United States Patent Application Publication US 2014/0004565 A1 - sequence listing, part 99

SEQ ID NO: 2460093 - RNA, 19 nt, Artificial Sequence
  Description of Artificial Sequence: Synthetic oligonucleotide
ucggcguggcuuccucuuc

SEQ ID NO: 2460094 - RNA, 19 nt, Artificial Sequence
  Description of Artificial Sequence: Synthetic oligonucleotide
gugcaaaagucacauuguu

SEQ ID NO: 2460095 - RNA, 19 nt, Artificial Sequence
  Description of Artificial Sequence: Synthetic oligonucleotide
ugacgucuuuaggugcaaa

SEQ ID NO: 2460096 - RNA, 19 nt, Artificial Sequence
  Description of Artificial Sequence: Synthetic oligonucleotide
gcaacgcacagccauagau

SEQ ID NO: 2460097 - RNA, 19 nt, Artificial Sequence
  Description of Artificial Sequence: Synthetic oligonucleotide
cucgaggccaacuccuugu

SEQ ID NO: 2460098 - RNA, 19 nt, Artificial Sequence
  Description of Artificial Sequence: Synthetic oligonucleotide
ccuccaggcggcaacgcac

SEQ ID NO: 2460099 - RNA, 19 nt, Artificial Sequence
  Description of Artificial Sequence: Synthetic oligonucleotide
ggugcaaaagucacauugu

SEQ ID NO: 2460100 - RNA, 19 nt, Artificial Sequence
  Description of Artificial Sequence: Synthetic oligonucleotide
cuccaggcggcaacgcaca

SEQ ID NO: 2460101 - RNA, 19 nt, Artificial Sequence
  Description of Artificial Sequence: Synthetic oligonucleotide
cauccguuccagagcaucu

SEQ ID NO: 2460102 - RNA, 19 nt, Artificial Sequence
  Description of Artificial Sequence: Synthetic oligonucleotide
gugccacucaaaugugucu

SEQ ID NO: 2460103 - RNA, 19 nt, Artificial Sequence
  Description of Artificial Sequence: Synthetic oligonucleotide
accugaucggaguccucuu

SEQ ID NO: 2460104 - RNA, 19 nt, Artificial Sequence
  Description of Artificial Sequence: Synthetic oligonucleotide
aucccgcuuuacucugggu

SEQ ID NO: 2460105 - RNA, 19 nt, Artificial Sequence
  Description of Artificial Sequence: Synthetic oligonucleotide
ccucuacaccgaaagccug

SEQ ID NO: 2460106 - RNA, 19 nt, Artificial Sequence
  Description of Artificial Sequence: Synthetic oligonucleotide
acgccacguagagcugggc

SEQ ID NO: 2460107 - RNA, 19 nt, Artificial Sequence
  Description of Artificial Sequence: Synthetic oligonucleotide
accgaaagccuggccagaa

SEQ ID NO: 2460108 - RNA, 19 nt, Artificial Sequence
  Description of Artificial Sequence: Synthetic oligonucleotide
ccuuccgaacagugcuugg

SEQ ID NO: 2460109 - RNA, 19 nt, Artificial Sequence
  Description of Artificial Sequence: Synthetic oligonucleotide
ucugucggcguggcuuccu

SEQ ID NO: 2460110 - RNA, 19 nt, Artificial Sequence
  Description of Artificial Sequence: Synthetic oligonucleotide
ugggccgcccgagcaaacu

SEQ ID NO: 2460111 - RNA, 19 nt, Artificial Sequence
  Description of Artificial Sequence: Synthetic oligonucleotide
cucuuacacagaaguuugu

SEQ ID NO: 2460112 - RNA, 19 nt, Artificial Sequence
  Description of Artificial Sequence: Synthetic oligonucleotide
cuggccagaaauucccaau

SEQ ID NO: 2460113 - RNA, 19 nt, Artificial Sequence
  Description of Artificial Sequence: Synthetic oligonucleotide
augugucucgggugagcuu

SEQ ID NO: 2460114 - RNA, 19 nt, Artificial Sequence
  Description of Artificial Sequence: Synthetic oligonucleotide
gccgacuacuguugacccc

SEQ ID NO: 2460115 - RNA, 19 nt, Artificial Sequence
  Description of Artificial Sequence: Synthetic oligonucleotide
ccgggauccgguuucuguc

SEQ ID NO: 2460116 - RNA, 19 nt, Artificial Sequence
  Description of Artificial Sequence: Synthetic oligonucleotide
cgggauccgguuucugucg

SEQ ID NO: 2460117 - RNA, 19 nt, Artificial Sequence
  Description of Artificial Sequence: Synthetic oligonucleotide
cugugggcggaggggcugg

SEQ ID NO: 2460118 - RNA, 19 nt, Artificial Sequence
  Description of Artificial Sequence: Synthetic oligonucleotide
aggccaacuccuuguccuu

SEQ ID NO: 2460119 - RNA, 19 nt, Artificial Sequence
  Description of Artificial Sequence: Synthetic oligonucleotide
ggugagcuucccaaacauc

SEQ ID NO: 2460120 - RNA, 19 nt, Artificial Sequence
  Description of Artificial Sequence: Synthetic oligonucleotide
ggauccgguuucugucggc

SEQ ID NO: 2460121 - RNA, 19 nt, Artificial Sequence
  Description of Artificial Sequence: Synthetic oligonucleotide
cacugacgucguucucuug

SEQ ID NO: 2460122 - RNA, 19 nt, Artificial Sequence
  Description of Artificial Sequence: Synthetic oligonucleotide
guagagcugggccgcccga

SEQ ID NO: 2460123 - RNA, 19 nt, Artificial Sequence
  Description of Artificial Sequence: Synthetic oligonucleotide
cccgagcaaacuccucccg

SEQ ID NO: 2460124 - RNA, 19 nt, Artificial Sequence
  Description of Artificial Sequence: Synthetic oligonucleotide
cucgggugagcuucccaaa

SEQ ID NO: 2460125 - RNA, 19 nt, Artificial Sequence
  Description of Artificial Sequence: Synthetic oligonucleotide
gcauccguuccagagcauc

SEQ ID NO: 2460126 - RNA, 19 nt, Artificial Sequence
  Description of Artificial Sequence: Synthetic oligonucleotide
aggguggagugggacgcca

SEQ ID NO: 2460127 - RNA, 19 nt, Artificial Sequence
  Description of Artificial Sequence: Synthetic oligonucleotide
cagauguucgccuggccuu

SEQ ID NO: 2460128 - RNA, 19 nt, Artificial Sequence
  Description of Artificial Sequence: Synthetic oligonucleotide
ccugaucggaguccucuuc

SEQ ID NO: 2460129 - RNA, 19 nt, Artificial Sequence
  Description of Artificial Sequence: Synthetic oligonucleotide
cgagcaaacuccucccguc

SEQ ID NO: 2460130 - RNA, 19 nt, Artificial Sequence
  Description of Artificial Sequence: Synthetic oligonucleotide
gccuuccgaacagugcuug

SEQ ID NO: 2460131 - RNA, 19 nt, Artificial Sequence
  Description of Artificial Sequence: Synthetic oligonucleotide
cugucggcguggcuuccuc

SEQ ID NO: 2460132 - RNA, 19 nt, Artificial Sequence
  Description of Artificial Sequence: Synthetic oligonucleotide
cucagacccuucagaaccu

SEQ ID NO: 2460133 - RNA, 19 nt, Artificial Sequence
  Description of Artificial Sequence: Synthetic oligonucleotide
cugacgucguucucuuggu

SEQ ID NO: 2460134 - RNA, 19 nt, Artificial Sequence
  Description of Artificial Sequence: Synthetic oligonucleotide
gugggacgccacguagagc

SEQ ID NO: 2460135 - RNA, 19 nt, Artificial Sequence
  Description of Artificial Sequence: Synthetic oligonucleotide
augacgucuuuaggugcaa

SEQ ID NO: 2460136 - RNA, 19 nt, Artificial Sequence
  Description of Artificial Sequence: Synthetic oligonucleotide
ggcggcaacgcacagccau

SEQ ID NO: 2460137 - RNA, 19 nt, Artificial Sequence
  Description of Artificial Sequence: Synthetic oligonucleotide
cgccacguagagcugggcc

SEQ ID NO: 2460138 - RNA, 19 nt, Artificial Sequence
  Description of Artificial Sequence: Synthetic oligonucleotide
ggacaggguggagugggac

SEQ ID NO: 2460139 - RNA, 19 nt, Artificial Sequence
  Description of Artificial Sequence: Synthetic oligonucleotide
ccuuuacucaguccaacgu

SEQ ID NO: 2460140 - RNA, 19 nt, Artificial Sequence
  Description of Artificial Sequence: Synthetic oligonucleotide
cgggcaugacgucuuuagg

SEQ ID NO: 2460141 - RNA, 19 nt, Artificial Sequence
  Description of Artificial Sequence: Synthetic oligonucleotide
cgaacagugcuuggcgggg

SEQ ID NO: 2460142 - RNA, 19 nt, Artificial Sequence
  Description of Artificial Sequence: Synthetic oligonucleotide
acucuucauaucgccucua

SEQ ID NO: 2460143 - RNA, 19 nt, Artificial Sequence
  Description of Artificial Sequence: Synthetic oligonucleotide
gugucucgggugagcuucc

SEQ ID NO: 2460144 - RNA, 19 nt, Artificial Sequence
  Description of Artificial Sequence: Synthetic oligonucleotide
cguagagcugggccgcccg

SEQ ID NO: 2460145 - RNA, 19 nt, Artificial Sequence
  Description of Artificial Sequence: Synthetic oligonucleotide
ccacguagagcugggccgc

SEQ ID NO: 2460146 - RNA, 19 nt, Artificial Sequence
  Description of Artificial Sequence: Synthetic oligonucleotide
cacguagagcugggccgcc

SEQ ID NO: 2460147 - RNA, 19 nt, Artificial Sequence
  Description of Artificial Sequence: Synthetic oligonucleotide
gggugagcuucccaaacau

SEQ ID NO: 2460148 - RNA, 19 nt, Artificial Sequence
  Description of Artificial Sequence: Synthetic oligonucleotide
ggccgcccgagcaaacucc

SEQ ID NO: 2460149 - RNA, 19 nt, Artificial Sequence
  Description of Artificial Sequence: Synthetic oligonucleotide
ccgguuucugucggcgugg

SEQ ID NO: 2460150 - RNA, 19 nt, Artificial Sequence
  Description of Artificial Sequence: Synthetic oligonucleotide
caggguggagugggacgcc

SEQ ID NO: 2460151 - RNA, 19 nt, Artificial Sequence
  Description of Artificial Sequence: Synthetic oligonucleotide
ccgcuuuacucuggguagg

SEQ ID NO: 2460152 - RNA, 19 nt, Artificial Sequence
  Description of Artificial Sequence: Synthetic oligonucleotide
cuucaagaagauggcuggu

SEQ ID NO: 2460153 - RNA, 19 nt, Artificial Sequence
  Description of Artificial Sequence: Synthetic oligonucleotide
cgucuuuaggugcaaaagu

SEQ ID NO: 2460154 - RNA, 19 nt, Artificial Sequence
  Description of Artificial Sequence: Synthetic oligonucleotide
ggaucgucagaaaguugaa

SEQ ID NO: 2460155 - RNA, 19 nt, Artificial Sequence
  Description of Artificial Sequence: Synthetic oligonucleotide
cugggccgcccgagcaaac

SEQ ID NO: 2460156 - RNA, 19 nt, Artificial Sequence
  Description of Artificial Sequence: Synthetic oligonucleotide
acaccgggauccgguuucu

SEQ ID NO: 2460157 - RNA, 19 nt, Artificial Sequence
  Description of Artificial Sequence: Synthetic oligonucleotide
gaacagugcuuggcggggu

SEQ ID NO: 2460158 - RNA, 19 nt, Artificial Sequence
  Description of Artificial Sequence: Synthetic oligonucleotide
gccucuacaccgaaagccu

SEQ ID NO: 2460159 - RNA, 19 nt, Artificial Sequence
  Description of Artificial Sequence: Synthetic oligonucleotide
cccacucggucaugccggg

SEQ ID NO: 2460160 - RNA, 19 nt, Artificial Sequence
  Description of Artificial Sequence: Synthetic oligonucleotide
gggguccaggcauccguuc

SEQ ID NO: 2460161 - RNA, 19 nt, Artificial Sequence
  Description of Artificial Sequence: Synthetic oligonucleotide
guggagugggacgccacgu

SEQ ID NO: 2460162 - RNA, 19 nt, Artificial Sequence
  Description of Artificial Sequence: Synthetic oligonucleotide
ggguaggccgacuacuguu

SEQ ID NO: 2460163 - RNA, 19 nt, Artificial Sequence
  Description of Artificial Sequence: Synthetic oligonucleotide
ggcaacgcacagccauaga

SEQ ID NO: 2460164 - RNA, 19 nt, Artificial Sequence
  Description of Artificial Sequence: Synthetic oligonucleotide
ggccagaaauucccaauuu

SEQ ID NO: 2460165 - RNA, 19 nt, Artificial Sequence
  Description of Artificial Sequence: Synthetic oligonucleotide
gggccgcccgagcaaacuc

SEQ ID NO: 2460166 - RNA, 19 nt, Artificial Sequence
  Description of Artificial Sequence: Synthetic oligonucleotide
ggauaagggucagggacau

SEQ ID NO: 2460167 - RNA, 19 nt, Artificial Sequence
  Description of Artificial Sequence: Synthetic oligonucleotide
gucggcguggcuuccucuu

SEQ ID NO: 2460168 - RNA, 19 nt, Artificial Sequence
  Description of Artificial Sequence: Synthetic oligonucleotide
ccaggccguguacauuauc

SEQ ID NO: 2460169 - RNA, 19 nt, Artificial Sequence
  Description of Artificial Sequence: Synthetic oligonucleotide
cgacuacuguugaccccgg

SEQ ID NO: 2460170 - RNA, 19 nt, Artificial Sequence
  Description of Artificial Sequence: Synthetic oligonucleotide
cccggauaagggucaggga

SEQ ID NO: 2460171 - RNA, 19 nt, Artificial Sequence
  Description of Artificial Sequence: Synthetic oligonucleotide
cgucguucucuuggucucg

SEQ ID NO: 2460172 - RNA, 19 nt, Artificial Sequence
  Description of Artificial Sequence: Synthetic oligonucleotide
caccgggauccgguuucug

SEQ ID NO: 2460173 - RNA, 19 nt, Artificial Sequence
  Description of Artificial Sequence: Synthetic oligonucleotide
cgucagaaaguugaagacu

SEQ ID NO: 2460174 - RNA, 19 nt, Artificial Sequence
  Description of Artificial Sequence: Synthetic oligonucleotide
ccaacgucuucaagaagau

SEQ ID NO: 2460175 - RNA, 19 nt, Artificial Sequence
  Description of Artificial Sequence: Synthetic oligonucleotide
acgcacagccauagaucuu

SEQ ID NO: 2460176 - RNA, 19 nt, Artificial Sequence
  Description of Artificial Sequence: Synthetic oligonucleotide
cggcuucgcucccacucgg

SEQ ID NO: 2460177 - RNA, 19 nt, Artificial Sequence
  Description of Artificial Sequence: Synthetic oligonucleotide
cggcaacgcacagccauag

SEQ ID NO: 2460178 - RNA, 19 nt, Artificial Sequence
  Description of Artificial Sequence: Synthetic oligonucleotide
ucgcucccacucggucaug

SEQ ID NO: 2460179 - RNA, 19 nt, Artificial Sequence
  Description of Artificial Sequence: Synthetic oligonucleotide
ggcggaggggcuggcucug

SEQ ID NO: 2460180 - RNA, 19 nt, Artificial Sequence
  Description of Artificial Sequence: Synthetic oligonucleotide
gggugccacucaaaugugu

SEQ ID NO: 2460181 - RNA, 19 nt, Artificial Sequence
  Description of Artificial Sequence: Synthetic oligonucleotide
gggacgccacguagagcug

SEQ ID NO: 2460182 - RNA, 19 nt, Artificial Sequence
  Description of Artificial Sequence: Synthetic oligonucleotide
gauaagggucagggacauu

SEQ ID NO: 2460183 - RNA, 19 nt, Artificial Sequence
  Description of Artificial Sequence: Synthetic oligonucleotide
cacucgaggccaacuccuu

SEQ ID NO: 2460184 - RNA, 19 nt, Artificial Sequence
  Description of Artificial Sequence: Synthetic oligonucleotide
ccacucggucaugccgggg

SEQ ID NO: 2460185 - RNA, 19 nt, Artificial Sequence
  Description of Artificial Sequence: Synthetic oligonucleotide
cacgggcaugacgucuuua

SEQ ID NO: 2460186 - RNA, 19 nt, Artificial Sequence
  Description of Artificial Sequence: Synthetic oligonucleotide
ccucccgucucggcuucgc

SEQ ID NO: 2460187 - RNA, 19 nt, Artificial Sequence
  Description of Artificial Sequence: Synthetic oligonucleotide
ccgagcaaacuccucccgu

SEQ ID NO: 2460188 - RNA, 19 nt, Artificial Sequence
  Description of Artificial Sequence: Synthetic oligonucleotide
ccgucucggcuucgcuccc

SEQ ID NO: 2460189 - RNA, 19 nt, Artificial Sequence
  Description of Artificial Sequence: Synthetic oligonucleotide
gcugggccgcccgagcaaa

SEQ ID NO: 2460190 - RNA, 19 nt, Artificial Sequence
  Description of Artificial Sequence: Synthetic oligonucleotide
cucccgucucggcuucgcu

SEQ ID NO: 2460191 - RNA, 19 nt, Artificial Sequence
  Description of Artificial Sequence: Synthetic oligonucleotide
ccgaaagccuggccagaaa

SEQ ID NO: 2460192 - RNA, 19 nt, Artificial Sequence
  Description of Artificial Sequence: Synthetic oligonucleotide
gcguggcuuccucuucacu

SEQ ID NO: 2460193 - RNA, 19 nt, Artificial Sequence
  Description of Artificial Sequence: Synthetic oligonucleotide
gcggcaacgcacagccaua

SEQ ID NO: 2460194 - RNA, 19 nt, Artificial Sequence
  Description of Artificial Sequence: Synthetic oligonucleotide
ccgggguccaggcauccgu

SEQ ID NO: 2460195 - RNA, 19 nt, Artificial Sequence
  Description of Artificial Sequence: Synthetic oligonucleotide
cgaggaacuucaaccugau

SEQ ID NO: 2460196 - RNA, 19 nt, Artificial Sequence
  Description of Artificial Sequence: Synthetic oligonucleotide
cagggacauuaaaccucuu

SEQ ID NO: 2460197 - RNA, 19 nt, Artificial Sequence
  Description of Artificial Sequence: Synthetic oligonucleotide
gccgcccgagcaaacuccu

SEQ ID NO: 2460198 - RNA, 19 nt, Artificial Sequence
  Description of Artificial Sequence: Synthetic oligonucleotide
ggcuucgcucccacucggu

SEQ ID NO: 2460199 - RNA, 19 nt, Artificial Sequence
  Description of Artificial Sequence: Synthetic oligonucleotide
ccuuggcgugagugaaccu

SEQ ID NO: 2460200 - RNA, 19 nt, Artificial Sequence
  Description of Artificial Sequence: Synthetic oligonucleotide
cccucaggggcgccaccaa

SEQ ID NO: 2460201 - RNA, 19 nt, Artificial Sequence
  Description of Artificial Sequence: Synthetic oligonucleotide
ggcauccguuccagagcau

SEQ ID NO: 2460202 - RNA, 19 nt, Artificial Sequence
  Description of Artificial Sequence: Synthetic oligonucleotide
gccaggccguguacauuau

SEQ ID NO: 2460203 - RNA, 19 nt, Artificial Sequence
  Description of Artificial Sequence: Synthetic oligonucleotide
cgucucggcuucgcuccca

SEQ ID NO: 2460204 - RNA, 19 nt, Artificial Sequence
  Description of Artificial Sequence: Synthetic oligonucleotide
ccacgggcaugacgucuuu

SEQ ID NO: 2460205 - RNA, 19 nt, Artificial Sequence
  Description of Artificial Sequence: Synthetic oligonucleotide
gggcuggcucugggaucgu

SEQ ID NO: 2460206 - RNA, 19 nt, Artificial Sequence
  Description of Artificial Sequence: Synthetic oligonucleotide
uauagaauagacuauaugg

SEQ ID NO: 2460207 - RNA, 19 nt, Artificial Sequence
  Description of Artificial Sequence: Synthetic oligonucleotide
uguaauaaugguaagauac

SEQ ID NO: 2460208 - RNA, 19 nt, Artificial Sequence
  Description of Artificial Sequence: Synthetic oligonucleotide
aaugguaagauacuggcuc

SEQ ID NO: 2460209 - RNA, 19 nt, Artificial Sequence
  Description of Artificial Sequence: Synthetic oligonucleotide
aguaaugacagaaauaacc

SEQ ID NO: 2460210 - RNA, 19 nt, Artificial Sequence
  Description of Artificial Sequence: Synthetic oligonucleotide
auaaugguaagauacuggc

SEQ ID NO: 2460211 - RNA, 19 nt, Artificial Sequence
  Description of Artificial Sequence: Synthetic oligonucleotide
uaugaauauuuccugaagg

SEQ ID NO: 2460212 - RNA, 19 nt, Artificial Sequence
  Description of Artificial Sequence: Synthetic oligonucleotide
agaacauaugaauauuucc

SEQ ID NO: 2460213 - RNA, 19 nt, Artificial Sequence
  Description of Artificial Sequence: Synthetic oligonucleotide
ugauuuauagaauagacua

SEQ ID NO: 2460214 - RNA, 19 nt, Artificial Sequence
  Description of Artificial Sequence: Synthetic oligonucleotide
uauguaaucaauguaaucu

SEQ ID NO: 2460215 - RNA, 19 nt, Artificial Sequence
  Description of Artificial Sequence: Synthetic oligonucleotide
aaucaccagaacuggaagc

SEQ ID NO: 2460216 - RNA, 19 nt, Artificial Sequence
  Description of Artificial Sequence: Synthetic oligonucleotide
aaucaauguaaucuuucuc

SEQ ID NO: 2460217 - RNA, 19 nt, Artificial Sequence
  Description of Artificial Sequence: Synthetic oligonucleotide
aguucuucuggagagaugc

SEQ ID NO: 2460218 - RNA, 19 nt, Artificial Sequence
  Description of Artificial Sequence: Synthetic oligonucleotide
aaaugcggaauauggaguc

SEQ ID NO: 2460219 - RNA, 19 nt, Artificial Sequence
  Description of Artificial Sequence: Synthetic oligonucleotide
aacauaugaauauuuccug

SEQ ID NO: 2460220 - RNA, 19 nt, Artificial Sequence
  Description of Artificial Sequence: Synthetic oligonucleotide
agaaauaaccacaaucacc

SEQ ID NO: 2460221 - RNA, 19 nt, Artificial Sequence
  Description of Artificial Sequence: Synthetic oligonucleotide
ucugugauaauagugacug

SEQ ID NO: 2460222 - RNA, 19 nt, Artificial Sequence
  Description of Artificial Sequence: Synthetic oligonucleotide
ugaguaaugacagaaauaa

SEQ ID NO: 2460223 - RNA, 19 nt, Artificial Sequence
  Description of Artificial Sequence: Synthetic oligonucleotide
gaaauaaccacaaucacca

SEQ ID NO: 2460224 - RNA, 19 nt, Artificial Sequence
  Description of Artificial Sequence: Synthetic oligonucleotide
uuguauguaaucaauguaa

SEQ ID NO: 2460225 - RNA, 19 nt, Artificial Sequence
  Description of Artificial Sequence: Synthetic oligonucleotide
aauaaugguaagauacugg

SEQ ID NO: 2460226 - RNA, 19 nt, Artificial Sequence
  Description of Artificial Sequence: Synthetic oligonucleotide
uuaacagacaguugggugc

SEQ ID NO: 2460227 - RNA, 19 nt, Artificial Sequence
  Description of Artificial Sequence: Synthetic oligonucleotide
ggaguuaacagacaguugg

SEQ ID NO: 2460228 - RNA, 19 nt, Artificial Sequence
  Description of Artificial Sequence: Synthetic oligonucleotide
acacacacaacacacagag

SEQ ID NO: 2460229 - RNA, 19 nt, Artificial Sequence
  Description of Artificial Sequence: Synthetic oligonucleotide
auaauagugacugucaucu

SEQ ID NO: 2460230 - RNA, 19 nt, Artificial Sequence
  Description of Artificial Sequence: Synthetic oligonucleotide
acaaaugcggaauauggag

SEQ ID NO: 2460231 - RNA, 19 nt, Artificial Sequence
  Description of Artificial Sequence: Synthetic oligonucleotide
uauaaccccgccaaauugg

SEQ ID NO: 2460232 - RNA, 19 nt, Artificial Sequence
  Description of Artificial Sequence: Synthetic oligonucleotide
cauugaauaguucuucugg

SEQ ID NO: 2460233 - RNA, 19 nt, Artificial Sequence
  Description of Artificial Sequence: Synthetic oligonucleotide
uuauccacaaaguaaggca

SEQ ID NO: 2460234 - RNA, 19 nt, Artificial Sequence
  Description of Artificial Sequence: Synthetic oligonucleotide
aauagugacugucaucugu

SEQ ID NO: 2460235 - RNA, 19 nt, Artificial Sequence
  Description of Artificial Sequence: Synthetic oligonucleotide
aauaaccacaaucaccaga

SEQ ID NO: 2460236 - RNA, 19 nt, Artificial Sequence
  Description of Artificial Sequence: Synthetic oligonucleotide
gaauaguucuucuggagag

SEQ ID NO: 2460237 - RNA, 19 nt, Artificial Sequence
  Description of Artificial Sequence: Synthetic oligonucleotide
aacuggaguuaacagacag

SEQ ID NO: 2460238 - RNA, 19 nt, Artificial Sequence
  Description of Artificial Sequence: Synthetic oligonucleotide
agugacucugcuuucugcc

SEQ ID NO: 2460239 - RNA, 19 nt, Artificial Sequence
  Description of Artificial Sequence: Synthetic oligonucleotide
auagaauagacuauauggg

SEQ ID NO: 2460240 - RNA, 19 nt, Artificial Sequence
  Description of Artificial Sequence: Synthetic oligonucleotide
uugauuuauagaauagacu

SEQ ID NO: 2460241 - RNA, 19 nt, Artificial Sequence
  Description of Artificial Sequence: Synthetic oligonucleotide
aaugguguagcccaggguu

SEQ ID NO: 2460242 - RNA, 19 nt, Artificial Sequence
  Description of Artificial Sequence: Synthetic oligonucleotide
uguuuguauguaaucaaug

SEQ ID NO: 2460243 - RNA, 19 nt, Artificial Sequence
  Description of Artificial Sequence: Synthetic oligonucleotide
ucaucucuauauaaccccg

SEQ ID NO: 2460244 - RNA, 19 nt, Artificial Sequence
  Description of Artificial Sequence: Synthetic oligonucleotide
ucuauuguuuucucgaggu

SEQ ID NO: 2460245 - RNA, 19 nt, Artificial Sequence
  Description of Artificial Sequence: Synthetic oligonucleotide
aauuggucagcucugacuu

SEQ ID NO: 2460246 - RNA, 19 nt, Artificial Sequence
  Description of Artificial Sequence: Synthetic oligonucleotide
aaaauguccuccaaagaag

SEQ ID NO: 2460247 - RNA, 19 nt, Artificial Sequence
  Description of Artificial Sequence: Synthetic oligonucleotide
aaccacaaucaccagaacu

SEQ ID NO: 2460248 - RNA, 19 nt, Artificial Sequence
  Description of Artificial Sequence: Synthetic oligonucleotide
aaaaucccuguaauaaugg

SEQ ID NO: 2460249 - RNA, 19 nt, Artificial Sequence
  Description of Artificial Sequence: Synthetic oligonucleotide
aaauuggucagcucugacu

SEQ ID NO: 2460250 - RNA, 19 nt, Artificial Sequence
  Description of Artificial Sequence: Synthetic oligonucleotide
aauguaaucuuucucuauu

SEQ ID NO: 2460251 - RNA, 19 nt, Artificial Sequence
  Description of Artificial Sequence: Synthetic oligonucleotide
aggucaucugcucaucucc

SEQ ID NO: 2460252 - RNA, 19 nt, Artificial Sequence
  Description of Artificial Sequence: Synthetic oligonucleotide
uucaaaaucccuguaauaa

SEQ ID NO: 2460253 - RNA, 19 nt, Artificial Sequence
  Description of Artificial Sequence: Synthetic oligonucleotide
acagaaauaaccacaauca

SEQ ID NO: 2460254 - RNA, 19 nt, Artificial Sequence
  Description of Artificial Sequence: Synthetic oligonucleotide
aagagaagcuccucuguag

SEQ ID NO: 2460255 - RNA, 19 nt, Artificial Sequence
  Description of Artificial Sequence: Synthetic oligonucleotide
aucucuauauaaccccgcc

SEQ ID NO: 2460256 - RNA, 19 nt, Artificial Sequence
  Description of Artificial Sequence: Synthetic oligonucleotide
uucucuauuguuuucucga

SEQ ID NO: 2460257 - RNA, 19 nt, Artificial Sequence
  Description of Artificial Sequence: Synthetic oligonucleotide
uaaucuuucucuauuguuu

SEQ ID NO: 2460258 - RNA, 19 nt, Artificial Sequence
  Description of Artificial Sequence: Synthetic oligonucleotide
uuuauccacaaaguaaggc

SEQ ID NO: 2460259 - RNA, 19 nt, Artificial Sequence
  Description of Artificial Sequence: Synthetic oligonucleotide
uuucucuauuguuuucucg

SEQ ID NO: 2460260 - RNA, 19 nt, Artificial Sequence
  Description of Artificial Sequence: Synthetic oligonucleotide
uccauacucaucauagcgc

SEQ ID NO: 2460261 - RNA, 19 nt, Artificial Sequence
  Description of Artificial Sequence: Synthetic oligonucleotide
uuuguauguaaucaaugua

SEQ ID NO: 2460262 - RNA, 19 nt, Artificial Sequence
  Description of Artificial Sequence: Synthetic oligonucleotide
auaugaauauuuccugaag

SEQ ID NO: 2460263 - RNA, 19 nt, Artificial Sequence
  Description of Artificial Sequence: Synthetic oligonucleotide
caaagaagacauugaauag

SEQ ID NO: 2460264 - RNA, 19 nt, Artificial Sequence
  Description of Artificial Sequence: Synthetic oligonucleotide
augaauauuuccugaagga

SEQ ID NO: 2460265 - RNA, 19 nt, Artificial Sequence
  Description of Artificial Sequence: Synthetic oligonucleotide
uauuguuuucucgagguca

SEQ ID NO: 2460266 - RNA, 19 nt, Artificial Sequence
  Description of Artificial Sequence: Synthetic oligonucleotide
cucaucucuauauaacccc

SEQ ID NO: 2460267 - RNA, 19 nt, Artificial Sequence
  Description of Artificial Sequence: Synthetic oligonucleotide
caaaaucccuguaauaaug

SEQ ID NO: 2460268 - RNA, 19 nt, Artificial Sequence
  Description of Artificial Sequence: Synthetic oligonucleotide
gaagacauugaauaguucu

SEQ ID NO: 2460269 - RNA, 19 nt, Artificial Sequence
  Description of Artificial Sequence: Synthetic oligonucleotide
uaauaaugguaagauacug

SEQ ID NO: 2460270 - RNA, 19 nt, Artificial Sequence
  Description of Artificial Sequence: Synthetic oligonucleotide
guugauuuauagaauagac

SEQ ID NO: 2460271 - RNA, 19 nt, Artificial Sequence
  Description of Artificial Sequence: Synthetic oligonucleotide
uugaauaguucuucuggag

SEQ ID NO: 2460272 - RNA, 19 nt, Artificial Sequence
  Description of Artificial Sequence: Synthetic oligonucleotide
uuuucucgaggucacgaag

SEQ ID NO: 2460273 - RNA, 19 nt, Artificial Sequence
  Description of Artificial Sequence: Synthetic oligonucleotide
aaccccgccaaauugguca

SEQ ID NO: 2460274 - RNA, 19 nt, Artificial Sequence
  Description of Artificial Sequence: Synthetic oligonucleotide
uucuccuuccaacagcuug

SEQ ID NO: 2460275 - RNA, 19 nt, Artificial Sequence
  Description of Artificial Sequence: Synthetic oligonucleotide
gagagaugcuucaaaaucc

SEQ ID NO: 2460276 - RNA, 19 nt, Artificial Sequence
  Description of Artificial Sequence: Synthetic oligonucleotide
uagucagugcucuucuugg

SEQ ID NO: 2460277 - RNA, 19 nt, Artificial Sequence
  Description of Artificial Sequence: Synthetic oligonucleotide
uccugaaggaaaauguccu

SEQ ID NO: 2460278 - RNA, 19 nt, Artificial Sequence
  Description of Artificial Sequence: Synthetic oligonucleotide
cuagaaaugguguagccca

SEQ ID NO: 2460279 - RNA, 19 nt, Artificial Sequence
  Description of Artificial Sequence: Synthetic oligonucleotide
uguauguaaucaauguaau

SEQ ID NO: 2460280 - RNA, 19 nt, Artificial Sequence
  Description of Artificial Sequence: Synthetic oligonucleotide
uuuauagaauagacuauau

SEQ ID NO: 2460281 - RNA, 19 nt, Artificial Sequence
  Description of Artificial Sequence: Synthetic oligonucleotide
acacacacacaacacacag

SEQ ID NO: 2460282 - RNA, 19 nt, Artificial Sequence
  Description of Artificial Sequence: Synthetic oligonucleotide
agagaagcuccucuguagg

SEQ ID NO: 2460283 - RNA, 19 nt, Artificial Sequence
  Description of Artificial Sequence: Synthetic oligonucleotide
ugugauaauagugacuguc

SEQ ID NO: 2460284 - RNA, 19 nt, Artificial Sequence
  Description of Artificial Sequence: Synthetic oligonucleotide
ugcguuucucuagaaaugg

SEQ ID NO: 2460285 - RNA, 19 nt, Artificial Sequence
  Description of Artificial Sequence: Synthetic oligonucleotide
guuaacagacaguugggug

SEQ ID NO: 2460286 - RNA, 19 nt, Artificial Sequence
  Description of Artificial Sequence: Synthetic oligonucleotide
auugaauaguucuucugga

SEQ ID NO: 2460287 - RNA, 19 nt, Artificial Sequence
  Description of Artificial Sequence: Synthetic oligonucleotide
auauaaccccgccaaauug

SEQ ID NO: 2460288 - RNA, 19 nt, Artificial Sequence
  Description of Artificial Sequence: Synthetic oligonucleotide
ucuagaaaugguguagccc

SEQ ID NO: 2460289 - RNA, 19 nt, Artificial Sequence
  Description of Artificial Sequence: Synthetic oligonucleotide
aauauuuccugaaggaaaa

SEQ ID NO: 2460290 - RNA, 19 nt, Artificial Sequence
  Description of Artificial Sequence: Synthetic oligonucleotide
acauaugaauauuuccuga

SEQ ID NO: 2460291 - RNA, 19 nt, Artificial Sequence
  Description of Artificial Sequence: Synthetic oligonucleotide
aaaucccuguaauaauggu

SEQ ID NO: 2460292 - RNA, 19 nt, Artificial Sequence
  Description of Artificial Sequence: Synthetic oligonucleotide
agugacugucaucugucac

SEQ ID NO: 2460293 - RNA, 19 nt, Artificial Sequence
  Description of Artificial Sequence: Synthetic oligonucleotide
ugagaacauaugaauauuu

SEQ ID NO: 2460294 - RNA, 19 nt, Artificial Sequence
  Description of Artificial Sequence: Synthetic oligonucleotide
agagaugcuucaaaauccc

SEQ ID NO: 2460295 - RNA, 19 nt, Artificial Sequence
  Description of Artificial Sequence: Synthetic oligonucleotide
uuucucgaggucacgaaga

SEQ ID NO: 2460296 - RNA, 19 nt, Artificial Sequence
  Description of Artificial Sequence: Synthetic oligonucleotide
augguaagauacuggcucg

SEQ ID NO: 2460297 - RNA, 19 nt, Artificial Sequence
  Description of Artificial Sequence: Synthetic oligonucleotide
uccuccaaagaagacauug

SEQ ID NO: 2460298 - RNA, 19 nt, Artificial Sequence
  Description of Artificial Sequence: Synthetic oligonucleotide
uccucuguaggccuuguca

SEQ ID NO: 2460299 - RNA, 19 nt, Artificial Sequence
  Description of Artificial Sequence: Synthetic oligonucleotide
uguccuccaaagaagacau

SEQ ID NO: 2460300 - RNA, 19 nt, Artificial Sequence
  Description of Artificial Sequence: Synthetic oligonucleotide
ugacuuuugcuguuucucc

SEQ ID NO: 2460301 - RNA, 19 nt, Artificial Sequence
  Description of Artificial Sequence: Synthetic oligonucleotide
aagauacuggcucggggug

SEQ ID NO: 2460302 - RNA, 19 nt, Artificial Sequence
  Description of Artificial Sequence: Synthetic oligonucleotide
gauaauagugacugucauc

SEQ ID NO: 2460303 - RNA, 19 nt, Artificial Sequence
  Description of Artificial Sequence: Synthetic oligonucleotide
agcaacuggacaaaugcgg

SEQ ID NO: 2460304 - RNA, 19 nt, Artificial Sequence
  Description of Artificial Sequence: Synthetic oligonucleotide
uuuccugaaggaaaauguc

SEQ ID NO: 2460305 - RNA, 19 nt, Artificial Sequence
  Description of Artificial Sequence: Synthetic oligonucleotide
acacacacacacaacacac

SEQ ID NO: 2460306 - RNA, 19 nt, Artificial Sequence
  Description of Artificial Sequence: Synthetic oligonucleotide
agaagcuccucuguaggcc

SEQ ID NO: 2460307 - RNA, 19 nt, Artificial Sequence
  Description of Artificial Sequence: Synthetic oligonucleotide
ugaaggaaaauguccucca

SEQ ID NO: 2460308 - RNA, 19 nt, Artificial Sequence
  Description of Artificial Sequence: Synthetic oligonucleotide
auguaaucuuucucuauug

SEQ ID NO: 2460309 - RNA, 19 nt, Artificial Sequence
  Description of Artificial Sequence: Synthetic oligonucleotide
ugauaauagugacugucau

SEQ ID NO: 2460310 - RNA, 19 nt, Artificial Sequence
  Description of Artificial Sequence: Synthetic oligonucleotide
guugggugcugccaggugg

SEQ ID NO: 2460311 - RNA, 19 nt, Artificial Sequence
  Description of Artificial Sequence: Synthetic oligonucleotide
aaauaaccacaaucaccag

SEQ ID NO: 2460312 - RNA, 19 nt, Artificial Sequence
  Description of Artificial Sequence: Synthetic oligonucleotide
ucucuauuguuuucucgag

SEQ ID NO: 2460313 - RNA, 19 nt, Artificial Sequence
  Description of Artificial Sequence: Synthetic oligonucleotide
agacauugaauaguucuuc

SEQ ID NO: 2460314 - RNA, 19 nt, Artificial Sequence
  Description of Artificial Sequence: Synthetic oligonucleotide
ugaauauuuccugaaggaa

SEQ ID NO: 2460315 - RNA, 19 nt, Artificial Sequence
  Description of Artificial Sequence: Synthetic oligonucleotide
cacacacacacacacacac

SEQ ID NO: 2460316 - RNA, 19 nt, Artificial Sequence
  Description of Artificial Sequence: Synthetic oligonucleotide
aaauguccuccaaagaaga

SEQ ID NO: 2460317 - RNA, 19 nt, Artificial Sequence
  Description of Artificial Sequence: Synthetic oligonucleotide
auuuccugaaggaaaaugu

SEQ ID NO: 2460318 - RNA, 19 nt, Artificial Sequence
  Description of Artificial Sequence: Synthetic oligonucleotide
uauauaaccccgccaaauu

SEQ ID NO: 2460319 - RNA, 19 nt, Artificial Sequence
  Description of Artificial Sequence: Synthetic oligonucleotide
uuguuuguauguaaucaau

SEQ ID NO: 2460320 - RNA, 19 nt, Artificial Sequence
  Description of Artificial Sequence: Synthetic oligonucleotide
uguaaucaauguaaucuuu

SEQ ID NO: 2460321 - RNA, 19 nt, Artificial Sequence
  Description of Artificial Sequence: Synthetic oligonucleotide
uaaugguaagauacuggcu

SEQ ID NO: 2460322 - RNA, 19 nt, Artificial Sequence
  Description of Artificial Sequence: Synthetic oligonucleotide
gggauuagcagccagcagc

SEQ ID NO: 2460323 - RNA, 19 nt, Artificial Sequence
  Description of Artificial Sequence: Synthetic oligonucleotide
ucaaaaucccuguaauaau

SEQ ID NO: 2460324 - RNA, 19 nt, Artificial Sequence
  Description of Artificial Sequence: Synthetic oligonucleotide
gaacauaugaauauuuccu

SEQ ID NO: 2460325 - RNA, 19 nt, Artificial Sequence
  Description of Artificial Sequence: Synthetic oligonucleotide
gaauauuuccugaaggaaa

SEQ ID NO: 2460326 - RNA, 19 nt, Artificial Sequence
  Description of Artificial Sequence: Synthetic oligonucleotide
ucucuauauaaccccgcca

SEQ ID NO: 2460327 - RNA, 19 nt, Artificial Sequence
  Description of Artificial Sequence: Synthetic oligonucleotide
auuuauagaauagacuaua

SEQ ID NO: 2460328 - RNA, 19 nt, Artificial Sequence
  Description of Artificial Sequence: Synthetic oligonucleotide
ggacaaaugcggaauaugg

SEQ ID NO: 2460329 - RNA, 19 nt, Artificial Sequence
  Description of Artificial Sequence: Synthetic oligonucleotide
cucaucauagcgcagucuc

SEQ ID NO: 2460330 - RNA, 19 nt, Artificial Sequence
  Description of Artificial Sequence: Synthetic oligonucleotide
uguccucucaugucggugc

SEQ ID NO: 2460331 - RNA, 19 nt, Artificial Sequence
  Description of Artificial Sequence: Synthetic oligonucleotide
aauguccuccaaagaagac

SEQ ID NO: 2460332 - RNA, 19 nt, Artificial Sequence
  Description of Artificial Sequence: Synthetic oligonucleotide
ugcuucaaaaucccuguaa

SEQ ID NO: 2460333 - RNA, 19 nt, Artificial Sequence
  Description of Artificial Sequence: Synthetic oligonucleotide
cucuauuguuuucucgagg

SEQ ID NO: 2460334 - RNA, 19 nt, Artificial Sequence
  Description of Artificial Sequence: Synthetic oligonucleotide
acacacagagcacccuacc

SEQ ID NO: 2460335 - RNA, 19 nt, Artificial Sequence
  Description of Artificial Sequence: Synthetic oligonucleotide
gacaguugggugcugccag

SEQ ID NO: 2460336 - RNA, 19 nt, Artificial Sequence
  Description of Artificial Sequence: Synthetic oligonucleotide
cugaaggaaaauguccucc

SEQ ID NO: 2460337 - RNA, 19 nt, Artificial Sequence
  Description of Artificial Sequence: Synthetic oligonucleotide
auaaccacaaucaccagaa

SEQ ID NO: 2460338 - RNA, 19 nt, Artificial Sequence
  Description of Artificial Sequence: Synthetic oligonucleotide
cucgaggucacgaagagaa

SEQ ID NO: 2460339 - RNA, 19 nt, Artificial Sequence
  Description of Artificial Sequence: Synthetic oligonucleotide
aagaagacauugaauaguu

SEQ ID NO: 2460340 - RNA, 19 nt, Artificial Sequence
  Description of Artificial Sequence: Synthetic oligonucleotide
auuguuuucucgaggucac

SEQ ID NO: 2460341 - RNA, 19 nt, Artificial Sequence
  Description of Artificial Sequence: Synthetic oligonucleotide
cagaaauaaccacaaucac

SEQ ID NO: 2460342 - RNA, 19 nt, Artificial Sequence
  Description of Artificial Sequence: Synthetic oligonucleotide
ucucuagaaaugguguagc

SEQ ID NO: 2460343 - RNA, 19 nt, Artificial Sequence
  Description of Artificial Sequence: Synthetic oligonucleotide
aaaugguguagcccagggu

SEQ ID NO: 2460344 - RNA, 19 nt, Artificial Sequence
  Description of Artificial Sequence: Synthetic oligonucleotide
uucucgaggucacgaagag

SEQ ID NO: 2460345 - RNA, 19 nt, Artificial Sequence
  Description of Artificial Sequence: Synthetic oligonucleotide
guuuguauguaaucaaugu

SEQ ID NO: 2460346 - RNA, 19 nt, Artificial Sequence
  Description of Artificial Sequence: Synthetic oligonucleotide
ggagagaugcuucaaaauc

SEQ ID NO: 2460347 - RNA, 19 nt, Artificial Sequence
  Description of Artificial Sequence: Synthetic oligonucleotide
guagucagugcucuucuug

SEQ ID NO: 2460348 - RNA, 19 nt, Artificial Sequence
  Description of Artificial Sequence: Synthetic oligonucleotide
gaguuaacagacaguuggg

SEQ ID NO: 2460349 - RNA, 19 nt, Artificial Sequence
  Description of Artificial Sequence: Synthetic oligonucleotide
aggguugauuuauagaaua

SEQ ID NO: 2460350 - RNA, 19 nt, Artificial Sequence
  Description of Artificial Sequence: Synthetic oligonucleotide
agugaaggucaucugcuca

SEQ ID NO: 2460351 - RNA, 19 nt, Artificial Sequence
  Description of Artificial Sequence: Synthetic oligonucleotide
gagaacauaugaauauuuc

SEQ ID NO: 2460352 - RNA, 19 nt, Artificial Sequence
  Description of Artificial Sequence: Synthetic oligonucleotide
uucacaguuuucaguuuca

SEQ ID NO: 2460353 - RNA, 19 nt, Artificial Sequence
  Description of Artificial Sequence: Synthetic oligonucleotide
ucugcucaucuccauacuc

SEQ ID NO: 2460354 - RNA, 19 nt, Artificial Sequence
  Description of Artificial Sequence: Synthetic oligonucleotide
ucuggagagaugcuucaaa

SEQ ID NO: 2460355 - RNA, 19 nt, Artificial Sequence
  Description of Artificial Sequence: Synthetic oligonucleotide
cucuagaaaugguguagcc

SEQ ID NO: 2460356 - RNA, 19 nt, Artificial Sequence
  Description of Artificial Sequence: Synthetic oligonucleotide
guauguaaucaauguaauc

SEQ ID NO: 2460357 - RNA, 19 nt, Artificial Sequence
  Description of Artificial Sequence: Synthetic oligonucleotide
ucgcucaucucuauauaac

SEQ ID NO: 2460358 - RNA, 19 nt, Artificial Sequence
  Description of Artificial Sequence: Synthetic oligonucleotide
gaugcuucaaaaucccugu

SEQ ID NO: 2460359 - RNA, 19 nt, Artificial Sequence
  Description of Artificial Sequence: Synthetic oligonucleotide
ggaacuggaguuaacagac

SEQ ID NO: 2460360 - RNA, 19 nt, Artificial Sequence
  Description of Artificial Sequence: Synthetic oligonucleotide
uguuuucucgaggucacga

SEQ ID NO: 2460361 - RNA, 19 nt, Artificial Sequence
  Description of Artificial Sequence: Synthetic oligonucleotide
guaaucaauguaaucuuuc

SEQ ID NO: 2460362 - RNA, 19 nt, Artificial Sequence
  Description of Artificial Sequence: Synthetic oligonucleotide
aauaguucuucuggagaga

SEQ ID NO: 2460363 - RNA, 19 nt, Artificial Sequence
  Description of Artificial Sequence: Synthetic oligonucleotide
cacacacacacacacaaca

SEQ ID NO: 2460364 - RNA, 19 nt, Artificial Sequence
  Description of Artificial Sequence: Synthetic oligonucleotide
uaaggcaccugcagguucu

SEQ ID NO: 2460365 - RNA, 19 nt, Artificial Sequence
  Description of Artificial Sequence: Synthetic oligonucleotide
ucauagcgcagucucuugu

SEQ ID NO: 2460366 - RNA, 19 nt, Artificial Sequence
  Description of Artificial Sequence: Synthetic oligonucleotide
ggaauauggagucugaggu

SEQ ID NO: 2460367 - RNA, 19 nt, Artificial Sequence
  Description of Artificial Sequence: Synthetic oligonucleotide
uggaguuaacagacaguug

SEQ ID NO: 2460368 - RNA, 19 nt, Artificial Sequence
  Description of Artificial Sequence: Synthetic oligonucleotide
ugcuuucugccguagucgc

SEQ ID NO: 2460369 - RNA, 19 nt, Artificial Sequence
  Description of Artificial Sequence: Synthetic oligonucleotide
ccaaagaagacauugaaua

SEQ ID NO: 2460370 - RNA, 19 nt, Artificial Sequence
  Description of Artificial Sequence: Synthetic oligonucleotide
ucuauauaaccccgccaaa

SEQ ID NO: 2460371 - RNA, 19 nt, Artificial Sequence
  Description of Artificial Sequence: Synthetic oligonucleotide
cucuauauaaccccgccaa

SEQ ID NO: 2460372 - RNA, 19 nt, Artificial Sequence
  Description of Artificial Sequence: Synthetic oligonucleotide
acgaagagaagcuccucug

SEQ ID NO: 2460373 - RNA, 19 nt, Artificial Sequence
  Description of Artificial Sequence: Synthetic oligonucleotide
uggacaaaugcggaauaug

SEQ ID NO: 2460374 - RNA, 19 nt, Artificial Sequence
  Description of Artificial Sequence: Synthetic oligonucleotide
cauaugaauauuuccugaa

SEQ ID NO: 2460375 - RNA, 19 nt, Artificial Sequence
  Description of Artificial Sequence: Synthetic oligonucleotide
uuuugcuguuucuccuucc

SEQ ID NO: 2460376 - RNA, 19 nt, Artificial Sequence
  Description of Artificial Sequence: Synthetic oligonucleotide
aggucagguccccuggaac

SEQ ID NO: 2460377 - RNA, 19 nt, Artificial Sequence
  Description of Artificial Sequence: Synthetic oligonucleotide
cacaacacacagagcaccc

SEQ ID NO: 2460378 - RNA, 19 nt, Artificial Sequence
  Description of Artificial Sequence: Synthetic oligonucleotide
auuugagaacauaugaaua

SEQ ID NO: 2460379 - RNA, 19 nt, Artificial Sequence
  Description of Artificial Sequence: Synthetic oligonucleotide
ucucuuuugugugucugug

SEQ ID NO: 2460380 - RNA, 19 nt, Artificial Sequence
  Description of Artificial Sequence: Synthetic oligonucleotide
aacuggacaaaugcggaau

SEQ ID NO: 2460381 - RNA, 19 nt, Artificial Sequence
  Description of Artificial Sequence: Synthetic oligonucleotide
cuuguuuguauguaaucaa

SEQ ID NO: 2460382 - RNA, 19 nt, Artificial Sequence
  Description of Artificial Sequence: Synthetic oligonucleotide
aaucccuguaauaauggua

SEQ ID NO: 2460383 - RNA, 19 nt, Artificial Sequence
  Description of Artificial Sequence: Synthetic oligonucleotide
aucccuguaauaaugguaa

SEQ ID NO: 2460384 - RNA, 19 nt, Artificial Sequence
  Description of Artificial Sequence: Synthetic oligonucleotide
aucaccagaacuggaagca

SEQ ID NO: 2460385 - RNA, 19 nt, Artificial Sequence
  Description of Artificial Sequence: Synthetic oligonucleotide
ucagugcucuucuuggaaa

SEQ ID NO: 2460386 - RNA, 19 nt, Artificial Sequence
  Description of Artificial Sequence: Synthetic oligonucleotide
uggagagaugcuucaaaau

SEQ ID NO: 2460387 - RNA, 19 nt, Artificial Sequence
  Description of Artificial Sequence: Synthetic oligonucleotide
uagucgcucaucucuauau

SEQ ID NO: 2460388 - RNA, 19 nt, Artificial Sequence
  Description of Artificial Sequence: Synthetic oligonucleotide
ucugacuuuugcuguuucu

SEQ ID NO: 2460389 - RNA, 19 nt, Artificial Sequence
  Description of Artificial Sequence: Synthetic oligonucleotide
aagacauugaauaguucuu

SEQ ID NO: 2460390 - RNA, 19 nt, Artificial Sequence
  Description of Artificial Sequence: Synthetic oligonucleotide
caucucuauauaaccccgc

SEQ ID NO: 2460391 - RNA, 19 nt, Artificial Sequence
  Description of Artificial Sequence: Synthetic oligonucleotide
agcgcagucucuugucagg

SEQ ID NO: 2460392 - RNA, 19 nt, Artificial Sequence
  Description of Artificial Sequence: Synthetic oligonucleotide
uguagcccaggguugauuu

SEQ ID NO: 2460393 - RNA, 19 nt, Artificial Sequence
  Description of Artificial Sequence: Synthetic oligonucleotide
uccaacagcuuguuuguau

SEQ ID NO: 2460394 - RNA, 19 nt, Artificial Sequence
  Description of Artificial Sequence: Synthetic oligonucleotide
acacacacacacacaacac

SEQ ID NO: 2460395 - RNA, 19 nt, Artificial Sequence
  Description of Artificial Sequence: Synthetic oligonucleotide
gugacucugcuuucugccg

SEQ ID NO: 2460396 - RNA, 19 nt, Artificial Sequence
  Description of Artificial Sequence: Synthetic oligonucleotide
gugacugucaucugucaca

SEQ ID NO: 2460397 - RNA, 19 nt, Artificial Sequence
  Description of Artificial Sequence: Synthetic oligonucleotide
acauuugagaacauaugaa

SEQ ID NO: 2460398 - RNA, 19 nt, Artificial Sequence
  Description of Artificial Sequence: Synthetic oligonucleotide
ucaucauagcgcagucucu

SEQ ID NO: 2460399 - RNA, 19 nt, Artificial Sequence
  Description of Artificial Sequence: Synthetic oligonucleotide
acagcuuguuuguauguaa

SEQ ID NO: 2460400 - RNA, 19 nt, Artificial Sequence
  Description of Artificial Sequence: Synthetic oligonucleotide
cauuugagaacauaugaau

SEQ ID NO: 2460401 - RNA, 19 nt, Artificial Sequence
  Description of Artificial Sequence: Synthetic oligonucleotide
ugguaagauacuggcucgg

SEQ ID NO: 2460402 - RNA, 19 nt, Artificial Sequence
  Description of Artificial Sequence: Synthetic oligonucleotide
aaaggucagguccccugga

SEQ ID NO: 2460403 - RNA, 19 nt, Artificial Sequence
  Description of Artificial Sequence: Synthetic oligonucleotide
gacaaaugcggaauaugga

SEQ ID NO: 2460404 - RNA, 19 nt, Artificial Sequence
  Description of Artificial Sequence: Synthetic oligonucleotide
agguucugcguuucucuag

SEQ ID NO: 2460405 - RNA, 19 nt, Artificial Sequence
  Description of Artificial Sequence: Synthetic oligonucleotide
cugcuuucugccguagucg

SEQ ID NO: 2460406 - RNA, 19 nt, Artificial Sequence
  Description of Artificial Sequence: Synthetic oligonucleotide
cacccuaccuaaaauaaaa

SEQ ID NO: 2460407 - RNA, 19 nt, Artificial Sequence
  Description of Artificial Sequence: Synthetic oligonucleotide
agaaaugguguagcccagg

SEQ ID NO: 2460408 - RNA, 19 nt, Artificial Sequence
  Description of Artificial Sequence: Synthetic oligonucleotide
uugagaacauaugaauauu

SEQ ID NO: 2460409 - RNA, 19 nt, Artificial Sequence
  Description of Artificial Sequence: Synthetic oligonucleotide
auagcgcagucucuuguca

SEQ ID NO: 2460410 - RNA, 19 nt, Artificial Sequence
  Description of Artificial Sequence: Synthetic oligonucleotide
cacacaacacacagagcac

SEQ ID NO: 2460411 - RNA, 19 nt, Artificial Sequence
  Description of Artificial Sequence: Synthetic oligonucleotide
agucucuugucaggauugc

SEQ ID NO: 2460412 - RNA, 19 nt, Artificial Sequence
  Description of Artificial Sequence: Synthetic oligonucleotide
uguaggccuugucaaaguu

SEQ ID NO: 2460413 - RNA, 19 nt, Artificial Sequence
  Description of Artificial Sequence: Synthetic oligonucleotide
uaauagugacugucaucug

SEQ ID NO: 2460414 - RNA, 19 nt, Artificial Sequence
  Description of Artificial Sequence: Synthetic oligonucleotide
uagcgcagucucuugucag

SEQ ID NO: 2460415 - RNA, 19 nt, Artificial Sequence
  Description of Artificial Sequence: Synthetic oligonucleotide
augacagaaauaaccacaa

SEQ ID NO: 2460416 - RNA, 19 nt, Artificial Sequence
  Description of Artificial Sequence: Synthetic oligonucleotide
cugacuuuugcuguuucuc

SEQ ID NO: 2460417 - RNA, 19 nt, Artificial Sequence
  Description of Artificial Sequence: Synthetic oligonucleotide
uccacaaaguaaggcaccu

SEQ ID NO: 2460418 - RNA, 19 nt, Artificial Sequence
  Description of Artificial Sequence: Synthetic oligonucleotide
aaugcggaauauggagucu

SEQ ID NO: 2460419 - RNA, 19 nt, Artificial Sequence
  Description of Artificial Sequence: Synthetic oligonucleotide
cacacacacacacacacaa

SEQ ID NO: 2460420 - RNA, 19 nt, Artificial Sequence
  Description of Artificial Sequence: Synthetic oligonucleotide
gugauaauagugacuguca

SEQ ID NO: 2460421 - RNA, 19 nt, Artificial Sequence
  Description of Artificial Sequence: Synthetic oligonucleotide
agaagacauugaauaguuc

SEQ ID NO: 2460422 - RNA, 19 nt, Artificial Sequence
  Description of Artificial Sequence: Synthetic oligonucleotide
ucaucugcucaucuccaua

SEQ ID NO: 2460423 - RNA, 19 nt, Artificial Sequence
  Description of Artificial Sequence: Synthetic oligonucleotide
acaguugggugcugccagg

SEQ ID NO: 2460424 - RNA, 19 nt, Artificial Sequence
  Description of Artificial Sequence: Synthetic oligonucleotide
gaagagaagcuccucugua

SEQ ID NO: 2460425 - RNA, 19 nt, Artificial Sequence
  Description of Artificial Sequence: Synthetic oligonucleotide
agagcacccuaccuaaaau

SEQ ID NO: 2460426 - RNA, 19 nt, Artificial Sequence
  Description of Artificial Sequence: Synthetic oligonucleotide
uaacagacaguugggugcu

SEQ ID NO: 2460427 - RNA, 19 nt, Artificial Sequence
  Description of Artificial Sequence: Synthetic oligonucleotide
ucccuguaauaaugguaag

SEQ ID NO: 2460428 - RNA, 19 nt, Artificial Sequence
  Description of Artificial Sequence: Synthetic oligonucleotide
auaguucuucuggagagau

SEQ ID NO: 2460429 - RNA, 19 nt, Artificial Sequence
  Description of Artificial Sequence: Synthetic oligonucleotide
ugcggaauauggagucuga

SEQ ID NO: 2460430 - RNA, 19 nt, Artificial Sequence
  Description of Artificial Sequence: Synthetic oligonucleotide
ugcucaucuccauacucau

SEQ ID NO: 2460431 - RNA, 19 nt, Artificial Sequence
  Description of Artificial Sequence: Synthetic oligonucleotide
ucugagguuuguccucuuc

SEQ ID NO: 2460432 - RNA, 19 nt, Artificial Sequence
  Description of Artificial Sequence: Synthetic oligonucleotide
gaguaaugacagaaauaac

SEQ ID NO: 2460433 - RNA, 19 nt, Artificial Sequence
  Description of Artificial Sequence: Synthetic oligonucleotide
ccaggguugauuuauagaa

SEQ ID NO: 2460434 - RNA, 19 nt, Artificial Sequence
  Description of Artificial Sequence: Synthetic oligonucleotide
acacagagcacccuaccua

SEQ ID NO: 2460435 - RNA, 19 nt, Artificial Sequence
  Description of Artificial Sequence: Synthetic oligonucleotide
aucauagcgcagucucuug

SEQ ID NO: 2460436 - RNA, 19 nt, Artificial Sequence
  Description of Artificial Sequence: Synthetic oligonucleotide
ggugcugccaggugggugc

SEQ ID NO: 2460437 - RNA, 19 nt, Artificial Sequence
  Description of Artificial Sequence: Synthetic oligonucleotide
aacagcuuguuuguaugua

SEQ ID NO: 2460438 - RNA, 19 nt, Artificial Sequence
  Description of Artificial Sequence: Synthetic oligonucleotide
gcuuguuuguauguaauca

SEQ ID NO: 2460439 - RNA, 19 nt, Artificial Sequence
  Description of Artificial Sequence: Synthetic oligonucleotide
caaauuggucagcucugac

SEQ ID NO: 2460440 - RNA, 19 nt, Artificial Sequence
  Description of Artificial Sequence: Synthetic oligonucleotide
ucgaggucacgaagagaag

SEQ ID NO: 2460441 - RNA, 19 nt, Artificial Sequence
  Description of Artificial Sequence: Synthetic oligonucleotide
cauagcgcagucucuuguc

SEQ ID NO: 2460442 - RNA, 19 nt, Artificial Sequence
  Description of Artificial Sequence: Synthetic oligonucleotide
cacacacacacacaacaca

SEQ ID NO: 2460443 - RNA, 19 nt, Artificial Sequence
  Description of Artificial Sequence: Synthetic oligonucleotide
cuauuguuuucucgagguc

SEQ ID NO: 2460444 - RNA, 19 nt, Artificial Sequence
  Description of Artificial Sequence: Synthetic oligonucleotide
gguugauuuauagaauaga

SEQ ID NO: 2460445 - RNA, 19 nt, Artificial Sequence
  Description of Artificial Sequence: Synthetic oligonucleotide
gaaggaaaauguccuccaa

SEQ ID NO: 2460446 - RNA, 19 nt, Artificial Sequence
  Description of Artificial Sequence: Synthetic oligonucleotide
cuuucugccguagucgcuc

SEQ ID NO: 2460447 - RNA, 19 nt, Artificial Sequence
  Description of Artificial Sequence: Synthetic oligonucleotide
aaggucagguccccuggaa

SEQ ID NO: 2460448 - RNA, 19 nt, Artificial Sequence
  Description of Artificial Sequence: Synthetic oligonucleotide
gauuuauagaauagacuau

SEQ ID NO: 2460449 - RNA, 19 nt, Artificial Sequence
  Description of Artificial Sequence: Synthetic oligonucleotide
gugucuguguccucucaug

SEQ ID NO: 2460450 - RNA, 19 nt, Artificial Sequence
  Description of Artificial Sequence: Synthetic oligonucleotide
cugaguaaugacagaaaua

SEQ ID NO: 2460451 - RNA, 19 nt, Artificial Sequence
  Description of Artificial Sequence: Synthetic oligonucleotide
gagcacccuaccuaaaaua

SEQ ID NO: 2460452 - RNA, 19 nt, Artificial Sequence
  Description of Artificial Sequence: Synthetic oligonucleotide
acuggcucggggugcagug

SEQ ID NO: 2460453 - RNA, 19 nt, Artificial Sequence
  Description of Artificial Sequence: Synthetic oligonucleotide
ucagguccccuggaacugg

SEQ ID NO: 2460454 - RNA, 19 nt, Artificial Sequence
  Description of Artificial Sequence: Synthetic oligonucleotide
guaauaaugguaagauacu

SEQ ID NO: 2460455 - RNA, 19 nt, Artificial Sequence
  Description of Artificial Sequence: Synthetic oligonucleotide
gucgcucaucucuauauaa

SEQ ID NO: 2460456 - RNA, 19 nt, Artificial Sequence
  Description of Artificial Sequence: Synthetic oligonucleotide
agcacccuaccuaaaauaa

SEQ ID NO: 2460457 - RNA, 19 nt, Artificial Sequence
  Description of Artificial Sequence: Synthetic oligonucleotide
uuguuuucucgaggucacg

SEQ ID NO: 2460458 - RNA, 19 nt, Artificial Sequence
  Description of Artificial Sequence: Synthetic oligonucleotide
cacacacaacacacagagc

SEQ ID NO: 2460459 - RNA, 19 nt, Artificial Sequence
  Description of Artificial Sequence: Synthetic oligonucleotide
gcucaucucuauauaaccc

SEQ ID NO: 2460460 - RNA, 19 nt, Artificial Sequence
  Description of Artificial Sequence: Synthetic oligonucleotide
ggguugauuuauagaauag

SEQ ID NO: 2460461 - RNA, 19 nt, Artificial Sequence
  Description of Artificial Sequence: Synthetic oligonucleotide
aggucacgaagagaagcuc

SEQ ID NO: 2460462 - RNA, 19 nt, Artificial Sequence
  Description of Artificial Sequence: Synthetic oligonucleotide
gacuuuugcuguuucuccu

SEQ ID NO: 2460463 - RNA, 19 nt, Artificial Sequence
  Description of Artificial Sequence: Synthetic oligonucleotide
augcggaauauggagucug

SEQ ID NO: 2460464 - RNA, 19 nt, Artificial Sequence
  Description of Artificial Sequence: Synthetic oligonucleotide
acacacacacacacacaac

SEQ ID NO: 2460465 - RNA, 19 nt, Artificial Sequence
  Description of Artificial Sequence: Synthetic oligonucleotide
uaaccacaaucaccagaac

SEQ ID NO: 2460466 - RNA, 19 nt, Artificial Sequence
  Description of Artificial Sequence: Synthetic oligonucleotide
agucagugcucuucuugga

SEQ ID NO: 2460467 - RNA, 19 nt, Artificial Sequence
  Description of Artificial Sequence: Synthetic oligonucleotide
gucaucugucacauuugag

SEQ ID NO: 2460468 - RNA, 19 nt, Artificial Sequence
  Description of Artificial Sequence: Synthetic oligonucleotide
guaaggcaccugcagguuc

SEQ ID NO: 2460469 - RNA, 19 nt, Artificial Sequence
  Description of Artificial Sequence: Synthetic oligonucleotide
ggucacgaagagaagcucc

SEQ ID NO: 2460470 - RNA, 19 nt, Artificial Sequence
  Description of Artificial Sequence: Synthetic oligonucleotide
guaaucuuucucuauuguu

SEQ ID NO: 2460471 - RNA, 19 nt, Artificial Sequence
  Description of Artificial Sequence: Synthetic oligonucleotide
gugccgucugugauaauag

SEQ ID NO: 2460472 - RNA, 19 nt, Artificial Sequence
  Description of Artificial Sequence: Synthetic oligonucleotide
gguaagauacuggcucggg

SEQ ID NO: 2460473 - RNA, 19 nt, Artificial Sequence
  Description of Artificial Sequence: Synthetic oligonucleotide
ugucggugccgucugugau

SEQ ID NO: 2460474 - RNA, 19 nt, Artificial Sequence
  Description of Artificial Sequence: Synthetic oligonucleotide
gaacuggaagcaacuggac

SEQ ID NO: 2460475 - RNA, 19 nt, Artificial Sequence
  Description of Artificial Sequence: Synthetic oligonucleotide
cuguaauaaugguaagaua

SEQ ID NO: 2460476 - RNA, 19 nt, Artificial Sequence
  Description of Artificial Sequence: Synthetic oligonucleotide
cgcucaucucuauauaacc

SEQ ID NO: 2460477 - RNA, 19 nt, Artificial Sequence
  Description of Artificial Sequence: Synthetic oligonucleotide
cacagagcacccuaccuaa

SEQ ID NO: 2460478 - RNA, 19 nt, Artificial Sequence
  Description of Artificial Sequence: Synthetic oligonucleotide
acuggaguuaacagacagu

SEQ ID NO: 2460479 - RNA, 19 nt, Artificial Sequence
  Description of Artificial Sequence: Synthetic oligonucleotide
cuucuggagagaugcuuca

SEQ ID NO: 2460480 - RNA, 19 nt, Artificial Sequence
  Description of Artificial Sequence: Synthetic oligonucleotide
guuuucucgaggucacgaa

SEQ ID NO: 2460481 - RNA, 19 nt, Artificial Sequence
  Description of Artificial Sequence: Synthetic oligonucleotide
cucaugucggugccgucug

SEQ ID NO: 2460482 - RNA, 19 nt, Artificial Sequence
  Description of Artificial Sequence: Synthetic oligonucleotide
aguugggugcugccaggug

SEQ ID NO: 2460483 - RNA, 19 nt, Artificial Sequence
  Description of Artificial Sequence: Synthetic oligonucleotide
ucggggugcagugaagguc

SEQ ID NO: 2460484 - RNA, 19 nt, Artificial Sequence
  Description of Artificial Sequence: Synthetic oligonucleotide
cagugaaggucaucugcuc

SEQ ID NO: 2460485 - RNA, 19 nt, Artificial Sequence
  Description of Artificial Sequence: Synthetic oligonucleotide
uuucugccguagucgcuca

SEQ ID NO: 2460486 - RNA, 19 nt, Artificial Sequence
  Description of Artificial Sequence: Synthetic oligonucleotide
gaagcuccucuguaggccu

SEQ ID NO: 2460487 - RNA, 19 nt, Artificial Sequence
  Description of Artificial Sequence: Synthetic oligonucleotide
cacacacacacaacacaca

SEQ ID NO: 2460488 - RNA, 19 nt, Artificial Sequence
  Description of Artificial Sequence: Synthetic oligonucleotide
gaaggucaucugcucaucu

SEQ ID NO: 2460489 - RNA, 19 nt, Artificial Sequence
  Description of Artificial Sequence: Synthetic oligonucleotide
uagcccaggguugauuuau

SEQ ID NO: 2460490 - RNA, 19 nt, Artificial Sequence
  Description of Artificial Sequence: Synthetic oligonucleotide
agucgcucaucucuauaua

SEQ ID NO: 2460491 - RNA, 19 nt, Artificial Sequence
  Description of Artificial Sequence: Synthetic oligonucleotide
gaguagucagugcucuucu

SEQ ID NO: 2460492 - RNA, 19 nt, Artificial Sequence
  Description of Artificial Sequence: Synthetic oligonucleotide
auaaccccgccaaauuggu

SEQ ID NO: 2460493 - RNA, 19 nt, Artificial Sequence
  Description of Artificial Sequence: Synthetic oligonucleotide
cuuccaacagcuuguuugu

SEQ ID NO: 2460494 - RNA, 19 nt, Artificial Sequence
  Description of Artificial Sequence: Synthetic oligonucleotide
gguucugcguuucucuaga

SEQ ID NO: 2460495 - RNA, 19 nt, Artificial Sequence
  Description of Artificial Sequence: Synthetic oligonucleotide
ucucgaggucacgaagaga

SEQ ID NO: 2460496 - RNA, 19 nt, Artificial Sequence
  Description of Artificial Sequence: Synthetic oligonucleotide
ucggugccgucugugauaa

SEQ ID NO: 2460497 - RNA, 19 nt, Artificial Sequence
  Description of Artificial Sequence: Synthetic oligonucleotide
cacacacacaacacacaga

SEQ ID NO: 2460498 - RNA, 19 nt, Artificial Sequence
  Description of Artificial Sequence: Synthetic oligonucleotide
ugguguagcccaggguuga

SEQ ID NO: 2460499 - RNA, 19 nt, Artificial Sequence
  Description of Artificial Sequence: Synthetic oligonucleotide
accccgccaaauuggucag

SEQ ID NO: 2460500 - RNA, 19 nt, Artificial Sequence
  Description of Artificial Sequence: Synthetic oligonucleotide
gaauauggagucugagguu

SEQ ID NO: 2460501 - RNA, 19 nt, Artificial Sequence
  Description of Artificial Sequence: Synthetic oligonucleotide
ggugcagugaaggucaucu

SEQ ID NO: 2460502 - RNA, 19 nt, Artificial Sequence
  Description of Artificial Sequence: Synthetic oligonucleotide
uaaccccgccaaauugguc

SEQ ID NO: 2460503 - RNA, 19 nt, Artificial Sequence
  Description of Artificial Sequence: Synthetic oligonucleotide
gauacuggcucggggugca

SEQ ID NO: 2460504 - RNA, 19 nt, Artificial Sequence
  Description of Artificial Sequence: Synthetic oligonucleotide
uccucucaugucggugccg

SEQ ID NO: 2460505 - RNA, 19 nt, Artificial Sequence
  Description of Artificial Sequence: Synthetic oligonucleotide
cucugacuuuugcuguuuc

SEQ ID NO: 2460506 - RNA, 19 nt, Artificial Sequence
  Description of Artificial Sequence: Synthetic oligonucleotide
cuggaguuaacagacaguu

SEQ ID NO: 2460507 - RNA, 19 nt, Artificial Sequence
  Description of Artificial Sequence: Synthetic oligonucleotide
acaacacacagagcacccu

SEQ ID NO: 2460508 - RNA, 19 nt, Artificial Sequence
  Description of Artificial Sequence: Synthetic oligonucleotide
gaggucacgaagagaagcu

SEQ ID NO: 2460509 - RNA, 19 nt, Artificial Sequence
  Description of Artificial Sequence: Synthetic oligonucleotide
gcugaguaaugacagaaau

SEQ ID NO: 2460510 - RNA, 19 nt, Artificial Sequence
  Description of Artificial Sequence: Synthetic oligonucleotide
uggcucggggugcagugaa

SEQ ID NO: 2460511 - RNA, 19 nt, Artificial Sequence
  Description of Artificial Sequence: Synthetic oligonucleotide
acucaucauagcgcagucu

SEQ ID NO: 2460512 - RNA, 19 nt, Artificial Sequence
  Description of Artificial Sequence: Synthetic oligonucleotide
gucagcucugacuuuugcu

SEQ ID NO: 2460513 - RNA, 19 nt, Artificial Sequence
  Description of Artificial Sequence: Synthetic oligonucleotide
guccucucaugucggugcc

SEQ ID NO: 2460514 - RNA, 19 nt, Artificial Sequence
  Description of Artificial Sequence: Synthetic oligonucleotide
uuguccucuuccucucuuu

SEQ ID NO: 2460515 - RNA, 19 nt, Artificial Sequence
  Description of Artificial Sequence: Synthetic oligonucleotide
caacuggacaaaugcggaa

SEQ ID NO: 2460516 - RNA, 19 nt, Artificial Sequence
  Description of Artificial Sequence: Synthetic oligonucleotide
gauuagcagccagcagcug

SEQ ID NO: 2460517 - RNA, 19 nt, Artificial Sequence
  Description of Artificial Sequence: Synthetic oligonucleotide
cuauauaaccccgccaaau

SEQ ID NO: 2460518 - RNA, 19 nt, Artificial Sequence
  Description of Artificial Sequence: Synthetic oligonucleotide
gaacuggaguuaacagaca

SEQ ID NO: 2460519 - RNA, 19 nt, Artificial Sequence
  Description of Artificial Sequence: Synthetic oligonucleotide
augcuucaaaaucccugua

SEQ ID NO: 2460520 - RNA, 19 nt, Artificial Sequence
  Description of Artificial Sequence: Synthetic oligonucleotide
gcccaggguugauuuauag

SEQ ID NO: 2460521 - RNA, 19 nt, Artificial Sequence
  Description of Artificial Sequence: Synthetic oligonucleotide
agcagccagcagcugagua

SEQ ID NO: 2460522 - RNA, 19 nt, Artificial Sequence
  Description of Artificial Sequence: Synthetic oligonucleotide
caauguaaucuuucucuau

SEQ ID NO: 2460523 - RNA, 19 nt, Artificial Sequence
  Description of Artificial Sequence: Synthetic oligonucleotide
cacgaagagaagcuccucu

SEQ ID NO: 2460524 - RNA, 19 nt, Artificial Sequence
  Description of Artificial Sequence: Synthetic oligonucleotide
cgaggucacgaagagaagc

SEQ ID NO: 2460525 - RNA, 19 nt, Artificial Sequence
  Description of Artificial Sequence: Synthetic oligonucleotide
cagagcacccuaccuaaaa

SEQ ID NO: 2460526 - RNA, 19 nt, Artificial Sequence
  Description of Artificial Sequence: Synthetic oligonucleotide
caacacacagagcacccua

SEQ ID NO: 2460527 - RNA, 19 nt, Artificial Sequence
  Description of Artificial Sequence: Synthetic oligonucleotide
acacacacacacacacaca

SEQ ID NO: 2460528 - RNA, 19 nt, Artificial Sequence
  Description of Artificial Sequence: Synthetic oligonucleotide
gccaaauuggucagcucug

SEQ ID NO: 2460529 - RNA, 19 nt, Artificial Sequence
  Description of Artificial Sequence: Synthetic oligonucleotide
gcaacuggacaaaugcgga

SEQ ID NO: 2460530 - RNA, 19 nt, Artificial Sequence
  Description of Artificial Sequence: Synthetic oligonucleotide
ggggauuagcagccagcag

SEQ ID NO: 2460531 - RNA, 19 nt, Artificial Sequence
  Description of Artificial Sequence: Synthetic oligonucleotide
cgucugugauaauagugac

SEQ ID NO: 2460532 - RNA, 19 nt, Artificial Sequence
  Description of Artificial Sequence: Synthetic oligonucleotide
uccuuccaacagcuuguuu

SEQ ID NO: 2460533 - RNA, 19 nt, Artificial Sequence
  Description of Artificial Sequence: Synthetic oligonucleotide
guagucgcucaucucuaua

SEQ ID NO: 2460534 - RNA, 19 nt, Artificial Sequence
  Description of Artificial Sequence: Synthetic oligonucleotide
cucuguaggccuugucaaa

SEQ ID NO: 2460535 - RNA, 19 nt, Artificial Sequence
  Description of Artificial Sequence: Synthetic oligonucleotide
ggugccgucugugauaaua

SEQ ID NO: 2460536 - RNA, 19 nt, Artificial Sequence
  Description of Artificial Sequence: Synthetic oligonucleotide
caacagcuuguuuguaugu

SEQ ID NO: 2460537 - RNA, 19 nt, Artificial Sequence
  Description of Artificial Sequence: Synthetic oligonucleotide
ugccguagucgcucaucuc

SEQ ID NO: 2460538 - RNA, 19 nt, Artificial Sequence
  Description of Artificial Sequence: Synthetic oligonucleotide
aaggcaccugcagguucug

SEQ ID NO: 2460539 - RNA, 19 nt, Artificial Sequence
  Description of Artificial Sequence: Synthetic oligonucleotide
uacuggcucggggugcagu

SEQ ID NO: 2460540 - RNA, 19 nt, Artificial Sequence
  Description of Artificial Sequence: Synthetic oligonucleotide
gcggaauauggagucugag

SEQ ID NO: 2460541 - RNA, 19 nt, Artificial Sequence
  Description of Artificial Sequence: Synthetic oligonucleotide
accugcagguucugcguuu

SEQ ID NO: 2460542 - RNA, 19 nt, Artificial Sequence
  Description of Artificial Sequence: Synthetic oligonucleotide
gacucugcuuucugccgua

SEQ ID NO: 2460543 - RNA, 19 nt, Artificial Sequence
  Description of Artificial Sequence: Synthetic oligonucleotide
cacacagagcacccuaccu

SEQ ID NO: 2460544 - RNA, 19 nt, Artificial Sequence
  Description of Artificial Sequence: Synthetic oligonucleotide
gagaugcuucaaaaucccu

SEQ ID NO: 2460545 - RNA, 19 nt, Artificial Sequence
  Description of Artificial Sequence: Synthetic oligonucleotide
cucuuuugugugucugugu

SEQ ID NO: 2460546 - RNA, 19 nt, Artificial Sequence
  Description of Artificial Sequence: Synthetic oligonucleotide
caggguugauuuauagaau

SEQ ID NO: 2460547 - RNA, 19 nt, Artificial Sequence
  Description of Artificial Sequence: Synthetic oligonucleotide
gucggugccgucugugaua

SEQ ID NO: 2460548 - RNA, 19 nt, Artificial Sequence
  Description of Artificial Sequence: Synthetic oligonucleotide
cagcuuguuuguauguaau

SEQ ID NO: 2460549 - RNA, 19 nt, Artificial Sequence
  Description of Artificial Sequence: Synthetic oligonucleotide
uucugccguagucgcucau

SEQ ID NO: 2460550 - RNA, 19 nt, Artificial Sequence
  Description of Artificial Sequence: Synthetic oligonucleotide
guucugcguuucucuagaa

SEQ ID NO: 2460551 - RNA, 19 nt, Artificial Sequence
  Description of Artificial Sequence: Synthetic oligonucleotide
cuggaagcaacuggacaaa

SEQ ID NO: 2460552 - RNA, 19 nt, Artificial Sequence
  Description of Artificial Sequence: Synthetic oligonucleotide
ggauuagcagccagcagcu

SEQ ID NO: 2460553 - RNA, 19 nt, Artificial Sequence
  Description of Artificial Sequence: Synthetic oligonucleotide
ccucuguaggccuugucaa

SEQ ID NO: 2460554 - RNA, 19 nt, Artificial Sequence
  Description of Artificial Sequence: Synthetic oligonucleotide
cagguucugcguuucucua

SEQ ID NO: 2460555 - RNA, 19 nt, Artificial Sequence
  Description of Artificial Sequence: Synthetic oligonucleotide
cccaggguugauuuauaga

SEQ ID NO: 2460556 - RNA, 19 nt, Artificial Sequence
  Description of Artificial Sequence: Synthetic oligonucleotide
gcagcugaguaaugacaga

SEQ ID NO: 2460557 - RNA, 19 nt, Artificial Sequence
  Description of Artificial Sequence: Synthetic oligonucleotide
cccuguaauaaugguaaga

SEQ ID NO: 2460558 - RNA, 19 nt, Artificial Sequence
  Description of Artificial Sequence: Synthetic oligonucleotide
guagcccaggguugauuua

SEQ ID NO: 2460559 - RNA, 19 nt, Artificial Sequence
  Description of Artificial Sequence: Synthetic oligonucleotide
cuguaggccuugucaaagu

SEQ ID NO: 2460560 - RNA, 19 nt, Artificial Sequence
  Description of Artificial Sequence: Synthetic oligonucleotide
cugccguagucgcucaucu

SEQ ID NO: 2460561 - RNA, 19 nt, Artificial Sequence
  Description of Artificial Sequence: Synthetic oligonucleotide
cucucaugucggugccguc

SEQ ID NO: 2460562 - RNA, 19 nt, Artificial Sequence
  Description of Artificial Sequence: Synthetic oligonucleotide
guaggccuugucaaaguuu

SEQ ID NO: 2460563 - RNA, 19 nt, Artificial Sequence
  Description of Artificial Sequence: Synthetic oligonucleotide
cugugauaauagugacugu

SEQ ID NO: 2460564 - RNA, 19 nt, Artificial Sequence
  Description of Artificial Sequence: Synthetic oligonucleotide
caucauagcgcagucucuu

SEQ ID NO: 2460565 - RNA, 19 nt, Artificial Sequence
  Description of Artificial Sequence: Synthetic oligonucleotide
cggggugcagugaagguca

SEQ ID NO: 2460566 - RNA, 19 nt, Artificial Sequence
  Description of Artificial Sequence: Synthetic oligonucleotide
acagagcacccuaccuaaa

SEQ ID NO: 2460567 - RNA, 19 nt, Artificial Sequence
  Description of Artificial Sequence: Synthetic oligonucleotide
agguccccuggaacuggag

SEQ ID NO: 2460568 - RNA, 19 nt, Artificial Sequence
  Description of Artificial Sequence: Synthetic oligonucleotide
cagguccccuggaacugga

SEQ ID NO: 2460569 - RNA, 19 nt, Artificial Sequence
  Description of Artificial Sequence: Synthetic oligonucleotide
gucucuugucaggauugcu

SEQ ID NO: 2460570 - RNA, 19 nt, Artificial Sequence
  Description of Artificial Sequence: Synthetic oligonucleotide
cuggacaaaugcggaauau

SEQ ID NO: 2460571 - RNA, 19 nt, Artificial Sequence
  Description of Artificial Sequence: Synthetic oligonucleotide
ccaaauuggucagcucuga

SEQ ID NO: 2460572 - RNA, 19 nt, Artificial Sequence
  Description of Artificial Sequence: Synthetic oligonucleotide
gcacccuaccuaaaauaaa

SEQ ID NO: 2460573 - RNA, 19 nt, Artificial Sequence
  Description of Artificial Sequence: Synthetic oligonucleotide
cgccaaauuggucagcucu

SEQ ID NO: 2460574 - RNA, 19 nt, Artificial Sequence
  Description of Artificial Sequence: Synthetic oligonucleotide
cucggggugcagugaaggu

SEQ ID NO: 2460575 - RNA, 19 nt, Artificial Sequence
  Description of Artificial Sequence: Synthetic oligonucleotide
ccugcagguucugcguuuc

SEQ ID NO: 2460576 - RNA, 19 nt, Artificial Sequence
  Description of Artificial Sequence: Synthetic oligonucleotide
cuggcucggggugcaguga

SEQ ID NO: 2460577 - RNA, 19 nt, Artificial Sequence
  Description of Artificial Sequence: Synthetic oligonucleotide
agcccaggguugauuuaua

SEQ ID NO: 2460578 - RNA, 19 nt, Artificial Sequence
  Description of Artificial Sequence: Synthetic oligonucleotide
ccgccaaauuggucagcuc

SEQ ID NO: 2460579 - RNA, 19 nt, Artificial Sequence
  Description of Artificial Sequence: Synthetic oligonucleotide
caguugggugcugccaggu

SEQ ID NO: 2460580 - RNA, 19 nt, Artificial Sequence
  Description of Artificial Sequence: Synthetic oligonucleotide
gcguuucucuagaaauggu

SEQ ID NO: 2460581 - RNA, 19 nt, Artificial Sequence
  Description of Artificial Sequence: Synthetic oligonucleotide
ccguagucgcucaucucua

SEQ ID NO: 2460582 - RNA, 19 nt, Artificial Sequence
  Description of Artificial Sequence: Synthetic oligonucleotide
gggugcagugaaggucauc

SEQ ID NO: 2460583 - RNA, 19 nt, Artificial Sequence
  Description of Artificial Sequence: Synthetic oligonucleotide
guguagcccaggguugauu

SEQ ID NO: 2460584 - RNA, 19 nt, Artificial Sequence
  Description of Artificial Sequence: Synthetic oligonucleotide
cugcagguucugcguuucu

SEQ ID NO: 2460585 - RNA, 19 nt, Artificial Sequence
  Description of Artificial Sequence: Synthetic oligonucleotide
cccgccaaauuggucagcu

SEQ ID NO: 2460586 - RNA, 19 nt, Artificial Sequence
  Description of Artificial Sequence: Synthetic oligonucleotide
ccucucaugucggugccgu

SEQ ID NO: 2460587 - RNA, 19 nt, Artificial Sequence
  Description of Artificial Sequence: Synthetic oligonucleotide
gcuuucugccguagucgcu

SEQ ID NO: 2460588 - RNA, 19 nt, Artificial Sequence
  Description of Artificial Sequence: Synthetic oligonucleotide
ccccgccaaauuggucagc

SEQ ID NO: 2460589 - RNA, 19 nt, Artificial Sequence
  Description of Artificial Sequence: Synthetic oligonucleotide
gguguagcccaggguugau

SEQ ID NO: 2460590 - RNA, 19 nt, Artificial Sequence
  Description of Artificial Sequence: Synthetic oligonucleotide
cguagucgcucaucucuau

SEQ ID NO: 2460591 - RNA, 19 nt, Artificial Sequence
  Description of Artificial Sequence: Synthetic oligonucleotide
ggggugcagugaaggucau

SEQ ID NO: 2460592 - RNA, 19 nt, Artificial Sequence
  Description of Artificial Sequence: Synthetic oligonucleotide
auaaauaucuccuaguucg

SEQ ID NO: 2460593 - RNA, 19 nt, Artificial Sequence
  Description of Artificial Sequence: Synthetic oligonucleotide
aauuuguuagcucugugac

SEQ ID NO: 2460594 - RNA, 19 nt, Artificial Sequence
  Description of Artificial Sequence: Synthetic oligonucleotide
uuaaacugcaaacuugugg

SEQ ID NO: 2460595 - RNA, 19 nt, Artificial Sequence
  Description of Artificial Sequence: Synthetic oligonucleotide
aacuacagaguucuuaaac

SEQ ID NO: 2460596 - RNA, 19 nt, Artificial Sequence
  Description of Artificial Sequence: Synthetic oligonucleotide
auuuauucuaccuucaucu

SEQ ID NO: 2460597 - RNA, 19 nt, Artificial Sequence
  Description of Artificial Sequence: Synthetic oligonucleotide
cuuauggucacuuugguag

SEQ ID NO: 2460598 - RNA, 19 nt, Artificial Sequence
  Description of Artificial Sequence: Synthetic oligonucleotide
aauaucuccuaguucgccc

SEQ ID NO: 2460599 - RNA, 19 nt, Artificial Sequence
  Description of Artificial Sequence: Synthetic oligonucleotide
agcgaaauacaucaaauuc

SEQ ID NO: 2460600 - RNA, 19 nt, Artificial Sequence
  Description of Artificial Sequence: Synthetic oligonucleotide
ucuaccuucaucuugcuca

SEQ ID NO: 2460601 - RNA, 19 nt, Artificial Sequence
  Description of Artificial Sequence: Synthetic oligonucleotide
aauacaucaaauuccaguu

SEQ ID NO: 2460602 - RNA, 19 nt, Artificial Sequence
  Description of Artificial Sequence: Synthetic oligonucleotide
ugguauuuaguuuuccucg

SEQ ID NO: 2460603 - RNA, 19 nt, Artificial Sequence
  Description of Artificial Sequence: Synthetic oligonucleotide
aucuaagcgaaauacauca

SEQ ID NO: 2460604 - RNA, 19 nt, Artificial Sequence
  Description of Artificial Sequence: Synthetic oligonucleotide
uauucuaccuucaucuugc

SEQ ID NO: 2460605 - RNA, 19 nt, Artificial Sequence
  Description of Artificial Sequence: Synthetic oligonucleotide
ucuuaggugaugcagaguc

SEQ ID NO: 2460606 - RNA, 19 nt, Artificial Sequence
  Description of Artificial Sequence: Synthetic oligonucleotide
ucuuaaacugcaaacuugu

SEQ ID NO: 2460607 - RNA, 19 nt, Artificial Sequence
  Description of Artificial Sequence: Synthetic oligonucleotide
cagguuuagggauagaggc

SEQ ID NO: 2460608 - RNA, 19 nt, Artificial Sequence
  Description of Artificial Sequence: Synthetic oligonucleotide
ucagguuuagggauagagg

SEQ ID NO: 2460609 - RNA, 19 nt, Artificial Sequence
  Description of Artificial Sequence: Synthetic oligonucleotide
uugcucaugauccuaagca

SEQ ID NO: 2460610 - RNA, 19 nt, Artificial Sequence
  Description of Artificial Sequence: Synthetic oligonucleotide
agaauacuccagcagaauc

SEQ ID NO: 2460611 - RNA, 19 nt, Artificial Sequence
  Description of Artificial Sequence: Synthetic oligonucleotide
aaacuugugguauuuaguu

SEQ ID NO: 2460612 - RNA, 19 nt, Artificial Sequence
  Description of Artificial Sequence: Synthetic oligonucleotide
ugcacaauuuguuagcucu

SEQ ID NO: 2460613 - RNA, 19 nt, Artificial Sequence
  Description of Artificial Sequence: Synthetic oligonucleotide
ucagaaacuacagaguucu

SEQ ID NO: 2460614 - RNA, 19 nt, Artificial Sequence
  Description of Artificial Sequence: Synthetic oligonucleotide
uucuuaaacugcaaacuug

SEQ ID NO: 2460615 - RNA, 19 nt, Artificial Sequence
  Description of Artificial Sequence: Synthetic oligonucleotide
aaaaggcucuccgaguagc

SEQ ID NO: 2460616 - RNA, 19 nt, Artificial Sequence
  Description of Artificial Sequence: Synthetic oligonucleotide
uuuguuagcucugugacac

SEQ ID NO: 2460617 - RNA, 19 nt, Artificial Sequence
  Description of Artificial Sequence: Synthetic oligonucleotide
caucuauucaucuauccug

SEQ ID NO: 2460618 - RNA, 19 nt, Artificial Sequence
  Description of Artificial Sequence: Synthetic oligonucleotide
uuauucuaccuucaucuug

SEQ ID NO: 2460619 - RNA, 19 nt, Artificial Sequence
  Description of Artificial Sequence: Synthetic oligonucleotide
guuaucauaugcaacuggg

SEQ ID NO: 2460620 - RNA, 19 nt, Artificial Sequence
  Description of Artificial Sequence: Synthetic oligonucleotide
gauguuaucauaugcaacu

SEQ ID NO: 2460621 - RNA, 19 nt, Artificial Sequence
  Description of Artificial Sequence: Synthetic oligonucleotide
ugcagaauacuccagcaga

SEQ ID NO: 2460622 - RNA, 19 nt, Artificial Sequence
  Description of Artificial Sequence: Synthetic oligonucleotide
uccuaguucgcccacaacu

SEQ ID NO: 2460623 - RNA, 19 nt, Artificial Sequence
  Description of Artificial Sequence: Synthetic oligonucleotide
ugaaucuaagcgaaauaca

SEQ ID NO: 2460624 - RNA, 19 nt, Artificial Sequence
  Description of Artificial Sequence: Synthetic oligonucleotide
acuacagaguucuuaaacu

SEQ ID NO: 2460625 - RNA, 19 nt, Artificial Sequence
  Description of Artificial Sequence: Synthetic oligonucleotide
ugcagagucaaucucuucu

SEQ ID NO: 2460626 - RNA, 19 nt, Artificial Sequence
  Description of Artificial Sequence: Synthetic oligonucleotide
ucgcccacaacucugaugu

SEQ ID NO: 2460627 - RNA, 19 nt, Artificial Sequence
  Description of Artificial Sequence: Synthetic oligonucleotide
ucaucuauccuguauguaa

SEQ ID NO: 2460628 - RNA, 19 nt, Artificial Sequence
  Description of Artificial Sequence: Synthetic oligonucleotide
aucugcacaauuuguuagc

SEQ ID NO: 2460629 - RNA, 19 nt, Artificial Sequence
  Description of Artificial Sequence: Synthetic oligonucleotide
ucaucaccuacauuuaucu

SEQ ID NO: 2460630 - RNA, 19 nt, Artificial Sequence
  Description of Artificial Sequence: Synthetic oligonucleotide
uucccuaccuuacacaaca

SEQ ID NO: 2460631 - RNA, 19 nt, Artificial Sequence
  Description of Artificial Sequence: Synthetic oligonucleotide
cauauaguaggucuguuuc

SEQ ID NO: 2460632 - RNA, 19 nt, Artificial Sequence
  Description of Artificial Sequence: Synthetic oligonucleotide
uaagcgaaauacaucaaau

SEQ ID NO: 2460633 - RNA, 19 nt, Artificial Sequence
  Description of Artificial Sequence: Synthetic oligonucleotide
ucauaaauaucuccuaguu

SEQ ID NO: 2460634 - RNA, 19 nt, Artificial Sequence
  Description of Artificial Sequence: Synthetic oligonucleotide
agaaucacauuuauucuac

SEQ ID NO: 2460635 - RNA, 19 nt, Artificial Sequence
  Description of Artificial Sequence: Synthetic oligonucleotide
auccuaagcauucccuacc

SEQ ID NO: 2460636 - RNA, 19 nt, Artificial Sequence
  Description of Artificial Sequence: Synthetic oligonucleotide
auaugcaacugggacaccc

SEQ ID NO: 2460637 - RNA, 19 nt, Artificial Sequence
  Description of Artificial Sequence: Synthetic oligonucleotide
ggcauuaaaacacccaugc

SEQ ID NO: 2460638 - RNA, 19 nt, Artificial Sequence
  Description of Artificial Sequence: Synthetic oligonucleotide
ucauaagacaucugcucag

SEQ ID NO: 2460639 - RNA, 19 nt, Artificial Sequence
  Description of Artificial Sequence: Synthetic oligonucleotide
accaccauauaguaggucu

SEQ ID NO: 2460640 - RNA, 19 nt, Artificial Sequence
  Description of Artificial Sequence: Synthetic oligonucleotide
caucauaaauaucuccuag

SEQ ID NO: 2460641 - RNA, 19 nt, Artificial Sequence
  Description of Artificial Sequence: Synthetic oligonucleotide
cucgaaugcagaauacucc

SEQ ID NO: 2460642 - RNA, 19 nt, Artificial Sequence
  Description of Artificial Sequence: Synthetic oligonucleotide
gaguucuuaaacugcaaac

SEQ ID NO: 2460643 - RNA, 19 nt, Artificial Sequence
  Description of Artificial Sequence: Synthetic oligonucleotide
uacauuuaucuccaaguuc

SEQ ID NO: 2460644 - RNA, 19 nt, Artificial Sequence
  Description of Artificial Sequence: Synthetic oligonucleotide
ucacauuuauucuaccuuc

SEQ ID NO: 2460645 - RNA, 19 nt, Artificial Sequence
  Description of Artificial Sequence: Synthetic oligonucleotide
ucgaaugcagaauacucca

SEQ ID NO: 2460646 - RNA, 19 nt, Artificial Sequence
  Description of Artificial Sequence: Synthetic oligonucleotide
ucuuucuucuucuucuucu

SEQ ID NO: 2460647 - RNA, 19 nt, Artificial Sequence
  Description of Artificial Sequence: Synthetic oligonucleotide
cugaaucuaagcgaaauac

SEQ ID NO: 2460648 - RNA, 19 nt, Artificial Sequence
  Description of Artificial Sequence: Synthetic oligonucleotide
ucauaugcaacugggacac

SEQ ID NO: 2460649 - RNA, 19 nt, Artificial Sequence
  Description of Artificial Sequence: Synthetic oligonucleotide
agcauucccuaccuuacac

SEQ ID NO: 2460650 - RNA, 19 nt, Artificial Sequence
  Description of Artificial Sequence: Synthetic oligonucleotide
aucauaugcaacugggaca

SEQ ID NO: 2460651 - RNA, 19 nt, Artificial Sequence
  Description of Artificial Sequence: Synthetic oligonucleotide
uucuucuucuucuucuuug

SEQ ID NO: 2460652 - RNA, 19 nt, Artificial Sequence
  Description of Artificial Sequence: Synthetic oligonucleotide
caugccuugaucaucauaa

SEQ ID NO: 2460653 - RNA, 19 nt, Artificial Sequence
  Description of Artificial Sequence: Synthetic oligonucleotide
uccagcagaaucugaaucu

SEQ ID NO: 2460654 - RNA, 19 nt, Artificial Sequence
  Description of Artificial Sequence: Synthetic oligonucleotide
aguucuuaaacugcaaacu

SEQ ID NO: 2460655 - RNA, 19 nt, Artificial Sequence
  Description of Artificial Sequence: Synthetic oligonucleotide
ucaccuacauuuaucucca

SEQ ID NO: 2460656 - RNA, 19 nt, Artificial Sequence
  Description of Artificial Sequence: Synthetic oligonucleotide
uuugguagccacuggaguc

SEQ ID NO: 2460657 - RNA, 19 nt, Artificial Sequence
  Description of Artificial Sequence: Synthetic oligonucleotide
ugugguauuuaguuuuccu

SEQ ID NO: 2460658 - RNA, 19 nt, Artificial Sequence
  Description of Artificial Sequence: Synthetic oligonucleotide
cauaaauaucuccuaguuc

SEQ ID NO: 2460659 - RNA, 19 nt, Artificial Sequence
  Description of Artificial Sequence: Synthetic oligonucleotide
aagcgaaauacaucaaauu

SEQ ID NO: 2460660 - RNA, 19 nt, Artificial Sequence
  Description of Artificial Sequence: Synthetic oligonucleotide
uagaaccaccauauaguag

SEQ ID NO: 2460661 - RNA, 19 nt, Artificial Sequence
  Description of Artificial Sequence: Synthetic oligonucleotide
uuuccucgaaugcagaaua

SEQ ID NO: 2460662 - RNA, 19 nt, Artificial Sequence
  Description of Artificial Sequence: Synthetic oligonucleotide
caucuauccuguauguaag

SEQ ID NO: 2460663 - RNA, 19 nt, Artificial Sequence
  Description of Artificial Sequence: Synthetic oligonucleotide
uucuucuucuucuucuucu

SEQ ID NO: 2460664 - RNA, 19 nt, Artificial Sequence
  Description of Artificial Sequence: Synthetic oligonucleotide
uucaucaccuacauuuauc

SEQ ID NO: 2460665 - RNA, 19 nt, Artificial Sequence
  Description of Artificial Sequence: Synthetic oligonucleotide
acacccaaaaggcucuccg

SEQ ID NO: 2460666 - RNA, 19 nt, Artificial Sequence
  Description of Artificial Sequence: Synthetic oligonucleotide
ugccauuccucauaagaca

SEQ ID NO: 2460667 - RNA, 19 nt, Artificial Sequence
  Description of Artificial Sequence: Synthetic oligonucleotide
ugaucaucauaaauaucuc

SEQ ID NO: 2460668 - RNA, 19 nt, Artificial Sequence
  Description of Artificial Sequence: Synthetic oligonucleotide
ucugcuacaucuucagaaa

SEQ ID NO: 2460669 - RNA, 19 nt, Artificial Sequence
  Description of Artificial Sequence: Synthetic oligonucleotide
uuuggaguggcaucugcac

SEQ ID NO: 2460670 - RNA, 19 nt, Artificial Sequence
  Description of Artificial Sequence: Synthetic oligonucleotide
aaagacagucacugucucu

SEQ ID NO: 2460671 - RNA, 19 nt, Artificial Sequence
  Description of Artificial Sequence: Synthetic oligonucleotide
aucuauccuguauguaagg

SEQ ID NO: 2460672 - RNA, 19 nt, Artificial Sequence
  Description of Artificial Sequence: Synthetic oligonucleotide
uagaggcauuaaaacaccc

SEQ ID NO: 2460673 - RNA, 19 nt, Artificial Sequence
  Description of Artificial Sequence: Synthetic oligonucleotide
ucgacugcugcacauguuc

SEQ ID NO: 2460674 - RNA, 19 nt, Artificial Sequence
  Description of Artificial Sequence: Synthetic oligonucleotide
uucagaaacuacagaguuc

SEQ ID NO: 2460675 - RNA, 19 nt, Artificial Sequence
  Description of Artificial Sequence: Synthetic oligonucleotide
ucugaaucuaagcgaaaua

SEQ ID NO: 2460676 - RNA, 19 nt, Artificial Sequence
  Description of Artificial Sequence: Synthetic oligonucleotide
gauccuaagcauucccuac

SEQ ID NO: 2460677 - RNA, 19 nt, Artificial Sequence
  Description of Artificial Sequence: Synthetic oligonucleotide
auucaucuauccuguaugu

SEQ ID NO: 2460678 - RNA, 19 nt, Artificial Sequence
  Description of Artificial Sequence: Synthetic oligonucleotide
cucagguuuagggauagag

SEQ ID NO: 2460679 - RNA, 19 nt, Artificial Sequence
  Description of Artificial Sequence: Synthetic oligonucleotide
agaguucuuaaacugcaaa

SEQ ID NO: 2460680 - RNA, 19 nt, Artificial Sequence
  Description of Artificial Sequence: Synthetic oligonucleotide
cucaugauccuaagcauuc

SEQ ID NO: 2460681 - RNA, 19 nt, Artificial Sequence
  Description of Artificial Sequence: Synthetic oligonucleotide
uuggcucgucuucacagag

SEQ ID NO: 2460682 - RNA, 19 nt, Artificial Sequence
  Description of Artificial Sequence: Synthetic oligonucleotide
auaguaggucuguuucuuc

SEQ ID NO: 2460683 - RNA, 19 nt, Artificial Sequence
  Description of Artificial Sequence: Synthetic oligonucleotide
ugggacacccaaaaggcuc

SEQ ID NO: 2460684 - RNA, 19 nt, Artificial Sequence
  Description of Artificial Sequence: Synthetic oligonucleotide
gaaucacauuuauucuacc

SEQ ID NO: 2460685 - RNA, 19 nt, Artificial Sequence
  Description of Artificial Sequence: Synthetic oligonucleotide
uuauggucacuuugguagc

SEQ ID NO: 2460686 - RNA, 19 nt, Artificial Sequence
  Description of Artificial Sequence: Synthetic oligonucleotide
agagucaaucucuucucug

SEQ ID NO: 2460687 - RNA, 19 nt, Artificial Sequence
  Description of Artificial Sequence: Synthetic oligonucleotide
auagaaccaccauauagua

SEQ ID NO: 2460688 - RNA, 19 nt, Artificial Sequence
  Description of Artificial Sequence: Synthetic oligonucleotide
uacuccagcagaaucugaa

SEQ ID NO: 2460689 - RNA, 19 nt, Artificial Sequence
  Description of Artificial Sequence: Synthetic oligonucleotide
guccugaucuuccuggugc

SEQ ID NO: 2460690 - RNA, 19 nt, Artificial Sequence
  Description of Artificial Sequence: Synthetic oligonucleotide
ucuauccuguauguaagga

SEQ ID NO: 2460691 - RNA, 19 nt, Artificial Sequence
  Description of Artificial Sequence: Synthetic oligonucleotide
caauuuguuagcucuguga

SEQ ID NO: 2460692 - RNA, 19 nt, Artificial Sequence
  Description of Artificial Sequence: Synthetic oligonucleotide
uuccggcucagguagcgcg

SEQ ID NO: 2460693 - RNA, 19 nt, Artificial Sequence
  Description of Artificial Sequence: Synthetic oligonucleotide
gugguauuuaguuuuccuc

SEQ ID NO: 2460694 - RNA, 19 nt, Artificial Sequence
  Description of Artificial Sequence: Synthetic oligonucleotide
uaccuuacacaacaucuau

SEQ ID NO: 2460695 - RNA, 19 nt, Artificial Sequence
  Description of Artificial Sequence: Synthetic oligonucleotide
cauagaaccaccauauagu

SEQ ID NO: 2460696 - RNA, 19 nt, Artificial Sequence
  Description of Artificial Sequence: Synthetic oligonucleotide
ucagguagcgcggcgacag

SEQ ID NO: 2460697 - RNA, 19 nt, Artificial Sequence
  Description of Artificial Sequence: Synthetic oligonucleotide
acaacucugauguuaucau

SEQ ID NO: 2460698 - RNA, 19 nt, Artificial Sequence
  Description of Artificial Sequence: Synthetic oligonucleotide
auuuguuagcucugugaca

SEQ ID NO: 2460699 - RNA, 19 nt, Artificial Sequence
  Description of Artificial Sequence: Synthetic oligonucleotide
cuugcucaugauccuaagc

SEQ ID NO: 2460700 - RNA, 19 nt, Artificial Sequence
  Description of Artificial Sequence: Synthetic oligonucleotide
uucuuauggucacuuuggu

SEQ ID NO: 2460701 - RNA, 19 nt, Artificial Sequence
  Description of Artificial Sequence: Synthetic oligonucleotide
aaugccaguuucugcuaca

SEQ ID NO: 2460702 - RNA, 19 nt, Artificial Sequence
  Description of Artificial Sequence: Synthetic oligonucleotide
uguuagcucugugacacca

SEQ ID NO: 2460703 - RNA, 19 nt, Artificial Sequence
  Description of Artificial Sequence: Synthetic oligonucleotide
uucacagaggucauccaua

SEQ ID NO: 2460704 - RNA, 19 nt, Artificial Sequence
  Description of Artificial Sequence: Synthetic oligonucleotide
acaauuuguuagcucugug

SEQ ID NO: 2460705 - RNA, 19 nt, Artificial Sequence
  Description of Artificial Sequence: Synthetic oligonucleotide
cucauaagacaucugcuca

SEQ ID NO: 2460706 - RNA, 19 nt, Artificial Sequence
  Description of Artificial Sequence: Synthetic oligonucleotide
cauaagacaucugcucagg

SEQ ID NO: 2460707 - RNA, 19 nt, Artificial Sequence
  Description of Artificial Sequence: Synthetic oligonucleotide
ccuuacacaacaucuauuc

SEQ ID NO: 2460708 - RNA, 19 nt, Artificial Sequence
  Description of Artificial Sequence: Synthetic oligonucleotide
gcaaacuugugguauuuag

SEQ ID NO: 2460709 - RNA, 19 nt, Artificial Sequence
  Description of Artificial Sequence: Synthetic oligonucleotide
aaacuacagaguucuuaaa

SEQ ID NO: 2460710 - RNA, 19 nt, Artificial Sequence
  Description of Artificial Sequence: Synthetic oligonucleotide
uuaggugaugcagagucaa

SEQ ID NO: 2460711 - RNA, 19 nt, Artificial Sequence
  Description of Artificial Sequence: Synthetic oligonucleotide
uaugcaacugggacaccca

SEQ ID NO: 2460712 - RNA, 19 nt, Artificial Sequence
  Description of Artificial Sequence: Synthetic oligonucleotide
auaucuccuaguucgccca

SEQ ID NO: 2460713 - RNA, 19 nt, Artificial Sequence
  Description of Artificial Sequence: Synthetic oligonucleotide
ugccuugaucaucauaaau

SEQ ID NO: 2460714 - RNA, 19 nt, Artificial Sequence
  Description of Artificial Sequence: Synthetic oligonucleotide
cuugaucaucauaaauauc

SEQ ID NO: 2460715 - RNA, 19 nt, Artificial Sequence
  Description of Artificial Sequence: Synthetic oligonucleotide
agcagaaucugaaucuaag

SEQ ID NO: 2460716 - RNA, 19 nt, Artificial Sequence
  Description of Artificial Sequence: Synthetic oligonucleotide
uccuaagcauucccuaccu

SEQ ID NO: 2460717 - RNA, 19 nt, Artificial Sequence
  Description of Artificial Sequence: Synthetic oligonucleotide
ucauccauagaaccaccau

SEQ ID NO: 2460718 - RNA, 19 nt, Artificial Sequence
  Description of Artificial Sequence: Synthetic oligonucleotide
guuucuuccuuuggagugg

SEQ ID NO: 2460719 - RNA, 19 nt, Artificial Sequence
  Description of Artificial Sequence: Synthetic oligonucleotide
ucacuuugguagccacugg

SEQ ID NO: 2460720 - RNA, 19 nt, Artificial Sequence
  Description of Artificial Sequence: Synthetic oligonucleotide
caguucaucaccuacauuu

SEQ ID NO: 2460721 - RNA, 19 nt, Artificial Sequence
  Description of Artificial Sequence: Synthetic oligonucleotide
uguauguaaggaugucaaa

SEQ ID NO: 2460722 - RNA, 19 nt, Artificial Sequence
  Description of Artificial Sequence: Synthetic oligonucleotide
ugauccuaagcauucccua

SEQ ID NO: 2460723 - RNA, 19 nt, Artificial Sequence
  Description of Artificial Sequence: Synthetic oligonucleotide
acacaacaucuauucaucu

SEQ ID NO: 2460724 - RNA, 19 nt, Artificial Sequence
  Description of Artificial Sequence: Synthetic oligonucleotide
cuuaaacugcaaacuugug

SEQ ID NO: 2460725 - RNA, 19 nt, Artificial Sequence
  Description of Artificial Sequence: Synthetic oligonucleotide
ucuuauggucacuuuggua

SEQ ID NO: 2460726 - RNA, 19 nt, Artificial Sequence
  Description of Artificial Sequence: Synthetic oligonucleotide
gacaccaucgacugcugca

SEQ ID NO: 2460727 - RNA, 19 nt, Artificial Sequence
  Description of Artificial Sequence: Synthetic oligonucleotide
uuucuucuucuucuucuuc

SEQ ID NO: 2460728 - RNA, 19 nt, Artificial Sequence
  Description of Artificial Sequence: Synthetic oligonucleotide
uaguucgcccacaacucug

SEQ ID NO: 2460729 - RNA, 19 nt, Artificial Sequence
  Description of Artificial Sequence: Synthetic oligonucleotide
aaaggcucuccgaguagcg

SEQ ID NO: 2460730 - RNA, 19 nt, Artificial Sequence
  Description of Artificial Sequence: Synthetic oligonucleotide
ucuaagcgaaauacaucaa

SEQ ID NO: 2460731 - RNA, 19 nt, Artificial Sequence
  Description of Artificial Sequence: Synthetic oligonucleotide
gaaucuaagcgaaauacau

SEQ ID NO: 2460732 - RNA, 19 nt, Artificial Sequence
  Description of Artificial Sequence: Synthetic oligonucleotide
acucugauguuaucauaug

SEQ ID NO: 2460733 - RNA, 19 nt, Artificial Sequence
  Description of Artificial Sequence: Synthetic oligonucleotide
ugcucaugauccuaagcau

SEQ ID NO: 2460734 - RNA, 19 nt, Artificial Sequence
  Description of Artificial Sequence: Synthetic oligonucleotide
ucugcacaauuuguuagcu

SEQ ID NO: 2460735 - RNA, 19 nt, Artificial Sequence
  Description of Artificial Sequence: Synthetic oligonucleotide
gucacuuugguagccacug

SEQ ID NO: 2460736 - RNA, 19 nt, Artificial Sequence
  Description of Artificial Sequence: Synthetic oligonucleotide
cuguauguaaggaugucaa

SEQ ID NO: 2460737 - RNA, 19 nt, Artificial Sequence
  Description of Artificial Sequence: Synthetic oligonucleotide
acaccaucgacugcugcac

SEQ ID NO: 2460738 - RNA, 19 nt, Artificial Sequence
  Description of Artificial Sequence: Synthetic oligonucleotide
gcagaaucugaaucuaagc

SEQ ID NO: 2460739 - RNA, 19 nt, Artificial Sequence
  Description of Artificial Sequence: Synthetic oligonucleotide
cuaagcgaaauacaucaaa

SEQ ID NO: 2460740 - RNA, 19 nt, Artificial Sequence
  Description of Artificial Sequence: Synthetic oligonucleotide
cuaagcauucccuaccuua

SEQ ID NO: 2460741 - RNA, 19 nt, Artificial Sequence
  Description of Artificial Sequence: Synthetic oligonucleotide
aucuauucaucuauccugu

SEQ ID NO: 2460742 - RNA, 19 nt, Artificial Sequence
  Description of Artificial Sequence: Synthetic oligonucleotide
uccgaguagcgcaggagcu

SEQ ID NO: 2460743 - RNA, 19 nt, Artificial Sequence
  Description of Artificial Sequence: Synthetic oligonucleotide
aaaacaggguccugaucuu

SEQ ID NO: 2460744 - RNA, 19 nt, Artificial Sequence
  Description of Artificial Sequence: Synthetic oligonucleotide
agaaacuacagaguucuua

SEQ ID NO: 2460745 - RNA, 19 nt, Artificial Sequence
  Description of Artificial Sequence: Synthetic oligonucleotide
aagcauucccuaccuuaca

SEQ ID NO: 2460746 - RNA, 19 nt, Artificial Sequence
  Description of Artificial Sequence: Synthetic oligonucleotide
gaauacuccagcagaaucu

SEQ ID NO: 2460747 - RNA, 19 nt, Artificial Sequence
  Description of Artificial Sequence: Synthetic oligonucleotide
aauuccaguucaucaccua

SEQ ID NO: 2460748 - RNA, 19 nt, Artificial Sequence
  Description of Artificial Sequence: Synthetic oligonucleotide
acauuuauucuaccuucau

SEQ ID NO: 2460749 - RNA, 19 nt, Artificial Sequence
  Description of Artificial Sequence: Synthetic oligonucleotide
agggauagaggcauuaaaa

SEQ ID NO: 2460750 - RNA, 19 nt, Artificial Sequence
  Description of Artificial Sequence: Synthetic oligonucleotide
cuacaucuucagaaacuac

SEQ ID NO: 2460751 - RNA, 19 nt, Artificial Sequence
  Description of Artificial Sequence: Synthetic oligonucleotide
uggcucgucuucacagagg

SEQ ID NO: 2460752 - RNA, 19 nt, Artificial Sequence
  Description of Artificial Sequence: Synthetic oligonucleotide
uuuuccucgaaugcagaau

SEQ ID NO: 2460753 - RNA, 19 nt, Artificial Sequence
  Description of Artificial Sequence: Synthetic oligonucleotide
uuuagggauagaggcauua

SEQ ID NO: 2460754 - RNA, 19 nt, Artificial Sequence
  Description of Artificial Sequence: Synthetic oligonucleotide
uauggucacuuugguagcc

SEQ ID NO: 2460755 - RNA, 19 nt, Artificial Sequence
  Description of Artificial Sequence: Synthetic oligonucleotide
ucuuccuuuggaguggcau

SEQ ID NO: 2460756 - RNA, 19 nt, Artificial Sequence
  Description of Artificial Sequence: Synthetic oligonucleotide
acuuugguagccacuggag

SEQ ID NO: 2460757 - RNA, 19 nt, Artificial Sequence
  Description of Artificial Sequence: Synthetic oligonucleotide
uccugaucuuccuggugcc

SEQ ID NO: 2460758 - RNA, 19 nt, Artificial Sequence
  Description of Artificial Sequence: Synthetic oligonucleotide
ucaugauccuaagcauucc

SEQ ID NO: 2460759 - RNA, 19 nt, Artificial Sequence
  Description of Artificial Sequence: Synthetic oligonucleotide
uucgcccacaacucugaug

SEQ ID NO: 2460760 - RNA, 19 nt, Artificial Sequence
  Description of Artificial Sequence: Synthetic oligonucleotide
cacaacucugauguuauca

SEQ ID NO: 2460761 - RNA, 19 nt, Artificial Sequence
  Description of Artificial Sequence: Synthetic oligonucleotide
cugcuacaucuucagaaac

SEQ ID NO: 2460762 - RNA, 19 nt, Artificial Sequence
  Description of Artificial Sequence: Synthetic oligonucleotide
caacaucuauucaucuauc

SEQ ID NO: 2460763 - RNA, 19 nt, Artificial Sequence
  Description of Artificial Sequence: Synthetic oligonucleotide
uuccucgaaugcagaauac

SEQ ID NO: 2460764 - RNA, 19 nt, Artificial Sequence
  Description of Artificial Sequence: Synthetic oligonucleotide
uggaaaacaggguccugau

SEQ ID NO: 2460765 - RNA, 19 nt, Artificial Sequence
  Description of Artificial Sequence: Synthetic oligonucleotide
uccucgaaugcagaauacu

SEQ ID NO: 2460766 - RNA, 19 nt, Artificial Sequence
  Description of Artificial Sequence: Synthetic oligonucleotide
caaaagacagucacugucu

SEQ ID NO: 2460767 - RNA, 19 nt, Artificial Sequence
  Description of Artificial Sequence: Synthetic oligonucleotide
cacauuuauucuaccuuca

SEQ ID NO: 2460768 - RNA, 19 nt, Artificial Sequence
  Description of Artificial Sequence: Synthetic oligonucleotide
aguagcgcaggagcucggc

SEQ ID NO: 2460769 - RNA, 19 nt, Artificial Sequence
  Description of Artificial Sequence: Synthetic oligonucleotide
ucuccuaguucgcccacaa

SEQ ID NO: 2460770 - RNA, 19 nt, Artificial Sequence
  Description of Artificial Sequence: Synthetic oligonucleotide
ucuucuucuucuucuucuu

SEQ ID NO: 2460771 - RNA, 19 nt, Artificial Sequence
  Description of Artificial Sequence: Synthetic oligonucleotide
ugcucagguuuagggauag

SEQ ID NO: 2460772 - RNA, 19 nt, Artificial Sequence
  Description of Artificial Sequence: Synthetic oligonucleotide
uucuaccuucaucuugcuc

SEQ ID NO: 2460773 - RNA, 19 nt, Artificial Sequence
  Description of Artificial Sequence: Synthetic oligonucleotide
gguauuuaguuuuccucga

SEQ ID NO: 2460774 - RNA, 19 nt, Artificial Sequence
  Description of Artificial Sequence: Synthetic oligonucleotide
ugcacauguuccugucucu

SEQ ID NO: 2460775 - RNA, 19 nt, Artificial Sequence
  Description of Artificial Sequence: Synthetic oligonucleotide
agucacuggcuuggaaaac

SEQ ID NO: 2460776 - RNA, 19 nt, Artificial Sequence
  Description of Artificial Sequence: Synthetic oligonucleotide
cuuuggaguggcaucugca

SEQ ID NO: 2460777 - RNA, 19 nt, Artificial Sequence
  Description of Artificial Sequence: Synthetic oligonucleotide
agcgcaggagcucggcguc

SEQ ID NO: 2460778 - RNA, 19 nt, Artificial Sequence
  Description of Artificial Sequence: Synthetic oligonucleotide
caaugccaguuucugcuac

SEQ ID NO: 2460779 - RNA, 19 nt, Artificial Sequence
  Description of Artificial Sequence: Synthetic oligonucleotide
ugcaacugggacacccaaa

SEQ ID NO: 2460780 - RNA, 19 nt, Artificial Sequence
  Description of Artificial Sequence: Synthetic oligonucleotide
uagcgcaggagcucggcgu

SEQ ID NO: 2460781 - RNA, 19 nt, Artificial Sequence
  Description of Artificial Sequence: Synthetic oligonucleotide
cuucuucuucuucuucuuc

SEQ ID NO: 2460782 - RNA, 19 nt, Artificial Sequence
  Description of Artificial Sequence: Synthetic oligonucleotide
auucccuaccuuacacaac

SEQ ID NO: 2460783 - RNA, 19 nt, Artificial Sequence
  Description of Artificial Sequence: Synthetic oligonucleotide
acaucugcucagguuuagg

SEQ ID NO: 2460784 - RNA, 19 nt, Artificial Sequence
  Description of Artificial Sequence: Synthetic oligonucleotide
augauccuaagcauucccu

SEQ ID NO: 2460785 - RNA, 19 nt, Artificial Sequence
  Description of Artificial Sequence: Synthetic oligonucleotide
gaugcccgugcgcuuccgg

SEQ ID NO: 2460786 - RNA, 19 nt, Artificial Sequence
  Description of Artificial Sequence: Synthetic oligonucleotide
cucugugacaccaucgacu

SEQ ID NO: 2460787 - RNA, 19 nt, Artificial Sequence
  Description of Artificial Sequence: Synthetic oligonucleotide
caaacuugugguauuuagu

SEQ ID NO: 2460788 - RNA, 19 nt, Artificial Sequence
  Description of Artificial Sequence: Synthetic oligonucleotide
aggcauuaaaacacccaug

SEQ ID NO: 2460789 - RNA, 19 nt, Artificial Sequence
  Description of Artificial Sequence: Synthetic oligonucleotide
guuuuccucgaaugcagaa

SEQ ID NO: 2460790 - RNA, 19 nt, Artificial Sequence
  Description of Artificial Sequence: Synthetic oligonucleotide
guucuuaaacugcaaacuu

SEQ ID NO: 2460791 - RNA, 19 nt, Artificial Sequence
  Description of Artificial Sequence: Synthetic oligonucleotide
cacuuugguagccacugga

SEQ ID NO: 2460792 - RNA, 19 nt, Artificial Sequence
  Description of Artificial Sequence: Synthetic oligonucleotide
cuaccuuacacaacaucua

SEQ ID NO: 2460793 - RNA, 19 nt, Artificial Sequence
  Description of Artificial Sequence: Synthetic oligonucleotide
aguggcaucugcacaauuu

SEQ ID NO: 2460794 - RNA, 19 nt, Artificial Sequence
  Description of Artificial Sequence: Synthetic oligonucleotide
uaucuccuaguucgcccac

SEQ ID NO: 2460795 - RNA, 19 nt, Artificial Sequence
  Description of Artificial Sequence: Synthetic oligonucleotide
uucaucuauccuguaugua

SEQ ID NO: 2460796 - RNA, 19 nt, Artificial Sequence
  Description of Artificial Sequence: Synthetic oligonucleotide
ugcgcuuccggcucaggua

SEQ ID NO: 2460797 - RNA, 19 nt, Artificial Sequence
  Description of Artificial Sequence: Synthetic oligonucleotide
agguuuagggauagaggca

SEQ ID NO: 2460798 - RNA, 19 nt, Artificial Sequence
  Description of Artificial Sequence: Synthetic oligonucleotide
accaucgacugcugcacau

SEQ ID NO: 2460799 - RNA, 19 nt, Artificial Sequence
  Description of Artificial Sequence: Synthetic oligonucleotide
cauuccucauaagacaucu

SEQ ID NO: 2460800 - RNA, 19 nt, Artificial Sequence
  Description of Artificial Sequence: Synthetic oligonucleotide
ccuacauuuaucuccaagu

SEQ ID NO: 2460801 - RNA, 19 nt, Artificial Sequence
  Description of Artificial Sequence: Synthetic oligonucleotide
ccuaguucgcccacaacuc

SEQ ID NO: 2460802 - RNA, 19 nt, Artificial Sequence
  Description of Artificial Sequence: Synthetic oligonucleotide
acccaugccuugaucauca

SEQ ID NO: 2460803 - RNA, 19 nt, Artificial Sequence
  Description of Artificial Sequence: Synthetic oligonucleotide
acacccaugccuugaucau

SEQ ID NO: 2460804 - RNA, 19 nt, Artificial Sequence
  Description of Artificial Sequence: Synthetic oligonucleotide
auucuaccuucaucuugcu

SEQ ID NO: 2460805 - RNA, 19 nt, Artificial Sequence
  Description of Artificial Sequence: Synthetic oligonucleotide
uucugccauuccucauaag

SEQ ID NO: 2460806 - RNA, 19 nt, Artificial Sequence
  Description of Artificial Sequence: Synthetic oligonucleotide
uaggugaugcagagucaau

SEQ ID NO: 2460807 - RNA, 19 nt, Artificial Sequence
  Description of Artificial Sequence: Synthetic oligonucleotide
ucgucuucacagaggucau

SEQ ID NO: 2460808 - RNA, 19 nt, Artificial Sequence
  Description of Artificial Sequence: Synthetic oligonucleotide
uucuuaggugaugcagagu

SEQ ID NO: 2460809 - RNA, 19 nt, Artificial Sequence
  Description of Artificial Sequence: Synthetic oligonucleotide
cagcaaccucuucaaugcc

SEQ ID NO: 2460810 - RNA, 19 nt, Artificial Sequence
  Description of Artificial Sequence: Synthetic oligonucleotide
cuauccuguauguaaggau

SEQ ID NO: 2460811 - RNA, 19 nt, Artificial Sequence
  Description of Artificial Sequence: Synthetic oligonucleotide
cacuggagucacuggcuug

SEQ ID NO: 2460812 - RNA, 19 nt, Artificial Sequence
  Description of Artificial Sequence: Synthetic oligonucleotide
uccuguauguaaggauguc

SEQ ID NO: 2460813 - RNA, 19 nt, Artificial Sequence
  Description of Artificial Sequence: Synthetic oligonucleotide
ugccaguuucugcuacauc

SEQ ID NO: 2460814 - RNA, 19 nt, Artificial Sequence
  Description of Artificial Sequence: Synthetic oligonucleotide
cuauucaucuauccuguau

SEQ ID NO: 2460815 - RNA, 19 nt, Artificial Sequence
  Description of Artificial Sequence: Synthetic oligonucleotide
cuuugguagccacuggagu

SEQ ID NO: 2460816 - RNA, 19 nt, Artificial Sequence
  Description of Artificial Sequence: Synthetic oligonucleotide
ugcaaacuugugguauuua

SEQ ID NO: 2460817 - RNA, 19 nt, Artificial Sequence
  Description of Artificial Sequence: Synthetic oligonucleotide
augccuugaucaucauaaa

SEQ ID NO: 2460818 - RNA, 19 nt, Artificial Sequence
  Description of Artificial Sequence: Synthetic oligonucleotide
ugcccgugcgcuuccggcu

SEQ ID NO: 2460819 - RNA, 19 nt, Artificial Sequence
  Description of Artificial Sequence: Synthetic oligonucleotide
ucgcggaugcccgugcgcu

SEQ ID NO: 2460820 - RNA, 19 nt, Artificial Sequence
  Description of Artificial Sequence: Synthetic oligonucleotide
cuguuucuuccuuuggagu

SEQ ID NO: 2460821 - RNA, 19 nt, Artificial Sequence
  Description of Artificial Sequence: Synthetic oligonucleotide
ccaccauauaguaggucug

SEQ ID NO: 2460822 - RNA, 19 nt, Artificial Sequence
  Description of Artificial Sequence: Synthetic oligonucleotide
agcugcucgcggaugcccg

SEQ ID NO: 2460823 - RNA, 19 nt, Artificial Sequence
  Description of Artificial Sequence: Synthetic oligonucleotide
ggaaaacaggguccugauc

SEQ ID NO: 2460824 - RNA, 19 nt, Artificial Sequence
  Description of Artificial Sequence: Synthetic oligonucleotide
aguucgcccacaacucuga

SEQ ID NO: 2460825 - RNA, 19 nt, Artificial Sequence
  Description of Artificial Sequence: Synthetic oligonucleotide
aucuugcucaugauccuaa

SEQ ID NO: 2460826 - RNA, 19 nt, Artificial Sequence
  Description of Artificial Sequence: Synthetic oligonucleotide
caacucugauguuaucaua

SEQ ID NO: 2460827 - RNA, 19 nt, Artificial Sequence
  Description of Artificial Sequence: Synthetic oligonucleotide
cacccaaaaggcucuccga

SEQ ID NO: 2460828 - RNA, 19 nt, Artificial Sequence
  Description of Artificial Sequence: Synthetic oligonucleotide
gcaucugcacaauuuguua

SEQ ID NO: 2460829 - RNA, 19 nt, Artificial Sequence
  Description of Artificial Sequence: Synthetic oligonucleotide
ccuuuggaguggcaucugc

SEQ ID NO: 2460830 - RNA, 19 nt, Artificial Sequence
  Description of Artificial Sequence: Synthetic oligonucleotide
ucccuaccuuacacaacau

SEQ ID NO: 2460831 - RNA, 19 nt, Artificial Sequence
  Description of Artificial Sequence: Synthetic oligonucleotide
cugugacaccaucgacugc

SEQ ID NO: 2460832 - RNA, 19 nt, Artificial Sequence
  Description of Artificial Sequence: Synthetic oligonucleotide
accuuacacaacaucuauu

SEQ ID NO: 2460833 - RNA, 19 nt, Artificial Sequence
  Description of Artificial Sequence: Synthetic oligonucleotide
gguuuagggauagaggcau

SEQ ID NO: 2460834 - RNA, 19 nt, Artificial Sequence
  Description of Artificial Sequence: Synthetic oligonucleotide
accauauaguaggucuguu

SEQ ID NO: 2460835 - RNA, 19 nt, Artificial Sequence
  Description of Artificial Sequence: Synthetic oligonucleotide
cuccuaguucgcccacaac

SEQ ID NO: 2460836 - RNA, 19 nt, Artificial Sequence
  Description of Artificial Sequence: Synthetic oligonucleotide
cuaguucgcccacaacucu

SEQ ID NO: 2460837 - RNA, 19 nt, Artificial Sequence
  Description of Artificial Sequence: Synthetic oligonucleotide
cacccaugccuugaucauc

SEQ ID NO: 2460838 - RNA, 19 nt, Artificial Sequence
  Description of Artificial Sequence: Synthetic oligonucleotide
cuuccggcucagguagcgc

SEQ ID NO: 2460839 - RNA, 19 nt, Artificial Sequence
  Description of Artificial Sequence: Synthetic oligonucleotide
cuuucuucuucuucuucuu

SEQ ID NO: 2460840 - RNA, 19 nt, Artificial Sequence
  Description of Artificial Sequence: Synthetic oligonucleotide
caucgacugcugcacaugu

SEQ ID NO: 2460841 - RNA, 19 nt, Artificial Sequence
  Description of Artificial Sequence: Synthetic oligonucleotide
cauaugcaacugggacacc

SEQ ID NO: 2460842 - RNA, 19 nt, Artificial Sequence
  Description of Artificial Sequence: Synthetic oligonucleotide
cagagucaaucucuucucu

SEQ ID NO: 2460843 - RNA, 19 nt, Artificial Sequence
  Description of Artificial Sequence: Synthetic oligonucleotide
cacaauuuguuagcucugu

SEQ ID NO: 2460844 - RNA, 19 nt, Artificial Sequence
  Description of Artificial Sequence: Synthetic oligonucleotide
cccuaccuuacacaacauc

SEQ ID NO: 2460845 - RNA, 19 nt, Artificial Sequence
  Description of Artificial Sequence: Synthetic oligonucleotide
ccaaaaggcucuccgagua

SEQ ID NO: 2460846 - RNA, 19 nt, Artificial Sequence
  Description of Artificial Sequence: Synthetic oligonucleotide
cgaguagcgcaggagcucg

SEQ ID NO: 2460847 - RNA, 19 nt, Artificial Sequence
  Description of Artificial Sequence: Synthetic oligonucleotide
gaaccaccauauaguaggu

SEQ ID NO: 2460848 - RNA, 19 nt, Artificial Sequence
  Description of Artificial Sequence: Synthetic oligonucleotide
agacaucugcucagguuua

SEQ ID NO: 2460849 - RNA, 19 nt, Artificial Sequence
  Description of Artificial Sequence: Synthetic oligonucleotide
cacagaggucauccauaga

SEQ ID NO: 2460850 - RNA, 19 nt, Artificial Sequence
  Description of Artificial Sequence: Synthetic oligonucleotide
ggcucuccgaguagcgcag

SEQ ID NO: 2460851 - RNA, 19 nt, Artificial Sequence
  Description of Artificial Sequence: Synthetic oligonucleotide
caucuugcucaugauccua

SEQ ID NO: 2460852 - RNA, 19 nt, Artificial Sequence
  Description of Artificial Sequence: Synthetic oligonucleotide
cugcucagguuuagggaua

SEQ ID NO: 2460853 - RNA, 19 nt, Artificial Sequence
  Description of Artificial Sequence: Synthetic oligonucleotide
caccauauaguaggucugu

SEQ ID NO: 2460854 - RNA, 19 nt, Artificial Sequence
  Description of Artificial Sequence: Synthetic oligonucleotide
cuucuucuucuucuucuuu

SEQ ID NO: 2460855 - RNA, 19 nt, Artificial Sequence
  Description of Artificial Sequence: Synthetic oligonucleotide
ccaucgacugcugcacaug

SEQ ID NO: 2460856 - RNA, 19 nt, Artificial Sequence
  Description of Artificial Sequence: Synthetic oligonucleotide
aucgacugcugcacauguu

SEQ ID NO: 2460857 - RNA, 19 nt, Artificial Sequence
  Description of Artificial Sequence: Synthetic oligonucleotide
cacauguuccugucucuuu

SEQ ID NO: 2460858 - RNA, 19 nt, Artificial Sequence
  Description of Artificial Sequence: Synthetic oligonucleotide
gaguggcaucugcacaauu

SEQ ID NO: 2460859 - RNA, 19 nt, Artificial Sequence
  Description of Artificial Sequence: Synthetic oligonucleotide
ccauauaguaggucuguuu

SEQ ID NO: 2460860 - RNA, 19 nt, Artificial Sequence
  Description of Artificial Sequence: Synthetic oligonucleotide
cucagguagcgcggcgaca

SEQ ID NO: 2460861 - RNA, 19 nt, Artificial Sequence
  Description of Artificial Sequence: Synthetic oligonucleotide
ggcucagguagcgcggcga

SEQ ID NO: 2460862 - RNA, 19 nt, Artificial Sequence
  Description of Artificial Sequence: Synthetic oligonucleotide
gcucaugauccuaagcauu

SEQ ID NO: 2460863 - RNA, 19 nt, Artificial Sequence
  Description of Artificial Sequence: Synthetic oligonucleotide
gggacacccaaaaggcucu

SEQ ID NO: 2460864 - RNA, 19 nt, Artificial Sequence
  Description of Artificial Sequence: Synthetic oligonucleotide
gcucuccgaguagcgcagg

SEQ ID NO: 2460865 - RNA, 19 nt, Artificial Sequence
  Description of Artificial Sequence: Synthetic oligonucleotide
cccacaacucugauguuau

SEQ ID NO: 2460866 - RNA, 19 nt, Artificial Sequence
  Description of Artificial Sequence: Synthetic oligonucleotide
cugaucuuccuggugccuu

SEQ ID NO: 2460867 - RNA, 19 nt, Artificial Sequence
  Description of Artificial Sequence: Synthetic oligonucleotide
caaccucuucaaugccagu

SEQ ID NO: 2460868 - RNA, 19 nt, Artificial Sequence
  Description of Artificial Sequence: Synthetic oligonucleotide
caccuacauuuaucuccaa

SEQ ID NO: 2460869 - RNA, 19 nt, Artificial Sequence
  Description of Artificial Sequence: Synthetic oligonucleotide
cccaaaaggcucuccgagu

SEQ ID NO: 2460870 - RNA, 19 nt, Artificial Sequence
  Description of Artificial Sequence: Synthetic oligonucleotide
gcggaugcccgugcgcuuc

SEQ ID NO: 2460871 - RNA, 19 nt, Artificial Sequence
  Description of Artificial Sequence: Synthetic oligonucleotide
ggguccugaucuuccuggu

SEQ ID NO: 2460872 - RNA, 19 nt, Artificial Sequence
  Description of Artificial Sequence: Synthetic oligonucleotide
gcccgugcgcuuccggcuc

SEQ ID NO: 2460873 - RNA, 19 nt, Artificial Sequence
  Description of Artificial Sequence: Synthetic oligonucleotide
ggacacccaaaaggcucuc

SEQ ID NO: 2460874 - RNA, 19 nt, Artificial Sequence
  Description of Artificial Sequence: Synthetic oligonucleotide
cagaaacuacagaguucuu

SEQ ID NO: 2460875 - RNA, 19 nt, Artificial Sequence
  Description of Artificial Sequence: Synthetic oligonucleotide
gcacauguuccugucucuu

SEQ ID NO: 2460876 - RNA, 19 nt, Artificial Sequence
  Description of Artificial Sequence: Synthetic oligonucleotide
gcucagguuuagggauaga

SEQ ID NO: 2460877 - RNA, 19 nt, Artificial Sequence
  Description of Artificial Sequence: Synthetic oligonucleotide
cggaugcccgugcgcuucc

SEQ ID NO: 2460878 - RNA, 19 nt, Artificial Sequence
  Description of Artificial Sequence: Synthetic oligonucleotide
ccacuggagucacuggcuu

SEQ ID NO: 2460879 - RNA, 19 nt, Artificial Sequence
  Description of Artificial Sequence: Synthetic oligonucleotide
ccuaagcauucccuaccuu

SEQ ID NO: 2460880 - RNA, 19 nt, Artificial Sequence
  Description of Artificial Sequence: Synthetic oligonucleotide
ccaguucaucaccuacauu

SEQ ID NO: 2460881 - RNA, 19 nt, Artificial Sequence
  Description of Artificial Sequence: Synthetic oligonucleotide
cgugcgcuuccggcucagg

SEQ ID NO: 2460882 - RNA, 19 nt, Artificial Sequence
  Description of Artificial Sequence: Synthetic oligonucleotide
ccgugcgcuuccggcucag

SEQ ID NO: 2460883 - RNA, 19 nt, Artificial Sequence
  Description of Artificial Sequence: Synthetic oligonucleotide
cccgugcgcuuccggcuca

SEQ ID NO: 2460884 - RNA, 19 nt, Artificial Sequence
  Description of Artificial Sequence: Synthetic oligonucleotide
cgcggaugcccgugcgcuu

SEQ ID NO: 2460885 - RNA, 19 nt, Artificial Sequence
  Description of Artificial Sequence: Synthetic oligonucleotide
aaaggauucguuuggaccc

SEQ ID NO: 2460886 - RNA, 19 nt, Artificial Sequence
  Description of Artificial Sequence: Synthetic oligonucleotide
caaaauaauauucauugcc

SEQ ID NO: 2460887 - RNA, 19 nt, Artificial Sequence
  Description of Artificial Sequence: Synthetic oligonucleotide
uuugauuaaggcaugcugc

SEQ ID NO: 2460888 - RNA, 19 nt, Artificial Sequence
  Description of Artificial Sequence: Synthetic oligonucleotide
gaguauacugaacucagcg

SEQ ID NO: 2460889 - RNA, 19 nt, Artificial Sequence
  Description of Artificial Sequence: Synthetic oligonucleotide
aauacuggugguuugguga

SEQ ID NO: 2460890 - RNA, 19 nt, Artificial Sequence
  Description of Artificial Sequence: Synthetic oligonucleotide
acaaaauaauauucauugc

SEQ ID NO: 2460891 - RNA, 19 nt, Artificial Sequence
  Description of Artificial Sequence: Synthetic oligonucleotide
aauaauauucauugccuga

SEQ ID NO: 2460892 - RNA, 19 nt, Artificial Sequence
  Description of Artificial Sequence: Synthetic oligonucleotide
ugugaguucuccaaggcag

SEQ ID NO: 2460893 - RNA, 19 nt, Artificial Sequence
  Description of Artificial Sequence: Synthetic oligonucleotide
uucauugcaaaacaaacaa

SEQ ID NO: 2460894 - RNA, 19 nt, Artificial Sequence
  Description of Artificial Sequence: Synthetic oligonucleotide
uuuugauuaaggcaugcug

SEQ ID NO: 2460895 - RNA, 19 nt, Artificial Sequence
  Description of Artificial Sequence: Synthetic oligonucleotide
ucucuuaaagcacuccugg

SEQ ID NO: 2460896 - RNA, 19 nt, Artificial Sequence
  Description of Artificial Sequence: Synthetic oligonucleotide
aguauacugaacucagcgc

SEQ ID NO: 2460897 - RNA, 19 nt, Artificial Sequence
  Description of Artificial Sequence: Synthetic oligonucleotide
ugauuguugggaccgaggg

SEQ ID NO: 2460898 - RNA, 19 nt, Artificial Sequence
  Description of Artificial Sequence: Synthetic oligonucleotide
gaaaggauucguuuggacc

SEQ ID NO: 2460899 - RNA, 19 nt, Artificial Sequence
  Description of Artificial Sequence: Synthetic oligonucleotide
aaacuuuugauuaaggcau

SEQ ID NO: 2460900 - RNA, 19 nt, Artificial Sequence
  Description of Artificial Sequence: Synthetic oligonucleotide
gacaagcaaauacuggugg

SEQ ID NO: 2460901 - RNA, 19 nt, Artificial Sequence
  Description of Artificial Sequence: Synthetic oligonucleotide
ucuaaugcugacauuggug

SEQ ID NO: 2460902 - RNA, 19 nt, Artificial Sequence
  Description of Artificial Sequence: Synthetic oligonucleotide
uauucauugccugacaagc

SEQ ID NO: 2460903 - RNA, 19 nt, Artificial Sequence
  Description of Artificial Sequence: Synthetic oligonucleotide
auaauauucauugccugac

SEQ ID NO: 2460904 - RNA, 19 nt, Artificial Sequence
  Description of Artificial Sequence: Synthetic oligonucleotide
auuuccuucauugcaaaac

SEQ ID NO: 2460905 - RNA, 19 nt, Artificial Sequence
  Description of Artificial Sequence: Synthetic oligonucleotide
ugucagaucucuuuggugu

SEQ ID NO: 2460906 - RNA, 19 nt, Artificial Sequence
  Description of Artificial Sequence: Synthetic oligonucleotide
gaagcagauaugcugcagg

SEQ ID NO: 2460907 - RNA, 19 nt, Artificial Sequence
  Description of Artificial Sequence: Synthetic oligonucleotide
aauauucauugccugacaa

SEQ ID NO: 2460908 - RNA, 19 nt, Artificial Sequence
  Description of Artificial Sequence: Synthetic oligonucleotide
uuuccuucauugcaaaaca

SEQ ID NO: 2460909 - RNA, 19 nt, Artificial Sequence
  Description of Artificial Sequence: Synthetic oligonucleotide
gucauugcagugcagaccc

SEQ ID NO: 2460910 - RNA, 19 nt, Artificial Sequence
  Description of Artificial Sequence: Synthetic oligonucleotide
ucgaguauacugaacucag

SEQ ID NO: 2460911 - RNA, 19 nt, Artificial Sequence
  Description of Artificial Sequence: Synthetic oligonucleotide
uugccugacaagcaaauac

SEQ ID NO: 2460912 - RNA, 19 nt, Artificial Sequence
  Description of Artificial Sequence: Synthetic oligonucleotide
ucuuaaagcacuccuggaa

SEQ ID NO: 2460913 - RNA, 19 nt, Artificial Sequence
  Description of Artificial Sequence: Synthetic oligonucleotide
cuuacuugccuccagcccc

SEQ ID NO: 2460914 - RNA, 19 nt, Artificial Sequence
  Description of Artificial Sequence: Synthetic oligonucleotide
cauugcaaaacaaacaaaa

SEQ ID NO: 2460915 - RNA, 19 nt, Artificial Sequence
  Description of Artificial Sequence: Synthetic oligonucleotide
aguuuccuuacuugccucc

SEQ ID NO: 2460916 - RNA, 19 nt, Artificial Sequence
  Description of Artificial Sequence: Synthetic oligonucleotide
ugacaagggucaaaggcag

SEQ ID NO: 2460917 - RNA, 19 nt, Artificial Sequence
  Description of Artificial Sequence: Synthetic oligonucleotide
cauaucgucaucuccuccc

SEQ ID NO: 2460918 - RNA, 19 nt, Artificial Sequence
  Description of Artificial Sequence: Synthetic oligonucleotide
auauucgggugauuguugg

SEQ ID NO: 2460919 - RNA, 19 nt, Artificial Sequence
  Description of Artificial Sequence: Synthetic oligonucleotide
ucuugucagaucucuuugg

SEQ ID NO: 2460920 - RNA, 19 nt, Artificial Sequence
  Description of Artificial Sequence: Synthetic oligonucleotide
uaaggcaugcugcugugag

SEQ ID NO: 2460921 - RNA, 19 nt, Artificial Sequence
  Description of Artificial Sequence: Synthetic oligonucleotide
cugacauuggugacaaggg

SEQ ID NO: 2460922 - RNA, 19 nt, Artificial Sequence
  Description of Artificial Sequence: Synthetic oligonucleotide
aaaugaagguuguggccuc

SEQ ID NO: 2460923 - RNA, 19 nt, Artificial Sequence
  Description of Artificial Sequence: Synthetic oligonucleotide
cuggaaaugaagguugugg

SEQ ID NO: 2460924 - RNA, 19 nt, Artificial Sequence
  Description of Artificial Sequence: Synthetic oligonucleotide
gaagcaguuuccuuacuug

SEQ ID NO: 2460925 - RNA, 19 nt, Artificial Sequence
  Description of Artificial Sequence: Synthetic oligonucleotide
auucguuuggacccggguc

SEQ ID NO: 2460926 - RNA, 19 nt, Artificial Sequence
  Description of Artificial Sequence: Synthetic oligonucleotide
  modified_base (12)..(12): a, c, u, g, unknown or other
uccgucucaagnuccaucc

SEQ ID NO: 2460927 - RNA, 19 nt, Artificial Sequence
  Description of Artificial Sequence: Synthetic oligonucleotide
ucucuaaugcugacauugg

SEQ ID NO: 2460928 - RNA, 19 nt, Artificial Sequence
  Description of Artificial Sequence: Synthetic oligonucleotide
aaauacuggugguuuggug

SEQ ID NO: 2460929 - RNA, 19 nt, Artificial Sequence
  Description of Artificial Sequence: Synthetic oligonucleotide
uauauucgggugauuguug

SEQ ID NO: 2460930 - RNA, 19 nt, Artificial Sequence
  Description of Artificial Sequence: Synthetic oligonucleotide
aguuccugggcauaucguc

SEQ ID NO: 2460931 - RNA, 19 nt, Artificial Sequence
  Description of Artificial Sequence: Synthetic oligonucleotide
ugggauggcuguauauucg

SEQ ID NO: 2460932 - RNA, 19 nt, Artificial Sequence
  Description of Artificial Sequence: Synthetic oligonucleotide
ggugacaagggucaaaggc

SEQ ID NO: 2460933 - RNA, 19 nt, Artificial Sequence
  Description of Artificial Sequence: Synthetic oligonucleotide
cagacauggugcuaggugc

SEQ ID NO: 2460934 - RNA, 19 nt, Artificial Sequence
  Description of Artificial Sequence: Synthetic oligonucleotide
auauucauugccugacaag

SEQ ID NO: 2460935 - RNA, 19 nt, Artificial Sequence
  Description of Artificial Sequence: Synthetic oligonucleotide
gacgcaggacacuaguggg

SEQ ID NO: 2460936 - RNA, 19 nt, Artificial Sequence
  Description of Artificial Sequence: Synthetic oligonucleotide
uucuugucagaucucuuug

SEQ ID NO: 2460937 - RNA, 19 nt, Artificial Sequence
  Description of Artificial Sequence: Synthetic oligonucleotide
cuaaugcugacauugguga

SEQ ID NO: 2460938 - RNA, 19 nt, Artificial Sequence
  Description of Artificial Sequence: Synthetic oligonucleotide
gucucuaaugcugacauug

SEQ ID NO: 2460939 - RNA, 19 nt, Artificial Sequence
  Description of Artificial Sequence: Synthetic oligonucleotide
ugagucuuuccaucgcagg

SEQ ID NO: 2460940 - RNA, 19 nt, Artificial Sequence
  Description of Artificial Sequence: Synthetic oligonucleotide
agcgguuacagucuaccuc

SEQ ID NO: 2460941 - RNA, 19 nt, Artificial Sequence
  Description of Artificial Sequence: Synthetic oligonucleotide
uguccacaggaacagacac

SEQ ID NO: 2460942 - RNA, 19 nt, Artificial Sequence
  Description of Artificial Sequence: Synthetic oligonucleotide
uucguuuggacccgggucu

SEQ ID NO: 2460943 - RNA, 19 nt, Artificial Sequence
  Description of Artificial Sequence: Synthetic oligonucleotide
aggggaagcagauaugcug

SEQ ID NO: 2460944 - RNA, 19 nt, Artificial Sequence
  Description of Artificial Sequence: Synthetic oligonucleotide
uauacugaacucagcgcug

SEQ ID NO: 2460945 - RNA, 19 nt, Artificial Sequence
  Description of Artificial Sequence: Synthetic oligonucleotide
gaacucagcgcugaagagg

SEQ ID NO: 2460946 - RNA, 19 nt, Artificial Sequence
  Description of Artificial Sequence: Synthetic oligonucleotide
uugauuaaggcaugcugcu

SEQ ID NO: 2460947 - RNA, 19 nt, Artificial Sequence
  Description of Artificial Sequence: Synthetic oligonucleotide
gauuguugggaccgagggg

SEQ ID NO: 2460948 - RNA, 19 nt, Artificial Sequence
  Description of Artificial Sequence: Synthetic oligonucleotide
ucuuggucuuuucagcugu

SEQ ID NO: 2460949 - RNA, 19 nt, Artificial Sequence
  Description of Artificial Sequence: Synthetic oligonucleotide
uuggugacaagggucaaag

SEQ ID NO: 2460950 - RNA, 19 nt, Artificial Sequence
  Description of Artificial Sequence: Synthetic oligonucleotide
auuguugggaccgagggga

SEQ ID NO: 2460951 - RNA, 19 nt, Artificial Sequence
  Description of Artificial Sequence: Synthetic oligonucleotide
uguauauucgggugauugu

SEQ ID NO: 2460952 - RNA, 19 nt, Artificial Sequence
  Description of Artificial Sequence: Synthetic oligonucleotide
aaugcugacauuggugaca

SEQ ID NO: 2460953 - RNA, 19 nt, Artificial Sequence
  Description of Artificial Sequence: Synthetic oligonucleotide
acuuuugauuaaggcaugc

SEQ ID NO: 2460954 - RNA, 19 nt, Artificial Sequence
  Description of Artificial Sequence: Synthetic oligonucleotide
  modified_base (18)..(18): a, c, u, g, unknown or other
ucuaccuccgucucaagnu

SEQ ID NO: 2460955 - RNA, 19 nt, Artificial Sequence
  Description of Artificial Sequence: Synthetic oligonucleotide
agcagcaaaacuuuugauu

SEQ ID NO: 2460956 - RNA, 19 nt, Artificial Sequence
  Description of Artificial Sequence: Synthetic oligonucleotide
uaauauucauugccugaca

SEQ ID NO: 2460957 - RNA, 19 nt, Artificial Sequence
  Description of Artificial Sequence: Synthetic oligonucleotide
aagcagauaugcugcaggu

SEQ ID NO: 2460958 - RNA, 19 nt, Artificial Sequence
  Description of Artificial Sequence: Synthetic oligonucleotide
ugccugacaagcaaauacu

SEQ ID NO: 2460959 - RNA, 19 nt, Artificial Sequence
  Description of Artificial Sequence: Synthetic oligonucleotide
cuucauugcaaaacaaaca

SEQ ID NO: 2460960 - RNA, 19 nt, Artificial Sequence
  Description of Artificial Sequence: Synthetic oligonucleotide
uucauugccugacaagcaa

SEQ ID NO: 2460961 - RNA, 19 nt, Artificial Sequence
  Description of Artificial Sequence: Synthetic oligonucleotide
uuacagucuaccuccgucu

SEQ ID NO: 2460962 - RNA, 19 nt, Artificial Sequence
  Description of Artificial Sequence: Synthetic oligonucleotide
ugcugugaccccugaaagg

SEQ ID NO: 2460963 - RNA, 19 nt, Artificial Sequence
  Description of Artificial Sequence: Synthetic oligonucleotide
uuccucuccacagagcucc

SEQ ID NO: 2460964 - RNA, 19 nt, Artificial Sequence
  Description of Artificial Sequence: Synthetic oligonucleotide
cuugccuccagccccaaag

SEQ ID NO: 2460965 - RNA, 19 nt, Artificial Sequence
  Description of Artificial Sequence: Synthetic oligonucleotide
acucgaguauacugaacuc

SEQ ID NO: 2460966 - RNA, 19 nt, Artificial Sequence
  Description of Artificial Sequence: Synthetic oligonucleotide
caaagcgcccuuuaguuuc

SEQ ID NO: 2460967 - RNA, 19 nt, Artificial Sequence
  Description of Artificial Sequence: Synthetic oligonucleotide
aguguccacaggaacagac

SEQ ID NO: 2460968 - RNA, 19 nt, Artificial Sequence
  Description of Artificial Sequence: Synthetic oligonucleotide
ugcuaggugcuucuuguca

SEQ ID NO: 2460969 - RNA, 19 nt, Artificial Sequence
  Description of Artificial Sequence: Synthetic oligonucleotide
ugaacucagcgcugaagag

SEQ ID NO: 2460970 - RNA, 19 nt, Artificial Sequence
  Description of Artificial Sequence: Synthetic oligonucleotide
uccaucgcaggucauugca

SEQ ID NO: 2460971 - RNA, 19 nt, Artificial Sequence
  Description of Artificial Sequence: Synthetic oligonucleotide
cagacacucgaguauacug

SEQ ID NO: 2460972 - RNA, 19 nt, Artificial Sequence
  Description of Artificial Sequence: Synthetic oligonucleotide
uuuggugaucacagcagac

SEQ ID NO: 2460973 - RNA, 19 nt, Artificial Sequence
  Description of Artificial Sequence: Synthetic oligonucleotide
gcugacauuggugacaagg

SEQ ID NO: 2460974 - RNA, 19 nt, Artificial Sequence
  Description of Artificial Sequence: Synthetic oligonucleotide
aggucauugcagugcagac

SEQ ID NO: 2460975 - RNA, 19 nt, Artificial Sequence
  Description of Artificial Sequence: Synthetic oligonucleotide
ugacauuggugacaagggu

SEQ ID NO: 2460976 - RNA, 19 nt, Artificial Sequence
  Description of Artificial Sequence: Synthetic oligonucleotide
cuguauauucgggugauug

SEQ ID NO: 2460977 - RNA, 19 nt, Artificial Sequence
  Description of Artificial Sequence: Synthetic oligonucleotide
caugaagcaguuuccuuac

SEQ ID NO: 2460978 - RNA, 19 nt, Artificial Sequence
  Description of Artificial Sequence: Synthetic oligonucleotide
aggauuccucuccacagag

SEQ ID NO: 2460979 - RNA, 19 nt, Artificial Sequence
  Description of Artificial Sequence: Synthetic oligonucleotide
ugaaaggauucguuuggac

SEQ ID NO: 2460980 - RNA, 19 nt, Artificial Sequence
  Description of Artificial Sequence: Synthetic oligonucleotide
agcaguuuccuuacuugcc

SEQ ID NO: 2460981 - RNA, 19 nt, Artificial Sequence
  Description of Artificial Sequence: Synthetic oligonucleotide
aacaucacaugcugucccu

SEQ ID NO: 2460982 - RNA, 19 nt, Artificial Sequence
  Description of Artificial Sequence: Synthetic oligonucleotide
uauucgggugauuguuggg

SEQ ID NO: 2460983 - RNA, 19 nt, Artificial Sequence
  Description of Artificial Sequence: Synthetic oligonucleotide
caggacacuagugggaugg

SEQ ID NO: 2460984 - RNA, 19 nt, Artificial Sequence
  Description of Artificial Sequence: Synthetic oligonucleotide
aacucagcgcugaagagga

SEQ ID NO: 2460985 - RNA, 19 nt, Artificial Sequence
  Description of Artificial Sequence: Synthetic oligonucleotide
ugaagcaguuuccuuacuu

SEQ ID NO: 2460986 - RNA, 19 nt, Artificial Sequence
  Description of Artificial Sequence: Synthetic oligonucleotide
uugucagaucucuuuggug

SEQ ID NO: 2460987 - RNA, 19 nt, Artificial Sequence
  Description of Artificial Sequence: Synthetic oligonucleotide
ucagcgcugaagaggagga

SEQ ID NO: 2460988 - RNA, 19 nt, Artificial Sequence
  Description of Artificial Sequence: Synthetic oligonucleotide
guauacugaacucagcgcu

SEQ ID NO: 2460989 - RNA, 19 nt, Artificial Sequence
  Description of Artificial Sequence: Synthetic oligonucleotide
agacccaguguccacagga

SEQ ID NO: 2460990 - RNA, 19 nt, Artificial Sequence
  Description of Artificial Sequence: Synthetic oligonucleotide
caacaucacaugcuguccc

SEQ ID NO: 2460991 - RNA, 19 nt, Artificial Sequence
  Description of Artificial Sequence: Synthetic oligonucleotide
  modified_base (16)..(16): a, c, u, g, unknown or other
uaccuccgucucaagnucc

SEQ ID NO: 2460992 - RNA, 19 nt, Artificial Sequence
  Description of Artificial Sequence: Synthetic oligonucleotide
uuccuuacuugccuccagc

SEQ ID NO: 2460993 - RNA, 19 nt, Artificial Sequence
  Description of Artificial Sequence: Synthetic oligonucleotide
gacacuagugggauggcug

SEQ ID NO: 2460994 - RNA, 19 nt, Artificial Sequence
  Description of Artificial Sequence: Synthetic oligonucleotide
uccuuacuugccuccagcc

SEQ ID NO: 2460995 - RNA, 19 nt, Artificial Sequence
  Description of Artificial Sequence: Synthetic oligonucleotide
gauuaaggcaugcugcugu

SEQ ID NO: 2460996 - RNA, 19 nt, Artificial Sequence
  Description of Artificial Sequence: Synthetic oligonucleotide
accgaggggaagcagauau

SEQ ID NO: 2460997 - RNA, 19 nt, Artificial Sequence
  Description of Artificial Sequence: Synthetic oligonucleotide
ugcaggucucuaaugcuga

SEQ ID NO: 2460998 - RNA, 19 nt, Artificial Sequence
  Description of Artificial Sequence: Synthetic oligonucleotide
uuggugaucacagcagaca

SEQ ID NO: 2460999 - RNA, 19 nt, Artificial Sequence
  Description of Artificial Sequence: Synthetic oligonucleotide
ugucuccuggugcuucugg

SEQ ID NO: 2461000 - RNA, 19 nt, Artificial Sequence
  Description of Artificial Sequence: Synthetic oligonucleotide
uuuccaucgcaggucauug

SEQ ID NO: 2461001 - RNA, 19 nt, Artificial Sequence
  Description of Artificial Sequence: Synthetic oligonucleotide
ugccuccagccccaaagcg

SEQ ID NO: 2461002 - RNA, 19 nt, Artificial Sequence
  Description of Artificial Sequence: Synthetic oligonucleotide
uuuccuuacuugccuccag

SEQ ID NO: 2461003 - RNA, 19 nt, Artificial Sequence
  Description of Artificial Sequence: Synthetic oligonucleotide
agucuuuccaucgcagguc

SEQ ID NO: 2461004 - RNA, 19 nt, Artificial Sequence
  Description of Artificial Sequence: Synthetic oligonucleotide
cucuuugguguuuaccuuc

SEQ ID NO: 2461005 - RNA, 19 nt, Artificial Sequence
  Description of Artificial Sequence: Synthetic oligonucleotide
aaggauucguuuggacccg

SEQ ID NO: 2461006 - RNA, 19 nt, Artificial Sequence
  Description of Artificial Sequence: Synthetic oligonucleotide
agcgcugaagaggaggagg

SEQ ID NO: 2461007 - RNA, 19 nt, Artificial Sequence
  Description of Artificial Sequence: Synthetic oligonucleotide
uuuucagcugucuccuggu

SEQ ID NO: 2461008 - RNA, 19 nt, Artificial Sequence
  Description of Artificial Sequence: Synthetic oligonucleotide
ggaguuccugggcauaucg

SEQ ID NO: 2461009 - RNA, 19 nt, Artificial Sequence
  Description of Artificial Sequence: Synthetic oligonucleotide
cuuaaagcacuccuggaaa

SEQ ID NO: 2461010 - RNA, 19 nt, Artificial Sequence
  Description of Artificial Sequence: Synthetic oligonucleotide
cugaacucagcgcugaaga

SEQ ID NO: 2461011 - RNA, 19 nt, Artificial Sequence
  Description of Artificial Sequence: Synthetic oligonucleotide
ucuucccagcagcaaaacu

SEQ ID NO: 2461012 - RNA, 19 nt, Artificial Sequence
  Description of Artificial Sequence: Synthetic oligonucleotide
uuggacccgggucugcucc

SEQ ID NO: 2461013 - RNA, 19 nt, Artificial Sequence
  Description of Artificial Sequence: Synthetic oligonucleotide
guguuuaccuucuuggucu

SEQ ID NO: 2461014 - RNA, 19 nt, Artificial Sequence
  Description of Artificial Sequence: Synthetic oligonucleotide
gcgguuacagucuaccucc

SEQ ID NO: 2461015 - RNA, 19 nt, Artificial Sequence
  Description of Artificial Sequence: Synthetic oligonucleotide
ugcagugcagacccagugu

SEQ ID NO: 2461016 - RNA, 19 nt, Artificial Sequence
  Description of Artificial Sequence: Synthetic oligonucleotide
uggcuguauauucggguga

SEQ ID NO: 2461017 - RNA, 19 nt, Artificial Sequence
  Description of Artificial Sequence: Synthetic oligonucleotide
gugaucacagcagacacuc

SEQ ID NO: 2461018 - RNA, 19 nt, Artificial Sequence
  Description of Artificial Sequence: Synthetic oligonucleotide
ucauugccugacaagcaaa

SEQ ID NO: 2461019 - RNA, 19 nt, Artificial Sequence
  Description of Artificial Sequence: Synthetic oligonucleotide
gcagcaaaacuuuugauua

SEQ ID NO: 2461020 - RNA, 19 nt, Artificial Sequence
  Description of Artificial Sequence: Synthetic oligonucleotide
ugaucacagcagacacucg

SEQ ID NO: 2461021 - RNA, 19 nt, Artificial Sequence
  Description of Artificial Sequence: Synthetic oligonucleotide
ucacagcagacacucgagu

SEQ ID NO: 2461022 - RNA, 19 nt, Artificial Sequence
  Description of Artificial Sequence: Synthetic oligonucleotide
aucgucaucuccucccugu

SEQ ID NO: 2461023 - RNA, 19 nt, Artificial Sequence
  Description of Artificial Sequence: Synthetic oligonucleotide
ugguguuuaccuucuuggu

SEQ ID NO: 2461024 - RNA, 19 nt, Artificial Sequence
  Description of Artificial Sequence: Synthetic oligonucleotide
cugagucuuuccaucgcag

SEQ ID NO: 2461025 - RNA, 19 nt, Artificial Sequence
  Description of Artificial Sequence: Synthetic oligonucleotide
uuccuucauugcaaaacaa

SEQ ID NO: 2461026 - RNA, 19 nt, Artificial Sequence
  Description of Artificial Sequence: Synthetic oligonucleotide
ccugacaagcaaauacugg

SEQ ID NO: 2461027 - RNA, 19 nt, Artificial Sequence
  Description of Artificial Sequence: Synthetic oligonucleotide
aacuuuugauuaaggcaug

SEQ ID NO: 2461028 - RNA, 19 nt, Artificial Sequence
  Description of Artificial Sequence: Synthetic oligonucleotide
uggugacaagggucaaagg

SEQ ID NO: 2461029 - RNA, 19 nt, Artificial Sequence
  Description of Artificial Sequence: Synthetic oligonucleotide
uaaugcugacauuggugac

SEQ ID NO: 2461030 - RNA, 19 nt, Artificial Sequence
  Description of Artificial Sequence: Synthetic oligonucleotide
gugacaagggucaaaggca

SEQ ID NO: 2461031 - RNA, 19 nt, Artificial Sequence
  Description of Artificial Sequence: Synthetic oligonucleotide
uggucuuuucagcugucuc

SEQ ID NO: 2461032 - RNA, 19 nt, Artificial Sequence
  Description of Artificial Sequence: Synthetic oligonucleotide
cucagcgcugaagaggagg

SEQ ID NO: 2461033 - RNA, 19 nt, Artificial Sequence
  Description of Artificial Sequence: Synthetic oligonucleotide
acaagggucaaaggcagca

SEQ ID NO: 2461034 - RNA, 19 nt, Artificial Sequence
  Description of Artificial Sequence: Synthetic oligonucleotide
cugcugugaccccugaaag

SEQ ID NO: 2461035 - RNA, 19 nt, Artificial Sequence
  Description of Artificial Sequence: Synthetic oligonucleotide
agaucucuuugguguuuac

SEQ ID NO: 2461036 - RNA, 19 nt, Artificial Sequence
  Description of Artificial Sequence: Synthetic oligonucleotide
uucccagcagcaaaacuuu

SEQ ID NO: 2461037 - RNA, 19 nt, Artificial Sequence
  Description of Artificial Sequence: Synthetic oligonucleotide
uggugcuaggugcuucuug

SEQ ID NO: 2461038 - RNA, 19 nt, Artificial Sequence
  Description of Artificial Sequence: Synthetic oligonucleotide
guuuggugaucacagcaga

SEQ ID NO: 2461039 - RNA, 19 nt, Artificial Sequence
  Description of Artificial Sequence: Synthetic oligonucleotide
caaggcagacgcaggacac

SEQ ID NO: 2461040 - RNA, 19 nt, Artificial Sequence
  Description of Artificial Sequence: Synthetic oligonucleotide
acacuagugggauggcugu

SEQ ID NO: 2461041 - RNA, 19 nt, Artificial Sequence
  Description of Artificial Sequence: Synthetic oligonucleotide
gggauggcuguauauucgg

SEQ ID NO: 2461042 - RNA, 19 nt, Artificial Sequence
  Description of Artificial Sequence: Synthetic oligonucleotide
ugauuaaggcaugcugcug

SEQ ID NO: 2461043 - RNA, 19 nt, Artificial Sequence
  Description of Artificial Sequence: Synthetic oligonucleotide
aaggcaugcugcugugagu

SEQ ID NO: 2461044 - RNA, 19 nt, Artificial Sequence
  Description of Artificial Sequence: Synthetic oligonucleotide
auucgggugauuguuggga

SEQ ID NO: 2461045 - RNA, 19 nt, Artificial Sequence
  Description of Artificial Sequence: Synthetic oligonucleotide
uuacuugccuccagcccca

SEQ ID NO: 2461046 - RNA, 19 nt, Artificial Sequence
  Description of Artificial Sequence: Synthetic oligonucleotide
uucgggugauuguugggac

SEQ ID NO: 2461047 - RNA, 19 nt, Artificial Sequence
  Description of Artificial Sequence: Synthetic oligonucleotide
cucccugcuagccagccac

SEQ ID NO: 2461048 - RNA, 19 nt, Artificial Sequence
  Description of Artificial Sequence: Synthetic oligonucleotide
agacacucgaguauacuga

SEQ ID NO: 2461049 - RNA, 19 nt, Artificial Sequence
  Description of Artificial Sequence: Synthetic oligonucleotide
aguuucucuuaaagcacuc

SEQ ID NO: 2461050 - RNA, 19 nt, Artificial Sequence
  Description of Artificial Sequence: Synthetic oligonucleotide
ggugcuucuugucagaucu

SEQ ID NO: 2461051 - RNA, 19 nt, Artificial Sequence
  Description of Artificial Sequence: Synthetic oligonucleotide
uccuggaaaugaagguugu

SEQ ID NO: 2461052 - RNA, 19 nt, Artificial Sequence
  Description of Artificial Sequence: Synthetic oligonucleotide
gugggauggcuguauauuc

SEQ ID NO: 2461053 - RNA, 19 nt, Artificial Sequence
  Description of Artificial Sequence: Synthetic oligonucleotide
ugugaccccugaaaggauu

SEQ ID NO: 2461054 - RNA, 19 nt, Artificial Sequence
  Description of Artificial Sequence: Synthetic oligonucleotide
gccagcaugaagcaguuuc

SEQ ID NO: 2461055 - RNA, 19 nt, Artificial Sequence
  Description of Artificial Sequence: Synthetic oligonucleotide
agagccagcucagcccucc

SEQ ID NO: 2461056 - RNA, 19 nt, Artificial Sequence
  Description of Artificial Sequence: Synthetic oligonucleotide
gucaucuccucccuguguc

SEQ ID NO: 2461057 - RNA, 19 nt, Artificial Sequence
  Description of Artificial Sequence: Synthetic oligonucleotide
gguguuuaccuucuugguc

SEQ ID NO: 2461058 - RNA, 19 nt, Artificial Sequence
  Description of Artificial Sequence: Synthetic oligonucleotide
gcuaggugcuucuugucag

SEQ ID NO: 2461059 - RNA, 19 nt, Artificial Sequence
  Description of Artificial Sequence: Synthetic oligonucleotide
gacacucgaguauacugaa

SEQ ID NO: 2461060 - RNA, 19 nt, Artificial Sequence
  Description of Artificial Sequence: Synthetic oligonucleotide
ucgggugauuguugggacc

SEQ ID NO: 2461061 - RNA, 19 nt, Artificial Sequence
  Description of Artificial Sequence: Synthetic oligonucleotide
auacuggugguuuggugau

SEQ ID NO: 2461062 - RNA, 19 nt, Artificial Sequence
  Description of Artificial Sequence: Synthetic oligonucleotide
ucccuguagccuccagcgg

SEQ ID NO: 2461063 - RNA, 19 nt, Artificial Sequence
  Description of Artificial Sequence: Synthetic oligonucleotide
agcagauaugcugcagguc

SEQ ID NO: 2461064 - RNA, 19 nt, Artificial Sequence
  Description of Artificial Sequence: Synthetic oligonucleotide
aggugcuucuugucagauc

SEQ ID NO: 2461065 - RNA, 19 nt, Artificial Sequence
  Description of Artificial Sequence: Synthetic oligonucleotide
gugauuguugggaccgagg

SEQ ID NO: 2461066 - RNA, 19 nt, Artificial Sequence
  Description of Artificial Sequence: Synthetic oligonucleotide
cauugcagugcagacccag

SEQ ID NO: 2461067 - RNA, 19 nt, Artificial Sequence
  Description of Artificial Sequence: Synthetic oligonucleotide
gcagacauggugcuaggug

SEQ ID NO: 2461068 - RNA, 19 nt, Artificial Sequence
  Description of Artificial Sequence: Synthetic oligonucleotide
acuggugguuuggugauca

SEQ ID NO: 2461069 - RNA, 19 nt, Artificial Sequence
  Description of Artificial Sequence: Synthetic oligonucleotide
aucgcaggucauugcagug

SEQ ID NO: 2461070 - RNA, 19 nt, Artificial Sequence
  Description of Artificial Sequence: Synthetic oligonucleotide
cucgaguauacugaacuca

SEQ ID NO: 2461071 - RNA, 19 nt, Artificial Sequence
  Description of Artificial Sequence: Synthetic oligonucleotide
ucgcaggucauugcagugc

SEQ ID NO: 2461072 - RNA, 19 nt, Artificial Sequence
  Description of Artificial Sequence: Synthetic oligonucleotide
guugggaccgaggggaagc

SEQ ID NO: 2461073 - RNA, 19 nt, Artificial Sequence
  Description of Artificial Sequence: Synthetic oligonucleotide
ugaccccugaaaggauucg

SEQ ID NO: 2461074 - RNA, 19 nt, Artificial Sequence
  Description of Artificial Sequence: Synthetic oligonucleotide
cacucgaguauacugaacu

SEQ ID NO: 2461075 - RNA, 19 nt, Artificial Sequence
  Description of Artificial Sequence: Synthetic oligonucleotide
auaugcugcaggucucuaa

SEQ ID NO: 2461076 - RNA, 19 nt, Artificial Sequence
  Description of Artificial Sequence: Synthetic oligonucleotide
agugcagacccagugucca

SEQ ID NO: 2461077 - RNA, 19 nt, Artificial Sequence
  Description of Artificial Sequence: Synthetic oligonucleotide
agcacuccuggaaaugaag

SEQ ID NO: 2461078 - RNA, 19 nt, Artificial Sequence
  Description of Artificial Sequence: Synthetic oligonucleotide
aaugaagguuguggccucu

SEQ ID NO: 2461079 - RNA, 19 nt, Artificial Sequence
  Description of Artificial Sequence: Synthetic oligonucleotide
gcacuccuggaaaugaagg

SEQ ID NO: 2461080 - RNA, 19 nt, Artificial Sequence
  Description of Artificial Sequence: Synthetic oligonucleotide
ggggaagcagauaugcugc

SEQ ID NO: 2461081 - RNA, 19 nt, Artificial Sequence
  Description of Artificial Sequence: Synthetic oligonucleotide
  modified_base (17)..(17): a, c, u, g, unknown or other
cuaccuccgucucaagnuc

SEQ ID NO: 2461082 - RNA, 19 nt, Artificial Sequence
  Description of Artificial Sequence: Synthetic oligonucleotide
uuccaucgcaggucauugc

SEQ ID NO: 2461083 - RNA, 19 nt, Artificial Sequence
  Description of Artificial Sequence: Synthetic oligonucleotide
ucgucaucuccucccugug

SEQ ID NO: 2461084 - RNA, 19 nt, Artificial Sequence
  Description of Artificial Sequence: Synthetic oligonucleotide
gagucuuuccaucgcaggu

SEQ ID NO: 2461085 - RNA, 19 nt, Artificial Sequence
  Description of Artificial Sequence: Synthetic oligonucleotide
acauggugcuaggugcuuc

SEQ ID NO: 2461086 - RNA, 19 nt, Artificial Sequence
  Description of Artificial Sequence: Synthetic oligonucleotide
gcugcagacauggugcuag

SEQ ID NO: 2461087 - RNA, 19 nt, Artificial Sequence
  Description of Artificial Sequence: Synthetic oligonucleotide
agugggauggcuguauauu

SEQ ID NO: 2461088 - RNA, 19 nt, Artificial Sequence
  Description of Artificial Sequence: Synthetic oligonucleotide
ggcagcaggauuccucucc

SEQ ID NO: 2461089 - RNA, 19 nt, Artificial Sequence
  Description of Artificial Sequence: Synthetic oligonucleotide
cagugcagacccagugucc

SEQ ID NO: 2461090 - RNA, 19 nt, Artificial Sequence
  Description of Artificial Sequence: Synthetic oligonucleotide
cagacgcaggacacuagug

SEQ ID NO: 2461091 - RNA, 19 nt, Artificial Sequence
  Description of Artificial Sequence: Synthetic oligonucleotide
auucauugccugacaagca

SEQ ID NO: 2461092 - RNA, 19 nt, Artificial Sequence
  Description of Artificial Sequence: Synthetic oligonucleotide
cuucccagcagcaaaacuu

SEQ ID NO: 2461093 - RNA, 19 nt, Artificial Sequence
  Description of Artificial Sequence: Synthetic oligonucleotide
ugcagacccaguguccaca

SEQ ID NO: 2461094 - RNA, 19 nt, Artificial Sequence
  Description of Artificial Sequence: Synthetic oligonucleotide
  modified_base (8)..(8): a, c, u, g, unknown or other
ucucaagnuccauccgcau

SEQ ID NO: 2461095 - RNA, 19 nt, Artificial Sequence
  Description of Artificial Sequence: Synthetic oligonucleotide
  modified_base (19)..(19): a, c, u, g, unknown or other
gucuaccuccgucucaagn

SEQ ID NO: 2461096 - RNA, 19 nt, Artificial Sequence
  Description of Artificial Sequence: Synthetic oligonucleotide
acagucuaccuccgucuca

SEQ ID NO: 2461097 - RNA, 19 nt, Artificial Sequence
  Description of Artificial Sequence: Synthetic oligonucleotide
uuaaggcaugcugcuguga

SEQ ID NO: 2461098 - RNA, 19 nt, Artificial Sequence
  Description of Artificial Sequence: Synthetic oligonucleotide
uccucccugugucuggguc

SEQ ID NO: 2461099 - RNA, 19 nt, Artificial Sequence
  Description of Artificial Sequence: Synthetic oligonucleotide
cucuuaaagcacuccugga

SEQ ID NO: 2461100 - RNA, 19 nt, Artificial Sequence
  Description of Artificial Sequence: Synthetic oligonucleotide
cugcuagccagccacccuc

SEQ ID NO: 2461101 - RNA, 19 nt, Artificial Sequence
  Description of Artificial Sequence: Synthetic oligonucleotide
auacugaacucagcgcuga

SEQ ID NO: 2461102 - RNA, 19 nt, Artificial Sequence
  Description of Artificial Sequence: Synthetic oligonucleotide
  modified_base (10)..(10): a, c, u, g, unknown or other
cgucucaagnuccauccgc

SEQ ID NO: 2461103 - RNA, 19 nt, Artificial Sequence
  Description of Artificial Sequence: Synthetic oligonucleotide
agcagacacucgaguauac

SEQ ID NO: 2461104 - RNA, 19 nt, Artificial Sequence
  Description of Artificial Sequence: Synthetic oligonucleotide
uuccugggcauaucgucau

SEQ ID NO: 2461105 - RNA, 19 nt, Artificial Sequence
  Description of Artificial Sequence: Synthetic oligonucleotide
cagauaugcugcaggucuc

SEQ ID NO: 2461106 - RNA, 19 nt, Artificial Sequence
  Description of Artificial Sequence: Synthetic oligonucleotide
  modified_base (13)..(13): a, c, u, g, unknown or other
cuccgucucaagnuccauc

SEQ ID NO: 2461107 - RNA, 19 nt, Artificial Sequence
  Description of Artificial Sequence: Synthetic oligonucleotide
  modified_base (9)..(9): a, c, u, g, unknown or other
gucucaagnuccauccgca

SEQ ID NO: 2461108 - RNA, 19 nt, Artificial Sequence
  Description of Artificial Sequence: Synthetic oligonucleotide
acacucgaguauacugaac

SEQ ID NO: 2461109 - RNA, 19 nt, Artificial Sequence
  Description of Artificial Sequence: Synthetic oligonucleotide
uuggucuuuucagcugucu

SEQ ID NO: 2461110 - RNA, 19 nt, Artificial Sequence
  Description of Artificial Sequence: Synthetic oligonucleotide
agguuguggccucucccug

SEQ ID NO: 2461111 - RNA, 19 nt, Artificial Sequence
  Description of Artificial Sequence: Synthetic oligonucleotide
cugugaguucuccaaggca

SEQ ID NO: 2461112 - RNA, 19 nt, Artificial Sequence
  Description of Artificial Sequence: Synthetic oligonucleotide
caguuuccuuacuugccuc

SEQ ID NO: 2461113 - RNA, 19 nt, Artificial Sequence
  Description of Artificial Sequence: Synthetic oligonucleotide
agauaugcugcaggucucu

SEQ ID NO: 2461114 - RNA, 19 nt, Artificial Sequence
  Description of Artificial Sequence: Synthetic oligonucleotide
cccaacaucacaugcuguc

SEQ ID NO: 2461115 - RNA, 19 nt, Artificial Sequence
  Description of Artificial Sequence: Synthetic oligonucleotide
uguugggaccgaggggaag

SEQ ID NO: 2461116 - RNA, 19 nt, Artificial Sequence
  Description of Artificial Sequence: Synthetic oligonucleotide
ggucauugcagugcagacc

SEQ ID NO: 2461117 - RNA, 19 nt, Artificial Sequence
  Description of Artificial Sequence: Synthetic oligonucleotide
aaggcagacgcaggacacu

SEQ ID NO: 2461118 - RNA, 19 nt, Artificial Sequence
  Description of Artificial Sequence: Synthetic oligonucleotide
guuccugggcauaucguca

SEQ ID NO: 2461119 - RNA, 19 nt, Artificial Sequence
  Description of Artificial Sequence: Synthetic oligonucleotide
caagggucaaaggcagcag

SEQ ID NO: 2461120 - RNA, 19 nt, Artificial Sequence
  Description of Artificial Sequence: Synthetic oligonucleotide
aggacacuagugggauggc

SEQ ID NO: 2461121 - RNA, 19 nt, Artificial Sequence
  Description of Artificial Sequence: Synthetic oligonucleotide
gauucguuuggacccgggu

SEQ ID NO: 2461122 - RNA, 19 nt, Artificial Sequence
  Description of Artificial Sequence: Synthetic oligonucleotide
ccuccagccccaaagcgcc

SEQ ID NO: 2461123 - RNA, 19 nt, Artificial Sequence
  Description of Artificial Sequence: Synthetic oligonucleotide
gaggcgcugggcugcagac

SEQ ID NO: 2461124 - RNA, 19 nt, Artificial Sequence
  Description of Artificial Sequence: Synthetic oligonucleotide
ugcugucccuguagccucc

SEQ ID NO: 2461125 - RNA, 19 nt, Artificial Sequence
  Description of Artificial Sequence: Synthetic oligonucleotide
uccuggugcuucuggaguu

SEQ ID NO: 2461126 - RNA, 19 nt, Artificial Sequence
  Description of Artificial Sequence: Synthetic oligonucleotide
agcugucuccuggugcuuc

SEQ ID NO: 2461127 - RNA, 19 nt, Artificial Sequence
  Description of Artificial Sequence: Synthetic oligonucleotide
acuagugggauggcuguau

SEQ ID NO: 2461128 - RNA, 19 nt, Artificial Sequence
  Description of Artificial Sequence: Synthetic oligonucleotide
agggucaaaggcagcagga

SEQ ID NO: 2461129 - RNA, 19 nt, Artificial Sequence
  Description of Artificial Sequence: Synthetic oligonucleotide
augaagcaguuuccuuacu

SEQ ID NO: 2461130 - RNA, 19 nt, Artificial Sequence
  Description of Artificial Sequence: Synthetic oligonucleotide
gcugugaccccugaaagga

SEQ ID NO: 2461131 - RNA, 19 nt, Artificial Sequence
  Description of Artificial Sequence: Synthetic oligonucleotide
uguuuaccuucuuggucuu

SEQ ID NO: 2461132 - RNA, 19 nt, Artificial Sequence
  Description of Artificial Sequence: Synthetic oligonucleotide
ccuucugagucuuuccauc

SEQ ID NO: 2461133 - RNA, 19 nt, Artificial Sequence
  Description of Artificial Sequence: Synthetic oligonucleotide
cugcagacauggugcuagg

SEQ ID NO: 2461134 - RNA, 19 nt, Artificial Sequence
  Description of Artificial Sequence: Synthetic oligonucleotide
gacaagggucaaaggcagc

SEQ ID NO: 2461135 - RNA, 19 nt, Artificial Sequence
  Description of Artificial Sequence: Synthetic oligonucleotide
uucuucccagcagcaaaac

SEQ ID NO: 2461136 - RNA, 19 nt, Artificial Sequence
  Description of Artificial Sequence: Synthetic oligonucleotide
ucauugcagugcagaccca

SEQ ID NO: 2461137 - RNA, 19 nt, Artificial Sequence
  Description of Artificial Sequence: Synthetic oligonucleotide
caggucauugcagugcaga

SEQ ID NO: 2461138 - RNA, 19 nt, Artificial Sequence
  Description of Artificial Sequence: Synthetic oligonucleotide
cugggcauaucgucaucuc

SEQ ID NO: 2461139 - RNA, 19 nt, Artificial Sequence
  Description of Artificial Sequence: Synthetic oligonucleotide
aaagcgcccuuuaguuucu

SEQ ID NO: 2461140 - RNA, 19 nt, Artificial Sequence
  Description of Artificial Sequence: Synthetic oligonucleotide
gcagugcagacccaguguc

SEQ ID NO: 2461141 - RNA, 19 nt, Artificial Sequence
  Description of Artificial Sequence: Synthetic oligonucleotide
ucucccugcuagccagcca

SEQ ID NO: 2461142 - RNA, 19 nt, Artificial Sequence
  Description of Artificial Sequence: Synthetic oligonucleotide
ggauggcuguauauucggg

SEQ ID NO: 2461143 - RNA, 19 nt, Artificial Sequence
  Description of Artificial Sequence: Synthetic oligonucleotide
gacacagcgguuacagucu

SEQ ID NO: 2461144 - RNA, 19 nt, Artificial Sequence
  Description of Artificial Sequence: Synthetic oligonucleotide
ugcagacauggugcuaggu

SEQ ID NO: 2461145 - RNA, 19 nt, Artificial Sequence
  Description of Artificial Sequence: Synthetic oligonucleotide
agacauggugcuaggugcu

SEQ ID NO: 2461146 - RNA, 19 nt, Artificial Sequence
  Description of Artificial Sequence: Synthetic oligonucleotide
cccuguagccuccagcggc

SEQ ID NO: 2461147 - RNA, 19 nt, Artificial Sequence
  Description of Artificial Sequence: Synthetic oligonucleotide
aucacaugcugucccugua

SEQ ID NO: 2461148 - RNA, 19 nt, Artificial Sequence
  Description of Artificial Sequence: Synthetic oligonucleotide
gguuguggccucucccugc

SEQ ID NO: 2461149 - RNA, 19 nt, Artificial Sequence
  Description of Artificial Sequence: Synthetic oligonucleotide
cuaggugcuucuugucaga

SEQ ID NO: 2461150 - RNA, 19 nt, Artificial Sequence
  Description of Artificial Sequence: Synthetic oligonucleotide
auuggugacaagggucaaa

SEQ ID NO: 2461151 - RNA, 19 nt, Artificial Sequence
  Description of Artificial Sequence: Synthetic oligonucleotide
cccucauuuccuucauugc

SEQ ID NO: 2461152 - RNA, 19 nt, Artificial Sequence
  Description of Artificial Sequence: Synthetic oligonucleotide
aagcacuccuggaaaugaa

SEQ ID NO: 2461153 - RNA, 19 nt, Artificial Sequence
  Description of Artificial Sequence: Synthetic oligonucleotide
uuguugggaccgaggggaa

SEQ ID NO: 2461154 - RNA, 19 nt, Artificial Sequence
  Description of Artificial Sequence: Synthetic oligonucleotide
ucccugcuagccagccacc

SEQ ID NO: 2461155 - RNA, 19 nt, Artificial Sequence
  Description of Artificial Sequence: Synthetic oligonucleotide
gcauaucgucaucuccucc

SEQ ID NO: 2461156 - RNA, 19 nt, Artificial Sequence
  Description of Artificial Sequence: Synthetic oligonucleotide
ggaacagacacagcgguua

SEQ ID NO: 2461157 - RNA, 19 nt, Artificial Sequence
  Description of Artificial Sequence: Synthetic oligonucleotide
ggugcuaggugcuucuugu

SEQ ID NO: 2461158 - RNA, 19 nt, Artificial Sequence
  Description of Artificial Sequence: Synthetic oligonucleotide
uaggugcuucuugucagau

SEQ ID NO: 2461159 - RNA, 19 nt, Artificial Sequence
  Description of Artificial Sequence: Synthetic oligonucleotide
agcgcccuuuaguuucucu

SEQ ID NO: 2461160 - RNA, 19 nt, Artificial Sequence
  Description of Artificial Sequence: Synthetic oligonucleotide
guauauucgggugauuguu

SEQ ID NO: 2461161 - RNA, 19 nt, Artificial Sequence
  Description of Artificial Sequence: Synthetic oligonucleotide
ccaacaucacaugcugucc

SEQ ID NO: 2461162 - RNA, 19 nt, Artificial Sequence
  Description of Artificial Sequence: Synthetic oligonucleotide
acagagcuccccacccuuc

SEQ ID NO: 2461163 - RNA, 19 nt, Artificial Sequence
  Description of Artificial Sequence: Synthetic oligonucleotide
ggugauuguugggaccgag

SEQ ID NO: 2461164 - RNA, 19 nt, Artificial Sequence
  Description of Artificial Sequence: Synthetic oligonucleotide
gccugacaagcaaauacug

SEQ ID NO: 2461165 - RNA, 19 nt, Artificial Sequence
  Description of Artificial Sequence: Synthetic oligonucleotide
cuccaaggcagacgcagga

SEQ ID NO: 2461166 - RNA, 19 nt, Artificial Sequence
  Description of Artificial Sequence: Synthetic oligonucleotide
aggauucguuuggacccgg

SEQ ID NO: 2461167 - RNA, 19 nt, Artificial Sequence
  Description of Artificial Sequence: Synthetic oligonucleotide
caggaacagacacagcggu

SEQ ID NO: 2461168 - RNA, 19 nt, Artificial Sequence
  Description of Artificial Sequence: Synthetic oligonucleotide
agccagccacccucauuuc

SEQ ID NO: 2461169 - RNA, 19 nt, Artificial Sequence
  Description of Artificial Sequence: Synthetic oligonucleotide
caggauuccucuccacaga

SEQ ID NO: 2461170 - RNA, 19 nt, Artificial Sequence
  Description of Artificial Sequence: Synthetic oligonucleotide
agucuaccuccgucucaag

SEQ ID NO: 2461171 - RNA, 19 nt, Artificial Sequence
  Description of Artificial Sequence: Synthetic oligonucleotide
cgaggggaagcagauaugc

SEQ ID NO: 2461172 - RNA, 19 nt, Artificial Sequence
  Description of Artificial Sequence: Synthetic oligonucleotide
auugccugacaagcaaaua

SEQ ID NO: 2461173 - RNA, 19 nt, Artificial Sequence
  Description of Artificial Sequence: Synthetic oligonucleotide
ucuuuccaucgcaggucau

SEQ ID NO: 2461174 - RNA, 19 nt, Artificial Sequence
  Description of Artificial Sequence: Synthetic oligonucleotide
ucguuuggacccgggucug

SEQ ID NO: 2461175 - RNA, 19 nt, Artificial Sequence
  Description of Artificial Sequence: Synthetic oligonucleotide
cccuuccuccagcagagcc

SEQ ID NO: 2461176 - RNA, 19 nt, Artificial Sequence
  Description of Artificial Sequence: Synthetic oligonucleotide
ggcauaucgucaucuccuc

SEQ ID NO: 2461177 - RNA, 19 nt, Artificial Sequence
  Description of Artificial Sequence: Synthetic oligonucleotide
ucccagcagcaaaacuuuu

SEQ ID NO: 2461178 - RNA, 19 nt, Artificial Sequence
  Description of Artificial Sequence: Synthetic oligonucleotide
cagacccaguguccacagg

SEQ ID NO: 2461179 - RNA, 19 nt, Artificial Sequence
  Description of Artificial Sequence: Synthetic oligonucleotide
cucuaaugcugacauuggu

SEQ ID NO: 2461180 - RNA, 19 nt, Artificial Sequence
  Description of Artificial Sequence: Synthetic oligonucleotide
gcagacccaguguccacag

SEQ ID NO: 2461181 - RNA, 19 nt, Artificial Sequence
  Description of Artificial Sequence: Synthetic oligonucleotide
caucgcaggucauugcagu

SEQ ID NO: 2461182 - RNA, 19 nt, Artificial Sequence
  Description of Artificial Sequence: Synthetic oligonucleotide
cuuuugauuaaggcaugcu

SEQ ID NO: 2461183 - RNA, 19 nt, Artificial Sequence
  Description of Artificial Sequence: Synthetic oligonucleotide
ccaucgcaggucauugcag

SEQ ID NO: 2461184 - RNA, 19 nt, Artificial Sequence
  Description of Artificial Sequence: Synthetic oligonucleotide
gugaccccugaaaggauuc

SEQ ID NO: 2461185 - RNA, 19 nt, Artificial Sequence
  Description of Artificial Sequence: Synthetic oligonucleotide
cccaguguccacaggaaca

SEQ ID NO: 2461186 - RNA, 19 nt, Artificial Sequence
  Description of Artificial Sequence: Synthetic oligonucleotide
ugggaccgaggggaagcag

SEQ ID NO: 2461187 - RNA, 19 nt, Artificial Sequence
  Description of Artificial Sequence: Synthetic oligonucleotide
guggccucucccugcuagc

SEQ ID NO: 2461188 - RNA, 19 nt, Artificial Sequence
  Description of Artificial Sequence: Synthetic oligonucleotide
uccugggcauaucgucauc

SEQ ID NO: 2461189 - RNA, 19 nt, Artificial Sequence
  Description of Artificial Sequence: Synthetic oligonucleotide
cauugccugacaagcaaau

SEQ ID NO: 2461190 - RNA, 19 nt, Artificial Sequence
  Description of Artificial Sequence: Synthetic oligonucleotide
aagcgcccuuuaguuucuc

SEQ ID NO: 2461191 - RNA, 19 nt, Artificial Sequence
  Description of Artificial Sequence: Synthetic oligonucleotide
gugaguucuccaaggcaga

SEQ ID NO: 2461192 - RNA, 19 nt, Artificial Sequence
  Description of Artificial Sequence: Synthetic oligonucleotide
acacagcgguuacagucua

SEQ ID NO: 2461193 - RNA, 19 nt, Artificial Sequence
  Description of Artificial Sequence: Synthetic oligonucleotide
acgcaggacacuaguggga

SEQ ID NO: 2461194 - RNA, 19 nt, Artificial Sequence
  Description of Artificial Sequence: Synthetic oligonucleotide
gcgcugaagaggaggaggc

SEQ ID NO: 2461195 - RNA, 19 nt, Artificial Sequence
  Description of Artificial Sequence: Synthetic oligonucleotide
cgggugauuguugggaccg

SEQ ID NO: 2461196 - RNA, 19 nt, Artificial Sequence
  Description of Artificial Sequence: Synthetic oligonucleotide
cagucuaccuccgucucaa

SEQ ID NO: 2461197 - RNA, 19 nt, Artificial Sequence
  Description of Artificial Sequence: Synthetic oligonucleotide
gugucugggucugggcccc

SEQ ID NO: 2461198 - RNA, 19 nt, Artificial Sequence
  Description of Artificial Sequence: Synthetic oligonucleotide
gccuccagccccaaagcgc

SEQ ID NO: 2461199 - RNA, 19 nt, Artificial Sequence
  Description of Artificial Sequence: Synthetic oligonucleotide
ccaaggcagacgcaggaca

SEQ ID NO: 2461200 - RNA, 19 nt, Artificial Sequence
  Description of Artificial Sequence: Synthetic oligonucleotide
gacccaguguccacaggaa

SEQ ID NO: 2461201 - RNA, 19 nt, Artificial Sequence
  Description of Artificial Sequence: Synthetic oligonucleotide
uggacccgggucugcuccu

SEQ ID NO: 2461202 - RNA, 19 nt, Artificial Sequence
  Description of Artificial Sequence: Synthetic oligonucleotide
aggcagacgcaggacacua

SEQ ID NO: 2461203 - RNA, 19 nt, Artificial Sequence
  Description of Artificial Sequence: Synthetic oligonucleotide
ggauucguuuggacccggg

SEQ ID NO: 2461204 - RNA, 19 nt, Artificial Sequence
  Description of Artificial Sequence: Synthetic oligonucleotide
gauaugcugcaggucucua

SEQ ID NO: 2461205 - RNA, 19 nt, Artificial Sequence
  Description of Artificial Sequence: Synthetic oligonucleotide
gggaagcagauaugcugca

SEQ ID NO: 2461206 - RNA, 19 nt, Artificial Sequence
  Description of Artificial Sequence: Synthetic oligonucleotide
gcagcaggauuccucucca

SEQ ID NO: 2461207 - RNA, 19 nt, Artificial Sequence
  Description of Artificial Sequence: Synthetic oligonucleotide
agccccaaagcgcccuuua

SEQ ID NO: 2461208 - RNA, 19 nt, Artificial Sequence
  Description of Artificial Sequence: Synthetic oligonucleotide
gagccagcucagcccuccc

SEQ ID NO: 2461209 - RNA, 19 nt, Artificial Sequence
  Description of Artificial Sequence: Synthetic oligonucleotide
gggcauaucgucaucuccu

SEQ ID NO: 2461210 - RNA, 19 nt, Artificial Sequence
  Description of Artificial Sequence: Synthetic oligonucleotide
  modified_base (11)..(11): a, c, u, g, unknown or other
ccgucucaagnuccauccg

SEQ ID NO: 2461211 - RNA, 19 nt, Artificial Sequence
  Description of Artificial Sequence: Synthetic oligonucleotide
cuagugggauggcuguaua

SEQ ID NO: 2461212 - RNA, 19 nt, Artificial Sequence
  Description of Artificial Sequence: Synthetic oligonucleotide
gugcagacccaguguccac

SEQ ID NO: 2461213 - RNA, 19 nt, Artificial Sequence
  Description of Artificial Sequence: Synthetic oligonucleotide
gccccaaagcgcccuuuag

SEQ ID NO: 2461214 - RNA, 19 nt, Artificial Sequence
  Description of Artificial Sequence: Synthetic oligonucleotide
accccugaaaggauucguu

SEQ ID NO: 2461215 - RNA, 19 nt, Artificial Sequence
  Description of Artificial Sequence: Synthetic oligonucleotide
uacuggugguuuggugauc

SEQ ID NO: 2461216 - RNA, 19 nt, Artificial Sequence
  Description of Artificial Sequence: Synthetic oligonucleotide
gcccuuuaguuucucuuaa

SEQ ID NO: 2461217 - RNA, 19 nt, Artificial Sequence
  Description of Artificial Sequence: Synthetic oligonucleotide
gaggggaagcagauaugcu

SEQ ID NO: 2461218 - RNA, 19 nt, Artificial Sequence
  Description of Artificial Sequence: Synthetic oligonucleotide
caaauacuggugguuuggu

SEQ ID NO: 2461219 - RNA, 19 nt, Artificial Sequence
  Description of Artificial Sequence: Synthetic oligonucleotide
gcaggucucuaaugcugac

SEQ ID NO: 2461220 - RNA, 19 nt, Artificial Sequence
  Description of Artificial Sequence: Synthetic oligonucleotide
gaccccugaaaggauucgu

SEQ ID NO: 2461221 - RNA, 19 nt, Artificial Sequence
  Description of Artificial Sequence: Synthetic oligonucleotide
cagcgcugaagaggaggag

SEQ ID NO: 2461222 - RNA, 19 nt, Artificial Sequence
  Description of Artificial Sequence: Synthetic oligonucleotide
gaguuccugggcauaucgu

SEQ ID NO: 2461223 - RNA, 19 nt, Artificial Sequence
  Description of Artificial Sequence: Synthetic oligonucleotide
gucagaucucuuugguguu

SEQ ID NO: 2461224 - RNA, 19 nt, Artificial Sequence
  Description of Artificial Sequence: Synthetic oligonucleotide
gcaggacacuagugggaug

SEQ ID NO: 2461225 - RNA, 19 nt, Artificial Sequence
  Description of Artificial Sequence: Synthetic oligonucleotide
gggaccgaggggaagcaga

SEQ ID NO: 2461226 - RNA, 19 nt, Artificial Sequence
  Description of Artificial Sequence: Synthetic oligonucleotide
cagcagacacucgaguaua

SEQ ID NO: 2461227 - RNA, 19 nt, Artificial Sequence
  Description of Artificial Sequence: Synthetic oligonucleotide
gcagacgcaggacacuagu

SEQ ID NO: 2461228 - RNA, 19 nt, Artificial Sequence
  Description of Artificial Sequence: Synthetic oligonucleotide
ccuggaaaugaagguugug

SEQ ID NO: 2461229 - RNA, 19 nt, Artificial Sequence
  Description of Artificial Sequence: Synthetic oligonucleotide
ggcagacgcaggacacuag

SEQ ID NO: 2461230 - RNA, 19 nt, Artificial Sequence
  Description of Artificial Sequence: Synthetic oligonucleotide
cagcaugaagcaguuuccu

SEQ ID NO: 2461231 - RNA, 19 nt, Artificial Sequence
  Description of Artificial Sequence: Synthetic oligonucleotide
acucagcgcugaagaggag

SEQ ID NO: 2461232 - RNA, 19 nt, Artificial Sequence
  Description of Artificial Sequence: Synthetic oligonucleotide
guuuggacccgggucugcu

SEQ ID NO: 2461233 - RNA, 19 nt, Artificial Sequence
  Description of Artificial Sequence: Synthetic oligonucleotide
ccgaggggaagcagauaug

SEQ ID NO: 2461234 - RNA, 19 nt, Artificial Sequence
  Description of Artificial Sequence: Synthetic oligonucleotide
ccgggucugcuccucugcc

SEQ ID NO: 2461235 - RNA, 19 nt, Artificial Sequence
  Description of Artificial Sequence: Synthetic oligonucleotide
cagcgguuacagucuaccu

SEQ ID NO: 2461236 - RNA, 19 nt, Artificial Sequence
  Description of Artificial Sequence: Synthetic oligonucleotide
ggcgcugggcugcagacau

SEQ ID NO: 2461237 - RNA, 19 nt, Artificial Sequence
  Description of Artificial Sequence: Synthetic oligonucleotide
ccccuucugagucuuucca

SEQ ID NO: 2461238 - RNA, 19 nt, Artificial Sequence
  Description of Artificial Sequence: Synthetic oligonucleotide
cuuuccaucgcaggucauu

SEQ ID NO: 2461239 - RNA, 19 nt, Artificial Sequence
  Description of Artificial Sequence: Synthetic oligonucleotide
ggugaucacagcagacacu

SEQ ID NO: 2461240 - RNA, 19 nt, Artificial Sequence
  Description of Artificial Sequence: Synthetic oligonucleotide
cccgggucugcuccucugc

SEQ ID NO: 2461241 - RNA, 19 nt, Artificial Sequence
  Description of Artificial Sequence: Synthetic oligonucleotide
cgguuacagucuaccuccg

SEQ ID NO: 2461242 - RNA, 19 nt, Artificial Sequence
  Description of Artificial Sequence: Synthetic oligonucleotide
cauuggugacaagggucaa

SEQ ID NO: 2461243 - RNA, 19 nt, Artificial Sequence
  Description of Artificial Sequence: Synthetic oligonucleotide
gguuacagucuaccuccgu

SEQ ID NO: 2461244 - RNA, 19 nt, Artificial Sequence
  Description of Artificial Sequence: Synthetic oligonucleotide
cccaaagcgcccuuuaguu

SEQ ID NO: 2461245 - RNA, 19 nt, Artificial Sequence
  Description of Artificial Sequence: Synthetic oligonucleotide
cccugcuagccagccaccc

SEQ ID NO: 2461246 - RNA, 19 nt, Artificial Sequence
  Description of Artificial Sequence: Synthetic oligonucleotide
gcaggucauugcagugcag

SEQ ID NO: 2461247 - RNA, 19 nt, Artificial Sequence
  Description of Artificial Sequence: Synthetic oligonucleotide
cccuuuaguuucucuuaaa

SEQ ID NO: 2461248 - RNA, 19 nt, Artificial Sequence
  Description of Artificial Sequence: Synthetic oligonucleotide
cacagagcuccccacccuu

SEQ ID NO: 2461249 - RNA, 19 nt, Artificial Sequence
  Description of Artificial Sequence: Synthetic oligonucleotide
cugugaccccugaaaggau

SEQ ID NO: 2461250 - RNA, 19 nt, Artificial Sequence
  Description of Artificial Sequence: Synthetic oligonucleotide
gaccgaggggaagcagaua

SEQ ID NO: 2461251 - RNA, 19 nt, Artificial Sequence
  Description of Artificial Sequence: Synthetic oligonucleotide
ccucucccugcuagccagc

SEQ ID NO: 2461252 - RNA, 19 nt, Artificial Sequence
  Description of Artificial Sequence: Synthetic oligonucleotide
gacauggugcuaggugcuu

SEQ ID NO: 2461253 - RNA, 19 nt, Artificial Sequence
  Description of Artificial Sequence: Synthetic oligonucleotide
uacuugccuccagccccaa

SEQ ID NO: 2461254 - RNA, 19 nt, Artificial Sequence
  Description of Artificial Sequence: Synthetic oligonucleotide
ggcuguauauucgggugau

SEQ ID NO: 2461255 - RNA, 19 nt, Artificial Sequence
  Description of Artificial Sequence: Synthetic oligonucleotide
ggacacuagugggauggcu

SEQ ID NO: 2461256 - RNA, 19 nt, Artificial Sequence
  Description of Artificial Sequence: Synthetic oligonucleotide
gacccgggucugcuccucu

SEQ ID NO: 2461257 - RNA, 19 nt, Artificial Sequence
  Description of Artificial Sequence: Synthetic oligonucleotide
gcagacacucgaguauacu

SEQ ID NO: 2461258 - RNA, 19 nt, Artificial Sequence
  Description of Artificial Sequence: Synthetic oligonucleotide
gcgcccuuuaguuucucuu

SEQ ID NO: 2461259 - RNA, 19 nt, Artificial Sequence
  Description of Artificial Sequence: Synthetic oligonucleotide
caaaggcagcaggauuccu

SEQ ID NO: 2461260 - RNA, 19 nt, Artificial Sequence
  Description of Artificial Sequence: Synthetic oligonucleotide
cacuagugggauggcugua

SEQ ID NO: 2461261 - RNA, 19 nt, Artificial Sequence
  Description of Artificial Sequence: Synthetic oligonucleotide
ccugggcauaucgucaucu

SEQ ID NO: 2461262 - RNA, 19 nt, Artificial Sequence
  Description of Artificial Sequence: Synthetic oligonucleotide
ccccaaagcgcccuuuagu

SEQ ID NO: 2461263 - RNA, 19 nt, Artificial Sequence
  Description of Artificial Sequence: Synthetic oligonucleotide
cgcccuuuaguuucucuua

SEQ ID NO: 2461264 - RNA, 19 nt, Artificial Sequence
  Description of Artificial Sequence: Synthetic oligonucleotide
ggucucuaaugcugacauu

SEQ ID NO: 2461265 - RNA, 19 nt, Artificial Sequence
  Description of Artificial Sequence: Synthetic oligonucleotide
ccaaagcgcccuuuaguuu

SEQ ID NO: 2461266 - RNA, 19 nt, Artificial Sequence
  Description of Artificial Sequence: Synthetic oligonucleotide
gggugauuguugggaccga

SEQ ID NO: 2461267 - RNA, 19 nt, Artificial Sequence
  Description of Artificial Sequence: Synthetic oligonucleotide
gcggcugcugugaccccug

SEQ ID NO: 2461268 - RNA, 19 nt, Artificial Sequence
  Description of Artificial Sequence: Synthetic oligonucleotide
ggaccgaggggaagcagau

SEQ ID NO: 2461269 - RNA, 19 nt, Artificial Sequence
  Description of Artificial Sequence: Synthetic oligonucleotide
ccucccugugucugggucu

SEQ ID NO: 2461270 - RNA, 19 nt, Artificial Sequence
  Description of Artificial Sequence: Synthetic oligonucleotide
cccuucugagucuuuccau

SEQ ID NO: 2461271 - RNA, 19 nt, Artificial Sequence
  Description of Artificial Sequence: Synthetic oligonucleotide
cguuuggacccgggucugc

SEQ ID NO: 2461272 - RNA, 19 nt, Artificial Sequence
  Description of Artificial Sequence: Synthetic oligonucleotide
cacccucauuuccuucauu

SEQ ID NO: 2461273 - RNA, 19 nt, Artificial Sequence
  Description of Artificial Sequence: Synthetic oligonucleotide
ccugcuagccagccacccu

SEQ ID NO: 2461274 - RNA, 19 nt, Artificial Sequence
  Description of Artificial Sequence: Synthetic oligonucleotide
ggacccgggucugcuccuc

SEQ ID NO: 2461275 - RNA, 19 nt, Artificial Sequence
  Description of Artificial Sequence: Synthetic oligonucleotide
ggcugcagacauggugcua

SEQ ID NO: 2461276 - RNA, 19 nt, Artificial Sequence
  Description of Artificial Sequence: Synthetic oligonucleotide
ccacagagcuccccacccu

SEQ ID NO: 2461277 - RNA, 19 nt, Artificial Sequence
  Description of Artificial Sequence: Synthetic oligonucleotide
cgucaucuccucccugugu

SEQ ID NO: 2461278 - RNA, 19 nt, Artificial Sequence
  Description of Artificial Sequence: Synthetic oligonucleotide
gcuguauauucgggugauu

SEQ ID NO: 2461279 - RNA, 19 nt, Artificial Sequence
  Description of Artificial Sequence: Synthetic oligonucleotide
cgcaggacacuagugggau

SEQ ID NO: 2461280 - RNA, 19 nt, Artificial Sequence
  Description of Artificial Sequence: Synthetic oligonucleotide
  modified_base (14)..(14): a, c, u, g, unknown or other
ccuccgucucaagnuccau

SEQ ID NO: 2461281 - RNA, 19 nt, Artificial Sequence
  Description of Artificial Sequence: Synthetic oligonucleotide
cagccccaaagcgcccuuu

SEQ ID NO: 2461282 - RNA, 19 nt, Artificial Sequence
  Description of Artificial Sequence: Synthetic oligonucleotide
cagcugucuccuggugcuu

SEQ ID NO: 2461283 - RNA, 19 nt, Artificial Sequence
  Description of Artificial Sequence: Synthetic oligonucleotide
ccagccccaaagcgcccuu

SEQ ID NO: 2461284 - RNA, 19 nt, Artificial Sequence
  Description of Artificial Sequence: Synthetic oligonucleotide
aauuauuuggaacccaacc

SEQ ID NO: 2461285 - RNA, 19 nt, Artificial Sequence
  Description of Artificial Sequence: Synthetic oligonucleotide
aaaacuaggcaacauaauc

SEQ ID NO: 2461286 - RNA, 19 nt, Artificial Sequence
  Description of Artificial Sequence: Synthetic oligonucleotide
uaagauagagauaacaaug

SEQ ID NO: 2461287 - RNA, 19 nt, Artificial Sequence
  Description of Artificial Sequence: Synthetic oligonucleotide
auaacaauguugaagagcc

SEQ ID NO: 2461288 - RNA, 19 nt, Artificial Sequence
  Description of Artificial Sequence: Synthetic oligonucleotide
augaaugcuacuuugguac

SEQ ID NO: 2461289 - RNA, 19 nt, Artificial Sequence
  Description of Artificial Sequence: Synthetic oligonucleotide
aaacuaggcaacauaaucc

SEQ ID NO: 2461290 - RNA, 19 nt, Artificial Sequence
  Description of Artificial Sequence: Synthetic oligonucleotide
aaaauacucauuuucauuu

SEQ ID NO: 2461291 - RNA, 19 nt, Artificial Sequence
  Description of Artificial Sequence: Synthetic oligonucleotide
aacuaggcaacauaauccg

SEQ ID NO: 2461292 - RNA, 19 nt, Artificial Sequence
  Description of Artificial Sequence: Synthetic oligonucleotide
cuucagauguucuauaugg

SEQ ID NO: 2461293 - RNA, 19 nt, Artificial Sequence
  Description of Artificial Sequence: Synthetic oligonucleotide
auaacucauguguauaccc

SEQ ID NO: 2461294 - RNA, 19 nt, Artificial Sequence
  Description of Artificial Sequence: Synthetic oligonucleotide
auucuugggcgucagaucc

SEQ ID NO: 2461295 - RNA, 19 nt, Artificial Sequence
  Description of Artificial Sequence: Synthetic oligonucleotide
aagucagaaaggcugugcc

SEQ ID NO: 2461296 - RNA, 19 nt, Artificial Sequence
  Description of Artificial Sequence: Synthetic oligonucleotide
uuaagaucgauuuucuuca

SEQ ID NO: 2461297 - RNA, 19 nt, Artificial Sequence
  Description of Artificial Sequence: Synthetic oligonucleotide
uguucuauaugguacaucu

SEQ ID NO: 2461298 - RNA, 19 nt, Artificial Sequence
  Description of Artificial Sequence: Synthetic oligonucleotide
guuuauguagccuugguug

SEQ ID NO: 2461299 - RNA, 19 nt, Artificial Sequence
  Description of Artificial Sequence: Synthetic oligonucleotide
aauaacucauguguauacc

SEQ ID NO: 2461300 - RNA, 19 nt, Artificial Sequence
  Description of Artificial Sequence: Synthetic oligonucleotide
uucuauaugguacaucucu

SEQ ID NO: 2461301 - RNA, 19 nt, Artificial Sequence
  Description of Artificial Sequence: Synthetic oligonucleotide
aguaguaagauagagauaa

SEQ ID NO: 2461302 - RNA, 19 nt, Artificial Sequence
  Description of Artificial Sequence: Synthetic oligonucleotide
gaugaagucagaaaggcug

SEQ ID NO: 2461303 - RNA, 19 nt, Artificial Sequence
  Description of Artificial Sequence: Synthetic oligonucleotide
auuauuuggaacccaacca

SEQ ID NO: 2461304 - RNA, 19 nt, Artificial Sequence
  Description of Artificial Sequence: Synthetic oligonucleotide
gauagagauaacaauguug

SEQ ID NO: 2461305 - RNA, 19 nt, Artificial Sequence
  Description of Artificial Sequence: Synthetic oligonucleotide
uguguauacccucuuaaga

SEQ ID NO: 2461306 - RNA, 19 nt, Artificial Sequence
  Description of Artificial Sequence: Synthetic oligonucleotide
ugcaugcuuaauuauuugg

SEQ ID NO: 2461307 - RNA, 19 nt, Artificial Sequence
  Description of Artificial Sequence: Synthetic oligonucleotide
aaauuugcaugcuuaauua

SEQ ID NO: 2461308 - RNA, 19 nt, Artificial Sequence
  Description of Artificial Sequence: Synthetic oligonucleotide
uuauuuggaacccaaccac

SEQ ID NO: 2461309 - RNA, 19 nt, Artificial Sequence
  Description of Artificial Sequence: Synthetic oligonucleotide
uguaguucccauuaguagu

SEQ ID NO: 2461310 - RNA, 19 nt, Artificial Sequence
  Description of Artificial Sequence: Synthetic oligonucleotide
ucuucucuuaauaauaaua

SEQ ID NO: 2461311 - RNA, 19 nt, Artificial Sequence
  Description of Artificial Sequence: Synthetic oligonucleotide
gauaacaauguugaagagc

SEQ ID NO: 2461312 - RNA, 19 nt, Artificial Sequence
  Description of Artificial Sequence: Synthetic oligonucleotide
cugcaguucaguaaaauac

SEQ ID NO: 2461313 - RNA, 19 nt, Artificial Sequence
  Description of Artificial Sequence: Synthetic oligonucleotide
aauucuugggcgucagauc

SEQ ID NO: 2461314 - RNA, 19 nt, Artificial Sequence
  Description of Artificial Sequence: Synthetic oligonucleotide
cuaggcaacauaauccggg

SEQ ID NO: 2461315 - RNA, 19 nt, Artificial Sequence
  Description of Artificial Sequence: Synthetic oligonucleotide
auagagauaacaauguuga

SEQ ID NO: 2461316 - RNA, 19 nt, Artificial Sequence
  Description of Artificial Sequence: Synthetic oligonucleotide
aacucauguguauacccuc

SEQ ID NO: 2461317 - RNA, 19 nt, Artificial Sequence
  Description of Artificial Sequence: Synthetic oligonucleotide
aggucagucacugacagac

SEQ ID NO: 2461318 - RNA, 19 nt, Artificial Sequence
  Description of Artificial Sequence: Synthetic oligonucleotide
ucaacugcaguucaguaaa

SEQ ID NO: 2461319 - RNA, 19 nt, Artificial Sequence
  Description of Artificial Sequence: Synthetic oligonucleotide
acugacagacacuaauaac

SEQ ID NO: 2461320 - RNA, 19 nt, Artificial Sequence
  Description of Artificial Sequence: Synthetic oligonucleotide
uuaauuauuuggaacccaa

SEQ ID NO: 2461321 - RNA, 19 nt, Artificial Sequence
  Description of Artificial Sequence: Synthetic oligonucleotide
ucuuguuucaccugaggca

SEQ ID NO: 2461322 - RNA, 19 nt, Artificial Sequence
  Description of Artificial Sequence: Synthetic oligonucleotide
uuuggauuccauuuccuga

SEQ ID NO: 2461323 - RNA, 19 nt, Artificial Sequence
  Description of Artificial Sequence: Synthetic oligonucleotide
aagagccaauuaugaaugc

SEQ ID NO: 2461324 - RNA, 19 nt, Artificial Sequence
  Description of Artificial Sequence: Synthetic oligonucleotide
gacacuaauaacucaugug

SEQ ID NO: 2461325 - RNA, 19 nt, Artificial Sequence
  Description of Artificial Sequence: Synthetic oligonucleotide
uucaccugaggcaagguca

SEQ ID NO: 2461326 - RNA, 19 nt, Artificial Sequence
  Description of Artificial Sequence: Synthetic oligonucleotide
cccauuaguaguaagauag

SEQ ID NO: 2461327 - RNA, 19 nt, Artificial Sequence
  Description of Artificial Sequence: Synthetic oligonucleotide
aacccaaccacuucagaug

SEQ ID NO: 2461328 - RNA, 19 nt, Artificial Sequence
  Description of Artificial Sequence: Synthetic oligonucleotide
uuuauguagccuugguugc

SEQ ID NO: 2461329 - RNA, 19 nt, Artificial Sequence
  Description of Artificial Sequence: Synthetic oligonucleotide
aguucaguaaaauacucau

SEQ ID NO: 2461330 - RNA, 19 nt, Artificial Sequence
  Description of Artificial Sequence: Synthetic oligonucleotide
agaaaagcggauuggggag

SEQ ID NO: 2461331 - RNA, 19 nt, Artificial Sequence
  Description of Artificial Sequence: Synthetic oligonucleotide
uuaugaaugcuacuuuggu

SEQ ID NO: 2461332 - RNA, 19 nt, Artificial Sequence
  Description of Artificial Sequence: Synthetic oligonucleotide
uauaugguacaucucuaga

SEQ ID NO: 2461333 - RNA, 19 nt, Artificial Sequence
  Description of Artificial Sequence: Synthetic oligonucleotide
uaauaacucauguguauac

SEQ ID NO: 2461334 - RNA, 19 nt, Artificial Sequence
  Description of Artificial Sequence: Synthetic oligonucleotide
aagauagagauaacaaugu

SEQ ID NO: 2461335 - RNA, 19 nt, Artificial Sequence
  Description of Artificial Sequence: Synthetic oligonucleotide
ucagaucccaggcaaaacu

SEQ ID NO: 2461336 - RNA, 19 nt, Artificial Sequence
  Description of Artificial Sequence: Synthetic oligonucleotide
ugcaguucaguaaaauacu

SEQ ID NO: 2461337 - RNA, 19 nt, Artificial Sequence
  Description of Artificial Sequence: Synthetic oligonucleotide
aacacaaggucugugucag

SEQ ID NO: 2461338 - RNA, 19 nt, Artificial Sequence
  Description of Artificial Sequence: Synthetic oligonucleotide
cagauguucuauaugguac

SEQ ID NO: 2461339 - RNA, 19 nt, Artificial Sequence
  Description of Artificial Sequence: Synthetic oligonucleotide
uuugcaugcuuaauuauuu

SEQ ID NO: 2461340 - RNA, 19 nt, Artificial Sequence
  Description of Artificial Sequence: Synthetic oligonucleotide
ucuaccuacuugcugcuug

SEQ ID NO: 2461341 - RNA, 19 nt, Artificial Sequence
  Description of Artificial Sequence: Synthetic oligonucleotide
acugcuaacaguuuaugua

SEQ ID NO: 2461342 - RNA, 19 nt, Artificial Sequence
  Description of Artificial Sequence: Synthetic oligonucleotide
aauguugaagagccaauua

SEQ ID NO: 2461343 - RNA, 19 nt, Artificial Sequence
  Description of Artificial Sequence: Synthetic oligonucleotide
gucucuaccuacuugcugc

SEQ ID NO: 2461344 - RNA, 19 nt, Artificial Sequence
  Description of Artificial Sequence: Synthetic oligonucleotide
uucucuuaauaauaauagu

SEQ ID NO: 2461345 - RNA, 19 nt, Artificial Sequence
  Description of Artificial Sequence: Synthetic oligonucleotide
caucucuagauuuggauuc

SEQ ID NO: 2461346 - RNA, 19 nt, Artificial Sequence
  Description of Artificial Sequence: Synthetic oligonucleotide
aaugcuacuuugguaccgg

SEQ ID NO: 2461347 - RNA, 19 nt, Artificial Sequence
  Description of Artificial Sequence: Synthetic oligonucleotide
uggggagaagaacagaaaa

SEQ ID NO: 2461348 - RNA, 19 nt, Artificial Sequence
  Description of Artificial Sequence: Synthetic oligonucleotide
guauacccucuuaagaucg

SEQ ID NO: 2461349 - RNA, 19 nt, Artificial Sequence
  Description of Artificial Sequence: Synthetic oligonucleotide
uuuacugcuaacaguuuau

SEQ ID NO: 2461350 - RNA, 19 nt, Artificial Sequence
  Description of Artificial Sequence: Synthetic oligonucleotide
acuaauaacucauguguau

SEQ ID NO: 2461351 - RNA, 19 nt, Artificial Sequence
  Description of Artificial Sequence: Synthetic oligonucleotide
aacaauguugaagagccaa

SEQ ID NO: 2461352 - RNA, 19 nt, Artificial Sequence
  Description of Artificial Sequence: Synthetic oligonucleotide
cucuuguuucaccugaggc

SEQ ID NO: 2461353 - RNA, 19 nt, Artificial Sequence
  Description of Artificial Sequence: Synthetic oligonucleotide
caaggucugugucaggugg

SEQ ID NO: 2461354 - RNA, 19 nt, Artificial Sequence
  Description of Artificial Sequence: Synthetic oligonucleotide
auaugguacaucucuagau

SEQ ID NO: 2461355 - RNA, 19 nt, Artificial Sequence
  Description of Artificial Sequence: Synthetic oligonucleotide
auuuggauuccauuuccug

SEQ ID NO: 2461356 - RNA, 19 nt, Artificial Sequence
  Description of Artificial Sequence: Synthetic oligonucleotide
uaugguacaucucuagauu

SEQ ID NO: 2461357 - RNA, 19 nt, Artificial Sequence
  Description of Artificial Sequence: Synthetic oligonucleotide
agaagaacagaaaagcgga

SEQ ID NO: 2461358 - RNA, 19 nt, Artificial Sequence
  Description of Artificial Sequence: Synthetic oligonucleotide
cauuaguaguaagauagag

SEQ ID NO: 2461359 - RNA, 19 nt, Artificial Sequence
  Description of Artificial Sequence: Synthetic oligonucleotide
uauuuggaacccaaccacu

SEQ ID NO: 2461360 - RNA, 19 nt, Artificial Sequence
  Description of Artificial Sequence: Synthetic oligonucleotide
auuggggaggggcaguaac

SEQ ID NO: 2461361 - RNA, 19 nt, Artificial Sequence
  Description of Artificial Sequence: Synthetic oligonucleotide
uaggcaacauaauccgggg

SEQ ID NO: 2461362 - RNA, 19 nt, Artificial Sequence
  Description of Artificial Sequence: Synthetic oligonucleotide
aguaagauagagauaacaa

SEQ ID NO: 2461363 - RNA, 19 nt, Artificial Sequence
  Description of Artificial Sequence: Synthetic oligonucleotide
uaacucauguguauacccu

SEQ ID NO: 2461364 - RNA, 19 nt, Artificial Sequence
  Description of Artificial Sequence: Synthetic oligonucleotide
aagcggauuggggaggggc

SEQ ID NO: 2461365 - RNA, 19 nt, Artificial Sequence
  Description of Artificial Sequence: Synthetic oligonucleotide
uaauuauuuggaacccaac

SEQ ID NO: 2461366 - RNA, 19 nt, Artificial Sequence
  Description of Artificial Sequence: Synthetic oligonucleotide
gguaccgguucuuaggugg

SEQ ID NO: 2461367 - RNA, 19 nt, Artificial Sequence
  Description of Artificial Sequence: Synthetic oligonucleotide
ugggccuccuguaaugggg

SEQ ID NO: 2461368 - RNA, 19 nt, Artificial Sequence
  Description of Artificial Sequence: Synthetic oligonucleotide
uguauacccucuuaagauc

SEQ ID NO: 2461369 - RNA, 19 nt, Artificial Sequence
  Description of Artificial Sequence: Synthetic oligonucleotide
agacacuaauaacucaugu

SEQ ID NO: 2461370 - RNA, 19 nt, Artificial Sequence
  Description of Artificial Sequence: Synthetic oligonucleotide
auguguauacccucuuaag

SEQ ID NO: 2461371 - RNA, 19 nt, Artificial Sequence
  Description of Artificial Sequence: Synthetic oligonucleotide
auguugaagagccaauuau

SEQ ID NO: 2461372 - RNA, 19 nt, Artificial Sequence
  Description of Artificial Sequence: Synthetic oligonucleotide
agauguucuauaugguaca

SEQ ID NO: 2461373 - RNA, 19 nt, Artificial Sequence
  Description of Artificial Sequence: Synthetic oligonucleotide
uaugaaugcuacuuuggua

SEQ ID NO: 2461374 - RNA, 19 nt, Artificial Sequence
  Description of Artificial Sequence: Synthetic oligonucleotide
auuaguaguaagauagaga

SEQ ID NO: 2461375 - RNA, 19 nt, Artificial Sequence
  Description of Artificial Sequence: Synthetic oligonucleotide
uucaacugcaguucaguaa

SEQ ID NO: 2461376 - RNA, 19 nt, Artificial Sequence
  Description of Artificial Sequence: Synthetic oligonucleotide
ugcaacguggaugaaguca

SEQ ID NO: 2461377 - RNA, 19 nt, Artificial Sequence
  Description of Artificial Sequence: Synthetic oligonucleotide
uucaaauuugcaugcuuaa

SEQ ID NO: 2461378 - RNA, 19 nt, Artificial Sequence
  Description of Artificial Sequence: Synthetic oligonucleotide
guaacaaggucagucacug

SEQ ID NO: 2461379 - RNA, 19 nt, Artificial Sequence
  Description of Artificial Sequence: Synthetic oligonucleotide
gaacagaaaagcggauugg

SEQ ID NO: 2461380 - RNA, 19 nt, Artificial Sequence
  Description of Artificial Sequence: Synthetic oligonucleotide
ucuuucaacugcaguucag

SEQ ID NO: 2461381 - RNA, 19 nt, Artificial Sequence
  Description of Artificial Sequence: Synthetic oligonucleotide
ugguacaucucuagauuug

SEQ ID NO: 2461382 - RNA, 19 nt, Artificial Sequence
  Description of Artificial Sequence: Synthetic oligonucleotide
acauaauccggggaacugg

SEQ ID NO: 2461383 - RNA, 19 nt, Artificial Sequence
  Description of Artificial Sequence: Synthetic oligonucleotide
ucuagauuuggauuccauu

SEQ ID NO: 2461384 - RNA, 19 nt, Artificial Sequence
  Description of Artificial Sequence: Synthetic oligonucleotide
ucuauaugguacaucucua

SEQ ID NO: 2461385 - RNA, 19 nt, Artificial Sequence
  Description of Artificial Sequence: Synthetic oligonucleotide
uucagauguucuauauggu

SEQ ID NO: 2461386 - RNA, 19 nt, Artificial Sequence
  Description of Artificial Sequence: Synthetic oligonucleotide
gcuacucaauucuugggcg

SEQ ID NO: 2461387 - RNA, 19 nt, Artificial Sequence
  Description of Artificial Sequence: Synthetic oligonucleotide
uucuuucaacugcaguuca

SEQ ID NO: 2461388 - RNA, 19 nt, Artificial Sequence
  Description of Artificial Sequence: Synthetic oligonucleotide
aaaagcggauuggggaggg

SEQ ID NO: 2461389 - RNA, 19 nt, Artificial Sequence
  Description of Artificial Sequence: Synthetic oligonucleotide
uacugcuaacaguuuaugu

SEQ ID NO: 2461390 - RNA, 19 nt, Artificial Sequence
  Description of Artificial Sequence: Synthetic oligonucleotide
guagccuugguugcuaggg

SEQ ID NO: 2461391 - RNA, 19 nt, Artificial Sequence
  Description of Artificial Sequence: Synthetic oligonucleotide
agccaauuaugaaugcuac

SEQ ID NO: 2461392 - RNA, 19 nt, Artificial Sequence
  Description of Artificial Sequence: Synthetic oligonucleotide
uucagccacaaaagaaugu

SEQ ID NO: 2461393 - RNA, 19 nt, Artificial Sequence
  Description of Artificial Sequence: Synthetic oligonucleotide
uugguaccgguucuuaggu

SEQ ID NO: 2461394 - RNA, 19 nt, Artificial Sequence
  Description of Artificial Sequence: Synthetic oligonucleotide
gaaugcuacuuugguaccg

SEQ ID NO: 2461395 - RNA, 19 nt, Artificial Sequence
  Description of Artificial Sequence: Synthetic oligonucleotide
agggcagccaggcugcaac

SEQ ID NO: 2461396 - RNA, 19 nt, Artificial Sequence
  Description of Artificial Sequence: Synthetic oligonucleotide
acaucucuagauuuggauu

SEQ ID NO: 2461397 - RNA, 19 nt, Artificial Sequence
  Description of Artificial Sequence: Synthetic oligonucleotide
uugggcgucagaucccagg

SEQ ID NO: 2461398 - RNA, 19 nt, Artificial Sequence
  Description of Artificial Sequence: Synthetic oligonucleotide
ugaaugcuacuuugguacc

SEQ ID NO: 2461399 - RNA, 19 nt, Artificial Sequence
  Description of Artificial Sequence: Synthetic oligonucleotide
gaucccaggcaaaacuagg

SEQ ID NO: 2461400 - RNA, 19 nt, Artificial Sequence
  Description of Artificial Sequence: Synthetic oligonucleotide
uuaggugguggggagaaga

SEQ ID NO: 2461401 - RNA, 19 nt, Artificial Sequence
  Description of Artificial Sequence: Synthetic oligonucleotide
cuguaauggggcuucugag

SEQ ID NO: 2461402 - RNA, 19 nt, Artificial Sequence
  Description of Artificial Sequence: Synthetic oligonucleotide
aacaguuuauguagccuug

SEQ ID NO: 2461403 - RNA, 19 nt, Artificial Sequence
  Description of Artificial Sequence: Synthetic oligonucleotide
aucucuagauuuggauucc

SEQ ID NO: 2461404 - RNA, 19 nt, Artificial Sequence
  Description of Artificial Sequence: Synthetic oligonucleotide
aucccaggcaaaacuaggc

SEQ ID NO: 2461405 - RNA, 19 nt, Artificial Sequence
  Description of Artificial Sequence: Synthetic oligonucleotide
gaaaagcggauuggggagg

SEQ ID NO: 2461406 - RNA, 19 nt, Artificial Sequence
  Description of Artificial Sequence: Synthetic oligonucleotide
aguuuauguagccuugguu

SEQ ID NO: 2461407 - RNA, 19 nt, Artificial Sequence
  Description of Artificial Sequence: Synthetic oligonucleotide
uugcaugcuuaauuauuug

SEQ ID NO: 2461408 - RNA, 19 nt, Artificial Sequence
  Description of Artificial Sequence: Synthetic oligonucleotide
ucacugacagacacuaaua

SEQ ID NO: 2461409 - RNA, 19 nt, Artificial Sequence
  Description of Artificial Sequence: Synthetic oligonucleotide
cugaggcaaggucacagcc

SEQ ID NO: 2461410 - RNA, 19 nt, Artificial Sequence
  Description of Artificial Sequence: Synthetic oligonucleotide
uggacaguccucagcacac

SEQ ID NO: 2461411 - RNA, 19 nt, Artificial Sequence
  Description of Artificial Sequence: Synthetic oligonucleotide
aucacaaggucagcuacuc

SEQ ID NO: 2461412 - RNA, 19 nt, Artificial Sequence
  Description of Artificial Sequence: Synthetic oligonucleotide
ugggcgucagaucccaggc

SEQ ID NO: 2461413 - RNA, 19 nt, Artificial Sequence
  Description of Artificial Sequence: Synthetic oligonucleotide
gaagucagaaaggcugugc

SEQ ID NO: 2461414 - RNA, 19 nt, Artificial Sequence
  Description of Artificial Sequence: Synthetic oligonucleotide
cuaccuacuugcugcuugg

SEQ ID NO: 2461415 - RNA, 19 nt, Artificial Sequence
  Description of Artificial Sequence: Synthetic oligonucleotide
guaagauagagauaacaau

SEQ ID NO: 2461416 - RNA, 19 nt, Artificial Sequence
  Description of Artificial Sequence: Synthetic oligonucleotide
gucacagcccaacucuggg

SEQ ID NO: 2461417 - RNA, 19 nt, Artificial Sequence
  Description of Artificial Sequence: Synthetic oligonucleotide
uggaacccaaccacuucag

SEQ ID NO: 2461418 - RNA, 19 nt, Artificial Sequence
  Description of Artificial Sequence: Synthetic oligonucleotide
cuacaguacuucuucuuuc

SEQ ID NO: 2461419 - RNA, 19 nt, Artificial Sequence
  Description of Artificial Sequence: Synthetic oligonucleotide
ggaucagagcuguaguucc

SEQ ID NO: 2461420 - RNA, 19 nt, Artificial Sequence
  Description of Artificial Sequence: Synthetic oligonucleotide
aguucccauuaguaguaag

SEQ ID NO: 2461421 - RNA, 19 nt, Artificial Sequence
  Description of Artificial Sequence: Synthetic oligonucleotide
uucccauuaguaguaagau

SEQ ID NO: 2461422 - RNA, 19 nt, Artificial Sequence
  Description of Artificial Sequence: Synthetic oligonucleotide
acaguuuauguagccuugg

SEQ ID NO: 2461423 - RNA, 19 nt, Artificial Sequence
  Description of Artificial Sequence: Synthetic oligonucleotide
gaggcaaggucacagccca

SEQ ID NO: 2461424 - RNA, 19 nt, Artificial Sequence
  Description of Artificial Sequence: Synthetic oligonucleotide
guugcuagggcagccaggc

SEQ ID NO: 2461425 - RNA, 19 nt, Artificial Sequence
  Description of Artificial Sequence: Synthetic oligonucleotide
gaacuggacaguccucagc

SEQ ID NO: 2461426 - RNA, 19 nt, Artificial Sequence
  Description of Artificial Sequence: Synthetic oligonucleotide
uguccacuccucuggagca

SEQ ID NO: 2461427 - RNA, 19 nt, Artificial Sequence
  Description of Artificial Sequence: Synthetic oligonucleotide
augguacaucucuagauuu

SEQ ID NO: 2461428 - RNA, 19 nt, Artificial Sequence
  Description of Artificial Sequence: Synthetic oligonucleotide
agauagagauaacaauguu

SEQ ID NO: 2461429 - RNA, 19 nt, Artificial Sequence
  Description of Artificial Sequence: Synthetic oligonucleotide
acagacacuaauaacucau

SEQ ID NO: 2461430 - RNA, 19 nt, Artificial Sequence
  Description of Artificial Sequence: Synthetic oligonucleotide
acaaaagaaugucuuucuu

SEQ ID NO: 2461431 - RNA, 19 nt, Artificial Sequence
  Description of Artificial Sequence: Synthetic oligonucleotide
uuucaacugcaguucagua

SEQ ID NO: 2461432 - RNA, 19 nt, Artificial Sequence
  Description of Artificial Sequence: Synthetic oligonucleotide
acccaaccacuucagaugu

SEQ ID NO: 2461433 - RNA, 19 nt, Artificial Sequence
  Description of Artificial Sequence: Synthetic oligonucleotide
gguacaucucuagauuugg

SEQ ID NO: 2461434 - RNA, 19 nt, Artificial Sequence
  Description of Artificial Sequence: Synthetic oligonucleotide
uuacugcuaacaguuuaug

SEQ ID NO: 2461435 - RNA, 19 nt, Artificial Sequence
  Description of Artificial Sequence: Synthetic oligonucleotide
ucagaaaggcugugccugc

SEQ ID NO: 2461436 - RNA, 19 nt, Artificial Sequence
  Description of Artificial Sequence: Synthetic oligonucleotide
agucucuaccuacuugcug

SEQ ID NO: 2461437 - RNA, 19 nt, Artificial Sequence
  Description of Artificial Sequence: Synthetic oligonucleotide
cagcuacucaauucuuggg

SEQ ID NO: 2461438 - RNA, 19 nt, Artificial Sequence
  Description of Artificial Sequence: Synthetic oligonucleotide
uggggaucagagcuguagu

SEQ ID NO: 2461439 - RNA, 19 nt, Artificial Sequence
  Description of Artificial Sequence: Synthetic oligonucleotide
cacaaggucagcuacucaa

SEQ ID NO: 2461440 - RNA, 19 nt, Artificial Sequence
  Description of Artificial Sequence: Synthetic oligonucleotide
ugaauuccgaguucagcuu

SEQ ID NO: 2461441 - RNA, 19 nt, Artificial Sequence
  Description of Artificial Sequence: Synthetic oligonucleotide
agcuguaguucccauuagu

SEQ ID NO: 2461442 - RNA, 19 nt, Artificial Sequence
  Description of Artificial Sequence: Synthetic oligonucleotide
ugguugcuagggcagccag

SEQ ID NO: 2461443 - RNA, 19 nt, Artificial Sequence
  Description of Artificial Sequence: Synthetic oligonucleotide
aggggcaguaacaagguca

SEQ ID NO: 2461444 - RNA, 19 nt, Artificial Sequence
  Description of Artificial Sequence: Synthetic oligonucleotide
aaccacuucagauguucua

SEQ ID NO: 2461445 - RNA, 19 nt, Artificial Sequence
  Description of Artificial Sequence: Synthetic oligonucleotide
ucaccugaggcaaggucac

SEQ ID NO: 2461446 - RNA, 19 nt, Artificial Sequence
  Description of Artificial Sequence: Synthetic oligonucleotide
ucauguguauacccucuua

SEQ ID NO: 2461447 - RNA, 19 nt, Artificial Sequence
  Description of Artificial Sequence: Synthetic oligonucleotide
caguaacaaggucagucac

SEQ ID NO: 2461448 - RNA, 19 nt, Artificial Sequence
  Description of Artificial Sequence: Synthetic oligonucleotide
gcuaacaguuuauguagcc

SEQ ID NO: 2461449 - RNA, 19 nt, Artificial Sequence
  Description of Artificial Sequence: Synthetic oligonucleotide
gcuacuuugguaccgguuc

SEQ ID NO: 2461450 - RNA, 19 nt, Artificial Sequence
  Description of Artificial Sequence: Synthetic oligonucleotide
uauacccucuuaagaucga

SEQ ID NO: 2461451 - RNA, 19 nt, Artificial Sequence
  Description of Artificial Sequence: Synthetic oligonucleotide
uccucuggagcaucggccu

SEQ ID NO: 2461452 - RNA, 19 nt, Artificial Sequence
  Description of Artificial Sequence: Synthetic oligonucleotide
guucccauuaguaguaaga

SEQ ID NO: 2461453 - RNA, 19 nt, Artificial Sequence
  Description of Artificial Sequence: Synthetic oligonucleotide
aacguggaugaagucagaa

SEQ ID NO: 2461454 - RNA, 19 nt, Artificial Sequence
  Description of Artificial Sequence: Synthetic oligonucleotide
uaacaauguugaagagcca

SEQ ID NO: 2461455 - RNA, 19 nt, Artificial Sequence
  Description of Artificial Sequence: Synthetic oligonucleotide
auguucuauaugguacauc

SEQ ID NO: 2461456 - RNA, 19 nt, Artificial Sequence
  Description of Artificial Sequence: Synthetic oligonucleotide
cauguguauacccucuuaa

SEQ ID NO: 2461457 - RNA, 19 nt, Artificial Sequence
  Description of Artificial Sequence: Synthetic oligonucleotide
guguauacccucuuaagau

SEQ ID NO: 2461458 - RNA, 19 nt, Artificial Sequence
  Description of Artificial Sequence: Synthetic oligonucleotide
aguaacaaggucagucacu

SEQ ID NO: 2461459 - RNA, 19 nt, Artificial Sequence
  Description of Artificial Sequence: Synthetic oligonucleotide
acuaggcaacauaauccgg

SEQ ID NO: 2461460 - RNA, 19 nt, Artificial Sequence
  Description of Artificial Sequence: Synthetic oligonucleotide
uagccuugguugcuagggc

SEQ ID NO: 2461461 - RNA, 19 nt, Artificial Sequence
  Description of Artificial Sequence: Synthetic oligonucleotide
cagccaggcugcaacgugg

SEQ ID NO: 2461462 - RNA, 19 nt, Artificial Sequence
  Description of Artificial Sequence: Synthetic oligonucleotide
cuuaauuauuuggaaccca

SEQ ID NO: 2461463 - RNA, 19 nt, Artificial Sequence
  Description of Artificial Sequence: Synthetic oligonucleotide
gaacccaaccacuucagau

SEQ ID NO: 2461464 - RNA, 19 nt, Artificial Sequence
  Description of Artificial Sequence: Synthetic oligonucleotide
agccuugguugcuagggca

SEQ ID NO: 2461465 - RNA, 19 nt, Artificial Sequence
  Description of Artificial Sequence: Synthetic oligonucleotide
uagagauaacaauguugaa

SEQ ID NO: 2461466 - RNA, 19 nt, Artificial Sequence
  Description of Artificial Sequence: Synthetic oligonucleotide
ucuuaggugguggggagaa

SEQ ID NO: 2461467 - RNA, 19 nt, Artificial Sequence
  Description of Artificial Sequence: Synthetic oligonucleotide
ucucuccuacaguacuucu

SEQ ID NO: 2461468 - RNA, 19 nt, Artificial Sequence
  Description of Artificial Sequence: Synthetic oligonucleotide
gcaacguggaugaagucag

SEQ ID NO: 2461469 - RNA, 19 nt, Artificial Sequence
  Description of Artificial Sequence: Synthetic oligonucleotide
cauaauccggggaacugga

SEQ ID NO: 2461470 - RNA, 19 nt, Artificial Sequence
  Description of Artificial Sequence: Synthetic oligonucleotide
caaauuugcaugcuuaauu

SEQ ID NO: 2461471 - RNA, 19 nt, Artificial Sequence
  Description of Artificial Sequence: Synthetic oligonucleotide
uucuugggcgucagauccc

SEQ ID NO: 2461472 - RNA, 19 nt, Artificial Sequence
  Description of Artificial Sequence: Synthetic oligonucleotide
cuggggaucagagcuguag

SEQ ID NO: 2461473 - RNA, 19 nt, Artificial Sequence
  Description of Artificial Sequence: Synthetic oligonucleotide
accgguucuuagguggugg

SEQ ID NO: 2461474 - RNA, 19 nt, Artificial Sequence
  Description of Artificial Sequence: Synthetic oligonucleotide
aaggucagucacugacaga

SEQ ID NO: 2461475 - RNA, 19 nt, Artificial Sequence
  Description of Artificial Sequence: Synthetic oligonucleotide
gucagcuacucaauucuug

SEQ ID NO: 2461476 - RNA, 19 nt, Artificial Sequence
  Description of Artificial Sequence: Synthetic oligonucleotide
ucaauucuugggcgucaga

SEQ ID NO: 2461477 - RNA, 19 nt, Artificial Sequence
  Description of Artificial Sequence: Synthetic oligonucleotide
accuacuugcugcuuggcu

SEQ ID NO: 2461478 - RNA, 19 nt, Artificial Sequence
  Description of Artificial Sequence: Synthetic oligonucleotide
uccuacaguacuucuucuu

SEQ ID NO: 2461479 - RNA, 19 nt, Artificial Sequence
  Description of Artificial Sequence: Synthetic oligonucleotide
uuauguagccuugguugcu

SEQ ID NO: 2461480 - RNA, 19 nt, Artificial Sequence
  Description of Artificial Sequence: Synthetic oligonucleotide
uaagaucgauuuucuucaa

SEQ ID NO: 2461481 - RNA, 19 nt, Artificial Sequence
  Description of Artificial Sequence: Synthetic oligonucleotide
acguggaugaagucagaaa

SEQ ID NO: 2461482 - RNA, 19 nt, Artificial Sequence
  Description of Artificial Sequence: Synthetic oligonucleotide
ggcaacauaauccggggaa

SEQ ID NO: 2461483 - RNA, 19 nt, Artificial Sequence
  Description of Artificial Sequence: Synthetic oligonucleotide
gagccaauuaugaaugcua

SEQ ID NO: 2461484 - RNA, 19 nt, Artificial Sequence
  Description of Artificial Sequence: Synthetic oligonucleotide
agcaucggccuucucuugu

SEQ ID NO: 2461485 - RNA, 19 nt, Artificial Sequence
  Description of Artificial Sequence: Synthetic oligonucleotide
gagcuguaguucccauuag

SEQ ID NO: 2461486 - RNA, 19 nt, Artificial Sequence
  Description of Artificial Sequence: Synthetic oligonucleotide
auguagccuugguugcuag

SEQ ID NO: 2461487 - RNA, 19 nt, Artificial Sequence
  Description of Artificial Sequence: Synthetic oligonucleotide
cacuaauaacucaugugua

SEQ ID NO: 2461488 - RNA, 19 nt, Artificial Sequence
  Description of Artificial Sequence: Synthetic oligonucleotide
gcaaaacuaggcaacauaa

SEQ ID NO: 2461489 - RNA, 19 nt, Artificial Sequence
  Description of Artificial Sequence: Synthetic oligonucleotide
cuaauaacucauguguaua

SEQ ID NO: 2461490 - RNA, 19 nt, Artificial Sequence
  Description of Artificial Sequence: Synthetic oligonucleotide
ugcuacuuugguaccgguu

SEQ ID NO: 2461491 - RNA, 19 nt, Artificial Sequence
  Description of Artificial Sequence: Synthetic oligonucleotide
ccucuuaagaucgauuuuc

SEQ ID NO: 2461492 - RNA, 19 nt, Artificial Sequence
  Description of Artificial Sequence: Synthetic oligonucleotide
auaauccggggaacuggac

SEQ ID NO: 2461493 - RNA, 19 nt, Artificial Sequence
  Description of Artificial Sequence: Synthetic oligonucleotide
ccaggcaaaacuaggcaac

SEQ ID NO: 2461494 - RNA, 19 nt, Artificial Sequence
  Description of Artificial Sequence: Synthetic oligonucleotide
ggugguggggagaagaaca

SEQ ID NO: 2461495 - RNA, 19 nt, Artificial Sequence
  Description of Artificial Sequence: Synthetic oligonucleotide
ugguaccgguucuuaggug

SEQ ID NO: 2461496 - RNA, 19 nt, Artificial Sequence
  Description of Artificial Sequence: Synthetic oligonucleotide
ucucuagauuuggauucca

SEQ ID NO: 2461497 - RNA, 19 nt, Artificial Sequence
  Description of Artificial Sequence: Synthetic oligonucleotide
aggcaacauaauccgggga

SEQ ID NO: 2461498 - RNA, 19 nt, Artificial Sequence
  Description of Artificial Sequence: Synthetic oligonucleotide
uacucaauucuugggcguc

SEQ ID NO: 2461499 - RNA, 19 nt, Artificial Sequence
  Description of Artificial Sequence: Synthetic oligonucleotide
aaagcggauuggggagggg

SEQ ID NO: 2461500 - RNA, 19 nt, Artificial Sequence
  Description of Artificial Sequence: Synthetic oligonucleotide
ccugcaaaggacugcuggc

SEQ ID NO: 2461501 - RNA, 19 nt, Artificial Sequence
  Description of Artificial Sequence: Synthetic oligonucleotide
aacucugggcagagcacug

SEQ ID NO: 2461502 - RNA, 19 nt, Artificial Sequence
  Description of Artificial Sequence: Synthetic oligonucleotide
agccacaaaagaaugucuu

SEQ ID NO: 2461503 - RNA, 19 nt, Artificial Sequence
  Description of Artificial Sequence: Synthetic oligonucleotide
uauguagccuugguugcua

SEQ ID NO: 2461504 - RNA, 19 nt, Artificial Sequence
  Description of Artificial Sequence: Synthetic oligonucleotide
cgaguucagcuuuucagcc

SEQ ID NO: 2461505 - RNA, 19 nt, Artificial Sequence
  Description of Artificial Sequence: Synthetic oligonucleotide
uaauggggcuucugaggaa

SEQ ID NO: 2461506 - RNA, 19 nt, Artificial Sequence
  Description of Artificial Sequence: Synthetic oligonucleotide
ggcaaaacuaggcaacaua

SEQ ID NO: 2461507 - RNA, 19 nt, Artificial Sequence
  Description of Artificial Sequence: Synthetic oligonucleotide
uucuuaggugguggggaga

SEQ ID NO: 2461508 - RNA, 19 nt, Artificial Sequence
  Description of Artificial Sequence: Synthetic oligonucleotide
cucaauucuugggcgucag

SEQ ID NO: 2461509 - RNA, 19 nt, Artificial Sequence
  Description of Artificial Sequence: Synthetic oligonucleotide
uugguugcuagggcagcca

SEQ ID NO: 2461510 - RNA, 19 nt, Artificial Sequence
  Description of Artificial Sequence: Synthetic oligonucleotide
gguucuuagguggugggga

SEQ ID NO: 2461511 - RNA, 19 nt, Artificial Sequence
  Description of Artificial Sequence: Synthetic oligonucleotide
cugcuuggcugaagccugg

SEQ ID NO: 2461512 - RNA, 19 nt, Artificial Sequence
  Description of Artificial Sequence: Synthetic oligonucleotide
ugcuggcaccuucucguaa

SEQ ID NO: 2461513 - RNA, 19 nt, Artificial Sequence
  Description of Artificial Sequence: Synthetic oligonucleotide
cucuuaagaucgauuuucu

SEQ ID NO: 2461514 - RNA, 19 nt, Artificial Sequence
  Description of Artificial Sequence: Synthetic oligonucleotide
ugcuuggcugaagccuggg

SEQ ID NO: 2461515 - RNA, 19 nt, Artificial Sequence
  Description of Artificial Sequence: Synthetic oligonucleotide
gaauuccgaguucagcuuu

SEQ ID NO: 2461516 - RNA, 19 nt, Artificial Sequence
  Description of Artificial Sequence: Synthetic oligonucleotide
ggaacuggacaguccucag

SEQ ID NO: 2461517 - RNA, 19 nt, Artificial Sequence
  Description of Artificial Sequence: Synthetic oligonucleotide
gauuuggauuccauuuccu

SEQ ID NO: 2461518 - RNA, 19 nt, Artificial Sequence
  Description of Artificial Sequence: Synthetic oligonucleotide
cagaucccaggcaaaacua

SEQ ID NO: 2461519 - RNA, 19 nt, Artificial Sequence
  Description of Artificial Sequence: Synthetic oligonucleotide
gguggggagaagaacagaa

SEQ ID NO: 2461520 - RNA, 19 nt, Artificial Sequence
  Description of Artificial Sequence: Synthetic oligonucleotide
gagcaucggccuucucuug

SEQ ID NO: 2461521 - RNA, 19 nt, Artificial Sequence
  Description of Artificial Sequence: Synthetic oligonucleotide
guucuauaugguacaucuc

SEQ ID NO: 2461522 - RNA, 19 nt, Artificial Sequence
  Description of Artificial Sequence: Synthetic oligonucleotide
acucaauucuugggcguca

SEQ ID NO: 2461523 - RNA, 19 nt, Artificial Sequence
  Description of Artificial Sequence: Synthetic oligonucleotide
cauuuccugaauuccgagu

SEQ ID NO: 2461524 - RNA, 19 nt, Artificial Sequence
  Description of Artificial Sequence: Synthetic oligonucleotide
augcuacuuugguaccggu

SEQ ID NO: 2461525 - RNA, 19 nt, Artificial Sequence
  Description of Artificial Sequence: Synthetic oligonucleotide
gaggggcaguaacaagguc

SEQ ID NO: 2461526 - RNA, 19 nt, Artificial Sequence
  Description of Artificial Sequence: Synthetic oligonucleotide
gggaucagagcuguaguuc

SEQ ID NO: 2461527 - RNA, 19 nt, Artificial Sequence
  Description of Artificial Sequence: Synthetic oligonucleotide
caaaacuaggcaacauaau

SEQ ID NO: 2461528 - RNA, 19 nt, Artificial Sequence
  Description of Artificial Sequence: Synthetic oligonucleotide
gucagaucccaggcaaaac

SEQ ID NO: 2461529 - RNA, 19 nt, Artificial Sequence
  Description of Artificial Sequence: Synthetic oligonucleotide
cagucacugacagacacua

SEQ ID NO: 2461530 - RNA, 19 nt, Artificial Sequence
  Description of Artificial Sequence: Synthetic oligonucleotide
ggcugcaacguggaugaag

SEQ ID NO: 2461531 - RNA, 19 nt, Artificial Sequence
  Description of Artificial Sequence: Synthetic oligonucleotide
caauuaugaaugcuacuuu

SEQ ID NO: 2461532 - RNA, 19 nt, Artificial Sequence
  Description of Artificial Sequence: Synthetic oligonucleotide
cuuucaacugcaguucagu

SEQ ID NO: 2461533 - RNA, 19 nt, Artificial Sequence
  Description of Artificial Sequence: Synthetic oligonucleotide
cugcaaaggacugcuggca

SEQ ID NO: 2461534 - RNA, 19 nt, Artificial Sequence
  Description of Artificial Sequence: Synthetic oligonucleotide
guacaucucuagauuugga

SEQ ID NO: 2461535 - RNA, 19 nt, Artificial Sequence
  Description of Artificial Sequence: Synthetic oligonucleotide
uaccuacuugcugcuuggc

SEQ ID NO: 2461536 - RNA, 19 nt, Artificial Sequence
  Description of Artificial Sequence: Synthetic oligonucleotide
ggcagcacagagucucuac

SEQ ID NO: 2461537 - RNA, 19 nt, Artificial Sequence
  Description of Artificial Sequence: Synthetic oligonucleotide
gaucacaaggucagcuacu

SEQ ID NO: 2461538 - RNA, 19 nt, Artificial Sequence
  Description of Artificial Sequence: Synthetic oligonucleotide
uccggggaacuggacaguc

SEQ ID NO: 2461539 - RNA, 19 nt, Artificial Sequence
  Description of Artificial Sequence: Synthetic oligonucleotide
gcaacauaauccggggaac

SEQ ID NO: 2461540 - RNA, 19 nt, Artificial Sequence
  Description of Artificial Sequence: Synthetic oligonucleotide
auacccucuuaagaucgau

SEQ ID NO: 2461541 - RNA, 19 nt, Artificial Sequence
  Description of Artificial Sequence: Synthetic oligonucleotide
ggcgucagaucccaggcaa

SEQ ID NO: 2461542 - RNA, 19 nt, Artificial Sequence
  Description of Artificial Sequence: Synthetic oligonucleotide
ccaaccacuucagauguuc

SEQ ID NO: 2461543 - RNA, 19 nt, Artificial Sequence
  Description of Artificial Sequence: Synthetic oligonucleotide
uaguucccauuaguaguaa

SEQ ID NO: 2461544 - RNA, 19 nt, Artificial Sequence
  Description of Artificial Sequence: Synthetic oligonucleotide
gggaacuggacaguccuca

SEQ ID NO: 2461545 - RNA, 19 nt, Artificial Sequence
  Description of Artificial Sequence: Synthetic oligonucleotide
cuacucaauucuugggcgu

SEQ ID NO: 2461546 - RNA, 19 nt, Artificial Sequence
  Description of Artificial Sequence: Synthetic oligonucleotide
gauguucuauaugguacau

SEQ ID NO: 2461547 - RNA, 19 nt, Artificial Sequence
  Description of Artificial Sequence: Synthetic oligonucleotide
gguugcuagggcagccagg

SEQ ID NO: 2461548 - RNA, 19 nt, Artificial Sequence
  Description of Artificial Sequence: Synthetic oligonucleotide
acuuugguaccgguucuua

SEQ ID NO: 2461549 - RNA, 19 nt, Artificial Sequence
  Description of Artificial Sequence: Synthetic oligonucleotide
uugcuagggcagccaggcu

SEQ ID NO: 2461550 - RNA, 19 nt, Artificial Sequence
  Description of Artificial Sequence: Synthetic oligonucleotide
uaccgguucuuagguggug

SEQ ID NO: 2461551 - RNA, 19 nt, Artificial Sequence
  Description of Artificial Sequence: Synthetic oligonucleotide
cacuucagauguucuauau

SEQ ID NO: 2461552 - RNA, 19 nt, Artificial Sequence
  Description of Artificial Sequence: Synthetic oligonucleotide
agcggauuggggaggggca

SEQ ID NO: 2461553 - RNA, 19 nt, Artificial Sequence
  Description of Artificial Sequence: Synthetic oligonucleotide
aggucacagcccaacucug

SEQ ID NO: 2461554 - RNA, 19 nt, Artificial Sequence
  Description of Artificial Sequence: Synthetic oligonucleotide
gaagaacagaaaagcggau

SEQ ID NO: 2461555 - RNA, 19 nt, Artificial Sequence
  Description of Artificial Sequence: Synthetic oligonucleotide
uacuuugguaccgguucuu

SEQ ID NO: 2461556 - RNA, 19 nt, Artificial Sequence
  Description of Artificial Sequence: Synthetic oligonucleotide
cuuaggugguggggagaag

SEQ ID NO: 2461557 - RNA, 19 nt, Artificial Sequence
  Description of Artificial Sequence: Synthetic oligonucleotide
cucuggagcaucggccuuc

SEQ ID NO: 2461558 - RNA, 19 nt, Artificial Sequence
  Description of Artificial Sequence: Synthetic oligonucleotide
ggggaggggcaguaacaag

SEQ ID NO: 2461559 - RNA, 19 nt, Artificial Sequence
  Description of Artificial Sequence: Synthetic oligonucleotide
cugcaacguggaugaaguc

SEQ ID NO: 2461560 - RNA, 19 nt, Artificial Sequence
  Description of Artificial Sequence: Synthetic oligonucleotide
cagcacagagucucuaccu

SEQ ID NO: 2461561 - RNA, 19 nt, Artificial Sequence
  Description of Artificial Sequence: Synthetic oligonucleotide
cacuccucuggagcaucgg

SEQ ID NO: 2461562 - RNA, 19 nt, Artificial Sequence
  Description of Artificial Sequence: Synthetic oligonucleotide
ccaacucugggcagagcac

SEQ ID NO: 2461563 - RNA, 19 nt, Artificial Sequence
  Description of Artificial Sequence: Synthetic oligonucleotide
gcugcaacguggaugaagu

SEQ ID NO: 2461564 - RNA, 19 nt, Artificial Sequence
  Description of Artificial Sequence: Synthetic oligonucleotide
cagagcacugggccuccug

SEQ ID NO: 2461565 - RNA, 19 nt, Artificial Sequence
  Description of Artificial Sequence: Synthetic oligonucleotide
ccauuaguaguaagauaga

SEQ ID NO: 2461566 - RNA, 19 nt, Artificial Sequence
  Description of Artificial Sequence: Synthetic oligonucleotide
ccgguucuuaggugguggg

SEQ ID NO: 2461567 - RNA, 19 nt, Artificial Sequence
  Description of Artificial Sequence: Synthetic oligonucleotide
ccaauuaugaaugcuacuu

SEQ ID NO: 2461568 - RNA, 19 nt, Artificial Sequence
  Description of Artificial Sequence: Synthetic oligonucleotide
cuacuuugguaccgguucu

SEQ ID NO: 2461569 - RNA, 19 nt, Artificial Sequence
  Description of Artificial Sequence: Synthetic oligonucleotide
ggaacccaaccacuucaga

SEQ ID NO: 2461570 - RNA, 19 nt, Artificial Sequence
  Description of Artificial Sequence: Synthetic oligonucleotide
ggcaccugcaaaggacugc

SEQ ID NO: 2461571 - RNA, 19 nt, Artificial Sequence
  Description of Artificial Sequence: Synthetic oligonucleotide
guggggagaagaacagaaa

SEQ ID NO: 2461572 - RNA, 19 nt, Artificial Sequence
  Description of Artificial Sequence: Synthetic oligonucleotide
caacauaauccggggaacu

SEQ ID NO: 2461573 - RNA, 19 nt, Artificial Sequence
  Description of Artificial Sequence: Synthetic oligonucleotide
gcuggcaccuucucguaaa

SEQ ID NO: 2461574 - RNA, 19 nt, Artificial Sequence
  Description of Artificial Sequence: Synthetic oligonucleotide
aggcaccugcaaaggacug

SEQ ID NO: 2461575 - RNA, 19 nt, Artificial Sequence
  Description of Artificial Sequence: Synthetic oligonucleotide
caguuuauguagccuuggu

SEQ ID NO: 2461576 - RNA, 19 nt, Artificial Sequence
  Description of Artificial Sequence: Synthetic oligonucleotide
cucuagauuuggauuccau

SEQ ID NO: 2461577 - RNA, 19 nt, Artificial Sequence
  Description of Artificial Sequence: Synthetic oligonucleotide
caaccacuucagauguucu

SEQ ID NO: 2461578 - RNA, 19 nt, Artificial Sequence
  Description of Artificial Sequence: Synthetic oligonucleotide
caacugcaguucaguaaaa

SEQ ID NO: 2461579 - RNA, 19 nt, Artificial Sequence
  Description of Artificial Sequence: Synthetic oligonucleotide
gccaauuaugaaugcuacu

SEQ ID NO: 2461580 - RNA, 19 nt, Artificial Sequence
  Description of Artificial Sequence: Synthetic oligonucleotide
caacguggaugaagucaga

SEQ ID NO: 2461581 - RNA, 19 nt, Artificial Sequence
  Description of Artificial Sequence: Synthetic oligonucleotide
caacucugggcagagcacu

SEQ ID NO: 2461582 - RNA, 19 nt, Artificial Sequence
  Description of Artificial Sequence: Synthetic oligonucleotide
aaaggacugcuggcaccuu

SEQ ID NO: 2461583 - RNA, 19 nt, Artificial Sequence
  Description of Artificial Sequence: Synthetic oligonucleotide
cuccuacaguacuucuucu

SEQ ID NO: 2461584 - RNA, 19 nt, Artificial Sequence
  Description of Artificial Sequence: Synthetic oligonucleotide
agccaggcugcaacgugga

SEQ ID NO: 2461585 - RNA, 19 nt, Artificial Sequence
  Description of Artificial Sequence: Synthetic oligonucleotide
ggacaguccucagcacacc

SEQ ID NO: 2461586 - RNA, 19 nt, Artificial Sequence
  Description of Artificial Sequence: Synthetic oligonucleotide
ccuccuguaauggggcuuc

SEQ ID NO: 2461587 - RNA, 19 nt, Artificial Sequence
  Description of Artificial Sequence: Synthetic oligonucleotide
agucacugacagacacuaa

SEQ ID NO: 2461588 - RNA, 19 nt, Artificial Sequence
  Description of Artificial Sequence: Synthetic oligonucleotide
gcggauuggggaggggcag

SEQ ID NO: 2461589 - RNA, 19 nt, Artificial Sequence
  Description of Artificial Sequence: Synthetic oligonucleotide
auccggggaacuggacagu

SEQ ID NO: 2461590 - RNA, 19 nt, Artificial Sequence
  Description of Artificial Sequence: Synthetic oligonucleotide
cuggcaccuucucguaaaa

SEQ ID NO: 2461591 - RNA, 19 nt, Artificial Sequence
  Description of Artificial Sequence: Synthetic oligonucleotide
guuucaccugaggcaaggu

SEQ ID NO: 2461592 - RNA, 19 nt, Artificial Sequence
  Description of Artificial Sequence: Synthetic oligonucleotide
ccuacaguacuucuucuuu

SEQ ID NO: 2461593 - RNA, 19 nt, Artificial Sequence
  Description of Artificial Sequence: Synthetic oligonucleotide
ggggaucagagcuguaguu

SEQ ID NO: 2461594 - RNA, 19 nt, Artificial Sequence
  Description of Artificial Sequence: Synthetic oligonucleotide
gggcgucagaucccaggca

SEQ ID NO: 2461595 - RNA, 19 nt, Artificial Sequence
  Description of Artificial Sequence: Synthetic oligonucleotide
ggaggggcaguaacaaggu

SEQ ID NO: 2461596 - RNA, 19 nt, Artificial Sequence
  Description of Artificial Sequence: Synthetic oligonucleotide
ggucagucacugacagaca

SEQ ID NO: 2461597 - RNA, 19 nt, Artificial Sequence
  Description of Artificial Sequence: Synthetic oligonucleotide
cagcccaacucugggcaga

SEQ ID NO: 2461598 - RNA, 19 nt, Artificial Sequence
  Description of Artificial Sequence: Synthetic oligonucleotide
guaccgguucuuagguggu

SEQ ID NO: 2461599 - RNA, 19 nt, Artificial Sequence
  Description of Artificial Sequence: Synthetic oligonucleotide
cugcuggcaccuucucgua

SEQ ID NO: 2461600 - RNA, 19 nt, Artificial Sequence
  Description of Artificial Sequence: Synthetic oligonucleotide
ggauuggggaggggcagua

SEQ ID NO: 2461601 - RNA, 19 nt, Artificial Sequence
  Description of Artificial Sequence: Synthetic oligonucleotide
caccugaggcaaggucaca

SEQ ID NO: 2461602 - RNA, 19 nt, Artificial Sequence
  Description of Artificial Sequence: Synthetic oligonucleotide
aggcaaggucacagcccaa

SEQ ID NO: 2461603 - RNA, 19 nt, Artificial Sequence
  Description of Artificial Sequence: Synthetic oligonucleotide
gcacugggccuccuguaau

SEQ ID NO: 2461604 - RNA, 19 nt, Artificial Sequence
  Description of Artificial Sequence: Synthetic oligonucleotide
ccucagcacaccuggggau

SEQ ID NO: 2461605 - RNA, 19 nt, Artificial Sequence
  Description of Artificial Sequence: Synthetic oligonucleotide
gcgucagaucccaggcaaa

SEQ ID NO: 2461606 - RNA, 19 nt, Artificial Sequence
  Description of Artificial Sequence: Synthetic oligonucleotide
gcaucggccuucucuuguu

SEQ ID NO: 2461607 - RNA, 19 nt, Artificial Sequence
  Description of Artificial Sequence: Synthetic oligonucleotide
cccucuuaagaucgauuuu

SEQ ID NO: 2461608 - RNA, 19 nt, Artificial Sequence
  Description of Artificial Sequence: Synthetic oligonucleotide
cucuaccuacuugcugcuu

SEQ ID NO: 2461609 - RNA, 19 nt, Artificial Sequence
  Description of Artificial Sequence: Synthetic oligonucleotide
cccaaccacuucagauguu

SEQ ID NO: 2461610 - RNA, 19 nt, Artificial Sequence
  Description of Artificial Sequence: Synthetic oligonucleotide
ccucuggagcaucggccuu

SEQ ID NO: 2461611 - RNA, 19 nt, Artificial Sequence
  Description of Artificial Sequence: Synthetic oligonucleotide
cggauuggggaggggcagu

SEQ ID NO: 2461612 - RNA, 19 nt, Artificial Sequence
  Description of Artificial Sequence: Synthetic oligonucleotide
aaagguaucaggcauauuc

SEQ ID NO: 2461613 - RNA, 19 nt, Artificial Sequence
  Description of Artificial Sequence: Synthetic oligonucleotide
gaagaugugauuuaguuug

SEQ ID NO: 2461614 - RNA, 19 nt, Artificial Sequence
  Description of Artificial Sequence: Synthetic oligonucleotide
ucaaguuauauucauauga

SEQ ID NO: 2461615 - RNA, 19 nt, Artificial Sequence
  Description of Artificial Sequence: Synthetic oligonucleotide
uauauucauaugaaucagg

SEQ ID NO: 2461616 - RNA, 19 nt, Artificial Sequence
  Description of Artificial Sequence: Synthetic oligonucleotide
uguugacacaaaauuaucc

SEQ ID NO: 2461617 - RNA, 19 nt, Artificial Sequence
  Description of Artificial Sequence: Synthetic oligonucleotide
aaaaucuugacaucaguau

SEQ ID NO: 2461618 - RNA, 19 nt, Artificial Sequence
  Description of Artificial Sequence: Synthetic oligonucleotide
gaagcuaucgaacaggcca

SEQ ID NO: 2461619 - RNA, 19 nt, Artificial Sequence
  Description of Artificial Sequence: Synthetic oligonucleotide
gaugugauuuaguuugggg

SEQ ID NO: 2461620 - RNA, 19 nt, Artificial Sequence
  Description of Artificial Sequence: Synthetic oligonucleotide
uguguugacacaaaauuau

SEQ ID NO: 2461621 - RNA, 19 nt, Artificial Sequence
  Description of Artificial Sequence: Synthetic oligonucleotide
aaucuugacaucaguauag

SEQ ID NO: 2461622 - RNA, 19 nt, Artificial Sequence
  Description of Artificial Sequence: Synthetic oligonucleotide
uucauaugaaucaggaauc

SEQ ID NO: 2461623 - RNA, 19 nt, Artificial Sequence
  Description of Artificial Sequence: Synthetic oligonucleotide
uugacaucaguauagugac

SEQ ID NO: 2461624 - RNA, 19 nt, Artificial Sequence
  Description of Artificial Sequence: Synthetic oligonucleotide
uucuuaagaagugucuugg

SEQ ID NO: 2461625 - RNA, 19 nt, Artificial Sequence
  Description of Artificial Sequence: Synthetic oligonucleotide
auuaaauggaguuuuccaa

SEQ ID NO: 2461626 - RNA, 19 nt, Artificial Sequence
  Description of Artificial Sequence: Synthetic oligonucleotide
uuaagaagugucuugggau

SEQ ID NO: 2461627 - RNA, 19 nt, Artificial Sequence
  Description of Artificial Sequence: Synthetic oligonucleotide
uucguuucuucauuaaaug

SEQ ID NO: 2461628 - RNA, 19 nt, Artificial Sequence
  Description of Artificial Sequence: Synthetic oligonucleotide
uuucguuucuucauuaaau

SEQ ID NO: 2461629 - RNA, 19 nt, Artificial Sequence
  Description of Artificial Sequence: Synthetic oligonucleotide
augugauuuaguuuggggu

SEQ ID NO: 2461630 - RNA, 19 nt, Artificial Sequence
  Description of Artificial Sequence: Synthetic oligonucleotide
ugugauuuaguuugggguc

SEQ ID NO: 2461631 - RNA, 19 nt, Artificial Sequence
  Description of Artificial Sequence: Synthetic oligonucleotide
gucgacucaaguuauauuc

SEQ ID NO: 2461632 - RNA, 19 nt, Artificial Sequence
  Description of Artificial Sequence: Synthetic oligonucleotide
ucaggcauauucuuaagaa

SEQ ID NO: 2461633 - RNA, 19 nt, Artificial Sequence
  Description of Artificial Sequence: Synthetic oligonucleotide
cauauucuuaagaaguguc

SEQ ID NO: 2461634 - RNA, 19 nt, Artificial Sequence
  Description of Artificial Sequence: Synthetic oligonucleotide
agcgaagcgggguugaccg

SEQ ID NO: 2461635 - RNA, 19 nt, Artificial Sequence
  Description of Artificial Sequence: Synthetic oligonucleotide
cauuguaggauuccauucc

SEQ ID NO: 2461636 - RNA, 19 nt, Artificial Sequence
  Description of Artificial Sequence: Synthetic oligonucleotide
guugacacaaaauuaucca

SEQ ID NO: 2461637 - RNA, 19 nt, Artificial Sequence
  Description of Artificial Sequence: Synthetic oligonucleotide
ugguucuuguucauuguag

SEQ ID NO: 2461638 - RNA, 19 nt, Artificial Sequence
  Description of Artificial Sequence: Synthetic oligonucleotide
cuugggauggcgcuggagg

SEQ ID NO: 2461639 - RNA, 19 nt, Artificial Sequence
  Description of Artificial Sequence: Synthetic oligonucleotide
uugacacaaaauuauccac

SEQ ID NO: 2461640 - RNA, 19 nt, Artificial Sequence
  Description of Artificial Sequence: Synthetic oligonucleotide
ucuuaagaagugucuuggg

SEQ ID NO: 2461641 - RNA, 19 nt, Artificial Sequence
  Description of Artificial Sequence: Synthetic oligonucleotide
acgucggccagacaguccc

SEQ ID NO: 2461642 - RNA, 19 nt, Artificial Sequence
  Description of Artificial Sequence: Synthetic oligonucleotide
uaucgaacaggccacggcu

SEQ ID NO: 2461643 - RNA, 19 nt, Artificial Sequence
  Description of Artificial Sequence: Synthetic oligonucleotide
uguaggauuccauuccugu

SEQ ID NO: 2461644 - RNA, 19 nt, Artificial Sequence
  Description of Artificial Sequence: Synthetic oligonucleotide
acacaccccagucaaggcc

SEQ ID NO: 2461645 - RNA, 19 nt, Artificial Sequence
  Description of Artificial Sequence: Synthetic oligonucleotide
ucauuaaauggaguuuucc

SEQ ID NO: 2461646 - RNA, 19 nt, Artificial Sequence
  Description of Artificial Sequence: Synthetic oligonucleotide
uguuuguccagauguguug

SEQ ID NO: 2461647 - RNA, 19 nt, Artificial Sequence
  Description of Artificial Sequence: Synthetic oligonucleotide
aagaagugucuugggaugg

SEQ ID NO: 2461648 - RNA, 19 nt, Artificial Sequence
  Description of Artificial Sequence: Synthetic oligonucleotide
ucaggaauccauuucguuu

SEQ ID NO: 2461649 - RNA, 19 nt, Artificial Sequence
  Description of Artificial Sequence: Synthetic oligonucleotide
auauucauaugaaucagga

SEQ ID NO: 2461650 - RNA, 19 nt, Artificial Sequence
  Description of Artificial Sequence: Synthetic oligonucleotide
ucaguauagugacaugguc

SEQ ID NO: 2461651 - RNA, 19 nt, Artificial Sequence
  Description of Artificial Sequence: Synthetic oligonucleotide
auuuaguuugggguccacc

SEQ ID NO: 2461652 - RNA, 19 nt, Artificial Sequence
  Description of Artificial Sequence: Synthetic oligonucleotide
ucuacuccugcuuccaaca

SEQ ID NO: 2461653 - RNA, 19 nt, Artificial Sequence
  Description of Artificial Sequence: Synthetic oligonucleotide
ucauaugaaucaggaaucc

SEQ ID NO: 2461654 - RNA, 19 nt, Artificial Sequence
  Description of Artificial Sequence: Synthetic oligonucleotide
uaguuugggguccaccacc

SEQ ID NO: 2461655 - RNA, 19 nt, Artificial Sequence
  Description of Artificial Sequence: Synthetic oligonucleotide
ucgacucaaguuauauuca

SEQ ID NO: 2461656 - RNA, 19 nt, Artificial Sequence
  Description of Artificial Sequence: Synthetic oligonucleotide
uaugaaucaggaauccauu

SEQ ID NO: 2461657 - RNA, 19 nt, Artificial Sequence
  Description of Artificial Sequence: Synthetic oligonucleotide
ugaagaugugauuuaguuu

SEQ ID NO: 2461658 - RNA, 19 nt, Artificial Sequence
  Description of Artificial Sequence: Synthetic oligonucleotide
gguucuuguucauuguagg

SEQ ID NO: 2461659 - RNA, 19 nt, Artificial Sequence
  Description of Artificial Sequence: Synthetic oligonucleotide
caggcauauucuuaagaag

SEQ ID NO: 2461660 - RNA, 19 nt, Artificial Sequence
  Description of Artificial Sequence: Synthetic oligonucleotide
aggcauauucuuaagaagu

SEQ ID NO: 2461661 - RNA, 19 nt, Artificial Sequence
  Description of Artificial Sequence: Synthetic oligonucleotide
uauucauaugaaucaggaa

SEQ ID NO: 2461662 - RNA, 19 nt, Artificial Sequence
  Description of Artificial Sequence: Synthetic oligonucleotide
aagcuaucgaacaggccac

SEQ ID NO: 2461663 - RNA, 19 nt, Artificial Sequence
  Description of Artificial Sequence: Synthetic oligonucleotide
aagugucuugggauggcgc

SEQ ID NO: 2461664 - RNA, 19 nt, Artificial Sequence
  Description of Artificial Sequence: Synthetic oligonucleotide
caggaauccauuucguuuc

SEQ ID NO: 2461665 - RNA, 19 nt, Artificial Sequence
  Description of Artificial Sequence: Synthetic oligonucleotide
ucuugacaucaguauagug

SEQ ID NO: 2461666 - RNA, 19 nt, Artificial Sequence
  Description of Artificial Sequence: Synthetic oligonucleotide
auuguaggauuccauuccu

SEQ ID NO: 2461667 - RNA, 19 nt, Artificial Sequence
  Description of Artificial Sequence: Synthetic oligonucleotide
uaggauuccauuccuguuu

SEQ ID NO: 2461668 - RNA, 19 nt, Artificial Sequence
  Description of Artificial Sequence: Synthetic oligonucleotide
aacaugccugacuggacca

SEQ ID NO: 2461669 - RNA, 19 nt, Artificial Sequence
  Description of Artificial Sequence: Synthetic oligonucleotide
acauggucgacucaaguua

SEQ ID NO: 2461670 - RNA, 19 nt, Artificial Sequence
  Description of Artificial Sequence: Synthetic oligonucleotide
acggcucuugagcugcucc

SEQ ID NO: 2461671 - RNA, 19 nt, Artificial Sequence
  Description of Artificial Sequence: Synthetic oligonucleotide
aucaggcauauucuuaaga

SEQ ID NO: 2461672 - RNA, 19 nt, Artificial Sequence
  Description of Artificial Sequence: Synthetic oligonucleotide
aagguaucaggcauauucu

SEQ ID NO: 2461673 - RNA, 19 nt, Artificial Sequence
  Description of Artificial Sequence: Synthetic oligonucleotide
caacaugccugacuggacc

SEQ ID NO: 2461674 - RNA, 19 nt, Artificial Sequence
  Description of Artificial Sequence: Synthetic oligonucleotide
cuuaagaagugucuuggga

SEQ ID NO: 2461675 - RNA, 19 nt, Artificial Sequence
  Description of Artificial Sequence: Synthetic oligonucleotide
guacacaccccagucaagg

SEQ ID NO: 2461676 - RNA, 19 nt, Artificial Sequence
  Description of Artificial Sequence: Synthetic oligonucleotide
auaugaaucaggaauccau

SEQ ID NO: 2461677 - RNA, 19 nt, Artificial Sequence
  Description of Artificial Sequence: Synthetic oligonucleotide
auuucguuucuucauuaaa

SEQ ID NO: 2461678 - RNA, 19 nt, Artificial Sequence
  Description of Artificial Sequence: Synthetic oligonucleotide
cucaaguuauauucauaug

SEQ ID NO: 2461679 - RNA, 19 nt, Artificial Sequence
  Description of Artificial Sequence: Synthetic oligonucleotide
guucugguaagcuggcuug

SEQ ID NO: 2461680 - RNA, 19 nt, Artificial Sequence
  Description of Artificial Sequence: Synthetic oligonucleotide
agacagucccggcggaagc

SEQ ID NO: 2461681 - RNA, 19 nt, Artificial Sequence
  Description of Artificial Sequence: Synthetic oligonucleotide
uucauuaaauggaguuuuc

SEQ ID NO: 2461682 - RNA, 19 nt, Artificial Sequence
  Description of Artificial Sequence: Synthetic oligonucleotide
uugggguccaccaccugag

SEQ ID NO: 2461683 - RNA, 19 nt, Artificial Sequence
  Description of Artificial Sequence: Synthetic oligonucleotide
auauucuuaagaagugucu

SEQ ID NO: 2461684 - RNA, 19 nt, Artificial Sequence
  Description of Artificial Sequence: Synthetic oligonucleotide
uggauugcucgcucuaucu

SEQ ID NO: 2461685 - RNA, 19 nt, Artificial Sequence
  Description of Artificial Sequence: Synthetic oligonucleotide
ugacauggucgacucaagu

SEQ ID NO: 2461686 - RNA, 19 nt, Artificial Sequence
  Description of Artificial Sequence: Synthetic oligonucleotide
uuguaggauuccauuccug

SEQ ID NO: 2461687 - RNA, 19 nt, Artificial Sequence
  Description of Artificial Sequence: Synthetic oligonucleotide
ggaacucguggauugcucg

SEQ ID NO: 2461688 - RNA, 19 nt, Artificial Sequence
  Description of Artificial Sequence: Synthetic oligonucleotide
agugucuugggauggcgcu

SEQ ID NO: 2461689 - RNA, 19 nt, Artificial Sequence
  Description of Artificial Sequence: Synthetic oligonucleotide
cuuguucauuguaggauuc

SEQ ID NO: 2461690 - RNA, 19 nt, Artificial Sequence
  Description of Artificial Sequence: Synthetic oligonucleotide
cuaucgaacaggccacggc

SEQ ID NO: 2461691 - RNA, 19 nt, Artificial Sequence
  Description of Artificial Sequence: Synthetic oligonucleotide
gaagugucuugggauggcg

SEQ ID NO: 2461692 - RNA, 19 nt, Artificial Sequence
  Description of Artificial Sequence: Synthetic oligonucleotide
uguacacaccccagucaag

SEQ ID NO: 2461693 - RNA, 19 nt, Artificial Sequence
  Description of Artificial Sequence: Synthetic oligonucleotide
uuucgcaacugguucuugu

SEQ ID NO: 2461694 - RNA, 19 nt, Artificial Sequence
  Description of Artificial Sequence: Synthetic oligonucleotide
cuugguguccacgucggcc

SEQ ID NO: 2461695 - RNA, 19 nt, Artificial Sequence
  Description of Artificial Sequence: Synthetic oligonucleotide
gaacucguggauugcucgc

SEQ ID NO: 2461696 - RNA, 19 nt, Artificial Sequence
  Description of Artificial Sequence: Synthetic oligonucleotide
aaucaggaauccauuucgu

SEQ ID NO: 2461697 - RNA, 19 nt, Artificial Sequence
  Description of Artificial Sequence: Synthetic oligonucleotide
ugcuccacuaugagggcga

SEQ ID NO: 2461698 - RNA, 19 nt, Artificial Sequence
  Description of Artificial Sequence: Synthetic oligonucleotide
agugacauggucgacucaa

SEQ ID NO: 2461699 - RNA, 19 nt, Artificial Sequence
  Description of Artificial Sequence: Synthetic oligonucleotide
uugccucagguucugguaa

SEQ ID NO: 2461700 - RNA, 19 nt, Artificial Sequence
  Description of Artificial Sequence: Synthetic oligonucleotide
agaaaugauccugucuacu

SEQ ID NO: 2461701 - RNA, 19 nt, Artificial Sequence
  Description of Artificial Sequence: Synthetic oligonucleotide
agaagugucuugggauggc

SEQ ID NO: 2461702 - RNA, 19 nt, Artificial Sequence
  Description of Artificial Sequence: Synthetic oligonucleotide
gugauuuaguuuggggucc

SEQ ID NO: 2461703 - RNA, 19 nt, Artificial Sequence
  Description of Artificial Sequence: Synthetic oligonucleotide
agcgggguugaccgggccc

SEQ ID NO: 2461704 - RNA, 19 nt, Artificial Sequence
  Description of Artificial Sequence: Synthetic oligonucleotide
aggccaaaaucuugacauc

SEQ ID NO: 2461705 - RNA, 19 nt, Artificial Sequence
  Description of Artificial Sequence: Synthetic oligonucleotide
auccauuucguuucuucau

SEQ ID NO: 2461706 - RNA, 19 nt, Artificial Sequence
  Description of Artificial Sequence: Synthetic oligonucleotide
aagcgggguugaccgggcc

SEQ ID NO: 2461707 - RNA, 19 nt, Artificial Sequence
  Description of Artificial Sequence: Synthetic oligonucleotide
ucgaacaggccacggcucu

SEQ ID NO: 2461708 - RNA, 19 nt, Artificial Sequence
  Description of Artificial Sequence: Synthetic oligonucleotide
uacacaccccagucaaggc

SEQ ID NO: 2461709 - RNA, 19 nt, Artificial Sequence
  Description of Artificial Sequence: Synthetic oligonucleotide
uccugucuacuccugcuuc

SEQ ID NO: 2461710 - RNA, 19 nt, Artificial Sequence
  Description of Artificial Sequence: Synthetic oligonucleotide
agggcgaugagcugcgggu

SEQ ID NO: 2461711 - RNA, 19 nt, Artificial Sequence
  Description of Artificial Sequence: Synthetic oligonucleotide
ucgcaacugguucuuguuc

SEQ ID NO: 2461712 - RNA, 19 nt, Artificial Sequence
  Description of Artificial Sequence: Synthetic oligonucleotide
gacaucaguauagugacau

SEQ ID NO: 2461713 - RNA, 19 nt, Artificial Sequence
  Description of Artificial Sequence: Synthetic oligonucleotide
acaucaguauagugacaug

SEQ ID NO: 2461714 - RNA, 19 nt, Artificial Sequence
  Description of Artificial Sequence: Synthetic oligonucleotide
cagcccauuucgcaacugg

SEQ ID NO: 2461715 - RNA, 19 nt, Artificial Sequence
  Description of Artificial Sequence: Synthetic oligonucleotide
gauugcucgcucuaucugu

SEQ ID NO: 2461716 - RNA, 19 nt, Artificial Sequence
  Description of Artificial Sequence: Synthetic oligonucleotide
ugacaucaguauagugaca

SEQ ID NO: 2461717 - RNA, 19 nt, Artificial Sequence
  Description of Artificial Sequence: Synthetic oligonucleotide
uugcucgcucuaucugugg

SEQ ID NO: 2461718 - RNA, 19 nt, Artificial Sequence
  Description of Artificial Sequence: Synthetic oligonucleotide
acucguggauugcucgcuc

SEQ ID NO: 2461719 - RNA, 19 nt, Artificial Sequence
  Description of Artificial Sequence: Synthetic oligonucleotide
aucaggaauccauuucguu

SEQ ID NO: 2461720 - RNA, 19 nt, Artificial Sequence
  Description of Artificial Sequence: Synthetic oligonucleotide
auguguugacacaaaauua

SEQ ID NO: 2461721 - RNA, 19 nt, Artificial Sequence
  Description of Artificial Sequence: Synthetic oligonucleotide
agucaaggccaaaaucuug

SEQ ID NO: 2461722 - RNA, 19 nt, Artificial Sequence
  Description of Artificial Sequence: Synthetic oligonucleotide
uggaccacgcucugccuca

SEQ ID NO: 2461723 - RNA, 19 nt, Artificial Sequence
  Description of Artificial Sequence: Synthetic oligonucleotide
ugccucagcccauuucgca

SEQ ID NO: 2461724 - RNA, 19 nt, Artificial Sequence
  Description of Artificial Sequence: Synthetic oligonucleotide
gucuacuccugcuuccaac

SEQ ID NO: 2461725 - RNA, 19 nt, Artificial Sequence
  Description of Artificial Sequence: Synthetic oligonucleotide
ugccucagguucugguaag

SEQ ID NO: 2461726 - RNA, 19 nt, Artificial Sequence
  Description of Artificial Sequence: Synthetic oligonucleotide
ucgagcccgacgccggucc

SEQ ID NO: 2461727 - RNA, 19 nt, Artificial Sequence
  Description of Artificial Sequence: Synthetic oligonucleotide
gacggaggcggcagggugg

SEQ ID NO: 2461728 - RNA, 19 nt, Artificial Sequence
  Description of Artificial Sequence: Synthetic oligonucleotide
uucgcaacugguucuuguu

SEQ ID NO: 2461729 - RNA, 19 nt, Artificial Sequence
  Description of Artificial Sequence: Synthetic oligonucleotide
gcugcgcagacacggaggg

SEQ ID NO: 2461730 - RNA, 19 nt, Artificial Sequence
  Description of Artificial Sequence: Synthetic oligonucleotide
uccacgucggccagacagu

SEQ ID NO: 2461731 - RNA, 19 nt, Artificial Sequence
  Description of Artificial Sequence: Synthetic oligonucleotide
cugguaagcuggcuuggug

SEQ ID NO: 2461732 - RNA, 19 nt, Artificial Sequence
  Description of Artificial Sequence: Synthetic oligonucleotide
ugauuuaguuuggggucca

SEQ ID NO: 2461733 - RNA, 19 nt, Artificial Sequence
  Description of Artificial Sequence: Synthetic oligonucleotide
aucuugacaucaguauagu

SEQ ID NO: 2461734 - RNA, 19 nt, Artificial Sequence
  Description of Artificial Sequence: Synthetic oligonucleotide
auggccgcgccucgcgccc

SEQ ID NO: 2461735 - RNA, 19 nt, Artificial Sequence
  Description of Artificial Sequence: Synthetic oligonucleotide
uccugcaccguccgccaug

SEQ ID NO: 2461736 - RNA, 19 nt, Artificial Sequence
  Description of Artificial Sequence: Synthetic oligonucleotide
gacauggucgacucaaguu

SEQ ID NO: 2461737 - RNA, 19 nt, Artificial Sequence
  Description of Artificial Sequence: Synthetic oligonucleotide
aggaacucguggauugcuc

SEQ ID NO: 2461738 - RNA, 19 nt, Artificial Sequence
  Description of Artificial Sequence: Synthetic oligonucleotide
cacaccccagucaaggcca

SEQ ID NO: 2461739 - RNA, 19 nt, Artificial Sequence
  Description of Artificial Sequence: Synthetic oligonucleotide
aucgaacaggccacggcuc

SEQ ID NO: 2461740 - RNA, 19 nt, Artificial Sequence
  Description of Artificial Sequence: Synthetic oligonucleotide
aggaauccauuucguuucu

SEQ ID NO: 2461741 - RNA, 19 nt, Artificial Sequence
  Description of Artificial Sequence: Synthetic oligonucleotide
gaugagcugcgggucuccg

SEQ ID NO: 2461742 - RNA, 19 nt, Artificial Sequence
  Description of Artificial Sequence: Synthetic oligonucleotide
guguugacacaaaauuauc

SEQ ID NO: 2461743 - RNA, 19 nt, Artificial Sequence
  Description of Artificial Sequence: Synthetic oligonucleotide
caugccugacuggaccacg

SEQ ID NO: 2461744 - RNA, 19 nt, Artificial Sequence
  Description of Artificial Sequence: Synthetic oligonucleotide
cacggagggccccaaggag

SEQ ID NO: 2461745 - RNA, 19 nt, Artificial Sequence
  Description of Artificial Sequence: Synthetic oligonucleotide
cuuucagguucuggagggg

SEQ ID NO: 2461746 - RNA, 19 nt, Artificial Sequence
  Description of Artificial Sequence: Synthetic oligonucleotide
gccaggaacucguggauug

SEQ ID NO: 2461747 - RNA, 19 nt, Artificial Sequence
  Description of Artificial Sequence: Synthetic oligonucleotide
ggauugcucgcucuaucug

SEQ ID NO: 2461748 - RNA, 19 nt, Artificial Sequence
  Description of Artificial Sequence: Synthetic oligonucleotide
cauaugaaucaggaaucca

SEQ ID NO: 2461749 - RNA, 19 nt, Artificial Sequence
  Description of Artificial Sequence: Synthetic oligonucleotide
accugagaaaugauccugu

SEQ ID NO: 2461750 - RNA, 19 nt, Artificial Sequence
  Description of Artificial Sequence: Synthetic oligonucleotide
ccagucaaggccaaaaucu

SEQ ID NO: 2461751 - RNA, 19 nt, Artificial Sequence
  Description of Artificial Sequence: Synthetic oligonucleotide
ugucuacuccugcuuccaa

SEQ ID NO: 2461752 - RNA, 19 nt, Artificial Sequence
  Description of Artificial Sequence: Synthetic oligonucleotide
ucuugggauggcgcuggag

SEQ ID NO: 2461753 - RNA, 19 nt, Artificial Sequence
  Description of Artificial Sequence: Synthetic oligonucleotide
agcuaucgaacaggccacg

SEQ ID NO: 2461754 - RNA, 19 nt, Artificial Sequence
  Description of Artificial Sequence: Synthetic oligonucleotide
gcggaagcuaucgaacagg

SEQ ID NO: 2461755 - RNA, 19 nt, Artificial Sequence
  Description of Artificial Sequence: Synthetic oligonucleotide
gguaagcuggcuugguguc

SEQ ID NO: 2461756 - RNA, 19 nt, Artificial Sequence
  Description of Artificial Sequence: Synthetic oligonucleotide
ucugguaagcuggcuuggu

SEQ ID NO: 2461757 - RNA, 19 nt, Artificial Sequence
  Description of Artificial Sequence: Synthetic oligonucleotide
cccauuucgcaacugguuc

SEQ ID NO: 2461758 - RNA, 19 nt, Artificial Sequence
  Description of Artificial Sequence: Synthetic oligonucleotide
cauggccgcgccucgcgcc

SEQ ID NO: 2461759 - RNA, 19 nt, Artificial Sequence
  Description of Artificial Sequence: Synthetic oligonucleotide
ucguggauugcucgcucua

SEQ ID NO: 2461760 - RNA, 19 nt, Artificial Sequence
  Description of Artificial Sequence: Synthetic oligonucleotide
guggauugcucgcucuauc

SEQ ID NO: 2461761 - RNA, 19 nt, Artificial Sequence
  Description of Artificial Sequence: Synthetic oligonucleotide
gucccggcggaagcuaucg

SEQ ID NO: 2461762 - RNA, 19 nt, Artificial Sequence
  Description of Artificial Sequence: Synthetic oligonucleotide
gacucaaguuauauucaua

SEQ ID NO: 2461763 - RNA, 19 nt, Artificial Sequence
  Description of Artificial Sequence: Synthetic oligonucleotide
aguuugggguccaccaccu

SEQ ID NO: 2461764 - RNA, 19 nt, Artificial Sequence
  Description of Artificial Sequence: Synthetic oligonucleotide
cugagaaaugauccugucu

SEQ ID NO: 2461765 - RNA, 19 nt, Artificial Sequence
  Description of Artificial Sequence: Synthetic oligonucleotide
ggggagcuggcauagcuuc

SEQ ID NO: 2461766 - RNA, 19 nt, Artificial Sequence
  Description of Artificial Sequence: Synthetic oligonucleotide
cacgcucugccucagccca

SEQ ID NO: 2461767 - RNA, 19 nt, Artificial Sequence
  Description of Artificial Sequence: Synthetic oligonucleotide
ugccugacuggaccacgcu

SEQ ID NO: 2461768 - RNA, 19 nt, Artificial Sequence
  Description of Artificial Sequence: Synthetic oligonucleotide
gccugaagaugugauuuag

SEQ ID NO: 2461769 - RNA, 19 nt, Artificial Sequence
  Description of Artificial Sequence: Synthetic oligonucleotide
gugacauggucgacucaag

SEQ ID NO: 2461770 - RNA, 19 nt, Artificial Sequence
  Description of Artificial Sequence: Synthetic oligonucleotide
ucggccagacagucccggc

SEQ ID NO: 2461771 - RNA, 19 nt, Artificial Sequence
  Description of Artificial Sequence: Synthetic oligonucleotide
auuucgcaacugguucuug

SEQ ID NO: 2461772 - RNA, 19 nt, Artificial Sequence
  Description of Artificial Sequence: Synthetic oligonucleotide
ucagcccauuucgcaacug

SEQ ID NO: 2461773 - RNA, 19 nt, Artificial Sequence
  Description of Artificial Sequence: Synthetic oligonucleotide
gucggccagacagucccgg

SEQ ID NO: 2461774 - RNA, 19 nt, Artificial Sequence
  Description of Artificial Sequence: Synthetic oligonucleotide
cacgucggccagacagucc

SEQ ID NO: 2461775 - RNA, 19 nt, Artificial Sequence
  Description of Artificial Sequence: Synthetic oligonucleotide
ugacuggaccacgcucugc

SEQ ID NO: 2461776 - RNA, 19 nt, Artificial Sequence
  Description of Artificial Sequence: Synthetic oligonucleotide
agcccauuucgcaacuggu

SEQ ID NO: 2461777 - RNA, 19 nt, Artificial Sequence
  Description of Artificial Sequence: Synthetic oligonucleotide
gcuaucgaacaggccacgg

SEQ ID NO: 2461778 - RNA, 19 nt, Artificial Sequence
  Description of Artificial Sequence: Synthetic oligonucleotide
gucuccgggaggcagcgaa

SEQ ID NO: 2461779 - RNA, 19 nt, Artificial Sequence
  Description of Artificial Sequence: Synthetic oligonucleotide
cggaagcuaucgaacaggc

SEQ ID NO: 2461780 - RNA, 19 nt, Artificial Sequence
  Description of Artificial Sequence: Synthetic oligonucleotide
ggcuugguguccacgucgg

SEQ ID NO: 2461781 - RNA, 19 nt, Artificial Sequence
  Description of Artificial Sequence: Synthetic oligonucleotide
gguaucaggcauauucuua

SEQ ID NO: 2461782 - RNA, 19 nt, Artificial Sequence
  Description of Artificial Sequence: Synthetic oligonucleotide
ccccacucgagcccgacgc

SEQ ID NO: 2461783 - RNA, 19 nt, Artificial Sequence
  Description of Artificial Sequence: Synthetic oligonucleotide
cugcgggucuccgggaggc

SEQ ID NO: 2461784 - RNA, 19 nt, Artificial Sequence
  Description of Artificial Sequence: Synthetic oligonucleotide
augauccugucuacuccug

SEQ ID NO: 2461785 - RNA, 19 nt, Artificial Sequence
  Description of Artificial Sequence: Synthetic oligonucleotide
ggaagcuaucgaacaggcc

SEQ ID NO: 2461786 - RNA, 19 nt, Artificial Sequence
  Description of Artificial Sequence: Synthetic oligonucleotide
ucgcucuaucuguggccug

SEQ ID NO: 2461787 - RNA, 19 nt, Artificial Sequence
  Description of Artificial Sequence: Synthetic oligonucleotide
cuggcuugguguccacguc

SEQ ID NO: 2461788 - RNA, 19 nt, Artificial Sequence
  Description of Artificial Sequence: Synthetic oligonucleotide
cauggucgacucaaguuau

SEQ ID NO: 2461789 - RNA, 19 nt, Artificial Sequence
  Description of Artificial Sequence: Synthetic oligonucleotide
ggguccaccaccugagaaa

SEQ ID NO: 2461790 - RNA, 19 nt, Artificial Sequence
  Description of Artificial Sequence: Synthetic oligonucleotide
ccggcggaagcuaucgaac

SEQ ID NO: 2461791 - RNA, 19 nt, Artificial Sequence
  Description of Artificial Sequence: Synthetic oligonucleotide
ugagggcgaugagcugcgg

SEQ ID NO: 2461792 - RNA, 19 nt, Artificial Sequence
  Description of Artificial Sequence: Synthetic oligonucleotide
ggcgcuggaggauccuggc

SEQ ID NO: 2461793 - RNA, 19 nt, Artificial Sequence
  Description of Artificial Sequence: Synthetic oligonucleotide
cuguuuguccagauguguu

SEQ ID NO: 2461794 - RNA, 19 nt, Artificial Sequence
  Description of Artificial Sequence: Synthetic oligonucleotide
gcauauucuuaagaagugu

SEQ ID NO: 2461795 - RNA, 19 nt, Artificial Sequence
  Description of Artificial Sequence: Synthetic oligonucleotide
gagcccgacgccgguccgg

SEQ ID NO: 2461796 - RNA, 19 nt, Artificial Sequence
  Description of Artificial Sequence: Synthetic oligonucleotide
gccacggcucuugagcugc

SEQ ID NO: 2461797 - RNA, 19 nt, Artificial Sequence
  Description of Artificial Sequence: Synthetic oligonucleotide
agucccggcggaagcuauc

SEQ ID NO: 2461798 - RNA, 19 nt, Artificial Sequence
  Description of Artificial Sequence: Synthetic oligonucleotide
cugucuacuccugcuucca

SEQ ID NO: 2461799 - RNA, 19 nt, Artificial Sequence
  Description of Artificial Sequence: Synthetic oligonucleotide
gcugcgggucuccgggagg

SEQ ID NO: 2461800 - RNA, 19 nt, Artificial Sequence
  Description of Artificial Sequence: Synthetic oligonucleotide
cucgcgcccgcgccgggcc

SEQ ID NO: 2461801 - RNA, 19 nt, Artificial Sequence
  Description of Artificial Sequence: Synthetic oligonucleotide
cagucaaggccaaaaucuu

SEQ ID NO: 2461802 - RNA, 19 nt, Artificial Sequence
  Description of Artificial Sequence: Synthetic oligonucleotide
ccgggaggcagcgaagcgg

SEQ ID NO: 2461803 - RNA, 19 nt, Artificial Sequence
  Description of Artificial Sequence: Synthetic oligonucleotide
caccguccgccauggccgc

SEQ ID NO: 2461804 - RNA, 19 nt, Artificial Sequence
  Description of Artificial Sequence: Synthetic oligonucleotide
acucgagcccgacgccggu

SEQ ID NO: 2461805 - RNA, 19 nt, Artificial Sequence
  Description of Artificial Sequence: Synthetic oligonucleotide
gccugacuggaccacgcuc

SEQ ID NO: 2461806 - RNA, 19 nt, Artificial Sequence
  Description of Artificial Sequence: Synthetic oligonucleotide
cgcaacugguucuuguuca

SEQ ID NO: 2461807 - RNA, 19 nt, Artificial Sequence
  Description of Artificial Sequence: Synthetic oligonucleotide
cccgacgccgguccggagg

SEQ ID NO: 2461808 - RNA, 19 nt, Artificial Sequence
  Description of Artificial Sequence: Synthetic oligonucleotide
cucggcugcuccuccggga

SEQ ID NO: 2461809 - RNA, 19 nt, Artificial Sequence
  Description of Artificial Sequence: Synthetic oligonucleotide
cuccgggagccgcgggccg

SEQ ID NO: 2461810 - RNA, 19 nt, Artificial Sequence
  Description of Artificial Sequence: Synthetic oligonucleotide
ccacgcucugccucagccc

SEQ ID NO: 2461811 - RNA, 19 nt, Artificial Sequence
  Description of Artificial Sequence: Synthetic oligonucleotide
cucgcucuaucuguggccu

SEQ ID NO: 2461812 - RNA, 19 nt, Artificial Sequence
  Description of Artificial Sequence: Synthetic oligonucleotide
ccacucgagcccgacgccg

SEQ ID NO: 2461813 - RNA, 19 nt, Artificial Sequence
  Description of Artificial Sequence: Synthetic oligonucleotide
cgaagcgggguugaccggg

SEQ ID NO: 2461814 - RNA, 19 nt, Artificial Sequence
  Description of Artificial Sequence: Synthetic oligonucleotide
ccaaaaucuugacaucagu

SEQ ID NO: 2461815 - RNA, 19 nt, Artificial Sequence
  Description of Artificial Sequence: Synthetic oligonucleotide
gcuggcuugguguccacgu

SEQ ID NO: 2461816 - RNA, 19 nt, Artificial Sequence
  Description of Artificial Sequence: Synthetic oligonucleotide
cgcugcgcagacacggagg

SEQ ID NO: 2461817 - RNA, 19 nt, Artificial Sequence
  Description of Artificial Sequence: Synthetic oligonucleotide
gacagucccggcggaagcu

SEQ ID NO: 2461818 - RNA, 19 nt, Artificial Sequence
  Description of Artificial Sequence: Synthetic oligonucleotide
gcgcugcgcagacacggag

SEQ ID NO: 2461819 - RNA, 19 nt, Artificial Sequence
  Description of Artificial Sequence: Synthetic oligonucleotide
cucguggauugcucgcucu

SEQ ID NO: 2461820 - RNA, 19 nt, Artificial Sequence
  Description of Artificial Sequence: Synthetic oligonucleotide
gcgaagcgggguugaccgg

SEQ ID NO: 2461821 - RNA, 19 nt, Artificial Sequence
  Description of Artificial Sequence: Synthetic oligonucleotide
gagcugcgggucuccggga

SEQ ID NO: 2461822 - RNA, 19 nt, Artificial Sequence
  Description of Artificial Sequence: Synthetic oligonucleotide
cugcgcagacacggagggc

SEQ ID NO: 2461823 - RNA, 19 nt, Artificial Sequence
  Description of Artificial Sequence: Synthetic oligonucleotide
acagucccggcggaagcua

SEQ ID NO: 2461824 - RNA, 19 nt, Artificial Sequence
  Description of Artificial Sequence: Synthetic oligonucleotide
cuccacuaugagggcgaug

SEQ ID NO: 2461825 - RNA, 19 nt, Artificial Sequence
  Description of Artificial Sequence: Synthetic oligonucleotide
gcgggguugaccgggcccc

SEQ ID NO: 2461826 - RNA, 19 nt, Artificial Sequence
  Description of Artificial Sequence: Synthetic oligonucleotide
ggagccgcgggccgcgcug

SEQ ID NO: 2461827 - RNA, 19 nt, Artificial Sequence
  Description of Artificial Sequence: Synthetic oligonucleotide
gggauggcgcuggaggauc

SEQ ID NO: 2461828 - RNA, 19 nt, Artificial Sequence
  Description of Artificial Sequence: Synthetic oligonucleotide
ccgacgccgguccggaggc

SEQ ID NO: 2461829 - RNA, 19 nt, Artificial Sequence
  Description of Artificial Sequence: Synthetic oligonucleotide
ggccacggcucuugagcug

SEQ ID NO: 2461830 - RNA, 19 nt, Artificial Sequence
  Description of Artificial Sequence: Synthetic oligonucleotide
cacggcgcuccccgcucgc

SEQ ID NO: 2461831 - RNA, 19 nt, Artificial Sequence
  Description of Artificial Sequence: Synthetic oligonucleotide
ccauuucgcaacugguucu

SEQ ID NO: 2461832 - RNA, 19 nt, Artificial Sequence
  Description of Artificial Sequence: Synthetic oligonucleotide
gccccacucgagcccgacg

SEQ ID NO: 2461833 - RNA, 19 nt, Artificial Sequence
  Description of Artificial Sequence: Synthetic oligonucleotide
ggucgacucaaguuauauu

SEQ ID NO: 2461834 - RNA, 19 nt, Artificial Sequence
  Description of Artificial Sequence: Synthetic oligonucleotide
auggucgacucaaguuaua

SEQ ID NO: 2461835 - RNA, 19 nt, Artificial Sequence
  Description of Artificial Sequence: Synthetic oligonucleotide
gguccaccaccugagaaau

SEQ ID NO: 2461836 - RNA, 19 nt, Artificial Sequence
  Description of Artificial Sequence: Synthetic oligonucleotide
agcccgacgccgguccgga

SEQ ID NO: 2461837 - RNA, 19 nt, Artificial Sequence
  Description of Artificial Sequence: Synthetic oligonucleotide
ugcgggucuccgggaggca

SEQ ID NO: 2461838 - RNA, 19 nt, Artificial Sequence
  Description of Artificial Sequence: Synthetic oligonucleotide
cucagcccauuucgcaacu

SEQ ID NO: 2461839 - RNA, 19 nt, Artificial Sequence
  Description of Artificial Sequence: Synthetic oligonucleotide
gcgggucuccgggaggcag

SEQ ID NO: 2461840 - RNA, 19 nt, Artificial Sequence
  Description of Artificial Sequence: Synthetic oligonucleotide
cuacuccugcuuccaacau

SEQ ID NO: 2461841 - RNA, 19 nt, Artificial Sequence
  Description of Artificial Sequence: Synthetic oligonucleotide
uggcccgccccgccugcuc

SEQ ID NO: 2461842 - RNA, 19 nt, Artificial Sequence
  Description of Artificial Sequence: Synthetic oligonucleotide
cucgagcccgacgccgguc

SEQ ID NO: 2461843 - RNA, 19 nt, Artificial Sequence
  Description of Artificial Sequence: Synthetic oligonucleotide
cccacucgagcccgacgcc

SEQ ID NO: 2461844 - RNA, 19 nt, Artificial Sequence
  Description of Artificial Sequence: Synthetic oligonucleotide
cccggcggaagcuaucgaa

SEQ ID NO: 2461845 - RNA, 19 nt, Artificial Sequence
  Description of Artificial Sequence: Synthetic oligonucleotide
gucuugggauggcgcugga

SEQ ID NO: 2461846 - RNA, 19 nt, Artificial Sequence
  Description of Artificial Sequence: Synthetic oligonucleotide
ggcgaugagcugcgggucu

SEQ ID NO: 2461847 - RNA, 19 nt, Artificial Sequence
  Description of Artificial Sequence: Synthetic oligonucleotide
cacggcucuugagcugcuc

SEQ ID NO: 2461848 - RNA, 19 nt, Artificial Sequence
  Description of Artificial Sequence: Synthetic oligonucleotide
ccuguuuguccagaugugu

SEQ ID NO: 2461849 - RNA, 19 nt, Artificial Sequence
  Description of Artificial Sequence: Synthetic oligonucleotide
ccauggccgcgccucgcgc

SEQ ID NO: 2461850 - RNA, 19 nt, Artificial Sequence
  Description of Artificial Sequence: Synthetic oligonucleotide
cgacggaggcggcagggug

SEQ ID NO: 2461851 - RNA, 19 nt, Artificial Sequence
  Description of Artificial Sequence: Synthetic oligonucleotide
cggcggaagcuaucgaaca

SEQ ID NO: 2461852 - RNA, 19 nt, Artificial Sequence
  Description of Artificial Sequence: Synthetic oligonucleotide
guccggaggccuggcccgc

SEQ ID NO: 2461853 - RNA, 19 nt, Artificial Sequence
  Description of Artificial Sequence: Synthetic oligonucleotide
ccacgucggccagacaguc

SEQ ID NO: 2461854 - RNA, 19 nt, Artificial Sequence
  Description of Artificial Sequence: Synthetic oligonucleotide
ccccgccugcuccugcacc

SEQ ID NO: 2461855 - RNA, 19 nt, Artificial Sequence
  Description of Artificial Sequence: Synthetic oligonucleotide
cugcaccguccgccauggc

SEQ ID NO: 2461856 - RNA, 19 nt, Artificial Sequence
  Description of Artificial Sequence: Synthetic oligonucleotide
ggaccacgcucugccucag

SEQ ID NO: 2461857 - RNA, 19 nt, Artificial Sequence
  Description of Artificial Sequence: Synthetic oligonucleotide
gcgccucgcgcccgcgccg

SEQ ID NO: 2461858 - RNA, 19 nt, Artificial Sequence
  Description of Artificial Sequence: Synthetic oligonucleotide
ccaaagguaucaggcauau

SEQ ID NO: 2461859 - RNA, 19 nt, Artificial Sequence
  Description of Artificial Sequence: Synthetic oligonucleotide
acgccgguccggaggccug

SEQ ID NO: 2461860 - RNA, 19 nt, Artificial Sequence
  Description of Artificial Sequence: Synthetic oligonucleotide
cgacucaaguuauauucau

SEQ ID NO: 2461861 - RNA, 19 nt, Artificial Sequence
  Description of Artificial Sequence: Synthetic oligonucleotide
cgucggccagacagucccg

SEQ ID NO: 2461862 - RNA, 19 nt, Artificial Sequence
  Description of Artificial Sequence: Synthetic oligonucleotide
caacugguucuuguucauu

SEQ ID NO: 2461863 - RNA, 19 nt, Artificial Sequence
  Description of Artificial Sequence: Synthetic oligonucleotide
gcagcgaagcgggguugac

SEQ ID NO: 2461864 - RNA, 19 nt, Artificial Sequence
  Description of Artificial Sequence: Synthetic oligonucleotide
ccccaaggaggcggcggcg

SEQ ID NO: 2461865 - RNA, 19 nt, Artificial Sequence
  Description of Artificial Sequence: Synthetic oligonucleotide
cgaugagcugcgggucucc

SEQ ID NO: 2461866 - RNA, 19 nt, Artificial Sequence
  Description of Artificial Sequence: Synthetic oligonucleotide
ccguccgccauggccgcgc

SEQ ID NO: 2461867 - RNA, 19 nt, Artificial Sequence
  Description of Artificial Sequence: Synthetic oligonucleotide
cagucccggcggaagcuau

SEQ ID NO: 2461868 - RNA, 19 nt, Artificial Sequence
  Description of Artificial Sequence: Synthetic oligonucleotide
gggccccaaggaggcggcg

SEQ ID NO: 2461869 - RNA, 19 nt, Artificial Sequence
  Description of Artificial Sequence: Synthetic oligonucleotide
cgcucuaucuguggccuga

SEQ ID NO: 2461870 - RNA, 19 nt, Artificial Sequence
  Description of Artificial Sequence: Synthetic oligonucleotide
acgcucugccucagcccau

SEQ ID NO: 2461871 - RNA, 19 nt, Artificial Sequence
  Description of Artificial Sequence: Synthetic oligonucleotide
cgcgcucggcugcuccucc

SEQ ID NO: 2461872 - RNA, 19 nt, Artificial Sequence
  Description of Artificial Sequence: Synthetic oligonucleotide
gcgcuggaggauccuggcu

SEQ ID NO: 2461873 - RNA, 19 nt, Artificial Sequence
  Description of Artificial Sequence: Synthetic oligonucleotide
caaagguaucaggcauauu

SEQ ID NO: 2461874 - RNA, 19 nt, Artificial Sequence
  Description of Artificial Sequence: Synthetic oligonucleotide
cgcagacacggagggcccc

SEQ ID NO: 2461875 - RNA, 19 nt, Artificial Sequence
  Description of Artificial Sequence: Synthetic oligonucleotide
cagccccacucgagcccga

SEQ ID NO: 2461876 - RNA, 19 nt, Artificial Sequence
  Description of Artificial Sequence: Synthetic oligonucleotide
cggcgcuccccgcucgcag

SEQ ID NO: 2461877 - RNA, 19 nt, Artificial Sequence
  Description of Artificial Sequence: Synthetic oligonucleotide
gcccgacgccgguccggag

SEQ ID NO: 2461878 - RNA, 19 nt, Artificial Sequence
  Description of Artificial Sequence: Synthetic oligonucleotide
ccucgcgcccgcgccgggc

SEQ ID NO: 2461879 - RNA, 19 nt, Artificial Sequence
  Description of Artificial Sequence: Synthetic oligonucleotide
cgggccgcgcugcgcagac

SEQ ID NO: 2461880 - RNA, 19 nt, Artificial Sequence
  Description of Artificial Sequence: Synthetic oligonucleotide
ggucuccgggaggcagcga

SEQ ID NO: 2461881 - RNA, 19 nt, Artificial Sequence
  Description of Artificial Sequence: Synthetic oligonucleotide
ccgccccgccugcuccugc

SEQ ID NO: 2461882 - RNA, 19 nt, Artificial Sequence
  Description of Artificial Sequence: Synthetic oligonucleotide
cgcgcugcgcagacacgga

SEQ ID NO: 2461883 - RNA, 19 nt, Artificial Sequence
  Description of Artificial Sequence: Synthetic oligonucleotide
cgccgguccggaggccugg

SEQ ID NO: 2461884 - RNA, 19 nt, Artificial Sequence
  Description of Artificial Sequence: Synthetic oligonucleotide
ccgcgcucggcugcuccuc

SEQ ID NO: 2461885 - RNA, 19 nt, Artificial Sequence
  Description of Artificial Sequence: Synthetic oligonucleotide
gcgacggaggcggcagggu

SEQ ID NO: 2461886 - RNA, 19 nt, Artificial Sequence
  Description of Artificial Sequence: Synthetic oligonucleotide
gggagccgcgggccgcgcu

SEQ ID NO: 2461887 - RNA, 19 nt, Artificial Sequence
  Description of Artificial Sequence: Synthetic oligonucleotide
gcuccacuaugagggcgau

SEQ ID NO: 2461888 - RNA, 19 nt, Artificial Sequence
  Description of Artificial Sequence: Synthetic oligonucleotide
cguggauugcucgcucuau

SEQ ID NO: 2461889 - RNA, 19 nt, Artificial Sequence
  Description of Artificial Sequence: Synthetic oligonucleotide
cgcgggccgcgcugcgcag

SEQ ID NO: 2461890 - RNA, 19 nt, Artificial Sequence
  Description of Artificial Sequence: Synthetic oligonucleotide
gcgcccgcgccgggccccg

SEQ ID NO: 2461891 - RNA, 19 nt, Artificial Sequence
  Description of Artificial Sequence: Synthetic oligonucleotide
cccgcgcucggcugcuccu

SEQ ID NO: 2461892 - RNA, 19 nt, Artificial Sequence
  Description of Artificial Sequence: Synthetic oligonucleotide
gggccgcgcugcgcagaca

SEQ ID NO: 2461893 - RNA, 19 nt, Artificial Sequence
  Description of Artificial Sequence: Synthetic oligonucleotide
ccacggcucuugagcugcu

SEQ ID NO: 2461894 - RNA, 19 nt, Artificial Sequence
  Description of Artificial Sequence: Synthetic oligonucleotide
ccgggccccgcgcucggcu

SEQ ID NO: 2461895 - RNA, 19 nt, Artificial Sequence
  Description of Artificial Sequence: Synthetic oligonucleotide
gccccgcgcucggcugcuc

SEQ ID NO: 2461896 - RNA, 19 nt, Artificial Sequence
  Description of Artificial Sequence: Synthetic oligonucleotide
cgaacaggccacggcucuu

SEQ ID NO: 2461897 - RNA, 19 nt, Artificial Sequence
  Description of Artificial Sequence: Synthetic oligonucleotide
cgcucugccucagcccauu

SEQ ID NO: 2461898 - RNA, 19 nt, Artificial Sequence
  Description of Artificial Sequence: Synthetic oligonucleotide
cggcgggguccacggcgcu

SEQ ID NO: 2461899 - RNA, 19 nt, Artificial Sequence
  Description of Artificial Sequence: Synthetic oligonucleotide
auaggaaccgaucugagcc

SEQ ID NO: 2461900 - RNA, 19 nt, Artificial Sequence
  Description of Artificial Sequence: Synthetic oligonucleotide
auuaucaucacucucucag

SEQ ID NO: 2461901 - RNA, 19 nt, Artificial Sequence
  Description of Artificial Sequence: Synthetic oligonucleotide
aauuuccuugcuuagcgac

SEQ ID NO: 2461902 - RNA, 19 nt, Artificial Sequence
  Description of Artificial Sequence: Synthetic oligonucleotide
uucuacaauaaaaggaggg

SEQ ID NO: 2461903 - RNA, 19 nt, Artificial Sequence
  Description of Artificial Sequence: Synthetic oligonucleotide
accuguuuuauguaggagc

SEQ ID NO: 2461904 - RNA, 19 nt, Artificial Sequence
  Description of Artificial Sequence: Synthetic oligonucleotide
uagugggugacaaacaggg

SEQ ID NO: 2461905 - RNA, 19 nt, Artificial Sequence
  Description of Artificial Sequence: Synthetic oligonucleotide
aaucaagccauucagcgcu

SEQ ID NO: 2461906 - RNA, 19 nt, Artificial Sequence
  Description of Artificial Sequence: Synthetic oligonucleotide
gaaaauggcauccacaauc

SEQ ID NO: 2461907 - RNA, 19 nt, Artificial Sequence
  Description of Artificial Sequence: Synthetic oligonucleotide
aaaauucuaccagaaaauc

SEQ ID NO: 2461908 - RNA, 19 nt, Artificial Sequence
  Description of Artificial Sequence: Synthetic oligonucleotide
ugcuaggugauucacagcc

SEQ ID NO: 2461909 - RNA, 19 nt, Artificial Sequence
  Description of Artificial Sequence: Synthetic oligonucleotide
aacgucuguaguuuucuac

SEQ ID NO: 2461910 - RNA, 19 nt, Artificial Sequence
  Description of Artificial Sequence: Synthetic oligonucleotide
guaauuuccuugcuuagcg

SEQ ID NO: 2461911 - RNA, 19 nt, Artificial Sequence
  Description of Artificial Sequence: Synthetic oligonucleotide
uuucuaguucacaaacugg

SEQ ID NO: 2461912 - RNA, 19 nt, Artificial Sequence
  Description of Artificial Sequence: Synthetic oligonucleotide
uccucaucgaccaagaauc

SEQ ID NO: 2461913 - RNA, 19 nt, Artificial Sequence
  Description of Artificial Sequence: Synthetic oligonucleotide
auauauugucugcagcacc

SEQ ID NO: 2461914 - RNA, 19 nt, Artificial Sequence
  Description of Artificial Sequence: Synthetic oligonucleotide
aaggauuucacaucucuga

SEQ ID NO: 2461915 - RNA, 19 nt, Artificial Sequence
  Description of Artificial Sequence: Synthetic oligonucleotide
uauauugucugcagcaccc

SEQ ID NO: 2461916 - RNA, 19 nt, Artificial Sequence
  Description of Artificial Sequence: Synthetic oligonucleotide
ucucugauaaaauacucca

SEQ ID NO: 2461917 - RNA, 19 nt, Artificial Sequence
  Description of Artificial Sequence: Synthetic oligonucleotide
ugauaaaauacuccagugu

SEQ ID NO: 2461918 - RNA, 19 nt, Artificial Sequence
  Description of Artificial Sequence: Synthetic oligonucleotide
uguagcauaggcgauggcg

SEQ ID NO: 2461919 - RNA, 19 nt, Artificial Sequence
  Description of Artificial Sequence: Synthetic oligonucleotide
uguauauauugucugcagc

SEQ ID NO: 2461920 - RNA, 19 nt, Artificial Sequence
  Description of Artificial Sequence: Synthetic oligonucleotide
gacaaacucguacuguugg

SEQ ID NO: 2461921 - RNA, 19 nt, Artificial Sequence
  Description of Artificial Sequence: Synthetic oligonucleotide
uucuaguucacaaacuggu

SEQ ID NO: 2461922 - RNA, 19 nt, Artificial Sequence
  Description of Artificial Sequence: Synthetic oligonucleotide
aguucuuccaugaaaguac

SEQ ID NO: 2461923 - RNA, 19 nt, Artificial Sequence
  Description of Artificial Sequence: Synthetic oligonucleotide
agugcaaccuguuuuaugu

SEQ ID NO: 2461924 - RNA, 19 nt, Artificial Sequence
  Description of Artificial Sequence: Synthetic oligonucleotide
uuuauguaggagcucuucc

SEQ ID NO: 2461925 - RNA, 19 nt, Artificial Sequence
  Description of Artificial Sequence: Synthetic oligonucleotide
uccaguguagcauaggcga

SEQ ID NO: 2461926 - RNA, 19 nt, Artificial Sequence
  Description of Artificial Sequence: Synthetic oligonucleotide
aauucuaccagaaaaucaa

SEQ ID NO: 2461927 - RNA, 19 nt, Artificial Sequence
  Description of Artificial Sequence: Synthetic oligonucleotide
caaacugguggauaguggg

SEQ ID NO: 2461928 - RNA, 19 nt, Artificial Sequence
  Description of Artificial Sequence: Synthetic oligonucleotide
uaucaucacucucucagag

SEQ ID NO: 2461929 - RNA, 19 nt, Artificial Sequence
  Description of Artificial Sequence: Synthetic oligonucleotide
agugauuaucaucacucuc

SEQ ID NO: 2461930 - RNA, 19 nt, Artificial Sequence
  Description of Artificial Sequence: Synthetic oligonucleotide
uacuguugggcacaaacug

SEQ ID NO: 2461931 - RNA, 19 nt, Artificial Sequence
  Description of Artificial Sequence: Synthetic oligonucleotide
guugcuaggugauucacag

SEQ ID NO: 2461932 - RNA, 19 nt, Artificial Sequence
  Description of Artificial Sequence: Synthetic oligonucleotide
uuauguaggagcucuuccc

SEQ ID NO: 2461933 - RNA, 19 nt, Artificial Sequence
  Description of Artificial Sequence: Synthetic oligonucleotide
aagugugguaauguucacc

SEQ ID NO: 2461934 - RNA, 19 nt, Artificial Sequence
  Description of Artificial Sequence: Synthetic oligonucleotide
ucaucgaccaagaauccca

SEQ ID NO: 2461935 - RNA, 19 nt, Artificial Sequence
  Description of Artificial Sequence: Synthetic oligonucleotide
ucaucacucucucagaguc

SEQ ID NO: 2461936 - RNA, 19 nt, Artificial Sequence
  Description of Artificial Sequence: Synthetic oligonucleotide
ucgaccaagaaucccaugu

SEQ ID NO: 2461937 - RNA, 19 nt, Artificial Sequence
  Description of Artificial Sequence: Synthetic oligonucleotide
uuggccugcaguaauuucc

SEQ ID NO: 2461938 - RNA, 19 nt, Artificial Sequence
  Description of Artificial Sequence: Synthetic oligonucleotide
cuuccaugaaaguacuccg

SEQ ID NO: 2461939 - RNA, 19 nt, Artificial Sequence
  Description of Artificial Sequence: Synthetic oligonucleotide
aucucugauaaaauacucc

SEQ ID NO: 2461940 - RNA, 19 nt, Artificial Sequence
  Description of Artificial Sequence: Synthetic oligonucleotide
uguuuuauguaggagcucu

SEQ ID NO: 2461941 - RNA, 19 nt, Artificial Sequence
  Description of Artificial Sequence: Synthetic oligonucleotide
guugggcacaaacugaucc

SEQ ID NO: 2461942 - RNA, 19 nt, Artificial Sequence
  Description of Artificial Sequence: Synthetic oligonucleotide
ugcuuagcgaccuuggcca

SEQ ID NO: 2461943 - RNA, 19 nt, Artificial Sequence
  Description of Artificial Sequence: Synthetic oligonucleotide
ugucccucuucccagcucg

SEQ ID NO: 2461944 - RNA, 19 nt, Artificial Sequence
  Description of Artificial Sequence: Synthetic oligonucleotide
uuuguauauauugucugca

SEQ ID NO: 2461945 - RNA, 19 nt, Artificial Sequence
  Description of Artificial Sequence: Synthetic oligonucleotide
aacucguacuguugggcac

SEQ ID NO: 2461946 - RNA, 19 nt, Artificial Sequence
  Description of Artificial Sequence: Synthetic oligonucleotide
ugugguaauguucaccaaa

SEQ ID NO: 2461947 - RNA, 19 nt, Artificial Sequence
  Description of Artificial Sequence: Synthetic oligonucleotide
uguucaccaaaauucuacc

SEQ ID NO: 2461948 - RNA, 19 nt, Artificial Sequence
  Description of Artificial Sequence: Synthetic oligonucleotide
cugauaaaauacuccagug

SEQ ID NO: 2461949 - RNA, 19 nt, Artificial Sequence
  Description of Artificial Sequence: Synthetic oligonucleotide
ugcaaccuguuuuauguag

SEQ ID NO: 2461950 - RNA, 19 nt, Artificial Sequence
  Description of Artificial Sequence: Synthetic oligonucleotide
aggguuaaggauuucacau

SEQ ID NO: 2461951 - RNA, 19 nt, Artificial Sequence
  Description of Artificial Sequence: Synthetic oligonucleotide
aauacuccaguguagcaua

SEQ ID NO: 2461952 - RNA, 19 nt, Artificial Sequence
  Description of Artificial Sequence: Synthetic oligonucleotide
aaagugugguaauguucac

SEQ ID NO: 2461953 - RNA, 19 nt, Artificial Sequence
  Description of Artificial Sequence: Synthetic oligonucleotide
ucuacaauaaaaggagggu

SEQ ID NO: 2461954 - RNA, 19 nt, Artificial Sequence
  Description of Artificial Sequence: Synthetic oligonucleotide
auguucaccaaaauucuac

SEQ ID NO: 2461955 - RNA, 19 nt, Artificial Sequence
  Description of Artificial Sequence: Synthetic oligonucleotide
auagcaaucagugcaaccu

SEQ ID NO: 2461956 - RNA, 19 nt, Artificial Sequence
  Description of Artificial Sequence: Synthetic oligonucleotide
aaacucguacuguugggca

SEQ ID NO: 2461957 - RNA, 19 nt, Artificial Sequence
  Description of Artificial Sequence: Synthetic oligonucleotide
uugcuuagcgaccuuggcc

SEQ ID NO: 2461958 - RNA, 19 nt, Artificial Sequence
  Description of Artificial Sequence: Synthetic oligonucleotide
ucuaguucacaaacuggug

SEQ ID NO: 2461959 - RNA, 19 nt, Artificial Sequence
  Description of Artificial Sequence: Synthetic oligonucleotide
uccugauuauuucugcugu

SEQ ID NO: 2461960 - RNA, 19 nt, Artificial Sequence
  Description of Artificial Sequence: Synthetic oligonucleotide
cagccuuacacaaagugug

SEQ ID NO: 2461961 - RNA, 19 nt, Artificial Sequence
  Description of Artificial Sequence: Synthetic oligonucleotide
gaaaaucaagccauucagc

SEQ ID NO: 2461962 - RNA, 19 nt, Artificial Sequence
  Description of Artificial Sequence: Synthetic oligonucleotide
gagucuugugacaaacucg

SEQ ID NO: 2461963 - RNA, 19 nt, Artificial Sequence
  Description of Artificial Sequence: Synthetic oligonucleotide
aguacuccgaccuuuguau

SEQ ID NO: 2461964 - RNA, 19 nt, Artificial Sequence
  Description of Artificial Sequence: Synthetic oligonucleotide
guuaccugacucuugcuug

SEQ ID NO: 2461965 - RNA, 19 nt, Artificial Sequence
  Description of Artificial Sequence: Synthetic oligonucleotide
uccggagcugauucaaacg

SEQ ID NO: 2461966 - RNA, 19 nt, Artificial Sequence
  Description of Artificial Sequence: Synthetic oligonucleotide
uccaugaaaguacuccgac

SEQ ID NO: 2461967 - RNA, 19 nt, Artificial Sequence
  Description of Artificial Sequence: Synthetic oligonucleotide
agugcuugucccucuuccc

SEQ ID NO: 2461968 - RNA, 19 nt, Artificial Sequence
  Description of Artificial Sequence: Synthetic oligonucleotide
cuacaauaaaaggagggug

SEQ ID NO: 2461969 - RNA, 19 nt, Artificial Sequence
  Description of Artificial Sequence: Synthetic oligonucleotide
ugucaguucuuccaugaaa

SEQ ID NO: 2461970 - RNA, 19 nt, Artificial Sequence
  Description of Artificial Sequence: Synthetic oligonucleotide
aaggacuagcugcuuccgg

SEQ ID NO: 2461971 - RNA, 19 nt, Artificial Sequence
  Description of Artificial Sequence: Synthetic oligonucleotide
acgucaaucauaggaugcc

SEQ ID NO: 2461972 - RNA, 19 nt, Artificial Sequence
  Description of Artificial Sequence: Synthetic oligonucleotide
ucccaugugguaauucccc

SEQ ID NO: 2461973 - RNA, 19 nt, Artificial Sequence
  Description of Artificial Sequence: Synthetic oligonucleotide
ucaaucauaggaugccuuc

SEQ ID NO: 2461974 - RNA, 19 nt, Artificial Sequence
  Description of Artificial Sequence: Synthetic oligonucleotide
cacgucaaucauaggaugc

SEQ ID NO: 2461975 - RNA, 19 nt, Artificial Sequence
  Description of Artificial Sequence: Synthetic oligonucleotide
uucuuguagaguuggccug

SEQ ID NO: 2461976 - RNA, 19 nt, Artificial Sequence
  Description of Artificial Sequence: Synthetic oligonucleotide
ucaacaguugcuaggugau

SEQ ID NO: 2461977 - RNA, 19 nt, Artificial Sequence
  Description of Artificial Sequence: Synthetic oligonucleotide
ugauuaucaucacucucuc

SEQ ID NO: 2461978 - RNA, 19 nt, Artificial Sequence
  Description of Artificial Sequence: Synthetic oligonucleotide
gugguaauuccccaccugc

SEQ ID NO: 2461979 - RNA, 19 nt, Artificial Sequence
  Description of Artificial Sequence: Synthetic oligonucleotide
caugugguaauuccccacc

SEQ ID NO: 2461980 - RNA, 19 nt, Artificial Sequence
  Description of Artificial Sequence: Synthetic oligonucleotide
uugugacaaacucguacug

SEQ ID NO: 2461981 - RNA, 19 nt, Artificial Sequence
  Description of Artificial Sequence: Synthetic oligonucleotide
gcagucaaggacuagcugc

SEQ ID NO: 2461982 - RNA, 19 nt, Artificial Sequence
  Description of Artificial Sequence: Synthetic oligonucleotide
ugacaaacucguacuguug

SEQ ID NO: 2461983 - RNA, 19 nt, Artificial Sequence
  Description of Artificial Sequence: Synthetic oligonucleotide
gaccuuuguauauauuguc

SEQ ID NO: 2461984 - RNA, 19 nt, Artificial Sequence
  Description of Artificial Sequence: Synthetic oligonucleotide
acgucuguaguuuucuaca

SEQ ID NO: 2461985 - RNA, 19 nt, Artificial Sequence
  Description of Artificial Sequence: Synthetic oligonucleotide
uccagugauuaucaucacu

SEQ ID NO: 2461986 - RNA, 19 nt, Artificial Sequence
  Description of Artificial Sequence: Synthetic oligonucleotide
uguaggagcucuucccacc

SEQ ID NO: 2461987 - RNA, 19 nt, Artificial Sequence
  Description of Artificial Sequence: Synthetic oligonucleotide
uguuaccugacucuugcuu

SEQ ID NO: 2461988 - RNA, 19 nt, Artificial Sequence
  Description of Artificial Sequence: Synthetic oligonucleotide
cacagccuuacacaaagug

SEQ ID NO: 2461989 - RNA, 19 nt, Artificial Sequence
  Description of Artificial Sequence: Synthetic oligonucleotide
gucaacaguugcuagguga

SEQ ID NO: 2461990 - RNA, 19 nt, Artificial Sequence
  Description of Artificial Sequence: Synthetic oligonucleotide
uuccaugaaaguacuccga

SEQ ID NO: 2461991 - RNA, 19 nt, Artificial Sequence
  Description of Artificial Sequence: Synthetic oligonucleotide
uuaucaucacucucucaga

SEQ ID NO: 2461992 - RNA, 19 nt, Artificial Sequence
  Description of Artificial Sequence: Synthetic oligonucleotide
ugugguaauuccccaccug

SEQ ID NO: 2461993 - RNA, 19 nt, Artificial Sequence
  Description of Artificial Sequence: Synthetic oligonucleotide
ugggguguugcuuuccuga

SEQ ID NO: 2461994 - RNA, 19 nt, Artificial Sequence
  Description of Artificial Sequence: Synthetic oligonucleotide
auguaggagcucuucccac

SEQ ID NO: 2461995 - RNA, 19 nt, Artificial Sequence
  Description of Artificial Sequence: Synthetic oligonucleotide
aguguagcauaggcgaugg

SEQ ID NO: 2461996 - RNA, 19 nt, Artificial Sequence
  Description of Artificial Sequence: Synthetic oligonucleotide
cuccaguguagcauaggcg

SEQ ID NO: 2461997 - RNA, 19 nt, Artificial Sequence
  Description of Artificial Sequence: Synthetic oligonucleotide
agucuugugacaaacucgu

SEQ ID NO: 2461998 - RNA, 19 nt, Artificial Sequence
  Description of Artificial Sequence: Synthetic oligonucleotide
uacacaaagugugguaaug

SEQ ID NO: 2461999 - RNA, 19 nt, Artificial Sequence
  Description of Artificial Sequence: Synthetic oligonucleotide
uuaccugacucuugcuugc

SEQ ID NO: 2462000 - RNA, 19 nt, Artificial Sequence
  Description of Artificial Sequence: Synthetic oligonucleotide
ugcagucaacaguugcuag

SEQ ID NO: 2462001 - RNA, 19 nt, Artificial Sequence
  Description of Artificial Sequence: Synthetic oligonucleotide
cacaaacugauccuguuca

SEQ ID NO: 2462002 - RNA, 19 nt, Artificial Sequence
  Description of Artificial Sequence: Synthetic oligonucleotide
uagcaaucagugcaaccug

SEQ ID NO: 2462003 - RNA, 19 nt, Artificial Sequence
  Description of Artificial Sequence: Synthetic oligonucleotide
uuagcgaccuuggccaggg

SEQ ID NO: 2462004 - RNA, 19 nt, Artificial Sequence
  Description of Artificial Sequence: Synthetic oligonucleotide
ucaaacgucuguaguuuuc

SEQ ID NO: 2462005 - RNA, 19 nt, Artificial Sequence
  Description of Artificial Sequence: Synthetic oligonucleotide
ccagugauuaucaucacuc

SEQ ID NO: 2462006 - RNA, 19 nt, Artificial Sequence
  Description of Artificial Sequence: Synthetic oligonucleotide
aaguacuccgaccuuugua

SEQ ID NO: 2462007 - RNA, 19 nt, Artificial Sequence
  Description of Artificial Sequence: Synthetic oligonucleotide
aagccauucagcgcugcag

SEQ ID NO: 2462008 - RNA, 19 nt, Artificial Sequence
  Description of Artificial Sequence: Synthetic oligonucleotide
acaaacaggguuaaggauu

SEQ ID NO: 2462009 - RNA, 19 nt, Artificial Sequence
  Description of Artificial Sequence: Synthetic oligonucleotide
aaaguacuccgaccuuugu

SEQ ID NO: 2462010 - RNA, 19 nt, Artificial Sequence
  Description of Artificial Sequence: Synthetic oligonucleotide
uuuuauguaggagcucuuc

SEQ ID NO: 2462011 - RNA, 19 nt, Artificial Sequence
  Description of Artificial Sequence: Synthetic oligonucleotide
ugcagucaaggacuagcug

SEQ ID NO: 2462012 - RNA, 19 nt, Artificial Sequence
  Description of Artificial Sequence: Synthetic oligonucleotide
cagcacgucaaucauagga

SEQ ID NO: 2462013 - RNA, 19 nt, Artificial Sequence
  Description of Artificial Sequence: Synthetic oligonucleotide
caugaaaguacuccgaccu

SEQ ID NO: 2462014 - RNA, 19 nt, Artificial Sequence
  Description of Artificial Sequence: Synthetic oligonucleotide
caaacucguacuguugggc

SEQ ID NO: 2462015 - RNA, 19 nt, Artificial Sequence
  Description of Artificial Sequence: Synthetic oligonucleotide
caguaauuuccuugcuuag

SEQ ID NO: 2462016 - RNA, 19 nt, Artificial Sequence
  Description of Artificial Sequence: Synthetic oligonucleotide
aggacuagcugcuuccgga

SEQ ID NO: 2462017 - RNA, 19 nt, Artificial Sequence
  Description of Artificial Sequence: Synthetic oligonucleotide
ugguaauuccccaccugcu

SEQ ID NO: 2462018 - RNA, 19 nt, Artificial Sequence
  Description of Artificial Sequence: Synthetic oligonucleotide
aucccaugugguaauuccc

SEQ ID NO: 2462019 - RNA, 19 nt, Artificial Sequence
  Description of Artificial Sequence: Synthetic oligonucleotide
auagugggugacaaacagg

SEQ ID NO: 2462020 - RNA, 19 nt, Artificial Sequence
  Description of Artificial Sequence: Synthetic oligonucleotide
aggaacauaggaaccgauc

SEQ ID NO: 2462021 - RNA, 19 nt, Artificial Sequence
  Description of Artificial Sequence: Synthetic oligonucleotide
gguccagugauuaucauca

SEQ ID NO: 2462022 - RNA, 19 nt, Artificial Sequence
  Description of Artificial Sequence: Synthetic oligonucleotide
acaaacugguggauagugg

SEQ ID NO: 2462023 - RNA, 19 nt, Artificial Sequence
  Description of Artificial Sequence: Synthetic oligonucleotide
ccgaucugagccaugauag

SEQ ID NO: 2462024 - RNA, 19 nt, Artificial Sequence
  Description of Artificial Sequence: Synthetic oligonucleotide
ugcagcacccauccgugug

SEQ ID NO: 2462025 - RNA, 19 nt, Artificial Sequence
  Description of Artificial Sequence: Synthetic oligonucleotide
ugcuugucccucuucccag

SEQ ID NO: 2462026 - RNA, 19 nt, Artificial Sequence
  Description of Artificial Sequence: Synthetic oligonucleotide
ucuuguagaguuggccugc

SEQ ID NO: 2462027 - RNA, 19 nt, Artificial Sequence
  Description of Artificial Sequence: Synthetic oligonucleotide
uugggcacaaacugauccu

SEQ ID NO: 2462028 - RNA, 19 nt, Artificial Sequence
  Description of Artificial Sequence: Synthetic oligonucleotide
gauucaaacgucuguaguu

SEQ ID NO: 2462029 - RNA, 19 nt, Artificial Sequence
  Description of Artificial Sequence: Synthetic oligonucleotide
ccgaccuuuguauauauug

SEQ ID NO: 2462030 - RNA, 19 nt, Artificial Sequence
  Description of Artificial Sequence: Synthetic oligonucleotide
ugaccaaggacuggggugu

SEQ ID NO: 2462031 - RNA, 19 nt, Artificial Sequence
  Description of Artificial Sequence: Synthetic oligonucleotide
gcagucaacaguugcuagg

SEQ ID NO: 2462032 - RNA, 19 nt, Artificial Sequence
  Description of Artificial Sequence: Synthetic oligonucleotide
uuccggagcugauucaaac

SEQ ID NO: 2462033 - RNA, 19 nt, Artificial Sequence
  Description of Artificial Sequence: Synthetic oligonucleotide
uuuccuugcuuagcgaccu

SEQ ID NO: 2462034 - RNA, 19 nt, Artificial Sequence
  Description of Artificial Sequence: Synthetic oligonucleotide
agcgaccuuggccagggag

SEQ ID NO: 2462035 - RNA, 19 nt, Artificial Sequence
  Description of Artificial Sequence: Synthetic oligonucleotide
caaucauaggaugccuucc

SEQ ID NO: 2462036 - RNA, 19 nt, Artificial Sequence
  Description of Artificial Sequence: Synthetic oligonucleotide
guucaccaaaauucuacca

SEQ ID NO: 2462037 - RNA, 19 nt, Artificial Sequence
  Description of Artificial Sequence: Synthetic oligonucleotide
aggauuucacaucucugau

SEQ ID NO: 2462038 - RNA, 19 nt, Artificial Sequence
  Description of Artificial Sequence: Synthetic oligonucleotide
gaaaguacuccgaccuuug

SEQ ID NO: 2462039 - RNA, 19 nt, Artificial Sequence
  Description of Artificial Sequence: Synthetic oligonucleotide
gauggcgauuccaucauga

SEQ ID NO: 2462040 - RNA, 19 nt, Artificial Sequence
  Description of Artificial Sequence: Synthetic oligonucleotide
uuacacaaagugugguaau

SEQ ID NO: 2462041 - RNA, 19 nt, Artificial Sequence
  Description of Artificial Sequence: Synthetic oligonucleotide
auggcgauuccaucaugag

SEQ ID NO: 2462042 - RNA, 19 nt, Artificial Sequence
  Description of Artificial Sequence: Synthetic oligonucleotide
ccuuuguauauauugucug

SEQ ID NO: 2462043 - RNA, 19 nt, Artificial Sequence
  Description of Artificial Sequence: Synthetic oligonucleotide
ucucagagucuugugacaa

SEQ ID NO: 2462044 - RNA, 19 nt, Artificial Sequence
  Description of Artificial Sequence: Synthetic oligonucleotide
uaauuccccaccugcucug

SEQ ID NO: 2462045 - RNA, 19 nt, Artificial Sequence
  Description of Artificial Sequence: Synthetic oligonucleotide
ugaaaguacuccgaccuuu

SEQ ID NO: 2462046 - RNA, 19 nt, Artificial Sequence
  Description of Artificial Sequence: Synthetic oligonucleotide
accaaaauucuaccagaaa

SEQ ID NO: 2462047 - RNA, 19 nt, Artificial Sequence
  Description of Artificial Sequence: Synthetic oligonucleotide
cuuacacaaagugugguaa

SEQ ID NO: 2462048 - RNA, 19 nt, Artificial Sequence
  Description of Artificial Sequence: Synthetic oligonucleotide
auugucugcagcacccauc

SEQ ID NO: 2462049 - RNA, 19 nt, Artificial Sequence
  Description of Artificial Sequence: Synthetic oligonucleotide
uggccugcaguaauuuccu

SEQ ID NO: 2462050 - RNA, 19 nt, Artificial Sequence
  Description of Artificial Sequence: Synthetic oligonucleotide
ucauaggaugccuuccauu

SEQ ID NO: 2462051 - RNA, 19 nt, Artificial Sequence
  Description of Artificial Sequence: Synthetic oligonucleotide
ugcuuucauccucaucgac

SEQ ID NO: 2462052 - RNA, 19 nt, Artificial Sequence
  Description of Artificial Sequence: Synthetic oligonucleotide
aucaugagugcuugucccu

SEQ ID NO: 2462053 - RNA, 19 nt, Artificial Sequence
  Description of Artificial Sequence: Synthetic oligonucleotide
gugauuaucaucacucucu

SEQ ID NO: 2462054 - RNA, 19 nt, Artificial Sequence
  Description of Artificial Sequence: Synthetic oligonucleotide
agcgcugcagucaaggacu

SEQ ID NO: 2462055 - RNA, 19 nt, Artificial Sequence
  Description of Artificial Sequence: Synthetic oligonucleotide
agccauucagcgcugcagu

SEQ ID NO: 2462056 - RNA, 19 nt, Artificial Sequence
  Description of Artificial Sequence: Synthetic oligonucleotide
accgaucugagccaugaua

SEQ ID NO: 2462057 - RNA, 19 nt, Artificial Sequence
  Description of Artificial Sequence: Synthetic oligonucleotide
guuugguccagugauuauc

SEQ ID NO: 2462058 - RNA, 19 nt, Artificial Sequence
  Description of Artificial Sequence: Synthetic oligonucleotide
aauuccccaccugcucugg

SEQ ID NO: 2462059 - RNA, 19 nt, Artificial Sequence
  Description of Artificial Sequence: Synthetic oligonucleotide
uaggaaccgaucugagcca

SEQ ID NO: 2462060 - RNA, 19 nt, Artificial Sequence
  Description of Artificial Sequence: Synthetic oligonucleotide
guagaguuggccugcagua

SEQ ID NO: 2462061 - RNA, 19 nt, Artificial Sequence
  Description of Artificial Sequence: Synthetic oligonucleotide
auucaaacgucuguaguuu

SEQ ID NO: 2462062 - RNA, 19 nt, Artificial Sequence
  Description of Artificial Sequence: Synthetic oligonucleotide
agaguuggccugcaguaau

SEQ ID NO: 2462063 - RNA, 19 nt, Artificial Sequence
  Description of Artificial Sequence: Synthetic oligonucleotide
guagcauaggcgauggcga

SEQ ID NO: 2462064 - RNA, 19 nt, Artificial Sequence
  Description of Artificial Sequence: Synthetic oligonucleotide
aauguucaccaaaauucua

SEQ ID NO: 2462065 - RNA, 19 nt, Artificial Sequence
  Description of Artificial Sequence: Synthetic oligonucleotide
aaacugguggauagugggu

SEQ ID NO: 2462066 - RNA, 19 nt, Artificial Sequence
  Description of Artificial Sequence: Synthetic oligonucleotide
acaauaaaaggagggugaa

SEQ ID NO: 2462067 - RNA, 19 nt, Artificial Sequence
  Description of Artificial Sequence: Synthetic oligonucleotide
uacuccgaccuuuguauau

SEQ ID NO: 2462068 - RNA, 19 nt, Artificial Sequence
  Description of Artificial Sequence: Synthetic oligonucleotide
uccgugugaaaauggcauc

SEQ ID NO: 2462069 - RNA, 19 nt, Artificial Sequence
  Description of Artificial Sequence: Synthetic oligonucleotide
cuucuuguagaguuggccu

SEQ ID NO: 2462070 - RNA, 19 nt, Artificial Sequence
  Description of Artificial Sequence: Synthetic oligonucleotide
augugguaauuccccaccu

SEQ ID NO: 2462071 - RNA, 19 nt, Artificial Sequence
  Description of Artificial Sequence: Synthetic oligonucleotide
auccgugugaaaauggcau

SEQ ID NO: 2462072 - RNA, 19 nt, Artificial Sequence
  Description of Artificial Sequence: Synthetic oligonucleotide
gguuaaggauuucacaucu

SEQ ID NO: 2462073 - RNA, 19 nt, Artificial Sequence
  Description of Artificial Sequence: Synthetic oligonucleotide
accaagaaucccauguggu

SEQ ID NO: 2462074 - RNA, 19 nt, Artificial Sequence
  Description of Artificial Sequence: Synthetic oligonucleotide
cucaucgaccaagaauccc

SEQ ID NO: 2462075 - RNA, 19 nt, Artificial Sequence
  Description of Artificial Sequence: Synthetic oligonucleotide
aaacgucuguaguuuucua

SEQ ID NO: 2462076 - RNA, 19 nt, Artificial Sequence
  Description of Artificial Sequence: Synthetic oligonucleotide
agcacgucaaucauaggau

SEQ ID NO: 2462077 - RNA, 19 nt, Artificial Sequence
  Description of Artificial Sequence: Synthetic oligonucleotide
acugguggauaguggguga

SEQ ID NO: 2462078 - RNA, 19 nt, Artificial Sequence
  Description of Artificial Sequence: Synthetic oligonucleotide
uucaaacgucuguaguuuu

SEQ ID NO: 2462079 - RNA, 19 nt, Artificial Sequence
  Description of Artificial Sequence: Synthetic oligonucleotide
agccuuacacaaagugugg

SEQ ID NO: 2462080 - RNA, 19 nt, Artificial Sequence
  Description of Artificial Sequence: Synthetic oligonucleotide
uccuugcuuagcgaccuug

SEQ ID NO: 2462081 - RNA, 19 nt, Artificial Sequence
  Description of Artificial Sequence: Synthetic oligonucleotide
gcaaccuguuuuauguagg

SEQ ID NO: 2462082 - RNA, 19 nt, Artificial Sequence
  Description of Artificial Sequence: Synthetic oligonucleotide
gguguugcuuuccugauua

SEQ ID NO: 2462083 - RNA, 19 nt, Artificial Sequence
  Description of Artificial Sequence: Synthetic oligonucleotide
gaaccgaucugagccauga

SEQ ID NO: 2462084 - RNA, 19 nt, Artificial Sequence
  Description of Artificial Sequence: Synthetic oligonucleotide
uugcuaggugauucacagc

SEQ ID NO: 2462085 - RNA, 19 nt, Artificial Sequence
  Description of Artificial Sequence: Synthetic oligonucleotide
caagaaucccaugugguaa

SEQ ID NO: 2462086 - RNA, 19 nt, Artificial Sequence
  Description of Artificial Sequence: Synthetic oligonucleotide
agucaacaguugcuaggug

SEQ ID NO: 2462087 - RNA, 19 nt, Artificial Sequence
  Description of Artificial Sequence: Synthetic oligonucleotide
ugauagcaaucagugcaac

SEQ ID NO: 2462088 - RNA, 19 nt, Artificial Sequence
  Description of Artificial Sequence: Synthetic oligonucleotide
cauccgugugaaaauggca

SEQ ID NO: 2462089 - RNA, 19 nt, Artificial Sequence
  Description of Artificial Sequence: Synthetic oligonucleotide
acccauguuugguccagug

SEQ ID NO: 2462090 - RNA, 19 nt, Artificial Sequence
  Description of Artificial Sequence: Synthetic oligonucleotide
caaccuguuuuauguagga

SEQ ID NO: 2462091 - RNA, 19 nt, Artificial Sequence
  Description of Artificial Sequence: Synthetic oligonucleotide
cagugcaaccuguuuuaug

SEQ ID NO: 2462092 - RNA, 19 nt, Artificial Sequence
  Description of Artificial Sequence: Synthetic oligonucleotide
cuuggccagggagaaaaug

SEQ ID NO: 2462093 - RNA, 19 nt, Artificial Sequence
  Description of Artificial Sequence: Synthetic oligonucleotide
uguugggcacaaacugauc

SEQ ID NO: 2462094 - RNA, 19 nt, Artificial Sequence
  Description of Artificial Sequence: Synthetic oligonucleotide
cugacucuugcuugcuuuc

SEQ ID NO: 2462095 - RNA, 19 nt, Artificial Sequence
  Description of Artificial Sequence: Synthetic oligonucleotide
cagcgcugcagucaaggac

SEQ ID NO: 2462096 - RNA, 19 nt, Artificial Sequence
  Description of Artificial Sequence: Synthetic oligonucleotide
uucccacccauguuugguc

SEQ ID NO: 2462097 - RNA, 19 nt, Artificial Sequence
  Description of Artificial Sequence: Synthetic oligonucleotide
aaacaggguuaaggauuuc

SEQ ID NO: 2462098 - RNA, 19 nt, Artificial Sequence
  Description of Artificial Sequence: Synthetic oligonucleotide
gaugaccaaggacuggggu

SEQ ID NO: 2462099 - RNA, 19 nt, Artificial Sequence
  Description of Artificial Sequence: Synthetic oligonucleotide
uguugcuuuccugauuauu

SEQ ID NO: 2462100 - RNA, 19 nt, Artificial Sequence
  Description of Artificial Sequence: Synthetic oligonucleotide
ugucugcagcacccauccg

SEQ ID NO: 2462101 - RNA, 19 nt, Artificial Sequence
  Description of Artificial Sequence: Synthetic oligonucleotide
ccaugaaaguacuccgacc

SEQ ID NO: 2462102 - RNA, 19 nt, Artificial Sequence
  Description of Artificial Sequence: Synthetic oligonucleotide
uccauguuaccugacucuu

SEQ ID NO: 2462103 - RNA, 19 nt, Artificial Sequence
  Description of Artificial Sequence: Synthetic oligonucleotide
uguuugguccagugauuau

SEQ ID NO: 2462104 - RNA, 19 nt, Artificial Sequence
  Description of Artificial Sequence: Synthetic oligonucleotide
cauaggaugccuuccauuu

SEQ ID NO: 2462105 - RNA, 19 nt, Artificial Sequence
  Description of Artificial Sequence: Synthetic oligonucleotide
cguacuguugggcacaaac

SEQ ID NO: 2462106 - RNA, 19 nt, Artificial Sequence
  Description of Artificial Sequence: Synthetic oligonucleotide
caaggacuagcugcuuccg

SEQ ID NO: 2462107 - RNA, 19 nt, Artificial Sequence
  Description of Artificial Sequence: Synthetic oligonucleotide
uaggugauucacagccuua

SEQ ID NO: 2462108 - RNA, 19 nt, Artificial Sequence
  Description of Artificial Sequence: Synthetic oligonucleotide
gguaauuccccaccugcuc

SEQ ID NO: 2462109 - RNA, 19 nt, Artificial Sequence
  Description of Artificial Sequence: Synthetic oligonucleotide
aggcgauggcgauuccauc

SEQ ID NO: 2462110 - RNA, 19 nt, Artificial Sequence
  Description of Artificial Sequence: Synthetic oligonucleotide
ggcgauggcgauuccauca

SEQ ID NO: 2462111 - RNA, 19 nt, Artificial Sequence
  Description of Artificial Sequence: Synthetic oligonucleotide
gaaucccaugugguaauuc

SEQ ID NO: 2462112 - RNA, 19 nt, Artificial Sequence
  Description of Artificial Sequence: Synthetic oligonucleotide
ggguuaaggauuucacauc

SEQ ID NO: 2462113 - RNA, 19 nt, Artificial Sequence
  Description of Artificial Sequence: Synthetic oligonucleotide
augauagcaaucagugcaa

SEQ ID NO: 2462114 - RNA, 19 nt, Artificial Sequence
  Description of Artificial Sequence: Synthetic oligonucleotide
aguugcuaggugauucaca

SEQ ID NO: 2462115 - RNA, 19 nt, Artificial Sequence
  Description of Artificial Sequence: Synthetic oligonucleotide
ccauccgugugaaaauggc

SEQ ID NO: 2462116 - RNA, 19 nt, Artificial Sequence
  Description of Artificial Sequence: Synthetic oligonucleotide
gagcugauucaaacgucug

SEQ ID NO: 2462117 - RNA, 19 nt, Artificial Sequence
  Description of Artificial Sequence: Synthetic oligonucleotide
agcaaucagugcaaccugu

SEQ ID NO: 2462118 - RNA, 19 nt, Artificial Sequence
  Description of Artificial Sequence: Synthetic oligonucleotide
aucgaccaagaaucccaug

SEQ ID NO: 2462119 - RNA, 19 nt, Artificial Sequence
  Description of Artificial Sequence: Synthetic oligonucleotide
auaggaugccuuccauuuu

SEQ ID NO: 2462120 - RNA, 19 nt, Artificial Sequence
  Description of Artificial Sequence: Synthetic oligonucleotide
gcacgucaaucauaggaug

SEQ ID NO: 2462121 - RNA, 19 nt, Artificial Sequence
  Description of Artificial Sequence: Synthetic oligonucleotide
ccaugauagcaaucagugc

SEQ ID NO: 2462122 - RNA, 19 nt, Artificial Sequence
  Description of Artificial Sequence: Synthetic oligonucleotide
auaggcgauggcgauucca

SEQ ID NO: 2462123 - RNA, 19 nt, Artificial Sequence
  Description of Artificial Sequence: Synthetic oligonucleotide
ggacuagcugcuuccggag

SEQ ID NO: 2462124 - RNA, 19 nt, Artificial Sequence
  Description of Artificial Sequence: Synthetic oligonucleotide
augaaaguacuccgaccuu

SEQ ID NO: 2462125 - RNA, 19 nt, Artificial Sequence
  Description of Artificial Sequence: Synthetic oligonucleotide
uagcauaggcgauggcgau

SEQ ID NO: 2462126 - RNA, 19 nt, Artificial Sequence
  Description of Artificial Sequence: Synthetic oligonucleotide
cuuagcgaccuuggccagg

SEQ ID NO: 2462127 - RNA, 19 nt, Artificial Sequence
  Description of Artificial Sequence: Synthetic oligonucleotide
auguuaccugacucuugcu

SEQ ID NO: 2462128 - RNA, 19 nt, Artificial Sequence
  Description of Artificial Sequence: Synthetic oligonucleotide
uagaguuggccugcaguaa

SEQ ID NO: 2462129 - RNA, 19 nt, Artificial Sequence
  Description of Artificial Sequence: Synthetic oligonucleotide
acaaucccaauuguugcuu

SEQ ID NO: 2462130 - RNA, 19 nt, Artificial Sequence
  Description of Artificial Sequence: Synthetic oligonucleotide
aggagcucuucccacccau

SEQ ID NO: 2462131 - RNA, 19 nt, Artificial Sequence
  Description of Artificial Sequence: Synthetic oligonucleotide
acccauccgugugaaaaug

SEQ ID NO: 2462132 - RNA, 19 nt, Artificial Sequence
  Description of Artificial Sequence: Synthetic oligonucleotide
acucguacuguugggcaca

SEQ ID NO: 2462133 - RNA, 19 nt, Artificial Sequence
  Description of Artificial Sequence: Synthetic oligonucleotide
uaggagcucuucccaccca

SEQ ID NO: 2462134 - RNA, 19 nt, Artificial Sequence
  Description of Artificial Sequence: Synthetic oligonucleotide
aucccaauuguugcuuccu

SEQ ID NO: 2462135 - RNA, 19 nt, Artificial Sequence
  Description of Artificial Sequence: Synthetic oligonucleotide
cauucagcgcugcagucaa

SEQ ID NO: 2462136 - RNA, 19 nt, Artificial Sequence
  Description of Artificial Sequence: Synthetic oligonucleotide
cuucccagcucguccagga

SEQ ID NO: 2462137 - RNA, 19 nt, Artificial Sequence
  Description of Artificial Sequence: Synthetic oligonucleotide
aaccgaucugagccaugau

SEQ ID NO: 2462138 - RNA, 19 nt, Artificial Sequence
  Description of Artificial Sequence: Synthetic oligonucleotide
ucaagccauucagcgcugc

SEQ ID NO: 2462139 - RNA, 19 nt, Artificial Sequence
  Description of Artificial Sequence: Synthetic oligonucleotide
guuaaggauuucacaucuc

SEQ ID NO: 2462140 - RNA, 19 nt, Artificial Sequence
  Description of Artificial Sequence: Synthetic oligonucleotide
aguucacaaacugguggau

SEQ ID NO: 2462141 - RNA, 19 nt, Artificial Sequence
  Description of Artificial Sequence: Synthetic oligonucleotide
auacuccaguguagcauag

SEQ ID NO: 2462142 - RNA, 19 nt, Artificial Sequence
  Description of Artificial Sequence: Synthetic oligonucleotide
gugacaaacucguacuguu

SEQ ID NO: 2462143 - RNA, 19 nt, Artificial Sequence
  Description of Artificial Sequence: Synthetic oligonucleotide
ugguggauagugggugaca

SEQ ID NO: 2462144 - RNA, 19 nt, Artificial Sequence
  Description of Artificial Sequence: Synthetic oligonucleotide
uccccaccugcucugggua

SEQ ID NO: 2462145 - RNA, 19 nt, Artificial Sequence
  Description of Artificial Sequence: Synthetic oligonucleotide
augcagucaacaguugcua

SEQ ID NO: 2462146 - RNA, 19 nt, Artificial Sequence
  Description of Artificial Sequence: Synthetic oligonucleotide
ccgugugaaaauggcaucc

SEQ ID NO: 2462147 - RNA, 19 nt, Artificial Sequence
  Description of Artificial Sequence: Synthetic oligonucleotide
uccgaccuuuguauauauu

SEQ ID NO: 2462148 - RNA, 19 nt, Artificial Sequence
  Description of Artificial Sequence: Synthetic oligonucleotide
cugggguguugcuuuccug

SEQ ID NO: 2462149 - RNA, 19 nt, Artificial Sequence
  Description of Artificial Sequence: Synthetic oligonucleotide
caguugcuaggugauucac

SEQ ID NO: 2462150 - RNA, 19 nt, Artificial Sequence
  Description of Artificial Sequence: Synthetic oligonucleotide
uuccaucaugagugcuugu

SEQ ID NO: 2462151 - RNA, 19 nt, Artificial Sequence
  Description of Artificial Sequence: Synthetic oligonucleotide
caaacaggguuaaggauuu

SEQ ID NO: 2462152 - RNA, 19 nt, Artificial Sequence
  Description of Artificial Sequence: Synthetic oligonucleotide
ccugauuauuucugcugug

SEQ ID NO: 2462153 - RNA, 19 nt, Artificial Sequence
  Description of Artificial Sequence: Synthetic oligonucleotide
ggcaccugcuccauguuac

SEQ ID NO: 2462154 - RNA, 19 nt, Artificial Sequence
  Description of Artificial Sequence: Synthetic oligonucleotide
ggauuucacaucucugaua

SEQ ID NO: 2462155 - RNA, 19 nt, Artificial Sequence
  Description of Artificial Sequence: Synthetic oligonucleotide
guacuguugggcacaaacu

SEQ ID NO: 2462156 - RNA, 19 nt, Artificial Sequence
  Description of Artificial Sequence: Synthetic oligonucleotide
aguuggccugcaguaauuu

SEQ ID NO: 2462157 - RNA, 19 nt, Artificial Sequence
  Description of Artificial Sequence: Synthetic oligonucleotide
cugguggauagugggugac

SEQ ID NO: 2462158 - RNA, 19 nt, Artificial Sequence
  Description of Artificial Sequence: Synthetic oligonucleotide
acccagcagcacgucaauc

SEQ ID NO: 2462159 - RNA, 19 nt, Artificial Sequence
  Description of Artificial Sequence: Synthetic oligonucleotide
caauaaaaggagggugaaa

SEQ ID NO: 2462160 - RNA, 19 nt, Artificial Sequence
  Description of Artificial Sequence: Synthetic oligonucleotide
ccucaucgaccaagaaucc

SEQ ID NO: 2462161 - RNA, 19 nt, Artificial Sequence
  Description of Artificial Sequence: Synthetic oligonucleotide
auccacaaucccaauuguu

SEQ ID NO: 2462162 - RNA, 19 nt, Artificial Sequence
  Description of Artificial Sequence: Synthetic oligonucleotide
accugcucuggguaacauu

SEQ ID NO: 2462163 - RNA, 19 nt, Artificial Sequence
  Description of Artificial Sequence: Synthetic oligonucleotide
cagugauuaucaucacucu

SEQ ID NO: 2462164 - RNA, 19 nt, Artificial Sequence
  Description of Artificial Sequence: Synthetic oligonucleotide
gcauaggcgauggcgauuc

SEQ ID NO: 2462165 - RNA, 19 nt, Artificial Sequence
  Description of Artificial Sequence: Synthetic oligonucleotide
ccagaaaaucaagccauuc

SEQ ID NO: 2462166 - RNA, 19 nt, Artificial Sequence
  Description of Artificial Sequence: Synthetic oligonucleotide
auucacagccuuacacaaa

SEQ ID NO: 2462167 - RNA, 19 nt, Artificial Sequence
  Description of Artificial Sequence: Synthetic oligonucleotide
cuguugggcacaaacugau

SEQ ID NO: 2462168 - RNA, 19 nt, Artificial Sequence
  Description of Artificial Sequence: Synthetic oligonucleotide
acuccgaccuuuguauaua

SEQ ID NO: 2462169 - RNA, 19 nt, Artificial Sequence
  Description of Artificial Sequence: Synthetic oligonucleotide
gcgauuccaucaugagugc

SEQ ID NO: 2462170 - RNA, 19 nt, Artificial Sequence
  Description of Artificial Sequence: Synthetic oligonucleotide
caaacgucuguaguuuucu

SEQ ID NO: 2462171 - RNA, 19 nt, Artificial Sequence
  Description of Artificial Sequence: Synthetic oligonucleotide
ggauagugggugacaaaca

SEQ ID NO: 2462172 - RNA, 19 nt, Artificial Sequence
  Description of Artificial Sequence: Synthetic oligonucleotide
gguggauagugggugacaa

SEQ ID NO: 2462173 - RNA, 19 nt, Artificial Sequence
  Description of Artificial Sequence: Synthetic oligonucleotide
agugggugacaaacagggu

SEQ ID NO: 2462174 - RNA, 19 nt, Artificial Sequence
  Description of Artificial Sequence: Synthetic oligonucleotide
cauaggcgauggcgauucc

SEQ ID NO: 2462175 - RNA, 19 nt, Artificial Sequence
  Description of Artificial Sequence: Synthetic oligonucleotide
cugcagucaaggacuagcu

SEQ ID NO: 2462176 - RNA, 19 nt, Artificial Sequence
  Description of Artificial Sequence: Synthetic oligonucleotide
ggagcugauucaaacgucu

SEQ ID NO: 2462177 - RNA, 19 nt, Artificial Sequence
  Description of Artificial Sequence: Synthetic oligonucleotide
gcacccauccgugugaaaa

SEQ ID NO: 2462178 - RNA, 19 nt, Artificial Sequence
  Description of Artificial Sequence: Synthetic oligonucleotide
uaccugacucuugcuugcu

SEQ ID NO: 2462179 - RNA, 19 nt, Artificial Sequence
  Description of Artificial Sequence: Synthetic oligonucleotide
aggaaccgaucugagccau

SEQ ID NO: 2462180 - RNA, 19 nt, Artificial Sequence
  Description of Artificial Sequence: Synthetic oligonucleotide
cuaggugauucacagccuu

SEQ ID NO: 2462181 - RNA, 19 nt, Artificial Sequence
  Description of Artificial Sequence: Synthetic oligonucleotide
cagucaacaguugcuaggu

SEQ ID NO: 2462182 - RNA, 19 nt, Artificial Sequence
  Description of Artificial Sequence: Synthetic oligonucleotide
ccauguuaccugacucuug

SEQ ID NO: 2462183 - RNA, 19 nt, Artificial Sequence
  Description of Artificial Sequence: Synthetic oligonucleotide
guacuccgaccuuuguaua

SEQ ID NO: 2462184 - RNA, 19 nt, Artificial Sequence
  Description of Artificial Sequence: Synthetic oligonucleotide
accagaaaaucaagccauu

SEQ ID NO: 2462185 - RNA, 19 nt, Artificial Sequence
  Description of Artificial Sequence: Synthetic oligonucleotide
accugacucuugcuugcuu

SEQ ID NO: 2462186 - RNA, 19 nt, Artificial Sequence
  Description of Artificial Sequence: Synthetic oligonucleotide
gcuuagcgaccuuggccag

SEQ ID NO: 2462187 - RNA, 19 nt, Artificial Sequence
  Description of Artificial Sequence: Synthetic oligonucleotide
cuuccggagcugauucaaa

SEQ ID NO: 2462188 - RNA, 19 nt, Artificial Sequence
  Description of Artificial Sequence: Synthetic oligonucleotide
ccauguuugguccagugau

SEQ ID NO: 2462189 - RNA, 19 nt, Artificial Sequence
  Description of Artificial Sequence: Synthetic oligonucleotide
gugcaaccuguuuuaugua

SEQ ID NO: 2462190 - RNA, 19 nt, Artificial Sequence
  Description of Artificial Sequence: Synthetic oligonucleotide
cugcuccauguuaccugac

SEQ ID NO: 2462191 - RNA, 19 nt, Artificial Sequence
  Description of Artificial Sequence: Synthetic oligonucleotide
gcagcacgucaaucauagg

SEQ ID NO: 2462192 - RNA, 19 nt, Artificial Sequence
  Description of Artificial Sequence: Synthetic oligonucleotide
cugucaguucuuccaugaa

SEQ ID NO: 2462193 - RNA, 19 nt, Artificial Sequence
  Description of Artificial Sequence: Synthetic oligonucleotide
cgaccaagaaucccaugug

SEQ ID NO: 2462194 - RNA, 19 nt, Artificial Sequence
  Description of Artificial Sequence: Synthetic oligonucleotide
ccuuacacaaaguguggua

SEQ ID NO: 2462195 - RNA, 19 nt, Artificial Sequence
  Description of Artificial Sequence: Synthetic oligonucleotide
cuuguagaguuggccugca

SEQ ID NO: 2462196 - RNA, 19 nt, Artificial Sequence
  Description of Artificial Sequence: Synthetic oligonucleotide
agcauaggcgauggcgauu

SEQ ID NO: 2462197 - RNA, 19 nt, Artificial Sequence
  Description of Artificial Sequence: Synthetic oligonucleotide
cugcugugucugucaguuc

SEQ ID NO: 2462198 - RNA, 19 nt, Artificial Sequence
  Description of Artificial Sequence: Synthetic oligonucleotide
caugagugcuugucccucu

SEQ ID NO: 2462199 - RNA, 19 nt, Artificial Sequence
  Description of Artificial Sequence: Synthetic oligonucleotide
gcaggaacauaggaaccga

SEQ ID NO: 2462200 - RNA, 19 nt, Artificial Sequence
  Description of Artificial Sequence: Synthetic oligonucleotide
cacucucucagagucuugu

SEQ ID NO: 2462201 - RNA, 19 nt, Artificial Sequence
  Description of Artificial Sequence: Synthetic oligonucleotide
caucacucucucagagucu

SEQ ID NO: 2462202 - RNA, 19 nt, Artificial Sequence
  Description of Artificial Sequence: Synthetic oligonucleotide
gucaaucauaggaugccuu

SEQ ID NO: 2462203 - RNA, 19 nt, Artificial Sequence
  Description of Artificial Sequence: Synthetic oligonucleotide
caaucagugcaaccuguuu

SEQ ID NO: 2462204 - RNA, 19 nt, Artificial Sequence
  Description of Artificial Sequence: Synthetic oligonucleotide
gccauucagcgcugcaguc

SEQ ID NO: 2462205 - RNA, 19 nt, Artificial Sequence
  Description of Artificial Sequence: Synthetic oligonucleotide
gcgaccuuggccagggaga

SEQ ID NO: 2462206 - RNA, 19 nt, Artificial Sequence
  Description of Artificial Sequence: Synthetic oligonucleotide
caucgaccaagaaucccau

SEQ ID NO: 2462207 - RNA, 19 nt, Artificial Sequence
  Description of Artificial Sequence: Synthetic oligonucleotide
auucagcgcugcagucaag

SEQ ID NO: 2462208 - RNA, 19 nt, Artificial Sequence
  Description of Artificial Sequence: Synthetic oligonucleotide
cuucccacccauguuuggu

SEQ ID NO: 2462209 - RNA, 19 nt, Artificial Sequence
  Description of Artificial Sequence: Synthetic oligonucleotide
cccauguuugguccaguga

SEQ ID NO: 2462210 - RNA, 19 nt, Artificial Sequence
  Description of Artificial Sequence: Synthetic oligonucleotide
caggaacauaggaaccgau

SEQ ID NO: 2462211 - RNA, 19 nt, Artificial Sequence
  Description of Artificial Sequence: Synthetic oligonucleotide
ggagcucuucccacccaug

SEQ ID NO: 2462212 - RNA, 19 nt, Artificial Sequence
  Description of Artificial Sequence: Synthetic oligonucleotide
cacccauccgugugaaaau

SEQ ID NO: 2462213 - RNA, 19 nt, Artificial Sequence
  Description of Artificial Sequence: Synthetic oligonucleotide
cuccgaccuuuguauauau

SEQ ID NO: 2462214 - RNA, 19 nt, Artificial Sequence
  Description of Artificial Sequence: Synthetic oligonucleotide
cccaauuguugcuuccucu

SEQ ID NO: 2462215 - RNA, 19 nt, Artificial Sequence
  Description of Artificial Sequence: Synthetic oligonucleotide
guucacccagcagcacguc

SEQ ID NO: 2462216 - RNA, 19 nt, Artificial Sequence
  Description of Artificial Sequence: Synthetic oligonucleotide
guuuuauguaggagcucuu

SEQ ID NO: 2462217 - RNA, 19 nt, Artificial Sequence
  Description of Artificial Sequence: Synthetic oligonucleotide
ggaaccgaucugagccaug

SEQ ID NO: 2462218 - RNA, 19 nt, Artificial Sequence
  Description of Artificial Sequence: Synthetic oligonucleotide
caaggacugggguguugcu

SEQ ID NO: 2462219 - RNA, 19 nt, Artificial Sequence
  Description of Artificial Sequence: Synthetic oligonucleotide
ucguacuguugggcacaaa

SEQ ID NO: 2462220 - RNA, 19 nt, Artificial Sequence
  Description of Artificial Sequence: Synthetic oligonucleotide
gaguuggccugcaguaauu

SEQ ID NO: 2462221 - RNA, 19 nt, Artificial Sequence
  Description of Artificial Sequence: Synthetic oligonucleotide
cgucuguaguuuucuacaa

SEQ ID NO: 2462222 - RNA, 19 nt, Artificial Sequence
  Description of Artificial Sequence: Synthetic oligonucleotide
gucuugugacaaacucgua

SEQ ID NO: 2462223 - RNA, 19 nt, Artificial Sequence
  Description of Artificial Sequence: Synthetic oligonucleotide
gggugacaaacaggguuaa

SEQ ID NO: 2462224 - RNA, 19 nt, Artificial Sequence
  Description of Artificial Sequence: Synthetic oligonucleotide
guguugcuuuccugauuau

SEQ ID NO: 2462225 - RNA, 19 nt, Artificial Sequence
  Description of Artificial Sequence: Synthetic oligonucleotide
ccugacucuugcuugcuuu

SEQ ID NO: 2462226 - RNA, 19 nt, Artificial Sequence
  Description of Artificial Sequence: Synthetic oligonucleotide
cucguacuguugggcacaa

SEQ ID NO: 2462227 - RNA, 19 nt, Artificial Sequence
  Description of Artificial Sequence: Synthetic oligonucleotide
gggguguugcuuuccugau

SEQ ID NO: 2462228 - RNA, 19 nt, Artificial Sequence
  Description of Artificial Sequence: Synthetic oligonucleotide
cgauggcgauuccaucaug

SEQ ID NO: 2462229 - RNA, 19 nt, Artificial Sequence
  Description of Artificial Sequence: Synthetic oligonucleotide
gcuaggugauucacagccu

SEQ ID NO: 2462230 - RNA, 19 nt, Artificial Sequence
  Description of Artificial Sequence: Synthetic oligonucleotide
cccaccugcucuggguaac

SEQ ID NO: 2462231 - RNA, 19 nt, Artificial Sequence
  Description of Artificial Sequence: Synthetic oligonucleotide
gcgauggcgauuccaucau

SEQ ID NO: 2462232 - RNA, 19 nt, Artificial Sequence
  Description of Artificial Sequence: Synthetic oligonucleotide
cugcucuggguaacauuuu

SEQ ID NO: 2462233 - RNA, 19 nt, Artificial Sequence
  Description of Artificial Sequence: Synthetic oligonucleotide
gcaaucagugcaaccuguu

SEQ ID NO: 2462234 - RNA, 19 nt, Artificial Sequence
  Description of Artificial Sequence: Synthetic oligonucleotide
ggguguugcuuuccugauu

SEQ ID NO: 2462235 - RNA, 19 nt, Artificial Sequence
  Description of Artificial Sequence: Synthetic oligonucleotide
ccaguguagcauaggcgau

SEQ ID NO: 2462236 - RNA, 19 nt, Artificial Sequence
  Description of Artificial Sequence: Synthetic oligonucleotide
cacccagcagcacgucaau

SEQ ID NO: 2462237 - RNA, 19 nt, Artificial Sequence
  Description of Artificial Sequence: Synthetic oligonucleotide
cgucaaucauaggaugccu

SEQ ID NO: 2462238 - RNA, 19 nt, Artificial Sequence
  Description of Artificial Sequence: Synthetic oligonucleotide
gucccucuucccagcucgu

SEQ ID NO: 2462239 - RNA, 19 nt, Artificial Sequence
  Description of Artificial Sequence: Synthetic oligonucleotide
ccccaccugcucuggguaa

SEQ ID NO: 2462240 - RNA, 19 nt, Artificial Sequence
  Description of Artificial Sequence: Synthetic oligonucleotide
caccugcucuggguaacau

SEQ ID NO: 2462241 - RNA, 19 nt, Artificial Sequence
  Description of Artificial Sequence: Synthetic oligonucleotide
cgaccuuggccagggagaa

SEQ ID NO: 2462242 - RNA, 19 nt, Artificial Sequence
  Description of Artificial Sequence: Synthetic oligonucleotide
ccagcucguccaggaugac

SEQ ID NO: 2462243 - RNA, 19 nt, Artificial Sequence
  Description of Artificial Sequence: Synthetic oligonucleotide
gcgcugcagucaaggacua

SEQ ID NO: 2462244 - RNA, 19 nt, Artificial Sequence
  Description of Artificial Sequence: Synthetic oligonucleotide
ccuuggccagggagaaaau

SEQ ID NO: 2462245 - RNA, 19 nt, Artificial Sequence
  Description of Artificial Sequence: Synthetic oligonucleotide
uuauuuguuauccuuaaag

SEQ ID NO: 2462246 - RNA, 19 nt, Artificial Sequence
  Description of Artificial Sequence: Synthetic oligonucleotide
ucugccaugggucaaaacg

SEQ ID NO: 2462247 - RNA, 19 nt, Artificial Sequence
  Description of Artificial Sequence: Synthetic oligonucleotide
auuuguuauccuuaaagac

SEQ ID NO: 2462248 - RNA, 19 nt, Artificial Sequence
  Description of Artificial Sequence: Synthetic oligonucleotide
cugacuuagaaguagaagc

SEQ ID NO: 2462249 - RNA, 19 nt, Artificial Sequence
  Description of Artificial Sequence: Synthetic oligonucleotide
ucucacaacauauuggcgg

SEQ ID NO: 2462250 - RNA, 19 nt, Artificial Sequence
  Description of Artificial Sequence: Synthetic oligonucleotide
aauacgacgacguuugugu

SEQ ID NO: 2462251 - RNA, 19 nt, Artificial Sequence
  Description of Artificial Sequence: Synthetic oligonucleotide
uuuguuauccuuaaagacu

SEQ ID NO: 2462252 - RNA, 19 nt, Artificial Sequence
  Description of Artificial Sequence: Synthetic oligonucleotide
uucauagaaaguacgaagc

SEQ ID NO: 2462253 - RNA, 19 nt, Artificial Sequence
  Description of Artificial Sequence: Synthetic oligonucleotide
uuuuaggucccaaacgacg

SEQ ID NO: 2462254 - RNA, 19 nt, Artificial Sequence
  Description of Artificial Sequence: Synthetic oligonucleotide
ugugugauuauuuauuugu

SEQ ID NO: 2462255 - RNA, 19 nt, Artificial Sequence
  Description of Artificial Sequence: Synthetic oligonucleotide
uauuuguuauccuuaaaga

SEQ ID NO: 2462256 - RNA, 19 nt, Artificial Sequence
  Description of Artificial Sequence: Synthetic oligonucleotide
ucuuuuaggucccaaacga

SEQ ID NO: 2462257 - RNA, 19 nt, Artificial Sequence
  Description of Artificial Sequence: Synthetic oligonucleotide
aaaacgccuugcuucaugg

SEQ ID NO: 2462258 - RNA, 19 nt, Artificial Sequence
  Description of Artificial Sequence: Synthetic oligonucleotide
aaguacgaagcuuucuuuc

SEQ ID NO: 2462259 - RNA, 19 nt, Artificial Sequence
  Description of Artificial Sequence: Synthetic oligonucleotide
ucuguagcaagaaugcccc

SEQ ID NO: 2462260 - RNA, 19 nt, Artificial Sequence
  Description of Artificial Sequence: Synthetic oligonucleotide
uuggucuguagcaagaaug

SEQ ID NO: 2462261 - RNA, 19 nt, Artificial Sequence
  Description of Artificial Sequence: Synthetic oligonucleotide
aacacucagauuggcaucc

SEQ ID NO: 2462262 - RNA, 19 nt, Artificial Sequence
  Description of Artificial Sequence: Synthetic oligonucleotide
uguuguaggacacguggcg

SEQ ID NO: 2462263 - RNA, 19 nt, Artificial Sequence
  Description of Artificial Sequence: Synthetic oligonucleotide
aacauauuggcggacauca

SEQ ID NO: 2462264 - RNA, 19 nt, Artificial Sequence
  Description of Artificial Sequence: Synthetic oligonucleotide
uuucuucagagcaauacga

SEQ ID NO: 2462265 - RNA, 19 nt, Artificial Sequence
  Description of Artificial Sequence: Synthetic oligonucleotide
aaaagcuuucgaauucugc

SEQ ID NO: 2462266 - RNA, 19 nt, Artificial Sequence
  Description of Artificial Sequence: Synthetic oligonucleotide
ucugcuagcucuuuuaggu

SEQ ID NO: 2462267 - RNA, 19 nt, Artificial Sequence
  Description of Artificial Sequence: Synthetic oligonucleotide
uucaucuugacgcagccga

SEQ ID NO: 2462268 - RNA, 19 nt, Artificial Sequence
  Description of Artificial Sequence: Synthetic oligonucleotide
aaguugagaacacucagau

SEQ ID NO: 2462269 - RNA, 19 nt, Artificial Sequence
  Description of Artificial Sequence: Synthetic oligonucleotide
uauccuuaaagacuuauuu

SEQ ID NO: 2462270 - RNA, 19 nt, Artificial Sequence
  Description of Artificial Sequence: Synthetic oligonucleotide
uuguuuaaaggcuuucuca

SEQ ID NO: 2462271 - RNA, 19 nt, Artificial Sequence
  Description of Artificial Sequence: Synthetic oligonucleotide
aaguuuagcguauucugcu

SEQ ID NO: 2462272 - RNA, 19 nt, Artificial Sequence
  Description of Artificial Sequence: Synthetic oligonucleotide
agugaagacagccuacguc

SEQ ID NO: 2462273 - RNA, 19 nt, Artificial Sequence
  Description of Artificial Sequence: Synthetic oligonucleotide
aguacgaagcuuucuuucg

SEQ ID NO: 2462274 - RNA, 19 nt, Artificial Sequence
  Description of Artificial Sequence: Synthetic oligonucleotide
ugucaguccaggaaugucc

SEQ ID NO: 2462275 - RNA, 19 nt, Artificial Sequence
  Description of Artificial Sequence: Synthetic oligonucleotide
ucguuguuucuucagagca

SEQ ID NO: 2462276 - RNA, 19 nt, Artificial Sequence
  Description of Artificial Sequence: Synthetic oligonucleotide
ucuuucgucgucuaccuca

SEQ ID NO: 2462277 - RNA, 19 nt, Artificial Sequence
  Description of Artificial Sequence: Synthetic oligonucleotide
ugauucggaccacauaacc

SEQ ID NO: 2462278 - RNA, 19 nt, Artificial Sequence
  Description of Artificial Sequence: Synthetic oligonucleotide
uuuaggucccaaacgacga

SEQ ID NO: 2462279 - RNA, 19 nt, Artificial Sequence
  Description of Artificial Sequence: Synthetic oligonucleotide
agucguuggaucuugggug

SEQ ID NO: 2462280 - RNA, 19 nt, Artificial Sequence
  Description of Artificial Sequence: Synthetic oligonucleotide
ucauagaaaguacgaagcu

SEQ ID NO: 2462281 - RNA, 19 nt, Artificial Sequence
  Description of Artificial Sequence: Synthetic oligonucleotide
uggucuguagcaagaaugc

SEQ ID NO: 2462282 - RNA, 19 nt, Artificial Sequence
  Description of Artificial Sequence: Synthetic oligonucleotide
uuguuauccuuaaagacuu

SEQ ID NO: 2462283 - RNA, 19 nt, Artificial Sequence
  Description of Artificial Sequence: Synthetic oligonucleotide
aacaguaguaucugucagu

SEQ ID NO: 2462284 - RNA, 19 nt, Artificial Sequence
  Description of Artificial Sequence: Synthetic oligonucleotide
aagucguuggaucuugggu

SEQ ID NO: 2462285 - RNA, 19 nt, Artificial Sequence
  Description of Artificial Sequence: Synthetic oligonucleotide
aacgacgaggaacaguagu

SEQ ID NO: 2462286 - RNA, 19 nt, Artificial Sequence
  Description of Artificial Sequence: Synthetic oligonucleotide
uuggccaaaaguuuagcgu

SEQ ID NO: 2462287 - RNA, 19 nt, Artificial Sequence
  Description of Artificial Sequence: Synthetic oligonucleotide
cucuuuuaggucccaaacg

SEQ ID NO: 2462288 - RNA, 19 nt, Artificial Sequence
  Description of Artificial Sequence: Synthetic oligonucleotide
uggcguaacaagucguugg

SEQ ID NO: 2462289 - RNA, 19 nt, Artificial Sequence
  Description of Artificial Sequence: Synthetic oligonucleotide
ucugacuuagaaguagaag

SEQ ID NO: 2462290 - RNA, 19 nt, Artificial Sequence
  Description of Artificial Sequence: Synthetic oligonucleotide
aguagaagcucucagugaa

SEQ ID NO: 2462291 - RNA, 19 nt, Artificial Sequence
  Description of Artificial Sequence: Synthetic oligonucleotide
uccucgaacagacuugcgc

SEQ ID NO: 2462292 - RNA, 19 nt, Artificial Sequence
  Description of Artificial Sequence: Synthetic oligonucleotide
uucucacaacauauuggcg

SEQ ID NO: 2462293 - RNA, 19 nt, Artificial Sequence
  Description of Artificial Sequence: Synthetic oligonucleotide
acaguaguaucugucaguc

SEQ ID NO: 2462294 - RNA, 19 nt, Artificial Sequence
  Description of Artificial Sequence: Synthetic oligonucleotide
gaacaguaguaucugucag

SEQ ID NO: 2462295 - RNA, 19 nt, Artificial Sequence
  Description of Artificial Sequence: Synthetic oligonucleotide
uuacucaacagcaggcgca

SEQ ID NO: 2462296 - RNA, 19 nt, Artificial Sequence
  Description of Artificial Sequence: Synthetic oligonucleotide
ucccaaacgacgaggaaca

SEQ ID NO: 2462297 - RNA, 19 nt, Artificial Sequence
  Description of Artificial Sequence: Synthetic oligonucleotide
aacgccuugcuucauggga

SEQ ID NO: 2462298 - RNA, 19 nt, Artificial Sequence
  Description of Artificial Sequence: Synthetic oligonucleotide
ugauuauuuauuuguuauc

SEQ ID NO: 2462299 - RNA, 19 nt, Artificial Sequence
  Description of Artificial Sequence: Synthetic oligonucleotide
agauuggcauccacgaugc

SEQ ID NO: 2462300 - RNA, 19 nt, Artificial Sequence
  Description of Artificial Sequence: Synthetic oligonucleotide
acgacguuuguguuguagg

SEQ ID NO: 2462301 - RNA, 19 nt, Artificial Sequence
  Description of Artificial Sequence: Synthetic oligonucleotide
ugugauuauuuauuuguua

SEQ ID NO: 2462302 - RNA, 19 nt, Artificial Sequence
  Description of Artificial Sequence: Synthetic oligonucleotide
aauucugcuagcucuuuua

SEQ ID NO: 2462303 - RNA, 19 nt, Artificial Sequence
  Description of Artificial Sequence: Synthetic oligonucleotide
uguucguuguuucuucaga

SEQ ID NO: 2462304 - RNA, 19 nt, Artificial Sequence
  Description of Artificial Sequence: Synthetic oligonucleotide
acagccuacgucucuuggc

SEQ ID NO: 2462305 - RNA, 19 nt, Artificial Sequence
  Description of Artificial Sequence: Synthetic oligonucleotide
uacccucuuuguuuaaagg

SEQ ID NO: 2462306 - RNA, 19 nt, Artificial Sequence
  Description of Artificial Sequence: Synthetic oligonucleotide
agcuuucgaauucugcuag

SEQ ID NO: 2462307 - RNA, 19 nt, Artificial Sequence
  Description of Artificial Sequence: Synthetic oligonucleotide
aaguagaagcucucaguga

SEQ ID NO: 2462308 - RNA, 19 nt, Artificial Sequence
  Description of Artificial Sequence: Synthetic oligonucleotide
uuacccucuuuguuuaaag

SEQ ID NO: 2462309 - RNA, 19 nt, Artificial Sequence
  Description of Artificial Sequence: Synthetic oligonucleotide
agcguauucugcugccucc

SEQ ID NO: 2462310 - RNA, 19 nt, Artificial Sequence
  Description of Artificial Sequence: Synthetic oligonucleotide
uuacaauaaccaaguugag

SEQ ID NO: 2462311 - RNA, 19 nt, Artificial Sequence
  Description of Artificial Sequence: Synthetic oligonucleotide
guucguuguuucuucagag

SEQ ID NO: 2462312 - RNA, 19 nt, Artificial Sequence
  Description of Artificial Sequence: Synthetic oligonucleotide
gaugcauccucgaacagac

SEQ ID NO: 2462313 - RNA, 19 nt, Artificial Sequence
  Description of Artificial Sequence: Synthetic oligonucleotide
uucaaugugugauuauuua

SEQ ID NO: 2462314 - RNA, 19 nt, Artificial Sequence
  Description of Artificial Sequence: Synthetic oligonucleotide
uucuucagagcaauacgac

SEQ ID NO: 2462315 - RNA, 19 nt, Artificial Sequence
  Description of Artificial Sequence: Synthetic oligonucleotide
acgaagcuuucuuucgucg

SEQ ID NO: 2462316 - RNA, 19 nt, Artificial Sequence
  Description of Artificial Sequence: Synthetic oligonucleotide
uuggcauccacgaugcauc

SEQ ID NO: 2462317 - RNA, 19 nt, Artificial Sequence
  Description of Artificial Sequence: Synthetic oligonucleotide
cuugcuucaugggaaaacc

SEQ ID NO: 2462318 - RNA, 19 nt, Artificial Sequence
  Description of Artificial Sequence: Synthetic oligonucleotide
ucgucuaccucaauuaguu

SEQ ID NO: 2462319 - RNA, 19 nt, Artificial Sequence
  Description of Artificial Sequence: Synthetic oligonucleotide
cagauuggcauccacgaug

SEQ ID NO: 2462320 - RNA, 19 nt, Artificial Sequence
  Description of Artificial Sequence: Synthetic oligonucleotide
aaugccccuuacucaacag

SEQ ID NO: 2462321 - RNA, 19 nt, Artificial Sequence
  Description of Artificial Sequence: Synthetic oligonucleotide
uuuagcguauucugcugcc

SEQ ID NO: 2462322 - RNA, 19 nt, Artificial Sequence
  Description of Artificial Sequence: Synthetic oligonucleotide
cuuacucaacagcaggcgc

SEQ ID NO: 2462323 - RNA, 19 nt, Artificial Sequence
  Description of Artificial Sequence: Synthetic oligonucleotide
cugccaugggucaaaacgc

SEQ ID NO: 2462324 - RNA, 19 nt, Artificial Sequence
  Description of Artificial Sequence: Synthetic oligonucleotide
uuuguguuguaggacacgu

SEQ ID NO: 2462325 - RNA, 19 nt, Artificial Sequence
  Description of Artificial Sequence: Synthetic oligonucleotide
uucguuguuucuucagagc

SEQ ID NO: 2462326 - RNA, 19 nt, Artificial Sequence
  Description of Artificial Sequence: Synthetic oligonucleotide
acccuuccacucuucaccc

SEQ ID NO: 2462327 - RNA, 19 nt, Artificial Sequence
  Description of Artificial Sequence: Synthetic oligonucleotide
acguuuguguuguaggaca

SEQ ID NO: 2462328 - RNA, 19 nt, Artificial Sequence
  Description of Artificial Sequence: Synthetic oligonucleotide
auaaccaaguugagaacac

SEQ ID NO: 2462329 - RNA, 19 nt, Artificial Sequence
  Description of Artificial Sequence: Synthetic oligonucleotide
uuucuuucgucgucuaccu

SEQ ID NO: 2462330 - RNA, 19 nt, Artificial Sequence
  Description of Artificial Sequence: Synthetic oligonucleotide
ucaugggaaaaccuuguuu

SEQ ID NO: 2462331 - RNA, 19 nt, Artificial Sequence
  Description of Artificial Sequence: Synthetic oligonucleotide
ugcauccucgaacagacuu

SEQ ID NO: 2462332 - RNA, 19 nt, Artificial Sequence
  Description of Artificial Sequence: Synthetic oligonucleotide
aaacgccuugcuucauggg

SEQ ID NO: 2462333 - RNA, 19 nt, Artificial Sequence
  Description of Artificial Sequence: Synthetic oligonucleotide
agcaauacgacgacguuug

SEQ ID NO: 2462334 - RNA, 19 nt, Artificial Sequence
  Description of Artificial Sequence: Synthetic oligonucleotide
uggccaaaaguuuagcgua

SEQ ID NO: 2462335 - RNA, 19 nt, Artificial Sequence
  Description of Artificial Sequence: Synthetic oligonucleotide
caaacgacgaggaacagua

SEQ ID NO: 2462336 - RNA, 19 nt, Artificial Sequence
  Description of Artificial Sequence: Synthetic oligonucleotide
augugugauuauuuauuug

SEQ ID NO: 2462337 - RNA, 19 nt, Artificial Sequence
  Description of Artificial Sequence: Synthetic oligonucleotide
uuagaaguagaagcucuca

SEQ ID NO: 2462338 - RNA, 19 nt, Artificial Sequence
  Description of Artificial Sequence: Synthetic oligonucleotide
auucccgccacugauucgg

SEQ ID NO: 2462339 - RNA, 19 nt, Artificial Sequence
  Description of Artificial Sequence: Synthetic oligonucleotide
gucuguagcaagaaugccc

SEQ ID NO: 2462340 - RNA, 19 nt, Artificial Sequence
  Description of Artificial Sequence: Synthetic oligonucleotide
aagcuuucgaauucugcua

SEQ ID NO: 2462341 - RNA, 19 nt, Artificial Sequence
  Description of Artificial Sequence: Synthetic oligonucleotide
auagaaaguacgaagcuuu

SEQ ID NO: 2462342 - RNA, 19 nt, Artificial Sequence
  Description of Artificial Sequence: Synthetic oligonucleotide
auauuggcggacaucaucu

SEQ ID NO: 2462343 - RNA, 19 nt, Artificial Sequence
  Description of Artificial Sequence: Synthetic oligonucleotide
uuaggucccaaacgacgag

SEQ ID NO: 2462344 - RNA, 19 nt, Artificial Sequence
  Description of Artificial Sequence: Synthetic oligonucleotide
cauauuggcggacaucauc

SEQ ID NO: 2462345 - RNA, 19 nt, Artificial Sequence
  Description of Artificial Sequence: Synthetic oligonucleotide
aggaacaguaguaucuguc

SEQ ID NO: 2462346 - RNA, 19 nt, Artificial Sequence
  Description of Artificial Sequence: Synthetic oligonucleotide
cuuuuaggucccaaacgac

SEQ ID NO: 2462347 - RNA, 19 nt, Artificial Sequence
  Description of Artificial Sequence: Synthetic oligonucleotide
uuuguucguuguuucuuca

SEQ ID NO: 2462348 - RNA, 19 nt, Artificial Sequence
  Description of Artificial Sequence: Synthetic oligonucleotide
aacaagucguuggaucuug

SEQ ID NO: 2462349 - RNA, 19 nt, Artificial Sequence
  Description of Artificial Sequence: Synthetic oligonucleotide
ucauucccgccacugauuc

SEQ ID NO: 2462350 - RNA, 19 nt, Artificial Sequence
  Description of Artificial Sequence: Synthetic oligonucleotide
uuuugacuggacucugacu

SEQ ID NO: 2462351 - RNA, 19 nt, Artificial Sequence
  Description of Artificial Sequence: Synthetic oligonucleotide
uuguucguuguuucuucag

SEQ ID NO: 2462352 - RNA, 19 nt, Artificial Sequence
  Description of Artificial Sequence: Synthetic oligonucleotide
uuucgaauucugcuagcuc

SEQ ID NO: 2462353 - RNA, 19 nt, Artificial Sequence
  Description of Artificial Sequence: Synthetic oligonucleotide
cuuguuugucauucccgcc

SEQ ID NO: 2462354 - RNA, 19 nt, Artificial Sequence
  Description of Artificial Sequence: Synthetic oligonucleotide
acucagauuggcauccacg

SEQ ID NO: 2462355 - RNA, 19 nt, Artificial Sequence
  Description of Artificial Sequence: Synthetic oligonucleotide
acuuagaaguagaagcucu

SEQ ID NO: 2462356 - RNA, 19 nt, Artificial Sequence
  Description of Artificial Sequence: Synthetic oligonucleotide
cuuuguucguuguuucuuc

SEQ ID NO: 2462357 - RNA, 19 nt, Artificial Sequence
  Description of Artificial Sequence: Synthetic oligonucleotide
cagccuacgucucuuggcg

SEQ ID NO: 2462358 - RNA, 19 nt, Artificial Sequence
  Description of Artificial Sequence: Synthetic oligonucleotide
cuuagaaguagaagcucuc

SEQ ID NO: 2462359 - RNA, 19 nt, Artificial Sequence
  Description of Artificial Sequence: Synthetic oligonucleotide
ugccaugggucaaaacgcc

SEQ ID NO: 2462360 - RNA, 19 nt, Artificial Sequence
  Description of Artificial Sequence: Synthetic oligonucleotide
ugcuucaugggaaaaccuu

SEQ ID NO: 2462361 - RNA, 19 nt, Artificial Sequence
  Description of Artificial Sequence: Synthetic oligonucleotide
uggaucuugggugcuuugg

SEQ ID NO: 2462362 - RNA, 19 nt, Artificial Sequence
  Description of Artificial Sequence: Synthetic oligonucleotide
ucagagcaauacgacgacg

SEQ ID NO: 2462363 - RNA, 19 nt, Artificial Sequence
  Description of Artificial Sequence: Synthetic oligonucleotide
gugaagacagccuacgucu

SEQ ID NO: 2462364 - RNA, 19 nt, Artificial Sequence
  Description of Artificial Sequence: Synthetic oligonucleotide
uacgacgacguuuguguug

SEQ ID NO: 2462365 - RNA, 19 nt, Artificial Sequence
  Description of Artificial Sequence: Synthetic oligonucleotide
uucgucgucuaccucaauu

SEQ ID NO: 2462366 - RNA, 19 nt, Artificial Sequence
  Description of Artificial Sequence: Synthetic oligonucleotide
uuccacucuucacccagag

SEQ ID NO: 2462367 - RNA, 19 nt, Artificial Sequence
  Description of Artificial Sequence: Synthetic oligonucleotide
auucucuuggccaaaaguu

SEQ ID NO: 2462368 - RNA, 19 nt, Artificial Sequence
  Description of Artificial Sequence: Synthetic oligonucleotide
cacguggcguaacaagucg

SEQ ID NO: 2462369 - RNA, 19 nt, Artificial Sequence
  Description of Artificial Sequence: Synthetic oligonucleotide
gaagcuuucuuucgucguc

SEQ ID NO: 2462370 - RNA, 19 nt, Artificial Sequence
  Description of Artificial Sequence: Synthetic oligonucleotide
gcaagaaugccccuuacuc

SEQ ID NO: 2462371 - RNA, 19 nt, Artificial Sequence
  Description of Artificial Sequence: Synthetic oligonucleotide
guaacaagucguuggaucu

SEQ ID NO: 2462372 - RNA, 19 nt, Artificial Sequence
  Description of Artificial Sequence: Synthetic oligonucleotide
ucgucgucuaccucaauua

SEQ ID NO: 2462373 - RNA, 19 nt, Artificial Sequence
  Description of Artificial Sequence: Synthetic oligonucleotide
uagaaaguacgaagcuuuc

SEQ ID NO: 2462374 - RNA, 19 nt, Artificial Sequence
  Description of Artificial Sequence: Synthetic oligonucleotide
guauucugcugccuccucc

SEQ ID NO: 2462375 - RNA, 19 nt, Artificial Sequence
  Description of Artificial Sequence: Synthetic oligonucleotide
guaucugucaguccaggaa

SEQ ID NO: 2462376 - RNA, 19 nt, Artificial Sequence
  Description of Artificial Sequence: Synthetic oligonucleotide
gaucuugggugcuuugguc

SEQ ID NO: 2462377 - RNA, 19 nt, Artificial Sequence
  Description of Artificial Sequence: Synthetic oligonucleotide
ugggucaaaacgccuugcu

SEQ ID NO: 2462378 - RNA, 19 nt, Artificial Sequence
  Description of Artificial Sequence: Synthetic oligonucleotide
acgaggaacaguaguaucu

SEQ ID NO: 2462379 - RNA, 19 nt, Artificial Sequence
  Description of Artificial Sequence: Synthetic oligonucleotide
uggcgaucuguuccuggcg

SEQ ID NO: 2462380 - RNA, 19 nt, Artificial Sequence
  Description of Artificial Sequence: Synthetic oligonucleotide
auaacccuuccacucuuca

SEQ ID NO: 2462381 - RNA, 19 nt, Artificial Sequence
  Description of Artificial Sequence: Synthetic oligonucleotide
uucuuacccucuuuguuua

SEQ ID NO: 2462382 - RNA, 19 nt, Artificial Sequence
  Description of Artificial Sequence: Synthetic oligonucleotide
gucguuggaucuugggugc

SEQ ID NO: 2462383 - RNA, 19 nt, Artificial Sequence
  Description of Artificial Sequence: Synthetic oligonucleotide
gacgaggaacaguaguauc

SEQ ID NO: 2462384 - RNA, 19 nt, Artificial Sequence
  Description of Artificial Sequence: Synthetic oligonucleotide
caaguugagaacacucaga

SEQ ID NO: 2462385 - RNA, 19 nt, Artificial Sequence
  Description of Artificial Sequence: Synthetic oligonucleotide
gacgacguuuguguuguag

SEQ ID NO: 2462386 - RNA, 19 nt, Artificial Sequence
  Description of Artificial Sequence: Synthetic oligonucleotide
cagccgaccgcgcaggagg

SEQ ID NO: 2462387 - RNA, 19 nt, Artificial Sequence
  Description of Artificial Sequence: Synthetic oligonucleotide
gacuuagaaguagaagcuc

SEQ ID NO: 2462388 - RNA, 19 nt, Artificial Sequence
  Description of Artificial Sequence: Synthetic oligonucleotide
uacgaagcuuucuuucguc

SEQ ID NO: 2462389 - RNA, 19 nt, Artificial Sequence
  Description of Artificial Sequence: Synthetic oligonucleotide
augggucaaaacgccuugc

SEQ ID NO: 2462390 - RNA, 19 nt, Artificial Sequence
  Description of Artificial Sequence: Synthetic oligonucleotide
ucuugggugcuuugguccu

SEQ ID NO: 2462391 - RNA, 19 nt, Artificial Sequence
  Description of Artificial Sequence: Synthetic oligonucleotide
acaacauauuggcggacau

SEQ ID NO: 2462392 - RNA, 19 nt, Artificial Sequence
  Description of Artificial Sequence: Synthetic oligonucleotide
guuuguguuguaggacacg

SEQ ID NO: 2462393 - RNA, 19 nt, Artificial Sequence
  Description of Artificial Sequence: Synthetic oligonucleotide
cucacaacauauuggcgga

SEQ ID NO: 2462394 - RNA, 19 nt, Artificial Sequence
  Description of Artificial Sequence: Synthetic oligonucleotide
agaaaguacgaagcuuucu

SEQ ID NO: 2462395 - RNA, 19 nt, Artificial Sequence
  Description of Artificial Sequence: Synthetic oligonucleotide
gucccaaacgacgaggaac

SEQ ID NO: 2462396 - RNA, 19 nt, Artificial Sequence
  Description of Artificial Sequence: Synthetic oligonucleotide
uccacgaugcauccucgaa

SEQ ID NO: 2462397 - RNA, 19 nt, Artificial Sequence
  Description of Artificial Sequence: Synthetic oligonucleotide
cauccucgaacagacuugc

SEQ ID NO: 2462398 - RNA, 19 nt, Artificial Sequence
  Description of Artificial Sequence: Synthetic oligonucleotide
gacguuuguguuguaggac

SEQ ID NO: 2462399 - RNA, 19 nt, Artificial Sequence
  Description of Artificial Sequence: Synthetic oligonucleotide
gaaugccccuuacucaaca

SEQ ID NO: 2462400 - RNA, 19 nt, Artificial Sequence
  Description of Artificial Sequence: Synthetic oligonucleotide
uagcguauucugcugccuc

SEQ ID NO: 2462401 - RNA, 19 nt, Artificial Sequence
  Description of Artificial Sequence: Synthetic oligonucleotide
cugauucggaccacauaac

SEQ ID NO: 2462402 - RNA, 19 nt, Artificial Sequence
  Description of Artificial Sequence: Synthetic oligonucleotide
cucaacagcaggcgcacuc

SEQ ID NO: 2462403 - RNA, 19 nt, Artificial Sequence
  Description of Artificial Sequence: Synthetic oligonucleotide
cauccacgaugcauccucg

SEQ ID NO: 2462404 - RNA, 19 nt, Artificial Sequence
  Description of Artificial Sequence: Synthetic oligonucleotide
ugguccugggcuucuuacc

SEQ ID NO: 2462405 - RNA, 19 nt, Artificial Sequence
  Description of Artificial Sequence: Synthetic oligonucleotide
ugggaaaaccuuguuuguc

SEQ ID NO: 2462406 - RNA, 19 nt, Artificial Sequence
  Description of Artificial Sequence: Synthetic oligonucleotide
uucaugggaaaaccuuguu

SEQ ID NO: 2462407 - RNA, 19 nt, Artificial Sequence
  Description of Artificial Sequence: Synthetic oligonucleotide
uaaccaaguugagaacacu

SEQ ID NO: 2462408 - RNA, 19 nt, Artificial Sequence
  Description of Artificial Sequence: Synthetic oligonucleotide
caauacgacgacguuugug

SEQ ID NO: 2462409 - RNA, 19 nt, Artificial Sequence
  Description of Artificial Sequence: Synthetic oligonucleotide
acgacgacguuuguguugu

SEQ ID NO: 2462410 - RNA, 19 nt, Artificial Sequence
  Description of Artificial Sequence: Synthetic oligonucleotide
agcucuuuuaggucccaaa

SEQ ID NO: 2462411 - RNA, 19 nt, Artificial Sequence
  Description of Artificial Sequence: Synthetic oligonucleotide
caguaguaucugucagucc

SEQ ID NO: 2462412 - RNA, 19 nt, Artificial Sequence
  Description of Artificial Sequence: Synthetic oligonucleotide
uuguaggacacguggcgua

SEQ ID NO: 2462413 - RNA, 19 nt, Artificial Sequence
  Description of Artificial Sequence: Synthetic oligonucleotide
gagaacacucagauuggca

SEQ ID NO: 2462414 - RNA, 19 nt, Artificial Sequence
  Description of Artificial Sequence: Synthetic oligonucleotide
ucugucaguccaggaaugu

SEQ ID NO: 2462415 - RNA, 19 nt, Artificial Sequence
  Description of Artificial Sequence: Synthetic oligonucleotide
acacguggcguaacaaguc

SEQ ID NO: 2462416 - RNA, 19 nt, Artificial Sequence
  Description of Artificial Sequence: Synthetic oligonucleotide
cuucaucuugacgcagccg

SEQ ID NO: 2462417 - RNA, 19 nt, Artificial Sequence
  Description of Artificial Sequence: Synthetic oligonucleotide
gacgcagccgaccgcgcag

SEQ ID NO: 2462418 - RNA, 19 nt, Artificial Sequence
  Description of Artificial Sequence: Synthetic oligonucleotide
caaaaguuuagcguauucu

SEQ ID NO: 2462419 - RNA, 19 nt, Artificial Sequence
  Description of Artificial Sequence: Synthetic oligonucleotide
gucuaccucaauuaguuuu

SEQ ID NO: 2462420 - RNA, 19 nt, Artificial Sequence
  Description of Artificial Sequence: Synthetic oligonucleotide
caucuugacgcagccgacc

SEQ ID NO: 2462421 - RNA, 19 nt, Artificial Sequence
  Description of Artificial Sequence: Synthetic oligonucleotide
uagcaagaaugccccuuac

SEQ ID NO: 2462422 - RNA, 19 nt, Artificial Sequence
  Description of Artificial Sequence: Synthetic oligonucleotide
aguugagaacacucagauu

SEQ ID NO: 2462423 - RNA, 19 nt, Artificial Sequence
  Description of Artificial Sequence: Synthetic oligonucleotide
cauucucuuggccaaaagu

SEQ ID NO: 2462424 - RNA, 19 nt, Artificial Sequence
  Description of Artificial Sequence: Synthetic oligonucleotide
aaacgacgaggaacaguag

SEQ ID NO: 2462425 - RNA, 19 nt, Artificial Sequence
  Description of Artificial Sequence: Synthetic oligonucleotide
uacucaacagcaggcgcac

SEQ ID NO: 2462426 - RNA, 19 nt, Artificial Sequence
  Description of Artificial Sequence: Synthetic oligonucleotide
ccgggaaggagauauucag

SEQ ID NO: 2462427 - RNA, 19 nt, Artificial Sequence
  Description of Artificial Sequence: Synthetic oligonucleotide
uuagcguauucugcugccu

SEQ ID NO: 2462428 - RNA, 19 nt, Artificial Sequence
  Description of Artificial Sequence: Synthetic oligonucleotide
guguuguaggacacguggc

SEQ ID NO: 2462429 - RNA, 19 nt, Artificial Sequence
  Description of Artificial Sequence: Synthetic oligonucleotide
agagcaauacgacgacguu

SEQ ID NO: 2462430 - RNA, 19 nt, Artificial Sequence
  Description of Artificial Sequence: Synthetic oligonucleotide
uguuccuggcgcuuuucuu

SEQ ID NO: 2462431 - RNA, 19 nt, Artificial Sequence
  Description of Artificial Sequence: Synthetic oligonucleotide
uggcgcuuuucuuuggcuu

SEQ ID NO: 2462432 - RNA, 19 nt, Artificial Sequence
  Description of Artificial Sequence: Synthetic oligonucleotide
cguaacaagucguuggauc

SEQ ID NO: 2462433 - RNA, 19 nt, Artificial Sequence
  Description of Artificial Sequence: Synthetic oligonucleotide
cauucccgccacugauucg

SEQ ID NO: 2462434 - RNA, 19 nt, Artificial Sequence
  Description of Artificial Sequence: Synthetic oligonucleotide
cugcuagcucuuuuagguc

SEQ ID NO: 2462435 - RNA, 19 nt, Artificial Sequence
  Description of Artificial Sequence: Synthetic oligonucleotide
cagagcaauacgacgacgu

SEQ ID NO: 2462436 - RNA, 19 nt, Artificial Sequence
  Description of Artificial Sequence: Synthetic oligonucleotide
guagcaagaaugccccuua

SEQ ID NO: 2462437 - RNA, 19 nt, Artificial Sequence
  Description of Artificial Sequence: Synthetic oligonucleotide
cccuuacucaacagcaggc

SEQ ID NO: 2462438 - RNA, 19 nt, Artificial Sequence
  Description of Artificial Sequence: Synthetic oligonucleotide
gcggacaucaucuucuuua

SEQ ID NO: 2462439 - RNA, 19 nt, Artificial Sequence
  Description of Artificial Sequence: Synthetic oligonucleotide
ccuuacucaacagcaggcg

SEQ ID NO: 2462440 - RNA, 19 nt, Artificial Sequence
  Description of Artificial Sequence: Synthetic oligonucleotide
cauaacccuuccacucuuc

SEQ ID NO: 2462441 - RNA, 19 nt, Artificial Sequence
  Description of Artificial Sequence: Synthetic oligonucleotide
gacacguggcguaacaagu

SEQ ID NO: 2462442 - RNA, 19 nt, Artificial Sequence
  Description of Artificial Sequence: Synthetic oligonucleotide
agaaugccccuuacucaac

SEQ ID NO: 2462443 - RNA, 19 nt, Artificial Sequence
  Description of Artificial Sequence: Synthetic oligonucleotide
uccugggcuucuuacccuc

SEQ ID NO: 2462444 - RNA, 19 nt, Artificial Sequence
  Description of Artificial Sequence: Synthetic oligonucleotide
cuucuuacccucuuuguuu

SEQ ID NO: 2462445 - RNA, 19 nt, Artificial Sequence
  Description of Artificial Sequence: Synthetic oligonucleotide
acaagucguuggaucuugg

SEQ ID NO: 2462446 - RNA, 19 nt, Artificial Sequence
  Description of Artificial Sequence: Synthetic oligonucleotide
ccccuuacucaacagcagg

SEQ ID NO: 2462447 - RNA, 19 nt, Artificial Sequence
  Description of Artificial Sequence: Synthetic oligonucleotide
uucggaccacauaacccuu

SEQ ID NO: 2462448 - RNA, 19 nt, Artificial Sequence
  Description of Artificial Sequence: Synthetic oligonucleotide
uucuuucgucgucuaccuc

SEQ ID NO: 2462449 - RNA, 19 nt, Artificial Sequence
  Description of Artificial Sequence: Synthetic oligonucleotide
gggcuucuuacccucuuug

SEQ ID NO: 2462450 - RNA, 19 nt, Artificial Sequence
  Description of Artificial Sequence: Synthetic oligonucleotide
cuucaugggaaaaccuugu

SEQ ID NO: 2462451 - RNA, 19 nt, Artificial Sequence
  Description of Artificial Sequence: Synthetic oligonucleotide
guggcguaacaagucguug

SEQ ID NO: 2462452 - RNA, 19 nt, Artificial Sequence
  Description of Artificial Sequence: Synthetic oligonucleotide
ucacaacauauuggcggac

SEQ ID NO: 2462453 - RNA, 19 nt, Artificial Sequence
  Description of Artificial Sequence: Synthetic oligonucleotide
acgacgaggaacaguagua

SEQ ID NO: 2462454 - RNA, 19 nt, Artificial Sequence
  Description of Artificial Sequence: Synthetic oligonucleotide
uauuggcggacaucaucuu

SEQ ID NO: 2462455 - RNA, 19 nt, Artificial Sequence
  Description of Artificial Sequence: Synthetic oligonucleotide
cagccgguggccgggaagg

SEQ ID NO: 2462456 - RNA, 19 nt, Artificial Sequence
  Description of Artificial Sequence: Synthetic oligonucleotide
uaacaagucguuggaucuu

SEQ ID NO: 2462457 - RNA, 19 nt, Artificial Sequence
  Description of Artificial Sequence: Synthetic oligonucleotide
cucugacuuagaaguagaa

SEQ ID NO: 2462458 - RNA, 19 nt, Artificial Sequence
  Description of Artificial Sequence: Synthetic oligonucleotide
cacaacauauuggcggaca

SEQ ID NO: 2462459 - RNA, 19 nt, Artificial Sequence
  Description of Artificial Sequence: Synthetic oligonucleotide
ccaaaaguuuagcguauuc

SEQ ID NO: 2462460 - RNA, 19 nt, Artificial Sequence
  Description of Artificial Sequence: Synthetic oligonucleotide
guuauccuuaaagacuuau

SEQ ID NO: 2462461 - RNA, 19 nt, Artificial Sequence
  Description of Artificial Sequence: Synthetic oligonucleotide
ggcguaacaagucguugga

SEQ ID NO: 2462462 - RNA, 19 nt, Artificial Sequence
  Description of Artificial Sequence: Synthetic oligonucleotide
ugggcuucuuacccucuuu

SEQ ID NO: 2462463 - RNA, 19 nt, Artificial Sequence
  Description of Artificial Sequence: Synthetic oligonucleotide
auccacgaugcauccucga

SEQ ID NO: 2462464 - RNA, 19 nt, Artificial Sequence
  Description of Artificial Sequence: Synthetic oligonucleotide
auacgacgacguuuguguu

SEQ ID NO: 2462465 - RNA, 19 nt, Artificial Sequence
  Description of Artificial Sequence: Synthetic oligonucleotide
guacgaagcuuucuuucgu

SEQ ID NO: 2462466 - RNA, 19 nt, Artificial Sequence
  Description of Artificial Sequence: Synthetic oligonucleotide
cuuucgucgucuaccucaa

SEQ ID NO: 2462467 - RNA, 19 nt, Artificial Sequence
  Description of Artificial Sequence: Synthetic oligonucleotide
cccgccacugauucggacc

SEQ ID NO: 2462468 - RNA, 19 nt, Artificial Sequence
  Description of Artificial Sequence: Synthetic oligonucleotide
cugucaguccaggaauguc

SEQ ID NO: 2462469 - RNA, 19 nt, Artificial Sequence
  Description of Artificial Sequence: Synthetic oligonucleotide
ccacgaugcauccucgaac

SEQ ID NO: 2462470 - RNA, 19 nt, Artificial Sequence
  Description of Artificial Sequence: Synthetic oligonucleotide
ggucuguagcaagaaugcc

SEQ ID NO: 2462471 - RNA, 19 nt, Artificial Sequence
  Description of Artificial Sequence: Synthetic oligonucleotide
acgucucuuggcgaucugu

SEQ ID NO: 2462472 - RNA, 19 nt, Artificial Sequence
  Description of Artificial Sequence: Synthetic oligonucleotide
uacgucucuuggcgaucug

SEQ ID NO: 2462473 - RNA, 19 nt, Artificial Sequence
  Description of Artificial Sequence: Synthetic oligonucleotide
aggucccaaacgacgagga

SEQ ID NO: 2462474 - RNA, 19 nt, Artificial Sequence
  Description of Artificial Sequence: Synthetic oligonucleotide
ugggugcuuugguccuggg

SEQ ID NO: 2462475 - RNA, 19 nt, Artificial Sequence
  Description of Artificial Sequence: Synthetic oligonucleotide
agccuacgucucuuggcga

SEQ ID NO: 2462476 - RNA, 19 nt, Artificial Sequence
  Description of Artificial Sequence: Synthetic oligonucleotide
cuuucgaauucugcuagcu

SEQ ID NO: 2462477 - RNA, 19 nt, Artificial Sequence
  Description of Artificial Sequence: Synthetic oligonucleotide
cacauaacccuuccacucu

SEQ ID NO: 2462478 - RNA, 19 nt, Artificial Sequence
  Description of Artificial Sequence: Synthetic oligonucleotide
cucugccaugggucaaaac

SEQ ID NO: 2462479 - RNA, 19 nt, Artificial Sequence
  Description of Artificial Sequence: Synthetic oligonucleotide
caggcgcacucugccaugg

SEQ ID NO: 2462480 - RNA, 19 nt, Artificial Sequence
  Description of Artificial Sequence: Synthetic oligonucleotide
gcauccucgaacagacuug

SEQ ID NO: 2462481 - RNA, 19 nt, Artificial Sequence
  Description of Artificial Sequence: Synthetic oligonucleotide
gaaaaccuuguuugucauu

SEQ ID NO: 2462482 - RNA, 19 nt, Artificial Sequence
  Description of Artificial Sequence: Synthetic oligonucleotide
gagcaauacgacgacguuu

SEQ ID NO: 2462483 - RNA, 19 nt, Artificial Sequence
  Description of Artificial Sequence: Synthetic oligonucleotide
cuuacccucuuuguuuaaa

SEQ ID NO: 2462484 - RNA, 19 nt, Artificial Sequence
  Description of Artificial Sequence: Synthetic oligonucleotide
agccgaccgcgcaggaggc

SEQ ID NO: 2462485 - RNA, 19 nt, Artificial Sequence
  Description of Artificial Sequence: Synthetic oligonucleotide
guuguaggacacguggcgu

SEQ ID NO: 2462486 - RNA, 19 nt, Artificial Sequence
  Description of Artificial Sequence: Synthetic oligonucleotide
acgccuugcuucaugggaa

SEQ ID NO: 2462487 - RNA, 19 nt, Artificial Sequence
  Description of Artificial Sequence: Synthetic oligonucleotide
gggugcuuugguccugggc

SEQ ID NO: 2462488 - RNA, 19 nt, Artificial Sequence
  Description of Artificial Sequence: Synthetic oligonucleotide
aggcgcacucugccauggg

SEQ ID NO: 2462489 - RNA, 19 nt, Artificial Sequence
  Description of Artificial Sequence: Synthetic oligonucleotide
uucccgccacugauucgga

SEQ ID NO: 2462490 - RNA, 19 nt, Artificial Sequence
  Description of Artificial Sequence: Synthetic oligonucleotide
agcuuucuuucgucgucua

SEQ ID NO: 2462491 - RNA, 19 nt, Artificial Sequence
  Description of Artificial Sequence: Synthetic oligonucleotide
cuuccacucuucacccaga

SEQ ID NO: 2462492 - RNA, 19 nt, Artificial Sequence
  Description of Artificial Sequence: Synthetic oligonucleotide
acguggcguaacaagucgu

SEQ ID NO: 2462493 - RNA, 19 nt, Artificial Sequence
  Description of Artificial Sequence: Synthetic oligonucleotide
auccucgaacagacuugcg

SEQ ID NO: 2462494 - RNA, 19 nt, Artificial Sequence
  Description of Artificial Sequence: Synthetic oligonucleotide
ucccgccacugauucggac

SEQ ID NO: 2462495 - RNA, 19 nt, Artificial Sequence
  Description of Artificial Sequence: Synthetic oligonucleotide
gauuggcauccacgaugca

SEQ ID NO: 2462496 - RNA, 19 nt, Artificial Sequence
  Description of Artificial Sequence: Synthetic oligonucleotide
cguuuguguuguaggacac

SEQ ID NO: 2462497 - RNA, 19 nt, Artificial Sequence
  Description of Artificial Sequence: Synthetic oligonucleotide
uuucgucgucuaccucaau

SEQ ID NO: 2462498 - RNA, 19 nt, Artificial Sequence
  Description of Artificial Sequence: Synthetic oligonucleotide
guggccgggaaggagauau

SEQ ID NO: 2462499 - RNA, 19 nt, Artificial Sequence
  Description of Artificial Sequence: Synthetic oligonucleotide
cgucgucuaccucaauuag

SEQ ID NO: 2462500 - RNA, 19 nt, Artificial Sequence
  Description of Artificial Sequence: Synthetic oligonucleotide
ucguuggaucuugggugcu

SEQ ID NO: 2462501 - RNA, 19 nt, Artificial Sequence
  Description of Artificial Sequence: Synthetic oligonucleotide
gucgucuaccucaauuagu

SEQ ID NO: 2462502 - RNA, 19 nt, Artificial Sequence
  Description of Artificial Sequence: Synthetic oligonucleotide
cccucuuuguuuaaaggcu

SEQ ID NO: 2462503 - RNA, 19 nt, Artificial Sequence
  Description of Artificial Sequence: Synthetic oligonucleotide
acgcagccgaccgcgcagg

SEQ ID NO: 2462504 - RNA, 19 nt, Artificial Sequence
  Description of Artificial Sequence: Synthetic oligonucleotide
uagcucuuuuaggucccaa

SEQ ID NO: 2462505 - RNA, 19 nt, Artificial Sequence
  Description of Artificial Sequence: Synthetic oligonucleotide
aggagauauucagcuucau

SEQ ID NO: 2462506 - RNA, 19 nt, Artificial Sequence
  Description of Artificial Sequence: Synthetic oligonucleotide
guaggacacguggcguaac

SEQ ID NO: 2462507 - RNA, 19 nt, Artificial Sequence
  Description of Artificial Sequence: Synthetic oligonucleotide
gugugauuauuuauuuguu

SEQ ID NO: 2462508 - RNA, 19 nt, Artificial Sequence
  Description of Artificial Sequence: Synthetic oligonucleotide
ccucgaacagacuugcgcu

SEQ ID NO: 2462509 - RNA, 19 nt, Artificial Sequence
  Description of Artificial Sequence: Synthetic oligonucleotide
cucuuggcgaucuguuccu

SEQ ID NO: 2462510 - RNA, 19 nt, Artificial Sequence
  Description of Artificial Sequence: Synthetic oligonucleotide
cacugauucggaccacaua

SEQ ID NO: 2462511 - RNA, 19 nt, Artificial Sequence
  Description of Artificial Sequence: Synthetic oligonucleotide
acauauuggcggacaucau

SEQ ID NO: 2462512 - RNA, 19 nt, Artificial Sequence
  Description of Artificial Sequence: Synthetic oligonucleotide
gacuggacucugacuuaga

SEQ ID NO: 2462513 - RNA, 19 nt, Artificial Sequence
  Description of Artificial Sequence: Synthetic oligonucleotide
ggccgggaaggagauauuc

SEQ ID NO: 2462514 - RNA, 19 nt, Artificial Sequence
  Description of Artificial Sequence: Synthetic oligonucleotide
gcuucuuacccucuuuguu

SEQ ID NO: 2462515 - RNA, 19 nt, Artificial Sequence
  Description of Artificial Sequence: Synthetic oligonucleotide
ggaccacauaacccuucca

SEQ ID NO: 2462516 - RNA, 19 nt, Artificial Sequence
  Description of Artificial Sequence: Synthetic oligonucleotide
cgacguuuguguuguagga

SEQ ID NO: 2462517 - RNA, 19 nt, Artificial Sequence
  Description of Artificial Sequence: Synthetic oligonucleotide
gccgggaaggagauauuca

SEQ ID NO: 2462518 - RNA, 19 nt, Artificial Sequence
  Description of Artificial Sequence: Synthetic oligonucleotide
acucaacagcaggcgcacu

SEQ ID NO: 2462519 - RNA, 19 nt, Artificial Sequence
  Description of Artificial Sequence: Synthetic oligonucleotide
cagugaagacagccuacgu

SEQ ID NO: 2462520 - RNA, 19 nt, Artificial Sequence
  Description of Artificial Sequence: Synthetic oligonucleotide
gaacagacuugcgcuuccu

SEQ ID NO: 2462521 - RNA, 19 nt, Artificial Sequence
  Description of Artificial Sequence: Synthetic oligonucleotide
uggccgggaaggagauauu

SEQ ID NO: 2462522 - RNA, 19 nt, Artificial Sequence
  Description of Artificial Sequence: Synthetic oligonucleotide
gcgcacucugccauggguc

SEQ ID NO: 2462523 - RNA, 19 nt, Artificial Sequence
  Description of Artificial Sequence: Synthetic oligonucleotide
cuacgucucuuggcgaucu

SEQ ID NO: 2462524 - RNA, 19 nt, Artificial Sequence
  Description of Artificial Sequence: Synthetic oligonucleotide
gcaggcgcacucugccaug

SEQ ID NO: 2462525 - RNA, 19 nt, Artificial Sequence
  Description of Artificial Sequence: Synthetic oligonucleotide
ggucccaaacgacgaggaa

SEQ ID NO: 2462526 - RNA, 19 nt, Artificial Sequence
  Description of Artificial Sequence: Synthetic oligonucleotide
gccacugauucggaccaca

SEQ ID NO: 2462527 - RNA, 19 nt, Artificial Sequence
  Description of Artificial Sequence: Synthetic oligonucleotide
ccgccacugauucggacca

SEQ ID NO: 2462528 - RNA, 19 nt, Artificial Sequence
  Description of Artificial Sequence: Synthetic oligonucleotide
cacucugccaugggucaaa

SEQ ID NO: 2462529 - RNA, 19 nt, Artificial Sequence
  Description of Artificial Sequence: Synthetic oligonucleotide
ccgguggccgggaaggaga

SEQ ID NO: 2462530 - RNA, 19 nt, Artificial Sequence
  Description of Artificial Sequence: Synthetic oligonucleotide
ggcgcacucugccaugggu

SEQ ID NO: 2462531 - RNA, 19 nt, Artificial Sequence
  Description of Artificial Sequence: Synthetic oligonucleotide
cuguagcaagaaugccccu

SEQ ID NO: 2462532 - RNA, 19 nt, Artificial Sequence
  Description of Artificial Sequence: Synthetic oligonucleotide
cgaugcauccucgaacaga

SEQ ID NO: 2462533 - RNA, 19 nt, Artificial Sequence
  Description of Artificial Sequence: Synthetic oligonucleotide
gcagccgaccgcgcaggag

SEQ ID NO: 2462534 - RNA, 19 nt, Artificial Sequence
  Description of Artificial Sequence: Synthetic oligonucleotide
gucauucccgccacugauu

SEQ ID NO: 2462535 - RNA, 19 nt, Artificial Sequence
  Description of Artificial Sequence: Synthetic oligonucleotide
cgcacucugccauggguca

SEQ ID NO: 2462536 - RNA, 19 nt, Artificial Sequence
  Description of Artificial Sequence: Synthetic oligonucleotide
caguucuccuuggucugua

SEQ ID NO: 2462537 - RNA, 19 nt, Artificial Sequence
  Description of Artificial Sequence: Synthetic oligonucleotide
cccaaacgacgaggaacag

SEQ ID NO: 2462538 - RNA, 19 nt, Artificial Sequence
  Description of Artificial Sequence: Synthetic oligonucleotide
ccuacgucucuuggcgauc

SEQ ID NO: 2462539 - RNA, 19 nt, Artificial Sequence
  Description of Artificial Sequence: Synthetic oligonucleotide
gccuacgucucuuggcgau

SEQ ID NO: 2462540 - RNA, 19 nt, Artificial Sequence
  Description of Artificial Sequence: Synthetic oligonucleotide
agccgguggccgggaagga

SEQ ID NO: 2462541 - RNA, 19 nt, Artificial Sequence
  Description of Artificial Sequence: Synthetic oligonucleotide
ccuuggucuguagcaagaa

SEQ ID NO: 2462542 - RNA, 19 nt, Artificial Sequence
  Description of Artificial Sequence: Synthetic oligonucleotide
gcgaucuguuccuggcgcu

SEQ ID NO: 2462543 - RNA, 19 nt, Artificial Sequence
  Description of Artificial Sequence: Synthetic oligonucleotide
uggcagccgguggccggga

SEQ ID NO: 2462544 - RNA, 19 nt, Artificial Sequence
  Description of Artificial Sequence: Synthetic oligonucleotide
ccaaacgacgaggaacagu

SEQ ID NO: 2462545 - RNA, 19 nt, Artificial Sequence
  Description of Artificial Sequence: Synthetic oligonucleotide
gccgaccgcgcaggaggcg

SEQ ID NO: 2462546 - RNA, 19 nt, Artificial Sequence
  Description of Artificial Sequence: Synthetic oligonucleotide
gcaauacgacgacguuugu

SEQ ID NO: 2462547 - RNA, 19 nt, Artificial Sequence
  Description of Artificial Sequence: Synthetic oligonucleotide
gcguauucugcugccuccu

SEQ ID NO: 2462548 - RNA, 19 nt, Artificial Sequence
  Description of Artificial Sequence: Synthetic oligonucleotide
gccuugcuucaugggaaaa

SEQ ID NO: 2462549 - RNA, 19 nt, Artificial Sequence
  Description of Artificial Sequence: Synthetic oligonucleotide
gcguaacaagucguuggau

SEQ ID NO: 2462550 - RNA, 19 nt, Artificial Sequence
  Description of Artificial Sequence: Synthetic oligonucleotide
ccacugauucggaccacau

SEQ ID NO: 2462551 - RNA, 19 nt, Artificial Sequence
  Description of Artificial Sequence: Synthetic oligonucleotide
ggcggacaucaucuucuuu

SEQ ID NO: 2462552 - RNA, 19 nt, Artificial Sequence
  Description of Artificial Sequence: Synthetic oligonucleotide
gcacucugccaugggucaa

SEQ ID NO: 2462553 - RNA, 19 nt, Artificial Sequence
  Description of Artificial Sequence: Synthetic oligonucleotide
ggcauccacgaugcauccu

SEQ ID NO: 2462554 - RNA, 19 nt, Artificial Sequence
  Description of Artificial Sequence: Synthetic oligonucleotide
cgccuugcuucaugggaaa

SEQ ID NO: 2462555 - RNA, 19 nt, Artificial Sequence
  Description of Artificial Sequence: Synthetic oligonucleotide
cguggcguaacaagucguu

SEQ ID NO: 2462556 - RNA, 19 nt, Artificial Sequence
  Description of Artificial Sequence: Synthetic oligonucleotide
cgucucuuggcgaucuguu

SEQ ID NO: 2462557 - RNA, 19 nt, Artificial Sequence
  Description of Artificial Sequence: Synthetic oligonucleotide
ggcagccgguggccgggaa

SEQ ID NO: 2462558 - RNA, 19 nt, Artificial Sequence
  Description of Artificial Sequence: Synthetic oligonucleotide
cgacgaggaacaguaguau

SEQ ID NO: 2462559 - RNA, 19 nt, Artificial Sequence
  Description of Artificial Sequence: Synthetic oligonucleotide
cgaccgcgcaggaggcguc

SEQ ID NO: 2462560 - RNA, 19 nt, Artificial Sequence
  Description of Artificial Sequence: Synthetic oligonucleotide
ccaguucuccuuggucugu

SEQ ID NO: 2462561 - RNA, 19 nt, Artificial Sequence
  Description of Artificial Sequence: Synthetic oligonucleotide
gguggccgggaaggagaua

SEQ ID NO: 2462562 - RNA, 19 nt, Artificial Sequence
  Description of Artificial Sequence: Synthetic oligonucleotide
gcgcuuccucucuccaguu

SEQ ID NO: 2462563 - RNA, 19 nt, Artificial Sequence
  Description of Artificial Sequence: Synthetic oligonucleotide
cgucuaccucaauuaguuu

SEQ ID NO: 2462564 - RNA, 19 nt, Artificial Sequence
  Description of Artificial Sequence: Synthetic oligonucleotide
ccgaccgcgcaggaggcgu

SEQ ID NO: 2462565 - RNA, 19 nt, Artificial Sequence
  Description of Artificial Sequence: Synthetic oligonucleotide
cgccacugauucggaccac

SEQ ID NO: 2462566 - RNA, 19 nt, Artificial Sequence
  Description of Artificial Sequence: Synthetic oligonucleotide
cguuggaucuugggugcuu

SEQ ID NO: 2462567 - RNA, 19 nt, Artificial Sequence
  Description of Artificial Sequence: Synthetic oligonucleotide
cgacgacguuuguguugua

SEQ ID NO: 2462568 - RNA, 19 nt, Artificial Sequence
  Description of Artificial Sequence: Synthetic oligonucleotide
acaacuggcaaauugaugg

SEQ ID NO: 2462569 - RNA, 19 nt, Artificial Sequence
  Description of Artificial Sequence: Synthetic oligonucleotide
acuucugucccucuugucc

SEQ ID NO: 2462570 - RNA, 19 nt, Artificial Sequence
  Description of Artificial Sequence: Synthetic oligonucleotide
ugggcuuucggaaaggccg

SEQ ID NO: 2462571 - RNA, 19 nt, Artificial Sequence
  Description of Artificial Sequence: Synthetic oligonucleotide
aaauugaugggcuuucgga

SEQ ID NO: 2462572 - RNA, 19 nt, Artificial Sequence
  Description of Artificial Sequence: Synthetic oligonucleotide
uccaguaacgccuuuguug

SEQ ID NO: 2462573 - RNA, 19 nt, Artificial Sequence
  Description of Artificial Sequence: Synthetic oligonucleotide
uuugagaaagggcuggcug

SEQ ID NO: 2462574 - RNA, 19 nt, Artificial Sequence
  Description of Artificial Sequence: Synthetic oligonucleotide
ucagucgugccacaaacag

SEQ ID NO: 2462575 - RNA, 19 nt, Artificial Sequence
  Description of Artificial Sequence: Synthetic oligonucleotide
aauugaugggcuuucggaa

SEQ ID NO: 2462576 - RNA, 19 nt, Artificial Sequence
  Description of Artificial Sequence: Synthetic oligonucleotide
uucccgaucguucucaggc

SEQ ID NO: 2462577 - RNA, 19 nt, Artificial Sequence
  Description of Artificial Sequence: Synthetic oligonucleotide
ucaugcuaggucaaugacc

SEQ ID NO: 2462578 - RNA, 19 nt, Artificial Sequence
  Description of Artificial Sequence: Synthetic oligonucleotide
cuuuacuuacuucuguccc

SEQ ID NO: 2462579 - RNA, 19 nt, Artificial Sequence
  Description of Artificial Sequence: Synthetic oligonucleotide
ucauucuugacaacuggca

SEQ ID NO: 2462580 - RNA, 19 nt, Artificial Sequence
  Description of Artificial Sequence: Synthetic oligonucleotide
uggucugcaaguucagucg

SEQ ID NO: 2462581 - RNA, 19 nt, Artificial Sequence
  Description of Artificial Sequence: Synthetic oligonucleotide
agucgugccacaaacaggg

SEQ ID NO: 2462582 - RNA, 19 nt, Artificial Sequence
  Description of Artificial Sequence: Synthetic oligonucleotide
cacaaacaggguaaggagg

SEQ ID NO: 2462583 - RNA, 19 nt, Artificial Sequence
  Description of Artificial Sequence: Synthetic oligonucleotide
acgaauaucucaugcuagg

SEQ ID NO: 2462584 - RNA, 19 nt, Artificial Sequence
  Description of Artificial Sequence: Synthetic oligonucleotide
aucacgguaggccuucagc

SEQ ID NO: 2462585 - RNA, 19 nt, Artificial Sequence
  Description of Artificial Sequence: Synthetic oligonucleotide
ugucccgggaucgagagcg

SEQ ID NO: 2462586 - RNA, 19 nt, Artificial Sequence
  Description of Artificial Sequence: Synthetic oligonucleotide
gagggauccagccacguag

SEQ ID NO: 2462587 - RNA, 19 nt, Artificial Sequence
  Description of Artificial Sequence: Synthetic oligonucleotide
uuguuggguacguagcggg

SEQ ID NO: 2462588 - RNA, 19 nt, Artificial Sequence
  Description of Artificial Sequence: Synthetic oligonucleotide
ucguucucaggccacaccc

SEQ ID NO: 2462589 - RNA, 19 nt, Artificial Sequence
  Description of Artificial Sequence: Synthetic oligonucleotide
cuuucggaaaggccgaucc

SEQ ID NO: 2462590 - RNA, 19 nt, Artificial Sequence
  Description of Artificial Sequence: Synthetic oligonucleotide
aagcgggucauauuccuug

SEQ ID NO: 2462591 - RNA, 19 nt, Artificial Sequence
  Description of Artificial Sequence: Synthetic oligonucleotide
caugcuaggucaaugacca

SEQ ID NO: 2462592 - RNA, 19 nt, Artificial Sequence
  Description of Artificial Sequence: Synthetic oligonucleotide
acaaacaggguaaggaggg

SEQ ID NO: 2462593 - RNA, 19 nt, Artificial Sequence
  Description of Artificial Sequence: Synthetic oligonucleotide
gaaggcguagcccuuggag

SEQ ID NO: 2462594 - RNA, 19 nt, Artificial Sequence
  Description of Artificial Sequence: Synthetic oligonucleotide
cuuuguuggguacguagcg

SEQ ID NO: 2462595 - RNA, 19 nt, Artificial Sequence
  Description of Artificial Sequence: Synthetic oligonucleotide
uucggaaaggccgaucccg

SEQ ID NO: 2462596 - RNA, 19 nt, Artificial Sequence
  Description of Artificial Sequence: Synthetic oligonucleotide
uuuacuuacuucugucccu

SEQ ID NO: 2462597 - RNA, 19 nt, Artificial Sequence
  Description of Artificial Sequence: Synthetic oligonucleotide
agucaccaggucccgaacc

SEQ ID NO: 2462598 - RNA, 19 nt, Artificial Sequence
  Description of Artificial Sequence: Synthetic oligonucleotide
ucucaugcuaggucaauga

SEQ ID NO: 2462599 - RNA, 19 nt, Artificial Sequence
  Description of Artificial Sequence: Synthetic oligonucleotide
uugaugggcuuucggaaag

SEQ ID NO: 2462600 - RNA, 19 nt, Artificial Sequence
  Description of Artificial Sequence: Synthetic oligonucleotide
ucacgguaggccuucagca

SEQ ID NO: 2462601 - RNA, 19 nt, Artificial Sequence
  Description of Artificial Sequence: Synthetic oligonucleotide
uuuguuggguacguagcgg

SEQ ID NO: 2462602 - RNA, 19 nt, Artificial Sequence
  Description of Artificial Sequence: Synthetic oligonucleotide
cacgaauaucucaugcuag

SEQ ID NO: 2462603 - RNA, 19 nt, Artificial Sequence
  Description of Artificial Sequence: Synthetic oligonucleotide
caaauugaugggcuuucgg

SEQ ID NO: 2462604 - RNA, 19 nt, Artificial Sequence
  Description of Artificial Sequence: Synthetic oligonucleotide
cuuaagcgggucauauucc

SEQ ID NO: 2462605 - RNA, 19 nt, Artificial Sequence
  Description of Artificial Sequence: Synthetic oligonucleotide
accauagcgggagaagacc

SEQ ID NO: 2462606 - RNA, 19 nt, Artificial Sequence
  Description of Artificial Sequence: Synthetic oligonucleotide
cagcccaccaccuagccgc

SEQ ID NO: 2462607 - RNA, 19 nt, Artificial Sequence
  Description of Artificial Sequence: Synthetic oligonucleotide
uccucuuuggucugcaagu

SEQ ID NO: 2462608 - RNA, 19 nt, Artificial Sequence
  Description of Artificial Sequence: Synthetic oligonucleotide
auagcgggagaagaccucc

SEQ ID NO: 2462609 - RNA, 19 nt, Artificial Sequence
  Description of Artificial Sequence: Synthetic oligonucleotide
uuaagcgggucauauuccu

SEQ ID NO: 2462610 - RNA, 19 nt, Artificial Sequence
  Description of Artificial Sequence: Synthetic oligonucleotide
cuucugucccucuuguccc

SEQ ID NO: 2462611 - RNA, 19 nt, Artificial Sequence
  Description of Artificial Sequence: Synthetic oligonucleotide
ccaguaacgccuuuguugg

SEQ ID NO: 2462612 - RNA, 19 nt, Artificial Sequence
  Description of Artificial Sequence: Synthetic oligonucleotide
ucccgaaccagccguagcc

SEQ ID NO: 2462613 - RNA, 19 nt, Artificial Sequence
  Description of Artificial Sequence: Synthetic oligonucleotide
uccacgaauaucucaugcu

SEQ ID NO: 2462614 - RNA, 19 nt, Artificial Sequence
  Description of Artificial Sequence: Synthetic oligonucleotide
ucaugguuccgcucccugg

SEQ ID NO: 2462615 - RNA, 19 nt, Artificial Sequence
  Description of Artificial Sequence: Synthetic oligonucleotide
uacguagcgggccaacaug

SEQ ID NO: 2462616 - RNA, 19 nt, Artificial Sequence
  Description of Artificial Sequence: Synthetic oligonucleotide
aucguucucaggccacacc

SEQ ID NO: 2462617 - RNA, 19 nt, Artificial Sequence
  Description of Artificial Sequence: Synthetic oligonucleotide
aaugaccaguccaucagca

SEQ ID NO: 2462618 - RNA, 19 nt, Artificial Sequence
  Description of Artificial Sequence: Synthetic oligonucleotide
aacgccuuuguuggguacg

SEQ ID NO: 2462619 - RNA, 19 nt, Artificial Sequence
  Description of Artificial Sequence: Synthetic oligonucleotide
cuuacuucugucccucuug

SEQ ID NO: 2462620 - RNA, 19 nt, Artificial Sequence
  Description of Artificial Sequence: Synthetic oligonucleotide
ucggaaaggccgaucccgg

SEQ ID NO: 2462621 - RNA, 19 nt, Artificial Sequence
  Description of Artificial Sequence: Synthetic oligonucleotide
gucccaucaaugcugccgg

SEQ ID NO: 2462622 - RNA, 19 nt, Artificial Sequence
  Description of Artificial Sequence: Synthetic oligonucleotide
ugcgcuccagcucauaguc

SEQ ID NO: 2462623 - RNA, 19 nt, Artificial Sequence
  Description of Artificial Sequence: Synthetic oligonucleotide
uugccagcguuucucuagg

SEQ ID NO: 2462624 - RNA, 19 nt, Artificial Sequence
  Description of Artificial Sequence: Synthetic oligonucleotide
ucugcaaguucagucgugc

SEQ ID NO: 2462625 - RNA, 19 nt, Artificial Sequence
  Description of Artificial Sequence: Synthetic oligonucleotide
ugccuuuuggcuuuacuua

SEQ ID NO: 2462626 - RNA, 19 nt, Artificial Sequence
  Description of Artificial Sequence: Synthetic oligonucleotide
ucuccaguaacgccuuugu

SEQ ID NO: 2462627 - RNA, 19 nt, Artificial Sequence
  Description of Artificial Sequence: Synthetic oligonucleotide
ugaacucccucucucuuuc

SEQ ID NO: 2462628 - RNA, 19 nt, Artificial Sequence
  Description of Artificial Sequence: Synthetic oligonucleotide
caugguuccgcucccuggg

SEQ ID NO: 2462629 - RNA, 19 nt, Artificial Sequence
  Description of Artificial Sequence: Synthetic oligonucleotide
caacuggcaaauugauggg

SEQ ID NO: 2462630 - RNA, 19 nt, Artificial Sequence
  Description of Artificial Sequence: Synthetic oligonucleotide
ugcggcucauucuugacaa

SEQ ID NO: 2462631 - RNA, 19 nt, Artificial Sequence
  Description of Artificial Sequence: Synthetic oligonucleotide
augcugccggccuuaagcg

SEQ ID NO: 2462632 - RNA, 19 nt, Artificial Sequence
  Description of Artificial Sequence: Synthetic oligonucleotide
gaaaggccgaucccggccc

SEQ ID NO: 2462633 - RNA, 19 nt, Artificial Sequence
  Description of Artificial Sequence: Synthetic oligonucleotide
guccacgaauaucucaugc

SEQ ID NO: 2462634 - RNA, 19 nt, Artificial Sequence
  Description of Artificial Sequence: Synthetic oligonucleotide
accaccuagccgccgaggg

SEQ ID NO: 2462635 - RNA, 19 nt, Artificial Sequence
  Description of Artificial Sequence: Synthetic oligonucleotide
auugaugggcuuucggaaa

SEQ ID NO: 2462636 - RNA, 19 nt, Artificial Sequence
  Description of Artificial Sequence: Synthetic oligonucleotide
uucagucgugccacaaaca

SEQ ID NO: 2462637 - RNA, 19 nt, Artificial Sequence
  Description of Artificial Sequence: Synthetic oligonucleotide
cuugucccugccuuuggcc

SEQ ID NO: 2462638 - RNA, 19 nt, Artificial Sequence
  Description of Artificial Sequence: Synthetic oligonucleotide
uuucggaaaggccgauccc

SEQ ID NO: 2462639 - RNA, 19 nt, Artificial Sequence
  Description of Artificial Sequence: Synthetic oligonucleotide
uggcuuuacuuacuucugu

SEQ ID NO: 2462640 - RNA, 19 nt, Artificial Sequence
  Description of Artificial Sequence: Synthetic oligonucleotide
ucaccauagcgggagaaga

SEQ ID NO: 2462641 - RNA, 19 nt, Artificial Sequence
  Description of Artificial Sequence: Synthetic oligonucleotide
cucuaggccccugucaugg

SEQ ID NO: 2462642 - RNA, 19 nt, Artificial Sequence
  Description of Artificial Sequence: Synthetic oligonucleotide
gucauguggauccucaucu

SEQ ID NO: 2462643 - RNA, 19 nt, Artificial Sequence
  Description of Artificial Sequence: Synthetic oligonucleotide
gucaaugaccaguccauca

SEQ ID NO: 2462644 - RNA, 19 nt, Artificial Sequence
  Description of Artificial Sequence: Synthetic oligonucleotide
gacaacuggcaaauugaug

SEQ ID NO: 2462645 - RNA, 19 nt, Artificial Sequence
  Description of Artificial Sequence: Synthetic oligonucleotide
uguuggguacguagcgggc

SEQ ID NO: 2462646 - RNA, 19 nt, Artificial Sequence
  Description of Artificial Sequence: Synthetic oligonucleotide
cagucgugccacaaacagg

SEQ ID NO: 2462647 - RNA, 19 nt, Artificial Sequence
  Description of Artificial Sequence: Synthetic oligonucleotide
uuucccgaucguucucagg

SEQ ID NO: 2462648 - RNA, 19 nt, Artificial Sequence
  Description of Artificial Sequence: Synthetic oligonucleotide
ucauguggauccucaucug

SEQ ID NO: 2462649 - RNA, 19 nt, Artificial Sequence
  Description of Artificial Sequence: Synthetic oligonucleotide
cucaugcuaggucaaugac

SEQ ID NO: 2462650 - RNA, 19 nt, Artificial Sequence
  Description of Artificial Sequence: Synthetic oligonucleotide
agcgggucauauuccuugg

SEQ ID NO: 2462651 - RNA, 19 nt, Artificial Sequence
  Description of Artificial Sequence: Synthetic oligonucleotide
ccuuaagcgggucauauuc

SEQ ID NO: 2462652 - RNA, 19 nt, Artificial Sequence
  Description of Artificial Sequence: Synthetic oligonucleotide
agaagaccuccuuuaacuu

SEQ ID NO: 2462653 - RNA, 19 nt, Artificial Sequence
  Description of Artificial Sequence: Synthetic oligonucleotide
uuuugagaaagggcuggcu

SEQ ID NO: 2462654 - RNA, 19 nt, Artificial Sequence
  Description of Artificial Sequence: Synthetic oligonucleotide
uuggguacguagcgggcca

SEQ ID NO: 2462655 - RNA, 19 nt, Artificial Sequence
  Description of Artificial Sequence: Synthetic oligonucleotide
uuacuuacuucugucccuc

SEQ ID NO: 2462656 - RNA, 19 nt, Artificial Sequence
  Description of Artificial Sequence: Synthetic oligonucleotide
aguaacgccuuuguugggu

SEQ ID NO: 2462657 - RNA, 19 nt, Artificial Sequence
  Description of Artificial Sequence: Synthetic oligonucleotide
ucgugccacaaacagggua

SEQ ID NO: 2462658 - RNA, 19 nt, Artificial Sequence
  Description of Artificial Sequence: Synthetic oligonucleotide
acguagcgggccaacaugg

SEQ ID NO: 2462659 - RNA, 19 nt, Artificial Sequence
  Description of Artificial Sequence: Synthetic oligonucleotide
augaaggcguagcccuugg

SEQ ID NO: 2462660 - RNA, 19 nt, Artificial Sequence
  Description of Artificial Sequence: Synthetic oligonucleotide
augguuccgcucccugggc

SEQ ID NO: 2462661 - RNA, 19 nt, Artificial Sequence
  Description of Artificial Sequence: Synthetic oligonucleotide
gaucgagagcgcucccucc

SEQ ID NO: 2462662 - RNA, 19 nt, Artificial Sequence
  Description of Artificial Sequence: Synthetic oligonucleotide
acguagggugcgcuccagc

SEQ ID NO: 2462663 - RNA, 19 nt, Artificial Sequence
  Description of Artificial Sequence: Synthetic oligonucleotide
ugcugccggccuuaagcgg

SEQ ID NO: 2462664 - RNA, 19 nt, Artificial Sequence
  Description of Artificial Sequence: Synthetic oligonucleotide
ccacaaacaggguaaggag

SEQ ID NO: 2462665 - RNA, 19 nt, Artificial Sequence
  Description of Artificial Sequence: Synthetic oligonucleotide
ucucuugccagcguuucuc

SEQ ID NO: 2462666 - RNA, 19 nt, Artificial Sequence
  Description of Artificial Sequence: Synthetic oligonucleotide
cacgguaggccuucagcag

SEQ ID NO: 2462667 - RNA, 19 nt, Artificial Sequence
  Description of Artificial Sequence: Synthetic oligonucleotide
acuggcaaauugaugggcu

SEQ ID NO: 2462668 - RNA, 19 nt, Artificial Sequence
  Description of Artificial Sequence: Synthetic oligonucleotide
ugaugggcuuucggaaagg

SEQ ID NO: 2462669 - RNA, 19 nt, Artificial Sequence
  Description of Artificial Sequence: Synthetic oligonucleotide
cauucuugacaacuggcaa

SEQ ID NO: 2462670 - RNA, 19 nt, Artificial Sequence
  Description of Artificial Sequence: Synthetic oligonucleotide
cauaguccacgaauaucuc

SEQ ID NO: 2462671 - RNA, 19 nt, Artificial Sequence
  Description of Artificial Sequence: Synthetic oligonucleotide
uguacucaaugaaggcgua

SEQ ID NO: 2462672 - RNA, 19 nt, Artificial Sequence
  Description of Artificial Sequence: Synthetic oligonucleotide
cuaggucaaugaccagucc

SEQ ID NO: 2462673 - RNA, 19 nt, Artificial Sequence
  Description of Artificial Sequence: Synthetic oligonucleotide
ccuuguacucaaugaaggc

SEQ ID NO: 2462674 - RNA, 19 nt, Artificial Sequence
  Description of Artificial Sequence: Synthetic oligonucleotide
caccauagcgggagaagac

SEQ ID NO: 2462675 - RNA, 19 nt, Artificial Sequence
  Description of Artificial Sequence: Synthetic oligonucleotide
ucucugugcggcucauucu

SEQ ID NO: 2462676 - RNA, 19 nt, Artificial Sequence
  Description of Artificial Sequence: Synthetic oligonucleotide
agccguagccuccggaugu

SEQ ID NO: 2462677 - RNA, 19 nt, Artificial Sequence
  Description of Artificial Sequence: Synthetic oligonucleotide
aucucaugcuaggucaaug

SEQ ID NO: 2462678 - RNA, 19 nt, Artificial Sequence
  Description of Artificial Sequence: Synthetic oligonucleotide
ugguuccgcucccugggcc

SEQ ID NO: 2462679 - RNA, 19 nt, Artificial Sequence
  Description of Artificial Sequence: Synthetic oligonucleotide
aucgagagcgcucccuccu

SEQ ID NO: 2462680 - RNA, 19 nt, Artificial Sequence
  Description of Artificial Sequence: Synthetic oligonucleotide
uaggccccugucaugguuc

SEQ ID NO: 2462681 - RNA, 19 nt, Artificial Sequence
  Description of Artificial Sequence: Synthetic oligonucleotide
guuggguacguagcgggcc

SEQ ID NO: 2462682 - RNA, 19 nt, Artificial Sequence
  Description of Artificial Sequence: Synthetic oligonucleotide
gaccuccuuuaacuuuucc

SEQ ID NO: 2462683 - RNA, 19 nt, Artificial Sequence
  Description of Artificial Sequence: Synthetic oligonucleotide
cugcaaguucagucgugcc

SEQ ID NO: 2462684 - RNA, 19 nt, Artificial Sequence
  Description of Artificial Sequence: Synthetic oligonucleotide
ggaaaggccgaucccggcc

SEQ ID NO: 2462685 - RNA, 19 nt, Artificial Sequence
  Description of Artificial Sequence: Synthetic oligonucleotide
ucccgaucguucucaggcc

SEQ ID NO: 2462686 - RNA, 19 nt, Artificial Sequence
  Description of Artificial Sequence: Synthetic oligonucleotide
agcaucacgguaggccuuc

SEQ ID NO: 2462687 - RNA, 19 nt, Artificial Sequence
  Description of Artificial Sequence: Synthetic oligonucleotide
ggagaagaccuccuuuaac

SEQ ID NO: 2462688 - RNA, 19 nt, Artificial Sequence
  Description of Artificial Sequence: Synthetic oligonucleotide
ugugcggcucauucuugac

SEQ ID NO: 2462689 - RNA, 19 nt, Artificial Sequence
  Description of Artificial Sequence: Synthetic oligonucleotide
gucaccauagcgggagaag

SEQ ID NO: 2462690 - RNA, 19 nt, Artificial Sequence
  Description of Artificial Sequence: Synthetic oligonucleotide
ggugcgcuccagcucauag

SEQ ID NO: 2462691 - RNA, 19 nt, Artificial Sequence
  Description of Artificial Sequence: Synthetic oligonucleotide
ucccucuugucccugccuu

SEQ ID NO: 2462692 - RNA, 19 nt, Artificial Sequence
  Description of Artificial Sequence: Synthetic oligonucleotide
uaagcgggucauauuccuu

SEQ ID NO: 2462693 - RNA, 19 nt, Artificial Sequence
  Description of Artificial Sequence: Synthetic oligonucleotide
cacccagcccaccaccuag

SEQ ID NO: 2462694 - RNA, 19 nt, Artificial Sequence
  Description of Artificial Sequence: Synthetic oligonucleotide
uaacgccuuuguuggguac

SEQ ID NO: 2462695 - RNA, 19 nt, Artificial Sequence
  Description of Artificial Sequence: Synthetic oligonucleotide
ugucugucccgggaucgag

SEQ ID NO: 2462696 - RNA, 19 nt, Artificial Sequence
  Description of Artificial Sequence: Synthetic oligonucleotide
gccaacauggcccuccaca

SEQ ID NO: 2462697 - RNA, 19 nt, Artificial Sequence
  Description of Artificial Sequence: Synthetic oligonucleotide
gccacaaacaggguaagga

SEQ ID NO: 2462698 - RNA, 19 nt, Artificial Sequence
  Description of Artificial Sequence: Synthetic oligonucleotide
gcaaguucagucgugccac

SEQ ID NO: 2462699 - RNA, 19 nt, Artificial Sequence
  Description of Artificial Sequence: Synthetic oligonucleotide
caguaacgccuuuguuggg

SEQ ID NO: 2462700 - RNA, 19 nt, Artificial Sequence
  Description of Artificial Sequence: Synthetic oligonucleotide
ugucaccauagcgggagaa

SEQ ID NO: 2462701 - RNA, 19 nt, Artificial Sequence
  Description of Artificial Sequence: Synthetic oligonucleotide
uacuuacuucugucccucu

SEQ ID NO: 2462702 - RNA, 19 nt, Artificial Sequence
  Description of Artificial Sequence: Synthetic oligonucleotide
uggcaaauugaugggcuuu

SEQ ID NO: 2462703 - RNA, 19 nt, Artificial Sequence
  Description of Artificial Sequence: Synthetic oligonucleotide
uccagccacguagggugcg

SEQ ID NO: 2462704 - RNA, 19 nt, Artificial Sequence
  Description of Artificial Sequence: Synthetic oligonucleotide
gcaaauugaugggcuuucg

SEQ ID NO: 2462705 - RNA, 19 nt, Artificial Sequence
  Description of Artificial Sequence: Synthetic oligonucleotide
agagcgcucccuccucucu

SEQ ID NO: 2462706 - RNA, 19 nt, Artificial Sequence
  Description of Artificial Sequence: Synthetic oligonucleotide
gcugccggccuuaagcggg

SEQ ID NO: 2462707 - RNA, 19 nt, Artificial Sequence
  Description of Artificial Sequence: Synthetic oligonucleotide
uucagcagggcccgcucuu

SEQ ID NO: 2462708 - RNA, 19 nt, Artificial Sequence
  Description of Artificial Sequence: Synthetic oligonucleotide
cugucaugguuccgcuccc

SEQ ID NO: 2462709 - RNA, 19 nt, Artificial Sequence
  Description of Artificial Sequence: Synthetic oligonucleotide
ggucauguggauccucauc

SEQ ID NO: 2462710 - RNA, 19 nt, Artificial Sequence
  Description of Artificial Sequence: Synthetic oligonucleotide
gccagcguuucucuaggcc

SEQ ID NO: 2462711 - RNA, 19 nt, Artificial Sequence
  Description of Artificial Sequence: Synthetic oligonucleotide
gaucguucucaggccacac

SEQ ID NO: 2462712 - RNA, 19 nt, Artificial Sequence
  Description of Artificial Sequence: Synthetic oligonucleotide
ucccucucuugccagcguu

SEQ ID NO: 2462713 - RNA, 19 nt, Artificial Sequence
  Description of Artificial Sequence: Synthetic oligonucleotide
gugcggcucauucuugaca

SEQ ID NO: 2462714 - RNA, 19 nt, Artificial Sequence
  Description of Artificial Sequence: Synthetic oligonucleotide
uagcgggagaagaccuccu

SEQ ID NO: 2462715 - RNA, 19 nt, Artificial Sequence
  Description of Artificial Sequence: Synthetic oligonucleotide
ucuugccagcguuucucua

SEQ ID NO: 2462716 - RNA, 19 nt, Artificial Sequence
  Description of Artificial Sequence: Synthetic oligonucleotide
uaucucaugcuaggucaau

SEQ ID NO: 2462717 - RNA, 19 nt, Artificial Sequence
  Description of Artificial Sequence: Synthetic oligonucleotide
ccucaguuguccagauucc

SEQ ID NO: 2462718 - RNA, 19 nt, Artificial Sequence
  Description of Artificial Sequence: Synthetic oligonucleotide
auccagccacguagggugc

SEQ ID NO: 2462719 - RNA, 19 nt, Artificial Sequence
  Description of Artificial Sequence: Synthetic oligonucleotide
caucacgguaggccuucag

SEQ ID NO: 2462720 - RNA, 19 nt, Artificial Sequence
  Description of Artificial Sequence: Synthetic oligonucleotide
ugccagcguuucucuaggc

SEQ ID NO: 2462721 - RNA, 19 nt, Artificial Sequence
  Description of Artificial Sequence: Synthetic oligonucleotide
ggcucauucuugacaacug

SEQ ID NO: 2462722 - RNA, 19 nt, Artificial Sequence
  Description of Artificial Sequence: Synthetic oligonucleotide
augcuaggucaaugaccag

SEQ ID NO: 2462723 - RNA, 19 nt, Artificial Sequence
  Description of Artificial Sequence: Synthetic oligonucleotide
uuuucccacccagcccacc

SEQ ID NO: 2462724 - RNA, 19 nt, Artificial Sequence
  Description of Artificial Sequence: Synthetic oligonucleotide
auaucucaugcuaggucaa

SEQ ID NO: 2462725 - RNA, 19 nt, Artificial Sequence
  Description of Artificial Sequence: Synthetic oligonucleotide
agcgggccaacauggcccu

SEQ ID NO: 2462726 - RNA, 19 nt, Artificial Sequence
  Description of Artificial Sequence: Synthetic oligonucleotide
ucgagagcgcucccuccuc

SEQ ID NO: 2462727 - RNA, 19 nt, Artificial Sequence
  Description of Artificial Sequence: Synthetic oligonucleotide
aaagggcuggcugccuuuu

SEQ ID NO: 2462728 - RNA, 19 nt, Artificial Sequence
  Description of Artificial Sequence: Synthetic oligonucleotide
ccuccggaugucaccauag

SEQ ID NO: 2462729 - RNA, 19 nt, Artificial Sequence
  Description of Artificial Sequence: Synthetic oligonucleotide
gucccgaaccagccguagc

SEQ ID NO: 2462730 - RNA, 19 nt, Artificial Sequence
  Description of Artificial Sequence: Synthetic oligonucleotide
cugccuuuuggcuuuacuu

SEQ ID NO: 2462731 - RNA, 19 nt, Artificial Sequence
  Description of Artificial Sequence: Synthetic oligonucleotide
cauguggauccucaucugu

SEQ ID NO: 2462732 - RNA, 19 nt, Artificial Sequence
  Description of Artificial Sequence: Synthetic oligonucleotide
gggauccagccacguaggg

SEQ ID NO: 2462733 - RNA, 19 nt, Artificial Sequence
  Description of Artificial Sequence: Synthetic oligonucleotide
guaacgccuuuguugggua

SEQ ID NO: 2462734 - RNA, 19 nt, Artificial Sequence
  Description of Artificial Sequence: Synthetic oligonucleotide
accagccguagccuccgga

SEQ ID NO: 2462735 - RNA, 19 nt, Artificial Sequence
  Description of Artificial Sequence: Synthetic oligonucleotide
guagcccuuggagaagcca

SEQ ID NO: 2462736 - RNA, 19 nt, Artificial Sequence
  Description of Artificial Sequence: Synthetic oligonucleotide
cagccguagccuccggaug

SEQ ID NO: 2462737 - RNA, 19 nt, Artificial Sequence
  Description of Artificial Sequence: Synthetic oligonucleotide
gucugcaaguucagucgug

SEQ ID NO: 2462738 - RNA, 19 nt, Artificial Sequence
  Description of Artificial Sequence: Synthetic oligonucleotide
ugucaugguuccgcucccu

SEQ ID NO: 2462739 - RNA, 19 nt, Artificial Sequence
  Description of Artificial Sequence: Synthetic oligonucleotide
ggaucgagagcgcucccuc

SEQ ID NO: 2462740 - RNA, 19 nt, Artificial Sequence
  Description of Artificial Sequence: Synthetic oligonucleotide
caucugucccaucaaugcu

SEQ ID NO: 2462741 - RNA, 19 nt, Artificial Sequence
  Description of Artificial Sequence: Synthetic oligonucleotide
agcgggagaagaccuccuu

SEQ ID NO: 2462742 - RNA, 19 nt, Artificial Sequence
  Description of Artificial Sequence: Synthetic oligonucleotide
gagagcgcucccuccucuc

SEQ ID NO: 2462743 - RNA, 19 nt, Artificial Sequence
  Description of Artificial Sequence: Synthetic oligonucleotide
cagucaccaggucccgaac

SEQ ID NO: 2462744 - RNA, 19 nt, Artificial Sequence
  Description of Artificial Sequence: Synthetic oligonucleotide
gagcgcucccuccucucuc

SEQ ID NO: 2462745 - RNA, 19 nt, Artificial Sequence
  Description of Artificial Sequence: Synthetic oligonucleotide
aucaaugcugccggccuua

SEQ ID NO: 2462746 - RNA, 19 nt, Artificial Sequence
  Description of Artificial Sequence: Synthetic oligonucleotide
gccgccgagggauccagcc

SEQ ID NO: 2462747 - RNA, 19 nt, Artificial Sequence
  Description of Artificial Sequence: Synthetic oligonucleotide
caguuguccagauuccuuu

SEQ ID NO: 2462748 - RNA, 19 nt, Artificial Sequence
  Description of Artificial Sequence: Synthetic oligonucleotide
caucagcaucacgguaggc

SEQ ID NO: 2462749 - RNA, 19 nt, Artificial Sequence
  Description of Artificial Sequence: Synthetic oligonucleotide
ccgaaccucaguuguccag

SEQ ID NO: 2462750 - RNA, 19 nt, Artificial Sequence
  Description of Artificial Sequence: Synthetic oligonucleotide
cacccuggccaucucccuc

SEQ ID NO: 2462751 - RNA, 19 nt, Artificial Sequence
  Description of Artificial Sequence: Synthetic oligonucleotide
cugucccgggaucgagagc

SEQ ID NO: 2462752 - RNA, 19 nt, Artificial Sequence
  Description of Artificial Sequence: Synthetic oligonucleotide
acgccuuuguuggguacgu

SEQ ID NO: 2462753 - RNA, 19 nt, Artificial Sequence
  Description of Artificial Sequence: Synthetic oligonucleotide
caaguucagucgugccaca

SEQ ID NO: 2462754 - RNA, 19 nt, Artificial Sequence
  Description of Artificial Sequence: Synthetic oligonucleotide
ccacgaauaucucaugcua

SEQ ID NO: 2462755 - RNA, 19 nt, Artificial Sequence
  Description of Artificial Sequence: Synthetic oligonucleotide
gaaccucaguuguccagau

SEQ ID NO: 2462756 - RNA, 19 nt, Artificial Sequence
  Description of Artificial Sequence: Synthetic oligonucleotide
caccaccuagccgccgagg

SEQ ID NO: 2462757 - RNA, 19 nt, Artificial Sequence
  Description of Artificial Sequence: Synthetic oligonucleotide
guacguagcgggccaacau

SEQ ID NO: 2462758 - RNA, 19 nt, Artificial Sequence
  Description of Artificial Sequence: Synthetic oligonucleotide
cgaaccagccguagccucc

SEQ ID NO: 2462759 - RNA, 19 nt, Artificial Sequence
  Description of Artificial Sequence: Synthetic oligonucleotide
gccacguagggugcgcucc

SEQ ID NO: 2462760 - RNA, 19 nt, Artificial Sequence
  Description of Artificial Sequence: Synthetic oligonucleotide
ucccgggaucgagagcgcu

SEQ ID NO: 2462761 - RNA, 19 nt, Artificial Sequence
  Description of Artificial Sequence: Synthetic oligonucleotide
agcccaccaccuagccgcc

SEQ ID NO: 2462762 - RNA, 19 nt, Artificial Sequence
  Description of Artificial Sequence: Synthetic oligonucleotide
gaaagggcuggcugccuuu

SEQ ID NO: 2462763 - RNA, 19 nt, Artificial Sequence
  Description of Artificial Sequence: Synthetic oligonucleotide
ccccgaaccucaguugucc

SEQ ID NO: 2462764 - RNA, 19 nt, Artificial Sequence
  Description of Artificial Sequence: Synthetic oligonucleotide
agggcccgcucuuccuugu

SEQ ID NO: 2462765 - RNA, 19 nt, Artificial Sequence
  Description of Artificial Sequence: Synthetic oligonucleotide
ggggucuccaguaacgccu

SEQ ID NO: 2462766 - RNA, 19 nt, Artificial Sequence
  Description of Artificial Sequence: Synthetic oligonucleotide
gccccugucaugguuccgc

SEQ ID NO: 2462767 - RNA, 19 nt, Artificial Sequence
  Description of Artificial Sequence: Synthetic oligonucleotide
cucugugcggcucauucuu

SEQ ID NO: 2462768 - RNA, 19 nt, Artificial Sequence
  Description of Artificial Sequence: Synthetic oligonucleotide
ggucugcaaguucagucgu

SEQ ID NO: 2462769 - RNA, 19 nt, Artificial Sequence
  Description of Artificial Sequence: Synthetic oligonucleotide
cgguaggccuucagcaggg

SEQ ID NO: 2462770 - RNA, 19 nt, Artificial Sequence
  Description of Artificial Sequence: Synthetic oligonucleotide
caggucccgaaccagccgu

SEQ ID NO: 2462771 - RNA, 19 nt, Artificial Sequence
  Description of Artificial Sequence: Synthetic oligonucleotide
agcguuucucuaggccccu

SEQ ID NO: 2462772 - RNA, 19 nt, Artificial Sequence
  Description of Artificial Sequence: Synthetic oligonucleotide
gguacguagcgggccaaca

SEQ ID NO: 2462773 - RNA, 19 nt, Artificial Sequence
  Description of Artificial Sequence: Synthetic oligonucleotide
ggcccuguccucccugaac

SEQ ID NO: 2462774 - RNA, 19 nt, Artificial Sequence
  Description of Artificial Sequence: Synthetic oligonucleotide
ccgggaucgagagcgcucc

SEQ ID NO: 2462775 - RNA, 19 nt, Artificial Sequence
  Description of Artificial Sequence: Synthetic oligonucleotide
gucugucccgggaucgaga

SEQ ID NO: 2462776 - RNA, 19 nt, Artificial Sequence
  Description of Artificial Sequence: Synthetic oligonucleotide
cacguagggugcgcuccag

SEQ ID NO: 2462777 - RNA, 19 nt, Artificial Sequence
  Description of Artificial Sequence: Synthetic oligonucleotide
ggucccgaaccagccguag

SEQ ID NO: 2462778 - RNA, 19 nt, Artificial Sequence
  Description of Artificial Sequence: Synthetic oligonucleotide
gugcgcuccagcucauagu

SEQ ID NO: 2462779 - RNA, 19 nt, Artificial Sequence
  Description of Artificial Sequence: Synthetic oligonucleotide
uggguacguagcgggccaa

SEQ ID NO: 2462780 - RNA, 19 nt, Artificial Sequence
  Description of Artificial Sequence: Synthetic oligonucleotide
ccgaucguucucaggccac

SEQ ID NO: 2462781 - RNA, 19 nt, Artificial Sequence
  Description of Artificial Sequence: Synthetic oligonucleotide
agccgccgagggauccagc

SEQ ID NO: 2462782 - RNA, 19 nt, Artificial Sequence
  Description of Artificial Sequence: Synthetic oligonucleotide
cuggcaaauugaugggcuu

SEQ ID NO: 2462783 - RNA, 19 nt, Artificial Sequence
  Description of Artificial Sequence: Synthetic oligonucleotide
ggcguagcccuuggagaag

SEQ ID NO: 2462784 - RNA, 19 nt, Artificial Sequence
  Description of Artificial Sequence: Synthetic oligonucleotide
accuagccgccgagggauc

SEQ ID NO: 2462785 - RNA, 19 nt, Artificial Sequence
  Description of Artificial Sequence: Synthetic oligonucleotide
ccggucauguggauccuca

SEQ ID NO: 2462786 - RNA, 19 nt, Artificial Sequence
  Description of Artificial Sequence: Synthetic oligonucleotide
cccgcucuuccuuguacuc

SEQ ID NO: 2462787 - RNA, 19 nt, Artificial Sequence
  Description of Artificial Sequence: Synthetic oligonucleotide
ccgaaccagccguagccuc

SEQ ID NO: 2462788 - RNA, 19 nt, Artificial Sequence
  Description of Artificial Sequence: Synthetic oligonucleotide
cguagccuccggaugucac

SEQ ID NO: 2462789 - RNA, 19 nt, Artificial Sequence
  Description of Artificial Sequence: Synthetic oligonucleotide
ccauagcgggagaagaccu

SEQ ID NO: 2462790 - RNA, 19 nt, Artificial Sequence
  Description of Artificial Sequence: Synthetic oligonucleotide
cuggcugccuuuuggcuuu

SEQ ID NO: 2462791 - RNA, 19 nt, Artificial Sequence
  Description of Artificial Sequence: Synthetic oligonucleotide
cgccgagggauccagccac

SEQ ID NO: 2462792 - RNA, 19 nt, Artificial Sequence
  Description of Artificial Sequence: Synthetic oligonucleotide
ccagucaccaggucccgaa

SEQ ID NO: 2462793 - RNA, 19 nt, Artificial Sequence
  Description of Artificial Sequence: Synthetic oligonucleotide
caccuagccgccgagggau

SEQ ID NO: 2462794 - RNA, 19 nt, Artificial Sequence
  Description of Artificial Sequence: Synthetic oligonucleotide
cccgaucguucucaggcca

SEQ ID NO: 2462795 - RNA, 19 nt, Artificial Sequence
  Description of Artificial Sequence: Synthetic oligonucleotide
gggcuuucggaaaggccga

SEQ ID NO: 2462796 - RNA, 19 nt, Artificial Sequence
  Description of Artificial Sequence: Synthetic oligonucleotide
ggauccagccacguagggu

SEQ ID NO: 2462797 - RNA, 19 nt, Artificial Sequence
  Description of Artificial Sequence: Synthetic oligonucleotide
gcuuucggaaaggccgauc

SEQ ID NO: 2462798 - RNA, 19 nt, Artificial Sequence
  Description of Artificial Sequence: Synthetic oligonucleotide
aggccacacccuggccauc

SEQ ID NO: 2462799 - RNA, 19 nt, Artificial Sequence
  Description of Artificial Sequence: Synthetic oligonucleotide
cggaaaggccgaucccggc

SEQ ID NO: 2462800 - RNA, 19 nt, Artificial Sequence
  Description of Artificial Sequence: Synthetic oligonucleotide
gguuccgcucccugggccu

SEQ ID NO: 2462801 - RNA, 19 nt, Artificial Sequence
  Description of Artificial Sequence: Synthetic oligonucleotide
gccgagggauccagccacg

SEQ ID NO: 2462802 - RNA, 19 nt, Artificial Sequence
  Description of Artificial Sequence: Synthetic oligonucleotide
cccagugucugucccggga

SEQ ID NO: 2462803 - RNA, 19 nt, Artificial Sequence
  Description of Artificial Sequence: Synthetic oligonucleotide
cccgggaucgagagcgcuc

SEQ ID NO: 2462804 - RNA, 19 nt, Artificial Sequence
  Description of Artificial Sequence: Synthetic oligonucleotide
ccaucaaugcugccggccu

SEQ ID NO: 2462805 - RNA, 19 nt, Artificial Sequence
  Description of Artificial Sequence: Synthetic oligonucleotide
cgggagaagaccuccuuua

SEQ ID NO: 2462806 - RNA, 19 nt, Artificial Sequence
  Description of Artificial Sequence: Synthetic oligonucleotide
gcggcucauucuugacaac

SEQ ID NO: 2462807 - RNA, 19 nt, Artificial Sequence
  Description of Artificial Sequence: Synthetic oligonucleotide
cuaggccccugucaugguu

SEQ ID NO: 2462808 - RNA, 19 nt, Artificial Sequence
  Description of Artificial Sequence: Synthetic oligonucleotide
gccggccuuaagcggguca

SEQ ID NO: 2462809 - RNA, 19 nt, Artificial Sequence
  Description of Artificial Sequence: Synthetic oligonucleotide
ggccuuaagcgggucauau

SEQ ID NO: 2462810 - RNA, 19 nt, Artificial Sequence
  Description of Artificial Sequence: Synthetic oligonucleotide
gucccgggaucgagagcgc

SEQ ID NO: 2462811 - RNA, 19 nt, Artificial Sequence
  Description of Artificial Sequence: Synthetic oligonucleotide
cuccaguaacgccuuuguu

SEQ ID NO: 2462812 - RNA, 19 nt, Artificial Sequence
  Description of Artificial Sequence: Synthetic oligonucleotide
caucaaugcugccggccuu

SEQ ID NO: 2462813 - RNA, 19 nt, Artificial Sequence
  Description of Artificial Sequence: Synthetic oligonucleotide
ccagccacguagggugcgc

SEQ ID NO: 2462814 - RNA, 19 nt, Artificial Sequence
  Description of Artificial Sequence: Synthetic oligonucleotide
cgggccaacauggcccucc

SEQ ID NO: 2462815 - RNA, 19 nt, Artificial Sequence
  Description of Artificial Sequence: Synthetic oligonucleotide
ggguacguagcgggccaac

SEQ ID NO: 2462816 - RNA, 19 nt, Artificial Sequence
  Description of Artificial Sequence: Synthetic oligonucleotide
cccgaaccucaguugucca

SEQ ID NO: 2462817 - RNA, 19 nt, Artificial Sequence
  Description of Artificial Sequence: Synthetic oligonucleotide
ggccccugucaugguuccg

SEQ ID NO: 2462818 - RNA, 19 nt, Artificial Sequence
  Description of Artificial Sequence: Synthetic oligonucleotide
aggucccgaaccagccgua

SEQ ID NO: 2462819 - RNA, 19 nt, Artificial Sequence
  Description of Artificial Sequence: Synthetic oligonucleotide
ggcccuccacacagcccgg

SEQ ID NO: 2462820 - RNA, 19 nt, Artificial Sequence
  Description of Artificial Sequence: Synthetic oligonucleotide
ccaccuagccgccgaggga

SEQ ID NO: 2462821 - RNA, 19 nt, Artificial Sequence
  Description of Artificial Sequence: Synthetic oligonucleotide
ccgcucuuccuuguacuca

SEQ ID NO: 2462822 - RNA, 19 nt, Artificial Sequence
  Description of Artificial Sequence: Synthetic oligonucleotide
gggaucgagagcgcucccu

SEQ ID NO: 2462823 - RNA, 19 nt, Artificial Sequence
  Description of Artificial Sequence: Synthetic oligonucleotide
cgaauaucucaugcuaggu

SEQ ID NO: 2462824 - RNA, 19 nt, Artificial Sequence
  Description of Artificial Sequence: Synthetic oligonucleotide
ccagccguagccuccggau

SEQ ID NO: 2462825 - RNA, 19 nt, Artificial Sequence
  Description of Artificial Sequence: Synthetic oligonucleotide
cagcaucacgguaggccuu

SEQ ID NO: 2462826 - RNA, 19 nt, Artificial Sequence
  Description of Artificial Sequence: Synthetic oligonucleotide
gcauccagucacucauguu

SEQ ID NO: 2462827 - RNA, 19 nt, Artificial Sequence
  Description of Artificial Sequence: Synthetic oligonucleotide
cugccggccuuaagcgggu

SEQ ID NO: 2462828 - RNA, 19 nt, Artificial Sequence
  Description of Artificial Sequence: Synthetic oligonucleotide
ccacguagggugcgcucca

SEQ ID NO: 2462829 - RNA, 19 nt, Artificial Sequence
  Description of Artificial Sequence: Synthetic oligonucleotide
gcguuucucuaggccccug

SEQ ID NO: 2462830 - RNA, 19 nt, Artificial Sequence
  Description of Artificial Sequence: Synthetic oligonucleotide
gucgugccacaaacagggu

SEQ ID NO: 2462831 - RNA, 19 nt, Artificial Sequence
  Description of Artificial Sequence: Synthetic oligonucleotide
ucccugccuuuggcccugu

SEQ ID NO: 2462832 - RNA, 19 nt, Artificial Sequence
  Description of Artificial Sequence: Synthetic oligonucleotide
ccagugucugucccgggau

SEQ ID NO: 2462833 - RNA, 19 nt, Artificial Sequence
  Description of Artificial Sequence: Synthetic oligonucleotide
gccguagccuccggauguc

SEQ ID NO: 2462834 - RNA, 19 nt, Artificial Sequence
  Description of Artificial Sequence: Synthetic oligonucleotide
ccugaacucccucucucuu

SEQ ID NO: 2462835 - RNA, 19 nt, Artificial Sequence
  Description of Artificial Sequence: Synthetic oligonucleotide
ccgccgagggauccagcca

SEQ ID NO: 2462836 - RNA, 19 nt, Artificial Sequence
  Description of Artificial Sequence: Synthetic oligonucleotide
cggcucauucuugacaacu

SEQ ID NO: 2462837 - RNA, 19 nt, Artificial Sequence
  Description of Artificial Sequence: Synthetic oligonucleotide
agggugcgcuccagcucau

SEQ ID NO: 2462838 - RNA, 19 nt, Artificial Sequence
  Description of Artificial Sequence: Synthetic oligonucleotide
cccggucauguggauccuc

SEQ ID NO: 2462839 - RNA, 19 nt, Artificial Sequence
  Description of Artificial Sequence: Synthetic oligonucleotide
ggcugccuuuuggcuuuac

SEQ ID NO: 2462840 - RNA, 19 nt, Artificial Sequence
  Description of Artificial Sequence: Synthetic oligonucleotide
gcaucacgguaggccuuca

SEQ ID NO: 2462841 - RNA, 19 nt, Artificial Sequence
  Description of Artificial Sequence: Synthetic oligonucleotide
cgggaucgagagcgcuccc

SEQ ID NO: 2462842 - RNA, 19 nt, Artificial Sequence
  Description of Artificial Sequence: Synthetic oligonucleotide
cgaucguucucaggccaca

SEQ ID NO: 2462843 - RNA, 19 nt, Artificial Sequence
  Description of Artificial Sequence: Synthetic oligonucleotide
cagccacguagggugcgcu

SEQ ID NO: 2462844 - RNA, 19 nt, Artificial Sequence
  Description of Artificial Sequence: Synthetic oligonucleotide
ccgcucccugggccugggg

SEQ ID NO: 2462845 - RNA, 19 nt, Artificial Sequence
  Description of Artificial Sequence: Synthetic oligonucleotide
cccgaaccagccguagccu

SEQ ID NO: 2462846 - RNA, 19 nt, Artificial Sequence
  Description of Artificial Sequence: Synthetic oligonucleotide
ggcuuucggaaaggccgau

SEQ ID NO: 2462847 - RNA, 19 nt, Artificial Sequence
  Description of Artificial Sequence: Synthetic oligonucleotide
ggucuccaguaacgccuuu

SEQ ID NO: 2462848 - RNA, 19 nt, Artificial Sequence
  Description of Artificial Sequence: Synthetic oligonucleotide
ccggccuuaagcgggucau

SEQ ID NO: 2462849 - RNA, 19 nt, Artificial Sequence
  Description of Artificial Sequence: Synthetic oligonucleotide
cgagagcgcucccuccucu

SEQ ID NO: 2462850 - RNA, 19 nt, Artificial Sequence
  Description of Artificial Sequence: Synthetic oligonucleotide
cccucuugucccugccuuu

SEQ ID NO: 2462851 - RNA, 19 nt, Artificial Sequence
  Description of Artificial Sequence: Synthetic oligonucleotide
gggugcgcuccagcucaua

SEQ ID NO: 2462852 - RNA, 19 nt, Artificial Sequence
  Description of Artificial Sequence: Synthetic oligonucleotide
ccgagggauccagccacgu

SEQ ID NO: 2462853 - RNA, 19 nt, Artificial Sequence
  Description of Artificial Sequence: Synthetic oligonucleotide
cggucauguggauccucau

SEQ ID NO: 2462854 - RNA, 19 nt, Artificial Sequence
  Description of Artificial Sequence: Synthetic oligonucleotide
gcccuccacacagcccggu

SEQ ID NO: 2462855 - RNA, 19 nt, Artificial Sequence
  Description of Artificial Sequence: Synthetic oligonucleotide
gcccggucauguggauccu

SEQ ID NO: 2462856 - RNA, 19 nt, Artificial Sequence
  Description of Artificial Sequence: Synthetic oligonucleotide
gcgcucccuccucucucuu

SEQ ID NO: 2462857 - RNA, 19 nt, Artificial Sequence
  Description of Artificial Sequence: Synthetic oligonucleotide
cgccuuuguuggguacgua

SEQ ID NO: 2462858 - RNA, 19 nt, Artificial Sequence
  Description of Artificial Sequence: Synthetic oligonucleotide
cggccuuaagcgggucaua

SEQ ID NO: 2462859 - RNA, 19 nt, Artificial Sequence
  Description of Artificial Sequence: Synthetic oligonucleotide
cgcucccuccucucucuuu

SEQ ID NO: 2462860 - RNA, 19 nt, Artificial Sequence
  Description of Artificial Sequence: Synthetic oligonucleotide
uuugcugagauaaauaucc

SEQ ID NO: 2462861 - RNA, 19 nt, Artificial Sequence
  Description of Artificial Sequence: Synthetic oligonucleotide
uguacaaagaauuuucgcg

SEQ ID NO: 2462862 - RNA, 19 nt, Artificial Sequence
  Description of Artificial Sequence: Synthetic oligonucleotide
ugaacuugauccaucaggg

SEQ ID NO: 2462863 - RNA, 19 nt, Artificial Sequence
  Description of Artificial Sequence: Synthetic oligonucleotide
uucuauaugagcaaugacu

SEQ ID NO: 2462864 - RNA, 19 nt, Artificial Sequence
  Description of Artificial Sequence: Synthetic oligonucleotide
ucugauugugaaaacaucc

SEQ ID NO: 2462865 - RNA, 19 nt, Artificial Sequence
  Description of Artificial Sequence: Synthetic oligonucleotide
aaccugauuuaugugaucc

SEQ ID NO: 2462866 - RNA, 19 nt, Artificial Sequence
  Description of Artificial Sequence: Synthetic oligonucleotide
aaacauauggacuguagga

SEQ ID NO: 2462867 - RNA, 19 nt, Artificial Sequence
  Description of Artificial Sequence: Synthetic oligonucleotide
uguaguaagaucugaagga

SEQ ID NO: 2462868 - RNA, 19 nt, Artificial Sequence
  Description of Artificial Sequence: Synthetic oligonucleotide
augaacuugauccaucagg

SEQ ID NO: 2462869 - RNA, 19 nt, Artificial Sequence
  Description of Artificial Sequence: Synthetic oligonucleotide
aauuucguguaguaagauc

SEQ ID NO: 2462870 - RNA, 19 nt, Artificial Sequence
  Description of Artificial Sequence: Synthetic oligonucleotide
aacugauguacuuaguuga

SEQ ID NO: 2462871 - RNA, 19 nt, Artificial Sequence
  Description of Artificial Sequence: Synthetic oligonucleotide
ucaaaaguaugucuguuug

SEQ ID NO: 2462872 - RNA, 19 nt, Artificial Sequence
  Description of Artificial Sequence: Synthetic oligonucleotide
gaaacauauggacuguagg

SEQ ID NO: 2462873 - RNA, 19 nt, Artificial Sequence
  Description of Artificial Sequence: Synthetic oligonucleotide
uguuugaugaacuggacac

SEQ ID NO: 2462874 - RNA, 19 nt, Artificial Sequence
  Description of Artificial Sequence: Synthetic oligonucleotide
aguaagaucugaaggaugc

SEQ ID NO: 2462875 - RNA, 19 nt, Artificial Sequence
  Description of Artificial Sequence: Synthetic oligonucleotide
agagguuucugucggaacc

SEQ ID NO: 2462876 - RNA, 19 nt, Artificial Sequence
  Description of Artificial Sequence: Synthetic oligonucleotide
ugugaaacugaaauggcca

SEQ ID NO: 2462877 - RNA, 19 nt, Artificial Sequence
  Description of Artificial Sequence: Synthetic oligonucleotide
aacuugauccaucagggca

SEQ ID NO: 2462878 - RNA, 19 nt, Artificial Sequence
  Description of Artificial Sequence: Synthetic oligonucleotide
aauuuucgcgacgaguacc

SEQ ID NO: 2462879 - RNA, 19 nt, Artificial Sequence
  Description of Artificial Sequence: Synthetic oligonucleotide
acuuaguugagguaguuug

SEQ ID NO: 2462880 - RNA, 19 nt, Artificial Sequence
  Description of Artificial Sequence: Synthetic oligonucleotide
gauugugaaaacauccugg

SEQ ID NO: 2462881 - RNA, 19 nt, Artificial Sequence
  Description of Artificial Sequence: Synthetic oligonucleotide
uguucagagggcaacagug

SEQ ID NO: 2462882 - RNA, 19 nt, Artificial Sequence
  Description of Artificial Sequence: Synthetic oligonucleotide
uauaugagcaaugacuuug

SEQ ID NO: 2462883 - RNA, 19 nt, Artificial Sequence
  Description of Artificial Sequence: Synthetic oligonucleotide
uguagaacaggaaugacuu

SEQ ID NO: 2462884 - RNA, 19 nt, Artificial Sequence
  Description of Artificial Sequence: Synthetic oligonucleotide
cuugucaaaaguaugucug

SEQ ID NO: 2462885 - RNA, 19 nt, Artificial Sequence
  Description of Artificial Sequence: Synthetic oligonucleotide
aacugaaauggccaucauc

SEQ ID NO: 2462886 - RNA, 19 nt, Artificial Sequence
  Description of Artificial Sequence: Synthetic oligonucleotide
gaauucucacuucacaacc

SEQ ID NO: 2462887 - RNA, 19 nt, Artificial Sequence
  Description of Artificial Sequence: Synthetic oligonucleotide
ucuauaugagcaaugacuu

SEQ ID NO: 2462888 - RNA, 19 nt, Artificial Sequence
  Description of Artificial Sequence: Synthetic oligonucleotide
aagaucugaaggaugcugc

SEQ ID NO: 2462889 - RNA, 19 nt, Artificial Sequence
  Description of Artificial Sequence: Synthetic oligonucleotide
aaaagagguaccagaagac

SEQ ID NO: 2462890 - RNA, 19 nt, Artificial Sequence
  Description of Artificial Sequence: Synthetic oligonucleotide
aacauauggacuguaggag

SEQ ID NO: 2462891 - RNA, 19 nt, Artificial Sequence
  Description of Artificial Sequence: Synthetic oligonucleotide
uccucugugaaacugaaau

SEQ ID NO: 2462892 - RNA, 19 nt, Artificial Sequence
  Description of Artificial Sequence: Synthetic oligonucleotide
aguugagguaguuugaaga

SEQ ID NO: 2462893 - RNA, 19 nt, Artificial Sequence
  Description of Artificial Sequence: Synthetic oligonucleotide
ugggucuucuauaugagca

SEQ ID NO: 2462894 - RNA, 19 nt, Artificial Sequence
  Description of Artificial Sequence: Synthetic oligonucleotide
acugaaauggccaucaucu

SEQ ID NO: 2462895 - RNA, 19 nt, Artificial Sequence
  Description of Artificial Sequence: Synthetic oligonucleotide
ugauguacuuaguugaggu

SEQ ID NO: 2462896 - RNA, 19 nt, Artificial Sequence
  Description of Artificial Sequence: Synthetic oligonucleotide
aauuugacacuuucucucu

SEQ ID NO: 2462897 - RNA, 19 nt, Artificial Sequence
  Description of Artificial Sequence: Synthetic oligonucleotide
auuuaugugauccacuauu

SEQ ID NO: 2462898 - RNA, 19 nt, Artificial Sequence
  Description of Artificial Sequence: Synthetic oligonucleotide
ucacuuuucaccucaccag

SEQ ID NO: 2462899 - RNA, 19 nt, Artificial Sequence
  Description of Artificial Sequence: Synthetic oligonucleotide
auuucguguaguaagaucu

SEQ ID NO: 2462900 - RNA, 19 nt, Artificial Sequence
  Description of Artificial Sequence: Synthetic oligonucleotide
ucuagcucucccaagguac

SEQ ID NO: 2462901 - RNA, 19 nt, Artificial Sequence
  Description of Artificial Sequence: Synthetic oligonucleotide
aaaaguaugucuguuugau

SEQ ID NO: 2462902 - RNA, 19 nt, Artificial Sequence
  Description of Artificial Sequence: Synthetic oligonucleotide
acuguaucuuuguagaggu

SEQ ID NO: 2462903 - RNA, 19 nt, Artificial Sequence
  Description of Artificial Sequence: Synthetic oligonucleotide
gaaaacauccugguucugg

SEQ ID NO: 2462904 - RNA, 19 nt, Artificial Sequence
  Description of Artificial Sequence: Synthetic oligonucleotide
agguaccuugguuagaguc

SEQ ID NO: 2462905 - RNA, 19 nt, Artificial Sequence
  Description of Artificial Sequence: Synthetic oligonucleotide
acgaguaccagguagaauu

SEQ ID NO: 2462906 - RNA, 19 nt, Artificial Sequence
  Description of Artificial Sequence: Synthetic oligonucleotide
uuucugucgacccacugac

SEQ ID NO: 2462907 - RNA, 19 nt, Artificial Sequence
  Description of Artificial Sequence: Synthetic oligonucleotide
agaauuugacacuuucucu

SEQ ID NO: 2462908 - RNA, 19 nt, Artificial Sequence
  Description of Artificial Sequence: Synthetic oligonucleotide
gacuguaucuuuguagagg

SEQ ID NO: 2462909 - RNA, 19 nt, Artificial Sequence
  Description of Artificial Sequence: Synthetic oligonucleotide
agaucugaaggaugcugcc

SEQ ID NO: 2462910 - RNA, 19 nt, Artificial Sequence
  Description of Artificial Sequence: Synthetic oligonucleotide
auugugaaaacauccuggu

SEQ ID NO: 2462911 - RNA, 19 nt, Artificial Sequence
  Description of Artificial Sequence: Synthetic oligonucleotide
ugguuuguagaacaggaau

SEQ ID NO: 2462912 - RNA, 19 nt, Artificial Sequence
  Description of Artificial Sequence: Synthetic oligonucleotide
gagggcaacagugagcacg

SEQ ID NO: 2462913 - RNA, 19 nt, Artificial Sequence
  Description of Artificial Sequence: Synthetic oligonucleotide
aaagaauuuucgcgacgag

SEQ ID NO: 2462914 - RNA, 19 nt, Artificial Sequence
  Description of Artificial Sequence: Synthetic oligonucleotide
cuugguuagaguccccugg

SEQ ID NO: 2462915 - RNA, 19 nt, Artificial Sequence
  Description of Artificial Sequence: Synthetic oligonucleotide
ucacuucacaaccugauuu

SEQ ID NO: 2462916 - RNA, 19 nt, Artificial Sequence
  Description of Artificial Sequence: Synthetic oligonucleotide
cuguacaaagaauuuucgc

SEQ ID NO: 2462917 - RNA, 19 nt, Artificial Sequence
  Description of Artificial Sequence: Synthetic oligonucleotide
acaaagaauuuucgcgacg

SEQ ID NO: 2462918 - RNA, 19 nt, Artificial Sequence
  Description of Artificial Sequence: Synthetic oligonucleotide
ucuucuauaugagcaauga

SEQ ID NO: 2462919 - RNA, 19 nt, Artificial Sequence
  Description of Artificial Sequence: Synthetic oligonucleotide
uucagagggcaacagugag

SEQ ID NO: 2462920 - RNA, 19 nt, Artificial Sequence
  Description of Artificial Sequence: Synthetic oligonucleotide
uugguuagaguccccuggg

SEQ ID NO: 2462921 - RNA, 19 nt, Artificial Sequence
  Description of Artificial Sequence: Synthetic oligonucleotide
guacaaagaauuuucgcga

SEQ ID NO: 2462922 - RNA, 19 nt, Artificial Sequence
  Description of Artificial Sequence: Synthetic oligonucleotide
uuuucaccucaccagaauc

SEQ ID NO: 2462923 - RNA, 19 nt, Artificial Sequence
  Description of Artificial Sequence: Synthetic oligonucleotide
uuugacacuuucucucucc

SEQ ID NO: 2462924 - RNA, 19 nt, Artificial Sequence
  Description of Artificial Sequence: Synthetic oligonucleotide
ugauuuaugugauccacua

SEQ ID NO: 2462925 - RNA, 19 nt, Artificial Sequence
  Description of Artificial Sequence: Synthetic oligonucleotide
uuugaagaagccagggguc

SEQ ID NO: 2462926 - RNA, 19 nt, Artificial Sequence
  Description of Artificial Sequence: Synthetic oligonucleotide
auaugaacuugauccauca

SEQ ID NO: 2462927 - RNA, 19 nt, Artificial Sequence
  Description of Artificial Sequence: Synthetic oligonucleotide
gaaaacuccaacaaggagu

SEQ ID NO: 2462928 - RNA, 19 nt, Artificial Sequence
  Description of Artificial Sequence: Synthetic oligonucleotide
uggguucugcauaugaacu

SEQ ID NO: 2462929 - RNA, 19 nt, Artificial Sequence
  Description of Artificial Sequence: Synthetic oligonucleotide
uggaauucucacuucacaa

SEQ ID NO: 2462930 - RNA, 19 nt, Artificial Sequence
  Description of Artificial Sequence: Synthetic oligonucleotide
aagagguaccagaagacug

SEQ ID NO: 2462931 - RNA, 19 nt, Artificial Sequence
  Description of Artificial Sequence: Synthetic oligonucleotide
cuuuguagagguuucuguc

SEQ ID NO: 2462932 - RNA, 19 nt, Artificial Sequence
  Description of Artificial Sequence: Synthetic oligonucleotide
uucgcgacgaguaccaggu

SEQ ID NO: 2462933 - RNA, 19 nt, Artificial Sequence
  Description of Artificial Sequence: Synthetic oligonucleotide
aagaauuuucgcgacgagu

SEQ ID NO: 2462934 - RNA, 19 nt, Artificial Sequence
  Description of Artificial Sequence: Synthetic oligonucleotide
gaccaacugauguacuuag

SEQ ID NO: 2462935 - RNA, 19 nt, Artificial Sequence
  Description of Artificial Sequence: Synthetic oligonucleotide
caacugauguacuuaguug

SEQ ID NO: 2462936 - RNA, 19 nt, Artificial Sequence
  Description of Artificial Sequence: Synthetic oligonucleotide
aaagagguaccagaagacu

SEQ ID NO: 2462937 - RNA, 19 nt, Artificial Sequence
  Description of Artificial Sequence: Synthetic oligonucleotide
ucugucgacccacugacuc

SEQ ID NO: 2462938 - RNA, 19 nt, Artificial Sequence
  Description of Artificial Sequence: Synthetic oligonucleotide
uaugaacuugauccaucag

SEQ ID NO: 2462939 - RNA, 19 nt, Artificial Sequence
  Description of Artificial Sequence: Synthetic oligonucleotide
ugcauaugaacuugaucca

SEQ ID NO: 2462940 - RNA, 19 nt, Artificial Sequence
  Description of Artificial Sequence: Synthetic oligonucleotide
acacaacuggaauucucac

SEQ ID NO: 2462941 - RNA, 19 nt, Artificial Sequence
  Description of Artificial Sequence: Synthetic oligonucleotide
uaguuugaagaagccaggg

SEQ ID NO: 2462942 - RNA, 19 nt, Artificial Sequence
  Description of Artificial Sequence: Synthetic oligonucleotide
uuucgcgacgaguaccagg

SEQ ID NO: 2462943 - RNA, 19 nt, Artificial Sequence
  Description of Artificial Sequence: Synthetic oligonucleotide
ucucuccauacucaugccc

SEQ ID NO: 2462944 - RNA, 19 nt, Artificial Sequence
  Description of Artificial Sequence: Synthetic oligonucleotide
gagacgcuggaaacgaugg

SEQ ID NO: 2462945 - RNA, 19 nt, Artificial Sequence
  Description of Artificial Sequence: Synthetic oligonucleotide
gaggcauugucuuuaggca

SEQ ID NO: 2462946 - RNA, 19 nt, Artificial Sequence
  Description of Artificial Sequence: Synthetic oligonucleotide
agaaaaugaggcauugucu

SEQ ID NO: 2462947 - RNA, 19 nt, Artificial Sequence
  Description of Artificial Sequence: Synthetic oligonucleotide
uuucguguaguaagaucug

SEQ ID NO: 2462948 - RNA, 19 nt, Artificial Sequence
  Description of Artificial Sequence: Synthetic oligonucleotide
uuucuagaucugauuguga

SEQ ID NO: 2462949 - RNA, 19 nt, Artificial Sequence
  Description of Artificial Sequence: Synthetic oligonucleotide
ucugaggaaccccaagaaa

SEQ ID NO: 2462950 - RNA, 19 nt, Artificial Sequence
  Description of Artificial Sequence: Synthetic oligonucleotide
cacaaccugauuuauguga

SEQ ID NO: 2462951 - RNA, 19 nt, Artificial Sequence
  Description of Artificial Sequence: Synthetic oligonucleotide
uugucaaaaguaugucugu

SEQ ID NO: 2462952 - RNA, 19 nt, Artificial Sequence
  Description of Artificial Sequence: Synthetic oligonucleotide
aacaaggagucauccaauu

SEQ ID NO: 2462953 - RNA, 19 nt, Artificial Sequence
  Description of Artificial Sequence: Synthetic oligonucleotide
auuugacacuuucucucuc

SEQ ID NO: 2462954 - RNA, 19 nt, Artificial Sequence
  Description of Artificial Sequence: Synthetic oligonucleotide
aacagugagcacgucauau

SEQ ID NO: 2462955 - RNA, 19 nt, Artificial Sequence
  Description of Artificial Sequence: Synthetic oligonucleotide
auucucacuucacaaccug

SEQ ID NO: 2462956 - RNA, 19 nt, Artificial Sequence
  Description of Artificial Sequence: Synthetic oligonucleotide
cauaugaacuugauccauc

SEQ ID NO: 2462957 - RNA, 19 nt, Artificial Sequence
  Description of Artificial Sequence: Synthetic oligonucleotide
gaaaaugaggcauugucuu

SEQ ID NO: 2462958 - RNA, 19 nt, Artificial Sequence
  Description of Artificial Sequence: Synthetic oligonucleotide
ugaggaaccccaagaaaau

SEQ ID NO: 2462959 - RNA, 19 nt, Artificial Sequence
  Description of Artificial Sequence: Synthetic oligonucleotide
caagguaccuugguuagag

SEQ ID NO: 2462960 - RNA, 19 nt, Artificial Sequence
  Description of Artificial Sequence: Synthetic oligonucleotide
aaaugaggcauugucuuua

SEQ ID NO: 2462961 - RNA, 19 nt, Artificial Sequence
  Description of Artificial Sequence: Synthetic oligonucleotide
guaguuugaagaagccagg

SEQ ID NO: 2462962 - RNA, 19 nt, Artificial Sequence
  Description of Artificial Sequence: Synthetic oligonucleotide
auaauuucguguaguaaga

SEQ ID NO: 2462963 - RNA, 19 nt, Artificial Sequence
  Description of Artificial Sequence: Synthetic oligonucleotide
cucacuuuucaccucacca

SEQ ID NO: 2462964 - RNA, 19 nt, Artificial Sequence
  Description of Artificial Sequence: Synthetic oligonucleotide
agaauuuucgcgacgagua

SEQ ID NO: 2462965 - RNA, 19 nt, Artificial Sequence
  Description of Artificial Sequence: Synthetic oligonucleotide
agacuguaucuuuguagag

SEQ ID NO: 2462966 - RNA, 19 nt, Artificial Sequence
  Description of Artificial Sequence: Synthetic oligonucleotide
aauucucacuucacaaccu

SEQ ID NO: 2462967 - RNA, 19 nt, Artificial Sequence
  Description of Artificial Sequence: Synthetic oligonucleotide
ucugggagacgcuggaaac

SEQ ID NO: 2462968 - RNA, 19 nt, Artificial Sequence
  Description of Artificial Sequence: Synthetic oligonucleotide
gagguuucugucggaaccg

SEQ ID NO: 2462969 - RNA, 19 nt, Artificial Sequence
  Description of Artificial Sequence: Synthetic oligonucleotide
aucugauugugaaaacauc

SEQ ID NO: 2462970 - RNA, 19 nt, Artificial Sequence
  Description of Artificial Sequence: Synthetic oligonucleotide
gaauuuucgcgacgaguac

SEQ ID NO: 2462971 - RNA, 19 nt, Artificial Sequence
  Description of Artificial Sequence: Synthetic oligonucleotide
ucguguaguaagaucugaa

SEQ ID NO: 2462972 - RNA, 19 nt, Artificial Sequence
  Description of Artificial Sequence: Synthetic oligonucleotide
gcaucuagcucucccaagg

SEQ ID NO: 2462973 - RNA, 19 nt, Artificial Sequence
  Description of Artificial Sequence: Synthetic oligonucleotide
ucuucaucugaggaacccc

SEQ ID NO: 2462974 - RNA, 19 nt, Artificial Sequence
  Description of Artificial Sequence: Synthetic oligonucleotide
ucccaagguaccuugguua

SEQ ID NO: 2462975 - RNA, 19 nt, Artificial Sequence
  Description of Artificial Sequence: Synthetic oligonucleotide
ucacaaccugauuuaugug

SEQ ID NO: 2462976 - RNA, 19 nt, Artificial Sequence
  Description of Artificial Sequence: Synthetic oligonucleotide
uccaacaaggagucaucca

SEQ ID NO: 2462977 - RNA, 19 nt, Artificial Sequence
  Description of Artificial Sequence: Synthetic oligonucleotide
cugauguacuuaguugagg

SEQ ID NO: 2462978 - RNA, 19 nt, Artificial Sequence
  Description of Artificial Sequence: Synthetic oligonucleotide
uuuguagaacaggaaugac

SEQ ID NO: 2462979 - RNA, 19 nt, Artificial Sequence
  Description of Artificial Sequence: Synthetic oligonucleotide
agucuucucucacuuuuca

SEQ ID NO: 2462980 - RNA, 19 nt, Artificial Sequence
  Description of Artificial Sequence: Synthetic oligonucleotide
uccaugaccaacugaugua

SEQ ID NO: 2462981 - RNA, 19 nt, Artificial Sequence
  Description of Artificial Sequence: Synthetic oligonucleotide
aaccgcgcauaauuucgug

SEQ ID NO: 2462982 - RNA, 19 nt, Artificial Sequence
  Description of Artificial Sequence: Synthetic oligonucleotide
gcugagauaaauauccuuc

SEQ ID NO: 2462983 - RNA, 19 nt, Artificial Sequence
  Description of Artificial Sequence: Synthetic oligonucleotide
guuucugucgacccacuga

SEQ ID NO: 2462984 - RNA, 19 nt, Artificial Sequence
  Description of Artificial Sequence: Synthetic oligonucleotide
cauacucaugcccaccauc

SEQ ID NO: 2462985 - RNA, 19 nt, Artificial Sequence
  Description of Artificial Sequence: Synthetic oligonucleotide
cugggucuucuauaugagc

SEQ ID NO: 2462986 - RNA, 19 nt, Artificial Sequence
  Description of Artificial Sequence: Synthetic oligonucleotide
aagucugggagacgcugga

SEQ ID NO: 2462987 - RNA, 19 nt, Artificial Sequence
  Description of Artificial Sequence: Synthetic oligonucleotide
caaagaauuuucgcgacga

SEQ ID NO: 2462988 - RNA, 19 nt, Artificial Sequence
  Description of Artificial Sequence: Synthetic oligonucleotide
acuuugccuagucuucucu

SEQ ID NO: 2462989 - RNA, 19 nt, Artificial Sequence
  Description of Artificial Sequence: Synthetic oligonucleotide
uugcugagauaaauauccu

SEQ ID NO: 2462990 - RNA, 19 nt, Artificial Sequence
  Description of Artificial Sequence: Synthetic oligonucleotide
ggaaccgcgcauaauuucg

SEQ ID NO: 2462991 - RNA, 19 nt, Artificial Sequence
  Description of Artificial Sequence: Synthetic oligonucleotide
gacucagacuguaucuuug

SEQ ID NO: 2462992 - RNA, 19 nt, Artificial Sequence
  Description of Artificial Sequence: Synthetic oligonucleotide
cuuaguugagguaguuuga

SEQ ID NO: 2462993 - RNA, 19 nt, Artificial Sequence
  Description of Artificial Sequence: Synthetic oligonucleotide
auacucaugcccaccauca

SEQ ID NO: 2462994 - RNA, 19 nt, Artificial Sequence
  Description of Artificial Sequence: Synthetic oligonucleotide
ugucgacccacugacucag

SEQ ID NO: 2462995 - RNA, 19 nt, Artificial Sequence
  Description of Artificial Sequence: Synthetic oligonucleotide
gguucugguuuguagaaca

SEQ ID NO: 2462996 - RNA, 19 nt, Artificial Sequence
  Description of Artificial Sequence: Synthetic oligonucleotide
cuggaaacgaugguggcuc

SEQ ID NO: 2462997 - RNA, 19 nt, Artificial Sequence
  Description of Artificial Sequence: Synthetic oligonucleotide
gaaacgaugguggcuccgc

SEQ ID NO: 2462998 - RNA, 19 nt, Artificial Sequence
  Description of Artificial Sequence: Synthetic oligonucleotide
uagaucugauugugaaaac

SEQ ID NO: 2462999 - RNA, 19 nt, Artificial Sequence
  Description of Artificial Sequence: Synthetic oligonucleotide
agaagacuguucagagggc

SEQ ID NO: 2463000 - RNA, 19 nt, Artificial Sequence
  Description of Artificial Sequence: Synthetic oligonucleotide
acucagacuguaucuuugu

SEQ ID NO: 2463001 - RNA, 19 nt, Artificial Sequence
  Description of Artificial Sequence: Synthetic oligonucleotide
uucguguaguaagaucuga

SEQ ID NO: 2463002 - RNA, 19 nt, Artificial Sequence
  Description of Artificial Sequence: Synthetic oligonucleotide
aggaaccccaagaaaauga

SEQ ID NO: 2463003 - RNA, 19 nt, Artificial Sequence
  Description of Artificial Sequence: Synthetic oligonucleotide
acgcuggaaacgauggugg

SEQ ID NO: 2463004 - RNA, 19 nt, Artificial Sequence
  Description of Artificial Sequence: Synthetic oligonucleotide
gagaugaaacauauggacu

SEQ ID NO: 2463005 - RNA, 19 nt, Artificial Sequence
  Description of Artificial Sequence: Synthetic oligonucleotide
acugauguacuuaguugag

SEQ ID NO: 2463006 - RNA, 19 nt, Artificial Sequence
  Description of Artificial Sequence: Synthetic oligonucleotide
aaacgaugguggcuccgcu

SEQ ID NO: 2463007 - RNA, 19 nt, Artificial Sequence
  Description of Artificial Sequence: Synthetic oligonucleotide
agaagucugggagacgcug

SEQ ID NO: 2463008 - RNA, 19 nt, Artificial Sequence
  Description of Artificial Sequence: Synthetic oligonucleotide
aggcauugucuuuaggcaa

SEQ ID NO: 2463009 - RNA, 19 nt, Artificial Sequence
  Description of Artificial Sequence: Synthetic oligonucleotide
aguaccagguagaauuuga

SEQ ID NO: 2463010 - RNA, 19 nt, Artificial Sequence
  Description of Artificial Sequence: Synthetic oligonucleotide
cuucaucugaggaacccca

SEQ ID NO: 2463011 - RNA, 19 nt, Artificial Sequence
  Description of Artificial Sequence: Synthetic oligonucleotide
guaccuugguuagaguccc

SEQ ID NO: 2463012 - RNA, 19 nt, Artificial Sequence
  Description of Artificial Sequence: Synthetic oligonucleotide
cuuugccuagucuucucuc

SEQ ID NO: 2463013 - RNA, 19 nt, Artificial Sequence
  Description of Artificial Sequence: Synthetic oligonucleotide
uaauuucguguaguaagau

SEQ ID NO: 2463014 - RNA, 19 nt, Artificial Sequence
  Description of Artificial Sequence: Synthetic oligonucleotide
gaggaaccccaagaaaaug

SEQ ID NO: 2463015 - RNA, 19 nt, Artificial Sequence
  Description of Artificial Sequence: Synthetic oligonucleotide
uucaccucaccagaauccu

SEQ ID NO: 2463016 - RNA, 19 nt, Artificial Sequence
  Description of Artificial Sequence: Synthetic oligonucleotide
uagagguuucugucggaac

SEQ ID NO: 2463017 - RNA, 19 nt, Artificial Sequence
  Description of Artificial Sequence: Synthetic oligonucleotide
uucugcauaugaacuugau

SEQ ID NO: 2463018 - RNA, 19 nt, Artificial Sequence
  Description of Artificial Sequence: Synthetic oligonucleotide
ucgacccacugacucagac

SEQ ID NO: 2463019 - RNA, 19 nt, Artificial Sequence
  Description of Artificial Sequence: Synthetic oligonucleotide
gguaccuugguuagagucc

SEQ ID NO: 2463020 - RNA, 19 nt, Artificial Sequence
  Description of Artificial Sequence: Synthetic oligonucleotide
agaauccuugucaaaagua

SEQ ID NO: 2463021 - RNA, 19 nt, Artificial Sequence
  Description of Artificial Sequence: Synthetic oligonucleotide
cacugacucagacuguauc

SEQ ID NO: 2463022 - RNA, 19 nt, Artificial Sequence
  Description of Artificial Sequence: Synthetic oligonucleotide
augaggcauugucuuuagg

SEQ ID NO: 2463023 - RNA, 19 nt, Artificial Sequence
  Description of Artificial Sequence: Synthetic oligonucleotide
auuuucgcgacgaguacca

SEQ ID NO: 2463024 - RNA, 19 nt, Artificial Sequence
  Description of Artificial Sequence: Synthetic oligonucleotide
augaccaacugauguacuu

SEQ ID NO: 2463025 - RNA, 19 nt, Artificial Sequence
  Description of Artificial Sequence: Synthetic oligonucleotide
gauguacuuaguugaggua

SEQ ID NO: 2463026 - RNA, 19 nt, Artificial Sequence
  Description of Artificial Sequence: Synthetic oligonucleotide
uguagagguuucugucgga

SEQ ID NO: 2463027 - RNA, 19 nt, Artificial Sequence
  Description of Artificial Sequence: Synthetic oligonucleotide
agguaguuugaagaagcca

SEQ ID NO: 2463028 - RNA, 19 nt, Artificial Sequence
  Description of Artificial Sequence: Synthetic oligonucleotide
ugggagacgcuggaaacga

SEQ ID NO: 2463029 - RNA, 19 nt, Artificial Sequence
  Description of Artificial Sequence: Synthetic oligonucleotide
accgcgcauaauuucgugu

SEQ ID NO: 2463030 - RNA, 19 nt, Artificial Sequence
  Description of Artificial Sequence: Synthetic oligonucleotide
uccuugucaaaaguauguc

SEQ ID NO: 2463031 - RNA, 19 nt, Artificial Sequence
  Description of Artificial Sequence: Synthetic oligonucleotide
aaacauccugguucugguu

SEQ ID NO: 2463032 - RNA, 19 nt, Artificial Sequence
  Description of Artificial Sequence: Synthetic oligonucleotide
gugaaaacauccugguucu

SEQ ID NO: 2463033 - RNA, 19 nt, Artificial Sequence
  Description of Artificial Sequence: Synthetic oligonucleotide
aguugguccaugaccaacu

SEQ ID NO: 2463034 - RNA, 19 nt, Artificial Sequence
  Description of Artificial Sequence: Synthetic oligonucleotide
accugauuuaugugaucca

SEQ ID NO: 2463035 - RNA, 19 nt, Artificial Sequence
  Description of Artificial Sequence: Synthetic oligonucleotide
ugucaaaaguaugucuguu

SEQ ID NO: 2463036 - RNA, 19 nt, Artificial Sequence
  Description of Artificial Sequence: Synthetic oligonucleotide
aagguaccuugguuagagu

SEQ ID NO: 2463037 - RNA, 19 nt, Artificial Sequence
  Description of Artificial Sequence: Synthetic oligonucleotide
agguuucugucggaaccgc

SEQ ID NO: 2463038 - RNA, 19 nt, Artificial Sequence
  Description of Artificial Sequence: Synthetic oligonucleotide
cugggagacgcuggaaacg

SEQ ID NO: 2463039 - RNA, 19 nt, Artificial Sequence
  Description of Artificial Sequence: Synthetic oligonucleotide
acuguucagagggcaacag

SEQ ID NO: 2463040 - RNA, 19 nt, Artificial Sequence
  Description of Artificial Sequence: Synthetic oligonucleotide
gaauccuugucaaaaguau

SEQ ID NO: 2463041 - RNA, 19 nt, Artificial Sequence
  Description of Artificial Sequence: Synthetic oligonucleotide
caggaaugacuuugccuag

SEQ ID NO: 2463042 - RNA, 19 nt, Artificial Sequence
  Description of Artificial Sequence: Synthetic oligonucleotide
guaugucuguuugaugaac

SEQ ID NO: 2463043 - RNA, 19 nt, Artificial Sequence
  Description of Artificial Sequence: Synthetic oligonucleotide
uucaucugaggaaccccaa

SEQ ID NO: 2463044 - RNA, 19 nt, Artificial Sequence
  Description of Artificial Sequence: Synthetic oligonucleotide
ugaccaacugauguacuua

SEQ ID NO: 2463045 - RNA, 19 nt, Artificial Sequence
  Description of Artificial Sequence: Synthetic oligonucleotide
ucuccauacucaugcccac

SEQ ID NO: 2463046 - RNA, 19 nt, Artificial Sequence
  Description of Artificial Sequence: Synthetic oligonucleotide
agggcaucuagcucuccca

SEQ ID NO: 2463047 - RNA, 19 nt, Artificial Sequence
  Description of Artificial Sequence: Synthetic oligonucleotide
aacgaugguggcuccgcuu

SEQ ID NO: 2463048 - RNA, 19 nt, Artificial Sequence
  Description of Artificial Sequence: Synthetic oligonucleotide
acuugauccaucagggcau

SEQ ID NO: 2463049 - RNA, 19 nt, Artificial Sequence
  Description of Artificial Sequence: Synthetic oligonucleotide
ugacucagacuguaucuuu

SEQ ID NO: 2463050 - RNA, 19 nt, Artificial Sequence
  Description of Artificial Sequence: Synthetic oligonucleotide
auauggacuguaggagaag

SEQ ID NO: 2463051 - RNA, 19 nt, Artificial Sequence
  Description of Artificial Sequence: Synthetic oligonucleotide
ggaaccccaagaaaaugag

SEQ ID NO: 2463052 - RNA, 19 nt, Artificial Sequence
  Description of Artificial Sequence: Synthetic oligonucleotide
acaaccugauuuaugugau

SEQ ID NO: 2463053 - RNA, 19 nt, Artificial Sequence
  Description of Artificial Sequence: Synthetic oligonucleotide
guaucuuuguagagguuuc

SEQ ID NO: 2463054 - RNA, 19 nt, Artificial Sequence
  Description of Artificial Sequence: Synthetic oligonucleotide
gucuucuauaugagcaaug

SEQ ID NO: 2463055 - RNA, 19 nt, Artificial Sequence
  Description of Artificial Sequence: Synthetic oligonucleotide
ucggaaccgcgcauaauuu

SEQ ID NO: 2463056 - RNA, 19 nt, Artificial Sequence
  Description of Artificial Sequence: Synthetic oligonucleotide
ggccccaagcuguacaaag

SEQ ID NO: 2463057 - RNA, 19 nt, Artificial Sequence
  Description of Artificial Sequence: Synthetic oligonucleotide
cugauugugaaaacauccu

SEQ ID NO: 2463058 - RNA, 19 nt, Artificial Sequence
  Description of Artificial Sequence: Synthetic oligonucleotide
gaguaccagguagaauuug

SEQ ID NO: 2463059 - RNA, 19 nt, Artificial Sequence
  Description of Artificial Sequence: Synthetic oligonucleotide
auggacuguaggagaaguc

SEQ ID NO: 2463060 - RNA, 19 nt, Artificial Sequence
  Description of Artificial Sequence: Synthetic oligonucleotide
gaguugguccaugaccaac

SEQ ID NO: 2463061 - RNA, 19 nt, Artificial Sequence
  Description of Artificial Sequence: Synthetic oligonucleotide
ugccuagucuucucucacu

SEQ ID NO: 2463062 - RNA, 19 nt, Artificial Sequence
  Description of Artificial Sequence: Synthetic oligonucleotide
uccccugggucuucuauau

SEQ ID NO: 2463063 - RNA, 19 nt, Artificial Sequence
  Description of Artificial Sequence: Synthetic oligonucleotide
gacuuugcugagauaaaua

SEQ ID NO: 2463064 - RNA, 19 nt, Artificial Sequence
  Description of Artificial Sequence: Synthetic oligonucleotide
uggaaacgaugguggcucc

SEQ ID NO: 2463065 - RNA, 19 nt, Artificial Sequence
  Description of Artificial Sequence: Synthetic oligonucleotide
aucuagcucucccaaggua

SEQ ID NO: 2463066 - RNA, 19 nt, Artificial Sequence
  Description of Artificial Sequence: Synthetic oligonucleotide
uacuuaguugagguaguuu

SEQ ID NO: 2463067 - RNA, 19 nt, Artificial Sequence
  Description of Artificial Sequence: Synthetic oligonucleotide
uuguuucugucgacccacu

SEQ ID NO: 2463068 - RNA, 19 nt, Artificial Sequence
  Description of Artificial Sequence: Synthetic oligonucleotide
gaaugacuuugccuagucu

SEQ ID NO: 2463069 - RNA, 19 nt, Artificial Sequence
  Description of Artificial Sequence: Synthetic oligonucleotide
gauuuaugugauccacuau

SEQ ID NO: 2463070 - RNA, 19 nt, Artificial Sequence
  Description of Artificial Sequence: Synthetic oligonucleotide
gaugaaacauauggacugu

SEQ ID NO: 2463071 - RNA, 19 nt, Artificial Sequence
  Description of Artificial Sequence: Synthetic oligonucleotide
gaacuggacacaacuggaa

SEQ ID NO: 2463072 - RNA, 19 nt, Artificial Sequence
  Description of Artificial Sequence: Synthetic oligonucleotide
cugaaggaugcugccaguc

SEQ ID NO: 2463073 - RNA, 19 nt, Artificial Sequence
  Description of Artificial Sequence: Synthetic oligonucleotide
caaccugauuuaugugauc

SEQ ID NO: 2463074 - RNA, 19 nt, Artificial Sequence
  Description of Artificial Sequence: Synthetic oligonucleotide
uucugucgacccacugacu

SEQ ID NO: 2463075 - RNA, 19 nt, Artificial Sequence
  Description of Artificial Sequence: Synthetic oligonucleotide
ccucugugaaacugaaaug

SEQ ID NO: 2463076 - RNA, 19 nt, Artificial Sequence
  Description of Artificial Sequence: Synthetic oligonucleotide
uacucaugcccaccaucau

SEQ ID NO: 2463077 - RNA, 19 nt, Artificial Sequence
  Description of Artificial Sequence: Synthetic oligonucleotide
agagggcaacagugagcac

SEQ ID NO: 2463078 - RNA, 19 nt, Artificial Sequence
  Description of Artificial Sequence: Synthetic oligonucleotide
guucagagggcaacaguga

SEQ ID NO: 2463079 - RNA, 19 nt, Artificial Sequence
  Description of Artificial Sequence: Synthetic oligonucleotide
gacuguucagagggcaaca

SEQ ID NO: 2463080 - RNA, 19 nt, Artificial Sequence
  Description of Artificial Sequence: Synthetic oligonucleotide
ucugucggaaccgcgcaua

SEQ ID NO: 2463081 - RNA, 19 nt, Artificial Sequence
  Description of Artificial Sequence: Synthetic oligonucleotide
uccgcuuguuucugucgac

SEQ ID NO: 2463082 - RNA, 19 nt, Artificial Sequence
  Description of Artificial Sequence: Synthetic oligonucleotide
uuuucgcgacgaguaccag

SEQ ID NO: 2463083 - RNA, 19 nt, Artificial Sequence
  Description of Artificial Sequence: Synthetic oligonucleotide
ccaacaaggagucauccaa

SEQ ID NO: 2463084 - RNA, 19 nt, Artificial Sequence
  Description of Artificial Sequence: Synthetic oligonucleotide
accuugguuagaguccccu

SEQ ID NO: 2463085 - RNA, 19 nt, Artificial Sequence
  Description of Artificial Sequence: Synthetic oligonucleotide
aggaaugacuuugccuagu

SEQ ID NO: 2463086 - RNA, 19 nt, Artificial Sequence
  Description of Artificial Sequence: Synthetic oligonucleotide
uucugucggaaccgcgcau

SEQ ID NO: 2463087 - RNA, 19 nt, Artificial Sequence
  Description of Artificial Sequence: Synthetic oligonucleotide
ggagacgcuggaaacgaug

SEQ ID NO: 2463088 - RNA, 19 nt, Artificial Sequence
  Description of Artificial Sequence: Synthetic oligonucleotide
gucggaaccgcgcauaauu

SEQ ID NO: 2463089 - RNA, 19 nt, Artificial Sequence
  Description of Artificial Sequence: Synthetic oligonucleotide
ggcaucuagcucucccaag

SEQ ID NO: 2463090 - RNA, 19 nt, Artificial Sequence
  Description of Artificial Sequence: Synthetic oligonucleotide
cacaacuggaauucucacu

SEQ ID NO: 2463091 - RNA, 19 nt, Artificial Sequence
  Description of Artificial Sequence: Synthetic oligonucleotide
cuccauacucaugcccacc

SEQ ID NO: 2463092 - RNA, 19 nt, Artificial Sequence
  Description of Artificial Sequence: Synthetic oligonucleotide
guagagguuucugucggaa

SEQ ID NO: 2463093 - RNA, 19 nt, Artificial Sequence
  Description of Artificial Sequence: Synthetic oligonucleotide
uaccuugguuagagucccc

SEQ ID NO: 2463094 - RNA, 19 nt, Artificial Sequence
  Description of Artificial Sequence: Synthetic oligonucleotide
ucaccucaccagaauccuu

SEQ ID NO: 2463095 - RNA, 19 nt, Artificial Sequence
  Description of Artificial Sequence: Synthetic oligonucleotide
ccaugaccaacugauguac

SEQ ID NO: 2463096 - RNA, 19 nt, Artificial Sequence
  Description of Artificial Sequence: Synthetic oligonucleotide
cuccgcuuguuucugucga

SEQ ID NO: 2463097 - RNA, 19 nt, Artificial Sequence
  Description of Artificial Sequence: Synthetic oligonucleotide
gugaaacugaaauggccau

SEQ ID NO: 2463098 - RNA, 19 nt, Artificial Sequence
  Description of Artificial Sequence: Synthetic oligonucleotide
cagaauccuugucaaaagu

SEQ ID NO: 2463099 - RNA, 19 nt, Artificial Sequence
  Description of Artificial Sequence: Synthetic oligonucleotide
aaacuccaacaaggaguca

SEQ ID NO: 2463100 - RNA, 19 nt, Artificial Sequence
  Description of Artificial Sequence: Synthetic oligonucleotide
ggaaacgaugguggcuccg

SEQ ID NO: 2463101 - RNA, 19 nt, Artificial Sequence
  Description of Artificial Sequence: Synthetic oligonucleotide
cccugggucuucuauauga

SEQ ID NO: 2463102 - RNA, 19 nt, Artificial Sequence
  Description of Artificial Sequence: Synthetic oligonucleotide
cugucgacccacugacuca

SEQ ID NO: 2463103 - RNA, 19 nt, Artificial Sequence
  Description of Artificial Sequence: Synthetic oligonucleotide
gcucucccaagguaccuug

SEQ ID NO: 2463104 - RNA, 19 nt, Artificial Sequence
  Description of Artificial Sequence: Synthetic oligonucleotide
uagcucucccaagguaccu

SEQ ID NO: 2463105 - RNA, 19 nt, Artificial Sequence
  Description of Artificial Sequence: Synthetic oligonucleotide
augacuuugcugagauaaa

SEQ ID NO: 2463106 - RNA, 19 nt, Artificial Sequence
  Description of Artificial Sequence: Synthetic oligonucleotide
gggucuucuauaugagcaa

SEQ ID NO: 2463107 - RNA, 19 nt, Artificial Sequence
  Description of Artificial Sequence: Synthetic oligonucleotide
accaacugauguacuuagu

SEQ ID NO: 2463108 - RNA, 19 nt, Artificial Sequence
  Description of Artificial Sequence: Synthetic oligonucleotide
gcuuguuucugucgaccca

SEQ ID NO: 2463109 - RNA, 19 nt, Artificial Sequence
  Description of Artificial Sequence: Synthetic oligonucleotide
ccuugucaaaaguaugucu

SEQ ID NO: 2463110 - RNA, 19 nt, Artificial Sequence
  Description of Artificial Sequence: Synthetic oligonucleotide
caugaccaacugauguacu

SEQ ID NO: 2463111 - RNA, 19 nt, Artificial Sequence
  Description of Artificial Sequence: Synthetic oligonucleotide
ccuugguuagaguccccug

SEQ ID NO: 2463112 - RNA, 19 nt, Artificial Sequence
  Description of Artificial Sequence: Synthetic oligonucleotide
cuauaugagcaaugacuuu

SEQ ID NO: 2463113 - RNA, 19 nt, Artificial Sequence
  Description of Artificial Sequence: Synthetic oligonucleotide
cuggccccaagcuguacaa

SEQ ID NO: 2463114 - RNA, 19 nt, Artificial Sequence
  Description of Artificial Sequence: Synthetic oligonucleotide
ggcauugucuuuaggcaaa

SEQ ID NO: 2463115 - RNA, 19 nt, Artificial Sequence
  Description of Artificial Sequence: Synthetic oligonucleotide
gguccaugaccaacugaug

SEQ ID NO: 2463116 - RNA, 19 nt, Artificial Sequence
  Description of Artificial Sequence: Synthetic oligonucleotide
ucagggcaucuagcucucc

SEQ ID NO: 2463117 - RNA, 19 nt, Artificial Sequence
  Description of Artificial Sequence: Synthetic oligonucleotide
ugucggaaccgcgcauaau

SEQ ID NO: 2463118 - RNA, 19 nt, Artificial Sequence
  Description of Artificial Sequence: Synthetic oligonucleotide
cuguucagagggcaacagu

SEQ ID NO: 2463119 - RNA, 19 nt, Artificial Sequence
  Description of Artificial Sequence: Synthetic oligonucleotide
ccaggaguugguccaugac

SEQ ID NO: 2463120 - RNA, 19 nt, Artificial Sequence
  Description of Artificial Sequence: Synthetic oligonucleotide
gaaccgcgcauaauuucgu

SEQ ID NO: 2463121 - RNA, 19 nt, Artificial Sequence
  Description of Artificial Sequence: Synthetic oligonucleotide
caucuagcucucccaaggu

SEQ ID NO: 2463122 - RNA, 19 nt, Artificial Sequence
  Description of Artificial Sequence: Synthetic oligonucleotide
guagaacaggaaugacuuu

SEQ ID NO: 2463123 - RNA, 19 nt, Artificial Sequence
  Description of Artificial Sequence: Synthetic oligonucleotide
caccagaauccuugucaaa

SEQ ID NO: 2463124 - RNA, 19 nt, Artificial Sequence
  Description of Artificial Sequence: Synthetic oligonucleotide
ccgcuuguuucugucgacc

SEQ ID NO: 2463125 - RNA, 19 nt, Artificial Sequence
  Description of Artificial Sequence: Synthetic oligonucleotide
agcucucccaagguaccuu

SEQ ID NO: 2463126 - RNA, 19 nt, Artificial Sequence
  Description of Artificial Sequence: Synthetic oligonucleotide
caaugacuuugcugagaua

SEQ ID NO: 2463127 - RNA, 19 nt, Artificial Sequence
  Description of Artificial Sequence: Synthetic oligonucleotide
gcgacgaguaccagguaga

SEQ ID NO: 2463128 - RNA, 19 nt, Artificial Sequence
  Description of Artificial Sequence: Synthetic oligonucleotide
uggccccaagcuguacaaa

SEQ ID NO: 2463129 - RNA, 19 nt, Artificial Sequence
  Description of Artificial Sequence: Synthetic oligonucleotide
cgcgcauaauuucguguag

SEQ ID NO: 2463130 - RNA, 19 nt, Artificial Sequence
  Description of Artificial Sequence: Synthetic oligonucleotide
cugucggaaccgcgcauaa

SEQ ID NO: 2463131 - RNA, 19 nt, Artificial Sequence
  Description of Artificial Sequence: Synthetic oligonucleotide
agguagaauuugacacuuu

SEQ ID NO: 2463132 - RNA, 19 nt, Artificial Sequence
  Description of Artificial Sequence: Synthetic oligonucleotide
ccccaagcuguacaaagaa

SEQ ID NO: 2463133 - RNA, 19 nt, Artificial Sequence
  Description of Artificial Sequence: Synthetic oligonucleotide
gacgaguaccagguagaau

SEQ ID NO: 2463134 - RNA, 19 nt, Artificial Sequence
  Description of Artificial Sequence: Synthetic oligonucleotide
ucgcgacgaguaccaggua

SEQ ID NO: 2463135 - RNA, 19 nt, Artificial Sequence
  Description of Artificial Sequence: Synthetic oligonucleotide
cggaaccgcgcauaauuuc

SEQ ID NO: 2463136 - RNA, 19 nt, Artificial Sequence
  Description of Artificial Sequence: Synthetic oligonucleotide
caacagugagcacgucaua

SEQ ID NO: 2463137 - RNA, 19 nt, Artificial Sequence
  Description of Artificial Sequence: Synthetic oligonucleotide
ggguucugcauaugaacuu

SEQ ID NO: 2463138 - RNA, 19 nt, Artificial Sequence
  Description of Artificial Sequence: Synthetic oligonucleotide
cugacucagacuguaucuu

SEQ ID NO: 2463139 - RNA, 19 nt, Artificial Sequence
  Description of Artificial Sequence: Synthetic oligonucleotide
ccgcgcauaauuucgugua

SEQ ID NO: 2463140 - RNA, 19 nt, Artificial Sequence
  Description of Artificial Sequence: Synthetic oligonucleotide
gcauaugaacuugauccau

SEQ ID NO: 2463141 - RNA, 19 nt, Artificial Sequence
  Description of Artificial Sequence: Synthetic oligonucleotide
uagaguccccugggucuuc

SEQ ID NO: 2463142 - RNA, 19 nt, Artificial Sequence
  Description of Artificial Sequence: Synthetic oligonucleotide
gccccaagcuguacaaaga

SEQ ID NO: 2463143 - RNA, 19 nt, Artificial Sequence
  Description of Artificial Sequence: Synthetic oligonucleotide
gagguaccagaagacuguu

SEQ ID NO: 2463144 - RNA, 19 nt, Artificial Sequence
  Description of Artificial Sequence: Synthetic oligonucleotide
cgcauaauuucguguagua

SEQ ID NO: 2463145 - RNA, 19 nt, Artificial Sequence
  Description of Artificial Sequence: Synthetic oligonucleotide
cucccaagguaccuugguu

SEQ ID NO: 2463146 - RNA, 19 nt, Artificial Sequence
  Description of Artificial Sequence: Synthetic oligonucleotide
guacuuaguugagguaguu

SEQ ID NO: 2463147 - RNA, 19 nt, Artificial Sequence
  Description of Artificial Sequence: Synthetic oligonucleotide
gccuagucuucucucacuu

SEQ ID NO: 2463148 - RNA, 19 nt, Artificial Sequence
  Description of Artificial Sequence: Synthetic oligonucleotide
gcgcauaauuucguguagu

SEQ ID NO: 2463149 - RNA, 19 nt, Artificial Sequence
  Description of Artificial Sequence: Synthetic oligonucleotide
cuguaucuuuguagagguu

SEQ ID NO: 2463150 - RNA, 19 nt, Artificial Sequence
  Description of Artificial Sequence: Synthetic oligonucleotide
cccaagcuguacaaagaau

SEQ ID NO: 2463151 - RNA, 19 nt, Artificial Sequence
  Description of Artificial Sequence: Synthetic oligonucleotide
cccacugacucagacugua

SEQ ID NO: 2463152 - RNA, 19 nt, Artificial Sequence
  Description of Artificial Sequence: Synthetic oligonucleotide
ccccugggucuucuauaug

SEQ ID NO: 2463153 - RNA, 19 nt, Artificial Sequence
  Description of Artificial Sequence: Synthetic oligonucleotide
gucgacccacugacucaga

SEQ ID NO: 2463154 - RNA, 19 nt, Artificial Sequence
  Description of Artificial Sequence: Synthetic oligonucleotide
cugcuggccccaagcugua

SEQ ID NO: 2463155 - RNA, 19 nt, Artificial Sequence
  Description of Artificial Sequence: Synthetic oligonucleotide
cgaguaccagguagaauuu

SEQ ID NO: 2463156 - RNA, 19 nt, Artificial Sequence
  Description of Artificial Sequence: Synthetic oligonucleotide
ccauacucaugcccaccau

SEQ ID NO: 2463157 - RNA, 19 nt, Artificial Sequence
  Description of Artificial Sequence: Synthetic oligonucleotide
cgacgaguaccagguagaa

SEQ ID NO: 2463158 - RNA, 19 nt, Artificial Sequence
  Description of Artificial Sequence: Synthetic oligonucleotide
ccacugacucagacuguau

SEQ ID NO: 2463159 - RNA, 19 nt, Artificial Sequence
  Description of Artificial Sequence: Synthetic oligonucleotide
gggagacgcuggaaacgau

SEQ ID NO: 2463160 - RNA, 19 nt, Artificial Sequence
  Description of Artificial Sequence: Synthetic oligonucleotide
uuuauacaaaacaaaaugc

SEQ ID NO: 2463161 - RNA, 19 nt, Artificial Sequence
  Description of Artificial Sequence: Synthetic oligonucleotide
aauaaauuuccgaauaggg

SEQ ID NO: 2463162 - RNA, 19 nt, Artificial Sequence
  Description of Artificial Sequence: Synthetic oligonucleotide
uucauucucucuaauaagg

SEQ ID NO: 2463163 - RNA, 19 nt, Artificial Sequence
  Description of Artificial Sequence: Synthetic oligonucleotide
uauacugcugcuaauaugu

SEQ ID NO: 2463164 - RNA, 19 nt, Artificial Sequence
  Description of Artificial Sequence: Synthetic oligonucleotide
uuauacaaaacaaaaugcu

SEQ ID NO: 2463165 - RNA, 19 nt, Artificial Sequence
  Description of Artificial Sequence: Synthetic oligonucleotide
aauauguucccaaaguuuc

SEQ ID NO: 2463166 - RNA, 19 nt, Artificial Sequence
  Description of Artificial Sequence: Synthetic oligonucleotide
aaauuugacauuaacuguc

SEQ ID NO: 2463167 - RNA, 19 nt, Artificial Sequence
  Description of Artificial Sequence: Synthetic oligonucleotide
aaauaaauuuccgaauagg

SEQ ID NO: 2463168 - RNA, 19 nt, Artificial Sequence
  Description of Artificial Sequence: Synthetic oligonucleotide
ucuuuaugaaccaauuuug

SEQ ID NO: 2463169 - RNA, 19 nt, Artificial Sequence
  Description of Artificial Sequence: Synthetic oligonucleotide
ugaagauuugagaauaucu

SEQ ID NO: 2463170 - RNA, 19 nt, Artificial Sequence
  Description of Artificial Sequence: Synthetic oligonucleotide
ugauuaaauaaauuugaca

SEQ ID NO: 2463171 - RNA, 19 nt, Artificial Sequence
  Description of Artificial Sequence: Synthetic oligonucleotide
ucuauugauggugaaaagg

SEQ ID NO: 2463172 - RNA, 19 nt, Artificial Sequence
  Description of Artificial Sequence: Synthetic oligonucleotide
gauuugagaauaucuauug

SEQ ID NO: 2463173 - RNA, 19 nt, Artificial Sequence
  Description of Artificial Sequence: Synthetic oligonucleotide
uaaauuuccgaauagggau

SEQ ID NO: 2463174 - RNA, 19 nt, Artificial Sequence
  Description of Artificial Sequence: Synthetic oligonucleotide
ucuaauaaggccucaugag

SEQ ID NO: 2463175 - RNA, 19 nt, Artificial Sequence
  Description of Artificial Sequence: Synthetic oligonucleotide
aucaucuuggcauauacug

SEQ ID NO: 2463176 - RNA, 19 nt, Artificial Sequence
  Description of Artificial Sequence: Synthetic oligonucleotide
aaacuuggaguagugagcg

SEQ ID NO: 2463177 - RNA, 19 nt, Artificial Sequence
  Description of Artificial Sequence: Synthetic oligonucleotide
aaguaaagcugacuugacg

SEQ ID NO: 2463178 - RNA, 19 nt, Artificial Sequence
  Description of Artificial Sequence: Synthetic oligonucleotide
uucuuuaaucuucagugcc

SEQ ID NO: 2463179 - RNA, 19 nt, Artificial Sequence
  Description of Artificial Sequence: Synthetic oligonucleotide
aguaaagcugacuugacga

SEQ ID NO: 2463180 - RNA, 19 nt, Artificial Sequence
  Description of Artificial Sequence: Synthetic oligonucleotide
ucuuuguuagccaucaagu

SEQ ID NO: 2463181 - RNA, 19 nt, Artificial Sequence
  Description of Artificial Sequence: Synthetic oligonucleotide
uaacugauuaaauaaauuu

SEQ ID NO: 2463182 - RNA, 19 nt, Artificial Sequence
  Description of Artificial Sequence: Synthetic oligonucleotide
uuaugaaccaauuuuggau

SEQ ID NO: 2463183 - RNA, 19 nt, Artificial Sequence
  Description of Artificial Sequence: Synthetic oligonucleotide
cuaauaaggccucaugagg

SEQ ID NO: 2463184 - RNA, 19 nt, Artificial Sequence
  Description of Artificial Sequence: Synthetic oligonucleotide
ucugauuagaggcacaaau

SEQ ID NO: 2463185 - RNA, 19 nt, Artificial Sequence
  Description of Artificial Sequence: Synthetic oligonucleotide
uaauaaggccucaugagga

SEQ ID NO: 2463186 - RNA, 19 nt, Artificial Sequence
  Description of Artificial Sequence: Synthetic oligonucleotide
uucagugccugcaugacag

SEQ ID NO: 2463187 - RNA, 19 nt, Artificial Sequence
  Description of Artificial Sequence: Synthetic oligonucleotide
uucucuacgaguaucuucu

SEQ ID NO: 2463188 - RNA, 19 nt, Artificial Sequence
  Description of Artificial Sequence: Synthetic oligonucleotide
aauagggauucccaucauc

SEQ ID NO: 2463189 - RNA, 19 nt, Artificial Sequence
  Description of Artificial Sequence: Synthetic oligonucleotide
uccaaaucgacucuugaga

SEQ ID NO: 2463190 - RNA, 19 nt, Artificial Sequence
  Description of Artificial Sequence: Synthetic oligonucleotide
uuugagaauaucuauugau

SEQ ID NO: 2463191 - RNA, 19 nt, Artificial Sequence
  Description of Artificial Sequence: Synthetic oligonucleotide
aagauuugagaauaucuau

SEQ ID NO: 2463192 - RNA, 19 nt, Artificial Sequence
  Description of Artificial Sequence: Synthetic oligonucleotide
gcuauugcaguccaaaucg

SEQ ID NO: 2463193 - RNA, 19 nt, Artificial Sequence
  Description of Artificial Sequence: Synthetic oligonucleotide
ugugcuaauuuccuauucc

SEQ ID NO: 2463194 - RNA, 19 nt, Artificial Sequence
  Description of Artificial Sequence: Synthetic oligonucleotide
uuuaugaaccaauuuugga

SEQ ID NO: 2463195 - RNA, 19 nt, Artificial Sequence
  Description of Artificial Sequence: Synthetic oligonucleotide
aaaauauaccccgaugugu

SEQ ID NO: 2463196 - RNA, 19 nt, Artificial Sequence
  Description of Artificial Sequence: Synthetic oligonucleotide
agugcuaauggcuucaaga

SEQ ID NO: 2463197 - RNA, 19 nt, Artificial Sequence
  Description of Artificial Sequence: Synthetic oligonucleotide
uuuguuagccaucaaguau

SEQ ID NO: 2463198 - RNA, 19 nt, Artificial Sequence
  Description of Artificial Sequence: Synthetic oligonucleotide
uuggaagugaagcugacuc

SEQ ID NO: 2463199 - RNA, 19 nt, Artificial Sequence
  Description of Artificial Sequence: Synthetic oligonucleotide
ucaaguauaaaugucgcuc

SEQ ID NO: 2463200 - RNA, 19 nt, Artificial Sequence
  Description of Artificial Sequence: Synthetic oligonucleotide
ucuaacugauuaaauaaau

SEQ ID NO: 2463201 - RNA, 19 nt, Artificial Sequence
  Description of Artificial Sequence: Synthetic oligonucleotide
uaugaaccaauuuuggauc

SEQ ID NO: 2463202 - RNA, 19 nt, Artificial Sequence
  Description of Artificial Sequence: Synthetic oligonucleotide
ucuauuuggaagugaagcu

SEQ ID NO: 2463203 - RNA, 19 nt, Artificial Sequence
  Description of Artificial Sequence: Synthetic oligonucleotide
uaucuucucuauuuggaag

SEQ ID NO: 2463204 - RNA, 19 nt, Artificial Sequence
  Description of Artificial Sequence: Synthetic oligonucleotide
cucuauuuggaagugaagc

SEQ ID NO: 2463205 - RNA, 19 nt, Artificial Sequence
  Description of Artificial Sequence: Synthetic oligonucleotide
uugucuugcauccugucug

SEQ ID NO: 2463206 - RNA, 19 nt, Artificial Sequence
  Description of Artificial Sequence: Synthetic oligonucleotide
aucuuuguuagccaucaag

SEQ ID NO: 2463207 - RNA, 19 nt, Artificial Sequence
  Description of Artificial Sequence: Synthetic oligonucleotide
uauuuggaagugaagcuga

SEQ ID NO: 2463208 - RNA, 19 nt, Artificial Sequence
  Description of Artificial Sequence: Synthetic oligonucleotide
caaguauaaaugucgcucc

SEQ ID NO: 2463209 - RNA, 19 nt, Artificial Sequence
  Description of Artificial Sequence: Synthetic oligonucleotide
ggauccaaaauauaccccg

SEQ ID NO: 2463210 - RNA, 19 nt, Artificial Sequence
  Description of Artificial Sequence: Synthetic oligonucleotide
aaucagucaaaacaugguu

SEQ ID NO: 2463211 - RNA, 19 nt, Artificial Sequence
  Description of Artificial Sequence: Synthetic oligonucleotide
aacuguccaucuuuguuag

SEQ ID NO: 2463212 - RNA, 19 nt, Artificial Sequence
  Description of Artificial Sequence: Synthetic oligonucleotide
guauaaaugucgcuccagg

SEQ ID NO: 2463213 - RNA, 19 nt, Artificial Sequence
  Description of Artificial Sequence: Synthetic oligonucleotide
ucauucucucuaauaaggc

SEQ ID NO: 2463214 - RNA, 19 nt, Artificial Sequence
  Description of Artificial Sequence: Synthetic oligonucleotide
gaugagaugaucacugggc

SEQ ID NO: 2463215 - RNA, 19 nt, Artificial Sequence
  Description of Artificial Sequence: Synthetic oligonucleotide
ggugguaaugcauuguacg

SEQ ID NO: 2463216 - RNA, 19 nt, Artificial Sequence
  Description of Artificial Sequence: Synthetic oligonucleotide
aaugcauuguacgagccca

SEQ ID NO: 2463217 - RNA, 19 nt, Artificial Sequence
  Description of Artificial Sequence: Synthetic oligonucleotide
ugagcggucgaugagauga

SEQ ID NO: 2463218 - RNA, 19 nt, Artificial Sequence
  Description of Artificial Sequence: Synthetic oligonucleotide
agaggcacaaauaaauuuc

SEQ ID NO: 2463219 - RNA, 19 nt, Artificial Sequence
  Description of Artificial Sequence: Synthetic oligonucleotide
agaauaucuauugauggug

SEQ ID NO: 2463220 - RNA, 19 nt, Artificial Sequence
  Description of Artificial Sequence: Synthetic oligonucleotide
ugcuaauauguucccaaag

SEQ ID NO: 2463221 - RNA, 19 nt, Artificial Sequence
  Description of Artificial Sequence: Synthetic oligonucleotide
uaucuauugauggugaaaa

SEQ ID NO: 2463222 - RNA, 19 nt, Artificial Sequence
  Description of Artificial Sequence: Synthetic oligonucleotide
uaauauguucccaaaguuu

SEQ ID NO: 2463223 - RNA, 19 nt, Artificial Sequence
  Description of Artificial Sequence: Synthetic oligonucleotide
uacucagacuucuuuauga

SEQ ID NO: 2463224 - RNA, 19 nt, Artificial Sequence
  Description of Artificial Sequence: Synthetic oligonucleotide
aaaauacucuacucagacu

SEQ ID NO: 2463225 - RNA, 19 nt, Artificial Sequence
  Description of Artificial Sequence: Synthetic oligonucleotide
acugauuaaauaaauuuga

SEQ ID NO: 2463226 - RNA, 19 nt, Artificial Sequence
  Description of Artificial Sequence: Synthetic oligonucleotide
aguaaguaaagcugacuug

SEQ ID NO: 2463227 - RNA, 19 nt, Artificial Sequence
  Description of Artificial Sequence: Synthetic oligonucleotide
gaguaucuucucuauuugg

SEQ ID NO: 2463228 - RNA, 19 nt, Artificial Sequence
  Description of Artificial Sequence: Synthetic oligonucleotide
ucaucuuggcauauacugc

SEQ ID NO: 2463229 - RNA, 19 nt, Artificial Sequence
  Description of Artificial Sequence: Synthetic oligonucleotide
ugcggauccaaaauauacc

SEQ ID NO: 2463230 - RNA, 19 nt, Artificial Sequence
  Description of Artificial Sequence: Synthetic oligonucleotide
cauucucucuaauaaggcc

SEQ ID NO: 2463231 - RNA, 19 nt, Artificial Sequence
  Description of Artificial Sequence: Synthetic oligonucleotide
uccaaaauauaccccgaug

SEQ ID NO: 2463232 - RNA, 19 nt, Artificial Sequence
  Description of Artificial Sequence: Synthetic oligonucleotide
cugauuaaauaaauuugac

SEQ ID NO: 2463233 - RNA, 19 nt, Artificial Sequence
  Description of Artificial Sequence: Synthetic oligonucleotide
caucaaguauaaaugucgc

SEQ ID NO: 2463234 - RNA, 19 nt, Artificial Sequence
  Description of Artificial Sequence: Synthetic oligonucleotide
aauuuccgaauagggauuc

SEQ ID NO: 2463235 - RNA, 19 nt, Artificial Sequence
  Description of Artificial Sequence: Synthetic oligonucleotide
gagaugaucacugggcagg

SEQ ID NO: 2463236 - RNA, 19 nt, Artificial Sequence
  Description of Artificial Sequence: Synthetic oligonucleotide
acaugguucugauuagagg

SEQ ID NO: 2463237 - RNA, 19 nt, Artificial Sequence
  Description of Artificial Sequence: Synthetic oligonucleotide
uguagguagugcuaauggc

SEQ ID NO: 2463238 - RNA, 19 nt, Artificial Sequence
  Description of Artificial Sequence: Synthetic oligonucleotide
uuguuagccaucaaguaua

SEQ ID NO: 2463239 - RNA, 19 nt, Artificial Sequence
  Description of Artificial Sequence: Synthetic oligonucleotide
cacaaaaucuugcugcagc

SEQ ID NO: 2463240 - RNA, 19 nt, Artificial Sequence
  Description of Artificial Sequence: Synthetic oligonucleotide
ucuuuaaucuucagugccu

SEQ ID NO: 2463241 - RNA, 19 nt, Artificial Sequence
  Description of Artificial Sequence: Synthetic oligonucleotide
aaaucgacucuugagauuu

SEQ ID NO: 2463242 - RNA, 19 nt, Artificial Sequence
  Description of Artificial Sequence: Synthetic oligonucleotide
aauccaucuucccuugcug

SEQ ID NO: 2463243 - RNA, 19 nt, Artificial Sequence
  Description of Artificial Sequence: Synthetic oligonucleotide
uaaaugucgcuccagguuu

SEQ ID NO: 2463244 - RNA, 19 nt, Artificial Sequence
  Description of Artificial Sequence: Synthetic oligonucleotide
cagguuuugucuugcaucc

SEQ ID NO: 2463245 - RNA, 19 nt, Artificial Sequence
  Description of Artificial Sequence: Synthetic oligonucleotide
ccaucaaguauaaaugucg

SEQ ID NO: 2463246 - RNA, 19 nt, Artificial Sequence
  Description of Artificial Sequence: Synthetic oligonucleotide
auuagaggcacaaauaaau

SEQ ID NO: 2463247 - RNA, 19 nt, Artificial Sequence
  Description of Artificial Sequence: Synthetic oligonucleotide
auuguacgagcccaguaag

SEQ ID NO: 2463248 - RNA, 19 nt, Artificial Sequence
  Description of Artificial Sequence: Synthetic oligonucleotide
uccucagaucauaaugucc

SEQ ID NO: 2463249 - RNA, 19 nt, Artificial Sequence
  Description of Artificial Sequence: Synthetic oligonucleotide
uucucuauuuggaagugaa

SEQ ID NO: 2463250 - RNA, 19 nt, Artificial Sequence
  Description of Artificial Sequence: Synthetic oligonucleotide
acauuuauacaaaacaaaa

SEQ ID NO: 2463251 - RNA, 19 nt, Artificial Sequence
  Description of Artificial Sequence: Synthetic oligonucleotide
uggugaaaaggucugugcu

SEQ ID NO: 2463252 - RNA, 19 nt, Artificial Sequence
  Description of Artificial Sequence: Synthetic oligonucleotide
uauaaaugucgcuccaggu

SEQ ID NO: 2463253 - RNA, 19 nt, Artificial Sequence
  Description of Artificial Sequence: Synthetic oligonucleotide
uccacaugacccuucagga

SEQ ID NO: 2463254 - RNA, 19 nt, Artificial Sequence
  Description of Artificial Sequence: Synthetic oligonucleotide
ucucuaauaaggccucaug

SEQ ID NO: 2463255 - RNA, 19 nt, Artificial Sequence
  Description of Artificial Sequence: Synthetic oligonucleotide
uuugacauuaacuguccau

SEQ ID NO: 2463256 - RNA, 19 nt, Artificial Sequence
  Description of Artificial Sequence: Synthetic oligonucleotide
ugcuauugcaguccaaauc

SEQ ID NO: 2463257 - RNA, 19 nt, Artificial Sequence
  Description of Artificial Sequence: Synthetic oligonucleotide
ugcacaaaccugguaaucc

SEQ ID NO: 2463258 - RNA, 19 nt, Artificial Sequence
  Description of Artificial Sequence: Synthetic oligonucleotide
auauacugcugcuaauaug

SEQ ID NO: 2463259 - RNA, 19 nt, Artificial Sequence
  Description of Artificial Sequence: Synthetic oligonucleotide
uaaugcauuguacgagccc

SEQ ID NO: 2463260 - RNA, 19 nt, Artificial Sequence
  Description of Artificial Sequence: Synthetic oligonucleotide
uuaugaaaucagucaaaac

SEQ ID NO: 2463261 - RNA, 19 nt, Artificial Sequence
  Description of Artificial Sequence: Synthetic oligonucleotide
auaaauuuccgaauaggga

SEQ ID NO: 2463262 - RNA, 19 nt, Artificial Sequence
  Description of Artificial Sequence: Synthetic oligonucleotide
caaaaugcuauugcagucc

SEQ ID NO: 2463263 - RNA, 19 nt, Artificial Sequence
  Description of Artificial Sequence: Synthetic oligonucleotide
augcggauccaaaauauac

SEQ ID NO: 2463264 - RNA, 19 nt, Artificial Sequence
  Description of Artificial Sequence: Synthetic oligonucleotide
uuugcgacagcgguaugcg

SEQ ID NO: 2463265 - RNA, 19 nt, Artificial Sequence
  Description of Artificial Sequence: Synthetic oligonucleotide
uuaaucuucagugccugca

SEQ ID NO: 2463266 - RNA, 19 nt, Artificial Sequence
  Description of Artificial Sequence: Synthetic oligonucleotide
guaaguaaagcugacuuga

SEQ ID NO: 2463267 - RNA, 19 nt, Artificial Sequence
  Description of Artificial Sequence: Synthetic oligonucleotide
aauaucuauugauggugaa

SEQ ID NO: 2463268 - RNA, 19 nt, Artificial Sequence
  Description of Artificial Sequence: Synthetic oligonucleotide
aacaugguucugauuagag

SEQ ID NO: 2463269 - RNA, 19 nt, Artificial Sequence
  Description of Artificial Sequence: Synthetic oligonucleotide
aaguauaaaugucgcucca

SEQ ID NO: 2463270 - RNA, 19 nt, Artificial Sequence
  Description of Artificial Sequence: Synthetic oligonucleotide
ugcuaauggcuucaagaca

SEQ ID NO: 2463271 - RNA, 19 nt, Artificial Sequence
  Description of Artificial Sequence: Synthetic oligonucleotide
gcaaacuuggaguagugag

SEQ ID NO: 2463272 - RNA, 19 nt, Artificial Sequence
  Description of Artificial Sequence: Synthetic oligonucleotide
ucuacgaguaucuucucua

SEQ ID NO: 2463273 - RNA, 19 nt, Artificial Sequence
  Description of Artificial Sequence: Synthetic oligonucleotide
ucucuauuuggaagugaag

SEQ ID NO: 2463274 - RNA, 19 nt, Artificial Sequence
  Description of Artificial Sequence: Synthetic oligonucleotide
ugagaugaucacugggcag

SEQ ID NO: 2463275 - RNA, 19 nt, Artificial Sequence
  Description of Artificial Sequence: Synthetic oligonucleotide
auaaaugucgcuccagguu

SEQ ID NO: 2463276 - RNA, 19 nt, Artificial Sequence
  Description of Artificial Sequence: Synthetic oligonucleotide
aaagcugacuugacgaugu

SEQ ID NO: 2463277 - RNA, 19 nt, Artificial Sequence
  Description of Artificial Sequence: Synthetic oligonucleotide
accagucagccacaaaauc

SEQ ID NO: 2463278 - RNA, 19 nt, Artificial Sequence
  Description of Artificial Sequence: Synthetic oligonucleotide
uauugcaguccaaaucgac

SEQ ID NO: 2463279 - RNA, 19 nt, Artificial Sequence
  Description of Artificial Sequence: Synthetic oligonucleotide
aguagugagcggucgauga

SEQ ID NO: 2463280 - RNA, 19 nt, Artificial Sequence
  Description of Artificial Sequence: Synthetic oligonucleotide
uucaagacauucucccuca

SEQ ID NO: 2463281 - RNA, 19 nt, Artificial Sequence
  Description of Artificial Sequence: Synthetic oligonucleotide
acaaaaucuugcugcagcu

SEQ ID NO: 2463282 - RNA, 19 nt, Artificial Sequence
  Description of Artificial Sequence: Synthetic oligonucleotide
uuagaggcacaaauaaauu

SEQ ID NO: 2463283 - RNA, 19 nt, Artificial Sequence
  Description of Artificial Sequence: Synthetic oligonucleotide
agacauucucccucagaac

SEQ ID NO: 2463284 - RNA, 19 nt, Artificial Sequence
  Description of Artificial Sequence: Synthetic oligonucleotide
ugguaaugcauuguacgag

SEQ ID NO: 2463285 - RNA, 19 nt, Artificial Sequence
  Description of Artificial Sequence: Synthetic oligonucleotide
agcugcacaaaccugguaa

SEQ ID NO: 2463286 - RNA, 19 nt, Artificial Sequence
  Description of Artificial Sequence: Synthetic oligonucleotide
ugucgcuccagguuugaag

SEQ ID NO: 2463287 - RNA, 19 nt, Artificial Sequence
  Description of Artificial Sequence: Synthetic oligonucleotide
auucucucuaauaaggccu

SEQ ID NO: 2463288 - RNA, 19 nt, Artificial Sequence
  Description of Artificial Sequence: Synthetic oligonucleotide
ucuacucagacuucuuuau

SEQ ID NO: 2463289 - RNA, 19 nt, Artificial Sequence
  Description of Artificial Sequence: Synthetic oligonucleotide
aaauauaccccgauguguu

SEQ ID NO: 2463290 - RNA, 19 nt, Artificial Sequence
  Description of Artificial Sequence: Synthetic oligonucleotide
ugcgacagcgguaugcgga

SEQ ID NO: 2463291 - RNA, 19 nt, Artificial Sequence
  Description of Artificial Sequence: Synthetic oligonucleotide
gaagauuugagaauaucua

SEQ ID NO: 2463292 - RNA, 19 nt, Artificial Sequence
  Description of Artificial Sequence: Synthetic oligonucleotide
gguaaugcauuguacgagc

SEQ ID NO: 2463293 - RNA, 19 nt, Artificial Sequence
  Description of Artificial Sequence: Synthetic oligonucleotide
augagaugaucacugggca

SEQ ID NO: 2463294 - RNA, 19 nt, Artificial Sequence
  Description of Artificial Sequence: Synthetic oligonucleotide
acauuaacuguccaucuuu

SEQ ID NO: 2463295 - RNA, 19 nt, Artificial Sequence
  Description of Artificial Sequence: Synthetic oligonucleotide
ucgaugagaugaucacugg

SEQ ID NO: 2463296 - RNA, 19 nt, Artificial Sequence
  Description of Artificial Sequence: Synthetic oligonucleotide
acgaguaucuucucuauuu

SEQ ID NO: 2463297 - RNA, 19 nt, Artificial Sequence
  Description of Artificial Sequence: Synthetic oligonucleotide
auagggauucccaucaucu

SEQ ID NO: 2463298 - RNA, 19 nt, Artificial Sequence
  Description of Artificial Sequence: Synthetic oligonucleotide
cucuaauaaggccucauga

SEQ ID NO: 2463299 - RNA, 19 nt, Artificial Sequence
  Description of Artificial Sequence: Synthetic oligonucleotide
guccaaaucgacucuugag

SEQ ID NO: 2463300 - RNA, 19 nt, Artificial Sequence
  Description of Artificial Sequence: Synthetic oligonucleotide
aucuauugauggugaaaag

SEQ ID NO: 2463301 - RNA, 19 nt, Artificial Sequence
  Description of Artificial Sequence: Synthetic oligonucleotide
cuucaagacauucucccuc

SEQ ID NO: 2463302 - RNA, 19 nt, Artificial Sequence
  Description of Artificial Sequence: Synthetic oligonucleotide
uaaggccucaugaggaggu

SEQ ID NO: 2463303 - RNA, 19 nt, Artificial Sequence
  Description of Artificial Sequence: Synthetic oligonucleotide
aucaaguauaaaugucgcu

SEQ ID NO: 2463304 - RNA, 19 nt, Artificial Sequence
  Description of Artificial Sequence: Synthetic oligonucleotide
uaaguaaagcugacuugac

SEQ ID NO: 2463305 - RNA, 19 nt, Artificial Sequence
  Description of Artificial Sequence: Synthetic oligonucleotide
uggcauauacugcugcuaa

SEQ ID NO: 2463306 - RNA, 19 nt, Artificial Sequence
  Description of Artificial Sequence: Synthetic oligonucleotide
uuccgaauagggauuccca

SEQ ID NO: 2463307 - RNA, 19 nt, Artificial Sequence
  Description of Artificial Sequence: Synthetic oligonucleotide
uacgagcccaguaaguaaa

SEQ ID NO: 2463308 - RNA, 19 nt, Artificial Sequence
  Description of Artificial Sequence: Synthetic oligonucleotide
uuuccgaauagggauuccc

SEQ ID NO: 2463309 - RNA, 19 nt, Artificial Sequence
  Description of Artificial Sequence: Synthetic oligonucleotide
gauguguuguagguagugc

SEQ ID NO: 2463310 - RNA, 19 nt, Artificial Sequence
  Description of Artificial Sequence: Synthetic oligonucleotide
uaaagcugacuugacgaug

SEQ ID NO: 2463311 - RNA, 19 nt, Artificial Sequence
  Description of Artificial Sequence: Synthetic oligonucleotide
aacuuggaguagugagcgg

SEQ ID NO: 2463312 - RNA, 19 nt, Artificial Sequence
  Description of Artificial Sequence: Synthetic oligonucleotide
aguauaaaugucgcuccag

SEQ ID NO: 2463313 - RNA, 19 nt, Artificial Sequence
  Description of Artificial Sequence: Synthetic oligonucleotide
gacagcgguaugcggaucc

SEQ ID NO: 2463314 - RNA, 19 nt, Artificial Sequence
  Description of Artificial Sequence: Synthetic oligonucleotide
gaauaucuauugaugguga

SEQ ID NO: 2463315 - RNA, 19 nt, Artificial Sequence
  Description of Artificial Sequence: Synthetic oligonucleotide
gaucauaauguccaguuuu

SEQ ID NO: 2463316 - RNA, 19 nt, Artificial Sequence
  Description of Artificial Sequence: Synthetic oligonucleotide
uucccuugcugcuucauuc

SEQ ID NO: 2463317 - RNA, 19 nt, Artificial Sequence
  Description of Artificial Sequence: Synthetic oligonucleotide
ugguaauccaucuucccuu

SEQ ID NO: 2463318 - RNA, 19 nt, Artificial Sequence
  Description of Artificial Sequence: Synthetic oligonucleotide
agucaaaacaugguucuga

SEQ ID NO: 2463319 - RNA, 19 nt, Artificial Sequence
  Description of Artificial Sequence: Synthetic oligonucleotide
gucugcaaccaccuuugcg

SEQ ID NO: 2463320 - RNA, 19 nt, Artificial Sequence
  Description of Artificial Sequence: Synthetic oligonucleotide
uguguuguagguagugcua

SEQ ID NO: 2463321 - RNA, 19 nt, Artificial Sequence
  Description of Artificial Sequence: Synthetic oligonucleotide
aaccaccuuugcgacagcg

SEQ ID NO: 2463322 - RNA, 19 nt, Artificial Sequence
  Description of Artificial Sequence: Synthetic oligonucleotide
gcggauccaaaauauaccc

SEQ ID NO: 2463323 - RNA, 19 nt, Artificial Sequence
  Description of Artificial Sequence: Synthetic oligonucleotide
ucucccucagaacaccagu

SEQ ID NO: 2463324 - RNA, 19 nt, Artificial Sequence
  Description of Artificial Sequence: Synthetic oligonucleotide
aaacaugguucugauuaga

SEQ ID NO: 2463325 - RNA, 19 nt, Artificial Sequence
  Description of Artificial Sequence: Synthetic oligonucleotide
uucucucuaauaaggccuc

SEQ ID NO: 2463326 - RNA, 19 nt, Artificial Sequence
  Description of Artificial Sequence: Synthetic oligonucleotide
cucagacuucuuuaugaac

SEQ ID NO: 2463327 - RNA, 19 nt, Artificial Sequence
  Description of Artificial Sequence: Synthetic oligonucleotide
uggcuucaagacauucucc

SEQ ID NO: 2463328 - RNA, 19 nt, Artificial Sequence
  Description of Artificial Sequence: Synthetic oligonucleotide
ucccucagaacaccaguca

SEQ ID NO: 2463329 - RNA, 19 nt, Artificial Sequence
  Description of Artificial Sequence: Synthetic oligonucleotide
uggaagugaagcugacucu

SEQ ID NO: 2463330 - RNA, 19 nt, Artificial Sequence
  Description of Artificial Sequence: Synthetic oligonucleotide
cuuuaaucuucagugccug

SEQ ID NO: 2463331 - RNA, 19 nt, Artificial Sequence
  Description of Artificial Sequence: Synthetic oligonucleotide
gagaauaucuauugauggu

SEQ ID NO: 2463332 - RNA, 19 nt, Artificial Sequence
  Description of Artificial Sequence: Synthetic oligonucleotide
uuggaguagugagcggucg

SEQ ID NO: 2463333 - RNA, 19 nt, Artificial Sequence
  Description of Artificial Sequence: Synthetic oligonucleotide
ugacccuucaggacacuga

SEQ ID NO: 2463334 - RNA, 19 nt, Artificial Sequence
  Description of Artificial Sequence: Synthetic oligonucleotide
gugguaaugcauuguacga

SEQ ID NO: 2463335 - RNA, 19 nt, Artificial Sequence
  Description of Artificial Sequence: Synthetic oligonucleotide
ugaggaggugguaaugcau

SEQ ID NO: 2463336 - RNA, 19 nt, Artificial Sequence
  Description of Artificial Sequence: Synthetic oligonucleotide
cuuugcgacagcgguaugc

SEQ ID NO: 2463337 - RNA, 19 nt, Artificial Sequence
  Description of Artificial Sequence: Synthetic oligonucleotide
uugaagauuugagaauauc

SEQ ID NO: 2463338 - RNA, 19 nt, Artificial Sequence
  Description of Artificial Sequence: Synthetic oligonucleotide
augaucacugggcagguuu

SEQ ID NO: 2463339 - RNA, 19 nt, Artificial Sequence
  Description of Artificial Sequence: Synthetic oligonucleotide
uguacgagcccaguaagua

SEQ ID NO: 2463340 - RNA, 19 nt, Artificial Sequence
  Description of Artificial Sequence: Synthetic oligonucleotide
accaauuuuggaucaguuu

SEQ ID NO: 2463341 - RNA, 19 nt, Artificial Sequence
  Description of Artificial Sequence: Synthetic oligonucleotide
uucaggacacugacaucag

SEQ ID NO: 2463342 - RNA, 19 nt, Artificial Sequence
  Description of Artificial Sequence: Synthetic oligonucleotide
acuugacgaugucugguug

SEQ ID NO: 2463343 - RNA, 19 nt, Artificial Sequence
  Description of Artificial Sequence: Synthetic oligonucleotide
gugaagcugacucucuaac

SEQ ID NO: 2463344 - RNA, 19 nt, Artificial Sequence
  Description of Artificial Sequence: Synthetic oligonucleotide
ggcacaaauaaauuuccga

SEQ ID NO: 2463345 - RNA, 19 nt, Artificial Sequence
  Description of Artificial Sequence: Synthetic oligonucleotide
aguccaaaucgacucuuga

SEQ ID NO: 2463346 - RNA, 19 nt, Artificial Sequence
  Description of Artificial Sequence: Synthetic oligonucleotide
uaugcggauccaaaauaua

SEQ ID NO: 2463347 - RNA, 19 nt, Artificial Sequence
  Description of Artificial Sequence: Synthetic oligonucleotide
gcacaaauaaauuuccgaa

SEQ ID NO: 2463348 - RNA, 19 nt, Artificial Sequence
  Description of Artificial Sequence: Synthetic oligonucleotide
auugcaguccaaaucgacu

SEQ ID NO: 2463349 - RNA, 19 nt, Artificial Sequence
  Description of Artificial Sequence: Synthetic oligonucleotide
cucuaacugauuaaauaaa

SEQ ID NO: 2463350 - RNA, 19 nt, Artificial Sequence
  Description of Artificial Sequence: Synthetic oligonucleotide
aaauuuccgaauagggauu

SEQ ID NO: 2463351 - RNA, 19 nt, Artificial Sequence
  Description of Artificial Sequence: Synthetic oligonucleotide
ccagguuugaagauuugag

SEQ ID NO: 2463352 - RNA, 19 nt, Artificial Sequence
  Description of Artificial Sequence: Synthetic oligonucleotide
ucagaucauaauguccagu

SEQ ID NO: 2463353 - RNA, 19 nt, Artificial Sequence
  Description of Artificial Sequence: Synthetic oligonucleotide
agcccaguaaguaaagcug

SEQ ID NO: 2463354 - RNA, 19 nt, Artificial Sequence
  Description of Artificial Sequence: Synthetic oligonucleotide
gcuucauucucucuaauaa

SEQ ID NO: 2463355 - RNA, 19 nt, Artificial Sequence
  Description of Artificial Sequence: Synthetic oligonucleotide
uuguacgagcccaguaagu

SEQ ID NO: 2463356 - RNA, 19 nt, Artificial Sequence
  Description of Artificial Sequence: Synthetic oligonucleotide
uuccucagaucauaauguc

SEQ ID NO: 2463357 - RNA, 19 nt, Artificial Sequence
  Description of Artificial Sequence: Synthetic oligonucleotide
guuguagguagugcuaaug

SEQ ID NO: 2463358 - RNA, 19 nt, Artificial Sequence
  Description of Artificial Sequence: Synthetic oligonucleotide
uugacgaugucugguugag

SEQ ID NO: 2463359 - RNA, 19 nt, Artificial Sequence
  Description of Artificial Sequence: Synthetic oligonucleotide
agguagugcuaauggcuuc

SEQ ID NO: 2463360 - RNA, 19 nt, Artificial Sequence
  Description of Artificial Sequence: Synthetic oligonucleotide
agauuugagaauaucuauu

SEQ ID NO: 2463361 - RNA, 19 nt, Artificial Sequence
  Description of Artificial Sequence: Synthetic oligonucleotide
ugcaguccaaaucgacucu

SEQ ID NO: 2463362 - RNA, 19 nt, Artificial Sequence
  Description of Artificial Sequence: Synthetic oligonucleotide
uagugcuaauggcuucaag

SEQ ID NO: 2463363 - RNA, 19 nt, Artificial Sequence
  Description of Artificial Sequence: Synthetic oligonucleotide
uccgaauagggauucccau

SEQ ID NO: 2463364 - RNA, 19 nt, Artificial Sequence
  Description of Artificial Sequence: Synthetic oligonucleotide
acauaaacauuuauacaaa

SEQ ID NO: 2463365 - RNA, 19 nt, Artificial Sequence
  Description of Artificial Sequence: Synthetic oligonucleotide
gauuagaggcacaaauaaa

SEQ ID NO: 2463366 - RNA, 19 nt, Artificial Sequence
  Description of Artificial Sequence: Synthetic oligonucleotide
ugaaccaauuuuggaucag

SEQ ID NO: 2463367 - RNA, 19 nt, Artificial Sequence
  Description of Artificial Sequence: Synthetic oligonucleotide
auaucuauugauggugaaa

SEQ ID NO: 2463368 - RNA, 19 nt, Artificial Sequence
  Description of Artificial Sequence: Synthetic oligonucleotide
cauuguacgagcccaguaa

SEQ ID NO: 2463369 - RNA, 19 nt, Artificial Sequence
  Description of Artificial Sequence: Synthetic oligonucleotide
guaaugcauuguacgagcc

SEQ ID NO: 2463370 - RNA, 19 nt, Artificial Sequence
  Description of Artificial Sequence: Synthetic oligonucleotide
ugacucucuaacugauuaa

SEQ ID NO: 2463371 - RNA, 19 nt, Artificial Sequence
  Description of Artificial Sequence: Synthetic oligonucleotide
aggugguaaugcauuguac

SEQ ID NO: 2463372 - RNA, 19 nt, Artificial Sequence
  Description of Artificial Sequence: Synthetic oligonucleotide
ugcaaacuuggaguaguga

SEQ ID NO: 2463373 - RNA, 19 nt, Artificial Sequence
  Description of Artificial Sequence: Synthetic oligonucleotide
aggcacaaauaaauuuccg

SEQ ID NO: 2463374 - RNA, 19 nt, Artificial Sequence
  Description of Artificial Sequence: Synthetic oligonucleotide
ugacuugacgaugucuggu

SEQ ID NO: 2463375 - RNA, 19 nt, Artificial Sequence
  Description of Artificial Sequence: Synthetic oligonucleotide
aagcugacuugacgauguc

SEQ ID NO: 2463376 - RNA, 19 nt, Artificial Sequence
  Description of Artificial Sequence: Synthetic oligonucleotide
auuuccgaauagggauucc

SEQ ID NO: 2463377 - RNA, 19 nt, Artificial Sequence
  Description of Artificial Sequence: Synthetic oligonucleotide
guagugagcggucgaugag

SEQ ID NO: 2463378 - RNA, 19 nt, Artificial Sequence
  Description of Artificial Sequence: Synthetic oligonucleotide
gggauucccaucaucuugg

SEQ ID NO: 2463379 - RNA, 19 nt, Artificial Sequence
  Description of Artificial Sequence: Synthetic oligonucleotide
auuuggaagugaagcugac

SEQ ID NO: 2463380 - RNA, 19 nt, Artificial Sequence
  Description of Artificial Sequence: Synthetic oligonucleotide
ucuugcauccugucugcaa

SEQ ID NO: 2463381 - RNA, 19 nt, Artificial Sequence
  Description of Artificial Sequence: Synthetic oligonucleotide
cugauuagaggcacaaaua

SEQ ID NO: 2463382 - RNA, 19 nt, Artificial Sequence
  Description of Artificial Sequence: Synthetic oligonucleotide
gacucucuaacugauuaaa

SEQ ID NO: 2463383 - RNA, 19 nt, Artificial Sequence
  Description of Artificial Sequence: Synthetic oligonucleotide
uggaguagugagcggucga

SEQ ID NO: 2463384 - RNA, 19 nt, Artificial Sequence
  Description of Artificial Sequence: Synthetic oligonucleotide
uaauggcuucaagacauuc

SEQ ID NO: 2463385 - RNA, 19 nt, Artificial Sequence
  Description of Artificial Sequence: Synthetic oligonucleotide
agaucauaauguccaguuu

SEQ ID NO: 2463386 - RNA, 19 nt, Artificial Sequence
  Description of Artificial Sequence: Synthetic oligonucleotide
ucaugaggaggugguaaug

SEQ ID NO: 2463387 - RNA, 19 nt, Artificial Sequence
  Description of Artificial Sequence: Synthetic oligonucleotide
cuuuguuagccaucaagua

SEQ ID NO: 2463388 - RNA, 19 nt, Artificial Sequence
  Description of Artificial Sequence: Synthetic oligonucleotide
ggacacugacaucagcugc

SEQ ID NO: 2463389 - RNA, 19 nt, Artificial Sequence
  Description of Artificial Sequence: Synthetic oligonucleotide
auacucuacucagacuucu

SEQ ID NO: 2463390 - RNA, 19 nt, Artificial Sequence
  Description of Artificial Sequence: Synthetic oligonucleotide
cugacucucuaacugauua

SEQ ID NO: 2463391 - RNA, 19 nt, Artificial Sequence
  Description of Artificial Sequence: Synthetic oligonucleotide
ucugugcuaauuuccuauu

SEQ ID NO: 2463392 - RNA, 19 nt, Artificial Sequence
  Description of Artificial Sequence: Synthetic oligonucleotide
ucaaaacaugguucugauu

SEQ ID NO: 2463393 - RNA, 19 nt, Artificial Sequence
  Description of Artificial Sequence: Synthetic oligonucleotide
aaaugucgcuccagguuug

SEQ ID NO: 2463394 - RNA, 19 nt, Artificial Sequence
  Description of Artificial Sequence: Synthetic oligonucleotide
aaccaauuuuggaucaguu

SEQ ID NO: 2463395 - RNA, 19 nt, Artificial Sequence
  Description of Artificial Sequence: Synthetic oligonucleotide
cugugcuaauuuccuauuc

SEQ ID NO: 2463396 - RNA, 19 nt, Artificial Sequence
  Description of Artificial Sequence: Synthetic oligonucleotide
gaggugguaaugcauugua

SEQ ID NO: 2463397 - RNA, 19 nt, Artificial Sequence
  Description of Artificial Sequence: Synthetic oligonucleotide
ugucugguugaguucuuua

SEQ ID NO: 2463398 - RNA, 19 nt, Artificial Sequence
  Description of Artificial Sequence: Synthetic oligonucleotide
cuugacgaugucugguuga

SEQ ID NO: 2463399 - RNA, 19 nt, Artificial Sequence
  Description of Artificial Sequence: Synthetic oligonucleotide
ugguucugauuagaggcac

SEQ ID NO: 2463400 - RNA, 19 nt, Artificial Sequence
  Description of Artificial Sequence: Synthetic oligonucleotide
gguaauccaucuucccuug

SEQ ID NO: 2463401 - RNA, 19 nt, Artificial Sequence
  Description of Artificial Sequence: Synthetic oligonucleotide
gugaaaaggucugugcuaa

SEQ ID NO: 2463402 - RNA, 19 nt, Artificial Sequence
  Description of Artificial Sequence: Synthetic oligonucleotide
gauucccaucaucuuggca

SEQ ID NO: 2463403 - RNA, 19 nt, Artificial Sequence
  Description of Artificial Sequence: Synthetic oligonucleotide
ugaucacugggcagguuuu

SEQ ID NO: 2463404 - RNA, 19 nt, Artificial Sequence
  Description of Artificial Sequence: Synthetic oligonucleotide
guagguagugcuaauggcu

SEQ ID NO: 2463405 - RNA, 19 nt, Artificial Sequence
  Description of Artificial Sequence: Synthetic oligonucleotide
gauccaaaauauaccccga

SEQ ID NO: 2463406 - RNA, 19 nt, Artificial Sequence
  Description of Artificial Sequence: Synthetic oligonucleotide
ucccuugcugcuucauucu

SEQ ID NO: 2463407 - RNA, 19 nt, Artificial Sequence
  Description of Artificial Sequence: Synthetic oligonucleotide
accccgauguguuguaggu

SEQ ID NO: 2463408 - RNA, 19 nt, Artificial Sequence
  Description of Artificial Sequence: Synthetic oligonucleotide
uugcgacagcgguaugcgg

SEQ ID NO: 2463409 - RNA, 19 nt, Artificial Sequence
  Description of Artificial Sequence: Synthetic oligonucleotide
uccuauuccucagaucaua

SEQ ID NO: 2463410 - RNA, 19 nt, Artificial Sequence
  Description of Artificial Sequence: Synthetic oligonucleotide
uacgaguaucuucucuauu

SEQ ID NO: 2463411 - RNA, 19 nt, Artificial Sequence
  Description of Artificial Sequence: Synthetic oligonucleotide
gcaaccaccuuugcgacag

SEQ ID NO: 2463412 - RNA, 19 nt, Artificial Sequence
  Description of Artificial Sequence: Synthetic oligonucleotide
cucccucagaacaccaguc

SEQ ID NO: 2463413 - RNA, 19 nt, Artificial Sequence
  Description of Artificial Sequence: Synthetic oligonucleotide
augcuauugcaguccaaau

SEQ ID NO: 2463414 - RNA, 19 nt, Artificial Sequence
  Description of Artificial Sequence: Synthetic oligonucleotide
acacugacaucagcugcac

SEQ ID NO: 2463415 - RNA, 19 nt, Artificial Sequence
  Description of Artificial Sequence: Synthetic oligonucleotide
uguuguagguagugcuaau

SEQ ID NO: 2463416 - RNA, 19 nt, Artificial Sequence
  Description of Artificial Sequence: Synthetic oligonucleotide
cugcaaccaccuuugcgac

SEQ ID NO: 2463417 - RNA, 19 nt, Artificial Sequence
  Description of Artificial Sequence: Synthetic oligonucleotide
ucgacucuugagauuuauu

SEQ ID NO: 2463418 - RNA, 19 nt, Artificial Sequence
  Description of Artificial Sequence: Synthetic oligonucleotide
cucuacucagacuucuuua

SEQ ID NO: 2463419 - RNA, 19 nt, Artificial Sequence
  Description of Artificial Sequence: Synthetic oligonucleotide
caggacacugacaucagcu

SEQ ID NO: 2463420 - RNA, 19 nt, Artificial Sequence
  Description of Artificial Sequence: Synthetic oligonucleotide
cugcaugacagcaggugca

SEQ ID NO: 2463421 - RNA, 19 nt, Artificial Sequence
  Description of Artificial Sequence: Synthetic oligonucleotide
gcugcuaauauguucccaa

SEQ ID NO: 2463422 - RNA, 19 nt, Artificial Sequence
  Description of Artificial Sequence: Synthetic oligonucleotide
gguaugcggauccaaaaua

SEQ ID NO: 2463423 - RNA, 19 nt, Artificial Sequence
  Description of Artificial Sequence: Synthetic oligonucleotide
ugcugcuaauauguuccca

SEQ ID NO: 2463424 - RNA, 19 nt, Artificial Sequence
  Description of Artificial Sequence: Synthetic oligonucleotide
cuauugcaguccaaaucga

SEQ ID NO: 2463425 - RNA, 19 nt, Artificial Sequence
  Description of Artificial Sequence: Synthetic oligonucleotide
ugucugcaaccaccuuugc

SEQ ID NO: 2463426 - RNA, 19 nt, Artificial Sequence
  Description of Artificial Sequence: Synthetic oligonucleotide
gaguagugagcggucgaug

SEQ ID NO: 2463427 - RNA, 19 nt, Artificial Sequence
  Description of Artificial Sequence: Synthetic oligonucleotide
agcuucucuacgaguaucu

SEQ ID NO: 2463428 - RNA, 19 nt, Artificial Sequence
  Description of Artificial Sequence: Synthetic oligonucleotide
caguccaaaucgacucuug

SEQ ID NO: 2463429 - RNA, 19 nt, Artificial Sequence
  Description of Artificial Sequence: Synthetic oligonucleotide
cagaugcacacauaaacau

SEQ ID NO: 2463430 - RNA, 19 nt, Artificial Sequence
  Description of Artificial Sequence: Synthetic oligonucleotide
uucccaucaucuuggcaua

SEQ ID NO: 2463431 - RNA, 19 nt, Artificial Sequence
  Description of Artificial Sequence: Synthetic oligonucleotide
accuuugcgacagcgguau

SEQ ID NO: 2463432 - RNA, 19 nt, Artificial Sequence
  Description of Artificial Sequence: Synthetic oligonucleotide
accaccuuugcgacagcgg

SEQ ID NO: 2463433 - RNA, 19 nt, Artificial Sequence
  Description of Artificial Sequence: Synthetic oligonucleotide
ggaagugaagcugacucuc

SEQ ID NO: 2463434 - RNA, 19 nt, Artificial Sequence
  Description of Artificial Sequence: Synthetic oligonucleotide
aacaccagucagccacaaa

SEQ ID NO: 2463435 - RNA, 19 nt, Artificial Sequence
  Description of Artificial Sequence: Synthetic oligonucleotide
ugcaaccaccuuugcgaca

SEQ ID NO: 2463436 - RNA, 19 nt, Artificial Sequence
  Description of Artificial Sequence: Synthetic oligonucleotide
aaugucgcuccagguuuga

SEQ ID NO: 2463437 - RNA, 19 nt, Artificial Sequence
  Description of Artificial Sequence: Synthetic oligonucleotide
agcugacuugacgaugucu

SEQ ID NO: 2463438 - RNA, 19 nt, Artificial Sequence
  Description of Artificial Sequence: Synthetic oligonucleotide
guacgagcccaguaaguaa

SEQ ID NO: 2463439 - RNA, 19 nt, Artificial Sequence
  Description of Artificial Sequence: Synthetic oligonucleotide
ugcaugacagcaggugcaa

SEQ ID NO: 2463440 - RNA, 19 nt, Artificial Sequence
  Description of Artificial Sequence: Synthetic oligonucleotide
ugaaaaggucugugcuaau

SEQ ID NO: 2463441 - RNA, 19 nt, Artificial Sequence
  Description of Artificial Sequence: Synthetic oligonucleotide
uacucuacucagacuucuu

SEQ ID NO: 2463442 - RNA, 19 nt, Artificial Sequence
  Description of Artificial Sequence: Synthetic oligonucleotide
ugcauuguacgagcccagu

SEQ ID NO: 2463443 - RNA, 19 nt, Artificial Sequence
  Description of Artificial Sequence: Synthetic oligonucleotide
ggugaaaaggucugugcua

SEQ ID NO: 2463444 - RNA, 19 nt, Artificial Sequence
  Description of Artificial Sequence: Synthetic oligonucleotide
gucaaaacaugguucugau

SEQ ID NO: 2463445 - RNA, 19 nt, Artificial Sequence
  Description of Artificial Sequence: Synthetic oligonucleotide
uucugauuagaggcacaaa

SEQ ID NO: 2463446 - RNA, 19 nt, Artificial Sequence
  Description of Artificial Sequence: Synthetic oligonucleotide
augacccuucaggacacug

SEQ ID NO: 2463447 - RNA, 19 nt, Artificial Sequence
  Description of Artificial Sequence: Synthetic oligonucleotide
cugguaauccaucuucccu

SEQ ID NO: 2463448 - RNA, 19 nt, Artificial Sequence
  Description of Artificial Sequence: Synthetic oligonucleotide
aggugcaaacuuggaguag

SEQ ID NO: 2463449 - RNA, 19 nt, Artificial Sequence
  Description of Artificial Sequence: Synthetic oligonucleotide
ucucucuaauaaggccuca

SEQ ID NO: 2463450 - RNA, 19 nt, Artificial Sequence
  Description of Artificial Sequence: Synthetic oligonucleotide
cuucagugccugcaugaca

SEQ ID NO: 2463451 - RNA, 19 nt, Artificial Sequence
  Description of Artificial Sequence: Synthetic oligonucleotide
gacuucuuuaugaaccaau

SEQ ID NO: 2463452 - RNA, 19 nt, Artificial Sequence
  Description of Artificial Sequence: Synthetic oligonucleotide
cauauacugcugcuaauau

SEQ ID NO: 2463453 - RNA, 19 nt, Artificial Sequence
  Description of Artificial Sequence: Synthetic oligonucleotide
guaaagcugacuugacgau

SEQ ID NO: 2463454 - RNA, 19 nt, Artificial Sequence
  Description of Artificial Sequence: Synthetic oligonucleotide
aaggccucaugaggaggug

SEQ ID NO: 2463455 - RNA, 19 nt, Artificial Sequence
  Description of Artificial Sequence: Synthetic oligonucleotide
gaaccaauuuuggaucagu

SEQ ID NO: 2463456 - RNA, 19 nt, Artificial Sequence
  Description of Artificial Sequence: Synthetic oligonucleotide
gguuugaagauuugagaau

SEQ ID NO: 2463457 - RNA, 19 nt, Artificial Sequence
  Description of Artificial Sequence: Synthetic oligonucleotide
caggugcaaacuuggagua

SEQ ID NO: 2463458 - RNA, 19 nt, Artificial Sequence
  Description of Artificial Sequence: Synthetic oligonucleotide
guguuguagguagugcuaa

SEQ ID NO: 2463459 - RNA, 19 nt, Artificial Sequence
  Description of Artificial Sequence: Synthetic oligonucleotide
agaugaucacugggcaggu

SEQ ID NO: 2463460 - RNA, 19 nt, Artificial Sequence
  Description of Artificial Sequence: Synthetic oligonucleotide
gaaaaggucugugcuaauu

SEQ ID NO: 2463461 - RNA, 19 nt, Artificial Sequence
  Description of Artificial Sequence: Synthetic oligonucleotide
aucgacucuugagauuuau

SEQ ID NO: 2463462 - RNA, 19 nt, Artificial Sequence
  Description of Artificial Sequence: Synthetic oligonucleotide
guaugcggauccaaaauau

SEQ ID NO: 2463463 - RNA, 19 nt, Artificial Sequence
  Description of Artificial Sequence: Synthetic oligonucleotide
aaaugcuauugcaguccaa

SEQ ID NO: 2463464 - RNA, 19 nt, Artificial Sequence
  Description of Artificial Sequence: Synthetic oligonucleotide
aucuuggcauauacugcug

SEQ ID NO: 2463465 - RNA, 19 nt, Artificial Sequence
  Description of Artificial Sequence: Synthetic oligonucleotide
cugcacaaaccugguaauc

SEQ ID NO: 2463466 - RNA, 19 nt, Artificial Sequence
  Description of Artificial Sequence: Synthetic oligonucleotide
cgaauagggauucccauca

SEQ ID NO: 2463467 - RNA, 19 nt, Artificial Sequence
  Description of Artificial Sequence: Synthetic oligonucleotide
ccgaauagggauucccauc

SEQ ID NO: 2463468 - RNA, 19 nt, Artificial Sequence
  Description of Artificial Sequence: Synthetic oligonucleotide
gacuugacgaugucugguu

SEQ ID NO: 2463469 - RNA, 19 nt, Artificial Sequence
  Description of Artificial Sequence: Synthetic oligonucleotide
agugagcggucgaugagau

SEQ ID NO: 2463470 - RNA, 19 nt, Artificial Sequence
  Description of Artificial Sequence: Synthetic oligonucleotide
gguagugcuaauggcuuca

SEQ ID NO: 2463471 - RNA, 19 nt, Artificial Sequence
  Description of Artificial Sequence: Synthetic oligonucleotide
ccagucagccacaaaaucu

SEQ ID NO: 2463472 - RNA, 19 nt, Artificial Sequence
  Description of Artificial Sequence: Synthetic oligonucleotide
ucgcuccagguuugaagau

SEQ ID NO: 2463473 - RNA, 19 nt, Artificial Sequence
  Description of Artificial Sequence: Synthetic oligonucleotide
gcauauacugcugcuaaua

SEQ ID NO: 2463474 - RNA, 19 nt, Artificial Sequence
  Description of Artificial Sequence: Synthetic oligonucleotide
gaagugaagcugacucucu

SEQ ID NO: 2463475 - RNA, 19 nt, Artificial Sequence
  Description of Artificial Sequence: Synthetic oligonucleotide
agcgguaugcggauccaaa

SEQ ID NO: 2463476 - RNA, 19 nt, Artificial Sequence
  Description of Artificial Sequence: Synthetic oligonucleotide
ggauucccaucaucuuggc

SEQ ID NO: 2463477 - RNA, 19 nt, Artificial Sequence
  Description of Artificial Sequence: Synthetic oligonucleotide
cucuacgaguaucuucucu

SEQ ID NO: 2463478 - RNA, 19 nt, Artificial Sequence
  Description of Artificial Sequence: Synthetic oligonucleotide
ggugcaaacuuggaguagu

SEQ ID NO: 2463479 - RNA, 19 nt, Artificial Sequence
  Description of Artificial Sequence: Synthetic oligonucleotide
cuauuccucagaucauaau

SEQ ID NO: 2463480 - RNA, 19 nt, Artificial Sequence
  Description of Artificial Sequence: Synthetic oligonucleotide
gcggucgaugagaugauca

SEQ ID NO: 2463481 - RNA, 19 nt, Artificial Sequence
  Description of Artificial Sequence: Synthetic oligonucleotide
cuacgaguaucuucucuau

SEQ ID NO: 2463482 - RNA, 19 nt, Artificial Sequence
  Description of Artificial Sequence: Synthetic oligonucleotide
ccuauuccucagaucauaa

SEQ ID NO: 2463483 - RNA, 19 nt, Artificial Sequence
  Description of Artificial Sequence: Synthetic oligonucleotide
aaucgacucuugagauuua

SEQ ID NO: 2463484 - RNA, 19 nt, Artificial Sequence
  Description of Artificial Sequence: Synthetic oligonucleotide
acagcgguaugcggaucca

SEQ ID NO: 2463485 - RNA, 19 nt, Artificial Sequence
  Description of Artificial Sequence: Synthetic oligonucleotide
caaaucgacucuugagauu

SEQ ID NO: 2463486 - RNA, 19 nt, Artificial Sequence
  Description of Artificial Sequence: Synthetic oligonucleotide
ccaaaucgacucuugagau

SEQ ID NO: 2463487 - RNA, 19 nt, Artificial Sequence
  Description of Artificial Sequence: Synthetic oligonucleotide
gcgguaugcggauccaaaa

SEQ ID NO: 2463488 - RNA, 19 nt, Artificial Sequence
  Description of Artificial Sequence: Synthetic oligonucleotide
augucugguugaguucuuu

SEQ ID NO: 2463489 - RNA, 19 nt, Artificial Sequence
  Description of Artificial Sequence: Synthetic oligonucleotide
cggucgaugagaugaucac

SEQ ID NO: 2463490 - RNA, 19 nt, Artificial Sequence
  Description of Artificial Sequence: Synthetic oligonucleotide
caccagucagccacaaaau

SEQ ID NO: 2463491 - RNA, 19 nt, Artificial Sequence
  Description of Artificial Sequence: Synthetic oligonucleotide
ccacaaaaucuugcugcag

SEQ ID NO: 2463492 - RNA, 19 nt, Artificial Sequence
  Description of Artificial Sequence: Synthetic oligonucleotide
gcauuguacgagcccagua

SEQ ID NO: 2463493 - RNA, 19 nt, Artificial Sequence
  Description of Artificial Sequence: Synthetic oligonucleotide
gguucugauuagaggcaca

SEQ ID NO: 2463494 - RNA, 19 nt, Artificial Sequence
  Description of Artificial Sequence: Synthetic oligonucleotide
guuagccaucaaguauaaa

SEQ ID NO: 2463495 - RNA, 19 nt, Artificial Sequence
  Description of Artificial Sequence: Synthetic oligonucleotide
acccuucaggacacugaca

SEQ ID NO: 2463496 - RNA, 19 nt, Artificial Sequence
  Description of Artificial Sequence: Synthetic oligonucleotide
caccuuugcgacagcggua

SEQ ID NO: 2463497 - RNA, 19 nt, Artificial Sequence
  Description of Artificial Sequence: Synthetic oligonucleotide
caaccaccuuugcgacagc

SEQ ID NO: 2463498 - RNA, 19 nt, Artificial Sequence
  Description of Artificial Sequence: Synthetic oligonucleotide
ggucgaugagaugaucacu

SEQ ID NO: 2463499 - RNA, 19 nt, Artificial Sequence
  Description of Artificial Sequence: Synthetic oligonucleotide
gucuugcauccugucugca

SEQ ID NO: 2463500 - RNA, 19 nt, Artificial Sequence
  Description of Artificial Sequence: Synthetic oligonucleotide
ggcagguuuugucuugcau

SEQ ID NO: 2463501 - RNA, 19 nt, Artificial Sequence
  Description of Artificial Sequence: Synthetic oligonucleotide
caaaaucuugcugcagcuu

SEQ ID NO: 2463502 - RNA, 19 nt, Artificial Sequence
  Description of Artificial Sequence: Synthetic oligonucleotide
ccucaugaggaggugguaa

SEQ ID NO: 2463503 - RNA, 19 nt, Artificial Sequence
  Description of Artificial Sequence: Synthetic oligonucleotide
augucgcuccagguuugaa

SEQ ID NO: 2463504 - RNA, 19 nt, Artificial Sequence
  Description of Artificial Sequence: Synthetic oligonucleotide
cucucuaauaaggccucau

SEQ ID NO: 2463505 - RNA, 19 nt, Artificial Sequence
  Description of Artificial Sequence: Synthetic oligonucleotide
ccaccuuugcgacagcggu

SEQ ID NO: 2463506 - RNA, 19 nt, Artificial Sequence
  Description of Artificial Sequence: Synthetic oligonucleotide
cccuugcugcuucauucuc

SEQ ID NO: 2463507 - RNA, 19 nt, Artificial Sequence
  Description of Artificial Sequence: Synthetic oligonucleotide
ggaggugguaaugcauugu

SEQ ID NO: 2463508 - RNA, 19 nt, Artificial Sequence
  Description of Artificial Sequence: Synthetic oligonucleotide
ccugucugcaaccaccuuu

SEQ ID NO: 2463509 - RNA, 19 nt, Artificial Sequence
  Description of Artificial Sequence: Synthetic oligonucleotide
cuucccuugcugcuucauu

SEQ ID NO: 2463510 - RNA, 19 nt, Artificial Sequence
  Description of Artificial Sequence: Synthetic oligonucleotide
ccuugcugcuucauucucu

SEQ ID NO: 2463511 - RNA, 19 nt, Artificial Sequence
  Description of Artificial Sequence: Synthetic oligonucleotide
cagcugcacaaaccuggua

SEQ ID NO: 2463512 - RNA, 19 nt, Artificial Sequence
  Description of Artificial Sequence: Synthetic oligonucleotide
ggaguagugagcggucgau

SEQ ID NO: 2463513 - RNA, 19 nt, Artificial Sequence
  Description of Artificial Sequence: Synthetic oligonucleotide
cagcgguaugcggauccaa

SEQ ID NO: 2463514 - RNA, 19 nt, Artificial Sequence
  Description of Artificial Sequence: Synthetic oligonucleotide
gagcggucgaugagaugau

SEQ ID NO: 2463515 - RNA, 19 nt, Artificial Sequence
  Description of Artificial Sequence: Synthetic oligonucleotide
gcgacagcgguaugcggau

SEQ ID NO: 2463516 - RNA, 19 nt, Artificial Sequence
  Description of Artificial Sequence: Synthetic oligonucleotide
ccuuugcgacagcgguaug

SEQ ID NO: 2463517 - RNA, 19 nt, Artificial Sequence
  Description of Artificial Sequence: Synthetic oligonucleotide
gcaugacagcaggugcaaa

SEQ ID NO: 2463518 - RNA, 19 nt, Artificial Sequence
  Description of Artificial Sequence: Synthetic oligonucleotide
gcaguccaaaucgacucuu

SEQ ID NO: 2463519 - RNA, 19 nt, Artificial Sequence
  Description of Artificial Sequence: Synthetic oligonucleotide
cgguaugcggauccaaaau

SEQ ID NO: 2463520 - RNA, 19 nt, Artificial Sequence
  Description of Artificial Sequence: Synthetic oligonucleotide
ccgauguguuguagguagu

SEQ ID NO: 2463521 - RNA, 19 nt, Artificial Sequence
  Description of Artificial Sequence: Synthetic oligonucleotide
caugacccuucaggacacu

SEQ ID NO: 2463522 - RNA, 19 nt, Artificial Sequence
  Description of Artificial Sequence: Synthetic oligonucleotide
gcugacucucuaacugauu

SEQ ID NO: 2463523 - RNA, 19 nt, Artificial Sequence
  Description of Artificial Sequence: Synthetic oligonucleotide
gccucaugaggagguggua

SEQ ID NO: 2463524 - RNA, 19 nt, Artificial Sequence
  Description of Artificial Sequence: Synthetic oligonucleotide
cccaucaucuuggcauaua

SEQ ID NO: 2463525 - RNA, 19 nt, Artificial Sequence
  Description of Artificial Sequence: Synthetic oligonucleotide
ccccgauguguuguaggua

SEQ ID NO: 2463526 - RNA, 19 nt, Artificial Sequence
  Description of Artificial Sequence: Synthetic oligonucleotide
cgacagcgguaugcggauc

SEQ ID NO: 2463527 - RNA, 19 nt, Artificial Sequence
  Description of Artificial Sequence: Synthetic oligonucleotide
ugaaauguaaccaugcugc

SEQ ID NO: 2463528 - RNA, 19 nt, Artificial Sequence
  Description of Artificial Sequence: Synthetic oligonucleotide
uaauuucuuauauugaugc

SEQ ID NO: 2463529 - RNA, 19 nt, Artificial Sequence
  Description of Artificial Sequence: Synthetic oligonucleotide
gaaucuuauuccuauaugc

SEQ ID NO: 2463530 - RNA, 19 nt, Artificial Sequence
  Description of Artificial Sequence: Synthetic oligonucleotide
agauuuuaaaugugcaagc

SEQ ID NO: 2463531 - RNA, 19 nt, Artificial Sequence
  Description of Artificial Sequence: Synthetic oligonucleotide
aauuuuaucaggcugucaa

SEQ ID NO: 2463532 - RNA, 19 nt, Artificial Sequence
  Description of Artificial Sequence: Synthetic oligonucleotide
ucuuacgauauucauacca

SEQ ID NO: 2463533 - RNA, 19 nt, Artificial Sequence
  Description of Artificial Sequence: Synthetic oligonucleotide
ucugaaaugauuuccgggc

SEQ ID NO: 2463534 - RNA, 19 nt, Artificial Sequence
  Description of Artificial Sequence: Synthetic oligonucleotide
uuauauugaugccaguaag

SEQ ID NO: 2463535 - RNA, 19 nt, Artificial Sequence
  Description of Artificial Sequence: Synthetic oligonucleotide
aaaauguagacuucggaaa

SEQ ID NO: 2463536 - RNA, 19 nt, Artificial Sequence
  Description of Artificial Sequence: Synthetic oligonucleotide
ucaguuauaacagaugaug

SEQ ID NO: 2463537 - RNA, 19 nt, Artificial Sequence
  Description of Artificial Sequence: Synthetic oligonucleotide
ucuuauuccuauaugcuug

SEQ ID NO: 2463538 - RNA, 19 nt, Artificial Sequence
  Description of Artificial Sequence: Synthetic oligonucleotide
auucugaauauucuguggg

SEQ ID NO: 2463539 - RNA, 19 nt, Artificial Sequence
  Description of Artificial Sequence: Synthetic oligonucleotide
aaaggugcacgcuaucugg

SEQ ID NO: 2463540 - RNA, 19 nt, Artificial Sequence
  Description of Artificial Sequence: Synthetic oligonucleotide
guucuuacgauauucauac

SEQ ID NO: 2463541 - RNA, 19 nt, Artificial Sequence
  Description of Artificial Sequence: Synthetic oligonucleotide
uucauuguuuguaaugucc

SEQ ID NO: 2463542 - RNA, 19 nt, Artificial Sequence
  Description of Artificial Sequence: Synthetic oligonucleotide
uuaaaaugcuuaaaugugu

SEQ ID NO: 2463543 - RNA, 19 nt, Artificial Sequence
  Description of Artificial Sequence: Synthetic oligonucleotide
uuucuuauauugaugccag

SEQ ID NO: 2463544 - RNA, 19 nt, Artificial Sequence
  Description of Artificial Sequence: Synthetic oligonucleotide
acgauauucauaccacucc

SEQ ID NO: 2463545 - RNA, 19 nt, Artificial Sequence
  Description of Artificial Sequence: Synthetic oligonucleotide
aacuagucauuuuccacac

SEQ ID NO: 2463546 - RNA, 19 nt, Artificial Sequence
  Description of Artificial Sequence: Synthetic oligonucleotide
ucaucuauuuguauccucc

SEQ ID NO: 2463547 - RNA, 19 nt, Artificial Sequence
  Description of Artificial Sequence: Synthetic oligonucleotide
uugaaauguaaccaugcug

SEQ ID NO: 2463548 - RNA, 19 nt, Artificial Sequence
  Description of Artificial Sequence: Synthetic oligonucleotide
aaaugcuuaaauguguucu

SEQ ID NO: 2463549 - RNA, 19 nt, Artificial Sequence
  Description of Artificial Sequence: Synthetic oligonucleotide
uuuagucucaauuuccaga

SEQ ID NO: 2463550 - RNA, 19 nt, Artificial Sequence
  Description of Artificial Sequence: Synthetic oligonucleotide
auuccuauaugcuugccag

SEQ ID NO: 2463551 - RNA, 19 nt, Artificial Sequence
  Description of Artificial Sequence: Synthetic oligonucleotide
aagcaauuuuaucaggcug

SEQ ID NO: 2463552 - RNA, 19 nt, Artificial Sequence
  Description of Artificial Sequence: Synthetic oligonucleotide
aaagcaauuuuaucaggcu

SEQ ID NO: 2463553 - RNA, 19 nt, Artificial Sequence
  Description of Artificial Sequence: Synthetic oligonucleotide
cuucagauuuuaaaugugc

SEQ ID NO: 2463554 - RNA, 19 nt, Artificial Sequence
  Description of Artificial Sequence: Synthetic oligonucleotide
uauauugaugccaguaagu

SEQ ID NO: 2463555 - RNA, 19 nt, Artificial Sequence
  Description of Artificial Sequence: Synthetic oligonucleotide
aguugaaauguaaccaugc

SEQ ID NO: 2463556 - RNA, 19 nt, Artificial Sequence
  Description of Artificial Sequence: Synthetic oligonucleotide
uaauucugaauauucugug

SEQ ID NO: 2463557 - RNA, 19 nt, Artificial Sequence
  Description of Artificial Sequence: Synthetic oligonucleotide
uucagauuuuaaaugugca

SEQ ID NO: 2463558 - RNA, 19 nt, Artificial Sequence
  Description of Artificial Sequence: Synthetic oligonucleotide
ucuagaugcaaauucacuu

SEQ ID NO: 2463559 - RNA, 19 nt, Artificial Sequence
  Description of Artificial Sequence: Synthetic oligonucleotide
caaucacuaguucaaaccc

SEQ ID NO: 2463560 - RNA, 19 nt, Artificial Sequence
  Description of Artificial Sequence: Synthetic oligonucleotide
uaaaugugcaagcugacuu

SEQ ID NO: 2463561 - RNA, 19 nt, Artificial Sequence
  Description of Artificial Sequence: Synthetic oligonucleotide
aaauguagacuucggaaaa

SEQ ID NO: 2463562 - RNA, 19 nt, Artificial Sequence
  Description of Artificial Sequence: Synthetic oligonucleotide
uauaugcuugccagcacgg

SEQ ID NO: 2463563 - RNA, 19 nt, Artificial Sequence
  Description of Artificial Sequence: Synthetic oligonucleotide
uuaaauguguucuuacgau

SEQ ID NO: 2463564 - RNA, 19 nt, Artificial Sequence
  Description of Artificial Sequence: Synthetic oligonucleotide
uccucaucuauuuguaucc

SEQ ID NO: 2463565 - RNA, 19 nt, Artificial Sequence
  Description of Artificial Sequence: Synthetic oligonucleotide
aggagcaguuucuaugacc

SEQ ID NO: 2463566 - RNA, 19 nt, Artificial Sequence
  Description of Artificial Sequence: Synthetic oligonucleotide
ucuauuuguauccuccaaa

SEQ ID NO: 2463567 - RNA, 19 nt, Artificial Sequence
  Description of Artificial Sequence: Synthetic oligonucleotide
uuuaucaggcugucaagag

SEQ ID NO: 2463568 - RNA, 19 nt, Artificial Sequence
  Description of Artificial Sequence: Synthetic oligonucleotide
cuuacgauauucauaccac

SEQ ID NO: 2463569 - RNA, 19 nt, Artificial Sequence
  Description of Artificial Sequence: Synthetic oligonucleotide
cucuguagaauuuucuuug

SEQ ID NO: 2463570 - RNA, 19 nt, Artificial Sequence
  Description of Artificial Sequence: Synthetic oligonucleotide
uguaauguccucaguuuug

SEQ ID NO: 2463571 - RNA, 19 nt, Artificial Sequence
  Description of Artificial Sequence: Synthetic oligonucleotide
uuccaguugaaauguaacc

SEQ ID NO: 2463572 - RNA, 19 nt, Artificial Sequence
  Description of Artificial Sequence: Synthetic oligonucleotide
cuauuuguauccuccaaac

SEQ ID NO: 2463573 - RNA, 19 nt, Artificial Sequence
  Description of Artificial Sequence: Synthetic oligonucleotide
cuauaugcuugccagcacg

SEQ ID NO: 2463574 - RNA, 19 nt, Artificial Sequence
  Description of Artificial Sequence: Synthetic oligonucleotide
gaacuagucauuuuccaca

SEQ ID NO: 2463575 - RNA, 19 nt, Artificial Sequence
  Description of Artificial Sequence: Synthetic oligonucleotide
auuucugaaaugauuuccg

SEQ ID NO: 2463576 - RNA, 19 nt, Artificial Sequence
  Description of Artificial Sequence: Synthetic oligonucleotide
uuacuuagaaaugaaacuu

SEQ ID NO: 2463577 - RNA, 19 nt, Artificial Sequence
  Description of Artificial Sequence: Synthetic oligonucleotide
uguguucuuacgauauuca

SEQ ID NO: 2463578 - RNA, 19 nt, Artificial Sequence
  Description of Artificial Sequence: Synthetic oligonucleotide
uauuccuauaugcuugcca

SEQ ID NO: 2463579 - RNA, 19 nt, Artificial Sequence
  Description of Artificial Sequence: Synthetic oligonucleotide
acaaagcaauuuuaucagg

SEQ ID NO: 2463580 - RNA, 19 nt, Artificial Sequence
  Description of Artificial Sequence: Synthetic oligonucleotide
ugaugauuucucuuuaguc

SEQ ID NO: 2463581 - RNA, 19 nt, Artificial Sequence
  Description of Artificial Sequence: Synthetic oligonucleotide
aacagaugaugauuucucu

SEQ ID NO: 2463582 - RNA, 19 nt, Artificial Sequence
  Description of Artificial Sequence: Synthetic oligonucleotide
uguggguuccauuauuaug

SEQ ID NO: 2463583 - RNA, 19 nt, Artificial Sequence
  Description of Artificial Sequence: Synthetic oligonucleotide
cugaggucaguuauaacag

SEQ ID NO: 2463584 - RNA, 19 nt, Artificial Sequence
  Description of Artificial Sequence: Synthetic oligonucleotide
aaucuuauuccuauaugcu

SEQ ID NO: 2463585 - RNA, 19 nt, Artificial Sequence
  Description of Artificial Sequence: Synthetic oligonucleotide
agaaucuuauuccuauaug

SEQ ID NO: 2463586 - RNA, 19 nt, Artificial Sequence
  Description of Artificial Sequence: Synthetic oligonucleotide
uaacagaugaugauuucuc

SEQ ID NO: 2463587 - RNA, 19 nt, Artificial Sequence
  Description of Artificial Sequence: Synthetic oligonucleotide
cuuagaaaugaaacuucag

SEQ ID NO: 2463588 - RNA, 19 nt, Artificial Sequence
  Description of Artificial Sequence: Synthetic oligonucleotide
cucuuuagucucaauuucc

SEQ ID NO: 2463589 - RNA, 19 nt, Artificial Sequence
  Description of Artificial Sequence: Synthetic oligonucleotide
uguucuuacgauauucaua

SEQ ID NO: 2463590 - RNA, 19 nt, Artificial Sequence
  Description of Artificial Sequence: Synthetic oligonucleotide
ugcucuagaugcaaauuca

SEQ ID NO: 2463591 - RNA, 19 nt, Artificial Sequence
  Description of Artificial Sequence: Synthetic oligonucleotide
uacgauauucauaccacuc

SEQ ID NO: 2463592 - RNA, 19 nt, Artificial Sequence
  Description of Artificial Sequence: Synthetic oligonucleotide
uaaaaugcuuaaauguguu

SEQ ID NO: 2463593 - RNA, 19 nt, Artificial Sequence
  Description of Artificial Sequence: Synthetic oligonucleotide
uuuuaucaggcugucaaga

SEQ ID NO: 2463594 - RNA, 19 nt, Artificial Sequence
  Description of Artificial Sequence: Synthetic oligonucleotide
uuguuuguaauguccucag

SEQ ID NO: 2463595 - RNA, 19 nt, Artificial Sequence
  Description of Artificial Sequence: Synthetic oligonucleotide
ugugcaagcugacuuuuca

SEQ ID NO: 2463596 - RNA, 19 nt, Artificial Sequence
  Description of Artificial Sequence: Synthetic oligonucleotide
aguuauaacagaugaugau

SEQ ID NO: 2463597 - RNA, 19 nt, Artificial Sequence
  Description of Artificial Sequence: Synthetic oligonucleotide
cuuaaauguguucuuacga

SEQ ID NO: 2463598 - RNA, 19 nt, Artificial Sequence
  Description of Artificial Sequence: Synthetic oligonucleotide
agucuucggaaacucagag

SEQ ID NO: 2463599 - RNA, 19 nt, Artificial Sequence
  Description of Artificial Sequence: Synthetic oligonucleotide
auauucauaccacuccaca

SEQ ID NO: 2463600 - RNA, 19 nt, Artificial Sequence
  Description of Artificial Sequence: Synthetic oligonucleotide
cuaguucaaacccuggcug

SEQ ID NO: 2463601 - RNA, 19 nt, Artificial Sequence
  Description of Artificial Sequence: Synthetic oligonucleotide
uuaugcugaggucaguuau

SEQ ID NO: 2463602 - RNA, 19 nt, Artificial Sequence
  Description of Artificial Sequence: Synthetic oligonucleotide
uucacuuaauucugaauau

SEQ ID NO: 2463603 - RNA, 19 nt, Artificial Sequence
  Description of Artificial Sequence: Synthetic oligonucleotide
uaugacccuguucuugucc

SEQ ID NO: 2463604 - RNA, 19 nt, Artificial Sequence
  Description of Artificial Sequence: Synthetic oligonucleotide
auuccaguugaaauguaac

SEQ ID NO: 2463605 - RNA, 19 nt, Artificial Sequence
  Description of Artificial Sequence: Synthetic oligonucleotide
ugaauauucuguggguucc

SEQ ID NO: 2463606 - RNA, 19 nt, Artificial Sequence
  Description of Artificial Sequence: Synthetic oligonucleotide
uauucauaccacuccacaa

SEQ ID NO: 2463607 - RNA, 19 nt, Artificial Sequence
  Description of Artificial Sequence: Synthetic oligonucleotide
uucggaaacucagaggagc

SEQ ID NO: 2463608 - RNA, 19 nt, Artificial Sequence
  Description of Artificial Sequence: Synthetic oligonucleotide
uuccugauaaucugugucu

SEQ ID NO: 2463609 - RNA, 19 nt, Artificial Sequence
  Description of Artificial Sequence: Synthetic oligonucleotide
cuuuucaggucucuccagg

SEQ ID NO: 2463610 - RNA, 19 nt, Artificial Sequence
  Description of Artificial Sequence: Synthetic oligonucleotide
gaaaggugcacgcuaucug

SEQ ID NO: 2463611 - RNA, 19 nt, Artificial Sequence
  Description of Artificial Sequence: Synthetic oligonucleotide
ugggacuuuggugagaaga

SEQ ID NO: 2463612 - RNA, 19 nt, Artificial Sequence
  Description of Artificial Sequence: Synthetic oligonucleotide
auucauaccacuccacaaa

SEQ ID NO: 2463613 - RNA, 19 nt, Artificial Sequence
  Description of Artificial Sequence: Synthetic oligonucleotide
uaaauguguucuuacgaua

SEQ ID NO: 2463614 - RNA, 19 nt, Artificial Sequence
  Description of Artificial Sequence: Synthetic oligonucleotide
gaagauccagcuuugggaa

SEQ ID NO: 2463615 - RNA, 19 nt, Artificial Sequence
  Description of Artificial Sequence: Synthetic oligonucleotide
auaacagaugaugauuucu

SEQ ID NO: 2463616 - RNA, 19 nt, Artificial Sequence
  Description of Artificial Sequence: Synthetic oligonucleotide
aaugauuuccgggcuccgg

SEQ ID NO: 2463617 - RNA, 19 nt, Artificial Sequence
  Description of Artificial Sequence: Synthetic oligonucleotide
uucauaccacuccacaaaa

SEQ ID NO: 2463618 - RNA, 19 nt, Artificial Sequence
  Description of Artificial Sequence: Synthetic oligonucleotide
uuacgauauucauaccacu

SEQ ID NO: 2463619 - RNA, 19 nt, Artificial Sequence
  Description of Artificial Sequence: Synthetic oligonucleotide
ugggaaaaccuucccuucc

SEQ ID NO: 2463620 - RNA, 19 nt, Artificial Sequence
  Description of Artificial Sequence: Synthetic oligonucleotide
gcuuaaauguguucuuacg

SEQ ID NO: 2463621 - RNA, 19 nt, Artificial Sequence
  Description of Artificial Sequence: Synthetic oligonucleotide
guaauguccucaguuuugg

SEQ ID NO: 2463622 - RNA, 19 nt, Artificial Sequence
  Description of Artificial Sequence: Synthetic oligonucleotide
cuuuagucucaauuuccag

SEQ ID NO: 2463623 - RNA, 19 nt, Artificial Sequence
  Description of Artificial Sequence: Synthetic oligonucleotide
ucacuaguucaaacccugg

SEQ ID NO: 2463624 - RNA, 19 nt, Artificial Sequence
  Description of Artificial Sequence: Synthetic oligonucleotide
uccuauaugcuugccagca

SEQ ID NO: 2463625 - RNA, 19 nt, Artificial Sequence
  Description of Artificial Sequence: Synthetic oligonucleotide
uaguucaaacccuggcugc

SEQ ID NO: 2463626 - RNA, 19 nt, Artificial Sequence
  Description of Artificial Sequence: Synthetic oligonucleotide
aguucaaacccuggcugcc

SEQ ID NO: 2463627 - RNA, 19 nt, Artificial Sequence
  Description of Artificial Sequence: Synthetic oligonucleotide
ggucaguuauaacagauga

SEQ ID NO: 2463628 - RNA, 19 nt, Artificial Sequence
  Description of Artificial Sequence: Synthetic oligonucleotide
uggaauaauuucuuauauu

SEQ ID NO: 2463629 - RNA, 19 nt, Artificial Sequence
  Description of Artificial Sequence: Synthetic oligonucleotide
ucuguagaauuuucuuugu

SEQ ID NO: 2463630 - RNA, 19 nt, Artificial Sequence
  Description of Artificial Sequence: Synthetic oligonucleotide
uccacacaaagcaauuuua

SEQ ID NO: 2463631 - RNA, 19 nt, Artificial Sequence
  Description of Artificial Sequence: Synthetic oligonucleotide
ugaaaugauuuccgggcuc

SEQ ID NO: 2463632 - RNA, 19 nt, Artificial Sequence
  Description of Artificial Sequence: Synthetic oligonucleotide
cugaauauucuguggguuc

SEQ ID NO: 2463633 - RNA, 19 nt, Artificial Sequence
  Description of Artificial Sequence: Synthetic oligonucleotide
aucuuauuccuauaugcuu

SEQ ID NO: 2463634 - RNA, 19 nt, Artificial Sequence
  Description of Artificial Sequence: Synthetic oligonucleotide
uuaaaugugcaagcugacu

SEQ ID NO: 2463635 - RNA, 19 nt, Artificial Sequence
  Description of Artificial Sequence: Synthetic oligonucleotide
cacacaaagcaauuuuauc

SEQ ID NO: 2463636 - RNA, 19 nt, Artificial Sequence
  Description of Artificial Sequence: Synthetic oligonucleotide
aaucacuaguucaaacccu

SEQ ID NO: 2463637 - RNA, 19 nt, Artificial Sequence
  Description of Artificial Sequence: Synthetic oligonucleotide
cacggaacuagucauuuuc

SEQ ID NO: 2463638 - RNA, 19 nt, Artificial Sequence
  Description of Artificial Sequence: Synthetic oligonucleotide
acggaacuagucauuuucc

SEQ ID NO: 2463639 - RNA, 19 nt, Artificial Sequence
  Description of Artificial Sequence: Synthetic oligonucleotide
ucugaaaggugcacgcuau

SEQ ID NO: 2463640 - RNA, 19 nt, Artificial Sequence
  Description of Artificial Sequence: Synthetic oligonucleotide
aauuccaguugaaauguaa

SEQ ID NO: 2463641 - RNA, 19 nt, Artificial Sequence
  Description of Artificial Sequence: Synthetic oligonucleotide
agcuuugggaaaaccuucc

SEQ ID NO: 2463642 - RNA, 19 nt, Artificial Sequence
  Description of Artificial Sequence: Synthetic oligonucleotide
agcaauuuuaucaggcugu

SEQ ID NO: 2463643 - RNA, 19 nt, Artificial Sequence
  Description of Artificial Sequence: Synthetic oligonucleotide
caguuauaacagaugauga

SEQ ID NO: 2463644 - RNA, 19 nt, Artificial Sequence
  Description of Artificial Sequence: Synthetic oligonucleotide
ucggaaacucagaggagca

SEQ ID NO: 2463645 - RNA, 19 nt, Artificial Sequence
  Description of Artificial Sequence: Synthetic oligonucleotide
auguccucaguuuuggaau

SEQ ID NO: 2463646 - RNA, 19 nt, Artificial Sequence
  Description of Artificial Sequence: Synthetic oligonucleotide
cuuauauugaugccaguaa

SEQ ID NO: 2463647 - RNA, 19 nt, Artificial Sequence
  Description of Artificial Sequence: Synthetic oligonucleotide
aggauuuccaucccucaga

SEQ ID NO: 2463648 - RNA, 19 nt, Artificial Sequence
  Description of Artificial Sequence: Synthetic oligonucleotide
ugaaaggugcacgcuaucu

SEQ ID NO: 2463649 - RNA, 19 nt, Artificial Sequence
  Description of Artificial Sequence: Synthetic oligonucleotide
gucuucggaaacucagagg

SEQ ID NO: 2463650 - RNA, 19 nt, Artificial Sequence
  Description of Artificial Sequence: Synthetic oligonucleotide
ucuguggguuccauuauua

SEQ ID NO: 2463651 - RNA, 19 nt, Artificial Sequence
  Description of Artificial Sequence: Synthetic oligonucleotide
acuuagaaaugaaacuuca

SEQ ID NO: 2463652 - RNA, 19 nt, Artificial Sequence
  Description of Artificial Sequence: Synthetic oligonucleotide
cacuaguucaaacccuggc

SEQ ID NO: 2463653 - RNA, 19 nt, Artificial Sequence
  Description of Artificial Sequence: Synthetic oligonucleotide
cugcucuagaugcaaauuc

SEQ ID NO: 2463654 - RNA, 19 nt, Artificial Sequence
  Description of Artificial Sequence: Synthetic oligonucleotide
uauugaugccaguaaguuu

SEQ ID NO: 2463655 - RNA, 19 nt, Artificial Sequence
  Description of Artificial Sequence: Synthetic oligonucleotide
uccuccaaacaaucacuag

SEQ ID NO: 2463656 - RNA, 19 nt, Artificial Sequence
  Description of Artificial Sequence: Synthetic oligonucleotide
ugauaaucugugucucugu

SEQ ID NO: 2463657 - RNA, 19 nt, Artificial Sequence
  Description of Artificial Sequence: Synthetic oligonucleotide
guuccauuauuaugcugag

SEQ ID NO: 2463658 - RNA, 19 nt, Artificial Sequence
  Description of Artificial Sequence: Synthetic oligonucleotide
auuuccugauaaucugugu

SEQ ID NO: 2463659 - RNA, 19 nt, Artificial Sequence
  Description of Artificial Sequence: Synthetic oligonucleotide
auauugaugccaguaaguu

SEQ ID NO: 2463660 - RNA, 19 nt, Artificial Sequence
  Description of Artificial Sequence: Synthetic oligonucleotide
gaaauguaaccaugcugca

SEQ ID NO: 2463661 - RNA, 19 nt, Artificial Sequence
  Description of Artificial Sequence: Synthetic oligonucleotide
aaaugauuuccgggcuccg

SEQ ID NO: 2463662 - RNA, 19 nt, Artificial Sequence
  Description of Artificial Sequence: Synthetic oligonucleotide
ugucacuucauuguuugua

SEQ ID NO: 2463663 - RNA, 19 nt, Artificial Sequence
  Description of Artificial Sequence: Synthetic oligonucleotide
aauguguucuuacgauauu

SEQ ID NO: 2463664 - RNA, 19 nt, Artificial Sequence
  Description of Artificial Sequence: Synthetic oligonucleotide
cugauaaucugugucucug

SEQ ID NO: 2463665 - RNA, 19 nt, Artificial Sequence
  Description of Artificial Sequence: Synthetic oligonucleotide
ucugaauauucuguggguu

SEQ ID NO: 2463666 - RNA, 19 nt, Artificial Sequence
  Description of Artificial Sequence: Synthetic oligonucleotide
ugagaagauccagcuuugg

SEQ ID NO: 2463667 - RNA, 19 nt, Artificial Sequence
  Description of Artificial Sequence: Synthetic oligonucleotide
uguuuguaauguccucagu

SEQ ID NO: 2463668 - RNA, 19 nt, Artificial Sequence
  Description of Artificial Sequence: Synthetic oligonucleotide
aaggugcacgcuaucuggg

SEQ ID NO: 2463669 - RNA, 19 nt, Artificial Sequence
  Description of Artificial Sequence: Synthetic oligonucleotide
uuccauuauuaugcugagg

SEQ ID NO: 2463670 - RNA, 19 nt, Artificial Sequence
  Description of Artificial Sequence: Synthetic oligonucleotide
gauaaucugugucucugua

SEQ ID NO: 2463671 - RNA, 19 nt, Artificial Sequence
  Description of Artificial Sequence: Synthetic oligonucleotide
ucaaacccuggcugccugg

SEQ ID NO: 2463672 - RNA, 19 nt, Artificial Sequence
  Description of Artificial Sequence: Synthetic oligonucleotide
ggaacuagucauuuuccac

SEQ ID NO: 2463673 - RNA, 19 nt, Artificial Sequence
  Description of Artificial Sequence: Synthetic oligonucleotide
uaugcugaggucaguuaua

SEQ ID NO: 2463674 - RNA, 19 nt, Artificial Sequence
  Description of Artificial Sequence: Synthetic oligonucleotide
uuccuauaugcuugccagc

SEQ ID NO: 2463675 - RNA, 19 nt, Artificial Sequence
  Description of Artificial Sequence: Synthetic oligonucleotide
ccuuaaaaugcuuaaaugu

SEQ ID NO: 2463676 - RNA, 19 nt, Artificial Sequence
  Description of Artificial Sequence: Synthetic oligonucleotide
uuucaggucucuccaggau

SEQ ID NO: 2463677 - RNA, 19 nt, Artificial Sequence
  Description of Artificial Sequence: Synthetic oligonucleotide
aucuauuuguauccuccaa

SEQ ID NO: 2463678 - RNA, 19 nt, Artificial Sequence
  Description of Artificial Sequence: Synthetic oligonucleotide
uucugcucuagaugcaaau

SEQ ID NO: 2463679 - RNA, 19 nt, Artificial Sequence
  Description of Artificial Sequence: Synthetic oligonucleotide
cugcaauuuccugauaauc

SEQ ID NO: 2463680 - RNA, 19 nt, Artificial Sequence
  Description of Artificial Sequence: Synthetic oligonucleotide
gucacuucauuguuuguaa

SEQ ID NO: 2463681 - RNA, 19 nt, Artificial Sequence
  Description of Artificial Sequence: Synthetic oligonucleotide
auuaugcugaggucaguua

SEQ ID NO: 2463682 - RNA, 19 nt, Artificial Sequence
  Description of Artificial Sequence: Synthetic oligonucleotide
aaugugcaagcugacuuuu

SEQ ID NO: 2463683 - RNA, 19 nt, Artificial Sequence
  Description of Artificial Sequence: Synthetic oligonucleotide
ucugggacuuuggugagaa

SEQ ID NO: 2463684 - RNA, 19 nt, Artificial Sequence
  Description of Artificial Sequence: Synthetic oligonucleotide
gcuaucuggguacuucucc

SEQ ID NO: 2463685 - RNA, 19 nt, Artificial Sequence
  Description of Artificial Sequence: Synthetic oligonucleotide
ucgcucugggacuuuggug

SEQ ID NO: 2463686 - RNA, 19 nt, Artificial Sequence
  Description of Artificial Sequence: Synthetic oligonucleotide
uucuuacgauauucauacc

SEQ ID NO: 2463687 - RNA, 19 nt, Artificial Sequence
  Description of Artificial Sequence: Synthetic oligonucleotide
aagauccagcuuugggaaa

SEQ ID NO: 2463688 - RNA, 19 nt, Artificial Sequence
  Description of Artificial Sequence: Synthetic oligonucleotide
ucuggguacuucuccuuaa

SEQ ID NO: 2463689 - RNA, 19 nt, Artificial Sequence
  Description of Artificial Sequence: Synthetic oligonucleotide
guuauaacagaugaugauu

SEQ ID NO: 2463690 - RNA, 19 nt, Artificial Sequence
  Description of Artificial Sequence: Synthetic oligonucleotide
uaauguccucaguuuugga

SEQ ID NO: 2463691 - RNA, 19 nt, Artificial Sequence
  Description of Artificial Sequence: Synthetic oligonucleotide
ugauuuccgggcuccggac

SEQ ID NO: 2463692 - RNA, 19 nt, Artificial Sequence
  Description of Artificial Sequence: Synthetic oligonucleotide
guacuccuagcagucuucg

SEQ ID NO: 2463693 - RNA, 19 nt, Artificial Sequence
  Description of Artificial Sequence: Synthetic oligonucleotide
gaucuccaugcagugggag

SEQ ID NO: 2463694 - RNA, 19 nt, Artificial Sequence
  Description of Artificial Sequence: Synthetic oligonucleotide
ucacuucauuguuuguaau

SEQ ID NO: 2463695 - RNA, 19 nt, Artificial Sequence
  Description of Artificial Sequence: Synthetic oligonucleotide
aaacaugagcaaaucucuu

SEQ ID NO: 2463696 - RNA, 19 nt, Artificial Sequence
  Description of Artificial Sequence: Synthetic oligonucleotide
uuauuccuauaugcuugcc

SEQ ID NO: 2463697 - RNA, 19 nt, Artificial Sequence
  Description of Artificial Sequence: Synthetic oligonucleotide
uccugauaaucugugucuc

SEQ ID NO: 2463698 - RNA, 19 nt, Artificial Sequence
  Description of Artificial Sequence: Synthetic oligonucleotide
uucuuauauugaugccagu

SEQ ID NO: 2463699 - RNA, 19 nt, Artificial Sequence
  Description of Artificial Sequence: Synthetic oligonucleotide
uucuguggguuccauuauu

SEQ ID NO: 2463700 - RNA, 19 nt, Artificial Sequence
  Description of Artificial Sequence: Synthetic oligonucleotide
uguauccuuuucugucacu

SEQ ID NO: 2463701 - RNA, 19 nt, Artificial Sequence
  Description of Artificial Sequence: Synthetic oligonucleotide
uugaugccaguaaguuuac

SEQ ID NO: 2463702 - RNA, 19 nt, Artificial Sequence
  Description of Artificial Sequence: Synthetic oligonucleotide
caucuauuuguauccucca

SEQ ID NO: 2463703 - RNA, 19 nt, Artificial Sequence
  Description of Artificial Sequence: Synthetic oligonucleotide
aggucaguuauaacagaug

SEQ ID NO: 2463704 - RNA, 19 nt, Artificial Sequence
  Description of Artificial Sequence: Synthetic oligonucleotide
gcaggugcccucugaaagg

SEQ ID NO: 2463705 - RNA, 19 nt, Artificial Sequence
  Description of Artificial Sequence: Synthetic oligonucleotide
ggugagaagauccagcuuu

SEQ ID NO: 2463706 - RNA, 19 nt, Artificial Sequence
  Description of Artificial Sequence: Synthetic oligonucleotide
ucugcucuagaugcaaauu

SEQ ID NO: 2463707 - RNA, 19 nt, Artificial Sequence
  Description of Artificial Sequence: Synthetic oligonucleotide
gcagucuucggaaacucag

SEQ ID NO: 2463708 - RNA, 19 nt, Artificial Sequence
  Description of Artificial Sequence: Synthetic oligonucleotide
cagcuucaauuccaaguac

SEQ ID NO: 2463709 - RNA, 19 nt, Artificial Sequence
  Description of Artificial Sequence: Synthetic oligonucleotide
acuagucauuuuccacaca

SEQ ID NO: 2463710 - RNA, 19 nt, Artificial Sequence
  Description of Artificial Sequence: Synthetic oligonucleotide
uccaucccucagaaucuga

SEQ ID NO: 2463711 - RNA, 19 nt, Artificial Sequence
  Description of Artificial Sequence: Synthetic oligonucleotide
gugcacgcuaucuggguac

SEQ ID NO: 2463712 - RNA, 19 nt, Artificial Sequence
  Description of Artificial Sequence: Synthetic oligonucleotide
auucuguggguuccauuau

SEQ ID NO: 2463713 - RNA, 19 nt, Artificial Sequence
  Description of Artificial Sequence: Synthetic oligonucleotide
agauccagcuuugggaaaa

SEQ ID NO: 2463714 - RNA, 19 nt, Artificial Sequence
  Description of Artificial Sequence: Synthetic oligonucleotide
uugccagcacggaacuagu

SEQ ID NO: 2463715 - RNA, 19 nt, Artificial Sequence
  Description of Artificial Sequence: Synthetic oligonucleotide
guggaucuccaugcagugg

SEQ ID NO: 2463716 - RNA, 19 nt, Artificial Sequence
  Description of Artificial Sequence: Synthetic oligonucleotide
ccaaguacuccuagcaguc

SEQ ID NO: 2463717 - RNA, 19 nt, Artificial Sequence
  Description of Artificial Sequence: Synthetic oligonucleotide
caauuuccugauaaucugu

SEQ ID NO: 2463718 - RNA, 19 nt, Artificial Sequence
  Description of Artificial Sequence: Synthetic oligonucleotide
caugcagugggagcaggug

SEQ ID NO: 2463719 - RNA, 19 nt, Artificial Sequence
  Description of Artificial Sequence: Synthetic oligonucleotide
cucuagaugcaaauucacu

SEQ ID NO: 2463720 - RNA, 19 nt, Artificial Sequence
  Description of Artificial Sequence: Synthetic oligonucleotide
uggugagaagauccagcuu

SEQ ID NO: 2463721 - RNA, 19 nt, Artificial Sequence
  Description of Artificial Sequence: Synthetic oligonucleotide
uccuagcagucuucggaaa

SEQ ID NO: 2463722 - RNA, 19 nt, Artificial Sequence
  Description of Artificial Sequence: Synthetic oligonucleotide
cacgcuaucuggguacuuc

SEQ ID NO: 2463723 - RNA, 19 nt, Artificial Sequence
  Description of Artificial Sequence: Synthetic oligonucleotide
aggugcacgcuaucugggu

SEQ ID NO: 2463724 - RNA, 19 nt, Artificial Sequence
  Description of Artificial Sequence: Synthetic oligonucleotide
ccagcccagaaucuuauuc

SEQ ID NO: 2463725 - RNA, 19 nt, Artificial Sequence
  Description of Artificial Sequence: Synthetic oligonucleotide
cagaaucuuauuccuauau

SEQ ID NO: 2463726 - RNA, 19 nt, Artificial Sequence
  Description of Artificial Sequence: Synthetic oligonucleotide
ugcugaggucaguuauaac

SEQ ID NO: 2463727 - RNA, 19 nt, Artificial Sequence
  Description of Artificial Sequence: Synthetic oligonucleotide
cuguggaucuccaugcagu

SEQ ID NO: 2463728 - RNA, 19 nt, Artificial Sequence
  Description of Artificial Sequence: Synthetic oligonucleotide
cagucuucggaaacucaga

SEQ ID NO: 2463729 - RNA, 19 nt, Artificial Sequence
  Description of Artificial Sequence: Synthetic oligonucleotide
agcacggaacuagucauuu

SEQ ID NO: 2463730 - RNA, 19 nt, Artificial Sequence
  Description of Artificial Sequence: Synthetic oligonucleotide
cuccuagcagucuucggaa

SEQ ID NO: 2463731 - RNA, 19 nt, Artificial Sequence
  Description of Artificial Sequence: Synthetic oligonucleotide
cuaugacccuguucuuguc

SEQ ID NO: 2463732 - RNA, 19 nt, Artificial Sequence
  Description of Artificial Sequence: Synthetic oligonucleotide
caugcugcaauuuccugau

SEQ ID NO: 2463733 - RNA, 19 nt, Artificial Sequence
  Description of Artificial Sequence: Synthetic oligonucleotide
cuaucuggguacuucuccu

SEQ ID NO: 2463734 - RNA, 19 nt, Artificial Sequence
  Description of Artificial Sequence: Synthetic oligonucleotide
gccagcacggaacuaguca

SEQ ID NO: 2463735 - RNA, 19 nt, Artificial Sequence
  Description of Artificial Sequence: Synthetic oligonucleotide
ccuagcagucuucggaaac

SEQ ID NO: 2463736 - RNA, 19 nt, Artificial Sequence
  Description of Artificial Sequence: Synthetic oligonucleotide
cugaaaggugcacgcuauc

SEQ ID NO: 2463737 - RNA, 19 nt, Artificial Sequence
  Description of Artificial Sequence: Synthetic oligonucleotide
auaugcuugccagcacgga

SEQ ID NO: 2463738 - RNA, 19 nt, Artificial Sequence
  Description of Artificial Sequence: Synthetic oligonucleotide
cugaaaugauuuccgggcu

SEQ ID NO: 2463739 - RNA, 19 nt, Artificial Sequence
  Description of Artificial Sequence: Synthetic oligonucleotide
uccucaguuuuggaauaau

SEQ ID NO: 2463740 - RNA, 19 nt, Artificial Sequence
  Description of Artificial Sequence: Synthetic oligonucleotide
ugaugccaguaaguuuacu

SEQ ID NO: 2463741 - RNA, 19 nt, Artificial Sequence
  Description of Artificial Sequence: Synthetic oligonucleotide
gauccagcuuugggaaaac

SEQ ID NO: 2463742 - RNA, 19 nt, Artificial Sequence
  Description of Artificial Sequence: Synthetic oligonucleotide
guguucuuacgauauucau

SEQ ID NO: 2463743 - RNA, 19 nt, Artificial Sequence
  Description of Artificial Sequence: Synthetic oligonucleotide
gcucuagaugcaaauucac

SEQ ID NO: 2463744 - RNA, 19 nt, Artificial Sequence
  Description of Artificial Sequence: Synthetic oligonucleotide
auguuccccagcccagaau

SEQ ID NO: 2463745 - RNA, 19 nt, Artificial Sequence
  Description of Artificial Sequence: Synthetic oligonucleotide
ugcacgcuaucuggguacu

SEQ ID NO: 2463746 - RNA, 19 nt, Artificial Sequence
  Description of Artificial Sequence: Synthetic oligonucleotide
gagcaggugcccucugaaa

SEQ ID NO: 2463747 - RNA, 19 nt, Artificial Sequence
  Description of Artificial Sequence: Synthetic oligonucleotide
guauccuuuucugucacuu

SEQ ID NO: 2463748 - RNA, 19 nt, Artificial Sequence
  Description of Artificial Sequence: Synthetic oligonucleotide
ugcccucugaaaggugcac

SEQ ID NO: 2463749 - RNA, 19 nt, Artificial Sequence
  Description of Artificial Sequence: Synthetic oligonucleotide
gcaauuuuaucaggcuguc

SEQ ID NO: 2463750 - RNA, 19 nt, Artificial Sequence
  Description of Artificial Sequence: Synthetic oligonucleotide
acccuggcugccuggcacu

SEQ ID NO: 2463751 - RNA, 19 nt, Artificial Sequence
  Description of Artificial Sequence: Synthetic oligonucleotide
ggaaacucagaggagcagu

SEQ ID NO: 2463752 - RNA, 19 nt, Artificial Sequence
  Description of Artificial Sequence: Synthetic oligonucleotide
cugggacuuuggugagaag

SEQ ID NO: 2463753 - RNA, 19 nt, Artificial Sequence
  Description of Artificial Sequence: Synthetic oligonucleotide
caucccucagaaucugacu

SEQ ID NO: 2463754 - RNA, 19 nt, Artificial Sequence
  Description of Artificial Sequence: Synthetic oligonucleotide
cuggguacuucuccuuaaa

SEQ ID NO: 2463755 - RNA, 19 nt, Artificial Sequence
  Description of Artificial Sequence: Synthetic oligonucleotide
cuagcagucuucggaaacu

SEQ ID NO: 2463756 - RNA, 19 nt, Artificial Sequence
  Description of Artificial Sequence: Synthetic oligonucleotide
ccuauaugcuugccagcac

SEQ ID NO: 2463757 - RNA, 19 nt, Artificial Sequence
  Description of Artificial Sequence: Synthetic oligonucleotide
gucaguuauaacagaugau

SEQ ID NO: 2463758 - RNA, 19 nt, Artificial Sequence
  Description of Artificial Sequence: Synthetic oligonucleotide
cuggcacuguggaucucca

SEQ ID NO: 2463759 - RNA, 19 nt, Artificial Sequence
  Description of Artificial Sequence: Synthetic oligonucleotide
uggcacuguggaucuccau

SEQ ID NO: 2463760 - RNA, 19 nt, Artificial Sequence
  Description of Artificial Sequence: Synthetic oligonucleotide
gauuuccaucccucagaau

SEQ ID NO: 2463761 - RNA, 19 nt, Artificial Sequence
  Description of Artificial Sequence: Synthetic oligonucleotide
ggugcacgcuaucugggua

SEQ ID NO: 2463762 - RNA, 19 nt, Artificial Sequence
  Description of Artificial Sequence: Synthetic oligonucleotide
cuguggguuccauuauuau

SEQ ID NO: 2463763 - RNA, 19 nt, Artificial Sequence
  Description of Artificial Sequence: Synthetic oligonucleotide
cggaacuagucauuuucca

SEQ ID NO: 2463764 - RNA, 19 nt, Artificial Sequence
  Description of Artificial Sequence: Synthetic oligonucleotide
gugcccucugaaaggugca

SEQ ID NO: 2463765 - RNA, 19 nt, Artificial Sequence
  Description of Artificial Sequence: Synthetic oligonucleotide
ccagcuuugggaaaaccuu

SEQ ID NO: 2463766 - RNA, 19 nt, Artificial Sequence
  Description of Artificial Sequence: Synthetic oligonucleotide
gggacuuuggugagaagau

SEQ ID NO: 2463767 - RNA, 19 nt, Artificial Sequence
  Description of Artificial Sequence: Synthetic oligonucleotide
cugucacuucauuguuugu

SEQ ID NO: 2463768 - RNA, 19 nt, Artificial Sequence
  Description of Artificial Sequence: Synthetic oligonucleotide
agggcucgcucugggacuu

SEQ ID NO: 2463769 - RNA, 19 nt, Artificial Sequence
  Description of Artificial Sequence: Synthetic oligonucleotide
caaguacuccuagcagucu

SEQ ID NO: 2463770 - RNA, 19 nt, Artificial Sequence
  Description of Artificial Sequence: Synthetic oligonucleotide
ccagcacggaacuagucau

SEQ ID NO: 2463771 - RNA, 19 nt, Artificial Sequence
  Description of Artificial Sequence: Synthetic oligonucleotide
caggugcccucugaaaggu

SEQ ID NO: 2463772 - RNA, 19 nt, Artificial Sequence
  Description of Artificial Sequence: Synthetic oligonucleotide
cucugggacuuuggugaga

SEQ ID NO: 2463773 - RNA, 19 nt, Artificial Sequence
  Description of Artificial Sequence: Synthetic oligonucleotide
cgcuaucuggguacuucuc

SEQ ID NO: 2463774 - RNA, 19 nt, Artificial Sequence
  Description of Artificial Sequence: Synthetic oligonucleotide
ccucaguuuuggaauaauu

SEQ ID NO: 2463775 - RNA, 19 nt, Artificial Sequence
  Description of Artificial Sequence: Synthetic oligonucleotide
cagcacggaacuagucauu

SEQ ID NO: 2463776 - RNA, 19 nt, Artificial Sequence
  Description of Artificial Sequence: Synthetic oligonucleotide
gcccagaaucuuauuccua

SEQ ID NO: 2463777 - RNA, 19 nt, Artificial Sequence
  Description of Artificial Sequence: Synthetic oligonucleotide
caguuucuaugacccuguu

SEQ ID NO: 2463778 - RNA, 19 nt, Artificial Sequence
  Description of Artificial Sequence: Synthetic oligonucleotide
cagugggagcaggugcccu

SEQ ID NO: 2463779 - RNA, 19 nt, Artificial Sequence
  Description of Artificial Sequence: Synthetic oligonucleotide
gcacggaacuagucauuuu

SEQ ID NO: 2463780 - RNA, 19 nt, Artificial Sequence
  Description of Artificial Sequence: Synthetic oligonucleotide
ccucugaaaggugcacgcu

SEQ ID NO: 2463781 - RNA, 19 nt, Artificial Sequence
  Description of Artificial Sequence: Synthetic oligonucleotide
gggcucgcucugggacuuu

SEQ ID NO: 2463782 - RNA, 19 nt, Artificial Sequence
  Description of Artificial Sequence: Synthetic oligonucleotide
aaauuaaacacacaaaacc

SEQ ID NO: 2463783 - RNA, 19 nt, Artificial Sequence
  Description of Artificial Sequence: Synthetic oligonucleotide
aauacugaaaacuggauuc

SEQ ID NO: 2463784 - RNA, 19 nt, Artificial Sequence
  Description of Artificial Sequence: Synthetic oligonucleotide
uaauuaauaaauuaaacac

SEQ ID NO: 2463785 - RNA, 19 nt, Artificial Sequence
  Description of Artificial Sequence: Synthetic oligonucleotide
aauuguaaaauccaauuag

SEQ ID NO: 2463786 - RNA, 19 nt, Artificial Sequence
  Description of Artificial Sequence: Synthetic oligonucleotide
auuauuaaccuuuucacag

SEQ ID NO: 2463787 - RNA, 19 nt, Artificial Sequence
  Description of Artificial Sequence: Synthetic oligonucleotide
aacuauuggacucuacccc

SEQ ID NO: 2463788 - RNA, 19 nt, Artificial Sequence
  Description of Artificial Sequence: Synthetic oligonucleotide
uccaauguuguuaaaauag

SEQ ID NO: 2463789 - RNA, 19 nt, Artificial Sequence
  Description of Artificial Sequence: Synthetic oligonucleotide
acauuaaauuaccacaggc

SEQ ID NO: 2463790 - RNA, 19 nt, Artificial Sequence
  Description of Artificial Sequence: Synthetic oligonucleotide
aaaauagucaugauucccc

SEQ ID NO: 2463791 - RNA, 19 nt, Artificial Sequence
  Description of Artificial Sequence: Synthetic oligonucleotide
aaaggaucaauccagugug

SEQ ID NO: 2463792 - RNA, 19 nt, Artificial Sequence
  Description of Artificial Sequence: Synthetic oligonucleotide
aauagcuuacauucauagc

SEQ ID NO: 2463793 - RNA, 19 nt, Artificial Sequence
  Description of Artificial Sequence: Synthetic oligonucleotide
auagcuuacauucauagca

SEQ ID NO: 2463794 - RNA, 19 nt, Artificial Sequence
  Description of Artificial Sequence: Synthetic oligonucleotide
aucccaauagcuuacauuc

SEQ ID NO: 2463795 - RNA, 19 nt, Artificial Sequence
  Description of Artificial Sequence: Synthetic oligonucleotide
uguguaguuagucauagca

SEQ ID NO: 2463796 - RNA, 19 nt, Artificial Sequence
  Description of Artificial Sequence: Synthetic oligonucleotide
augugaaagacacauaauc

SEQ ID NO: 2463797 - RNA, 19 nt, Artificial Sequence
  Description of Artificial Sequence: Synthetic oligonucleotide
uucuucgacaacaagaaug

SEQ ID NO: 2463798 - RNA, 19 nt, Artificial Sequence
  Description of Artificial Sequence: Synthetic oligonucleotide
aaaaggaucaauccagugu

SEQ ID NO: 2463799 - RNA, 19 nt, Artificial Sequence
  Description of Artificial Sequence: Synthetic oligonucleotide
ucgacaacaagaaugacac

SEQ ID NO: 2463800 - RNA, 19 nt, Artificial Sequence
  Description of Artificial Sequence: Synthetic oligonucleotide
caaguuaggauuucuaucc

SEQ ID NO: 2463801 - RNA, 19 nt, Artificial Sequence
  Description of Artificial Sequence: Synthetic oligonucleotide
ucaauaaaagcauuugaca

SEQ ID NO: 2463802 - RNA, 19 nt, Artificial Sequence
  Description of Artificial Sequence: Synthetic oligonucleotide
ugugaaagacacauaauca

SEQ ID NO: 2463803 - RNA, 19 nt, Artificial Sequence
  Description of Artificial Sequence: Synthetic oligonucleotide
uuuaaagaggaaaagugaa

SEQ ID NO: 2463804 - RNA, 19 nt, Artificial Sequence
  Description of Artificial Sequence: Synthetic oligonucleotide
auagucaugauuccccagc

SEQ ID NO: 2463805 - RNA, 19 nt, Artificial Sequence
  Description of Artificial Sequence: Synthetic oligonucleotide
uuacaauacugaaaacugg

SEQ ID NO: 2463806 - RNA, 19 nt, Artificial Sequence
  Description of Artificial Sequence: Synthetic oligonucleotide
uauuauuuugguuuguagu

SEQ ID NO: 2463807 - RNA, 19 nt, Artificial Sequence
  Description of Artificial Sequence: Synthetic oligonucleotide
aaaacuggauuccacguug

SEQ ID NO: 2463808 - RNA, 19 nt, Artificial Sequence
  Description of Artificial Sequence: Synthetic oligonucleotide
uaugcagcaauauucaacu

SEQ ID NO: 2463809 - RNA, 19 nt, Artificial Sequence
  Description of Artificial Sequence: Synthetic oligonucleotide
uuaaugaugguccaguaau

SEQ ID NO: 2463810 - RNA, 19 nt, Artificial Sequence
  Description of Artificial Sequence: Synthetic oligonucleotide
ucaacuauuggacucuacc

SEQ ID NO: 2463811 - RNA, 19 nt, Artificial Sequence
  Description of Artificial Sequence: Synthetic oligonucleotide
uuuuacacauuauuaaccu

SEQ ID NO: 2463812 - RNA, 19 nt, Artificial Sequence
  Description of Artificial Sequence: Synthetic oligonucleotide
ucaaguuuucuuaagguaa

SEQ ID NO: 2463813 - RNA, 19 nt, Artificial Sequence
  Description of Artificial Sequence: Synthetic oligonucleotide
ugaauaguguuuauuuaag

SEQ ID NO: 2463814 - RNA, 19 nt, Artificial Sequence
  Description of Artificial Sequence: Synthetic oligonucleotide
aucaauaaaagcauuugac

SEQ ID NO: 2463815 - RNA, 19 nt, Artificial Sequence
  Description of Artificial Sequence: Synthetic oligonucleotide
gaauaguguuuauuuaagg

SEQ ID NO: 2463816 - RNA, 19 nt, Artificial Sequence
  Description of Artificial Sequence: Synthetic oligonucleotide
auauucaacuauuggacuc

SEQ ID NO: 2463817 - RNA, 19 nt, Artificial Sequence
  Description of Artificial Sequence: Synthetic oligonucleotide
uuucuuaagguaagaauug

SEQ ID NO: 2463818 - RNA, 19 nt, Artificial Sequence
  Description of Artificial Sequence: Synthetic oligonucleotide
aauguuguuaaaauaguca

SEQ ID NO: 2463819 - RNA, 19 nt, Artificial Sequence
  Description of Artificial Sequence: Synthetic oligonucleotide
uguaguuagucauagcaca

SEQ ID NO: 2463820 - RNA, 19 nt, Artificial Sequence
  Description of Artificial Sequence: Synthetic oligonucleotide
agugaaagcaacuacaguu

SEQ ID NO: 2463821 - RNA, 19 nt, Artificial Sequence
  Description of Artificial Sequence: Synthetic oligonucleotide
agcaauauucaacuauugg

SEQ ID NO: 2463822 - RNA, 19 nt, Artificial Sequence
  Description of Artificial Sequence: Synthetic oligonucleotide
auaguguuuauuuaaggga

SEQ ID NO: 2463823 - RNA, 19 nt, Artificial Sequence
  Description of Artificial Sequence: Synthetic oligonucleotide
ucuauacugaauuccaaug

SEQ ID NO: 2463824 - RNA, 19 nt, Artificial Sequence
  Description of Artificial Sequence: Synthetic oligonucleotide
uuaaccuuuucacaguaca

SEQ ID NO: 2463825 - RNA, 19 nt, Artificial Sequence
  Description of Artificial Sequence: Synthetic oligonucleotide
ugugcuugaaaacuggacu

SEQ ID NO: 2463826 - RNA, 19 nt, Artificial Sequence
  Description of Artificial Sequence: Synthetic oligonucleotide
uacaauacugaaaacugga

SEQ ID NO: 2463827 - RNA, 19 nt, Artificial Sequence
  Description of Artificial Sequence: Synthetic oligonucleotide
aaguuaggauuucuauccc

SEQ ID NO: 2463828 - RNA, 19 nt, Artificial Sequence
  Description of Artificial Sequence: Synthetic oligonucleotide
uauucuucgacaacaagaa

SEQ ID NO: 2463829 - RNA, 19 nt, Artificial Sequence
  Description of Artificial Sequence: Synthetic oligonucleotide
aauauucuucgacaacaag

SEQ ID NO: 2463830 - RNA, 19 nt, Artificial Sequence
  Description of Artificial Sequence: Synthetic oligonucleotide
ucuucgacaacaagaauga

SEQ ID NO: 2463831 - RNA, 19 nt, Artificial Sequence
  Description of Artificial Sequence: Synthetic oligonucleotide
ugacaagacauuaaauuac

SEQ ID NO: 2463832 - RNA, 19 nt, Artificial Sequence
  Description of Artificial Sequence: Synthetic oligonucleotide
uaagguaagaauuguaaaa

SEQ ID NO: 2463833 - RNA, 19 nt, Artificial Sequence
  Description of Artificial Sequence: Synthetic oligonucleotide
ugaguuacaucuauacuga

SEQ ID NO: 2463834 - RNA, 19 nt, Artificial Sequence
  Description of Artificial Sequence: Synthetic oligonucleotide
uaaauuaccacaggcacug

SEQ ID NO: 2463835 - RNA, 19 nt, Artificial Sequence
  Description of Artificial Sequence: Synthetic oligonucleotide
uucgacaacaagaaugaca

SEQ ID NO: 2463836 - RNA, 19 nt, Artificial Sequence
  Description of Artificial Sequence: Synthetic oligonucleotide
caauagcuuacauucauag

SEQ ID NO: 2463837 - RNA, 19 nt, Artificial Sequence
  Description of Artificial Sequence: Synthetic oligonucleotide
aguuacaauacugaaaacu

SEQ ID NO: 2463838 - RNA, 19 nt, Artificial Sequence
  Description of Artificial Sequence: Synthetic oligonucleotide
uuauuuaagggacucuggu

SEQ ID NO: 2463839 - RNA, 19 nt, Artificial Sequence
  Description of Artificial Sequence: Synthetic oligonucleotide
auaaucaucuuuugaaccu

SEQ ID NO: 2463840 - RNA, 19 nt, Artificial Sequence
  Description of Artificial Sequence: Synthetic oligonucleotide
agggacucugguuaagucc

SEQ ID NO: 2463841 - RNA, 19 nt, Artificial Sequence
  Description of Artificial Sequence: Synthetic oligonucleotide
guuacaauacugaaaacug

SEQ ID NO: 2463842 - RNA, 19 nt, Artificial Sequence
  Description of Artificial Sequence: Synthetic oligonucleotide
uugacaagacauuaaauua

SEQ ID NO: 2463843 - RNA, 19 nt, Artificial Sequence
  Description of Artificial Sequence: Synthetic oligonucleotide
ugaugguccaguaaucuca

SEQ ID NO: 2463844 - RNA, 19 nt, Artificial Sequence
  Description of Artificial Sequence: Synthetic oligonucleotide
uuagucauagcacaguauu

SEQ ID NO: 2463845 - RNA, 19 nt, Artificial Sequence
  Description of Artificial Sequence: Synthetic oligonucleotide
cugugaaugugaaagacac

SEQ ID NO: 2463846 - RNA, 19 nt, Artificial Sequence
  Description of Artificial Sequence: Synthetic oligonucleotide
uaagaauuguaaaauccaa

SEQ ID NO: 2463847 - RNA, 19 nt, Artificial Sequence
  Description of Artificial Sequence: Synthetic oligonucleotide
uguuguuaaaauagucaug

SEQ ID NO: 2463848 - RNA, 19 nt, Artificial Sequence
  Description of Artificial Sequence: Synthetic oligonucleotide
caaaacccaacccaguccg

SEQ ID NO: 2463849 - RNA, 19 nt, Artificial Sequence
  Description of Artificial Sequence: Synthetic oligonucleotide
uuaaauuaccacaggcacu

SEQ ID NO: 2463850 - RNA, 19 nt, Artificial Sequence
  Description of Artificial Sequence: Synthetic oligonucleotide
ugaaagacacauaaucauc

SEQ ID NO: 2463851 - RNA, 19 nt, Artificial Sequence
  Description of Artificial Sequence: Synthetic oligonucleotide
uguuguuucaaguuaggau

SEQ ID NO: 2463852 - RNA, 19 nt, Artificial Sequence
  Description of Artificial Sequence: Synthetic oligonucleotide
uuaagguaagaauuguaaa

SEQ ID NO: 2463853 - RNA, 19 nt, Artificial Sequence
  Description of Artificial Sequence: Synthetic oligonucleotide
uccaguaaucucaaaacaa

SEQ ID NO: 2463854 - RNA, 19 nt, Artificial Sequence
  Description of Artificial Sequence: Synthetic oligonucleotide
uagacuuagcaccauacuc

SEQ ID NO: 2463855 - RNA, 19 nt, Artificial Sequence
  Description of Artificial Sequence: Synthetic oligonucleotide
uguaguuuuguacuugaau

SEQ ID NO: 2463856 - RNA, 19 nt, Artificial Sequence
  Description of Artificial Sequence: Synthetic oligonucleotide
acuugaauaguguuuauuu

SEQ ID NO: 2463857 - RNA, 19 nt, Artificial Sequence
  Description of Artificial Sequence: Synthetic oligonucleotide
aguguucuuaccugagugg

SEQ ID NO: 2463858 - RNA, 19 nt, Artificial Sequence
  Description of Artificial Sequence: Synthetic oligonucleotide
uaauaauucaaguuuucuu

SEQ ID NO: 2463859 - RNA, 19 nt, Artificial Sequence
  Description of Artificial Sequence: Synthetic oligonucleotide
auguuguuaaaauagucau

SEQ ID NO: 2463860 - RNA, 19 nt, Artificial Sequence
  Description of Artificial Sequence: Synthetic oligonucleotide
ugguuuguaguuuuguacu

SEQ ID NO: 2463861 - RNA, 19 nt, Artificial Sequence
  Description of Artificial Sequence: Synthetic oligonucleotide
aaauagucaugauucccca

SEQ ID NO: 2463862 - RNA, 19 nt, Artificial Sequence
  Description of Artificial Sequence: Synthetic oligonucleotide
uguagacuuagcaccauac

SEQ ID NO: 2463863 - RNA, 19 nt, Artificial Sequence
  Description of Artificial Sequence: Synthetic oligonucleotide
agacuuagcaccauacucg

SEQ ID NO: 2463864 - RNA, 19 nt, Artificial Sequence
  Description of Artificial Sequence: Synthetic oligonucleotide
caacuauuggacucuaccc

SEQ ID NO: 2463865 - RNA, 19 nt, Artificial Sequence
  Description of Artificial Sequence: Synthetic oligonucleotide
aacaagaaugacacagaac

SEQ ID NO: 2463866 - RNA, 19 nt, Artificial Sequence
  Description of Artificial Sequence: Synthetic oligonucleotide
ucaaguuaggauuucuauc

SEQ ID NO: 2463867 - RNA, 19 nt, Artificial Sequence
  Description of Artificial Sequence: Synthetic oligonucleotide
aguacacauuuaaugaugg

SEQ ID NO: 2463868 - RNA, 19 nt, Artificial Sequence
  Description of Artificial Sequence: Synthetic oligonucleotide
cuuagcaccauacucgcug

SEQ ID NO: 2463869 - RNA, 19 nt, Artificial Sequence
  Description of Artificial Sequence: Synthetic oligonucleotide
uaauucaaguuuucuuaag

SEQ ID NO: 2463870 - RNA, 19 nt, Artificial Sequence
  Description of Artificial Sequence: Synthetic oligonucleotide
auuggacucuaccccaccc

SEQ ID NO: 2463871 - RNA, 19 nt, Artificial Sequence
  Description of Artificial Sequence: Synthetic oligonucleotide
auauucuucgacaacaaga

SEQ ID NO: 2463872 - RNA, 19 nt, Artificial Sequence
  Description of Artificial Sequence: Synthetic oligonucleotide
cauuaaauuaccacaggca

SEQ ID NO: 2463873 - RNA, 19 nt, Artificial Sequence
  Description of Artificial Sequence: Synthetic oligonucleotide
auacugaaaacuggauucc

SEQ ID NO: 2463874 - RNA, 19 nt, Artificial Sequence
  Description of Artificial Sequence: Synthetic oligonucleotide
guaguuuuguacuugaaua

SEQ ID NO: 2463875 - RNA, 19 nt, Artificial Sequence
  Description of Artificial Sequence: Synthetic oligonucleotide
gguaagaauuguaaaaucc

SEQ ID NO: 2463876 - RNA, 19 nt, Artificial Sequence
  Description of Artificial Sequence: Synthetic oligonucleotide
cacauuauuaaccuuuuca

SEQ ID NO: 2463877 - RNA, 19 nt, Artificial Sequence
  Description of Artificial Sequence: Synthetic oligonucleotide
gaguguucuuaccugagug

SEQ ID NO: 2463878 - RNA, 19 nt, Artificial Sequence
  Description of Artificial Sequence: Synthetic oligonucleotide
uaagacuaauuaauaaauu

SEQ ID NO: 2463879 - RNA, 19 nt, Artificial Sequence
  Description of Artificial Sequence: Synthetic oligonucleotide
agacauuaaauuaccacag

SEQ ID NO: 2463880 - RNA, 19 nt, Artificial Sequence
  Description of Artificial Sequence: Synthetic oligonucleotide
aagggacucugguuaaguc

SEQ ID NO: 2463881 - RNA, 19 nt, Artificial Sequence
  Description of Artificial Sequence: Synthetic oligonucleotide
ucuccuaauaauucaaguu

SEQ ID NO: 2463882 - RNA, 19 nt, Artificial Sequence
  Description of Artificial Sequence: Synthetic oligonucleotide
cuuaagguaagaauuguaa

SEQ ID NO: 2463883 - RNA, 19 nt, Artificial Sequence
  Description of Artificial Sequence: Synthetic oligonucleotide
uguguguaguuagucauag

SEQ ID NO: 2463884 - RNA, 19 nt, Artificial Sequence
  Description of Artificial Sequence: Synthetic oligonucleotide
aagaaugacacagaaccaa

SEQ ID NO: 2463885 - RNA, 19 nt, Artificial Sequence
  Description of Artificial Sequence: Synthetic oligonucleotide
uauacugaauuccaauguu

SEQ ID NO: 2463886 - RNA, 19 nt, Artificial Sequence
  Description of Artificial Sequence: Synthetic oligonucleotide
uguacuugaauaguguuua

SEQ ID NO: 2463887 - RNA, 19 nt, Artificial Sequence
  Description of Artificial Sequence: Synthetic oligonucleotide
cuaacugauguugaguuac

SEQ ID NO: 2463888 - RNA, 19 nt, Artificial Sequence
  Description of Artificial Sequence: Synthetic oligonucleotide
uucaaguuaggauuucuau

SEQ ID NO: 2463889 - RNA, 19 nt, Artificial Sequence
  Description of Artificial Sequence: Synthetic oligonucleotide
uucaaguuuucuuaaggua

SEQ ID NO: 2463890 - RNA, 19 nt, Artificial Sequence
  Description of Artificial Sequence: Synthetic oligonucleotide
uuauuaaccuuuucacagu

SEQ ID NO: 2463891 - RNA, 19 nt, Artificial Sequence
  Description of Artificial Sequence: Synthetic oligonucleotide
gaauuguaaaauccaauua

SEQ ID NO: 2463892 - RNA, 19 nt, Artificial Sequence
  Description of Artificial Sequence: Synthetic oligonucleotide
auaauucaaguuuucuuaa

SEQ ID NO: 2463893 - RNA, 19 nt, Artificial Sequence
  Description of Artificial Sequence: Synthetic oligonucleotide
gcaauauucaacuauugga

SEQ ID NO: 2463894 - RNA, 19 nt, Artificial Sequence
  Description of Artificial Sequence: Synthetic oligonucleotide
gcuguguagacuuagcacc

SEQ ID NO: 2463895 - RNA, 19 nt, Artificial Sequence
  Description of Artificial Sequence: Synthetic oligonucleotide
uuucuaucccaauagcuua

SEQ ID NO: 2463896 - RNA, 19 nt, Artificial Sequence
  Description of Artificial Sequence: Synthetic oligonucleotide
cugauguugaguuacaucu

SEQ ID NO: 2463897 - RNA, 19 nt, Artificial Sequence
  Description of Artificial Sequence: Synthetic oligonucleotide
uccuaauaauucaaguuuu

SEQ ID NO: 2463898 - RNA, 19 nt, Artificial Sequence
  Description of Artificial Sequence: Synthetic oligonucleotide
aaucaucuuuugaaccuac

SEQ ID NO: 2463899 - RNA, 19 nt, Artificial Sequence
  Description of Artificial Sequence: Synthetic oligonucleotide
aacccaacccaguccguac

SEQ ID NO: 2463900 - RNA, 19 nt, Artificial Sequence
  Description of Artificial Sequence: Synthetic oligonucleotide
gauuccacguugcugggug

SEQ ID NO: 2463901 - RNA, 19 nt, Artificial Sequence
  Description of Artificial Sequence: Synthetic oligonucleotide
uauuaaccuuuucacagua

SEQ ID NO: 2463902 - RNA, 19 nt, Artificial Sequence
  Description of Artificial Sequence: Synthetic oligonucleotide
gacacauaaucaucuuuug

SEQ ID NO: 2463903 - RNA, 19 nt, Artificial Sequence
  Description of Artificial Sequence: Synthetic oligonucleotide
uuugugcuugaaaacugga

SEQ ID NO: 2463904 - RNA, 19 nt, Artificial Sequence
  Description of Artificial Sequence: Synthetic oligonucleotide
ugaguggccuuucaucacc

SEQ ID NO: 2463905 - RNA, 19 nt, Artificial Sequence
  Description of Artificial Sequence: Synthetic oligonucleotide
ugaaccuacuuucuccuaa

SEQ ID NO: 2463906 - RNA, 19 nt, Artificial Sequence
  Description of Artificial Sequence: Synthetic oligonucleotide
guaagaauuguaaaaucca

SEQ ID NO: 2463907 - RNA, 19 nt, Artificial Sequence
  Description of Artificial Sequence: Synthetic oligonucleotide
acuauuggacucuacccca

SEQ ID NO: 2463908 - RNA, 19 nt, Artificial Sequence
  Description of Artificial Sequence: Synthetic oligonucleotide
agacuaauuaauaaauuaa

SEQ ID NO: 2463909 - RNA, 19 nt, Artificial Sequence
  Description of Artificial Sequence: Synthetic oligonucleotide
cauuauuaaccuuuucaca

SEQ ID NO: 2463910 - RNA, 19 nt, Artificial Sequence
  Description of Artificial Sequence: Synthetic oligonucleotide
augaugguccaguaaucuc

SEQ ID NO: 2463911 - RNA, 19 nt, Artificial Sequence
  Description of Artificial Sequence: Synthetic oligonucleotide
aaauccaauuagcagccuu

SEQ ID NO: 2463912 - RNA, 19 nt, Artificial Sequence
  Description of Artificial Sequence: Synthetic oligonucleotide
ugcuguguagacuuagcac

SEQ ID NO: 2463913 - RNA, 19 nt, Artificial Sequence
  Description of Artificial Sequence: Synthetic oligonucleotide
aaacuggauuccacguugc

SEQ ID NO: 2463914 - RNA, 19 nt, Artificial Sequence
  Description of Artificial Sequence: Synthetic oligonucleotide
uaaccuuuucacaguacac

SEQ ID NO: 2463915 - RNA, 19 nt, Artificial Sequence
  Description of Artificial Sequence: Synthetic oligonucleotide
gacuuagcaccauacucgc

SEQ ID NO: 2463916 - RNA, 19 nt, Artificial Sequence
  Description of Artificial Sequence: Synthetic oligonucleotide
ucaugauuccccagccucc

SEQ ID NO: 2463917 - RNA, 19 nt, Artificial Sequence
  Description of Artificial Sequence: Synthetic oligonucleotide
uugugcuugaaaacuggac

SEQ ID NO: 2463918 - RNA, 19 nt, Artificial Sequence
  Description of Artificial Sequence: Synthetic oligonucleotide
gugcuugaaaacuggacug

SEQ ID NO: 2463919 - RNA, 19 nt, Artificial Sequence
  Description of Artificial Sequence: Synthetic oligonucleotide
auuacugagguaguuacaa

SEQ ID NO: 2463920 - RNA, 19 nt, Artificial Sequence
  Description of Artificial Sequence: Synthetic oligonucleotide
acaguacacauuuaaugau

SEQ ID NO: 2463921 - RNA, 19 nt, Artificial Sequence
  Description of Artificial Sequence: Synthetic oligonucleotide
uuucaaguuaggauuucua

SEQ ID NO: 2463922 - RNA, 19 nt, Artificial Sequence
  Description of Artificial Sequence: Synthetic oligonucleotide
agcuaacugauguugaguu

SEQ ID NO: 2463923 - RNA, 19 nt, Artificial Sequence
  Description of Artificial Sequence: Synthetic oligonucleotide
uguucuuaccugaguggcc

SEQ ID NO: 2463924 - RNA, 19 nt, Artificial Sequence
  Description of Artificial Sequence: Synthetic oligonucleotide
aguuaggauuucuauccca

SEQ ID NO: 2463925 - RNA, 19 nt, Artificial Sequence
  Description of Artificial Sequence: Synthetic oligonucleotide
uauuuaagggacucugguu

SEQ ID NO: 2463926 - RNA, 19 nt, Artificial Sequence
  Description of Artificial Sequence: Synthetic oligonucleotide
accccaagcuaacugaugu

SEQ ID NO: 2463927 - RNA, 19 nt, Artificial Sequence
  Description of Artificial Sequence: Synthetic oligonucleotide
uaaugaugguccaguaauc

SEQ ID NO: 2463928 - RNA, 19 nt, Artificial Sequence
  Description of Artificial Sequence: Synthetic oligonucleotide
caaaaggaucaauccagug

SEQ ID NO: 2463929 - RNA, 19 nt, Artificial Sequence
  Description of Artificial Sequence: Synthetic oligonucleotide
ugugaaugugaaagacaca

SEQ ID NO: 2463930 - RNA, 19 nt, Artificial Sequence
  Description of Artificial Sequence: Synthetic oligonucleotide
uaucccaauagcuuacauu

SEQ ID NO: 2463931 - RNA, 19 nt, Artificial Sequence
  Description of Artificial Sequence: Synthetic oligonucleotide
aguuagucauagcacagua

SEQ ID NO: 2463932 - RNA, 19 nt, Artificial Sequence
  Description of Artificial Sequence: Synthetic oligonucleotide
cacaguauuauuuugguuu

SEQ ID NO: 2463933 - RNA, 19 nt, Artificial Sequence
  Description of Artificial Sequence: Synthetic oligonucleotide
uuuaagggacucugguuaa

SEQ ID NO: 2463934 - RNA, 19 nt, Artificial Sequence
  Description of Artificial Sequence: Synthetic oligonucleotide
cccaaaaggaucaauccag

SEQ ID NO: 2463935 - RNA, 19 nt, Artificial Sequence
  Description of Artificial Sequence: Synthetic oligonucleotide
uagcuuacauucauagcau

SEQ ID NO: 2463936 - RNA, 19 nt, Artificial Sequence
  Description of Artificial Sequence: Synthetic oligonucleotide
ugaaagcaacuacaguuuu

SEQ ID NO: 2463937 - RNA, 19 nt, Artificial Sequence
  Description of Artificial Sequence: Synthetic oligonucleotide
acucgcuguguguaguuag

SEQ ID NO: 2463938 - RNA, 19 nt, Artificial Sequence
  Description of Artificial Sequence: Synthetic oligonucleotide
guaugcagcaauauucaac

SEQ ID NO: 2463939 - RNA, 19 nt, Artificial Sequence
  Description of Artificial Sequence: Synthetic oligonucleotide
gguccaguaaucucaaaac

SEQ ID NO: 2463940 - RNA, 19 nt, Artificial Sequence
  Description of Artificial Sequence: Synthetic oligonucleotide
auacugaauuccaauguug

SEQ ID NO: 2463941 - RNA, 19 nt, Artificial Sequence
  Description of Artificial Sequence: Synthetic oligonucleotide
uucuuaagguaagaauugu

SEQ ID NO: 2463942 - RNA, 19 nt, Artificial Sequence
  Description of Artificial Sequence: Synthetic oligonucleotide
gucaugauuccccagccuc

SEQ ID NO: 2463943 - RNA, 19 nt, Artificial Sequence
  Description of Artificial Sequence: Synthetic oligonucleotide
accuacuuucuccuaauaa

SEQ ID NO: 2463944 - RNA, 19 nt, Artificial Sequence
  Description of Artificial Sequence: Synthetic oligonucleotide
agucauagcacaguauuau

SEQ ID NO: 2463945 - RNA, 19 nt, Artificial Sequence
  Description of Artificial Sequence: Synthetic oligonucleotide
guaguuagucauagcacag

SEQ ID NO: 2463946 - RNA, 19 nt, Artificial Sequence
  Description of Artificial Sequence: Synthetic oligonucleotide
aaugugaaagacacauaau

SEQ ID NO: 2463947 - RNA, 19 nt, Artificial Sequence
  Description of Artificial Sequence: Synthetic oligonucleotide
auuaaccuuuucacaguac

SEQ ID NO: 2463948 - RNA, 19 nt, Artificial Sequence
  Description of Artificial Sequence: Synthetic oligonucleotide
acccaacccaguccguacc

SEQ ID NO: 2463949 - RNA, 19 nt, Artificial Sequence
  Description of Artificial Sequence: Synthetic oligonucleotide
auuucuaucccaauagcuu

SEQ ID NO: 2463950 - RNA, 19 nt, Artificial Sequence
  Description of Artificial Sequence: Synthetic oligonucleotide
uggacugaguguucuuacc

SEQ ID NO: 2463951 - RNA, 19 nt, Artificial Sequence
  Description of Artificial Sequence: Synthetic oligonucleotide
uauuggacucuaccccacc

SEQ ID NO: 2463952 - RNA, 19 nt, Artificial Sequence
  Description of Artificial Sequence: Synthetic oligonucleotide
guccaguaaucucaaaaca

SEQ ID NO: 2463953 - RNA, 19 nt, Artificial Sequence
  Description of Artificial Sequence: Synthetic oligonucleotide
uguuuauuuaagggacucu

SEQ ID NO: 2463954 - RNA, 19 nt, Artificial Sequence
  Description of Artificial Sequence: Synthetic oligonucleotide
agguaguuacaauacugaa

SEQ ID NO: 2463955 - RNA, 19 nt, Artificial Sequence
  Description of Artificial Sequence: Synthetic oligonucleotide
uagucauagcacaguauua

SEQ ID NO: 2463956 - RNA, 19 nt, Artificial Sequence
  Description of Artificial Sequence: Synthetic oligonucleotide
agacacauaaucaucuuuu

SEQ ID NO: 2463957 - RNA, 19 nt, Artificial Sequence
  Description of Artificial Sequence: Synthetic oligonucleotide
guguucuuaccugaguggc

SEQ ID NO: 2463958 - RNA, 19 nt, Artificial Sequence
  Description of Artificial Sequence: Synthetic oligonucleotide
aauccaauuagcagccuuu

SEQ ID NO: 2463959 - RNA, 19 nt, Artificial Sequence
  Description of Artificial Sequence: Synthetic oligonucleotide
uaacugauguugaguuaca

SEQ ID NO: 2463960 - RNA, 19 nt, Artificial Sequence
  Description of Artificial Sequence: Synthetic oligonucleotide
acauuuaaugaugguccag

SEQ ID NO: 2463961 - RNA, 19 nt, Artificial Sequence
  Description of Artificial Sequence: Synthetic oligonucleotide
ugauguugaguuacaucua

SEQ ID NO: 2463962 - RNA, 19 nt, Artificial Sequence
  Description of Artificial Sequence: Synthetic oligonucleotide
ugcuugaaaacuggacuga

SEQ ID NO: 2463963 - RNA, 19 nt, Artificial Sequence
  Description of Artificial Sequence: Synthetic oligonucleotide
uggcuguuguuucaaguua

SEQ ID NO: 2463964 - RNA, 19 nt, Artificial Sequence
  Description of Artificial Sequence: Synthetic oligonucleotide
guguaguuagucauagcac

SEQ ID NO: 2463965 - RNA, 19 nt, Artificial Sequence
  Description of Artificial Sequence: Synthetic oligonucleotide
uaguuacaauacugaaaac

SEQ ID NO: 2463966 - RNA, 19 nt, Artificial Sequence
  Description of Artificial Sequence: Synthetic oligonucleotide
caguaaucucaaaacaaaa

SEQ ID NO: 2463967 - RNA, 19 nt, Artificial Sequence
  Description of Artificial Sequence: Synthetic oligonucleotide
uuaggauuucuaucccaau

SEQ ID NO: 2463968 - RNA, 19 nt, Artificial Sequence
  Description of Artificial Sequence: Synthetic oligonucleotide
uacugaaaacuggauucca

SEQ ID NO: 2463969 - RNA, 19 nt, Artificial Sequence
  Description of Artificial Sequence: Synthetic oligonucleotide
gauguugaguuacaucuau

SEQ ID NO: 2463970 - RNA, 19 nt, Artificial Sequence
  Description of Artificial Sequence: Synthetic oligonucleotide
uucaacuauuggacucuac

SEQ ID NO: 2463971 - RNA, 19 nt, Artificial Sequence
  Description of Artificial Sequence: Synthetic oligonucleotide
cuauacugaauuccaaugu

SEQ ID NO: 2463972 - RNA, 19 nt, Artificial Sequence
  Description of Artificial Sequence: Synthetic oligonucleotide
aaauuaccacaggcacugg

SEQ ID NO: 2463973 - RNA, 19 nt, Artificial Sequence
  Description of Artificial Sequence: Synthetic oligonucleotide
uaguuagucauagcacagu

SEQ ID NO: 2463974 - RNA, 19 nt, Artificial Sequence
  Description of Artificial Sequence: Synthetic oligonucleotide
uuaagggacucugguuaag

SEQ ID NO: 2463975 - RNA, 19 nt, Artificial Sequence
  Description of Artificial Sequence: Synthetic oligonucleotide
uaagggacucugguuaagu

SEQ ID NO: 2463976 - RNA, 19 nt, Artificial Sequence
  Description of Artificial Sequence: Synthetic oligonucleotide
acaacaagaaugacacaga

SEQ ID NO: 2463977 - RNA, 19 nt, Artificial Sequence
  Description of Artificial Sequence: Synthetic oligonucleotide
aguuacaucuauacugaau

SEQ ID NO: 2463978 - RNA, 19 nt, Artificial Sequence
  Description of Artificial Sequence: Synthetic oligonucleotide
guugaguuacaucuauacu

SEQ ID NO: 2463979 - RNA, 19 nt, Artificial Sequence
  Description of Artificial Sequence: Synthetic oligonucleotide
guguuuauuuaagggacuc

SEQ ID NO: 2463980 - RNA, 19 nt, Artificial Sequence
  Description of Artificial Sequence: Synthetic oligonucleotide
acaagacauuaaauuacca

SEQ ID NO: 2463981 - RNA, 19 nt, Artificial Sequence
  Description of Artificial Sequence: Synthetic oligonucleotide
uuacugagguaguuacaau

SEQ ID NO: 2463982 - RNA, 19 nt, Artificial Sequence
  Description of Artificial Sequence: Synthetic oligonucleotide
cuccuaauaauucaaguuu

SEQ ID NO: 2463983 - RNA, 19 nt, Artificial Sequence
  Description of Artificial Sequence: Synthetic oligonucleotide
ggcaaauauucuucgacaa

SEQ ID NO: 2463984 - RNA, 19 nt, Artificial Sequence
  Description of Artificial Sequence: Synthetic oligonucleotide
ucuaucccaauagcuuaca

SEQ ID NO: 2463985 - RNA, 19 nt, Artificial Sequence
  Description of Artificial Sequence: Synthetic oligonucleotide
aaaauccaauuagcagccu

SEQ ID NO: 2463986 - RNA, 19 nt, Artificial Sequence
  Description of Artificial Sequence: Synthetic oligonucleotide
gcaaauauucuucgacaac

SEQ ID NO: 2463987 - RNA, 19 nt, Artificial Sequence
  Description of Artificial Sequence: Synthetic oligonucleotide
aaccuacuuucuccuaaua

SEQ ID NO: 2463988 - RNA, 19 nt, Artificial Sequence
  Description of Artificial Sequence: Synthetic oligonucleotide
caugauuccccagccuccc

SEQ ID NO: 2463989 - RNA, 19 nt, Artificial Sequence
  Description of Artificial Sequence: Synthetic oligonucleotide
acaauacugaaaacuggau

SEQ ID NO: 2463990 - RNA, 19 nt, Artificial Sequence
  Description of Artificial Sequence: Synthetic oligonucleotide
cuguguagacuuagcacca

SEQ ID NO: 2463991 - RNA, 19 nt, Artificial Sequence
  Description of Artificial Sequence: Synthetic oligonucleotide
ggcuguuguuucaaguuag

SEQ ID NO: 2463992 - RNA, 19 nt, Artificial Sequence
  Description of Artificial Sequence: Synthetic oligonucleotide
cauuacugagguaguuaca

SEQ ID NO: 2463993 - RNA, 19 nt, Artificial Sequence
  Description of Artificial Sequence: Synthetic oligonucleotide
cugaguggccuuucaucac

SEQ ID NO: 2463994 - RNA, 19 nt, Artificial Sequence
  Description of Artificial Sequence: Synthetic oligonucleotide
aaggaucaauccagugugu

SEQ ID NO: 2463995 - RNA, 19 nt, Artificial Sequence
  Description of Artificial Sequence: Synthetic oligonucleotide
auagcauuacugagguagu

SEQ ID NO: 2463996 - RNA, 19 nt, Artificial Sequence
  Description of Artificial Sequence: Synthetic oligonucleotide
agcuuacauucauagcauu

SEQ ID NO: 2463997 - RNA, 19 nt, Artificial Sequence
  Description of Artificial Sequence: Synthetic oligonucleotide
cauuuaaugaugguccagu

SEQ ID NO: 2463998 - RNA, 19 nt, Artificial Sequence
  Description of Artificial Sequence: Synthetic oligonucleotide
ugggugcugugaaugugaa

SEQ ID NO: 2463999 - RNA, 19 nt, Artificial Sequence
  Description of Artificial Sequence: Synthetic oligonucleotide
ccuuuuaagacuaauuaau

SEQ ID NO: 2464000 - RNA, 19 nt, Artificial Sequence
  Description of Artificial Sequence: Synthetic oligonucleotide
aaccccaagcuaacugaug

SEQ ID NO: 2464001 - RNA, 19 nt, Artificial Sequence
  Description of Artificial Sequence: Synthetic oligonucleotide
aaacccaacccaguccgua

SEQ ID NO: 2464002 - RNA, 19 nt, Artificial Sequence
  Description of Artificial Sequence: Synthetic oligonucleotide
ggaucaauccaguguguuc

SEQ ID NO: 2464003 - RNA, 19 nt, Artificial Sequence
  Description of Artificial Sequence: Synthetic oligonucleotide
caucuauacugaauuccaa

SEQ ID NO: 2464004 - RNA, 19 nt, Artificial Sequence
  Description of Artificial Sequence: Synthetic oligonucleotide
agcaccauacucgcugugu

SEQ ID NO: 2464005 - RNA, 19 nt, Artificial Sequence
  Description of Artificial Sequence: Synthetic oligonucleotide
uaccugaguggccuuucau

SEQ ID NO: 2464006 - RNA, 19 nt, Artificial Sequence
  Description of Artificial Sequence: Synthetic oligonucleotide
guagacuuagcaccauacu

SEQ ID NO: 2464007 - RNA, 19 nt, Artificial Sequence
  Description of Artificial Sequence: Synthetic oligonucleotide
caauacugaaaacuggauu

SEQ ID NO: 2464008 - RNA, 19 nt, Artificial Sequence
  Description of Artificial Sequence: Synthetic oligonucleotide
uugaaccuacuuucuccua

SEQ ID NO: 2464009 - RNA, 19 nt, Artificial Sequence
  Description of Artificial Sequence: Synthetic oligonucleotide
cuguuguuucaaguuagga

SEQ ID NO: 2464010 - RNA, 19 nt, Artificial Sequence
  Description of Artificial Sequence: Synthetic oligonucleotide
gaugguccaguaaucucaa

SEQ ID NO: 2464011 - RNA, 19 nt, Artificial Sequence
  Description of Artificial Sequence: Synthetic oligonucleotide
accaaucaauaaaagcauu

SEQ ID NO: 2464012 - RNA, 19 nt, Artificial Sequence
  Description of Artificial Sequence: Synthetic oligonucleotide
accauacucgcugugugua

SEQ ID NO: 2464013 - RNA, 19 nt, Artificial Sequence
  Description of Artificial Sequence: Synthetic oligonucleotide
gcuguuguuucaaguuagg

SEQ ID NO: 2464014 - RNA, 19 nt, Artificial Sequence
  Description of Artificial Sequence: Synthetic oligonucleotide
cuugaaaacuggacugagu

SEQ ID NO: 2464015 - RNA, 19 nt, Artificial Sequence
  Description of Artificial Sequence: Synthetic oligonucleotide
aaaacccaacccaguccgu

SEQ ID NO: 2464016 - RNA, 19 nt, Artificial Sequence
  Description of Artificial Sequence: Synthetic oligonucleotide
acacaaaacccaacccagu

SEQ ID NO: 2464017 - RNA, 19 nt, Artificial Sequence
  Description of Artificial Sequence: Synthetic oligonucleotide
caauccaguguguucuuua

SEQ ID NO: 2464018 - RNA, 19 nt, Artificial Sequence
  Description of Artificial Sequence: Synthetic oligonucleotide
cccaagcuaacugauguug

SEQ ID NO: 2464019 - RNA, 19 nt, Artificial Sequence
  Description of Artificial Sequence: Synthetic oligonucleotide
aggaucaauccaguguguu

SEQ ID NO: 2464020 - RNA, 19 nt, Artificial Sequence
  Description of Artificial Sequence: Synthetic oligonucleotide
auacucgcuguguguaguu

SEQ ID NO: 2464021 - RNA, 19 nt, Artificial Sequence
  Description of Artificial Sequence: Synthetic oligonucleotide
uuccacguugcugggugcu

SEQ ID NO: 2464022 - RNA, 19 nt, Artificial Sequence
  Description of Artificial Sequence: Synthetic oligonucleotide
cuucgacaacaagaaugac

SEQ ID NO: 2464023 - RNA, 19 nt, Artificial Sequence
  Description of Artificial Sequence: Synthetic oligonucleotide
gcugugaaugugaaagaca

SEQ ID NO: 2464024 - RNA, 19 nt, Artificial Sequence
  Description of Artificial Sequence: Synthetic oligonucleotide
gaaccuacuuucuccuaau

SEQ ID NO: 2464025 - RNA, 19 nt, Artificial Sequence
  Description of Artificial Sequence: Synthetic oligonucleotide
cuuaccugaguggccuuuc

SEQ ID NO: 2464026 - RNA, 19 nt, Artificial Sequence
  Description of Artificial Sequence: Synthetic oligonucleotide
uagcauuacugagguaguu

SEQ ID NO: 2464027 - RNA, 19 nt, Artificial Sequence
  Description of Artificial Sequence: Synthetic oligonucleotide
ucuuaccugaguggccuuu

SEQ ID NO: 2464028 - RNA, 19 nt, Artificial Sequence
  Description of Artificial Sequence: Synthetic oligonucleotide
aguguguucuuuagcuuuu

SEQ ID NO: 2464029 - RNA, 19 nt, Artificial Sequence
  Description of Artificial Sequence: Synthetic oligonucleotide
guacacauuuaaugauggu

SEQ ID NO: 2464030 - RNA, 19 nt, Artificial Sequence
  Description of Artificial Sequence: Synthetic oligonucleotide
aucaauccaguguguucuu

SEQ ID NO: 2464031 - RNA, 19 nt, Artificial Sequence
  Description of Artificial Sequence: Synthetic oligonucleotide
ggacugaguguucuuaccu

SEQ ID NO: 2464032 - RNA, 19 nt, Artificial Sequence
  Description of Artificial Sequence: Synthetic oligonucleotide
auccaauuagcagccuuuu

SEQ ID NO: 2464033 - RNA, 19 nt, Artificial Sequence
  Description of Artificial Sequence: Synthetic oligonucleotide
gugaaagcaacuacaguuu

SEQ ID NO: 2464034 - RNA, 19 nt, Artificial Sequence
  Description of Artificial Sequence: Synthetic oligonucleotide
gguaugcagcaauauucaa

SEQ ID NO: 2464035 - RNA, 19 nt, Artificial Sequence
  Description of Artificial Sequence: Synthetic oligonucleotide
caguguguucuuuagcuuu

SEQ ID NO: 2464036 - RNA, 19 nt, Artificial Sequence
  Description of Artificial Sequence: Synthetic oligonucleotide
ccaaccccaagcuaacuga

SEQ ID NO: 2464037 - RNA, 19 nt, Artificial Sequence
  Description of Artificial Sequence: Synthetic oligonucleotide
gcuguguguaguuagucau

SEQ ID NO: 2464038 - RNA, 19 nt, Artificial Sequence
  Description of Artificial Sequence: Synthetic oligonucleotide
augauuccccagccuccca

SEQ ID NO: 2464039 - RNA, 19 nt, Artificial Sequence
  Description of Artificial Sequence: Synthetic oligonucleotide
cccaaccccaagcuaacug

SEQ ID NO: 2464040 - RNA, 19 nt, Artificial Sequence
  Description of Artificial Sequence: Synthetic oligonucleotide
cacguugcugggugcugug

SEQ ID NO: 2464041 - RNA, 19 nt, Artificial Sequence
  Description of Artificial Sequence: Synthetic oligonucleotide
cuggcuguuguuucaaguu

SEQ ID NO: 2464042 - RNA, 19 nt, Artificial Sequence
  Description of Artificial Sequence: Synthetic oligonucleotide
gucauagcacaguauuauu

SEQ ID NO: 2464043 - RNA, 19 nt, Artificial Sequence
  Description of Artificial Sequence: Synthetic oligonucleotide
ccccaaaaggaucaaucca

SEQ ID NO: 2464044 - RNA, 19 nt, Artificial Sequence
  Description of Artificial Sequence: Synthetic oligonucleotide
guuagucauagcacaguau

SEQ ID NO: 2464045 - RNA, 19 nt, Artificial Sequence
  Description of Artificial Sequence: Synthetic oligonucleotide
ccauacucgcuguguguag

SEQ ID NO: 2464046 - RNA, 19 nt, Artificial Sequence
  Description of Artificial Sequence: Synthetic oligonucleotide
uucuuaccugaguggccuu

SEQ ID NO: 2464047 - RNA, 19 nt, Artificial Sequence
  Description of Artificial Sequence: Synthetic oligonucleotide
acuuagcaccauacucgcu

SEQ ID NO: 2464048 - RNA, 19 nt, Artificial Sequence
  Description of Artificial Sequence: Synthetic oligonucleotide
ccaaucaauaaaagcauuu

SEQ ID NO: 2464049 - RNA, 19 nt, Artificial Sequence
  Description of Artificial Sequence: Synthetic oligonucleotide
gggacucugguuaaguccu

SEQ ID NO: 2464050 - RNA, 19 nt, Artificial Sequence
  Description of Artificial Sequence: Synthetic oligonucleotide
gcuaacugauguugaguua

SEQ ID NO: 2464051 - RNA, 19 nt, Artificial Sequence
  Description of Artificial Sequence: Synthetic oligonucleotide
cccaacccaguccguaccc

SEQ ID NO: 2464052 - RNA, 19 nt, Artificial Sequence
  Description of Artificial Sequence: Synthetic oligonucleotide
guacuugaauaguguuuau

SEQ ID NO: 2464053 - RNA, 19 nt, Artificial Sequence
  Description of Artificial Sequence: Synthetic oligonucleotide
cauacucgcuguguguagu

SEQ ID NO: 2464054 - RNA, 19 nt, Artificial Sequence
  Description of Artificial Sequence: Synthetic oligonucleotide
ccaauagcuuacauucaua

SEQ ID NO: 2464055 - RNA, 19 nt, Artificial Sequence
  Description of Artificial Sequence: Synthetic oligonucleotide
caccauacucgcugugugu

SEQ ID NO: 2464056 - RNA, 19 nt, Artificial Sequence
  Description of Artificial Sequence: Synthetic oligonucleotide
cuaucccaauagcuuacau

SEQ ID NO: 2464057 - RNA, 19 nt, Artificial Sequence
  Description of Artificial Sequence: Synthetic oligonucleotide
ccaaaaggaucaauccagu

SEQ ID NO: 2464058 - RNA, 19 nt, Artificial Sequence
  Description of Artificial Sequence: Synthetic oligonucleotide
accuggguaugcagcaaua

SEQ ID NO: 2464059 - RNA, 19 nt, Artificial Sequence
  Description of Artificial Sequence: Synthetic oligonucleotide
ccaacccaguccguacccc

SEQ ID NO: 2464060 - RNA, 19 nt, Artificial Sequence
  Description of Artificial Sequence: Synthetic oligonucleotide
caguauuauuuugguuugu

SEQ ID NO: 2464061 - RNA, 19 nt, Artificial Sequence
  Description of Artificial Sequence: Synthetic oligonucleotide
cccaauagcuuacauucau

SEQ ID NO: 2464062 - RNA, 19 nt, Artificial Sequence
  Description of Artificial Sequence: Synthetic oligonucleotide
cagccucccaccuggguau

SEQ ID NO: 2464063 - RNA, 19 nt, Artificial Sequence
  Description of Artificial Sequence: Synthetic oligonucleotide
gacucugguuaaguccuuu

SEQ ID NO: 2464064 - RNA, 19 nt, Artificial Sequence
  Description of Artificial Sequence: Synthetic oligonucleotide
caccuggguaugcagcaau

SEQ ID NO: 2464065 - RNA, 19 nt, Artificial Sequence
  Description of Artificial Sequence: Synthetic oligonucleotide
gggugcugugaaugugaaa

SEQ ID NO: 2464066 - RNA, 19 nt, Artificial Sequence
  Description of Artificial Sequence: Synthetic oligonucleotide
cacaggcacuggcuguugu

SEQ ID NO: 2464067 - RNA, 19 nt, Artificial Sequence
  Description of Artificial Sequence: Synthetic oligonucleotide
agccucccaccuggguaug

SEQ ID NO: 2464068 - RNA, 19 nt, Artificial Sequence
  Description of Artificial Sequence: Synthetic oligonucleotide
cguugcugggugcugugaa

SEQ ID NO: 2464069 - RNA, 19 nt, Artificial Sequence
  Description of Artificial Sequence: Synthetic oligonucleotide
ggauuccacguugcugggu

SEQ ID NO: 2464070 - RNA, 19 nt, Artificial Sequence
  Description of Artificial Sequence: Synthetic oligonucleotide
ccuggguaugcagcaauau

SEQ ID NO: 2464071 - RNA, 19 nt, Artificial Sequence
  Description of Artificial Sequence: Synthetic oligonucleotide
ccccaagcuaacugauguu

SEQ ID NO: 2464072 - RNA, 19 nt, Artificial Sequence
  Description of Artificial Sequence: Synthetic oligonucleotide
ccacguugcugggugcugu

SEQ ID NO: 2464073 - RNA, 19 nt, Artificial Sequence
  Description of Artificial Sequence: Synthetic oligonucleotide
ggacucugguuaaguccuu

SEQ ID NO: 2464074 - RNA, 19 nt, Artificial Sequence
  Description of Artificial Sequence: Synthetic oligonucleotide
aaauauagaaacuauguau

SEQ ID NO: 2464075 - RNA, 19 nt, Artificial Sequence
  Description of Artificial Sequence: Synthetic oligonucleotide
aauaucagucugcagggcc

SEQ ID NO: 2464076 - RNA, 19 nt, Artificial Sequence
  Description of Artificial Sequence: Synthetic oligonucleotide
aacuauguauaaaauaagc

SEQ ID NO: 2464077 - RNA, 19 nt, Artificial Sequence
  Description of Artificial Sequence: Synthetic oligonucleotide
uaauguaagaggcagcccg

SEQ ID NO: 2464078 - RNA, 19 nt, Artificial Sequence
  Description of Artificial Sequence: Synthetic oligonucleotide
ucuagcuaauguaagaggc

SEQ ID NO: 2464079 - RNA, 19 nt, Artificial Sequence
  Description of Artificial Sequence: Synthetic oligonucleotide
acuauguauaaaauaagcc

SEQ ID NO: 2464080 - RNA, 19 nt, Artificial Sequence
  Description of Artificial Sequence: Synthetic oligonucleotide
auaaauuacgcgcacuuuc

SEQ ID NO: 2464081 - RNA, 19 nt, Artificial Sequence
  Description of Artificial Sequence: Synthetic oligonucleotide
cuguguauaaauuacgcgc

SEQ ID NO: 2464082 - RNA, 19 nt, Artificial Sequence
  Description of Artificial Sequence: Synthetic oligonucleotide
auucauacggcucaccacg

SEQ ID NO: 2464083 - RNA, 19 nt, Artificial Sequence
  Description of Artificial Sequence: Synthetic oligonucleotide
agccgagacacauucaugc

SEQ ID NO: 2464084 - RNA, 19 nt, Artificial Sequence
  Description of Artificial Sequence: Synthetic oligonucleotide
ucugaugugaucccaaacu

SEQ ID NO: 2464085 - RNA, 19 nt, Artificial Sequence
  Description of Artificial Sequence: Synthetic oligonucleotide
aguuucauaaugcuucuag

SEQ ID NO: 2464086 - RNA, 19 nt, Artificial Sequence
  Description of Artificial Sequence: Synthetic oligonucleotide
aauuacgcgcacuuucuuc

SEQ ID NO: 2464087 - RNA, 19 nt, Artificial Sequence
  Description of Artificial Sequence: Synthetic oligonucleotide
uguguauaaauuacgcgca

SEQ ID NO: 2464088 - RNA, 19 nt, Artificial Sequence
  Description of Artificial Sequence: Synthetic oligonucleotide
acuaagccgagacacauuc

SEQ ID NO: 2464089 - RNA, 19 nt, Artificial Sequence
  Description of Artificial Sequence: Synthetic oligonucleotide
auacuuucuagccgggugc

SEQ ID NO: 2464090 - RNA, 19 nt, Artificial Sequence
  Description of Artificial Sequence: Synthetic oligonucleotide
aaugcuucuagcuaaugua

SEQ ID NO: 2464091 - RNA, 19 nt, Artificial Sequence
  Description of Artificial Sequence: Synthetic oligonucleotide
uaagccaguuucauaaugc

SEQ ID NO: 2464092 - RNA, 19 nt, Artificial Sequence
  Description of Artificial Sequence: Synthetic oligonucleotide
cucauccucauucauacgg

SEQ ID NO: 2464093 - RNA, 19 nt, Artificial Sequence
  Description of Artificial Sequence: Synthetic oligonucleotide
aaagcuuuggauugccuga

SEQ ID NO: 2464094 - RNA, 19 nt, Artificial Sequence
  Description of Artificial Sequence: Synthetic oligonucleotide
uucuagcuaauguaagagg

SEQ ID NO: 2464095 - RNA, 19 nt, Artificial Sequence
  Description of Artificial Sequence: Synthetic oligonucleotide
ugagcuguguauaaauuac

SEQ ID NO: 2464096 - RNA, 19 nt, Artificial Sequence
  Description of Artificial Sequence: Synthetic oligonucleotide
acauucaugcuaucugggc

SEQ ID NO: 2464097 - RNA, 19 nt, Artificial Sequence
  Description of Artificial Sequence: Synthetic oligonucleotide
uucaggagguuccagagcu

SEQ ID NO: 2464098 - RNA, 19 nt, Artificial Sequence
  Description of Artificial Sequence: Synthetic oligonucleotide
acacauucaugcuaucugg

SEQ ID NO: 2464099 - RNA, 19 nt, Artificial Sequence
  Description of Artificial Sequence: Synthetic oligonucleotide
gaugugaucccaaacucgg

SEQ ID NO: 2464100 - RNA, 19 nt, Artificial Sequence
  Description of Artificial Sequence: Synthetic oligonucleotide
uggucuugcguuuucacag

SEQ ID NO: 2464101 - RNA, 19 nt, Artificial Sequence
  Description of Artificial Sequence: Synthetic oligonucleotide
aaguccacaauaucagucu

SEQ ID NO: 2464102 - RNA, 19 nt, Artificial Sequence
  Description of Artificial Sequence: Synthetic oligonucleotide
ucugaguaauguuacaaaa

SEQ ID NO: 2464103 - RNA, 19 nt, Artificial Sequence
  Description of Artificial Sequence: Synthetic oligonucleotide
cuucuauagaguucccucg

SEQ ID NO: 2464104 - RNA, 19 nt, Artificial Sequence
  Description of Artificial Sequence: Synthetic oligonucleotide
cauaucugaguaauguuac

SEQ ID NO: 2464105 - RNA, 19 nt, Artificial Sequence
  Description of Artificial Sequence: Synthetic oligonucleotide
uaaugcuucuagcuaaugu

SEQ ID NO: 2464106 - RNA, 19 nt, Artificial Sequence
  Description of Artificial Sequence: Synthetic oligonucleotide
ucauaaugcuucuagcuaa

SEQ ID NO: 2464107 - RNA, 19 nt, Artificial Sequence
  Description of Artificial Sequence: Synthetic oligonucleotide
uaaauuacgcgcacuuucu

SEQ ID NO: 2464108 - RNA, 19 nt, Artificial Sequence
  Description of Artificial Sequence: Synthetic oligonucleotide
uuucacagugucuugcagc

SEQ ID NO: 2464109 - RNA, 19 nt, Artificial Sequence
  Description of Artificial Sequence: Synthetic oligonucleotide
ucuagccgggugcagaggg

SEQ ID NO: 2464110 - RNA, 19 nt, Artificial Sequence
  Description of Artificial Sequence: Synthetic oligonucleotide
gauugccugaaguagcagc

SEQ ID NO: 2464111 - RNA, 19 nt, Artificial Sequence
  Description of Artificial Sequence: Synthetic oligonucleotide
uauagaguucccucgcuug

SEQ ID NO: 2464112 - RNA, 19 nt, Artificial Sequence
  Description of Artificial Sequence: Synthetic oligonucleotide
ucuucuauagaguucccuc

SEQ ID NO: 2464113 - RNA, 19 nt, Artificial Sequence
  Description of Artificial Sequence: Synthetic oligonucleotide
uucauaaugcuucuagcua

SEQ ID NO: 2464114 - RNA, 19 nt, Artificial Sequence
  Description of Artificial Sequence: Synthetic oligonucleotide
agcuguguauaaauuacgc

SEQ ID NO: 2464115 - RNA, 19 nt, Artificial Sequence
  Description of Artificial Sequence: Synthetic oligonucleotide
auugccugaaguagcagcc

SEQ ID NO: 2464116 - RNA, 19 nt, Artificial Sequence
  Description of Artificial Sequence: Synthetic oligonucleotide
acauuagcugaccagggug

SEQ ID NO: 2464117 - RNA, 19 nt, Artificial Sequence
  Description of Artificial Sequence: Synthetic oligonucleotide
aaaauaagccaguuucaua

SEQ ID NO: 2464118 - RNA, 19 nt, Artificial Sequence
  Description of Artificial Sequence: Synthetic oligonucleotide
ugucacaggcacuggacgg

SEQ ID NO: 2464119 - RNA, 19 nt, Artificial Sequence
  Description of Artificial Sequence: Synthetic oligonucleotide
ucuuggcugagucagguaa

SEQ ID NO: 2464120 - RNA, 19 nt, Artificial Sequence
  Description of Artificial Sequence: Synthetic oligonucleotide
uccucauucauacggcuca

SEQ ID NO: 2464121 - RNA, 19 nt, Artificial Sequence
  Description of Artificial Sequence: Synthetic oligonucleotide
auacauaucugaguaaugu

SEQ ID NO: 2464122 - RNA, 19 nt, Artificial Sequence
  Description of Artificial Sequence: Synthetic oligonucleotide
agggugacuaagccgagac

SEQ ID NO: 2464123 - RNA, 19 nt, Artificial Sequence
  Description of Artificial Sequence: Synthetic oligonucleotide
cuuuucuuggcugagucag

SEQ ID NO: 2464124 - RNA, 19 nt, Artificial Sequence
  Description of Artificial Sequence: Synthetic oligonucleotide
uuggauugccugaaguagc

SEQ ID NO: 2464125 - RNA, 19 nt, Artificial Sequence
  Description of Artificial Sequence: Synthetic oligonucleotide
ucugacuuugcuacaggca

SEQ ID NO: 2464126 - RNA, 19 nt, Artificial Sequence
  Description of Artificial Sequence: Synthetic oligonucleotide
cugacugucaccaucuguc

SEQ ID NO: 2464127 - RNA, 19 nt, Artificial Sequence
  Description of Artificial Sequence: Synthetic oligonucleotide
uucuauagaguucccucgc

SEQ ID NO: 2464128 - RNA, 19 nt, Artificial Sequence
  Description of Artificial Sequence: Synthetic oligonucleotide
cagcauacuuucuagccgg

SEQ ID NO: 2464129 - RNA, 19 nt, Artificial Sequence
  Description of Artificial Sequence: Synthetic oligonucleotide
auaagccaguuucauaaug

SEQ ID NO: 2464130 - RNA, 19 nt, Artificial Sequence
  Description of Artificial Sequence: Synthetic oligonucleotide
uagcuaauguaagaggcag

SEQ ID NO: 2464131 - RNA, 19 nt, Artificial Sequence
  Description of Artificial Sequence: Synthetic oligonucleotide
auauagaaacuauguauaa

SEQ ID NO: 2464132 - RNA, 19 nt, Artificial Sequence
  Description of Artificial Sequence: Synthetic oligonucleotide
auuacgcgcacuuucuucu

SEQ ID NO: 2464133 - RNA, 19 nt, Artificial Sequence
  Description of Artificial Sequence: Synthetic oligonucleotide
caaagcuuuggauugccug

SEQ ID NO: 2464134 - RNA, 19 nt, Artificial Sequence
  Description of Artificial Sequence: Synthetic oligonucleotide
cagucuucuauagaguucc

SEQ ID NO: 2464135 - RNA, 19 nt, Artificial Sequence
  Description of Artificial Sequence: Synthetic oligonucleotide
uaagccgagacacauucau

SEQ ID NO: 2464136 - RNA, 19 nt, Artificial Sequence
  Description of Artificial Sequence: Synthetic oligonucleotide
aagccaguuucauaaugcu

SEQ ID NO: 2464137 - RNA, 19 nt, Artificial Sequence
  Description of Artificial Sequence: Synthetic oligonucleotide
ucugcuuacagaccacggu

SEQ ID NO: 2464138 - RNA, 19 nt, Artificial Sequence
  Description of Artificial Sequence: Synthetic oligonucleotide
agccgaaccauuuccugac

SEQ ID NO: 2464139 - RNA, 19 nt, Artificial Sequence
  Description of Artificial Sequence: Synthetic oligonucleotide
ucuguaaguccacaauauc

SEQ ID NO: 2464140 - RNA, 19 nt, Artificial Sequence
  Description of Artificial Sequence: Synthetic oligonucleotide
cuucacgucauccucccgc

SEQ ID NO: 2464141 - RNA, 19 nt, Artificial Sequence
  Description of Artificial Sequence: Synthetic oligonucleotide
gcuguguauaaauuacgcg

SEQ ID NO: 2464142 - RNA, 19 nt, Artificial Sequence
  Description of Artificial Sequence: Synthetic oligonucleotide
uuuucuuggcugagucagg

SEQ ID NO: 2464143 - RNA, 19 nt, Artificial Sequence
  Description of Artificial Sequence: Synthetic oligonucleotide
cauacuuucuagccgggug

SEQ ID NO: 2464144 - RNA, 19 nt, Artificial Sequence
  Description of Artificial Sequence: Synthetic oligonucleotide
ugaccagggugacuaagcc

SEQ ID NO: 2464145 - RNA, 19 nt, Artificial Sequence
  Description of Artificial Sequence: Synthetic oligonucleotide
accacgguuuuacugagcu

SEQ ID NO: 2464146 - RNA, 19 nt, Artificial Sequence
  Description of Artificial Sequence: Synthetic oligonucleotide
gugccuucugcuuacagac

SEQ ID NO: 2464147 - RNA, 19 nt, Artificial Sequence
  Description of Artificial Sequence: Synthetic oligonucleotide
ugggacauuagcugaccag

SEQ ID NO: 2464148 - RNA, 19 nt, Artificial Sequence
  Description of Artificial Sequence: Synthetic oligonucleotide
uccacaauaucagucugca

SEQ ID NO: 2464149 - RNA, 19 nt, Artificial Sequence
  Description of Artificial Sequence: Synthetic oligonucleotide
uuuucugaugugaucccaa

SEQ ID NO: 2464150 - RNA, 19 nt, Artificial Sequence
  Description of Artificial Sequence: Synthetic oligonucleotide
uuucuagccgggugcagag

SEQ ID NO: 2464151 - RNA, 19 nt, Artificial Sequence
  Description of Artificial Sequence: Synthetic oligonucleotide
gagggcgugugcuucagcc

SEQ ID NO: 2464152 - RNA, 19 nt, Artificial Sequence
  Description of Artificial Sequence: Synthetic oligonucleotide
ucuaccuggggcagcaacu

SEQ ID NO: 2464153 - RNA, 19 nt, Artificial Sequence
  Description of Artificial Sequence: Synthetic oligonucleotide
uggauugccugaaguagca

SEQ ID NO: 2464154 - RNA, 19 nt, Artificial Sequence
  Description of Artificial Sequence: Synthetic oligonucleotide
gagcuguguauaaauuacg

SEQ ID NO: 2464155 - RNA, 19 nt, Artificial Sequence
  Description of Artificial Sequence: Synthetic oligonucleotide
cucugacuuugcuacaggc

SEQ ID NO: 2464156 - RNA, 19 nt, Artificial Sequence
  Description of Artificial Sequence: Synthetic oligonucleotide
uuacagaccacgguuuuac

SEQ ID NO: 2464157 - RNA, 19 nt, Artificial Sequence
  Description of Artificial Sequence: Synthetic oligonucleotide
uccaccagacgcuucacgu

SEQ ID NO: 2464158 - RNA, 19 nt, Artificial Sequence
  Description of Artificial Sequence: Synthetic oligonucleotide
uguauaaauuacgcgcacu

SEQ ID NO: 2464159 - RNA, 19 nt, Artificial Sequence
  Description of Artificial Sequence: Synthetic oligonucleotide
ucuauagaguucccucgcu

SEQ ID NO: 2464160 - RNA, 19 nt, Artificial Sequence
  Description of Artificial Sequence: Synthetic oligonucleotide
uucugaugugaucccaaac

SEQ ID NO: 2464161 - RNA, 19 nt, Artificial Sequence
  Description of Artificial Sequence: Synthetic oligonucleotide
cacgucuucuaccuggggc

SEQ ID NO: 2464162 - RNA, 19 nt, Artificial Sequence
  Description of Artificial Sequence: Synthetic oligonucleotide
gugugcuucagccaccagc

SEQ ID NO: 2464163 - RNA, 19 nt, Artificial Sequence
  Description of Artificial Sequence: Synthetic oligonucleotide
ucagucuucuauagaguuc

SEQ ID NO: 2464164 - RNA, 19 nt, Artificial Sequence
  Description of Artificial Sequence: Synthetic oligonucleotide
gucagguaagcugucacag

SEQ ID NO: 2464165 - RNA, 19 nt, Artificial Sequence
  Description of Artificial Sequence: Synthetic oligonucleotide
cugaaggcggaccacaguc

SEQ ID NO: 2464166 - RNA, 19 nt, Artificial Sequence
  Description of Artificial Sequence: Synthetic oligonucleotide
acggcugggacauuagcug

SEQ ID NO: 2464167 - RNA, 19 nt, Artificial Sequence
  Description of Artificial Sequence: Synthetic oligonucleotide
cugaugugaucccaaacuc

SEQ ID NO: 2464168 - RNA, 19 nt, Artificial Sequence
  Description of Artificial Sequence: Synthetic oligonucleotide
uguaagaggcagcccguga

SEQ ID NO: 2464169 - RNA, 19 nt, Artificial Sequence
  Description of Artificial Sequence: Synthetic oligonucleotide
uuuuacugagcuguguaua

SEQ ID NO: 2464170 - RNA, 19 nt, Artificial Sequence
  Description of Artificial Sequence: Synthetic oligonucleotide
uacauaucugaguaauguu

SEQ ID NO: 2464171 - RNA, 19 nt, Artificial Sequence
  Description of Artificial Sequence: Synthetic oligonucleotide
ugcguuuucacagugucuu

SEQ ID NO: 2464172 - RNA, 19 nt, Artificial Sequence
  Description of Artificial Sequence: Synthetic oligonucleotide
agugucuugcagcauacuu

SEQ ID NO: 2464173 - RNA, 19 nt, Artificial Sequence
  Description of Artificial Sequence: Synthetic oligonucleotide
gcagcauacuuucuagccg

SEQ ID NO: 2464174 - RNA, 19 nt, Artificial Sequence
  Description of Artificial Sequence: Synthetic oligonucleotide
aacucggucugcucuuugu

SEQ ID NO: 2464175 - RNA, 19 nt, Artificial Sequence
  Description of Artificial Sequence: Synthetic oligonucleotide
gcuaauguaagaggcagcc

SEQ ID NO: 2464176 - RNA, 19 nt, Artificial Sequence
  Description of Artificial Sequence: Synthetic oligonucleotide
auaucugaguaauguuaca

SEQ ID NO: 2464177 - RNA, 19 nt, Artificial Sequence
  Description of Artificial Sequence: Synthetic oligonucleotide
acauaucugaguaauguua

SEQ ID NO: 2464178 - RNA, 19 nt, Artificial Sequence
  Description of Artificial Sequence: Synthetic oligonucleotide
uucacgucauccucccgcc

SEQ ID NO: 2464179 - RNA, 19 nt, Artificial Sequence
  Description of Artificial Sequence: Synthetic oligonucleotide
ucaccaucuguccucuggu

SEQ ID NO: 2464180 - RNA, 19 nt, Artificial Sequence
  Description of Artificial Sequence: Synthetic oligonucleotide
gggacauuagcugaccagg

SEQ ID NO: 2464181 - RNA, 19 nt, Artificial Sequence
  Description of Artificial Sequence: Synthetic oligonucleotide
auagaguucccucgcuugu

SEQ ID NO: 2464182 - RNA, 19 nt, Artificial Sequence
  Description of Artificial Sequence: Synthetic oligonucleotide
aaauuacgcgcacuuucuu

SEQ ID NO: 2464183 - RNA, 19 nt, Artificial Sequence
  Description of Artificial Sequence: Synthetic oligonucleotide
uggucucuaggccucuccc

SEQ ID NO: 2464184 - RNA, 19 nt, Artificial Sequence
  Description of Artificial Sequence: Synthetic oligonucleotide
auucaugcuaucugggcuu

SEQ ID NO: 2464185 - RNA, 19 nt, Artificial Sequence
  Description of Artificial Sequence: Synthetic oligonucleotide
agcuaauguaagaggcagc

SEQ ID NO: 2464186 - RNA, 19 nt, Artificial Sequence
  Description of Artificial Sequence: Synthetic oligonucleotide
ucuugcguuuucacagugu

SEQ ID NO: 2464187 - RNA, 19 nt, Artificial Sequence
  Description of Artificial Sequence: Synthetic oligonucleotide
gagucagguaagcugucac

SEQ ID NO: 2464188 - RNA, 19 nt, Artificial Sequence
  Description of Artificial Sequence: Synthetic oligonucleotide
ugaaggcggaccacagucu

SEQ ID NO: 2464189 - RNA, 19 nt, Artificial Sequence
  Description of Artificial Sequence: Synthetic oligonucleotide
cugacuuugcuacaggcaa

SEQ ID NO: 2464190 - RNA, 19 nt, Artificial Sequence
  Description of Artificial Sequence: Synthetic oligonucleotide
cuagcuaauguaagaggca

SEQ ID NO: 2464191 - RNA, 19 nt, Artificial Sequence
  Description of Artificial Sequence: Synthetic oligonucleotide
ucaaagcuuuggauugccu

SEQ ID NO: 2464192 - RNA, 19 nt, Artificial Sequence
  Description of Artificial Sequence: Synthetic oligonucleotide
uugcuacaggcaaucuuca

SEQ ID NO: 2464193 - RNA, 19 nt, Artificial Sequence
  Description of Artificial Sequence: Synthetic oligonucleotide
uaucugggcuuccacugac

SEQ ID NO: 2464194 - RNA, 19 nt, Artificial Sequence
  Description of Artificial Sequence: Synthetic oligonucleotide
cacuuuucuuggcugaguc

SEQ ID NO: 2464195 - RNA, 19 nt, Artificial Sequence
  Description of Artificial Sequence: Synthetic oligonucleotide
cugcuuccgacccaucggg

SEQ ID NO: 2464196 - RNA, 19 nt, Artificial Sequence
  Description of Artificial Sequence: Synthetic oligonucleotide
cagaccacgguuuuacuga

SEQ ID NO: 2464197 - RNA, 19 nt, Artificial Sequence
  Description of Artificial Sequence: Synthetic oligonucleotide
cauuagcugaccaggguga

SEQ ID NO: 2464198 - RNA, 19 nt, Artificial Sequence
  Description of Artificial Sequence: Synthetic oligonucleotide
gacuggaccucugacuuug

SEQ ID NO: 2464199 - RNA, 19 nt, Artificial Sequence
  Description of Artificial Sequence: Synthetic oligonucleotide
ugccugaaguagcagccga

SEQ ID NO: 2464200 - RNA, 19 nt, Artificial Sequence
  Description of Artificial Sequence: Synthetic oligonucleotide
ugcuacaggcaaucuucag

SEQ ID NO: 2464201 - RNA, 19 nt, Artificial Sequence
  Description of Artificial Sequence: Synthetic oligonucleotide
gacgcuucacgucauccuc

SEQ ID NO: 2464202 - RNA, 19 nt, Artificial Sequence
  Description of Artificial Sequence: Synthetic oligonucleotide
augcuaucugggcuuccac

SEQ ID NO: 2464203 - RNA, 19 nt, Artificial Sequence
  Description of Artificial Sequence: Synthetic oligonucleotide
auuagcugaccagggugac

SEQ ID NO: 2464204 - RNA, 19 nt, Artificial Sequence
  Description of Artificial Sequence: Synthetic oligonucleotide
ugcuuacagaccacgguuu

SEQ ID NO: 2464205 - RNA, 19 nt, Artificial Sequence
  Description of Artificial Sequence: Synthetic oligonucleotide
aaacucggucugcucuuug

SEQ ID NO: 2464206 - RNA, 19 nt, Artificial Sequence
  Description of Artificial Sequence: Synthetic oligonucleotide
agacacauucaugcuaucu

SEQ ID NO: 2464207 - RNA, 19 nt, Artificial Sequence
  Description of Artificial Sequence: Synthetic oligonucleotide
ugacuaagccgagacacau

SEQ ID NO: 2464208 - RNA, 19 nt, Artificial Sequence
  Description of Artificial Sequence: Synthetic oligonucleotide
cuaauguaagaggcagccc

SEQ ID NO: 2464209 - RNA, 19 nt, Artificial Sequence
  Description of Artificial Sequence: Synthetic oligonucleotide
ugccgcuucuccugaaggc

SEQ ID NO: 2464210 - RNA, 19 nt, Artificial Sequence
  Description of Artificial Sequence: Synthetic oligonucleotide
guguauaaauuacgcgcac

SEQ ID NO: 2464211 - RNA, 19 nt, Artificial Sequence
  Description of Artificial Sequence: Synthetic oligonucleotide
cucggucugcucuuuguac

SEQ ID NO: 2464212 - RNA, 19 nt, Artificial Sequence
  Description of Artificial Sequence: Synthetic oligonucleotide
uugcguuuucacagugucu

SEQ ID NO: 2464213 - RNA, 19 nt, Artificial Sequence
  Description of Artificial Sequence: Synthetic oligonucleotide
cucccucagucuucuauag

SEQ ID NO: 2464214 - RNA, 19 nt, Artificial Sequence
  Description of Artificial Sequence: Synthetic oligonucleotide
uggaccucugacuuugcua

SEQ ID NO: 2464215 - RNA, 19 nt, Artificial Sequence
  Description of Artificial Sequence: Synthetic oligonucleotide
uucauacggcucaccacgu

SEQ ID NO: 2464216 - RNA, 19 nt, Artificial Sequence
  Description of Artificial Sequence: Synthetic oligonucleotide
ucgcuuguuccucuagguc

SEQ ID NO: 2464217 - RNA, 19 nt, Artificial Sequence
  Description of Artificial Sequence: Synthetic oligonucleotide
uugccugaaguagcagccg

SEQ ID NO: 2464218 - RNA, 19 nt, Artificial Sequence
  Description of Artificial Sequence: Synthetic oligonucleotide
cugggcuuccacugacugg

SEQ ID NO: 2464219 - RNA, 19 nt, Artificial Sequence
  Description of Artificial Sequence: Synthetic oligonucleotide
gacuuugcuacaggcaauc

SEQ ID NO: 2464220 - RNA, 19 nt, Artificial Sequence
  Description of Artificial Sequence: Synthetic oligonucleotide
ugacuuugcuacaggcaau

SEQ ID NO: 2464221 - RNA, 19 nt, Artificial Sequence
  Description of Artificial Sequence: Synthetic oligonucleotide
uagcugaccagggugacua

SEQ ID NO: 2464222 - RNA, 19 nt, Artificial Sequence
  Description of Artificial Sequence: Synthetic oligonucleotide
cuaggucauccagagugcc

SEQ ID NO: 2464223 - RNA, 19 nt, Artificial Sequence
  Description of Artificial Sequence: Synthetic oligonucleotide
guauaaauuacgcgcacuu

SEQ ID NO: 2464224 - RNA, 19 nt, Artificial Sequence
  Description of Artificial Sequence: Synthetic oligonucleotide
acgcuucacgucauccucc

SEQ ID NO: 2464225 - RNA, 19 nt, Artificial Sequence
  Description of Artificial Sequence: Synthetic oligonucleotide
auccucauucauacggcuc

SEQ ID NO: 2464226 - RNA, 19 nt, Artificial Sequence
  Description of Artificial Sequence: Synthetic oligonucleotide
ugagucagguaagcuguca

SEQ ID NO: 2464227 - RNA, 19 nt, Artificial Sequence
  Description of Artificial Sequence: Synthetic oligonucleotide
guaagaggcagcccgugaa

SEQ ID NO: 2464228 - RNA, 19 nt, Artificial Sequence
  Description of Artificial Sequence: Synthetic oligonucleotide
ucuguccucuggucucuag

SEQ ID NO: 2464229 - RNA, 19 nt, Artificial Sequence
  Description of Artificial Sequence: Synthetic oligonucleotide
agcccgugaagcugugguc

SEQ ID NO: 2464230 - RNA, 19 nt, Artificial Sequence
  Description of Artificial Sequence: Synthetic oligonucleotide
auaucagucugcagggcca

SEQ ID NO: 2464231 - RNA, 19 nt, Artificial Sequence
  Description of Artificial Sequence: Synthetic oligonucleotide
gcaaucuucaggagguucc

SEQ ID NO: 2464232 - RNA, 19 nt, Artificial Sequence
  Description of Artificial Sequence: Synthetic oligonucleotide
acgucauccucccgcccac

SEQ ID NO: 2464233 - RNA, 19 nt, Artificial Sequence
  Description of Artificial Sequence: Synthetic oligonucleotide
guggucuugcguuuucaca

SEQ ID NO: 2464234 - RNA, 19 nt, Artificial Sequence
  Description of Artificial Sequence: Synthetic oligonucleotide
agagggcgugugcuucagc

SEQ ID NO: 2464235 - RNA, 19 nt, Artificial Sequence
  Description of Artificial Sequence: Synthetic oligonucleotide
uggacggcugggacauuag

SEQ ID NO: 2464236 - RNA, 19 nt, Artificial Sequence
  Description of Artificial Sequence: Synthetic oligonucleotide
gucuugcguuuucacagug

SEQ ID NO: 2464237 - RNA, 19 nt, Artificial Sequence
  Description of Artificial Sequence: Synthetic oligonucleotide
aagccgagacacauucaug

SEQ ID NO: 2464238 - RNA, 19 nt, Artificial Sequence
  Description of Artificial Sequence: Synthetic oligonucleotide
uacuuucuagccgggugca

SEQ ID NO: 2464239 - RNA, 19 nt, Artificial Sequence
  Description of Artificial Sequence: Synthetic oligonucleotide
caucgggcuccucuguaag

SEQ ID NO: 2464240 - RNA, 19 nt, Artificial Sequence
  Description of Artificial Sequence: Synthetic oligonucleotide
cagacgcuucacgucaucc

SEQ ID NO: 2464241 - RNA, 19 nt, Artificial Sequence
  Description of Artificial Sequence: Synthetic oligonucleotide
ggacauuagcugaccaggg

SEQ ID NO: 2464242 - RNA, 19 nt, Artificial Sequence
  Description of Artificial Sequence: Synthetic oligonucleotide
uuacugagcuguguauaaa

SEQ ID NO: 2464243 - RNA, 19 nt, Artificial Sequence
  Description of Artificial Sequence: Synthetic oligonucleotide
uaggccucucccucagucu

SEQ ID NO: 2464244 - RNA, 19 nt, Artificial Sequence
  Description of Artificial Sequence: Synthetic oligonucleotide
ugcuuccgacccaucgggc

SEQ ID NO: 2464245 - RNA, 19 nt, Artificial Sequence
  Description of Artificial Sequence: Synthetic oligonucleotide
caauaucagucugcagggc

SEQ ID NO: 2464246 - RNA, 19 nt, Artificial Sequence
  Description of Artificial Sequence: Synthetic oligonucleotide
agucuucuauagaguuccc

SEQ ID NO: 2464247 - RNA, 19 nt, Artificial Sequence
  Description of Artificial Sequence: Synthetic oligonucleotide
gacccaucgggcuccucug

SEQ ID NO: 2464248 - RNA, 19 nt, Artificial Sequence
  Description of Artificial Sequence: Synthetic oligonucleotide
uacagaccacgguuuuacu

SEQ ID NO: 2464249 - RNA, 19 nt, Artificial Sequence
  Description of Artificial Sequence: Synthetic oligonucleotide
cacgguuuuacugagcugu

SEQ ID NO: 2464250 - RNA, 19 nt, Artificial Sequence
  Description of Artificial Sequence: Synthetic oligonucleotide
aaggcggaccacagucuuc

SEQ ID NO: 2464251 - RNA, 19 nt, Artificial Sequence
  Description of Artificial Sequence: Synthetic oligonucleotide
cacugacuggaccucugac

SEQ ID NO: 2464252 - RNA, 19 nt, Artificial Sequence
  Description of Artificial Sequence: Synthetic oligonucleotide
gacauuagcugaccagggu

SEQ ID NO: 2464253 - RNA, 19 nt, Artificial Sequence
  Description of Artificial Sequence: Synthetic oligonucleotide
caccagacgcuucacguca

SEQ ID NO: 2464254 - RNA, 19 nt, Artificial Sequence
  Description of Artificial Sequence: Synthetic oligonucleotide
guaaguccacaauaucagu

SEQ ID NO: 2464255 - RNA, 19 nt, Artificial Sequence
  Description of Artificial Sequence: Synthetic oligonucleotide
gcuuuucugaugugauccc

SEQ ID NO: 2464256 - RNA, 19 nt, Artificial Sequence
  Description of Artificial Sequence: Synthetic oligonucleotide
ucgggcuccucuguaaguc

SEQ ID NO: 2464257 - RNA, 19 nt, Artificial Sequence
  Description of Artificial Sequence: Synthetic oligonucleotide
gagguuccagagcuccuuc

SEQ ID NO: 2464258 - RNA, 19 nt, Artificial Sequence
  Description of Artificial Sequence: Synthetic oligonucleotide
uucuagccgggugcagagg

SEQ ID NO: 2464259 - RNA, 19 nt, Artificial Sequence
  Description of Artificial Sequence: Synthetic oligonucleotide
cucuguaaguccacaauau

SEQ ID NO: 2464260 - RNA, 19 nt, Artificial Sequence
  Description of Artificial Sequence: Synthetic oligonucleotide
ucacgucauccucccgccc

SEQ ID NO: 2464261 - RNA, 19 nt, Artificial Sequence
  Description of Artificial Sequence: Synthetic oligonucleotide
gucacaggcacuggacggc

SEQ ID NO: 2464262 - RNA, 19 nt, Artificial Sequence
  Description of Artificial Sequence: Synthetic oligonucleotide
aagcuguggucuugcguuu

SEQ ID NO: 2464263 - RNA, 19 nt, Artificial Sequence
  Description of Artificial Sequence: Synthetic oligonucleotide
aggcggaccacagucuucu

SEQ ID NO: 2464264 - RNA, 19 nt, Artificial Sequence
  Description of Artificial Sequence: Synthetic oligonucleotide
gccuucugcuuacagacca

SEQ ID NO: 2464265 - RNA, 19 nt, Artificial Sequence
  Description of Artificial Sequence: Synthetic oligonucleotide
cucauucauacggcucacc

SEQ ID NO: 2464266 - RNA, 19 nt, Artificial Sequence
  Description of Artificial Sequence: Synthetic oligonucleotide
cuagccgggugcagagggc

SEQ ID NO: 2464267 - RNA, 19 nt, Artificial Sequence
  Description of Artificial Sequence: Synthetic oligonucleotide
caacuccagugccuucugc

SEQ ID NO: 2464268 - RNA, 19 nt, Artificial Sequence
  Description of Artificial Sequence: Synthetic oligonucleotide
agcauacuuucuagccggg

SEQ ID NO: 2464269 - RNA, 19 nt, Artificial Sequence
  Description of Artificial Sequence: Synthetic oligonucleotide
accacgucuucuaccuggg

SEQ ID NO: 2464270 - RNA, 19 nt, Artificial Sequence
  Description of Artificial Sequence: Synthetic oligonucleotide
gugaucccaaacucggucu

SEQ ID NO: 2464271 - RNA, 19 nt, Artificial Sequence
  Description of Artificial Sequence: Synthetic oligonucleotide
cucagucuucuauagaguu

SEQ ID NO: 2464272 - RNA, 19 nt, Artificial Sequence
  Description of Artificial Sequence: Synthetic oligonucleotide
aguagcagccgaaccauuu

SEQ ID NO: 2464273 - RNA, 19 nt, Artificial Sequence
  Description of Artificial Sequence: Synthetic oligonucleotide
cacagugucuugcagcaua

SEQ ID NO: 2464274 - RNA, 19 nt, Artificial Sequence
  Description of Artificial Sequence: Synthetic oligonucleotide
aucgggcuccucuguaagu

SEQ ID NO: 2464275 - RNA, 19 nt, Artificial Sequence
  Description of Artificial Sequence: Synthetic oligonucleotide
cagccgaaccauuuccuga

SEQ ID NO: 2464276 - RNA, 19 nt, Artificial Sequence
  Description of Artificial Sequence: Synthetic oligonucleotide
cuuucuagccgggugcaga

SEQ ID NO: 2464277 - RNA, 19 nt, Artificial Sequence
  Description of Artificial Sequence: Synthetic oligonucleotide
agggcgugugcuucagcca

SEQ ID NO: 2464278 - RNA, 19 nt, Artificial Sequence
  Description of Artificial Sequence: Synthetic oligonucleotide
uuacgcgcacuuucuucuc

SEQ ID NO: 2464279 - RNA, 19 nt, Artificial Sequence
  Description of Artificial Sequence: Synthetic oligonucleotide
ccugcuuccgacccaucgg

SEQ ID NO: 2464280 - RNA, 19 nt, Artificial Sequence
  Description of Artificial Sequence: Synthetic oligonucleotide
uucaugcuaucugggcuuc

SEQ ID NO: 2464281 - RNA, 19 nt, Artificial Sequence
  Description of Artificial Sequence: Synthetic oligonucleotide
gacggcugggacauuagcu

SEQ ID NO: 2464282 - RNA, 19 nt, Artificial Sequence
  Description of Artificial Sequence: Synthetic oligonucleotide
gaaguagcagccgaaccau

SEQ ID NO: 2464283 - RNA, 19 nt, Artificial Sequence
  Description of Artificial Sequence: Synthetic oligonucleotide
cuaucugggcuuccacuga

SEQ ID NO: 2464284 - RNA, 19 nt, Artificial Sequence
  Description of Artificial Sequence: Synthetic oligonucleotide
uacggcucaccacgucuuc

SEQ ID NO: 2464285 - RNA, 19 nt, Artificial Sequence
  Description of Artificial Sequence: Synthetic oligonucleotide
cuaagccgagacacauuca

SEQ ID NO: 2464286 - RNA, 19 nt, Artificial Sequence
  Description of Artificial Sequence: Synthetic oligonucleotide
aucccaaacucggucugcu

SEQ ID NO: 2464287 - RNA, 19 nt, Artificial Sequence
  Description of Artificial Sequence: Synthetic oligonucleotide
acuuugcuacaggcaaucu

SEQ ID NO: 2464288 - RNA, 19 nt, Artificial Sequence
  Description of Artificial Sequence: Synthetic oligonucleotide
gagacacauucaugcuauc

SEQ ID NO: 2464289 - RNA, 19 nt, Artificial Sequence
  Description of Artificial Sequence: Synthetic oligonucleotide
cuaccuggggcagcaacuc

SEQ ID NO: 2464290 - RNA, 19 nt, Artificial Sequence
  Description of Artificial Sequence: Synthetic oligonucleotide
gcagccgaaccauuuccug

SEQ ID NO: 2464291 - RNA, 19 nt, Artificial Sequence
  Description of Artificial Sequence: Synthetic oligonucleotide
cacgucauccucccgccca

SEQ ID NO: 2464292 - RNA, 19 nt, Artificial Sequence
  Description of Artificial Sequence: Synthetic oligonucleotide
uggcugagucagguaagcu

SEQ ID NO: 2464293 - RNA, 19 nt, Artificial Sequence
  Description of Artificial Sequence: Synthetic oligonucleotide
acuuucuagccgggugcag

SEQ ID NO: 2464294 - RNA, 19 nt, Artificial Sequence
  Description of Artificial Sequence: Synthetic oligonucleotide
gcucaccacgucuucuacc

SEQ ID NO: 2464295 - RNA, 19 nt, Artificial Sequence
  Description of Artificial Sequence: Synthetic oligonucleotide
acuggaccucugacuuugc

SEQ ID NO: 2464296 - RNA, 19 nt, Artificial Sequence
  Description of Artificial Sequence: Synthetic oligonucleotide
cugacuggaccucugacuu

SEQ ID NO: 2464297 - RNA, 19 nt, Artificial Sequence
  Description of Artificial Sequence: Synthetic oligonucleotide
agcagccgaaccauuuccu

SEQ ID NO: 2464298 - RNA, 19 nt, Artificial Sequence
  Description of Artificial Sequence: Synthetic oligonucleotide
gggcgugugcuucagccac

SEQ ID NO: 2464299 - RNA, 19 nt, Artificial Sequence
  Description of Artificial Sequence: Synthetic oligonucleotide
ucuccugaaggcggaccac

SEQ ID NO: 2464300 - RNA, 19 nt, Artificial Sequence
  Description of Artificial Sequence: Synthetic oligonucleotide
ucccaaacucggucugcuc

SEQ ID NO: 2464301 - RNA, 19 nt, Artificial Sequence
  Description of Artificial Sequence: Synthetic oligonucleotide
ucaugcuaucugggcuucc

SEQ ID NO: 2464302 - RNA, 19 nt, Artificial Sequence
  Description of Artificial Sequence: Synthetic oligonucleotide
caugcuaucugggcuucca

SEQ ID NO: 2464303 - RNA, 19 nt, Artificial Sequence
  Description of Artificial Sequence: Synthetic oligonucleotide
gaccucugacuuugcuaca

SEQ ID NO: 2464304 - RNA, 19 nt, Artificial Sequence
  Description of Artificial Sequence: Synthetic oligonucleotide
cguuuucacagugucuugc

SEQ ID NO: 2464305 - RNA, 19 nt, Artificial Sequence
  Description of Artificial Sequence: Synthetic oligonucleotide
gaccacgguuuuacugagc

SEQ ID NO: 2464306 - RNA, 19 nt, Artificial Sequence
  Description of Artificial Sequence: Synthetic oligonucleotide
cauaaugcuucuagcuaau

SEQ ID NO: 2464307 - RNA, 19 nt, Artificial Sequence
  Description of Artificial Sequence: Synthetic oligonucleotide
ccaucuguccucuggucuc

SEQ ID NO: 2464308 - RNA, 19 nt, Artificial Sequence
  Description of Artificial Sequence: Synthetic oligonucleotide
cucgcuuguuccucuaggu

SEQ ID NO: 2464309 - RNA, 19 nt, Artificial Sequence
  Description of Artificial Sequence: Synthetic oligonucleotide
ggacggcugggacauuagc

SEQ ID NO: 2464310 - RNA, 19 nt, Artificial Sequence
  Description of Artificial Sequence: Synthetic oligonucleotide
acgguuuuacugagcugug

SEQ ID NO: 2464311 - RNA, 19 nt, Artificial Sequence
  Description of Artificial Sequence: Synthetic oligonucleotide
uagaguucccucgcuuguu

SEQ ID NO: 2464312 - RNA, 19 nt, Artificial Sequence
  Description of Artificial Sequence: Synthetic oligonucleotide
gcuuuggauugccugaagu

SEQ ID NO: 2464313 - RNA, 19 nt, Artificial Sequence
  Description of Artificial Sequence: Synthetic oligonucleotide
cuccucuguaaguccacaa

SEQ ID NO: 2464314 - RNA, 19 nt, Artificial Sequence
  Description of Artificial Sequence: Synthetic oligonucleotide
ggcaaucuucaggagguuc

SEQ ID NO: 2464315 - RNA, 19 nt, Artificial Sequence
  Description of Artificial Sequence: Synthetic oligonucleotide
cugcuuacagaccacgguu

SEQ ID NO: 2464316 - RNA, 19 nt, Artificial Sequence
  Description of Artificial Sequence: Synthetic oligonucleotide
ccugaaguagcagccgaac

SEQ ID NO: 2464317 - RNA, 19 nt, Artificial Sequence
  Description of Artificial Sequence: Synthetic oligonucleotide
guucccucgcuuguuccuc

SEQ ID NO: 2464318 - RNA, 19 nt, Artificial Sequence
  Description of Artificial Sequence: Synthetic oligonucleotide
gucuucuauagaguucccu

SEQ ID NO: 2464319 - RNA, 19 nt, Artificial Sequence
  Description of Artificial Sequence: Synthetic oligonucleotide
aaguagcagccgaaccauu

SEQ ID NO: 2464320 - RNA, 19 nt, Artificial Sequence
  Description of Artificial Sequence: Synthetic oligonucleotide
auccucccgcccacacugc

SEQ ID NO: 2464321 - RNA, 19 nt, Artificial Sequence
  Description of Artificial Sequence: Synthetic oligonucleotide
cacaggcacuggacggcug

SEQ ID NO: 2464322 - RNA, 19 nt, Artificial Sequence
  Description of Artificial Sequence: Synthetic oligonucleotide
gcguuuucacagugucuug

SEQ ID NO: 2464323 - RNA, 19 nt, Artificial Sequence
  Description of Artificial Sequence: Synthetic oligonucleotide
acggcucaccacgucuucu

SEQ ID NO: 2464324 - RNA, 19 nt, Artificial Sequence
  Description of Artificial Sequence: Synthetic oligonucleotide
cuccagugccuucugcuua

SEQ ID NO: 2464325 - RNA, 19 nt, Artificial Sequence
  Description of Artificial Sequence: Synthetic oligonucleotide
cuuacagaccacgguuuua

SEQ ID NO: 2464326 - RNA, 19 nt, Artificial Sequence
  Description of Artificial Sequence: Synthetic oligonucleotide
gcggaccacagucuucuca

SEQ ID NO: 2464327 - RNA, 19 nt, Artificial Sequence
  Description of Artificial Sequence: Synthetic oligonucleotide
cucucccucagucuucuau

SEQ ID NO: 2464328 - RNA, 19 nt, Artificial Sequence
  Description of Artificial Sequence: Synthetic oligonucleotide
cagcagcuuuucugaugug

SEQ ID NO: 2464329 - RNA, 19 nt, Artificial Sequence
  Description of Artificial Sequence: Synthetic oligonucleotide
gggugacuaagccgagaca

SEQ ID NO: 2464330 - RNA, 19 nt, Artificial Sequence
  Description of Artificial Sequence: Synthetic oligonucleotide
cuguggucuugcguuuuca

SEQ ID NO: 2464331 - RNA, 19 nt, Artificial Sequence
  Description of Artificial Sequence: Synthetic oligonucleotide
gcacuggacggcugggaca

SEQ ID NO: 2464332 - RNA, 19 nt, Artificial Sequence
  Description of Artificial Sequence: Synthetic oligonucleotide
agcugaccagggugacuaa

SEQ ID NO: 2464333 - RNA, 19 nt, Artificial Sequence
  Description of Artificial Sequence: Synthetic oligonucleotide
aggagguuccagagcuccu

SEQ ID NO: 2464334 - RNA, 19 nt, Artificial Sequence
  Description of Artificial Sequence: Synthetic oligonucleotide
ggcugggacauuagcugac

SEQ ID NO: 2464335 - RNA, 19 nt, Artificial Sequence
  Description of Artificial Sequence: Synthetic oligonucleotide
ggugcagagggcgugugcu

SEQ ID NO: 2464336 - RNA, 19 nt, Artificial Sequence
  Description of Artificial Sequence: Synthetic oligonucleotide
cuuguuccucuaggucauc

SEQ ID NO: 2464337 - RNA, 19 nt, Artificial Sequence
  Description of Artificial Sequence: Synthetic oligonucleotide
ccacgguuuuacugagcug

SEQ ID NO: 2464338 - RNA, 19 nt, Artificial Sequence
  Description of Artificial Sequence: Synthetic oligonucleotide
gcuguggucuugcguuuuc

SEQ ID NO: 2464339 - RNA, 19 nt, Artificial Sequence
  Description of Artificial Sequence: Synthetic oligonucleotide
ggucuugcguuuucacagu

SEQ ID NO: 2464340 - RNA, 19 nt, Artificial Sequence
  Description of Artificial Sequence: Synthetic oligonucleotide
ggucucuaggccucucccu

SEQ ID NO: 2464341 - RNA, 19 nt, Artificial Sequence
  Description of Artificial Sequence: Synthetic oligonucleotide
cuggacggcugggacauua

SEQ ID NO: 2464342 - RNA, 19 nt, Artificial Sequence
  Description of Artificial Sequence: Synthetic oligonucleotide
agcuguggucuugcguuuu

SEQ ID NO: 2464343 - RNA, 19 nt, Artificial Sequence
  Description of Artificial Sequence: Synthetic oligonucleotide
ggucugcucuuuguacuuc

SEQ ID NO: 2464344 - RNA, 19 nt, Artificial Sequence
  Description of Artificial Sequence: Synthetic oligonucleotide
gcuuccgacccaucgggcu

SEQ ID NO: 2464345 - RNA, 19 nt, Artificial Sequence
  Description of Artificial Sequence: Synthetic oligonucleotide
ccgagacacauucaugcua

SEQ ID NO: 2464346 - RNA, 19 nt, Artificial Sequence
  Description of Artificial Sequence: Synthetic oligonucleotide
ccacgucuucuaccugggg

SEQ ID NO: 2464347 - RNA, 19 nt, Artificial Sequence
  Description of Artificial Sequence: Synthetic oligonucleotide
cccaaacucggucugcucu

SEQ ID NO: 2464348 - RNA, 19 nt, Artificial Sequence
  Description of Artificial Sequence: Synthetic oligonucleotide
ccagggugacuaagccgag

SEQ ID NO: 2464349 - RNA, 19 nt, Artificial Sequence
  Description of Artificial Sequence: Synthetic oligonucleotide
cagggugacuaagccgaga

SEQ ID NO: 2464350 - RNA, 19 nt, Artificial Sequence
  Description of Artificial Sequence: Synthetic oligonucleotide
cuggaccucugacuuugcu

SEQ ID NO: 2464351 - RNA, 19 nt, Artificial Sequence
  Description of Artificial Sequence: Synthetic oligonucleotide
cacuggacggcugggacau

SEQ ID NO: 2464352 - RNA, 19 nt, Artificial Sequence
  Description of Artificial Sequence: Synthetic oligonucleotide
ucccgcccacacugcucca

SEQ ID NO: 2464353 - RNA, 19 nt, Artificial Sequence
  Description of Artificial Sequence: Synthetic oligonucleotide
accagacgcuucacgucau

SEQ ID NO: 2464354 - RNA, 19 nt, Artificial Sequence
  Description of Artificial Sequence: Synthetic oligonucleotide
gccgagacacauucaugcu

SEQ ID NO: 2464355 - RNA, 19 nt, Artificial Sequence
  Description of Artificial Sequence: Synthetic oligonucleotide
ggcgugugcuucagccacc

SEQ ID NO: 2464356 - RNA, 19 nt, Artificial Sequence
  Description of Artificial Sequence: Synthetic oligonucleotide
gcuuacagaccacgguuuu

SEQ ID NO: 2464357 - RNA, 19 nt, Artificial Sequence
  Description of Artificial Sequence: Synthetic oligonucleotide
gcccgugaagcuguggucu

SEQ ID NO: 2464358 - RNA, 19 nt, Artificial Sequence
  Description of Artificial Sequence: Synthetic oligonucleotide
ggcuccucuguaaguccac

SEQ ID NO: 2464359 - RNA, 19 nt, Artificial Sequence
  Description of Artificial Sequence: Synthetic oligonucleotide
caucuguccucuggucucu

SEQ ID NO: 2464360 - RNA, 19 nt, Artificial Sequence
  Description of Artificial Sequence: Synthetic oligonucleotide
cgaaccauuuccugacugu

SEQ ID NO: 2464361 - RNA, 19 nt, Artificial Sequence
  Description of Artificial Sequence: Synthetic oligonucleotide
ccaucgggcuccucuguaa

SEQ ID NO: 2464362 - RNA, 19 nt, Artificial Sequence
  Description of Artificial Sequence: Synthetic oligonucleotide
aucuguccucuggucucua

SEQ ID NO: 2464363 - RNA, 19 nt, Artificial Sequence
  Description of Artificial Sequence: Synthetic oligonucleotide
gcgugugcuucagccacca

SEQ ID NO: 2464364 - RNA, 19 nt, Artificial Sequence
  Description of Artificial Sequence: Synthetic oligonucleotide
gccugaaguagcagccgaa

SEQ ID NO: 2464365 - RNA, 19 nt, Artificial Sequence
  Description of Artificial Sequence: Synthetic oligonucleotide
ccgugaagcuguggucuug

SEQ ID NO: 2464366 - RNA, 19 nt, Artificial Sequence
  Description of Artificial Sequence: Synthetic oligonucleotide
gcauacuuucuagccgggu

SEQ ID NO: 2464367 - RNA, 19 nt, Artificial Sequence
  Description of Artificial Sequence: Synthetic oligonucleotide
gugcagagggcgugugcuu

SEQ ID NO: 2464368 - RNA, 19 nt, Artificial Sequence
  Description of Artificial Sequence: Synthetic oligonucleotide
ggcggaccacagucuucuc

SEQ ID NO: 2464369 - RNA, 19 nt, Artificial Sequence
  Description of Artificial Sequence: Synthetic oligonucleotide
caaacucggucugcucuuu

SEQ ID NO: 2464370 - RNA, 19 nt, Artificial Sequence
  Description of Artificial Sequence: Synthetic oligonucleotide
ccaaacucggucugcucuu

SEQ ID NO: 2464371 - RNA, 19 nt, Artificial Sequence
  Description of Artificial Sequence: Synthetic oligonucleotide
cccgcccacacugcuccac

SEQ ID NO: 2464372 - RNA, 19 nt, Artificial Sequence
  Description of Artificial Sequence: Synthetic oligonucleotide
cccaucgggcuccucugua

SEQ ID NO: 2464373 - RNA, 19 nt, Artificial Sequence
  Description of Artificial Sequence: Synthetic oligonucleotide
cucuggucucuaggccucu

SEQ ID NO: 2464374 - RNA, 19 nt, Artificial Sequence
  Description of Artificial Sequence: Synthetic oligonucleotide
acuggacggcugggacauu

SEQ ID NO: 2464375 - RNA, 19 nt, Artificial Sequence
  Description of Artificial Sequence: Synthetic oligonucleotide
cgguuuuacugagcugugu

SEQ ID NO: 2464376 - RNA, 19 nt, Artificial Sequence
  Description of Artificial Sequence: Synthetic oligonucleotide
cccgugaagcuguggucuu

SEQ ID NO: 2464377 - RNA, 19 nt, Artificial Sequence
  Description of Artificial Sequence: Synthetic oligonucleotide
ccgggugcagagggcgugu

SEQ ID NO: 2464378 - RNA, 19 nt, Artificial Sequence
  Description of Artificial Sequence: Synthetic oligonucleotide
ccgacccaucgggcuccuc

SEQ ID NO: 2464379 - RNA, 19 nt, Artificial Sequence
  Description of Artificial Sequence: Synthetic oligonucleotide
ucauacauggguuugaugg

SEQ ID NO: 2464380 - RNA, 19 nt, Artificial Sequence
  Description of Artificial Sequence: Synthetic oligonucleotide
gaagguaccaucuagagga

SEQ ID NO: 2464381 - RNA, 19 nt, Artificial Sequence
  Description of Artificial Sequence: Synthetic oligonucleotide
augcuaucuacacagaagg

SEQ ID NO: 2464382 - RNA, 19 nt, Artificial Sequence
  Description of Artificial Sequence: Synthetic oligonucleotide
aaguccaagaagaugaggg

SEQ ID NO: 2464383 - RNA, 19 nt, Artificial Sequence
  Description of Artificial Sequence: Synthetic oligonucleotide
aaugcauagagagagcuug

SEQ ID NO: 2464384 - RNA, 19 nt, Artificial Sequence
  Description of Artificial Sequence: Synthetic oligonucleotide
uguuuauccacccacugca

SEQ ID NO: 2464385 - RNA, 19 nt, Artificial Sequence
  Description of Artificial Sequence: Synthetic oligonucleotide
ucuauggacagccagcaga

SEQ ID NO: 2464386 - RNA, 19 nt, Artificial Sequence
  Description of Artificial Sequence: Synthetic oligonucleotide
ugcaauauucauacauggg

SEQ ID NO: 2464387 - RNA, 19 nt, Artificial Sequence
  Description of Artificial Sequence: Synthetic oligonucleotide
cuucuaauggucagcauag

SEQ ID NO: 2464388 - RNA, 19 nt, Artificial Sequence
  Description of Artificial Sequence: Synthetic oligonucleotide
auguuuauccacccacugc

SEQ ID NO: 2464389 - RNA, 19 nt, Artificial Sequence
  Description of Artificial Sequence: Synthetic oligonucleotide
  modified_base (9)..(9): a, c, u, g, unknown or other
gauggaggnguuuuccagg

SEQ ID NO: 2464390 - RNA, 19 nt, Artificial Sequence
  Description of Artificial Sequence: Synthetic oligonucleotide
aaugcuaucuacacagaag

SEQ ID NO: 2464391 - RNA, 19 nt, Artificial Sequence
  Description of Artificial Sequence: Synthetic oligonucleotide
aggguugccguccauuugc

SEQ ID NO: 2464392 - RNA, 19 nt, Artificial Sequence
  Description of Artificial Sequence: Synthetic oligonucleotide
aucuagaggacuucuaaug

SEQ ID NO: 2464393 - RNA, 19 nt, Artificial Sequence
  Description of Artificial Sequence: Synthetic oligonucleotide
cagugugugagucuguugg

SEQ ID NO: 2464394 - RNA, 19 nt, Artificial Sequence
  Description of Artificial Sequence: Synthetic oligonucleotide
aaagucguaacggucacca

SEQ ID NO: 2464395 - RNA, 19 nt, Artificial Sequence
  Description of Artificial Sequence: Synthetic oligonucleotide
gaaggcuuggagcagguug

SEQ ID NO: 2464396 - RNA, 19 nt, Artificial Sequence
  Description of Artificial Sequence: Synthetic oligonucleotide
agaagguaccaucuagagg

SEQ ID NO: 2464397 - RNA, 19 nt, Artificial Sequence
  Description of Artificial Sequence: Synthetic oligonucleotide
gguuugauggugcuaaagg

SEQ ID NO: 2464398 - RNA, 19 nt, Artificial Sequence
  Description of Artificial Sequence: Synthetic oligonucleotide
uacacagaagguaccaucu

SEQ ID NO: 2464399 - RNA, 19 nt, Artificial Sequence
  Description of Artificial Sequence: Synthetic oligonucleotide
agucuguuggugcuugccc

SEQ ID NO: 2464400 - RNA, 19 nt, Artificial Sequence
  Description of Artificial Sequence: Synthetic oligonucleotide
auagagagagcuuguccac

SEQ ID NO: 2464401 - RNA, 19 nt, Artificial Sequence
  Description of Artificial Sequence: Synthetic oligonucleotide
ugcuugcccauacaggcgg

SEQ ID NO: 2464402 - RNA, 19 nt, Artificial Sequence
  Description of Artificial Sequence: Synthetic oligonucleotide
uuuauccacccacugcaag

SEQ ID NO: 2464403 - RNA, 19 nt, Artificial Sequence
  Description of Artificial Sequence: Synthetic oligonucleotide
uuuagggcagcaaugcuau

SEQ ID NO: 2464404 - RNA, 19 nt, Artificial Sequence
  Description of Artificial Sequence: Synthetic oligonucleotide
agcaguagcugcaauauuc

SEQ ID NO: 2464405 - RNA, 19 nt, Artificial Sequence
  Description of Artificial Sequence: Synthetic oligonucleotide
acggucaccauugugugcc

SEQ ID NO: 2464406 - RNA, 19 nt, Artificial Sequence
  Description of Artificial Sequence: Synthetic oligonucleotide
uacaggcggguauagaugc

SEQ ID NO: 2464407 - RNA, 19 nt, Artificial Sequence
  Description of Artificial Sequence: Synthetic oligonucleotide
  modified_base (12)..(12): a, c, u, g, unknown or other
agagauggaggnguuuucc

SEQ ID NO: 2464408 - RNA, 19 nt, Artificial Sequence
  Description of Artificial Sequence: Synthetic oligonucleotide
gaucucacuggcugcaggg

SEQ ID NO: 2464409 - RNA, 19 nt, Artificial Sequence
  Description of Artificial Sequence: Synthetic oligonucleotide
aacggucaccauugugugc

SEQ ID NO: 2464410 - RNA, 19 nt, Artificial Sequence
  Description of Artificial Sequence: Synthetic oligonucleotide
guuguggcagcauauggcc

SEQ ID NO: 2464411 - RNA, 19 nt, Artificial Sequence
  Description of Artificial Sequence: Synthetic oligonucleotide
agcugcaauauucauacau

SEQ ID NO: 2464412 - RNA, 19 nt, Artificial Sequence
  Description of Artificial Sequence: Synthetic oligonucleotide
ucuuccuuggaccacgcuc

SEQ ID NO: 2464413 - RNA, 19 nt, Artificial Sequence
  Description of Artificial Sequence: Synthetic oligonucleotide
cauagagagagcuugucca

SEQ ID NO: 2464414 - RNA, 19 nt, Artificial Sequence
  Description of Artificial Sequence: Synthetic oligonucleotide
ugucccgcagagauggagg

SEQ ID NO: 2464415 - RNA, 19 nt, Artificial Sequence
  Description of Artificial Sequence: Synthetic oligonucleotide
gugguuugggcacuggagg

SEQ ID NO: 2464416 - RNA, 19 nt, Artificial Sequence
  Description of Artificial Sequence: Synthetic oligonucleotide
gucugcaugggaccgaggg

SEQ ID NO: 2464417 - RNA, 19 nt, Artificial Sequence
  Description of Artificial Sequence: Synthetic oligonucleotide
acaucuauggacagccagc

SEQ ID NO: 2464418 - RNA, 19 nt, Artificial Sequence
  Description of Artificial Sequence: Synthetic oligonucleotide
  modified_base (8)..(8): a, c, u, g, unknown or other
auggaggnguuuuccaggg

SEQ ID NO: 2464419 - RNA, 19 nt, Artificial Sequence
  Description of Artificial Sequence: Synthetic oligonucleotide
uuauccacccacugcaaga

SEQ ID NO: 2464420 - RNA, 19 nt, Artificial Sequence
  Description of Artificial Sequence: Synthetic oligonucleotide
uugguuuguuccuagcagu

SEQ ID NO: 2464421 - RNA, 19 nt, Artificial Sequence
  Description of Artificial Sequence: Synthetic oligonucleotide
uagaggacuucuaaugguc

SEQ ID NO: 2464422 - RNA, 19 nt, Artificial Sequence
  Description of Artificial Sequence: Synthetic oligonucleotide
ggagcugcuagcuuguucc

SEQ ID NO: 2464423 - RNA, 19 nt, Artificial Sequence
  Description of Artificial Sequence: Synthetic oligonucleotide
uaucuacacagaagguacc

SEQ ID NO: 2464424 - RNA, 19 nt, Artificial Sequence
  Description of Artificial Sequence: Synthetic oligonucleotide
ugaucucacuggcugcagg

SEQ ID NO: 2464425 - RNA, 19 nt, Artificial Sequence
  Description of Artificial Sequence: Synthetic oligonucleotide
ggugcuugcccauacaggc

SEQ ID NO: 2464426 - RNA, 19 nt, Artificial Sequence
  Description of Artificial Sequence: Synthetic oligonucleotide
cagaagguaccaucuagag

SEQ ID NO: 2464427 - RNA, 19 nt, Artificial Sequence
  Description of Artificial Sequence: Synthetic oligonucleotide
cuauggacagccagcagac

SEQ ID NO: 2464428 - RNA, 19 nt, Artificial Sequence
  Description of Artificial Sequence: Synthetic oligonucleotide
cauagcaagcucugccugg

SEQ ID NO: 2464429 - RNA, 19 nt, Artificial Sequence
  Description of Artificial Sequence: Synthetic oligonucleotide
uggagcaggggaaagucgu

SEQ ID NO: 2464430 - RNA, 19 nt, Artificial Sequence
  Description of Artificial Sequence: Synthetic oligonucleotide
cuaauggucagcauagcaa

SEQ ID NO: 2464431 - RNA, 19 nt, Artificial Sequence
  Description of Artificial Sequence: Synthetic oligonucleotide
uggucagggauguaguggu

SEQ ID NO: 2464432 - RNA, 19 nt, Artificial Sequence
  Description of Artificial Sequence: Synthetic oligonucleotide
cacaucuauggacagccag

SEQ ID NO: 2464433 - RNA, 19 nt, Artificial Sequence
  Description of Artificial Sequence: Synthetic oligonucleotide
aaaggguugccguccauuu

SEQ ID NO: 2464434 - RNA, 19 nt, Artificial Sequence
  Description of Artificial Sequence: Synthetic oligonucleotide
auugugugccacaaggcag

SEQ ID NO: 2464435 - RNA, 19 nt, Artificial Sequence
  Description of Artificial Sequence: Synthetic oligonucleotide
uauagaugcugcccaggcu

SEQ ID NO: 2464436 - RNA, 19 nt, Artificial Sequence
  Description of Artificial Sequence: Synthetic oligonucleotide
acugcaagagggcccgugg

SEQ ID NO: 2464437 - RNA, 19 nt, Artificial Sequence
  Description of Artificial Sequence: Synthetic oligonucleotide
ugucaucaaaggguugccg

SEQ ID NO: 2464438 - RNA, 19 nt, Artificial Sequence
  Description of Artificial Sequence: Synthetic oligonucleotide
agacacagcucugugaucu

SEQ ID NO: 2464439 - RNA, 19 nt, Artificial Sequence
  Description of Artificial Sequence: Synthetic oligonucleotide
uugcuuccaguucagcugu

SEQ ID NO: 2464440 - RNA, 19 nt, Artificial Sequence
  Description of Artificial Sequence: Synthetic oligonucleotide
gauggugcuaaagggccgg

SEQ ID NO: 2464441 - RNA, 19 nt, Artificial Sequence
  Description of Artificial Sequence: Synthetic oligonucleotide
cauguuuauccacccacug

SEQ ID NO: 2464442 - RNA, 19 nt, Artificial Sequence
  Description of Artificial Sequence: Synthetic oligonucleotide
agggcuacaggcuuucccu

SEQ ID NO: 2464443 - RNA, 19 nt, Artificial Sequence
  Description of Artificial Sequence: Synthetic oligonucleotide
uauccacccacugcaagag

SEQ ID NO: 2464444 - RNA, 19 nt, Artificial Sequence
  Description of Artificial Sequence: Synthetic oligonucleotide
uauucauacauggguuuga

SEQ ID NO: 2464445 - RNA, 19 nt, Artificial Sequence
  Description of Artificial Sequence: Synthetic oligonucleotide
uucauacauggguuugaug

SEQ ID NO: 2464446 - RNA, 19 nt, Artificial Sequence
  Description of Artificial Sequence: Synthetic oligonucleotide
caggggaaagucguaacgg

SEQ ID NO: 2464447 - RNA, 19 nt, Artificial Sequence
  Description of Artificial Sequence: Synthetic oligonucleotide
cuuguguugguugugguca

SEQ ID NO: 2464448 - RNA, 19 nt, Artificial Sequence
  Description of Artificial Sequence: Synthetic oligonucleotide
uguggucagggauguagug

SEQ ID NO: 2464449 - RNA, 19 nt, Artificial Sequence
  Description of Artificial Sequence: Synthetic oligonucleotide
gucguaacggucaccauug

SEQ ID NO: 2464450 - RNA, 19 nt, Artificial Sequence
  Description of Artificial Sequence: Synthetic oligonucleotide
uguguucagaccugugauc

SEQ ID NO: 2464451 - RNA, 19 nt, Artificial Sequence
  Description of Artificial Sequence: Synthetic oligonucleotide
aaggcaggccaguggcuuc

SEQ ID NO: 2464452 - RNA, 19 nt, Artificial Sequence
  Description of Artificial Sequence: Synthetic oligonucleotide
ugcuaucuacacagaaggu

SEQ ID NO: 2464453 - RNA, 19 nt, Artificial Sequence
  Description of Artificial Sequence: Synthetic oligonucleotide
agucguaacggucaccauu

SEQ ID NO: 2464454 - RNA, 19 nt, Artificial Sequence
  Description of Artificial Sequence: Synthetic oligonucleotide
agagagagcuuguccacca

SEQ ID NO: 2464455 - RNA, 19 nt, Artificial Sequence
  Description of Artificial Sequence: Synthetic oligonucleotide
agcagguuggccaagcugu

SEQ ID NO: 2464456 - RNA, 19 nt, Artificial Sequence
  Description of Artificial Sequence: Synthetic oligonucleotide
aaggguugccguccauuug

SEQ ID NO: 2464457 - RNA, 19 nt, Artificial Sequence
  Description of Artificial Sequence: Synthetic oligonucleotide
uaaagggccgggcauguuu

SEQ ID NO: 2464458 - RNA, 19 nt, Artificial Sequence
  Description of Artificial Sequence: Synthetic oligonucleotide
uggaccacgcucugaggag

SEQ ID NO: 2464459 - RNA, 19 nt, Artificial Sequence
  Description of Artificial Sequence: Synthetic oligonucleotide
  modified_base (11)..(11): a, c, u, g, unknown or other
gagauggaggnguuuucca

SEQ ID NO: 2464460 - RNA, 19 nt, Artificial Sequence
  Description of Artificial Sequence: Synthetic oligonucleotide
aggagcugcuagcuuguuc

SEQ ID NO: 2464461 - RNA, 19 nt, Artificial Sequence
  Description of Artificial Sequence: Synthetic oligonucleotide
uguuggugcuugcccauac

SEQ ID NO: 2464462 - RNA, 19 nt, Artificial Sequence
  Description of Artificial Sequence: Synthetic oligonucleotide
aggggaaagucguaacggu

SEQ ID NO: 2464463 - RNA, 19 nt, Artificial Sequence
  Description of Artificial Sequence: Synthetic oligonucleotide
ugcaagagggcccguggcu

SEQ ID NO: 2464464 - RNA, 19 nt, Artificial Sequence
  Description of Artificial Sequence: Synthetic oligonucleotide
cuggagcaggggaaagucg

SEQ ID NO: 2464465 - RNA, 19 nt, Artificial Sequence
  Description of Artificial Sequence: Synthetic oligonucleotide
ugguuugggcacuggaggu

SEQ ID NO: 2464466 - RNA, 19 nt, Artificial Sequence
  Description of Artificial Sequence: Synthetic oligonucleotide
caucaaaggguugccgucc

SEQ ID NO: 2464467 - RNA, 19 nt, Artificial Sequence
  Description of Artificial Sequence: Synthetic oligonucleotide
ggcauguuuauccacccac

SEQ ID NO: 2464468 - RNA, 19 nt, Artificial Sequence
  Description of Artificial Sequence: Synthetic oligonucleotide
gaccugugaucucacuggc

SEQ ID NO: 2464469 - RNA, 19 nt, Artificial Sequence
  Description of Artificial Sequence: Synthetic oligonucleotide
  modified_base (7)..(7): a, c, u, g, unknown or other
uggaggnguuuuccagggc

SEQ ID NO: 2464470 - RNA, 19 nt, Artificial Sequence
  Description of Artificial Sequence: Synthetic oligonucleotide
ugguuuguuccuagcagua

SEQ ID NO: 2464471 - RNA, 19 nt, Artificial Sequence
  Description of Artificial Sequence: Synthetic oligonucleotide
cugcuagcuuguuccaagg

SEQ ID NO: 2464472 - RNA, 19 nt, Artificial Sequence
  Description of Artificial Sequence: Synthetic oligonucleotide
agcaaugcauagagagagc

SEQ ID NO: 2464473 - RNA, 19 nt, Artificial Sequence
  Description of Artificial Sequence: Synthetic oligonucleotide
cuuuagggcagcaaugcua

SEQ ID NO: 2464474 - RNA, 19 nt, Artificial Sequence
  Description of Artificial Sequence: Synthetic oligonucleotide
uccagggcacaucuaugga

SEQ ID NO: 2464475 - RNA, 19 nt, Artificial Sequence
  Description of Artificial Sequence: Synthetic oligonucleotide
uucccuggagcaaugcaua

SEQ ID NO: 2464476 - RNA, 19 nt, Artificial Sequence
  Description of Artificial Sequence: Synthetic oligonucleotide
auggguuugauggugcuaa

SEQ ID NO: 2464477 - RNA, 19 nt, Artificial Sequence
  Description of Artificial Sequence: Synthetic oligonucleotide
uuguguugguuguggucag

SEQ ID NO: 2464478 - RNA, 19 nt, Artificial Sequence
  Description of Artificial Sequence: Synthetic oligonucleotide
gcaggggaaagucguaacg

SEQ ID NO: 2464479 - RNA, 19 nt, Artificial Sequence
  Description of Artificial Sequence: Synthetic oligonucleotide
guguugguuguggucaggg

SEQ ID NO: 2464480 - RNA, 19 nt, Artificial Sequence
  Description of Artificial Sequence: Synthetic oligonucleotide
ccaagcugucaucaaaggg

SEQ ID NO: 2464481 - RNA, 19 nt, Artificial Sequence
  Description of Artificial Sequence: Synthetic oligonucleotide
uagagagagcuuguccacc

SEQ ID NO: 2464482 - RNA, 19 nt, Artificial Sequence
  Description of Artificial Sequence: Synthetic oligonucleotide
uguugguuguggucaggga

SEQ ID NO: 2464483 - RNA, 19 nt, Artificial Sequence
  Description of Artificial Sequence: Synthetic oligonucleotide
gcauagagagagcuugucc

SEQ ID NO: 2464484 - RNA, 19 nt, Artificial Sequence
  Description of Artificial Sequence: Synthetic oligonucleotide
aucaccuucagcagugugu

SEQ ID NO: 2464485 - RNA, 19 nt, Artificial Sequence
  Description of Artificial Sequence: Synthetic oligonucleotide
aagguaccaucuagaggac

SEQ ID NO: 2464486 - RNA, 19 nt, Artificial Sequence
  Description of Artificial Sequence: Synthetic oligonucleotide
aucuacacagaagguacca

SEQ ID NO: 2464487 - RNA, 19 nt, Artificial Sequence
  Description of Artificial Sequence: Synthetic oligonucleotide
  modified_base (6)..(6): a, c, u, g, unknown or other
ggaggnguuuuccagggca

SEQ ID NO: 2464488 - RNA, 19 nt, Artificial Sequence
  Description of Artificial Sequence: Synthetic oligonucleotide
acuggagguggcugucccg

SEQ ID NO: 2464489 - RNA, 19 nt, Artificial Sequence
  Description of Artificial Sequence: Synthetic oligonucleotide
uggccaagcugucaucaaa

SEQ ID NO: 2464490 - RNA, 19 nt, Artificial Sequence
  Description of Artificial Sequence: Synthetic oligonucleotide
ucagcauagcaagcucugc

SEQ ID NO: 2464491 - RNA, 19 nt, Artificial Sequence
  Description of Artificial Sequence: Synthetic oligonucleotide
gcugcaauauucauacaug

SEQ ID NO: 2464492 - RNA, 19 nt, Artificial Sequence
  Description of Artificial Sequence: Synthetic oligonucleotide
cuagcuuguuccaaggccu

SEQ ID NO: 2464493 - RNA, 19 nt, Artificial Sequence
  Description of Artificial Sequence: Synthetic oligonucleotide
cuuggaccacgcucugagg

SEQ ID NO: 2464494 - RNA, 19 nt, Artificial Sequence
  Description of Artificial Sequence: Synthetic oligonucleotide
cagggcuacaggcuuuccc

SEQ ID NO: 2464495 - RNA, 19 nt, Artificial Sequence
  Description of Artificial Sequence: Synthetic oligonucleotide
agggcuagaacaucaccuu

SEQ ID NO: 2464496 - RNA, 19 nt, Artificial Sequence
  Description of Artificial Sequence: Synthetic oligonucleotide
ucugugaucuugggcugag

SEQ ID NO: 2464497 - RNA, 19 nt, Artificial Sequence
  Description of Artificial Sequence: Synthetic oligonucleotide
gcuagaacaucaccuucag

SEQ ID NO: 2464498 - RNA, 19 nt, Artificial Sequence
  Description of Artificial Sequence: Synthetic oligonucleotide
ugcuaaagggccgggcaug

SEQ ID NO: 2464499 - RNA, 19 nt, Artificial Sequence
  Description of Artificial Sequence: Synthetic oligonucleotide
auacaggcggguauagaug

SEQ ID NO: 2464500 - RNA, 19 nt, Artificial Sequence
  Description of Artificial Sequence: Synthetic oligonucleotide
gcugcuagcuuguuccaag

SEQ ID NO: 2464501 - RNA, 19 nt, Artificial Sequence
  Description of Artificial Sequence: Synthetic oligonucleotide
agggcacaucuauggacag

SEQ ID NO: 2464502 - RNA, 19 nt, Artificial Sequence
  Description of Artificial Sequence: Synthetic oligonucleotide
caaugcuaucuacacagaa

SEQ ID NO: 2464503 - RNA, 19 nt, Artificial Sequence
  Description of Artificial Sequence: Synthetic oligonucleotide
uucuaauggucagcauagc

SEQ ID NO: 2464504 - RNA, 19 nt, Artificial Sequence
  Description of Artificial Sequence: Synthetic oligonucleotide
uguguugguuguggucagg

SEQ ID NO: 2464505 - RNA, 19 nt, Artificial Sequence
  Description of Artificial Sequence: Synthetic oligonucleotide
acacggggugguuugggca

SEQ ID NO: 2464506 - RNA, 19 nt, Artificial Sequence
  Description of Artificial Sequence: Synthetic oligonucleotide
caaggcagcagggcugugg

SEQ ID NO: 2464507 - RNA, 19 nt, Artificial Sequence
  Description of Artificial Sequence: Synthetic oligonucleotide
ugcccauacaggcggguau

SEQ ID NO: 2464508 - RNA, 19 nt, Artificial Sequence
  Description of Artificial Sequence: Synthetic oligonucleotide
gaaagucguaacggucacc

SEQ ID NO: 2464509 - RNA, 19 nt, Artificial Sequence
  Description of Artificial Sequence: Synthetic oligonucleotide
cauacaggcggguauagau

SEQ ID NO: 2464510 - RNA, 19 nt, Artificial Sequence
  Description of Artificial Sequence: Synthetic oligonucleotide
  modified_base (5)..(5): a, c, u, g, unknown or other
gaggnguuuuccagggcac

SEQ ID NO: 2464511 - RNA, 19 nt, Artificial Sequence
  Description of Artificial Sequence: Synthetic oligonucleotide
ucaccauugugugccacaa

SEQ ID NO: 2464512 - RNA, 19 nt, Artificial Sequence
  Description of Artificial Sequence: Synthetic oligonucleotide
uaccaucuagaggacuucu

SEQ ID NO: 2464513 - RNA, 19 nt, Artificial Sequence
  Description of Artificial Sequence: Synthetic oligonucleotide
gucagcauagcaagcucug

SEQ ID NO: 2464514 - RNA, 19 nt, Artificial Sequence
  Description of Artificial Sequence: Synthetic oligonucleotide
agcauauggccuuggcuuu

SEQ ID NO: 2464515 - RNA, 19 nt, Artificial Sequence
  Description of Artificial Sequence: Synthetic oligonucleotide
guugguuguggucagggau

SEQ ID NO: 2464516 - RNA, 19 nt, Artificial Sequence
  Description of Artificial Sequence: Synthetic oligonucleotide
acauggguuugauggugcu

SEQ ID NO: 2464517 - RNA, 19 nt, Artificial Sequence
  Description of Artificial Sequence: Synthetic oligonucleotide
  modified_base (13)..(13): a, c, u, g, unknown or other
cagagauggaggnguuuuc

SEQ ID NO: 2464518 - RNA, 19 nt, Artificial Sequence
  Description of Artificial Sequence: Synthetic oligonucleotide
ugcauagagagagcuuguc

SEQ ID NO: 2464519 - RNA, 19 nt, Artificial Sequence
  Description of Artificial Sequence: Synthetic oligonucleotide
acccacugcaagagggccc

SEQ ID NO: 2464520 - RNA, 19 nt, Artificial Sequence
  Description of Artificial Sequence: Synthetic oligonucleotide
cacggggugguuugggcac

SEQ ID NO: 2464521 - RNA, 19 nt, Artificial Sequence
  Description of Artificial Sequence: Synthetic oligonucleotide
cuuccuuggaccacgcucu

SEQ ID NO: 2464522 - RNA, 19 nt, Artificial Sequence
  Description of Artificial Sequence: Synthetic oligonucleotide
auucauacauggguuugau

SEQ ID NO: 2464523 - RNA, 19 nt, Artificial Sequence
  Description of Artificial Sequence: Synthetic oligonucleotide
caucuauggacagccagca

SEQ ID NO: 2464524 - RNA, 19 nt, Artificial Sequence
  Description of Artificial Sequence: Synthetic oligonucleotide
cacacggggugguuugggc

SEQ ID NO: 2464525 - RNA, 19 nt, Artificial Sequence
  Description of Artificial Sequence: Synthetic oligonucleotide
gggccgggcauguuuaucc

SEQ ID NO: 2464526 - RNA, 19 nt, Artificial Sequence
  Description of Artificial Sequence: Synthetic oligonucleotide
cugcaagagggcccguggc

SEQ ID NO: 2464527 - RNA, 19 nt, Artificial Sequence
  Description of Artificial Sequence: Synthetic oligonucleotide
ugagucuguuggugcuugc

SEQ ID NO: 2464528 - RNA, 19 nt, Artificial Sequence
  Description of Artificial Sequence: Synthetic oligonucleotide
ggugcuaaagggccgggca

SEQ ID NO: 2464529 - RNA, 19 nt, Artificial Sequence
  Description of Artificial Sequence: Synthetic oligonucleotide
auagcaagcucugccugga

SEQ ID NO: 2464530 - RNA, 19 nt, Artificial Sequence
  Description of Artificial Sequence: Synthetic oligonucleotide
cuagaggacuucuaauggu

SEQ ID NO: 2464531 - RNA, 19 nt, Artificial Sequence
  Description of Artificial Sequence: Synthetic oligonucleotide
agcagggcuagaacaucac

SEQ ID NO: 2464532 - RNA, 19 nt, Artificial Sequence
  Description of Artificial Sequence: Synthetic oligonucleotide
ccuuggaccacgcucugag

SEQ ID NO: 2464533 - RNA, 19 nt, Artificial Sequence
  Description of Artificial Sequence: Synthetic oligonucleotide
caucaccuucagcagugug

SEQ ID NO: 2464534 - RNA, 19 nt, Artificial Sequence
  Description of Artificial Sequence: Synthetic oligonucleotide
ugccacaaggcagcagggc

SEQ ID NO: 2464535 - RNA, 19 nt, Artificial Sequence
  Description of Artificial Sequence: Synthetic oligonucleotide
gugaucuugggcugagaaa

SEQ ID NO: 2464536 - RNA, 19 nt, Artificial Sequence
  Description of Artificial Sequence: Synthetic oligonucleotide
guguucagaccugugaucu

SEQ ID NO: 2464537 - RNA, 19 nt, Artificial Sequence
  Description of Artificial Sequence: Synthetic oligonucleotide
ggccaagcugucaucaaag

SEQ ID NO: 2464538 - RNA, 19 nt, Artificial Sequence
  Description of Artificial Sequence: Synthetic oligonucleotide
aagucguaacggucaccau

SEQ ID NO: 2464539 - RNA, 19 nt, Artificial Sequence
  Description of Artificial Sequence: Synthetic oligonucleotide
cagcauauggccuuggcuu

SEQ ID NO: 2464540 - RNA, 19 nt, Artificial Sequence
  Description of Artificial Sequence: Synthetic oligonucleotide
gugcuugcccauacaggcg

SEQ ID NO: 2464541 - RNA, 19 nt, Artificial Sequence
  Description of Artificial Sequence: Synthetic oligonucleotide
ugagcagggcuagaacauc

SEQ ID NO: 2464542 - RNA, 19 nt, Artificial Sequence
  Description of Artificial Sequence: Synthetic oligonucleotide
aaagggccgggcauguuua

SEQ ID NO: 2464543 - RNA, 19 nt, Artificial Sequence
  Description of Artificial Sequence: Synthetic oligonucleotide
gguuuguuccuagcaguag

SEQ ID NO: 2464544 - RNA, 19 nt, Artificial Sequence
  Description of Artificial Sequence: Synthetic oligonucleotide
ggaaagucguaacggucac

SEQ ID NO: 2464545 - RNA, 19 nt, Artificial Sequence
  Description of Artificial Sequence: Synthetic oligonucleotide
guggcugucccgcagagau

SEQ ID NO: 2464546 - RNA, 19 nt, Artificial Sequence
  Description of Artificial Sequence: Synthetic oligonucleotide
agugguuguggcagcauau

SEQ ID NO: 2464547 - RNA, 19 nt, Artificial Sequence
  Description of Artificial Sequence: Synthetic oligonucleotide
  modified_base (2)..(2): a, c, u, g, unknown or other
gnguuuuccagggcacauc

SEQ ID NO: 2464548 - RNA, 19 nt, Artificial Sequence
  Description of Artificial Sequence: Synthetic oligonucleotide
gcuaucuacacagaaggua

SEQ ID NO: 2464549 - RNA, 19 nt, Artificial Sequence
  Description of Artificial Sequence: Synthetic oligonucleotide
gaccgaggggcagagccug

SEQ ID NO: 2464550 - RNA, 19 nt, Artificial Sequence
  Description of Artificial Sequence: Synthetic oligonucleotide
  modified_base (4)..(4): a, c, u, g, unknown or other
aggnguuuuccagggcaca

SEQ ID NO: 2464551 - RNA, 19 nt, Artificial Sequence
  Description of Artificial Sequence: Synthetic oligonucleotide
gugguuguggcagcauaug

SEQ ID NO: 2464552 - RNA, 19 nt, Artificial Sequence
  Description of Artificial Sequence: Synthetic oligonucleotide
cacccacugcaagagggcc

SEQ ID NO: 2464553 - RNA, 19 nt, Artificial Sequence
  Description of Artificial Sequence: Synthetic oligonucleotide
cuuggagcagguuggccaa

SEQ ID NO: 2464554 - RNA, 19 nt, Artificial Sequence
  Description of Artificial Sequence: Synthetic oligonucleotide
aaggccuuuagggcagcaa

SEQ ID NO: 2464555 - RNA, 19 nt, Artificial Sequence
  Description of Artificial Sequence: Synthetic oligonucleotide
ccgggcauguuuauccacc

SEQ ID NO: 2464556 - RNA, 19 nt, Artificial Sequence
  Description of Artificial Sequence: Synthetic oligonucleotide
ggacuucuaauggucagca

SEQ ID NO: 2464557 - RNA, 19 nt, Artificial Sequence
  Description of Artificial Sequence: Synthetic oligonucleotide
uggugcuaaagggccgggc

SEQ ID NO: 2464558 - RNA, 19 nt, Artificial Sequence
  Description of Artificial Sequence: Synthetic oligonucleotide
ggcuagaacaucaccuuca

SEQ ID NO: 2464559 - RNA, 19 nt, Artificial Sequence
  Description of Artificial Sequence: Synthetic oligonucleotide
ucguaacggucaccauugu

SEQ ID NO: 2464560 - RNA, 19 nt, Artificial Sequence
  Description of Artificial Sequence: Synthetic oligonucleotide
ggguuugauggugcuaaag

SEQ ID NO: 2464561 - RNA, 19 nt, Artificial Sequence
  Description of Artificial Sequence: Synthetic oligonucleotide
  modified_base (19)..(19): a, c, u, g, unknown or other
gucccgcagagauggaggn

SEQ ID NO: 2464562 - RNA, 19 nt, Artificial Sequence
  Description of Artificial Sequence: Synthetic oligonucleotide
gcuuugguuuguuccuagc

SEQ ID NO: 2464563 - RNA, 19 nt, Artificial Sequence
  Description of Artificial Sequence: Synthetic oligonucleotide
uagcugcaauauucauaca

SEQ ID NO: 2464564 - RNA, 19 nt, Artificial Sequence
  Description of Artificial Sequence: Synthetic oligonucleotide
guuggugcuugcccauaca

SEQ ID NO: 2464565 - RNA, 19 nt, Artificial Sequence
  Description of Artificial Sequence: Synthetic oligonucleotide
caagagggcccguggcuuc

SEQ ID NO: 2464566 - RNA, 19 nt, Artificial Sequence
  Description of Artificial Sequence: Synthetic oligonucleotide
cuagcaguagcugcaauau

SEQ ID NO: 2464567 - RNA, 19 nt, Artificial Sequence
  Description of Artificial Sequence: Synthetic oligonucleotide
gagccugugagcccaugcu

SEQ ID NO: 2464568 - RNA, 19 nt, Artificial Sequence
  Description of Artificial Sequence: Synthetic oligonucleotide
caccauugugugccacaag

SEQ ID NO: 2464569 - RNA, 19 nt, Artificial Sequence
  Description of Artificial Sequence: Synthetic oligonucleotide
caagcucugccuggagcag

SEQ ID NO: 2464570 - RNA, 19 nt, Artificial Sequence
  Description of Artificial Sequence: Synthetic oligonucleotide
caucuagaggacuucuaau

SEQ ID NO: 2464571 - RNA, 19 nt, Artificial Sequence
  Description of Artificial Sequence: Synthetic oligonucleotide
uggguuugauggugcuaaa

SEQ ID NO: 2464572 - RNA, 19 nt, Artificial Sequence
  Description of Artificial Sequence: Synthetic oligonucleotide
gagcaggggaaagucguaa

SEQ ID NO: 2464573 - RNA, 19 nt, Artificial Sequence
  Description of Artificial Sequence: Synthetic oligonucleotide
auggugcuaaagggccggg

SEQ ID NO: 2464574 - RNA, 19 nt, Artificial Sequence
  Description of Artificial Sequence: Synthetic oligonucleotide
aagggccgggcauguuuau

SEQ ID NO: 2464575 - RNA, 19 nt, Artificial Sequence
  Description of Artificial Sequence: Synthetic oligonucleotide
agguaccaucuagaggacu

SEQ ID NO: 2464576 - RNA, 19 nt, Artificial Sequence
  Description of Artificial Sequence: Synthetic oligonucleotide
gcggguauagaugcugccc

SEQ ID NO: 2464577 - RNA, 19 nt, Artificial Sequence
  Description of Artificial Sequence: Synthetic oligonucleotide
augcauagagagagcuugu

SEQ ID NO: 2464578 - RNA, 19 nt, Artificial Sequence
  Description of Artificial Sequence: Synthetic oligonucleotide
gagcugcuagcuuguucca

SEQ ID NO: 2464579 - RNA, 19 nt, Artificial Sequence
  Description of Artificial Sequence: Synthetic oligonucleotide
ggcggguauagaugcugcc

SEQ ID NO: 2464580 - RNA, 19 nt, Artificial Sequence
  Description of Artificial Sequence: Synthetic oligonucleotide
uuccuagcaguagcugcaa

SEQ ID NO: 2464581 - RNA, 19 nt, Artificial Sequence
  Description of Artificial Sequence: Synthetic oligonucleotide
cuggagcaaugcauagaga

SEQ ID NO: 2464582 - RNA, 19 nt, Artificial Sequence
  Description of Artificial Sequence: Synthetic oligonucleotide
ggcagcauauggccuuggc

SEQ ID NO: 2464583 - RNA, 19 nt, Artificial Sequence
  Description of Artificial Sequence: Synthetic oligonucleotide
auauggccuuggcuuuggu

SEQ ID NO: 2464584 - RNA, 19 nt, Artificial Sequence
  Description of Artificial Sequence: Synthetic oligonucleotide
uggcuuccacugacagaug

SEQ ID NO: 2464585 - RNA, 19 nt, Artificial Sequence
  Description of Artificial Sequence: Synthetic oligonucleotide
agggccgggcauguuuauc

SEQ ID NO: 2464586 - RNA, 19 nt, Artificial Sequence
  Description of Artificial Sequence: Synthetic oligonucleotide
ugcagggcuacaggcuuuc

SEQ ID NO: 2464587 - RNA, 19 nt, Artificial Sequence
  Description of Artificial Sequence: Synthetic oligonucleotide
gguuugggcacuggaggug

SEQ ID NO: 2464588 - RNA, 19 nt, Artificial Sequence
  Description of Artificial Sequence: Synthetic oligonucleotide
gcaaugcauagagagagcu

SEQ ID NO: 2464589 - RNA, 19 nt, Artificial Sequence
  Description of Artificial Sequence: Synthetic oligonucleotide
accacacggggugguuugg

SEQ ID NO: 2464590 - RNA, 19 nt, Artificial Sequence
  Description of Artificial Sequence: Synthetic oligonucleotide
gcagugugugagucuguug

SEQ ID NO: 2464591 - RNA, 19 nt, Artificial Sequence
  Description of Artificial Sequence: Synthetic oligonucleotide
uccuuggaccacgcucuga

SEQ ID NO: 2464592 - RNA, 19 nt, Artificial Sequence
  Description of Artificial Sequence: Synthetic oligonucleotide
ggggaaagucguaacgguc

SEQ ID NO: 2464593 - RNA, 19 nt, Artificial Sequence
  Description of Artificial Sequence: Synthetic oligonucleotide
guuuauccacccacugcaa

SEQ ID NO: 2464594 - RNA, 19 nt, Artificial Sequence
  Description of Artificial Sequence: Synthetic oligonucleotide
aggcuuucccuggagcaau

SEQ ID NO: 2464595 - RNA, 19 nt, Artificial Sequence
  Description of Artificial Sequence: Synthetic oligonucleotide
cccacugcaagagggcccg

SEQ ID NO: 2464596 - RNA, 19 nt, Artificial Sequence
  Description of Artificial Sequence: Synthetic oligonucleotide
cagggauguagugguugug

SEQ ID NO: 2464597 - RNA, 19 nt, Artificial Sequence
  Description of Artificial Sequence: Synthetic oligonucleotide
ggaccacgcucugaggagc

SEQ ID NO: 2464598 - RNA, 19 nt, Artificial Sequence
  Description of Artificial Sequence: Synthetic oligonucleotide
uugcccauacaggcgggua

SEQ ID NO: 2464599 - RNA, 19 nt, Artificial Sequence
  Description of Artificial Sequence: Synthetic oligonucleotide
gcagcauauggccuuggcu

SEQ ID NO: 2464600 - RNA, 19 nt, Artificial Sequence
  Description of Artificial Sequence: Synthetic oligonucleotide
ccuagcaguagcugcaaua

SEQ ID NO: 2464601 - RNA, 19 nt, Artificial Sequence
  Description of Artificial Sequence: Synthetic oligonucleotide
agggcccguggcuuccacu

SEQ ID NO: 2464602 - RNA, 19 nt, Artificial Sequence
  Description of Artificial Sequence: Synthetic oligonucleotide
ccuggagcaggggaaaguc

SEQ ID NO: 2464603 - RNA, 19 nt, Artificial Sequence
  Description of Artificial Sequence: Synthetic oligonucleotide
gcuacaggcuuucccugga

SEQ ID NO: 2464604 - RNA, 19 nt, Artificial Sequence
  Description of Artificial Sequence: Synthetic oligonucleotide
agcugcuagcuuguuccaa

SEQ ID NO: 2464605 - RNA, 19 nt, Artificial Sequence
  Description of Artificial Sequence: Synthetic oligonucleotide
agcuguguucagaccugug

SEQ ID NO: 2464606 - RNA, 19 nt, Artificial Sequence
  Description of Artificial Sequence: Synthetic oligonucleotide
caguucagcuguguucaga

SEQ ID NO: 2464607 - RNA, 19 nt, Artificial Sequence
  Description of Artificial Sequence: Synthetic oligonucleotide
accaucuagaggacuucua

SEQ ID NO: 2464608 - RNA, 19 nt, Artificial Sequence
  Description of Artificial Sequence: Synthetic oligonucleotide
ccacugacagaugcugagc

SEQ ID NO: 2464609 - RNA, 19 nt, Artificial Sequence
  Description of Artificial Sequence: Synthetic oligonucleotide
gggugguuugggcacugga

SEQ ID NO: 2464610 - RNA, 19 nt, Artificial Sequence
  Description of Artificial Sequence: Synthetic oligonucleotide
caaugcauagagagagcuu

SEQ ID NO: 2464611 - RNA, 19 nt, Artificial Sequence
  Description of Artificial Sequence: Synthetic oligonucleotide
gggacuuguguugguugug

SEQ ID NO: 2464612 - RNA, 19 nt, Artificial Sequence
  Description of Artificial Sequence: Synthetic oligonucleotide
gguaccaucuagaggacuu

SEQ ID NO: 2464613 - RNA, 19 nt, Artificial Sequence
  Description of Artificial Sequence: Synthetic oligonucleotide
cuuguccaccacacggggu

SEQ ID NO: 2464614 - RNA, 19 nt, Artificial Sequence
  Description of Artificial Sequence: Synthetic oligonucleotide
cgggcauguuuauccaccc

SEQ ID NO: 2464615 - RNA, 19 nt, Artificial Sequence
  Description of Artificial Sequence: Synthetic oligonucleotide
caugggaccgaggggcaga

SEQ ID NO: 2464616 - RNA, 19 nt, Artificial Sequence
  Description of Artificial Sequence: Synthetic oligonucleotide
  modified_base (14)..(14): a, c, u, g, unknown or other
gcagagauggaggnguuuu

SEQ ID NO: 2464617 - RNA, 19 nt, Artificial Sequence
  Description of Artificial Sequence: Synthetic oligonucleotide
gcauauggccuuggcuuug

SEQ ID NO: 2464618 - RNA, 19 nt, Artificial Sequence
  Description of Artificial Sequence: Synthetic oligonucleotide
acaggcggguauagaugcu

SEQ ID NO: 2464619 - RNA, 19 nt, Artificial Sequence
  Description of Artificial Sequence: Synthetic oligonucleotide
gggcauguuuauccaccca

SEQ ID NO: 2464620 - RNA, 19 nt, Artificial Sequence
  Description of Artificial Sequence: Synthetic oligonucleotide
ccacgcucugaggagcugc

SEQ ID NO: 2464621 - RNA, 19 nt, Artificial Sequence
  Description of Artificial Sequence: Synthetic oligonucleotide
gccgggcauguuuauccac

SEQ ID NO: 2464622 - RNA, 19 nt, Artificial Sequence
  Description of Artificial Sequence: Synthetic oligonucleotide
cauggguuugauggugcua

SEQ ID NO: 2464623 - RNA, 19 nt, Artificial Sequence
  Description of Artificial Sequence: Synthetic oligonucleotide
caguagcugcaauauucau

SEQ ID NO: 2464624 - RNA, 19 nt, Artificial Sequence
  Description of Artificial Sequence: Synthetic oligonucleotide
ggcuuggagcagguuggcc

SEQ ID NO: 2464625 - RNA, 19 nt, Artificial Sequence
  Description of Artificial Sequence: Synthetic oligonucleotide
gagggcccguggcuuccac

SEQ ID NO: 2464626 - RNA, 19 nt, Artificial Sequence
  Description of Artificial Sequence: Synthetic oligonucleotide
ugccguccauuugcuucca

SEQ ID NO: 2464627 - RNA, 19 nt, Artificial Sequence
  Description of Artificial Sequence: Synthetic oligonucleotide
gcuugcccauacaggcggg

SEQ ID NO: 2464628 - RNA, 19 nt, Artificial Sequence
  Description of Artificial Sequence: Synthetic oligonucleotide
accacgcucugaggagcug

SEQ ID NO: 2464629 - RNA, 19 nt, Artificial Sequence
  Description of Artificial Sequence: Synthetic oligonucleotide
gcaaugcuaucuacacaga

SEQ ID NO: 2464630 - RNA, 19 nt, Artificial Sequence
  Description of Artificial Sequence: Synthetic oligonucleotide
gcccguggcuuccacugac

SEQ ID NO: 2464631 - RNA, 19 nt, Artificial Sequence
  Description of Artificial Sequence: Synthetic oligonucleotide
cccauacaggcggguauag

SEQ ID NO: 2464632 - RNA, 19 nt, Artificial Sequence
  Description of Artificial Sequence: Synthetic oligonucleotide
ggccgggcauguuuaucca

SEQ ID NO: 2464633 - RNA, 19 nt, Artificial Sequence
  Description of Artificial Sequence: Synthetic oligonucleotide
gcuuguuccaaggccuuua

SEQ ID NO: 2464634 - RNA, 19 nt, Artificial Sequence
  Description of Artificial Sequence: Synthetic oligonucleotide
ugggaccgaggggcagagc

SEQ ID NO: 2464635 - RNA, 19 nt, Artificial Sequence
  Description of Artificial Sequence: Synthetic oligonucleotide
caaaggguugccguccauu

SEQ ID NO: 2464636 - RNA, 19 nt, Artificial Sequence
  Description of Artificial Sequence: Synthetic oligonucleotide
gaccacgcucugaggagcu

SEQ ID NO: 2464637 - RNA, 19 nt, Artificial Sequence
  Description of Artificial Sequence: Synthetic oligonucleotide
cacaaggcagcagggcugu

SEQ ID NO: 2464638 - RNA, 19 nt, Artificial Sequence
  Description of Artificial Sequence: Synthetic oligonucleotide
ggcuuucccuggagcaaug

SEQ ID NO: 2464639 - RNA, 19 nt, Artificial Sequence
  Description of Artificial Sequence: Synthetic oligonucleotide
cacgcucugaggagcugcu

SEQ ID NO: 2464640 - RNA, 19 nt, Artificial Sequence
  Description of Artificial Sequence: Synthetic oligonucleotide
gcaugggaccgaggggcag

SEQ ID NO: 2464641 - RNA, 19 nt, Artificial Sequence
  Description of Artificial Sequence: Synthetic oligonucleotide
  modified_base (3)..(3): a, c, u, g, unknown or other
ggnguuuuccagggcacau

SEQ ID NO: 2464642 - RNA, 19 nt, Artificial Sequence
  Description of Artificial Sequence: Synthetic oligonucleotide
acaaggcagcagggcugug

SEQ ID NO: 2464643 - RNA, 19 nt, Artificial Sequence
  Description of Artificial Sequence: Synthetic oligonucleotide
caaggccuuuagggcagca

SEQ ID NO: 2464644 - RNA, 19 nt, Artificial Sequence
  Description of Artificial Sequence: Synthetic oligonucleotide
gccguccauuugcuuccag

SEQ ID NO: 2464645 - RNA, 19 nt, Artificial Sequence
  Description of Artificial Sequence: Synthetic oligonucleotide
cugugaucuugggcugaga

SEQ ID NO: 2464646 - RNA, 19 nt, Artificial Sequence
  Description of Artificial Sequence: Synthetic oligonucleotide
gcuaaagggccgggcaugu

SEQ ID NO: 2464647 - RNA, 19 nt, Artificial Sequence
  Description of Artificial Sequence: Synthetic oligonucleotide
cuugcccauacaggcgggu

SEQ ID NO: 2464648 - RNA, 19 nt, Artificial Sequence
  Description of Artificial Sequence: Synthetic oligonucleotide
gcacaucuauggacagcca

SEQ ID NO: 2464649 - RNA, 19 nt, Artificial Sequence
  Description of Artificial Sequence: Synthetic oligonucleotide
ccguccauuugcuuccagu

SEQ ID NO: 2464650 - RNA, 19 nt, Artificial Sequence
  Description of Artificial Sequence: Synthetic oligonucleotide
cucuuccuuggaccacgcu

SEQ ID NO: 2464651 - RNA, 19 nt, Artificial Sequence
  Description of Artificial Sequence: Synthetic oligonucleotide
accgaggggcagagccugu

SEQ ID NO: 2464652 - RNA, 19 nt, Artificial Sequence
  Description of Artificial Sequence: Synthetic oligonucleotide
cugcauggcugggacuugu

SEQ ID NO: 2464653 - RNA, 19 nt, Artificial Sequence
  Description of Artificial Sequence: Synthetic oligonucleotide
ccauacaggcggguauaga

SEQ ID NO: 2464654 - RNA, 19 nt, Artificial Sequence
  Description of Artificial Sequence: Synthetic oligonucleotide
gcccauacaggcggguaua

SEQ ID NO: 2464655 - RNA, 19 nt, Artificial Sequence
  Description of Artificial Sequence: Synthetic oligonucleotide
ggguugccguccauuugcu

SEQ ID NO: 2464656 - RNA, 19 nt, Artificial Sequence
  Description of Artificial Sequence: Synthetic oligonucleotide
cuaaagggccgggcauguu

SEQ ID NO: 2464657 - RNA, 19 nt, Artificial Sequence
  Description of Artificial Sequence: Synthetic oligonucleotide
cacuggcugcagggcuaca

SEQ ID NO: 2464658 - RNA, 19 nt, Artificial Sequence
  Description of Artificial Sequence: Synthetic oligonucleotide
gcugucccgcagagaugga

SEQ ID NO: 2464659 - RNA, 19 nt, Artificial Sequence
  Description of Artificial Sequence: Synthetic oligonucleotide
  modified_base (16)..(16): a, c, u, g, unknown or other
ccgcagagauggaggnguu

SEQ ID NO: 2464660 - RNA, 19 nt, Artificial Sequence
  Description of Artificial Sequence: Synthetic oligonucleotide
  modified_base (15)..(15): a, c, u, g, unknown or other
cgcagagauggaggnguuu

SEQ ID NO: 2464661 - RNA, 19 nt, Artificial Sequence
  Description of Artificial Sequence: Synthetic oligonucleotide
ccacugcaagagggcccgu

SEQ ID NO: 2464662 - RNA, 19 nt, Artificial Sequence
  Description of Artificial Sequence: Synthetic oligonucleotide
uuagauauaucuaacaucu

SEQ ID NO: 2464663 - RNA, 19 nt, Artificial Sequence
  Description of Artificial Sequence: Synthetic oligonucleotide
aaucacuuggcauuaaugg

SEQ ID NO: 2464664 - RNA, 19 nt, Artificial Sequence
  Description of Artificial Sequence: Synthetic oligonucleotide
agauauaucuaacaucucc

SEQ ID NO: 2464665 - RNA, 19 nt, Artificial Sequence
  Description of Artificial Sequence: Synthetic oligonucleotide
aacuauaucaaauuugaga

SEQ ID NO: 2464666 - RNA, 19 nt, Artificial Sequence
  Description of Artificial Sequence: Synthetic oligonucleotide
aaauguaccauauaucugu

SEQ ID NO: 2464667 - RNA, 19 nt, Artificial Sequence
  Description of Artificial Sequence: Synthetic oligonucleotide
gauaauuuucuucaguuag

SEQ ID NO: 2464668 - RNA, 19 nt, Artificial Sequence
  Description of Artificial Sequence: Synthetic oligonucleotide
uaaaggaggaacuauauca

SEQ ID NO: 2464669 - RNA, 19 nt, Artificial Sequence
  Description of Artificial Sequence: Synthetic oligonucleotide
uucuuaaccaaacaggaag

SEQ ID NO: 2464670 - RNA, 19 nt, Artificial Sequence
  Description of Artificial Sequence: Synthetic oligonucleotide
aacaaaaccuaucaauauc

SEQ ID NO: 2464671 - RNA, 19 nt, Artificial Sequence
  Description of Artificial Sequence: Synthetic oligonucleotide
aaagacggcaaucacuugg

SEQ ID NO: 2464672 - RNA, 19 nt, Artificial Sequence
  Description of Artificial Sequence: Synthetic oligonucleotide
aaaauauccaucuuggcua

SEQ ID NO: 2464673 - RNA, 19 nt, Artificial Sequence
  Description of Artificial Sequence: Synthetic oligonucleotide
aauuccaacaaauguacca

SEQ ID NO: 2464674 - RNA, 19 nt, Artificial Sequence
  Description of Artificial Sequence: Synthetic oligonucleotide
guuuguaucuaaaugaggg

SEQ ID NO: 2464675 - RNA, 19 nt, Artificial Sequence
  Description of Artificial Sequence: Synthetic oligonucleotide
auaucugugauacacagcu

SEQ ID NO: 2464676 - RNA, 19 nt, Artificial Sequence
  Description of Artificial Sequence: Synthetic oligonucleotide
agagucacacuucuuaacc

SEQ ID NO: 2464677 - RNA, 19 nt, Artificial Sequence
  Description of Artificial Sequence: Synthetic oligonucleotide
uuagguuuguaucuaaaug

SEQ ID NO: 2464678 - RNA, 19 nt, Artificial Sequence
  Description of Artificial Sequence: Synthetic oligonucleotide
acaaaaccuaucaauaucc

SEQ ID NO: 2464679 - RNA, 19 nt, Artificial Sequence
  Description of Artificial Sequence: Synthetic oligonucleotide
ucaguuaguacuuugggga

SEQ ID NO: 2464680 - RNA, 19 nt, Artificial Sequence
  Description of Artificial Sequence: Synthetic oligonucleotide
uauaucaaauuugagaaga

SEQ ID NO: 2464681 - RNA, 19 nt, Artificial Sequence
  Description of Artificial Sequence: Synthetic oligonucleotide
ucuuaaccaaacaggaagg

SEQ ID NO: 2464682 - RNA, 19 nt, Artificial Sequence
  Description of Artificial Sequence: Synthetic oligonucleotide
aauaucugagaucugcugu

SEQ ID NO: 2464683 - RNA, 19 nt, Artificial Sequence
  Description of Artificial Sequence: Synthetic oligonucleotide
ucuggagaaguucacaaag

SEQ ID NO: 2464684 - RNA, 19 nt, Artificial Sequence
  Description of Artificial Sequence: Synthetic oligonucleotide
aaguucaauuucuagguug

SEQ ID NO: 2464685 - RNA, 19 nt, Artificial Sequence
  Description of Artificial Sequence: Synthetic oligonucleotide
aaguucacaaagcaaggag

SEQ ID NO: 2464686 - RNA, 19 nt, Artificial Sequence
  Description of Artificial Sequence: Synthetic oligonucleotide
uagguuuguaucuaaauga

SEQ ID NO: 2464687 - RNA, 19 nt, Artificial Sequence
  Description of Artificial Sequence: Synthetic oligonucleotide
ugagggauauuucuaauug

SEQ ID NO: 2464688 - RNA, 19 nt, Artificial Sequence
  Description of Artificial Sequence: Synthetic oligonucleotide
uuugacuacacauaauuaa

SEQ ID NO: 2464689 - RNA, 19 nt, Artificial Sequence
  Description of Artificial Sequence: Synthetic oligonucleotide
ucuucaguuaguacuuugg

SEQ ID NO: 2464690 - RNA, 19 nt, Artificial Sequence
  Description of Artificial Sequence: Synthetic oligonucleotide
uguaaucuggagaaguuca

SEQ ID NO: 2464691 - RNA, 19 nt, Artificial Sequence
  Description of Artificial Sequence: Synthetic oligonucleotide
ugauuauucaugauuugca

SEQ ID NO: 2464692 - RNA, 19 nt, Artificial Sequence
  Description of Artificial Sequence: Synthetic oligonucleotide
acuuuggggauacacaagg

SEQ ID NO: 2464693 - RNA, 19 nt, Artificial Sequence
  Description of Artificial Sequence: Synthetic oligonucleotide
augauuauucaugauuugc

SEQ ID NO: 2464694 - RNA, 19 nt, Artificial Sequence
  Description of Artificial Sequence: Synthetic oligonucleotide
cucgaugaaagucacagcc

SEQ ID NO: 2464695 - RNA, 19 nt, Artificial Sequence
  Description of Artificial Sequence: Synthetic oligonucleotide
ugauacacagcuucaauug

SEQ ID NO: 2464696 - RNA, 19 nt, Artificial Sequence
  Description of Artificial Sequence: Synthetic oligonucleotide
uucaguuaguacuuugggg

SEQ ID NO: 2464697 - RNA, 19 nt, Artificial Sequence
  Description of Artificial Sequence: Synthetic oligonucleotide
ucaauuucuagguuguucu

SEQ ID NO: 2464698 - RNA, 19 nt, Artificial Sequence
  Description of Artificial Sequence: Synthetic oligonucleotide
aaaccuaucaauaucccug

SEQ ID NO: 2464699 - RNA, 19 nt, Artificial Sequence
  Description of Artificial Sequence: Synthetic oligonucleotide
aauuucuagguuguucugg

SEQ ID NO: 2464700 - RNA, 19 nt, Artificial Sequence
  Description of Artificial Sequence: Synthetic oligonucleotide
ucuuagauauaucuaacau

SEQ ID NO: 2464701 - RNA, 19 nt, Artificial Sequence
  Description of Artificial Sequence: Synthetic oligonucleotide
aaaauggacuucuuugacu

SEQ ID NO: 2464702 - RNA, 19 nt, Artificial Sequence
  Description of Artificial Sequence: Synthetic oligonucleotide
aaggaugaauaagaucugc

SEQ ID NO: 2464703 - RNA, 19 nt, Artificial Sequence
  Description of Artificial Sequence: Synthetic oligonucleotide
aacaaaaggaaagacggca

SEQ ID NO: 2464704 - RNA, 19 nt, Artificial Sequence
  Description of Artificial Sequence: Synthetic oligonucleotide
cacuucuuaaccaaacagg

SEQ ID NO: 2464705 - RNA, 19 nt, Artificial Sequence
  Description of Artificial Sequence: Synthetic oligonucleotide
aacaaauguaccauauauc

SEQ ID NO: 2464706 - RNA, 19 nt, Artificial Sequence
  Description of Artificial Sequence: Synthetic oligonucleotide
uuagaaguucaauuucuag

SEQ ID NO: 2464707 - RNA, 19 nt, Artificial Sequence
  Description of Artificial Sequence: Synthetic oligonucleotide
aagauugguuuccaacuuc

SEQ ID NO: 2464708 - RNA, 19 nt, Artificial Sequence
  Description of Artificial Sequence: Synthetic oligonucleotide
cuuagauauaucuaacauc

SEQ ID NO: 2464709 - RNA, 19 nt, Artificial Sequence
  Description of Artificial Sequence: Synthetic oligonucleotide
uucucgaugaaagucacag

SEQ ID NO: 2464710 - RNA, 19 nt, Artificial Sequence
  Description of Artificial Sequence: Synthetic oligonucleotide
aaaaccuaucaauaucccu

SEQ ID NO: 2464711 - RNA, 19 nt, Artificial Sequence
  Description of Artificial Sequence: Synthetic oligonucleotide
uauaucuaacaucuccuca

SEQ ID NO: 2464712 - RNA, 19 nt, Artificial Sequence
  Description of Artificial Sequence: Synthetic oligonucleotide
gauacacagcuucaauugg

SEQ ID NO: 2464713 - RNA, 19 nt, Artificial Sequence
  Description of Artificial Sequence: Synthetic oligonucleotide
aaaaggaaagacggcaauc

SEQ ID NO: 2464714 - RNA, 19 nt, Artificial Sequence
  Description of Artificial Sequence: Synthetic oligonucleotide
uguaccauauaucugugau

SEQ ID NO: 2464715 - RNA, 19 nt, Artificial Sequence
  Description of Artificial Sequence: Synthetic oligonucleotide
uaccauauaucugugauac

SEQ ID NO: 2464716 - RNA, 19 nt, Artificial Sequence
  Description of Artificial Sequence: Synthetic oligonucleotide
acuugaguauauucucugc

SEQ ID NO: 2464717 - RNA, 19 nt, Artificial Sequence
  Description of Artificial Sequence: Synthetic oligonucleotide
uugaauaucugagaucugc

SEQ ID NO: 2464718 - RNA, 19 nt, Artificial Sequence
  Description of Artificial Sequence: Synthetic oligonucleotide
auauaucuaacaucuccuc

SEQ ID NO: 2464719 - RNA, 19 nt, Artificial Sequence
  Description of Artificial Sequence: Synthetic oligonucleotide
aaaugagggauauuucuaa

SEQ ID NO: 2464720 - RNA, 19 nt, Artificial Sequence
  Description of Artificial Sequence: Synthetic oligonucleotide
aguuuuagaaguucaauuu

SEQ ID NO: 2464721 - RNA, 19 nt, Artificial Sequence
  Description of Artificial Sequence: Synthetic oligonucleotide
aaacaaaaggaaagacggc

SEQ ID NO: 2464722 - RNA, 19 nt, Artificial Sequence
  Description of Artificial Sequence: Synthetic oligonucleotide
aaggaaagacggcaaucac

SEQ ID NO: 2464723 - RNA, 19 nt, Artificial Sequence
  Description of Artificial Sequence: Synthetic oligonucleotide
augauuugcagagagucac

SEQ ID NO: 2464724 - RNA, 19 nt, Artificial Sequence
  Description of Artificial Sequence: Synthetic oligonucleotide
aaaggaaagacggcaauca

SEQ ID NO: 2464725 - RNA, 19 nt, Artificial Sequence
  Description of Artificial Sequence: Synthetic oligonucleotide
uugacuacacauaauuaaa

SEQ ID NO: 2464726 - RNA, 19 nt, Artificial Sequence
  Description of Artificial Sequence: Synthetic oligonucleotide
cuugaguauauucucugcc

SEQ ID NO: 2464727 - RNA, 19 nt, Artificial Sequence
  Description of Artificial Sequence: Synthetic oligonucleotide
aauuggcagguucuccugg

SEQ ID NO: 2464728 - RNA, 19 nt, Artificial Sequence
  Description of Artificial Sequence: Synthetic oligonucleotide
uucuuagauauaucuaaca

SEQ ID NO: 2464729 - RNA, 19 nt, Artificial Sequence
  Description of Artificial Sequence: Synthetic oligonucleotide
aacaggaaggaugaauaag

SEQ ID NO: 2464730 - RNA, 19 nt, Artificial Sequence
  Description of Artificial Sequence: Synthetic oligonucleotide
uucaagauugguuuccaac

SEQ ID NO: 2464731 - RNA, 19 nt, Artificial Sequence
  Description of Artificial Sequence: Synthetic oligonucleotide
uuucuuagauauaucuaac

SEQ ID NO: 2464732 - RNA, 19 nt, Artificial Sequence
  Description of Artificial Sequence: Synthetic oligonucleotide
uucuaguuuuagaaguuca

SEQ ID NO: 2464733 - RNA, 19 nt, Artificial Sequence
  Description of Artificial Sequence: Synthetic oligonucleotide
agugacuauccccgaagcc

SEQ ID NO: 2464734 - RNA, 19 nt, Artificial Sequence
  Description of Artificial Sequence: Synthetic oligonucleotide
uuuguaucuaaaugaggga

SEQ ID NO: 2464735 - RNA, 19 nt, Artificial Sequence
  Description of Artificial Sequence: Synthetic oligonucleotide
ucaugauuugcagagaguc

SEQ ID NO: 2464736 - RNA, 19 nt, Artificial Sequence
  Description of Artificial Sequence: Synthetic oligonucleotide
uccagaugauuauucauga

SEQ ID NO: 2464737 - RNA, 19 nt, Artificial Sequence
  Description of Artificial Sequence: Synthetic oligonucleotide
aggaaggaugaauaagauc

SEQ ID NO: 2464738 - RNA, 19 nt, Artificial Sequence
  Description of Artificial Sequence: Synthetic oligonucleotide
uugaguauauucucugcca

SEQ ID NO: 2464739 - RNA, 19 nt, Artificial Sequence
  Description of Artificial Sequence: Synthetic oligonucleotide
cacagcuucaauuggcagg

SEQ ID NO: 2464740 - RNA, 19 nt, Artificial Sequence
  Description of Artificial Sequence: Synthetic oligonucleotide
gaauaucugagaucugcug

SEQ ID NO: 2464741 - RNA, 19 nt, Artificial Sequence
  Description of Artificial Sequence: Synthetic oligonucleotide
aucaaauuugagaagauaa

SEQ ID NO: 2464742 - RNA, 19 nt, Artificial Sequence
  Description of Artificial Sequence: Synthetic oligonucleotide
uaguuuuagaaguucaauu

SEQ ID NO: 2464743 - RNA, 19 nt, Artificial Sequence
  Description of Artificial Sequence: Synthetic oligonucleotide
cuucaguuaguacuuuggg

SEQ ID NO: 2464744 - RNA, 19 nt, Artificial Sequence
  Description of Artificial Sequence: Synthetic oligonucleotide
uuggcauuaaugguuuggg

SEQ ID NO: 2464745 - RNA, 19 nt, Artificial Sequence
  Description of Artificial Sequence: Synthetic oligonucleotide
aauuguuucaagauugguu

SEQ ID NO: 2464746 - RNA, 19 nt, Artificial Sequence
  Description of Artificial Sequence: Synthetic oligonucleotide
uuuggggauacacaaggaa

SEQ ID NO: 2464747 - RNA, 19 nt, Artificial Sequence
  Description of Artificial Sequence: Synthetic oligonucleotide
uauccaucuuggcuaaugc

SEQ ID NO: 2464748 - RNA, 19 nt, Artificial Sequence
  Description of Artificial Sequence: Synthetic oligonucleotide
ugaauaucugagaucugcu

SEQ ID NO: 2464749 - RNA, 19 nt, Artificial Sequence
  Description of Artificial Sequence: Synthetic oligonucleotide
uaaaugagggauauuucua

SEQ ID NO: 2464750 - RNA, 19 nt, Artificial Sequence
  Description of Artificial Sequence: Synthetic oligonucleotide
aagacggcaaucacuuggc

SEQ ID NO: 2464751 - RNA, 19 nt, Artificial Sequence
  Description of Artificial Sequence: Synthetic oligonucleotide
cuauaucaaauuugagaag

SEQ ID NO: 2464752 - RNA, 19 nt, Artificial Sequence
  Description of Artificial Sequence: Synthetic oligonucleotide
agaagauaauuuucuucag

SEQ ID NO: 2464753 - RNA, 19 nt, Artificial Sequence
  Description of Artificial Sequence: Synthetic oligonucleotide
uauaucugugauacacagc

SEQ ID NO: 2464754 - RNA, 19 nt, Artificial Sequence
  Description of Artificial Sequence: Synthetic oligonucleotide
ucuaguuuuagaaguucaa

SEQ ID NO: 2464755 - RNA, 19 nt, Artificial Sequence
  Description of Artificial Sequence: Synthetic oligonucleotide
aaccuaucaauaucccugu

SEQ ID NO: 2464756 - RNA, 19 nt, Artificial Sequence
  Description of Artificial Sequence: Synthetic oligonucleotide
cuacacauaauuaaacaaa

SEQ ID NO: 2464757 - RNA, 19 nt, Artificial Sequence
  Description of Artificial Sequence: Synthetic oligonucleotide
aucaauaucccugucacaa

SEQ ID NO: 2464758 - RNA, 19 nt, Artificial Sequence
  Description of Artificial Sequence: Synthetic oligonucleotide
ugaguauauucucugccaa

SEQ ID NO: 2464759 - RNA, 19 nt, Artificial Sequence
  Description of Artificial Sequence: Synthetic oligonucleotide
auacacagcuucaauuggc

SEQ ID NO: 2464760 - RNA, 19 nt, Artificial Sequence
  Description of Artificial Sequence: Synthetic oligonucleotide
uguuucaagauugguuucc

SEQ ID NO: 2464761 - RNA, 19 nt, Artificial Sequence
  Description of Artificial Sequence: Synthetic oligonucleotide
agccauggcucccacacac

SEQ ID NO: 2464762 - RNA, 19 nt, Artificial Sequence
  Description of Artificial Sequence: Synthetic oligonucleotide
aacuucucgaugaaaguca

SEQ ID NO: 2464763 - RNA, 19 nt, Artificial Sequence
  Description of Artificial Sequence: Synthetic oligonucleotide
aaugagggauauuucuaau

SEQ ID NO: 2464764 - RNA, 19 nt, Artificial Sequence
  Description of Artificial Sequence: Synthetic oligonucleotide
uguuguucucgccacuuga

SEQ ID NO: 2464765 - RNA, 19 nt, Artificial Sequence
  Description of Artificial Sequence: Synthetic oligonucleotide
agcuugaauaucugagauc

SEQ ID NO: 2464766 - RNA, 19 nt, Artificial Sequence
  Description of Artificial Sequence: Synthetic oligonucleotide
ugcuguauccuuuucuagu

SEQ ID NO: 2464767 - RNA, 19 nt, Artificial Sequence
  Description of Artificial Sequence: Synthetic oligonucleotide
uccaacaaauguaccauau

SEQ ID NO: 2464768 - RNA, 19 nt, Artificial Sequence
  Description of Artificial Sequence: Synthetic oligonucleotide
agcuucaauuggcagguuc

SEQ ID NO: 2464769 - RNA, 19 nt, Artificial Sequence
  Description of Artificial Sequence: Synthetic oligonucleotide
ucugagaucugcuguaauc

SEQ ID NO: 2464770 - RNA, 19 nt, Artificial Sequence
  Description of Artificial Sequence: Synthetic oligonucleotide
uacacaaggaaauuuccuu

SEQ ID NO: 2464771 - RNA, 19 nt, Artificial Sequence
  Description of Artificial Sequence: Synthetic oligonucleotide
uguaucuaaaugagggaua

SEQ ID NO: 2464772 - RNA, 19 nt, Artificial Sequence
  Description of Artificial Sequence: Synthetic oligonucleotide
uuguaucuaaaugagggau

SEQ ID NO: 2464773 - RNA, 19 nt, Artificial Sequence
  Description of Artificial Sequence: Synthetic oligonucleotide
caaaaccuaucaauauccc

SEQ ID NO: 2464774 - RNA, 19 nt, Artificial Sequence
  Description of Artificial Sequence: Synthetic oligonucleotide
acuucuuaaccaaacagga

SEQ ID NO: 2464775 - RNA, 19 nt, Artificial Sequence
  Description of Artificial Sequence: Synthetic oligonucleotide
aucacuuggcauuaauggu

SEQ ID NO: 2464776 - RNA, 19 nt, Artificial Sequence
  Description of Artificial Sequence: Synthetic oligonucleotide
ucacuuggcauuaaugguu

SEQ ID NO: 2464777 - RNA, 19 nt, Artificial Sequence
  Description of Artificial Sequence: Synthetic oligonucleotide
aaauauccaucuuggcuaa

SEQ ID NO: 2464778 - RNA, 19 nt, Artificial Sequence
  Description of Artificial Sequence: Synthetic oligonucleotide
uacacagcuucaauuggca

SEQ ID NO: 2464779 - RNA, 19 nt, Artificial Sequence
  Description of Artificial Sequence: Synthetic oligonucleotide
aaugccuugcucauuuucu

SEQ ID NO: 2464780 - RNA, 19 nt, Artificial Sequence
  Description of Artificial Sequence: Synthetic oligonucleotide
caaucacuuggcauuaaug

SEQ ID NO: 2464781 - RNA, 19 nt, Artificial Sequence
  Description of Artificial Sequence: Synthetic oligonucleotide
ucugucuuguucaccaaaa

SEQ ID NO: 2464782 - RNA, 19 nt, Artificial Sequence
  Description of Artificial Sequence: Synthetic oligonucleotide
ucgaugaaagucacagcca

SEQ ID NO: 2464783 - RNA, 19 nt, Artificial Sequence
  Description of Artificial Sequence: Synthetic oligonucleotide
cuuuucuaguuuuagaagu

SEQ ID NO: 2464784 - RNA, 19 nt, Artificial Sequence
  Description of Artificial Sequence: Synthetic oligonucleotide
agaaguucacaaagcaagg

SEQ ID NO: 2464785 - RNA, 19 nt, Artificial Sequence
  Description of Artificial Sequence: Synthetic oligonucleotide
aggaacuauaucaaauuug

SEQ ID NO: 2464786 - RNA, 19 nt, Artificial Sequence
  Description of Artificial Sequence: Synthetic oligonucleotide
ugcagagagucacacuucu

SEQ ID NO: 2464787 - RNA, 19 nt, Artificial Sequence
  Description of Artificial Sequence: Synthetic oligonucleotide
cuuggcauuaaugguuugg

SEQ ID NO: 2464788 - RNA, 19 nt, Artificial Sequence
  Description of Artificial Sequence: Synthetic oligonucleotide
ggaugaauaagaucugcug

SEQ ID NO: 2464789 - RNA, 19 nt, Artificial Sequence
  Description of Artificial Sequence: Synthetic oligonucleotide
agaugauuauucaugauuu

SEQ ID NO: 2464790 - RNA, 19 nt, Artificial Sequence
  Description of Artificial Sequence: Synthetic oligonucleotide
ucuccuggcacaugggucu

SEQ ID NO: 2464791 - RNA, 19 nt, Artificial Sequence
  Description of Artificial Sequence: Synthetic oligonucleotide
acaaggaaauuuccuuuug

SEQ ID NO: 2464792 - RNA, 19 nt, Artificial Sequence
  Description of Artificial Sequence: Synthetic oligonucleotide
aaaggaggaacuauaucaa

SEQ ID NO: 2464793 - RNA, 19 nt, Artificial Sequence
  Description of Artificial Sequence: Synthetic oligonucleotide
uacuuuggggauacacaag

SEQ ID NO: 2464794 - RNA, 19 nt, Artificial Sequence
  Description of Artificial Sequence: Synthetic oligonucleotide
ugagaucugcuguaaucug

SEQ ID NO: 2464795 - RNA, 19 nt, Artificial Sequence
  Description of Artificial Sequence: Synthetic oligonucleotide
uaucuaacaucuccucagu

SEQ ID NO: 2464796 - RNA, 19 nt, Artificial Sequence
  Description of Artificial Sequence: Synthetic oligonucleotide
cuaaaugagggauauuucu

SEQ ID NO: 2464797 - RNA, 19 nt, Artificial Sequence
  Description of Artificial Sequence: Synthetic oligonucleotide
ugacuauccccgaagccac

SEQ ID NO: 2464798 - RNA, 19 nt, Artificial Sequence
  Description of Artificial Sequence: Synthetic oligonucleotide
ggaacuauaucaaauuuga

SEQ ID NO: 2464799 - RNA, 19 nt, Artificial Sequence
  Description of Artificial Sequence: Synthetic oligonucleotide
ggcauuaaugguuugggca

SEQ ID NO: 2464800 - RNA, 19 nt, Artificial Sequence
  Description of Artificial Sequence: Synthetic oligonucleotide
gauauaucuaacaucuccu

SEQ ID NO: 2464801 - RNA, 19 nt, Artificial Sequence
  Description of Artificial Sequence: Synthetic oligonucleotide
agguuuguaucuaaaugag

SEQ ID NO: 2464802 - RNA, 19 nt, Artificial Sequence
  Description of Artificial Sequence: Synthetic oligonucleotide
aauaucccugucacaauca

SEQ ID NO: 2464803 - RNA, 19 nt, Artificial Sequence
  Description of Artificial Sequence: Synthetic oligonucleotide
caauaucccugucacaauc

SEQ ID NO: 2464804 - RNA, 19 nt, Artificial Sequence
  Description of Artificial Sequence: Synthetic oligonucleotide
aauguaccauauaucugug

SEQ ID NO: 2464805 - RNA, 19 nt, Artificial Sequence
  Description of Artificial Sequence: Synthetic oligonucleotide
uguucucgccacuugagua

SEQ ID NO: 2464806 - RNA, 19 nt, Artificial Sequence
  Description of Artificial Sequence: Synthetic oligonucleotide
uucaugauuugcagagagu

SEQ ID NO: 2464807 - RNA, 19 nt, Artificial Sequence
  Description of Artificial Sequence: Synthetic oligonucleotide
cacuugaguauauucucug

SEQ ID NO: 2464808 - RNA, 19 nt, Artificial Sequence
  Description of Artificial Sequence: Synthetic oligonucleotide
ugcuguaaucuggagaagu

SEQ ID NO: 2464809 - RNA, 19 nt, Artificial Sequence
  Description of Artificial Sequence: Synthetic oligonucleotide
cuugcucauuuucuuuagg

SEQ ID NO: 2464810 - RNA, 19 nt, Artificial Sequence
  Description of Artificial Sequence: Synthetic oligonucleotide
guacuuuggggauacacaa

SEQ ID NO: 2464811 - RNA, 19 nt, Artificial Sequence
  Description of Artificial Sequence: Synthetic oligonucleotide
aagguaaaggaggaacuau

SEQ ID NO: 2464812 - RNA, 19 nt, Artificial Sequence
  Description of Artificial Sequence: Synthetic oligonucleotide
gagagucacacuucuuaac

SEQ ID NO: 2464813 - RNA, 19 nt, Artificial Sequence
  Description of Artificial Sequence: Synthetic oligonucleotide
ugguucagcaguagcccag

SEQ ID NO: 2464814 - RNA, 19 nt, Artificial Sequence
  Description of Artificial Sequence: Synthetic oligonucleotide
guaaaggaggaacuauauc

SEQ ID NO: 2464815 - RNA, 19 nt, Artificial Sequence
  Description of Artificial Sequence: Synthetic oligonucleotide
cagucuuugccugauggcc

SEQ ID NO: 2464816 - RNA, 19 nt, Artificial Sequence
  Description of Artificial Sequence: Synthetic oligonucleotide
aguacuuuggggauacaca

SEQ ID NO: 2464817 - RNA, 19 nt, Artificial Sequence
  Description of Artificial Sequence: Synthetic oligonucleotide
uggcauuaaugguuugggc

SEQ ID NO: 2464818 - RNA, 19 nt, Artificial Sequence
  Description of Artificial Sequence: Synthetic oligonucleotide
uaauuguuucaagauuggu

SEQ ID NO: 2464819 - RNA, 19 nt, Artificial Sequence
  Description of Artificial Sequence: Synthetic oligonucleotide
auaagaucugcuguauccu

SEQ ID NO: 2464820 - RNA, 19 nt, Artificial Sequence
  Description of Artificial Sequence: Synthetic oligonucleotide
accauuuccagaugauuau

SEQ ID NO: 2464821 - RNA, 19 nt, Artificial Sequence
  Description of Artificial Sequence: Synthetic oligonucleotide
uaguacuuuggggauacac

SEQ ID NO: 2464822 - RNA, 19 nt, Artificial Sequence
  Description of Artificial Sequence: Synthetic oligonucleotide
cauauaucugugauacaca

SEQ ID NO: 2464823 - RNA, 19 nt, Artificial Sequence
  Description of Artificial Sequence: Synthetic oligonucleotide
gggcaugaacuuuagaaac

SEQ ID NO: 2464824 - RNA, 19 nt, Artificial Sequence
  Description of Artificial Sequence: Synthetic oligonucleotide
agguuguucugguugauuu

SEQ ID NO: 2464825 - RNA, 19 nt, Artificial Sequence
  Description of Artificial Sequence: Synthetic oligonucleotide
ugauuugcagagagucaca

SEQ ID NO: 2464826 - RNA, 19 nt, Artificial Sequence
  Description of Artificial Sequence: Synthetic oligonucleotide
ccauauaucugugauacac

SEQ ID NO: 2464827 - RNA, 19 nt, Artificial Sequence
  Description of Artificial Sequence: Synthetic oligonucleotide
acggcaaucacuuggcauu

SEQ ID NO: 2464828 - RNA, 19 nt, Artificial Sequence
  Description of Artificial Sequence: Synthetic oligonucleotide
agagagucacacuucuuaa

SEQ ID NO: 2464829 - RNA, 19 nt, Artificial Sequence
  Description of Artificial Sequence: Synthetic oligonucleotide
acuauccccgaagccaccc

SEQ ID NO: 2464830 - RNA, 19 nt, Artificial Sequence
  Description of Artificial Sequence: Synthetic oligonucleotide
auuccaacaaauguaccau

SEQ ID NO: 2464831 - RNA, 19 nt, Artificial Sequence
  Description of Artificial Sequence: Synthetic oligonucleotide
ucucgaugaaagucacagc

SEQ ID NO: 2464832 - RNA, 19 nt, Artificial Sequence
  Description of Artificial Sequence: Synthetic oligonucleotide
aguucaauuucuagguugu

SEQ ID NO: 2464833 - RNA, 19 nt, Artificial Sequence
  Description of Artificial Sequence: Synthetic oligonucleotide
guuaguacuuuggggauac

SEQ ID NO: 2464834 - RNA, 19 nt, Artificial Sequence
  Description of Artificial Sequence: Synthetic oligonucleotide
uucugucuuguucaccaaa

SEQ ID NO: 2464835 - RNA, 19 nt, Artificial Sequence
  Description of Artificial Sequence: Synthetic oligonucleotide
gagucacacuucuuaacca

SEQ ID NO: 2464836 - RNA, 19 nt, Artificial Sequence
  Description of Artificial Sequence: Synthetic oligonucleotide
ugaauaagaucugcuguau

SEQ ID NO: 2464837 - RNA, 19 nt, Artificial Sequence
  Description of Artificial Sequence: Synthetic oligonucleotide
cuucuuugacuacacauaa

SEQ ID NO: 2464838 - RNA, 19 nt, Artificial Sequence
  Description of Artificial Sequence: Synthetic oligonucleotide
aguauauucucugccaauu

SEQ ID NO: 2464839 - RNA, 19 nt, Artificial Sequence
  Description of Artificial Sequence: Synthetic oligonucleotide
uuuuguuguucucgccacu

SEQ ID NO: 2464840 - RNA, 19 nt, Artificial Sequence
  Description of Artificial Sequence: Synthetic oligonucleotide
augagggauauuucuaauu

SEQ ID NO: 2464841 - RNA, 19 nt, Artificial Sequence
  Description of Artificial Sequence: Synthetic oligonucleotide
auauccaucuuggcuaaug

SEQ ID NO: 2464842 - RNA, 19 nt, Artificial Sequence
  Description of Artificial Sequence: Synthetic oligonucleotide
gaaguucacaaagcaagga

SEQ ID NO: 2464843 - RNA, 19 nt, Artificial Sequence
  Description of Artificial Sequence: Synthetic oligonucleotide
guauauucucugccaauuc

SEQ ID NO: 2464844 - RNA, 19 nt, Artificial Sequence
  Description of Artificial Sequence: Synthetic oligonucleotide
gucuuguucaccaaaauau

SEQ ID NO: 2464845 - RNA, 19 nt, Artificial Sequence
  Description of Artificial Sequence: Synthetic oligonucleotide
gguuuguaucuaaaugagg

SEQ ID NO: 2464846 - RNA, 19 nt, Artificial Sequence
  Description of Artificial Sequence: Synthetic oligonucleotide
gugacuauccccgaagcca

SEQ ID NO: 2464847 - RNA, 19 nt, Artificial Sequence
  Description of Artificial Sequence: Synthetic oligonucleotide
uuugggcaugaacuuuaga

SEQ ID NO: 2464848 - RNA, 19 nt, Artificial Sequence
  Description of Artificial Sequence: Synthetic oligonucleotide
uuguuguucucgccacuug

SEQ ID NO: 2464849 - RNA, 19 nt, Artificial Sequence
  Description of Artificial Sequence: Synthetic oligonucleotide
aagcaaggagcuguuuucu

SEQ ID NO: 2464850 - RNA, 19 nt, Artificial Sequence
  Description of Artificial Sequence: Synthetic oligonucleotide
cagccaauuccaacaaaug

SEQ ID NO: 2464851 - RNA, 19 nt, Artificial Sequence
  Description of Artificial Sequence: Synthetic oligonucleotide
caauuucuagguuguucug

SEQ ID NO: 2464852 - RNA, 19 nt, Artificial Sequence
  Description of Artificial Sequence: Synthetic oligonucleotide
uauucaugauuugcagaga

SEQ ID NO: 2464853 - RNA, 19 nt, Artificial Sequence
  Description of Artificial Sequence: Synthetic oligonucleotide
guuguucugguugauuuca

SEQ ID NO: 2464854 - RNA, 19 nt, Artificial Sequence
  Description of Artificial Sequence: Synthetic oligonucleotide
uccuuuuguuguucucgcc

SEQ ID NO: 2464855 - RNA, 19 nt, Artificial Sequence
  Description of Artificial Sequence: Synthetic oligonucleotide
agauugguuuccaacuucu

SEQ ID NO: 2464856 - RNA, 19 nt, Artificial Sequence
  Description of Artificial Sequence: Synthetic oligonucleotide
cuuugacuacacauaauua

SEQ ID NO: 2464857 - RNA, 19 nt, Artificial Sequence
  Description of Artificial Sequence: Synthetic oligonucleotide
uucuuugacuacacauaau

SEQ ID NO: 2464858 - RNA, 19 nt, Artificial Sequence
  Description of Artificial Sequence: Synthetic oligonucleotide
caugauuugcagagaguca

SEQ ID NO: 2464859 - RNA, 19 nt, Artificial Sequence
  Description of Artificial Sequence: Synthetic oligonucleotide
cagugacuauccccgaagc

SEQ ID NO: 2464860 - RNA, 19 nt, Artificial Sequence
  Description of Artificial Sequence: Synthetic oligonucleotide
ucgccacuugaguauauuc

SEQ ID NO: 2464861 - RNA, 19 nt, Artificial Sequence
  Description of Artificial Sequence: Synthetic oligonucleotide
caccauuuccagaugauua

SEQ ID NO: 2464862 - RNA, 19 nt, Artificial Sequence
  Description of Artificial Sequence: Synthetic oligonucleotide
aggaugaauaagaucugcu

SEQ ID NO: 2464863 - RNA, 19 nt, Artificial Sequence
  Description of Artificial Sequence: Synthetic oligonucleotide
gaagccacccagugguuca

SEQ ID NO: 2464864 - RNA, 19 nt, Artificial Sequence
  Description of Artificial Sequence: Synthetic oligonucleotide
ugagcaccauuuccagaug

SEQ ID NO: 2464865 - RNA, 19 nt, Artificial Sequence
  Description of Artificial Sequence: Synthetic oligonucleotide
guuguucucgccacuugag

SEQ ID NO: 2464866 - RNA, 19 nt, Artificial Sequence
  Description of Artificial Sequence: Synthetic oligonucleotide
ucaauaucccugucacaau

SEQ ID NO: 2464867 - RNA, 19 nt, Artificial Sequence
  Description of Artificial Sequence: Synthetic oligonucleotide
ggauacacaaggaaauuuc

SEQ ID NO: 2464868 - RNA, 19 nt, Artificial Sequence
  Description of Artificial Sequence: Synthetic oligonucleotide
auguaccauauaucuguga

SEQ ID NO: 2464869 - RNA, 19 nt, Artificial Sequence
  Description of Artificial Sequence: Synthetic oligonucleotide
cuguaaucuggagaaguuc

SEQ ID NO: 2464870 - RNA, 19 nt, Artificial Sequence
  Description of Artificial Sequence: Synthetic oligonucleotide
augguuugggcaugaacuu

SEQ ID NO: 2464871 - RNA, 19 nt, Artificial Sequence
  Description of Artificial Sequence: Synthetic oligonucleotide
uccccgaagccacccagug

SEQ ID NO: 2464872 - RNA, 19 nt, Artificial Sequence
  Description of Artificial Sequence: Synthetic oligonucleotide
aucuggagaaguucacaaa

SEQ ID NO: 2464873 - RNA, 19 nt, Artificial Sequence
  Description of Artificial Sequence: Synthetic oligonucleotide
auuaaugguuugggcauga

SEQ ID NO: 2464874 - RNA, 19 nt, Artificial Sequence
  Description of Artificial Sequence: Synthetic oligonucleotide
caauuggcagguucuccug

SEQ ID NO: 2464875 - RNA, 19 nt, Artificial Sequence
  Description of Artificial Sequence: Synthetic oligonucleotide
ugccugauggcccgcuucu

SEQ ID NO: 2464876 - RNA, 19 nt, Artificial Sequence
  Description of Artificial Sequence: Synthetic oligonucleotide
ugggucucagcagucuuug

SEQ ID NO: 2464877 - RNA, 19 nt, Artificial Sequence
  Description of Artificial Sequence: Synthetic oligonucleotide
agcaguagcccagcugcac

SEQ ID NO: 2464878 - RNA, 19 nt, Artificial Sequence
  Description of Artificial Sequence: Synthetic oligonucleotide
uuuguuguucucgccacuu

SEQ ID NO: 2464879 - RNA, 19 nt, Artificial Sequence
  Description of Artificial Sequence: Synthetic oligonucleotide
gagggauauuucuaauugu

SEQ ID NO: 2464880 - RNA, 19 nt, Artificial Sequence
  Description of Artificial Sequence: Synthetic oligonucleotide
ugauuucagcuugaauauc

SEQ ID NO: 2464881 - RNA, 19 nt, Artificial Sequence
  Description of Artificial Sequence: Synthetic oligonucleotide
cuucuuaaccaaacaggaa

SEQ ID NO: 2464882 - RNA, 19 nt, Artificial Sequence
  Description of Artificial Sequence: Synthetic oligonucleotide
cuuaaccaaacaggaagga

SEQ ID NO: 2464883 - RNA, 19 nt, Artificial Sequence
  Description of Artificial Sequence: Synthetic oligonucleotide
aagaucugcuguauccuuu

SEQ ID NO: 2464884 - RNA, 19 nt, Artificial Sequence
  Description of Artificial Sequence: Synthetic oligonucleotide
guucacaaagcaaggagcu

SEQ ID NO: 2464885 - RNA, 19 nt, Artificial Sequence
  Description of Artificial Sequence: Synthetic oligonucleotide
ggucccacggguucggggc

SEQ ID NO: 2464886 - RNA, 19 nt, Artificial Sequence
  Description of Artificial Sequence: Synthetic oligonucleotide
caacaaaaccuaucaauau

SEQ ID NO: 2464887 - RNA, 19 nt, Artificial Sequence
  Description of Artificial Sequence: Synthetic oligonucleotide
guagcccagcugcacucgg

SEQ ID NO: 2464888 - RNA, 19 nt, Artificial Sequence
  Description of Artificial Sequence: Synthetic oligonucleotide
accauauaucugugauaca

SEQ ID NO: 2464889 - RNA, 19 nt, Artificial Sequence
  Description of Artificial Sequence: Synthetic oligonucleotide
uaucugugauacacagcuu

SEQ ID NO: 2464890 - RNA, 19 nt, Artificial Sequence
  Description of Artificial Sequence: Synthetic oligonucleotide
uggcuaaugccuugcucau

SEQ ID NO: 2464891 - RNA, 19 nt, Artificial Sequence
  Description of Artificial Sequence: Synthetic oligonucleotide
cugcacucggcgcggacgc

SEQ ID NO: 2464892 - RNA, 19 nt, Artificial Sequence
  Description of Artificial Sequence: Synthetic oligonucleotide
agguaaaggaggaacuaua

SEQ ID NO: 2464893 - RNA, 19 nt, Artificial Sequence
  Description of Artificial Sequence: Synthetic oligonucleotide
cuucaauuggcagguucuc

SEQ ID NO: 2464894 - RNA, 19 nt, Artificial Sequence
  Description of Artificial Sequence: Synthetic oligonucleotide
aucugagaucugcuguaau

SEQ ID NO: 2464895 - RNA, 19 nt, Artificial Sequence
  Description of Artificial Sequence: Synthetic oligonucleotide
guaucuaaaugagggauau

SEQ ID NO: 2464896 - RNA, 19 nt, Artificial Sequence
  Description of Artificial Sequence: Synthetic oligonucleotide
acggguucggggcagccau

SEQ ID NO: 2464897 - RNA, 19 nt, Artificial Sequence
  Description of Artificial Sequence: Synthetic oligonucleotide
gaucugcuguauccuuuuc

SEQ ID NO: 2464898 - RNA, 19 nt, Artificial Sequence
  Description of Artificial Sequence: Synthetic oligonucleotide
caguagcccagcugcacuc

SEQ ID NO: 2464899 - RNA, 19 nt, Artificial Sequence
  Description of Artificial Sequence: Synthetic oligonucleotide
gccaauuccaacaaaugua

SEQ ID NO: 2464900 - RNA, 19 nt, Artificial Sequence
  Description of Artificial Sequence: Synthetic oligonucleotide
gacggcaaucacuuggcau

SEQ ID NO: 2464901 - RNA, 19 nt, Artificial Sequence
  Description of Artificial Sequence: Synthetic oligonucleotide
gugguucagcaguagccca

SEQ ID NO: 2464902 - RNA, 19 nt, Artificial Sequence
  Description of Artificial Sequence: Synthetic oligonucleotide
gaguauauucucugccaau

SEQ ID NO: 2464903 - RNA, 19 nt, Artificial Sequence
  Description of Artificial Sequence: Synthetic oligonucleotide
agacggcaaucacuuggca

SEQ ID NO: 2464904 - RNA, 19 nt, Artificial Sequence
  Description of Artificial Sequence: Synthetic oligonucleotide
aguuaguacuuuggggaua

SEQ ID NO: 2464905 - RNA, 19 nt, Artificial Sequence
  Description of Artificial Sequence: Synthetic oligonucleotide
gcccgcuucuccuugagca

SEQ ID NO: 2464906 - RNA, 19 nt, Artificial Sequence
  Description of Artificial Sequence: Synthetic oligonucleotide
ggcaugaacuuuagaaaca

SEQ ID NO: 2464907 - RNA, 19 nt, Artificial Sequence
  Description of Artificial Sequence: Synthetic oligonucleotide
uuaaugguuugggcaugaa

SEQ ID NO: 2464908 - RNA, 19 nt, Artificial Sequence
  Description of Artificial Sequence: Synthetic oligonucleotide
cacaugggucucagcaguc

SEQ ID NO: 2464909 - RNA, 19 nt, Artificial Sequence
  Description of Artificial Sequence: Synthetic oligonucleotide
cuaguuuuagaaguucaau

SEQ ID NO: 2464910 - RNA, 19 nt, Artificial Sequence
  Description of Artificial Sequence: Synthetic oligonucleotide
ggaggaacuauaucaaauu

SEQ ID NO: 2464911 - RNA, 19 nt, Artificial Sequence
  Description of Artificial Sequence: Synthetic oligonucleotide
caaagcaaggagcuguuuu

SEQ ID NO: 2464912 - RNA, 19 nt, Artificial Sequence
  Description of Artificial Sequence: Synthetic oligonucleotide
ugguugauuucagcuugaa

SEQ ID NO: 2464913 - RNA, 19 nt, Artificial Sequence
  Description of Artificial Sequence: Synthetic oligonucleotide
uggcccgcuucuccuugag

SEQ ID NO: 2464914 - RNA, 19 nt, Artificial Sequence
  Description of Artificial Sequence: Synthetic oligonucleotide
aauauccaucuuggcuaau

SEQ ID NO: 2464915 - RNA, 19 nt, Artificial Sequence
  Description of Artificial Sequence: Synthetic oligonucleotide
gcaugaacuuuagaaacaa

SEQ ID NO: 2464916 - RNA, 19 nt, Artificial Sequence
  Description of Artificial Sequence: Synthetic oligonucleotide
uuugccugauggcccgcuu

SEQ ID NO: 2464917 - RNA, 19 nt, Artificial Sequence
  Description of Artificial Sequence: Synthetic oligonucleotide
uaucuaaaugagggauauu

SEQ ID NO: 2464918 - RNA, 19 nt, Artificial Sequence
  Description of Artificial Sequence: Synthetic oligonucleotide
cuucucgaugaaagucaca

SEQ ID NO: 2464919 - RNA, 19 nt, Artificial Sequence
  Description of Artificial Sequence: Synthetic oligonucleotide
ucucgccacuugaguauau

SEQ ID NO: 2464920 - RNA, 19 nt, Artificial Sequence
  Description of Artificial Sequence: Synthetic oligonucleotide
cucagcagucuuugccuga

SEQ ID NO: 2464921 - RNA, 19 nt, Artificial Sequence
  Description of Artificial Sequence: Synthetic oligonucleotide
uuaguacuuuggggauaca

SEQ ID NO: 2464922 - RNA, 19 nt, Artificial Sequence
  Description of Artificial Sequence: Synthetic oligonucleotide
gcaaggagcuguuuucuua

SEQ ID NO: 2464923 - RNA, 19 nt, Artificial Sequence
  Description of Artificial Sequence: Synthetic oligonucleotide
caggaaggaugaauaagau

SEQ ID NO: 2464924 - RNA, 19 nt, Artificial Sequence
  Description of Artificial Sequence: Synthetic oligonucleotide
gcuaaugccuugcucauuu

SEQ ID NO: 2464925 - RNA, 19 nt, Artificial Sequence
  Description of Artificial Sequence: Synthetic oligonucleotide
caagauugguuuccaacuu

SEQ ID NO: 2464926 - RNA, 19 nt, Artificial Sequence
  Description of Artificial Sequence: Synthetic oligonucleotide
cucagugacuauccccgaa

SEQ ID NO: 2464927 - RNA, 19 nt, Artificial Sequence
  Description of Artificial Sequence: Synthetic oligonucleotide
ccugucacaaucaccuaaa

SEQ ID NO: 2464928 - RNA, 19 nt, Artificial Sequence
  Description of Artificial Sequence: Synthetic oligonucleotide
gguuugggcaugaacuuua

SEQ ID NO: 2464929 - RNA, 19 nt, Artificial Sequence
  Description of Artificial Sequence: Synthetic oligonucleotide
cugucacaaucaccuaaaa

SEQ ID NO: 2464930 - RNA, 19 nt, Artificial Sequence
  Description of Artificial Sequence: Synthetic oligonucleotide
cugugauacacagcuucaa

SEQ ID NO: 2464931 - RNA, 19 nt, Artificial Sequence
  Description of Artificial Sequence: Synthetic oligonucleotide
caguuaguacuuuggggau

SEQ ID NO: 2464932 - RNA, 19 nt, Artificial Sequence
  Description of Artificial Sequence: Synthetic oligonucleotide
gcuguauccuuuucuaguu

SEQ ID NO: 2464933 - RNA, 19 nt, Artificial Sequence
  Description of Artificial Sequence: Synthetic oligonucleotide
ucggcgcggacgccggguc

SEQ ID NO: 2464934 - RNA, 19 nt, Artificial Sequence
  Description of Artificial Sequence: Synthetic oligonucleotide
ucccacggguucggggcag

SEQ ID NO: 2464935 - RNA, 19 nt, Artificial Sequence
  Description of Artificial Sequence: Synthetic oligonucleotide
cuauccccgaagccaccca

SEQ ID NO: 2464936 - RNA, 19 nt, Artificial Sequence
  Description of Artificial Sequence: Synthetic oligonucleotide
gguugauuucagcuugaau

SEQ ID NO: 2464937 - RNA, 19 nt, Artificial Sequence
  Description of Artificial Sequence: Synthetic oligonucleotide
gggucucagcagucuuugc

SEQ ID NO: 2464938 - RNA, 19 nt, Artificial Sequence
  Description of Artificial Sequence: Synthetic oligonucleotide
gcacucggcgcggacgccg

SEQ ID NO: 2464939 - RNA, 19 nt, Artificial Sequence
  Description of Artificial Sequence: Synthetic oligonucleotide
auccccgaagccacccagu

SEQ ID NO: 2464940 - RNA, 19 nt, Artificial Sequence
  Description of Artificial Sequence: Synthetic oligonucleotide
cccugucacaaucaccuaa

SEQ ID NO: 2464941 - RNA, 19 nt, Artificial Sequence
  Description of Artificial Sequence: Synthetic oligonucleotide
cccgcuucuccuugagcac

SEQ ID NO: 2464942 - RNA, 19 nt, Artificial Sequence
  Description of Artificial Sequence: Synthetic oligonucleotide
ccccgaagccacccagugg

SEQ ID NO: 2464943 - RNA, 19 nt, Artificial Sequence
  Description of Artificial Sequence: Synthetic oligonucleotide
gcggacgccgggucccacg

SEQ ID NO: 2464944 - RNA, 19 nt, Artificial Sequence
  Description of Artificial Sequence: Synthetic oligonucleotide
gucccacggguucggggca

SEQ ID NO: 2464945 - RNA, 19 nt, Artificial Sequence
  Description of Artificial Sequence: Synthetic oligonucleotide
guucagcaguagcccagcu

SEQ ID NO: 2464946 - RNA, 19 nt, Artificial Sequence
  Description of Artificial Sequence: Synthetic oligonucleotide
gcaguagcccagcugcacu

SEQ ID NO: 2464947 - RNA, 19 nt, Artificial Sequence
  Description of Artificial Sequence: Synthetic oligonucleotide
ggcccgcuucuccuugagc

SEQ ID NO: 2464948 - RNA, 19 nt, Artificial Sequence
  Description of Artificial Sequence: Synthetic oligonucleotide
caugggucucagcagucuu

SEQ ID NO: 2464949 - RNA, 19 nt, Artificial Sequence
  Description of Artificial Sequence: Synthetic oligonucleotide
gccgggucccacggguucg

SEQ ID NO: 2464950 - RNA, 19 nt, Artificial Sequence
  Description of Artificial Sequence: Synthetic oligonucleotide
cuccuggcacaugggucuc

SEQ ID NO: 2464951 - RNA, 19 nt, Artificial Sequence
  Description of Artificial Sequence: Synthetic oligonucleotide
cuaaugccuugcucauuuu

SEQ ID NO: 2464952 - RNA, 19 nt, Artificial Sequence
  Description of Artificial Sequence: Synthetic oligonucleotide
guucaauuucuagguuguu

SEQ ID NO: 2464953 - RNA, 19 nt, Artificial Sequence
  Description of Artificial Sequence: Synthetic oligonucleotide
cggacgccgggucccacgg

SEQ ID NO: 2464954 - RNA, 19 nt, Artificial Sequence
  Description of Artificial Sequence: Synthetic oligonucleotide
ccagaugauuauucaugau

SEQ ID NO: 2464955 - RNA, 19 nt, Artificial Sequence
  Description of Artificial Sequence: Synthetic oligonucleotide
ggggauacacaaggaaauu

SEQ ID NO: 2464956 - RNA, 19 nt, Artificial Sequence
  Description of Artificial Sequence: Synthetic oligonucleotide
ccucagugacuauccccga

SEQ ID NO: 2464957 - RNA, 19 nt, Artificial Sequence
  Description of Artificial Sequence: Synthetic oligonucleotide
gcaccauuuccagaugauu

SEQ ID NO: 2464958 - RNA, 19 nt, Artificial Sequence
  Description of Artificial Sequence: Synthetic oligonucleotide
ggcaaucacuuggcauuaa

SEQ ID NO: 2464959 - RNA, 19 nt, Artificial Sequence
  Description of Artificial Sequence: Synthetic oligonucleotide
cucgccacuugaguauauu

SEQ ID NO: 2464960 - RNA, 19 nt, Artificial Sequence
  Description of Artificial Sequence: Synthetic oligonucleotide
ccacggguucggggcagcc

SEQ ID NO: 2464961 - RNA, 19 nt, Artificial Sequence
  Description of Artificial Sequence: Synthetic oligonucleotide
ccauuuccagaugauuauu

SEQ ID NO: 2464962 - RNA, 19 nt, Artificial Sequence
  Description of Artificial Sequence: Synthetic oligonucleotide
cucggcgcggacgccgggu

SEQ ID NO: 2464963 - RNA, 19 nt, Artificial Sequence
  Description of Artificial Sequence: Synthetic oligonucleotide
ggcuaaugccuugcucauu

SEQ ID NO: 2464964 - RNA, 19 nt, Artificial Sequence
  Description of Artificial Sequence: Synthetic oligonucleotide
cggcaaucacuuggcauua

SEQ ID NO: 2464965 - RNA, 19 nt, Artificial Sequence
  Description of Artificial Sequence: Synthetic oligonucleotide
cagcuucaauuggcagguu

SEQ ID NO: 2464966 - RNA, 19 nt, Artificial Sequence
  Description of Artificial Sequence: Synthetic oligonucleotide
ccgaagccacccagugguu

SEQ ID NO: 2464967 - RNA, 19 nt, Artificial Sequence
  Description of Artificial Sequence: Synthetic oligonucleotide
uccacuaccauuuuguccg

SEQ ID NO: 2464968 - RNA, 19 nt, Artificial Sequence
  Description of Artificial Sequence: Synthetic oligonucleotide
aaaacuuagcgcugggcgc

SEQ ID NO: 2464969 - RNA, 19 nt, Artificial Sequence
  Description of Artificial Sequence: Synthetic oligonucleotide
gaaaacuuagcgcugggcg

SEQ ID NO: 2464970 - RNA, 19 nt, Artificial Sequence
  Description of Artificial Sequence: Synthetic oligonucleotide
acgaucuugaauugcagcc

SEQ ID NO: 2464971 - RNA, 19 nt, Artificial Sequence
  Description of Artificial Sequence: Synthetic oligonucleotide
acugcugucaccuacacgu

SEQ ID NO: 2464972 - RNA, 19 nt, Artificial Sequence
  Description of Artificial Sequence: Synthetic oligonucleotide
ugaccuucaaucuaggugu

SEQ ID NO: 2464973 - RNA, 19 nt, Artificial Sequence
  Description of Artificial Sequence: Synthetic oligonucleotide
uuggucaugaccuucaauc

SEQ ID NO: 2464974 - RNA, 19 nt, Artificial Sequence
  Description of Artificial Sequence: Synthetic oligonucleotide
uuuauugcgcuccugcagc

SEQ ID NO: 2464975 - RNA, 19 nt, Artificial Sequence
  Description of Artificial Sequence: Synthetic oligonucleotide
guuggggucggucagaucc

SEQ ID NO: 2464976 - RNA, 19 nt, Artificial Sequence
  Description of Artificial Sequence: Synthetic oligonucleotide
aauugcagccgggugacgc

SEQ ID NO: 2464977 - RNA, 19 nt, Artificial Sequence
  Description of Artificial Sequence: Synthetic oligonucleotide
ugcgacuugaguuuauugc

SEQ ID NO: 2464978 - RNA, 19 nt, Artificial Sequence
  Description of Artificial Sequence: Synthetic oligonucleotide
augaccuucaaucuaggug

SEQ ID NO: 2464979 - RNA, 19 nt, Artificial Sequence
  Description of Artificial Sequence: Synthetic oligonucleotide
uugaauugcagccggguga

SEQ ID NO: 2464980 - RNA, 19 nt, Artificial Sequence
  Description of Artificial Sequence: Synthetic oligonucleotide
ggagaugucguacacgucg

SEQ ID NO: 2464981 - RNA, 19 nt, Artificial Sequence
  Description of Artificial Sequence: Synthetic oligonucleotide
agggccaucagcucgcggc

SEQ ID NO: 2464982 - RNA, 19 nt, Artificial Sequence
  Description of Artificial Sequence: Synthetic oligonucleotide
acacguacgaucuugaauu

SEQ ID NO: 2464983 - RNA, 19 nt, Artificial Sequence
  Description of Artificial Sequence: Synthetic oligonucleotide
caugguaaccacagcaucc

SEQ ID NO: 2464984 - RNA, 19 nt, Artificial Sequence
  Description of Artificial Sequence: Synthetic oligonucleotide
aacagcugcgacuugaguu

SEQ ID NO: 2464985 - RNA, 19 nt, Artificial Sequence
  Description of Artificial Sequence: Synthetic oligonucleotide
gggucaagaaaacuuagcg

SEQ ID NO: 2464986 - RNA, 19 nt, Artificial Sequence
  Description of Artificial Sequence: Synthetic oligonucleotide
uccaucacacguacgaucu

SEQ ID NO: 2464987 - RNA, 19 nt, Artificial Sequence
  Description of Artificial Sequence: Synthetic oligonucleotide
uaggagaugucguacacgu

SEQ ID NO: 2464988 - RNA, 19 nt, Artificial Sequence
  Description of Artificial Sequence: Synthetic oligonucleotide
gaguuuauugcgcuccugc

SEQ ID NO: 2464989 - RNA, 19 nt, Artificial Sequence
  Description of Artificial Sequence: Synthetic oligonucleotide
gucaagaaaacuuagcgcu

SEQ ID NO: 2464990 - RNA, 19 nt, Artificial Sequence
  Description of Artificial Sequence: Synthetic oligonucleotide
aagaaaacuuagcgcuggg

SEQ ID NO: 2464991 - RNA, 19 nt, Artificial Sequence
  Description of Artificial Sequence: Synthetic oligonucleotide
uucucuggauggaagcagg

SEQ ID NO: 2464992 - RNA, 19 nt, Artificial Sequence
  Description of Artificial Sequence: Synthetic oligonucleotide
agguugucccucuccaucc

SEQ ID NO: 2464993 - RNA, 19 nt, Artificial Sequence
  Description of Artificial Sequence: Synthetic oligonucleotide
ucaagaaaacuuagcgcug

SEQ ID NO: 2464994 - RNA, 19 nt, Artificial Sequence
  Description of Artificial Sequence: Synthetic oligonucleotide
aggugugcuucccugaccg

SEQ ID NO: 2464995 - RNA, 19 nt, Artificial Sequence
  Description of Artificial Sequence: Synthetic oligonucleotide
cauuuuguccgguccaagg

SEQ ID NO: 2464996 - RNA, 19 nt, Artificial Sequence
  Description of Artificial Sequence: Synthetic oligonucleotide
cuggccuccggauacaccg

SEQ ID NO: 2464997 - RNA, 19 nt, Artificial Sequence
  Description of Artificial Sequence: Synthetic oligonucleotide
ucgguggucagcugcaggg

SEQ ID NO: 2464998 - RNA, 19 nt, Artificial Sequence
  Description of Artificial Sequence: Synthetic oligonucleotide
uacgaucuugaauugcagc

SEQ ID NO: 2464999 - RNA, 19 nt, Artificial Sequence
  Description of Artificial Sequence: Synthetic oligonucleotide
uugggucaagaaaacuuag

SEQ ID NO: 2465000 - RNA, 19 nt, Artificial Sequence
  Description of Artificial Sequence: Synthetic oligonucleotide
caugaugguccuuucuucc

SEQ ID NO: 2465001 - RNA, 19 nt, Artificial Sequence
  Description of Artificial Sequence: Synthetic oligonucleotide
ugucuucucaagucagagg

SEQ ID NO: 2465002 - RNA, 19 nt, Artificial Sequence
  Description of Artificial Sequence: Synthetic oligonucleotide
gaaagcucggagucgcggg

SEQ ID NO: 2465003 - RNA, 19 nt, Artificial Sequence
  Description of Artificial Sequence: Synthetic oligonucleotide
cuugaguuuauugcgcucc

SEQ ID NO: 2465004 - RNA, 19 nt, Artificial Sequence
  Description of Artificial Sequence: Synthetic oligonucleotide
aucuccaucacacguacga

SEQ ID NO: 2465005 - RNA, 19 nt, Artificial Sequence
  Description of Artificial Sequence: Synthetic oligonucleotide
ucaccuacacguccacugg

SEQ ID NO: 2465006 - RNA, 19 nt, Artificial Sequence
  Description of Artificial Sequence: Synthetic oligonucleotide
aagacaucuuggcaauugu

SEQ ID NO: 2465007 - RNA, 19 nt, Artificial Sequence
  Description of Artificial Sequence: Synthetic oligonucleotide
agaaaacuuagcgcugggc

SEQ ID NO: 2465008 - RNA, 19 nt, Artificial Sequence
  Description of Artificial Sequence: Synthetic oligonucleotide
ugggucaagaaaacuuagc

SEQ ID NO: 2465009 - RNA, 19 nt, Artificial Sequence
  Description of Artificial Sequence: Synthetic oligonucleotide
acuaccauuuuguccgguc

SEQ ID NO: 2465010 - RNA, 19 nt, Artificial Sequence
  Description of Artificial Sequence: Synthetic oligonucleotide
augucguacacgucgucgg

SEQ ID NO: 2465011 - RNA, 19 nt, Artificial Sequence
  Description of Artificial Sequence: Synthetic oligonucleotide
ugcagagugaagcggggcc

SEQ ID NO: 2465012 - RNA, 19 nt, Artificial Sequence
  Description of Artificial Sequence: Synthetic oligonucleotide
gacuuuggcgaccuccggg

SEQ ID NO: 2465013 - RNA, 19 nt, Artificial Sequence
  Description of Artificial Sequence: Synthetic oligonucleotide
uuggcaauugucuucucaa

SEQ ID NO: 2465014 - RNA, 19 nt, Artificial Sequence
  Description of Artificial Sequence: Synthetic oligonucleotide
gaagaaagcucggagucgc

SEQ ID NO: 2465015 - RNA, 19 nt, Artificial Sequence
  Description of Artificial Sequence: Synthetic oligonucleotide
auuuuguccgguccaaggu

SEQ ID NO: 2465016 - RNA, 19 nt, Artificial Sequence
  Description of Artificial Sequence: Synthetic oligonucleotide
uucaugaugguccuuucuu

SEQ ID NO: 2465017 - RNA, 19 nt, Artificial Sequence
  Description of Artificial Sequence: Synthetic oligonucleotide
ggucaagaaaacuuagcgc

SEQ ID NO: 2465018 - RNA, 19 nt, Artificial Sequence
  Description of Artificial Sequence: Synthetic oligonucleotide
ucguacacgucgucggugg

SEQ ID NO: 2465019 - RNA, 19 nt, Artificial Sequence
  Description of Artificial Sequence: Synthetic oligonucleotide
caagaaaacuuagcgcugg

SEQ ID NO: 2465020 - RNA, 19 nt, Artificial Sequence
  Description of Artificial Sequence: Synthetic oligonucleotide
uugucuucucaagucagag

SEQ ID NO: 2465021 - RNA, 19 nt, Artificial Sequence
  Description of Artificial Sequence: Synthetic oligonucleotide
ucaaucuaggugugcuucc

SEQ ID NO: 2465022 - RNA, 19 nt, Artificial Sequence
  Description of Artificial Sequence: Synthetic oligonucleotide
gcgacuugaguuuauugcg

SEQ ID NO: 2465023 - RNA, 19 nt, Artificial Sequence
  Description of Artificial Sequence: Synthetic oligonucleotide
accacagcauccuucucuc

SEQ ID NO: 2465024 - RNA, 19 nt, Artificial Sequence
  Description of Artificial Sequence: Synthetic oligonucleotide
uccaagguucaccuggccu

SEQ ID NO: 2465025 - RNA, 19 nt, Artificial Sequence
  Description of Artificial Sequence: Synthetic oligonucleotide
ucaugaccuucaaucuagg

SEQ ID NO: 2465026 - RNA, 19 nt, Artificial Sequence
  Description of Artificial Sequence: Synthetic oligonucleotide
gucaugaccuucaaucuag

SEQ ID NO: 2465027 - RNA, 19 nt, Artificial Sequence
  Description of Artificial Sequence: Synthetic oligonucleotide
ucucuggugcccaugguaa

SEQ ID NO: 2465028 - RNA, 19 nt, Artificial Sequence
  Description of Artificial Sequence: Synthetic oligonucleotide
acaggggccuccuccaugg

SEQ ID NO: 2465029 - RNA, 19 nt, Artificial Sequence
  Description of Artificial Sequence: Synthetic oligonucleotide
cuaccauuuuguccggucc

SEQ ID NO: 2465030 - RNA, 19 nt, Artificial Sequence
  Description of Artificial Sequence: Synthetic oligonucleotide
acuugaguuuauugcgcuc

SEQ ID NO: 2465031 - RNA, 19 nt, Artificial Sequence
  Description of Artificial Sequence: Synthetic oligonucleotide
uggucaugaccuucaaucu

SEQ ID NO: 2465032 - RNA, 19 nt, Artificial Sequence
  Description of Artificial Sequence: Synthetic oligonucleotide
uucaaucuaggugugcuuc

SEQ ID NO: 2465033 - RNA, 19 nt, Artificial Sequence
  Description of Artificial Sequence: Synthetic oligonucleotide
agauccacuaccauuuugu

SEQ ID NO: 2465034 - RNA, 19 nt, Artificial Sequence
  Description of Artificial Sequence: Synthetic oligonucleotide
aguuuauugcgcuccugca

SEQ ID NO: 2465035 - RNA, 19 nt, Artificial Sequence
  Description of Artificial Sequence: Synthetic oligonucleotide
aaacuuagcgcugggcgca

SEQ ID NO: 2465036 - RNA, 19 nt, Artificial Sequence
  Description of Artificial Sequence: Synthetic oligonucleotide
uggcaauugucuucucaag

SEQ ID NO: 2465037 - RNA, 19 nt, Artificial Sequence
  Description of Artificial Sequence: Synthetic oligonucleotide
aaucuaggugugcuucccu

SEQ ID NO: 2465038 - RNA, 19 nt, Artificial Sequence
  Description of Artificial Sequence: Synthetic oligonucleotide
cuugaauugcagccgggug

SEQ ID NO: 2465039 - RNA, 19 nt, Artificial Sequence
  Description of Artificial Sequence: Synthetic oligonucleotide
ugcugucaccuacacgucc

SEQ ID NO: 2465040 - RNA, 19 nt, Artificial Sequence
  Description of Artificial Sequence: Synthetic oligonucleotide
ugaagcggggccuguuggg

SEQ ID NO: 2465041 - RNA, 19 nt, Artificial Sequence
  Description of Artificial Sequence: Synthetic oligonucleotide
uuuuguccgguccaagguu

SEQ ID NO: 2465042 - RNA, 19 nt, Artificial Sequence
  Description of Artificial Sequence: Synthetic oligonucleotide
cuucucaagucagagggug

SEQ ID NO: 2465043 - RNA, 19 nt, Artificial Sequence
  Description of Artificial Sequence: Synthetic oligonucleotide
ucuaggugugcuucccuga

SEQ ID NO: 2465044 - RNA, 19 nt, Artificial Sequence
  Description of Artificial Sequence: Synthetic oligonucleotide
aaagcucggagucgcggga

SEQ ID NO: 2465045 - RNA, 19 nt, Artificial Sequence
  Description of Artificial Sequence: Synthetic oligonucleotide
auugcagccgggugacgcg

SEQ ID NO: 2465046 - RNA, 19 nt, Artificial Sequence
  Description of Artificial Sequence: Synthetic oligonucleotide
gauacaccggcucuccgca

SEQ ID NO: 2465047 - RNA, 19 nt, Artificial Sequence
  Description of Artificial Sequence: Synthetic oligonucleotide
agcaggccacuccuguagc

SEQ ID NO: 2465048 - RNA, 19 nt, Artificial Sequence
  Description of Artificial Sequence: Synthetic oligonucleotide
ucucuggauggaagcaggc

SEQ ID NO: 2465049 - RNA, 19 nt, Artificial Sequence
  Description of Artificial Sequence: Synthetic oligonucleotide
agaaagcucggagucgcgg

SEQ ID NO: 2465050 - RNA, 19 nt, Artificial Sequence
  Description of Artificial Sequence: Synthetic oligonucleotide
cagcacgucccucagcucc

SEQ ID NO: 2465051 - RNA, 19 nt, Artificial Sequence
  Description of Artificial Sequence: Synthetic oligonucleotide
acguacgaucuugaauugc

SEQ ID NO: 2465052 - RNA, 19 nt, Artificial Sequence
  Description of Artificial Sequence: Synthetic oligonucleotide
aucuaggugugcuucccug

SEQ ID NO: 2465053 - RNA, 19 nt, Artificial Sequence
  Description of Artificial Sequence: Synthetic oligonucleotide
cuggagcuucucuggaugg

SEQ ID NO: 2465054 - RNA, 19 nt, Artificial Sequence
  Description of Artificial Sequence: Synthetic oligonucleotide
gucggucagauccacuacc

SEQ ID NO: 2465055 - RNA, 19 nt, Artificial Sequence
  Description of Artificial Sequence: Synthetic oligonucleotide
uguagcacugcaguucuuc

SEQ ID NO: 2465056 - RNA, 19 nt, Artificial Sequence
  Description of Artificial Sequence: Synthetic oligonucleotide
ugaauugcagccgggugac

SEQ ID NO: 2465057 - RNA, 19 nt, Artificial Sequence
  Description of Artificial Sequence: Synthetic oligonucleotide
ucguaggagaugucguaca

SEQ ID NO: 2465058 - RNA, 19 nt, Artificial Sequence
  Description of Artificial Sequence: Synthetic oligonucleotide
guaggagaugucguacacg

SEQ ID NO: 2465059 - RNA, 19 nt, Artificial Sequence
  Description of Artificial Sequence: Synthetic oligonucleotide
uccgguccaagguucaccu

SEQ ID NO: 2465060 - RNA, 19 nt, Artificial Sequence
  Description of Artificial Sequence: Synthetic oligonucleotide
ucuugaauugcagccgggu

SEQ ID NO: 2465061 - RNA, 19 nt, Artificial Sequence
  Description of Artificial Sequence: Synthetic oligonucleotide
ucuucucaagucagagggu

SEQ ID NO: 2465062 - RNA, 19 nt, Artificial Sequence
  Description of Artificial Sequence: Synthetic oligonucleotide
gacugcugucaccuacacg

SEQ ID NO: 2465063 - RNA, 19 nt, Artificial Sequence
  Description of Artificial Sequence: Synthetic oligonucleotide
gagguugucccucuccauc

SEQ ID NO: 2465064 - RNA, 19 nt, Artificial Sequence
  Description of Artificial Sequence: Synthetic oligonucleotide
ugcaggggacucuuggcca

SEQ ID NO: 2465065 - RNA, 19 nt, Artificial Sequence
  Description of Artificial Sequence: Synthetic oligonucleotide
guagcacugcaguucuucc

SEQ ID NO: 2465066 - RNA, 19 nt, Artificial Sequence
  Description of Artificial Sequence: Synthetic oligonucleotide
uugaguuuauugcgcuccu

SEQ ID NO: 2465067 - RNA, 19 nt, Artificial Sequence
  Description of Artificial Sequence: Synthetic oligonucleotide
uacacguccacuggcuuug

SEQ ID NO: 2465068 - RNA, 19 nt, Artificial Sequence
  Description of Artificial Sequence: Synthetic oligonucleotide
agacaucuuggcaauuguc

SEQ ID NO: 2465069 - RNA, 19 nt, Artificial Sequence
  Description of Artificial Sequence: Synthetic oligonucleotide
gugaagcggggccuguugg

SEQ ID NO: 2465070 - RNA, 19 nt, Artificial Sequence
  Description of Artificial Sequence: Synthetic oligonucleotide
uucucaagucagagggugu

SEQ ID NO: 2465071 - RNA, 19 nt, Artificial Sequence
  Description of Artificial Sequence: Synthetic oligonucleotide
ucuggugcccaugguaacc

SEQ ID NO: 2465072 - RNA, 19 nt, Artificial Sequence
  Description of Artificial Sequence: Synthetic oligonucleotide
caguccacgccguaugcag

SEQ ID NO: 2465073 - RNA, 19 nt, Artificial Sequence
  Description of Artificial Sequence: Synthetic oligonucleotide
gacaucuuggcaauugucu

SEQ ID NO: 2465074 - RNA, 19 nt, Artificial Sequence
  Description of Artificial Sequence: Synthetic oligonucleotide
ucaagucagagggugucac

SEQ ID NO: 2465075 - RNA, 19 nt, Artificial Sequence
  Description of Artificial Sequence: Synthetic oligonucleotide
uuuggcgaccuccgggacu

SEQ ID NO: 2465076 - RNA, 19 nt, Artificial Sequence
  Description of Artificial Sequence: Synthetic oligonucleotide
uuauugcgcuccugcagca

SEQ ID NO: 2465077 - RNA, 19 nt, Artificial Sequence
  Description of Artificial Sequence: Synthetic oligonucleotide
uacacgucgucggugguca

SEQ ID NO: 2465078 - RNA, 19 nt, Artificial Sequence
  Description of Artificial Sequence: Synthetic oligonucleotide
augaugguccuuucuuccu

SEQ ID NO: 2465079 - RNA, 19 nt, Artificial Sequence
  Description of Artificial Sequence: Synthetic oligonucleotide
caccucguaggagaugucg

SEQ ID NO: 2465080 - RNA, 19 nt, Artificial Sequence
  Description of Artificial Sequence: Synthetic oligonucleotide
gaugguccuuucuuccuuc

SEQ ID NO: 2465081 - RNA, 19 nt, Artificial Sequence
  Description of Artificial Sequence: Synthetic oligonucleotide
gaagcggggccuguugggg

SEQ ID NO: 2465082 - RNA, 19 nt, Artificial Sequence
  Description of Artificial Sequence: Synthetic oligonucleotide
uccuguagcacugcaguuc

SEQ ID NO: 2465083 - RNA, 19 nt, Artificial Sequence
  Description of Artificial Sequence: Synthetic oligonucleotide
acguccacuggcuuugggu

SEQ ID NO: 2465084 - RNA, 19 nt, Artificial Sequence
  Description of Artificial Sequence: Synthetic oligonucleotide
gucgucgguggucagcugc

SEQ ID NO: 2465085 - RNA, 19 nt, Artificial Sequence
  Description of Artificial Sequence: Synthetic oligonucleotide
caucacacguacgaucuug

SEQ ID NO: 2465086 - RNA, 19 nt, Artificial Sequence
  Description of Artificial Sequence: Synthetic oligonucleotide
acaccggcucuccgcagcc

SEQ ID NO: 2465087 - RNA, 19 nt, Artificial Sequence
  Description of Artificial Sequence: Synthetic oligonucleotide
ugugcuucccugaccggaa

SEQ ID NO: 2465088 - RNA, 19 nt, Artificial Sequence
  Description of Artificial Sequence: Synthetic oligonucleotide
ucucaagucagaggguguc

SEQ ID NO: 2465089 - RNA, 19 nt, Artificial Sequence
  Description of Artificial Sequence: Synthetic oligonucleotide
cugcccucguucaccagcg

SEQ ID NO: 2465090 - RNA, 19 nt, Artificial Sequence
  Description of Artificial Sequence: Synthetic oligonucleotide
cugcgacuugaguuuauug

SEQ ID NO: 2465091 - RNA, 19 nt, Artificial Sequence
  Description of Artificial Sequence: Synthetic oligonucleotide
gccguaugcagucugggug

SEQ ID NO: 2465092 - RNA, 19 nt, Artificial Sequence
  Description of Artificial Sequence: Synthetic oligonucleotide
augguaaccacagcauccu

SEQ ID NO: 2465093 - RNA, 19 nt, Artificial Sequence
  Description of Artificial Sequence: Synthetic oligonucleotide
uuggcgaccuccgggacug

SEQ ID NO: 2465094 - RNA, 19 nt, Artificial Sequence
  Description of Artificial Sequence: Synthetic oligonucleotide
ugaugguccuuucuuccuu

SEQ ID NO: 2465095 - RNA, 19 nt, Artificial Sequence
  Description of Artificial Sequence: Synthetic oligonucleotide
ugucguacacgucgucggu

SEQ ID NO: 2465096 - RNA, 19 nt, Artificial Sequence
  Description of Artificial Sequence: Synthetic oligonucleotide
cuuugggucaagaaaacuu

SEQ ID NO: 2465097 - RNA, 19 nt, Artificial Sequence
  Description of Artificial Sequence: Synthetic oligonucleotide
cuaggugugcuucccugac

SEQ ID NO: 2465098 - RNA, 19 nt, Artificial Sequence
  Description of Artificial Sequence: Synthetic oligonucleotide
accuucaaucuaggugugc

SEQ ID NO: 2465099 - RNA, 19 nt, Artificial Sequence
  Description of Artificial Sequence: Synthetic oligonucleotide
aagaaagcucggagucgcg

SEQ ID NO: 2465100 - RNA, 19 nt, Artificial Sequence
  Description of Artificial Sequence: Synthetic oligonucleotide
gugcccaugguaaccacag

SEQ ID NO: 2465101 - RNA, 19 nt, Artificial Sequence
  Description of Artificial Sequence: Synthetic oligonucleotide
caaucuaggugugcuuccc

SEQ ID NO: 2465102 - RNA, 19 nt, Artificial Sequence
  Description of Artificial Sequence: Synthetic oligonucleotide
guacgaucuugaauugcag

SEQ ID NO: 2465103 - RNA, 19 nt, Artificial Sequence
  Description of Artificial Sequence: Synthetic oligonucleotide
cucguaggagaugucguac

SEQ ID NO: 2465104 - RNA, 19 nt, Artificial Sequence
  Description of Artificial Sequence: Synthetic oligonucleotide
cagauccacuaccauuuug

SEQ ID NO: 2465105 - RNA, 19 nt, Artificial Sequence
  Description of Artificial Sequence: Synthetic oligonucleotide
agcaacagcugcgacuuga

SEQ ID NO: 2465106 - RNA, 19 nt, Artificial Sequence
  Description of Artificial Sequence: Synthetic oligonucleotide
gacuugaguuuauugcgcu

SEQ ID NO: 2465107 - RNA, 19 nt, Artificial Sequence
  Description of Artificial Sequence: Synthetic oligonucleotide
ggauacaccggcucuccgc

SEQ ID NO: 2465108 - RNA, 19 nt, Artificial Sequence
  Description of Artificial Sequence: Synthetic oligonucleotide
cucuggauggaagcaggcc

SEQ ID NO: 2465109 - RNA, 19 nt, Artificial Sequence
  Description of Artificial Sequence: Synthetic oligonucleotide
cacguacgaucuugaauug

SEQ ID NO: 2465110 - RNA, 19 nt, Artificial Sequence
  Description of Artificial Sequence: Synthetic oligonucleotide
ugaguuuauugcgcuccug

SEQ ID NO: 2465111 - RNA, 19 nt, Artificial Sequence
  Description of Artificial Sequence: Synthetic oligonucleotide
caccaccuuggucaugacc

SEQ ID NO: 2465112 - RNA, 19 nt, Artificial Sequence
  Description of Artificial Sequence: Synthetic oligonucleotide
cacgccguaugcagucugg

SEQ ID NO: 2465113 - RNA, 19 nt, Artificial Sequence
  Description of Artificial Sequence: Synthetic oligonucleotide
ccguaugcagucugggugg

SEQ ID NO: 2465114 - RNA, 19 nt, Artificial Sequence
  Description of Artificial Sequence: Synthetic oligonucleotide
ucgucgguggucagcugca

SEQ ID NO: 2465115 - RNA, 19 nt, Artificial Sequence
  Description of Artificial Sequence: Synthetic oligonucleotide
gucgguggucagcugcagg

SEQ ID NO: 2465116 - RNA, 19 nt, Artificial Sequence
  Description of Artificial Sequence: Synthetic oligonucleotide
ucgcggcccaccucguagg

SEQ ID NO: 2465117 - RNA, 19 nt, Artificial Sequence
  Description of Artificial Sequence: Synthetic oligonucleotide
uggccuccggauacaccgg

SEQ ID NO: 2465118 - RNA, 19 nt, Artificial Sequence
  Description of Artificial Sequence: Synthetic oligonucleotide
gucaccaccuuggucauga

SEQ ID NO: 2465119 - RNA, 19 nt, Artificial Sequence
  Description of Artificial Sequence: Synthetic oligonucleotide
caucuccaucacacguacg

SEQ ID NO: 2465120 - RNA, 19 nt, Artificial Sequence
  Description of Artificial Sequence: Synthetic oligonucleotide
aagcggggccuguuggggu

SEQ ID NO: 2465121 - RNA, 19 nt, Artificial Sequence
  Description of Artificial Sequence: Synthetic oligonucleotide
caccuacacguccacuggc

SEQ ID NO: 2465122 - RNA, 19 nt, Artificial Sequence
  Description of Artificial Sequence: Synthetic oligonucleotide
caagguucaccuggccucc

SEQ ID NO: 2465123 - RNA, 19 nt, Artificial Sequence
  Description of Artificial Sequence: Synthetic oligonucleotide
cucgcggcccaccucguag

SEQ ID NO: 2465124 - RNA, 19 nt, Artificial Sequence
  Description of Artificial Sequence: Synthetic oligonucleotide
agcggggccuguugggguc

SEQ ID NO: 2465125 - RNA, 19 nt, Artificial Sequence
  Description of Artificial Sequence: Synthetic oligonucleotide
cugcaccagcaacagcugc

SEQ ID NO: 2465126 - RNA, 19 nt, Artificial Sequence
  Description of Artificial Sequence: Synthetic oligonucleotide
ccaagguucaccuggccuc

SEQ ID NO: 2465127 - RNA, 19 nt, Artificial Sequence
  Description of Artificial Sequence: Synthetic oligonucleotide
ggccagggcgccuucgucg

SEQ ID NO: 2465128 - RNA, 19 nt, Artificial Sequence
  Description of Artificial Sequence: Synthetic oligonucleotide
ggccccggaagaaagcucg

SEQ ID NO: 2465129 - RNA, 19 nt, Artificial Sequence
  Description of Artificial Sequence: Synthetic oligonucleotide
ugcuucccugaccggaaaa

SEQ ID NO: 2465130 - RNA, 19 nt, Artificial Sequence
  Description of Artificial Sequence: Synthetic oligonucleotide
uugcagccgggugacgcgg

SEQ ID NO: 2465131 - RNA, 19 nt, Artificial Sequence
  Description of Artificial Sequence: Synthetic oligonucleotide
gcccaugguaaccacagca

SEQ ID NO: 2465132 - RNA, 19 nt, Artificial Sequence
  Description of Artificial Sequence: Synthetic oligonucleotide
gccuucgucguccuccccg

SEQ ID NO: 2465133 - RNA, 19 nt, Artificial Sequence
  Description of Artificial Sequence: Synthetic oligonucleotide
ugagguugucccucuccau

SEQ ID NO: 2465134 - RNA, 19 nt, Artificial Sequence
  Description of Artificial Sequence: Synthetic oligonucleotide
ugcccaugguaaccacagc

SEQ ID NO: 2465135 - RNA, 19 nt, Artificial Sequence
  Description of Artificial Sequence: Synthetic oligonucleotide
ugcagccgggugacgcggg

SEQ ID NO: 2465136 - RNA, 19 nt, Artificial Sequence
  Description of Artificial Sequence: Synthetic oligonucleotide
aggccacuccuguagcacu

SEQ ID NO: 2465137 - RNA, 19 nt, Artificial Sequence
  Description of Artificial Sequence: Synthetic oligonucleotide
ggggucgcugcccagggcc

SEQ ID NO: 2465138 - RNA, 19 nt, Artificial Sequence
  Description of Artificial Sequence: Synthetic oligonucleotide
ucuccaucacacguacgau

SEQ ID NO: 2465139 - RNA, 19 nt, Artificial Sequence
  Description of Artificial Sequence: Synthetic oligonucleotide
gguaaccacagcauccuuc

SEQ ID NO: 2465140 - RNA, 19 nt, Artificial Sequence
  Description of Artificial Sequence: Synthetic oligonucleotide
aucagcucgcggcccaccu

SEQ ID NO: 2465141 - RNA, 19 nt, Artificial Sequence
  Description of Artificial Sequence: Synthetic oligonucleotide
uugcgcuccugcagcacgu

SEQ ID NO: 2465142 - RNA, 19 nt, Artificial Sequence
  Description of Artificial Sequence: Synthetic oligonucleotide
aagguucaccuggccuccg

SEQ ID NO: 2465143 - RNA, 19 nt, Artificial Sequence
  Description of Artificial Sequence: Synthetic oligonucleotide
aacuuagcgcugggcgcag

SEQ ID NO: 2465144 - RNA, 19 nt, Artificial Sequence
  Description of Artificial Sequence: Synthetic oligonucleotide
ccgacuuuggcgaccuccg

SEQ ID NO: 2465145 - RNA, 19 nt, Artificial Sequence
  Description of Artificial Sequence: Synthetic oligonucleotide
gacucuuggccagggcgcc

SEQ ID NO: 2465146 - RNA, 19 nt, Artificial Sequence
  Description of Artificial Sequence: Synthetic oligonucleotide
uuggccagggcgccuucgu

SEQ ID NO: 2465147 - RNA, 19 nt, Artificial Sequence
  Description of Artificial Sequence: Synthetic oligonucleotide
aucacacguacgaucuuga

SEQ ID NO: 2465148 - RNA, 19 nt, Artificial Sequence
  Description of Artificial Sequence: Synthetic oligonucleotide
agcucggagucgcgggaag

SEQ ID NO: 2465149 - RNA, 19 nt, Artificial Sequence
  Description of Artificial Sequence: Synthetic oligonucleotide
cucuggugcccaugguaac

SEQ ID NO: 2465150 - RNA, 19 nt, Artificial Sequence
  Description of Artificial Sequence: Synthetic oligonucleotide
ggagucgcgggaagcaccg

SEQ ID NO: 2465151 - RNA, 19 nt, Artificial Sequence
  Description of Artificial Sequence: Synthetic oligonucleotide
gcugcccucguucaccagc

SEQ ID NO: 2465152 - RNA, 19 nt, Artificial Sequence
  Description of Artificial Sequence: Synthetic oligonucleotide
ggcaauugucuucucaagu

SEQ ID NO: 2465153 - RNA, 19 nt, Artificial Sequence
  Description of Artificial Sequence: Synthetic oligonucleotide
cuccauccucagcuccucg

SEQ ID NO: 2465154 - RNA, 19 nt, Artificial Sequence
  Description of Artificial Sequence: Synthetic oligonucleotide
cgguccaagguucaccugg

SEQ ID NO: 2465155 - RNA, 19 nt, Artificial Sequence
  Description of Artificial Sequence: Synthetic oligonucleotide
auacaccggcucuccgcag

SEQ ID NO: 2465156 - RNA, 19 nt, Artificial Sequence
  Description of Artificial Sequence: Synthetic oligonucleotide
gaccuucaaucuaggugug

SEQ ID NO: 2465157 - RNA, 19 nt, Artificial Sequence
  Description of Artificial Sequence: Synthetic oligonucleotide
acgccguaugcagucuggg

SEQ ID NO: 2465158 - RNA, 19 nt, Artificial Sequence
  Description of Artificial Sequence: Synthetic oligonucleotide
cccggaagaaagcucggag

SEQ ID NO: 2465159 - RNA, 19 nt, Artificial Sequence
  Description of Artificial Sequence: Synthetic oligonucleotide
cgacuugaguuuauugcgc

SEQ ID NO: 2465160 - RNA, 19 nt, Artificial Sequence
  Description of Artificial Sequence: Synthetic oligonucleotide
ccagcaucuccaucacacg

SEQ ID NO: 2465161 - RNA, 19 nt, Artificial Sequence
  Description of Artificial Sequence: Synthetic oligonucleotide
guccacgccguaugcaguc

SEQ ID NO: 2465162 - RNA, 19 nt, Artificial Sequence
  Description of Artificial Sequence: Synthetic oligonucleotide
ugucaccuacacguccacu

SEQ ID NO: 2465163 - RNA, 19 nt, Artificial Sequence
  Description of Artificial Sequence: Synthetic oligonucleotide
accucguaggagaugucgu

SEQ ID NO: 2465164 - RNA, 19 nt, Artificial Sequence
  Description of Artificial Sequence: Synthetic oligonucleotide
gaauugcagccgggugacg

SEQ ID NO: 2465165 - RNA, 19 nt, Artificial Sequence
  Description of Artificial Sequence: Synthetic oligonucleotide
uccggauacaccggcucuc

SEQ ID NO: 2465166 - RNA, 19 nt, Artificial Sequence
  Description of Artificial Sequence: Synthetic oligonucleotide
cugcagagugaagcggggc

SEQ ID NO: 2465167 - RNA, 19 nt, Artificial Sequence
  Description of Artificial Sequence: Synthetic oligonucleotide
cuuuggcgaccuccgggac

SEQ ID NO: 2465168 - RNA, 19 nt, Artificial Sequence
  Description of Artificial Sequence: Synthetic oligonucleotide
uauugcgcuccugcagcac

SEQ ID NO: 2465169 - RNA, 19 nt, Artificial Sequence
  Description of Artificial Sequence: Synthetic oligonucleotide
accuacacguccacuggcu

SEQ ID NO: 2465170 - RNA, 19 nt, Artificial Sequence
  Description of Artificial Sequence: Synthetic oligonucleotide
guccaagguucaccuggcc

SEQ ID NO: 2465171 - RNA, 19 nt, Artificial Sequence
  Description of Artificial Sequence: Synthetic oligonucleotide
cggaagaaagcucggaguc

SEQ ID NO: 2465172 - RNA, 19 nt, Artificial Sequence
  Description of Artificial Sequence: Synthetic oligonucleotide
cgaucuugaauugcagccg

SEQ ID NO: 2465173 - RNA, 19 nt, Artificial Sequence
  Description of Artificial Sequence: Synthetic oligonucleotide
agggugucaccaccuuggu

SEQ ID NO: 2465174 - RNA, 19 nt, Artificial Sequence
  Description of Artificial Sequence: Synthetic oligonucleotide
ccugagguugucccucucc

SEQ ID NO: 2465175 - RNA, 19 nt, Artificial Sequence
  Description of Artificial Sequence: Synthetic oligonucleotide
ggacucuuggccagggcgc

SEQ ID NO: 2465176 - RNA, 19 nt, Artificial Sequence
  Description of Artificial Sequence: Synthetic oligonucleotide
cguacgaucuugaauugca

SEQ ID NO: 2465177 - RNA, 19 nt, Artificial Sequence
  Description of Artificial Sequence: Synthetic oligonucleotide
ccaugguaaccacagcauc

SEQ ID NO: 2465178 - RNA, 19 nt, Artificial Sequence
  Description of Artificial Sequence: Synthetic oligonucleotide
guugucccucuccauccuc

SEQ ID NO: 2465179 - RNA, 19 nt, Artificial Sequence
  Description of Artificial Sequence: Synthetic oligonucleotide
caggccacuccuguagcac

SEQ ID NO: 2465180 - RNA, 19 nt, Artificial Sequence
  Description of Artificial Sequence: Synthetic oligonucleotide
ugguaaccacagcauccuu

SEQ ID NO: 2465181 - RNA, 19 nt, Artificial Sequence
  Description of Artificial Sequence: Synthetic oligonucleotide
caccuccugccugagguug

SEQ ID NO: 2465182 - RNA, 19 nt, Artificial Sequence
  Description of Artificial Sequence: Synthetic oligonucleotide
agcaucuccaucacacgua

SEQ ID NO: 2465183 - RNA, 19 nt, Artificial Sequence
  Description of Artificial Sequence: Synthetic oligonucleotide
uggccccggaagaaagcuc

SEQ ID NO: 2465184 - RNA, 19 nt, Artificial Sequence
  Description of Artificial Sequence: Synthetic oligonucleotide
uggauggaagcaggccacu

SEQ ID NO: 2465185 - RNA, 19 nt, Artificial Sequence
  Description of Artificial Sequence: Synthetic oligonucleotide
ggucaugaccuucaaucua

SEQ ID NO: 2465186 - RNA, 19 nt, Artificial Sequence
  Description of Artificial Sequence: Synthetic oligonucleotide
accauuuuguccgguccaa

SEQ ID NO: 2465187 - RNA, 19 nt, Artificial Sequence
  Description of Artificial Sequence: Synthetic oligonucleotide
cacaggggccuccuccaug

SEQ ID NO: 2465188 - RNA, 19 nt, Artificial Sequence
  Description of Artificial Sequence: Synthetic oligonucleotide
guccgguccaagguucacc

SEQ ID NO: 2465189 - RNA, 19 nt, Artificial Sequence
  Description of Artificial Sequence: Synthetic oligonucleotide
cacguccacuggcuuuggg

SEQ ID NO: 2465190 - RNA, 19 nt, Artificial Sequence
  Description of Artificial Sequence: Synthetic oligonucleotide
ugccugagguugucccucu

SEQ ID NO: 2465191 - RNA, 19 nt, Artificial Sequence
  Description of Artificial Sequence: Synthetic oligonucleotide
ggcgccuucgucguccucc

SEQ ID NO: 2465192 - RNA, 19 nt, Artificial Sequence
  Description of Artificial Sequence: Synthetic oligonucleotide
cagggcgccuucgucgucc

SEQ ID NO: 2465193 - RNA, 19 nt, Artificial Sequence
  Description of Artificial Sequence: Synthetic oligonucleotide
gugugcuucccugaccgga

SEQ ID NO: 2465194 - RNA, 19 nt, Artificial Sequence
  Description of Artificial Sequence: Synthetic oligonucleotide
accuggccuccggauacac

SEQ ID NO: 2465195 - RNA, 19 nt, Artificial Sequence
  Description of Artificial Sequence: Synthetic oligonucleotide
accuccgggacugcuguca

SEQ ID NO: 2465196 - RNA, 19 nt, Artificial Sequence
  Description of Artificial Sequence: Synthetic oligonucleotide
aggggacucuuggccaggg

SEQ ID NO: 2465197 - RNA, 19 nt, Artificial Sequence
  Description of Artificial Sequence: Synthetic oligonucleotide
cugucaccuacacguccac

SEQ ID NO: 2465198 - RNA, 19 nt, Artificial Sequence
  Description of Artificial Sequence: Synthetic oligonucleotide
cacacguacgaucuugaau

SEQ ID NO: 2465199 - RNA, 19 nt, Artificial Sequence
  Description of Artificial Sequence: Synthetic oligonucleotide
ucggagucgcgggaagcac

SEQ ID NO: 2465200 - RNA, 19 nt, Artificial Sequence
  Description of Artificial Sequence: Synthetic oligonucleotide
cuuggccagggcgccuucg

SEQ ID NO: 2465201 - RNA, 19 nt, Artificial Sequence
  Description of Artificial Sequence: Synthetic oligonucleotide
ggugugcuucccugaccgg

SEQ ID NO: 2465202 - RNA, 19 nt, Artificial Sequence
  Description of Artificial Sequence: Synthetic oligonucleotide
uggugcccaugguaaccac

SEQ ID NO: 2465203 - RNA, 19 nt, Artificial Sequence
  Description of Artificial Sequence: Synthetic oligonucleotide
ggucggucagauccacuac

SEQ ID NO: 2465204 - RNA, 19 nt, Artificial Sequence
  Description of Artificial Sequence: Synthetic oligonucleotide
ccauccucagcuccucggc

SEQ ID NO: 2465205 - RNA, 19 nt, Artificial Sequence
  Description of Artificial Sequence: Synthetic oligonucleotide
gguggucagcugcagggga

SEQ ID NO: 2465206 - RNA, 19 nt, Artificial Sequence
  Description of Artificial Sequence: Synthetic oligonucleotide
aagcucggagucgcgggaa

SEQ ID NO: 2465207 - RNA, 19 nt, Artificial Sequence
  Description of Artificial Sequence: Synthetic oligonucleotide
caugaccuucaaucuaggu

SEQ ID NO: 2465208 - RNA, 19 nt, Artificial Sequence
  Description of Artificial Sequence: Synthetic oligonucleotide
cacgucgucgguggucagc

SEQ ID NO: 2465209 - RNA, 19 nt, Artificial Sequence
  Description of Artificial Sequence: Synthetic oligonucleotide
gggucggucagauccacua

SEQ ID NO: 2465210 - RNA, 19 nt, Artificial Sequence
  Description of Artificial Sequence: Synthetic oligonucleotide
gagaugucguacacgucgu

SEQ ID NO: 2465211 - RNA, 19 nt, Artificial Sequence
  Description of Artificial Sequence: Synthetic oligonucleotide
gcccucguucaccagcgcc

SEQ ID NO: 2465212 - RNA, 19 nt, Artificial Sequence
  Description of Artificial Sequence: Synthetic oligonucleotide
ccucuccauccucagcucc

SEQ ID NO: 2465213 - RNA, 19 nt, Artificial Sequence
  Description of Artificial Sequence: Synthetic oligonucleotide
cuucucucuggugcccaug

SEQ ID NO: 2465214 - RNA, 19 nt, Artificial Sequence
  Description of Artificial Sequence: Synthetic oligonucleotide
cuccgggacugcugucacc

SEQ ID NO: 2465215 - RNA, 19 nt, Artificial Sequence
  Description of Artificial Sequence: Synthetic oligonucleotide
ugggcgcaguccacgccgu

SEQ ID NO: 2465216 - RNA, 19 nt, Artificial Sequence
  Description of Artificial Sequence: Synthetic oligonucleotide
uggccagggcgccuucguc

SEQ ID NO: 2465217 - RNA, 19 nt, Artificial Sequence
  Description of Artificial Sequence: Synthetic oligonucleotide
cccgacuuuggcgaccucc

SEQ ID NO: 2465218 - RNA, 19 nt, Artificial Sequence
  Description of Artificial Sequence: Synthetic oligonucleotide
guacacgucgucggugguc

SEQ ID NO: 2465219 - RNA, 19 nt, Artificial Sequence
  Description of Artificial Sequence: Synthetic oligonucleotide
gcaacagcugcgacuugag

SEQ ID NO: 2465220 - RNA, 19 nt, Artificial Sequence
  Description of Artificial Sequence: Synthetic oligonucleotide
ggucagauccacuaccauu

SEQ ID NO: 2465221 - RNA, 19 nt, Artificial Sequence
  Description of Artificial Sequence: Synthetic oligonucleotide
cguccacuggcuuuggguc

SEQ ID NO: 2465222 - RNA, 19 nt, Artificial Sequence
  Description of Artificial Sequence: Synthetic oligonucleotide
gguccaagguucaccuggc

SEQ ID NO: 2465223 - RNA, 19 nt, Artificial Sequence
  Description of Artificial Sequence: Synthetic oligonucleotide
cuccucccgcacaggggcc

SEQ ID NO: 2465224 - RNA, 19 nt, Artificial Sequence
  Description of Artificial Sequence: Synthetic oligonucleotide
cuggugcccaugguaacca

SEQ ID NO: 2465225 - RNA, 19 nt, Artificial Sequence
  Description of Artificial Sequence: Synthetic oligonucleotide
uguccgguccaagguucac

SEQ ID NO: 2465226 - RNA, 19 nt, Artificial Sequence
  Description of Artificial Sequence: Synthetic oligonucleotide
aguccacgccguaugcagu

SEQ ID NO: 2465227 - RNA, 19 nt, Artificial Sequence
  Description of Artificial Sequence: Synthetic oligonucleotide
gggccaucagcucgcggcc

SEQ ID NO: 2465228 - RNA, 19 nt, Artificial Sequence
  Description of Artificial Sequence: Synthetic oligonucleotide
ggcuuugggucaagaaaac

SEQ ID NO: 2465229 - RNA, 19 nt, Artificial Sequence
  Description of Artificial Sequence: Synthetic oligonucleotide
uccacgccguaugcagucu

SEQ ID NO: 2465230 - RNA, 19 nt, Artificial Sequence
  Description of Artificial Sequence: Synthetic oligonucleotide
cguaggagaugucguacac

SEQ ID NO: 2465231 - RNA, 19 nt, Artificial Sequence
  Description of Artificial Sequence: Synthetic oligonucleotide
guaugcagucuggguggcc

SEQ ID NO: 2465232 - RNA, 19 nt, Artificial Sequence
  Description of Artificial Sequence: Synthetic oligonucleotide
gcuucucuggauggaagca

SEQ ID NO: 2465233 - RNA, 19 nt, Artificial Sequence
  Description of Artificial Sequence: Synthetic oligonucleotide
cucggagucgcgggaagca

SEQ ID NO: 2465234 - RNA, 19 nt, Artificial Sequence
  Description of Artificial Sequence: Synthetic oligonucleotide
gcugucaccuacacgucca

SEQ ID NO: 2465235 - RNA, 19 nt, Artificial Sequence
  Description of Artificial Sequence: Synthetic oligonucleotide
caccagcaacagcugcgac

SEQ ID NO: 2465236 - RNA, 19 nt, Artificial Sequence
  Description of Artificial Sequence: Synthetic oligonucleotide
agucuggguggccccggaa

SEQ ID NO: 2465237 - RNA, 19 nt, Artificial Sequence
  Description of Artificial Sequence: Synthetic oligonucleotide
agcgcugggcgcaguccac

SEQ ID NO: 2465238 - RNA, 19 nt, Artificial Sequence
  Description of Artificial Sequence: Synthetic oligonucleotide
cacgucccucagcuccugc

SEQ ID NO: 2465239 - RNA, 19 nt, Artificial Sequence
  Description of Artificial Sequence: Synthetic oligonucleotide
caggggacucuuggccagg

SEQ ID NO: 2465240 - RNA, 19 nt, Artificial Sequence
  Description of Artificial Sequence: Synthetic oligonucleotide
acacguccacuggcuuugg

SEQ ID NO: 2465241 - RNA, 19 nt, Artificial Sequence
  Description of Artificial Sequence: Synthetic oligonucleotide
ggccuccggauacaccggc

SEQ ID NO: 2465242 - RNA, 19 nt, Artificial Sequence
  Description of Artificial Sequence: Synthetic oligonucleotide
gguucaccuggccuccgga

SEQ ID NO: 2465243 - RNA, 19 nt, Artificial Sequence
  Description of Artificial Sequence: Synthetic oligonucleotide
caucagcucgcggcccacc

SEQ ID NO: 2465244 - RNA, 19 nt, Artificial Sequence
  Description of Artificial Sequence: Synthetic oligonucleotide
caccagcgccuccagcauc

SEQ ID NO: 2465245 - RNA, 19 nt, Artificial Sequence
  Description of Artificial Sequence: Synthetic oligonucleotide
cacagcauccuucucucuu

SEQ ID NO: 2465246 - RNA, 19 nt, Artificial Sequence
  Description of Artificial Sequence: Synthetic oligonucleotide
cuccugccugagguugucc

SEQ ID NO: 2465247 - RNA, 19 nt, Artificial Sequence
  Description of Artificial Sequence: Synthetic oligonucleotide
agcacgucccucagcuccu

SEQ ID NO: 2465248 - RNA, 19 nt, Artificial Sequence
  Description of Artificial Sequence: Synthetic oligonucleotide
gcgcaguccacgccguaug

SEQ ID NO: 2465249 - RNA, 19 nt, Artificial Sequence
  Description of Artificial Sequence: Synthetic oligonucleotide
cuucaaucuaggugugcuu

SEQ ID NO: 2465250 - RNA, 19 nt, Artificial Sequence
  Description of Artificial Sequence: Synthetic oligonucleotide
ccacuaccauuuuguccgg

SEQ ID NO: 2465251 - RNA, 19 nt, Artificial Sequence
  Description of Artificial Sequence: Synthetic oligonucleotide
gguggccccggaagaaagc

SEQ ID NO: 2465252 - RNA, 19 nt, Artificial Sequence
  Description of Artificial Sequence: Synthetic oligonucleotide
ggugcccaugguaaccaca

SEQ ID NO: 2465253 - RNA, 19 nt, Artificial Sequence
  Description of Artificial Sequence: Synthetic oligonucleotide
gggugucaccaccuugguc

SEQ ID NO: 2465254 - RNA, 19 nt, Artificial Sequence
  Description of Artificial Sequence: Synthetic oligonucleotide
ccuccggauacaccggcuc

SEQ ID NO: 2465255 - RNA, 19 nt, Artificial Sequence
  Description of Artificial Sequence: Synthetic oligonucleotide
ccugcagcacgucccucag

SEQ ID NO: 2465256 - RNA, 19 nt, Artificial Sequence
  Description of Artificial Sequence: Synthetic oligonucleotide
guucaccuggccuccggau

SEQ ID NO: 2465257 - RNA, 19 nt, Artificial Sequence
  Description of Artificial Sequence: Synthetic oligonucleotide
cuacacguccacuggcuuu

SEQ ID NO: 2465258 - RNA, 19 nt, Artificial Sequence
  Description of Artificial Sequence: Synthetic oligonucleotide
ggccacuccuguagcacug

SEQ ID NO: 2465259 - RNA, 19 nt, Artificial Sequence
  Description of Artificial Sequence: Synthetic oligonucleotide
ccuggccuccggauacacc

SEQ ID NO: 2465260 - RNA, 19 nt, Artificial Sequence
  Description of Artificial Sequence: Synthetic oligonucleotide
cggagucgcgggaagcacc

SEQ ID NO: 2465261 - RNA, 19 nt, Artificial Sequence
  Description of Artificial Sequence: Synthetic oligonucleotide
gggacugcugucaccuaca

SEQ ID NO: 2465262 - RNA, 19 nt, Artificial Sequence
  Description of Artificial Sequence: Synthetic oligonucleotide
guggccccggaagaaagcu

SEQ ID NO: 2465263 - RNA, 19 nt, Artificial Sequence
  Description of Artificial Sequence: Synthetic oligonucleotide
gcagccgggugacgcgggg

SEQ ID NO: 2465264 - RNA, 19 nt, Artificial Sequence
  Description of Artificial Sequence: Synthetic oligonucleotide
cuucgucguccuccccguc

SEQ ID NO: 2465265 - RNA, 19 nt, Artificial Sequence
  Description of Artificial Sequence: Synthetic oligonucleotide
gaccuccgggacugcuguc

SEQ ID NO: 2465266 - RNA, 19 nt, Artificial Sequence
  Description of Artificial Sequence: Synthetic oligonucleotide
cuccggauacaccggcucu

SEQ ID NO: 2465267 - RNA, 19 nt, Artificial Sequence
  Description of Artificial Sequence: Synthetic oligonucleotide
ccuucaaucuaggugugcu

SEQ ID NO: 2465268 - RNA, 19 nt, Artificial Sequence
  Description of Artificial Sequence: Synthetic oligonucleotide
ccggauacaccggcucucc

SEQ ID NO: 2465269 - RNA, 19 nt, Artificial Sequence
  Description of Artificial Sequence: Synthetic oligonucleotide
ccggaagaaagcucggagu

SEQ ID NO: 2465270 - RNA, 19 nt, Artificial Sequence
  Description of Artificial Sequence: Synthetic oligonucleotide
ggggacucuuggccagggc

SEQ ID NO: 2465271 - RNA, 19 nt, Artificial Sequence
  Description of Artificial Sequence: Synthetic oligonucleotide
gugcuucccugaccggaaa

SEQ ID NO: 2465272 - RNA, 19 nt, Artificial Sequence
  Description of Artificial Sequence: Synthetic oligonucleotide
gcuuugggucaagaaaacu

SEQ ID NO: 2465273 - RNA, 19 nt, Artificial Sequence
  Description of Artificial Sequence: Synthetic oligonucleotide
caacagcugcgacuugagu

SEQ ID NO: 2465274 - RNA, 19 nt, Artificial Sequence
  Description of Artificial Sequence: Synthetic oligonucleotide
cgggacugcugucaccuac

SEQ ID NO: 2465275 - RNA, 19 nt, Artificial Sequence
  Description of Artificial Sequence: Synthetic oligonucleotide
gcucggagucgcgggaagc

SEQ ID NO: 2465276 - RNA, 19 nt, Artificial Sequence
  Description of Artificial Sequence: Synthetic oligonucleotide
ucccgcacaggggccuccu

SEQ ID NO: 2465277 - RNA, 19 nt, Artificial Sequence
  Description of Artificial Sequence: Synthetic oligonucleotide
gcagucuggguggccccgg

SEQ ID NO: 2465278 - RNA, 19 nt, Artificial Sequence
  Description of Artificial Sequence: Synthetic oligonucleotide
acuuagcgcugggcgcagu

SEQ ID NO: 2465279 - RNA, 19 nt, Artificial Sequence
  Description of Artificial Sequence: Synthetic oligonucleotide
cgcaguccacgccguaugc

SEQ ID NO: 2465280 - RNA, 19 nt, Artificial Sequence
  Description of Artificial Sequence: Synthetic oligonucleotide
ccacgccguaugcagucug

SEQ ID NO: 2465281 - RNA, 19 nt, Artificial Sequence
  Description of Artificial Sequence: Synthetic oligonucleotide
cacuggcuuugggucaaga

SEQ ID NO: 2465282 - RNA, 19 nt, Artificial Sequence
  Description of Artificial Sequence: Synthetic oligonucleotide
gcaguccacgccguaugca

SEQ ID NO: 2465283 - RNA, 19 nt, Artificial Sequence
  Description of Artificial Sequence: Synthetic oligonucleotide
ccucguaggagaugucgua

SEQ ID NO: 2465284 - RNA, 19 nt, Artificial Sequence
  Description of Artificial Sequence: Synthetic oligonucleotide
cgacuuuggcgaccuccgg

SEQ ID NO: 2465285 - RNA, 19 nt, Artificial Sequence
  Description of Artificial Sequence: Synthetic oligonucleotide
gcgcugggcgcaguccacg

SEQ ID NO: 2465286 - RNA, 19 nt, Artificial Sequence
  Description of Artificial Sequence: Synthetic oligonucleotide
cccaugguaaccacagcau

SEQ ID NO: 2465287 - RNA, 19 nt, Artificial Sequence
  Description of Artificial Sequence: Synthetic oligonucleotide
cucccgcacaggggccucc

SEQ ID NO: 2465288 - RNA, 19 nt, Artificial Sequence
  Description of Artificial Sequence: Synthetic oligonucleotide
cuggguggccccggaagaa

SEQ ID NO: 2465289 - RNA, 19 nt, Artificial Sequence
  Description of Artificial Sequence: Synthetic oligonucleotide
ccuccgggacugcugucac

SEQ ID NO: 2465290 - RNA, 19 nt, Artificial Sequence
  Description of Artificial Sequence: Synthetic oligonucleotide
cggauacaccggcucuccg

SEQ ID NO: 2465291 - RNA, 19 nt, Artificial Sequence
  Description of Artificial Sequence: Synthetic oligonucleotide
cccguccuccuccucccgc

SEQ ID NO: 2465292 - RNA, 19 nt, Artificial Sequence
  Description of Artificial Sequence: Synthetic oligonucleotide
gccccggaagaaagcucgg

SEQ ID NO: 2465293 - RNA, 19 nt, Artificial Sequence
  Description of Artificial Sequence: Synthetic oligonucleotide
agcugcgacuugaguuuau

SEQ ID NO: 2465294 - RNA, 19 nt, Artificial Sequence
  Description of Artificial Sequence: Synthetic oligonucleotide
gcagagugaagcggggccu

SEQ ID NO: 2465295 - RNA, 19 nt, Artificial Sequence
  Description of Artificial Sequence: Synthetic oligonucleotide
cccaccucguaggagaugu

SEQ ID NO: 2465296 - RNA, 19 nt, Artificial Sequence
  Description of Artificial Sequence: Synthetic oligonucleotide
ccaggcugcccucguucac

SEQ ID NO: 2465297 - RNA, 19 nt, Artificial Sequence
  Description of Artificial Sequence: Synthetic oligonucleotide
cguaugcagucuggguggc

SEQ ID NO: 2465298 - RNA, 19 nt, Artificial Sequence
  Description of Artificial Sequence: Synthetic oligonucleotide
gcagcacgucccucagcuc

SEQ ID NO: 2465299 - RNA, 19 nt, Artificial Sequence
  Description of Artificial Sequence: Synthetic oligonucleotide
gggccuguuggggucgguc

SEQ ID NO: 2465300 - RNA, 19 nt, Artificial Sequence
  Description of Artificial Sequence: Synthetic oligonucleotide
ccgguccaagguucaccug

SEQ ID NO: 2465301 - RNA, 19 nt, Artificial Sequence
  Description of Artificial Sequence: Synthetic oligonucleotide
gcggggccuguuggggucg

SEQ ID NO: 2465302 - RNA, 19 nt, Artificial Sequence
  Description of Artificial Sequence: Synthetic oligonucleotide
gucgcugcccagggccauc

SEQ ID NO: 2465303 - RNA, 19 nt, Artificial Sequence
  Description of Artificial Sequence: Synthetic oligonucleotide
cgcugggcgcaguccacgc

SEQ ID NO: 2465304 - RNA, 19 nt, Artificial Sequence
  Description of Artificial Sequence: Synthetic oligonucleotide
cuguuggggucggucagau

SEQ ID NO: 2465305 - RNA, 19 nt, Artificial Sequence
  Description of Artificial Sequence: Synthetic oligonucleotide
cagcugcgacuugaguuua

SEQ ID NO: 2465306 - RNA, 19 nt, Artificial Sequence
  Description of Artificial Sequence: Synthetic oligonucleotide
gccagggcgccuucgucgu

SEQ ID NO: 2465307 - RNA, 19 nt, Artificial Sequence
  Description of Artificial Sequence: Synthetic oligonucleotide
ccaccucguaggagauguc

SEQ ID NO: 2465308 - RNA, 19 nt, Artificial Sequence
  Description of Artificial Sequence: Synthetic oligonucleotide
uggcgaccuccgggacugc

SEQ ID NO: 2465309 - RNA, 19 nt, Artificial Sequence
  Description of Artificial Sequence: Synthetic oligonucleotide
cacuaccauuuuguccggu

SEQ ID NO: 2465310 - RNA, 19 nt, Artificial Sequence
  Description of Artificial Sequence: Synthetic oligonucleotide
ccagggccaucagcucgcg

SEQ ID NO: 2465311 - RNA, 19 nt, Artificial Sequence
  Description of Artificial Sequence: Synthetic oligonucleotide
caccuggccuccggauaca

SEQ ID NO: 2465312 - RNA, 19 nt, Artificial Sequence
  Description of Artificial Sequence: Synthetic oligonucleotide
agcucgcggcccaccucgu

SEQ ID NO: 2465313 - RNA, 19 nt, Artificial Sequence
  Description of Artificial Sequence: Synthetic oligonucleotide
gggucgcugcccagggcca

SEQ ID NO: 2465314 - RNA, 19 nt, Artificial Sequence
  Description of Artificial Sequence: Synthetic oligonucleotide
ccuguuggggucggucaga

SEQ ID NO: 2465315 - RNA, 19 nt, Artificial Sequence
  Description of Artificial Sequence: Synthetic oligonucleotide
ccuucgucguccuccccgu

SEQ ID NO: 2465316 - RNA, 19 nt, Artificial Sequence
  Description of Artificial Sequence: Synthetic oligonucleotide
gcccaccucguaggagaug

SEQ ID NO: 2465317 - RNA, 19 nt, Artificial Sequence
  Description of Artificial Sequence: Synthetic oligonucleotide
ccccguccuccuccucccg

SEQ ID NO: 2465318 - RNA, 19 nt, Artificial Sequence
  Description of Artificial Sequence: Synthetic oligonucleotide
gcugcgacuugaguuuauu

SEQ ID NO: 2465319 - RNA, 19 nt, Artificial Sequence
  Description of Artificial Sequence: Synthetic oligonucleotide
ccaucagcucgcggcccac

SEQ ID NO: 2465320 - RNA, 19 nt, Artificial Sequence
  Description of Artificial Sequence: Synthetic oligonucleotide
ccccggaagaaagcucgga

SEQ ID NO: 2465321 - RNA, 19 nt, Artificial Sequence
  Description of Artificial Sequence: Synthetic oligonucleotide
ggcgcaguccacgccguau

SEQ ID NO: 2465322 - RNA, 19 nt, Artificial Sequence
  Description of Artificial Sequence: Synthetic oligonucleotide
ccuacacguccacuggcuu

SEQ ID NO: 2465323 - RNA, 19 nt, Artificial Sequence
  Description of Artificial Sequence: Synthetic oligonucleotide
ccacuggcuuugggucaag

SEQ ID NO: 2465324 - RNA, 19 nt, Artificial Sequence
  Description of Artificial Sequence: Synthetic oligonucleotide
cgucgucgguggucagcug

SEQ ID NO: 2465325 - RNA, 19 nt, Artificial Sequence
  Description of Artificial Sequence: Synthetic oligonucleotide
cgaccuccgggacugcugu

SEQ ID NO: 2465326 - RNA, 19 nt, Artificial Sequence
  Description of Artificial Sequence: Synthetic oligonucleotide
ggcgaccuccgggacugcu

SEQ ID NO: 2465327 - RNA, 19 nt, Artificial Sequence
  Description of Artificial Sequence: Synthetic oligonucleotide
ccagggcgccuucgucguc

SEQ ID NO: 2465328 - RNA, 19 nt, Artificial Sequence
  Description of Artificial Sequence: Synthetic oligonucleotide
gcucgcggcccaccucgua

SEQ ID NO: 2465329 - RNA, 19 nt, Artificial Sequence
  Description of Artificial Sequence: Synthetic oligonucleotide
cgccguaugcagucugggu

SEQ ID NO: 2465330 - RNA, 19 nt, Artificial Sequence
  Description of Artificial Sequence: Synthetic oligonucleotide
gccuccggauacaccggcu

SEQ ID NO: 2465331 - RNA, 19 nt, Artificial Sequence
  Description of Artificial Sequence: Synthetic oligonucleotide
cgccuucgucguccucccc

SEQ ID NO: 2465332 - RNA, 19 nt, Artificial Sequence
  Description of Artificial Sequence: Synthetic oligonucleotide
gggcgccuucgucguccuc

SEQ ID NO: 2465333 - RNA, 19 nt, Artificial Sequence
  Description of Artificial Sequence: Synthetic oligonucleotide
ggcccaccucguaggagau

SEQ ID NO: 2465334 - RNA, 19 nt, Artificial Sequence
  Description of Artificial Sequence: Synthetic oligonucleotide
ccucccgcacaggggccuc

SEQ ID NO: 2465335 - RNA, 19 nt, Artificial Sequence
  Description of Artificial Sequence: Synthetic oligonucleotide
ccaucacacguacgaucuu

SEQ ID NO: 2465336 - RNA, 19 nt, Artificial Sequence
  Description of Artificial Sequence: Synthetic oligonucleotide
cgcggcccaccucguagga

SEQ ID NO: 2465337 - RNA, 19 nt, Artificial Sequence
  Description of Artificial Sequence: Synthetic oligonucleotide
cggucagauccacuaccau

SEQ ID NO: 2465338 - RNA, 19 nt, Artificial Sequence
  Description of Artificial Sequence: Synthetic oligonucleotide
cguacacgucgucgguggu

SEQ ID NO: 2465339 - RNA, 19 nt, Artificial Sequence
  Description of Artificial Sequence: Synthetic oligonucleotide
cggggccuguuggggucgg

SEQ ID NO: 2465340 - RNA, 19 nt, Artificial Sequence
  Description of Artificial Sequence: Synthetic oligonucleotide
ccggcucuccgcagccccu

SEQ ID NO: 2465341 - RNA, 19 nt, Artificial Sequence
  Description of Artificial Sequence: Synthetic oligonucleotide
ccccgacuuuggcgaccuc

SEQ ID NO: 2465342 - RNA, 19 nt, Artificial Sequence
  Description of Artificial Sequence: Synthetic oligonucleotide
ggggccuguuggggucggu

SEQ ID NO: 2465343 - RNA, 19 nt, Artificial Sequence
  Description of Artificial Sequence: Synthetic oligonucleotide
aacuucaagagcgaaagcc

SEQ ID NO: 2465344 - RNA, 19 nt, Artificial Sequence
  Description of Artificial Sequence: Synthetic oligonucleotide
aucaauaagugccagaauc

SEQ ID NO: 2465345 - RNA, 19 nt, Artificial Sequence
  Description of Artificial Sequence: Synthetic oligonucleotide
aaaccuuugagccuauuuc

SEQ ID NO: 2465346 - RNA, 19 nt, Artificial Sequence
  Description of Artificial Sequence: Synthetic oligonucleotide
guuaacaacuucaagagcg

SEQ ID NO: 2465347 - RNA, 19 nt, Artificial Sequence
  Description of Artificial Sequence: Synthetic oligonucleotide
accuuauaaagucucaacc

SEQ ID NO: 2465348 - RNA, 19 nt, Artificial Sequence
  Description of Artificial Sequence: Synthetic oligonucleotide
agacauuugguacauagcg

SEQ ID NO: 2465349 - RNA, 19 nt, Artificial Sequence
  Description of Artificial Sequence: Synthetic oligonucleotide
uuuuccaacauucaugugu

SEQ ID NO: 2465350 - RNA, 19 nt, Artificial Sequence
  Description of Artificial Sequence: Synthetic oligonucleotide
uuauuuaguccucagaggu

SEQ ID NO: 2465351 - RNA, 19 nt, Artificial Sequence
  Description of Artificial Sequence: Synthetic oligonucleotide
ggaucauugacauugauag

SEQ ID NO: 2465352 - RNA, 19 nt, Artificial Sequence
  Description of Artificial Sequence: Synthetic oligonucleotide
aagauguugggaccgauuc

SEQ ID NO: 2465353 - RNA, 19 nt, Artificial Sequence
  Description of Artificial Sequence: Synthetic oligonucleotide
uccacaaccauauuaaaca

SEQ ID NO: 2465354 - RNA, 19 nt, Artificial Sequence
  Description of Artificial Sequence: Synthetic oligonucleotide
uuacuuuccaaucuguggc

SEQ ID NO: 2465355 - RNA, 19 nt, Artificial Sequence
  Description of Artificial Sequence: Synthetic oligonucleotide
auuacuuuccaaucugugg

SEQ ID NO: 2465356 - RNA, 19 nt, Artificial Sequence
  Description of Artificial Sequence: Synthetic oligonucleotide
aaagucucaaccaacuaac

SEQ ID NO: 2465357 - RNA, 19 nt, Artificial Sequence
  Description of Artificial Sequence: Synthetic oligonucleotide
uauauagcccuugugaggg

SEQ ID NO: 2465358 - RNA, 19 nt, Artificial Sequence
  Description of Artificial Sequence: Synthetic oligonucleotide
cuuaucuuucugaaaaggg

SEQ ID NO: 2465359 - RNA, 19 nt, Artificial Sequence
  Description of Artificial Sequence: Synthetic oligonucleotide
ucaauaagugccagaaucc

SEQ ID NO: 2465360 - RNA, 19 nt, Artificial Sequence
  Description of Artificial Sequence: Synthetic oligonucleotide
uuugcgucuugcuuaaugg

SEQ ID NO: 2465361 - RNA, 19 nt, Artificial Sequence
  Description of Artificial Sequence: Synthetic oligonucleotide
ucaaccaacuaacaguggc

SEQ ID NO: 2465362 - RNA, 19 nt, Artificial Sequence
  Description of Artificial Sequence: Synthetic oligonucleotide
ugcuuaaugggauucagug

SEQ ID NO: 2465363 - RNA, 19 nt, Artificial Sequence
  Description of Artificial Sequence: Synthetic oligonucleotide
augaucauuguuuuccaac

SEQ ID NO: 2465364 - RNA, 19 nt, Artificial Sequence
  Description of Artificial Sequence: Synthetic oligonucleotide
ucucaaccaacuaacagug

SEQ ID NO: 2465365 - RNA, 19 nt, Artificial Sequence
  Description of Artificial Sequence: Synthetic oligonucleotide
ugugugguuaacaacuuca

SEQ ID NO: 2465366 - RNA, 19 nt, Artificial Sequence
  Description of Artificial Sequence: Synthetic oligonucleotide
aagcaaacuuguuuucugg

SEQ ID NO: 2465367 - RNA, 19 nt, Artificial Sequence
  Description of Artificial Sequence: Synthetic oligonucleotide
cauauauagcccuugugag

SEQ ID NO: 2465368 - RNA, 19 nt, Artificial Sequence
  Description of Artificial Sequence: Synthetic oligonucleotide
ugugcaauugauagcuccg

SEQ ID NO: 2465369 - RNA, 19 nt, Artificial Sequence
  Description of Artificial Sequence: Synthetic oligonucleotide
ucugguaccuuauaaaguc

SEQ ID NO: 2465370 - RNA, 19 nt, Artificial Sequence
  Description of Artificial Sequence: Synthetic oligonucleotide
uaaagucucaaccaacuaa

SEQ ID NO: 2465371 - RNA, 19 nt, Artificial Sequence
  Description of Artificial Sequence: Synthetic oligonucleotide
ucauuguuuuccaacauuc

SEQ ID NO: 2465372 - RNA, 19 nt, Artificial Sequence
  Description of Artificial Sequence: Synthetic oligonucleotide
uuuccaacauucaugugug

SEQ ID NO: 2465373 - RNA, 19 nt, Artificial Sequence
  Description of Artificial Sequence: Synthetic oligonucleotide
uugauagcaauuacuuucc

SEQ ID NO: 2465374 - RNA, 19 nt, Artificial Sequence
  Description of Artificial Sequence: Synthetic oligonucleotide
auagcaauuacuuuccaau

SEQ ID NO: 2465375 - RNA, 19 nt, Artificial Sequence
  Description of Artificial Sequence: Synthetic oligonucleotide
aacuagugaucuugcuucc

SEQ ID NO: 2465376 - RNA, 19 nt, Artificial Sequence
  Description of Artificial Sequence: Synthetic oligonucleotide
acccucaucaauaagugcc

SEQ ID NO: 2465377 - RNA, 19 nt, Artificial Sequence
  Description of Artificial Sequence: Synthetic oligonucleotide
cguaauuccauauauagcc

SEQ ID NO: 2465378 - RNA, 19 nt, Artificial Sequence
  Description of Artificial Sequence: Synthetic oligonucleotide
auauauagcccuugugagg

SEQ ID NO: 2465379 - RNA, 19 nt, Artificial Sequence
  Description of Artificial Sequence: Synthetic oligonucleotide
agggcuaucacacauuugu

SEQ ID NO: 2465380 - RNA, 19 nt, Artificial Sequence
  Description of Artificial Sequence: Synthetic oligonucleotide
ucugaaaagggucuuccca

SEQ ID NO: 2465381 - RNA, 19 nt, Artificial Sequence
  Description of Artificial Sequence: Synthetic oligonucleotide
uauuuauuuaguccucaga

SEQ ID NO: 2465382 - RNA, 19 nt, Artificial Sequence
  Description of Artificial Sequence: Synthetic oligonucleotide
auuugugcaauugauagcu

SEQ ID NO: 2465383 - RNA, 19 nt, Artificial Sequence
  Description of Artificial Sequence: Synthetic oligonucleotide
aaccuuugagccuauuuca

SEQ ID NO: 2465384 - RNA, 19 nt, Artificial Sequence
  Description of Artificial Sequence: Synthetic oligonucleotide
aggaccuucacauggauca

SEQ ID NO: 2465385 - RNA, 19 nt, Artificial Sequence
  Description of Artificial Sequence: Synthetic oligonucleotide
aaagggucuucccaggucu

SEQ ID NO: 2465386 - RNA, 19 nt, Artificial Sequence
  Description of Artificial Sequence: Synthetic oligonucleotide
acuaacaguggcuuccagg

SEQ ID NO: 2465387 - RNA, 19 nt, Artificial Sequence
  Description of Artificial Sequence: Synthetic oligonucleotide
uucuauauugcuuucuuua

SEQ ID NO: 2465388 - RNA, 19 nt, Artificial Sequence
  Description of Artificial Sequence: Synthetic oligonucleotide
aagagcgaaagccuugucu

SEQ ID NO: 2465389 - RNA, 19 nt, Artificial Sequence
  Description of Artificial Sequence: Synthetic oligonucleotide
aagacauuugguacauagc

SEQ ID NO: 2465390 - RNA, 19 nt, Artificial Sequence
  Description of Artificial Sequence: Synthetic oligonucleotide
uucuccauuaaaagcaaac

SEQ ID NO: 2465391 - RNA, 19 nt, Artificial Sequence
  Description of Artificial Sequence: Synthetic oligonucleotide
auggaucacaucuccacgg

SEQ ID NO: 2465392 - RNA, 19 nt, Artificial Sequence
  Description of Artificial Sequence: Synthetic oligonucleotide
gggaacaaaccuuugagcc

SEQ ID NO: 2465393 - RNA, 19 nt, Artificial Sequence
  Description of Artificial Sequence: Synthetic oligonucleotide
auggagaaccuccaguguc

SEQ ID NO: 2465394 - RNA, 19 nt, Artificial Sequence
  Description of Artificial Sequence: Synthetic oligonucleotide
uuccacaaccauauuaaac

SEQ ID NO: 2465395 - RNA, 19 nt, Artificial Sequence
  Description of Artificial Sequence: Synthetic oligonucleotide
aacaguggcuuccagguaa

SEQ ID NO: 2465396 - RNA, 19 nt, Artificial Sequence
  Description of Artificial Sequence: Synthetic oligonucleotide
aguggaaagggcuaucaca

SEQ ID NO: 2465397 - RNA, 19 nt, Artificial Sequence
  Description of Artificial Sequence: Synthetic oligonucleotide
uugugcaauugauagcucc

SEQ ID NO: 2465398 - RNA, 19 nt, Artificial Sequence
  Description of Artificial Sequence: Synthetic oligonucleotide
agcaauuacuuuccaaucu

SEQ ID NO: 2465399 - RNA, 19 nt, Artificial Sequence
  Description of Artificial Sequence: Synthetic oligonucleotide
aaaagcaaacuuguuuucu

SEQ ID NO: 2465400 - RNA, 19 nt, Artificial Sequence
  Description of Artificial Sequence: Synthetic oligonucleotide
uaauuccauauauagcccu

SEQ ID NO: 2465401 - RNA, 19 nt, Artificial Sequence
  Description of Artificial Sequence: Synthetic oligonucleotide
ugaaaagggucuucccagg

SEQ ID NO: 2465402 - RNA, 19 nt, Artificial Sequence
  Description of Artificial Sequence: Synthetic oligonucleotide
uuaacaacuucaagagcga

SEQ ID NO: 2465403 - RNA, 19 nt, Artificial Sequence
  Description of Artificial Sequence: Synthetic oligonucleotide
ucuauauugcuuucuuuaa

SEQ ID NO: 2465404 - RNA, 19 nt, Artificial Sequence
  Description of Artificial Sequence: Synthetic oligonucleotide
acgggaacaaaccuuugag

SEQ ID NO: 2465405 - RNA, 19 nt, Artificial Sequence
  Description of Artificial Sequence: Synthetic oligonucleotide
gagggaagacauuugguac

SEQ ID NO: 2465406 - RNA, 19 nt, Artificial Sequence
  Description of Artificial Sequence: Synthetic oligonucleotide
uugggaccgauucaacuag

SEQ ID NO: 2465407 - RNA, 19 nt, Artificial Sequence
  Description of Artificial Sequence: Synthetic oligonucleotide
auugauagcuccgugguca

SEQ ID NO: 2465408 - RNA, 19 nt, Artificial Sequence
  Description of Artificial Sequence: Synthetic oligonucleotide
uugcuuucuuuaaucacug

SEQ ID NO: 2465409 - RNA, 19 nt, Artificial Sequence
  Description of Artificial Sequence: Synthetic oligonucleotide
uucuuaucuuucugaaaag

SEQ ID NO: 2465410 - RNA, 19 nt, Artificial Sequence
  Description of Artificial Sequence: Synthetic oligonucleotide
uggagugcaguggaaaggg

SEQ ID NO: 2465411 - RNA, 19 nt, Artificial Sequence
  Description of Artificial Sequence: Synthetic oligonucleotide
ugccagaaucccaaggacc

SEQ ID NO: 2465412 - RNA, 19 nt, Artificial Sequence
  Description of Artificial Sequence: Synthetic oligonucleotide
ucaacuagugaucuugcuu

SEQ ID NO: 2465413 - RNA, 19 nt, Artificial Sequence
  Description of Artificial Sequence: Synthetic oligonucleotide
auuuaguccucagagguug

SEQ ID NO: 2465414 - RNA, 19 nt, Artificial Sequence
  Description of Artificial Sequence: Synthetic oligonucleotide
uuugguacauagcgcagcu

SEQ ID NO: 2465415 - RNA, 19 nt, Artificial Sequence
  Description of Artificial Sequence: Synthetic oligonucleotide
agugccagaaucccaagga

SEQ ID NO: 2465416 - RNA, 19 nt, Artificial Sequence
  Description of Artificial Sequence: Synthetic oligonucleotide
aaagggcuaucacacauuu

SEQ ID NO: 2465417 - RNA, 19 nt, Artificial Sequence
  Description of Artificial Sequence: Synthetic oligonucleotide
uugauggagaaccuccagu

SEQ ID NO: 2465418 - RNA, 19 nt, Artificial Sequence
  Description of Artificial Sequence: Synthetic oligonucleotide
uccauauauagcccuugug

SEQ ID NO: 2465419 - RNA, 19 nt, Artificial Sequence
  Description of Artificial Sequence: Synthetic oligonucleotide
ugcgucuugcuuaauggga

SEQ ID NO: 2465420 - RNA, 19 nt, Artificial Sequence
  Description of Artificial Sequence: Synthetic oligonucleotide
uuucugaaaagggucuucc

SEQ ID NO: 2465421 - RNA, 19 nt, Artificial Sequence
  Description of Artificial Sequence: Synthetic oligonucleotide
uugcgucuugcuuaauggg

SEQ ID NO: 2465422 - RNA, 19 nt, Artificial Sequence
  Description of Artificial Sequence: Synthetic oligonucleotide
uucagugguuccucagugg

SEQ ID NO: 2465423 - RNA, 19 nt, Artificial Sequence
  Description of Artificial Sequence: Synthetic oligonucleotide
uaccuuauaaagucucaac

SEQ ID NO: 2465424 - RNA, 19 nt, Artificial Sequence
  Description of Artificial Sequence: Synthetic oligonucleotide
ucaugugugugguuaacaa

SEQ ID NO: 2465425 - RNA, 19 nt, Artificial Sequence
  Description of Artificial Sequence: Synthetic oligonucleotide
uucaagagcgaaagccuug

SEQ ID NO: 2465426 - RNA, 19 nt, Artificial Sequence
  Description of Artificial Sequence: Synthetic oligonucleotide
auucagugguuccucagug

SEQ ID NO: 2465427 - RNA, 19 nt, Artificial Sequence
  Description of Artificial Sequence: Synthetic oligonucleotide
ugacauugauagcaauuac

SEQ ID NO: 2465428 - RNA, 19 nt, Artificial Sequence
  Description of Artificial Sequence: Synthetic oligonucleotide
cuuuaaucacugaagaugu

SEQ ID NO: 2465429 - RNA, 19 nt, Artificial Sequence
  Description of Artificial Sequence: Synthetic oligonucleotide
gcaauugauagcuccgugg

SEQ ID NO: 2465430 - RNA, 19 nt, Artificial Sequence
  Description of Artificial Sequence: Synthetic oligonucleotide
aucacaucuccacgggaac

SEQ ID NO: 2465431 - RNA, 19 nt, Artificial Sequence
  Description of Artificial Sequence: Synthetic oligonucleotide
augugugugguuaacaacu

SEQ ID NO: 2465432 - RNA, 19 nt, Artificial Sequence
  Description of Artificial Sequence: Synthetic oligonucleotide
ucuucuauauugcuuucuu

SEQ ID NO: 2465433 - RNA, 19 nt, Artificial Sequence
  Description of Artificial Sequence: Synthetic oligonucleotide
aucuccacgggaacaaacc

SEQ ID NO: 2465434 - RNA, 19 nt, Artificial Sequence
  Description of Artificial Sequence: Synthetic oligonucleotide
uguggcacccucaucaaua

SEQ ID NO: 2465435 - RNA, 19 nt, Artificial Sequence
  Description of Artificial Sequence: Synthetic oligonucleotide
uuuccaaucuguggcaccc

SEQ ID NO: 2465436 - RNA, 19 nt, Artificial Sequence
  Description of Artificial Sequence: Synthetic oligonucleotide
auucaacuagugaucuugc

SEQ ID NO: 2465437 - RNA, 19 nt, Artificial Sequence
  Description of Artificial Sequence: Synthetic oligonucleotide
uguugggaccgauucaacu

SEQ ID NO: 2465438 - RNA, 19 nt, Artificial Sequence
  Description of Artificial Sequence: Synthetic oligonucleotide
cuuaaugggauucaguggu

SEQ ID NO: 2465439 - RNA, 19 nt, Artificial Sequence
  Description of Artificial Sequence: Synthetic oligonucleotide
auuuccacaaccauauuaa

SEQ ID NO: 2465440 - RNA, 19 nt, Artificial Sequence
  Description of Artificial Sequence: Synthetic oligonucleotide
gacauuugguacauagcgc

SEQ ID NO: 2465441 - RNA, 19 nt, Artificial Sequence
  Description of Artificial Sequence: Synthetic oligonucleotide
ugagcuucuuaacaucauc

SEQ ID NO: 2465442 - RNA, 19 nt, Artificial Sequence
  Description of Artificial Sequence: Synthetic oligonucleotide
uccguggucacauuucuuc

SEQ ID NO: 2465443 - RNA, 19 nt, Artificial Sequence
  Description of Artificial Sequence: Synthetic oligonucleotide
ucacacauuuguacauuug

SEQ ID NO: 2465444 - RNA, 19 nt, Artificial Sequence
  Description of Artificial Sequence: Synthetic oligonucleotide
uucuuuaaucacugaagau

SEQ ID NO: 2465445 - RNA, 19 nt, Artificial Sequence
  Description of Artificial Sequence: Synthetic oligonucleotide
uggcuuccagguaaccugg

SEQ ID NO: 2465446 - RNA, 19 nt, Artificial Sequence
  Description of Artificial Sequence: Synthetic oligonucleotide
aauaagugccagaauccca

SEQ ID NO: 2465447 - RNA, 19 nt, Artificial Sequence
  Description of Artificial Sequence: Synthetic oligonucleotide
cccguaauuccauauauag

SEQ ID NO: 2465448 - RNA, 19 nt, Artificial Sequence
  Description of Artificial Sequence: Synthetic oligonucleotide
uguccaccgagguauuucc

SEQ ID NO: 2465449 - RNA, 19 nt, Artificial Sequence
  Description of Artificial Sequence: Synthetic oligonucleotide
uucacauggaucacaucuc

SEQ ID NO: 2465450 - RNA, 19 nt, Artificial Sequence
  Description of Artificial Sequence: Synthetic oligonucleotide
agagcgaaagccuugucuu

SEQ ID NO: 2465451 - RNA, 19 nt, Artificial Sequence
  Description of Artificial Sequence: Synthetic oligonucleotide
ugguaccuuauaaagucuc

SEQ ID NO: 2465452 - RNA, 19 nt, Artificial Sequence
  Description of Artificial Sequence: Synthetic oligonucleotide
agggaagacauuugguaca

SEQ ID NO: 2465453 - RNA, 19 nt, Artificial Sequence
  Description of Artificial Sequence: Synthetic oligonucleotide
aaacuuguuuucugguuuu

SEQ ID NO: 2465454 - RNA, 19 nt, Artificial Sequence
  Description of Artificial Sequence: Synthetic oligonucleotide
gauagcaauuacuuuccaa

SEQ ID NO: 2465455 - RNA, 19 nt, Artificial Sequence
  Description of Artificial Sequence: Synthetic oligonucleotide
gcuuaaugggauucagugg

SEQ ID NO: 2465456 - RNA, 19 nt, Artificial Sequence
  Description of Artificial Sequence: Synthetic oligonucleotide
ccaacauucaugugugugg

SEQ ID NO: 2465457 - RNA, 19 nt, Artificial Sequence
  Description of Artificial Sequence: Synthetic oligonucleotide
cuuugcgucuugcuuaaug

SEQ ID NO: 2465458 - RNA, 19 nt, Artificial Sequence
  Description of Artificial Sequence: Synthetic oligonucleotide
acauugauagcaauuacuu

SEQ ID NO: 2465459 - RNA, 19 nt, Artificial Sequence
  Description of Artificial Sequence: Synthetic oligonucleotide
guaauuccauauauagccc

SEQ ID NO: 2465460 - RNA, 19 nt, Artificial Sequence
  Description of Artificial Sequence: Synthetic oligonucleotide
ggaagugccaccuuucuuc

SEQ ID NO: 2465461 - RNA, 19 nt, Artificial Sequence
  Description of Artificial Sequence: Synthetic oligonucleotide
ucuccacgggaacaaaccu

SEQ ID NO: 2465462 - RNA, 19 nt, Artificial Sequence
  Description of Artificial Sequence: Synthetic oligonucleotide
uguucuuaucuuucugaaa

SEQ ID NO: 2465463 - RNA, 19 nt, Artificial Sequence
  Description of Artificial Sequence: Synthetic oligonucleotide
ucaauggggucauugucuc

SEQ ID NO: 2465464 - RNA, 19 nt, Artificial Sequence
  Description of Artificial Sequence: Synthetic oligonucleotide
agcaaacuuguuuucuggu

SEQ ID NO: 2465465 - RNA, 19 nt, Artificial Sequence
  Description of Artificial Sequence: Synthetic oligonucleotide
ucuuaacaucaucaauauc

SEQ ID NO: 2465466 - RNA, 19 nt, Artificial Sequence
  Description of Artificial Sequence: Synthetic oligonucleotide
auuuguacauuugugcaau

SEQ ID NO: 2465467 - RNA, 19 nt, Artificial Sequence
  Description of Artificial Sequence: Synthetic oligonucleotide
ucaguugaggaagugccac

SEQ ID NO: 2465468 - RNA, 19 nt, Artificial Sequence
  Description of Artificial Sequence: Synthetic oligonucleotide
accgauucaacuagugauc

SEQ ID NO: 2465469 - RNA, 19 nt, Artificial Sequence
  Description of Artificial Sequence: Synthetic oligonucleotide
uccacgggaacaaaccuuu

SEQ ID NO: 2465470 - RNA, 19 nt, Artificial Sequence
  Description of Artificial Sequence: Synthetic oligonucleotide
aacuuguuuucugguuuuc

SEQ ID NO: 2465471 - RNA, 19 nt, Artificial Sequence
  Description of Artificial Sequence: Synthetic oligonucleotide
accaacuaacaguggcuuc

SEQ ID NO: 2465472 - RNA, 19 nt, Artificial Sequence
  Description of Artificial Sequence: Synthetic oligonucleotide
uugcuuaaugggauucagu

SEQ ID NO: 2465473 - RNA, 19 nt, Artificial Sequence
  Description of Artificial Sequence: Synthetic oligonucleotide
aacuaacaguggcuuccag

SEQ ID NO: 2465474 - RNA, 19 nt, Artificial Sequence
  Description of Artificial Sequence: Synthetic oligonucleotide
cuuugagccuauuucacaa

SEQ ID NO: 2465475 - RNA, 19 nt, Artificial Sequence
  Description of Artificial Sequence: Synthetic oligonucleotide
gucucaaccaacuaacagu

SEQ ID NO: 2465476 - RNA, 19 nt, Artificial Sequence
  Description of Artificial Sequence: Synthetic oligonucleotide
uuuuccgucugguaccuua

SEQ ID NO: 2465477 - RNA, 19 nt, Artificial Sequence
  Description of Artificial Sequence: Synthetic oligonucleotide
gaccgauucaacuagugau

SEQ ID NO: 2465478 - RNA, 19 nt, Artificial Sequence
  Description of Artificial Sequence: Synthetic oligonucleotide
uuuaguccucagagguugc

SEQ ID NO: 2465479 - RNA, 19 nt, Artificial Sequence
  Description of Artificial Sequence: Synthetic oligonucleotide
ugauagcaauuacuuucca

SEQ ID NO: 2465480 - RNA, 19 nt, Artificial Sequence
  Description of Artificial Sequence: Synthetic oligonucleotide
cauuugguacauagcgcag

SEQ ID NO: 2465481 - RNA, 19 nt, Artificial Sequence
  Description of Artificial Sequence: Synthetic oligonucleotide
uucaacuagugaucuugcu

SEQ ID NO: 2465482 - RNA, 19 nt, Artificial Sequence
  Description of Artificial Sequence: Synthetic oligonucleotide
cuuuccaaucuguggcacc

SEQ ID NO: 2465483 - RNA, 19 nt, Artificial Sequence
  Description of Artificial Sequence: Synthetic oligonucleotide
acuucaagagcgaaagccu

SEQ ID NO: 2465484 - RNA, 19 nt, Artificial Sequence
  Description of Artificial Sequence: Synthetic oligonucleotide
cuugauggagaaccuccag

SEQ ID NO: 2465485 - RNA, 19 nt, Artificial Sequence
  Description of Artificial Sequence: Synthetic oligonucleotide
uauuuaguccucagagguu

SEQ ID NO: 2465486 - RNA, 19 nt, Artificial Sequence
  Description of Artificial Sequence: Synthetic oligonucleotide
caggucugagggaaggccc

SEQ ID NO: 2465487 - RNA, 19 nt, Artificial Sequence
  Description of Artificial Sequence: Synthetic oligonucleotide
gcuaucacacauuuguaca

SEQ ID NO: 2465488 - RNA, 19 nt, Artificial Sequence
  Description of Artificial Sequence: Synthetic oligonucleotide
gauguugggaccgauucaa

SEQ ID NO: 2465489 - RNA, 19 nt, Artificial Sequence
  Description of Artificial Sequence: Synthetic oligonucleotide
cuaacaguggcuuccaggu

SEQ ID NO: 2465490 - RNA, 19 nt, Artificial Sequence
  Description of Artificial Sequence: Synthetic oligonucleotide
ucagagguugcagucuuga

SEQ ID NO: 2465491 - RNA, 19 nt, Artificial Sequence
  Description of Artificial Sequence: Synthetic oligonucleotide
uagugaucuugcuuccucu

SEQ ID NO: 2465492 - RNA, 19 nt, Artificial Sequence
  Description of Artificial Sequence: Synthetic oligonucleotide
ugagggaaggccccguaau

SEQ ID NO: 2465493 - RNA, 19 nt, Artificial Sequence
  Description of Artificial Sequence: Synthetic oligonucleotide
uccccgucaguugaggaag

SEQ ID NO: 2465494 - RNA, 19 nt, Artificial Sequence
  Description of Artificial Sequence: Synthetic oligonucleotide
accgagguauuuccacaac

SEQ ID NO: 2465495 - RNA, 19 nt, Artificial Sequence
  Description of Artificial Sequence: Synthetic oligonucleotide
gacauugauagcaauuacu

SEQ ID NO: 2465496 - RNA, 19 nt, Artificial Sequence
  Description of Artificial Sequence: Synthetic oligonucleotide
gguuaacaacuucaagagc

SEQ ID NO: 2465497 - RNA, 19 nt, Artificial Sequence
  Description of Artificial Sequence: Synthetic oligonucleotide
cuagugaucuugcuuccuc

SEQ ID NO: 2465498 - RNA, 19 nt, Artificial Sequence
  Description of Artificial Sequence: Synthetic oligonucleotide
cucaaccaacuaacagugg

SEQ ID NO: 2465499 - RNA, 19 nt, Artificial Sequence
  Description of Artificial Sequence: Synthetic oligonucleotide
aaccaacuaacaguggcuu

SEQ ID NO: 2465500 - RNA, 19 nt, Artificial Sequence
  Description of Artificial Sequence: Synthetic oligonucleotide
ccauauauagcccuuguga

SEQ ID NO: 2465501 - RNA, 19 nt, Artificial Sequence
  Description of Artificial Sequence: Synthetic oligonucleotide
ccuuauaaagucucaacca

SEQ ID NO: 2465502 - RNA, 19 nt, Artificial Sequence
  Description of Artificial Sequence: Synthetic oligonucleotide
uuugagccuauuucacaaa

SEQ ID NO: 2465503 - RNA, 19 nt, Artificial Sequence
  Description of Artificial Sequence: Synthetic oligonucleotide
agauguugggaccgauuca

SEQ ID NO: 2465504 - RNA, 19 nt, Artificial Sequence
  Description of Artificial Sequence: Synthetic oligonucleotide
aucacacauuuguacauuu

SEQ ID NO: 2465505 - RNA, 19 nt, Artificial Sequence
  Description of Artificial Sequence: Synthetic oligonucleotide
cauuguuuuccaacauuca

SEQ ID NO: 2465506 - RNA, 19 nt, Artificial Sequence
  Description of Artificial Sequence: Synthetic oligonucleotide
guacauagcgcagcuuucc

SEQ ID NO: 2465507 - RNA, 19 nt, Artificial Sequence
  Description of Artificial Sequence: Synthetic oligonucleotide
auuccauauauagcccuug

SEQ ID NO: 2465508 - RNA, 19 nt, Artificial Sequence
  Description of Artificial Sequence: Synthetic oligonucleotide
guaaccugguuugagcuuc

SEQ ID NO: 2465509 - RNA, 19 nt, Artificial Sequence
  Description of Artificial Sequence: Synthetic oligonucleotide
aguugaggaagugccaccu

SEQ ID NO: 2465510 - RNA, 19 nt, Artificial Sequence
  Description of Artificial Sequence: Synthetic oligonucleotide
gaacaaaccuuugagccua

SEQ ID NO: 2465511 - RNA, 19 nt, Artificial Sequence
  Description of Artificial Sequence: Synthetic oligonucleotide
ugugugugguuaacaacuu

SEQ ID NO: 2465512 - RNA, 19 nt, Artificial Sequence
  Description of Artificial Sequence: Synthetic oligonucleotide
uucuuugcgucuugcuuaa

SEQ ID NO: 2465513 - RNA, 19 nt, Artificial Sequence
  Description of Artificial Sequence: Synthetic oligonucleotide
guugggaccgauucaacua

SEQ ID NO: 2465514 - RNA, 19 nt, Artificial Sequence
  Description of Artificial Sequence: Synthetic oligonucleotide
uuuaaucacugaagauguu

SEQ ID NO: 2465515 - RNA, 19 nt, Artificial Sequence
  Description of Artificial Sequence: Synthetic oligonucleotide
aauuccauauauagcccuu

SEQ ID NO: 2465516 - RNA, 19 nt, Artificial Sequence
  Description of Artificial Sequence: Synthetic oligonucleotide
agccuauuucacaaacauc

SEQ ID NO: 2465517 - RNA, 19 nt, Artificial Sequence
  Description of Artificial Sequence: Synthetic oligonucleotide
aagucucaaccaacuaaca

SEQ ID NO: 2465518 - RNA, 19 nt, Artificial Sequence
  Description of Artificial Sequence: Synthetic oligonucleotide
caguugaggaagugccacc

SEQ ID NO: 2465519 - RNA, 19 nt, Artificial Sequence
  Description of Artificial Sequence: Synthetic oligonucleotide
agcuuuccauucuuugcgu

SEQ ID NO: 2465520 - RNA, 19 nt, Artificial Sequence
  Description of Artificial Sequence: Synthetic oligonucleotide
uggaaagggcuaucacaca

SEQ ID NO: 2465521 - RNA, 19 nt, Artificial Sequence
  Description of Artificial Sequence: Synthetic oligonucleotide
agcgaaagccuugucuuug

SEQ ID NO: 2465522 - RNA, 19 nt, Artificial Sequence
  Description of Artificial Sequence: Synthetic oligonucleotide
guguucuuaucuuucugaa

SEQ ID NO: 2465523 - RNA, 19 nt, Artificial Sequence
  Description of Artificial Sequence: Synthetic oligonucleotide
uuaaugggauucagugguu

SEQ ID NO: 2465524 - RNA, 19 nt, Artificial Sequence
  Description of Artificial Sequence: Synthetic oligonucleotide
cgucaguugaggaagugcc

SEQ ID NO: 2465525 - RNA, 19 nt, Artificial Sequence
  Description of Artificial Sequence: Synthetic oligonucleotide
uuuccgucugguaccuuau

SEQ ID NO: 2465526 - RNA, 19 nt, Artificial Sequence
  Description of Artificial Sequence: Synthetic oligonucleotide
gauucagugguuccucagu

SEQ ID NO: 2465527 - RNA, 19 nt, Artificial Sequence
  Description of Artificial Sequence: Synthetic oligonucleotide
ccaacuaacaguggcuucc

SEQ ID NO: 2465528 - RNA, 19 nt, Artificial Sequence
  Description of Artificial Sequence: Synthetic oligonucleotide
uaacaacuucaagagcgaa

SEQ ID NO: 2465529 - RNA, 19 nt, Artificial Sequence
  Description of Artificial Sequence: Synthetic oligonucleotide
uugauagcuccguggucac

SEQ ID NO: 2465530 - RNA, 19 nt, Artificial Sequence
  Description of Artificial Sequence: Synthetic oligonucleotide
aacauucaugugugugguu

SEQ ID NO: 2465531 - RNA, 19 nt, Artificial Sequence
  Description of Artificial Sequence: Synthetic oligonucleotide
acauagcgcagcuuuccau

SEQ ID NO: 2465532 - RNA, 19 nt, Artificial Sequence
  Description of Artificial Sequence: Synthetic oligonucleotide
aggaucauugacauugaua

SEQ ID NO: 2465533 - RNA, 19 nt, Artificial Sequence
  Description of Artificial Sequence: Synthetic oligonucleotide
uauagcccuugugagggaa

SEQ ID NO: 2465534 - RNA, 19 nt, Artificial Sequence
  Description of Artificial Sequence: Synthetic oligonucleotide
gugccagaaucccaaggac

SEQ ID NO: 2465535 - RNA, 19 nt, Artificial Sequence
  Description of Artificial Sequence: Synthetic oligonucleotide
ugucuccacagcagcuugu

SEQ ID NO: 2465536 - RNA, 19 nt, Artificial Sequence
  Description of Artificial Sequence: Synthetic oligonucleotide
uguccccgucaguugagga

SEQ ID NO: 2465537 - RNA, 19 nt, Artificial Sequence
  Description of Artificial Sequence: Synthetic oligonucleotide
uuguccaccgagguauuuc

SEQ ID NO: 2465538 - RNA, 19 nt, Artificial Sequence
  Description of Artificial Sequence: Synthetic oligonucleotide
gaaaagggucuucccaggu

SEQ ID NO: 2465539 - RNA, 19 nt, Artificial Sequence
  Description of Artificial Sequence: Synthetic oligonucleotide
gaaagccuugucuuugaau

SEQ ID NO: 2465540 - RNA, 19 nt, Artificial Sequence
  Description of Artificial Sequence: Synthetic oligonucleotide
ccgagguauuuccacaacc

SEQ ID NO: 2465541 - RNA, 19 nt, Artificial Sequence
  Description of Artificial Sequence: Synthetic oligonucleotide
ccugguuugagcuucuuaa

SEQ ID NO: 2465542 - RNA, 19 nt, Artificial Sequence
  Description of Artificial Sequence: Synthetic oligonucleotide
agcuccguggucacauuuc

SEQ ID NO: 2465543 - RNA, 19 nt, Artificial Sequence
  Description of Artificial Sequence: Synthetic oligonucleotide
ugggaccgauucaacuagu

SEQ ID NO: 2465544 - RNA, 19 nt, Artificial Sequence
  Description of Artificial Sequence: Synthetic oligonucleotide
ucccaaggaccuucacaug

SEQ ID NO: 2465545 - RNA, 19 nt, Artificial Sequence
  Description of Artificial Sequence: Synthetic oligonucleotide
guaccuuauaaagucucaa

SEQ ID NO: 2465546 - RNA, 19 nt, Artificial Sequence
  Description of Artificial Sequence: Synthetic oligonucleotide
aagggcuaucacacauuug

SEQ ID NO: 2465547 - RNA, 19 nt, Artificial Sequence
  Description of Artificial Sequence: Synthetic oligonucleotide
cacgggaacaaaccuuuga

SEQ ID NO: 2465548 - RNA, 19 nt, Artificial Sequence
  Description of Artificial Sequence: Synthetic oligonucleotide
gugugugguuaacaacuuc

SEQ ID NO: 2465549 - RNA, 19 nt, Artificial Sequence
  Description of Artificial Sequence: Synthetic oligonucleotide
uaaccugguuugagcuucu

SEQ ID NO: 2465550 - RNA, 19 nt, Artificial Sequence
  Description of Artificial Sequence: Synthetic oligonucleotide
ugggauucagugguuccuc

SEQ ID NO: 2465551 - RNA, 19 nt, Artificial Sequence
  Description of Artificial Sequence: Synthetic oligonucleotide
gagaaccuccagugucccc

SEQ ID NO: 2465552 - RNA, 19 nt, Artificial Sequence
  Description of Artificial Sequence: Synthetic oligonucleotide
caaacuuguuuucugguuu

SEQ ID NO: 2465553 - RNA, 19 nt, Artificial Sequence
  Description of Artificial Sequence: Synthetic oligonucleotide
cuaucacacauuuguacau

SEQ ID NO: 2465554 - RNA, 19 nt, Artificial Sequence
  Description of Artificial Sequence: Synthetic oligonucleotide
caugaucauuguuuuccaa

SEQ ID NO: 2465555 - RNA, 19 nt, Artificial Sequence
  Description of Artificial Sequence: Synthetic oligonucleotide
auguugggaccgauucaac

SEQ ID NO: 2465556 - RNA, 19 nt, Artificial Sequence
  Description of Artificial Sequence: Synthetic oligonucleotide
uagcuccguggucacauuu

SEQ ID NO: 2465557 - RNA, 19 nt, Artificial Sequence
  Description of Artificial Sequence: Synthetic oligonucleotide
ggaccgauucaacuaguga

SEQ ID NO: 2465558 - RNA, 19 nt, Artificial Sequence
  Description of Artificial Sequence: Synthetic oligonucleotide
cauucaugugugugguuaa

SEQ ID NO: 2465559 - RNA, 19 nt, Artificial Sequence
  Description of Artificial Sequence: Synthetic oligonucleotide
aggaagugccaccuuucuu

SEQ ID NO: 2465560 - RNA, 19 nt, Artificial Sequence
  Description of Artificial Sequence: Synthetic oligonucleotide
gguuugagcuucuuaacau

SEQ ID NO: 2465561 - RNA, 19 nt, Artificial Sequence
  Description of Artificial Sequence: Synthetic oligonucleotide
cacauggaucacaucucca

SEQ ID NO: 2465562 - RNA, 19 nt, Artificial Sequence
  Description of Artificial Sequence: Synthetic oligonucleotide
acuagugaucuugcuuccu

SEQ ID NO: 2465563 - RNA, 19 nt, Artificial Sequence
  Description of Artificial Sequence: Synthetic oligonucleotide
gauagcuccguggucacau

SEQ ID NO: 2465564 - RNA, 19 nt, Artificial Sequence
  Description of Artificial Sequence: Synthetic oligonucleotide
caaccaacuaacaguggcu

SEQ ID NO: 2465565 - RNA, 19 nt, Artificial Sequence
  Description of Artificial Sequence: Synthetic oligonucleotide
agugcaguggaaagggcua

SEQ ID NO: 2465566 - RNA, 19 nt, Artificial Sequence
  Description of Artificial Sequence: Synthetic oligonucleotide
agcccuugugagggaagac

SEQ ID NO: 2465567 - RNA, 19 nt, Artificial Sequence
  Description of Artificial Sequence: Synthetic oligonucleotide
auauagcccuugugaggga

SEQ ID NO: 2465568 - RNA, 19 nt, Artificial Sequence
  Description of Artificial Sequence: Synthetic oligonucleotide
guacauuugugcaauugau

SEQ ID NO: 2465569 - RNA, 19 nt, Artificial Sequence
  Description of Artificial Sequence: Synthetic oligonucleotide
ggaacaaaccuuugagccu

SEQ ID NO: 2465570 - RNA, 19 nt, Artificial Sequence
  Description of Artificial Sequence: Synthetic oligonucleotide
ugguuccucaguggcaauc

SEQ ID NO: 2465571 - RNA, 19 nt, Artificial Sequence
  Description of Artificial Sequence: Synthetic oligonucleotide
cgggaacaaaccuuugagc

SEQ ID NO: 2465572 - RNA, 19 nt, Artificial Sequence
  Description of Artificial Sequence: Synthetic oligonucleotide
gcacccucaucaauaagug

SEQ ID NO: 2465573 - RNA, 19 nt, Artificial Sequence
  Description of Artificial Sequence: Synthetic oligonucleotide
cuugugagggaagacauuu

SEQ ID NO: 2465574 - RNA, 19 nt, Artificial Sequence
  Description of Artificial Sequence: Synthetic oligonucleotide
ggaaagggcuaucacacau

SEQ ID NO: 2465575 - RNA, 19 nt, Artificial Sequence
  Description of Artificial Sequence: Synthetic oligonucleotide
gguaccuuauaaagucuca

SEQ ID NO: 2465576 - RNA, 19 nt, Artificial Sequence
  Description of Artificial Sequence: Synthetic oligonucleotide
agaaucccaaggaccuuca

SEQ ID NO: 2465577 - RNA, 19 nt, Artificial Sequence
  Description of Artificial Sequence: Synthetic oligonucleotide
gugugguuaacaacuucaa

SEQ ID NO: 2465578 - RNA, 19 nt, Artificial Sequence
  Description of Artificial Sequence: Synthetic oligonucleotide
gucugguaccuuauaaagu

SEQ ID NO: 2465579 - RNA, 19 nt, Artificial Sequence
  Description of Artificial Sequence: Synthetic oligonucleotide
cuuccagguaaccugguuu

SEQ ID NO: 2465580 - RNA, 19 nt, Artificial Sequence
  Description of Artificial Sequence: Synthetic oligonucleotide
caguguccccgucaguuga

SEQ ID NO: 2465581 - RNA, 19 nt, Artificial Sequence
  Description of Artificial Sequence: Synthetic oligonucleotide
aggccccguaauuccauau

SEQ ID NO: 2465582 - RNA, 19 nt, Artificial Sequence
  Description of Artificial Sequence: Synthetic oligonucleotide
uuccgucugguaccuuaua

SEQ ID NO: 2465583 - RNA, 19 nt, Artificial Sequence
  Description of Artificial Sequence: Synthetic oligonucleotide
caccgagguauuuccacaa

SEQ ID NO: 2465584 - RNA, 19 nt, Artificial Sequence
  Description of Artificial Sequence: Synthetic oligonucleotide
guccccgucaguugaggaa

SEQ ID NO: 2465585 - RNA, 19 nt, Artificial Sequence
  Description of Artificial Sequence: Synthetic oligonucleotide
caagagcgaaagccuuguc

SEQ ID NO: 2465586 - RNA, 19 nt, Artificial Sequence
  Description of Artificial Sequence: Synthetic oligonucleotide
cauagcgcagcuuuccauu

SEQ ID NO: 2465587 - RNA, 19 nt, Artificial Sequence
  Description of Artificial Sequence: Synthetic oligonucleotide
ugauagcuccguggucaca

SEQ ID NO: 2465588 - RNA, 19 nt, Artificial Sequence
  Description of Artificial Sequence: Synthetic oligonucleotide
guguccccgucaguugagg

SEQ ID NO: 2465589 - RNA, 19 nt, Artificial Sequence
  Description of Artificial Sequence: Synthetic oligonucleotide
cugguaccuuauaaagucu

SEQ ID NO: 2465590 - RNA, 19 nt, Artificial Sequence
  Description of Artificial Sequence: Synthetic oligonucleotide
cuucaagagcgaaagccuu

SEQ ID NO: 2465591 - RNA, 19 nt, Artificial Sequence
  Description of Artificial Sequence: Synthetic oligonucleotide
uuuguccaccgagguauuu

SEQ ID NO: 2465592 - RNA, 19 nt, Artificial Sequence
  Description of Artificial Sequence: Synthetic oligonucleotide
cuucuauauugcuuucuuu

SEQ ID NO: 2465593 - RNA, 19 nt, Artificial Sequence
  Description of Artificial Sequence: Synthetic oligonucleotide
caacauucauguguguggu

SEQ ID NO: 2465594 - RNA, 19 nt, Artificial Sequence
  Description of Artificial Sequence: Synthetic oligonucleotide
ccuuugagccuauuucaca

SEQ ID NO: 2465595 - RNA, 19 nt, Artificial Sequence
  Description of Artificial Sequence: Synthetic oligonucleotide
uuccaaucuguggcacccu

SEQ ID NO: 2465596 - RNA, 19 nt, Artificial Sequence
  Description of Artificial Sequence: Synthetic oligonucleotide
gguacauagcgcagcuuuc

SEQ ID NO: 2465597 - RNA, 19 nt, Artificial Sequence
  Description of Artificial Sequence: Synthetic oligonucleotide
caccuuucuucuucuauau

SEQ ID NO: 2465598 - RNA, 19 nt, Artificial Sequence
  Description of Artificial Sequence: Synthetic oligonucleotide
cacaucuccacgggaacaa

SEQ ID NO: 2465599 - RNA, 19 nt, Artificial Sequence
  Description of Artificial Sequence: Synthetic oligonucleotide
gggaccgauucaacuagug

SEQ ID NO: 2465600 - RNA, 19 nt, Artificial Sequence
  Description of Artificial Sequence: Synthetic oligonucleotide
cucaguggcaaucuccauu

SEQ ID NO: 2465601 - RNA, 19 nt, Artificial Sequence
  Description of Artificial Sequence: Synthetic oligonucleotide
cauugacauugauagcaau

SEQ ID NO: 2465602 - RNA, 19 nt, Artificial Sequence
  Description of Artificial Sequence: Synthetic oligonucleotide
ggcauuuguccaccgaggu

SEQ ID NO: 2465603 - RNA, 19 nt, Artificial Sequence
  Description of Artificial Sequence: Synthetic oligonucleotide
aacaaaccuuugagccuau

SEQ ID NO: 2465604 - RNA, 19 nt, Artificial Sequence
  Description of Artificial Sequence: Synthetic oligonucleotide
cucuggagugcaguggaaa

SEQ ID NO: 2465605 - RNA, 19 nt, Artificial Sequence
  Description of Artificial Sequence: Synthetic oligonucleotide
ccagguaaccugguuugag

SEQ ID NO: 2465606 - RNA, 19 nt, Artificial Sequence
  Description of Artificial Sequence: Synthetic oligonucleotide
ccgucaguugaggaagugc

SEQ ID NO: 2465607 - RNA, 19 nt, Artificial Sequence
  Description of Artificial Sequence: Synthetic oligonucleotide
caacuaacaguggcuucca

SEQ ID NO: 2465608 - RNA, 19 nt, Artificial Sequence
  Description of Artificial Sequence: Synthetic oligonucleotide
gggauucagugguuccuca

SEQ ID NO: 2465609 - RNA, 19 nt, Artificial Sequence
  Description of Artificial Sequence: Synthetic oligonucleotide
auagcuccguggucacauu

SEQ ID NO: 2465610 - RNA, 19 nt, Artificial Sequence
  Description of Artificial Sequence: Synthetic oligonucleotide
gaaagggcuaucacacauu

SEQ ID NO: 2465611 - RNA, 19 nt, Artificial Sequence
  Description of Artificial Sequence: Synthetic oligonucleotide
ggagugcaguggaaagggc

SEQ ID NO: 2465612 - RNA, 19 nt, Artificial Sequence
  Description of Artificial Sequence: Synthetic oligonucleotide
gugcaauugauagcuccgu

SEQ ID NO: 2465613 - RNA, 19 nt, Artificial Sequence
  Description of Artificial Sequence: Synthetic oligonucleotide
gcauuuguccaccgaggua

SEQ ID NO: 2465614 - RNA, 19 nt, Artificial Sequence
  Description of Artificial Sequence: Synthetic oligonucleotide
ccgucugguaccuuauaaa

SEQ ID NO: 2465615 - RNA, 19 nt, Artificial Sequence
  Description of Artificial Sequence: Synthetic oligonucleotide
cuccacgggaacaaaccuu

SEQ ID NO: 2465616 - RNA, 19 nt, Artificial Sequence
  Description of Artificial Sequence: Synthetic oligonucleotide
ccaaucuguggcacccuca

SEQ ID NO: 2465617 - RNA, 19 nt, Artificial Sequence
  Description of Artificial Sequence: Synthetic oligonucleotide
ccguggucacauuucuuca

SEQ ID NO: 2465618 - RNA, 19 nt, Artificial Sequence
  Description of Artificial Sequence: Synthetic oligonucleotide
auuuguccaccgagguauu

SEQ ID NO: 2465619 - RNA, 19 nt, Artificial Sequence
  Description of Artificial Sequence: Synthetic oligonucleotide
gccccguaauuccauauau

SEQ ID NO: 2465620 - RNA, 19 nt, Artificial Sequence
  Description of Artificial Sequence: Synthetic oligonucleotide
caaggaccuucacauggau

SEQ ID NO: 2465621 - RNA, 19 nt, Artificial Sequence
  Description of Artificial Sequence: Synthetic oligonucleotide
acaaaccuuugagccuauu

SEQ ID NO: 2465622 - RNA, 19 nt, Artificial Sequence
  Description of Artificial Sequence: Synthetic oligonucleotide
ucuuugcgucuugcuuaau

SEQ ID NO: 2465623 - RNA, 19 nt, Artificial Sequence
  Description of Artificial Sequence: Synthetic oligonucleotide
ggccccguaauuccauaua

SEQ ID NO: 2465624 - RNA, 19 nt, Artificial Sequence
  Description of Artificial Sequence: Synthetic oligonucleotide
gccaccuuucuucuucuau

SEQ ID NO: 2465625 - RNA, 19 nt, Artificial Sequence
  Description of Artificial Sequence: Synthetic oligonucleotide
guauuuccacaaccauauu

SEQ ID NO: 2465626 - RNA, 19 nt, Artificial Sequence
  Description of Artificial Sequence: Synthetic oligonucleotide
ccacgggaacaaaccuuug

SEQ ID NO: 2465627 - RNA, 19 nt, Artificial Sequence
  Description of Artificial Sequence: Synthetic oligonucleotide
caggaucauugacauugau

SEQ ID NO: 2465628 - RNA, 19 nt, Artificial Sequence
  Description of Artificial Sequence: Synthetic oligonucleotide
gguuuuccgucugguaccu

SEQ ID NO: 2465629 - RNA, 19 nt, Artificial Sequence
  Description of Artificial Sequence: Synthetic oligonucleotide
ccgauucaacuagugaucu

SEQ ID NO: 2465630 - RNA, 19 nt, Artificial Sequence
  Description of Artificial Sequence: Synthetic oligonucleotide
ccccguaauuccauauaua

SEQ ID NO: 2465631 - RNA, 19 nt, Artificial Sequence
  Description of Artificial Sequence: Synthetic oligonucleotide
cuguggcacccucaucaau

SEQ ID NO: 2465632 - RNA, 19 nt, Artificial Sequence
  Description of Artificial Sequence: Synthetic oligonucleotide
cccgucaguugaggaagug

SEQ ID NO: 2465633 - RNA, 19 nt, Artificial Sequence
  Description of Artificial Sequence: Synthetic oligonucleotide
cuccguggucacauuucuu

SEQ ID NO: 2465634 - RNA, 19 nt, Artificial Sequence
  Description of Artificial Sequence: Synthetic oligonucleotide
ccucuggagugcaguggaa

SEQ ID NO: 2465635 - RNA, 19 nt, Artificial Sequence
  Description of Artificial Sequence: Synthetic oligonucleotide
ccucaguggcaaucuccau

SEQ ID NO: 2465636 - RNA, 19 nt, Artificial Sequence
  Description of Artificial Sequence: Synthetic oligonucleotide
cgauucaacuagugaucuu

SEQ ID NO: 2465637 - RNA, 19 nt, Artificial Sequence
  Description of Artificial Sequence: Synthetic oligonucleotide
ccccgucaguugaggaagu

SEQ ID NO: 2465638 - RNA, 19 nt, Artificial Sequence
  Description of Artificial Sequence: Synthetic oligonucleotide
gcgcagcuuuccauucuuu

SEQ ID NO: 2465639 - RNA, 19 nt, Artificial Sequence
  Description of Artificial Sequence: Synthetic oligonucleotide
gacaaagucgucuagggcg

SEQ ID NO: 2465640 - RNA, 19 nt, Artificial Sequence
  Description of Artificial Sequence: Synthetic oligonucleotide
aauguacccggccagagcg

SEQ ID NO: 2465641 - RNA, 19 nt, Artificial Sequence
  Description of Artificial Sequence: Synthetic oligonucleotide
ucagauuuggguuagggga

SEQ ID NO: 2465642 - RNA, 19 nt, Artificial Sequence
  Description of Artificial Sequence: Synthetic oligonucleotide
agaaugaggaggcuaaugg

SEQ ID NO: 2465643 - RNA, 19 nt, Artificial Sequence
  Description of Artificial Sequence: Synthetic oligonucleotide
uugacaauggauaugcucu

SEQ ID NO: 2465644 - RNA, 19 nt, Artificial Sequence
  Description of Artificial Sequence: Synthetic oligonucleotide
aaauccuuagagcucauga

SEQ ID NO: 2465645 - RNA, 19 nt, Artificial Sequence
  Description of Artificial Sequence: Synthetic oligonucleotide
auuggaguccgcuuuagac

SEQ ID NO: 2465646 - RNA, 19 nt, Artificial Sequence
  Description of Artificial Sequence: Synthetic oligonucleotide
uguuuuaagguuucucagg

SEQ ID NO: 2465647 - RNA, 19 nt, Artificial Sequence
  Description of Artificial Sequence: Synthetic oligonucleotide
uuaagcucaagauuuggcc

SEQ ID NO: 2465648 - RNA, 19 nt, Artificial Sequence
  Description of Artificial Sequence: Synthetic oligonucleotide
auugacaauggauaugcuc

SEQ ID NO: 2465649 - RNA, 19 nt, Artificial Sequence
  Description of Artificial Sequence: Synthetic oligonucleotide
uuuaagguuucucaggcgu

SEQ ID NO: 2465650 - RNA, 19 nt, Artificial Sequence
  Description of Artificial Sequence: Synthetic oligonucleotide
uucgaaguagggaagacca

SEQ ID NO: 2465651 - RNA, 19 nt, Artificial Sequence
  Description of Artificial Sequence: Synthetic oligonucleotide
uaccagugcacucaggagg

SEQ ID NO: 2465652 - RNA, 19 nt, Artificial Sequence
  Description of Artificial Sequence: Synthetic oligonucleotide
acagaagguaauuaguuug

SEQ ID NO: 2465653 - RNA, 19 nt, Artificial Sequence
  Description of Artificial Sequence: Synthetic oligonucleotide
aucaggagccgccagacgc

SEQ ID NO: 2465654 - RNA, 19 nt, Artificial Sequence
  Description of Artificial Sequence: Synthetic oligonucleotide
uuugagauugacaauggau

SEQ ID NO: 2465655 - RNA, 19 nt, Artificial Sequence
  Description of Artificial Sequence: Synthetic oligonucleotide
ucaagauuuggccaugucu

SEQ ID NO: 2465656 - RNA, 19 nt, Artificial Sequence
  Description of Artificial Sequence: Synthetic oligonucleotide
uugagauugacaauggaua

SEQ ID NO: 2465657 - RNA, 19 nt, Artificial Sequence
  Description of Artificial Sequence: Synthetic oligonucleotide
auuaguuugguaguagagg

SEQ ID NO: 2465658 - RNA, 19 nt, Artificial Sequence
  Description of Artificial Sequence: Synthetic oligonucleotide
aguuuugagauugacaaug

SEQ ID NO: 2465659 - RNA, 19 nt, Artificial Sequence
  Description of Artificial Sequence: Synthetic oligonucleotide
guuuuaagguuucucaggc

SEQ ID NO: 2465660 - RNA, 19 nt, Artificial Sequence
  Description of Artificial Sequence: Synthetic oligonucleotide
uuugagaguguccugcccc

SEQ ID NO: 2465661 - RNA, 19 nt, Artificial Sequence
  Description of Artificial Sequence: Synthetic oligonucleotide
uuaaccuggguuccaagcc

SEQ ID NO: 2465662 - RNA, 19 nt, Artificial Sequence
  Description of Artificial Sequence: Synthetic oligonucleotide
uaguagaggagauuguuga

SEQ ID NO: 2465663 - RNA, 19 nt, Artificial Sequence
  Description of Artificial Sequence: Synthetic oligonucleotide
cuaggauccagcuuccugc

SEQ ID NO: 2465664 - RNA, 19 nt, Artificial Sequence
  Description of Artificial Sequence: Synthetic oligonucleotide
uucucaaucuuguuuuaag

SEQ ID NO: 2465665 - RNA, 19 nt, Artificial Sequence
  Description of Artificial Sequence: Synthetic oligonucleotide
uaagcucaagauuuggcca

SEQ ID NO: 2465666 - RNA, 19 nt, Artificial Sequence
  Description of Artificial Sequence: Synthetic oligonucleotide
uugguaguagaggagauug

SEQ ID NO: 2465667 - RNA, 19 nt, Artificial Sequence
  Description of Artificial Sequence: Synthetic oligonucleotide
aggagauuguugaugacgc

SEQ ID NO: 2465668 - RNA, 19 nt, Artificial Sequence
  Description of Artificial Sequence: Synthetic oligonucleotide
gagauuguugaugacgcgg

SEQ ID NO: 2465669 - RNA, 19 nt, Artificial Sequence
  Description of Artificial Sequence: Synthetic oligonucleotide
gaggagauuguugaugacg

SEQ ID NO: 2465670 - RNA, 19 nt, Artificial Sequence
  Description of Artificial Sequence: Synthetic oligonucleotide
aguguccugccccaagucc

SEQ ID NO: 2465671 - RNA, 19 nt, Artificial Sequence
  Description of Artificial Sequence: Synthetic oligonucleotide
uuuuaagguuucucaggcg

SEQ ID NO: 2465672 - RNA, 19 nt, Artificial Sequence
  Description of Artificial Sequence: Synthetic oligonucleotide
agaccaaugcucucgaucu

SEQ ID NO: 2465673 - RNA, 19 nt, Artificial Sequence
  Description of Artificial Sequence: Synthetic oligonucleotide
uaauuaguuugguaguaga

SEQ ID NO: 2465674 - RNA, 19 nt, Artificial Sequence
  Description of Artificial Sequence: Synthetic oligonucleotide
uaaccuggguuccaagccg

SEQ ID NO: 2465675 - RNA, 19 nt, Artificial Sequence
  Description of Artificial Sequence: Synthetic oligonucleotide
caugucuuaaccuggguuc

SEQ ID NO: 2465676 - RNA, 19 nt, Artificial Sequence
  Description of Artificial Sequence: Synthetic oligonucleotide
aaaacccaguuucaaggcu

SEQ ID NO: 2465677 - RNA, 19 nt, Artificial Sequence
  Description of Artificial Sequence: Synthetic oligonucleotide
uccgcuuuagaccaaugcu

SEQ ID NO: 2465678 - RNA, 19 nt, Artificial Sequence
  Description of Artificial Sequence: Synthetic oligonucleotide
uuggaguccgcuuuagacc

SEQ ID NO: 2465679 - RNA, 19 nt, Artificial Sequence
  Description of Artificial Sequence: Synthetic oligonucleotide
ugaagcaugcagcaggauc

SEQ ID NO: 2465680 - RNA, 19 nt, Artificial Sequence
  Description of Artificial Sequence: Synthetic oligonucleotide
auuugagaguguccugccc

SEQ ID NO: 2465681 - RNA, 19 nt, Artificial Sequence
  Description of Artificial Sequence: Synthetic oligonucleotide
ucaaucuuguuuuaagguu

SEQ ID NO: 2465682 - RNA, 19 nt, Artificial Sequence
  Description of Artificial Sequence: Synthetic oligonucleotide
uuaggggaguaucucuggg

SEQ ID NO: 2465683 - RNA, 19 nt, Artificial Sequence
  Description of Artificial Sequence: Synthetic oligonucleotide
uuggccaugucuuaaccug

SEQ ID NO: 2465684 - RNA, 19 nt, Artificial Sequence
  Description of Artificial Sequence: Synthetic oligonucleotide
aauccuuagagcucaugau

SEQ ID NO: 2465685 - RNA, 19 nt, Artificial Sequence
  Description of Artificial Sequence: Synthetic oligonucleotide
cuuuagaccaaugcucucg

SEQ ID NO: 2465686 - RNA, 19 nt, Artificial Sequence
  Description of Artificial Sequence: Synthetic oligonucleotide
agcaccggcgcugugaugc

SEQ ID NO: 2465687 - RNA, 19 nt, Artificial Sequence
  Description of Artificial Sequence: Synthetic oligonucleotide
cuuaaccuggguuccaagc

SEQ ID NO: 2465688 - RNA, 19 nt, Artificial Sequence
  Description of Artificial Sequence: Synthetic oligonucleotide
uccaguuuugagauugaca

SEQ ID NO: 2465689 - RNA, 19 nt, Artificial Sequence
  Description of Artificial Sequence: Synthetic oligonucleotide
gaaagcgccgcccacggcc

SEQ ID NO: 2465690 - RNA, 19 nt, Artificial Sequence
  Description of Artificial Sequence: Synthetic oligonucleotide
agcaggaucaaaagcaccg

SEQ ID NO: 2465691 - RNA, 19 nt, Artificial Sequence
  Description of Artificial Sequence: Synthetic oligonucleotide
ucaggcguagugaagcaug

SEQ ID NO: 2465692 - RNA, 19 nt, Artificial Sequence
  Description of Artificial Sequence: Synthetic oligonucleotide
ugagauugacaauggauau

SEQ ID NO: 2465693 - RNA, 19 nt, Artificial Sequence
  Description of Artificial Sequence: Synthetic oligonucleotide
gaggcuaauggcaagcacc

SEQ ID NO: 2465694 - RNA, 19 nt, Artificial Sequence
  Description of Artificial Sequence: Synthetic oligonucleotide
uuuugagauugacaaugga

SEQ ID NO: 2465695 - RNA, 19 nt, Artificial Sequence
  Description of Artificial Sequence: Synthetic oligonucleotide
ucuagauacaggguguaga

SEQ ID NO: 2465696 - RNA, 19 nt, Artificial Sequence
  Description of Artificial Sequence: Synthetic oligonucleotide
uggaguccgcuuuagacca

SEQ ID NO: 2465697 - RNA, 19 nt, Artificial Sequence
  Description of Artificial Sequence: Synthetic oligonucleotide
uggguuccaagccggauag

SEQ ID NO: 2465698 - RNA, 19 nt, Artificial Sequence
  Description of Artificial Sequence: Synthetic oligonucleotide
uuguucucaaucuuguuuu

SEQ ID NO: 2465699 - RNA, 19 nt, Artificial Sequence
  Description of Artificial Sequence: Synthetic oligonucleotide
ucgaucuuguucucaaucu

SEQ ID NO: 2465700 - RNA, 19 nt, Artificial Sequence
  Description of Artificial Sequence: Synthetic oligonucleotide
ucaugauuugagagugucc

SEQ ID NO: 2465701 - RNA, 19 nt, Artificial Sequence
  Description of Artificial Sequence: Synthetic oligonucleotide
uuuagaccaaugcucucga

SEQ ID NO: 2465702 - RNA, 19 nt, Artificial Sequence
  Description of Artificial Sequence: Synthetic oligonucleotide
accuccgacauccugcggg

SEQ ID NO: 2465703 - RNA, 19 nt, Artificial Sequence
  Description of Artificial Sequence: Synthetic oligonucleotide
cuagcuucgaaguagggaa

SEQ ID NO: 2465704 - RNA, 19 nt, Artificial Sequence
  Description of Artificial Sequence: Synthetic oligonucleotide
uagaccaaugcucucgauc

SEQ ID NO: 2465705 - RNA, 19 nt, Artificial Sequence
  Description of Artificial Sequence: Synthetic oligonucleotide
aucgccuggaucaggagcc

SEQ ID NO: 2465706 - RNA, 19 nt, Artificial Sequence
  Description of Artificial Sequence: Synthetic oligonucleotide
uucucaggcguagugaagc

SEQ ID NO: 2465707 - RNA, 19 nt, Artificial Sequence
  Description of Artificial Sequence: Synthetic oligonucleotide
ucgucuagggcgcgcagcg

SEQ ID NO: 2465708 - RNA, 19 nt, Artificial Sequence
  Description of Artificial Sequence: Synthetic oligonucleotide
uaguuugguaguagaggag

SEQ ID NO: 2465709 - RNA, 19 nt, Artificial Sequence
  Description of Artificial Sequence: Synthetic oligonucleotide
uuguugaugacgcggugac

SEQ ID NO: 2465710 - RNA, 19 nt, Artificial Sequence
  Description of Artificial Sequence: Synthetic oligonucleotide
aguggacgaauguacccgg

SEQ ID NO: 2465711 - RNA, 19 nt, Artificial Sequence
  Description of Artificial Sequence: Synthetic oligonucleotide
ugcaguggacgaauguacc

SEQ ID NO: 2465712 - RNA, 19 nt, Artificial Sequence
  Description of Artificial Sequence: Synthetic oligonucleotide
caagacaaagucgucuagg

SEQ ID NO: 2465713 - RNA, 19 nt, Artificial Sequence
  Description of Artificial Sequence: Synthetic oligonucleotide
agguaauuaguuugguagu

SEQ ID NO: 2465714 - RNA, 19 nt, Artificial Sequence
  Description of Artificial Sequence: Synthetic oligonucleotide
acaaagucgucuagggcgc

SEQ ID NO: 2465715 - RNA, 19 nt, Artificial Sequence
  Description of Artificial Sequence: Synthetic oligonucleotide
gauuugagaguguccugcc

SEQ ID NO: 2465716 - RNA, 19 nt, Artificial Sequence
  Description of Artificial Sequence: Synthetic oligonucleotide
guuuugagauugacaaugg

SEQ ID NO: 2465717 - RNA, 19 nt, Artificial Sequence
  Description of Artificial Sequence: Synthetic oligonucleotide
aguuucaaggcuguggggu

SEQ ID NO: 2465718 - RNA, 19 nt, Artificial Sequence
  Description of Artificial Sequence: Synthetic oligonucleotide
aaacccaguuucaaggcug

SEQ ID NO: 2465719 - RNA, 19 nt, Artificial Sequence
  Description of Artificial Sequence: Synthetic oligonucleotide
augucuuaaccuggguucc

SEQ ID NO: 2465720 - RNA, 19 nt, Artificial Sequence
  Description of Artificial Sequence: Synthetic oligonucleotide
aagcucaagauuuggccau

SEQ ID NO: 2465721 - RNA, 19 nt, Artificial Sequence
  Description of Artificial Sequence: Synthetic oligonucleotide
cagauuuggguuaggggag

SEQ ID NO: 2465722 - RNA, 19 nt, Artificial Sequence
  Description of Artificial Sequence: Synthetic oligonucleotide
ggguggucuagauacaggg

SEQ ID NO: 2465723 - RNA, 19 nt, Artificial Sequence
  Description of Artificial Sequence: Synthetic oligonucleotide
guugaugacgcggugacac

SEQ ID NO: 2465724 - RNA, 19 nt, Artificial Sequence
  Description of Artificial Sequence: Synthetic oligonucleotide
guaauuaguuugguaguag

SEQ ID NO: 2465725 - RNA, 19 nt, Artificial Sequence
  Description of Artificial Sequence: Synthetic oligonucleotide
guuaggggaguaucucugg

SEQ ID NO: 2465726 - RNA, 19 nt, Artificial Sequence
  Description of Artificial Sequence: Synthetic oligonucleotide
aguuugguaguagaggaga

SEQ ID NO: 2465727 - RNA, 19 nt, Artificial Sequence
  Description of Artificial Sequence: Synthetic oligonucleotide
ugacgcggugacaccaucg

SEQ ID NO: 2465728 - RNA, 19 nt, Artificial Sequence
  Description of Artificial Sequence: Synthetic oligonucleotide
agccggaccuccgacaucc

SEQ ID NO: 2465729 - RNA, 19 nt, Artificial Sequence
  Description of Artificial Sequence: Synthetic oligonucleotide
gacgaauguacccggccag

SEQ ID NO: 2465730 - RNA, 19 nt, Artificial Sequence
  Description of Artificial Sequence: Synthetic oligonucleotide
aguccuagcuucgaaguag

SEQ ID NO: 2465731 - RNA, 19 nt, Artificial Sequence
  Description of Artificial Sequence: Synthetic oligonucleotide
uaagguuucucaggcguag

SEQ ID NO: 2465732 - RNA, 19 nt, Artificial Sequence
  Description of Artificial Sequence: Synthetic oligonucleotide
gaaguagggaagaccagug

SEQ ID NO: 2465733 - RNA, 19 nt, Artificial Sequence
  Description of Artificial Sequence: Synthetic oligonucleotide
ugacaauggauaugcucug

SEQ ID NO: 2465734 - RNA, 19 nt, Artificial Sequence
  Description of Artificial Sequence: Synthetic oligonucleotide
agcagcccacaccagcacc

SEQ ID NO: 2465735 - RNA, 19 nt, Artificial Sequence
  Description of Artificial Sequence: Synthetic oligonucleotide
cagagcgagacugaugccg

SEQ ID NO: 2465736 - RNA, 19 nt, Artificial Sequence
  Description of Artificial Sequence: Synthetic oligonucleotide
aaaagcaccggcgcuguga

SEQ ID NO: 2465737 - RNA, 19 nt, Artificial Sequence
  Description of Artificial Sequence: Synthetic oligonucleotide
gccagagcgagacugaugc

SEQ ID NO: 2465738 - RNA, 19 nt, Artificial Sequence
  Description of Artificial Sequence: Synthetic oligonucleotide
gauuuggccaugucuuaac

SEQ ID NO: 2465739 - RNA, 19 nt, Artificial Sequence
  Description of Artificial Sequence: Synthetic oligonucleotide
uggacgaauguacccggcc

SEQ ID NO: 2465740 - RNA, 19 nt, Artificial Sequence
  Description of Artificial Sequence: Synthetic oligonucleotide
aaagucgucuagggcgcgc

SEQ ID NO: 2465741 - RNA, 19 nt, Artificial Sequence
  Description of Artificial Sequence: Synthetic oligonucleotide
aaggugaaagcgccgccca

SEQ ID NO: 2465742 - RNA, 19 nt, Artificial Sequence
  Description of Artificial Sequence: Synthetic oligonucleotide
cuguggaucgccuggauca

SEQ ID NO: 2465743 - RNA, 19 nt, Artificial Sequence
  Description of Artificial Sequence: Synthetic oligonucleotide
acaauggauaugcucuggu

SEQ ID NO: 2465744 - RNA, 19 nt, Artificial Sequence
  Description of Artificial Sequence: Synthetic oligonucleotide
uuucucaggcguagugaag

SEQ ID NO: 2465745 - RNA, 19 nt, Artificial Sequence
  Description of Artificial Sequence: Synthetic oligonucleotide
gacaauggauaugcucugg

SEQ ID NO: 2465746 - RNA, 19 nt, Artificial Sequence
  Description of Artificial Sequence: Synthetic oligonucleotide
ugccucuaggagcaguccc

SEQ ID NO: 2465747 - RNA, 19 nt, Artificial Sequence
  Description of Artificial Sequence: Synthetic oligonucleotide
ccaguuuugagauugacaa

SEQ ID NO: 2465748 - RNA, 19 nt, Artificial Sequence
  Description of Artificial Sequence: Synthetic oligonucleotide
cucgaucuuguucucaauc

SEQ ID NO: 2465749 - RNA, 19 nt, Artificial Sequence
  Description of Artificial Sequence: Synthetic oligonucleotide
ucuuaaccuggguuccaag

SEQ ID NO: 2465750 - RNA, 19 nt, Artificial Sequence
  Description of Artificial Sequence: Synthetic oligonucleotide
aggcuaauggcaagcaccg

SEQ ID NO: 2465751 - RNA, 19 nt, Artificial Sequence
  Description of Artificial Sequence: Synthetic oligonucleotide
auccuuagagcucaugauu

SEQ ID NO: 2465752 - RNA, 19 nt, Artificial Sequence
  Description of Artificial Sequence: Synthetic oligonucleotide
gagauugacaauggauaug

SEQ ID NO: 2465753 - RNA, 19 nt, Artificial Sequence
  Description of Artificial Sequence: Synthetic oligonucleotide
ucgaaguagggaagaccag

SEQ ID NO: 2465754 - RNA, 19 nt, Artificial Sequence
  Description of Artificial Sequence: Synthetic oligonucleotide
aaaauccuuagagcucaug

SEQ ID NO: 2465755 - RNA, 19 nt, Artificial Sequence
  Description of Artificial Sequence: Synthetic oligonucleotide
uggaucgccuggaucagga

SEQ ID NO: 2465756 - RNA, 19 nt, Artificial Sequence
  Description of Artificial Sequence: Synthetic oligonucleotide
guaguagaggagauuguug

SEQ ID NO: 2465757 - RNA, 19 nt, Artificial Sequence
  Description of Artificial Sequence: Synthetic oligonucleotide
aaagcaccggcgcugugau

SEQ ID NO: 2465758 - RNA, 19 nt, Artificial Sequence
  Description of Artificial Sequence: Synthetic oligonucleotide
uagcuucgaaguagggaag

SEQ ID NO: 2465759 - RNA, 19 nt, Artificial Sequence
  Description of Artificial Sequence: Synthetic oligonucleotide
cuucgaaguagggaagacc

SEQ ID NO: 2465760 - RNA, 19 nt, Artificial Sequence
  Description of Artificial Sequence: Synthetic oligonucleotide
uccgacauccugcggguug

SEQ ID NO: 2465761 - RNA, 19 nt, Artificial Sequence
  Description of Artificial Sequence: Synthetic oligonucleotide
uuuggguuaggggaguauc

SEQ ID NO: 2465762 - RNA, 19 nt, Artificial Sequence
  Description of Artificial Sequence: Synthetic oligonucleotide
gagaaugaggaggcuaaug

SEQ ID NO: 2465763 - RNA, 19 nt, Artificial Sequence
  Description of Artificial Sequence: Synthetic oligonucleotide
gaaggugaaagcgccgccc

SEQ ID NO: 2465764 - RNA, 19 nt, Artificial Sequence
  Description of Artificial Sequence: Synthetic oligonucleotide
ggcguagugaagcaugcag

SEQ ID NO: 2465765 - RNA, 19 nt, Artificial Sequence
  Description of Artificial Sequence: Synthetic oligonucleotide
caguggacgaauguacccg

SEQ ID NO: 2465766 - RNA, 19 nt, Artificial Sequence
  Description of Artificial Sequence: Synthetic oligonucleotide
aagaccagugagucucaga

SEQ ID NO: 2465767 - RNA, 19 nt, Artificial Sequence
  Description of Artificial Sequence: Synthetic oligonucleotide
gugaugcagagcaggaagg

SEQ ID NO: 2465768 - RNA, 19 nt, Artificial Sequence
  Description of Artificial Sequence: Synthetic oligonucleotide
uuaagguuucucaggcgua

SEQ ID NO: 2465769 - RNA, 19 nt, Artificial Sequence
  Description of Artificial Sequence: Synthetic oligonucleotide
cagugagucucagauuugg

SEQ ID NO: 2465770 - RNA, 19 nt, Artificial Sequence
  Description of Artificial Sequence: Synthetic oligonucleotide
gguuccaagccggauaggg

SEQ ID NO: 2465771 - RNA, 19 nt, Artificial Sequence
  Description of Artificial Sequence: Synthetic oligonucleotide
uccuagcuucgaaguaggg

SEQ ID NO: 2465772 - RNA, 19 nt, Artificial Sequence
  Description of Artificial Sequence: Synthetic oligonucleotide
auuguugaugacgcgguga

SEQ ID NO: 2465773 - RNA, 19 nt, Artificial Sequence
  Description of Artificial Sequence: Synthetic oligonucleotide
aaagcgccgcccacggccc

SEQ ID NO: 2465774 - RNA, 19 nt, Artificial Sequence
  Description of Artificial Sequence: Synthetic oligonucleotide
gacgcggugacaccaucgc

SEQ ID NO: 2465775 - RNA, 19 nt, Artificial Sequence
  Description of Artificial Sequence: Synthetic oligonucleotide
ugugcaguggacgaaugua

SEQ ID NO: 2465776 - RNA, 19 nt, Artificial Sequence
  Description of Artificial Sequence: Synthetic oligonucleotide
augauuugagaguguccug

SEQ ID NO: 2465777 - RNA, 19 nt, Artificial Sequence
  Description of Artificial Sequence: Synthetic oligonucleotide
gugaaagcgccgcccacgg

SEQ ID NO: 2465778 - RNA, 19 nt, Artificial Sequence
  Description of Artificial Sequence: Synthetic oligonucleotide
accagugcacucaggaggg

SEQ ID NO: 2465779 - RNA, 19 nt, Artificial Sequence
  Description of Artificial Sequence: Synthetic oligonucleotide
cucaaucuuguuuuaaggu

SEQ ID NO: 2465780 - RNA, 19 nt, Artificial Sequence
  Description of Artificial Sequence: Synthetic oligonucleotide
aaccuggguuccaagccgg

SEQ ID NO: 2465781 - RNA, 19 nt, Artificial Sequence
  Description of Artificial Sequence: Synthetic oligonucleotide
ugaugacgcggugacacca

SEQ ID NO: 2465782 - RNA, 19 nt, Artificial Sequence
  Description of Artificial Sequence: Synthetic oligonucleotide
uugagaguguccugcccca

SEQ ID NO: 2465783 - RNA, 19 nt, Artificial Sequence
  Description of Artificial Sequence: Synthetic oligonucleotide
accacuaccagugcacuca

SEQ ID NO: 2465784 - RNA, 19 nt, Artificial Sequence
  Description of Artificial Sequence: Synthetic oligonucleotide
uaggggaguaucucugggu

SEQ ID NO: 2465785 - RNA, 19 nt, Artificial Sequence
  Description of Artificial Sequence: Synthetic oligonucleotide
gauacaggguguagaugcc

SEQ ID NO: 2465786 - RNA, 19 nt, Artificial Sequence
  Description of Artificial Sequence: Synthetic oligonucleotide
gaggguggucuagauacag

SEQ ID NO: 2465787 - RNA, 19 nt, Artificial Sequence
  Description of Artificial Sequence: Synthetic oligonucleotide
aaguccuagcuucgaagua

SEQ ID NO: 2465788 - RNA, 19 nt, Artificial Sequence
  Description of Artificial Sequence: Synthetic oligonucleotide
gaucaggagccgccagacg

SEQ ID NO: 2465789 - RNA, 19 nt, Artificial Sequence
  Description of Artificial Sequence: Synthetic oligonucleotide
aguagaggagauuguugau

SEQ ID NO: 2465790 - RNA, 19 nt, Artificial Sequence
  Description of Artificial Sequence: Synthetic oligonucleotide
agaguguccugccccaagu

SEQ ID NO: 2465791 - RNA, 19 nt, Artificial Sequence
  Description of Artificial Sequence: Synthetic oligonucleotide
agcgguggcagccggaccu

SEQ ID NO: 2465792 - RNA, 19 nt, Artificial Sequence
  Description of Artificial Sequence: Synthetic oligonucleotide
caugauuugagaguguccu

SEQ ID NO: 2465793 - RNA, 19 nt, Artificial Sequence
  Description of Artificial Sequence: Synthetic oligonucleotide
ugcacggguuucagcagcc

SEQ ID NO: 2465794 - RNA, 19 nt, Artificial Sequence
  Description of Artificial Sequence: Synthetic oligonucleotide
accaucgcuguggaucgcc

SEQ ID NO: 2465795 - RNA, 19 nt, Artificial Sequence
  Description of Artificial Sequence: Synthetic oligonucleotide
agauuguugaugacgcggu

SEQ ID NO: 2465796 - RNA, 19 nt, Artificial Sequence
  Description of Artificial Sequence: Synthetic oligonucleotide
agugagucucagauuuggg

SEQ ID NO: 2465797 - RNA, 19 nt, Artificial Sequence
  Description of Artificial Sequence: Synthetic oligonucleotide
gaggaggcuaauggcaagc

SEQ ID NO: 2465798 - RNA, 19 nt, Artificial Sequence
  Description of Artificial Sequence: Synthetic oligonucleotide
caggcguagugaagcaugc

SEQ ID NO: 2465799 - RNA, 19 nt, Artificial Sequence
  Description of Artificial Sequence: Synthetic oligonucleotide
ugaugcagagcaggaaggu

SEQ ID NO: 2465800 - RNA, 19 nt, Artificial Sequence
  Description of Artificial Sequence: Synthetic oligonucleotide
cacaguccuaggauccagc

SEQ ID NO: 2465801 - RNA, 19 nt, Artificial Sequence
  Description of Artificial Sequence: Synthetic oligonucleotide
gcuaauggcaagcaccgca

SEQ ID NO: 2465802 - RNA, 19 nt, Artificial Sequence
  Description of Artificial Sequence: Synthetic oligonucleotide
uuucaaggcugugggguug

SEQ ID NO: 2465803 - RNA, 19 nt, Artificial Sequence
  Description of Artificial Sequence: Synthetic oligonucleotide
caguuucaaggcugugggg

SEQ ID NO: 2465804 - RNA, 19 nt, Artificial Sequence
  Description of Artificial Sequence: Synthetic oligonucleotide
agcggcgcauagcugcacg

SEQ ID NO: 2465805 - RNA, 19 nt, Artificial Sequence
  Description of Artificial Sequence: Synthetic oligonucleotide
ucucaggcguagugaagca

SEQ ID NO: 2465806 - RNA, 19 nt, Artificial Sequence
  Description of Artificial Sequence: Synthetic oligonucleotide
uguacccggccagagcgag

SEQ ID NO: 2465807 - RNA, 19 nt, Artificial Sequence
  Description of Artificial Sequence: Synthetic oligonucleotide
acggguuucagcagcccac

SEQ ID NO: 2465808 - RNA, 19 nt, Artificial Sequence
  Description of Artificial Sequence: Synthetic oligonucleotide
gacgcgcagaccccaagac

SEQ ID NO: 2465809 - RNA, 19 nt, Artificial Sequence
  Description of Artificial Sequence: Synthetic oligonucleotide
cucuggguccaguuuugag

SEQ ID NO: 2465810 - RNA, 19 nt, Artificial Sequence
  Description of Artificial Sequence: Synthetic oligonucleotide
ugaggguggucuagauaca

SEQ ID NO: 2465811 - RNA, 19 nt, Artificial Sequence
  Description of Artificial Sequence: Synthetic oligonucleotide
ggcagcggcgcauagcugc

SEQ ID NO: 2465812 - RNA, 19 nt, Artificial Sequence
  Description of Artificial Sequence: Synthetic oligonucleotide
aggugaaagcgccgcccac

SEQ ID NO: 2465813 - RNA, 19 nt, Artificial Sequence
  Description of Artificial Sequence: Synthetic oligonucleotide
ggagauuguugaugacgcg

SEQ ID NO: 2465814 - RNA, 19 nt, Artificial Sequence
  Description of Artificial Sequence: Synthetic oligonucleotide
uguucucaaucuuguuuua

SEQ ID NO: 2465815 - RNA, 19 nt, Artificial Sequence
  Description of Artificial Sequence: Synthetic oligonucleotide
guccuagcuucgaaguagg

SEQ ID NO: 2465816 - RNA, 19 nt, Artificial Sequence
  Description of Artificial Sequence: Synthetic oligonucleotide
gaccccaagacaaagucgu

SEQ ID NO: 2465817 - RNA, 19 nt, Artificial Sequence
  Description of Artificial Sequence: Synthetic oligonucleotide
ucuagggcgcgcagcggug

SEQ ID NO: 2465818 - RNA, 19 nt, Artificial Sequence
  Description of Artificial Sequence: Synthetic oligonucleotide
cugcacggguuucagcagc

SEQ ID NO: 2465819 - RNA, 19 nt, Artificial Sequence
  Description of Artificial Sequence: Synthetic oligonucleotide
gugagucucagauuugggu

SEQ ID NO: 2465820 - RNA, 19 nt, Artificial Sequence
  Description of Artificial Sequence: Synthetic oligonucleotide
cuuagagcucaugauuuga

SEQ ID NO: 2465821 - RNA, 19 nt, Artificial Sequence
  Description of Artificial Sequence: Synthetic oligonucleotide
ggguguagaugccacaguc

SEQ ID NO: 2465822 - RNA, 19 nt, Artificial Sequence
  Description of Artificial Sequence: Synthetic oligonucleotide
uguggaucgccuggaucag

SEQ ID NO: 2465823 - RNA, 19 nt, Artificial Sequence
  Description of Artificial Sequence: Synthetic oligonucleotide
gcaguggacgaauguaccc

SEQ ID NO: 2465824 - RNA, 19 nt, Artificial Sequence
  Description of Artificial Sequence: Synthetic oligonucleotide
caaucuuguuuuaagguuu

SEQ ID NO: 2465825 - RNA, 19 nt, Artificial Sequence
  Description of Artificial Sequence: Synthetic oligonucleotide
augacgcggugacaccauc

SEQ ID NO: 2465826 - RNA, 19 nt, Artificial Sequence
  Description of Artificial Sequence: Synthetic oligonucleotide
auggcaagcaccgcagcca

SEQ ID NO: 2465827 - RNA, 19 nt, Artificial Sequence
  Description of Artificial Sequence: Synthetic oligonucleotide
ggugaaagcgccgcccacg

SEQ ID NO: 2465828 - RNA, 19 nt, Artificial Sequence
  Description of Artificial Sequence: Synthetic oligonucleotide
agacgcgcagaccccaaga

SEQ ID NO: 2465829 - RNA, 19 nt, Artificial Sequence
  Description of Artificial Sequence: Synthetic oligonucleotide
agccggauaggguuugaaa

SEQ ID NO: 2465830 - RNA, 19 nt, Artificial Sequence
  Description of Artificial Sequence: Synthetic oligonucleotide
cuagauacaggguguagau

SEQ ID NO: 2465831 - RNA, 19 nt, Artificial Sequence
  Description of Artificial Sequence: Synthetic oligonucleotide
ggaccuccgacauccugcg

SEQ ID NO: 2465832 - RNA, 19 nt, Artificial Sequence
  Description of Artificial Sequence: Synthetic oligonucleotide
gccggauaggguuugaaaa

SEQ ID NO: 2465833 - RNA, 19 nt, Artificial Sequence
  Description of Artificial Sequence: Synthetic oligonucleotide
uggguuaggggaguaucuc

SEQ ID NO: 2465834 - RNA, 19 nt, Artificial Sequence
  Description of Artificial Sequence: Synthetic oligonucleotide
agauuuggccaugucuuaa

SEQ ID NO: 2465835 - RNA, 19 nt, Artificial Sequence
  Description of Artificial Sequence: Synthetic oligonucleotide
caaguccuagcuucgaagu

SEQ ID NO: 2465836 - RNA, 19 nt, Artificial Sequence
  Description of Artificial Sequence: Synthetic oligonucleotide
agucccauuggaguccgcu

SEQ ID NO: 2465837 - RNA, 19 nt, Artificial Sequence
  Description of Artificial Sequence: Synthetic oligonucleotide
gucuagauacaggguguag

SEQ ID NO: 2465838 - RNA, 19 nt, Artificial Sequence
  Description of Artificial Sequence: Synthetic oligonucleotide
aggguggucuagauacagg

SEQ ID NO: 2465839 - RNA, 19 nt, Artificial Sequence
  Description of Artificial Sequence: Synthetic oligonucleotide
agggaagaccagugagucu

SEQ ID NO: 2465840 - RNA, 19 nt, Artificial Sequence
  Description of Artificial Sequence: Synthetic oligonucleotide
aagucgucuagggcgcgca

SEQ ID NO: 2465841 - RNA, 19 nt, Artificial Sequence
  Description of Artificial Sequence: Synthetic oligonucleotide
agugcacucaggagggugu

SEQ ID NO: 2465842 - RNA, 19 nt, Artificial Sequence
  Description of Artificial Sequence: Synthetic oligonucleotide
acggcccagagaaugagga

SEQ ID NO: 2465843 - RNA, 19 nt, Artificial Sequence
  Description of Artificial Sequence: Synthetic oligonucleotide
aagguuucucaggcguagu

SEQ ID NO: 2465844 - RNA, 19 nt, Artificial Sequence
  Description of Artificial Sequence: Synthetic oligonucleotide
cucaagauuuggccauguc

SEQ ID NO: 2465845 - RNA, 19 nt, Artificial Sequence
  Description of Artificial Sequence: Synthetic oligonucleotide
gcgagacugaugccgaagc

SEQ ID NO: 2465846 - RNA, 19 nt, Artificial Sequence
  Description of Artificial Sequence: Synthetic oligonucleotide
gaguguccugccccaaguc

SEQ ID NO: 2465847 - RNA, 19 nt, Artificial Sequence
  Description of Artificial Sequence: Synthetic oligonucleotide
acgcgcagaccccaagaca

SEQ ID NO: 2465848 - RNA, 19 nt, Artificial Sequence
  Description of Artificial Sequence: Synthetic oligonucleotide
cuuccugcuccugucccag

SEQ ID NO: 2465849 - RNA, 19 nt, Artificial Sequence
  Description of Artificial Sequence: Synthetic oligonucleotide
uguugaugacgcggugaca

SEQ ID NO: 2465850 - RNA, 19 nt, Artificial Sequence
  Description of Artificial Sequence: Synthetic oligonucleotide
cucucgaucuuguucucaa

SEQ ID NO: 2465851 - RNA, 19 nt, Artificial Sequence
  Description of Artificial Sequence: Synthetic oligonucleotide
ggagcagucccauuggagu

SEQ ID NO: 2465852 - RNA, 19 nt, Artificial Sequence
  Description of Artificial Sequence: Synthetic oligonucleotide
caaggcugugggguugagg

SEQ ID NO: 2465853 - RNA, 19 nt, Artificial Sequence
  Description of Artificial Sequence: Synthetic oligonucleotide
caccccgagggccaccacc

SEQ ID NO: 2465854 - RNA, 19 nt, Artificial Sequence
  Description of Artificial Sequence: Synthetic oligonucleotide
gcguagugaagcaugcagc

SEQ ID NO: 2465855 - RNA, 19 nt, Artificial Sequence
  Description of Artificial Sequence: Synthetic oligonucleotide
agagcgagacugaugccga

SEQ ID NO: 2465856 - RNA, 19 nt, Artificial Sequence
  Description of Artificial Sequence: Synthetic oligonucleotide
ggacgaauguacccggcca

SEQ ID NO: 2465857 - RNA, 19 nt, Artificial Sequence
  Description of Artificial Sequence: Synthetic oligonucleotide
ggggaguaucucugggucc

SEQ ID NO: 2465858 - RNA, 19 nt, Artificial Sequence
  Description of Artificial Sequence: Synthetic oligonucleotide
gcaagcaccgcagccaggc

SEQ ID NO: 2465859 - RNA, 19 nt, Artificial Sequence
  Description of Artificial Sequence: Synthetic oligonucleotide
guugaggguggucuagaua

SEQ ID NO: 2465860 - RNA, 19 nt, Artificial Sequence
  Description of Artificial Sequence: Synthetic oligonucleotide
cacuaccagugcacucagg

SEQ ID NO: 2465861 - RNA, 19 nt, Artificial Sequence
  Description of Artificial Sequence: Synthetic oligonucleotide
agucgucuagggcgcgcag

SEQ ID NO: 2465862 - RNA, 19 nt, Artificial Sequence
  Description of Artificial Sequence: Synthetic oligonucleotide
gguaauuaguuugguagua

SEQ ID NO: 2465863 - RNA, 19 nt, Artificial Sequence
  Description of Artificial Sequence: Synthetic oligonucleotide
cuggaucaggagccgccag

SEQ ID NO: 2465864 - RNA, 19 nt, Artificial Sequence
  Description of Artificial Sequence: Synthetic oligonucleotide
aggaggcuaauggcaagca

SEQ ID NO: 2465865 - RNA, 19 nt, Artificial Sequence
  Description of Artificial Sequence: Synthetic oligonucleotide
ggaggcuaauggcaagcac

SEQ ID NO: 2465866 - RNA, 19 nt, Artificial Sequence
  Description of Artificial Sequence: Synthetic oligonucleotide
guucucaaucuuguuuuaa

SEQ ID NO: 2465867 - RNA, 19 nt, Artificial Sequence
  Description of Artificial Sequence: Synthetic oligonucleotide
ccuaggauccagcuuccug

SEQ ID NO: 2465868 - RNA, 19 nt, Artificial Sequence
  Description of Artificial Sequence: Synthetic oligonucleotide
gguggcugcgacggcagcg

SEQ ID NO: 2465869 - RNA, 19 nt, Artificial Sequence
  Description of Artificial Sequence: Synthetic oligonucleotide
auuuggguuaggggaguau

SEQ ID NO: 2465870 - RNA, 19 nt, Artificial Sequence
  Description of Artificial Sequence: Synthetic oligonucleotide
guccaguuuugagauugac

SEQ ID NO: 2465871 - RNA, 19 nt, Artificial Sequence
  Description of Artificial Sequence: Synthetic oligonucleotide
ccaagacaaagucgucuag

SEQ ID NO: 2465872 - RNA, 19 nt, Artificial Sequence
  Description of Artificial Sequence: Synthetic oligonucleotide
cuagggcgcgcagcggugg

SEQ ID NO: 2465873 - RNA, 19 nt, Artificial Sequence
  Description of Artificial Sequence: Synthetic oligonucleotide
caaagucgucuagggcgcg

SEQ ID NO: 2465874 - RNA, 19 nt, Artificial Sequence
  Description of Artificial Sequence: Synthetic oligonucleotide
cacagaagguaauuaguuu

SEQ ID NO: 2465875 - RNA, 19 nt, Artificial Sequence
  Description of Artificial Sequence: Synthetic oligonucleotide
ggagccgccagacgcgcag

SEQ ID NO: 2465876 - RNA, 19 nt, Artificial Sequence
  Description of Artificial Sequence: Synthetic oligonucleotide
acgaauguacccggccaga

SEQ ID NO: 2465877 - RNA, 19 nt, Artificial Sequence
  Description of Artificial Sequence: Synthetic oligonucleotide
agcucaagauuuggccaug

SEQ ID NO: 2465878 - RNA, 19 nt, Artificial Sequence
  Description of Artificial Sequence: Synthetic oligonucleotide
gaccuccgacauccugcgg

SEQ ID NO: 2465879 - RNA, 19 nt, Artificial Sequence
  Description of Artificial Sequence: Synthetic oligonucleotide
cauuggaguccgcuuuaga

SEQ ID NO: 2465880 - RNA, 19 nt, Artificial Sequence
  Description of Artificial Sequence: Synthetic oligonucleotide
ucgccuggaucaggagccg

SEQ ID NO: 2465881 - RNA, 19 nt, Artificial Sequence
  Description of Artificial Sequence: Synthetic oligonucleotide
aagccggauaggguuugaa

SEQ ID NO: 2465882 - RNA, 19 nt, Artificial Sequence
  Description of Artificial Sequence: Synthetic oligonucleotide
gucgucuagggcgcgcagc

SEQ ID NO: 2465883 - RNA, 19 nt, Artificial Sequence
  Description of Artificial Sequence: Synthetic oligonucleotide
guggaucgccuggaucagg

SEQ ID NO: 2465884 - RNA, 19 nt, Artificial Sequence
  Description of Artificial Sequence: Synthetic oligonucleotide
acgcggugacaccaucgcu

SEQ ID NO: 2465885 - RNA, 19 nt, Artificial Sequence
  Description of Artificial Sequence: Synthetic oligonucleotide
cguagugaagcaugcagca

SEQ ID NO: 2465886 - RNA, 19 nt, Artificial Sequence
  Description of Artificial Sequence: Synthetic oligonucleotide
gacggcagcggcgcauagc

SEQ ID NO: 2465887 - RNA, 19 nt, Artificial Sequence
  Description of Artificial Sequence: Synthetic oligonucleotide
aagcaccggcgcugugaug

SEQ ID NO: 2465888 - RNA, 19 nt, Artificial Sequence
  Description of Artificial Sequence: Synthetic oligonucleotide
ugggguugaggguggucua

SEQ ID NO: 2465889 - RNA, 19 nt, Artificial Sequence
  Description of Artificial Sequence: Synthetic oligonucleotide
cacggguuucagcagccca

SEQ ID NO: 2465890 - RNA, 19 nt, Artificial Sequence
  Description of Artificial Sequence: Synthetic oligonucleotide
cuggguuccaagccggaua

SEQ ID NO: 2465891 - RNA, 19 nt, Artificial Sequence
  Description of Artificial Sequence: Synthetic oligonucleotide
agagaaugaggaggcuaau

SEQ ID NO: 2465892 - RNA, 19 nt, Artificial Sequence
  Description of Artificial Sequence: Synthetic oligonucleotide
uagggcgcgcagcgguggc

SEQ ID NO: 2465893 - RNA, 19 nt, Artificial Sequence
  Description of Artificial Sequence: Synthetic oligonucleotide
ggaucaggagccgccagac

SEQ ID NO: 2465894 - RNA, 19 nt, Artificial Sequence
  Description of Artificial Sequence: Synthetic oligonucleotide
cgcggugacaccaucgcug

SEQ ID NO: 2465895 - RNA, 19 nt, Artificial Sequence
  Description of Artificial Sequence: Synthetic oligonucleotide
gggaguaucucugggucca

SEQ ID NO: 2465896 - RNA, 19 nt, Artificial Sequence
  Description of Artificial Sequence: Synthetic oligonucleotide
cagacgcgcagaccccaag

SEQ ID NO: 2465897 - RNA, 19 nt, Artificial Sequence
  Description of Artificial Sequence: Synthetic oligonucleotide
guggacgaauguacccggc

SEQ ID NO: 2465898 - RNA, 19 nt, Artificial Sequence
  Description of Artificial Sequence: Synthetic oligonucleotide
accccaagacaaagucguc

SEQ ID NO: 2465899 - RNA, 19 nt, Artificial Sequence
  Description of Artificial Sequence: Synthetic oligonucleotide
ggaucgccuggaucaggag

SEQ ID NO: 2465900 - RNA, 19 nt, Artificial Sequence
  Description of Artificial Sequence: Synthetic oligonucleotide
gcggcgcauagcugcacgg

SEQ ID NO: 2465901 - RNA, 19 nt, Artificial Sequence
  Description of Artificial Sequence: Synthetic oligonucleotide
gcagcccacaccagcaccc

SEQ ID NO: 2465902 - RNA, 19 nt, Artificial Sequence
  Description of Artificial Sequence: Synthetic oligonucleotide
gugccucuaggagcagucc

SEQ ID NO: 2465903 - RNA, 19 nt, Artificial Sequence
  Description of Artificial Sequence: Synthetic oligonucleotide
gcuuuagaccaaugcucuc

SEQ ID NO: 2465904 - RNA, 19 nt, Artificial Sequence
  Description of Artificial Sequence: Synthetic oligonucleotide
gucuagggcgcgcagcggu

SEQ ID NO: 2465905 - RNA, 19 nt, Artificial Sequence
  Description of Artificial Sequence: Synthetic oligonucleotide
caauggauaugcucugguu

SEQ ID NO: 2465906 - RNA, 19 nt, Artificial Sequence
  Description of Artificial Sequence: Synthetic oligonucleotide
guuucaaggcugugggguu

SEQ ID NO: 2465907 - RNA, 19 nt, Artificial Sequence
  Description of Artificial Sequence: Synthetic oligonucleotide
accccgagggccaccacca

SEQ ID NO: 2465908 - RNA, 19 nt, Artificial Sequence
  Description of Artificial Sequence: Synthetic oligonucleotide
gauuuggguuaggggagua

SEQ ID NO: 2465909 - RNA, 19 nt, Artificial Sequence
  Description of Artificial Sequence: Synthetic oligonucleotide
ccuagcuucgaaguaggga

SEQ ID NO: 2465910 - RNA, 19 nt, Artificial Sequence
  Description of Artificial Sequence: Synthetic oligonucleotide
guaucucuggguccaguuu

SEQ ID NO: 2465911 - RNA, 19 nt, Artificial Sequence
  Description of Artificial Sequence: Synthetic oligonucleotide
caaaagcaccggcgcugug

SEQ ID NO: 2465912 - RNA, 19 nt, Artificial Sequence
  Description of Artificial Sequence: Synthetic oligonucleotide
gucuuaaccuggguuccaa

SEQ ID NO: 2465913 - RNA, 19 nt, Artificial Sequence
  Description of Artificial Sequence: Synthetic oligonucleotide
uccuaggauccagcuuccu

SEQ ID NO: 2465914 - RNA, 19 nt, Artificial Sequence
  Description of Artificial Sequence: Synthetic oligonucleotide
gugugcaguggacgaaugu

SEQ ID NO: 2465915 - RNA, 19 nt, Artificial Sequence
  Description of Artificial Sequence: Synthetic oligonucleotide
aguccgcuuuagaccaaug

SEQ ID NO: 2465916 - RNA, 19 nt, Artificial Sequence
  Description of Artificial Sequence: Synthetic oligonucleotide
guuugguaguagaggagau

SEQ ID NO: 2465917 - RNA, 19 nt, Artificial Sequence
  Description of Artificial Sequence: Synthetic oligonucleotide
gcuucgaaguagggaagac

SEQ ID NO: 2465918 - RNA, 19 nt, Artificial Sequence
  Description of Artificial Sequence: Synthetic oligonucleotide
aggcguagugaagcaugca

SEQ ID NO: 2465919 - RNA, 19 nt, Artificial Sequence
  Description of Artificial Sequence: Synthetic oligonucleotide
ggguuaggggaguaucucu

SEQ ID NO: 2465920 - RNA, 19 nt, Artificial Sequence
  Description of Artificial Sequence: Synthetic oligonucleotide
ugacaccaucgcuguggau

SEQ ID NO: 2465921 - RNA, 19 nt, Artificial Sequence
  Description of Artificial Sequence: Synthetic oligonucleotide
ccagugagucucagauuug

SEQ ID NO: 2465922 - RNA, 19 nt, Artificial Sequence
  Description of Artificial Sequence: Synthetic oligonucleotide
gggguugaggguggucuag

SEQ ID NO: 2465923 - RNA, 19 nt, Artificial Sequence
  Description of Artificial Sequence: Synthetic oligonucleotide
caguuuugagauugacaau

SEQ ID NO: 2465924 - RNA, 19 nt, Artificial Sequence
  Description of Artificial Sequence: Synthetic oligonucleotide
gcccacggcccagagaaug

SEQ ID NO: 2465925 - RNA, 19 nt, Artificial Sequence
  Description of Artificial Sequence: Synthetic oligonucleotide
cccaagacaaagucgucua

SEQ ID NO: 2465926 - RNA, 19 nt, Artificial Sequence
  Description of Artificial Sequence: Synthetic oligonucleotide
uggguccaguuuugagauu

SEQ ID NO: 2465927 - RNA, 19 nt, Artificial Sequence
  Description of Artificial Sequence: Synthetic oligonucleotide
gccgaagcacagaagguaa

SEQ ID NO: 2465928 - RNA, 19 nt, Artificial Sequence
  Description of Artificial Sequence: Synthetic oligonucleotide
gagcgagacugaugccgaa

SEQ ID NO: 2465929 - RNA, 19 nt, Artificial Sequence
  Description of Artificial Sequence: Synthetic oligonucleotide
ccacuaccagugcacucag

SEQ ID NO: 2465930 - RNA, 19 nt, Artificial Sequence
  Description of Artificial Sequence: Synthetic oligonucleotide
uccugucccagugccucua

SEQ ID NO: 2465931 - RNA, 19 nt, Artificial Sequence
  Description of Artificial Sequence: Synthetic oligonucleotide
gaccagugagucucagauu

SEQ ID NO: 2465932 - RNA, 19 nt, Artificial Sequence
  Description of Artificial Sequence: Synthetic oligonucleotide
gguggcagccggaccuccg

SEQ ID NO: 2465933 - RNA, 19 nt, Artificial Sequence
  Description of Artificial Sequence: Synthetic oligonucleotide
cgcgcagaccccaagacaa

SEQ ID NO: 2465934 - RNA, 19 nt, Artificial Sequence
  Description of Artificial Sequence: Synthetic oligonucleotide
ccgcccacggcccagagaa

SEQ ID NO: 2465935 - RNA, 19 nt, Artificial Sequence
  Description of Artificial Sequence: Synthetic oligonucleotide
ccagagcgagacugaugcc

SEQ ID NO: 2465936 - RNA, 19 nt, Artificial Sequence
  Description of Artificial Sequence: Synthetic oligonucleotide
aagcgccgcccacggccca

SEQ ID NO: 2465937 - RNA, 19 nt, Artificial Sequence
  Description of Artificial Sequence: Synthetic oligonucleotide
auguacccggccagagcga

SEQ ID NO: 2465938 - RNA, 19 nt, Artificial Sequence
  Description of Artificial Sequence: Synthetic oligonucleotide
gccucuaggagcaguccca

SEQ ID NO: 2465939 - RNA, 19 nt, Artificial Sequence
  Description of Artificial Sequence: Synthetic oligonucleotide
cgaauguacccggccagag

SEQ ID NO: 2465940 - RNA, 19 nt, Artificial Sequence
  Description of Artificial Sequence: Synthetic oligonucleotide
ccgacauccugcggguugc

SEQ ID NO: 2465941 - RNA, 19 nt, Artificial Sequence
  Description of Artificial Sequence: Synthetic oligonucleotide
ggcuaauggcaagcaccgc

SEQ ID NO: 2465942 - RNA, 19 nt, Artificial Sequence
  Description of Artificial Sequence: Synthetic oligonucleotide
ggauaugcucugguuuaaa

SEQ ID NO: 2465943 - RNA, 19 nt, Artificial Sequence
  Description of Artificial Sequence: Synthetic oligonucleotide
gaugacgcggugacaccau

SEQ ID NO: 2465944 - RNA, 19 nt, Artificial Sequence
  Description of Artificial Sequence: Synthetic oligonucleotide
caagcaccgcagccaggca

SEQ ID NO: 2465945 - RNA, 19 nt, Artificial Sequence
  Description of Artificial Sequence: Synthetic oligonucleotide
ggcgcauagcugcacgggu

SEQ ID NO: 2465946 - RNA, 19 nt, Artificial Sequence
  Description of Artificial Sequence: Synthetic oligonucleotide
gguggucuagauacagggu

SEQ ID NO: 2465947 - RNA, 19 nt, Artificial Sequence
  Description of Artificial Sequence: Synthetic oligonucleotide
ggccagagcgagacugaug

SEQ ID NO: 2465948 - RNA, 19 nt, Artificial Sequence
  Description of Artificial Sequence: Synthetic oligonucleotide
cagucccauuggaguccgc

SEQ ID NO: 2465949 - RNA, 19 nt, Artificial Sequence
  Description of Artificial Sequence: Synthetic oligonucleotide
ggaagaccagugagucuca

SEQ ID NO: 2465950 - RNA, 19 nt, Artificial Sequence
  Description of Artificial Sequence: Synthetic oligonucleotide
gaccaaugcucucgaucuu

SEQ ID NO: 2465951 - RNA, 19 nt, Artificial Sequence
  Description of Artificial Sequence: Synthetic oligonucleotide
caccggcgcugugaugcag

SEQ ID NO: 2465952 - RNA, 19 nt, Artificial Sequence
  Description of Artificial Sequence: Synthetic oligonucleotide
gcagcgguggcagccggac

SEQ ID NO: 2465953 - RNA, 19 nt, Artificial Sequence
  Description of Artificial Sequence: Synthetic oligonucleotide
gucccauuggaguccgcuu

SEQ ID NO: 2465954 - RNA, 19 nt, Artificial Sequence
  Description of Artificial Sequence: Synthetic oligonucleotide
ccggcgcugugaugcagag

SEQ ID NO: 2465955 - RNA, 19 nt, Artificial Sequence
  Description of Artificial Sequence: Synthetic oligonucleotide
gguugaggguggucuagau

SEQ ID NO: 2465956 - RNA, 19 nt, Artificial Sequence
  Description of Artificial Sequence: Synthetic oligonucleotide
gaguccgcuuuagaccaau

SEQ ID NO: 2465957 - RNA, 19 nt, Artificial Sequence
  Description of Artificial Sequence: Synthetic oligonucleotide
ccugucccagugccucuag

SEQ ID NO: 2465958 - RNA, 19 nt, Artificial Sequence
  Description of Artificial Sequence: Synthetic oligonucleotide
accuggguuccaagccgga

SEQ ID NO: 2465959 - RNA, 19 nt, Artificial Sequence
  Description of Artificial Sequence: Synthetic oligonucleotide
caccaucgcuguggaucgc

SEQ ID NO: 2465960 - RNA, 19 nt, Artificial Sequence
  Description of Artificial Sequence: Synthetic oligonucleotide
agcgccgcccacggcccag

SEQ ID NO: 2465961 - RNA, 19 nt, Artificial Sequence
  Description of Artificial Sequence: Synthetic oligonucleotide
gggcgcgcagcgguggcag

SEQ ID NO: 2465962 - RNA, 19 nt, Artificial Sequence
  Description of Artificial Sequence: Synthetic oligonucleotide
cagccggaccuccgacauc

SEQ ID NO: 2465963 - RNA, 19 nt, Artificial Sequence
  Description of Artificial Sequence: Synthetic oligonucleotide
ccggaccuccgacauccug

SEQ ID NO: 2465964 - RNA, 19 nt, Artificial Sequence
  Description of Artificial Sequence: Synthetic oligonucleotide
gagccgccagacgcgcaga

SEQ ID NO: 2465965 - RNA, 19 nt, Artificial Sequence
  Description of Artificial Sequence: Synthetic oligonucleotide
gcacggguuucagcagccc

SEQ ID NO: 2465966 - RNA, 19 nt, Artificial Sequence
  Description of Artificial Sequence: Synthetic oligonucleotide
acccggccagagcgagacu

SEQ ID NO: 2465967 - RNA, 19 nt, Artificial Sequence
  Description of Artificial Sequence: Synthetic oligonucleotide
gcagccggaccuccgacau

SEQ ID NO: 2465968 - RNA, 19 nt, Artificial Sequence
  Description of Artificial Sequence: Synthetic oligonucleotide
gccacaguccuaggaucca

SEQ ID NO: 2465969 - RNA, 19 nt, Artificial Sequence
  Description of Artificial Sequence: Synthetic oligonucleotide
cccaaguccuagcuucgaa

SEQ ID NO: 2465970 - RNA, 19 nt, Artificial Sequence
  Description of Artificial Sequence: Synthetic oligonucleotide
cagcggcgcauagcugcac

SEQ ID NO: 2465971 - RNA, 19 nt, Artificial Sequence
  Description of Artificial Sequence: Synthetic oligonucleotide
cucaggcguagugaagcau

SEQ ID NO: 2465972 - RNA, 19 nt, Artificial Sequence
  Description of Artificial Sequence: Synthetic oligonucleotide
gcaggguggcugcgacggc

SEQ ID NO: 2465973 - RNA, 19 nt, Artificial Sequence
  Description of Artificial Sequence: Synthetic oligonucleotide
cggcgcauagcugcacggg

SEQ ID NO: 2465974 - RNA, 19 nt, Artificial Sequence
  Description of Artificial Sequence: Synthetic oligonucleotide
ccccaagacaaagucgucu

SEQ ID NO: 2465975 - RNA, 19 nt, Artificial Sequence
  Description of Artificial Sequence: Synthetic oligonucleotide
guacccggccagagcgaga

SEQ ID NO: 2465976 - RNA, 19 nt, Artificial Sequence
  Description of Artificial Sequence: Synthetic oligonucleotide
gccagacgcgcagacccca

SEQ ID NO: 2465977 - RNA, 19 nt, Artificial Sequence
  Description of Artificial Sequence: Synthetic oligonucleotide
gcucaagauuuggccaugu

SEQ ID NO: 2465978 - RNA, 19 nt, Artificial Sequence
  Description of Artificial Sequence: Synthetic oligonucleotide
gcgcugugaugcagagcag

SEQ ID NO: 2465979 - RNA, 19 nt, Artificial Sequence
  Description of Artificial Sequence: Synthetic oligonucleotide
cccauuggaguccgcuuua

SEQ ID NO: 2465980 - RNA, 19 nt, Artificial Sequence
  Description of Artificial Sequence: Synthetic oligonucleotide
ccgcagccaggcaggcagc

SEQ ID NO: 2465981 - RNA, 19 nt, Artificial Sequence
  Description of Artificial Sequence: Synthetic oligonucleotide
cagcaccccgagggccacc

SEQ ID NO: 2465982 - RNA, 19 nt, Artificial Sequence
  Description of Artificial Sequence: Synthetic oligonucleotide
gugaagcaugcagcaggau

SEQ ID NO: 2465983 - RNA, 19 nt, Artificial Sequence
  Description of Artificial Sequence: Synthetic oligonucleotide
cucuaggagcagucccauu

SEQ ID NO: 2465984 - RNA, 19 nt, Artificial Sequence
  Description of Artificial Sequence: Synthetic oligonucleotide
ccggccagagcgagacuga

SEQ ID NO: 2465985 - RNA, 19 nt, Artificial Sequence
  Description of Artificial Sequence: Synthetic oligonucleotide
gcaccgcagccaggcaggc

SEQ ID NO: 2465986 - RNA, 19 nt, Artificial Sequence
  Description of Artificial Sequence: Synthetic oligonucleotide
gcaccggcgcugugaugca

SEQ ID NO: 2465987 - RNA, 19 nt, Artificial Sequence
  Description of Artificial Sequence: Synthetic oligonucleotide
caccgcagccaggcaggca

SEQ ID NO: 2465988 - RNA, 19 nt, Artificial Sequence
  Description of Artificial Sequence: Synthetic oligonucleotide
ggaguccgcuuuagaccaa

SEQ ID NO: 2465989 - RNA, 19 nt, Artificial Sequence
  Description of Artificial Sequence: Synthetic oligonucleotide
cugcgacggcagcggcgca

SEQ ID NO: 2465990 - RNA, 19 nt, Artificial Sequence
  Description of Artificial Sequence: Synthetic oligonucleotide
gcgcagaccccaagacaaa

SEQ ID NO: 2465991 - RNA, 19 nt, Artificial Sequence
  Description of Artificial Sequence: Synthetic oligonucleotide
ccccgagggccaccaccac

SEQ ID NO: 2465992 - RNA, 19 nt, Artificial Sequence
  Description of Artificial Sequence: Synthetic oligonucleotide
cgacggcagcggcgcauag

SEQ ID NO: 2465993 - RNA, 19 nt, Artificial Sequence
  Description of Artificial Sequence: Synthetic oligonucleotide
cggcagcggcgcauagcug

SEQ ID NO: 2465994 - RNA, 19 nt, Artificial Sequence
  Description of Artificial Sequence: Synthetic oligonucleotide
gcgacggcagcggcgcaua

SEQ ID NO: 2465995 - RNA, 19 nt, Artificial Sequence
  Description of Artificial Sequence: Synthetic oligonucleotide
cggcgcugugaugcagagc

SEQ ID NO: 2465996 - RNA, 19 nt, Artificial Sequence
  Description of Artificial Sequence: Synthetic oligonucleotide
cgcauagcugcacggguuu

SEQ ID NO: 2465997 - RNA, 19 nt, Artificial Sequence
  Description of Artificial Sequence: Synthetic oligonucleotide
ccucuaggagcagucccau

SEQ ID NO: 2465998 - RNA, 19 nt, Artificial Sequence
  Description of Artificial Sequence: Synthetic oligonucleotide
cuccgacauccugcggguu

SEQ ID NO: 2465999 - RNA, 19 nt, Artificial Sequence
  Description of Artificial Sequence: Synthetic oligonucleotide
gcgccgcccacggcccaga

SEQ ID NO: 2466000 - RNA, 19 nt, Artificial Sequence
  Description of Artificial Sequence: Synthetic oligonucleotide
gccggaccuccgacauccu

SEQ ID NO: 2466001 - RNA, 19 nt, Artificial Sequence
  Description of Artificial Sequence: Synthetic oligonucleotide
cggccagagcgagacugau

SEQ ID NO: 2466002 - RNA, 19 nt, Artificial Sequence
  Description of Artificial Sequence: Synthetic oligonucleotide
cgacauccugcggguugcu

SEQ ID NO: 2466003 - RNA, 19 nt, Artificial Sequence
  Description of Artificial Sequence: Synthetic oligonucleotide
cgcccacggcccagagaau

SEQ ID NO: 2466004 - RNA, 19 nt, Artificial Sequence
  Description of Artificial Sequence: Synthetic oligonucleotide
aauaacaaaagcuugaggc

SEQ ID NO: 2466005 - RNA, 19 nt, Artificial Sequence
  Description of Artificial Sequence: Synthetic oligonucleotide
  modified_base (10)..(10): a, c, u, g, unknown or other
ucaguauacnguuuuaucc

SEQ ID NO: 2466006 - RNA, 19 nt, Artificial Sequence
  Description of Artificial Sequence: Synthetic oligonucleotide
uuaaaugcacuucacauca

SEQ ID NO: 2466007 - RNA, 19 nt, Artificial Sequence
  Description of Artificial Sequence: Synthetic oligonucleotide
aaauggacaaacucuucac

SEQ ID NO: 2466008 - RNA, 19 nt, Artificial Sequence
  Description of Artificial Sequence: Synthetic oligonucleotide
aaaucuauagugucaaagu

SEQ ID NO: 2466009 - RNA, 19 nt, Artificial Sequence
  Description of Artificial Sequence: Synthetic oligonucleotide
aaaaucuauagugucaaag

SEQ ID NO: 2466010 - RNA, 19 nt, Artificial Sequence
  Description of Artificial Sequence: Synthetic oligonucleotide
aacacuaucauguggagaa

SEQ ID NO: 2466011 - RNA, 19 nt, Artificial Sequence
  Description of Artificial Sequence: Synthetic oligonucleotide
aaauguaaaggaaaaguag

SEQ ID NO: 2466012 - RNA, 19 nt, Artificial Sequence
  Description of Artificial Sequence: Synthetic oligonucleotide
aaaaguagaccccuguuca

SEQ ID NO: 2466013 - RNA, 19 nt, Artificial Sequence
  Description of Artificial Sequence: Synthetic oligonucleotide
ccaacaaacauuuaaaugc

SEQ ID NO: 2466014 - RNA, 19 nt, Artificial Sequence
  Description of Artificial Sequence: Synthetic oligonucleotide
uguaugaaagacuacggug

SEQ ID NO: 2466015 - RNA, 19 nt, Artificial Sequence
  Description of Artificial Sequence: Synthetic oligonucleotide
ucuauagugucaaaguucu

SEQ ID NO: 2466016 - RNA, 19 nt, Artificial Sequence
  Description of Artificial Sequence: Synthetic oligonucleotide
aagacuacggugucacugc

SEQ ID NO: 2466017 - RNA, 19 nt, Artificial Sequence
  Description of Artificial Sequence: Synthetic oligonucleotide
aaaucauaaauaacaaaag

SEQ ID NO: 2466018 - RNA, 19 nt, Artificial Sequence
  Description of Artificial Sequence: Synthetic oligonucleotide
aguuaagccacagucaccc

SEQ ID NO: 2466019 - RNA, 19 nt, Artificial Sequence
  Description of Artificial Sequence: Synthetic oligonucleotide
agugaagugucccucagcg

SEQ ID NO: 2466020 - RNA, 19 nt, Artificial Sequence
  Description of Artificial Sequence: Synthetic oligonucleotide
caaaucauaaauaacaaaa

SEQ ID NO: 2466021 - RNA, 19 nt, Artificial Sequence
  Description of Artificial Sequence: Synthetic oligonucleotide
agaauaaagcagcacuuac

SEQ ID NO: 2466022 - RNA, 19 nt, Artificial Sequence
  Description of Artificial Sequence: Synthetic oligonucleotide
  modified_base (18)..(18): a, c, u, g, unknown or other
aacaguugucaguauacng

SEQ ID NO: 2466023 - RNA, 19 nt, Artificial Sequence
  Description of Artificial Sequence: Synthetic oligonucleotide
uuuuaucccuuuaucauug

SEQ ID NO: 2466024 - RNA, 19 nt, Artificial Sequence
  Description of Artificial Sequence: Synthetic oligonucleotide
aauguaaaggaaaaguaga

SEQ ID NO: 2466025 - RNA, 19 nt, Artificial Sequence
  Description of Artificial Sequence: Synthetic oligonucleotide
auuuaaaugcacuucacau

SEQ ID NO: 2466026 - RNA, 19 nt, Artificial Sequence
  Description of Artificial Sequence: Synthetic oligonucleotide
ugaagaaauggacaaacuc

SEQ ID NO: 2466027 - RNA, 19 nt, Artificial Sequence
  Description of Artificial Sequence: Synthetic oligonucleotide
uuauuaacuguucuucuac

SEQ ID NO: 2466028 - RNA, 19 nt, Artificial Sequence
  Description of Artificial Sequence: Synthetic oligonucleotide
gaguguaugaaagacuacg

SEQ ID NO: 2466029 - RNA, 19 nt, Artificial Sequence
  Description of Artificial Sequence: Synthetic oligonucleotide
ucuucuacagcacugcaac

SEQ ID NO: 2466030 - RNA, 19 nt, Artificial Sequence
  Description of Artificial Sequence: Synthetic oligonucleotide
uuagauuccuagcagcagc

SEQ ID NO: 2466031 - RNA, 19 nt, Artificial Sequence
  Description of Artificial Sequence: Synthetic oligonucleotide
aaaagcuugaggcagcuua

SEQ ID NO: 2466032 - RNA, 19 nt, Artificial Sequence
  Description of Artificial Sequence: Synthetic oligonucleotide
uauagugucaaaguucuug

SEQ ID NO: 2466033 - RNA, 19 nt, Artificial Sequence
  Description of Artificial Sequence: Synthetic oligonucleotide
aaaugcacuucacaucaag

SEQ ID NO: 2466034 - RNA, 19 nt, Artificial Sequence
  Description of Artificial Sequence: Synthetic oligonucleotide
uaaacaguugucaguauac

SEQ ID NO: 2466035 - RNA, 19 nt, Artificial Sequence
  Description of Artificial Sequence: Synthetic oligonucleotide
uaacuguucuucuacagca

SEQ ID NO: 2466036 - RNA, 19 nt, Artificial Sequence
  Description of Artificial Sequence: Synthetic oligonucleotide
ugaguuaagccacagucac

SEQ ID NO: 2466037 - RNA, 19 nt, Artificial Sequence
  Description of Artificial Sequence: Synthetic oligonucleotide
agcuacaguauucaaauca

SEQ ID NO: 2466038 - RNA, 19 nt, Artificial Sequence
  Description of Artificial Sequence: Synthetic oligonucleotide
uguuaaaaucuauaguguc

SEQ ID NO: 2466039 - RNA, 19 nt, Artificial Sequence
  Description of Artificial Sequence: Synthetic oligonucleotide
acugguaacacuaucaugu

SEQ ID NO: 2466040 - RNA, 19 nt, Artificial Sequence
  Description of Artificial Sequence: Synthetic oligonucleotide
agcuuagauuccuagcagc

SEQ ID NO: 2466041 - RNA, 19 nt, Artificial Sequence
  Description of Artificial Sequence: Synthetic oligonucleotide
  modified_base (3)..(3): a, c, u, g, unknown or other
acnguuuuaucccuuuauc

SEQ ID NO: 2466042 - RNA, 19 nt, Artificial Sequence
  Description of Artificial Sequence: Synthetic oligonucleotide
uaaauaacaaaagcuugag

SEQ ID NO: 2466043 - RNA, 19 nt, Artificial Sequence
  Description of Artificial Sequence: Synthetic oligonucleotide
  modified_base (9)..(9): a, c, u, g, unknown or other
caguauacnguuuuauccc

SEQ ID NO: 2466044 - RNA, 19 nt, Artificial Sequence
  Description of Artificial Sequence: Synthetic oligonucleotide
aaucuauagugucaaaguu

SEQ ID NO: 2466045 - RNA, 19 nt, Artificial Sequence
  Description of Artificial Sequence: Synthetic oligonucleotide
auaacaaaagcuugaggca

SEQ ID NO: 2466046 - RNA, 19 nt, Artificial Sequence
  Description of Artificial Sequence: Synthetic oligonucleotide
uguaaaggaaaaguagacc

SEQ ID NO: 2466047 - RNA, 19 nt, Artificial Sequence
  Description of Artificial Sequence: Synthetic oligonucleotide
aaaguagaccccuguucac

SEQ ID NO: 2466048 - RNA, 19 nt, Artificial Sequence
  Description of Artificial Sequence: Synthetic oligonucleotide
uaacaaaagcuugaggcag

SEQ ID NO: 2466049 - RNA, 19 nt, Artificial Sequence
  Description of Artificial Sequence: Synthetic oligonucleotide
aagccuucagaaaucaggg

SEQ ID NO: 2466050 - RNA, 19 nt, Artificial Sequence
  Description of Artificial Sequence: Synthetic oligonucleotide
uggacaaacucuucacugg

SEQ ID NO: 2466051 - RNA, 19 nt, Artificial Sequence
  Description of Artificial Sequence: Synthetic oligonucleotide
ugagacaugcaaaccauac

SEQ ID NO: 2466052 - RNA, 19 nt, Artificial Sequence
  Description of Artificial Sequence: Synthetic oligonucleotide
ucaaaucauaaauaacaaa

SEQ ID NO: 2466053 - RNA, 19 nt, Artificial Sequence
  Description of Artificial Sequence: Synthetic oligonucleotide
augcaaaccauacauacaa

SEQ ID NO: 2466054 - RNA, 19 nt, Artificial Sequence
  Description of Artificial Sequence: Synthetic oligonucleotide
ugguaacacuaucaugugg

SEQ ID NO: 2466055 - RNA, 19 nt, Artificial Sequence
  Description of Artificial Sequence: Synthetic oligonucleotide
aaagacuuguuuacuauca

SEQ ID NO: 2466056 - RNA, 19 nt, Artificial Sequence
  Description of Artificial Sequence: Synthetic oligonucleotide
cuucccaguguuaaggacc

SEQ ID NO: 2466057 - RNA, 19 nt, Artificial Sequence
  Description of Artificial Sequence: Synthetic oligonucleotide
uucauccuaauguucuuag

SEQ ID NO: 2466058 - RNA, 19 nt, Artificial Sequence
  Description of Artificial Sequence: Synthetic oligonucleotide
auguaaaggaaaaguagac

SEQ ID NO: 2466059 - RNA, 19 nt, Artificial Sequence
  Description of Artificial Sequence: Synthetic oligonucleotide
auggacaaacucuucacug

SEQ ID NO: 2466060 - RNA, 19 nt, Artificial Sequence
  Description of Artificial Sequence: Synthetic oligonucleotide
uguaguagugaaguguccc

SEQ ID NO: 2466061 - RNA, 19 nt, Artificial Sequence
  Description of Artificial Sequence: Synthetic oligonucleotide
ugauucuguagccaaucug

SEQ ID NO: 2466062 - RNA, 19 nt, Artificial Sequence
  Description of Artificial Sequence: Synthetic oligonucleotide
ucuacagcacugcaacaag

SEQ ID NO: 2466063 - RNA, 19 nt, Artificial Sequence
  Description of Artificial Sequence: Synthetic oligonucleotide
uggagaaagacuuguuuac

SEQ ID NO: 2466064 - RNA, 19 nt, Artificial Sequence
  Description of Artificial Sequence: Synthetic oligonucleotide
aguguauguaaacuuuugu

SEQ ID NO: 2466065 - RNA, 19 nt, Artificial Sequence
  Description of Artificial Sequence: Synthetic oligonucleotide
auagugucaaaguucuuga

SEQ ID NO: 2466066 - RNA, 19 nt, Artificial Sequence
  Description of Artificial Sequence: Synthetic oligonucleotide
cauguaguagugaaguguc

SEQ ID NO: 2466067 - RNA, 19 nt, Artificial Sequence
  Description of Artificial Sequence: Synthetic oligonucleotide
aagaguguaugaaagacua

SEQ ID NO: 2466068 - RNA, 19 nt, Artificial Sequence
  Description of Artificial Sequence: Synthetic oligonucleotide
uuaucccuuuaucauugag

SEQ ID NO: 2466069 - RNA, 19 nt, Artificial Sequence
  Description of Artificial Sequence: Synthetic oligonucleotide
uuuacaguacugguaacac

SEQ ID NO: 2466070 - RNA, 19 nt, Artificial Sequence
  Description of Artificial Sequence: Synthetic oligonucleotide
  modified_base (4)..(4): a, c, u, g, unknown or other
uacnguuuuaucccuuuau

SEQ ID NO: 2466071 - RNA, 19 nt, Artificial Sequence
  Description of Artificial Sequence: Synthetic oligonucleotide
gaaaucagggcugauucug

SEQ ID NO: 2466072 - RNA, 19 nt, Artificial Sequence
  Description of Artificial Sequence: Synthetic oligonucleotide
auccuaauguucuuagcug

SEQ ID NO: 2466073 - RNA, 19 nt, Artificial Sequence
  Description of Artificial Sequence: Synthetic oligonucleotide
auacagaagcaguggcacc

SEQ ID NO: 2466074 - RNA, 19 nt, Artificial Sequence
  Description of Artificial Sequence: Synthetic oligonucleotide
aguguaugaaagacuacgg

SEQ ID NO: 2466075 - RNA, 19 nt, Artificial Sequence
  Description of Artificial Sequence: Synthetic oligonucleotide
gauuccuagcagcagccag

SEQ ID NO: 2466076 - RNA, 19 nt, Artificial Sequence
  Description of Artificial Sequence: Synthetic oligonucleotide
gaaagacuuguuuacuauc

SEQ ID NO: 2466077 - RNA, 19 nt, Artificial Sequence
  Description of Artificial Sequence: Synthetic oligonucleotide
caugcguuuacaguacugg

SEQ ID NO: 2466078 - RNA, 19 nt, Artificial Sequence
  Description of Artificial Sequence: Synthetic oligonucleotide
gaagaaauggacaaacucu

SEQ ID NO: 2466079 - RNA, 19 nt, Artificial Sequence
  Description of Artificial Sequence: Synthetic oligonucleotide
  modified_base (8)..(8): a, c, u, g, unknown or other
aguauacnguuuuaucccu

SEQ ID NO: 2466080 - RNA, 19 nt, Artificial Sequence
  Description of Artificial Sequence: Synthetic oligonucleotide
ugaaagacuacggugucac

SEQ ID NO: 2466081 - RNA, 19 nt, Artificial Sequence
  Description of Artificial Sequence: Synthetic oligonucleotide
uagauuccuagcagcagcc

SEQ ID NO: 2466082 - RNA, 19 nt, Artificial Sequence
  Description of Artificial Sequence: Synthetic oligonucleotide
aagcuacaguauucaaauc

SEQ ID NO: 2466083 - RNA, 19 nt, Artificial Sequence
  Description of Artificial Sequence: Synthetic oligonucleotide
aucaaguguauguaaacuu

SEQ ID NO: 2466084 - RNA, 19 nt, Artificial Sequence
  Description of Artificial Sequence: Synthetic oligonucleotide
uacggugucacugcaaaug

SEQ ID NO: 2466085 - RNA, 19 nt, Artificial Sequence
  Description of Artificial Sequence: Synthetic oligonucleotide
cauugagacaugcaaacca

SEQ ID NO: 2466086 - RNA, 19 nt, Artificial Sequence
  Description of Artificial Sequence: Synthetic oligonucleotide
uccacuucuuguaaacagu

SEQ ID NO: 2466087 - RNA, 19 nt, Artificial Sequence
  Description of Artificial Sequence: Synthetic oligonucleotide
aagaaauggacaaacucuu

SEQ ID NO: 2466088 - RNA, 19 nt, Artificial Sequence
  Description of Artificial Sequence: Synthetic oligonucleotide
uucacuggagcuccuguga

SEQ ID NO: 2466089 - RNA, 19 nt, Artificial Sequence
  Description of Artificial Sequence: Synthetic oligonucleotide
gaagcaguggcaccacugc

SEQ ID NO: 2466090 - RNA, 19 nt, Artificial Sequence
  Description of Artificial Sequence: Synthetic oligonucleotide
aguacugguaacacuauca

SEQ ID NO: 2466091 - RNA, 19 nt, Artificial Sequence
  Description of Artificial Sequence: Synthetic oligonucleotide
ugcaaaccauacauacaag

SEQ ID NO: 2466092 - RNA, 19 nt, Artificial Sequence
  Description of Artificial Sequence: Synthetic oligonucleotide
caaacugagcgcuucccag

SEQ ID NO: 2466093 - RNA, 19 nt, Artificial Sequence
  Description of Artificial Sequence: Synthetic oligonucleotide
  modified_base (2)..(2): a, c, u, g, unknown or other
cnguuuuaucccuuuauca

SEQ ID NO: 2466094 - RNA, 19 nt, Artificial Sequence
  Description of Artificial Sequence: Synthetic oligonucleotide
agccuucagaaaucagggc

SEQ ID NO: 2466095 - RNA, 19 nt, Artificial Sequence
  Description of Artificial Sequence: Synthetic oligonucleotide
cacucauucaaagccaagc

SEQ ID NO: 2466096 - RNA, 19 nt, Artificial Sequence
  Description of Artificial Sequence: Synthetic oligonucleotide
aacugagcgcuucccagug

SEQ ID NO: 2466097 - RNA, 19 nt, Artificial Sequence
  Description of Artificial Sequence: Synthetic oligonucleotide
  modified_base (17)..(17): a, c, u, g, unknown or other
acaguugucaguauacngu

SEQ ID NO: 2466098 - RNA, 19 nt, Artificial Sequence
  Description of Artificial Sequence: Synthetic oligonucleotide
aacuguucuucuacagcac

SEQ ID NO: 2466099 - RNA, 19 nt, Artificial Sequence
  Description of Artificial Sequence: Synthetic oligonucleotide
cuucuuguaaacaguuguc

SEQ ID NO: 2466100 - RNA, 19 nt, Artificial Sequence
  Description of Artificial Sequence: Synthetic oligonucleotide
gccaacaaacauuuaaaug

SEQ ID NO: 2466101 - RNA, 19 nt, Artificial Sequence
  Description of Artificial Sequence: Synthetic oligonucleotide
  modified_base (19)..(19): a, c, u, g, unknown or other
aaacaguugucaguauacn

SEQ ID NO: 2466102 - RNA, 19 nt, Artificial Sequence
  Description of Artificial Sequence: Synthetic oligonucleotide
uaauguucuuagcugcauc

SEQ ID NO: 2466103 - RNA, 19 nt, Artificial Sequence
  Description of Artificial Sequence: Synthetic oligonucleotide
cuaucauguggagaaagac

SEQ ID NO: 2466104 - RNA, 19 nt, Artificial Sequence
  Description of Artificial Sequence: Synthetic oligonucleotide
cugaaggcaaacugagcgc

SEQ ID NO: 2466105 - RNA, 19 nt, Artificial Sequence
  Description of Artificial Sequence: Synthetic oligonucleotide
uuacuaucaucucuucuuu

SEQ ID NO: 2466106 - RNA, 19 nt, Artificial Sequence
  Description of Artificial Sequence: Synthetic oligonucleotide
  modified_base (11)..(11): a, c, u, g, unknown or other
gucaguauacnguuuuauc

SEQ ID NO: 2466107 - RNA, 19 nt, Artificial Sequence
  Description of Artificial Sequence: Synthetic oligonucleotide
cuacagcacugcaacaagc

SEQ ID NO: 2466108 - RNA, 19 nt, Artificial Sequence
  Description of Artificial Sequence: Synthetic oligonucleotide
ugcguuuacaguacuggua

SEQ ID NO: 2466109 - RNA, 19 nt, Artificial Sequence
  Description of Artificial Sequence: Synthetic oligonucleotide
ucauugagacaugcaaacc

SEQ ID NO: 2466110 - RNA, 19 nt, Artificial Sequence
  Description of Artificial Sequence: Synthetic oligonucleotide
ucauccuaauguucuuagc

SEQ ID NO: 2466111 - RNA, 19 nt, Artificial Sequence
  Description of Artificial Sequence: Synthetic oligonucleotide
aagccaacaaacauuuaaa

SEQ ID NO: 2466112 - RNA, 19 nt, Artificial Sequence
  Description of Artificial Sequence: Synthetic oligonucleotide
guaacacuaucauguggag

SEQ ID NO: 2466113 - RNA, 19 nt, Artificial Sequence
  Description of Artificial Sequence: Synthetic oligonucleotide
aguagugaagugucccuca

SEQ ID NO: 2466114 - RNA, 19 nt, Artificial Sequence
  Description of Artificial Sequence: Synthetic oligonucleotide
uuacaguacugguaacacu

SEQ ID NO: 2466115 - RNA, 19 nt, Artificial Sequence
  Description of Artificial Sequence: Synthetic oligonucleotide
ucauguggagaaagacuug

SEQ ID NO: 2466116 - RNA, 19 nt, Artificial Sequence
  Description of Artificial Sequence: Synthetic oligonucleotide
aguagaccccuguucacug

SEQ ID NO: 2466117 - RNA, 19 nt, Artificial Sequence
  Description of Artificial Sequence: Synthetic oligonucleotide
uucuacagcacugcaacaa

SEQ ID NO: 2466118 - RNA, 19 nt, Artificial Sequence
  Description of Artificial Sequence: Synthetic oligonucleotide
aacaagcuacaguauucaa

SEQ ID NO: 2466119 - RNA, 19 nt, Artificial Sequence
  Description of Artificial Sequence: Synthetic oligonucleotide
ucaagccuucagaaaucag

SEQ ID NO: 2466120 - RNA, 19 nt, Artificial Sequence
  Description of Artificial Sequence: Synthetic oligonucleotide
  modified_base (6)..(6): a, c, u, g, unknown or other
uauacnguuuuaucccuuu

SEQ ID NO: 2466121 - RNA, 19 nt, Artificial Sequence
  Description of Artificial Sequence: Synthetic oligonucleotide
cauucaaagccaagcaaca

SEQ ID NO: 2466122 - RNA, 19 nt, Artificial Sequence
  Description of Artificial Sequence: Synthetic oligonucleotide
acuacggugucacugcaaa

SEQ ID NO: 2466123 - RNA, 19 nt, Artificial Sequence
  Description of Artificial Sequence: Synthetic oligonucleotide
gguaacacuaucaugugga

SEQ ID NO: 2466124 - RNA, 19 nt, Artificial Sequence
  Description of Artificial Sequence: Synthetic oligonucleotide
acccauuauuaacuguucu

SEQ ID NO: 2466125 - RNA, 19 nt, Artificial Sequence
  Description of Artificial Sequence: Synthetic oligonucleotide
uucaagccuucagaaauca

SEQ ID NO: 2466126 - RNA, 19 nt, Artificial Sequence
  Description of Artificial Sequence: Synthetic oligonucleotide
cuuccaugcguuuacagua

SEQ ID NO: 2466127 - RNA, 19 nt, Artificial Sequence
  Description of Artificial Sequence: Synthetic oligonucleotide
aaguagaccccuguucacu

SEQ ID NO: 2466128 - RNA, 19 nt, Artificial Sequence
  Description of Artificial Sequence: Synthetic oligonucleotide
caaaccauacauacaagua

SEQ ID NO: 2466129 - RNA, 19 nt, Artificial Sequence
  Description of Artificial Sequence: Synthetic oligonucleotide
ggaagaguguaugaaagac

SEQ ID NO: 2466130 - RNA, 19 nt, Artificial Sequence
  Description of Artificial Sequence: Synthetic oligonucleotide
uaacacuaucauguggaga

SEQ ID NO: 2466131 - RNA, 19 nt, Artificial Sequence
  Description of Artificial Sequence: Synthetic oligonucleotide
ucacucucucuccccgugg

SEQ ID NO: 2466132 - RNA, 19 nt, Artificial Sequence
  Description of Artificial Sequence: Synthetic oligonucleotide
uuccaugcguuuacaguac

SEQ ID NO: 2466133 - RNA, 19 nt, Artificial Sequence
  Description of Artificial Sequence: Synthetic oligonucleotide
cuuagauuccuagcagcag

SEQ ID NO: 2466134 - RNA, 19 nt, Artificial Sequence
  Description of Artificial Sequence: Synthetic oligonucleotide
guaugaaagacuacggugu

SEQ ID NO: 2466135 - RNA, 19 nt, Artificial Sequence
  Description of Artificial Sequence: Synthetic oligonucleotide
guaaacaguugucaguaua

SEQ ID NO: 2466136 - RNA, 19 nt, Artificial Sequence
  Description of Artificial Sequence: Synthetic oligonucleotide
  modified_base (12)..(12): a, c, u, g, unknown or other
ugucaguauacnguuuuau

SEQ ID NO: 2466137 - RNA, 19 nt, Artificial Sequence
  Description of Artificial Sequence: Synthetic oligonucleotide
uacccauuauuaacuguuc

SEQ ID NO: 2466138 - RNA, 19 nt, Artificial Sequence
  Description of Artificial Sequence: Synthetic oligonucleotide
uccccauguaguagugaag

SEQ ID NO: 2466139 - RNA, 19 nt, Artificial Sequence
  Description of Artificial Sequence: Synthetic oligonucleotide
uguuuacuaucaucucuuc

SEQ ID NO: 2466140 - RNA, 19 nt, Artificial Sequence
  Description of Artificial Sequence: Synthetic oligonucleotide
accacugcuggaucaggag

SEQ ID NO: 2466141 - RNA, 19 nt, Artificial Sequence
  Description of Artificial Sequence: Synthetic oligonucleotide
auguaguagugaagugucc

SEQ ID NO: 2466142 - RNA, 19 nt, Artificial Sequence
  Description of Artificial Sequence: Synthetic oligonucleotide
cacuaucauguggagaaag

SEQ ID NO: 2466143 - RNA, 19 nt, Artificial Sequence
  Description of Artificial Sequence: Synthetic oligonucleotide
cuucaagccuucagaaauc

SEQ ID NO: 2466144 - RNA, 19 nt, Artificial Sequence
  Description of Artificial Sequence: Synthetic oligonucleotide
cucauacccauuauuaacu

SEQ ID NO: 2466145 - RNA, 19 nt, Artificial Sequence
  Description of Artificial Sequence: Synthetic oligonucleotide
uuuaucccuuuaucauuga

SEQ ID NO: 2466146 - RNA, 19 nt, Artificial Sequence
  Description of Artificial Sequence: Synthetic oligonucleotide
ucuccccgugggaagagug

SEQ ID NO: 2466147 - RNA, 19 nt, Artificial Sequence
  Description of Artificial Sequence: Synthetic oligonucleotide
cauccuaauguucuuagcu

SEQ ID NO: 2466148 - RNA, 19 nt, Artificial Sequence
  Description of Artificial Sequence: Synthetic oligonucleotide
gcagcuuagauuccuagca

SEQ ID NO: 2466149 - RNA, 19 nt, Artificial Sequence
  Description of Artificial Sequence: Synthetic oligonucleotide
auccccauguaguagugaa

SEQ ID NO: 2466150 - RNA, 19 nt, Artificial Sequence
  Description of Artificial Sequence: Synthetic oligonucleotide
gcuccugugaguuaagcca

SEQ ID NO: 2466151 - RNA, 19 nt, Artificial Sequence
  Description of Artificial Sequence: Synthetic oligonucleotide
augcguuuacaguacuggu

SEQ ID NO: 2466152 - RNA, 19 nt, Artificial Sequence
  Description of Artificial Sequence: Synthetic oligonucleotide
cacuucuuguaaacaguug

SEQ ID NO: 2466153 - RNA, 19 nt, Artificial Sequence
  Description of Artificial Sequence: Synthetic oligonucleotide
caugcaaaccauacauaca

SEQ ID NO: 2466154 - RNA, 19 nt, Artificial Sequence
  Description of Artificial Sequence: Synthetic oligonucleotide
auaaagcagcacuuacaaa

SEQ ID NO: 2466155 - RNA, 19 nt, Artificial Sequence
  Description of Artificial Sequence: Synthetic oligonucleotide
  modified_base (14)..(14): a, c, u, g, unknown or other
guugucaguauacnguuuu

SEQ ID NO: 2466156 - RNA, 19 nt, Artificial Sequence
  Description of Artificial Sequence: Synthetic oligonucleotide
uucuguagccaaucugguc

SEQ ID NO: 2466157 - RNA, 19 nt, Artificial Sequence
  Description of Artificial Sequence: Synthetic oligonucleotide
ucagaaaucagggcugauu

SEQ ID NO: 2466158 - RNA, 19 nt, Artificial Sequence
  Description of Artificial Sequence: Synthetic oligonucleotide
cuucacuggagcuccugug

SEQ ID NO: 2466159 - RNA, 19 nt, Artificial Sequence
  Description of Artificial Sequence: Synthetic oligonucleotide
aaucagggcugauucugua

SEQ ID NO: 2466160 - RNA, 19 nt, Artificial Sequence
  Description of Artificial Sequence: Synthetic oligonucleotide
aaaucagggcugauucugu

SEQ ID NO: 2466161 - RNA, 19 nt, Artificial Sequence
  Description of Artificial Sequence: Synthetic oligonucleotide
cacaucaaguguauguaaa

SEQ ID NO: 2466162 - RNA, 19 nt, Artificial Sequence
  Description of Artificial Sequence: Synthetic oligonucleotide
  modified_base (13)..(13): a, c, u, g, unknown or other
uugucaguauacnguuuua

SEQ ID NO: 2466163 - RNA, 19 nt, Artificial Sequence
  Description of Artificial Sequence: Synthetic oligonucleotide
cuuguaaacaguugucagu

SEQ ID NO: 2466164 - RNA, 19 nt, Artificial Sequence
  Description of Artificial Sequence: Synthetic oligonucleotide
auugagacaugcaaaccau

SEQ ID NO: 2466165 - RNA, 19 nt, Artificial Sequence
  Description of Artificial Sequence: Synthetic oligonucleotide
cacucacucucucuccccg

SEQ ID NO: 2466166 - RNA, 19 nt, Artificial Sequence
  Description of Artificial Sequence: Synthetic oligonucleotide
auacucacucacucucucu

SEQ ID NO: 2466167 - RNA, 19 nt, Artificial Sequence
  Description of Artificial Sequence: Synthetic oligonucleotide
acuaucauguggagaaaga

SEQ ID NO: 2466168 - RNA, 19 nt, Artificial Sequence
  Description of Artificial Sequence: Synthetic oligonucleotide
cauacucacucacucucuc

SEQ ID NO: 2466169 - RNA, 19 nt, Artificial Sequence
  Description of Artificial Sequence: Synthetic oligonucleotide
uagugucaaaguucuugaa

SEQ ID NO: 2466170 - RNA, 19 nt, Artificial Sequence
  Description of Artificial Sequence: Synthetic oligonucleotide
uccaugcguuuacaguacu

SEQ ID NO: 2466171 - RNA, 19 nt, Artificial Sequence
  Description of Artificial Sequence: Synthetic oligonucleotide
uagccaaucuggucagacu

SEQ ID NO: 2466172 - RNA, 19 nt, Artificial Sequence
  Description of Artificial Sequence: Synthetic oligonucleotide
uggagcuccugugaguuaa

SEQ ID NO: 2466173 - RNA, 19 nt, Artificial Sequence
  Description of Artificial Sequence: Synthetic oligonucleotide
gugaguuaagccacaguca

SEQ ID NO: 2466174 - RNA, 19 nt, Artificial Sequence
  Description of Artificial Sequence: Synthetic oligonucleotide
cagggcugauucuguagcc

SEQ ID NO: 2466175 - RNA, 19 nt, Artificial Sequence
  Description of Artificial Sequence: Synthetic oligonucleotide
cacucucucuccccguggg

SEQ ID NO: 2466176 - RNA, 19 nt, Artificial Sequence
  Description of Artificial Sequence: Synthetic oligonucleotide
ucccucagcggcuuccaga

SEQ ID NO: 2466177 - RNA, 19 nt, Artificial Sequence
  Description of Artificial Sequence: Synthetic oligonucleotide
gaguuaagccacagucacc

SEQ ID NO: 2466178 - RNA, 19 nt, Artificial Sequence
  Description of Artificial Sequence: Synthetic oligonucleotide
guguaugaaagacuacggu

SEQ ID NO: 2466179 - RNA, 19 nt, Artificial Sequence
  Description of Artificial Sequence: Synthetic oligonucleotide
ggcagcuuagauuccuagc

SEQ ID NO: 2466180 - RNA, 19 nt, Artificial Sequence
  Description of Artificial Sequence: Synthetic oligonucleotide
guagccaaucuggucagac

SEQ ID NO: 2466181 - RNA, 19 nt, Artificial Sequence
  Description of Artificial Sequence: Synthetic oligonucleotide
guuuuaucccuuuaucauu

SEQ ID NO: 2466182 - RNA, 19 nt, Artificial Sequence
  Description of Artificial Sequence: Synthetic oligonucleotide
uacuaucaucucuucuuuu

SEQ ID NO: 2466183 - RNA, 19 nt, Artificial Sequence
  Description of Artificial Sequence: Synthetic oligonucleotide
ggucagacucucugaaggc

SEQ ID NO: 2466184 - RNA, 19 nt, Artificial Sequence
  Description of Artificial Sequence: Synthetic oligonucleotide
  modified_base (5)..(5): a, c, u, g, unknown or other
auacnguuuuaucccuuua

SEQ ID NO: 2466185 - RNA, 19 nt, Artificial Sequence
  Description of Artificial Sequence: Synthetic oligonucleotide
gcguuuacaguacugguaa

SEQ ID NO: 2466186 - RNA, 19 nt, Artificial Sequence
  Description of Artificial Sequence: Synthetic oligonucleotide
gcaaaccauacauacaagu

SEQ ID NO: 2466187 - RNA, 19 nt, Artificial Sequence
  Description of Artificial Sequence: Synthetic oligonucleotide
acaaaagcuugaggcagcu

SEQ ID NO: 2466188 - RNA, 19 nt, Artificial Sequence
  Description of Artificial Sequence: Synthetic oligonucleotide
agcgcuucccaguguuaag

SEQ ID NO: 2466189 - RNA, 19 nt, Artificial Sequence
  Description of Artificial Sequence: Synthetic oligonucleotide
agcaguggcaccacugcug

SEQ ID NO: 2466190 - RNA, 19 nt, Artificial Sequence
  Description of Artificial Sequence: Synthetic oligonucleotide
augaaagacuacgguguca

SEQ ID NO: 2466191 - RNA, 19 nt, Artificial Sequence
  Description of Artificial Sequence: Synthetic oligonucleotide
cagcacugcaacaagccaa

SEQ ID NO: 2466192 - RNA, 19 nt, Artificial Sequence
  Description of Artificial Sequence: Synthetic oligonucleotide
ugcaucuuccaugcguuua

SEQ ID NO: 2466193 - RNA, 19 nt, Artificial Sequence
  Description of Artificial Sequence: Synthetic oligonucleotide
caguacugguaacacuauc

SEQ ID NO: 2466194 - RNA, 19 nt, Artificial Sequence
  Description of Artificial Sequence: Synthetic oligonucleotide
ggacaaacucuucacugga

SEQ ID NO: 2466195 - RNA, 19 nt, Artificial Sequence
  Description of Artificial Sequence: Synthetic oligonucleotide
guucuucuacagcacugca

SEQ ID NO: 2466196 - RNA, 19 nt, Artificial Sequence
  Description of Artificial Sequence: Synthetic oligonucleotide
gucacccucauacccauua

SEQ ID NO: 2466197 - RNA, 19 nt, Artificial Sequence
  Description of Artificial Sequence: Synthetic oligonucleotide
agacuacggugucacugca

SEQ ID NO: 2466198 - RNA, 19 nt, Artificial Sequence
  Description of Artificial Sequence: Synthetic oligonucleotide
cuacaguauucaaaucaua

SEQ ID NO: 2466199 - RNA, 19 nt, Artificial Sequence
  Description of Artificial Sequence: Synthetic oligonucleotide
caucaaguguauguaaacu

SEQ ID NO: 2466200 - RNA, 19 nt, Artificial Sequence
  Description of Artificial Sequence: Synthetic oligonucleotide
accgcauccccauguagua

SEQ ID NO: 2466201 - RNA, 19 nt, Artificial Sequence
  Description of Artificial Sequence: Synthetic oligonucleotide
gucagacucucugaaggca

SEQ ID NO: 2466202 - RNA, 19 nt, Artificial Sequence
  Description of Artificial Sequence: Synthetic oligonucleotide
guacugguaacacuaucau

SEQ ID NO: 2466203 - RNA, 19 nt, Artificial Sequence
  Description of Artificial Sequence: Synthetic oligonucleotide
acauacucacucacucucu

SEQ ID NO: 2466204 - RNA, 19 nt, Artificial Sequence
  Description of Artificial Sequence: Synthetic oligonucleotide
gcaucuuccaugcguuuac

SEQ ID NO: 2466205 - RNA, 19 nt, Artificial Sequence
  Description of Artificial Sequence: Synthetic oligonucleotide
  modified_base (16)..(16): a, c, u, g, unknown or other
caguugucaguauacnguu

SEQ ID NO: 2466206 - RNA, 19 nt, Artificial Sequence
  Description of Artificial Sequence: Synthetic oligonucleotide
gcaacaagccaacaaacau

SEQ ID NO: 2466207 - RNA, 19 nt, Artificial Sequence
  Description of Artificial Sequence: Synthetic oligonucleotide
cuucuacagcacugcaaca

SEQ ID NO: 2466208 - RNA, 19 nt, Artificial Sequence
  Description of Artificial Sequence: Synthetic oligonucleotide
acucacucucucuccccgu

SEQ ID NO: 2466209 - RNA, 19 nt, Artificial Sequence
  Description of Artificial Sequence: Synthetic oligonucleotide
gcgcuucccaguguuaagg

SEQ ID NO: 2466210 - RNA, 19 nt, Artificial Sequence
  Description of Artificial Sequence: Synthetic oligonucleotide
gaccccuguucacuguuaa

SEQ ID NO: 2466211 - RNA, 19 nt, Artificial Sequence
  Description of Artificial Sequence: Synthetic oligonucleotide
agauuccuagcagcagcca

SEQ ID NO: 2466212 - RNA, 19 nt, Artificial Sequence
  Description of Artificial Sequence: Synthetic oligonucleotide
gcaaacugagcgcuuccca

SEQ ID NO: 2466213 - RNA, 19 nt, Artificial Sequence
  Description of Artificial Sequence: Synthetic oligonucleotide
acucucucuccccguggga

SEQ ID NO: 2466214 - RNA, 19 nt, Artificial Sequence
  Description of Artificial Sequence: Synthetic oligonucleotide
uguagccaaucuggucaga

SEQ ID NO: 2466215 - RNA, 19 nt, Artificial Sequence
  Description of Artificial Sequence: Synthetic oligonucleotide
cagccagccauucauccua

SEQ ID NO: 2466216 - RNA, 19 nt, Artificial Sequence
  Description of Artificial Sequence: Synthetic oligonucleotide
cucagcggcuuccagacau

SEQ ID NO: 2466217 - RNA, 19 nt, Artificial Sequence
  Description of Artificial Sequence: Synthetic oligonucleotide
uucagaaaucagggcugau

SEQ ID NO: 2466218 - RNA, 19 nt, Artificial Sequence
  Description of Artificial Sequence: Synthetic oligonucleotide
ccaugcguuuacaguacug

SEQ ID NO: 2466219 - RNA, 19 nt, Artificial Sequence
  Description of Artificial Sequence: Synthetic oligonucleotide
ucagcggcuuccagacauu

SEQ ID NO: 2466220 - RNA, 19 nt, Artificial Sequence
  Description of Artificial Sequence: Synthetic oligonucleotide
  modified_base (15)..(15): a, c, u, g, unknown or other
aguugucaguauacnguuu

SEQ ID NO: 2466221 - RNA, 19 nt, Artificial Sequence
  Description of Artificial Sequence: Synthetic oligonucleotide
gaaagacuacggugucacu

SEQ ID NO: 2466222 - RNA, 19 nt, Artificial Sequence
  Description of Artificial Sequence: Synthetic oligonucleotide
uccuagcagcagccagcca

SEQ ID NO: 2466223 - RNA, 19 nt, Artificial Sequence
  Description of Artificial Sequence: Synthetic oligonucleotide
caccgcauccccauguagu

SEQ ID NO: 2466224 - RNA, 19 nt, Artificial Sequence
  Description of Artificial Sequence: Synthetic oligonucleotide
ccucuucaagccuucagaa

SEQ ID NO: 2466225 - RNA, 19 nt, Artificial Sequence
  Description of Artificial Sequence: Synthetic oligonucleotide
accccuguucacuguuaaa

SEQ ID NO: 2466226 - RNA, 19 nt, Artificial Sequence
  Description of Artificial Sequence: Synthetic oligonucleotide
ccuuuaucauugagacaug

SEQ ID NO: 2466227 - RNA, 19 nt, Artificial Sequence
  Description of Artificial Sequence: Synthetic oligonucleotide
aagugucccucagcggcuu

SEQ ID NO: 2466228 - RNA, 19 nt, Artificial Sequence
  Description of Artificial Sequence: Synthetic oligonucleotide
gcacuucacaucaagugua

SEQ ID NO: 2466229 - RNA, 19 nt, Artificial Sequence
  Description of Artificial Sequence: Synthetic oligonucleotide
acacuaucauguggagaaa

SEQ ID NO: 2466230 - RNA, 19 nt, Artificial Sequence
  Description of Artificial Sequence: Synthetic oligonucleotide
gcaccgcauccccauguag

SEQ ID NO: 2466231 - RNA, 19 nt, Artificial Sequence
  Description of Artificial Sequence: Synthetic oligonucleotide
ggagaaagacuuguuuacu

SEQ ID NO: 2466232 - RNA, 19 nt, Artificial Sequence
  Description of Artificial Sequence: Synthetic oligonucleotide
cucucucuccccgugggaa

SEQ ID NO: 2466233 - RNA, 19 nt, Artificial Sequence
  Description of Artificial Sequence: Synthetic oligonucleotide
  modified_base (7)..(7): a, c, u, g, unknown or other
guauacnguuuuaucccuu

SEQ ID NO: 2466234 - RNA, 19 nt, Artificial Sequence
  Description of Artificial Sequence: Synthetic oligonucleotide
gacuacggugucacugcaa

SEQ ID NO: 2466235 - RNA, 19 nt, Artificial Sequence
  Description of Artificial Sequence: Synthetic oligonucleotide
ccugugaguuaagccacag

SEQ ID NO: 2466236 - RNA, 19 nt, Artificial Sequence
  Description of Artificial Sequence: Synthetic oligonucleotide
caucuuccaugcguuuaca

SEQ ID NO: 2466237 - RNA, 19 nt, Artificial Sequence
  Description of Artificial Sequence: Synthetic oligonucleotide
cacuucacaucaaguguau

SEQ ID NO: 2466238 - RNA, 19 nt, Artificial Sequence
  Description of Artificial Sequence: Synthetic oligonucleotide
gcuugaggcagcuuagauu

SEQ ID NO: 2466239 - RNA, 19 nt, Artificial Sequence
  Description of Artificial Sequence: Synthetic oligonucleotide
cccucauacccauuauuaa

SEQ ID NO: 2466240 - RNA, 19 nt, Artificial Sequence
  Description of Artificial Sequence: Synthetic oligonucleotide
ccuagcagcagccagccau

SEQ ID NO: 2466241 - RNA, 19 nt, Artificial Sequence
  Description of Artificial Sequence: Synthetic oligonucleotide
ccccuguucacuguuaaaa

SEQ ID NO: 2466242 - RNA, 19 nt, Artificial Sequence
  Description of Artificial Sequence: Synthetic oligonucleotide
cauccccauguaguaguga

SEQ ID NO: 2466243 - RNA, 19 nt, Artificial Sequence
  Description of Artificial Sequence: Synthetic oligonucleotide
cguuuacaguacugguaac

SEQ ID NO: 2466244 - RNA, 19 nt, Artificial Sequence
  Description of Artificial Sequence: Synthetic oligonucleotide
caaucuggucagacucucu

SEQ ID NO: 2466245 - RNA, 19 nt, Artificial Sequence
  Description of Artificial Sequence: Synthetic oligonucleotide
cccgugggaagaguguaug

SEQ ID NO: 2466246 - RNA, 19 nt, Artificial Sequence
  Description of Artificial Sequence: Synthetic oligonucleotide
ggagcuccugugaguuaag

SEQ ID NO: 2466247 - RNA, 19 nt, Artificial Sequence
  Description of Artificial Sequence: Synthetic oligonucleotide
cacuggagcuccugugagu

SEQ ID NO: 2466248 - RNA, 19 nt, Artificial Sequence
  Description of Artificial Sequence: Synthetic oligonucleotide
ccccauguaguagugaagu

SEQ ID NO: 2466249 - RNA, 19 nt, Artificial Sequence
  Description of Artificial Sequence: Synthetic oligonucleotide
cagucacccucauacccau

SEQ ID NO: 2466250 - RNA, 19 nt, Artificial Sequence
  Description of Artificial Sequence: Synthetic oligonucleotide
cacccucauacccauuauu

SEQ ID NO: 2466251 - RNA, 19 nt, Artificial Sequence
  Description of Artificial Sequence: Synthetic oligonucleotide
agaccccuguucacuguua

SEQ ID NO: 2466252 - RNA, 19 nt, Artificial Sequence
  Description of Artificial Sequence: Synthetic oligonucleotide
cuccccgugggaagagugu

SEQ ID NO: 2466253 - RNA, 19 nt, Artificial Sequence
  Description of Artificial Sequence: Synthetic oligonucleotide
cuacggugucacugcaaau

SEQ ID NO: 2466254 - RNA, 19 nt, Artificial Sequence
  Description of Artificial Sequence: Synthetic oligonucleotide
gaaggcaaacugagcgcuu

SEQ ID NO: 2466255 - RNA, 19 nt, Artificial Sequence
  Description of Artificial Sequence: Synthetic oligonucleotide
ccgugggaagaguguauga

SEQ ID NO: 2466256 - RNA, 19 nt, Artificial Sequence
  Description of Artificial Sequence: Synthetic oligonucleotide
cuauagugucaaaguucuu

SEQ ID NO: 2466257 - RNA, 19 nt, Artificial Sequence
  Description of Artificial Sequence: Synthetic oligonucleotide
cccgcggcaccgcaucccc

SEQ ID NO: 2466258 - RNA, 19 nt, Artificial Sequence
  Description of Artificial Sequence: Synthetic oligonucleotide
cgugggaagaguguaugaa

SEQ ID NO: 2466259 - RNA, 19 nt, Artificial Sequence
  Description of Artificial Sequence: Synthetic oligonucleotide
cagaagcaguggcaccacu

SEQ ID NO: 2466260 - RNA, 19 nt, Artificial Sequence
  Description of Artificial Sequence: Synthetic oligonucleotide
ccgcauccccauguaguag

SEQ ID NO: 2466261 - RNA, 19 nt, Artificial Sequence
  Description of Artificial Sequence: Synthetic oligonucleotide
cccuguucacuguuaaaau

SEQ ID NO: 2466262 - RNA, 19 nt, Artificial Sequence
  Description of Artificial Sequence: Synthetic oligonucleotide
ggcaccgcauccccaugua

SEQ ID NO: 2466263 - RNA, 19 nt, Artificial Sequence
  Description of Artificial Sequence: Synthetic oligonucleotide
gcggcaccgcauccccaug

SEQ ID NO: 2466264 - RNA, 19 nt, Artificial Sequence
  Description of Artificial Sequence: Synthetic oligonucleotide
gcacugcaacaagccaaca

SEQ ID NO: 2466265 - RNA, 19 nt, Artificial Sequence
  Description of Artificial Sequence: Synthetic oligonucleotide
caaaagcuugaggcagcuu

SEQ ID NO: 2466266 - RNA, 19 nt, Artificial Sequence
  Description of Artificial Sequence: Synthetic oligonucleotide
ggcugauucuguagccaau

SEQ ID NO: 2466267 - RNA, 19 nt, Artificial Sequence
  Description of Artificial Sequence: Synthetic oligonucleotide
cagcggcuuccagacauuu

SEQ ID NO: 2466268 - RNA, 19 nt, Artificial Sequence
  Description of Artificial Sequence: Synthetic oligonucleotide
cucuccccgugggaagagu

SEQ ID NO: 2466269 - RNA, 19 nt, Artificial Sequence
  Description of Artificial Sequence: Synthetic oligonucleotide
ccucagcggcuuccagaca

SEQ ID NO: 2466270 - RNA, 19 nt, Artificial Sequence
  Description of Artificial Sequence: Synthetic oligonucleotide
ccccgugggaagaguguau

SEQ ID NO: 2466271 - RNA, 19 nt, Artificial Sequence
  Description of Artificial Sequence: Synthetic oligonucleotide
ccgcggcaccgcaucccca

SEQ ID NO: 2466272 - RNA, 19 nt, Artificial Sequence
  Description of Artificial Sequence: Synthetic oligonucleotide
cggcaccgcauccccaugu

SEQ ID NO: 2466273 - RNA, 19 nt, Artificial Sequence
  Description of Artificial Sequence: Synthetic oligonucleotide
cgcggcaccgcauccccau

SEQ ID NO: 2466274 - RNA, 19 nt, Artificial Sequence
  Description of Artificial Sequence: Synthetic oligonucleotide
  modified_base (1)..(1): a, c, u, g, unknown or other
nguuuuaucccuuuaucau

SEQ ID NO: 2466275 - RNA, 19 nt, Artificial Sequence
  Description of Artificial Sequence: Synthetic oligonucleotide
gauuugauuacuugugugg

SEQ ID NO: 2466276 - RNA, 19 nt, Artificial Sequence
  Description of Artificial Sequence: Synthetic oligonucleotide
aaacacuugauuugauuac

SEQ ID NO: 2466277 - RNA, 19 nt, Artificial Sequence
  Description of Artificial Sequence: Synthetic oligonucleotide
aacaauauucagcacauaa

SEQ ID NO: 2466278 - RNA, 19 nt, Artificial Sequence
  Description of Artificial Sequence: Synthetic oligonucleotide
agaaaaggaugcuaugggc

SEQ ID NO: 2466279 - RNA, 19 nt, Artificial Sequence
  Description of Artificial Sequence: Synthetic oligonucleotide
cuuggucugagucugagcg

SEQ ID NO: 2466280 - RNA, 19 nt, Artificial Sequence
  Description of Artificial Sequence: Synthetic oligonucleotide
agaacagaagaguccaggc

SEQ ID NO: 2466281 - RNA, 19 nt, Artificial Sequence
  Description of Artificial Sequence: Synthetic oligonucleotide
agugcugagucucggaagc

SEQ ID NO: 2466282 - RNA, 19 nt, Artificial Sequence
  Description of Artificial Sequence: Synthetic oligonucleotide
uaaacacuugauuugauua

SEQ ID NO: 2466283 - RNA, 19 nt, Artificial Sequence
  Description of Artificial Sequence: Synthetic oligonucleotide
aguacccugaacaauauuc

SEQ ID NO: 2466284 - RNA, 19 nt, Artificial Sequence
  Description of Artificial Sequence: Synthetic oligonucleotide
acaggcacucaauaaacac

SEQ ID NO: 2466285 - RNA, 19 nt, Artificial Sequence
  Description of Artificial Sequence: Synthetic oligonucleotide
ugugugaguagccaagccc

SEQ ID NO: 2466286 - RNA, 19 nt, Artificial Sequence
  Description of Artificial Sequence: Synthetic oligonucleotide
agcucagugugguauaucg

SEQ ID NO: 2466287 - RNA, 19 nt, Artificial Sequence
  Description of Artificial Sequence: Synthetic oligonucleotide
agagaaaaggaugcuaugg

SEQ ID NO: 2466288 - RNA, 19 nt, Artificial Sequence
  Description of Artificial Sequence: Synthetic oligonucleotide
cucagugugguauaucggg

SEQ ID NO: 2466289 - RNA, 19 nt, Artificial Sequence
  Description of Artificial Sequence: Synthetic oligonucleotide
uucacugcgaagcuucucc

SEQ ID NO: 2466290 - RNA, 19 nt, Artificial Sequence
  Description of Artificial Sequence: Synthetic oligonucleotide
uuugauuacuugugugggg

SEQ ID NO: 2466291 - RNA, 19 nt, Artificial Sequence
  Description of Artificial Sequence: Synthetic oligonucleotide
ugauuugauuacuugugug

SEQ ID NO: 2466292 - RNA, 19 nt, Artificial Sequence
  Description of Artificial Sequence: Synthetic oligonucleotide
auuugauuacuuguguggg

SEQ ID NO: 2466293 - RNA, 19 nt, Artificial Sequence
  Description of Artificial Sequence: Synthetic oligonucleotide
aucggggacagucaacgcc

SEQ ID NO: 2466294 - RNA, 19 nt, Artificial Sequence
  Description of Artificial Sequence: Synthetic oligonucleotide
acaauauucagcacauaac

SEQ ID NO: 2466295 - RNA, 19 nt, Artificial Sequence
  Description of Artificial Sequence: Synthetic oligonucleotide
acuuguguggggcuccugc

SEQ ID NO: 2466296 - RNA, 19 nt, Artificial Sequence
  Description of Artificial Sequence: Synthetic oligonucleotide
auaacaggcacucaauaaa

SEQ ID NO: 2466297 - RNA, 19 nt, Artificial Sequence
  Description of Artificial Sequence: Synthetic oligonucleotide
ucuuguuuauucucugaug

SEQ ID NO: 2466298 - RNA, 19 nt, Artificial Sequence
  Description of Artificial Sequence: Synthetic oligonucleotide
auaucggggacagucaacg

SEQ ID NO: 2466299 - RNA, 19 nt, Artificial Sequence
  Description of Artificial Sequence: Synthetic oligonucleotide
gauguugcuggccacgggc

SEQ ID NO: 2466300 - RNA, 19 nt, Artificial Sequence
  Description of Artificial Sequence: Synthetic oligonucleotide
uucagucucagucccaaac

SEQ ID NO: 2466301 - RNA, 19 nt, Artificial Sequence
  Description of Artificial Sequence: Synthetic oligonucleotide
uugauuacuuguguggggc

SEQ ID NO: 2466302 - RNA, 19 nt, Artificial Sequence
  Description of Artificial Sequence: Synthetic oligonucleotide
cugaacaauauucagcaca

SEQ ID NO: 2466303 - RNA, 19 nt, Artificial Sequence
  Description of Artificial Sequence: Synthetic oligonucleotide
agugugguauaucggggac

SEQ ID NO: 2466304 - RNA, 19 nt, Artificial Sequence
  Description of Artificial Sequence: Synthetic oligonucleotide
aagaguccaggcugucagc

SEQ ID NO: 2466305 - RNA, 19 nt, Artificial Sequence
  Description of Artificial Sequence: Synthetic oligonucleotide
aguccaggcugucagcucg

SEQ ID NO: 2466306 - RNA, 19 nt, Artificial Sequence
  Description of Artificial Sequence: Synthetic oligonucleotide
ugugguauaucggggacag

SEQ ID NO: 2466307 - RNA, 19 nt, Artificial Sequence
  Description of Artificial Sequence: Synthetic oligonucleotide
aacacuugauuugauuacu

SEQ ID NO: 2466308 - RNA, 19 nt, Artificial Sequence
  Description of Artificial Sequence: Synthetic oligonucleotide
ugaugugucccgaguaccc

SEQ ID NO: 2466309 - RNA, 19 nt, Artificial Sequence
  Description of Artificial Sequence: Synthetic oligonucleotide
auuacuuguguggggcucc

SEQ ID NO: 2466310 - RNA, 19 nt, Artificial Sequence
  Description of Artificial Sequence: Synthetic oligonucleotide
acccugaacaauauucagc

SEQ ID NO: 2466311 - RNA, 19 nt, Artificial Sequence
  Description of Artificial Sequence: Synthetic oligonucleotide
aacgcccaggggcaucugc

SEQ ID NO: 2466312 - RNA, 19 nt, Artificial Sequence
  Description of Artificial Sequence: Synthetic oligonucleotide
ucugaugugucccgaguac

SEQ ID NO: 2466313 - RNA, 19 nt, Artificial Sequence
  Description of Artificial Sequence: Synthetic oligonucleotide
uccaauugcugcugcaggc

SEQ ID NO: 2466314 - RNA, 19 nt, Artificial Sequence
  Description of Artificial Sequence: Synthetic oligonucleotide
ucggggacagucaacgccc

SEQ ID NO: 2466315 - RNA, 19 nt, Artificial Sequence
  Description of Artificial Sequence: Synthetic oligonucleotide
aggacagaacagaagaguc

SEQ ID NO: 2466316 - RNA, 19 nt, Artificial Sequence
  Description of Artificial Sequence: Synthetic oligonucleotide
ugguauaucggggacaguc

SEQ ID NO: 2466317 - RNA, 19 nt, Artificial Sequence
  Description of Artificial Sequence: Synthetic oligonucleotide
acucaauaaacacuugauu

SEQ ID NO: 2466318 - RNA, 19 nt, Artificial Sequence
  Description of Artificial Sequence: Synthetic oligonucleotide
ugcugugugaguagccaag

SEQ ID NO: 2466319 - RNA, 19 nt, Artificial Sequence
  Description of Artificial Sequence: Synthetic oligonucleotide
uacccugaacaauauucag

SEQ ID NO: 2466320 - RNA, 19 nt, Artificial Sequence
  Description of Artificial Sequence: Synthetic oligonucleotide
aguucguugugugcggacc

SEQ ID NO: 2466321 - RNA, 19 nt, Artificial Sequence
  Description of Artificial Sequence: Synthetic oligonucleotide
cagugagugucauagccag

SEQ ID NO: 2466322 - RNA, 19 nt, Artificial Sequence
  Description of Artificial Sequence: Synthetic oligonucleotide
aguaggcucaguccaaaga

SEQ ID NO: 2466323 - RNA, 19 nt, Artificial Sequence
  Description of Artificial Sequence: Synthetic oligonucleotide
cuuguuuauucucugaugu

SEQ ID NO: 2466324 - RNA, 19 nt, Artificial Sequence
  Description of Artificial Sequence: Synthetic oligonucleotide
gaugcauagccgugcuccg

SEQ ID NO: 2466325 - RNA, 19 nt, Artificial Sequence
  Description of Artificial Sequence: Synthetic oligonucleotide
ugucauagccagguacugg

SEQ ID NO: 2466326 - RNA, 19 nt, Artificial Sequence
  Description of Artificial Sequence: Synthetic oligonucleotide
aacuccgccgccugcagca

SEQ ID NO: 2466327 - RNA, 19 nt, Artificial Sequence
  Description of Artificial Sequence: Synthetic oligonucleotide
ugcauagccgugcuccgcc

SEQ ID NO: 2466328 - RNA, 19 nt, Artificial Sequence
  Description of Artificial Sequence: Synthetic oligonucleotide
cacuugauuugauuacuug

SEQ ID NO: 2466329 - RNA, 19 nt, Artificial Sequence
  Description of Artificial Sequence: Synthetic oligonucleotide
agucucagucccaaacacc

SEQ ID NO: 2466330 - RNA, 19 nt, Artificial Sequence
  Description of Artificial Sequence: Synthetic oligonucleotide
uccaugucggcgaccgccg

SEQ ID NO: 2466331 - RNA, 19 nt, Artificial Sequence
  Description of Artificial Sequence: Synthetic oligonucleotide
gugugaguagccaagcccc

SEQ ID NO: 2466332 - RNA, 19 nt, Artificial Sequence
  Description of Artificial Sequence: Synthetic oligonucleotide
ggcagugagugucauagcc

SEQ ID NO: 2466333 - RNA, 19 nt, Artificial Sequence
  Description of Artificial Sequence: Synthetic oligonucleotide
guucguugugugcggaccg

SEQ ID NO: 2466334 - RNA, 19 nt, Artificial Sequence
  Description of Artificial Sequence: Synthetic oligonucleotide
cuccaguucguugugugcg

SEQ ID NO: 2466335 - RNA, 19 nt, Artificial Sequence
  Description of Artificial Sequence: Synthetic oligonucleotide
ugccuaguaggcucagucc

SEQ ID NO: 2466336 - RNA, 19 nt, Artificial Sequence
  Description of Artificial Sequence: Synthetic oligonucleotide
cauaacaggcacucaauaa

SEQ ID NO: 2466337 - RNA, 19 nt, Artificial Sequence
  Description of Artificial Sequence: Synthetic oligonucleotide
uauaucggggacagucaac

SEQ ID NO: 2466338 - RNA, 19 nt, Artificial Sequence
  Description of Artificial Sequence: Synthetic oligonucleotide
gucccgaguacccugaaca

SEQ ID NO: 2466339 - RNA, 19 nt, Artificial Sequence
  Description of Artificial Sequence: Synthetic oligonucleotide
aaggaugcuaugggcagug

SEQ ID NO: 2466340 - RNA, 19 nt, Artificial Sequence
  Description of Artificial Sequence: Synthetic oligonucleotide
uggugcggacacaaggaug

SEQ ID NO: 2466341 - RNA, 19 nt, Artificial Sequence
  Description of Artificial Sequence: Synthetic oligonucleotide
ucagcacauaacaggcacu

SEQ ID NO: 2466342 - RNA, 19 nt, Artificial Sequence
  Description of Artificial Sequence: Synthetic oligonucleotide
acauaacaggcacucaaua

SEQ ID NO: 2466343 - RNA, 19 nt, Artificial Sequence
  Description of Artificial Sequence: Synthetic oligonucleotide
uguagacagccccggggcc

SEQ ID NO: 2466344 - RNA, 19 nt, Artificial Sequence
  Description of Artificial Sequence: Synthetic oligonucleotide
uguugagcgcgcccggagc

SEQ ID NO: 2466345 - RNA, 19 nt, Artificial Sequence
  Description of Artificial Sequence: Synthetic oligonucleotide
cuggaugugcacccuggcg

SEQ ID NO: 2466346 - RNA, 19 nt, Artificial Sequence
  Description of Artificial Sequence: Synthetic oligonucleotide
augcuaugggcagugagug

SEQ ID NO: 2466347 - RNA, 19 nt, Artificial Sequence
  Description of Artificial Sequence: Synthetic oligonucleotide
gagucucggaagcaguuca

SEQ ID NO: 2466348 - RNA, 19 nt, Artificial Sequence
  Description of Artificial Sequence: Synthetic oligonucleotide
agugucauagccagguacu

SEQ ID NO: 2466349 - RNA, 19 nt, Artificial Sequence
  Description of Artificial Sequence: Synthetic oligonucleotide
auagccagguacuggugcu

SEQ ID NO: 2466350 - RNA, 19 nt, Artificial Sequence
  Description of Artificial Sequence: Synthetic oligonucleotide
ggaugcauagccgugcucc

SEQ ID NO: 2466351 - RNA, 19 nt, Artificial Sequence
  Description of Artificial Sequence: Synthetic oligonucleotide
aauaaacacuugauuugau

SEQ ID NO: 2466352 - RNA, 19 nt, Artificial Sequence
  Description of Artificial Sequence: Synthetic oligonucleotide
uagccaagccccuggcuag

SEQ ID NO: 2466353 - RNA, 19 nt, Artificial Sequence
  Description of Artificial Sequence: Synthetic oligonucleotide
cuuguguggggcuccugcc

SEQ ID NO: 2466354 - RNA, 19 nt, Artificial Sequence
  Description of Artificial Sequence: Synthetic oligonucleotide
cucuacauccucuuggucu

SEQ ID NO: 2466355 - RNA, 19 nt, Artificial Sequence
  Description of Artificial Sequence: Synthetic oligonucleotide
ggacagucaacgcccaggg

SEQ ID NO: 2466356 - RNA, 19 nt, Artificial Sequence
  Description of Artificial Sequence: Synthetic oligonucleotide
ggugcggacacaaggaugc

SEQ ID NO: 2466357 - RNA, 19 nt, Artificial Sequence
  Description of Artificial Sequence: Synthetic oligonucleotide
ugauuacuuguguggggcu

SEQ ID NO: 2466358 - RNA, 19 nt, Artificial Sequence
  Description of Artificial Sequence: Synthetic oligonucleotide
ugugucccgaguacccuga

SEQ ID NO: 2466359 - RNA, 19 nt, Artificial Sequence
  Description of Artificial Sequence: Synthetic oligonucleotide
cagucucagucccaaacac

SEQ ID NO: 2466360 - RNA, 19 nt, Artificial Sequence
  Description of Artificial Sequence: Synthetic oligonucleotide
gaccgcccacuguugagcg

SEQ ID NO: 2466361 - RNA, 19 nt, Artificial Sequence
  Description of Artificial Sequence: Synthetic oligonucleotide
uggauguugcuggccacgg

SEQ ID NO: 2466362 - RNA, 19 nt, Artificial Sequence
  Description of Artificial Sequence: Synthetic oligonucleotide
uaguaggcucaguccaaag

SEQ ID NO: 2466363 - RNA, 19 nt, Artificial Sequence
  Description of Artificial Sequence: Synthetic oligonucleotide
uggucugagucugagcgcu

SEQ ID NO: 2466364 - RNA, 19 nt, Artificial Sequence
  Description of Artificial Sequence: Synthetic oligonucleotide
accucuacauccucuuggu

SEQ ID NO: 2466365 - RNA, 19 nt, Artificial Sequence
  Description of Artificial Sequence: Synthetic oligonucleotide
caccgcuucagcugggccc

SEQ ID NO: 2466366 - RNA, 19 nt, Artificial Sequence
  Description of Artificial Sequence: Synthetic oligonucleotide
uccuguagacagccccggg

SEQ ID NO: 2466367 - RNA, 19 nt, Artificial Sequence
  Description of Artificial Sequence: Synthetic oligonucleotide
uuggucugagucugagcgc

SEQ ID NO: 2466368 - RNA, 19 nt, Artificial Sequence
  Description of Artificial Sequence: Synthetic oligonucleotide
cugccuaguaggcucaguc

SEQ ID NO: 2466369 - RNA, 19 nt, Artificial Sequence
  Description of Artificial Sequence: Synthetic oligonucleotide
gacagucaacgcccagggg

SEQ ID NO: 2466370 - RNA, 19 nt, Artificial Sequence
  Description of Artificial Sequence: Synthetic oligonucleotide
ucucucgcgccgcuccagg

SEQ ID NO: 2466371 - RNA, 19 nt, Artificial Sequence
  Description of Artificial Sequence: Synthetic oligonucleotide
gaacagaagaguccaggcu

SEQ ID NO: 2466372 - RNA, 19 nt, Artificial Sequence
  Description of Artificial Sequence: Synthetic oligonucleotide
acacaaggaugcauagccg

SEQ ID NO: 2466373 - RNA, 19 nt, Artificial Sequence
  Description of Artificial Sequence: Synthetic oligonucleotide
ugcuguucacugcgaagcu

SEQ ID NO: 2466374 - RNA, 19 nt, Artificial Sequence
  Description of Artificial Sequence: Synthetic oligonucleotide
uggcuagugcugagucucg

SEQ ID NO: 2466375 - RNA, 19 nt, Artificial Sequence
  Description of Artificial Sequence: Synthetic oligonucleotide
uuguguggggcuccugccu

SEQ ID NO: 2466376 - RNA, 19 nt, Artificial Sequence
  Description of Artificial Sequence: Synthetic oligonucleotide
cugaugugucccgaguacc

SEQ ID NO: 2466377 - RNA, 19 nt, Artificial Sequence
  Description of Artificial Sequence: Synthetic oligonucleotide
cccugaacaauauucagca

SEQ ID NO: 2466378 - RNA, 19 nt, Artificial Sequence
  Description of Artificial Sequence: Synthetic oligonucleotide
gauuacuuguguggggcuc

SEQ ID NO: 2466379 - RNA, 19 nt, Artificial Sequence
  Description of Artificial Sequence: Synthetic oligonucleotide
cuggcuagugcugagucuc

SEQ ID NO: 2466380 - RNA, 19 nt, Artificial Sequence
  Description of Artificial Sequence: Synthetic oligonucleotide
aagcucagugugguauauc

SEQ ID NO: 2466381 - RNA, 19 nt, Artificial Sequence
  Description of Artificial Sequence: Synthetic oligonucleotide
aggcugucagcucgggguc

SEQ ID NO: 2466382 - RNA, 19 nt, Artificial Sequence
  Description of Artificial Sequence: Synthetic oligonucleotide
guacccugaacaauauuca

SEQ ID NO: 2466383 - RNA, 19 nt, Artificial Sequence
  Description of Artificial Sequence: Synthetic oligonucleotide
ucugagcgcucagaggaca

SEQ ID NO: 2466384 - RNA, 19 nt, Artificial Sequence
  Description of Artificial Sequence: Synthetic oligonucleotide
guagacagccccggggccg

SEQ ID NO: 2466385 - RNA, 19 nt, Artificial Sequence
  Description of Artificial Sequence: Synthetic oligonucleotide
ggggcuccugccuaguagg

SEQ ID NO: 2466386 - RNA, 19 nt, Artificial Sequence
  Description of Artificial Sequence: Synthetic oligonucleotide
guauaucggggacagucaa

SEQ ID NO: 2466387 - RNA, 19 nt, Artificial Sequence
  Description of Artificial Sequence: Synthetic oligonucleotide
ucacugcgaagcuucuccu

SEQ ID NO: 2466388 - RNA, 19 nt, Artificial Sequence
  Description of Artificial Sequence: Synthetic oligonucleotide
caaacaccaggcucuccac

SEQ ID NO: 2466389 - RNA, 19 nt, Artificial Sequence
  Description of Artificial Sequence: Synthetic oligonucleotide
gaugcuaugggcagugagu

SEQ ID NO: 2466390 - RNA, 19 nt, Artificial Sequence
  Description of Artificial Sequence: Synthetic oligonucleotide
gcacucaauaaacacuuga

SEQ ID NO: 2466391 - RNA, 19 nt, Artificial Sequence
  Description of Artificial Sequence: Synthetic oligonucleotide
gaggacagaacagaagagu

SEQ ID NO: 2466392 - RNA, 19 nt, Artificial Sequence
  Description of Artificial Sequence: Synthetic oligonucleotide
guagccaagccccuggcua

SEQ ID NO: 2466393 - RNA, 19 nt, Artificial Sequence
  Description of Artificial Sequence: Synthetic oligonucleotide
cucucucucgcgccgcucc

SEQ ID NO: 2466394 - RNA, 19 nt, Artificial Sequence
  Description of Artificial Sequence: Synthetic oligonucleotide
ggacagaacagaagagucc

SEQ ID NO: 2466395 - RNA, 19 nt, Artificial Sequence
  Description of Artificial Sequence: Synthetic oligonucleotide
augcauagccgugcuccgc

SEQ ID NO: 2466396 - RNA, 19 nt, Artificial Sequence
  Description of Artificial Sequence: Synthetic oligonucleotide
aguagccaagccccuggcu

SEQ ID NO: 2466397 - RNA, 19 nt, Artificial Sequence
  Description of Artificial Sequence: Synthetic oligonucleotide
uguguggggcuccugccua

SEQ ID NO: 2466398 - RNA, 19 nt, Artificial Sequence
  Description of Artificial Sequence: Synthetic oligonucleotide
cagcacauaacaggcacuc

SEQ ID NO: 2466399 - RNA, 19 nt, Artificial Sequence
  Description of Artificial Sequence: Synthetic oligonucleotide
agccccggggccguggugc

SEQ ID NO: 2466400 - RNA, 19 nt, Artificial Sequence
  Description of Artificial Sequence: Synthetic oligonucleotide
uacuggugcugugugagua

SEQ ID NO: 2466401 - RNA, 19 nt, Artificial Sequence
  Description of Artificial Sequence: Synthetic oligonucleotide
ugugcacccuggcgcggcg

SEQ ID NO: 2466402 - RNA, 19 nt, Artificial Sequence
  Description of Artificial Sequence: Synthetic oligonucleotide
ugucccgaguacccugaac

SEQ ID NO: 2466403 - RNA, 19 nt, Artificial Sequence
  Description of Artificial Sequence: Synthetic oligonucleotide
cugagcgcucagaggacag

SEQ ID NO: 2466404 - RNA, 19 nt, Artificial Sequence
  Description of Artificial Sequence: Synthetic oligonucleotide
ucccgaguacccugaacaa

SEQ ID NO: 2466405 - RNA, 19 nt, Artificial Sequence
  Description of Artificial Sequence: Synthetic oligonucleotide
aguucagucucagucccaa

SEQ ID NO: 2466406 - RNA, 19 nt, Artificial Sequence
  Description of Artificial Sequence: Synthetic oligonucleotide
cuagugcugagucucggaa

SEQ ID NO: 2466407 - RNA, 19 nt, Artificial Sequence
  Description of Artificial Sequence: Synthetic oligonucleotide
ugugcggaccgcccacugu

SEQ ID NO: 2466408 - RNA, 19 nt, Artificial Sequence
  Description of Artificial Sequence: Synthetic oligonucleotide
uugugugcggaccgcccac

SEQ ID NO: 2466409 - RNA, 19 nt, Artificial Sequence
  Description of Artificial Sequence: Synthetic oligonucleotide
cagugugguauaucgggga

SEQ ID NO: 2466410 - RNA, 19 nt, Artificial Sequence
  Description of Artificial Sequence: Synthetic oligonucleotide
ugagucucggaagcaguuc

SEQ ID NO: 2466411 - RNA, 19 nt, Artificial Sequence
  Description of Artificial Sequence: Synthetic oligonucleotide
ccuguagacagccccgggg

SEQ ID NO: 2466412 - RNA, 19 nt, Artificial Sequence
  Description of Artificial Sequence: Synthetic oligonucleotide
augucggcgaccgccgggg

SEQ ID NO: 2466413 - RNA, 19 nt, Artificial Sequence
  Description of Artificial Sequence: Synthetic oligonucleotide
gggacagucaacgcccagg

SEQ ID NO: 2466414 - RNA, 19 nt, Artificial Sequence
  Description of Artificial Sequence: Synthetic oligonucleotide
cacucaauaaacacuugau

SEQ ID NO: 2466415 - RNA, 19 nt, Artificial Sequence
  Description of Artificial Sequence: Synthetic oligonucleotide
cacaaggaugcauagccgu

SEQ ID NO: 2466416 - RNA, 19 nt, Artificial Sequence
  Description of Artificial Sequence: Synthetic oligonucleotide
ugagugucauagccaggua

SEQ ID NO: 2466417 - RNA, 19 nt, Artificial Sequence
  Description of Artificial Sequence: Synthetic oligonucleotide
gccuaguaggcucagucca

SEQ ID NO: 2466418 - RNA, 19 nt, Artificial Sequence
  Description of Artificial Sequence: Synthetic oligonucleotide
ucaacgcccaggggcaucu

SEQ ID NO: 2466419 - RNA, 19 nt, Artificial Sequence
  Description of Artificial Sequence: Synthetic oligonucleotide
accgcccacuguugagcgc

SEQ ID NO: 2466420 - RNA, 19 nt, Artificial Sequence
  Description of Artificial Sequence: Synthetic oligonucleotide
gucggucccgcucuccagc

SEQ ID NO: 2466421 - RNA, 19 nt, Artificial Sequence
  Description of Artificial Sequence: Synthetic oligonucleotide
augugcacccuggcgcggc

SEQ ID NO: 2466422 - RNA, 19 nt, Artificial Sequence
  Description of Artificial Sequence: Synthetic oligonucleotide
agugagugucauagccagg

SEQ ID NO: 2466423 - RNA, 19 nt, Artificial Sequence
  Description of Artificial Sequence: Synthetic oligonucleotide
caggcacucaauaaacacu

SEQ ID NO: 2466424 - RNA, 19 nt, Artificial Sequence
  Description of Artificial Sequence: Synthetic oligonucleotide
cucuuggucugagucugag

SEQ ID NO: 2466425 - RNA, 19 nt, Artificial Sequence
  Description of Artificial Sequence: Synthetic oligonucleotide
ggcuccaugucggcgaccg

SEQ ID NO: 2466426 - RNA, 19 nt, Artificial Sequence
  Description of Artificial Sequence: Synthetic oligonucleotide
guugugugcggaccgccca

SEQ ID NO: 2466427 - RNA, 19 nt, Artificial Sequence
  Description of Artificial Sequence: Synthetic oligonucleotide
cagucaacgcccaggggca

SEQ ID NO: 2466428 - RNA, 19 nt, Artificial Sequence
  Description of Artificial Sequence: Synthetic oligonucleotide
uucguugugugcggaccgc

SEQ ID NO: 2466429 - RNA, 19 nt, Artificial Sequence
  Description of Artificial Sequence: Synthetic oligonucleotide
auucagcacauaacaggca

SEQ ID NO: 2466430 - RNA, 19 nt, Artificial Sequence
  Description of Artificial Sequence: Synthetic oligonucleotide
ggcucuuguuuauucucug

SEQ ID NO: 2466431 - RNA, 19 nt, Artificial Sequence
  Description of Artificial Sequence: Synthetic oligonucleotide
cuguugagcgcgcccggag

SEQ ID NO: 2466432 - RNA, 19 nt, Artificial Sequence
  Description of Artificial Sequence: Synthetic oligonucleotide
gugucauagccagguacug

SEQ ID NO: 2466433 - RNA, 19 nt, Artificial Sequence
  Description of Artificial Sequence: Synthetic oligonucleotide
guugcuggccacgggcucc

SEQ ID NO: 2466434 - RNA, 19 nt, Artificial Sequence
  Description of Artificial Sequence: Synthetic oligonucleotide
ucguugugugcggaccgcc

SEQ ID NO: 2466435 - RNA, 19 nt, Artificial Sequence
  Description of Artificial Sequence: Synthetic oligonucleotide
gaugugcacccuggcgcgg

SEQ ID NO: 2466436 - RNA, 19 nt, Artificial Sequence
  Description of Artificial Sequence: Synthetic oligonucleotide
ugcggaccgcccacuguug

SEQ ID NO: 2466437 - RNA, 19 nt, Artificial Sequence
  Description of Artificial Sequence: Synthetic oligonucleotide
cacuguugagcgcgcccgg

SEQ ID NO: 2466438 - RNA, 19 nt, Artificial Sequence
  Description of Artificial Sequence: Synthetic oligonucleotide
ccguggugcggacacaagg

SEQ ID NO: 2466439 - RNA, 19 nt, Artificial Sequence
  Description of Artificial Sequence: Synthetic oligonucleotide
ugcacccuggcgcggcgca

SEQ ID NO: 2466440 - RNA, 19 nt, Artificial Sequence
  Description of Artificial Sequence: Synthetic oligonucleotide
ucucucucgcgccgcucca

SEQ ID NO: 2466441 - RNA, 19 nt, Artificial Sequence
  Description of Artificial Sequence: Synthetic oligonucleotide
caguucguugugugcggac

SEQ ID NO: 2466442 - RNA, 19 nt, Artificial Sequence
  Description of Artificial Sequence: Synthetic oligonucleotide
gguauaucggggacaguca

SEQ ID NO: 2466443 - RNA, 19 nt, Artificial Sequence
  Description of Artificial Sequence: Synthetic oligonucleotide
gcucagugugguauaucgg

SEQ ID NO: 2466444 - RNA, 19 nt, Artificial Sequence
  Description of Artificial Sequence: Synthetic oligonucleotide
ugcggacacaaggaugcau

SEQ ID NO: 2466445 - RNA, 19 nt, Artificial Sequence
  Description of Artificial Sequence: Synthetic oligonucleotide
acacuugauuugauuacuu

SEQ ID NO: 2466446 - RNA, 19 nt, Artificial Sequence
  Description of Artificial Sequence: Synthetic oligonucleotide
ugagcgcucagaggacaga

SEQ ID NO: 2466447 - RNA, 19 nt, Artificial Sequence
  Description of Artificial Sequence: Synthetic oligonucleotide
gaguccaggcugucagcuc

SEQ ID NO: 2466448 - RNA, 19 nt, Artificial Sequence
  Description of Artificial Sequence: Synthetic oligonucleotide
accgcuucagcugggcccu

SEQ ID NO: 2466449 - RNA, 19 nt, Artificial Sequence
  Description of Artificial Sequence: Synthetic oligonucleotide
ucggucccgcucuccagcu

SEQ ID NO: 2466450 - RNA, 19 nt, Artificial Sequence
  Description of Artificial Sequence: Synthetic oligonucleotide
agcacauaacaggcacuca

SEQ ID NO: 2466451 - RNA, 19 nt, Artificial Sequence
  Description of Artificial Sequence: Synthetic oligonucleotide
gucccaaacaccaggcucu

SEQ ID NO: 2466452 - RNA, 19 nt, Artificial Sequence
  Description of Artificial Sequence: Synthetic oligonucleotide
cuccgccucucucucgcgc

SEQ ID NO: 2466453 - RNA, 19 nt, Artificial Sequence
  Description of Artificial Sequence: Synthetic oligonucleotide
aggaacuccgccgccugca

SEQ ID NO: 2466454 - RNA, 19 nt, Artificial Sequence
  Description of Artificial Sequence: Synthetic oligonucleotide
ugagcgcgcccggagcuug

SEQ ID NO: 2466455 - RNA, 19 nt, Artificial Sequence
  Description of Artificial Sequence: Synthetic oligonucleotide
ggacacaaggaugcauagc

SEQ ID NO: 2466456 - RNA, 19 nt, Artificial Sequence
  Description of Artificial Sequence: Synthetic oligonucleotide
uuacuuguguggggcuccu

SEQ ID NO: 2466457 - RNA, 19 nt, Artificial Sequence
  Description of Artificial Sequence: Synthetic oligonucleotide
auguugcuggccacgggcu

SEQ ID NO: 2466458 - RNA, 19 nt, Artificial Sequence
  Description of Artificial Sequence: Synthetic oligonucleotide
gcguuucuccaguucguug

SEQ ID NO: 2466459 - RNA, 19 nt, Artificial Sequence
  Description of Artificial Sequence: Synthetic oligonucleotide
cacgggcuccaugucggcg

SEQ ID NO: 2466460 - RNA, 19 nt, Artificial Sequence
  Description of Artificial Sequence: Synthetic oligonucleotide
gugaguagccaagccccug

SEQ ID NO: 2466461 - RNA, 19 nt, Artificial Sequence
  Description of Artificial Sequence: Synthetic oligonucleotide
gagcgcucagaggacagaa

SEQ ID NO: 2466462 - RNA, 19 nt, Artificial Sequence
  Description of Artificial Sequence: Synthetic oligonucleotide
gugugguauaucggggaca

SEQ ID NO: 2466463 - RNA, 19 nt, Artificial Sequence
  Description of Artificial Sequence: Synthetic oligonucleotide
cacauaacaggcacucaau

SEQ ID NO: 2466464 - RNA, 19 nt, Artificial Sequence
  Description of Artificial Sequence: Synthetic oligonucleotide
agcucggggucggucccgc

SEQ ID NO: 2466465 - RNA, 19 nt, Artificial Sequence
  Description of Artificial Sequence: Synthetic oligonucleotide
cauagccgugcuccgccuc

SEQ ID NO: 2466466 - RNA, 19 nt, Artificial Sequence
  Description of Artificial Sequence: Synthetic oligonucleotide
ugugugcggaccgcccacu

SEQ ID NO: 2466467 - RNA, 19 nt, Artificial Sequence
  Description of Artificial Sequence: Synthetic oligonucleotide
gugcugugugaguagccaa

SEQ ID NO: 2466468 - RNA, 19 nt, Artificial Sequence
  Description of Artificial Sequence: Synthetic oligonucleotide
ccacuguugagcgcgcccg

SEQ ID NO: 2466469 - RNA, 19 nt, Artificial Sequence
  Description of Artificial Sequence: Synthetic oligonucleotide
guugagcgcgcccggagcu

SEQ ID NO: 2466470 - RNA, 19 nt, Artificial Sequence
  Description of Artificial Sequence: Synthetic oligonucleotide
gcagugagugucauagcca

SEQ ID NO: 2466471 - RNA, 19 nt, Artificial Sequence
  Description of Artificial Sequence: Synthetic oligonucleotide
gaugugucccgaguacccu

SEQ ID NO: 2466472 - RNA, 19 nt, Artificial Sequence
  Description of Artificial Sequence: Synthetic oligonucleotide
cuccgggcagccccuggag

SEQ ID NO: 2466473 - RNA, 19 nt, Artificial Sequence
  Description of Artificial Sequence: Synthetic oligonucleotide
acuguugagcgcgcccgga

SEQ ID NO: 2466474 - RNA, 19 nt, Artificial Sequence
  Description of Artificial Sequence: Synthetic oligonucleotide
ugucagcucggggucgguc

SEQ ID NO: 2466475 - RNA, 19 nt, Artificial Sequence
  Description of Artificial Sequence: Synthetic oligonucleotide
gaacaauauucagcacaua

SEQ ID NO: 2466476 - RNA, 19 nt, Artificial Sequence
  Description of Artificial Sequence: Synthetic oligonucleotide
ccuggcgcggcgcagcaag

SEQ ID NO: 2466477 - RNA, 19 nt, Artificial Sequence
  Description of Artificial Sequence: Synthetic oligonucleotide
ucgcgccgcuccaggaacu

SEQ ID NO: 2466478 - RNA, 19 nt, Artificial Sequence
  Description of Artificial Sequence: Synthetic oligonucleotide
ggcuagugcugagucucgg

SEQ ID NO: 2466479 - RNA, 19 nt, Artificial Sequence
  Description of Artificial Sequence: Synthetic oligonucleotide
gcgcagcaagcucagugug

SEQ ID NO: 2466480 - RNA, 19 nt, Artificial Sequence
  Description of Artificial Sequence: Synthetic oligonucleotide
ccgaguacccugaacaaua

SEQ ID NO: 2466481 - RNA, 19 nt, Artificial Sequence
  Description of Artificial Sequence: Synthetic oligonucleotide
ggaccgcccacuguugagc

SEQ ID NO: 2466482 - RNA, 19 nt, Artificial Sequence
  Description of Artificial Sequence: Synthetic oligonucleotide
gcgcccggagcuugcaggg

SEQ ID NO: 2466483 - RNA, 19 nt, Artificial Sequence
  Description of Artificial Sequence: Synthetic oligonucleotide
uccugccuaguaggcucag

SEQ ID NO: 2466484 - RNA, 19 nt, Artificial Sequence
  Description of Artificial Sequence: Synthetic oligonucleotide
gcuagugcugagucucgga

SEQ ID NO: 2466485 - RNA, 19 nt, Artificial Sequence
  Description of Artificial Sequence: Synthetic oligonucleotide
gugugcggaccgcccacug

SEQ ID NO: 2466486 - RNA, 19 nt, Artificial Sequence
  Description of Artificial Sequence: Synthetic oligonucleotide
ccucagcugcuccaggcac

SEQ ID NO: 2466487 - RNA, 19 nt, Artificial Sequence
  Description of Artificial Sequence: Synthetic oligonucleotide
cggacacaaggaugcauag

SEQ ID NO: 2466488 - RNA, 19 nt, Artificial Sequence
  Description of Artificial Sequence: Synthetic oligonucleotide
ccgcccacuguugagcgcg

SEQ ID NO: 2466489 - RNA, 19 nt, Artificial Sequence
  Description of Artificial Sequence: Synthetic oligonucleotide
uacuuguguggggcuccug

SEQ ID NO: 2466490 - RNA, 19 nt, Artificial Sequence
  Description of Artificial Sequence: Synthetic oligonucleotide
uguggggcuccugccuagu

SEQ ID NO: 2466491 - RNA, 19 nt, Artificial Sequence
  Description of Artificial Sequence: Synthetic oligonucleotide
ggcacucaauaaacacuug

SEQ ID NO: 2466492 - RNA, 19 nt, Artificial Sequence
  Description of Artificial Sequence: Synthetic oligonucleotide
ggggccguggugcggacac

SEQ ID NO: 2466493 - RNA, 19 nt, Artificial Sequence
  Description of Artificial Sequence: Synthetic oligonucleotide
cuccugccuaguaggcuca

SEQ ID NO: 2466494 - RNA, 19 nt, Artificial Sequence
  Description of Artificial Sequence: Synthetic oligonucleotide
cuccgccgccugcagcagg

SEQ ID NO: 2466495 - RNA, 19 nt, Artificial Sequence
  Description of Artificial Sequence: Synthetic oligonucleotide
cccaggggcaucugcugcc

SEQ ID NO: 2466496 - RNA, 19 nt, Artificial Sequence
  Description of Artificial Sequence: Synthetic oligonucleotide
ggcccuccugcguuucucc

SEQ ID NO: 2466497 - RNA, 19 nt, Artificial Sequence
  Description of Artificial Sequence: Synthetic oligonucleotide
agccccuggcuagugcuga

SEQ ID NO: 2466498 - RNA, 19 nt, Artificial Sequence
  Description of Artificial Sequence: Synthetic oligonucleotide
ggucggucccgcucuccag

SEQ ID NO: 2466499 - RNA, 19 nt, Artificial Sequence
  Description of Artificial Sequence: Synthetic oligonucleotide
ugggcccuccugcguuucu

SEQ ID NO: 2466500 - RNA, 19 nt, Artificial Sequence
  Description of Artificial Sequence: Synthetic oligonucleotide
gcccggagcuugcaggggc

SEQ ID NO: 2466501 - RNA, 19 nt, Artificial Sequence
  Description of Artificial Sequence: Synthetic oligonucleotide
uggcgcggcgcagcaagcu

SEQ ID NO: 2466502 - RNA, 19 nt, Artificial Sequence
  Description of Artificial Sequence: Synthetic oligonucleotide
ucccgcucuccagcuccgg

SEQ ID NO: 2466503 - RNA, 19 nt, Artificial Sequence
  Description of Artificial Sequence: Synthetic oligonucleotide
gcugucagcucggggucgg

SEQ ID NO: 2466504 - RNA, 19 nt, Artificial Sequence
  Description of Artificial Sequence: Synthetic oligonucleotide
uggccacgggcuccauguc

SEQ ID NO: 2466505 - RNA, 19 nt, Artificial Sequence
  Description of Artificial Sequence: Synthetic oligonucleotide
gaguacccugaacaauauu

SEQ ID NO: 2466506 - RNA, 19 nt, Artificial Sequence
  Description of Artificial Sequence: Synthetic oligonucleotide
guggugcggacacaaggau

SEQ ID NO: 2466507 - RNA, 19 nt, Artificial Sequence
  Description of Artificial Sequence: Synthetic oligonucleotide
cguggugcggacacaagga

SEQ ID NO: 2466508 - RNA, 19 nt, Artificial Sequence
  Description of Artificial Sequence: Synthetic oligonucleotide
ggcugucagcucggggucg

SEQ ID NO: 2466509 - RNA, 19 nt, Artificial Sequence
  Description of Artificial Sequence: Synthetic oligonucleotide
cccuggcuagugcugaguc

SEQ ID NO: 2466510 - RNA, 19 nt, Artificial Sequence
  Description of Artificial Sequence: Synthetic oligonucleotide
cguugugugcggaccgccc

SEQ ID NO: 2466511 - RNA, 19 nt, Artificial Sequence
  Description of Artificial Sequence: Synthetic oligonucleotide
ccaagccccuggcuagugc

SEQ ID NO: 2466512 - RNA, 19 nt, Artificial Sequence
  Description of Artificial Sequence: Synthetic oligonucleotide
gcaccgcuucagcugggcc

SEQ ID NO: 2466513 - RNA, 19 nt, Artificial Sequence
  Description of Artificial Sequence: Synthetic oligonucleotide
ggggacagucaacgcccag

SEQ ID NO: 2466514 - RNA, 19 nt, Artificial Sequence
  Description of Artificial Sequence: Synthetic oligonucleotide
gcaagcucagugugguaua

SEQ ID NO: 2466515 - RNA, 19 nt, Artificial Sequence
  Description of Artificial Sequence: Synthetic oligonucleotide
gcggacacaaggaugcaua

SEQ ID NO: 2466516 - RNA, 19 nt, Artificial Sequence
  Description of Artificial Sequence: Synthetic oligonucleotide
cgcgcccggagcuugcagg

SEQ ID NO: 2466517 - RNA, 19 nt, Artificial Sequence
  Description of Artificial Sequence: Synthetic oligonucleotide
gcagcaagcucaguguggu

SEQ ID NO: 2466518 - RNA, 19 nt, Artificial Sequence
  Description of Artificial Sequence: Synthetic oligonucleotide
cucucgcgccgcuccagga

SEQ ID NO: 2466519 - RNA, 19 nt, Artificial Sequence
  Description of Artificial Sequence: Synthetic oligonucleotide
gugcugagucucggaagca

SEQ ID NO: 2466520 - RNA, 19 nt, Artificial Sequence
  Description of Artificial Sequence: Synthetic oligonucleotide
acccuggcgcggcgcagca

SEQ ID NO: 2466521 - RNA, 19 nt, Artificial Sequence
  Description of Artificial Sequence: Synthetic oligonucleotide
ccuaguaggcucaguccaa

SEQ ID NO: 2466522 - RNA, 19 nt, Artificial Sequence
  Description of Artificial Sequence: Synthetic oligonucleotide
agccaagccccuggcuagu

SEQ ID NO: 2466523 - RNA, 19 nt, Artificial Sequence
  Description of Artificial Sequence: Synthetic oligonucleotide
gugcggaccgcccacuguu

SEQ ID NO: 2466524 - RNA, 19 nt, Artificial Sequence
  Description of Artificial Sequence: Synthetic oligonucleotide
acuccgccgccugcagcag

SEQ ID NO: 2466525 - RNA, 19 nt, Artificial Sequence
  Description of Artificial Sequence: Synthetic oligonucleotide
gucaacgcccaggggcauc

SEQ ID NO: 2466526 - RNA, 19 nt, Artificial Sequence
  Description of Artificial Sequence: Synthetic oligonucleotide
gggucggucccgcucucca

SEQ ID NO: 2466527 - RNA, 19 nt, Artificial Sequence
  Description of Artificial Sequence: Synthetic oligonucleotide
uugagcgcgcccggagcuu

SEQ ID NO: 2466528 - RNA, 19 nt, Artificial Sequence
  Description of Artificial Sequence: Synthetic oligonucleotide
agucaacgcccaggggcau

SEQ ID NO: 2466529 - RNA, 19 nt, Artificial Sequence
  Description of Artificial Sequence: Synthetic oligonucleotide
cagucccaaacaccaggcu

SEQ ID NO: 2466530 - RNA, 19 nt, Artificial Sequence
  Description of Artificial Sequence: Synthetic oligonucleotide
gggcuccugccuaguaggc

SEQ ID NO: 2466531 - RNA, 19 nt, Artificial Sequence
  Description of Artificial Sequence: Synthetic oligonucleotide
aggcaccgcuucagcuggg

SEQ ID NO: 2466532 - RNA, 19 nt, Artificial Sequence
  Description of Artificial Sequence: Synthetic oligonucleotide
gcggaccgcccacuguuga

SEQ ID NO: 2466533 - RNA, 19 nt, Artificial Sequence
  Description of Artificial Sequence: Synthetic oligonucleotide
ccgccucucucucgcgccg

SEQ ID NO: 2466534 - RNA, 19 nt, Artificial Sequence
  Description of Artificial Sequence: Synthetic oligonucleotide
gugucccgaguacccugaa

SEQ ID NO: 2466535 - RNA, 19 nt, Artificial Sequence
  Description of Artificial Sequence: Synthetic oligonucleotide
gcuccgggcagccccugga

SEQ ID NO: 2466536 - RNA, 19 nt, Artificial Sequence
  Description of Artificial Sequence: Synthetic oligonucleotide
gugcacccuggcgcggcgc

SEQ ID NO: 2466537 - RNA, 19 nt, Artificial Sequence
  Description of Artificial Sequence: Synthetic oligonucleotide
guggggcuccugccuagua

SEQ ID NO: 2466538 - RNA, 19 nt, Artificial Sequence
  Description of Artificial Sequence: Synthetic oligonucleotide
gugcggacacaaggaugca

SEQ ID NO: 2466539 - RNA, 19 nt, Artificial Sequence
  Description of Artificial Sequence: Synthetic oligonucleotide
gccccuggcuagugcugag

SEQ ID NO: 2466540 - RNA, 19 nt, Artificial Sequence
  Description of Artificial Sequence: Synthetic oligonucleotide
cacugcgaagcuucuccuu

SEQ ID NO: 2466541 - RNA, 19 nt, Artificial Sequence
  Description of Artificial Sequence: Synthetic oligonucleotide
cggaccgcccacuguugag

SEQ ID NO: 2466542 - RNA, 19 nt, Artificial Sequence
  Description of Artificial Sequence: Synthetic oligonucleotide
ccggagcuugcaggggccg

SEQ ID NO: 2466543 - RNA, 19 nt, Artificial Sequence
  Description of Artificial Sequence: Synthetic oligonucleotide
ggccguggugcggacacaa

SEQ ID NO: 2466544 - RNA, 19 nt, Artificial Sequence
  Description of Artificial Sequence: Synthetic oligonucleotide
gccccggggccguggugcg

SEQ ID NO: 2466545 - RNA, 19 nt, Artificial Sequence
  Description of Artificial Sequence: Synthetic oligonucleotide
gccguggugcggacacaag

SEQ ID NO: 2466546 - RNA, 19 nt, Artificial Sequence
  Description of Artificial Sequence: Synthetic oligonucleotide
gcgcggcgcagcaagcuca

SEQ ID NO: 2466547 - RNA, 19 nt, Artificial Sequence
  Description of Artificial Sequence: Synthetic oligonucleotide
ccuggcuagugcugagucu

SEQ ID NO: 2466548 - RNA, 19 nt, Artificial Sequence
  Description of Artificial Sequence: Synthetic oligonucleotide
caacgcccaggggcaucug

SEQ ID NO: 2466549 - RNA, 19 nt, Artificial Sequence
  Description of Artificial Sequence: Synthetic oligonucleotide
gcgcgcccggagcuugcag

SEQ ID NO: 2466550 - RNA, 19 nt, Artificial Sequence
  Description of Artificial Sequence: Synthetic oligonucleotide
ggggucggucccgcucucc

SEQ ID NO: 2466551 - RNA, 19 nt, Artificial Sequence
  Description of Artificial Sequence: Synthetic oligonucleotide
ccuccugcguuucuccagu

SEQ ID NO: 2466552 - RNA, 19 nt, Artificial Sequence
  Description of Artificial Sequence: Synthetic oligonucleotide
cgcggcgcagcaagcucag

SEQ ID NO: 2466553 - RNA, 19 nt, Artificial Sequence
  Description of Artificial Sequence: Synthetic oligonucleotide
ccaguucguugugugcgga

SEQ ID NO: 2466554 - RNA, 19 nt, Artificial Sequence
  Description of Artificial Sequence: Synthetic oligonucleotide
ggcuccugccuaguaggcu

SEQ ID NO: 2466555 - RNA, 19 nt, Artificial Sequence
  Description of Artificial Sequence: Synthetic oligonucleotide
gcauagccgugcuccgccu

SEQ ID NO: 2466556 - RNA, 19 nt, Artificial Sequence
  Description of Artificial Sequence: Synthetic oligonucleotide
gugguauaucggggacagu

SEQ ID NO: 2466557 - RNA, 19 nt, Artificial Sequence
  Description of Artificial Sequence: Synthetic oligonucleotide
ccgugcuccgccucucucu

SEQ ID NO: 2466558 - RNA, 19 nt, Artificial Sequence
  Description of Artificial Sequence: Synthetic oligonucleotide
gggcuccaugucggcgacc

SEQ ID NO: 2466559 - RNA, 19 nt, Artificial Sequence
  Description of Artificial Sequence: Synthetic oligonucleotide
cggagcuugcaggggccgc

SEQ ID NO: 2466560 - RNA, 19 nt, Artificial Sequence
  Description of Artificial Sequence: Synthetic oligonucleotide
cggaagcaguucagucuca

SEQ ID NO: 2466561 - RNA, 19 nt, Artificial Sequence
  Description of Artificial Sequence: Synthetic oligonucleotide
cgaguacccugaacaauau

SEQ ID NO: 2466562 - RNA, 19 nt, Artificial Sequence
  Description of Artificial Sequence: Synthetic oligonucleotide
cuccugcguuucuccaguu

SEQ ID NO: 2466563 - RNA, 19 nt, Artificial Sequence
  Description of Artificial Sequence: Synthetic oligonucleotide
ccgccugcagcaggaccug

SEQ ID NO: 2466564 - RNA, 19 nt, Artificial Sequence
  Description of Artificial Sequence: Synthetic oligonucleotide
cccgaguacccugaacaau

SEQ ID NO: 2466565 - RNA, 19 nt, Artificial Sequence
  Description of Artificial Sequence: Synthetic oligonucleotide
cccggggccguggugcgga

SEQ ID NO: 2466566 - RNA, 19 nt, Artificial Sequence
  Description of Artificial Sequence: Synthetic oligonucleotide
cgccucucucucgcgccgc

SEQ ID NO: 2466567 - RNA, 19 nt, Artificial Sequence
  Description of Artificial Sequence: Synthetic oligonucleotide
ccagcuccgggcagccccu

SEQ ID NO: 2466568 - RNA, 19 nt, Artificial Sequence
  Description of Artificial Sequence: Synthetic oligonucleotide
gggccguggugcggacaca

SEQ ID NO: 2466569 - RNA, 19 nt, Artificial Sequence
  Description of Artificial Sequence: Synthetic oligonucleotide
ccggggccguggugcggac

SEQ ID NO: 2466570 - RNA, 19 nt, Artificial Sequence
  Description of Artificial Sequence: Synthetic oligonucleotide
cggucccgcucuccagcuc

SEQ ID NO: 2466571 - RNA, 19 nt, Artificial Sequence
  Description of Artificial Sequence: Synthetic oligonucleotide
ccugccuaguaggcucagu

SEQ ID NO: 2466572 - RNA, 19 nt, Artificial Sequence
  Description of Artificial Sequence: Synthetic oligonucleotide
gcucggggucggucccgcu

SEQ ID NO: 2466573 - RNA, 19 nt, Artificial Sequence
  Description of Artificial Sequence: Synthetic oligonucleotide
ccccuggcuagugcugagu

SEQ ID NO: 2466574 - RNA, 19 nt, Artificial Sequence
  Description of Artificial Sequence: Synthetic oligonucleotide
ccccuggagcugcuccaau

SEQ ID NO: 2466575 - RNA, 19 nt, Artificial Sequence
  Description of Artificial Sequence: Synthetic oligonucleotide
ccgcuucagcugggcccuc

SEQ ID NO: 2466576 - RNA, 19 nt, Artificial Sequence
  Description of Artificial Sequence: Synthetic oligonucleotide
gcggcgcagcaagcucagu

SEQ ID NO: 2466577 - RNA, 19 nt, Artificial Sequence
  Description of Artificial Sequence: Synthetic oligonucleotide
cggggccguggugcggaca

SEQ ID NO: 2466578 - RNA, 19 nt, Artificial Sequence
  Description of Artificial Sequence: Synthetic oligonucleotide
cccuggcgcggcgcagcaa

SEQ ID NO: 2466579 - RNA, 19 nt, Artificial Sequence
  Description of Artificial Sequence: Synthetic oligonucleotide
uaacgugucauccuuaacg

SEQ ID NO: 2466580 - RNA, 19 nt, Artificial Sequence
  Description of Artificial Sequence: Synthetic oligonucleotide
uauaaaucccauuacacug

SEQ ID NO: 2466581 - RNA, 19 nt, Artificial Sequence
  Description of Artificial Sequence: Synthetic oligonucleotide
uguuacauagccaaaaccu

SEQ ID NO: 2466582 - RNA, 19 nt, Artificial Sequence
  Description of Artificial Sequence: Synthetic oligonucleotide
uaucaaaucgaguagagac

SEQ ID NO: 2466583 - RNA, 19 nt, Artificial Sequence
  Description of Artificial Sequence: Synthetic oligonucleotide
aauguuacauagccaaaac

SEQ ID NO: 2466584 - RNA, 19 nt, Artificial Sequence
  Description of Artificial Sequence: Synthetic oligonucleotide
auauauaguuugcacagcg

SEQ ID NO: 2466585 - RNA, 19 nt, Artificial Sequence
  Description of Artificial Sequence: Synthetic oligonucleotide
auaaauguuacauagccaa

SEQ ID NO: 2466586 - RNA, 19 nt, Artificial Sequence
  Description of Artificial Sequence: Synthetic oligonucleotide
uuuauuuauuuauugggga

SEQ ID NO: 2466587 - RNA, 19 nt, Artificial Sequence
  Description of Artificial Sequence: Synthetic oligonucleotide
ugaucaagaauugugaggc

SEQ ID NO: 2466588 - RNA, 19 nt, Artificial Sequence
  Description of Artificial Sequence: Synthetic oligonucleotide
aaucccauuacacugcugu

SEQ ID NO: 2466589 - RNA, 19 nt, Artificial Sequence
  Description of Artificial Sequence: Synthetic oligonucleotide
auggauguuacacuccugc

SEQ ID NO: 2466590 - RNA, 19 nt, Artificial Sequence
  Description of Artificial Sequence: Synthetic oligonucleotide
ucaaggguacgaaugaucc

SEQ ID NO: 2466591 - RNA, 19 nt, Artificial Sequence
  Description of Artificial Sequence: Synthetic oligonucleotide
gauaauauuugcugcuagg

SEQ ID NO: 2466592 - RNA, 19 nt, Artificial Sequence
  Description of Artificial Sequence: Synthetic oligonucleotide
uuauuacugcuucagacug

SEQ ID NO: 2466593 - RNA, 19 nt, Artificial Sequence
  Description of Artificial Sequence: Synthetic oligonucleotide
auguuacauagccaaaacc

SEQ ID NO: 2466594 - RNA, 19 nt, Artificial Sequence
  Description of Artificial Sequence: Synthetic oligonucleotide
aagugcaucccaaaguugc

SEQ ID NO: 2466595 - RNA, 19 nt, Artificial Sequence
  Description of Artificial Sequence: Synthetic oligonucleotide
ucauccuuaacgaagguuc

SEQ ID NO: 2466596 - RNA, 19 nt, Artificial Sequence
  Description of Artificial Sequence: Synthetic oligonucleotide
ucgaguagagacuucacag

SEQ ID NO: 2466597 - RNA, 19 nt, Artificial Sequence
  Description of Artificial Sequence: Synthetic oligonucleotide
uuauuuauuggggaccucg

SEQ ID NO: 2466598 - RNA, 19 nt, Artificial Sequence
  Description of Artificial Sequence: Synthetic oligonucleotide
auuguguggacaaauaggg

SEQ ID NO: 2466599 - RNA, 19 nt, Artificial Sequence
  Description of Artificial Sequence: Synthetic oligonucleotide
cuuuaacaugaguauaugg

SEQ ID NO: 2466600 - RNA, 19 nt, Artificial Sequence
  Description of Artificial Sequence: Synthetic oligonucleotide
gaguagagacuucacagcg

SEQ ID NO: 2466601 - RNA, 19 nt, Artificial Sequence
  Description of Artificial Sequence: Synthetic oligonucleotide
cauuguguggacaaauagg

SEQ ID NO: 2466602 - RNA, 19 nt, Artificial Sequence
  Description of Artificial Sequence: Synthetic oligonucleotide
gugcauaaauguuacauag

SEQ ID NO: 2466603 - RNA, 19 nt, Artificial Sequence
  Description of Artificial Sequence: Synthetic oligonucleotide
auauaaaucccauuacacu

SEQ ID NO: 2466604 - RNA, 19 nt, Artificial Sequence
  Description of Artificial Sequence: Synthetic oligonucleotide
ucacagcguacuaauaacg

SEQ ID NO: 2466605 - RNA, 19 nt, Artificial Sequence
  Description of Artificial Sequence: Synthetic oligonucleotide
uuauuuauuuauuggggac

SEQ ID NO: 2466606 - RNA, 19 nt, Artificial Sequence
  Description of Artificial Sequence: Synthetic oligonucleotide
uaguucuuuaacaugagua

SEQ ID NO: 2466607 - RNA, 19 nt, Artificial Sequence
  Description of Artificial Sequence: Synthetic oligonucleotide
auccaugacuucuucaugg

SEQ ID NO: 2466608 - RNA, 19 nt, Artificial Sequence
  Description of Artificial Sequence: Synthetic oligonucleotide
aaaguugccaaucuuccaa

SEQ ID NO: 2466609 - RNA, 19 nt, Artificial Sequence
  Description of Artificial Sequence: Synthetic oligonucleotide
agggauauauaguuugcac

SEQ ID NO: 2466610 - RNA, 19 nt, Artificial Sequence
  Description of Artificial Sequence: Synthetic oligonucleotide
ugggauuucaagugcaucc

SEQ ID NO: 2466611 - RNA, 19 nt, Artificial Sequence
  Description of Artificial Sequence: Synthetic oligonucleotide
uuuauuggggaccucgcug

SEQ ID NO: 2466612 - RNA, 19 nt, Artificial Sequence
  Description of Artificial Sequence: Synthetic oligonucleotide
uucagacugaucaagaauu

SEQ ID NO: 2466613 - RNA, 19 nt, Artificial Sequence
  Description of Artificial Sequence: Synthetic oligonucleotide
uaauauuugcugcuaggug

SEQ ID NO: 2466614 - RNA, 19 nt, Artificial Sequence
  Description of Artificial Sequence: Synthetic oligonucleotide
uuuguaguucuuuaacaug

SEQ ID NO: 2466615 - RNA, 19 nt, Artificial Sequence
  Description of Artificial Sequence: Synthetic oligonucleotide
uuugagaccagguaaggaa

SEQ ID NO: 2466616 - RNA, 19 nt, Artificial Sequence
  Description of Artificial Sequence: Synthetic oligonucleotide
uuaacaugaguauauggau

SEQ ID NO: 2466617 - RNA, 19 nt, Artificial Sequence
  Description of Artificial Sequence: Synthetic oligonucleotide
agaauugugaggcguauug

SEQ ID NO: 2466618 - RNA, 19 nt, Artificial Sequence
  Description of Artificial Sequence: Synthetic oligonucleotide
auauaguuugcacagcgcu

SEQ ID NO: 2466619 - RNA, 19 nt, Artificial Sequence
  Description of Artificial Sequence: Synthetic oligonucleotide
uuucaagugcaucccaaag

SEQ ID NO: 2466620 - RNA, 19 nt, Artificial Sequence
  Description of Artificial Sequence: Synthetic oligonucleotide
ggauauauaguuugcacag

SEQ ID NO: 2466621 - RNA, 19 nt, Artificial Sequence
  Description of Artificial Sequence: Synthetic oligonucleotide
gaguauauggauguuacac

SEQ ID NO: 2466622 - RNA, 19 nt, Artificial Sequence
  Description of Artificial Sequence: Synthetic oligonucleotide
uguguggacaaauagggau

SEQ ID NO: 2466623 - RNA, 19 nt, Artificial Sequence
  Description of Artificial Sequence: Synthetic oligonucleotide
cugaucaagaauugugagg

SEQ ID NO: 2466624 - RNA, 19 nt, Artificial Sequence
  Description of Artificial Sequence: Synthetic oligonucleotide
aacgugucauccuuaacga

SEQ ID NO: 2466625 - RNA, 19 nt, Artificial Sequence
  Description of Artificial Sequence: Synthetic oligonucleotide
gcauaaauguuacauagcc

SEQ ID NO: 2466626 - RNA, 19 nt, Artificial Sequence
  Description of Artificial Sequence: Synthetic oligonucleotide
auaaaucccauuacacugc

SEQ ID NO: 2466627 - RNA, 19 nt, Artificial Sequence
  Description of Artificial Sequence: Synthetic oligonucleotide
aaaccuuugggguuccgug

SEQ ID NO: 2466628 - RNA, 19 nt, Artificial Sequence
  Description of Artificial Sequence: Synthetic oligonucleotide
agggcuaugaaugacaaca

SEQ ID NO: 2466629 - RNA, 19 nt, Artificial Sequence
  Description of Artificial Sequence: Synthetic oligonucleotide
guuugcacagcgcugagcc

SEQ ID NO: 2466630 - RNA, 19 nt, Artificial Sequence
  Description of Artificial Sequence: Synthetic oligonucleotide
uugagaccagguaaggaag

SEQ ID NO: 2466631 - RNA, 19 nt, Artificial Sequence
  Description of Artificial Sequence: Synthetic oligonucleotide
acugaucaagaauugugag

SEQ ID NO: 2466632 - RNA, 19 nt, Artificial Sequence
  Description of Artificial Sequence: Synthetic oligonucleotide
uguuacaccucucccacug

SEQ ID NO: 2466633 - RNA, 19 nt, Artificial Sequence
  Description of Artificial Sequence: Synthetic oligonucleotide
aguauauggauguuacacu

SEQ ID NO: 2466634 - RNA, 19 nt, Artificial Sequence
  Description of Artificial Sequence: Synthetic oligonucleotide
aguucuuuaacaugaguau

SEQ ID NO: 2466635 - RNA, 19 nt, Artificial Sequence
  Description of Artificial Sequence: Synthetic oligonucleotide
uauauggauguuacacucc

SEQ ID NO: 2466636 - RNA, 19 nt, Artificial Sequence
  Description of Artificial Sequence: Synthetic oligonucleotide
uuugccuuauuacugcuuc

SEQ ID NO: 2466637 - RNA, 19 nt, Artificial Sequence
  Description of Artificial Sequence: Synthetic oligonucleotide
uaugaaugacaacagguuu

SEQ ID NO: 2466638 - RNA, 19 nt, Artificial Sequence
  Description of Artificial Sequence: Synthetic oligonucleotide
uauauaguuugcacagcgc

SEQ ID NO: 2466639 - RNA, 19 nt, Artificial Sequence
  Description of Artificial Sequence: Synthetic oligonucleotide
uucaagugcaucccaaagu

SEQ ID NO: 2466640 - RNA, 19 nt, Artificial Sequence
  Description of Artificial Sequence: Synthetic oligonucleotide
aaccuuugggguuccgugg

SEQ ID NO: 2466641 - RNA, 19 nt, Artificial Sequence
  Description of Artificial Sequence: Synthetic oligonucleotide
uauaguuugcacagcgcug

SEQ ID NO: 2466642 - RNA, 19 nt, Artificial Sequence
  Description of Artificial Sequence: Synthetic oligonucleotide
augaguauauggauguuac

SEQ ID NO: 2466643 - RNA, 19 nt, Artificial Sequence
  Description of Artificial Sequence: Synthetic oligonucleotide
aauaacgugucauccuuaa

SEQ ID NO: 2466644 - RNA, 19 nt, Artificial Sequence
  Description of Artificial Sequence: Synthetic oligonucleotide
ucgcugauaauauuugcug

SEQ ID NO: 2466645 - RNA, 19 nt, Artificial Sequence
  Description of Artificial Sequence: Synthetic oligonucleotide
uacuaauaacgugucaucc

SEQ ID NO: 2466646 - RNA, 19 nt, Artificial Sequence
  Description of Artificial Sequence: Synthetic oligonucleotide
ugcaucaguacuucguggc

SEQ ID NO: 2466647 - RNA, 19 nt, Artificial Sequence
  Description of Artificial Sequence: Synthetic oligonucleotide
aaaucgaguagagacuuca

SEQ ID NO: 2466648 - RNA, 19 nt, Artificial Sequence
  Description of Artificial Sequence: Synthetic oligonucleotide
uguucauucgugugguuug

SEQ ID NO: 2466649 - RNA, 19 nt, Artificial Sequence
  Description of Artificial Sequence: Synthetic oligonucleotide
cauaucaaaucgaguagag

SEQ ID NO: 2466650 - RNA, 19 nt, Artificial Sequence
  Description of Artificial Sequence: Synthetic oligonucleotide
aauugugaggcguauugua

SEQ ID NO: 2466651 - RNA, 19 nt, Artificial Sequence
  Description of Artificial Sequence: Synthetic oligonucleotide
guauauggauguuacacuc

SEQ ID NO: 2466652 - RNA, 19 nt, Artificial Sequence
  Description of Artificial Sequence: Synthetic oligonucleotide
ugguuuggcauccaugacu

SEQ ID NO: 2466653 - RNA, 19 nt, Artificial Sequence
  Description of Artificial Sequence: Synthetic oligonucleotide
acuaauaacgugucauccu

SEQ ID NO: 2466654 - RNA, 19 nt, Artificial Sequence
  Description of Artificial Sequence: Synthetic oligonucleotide
gacgcugaaaggcaagcag

SEQ ID NO: 2466655 - RNA, 19 nt, Artificial Sequence
  Description of Artificial Sequence: Synthetic oligonucleotide
ugugcuuccauuucagcaa

SEQ ID NO: 2466656 - RNA, 19 nt, Artificial Sequence
  Description of Artificial Sequence: Synthetic oligonucleotide
uuauuggggaccucgcuga

SEQ ID NO: 2466657 - RNA, 19 nt, Artificial Sequence
  Description of Artificial Sequence: Synthetic oligonucleotide
auauggauguuacacuccu

SEQ ID NO: 2466658 - RNA, 19 nt, Artificial Sequence
  Description of Artificial Sequence: Synthetic oligonucleotide
ucauucgugugguuuguag

SEQ ID NO: 2466659 - RNA, 19 nt, Artificial Sequence
  Description of Artificial Sequence: Synthetic oligonucleotide
uucuugggauuucaagugc

SEQ ID NO: 2466660 - RNA, 19 nt, Artificial Sequence
  Description of Artificial Sequence: Synthetic oligonucleotide
cuguuguucauucgugugg

SEQ ID NO: 2466661 - RNA, 19 nt, Artificial Sequence
  Description of Artificial Sequence: Synthetic oligonucleotide
agccguugguaacugaagg

SEQ ID NO: 2466662 - RNA, 19 nt, Artificial Sequence
  Description of Artificial Sequence: Synthetic oligonucleotide
agguucccugucuuaaggc

SEQ ID NO: 2466663 - RNA, 19 nt, Artificial Sequence
  Description of Artificial Sequence: Synthetic oligonucleotide
cuagguguuacaccucucc

SEQ ID NO: 2466664 - RNA, 19 nt, Artificial Sequence
  Description of Artificial Sequence: Synthetic oligonucleotide
auagggauauauaguuugc

SEQ ID NO: 2466665 - RNA, 19 nt, Artificial Sequence
  Description of Artificial Sequence: Synthetic oligonucleotide
aucaguacuucguggcugg

SEQ ID NO: 2466666 - RNA, 19 nt, Artificial Sequence
  Description of Artificial Sequence: Synthetic oligonucleotide
uucacagcguacuaauaac

SEQ ID NO: 2466667 - RNA, 19 nt, Artificial Sequence
  Description of Artificial Sequence: Synthetic oligonucleotide
ucauacucuccuugcauug

SEQ ID NO: 2466668 - RNA, 19 nt, Artificial Sequence
  Description of Artificial Sequence: Synthetic oligonucleotide
uugugaggcguauuguacc

SEQ ID NO: 2466669 - RNA, 19 nt, Artificial Sequence
  Description of Artificial Sequence: Synthetic oligonucleotide
auugugaggcguauuguac

SEQ ID NO: 2466670 - RNA, 19 nt, Artificial Sequence
  Description of Artificial Sequence: Synthetic oligonucleotide
uuaacgaagguucccuguc

SEQ ID NO: 2466671 - RNA, 19 nt, Artificial Sequence
  Description of Artificial Sequence: Synthetic oligonucleotide
uauuguacccuggaagggc

SEQ ID NO: 2466672 - RNA, 19 nt, Artificial Sequence
  Description of Artificial Sequence: Synthetic oligonucleotide
uccaggugcauaaauguua

SEQ ID NO: 2466673 - RNA, 19 nt, Artificial Sequence
  Description of Artificial Sequence: Synthetic oligonucleotide
ugaaaggcaagcagcucug

SEQ ID NO: 2466674 - RNA, 19 nt, Artificial Sequence
  Description of Artificial Sequence: Synthetic oligonucleotide
acaaauagggauauauagu

SEQ ID NO: 2466675 - RNA, 19 nt, Artificial Sequence
  Description of Artificial Sequence: Synthetic oligonucleotide
ugugaggcguauuguaccc

SEQ ID NO: 2466676 - RNA, 19 nt, Artificial Sequence
  Description of Artificial Sequence: Synthetic oligonucleotide
gaucaagaauugugaggcg

SEQ ID NO: 2466677 - RNA, 19 nt, Artificial Sequence
  Description of Artificial Sequence: Synthetic oligonucleotide
aaggugcaggcgcaugcac

SEQ ID NO: 2466678 - RNA, 19 nt, Artificial Sequence
  Description of Artificial Sequence: Synthetic oligonucleotide
acugcugugcuuccauuuc

SEQ ID NO: 2466679 - RNA, 19 nt, Artificial Sequence
  Description of Artificial Sequence: Synthetic oligonucleotide
acagcguacuaauaacgug

SEQ ID NO: 2466680 - RNA, 19 nt, Artificial Sequence
  Description of Artificial Sequence: Synthetic oligonucleotide
acuucguggcuggaaaacc

SEQ ID NO: 2466681 - RNA, 19 nt, Artificial Sequence
  Description of Artificial Sequence: Synthetic oligonucleotide
auugugggacgcugaaagg

SEQ ID NO: 2466682 - RNA, 19 nt, Artificial Sequence
  Description of Artificial Sequence: Synthetic oligonucleotide
auuuauuuauuggggaccu

SEQ ID NO: 2466683 - RNA, 19 nt, Artificial Sequence
  Description of Artificial Sequence: Synthetic oligonucleotide
ucuuuaacaugaguauaug

SEQ ID NO: 2466684 - RNA, 19 nt, Artificial Sequence
  Description of Artificial Sequence: Synthetic oligonucleotide
uagguguuacaccucuccc

SEQ ID NO: 2466685 - RNA, 19 nt, Artificial Sequence
  Description of Artificial Sequence: Synthetic oligonucleotide
uuacacuccugcaucagua

SEQ ID NO: 2466686 - RNA, 19 nt, Artificial Sequence
  Description of Artificial Sequence: Synthetic oligonucleotide
auaacgugucauccuuaac

SEQ ID NO: 2466687 - RNA, 19 nt, Artificial Sequence
  Description of Artificial Sequence: Synthetic oligonucleotide
cuucguggcuggaaaaccc

SEQ ID NO: 2466688 - RNA, 19 nt, Artificial Sequence
  Description of Artificial Sequence: Synthetic oligonucleotide
gauauauaguuugcacagc

SEQ ID NO: 2466689 - RNA, 19 nt, Artificial Sequence
  Description of Artificial Sequence: Synthetic oligonucleotide
aucgaguagagacuucaca

SEQ ID NO: 2466690 - RNA, 19 nt, Artificial Sequence
  Description of Artificial Sequence: Synthetic oligonucleotide
agacugaucaagaauugug

SEQ ID NO: 2466691 - RNA, 19 nt, Artificial Sequence
  Description of Artificial Sequence: Synthetic oligonucleotide
ugagccguugguaacugaa

SEQ ID NO: 2466692 - RNA, 19 nt, Artificial Sequence
  Description of Artificial Sequence: Synthetic oligonucleotide
ugcuagguguuacaccucu

SEQ ID NO: 2466693 - RNA, 19 nt, Artificial Sequence
  Description of Artificial Sequence: Synthetic oligonucleotide
ugucauacucuccuugcau

SEQ ID NO: 2466694 - RNA, 19 nt, Artificial Sequence
  Description of Artificial Sequence: Synthetic oligonucleotide
aaucgaguagagacuucac

SEQ ID NO: 2466695 - RNA, 19 nt, Artificial Sequence
  Description of Artificial Sequence: Synthetic oligonucleotide
ucaaaucgaguagagacuu

SEQ ID NO: 2466696 - RNA, 19 nt, Artificial Sequence
  Description of Artificial Sequence: Synthetic oligonucleotide
aguacuucguggcuggaaa

SEQ ID NO: 2466697 - RNA, 19 nt, Artificial Sequence
  Description of Artificial Sequence: Synthetic oligonucleotide
acgcugaaaggcaagcagc

SEQ ID NO: 2466698 - RNA, 19 nt, Artificial Sequence
  Description of Artificial Sequence: Synthetic oligonucleotide
ucaagaauugugaggcgua

SEQ ID NO: 2466699 - RNA, 19 nt, Artificial Sequence
  Description of Artificial Sequence: Synthetic oligonucleotide
uuuugagaccagguaagga

SEQ ID NO: 2466700 - RNA, 19 nt, Artificial Sequence
  Description of Artificial Sequence: Synthetic oligonucleotide
agauggcugucauacucuc

SEQ ID NO: 2466701 - RNA, 19 nt, Artificial Sequence
  Description of Artificial Sequence: Synthetic oligonucleotide
cuggaaaacccuccuuucc

SEQ ID NO: 2466702 - RNA, 19 nt, Artificial Sequence
  Description of Artificial Sequence: Synthetic oligonucleotide
ccuuauuacugcuucagac

SEQ ID NO: 2466703 - RNA, 19 nt, Artificial Sequence
  Description of Artificial Sequence: Synthetic oligonucleotide
ugccuuauuacugcuucag

SEQ ID NO: 2466704 - RNA, 19 nt, Artificial Sequence
  Description of Artificial Sequence: Synthetic oligonucleotide
uguuguucauucguguggu

SEQ ID NO: 2466705 - RNA, 19 nt, Artificial Sequence
  Description of Artificial Sequence: Synthetic oligonucleotide
uuugcugcuagguguuaca

SEQ ID NO: 2466706 - RNA, 19 nt, Artificial Sequence
  Description of Artificial Sequence: Synthetic oligonucleotide
uuguguggacaaauaggga

SEQ ID NO: 2466707 - RNA, 19 nt, Artificial Sequence
  Description of Artificial Sequence: Synthetic oligonucleotide
ucccauuacacugcugugc

SEQ ID NO: 2466708 - RNA, 19 nt, Artificial Sequence
  Description of Artificial Sequence: Synthetic oligonucleotide
cauuacacugcugugcuuc

SEQ ID NO: 2466709 - RNA, 19 nt, Artificial Sequence
  Description of Artificial Sequence: Synthetic oligonucleotide
gggauauauaguuugcaca

SEQ ID NO: 2466710 - RNA, 19 nt, Artificial Sequence
  Description of Artificial Sequence: Synthetic oligonucleotide
gaagguucccugucuuaag

SEQ ID NO: 2466711 - RNA, 19 nt, Artificial Sequence
  Description of Artificial Sequence: Synthetic oligonucleotide
aaguugccaaucuuccaaa

SEQ ID NO: 2466712 - RNA, 19 nt, Artificial Sequence
  Description of Artificial Sequence: Synthetic oligonucleotide
cguauuguacccuggaagg

SEQ ID NO: 2466713 - RNA, 19 nt, Artificial Sequence
  Description of Artificial Sequence: Synthetic oligonucleotide
guacuaauaacgugucauc

SEQ ID NO: 2466714 - RNA, 19 nt, Artificial Sequence
  Description of Artificial Sequence: Synthetic oligonucleotide
accuuugggguuccguggg

SEQ ID NO: 2466715 - RNA, 19 nt, Artificial Sequence
  Description of Artificial Sequence: Synthetic oligonucleotide
ugaggcguauuguacccug

SEQ ID NO: 2466716 - RNA, 19 nt, Artificial Sequence
  Description of Artificial Sequence: Synthetic oligonucleotide
caaauagggauauauaguu

SEQ ID NO: 2466717 - RNA, 19 nt, Artificial Sequence
  Description of Artificial Sequence: Synthetic oligonucleotide
cucaaggguacgaaugauc

SEQ ID NO: 2466718 - RNA, 19 nt, Artificial Sequence
  Description of Artificial Sequence: Synthetic oligonucleotide
agguguuacaccucuccca

SEQ ID NO: 2466719 - RNA, 19 nt, Artificial Sequence
  Description of Artificial Sequence: Synthetic oligonucleotide
ggaaaacccuccuuucccg

SEQ ID NO: 2466720 - RNA, 19 nt, Artificial Sequence
  Description of Artificial Sequence: Synthetic oligonucleotide
ugcacagcuuguacccagg

SEQ ID NO: 2466721 - RNA, 19 nt, Artificial Sequence
  Description of Artificial Sequence: Synthetic oligonucleotide
uccaaauauaaaucccauu

SEQ ID NO: 2466722 - RNA, 19 nt, Artificial Sequence
  Description of Artificial Sequence: Synthetic oligonucleotide
guauuguacccuggaaggg

SEQ ID NO: 2466723 - RNA, 19 nt, Artificial Sequence
  Description of Artificial Sequence: Synthetic oligonucleotide
gcauuguguggacaaauag

SEQ ID NO: 2466724 - RNA, 19 nt, Artificial Sequence
  Description of Artificial Sequence: Synthetic oligonucleotide
uuacaccucucccacugcu

SEQ ID NO: 2466725 - RNA, 19 nt, Artificial Sequence
  Description of Artificial Sequence: Synthetic oligonucleotide
gguuuguaguucuuuaaca

SEQ ID NO: 2466726 - RNA, 19 nt, Artificial Sequence
  Description of Artificial Sequence: Synthetic oligonucleotide
auccuuaacgaagguuccc

SEQ ID NO: 2466727 - RNA, 19 nt, Artificial Sequence
  Description of Artificial Sequence: Synthetic oligonucleotide
uagggauauauaguuugca

SEQ ID NO: 2466728 - RNA, 19 nt, Artificial Sequence
  Description of Artificial Sequence: Synthetic oligonucleotide
aaggccacccauaucaaau

SEQ ID NO: 2466729 - RNA, 19 nt, Artificial Sequence
  Description of Artificial Sequence: Synthetic oligonucleotide
uuugcacagcgcugagccg

SEQ ID NO: 2466730 - RNA, 19 nt, Artificial Sequence
  Description of Artificial Sequence: Synthetic oligonucleotide
cuuauuacugcuucagacu

SEQ ID NO: 2466731 - RNA, 19 nt, Artificial Sequence
  Description of Artificial Sequence: Synthetic oligonucleotide
gcguauuguacccuggaag

SEQ ID NO: 2466732 - RNA, 19 nt, Artificial Sequence
  Description of Artificial Sequence: Synthetic oligonucleotide
uaacgaagguucccugucu

SEQ ID NO: 2466733 - RNA, 19 nt, Artificial Sequence
  Description of Artificial Sequence: Synthetic oligonucleotide
guaaggaaggcacuguugu

SEQ ID NO: 2466734 - RNA, 19 nt, Artificial Sequence
  Description of Artificial Sequence: Synthetic oligonucleotide
uauggauguuacacuccug

SEQ ID NO: 2466735 - RNA, 19 nt, Artificial Sequence
  Description of Artificial Sequence: Synthetic oligonucleotide
gaccagguaaggaaggcac

SEQ ID NO: 2466736 - RNA, 19 nt, Artificial Sequence
  Description of Artificial Sequence: Synthetic oligonucleotide
uggauguuacacuccugca

SEQ ID NO: 2466737 - RNA, 19 nt, Artificial Sequence
  Description of Artificial Sequence: Synthetic oligonucleotide
agaauccagggcuaugaau

SEQ ID NO: 2466738 - RNA, 19 nt, Artificial Sequence
  Description of Artificial Sequence: Synthetic oligonucleotide
auuucaagugcaucccaaa

SEQ ID NO: 2466739 - RNA, 19 nt, Artificial Sequence
  Description of Artificial Sequence: Synthetic oligonucleotide
aaaggccacccauaucaaa

SEQ ID NO: 2466740 - RNA, 19 nt, Artificial Sequence
  Description of Artificial Sequence: Synthetic oligonucleotide
cuucacagcguacuaauaa

SEQ ID NO: 2466741 - RNA, 19 nt, Artificial Sequence
  Description of Artificial Sequence: Synthetic oligonucleotide
uguguagaauccagggcua

SEQ ID NO: 2466742 - RNA, 19 nt, Artificial Sequence
  Description of Artificial Sequence: Synthetic oligonucleotide
agugcaucccaaaguugcc

SEQ ID NO: 2466743 - RNA, 19 nt, Artificial Sequence
  Description of Artificial Sequence: Synthetic oligonucleotide
aaauagggauauauaguuu

SEQ ID NO: 2466744 - RNA, 19 nt, Artificial Sequence
  Description of Artificial Sequence: Synthetic oligonucleotide
aaaacccuccuuucccgaa

SEQ ID NO: 2466745 - RNA, 19 nt, Artificial Sequence
  Description of Artificial Sequence: Synthetic oligonucleotide
ggcuaugaaugacaacagg

SEQ ID NO: 2466746 - RNA, 19 nt, Artificial Sequence
  Description of Artificial Sequence: Synthetic oligonucleotide
aucaaaucgaguagagacu

SEQ ID NO: 2466747 - RNA, 19 nt, Artificial Sequence
  Description of Artificial Sequence: Synthetic oligonucleotide
auacucuccuugcauugug

SEQ ID NO: 2466748 - RNA, 19 nt, Artificial Sequence
  Description of Artificial Sequence: Synthetic oligonucleotide
uaauaacgugucauccuua

SEQ ID NO: 2466749 - RNA, 19 nt, Artificial Sequence
  Description of Artificial Sequence: Synthetic oligonucleotide
uccuuaacgaagguucccu

SEQ ID NO: 2466750 - RNA, 19 nt, Artificial Sequence
  Description of Artificial Sequence: Synthetic oligonucleotide
uucguggcuggaaaacccu

SEQ ID NO: 2466751 - RNA, 19 nt, Artificial Sequence
  Description of Artificial Sequence: Synthetic oligonucleotide
aacgaagguucccugucuu

SEQ ID NO: 2466752 - RNA, 19 nt, Artificial Sequence
  Description of Artificial Sequence: Synthetic oligonucleotide
cuguguagaauccagggcu

SEQ ID NO: 2466753 - RNA, 19 nt, Artificial Sequence
  Description of Artificial Sequence: Synthetic oligonucleotide
ucgugugguuuguaguucu

SEQ ID NO: 2466754 - RNA, 19 nt, Artificial Sequence
  Description of Artificial Sequence: Synthetic oligonucleotide
uguggacaaauagggauau

SEQ ID NO: 2466755 - RNA, 19 nt, Artificial Sequence
  Description of Artificial Sequence: Synthetic oligonucleotide
uacacuccugcaucaguac

SEQ ID NO: 2466756 - RNA, 19 nt, Artificial Sequence
  Description of Artificial Sequence: Synthetic oligonucleotide
guagaauccagggcuauga

SEQ ID NO: 2466757 - RNA, 19 nt, Artificial Sequence
  Description of Artificial Sequence: Synthetic oligonucleotide
gguguuacaccucucccac

SEQ ID NO: 2466758 - RNA, 19 nt, Artificial Sequence
  Description of Artificial Sequence: Synthetic oligonucleotide
caagugcaucccaaaguug

SEQ ID NO: 2466759 - RNA, 19 nt, Artificial Sequence
  Description of Artificial Sequence: Synthetic oligonucleotide
agcguacuaauaacguguc

SEQ ID NO: 2466760 - RNA, 19 nt, Artificial Sequence
  Description of Artificial Sequence: Synthetic oligonucleotide
ggagauggcugucauacuc

SEQ ID NO: 2466761 - RNA, 19 nt, Artificial Sequence
  Description of Artificial Sequence: Synthetic oligonucleotide
uugguaacugaaggugcag

SEQ ID NO: 2466762 - RNA, 19 nt, Artificial Sequence
  Description of Artificial Sequence: Synthetic oligonucleotide
uuuguccucaaggguacga

SEQ ID NO: 2466763 - RNA, 19 nt, Artificial Sequence
  Description of Artificial Sequence: Synthetic oligonucleotide
cugccuguguagaauccag

SEQ ID NO: 2466764 - RNA, 19 nt, Artificial Sequence
  Description of Artificial Sequence: Synthetic oligonucleotide
aaacccuccuuucccgaaa

SEQ ID NO: 2466765 - RNA, 19 nt, Artificial Sequence
  Description of Artificial Sequence: Synthetic oligonucleotide
ugccaaucuuccaaauaua

SEQ ID NO: 2466766 - RNA, 19 nt, Artificial Sequence
  Description of Artificial Sequence: Synthetic oligonucleotide
ugggacgcugaaaggcaag

SEQ ID NO: 2466767 - RNA, 19 nt, Artificial Sequence
  Description of Artificial Sequence: Synthetic oligonucleotide
uacacugcugugcuuccau

SEQ ID NO: 2466768 - RNA, 19 nt, Artificial Sequence
  Description of Artificial Sequence: Synthetic oligonucleotide
gaaaggcaagcagcucugg

SEQ ID NO: 2466769 - RNA, 19 nt, Artificial Sequence
  Description of Artificial Sequence: Synthetic oligonucleotide
uugcacagcgcugagccgu

SEQ ID NO: 2466770 - RNA, 19 nt, Artificial Sequence
  Description of Artificial Sequence: Synthetic oligonucleotide
uuccaggugcauaaauguu

SEQ ID NO: 2466771 - RNA, 19 nt, Artificial Sequence
  Description of Artificial Sequence: Synthetic oligonucleotide
gaaaacccuccuuucccga

SEQ ID NO: 2466772 - RNA, 19 nt, Artificial Sequence
  Description of Artificial Sequence: Synthetic oligonucleotide
uacuucguggcuggaaaac

SEQ ID NO: 2466773 - RNA, 19 nt, Artificial Sequence
  Description of Artificial Sequence: Synthetic oligonucleotide
cgugucauccuuaacgaag

SEQ ID NO: 2466774 - RNA, 19 nt, Artificial Sequence
  Description of Artificial Sequence: Synthetic oligonucleotide
uacccuggaagggccaggg

SEQ ID NO: 2466775 - RNA, 19 nt, Artificial Sequence
  Description of Artificial Sequence: Synthetic oligonucleotide
gacaacagguuucuccucu

SEQ ID NO: 2466776 - RNA, 19 nt, Artificial Sequence
  Description of Artificial Sequence: Synthetic oligonucleotide
cuuccaggugcauaaaugu

SEQ ID NO: 2466777 - RNA, 19 nt, Artificial Sequence
  Description of Artificial Sequence: Synthetic oligonucleotide
ggggagauggcugucauac

SEQ ID NO: 2466778 - RNA, 19 nt, Artificial Sequence
  Description of Artificial Sequence: Synthetic oligonucleotide
ugucauccuuaacgaaggu

SEQ ID NO: 2466779 - RNA, 19 nt, Artificial Sequence
  Description of Artificial Sequence: Synthetic oligonucleotide
gucuuaaggcuuccaggug

SEQ ID NO: 2466780 - RNA, 19 nt, Artificial Sequence
  Description of Artificial Sequence: Synthetic oligonucleotide
ggccacccauaucaaaucg

SEQ ID NO: 2466781 - RNA, 19 nt, Artificial Sequence
  Description of Artificial Sequence: Synthetic oligonucleotide
caucaguacuucguggcug

SEQ ID NO: 2466782 - RNA, 19 nt, Artificial Sequence
  Description of Artificial Sequence: Synthetic oligonucleotide
ggugcaggcgcaugcacag

SEQ ID NO: 2466783 - RNA, 19 nt, Artificial Sequence
  Description of Artificial Sequence: Synthetic oligonucleotide
uaguuugcacagcgcugag

SEQ ID NO: 2466784 - RNA, 19 nt, Artificial Sequence
  Description of Artificial Sequence: Synthetic oligonucleotide
uguccucaaggguacgaau

SEQ ID NO: 2466785 - RNA, 19 nt, Artificial Sequence
  Description of Artificial Sequence: Synthetic oligonucleotide
cugaaaggcaagcagcucu

SEQ ID NO: 2466786 - RNA, 19 nt, Artificial Sequence
  Description of Artificial Sequence: Synthetic oligonucleotide
cagcguacuaauaacgugu

SEQ ID NO: 2466787 - RNA, 19 nt, Artificial Sequence
  Description of Artificial Sequence: Synthetic oligonucleotide
ccacccauaucaaaucgag

SEQ ID NO: 2466788 - RNA, 19 nt, Artificial Sequence
  Description of Artificial Sequence: Synthetic oligonucleotide
cgaaaggccacccauauca

SEQ ID NO: 2466789 - RNA, 19 nt, Artificial Sequence
  Description of Artificial Sequence: Synthetic oligonucleotide
uguacccuggaagggccag

SEQ ID NO: 2466790 - RNA, 19 nt, Artificial Sequence
  Description of Artificial Sequence: Synthetic oligonucleotide
aggcacuguuguucauucg

SEQ ID NO: 2466791 - RNA, 19 nt, Artificial Sequence
  Description of Artificial Sequence: Synthetic oligonucleotide
uugggauuucaagugcauc

SEQ ID NO: 2466792 - RNA, 19 nt, Artificial Sequence
  Description of Artificial Sequence: Synthetic oligonucleotide
uguacccaggucugccugu

SEQ ID NO: 2466793 - RNA, 19 nt, Artificial Sequence
  Description of Artificial Sequence: Synthetic oligonucleotide
caaaguugccaaucuucca

SEQ ID NO: 2466794 - RNA, 19 nt, Artificial Sequence
  Description of Artificial Sequence: Synthetic oligonucleotide
guugguaacugaaggugca

SEQ ID NO: 2466795 - RNA, 19 nt, Artificial Sequence
  Description of Artificial Sequence: Synthetic oligonucleotide
aguugccaaucuuccaaau

SEQ ID NO: 2466796 - RNA, 19 nt, Artificial Sequence
  Description of Artificial Sequence: Synthetic oligonucleotide
cucucccacugcuuguuug

SEQ ID NO: 2466797 - RNA, 19 nt, Artificial Sequence
  Description of Artificial Sequence: Synthetic oligonucleotide
gauggcugucauacucucc

SEQ ID NO: 2466798 - RNA, 19 nt, Artificial Sequence
  Description of Artificial Sequence: Synthetic oligonucleotide
uccucuucuugggauuuca

SEQ ID NO: 2466799 - RNA, 19 nt, Artificial Sequence
  Description of Artificial Sequence: Synthetic oligonucleotide
agguaaggaaggcacuguu

SEQ ID NO: 2466800 - RNA, 19 nt, Artificial Sequence
  Description of Artificial Sequence: Synthetic oligonucleotide
cucgcugauaauauuugcu

SEQ ID NO: 2466801 - RNA, 19 nt, Artificial Sequence
  Description of Artificial Sequence: Synthetic oligonucleotide
aacugaaggugcaggcgca

SEQ ID NO: 2466802 - RNA, 19 nt, Artificial Sequence
  Description of Artificial Sequence: Synthetic oligonucleotide
ccaggugcauaaauguuac

SEQ ID NO: 2466803 - RNA, 19 nt, Artificial Sequence
  Description of Artificial Sequence: Synthetic oligonucleotide
gagccguugguaacugaag

SEQ ID NO: 2466804 - RNA, 19 nt, Artificial Sequence
  Description of Artificial Sequence: Synthetic oligonucleotide
ggugcauaaauguuacaua

SEQ ID NO: 2466805 - RNA, 19 nt, Artificial Sequence
  Description of Artificial Sequence: Synthetic oligonucleotide
gaggcguauuguacccugg

SEQ ID NO: 2466806 - RNA, 19 nt, Artificial Sequence
  Description of Artificial Sequence: Synthetic oligonucleotide
uaaggaaggcacuguuguu

SEQ ID NO: 2466807 - RNA, 19 nt, Artificial Sequence
  Description of Artificial Sequence: Synthetic oligonucleotide
ccuguguagaauccagggc

SEQ ID NO: 2466808 - RNA, 19 nt, Artificial Sequence
  Description of Artificial Sequence: Synthetic oligonucleotide
gcugcuagguguuacaccu

SEQ ID NO: 2466809 - RNA, 19 nt, Artificial Sequence
  Description of Artificial Sequence: Synthetic oligonucleotide
gacuucacagcguacuaau

SEQ ID NO: 2466810 - RNA, 19 nt, Artificial Sequence
  Description of Artificial Sequence: Synthetic oligonucleotide
guuacaccucucccacugc

SEQ ID NO: 2466811 - RNA, 19 nt, Artificial Sequence
  Description of Artificial Sequence: Synthetic oligonucleotide
ccugucuuaaggcuuccag

SEQ ID NO: 2466812 - RNA, 19 nt, Artificial Sequence
  Description of Artificial Sequence: Synthetic oligonucleotide
aagaauugugaggcguauu

SEQ ID NO: 2466813 - RNA, 19 nt, Artificial Sequence
  Description of Artificial Sequence: Synthetic oligonucleotide
gcuaugaaugacaacaggu

SEQ ID NO: 2466814 - RNA, 19 nt, Artificial Sequence
  Description of Artificial Sequence: Synthetic oligonucleotide
uucgugugguuuguaguuc

SEQ ID NO: 2466815 - RNA, 19 nt, Artificial Sequence
  Description of Artificial Sequence: Synthetic oligonucleotide
uugcugcuagguguuacac

SEQ ID NO: 2466816 - RNA, 19 nt, Artificial Sequence
  Description of Artificial Sequence: Synthetic oligonucleotide
gguaaggaaggcacuguug

SEQ ID NO: 2466817 - RNA, 19 nt, Artificial Sequence
  Description of Artificial Sequence: Synthetic oligonucleotide
accucgcugauaauauuug

SEQ ID NO: 2466818 - RNA, 19 nt, Artificial Sequence
  Description of Artificial Sequence: Synthetic oligonucleotide
aggcguauuguacccugga

SEQ ID NO: 2466819 - RNA, 19 nt, Artificial Sequence
  Description of Artificial Sequence: Synthetic oligonucleotide
caaaucgaguagagacuuc

SEQ ID NO: 2466820 - RNA, 19 nt, Artificial Sequence
  Description of Artificial Sequence: Synthetic oligonucleotide
agaccagguaaggaaggca

SEQ ID NO: 2466821 - RNA, 19 nt, Artificial Sequence
  Description of Artificial Sequence: Synthetic oligonucleotide
uuuauuuauuggggaccuc

SEQ ID NO: 2466822 - RNA, 19 nt, Artificial Sequence
  Description of Artificial Sequence: Synthetic oligonucleotide
gcuuccaggugcauaaaug

SEQ ID NO: 2466823 - RNA, 19 nt, Artificial Sequence
  Description of Artificial Sequence: Synthetic oligonucleotide
uuguacccuggaagggcca

SEQ ID NO: 2466824 - RNA, 19 nt, Artificial Sequence
  Description of Artificial Sequence: Synthetic oligonucleotide
cgcugauaauauuugcugc

SEQ ID NO: 2466825 - RNA, 19 nt, Artificial Sequence
  Description of Artificial Sequence: Synthetic oligonucleotide
guaguucuuuaacaugagu

SEQ ID NO: 2466826 - RNA, 19 nt, Artificial Sequence
  Description of Artificial Sequence: Synthetic oligonucleotide
ucguggcuggaaaacccuc

SEQ ID NO: 2466827 - RNA, 19 nt, Artificial Sequence
  Description of Artificial Sequence: Synthetic oligonucleotide
cuuaacgaagguucccugu

SEQ ID NO: 2466828 - RNA, 19 nt, Artificial Sequence
  Description of Artificial Sequence: Synthetic oligonucleotide
gggauuucaagugcauccc

SEQ ID NO: 2466829 - RNA, 19 nt, Artificial Sequence
  Description of Artificial Sequence: Synthetic oligonucleotide
caugaguauauggauguua

SEQ ID NO: 2466830 - RNA, 19 nt, Artificial Sequence
  Description of Artificial Sequence: Synthetic oligonucleotide
cguugguaacugaaggugc

SEQ ID NO: 2466831 - RNA, 19 nt, Artificial Sequence
  Description of Artificial Sequence: Synthetic oligonucleotide
cuaauaacgugucauccuu

SEQ ID NO: 2466832 - RNA, 19 nt, Artificial Sequence
  Description of Artificial Sequence: Synthetic oligonucleotide
uuguccucaaggguacgaa

SEQ ID NO: 2466833 - RNA, 19 nt, Artificial Sequence
  Description of Artificial Sequence: Synthetic oligonucleotide
gcugauaauauuugcugcu

SEQ ID NO: 2466834 - RNA, 19 nt, Artificial Sequence
  Description of Artificial Sequence: Synthetic oligonucleotide
gagacuucacagcguacua

SEQ ID NO: 2466835 - RNA, 19 nt, Artificial Sequence
  Description of Artificial Sequence: Synthetic oligonucleotide
cgaguagagacuucacagc

SEQ ID NO: 2466836 - RNA, 19 nt, Artificial Sequence
  Description of Artificial Sequence: Synthetic oligonucleotide
cugguuuggcauccaugac

SEQ ID NO: 2466837 - RNA, 19 nt, Artificial Sequence
  Description of Artificial Sequence: Synthetic oligonucleotide
cacagcuuguacccagguc

SEQ ID NO: 2466838 - RNA, 19 nt, Artificial Sequence
  Description of Artificial Sequence: Synthetic oligonucleotide
cacagcguacuaauaacgu

SEQ ID NO: 2466839 - RNA, 19 nt, Artificial Sequence
  Description of Artificial Sequence: Synthetic oligonucleotide
cauucgugugguuuguagu

SEQ ID NO: 2466840 - RNA, 19 nt, Artificial Sequence
  Description of Artificial Sequence: Synthetic oligonucleotide
uuugggguuccgugggauu

SEQ ID NO: 2466841 - RNA, 19 nt, Artificial Sequence
  Description of Artificial Sequence: Synthetic oligonucleotide
agacuucacagcguacuaa

SEQ ID NO: 2466842 - RNA, 19 nt, Artificial Sequence
  Description of Artificial Sequence: Synthetic oligonucleotide
ccucgcugauaauauuugc

SEQ ID NO: 2466843 - RNA, 19 nt, Artificial Sequence
  Description of Artificial Sequence: Synthetic oligonucleotide
acgugucauccuuaacgaa

SEQ ID NO: 2466844 - RNA, 19 nt, Artificial Sequence
  Description of Artificial Sequence: Synthetic oligonucleotide
gaauugugaggcguauugu

SEQ ID NO: 2466845 - RNA, 19 nt, Artificial Sequence
  Description of Artificial Sequence: Synthetic oligonucleotide
uauuggggaccucgcugau

SEQ ID NO: 2466846 - RNA, 19 nt, Artificial Sequence
  Description of Artificial Sequence: Synthetic oligonucleotide
cuuuguccucaaggguacg

SEQ ID NO: 2466847 - RNA, 19 nt, Artificial Sequence
  Description of Artificial Sequence: Synthetic oligonucleotide
ggauuucaagugcauccca

SEQ ID NO: 2466848 - RNA, 19 nt, Artificial Sequence
  Description of Artificial Sequence: Synthetic oligonucleotide
caagcagcucugguuuggc

SEQ ID NO: 2466849 - RNA, 19 nt, Artificial Sequence
  Description of Artificial Sequence: Synthetic oligonucleotide
ggucugccuguguagaauc

SEQ ID NO: 2466850 - RNA, 19 nt, Artificial Sequence
  Description of Artificial Sequence: Synthetic oligonucleotide
gaaggugcaggcgcaugca

SEQ ID NO: 2466851 - RNA, 19 nt, Artificial Sequence
  Description of Artificial Sequence: Synthetic oligonucleotide
guuacauagccaaaaccuu

SEQ ID NO: 2466852 - RNA, 19 nt, Artificial Sequence
  Description of Artificial Sequence: Synthetic oligonucleotide
uccuugcauuguguggaca

SEQ ID NO: 2466853 - RNA, 19 nt, Artificial Sequence
  Description of Artificial Sequence: Synthetic oligonucleotide
cagggcuaugaaugacaac

SEQ ID NO: 2466854 - RNA, 19 nt, Artificial Sequence
  Description of Artificial Sequence: Synthetic oligonucleotide
ggcacuguuguucauucgu

SEQ ID NO: 2466855 - RNA, 19 nt, Artificial Sequence
  Description of Artificial Sequence: Synthetic oligonucleotide
cuccuugcauuguguggac

SEQ ID NO: 2466856 - RNA, 19 nt, Artificial Sequence
  Description of Artificial Sequence: Synthetic oligonucleotide
gucugccuguguagaaucc

SEQ ID NO: 2466857 - RNA, 19 nt, Artificial Sequence
  Description of Artificial Sequence: Synthetic oligonucleotide
guacuucguggcuggaaaa

SEQ ID NO: 2466858 - RNA, 19 nt, Artificial Sequence
  Description of Artificial Sequence: Synthetic oligonucleotide
ccguugguaacugaaggug

SEQ ID NO: 2466859 - RNA, 19 nt, Artificial Sequence
  Description of Artificial Sequence: Synthetic oligonucleotide
guguggacaaauagggaua

SEQ ID NO: 2466860 - RNA, 19 nt, Artificial Sequence
  Description of Artificial Sequence: Synthetic oligonucleotide
cugauaauauuugcugcua

SEQ ID NO: 2466861 - RNA, 19 nt, Artificial Sequence
  Description of Artificial Sequence: Synthetic oligonucleotide
gccaaucuuccaaauauaa

SEQ ID NO: 2466862 - RNA, 19 nt, Artificial Sequence
  Description of Artificial Sequence: Synthetic oligonucleotide
acgaagguucccugucuua

SEQ ID NO: 2466863 - RNA, 19 nt, Artificial Sequence
  Description of Artificial Sequence: Synthetic oligonucleotide
uggcuggaaaacccuccuu

SEQ ID NO: 2466864 - RNA, 19 nt, Artificial Sequence
  Description of Artificial Sequence: Synthetic oligonucleotide
caacuuuguccucaagggu

SEQ ID NO: 2466865 - RNA, 19 nt, Artificial Sequence
  Description of Artificial Sequence: Synthetic oligonucleotide
ccauaucaaaucgaguaga

SEQ ID NO: 2466866 - RNA, 19 nt, Artificial Sequence
  Description of Artificial Sequence: Synthetic oligonucleotide
gaaaggccacccauaucaa

SEQ ID NO: 2466867 - RNA, 19 nt, Artificial Sequence
  Description of Artificial Sequence: Synthetic oligonucleotide
ccuuaacgaagguucccug

SEQ ID NO: 2466868 - RNA, 19 nt, Artificial Sequence
  Description of Artificial Sequence: Synthetic oligonucleotide
ccaaucuuccaaauauaaa

SEQ ID NO: 2466869 - RNA, 19 nt, Artificial Sequence
  Description of Artificial Sequence: Synthetic oligonucleotide
aggucugccuguguagaau

SEQ ID NO: 2466870 - RNA, 19 nt, Artificial Sequence
  Description of Artificial Sequence: Synthetic oligonucleotide
gaccucgcugauaauauuu

SEQ ID NO: 2466871 - RNA, 19 nt, Artificial Sequence
  Description of Artificial Sequence: Synthetic oligonucleotide
gguucccugucuuaaggcu

SEQ ID NO: 2466872 - RNA, 19 nt, Artificial Sequence
  Description of Artificial Sequence: Synthetic oligonucleotide
caaaaccuuugggguuccg

SEQ ID NO: 2466873 - RNA, 19 nt, Artificial Sequence
  Description of Artificial Sequence: Synthetic oligonucleotide
cugaaggugcaggcgcaug

SEQ ID NO: 2466874 - RNA, 19 nt, Artificial Sequence
  Description of Artificial Sequence: Synthetic oligonucleotide
ggacaaauagggauauaua

SEQ ID NO: 2466875 - RNA, 19 nt, Artificial Sequence
  Description of Artificial Sequence: Synthetic oligonucleotide
uauuugcugcuagguguua

SEQ ID NO: 2466876 - RNA, 19 nt, Artificial Sequence
  Description of Artificial Sequence: Synthetic oligonucleotide
uucauucgugugguuugua

SEQ ID NO: 2466877 - RNA, 19 nt, Artificial Sequence
  Description of Artificial Sequence: Synthetic oligonucleotide
ggcaagcagcucugguuug

SEQ ID NO: 2466878 - RNA, 19 nt, Artificial Sequence
  Description of Artificial Sequence: Synthetic oligonucleotide
ugggguuccgugggauugu

SEQ ID NO: 2466879 - RNA, 19 nt, Artificial Sequence
  Description of Artificial Sequence: Synthetic oligonucleotide
gccuuauuacugcuucaga

SEQ ID NO: 2466880 - RNA, 19 nt, Artificial Sequence
  Description of Artificial Sequence: Synthetic oligonucleotide
ccuugcauuguguggacaa

SEQ ID NO: 2466881 - RNA, 19 nt, Artificial Sequence
  Description of Artificial Sequence: Synthetic oligonucleotide
guacccaggucugccugug

SEQ ID NO: 2466882 - RNA, 19 nt, Artificial Sequence
  Description of Artificial Sequence: Synthetic oligonucleotide
uggaagggccaggggagau

SEQ ID NO: 2466883 - RNA, 19 nt, Artificial Sequence
  Description of Artificial Sequence: Synthetic oligonucleotide
acuucacagcguacuaaua

SEQ ID NO: 2466884 - RNA, 19 nt, Artificial Sequence
  Description of Artificial Sequence: Synthetic oligonucleotide
cuugcauuguguggacaaa

SEQ ID NO: 2466885 - RNA, 19 nt, Artificial Sequence
  Description of Artificial Sequence: Synthetic oligonucleotide
cuugggauuucaagugcau

SEQ ID NO: 2466886 - RNA, 19 nt, Artificial Sequence
  Description of Artificial Sequence: Synthetic oligonucleotide
guggcuggaaaacccuccu

SEQ ID NO: 2466887 - RNA, 19 nt, Artificial Sequence
  Description of Artificial Sequence: Synthetic oligonucleotide
uuaaggcuuccaggugcau

SEQ ID NO: 2466888 - RNA, 19 nt, Artificial Sequence
  Description of Artificial Sequence: Synthetic oligonucleotide
caggugcauaaauguuaca

SEQ ID NO: 2466889 - RNA, 19 nt, Artificial Sequence
  Description of Artificial Sequence: Synthetic oligonucleotide
ggcguauuguacccuggaa

SEQ ID NO: 2466890 - RNA, 19 nt, Artificial Sequence
  Description of Artificial Sequence: Synthetic oligonucleotide
aggggagauggcugucaua

SEQ ID NO: 2466891 - RNA, 19 nt, Artificial Sequence
  Description of Artificial Sequence: Synthetic oligonucleotide
ggcuggaaaacccuccuuu

SEQ ID NO: 2466892 - RNA, 19 nt, Artificial Sequence
  Description of Artificial Sequence: Synthetic oligonucleotide
gguuuggcauccaugacuu

SEQ ID NO: 2466893 - RNA, 19 nt, Artificial Sequence
  Description of Artificial Sequence: Synthetic oligonucleotide
gggauugugggacgcugaa

SEQ ID NO: 2466894 - RNA, 19 nt, Artificial Sequence
  Description of Artificial Sequence: Synthetic oligonucleotide
gcgcaugcacagcuuguac

SEQ ID NO: 2466895 - RNA, 19 nt, Artificial Sequence
  Description of Artificial Sequence: Synthetic oligonucleotide
gucauccuuaacgaagguu

SEQ ID NO: 2466896 - RNA, 19 nt, Artificial Sequence
  Description of Artificial Sequence: Synthetic oligonucleotide
gcguacuaauaacguguca

SEQ ID NO: 2466897 - RNA, 19 nt, Artificial Sequence
  Description of Artificial Sequence: Synthetic oligonucleotide
cacuccugcaucaguacuu

SEQ ID NO: 2466898 - RNA, 19 nt, Artificial Sequence
  Description of Artificial Sequence: Synthetic oligonucleotide
gccguugguaacugaaggu

SEQ ID NO: 2466899 - RNA, 19 nt, Artificial Sequence
  Description of Artificial Sequence: Synthetic oligonucleotide
ccagggcuaugaaugacaa

SEQ ID NO: 2466900 - RNA, 19 nt, Artificial Sequence
  Description of Artificial Sequence: Synthetic oligonucleotide
auuggggaccucgcugaua

SEQ ID NO: 2466901 - RNA, 19 nt, Artificial Sequence
  Description of Artificial Sequence: Synthetic oligonucleotide
cugagccguugguaacuga

SEQ ID NO: 2466902 - RNA, 19 nt, Artificial Sequence
  Description of Artificial Sequence: Synthetic oligonucleotide
caggucugccuguguagaa

SEQ ID NO: 2466903 - RNA, 19 nt, Artificial Sequence
  Description of Artificial Sequence: Synthetic oligonucleotide
guucauucgugugguuugu

SEQ ID NO: 2466904 - RNA, 19 nt, Artificial Sequence
  Description of Artificial Sequence: Synthetic oligonucleotide
gccacccauaucaaaucga

SEQ ID NO: 2466905 - RNA, 19 nt, Artificial Sequence
  Description of Artificial Sequence: Synthetic oligonucleotide
aggcgcaugcacagcuugu

SEQ ID NO: 2466906 - RNA, 19 nt, Artificial Sequence
  Description of Artificial Sequence: Synthetic oligonucleotide
accucucccacugcuuguu

SEQ ID NO: 2466907 - RNA, 19 nt, Artificial Sequence
  Description of Artificial Sequence: Synthetic oligonucleotide
ggacgcugaaaggcaagca

SEQ ID NO: 2466908 - RNA, 19 nt, Artificial Sequence
  Description of Artificial Sequence: Synthetic oligonucleotide
cacugcugugcuuccauuu

SEQ ID NO: 2466909 - RNA, 19 nt, Artificial Sequence
  Description of Artificial Sequence: Synthetic oligonucleotide
gcugagccguugguaacug

SEQ ID NO: 2466910 - RNA, 19 nt, Artificial Sequence
  Description of Artificial Sequence: Synthetic oligonucleotide
cguacuaauaacgugucau

SEQ ID NO: 2466911 - RNA, 19 nt, Artificial Sequence
  Description of Artificial Sequence: Synthetic oligonucleotide
caagaauugugaggcguau

SEQ ID NO: 2466912 - RNA, 19 nt, Artificial Sequence
  Description of Artificial Sequence: Synthetic oligonucleotide
caguacuucguggcuggaa

SEQ ID NO: 2466913 - RNA, 19 nt, Artificial Sequence
  Description of Artificial Sequence: Synthetic oligonucleotide
cccauuacacugcugugcu

SEQ ID NO: 2466914 - RNA, 19 nt, Artificial Sequence
  Description of Artificial Sequence: Synthetic oligonucleotide
guguuacaccucucccacu

SEQ ID NO: 2466915 - RNA, 19 nt, Artificial Sequence
  Description of Artificial Sequence: Synthetic oligonucleotide
ccaaaaccuuugggguucc

SEQ ID NO: 2466916 - RNA, 19 nt, Artificial Sequence
  Description of Artificial Sequence: Synthetic oligonucleotide
uggggaccucgcugauaau

SEQ ID NO: 2466917 - RNA, 19 nt, Artificial Sequence
  Description of Artificial Sequence: Synthetic oligonucleotide
ggauugugggacgcugaaa

SEQ ID NO: 2466918 - RNA, 19 nt, Artificial Sequence
  Description of Artificial Sequence: Synthetic oligonucleotide
gcgcugagccguugguaac

SEQ ID NO: 2466919 - RNA, 19 nt, Artificial Sequence
  Description of Artificial Sequence: Synthetic oligonucleotide
gggaccucgcugauaauau

SEQ ID NO: 2466920 - RNA, 19 nt, Artificial Sequence
  Description of Artificial Sequence: Synthetic oligonucleotide
cuuugggguuccgugggau

SEQ ID NO: 2466921 - RNA, 19 nt, Artificial Sequence
  Description of Artificial Sequence: Synthetic oligonucleotide
ccgaaaggccacccauauc

SEQ ID NO: 2466922 - RNA, 19 nt, Artificial Sequence
  Description of Artificial Sequence: Synthetic oligonucleotide
guguagaauccagggcuau

SEQ ID NO: 2466923 - RNA, 19 nt, Artificial Sequence
  Description of Artificial Sequence: Synthetic oligonucleotide
gcuagguguuacaccucuc

SEQ ID NO: 2466924 - RNA, 19 nt, Artificial Sequence
  Description of Artificial Sequence: Synthetic oligonucleotide
gugaggcguauuguacccu

SEQ ID NO: 2466925 - RNA, 19 nt, Artificial Sequence
  Description of Artificial Sequence: Synthetic oligonucleotide
guggacaaauagggauaua

SEQ ID NO: 2466926 - RNA, 19 nt, Artificial Sequence
  Description of Artificial Sequence: Synthetic oligonucleotide
cucccacugcuuguuugaa

SEQ ID NO: 2466927 - RNA, 19 nt, Artificial Sequence
  Description of Artificial Sequence: Synthetic oligonucleotide
gggguuccgugggauugug

SEQ ID NO: 2466928 - RNA, 19 nt, Artificial Sequence
  Description of Artificial Sequence: Synthetic oligonucleotide
ccaggucugccuguguaga

SEQ ID NO: 2466929 - RNA, 19 nt, Artificial Sequence
  Description of Artificial Sequence: Synthetic oligonucleotide
cgaagguucccugucuuaa

SEQ ID NO: 2466930 - RNA, 19 nt, Artificial Sequence
  Description of Artificial Sequence: Synthetic oligonucleotide
ccgugggauugugggacgc

SEQ ID NO: 2466931 - RNA, 19 nt, Artificial Sequence
  Description of Artificial Sequence: Synthetic oligonucleotide
gcacagcuuguacccaggu

SEQ ID NO: 2466932 - RNA, 19 nt, Artificial Sequence
  Description of Artificial Sequence: Synthetic oligonucleotide
caggggagauggcugucau

SEQ ID NO: 2466933 - RNA, 19 nt, Artificial Sequence
  Description of Artificial Sequence: Synthetic oligonucleotide
ggaccucgcugauaauauu

SEQ ID NO: 2466934 - RNA, 19 nt, Artificial Sequence
  Description of Artificial Sequence: Synthetic oligonucleotide
ccacugcuuguuugaauau

SEQ ID NO: 2466935 - RNA, 19 nt, Artificial Sequence
  Description of Artificial Sequence: Synthetic oligonucleotide
gccaggggagauggcuguc

SEQ ID NO: 2466936 - RNA, 19 nt, Artificial Sequence
  Description of Artificial Sequence: Synthetic oligonucleotide
ccauuacacugcugugcuu

SEQ ID NO: 2466937 - RNA, 19 nt, Artificial Sequence
  Description of Artificial Sequence: Synthetic oligonucleotide
cgcugagccguugguaacu

SEQ ID NO: 2466938 - RNA, 19 nt, Artificial Sequence
  Description of Artificial Sequence: Synthetic oligonucleotide
ccucucccacugcuuguuu

SEQ ID NO: 2466939 - RNA, 19 nt, Artificial Sequence
  Description of Artificial Sequence: Synthetic oligonucleotide
uauuauaucagucagccag

SEQ ID NO: 2466940 - RNA, 19 nt, Artificial Sequence
  Description of Artificial Sequence: Synthetic oligonucleotide
uuugggauggccuugaugg

SEQ ID NO: 2466941 - RNA, 19 nt, Artificial Sequence
  Description of Artificial Sequence: Synthetic oligonucleotide
uuuauuauaucagucagcc

SEQ ID NO: 2466942 - RNA, 19 nt, Artificial Sequence
  Description of Artificial Sequence: Synthetic oligonucleotide
uuuuguaacccacagaguc

SEQ ID NO: 2466943 - RNA, 19 nt, Artificial Sequence
  Description of Artificial Sequence: Synthetic oligonucleotide
acggguucagcucauaacc

SEQ ID NO: 2466944 - RNA, 19 nt, Artificial Sequence
  Description of Artificial Sequence: Synthetic oligonucleotide
ucuacuugcagcuuguccu

SEQ ID NO: 2466945 - RNA, 19 nt, Artificial Sequence
  Description of Artificial Sequence: Synthetic oligonucleotide
aguaccauggacaucauag

SEQ ID NO: 2466946 - RNA, 19 nt, Artificial Sequence
  Description of Artificial Sequence: Synthetic oligonucleotide
gaugguagcagacacuccc

SEQ ID NO: 2466947 - RNA, 19 nt, Artificial Sequence
  Description of Artificial Sequence: Synthetic oligonucleotide
aacguaggguaccugcagc

SEQ ID NO: 2466948 - RNA, 19 nt, Artificial Sequence
  Description of Artificial Sequence: Synthetic oligonucleotide
agguaguucuacuugcagc

SEQ ID NO: 2466949 - RNA, 19 nt, Artificial Sequence
  Description of Artificial Sequence: Synthetic oligonucleotide
aacaaccagcccuccaggc

SEQ ID NO: 2466950 - RNA, 19 nt, Artificial Sequence
  Description of Artificial Sequence: Synthetic oligonucleotide
auaacccacagcuggacgg

SEQ ID NO: 2466951 - RNA, 19 nt, Artificial Sequence
  Description of Artificial Sequence: Synthetic oligonucleotide
cuuuauuauaucagucagc

SEQ ID NO: 2466952 - RNA, 19 nt, Artificial Sequence
  Description of Artificial Sequence: Synthetic oligonucleotide
uagaaguggacuuugggau

SEQ ID NO: 2466953 - RNA, 19 nt, Artificial Sequence
  Description of Artificial Sequence: Synthetic oligonucleotide
ugagguucaccuuccagag

SEQ ID NO: 2466954 - RNA, 19 nt, Artificial Sequence
  Description of Artificial Sequence: Synthetic oligonucleotide
guugagagacaguucagag

SEQ ID NO: 2466955 - RNA, 19 nt, Artificial Sequence
  Description of Artificial Sequence: Synthetic oligonucleotide
agacaguucagagcggucc

SEQ ID NO: 2466956 - RNA, 19 nt, Artificial Sequence
  Description of Artificial Sequence: Synthetic oligonucleotide
ucgugcaagucccacaagc

SEQ ID NO: 2466957 - RNA, 19 nt, Artificial Sequence
  Description of Artificial Sequence: Synthetic oligonucleotide
ucccagaacaaccagcccu

SEQ ID NO: 2466958 - RNA, 19 nt, Artificial Sequence
  Description of Artificial Sequence: Synthetic oligonucleotide
auuauaucagucagccagc

SEQ ID NO: 2466959 - RNA, 19 nt, Artificial Sequence
  Description of Artificial Sequence: Synthetic oligonucleotide
uuucgaugguagcagacac

SEQ ID NO: 2466960 - RNA, 19 nt, Artificial Sequence
  Description of Artificial Sequence: Synthetic oligonucleotide
uugagagacaguucagagc

SEQ ID NO: 2466961 - RNA, 19 nt, Artificial Sequence
  Description of Artificial Sequence: Synthetic oligonucleotide
uggacggagaccacauugg

SEQ ID NO: 2466962 - RNA, 19 nt, Artificial Sequence
  Description of Artificial Sequence: Synthetic oligonucleotide
gaaacguccagacaccaca

SEQ ID NO: 2466963 - RNA, 19 nt, Artificial Sequence
  Description of Artificial Sequence: Synthetic oligonucleotide
accauggacaucauaggcc

SEQ ID NO: 2466964 - RNA, 19 nt, Artificial Sequence
  Description of Artificial Sequence: Synthetic oligonucleotide
cauugugacagucucugag

SEQ ID NO: 2466965 - RNA, 19 nt, Artificial Sequence
  Description of Artificial Sequence: Synthetic oligonucleotide
aaacaacaguccuagggau

SEQ ID NO: 2466966 - RNA, 19 nt, Artificial Sequence
  Description of Artificial Sequence: Synthetic oligonucleotide
agagcgguccuuuccaagg

SEQ ID NO: 2466967 - RNA, 19 nt, Artificial Sequence
  Description of Artificial Sequence: Synthetic oligonucleotide
agucuuuauuauaucaguc

SEQ ID NO: 2466968 - RNA, 19 nt, Artificial Sequence
  Description of Artificial Sequence: Synthetic oligonucleotide
agauccuuucgaugguagc

SEQ ID NO: 2466969 - RNA, 19 nt, Artificial Sequence
  Description of Artificial Sequence: Synthetic oligonucleotide
acguaggguaccugcagcc

SEQ ID NO: 2466970 - RNA, 19 nt, Artificial Sequence
  Description of Artificial Sequence: Synthetic oligonucleotide
acugcuacaggcugccagg

SEQ ID NO: 2466971 - RNA, 19 nt, Artificial Sequence
  Description of Artificial Sequence: Synthetic oligonucleotide
acguccagacaccacacgg

SEQ ID NO: 2466972 - RNA, 19 nt, Artificial Sequence
  Description of Artificial Sequence: Synthetic oligonucleotide
gcucauaacccacagcugg

SEQ ID NO: 2466973 - RNA, 19 nt, Artificial Sequence
  Description of Artificial Sequence: Synthetic oligonucleotide
ugcagguaguucuacuugc

SEQ ID NO: 2466974 - RNA, 19 nt, Artificial Sequence
  Description of Artificial Sequence: Synthetic oligonucleotide
agagucuuuauuauaucag

SEQ ID NO: 2466975 - RNA, 19 nt, Artificial Sequence
  Description of Artificial Sequence: Synthetic oligonucleotide
cucgcaacaacgauagcac

SEQ ID NO: 2466976 - RNA, 19 nt, Artificial Sequence
  Description of Artificial Sequence: Synthetic oligonucleotide
caauaucuccaccaagccc

SEQ ID NO: 2466977 - RNA, 19 nt, Artificial Sequence
  Description of Artificial Sequence: Synthetic oligonucleotide
ugaugggcaccccacaaga

SEQ ID NO: 2466978 - RNA, 19 nt, Artificial Sequence
  Description of Artificial Sequence: Synthetic oligonucleotide
uaguucuacuugcagcuug

SEQ ID NO: 2466979 - RNA, 19 nt, Artificial Sequence
  Description of Artificial Sequence: Synthetic oligonucleotide
ugggccgccagcacgaucc

SEQ ID NO: 2466980 - RNA, 19 nt, Artificial Sequence
  Description of Artificial Sequence: Synthetic oligonucleotide
gguaccugcagccucagag

SEQ ID NO: 2466981 - RNA, 19 nt, Artificial Sequence
  Description of Artificial Sequence: Synthetic oligonucleotide
agacacucccagaacaacc

SEQ ID NO: 2466982 - RNA, 19 nt, Artificial Sequence
  Description of Artificial Sequence: Synthetic oligonucleotide
guaccauggacaucauagg

SEQ ID NO: 2466983 - RNA, 19 nt, Artificial Sequence
  Description of Artificial Sequence: Synthetic oligonucleotide
uugcaauaucuccaccaag

SEQ ID NO: 2466984 - RNA, 19 nt, Artificial Sequence
  Description of Artificial Sequence: Synthetic oligonucleotide
caggaacacagacacauug

SEQ ID NO: 2466985 - RNA, 19 nt, Artificial Sequence
  Description of Artificial Sequence: Synthetic oligonucleotide
agaggcacgcggcggaacc

SEQ ID NO: 2466986 - RNA, 19 nt, Artificial Sequence
  Description of Artificial Sequence: Synthetic oligonucleotide
aagcagcgcccacacagcg

SEQ ID NO: 2466987 - RNA, 19 nt, Artificial Sequence
  Description of Artificial Sequence: Synthetic oligonucleotide
uucagagcgguccuuucca

SEQ ID NO: 2466988 - RNA, 19 nt, Artificial Sequence
  Description of Artificial Sequence: Synthetic oligonucleotide
caaacaacaguccuaggga

SEQ ID NO: 2466989 - RNA, 19 nt, Artificial Sequence
  Description of Artificial Sequence: Synthetic oligonucleotide
uugugacagucucugaggu

SEQ ID NO: 2466990 - RNA, 19 nt, Artificial Sequence
  Description of Artificial Sequence: Synthetic oligonucleotide
guagugggagcacacuggg

SEQ ID NO: 2466991 - RNA, 19 nt, Artificial Sequence
  Description of Artificial Sequence: Synthetic oligonucleotide
ucgucgugauccaugguug

SEQ ID NO: 2466992 - RNA, 19 nt, Artificial Sequence
  Description of Artificial Sequence: Synthetic oligonucleotide
aacgauagcacgugcucaa

SEQ ID NO: 2466993 - RNA, 19 nt, Artificial Sequence
  Description of Artificial Sequence: Synthetic oligonucleotide
gaacaaccagcccuccagg

SEQ ID NO: 2466994 - RNA, 19 nt, Artificial Sequence
  Description of Artificial Sequence: Synthetic oligonucleotide
aaacguccagacaccacac

SEQ ID NO: 2466995 - RNA, 19 nt, Artificial Sequence
  Description of Artificial Sequence: Synthetic oligonucleotide
agaaguggacuuugggaug

SEQ ID NO: 2466996 - RNA, 19 nt, Artificial Sequence
  Description of Artificial Sequence: Synthetic oligonucleotide
uuauuauaucagucagcca

SEQ ID NO: 2466997 - RNA, 19 nt, Artificial Sequence
  Description of Artificial Sequence: Synthetic oligonucleotide
cagagucuuuauuauauca

SEQ ID NO: 2466998 - RNA, 19 nt, Artificial Sequence
  Description of Artificial Sequence: Synthetic oligonucleotide
gaacccggguugcagaagc

SEQ ID NO: 2466999 - RNA, 19 nt, Artificial Sequence
  Description of Artificial Sequence: Synthetic oligonucleotide
ucgcaacaacgauagcacg

SEQ ID NO: 2467000 - RNA, 19 nt, Artificial Sequence
  Description of Artificial Sequence: Synthetic oligonucleotide
aguagugggagcacacugg

SEQ ID NO: 2467001 - RNA, 19 nt, Artificial Sequence
  Description of Artificial Sequence: Synthetic oligonucleotide
uagcacgugcucaaccugc

SEQ ID NO: 2467002 - RNA, 19 nt, Artificial Sequence
  Description of Artificial Sequence: Synthetic oligonucleotide
caaagccucggcagggucg

SEQ ID NO: 2467003 - RNA, 19 nt, Artificial Sequence
  Description of Artificial Sequence: Synthetic oligonucleotide
cuggacggagaccacauug

SEQ ID NO: 2467004 - RNA, 19 nt, Artificial Sequence
  Description of Artificial Sequence: Synthetic oligonucleotide
cauaacccacagcuggacg

SEQ ID NO: 2467005 - RNA, 19 nt, Artificial Sequence
  Description of Artificial Sequence: Synthetic oligonucleotide
uuauaucagucagccagcc

SEQ ID NO: 2467006 - RNA, 19 nt, Artificial Sequence
  Description of Artificial Sequence: Synthetic oligonucleotide
aacaacgauagcacgugcu

SEQ ID NO: 2467007 - RNA, 19 nt, Artificial Sequence
  Description of Artificial Sequence: Synthetic oligonucleotide
ucgaugguagcagacacuc

SEQ ID NO: 2467008 - RNA, 19 nt, Artificial Sequence
  Description of Artificial Sequence: Synthetic oligonucleotide
ucagcucauaacccacagc

SEQ ID NO: 2467009 - RNA, 19 nt, Artificial Sequence
  Description of Artificial Sequence: Synthetic oligonucleotide
uaggcggccaacccggagc

SEQ ID NO: 2467010 - RNA, 19 nt, Artificial Sequence
  Description of Artificial Sequence: Synthetic oligonucleotide
ugguagcagacacucccag

SEQ ID NO: 2467011 - RNA, 19 nt, Artificial Sequence
  Description of Artificial Sequence: Synthetic oligonucleotide
cugagguucaccuuccaga

SEQ ID NO: 2467012 - RNA, 19 nt, Artificial Sequence
  Description of Artificial Sequence: Synthetic oligonucleotide
guagcagacacucccagaa

SEQ ID NO: 2467013 - RNA, 19 nt, Artificial Sequence
  Description of Artificial Sequence: Synthetic oligonucleotide
gauccuuucgaugguagca

SEQ ID NO: 2467014 - RNA, 19 nt, Artificial Sequence
  Description of Artificial Sequence: Synthetic oligonucleotide
cacgugcucaaccugccgg

SEQ ID NO: 2467015 - RNA, 19 nt, Artificial Sequence
  Description of Artificial Sequence: Synthetic oligonucleotide
agagccuagauccaccauu

SEQ ID NO: 2467016 - RNA, 19 nt, Artificial Sequence
  Description of Artificial Sequence: Synthetic oligonucleotide
augcagucgugcaaguccc

SEQ ID NO: 2467017 - RNA, 19 nt, Artificial Sequence
  Description of Artificial Sequence: Synthetic oligonucleotide
gagucuuuauuauaucagu

SEQ ID NO: 2467018 - RNA, 19 nt, Artificial Sequence
  Description of Artificial Sequence: Synthetic oligonucleotide
ugguugagagacaguucag

SEQ ID NO: 2467019 - RNA, 19 nt, Artificial Sequence
  Description of Artificial Sequence: Synthetic oligonucleotide
aagucccacaagccacggg

SEQ ID NO: 2467020 - RNA, 19 nt, Artificial Sequence
  Description of Artificial Sequence: Synthetic oligonucleotide
uauaucagucagccagccu

SEQ ID NO: 2467021 - RNA, 19 nt, Artificial Sequence
  Description of Artificial Sequence: Synthetic oligonucleotide
acagcguaggcggccaacc

SEQ ID NO: 2467022 - RNA, 19 nt, Artificial Sequence
  Description of Artificial Sequence: Synthetic oligonucleotide
agcacgauccugccaucac

SEQ ID NO: 2467023 - RNA, 19 nt, Artificial Sequence
  Description of Artificial Sequence: Synthetic oligonucleotide
caccccacaagaaggcacg

SEQ ID NO: 2467024 - RNA, 19 nt, Artificial Sequence
  Description of Artificial Sequence: Synthetic oligonucleotide
acagucucugagguucacc

SEQ ID NO: 2467025 - RNA, 19 nt, Artificial Sequence
  Description of Artificial Sequence: Synthetic oligonucleotide
gauagcacgugcucaaccu

SEQ ID NO: 2467026 - RNA, 19 nt, Artificial Sequence
  Description of Artificial Sequence: Synthetic oligonucleotide
cuagggauggagguagaag

SEQ ID NO: 2467027 - RNA, 19 nt, Artificial Sequence
  Description of Artificial Sequence: Synthetic oligonucleotide
gucucugagguucaccuuc

SEQ ID NO: 2467028 - RNA, 19 nt, Artificial Sequence
  Description of Artificial Sequence: Synthetic oligonucleotide
auagcacgugcucaaccug

SEQ ID NO: 2467029 - RNA, 19 nt, Artificial Sequence
  Description of Artificial Sequence: Synthetic oligonucleotide
agucgugcaagucccacaa

SEQ ID NO: 2467030 - RNA, 19 nt, Artificial Sequence
  Description of Artificial Sequence: Synthetic oligonucleotide
acucuguccaggccuucac

SEQ ID NO: 2467031 - RNA, 19 nt, Artificial Sequence
  Description of Artificial Sequence: Synthetic oligonucleotide
acaagccacggguucagcu

SEQ ID NO: 2467032 - RNA, 19 nt, Artificial Sequence
  Description of Artificial Sequence: Synthetic oligonucleotide
gagauccuuucgaugguag

SEQ ID NO: 2467033 - RNA, 19 nt, Artificial Sequence
  Description of Artificial Sequence: Synthetic oligonucleotide
uaggguaccugcagccuca

SEQ ID NO: 2467034 - RNA, 19 nt, Artificial Sequence
  Description of Artificial Sequence: Synthetic oligonucleotide
auccuuucgaugguagcag

SEQ ID NO: 2467035 - RNA, 19 nt, Artificial Sequence
  Description of Artificial Sequence: Synthetic oligonucleotide
cuacaggcugccagguggg

SEQ ID NO: 2467036 - RNA, 19 nt, Artificial Sequence
  Description of Artificial Sequence: Synthetic oligonucleotide
cagcucauaacccacagcu

SEQ ID NO: 2467037 - RNA, 19 nt, Artificial Sequence
  Description of Artificial Sequence: Synthetic oligonucleotide
auggacaucauaggcccag

SEQ ID NO: 2467038 - RNA, 19 nt, Artificial Sequence
  Description of Artificial Sequence: Synthetic oligonucleotide
cuuugggauggccuugaug

SEQ ID NO: 2467039 - RNA, 19 nt, Artificial Sequence
  Description of Artificial Sequence: Synthetic oligonucleotide
cacggguucagcucauaac

SEQ ID NO: 2467040 - RNA, 19 nt, Artificial Sequence
  Description of Artificial Sequence: Synthetic oligonucleotide
ggcagggucgucgugaucc

SEQ ID NO: 2467041 - RNA, 19 nt, Artificial Sequence
  Description of Artificial Sequence: Synthetic oligonucleotide
cuuccagagauccuuucga

SEQ ID NO: 2467042 - RNA, 19 nt, Artificial Sequence
  Description of Artificial Sequence: Synthetic oligonucleotide
guccuagggauggagguag

SEQ ID NO: 2467043 - RNA, 19 nt, Artificial Sequence
  Description of Artificial Sequence: Synthetic oligonucleotide
acaguccuagggauggagg

SEQ ID NO: 2467044 - RNA, 19 nt, Artificial Sequence
  Description of Artificial Sequence: Synthetic oligonucleotide
agagacaguucagagcggu

SEQ ID NO: 2467045 - RNA, 19 nt, Artificial Sequence
  Description of Artificial Sequence: Synthetic oligonucleotide
ucgugauccaugguugaga

SEQ ID NO: 2467046 - RNA, 19 nt, Artificial Sequence
  Description of Artificial Sequence: Synthetic oligonucleotide
agcgcagucaaagccucgg

SEQ ID NO: 2467047 - RNA, 19 nt, Artificial Sequence
  Description of Artificial Sequence: Synthetic oligonucleotide
caacguaggguaccugcag

SEQ ID NO: 2467048 - RNA, 19 nt, Artificial Sequence
  Description of Artificial Sequence: Synthetic oligonucleotide
uuccagagauccuuucgau

SEQ ID NO: 2467049 - RNA, 19 nt, Artificial Sequence
  Description of Artificial Sequence: Synthetic oligonucleotide
aacccacagagucuuuauu

SEQ ID NO: 2467050 - RNA, 19 nt, Artificial Sequence
  Description of Artificial Sequence: Synthetic oligonucleotide
gcccacacagcguaggcgg

SEQ ID NO: 2467051 - RNA, 19 nt, Artificial Sequence
  Description of Artificial Sequence: Synthetic oligonucleotide
accacauuggugggccgcc

SEQ ID NO: 2467052 - RNA, 19 nt, Artificial Sequence
  Description of Artificial Sequence: Synthetic oligonucleotide
gacaucauaggcccagacu

SEQ ID NO: 2467053 - RNA, 19 nt, Artificial Sequence
  Description of Artificial Sequence: Synthetic oligonucleotide
gacggagaccacauuggug

SEQ ID NO: 2467054 - RNA, 19 nt, Artificial Sequence
  Description of Artificial Sequence: Synthetic oligonucleotide
ucgcgcagcgcagucaaag

SEQ ID NO: 2467055 - RNA, 19 nt, Artificial Sequence
  Description of Artificial Sequence: Synthetic oligonucleotide
ucauaacccacagcuggac

SEQ ID NO: 2467056 - RNA, 19 nt, Artificial Sequence
  Description of Artificial Sequence: Synthetic oligonucleotide
aaagccucggcagggucgu

SEQ ID NO: 2467057 - RNA, 19 nt, Artificial Sequence
  Description of Artificial Sequence: Synthetic oligonucleotide
uaacccacagagucuuuau

SEQ ID NO: 2467058 - RNA, 19 nt, Artificial Sequence
  Description of Artificial Sequence: Synthetic oligonucleotide
ucaaagccucggcaggguc

SEQ ID NO: 2467059 - RNA, 19 nt, Artificial Sequence
  Description of Artificial Sequence: Synthetic oligonucleotide
aaguggacuuugggauggc

SEQ ID NO: 2467060 - RNA, 19 nt, Artificial Sequence
  Description of Artificial Sequence: Synthetic oligonucleotide
uccuuucgaugguagcaga

SEQ ID NO: 2467061 - RNA, 19 nt, Artificial Sequence
  Description of Artificial Sequence: Synthetic oligonucleotide
cacagagucuuuauuauau

SEQ ID NO: 2467062 - RNA, 19 nt, Artificial Sequence
  Description of Artificial Sequence: Synthetic oligonucleotide
cuacuugcagcuuguccuc

SEQ ID NO: 2467063 - RNA, 19 nt, Artificial Sequence
  Description of Artificial Sequence: Synthetic oligonucleotide
caacaacgauagcacgugc

SEQ ID NO: 2467064 - RNA, 19 nt, Artificial Sequence
  Description of Artificial Sequence: Synthetic oligonucleotide
caaccugccgggcacucgc

SEQ ID NO: 2467065 - RNA, 19 nt, Artificial Sequence
  Description of Artificial Sequence: Synthetic oligonucleotide
gagcgguccuuuccaaggc

SEQ ID NO: 2467066 - RNA, 19 nt, Artificial Sequence
  Description of Artificial Sequence: Synthetic oligonucleotide
cacgauccugccaucacca

SEQ ID NO: 2467067 - RNA, 19 nt, Artificial Sequence
  Description of Artificial Sequence: Synthetic oligonucleotide
ucauaggcccagacucugu

SEQ ID NO: 2467068 - RNA, 19 nt, Artificial Sequence
  Description of Artificial Sequence: Synthetic oligonucleotide
gccaacguaggguaccugc

SEQ ID NO: 2467069 - RNA, 19 nt, Artificial Sequence
  Description of Artificial Sequence: Synthetic oligonucleotide
agcacgugcucaaccugcc

SEQ ID NO: 2467070 - RNA, 19 nt, Artificial Sequence
  Description of Artificial Sequence: Synthetic oligonucleotide
gggucgucgugauccaugg

SEQ ID NO: 2467071 - RNA, 19 nt, Artificial Sequence
  Description of Artificial Sequence: Synthetic oligonucleotide
uggugggccgccagcacga

SEQ ID NO: 2467072 - RNA, 19 nt, Artificial Sequence
  Description of Artificial Sequence: Synthetic oligonucleotide
cuucacccaccacugcuac

SEQ ID NO: 2467073 - RNA, 19 nt, Artificial Sequence
  Description of Artificial Sequence: Synthetic oligonucleotide
ucccacaagccacggguuc

SEQ ID NO: 2467074 - RNA, 19 nt, Artificial Sequence
  Description of Artificial Sequence: Synthetic oligonucleotide
guaggguaccugcagccuc

SEQ ID NO: 2467075 - RNA, 19 nt, Artificial Sequence
  Description of Artificial Sequence: Synthetic oligonucleotide
ugcuacaggcugccaggug

SEQ ID NO: 2467076 - RNA, 19 nt, Artificial Sequence
  Description of Artificial Sequence: Synthetic oligonucleotide
cagccucagaggcacgcgg

SEQ ID NO: 2467077 - RNA, 19 nt, Artificial Sequence
  Description of Artificial Sequence: Synthetic oligonucleotide
uccaugguugagagacagu

SEQ ID NO: 2467078 - RNA, 19 nt, Artificial Sequence
  Description of Artificial Sequence: Synthetic oligonucleotide
uuuuccagggcggccucgc

SEQ ID NO: 2467079 - RNA, 19 nt, Artificial Sequence
  Description of Artificial Sequence: Synthetic oligonucleotide
cucauaacccacagcugga

SEQ ID NO: 2467080 - RNA, 19 nt, Artificial Sequence
  Description of Artificial Sequence: Synthetic oligonucleotide
ucaaccugccgggcacucg

SEQ ID NO: 2467081 - RNA, 19 nt, Artificial Sequence
  Description of Artificial Sequence: Synthetic oligonucleotide
ggccucgcaacaacgauag

SEQ ID NO: 2467082 - RNA, 19 nt, Artificial Sequence
  Description of Artificial Sequence: Synthetic oligonucleotide
cagagcgguccuuuccaag

SEQ ID NO: 2467083 - RNA, 19 nt, Artificial Sequence
  Description of Artificial Sequence: Synthetic oligonucleotide
cuuucgaugguagcagaca

SEQ ID NO: 2467084 - RNA, 19 nt, Artificial Sequence
  Description of Artificial Sequence: Synthetic oligonucleotide
agccucagaggcacgcggc

SEQ ID NO: 2467085 - RNA, 19 nt, Artificial Sequence
  Description of Artificial Sequence: Synthetic oligonucleotide
auccugccaucaccagagc

SEQ ID NO: 2467086 - RNA, 19 nt, Artificial Sequence
  Description of Artificial Sequence: Synthetic oligonucleotide
acaccacacgggccccugc

SEQ ID NO: 2467087 - RNA, 19 nt, Artificial Sequence
  Description of Artificial Sequence: Synthetic oligonucleotide
gcaacaacgauagcacgug

SEQ ID NO: 2467088 - RNA, 19 nt, Artificial Sequence
  Description of Artificial Sequence: Synthetic oligonucleotide
uaacccacagcuggacgga

SEQ ID NO: 2467089 - RNA, 19 nt, Artificial Sequence
  Description of Artificial Sequence: Synthetic oligonucleotide
gaccacauuggugggccgc

SEQ ID NO: 2467090 - RNA, 19 nt, Artificial Sequence
  Description of Artificial Sequence: Synthetic oligonucleotide
agaccacauuggugggccg

SEQ ID NO: 2467091 - RNA, 19 nt, Artificial Sequence
  Description of Artificial Sequence: Synthetic oligonucleotide
acgauagcacgugcucaac

SEQ ID NO: 2467092 - RNA, 19 nt, Artificial Sequence
  Description of Artificial Sequence: Synthetic oligonucleotide
ucagagcgguccuuuccaa

SEQ ID NO: 2467093 - RNA, 19 nt, Artificial Sequence
  Description of Artificial Sequence: Synthetic oligonucleotide
acgauccugccaucaccag

SEQ ID NO: 2467094 - RNA, 19 nt, Artificial Sequence
  Description of Artificial Sequence: Synthetic oligonucleotide
cccaguaccauggacauca

SEQ ID NO: 2467095 - RNA, 19 nt, Artificial Sequence
  Description of Artificial Sequence: Synthetic oligonucleotide
uccaccaagcccgggccgc

SEQ ID NO: 2467096 - RNA, 19 nt, Artificial Sequence
  Description of Artificial Sequence: Synthetic oligonucleotide
cuugaugggcaccccacaa

SEQ ID NO: 2467097 - RNA, 19 nt, Artificial Sequence
  Description of Artificial Sequence: Synthetic oligonucleotide
gucgugauccaugguugag

SEQ ID NO: 2467098 - RNA, 19 nt, Artificial Sequence
  Description of Artificial Sequence: Synthetic oligonucleotide
cgugauccaugguugagag

SEQ ID NO: 2467099 - RNA, 19 nt, Artificial Sequence
  Description of Artificial Sequence: Synthetic oligonucleotide
cacauuggugggccgccag

SEQ ID NO: 2467100 - RNA, 19 nt, Artificial Sequence
  Description of Artificial Sequence: Synthetic oligonucleotide
aacccggagccugccgccg

SEQ ID NO: 2467101 - RNA, 19 nt, Artificial Sequence
  Description of Artificial Sequence: Synthetic oligonucleotide
uucacccaccacugcuaca

SEQ ID NO: 2467102 - RNA, 19 nt, Artificial Sequence
  Description of Artificial Sequence: Synthetic oligonucleotide
auaucuccaccaagcccgg

SEQ ID NO: 2467103 - RNA, 19 nt, Artificial Sequence
  Description of Artificial Sequence: Synthetic oligonucleotide
cagacacucccagaacaac

SEQ ID NO: 2467104 - RNA, 19 nt, Artificial Sequence
  Description of Artificial Sequence: Synthetic oligonucleotide
ggguugcagaagcagcgcc

SEQ ID NO: 2467105 - RNA, 19 nt, Artificial Sequence
  Description of Artificial Sequence: Synthetic oligonucleotide
agcucauaacccacagcug

SEQ ID NO: 2467106 - RNA, 19 nt, Artificial Sequence
  Description of Artificial Sequence: Synthetic oligonucleotide
agccucggcagggucgucg

SEQ ID NO: 2467107 - RNA, 19 nt, Artificial Sequence
  Description of Artificial Sequence: Synthetic oligonucleotide
ugcagucgugcaaguccca

SEQ ID NO: 2467108 - RNA, 19 nt, Artificial Sequence
  Description of Artificial Sequence: Synthetic oligonucleotide
gguugcagaagcagcgccc

SEQ ID NO: 2467109 - RNA, 19 nt, Artificial Sequence
  Description of Artificial Sequence: Synthetic oligonucleotide
ggguucagcucauaaccca

SEQ ID NO: 2467110 - RNA, 19 nt, Artificial Sequence
  Description of Artificial Sequence: Synthetic oligonucleotide
caacccggagccugccgcc

SEQ ID NO: 2467111 - RNA, 19 nt, Artificial Sequence
  Description of Artificial Sequence: Synthetic oligonucleotide
gucgucgugauccaugguu

SEQ ID NO: 2467112 - RNA, 19 nt, Artificial Sequence
  Description of Artificial Sequence: Synthetic oligonucleotide
caacgauagcacgugcuca

SEQ ID NO: 2467113 - RNA, 19 nt, Artificial Sequence
  Description of Artificial Sequence: Synthetic oligonucleotide
uccuagggauggagguaga

SEQ ID NO: 2467114 - RNA, 19 nt, Artificial Sequence
  Description of Artificial Sequence: Synthetic oligonucleotide
cuggcccaguaccauggac

SEQ ID NO: 2467115 - RNA, 19 nt, Artificial Sequence
  Description of Artificial Sequence: Synthetic oligonucleotide
cagccugucaaacaacagu

SEQ ID NO: 2467116 - RNA, 19 nt, Artificial Sequence
  Description of Artificial Sequence: Synthetic oligonucleotide
ccucgcaacaacgauagca

SEQ ID NO: 2467117 - RNA, 19 nt, Artificial Sequence
  Description of Artificial Sequence: Synthetic oligonucleotide
gagguucaccuuccagaga

SEQ ID NO: 2467118 - RNA, 19 nt, Artificial Sequence
  Description of Artificial Sequence: Synthetic oligonucleotide
gacuuugggauggccuuga

SEQ ID NO: 2467119 - RNA, 19 nt, Artificial Sequence
  Description of Artificial Sequence: Synthetic oligonucleotide
cagcguaggcggccaaccc

SEQ ID NO: 2467120 - RNA, 19 nt, Artificial Sequence
  Description of Artificial Sequence: Synthetic oligonucleotide
agucucugagguucaccuu

SEQ ID NO: 2467121 - RNA, 19 nt, Artificial Sequence
  Description of Artificial Sequence: Synthetic oligonucleotide
gcgcagcgcagucaaagcc

SEQ ID NO: 2467122 - RNA, 19 nt, Artificial Sequence
  Description of Artificial Sequence: Synthetic oligonucleotide
uaucuccaccaagcccggg

SEQ ID NO: 2467123 - RNA, 19 nt, Artificial Sequence
  Description of Artificial Sequence: Synthetic oligonucleotide
agggucgucgugauccaug

SEQ ID NO: 2467124 - RNA, 19 nt, Artificial Sequence
  Description of Artificial Sequence: Synthetic oligonucleotide
augguagcagacacuccca

SEQ ID NO: 2467125 - RNA, 19 nt, Artificial Sequence
  Description of Artificial Sequence: Synthetic oligonucleotide
gucgugcaagucccacaag

SEQ ID NO: 2467126 - RNA, 19 nt, Artificial Sequence
  Description of Artificial Sequence: Synthetic oligonucleotide
aggcccagacucuguccag

SEQ ID NO: 2467127 - RNA, 19 nt, Artificial Sequence
  Description of Artificial Sequence: Synthetic oligonucleotide
cacgggccccugcagguag

SEQ ID NO: 2467128 - RNA, 19 nt, Artificial Sequence
  Description of Artificial Sequence: Synthetic oligonucleotide
agagauccuuucgauggua

SEQ ID NO: 2467129 - RNA, 19 nt, Artificial Sequence
  Description of Artificial Sequence: Synthetic oligonucleotide
cucgcgccaacguagggua

SEQ ID NO: 2467130 - RNA, 19 nt, Artificial Sequence
  Description of Artificial Sequence: Synthetic oligonucleotide
cagcgcagucaaagccucg

SEQ ID NO: 2467131 - RNA, 19 nt, Artificial Sequence
  Description of Artificial Sequence: Synthetic oligonucleotide
gguagcagacacucccaga

SEQ ID NO: 2467132 - RNA, 19 nt, Artificial Sequence
  Description of Artificial Sequence: Synthetic oligonucleotide
guaacccacagagucuuua

SEQ ID NO: 2467133 - RNA, 19 nt, Artificial Sequence
  Description of Artificial Sequence: Synthetic oligonucleotide
cacucgcgccaacguaggg

SEQ ID NO: 2467134 - RNA, 19 nt, Artificial Sequence
  Description of Artificial Sequence: Synthetic oligonucleotide
accccacaagaaggcacgg

SEQ ID NO: 2467135 - RNA, 19 nt, Artificial Sequence
  Description of Artificial Sequence: Synthetic oligonucleotide
caccagagccuagauccac

SEQ ID NO: 2467136 - RNA, 19 nt, Artificial Sequence
  Description of Artificial Sequence: Synthetic oligonucleotide
gagacaguucagagcgguc

SEQ ID NO: 2467137 - RNA, 19 nt, Artificial Sequence
  Description of Artificial Sequence: Synthetic oligonucleotide
cauuggugggccgccagca

SEQ ID NO: 2467138 - RNA, 19 nt, Artificial Sequence
  Description of Artificial Sequence: Synthetic oligonucleotide
caguccuagggauggaggu

SEQ ID NO: 2467139 - RNA, 19 nt, Artificial Sequence
  Description of Artificial Sequence: Synthetic oligonucleotide
gccgcuugcaauaucucca

SEQ ID NO: 2467140 - RNA, 19 nt, Artificial Sequence
  Description of Artificial Sequence: Synthetic oligonucleotide
aguccuagggauggaggua

SEQ ID NO: 2467141 - RNA, 19 nt, Artificial Sequence
  Description of Artificial Sequence: Synthetic oligonucleotide
cagucgugcaagucccaca

SEQ ID NO: 2467142 - RNA, 19 nt, Artificial Sequence
  Description of Artificial Sequence: Synthetic oligonucleotide
gccugucaaacaacagucc

SEQ ID NO: 2467143 - RNA, 19 nt, Artificial Sequence
  Description of Artificial Sequence: Synthetic oligonucleotide
ucggcagggucgucgugau

SEQ ID NO: 2467144 - RNA, 19 nt, Artificial Sequence
  Description of Artificial Sequence: Synthetic oligonucleotide
agucagccagccugucaaa

SEQ ID NO: 2467145 - RNA, 19 nt, Artificial Sequence
  Description of Artificial Sequence: Synthetic oligonucleotide
ggggaaacguccagacacc

SEQ ID NO: 2467146 - RNA, 19 nt, Artificial Sequence
  Description of Artificial Sequence: Synthetic oligonucleotide
cgauagcacgugcucaacc

SEQ ID NO: 2467147 - RNA, 19 nt, Artificial Sequence
  Description of Artificial Sequence: Synthetic oligonucleotide
aacccggguugcagaagca

SEQ ID NO: 2467148 - RNA, 19 nt, Artificial Sequence
  Description of Artificial Sequence: Synthetic oligonucleotide
gaggcacgcggcggaaccc

SEQ ID NO: 2467149 - RNA, 19 nt, Artificial Sequence
  Description of Artificial Sequence: Synthetic oligonucleotide
gacagucucugagguucac

SEQ ID NO: 2467150 - RNA, 19 nt, Artificial Sequence
  Description of Artificial Sequence: Synthetic oligonucleotide
cucggcagggucgucguga

SEQ ID NO: 2467151 - RNA, 19 nt, Artificial Sequence
  Description of Artificial Sequence: Synthetic oligonucleotide
ggagaccacauuggugggc

SEQ ID NO: 2467152 - RNA, 19 nt, Artificial Sequence
  Description of Artificial Sequence: Synthetic oligonucleotide
agcuggacggagaccacau

SEQ ID NO: 2467153 - RNA, 19 nt, Artificial Sequence
  Description of Artificial Sequence: Synthetic oligonucleotide
ggcccagacucuguccagg

SEQ ID NO: 2467154 - RNA, 19 nt, Artificial Sequence
  Description of Artificial Sequence: Synthetic oligonucleotide
ucgcgccaacguaggguac

SEQ ID NO: 2467155 - RNA, 19 nt, Artificial Sequence
  Description of Artificial Sequence: Synthetic oligonucleotide
cacggcuggcccaguacca

SEQ ID NO: 2467156 - RNA, 19 nt, Artificial Sequence
  Description of Artificial Sequence: Synthetic oligonucleotide
agcccuccaggcaugcagu

SEQ ID NO: 2467157 - RNA, 19 nt, Artificial Sequence
  Description of Artificial Sequence: Synthetic oligonucleotide
ggaaacguccagacaccac

SEQ ID NO: 2467158 - RNA, 19 nt, Artificial Sequence
  Description of Artificial Sequence: Synthetic oligonucleotide
gagccuagauccaccauuu

SEQ ID NO: 2467159 - RNA, 19 nt, Artificial Sequence
  Description of Artificial Sequence: Synthetic oligonucleotide
cgccgcuugcaauaucucc

SEQ ID NO: 2467160 - RNA, 19 nt, Artificial Sequence
  Description of Artificial Sequence: Synthetic oligonucleotide
ccgcuugcaauaucuccac

SEQ ID NO: 2467161 - RNA, 19 nt, Artificial Sequence
  Description of Artificial Sequence: Synthetic oligonucleotide
ggacuuugggauggccuug

SEQ ID NO: 2467162 - RNA, 19 nt, Artificial Sequence
  Description of Artificial Sequence: Synthetic oligonucleotide
cacagcguaggcggccaac

SEQ ID NO: 2467163 - RNA, 19 nt, Artificial Sequence
  Description of Artificial Sequence: Synthetic oligonucleotide
ccaacguaggguaccugca

SEQ ID NO: 2467164 - RNA, 19 nt, Artificial Sequence
  Description of Artificial Sequence: Synthetic oligonucleotide
agccuagauccaccauuuu

SEQ ID NO: 2467165 - RNA, 19 nt, Artificial Sequence
  Description of Artificial Sequence: Synthetic oligonucleotide
ggccccugcagguaguucu

SEQ ID NO: 2467166 - RNA, 19 nt, Artificial Sequence
  Description of Artificial Sequence: Synthetic oligonucleotide
gggaaacguccagacacca

SEQ ID NO: 2467167 - RNA, 19 nt, Artificial Sequence
  Description of Artificial Sequence: Synthetic oligonucleotide
gcagcgcccacacagcgua

SEQ ID NO: 2467168 - RNA, 19 nt, Artificial Sequence
  Description of Artificial Sequence: Synthetic oligonucleotide
ggcggaacccggguugcag

SEQ ID NO: 2467169 - RNA, 19 nt, Artificial Sequence
  Description of Artificial Sequence: Synthetic oligonucleotide
caccacacgggccccugca

SEQ ID NO: 2467170 - RNA, 19 nt, Artificial Sequence
  Description of Artificial Sequence: Synthetic oligonucleotide
gcacucgcgccaacguagg

SEQ ID NO: 2467171 - RNA, 19 nt, Artificial Sequence
  Description of Artificial Sequence: Synthetic oligonucleotide
ccugccgggcacucgcgcc

SEQ ID NO: 2467172 - RNA, 19 nt, Artificial Sequence
  Description of Artificial Sequence: Synthetic oligonucleotide
aggguaccugcagccucag

SEQ ID NO: 2467173 - RNA, 19 nt, Artificial Sequence
  Description of Artificial Sequence: Synthetic oligonucleotide
ggaacccggguugcagaag

SEQ ID NO: 2467174 - RNA, 19 nt, Artificial Sequence
  Description of Artificial Sequence: Synthetic oligonucleotide
agcagcgcccacacagcgu

SEQ ID NO: 2467175 - RNA, 19 nt, Artificial Sequence
  Description of Artificial Sequence: Synthetic oligonucleotide
gcgcagucaaagccucggc

SEQ ID NO: 2467176 - RNA, 19 nt, Artificial Sequence
  Description of Artificial Sequence: Synthetic oligonucleotide
uggccuugaugggcacccc

SEQ ID NO: 2467177 - RNA, 19 nt, Artificial Sequence
  Description of Artificial Sequence: Synthetic oligonucleotide
gccaacccggagccugccg

SEQ ID NO: 2467178 - RNA, 19 nt, Artificial Sequence
  Description of Artificial Sequence: Synthetic oligonucleotide
gccaucaccagagccuaga

SEQ ID NO: 2467179 - RNA, 19 nt, Artificial Sequence
  Description of Artificial Sequence: Synthetic oligonucleotide
gcagucgugcaagucccac

SEQ ID NO: 2467180 - RNA, 19 nt, Artificial Sequence
  Description of Artificial Sequence: Synthetic oligonucleotide
cagagauccuuucgauggu

SEQ ID NO: 2467181 - RNA, 19 nt, Artificial Sequence
  Description of Artificial Sequence: Synthetic oligonucleotide
acggcuggcccaguaccau

SEQ ID NO: 2467182 - RNA, 19 nt, Artificial Sequence
  Description of Artificial Sequence: Synthetic oligonucleotide
acccacagcuggacggaga

SEQ ID NO: 2467183 - RNA, 19 nt, Artificial Sequence
  Description of Artificial Sequence: Synthetic oligonucleotide
cagcacgauccugccauca

SEQ ID NO: 2467184 - RNA, 19 nt, Artificial Sequence
  Description of Artificial Sequence: Synthetic oligonucleotide
cgaugguagcagacacucc

SEQ ID NO: 2467185 - RNA, 19 nt, Artificial Sequence
  Description of Artificial Sequence: Synthetic oligonucleotide
ggacggagaccacauuggu

SEQ ID NO: 2467186 - RNA, 19 nt, Artificial Sequence
  Description of Artificial Sequence: Synthetic oligonucleotide
aagccucggcagggucguc

SEQ ID NO: 2467187 - RNA, 19 nt, Artificial Sequence
  Description of Artificial Sequence: Synthetic oligonucleotide
caguaccauggacaucaua

SEQ ID NO: 2467188 - RNA, 19 nt, Artificial Sequence
  Description of Artificial Sequence: Synthetic oligonucleotide
cagaggcacgcggcggaac

SEQ ID NO: 2467189 - RNA, 19 nt, Artificial Sequence
  Description of Artificial Sequence: Synthetic oligonucleotide
cccacacagcguaggcggc

SEQ ID NO: 2467190 - RNA, 19 nt, Artificial Sequence
  Description of Artificial Sequence: Synthetic oligonucleotide
cugccgggcacucgcgcca

SEQ ID NO: 2467191 - RNA, 19 nt, Artificial Sequence
  Description of Artificial Sequence: Synthetic oligonucleotide
cacacgggccccugcaggu

SEQ ID NO: 2467192 - RNA, 19 nt, Artificial Sequence
  Description of Artificial Sequence: Synthetic oligonucleotide
acacagcguaggcggccaa

SEQ ID NO: 2467193 - RNA, 19 nt, Artificial Sequence
  Description of Artificial Sequence: Synthetic oligonucleotide
ccacagagucuuuauuaua

SEQ ID NO: 2467194 - RNA, 19 nt, Artificial Sequence
  Description of Artificial Sequence: Synthetic oligonucleotide
gcggaacccggguugcaga

SEQ ID NO: 2467195 - RNA, 19 nt, Artificial Sequence
  Description of Artificial Sequence: Synthetic oligonucleotide
cgcgcagcgcagucaaagc

SEQ ID NO: 2467196 - RNA, 19 nt, Artificial Sequence
  Description of Artificial Sequence: Synthetic oligonucleotide
ggcccaguaccauggacau

SEQ ID NO: 2467197 - RNA, 19 nt, Artificial Sequence
  Description of Artificial Sequence: Synthetic oligonucleotide
cgcaacaacgauagcacgu

SEQ ID NO: 2467198 - RNA, 19 nt, Artificial Sequence
  Description of Artificial Sequence: Synthetic oligonucleotide
ccaugguugagagacaguu

SEQ ID NO: 2467199 - RNA, 19 nt, Artificial Sequence
  Description of Artificial Sequence: Synthetic oligonucleotide
gugggccgccagcacgauc

SEQ ID NO: 2467200 - RNA, 19 nt, Artificial Sequence
  Description of Artificial Sequence: Synthetic oligonucleotide
cucucgcgcagcgcaguca

SEQ ID NO: 2467201 - RNA, 19 nt, Artificial Sequence
  Description of Artificial Sequence: Synthetic oligonucleotide
ggcaccccacaagaaggca

SEQ ID NO: 2467202 - RNA, 19 nt, Artificial Sequence
  Description of Artificial Sequence: Synthetic oligonucleotide
acgcggcggaacccggguu

SEQ ID NO: 2467203 - RNA, 19 nt, Artificial Sequence
  Description of Artificial Sequence: Synthetic oligonucleotide
gguucaccuuccagagauc

SEQ ID NO: 2467204 - RNA, 19 nt, Artificial Sequence
  Description of Artificial Sequence: Synthetic oligonucleotide
guaguucuacuugcagcuu

SEQ ID NO: 2467205 - RNA, 19 nt, Artificial Sequence
  Description of Artificial Sequence: Synthetic oligonucleotide
ccgggcacucgcgccaacg

SEQ ID NO: 2467206 - RNA, 19 nt, Artificial Sequence
  Description of Artificial Sequence: Synthetic oligonucleotide
ggcacgcggcggaacccgg

SEQ ID NO: 2467207 - RNA, 19 nt, Artificial Sequence
  Description of Artificial Sequence: Synthetic oligonucleotide
cgauccugccaucaccaga

SEQ ID NO: 2467208 - RNA, 19 nt, Artificial Sequence
  Description of Artificial Sequence: Synthetic oligonucleotide
gccgccgcuugcaauaucu

SEQ ID NO: 2467209 - RNA, 19 nt, Artificial Sequence
  Description of Artificial Sequence: Synthetic oligonucleotide
ccgccagcacgauccugcc

SEQ ID NO: 2467210 - RNA, 19 nt, Artificial Sequence
  Description of Artificial Sequence: Synthetic oligonucleotide
cgcccacacagcguaggcg

SEQ ID NO: 2467211 - RNA, 19 nt, Artificial Sequence
  Description of Artificial Sequence: Synthetic oligonucleotide
cgcgccaacguaggguacc

SEQ ID NO: 2467212 - RNA, 19 nt, Artificial Sequence
  Description of Artificial Sequence: Synthetic oligonucleotide
ugccgggcacucgcgccaa

SEQ ID NO: 2467213 - RNA, 19 nt, Artificial Sequence
  Description of Artificial Sequence: Synthetic oligonucleotide
ccacggguucagcucauaa

SEQ ID NO: 2467214 - RNA, 19 nt, Artificial Sequence
  Description of Artificial Sequence: Synthetic oligonucleotide
caagcccgggccgccucuc

SEQ ID NO: 2467215 - RNA, 19 nt, Artificial Sequence
  Description of Artificial Sequence: Synthetic oligonucleotide
gcuggcccaguaccaugga

SEQ ID NO: 2467216 - RNA, 19 nt, Artificial Sequence
  Description of Artificial Sequence: Synthetic oligonucleotide
acacgggccccugcaggua

SEQ ID NO: 2467217 - RNA, 19 nt, Artificial Sequence
  Description of Artificial Sequence: Synthetic oligonucleotide
gccucgcaacaacgauagc

SEQ ID NO: 2467218 - RNA, 19 nt, Artificial Sequence
  Description of Artificial Sequence: Synthetic oligonucleotide
cgucgugauccaugguuga

SEQ ID NO: 2467219 - RNA, 19 nt, Artificial Sequence
  Description of Artificial Sequence: Synthetic oligonucleotide
ggcaugcagucgugcaagu

SEQ ID NO: 2467220 - RNA, 19 nt, Artificial Sequence
  Description of Artificial Sequence: Synthetic oligonucleotide
gcggcggaacccggguugc

SEQ ID NO: 2467221 - RNA, 19 nt, Artificial Sequence
  Description of Artificial Sequence: Synthetic oligonucleotide
ccgccgcuugcaauaucuc

SEQ ID NO: 2467222 - RNA, 19 nt, Artificial Sequence
  Description of Artificial Sequence: Synthetic oligonucleotide
cagagccuagauccaccau

SEQ ID NO: 2467223 - RNA, 19 nt, Artificial Sequence
  Description of Artificial Sequence: Synthetic oligonucleotide
cgugcucaaccugccgggc

SEQ ID NO: 2467224 - RNA, 19 nt, Artificial Sequence
  Description of Artificial Sequence: Synthetic oligonucleotide
cacgcggcggaacccgggu

SEQ ID NO: 2467225 - RNA, 19 nt, Artificial Sequence
  Description of Artificial Sequence: Synthetic oligonucleotide
caguucagagcgguccuuu

SEQ ID NO: 2467226 - RNA, 19 nt, Artificial Sequence
  Description of Artificial Sequence: Synthetic oligonucleotide
cgcagcgcagucaaagccu

SEQ ID NO: 2467227 - RNA, 19 nt, Artificial Sequence
  Description of Artificial Sequence: Synthetic oligonucleotide
ccucucgcgcagcgcaguc

SEQ ID NO: 2467228 - RNA, 19 nt, Artificial Sequence
  Description of Artificial Sequence: Synthetic oligonucleotide
ccuagggauggagguagaa

SEQ ID NO: 2467229 - RNA, 19 nt, Artificial Sequence
  Description of Artificial Sequence: Synthetic oligonucleotide
cucgcgcagcgcagucaaa

SEQ ID NO: 2467230 - RNA, 19 nt, Artificial Sequence
  Description of Artificial Sequence: Synthetic oligonucleotide
cccgggccgccucucgcgc

SEQ ID NO: 2467231 - RNA, 19 nt, Artificial Sequence
  Description of Artificial Sequence: Synthetic oligonucleotide
ggccaacccggagccugcc

SEQ ID NO: 2467232 - RNA, 19 nt, Artificial Sequence
  Description of Artificial Sequence: Synthetic oligonucleotide
ggguaccugcagccucaga

SEQ ID NO: 2467233 - RNA, 19 nt, Artificial Sequence
  Description of Artificial Sequence: Synthetic oligonucleotide
acgggccccugcagguagu

SEQ ID NO: 2467234 - RNA, 19 nt, Artificial Sequence
  Description of Artificial Sequence: Synthetic oligonucleotide
agccacggguucagcucau

SEQ ID NO: 2467235 - RNA, 19 nt, Artificial Sequence
  Description of Artificial Sequence: Synthetic oligonucleotide
gucccacaagccacggguu

SEQ ID NO: 2467236 - RNA, 19 nt, Artificial Sequence
  Description of Artificial Sequence: Synthetic oligonucleotide
gcggccucgcaacaacgau

SEQ ID NO: 2467237 - RNA, 19 nt, Artificial Sequence
  Description of Artificial Sequence: Synthetic oligonucleotide
cggccaacccggagccugc

SEQ ID NO: 2467238 - RNA, 19 nt, Artificial Sequence
  Description of Artificial Sequence: Synthetic oligonucleotide
ggucgucgugauccauggu

SEQ ID NO: 2467239 - RNA, 19 nt, Artificial Sequence
  Description of Artificial Sequence: Synthetic oligonucleotide
cggccucgcaacaacgaua

SEQ ID NO: 2467240 - RNA, 19 nt, Artificial Sequence
  Description of Artificial Sequence: Synthetic oligonucleotide
cggaacccggguugcagaa

SEQ ID NO: 2467241 - RNA, 19 nt, Artificial Sequence
  Description of Artificial Sequence: Synthetic oligonucleotide
gccucggcagggucgucgu

SEQ ID NO: 2467242 - RNA, 19 nt, Artificial Sequence
  Description of Artificial Sequence: Synthetic oligonucleotide
gcccaguaccauggacauc

SEQ ID NO: 2467243 - RNA, 19 nt, Artificial Sequence
  Description of Artificial Sequence: Synthetic oligonucleotide
ccaucaccagagccuagau

SEQ ID NO: 2467244 - RNA, 19 nt, Artificial Sequence
  Description of Artificial Sequence: Synthetic oligonucleotide
cgggccgccucucgcgcag

SEQ ID NO: 2467245 - RNA, 19 nt, Artificial Sequence
  Description of Artificial Sequence: Synthetic oligonucleotide
ccagggcggccucgcaaca

SEQ ID NO: 2467246 - RNA, 19 nt, Artificial Sequence
  Description of Artificial Sequence: Synthetic oligonucleotide
gggccccugcagguaguuc

SEQ ID NO: 2467247 - RNA, 19 nt, Artificial Sequence
  Description of Artificial Sequence: Synthetic oligonucleotide
gcuggacggagaccacauu

SEQ ID NO: 2467248 - RNA, 19 nt, Artificial Sequence
  Description of Artificial Sequence: Synthetic oligonucleotide
cggagccugccgccgcuug

SEQ ID NO: 2467249 - RNA, 19 nt, Artificial Sequence
  Description of Artificial Sequence: Synthetic oligonucleotide
gcgccaacguaggguaccu

SEQ ID NO: 2467250 - RNA, 19 nt, Artificial Sequence
  Description of Artificial Sequence: Synthetic oligonucleotide
cagggucgucgugauccau

SEQ ID NO: 2467251 - RNA, 19 nt, Artificial Sequence
  Description of Artificial Sequence: Synthetic oligonucleotide
cguaggguaccugcagccu

SEQ ID NO: 2467252 - RNA, 19 nt, Artificial Sequence
  Description of Artificial Sequence: Synthetic oligonucleotide
cugccgccgcuugcaauau

SEQ ID NO: 2467253 - RNA, 19 nt, Artificial Sequence
  Description of Artificial Sequence: Synthetic oligonucleotide
ccccagccgggagcuggag

SEQ ID NO: 2467254 - RNA, 19 nt, Artificial Sequence
  Description of Artificial Sequence: Synthetic oligonucleotide
gggccgccucucgcgcagc

SEQ ID NO: 2467255 - RNA, 19 nt, Artificial Sequence
  Description of Artificial Sequence: Synthetic oligonucleotide
gccgggcacucgcgccaac

SEQ ID NO: 2467256 - RNA, 19 nt, Artificial Sequence
  Description of Artificial Sequence: Synthetic oligonucleotide
cgccaacguaggguaccug

SEQ ID NO: 2467257 - RNA, 19 nt, Artificial Sequence
  Description of Artificial Sequence: Synthetic oligonucleotide
gccucucgcgcagcgcagu

SEQ ID NO: 2467258 - RNA, 19 nt, Artificial Sequence
  Description of Artificial Sequence: Synthetic oligonucleotide
ccaagcccgggccgccucu

SEQ ID NO: 2467259 - RNA, 19 nt, Artificial Sequence
  Description of Artificial Sequence: Synthetic oligonucleotide
cgggcacucgcgccaacgu

SEQ ID NO: 2467260 - RNA, 19 nt, Artificial Sequence
  Description of Artificial Sequence: Synthetic oligonucleotide
cggcagggucgucgugauc

SEQ ID NO: 2467261 - RNA, 19 nt, Artificial Sequence
  Description of Artificial Sequence: Synthetic oligonucleotide
ggugggccgccagcacgau

SEQ ID NO: 2467262 - RNA, 19 nt, Artificial Sequence
  Description of Artificial Sequence: Synthetic oligonucleotide
cggcggaacccggguugca

SEQ ID NO: 2467263 - RNA, 19 nt, Artificial Sequence
  Description of Artificial Sequence: Synthetic oligonucleotide
ccggagccugccgccgcuu

SEQ ID NO: 2467264 - RNA, 19 nt, Artificial Sequence
  Description of Artificial Sequence: Synthetic oligonucleotide
cgggccccugcagguaguu

SEQ ID NO: 2467265 - RNA, 19 nt, Artificial Sequence
  Description of Artificial Sequence: Synthetic oligonucleotide
agaauauccacuuuaaucc

SEQ ID NO: 2467266 - RNA, 19 nt, Artificial Sequence
  Description of Artificial Sequence: Synthetic oligonucleotide
aagagaaugagcuugcucc

SEQ ID NO: 2467267 - RNA, 19 nt, Artificial Sequence
  Description of Artificial Sequence: Synthetic oligonucleotide
aagaauauccacuuuaauc

SEQ ID NO: 2467268 - RNA, 19 nt, Artificial Sequence
  Description of Artificial Sequence: Synthetic oligonucleotide
aguauugucucacugaggc

SEQ ID NO: 2467269 - RNA, 19 nt, Artificial Sequence
  Description of Artificial Sequence: Synthetic oligonucleotide
uuuuaugauaauaagacuc

SEQ ID NO: 2467270 - RNA, 19 nt, Artificial Sequence
  Description of Artificial Sequence: Synthetic oligonucleotide
uauaauuacguucacuucc

SEQ ID NO: 2467271 - RNA, 19 nt, Artificial Sequence
  Description of Artificial Sequence: Synthetic oligonucleotide
accaccaagacucaggagc

SEQ ID NO: 2467272 - RNA, 19 nt, Artificial Sequence
  Description of Artificial Sequence: Synthetic oligonucleotide
aauaagacucugcuuuugc

SEQ ID NO: 2467273 - RNA, 19 nt, Artificial Sequence
  Description of Artificial Sequence: Synthetic oligonucleotide
uuuaauuuggugcaauucu

SEQ ID NO: 2467274 - RNA, 19 nt, Artificial Sequence
  Description of Artificial Sequence: Synthetic oligonucleotide
uaagguuuuauaauuacgu

SEQ ID NO: 2467275 - RNA, 19 nt, Artificial Sequence
  Description of Artificial Sequence: Synthetic oligonucleotide
aaucaugcguucuugauga

SEQ ID NO: 2467276 - RNA, 19 nt, Artificial Sequence
  Description of Artificial Sequence: Synthetic oligonucleotide
uuuauaauuacguucacuu

SEQ ID NO: 2467277 - RNA, 19 nt, Artificial Sequence
  Description of Artificial Sequence: Synthetic oligonucleotide
aagauccugucuuugaguc

SEQ ID NO: 2467278 - RNA, 19 nt, Artificial Sequence
  Description of Artificial Sequence: Synthetic oligonucleotide
uuuaugauaauaagacucu

SEQ ID NO: 2467279 - RNA, 19 nt, Artificial Sequence
  Description of Artificial Sequence: Synthetic oligonucleotide
acuuuaauccgacuuguac

SEQ ID NO: 2467280 - RNA, 19 nt, Artificial Sequence
  Description of Artificial Sequence: Synthetic oligonucleotide
uguaguauguacaccacca

SEQ ID NO: 2467281 - RNA, 19 nt, Artificial Sequence
  Description of Artificial Sequence: Synthetic oligonucleotide
uaugauaauaagacucugc

SEQ ID NO: 2467282 - RNA, 19 nt, Artificial Sequence
  Description of Artificial Sequence: Synthetic oligonucleotide
uuuaauccgacuuguacug

SEQ ID NO: 2467283 - RNA, 19 nt, Artificial Sequence
  Description of Artificial Sequence: Synthetic oligonucleotide
ugaucuuuaauuuggugca

SEQ ID NO: 2467284 - RNA, 19 nt, Artificial Sequence
  Description of Artificial Sequence: Synthetic oligonucleotide
aauuuggugcaauucucuc

SEQ ID NO: 2467285 - RNA, 19 nt, Artificial Sequence
  Description of Artificial Sequence: Synthetic oligonucleotide
augauaauaagacucugcu

SEQ ID NO: 2467286 - RNA, 19 nt, Artificial Sequence
  Description of Artificial Sequence: Synthetic oligonucleotide
gaauauccacuuuaauccg

SEQ ID NO: 2467287 - RNA, 19 nt, Artificial Sequence
  Description of Artificial Sequence: Synthetic oligonucleotide
cuucugaaauccuagggcc

SEQ ID NO: 2467288 - RNA, 19 nt, Artificial Sequence
  Description of Artificial Sequence: Synthetic oligonucleotide
uaugcgacaacccuuucca

SEQ ID NO: 2467289 - RNA, 19 nt, Artificial Sequence
  Description of Artificial Sequence: Synthetic oligonucleotide
uuccauaagaauauccacu

SEQ ID NO: 2467290 - RNA, 19 nt, Artificial Sequence
  Description of Artificial Sequence: Synthetic oligonucleotide
aagacucugcuuuugcaag

SEQ ID NO: 2467291 - RNA, 19 nt, Artificial Sequence
  Description of Artificial Sequence: Synthetic oligonucleotide
uauaagguuuuauaauuac

SEQ ID NO: 2467292 - RNA, 19 nt, Artificial Sequence
  Description of Artificial Sequence: Synthetic oligonucleotide
uucuugaugaucuuuaauu

SEQ ID NO: 2467293 - RNA, 19 nt, Artificial Sequence
  Description of Artificial Sequence: Synthetic oligonucleotide
ugcucuuaaacucucuggc

SEQ ID NO: 2467294 - RNA, 19 nt, Artificial Sequence
  Description of Artificial Sequence: Synthetic oligonucleotide
gauaauaagacucugcuuu

SEQ ID NO: 2467295 - RNA, 19 nt, Artificial Sequence
  Description of Artificial Sequence: Synthetic oligonucleotide
aaaagguaggcacagccaa

SEQ ID NO: 2467296 - RNA, 19 nt, Artificial Sequence
  Description of Artificial Sequence: Synthetic oligonucleotide
uucuauuugucucuucucu

SEQ ID NO: 2467297 - RNA, 19 nt, Artificial Sequence
  Description of Artificial Sequence: Synthetic oligonucleotide
aaucauuuccacuuauuuu

SEQ ID NO: 2467298 - RNA, 19 nt, Artificial Sequence
  Description of Artificial Sequence: Synthetic oligonucleotide
uuaccaagugucuugcugc

SEQ ID NO: 2467299 - RNA, 19 nt, Artificial Sequence
  Description of Artificial Sequence: Synthetic oligonucleotide
uucaucuucauuucaccgc

SEQ ID NO: 2467300 - RNA, 19 nt, Artificial Sequence
  Description of Artificial Sequence: Synthetic oligonucleotide
uaguauguacaccaccaag

SEQ ID NO: 2467301 - RNA, 19 nt, Artificial Sequence
  Description of Artificial Sequence: Synthetic oligonucleotide
guaguauugucucacugag

SEQ ID NO: 2467302 - RNA, 19 nt, Artificial Sequence
  Description of Artificial Sequence: Synthetic oligonucleotide
agagaaugagcuugcuccc

SEQ ID NO: 2467303 - RNA, 19 nt, Artificial Sequence
  Description of Artificial Sequence: Synthetic oligonucleotide
gaugcuuuugcccaagcca

SEQ ID NO: 2467304 - RNA, 19 nt, Artificial Sequence
  Description of Artificial Sequence: Synthetic oligonucleotide
aauccuggguaguauuguc

SEQ ID NO: 2467305 - RNA, 19 nt, Artificial Sequence
  Description of Artificial Sequence: Synthetic oligonucleotide
uaaucauuuccacuuauuu

SEQ ID NO: 2467306 - RNA, 19 nt, Artificial Sequence
  Description of Artificial Sequence: Synthetic oligonucleotide
uuaauuuggugcaauucuc

SEQ ID NO: 2467307 - RNA, 19 nt, Artificial Sequence
  Description of Artificial Sequence: Synthetic oligonucleotide
uugcucuuaaacucucugg

SEQ ID NO: 2467308 - RNA, 19 nt, Artificial Sequence
  Description of Artificial Sequence: Synthetic oligonucleotide
gaaucaugcguucuugaug

SEQ ID NO: 2467309 - RNA, 19 nt, Artificial Sequence
  Description of Artificial Sequence: Synthetic oligonucleotide
uacaccaccaagacucagg

SEQ ID NO: 2467310 - RNA, 19 nt, Artificial Sequence
  Description of Artificial Sequence: Synthetic oligonucleotide
uccgacuuguacuggacgg

SEQ ID NO: 2467311 - RNA, 19 nt, Artificial Sequence
  Description of Artificial Sequence: Synthetic oligonucleotide
auaagguuuuauaauuacg

SEQ ID NO: 2467312 - RNA, 19 nt, Artificial Sequence
  Description of Artificial Sequence: Synthetic oligonucleotide
ugaguuaccaagugucuug

SEQ ID NO: 2467313 - RNA, 19 nt, Artificial Sequence
  Description of Artificial Sequence: Synthetic oligonucleotide
uauugucucacugaggcgu

SEQ ID NO: 2467314 - RNA, 19 nt, Artificial Sequence
  Description of Artificial Sequence: Synthetic oligonucleotide
ugaccuucugaaauccuag

SEQ ID NO: 2467315 - RNA, 19 nt, Artificial Sequence
  Description of Artificial Sequence: Synthetic oligonucleotide
ugcucuagaaguucccucc

SEQ ID NO: 2467316 - RNA, 19 nt, Artificial Sequence
  Description of Artificial Sequence: Synthetic oligonucleotide
auuacguucacuuccuuuu

SEQ ID NO: 2467317 - RNA, 19 nt, Artificial Sequence
  Description of Artificial Sequence: Synthetic oligonucleotide
uugacugcgccucucaggu

SEQ ID NO: 2467318 - RNA, 19 nt, Artificial Sequence
  Description of Artificial Sequence: Synthetic oligonucleotide
agucaagagaaugagcuug

SEQ ID NO: 2467319 - RNA, 19 nt, Artificial Sequence
  Description of Artificial Sequence: Synthetic oligonucleotide
uuugaguuaccaagugucu

SEQ ID NO: 2467320 - RNA, 19 nt, Artificial Sequence
  Description of Artificial Sequence: Synthetic oligonucleotide
uuauaauuacguucacuuc

SEQ ID NO: 2467321 - RNA, 19 nt, Artificial Sequence
  Description of Artificial Sequence: Synthetic oligonucleotide
gaaugugccuuucuauuug

SEQ ID NO: 2467322 - RNA, 19 nt, Artificial Sequence
  Description of Artificial Sequence: Synthetic oligonucleotide
aguagucaagagaaugagc

SEQ ID NO: 2467323 - RNA, 19 nt, Artificial Sequence
  Description of Artificial Sequence: Synthetic oligonucleotide
uuucuggcgaaauccuggg

SEQ ID NO: 2467324 - RNA, 19 nt, Artificial Sequence
  Description of Artificial Sequence: Synthetic oligonucleotide
uguucuaagaaugugccuu

SEQ ID NO: 2467325 - RNA, 19 nt, Artificial Sequence
  Description of Artificial Sequence: Synthetic oligonucleotide
cuuauuugaguucucaaaa

SEQ ID NO: 2467326 - RNA, 19 nt, Artificial Sequence
  Description of Artificial Sequence: Synthetic oligonucleotide
ugcguuucuggcgaaaucc

SEQ ID NO: 2467327 - RNA, 19 nt, Artificial Sequence
  Description of Artificial Sequence: Synthetic oligonucleotide
uccauaagaauauccacuu

SEQ ID NO: 2467328 - RNA, 19 nt, Artificial Sequence
  Description of Artificial Sequence: Synthetic oligonucleotide
agacucugcuuuugcaagc

SEQ ID NO: 2467329 - RNA, 19 nt, Artificial Sequence
  Description of Artificial Sequence: Synthetic oligonucleotide
guuaccaagugucuugcug

SEQ ID NO: 2467330 - RNA, 19 nt, Artificial Sequence
  Description of Artificial Sequence: Synthetic oligonucleotide
ugugccuuucuauuugucu

SEQ ID NO: 2467331 - RNA, 19 nt, Artificial Sequence
  Description of Artificial Sequence: Synthetic oligonucleotide
aagccaguagucaagagaa

SEQ ID NO: 2467332 - RNA, 19 nt, Artificial Sequence
  Description of Artificial Sequence: Synthetic oligonucleotide
ugagcuugcucccugcaga

SEQ ID NO: 2467333 - RNA, 19 nt, Artificial Sequence
  Description of Artificial Sequence: Synthetic oligonucleotide
uaagaaugugccuuucuau

SEQ ID NO: 2467334 - RNA, 19 nt, Artificial Sequence
  Description of Artificial Sequence: Synthetic oligonucleotide
uucuucacuugacugcgcc

SEQ ID NO: 2467335 - RNA, 19 nt, Artificial Sequence
  Description of Artificial Sequence: Synthetic oligonucleotide
cuagaaguucccucccucg

SEQ ID NO: 2467336 - RNA, 19 nt, Artificial Sequence
  Description of Artificial Sequence: Synthetic oligonucleotide
aauccuagggccucuggau

SEQ ID NO: 2467337 - RNA, 19 nt, Artificial Sequence
  Description of Artificial Sequence: Synthetic oligonucleotide
uaguauugucucacugagg

SEQ ID NO: 2467338 - RNA, 19 nt, Artificial Sequence
  Description of Artificial Sequence: Synthetic oligonucleotide
ucuaagaaugugccuuucu

SEQ ID NO: 2467339 - RNA, 19 nt, Artificial Sequence
  Description of Artificial Sequence: Synthetic oligonucleotide
uauguacaccaccaagacu

SEQ ID NO: 2467340 - RNA, 19 nt, Artificial Sequence
  Description of Artificial Sequence: Synthetic oligonucleotide
ucuggcgaaauccugggua

SEQ ID NO: 2467341 - RNA, 19 nt, Artificial Sequence
  Description of Artificial Sequence: Synthetic oligonucleotide
aguauguacaccaccaaga

SEQ ID NO: 2467342 - RNA, 19 nt, Artificial Sequence
  Description of Artificial Sequence: Synthetic oligonucleotide
auuuggugcaauucucucu

SEQ ID NO: 2467343 - RNA, 19 nt, Artificial Sequence
  Description of Artificial Sequence: Synthetic oligonucleotide
gguuuuauaauuacguuca

SEQ ID NO: 2467344 - RNA, 19 nt, Artificial Sequence
  Description of Artificial Sequence: Synthetic oligonucleotide
uuaugauaauaagacucug

SEQ ID NO: 2467345 - RNA, 19 nt, Artificial Sequence
  Description of Artificial Sequence: Synthetic oligonucleotide
ugucuuugagucuuugcuc

SEQ ID NO: 2467346 - RNA, 19 nt, Artificial Sequence
  Description of Artificial Sequence: Synthetic oligonucleotide
uucauuucaccgccggugu

SEQ ID NO: 2467347 - RNA, 19 nt, Artificial Sequence
  Description of Artificial Sequence: Synthetic oligonucleotide
ucuauuugucucuucucuc

SEQ ID NO: 2467348 - RNA, 19 nt, Artificial Sequence
  Description of Artificial Sequence: Synthetic oligonucleotide
guauguacaccaccaagac

SEQ ID NO: 2467349 - RNA, 19 nt, Artificial Sequence
  Description of Artificial Sequence: Synthetic oligonucleotide
uuuugcaagccaguaguca

SEQ ID NO: 2467350 - RNA, 19 nt, Artificial Sequence
  Description of Artificial Sequence: Synthetic oligonucleotide
cuggccuguucuaagaaug

SEQ ID NO: 2467351 - RNA, 19 nt, Artificial Sequence
  Description of Artificial Sequence: Synthetic oligonucleotide
uguugaccuucugaaaucc

SEQ ID NO: 2467352 - RNA, 19 nt, Artificial Sequence
  Description of Artificial Sequence: Synthetic oligonucleotide
ugaugaucuuuaauuuggu

SEQ ID NO: 2467353 - RNA, 19 nt, Artificial Sequence
  Description of Artificial Sequence: Synthetic oligonucleotide
acaacccuuuccaaacucc

SEQ ID NO: 2467354 - RNA, 19 nt, Artificial Sequence
  Description of Artificial Sequence: Synthetic oligonucleotide
agacuguugaccuucugaa

SEQ ID NO: 2467355 - RNA, 19 nt, Artificial Sequence
  Description of Artificial Sequence: Synthetic oligonucleotide
aagacucaggagccuuuuc

SEQ ID NO: 2467356 - RNA, 19 nt, Artificial Sequence
  Description of Artificial Sequence: Synthetic oligonucleotide
guagucaagagaaugagcu

SEQ ID NO: 2467357 - RNA, 19 nt, Artificial Sequence
  Description of Artificial Sequence: Synthetic oligonucleotide
cuugacugcgccucucagg

SEQ ID NO: 2467358 - RNA, 19 nt, Artificial Sequence
  Description of Artificial Sequence: Synthetic oligonucleotide
ucucuucucucucucgugu

SEQ ID NO: 2467359 - RNA, 19 nt, Artificial Sequence
  Description of Artificial Sequence: Synthetic oligonucleotide
ucuagaaguucccucccuc

SEQ ID NO: 2467360 - RNA, 19 nt, Artificial Sequence
  Description of Artificial Sequence: Synthetic oligonucleotide
ugucucuucucucucucgu

SEQ ID NO: 2467361 - RNA, 19 nt, Artificial Sequence
  Description of Artificial Sequence: Synthetic oligonucleotide
ugauaauaagacucugcuu

SEQ ID NO: 2467362 - RNA, 19 nt, Artificial Sequence
  Description of Artificial Sequence: Synthetic oligonucleotide
uucagggauucuuuuauuu

SEQ ID NO: 2467363 - RNA, 19 nt, Artificial Sequence
  Description of Artificial Sequence: Synthetic oligonucleotide
uaauccgacuuguacugga

SEQ ID NO: 2467364 - RNA, 19 nt, Artificial Sequence
  Description of Artificial Sequence: Synthetic oligonucleotide
uugcaagccaguagucaag

SEQ ID NO: 2467365 - RNA, 19 nt, Artificial Sequence
  Description of Artificial Sequence: Synthetic oligonucleotide
aauccgacuuguacuggac

SEQ ID NO: 2467366 - RNA, 19 nt, Artificial Sequence
  Description of Artificial Sequence: Synthetic oligonucleotide
uuugagucuuugcucuaga

SEQ ID NO: 2467367 - RNA, 19 nt, Artificial Sequence
  Description of Artificial Sequence: Synthetic oligonucleotide
uuugucucuucucucucuc

SEQ ID NO: 2467368 - RNA, 19 nt, Artificial Sequence
  Description of Artificial Sequence: Synthetic oligonucleotide
cuguaguauguacaccacc

SEQ ID NO: 2467369 - RNA, 19 nt, Artificial Sequence
  Description of Artificial Sequence: Synthetic oligonucleotide
gaaauccuagggccucugg

SEQ ID NO: 2467370 - RNA, 19 nt, Artificial Sequence
  Description of Artificial Sequence: Synthetic oligonucleotide
aaauccuggguaguauugu

SEQ ID NO: 2467371 - RNA, 19 nt, Artificial Sequence
  Description of Artificial Sequence: Synthetic oligonucleotide
aaugagcuugcucccugca

SEQ ID NO: 2467372 - RNA, 19 nt, Artificial Sequence
  Description of Artificial Sequence: Synthetic oligonucleotide
cuuuaauccgacuuguacu

SEQ ID NO: 2467373 - RNA, 19 nt, Artificial Sequence
  Description of Artificial Sequence: Synthetic oligonucleotide
gagccuuuucucuagugga

SEQ ID NO: 2467374 - RNA, 19 nt, Artificial Sequence
  Description of Artificial Sequence: Synthetic oligonucleotide
auccgacuuguacuggacg

SEQ ID NO: 2467375 - RNA, 19 nt, Artificial Sequence
  Description of Artificial Sequence: Synthetic oligonucleotide
guaugcgacaacccuuucc

SEQ ID NO: 2467376 - RNA, 19 nt, Artificial Sequence
  Description of Artificial Sequence: Synthetic oligonucleotide
uuaauccgacuuguacugg

SEQ ID NO: 2467377 - RNA, 19 nt, Artificial Sequence
  Description of Artificial Sequence: Synthetic oligonucleotide
uaauaagacucugcuuuug

SEQ ID NO: 2467378 - RNA, 19 nt, Artificial Sequence
  Description of Artificial Sequence: Synthetic oligonucleotide
uuugcucuccgcuuggcua

SEQ ID NO: 2467379 - RNA, 19 nt, Artificial Sequence
  Description of Artificial Sequence: Synthetic oligonucleotide
cuucauuucaccgccggug

SEQ ID NO: 2467380 - RNA, 19 nt, Artificial Sequence
  Description of Artificial Sequence: Synthetic oligonucleotide
uuugcccaagccaaucuua

SEQ ID NO: 2467381 - RNA, 19 nt, Artificial Sequence
  Description of Artificial Sequence: Synthetic oligonucleotide
uugucucuucucucucucg

SEQ ID NO: 2467382 - RNA, 19 nt, Artificial Sequence
  Description of Artificial Sequence: Synthetic oligonucleotide
uagaaguucccucccucga

SEQ ID NO: 2467383 - RNA, 19 nt, Artificial Sequence
  Description of Artificial Sequence: Synthetic oligonucleotide
ugaaacuucagggauucuu

SEQ ID NO: 2467384 - RNA, 19 nt, Artificial Sequence
  Description of Artificial Sequence: Synthetic oligonucleotide
uacguucacuuccuuuuca

SEQ ID NO: 2467385 - RNA, 19 nt, Artificial Sequence
  Description of Artificial Sequence: Synthetic oligonucleotide
auccacuuuaauccgacuu

SEQ ID NO: 2467386 - RNA, 19 nt, Artificial Sequence
  Description of Artificial Sequence: Synthetic oligonucleotide
ucuuuaauuuggugcaauu

SEQ ID NO: 2467387 - RNA, 19 nt, Artificial Sequence
  Description of Artificial Sequence: Synthetic oligonucleotide
cuggcgaaauccuggguag

SEQ ID NO: 2467388 - RNA, 19 nt, Artificial Sequence
  Description of Artificial Sequence: Synthetic oligonucleotide
aagguaggcacagccaaga

SEQ ID NO: 2467389 - RNA, 19 nt, Artificial Sequence
  Description of Artificial Sequence: Synthetic oligonucleotide
uggacggcugguagagugg

SEQ ID NO: 2467390 - RNA, 19 nt, Artificial Sequence
  Description of Artificial Sequence: Synthetic oligonucleotide
agaaugagcuugcucccug

SEQ ID NO: 2467391 - RNA, 19 nt, Artificial Sequence
  Description of Artificial Sequence: Synthetic oligonucleotide
auaauuacguucacuuccu

SEQ ID NO: 2467392 - RNA, 19 nt, Artificial Sequence
  Description of Artificial Sequence: Synthetic oligonucleotide
ccuucugaaauccuagggc

SEQ ID NO: 2467393 - RNA, 19 nt, Artificial Sequence
  Description of Artificial Sequence: Synthetic oligonucleotide
uccuagggccucuggaugc

SEQ ID NO: 2467394 - RNA, 19 nt, Artificial Sequence
  Description of Artificial Sequence: Synthetic oligonucleotide
acaccaccaagacucagga

SEQ ID NO: 2467395 - RNA, 19 nt, Artificial Sequence
  Description of Artificial Sequence: Synthetic oligonucleotide
ugcgacaacccuuuccaaa

SEQ ID NO: 2467396 - RNA, 19 nt, Artificial Sequence
  Description of Artificial Sequence: Synthetic oligonucleotide
gaguggguaugcgacaacc

SEQ ID NO: 2467397 - RNA, 19 nt, Artificial Sequence
  Description of Artificial Sequence: Synthetic oligonucleotide
ucucucucguguuuccucu

SEQ ID NO: 2467398 - RNA, 19 nt, Artificial Sequence
  Description of Artificial Sequence: Synthetic oligonucleotide
ugccuuucuauuugucucu

SEQ ID NO: 2467399 - RNA, 19 nt, Artificial Sequence
  Description of Artificial Sequence: Synthetic oligonucleotide
ucgaaucaugcguucuuga

SEQ ID NO: 2467400 - RNA, 19 nt, Artificial Sequence
  Description of Artificial Sequence: Synthetic oligonucleotide
cuauaagguuuuauaauua

SEQ ID NO: 2467401 - RNA, 19 nt, Artificial Sequence
  Description of Artificial Sequence: Synthetic oligonucleotide
gguaguauugucucacuga

SEQ ID NO: 2467402 - RNA, 19 nt, Artificial Sequence
  Description of Artificial Sequence: Synthetic oligonucleotide
aaagguaggcacagccaag

SEQ ID NO: 2467403 - RNA, 19 nt, Artificial Sequence
  Description of Artificial Sequence: Synthetic oligonucleotide
uuccaaacuccuuucucuc

SEQ ID NO: 2467404 - RNA, 19 nt, Artificial Sequence
  Description of Artificial Sequence: Synthetic oligonucleotide
caagccaguagucaagaga

SEQ ID NO: 2467405 - RNA, 19 nt, Artificial Sequence
  Description of Artificial Sequence: Synthetic oligonucleotide
uccuggguaguauugucuc

SEQ ID NO: 2467406 - RNA, 19 nt, Artificial Sequence
  Description of Artificial Sequence: Synthetic oligonucleotide
ugguagaguggguaugcga

SEQ ID NO: 2467407 - RNA, 19 nt, Artificial Sequence
  Description of Artificial Sequence: Synthetic oligonucleotide
augcucugcguuucuggcg

SEQ ID NO: 2467408 - RNA, 19 nt, Artificial Sequence
  Description of Artificial Sequence: Synthetic oligonucleotide
caguagucaagagaaugag

SEQ ID NO: 2467409 - RNA, 19 nt, Artificial Sequence
  Description of Artificial Sequence: Synthetic oligonucleotide
cuggacggcugguagagug

SEQ ID NO: 2467410 - RNA, 19 nt, Artificial Sequence
  Description of Artificial Sequence: Synthetic oligonucleotide
gcuagugggaugcucugcg

SEQ ID NO: 2467411 - RNA, 19 nt, Artificial Sequence
  Description of Artificial Sequence: Synthetic oligonucleotide
ucuggcucauucucaagau

SEQ ID NO: 2467412 - RNA, 19 nt, Artificial Sequence
  Description of Artificial Sequence: Synthetic oligonucleotide
caagagaaugagcuugcuc

SEQ ID NO: 2467413 - RNA, 19 nt, Artificial Sequence
  Description of Artificial Sequence: Synthetic oligonucleotide
caugcguucuugaugaucu

SEQ ID NO: 2467414 - RNA, 19 nt, Artificial Sequence
  Description of Artificial Sequence: Synthetic oligonucleotide
uuacguucacuuccuuuuc

SEQ ID NO: 2467415 - RNA, 19 nt, Artificial Sequence
  Description of Artificial Sequence: Synthetic oligonucleotide
gacucaggagccuuuucuc

SEQ ID NO: 2467416 - RNA, 19 nt, Artificial Sequence
  Description of Artificial Sequence: Synthetic oligonucleotide
gacaacccuuuccaaacuc

SEQ ID NO: 2467417 - RNA, 19 nt, Artificial Sequence
  Description of Artificial Sequence: Synthetic oligonucleotide
uuuugcccaagccaaucuu

SEQ ID NO: 2467418 - RNA, 19 nt, Artificial Sequence
  Description of Artificial Sequence: Synthetic oligonucleotide
gaguuaccaagugucuugc

SEQ ID NO: 2467419 - RNA, 19 nt, Artificial Sequence
  Description of Artificial Sequence: Synthetic oligonucleotide
guuuuauaauuacguucac

SEQ ID NO: 2467420 - RNA, 19 nt, Artificial Sequence
  Description of Artificial Sequence: Synthetic oligonucleotide
augagcuugcucccugcag

SEQ ID NO: 2467421 - RNA, 19 nt, Artificial Sequence
  Description of Artificial Sequence: Synthetic oligonucleotide
agagugcuuugcucuccgc

SEQ ID NO: 2467422 - RNA, 19 nt, Artificial Sequence
  Description of Artificial Sequence: Synthetic oligonucleotide
uccuugaccugccuucuuc

SEQ ID NO: 2467423 - RNA, 19 nt, Artificial Sequence
  Description of Artificial Sequence: Synthetic oligonucleotide
cucuggaugcuuuugccca

SEQ ID NO: 2467424 - RNA, 19 nt, Artificial Sequence
  Description of Artificial Sequence: Synthetic oligonucleotide
uugagucuuugcucuagaa

SEQ ID NO: 2467425 - RNA, 19 nt, Artificial Sequence
  Description of Artificial Sequence: Synthetic oligonucleotide
aggcguugugucugccucc

SEQ ID NO: 2467426 - RNA, 19 nt, Artificial Sequence
  Description of Artificial Sequence: Synthetic oligonucleotide
uugcccaagccaaucuuaa

SEQ ID NO: 2467427 - RNA, 19 nt, Artificial Sequence
  Description of Artificial Sequence: Synthetic oligonucleotide
aguucccucccucgaauca

SEQ ID NO: 2467428 - RNA, 19 nt, Artificial Sequence
  Description of Artificial Sequence: Synthetic oligonucleotide
gguagaguggguaugcgac

SEQ ID NO: 2467429 - RNA, 19 nt, Artificial Sequence
  Description of Artificial Sequence: Synthetic oligonucleotide
cuuugagucuuugcucuag

SEQ ID NO: 2467430 - RNA, 19 nt, Artificial Sequence
  Description of Artificial Sequence: Synthetic oligonucleotide
uggguaugcgacaacccuu

SEQ ID NO: 2467431 - RNA, 19 nt, Artificial Sequence
  Description of Artificial Sequence: Synthetic oligonucleotide
gacucugcuuuugcaagcc

SEQ ID NO: 2467432 - RNA, 19 nt, Artificial Sequence
  Description of Artificial Sequence: Synthetic oligonucleotide
agaguggguaugcgacaac

SEQ ID NO: 2467433 - RNA, 19 nt, Artificial Sequence
  Description of Artificial Sequence: Synthetic oligonucleotide
gcugcuguaguauguacac

SEQ ID NO: 2467434 - RNA, 19 nt, Artificial Sequence
  Description of Artificial Sequence: Synthetic oligonucleotide
ucuucacuugacugcgccu

SEQ ID NO: 2467435 - RNA, 19 nt, Artificial Sequence
  Description of Artificial Sequence: Synthetic oligonucleotide
cuaagaaugugccuuucua

SEQ ID NO: 2467436 - RNA, 19 nt, Artificial Sequence
  Description of Artificial Sequence: Synthetic oligonucleotide
ucucguguuuccucuccca

SEQ ID NO: 2467437 - RNA, 19 nt, Artificial Sequence
  Description of Artificial Sequence: Synthetic oligonucleotide
ugcaagccaguagucaaga

SEQ ID NO: 2467438 - RNA, 19 nt, Artificial Sequence
  Description of Artificial Sequence: Synthetic oligonucleotide
gucaagagaaugagcuugc

SEQ ID NO: 2467439 - RNA, 19 nt, Artificial Sequence
  Description of Artificial Sequence: Synthetic oligonucleotide
ucguguuuccucucccacu

SEQ ID NO: 2467440 - RNA, 19 nt, Artificial Sequence
  Description of Artificial Sequence: Synthetic oligonucleotide
ucucaggugguggaaucug

SEQ ID NO: 2467441 - RNA, 19 nt, Artificial Sequence
  Description of Artificial Sequence: Synthetic oligonucleotide
cuugcucccugcagagugc

SEQ ID NO: 2467442 - RNA, 19 nt, Artificial Sequence
  Description of Artificial Sequence: Synthetic oligonucleotide
cucuuaaacucucuggccu

SEQ ID NO: 2467443 - RNA, 19 nt, Artificial Sequence
  Description of Artificial Sequence: Synthetic oligonucleotide
uugaguuaccaagugucuu

SEQ ID NO: 2467444 - RNA, 19 nt, Artificial Sequence
  Description of Artificial Sequence: Synthetic oligonucleotide
agaaguucccucccucgaa

SEQ ID NO: 2467445 - RNA, 19 nt, Artificial Sequence
  Description of Artificial Sequence: Synthetic oligonucleotide
agauccugucuuugagucu

SEQ ID NO: 2467446 - RNA, 19 nt, Artificial Sequence
  Description of Artificial Sequence: Synthetic oligonucleotide
ugcgccucucagguggugg

SEQ ID NO: 2467447 - RNA, 19 nt, Artificial Sequence
  Description of Artificial Sequence: Synthetic oligonucleotide
cucaagauccugucuuuga

SEQ ID NO: 2467448 - RNA, 19 nt, Artificial Sequence
  Description of Artificial Sequence: Synthetic oligonucleotide
uagaguggguaugcgacaa

SEQ ID NO: 2467449 - RNA, 19 nt, Artificial Sequence
  Description of Artificial Sequence: Synthetic oligonucleotide
uggaugcuuuugcccaagc

SEQ ID NO: 2467450 - RNA, 19 nt, Artificial Sequence
  Description of Artificial Sequence: Synthetic oligonucleotide
ucaugcguucuugaugauc

SEQ ID NO: 2467451 - RNA, 19 nt, Artificial Sequence
  Description of Artificial Sequence: Synthetic oligonucleotide
aggagccuuuucucuagug

SEQ ID NO: 2467452 - RNA, 19 nt, Artificial Sequence
  Description of Artificial Sequence: Synthetic oligonucleotide
gucuugcugcuguaguaug

SEQ ID NO: 2467453 - RNA, 19 nt, Artificial Sequence
  Description of Artificial Sequence: Synthetic oligonucleotide
uagugggaugcucugcguu

SEQ ID NO: 2467454 - RNA, 19 nt, Artificial Sequence
  Description of Artificial Sequence: Synthetic oligonucleotide
cucguguuuccucucccac

SEQ ID NO: 2467455 - RNA, 19 nt, Artificial Sequence
  Description of Artificial Sequence: Synthetic oligonucleotide
gccaguagucaagagaaug

SEQ ID NO: 2467456 - RNA, 19 nt, Artificial Sequence
  Description of Artificial Sequence: Synthetic oligonucleotide
ggaugcuuuugcccaagcc

SEQ ID NO: 2467457 - RNA, 19 nt, Artificial Sequence
  Description of Artificial Sequence: Synthetic oligonucleotide
agugggaugcucugcguuu

SEQ ID NO: 2467458 - RNA, 19 nt, Artificial Sequence
  Description of Artificial Sequence: Synthetic oligonucleotide
ugaggcguugugucugccu

SEQ ID NO: 2467459 - RNA, 19 nt, Artificial Sequence
  Description of Artificial Sequence: Synthetic oligonucleotide
cucgaaucaugcguucuug

SEQ ID NO: 2467460 - RNA, 19 nt, Artificial Sequence
  Description of Artificial Sequence: Synthetic oligonucleotide
ggguaguauugucucacug

SEQ ID NO: 2467461 - RNA, 19 nt, Artificial Sequence
  Description of Artificial Sequence: Synthetic oligonucleotide
gcgacaacccuuuccaaac

SEQ ID NO: 2467462 - RNA, 19 nt, Artificial Sequence
  Description of Artificial Sequence: Synthetic oligonucleotide
uugcucuccgcuuggcuau

SEQ ID NO: 2467463 - RNA, 19 nt, Artificial Sequence
  Description of Artificial Sequence: Synthetic oligonucleotide
ucccucccucgaaucaugc

SEQ ID NO: 2467464 - RNA, 19 nt, Artificial Sequence
  Description of Artificial Sequence: Synthetic oligonucleotide
cucucucucguguuuccuc

SEQ ID NO: 2467465 - RNA, 19 nt, Artificial Sequence
  Description of Artificial Sequence: Synthetic oligonucleotide
aucuuuaauuuggugcaau

SEQ ID NO: 2467466 - RNA, 19 nt, Artificial Sequence
  Description of Artificial Sequence: Synthetic oligonucleotide
aguuaccaagugucuugcu

SEQ ID NO: 2467467 - RNA, 19 nt, Artificial Sequence
  Description of Artificial Sequence: Synthetic oligonucleotide
gucucuucucucucucgug

SEQ ID NO: 2467468 - RNA, 19 nt, Artificial Sequence
  Description of Artificial Sequence: Synthetic oligonucleotide
agccuuuucucuaguggag

SEQ ID NO: 2467469 - RNA, 19 nt, Artificial Sequence
  Description of Artificial Sequence: Synthetic oligonucleotide
uccuucuauaagguuuuau

SEQ ID NO: 2467470 - RNA, 19 nt, Artificial Sequence
  Description of Artificial Sequence: Synthetic oligonucleotide
cucucguguuuccucuccc

SEQ ID NO: 2467471 - RNA, 19 nt, Artificial Sequence
  Description of Artificial Sequence: Synthetic oligonucleotide
ugaaauccuagggccucug

SEQ ID NO: 2467472 - RNA, 19 nt, Artificial Sequence
  Description of Artificial Sequence: Synthetic oligonucleotide
ucauuucaccgccgguguc

SEQ ID NO: 2467473 - RNA, 19 nt, Artificial Sequence
  Description of Artificial Sequence: Synthetic oligonucleotide
uccuuuucaugcagagauu

SEQ ID NO: 2467474 - RNA, 19 nt, Artificial Sequence
  Description of Artificial Sequence: Synthetic oligonucleotide
uaauuacguucacuuccuu

SEQ ID NO: 2467475 - RNA, 19 nt, Artificial Sequence
  Description of Artificial Sequence: Synthetic oligonucleotide
uggccuggccuguucuaag

SEQ ID NO: 2467476 - RNA, 19 nt, Artificial Sequence
  Description of Artificial Sequence: Synthetic oligonucleotide
cuugaccugccuucuucuc

SEQ ID NO: 2467477 - RNA, 19 nt, Artificial Sequence
  Description of Artificial Sequence: Synthetic oligonucleotide
ugcuagugggaugcucugc

SEQ ID NO: 2467478 - RNA, 19 nt, Artificial Sequence
  Description of Artificial Sequence: Synthetic oligonucleotide
cuggcucauucucaagauc

SEQ ID NO: 2467479 - RNA, 19 nt, Artificial Sequence
  Description of Artificial Sequence: Synthetic oligonucleotide
guggagacuguugaccuuc

SEQ ID NO: 2467480 - RNA, 19 nt, Artificial Sequence
  Description of Artificial Sequence: Synthetic oligonucleotide
ccuucuauaagguuuuaua

SEQ ID NO: 2467481 - RNA, 19 nt, Artificial Sequence
  Description of Artificial Sequence: Synthetic oligonucleotide
uucuaagaaugugccuuuc

SEQ ID NO: 2467482 - RNA, 19 nt, Artificial Sequence
  Description of Artificial Sequence: Synthetic oligonucleotide
ccaguagucaagagaauga

SEQ ID NO: 2467483 - RNA, 19 nt, Artificial Sequence
  Description of Artificial Sequence: Synthetic oligonucleotide
ccuuauuugaguucucaaa

SEQ ID NO: 2467484 - RNA, 19 nt, Artificial Sequence
  Description of Artificial Sequence: Synthetic oligonucleotide
gacuuguacuggacggcug

SEQ ID NO: 2467485 - RNA, 19 nt, Artificial Sequence
  Description of Artificial Sequence: Synthetic oligonucleotide
cugguagaguggguaugcg

SEQ ID NO: 2467486 - RNA, 19 nt, Artificial Sequence
  Description of Artificial Sequence: Synthetic oligonucleotide
ugcuuuugcccaagccaau

SEQ ID NO: 2467487 - RNA, 19 nt, Artificial Sequence
  Description of Artificial Sequence: Synthetic oligonucleotide
auccuggguaguauugucu

SEQ ID NO: 2467488 - RNA, 19 nt, Artificial Sequence
  Description of Artificial Sequence: Synthetic oligonucleotide
ugcguucuugaugaucuuu

SEQ ID NO: 2467489 - RNA, 19 nt, Artificial Sequence
  Description of Artificial Sequence: Synthetic oligonucleotide
cacugaggcguugugucug

SEQ ID NO: 2467490 - RNA, 19 nt, Artificial Sequence
  Description of Artificial Sequence: Synthetic oligonucleotide
ccugucuuugagucuuugc

SEQ ID NO: 2467491 - RNA, 19 nt, Artificial Sequence
  Description of Artificial Sequence: Synthetic oligonucleotide
augugccuuucuauuuguc

SEQ ID NO: 2467492 - RNA, 19 nt, Artificial Sequence
  Description of Artificial Sequence: Synthetic oligonucleotide
cugccuccagguuuugcuc

SEQ ID NO: 2467493 - RNA, 19 nt, Artificial Sequence
  Description of Artificial Sequence: Synthetic oligonucleotide
uucaccgccggugucuuuu

SEQ ID NO: 2467494 - RNA, 19 nt, Artificial Sequence
  Description of Artificial Sequence: Synthetic oligonucleotide
gugcuagugggaugcucug

SEQ ID NO: 2467495 - RNA, 19 nt, Artificial Sequence
  Description of Artificial Sequence: Synthetic oligonucleotide
guacuggacggcugguaga

SEQ ID NO: 2467496 - RNA, 19 nt, Artificial Sequence
  Description of Artificial Sequence: Synthetic oligonucleotide
ugggaugcucugcguuucu

SEQ ID NO: 2467497 - RNA, 19 nt, Artificial Sequence
  Description of Artificial Sequence: Synthetic oligonucleotide
gauccugucuuugagucuu

SEQ ID NO: 2467498 - RNA, 19 nt, Artificial Sequence
  Description of Artificial Sequence: Synthetic oligonucleotide
cugcagagugcuuugcucu

SEQ ID NO: 2467499 - RNA, 19 nt, Artificial Sequence
  Description of Artificial Sequence: Synthetic oligonucleotide
ugguggaaucuggcucugg

SEQ ID NO: 2467500 - RNA, 19 nt, Artificial Sequence
  Description of Artificial Sequence: Synthetic oligonucleotide
caagauccugucuuugagu

SEQ ID NO: 2467501 - RNA, 19 nt, Artificial Sequence
  Description of Artificial Sequence: Synthetic oligonucleotide
caccaccaagacucaggag

SEQ ID NO: 2467502 - RNA, 19 nt, Artificial Sequence
  Description of Artificial Sequence: Synthetic oligonucleotide
gaaguucccucccucgaau

SEQ ID NO: 2467503 - RNA, 19 nt, Artificial Sequence
  Description of Artificial Sequence: Synthetic oligonucleotide
gcucuagaaguucccuccc

SEQ ID NO: 2467504 - RNA, 19 nt, Artificial Sequence
  Description of Artificial Sequence: Synthetic oligonucleotide
cguugugucugccuccagg

SEQ ID NO: 2467505 - RNA, 19 nt, Artificial Sequence
  Description of Artificial Sequence: Synthetic oligonucleotide
guacaccaccaagacucag

SEQ ID NO: 2467506 - RNA, 19 nt, Artificial Sequence
  Description of Artificial Sequence: Synthetic oligonucleotide
ggugguggaaucuggcucu

SEQ ID NO: 2467507 - RNA, 19 nt, Artificial Sequence
  Description of Artificial Sequence: Synthetic oligonucleotide
cuuuugcccaagccaaucu

SEQ ID NO: 2467508 - RNA, 19 nt, Artificial Sequence
  Description of Artificial Sequence: Synthetic oligonucleotide
ggacggcugguagaguggg

SEQ ID NO: 2467509 - RNA, 19 nt, Artificial Sequence
  Description of Artificial Sequence: Synthetic oligonucleotide
uuguacuggacggcuggua

SEQ ID NO: 2467510 - RNA, 19 nt, Artificial Sequence
  Description of Artificial Sequence: Synthetic oligonucleotide
ucuggccuggccuguucua

SEQ ID NO: 2467511 - RNA, 19 nt, Artificial Sequence
  Description of Artificial Sequence: Synthetic oligonucleotide
uugucucacugaggcguug

SEQ ID NO: 2467512 - RNA, 19 nt, Artificial Sequence
  Description of Artificial Sequence: Synthetic oligonucleotide
accaagacucaggagccuu

SEQ ID NO: 2467513 - RNA, 19 nt, Artificial Sequence
  Description of Artificial Sequence: Synthetic oligonucleotide
acggcugguagagugggua

SEQ ID NO: 2467514 - RNA, 19 nt, Artificial Sequence
  Description of Artificial Sequence: Synthetic oligonucleotide
guucuaagaaugugccuuu

SEQ ID NO: 2467515 - RNA, 19 nt, Artificial Sequence
  Description of Artificial Sequence: Synthetic oligonucleotide
cucucucguguuuccucuc

SEQ ID NO: 2467516 - RNA, 19 nt, Artificial Sequence
  Description of Artificial Sequence: Synthetic oligonucleotide
augcgacaacccuuuccaa

SEQ ID NO: 2467517 - RNA, 19 nt, Artificial Sequence
  Description of Artificial Sequence: Synthetic oligonucleotide
uggcgaaauccuggguagu

SEQ ID NO: 2467518 - RNA, 19 nt, Artificial Sequence
  Description of Artificial Sequence: Synthetic oligonucleotide
cuguucuaagaaugugccu

SEQ ID NO: 2467519 - RNA, 19 nt, Artificial Sequence
  Description of Artificial Sequence: Synthetic oligonucleotide
ucugugcuagugggaugcu

SEQ ID NO: 2467520 - RNA, 19 nt, Artificial Sequence
  Description of Artificial Sequence: Synthetic oligonucleotide
gcuguaguauguacaccac

SEQ ID NO: 2467521 - RNA, 19 nt, Artificial Sequence
  Description of Artificial Sequence: Synthetic oligonucleotide
aucaugcguucuugaugau

SEQ ID NO: 2467522 - RNA, 19 nt, Artificial Sequence
  Description of Artificial Sequence: Synthetic oligonucleotide
caaacuccuuucucucucu

SEQ ID NO: 2467523 - RNA, 19 nt, Artificial Sequence
  Description of Artificial Sequence: Synthetic oligonucleotide
cugugcuagugggaugcuc

SEQ ID NO: 2467524 - RNA, 19 nt, Artificial Sequence
  Description of Artificial Sequence: Synthetic oligonucleotide
cauuucaccgccggugucu

SEQ ID NO: 2467525 - RNA, 19 nt, Artificial Sequence
  Description of Artificial Sequence: Synthetic oligonucleotide
cuuuucaugcagagauuuu

SEQ ID NO: 2467526 - RNA, 19 nt, Artificial Sequence
  Description of Artificial Sequence: Synthetic oligonucleotide
cccucccucgaaucaugcg

SEQ ID NO: 2467527 - RNA, 19 nt, Artificial Sequence
  Description of Artificial Sequence: Synthetic oligonucleotide
gcagagugcuuugcucucc

SEQ ID NO: 2467528 - RNA, 19 nt, Artificial Sequence
  Description of Artificial Sequence: Synthetic oligonucleotide
ccgacuuguacuggacggc

SEQ ID NO: 2467529 - RNA, 19 nt, Artificial Sequence
  Description of Artificial Sequence: Synthetic oligonucleotide
cugaggcguugugucugcc

SEQ ID NO: 2467530 - RNA, 19 nt, Artificial Sequence
  Description of Artificial Sequence: Synthetic oligonucleotide
cugcuuuugcaagccagua

SEQ ID NO: 2467531 - RNA, 19 nt, Artificial Sequence
  Description of Artificial Sequence: Synthetic oligonucleotide
gguaugcgacaacccuuuc

SEQ ID NO: 2467532 - RNA, 19 nt, Artificial Sequence
  Description of Artificial Sequence: Synthetic oligonucleotide
cucccucgaaucaugcguu

SEQ ID NO: 2467533 - RNA, 19 nt, Artificial Sequence
  Description of Artificial Sequence: Synthetic oligonucleotide
agccaguagucaagagaau

SEQ ID NO: 2467534 - RNA, 19 nt, Artificial Sequence
  Description of Artificial Sequence: Synthetic oligonucleotide
ccucccucgaaucaugcgu

SEQ ID NO: 2467535 - RNA, 19 nt, Artificial Sequence
  Description of Artificial Sequence: Synthetic oligonucleotide
gaaucuggcucuggcucau

SEQ ID NO: 2467536 - RNA, 19 nt, Artificial Sequence
  Description of Artificial Sequence: Synthetic oligonucleotide
ggcgaaauccuggguagua

SEQ ID NO: 2467537 - RNA, 19 nt, Artificial Sequence
  Description of Artificial Sequence: Synthetic oligonucleotide
cuggccuggccuguucuaa

SEQ ID NO: 2467538 - RNA, 19 nt, Artificial Sequence
  Description of Artificial Sequence: Synthetic oligonucleotide
ggcguugugucugccucca

SEQ ID NO: 2467539 - RNA, 19 nt, Artificial Sequence
  Description of Artificial Sequence: Synthetic oligonucleotide
cucucaggugguggaaucu

SEQ ID NO: 2467540 - RNA, 19 nt, Artificial Sequence
  Description of Artificial Sequence: Synthetic oligonucleotide
guucccucccucgaaucau

SEQ ID NO: 2467541 - RNA, 19 nt, Artificial Sequence
  Description of Artificial Sequence: Synthetic oligonucleotide
gccuggccuguucuaagaa

SEQ ID NO: 2467542 - RNA, 19 nt, Artificial Sequence
  Description of Artificial Sequence: Synthetic oligonucleotide
ccuuuucaugcagagauuu

SEQ ID NO: 2467543 - RNA, 19 nt, Artificial Sequence
  Description of Artificial Sequence: Synthetic oligonucleotide
cuuguacuggacggcuggu

SEQ ID NO: 2467544 - RNA, 19 nt, Artificial Sequence
  Description of Artificial Sequence: Synthetic oligonucleotide
cugaaauccuagggccucu

SEQ ID NO: 2467545 - RNA, 19 nt, Artificial Sequence
  Description of Artificial Sequence: Synthetic oligonucleotide
gcgccucucagguggugga

SEQ ID NO: 2467546 - RNA, 19 nt, Artificial Sequence
  Description of Artificial Sequence: Synthetic oligonucleotide
ccuugaccugccuucuucu

SEQ ID NO: 2467547 - RNA, 19 nt, Artificial Sequence
  Description of Artificial Sequence: Synthetic oligonucleotide
ugcucuccgcuuggcuauu

SEQ ID NO: 2467548 - RNA, 19 nt, Artificial Sequence
  Description of Artificial Sequence: Synthetic oligonucleotide
ggguaugcgacaacccuuu

SEQ ID NO: 2467549 - RNA, 19 nt, Artificial Sequence
  Description of Artificial Sequence: Synthetic oligonucleotide
gcguugugucugccuccag

SEQ ID NO: 2467550 - RNA, 19 nt, Artificial Sequence
  Description of Artificial Sequence: Synthetic oligonucleotide
gcguuucuggcgaaauccu

SEQ ID NO: 2467551 - RNA, 19 nt, Artificial Sequence
  Description of Artificial Sequence: Synthetic oligonucleotide
caggagccuuuucucuagu

SEQ ID NO: 2467552 - RNA, 19 nt, Artificial Sequence
  Description of Artificial Sequence: Synthetic oligonucleotide
cgaaucaugcguucuugau

SEQ ID NO: 2467553 - RNA, 19 nt, Artificial Sequence
  Description of Artificial Sequence: Synthetic oligonucleotide
cugcgccucucagguggug

SEQ ID NO: 2467554 - RNA, 19 nt, Artificial Sequence
  Description of Artificial Sequence: Synthetic oligonucleotide
gcgaaauccuggguaguau

SEQ ID NO: 2467555 - RNA, 19 nt, Artificial Sequence
  Description of Artificial Sequence: Synthetic oligonucleotide
ccuggccuguucuaagaau

SEQ ID NO: 2467556 - RNA, 19 nt, Artificial Sequence
  Description of Artificial Sequence: Synthetic oligonucleotide
caccaagacucaggagccu

SEQ ID NO: 2467557 - RNA, 19 nt, Artificial Sequence
  Description of Artificial Sequence: Synthetic oligonucleotide
cucuccgcuuggcuauuuu

SEQ ID NO: 2467558 - RNA, 19 nt, Artificial Sequence
  Description of Artificial Sequence: Synthetic oligonucleotide
ccucgaaucaugcguucuu

SEQ ID NO: 2467559 - RNA, 19 nt, Artificial Sequence
  Description of Artificial Sequence: Synthetic oligonucleotide
gcucugcguuucuggcgaa

SEQ ID NO: 2467560 - RNA, 19 nt, Artificial Sequence
  Description of Artificial Sequence: Synthetic oligonucleotide
ccaagacucaggagccuuu

SEQ ID NO: 2467561 - RNA, 19 nt, Artificial Sequence
  Description of Artificial Sequence: Synthetic oligonucleotide
cgacaacccuuuccaaacu

SEQ ID NO: 2467562 - RNA, 19 nt, Artificial Sequence
  Description of Artificial Sequence: Synthetic oligonucleotide
cgacuuguacuggacggcu

SEQ ID NO: 2467563 - RNA, 19 nt, Artificial Sequence
  Description of Artificial Sequence: Synthetic oligonucleotide
cccucgaaucaugcguucu

SEQ ID NO: 2467564 - RNA, 19 nt, Artificial Sequence
  Description of Artificial Sequence: Synthetic oligonucleotide
cggcugguagaguggguau

SEQ ID NO: 2467565 - RNA, 19 nt, Artificial Sequence
  Description of Artificial Sequence: Synthetic oligonucleotide
gcucuccgcuuggcuauuu

SEQ ID NO: 2467566 - RNA, 19 nt, Artificial Sequence
  Description of Artificial Sequence: Synthetic oligonucleotide
aaucuugaggggcugaucc

SEQ ID NO: 2467567 - RNA, 19 nt, Artificial Sequence
  Description of Artificial Sequence: Synthetic oligonucleotide
aaagucaaaucccacaaug

SEQ ID NO: 2467568 - RNA, 19 nt, Artificial Sequence
  Description of Artificial Sequence: Synthetic oligonucleotide
uucaauuuccgcaacauac

SEQ ID NO: 2467569 - RNA, 19 nt, Artificial Sequence
  Description of Artificial Sequence: Synthetic oligonucleotide
ugaggggucagucugauag

SEQ ID NO: 2467570 - RNA, 19 nt, Artificial Sequence
  Description of Artificial Sequence: Synthetic oligonucleotide
acaaugagggcagagaugc

SEQ ID NO: 2467571 - RNA, 19 nt, Artificial Sequence
  Description of Artificial Sequence: Synthetic oligonucleotide
gacauuaucguccaaagca

SEQ ID NO: 2467572 - RNA, 19 nt, Artificial Sequence
  Description of Artificial Sequence: Synthetic oligonucleotide
aauguaucgggugauguac

SEQ ID NO: 2467573 - RNA, 19 nt, Artificial Sequence
  Description of Artificial Sequence: Synthetic oligonucleotide
accaagaacaacaaugucc

SEQ ID NO: 2467574 - RNA, 19 nt, Artificial Sequence
  Description of Artificial Sequence: Synthetic oligonucleotide
caugguaugugccugaggg

SEQ ID NO: 2467575 - RNA, 19 nt, Artificial Sequence
  Description of Artificial Sequence: Synthetic oligonucleotide
uaguuugauggucagauca

SEQ ID NO: 2467576 - RNA, 19 nt, Artificial Sequence
  Description of Artificial Sequence: Synthetic oligonucleotide
agaucaucugucucgaugg

SEQ ID NO: 2467577 - RNA, 19 nt, Artificial Sequence
  Description of Artificial Sequence: Synthetic oligonucleotide
gaugacuauccuugcaucg

SEQ ID NO: 2467578 - RNA, 19 nt, Artificial Sequence
  Description of Artificial Sequence: Synthetic oligonucleotide
uuccgcaacauacuucucg

SEQ ID NO: 2467579 - RNA, 19 nt, Artificial Sequence
  Description of Artificial Sequence: Synthetic oligonucleotide
agucaaaucccacaaugag

SEQ ID NO: 2467580 - RNA, 19 nt, Artificial Sequence
  Description of Artificial Sequence: Synthetic oligonucleotide
augacagcaaguucgaugu

SEQ ID NO: 2467581 - RNA, 19 nt, Artificial Sequence
  Description of Artificial Sequence: Synthetic oligonucleotide
auuuccgcaacauacuucu

SEQ ID NO: 2467582 - RNA, 19 nt, Artificial Sequence
  Description of Artificial Sequence: Synthetic oligonucleotide
aauucacgcaccgacuugg

SEQ ID NO: 2467583 - RNA, 19 nt, Artificial Sequence
  Description of Artificial Sequence: Synthetic oligonucleotide
cuuuccucgaacaccaacc

SEQ ID NO: 2467584 - RNA, 19 nt, Artificial Sequence
  Description of Artificial Sequence: Synthetic oligonucleotide
cauugcucuguguauagcg

SEQ ID NO: 2467585 - RNA, 19 nt, Artificial Sequence
  Description of Artificial Sequence: Synthetic oligonucleotide
uuuagaaucuugaggggcu

SEQ ID NO: 2467586 - RNA, 19 nt, Artificial Sequence
  Description of Artificial Sequence: Synthetic oligonucleotide
ucgaacaccaaccgcagug

SEQ ID NO: 2467587 - RNA, 19 nt, Artificial Sequence
  Description of Artificial Sequence: Synthetic oligonucleotide
auggcauuggccuuccagg

SEQ ID NO: 2467588 - RNA, 19 nt, Artificial Sequence
  Description of Artificial Sequence: Synthetic oligonucleotide
uauggcauuggccuuccag

SEQ ID NO: 2467589 - RNA, 19 nt, Artificial Sequence
  Description of Artificial Sequence: Synthetic oligonucleotide
aguggagcccuucuugacc

SEQ ID NO: 2467590 - RNA, 19 nt, Artificial Sequence
  Description of Artificial Sequence: Synthetic oligonucleotide
aauguccuuuccucgaaca

SEQ ID NO: 2467591 - RNA, 19 nt, Artificial Sequence
  Description of Artificial Sequence: Synthetic oligonucleotide
ucaggguuuagaaucuuga

SEQ ID NO: 2467592 - RNA, 19 nt, Artificial Sequence
  Description of Artificial Sequence: Synthetic oligonucleotide
cuugcaucggcagugaggc

SEQ ID NO: 2467593 - RNA, 19 nt, Artificial Sequence
  Description of Artificial Sequence: Synthetic oligonucleotide
acaccaaccgcaguggagc

SEQ ID NO: 2467594 - RNA, 19 nt, Artificial Sequence
  Description of Artificial Sequence: Synthetic oligonucleotide
aauuuccgcaacauacuuc

SEQ ID NO: 2467595 - RNA, 19 nt, Artificial Sequence
  Description of Artificial Sequence: Synthetic oligonucleotide
gucaaaucccacaaugagg

SEQ ID NO: 2467596 - RNA, 19 nt, Artificial Sequence
  Description of Artificial Sequence: Synthetic oligonucleotide
agacuggcaauguaucggg

SEQ ID NO: 2467597 - RNA, 19 nt, Artificial Sequence
  Description of Artificial Sequence: Synthetic oligonucleotide
uucuugaccgccuccugcg

SEQ ID NO: 2467598 - RNA, 19 nt, Artificial Sequence
  Description of Artificial Sequence: Synthetic oligonucleotide
auagcgcugcuucagacug

SEQ ID NO: 2467599 - RNA, 19 nt, Artificial Sequence
  Description of Artificial Sequence: Synthetic oligonucleotide
acauuaucguccaaagcac

SEQ ID NO: 2467600 - RNA, 19 nt, Artificial Sequence
  Description of Artificial Sequence: Synthetic oligonucleotide
agucugauagagucugggg

SEQ ID NO: 2467601 - RNA, 19 nt, Artificial Sequence
  Description of Artificial Sequence: Synthetic oligonucleotide
uacuccacuuggaagaggu

SEQ ID NO: 2467602 - RNA, 19 nt, Artificial Sequence
  Description of Artificial Sequence: Synthetic oligonucleotide
ggugauguacuccacagug

SEQ ID NO: 2467603 - RNA, 19 nt, Artificial Sequence
  Description of Artificial Sequence: Synthetic oligonucleotide
uccaggaauucacgcaccg

SEQ ID NO: 2467604 - RNA, 19 nt, Artificial Sequence
  Description of Artificial Sequence: Synthetic oligonucleotide
ucacgcaccgacuuggcgc

SEQ ID NO: 2467605 - RNA, 19 nt, Artificial Sequence
  Description of Artificial Sequence: Synthetic oligonucleotide
aaugagggcagagaugcca

SEQ ID NO: 2467606 - RNA, 19 nt, Artificial Sequence
  Description of Artificial Sequence: Synthetic oligonucleotide
acuaguuugauggucagau

SEQ ID NO: 2467607 - RNA, 19 nt, Artificial Sequence
  Description of Artificial Sequence: Synthetic oligonucleotide
aaagcacagaucuuccgua

SEQ ID NO: 2467608 - RNA, 19 nt, Artificial Sequence
  Description of Artificial Sequence: Synthetic oligonucleotide
auugcucuguguauagcgc

SEQ ID NO: 2467609 - RNA, 19 nt, Artificial Sequence
  Description of Artificial Sequence: Synthetic oligonucleotide
aauggccugcgcccauugc

SEQ ID NO: 2467610 - RNA, 19 nt, Artificial Sequence
  Description of Artificial Sequence: Synthetic oligonucleotide
cucgauggcgucaucagug

SEQ ID NO: 2467611 - RNA, 19 nt, Artificial Sequence
  Description of Artificial Sequence: Synthetic oligonucleotide
cagacauuaucguccaaag

SEQ ID NO: 2467612 - RNA, 19 nt, Artificial Sequence
  Description of Artificial Sequence: Synthetic oligonucleotide
ugaucccgccucaugacag

SEQ ID NO: 2467613 - RNA, 19 nt, Artificial Sequence
  Description of Artificial Sequence: Synthetic oligonucleotide
ucuugaggggcugaucccg

SEQ ID NO: 2467614 - RNA, 19 nt, Artificial Sequence
  Description of Artificial Sequence: Synthetic oligonucleotide
uaucguccaaagcacagau

SEQ ID NO: 2467615 - RNA, 19 nt, Artificial Sequence
  Description of Artificial Sequence: Synthetic oligonucleotide
gauggcgucaucaguguag

SEQ ID NO: 2467616 - RNA, 19 nt, Artificial Sequence
  Description of Artificial Sequence: Synthetic oligonucleotide
caggaauucacgcaccgac

SEQ ID NO: 2467617 - RNA, 19 nt, Artificial Sequence
  Description of Artificial Sequence: Synthetic oligonucleotide
ugccuugaucacuaguuug

SEQ ID NO: 2467618 - RNA, 19 nt, Artificial Sequence
  Description of Artificial Sequence: Synthetic oligonucleotide
ggcgagaagacggugaugg

SEQ ID NO: 2467619 - RNA, 19 nt, Artificial Sequence
  Description of Artificial Sequence: Synthetic oligonucleotide
agugacgggguccuccacg

SEQ ID NO: 2467620 - RNA, 19 nt, Artificial Sequence
  Description of Artificial Sequence: Synthetic oligonucleotide
acuauccuugcaucggcag

SEQ ID NO: 2467621 - RNA, 19 nt, Artificial Sequence
  Description of Artificial Sequence: Synthetic oligonucleotide
ugacuauccuugcaucggc

SEQ ID NO: 2467622 - RNA, 19 nt, Artificial Sequence
  Description of Artificial Sequence: Synthetic oligonucleotide
cuguguauagcgcugcuuc

SEQ ID NO: 2467623 - RNA, 19 nt, Artificial Sequence
  Description of Artificial Sequence: Synthetic oligonucleotide
aagucaaaucccacaauga

SEQ ID NO: 2467624 - RNA, 19 nt, Artificial Sequence
  Description of Artificial Sequence: Synthetic oligonucleotide
uguccuuuccucgaacacc

SEQ ID NO: 2467625 - RNA, 19 nt, Artificial Sequence
  Description of Artificial Sequence: Synthetic oligonucleotide
augacuauccuugcaucgg

SEQ ID NO: 2467626 - RNA, 19 nt, Artificial Sequence
  Description of Artificial Sequence: Synthetic oligonucleotide
uauccuugcaucggcagug

SEQ ID NO: 2467627 - RNA, 19 nt, Artificial Sequence
  Description of Artificial Sequence: Synthetic oligonucleotide
uccgcaacauacuucucga

SEQ ID NO: 2467628 - RNA, 19 nt, Artificial Sequence
  Description of Artificial Sequence: Synthetic oligonucleotide
ugccaaauggccugcgccc

SEQ ID NO: 2467629 - RNA, 19 nt, Artificial Sequence
  Description of Artificial Sequence: Synthetic oligonucleotide
uucacgcaccgacuuggcg

SEQ ID NO: 2467630 - RNA, 19 nt, Artificial Sequence
  Description of Artificial Sequence: Synthetic oligonucleotide
auuaucguccaaagcacag

SEQ ID NO: 2467631 - RNA, 19 nt, Artificial Sequence
  Description of Artificial Sequence: Synthetic oligonucleotide
uuucaauuuccgcaacaua

SEQ ID NO: 2467632 - RNA, 19 nt, Artificial Sequence
  Description of Artificial Sequence: Synthetic oligonucleotide
ugguaugugccugaggggu

SEQ ID NO: 2467633 - RNA, 19 nt, Artificial Sequence
  Description of Artificial Sequence: Synthetic oligonucleotide
gaagcugcucuacccaaug

SEQ ID NO: 2467634 - RNA, 19 nt, Artificial Sequence
  Description of Artificial Sequence: Synthetic oligonucleotide
agcucaucccggcggacgc

SEQ ID NO: 2467635 - RNA, 19 nt, Artificial Sequence
  Description of Artificial Sequence: Synthetic oligonucleotide
ugaugacuauccuugcauc

SEQ ID NO: 2467636 - RNA, 19 nt, Artificial Sequence
  Description of Artificial Sequence: Synthetic oligonucleotide
cagacuggcaauguaucgg

SEQ ID NO: 2467637 - RNA, 19 nt, Artificial Sequence
  Description of Artificial Sequence: Synthetic oligonucleotide
gaagagguggccgucgggc

SEQ ID NO: 2467638 - RNA, 19 nt, Artificial Sequence
  Description of Artificial Sequence: Synthetic oligonucleotide
augguaugugccugagggg

SEQ ID NO: 2467639 - RNA, 19 nt, Artificial Sequence
  Description of Artificial Sequence: Synthetic oligonucleotide
cuugaucacuaguuugaug

SEQ ID NO: 2467640 - RNA, 19 nt, Artificial Sequence
  Description of Artificial Sequence: Synthetic oligonucleotide
uguguauagcgcugcuuca

SEQ ID NO: 2467641 - RNA, 19 nt, Artificial Sequence
  Description of Artificial Sequence: Synthetic oligonucleotide
gguuuagaaucuugagggg

SEQ ID NO: 2467642 - RNA, 19 nt, Artificial Sequence
  Description of Artificial Sequence: Synthetic oligonucleotide
ugcaucggcagugaggccu

SEQ ID NO: 2467643 - RNA, 19 nt, Artificial Sequence
  Description of Artificial Sequence: Synthetic oligonucleotide
ucacuaguuugauggucag

SEQ ID NO: 2467644 - RNA, 19 nt, Artificial Sequence
  Description of Artificial Sequence: Synthetic oligonucleotide
gaauucacgcaccgacuug

SEQ ID NO: 2467645 - RNA, 19 nt, Artificial Sequence
  Description of Artificial Sequence: Synthetic oligonucleotide
gauguacuccacagugacg

SEQ ID NO: 2467646 - RNA, 19 nt, Artificial Sequence
  Description of Artificial Sequence: Synthetic oligonucleotide
uggcauuggccuuccaggc

SEQ ID NO: 2467647 - RNA, 19 nt, Artificial Sequence
  Description of Artificial Sequence: Synthetic oligonucleotide
aucacuaguuugaugguca

SEQ ID NO: 2467648 - RNA, 19 nt, Artificial Sequence
  Description of Artificial Sequence: Synthetic oligonucleotide
aacaccaaccgcaguggag

SEQ ID NO: 2467649 - RNA, 19 nt, Artificial Sequence
  Description of Artificial Sequence: Synthetic oligonucleotide
uuccguacuguucuuucau

SEQ ID NO: 2467650 - RNA, 19 nt, Artificial Sequence
  Description of Artificial Sequence: Synthetic oligonucleotide
gaccacuuccagaagugcc

SEQ ID NO: 2467651 - RNA, 19 nt, Artificial Sequence
  Description of Artificial Sequence: Synthetic oligonucleotide
gggucagucugauagaguc

SEQ ID NO: 2467652 - RNA, 19 nt, Artificial Sequence
  Description of Artificial Sequence: Synthetic oligonucleotide
uuaucguccaaagcacaga

SEQ ID NO: 2467653 - RNA, 19 nt, Artificial Sequence
  Description of Artificial Sequence: Synthetic oligonucleotide
gaugccaaauggccugcgc

SEQ ID NO: 2467654 - RNA, 19 nt, Artificial Sequence
  Description of Artificial Sequence: Synthetic oligonucleotide
ugaucacuaguuugauggu

SEQ ID NO: 2467655 - RNA, 19 nt, Artificial Sequence
  Description of Artificial Sequence: Synthetic oligonucleotide
uuccucgaacaccaaccgc

SEQ ID NO: 2467656 - RNA, 19 nt, Artificial Sequence
  Description of Artificial Sequence: Synthetic oligonucleotide
ugucucgauggcgucauca

SEQ ID NO: 2467657 - RNA, 19 nt, Artificial Sequence
  Description of Artificial Sequence: Synthetic oligonucleotide
gauggucagaucaucuguc

SEQ ID NO: 2467658 - RNA, 19 nt, Artificial Sequence
  Description of Artificial Sequence: Synthetic oligonucleotide
acccaaugcucacuucauc

SEQ ID NO: 2467659 - RNA, 19 nt, Artificial Sequence
  Description of Artificial Sequence: Synthetic oligonucleotide
gaucacuaguuugaugguc

SEQ ID NO: 2467660 - RNA, 19 nt, Artificial Sequence
  Description of Artificial Sequence: Synthetic oligonucleotide
uuagaaucuugaggggcug

SEQ ID NO: 2467661 - RNA, 19 nt, Artificial Sequence
  Description of Artificial Sequence: Synthetic oligonucleotide
uguaucgggugauguacuc

SEQ ID NO: 2467662 - RNA, 19 nt, Artificial Sequence
  Description of Artificial Sequence: Synthetic oligonucleotide
cagucugauagagucuggg

SEQ ID NO: 2467663 - RNA, 19 nt, Artificial Sequence
  Description of Artificial Sequence: Synthetic oligonucleotide
agaagacggugauggcgcg

SEQ ID NO: 2467664 - RNA, 19 nt, Artificial Sequence
  Description of Artificial Sequence: Synthetic oligonucleotide
gugacgggguccuccacgg

SEQ ID NO: 2467665 - RNA, 19 nt, Artificial Sequence
  Description of Artificial Sequence: Synthetic oligonucleotide
gacggugauggcgcggucg

SEQ ID NO: 2467666 - RNA, 19 nt, Artificial Sequence
  Description of Artificial Sequence: Synthetic oligonucleotide
gagccgguggcucuggcac

SEQ ID NO: 2467667 - RNA, 19 nt, Artificial Sequence
  Description of Artificial Sequence: Synthetic oligonucleotide
ucgggcgagaagacgguga

SEQ ID NO: 2467668 - RNA, 19 nt, Artificial Sequence
  Description of Artificial Sequence: Synthetic oligonucleotide
cuugaccgccuccugcgcg

SEQ ID NO: 2467669 - RNA, 19 nt, Artificial Sequence
  Description of Artificial Sequence: Synthetic oligonucleotide
aagacggugauggcgcggu

SEQ ID NO: 2467670 - RNA, 19 nt, Artificial Sequence
  Description of Artificial Sequence: Synthetic oligonucleotide
cauuaucguccaaagcaca

SEQ ID NO: 2467671 - RNA, 19 nt, Artificial Sequence
  Description of Artificial Sequence: Synthetic oligonucleotide
cugcaaaggccaugcagac

SEQ ID NO: 2467672 - RNA, 19 nt, Artificial Sequence
  Description of Artificial Sequence: Synthetic oligonucleotide
ugcucuacccaaugcucac

SEQ ID NO: 2467673 - RNA, 19 nt, Artificial Sequence
  Description of Artificial Sequence: Synthetic oligonucleotide
cugcgcguacuccacuugg

SEQ ID NO: 2467674 - RNA, 19 nt, Artificial Sequence
  Description of Artificial Sequence: Synthetic oligonucleotide
cacgcaccgacuuggcgcc

SEQ ID NO: 2467675 - RNA, 19 nt, Artificial Sequence
  Description of Artificial Sequence: Synthetic oligonucleotide
aggggucagucugauagag

SEQ ID NO: 2467676 - RNA, 19 nt, Artificial Sequence
  Description of Artificial Sequence: Synthetic oligonucleotide
agcacagaucuuccguacu

SEQ ID NO: 2467677 - RNA, 19 nt, Artificial Sequence
  Description of Artificial Sequence: Synthetic oligonucleotide
gccaucaaagucaaauccc

SEQ ID NO: 2467678 - RNA, 19 nt, Artificial Sequence
  Description of Artificial Sequence: Synthetic oligonucleotide
cuaguuugauggucagauc

SEQ ID NO: 2467679 - RNA, 19 nt, Artificial Sequence
  Description of Artificial Sequence: Synthetic oligonucleotide
uagcucaucccggcggacg

SEQ ID NO: 2467680 - RNA, 19 nt, Artificial Sequence
  Description of Artificial Sequence: Synthetic oligonucleotide
uggccgucgggcgagaaga

SEQ ID NO: 2467681 - RNA, 19 nt, Artificial Sequence
  Description of Artificial Sequence: Synthetic oligonucleotide
guguauagcgcugcuucag

SEQ ID NO: 2467682 - RNA, 19 nt, Artificial Sequence
  Description of Artificial Sequence: Synthetic oligonucleotide
cuggcaauguaucggguga

SEQ ID NO: 2467683 - RNA, 19 nt, Artificial Sequence
  Description of Artificial Sequence: Synthetic oligonucleotide
gcggucguagcucaucccg

SEQ ID NO: 2467684 - RNA, 19 nt, Artificial Sequence
  Description of Artificial Sequence: Synthetic oligonucleotide
uacccaaugcucacuucau

SEQ ID NO: 2467685 - RNA, 19 nt, Artificial Sequence
  Description of Artificial Sequence: Synthetic oligonucleotide
ucuugaccgccuccugcgc

SEQ ID NO: 2467686 - RNA, 19 nt, Artificial Sequence
  Description of Artificial Sequence: Synthetic oligonucleotide
aucuuguagcuuggccacc

SEQ ID NO: 2467687 - RNA, 19 nt, Artificial Sequence
  Description of Artificial Sequence: Synthetic oligonucleotide
gaagugccuugaucacuag

SEQ ID NO: 2467688 - RNA, 19 nt, Artificial Sequence
  Description of Artificial Sequence: Synthetic oligonucleotide
uugccaccugacuggacca

SEQ ID NO: 2467689 - RNA, 19 nt, Artificial Sequence
  Description of Artificial Sequence: Synthetic oligonucleotide
uccguacuguucuuucauc

SEQ ID NO: 2467690 - RNA, 19 nt, Artificial Sequence
  Description of Artificial Sequence: Synthetic oligonucleotide
gaagacggugauggcgcgg

SEQ ID NO: 2467691 - RNA, 19 nt, Artificial Sequence
  Description of Artificial Sequence: Synthetic oligonucleotide
guaucgggugauguacucc

SEQ ID NO: 2467692 - RNA, 19 nt, Artificial Sequence
  Description of Artificial Sequence: Synthetic oligonucleotide
gcguacuccacuuggaaga

SEQ ID NO: 2467693 - RNA, 19 nt, Artificial Sequence
  Description of Artificial Sequence: Synthetic oligonucleotide
gaucccgccucaugacagc

SEQ ID NO: 2467694 - RNA, 19 nt, Artificial Sequence
  Description of Artificial Sequence: Synthetic oligonucleotide
ucggcagugaggccugcaa

SEQ ID NO: 2467695 - RNA, 19 nt, Artificial Sequence
  Description of Artificial Sequence: Synthetic oligonucleotide
cucaugacagcaaguucga

SEQ ID NO: 2467696 - RNA, 19 nt, Artificial Sequence
  Description of Artificial Sequence: Synthetic oligonucleotide
caauguccuuuccucgaac

SEQ ID NO: 2467697 - RNA, 19 nt, Artificial Sequence
  Description of Artificial Sequence: Synthetic oligonucleotide
auuggccuuccaggcaugg

SEQ ID NO: 2467698 - RNA, 19 nt, Artificial Sequence
  Description of Artificial Sequence: Synthetic oligonucleotide
gccugcaaaggccaugcag

SEQ ID NO: 2467699 - RNA, 19 nt, Artificial Sequence
  Description of Artificial Sequence: Synthetic oligonucleotide
agaagugccuugaucacua

SEQ ID NO: 2467700 - RNA, 19 nt, Artificial Sequence
  Description of Artificial Sequence: Synthetic oligonucleotide
uuggcgccccggccuaugg

SEQ ID NO: 2467701 - RNA, 19 nt, Artificial Sequence
  Description of Artificial Sequence: Synthetic oligonucleotide
ucuacccaaugcucacuuc

SEQ ID NO: 2467702 - RNA, 19 nt, Artificial Sequence
  Description of Artificial Sequence: Synthetic oligonucleotide
auucacgcaccgacuuggc

SEQ ID NO: 2467703 - RNA, 19 nt, Artificial Sequence
  Description of Artificial Sequence: Synthetic oligonucleotide
ggcgucaucaguguaguuc

SEQ ID NO: 2467704 - RNA, 19 nt, Artificial Sequence
  Description of Artificial Sequence: Synthetic oligonucleotide
cugcucuacccaaugcuca

SEQ ID NO: 2467705 - RNA, 19 nt, Artificial Sequence
  Description of Artificial Sequence: Synthetic oligonucleotide
aguuugauggucagaucau

SEQ ID NO: 2467706 - RNA, 19 nt, Artificial Sequence
  Description of Artificial Sequence: Synthetic oligonucleotide
uagaaucuugaggggcuga

SEQ ID NO: 2467707 - RNA, 19 nt, Artificial Sequence
  Description of Artificial Sequence: Synthetic oligonucleotide
caaagcacagaucuuccgu

SEQ ID NO: 2467708 - RNA, 19 nt, Artificial Sequence
  Description of Artificial Sequence: Synthetic oligonucleotide
gcacagaucuuccguacug

SEQ ID NO: 2467709 - RNA, 19 nt, Artificial Sequence
  Description of Artificial Sequence: Synthetic oligonucleotide
uugaccgccuccugcgcgu

SEQ ID NO: 2467710 - RNA, 19 nt, Artificial Sequence
  Description of Artificial Sequence: Synthetic oligonucleotide
uggccugcgcccauugcuc

SEQ ID NO: 2467711 - RNA, 19 nt, Artificial Sequence
  Description of Artificial Sequence: Synthetic oligonucleotide
ucugucucgauggcgucau

SEQ ID NO: 2467712 - RNA, 19 nt, Artificial Sequence
  Description of Artificial Sequence: Synthetic oligonucleotide
gagaugccaaauggccugc

SEQ ID NO: 2467713 - RNA, 19 nt, Artificial Sequence
  Description of Artificial Sequence: Synthetic oligonucleotide
cuuccguacuguucuuuca

SEQ ID NO: 2467714 - RNA, 19 nt, Artificial Sequence
  Description of Artificial Sequence: Synthetic oligonucleotide
ccgucgggcgagaagacgg

SEQ ID NO: 2467715 - RNA, 19 nt, Artificial Sequence
  Description of Artificial Sequence: Synthetic oligonucleotide
acggugauggcgcggucgu

SEQ ID NO: 2467716 - RNA, 19 nt, Artificial Sequence
  Description of Artificial Sequence: Synthetic oligonucleotide
aggaauucacgcaccgacu

SEQ ID NO: 2467717 - RNA, 19 nt, Artificial Sequence
  Description of Artificial Sequence: Synthetic oligonucleotide
ugcuucagacuggcaaugu

SEQ ID NO: 2467718 - RNA, 19 nt, Artificial Sequence
  Description of Artificial Sequence: Synthetic oligonucleotide
auggcgucaucaguguagu

SEQ ID NO: 2467719 - RNA, 19 nt, Artificial Sequence
  Description of Artificial Sequence: Synthetic oligonucleotide
guaguucuucuccaggaau

SEQ ID NO: 2467720 - RNA, 19 nt, Artificial Sequence
  Description of Artificial Sequence: Synthetic oligonucleotide
caauguaucgggugaugua

SEQ ID NO: 2467721 - RNA, 19 nt, Artificial Sequence
  Description of Artificial Sequence: Synthetic oligonucleotide
caguggagcccuucuugac

SEQ ID NO: 2467722 - RNA, 19 nt, Artificial Sequence
  Description of Artificial Sequence: Synthetic oligonucleotide
ucuguguauagcgcugcuu

SEQ ID NO: 2467723 - RNA, 19 nt, Artificial Sequence
  Description of Artificial Sequence: Synthetic oligonucleotide
aaccgcaguggagcccuuc

SEQ ID NO: 2467724 - RNA, 19 nt, Artificial Sequence
  Description of Artificial Sequence: Synthetic oligonucleotide
agaaucuugaggggcugau

SEQ ID NO: 2467725 - RNA, 19 nt, Artificial Sequence
  Description of Artificial Sequence: Synthetic oligonucleotide
ucgauuucuucaggguuua

SEQ ID NO: 2467726 - RNA, 19 nt, Artificial Sequence
  Description of Artificial Sequence: Synthetic oligonucleotide
acagcaaguucgauguuuu

SEQ ID NO: 2467727 - RNA, 19 nt, Artificial Sequence
  Description of Artificial Sequence: Synthetic oligonucleotide
agaugccaaauggccugcg

SEQ ID NO: 2467728 - RNA, 19 nt, Artificial Sequence
  Description of Artificial Sequence: Synthetic oligonucleotide
auggcgcggucguagcuca

SEQ ID NO: 2467729 - RNA, 19 nt, Artificial Sequence
  Description of Artificial Sequence: Synthetic oligonucleotide
cgagaagacggugauggcg

SEQ ID NO: 2467730 - RNA, 19 nt, Artificial Sequence
  Description of Artificial Sequence: Synthetic oligonucleotide
gacgcgcgagcuagggccg

SEQ ID NO: 2467731 - RNA, 19 nt, Artificial Sequence
  Description of Artificial Sequence: Synthetic oligonucleotide
guacuccacuuggaagagg

SEQ ID NO: 2467732 - RNA, 19 nt, Artificial Sequence
  Description of Artificial Sequence: Synthetic oligonucleotide
ggucguagcucaucccggc

SEQ ID NO: 2467733 - RNA, 19 nt, Artificial Sequence
  Description of Artificial Sequence: Synthetic oligonucleotide
ggcugaucccgccucauga

SEQ ID NO: 2467734 - RNA, 19 nt, Artificial Sequence
  Description of Artificial Sequence: Synthetic oligonucleotide
uuuccgcaacauacuucuc

SEQ ID NO: 2467735 - RNA, 19 nt, Artificial Sequence
  Description of Artificial Sequence: Synthetic oligonucleotide
gacuauccuugcaucggca

SEQ ID NO: 2467736 - RNA, 19 nt, Artificial Sequence
  Description of Artificial Sequence: Synthetic oligonucleotide
gcaacauacuucucgauuu

SEQ ID NO: 2467737 - RNA, 19 nt, Artificial Sequence
  Description of Artificial Sequence: Synthetic oligonucleotide
auguaucgggugauguacu

SEQ ID NO: 2467738 - RNA, 19 nt, Artificial Sequence
  Description of Artificial Sequence: Synthetic oligonucleotide
gaggggcugaucccgccuc

SEQ ID NO: 2467739 - RNA, 19 nt, Artificial Sequence
  Description of Artificial Sequence: Synthetic oligonucleotide
guccuccacggugagccgg

SEQ ID NO: 2467740 - RNA, 19 nt, Artificial Sequence
  Description of Artificial Sequence: Synthetic oligonucleotide
gcucuggcacuccacccgg

SEQ ID NO: 2467741 - RNA, 19 nt, Artificial Sequence
  Description of Artificial Sequence: Synthetic oligonucleotide
cuuggaagagguggccguc

SEQ ID NO: 2467742 - RNA, 19 nt, Artificial Sequence
  Description of Artificial Sequence: Synthetic oligonucleotide
cugaucccgccucaugaca

SEQ ID NO: 2467743 - RNA, 19 nt, Artificial Sequence
  Description of Artificial Sequence: Synthetic oligonucleotide
aucgggugauguacuccac

SEQ ID NO: 2467744 - RNA, 19 nt, Artificial Sequence
  Description of Artificial Sequence: Synthetic oligonucleotide
gcaugguaugugccugagg

SEQ ID NO: 2467745 - RNA, 19 nt, Artificial Sequence
  Description of Artificial Sequence: Synthetic oligonucleotide
gagguggccgucgggcgag

SEQ ID NO: 2467746 - RNA, 19 nt, Artificial Sequence
  Description of Artificial Sequence: Synthetic oligonucleotide
gacagcaaguucgauguuu

SEQ ID NO: 2467747 - RNA, 19 nt, Artificial Sequence
  Description of Artificial Sequence: Synthetic oligonucleotide
uaugugccugaggggucag

SEQ ID NO: 2467748 - RNA, 19 nt, Artificial Sequence
  Description of Artificial Sequence: Synthetic oligonucleotide
uccugcgcguacuccacuu

SEQ ID NO: 2467749 - RNA, 19 nt, Artificial Sequence
  Description of Artificial Sequence: Synthetic oligonucleotide
ccagaagugccuugaucac

SEQ ID NO: 2467750 - RNA, 19 nt, Artificial Sequence
  Description of Artificial Sequence: Synthetic oligonucleotide
gccuugaucacuaguuuga

SEQ ID NO: 2467751 - RNA, 19 nt, Artificial Sequence
  Description of Artificial Sequence: Synthetic oligonucleotide
cucaucccggcggacgcgc

SEQ ID NO: 2467752 - RNA, 19 nt, Artificial Sequence
  Description of Artificial Sequence: Synthetic oligonucleotide
ccuuuccucgaacaccaac

SEQ ID NO: 2467753 - RNA, 19 nt, Artificial Sequence
  Description of Artificial Sequence: Synthetic oligonucleotide
uggcaauguaucgggugau

SEQ ID NO: 2467754 - RNA, 19 nt, Artificial Sequence
  Description of Artificial Sequence: Synthetic oligonucleotide
cuggaccacuuccagaagu

SEQ ID NO: 2467755 - RNA, 19 nt, Artificial Sequence
  Description of Artificial Sequence: Synthetic oligonucleotide
ggcucuguugaugacuauc

SEQ ID NO: 2467756 - RNA, 19 nt, Artificial Sequence
  Description of Artificial Sequence: Synthetic oligonucleotide
acggugagccgguggcucu

SEQ ID NO: 2467757 - RNA, 19 nt, Artificial Sequence
  Description of Artificial Sequence: Synthetic oligonucleotide
ugcagacauuaucguccaa

SEQ ID NO: 2467758 - RNA, 19 nt, Artificial Sequence
  Description of Artificial Sequence: Synthetic oligonucleotide
guggccgucgggcgagaag

SEQ ID NO: 2467759 - RNA, 19 nt, Artificial Sequence
  Description of Artificial Sequence: Synthetic oligonucleotide
ucaugacagcaaguucgau

SEQ ID NO: 2467760 - RNA, 19 nt, Artificial Sequence
  Description of Artificial Sequence: Synthetic oligonucleotide
uugcaucggcagugaggcc

SEQ ID NO: 2467761 - RNA, 19 nt, Artificial Sequence
  Description of Artificial Sequence: Synthetic oligonucleotide
ccggccuauggcauuggcc

SEQ ID NO: 2467762 - RNA, 19 nt, Artificial Sequence
  Description of Artificial Sequence: Synthetic oligonucleotide
agacggugauggcgcgguc

SEQ ID NO: 2467763 - RNA, 19 nt, Artificial Sequence
  Description of Artificial Sequence: Synthetic oligonucleotide
gcgucaucaguguaguucu

SEQ ID NO: 2467764 - RNA, 19 nt, Artificial Sequence
  Description of Artificial Sequence: Synthetic oligonucleotide
ugacagcaaguucgauguu

SEQ ID NO: 2467765 - RNA, 19 nt, Artificial Sequence
  Description of Artificial Sequence: Synthetic oligonucleotide
uggcgccccggccuauggc

SEQ ID NO: 2467766 - RNA, 19 nt, Artificial Sequence
  Description of Artificial Sequence: Synthetic oligonucleotide
ggaccacuuccagaagugc

SEQ ID NO: 2467767 - RNA, 19 nt, Artificial Sequence
  Description of Artificial Sequence: Synthetic oligonucleotide
caauuuccgcaacauacuu

SEQ ID NO: 2467768 - RNA, 19 nt, Artificial Sequence
  Description of Artificial Sequence: Synthetic oligonucleotide
gcugcucuacccaaugcuc

SEQ ID NO: 2467769 - RNA, 19 nt, Artificial Sequence
  Description of Artificial Sequence: Synthetic oligonucleotide
cuauccuugcaucggcagu

SEQ ID NO: 2467770 - RNA, 19 nt, Artificial Sequence
  Description of Artificial Sequence: Synthetic oligonucleotide
ucccgccucaugacagcaa

SEQ ID NO: 2467771 - RNA, 19 nt, Artificial Sequence
  Description of Artificial Sequence: Synthetic oligonucleotide
cuccacccgggcucuguug

SEQ ID NO: 2467772 - RNA, 19 nt, Artificial Sequence
  Description of Artificial Sequence: Synthetic oligonucleotide
ugcgcccauugcucugugu

SEQ ID NO: 2467773 - RNA, 19 nt, Artificial Sequence
  Description of Artificial Sequence: Synthetic oligonucleotide
uccuuuccucgaacaccaa

SEQ ID NO: 2467774 - RNA, 19 nt, Artificial Sequence
  Description of Artificial Sequence: Synthetic oligonucleotide
uagcuuggccaccgauuuu

SEQ ID NO: 2467775 - RNA, 19 nt, Artificial Sequence
  Description of Artificial Sequence: Synthetic oligonucleotide
cccgccucaugacagcaag

SEQ ID NO: 2467776 - RNA, 19 nt, Artificial Sequence
  Description of Artificial Sequence: Synthetic oligonucleotide
ggcaauguaucgggugaug

SEQ ID NO: 2467777 - RNA, 19 nt, Artificial Sequence
  Description of Artificial Sequence: Synthetic oligonucleotide
ggaauucacgcaccgacuu

SEQ ID NO: 2467778 - RNA, 19 nt, Artificial Sequence
  Description of Artificial Sequence: Synthetic oligonucleotide
gccucaugacagcaaguuc

SEQ ID NO: 2467779 - RNA, 19 nt, Artificial Sequence
  Description of Artificial Sequence: Synthetic oligonucleotide
cacggugagccgguggcuc

SEQ ID NO: 2467780 - RNA, 19 nt, Artificial Sequence
  Description of Artificial Sequence: Synthetic oligonucleotide
aucccgccucaugacagca

SEQ ID NO: 2467781 - RNA, 19 nt, Artificial Sequence
  Description of Artificial Sequence: Synthetic oligonucleotide
ugccaccugacuggaccac

SEQ ID NO: 2467782 - RNA, 19 nt, Artificial Sequence
  Description of Artificial Sequence: Synthetic oligonucleotide
gcgcggucguagcucaucc

SEQ ID NO: 2467783 - RNA, 19 nt, Artificial Sequence
  Description of Artificial Sequence: Synthetic oligonucleotide
cacuaguuugauggucaga

SEQ ID NO: 2467784 - RNA, 19 nt, Artificial Sequence
  Description of Artificial Sequence: Synthetic oligonucleotide
agccgguggcucuggcacu

SEQ ID NO: 2467785 - RNA, 19 nt, Artificial Sequence
  Description of Artificial Sequence: Synthetic oligonucleotide
cuuguagcuuggccaccga

SEQ ID NO: 2467786 - RNA, 19 nt, Artificial Sequence
  Description of Artificial Sequence: Synthetic oligonucleotide
ggagcccuucuugaccgcc

SEQ ID NO: 2467787 - RNA, 19 nt, Artificial Sequence
  Description of Artificial Sequence: Synthetic oligonucleotide
gucgggcgagaagacggug

SEQ ID NO: 2467788 - RNA, 19 nt, Artificial Sequence
  Description of Artificial Sequence: Synthetic oligonucleotide
cgcaguggagcccuucuug

SEQ ID NO: 2467789 - RNA, 19 nt, Artificial Sequence
  Description of Artificial Sequence: Synthetic oligonucleotide
gcgagaagacggugauggc

SEQ ID NO: 2467790 - RNA, 19 nt, Artificial Sequence
  Description of Artificial Sequence: Synthetic oligonucleotide
cacccgggcucuguugaug

SEQ ID NO: 2467791 - RNA, 19 nt, Artificial Sequence
  Description of Artificial Sequence: Synthetic oligonucleotide
gccuccugcgcguacucca

SEQ ID NO: 2467792 - RNA, 19 nt, Artificial Sequence
  Description of Artificial Sequence: Synthetic oligonucleotide
gguaugugccugagggguc

SEQ ID NO: 2467793 - RNA, 19 nt, Artificial Sequence
  Description of Artificial Sequence: Synthetic oligonucleotide
gugagccgguggcucuggc

SEQ ID NO: 2467794 - RNA, 19 nt, Artificial Sequence
  Description of Artificial Sequence: Synthetic oligonucleotide
acgcgcgagcuagggccgc

SEQ ID NO: 2467795 - RNA, 19 nt, Artificial Sequence
  Description of Artificial Sequence: Synthetic oligonucleotide
gcgcccauugcucugugua

SEQ ID NO: 2467796 - RNA, 19 nt, Artificial Sequence
  Description of Artificial Sequence: Synthetic oligonucleotide
gacuuggcgccccggccua

SEQ ID NO: 2467797 - RNA, 19 nt, Artificial Sequence
  Description of Artificial Sequence: Synthetic oligonucleotide
gcauuggccuuccaggcau

SEQ ID NO: 2467798 - RNA, 19 nt, Artificial Sequence
  Description of Artificial Sequence: Synthetic oligonucleotide
guagcucaucccggcggac

SEQ ID NO: 2467799 - RNA, 19 nt, Artificial Sequence
  Description of Artificial Sequence: Synthetic oligonucleotide
gccgucgggcgagaagacg

SEQ ID NO: 2467800 - RNA, 19 nt, Artificial Sequence
  Description of Artificial Sequence: Synthetic oligonucleotide
cagugacgggguccuccac

SEQ ID NO: 2467801 - RNA, 19 nt, Artificial Sequence
  Description of Artificial Sequence: Synthetic oligonucleotide
ccguacuguucuuucaucu

SEQ ID NO: 2467802 - RNA, 19 nt, Artificial Sequence
  Description of Artificial Sequence: Synthetic oligonucleotide
ucccggcggacgcgcgagc

SEQ ID NO: 2467803 - RNA, 19 nt, Artificial Sequence
  Description of Artificial Sequence: Synthetic oligonucleotide
ccgacuuggcgccccggcc

SEQ ID NO: 2467804 - RNA, 19 nt, Artificial Sequence
  Description of Artificial Sequence: Synthetic oligonucleotide
gggcugaucccgccucaug

SEQ ID NO: 2467805 - RNA, 19 nt, Artificial Sequence
  Description of Artificial Sequence: Synthetic oligonucleotide
ccuauggcauuggccuucc

SEQ ID NO: 2467806 - RNA, 19 nt, Artificial Sequence
  Description of Artificial Sequence: Synthetic oligonucleotide
uggcgucaucaguguaguu

SEQ ID NO: 2467807 - RNA, 19 nt, Artificial Sequence
  Description of Artificial Sequence: Synthetic oligonucleotide
gccuauggcauuggccuuc

SEQ ID NO: 2467808 - RNA, 19 nt, Artificial Sequence
  Description of Artificial Sequence: Synthetic oligonucleotide
cuuggcgccccggccuaug

SEQ ID NO: 2467809 - RNA, 19 nt, Artificial Sequence
  Description of Artificial Sequence: Synthetic oligonucleotide
acgcaccgacuuggcgccc

SEQ ID NO: 2467810 - RNA, 19 nt, Artificial Sequence
  Description of Artificial Sequence: Synthetic oligonucleotide
gcggacgcgcgagcuaggg

SEQ ID NO: 2467811 - RNA, 19 nt, Artificial Sequence
  Description of Artificial Sequence: Synthetic oligonucleotide
gaccgccuccugcgcguac

SEQ ID NO: 2467812 - RNA, 19 nt, Artificial Sequence
  Description of Artificial Sequence: Synthetic oligonucleotide
cggccuauggcauuggccu

SEQ ID NO: 2467813 - RNA, 19 nt, Artificial Sequence
  Description of Artificial Sequence: Synthetic oligonucleotide
ccugcgcguacuccacuug

SEQ ID NO: 2467814 - RNA, 19 nt, Artificial Sequence
  Description of Artificial Sequence: Synthetic oligonucleotide
gcgcguacuccacuuggaa

SEQ ID NO: 2467815 - RNA, 19 nt, Artificial Sequence
  Description of Artificial Sequence: Synthetic oligonucleotide
gcaucggcagugaggccug

SEQ ID NO: 2467816 - RNA, 19 nt, Artificial Sequence
  Description of Artificial Sequence: Synthetic oligonucleotide
gcaccgacuuggcgccccg

SEQ ID NO: 2467817 - RNA, 19 nt, Artificial Sequence
  Description of Artificial Sequence: Synthetic oligonucleotide
cucuguguauagcgcugcu

SEQ ID NO: 2467818 - RNA, 19 nt, Artificial Sequence
  Description of Artificial Sequence: Synthetic oligonucleotide
cugcgcccauugcucugug

SEQ ID NO: 2467819 - RNA, 19 nt, Artificial Sequence
  Description of Artificial Sequence: Synthetic oligonucleotide
gcucaucccggcggacgcg

SEQ ID NO: 2467820 - RNA, 19 nt, Artificial Sequence
  Description of Artificial Sequence: Synthetic oligonucleotide
ggucagucugauagagucu

SEQ ID NO: 2467821 - RNA, 19 nt, Artificial Sequence
  Description of Artificial Sequence: Synthetic oligonucleotide
cucgaacaccaaccgcagu

SEQ ID NO: 2467822 - RNA, 19 nt, Artificial Sequence
  Description of Artificial Sequence: Synthetic oligonucleotide
caucggcagugaggccugc

SEQ ID NO: 2467823 - RNA, 19 nt, Artificial Sequence
  Description of Artificial Sequence: Synthetic oligonucleotide
gccugcgcccauugcucug

SEQ ID NO: 2467824 - RNA, 19 nt, Artificial Sequence
  Description of Artificial Sequence: Synthetic oligonucleotide
cuauggcauuggccuucca

SEQ ID NO: 2467825 - RNA, 19 nt, Artificial Sequence
  Description of Artificial Sequence: Synthetic oligonucleotide
caagaacaacaauguccuu

SEQ ID NO: 2467826 - RNA, 19 nt, Artificial Sequence
  Description of Artificial Sequence: Synthetic oligonucleotide
gggcgagaagacggugaug

SEQ ID NO: 2467827 - RNA, 19 nt, Artificial Sequence
  Description of Artificial Sequence: Synthetic oligonucleotide
cccggccuauggcauuggc

SEQ ID NO: 2467828 - RNA, 19 nt, Artificial Sequence
  Description of Artificial Sequence: Synthetic oligonucleotide
gcccauugcucuguguaua

SEQ ID NO: 2467829 - RNA, 19 nt, Artificial Sequence
  Description of Artificial Sequence: Synthetic oligonucleotide
cugaggggucagucugaua

SEQ ID NO: 2467830 - RNA, 19 nt, Artificial Sequence
  Description of Artificial Sequence: Synthetic oligonucleotide
uggcgcggucguagcucau

SEQ ID NO: 2467831 - RNA, 19 nt, Artificial Sequence
  Description of Artificial Sequence: Synthetic oligonucleotide
ugaccgccuccugcgcgua

SEQ ID NO: 2467832 - RNA, 19 nt, Artificial Sequence
  Description of Artificial Sequence: Synthetic oligonucleotide
cgcggucguagcucauccc

SEQ ID NO: 2467833 - RNA, 19 nt, Artificial Sequence
  Description of Artificial Sequence: Synthetic oligonucleotide
cguagcucaucccggcgga

SEQ ID NO: 2467834 - RNA, 19 nt, Artificial Sequence
  Description of Artificial Sequence: Synthetic oligonucleotide
ggcgcggucguagcucauc

SEQ ID NO: 2467835 - RNA, 19 nt, Artificial Sequence
  Description of Artificial Sequence: Synthetic oligonucleotide
ccaggaauucacgcaccga

SEQ ID NO: 2467836 - RNA, 19 nt, Artificial Sequence
  Description of Artificial Sequence: Synthetic oligonucleotide
gccccggccuauggcauug

SEQ ID NO: 2467837 - RNA, 19 nt, Artificial Sequence
  Description of Artificial Sequence: Synthetic oligonucleotide
gcgcgagcuagggccgccg

SEQ ID NO: 2467838 - RNA, 19 nt, Artificial Sequence
  Description of Artificial Sequence: Synthetic oligonucleotide
ggcggacgcgcgagcuagg

SEQ ID NO: 2467839 - RNA, 19 nt, Artificial Sequence
  Description of Artificial Sequence: Synthetic oligonucleotide
cgggcucuguugaugacua

SEQ ID NO: 2467840 - RNA, 19 nt, Artificial Sequence
  Description of Artificial Sequence: Synthetic oligonucleotide
cgcaacauacuucucgauu

SEQ ID NO: 2467841 - RNA, 19 nt, Artificial Sequence
  Description of Artificial Sequence: Synthetic oligonucleotide
ggaagcugcucuacccaau

SEQ ID NO: 2467842 - RNA, 19 nt, Artificial Sequence
  Description of Artificial Sequence: Synthetic oligonucleotide
gccgguggcucuggcacuc

SEQ ID NO: 2467843 - RNA, 19 nt, Artificial Sequence
  Description of Artificial Sequence: Synthetic oligonucleotide
cggcggacgcgcgagcuag

SEQ ID NO: 2467844 - RNA, 19 nt, Artificial Sequence
  Description of Artificial Sequence: Synthetic oligonucleotide
acuuggcgccccggccuau

SEQ ID NO: 2467845 - RNA, 19 nt, Artificial Sequence
  Description of Artificial Sequence: Synthetic oligonucleotide
ccaaccgcaguggagcccu

SEQ ID NO: 2467846 - RNA, 19 nt, Artificial Sequence
  Description of Artificial Sequence: Synthetic oligonucleotide
cccgggcucuguugaugac

SEQ ID NO: 2467847 - RNA, 19 nt, Artificial Sequence
  Description of Artificial Sequence: Synthetic oligonucleotide
cuccugcgcguacuccacu

SEQ ID NO: 2467848 - RNA, 19 nt, Artificial Sequence
  Description of Artificial Sequence: Synthetic oligonucleotide
ggccugcgcccauugcucu

SEQ ID NO: 2467849 - RNA, 19 nt, Artificial Sequence
  Description of Artificial Sequence: Synthetic oligonucleotide
ggggucagucugauagagu

SEQ ID NO: 2467850 - RNA, 19 nt, Artificial Sequence
  Description of Artificial Sequence: Synthetic oligonucleotide
gcucuacccaaugcucacu

SEQ ID NO: 2467851 - RNA, 19 nt, Artificial Sequence
  Description of Artificial Sequence: Synthetic oligonucleotide
ggccgucgggcgagaagac

SEQ ID NO: 2467852 - RNA, 19 nt, Artificial Sequence
  Description of Artificial Sequence: Synthetic oligonucleotide
cguacuguucuuucaucuu

SEQ ID NO: 2467853 - RNA, 19 nt, Artificial Sequence
  Description of Artificial Sequence: Synthetic oligonucleotide
caaauggccugcgcccauu

SEQ ID NO: 2467854 - RNA, 19 nt, Artificial Sequence
  Description of Artificial Sequence: Synthetic oligonucleotide
ggccuauggcauuggccuu

SEQ ID NO: 2467855 - RNA, 19 nt, Artificial Sequence
  Description of Artificial Sequence: Synthetic oligonucleotide
agguggccgucgggcgaga

SEQ ID NO: 2467856 - RNA, 19 nt, Artificial Sequence
  Description of Artificial Sequence: Synthetic oligonucleotide
ccgggcucuguugaugacu

SEQ ID NO: 2467857 - RNA, 19 nt, Artificial Sequence
  Description of Artificial Sequence: Synthetic oligonucleotide
ccgccuccugcgcguacuc

SEQ ID NO: 2467858 - RNA, 19 nt, Artificial Sequence
  Description of Artificial Sequence: Synthetic oligonucleotide
cgacuuggcgccccggccu

SEQ ID NO: 2467859 - RNA, 19 nt, Artificial Sequence
  Description of Artificial Sequence: Synthetic oligonucleotide
ccccggccuauggcauugg

SEQ ID NO: 2467860 - RNA, 19 nt, Artificial Sequence
  Description of Artificial Sequence: Synthetic oligonucleotide
ccaccugacuggaccacuu

SEQ ID NO: 2467861 - RNA, 19 nt, Artificial Sequence
  Description of Artificial Sequence: Synthetic oligonucleotide
ccgcaacauacuucucgau

SEQ ID NO: 2467862 - RNA, 19 nt, Artificial Sequence
  Description of Artificial Sequence: Synthetic oligonucleotide
cgauggcgucaucagugua

SEQ ID NO: 2467863 - RNA, 19 nt, Artificial Sequence
  Description of Artificial Sequence: Synthetic oligonucleotide
gguggccgucgggcgagaa

SEQ ID NO: 2467864 - RNA, 19 nt, Artificial Sequence
  Description of Artificial Sequence: Synthetic oligonucleotide
ccgccucaugacagcaagu

SEQ ID NO: 2467865 - RNA, 19 nt, Artificial Sequence
  Description of Artificial Sequence: Synthetic oligonucleotide
gggcucuguugaugacuau

SEQ ID NO: 2467866 - RNA, 19 nt, Artificial Sequence
  Description of Artificial Sequence: Synthetic oligonucleotide
cgccucaugacagcaaguu

SEQ ID NO: 2467867 - RNA, 19 nt, Artificial Sequence
  Description of Artificial Sequence: Synthetic oligonucleotide
cggugagccgguggcucug

SEQ ID NO: 2467868 - RNA, 19 nt, Artificial Sequence
  Description of Artificial Sequence: Synthetic oligonucleotide
ccaaauggccugcgcccau

SEQ ID NO: 2467869 - RNA, 19 nt, Artificial Sequence
  Description of Artificial Sequence: Synthetic oligonucleotide
cguccaaagcacagaucuu

SEQ ID NO: 2467870 - RNA, 19 nt, Artificial Sequence
  Description of Artificial Sequence: Synthetic oligonucleotide
cgcgcgagcuagggccgcc

SEQ ID NO: 2467871 - RNA, 19 nt, Artificial Sequence
  Description of Artificial Sequence: Synthetic oligonucleotide
cgggcgagaagacggugau

SEQ ID NO: 2467872 - RNA, 19 nt, Artificial Sequence
  Description of Artificial Sequence: Synthetic oligonucleotide
gggugccaucaaagucaaa

SEQ ID NO: 2467873 - RNA, 19 nt, Artificial Sequence
  Description of Artificial Sequence: Synthetic oligonucleotide
cgucgggcgagaagacggu

SEQ ID NO: 2467874 - RNA, 19 nt, Artificial Sequence
  Description of Artificial Sequence: Synthetic oligonucleotide
ggggcugaucccgccucau

SEQ ID NO: 2467875 - RNA, 19 nt, Artificial Sequence
  Description of Artificial Sequence: Synthetic oligonucleotide
gcgcugcuucagacuggca

SEQ ID NO: 2467876 - RNA, 19 nt, Artificial Sequence
  Description of Artificial Sequence: Synthetic oligonucleotide
caaccgcaguggagcccuu

SEQ ID NO: 2467877 - RNA, 19 nt, Artificial Sequence
  Description of Artificial Sequence: Synthetic oligonucleotide
ccggcggacgcgcgagcua

SEQ ID NO: 2467878 - RNA, 19 nt, Artificial Sequence
  Description of Artificial Sequence: Synthetic oligonucleotide
ccacggugagccgguggcu

SEQ ID NO: 2467879 - RNA, 19 nt, Artificial Sequence
  Description of Artificial Sequence: Synthetic oligonucleotide
ccgcaguggagcccuucuu

SEQ ID NO: 2467880 - RNA, 19 nt, Artificial Sequence
  Description of Artificial Sequence: Synthetic oligonucleotide
ccacccgggcucuguugau

SEQ ID NO: 2467881 - RNA, 19 nt, Artificial Sequence
  Description of Artificial Sequence: Synthetic oligonucleotide
cccggcggacgcgcgagcu

SEQ ID NO: 2467882 - RNA, 19 nt, Artificial Sequence
  Description of Artificial Sequence: Synthetic oligonucleotide
gcgccccggccuauggcau

SEQ ID NO: 2467883 - RNA, 19 nt, Artificial Sequence
  Description of Artificial Sequence: Synthetic oligonucleotide
cgccccggccuauggcauu

SEQ ID NO: 2467884 - RNA, 19 nt, Artificial Sequence
  Description of Artificial Sequence: Synthetic oligonucleotide
uguauaaauacucacaugc

SEQ ID NO: 2467885 - RNA, 19 nt, Artificial Sequence
  Description of Artificial Sequence: Synthetic oligonucleotide
aaaauggacauucaggagg

SEQ ID NO: 2467886 - RNA, 19 nt, Artificial Sequence
  Description of Artificial Sequence: Synthetic oligonucleotide
uuuuccaucaucaauacca

SEQ ID NO: 2467887 - RNA, 19 nt, Artificial Sequence
  Description of Artificial Sequence: Synthetic oligonucleotide
aauaugguaauuuguacag

SEQ ID NO: 2467888 - RNA, 19 nt, Artificial Sequence
  Description of Artificial Sequence: Synthetic oligonucleotide
auaaauugauccuuguacc

SEQ ID NO: 2467889 - RNA, 19 nt, Artificial Sequence
  Description of Artificial Sequence: Synthetic oligonucleotide
cuuguuauuaaguugacag

SEQ ID NO: 2467890 - RNA, 19 nt, Artificial Sequence
  Description of Artificial Sequence: Synthetic oligonucleotide
auuguagagagccacacgc

SEQ ID NO: 2467891 - RNA, 19 nt, Artificial Sequence
  Description of Artificial Sequence: Synthetic oligonucleotide
aauuuguacagaugagccc

SEQ ID NO: 2467892 - RNA, 19 nt, Artificial Sequence
  Description of Artificial Sequence: Synthetic oligonucleotide
ucugguaauaucuauggag

SEQ ID NO: 2467893 - RNA, 19 nt, Artificial Sequence
  Description of Artificial Sequence: Synthetic oligonucleotide
aauagcuauugauuccacc

SEQ ID NO: 2467894 - RNA, 19 nt, Artificial Sequence
  Description of Artificial Sequence: Synthetic oligonucleotide
uaauuuguacagaugagcc

SEQ ID NO: 2467895 - RNA, 19 nt, Artificial Sequence
  Description of Artificial Sequence: Synthetic oligonucleotide
auaaauacucacaugcucc

SEQ ID NO: 2467896 - RNA, 19 nt, Artificial Sequence
  Description of Artificial Sequence: Synthetic oligonucleotide
ugaaugaaagugaucaacc

SEQ ID NO: 2467897 - RNA, 19 nt, Artificial Sequence
  Description of Artificial Sequence: Synthetic oligonucleotide
ugguaauuuguacagauga

SEQ ID NO: 2467898 - RNA, 19 nt, Artificial Sequence
  Description of Artificial Sequence: Synthetic oligonucleotide
auaccuuucaagcagucac

SEQ ID NO: 2467899 - RNA, 19 nt, Artificial Sequence
  Description of Artificial Sequence: Synthetic oligonucleotide
auuucuguaaccacaaccc

SEQ ID NO: 2467900 - RNA, 19 nt, Artificial Sequence
  Description of Artificial Sequence: Synthetic oligonucleotide
cauaaauugauccuuguac

SEQ ID NO: 2467901 - RNA, 19 nt, Artificial Sequence
  Description of Artificial Sequence: Synthetic oligonucleotide
acaaaauggacauucagga

SEQ ID NO: 2467902 - RNA, 19 nt, Artificial Sequence
  Description of Artificial Sequence: Synthetic oligonucleotide
ucuagauucaguuaugcuc

SEQ ID NO: 2467903 - RNA, 19 nt, Artificial Sequence
  Description of Artificial Sequence: Synthetic oligonucleotide
uguuauuaaguugacaggc

SEQ ID NO: 2467904 - RNA, 19 nt, Artificial Sequence
  Description of Artificial Sequence: Synthetic oligonucleotide
aaagugaucaaccauugua

SEQ ID NO: 2467905 - RNA, 19 nt, Artificial Sequence
  Description of Artificial Sequence: Synthetic oligonucleotide
aauaucuauggagagcuuc

SEQ ID NO: 2467906 - RNA, 19 nt, Artificial Sequence
  Description of Artificial Sequence: Synthetic oligonucleotide
agaugaaugaaagugauca

SEQ ID NO: 2467907 - RNA, 19 nt, Artificial Sequence
  Description of Artificial Sequence: Synthetic oligonucleotide
aggaucaaaaccuuccuuc

SEQ ID NO: 2467908 - RNA, 19 nt, Artificial Sequence
  Description of Artificial Sequence: Synthetic oligonucleotide
uuuacucucagugagguca

SEQ ID NO: 2467909 - RNA, 19 nt, Artificial Sequence
  Description of Artificial Sequence: Synthetic oligonucleotide
acaaccccaaccuuugucc

SEQ ID NO: 2467910 - RNA, 19 nt, Artificial Sequence
  Description of Artificial Sequence: Synthetic oligonucleotide
auacaaggaauugacauac

SEQ ID NO: 2467911 - RNA, 19 nt, Artificial Sequence
  Description of Artificial Sequence: Synthetic oligonucleotide
aaggaauugacauaccuuu

SEQ ID NO: 2467912 - RNA, 19 nt, Artificial Sequence
  Description of Artificial Sequence: Synthetic oligonucleotide
ugguuucauaaauugaucc

SEQ ID NO: 2467913 - RNA, 19 nt, Artificial Sequence
  Description of Artificial Sequence: Synthetic oligonucleotide
uauaaauacucacaugcuc

SEQ ID NO: 2467914 - RNA, 19 nt, Artificial Sequence
  Description of Artificial Sequence: Synthetic oligonucleotide
gaugacagucuucuggugg

SEQ ID NO: 2467915 - RNA, 19 nt, Artificial Sequence
  Description of Artificial Sequence: Synthetic oligonucleotide
ugacauaccuuucaagcag

SEQ ID NO: 2467916 - RNA, 19 nt, Artificial Sequence
  Description of Artificial Sequence: Synthetic oligonucleotide
cauuuuguagcaaugauga

SEQ ID NO: 2467917 - RNA, 19 nt, Artificial Sequence
  Description of Artificial Sequence: Synthetic oligonucleotide
uggaauacaaggaauugac

SEQ ID NO: 2467918 - RNA, 19 nt, Artificial Sequence
  Description of Artificial Sequence: Synthetic oligonucleotide
aaauugauccuuguaccac

SEQ ID NO: 2467919 - RNA, 19 nt, Artificial Sequence
  Description of Artificial Sequence: Synthetic oligonucleotide
guagcaaugaugaaaguag

SEQ ID NO: 2467920 - RNA, 19 nt, Artificial Sequence
  Description of Artificial Sequence: Synthetic oligonucleotide
auagcuauugauuccaccu

SEQ ID NO: 2467921 - RNA, 19 nt, Artificial Sequence
  Description of Artificial Sequence: Synthetic oligonucleotide
uuguuauuaaguugacagg

SEQ ID NO: 2467922 - RNA, 19 nt, Artificial Sequence
  Description of Artificial Sequence: Synthetic oligonucleotide
aauccagacugcuuuuccg

SEQ ID NO: 2467923 - RNA, 19 nt, Artificial Sequence
  Description of Artificial Sequence: Synthetic oligonucleotide
aaugaaagugaucaaccau

SEQ ID NO: 2467924 - RNA, 19 nt, Artificial Sequence
  Description of Artificial Sequence: Synthetic oligonucleotide
aaaagaugaaugaaaguga

SEQ ID NO: 2467925 - RNA, 19 nt, Artificial Sequence
  Description of Artificial Sequence: Synthetic oligonucleotide
accaauagcuauugauucc

SEQ ID NO: 2467926 - RNA, 19 nt, Artificial Sequence
  Description of Artificial Sequence: Synthetic oligonucleotide
aguguauaaauacucacau

SEQ ID NO: 2467927 - RNA, 19 nt, Artificial Sequence
  Description of Artificial Sequence: Synthetic oligonucleotide
augaaugaaagugaucaac

SEQ ID NO: 2467928 - RNA, 19 nt, Artificial Sequence
  Description of Artificial Sequence: Synthetic oligonucleotide
ugauccuuguaccacagac

SEQ ID NO: 2467929 - RNA, 19 nt, Artificial Sequence
  Description of Artificial Sequence: Synthetic oligonucleotide
aagugaucaaccauuguag

SEQ ID NO: 2467930 - RNA, 19 nt, Artificial Sequence
  Description of Artificial Sequence: Synthetic oligonucleotide
aauacaaggaauugacaua

SEQ ID NO: 2467931 - RNA, 19 nt, Artificial Sequence
  Description of Artificial Sequence: Synthetic oligonucleotide
ucuaaaugcaaguccacgu

SEQ ID NO: 2467932 - RNA, 19 nt, Artificial Sequence
  Description of Artificial Sequence: Synthetic oligonucleotide
auuaaguugacaggcuccc

SEQ ID NO: 2467933 - RNA, 19 nt, Artificial Sequence
  Description of Artificial Sequence: Synthetic oligonucleotide
uaugcucucuguaugaaaa

SEQ ID NO: 2467934 - RNA, 19 nt, Artificial Sequence
  Description of Artificial Sequence: Synthetic oligonucleotide
acuuucuagauucaguuau

SEQ ID NO: 2467935 - RNA, 19 nt, Artificial Sequence
  Description of Artificial Sequence: Synthetic oligonucleotide
gucagaaguguauaaauac

SEQ ID NO: 2467936 - RNA, 19 nt, Artificial Sequence
  Description of Artificial Sequence: Synthetic oligonucleotide
uuuacgugcaucuccauau

SEQ ID NO: 2467937 - RNA, 19 nt, Artificial Sequence
  Description of Artificial Sequence: Synthetic oligonucleotide
uccaucaucaauaccaaua

SEQ ID NO: 2467938 - RNA, 19 nt, Artificial Sequence
  Description of Artificial Sequence: Synthetic oligonucleotide
aauugauccuuguaccaca

SEQ ID NO: 2467939 - RNA, 19 nt, Artificial Sequence
  Description of Artificial Sequence: Synthetic oligonucleotide
aaauuucuguaaccacaac

SEQ ID NO: 2467940 - RNA, 19 nt, Artificial Sequence
  Description of Artificial Sequence: Synthetic oligonucleotide
gaucaaccauuguagagag

SEQ ID NO: 2467941 - RNA, 19 nt, Artificial Sequence
  Description of Artificial Sequence: Synthetic oligonucleotide
uggaguuucuaagagacug

SEQ ID NO: 2467942 - RNA, 19 nt, Artificial Sequence
  Description of Artificial Sequence: Synthetic oligonucleotide
uacgugguuucauaaauug

SEQ ID NO: 2467943 - RNA, 19 nt, Artificial Sequence
  Description of Artificial Sequence: Synthetic oligonucleotide
aaccauuguagagagccac

SEQ ID NO: 2467944 - RNA, 19 nt, Artificial Sequence
  Description of Artificial Sequence: Synthetic oligonucleotide
uaugguaauuuguacagau

SEQ ID NO: 2467945 - RNA, 19 nt, Artificial Sequence
  Description of Artificial Sequence: Synthetic oligonucleotide
uaaauugauccuuguacca

SEQ ID NO: 2467946 - RNA, 19 nt, Artificial Sequence
  Description of Artificial Sequence: Synthetic oligonucleotide
auugauuccaccucuuccu

SEQ ID NO: 2467947 - RNA, 19 nt, Artificial Sequence
  Description of Artificial Sequence: Synthetic oligonucleotide
uuauuaaguugacaggcuc

SEQ ID NO: 2467948 - RNA, 19 nt, Artificial Sequence
  Description of Artificial Sequence: Synthetic oligonucleotide
uuuuggaauacaaggaauu

SEQ ID NO: 2467949 - RNA, 19 nt, Artificial Sequence
  Description of Artificial Sequence: Synthetic oligonucleotide
ugaaaguagcaucuggaaa

SEQ ID NO: 2467950 - RNA, 19 nt, Artificial Sequence
  Description of Artificial Sequence: Synthetic oligonucleotide
guaauuuguacagaugagc

SEQ ID NO: 2467951 - RNA, 19 nt, Artificial Sequence
  Description of Artificial Sequence: Synthetic oligonucleotide
cagaugagcccacacaugg

SEQ ID NO: 2467952 - RNA, 19 nt, Artificial Sequence
  Description of Artificial Sequence: Synthetic oligonucleotide
cuuccaugcaucuucaauc

SEQ ID NO: 2467953 - RNA, 19 nt, Artificial Sequence
  Description of Artificial Sequence: Synthetic oligonucleotide
uguggcaauguucugguaa

SEQ ID NO: 2467954 - RNA, 19 nt, Artificial Sequence
  Description of Artificial Sequence: Synthetic oligonucleotide
uguacgugguuucauaaau

SEQ ID NO: 2467955 - RNA, 19 nt, Artificial Sequence
  Description of Artificial Sequence: Synthetic oligonucleotide
caauccaggccuuuguucc

SEQ ID NO: 2467956 - RNA, 19 nt, Artificial Sequence
  Description of Artificial Sequence: Synthetic oligonucleotide
uuuuccgggcuuuucaggc

SEQ ID NO: 2467957 - RNA, 19 nt, Artificial Sequence
  Description of Artificial Sequence: Synthetic oligonucleotide
uucuguaaccacaacccca

SEQ ID NO: 2467958 - RNA, 19 nt, Artificial Sequence
  Description of Artificial Sequence: Synthetic oligonucleotide
uaaguugacaggcucccug

SEQ ID NO: 2467959 - RNA, 19 nt, Artificial Sequence
  Description of Artificial Sequence: Synthetic oligonucleotide
uaccaauagcuauugauuc

SEQ ID NO: 2467960 - RNA, 19 nt, Artificial Sequence
  Description of Artificial Sequence: Synthetic oligonucleotide
auuuguacagaugagccca

SEQ ID NO: 2467961 - RNA, 19 nt, Artificial Sequence
  Description of Artificial Sequence: Synthetic oligonucleotide
aauacucacaugcuccaau

SEQ ID NO: 2467962 - RNA, 19 nt, Artificial Sequence
  Description of Artificial Sequence: Synthetic oligonucleotide
uaaaugcaaguccacgugu

SEQ ID NO: 2467963 - RNA, 19 nt, Artificial Sequence
  Description of Artificial Sequence: Synthetic oligonucleotide
aaguguauaaauacucaca

SEQ ID NO: 2467964 - RNA, 19 nt, Artificial Sequence
  Description of Artificial Sequence: Synthetic oligonucleotide
uuuggaauacaaggaauug

SEQ ID NO: 2467965 - RNA, 19 nt, Artificial Sequence
  Description of Artificial Sequence: Synthetic oligonucleotide
ugguaauaucuauggagag

SEQ ID NO: 2467966 - RNA, 19 nt, Artificial Sequence
  Description of Artificial Sequence: Synthetic oligonucleotide
uguccccaaaagaugaaug

SEQ ID NO: 2467967 - RNA, 19 nt, Artificial Sequence
  Description of Artificial Sequence: Synthetic oligonucleotide
uuucuguaaccacaacccc

SEQ ID NO: 2467968 - RNA, 19 nt, Artificial Sequence
  Description of Artificial Sequence: Synthetic oligonucleotide
caaugaugaaaguagcauc

SEQ ID NO: 2467969 - RNA, 19 nt, Artificial Sequence
  Description of Artificial Sequence: Synthetic oligonucleotide
aaaccuuccuuccaugcau

SEQ ID NO: 2467970 - RNA, 19 nt, Artificial Sequence
  Description of Artificial Sequence: Synthetic oligonucleotide
agagugguugaugacaguc

SEQ ID NO: 2467971 - RNA, 19 nt, Artificial Sequence
  Description of Artificial Sequence: Synthetic oligonucleotide
aaagaugaaugaaagugau

SEQ ID NO: 2467972 - RNA, 19 nt, Artificial Sequence
  Description of Artificial Sequence: Synthetic oligonucleotide
auacucacaugcuccaauc

SEQ ID NO: 2467973 - RNA, 19 nt, Artificial Sequence
  Description of Artificial Sequence: Synthetic oligonucleotide
uguagagagccacacgcac

SEQ ID NO: 2467974 - RNA, 19 nt, Artificial Sequence
  Description of Artificial Sequence: Synthetic oligonucleotide
cucccugaggaucaaaacc

SEQ ID NO: 2467975 - RNA, 19 nt, Artificial Sequence
  Description of Artificial Sequence: Synthetic oligonucleotide
uuucuaagagacuggcgug

SEQ ID NO: 2467976 - RNA, 19 nt, Artificial Sequence
  Description of Artificial Sequence: Synthetic oligonucleotide
gaaugaaagugaucaacca

SEQ ID NO: 2467977 - RNA, 19 nt, Artificial Sequence
  Description of Artificial Sequence: Synthetic oligonucleotide
cauucaggaggacuguacg

SEQ ID NO: 2467978 - RNA, 19 nt, Artificial Sequence
  Description of Artificial Sequence: Synthetic oligonucleotide
uguagcaaugaugaaagua

SEQ ID NO: 2467979 - RNA, 19 nt, Artificial Sequence
  Description of Artificial Sequence: Synthetic oligonucleotide
uuucuagauucaguuaugc

SEQ ID NO: 2467980 - RNA, 19 nt, Artificial Sequence
  Description of Artificial Sequence: Synthetic oligonucleotide
cuaaaugcaaguccacgug

SEQ ID NO: 2467981 - RNA, 19 nt, Artificial Sequence
  Description of Artificial Sequence: Synthetic oligonucleotide
aucaccagagcacuggacu

SEQ ID NO: 2467982 - RNA, 19 nt, Artificial Sequence
  Description of Artificial Sequence: Synthetic oligonucleotide
ucugguggaguuucuaaga

SEQ ID NO: 2467983 - RNA, 19 nt, Artificial Sequence
  Description of Artificial Sequence: Synthetic oligonucleotide
acuucgcucuucuauuuuc

SEQ ID NO: 2467984 - RNA, 19 nt, Artificial Sequence
  Description of Artificial Sequence: Synthetic oligonucleotide
gugaucaaccauuguagag

SEQ ID NO: 2467985 - RNA, 19 nt, Artificial Sequence
  Description of Artificial Sequence: Synthetic oligonucleotide
ucaauaccaauagcuauug

SEQ ID NO: 2467986 - RNA, 19 nt, Artificial Sequence
  Description of Artificial Sequence: Synthetic oligonucleotide
cauacacaucauuuuguag

SEQ ID NO: 2467987 - RNA, 19 nt, Artificial Sequence
  Description of Artificial Sequence: Synthetic oligonucleotide
aucuaaaugcaaguccacg

SEQ ID NO: 2467988 - RNA, 19 nt, Artificial Sequence
  Description of Artificial Sequence: Synthetic oligonucleotide
aucuccauaucuugacuuc

SEQ ID NO: 2467989 - RNA, 19 nt, Artificial Sequence
  Description of Artificial Sequence: Synthetic oligonucleotide
cugguaauaucuauggaga

SEQ ID NO: 2467990 - RNA, 19 nt, Artificial Sequence
  Description of Artificial Sequence: Synthetic oligonucleotide
ucaguuaugcucucuguau

SEQ ID NO: 2467991 - RNA, 19 nt, Artificial Sequence
  Description of Artificial Sequence: Synthetic oligonucleotide
ucuccauaucuugacuucg

SEQ ID NO: 2467992 - RNA, 19 nt, Artificial Sequence
  Description of Artificial Sequence: Synthetic oligonucleotide
guuucuaagagacuggcgu

SEQ ID NO: 2467993 - RNA, 19 nt, Artificial Sequence
  Description of Artificial Sequence: Synthetic oligonucleotide
auccuuguaccacagacaa

SEQ ID NO: 2467994 - RNA, 19 nt, Artificial Sequence
  Description of Artificial Sequence: Synthetic oligonucleotide
aaauggacauucaggagga

SEQ ID NO: 2467995 - RNA, 19 nt, Artificial Sequence
  Description of Artificial Sequence: Synthetic oligonucleotide
augggacagucauagagug

SEQ ID NO: 2467996 - RNA, 19 nt, Artificial Sequence
  Description of Artificial Sequence: Synthetic oligonucleotide
uagagagccacacgcaccu

SEQ ID NO: 2467997 - RNA, 19 nt, Artificial Sequence
  Description of Artificial Sequence: Synthetic oligonucleotide
aagaugaaugaaagugauc

SEQ ID NO: 2467998 - RNA, 19 nt, Artificial Sequence
  Description of Artificial Sequence: Synthetic oligonucleotide
uguacagaugagcccacac

SEQ ID NO: 2467999 - RNA, 19 nt, Artificial Sequence
  Description of Artificial Sequence: Synthetic oligonucleotide
uacucacaugcuccaaucc

SEQ ID NO: 2468000 - RNA, 19 nt, Artificial Sequence
  Description of Artificial Sequence: Synthetic oligonucleotide
uucaguuaugcucucugua

SEQ ID NO: 2468001 - RNA, 19 nt, Artificial Sequence
  Description of Artificial Sequence: Synthetic oligonucleotide
aaguugacaggcucccuga

SEQ ID NO: 2468002 - RNA, 19 nt, Artificial Sequence
  Description of Artificial Sequence: Synthetic oligonucleotide
gucauagagugguugauga

SEQ ID NO: 2468003 - RNA, 19 nt, Artificial Sequence
  Description of Artificial Sequence: Synthetic oligonucleotide
agugaucaaccauuguaga

SEQ ID NO: 2468004 - RNA, 19 nt, Artificial Sequence
  Description of Artificial Sequence: Synthetic oligonucleotide
agcuaauucucuaucacca

SEQ ID NO: 2468005 - RNA, 19 nt, Artificial Sequence
  Description of Artificial Sequence: Synthetic oligonucleotide
acaucuguggcaauguucu

SEQ ID NO: 2468006 - RNA, 19 nt, Artificial Sequence
  Description of Artificial Sequence: Synthetic oligonucleotide
agacaauccagacugcuuu

SEQ ID NO: 2468007 - RNA, 19 nt, Artificial Sequence
  Description of Artificial Sequence: Synthetic oligonucleotide
uaccuuucaagcagucacc

SEQ ID NO: 2468008 - RNA, 19 nt, Artificial Sequence
  Description of Artificial Sequence: Synthetic oligonucleotide
ugcuuuuccgggcuuuuca

SEQ ID NO: 2468009 - RNA, 19 nt, Artificial Sequence
  Description of Artificial Sequence: Synthetic oligonucleotide
uucuagauucaguuaugcu

SEQ ID NO: 2468010 - RNA, 19 nt, Artificial Sequence
  Description of Artificial Sequence: Synthetic oligonucleotide
guaauaucuauggagagcu

SEQ ID NO: 2468011 - RNA, 19 nt, Artificial Sequence
  Description of Artificial Sequence: Synthetic oligonucleotide
acagucauagagugguuga

SEQ ID NO: 2468012 - RNA, 19 nt, Artificial Sequence
  Description of Artificial Sequence: Synthetic oligonucleotide
gaugagcccacacauggga

SEQ ID NO: 2468013 - RNA, 19 nt, Artificial Sequence
  Description of Artificial Sequence: Synthetic oligonucleotide
ucaaaaccuuccuuccaug

SEQ ID NO: 2468014 - RNA, 19 nt, Artificial Sequence
  Description of Artificial Sequence: Synthetic oligonucleotide
aacuuguuauuaaguugac

SEQ ID NO: 2468015 - RNA, 19 nt, Artificial Sequence
  Description of Artificial Sequence: Synthetic oligonucleotide
uuuuacgugcaucuccaua

SEQ ID NO: 2468016 - RNA, 19 nt, Artificial Sequence
  Description of Artificial Sequence: Synthetic oligonucleotide
auagagugguugaugacag

SEQ ID NO: 2468017 - RNA, 19 nt, Artificial Sequence
  Description of Artificial Sequence: Synthetic oligonucleotide
augaaaguagcaucuggaa

SEQ ID NO: 2468018 - RNA, 19 nt, Artificial Sequence
  Description of Artificial Sequence: Synthetic oligonucleotide
uucugguaauaucuaugga

SEQ ID NO: 2468019 - RNA, 19 nt, Artificial Sequence
  Description of Artificial Sequence: Synthetic oligonucleotide
caccauacacaucauuuug

SEQ ID NO: 2468020 - RNA, 19 nt, Artificial Sequence
  Description of Artificial Sequence: Synthetic oligonucleotide
ugcucucuguaugaaaagc

SEQ ID NO: 2468021 - RNA, 19 nt, Artificial Sequence
  Description of Artificial Sequence: Synthetic oligonucleotide
uucuaagagacuggcgugc

SEQ ID NO: 2468022 - RNA, 19 nt, Artificial Sequence
  Description of Artificial Sequence: Synthetic oligonucleotide
aggucagaaguguauaaau

SEQ ID NO: 2468023 - RNA, 19 nt, Artificial Sequence
  Description of Artificial Sequence: Synthetic oligonucleotide
cuuuuccgggcuuuucagg

SEQ ID NO: 2468024 - RNA, 19 nt, Artificial Sequence
  Description of Artificial Sequence: Synthetic oligonucleotide
cuucgcucuucuauuuucc

SEQ ID NO: 2468025 - RNA, 19 nt, Artificial Sequence
  Description of Artificial Sequence: Synthetic oligonucleotide
gaguuucuaagagacuggc

SEQ ID NO: 2468026 - RNA, 19 nt, Artificial Sequence
  Description of Artificial Sequence: Synthetic oligonucleotide
cauuguagagagccacacg

SEQ ID NO: 2468027 - RNA, 19 nt, Artificial Sequence
  Description of Artificial Sequence: Synthetic oligonucleotide
ugggacagucauagagugg

SEQ ID NO: 2468028 - RNA, 19 nt, Artificial Sequence
  Description of Artificial Sequence: Synthetic oligonucleotide
cuuucuagauucaguuaug

SEQ ID NO: 2468029 - RNA, 19 nt, Artificial Sequence
  Description of Artificial Sequence: Synthetic oligonucleotide
guccaugccuugcugaaag

SEQ ID NO: 2468030 - RNA, 19 nt, Artificial Sequence
  Description of Artificial Sequence: Synthetic oligonucleotide
uuguagagagccacacgca

SEQ ID NO: 2468031 - RNA, 19 nt, Artificial Sequence
  Description of Artificial Sequence: Synthetic oligonucleotide
uuacucucagugaggucag

SEQ ID NO: 2468032 - RNA, 19 nt, Artificial Sequence
  Description of Artificial Sequence: Synthetic oligonucleotide
guaaccacaaccccaaccu

SEQ ID NO: 2468033 - RNA, 19 nt, Artificial Sequence
  Description of Artificial Sequence: Synthetic oligonucleotide
gacagucauagagugguug

SEQ ID NO: 2468034 - RNA, 19 nt, Artificial Sequence
  Description of Artificial Sequence: Synthetic oligonucleotide
caugccuugcugaaagcug

SEQ ID NO: 2468035 - RNA, 19 nt, Artificial Sequence
  Description of Artificial Sequence: Synthetic oligonucleotide
uccauaucuugacuucgcu

SEQ ID NO: 2468036 - RNA, 19 nt, Artificial Sequence
  Description of Artificial Sequence: Synthetic oligonucleotide
cugguggaguuucuaagag

SEQ ID NO: 2468037 - RNA, 19 nt, Artificial Sequence
  Description of Artificial Sequence: Synthetic oligonucleotide
cucucagugaggucagaag

SEQ ID NO: 2468038 - RNA, 19 nt, Artificial Sequence
  Description of Artificial Sequence: Synthetic oligonucleotide
auuuucccacaaaauggac

SEQ ID NO: 2468039 - RNA, 19 nt, Artificial Sequence
  Description of Artificial Sequence: Synthetic oligonucleotide
auucaggaggacuguacgu

SEQ ID NO: 2468040 - RNA, 19 nt, Artificial Sequence
  Description of Artificial Sequence: Synthetic oligonucleotide
gauuccaccucuuccuguc

SEQ ID NO: 2468041 - RNA, 19 nt, Artificial Sequence
  Description of Artificial Sequence: Synthetic oligonucleotide
acauucaggaggacuguac

SEQ ID NO: 2468042 - RNA, 19 nt, Artificial Sequence
  Description of Artificial Sequence: Synthetic oligonucleotide
augaaagugaucaaccauu

SEQ ID NO: 2468043 - RNA, 19 nt, Artificial Sequence
  Description of Artificial Sequence: Synthetic oligonucleotide
agagcacuggacucucguc

SEQ ID NO: 2468044 - RNA, 19 nt, Artificial Sequence
  Description of Artificial Sequence: Synthetic oligonucleotide
augacagucuucuggugga

SEQ ID NO: 2468045 - RNA, 19 nt, Artificial Sequence
  Description of Artificial Sequence: Synthetic oligonucleotide
cauagagugguugaugaca

SEQ ID NO: 2468046 - RNA, 19 nt, Artificial Sequence
  Description of Artificial Sequence: Synthetic oligonucleotide
uacaaggaauugacauacc

SEQ ID NO: 2468047 - RNA, 19 nt, Artificial Sequence
  Description of Artificial Sequence: Synthetic oligonucleotide
cuaauucucuaucaccaga

SEQ ID NO: 2468048 - RNA, 19 nt, Artificial Sequence
  Description of Artificial Sequence: Synthetic oligonucleotide
ugagcccacacaugggaca

SEQ ID NO: 2468049 - RNA, 19 nt, Artificial Sequence
  Description of Artificial Sequence: Synthetic oligonucleotide
ucucuaucaccagagcacu

SEQ ID NO: 2468050 - RNA, 19 nt, Artificial Sequence
  Description of Artificial Sequence: Synthetic oligonucleotide
acuguacgugguuucauaa

SEQ ID NO: 2468051 - RNA, 19 nt, Artificial Sequence
  Description of Artificial Sequence: Synthetic oligonucleotide
gguaauaucuauggagagc

SEQ ID NO: 2468052 - RNA, 19 nt, Artificial Sequence
  Description of Artificial Sequence: Synthetic oligonucleotide
auaccaauagcuauugauu

SEQ ID NO: 2468053 - RNA, 19 nt, Artificial Sequence
  Description of Artificial Sequence: Synthetic oligonucleotide
gaugaaugaaagugaucaa

SEQ ID NO: 2468054 - RNA, 19 nt, Artificial Sequence
  Description of Artificial Sequence: Synthetic oligonucleotide
aguuucuaagagacuggcg

SEQ ID NO: 2468055 - RNA, 19 nt, Artificial Sequence
  Description of Artificial Sequence: Synthetic oligonucleotide
ugguggaguuucuaagaga

SEQ ID NO: 2468056 - RNA, 19 nt, Artificial Sequence
  Description of Artificial Sequence: Synthetic oligonucleotide
uuucaggcacuuucuagau

SEQ ID NO: 2468057 - RNA, 19 nt, Artificial Sequence
  Description of Artificial Sequence: Synthetic oligonucleotide
ucauagagugguugaugac

SEQ ID NO: 2468058 - RNA, 19 nt, Artificial Sequence
  Description of Artificial Sequence: Synthetic oligonucleotide
caguuaugcucucuguaug

SEQ ID NO: 2468059 - RNA, 19 nt, Artificial Sequence
  Description of Artificial Sequence: Synthetic oligonucleotide
acgcaccucacaucugugg

SEQ ID NO: 2468060 - RNA, 19 nt, Artificial Sequence
  Description of Artificial Sequence: Synthetic oligonucleotide
uugacuucgcucuucuauu

SEQ ID NO: 2468061 - RNA, 19 nt, Artificial Sequence
  Description of Artificial Sequence: Synthetic oligonucleotide
gcuuucaucuaaaugcaag

SEQ ID NO: 2468062 - RNA, 19 nt, Artificial Sequence
  Description of Artificial Sequence: Synthetic oligonucleotide
cuccauaucuugacuucgc

SEQ ID NO: 2468063 - RNA, 19 nt, Artificial Sequence
  Description of Artificial Sequence: Synthetic oligonucleotide
ggaauugacauaccuuuca

SEQ ID NO: 2468064 - RNA, 19 nt, Artificial Sequence
  Description of Artificial Sequence: Synthetic oligonucleotide
aauguucugguaauaucua

SEQ ID NO: 2468065 - RNA, 19 nt, Artificial Sequence
  Description of Artificial Sequence: Synthetic oligonucleotide
auaucuauggagagcuuca

SEQ ID NO: 2468066 - RNA, 19 nt, Artificial Sequence
  Description of Artificial Sequence: Synthetic oligonucleotide
augcucucuguaugaaaag

SEQ ID NO: 2468067 - RNA, 19 nt, Artificial Sequence
  Description of Artificial Sequence: Synthetic oligonucleotide
ccuguaacuuguuauuaag

SEQ ID NO: 2468068 - RNA, 19 nt, Artificial Sequence
  Description of Artificial Sequence: Synthetic oligonucleotide
agugguugaugacagucuu

SEQ ID NO: 2468069 - RNA, 19 nt, Artificial Sequence
  Description of Artificial Sequence: Synthetic oligonucleotide
guccccaaaagaugaauga

SEQ ID NO: 2468070 - RNA, 19 nt, Artificial Sequence
  Description of Artificial Sequence: Synthetic oligonucleotide
cucagcuaauucucuauca

SEQ ID NO: 2468071 - RNA, 19 nt, Artificial Sequence
  Description of Artificial Sequence: Synthetic oligonucleotide
uaucaccagagcacuggac

SEQ ID NO: 2468072 - RNA, 19 nt, Artificial Sequence
  Description of Artificial Sequence: Synthetic oligonucleotide
cacaugcuccaauccaggc

SEQ ID NO: 2468073 - RNA, 19 nt, Artificial Sequence
  Description of Artificial Sequence: Synthetic oligonucleotide
guacagaugagcccacaca

SEQ ID NO: 2468074 - RNA, 19 nt, Artificial Sequence
  Description of Artificial Sequence: Synthetic oligonucleotide
aaaguagcaucuggaaauu

SEQ ID NO: 2468075 - RNA, 19 nt, Artificial Sequence
  Description of Artificial Sequence: Synthetic oligonucleotide
cuauugauuccaccucuuc

SEQ ID NO: 2468076 - RNA, 19 nt, Artificial Sequence
  Description of Artificial Sequence: Synthetic oligonucleotide
aagagacuggcgugcucug

SEQ ID NO: 2468077 - RNA, 19 nt, Artificial Sequence
  Description of Artificial Sequence: Synthetic oligonucleotide
uuuguccccaaaagaugaa

SEQ ID NO: 2468078 - RNA, 19 nt, Artificial Sequence
  Description of Artificial Sequence: Synthetic oligonucleotide
uucccuguaacuuguuauu

SEQ ID NO: 2468079 - RNA, 19 nt, Artificial Sequence
  Description of Artificial Sequence: Synthetic oligonucleotide
aucaauaccaauagcuauu

SEQ ID NO: 2468080 - RNA, 19 nt, Artificial Sequence
  Description of Artificial Sequence: Synthetic oligonucleotide
acuuguuauuaaguugaca

SEQ ID NO: 2468081 - RNA, 19 nt, Artificial Sequence
  Description of Artificial Sequence: Synthetic oligonucleotide
gauccuuguaccacagaca

SEQ ID NO: 2468082 - RNA, 19 nt, Artificial Sequence
  Description of Artificial Sequence: Synthetic oligonucleotide
uccuggagaauaugguaau

SEQ ID NO: 2468083 - RNA, 19 nt, Artificial Sequence
  Description of Artificial Sequence: Synthetic oligonucleotide
auggacauucaggaggacu

SEQ ID NO: 2468084 - RNA, 19 nt, Artificial Sequence
  Description of Artificial Sequence: Synthetic oligonucleotide
uuccgggcuuuucaggcac

SEQ ID NO: 2468085 - RNA, 19 nt, Artificial Sequence
  Description of Artificial Sequence: Synthetic oligonucleotide
accauacacaucauuuugu

SEQ ID NO: 2468086 - RNA, 19 nt, Artificial Sequence
  Description of Artificial Sequence: Synthetic oligonucleotide
aaaugcaaguccacguguu

SEQ ID NO: 2468087 - RNA, 19 nt, Artificial Sequence
  Description of Artificial Sequence: Synthetic oligonucleotide
ggagagcuucaauaauucc

SEQ ID NO: 2468088 - RNA, 19 nt, Artificial Sequence
  Description of Artificial Sequence: Synthetic oligonucleotide
acagucuucugguggaguu

SEQ ID NO: 2468089 - RNA, 19 nt, Artificial Sequence
  Description of Artificial Sequence: Synthetic oligonucleotide
caauagcuauugauuccac

SEQ ID NO: 2468090 - RNA, 19 nt, Artificial Sequence
  Description of Artificial Sequence: Synthetic oligonucleotide
uuuccgggcuuuucaggca

SEQ ID NO: 2468091 - RNA, 19 nt, Artificial Sequence
  Description of Artificial Sequence: Synthetic oligonucleotide
augguaauuuguacagaug

SEQ ID NO: 2468092 - RNA, 19 nt, Artificial Sequence
  Description of Artificial Sequence: Synthetic oligonucleotide
ggaguuucuaagagacugg

SEQ ID NO: 2468093 - RNA, 19 nt, Artificial Sequence
  Description of Artificial Sequence: Synthetic oligonucleotide
auaugguaauuuguacaga

SEQ ID NO: 2468094 - RNA, 19 nt, Artificial Sequence
  Description of Artificial Sequence: Synthetic oligonucleotide
aaccacaaccccaaccuuu

SEQ ID NO: 2468095 - RNA, 19 nt, Artificial Sequence
  Description of Artificial Sequence: Synthetic oligonucleotide
uucaagcagucaccauaca

SEQ ID NO: 2468096 - RNA, 19 nt, Artificial Sequence
  Description of Artificial Sequence: Synthetic oligonucleotide
aaauacucacaugcuccaa

SEQ ID NO: 2468097 - RNA, 19 nt, Artificial Sequence
  Description of Artificial Sequence: Synthetic oligonucleotide
caauaauuccagaaguuuu

SEQ ID NO: 2468098 - RNA, 19 nt, Artificial Sequence
  Description of Artificial Sequence: Synthetic oligonucleotide
cacaaccccaaccuuuguc

SEQ ID NO: 2468099 - RNA, 19 nt, Artificial Sequence
  Description of Artificial Sequence: Synthetic oligonucleotide
auggagagcuucaauaauu

SEQ ID NO: 2468100 - RNA, 19 nt, Artificial Sequence
  Description of Artificial Sequence: Synthetic oligonucleotide
caucaauaccaauagcuau

SEQ ID NO: 2468101 - RNA, 19 nt, Artificial Sequence
  Description of Artificial Sequence: Synthetic oligonucleotide
augagcccacacaugggac

SEQ ID NO: 2468102 - RNA, 19 nt, Artificial Sequence
  Description of Artificial Sequence: Synthetic oligonucleotide
agccacacgcaccucacau

SEQ ID NO: 2468103 - RNA, 19 nt, Artificial Sequence
  Description of Artificial Sequence: Synthetic oligonucleotide
uuguagcaaugaugaaagu

SEQ ID NO: 2468104 - RNA, 19 nt, Artificial Sequence
  Description of Artificial Sequence: Synthetic oligonucleotide
gguuucauaaauugauccu

SEQ ID NO: 2468105 - RNA, 19 nt, Artificial Sequence
  Description of Artificial Sequence: Synthetic oligonucleotide
aagcugcuuucaucuaaau

SEQ ID NO: 2468106 - RNA, 19 nt, Artificial Sequence
  Description of Artificial Sequence: Synthetic oligonucleotide
agugaggucagaaguguau

SEQ ID NO: 2468107 - RNA, 19 nt, Artificial Sequence
  Description of Artificial Sequence: Synthetic oligonucleotide
ccacaaaauggacauucag

SEQ ID NO: 2468108 - RNA, 19 nt, Artificial Sequence
  Description of Artificial Sequence: Synthetic oligonucleotide
ugacuucgcucuucuauuu

SEQ ID NO: 2468109 - RNA, 19 nt, Artificial Sequence
  Description of Artificial Sequence: Synthetic oligonucleotide
cuguaacuuguuauuaagu

SEQ ID NO: 2468110 - RNA, 19 nt, Artificial Sequence
  Description of Artificial Sequence: Synthetic oligonucleotide
agaugagcccacacauggg

SEQ ID NO: 2468111 - RNA, 19 nt, Artificial Sequence
  Description of Artificial Sequence: Synthetic oligonucleotide
agucaccauacacaucauu

SEQ ID NO: 2468112 - RNA, 19 nt, Artificial Sequence
  Description of Artificial Sequence: Synthetic oligonucleotide
ucguccaugccuugcugaa

SEQ ID NO: 2468113 - RNA, 19 nt, Artificial Sequence
  Description of Artificial Sequence: Synthetic oligonucleotide
uaucuauggagagcuucaa

SEQ ID NO: 2468114 - RNA, 19 nt, Artificial Sequence
  Description of Artificial Sequence: Synthetic oligonucleotide
gaggucagaaguguauaaa

SEQ ID NO: 2468115 - RNA, 19 nt, Artificial Sequence
  Description of Artificial Sequence: Synthetic oligonucleotide
gcuuuuccgggcuuuucag

SEQ ID NO: 2468116 - RNA, 19 nt, Artificial Sequence
  Description of Artificial Sequence: Synthetic oligonucleotide
uaauaucuauggagagcuu

SEQ ID NO: 2468117 - RNA, 19 nt, Artificial Sequence
  Description of Artificial Sequence: Synthetic oligonucleotide
guucccuguaacuuguuau

SEQ ID NO: 2468118 - RNA, 19 nt, Artificial Sequence
  Description of Artificial Sequence: Synthetic oligonucleotide
aucaaccauuguagagagc

SEQ ID NO: 2468119 - RNA, 19 nt, Artificial Sequence
  Description of Artificial Sequence: Synthetic oligonucleotide
uuaaguugacaggcucccu

SEQ ID NO: 2468120 - RNA, 19 nt, Artificial Sequence
  Description of Artificial Sequence: Synthetic oligonucleotide
uucaggcacuuucuagauu

SEQ ID NO: 2468121 - RNA, 19 nt, Artificial Sequence
  Description of Artificial Sequence: Synthetic oligonucleotide
uaaccacaaccccaaccuu

SEQ ID NO: 2468122 - RNA, 19 nt, Artificial Sequence
  Description of Artificial Sequence: Synthetic oligonucleotide
gacuguacgugguuucaua

SEQ ID NO: 2468123 - RNA, 19 nt, Artificial Sequence
  Description of Artificial Sequence: Synthetic oligonucleotide
ucacaucuguggcaauguu

SEQ ID NO: 2468124 - RNA, 19 nt, Artificial Sequence
  Description of Artificial Sequence: Synthetic oligonucleotide
uuguccccaaaagaugaau

SEQ ID NO: 2468125 - RNA, 19 nt, Artificial Sequence
  Description of Artificial Sequence: Synthetic oligonucleotide
auaucuugacuucgcucuu

SEQ ID NO: 2468126 - RNA, 19 nt, Artificial Sequence
  Description of Artificial Sequence: Synthetic oligonucleotide
acgugguuucauaaauuga

SEQ ID NO: 2468127 - RNA, 19 nt, Artificial Sequence
  Description of Artificial Sequence: Synthetic oligonucleotide
guaugaaaagcuucauguu

SEQ ID NO: 2468128 - RNA, 19 nt, Artificial Sequence
  Description of Artificial Sequence: Synthetic oligonucleotide
acagaugagcccacacaug

SEQ ID NO: 2468129 - RNA, 19 nt, Artificial Sequence
  Description of Artificial Sequence: Synthetic oligonucleotide
aggcacuuucuagauucag

SEQ ID NO: 2468130 - RNA, 19 nt, Artificial Sequence
  Description of Artificial Sequence: Synthetic oligonucleotide
accagagcacuggacucuc

SEQ ID NO: 2468131 - RNA, 19 nt, Artificial Sequence
  Description of Artificial Sequence: Synthetic oligonucleotide
uagagugguugaugacagu

SEQ ID NO: 2468132 - RNA, 19 nt, Artificial Sequence
  Description of Artificial Sequence: Synthetic oligonucleotide
agauucaguuaugcucucu

SEQ ID NO: 2468133 - RNA, 19 nt, Artificial Sequence
  Description of Artificial Sequence: Synthetic oligonucleotide
cuaucaccagagcacugga

SEQ ID NO: 2468134 - RNA, 19 nt, Artificial Sequence
  Description of Artificial Sequence: Synthetic oligonucleotide
caaggaauugacauaccuu

SEQ ID NO: 2468135 - RNA, 19 nt, Artificial Sequence
  Description of Artificial Sequence: Synthetic oligonucleotide
ggaauacaaggaauugaca

SEQ ID NO: 2468136 - RNA, 19 nt, Artificial Sequence
  Description of Artificial Sequence: Synthetic oligonucleotide
cucguccaugccuugcuga

SEQ ID NO: 2468137 - RNA, 19 nt, Artificial Sequence
  Description of Artificial Sequence: Synthetic oligonucleotide
guaccacagacaauccaga

SEQ ID NO: 2468138 - RNA, 19 nt, Artificial Sequence
  Description of Artificial Sequence: Synthetic oligonucleotide
uccuuguaccacagacaau

SEQ ID NO: 2468139 - RNA, 19 nt, Artificial Sequence
  Description of Artificial Sequence: Synthetic oligonucleotide
uuguacagaugagcccaca

SEQ ID NO: 2468140 - RNA, 19 nt, Artificial Sequence
  Description of Artificial Sequence: Synthetic oligonucleotide
cuaagagacuggcgugcuc

SEQ ID NO: 2468141 - RNA, 19 nt, Artificial Sequence
  Description of Artificial Sequence: Synthetic oligonucleotide
aggacuguacgugguuuca

SEQ ID NO: 2468142 - RNA, 19 nt, Artificial Sequence
  Description of Artificial Sequence: Synthetic oligonucleotide
ggagaauaugguaauuugu

SEQ ID NO: 2468143 - RNA, 19 nt, Artificial Sequence
  Description of Artificial Sequence: Synthetic oligonucleotide
cuguacgugguuucauaaa

SEQ ID NO: 2468144 - RNA, 19 nt, Artificial Sequence
  Description of Artificial Sequence: Synthetic oligonucleotide
caaccauuguagagagcca

SEQ ID NO: 2468145 - RNA, 19 nt, Artificial Sequence
  Description of Artificial Sequence: Synthetic oligonucleotide
gggacagucauagaguggu

SEQ ID NO: 2468146 - RNA, 19 nt, Artificial Sequence
  Description of Artificial Sequence: Synthetic oligonucleotide
gacauaccuuucaagcagu

SEQ ID NO: 2468147 - RNA, 19 nt, Artificial Sequence
  Description of Artificial Sequence: Synthetic oligonucleotide
ggucagaaguguauaaaua

SEQ ID NO: 2468148 - RNA, 19 nt, Artificial Sequence
  Description of Artificial Sequence: Synthetic oligonucleotide
caauaccaauagcuauuga

SEQ ID NO: 2468149 - RNA, 19 nt, Artificial Sequence
  Description of Artificial Sequence: Synthetic oligonucleotide
gacucucguccaugccuug

SEQ ID NO: 2468150 - RNA, 19 nt, Artificial Sequence
  Description of Artificial Sequence: Synthetic oligonucleotide
caaucauggacugaauuuu

SEQ ID NO: 2468151 - RNA, 19 nt, Artificial Sequence
  Description of Artificial Sequence: Synthetic oligonucleotide
ccaauagcuauugauucca

SEQ ID NO: 2468152 - RNA, 19 nt, Artificial Sequence
  Description of Artificial Sequence: Synthetic oligonucleotide
cacgcaccucacaucugug

SEQ ID NO: 2468153 - RNA, 19 nt, Artificial Sequence
  Description of Artificial Sequence: Synthetic oligonucleotide
ccagacugcuuuuccgggc

SEQ ID NO: 2468154 - RNA, 19 nt, Artificial Sequence
  Description of Artificial Sequence: Synthetic oligonucleotide
aggaggacuguacgugguu

SEQ ID NO: 2468155 - RNA, 19 nt, Artificial Sequence
  Description of Artificial Sequence: Synthetic oligonucleotide
accccaaccuuugucccca

SEQ ID NO: 2468156 - RNA, 19 nt, Artificial Sequence
  Description of Artificial Sequence: Synthetic oligonucleotide
ggccuuuguucccuguaac

SEQ ID NO: 2468157 - RNA, 19 nt, Artificial Sequence
  Description of Artificial Sequence: Synthetic oligonucleotide
cacguguuccuggagaaua

SEQ ID NO: 2468158 - RNA, 19 nt, Artificial Sequence
  Description of Artificial Sequence: Synthetic oligonucleotide
ccccaaaagaugaaugaaa

SEQ ID NO: 2468159 - RNA, 19 nt, Artificial Sequence
  Description of Artificial Sequence: Synthetic oligonucleotide
agacuggcgugcucuguuu

SEQ ID NO: 2468160 - RNA, 19 nt, Artificial Sequence
  Description of Artificial Sequence: Synthetic oligonucleotide
uggcaauguucugguaaua

SEQ ID NO: 2468161 - RNA, 19 nt, Artificial Sequence
  Description of Artificial Sequence: Synthetic oligonucleotide
cgugguuucauaaauugau

SEQ ID NO: 2468162 - RNA, 19 nt, Artificial Sequence
  Description of Artificial Sequence: Synthetic oligonucleotide
ccaaccuuuguccccaaaa

SEQ ID NO: 2468163 - RNA, 19 nt, Artificial Sequence
  Description of Artificial Sequence: Synthetic oligonucleotide
gagacuggcgugcucuguu

SEQ ID NO: 2468164 - RNA, 19 nt, Artificial Sequence
  Description of Artificial Sequence: Synthetic oligonucleotide
gagccacacgcaccucaca

SEQ ID NO: 2468165 - RNA, 19 nt, Artificial Sequence
  Description of Artificial Sequence: Synthetic oligonucleotide
ccucacaucuguggcaaug

SEQ ID NO: 2468166 - RNA, 19 nt, Artificial Sequence
  Description of Artificial Sequence: Synthetic oligonucleotide
gacuucgcucuucuauuuu

SEQ ID NO: 2468167 - RNA, 19 nt, Artificial Sequence
  Description of Artificial Sequence: Synthetic oligonucleotide
gcucucuguaugaaaagcu

SEQ ID NO: 2468168 - RNA, 19 nt, Artificial Sequence
  Description of Artificial Sequence: Synthetic oligonucleotide
uacucucagugaggucaga

SEQ ID NO: 2468169 - RNA, 19 nt, Artificial Sequence
  Description of Artificial Sequence: Synthetic oligonucleotide
cccuguaacuuguuauuaa

SEQ ID NO: 2468170 - RNA, 19 nt, Artificial Sequence
  Description of Artificial Sequence: Synthetic oligonucleotide
cagagcacuggacucucgu

SEQ ID NO: 2468171 - RNA, 19 nt, Artificial Sequence
  Description of Artificial Sequence: Synthetic oligonucleotide
ggcacuuucuagauucagu

SEQ ID NO: 2468172 - RNA, 19 nt, Artificial Sequence
  Description of Artificial Sequence: Synthetic oligonucleotide
gccuuuguucccuguaacu

SEQ ID NO: 2468173 - RNA, 19 nt, Artificial Sequence
  Description of Artificial Sequence: Synthetic oligonucleotide
cccacaaaauggacauuca

SEQ ID NO: 2468174 - RNA, 19 nt, Artificial Sequence
  Description of Artificial Sequence: Synthetic oligonucleotide
cagacaauccagacugcuu

SEQ ID NO: 2468175 - RNA, 19 nt, Artificial Sequence
  Description of Artificial Sequence: Synthetic oligonucleotide
gccacacgcaccucacauc

SEQ ID NO: 2468176 - RNA, 19 nt, Artificial Sequence
  Description of Artificial Sequence: Synthetic oligonucleotide
guacgugguuucauaaauu

SEQ ID NO: 2468177 - RNA, 19 nt, Artificial Sequence
  Description of Artificial Sequence: Synthetic oligonucleotide
accucacaucuguggcaau

SEQ ID NO: 2468178 - RNA, 19 nt, Artificial Sequence
  Description of Artificial Sequence: Synthetic oligonucleotide
guggaguuucuaagagacu

SEQ ID NO: 2468179 - RNA, 19 nt, Artificial Sequence
  Description of Artificial Sequence: Synthetic oligonucleotide
cagucauagagugguugau

SEQ ID NO: 2468180 - RNA, 19 nt, Artificial Sequence
  Description of Artificial Sequence: Synthetic oligonucleotide
cuguggcaauguucuggua

SEQ ID NO: 2468181 - RNA, 19 nt, Artificial Sequence
  Description of Artificial Sequence: Synthetic oligonucleotide
ggacauucaggaggacugu

SEQ ID NO: 2468182 - RNA, 19 nt, Artificial Sequence
  Description of Artificial Sequence: Synthetic oligonucleotide
cugaagcugcucagcuaau

SEQ ID NO: 2468183 - RNA, 19 nt, Artificial Sequence
  Description of Artificial Sequence: Synthetic oligonucleotide
aggcucccugaggaucaaa

SEQ ID NO: 2468184 - RNA, 19 nt, Artificial Sequence
  Description of Artificial Sequence: Synthetic oligonucleotide
augcuccaauccaggccuu

SEQ ID NO: 2468185 - RNA, 19 nt, Artificial Sequence
  Description of Artificial Sequence: Synthetic oligonucleotide
ggacuguacgugguuucau

SEQ ID NO: 2468186 - RNA, 19 nt, Artificial Sequence
  Description of Artificial Sequence: Synthetic oligonucleotide
cccugaggaucaaaaccuu

SEQ ID NO: 2468187 - RNA, 19 nt, Artificial Sequence
  Description of Artificial Sequence: Synthetic oligonucleotide
caggcucccugaggaucaa

SEQ ID NO: 2468188 - RNA, 19 nt, Artificial Sequence
  Description of Artificial Sequence: Synthetic oligonucleotide
gcacuggacucucguccau

SEQ ID NO: 2468189 - RNA, 19 nt, Artificial Sequence
  Description of Artificial Sequence: Synthetic oligonucleotide
cccaaccuuuguccccaaa

SEQ ID NO: 2468190 - RNA, 19 nt, Artificial Sequence
  Description of Artificial Sequence: Synthetic oligonucleotide
ggacagucauagagugguu

SEQ ID NO: 2468191 - RNA, 19 nt, Artificial Sequence
  Description of Artificial Sequence: Synthetic oligonucleotide
ccacaaccccaaccuuugu

SEQ ID NO: 2468192 - RNA, 19 nt, Artificial Sequence
  Description of Artificial Sequence: Synthetic oligonucleotide
ccacguguuccuggagaau

SEQ ID NO: 2468193 - RNA, 19 nt, Artificial Sequence
  Description of Artificial Sequence: Synthetic oligonucleotide
ccccaaccuuuguccccaa

SEQ ID NO: 2468194 - RNA, 19 nt, Artificial Sequence
  Description of Artificial Sequence: Synthetic oligonucleotide
cgggcuuuucaggcacuuu

SEQ ID NO: 2468195 - RNA, 19 nt, Artificial Sequence
  Description of Artificial Sequence: Synthetic oligonucleotide
uauuaaauggcacucggag

SEQ ID NO: 2468196 - RNA, 19 nt, Artificial Sequence
  Description of Artificial Sequence: Synthetic oligonucleotide
uguaaagggauauuaaaug

SEQ ID NO: 2468197 - RNA, 19 nt, Artificial Sequence
  Description of Artificial Sequence: Synthetic oligonucleotide
gauauuaaauggcacucgg

SEQ ID NO: 2468198 - RNA, 19 nt, Artificial Sequence
  Description of Artificial Sequence: Synthetic oligonucleotide
ugaugcgugaccauuaggc

SEQ ID NO: 2468199 - RNA, 19 nt, Artificial Sequence
  Description of Artificial Sequence: Synthetic oligonucleotide
uuuguguugaccauaggac

SEQ ID NO: 2468200 - RNA, 19 nt, Artificial Sequence
  Description of Artificial Sequence: Synthetic oligonucleotide
gauccggcaaaacagaaag

SEQ ID NO: 2468201 - RNA, 19 nt, Artificial Sequence
  Description of Artificial Sequence: Synthetic oligonucleotide
ugcccagugacacaaacgg

SEQ ID NO: 2468202 - RNA, 19 nt, Artificial Sequence
  Description of Artificial Sequence: Synthetic oligonucleotide
uaaagggauauuaaauggc

SEQ ID NO: 2468203 - RNA, 19 nt, Artificial Sequence
  Description of Artificial Sequence: Synthetic oligonucleotide
gaagaugcagccaacaaag

SEQ ID NO: 2468204 - RNA, 19 nt, Artificial Sequence
  Description of Artificial Sequence: Synthetic oligonucleotide
aaacggaguacucaguucu

SEQ ID NO: 2468205 - RNA, 19 nt, Artificial Sequence
  Description of Artificial Sequence: Synthetic oligonucleotide
ucauagaucauguauggaa

SEQ ID NO: 2468206 - RNA, 19 nt, Artificial Sequence
  Description of Artificial Sequence: Synthetic oligonucleotide
cacauugcaguguaaaggg

SEQ ID NO: 2468207 - RNA, 19 nt, Artificial Sequence
  Description of Artificial Sequence: Synthetic oligonucleotide
uuccauugaccuuauaaag

SEQ ID NO: 2468208 - RNA, 19 nt, Artificial Sequence
  Description of Artificial Sequence: Synthetic oligonucleotide
cauucacagagguacaugg

SEQ ID NO: 2468209 - RNA, 19 nt, Artificial Sequence
  Description of Artificial Sequence: Synthetic oligonucleotide
agucauagaucauguaugg

SEQ ID NO: 2468210 - RNA, 19 nt, Artificial Sequence
  Description of Artificial Sequence: Synthetic oligonucleotide
auaaaggaggguaugcugc

SEQ ID NO: 2468211 - RNA, 19 nt, Artificial Sequence
  Description of Artificial Sequence: Synthetic oligonucleotide
aaaccagacauacucucug

SEQ ID NO: 2468212 - RNA, 19 nt, Artificial Sequence
  Description of Artificial Sequence: Synthetic oligonucleotide
uauaaaggaggguaugcug

SEQ ID NO: 2468213 - RNA, 19 nt, Artificial Sequence
  Description of Artificial Sequence: Synthetic oligonucleotide
aguuucggaaaaugguggc

SEQ ID NO: 2468214 - RNA, 19 nt, Artificial Sequence
  Description of Artificial Sequence: Synthetic oligonucleotide
uuucaaucaggaaguuucg

SEQ ID NO: 2468215 - RNA, 19 nt, Artificial Sequence
  Description of Artificial Sequence: Synthetic oligonucleotide
ugagaguaauuaaccaucc

SEQ ID NO: 2468216 - RNA, 19 nt, Artificial Sequence
  Description of Artificial Sequence: Synthetic oligonucleotide
gaaggauccggcaaaacag

SEQ ID NO: 2468217 - RNA, 19 nt, Artificial Sequence
  Description of Artificial Sequence: Synthetic oligonucleotide
aaaagaaggauccggcaaa

SEQ ID NO: 2468218 - RNA, 19 nt, Artificial Sequence
  Description of Artificial Sequence: Synthetic oligonucleotide
gauuccauugaccuuauaa

SEQ ID NO: 2468219 - RNA, 19 nt, Artificial Sequence
  Description of Artificial Sequence: Synthetic oligonucleotide
aaguuucggaaaauggugg

SEQ ID NO: 2468220 - RNA, 19 nt, Artificial Sequence
  Description of Artificial Sequence: Synthetic oligonucleotide
auugaccuuauaaaggagg

SEQ ID NO: 2468221 - RNA, 19 nt, Artificial Sequence
  Description of Artificial Sequence: Synthetic oligonucleotide
auagaucauguauggaauc

SEQ ID NO: 2468222 - RNA, 19 nt, Artificial Sequence
  Description of Artificial Sequence: Synthetic oligonucleotide
uggcauagcagucauagau

SEQ ID NO: 2468223 - RNA, 19 nt, Artificial Sequence
  Description of Artificial Sequence: Synthetic oligonucleotide
uuguguugaccauaggacc

SEQ ID NO: 2468224 - RNA, 19 nt, Artificial Sequence
  Description of Artificial Sequence: Synthetic oligonucleotide
uguguugaccauaggacca

SEQ ID NO: 2468225 - RNA, 19 nt, Artificial Sequence
  Description of Artificial Sequence: Synthetic oligonucleotide
gaaguuucggaaaauggug

SEQ ID NO: 2468226 - RNA, 19 nt, Artificial Sequence
  Description of Artificial Sequence: Synthetic oligonucleotide
gaugcgugaccauuaggcg

SEQ ID NO: 2468227 - RNA, 19 nt, Artificial Sequence
  Description of Artificial Sequence: Synthetic oligonucleotide
uaggaccaguacaugaagg

SEQ ID NO: 2468228 - RNA, 19 nt, Artificial Sequence
  Description of Artificial Sequence: Synthetic oligonucleotide
ugaccauaggaccaguaca

SEQ ID NO: 2468229 - RNA, 19 nt, Artificial Sequence
  Description of Artificial Sequence: Synthetic oligonucleotide
ucaaucaggaaguuucgga

SEQ ID NO: 2468230 - RNA, 19 nt, Artificial Sequence
  Description of Artificial Sequence: Synthetic oligonucleotide
aggaccaguacaugaaggg

SEQ ID NO: 2468231 - RNA, 19 nt, Artificial Sequence
  Description of Artificial Sequence: Synthetic oligonucleotide
aaagggauauuaaauggca

SEQ ID NO: 2468232 - RNA, 19 nt, Artificial Sequence
  Description of Artificial Sequence: Synthetic oligonucleotide
uuuagcugaaucagaacuc

SEQ ID NO: 2468233 - RNA, 19 nt, Artificial Sequence
  Description of Artificial Sequence: Synthetic oligonucleotide
ugaagaugcagccaacaaa

SEQ ID NO: 2468234 - RNA, 19 nt, Artificial Sequence
  Description of Artificial Sequence: Synthetic oligonucleotide
accacguugcugcaggagc

SEQ ID NO: 2468235 - RNA, 19 nt, Artificial Sequence
  Description of Artificial Sequence: Synthetic oligonucleotide
aguuucuggucccugguuc

SEQ ID NO: 2468236 - RNA, 19 nt, Artificial Sequence
  Description of Artificial Sequence: Synthetic oligonucleotide
agguacauggcauagcagu

SEQ ID NO: 2468237 - RNA, 19 nt, Artificial Sequence
  Description of Artificial Sequence: Synthetic oligonucleotide
aaccaguagagcuggggag

SEQ ID NO: 2468238 - RNA, 19 nt, Artificial Sequence
  Description of Artificial Sequence: Synthetic oligonucleotide
agaagagcgcgccacuggc

SEQ ID NO: 2468239 - RNA, 19 nt, Artificial Sequence
  Description of Artificial Sequence: Synthetic oligonucleotide
agaguaauuaaccauccuu

SEQ ID NO: 2468240 - RNA, 19 nt, Artificial Sequence
  Description of Artificial Sequence: Synthetic oligonucleotide
agaaggauccggcaaaaca

SEQ ID NO: 2468241 - RNA, 19 nt, Artificial Sequence
  Description of Artificial Sequence: Synthetic oligonucleotide
cugagaguaauuaaccauc

SEQ ID NO: 2468242 - RNA, 19 nt, Artificial Sequence
  Description of Artificial Sequence: Synthetic oligonucleotide
aagaagagcgcgccacugg

SEQ ID NO: 2468243 - RNA, 19 nt, Artificial Sequence
  Description of Artificial Sequence: Synthetic oligonucleotide
aaccagacauacucucugg

SEQ ID NO: 2468244 - RNA, 19 nt, Artificial Sequence
  Description of Artificial Sequence: Synthetic oligonucleotide
uaguccuuuguguugacca

SEQ ID NO: 2468245 - RNA, 19 nt, Artificial Sequence
  Description of Artificial Sequence: Synthetic oligonucleotide
cauggcauagcagucauag

SEQ ID NO: 2468246 - RNA, 19 nt, Artificial Sequence
  Description of Artificial Sequence: Synthetic oligonucleotide
agugccugacuccugagag

SEQ ID NO: 2468247 - RNA, 19 nt, Artificial Sequence
  Description of Artificial Sequence: Synthetic oligonucleotide
aaaaugguggcacgucuga

SEQ ID NO: 2468248 - RNA, 19 nt, Artificial Sequence
  Description of Artificial Sequence: Synthetic oligonucleotide
agagguacauggcauagca

SEQ ID NO: 2468249 - RNA, 19 nt, Artificial Sequence
  Description of Artificial Sequence: Synthetic oligonucleotide
agggauauuaaauggcacu

SEQ ID NO: 2468250 - RNA, 19 nt, Artificial Sequence
  Description of Artificial Sequence: Synthetic oligonucleotide
gcgguuuucaaucaggaag

SEQ ID NO: 2468251 - RNA, 19 nt, Artificial Sequence
  Description of Artificial Sequence: Synthetic oligonucleotide
aagucgccaaguucucccc

SEQ ID NO: 2468252 - RNA, 19 nt, Artificial Sequence
  Description of Artificial Sequence: Synthetic oligonucleotide
accagacauacucucuggc

SEQ ID NO: 2468253 - RNA, 19 nt, Artificial Sequence
  Description of Artificial Sequence: Synthetic oligonucleotide
acacaaacggaguacucag

SEQ ID NO: 2468254 - RNA, 19 nt, Artificial Sequence
  Description of Artificial Sequence: Synthetic oligonucleotide
augcgugaccauuaggcgg

SEQ ID NO: 2468255 - RNA, 19 nt, Artificial Sequence
  Description of Artificial Sequence: Synthetic oligonucleotide
ugagaaccaguagagcugg

SEQ ID NO: 2468256 - RNA, 19 nt, Artificial Sequence
  Description of Artificial Sequence: Synthetic oligonucleotide
cauuaggcgguuuucaauc

SEQ ID NO: 2468257 - RNA, 19 nt, Artificial Sequence
  Description of Artificial Sequence: Synthetic oligonucleotide
aaacaggaugacugcauga

SEQ ID NO: 2468258 - RNA, 19 nt, Artificial Sequence
  Description of Artificial Sequence: Synthetic oligonucleotide
cagccaacaaagaagucgc

SEQ ID NO: 2468259 - RNA, 19 nt, Artificial Sequence
  Description of Artificial Sequence: Synthetic oligonucleotide
gaagucgccaaguucuccc

SEQ ID NO: 2468260 - RNA, 19 nt, Artificial Sequence
  Description of Artificial Sequence: Synthetic oligonucleotide
agugacacaaacggaguac

SEQ ID NO: 2468261 - RNA, 19 nt, Artificial Sequence
  Description of Artificial Sequence: Synthetic oligonucleotide
ucuggcaagccaaugccug

SEQ ID NO: 2468262 - RNA, 19 nt, Artificial Sequence
  Description of Artificial Sequence: Synthetic oligonucleotide
ugcuuuagcugaaucagaa

SEQ ID NO: 2468263 - RNA, 19 nt, Artificial Sequence
  Description of Artificial Sequence: Synthetic oligonucleotide
auagcagucauagaucaug

SEQ ID NO: 2468264 - RNA, 19 nt, Artificial Sequence
  Description of Artificial Sequence: Synthetic oligonucleotide
cuccugagaguaauuaacc

SEQ ID NO: 2468265 - RNA, 19 nt, Artificial Sequence
  Description of Artificial Sequence: Synthetic oligonucleotide
uugaccauaggaccaguac

SEQ ID NO: 2468266 - RNA, 19 nt, Artificial Sequence
  Description of Artificial Sequence: Synthetic oligonucleotide
acucggagcaggcuuaguc

SEQ ID NO: 2468267 - RNA, 19 nt, Artificial Sequence
  Description of Artificial Sequence: Synthetic oligonucleotide
gguacaaggacaaacagga

SEQ ID NO: 2468268 - RNA, 19 nt, Artificial Sequence
  Description of Artificial Sequence: Synthetic oligonucleotide
uccggcaaaacagaaaggu

SEQ ID NO: 2468269 - RNA, 19 nt, Artificial Sequence
  Description of Artificial Sequence: Synthetic oligonucleotide
gagaccacguugcugcagg

SEQ ID NO: 2468270 - RNA, 19 nt, Artificial Sequence
  Description of Artificial Sequence: Synthetic oligonucleotide
uuauaaaggaggguaugcu

SEQ ID NO: 2468271 - RNA, 19 nt, Artificial Sequence
  Description of Artificial Sequence: Synthetic oligonucleotide
uccugagaguaauuaacca

SEQ ID NO: 2468272 - RNA, 19 nt, Artificial Sequence
  Description of Artificial Sequence: Synthetic oligonucleotide
uucuugcacagcaaugaga

SEQ ID NO: 2468273 - RNA, 19 nt, Artificial Sequence
  Description of Artificial Sequence: Synthetic oligonucleotide
auaggaccaguacaugaag

SEQ ID NO: 2468274 - RNA, 19 nt, Artificial Sequence
  Description of Artificial Sequence: Synthetic oligonucleotide
cugaaucagaacucugccc

SEQ ID NO: 2468275 - RNA, 19 nt, Artificial Sequence
  Description of Artificial Sequence: Synthetic oligonucleotide
uucaaucaggaaguuucgg

SEQ ID NO: 2468276 - RNA, 19 nt, Artificial Sequence
  Description of Artificial Sequence: Synthetic oligonucleotide
uucggaaaaugguggcacg

SEQ ID NO: 2468277 - RNA, 19 nt, Artificial Sequence
  Description of Artificial Sequence: Synthetic oligonucleotide
agguacaaggacaaacagg

SEQ ID NO: 2468278 - RNA, 19 nt, Artificial Sequence
  Description of Artificial Sequence: Synthetic oligonucleotide
cuuuagcugaaucagaacu

SEQ ID NO: 2468279 - RNA, 19 nt, Artificial Sequence
  Description of Artificial Sequence: Synthetic oligonucleotide
aauggcacucggagcaggc

SEQ ID NO: 2468280 - RNA, 19 nt, Artificial Sequence
  Description of Artificial Sequence: Synthetic oligonucleotide
agugugaggauuccauuga

SEQ ID NO: 2468281 - RNA, 19 nt, Artificial Sequence
  Description of Artificial Sequence: Synthetic oligonucleotide
aggaugacugcaugaugcg

SEQ ID NO: 2468282 - RNA, 19 nt, Artificial Sequence
  Description of Artificial Sequence: Synthetic oligonucleotide
gcagccaacaaagaagucg

SEQ ID NO: 2468283 - RNA, 19 nt, Artificial Sequence
  Description of Artificial Sequence: Synthetic oligonucleotide
aguaauuaaccauccuuuu

SEQ ID NO: 2468284 - RNA, 19 nt, Artificial Sequence
  Description of Artificial Sequence: Synthetic oligonucleotide
agaugcagccaacaaagaa

SEQ ID NO: 2468285 - RNA, 19 nt, Artificial Sequence
  Description of Artificial Sequence: Synthetic oligonucleotide
aaguucuccccggagcuuc

SEQ ID NO: 2468286 - RNA, 19 nt, Artificial Sequence
  Description of Artificial Sequence: Synthetic oligonucleotide
agacauacucucuggcaag

SEQ ID NO: 2468287 - RNA, 19 nt, Artificial Sequence
  Description of Artificial Sequence: Synthetic oligonucleotide
gaugaggauggcauuggcc

SEQ ID NO: 2468288 - RNA, 19 nt, Artificial Sequence
  Description of Artificial Sequence: Synthetic oligonucleotide
ggcagugucaaagagccgg

SEQ ID NO: 2468289 - RNA, 19 nt, Artificial Sequence
  Description of Artificial Sequence: Synthetic oligonucleotide
ugcgugaccauuaggcggu

SEQ ID NO: 2468290 - RNA, 19 nt, Artificial Sequence
  Description of Artificial Sequence: Synthetic oligonucleotide
aaaaccagacauacucucu

SEQ ID NO: 2468291 - RNA, 19 nt, Artificial Sequence
  Description of Artificial Sequence: Synthetic oligonucleotide
aagagcgcgccacuggcca

SEQ ID NO: 2468292 - RNA, 19 nt, Artificial Sequence
  Description of Artificial Sequence: Synthetic oligonucleotide
cagaacucugcccagugac

SEQ ID NO: 2468293 - RNA, 19 nt, Artificial Sequence
  Description of Artificial Sequence: Synthetic oligonucleotide
ugguucggcaccauucaca

SEQ ID NO: 2468294 - RNA, 19 nt, Artificial Sequence
  Description of Artificial Sequence: Synthetic oligonucleotide
gaaccaguagagcugggga

SEQ ID NO: 2468295 - RNA, 19 nt, Artificial Sequence
  Description of Artificial Sequence: Synthetic oligonucleotide
cauugaccuuauaaaggag

SEQ ID NO: 2468296 - RNA, 19 nt, Artificial Sequence
  Description of Artificial Sequence: Synthetic oligonucleotide
uccauuccggccgcgagcg

SEQ ID NO: 2468297 - RNA, 19 nt, Artificial Sequence
  Description of Artificial Sequence: Synthetic oligonucleotide
auucacagagguacauggc

SEQ ID NO: 2468298 - RNA, 19 nt, Artificial Sequence
  Description of Artificial Sequence: Synthetic oligonucleotide
gacugcaugaugcgugacc

SEQ ID NO: 2468299 - RNA, 19 nt, Artificial Sequence
  Description of Artificial Sequence: Synthetic oligonucleotide
aagaaggauccggcaaaac

SEQ ID NO: 2468300 - RNA, 19 nt, Artificial Sequence
  Description of Artificial Sequence: Synthetic oligonucleotide
acaaacggaguacucaguu

SEQ ID NO: 2468301 - RNA, 19 nt, Artificial Sequence
  Description of Artificial Sequence: Synthetic oligonucleotide
gaaaaugguggcacgucug

SEQ ID NO: 2468302 - RNA, 19 nt, Artificial Sequence
  Description of Artificial Sequence: Synthetic oligonucleotide
ugugaagaugcagccaaca

SEQ ID NO: 2468303 - RNA, 19 nt, Artificial Sequence
  Description of Artificial Sequence: Synthetic oligonucleotide
cugaguuucuggucccugg

SEQ ID NO: 2468304 - RNA, 19 nt, Artificial Sequence
  Description of Artificial Sequence: Synthetic oligonucleotide
uaaaggaggguaugcugcu

SEQ ID NO: 2468305 - RNA, 19 nt, Artificial Sequence
  Description of Artificial Sequence: Synthetic oligonucleotide
agaaccaguagagcugggg

SEQ ID NO: 2468306 - RNA, 19 nt, Artificial Sequence
  Description of Artificial Sequence: Synthetic oligonucleotide
aaauggcacucggagcagg

SEQ ID NO: 2468307 - RNA, 19 nt, Artificial Sequence
  Description of Artificial Sequence: Synthetic oligonucleotide
ucugcccagugacacaaac

SEQ ID NO: 2468308 - RNA, 19 nt, Artificial Sequence
  Description of Artificial Sequence: Synthetic oligonucleotide
caacaaagaagucgccaag

SEQ ID NO: 2468309 - RNA, 19 nt, Artificial Sequence
  Description of Artificial Sequence: Synthetic oligonucleotide
caaacaggaugacugcaug

SEQ ID NO: 2468310 - RNA, 19 nt, Artificial Sequence
  Description of Artificial Sequence: Synthetic oligonucleotide
cagguacaaggacaaacag

SEQ ID NO: 2468311 - RNA, 19 nt, Artificial Sequence
  Description of Artificial Sequence: Synthetic oligonucleotide
gacacaaacggaguacuca

SEQ ID NO: 2468312 - RNA, 19 nt, Artificial Sequence
  Description of Artificial Sequence: Synthetic oligonucleotide
gaccuuauaaaggagggua

SEQ ID NO: 2468313 - RNA, 19 nt, Artificial Sequence
  Description of Artificial Sequence: Synthetic oligonucleotide
ugaguuucuggucccuggu

SEQ ID NO: 2468314 - RNA, 19 nt, Artificial Sequence
  Description of Artificial Sequence: Synthetic oligonucleotide
augaugcgugaccauuagg

SEQ ID NO: 2468315 - RNA, 19 nt, Artificial Sequence
  Description of Artificial Sequence: Synthetic oligonucleotide
agcagaugauggugagccc

SEQ ID NO: 2468316 - RNA, 19 nt, Artificial Sequence
  Description of Artificial Sequence: Synthetic oligonucleotide
aggcagucgucgucggucc

SEQ ID NO: 2468317 - RNA, 19 nt, Artificial Sequence
  Description of Artificial Sequence: Synthetic oligonucleotide
agaagucgccaaguucucc

SEQ ID NO: 2468318 - RNA, 19 nt, Artificial Sequence
  Description of Artificial Sequence: Synthetic oligonucleotide
ggauauuaaauggcacucg

SEQ ID NO: 2468319 - RNA, 19 nt, Artificial Sequence
  Description of Artificial Sequence: Synthetic oligonucleotide
aaaugguggcacgucugag

SEQ ID NO: 2468320 - RNA, 19 nt, Artificial Sequence
  Description of Artificial Sequence: Synthetic oligonucleotide
acugcaugaugcgugacca

SEQ ID NO: 2468321 - RNA, 19 nt, Artificial Sequence
  Description of Artificial Sequence: Synthetic oligonucleotide
aucagaacucugcccagug

SEQ ID NO: 2468322 - RNA, 19 nt, Artificial Sequence
  Description of Artificial Sequence: Synthetic oligonucleotide
acggaguacucaguucugc

SEQ ID NO: 2468323 - RNA, 19 nt, Artificial Sequence
  Description of Artificial Sequence: Synthetic oligonucleotide
gguucggcaccauucacag

SEQ ID NO: 2468324 - RNA, 19 nt, Artificial Sequence
  Description of Artificial Sequence: Synthetic oligonucleotide
cugcccagugacacaaacg

SEQ ID NO: 2468325 - RNA, 19 nt, Artificial Sequence
  Description of Artificial Sequence: Synthetic oligonucleotide
ucagaacucugcccaguga

SEQ ID NO: 2468326 - RNA, 19 nt, Artificial Sequence
  Description of Artificial Sequence: Synthetic oligonucleotide
gauggugagccccgccccg

SEQ ID NO: 2468327 - RNA, 19 nt, Artificial Sequence
  Description of Artificial Sequence: Synthetic oligonucleotide
cccagugacacaaacggag

SEQ ID NO: 2468328 - RNA, 19 nt, Artificial Sequence
  Description of Artificial Sequence: Synthetic oligonucleotide
acauacucucuggcaagcc

SEQ ID NO: 2468329 - RNA, 19 nt, Artificial Sequence
  Description of Artificial Sequence: Synthetic oligonucleotide
caaucaggaaguuucggaa

SEQ ID NO: 2468330 - RNA, 19 nt, Artificial Sequence
  Description of Artificial Sequence: Synthetic oligonucleotide
uacauggcauagcagucau

SEQ ID NO: 2468331 - RNA, 19 nt, Artificial Sequence
  Description of Artificial Sequence: Synthetic oligonucleotide
gaggauuccauugaccuua

SEQ ID NO: 2468332 - RNA, 19 nt, Artificial Sequence
  Description of Artificial Sequence: Synthetic oligonucleotide
acagagguacauggcauag

SEQ ID NO: 2468333 - RNA, 19 nt, Artificial Sequence
  Description of Artificial Sequence: Synthetic oligonucleotide
uacucaguucugcugugaa

SEQ ID NO: 2468334 - RNA, 19 nt, Artificial Sequence
  Description of Artificial Sequence: Synthetic oligonucleotide
gcaccauucacagagguac

SEQ ID NO: 2468335 - RNA, 19 nt, Artificial Sequence
  Description of Artificial Sequence: Synthetic oligonucleotide
aagaagucgccaaguucuc

SEQ ID NO: 2468336 - RNA, 19 nt, Artificial Sequence
  Description of Artificial Sequence: Synthetic oligonucleotide
gaugauggugagccccgcc

SEQ ID NO: 2468337 - RNA, 19 nt, Artificial Sequence
  Description of Artificial Sequence: Synthetic oligonucleotide
caaacggaguacucaguuc

SEQ ID NO: 2468338 - RNA, 19 nt, Artificial Sequence
  Description of Artificial Sequence: Synthetic oligonucleotide
aaggauccggcaaaacaga

SEQ ID NO: 2468339 - RNA, 19 nt, Artificial Sequence
  Description of Artificial Sequence: Synthetic oligonucleotide
aagagccccgggaagaaga

SEQ ID NO: 2468340 - RNA, 19 nt, Artificial Sequence
  Description of Artificial Sequence: Synthetic oligonucleotide
accagccuggugccgaccg

SEQ ID NO: 2468341 - RNA, 19 nt, Artificial Sequence
  Description of Artificial Sequence: Synthetic oligonucleotide
cauaggaccaguacaugaa

SEQ ID NO: 2468342 - RNA, 19 nt, Artificial Sequence
  Description of Artificial Sequence: Synthetic oligonucleotide
agucgccaaguucuccccg

SEQ ID NO: 2468343 - RNA, 19 nt, Artificial Sequence
  Description of Artificial Sequence: Synthetic oligonucleotide
uuaguccuuuguguugacc

SEQ ID NO: 2468344 - RNA, 19 nt, Artificial Sequence
  Description of Artificial Sequence: Synthetic oligonucleotide
gaagaagagcgcgccacug

SEQ ID NO: 2468345 - RNA, 19 nt, Artificial Sequence
  Description of Artificial Sequence: Synthetic oligonucleotide
augacugcaugaugcguga

SEQ ID NO: 2468346 - RNA, 19 nt, Artificial Sequence
  Description of Artificial Sequence: Synthetic oligonucleotide
auauuaaauggcacucgga

SEQ ID NO: 2468347 - RNA, 19 nt, Artificial Sequence
  Description of Artificial Sequence: Synthetic oligonucleotide
gaccaguacaugaagggaa

SEQ ID NO: 2468348 - RNA, 19 nt, Artificial Sequence
  Description of Artificial Sequence: Synthetic oligonucleotide
ugacacaaacggaguacuc

SEQ ID NO: 2468349 - RNA, 19 nt, Artificial Sequence
  Description of Artificial Sequence: Synthetic oligonucleotide
ggagcuucugugaaacagg

SEQ ID NO: 2468350 - RNA, 19 nt, Artificial Sequence
  Description of Artificial Sequence: Synthetic oligonucleotide
caggaaguuucggaaaaug

SEQ ID NO: 2468351 - RNA, 19 nt, Artificial Sequence
  Description of Artificial Sequence: Synthetic oligonucleotide
gaguaauuaaccauccuuu

SEQ ID NO: 2468352 - RNA, 19 nt, Artificial Sequence
  Description of Artificial Sequence: Synthetic oligonucleotide
augccugucugagaccacg

SEQ ID NO: 2468353 - RNA, 19 nt, Artificial Sequence
  Description of Artificial Sequence: Synthetic oligonucleotide
gucgccaaguucuccccgg

SEQ ID NO: 2468354 - RNA, 19 nt, Artificial Sequence
  Description of Artificial Sequence: Synthetic oligonucleotide
aacucugcccagugacaca

SEQ ID NO: 2468355 - RNA, 19 nt, Artificial Sequence
  Description of Artificial Sequence: Synthetic oligonucleotide
gacaaacaggaugacugca

SEQ ID NO: 2468356 - RNA, 19 nt, Artificial Sequence
  Description of Artificial Sequence: Synthetic oligonucleotide
ucggcaccauucacagagg

SEQ ID NO: 2468357 - RNA, 19 nt, Artificial Sequence
  Description of Artificial Sequence: Synthetic oligonucleotide
ucgucgguccauuccggcc

SEQ ID NO: 2468358 - RNA, 19 nt, Artificial Sequence
  Description of Artificial Sequence: Synthetic oligonucleotide
ugaccuuauaaaggagggu

SEQ ID NO: 2468359 - RNA, 19 nt, Artificial Sequence
  Description of Artificial Sequence: Synthetic oligonucleotide
ggacaaacaggaugacugc

SEQ ID NO: 2468360 - RNA, 19 nt, Artificial Sequence
  Description of Artificial Sequence: Synthetic oligonucleotide
cauagaucauguauggaau

SEQ ID NO: 2468361 - RNA, 19 nt, Artificial Sequence
  Description of Artificial Sequence: Synthetic oligonucleotide
ucggaaaaugguggcacgu

SEQ ID NO: 2468362 - RNA, 19 nt, Artificial Sequence
  Description of Artificial Sequence: Synthetic oligonucleotide
accauuaggcgguuuucaa

SEQ ID NO: 2468363 - RNA, 19 nt, Artificial Sequence
  Description of Artificial Sequence: Synthetic oligonucleotide
cagcaaugagaaccaguag

SEQ ID NO: 2468364 - RNA, 19 nt, Artificial Sequence
  Description of Artificial Sequence: Synthetic oligonucleotide
ucuccccggagcuucugug

SEQ ID NO: 2468365 - RNA, 19 nt, Artificial Sequence
  Description of Artificial Sequence: Synthetic oligonucleotide
cauacucucuggcaagcca

SEQ ID NO: 2468366 - RNA, 19 nt, Artificial Sequence
  Description of Artificial Sequence: Synthetic oligonucleotide
agcgcgaagagccccggga

SEQ ID NO: 2468367 - RNA, 19 nt, Artificial Sequence
  Description of Artificial Sequence: Synthetic oligonucleotide
gagguacauggcauagcag

SEQ ID NO: 2468368 - RNA, 19 nt, Artificial Sequence
  Description of Artificial Sequence: Synthetic oligonucleotide
gaccgucaggcagucgucg

SEQ ID NO: 2468369 - RNA, 19 nt, Artificial Sequence
  Description of Artificial Sequence: Synthetic oligonucleotide
ugaggauuccauugaccuu

SEQ ID NO: 2468370 - RNA, 19 nt, Artificial Sequence
  Description of Artificial Sequence: Synthetic oligonucleotide
gggauauuaaauggcacuc

SEQ ID NO: 2468371 - RNA, 19 nt, Artificial Sequence
  Description of Artificial Sequence: Synthetic oligonucleotide
ugagugccugacuccugag

SEQ ID NO: 2468372 - RNA, 19 nt, Artificial Sequence
  Description of Artificial Sequence: Synthetic oligonucleotide
aggcuuaguccuuuguguu

SEQ ID NO: 2468373 - RNA, 19 nt, Artificial Sequence
  Description of Artificial Sequence: Synthetic oligonucleotide
agaucauguauggaaucaa

SEQ ID NO: 2468374 - RNA, 19 nt, Artificial Sequence
  Description of Artificial Sequence: Synthetic oligonucleotide
aguccuuuguguugaccau

SEQ ID NO: 2468375 - RNA, 19 nt, Artificial Sequence
  Description of Artificial Sequence: Synthetic oligonucleotide
ugucugagaccacguugcu

SEQ ID NO: 2468376 - RNA, 19 nt, Artificial Sequence
  Description of Artificial Sequence: Synthetic oligonucleotide
cugagcgcgaagagccccg

SEQ ID NO: 2468377 - RNA, 19 nt, Artificial Sequence
  Description of Artificial Sequence: Synthetic oligonucleotide
caguguaaagggauauuaa

SEQ ID NO: 2468378 - RNA, 19 nt, Artificial Sequence
  Description of Artificial Sequence: Synthetic oligonucleotide
aaugccugucugagaccac

SEQ ID NO: 2468379 - RNA, 19 nt, Artificial Sequence
  Description of Artificial Sequence: Synthetic oligonucleotide
ugcaugaugcgugaccauu

SEQ ID NO: 2468380 - RNA, 19 nt, Artificial Sequence
  Description of Artificial Sequence: Synthetic oligonucleotide
cuggugccgaccgucaggc

SEQ ID NO: 2468381 - RNA, 19 nt, Artificial Sequence
  Description of Artificial Sequence: Synthetic oligonucleotide
agaugauggugagccccgc

SEQ ID NO: 2468382 - RNA, 19 nt, Artificial Sequence
  Description of Artificial Sequence: Synthetic oligonucleotide
gugugaggauuccauugac

SEQ ID NO: 2468383 - RNA, 19 nt, Artificial Sequence
  Description of Artificial Sequence: Synthetic oligonucleotide
gugaagaugcagccaacaa

SEQ ID NO: 2468384 - RNA, 19 nt, Artificial Sequence
  Description of Artificial Sequence: Synthetic oligonucleotide
gcaggcuuaguccuuugug

SEQ ID NO: 2468385 - RNA, 19 nt, Artificial Sequence
  Description of Artificial Sequence: Synthetic oligonucleotide
gcagaugauggugagcccc

SEQ ID NO: 2468386 - RNA, 19 nt, Artificial Sequence
  Description of Artificial Sequence: Synthetic oligonucleotide
gaccauuaggcgguuuuca

SEQ ID NO: 2468387 - RNA, 19 nt, Artificial Sequence
  Description of Artificial Sequence: Synthetic oligonucleotide
caaugccugucugagacca

SEQ ID NO: 2468388 - RNA, 19 nt, Artificial Sequence
  Description of Artificial Sequence: Synthetic oligonucleotide
uggucccugguucggcacc

SEQ ID NO: 2468389 - RNA, 19 nt, Artificial Sequence
  Description of Artificial Sequence: Synthetic oligonucleotide
cuugcacagcaaugagaac

SEQ ID NO: 2468390 - RNA, 19 nt, Artificial Sequence
  Description of Artificial Sequence: Synthetic oligonucleotide
agccaacaaagaagucgcc

SEQ ID NO: 2468391 - RNA, 19 nt, Artificial Sequence
  Description of Artificial Sequence: Synthetic oligonucleotide
cauugcaguguaaagggau

SEQ ID NO: 2468392 - RNA, 19 nt, Artificial Sequence
  Description of Artificial Sequence: Synthetic oligonucleotide
cacgucugaguuucugguc

SEQ ID NO: 2468393 - RNA, 19 nt, Artificial Sequence
  Description of Artificial Sequence: Synthetic oligonucleotide
guguugaccauaggaccag

SEQ ID NO: 2468394 - RNA, 19 nt, Artificial Sequence
  Description of Artificial Sequence: Synthetic oligonucleotide
agcaggcuuaguccuuugu

SEQ ID NO: 2468395 - RNA, 19 nt, Artificial Sequence
  Description of Artificial Sequence: Synthetic oligonucleotide
guuucggaaaaugguggca

SEQ ID NO: 2468396 - RNA, 19 nt, Artificial Sequence
  Description of Artificial Sequence: Synthetic oligonucleotide
ggcuuaguccuuuguguug

SEQ ID NO: 2468397 - RNA, 19 nt, Artificial Sequence
  Description of Artificial Sequence: Synthetic oligonucleotide
guacauggcauagcaguca

SEQ ID NO: 2468398 - RNA, 19 nt, Artificial Sequence
  Description of Artificial Sequence: Synthetic oligonucleotide
ugcugagcgcgaagagccc

SEQ ID NO: 2468399 - RNA, 19 nt, Artificial Sequence
  Description of Artificial Sequence: Synthetic oligonucleotide
auccggcaaaacagaaagg

SEQ ID NO: 2468400 - RNA, 19 nt, Artificial Sequence
  Description of Artificial Sequence: Synthetic oligonucleotide
cauuccggccgcgagcggc

SEQ ID NO: 2468401 - RNA, 19 nt, Artificial Sequence
  Description of Artificial Sequence: Synthetic oligonucleotide
auacucucuggcaagccaa

SEQ ID NO: 2468402 - RNA, 19 nt, Artificial Sequence
  Description of Artificial Sequence: Synthetic oligonucleotide
ucaggaaguuucggaaaau

SEQ ID NO: 2468403 - RNA, 19 nt, Artificial Sequence
  Description of Artificial Sequence: Synthetic oligonucleotide
gcagucauagaucauguau

SEQ ID NO: 2468404 - RNA, 19 nt, Artificial Sequence
  Description of Artificial Sequence: Synthetic oligonucleotide
agucgucgucgguccauuc

SEQ ID NO: 2468405 - RNA, 19 nt, Artificial Sequence
  Description of Artificial Sequence: Synthetic oligonucleotide
gagaguaauuaaccauccu

SEQ ID NO: 2468406 - RNA, 19 nt, Artificial Sequence
  Description of Artificial Sequence: Synthetic oligonucleotide
ugaccauuaggcgguuuuc

SEQ ID NO: 2468407 - RNA, 19 nt, Artificial Sequence
  Description of Artificial Sequence: Synthetic oligonucleotide
ugccugucugagaccacgu

SEQ ID NO: 2468408 - RNA, 19 nt, Artificial Sequence
  Description of Artificial Sequence: Synthetic oligonucleotide
accuuauaaaggaggguau

SEQ ID NO: 2468409 - RNA, 19 nt, Artificial Sequence
  Description of Artificial Sequence: Synthetic oligonucleotide
gaagagcgcgccacuggcc

SEQ ID NO: 2468410 - RNA, 19 nt, Artificial Sequence
  Description of Artificial Sequence: Synthetic oligonucleotide
ggaaguuucggaaaauggu

SEQ ID NO: 2468411 - RNA, 19 nt, Artificial Sequence
  Description of Artificial Sequence: Synthetic oligonucleotide
auuggccacauugcagugu

SEQ ID NO: 2468412 - RNA, 19 nt, Artificial Sequence
  Description of Artificial Sequence: Synthetic oligonucleotide
guccauuccggccgcgagc

SEQ ID NO: 2468413 - RNA, 19 nt, Artificial Sequence
  Description of Artificial Sequence: Synthetic oligonucleotide
uccccggagcuucugugaa

SEQ ID NO: 2468414 - RNA, 19 nt, Artificial Sequence
  Description of Artificial Sequence: Synthetic oligonucleotide
ugcagccaacaaagaaguc

SEQ ID NO: 2468415 - RNA, 19 nt, Artificial Sequence
  Description of Artificial Sequence: Synthetic oligonucleotide
gaccacguugcugcaggag

SEQ ID NO: 2468416 - RNA, 19 nt, Artificial Sequence
  Description of Artificial Sequence: Synthetic oligonucleotide
cugugaagaugcagccaac

SEQ ID NO: 2468417 - RNA, 19 nt, Artificial Sequence
  Description of Artificial Sequence: Synthetic oligonucleotide
acaccagccuggugccgac

SEQ ID NO: 2468418 - RNA, 19 nt, Artificial Sequence
  Description of Artificial Sequence: Synthetic oligonucleotide
cuuaguccuuuguguugac

SEQ ID NO: 2468419 - RNA, 19 nt, Artificial Sequence
  Description of Artificial Sequence: Synthetic oligonucleotide
gugagccccgccccgguag

SEQ ID NO: 2468420 - RNA, 19 nt, Artificial Sequence
  Description of Artificial Sequence: Synthetic oligonucleotide
accauaggaccaguacaug

SEQ ID NO: 2468421 - RNA, 19 nt, Artificial Sequence
  Description of Artificial Sequence: Synthetic oligonucleotide
gguggcacgucugaguuuc

SEQ ID NO: 2468422 - RNA, 19 nt, Artificial Sequence
  Description of Artificial Sequence: Synthetic oligonucleotide
cagagguacauggcauagc

SEQ ID NO: 2468423 - RNA, 19 nt, Artificial Sequence
  Description of Artificial Sequence: Synthetic oligonucleotide
gaccauaggaccaguacau

SEQ ID NO: 2468424 - RNA, 19 nt, Artificial Sequence
  Description of Artificial Sequence: Synthetic oligonucleotide
aggaggguaugcugcugcu

SEQ ID NO: 2468425 - RNA, 19 nt, Artificial Sequence
  Description of Artificial Sequence: Synthetic oligonucleotide
acauugcaguguaaaggga

SEQ ID NO: 2468426 - RNA, 19 nt, Artificial Sequence
  Description of Artificial Sequence: Synthetic oligonucleotide
gucgucgguccauuccggc

SEQ ID NO: 2468427 - RNA, 19 nt, Artificial Sequence
  Description of Artificial Sequence: Synthetic oligonucleotide
ggcagcuagugugagugcc

SEQ ID NO: 2468428 - RNA, 19 nt, Artificial Sequence
  Description of Artificial Sequence: Synthetic oligonucleotide
gucaggcagucgucgucgg

SEQ ID NO: 2468429 - RNA, 19 nt, Artificial Sequence
  Description of Artificial Sequence: Synthetic oligonucleotide
ucgccaaguucuccccgga

SEQ ID NO: 2468430 - RNA, 19 nt, Artificial Sequence
  Description of Artificial Sequence: Synthetic oligonucleotide
gguaugcugcugcuuuagc

SEQ ID NO: 2468431 - RNA, 19 nt, Artificial Sequence
  Description of Artificial Sequence: Synthetic oligonucleotide
gaggguaugcugcugcuuu

SEQ ID NO: 2468432 - RNA, 19 nt, Artificial Sequence
  Description of Artificial Sequence: Synthetic oligonucleotide
agcagucauagaucaugua

SEQ ID NO: 2468433 - RNA, 19 nt, Artificial Sequence
  Description of Artificial Sequence: Synthetic oligonucleotide
ggcauagcagucauagauc

SEQ ID NO: 2468434 - RNA, 19 nt, Artificial Sequence
  Description of Artificial Sequence: Synthetic oligonucleotide
cugguucggcaccauucac

SEQ ID NO: 2468435 - RNA, 19 nt, Artificial Sequence
  Description of Artificial Sequence: Synthetic oligonucleotide
ugagccccgccccgguagc

SEQ ID NO: 2468436 - RNA, 19 nt, Artificial Sequence
  Description of Artificial Sequence: Synthetic oligonucleotide
gguacauggcauagcaguc

SEQ ID NO: 2468437 - RNA, 19 nt, Artificial Sequence
  Description of Artificial Sequence: Synthetic oligonucleotide
uguugaccauaggaccagu

SEQ ID NO: 2468438 - RNA, 19 nt, Artificial Sequence
  Description of Artificial Sequence: Synthetic oligonucleotide
ccggcaaaacagaaaggug

SEQ ID NO: 2468439 - RNA, 19 nt, Artificial Sequence
  Description of Artificial Sequence: Synthetic oligonucleotide
caccgaggacaccagccug

SEQ ID NO: 2468440 - RNA, 19 nt, Artificial Sequence
  Description of Artificial Sequence: Synthetic oligonucleotide
uucuggucccugguucggc

SEQ ID NO: 2468441 - RNA, 19 nt, Artificial Sequence
  Description of Artificial Sequence: Synthetic oligonucleotide
gcuagugugagugccugac

SEQ ID NO: 2468442 - RNA, 19 nt, Artificial Sequence
  Description of Artificial Sequence: Synthetic oligonucleotide
ggaaaaugguggcacgucu

SEQ ID NO: 2468443 - RNA, 19 nt, Artificial Sequence
  Description of Artificial Sequence: Synthetic oligonucleotide
uggcacgucugaguuucug

SEQ ID NO: 2468444 - RNA, 19 nt, Artificial Sequence
  Description of Artificial Sequence: Synthetic oligonucleotide
gacaccagccuggugccga

SEQ ID NO: 2468445 - RNA, 19 nt, Artificial Sequence
  Description of Artificial Sequence: Synthetic oligonucleotide
gcuuaguccuuuguguuga

SEQ ID NO: 2468446 - RNA, 19 nt, Artificial Sequence
  Description of Artificial Sequence: Synthetic oligonucleotide
accgucaggcagucgucgu

SEQ ID NO: 2468447 - RNA, 19 nt, Artificial Sequence
  Description of Artificial Sequence: Synthetic oligonucleotide
uggcaagccaaugccuguc

SEQ ID NO: 2468448 - RNA, 19 nt, Artificial Sequence
  Description of Artificial Sequence: Synthetic oligonucleotide
gguccauuccggccgcgag

SEQ ID NO: 2468449 - RNA, 19 nt, Artificial Sequence
  Description of Artificial Sequence: Synthetic oligonucleotide
cagugucaaagagccgggc

SEQ ID NO: 2468450 - RNA, 19 nt, Artificial Sequence
  Description of Artificial Sequence: Synthetic oligonucleotide
agagccccgggaagaagag

SEQ ID NO: 2468451 - RNA, 19 nt, Artificial Sequence
  Description of Artificial Sequence: Synthetic oligonucleotide
cagcuagugugagugccug

SEQ ID NO: 2468452 - RNA, 19 nt, Artificial Sequence
  Description of Artificial Sequence: Synthetic oligonucleotide
cacagcaaugagaaccagu

SEQ ID NO: 2468453 - RNA, 19 nt, Artificial Sequence
  Description of Artificial Sequence: Synthetic oligonucleotide
cuggucccugguucggcac

SEQ ID NO: 2468454 - RNA, 19 nt, Artificial Sequence
  Description of Artificial Sequence: Synthetic oligonucleotide
gugacacaaacggaguacu

SEQ ID NO: 2468455 - RNA, 19 nt, Artificial Sequence
  Description of Artificial Sequence: Synthetic oligonucleotide
cacagagguacauggcaua

SEQ ID NO: 2468456 - RNA, 19 nt, Artificial Sequence
  Description of Artificial Sequence: Synthetic oligonucleotide
agcggcgcagcgcccaggu

SEQ ID NO: 2468457 - RNA, 19 nt, Artificial Sequence
  Description of Artificial Sequence: Synthetic oligonucleotide
ccagacauacucucuggca

SEQ ID NO: 2468458 - RNA, 19 nt, Artificial Sequence
  Description of Artificial Sequence: Synthetic oligonucleotide
cugcaccgaggacaccagc

SEQ ID NO: 2468459 - RNA, 19 nt, Artificial Sequence
  Description of Artificial Sequence: Synthetic oligonucleotide
agaccacguugcugcagga

SEQ ID NO: 2468460 - RNA, 19 nt, Artificial Sequence
  Description of Artificial Sequence: Synthetic oligonucleotide
ggaccaguacaugaaggga

SEQ ID NO: 2468461 - RNA, 19 nt, Artificial Sequence
  Description of Artificial Sequence: Synthetic oligonucleotide
cagugacacaaacggagua

SEQ ID NO: 2468462 - RNA, 19 nt, Artificial Sequence
  Description of Artificial Sequence: Synthetic oligonucleotide
cacguugcugcaggagcag

SEQ ID NO: 2468463 - RNA, 19 nt, Artificial Sequence
  Description of Artificial Sequence: Synthetic oligonucleotide
aggauccggcaaaacagaa

SEQ ID NO: 2468464 - RNA, 19 nt, Artificial Sequence
  Description of Artificial Sequence: Synthetic oligonucleotide
caccauucacagagguaca

SEQ ID NO: 2468465 - RNA, 19 nt, Artificial Sequence
  Description of Artificial Sequence: Synthetic oligonucleotide
cgucgguccauuccggccg

SEQ ID NO: 2468466 - RNA, 19 nt, Artificial Sequence
  Description of Artificial Sequence: Synthetic oligonucleotide
aggguaugcugcugcuuua

SEQ ID NO: 2468467 - RNA, 19 nt, Artificial Sequence
  Description of Artificial Sequence: Synthetic oligonucleotide
gagcgcgccacuggccaag

SEQ ID NO: 2468468 - RNA, 19 nt, Artificial Sequence
  Description of Artificial Sequence: Synthetic oligonucleotide
gugaccauuaggcgguuuu

SEQ ID NO: 2468469 - RNA, 19 nt, Artificial Sequence
  Description of Artificial Sequence: Synthetic oligonucleotide
guacucaguucugcuguga

SEQ ID NO: 2468470 - RNA, 19 nt, Artificial Sequence
  Description of Artificial Sequence: Synthetic oligonucleotide
gucgguccauuccggccgc

SEQ ID NO: 2468471 - RNA, 19 nt, Artificial Sequence
  Description of Artificial Sequence: Synthetic oligonucleotide
cuccccggagcuucuguga

SEQ ID NO: 2468472 - RNA, 19 nt, Artificial Sequence
  Description of Artificial Sequence: Synthetic oligonucleotide
agcgcgccacuggccaagc

SEQ ID NO: 2468473 - RNA, 19 nt, Artificial Sequence
  Description of Artificial Sequence: Synthetic oligonucleotide
ccugagaguaauuaaccau

SEQ ID NO: 2468474 - RNA, 19 nt, Artificial Sequence
  Description of Artificial Sequence: Synthetic oligonucleotide
guuuucaaucaggaaguuu

SEQ ID NO: 2468475 - RNA, 19 nt, Artificial Sequence
  Description of Artificial Sequence: Synthetic oligonucleotide
guugaccauaggaccagua

SEQ ID NO: 2468476 - RNA, 19 nt, Artificial Sequence
  Description of Artificial Sequence: Synthetic oligonucleotide
ccauucacagagguacaug

SEQ ID NO: 2468477 - RNA, 19 nt, Artificial Sequence
  Description of Artificial Sequence: Synthetic oligonucleotide
ccuuuguguugaccauagg

SEQ ID NO: 2468478 - RNA, 19 nt, Artificial Sequence
  Description of Artificial Sequence: Synthetic oligonucleotide
gcugagcgcgaagagcccc

SEQ ID NO: 2468479 - RNA, 19 nt, Artificial Sequence
  Description of Artificial Sequence: Synthetic oligonucleotide
ucccugguucggcaccauu

SEQ ID NO: 2468480 - RNA, 19 nt, Artificial Sequence
  Description of Artificial Sequence: Synthetic oligonucleotide
ggcgguuuucaaucaggaa

SEQ ID NO: 2468481 - RNA, 19 nt, Artificial Sequence
  Description of Artificial Sequence: Synthetic oligonucleotide
cacaaacggaguacucagu

SEQ ID NO: 2468482 - RNA, 19 nt, Artificial Sequence
  Description of Artificial Sequence: Synthetic oligonucleotide
cccgggaagaagagcgcgc

SEQ ID NO: 2468483 - RNA, 19 nt, Artificial Sequence
  Description of Artificial Sequence: Synthetic oligonucleotide
cccggagcuucugugaaac

SEQ ID NO: 2468484 - RNA, 19 nt, Artificial Sequence
  Description of Artificial Sequence: Synthetic oligonucleotide
acguugcugcaggagcaga

SEQ ID NO: 2468485 - RNA, 19 nt, Artificial Sequence
  Description of Artificial Sequence: Synthetic oligonucleotide
gggagagaugaggauggca

SEQ ID NO: 2468486 - RNA, 19 nt, Artificial Sequence
  Description of Artificial Sequence: Synthetic oligonucleotide
guccuuuguguugaccaua

SEQ ID NO: 2468487 - RNA, 19 nt, Artificial Sequence
  Description of Artificial Sequence: Synthetic oligonucleotide
gugugagugccugacuccu

SEQ ID NO: 2468488 - RNA, 19 nt, Artificial Sequence
  Description of Artificial Sequence: Synthetic oligonucleotide
gaguuucuggucccugguu

SEQ ID NO: 2468489 - RNA, 19 nt, Artificial Sequence
  Description of Artificial Sequence: Synthetic oligonucleotide
ccugguucggcaccauuca

SEQ ID NO: 2468490 - RNA, 19 nt, Artificial Sequence
  Description of Artificial Sequence: Synthetic oligonucleotide
ccgggaagaagagcgcgcc

SEQ ID NO: 2468491 - RNA, 19 nt, Artificial Sequence
  Description of Artificial Sequence: Synthetic oligonucleotide
cugagaccacguugcugca

SEQ ID NO: 2468492 - RNA, 19 nt, Artificial Sequence
  Description of Artificial Sequence: Synthetic oligonucleotide
cggcgcagcgcccaggugc

SEQ ID NO: 2468493 - RNA, 19 nt, Artificial Sequence
  Description of Artificial Sequence: Synthetic oligonucleotide
cagccuggugccgaccguc

SEQ ID NO: 2468494 - RNA, 19 nt, Artificial Sequence
  Description of Artificial Sequence: Synthetic oligonucleotide
agagcgcgccacuggccaa

SEQ ID NO: 2468495 - RNA, 19 nt, Artificial Sequence
  Description of Artificial Sequence: Synthetic oligonucleotide
cuagugugagugccugacu

SEQ ID NO: 2468496 - RNA, 19 nt, Artificial Sequence
  Description of Artificial Sequence: Synthetic oligonucleotide
ucgguccauuccggccgcg

SEQ ID NO: 2468497 - RNA, 19 nt, Artificial Sequence
  Description of Artificial Sequence: Synthetic oligonucleotide
cgguuuucaaucaggaagu

SEQ ID NO: 2468498 - RNA, 19 nt, Artificial Sequence
  Description of Artificial Sequence: Synthetic oligonucleotide
ccacguugcugcaggagca

SEQ ID NO: 2468499 - RNA, 19 nt, Artificial Sequence
  Description of Artificial Sequence: Synthetic oligonucleotide
cgucugaguuucugguccc

SEQ ID NO: 2468500 - RNA, 19 nt, Artificial Sequence
  Description of Artificial Sequence: Synthetic oligonucleotide
ccugcaccgaggacaccag

SEQ ID NO: 2468501 - RNA, 19 nt, Artificial Sequence
  Description of Artificial Sequence: Synthetic oligonucleotide
ccccgggaagaagagcgcg

SEQ ID NO: 2468502 - RNA, 19 nt, Artificial Sequence
  Description of Artificial Sequence: Synthetic oligonucleotide
aguucuccccggagcuucu

SEQ ID NO: 2468503 - RNA, 19 nt, Artificial Sequence
  Description of Artificial Sequence: Synthetic oligonucleotide
aggauuccauugaccuuau

SEQ ID NO: 2468504 - RNA, 19 nt, Artificial Sequence
  Description of Artificial Sequence: Synthetic oligonucleotide
gccacuggccaagcgucag

SEQ ID NO: 2468505 - RNA, 19 nt, Artificial Sequence
  Description of Artificial Sequence: Synthetic oligonucleotide
gcagcgcccaggugcugag

SEQ ID NO: 2468506 - RNA, 19 nt, Artificial Sequence
  Description of Artificial Sequence: Synthetic oligonucleotide
gagcggcgcagcgcccagg

SEQ ID NO: 2468507 - RNA, 19 nt, Artificial Sequence
  Description of Artificial Sequence: Synthetic oligonucleotide
ccgcgagcggcgcagcgcc

SEQ ID NO: 2468508 - RNA, 19 nt, Artificial Sequence
  Description of Artificial Sequence: Synthetic oligonucleotide
gcaugaugcgugaccauua

SEQ ID NO: 2468509 - RNA, 19 nt, Artificial Sequence
  Description of Artificial Sequence: Synthetic oligonucleotide
ggacagugugaggauucca

SEQ ID NO: 2468510 - RNA, 19 nt, Artificial Sequence
  Description of Artificial Sequence: Synthetic oligonucleotide
guucuccccggagcuucug

SEQ ID NO: 2468511 - RNA, 19 nt, Artificial Sequence
  Description of Artificial Sequence: Synthetic oligonucleotide
ccacuggccaagcgucagc

SEQ ID NO: 2468512 - RNA, 19 nt, Artificial Sequence
  Description of Artificial Sequence: Synthetic oligonucleotide
cgucgucgguccauuccgg

SEQ ID NO: 2468513 - RNA, 19 nt, Artificial Sequence
  Description of Artificial Sequence: Synthetic oligonucleotide
gcgccacuggccaagcguc

SEQ ID NO: 2468514 - RNA, 19 nt, Artificial Sequence
  Description of Artificial Sequence: Synthetic oligonucleotide
cgcgaagagccccgggaag

SEQ ID NO: 2468515 - RNA, 19 nt, Artificial Sequence
  Description of Artificial Sequence: Synthetic oligonucleotide
gcaccgaggacaccagccu

SEQ ID NO: 2468516 - RNA, 19 nt, Artificial Sequence
  Description of Artificial Sequence: Synthetic oligonucleotide
guacaaggacaaacaggau

SEQ ID NO: 2468517 - RNA, 19 nt, Artificial Sequence
  Description of Artificial Sequence: Synthetic oligonucleotide
ggcaagccaaugccugucu

SEQ ID NO: 2468518 - RNA, 19 nt, Artificial Sequence
  Description of Artificial Sequence: Synthetic oligonucleotide
ccgggcugccuucuugcac

SEQ ID NO: 2468519 - RNA, 19 nt, Artificial Sequence
  Description of Artificial Sequence: Synthetic oligonucleotide
ugccgaccgucaggcaguc

SEQ ID NO: 2468520 - RNA, 19 nt, Artificial Sequence
  Description of Artificial Sequence: Synthetic oligonucleotide
ggcaccauucacagaggua

SEQ ID NO: 2468521 - RNA, 19 nt, Artificial Sequence
  Description of Artificial Sequence: Synthetic oligonucleotide
gcgcgaagagccccgggaa

SEQ ID NO: 2468522 - RNA, 19 nt, Artificial Sequence
  Description of Artificial Sequence: Synthetic oligonucleotide
ccgaccgucaggcagucgu

SEQ ID NO: 2468523 - RNA, 19 nt, Artificial Sequence
  Description of Artificial Sequence: Synthetic oligonucleotide
cugacuccugagaguaauu

SEQ ID NO: 2468524 - RNA, 19 nt, Artificial Sequence
  Description of Artificial Sequence: Synthetic oligonucleotide
agccccgccccgguagcca

SEQ ID NO: 2468525 - RNA, 19 nt, Artificial Sequence
  Description of Artificial Sequence: Synthetic oligonucleotide
ccgucaggcagucgucguc

SEQ ID NO: 2468526 - RNA, 19 nt, Artificial Sequence
  Description of Artificial Sequence: Synthetic oligonucleotide
gcccagugacacaaacgga

SEQ ID NO: 2468527 - RNA, 19 nt, Artificial Sequence
  Description of Artificial Sequence: Synthetic oligonucleotide
ggucccugguucggcacca

SEQ ID NO: 2468528 - RNA, 19 nt, Artificial Sequence
  Description of Artificial Sequence: Synthetic oligonucleotide
gucugaguuucuggucccu

SEQ ID NO: 2468529 - RNA, 19 nt, Artificial Sequence
  Description of Artificial Sequence: Synthetic oligonucleotide
cagcgcccaggugcugagc

SEQ ID NO: 2468530 - RNA, 19 nt, Artificial Sequence
  Description of Artificial Sequence: Synthetic oligonucleotide
cgguagccagcacugccug

SEQ ID NO: 2468531 - RNA, 19 nt, Artificial Sequence
  Description of Artificial Sequence: Synthetic oligonucleotide
ggcagucgucgucggucca

SEQ ID NO: 2468532 - RNA, 19 nt, Artificial Sequence
  Description of Artificial Sequence: Synthetic oligonucleotide
gcgcgccacuggccaagcg

SEQ ID NO: 2468533 - RNA, 19 nt, Artificial Sequence
  Description of Artificial Sequence: Synthetic oligonucleotide
cugcaugaugcgugaccau

SEQ ID NO: 2468534 - RNA, 19 nt, Artificial Sequence
  Description of Artificial Sequence: Synthetic oligonucleotide
gccccgggaagaagagcgc

SEQ ID NO: 2468535 - RNA, 19 nt, Artificial Sequence
  Description of Artificial Sequence: Synthetic oligonucleotide
gguuuucaaucaggaaguu

SEQ ID NO: 2468536 - RNA, 19 nt, Artificial Sequence
  Description of Artificial Sequence: Synthetic oligonucleotide
gccgggcugccuucuugca

SEQ ID NO: 2468537 - RNA, 19 nt, Artificial Sequence
  Description of Artificial Sequence: Synthetic oligonucleotide
ggauuccauugaccuuaua

SEQ ID NO: 2468538 - RNA, 19 nt, Artificial Sequence
  Description of Artificial Sequence: Synthetic oligonucleotide
cgaccgucaggcagucguc

SEQ ID NO: 2468539 - RNA, 19 nt, Artificial Sequence
  Description of Artificial Sequence: Synthetic oligonucleotide
ccauuccggccgcgagcgg

SEQ ID NO: 2468540 - RNA, 19 nt, Artificial Sequence
  Description of Artificial Sequence: Synthetic oligonucleotide
ggagcaggcuuaguccuuu

SEQ ID NO: 2468541 - RNA, 19 nt, Artificial Sequence
  Description of Artificial Sequence: Synthetic oligonucleotide
ccggagcuucugugaaaca

SEQ ID NO: 2468542 - RNA, 19 nt, Artificial Sequence
  Description of Artificial Sequence: Synthetic oligonucleotide
ggugagccccgccccggua

SEQ ID NO: 2468543 - RNA, 19 nt, Artificial Sequence
  Description of Artificial Sequence: Synthetic oligonucleotide
gcgagcggcgcagcgccca

SEQ ID NO: 2468544 - RNA, 19 nt, Artificial Sequence
  Description of Artificial Sequence: Synthetic oligonucleotide
gccgaccgucaggcagucg

SEQ ID NO: 2468545 - RNA, 19 nt, Artificial Sequence
  Description of Artificial Sequence: Synthetic oligonucleotide
gcggcgcagcgcccaggug

SEQ ID NO: 2468546 - RNA, 19 nt, Artificial Sequence
  Description of Artificial Sequence: Synthetic oligonucleotide
ggaggguaugcugcugcuu

SEQ ID NO: 2468547 - RNA, 19 nt, Artificial Sequence
  Description of Artificial Sequence: Synthetic oligonucleotide
cgcgccacuggccaagcgu

SEQ ID NO: 2468548 - RNA, 19 nt, Artificial Sequence
  Description of Artificial Sequence: Synthetic oligonucleotide
gcagucgucgucgguccau

SEQ ID NO: 2468549 - RNA, 19 nt, Artificial Sequence
  Description of Artificial Sequence: Synthetic oligonucleotide
ccccgccccgguagccagc

SEQ ID NO: 2468550 - RNA, 19 nt, Artificial Sequence
  Description of Artificial Sequence: Synthetic oligonucleotide
gccugacuccugagaguaa

SEQ ID NO: 2468551 - RNA, 19 nt, Artificial Sequence
  Description of Artificial Sequence: Synthetic oligonucleotide
cgaagagccccgggaagaa

SEQ ID NO: 2468552 - RNA, 19 nt, Artificial Sequence
  Description of Artificial Sequence: Synthetic oligonucleotide
cagucgucgucgguccauu

SEQ ID NO: 2468553 - RNA, 19 nt, Artificial Sequence
  Description of Artificial Sequence: Synthetic oligonucleotide
cggcaccauucacagaggu

SEQ ID NO: 2468554 - RNA, 19 nt, Artificial Sequence
  Description of Artificial Sequence: Synthetic oligonucleotide
cgccacuggccaagcguca

SEQ ID NO: 2468555 - RNA, 19 nt, Artificial Sequence
  Description of Artificial Sequence: Synthetic oligonucleotide
cgcagcgcccaggugcuga

SEQ ID NO: 2468556 - RNA, 19 nt, Artificial Sequence
  Description of Artificial Sequence: Synthetic oligonucleotide
cccgccccgguagccagca

SEQ ID NO: 2468557 - RNA, 19 nt, Artificial Sequence
  Description of Artificial Sequence: Synthetic oligonucleotide
ccagccuggugccgaccgu

SEQ ID NO: 2468558 - RNA, 19 nt, Artificial Sequence
  Description of Artificial Sequence: Synthetic oligonucleotide
gcgcagcgcccaggugcug

SEQ ID NO: 2468559 - RNA, 19 nt, Artificial Sequence
  Description of Artificial Sequence: Synthetic oligonucleotide
gcgugaccauuaggcgguu

SEQ ID NO: 2468560 - RNA, 19 nt, Artificial Sequence
  Description of Artificial Sequence: Synthetic oligonucleotide
cgugaccauuaggcgguuu

SEQ ID NO: 2468561 - RNA, 19 nt, Artificial Sequence
  Description of Artificial Sequence: Synthetic oligonucleotide
aaugucgcaauccugcaug

SEQ ID NO: 2468562 - RNA, 19 nt, Artificial Sequence
  Description of Artificial Sequence: Synthetic oligonucleotide
uacaccagcgagcagagcc

SEQ ID NO: 2468563 - RNA, 19 nt, Artificial Sequence
  Description of Artificial Sequence: Synthetic oligonucleotide
uucggaaugcagcuggugg

SEQ ID NO: 2468564 - RNA, 19 nt, Artificial Sequence
  Description of Artificial Sequence: Synthetic oligonucleotide
guaaucgcgaagcagcgcg

SEQ ID NO: 2468565 - RNA, 19 nt, Artificial Sequence
  Description of Artificial Sequence: Synthetic oligonucleotide
aaucggcuuguacuucucc

SEQ ID NO: 2468566 - RNA, 19 nt, Artificial Sequence
  Description of Artificial Sequence: Synthetic oligonucleotide
guuaaugucgcaauccugc

SEQ ID NO: 2468567 - RNA, 19 nt, Artificial Sequence
  Description of Artificial Sequence: Synthetic oligonucleotide
agugaauuggccucgcuca

SEQ ID NO: 2468568 - RNA, 19 nt, Artificial Sequence
  Description of Artificial Sequence: Synthetic oligonucleotide
caggugaagaaacucgucg

SEQ ID NO: 2468569 - RNA, 19 nt, Artificial Sequence
  Description of Artificial Sequence: Synthetic oligonucleotide
agcaaggccucuucgaagg

SEQ ID NO: 2468570 - RNA, 19 nt, Artificial Sequence
  Description of Artificial Sequence: Synthetic oligonucleotide
gaauuggccucgcucagcg

SEQ ID NO: 2468571 - RNA, 19 nt, Artificial Sequence
  Description of Artificial Sequence: Synthetic oligonucleotide
aacucgucgucguuaaugu

SEQ ID NO: 2468572 - RNA, 19 nt, Artificial Sequence
  Description of Artificial Sequence: Synthetic oligonucleotide
aagaacgcuuccgagugac

SEQ ID NO: 2468573 - RNA, 19 nt, Artificial Sequence
  Description of Artificial Sequence: Synthetic oligonucleotide
aaacucgucgucguuaaug

SEQ ID NO: 2468574 - RNA, 19 nt, Artificial Sequence
  Description of Artificial Sequence: Synthetic oligonucleotide
uccaggauccaccaacggc

SEQ ID NO: 2468575 - RNA, 19 nt, Artificial Sequence
  Description of Artificial Sequence: Synthetic oligonucleotide
ucggaaugcagcugguggg

SEQ ID NO: 2468576 - RNA, 19 nt, Artificial Sequence
  Description of Artificial Sequence: Synthetic oligonucleotide
gacccgagccucuugagag

SEQ ID NO: 2468577 - RNA, 19 nt, Artificial Sequence
  Description of Artificial Sequence: Synthetic oligonucleotide
gauccaacgcggcugcagg

SEQ ID NO: 2468578 - RNA, 19 nt, Artificial Sequence
  Description of Artificial Sequence: Synthetic oligonucleotide
gucgcaauccugcaugcgg

SEQ ID NO: 2468579 - RNA, 19 nt, Artificial Sequence
  Description of Artificial Sequence: Synthetic oligonucleotide
ucguuaaugucgcaauccu

SEQ ID NO: 2468580 - RNA, 19 nt, Artificial Sequence
  Description of Artificial Sequence: Synthetic oligonucleotide
ugcaccagugaauuggccu

SEQ ID NO: 2468581 - RNA, 19 nt, Artificial Sequence
  Description of Artificial Sequence: Synthetic oligonucleotide
ugaagaaacucgucgucgu

SEQ ID NO: 2468582 - RNA, 19 nt, Artificial Sequence
  Description of Artificial Sequence: Synthetic oligonucleotide
ugcaagaacgcuuccgagu

SEQ ID NO: 2468583 - RNA, 19 nt, Artificial Sequence
  Description of Artificial Sequence: Synthetic oligonucleotide
gggaagucgauccaacgcg

SEQ ID NO: 2468584 - RNA, 19 nt, Artificial Sequence
  Description of Artificial Sequence: Synthetic oligonucleotide
gugaagaaacucgucgucg

SEQ ID NO: 2468585 - RNA, 19 nt, Artificial Sequence
  Description of Artificial Sequence: Synthetic oligonucleotide
ucgaagguggccucgccag

SEQ ID NO: 2468586 - RNA, 19 nt, Artificial Sequence
  Description of Artificial Sequence: Synthetic oligonucleotide
uuaaugucgcaauccugca

SEQ ID NO: 2468587 - RNA, 19 nt, Artificial Sequence
  Description of Artificial Sequence: Synthetic oligonucleotide
ucguacaccagcgagcaga

SEQ ID NO: 2468588 - RNA, 19 nt, Artificial Sequence
  Description of Artificial Sequence: Synthetic oligonucleotide
uccucgaacagccucucgu

SEQ ID NO: 2468589 - RNA, 19 nt, Artificial Sequence
  Description of Artificial Sequence: Synthetic oligonucleotide
acagcccuggcuucgccgc

SEQ ID NO: 2468590 - RNA, 19 nt, Artificial Sequence
  Description of Artificial Sequence: Synthetic oligonucleotide
aucgaagggcgccucguac

SEQ ID NO: 2468591 - RNA, 19 nt, Artificial Sequence
  Description of Artificial Sequence: Synthetic oligonucleotide
augucgcaauccugcaugc

SEQ ID NO: 2468592 - RNA, 19 nt, Artificial Sequence
  Description of Artificial Sequence: Synthetic oligonucleotide
cucgccaggggccagggcg

SEQ ID NO: 2468593 - RNA, 19 nt, Artificial Sequence
  Description of Artificial Sequence: Synthetic oligonucleotide
aaccccacgucgaggaccc

SEQ ID NO: 2468594 - RNA, 19 nt, Artificial Sequence
  Description of Artificial Sequence: Synthetic oligonucleotide
gucucugcaggccucggcg

SEQ ID NO: 2468595 - RNA, 19 nt, Artificial Sequence
  Description of Artificial Sequence: Synthetic oligonucleotide
aggugaagaaacucgucgu

SEQ ID NO: 2468596 - RNA, 19 nt, Artificial Sequence
  Description of Artificial Sequence: Synthetic oligonucleotide
gacgguuacgcguggccgg

SEQ ID NO: 2468597 - RNA, 19 nt, Artificial Sequence
  Description of Artificial Sequence: Synthetic oligonucleotide
uuccgagugacgguuacgc

SEQ ID NO: 2468598 - RNA, 19 nt, Artificial Sequence
  Description of Artificial Sequence: Synthetic oligonucleotide
gucguuaaugucgcaaucc

SEQ ID NO: 2468599 - RNA, 19 nt, Artificial Sequence
  Description of Artificial Sequence: Synthetic oligonucleotide
ucgucgucguuaaugucgc

SEQ ID NO: 2468600 - RNA, 19 nt, Artificial Sequence
  Description of Artificial Sequence: Synthetic oligonucleotide
augcgguucuccaggaucc

SEQ ID NO: 2468601 - RNA, 19 nt, Artificial Sequence
  Description of Artificial Sequence: Synthetic oligonucleotide
aagucgauccaacgcggcu

SEQ ID NO: 2468602 - RNA, 19 nt, Artificial Sequence
  Description of Artificial Sequence: Synthetic oligonucleotide
uuuugcaagaccugcucuu

SEQ ID NO: 2468603 - RNA, 19 nt, Artificial Sequence
  Description of Artificial Sequence: Synthetic oligonucleotide
ugcaagaccugcucuuccc

SEQ ID NO: 2468604 - RNA, 19 nt, Artificial Sequence
  Description of Artificial Sequence: Synthetic oligonucleotide
aaucgcgaagcagcgcgcg

SEQ ID NO: 2468605 - RNA, 19 nt, Artificial Sequence
  Description of Artificial Sequence: Synthetic oligonucleotide
agguucacguggcgcagcc

SEQ ID NO: 2468606 - RNA, 19 nt, Artificial Sequence
  Description of Artificial Sequence: Synthetic oligonucleotide
ugacgguuacgcguggccg

SEQ ID NO: 2468607 - RNA, 19 nt, Artificial Sequence
  Description of Artificial Sequence: Synthetic oligonucleotide
aagaccugcucuucccaca

SEQ ID NO: 2468608 - RNA, 19 nt, Artificial Sequence
  Description of Artificial Sequence: Synthetic oligonucleotide
acaaucggcuuguacuucu

SEQ ID NO: 2468609 - RNA, 19 nt, Artificial Sequence
  Description of Artificial Sequence: Synthetic oligonucleotide
guucacguggcgcagccgc

SEQ ID NO: 2468610 - RNA, 19 nt, Artificial Sequence
  Description of Artificial Sequence: Synthetic oligonucleotide
gucaucagugagcacaauc

SEQ ID NO: 2468611 - RNA, 19 nt, Artificial Sequence
  Description of Artificial Sequence: Synthetic oligonucleotide
cacgucgaggacccgaccg

SEQ ID NO: 2468612 - RNA, 19 nt, Artificial Sequence
  Description of Artificial Sequence: Synthetic oligonucleotide
uucgaagguggccucgcca

SEQ ID NO: 2468613 - RNA, 19 nt, Artificial Sequence
  Description of Artificial Sequence: Synthetic oligonucleotide
cagcauucgccucuccucg

SEQ ID NO: 2468614 - RNA, 19 nt, Artificial Sequence
  Description of Artificial Sequence: Synthetic oligonucleotide
cucggcguaaucgcgaagc

SEQ ID NO: 2468615 - RNA, 19 nt, Artificial Sequence
  Description of Artificial Sequence: Synthetic oligonucleotide
gcaagaacgcuuccgagug

SEQ ID NO: 2468616 - RNA, 19 nt, Artificial Sequence
  Description of Artificial Sequence: Synthetic oligonucleotide
gagcaaggccucuucgaag

SEQ ID NO: 2468617 - RNA, 19 nt, Artificial Sequence
  Description of Artificial Sequence: Synthetic oligonucleotide
cugcaugcgguucuccagg

SEQ ID NO: 2468618 - RNA, 19 nt, Artificial Sequence
  Description of Artificial Sequence: Synthetic oligonucleotide
caugcgguucuccaggauc

SEQ ID NO: 2468619 - RNA, 19 nt, Artificial Sequence
  Description of Artificial Sequence: Synthetic oligonucleotide
agaaacucgucgucguuaa

SEQ ID NO: 2468620 - RNA, 19 nt, Artificial Sequence
  Description of Artificial Sequence: Synthetic oligonucleotide
aggaaccccacgucgagga

SEQ ID NO: 2468621 - RNA, 19 nt, Artificial Sequence
  Description of Artificial Sequence: Synthetic oligonucleotide
ucgcaauccugcaugcggu

SEQ ID NO: 2468622 - RNA, 19 nt, Artificial Sequence
  Description of Artificial Sequence: Synthetic oligonucleotide
uccgagugacgguuacgcg

SEQ ID NO: 2468623 - RNA, 19 nt, Artificial Sequence
  Description of Artificial Sequence: Synthetic oligonucleotide
aacgcggcugcagguagcg

SEQ ID NO: 2468624 - RNA, 19 nt, Artificial Sequence
  Description of Artificial Sequence: Synthetic oligonucleotide
aucggcuuguacuucuccu

SEQ ID NO: 2468625 - RNA, 19 nt, Artificial Sequence
  Description of Artificial Sequence: Synthetic oligonucleotide
ucgagcaaggccucuucga

SEQ ID NO: 2468626 - RNA, 19 nt, Artificial Sequence
  Description of Artificial Sequence: Synthetic oligonucleotide
agaccugcucuucccacag

SEQ ID NO: 2468627 - RNA, 19 nt, Artificial Sequence
  Description of Artificial Sequence: Synthetic oligonucleotide
ugcccagucgcgcccacag

SEQ ID NO: 2468628 - RNA, 19 nt, Artificial Sequence
  Description of Artificial Sequence: Synthetic oligonucleotide
uaaugucgcaauccugcau

SEQ ID NO: 2468629 - RNA, 19 nt, Artificial Sequence
  Description of Artificial Sequence: Synthetic oligonucleotide
gguccaagugcccagucgc

SEQ ID NO: 2468630 - RNA, 19 nt, Artificial Sequence
  Description of Artificial Sequence: Synthetic oligonucleotide
agcauucgccucuccucgc

SEQ ID NO: 2468631 - RNA, 19 nt, Artificial Sequence
  Description of Artificial Sequence: Synthetic oligonucleotide
ucgaagggcgccucguaca

SEQ ID NO: 2468632 - RNA, 19 nt, Artificial Sequence
  Description of Artificial Sequence: Synthetic oligonucleotide
agagcggcgguggccaucc

SEQ ID NO: 2468633 - RNA, 19 nt, Artificial Sequence
  Description of Artificial Sequence: Synthetic oligonucleotide
ggcguaaucgcgaagcagc

SEQ ID NO: 2468634 - RNA, 19 nt, Artificial Sequence
  Description of Artificial Sequence: Synthetic oligonucleotide
ucgucguuaaugucgcaau

SEQ ID NO: 2468635 - RNA, 19 nt, Artificial Sequence
  Description of Artificial Sequence: Synthetic oligonucleotide
gacccgaccggggaagucg

SEQ ID NO: 2468636 - RNA, 19 nt, Artificial Sequence
  Description of Artificial Sequence: Synthetic oligonucleotide
uucacugcgcccagcggac

SEQ ID NO: 2468637 - RNA, 19 nt, Artificial Sequence
  Description of Artificial Sequence: Synthetic oligonucleotide
uaaucgcgaagcagcgcgc

SEQ ID NO: 2468638 - RNA, 19 nt, Artificial Sequence
  Description of Artificial Sequence: Synthetic oligonucleotide
ggaaaccucggccugcacc

SEQ ID NO: 2468639 - RNA, 19 nt, Artificial Sequence
  Description of Artificial Sequence: Synthetic oligonucleotide
agcaggcgcugcaagaacg

SEQ ID NO: 2468640 - RNA, 19 nt, Artificial Sequence
  Description of Artificial Sequence: Synthetic oligonucleotide
acgucgaggacccgaccgg

SEQ ID NO: 2468641 - RNA, 19 nt, Artificial Sequence
  Description of Artificial Sequence: Synthetic oligonucleotide
acaccagcgagcagagccc

SEQ ID NO: 2468642 - RNA, 19 nt, Artificial Sequence
  Description of Artificial Sequence: Synthetic oligonucleotide
gacacggaggugcgcaggc

SEQ ID NO: 2468643 - RNA, 19 nt, Artificial Sequence
  Description of Artificial Sequence: Synthetic oligonucleotide
acguagacugccgcgcggc

SEQ ID NO: 2468644 - RNA, 19 nt, Artificial Sequence
  Description of Artificial Sequence: Synthetic oligonucleotide
uugagagcggcgguggcca

SEQ ID NO: 2468645 - RNA, 19 nt, Artificial Sequence
  Description of Artificial Sequence: Synthetic oligonucleotide
ggggaagucgauccaacgc

SEQ ID NO: 2468646 - RNA, 19 nt, Artificial Sequence
  Description of Artificial Sequence: Synthetic oligonucleotide
acccgagccucuugagagc

SEQ ID NO: 2468647 - RNA, 19 nt, Artificial Sequence
  Description of Artificial Sequence: Synthetic oligonucleotide
aauccugcaugcgguucuc

SEQ ID NO: 2468648 - RNA, 19 nt, Artificial Sequence
  Description of Artificial Sequence: Synthetic oligonucleotide
uuugcaagaccugcucuuc

SEQ ID NO: 2468649 - RNA, 19 nt, Artificial Sequence
  Description of Artificial Sequence: Synthetic oligonucleotide
agucgauccaacgcggcug

SEQ ID NO: 2468650 - RNA, 19 nt, Artificial Sequence
  Description of Artificial Sequence: Synthetic oligonucleotide
ucggcuuguacuucuccuc

SEQ ID NO: 2468651 - RNA, 19 nt, Artificial Sequence
  Description of Artificial Sequence: Synthetic oligonucleotide
gaaccccacgucgaggacc

SEQ ID NO: 2468652 - RNA, 19 nt, Artificial Sequence
  Description of Artificial Sequence: Synthetic oligonucleotide
cugcaagaacgcuuccgag

SEQ ID NO: 2468653 - RNA, 19 nt, Artificial Sequence
  Description of Artificial Sequence: Synthetic oligonucleotide
gugaauuggccucgcucag

SEQ ID NO: 2468654 - RNA, 19 nt, Artificial Sequence
  Description of Artificial Sequence: Synthetic oligonucleotide
ucgaggacccgaccgggga

SEQ ID NO: 2468655 - RNA, 19 nt, Artificial Sequence
  Description of Artificial Sequence: Synthetic oligonucleotide
agugacgguuacgcguggc

SEQ ID NO: 2468656 - RNA, 19 nt, Artificial Sequence
  Description of Artificial Sequence: Synthetic oligonucleotide
ucuccucgcgcuucacugc

SEQ ID NO: 2468657 - RNA, 19 nt, Artificial Sequence
  Description of Artificial Sequence: Synthetic oligonucleotide
agccucuugagagcggcgg

SEQ ID NO: 2468658 - RNA, 19 nt, Artificial Sequence
  Description of Artificial Sequence: Synthetic oligonucleotide
ucuugagagcggcgguggc

SEQ ID NO: 2468659 - RNA, 19 nt, Artificial Sequence
  Description of Artificial Sequence: Synthetic oligonucleotide
ugaauuggccucgcucagc

SEQ ID NO: 2468660 - RNA, 19 nt, Artificial Sequence
  Description of Artificial Sequence: Synthetic oligonucleotide
caagaccugcucuucccac

SEQ ID NO: 2468661 - RNA, 19 nt, Artificial Sequence
  Description of Artificial Sequence: Synthetic oligonucleotide
accaacggcccaggaaccc

SEQ ID NO: 2468662 - RNA, 19 nt, Artificial Sequence
  Description of Artificial Sequence: Synthetic oligonucleotide
gaagucgauccaacgcggc

SEQ ID NO: 2468663 - RNA, 19 nt, Artificial Sequence
  Description of Artificial Sequence: Synthetic oligonucleotide
cucuugagagcggcggugg

SEQ ID NO: 2468664 - RNA, 19 nt, Artificial Sequence
  Description of Artificial Sequence: Synthetic oligonucleotide
ucggcguaaucgcgaagca

SEQ ID NO: 2468665 - RNA, 19 nt, Artificial Sequence
  Description of Artificial Sequence: Synthetic oligonucleotide
gugacgguuacgcguggcc

SEQ ID NO: 2468666 - RNA, 19 nt, Artificial Sequence
  Description of Artificial Sequence: Synthetic oligonucleotide
ugcgcaggcaggugaagaa

SEQ ID NO: 2468667 - RNA, 19 nt, Artificial Sequence
  Description of Artificial Sequence: Synthetic oligonucleotide
uccaagugcccagucgcgc

SEQ ID NO: 2468668 - RNA, 19 nt, Artificial Sequence
  Description of Artificial Sequence: Synthetic oligonucleotide
cuccucgcgcuucacugcg

SEQ ID NO: 2468669 - RNA, 19 nt, Artificial Sequence
  Description of Artificial Sequence: Synthetic oligonucleotide
cucucguuggccuucggaa

SEQ ID NO: 2468670 - RNA, 19 nt, Artificial Sequence
  Description of Artificial Sequence: Synthetic oligonucleotide
gagcacaaucggcuuguac

SEQ ID NO: 2468671 - RNA, 19 nt, Artificial Sequence
  Description of Artificial Sequence: Synthetic oligonucleotide
caggauccaccaacggccc

SEQ ID NO: 2468672 - RNA, 19 nt, Artificial Sequence
  Description of Artificial Sequence: Synthetic oligonucleotide
ggaagucgauccaacgcgg

SEQ ID NO: 2468673 - RNA, 19 nt, Artificial Sequence
  Description of Artificial Sequence: Synthetic oligonucleotide
gucgauccaacgcggcugc

SEQ ID NO: 2468674 - RNA, 19 nt, Artificial Sequence
  Description of Artificial Sequence: Synthetic oligonucleotide
ccaccaacggcccaggaac

SEQ ID NO: 2468675 - RNA, 19 nt, Artificial Sequence
  Description of Artificial Sequence: Synthetic oligonucleotide
cacggaggugcgcaggcag

SEQ ID NO: 2468676 - RNA, 19 nt, Artificial Sequence
  Description of Artificial Sequence: Synthetic oligonucleotide
uucacguggcgcagccgcc

SEQ ID NO: 2468677 - RNA, 19 nt, Artificial Sequence
  Description of Artificial Sequence: Synthetic oligonucleotide
gacgcgucgagcaaggccu

SEQ ID NO: 2468678 - RNA, 19 nt, Artificial Sequence
  Description of Artificial Sequence: Synthetic oligonucleotide
gaggugcgcaggcagguga

SEQ ID NO: 2468679 - RNA, 19 nt, Artificial Sequence
  Description of Artificial Sequence: Synthetic oligonucleotide
aucgcgaagcagcgcgcgg

SEQ ID NO: 2468680 - RNA, 19 nt, Artificial Sequence
  Description of Artificial Sequence: Synthetic oligonucleotide
gaccccgacgcgucgagca

SEQ ID NO: 2468681 - RNA, 19 nt, Artificial Sequence
  Description of Artificial Sequence: Synthetic oligonucleotide
ugcaugcgguucuccagga

SEQ ID NO: 2468682 - RNA, 19 nt, Artificial Sequence
  Description of Artificial Sequence: Synthetic oligonucleotide
gacgacacggaggugcgca

SEQ ID NO: 2468683 - RNA, 19 nt, Artificial Sequence
  Description of Artificial Sequence: Synthetic oligonucleotide
ucggccugcaccagugaau

SEQ ID NO: 2468684 - RNA, 19 nt, Artificial Sequence
  Description of Artificial Sequence: Synthetic oligonucleotide
agcugguggggcccgacga

SEQ ID NO: 2468685 - RNA, 19 nt, Artificial Sequence
  Description of Artificial Sequence: Synthetic oligonucleotide
ucucugcaggccucggcgu

SEQ ID NO: 2468686 - RNA, 19 nt, Artificial Sequence
  Description of Artificial Sequence: Synthetic oligonucleotide
acgguuacgcguggccggc

SEQ ID NO: 2468687 - RNA, 19 nt, Artificial Sequence
  Description of Artificial Sequence: Synthetic oligonucleotide
caagugcccagucgcgccc

SEQ ID NO: 2468688 - RNA, 19 nt, Artificial Sequence
  Description of Artificial Sequence: Synthetic oligonucleotide
ucagcgccagucuauccuu

SEQ ID NO: 2468689 - RNA, 19 nt, Artificial Sequence
  Description of Artificial Sequence: Synthetic oligonucleotide
agcggcgguggccauccuc

SEQ ID NO: 2468690 - RNA, 19 nt, Artificial Sequence
  Description of Artificial Sequence: Synthetic oligonucleotide
aaccucggccugcaccagu

SEQ ID NO: 2468691 - RNA, 19 nt, Artificial Sequence
  Description of Artificial Sequence: Synthetic oligonucleotide
ucguuggccuucggaaugc

SEQ ID NO: 2468692 - RNA, 19 nt, Artificial Sequence
  Description of Artificial Sequence: Synthetic oligonucleotide
ggguccaagugcccagucg

SEQ ID NO: 2468693 - RNA, 19 nt, Artificial Sequence
  Description of Artificial Sequence: Synthetic oligonucleotide
caccaacggcccaggaacc

SEQ ID NO: 2468694 - RNA, 19 nt, Artificial Sequence
  Description of Artificial Sequence: Synthetic oligonucleotide
auucgccucuccucgcgcu

SEQ ID NO: 2468695 - RNA, 19 nt, Artificial Sequence
  Description of Artificial Sequence: Synthetic oligonucleotide
caggcaggugaagaaacuc

SEQ ID NO: 2468696 - RNA, 19 nt, Artificial Sequence
  Description of Artificial Sequence: Synthetic oligonucleotide
ucgcgcuucacugcgccca

SEQ ID NO: 2468697 - RNA, 19 nt, Artificial Sequence
  Description of Artificial Sequence: Synthetic oligonucleotide
gagugacgguuacgcgugg

SEQ ID NO: 2468698 - RNA, 19 nt, Artificial Sequence
  Description of Artificial Sequence: Synthetic oligonucleotide
caccagugaauuggccucg

SEQ ID NO: 2468699 - RNA, 19 nt, Artificial Sequence
  Description of Artificial Sequence: Synthetic oligonucleotide
cacguagacugccgcgcgg

SEQ ID NO: 2468700 - RNA, 19 nt, Artificial Sequence
  Description of Artificial Sequence: Synthetic oligonucleotide
cauucgccucuccucgcgc

SEQ ID NO: 2468701 - RNA, 19 nt, Artificial Sequence
  Description of Artificial Sequence: Synthetic oligonucleotide
caucuggaaaccucggccu

SEQ ID NO: 2468702 - RNA, 19 nt, Artificial Sequence
  Description of Artificial Sequence: Synthetic oligonucleotide
gcaggccucggcguaaucg

SEQ ID NO: 2468703 - RNA, 19 nt, Artificial Sequence
  Description of Artificial Sequence: Synthetic oligonucleotide
gccucucagccacagcagg

SEQ ID NO: 2468704 - RNA, 19 nt, Artificial Sequence
  Description of Artificial Sequence: Synthetic oligonucleotide
cuucgaagguggccucgcc

SEQ ID NO: 2468705 - RNA, 19 nt, Artificial Sequence
  Description of Artificial Sequence: Synthetic oligonucleotide
cucuucgaagguggccucg

SEQ ID NO: 2468706 - RNA, 19 nt, Artificial Sequence
  Description of Artificial Sequence: Synthetic oligonucleotide
cagguagcggcagcgggcc

SEQ ID NO: 2468707 - RNA, 19 nt, Artificial Sequence
  Description of Artificial Sequence: Synthetic oligonucleotide
gaggacccgaccggggaag

SEQ ID NO: 2468708 - RNA, 19 nt, Artificial Sequence
  Description of Artificial Sequence: Synthetic oligonucleotide
guccaagugcccagucgcg

SEQ ID NO: 2468709 - RNA, 19 nt, Artificial Sequence
  Description of Artificial Sequence: Synthetic oligonucleotide
gguuucaucuggaaaccuc

SEQ ID NO: 2468710 - RNA, 19 nt, Artificial Sequence
  Description of Artificial Sequence: Synthetic oligonucleotide
ugguggggcccgacgacac

SEQ ID NO: 2468711 - RNA, 19 nt, Artificial Sequence
  Description of Artificial Sequence: Synthetic oligonucleotide
gcaccagugaauuggccuc

SEQ ID NO: 2468712 - RNA, 19 nt, Artificial Sequence
  Description of Artificial Sequence: Synthetic oligonucleotide
acgacacggaggugcgcag

SEQ ID NO: 2468713 - RNA, 19 nt, Artificial Sequence
  Description of Artificial Sequence: Synthetic oligonucleotide
gcagcauucgccucuccuc

SEQ ID NO: 2468714 - RNA, 19 nt, Artificial Sequence
  Description of Artificial Sequence: Synthetic oligonucleotide
gagggaccccgacgcgucg

SEQ ID NO: 2468715 - RNA, 19 nt, Artificial Sequence
  Description of Artificial Sequence: Synthetic oligonucleotide
cuucggaaugcagcuggug

SEQ ID NO: 2468716 - RNA, 19 nt, Artificial Sequence
  Description of Artificial Sequence: Synthetic oligonucleotide
gucgucguuaaugucgcaa

SEQ ID NO: 2468717 - RNA, 19 nt, Artificial Sequence
  Description of Artificial Sequence: Synthetic oligonucleotide
aaaccucggccugcaccag

SEQ ID NO: 2468718 - RNA, 19 nt, Artificial Sequence
  Description of Artificial Sequence: Synthetic oligonucleotide
gcauucgccucuccucgcg

SEQ ID NO: 2468719 - RNA, 19 nt, Artificial Sequence
  Description of Artificial Sequence: Synthetic oligonucleotide
accgucgcggcagcauucg

SEQ ID NO: 2468720 - RNA, 19 nt, Artificial Sequence
  Description of Artificial Sequence: Synthetic oligonucleotide
caaucggcuuguacuucuc

SEQ ID NO: 2468721 - RNA, 19 nt, Artificial Sequence
  Description of Artificial Sequence: Synthetic oligonucleotide
agcagagccccagguucac

SEQ ID NO: 2468722 - RNA, 19 nt, Artificial Sequence
  Description of Artificial Sequence: Synthetic oligonucleotide
ucgcucagcgccagucuau

SEQ ID NO: 2468723 - RNA, 19 nt, Artificial Sequence
  Description of Artificial Sequence: Synthetic oligonucleotide
ccugcaccagugaauuggc

SEQ ID NO: 2468724 - RNA, 19 nt, Artificial Sequence
  Description of Artificial Sequence: Synthetic oligonucleotide
ggauccaccaacggcccag

SEQ ID NO: 2468725 - RNA, 19 nt, Artificial Sequence
  Description of Artificial Sequence: Synthetic oligonucleotide
caggaaccccacgucgagg

SEQ ID NO: 2468726 - RNA, 19 nt, Artificial Sequence
  Description of Artificial Sequence: Synthetic oligonucleotide
ucacguggcgcagccgccc

SEQ ID NO: 2468727 - RNA, 19 nt, Artificial Sequence
  Description of Artificial Sequence: Synthetic oligonucleotide
aacggcccaggaaccccac

SEQ ID NO: 2468728 - RNA, 19 nt, Artificial Sequence
  Description of Artificial Sequence: Synthetic oligonucleotide
guuacgcguggccggcgcc

SEQ ID NO: 2468729 - RNA, 19 nt, Artificial Sequence
  Description of Artificial Sequence: Synthetic oligonucleotide
agaacgcuuccgagugacg

SEQ ID NO: 2468730 - RNA, 19 nt, Artificial Sequence
  Description of Artificial Sequence: Synthetic oligonucleotide
cacugcgcccagcggaccc

SEQ ID NO: 2468731 - RNA, 19 nt, Artificial Sequence
  Description of Artificial Sequence: Synthetic oligonucleotide
uuacgcguggccggcgcca

SEQ ID NO: 2468732 - RNA, 19 nt, Artificial Sequence
  Description of Artificial Sequence: Synthetic oligonucleotide
gcguaaucgcgaagcagcg

SEQ ID NO: 2468733 - RNA, 19 nt, Artificial Sequence
  Description of Artificial Sequence: Synthetic oligonucleotide
cccgacgacacggaggugc

SEQ ID NO: 2468734 - RNA, 19 nt, Artificial Sequence
  Description of Artificial Sequence: Synthetic oligonucleotide
ggcgccucguacaccagcg

SEQ ID NO: 2468735 - RNA, 19 nt, Artificial Sequence
  Description of Artificial Sequence: Synthetic oligonucleotide
caacgcggcugcagguagc

SEQ ID NO: 2468736 - RNA, 19 nt, Artificial Sequence
  Description of Artificial Sequence: Synthetic oligonucleotide
ccaagugcccagucgcgcc

SEQ ID NO: 2468737 - RNA, 19 nt, Artificial Sequence
  Description of Artificial Sequence: Synthetic oligonucleotide
gagccucuugagagcggcg

SEQ ID NO: 2468738 - RNA, 19 nt, Artificial Sequence
  Description of Artificial Sequence: Synthetic oligonucleotide
cacaaucggcuuguacuuc

SEQ ID NO: 2468739 - RNA, 19 nt, Artificial Sequence
  Description of Artificial Sequence: Synthetic oligonucleotide
agugcccagucgcgcccac

SEQ ID NO: 2468740 - RNA, 19 nt, Artificial Sequence
  Description of Artificial Sequence: Synthetic oligonucleotide
aggagggaccccgacgcgu

SEQ ID NO: 2468741 - RNA, 19 nt, Artificial Sequence
  Description of Artificial Sequence: Synthetic oligonucleotide
cguuaaugucgcaauccug

SEQ ID NO: 2468742 - RNA, 19 nt, Artificial Sequence
  Description of Artificial Sequence: Synthetic oligonucleotide
uccaacgcggcugcaggua

SEQ ID NO: 2468743 - RNA, 19 nt, Artificial Sequence
  Description of Artificial Sequence: Synthetic oligonucleotide
ggcuucgccgccaccgucg

SEQ ID NO: 2468744 - RNA, 19 nt, Artificial Sequence
  Description of Artificial Sequence: Synthetic oligonucleotide
guagcggcagcgggccugg

SEQ ID NO: 2468745 - RNA, 19 nt, Artificial Sequence
  Description of Artificial Sequence: Synthetic oligonucleotide
cucagcgccagucuauccu

SEQ ID NO: 2468746 - RNA, 19 nt, Artificial Sequence
  Description of Artificial Sequence: Synthetic oligonucleotide
cgaccggggaagucgaucc

SEQ ID NO: 2468747 - RNA, 19 nt, Artificial Sequence
  Description of Artificial Sequence: Synthetic oligonucleotide
cugccgcgcggccuggccg

SEQ ID NO: 2468748 - RNA, 19 nt, Artificial Sequence
  Description of Artificial Sequence: Synthetic oligonucleotide
cagcugguggggcccgacg

SEQ ID NO: 2468749 - RNA, 19 nt, Artificial Sequence
  Description of Artificial Sequence: Synthetic oligonucleotide
gucgaggacccgaccgggg

SEQ ID NO: 2468750 - RNA, 19 nt, Artificial Sequence
  Description of Artificial Sequence: Synthetic oligonucleotide
gcuucacugcgcccagcgg

SEQ ID NO: 2468751 - RNA, 19 nt, Artificial Sequence
  Description of Artificial Sequence: Synthetic oligonucleotide
gaagggcgccucguacacc

SEQ ID NO: 2468752 - RNA, 19 nt, Artificial Sequence
  Description of Artificial Sequence: Synthetic oligonucleotide
caggagggaccccgacgcg

SEQ ID NO: 2468753 - RNA, 19 nt, Artificial Sequence
  Description of Artificial Sequence: Synthetic oligonucleotide
cagggcgcagcacgccgcg

SEQ ID NO: 2468754 - RNA, 19 nt, Artificial Sequence
  Description of Artificial Sequence: Synthetic oligonucleotide
uggaaaccucggccugcac

SEQ ID NO: 2468755 - RNA, 19 nt, Artificial Sequence
  Description of Artificial Sequence: Synthetic oligonucleotide
ucugcaggccucggcguaa

SEQ ID NO: 2468756 - RNA, 19 nt, Artificial Sequence
  Description of Artificial Sequence: Synthetic oligonucleotide
cgagugacgguuacgcgug

SEQ ID NO: 2468757 - RNA, 19 nt, Artificial Sequence
  Description of Artificial Sequence: Synthetic oligonucleotide
cgagcagagccccagguuc

SEQ ID NO: 2468758 - RNA, 19 nt, Artificial Sequence
  Description of Artificial Sequence: Synthetic oligonucleotide
cucgcgcuucacugcgccc

SEQ ID NO: 2468759 - RNA, 19 nt, Artificial Sequence
  Description of Artificial Sequence: Synthetic oligonucleotide
gucgcggcagcauucgccu

SEQ ID NO: 2468760 - RNA, 19 nt, Artificial Sequence
  Description of Artificial Sequence: Synthetic oligonucleotide
aggauccaccaacggccca

SEQ ID NO: 2468761 - RNA, 19 nt, Artificial Sequence
  Description of Artificial Sequence: Synthetic oligonucleotide
cacguggcgcagccgcccg

SEQ ID NO: 2468762 - RNA, 19 nt, Artificial Sequence
  Description of Artificial Sequence: Synthetic oligonucleotide
gguuacgcguggccggcgc

SEQ ID NO: 2468763 - RNA, 19 nt, Artificial Sequence
  Description of Artificial Sequence: Synthetic oligonucleotide
caccagcgagcagagcccc

SEQ ID NO: 2468764 - RNA, 19 nt, Artificial Sequence
  Description of Artificial Sequence: Synthetic oligonucleotide
aggccucggcguaaucgcg

SEQ ID NO: 2468765 - RNA, 19 nt, Artificial Sequence
  Description of Artificial Sequence: Synthetic oligonucleotide
gucgcgcccacagcccugg

SEQ ID NO: 2468766 - RNA, 19 nt, Artificial Sequence
  Description of Artificial Sequence: Synthetic oligonucleotide
cagcgcgcggguccaagug

SEQ ID NO: 2468767 - RNA, 19 nt, Artificial Sequence
  Description of Artificial Sequence: Synthetic oligonucleotide
uggggcccgacgacacgga

SEQ ID NO: 2468768 - RNA, 19 nt, Artificial Sequence
  Description of Artificial Sequence: Synthetic oligonucleotide
gcccaacagccccacguag

SEQ ID NO: 2468769 - RNA, 19 nt, Artificial Sequence
  Description of Artificial Sequence: Synthetic oligonucleotide
agcgccagucuauccuuuu

SEQ ID NO: 2468770 - RNA, 19 nt, Artificial Sequence
  Description of Artificial Sequence: Synthetic oligonucleotide
accucggccugcaccagug

SEQ ID NO: 2468771 - RNA, 19 nt, Artificial Sequence
  Description of Artificial Sequence: Synthetic oligonucleotide
gaccggggaagucgaucca

SEQ ID NO: 2468772 - RNA, 19 nt, Artificial Sequence
  Description of Artificial Sequence: Synthetic oligonucleotide
uggcuucgccgccaccguc

SEQ ID NO: 2468773 - RNA, 19 nt, Artificial Sequence
  Description of Artificial Sequence: Synthetic oligonucleotide
caagaacgcuuccgaguga

SEQ ID NO: 2468774 - RNA, 19 nt, Artificial Sequence
  Description of Artificial Sequence: Synthetic oligonucleotide
agcggacccgagccucuug

SEQ ID NO: 2468775 - RNA, 19 nt, Artificial Sequence
  Description of Artificial Sequence: Synthetic oligonucleotide
caccgucgcggcagcauuc

SEQ ID NO: 2468776 - RNA, 19 nt, Artificial Sequence
  Description of Artificial Sequence: Synthetic oligonucleotide
cguacaccagcgagcagag

SEQ ID NO: 2468777 - RNA, 19 nt, Artificial Sequence
  Description of Artificial Sequence: Synthetic oligonucleotide
gccucguacaccagcgagc

SEQ ID NO: 2468778 - RNA, 19 nt, Artificial Sequence
  Description of Artificial Sequence: Synthetic oligonucleotide
cccgagccucuugagagcg

SEQ ID NO: 2468779 - RNA, 19 nt, Artificial Sequence
  Description of Artificial Sequence: Synthetic oligonucleotide
agcacgccgcggcgccgcc

SEQ ID NO: 2468780 - RNA, 19 nt, Artificial Sequence
  Description of Artificial Sequence: Synthetic oligonucleotide
cucguacaccagcgagcag

SEQ ID NO: 2468781 - RNA, 19 nt, Artificial Sequence
  Description of Artificial Sequence: Synthetic oligonucleotide
ccaacgcggcugcagguag

SEQ ID NO: 2468782 - RNA, 19 nt, Artificial Sequence
  Description of Artificial Sequence: Synthetic oligonucleotide
uacgcguggccggcgccag

SEQ ID NO: 2468783 - RNA, 19 nt, Artificial Sequence
  Description of Artificial Sequence: Synthetic oligonucleotide
ggacccgagccucuugaga

SEQ ID NO: 2468784 - RNA, 19 nt, Artificial Sequence
  Description of Artificial Sequence: Synthetic oligonucleotide
ccgacgacacggaggugcg

SEQ ID NO: 2468785 - RNA, 19 nt, Artificial Sequence
  Description of Artificial Sequence: Synthetic oligonucleotide
cagagccccagguucacgu

SEQ ID NO: 2468786 - RNA, 19 nt, Artificial Sequence
  Description of Artificial Sequence: Synthetic oligonucleotide
accggggaagucgauccaa

SEQ ID NO: 2468787 - RNA, 19 nt, Artificial Sequence
  Description of Artificial Sequence: Synthetic oligonucleotide
gcuuccgagugacgguuac

SEQ ID NO: 2468788 - RNA, 19 nt, Artificial Sequence
  Description of Artificial Sequence: Synthetic oligonucleotide
cagccccacguagacugcc

SEQ ID NO: 2468789 - RNA, 19 nt, Artificial Sequence
  Description of Artificial Sequence: Synthetic oligonucleotide
ccacguagacugccgcgcg

SEQ ID NO: 2468790 - RNA, 19 nt, Artificial Sequence
  Description of Artificial Sequence: Synthetic oligonucleotide
gguggggcccgacgacacg

SEQ ID NO: 2468791 - RNA, 19 nt, Artificial Sequence
  Description of Artificial Sequence: Synthetic oligonucleotide
cgcggcugcagguagcggc

SEQ ID NO: 2468792 - RNA, 19 nt, Artificial Sequence
  Description of Artificial Sequence: Synthetic oligonucleotide
cggggaagucgauccaacg

SEQ ID NO: 2468793 - RNA, 19 nt, Artificial Sequence
  Description of Artificial Sequence: Synthetic oligonucleotide
ucacugcgcccagcggacc

SEQ ID NO: 2468794 - RNA, 19 nt, Artificial Sequence
  Description of Artificial Sequence: Synthetic oligonucleotide
cccacguagacugccgcgc

SEQ ID NO: 2468795 - RNA, 19 nt, Artificial Sequence
  Description of Artificial Sequence: Synthetic oligonucleotide
gguagcggcagcgggccug

SEQ ID NO: 2468796 - RNA, 19 nt, Artificial Sequence
  Description of Artificial Sequence: Synthetic oligonucleotide
cucggccugcaccagugaa

SEQ ID NO: 2468797 - RNA, 19 nt, Artificial Sequence
  Description of Artificial Sequence: Synthetic oligonucleotide
acgcuuccgagugacgguu

SEQ ID NO: 2468798 - RNA, 19 nt, Artificial Sequence
  Description of Artificial Sequence: Synthetic oligonucleotide
gggcccgacgacacggagg

SEQ ID NO: 2468799 - RNA, 19 nt, Artificial Sequence
  Description of Artificial Sequence: Synthetic oligonucleotide
ccccacguagacugccgcg

SEQ ID NO: 2468800 - RNA, 19 nt, Artificial Sequence
  Description of Artificial Sequence: Synthetic oligonucleotide
ccagucgcgcccacagccc

SEQ ID NO: 2468801 - RNA, 19 nt, Artificial Sequence
  Description of Artificial Sequence: Synthetic oligonucleotide
cgucgcggcagcauucgcc

SEQ ID NO: 2468802 - RNA, 19 nt, Artificial Sequence
  Description of Artificial Sequence: Synthetic oligonucleotide
agcagcgcgcggguccaag

SEQ ID NO: 2468803 - RNA, 19 nt, Artificial Sequence
  Description of Artificial Sequence: Synthetic oligonucleotide
cagcaggagggaccccgac

SEQ ID NO: 2468804 - RNA, 19 nt, Artificial Sequence
  Description of Artificial Sequence: Synthetic oligonucleotide
ggcgcagccgcccgcggcc

SEQ ID NO: 2468805 - RNA, 19 nt, Artificial Sequence
  Description of Artificial Sequence: Synthetic oligonucleotide
cccagguucacguggcgca

SEQ ID NO: 2468806 - RNA, 19 nt, Artificial Sequence
  Description of Artificial Sequence: Synthetic oligonucleotide
ggcccgacgacacggaggu

SEQ ID NO: 2468807 - RNA, 19 nt, Artificial Sequence
  Description of Artificial Sequence: Synthetic oligonucleotide
gcucagcgccagucuaucc

SEQ ID NO: 2468808 - RNA, 19 nt, Artificial Sequence
  Description of Artificial Sequence: Synthetic oligonucleotide
ugcgcccagcggacccgag

SEQ ID NO: 2468809 - RNA, 19 nt, Artificial Sequence
  Description of Artificial Sequence: Synthetic oligonucleotide
cucgcucagcgccagucua

SEQ ID NO: 2468810 - RNA, 19 nt, Artificial Sequence
  Description of Artificial Sequence: Synthetic oligonucleotide
ccucgcgcuucacugcgcc

SEQ ID NO: 2468811 - RNA, 19 nt, Artificial Sequence
  Description of Artificial Sequence: Synthetic oligonucleotide
cgacgcgucgagcaaggcc

SEQ ID NO: 2468812 - RNA, 19 nt, Artificial Sequence
  Description of Artificial Sequence: Synthetic oligonucleotide
cccgacgcgucgagcaagg

SEQ ID NO: 2468813 - RNA, 19 nt, Artificial Sequence
  Description of Artificial Sequence: Synthetic oligonucleotide
cuggaaaccucggccugca

SEQ ID NO: 2468814 - RNA, 19 nt, Artificial Sequence
  Description of Artificial Sequence: Synthetic oligonucleotide
cuucgccgccaccgucgcg

SEQ ID NO: 2468815 - RNA, 19 nt, Artificial Sequence
  Description of Artificial Sequence: Synthetic oligonucleotide
ugcaggccucggcguaauc

SEQ ID NO: 2468816 - RNA, 19 nt, Artificial Sequence
  Description of Artificial Sequence: Synthetic oligonucleotide
gguucacguggcgcagccg

SEQ ID NO: 2468817 - RNA, 19 nt, Artificial Sequence
  Description of Artificial Sequence: Synthetic oligonucleotide
ggcaggugaagaaacucgu

SEQ ID NO: 2468818 - RNA, 19 nt, Artificial Sequence
  Description of Artificial Sequence: Synthetic oligonucleotide
cggaaugcagcuggugggg

SEQ ID NO: 2468819 - RNA, 19 nt, Artificial Sequence
  Description of Artificial Sequence: Synthetic oligonucleotide
cccgcggccucucagccac

SEQ ID NO: 2468820 - RNA, 19 nt, Artificial Sequence
  Description of Artificial Sequence: Synthetic oligonucleotide
acacggaggugcgcaggca

SEQ ID NO: 2468821 - RNA, 19 nt, Artificial Sequence
  Description of Artificial Sequence: Synthetic oligonucleotide
ccucguacaccagcgagca

SEQ ID NO: 2468822 - RNA, 19 nt, Artificial Sequence
  Description of Artificial Sequence: Synthetic oligonucleotide
ugagcacaaucggcuugua

SEQ ID NO: 2468823 - RNA, 19 nt, Artificial Sequence
  Description of Artificial Sequence: Synthetic oligonucleotide
gcacaaucggcuuguacuu

SEQ ID NO: 2468824 - RNA, 19 nt, Artificial Sequence
  Description of Artificial Sequence: Synthetic oligonucleotide
cccacgucgaggacccgac

SEQ ID NO: 2468825 - RNA, 19 nt, Artificial Sequence
  Description of Artificial Sequence: Synthetic oligonucleotide
ccggggaagucgauccaac

SEQ ID NO: 2468826 - RNA, 19 nt, Artificial Sequence
  Description of Artificial Sequence: Synthetic oligonucleotide
gaaacucgucgucguuaau

SEQ ID NO: 2468827 - RNA, 19 nt, Artificial Sequence
  Description of Artificial Sequence: Synthetic oligonucleotide
accccgacgcgucgagcaa

SEQ ID NO: 2468828 - RNA, 19 nt, Artificial Sequence
  Description of Artificial Sequence: Synthetic oligonucleotide
cgccucguacaccagcgag

SEQ ID NO: 2468829 - RNA, 19 nt, Artificial Sequence
  Description of Artificial Sequence: Synthetic oligonucleotide
ugagagcggcgguggccau

SEQ ID NO: 2468830 - RNA, 19 nt, Artificial Sequence
  Description of Artificial Sequence: Synthetic oligonucleotide
cgucguuaaugucgcaauc

SEQ ID NO: 2468831 - RNA, 19 nt, Artificial Sequence
  Description of Artificial Sequence: Synthetic oligonucleotide
gccccacguagacugccgc

SEQ ID NO: 2468832 - RNA, 19 nt, Artificial Sequence
  Description of Artificial Sequence: Synthetic oligonucleotide
guacaccagcgagcagagc

SEQ ID NO: 2468833 - RNA, 19 nt, Artificial Sequence
  Description of Artificial Sequence: Synthetic oligonucleotide
ggaaccccacgucgaggac

SEQ ID NO: 2468834 - RNA, 19 nt, Artificial Sequence
  Description of Artificial Sequence: Synthetic oligonucleotide
ccgagugacgguuacgcgu

SEQ ID NO: 2468835 - RNA, 19 nt, Artificial Sequence
  Description of Artificial Sequence: Synthetic oligonucleotide
ucgauccaacgcggcugca

SEQ ID NO: 2468836 - RNA, 19 nt, Artificial Sequence
  Description of Artificial Sequence: Synthetic oligonucleotide
gcagcgggccugguagagg

SEQ ID NO: 2468837 - RNA, 19 nt, Artificial Sequence
  Description of Artificial Sequence: Synthetic oligonucleotide
cgcccagcggacccgagcc

SEQ ID NO: 2468838 - RNA, 19 nt, Artificial Sequence
  Description of Artificial Sequence: Synthetic oligonucleotide
acgcgucgagcaaggccuc

SEQ ID NO: 2468839 - RNA, 19 nt, Artificial Sequence
  Description of Artificial Sequence: Synthetic oligonucleotide
ggggcccgacgacacggag

SEQ ID NO: 2468840 - RNA, 19 nt, Artificial Sequence
  Description of Artificial Sequence: Synthetic oligonucleotide
gagagcggcgguggccauc

SEQ ID NO: 2468841 - RNA, 19 nt, Artificial Sequence
  Description of Artificial Sequence: Synthetic oligonucleotide
cgagccucuugagagcggc

SEQ ID NO: 2468842 - RNA, 19 nt, Artificial Sequence
  Description of Artificial Sequence: Synthetic oligonucleotide
agguagcggcagcgggccu

SEQ ID NO: 2468843 - RNA, 19 nt, Artificial Sequence
  Description of Artificial Sequence: Synthetic oligonucleotide
cgaagggcgccucguacac

SEQ ID NO: 2468844 - RNA, 19 nt, Artificial Sequence
  Description of Artificial Sequence: Synthetic oligonucleotide
acgcggcugcagguagcgg

SEQ ID NO: 2468845 - RNA, 19 nt, Artificial Sequence
  Description of Artificial Sequence: Synthetic oligonucleotide
gcuucgccgccaccgucgc

SEQ ID NO: 2468846 - RNA, 19 nt, Artificial Sequence
  Description of Artificial Sequence: Synthetic oligonucleotide
acccgaccggggaagucga

SEQ ID NO: 2468847 - RNA, 19 nt, Artificial Sequence
  Description of Artificial Sequence: Synthetic oligonucleotide
gcgggccugguagaggcug

SEQ ID NO: 2468848 - RNA, 19 nt, Artificial Sequence
  Description of Artificial Sequence: Synthetic oligonucleotide
guagacugccgcgcggccu

SEQ ID NO: 2468849 - RNA, 19 nt, Artificial Sequence
  Description of Artificial Sequence: Synthetic oligonucleotide
agacugccgcgcggccugg

SEQ ID NO: 2468850 - RNA, 19 nt, Artificial Sequence
  Description of Artificial Sequence: Synthetic oligonucleotide
gccccagguucacguggcg

SEQ ID NO: 2468851 - RNA, 19 nt, Artificial Sequence
  Description of Artificial Sequence: Synthetic oligonucleotide
aggacccgaccggggaagu

SEQ ID NO: 2468852 - RNA, 19 nt, Artificial Sequence
  Description of Artificial Sequence: Synthetic oligonucleotide
cagccucucguuggccuuc

SEQ ID NO: 2468853 - RNA, 19 nt, Artificial Sequence
  Description of Artificial Sequence: Synthetic oligonucleotide
cguaaucgcgaagcagcgc

SEQ ID NO: 2468854 - RNA, 19 nt, Artificial Sequence
  Description of Artificial Sequence: Synthetic oligonucleotide
agggcgcagcacgccgcgg

SEQ ID NO: 2468855 - RNA, 19 nt, Artificial Sequence
  Description of Artificial Sequence: Synthetic oligonucleotide
agucgcgcccacagcccug

SEQ ID NO: 2468856 - RNA, 19 nt, Artificial Sequence
  Description of Artificial Sequence: Synthetic oligonucleotide
ccccagguucacguggcgc

SEQ ID NO: 2468857 - RNA, 19 nt, Artificial Sequence
  Description of Artificial Sequence: Synthetic oligonucleotide
ccagguucacguggcgcag

SEQ ID NO: 2468858 - RNA, 19 nt, Artificial Sequence
  Description of Artificial Sequence: Synthetic oligonucleotide
ccucucguuggccuucgga

SEQ ID NO: 2468859 - RNA, 19 nt, Artificial Sequence
  Description of Artificial Sequence: Synthetic oligonucleotide
ggccuucggaaugcagcug

SEQ ID NO: 2468860 - RNA, 19 nt, Artificial Sequence
  Description of Artificial Sequence: Synthetic oligonucleotide
ggccggcgccagcagcagg

SEQ ID NO: 2468861 - RNA, 19 nt, Artificial Sequence
  Description of Artificial Sequence: Synthetic oligonucleotide
gcgcgcggguccaagugcc

SEQ ID NO: 2468862 - RNA, 19 nt, Artificial Sequence
  Description of Artificial Sequence: Synthetic oligonucleotide
cagugagcacaaucggcuu

SEQ ID NO: 2468863 - RNA, 19 nt, Artificial Sequence
  Description of Artificial Sequence: Synthetic oligonucleotide
cacgccgcggcgccgccca

SEQ ID NO: 2468864 - RNA, 19 nt, Artificial Sequence
  Description of Artificial Sequence: Synthetic oligonucleotide
ggccugguagaggcuggcc

SEQ ID NO: 2468865 - RNA, 19 nt, Artificial Sequence
  Description of Artificial Sequence: Synthetic oligonucleotide
cgauccaacgcggcugcag

SEQ ID NO: 2468866 - RNA, 19 nt, Artificial Sequence
  Description of Artificial Sequence: Synthetic oligonucleotide
ccgagccucuugagagcgg

SEQ ID NO: 2468867 - RNA, 19 nt, Artificial Sequence
  Description of Artificial Sequence: Synthetic oligonucleotide
ucgcgcccacagcccuggc

SEQ ID NO: 2468868 - RNA, 19 nt, Artificial Sequence
  Description of Artificial Sequence: Synthetic oligonucleotide
gcgcccagcggacccgagc

SEQ ID NO: 2468869 - RNA, 19 nt, Artificial Sequence
  Description of Artificial Sequence: Synthetic oligonucleotide
cgucgaggacccgaccggg

SEQ ID NO: 2468870 - RNA, 19 nt, Artificial Sequence
  Description of Artificial Sequence: Synthetic oligonucleotide
ccacgucgaggacccgacc

SEQ ID NO: 2468871 - RNA, 19 nt, Artificial Sequence
  Description of Artificial Sequence: Synthetic oligonucleotide
cguagacugccgcgcggcc

SEQ ID NO: 2468872 - RNA, 19 nt, Artificial Sequence
  Description of Artificial Sequence: Synthetic oligonucleotide
cggcguaaucgcgaagcag

SEQ ID NO: 2468873 - RNA, 19 nt, Artificial Sequence
  Description of Artificial Sequence: Synthetic oligonucleotide
gccucggcguaaucgcgaa

SEQ ID NO: 2468874 - RNA, 19 nt, Artificial Sequence
  Description of Artificial Sequence: Synthetic oligonucleotide
ccucggcguaaucgcgaag

SEQ ID NO: 2468875 - RNA, 19 nt, Artificial Sequence
  Description of Artificial Sequence: Synthetic oligonucleotide
gcccagucgcgcccacagc

SEQ ID NO: 2468876 - RNA, 19 nt, Artificial Sequence
  Description of Artificial Sequence: Synthetic oligonucleotide
cgcggguccaagugcccag

SEQ ID NO: 2468877 - RNA, 19 nt, Artificial Sequence
  Description of Artificial Sequence: Synthetic oligonucleotide
gcggcugcagguagcggca

SEQ ID NO: 2468878 - RNA, 19 nt, Artificial Sequence
  Description of Artificial Sequence: Synthetic oligonucleotide
agcgggccugguagaggcu

SEQ ID NO: 2468879 - RNA, 19 nt, Artificial Sequence
  Description of Artificial Sequence: Synthetic oligonucleotide
cagucgcgcccacagcccu

SEQ ID NO: 2468880 - RNA, 19 nt, Artificial Sequence
  Description of Artificial Sequence: Synthetic oligonucleotide
gcaggcaggugaagaaacu

SEQ ID NO: 2468881 - RNA, 19 nt, Artificial Sequence
  Description of Artificial Sequence: Synthetic oligonucleotide
ccgaccggggaagucgauc

SEQ ID NO: 2468882 - RNA, 19 nt, Artificial Sequence
  Description of Artificial Sequence: Synthetic oligonucleotide
cgacacggaggugcgcagg

SEQ ID NO: 2468883 - RNA, 19 nt, Artificial Sequence
  Description of Artificial Sequence: Synthetic oligonucleotide
gccucucguuggccuucgg

SEQ ID NO: 2468884 - RNA, 19 nt, Artificial Sequence
  Description of Artificial Sequence: Synthetic oligonucleotide
cccagcggacccgagccuc

SEQ ID NO: 2468885 - RNA, 19 nt, Artificial Sequence
  Description of Artificial Sequence: Synthetic oligonucleotide
gcgcaggcaggugaagaaa

SEQ ID NO: 2468886 - RNA, 19 nt, Artificial Sequence
  Description of Artificial Sequence: Synthetic oligonucleotide
cuggcuucgccgccaccgu

SEQ ID NO: 2468887 - RNA, 19 nt, Artificial Sequence
  Description of Artificial Sequence: Synthetic oligonucleotide
cggacccgagccucuugag

SEQ ID NO: 2468888 - RNA, 19 nt, Artificial Sequence
  Description of Artificial Sequence: Synthetic oligonucleotide
gccgcccaacagccccacg

SEQ ID NO: 2468889 - RNA, 19 nt, Artificial Sequence
  Description of Artificial Sequence: Synthetic oligonucleotide
gcggcgguggccauccucu

SEQ ID NO: 2468890 - RNA, 19 nt, Artificial Sequence
  Description of Artificial Sequence: Synthetic oligonucleotide
caacagccccacguagacu

SEQ ID NO: 2468891 - RNA, 19 nt, Artificial Sequence
  Description of Artificial Sequence: Synthetic oligonucleotide
gcgucucugcaggccucgg

SEQ ID NO: 2468892 - RNA, 19 nt, Artificial Sequence
  Description of Artificial Sequence: Synthetic oligonucleotide
ccccgacgcgucgagcaag

SEQ ID NO: 2468893 - RNA, 19 nt, Artificial Sequence
  Description of Artificial Sequence: Synthetic oligonucleotide
ggaccccgacgcgucgagc

SEQ ID NO: 2468894 - RNA, 19 nt, Artificial Sequence
  Description of Artificial Sequence: Synthetic oligonucleotide
gcgcccacagcccuggcuu

SEQ ID NO: 2468895 - RNA, 19 nt, Artificial Sequence
  Description of Artificial Sequence: Synthetic oligonucleotide
cguggcgcagccgcccgcg

SEQ ID NO: 2468896 - RNA, 19 nt, Artificial Sequence
  Description of Artificial Sequence: Synthetic oligonucleotide
gcaaggccucuucgaaggu

SEQ ID NO: 2468897 - RNA, 19 nt, Artificial Sequence
  Description of Artificial Sequence: Synthetic oligonucleotide
accccacgucgaggacccg

SEQ ID NO: 2468898 - RNA, 19 nt, Artificial Sequence
  Description of Artificial Sequence: Synthetic oligonucleotide
gcgccucguacaccagcga

SEQ ID NO: 2468899 - RNA, 19 nt, Artificial Sequence
  Description of Artificial Sequence: Synthetic oligonucleotide
caggcgcugcaagaacgcu

SEQ ID NO: 2468900 - RNA, 19 nt, Artificial Sequence
  Description of Artificial Sequence: Synthetic oligonucleotide
agccgcccgcggccucuca

SEQ ID NO: 2468901 - RNA, 19 nt, Artificial Sequence
  Description of Artificial Sequence: Synthetic oligonucleotide
ccgucgcggcagcauucgc

SEQ ID NO: 2468902 - RNA, 19 nt, Artificial Sequence
  Description of Artificial Sequence: Synthetic oligonucleotide
gcaucgaagggcgccucgu

SEQ ID NO: 2468903 - RNA, 19 nt, Artificial Sequence
  Description of Artificial Sequence: Synthetic oligonucleotide
ggacccgaccggggaaguc

SEQ ID NO: 2468904 - RNA, 19 nt, Artificial Sequence
  Description of Artificial Sequence: Synthetic oligonucleotide
gugcccagucgcgcccaca

SEQ ID NO: 2468905 - RNA, 19 nt, Artificial Sequence
  Description of Artificial Sequence: Synthetic oligonucleotide
aggcuggccugggcaucga

SEQ ID NO: 2468906 - RNA, 19 nt, Artificial Sequence
  Description of Artificial Sequence: Synthetic oligonucleotide
gcgcggguccaagugccca

SEQ ID NO: 2468907 - RNA, 19 nt, Artificial Sequence
  Description of Artificial Sequence: Synthetic oligonucleotide
ggcuggccugggcaucgaa

SEQ ID NO: 2468908 - RNA, 19 nt, Artificial Sequence
  Description of Artificial Sequence: Synthetic oligonucleotide
ccgcgucucugcaggccuc

SEQ ID NO: 2468909 - RNA, 19 nt, Artificial Sequence
  Description of Artificial Sequence: Synthetic oligonucleotide
cugcgcccagcggacccga

SEQ ID NO: 2468910 - RNA, 19 nt, Artificial Sequence
  Description of Artificial Sequence: Synthetic oligonucleotide
cagcgccagucuauccuuu

SEQ ID NO: 2468911 - RNA, 19 nt, Artificial Sequence
  Description of Artificial Sequence: Synthetic oligonucleotide
gcagcgcgcggguccaagu

SEQ ID NO: 2468912 - RNA, 19 nt, Artificial Sequence
  Description of Artificial Sequence: Synthetic oligonucleotide
cgcgcggguccaagugccc

SEQ ID NO: 2468913 - RNA, 19 nt, Artificial Sequence
  Description of Artificial Sequence: Synthetic oligonucleotide
ccgacgcgucgagcaaggc

SEQ ID NO: 2468914 - RNA, 19 nt, Artificial Sequence
  Description of Artificial Sequence: Synthetic oligonucleotide
gcaugcgguucuccaggau

SEQ ID NO: 2468915 - RNA, 19 nt, Artificial Sequence
  Description of Artificial Sequence: Synthetic oligonucleotide
ccccacgucgaggacccga

SEQ ID NO: 2468916 - RNA, 19 nt, Artificial Sequence
  Description of Artificial Sequence: Synthetic oligonucleotide
cgaggacccgaccggggaa

SEQ ID NO: 2468917 - RNA, 19 nt, Artificial Sequence
  Description of Artificial Sequence: Synthetic oligonucleotide
cgguuacgcguggccggcg

SEQ ID NO: 2468918 - RNA, 19 nt, Artificial Sequence
  Description of Artificial Sequence: Synthetic oligonucleotide
cgacgacacggaggugcgc

SEQ ID NO: 2468919 - RNA, 19 nt, Artificial Sequence
  Description of Artificial Sequence: Synthetic oligonucleotide
ccgccaccgucgcggcagc

SEQ ID NO: 2468920 - RNA, 19 nt, Artificial Sequence
  Description of Artificial Sequence: Synthetic oligonucleotide
cgcccaacagccccacgua

SEQ ID NO: 2468921 - RNA, 19 nt, Artificial Sequence
  Description of Artificial Sequence: Synthetic oligonucleotide
cagccgcccgcggccucuc

SEQ ID NO: 2468922 - RNA, 19 nt, Artificial Sequence
  Description of Artificial Sequence: Synthetic oligonucleotide
cgccgccgcgucucugcag

SEQ ID NO: 2468923 - RNA, 19 nt, Artificial Sequence
  Description of Artificial Sequence: Synthetic oligonucleotide
ccgcggcgccgcccaacag

SEQ ID NO: 2468924 - RNA, 19 nt, Artificial Sequence
  Description of Artificial Sequence: Synthetic oligonucleotide
ccagcggacccgagccucu

SEQ ID NO: 2468925 - RNA, 19 nt, Artificial Sequence
  Description of Artificial Sequence: Synthetic oligonucleotide
gcacgccgcggcgccgccc

SEQ ID NO: 2468926 - RNA, 19 nt, Artificial Sequence
  Description of Artificial Sequence: Synthetic oligonucleotide
cugcaggccucggcguaau

SEQ ID NO: 2468927 - RNA, 19 nt, Artificial Sequence
  Description of Artificial Sequence: Synthetic oligonucleotide
cgucgucguuaaugucgca

SEQ ID NO: 2468928 - RNA, 19 nt, Artificial Sequence
  Description of Artificial Sequence: Synthetic oligonucleotide
gcccagcggacccgagccu

SEQ ID NO: 2468929 - RNA, 19 nt, Artificial Sequence
  Description of Artificial Sequence: Synthetic oligonucleotide
cggcagcauucgccucucc

SEQ ID NO: 2468930 - RNA, 19 nt, Artificial Sequence
  Description of Artificial Sequence: Synthetic oligonucleotide
gagcggcgguggccauccu

SEQ ID NO: 2468931 - RNA, 19 nt, Artificial Sequence
  Description of Artificial Sequence: Synthetic oligonucleotide
gcccgacgacacggaggug

SEQ ID NO: 2468932 - RNA, 19 nt, Artificial Sequence
  Description of Artificial Sequence: Synthetic oligonucleotide
ccaccgucgcggcagcauu

SEQ ID NO: 2468933 - RNA, 19 nt, Artificial Sequence
  Description of Artificial Sequence: Synthetic oligonucleotide
cggcgccgcccaacagccc

SEQ ID NO: 2468934 - RNA, 19 nt, Artificial Sequence
  Description of Artificial Sequence: Synthetic oligonucleotide
ggccucgcucagcgccagu

SEQ ID NO: 2468935 - RNA, 19 nt, Artificial Sequence
  Description of Artificial Sequence: Synthetic oligonucleotide
cagcggacccgagccucuu

SEQ ID NO: 2468936 - RNA, 19 nt, Artificial Sequence
  Description of Artificial Sequence: Synthetic oligonucleotide
cgcgcccacagcccuggcu

SEQ ID NO: 2468937 - RNA, 19 nt, Artificial Sequence
  Description of Artificial Sequence: Synthetic oligonucleotide
cgccgcggcgccgcccaac

SEQ ID NO: 2468938 - RNA, 19 nt, Artificial Sequence
  Description of Artificial Sequence: Synthetic oligonucleotide
ccgcggccucucagccaca

SEQ ID NO: 2468939 - RNA, 19 nt, Artificial Sequence
  Description of Artificial Sequence: Synthetic oligonucleotide
cccgaccggggaagucgau

SEQ ID NO: 2468940 - RNA, 19 nt, Artificial Sequence
  Description of Artificial Sequence: Synthetic oligonucleotide
cgccaccgucgcggcagca

SEQ ID NO: 2468941 - RNA, 19 nt, Artificial Sequence
  Description of Artificial Sequence: Synthetic oligonucleotide
aaauaaguuguuuaaacuc

SEQ ID NO: 2468942 - RNA, 19 nt, Artificial Sequence
  Description of Artificial Sequence: Synthetic oligonucleotide
aguaacagaugauaaaccc

SEQ ID NO: 2468943 - RNA, 19 nt, Artificial Sequence
  Description of Artificial Sequence: Synthetic oligonucleotide
agaugauaaacccuucucc

SEQ ID NO: 2468944 - RNA, 19 nt, Artificial Sequence
  Description of Artificial Sequence: Synthetic oligonucleotide
guuuguauucucuugauag

SEQ ID NO: 2468945 - RNA, 19 nt, Artificial Sequence
  Description of Artificial Sequence: Synthetic oligonucleotide
aaaagggacagcugaauuc

SEQ ID NO: 2468946 - RNA, 19 nt, Artificial Sequence
  Description of Artificial Sequence: Synthetic oligonucleotide
gaaaacaucgucaauguag

SEQ ID NO: 2468947 - RNA, 19 nt, Artificial Sequence
  Description of Artificial Sequence: Synthetic oligonucleotide
cuuguuucccacaagaacc

SEQ ID NO: 2468948 - RNA, 19 nt, Artificial Sequence
  Description of Artificial Sequence: Synthetic oligonucleotide
uguaguaacgguaugcagc

SEQ ID NO: 2468949 - RNA, 19 nt, Artificial Sequence
  Description of Artificial Sequence: Synthetic oligonucleotide
uuauaagcgucuucaaugg

SEQ ID NO: 2468950 - RNA, 19 nt, Artificial Sequence
  Description of Artificial Sequence: Synthetic oligonucleotide
cuuauaagcgucuucaaug

SEQ ID NO: 2468951 - RNA, 19 nt, Artificial Sequence
  Description of Artificial Sequence: Synthetic oligonucleotide
uuuaaacucccgaacuucg

SEQ ID NO: 2468952 - RNA, 19 nt, Artificial Sequence
  Description of Artificial Sequence: Synthetic oligonucleotide
aacuaguuccuuuucuuuc

SEQ ID NO: 2468953 - RNA, 19 nt, Artificial Sequence
  Description of Artificial Sequence: Synthetic oligonucleotide
cuuucuuacguauuucccg

SEQ ID NO: 2468954 - RNA, 19 nt, Artificial Sequence
  Description of Artificial Sequence: Synthetic oligonucleotide
uaagcgucuucaauggugg

SEQ ID NO: 2468955 - RNA, 19 nt, Artificial Sequence
  Description of Artificial Sequence: Synthetic oligonucleotide
ucuaaagccggucgaaucc

SEQ ID NO: 2468956 - RNA, 19 nt, Artificial Sequence
  Description of Artificial Sequence: Synthetic oligonucleotide
aaacucccgaacuucgugg

SEQ ID NO: 2468957 - RNA, 19 nt, Artificial Sequence
  Description of Artificial Sequence: Synthetic oligonucleotide
ugauaaacccuucuccugc

SEQ ID NO: 2468958 - RNA, 19 nt, Artificial Sequence
  Description of Artificial Sequence: Synthetic oligonucleotide
guaguaacgguaugcagcg

SEQ ID NO: 2468959 - RNA, 19 nt, Artificial Sequence
  Description of Artificial Sequence: Synthetic oligonucleotide
uuguauucucuugauagcg

SEQ ID NO: 2468960 - RNA, 19 nt, Artificial Sequence
  Description of Artificial Sequence: Synthetic oligonucleotide
gaauccggaucuuauaagc

SEQ ID NO: 2468961 - RNA, 19 nt, Artificial Sequence
  Description of Artificial Sequence: Synthetic oligonucleotide
aauccauuguccucuggag

SEQ ID NO: 2468962 - RNA, 19 nt, Artificial Sequence
  Description of Artificial Sequence: Synthetic oligonucleotide
aacugcauugucauggcac

SEQ ID NO: 2468963 - RNA, 19 nt, Artificial Sequence
  Description of Artificial Sequence: Synthetic oligonucleotide
ucaucaucgaugcgaaucc

SEQ ID NO: 2468964 - RNA, 19 nt, Artificial Sequence
  Description of Artificial Sequence: Synthetic oligonucleotide
aguuacagaguccuucuuc

SEQ ID NO: 2468965 - RNA, 19 nt, Artificial Sequence
  Description of Artificial Sequence: Synthetic oligonucleotide
uauuucccguacaagagca

SEQ ID NO: 2468966 - RNA, 19 nt, Artificial Sequence
  Description of Artificial Sequence: Synthetic oligonucleotide
cugaauggugacuucagcc

SEQ ID NO: 2468967 - RNA, 19 nt, Artificial Sequence
  Description of Artificial Sequence: Synthetic oligonucleotide
aauguccagauuggcaggc

SEQ ID NO: 2468968 - RNA, 19 nt, Artificial Sequence
  Description of Artificial Sequence: Synthetic oligonucleotide
uaaguuguuuaaacucccg

SEQ ID NO: 2468969 - RNA, 19 nt, Artificial Sequence
  Description of Artificial Sequence: Synthetic oligonucleotide
ucuuucuuacguauuuccc

SEQ ID NO: 2468970 - RNA, 19 nt, Artificial Sequence
  Description of Artificial Sequence: Synthetic oligonucleotide
cuucguggaaacuucgacg

SEQ ID NO: 2468971 - RNA, 19 nt, Artificial Sequence
  Description of Artificial Sequence: Synthetic oligonucleotide
aaaacuaguuccuuuucuu

SEQ ID NO: 2468972 - RNA, 19 nt, Artificial Sequence
  Description of Artificial Sequence: Synthetic oligonucleotide
acuggugugucauccgugc

SEQ ID NO: 2468973 - RNA, 19 nt, Artificial Sequence
  Description of Artificial Sequence: Synthetic oligonucleotide
gaauccggguugcagaccg

SEQ ID NO: 2468974 - RNA, 19 nt, Artificial Sequence
  Description of Artificial Sequence: Synthetic oligonucleotide
uucguggaaacuucgacga

SEQ ID NO: 2468975 - RNA, 19 nt, Artificial Sequence
  Description of Artificial Sequence: Synthetic oligonucleotide
uuuguauucucuugauagc

SEQ ID NO: 2468976 - RNA, 19 nt, Artificial Sequence
  Description of Artificial Sequence: Synthetic oligonucleotide
uacaagagcauggaaaaca

SEQ ID NO: 2468977 - RNA, 19 nt, Artificial Sequence
  Description of Artificial Sequence: Synthetic oligonucleotide
aauguaguaacgguaugca

SEQ ID NO: 2468978 - RNA, 19 nt, Artificial Sequence
  Description of Artificial Sequence: Synthetic oligonucleotide
auaaguuguuuaaacuccc

SEQ ID NO: 2468979 - RNA, 19 nt, Artificial Sequence
  Description of Artificial Sequence: Synthetic oligonucleotide
uucaagucagacuuguuuc

SEQ ID NO: 2468980 - RNA, 19 nt, Artificial Sequence
  Description of Artificial Sequence: Synthetic oligonucleotide
acuucguggaaacuucgac

SEQ ID NO: 2468981 - RNA, 19 nt, Artificial Sequence
  Description of Artificial Sequence: Synthetic oligonucleotide
aaaacaucgucaauguagu

SEQ ID NO: 2468982 - RNA, 19 nt, Artificial Sequence
  Description of Artificial Sequence: Synthetic oligonucleotide
ugaauggugacuucagccu

SEQ ID NO: 2468983 - RNA, 19 nt, Artificial Sequence
  Description of Artificial Sequence: Synthetic oligonucleotide
aaguuguuuaaacucccga

SEQ ID NO: 2468984 - RNA, 19 nt, Artificial Sequence
  Description of Artificial Sequence: Synthetic oligonucleotide
acuaguuuguauucucuug

SEQ ID NO: 2468985 - RNA, 19 nt, Artificial Sequence
  Description of Artificial Sequence: Synthetic oligonucleotide
aauccggaucuuauaagcg

SEQ ID NO: 2468986 - RNA, 19 nt, Artificial Sequence
  Description of Artificial Sequence: Synthetic oligonucleotide
uguauucucuugauagcgc

SEQ ID NO: 2468987 - RNA, 19 nt, Artificial Sequence
  Description of Artificial Sequence: Synthetic oligonucleotide
ugucauggcacucuuccca

SEQ ID NO: 2468988 - RNA, 19 nt, Artificial Sequence
  Description of Artificial Sequence: Synthetic oligonucleotide
gaucuuauaagcgucuuca

SEQ ID NO: 2468989 - RNA, 19 nt, Artificial Sequence
  Description of Artificial Sequence: Synthetic oligonucleotide
uuucuuacguauuucccgu

SEQ ID NO: 2468990 - RNA, 19 nt, Artificial Sequence
  Description of Artificial Sequence: Synthetic oligonucleotide
acguauuucccguacaaga

SEQ ID NO: 2468991 - RNA, 19 nt, Artificial Sequence
  Description of Artificial Sequence: Synthetic oligonucleotide
ucaagucagacuuguuucc

SEQ ID NO: 2468992 - RNA, 19 nt, Artificial Sequence
  Description of Artificial Sequence: Synthetic oligonucleotide
uucccguacaagagcaugg

SEQ ID NO: 2468993 - RNA, 19 nt, Artificial Sequence
  Description of Artificial Sequence: Synthetic oligonucleotide
uggcugaugaacugcauug

SEQ ID NO: 2468994 - RNA, 19 nt, Artificial Sequence
  Description of Artificial Sequence: Synthetic oligonucleotide
ucuuauaagcgucuucaau

SEQ ID NO: 2468995 - RNA, 19 nt, Artificial Sequence
  Description of Artificial Sequence: Synthetic oligonucleotide
aacgguaugcagcggaggu

SEQ ID NO: 2468996 - RNA, 19 nt, Artificial Sequence
  Description of Artificial Sequence: Synthetic oligonucleotide
uaaacucccgaacuucgug

SEQ ID NO: 2468997 - RNA, 19 nt, Artificial Sequence
  Description of Artificial Sequence: Synthetic oligonucleotide
agacuuguuucccacaaga

SEQ ID NO: 2468998 - RNA, 19 nt, Artificial Sequence
  Description of Artificial Sequence: Synthetic oligonucleotide
auuggcaggcucaucaucg

SEQ ID NO: 2468999 - RNA, 19 nt, Artificial Sequence
  Description of Artificial Sequence: Synthetic oligonucleotide
cucuugauagcgcugcagg

SEQ ID NO: 2469000 - RNA, 19 nt, Artificial Sequence
  Description of Artificial Sequence: Synthetic oligonucleotide
acugcuuuuggguuuagau

SEQ ID NO: 2469001 - RNA, 19 nt, Artificial Sequence
  Description of Artificial Sequence: Synthetic oligonucleotide
aguuguuuaaacucccgaa

SEQ ID NO: 2469002 - RNA, 19 nt, Artificial Sequence
  Description of Artificial Sequence: Synthetic oligonucleotide
aaacccuucuccugcucuc

SEQ ID NO: 2469003 - RNA, 19 nt, Artificial Sequence
  Description of Artificial Sequence: Synthetic oligonucleotide
gaauguccagauuggcagg

SEQ ID NO: 2469004 - RNA, 19 nt, Artificial Sequence
  Description of Artificial Sequence: Synthetic oligonucleotide
aucgucaauguaguaacgg

SEQ ID NO: 2469005 - RNA, 19 nt, Artificial Sequence
  Description of Artificial Sequence: Synthetic oligonucleotide
aaacuaguuccuuuucuuu

SEQ ID NO: 2469006 - RNA, 19 nt, Artificial Sequence
  Description of Artificial Sequence: Synthetic oligonucleotide
aacgccaccagcacccagc

SEQ ID NO: 2469007 - RNA, 19 nt, Artificial Sequence
  Description of Artificial Sequence: Synthetic oligonucleotide
uacacuccccucaaguuac

SEQ ID NO: 2469008 - RNA, 19 nt, Artificial Sequence
  Description of Artificial Sequence: Synthetic oligonucleotide
caauguaguaacgguaugc

SEQ ID NO: 2469009 - RNA, 19 nt, Artificial Sequence
  Description of Artificial Sequence: Synthetic oligonucleotide
ucggacgcgguaaauaagu

SEQ ID NO: 2469010 - RNA, 19 nt, Artificial Sequence
  Description of Artificial Sequence: Synthetic oligonucleotide
gacaaucccucuuccuugg

SEQ ID NO: 2469011 - RNA, 19 nt, Artificial Sequence
  Description of Artificial Sequence: Synthetic oligonucleotide
ucaucgaugcgaauccgga

SEQ ID NO: 2469012 - RNA, 19 nt, Artificial Sequence
  Description of Artificial Sequence: Synthetic oligonucleotide
gaugauaaacccuucuccu

SEQ ID NO: 2469013 - RNA, 19 nt, Artificial Sequence
  Description of Artificial Sequence: Synthetic oligonucleotide
uugauagcgcugcagggcu

SEQ ID NO: 2469014 - RNA, 19 nt, Artificial Sequence
  Description of Artificial Sequence: Synthetic oligonucleotide
uuacguauuucccguacaa

SEQ ID NO: 2469015 - RNA, 19 nt, Artificial Sequence
  Description of Artificial Sequence: Synthetic oligonucleotide
augauaaacccuucuccug

SEQ ID NO: 2469016 - RNA, 19 nt, Artificial Sequence
  Description of Artificial Sequence: Synthetic oligonucleotide
uguuuaaacucccgaacuu

SEQ ID NO: 2469017 - RNA, 19 nt, Artificial Sequence
  Description of Artificial Sequence: Synthetic oligonucleotide
ucuuacguauuucccguac

SEQ ID NO: 2469018 - RNA, 19 nt, Artificial Sequence
  Description of Artificial Sequence: Synthetic oligonucleotide
agcaucacuaguuuguauu

SEQ ID NO: 2469019 - RNA, 19 nt, Artificial Sequence
  Description of Artificial Sequence: Synthetic oligonucleotide
uccauacacugcuuuuggg

SEQ ID NO: 2469020 - RNA, 19 nt, Artificial Sequence
  Description of Artificial Sequence: Synthetic oligonucleotide
ucucauguacugaucccgc

SEQ ID NO: 2469021 - RNA, 19 nt, Artificial Sequence
  Description of Artificial Sequence: Synthetic oligonucleotide
uccgugauggaguaacaga

SEQ ID NO: 2469022 - RNA, 19 nt, Artificial Sequence
  Description of Artificial Sequence: Synthetic oligonucleotide
uacagaguccuucuucuuc

SEQ ID NO: 2469023 - RNA, 19 nt, Artificial Sequence
  Description of Artificial Sequence: Synthetic oligonucleotide
ucacuaguuuguauucucu

SEQ ID NO: 2469024 - RNA, 19 nt, Artificial Sequence
  Description of Artificial Sequence: Synthetic oligonucleotide
agacaaucccucuuccuug

SEQ ID NO: 2469025 - RNA, 19 nt, Artificial Sequence
  Description of Artificial Sequence: Synthetic oligonucleotide
uucacagcagauccuuuac

SEQ ID NO: 2469026 - RNA, 19 nt, Artificial Sequence
  Description of Artificial Sequence: Synthetic oligonucleotide
ucauccgugcgucggacgc

SEQ ID NO: 2469027 - RNA, 19 nt, Artificial Sequence
  Description of Artificial Sequence: Synthetic oligonucleotide
uauucucuugauagcgcug

SEQ ID NO: 2469028 - RNA, 19 nt, Artificial Sequence
  Description of Artificial Sequence: Synthetic oligonucleotide
uuacacuccccucaaguua

SEQ ID NO: 2469029 - RNA, 19 nt, Artificial Sequence
  Description of Artificial Sequence: Synthetic oligonucleotide
ucgacgauccgugauggag

SEQ ID NO: 2469030 - RNA, 19 nt, Artificial Sequence
  Description of Artificial Sequence: Synthetic oligonucleotide
ugugucauccgugcgucgg

SEQ ID NO: 2469031 - RNA, 19 nt, Artificial Sequence
  Description of Artificial Sequence: Synthetic oligonucleotide
uggaguaacagaugauaaa

SEQ ID NO: 2469032 - RNA, 19 nt, Artificial Sequence
  Description of Artificial Sequence: Synthetic oligonucleotide
ggaguaacagaugauaaac

SEQ ID NO: 2469033 - RNA, 19 nt, Artificial Sequence
  Description of Artificial Sequence: Synthetic oligonucleotide
cuaguuuguauucucuuga

SEQ ID NO: 2469034 - RNA, 19 nt, Artificial Sequence
  Description of Artificial Sequence: Synthetic oligonucleotide
uccugaauggugacuucag

SEQ ID NO: 2469035 - RNA, 19 nt, Artificial Sequence
  Description of Artificial Sequence: Synthetic oligonucleotide
acuucgacgauccgugaug

SEQ ID NO: 2469036 - RNA, 19 nt, Artificial Sequence
  Description of Artificial Sequence: Synthetic oligonucleotide
agcgcugcagggcugcuac

SEQ ID NO: 2469037 - RNA, 19 nt, Artificial Sequence
  Description of Artificial Sequence: Synthetic oligonucleotide
cucaucaucgaugcgaauc

SEQ ID NO: 2469038 - RNA, 19 nt, Artificial Sequence
  Description of Artificial Sequence: Synthetic oligonucleotide
aagucagacuuguuuccca

SEQ ID NO: 2469039 - RNA, 19 nt, Artificial Sequence
  Description of Artificial Sequence: Synthetic oligonucleotide
gaaucgguggcugaugaac

SEQ ID NO: 2469040 - RNA, 19 nt, Artificial Sequence
  Description of Artificial Sequence: Synthetic oligonucleotide
auaagcgucuucaauggug

SEQ ID NO: 2469041 - RNA, 19 nt, Artificial Sequence
  Description of Artificial Sequence: Synthetic oligonucleotide
cuugauagcgcugcagggc

SEQ ID NO: 2469042 - RNA, 19 nt, Artificial Sequence
  Description of Artificial Sequence: Synthetic oligonucleotide
uuuacacuccccucaaguu

SEQ ID NO: 2469043 - RNA, 19 nt, Artificial Sequence
  Description of Artificial Sequence: Synthetic oligonucleotide
uuaaacucccgaacuucgu

SEQ ID NO: 2469044 - RNA, 19 nt, Artificial Sequence
  Description of Artificial Sequence: Synthetic oligonucleotide
ugaacugcauugucauggc

SEQ ID NO: 2469045 - RNA, 19 nt, Artificial Sequence
  Description of Artificial Sequence: Synthetic oligonucleotide
auccuuuacacuccccuca

SEQ ID NO: 2469046 - RNA, 19 nt, Artificial Sequence
  Description of Artificial Sequence: Synthetic oligonucleotide
uaaagccggucgaauccgg

SEQ ID NO: 2469047 - RNA, 19 nt, Artificial Sequence
  Description of Artificial Sequence: Synthetic oligonucleotide
acaagaaccacuggugugu

SEQ ID NO: 2469048 - RNA, 19 nt, Artificial Sequence
  Description of Artificial Sequence: Synthetic oligonucleotide
ucgaugcgaauccggaucu

SEQ ID NO: 2469049 - RNA, 19 nt, Artificial Sequence
  Description of Artificial Sequence: Synthetic oligonucleotide
uccucuggagcagucgugg

SEQ ID NO: 2469050 - RNA, 19 nt, Artificial Sequence
  Description of Artificial Sequence: Synthetic oligonucleotide
uccggaucuuauaagcguc

SEQ ID NO: 2469051 - RNA, 19 nt, Artificial Sequence
  Description of Artificial Sequence: Synthetic oligonucleotide
auccggaucuuauaagcgu

SEQ ID NO: 2469052 - RNA, 19 nt, Artificial Sequence
  Description of Artificial Sequence: Synthetic oligonucleotide
uauaagcgucuucaauggu

SEQ ID NO: 2469053 - RNA, 19 nt, Artificial Sequence
  Description of Artificial Sequence: Synthetic oligonucleotide
agcagauccuuuacacucc

SEQ ID NO: 2469054 - RNA, 19 nt, Artificial Sequence
  Description of Artificial Sequence: Synthetic oligonucleotide
aacucccgaacuucgugga

SEQ ID NO: 2469055 - RNA, 19 nt, Artificial Sequence
  Description of Artificial Sequence: Synthetic oligonucleotide
ucgagccagagacaauccc

SEQ ID NO: 2469056 - RNA, 19 nt, Artificial Sequence
  Description of Artificial Sequence: Synthetic oligonucleotide
gaauggugacuucagccuc

SEQ ID NO: 2469057 - RNA, 19 nt, Artificial Sequence
  Description of Artificial Sequence: Synthetic oligonucleotide
gaacuucguggaaacuucg

SEQ ID NO: 2469058 - RNA, 19 nt, Artificial Sequence
  Description of Artificial Sequence: Synthetic oligonucleotide
uuucccguacaagagcaug

SEQ ID NO: 2469059 - RNA, 19 nt, Artificial Sequence
  Description of Artificial Sequence: Synthetic oligonucleotide
agcauggaaaacaucguca

SEQ ID NO: 2469060 - RNA, 19 nt, Artificial Sequence
  Description of Artificial Sequence: Synthetic oligonucleotide
aacuucgacgauccgugau

SEQ ID NO: 2469061 - RNA, 19 nt, Artificial Sequence
  Description of Artificial Sequence: Synthetic oligonucleotide
ggaaaggccuccucuaaag

SEQ ID NO: 2469062 - RNA, 19 nt, Artificial Sequence
  Description of Artificial Sequence: Synthetic oligonucleotide
uggugugucauccgugcgu

SEQ ID NO: 2469063 - RNA, 19 nt, Artificial Sequence
  Description of Artificial Sequence: Synthetic oligonucleotide
accgcguuccuucccgagc

SEQ ID NO: 2469064 - RNA, 19 nt, Artificial Sequence
  Description of Artificial Sequence: Synthetic oligonucleotide
cacaagaaccacuggugug

SEQ ID NO: 2469065 - RNA, 19 nt, Artificial Sequence
  Description of Artificial Sequence: Synthetic oligonucleotide
cagauuggcaggcucauca

SEQ ID NO: 2469066 - RNA, 19 nt, Artificial Sequence
  Description of Artificial Sequence: Synthetic oligonucleotide
caucgucaauguaguaacg

SEQ ID NO: 2469067 - RNA, 19 nt, Artificial Sequence
  Description of Artificial Sequence: Synthetic oligonucleotide
guuuaaacucccgaacuuc

SEQ ID NO: 2469068 - RNA, 19 nt, Artificial Sequence
  Description of Artificial Sequence: Synthetic oligonucleotide
cuaaagccggucgaauccg

SEQ ID NO: 2469069 - RNA, 19 nt, Artificial Sequence
  Description of Artificial Sequence: Synthetic oligonucleotide
gacgcgguaaauaaguugu

SEQ ID NO: 2469070 - RNA, 19 nt, Artificial Sequence
  Description of Artificial Sequence: Synthetic oligonucleotide
cucuaaagccggucgaauc

SEQ ID NO: 2469071 - RNA, 19 nt, Artificial Sequence
  Description of Artificial Sequence: Synthetic oligonucleotide
agcgucuucaauggugggg

SEQ ID NO: 2469072 - RNA, 19 nt, Artificial Sequence
  Description of Artificial Sequence: Synthetic oligonucleotide
gauccuuuacacuccccuc

SEQ ID NO: 2469073 - RNA, 19 nt, Artificial Sequence
  Description of Artificial Sequence: Synthetic oligonucleotide
cuucgacgauccgugaugg

SEQ ID NO: 2469074 - RNA, 19 nt, Artificial Sequence
  Description of Artificial Sequence: Synthetic oligonucleotide
cuuccauacacugcuuuug

SEQ ID NO: 2469075 - RNA, 19 nt, Artificial Sequence
  Description of Artificial Sequence: Synthetic oligonucleotide
agagacaaucccucuuccu

SEQ ID NO: 2469076 - RNA, 19 nt, Artificial Sequence
  Description of Artificial Sequence: Synthetic oligonucleotide
guuacagaguccuucuucu

SEQ ID NO: 2469077 - RNA, 19 nt, Artificial Sequence
  Description of Artificial Sequence: Synthetic oligonucleotide
ucgaauccggguugcagac

SEQ ID NO: 2469078 - RNA, 19 nt, Artificial Sequence
  Description of Artificial Sequence: Synthetic oligonucleotide
ugauggaguaacagaugau

SEQ ID NO: 2469079 - RNA, 19 nt, Artificial Sequence
  Description of Artificial Sequence: Synthetic oligonucleotide
aucaucgaugcgaauccgg

SEQ ID NO: 2469080 - RNA, 19 nt, Artificial Sequence
  Description of Artificial Sequence: Synthetic oligonucleotide
uaccaacugggcgagcucc

SEQ ID NO: 2469081 - RNA, 19 nt, Artificial Sequence
  Description of Artificial Sequence: Synthetic oligonucleotide
acugaucccgcauggcugu

SEQ ID NO: 2469082 - RNA, 19 nt, Artificial Sequence
  Description of Artificial Sequence: Synthetic oligonucleotide
uugucauggcacucuuccc

SEQ ID NO: 2469083 - RNA, 19 nt, Artificial Sequence
  Description of Artificial Sequence: Synthetic oligonucleotide
aggcucaucaucgaugcga

SEQ ID NO: 2469084 - RNA, 19 nt, Artificial Sequence
  Description of Artificial Sequence: Synthetic oligonucleotide
uggaaacuucgacgauccg

SEQ ID NO: 2469085 - RNA, 19 nt, Artificial Sequence
  Description of Artificial Sequence: Synthetic oligonucleotide
aaagccggucgaauccggg

SEQ ID NO: 2469086 - RNA, 19 nt, Artificial Sequence
  Description of Artificial Sequence: Synthetic oligonucleotide
aagccggucgaauccgggu

SEQ ID NO: 2469087 - RNA, 19 nt, Artificial Sequence
  Description of Artificial Sequence: Synthetic oligonucleotide
aaacuucgacgauccguga

SEQ ID NO: 2469088 - RNA, 19 nt, Artificial Sequence
  Description of Artificial Sequence: Synthetic oligonucleotide
uccuuuucuuucuuacgua

SEQ ID NO: 2469089 - RNA, 19 nt, Artificial Sequence
  Description of Artificial Sequence: Synthetic oligonucleotide
ggagaccugucucagcugc

SEQ ID NO: 2469090 - RNA, 19 nt, Artificial Sequence
  Description of Artificial Sequence: Synthetic oligonucleotide
gugaacucggccuguccag

SEQ ID NO: 2469091 - RNA, 19 nt, Artificial Sequence
  Description of Artificial Sequence: Synthetic oligonucleotide
uugcagaccgcguuccuuc

SEQ ID NO: 2469092 - RNA, 19 nt, Artificial Sequence
  Description of Artificial Sequence: Synthetic oligonucleotide
gucgaauccggguugcaga

SEQ ID NO: 2469093 - RNA, 19 nt, Artificial Sequence
  Description of Artificial Sequence: Synthetic oligonucleotide
gcaggcucaucaucgaugc

SEQ ID NO: 2469094 - RNA, 19 nt, Artificial Sequence
  Description of Artificial Sequence: Synthetic oligonucleotide
cugggcgagcuccagaauc

SEQ ID NO: 2469095 - RNA, 19 nt, Artificial Sequence
  Description of Artificial Sequence: Synthetic oligonucleotide
auucucgagccagagacaa

SEQ ID NO: 2469096 - RNA, 19 nt, Artificial Sequence
  Description of Artificial Sequence: Synthetic oligonucleotide
cucgagccagagacaaucc

SEQ ID NO: 2469097 - RNA, 19 nt, Artificial Sequence
  Description of Artificial Sequence: Synthetic oligonucleotide
ugggaaaggccuccucuaa

SEQ ID NO: 2469098 - RNA, 19 nt, Artificial Sequence
  Description of Artificial Sequence: Synthetic oligonucleotide
aucgguggcugaugaacug

SEQ ID NO: 2469099 - RNA, 19 nt, Artificial Sequence
  Description of Artificial Sequence: Synthetic oligonucleotide
auccgugauggaguaacag

SEQ ID NO: 2469100 - RNA, 19 nt, Artificial Sequence
  Description of Artificial Sequence: Synthetic oligonucleotide
aaguuacagaguccuucuu

SEQ ID NO: 2469101 - RNA, 19 nt, Artificial Sequence
  Description of Artificial Sequence: Synthetic oligonucleotide
aucuuauaagcgucuucaa

SEQ ID NO: 2469102 - RNA, 19 nt, Artificial Sequence
  Description of Artificial Sequence: Synthetic oligonucleotide
aaacaucgucaauguagua

SEQ ID NO: 2469103 - RNA, 19 nt, Artificial Sequence
  Description of Artificial Sequence: Synthetic oligonucleotide
ggacgcgguaaauaaguug

SEQ ID NO: 2469104 - RNA, 19 nt, Artificial Sequence
  Description of Artificial Sequence: Synthetic oligonucleotide
cagaccgcguuccuucccg

SEQ ID NO: 2469105 - RNA, 19 nt, Artificial Sequence
  Description of Artificial Sequence: Synthetic oligonucleotide
gauagcgcugcagggcugc

SEQ ID NO: 2469106 - RNA, 19 nt, Artificial Sequence
  Description of Artificial Sequence: Synthetic oligonucleotide
acaagagcauggaaaacau

SEQ ID NO: 2469107 - RNA, 19 nt, Artificial Sequence
  Description of Artificial Sequence: Synthetic oligonucleotide
ucccgaacuucguggaaac

SEQ ID NO: 2469108 - RNA, 19 nt, Artificial Sequence
  Description of Artificial Sequence: Synthetic oligonucleotide
acuccccucaaguuacaga

SEQ ID NO: 2469109 - RNA, 19 nt, Artificial Sequence
  Description of Artificial Sequence: Synthetic oligonucleotide
cguauuucccguacaagag

SEQ ID NO: 2469110 - RNA, 19 nt, Artificial Sequence
  Description of Artificial Sequence: Synthetic oligonucleotide
cuuuacacuccccucaagu

SEQ ID NO: 2469111 - RNA, 19 nt, Artificial Sequence
  Description of Artificial Sequence: Synthetic oligonucleotide
guauucucuugauagcgcu

SEQ ID NO: 2469112 - RNA, 19 nt, Artificial Sequence
  Description of Artificial Sequence: Synthetic oligonucleotide
aacuucguggaaacuucga

SEQ ID NO: 2469113 - RNA, 19 nt, Artificial Sequence
  Description of Artificial Sequence: Synthetic oligonucleotide
guaacagaugauaaacccu

SEQ ID NO: 2469114 - RNA, 19 nt, Artificial Sequence
  Description of Artificial Sequence: Synthetic oligonucleotide
cuuacguauuucccguaca

SEQ ID NO: 2469115 - RNA, 19 nt, Artificial Sequence
  Description of Artificial Sequence: Synthetic oligonucleotide
uucucuugauagcgcugca

SEQ ID NO: 2469116 - RNA, 19 nt, Artificial Sequence
  Description of Artificial Sequence: Synthetic oligonucleotide
auacacugcuuuuggguuu

SEQ ID NO: 2469117 - RNA, 19 nt, Artificial Sequence
  Description of Artificial Sequence: Synthetic oligonucleotide
ugaacucggccuguccagc

SEQ ID NO: 2469118 - RNA, 19 nt, Artificial Sequence
  Description of Artificial Sequence: Synthetic oligonucleotide
gguaaauaaguuguuuaaa

SEQ ID NO: 2469119 - RNA, 19 nt, Artificial Sequence
  Description of Artificial Sequence: Synthetic oligonucleotide
auggccaaaacuaguuccu

SEQ ID NO: 2469120 - RNA, 19 nt, Artificial Sequence
  Description of Artificial Sequence: Synthetic oligonucleotide
gagacaaucccucuuccuu

SEQ ID NO: 2469121 - RNA, 19 nt, Artificial Sequence
  Description of Artificial Sequence: Synthetic oligonucleotide
ugcgaauccggaucuuaua

SEQ ID NO: 2469122 - RNA, 19 nt, Artificial Sequence
  Description of Artificial Sequence: Synthetic oligonucleotide
agagcauggaaaacaucgu

SEQ ID NO: 2469123 - RNA, 19 nt, Artificial Sequence
  Description of Artificial Sequence: Synthetic oligonucleotide
agcggcgccgcacagccca

SEQ ID NO: 2469124 - RNA, 19 nt, Artificial Sequence
  Description of Artificial Sequence: Synthetic oligonucleotide
acccagcaucacuaguuug

SEQ ID NO: 2469125 - RNA, 19 nt, Artificial Sequence
  Description of Artificial Sequence: Synthetic oligonucleotide
guauccagaauguccagau

SEQ ID NO: 2469126 - RNA, 19 nt, Artificial Sequence
  Description of Artificial Sequence: Synthetic oligonucleotide
ugauagcgcugcagggcug

SEQ ID NO: 2469127 - RNA, 19 nt, Artificial Sequence
  Description of Artificial Sequence: Synthetic oligonucleotide
caucaucgaugcgaauccg

SEQ ID NO: 2469128 - RNA, 19 nt, Artificial Sequence
  Description of Artificial Sequence: Synthetic oligonucleotide
cuggugugucauccgugcg

SEQ ID NO: 2469129 - RNA, 19 nt, Artificial Sequence
  Description of Artificial Sequence: Synthetic oligonucleotide
cccacaagaaccacuggug

SEQ ID NO: 2469130 - RNA, 19 nt, Artificial Sequence
  Description of Artificial Sequence: Synthetic oligonucleotide
agucgugggccccugggaa

SEQ ID NO: 2469131 - RNA, 19 nt, Artificial Sequence
  Description of Artificial Sequence: Synthetic oligonucleotide
aauccggguugcagaccgc

SEQ ID NO: 2469132 - RNA, 19 nt, Artificial Sequence
  Description of Artificial Sequence: Synthetic oligonucleotide
cagacuuguuucccacaag

SEQ ID NO: 2469133 - RNA, 19 nt, Artificial Sequence
  Description of Artificial Sequence: Synthetic oligonucleotide
gucauccgugcgucggacg

SEQ ID NO: 2469134 - RNA, 19 nt, Artificial Sequence
  Description of Artificial Sequence: Synthetic oligonucleotide
auccggguugcagaccgcg

SEQ ID NO: 2469135 - RNA, 19 nt, Artificial Sequence
  Description of Artificial Sequence: Synthetic oligonucleotide
cccaacgccaccagcaccc

SEQ ID NO: 2469136 - RNA, 19 nt, Artificial Sequence
  Description of Artificial Sequence: Synthetic oligonucleotide
uaugcagcggaggucucaa

SEQ ID NO: 2469137 - RNA, 19 nt, Artificial Sequence
  Description of Artificial Sequence: Synthetic oligonucleotide
ggacagcugaauucucgag

SEQ ID NO: 2469138 - RNA, 19 nt, Artificial Sequence
  Description of Artificial Sequence: Synthetic oligonucleotide
gauaaacccuucuccugcu

SEQ ID NO: 2469139 - RNA, 19 nt, Artificial Sequence
  Description of Artificial Sequence: Synthetic oligonucleotide
ugcagaccgcguuccuucc

SEQ ID NO: 2469140 - RNA, 19 nt, Artificial Sequence
  Description of Artificial Sequence: Synthetic oligonucleotide
agauuggcaggcucaucau

SEQ ID NO: 2469141 - RNA, 19 nt, Artificial Sequence
  Description of Artificial Sequence: Synthetic oligonucleotide
ucccguacaagagcaugga

SEQ ID NO: 2469142 - RNA, 19 nt, Artificial Sequence
  Description of Artificial Sequence: Synthetic oligonucleotide
cacuggugugucauccgug

SEQ ID NO: 2469143 - RNA, 19 nt, Artificial Sequence
  Description of Artificial Sequence: Synthetic oligonucleotide
agcacccagcaucacuagu

SEQ ID NO: 2469144 - RNA, 19 nt, Artificial Sequence
  Description of Artificial Sequence: Synthetic oligonucleotide
gacuuguuucccacaagaa

SEQ ID NO: 2469145 - RNA, 19 nt, Artificial Sequence
  Description of Artificial Sequence: Synthetic oligonucleotide
cacucuucccaacgccacc

SEQ ID NO: 2469146 - RNA, 19 nt, Artificial Sequence
  Description of Artificial Sequence: Synthetic oligonucleotide
uuacagaguccuucuucuu

SEQ ID NO: 2469147 - RNA, 19 nt, Artificial Sequence
  Description of Artificial Sequence: Synthetic oligonucleotide
uucuuacguauuucccgua

SEQ ID NO: 2469148 - RNA, 19 nt, Artificial Sequence
  Description of Artificial Sequence: Synthetic oligonucleotide
guacugaucccgcauggcu

SEQ ID NO: 2469149 - RNA, 19 nt, Artificial Sequence
  Description of Artificial Sequence: Synthetic oligonucleotide
ccuccucuaaagccggucg

SEQ ID NO: 2469150 - RNA, 19 nt, Artificial Sequence
  Description of Artificial Sequence: Synthetic oligonucleotide
ucgugggccccugggaaag

SEQ ID NO: 2469151 - RNA, 19 nt, Artificial Sequence
  Description of Artificial Sequence: Synthetic oligonucleotide
gcgguaaauaaguuguuua

SEQ ID NO: 2469152 - RNA, 19 nt, Artificial Sequence
  Description of Artificial Sequence: Synthetic oligonucleotide
ugggccccugggaaaggcc

SEQ ID NO: 2469153 - RNA, 19 nt, Artificial Sequence
  Description of Artificial Sequence: Synthetic oligonucleotide
ggaucuuauaagcgucuuc

SEQ ID NO: 2469154 - RNA, 19 nt, Artificial Sequence
  Description of Artificial Sequence: Synthetic oligonucleotide
uguuucccacaagaaccac

SEQ ID NO: 2469155 - RNA, 19 nt, Artificial Sequence
  Description of Artificial Sequence: Synthetic oligonucleotide
gcuccagaauccauugucc

SEQ ID NO: 2469156 - RNA, 19 nt, Artificial Sequence
  Description of Artificial Sequence: Synthetic oligonucleotide
gaccgcguuccuucccgag

SEQ ID NO: 2469157 - RNA, 19 nt, Artificial Sequence
  Description of Artificial Sequence: Synthetic oligonucleotide
uuccuucccgagcggcgcc

SEQ ID NO: 2469158 - RNA, 19 nt, Artificial Sequence
  Description of Artificial Sequence: Synthetic oligonucleotide
ugggaaucgguggcugaug

SEQ ID NO: 2469159 - RNA, 19 nt, Artificial Sequence
  Description of Artificial Sequence: Synthetic oligonucleotide
ucauggcacucuucccaac

SEQ ID NO: 2469160 - RNA, 19 nt, Artificial Sequence
  Description of Artificial Sequence: Synthetic oligonucleotide
gacgauccgugauggagua

SEQ ID NO: 2469161 - RNA, 19 nt, Artificial Sequence
  Description of Artificial Sequence: Synthetic oligonucleotide
gcgaauccggaucuuauaa

SEQ ID NO: 2469162 - RNA, 19 nt, Artificial Sequence
  Description of Artificial Sequence: Synthetic oligonucleotide
gucggacgcgguaaauaag

SEQ ID NO: 2469163 - RNA, 19 nt, Artificial Sequence
  Description of Artificial Sequence: Synthetic oligonucleotide
gcugaugaacugcauuguc

SEQ ID NO: 2469164 - RNA, 19 nt, Artificial Sequence
  Description of Artificial Sequence: Synthetic oligonucleotide
auccgugcgucggacgcgg

SEQ ID NO: 2469165 - RNA, 19 nt, Artificial Sequence
  Description of Artificial Sequence: Synthetic oligonucleotide
gaugcgaauccggaucuua

SEQ ID NO: 2469166 - RNA, 19 nt, Artificial Sequence
  Description of Artificial Sequence: Synthetic oligonucleotide
uccugcucucauguacuga

SEQ ID NO: 2469167 - RNA, 19 nt, Artificial Sequence
  Description of Artificial Sequence: Synthetic oligonucleotide
gaccugucucagcugcuuc

SEQ ID NO: 2469168 - RNA, 19 nt, Artificial Sequence
  Description of Artificial Sequence: Synthetic oligonucleotide
guuccuucccgagcggcgc

SEQ ID NO: 2469169 - RNA, 19 nt, Artificial Sequence
  Description of Artificial Sequence: Synthetic oligonucleotide
ucguggaaacuucgacgau

SEQ ID NO: 2469170 - RNA, 19 nt, Artificial Sequence
  Description of Artificial Sequence: Synthetic oligonucleotide
ccccucaaguuacagaguc

SEQ ID NO: 2469171 - RNA, 19 nt, Artificial Sequence
  Description of Artificial Sequence: Synthetic oligonucleotide
uggcaggcucaucaucgau

SEQ ID NO: 2469172 - RNA, 19 nt, Artificial Sequence
  Description of Artificial Sequence: Synthetic oligonucleotide
gucauggcacucuucccaa

SEQ ID NO: 2469173 - RNA, 19 nt, Artificial Sequence
  Description of Artificial Sequence: Synthetic oligonucleotide
ugucauccgugcgucggac

SEQ ID NO: 2469174 - RNA, 19 nt, Artificial Sequence
  Description of Artificial Sequence: Synthetic oligonucleotide
gugugucauccgugcgucg

SEQ ID NO: 2469175 - RNA, 19 nt, Artificial Sequence
  Description of Artificial Sequence: Synthetic oligonucleotide
uucgacgauccgugaugga

SEQ ID NO: 2469176 - RNA, 19 nt, Artificial Sequence
  Description of Artificial Sequence: Synthetic oligonucleotide
ccguacaagagcauggaaa

SEQ ID NO: 2469177 - RNA, 19 nt, Artificial Sequence
  Description of Artificial Sequence: Synthetic oligonucleotide
cugcuucaagucagacuug

SEQ ID NO: 2469178 - RNA, 19 nt, Artificial Sequence
  Description of Artificial Sequence: Synthetic oligonucleotide
gaucccgcauggcugugaa

SEQ ID NO: 2469179 - RNA, 19 nt, Artificial Sequence
  Description of Artificial Sequence: Synthetic oligonucleotide
ggcaggcucaucaucgaug

SEQ ID NO: 2469180 - RNA, 19 nt, Artificial Sequence
  Description of Artificial Sequence: Synthetic oligonucleotide
agccggucgaauccggguu

SEQ ID NO: 2469181 - RNA, 19 nt, Artificial Sequence
  Description of Artificial Sequence: Synthetic oligonucleotide
uccggguugcagaccgcgu

SEQ ID NO: 2469182 - RNA, 19 nt, Artificial Sequence
  Description of Artificial Sequence: Synthetic oligonucleotide
acaaucccucuuccuugga

SEQ ID NO: 2469183 - RNA, 19 nt, Artificial Sequence
  Description of Artificial Sequence: Synthetic oligonucleotide
cgaauccggaucuuauaag

SEQ ID NO: 2469184 - RNA, 19 nt, Artificial Sequence
  Description of Artificial Sequence: Synthetic oligonucleotide
ggucgaauccggguugcag

SEQ ID NO: 2469185 - RNA, 19 nt, Artificial Sequence
  Description of Artificial Sequence: Synthetic oligonucleotide
ggaaacuucgacgauccgu

SEQ ID NO: 2469186 - RNA, 19 nt, Artificial Sequence
  Description of Artificial Sequence: Synthetic oligonucleotide
uucucgagccagagacaau

SEQ ID NO: 2469187 - RNA, 19 nt, Artificial Sequence
  Description of Artificial Sequence: Synthetic oligonucleotide
cgaacuucguggaaacuuc

SEQ ID NO: 2469188 - RNA, 19 nt, Artificial Sequence
  Description of Artificial Sequence: Synthetic oligonucleotide
ugaucccgcauggcuguga

SEQ ID NO: 2469189 - RNA, 19 nt, Artificial Sequence
  Description of Artificial Sequence: Synthetic oligonucleotide
cagcacccagcaucacuag

SEQ ID NO: 2469190 - RNA, 19 nt, Artificial Sequence
  Description of Artificial Sequence: Synthetic oligonucleotide
gauccgugauggaguaaca

SEQ ID NO: 2469191 - RNA, 19 nt, Artificial Sequence
  Description of Artificial Sequence: Synthetic oligonucleotide
ggucauggucuucugggaa

SEQ ID NO: 2469192 - RNA, 19 nt, Artificial Sequence
  Description of Artificial Sequence: Synthetic oligonucleotide
acgccaccagcacccagca

SEQ ID NO: 2469193 - RNA, 19 nt, Artificial Sequence
  Description of Artificial Sequence: Synthetic oligonucleotide
ccgcguuccuucccgagcg

SEQ ID NO: 2469194 - RNA, 19 nt, Artificial Sequence
  Description of Artificial Sequence: Synthetic oligonucleotide
cugcuaccaacugggcgag

SEQ ID NO: 2469195 - RNA, 19 nt, Artificial Sequence
  Description of Artificial Sequence: Synthetic oligonucleotide
cauccgugcgucggacgcg

SEQ ID NO: 2469196 - RNA, 19 nt, Artificial Sequence
  Description of Artificial Sequence: Synthetic oligonucleotide
uggagcagucgugggcccc

SEQ ID NO: 2469197 - RNA, 19 nt, Artificial Sequence
  Description of Artificial Sequence: Synthetic oligonucleotide
augcgaauccggaucuuau

SEQ ID NO: 2469198 - RNA, 19 nt, Artificial Sequence
  Description of Artificial Sequence: Synthetic oligonucleotide
ggugugucauccgugcguc

SEQ ID NO: 2469199 - RNA, 19 nt, Artificial Sequence
  Description of Artificial Sequence: Synthetic oligonucleotide
uggccaaaacuaguuccuu

SEQ ID NO: 2469200 - RNA, 19 nt, Artificial Sequence
  Description of Artificial Sequence: Synthetic oligonucleotide
cgagcuccagaauccauug

SEQ ID NO: 2469201 - RNA, 19 nt, Artificial Sequence
  Description of Artificial Sequence: Synthetic oligonucleotide
ccauggccaaaacuaguuc

SEQ ID NO: 2469202 - RNA, 19 nt, Artificial Sequence
  Description of Artificial Sequence: Synthetic oligonucleotide
guaugcagcggaggucuca

SEQ ID NO: 2469203 - RNA, 19 nt, Artificial Sequence
  Description of Artificial Sequence: Synthetic oligonucleotide
gaacucggccuguccagcu

SEQ ID NO: 2469204 - RNA, 19 nt, Artificial Sequence
  Description of Artificial Sequence: Synthetic oligonucleotide
acugggcgagcuccagaau

SEQ ID NO: 2469205 - RNA, 19 nt, Artificial Sequence
  Description of Artificial Sequence: Synthetic oligonucleotide
cgauccgugauggaguaac

SEQ ID NO: 2469206 - RNA, 19 nt, Artificial Sequence
  Description of Artificial Sequence: Synthetic oligonucleotide
guggggucauggucuucug

SEQ ID NO: 2469207 - RNA, 19 nt, Artificial Sequence
  Description of Artificial Sequence: Synthetic oligonucleotide
cacuaguuuguauucucuu

SEQ ID NO: 2469208 - RNA, 19 nt, Artificial Sequence
  Description of Artificial Sequence: Synthetic oligonucleotide
gugucauccgugcgucgga

SEQ ID NO: 2469209 - RNA, 19 nt, Artificial Sequence
  Description of Artificial Sequence: Synthetic oligonucleotide
agaccgcguuccuucccga

SEQ ID NO: 2469210 - RNA, 19 nt, Artificial Sequence
  Description of Artificial Sequence: Synthetic oligonucleotide
cuccauggccaaaacuagu

SEQ ID NO: 2469211 - RNA, 19 nt, Artificial Sequence
  Description of Artificial Sequence: Synthetic oligonucleotide
gggucauggucuucuggga

SEQ ID NO: 2469212 - RNA, 19 nt, Artificial Sequence
  Description of Artificial Sequence: Synthetic oligonucleotide
guggcugaugaacugcauu

SEQ ID NO: 2469213 - RNA, 19 nt, Artificial Sequence
  Description of Artificial Sequence: Synthetic oligonucleotide
cucccgaacuucguggaaa

SEQ ID NO: 2469214 - RNA, 19 nt, Artificial Sequence
  Description of Artificial Sequence: Synthetic oligonucleotide
guccucuggagcagucgug

SEQ ID NO: 2469215 - RNA, 19 nt, Artificial Sequence
  Description of Artificial Sequence: Synthetic oligonucleotide
uggugacuucagccucuuc

SEQ ID NO: 2469216 - RNA, 19 nt, Artificial Sequence
  Description of Artificial Sequence: Synthetic oligonucleotide
auguccagauuggcaggcu

SEQ ID NO: 2469217 - RNA, 19 nt, Artificial Sequence
  Description of Artificial Sequence: Synthetic oligonucleotide
agaccugucucagcugcuu

SEQ ID NO: 2469218 - RNA, 19 nt, Artificial Sequence
  Description of Artificial Sequence: Synthetic oligonucleotide
auuucccguacaagagcau

SEQ ID NO: 2469219 - RNA, 19 nt, Artificial Sequence
  Description of Artificial Sequence: Synthetic oligonucleotide
gccggucgaauccggguug

SEQ ID NO: 2469220 - RNA, 19 nt, Artificial Sequence
  Description of Artificial Sequence: Synthetic oligonucleotide
cgccgcacagcccagugcc

SEQ ID NO: 2469221 - RNA, 19 nt, Artificial Sequence
  Description of Artificial Sequence: Synthetic oligonucleotide
uucccgagcggcgccgcac

SEQ ID NO: 2469222 - RNA, 19 nt, Artificial Sequence
  Description of Artificial Sequence: Synthetic oligonucleotide
cguuccuucccgagcggcg

SEQ ID NO: 2469223 - RNA, 19 nt, Artificial Sequence
  Description of Artificial Sequence: Synthetic oligonucleotide
cguggaaacuucgacgauc

SEQ ID NO: 2469224 - RNA, 19 nt, Artificial Sequence
  Description of Artificial Sequence: Synthetic oligonucleotide
aguucacagcagauccuuu

SEQ ID NO: 2469225 - RNA, 19 nt, Artificial Sequence
  Description of Artificial Sequence: Synthetic oligonucleotide
cagcugaauucucgagcca

SEQ ID NO: 2469226 - RNA, 19 nt, Artificial Sequence
  Description of Artificial Sequence: Synthetic oligonucleotide
cacagcccagugccccgcc

SEQ ID NO: 2469227 - RNA, 19 nt, Artificial Sequence
  Description of Artificial Sequence: Synthetic oligonucleotide
ccuuuacacuccccucaag

SEQ ID NO: 2469228 - RNA, 19 nt, Artificial Sequence
  Description of Artificial Sequence: Synthetic oligonucleotide
gucgugggccccugggaaa

SEQ ID NO: 2469229 - RNA, 19 nt, Artificial Sequence
  Description of Artificial Sequence: Synthetic oligonucleotide
ccgcauggcugugaacucg

SEQ ID NO: 2469230 - RNA, 19 nt, Artificial Sequence
  Description of Artificial Sequence: Synthetic oligonucleotide
ccuuuucuuucuuacguau

SEQ ID NO: 2469231 - RNA, 19 nt, Artificial Sequence
  Description of Artificial Sequence: Synthetic oligonucleotide
ggcucaucaucgaugcgaa

SEQ ID NO: 2469232 - RNA, 19 nt, Artificial Sequence
  Description of Artificial Sequence: Synthetic oligonucleotide
caucgaugcgaauccggau

SEQ ID NO: 2469233 - RNA, 19 nt, Artificial Sequence
  Description of Artificial Sequence: Synthetic oligonucleotide
ugcgucggacgcgguaaau

SEQ ID NO: 2469234 - RNA, 19 nt, Artificial Sequence
  Description of Artificial Sequence: Synthetic oligonucleotide
gcagaccgcguuccuuccc

SEQ ID NO: 2469235 - RNA, 19 nt, Artificial Sequence
  Description of Artificial Sequence: Synthetic oligonucleotide
gguggggucauggucuucu

SEQ ID NO: 2469236 - RNA, 19 nt, Artificial Sequence
  Description of Artificial Sequence: Synthetic oligonucleotide
ugcuaccaacugggcgagc

SEQ ID NO: 2469237 - RNA, 19 nt, Artificial Sequence
  Description of Artificial Sequence: Synthetic oligonucleotide
gcuaccaacugggcgagcu

SEQ ID NO: 2469238 - RNA, 19 nt, Artificial Sequence
  Description of Artificial Sequence: Synthetic oligonucleotide
augcagcggaggucucaaa

SEQ ID NO: 2469239 - RNA, 19 nt, Artificial Sequence
  Description of Artificial Sequence: Synthetic oligonucleotide
ggcgccgcacagcccagug

SEQ ID NO: 2469240 - RNA, 19 nt, Artificial Sequence
  Description of Artificial Sequence: Synthetic oligonucleotide
cuucuccugcucucaugua

SEQ ID NO: 2469241 - RNA, 19 nt, Artificial Sequence
  Description of Artificial Sequence: Synthetic oligonucleotide
ccacaagaaccacuggugu

SEQ ID NO: 2469242 - RNA, 19 nt, Artificial Sequence
  Description of Artificial Sequence: Synthetic oligonucleotide
auggugacuucagccucuu

SEQ ID NO: 2469243 - RNA, 19 nt, Artificial Sequence
  Description of Artificial Sequence: Synthetic oligonucleotide
acgcgguaaauaaguuguu

SEQ ID NO: 2469244 - RNA, 19 nt, Artificial Sequence
  Description of Artificial Sequence: Synthetic oligonucleotide
cgucggacgcgguaaauaa

SEQ ID NO: 2469245 - RNA, 19 nt, Artificial Sequence
  Description of Artificial Sequence: Synthetic oligonucleotide
uccgugcgucggacgcggu

SEQ ID NO: 2469246 - RNA, 19 nt, Artificial Sequence
  Description of Artificial Sequence: Synthetic oligonucleotide
cagcaucacuaguuuguau

SEQ ID NO: 2469247 - RNA, 19 nt, Artificial Sequence
  Description of Artificial Sequence: Synthetic oligonucleotide
ccugggaaaggccuccucu

SEQ ID NO: 2469248 - RNA, 19 nt, Artificial Sequence
  Description of Artificial Sequence: Synthetic oligonucleotide
auagcgcugcagggcugcu

SEQ ID NO: 2469249 - RNA, 19 nt, Artificial Sequence
  Description of Artificial Sequence: Synthetic oligonucleotide
uagcgcugcagggcugcua

SEQ ID NO: 2469250 - RNA, 19 nt, Artificial Sequence
  Description of Artificial Sequence: Synthetic oligonucleotide
gagaccugucucagcugcu

SEQ ID NO: 2469251 - RNA, 19 nt, Artificial Sequence
  Description of Artificial Sequence: Synthetic oligonucleotide
ccgcaguucacagcagauc

SEQ ID NO: 2469252 - RNA, 19 nt, Artificial Sequence
  Description of Artificial Sequence: Synthetic oligonucleotide
ccgcacagcccagugcccc

SEQ ID NO: 2469253 - RNA, 19 nt, Artificial Sequence
  Description of Artificial Sequence: Synthetic oligonucleotide
acgauccgugauggaguaa

SEQ ID NO: 2469254 - RNA, 19 nt, Artificial Sequence
  Description of Artificial Sequence: Synthetic oligonucleotide
cgagccagagacaaucccu

SEQ ID NO: 2469255 - RNA, 19 nt, Artificial Sequence
  Description of Artificial Sequence: Synthetic oligonucleotide
gcgccgcacagcccagugc

SEQ ID NO: 2469256 - RNA, 19 nt, Artificial Sequence
  Description of Artificial Sequence: Synthetic oligonucleotide
gugcgucggacgcgguaaa

SEQ ID NO: 2469257 - RNA, 19 nt, Artificial Sequence
  Description of Artificial Sequence: Synthetic oligonucleotide
gccuccucuaaagccgguc

SEQ ID NO: 2469258 - RNA, 19 nt, Artificial Sequence
  Description of Artificial Sequence: Synthetic oligonucleotide
ccggucgaauccggguugc

SEQ ID NO: 2469259 - RNA, 19 nt, Artificial Sequence
  Description of Artificial Sequence: Synthetic oligonucleotide
ccggaucuuauaagcgucu

SEQ ID NO: 2469260 - RNA, 19 nt, Artificial Sequence
  Description of Artificial Sequence: Synthetic oligonucleotide
cggguugcagaccgcguuc

SEQ ID NO: 2469261 - RNA, 19 nt, Artificial Sequence
  Description of Artificial Sequence: Synthetic oligonucleotide
cuucccgagcggcgccgca

SEQ ID NO: 2469262 - RNA, 19 nt, Artificial Sequence
  Description of Artificial Sequence: Synthetic oligonucleotide
gguaugcagcggaggucuc

SEQ ID NO: 2469263 - RNA, 19 nt, Artificial Sequence
  Description of Artificial Sequence: Synthetic oligonucleotide
cccguacaagagcauggaa

SEQ ID NO: 2469264 - RNA, 19 nt, Artificial Sequence
  Description of Artificial Sequence: Synthetic oligonucleotide
cgaauccggguugcagacc

SEQ ID NO: 2469265 - RNA, 19 nt, Artificial Sequence
  Description of Artificial Sequence: Synthetic oligonucleotide
gcaccgcaguucacagcag

SEQ ID NO: 2469266 - RNA, 19 nt, Artificial Sequence
  Description of Artificial Sequence: Synthetic oligonucleotide
caccagcacccagcaucac

SEQ ID NO: 2469267 - RNA, 19 nt, Artificial Sequence
  Description of Artificial Sequence: Synthetic oligonucleotide
cggccuguccagcuguauc

SEQ ID NO: 2469268 - RNA, 19 nt, Artificial Sequence
  Description of Artificial Sequence: Synthetic oligonucleotide
gcacagcccagugccccgc

SEQ ID NO: 2469269 - RNA, 19 nt, Artificial Sequence
  Description of Artificial Sequence: Synthetic oligonucleotide
gcgucggacgcgguaaaua

SEQ ID NO: 2469270 - RNA, 19 nt, Artificial Sequence
  Description of Artificial Sequence: Synthetic oligonucleotide
ccgaacuucguggaaacuu

SEQ ID NO: 2469271 - RNA, 19 nt, Artificial Sequence
  Description of Artificial Sequence: Synthetic oligonucleotide
cucggccuguccagcugua

SEQ ID NO: 2469272 - RNA, 19 nt, Artificial Sequence
  Description of Artificial Sequence: Synthetic oligonucleotide
gggcgagcuccagaaucca

SEQ ID NO: 2469273 - RNA, 19 nt, Artificial Sequence
  Description of Artificial Sequence: Synthetic oligonucleotide
ccacuggugugucauccgu

SEQ ID NO: 2469274 - RNA, 19 nt, Artificial Sequence
  Description of Artificial Sequence: Synthetic oligonucleotide
gcgagcuccagaauccauu

SEQ ID NO: 2469275 - RNA, 19 nt, Artificial Sequence
  Description of Artificial Sequence: Synthetic oligonucleotide
gccgcacagcccagugccc

SEQ ID NO: 2469276 - RNA, 19 nt, Artificial Sequence
  Description of Artificial Sequence: Synthetic oligonucleotide
cgcguuccuucccgagcgg

SEQ ID NO: 2469277 - RNA, 19 nt, Artificial Sequence
  Description of Artificial Sequence: Synthetic oligonucleotide
cgguaugcagcggaggucu

SEQ ID NO: 2469278 - RNA, 19 nt, Artificial Sequence
  Description of Artificial Sequence: Synthetic oligonucleotide
ccgagcggcgccgcacagc

SEQ ID NO: 2469279 - RNA, 19 nt, Artificial Sequence
  Description of Artificial Sequence: Synthetic oligonucleotide
ggagcagucgugggccccu

SEQ ID NO: 2469280 - RNA, 19 nt, Artificial Sequence
  Description of Artificial Sequence: Synthetic oligonucleotide
ccuucccgagcggcgccgc

SEQ ID NO: 2469281 - RNA, 19 nt, Artificial Sequence
  Description of Artificial Sequence: Synthetic oligonucleotide
cgugcgucggacgcgguaa

SEQ ID NO: 2469282 - RNA, 19 nt, Artificial Sequence
  Description of Artificial Sequence: Synthetic oligonucleotide
ccucuaaagccggucgaau

SEQ ID NO: 2469283 - RNA, 19 nt, Artificial Sequence
  Description of Artificial Sequence: Synthetic oligonucleotide
cgugggccccugggaaagg

SEQ ID NO: 2469284 - RNA, 19 nt, Artificial Sequence
  Description of Artificial Sequence: Synthetic oligonucleotide
ggcgagcuccagaauccau

SEQ ID NO: 2469285 - RNA, 19 nt, Artificial Sequence
  Description of Artificial Sequence: Synthetic oligonucleotide
cgcgguaaauaaguuguuu

SEQ ID NO: 2469286 - RNA, 19 nt, Artificial Sequence
  Description of Artificial Sequence: Synthetic oligonucleotide
ccggguugcagaccgcguu

SEQ ID NO: 2469287 - RNA, 19 nt, Artificial Sequence
  Description of Artificial Sequence: Synthetic oligonucleotide
gcggcgccgcacagcccag

SEQ ID NO: 2469288 - RNA, 19 nt, Artificial Sequence
  Description of Artificial Sequence: Synthetic oligonucleotide
ccgugcgucggacgcggua

SEQ ID NO: 2469289 - RNA, 19 nt, Artificial Sequence
  Description of Artificial Sequence: Synthetic oligonucleotide
cccgaacuucguggaaacu

SEQ ID NO: 2469290 - RNA, 19 nt, Artificial Sequence
  Description of Artificial Sequence: Synthetic oligonucleotide
cggacgcgguaaauaaguu

SEQ ID NO: 2469291 - RNA, 19 nt, Artificial Sequence
  Description of Artificial Sequence: Synthetic oligonucleotide
ggccuccucuaaagccggu

SEQ ID NO: 2469292 - RNA, 19 nt, Artificial Sequence
  Description of Artificial Sequence: Synthetic oligonucleotide
cggucgaauccggguugca

SEQ ID NO: 2469293 - RNA, 19 nt, Artificial Sequence
  Description of Artificial Sequence: Synthetic oligonucleotide
cgaugcgaauccggaucuu

SEQ ID NO: 2469294 - RNA, 19 nt, Artificial Sequence
  Description of Artificial Sequence: Synthetic oligonucleotide
cggcgccgcacagcccagu

SEQ ID NO: 2469295 - RNA, 19 nt, Artificial Sequence
  Description of Artificial Sequence: Synthetic oligonucleotide
aaauaucuaguaaugaggc

SEQ ID NO: 2469296 - RNA, 19 nt, Artificial Sequence
  Description of Artificial Sequence: Synthetic oligonucleotide
uaauguaacaauaaugugu

SEQ ID NO: 2469297 - RNA, 19 nt, Artificial Sequence
  Description of Artificial Sequence: Synthetic oligonucleotide
uauuuagugaaauuaaugu

SEQ ID NO: 2469298 - RNA, 19 nt, Artificial Sequence
  Description of Artificial Sequence: Synthetic oligonucleotide
aaauucuucacauugguaa

SEQ ID NO: 2469299 - RNA, 19 nt, Artificial Sequence
  Description of Artificial Sequence: Synthetic oligonucleotide
cuuaucauggcuuugcacg

SEQ ID NO: 2469300 - RNA, 19 nt, Artificial Sequence
  Description of Artificial Sequence: Synthetic oligonucleotide
aaaauaacuccuuaucaug

SEQ ID NO: 2469301 - RNA, 19 nt, Artificial Sequence
  Description of Artificial Sequence: Synthetic oligonucleotide
uauaucuuaacacuaauua

SEQ ID NO: 2469302 - RNA, 19 nt, Artificial Sequence
  Description of Artificial Sequence: Synthetic oligonucleotide
uauaaauucuucacauugg

SEQ ID NO: 2469303 - RNA, 19 nt, Artificial Sequence
  Description of Artificial Sequence: Synthetic oligonucleotide
aauguguuuauaucuuaac

SEQ ID NO: 2469304 - RNA, 19 nt, Artificial Sequence
  Description of Artificial Sequence: Synthetic oligonucleotide
agaaaucuggcuuuucugc

SEQ ID NO: 2469305 - RNA, 19 nt, Artificial Sequence
  Description of Artificial Sequence: Synthetic oligonucleotide
auagacaucauaguaaaac

SEQ ID NO: 2469306 - RNA, 19 nt, Artificial Sequence
  Description of Artificial Sequence: Synthetic oligonucleotide
auuaauguaacaauaaugu

SEQ ID NO: 2469307 - RNA, 19 nt, Artificial Sequence
  Description of Artificial Sequence: Synthetic oligonucleotide
gacuaagacaccaugaagg

SEQ ID NO: 2469308 - RNA, 19 nt, Artificial Sequence
  Description of Artificial Sequence: Synthetic oligonucleotide
uuaugaaauauuuagugaa

SEQ ID NO: 2469309 - RNA, 19 nt, Artificial Sequence
  Description of Artificial Sequence: Synthetic oligonucleotide
aaauguaugcuucgguuuc

SEQ ID NO: 2469310 - RNA, 19 nt, Artificial Sequence
  Description of Artificial Sequence: Synthetic oligonucleotide
agaaucuuuucucauuggc

SEQ ID NO: 2469311 - RNA, 19 nt, Artificial Sequence
  Description of Artificial Sequence: Synthetic oligonucleotide
uuaacacuaauuaaaugcu

SEQ ID NO: 2469312 - RNA, 19 nt, Artificial Sequence
  Description of Artificial Sequence: Synthetic oligonucleotide
acaauaauguguuuauauc

SEQ ID NO: 2469313 - RNA, 19 nt, Artificial Sequence
  Description of Artificial Sequence: Synthetic oligonucleotide
aaauaacuccuuaucaugg

SEQ ID NO: 2469314 - RNA, 19 nt, Artificial Sequence
  Description of Artificial Sequence: Synthetic oligonucleotide
ugaaauuaauguaacaaua

SEQ ID NO: 2469315 - RNA, 19 nt, Artificial Sequence
  Description of Artificial Sequence: Synthetic oligonucleotide
uaaaacuaccuuaugaaau

SEQ ID NO: 2469316 - RNA, 19 nt, Artificial Sequence
  Description of Artificial Sequence: Synthetic oligonucleotide
aguguacuuaaauuggcgg

SEQ ID NO: 2469317 - RNA, 19 nt, Artificial Sequence
  Description of Artificial Sequence: Synthetic oligonucleotide
uaguaaaacuaccuuauga

SEQ ID NO: 2469318 - RNA, 19 nt, Artificial Sequence
  Description of Artificial Sequence: Synthetic oligonucleotide
aagaauagacaucauagua

SEQ ID NO: 2469319 - RNA, 19 nt, Artificial Sequence
  Description of Artificial Sequence: Synthetic oligonucleotide
gagaucagcucacagaugc

SEQ ID NO: 2469320 - RNA, 19 nt, Artificial Sequence
  Description of Artificial Sequence: Synthetic oligonucleotide
uuauuugcaguauugagau

SEQ ID NO: 2469321 - RNA, 19 nt, Artificial Sequence
  Description of Artificial Sequence: Synthetic oligonucleotide
uguuauuugcaguauugag

SEQ ID NO: 2469322 - RNA, 19 nt, Artificial Sequence
  Description of Artificial Sequence: Synthetic oligonucleotide
aacacuaauuaaaugcuuc

SEQ ID NO: 2469323 - RNA, 19 nt, Artificial Sequence
  Description of Artificial Sequence: Synthetic oligonucleotide
uuuacacgcccuaacacag

SEQ ID NO: 2469324 - RNA, 19 nt, Artificial Sequence
  Description of Artificial Sequence: Synthetic oligonucleotide
aguaaaacuaccuuaugaa

SEQ ID NO: 2469325 - RNA, 19 nt, Artificial Sequence
  Description of Artificial Sequence: Synthetic oligonucleotide
ucuccuuacauucuuccag

SEQ ID NO: 2469326 - RNA, 19 nt, Artificial Sequence
  Description of Artificial Sequence: Synthetic oligonucleotide
uuaauguaacaauaaugug

SEQ ID NO: 2469327 - RNA, 19 nt, Artificial Sequence
  Description of Artificial Sequence: Synthetic oligonucleotide
uguaguagaaucuuuucuc

SEQ ID NO: 2469328 - RNA, 19 nt, Artificial Sequence
  Description of Artificial Sequence: Synthetic oligonucleotide
guugaauuguaguagaauc

SEQ ID NO: 2469329 - RNA, 19 nt, Artificial Sequence
  Description of Artificial Sequence: Synthetic oligonucleotide
uccaaagucucaaaguugu

SEQ ID NO: 2469330 - RNA, 19 nt, Artificial Sequence
  Description of Artificial Sequence: Synthetic oligonucleotide
aaucuuuucucauuggcuu

SEQ ID NO: 2469331 - RNA, 19 nt, Artificial Sequence
  Description of Artificial Sequence: Synthetic oligonucleotide
aguaaugaggccucggcag

SEQ ID NO: 2469332 - RNA, 19 nt, Artificial Sequence
  Description of Artificial Sequence: Synthetic oligonucleotide
aaaacuaccuuaugaaaua

SEQ ID NO: 2469333 - RNA, 19 nt, Artificial Sequence
  Description of Artificial Sequence: Synthetic oligonucleotide
ucaucuaccuucauugcgc

SEQ ID NO: 2469334 - RNA, 19 nt, Artificial Sequence
  Description of Artificial Sequence: Synthetic oligonucleotide
ugcaguauugagaucagcu

SEQ ID NO: 2469335 - RNA, 19 nt, Artificial Sequence
  Description of Artificial Sequence: Synthetic oligonucleotide
uaaauuggcggcauuuccc

SEQ ID NO: 2469336 - RNA, 19 nt, Artificial Sequence
  Description of Artificial Sequence: Synthetic oligonucleotide
cuuuugauauucuuuugag

SEQ ID NO: 2469337 - RNA, 19 nt, Artificial Sequence
  Description of Artificial Sequence: Synthetic oligonucleotide
gaggaaaccucuuuuacac

SEQ ID NO: 2469338 - RNA, 19 nt, Artificial Sequence
  Description of Artificial Sequence: Synthetic oligonucleotide
aauguaacaauaauguguu

SEQ ID NO: 2469339 - RNA, 19 nt, Artificial Sequence
  Description of Artificial Sequence: Synthetic oligonucleotide
uuuuacacgcccuaacaca

SEQ ID NO: 2469340 - RNA, 19 nt, Artificial Sequence
  Description of Artificial Sequence: Synthetic oligonucleotide
auccaguguacuuaaauug

SEQ ID NO: 2469341 - RNA, 19 nt, Artificial Sequence
  Description of Artificial Sequence: Synthetic oligonucleotide
uugagaucagcucacagau

SEQ ID NO: 2469342 - RNA, 19 nt, Artificial Sequence
  Description of Artificial Sequence: Synthetic oligonucleotide
uuguaguagaaucuuuucu

SEQ ID NO: 2469343 - RNA, 19 nt, Artificial Sequence
  Description of Artificial Sequence: Synthetic oligonucleotide
aaucgauuuucguuuccuc

SEQ ID NO: 2469344 - RNA, 19 nt, Artificial Sequence
  Description of Artificial Sequence: Synthetic oligonucleotide
agacuacuuucacagaagg

SEQ ID NO: 2469345 - RNA, 19 nt, Artificial Sequence
  Description of Artificial Sequence: Synthetic oligonucleotide
uuaucauggcuuugcacgg

SEQ ID NO: 2469346 - RNA, 19 nt, Artificial Sequence
  Description of Artificial Sequence: Synthetic oligonucleotide
aucaucuaccuucauugcg

SEQ ID NO: 2469347 - RNA, 19 nt, Artificial Sequence
  Description of Artificial Sequence: Synthetic oligonucleotide
ucauaguaaaacuaccuua

SEQ ID NO: 2469348 - RNA, 19 nt, Artificial Sequence
  Description of Artificial Sequence: Synthetic oligonucleotide
uguuuauaucuuaacacua

SEQ ID NO: 2469349 - RNA, 19 nt, Artificial Sequence
  Description of Artificial Sequence: Synthetic oligonucleotide
ucuuuuacacgcccuaaca

SEQ ID NO: 2469350 - RNA, 19 nt, Artificial Sequence
  Description of Artificial Sequence: Synthetic oligonucleotide
auaucuaguaaugaggccu

SEQ ID NO: 2469351 - RNA, 19 nt, Artificial Sequence
  Description of Artificial Sequence: Synthetic oligonucleotide
ucuuaacacuaauuaaaug

SEQ ID NO: 2469352 - RNA, 19 nt, Artificial Sequence
  Description of Artificial Sequence: Synthetic oligonucleotide
gguaguaaaauuauuauga

SEQ ID NO: 2469353 - RNA, 19 nt, Artificial Sequence
  Description of Artificial Sequence: Synthetic oligonucleotide
uagacaucauaguaaaacu

SEQ ID NO: 2469354 - RNA, 19 nt, Artificial Sequence
  Description of Artificial Sequence: Synthetic oligonucleotide
auacuugaauugcucacac

SEQ ID NO: 2469355 - RNA, 19 nt, Artificial Sequence
  Description of Artificial Sequence: Synthetic oligonucleotide
uguaacaauaauguguuua

SEQ ID NO: 2469356 - RNA, 19 nt, Artificial Sequence
  Description of Artificial Sequence: Synthetic oligonucleotide
aagucucaaaguuguugcg

SEQ ID NO: 2469357 - RNA, 19 nt, Artificial Sequence
  Description of Artificial Sequence: Synthetic oligonucleotide
cuuaugaaauauuuaguga

SEQ ID NO: 2469358 - RNA, 19 nt, Artificial Sequence
  Description of Artificial Sequence: Synthetic oligonucleotide
aaauuggcggcauuuccca

SEQ ID NO: 2469359 - RNA, 19 nt, Artificial Sequence
  Description of Artificial Sequence: Synthetic oligonucleotide
auuuagugaaauuaaugua

SEQ ID NO: 2469360 - RNA, 19 nt, Artificial Sequence
  Description of Artificial Sequence: Synthetic oligonucleotide
auaucuuaacacuaauuaa

SEQ ID NO: 2469361 - RNA, 19 nt, Artificial Sequence
  Description of Artificial Sequence: Synthetic oligonucleotide
uucacauugguaaguaaaa

SEQ ID NO: 2469362 - RNA, 19 nt, Artificial Sequence
  Description of Artificial Sequence: Synthetic oligonucleotide
cauugcgcaaaauguaugc

SEQ ID NO: 2469363 - RNA, 19 nt, Artificial Sequence
  Description of Artificial Sequence: Synthetic oligonucleotide
uuauaucuuaacacuaauu

SEQ ID NO: 2469364 - RNA, 19 nt, Artificial Sequence
  Description of Artificial Sequence: Synthetic oligonucleotide
ugaggaaaccucuuuuaca

SEQ ID NO: 2469365 - RNA, 19 nt, Artificial Sequence
  Description of Artificial Sequence: Synthetic oligonucleotide
uaauguguuuauaucuuaa

SEQ ID NO: 2469366 - RNA, 19 nt, Artificial Sequence
  Description of Artificial Sequence: Synthetic oligonucleotide
ccuuaugaaauauuuagug

SEQ ID NO: 2469367 - RNA, 19 nt, Artificial Sequence
  Description of Artificial Sequence: Synthetic oligonucleotide
accuucauugcgcaaaaug

SEQ ID NO: 2469368 - RNA, 19 nt, Artificial Sequence
  Description of Artificial Sequence: Synthetic oligonucleotide
cuugaauugcucacacugc

SEQ ID NO: 2469369 - RNA, 19 nt, Artificial Sequence
  Description of Artificial Sequence: Synthetic oligonucleotide
ugacacauuccacugucug

SEQ ID NO: 2469370 - RNA, 19 nt, Artificial Sequence
  Description of Artificial Sequence: Synthetic oligonucleotide
uucauugcgcaaaauguau

SEQ ID NO: 2469371 - RNA, 19 nt, Artificial Sequence
  Description of Artificial Sequence: Synthetic oligonucleotide
uguacuuaaauuggcggca

SEQ ID NO: 2469372 - RNA, 19 nt, Artificial Sequence
  Description of Artificial Sequence: Synthetic oligonucleotide
aauaauguguuuauaucuu

SEQ ID NO: 2469373 - RNA, 19 nt, Artificial Sequence
  Description of Artificial Sequence: Synthetic oligonucleotide
uuuucguuuccucugcauc

SEQ ID NO: 2469374 - RNA, 19 nt, Artificial Sequence
  Description of Artificial Sequence: Synthetic oligonucleotide
uugaggaaaccucuuuuac

SEQ ID NO: 2469375 - RNA, 19 nt, Artificial Sequence
  Description of Artificial Sequence: Synthetic oligonucleotide
ugucuuuacagucuucuuu

SEQ ID NO: 2469376 - RNA, 19 nt, Artificial Sequence
  Description of Artificial Sequence: Synthetic oligonucleotide
caguguacuuaaauuggcg

SEQ ID NO: 2469377 - RNA, 19 nt, Artificial Sequence
  Description of Artificial Sequence: Synthetic oligonucleotide
guuauuugcaguauugaga

SEQ ID NO: 2469378 - RNA, 19 nt, Artificial Sequence
  Description of Artificial Sequence: Synthetic oligonucleotide
uuugcacgguccaucaucu

SEQ ID NO: 2469379 - RNA, 19 nt, Artificial Sequence
  Description of Artificial Sequence: Synthetic oligonucleotide
guguacuuaaauuggcggc

SEQ ID NO: 2469380 - RNA, 19 nt, Artificial Sequence
  Description of Artificial Sequence: Synthetic oligonucleotide
ggaucaaaguguuauuugc

SEQ ID NO: 2469381 - RNA, 19 nt, Artificial Sequence
  Description of Artificial Sequence: Synthetic oligonucleotide
ucauugcgcaaaauguaug

SEQ ID NO: 2469382 - RNA, 19 nt, Artificial Sequence
  Description of Artificial Sequence: Synthetic oligonucleotide
uggguguuuugguagacug

SEQ ID NO: 2469383 - RNA, 19 nt, Artificial Sequence
  Description of Artificial Sequence: Synthetic oligonucleotide
ucuugcauucauccaaagu

SEQ ID NO: 2469384 - RNA, 19 nt, Artificial Sequence
  Description of Artificial Sequence: Synthetic oligonucleotide
aguauugagaucagcucac

SEQ ID NO: 2469385 - RNA, 19 nt, Artificial Sequence
  Description of Artificial Sequence: Synthetic oligonucleotide
auauucuuuugaggaaacc

SEQ ID NO: 2469386 - RNA, 19 nt, Artificial Sequence
  Description of Artificial Sequence: Synthetic oligonucleotide
uggacuaagacaccaugaa

SEQ ID NO: 2469387 - RNA, 19 nt, Artificial Sequence
  Description of Artificial Sequence: Synthetic oligonucleotide
cuaguaaugaggccucggc

SEQ ID NO: 2469388 - RNA, 19 nt, Artificial Sequence
  Description of Artificial Sequence: Synthetic oligonucleotide
uucuuuggguuuuaauugu

SEQ ID NO: 2469389 - RNA, 19 nt, Artificial Sequence
  Description of Artificial Sequence: Synthetic oligonucleotide
cuuuuacacgcccuaacac

SEQ ID NO: 2469390 - RNA, 19 nt, Artificial Sequence
  Description of Artificial Sequence: Synthetic oligonucleotide
uaguaaugaggccucggca

SEQ ID NO: 2469391 - RNA, 19 nt, Artificial Sequence
  Description of Artificial Sequence: Synthetic oligonucleotide
aauugcucacacugcuuug

SEQ ID NO: 2469392 - RNA, 19 nt, Artificial Sequence
  Description of Artificial Sequence: Synthetic oligonucleotide
agaauagacaucauaguaa

SEQ ID NO: 2469393 - RNA, 19 nt, Artificial Sequence
  Description of Artificial Sequence: Synthetic oligonucleotide
gacacauuccacugucugc

SEQ ID NO: 2469394 - RNA, 19 nt, Artificial Sequence
  Description of Artificial Sequence: Synthetic oligonucleotide
ggaaaccucuuuuacacgc

SEQ ID NO: 2469395 - RNA, 19 nt, Artificial Sequence
  Description of Artificial Sequence: Synthetic oligonucleotide
ucuuccaggguuucaaauc

SEQ ID NO: 2469396 - RNA, 19 nt, Artificial Sequence
  Description of Artificial Sequence: Synthetic oligonucleotide
aaaucgauuuucguuuccu

SEQ ID NO: 2469397 - RNA, 19 nt, Artificial Sequence
  Description of Artificial Sequence: Synthetic oligonucleotide
augaagggccaugauauuc

SEQ ID NO: 2469398 - RNA, 19 nt, Artificial Sequence
  Description of Artificial Sequence: Synthetic oligonucleotide
auaacuccuuaucauggcu

SEQ ID NO: 2469399 - RNA, 19 nt, Artificial Sequence
  Description of Artificial Sequence: Synthetic oligonucleotide
uagugaaauuaauguaaca

SEQ ID NO: 2469400 - RNA, 19 nt, Artificial Sequence
  Description of Artificial Sequence: Synthetic oligonucleotide
ugcacgguccaucaucuac

SEQ ID NO: 2469401 - RNA, 19 nt, Artificial Sequence
  Description of Artificial Sequence: Synthetic oligonucleotide
ugaugcaugucuccuuaca

SEQ ID NO: 2469402 - RNA, 19 nt, Artificial Sequence
  Description of Artificial Sequence: Synthetic oligonucleotide
guaguagaaucuuuucuca

SEQ ID NO: 2469403 - RNA, 19 nt, Artificial Sequence
  Description of Artificial Sequence: Synthetic oligonucleotide
uaucuaguaaugaggccuc

SEQ ID NO: 2469404 - RNA, 19 nt, Artificial Sequence
  Description of Artificial Sequence: Synthetic oligonucleotide
cuugacacauuccacuguc

SEQ ID NO: 2469405 - RNA, 19 nt, Artificial Sequence
  Description of Artificial Sequence: Synthetic oligonucleotide
ucuaguaaugaggccucgg

SEQ ID NO: 2469406 - RNA, 19 nt, Artificial Sequence
  Description of Artificial Sequence: Synthetic oligonucleotide
gauauucccaacggcuggg

SEQ ID NO: 2469407 - RNA, 19 nt, Artificial Sequence
  Description of Artificial Sequence: Synthetic oligonucleotide
aguuguugcgguugccuag

SEQ ID NO: 2469408 - RNA, 19 nt, Artificial Sequence
  Description of Artificial Sequence: Synthetic oligonucleotide
ugaauuguaguagaaucuu

SEQ ID NO: 2469409 - RNA, 19 nt, Artificial Sequence
  Description of Artificial Sequence: Synthetic oligonucleotide
cuacuuucacagaaggcuc

SEQ ID NO: 2469410 - RNA, 19 nt, Artificial Sequence
  Description of Artificial Sequence: Synthetic oligonucleotide
aguagaaucuuuucucauu

SEQ ID NO: 2469411 - RNA, 19 nt, Artificial Sequence
  Description of Artificial Sequence: Synthetic oligonucleotide
uuauaaccucugaugcaug

SEQ ID NO: 2469412 - RNA, 19 nt, Artificial Sequence
  Description of Artificial Sequence: Synthetic oligonucleotide
uggcuugacacauuccacu

SEQ ID NO: 2469413 - RNA, 19 nt, Artificial Sequence
  Description of Artificial Sequence: Synthetic oligonucleotide
cagaaaucuggcuuuucug

SEQ ID NO: 2469414 - RNA, 19 nt, Artificial Sequence
  Description of Artificial Sequence: Synthetic oligonucleotide
aggaaaccucuuuuacacg

SEQ ID NO: 2469415 - RNA, 19 nt, Artificial Sequence
  Description of Artificial Sequence: Synthetic oligonucleotide
gaagaauagacaucauagu

SEQ ID NO: 2469416 - RNA, 19 nt, Artificial Sequence
  Description of Artificial Sequence: Synthetic oligonucleotide
uaacacuaauuaaaugcuu

SEQ ID NO: 2469417 - RNA, 19 nt, Artificial Sequence
  Description of Artificial Sequence: Synthetic oligonucleotide
ucugaugcaugucuccuua

SEQ ID NO: 2469418 - RNA, 19 nt, Artificial Sequence
  Description of Artificial Sequence: Synthetic oligonucleotide
acuaccuuaugaaauauuu

SEQ ID NO: 2469419 - RNA, 19 nt, Artificial Sequence
  Description of Artificial Sequence: Synthetic oligonucleotide
caguauugagaucagcuca

SEQ ID NO: 2469420 - RNA, 19 nt, Artificial Sequence
  Description of Artificial Sequence: Synthetic oligonucleotide
cuucauagacuacuuucac

SEQ ID NO: 2469421 - RNA, 19 nt, Artificial Sequence
  Description of Artificial Sequence: Synthetic oligonucleotide
guguuuauaucuuaacacu

SEQ ID NO: 2469422 - RNA, 19 nt, Artificial Sequence
  Description of Artificial Sequence: Synthetic oligonucleotide
auaauguguuuauaucuua

SEQ ID NO: 2469423 - RNA, 19 nt, Artificial Sequence
  Description of Artificial Sequence: Synthetic oligonucleotide
auucccaacggcugggugu

SEQ ID NO: 2469424 - RNA, 19 nt, Artificial Sequence
  Description of Artificial Sequence: Synthetic oligonucleotide
caaaguguuauuugcagua

SEQ ID NO: 2469425 - RNA, 19 nt, Artificial Sequence
  Description of Artificial Sequence: Synthetic oligonucleotide
gaucaaaguguuauuugca

SEQ ID NO: 2469426 - RNA, 19 nt, Artificial Sequence
  Description of Artificial Sequence: Synthetic oligonucleotide
cuuugcacgguccaucauc

SEQ ID NO: 2469427 - RNA, 19 nt, Artificial Sequence
  Description of Artificial Sequence: Synthetic oligonucleotide
gauauucuuuugaggaaac

SEQ ID NO: 2469428 - RNA, 19 nt, Artificial Sequence
  Description of Artificial Sequence: Synthetic oligonucleotide
agggccaugauauucccaa

SEQ ID NO: 2469429 - RNA, 19 nt, Artificial Sequence
  Description of Artificial Sequence: Synthetic oligonucleotide
uccagauggugucuuuaca

SEQ ID NO: 2469430 - RNA, 19 nt, Artificial Sequence
  Description of Artificial Sequence: Synthetic oligonucleotide
aacuccuuaucauggcuuu

SEQ ID NO: 2469431 - RNA, 19 nt, Artificial Sequence
  Description of Artificial Sequence: Synthetic oligonucleotide
ugcauucauccaaagucuc

SEQ ID NO: 2469432 - RNA, 19 nt, Artificial Sequence
  Description of Artificial Sequence: Synthetic oligonucleotide
acacauuccacugucugcu

SEQ ID NO: 2469433 - RNA, 19 nt, Artificial Sequence
  Description of Artificial Sequence: Synthetic oligonucleotide
uaacuccuuaucauggcuu

SEQ ID NO: 2469434 - RNA, 19 nt, Artificial Sequence
  Description of Artificial Sequence: Synthetic oligonucleotide
aaaguguuauuugcaguau

SEQ ID NO: 2469435 - RNA, 19 nt, Artificial Sequence
  Description of Artificial Sequence: Synthetic oligonucleotide
uuacauucuuccaggguuu

SEQ ID NO: 2469436 - RNA, 19 nt, Artificial Sequence
  Description of Artificial Sequence: Synthetic oligonucleotide
ggccaugauauucccaacg

SEQ ID NO: 2469437 - RNA, 19 nt, Artificial Sequence
  Description of Artificial Sequence: Synthetic oligonucleotide
aaacuaccuuaugaaauau

SEQ ID NO: 2469438 - RNA, 19 nt, Artificial Sequence
  Description of Artificial Sequence: Synthetic oligonucleotide
uucacagaaggcuccuuuc

SEQ ID NO: 2469439 - RNA, 19 nt, Artificial Sequence
  Description of Artificial Sequence: Synthetic oligonucleotide
uacacgcccuaacacaguc

SEQ ID NO: 2469440 - RNA, 19 nt, Artificial Sequence
  Description of Artificial Sequence: Synthetic oligonucleotide
ugagaucagcucacagaug

SEQ ID NO: 2469441 - RNA, 19 nt, Artificial Sequence
  Description of Artificial Sequence: Synthetic oligonucleotide
ucucauuggcuugacacau

SEQ ID NO: 2469442 - RNA, 19 nt, Artificial Sequence
  Description of Artificial Sequence: Synthetic oligonucleotide
gacuacuuucacagaaggc

SEQ ID NO: 2469443 - RNA, 19 nt, Artificial Sequence
  Description of Artificial Sequence: Synthetic oligonucleotide
uccuuaucauggcuuugca

SEQ ID NO: 2469444 - RNA, 19 nt, Artificial Sequence
  Description of Artificial Sequence: Synthetic oligonucleotide
ggacuaagacaccaugaag

SEQ ID NO: 2469445 - RNA, 19 nt, Artificial Sequence
  Description of Artificial Sequence: Synthetic oligonucleotide
guaacaauaauguguuuau

SEQ ID NO: 2469446 - RNA, 19 nt, Artificial Sequence
  Description of Artificial Sequence: Synthetic oligonucleotide
uuggcggcauuucccaaug

SEQ ID NO: 2469447 - RNA, 19 nt, Artificial Sequence
  Description of Artificial Sequence: Synthetic oligonucleotide
uauucccaacggcugggug

SEQ ID NO: 2469448 - RNA, 19 nt, Artificial Sequence
  Description of Artificial Sequence: Synthetic oligonucleotide
aaguuguugcgguugccua

SEQ ID NO: 2469449 - RNA, 19 nt, Artificial Sequence
  Description of Artificial Sequence: Synthetic oligonucleotide
aauguaugcuucgguuuca

SEQ ID NO: 2469450 - RNA, 19 nt, Artificial Sequence
  Description of Artificial Sequence: Synthetic oligonucleotide
cuaagacaccaugaagggc

SEQ ID NO: 2469451 - RNA, 19 nt, Artificial Sequence
  Description of Artificial Sequence: Synthetic oligonucleotide
aacggcuggguguuuuggu

SEQ ID NO: 2469452 - RNA, 19 nt, Artificial Sequence
  Description of Artificial Sequence: Synthetic oligonucleotide
gaagggccaugauauuccc

SEQ ID NO: 2469453 - RNA, 19 nt, Artificial Sequence
  Description of Artificial Sequence: Synthetic oligonucleotide
uugcgcaaaauguaugcuu

SEQ ID NO: 2469454 - RNA, 19 nt, Artificial Sequence
  Description of Artificial Sequence: Synthetic oligonucleotide
ugguugaauuguaguagaa

SEQ ID NO: 2469455 - RNA, 19 nt, Artificial Sequence
  Description of Artificial Sequence: Synthetic oligonucleotide
aaccucugaugcaugucuc

SEQ ID NO: 2469456 - RNA, 19 nt, Artificial Sequence
  Description of Artificial Sequence: Synthetic oligonucleotide
cucuuuuacacgcccuaac

SEQ ID NO: 2469457 - RNA, 19 nt, Artificial Sequence
  Description of Artificial Sequence: Synthetic oligonucleotide
gggaucaaaguguuauuug

SEQ ID NO: 2469458 - RNA, 19 nt, Artificial Sequence
  Description of Artificial Sequence: Synthetic oligonucleotide
ucauggcuuugcacggucc

SEQ ID NO: 2469459 - RNA, 19 nt, Artificial Sequence
  Description of Artificial Sequence: Synthetic oligonucleotide
aaugcuucauagacuacuu

SEQ ID NO: 2469460 - RNA, 19 nt, Artificial Sequence
  Description of Artificial Sequence: Synthetic oligonucleotide
cuccuuaucauggcuuugc

SEQ ID NO: 2469461 - RNA, 19 nt, Artificial Sequence
  Description of Artificial Sequence: Synthetic oligonucleotide
caucauaguaaaacuaccu

SEQ ID NO: 2469462 - RNA, 19 nt, Artificial Sequence
  Description of Artificial Sequence: Synthetic oligonucleotide
aaugaggccucggcagauc

SEQ ID NO: 2469463 - RNA, 19 nt, Artificial Sequence
  Description of Artificial Sequence: Synthetic oligonucleotide
uccaggguuucaaaucgau

SEQ ID NO: 2469464 - RNA, 19 nt, Artificial Sequence
  Description of Artificial Sequence: Synthetic oligonucleotide
guuguugcgguugccuagg

SEQ ID NO: 2469465 - RNA, 19 nt, Artificial Sequence
  Description of Artificial Sequence: Synthetic oligonucleotide
ucggcagaucccagggucc

SEQ ID NO: 2469466 - RNA, 19 nt, Artificial Sequence
  Description of Artificial Sequence: Synthetic oligonucleotide
acuuaaauuggcggcauuu

SEQ ID NO: 2469467 - RNA, 19 nt, Artificial Sequence
  Description of Artificial Sequence: Synthetic oligonucleotide
cuuacauucuuccaggguu

SEQ ID NO: 2469468 - RNA, 19 nt, Artificial Sequence
  Description of Artificial Sequence: Synthetic oligonucleotide
auuucccaaugguugaauu

SEQ ID NO: 2469469 - RNA, 19 nt, Artificial Sequence
  Description of Artificial Sequence: Synthetic oligonucleotide
uggcuuuucugcuccagau

SEQ ID NO: 2469470 - RNA, 19 nt, Artificial Sequence
  Description of Artificial Sequence: Synthetic oligonucleotide
cuucauugcgcaaaaugua

SEQ ID NO: 2469471 - RNA, 19 nt, Artificial Sequence
  Description of Artificial Sequence: Synthetic oligonucleotide
ugaauugcucacacugcuu

SEQ ID NO: 2469472 - RNA, 19 nt, Artificial Sequence
  Description of Artificial Sequence: Synthetic oligonucleotide
uguugcgguugccuaggca

SEQ ID NO: 2469473 - RNA, 19 nt, Artificial Sequence
  Description of Artificial Sequence: Synthetic oligonucleotide
cauuggcuugacacauucc

SEQ ID NO: 2469474 - RNA, 19 nt, Artificial Sequence
  Description of Artificial Sequence: Synthetic oligonucleotide
aauagacaucauaguaaaa

SEQ ID NO: 2469475 - RNA, 19 nt, Artificial Sequence
  Description of Artificial Sequence: Synthetic oligonucleotide
uacuugaauugcucacacu

SEQ ID NO: 2469476 - RNA, 19 nt, Artificial Sequence
  Description of Artificial Sequence: Synthetic oligonucleotide
acccaccauacuugaauug

SEQ ID NO: 2469477 - RNA, 19 nt, Artificial Sequence
  Description of Artificial Sequence: Synthetic oligonucleotide
uugcgguugccuaggcacc

SEQ ID NO: 2469478 - RNA, 19 nt, Artificial Sequence
  Description of Artificial Sequence: Synthetic oligonucleotide
aggguuucaaaucgauuuu

SEQ ID NO: 2469479 - RNA, 19 nt, Artificial Sequence
  Description of Artificial Sequence: Synthetic oligonucleotide
cucggcagaucccaggguc

SEQ ID NO: 2469480 - RNA, 19 nt, Artificial Sequence
  Description of Artificial Sequence: Synthetic oligonucleotide
ugccuaggcacccaccaua

SEQ ID NO: 2469481 - RNA, 19 nt, Artificial Sequence
  Description of Artificial Sequence: Synthetic oligonucleotide
cauacuugaauugcucaca

SEQ ID NO: 2469482 - RNA, 19 nt, Artificial Sequence
  Description of Artificial Sequence: Synthetic oligonucleotide
cuccagauggugucuuuac

SEQ ID NO: 2469483 - RNA, 19 nt, Artificial Sequence
  Description of Artificial Sequence: Synthetic oligonucleotide
uuccaggguuucaaaucga

SEQ ID NO: 2469484 - RNA, 19 nt, Artificial Sequence
  Description of Artificial Sequence: Synthetic oligonucleotide
gauuuucguuuccucugca

SEQ ID NO: 2469485 - RNA, 19 nt, Artificial Sequence
  Description of Artificial Sequence: Synthetic oligonucleotide
aauuggcggcauuucccaa

SEQ ID NO: 2469486 - RNA, 19 nt, Artificial Sequence
  Description of Artificial Sequence: Synthetic oligonucleotide
gaauugcucacacugcuuu

SEQ ID NO: 2469487 - RNA, 19 nt, Artificial Sequence
  Description of Artificial Sequence: Synthetic oligonucleotide
auuggcggcauuucccaau

SEQ ID NO: 2469488 - RNA, 19 nt, Artificial Sequence
  Description of Artificial Sequence: Synthetic oligonucleotide
caggguuucaaaucgauuu

SEQ ID NO: 2469489 - RNA, 19 nt, Artificial Sequence
  Description of Artificial Sequence: Synthetic oligonucleotide
ccaguguacuuaaauuggc

SEQ ID NO: 2469490 - RNA, 19 nt, Artificial Sequence
  Description of Artificial Sequence: Synthetic oligonucleotide
guuucaaaucgauuuucgu

SEQ ID NO: 2469491 - RNA, 19 nt, Artificial Sequence
  Description of Artificial Sequence: Synthetic oligonucleotide
gcaguauugagaucagcuc

SEQ ID NO: 2469492 - RNA, 19 nt, Artificial Sequence
  Description of Artificial Sequence: Synthetic oligonucleotide
guaaugaggccucggcaga

SEQ ID NO: 2469493 - RNA, 19 nt, Artificial Sequence
  Description of Artificial Sequence: Synthetic oligonucleotide
ucuggcuuuucugcuccag

SEQ ID NO: 2469494 - RNA, 19 nt, Artificial Sequence
  Description of Artificial Sequence: Synthetic oligonucleotide
ccauacuugaauugcucac

SEQ ID NO: 2469495 - RNA, 19 nt, Artificial Sequence
  Description of Artificial Sequence: Synthetic oligonucleotide
uuacacgcccuaacacagu

SEQ ID NO: 2469496 - RNA, 19 nt, Artificial Sequence
  Description of Artificial Sequence: Synthetic oligonucleotide
caaaauguaugcuucgguu

SEQ ID NO: 2469497 - RNA, 19 nt, Artificial Sequence
  Description of Artificial Sequence: Synthetic oligonucleotide
cccauauauaaauucuuca

SEQ ID NO: 2469498 - RNA, 19 nt, Artificial Sequence
  Description of Artificial Sequence: Synthetic oligonucleotide
acugcuuugacugguuauu

SEQ ID NO: 2469499 - RNA, 19 nt, Artificial Sequence
  Description of Artificial Sequence: Synthetic oligonucleotide
aacuaccuuaugaaauauu

SEQ ID NO: 2469500 - RNA, 19 nt, Artificial Sequence
  Description of Artificial Sequence: Synthetic oligonucleotide
aucuaguaaugaggccucg

SEQ ID NO: 2469501 - RNA, 19 nt, Artificial Sequence
  Description of Artificial Sequence: Synthetic oligonucleotide
uggcggcauuucccaaugg

SEQ ID NO: 2469502 - RNA, 19 nt, Artificial Sequence
  Description of Artificial Sequence: Synthetic oligonucleotide
aaccucuuuuacacgcccu

SEQ ID NO: 2469503 - RNA, 19 nt, Artificial Sequence
  Description of Artificial Sequence: Synthetic oligonucleotide
gcgcaaaauguaugcuucg

SEQ ID NO: 2469504 - RNA, 19 nt, Artificial Sequence
  Description of Artificial Sequence: Synthetic oligonucleotide
guguuuugguagacugggg

SEQ ID NO: 2469505 - RNA, 19 nt, Artificial Sequence
  Description of Artificial Sequence: Synthetic oligonucleotide
cauagacuacuuucacaga

SEQ ID NO: 2469506 - RNA, 19 nt, Artificial Sequence
  Description of Artificial Sequence: Synthetic oligonucleotide
ccaugauauucccaacggc

SEQ ID NO: 2469507 - RNA, 19 nt, Artificial Sequence
  Description of Artificial Sequence: Synthetic oligonucleotide
accucuuuuacacgcccua

SEQ ID NO: 2469508 - RNA, 19 nt, Artificial Sequence
  Description of Artificial Sequence: Synthetic oligonucleotide
gucuccuuacauucuucca

SEQ ID NO: 2469509 - RNA, 19 nt, Artificial Sequence
  Description of Artificial Sequence: Synthetic oligonucleotide
ccccauauauaaauucuuc

SEQ ID NO: 2469510 - RNA, 19 nt, Artificial Sequence
  Description of Artificial Sequence: Synthetic oligonucleotide
uacuuaaauuggcggcauu

SEQ ID NO: 2469511 - RNA, 19 nt, Artificial Sequence
  Description of Artificial Sequence: Synthetic oligonucleotide
ggguuuuaauuguucuuuc

SEQ ID NO: 2469512 - RNA, 19 nt, Artificial Sequence
  Description of Artificial Sequence: Synthetic oligonucleotide
cugaugcaugucuccuuac

SEQ ID NO: 2469513 - RNA, 19 nt, Artificial Sequence
  Description of Artificial Sequence: Synthetic oligonucleotide
ggcauuucccaaugguuga

SEQ ID NO: 2469514 - RNA, 19 nt, Artificial Sequence
  Description of Artificial Sequence: Synthetic oligonucleotide
acuuucacagaaggcuccu

SEQ ID NO: 2469515 - RNA, 19 nt, Artificial Sequence
  Description of Artificial Sequence: Synthetic oligonucleotide
uuguugcgguugccuaggc

SEQ ID NO: 2469516 - RNA, 19 nt, Artificial Sequence
  Description of Artificial Sequence: Synthetic oligonucleotide
uaucauggcuuugcacggu

SEQ ID NO: 2469517 - RNA, 19 nt, Artificial Sequence
  Description of Artificial Sequence: Synthetic oligonucleotide
caucuaccuucauugcgca

SEQ ID NO: 2469518 - RNA, 19 nt, Artificial Sequence
  Description of Artificial Sequence: Synthetic oligonucleotide
ccuuaucauggcuuugcac

SEQ ID NO: 2469519 - RNA, 19 nt, Artificial Sequence
  Description of Artificial Sequence: Synthetic oligonucleotide
caacggcuggguguuuugg

SEQ ID NO: 2469520 - RNA, 19 nt, Artificial Sequence
  Description of Artificial Sequence: Synthetic oligonucleotide
uguaugcuucgguuucauu

SEQ ID NO: 2469521 - RNA, 19 nt, Artificial Sequence
  Description of Artificial Sequence: Synthetic oligonucleotide
ugcgguugccuaggcaccc

SEQ ID NO: 2469522 - RNA, 19 nt, Artificial Sequence
  Description of Artificial Sequence: Synthetic oligonucleotide
gccucggcagaucccaggg

SEQ ID NO: 2469523 - RNA, 19 nt, Artificial Sequence
  Description of Artificial Sequence: Synthetic oligonucleotide
aagggccaugauauuccca

SEQ ID NO: 2469524 - RNA, 19 nt, Artificial Sequence
  Description of Artificial Sequence: Synthetic oligonucleotide
acggcuggguguuuuggua

SEQ ID NO: 2469525 - RNA, 19 nt, Artificial Sequence
  Description of Artificial Sequence: Synthetic oligonucleotide
uugccuaggcacccaccau

SEQ ID NO: 2469526 - RNA, 19 nt, Artificial Sequence
  Description of Artificial Sequence: Synthetic oligonucleotide
acacugcuuugacugguua

SEQ ID NO: 2469527 - RNA, 19 nt, Artificial Sequence
  Description of Artificial Sequence: Synthetic oligonucleotide
cuaggcacccaccauacuu

SEQ ID NO: 2469528 - RNA, 19 nt, Artificial Sequence
  Description of Artificial Sequence: Synthetic oligonucleotide
gcacgguccaucaucuacc

SEQ ID NO: 2469529 - RNA, 19 nt, Artificial Sequence
  Description of Artificial Sequence: Synthetic oligonucleotide
auauucccaacggcugggu

SEQ ID NO: 2469530 - RNA, 19 nt, Artificial Sequence
  Description of Artificial Sequence: Synthetic oligonucleotide
guauugagaucagcucaca

SEQ ID NO: 2469531 - RNA, 19 nt, Artificial Sequence
  Description of Artificial Sequence: Synthetic oligonucleotide
uucccaacggcuggguguu

SEQ ID NO: 2469532 - RNA, 19 nt, Artificial Sequence
  Description of Artificial Sequence: Synthetic oligonucleotide
cuaccuucauugcgcaaaa

SEQ ID NO: 2469533 - RNA, 19 nt, Artificial Sequence
  Description of Artificial Sequence: Synthetic oligonucleotide
cgauuuucguuuccucugc

SEQ ID NO: 2469534 - RNA, 19 nt, Artificial Sequence
  Description of Artificial Sequence: Synthetic oligonucleotide
cuuuugaggaaaccucuuu

SEQ ID NO: 2469535 - RNA, 19 nt, Artificial Sequence
  Description of Artificial Sequence: Synthetic oligonucleotide
ggcuuugcacgguccauca

SEQ ID NO: 2469536 - RNA, 19 nt, Artificial Sequence
  Description of Artificial Sequence: Synthetic oligonucleotide
cacugucugcuggacuaag

SEQ ID NO: 2469537 - RNA, 19 nt, Artificial Sequence
  Description of Artificial Sequence: Synthetic oligonucleotide
cgcaaaauguaugcuucgg

SEQ ID NO: 2469538 - RNA, 19 nt, Artificial Sequence
  Description of Artificial Sequence: Synthetic oligonucleotide
agaucagcucacagaugcu

SEQ ID NO: 2469539 - RNA, 19 nt, Artificial Sequence
  Description of Artificial Sequence: Synthetic oligonucleotide
gguugaauuguaguagaau

SEQ ID NO: 2469540 - RNA, 19 nt, Artificial Sequence
  Description of Artificial Sequence: Synthetic oligonucleotide
gcauucauccaaagucuca

SEQ ID NO: 2469541 - RNA, 19 nt, Artificial Sequence
  Description of Artificial Sequence: Synthetic oligonucleotide
ugcuccagauggugucuuu

SEQ ID NO: 2469542 - RNA, 19 nt, Artificial Sequence
  Description of Artificial Sequence: Synthetic oligonucleotide
acacgcccuaacacagucu

SEQ ID NO: 2469543 - RNA, 19 nt, Artificial Sequence
  Description of Artificial Sequence: Synthetic oligonucleotide
ggcuggguguuuugguaga

SEQ ID NO: 2469544 - RNA, 19 nt, Artificial Sequence
  Description of Artificial Sequence: Synthetic oligonucleotide
gcacccaccauacuugaau

SEQ ID NO: 2469545 - RNA, 19 nt, Artificial Sequence
  Description of Artificial Sequence: Synthetic oligonucleotide
ggcggcauuucccaauggu

SEQ ID NO: 2469546 - RNA, 19 nt, Artificial Sequence
  Description of Artificial Sequence: Synthetic oligonucleotide
cugcuuugacugguuauua

SEQ ID NO: 2469547 - RNA, 19 nt, Artificial Sequence
  Description of Artificial Sequence: Synthetic oligonucleotide
cacgcccuaacacagucuu

SEQ ID NO: 2469548 - RNA, 19 nt, Artificial Sequence
  Description of Artificial Sequence: Synthetic oligonucleotide
uugcacgguccaucaucua

SEQ ID NO: 2469549 - RNA, 19 nt, Artificial Sequence
  Description of Artificial Sequence: Synthetic oligonucleotide
gccuaggcacccaccauac

SEQ ID NO: 2469550 - RNA, 19 nt, Artificial Sequence
  Description of Artificial Sequence: Synthetic oligonucleotide
cacgguccaucaucuaccu

SEQ ID NO: 2469551 - RNA, 19 nt, Artificial Sequence
  Description of Artificial Sequence: Synthetic oligonucleotide
cacccaccauacuugaauu

SEQ ID NO: 2469552 - RNA, 19 nt, Artificial Sequence
  Description of Artificial Sequence: Synthetic oligonucleotide
ggggaucaaaguguuauuu

SEQ ID NO: 2469553 - RNA, 19 nt, Artificial Sequence
  Description of Artificial Sequence: Synthetic oligonucleotide
cacauccaguguacuuaaa

SEQ ID NO: 2469554 - RNA, 19 nt, Artificial Sequence
  Description of Artificial Sequence: Synthetic oligonucleotide
ccaacggcuggguguuuug

SEQ ID NO: 2469555 - RNA, 19 nt, Artificial Sequence
  Description of Artificial Sequence: Synthetic oligonucleotide
gcuugacacauuccacugu

SEQ ID NO: 2469556 - RNA, 19 nt, Artificial Sequence
  Description of Artificial Sequence: Synthetic oligonucleotide
gcucuugcauucauccaaa

SEQ ID NO: 2469557 - RNA, 19 nt, Artificial Sequence
  Description of Artificial Sequence: Synthetic oligonucleotide
gcuggguguuuugguagac

SEQ ID NO: 2469558 - RNA, 19 nt, Artificial Sequence
  Description of Artificial Sequence: Synthetic oligonucleotide
cucugaugcaugucuccuu

SEQ ID NO: 2469559 - RNA, 19 nt, Artificial Sequence
  Description of Artificial Sequence: Synthetic oligonucleotide
cauuucccaaugguugaau

SEQ ID NO: 2469560 - RNA, 19 nt, Artificial Sequence
  Description of Artificial Sequence: Synthetic oligonucleotide
ccuuacauucuuccagggu

SEQ ID NO: 2469561 - RNA, 19 nt, Artificial Sequence
  Description of Artificial Sequence: Synthetic oligonucleotide
gcauuucccaaugguugaa

SEQ ID NO: 2469562 - RNA, 19 nt, Artificial Sequence
  Description of Artificial Sequence: Synthetic oligonucleotide
acgcccuaacacagucuuu

SEQ ID NO: 2469563 - RNA, 19 nt, Artificial Sequence
  Description of Artificial Sequence: Synthetic oligonucleotide
caccaugaagggccaugau

SEQ ID NO: 2469564 - RNA, 19 nt, Artificial Sequence
  Description of Artificial Sequence: Synthetic oligonucleotide
cuuucacagaaggcuccuu

SEQ ID NO: 2469565 - RNA, 19 nt, Artificial Sequence
  Description of Artificial Sequence: Synthetic oligonucleotide
ccaggguuucaaaucgauu

SEQ ID NO: 2469566 - RNA, 19 nt, Artificial Sequence
  Description of Artificial Sequence: Synthetic oligonucleotide
ggcagaucccaggguccuc

SEQ ID NO: 2469567 - RNA, 19 nt, Artificial Sequence
  Description of Artificial Sequence: Synthetic oligonucleotide
cgguugccuaggcacccac

SEQ ID NO: 2469568 - RNA, 19 nt, Artificial Sequence
  Description of Artificial Sequence: Synthetic oligonucleotide
ggcacccaccauacuugaa

SEQ ID NO: 2469569 - RNA, 19 nt, Artificial Sequence
  Description of Artificial Sequence: Synthetic oligonucleotide
gcuuugcacgguccaucau

SEQ ID NO: 2469570 - RNA, 19 nt, Artificial Sequence
  Description of Artificial Sequence: Synthetic oligonucleotide
ucccaacggcuggguguuu

SEQ ID NO: 2469571 - RNA, 19 nt, Artificial Sequence
  Description of Artificial Sequence: Synthetic oligonucleotide
gcgguugccuaggcaccca

SEQ ID NO: 2469572 - RNA, 19 nt, Artificial Sequence
  Description of Artificial Sequence: Synthetic oligonucleotide
cgcccuaacacagucuuuu

SEQ ID NO: 2469573 - RNA, 19 nt, Artificial Sequence
  Description of Artificial Sequence: Synthetic oligonucleotide
ccuaggcacccaccauacu

SEQ ID NO: 2469574 - RNA, 19 nt, Artificial Sequence
  Description of Artificial Sequence: Synthetic oligonucleotide
ccucggcagaucccagggu

SEQ ID NO: 2469575 - RNA, 19 nt, Artificial Sequence
  Description of Artificial Sequence: Synthetic oligonucleotide
cccaacggcuggguguuuu

SEQ ID NO: 2469576 - RNA, 19 nt, Artificial Sequence
  Description of Artificial Sequence: Synthetic oligonucleotide
cggcagaucccaggguccu

SEQ ID NO: 2469577 - RNA, 19 nt, Artificial Sequence
  Description of Artificial Sequence: Synthetic oligonucleotide
aauuaugccuuugauaacc

SEQ ID NO: 2469578 - RNA, 19 nt, Artificial Sequence
  Description of Artificial Sequence: Synthetic oligonucleotide
auuggugauccauucaucc

SEQ ID NO: 2469579 - RNA, 19 nt, Artificial Sequence
  Description of Artificial Sequence: Synthetic oligonucleotide
aacaggagaaauuaugccu

SEQ ID NO: 2469580 - RNA, 19 nt, Artificial Sequence
  Description of Artificial Sequence: Synthetic oligonucleotide
acaacugucaguugccagc

SEQ ID NO: 2469581 - RNA, 19 nt, Artificial Sequence
  Description of Artificial Sequence: Synthetic oligonucleotide
uuuuguucaucccacuucc

SEQ ID NO: 2469582 - RNA, 19 nt, Artificial Sequence
  Description of Artificial Sequence: Synthetic oligonucleotide
uucaauguacucuuggaca

SEQ ID NO: 2469583 - RNA, 19 nt, Artificial Sequence
  Description of Artificial Sequence: Synthetic oligonucleotide
uccuguugcauucauguag

SEQ ID NO: 2469584 - RNA, 19 nt, Artificial Sequence
  Description of Artificial Sequence: Synthetic oligonucleotide
ucaagagugagcguugugg

SEQ ID NO: 2469585 - RNA, 19 nt, Artificial Sequence
  Description of Artificial Sequence: Synthetic oligonucleotide
aaauuucugagcaucacug

SEQ ID NO: 2469586 - RNA, 19 nt, Artificial Sequence
  Description of Artificial Sequence: Synthetic oligonucleotide
aaauuaugccuuugauaac

SEQ ID NO: 2469587 - RNA, 19 nt, Artificial Sequence
  Description of Artificial Sequence: Synthetic oligonucleotide
uuuccuguugcauucaugu

SEQ ID NO: 2469588 - RNA, 19 nt, Artificial Sequence
  Description of Artificial Sequence: Synthetic oligonucleotide
agugauacauaugagcccg

SEQ ID NO: 2469589 - RNA, 19 nt, Artificial Sequence
  Description of Artificial Sequence: Synthetic oligonucleotide
cauaugagcccguaguugg

SEQ ID NO: 2469590 - RNA, 19 nt, Artificial Sequence
  Description of Artificial Sequence: Synthetic oligonucleotide
agauaaauuucugagcauc

SEQ ID NO: 2469591 - RNA, 19 nt, Artificial Sequence
  Description of Artificial Sequence: Synthetic oligonucleotide
ucgagugauacauaugagc

SEQ ID NO: 2469592 - RNA, 19 nt, Artificial Sequence
  Description of Artificial Sequence: Synthetic oligonucleotide
cauguguccacuuccagcc

SEQ ID NO: 2469593 - RNA, 19 nt, Artificial Sequence
  Description of Artificial Sequence: Synthetic oligonucleotide
uuucaauguacucuuggac

SEQ ID NO: 2469594 - RNA, 19 nt, Artificial Sequence
  Description of Artificial Sequence: Synthetic oligonucleotide
guacucuuggacaaggucg

SEQ ID NO: 2469595 - RNA, 19 nt, Artificial Sequence
  Description of Artificial Sequence: Synthetic oligonucleotide
uacucuuggacaaggucgg

SEQ ID NO: 2469596 - RNA, 19 nt, Artificial Sequence
  Description of Artificial Sequence: Synthetic oligonucleotide
aaugacuccaacauuccug

SEQ ID NO: 2469597 - RNA, 19 nt, Artificial Sequence
  Description of Artificial Sequence: Synthetic oligonucleotide
auacauaugagcccguagu

SEQ ID NO: 2469598 - RNA, 19 nt, Artificial Sequence
  Description of Artificial Sequence: Synthetic oligonucleotide
cagaucaugcuuuucaaug

SEQ ID NO: 2469599 - RNA, 19 nt, Artificial Sequence
  Description of Artificial Sequence: Synthetic oligonucleotide
uuucuuuugggcuggaguc

SEQ ID NO: 2469600 - RNA, 19 nt, Artificial Sequence
  Description of Artificial Sequence: Synthetic oligonucleotide
ugggugaucacaacuguca

SEQ ID NO: 2469601 - RNA, 19 nt, Artificial Sequence
  Description of Artificial Sequence: Synthetic oligonucleotide
uccauagcacgucagacuc

SEQ ID NO: 2469602 - RNA, 19 nt, Artificial Sequence
  Description of Artificial Sequence: Synthetic oligonucleotide
agaaauuaugccuuugaua

SEQ ID NO: 2469603 - RNA, 19 nt, Artificial Sequence
  Description of Artificial Sequence: Synthetic oligonucleotide
gaggagaugucauugguga

SEQ ID NO: 2469604 - RNA, 19 nt, Artificial Sequence
  Description of Artificial Sequence: Synthetic oligonucleotide
uaguuggccacgauuuggg

SEQ ID NO: 2469605 - RNA, 19 nt, Artificial Sequence
  Description of Artificial Sequence: Synthetic oligonucleotide
uagcacgucagacucguag

SEQ ID NO: 2469606 - RNA, 19 nt, Artificial Sequence
  Description of Artificial Sequence: Synthetic oligonucleotide
uguagaggcgccagaauga

SEQ ID NO: 2469607 - RNA, 19 nt, Artificial Sequence
  Description of Artificial Sequence: Synthetic oligonucleotide
gagacuuucccaugugucc

SEQ ID NO: 2469608 - RNA, 19 nt, Artificial Sequence
  Description of Artificial Sequence: Synthetic oligonucleotide
acugucaguugccagcuuc

SEQ ID NO: 2469609 - RNA, 19 nt, Artificial Sequence
  Description of Artificial Sequence: Synthetic oligonucleotide
ucugaugccuccauagcac

SEQ ID NO: 2469610 - RNA, 19 nt, Artificial Sequence
  Description of Artificial Sequence: Synthetic oligonucleotide
caacaggagaaauuaugcc

SEQ ID NO: 2469611 - RNA, 19 nt, Artificial Sequence
  Description of Artificial Sequence: Synthetic oligonucleotide
ugcucugaugccuccauag

SEQ ID NO: 2469612 - RNA, 19 nt, Artificial Sequence
  Description of Artificial Sequence: Synthetic oligonucleotide
auaaauuucugagcaucac

SEQ ID NO: 2469613 - RNA, 19 nt, Artificial Sequence
  Description of Artificial Sequence: Synthetic oligonucleotide
aaguagcggaugcucuggc

SEQ ID NO: 2469614 - RNA, 19 nt, Artificial Sequence
  Description of Artificial Sequence: Synthetic oligonucleotide
uggugauccauucauccac

SEQ ID NO: 2469615 - RNA, 19 nt, Artificial Sequence
  Description of Artificial Sequence: Synthetic oligonucleotide
agugcgaguucuugguggc

SEQ ID NO: 2469616 - RNA, 19 nt, Artificial Sequence
  Description of Artificial Sequence: Synthetic oligonucleotide
uugauaacccuguauuuuc

SEQ ID NO: 2469617 - RNA, 19 nt, Artificial Sequence
  Description of Artificial Sequence: Synthetic oligonucleotide
uuggccacgauuuggguga

SEQ ID NO: 2469618 - RNA, 19 nt, Artificial Sequence
  Description of Artificial Sequence: Synthetic oligonucleotide
ugauaacccuguauuuucc

SEQ ID NO: 2469619 - RNA, 19 nt, Artificial Sequence
  Description of Artificial Sequence: Synthetic oligonucleotide
cuugguggcaaguucugcc

SEQ ID NO: 2469620 - RNA, 19 nt, Artificial Sequence
  Description of Artificial Sequence: Synthetic oligonucleotide
agagauguuccucuguaga

SEQ ID NO: 2469621 - RNA, 19 nt, Artificial Sequence
  Description of Artificial Sequence: Synthetic oligonucleotide
guugacuugggcucuuggg

SEQ ID NO: 2469622 - RNA, 19 nt, Artificial Sequence
  Description of Artificial Sequence: Synthetic oligonucleotide
uccugauggugucugagca

SEQ ID NO: 2469623 - RNA, 19 nt, Artificial Sequence
  Description of Artificial Sequence: Synthetic oligonucleotide
uguucaucccacuuccucu

SEQ ID NO: 2469624 - RNA, 19 nt, Artificial Sequence
  Description of Artificial Sequence: Synthetic oligonucleotide
cacgauuugggugaugucc

SEQ ID NO: 2469625 - RNA, 19 nt, Artificial Sequence
  Description of Artificial Sequence: Synthetic oligonucleotide
uguacucuuggacaagguc

SEQ ID NO: 2469626 - RNA, 19 nt, Artificial Sequence
  Description of Artificial Sequence: Synthetic oligonucleotide
aauuucacccugggcacac

SEQ ID NO: 2469627 - RNA, 19 nt, Artificial Sequence
  Description of Artificial Sequence: Synthetic oligonucleotide
gagugauacauaugagccc

SEQ ID NO: 2469628 - RNA, 19 nt, Artificial Sequence
  Description of Artificial Sequence: Synthetic oligonucleotide
agaucaugcuuuucaaugu

SEQ ID NO: 2469629 - RNA, 19 nt, Artificial Sequence
  Description of Artificial Sequence: Synthetic oligonucleotide
uguugcauucauguagucc

SEQ ID NO: 2469630 - RNA, 19 nt, Artificial Sequence
  Description of Artificial Sequence: Synthetic oligonucleotide
acaccuguugacuugggcu

SEQ ID NO: 2469631 - RNA, 19 nt, Artificial Sequence
  Description of Artificial Sequence: Synthetic oligonucleotide
agaggcgccagaaugacuc

SEQ ID NO: 2469632 - RNA, 19 nt, Artificial Sequence
  Description of Artificial Sequence: Synthetic oligonucleotide
guugcauucauguaguccu

SEQ ID NO: 2469633 - RNA, 19 nt, Artificial Sequence
  Description of Artificial Sequence: Synthetic oligonucleotide
caguaaaucugcuccacac

SEQ ID NO: 2469634 - RNA, 19 nt, Artificial Sequence
  Description of Artificial Sequence: Synthetic oligonucleotide
cugagcaccuucaacaguc

SEQ ID NO: 2469635 - RNA, 19 nt, Artificial Sequence
  Description of Artificial Sequence: Synthetic oligonucleotide
ucuuggacaaggucgggga

SEQ ID NO: 2469636 - RNA, 19 nt, Artificial Sequence
  Description of Artificial Sequence: Synthetic oligonucleotide
aguagcggaugcucuggcc

SEQ ID NO: 2469637 - RNA, 19 nt, Artificial Sequence
  Description of Artificial Sequence: Synthetic oligonucleotide
augacuccaacauuccugu

SEQ ID NO: 2469638 - RNA, 19 nt, Artificial Sequence
  Description of Artificial Sequence: Synthetic oligonucleotide
agaaugacuccaacauucc

SEQ ID NO: 2469639 - RNA, 19 nt, Artificial Sequence
  Description of Artificial Sequence: Synthetic oligonucleotide
uaacccuguauuuuccugu

SEQ ID NO: 2469640 - RNA, 19 nt, Artificial Sequence
  Description of Artificial Sequence: Synthetic oligonucleotide
ucggggaccaaguagcgga

SEQ ID NO: 2469641 - RNA, 19 nt, Artificial Sequence
  Description of Artificial Sequence: Synthetic oligonucleotide
guacagaucaugcuuuuca

SEQ ID NO: 2469642 - RNA, 19 nt, Artificial Sequence
  Description of Artificial Sequence: Synthetic oligonucleotide
auuaugccuuugauaaccc

SEQ ID NO: 2469643 - RNA, 19 nt, Artificial Sequence
  Description of Artificial Sequence: Synthetic oligonucleotide
uugggcacauugaaggacu

SEQ ID NO: 2469644 - RNA, 19 nt, Artificial Sequence
  Description of Artificial Sequence: Synthetic oligonucleotide
uucccauguguccacuucc

SEQ ID NO: 2469645 - RNA, 19 nt, Artificial Sequence
  Description of Artificial Sequence: Synthetic oligonucleotide
agacucguagauaaauuuc

SEQ ID NO: 2469646 - RNA, 19 nt, Artificial Sequence
  Description of Artificial Sequence: Synthetic oligonucleotide
uguuccucuguagaggcgc

SEQ ID NO: 2469647 - RNA, 19 nt, Artificial Sequence
  Description of Artificial Sequence: Synthetic oligonucleotide
auugaaggacuccaguaaa

SEQ ID NO: 2469648 - RNA, 19 nt, Artificial Sequence
  Description of Artificial Sequence: Synthetic oligonucleotide
uguacgcaucgccaacagg

SEQ ID NO: 2469649 - RNA, 19 nt, Artificial Sequence
  Description of Artificial Sequence: Synthetic oligonucleotide
cucggaguuguacagauca

SEQ ID NO: 2469650 - RNA, 19 nt, Artificial Sequence
  Description of Artificial Sequence: Synthetic oligonucleotide
cuguagaggcgccagaaug

SEQ ID NO: 2469651 - RNA, 19 nt, Artificial Sequence
  Description of Artificial Sequence: Synthetic oligonucleotide
auaacccuguauuuuccug

SEQ ID NO: 2469652 - RNA, 19 nt, Artificial Sequence
  Description of Artificial Sequence: Synthetic oligonucleotide
uugggugauguccucaguc

SEQ ID NO: 2469653 - RNA, 19 nt, Artificial Sequence
  Description of Artificial Sequence: Synthetic oligonucleotide
aggucggggaccaaguagc

SEQ ID NO: 2469654 - RNA, 19 nt, Artificial Sequence
  Description of Artificial Sequence: Synthetic oligonucleotide
aacagccugaggugcaugu

SEQ ID NO: 2469655 - RNA, 19 nt, Artificial Sequence
  Description of Artificial Sequence: Synthetic oligonucleotide
ugagcguugugggugauca

SEQ ID NO: 2469656 - RNA, 19 nt, Artificial Sequence
  Description of Artificial Sequence: Synthetic oligonucleotide
cgagugauacauaugagcc

SEQ ID NO: 2469657 - RNA, 19 nt, Artificial Sequence
  Description of Artificial Sequence: Synthetic oligonucleotide
cauucauguaguccuugcc

SEQ ID NO: 2469658 - RNA, 19 nt, Artificial Sequence
  Description of Artificial Sequence: Synthetic oligonucleotide
guagcggaugcucuggccc

SEQ ID NO: 2469659 - RNA, 19 nt, Artificial Sequence
  Description of Artificial Sequence: Synthetic oligonucleotide
gaugauucgguggugggca

SEQ ID NO: 2469660 - RNA, 19 nt, Artificial Sequence
  Description of Artificial Sequence: Synthetic oligonucleotide
ugucauuggugauccauuc

SEQ ID NO: 2469661 - RNA, 19 nt, Artificial Sequence
  Description of Artificial Sequence: Synthetic oligonucleotide
ucaaacagccugaggugca

SEQ ID NO: 2469662 - RNA, 19 nt, Artificial Sequence
  Description of Artificial Sequence: Synthetic oligonucleotide
guaguuggccacgauuugg

SEQ ID NO: 2469663 - RNA, 19 nt, Artificial Sequence
  Description of Artificial Sequence: Synthetic oligonucleotide
uuggugauccauucaucca

SEQ ID NO: 2469664 - RNA, 19 nt, Artificial Sequence
  Description of Artificial Sequence: Synthetic oligonucleotide
ucagacucguagauaaauu

SEQ ID NO: 2469665 - RNA, 19 nt, Artificial Sequence
  Description of Artificial Sequence: Synthetic oligonucleotide
uacauaugagcccguaguu

SEQ ID NO: 2469666 - RNA, 19 nt, Artificial Sequence
  Description of Artificial Sequence: Synthetic oligonucleotide
guacgcaucgccaacagga

SEQ ID NO: 2469667 - RNA, 19 nt, Artificial Sequence
  Description of Artificial Sequence: Synthetic oligonucleotide
uacgcaucgccaacaggag

SEQ ID NO: 2469668 - RNA, 19 nt, Artificial Sequence
  Description of Artificial Sequence: Synthetic oligonucleotide
ugacuugggcucuuggggu

SEQ ID NO: 2469669 - RNA, 19 nt, Artificial Sequence
  Description of Artificial Sequence: Synthetic oligonucleotide
guuggccacgauuugggug

SEQ ID NO: 2469670 - RNA, 19 nt, Artificial Sequence
  Description of Artificial Sequence: Synthetic oligonucleotide
uuguacgcaucgccaacag

SEQ ID NO: 2469671 - RNA, 19 nt, Artificial Sequence
  Description of Artificial Sequence: Synthetic oligonucleotide
gcucgagugauacauauga

SEQ ID NO: 2469672 - RNA, 19 nt, Artificial Sequence
  Description of Artificial Sequence: Synthetic oligonucleotide
auuccugucuucacucucg

SEQ ID NO: 2469673 - RNA, 19 nt, Artificial Sequence
  Description of Artificial Sequence: Synthetic oligonucleotide
acauaugagcccguaguug

SEQ ID NO: 2469674 - RNA, 19 nt, Artificial Sequence
  Description of Artificial Sequence: Synthetic oligonucleotide
gauucgguggugggcaggg

SEQ ID NO: 2469675 - RNA, 19 nt, Artificial Sequence
  Description of Artificial Sequence: Synthetic oligonucleotide
cucgagugauacauaugag

SEQ ID NO: 2469676 - RNA, 19 nt, Artificial Sequence
  Description of Artificial Sequence: Synthetic oligonucleotide
ggaguuguacagaucaugc

SEQ ID NO: 2469677 - RNA, 19 nt, Artificial Sequence
  Description of Artificial Sequence: Synthetic oligonucleotide
gaaggacuccaguaaaucu

SEQ ID NO: 2469678 - RNA, 19 nt, Artificial Sequence
  Description of Artificial Sequence: Synthetic oligonucleotide
ugaugauucgguggugggc

SEQ ID NO: 2469679 - RNA, 19 nt, Artificial Sequence
  Description of Artificial Sequence: Synthetic oligonucleotide
uucgguggugggcagggga

SEQ ID NO: 2469680 - RNA, 19 nt, Artificial Sequence
  Description of Artificial Sequence: Synthetic oligonucleotide
agccagugcgaguucuugg

SEQ ID NO: 2469681 - RNA, 19 nt, Artificial Sequence
  Description of Artificial Sequence: Synthetic oligonucleotide
ucacccugggcacaccugu

SEQ ID NO: 2469682 - RNA, 19 nt, Artificial Sequence
  Description of Artificial Sequence: Synthetic oligonucleotide
aucccacuuccucuuccgc

SEQ ID NO: 2469683 - RNA, 19 nt, Artificial Sequence
  Description of Artificial Sequence: Synthetic oligonucleotide
uuaugccuuugauaacccu

SEQ ID NO: 2469684 - RNA, 19 nt, Artificial Sequence
  Description of Artificial Sequence: Synthetic oligonucleotide
uuggacaaggucggggacc

SEQ ID NO: 2469685 - RNA, 19 nt, Artificial Sequence
  Description of Artificial Sequence: Synthetic oligonucleotide
agcacgucagacucguaga

SEQ ID NO: 2469686 - RNA, 19 nt, Artificial Sequence
  Description of Artificial Sequence: Synthetic oligonucleotide
gacuccaguaaaucugcuc

SEQ ID NO: 2469687 - RNA, 19 nt, Artificial Sequence
  Description of Artificial Sequence: Synthetic oligonucleotide
auguugcucugaugccucc

SEQ ID NO: 2469688 - RNA, 19 nt, Artificial Sequence
  Description of Artificial Sequence: Synthetic oligonucleotide
uggaguccugcuuuuguuc

SEQ ID NO: 2469689 - RNA, 19 nt, Artificial Sequence
  Description of Artificial Sequence: Synthetic oligonucleotide
cacucucggaguuguacag

SEQ ID NO: 2469690 - RNA, 19 nt, Artificial Sequence
  Description of Artificial Sequence: Synthetic oligonucleotide
cauugaaggacuccaguaa

SEQ ID NO: 2469691 - RNA, 19 nt, Artificial Sequence
  Description of Artificial Sequence: Synthetic oligonucleotide
uaugagcccguaguuggcc

SEQ ID NO: 2469692 - RNA, 19 nt, Artificial Sequence
  Description of Artificial Sequence: Synthetic oligonucleotide
cacaacugucaguugccag

SEQ ID NO: 2469693 - RNA, 19 nt, Artificial Sequence
  Description of Artificial Sequence: Synthetic oligonucleotide
ggccuguccaucaagagug

SEQ ID NO: 2469694 - RNA, 19 nt, Artificial Sequence
  Description of Artificial Sequence: Synthetic oligonucleotide
caccuguugacuugggcuc

SEQ ID NO: 2469695 - RNA, 19 nt, Artificial Sequence
  Description of Artificial Sequence: Synthetic oligonucleotide
ucgccaacaggagaaauua

SEQ ID NO: 2469696 - RNA, 19 nt, Artificial Sequence
  Description of Artificial Sequence: Synthetic oligonucleotide
guuucuuuugggcuggagu

SEQ ID NO: 2469697 - RNA, 19 nt, Artificial Sequence
  Description of Artificial Sequence: Synthetic oligonucleotide
auaugagcccguaguuggc

SEQ ID NO: 2469698 - RNA, 19 nt, Artificial Sequence
  Description of Artificial Sequence: Synthetic oligonucleotide
gagcccuuucuucuuguac

SEQ ID NO: 2469699 - RNA, 19 nt, Artificial Sequence
  Description of Artificial Sequence: Synthetic oligonucleotide
ggagaaauuaugccuuuga

SEQ ID NO: 2469700 - RNA, 19 nt, Artificial Sequence
  Description of Artificial Sequence: Synthetic oligonucleotide
gacucguagauaaauuucu

SEQ ID NO: 2469701 - RNA, 19 nt, Artificial Sequence
  Description of Artificial Sequence: Synthetic oligonucleotide
aacccuguauuuuccuguu

SEQ ID NO: 2469702 - RNA, 19 nt, Artificial Sequence
  Description of Artificial Sequence: Synthetic oligonucleotide
cucugaugccuccauagca

SEQ ID NO: 2469703 - RNA, 19 nt, Artificial Sequence
  Description of Artificial Sequence: Synthetic oligonucleotide
gauugcugugcuuggccuc

SEQ ID NO: 2469704 - RNA, 19 nt, Artificial Sequence
  Description of Artificial Sequence: Synthetic oligonucleotide
ucuguagaggcgccagaau

SEQ ID NO: 2469705 - RNA, 19 nt, Artificial Sequence
  Description of Artificial Sequence: Synthetic oligonucleotide
gagaaauuaugccuuugau

SEQ ID NO: 2469706 - RNA, 19 nt, Artificial Sequence
  Description of Artificial Sequence: Synthetic oligonucleotide
ugaugccuccauagcacgu

SEQ ID NO: 2469707 - RNA, 19 nt, Artificial Sequence
  Description of Artificial Sequence: Synthetic oligonucleotide
agcguugugggugaucaca

SEQ ID NO: 2469708 - RNA, 19 nt, Artificial Sequence
  Description of Artificial Sequence: Synthetic oligonucleotide
cucuggccccuucugagag

SEQ ID NO: 2469709 - RNA, 19 nt, Artificial Sequence
  Description of Artificial Sequence: Synthetic oligonucleotide
uccaguaaaucugcuccac

SEQ ID NO: 2469710 - RNA, 19 nt, Artificial Sequence
  Description of Artificial Sequence: Synthetic oligonucleotide
gauguugcucugaugccuc

SEQ ID NO: 2469711 - RNA, 19 nt, Artificial Sequence
  Description of Artificial Sequence: Synthetic oligonucleotide
auguaguccuugcccagcu

SEQ ID NO: 2469712 - RNA, 19 nt, Artificial Sequence
  Description of Artificial Sequence: Synthetic oligonucleotide
uagcggaugcucuggcccc

SEQ ID NO: 2469713 - RNA, 19 nt, Artificial Sequence
  Description of Artificial Sequence: Synthetic oligonucleotide
gauaacccuguauuuuccu

SEQ ID NO: 2469714 - RNA, 19 nt, Artificial Sequence
  Description of Artificial Sequence: Synthetic oligonucleotide
gcaauuucacccugggcac

SEQ ID NO: 2469715 - RNA, 19 nt, Artificial Sequence
  Description of Artificial Sequence: Synthetic oligonucleotide
aucaagagugagcguugug

SEQ ID NO: 2469716 - RNA, 19 nt, Artificial Sequence
  Description of Artificial Sequence: Synthetic oligonucleotide
cacaccuguugacuugggc

SEQ ID NO: 2469717 - RNA, 19 nt, Artificial Sequence
  Description of Artificial Sequence: Synthetic oligonucleotide
uccggaucuugguggagga

SEQ ID NO: 2469718 - RNA, 19 nt, Artificial Sequence
  Description of Artificial Sequence: Synthetic oligonucleotide
agccugaggugcauguugg

SEQ ID NO: 2469719 - RNA, 19 nt, Artificial Sequence
  Description of Artificial Sequence: Synthetic oligonucleotide
uccucuguagaggcgccag

SEQ ID NO: 2469720 - RNA, 19 nt, Artificial Sequence
  Description of Artificial Sequence: Synthetic oligonucleotide
agagcucuccggaucuugg

SEQ ID NO: 2469721 - RNA, 19 nt, Artificial Sequence
  Description of Artificial Sequence: Synthetic oligonucleotide
cauuccugucuucacucuc

SEQ ID NO: 2469722 - RNA, 19 nt, Artificial Sequence
  Description of Artificial Sequence: Synthetic oligonucleotide
gccaacaggagaaauuaug

SEQ ID NO: 2469723 - RNA, 19 nt, Artificial Sequence
  Description of Artificial Sequence: Synthetic oligonucleotide
acgauuugggugauguccu

SEQ ID NO: 2469724 - RNA, 19 nt, Artificial Sequence
  Description of Artificial Sequence: Synthetic oligonucleotide
uguacagaucaugcuuuuc

SEQ ID NO: 2469725 - RNA, 19 nt, Artificial Sequence
  Description of Artificial Sequence: Synthetic oligonucleotide
cuucugagagcucuccgga

SEQ ID NO: 2469726 - RNA, 19 nt, Artificial Sequence
  Description of Artificial Sequence: Synthetic oligonucleotide
cuccggaucuugguggagg

SEQ ID NO: 2469727 - RNA, 19 nt, Artificial Sequence
  Description of Artificial Sequence: Synthetic oligonucleotide
ccauguguccacuuccagc

SEQ ID NO: 2469728 - RNA, 19 nt, Artificial Sequence
  Description of Artificial Sequence: Synthetic oligonucleotide
cuuggacaaggucggggac

SEQ ID NO: 2469729 - RNA, 19 nt, Artificial Sequence
  Description of Artificial Sequence: Synthetic oligonucleotide
ugagcaucacugccagcuc

SEQ ID NO: 2469730 - RNA, 19 nt, Artificial Sequence
  Description of Artificial Sequence: Synthetic oligonucleotide
gcucaaacagccugaggug

SEQ ID NO: 2469731 - RNA, 19 nt, Artificial Sequence
  Description of Artificial Sequence: Synthetic oligonucleotide
gaugccuccauagcacguc

SEQ ID NO: 2469732 - RNA, 19 nt, Artificial Sequence
  Description of Artificial Sequence: Synthetic oligonucleotide
ugccuccauagcacgucag

SEQ ID NO: 2469733 - RNA, 19 nt, Artificial Sequence
  Description of Artificial Sequence: Synthetic oligonucleotide
gggugaucacaacugucag

SEQ ID NO: 2469734 - RNA, 19 nt, Artificial Sequence
  Description of Artificial Sequence: Synthetic oligonucleotide
gaaugacuccaacauuccu

SEQ ID NO: 2469735 - RNA, 19 nt, Artificial Sequence
  Description of Artificial Sequence: Synthetic oligonucleotide
gaccaaguagcggaugcuc

SEQ ID NO: 2469736 - RNA, 19 nt, Artificial Sequence
  Description of Artificial Sequence: Synthetic oligonucleotide
uuguacagaucaugcuuuu

SEQ ID NO: 2469737 - RNA, 19 nt, Artificial Sequence
  Description of Artificial Sequence: Synthetic oligonucleotide
gcauucauguaguccuugc

SEQ ID NO: 2469738 - RNA, 19 nt, Artificial Sequence
  Description of Artificial Sequence: Synthetic oligonucleotide
gaugucauuggugauccau

SEQ ID NO: 2469739 - RNA, 19 nt, Artificial Sequence
  Description of Artificial Sequence: Synthetic oligonucleotide
ugcgaguucuugguggcaa

SEQ ID NO: 2469740 - RNA, 19 nt, Artificial Sequence
  Description of Artificial Sequence: Synthetic oligonucleotide
aguuggccacgauuugggu

SEQ ID NO: 2469741 - RNA, 19 nt, Artificial Sequence
  Description of Artificial Sequence: Synthetic oligonucleotide
caauguacucuuggacaag

SEQ ID NO: 2469742 - RNA, 19 nt, Artificial Sequence
  Description of Artificial Sequence: Synthetic oligonucleotide
ugauacauaugagcccgua

SEQ ID NO: 2469743 - RNA, 19 nt, Artificial Sequence
  Description of Artificial Sequence: Synthetic oligonucleotide
uucugagagcucuccggau

SEQ ID NO: 2469744 - RNA, 19 nt, Artificial Sequence
  Description of Artificial Sequence: Synthetic oligonucleotide
ucggaguuguacagaucau

SEQ ID NO: 2469745 - RNA, 19 nt, Artificial Sequence
  Description of Artificial Sequence: Synthetic oligonucleotide
ugggcacaccuguugacuu

SEQ ID NO: 2469746 - RNA, 19 nt, Artificial Sequence
  Description of Artificial Sequence: Synthetic oligonucleotide
accaaguagcggaugcucu

SEQ ID NO: 2469747 - RNA, 19 nt, Artificial Sequence
  Description of Artificial Sequence: Synthetic oligonucleotide
ucucggaguuguacagauc

SEQ ID NO: 2469748 - RNA, 19 nt, Artificial Sequence
  Description of Artificial Sequence: Synthetic oligonucleotide
gagagcucuccggaucuug

SEQ ID NO: 2469749 - RNA, 19 nt, Artificial Sequence
  Description of Artificial Sequence: Synthetic oligonucleotide
guagaggcgccagaaugac

SEQ ID NO: 2469750 - RNA, 19 nt, Artificial Sequence
  Description of Artificial Sequence: Synthetic oligonucleotide
auuucacccugggcacacc

SEQ ID NO: 2469751 - RNA, 19 nt, Artificial Sequence
  Description of Artificial Sequence: Synthetic oligonucleotide
cugagcaucacugccagcu

SEQ ID NO: 2469752 - RNA, 19 nt, Artificial Sequence
  Description of Artificial Sequence: Synthetic oligonucleotide
ucugagcaucacugccagc

SEQ ID NO: 2469753 - RNA, 19 nt, Artificial Sequence
  Description of Artificial Sequence: Synthetic oligonucleotide
acccuguauuuuccuguug

SEQ ID NO: 2469754 - RNA, 19 nt, Artificial Sequence
  Description of Artificial Sequence: Synthetic oligonucleotide
ugggauugcugugcuuggc

SEQ ID NO: 2469755 - RNA, 19 nt, Artificial Sequence
  Description of Artificial Sequence: Synthetic oligonucleotide
augccuccauagcacguca

SEQ ID NO: 2469756 - RNA, 19 nt, Artificial Sequence
  Description of Artificial Sequence: Synthetic oligonucleotide
acgcaucgccaacaggaga

SEQ ID NO: 2469757 - RNA, 19 nt, Artificial Sequence
  Description of Artificial Sequence: Synthetic oligonucleotide
cugugcuuggccucagaga

SEQ ID NO: 2469758 - RNA, 19 nt, Artificial Sequence
  Description of Artificial Sequence: Synthetic oligonucleotide
cugccagcucgagugauac

SEQ ID NO: 2469759 - RNA, 19 nt, Artificial Sequence
  Description of Artificial Sequence: Synthetic oligonucleotide
ccugcuuuuguucauccca

SEQ ID NO: 2469760 - RNA, 19 nt, Artificial Sequence
  Description of Artificial Sequence: Synthetic oligonucleotide
gaggcgccagaaugacucc

SEQ ID NO: 2469761 - RNA, 19 nt, Artificial Sequence
  Description of Artificial Sequence: Synthetic oligonucleotide
uugggcuggaguccugcuu

SEQ ID NO: 2469762 - RNA, 19 nt, Artificial Sequence
  Description of Artificial Sequence: Synthetic oligonucleotide
cuggagacuuucccaugug

SEQ ID NO: 2469763 - RNA, 19 nt, Artificial Sequence
  Description of Artificial Sequence: Synthetic oligonucleotide
cuuugauaacccuguauuu

SEQ ID NO: 2469764 - RNA, 19 nt, Artificial Sequence
  Description of Artificial Sequence: Synthetic oligonucleotide
guucuugguggcaaguucu

SEQ ID NO: 2469765 - RNA, 19 nt, Artificial Sequence
  Description of Artificial Sequence: Synthetic oligonucleotide
guccucagucuuccacagg

SEQ ID NO: 2469766 - RNA, 19 nt, Artificial Sequence
  Description of Artificial Sequence: Synthetic oligonucleotide
aggggaugagcccuuucuu

SEQ ID NO: 2469767 - RNA, 19 nt, Artificial Sequence
  Description of Artificial Sequence: Synthetic oligonucleotide
acaaggucggggaccaagu

SEQ ID NO: 2469768 - RNA, 19 nt, Artificial Sequence
  Description of Artificial Sequence: Synthetic oligonucleotide
ggugauccauucauccacc

SEQ ID NO: 2469769 - RNA, 19 nt, Artificial Sequence
  Description of Artificial Sequence: Synthetic oligonucleotide
uccagccagugcgaguucu

SEQ ID NO: 2469770 - RNA, 19 nt, Artificial Sequence
  Description of Artificial Sequence: Synthetic oligonucleotide
ggggaugagcccuuucuuc

SEQ ID NO: 2469771 - RNA, 19 nt, Artificial Sequence
  Description of Artificial Sequence: Synthetic oligonucleotide
cagacucguagauaaauuu

SEQ ID NO: 2469772 - RNA, 19 nt, Artificial Sequence
  Description of Artificial Sequence: Synthetic oligonucleotide
uccugucuucacucucgga

SEQ ID NO: 2469773 - RNA, 19 nt, Artificial Sequence
  Description of Artificial Sequence: Synthetic oligonucleotide
gccagaaugacuccaacau

SEQ ID NO: 2469774 - RNA, 19 nt, Artificial Sequence
  Description of Artificial Sequence: Synthetic oligonucleotide
gaucuugguggaggagaug

SEQ ID NO: 2469775 - RNA, 19 nt, Artificial Sequence
  Description of Artificial Sequence: Synthetic oligonucleotide
gucggggaccaaguagcgg

SEQ ID NO: 2469776 - RNA, 19 nt, Artificial Sequence
  Description of Artificial Sequence: Synthetic oligonucleotide
ccacagguugggcacauug

SEQ ID NO: 2469777 - RNA, 19 nt, Artificial Sequence
  Description of Artificial Sequence: Synthetic oligonucleotide
aucgccaacaggagaaauu

SEQ ID NO: 2469778 - RNA, 19 nt, Artificial Sequence
  Description of Artificial Sequence: Synthetic oligonucleotide
ccaacauuccugucuucac

SEQ ID NO: 2469779 - RNA, 19 nt, Artificial Sequence
  Description of Artificial Sequence: Synthetic oligonucleotide
augucauuggugauccauu

SEQ ID NO: 2469780 - RNA, 19 nt, Artificial Sequence
  Description of Artificial Sequence: Synthetic oligonucleotide
uugcucugaugccuccaua

SEQ ID NO: 2469781 - RNA, 19 nt, Artificial Sequence
  Description of Artificial Sequence: Synthetic oligonucleotide
acucuuggacaaggucggg

SEQ ID NO: 2469782 - RNA, 19 nt, Artificial Sequence
  Description of Artificial Sequence: Synthetic oligonucleotide
cuguugcauucauguaguc

SEQ ID NO: 2469783 - RNA, 19 nt, Artificial Sequence
  Description of Artificial Sequence: Synthetic oligonucleotide
ccaaguagcggaugcucug

SEQ ID NO: 2469784 - RNA, 19 nt, Artificial Sequence
  Description of Artificial Sequence: Synthetic oligonucleotide
ugagcccuuucuucuugua

SEQ ID NO: 2469785 - RNA, 19 nt, Artificial Sequence
  Description of Artificial Sequence: Synthetic oligonucleotide
auguguccacuuccagcca

SEQ ID NO: 2469786 - RNA, 19 nt, Artificial Sequence
  Description of Artificial Sequence: Synthetic oligonucleotide
cuccauagcacgucagacu

SEQ ID NO: 2469787 - RNA, 19 nt, Artificial Sequence
  Description of Artificial Sequence: Synthetic oligonucleotide
auguuggugaugggguuaa

SEQ ID NO: 2469788 - RNA, 19 nt, Artificial Sequence
  Description of Artificial Sequence: Synthetic oligonucleotide
cacauugaaggacuccagu

SEQ ID NO: 2469789 - RNA, 19 nt, Artificial Sequence
  Description of Artificial Sequence: Synthetic oligonucleotide
agcucgagugauacauaug

SEQ ID NO: 2469790 - RNA, 19 nt, Artificial Sequence
  Description of Artificial Sequence: Synthetic oligonucleotide
acucucggaguuguacaga

SEQ ID NO: 2469791 - RNA, 19 nt, Artificial Sequence
  Description of Artificial Sequence: Synthetic oligonucleotide
aaucugcuccacacagcaa

SEQ ID NO: 2469792 - RNA, 19 nt, Artificial Sequence
  Description of Artificial Sequence: Synthetic oligonucleotide
ucuccggaucuugguggag

SEQ ID NO: 2469793 - RNA, 19 nt, Artificial Sequence
  Description of Artificial Sequence: Synthetic oligonucleotide
aacugucaguugccagcuu

SEQ ID NO: 2469794 - RNA, 19 nt, Artificial Sequence
  Description of Artificial Sequence: Synthetic oligonucleotide
gucagacucguagauaaau

SEQ ID NO: 2469795 - RNA, 19 nt, Artificial Sequence
  Description of Artificial Sequence: Synthetic oligonucleotide
ugacuccaacauuccuguc

SEQ ID NO: 2469796 - RNA, 19 nt, Artificial Sequence
  Description of Artificial Sequence: Synthetic oligonucleotide
gccaugaugauucgguggu

SEQ ID NO: 2469797 - RNA, 19 nt, Artificial Sequence
  Description of Artificial Sequence: Synthetic oligonucleotide
ccauagcacgucagacucg

SEQ ID NO: 2469798 - RNA, 19 nt, Artificial Sequence
  Description of Artificial Sequence: Synthetic oligonucleotide
guuccucuguagaggcgcc

SEQ ID NO: 2469799 - RNA, 19 nt, Artificial Sequence
  Description of Artificial Sequence: Synthetic oligonucleotide
agaugucauuggugaucca

SEQ ID NO: 2469800 - RNA, 19 nt, Artificial Sequence
  Description of Artificial Sequence: Synthetic oligonucleotide
ccuuugauaacccuguauu

SEQ ID NO: 2469801 - RNA, 19 nt, Artificial Sequence
  Description of Artificial Sequence: Synthetic oligonucleotide
cauagcacgucagacucgu

SEQ ID NO: 2469802 - RNA, 19 nt, Artificial Sequence
  Description of Artificial Sequence: Synthetic oligonucleotide
cucuguagaggcgccagaa

SEQ ID NO: 2469803 - RNA, 19 nt, Artificial Sequence
  Description of Artificial Sequence: Synthetic oligonucleotide
ccuccauagcacgucagac

SEQ ID NO: 2469804 - RNA, 19 nt, Artificial Sequence
  Description of Artificial Sequence: Synthetic oligonucleotide
cagccagugcgaguucuug

SEQ ID NO: 2469805 - RNA, 19 nt, Artificial Sequence
  Description of Artificial Sequence: Synthetic oligonucleotide
gagcguugugggugaucac

SEQ ID NO: 2469806 - RNA, 19 nt, Artificial Sequence
  Description of Artificial Sequence: Synthetic oligonucleotide
cuucaacagucuccaccca

SEQ ID NO: 2469807 - RNA, 19 nt, Artificial Sequence
  Description of Artificial Sequence: Synthetic oligonucleotide
cuuccgcccgggccugucc

SEQ ID NO: 2469808 - RNA, 19 nt, Artificial Sequence
  Description of Artificial Sequence: Synthetic oligonucleotide
auucgguggugggcagggg

SEQ ID NO: 2469809 - RNA, 19 nt, Artificial Sequence
  Description of Artificial Sequence: Synthetic oligonucleotide
gcgaguucuugguggcaag

SEQ ID NO: 2469810 - RNA, 19 nt, Artificial Sequence
  Description of Artificial Sequence: Synthetic oligonucleotide
gggcacaccuguugacuug

SEQ ID NO: 2469811 - RNA, 19 nt, Artificial Sequence
  Description of Artificial Sequence: Synthetic oligonucleotide
cauguuggugaugggguua

SEQ ID NO: 2469812 - RNA, 19 nt, Artificial Sequence
  Description of Artificial Sequence: Synthetic oligonucleotide
guugccagcuucuccugau

SEQ ID NO: 2469813 - RNA, 19 nt, Artificial Sequence
  Description of Artificial Sequence: Synthetic oligonucleotide
caauuucacccugggcaca

SEQ ID NO: 2469814 - RNA, 19 nt, Artificial Sequence
  Description of Artificial Sequence: Synthetic oligonucleotide
ccuguugcauucauguagu

SEQ ID NO: 2469815 - RNA, 19 nt, Artificial Sequence
  Description of Artificial Sequence: Synthetic oligonucleotide
gagcucuccggaucuuggu

SEQ ID NO: 2469816 - RNA, 19 nt, Artificial Sequence
  Description of Artificial Sequence: Synthetic oligonucleotide
caccuucaacagucuccac

SEQ ID NO: 2469817 - RNA, 19 nt, Artificial Sequence
  Description of Artificial Sequence: Synthetic oligonucleotide
cggaguuguacagaucaug

SEQ ID NO: 2469818 - RNA, 19 nt, Artificial Sequence
  Description of Artificial Sequence: Synthetic oligonucleotide
gccuccauagcacgucaga

SEQ ID NO: 2469819 - RNA, 19 nt, Artificial Sequence
  Description of Artificial Sequence: Synthetic oligonucleotide
ccagugcgaguucuuggug

SEQ ID NO: 2469820 - RNA, 19 nt, Artificial Sequence
  Description of Artificial Sequence: Synthetic oligonucleotide
gacuugggcucuugggguu

SEQ ID NO: 2469821 - RNA, 19 nt, Artificial Sequence
  Description of Artificial Sequence: Synthetic oligonucleotide
caaggucggggaccaagua

SEQ ID NO: 2469822 - RNA, 19 nt, Artificial Sequence
  Description of Artificial Sequence: Synthetic oligonucleotide
gccacgauuugggugaugu

SEQ ID NO: 2469823 - RNA, 19 nt, Artificial Sequence
  Description of Artificial Sequence: Synthetic oligonucleotide
cgcaucgccaacaggagaa

SEQ ID NO: 2469824 - RNA, 19 nt, Artificial Sequence
  Description of Artificial Sequence: Synthetic oligonucleotide
gccagugcgaguucuuggu

SEQ ID NO: 2469825 - RNA, 19 nt, Artificial Sequence
  Description of Artificial Sequence: Synthetic oligonucleotide
cguaguuggccacgauuug

SEQ ID NO: 2469826 - RNA, 19 nt, Artificial Sequence
  Description of Artificial Sequence: Synthetic oligonucleotide
gccagcucgagugauacau

SEQ ID NO: 2469827 - RNA, 19 nt, Artificial Sequence
  Description of Artificial Sequence: Synthetic oligonucleotide
ugagagcucuccggaucuu

SEQ ID NO: 2469828 - RNA, 19 nt, Artificial Sequence
  Description of Artificial Sequence: Synthetic oligonucleotide
gcuggaguccugcuuuugu

SEQ ID NO: 2469829 - RNA, 19 nt, Artificial Sequence
  Description of Artificial Sequence: Synthetic oligonucleotide
cuggaguccugcuuuuguu

SEQ ID NO: 2469830 - RNA, 19 nt, Artificial Sequence
  Description of Artificial Sequence: Synthetic oligonucleotide
agcggaugcucuggccccu

SEQ ID NO: 2469831 - RNA, 19 nt, Artificial Sequence
  Description of Artificial Sequence: Synthetic oligonucleotide
agcccguaguuggccacga

SEQ ID NO: 2469832 - RNA, 19 nt, Artificial Sequence
  Description of Artificial Sequence: Synthetic oligonucleotide
gcucuggccccuucugaga

SEQ ID NO: 2469833 - RNA, 19 nt, Artificial Sequence
  Description of Artificial Sequence: Synthetic oligonucleotide
gcgccagaaugacuccaac

SEQ ID NO: 2469834 - RNA, 19 nt, Artificial Sequence
  Description of Artificial Sequence: Synthetic oligonucleotide
gugagcguugugggugauc

SEQ ID NO: 2469835 - RNA, 19 nt, Artificial Sequence
  Description of Artificial Sequence: Synthetic oligonucleotide
caggagaaauuaugccuuu

SEQ ID NO: 2469836 - RNA, 19 nt, Artificial Sequence
  Description of Artificial Sequence: Synthetic oligonucleotide
ucuuccgcccgggccuguc

SEQ ID NO: 2469837 - RNA, 19 nt, Artificial Sequence
  Description of Artificial Sequence: Synthetic oligonucleotide
ccguaguuggccacgauuu

SEQ ID NO: 2469838 - RNA, 19 nt, Artificial Sequence
  Description of Artificial Sequence: Synthetic oligonucleotide
ccacgauuugggugauguc

SEQ ID NO: 2469839 - RNA, 19 nt, Artificial Sequence
  Description of Artificial Sequence: Synthetic oligonucleotide
cgccagaaugacuccaaca

SEQ ID NO: 2469840 - RNA, 19 nt, Artificial Sequence
  Description of Artificial Sequence: Synthetic oligonucleotide
cguugugggugaucacaac

SEQ ID NO: 2469841 - RNA, 19 nt, Artificial Sequence
  Description of Artificial Sequence: Synthetic oligonucleotide
ggggaccaaguagcggaug

SEQ ID NO: 2469842 - RNA, 19 nt, Artificial Sequence
  Description of Artificial Sequence: Synthetic oligonucleotide
uccgcccgggccuguccau

SEQ ID NO: 2469843 - RNA, 19 nt, Artificial Sequence
  Description of Artificial Sequence: Synthetic oligonucleotide
gcguugugggugaucacaa

SEQ ID NO: 2469844 - RNA, 19 nt, Artificial Sequence
  Description of Artificial Sequence: Synthetic oligonucleotide
gcacaccuguugacuuggg

SEQ ID NO: 2469845 - RNA, 19 nt, Artificial Sequence
  Description of Artificial Sequence: Synthetic oligonucleotide
cuucacucucggaguugua

SEQ ID NO: 2469846 - RNA, 19 nt, Artificial Sequence
  Description of Artificial Sequence: Synthetic oligonucleotide
gugcgaguucuugguggca

SEQ ID NO: 2469847 - RNA, 19 nt, Artificial Sequence
  Description of Artificial Sequence: Synthetic oligonucleotide
ccaugaugauucgguggug

SEQ ID NO: 2469848 - RNA, 19 nt, Artificial Sequence
  Description of Artificial Sequence: Synthetic oligonucleotide
cggaucuugguggaggaga

SEQ ID NO: 2469849 - RNA, 19 nt, Artificial Sequence
  Description of Artificial Sequence: Synthetic oligonucleotide
agugagcguugugggugau

SEQ ID NO: 2469850 - RNA, 19 nt, Artificial Sequence
  Description of Artificial Sequence: Synthetic oligonucleotide
ggaucuugguggaggagau

SEQ ID NO: 2469851 - RNA, 19 nt, Artificial Sequence
  Description of Artificial Sequence: Synthetic oligonucleotide
gcacgucagacucguagau

SEQ ID NO: 2469852 - RNA, 19 nt, Artificial Sequence
  Description of Artificial Sequence: Synthetic oligonucleotide
gugauacauaugagcccgu

SEQ ID NO: 2469853 - RNA, 19 nt, Artificial Sequence
  Description of Artificial Sequence: Synthetic oligonucleotide
ggccccuucugagagcucu

SEQ ID NO: 2469854 - RNA, 19 nt, Artificial Sequence
  Description of Artificial Sequence: Synthetic oligonucleotide
cccgggccuguccaucaag

SEQ ID NO: 2469855 - RNA, 19 nt, Artificial Sequence
  Description of Artificial Sequence: Synthetic oligonucleotide
ggcgccagaaugacuccaa

SEQ ID NO: 2469856 - RNA, 19 nt, Artificial Sequence
  Description of Artificial Sequence: Synthetic oligonucleotide
uggccacgauuugggugau

SEQ ID NO: 2469857 - RNA, 19 nt, Artificial Sequence
  Description of Artificial Sequence: Synthetic oligonucleotide
caucgccaacaggagaaau

SEQ ID NO: 2469858 - RNA, 19 nt, Artificial Sequence
  Description of Artificial Sequence: Synthetic oligonucleotide
ccggaucuugguggaggag

SEQ ID NO: 2469859 - RNA, 19 nt, Artificial Sequence
  Description of Artificial Sequence: Synthetic oligonucleotide
ggaccaaguagcggaugcu

SEQ ID NO: 2469860 - RNA, 19 nt, Artificial Sequence
  Description of Artificial Sequence: Synthetic oligonucleotide
ccagaaugacuccaacauu

SEQ ID NO: 2469861 - RNA, 19 nt, Artificial Sequence
  Description of Artificial Sequence: Synthetic oligonucleotide
auagcacgucagacucgua

SEQ ID NO: 2469862 - RNA, 19 nt, Artificial Sequence
  Description of Artificial Sequence: Synthetic oligonucleotide
cacuccuucuggagacuuu

SEQ ID NO: 2469863 - RNA, 19 nt, Artificial Sequence
  Description of Artificial Sequence: Synthetic oligonucleotide
ccucuguagaggcgccaga

SEQ ID NO: 2469864 - RNA, 19 nt, Artificial Sequence
  Description of Artificial Sequence: Synthetic oligonucleotide
gccuguccaucaagaguga

SEQ ID NO: 2469865 - RNA, 19 nt, Artificial Sequence
  Description of Artificial Sequence: Synthetic oligonucleotide
ggacuccaguaaaucugcu

SEQ ID NO: 2469866 - RNA, 19 nt, Artificial Sequence
  Description of Artificial Sequence: Synthetic oligonucleotide
cccguaguuggccacgauu

SEQ ID NO: 2469867 - RNA, 19 nt, Artificial Sequence
  Description of Artificial Sequence: Synthetic oligonucleotide
gccugaggugcauguuggu

SEQ ID NO: 2469868 - RNA, 19 nt, Artificial Sequence
  Description of Artificial Sequence: Synthetic oligonucleotide
cacugccagcucgagugau

SEQ ID NO: 2469869 - RNA, 19 nt, Artificial Sequence
  Description of Artificial Sequence: Synthetic oligonucleotide
ggccacgauuugggugaug

SEQ ID NO: 2469870 - RNA, 19 nt, Artificial Sequence
  Description of Artificial Sequence: Synthetic oligonucleotide
gccccuucugagagcucuc

SEQ ID NO: 2469871 - RNA, 19 nt, Artificial Sequence
  Description of Artificial Sequence: Synthetic oligonucleotide
cacccugggcacaccuguu

SEQ ID NO: 2469872 - RNA, 19 nt, Artificial Sequence
  Description of Artificial Sequence: Synthetic oligonucleotide
ccucagucuuccacagguu

SEQ ID NO: 2469873 - RNA, 19 nt, Artificial Sequence
  Description of Artificial Sequence: Synthetic oligonucleotide
cgcccgggccuguccauca

SEQ ID NO: 2469874 - RNA, 19 nt, Artificial Sequence
  Description of Artificial Sequence: Synthetic oligonucleotide
ccgcccgggccuguccauc

SEQ ID NO: 2469875 - RNA, 19 nt, Artificial Sequence
  Description of Artificial Sequence: Synthetic oligonucleotide
gcccguaguuggccacgau

SEQ ID NO: 2469876 - RNA, 19 nt, Artificial Sequence
  Description of Artificial Sequence: Synthetic oligonucleotide
cucuuccgcccgggccugu

SEQ ID NO: 2469877 - RNA, 19 nt, Artificial Sequence
  Description of Artificial Sequence: Synthetic oligonucleotide
gcggaugcucuggccccuu

SEQ ID NO: 2469878 - RNA, 19 nt, Artificial Sequence
  Description of Artificial Sequence: Synthetic oligonucleotide
aauucuuccagguaugacc

SEQ ID NO: 2469879 - RNA, 19 nt, Artificial Sequence
  Description of Artificial Sequence: Synthetic oligonucleotide
aacucuuccagguauaacc

SEQ ID NO: 2469880 - RNA, 19 nt, Artificial Sequence
  Description of Artificial Sequence: Synthetic oligonucleotide
aacaacucugccuucugcc

SEQ ID NO: 2469881 - RNA, 19 nt, Artificial Sequence
  Description of Artificial Sequence: Synthetic oligonucleotide
augucuuccgacuugauuc

SEQ ID NO: 2469882 - RNA, 19 nt, Artificial Sequence
  Description of Artificial Sequence: Synthetic oligonucleotide
agguauaaccauuuuggcc

SEQ ID NO: 2469883 - RNA, 19 nt, Artificial Sequence
  Description of Artificial Sequence: Synthetic oligonucleotide
ucuucuuccaggauggugc

SEQ ID NO: 2469884 - RNA, 19 nt, Artificial Sequence
  Description of Artificial Sequence: Synthetic oligonucleotide
aggucuucagcucagaauc

SEQ ID NO: 2469885 - RNA, 19 nt, Artificial Sequence
  Description of Artificial Sequence: Synthetic oligonucleotide
aaucugcugauccugguag

SEQ ID NO: 2469886 - RNA, 19 nt, Artificial Sequence
  Description of Artificial Sequence: Synthetic oligonucleotide
ucaguaaugacagaugucu

SEQ ID NO: 2469887 - RNA, 19 nt, Artificial Sequence
  Description of Artificial Sequence: Synthetic oligonucleotide
cugagcaucccucagagcc

SEQ ID NO: 2469888 - RNA, 19 nt, Artificial Sequence
  Description of Artificial Sequence: Synthetic oligonucleotide
uuagauauccugcauuccu

SEQ ID NO: 2469889 - RNA, 19 nt, Artificial Sequence
  Description of Artificial Sequence: Synthetic oligonucleotide
agugccuccaggcaugacc

SEQ ID NO: 2469890 - RNA, 19 nt, Artificial Sequence
  Description of Artificial Sequence: Synthetic oligonucleotide
gauuccacugucuucuucc

SEQ ID NO: 2469891 - RNA, 19 nt, Artificial Sequence
  Description of Artificial Sequence: Synthetic oligonucleotide
uauggucugccgaagcugg

SEQ ID NO: 2469892 - RNA, 19 nt, Artificial Sequence
  Description of Artificial Sequence: Synthetic oligonucleotide
auauucucgcaacauuugg

SEQ ID NO: 2469893 - RNA, 19 nt, Artificial Sequence
  Description of Artificial Sequence: Synthetic oligonucleotide
aaccauuuuggccuccauc

SEQ ID NO: 2469894 - RNA, 19 nt, Artificial Sequence
  Description of Artificial Sequence: Synthetic oligonucleotide
uacuccuuagauauccugc

SEQ ID NO: 2469895 - RNA, 19 nt, Artificial Sequence
  Description of Artificial Sequence: Synthetic oligonucleotide
accauuuuggccuccauca

SEQ ID NO: 2469896 - RNA, 19 nt, Artificial Sequence
  Description of Artificial Sequence: Synthetic oligonucleotide
ugguguacuccuuagauau

SEQ ID NO: 2469897 - RNA, 19 nt, Artificial Sequence
  Description of Artificial Sequence: Synthetic oligonucleotide
uccagguaugaccacuugg

SEQ ID NO: 2469898 - RNA, 19 nt, Artificial Sequence
  Description of Artificial Sequence: Synthetic oligonucleotide
aucaguuccugauauucuc

SEQ ID NO: 2469899 - RNA, 19 nt, Artificial Sequence
  Description of Artificial Sequence: Synthetic oligonucleotide
ugauauucucgcaacauuu

SEQ ID NO: 2469900 - RNA, 19 nt, Artificial Sequence
  Description of Artificial Sequence: Synthetic oligonucleotide
aaugacagaugucuuccga

SEQ ID NO: 2469901 - RNA, 19 nt, Artificial Sequence
  Description of Artificial Sequence: Synthetic oligonucleotide
augacagaugucuuccgac

SEQ ID NO: 2469902 - RNA, 19 nt, Artificial Sequence
  Description of Artificial Sequence: Synthetic oligonucleotide
agauauccugcauuccucg

SEQ ID NO: 2469903 - RNA, 19 nt, Artificial Sequence
  Description of Artificial Sequence: Synthetic oligonucleotide
aauccagagccccucgcuc

SEQ ID NO: 2469904 - RNA, 19 nt, Artificial Sequence
  Description of Artificial Sequence: Synthetic oligonucleotide
acucaguaaugacagaugu

SEQ ID NO: 2469905 - RNA, 19 nt, Artificial Sequence
  Description of Artificial Sequence: Synthetic oligonucleotide
uccagggacaacuucgugc

SEQ ID NO: 2469906 - RNA, 19 nt, Artificial Sequence
  Description of Artificial Sequence: Synthetic oligonucleotide
aauggcagacugcagagua

SEQ ID NO: 2469907 - RNA, 19 nt, Artificial Sequence
  Description of Artificial Sequence: Synthetic oligonucleotide
ucucagagcagucuccagc

SEQ ID NO: 2469908 - RNA, 19 nt, Artificial Sequence
  Description of Artificial Sequence: Synthetic oligonucleotide
uggucacucaguaaugaca

SEQ ID NO: 2469909 - RNA, 19 nt, Artificial Sequence
  Description of Artificial Sequence: Synthetic oligonucleotide
ugcaucuugaggcuggaaa

SEQ ID NO: 2469910 - RNA, 19 nt, Artificial Sequence
  Description of Artificial Sequence: Synthetic oligonucleotide
uccacaagugccuccaggc

SEQ ID NO: 2469911 - RNA, 19 nt, Artificial Sequence
  Description of Artificial Sequence: Synthetic oligonucleotide
cucugaguccacaagugcc

SEQ ID NO: 2469912 - RNA, 19 nt, Artificial Sequence
  Description of Artificial Sequence: Synthetic oligonucleotide
ugcuuggcuguucucagag

SEQ ID NO: 2469913 - RNA, 19 nt, Artificial Sequence
  Description of Artificial Sequence: Synthetic oligonucleotide
ugccuuuccagccucugag

SEQ ID NO: 2469914 - RNA, 19 nt, Artificial Sequence
  Description of Artificial Sequence: Synthetic oligonucleotide
agccucuagauccaaagcu

SEQ ID NO: 2469915 - RNA, 19 nt, Artificial Sequence
  Description of Artificial Sequence: Synthetic oligonucleotide
ucucgcaacauuugggcca

SEQ ID NO: 2469916 - RNA, 19 nt, Artificial Sequence
  Description of Artificial Sequence: Synthetic oligonucleotide
acggagcaggaacucaugc

SEQ ID NO: 2469917 - RNA, 19 nt, Artificial Sequence
  Description of Artificial Sequence: Synthetic oligonucleotide
gguauaaccauuuuggccu

SEQ ID NO: 2469918 - RNA, 19 nt, Artificial Sequence
  Description of Artificial Sequence: Synthetic oligonucleotide
acaaugcuagagcagccuc

SEQ ID NO: 2469919 - RNA, 19 nt, Artificial Sequence
  Description of Artificial Sequence: Synthetic oligonucleotide
uccaucaacucuuccaggu

SEQ ID NO: 2469920 - RNA, 19 nt, Artificial Sequence
  Description of Artificial Sequence: Synthetic oligonucleotide
uggaaaucugacucugcag

SEQ ID NO: 2469921 - RNA, 19 nt, Artificial Sequence
  Description of Artificial Sequence: Synthetic oligonucleotide
accaguuacaaugcuagag

SEQ ID NO: 2469922 - RNA, 19 nt, Artificial Sequence
  Description of Artificial Sequence: Synthetic oligonucleotide
cuucgugcccaucaguucc

SEQ ID NO: 2469923 - RNA, 19 nt, Artificial Sequence
  Description of Artificial Sequence: Synthetic oligonucleotide
auccugguaggucuucagc

SEQ ID NO: 2469924 - RNA, 19 nt, Artificial Sequence
  Description of Artificial Sequence: Synthetic oligonucleotide
accauucugcaucuugagg

SEQ ID NO: 2469925 - RNA, 19 nt, Artificial Sequence
  Description of Artificial Sequence: Synthetic oligonucleotide
ccagguaugaccuuuuggc

SEQ ID NO: 2469926 - RNA, 19 nt, Artificial Sequence
  Description of Artificial Sequence: Synthetic oligonucleotide
uguauggucugccgaagcu

SEQ ID NO: 2469927 - RNA, 19 nt, Artificial Sequence
  Description of Artificial Sequence: Synthetic oligonucleotide
ucugaguccacaagugccu

SEQ ID NO: 2469928 - RNA, 19 nt, Artificial Sequence
  Description of Artificial Sequence: Synthetic oligonucleotide
uaaugacagaugucuuccg

SEQ ID NO: 2469929 - RNA, 19 nt, Artificial Sequence
  Description of Artificial Sequence: Synthetic oligonucleotide
ugcuagagcagccucuaga

SEQ ID NO: 2469930 - RNA, 19 nt, Artificial Sequence
  Description of Artificial Sequence: Synthetic oligonucleotide
agguaugaccuuuuggccu

SEQ ID NO: 2469931 - RNA, 19 nt, Artificial Sequence
  Description of Artificial Sequence: Synthetic oligonucleotide
ucgauacauggcaaucucc

SEQ ID NO: 2469932 - RNA, 19 nt, Artificial Sequence
  Description of Artificial Sequence: Synthetic oligonucleotide
uuacaaugcuagagcagcc

SEQ ID NO: 2469933 - RNA, 19 nt, Artificial Sequence
  Description of Artificial Sequence: Synthetic oligonucleotide
uguucucagagcagucucc

SEQ ID NO: 2469934 - RNA, 19 nt, Artificial Sequence
  Description of Artificial Sequence: Synthetic oligonucleotide
uccaauucuuccagguaug

SEQ ID NO: 2469935 - RNA, 19 nt, Artificial Sequence
  Description of Artificial Sequence: Synthetic oligonucleotide
agaauccagagccccucgc

SEQ ID NO: 2469936 - RNA, 19 nt, Artificial Sequence
  Description of Artificial Sequence: Synthetic oligonucleotide
ugcagaguaccauucugca

SEQ ID NO: 2469937 - RNA, 19 nt, Artificial Sequence
  Description of Artificial Sequence: Synthetic oligonucleotide
agguaugaccacuuggccu

SEQ ID NO: 2469938 - RNA, 19 nt, Artificial Sequence
  Description of Artificial Sequence: Synthetic oligonucleotide
aggagccagagccagaacu

SEQ ID NO: 2469939 - RNA, 19 nt, Artificial Sequence
  Description of Artificial Sequence: Synthetic oligonucleotide
ugccuggucacucaguaau

SEQ ID NO: 2469940 - RNA, 19 nt, Artificial Sequence
  Description of Artificial Sequence: Synthetic oligonucleotide
uccaggcaugaccauuugg

SEQ ID NO: 2469941 - RNA, 19 nt, Artificial Sequence
  Description of Artificial Sequence: Synthetic oligonucleotide
uccgacuugauuccacugu

SEQ ID NO: 2469942 - RNA, 19 nt, Artificial Sequence
  Description of Artificial Sequence: Synthetic oligonucleotide
cagguauaaccauuuuggc

SEQ ID NO: 2469943 - RNA, 19 nt, Artificial Sequence
  Description of Artificial Sequence: Synthetic oligonucleotide
uucgauacauggcaaucuc

SEQ ID NO: 2469944 - RNA, 19 nt, Artificial Sequence
  Description of Artificial Sequence: Synthetic oligonucleotide
cagguaugaccuuuuggcc

SEQ ID NO: 2469945 - RNA, 19 nt, Artificial Sequence
  Description of Artificial Sequence: Synthetic oligonucleotide
uccaucacaauuccaggua

SEQ ID NO: 2469946 - RNA, 19 nt, Artificial Sequence
  Description of Artificial Sequence: Synthetic oligonucleotide
ucuugcuuggcuguucuca

SEQ ID NO: 2469947 - RNA, 19 nt, Artificial Sequence
  Description of Artificial Sequence: Synthetic oligonucleotide
ugucuuccgacuugauucc

SEQ ID NO: 2469948 - RNA, 19 nt, Artificial Sequence
  Description of Artificial Sequence: Synthetic oligonucleotide
ucacucaguaaugacagau

SEQ ID NO: 2469949 - RNA, 19 nt, Artificial Sequence
  Description of Artificial Sequence: Synthetic oligonucleotide
ucuuccaggauggugcggc

SEQ ID NO: 2469950 - RNA, 19 nt, Artificial Sequence
  Description of Artificial Sequence: Synthetic oligonucleotide
agggacaacaacucugccu

SEQ ID NO: 2469951 - RNA, 19 nt, Artificial Sequence
  Description of Artificial Sequence: Synthetic oligonucleotide
acuccuuagauauccugca

SEQ ID NO: 2469952 - RNA, 19 nt, Artificial Sequence
  Description of Artificial Sequence: Synthetic oligonucleotide
cucagcaucggcaauggca

SEQ ID NO: 2469953 - RNA, 19 nt, Artificial Sequence
  Description of Artificial Sequence: Synthetic oligonucleotide
uagauauccugcauuccuc

SEQ ID NO: 2469954 - RNA, 19 nt, Artificial Sequence
  Description of Artificial Sequence: Synthetic oligonucleotide
ucuagauccaaagcugccu

SEQ ID NO: 2469955 - RNA, 19 nt, Artificial Sequence
  Description of Artificial Sequence: Synthetic oligonucleotide
aaaucugcugauccuggua

SEQ ID NO: 2469956 - RNA, 19 nt, Artificial Sequence
  Description of Artificial Sequence: Synthetic oligonucleotide
uucucgcaacauuugggcc

SEQ ID NO: 2469957 - RNA, 19 nt, Artificial Sequence
  Description of Artificial Sequence: Synthetic oligonucleotide
cuuuccagccucugagucc

SEQ ID NO: 2469958 - RNA, 19 nt, Artificial Sequence
  Description of Artificial Sequence: Synthetic oligonucleotide
acugcacccagaucccugg

SEQ ID NO: 2469959 - RNA, 19 nt, Artificial Sequence
  Description of Artificial Sequence: Synthetic oligonucleotide
guguacuccuuagauaucc

SEQ ID NO: 2469960 - RNA, 19 nt, Artificial Sequence
  Description of Artificial Sequence: Synthetic oligonucleotide
gauacauggcaaucuccac

SEQ ID NO: 2469961 - RNA, 19 nt, Artificial Sequence
  Description of Artificial Sequence: Synthetic oligonucleotide
uaccauucugcaucuugag

SEQ ID NO: 2469962 - RNA, 19 nt, Artificial Sequence
  Description of Artificial Sequence: Synthetic oligonucleotide
uccuuagauauccugcauu

SEQ ID NO: 2469963 - RNA, 19 nt, Artificial Sequence
  Description of Artificial Sequence: Synthetic oligonucleotide
ucggcaauggcagacugca

SEQ ID NO: 2469964 - RNA, 19 nt, Artificial Sequence
  Description of Artificial Sequence: Synthetic oligonucleotide
ugcacccagaucccugggg

SEQ ID NO: 2469965 - RNA, 19 nt, Artificial Sequence
  Description of Artificial Sequence: Synthetic oligonucleotide
acaacuucgugcccaucag

SEQ ID NO: 2469966 - RNA, 19 nt, Artificial Sequence
  Description of Artificial Sequence: Synthetic oligonucleotide
auauccugcauuccucgcu

SEQ ID NO: 2469967 - RNA, 19 nt, Artificial Sequence
  Description of Artificial Sequence: Synthetic oligonucleotide
gagccagacacggagcagg

SEQ ID NO: 2469968 - RNA, 19 nt, Artificial Sequence
  Description of Artificial Sequence: Synthetic oligonucleotide
acuucgugcccaucaguuc

SEQ ID NO: 2469969 - RNA, 19 nt, Artificial Sequence
  Description of Artificial Sequence: Synthetic oligonucleotide
ucuuccagguauaaccauu

SEQ ID NO: 2469970 - RNA, 19 nt, Artificial Sequence
  Description of Artificial Sequence: Synthetic oligonucleotide
gauauccugcauuccucgc

SEQ ID NO: 2469971 - RNA, 19 nt, Artificial Sequence
  Description of Artificial Sequence: Synthetic oligonucleotide
uucuguauggucugccgaa

SEQ ID NO: 2469972 - RNA, 19 nt, Artificial Sequence
  Description of Artificial Sequence: Synthetic oligonucleotide
ugaggcuggaaaucugacu

SEQ ID NO: 2469973 - RNA, 19 nt, Artificial Sequence
  Description of Artificial Sequence: Synthetic oligonucleotide
cauuuuggccuccaucaac

SEQ ID NO: 2469974 - RNA, 19 nt, Artificial Sequence
  Description of Artificial Sequence: Synthetic oligonucleotide
gaagccagagccagacacg

SEQ ID NO: 2469975 - RNA, 19 nt, Artificial Sequence
  Description of Artificial Sequence: Synthetic oligonucleotide
acagugaccuggcuggugu

SEQ ID NO: 2469976 - RNA, 19 nt, Artificial Sequence
  Description of Artificial Sequence: Synthetic oligonucleotide
aggcaugaccauuuggccu

SEQ ID NO: 2469977 - RNA, 19 nt, Artificial Sequence
  Description of Artificial Sequence: Synthetic oligonucleotide
uccugauauucucgcaaca

SEQ ID NO: 2469978 - RNA, 19 nt, Artificial Sequence
  Description of Artificial Sequence: Synthetic oligonucleotide
caggcaugaccauuuggcc

SEQ ID NO: 2469979 - RNA, 19 nt, Artificial Sequence
  Description of Artificial Sequence: Synthetic oligonucleotide
auuuuggccuccaucaacu

SEQ ID NO: 2469980 - RNA, 19 nt, Artificial Sequence
  Description of Artificial Sequence: Synthetic oligonucleotide
gauccaaagcugccuuucc

SEQ ID NO: 2469981 - RNA, 19 nt, Artificial Sequence
  Description of Artificial Sequence: Synthetic oligonucleotide
uuccugauauucucgcaac

SEQ ID NO: 2469982 - RNA, 19 nt, Artificial Sequence
  Description of Artificial Sequence: Synthetic oligonucleotide
uauccugcauuccucgcuc

SEQ ID NO: 2469983 - RNA, 19 nt, Artificial Sequence
  Description of Artificial Sequence: Synthetic oligonucleotide
caguuccugauauucucgc

SEQ ID NO: 2469984 - RNA, 19 nt, Artificial Sequence
  Description of Artificial Sequence: Synthetic oligonucleotide
ccaggcaugaccauuuggc

SEQ ID NO: 2469985 - RNA, 19 nt, Artificial Sequence
  Description of Artificial Sequence: Synthetic oligonucleotide
ccaguuacaaugcuagagc

SEQ ID NO: 2469986 - RNA, 19 nt, Artificial Sequence
  Description of Artificial Sequence: Synthetic oligonucleotide
agcaucggcaauggcagac

SEQ ID NO: 2469987 - RNA, 19 nt, Artificial Sequence
  Description of Artificial Sequence: Synthetic oligonucleotide
uuggcuguucucagagcag

SEQ ID NO: 2469988 - RNA, 19 nt, Artificial Sequence
  Description of Artificial Sequence: Synthetic oligonucleotide
ugucuugcuuggcuguucu

SEQ ID NO: 2469989 - RNA, 19 nt, Artificial Sequence
  Description of Artificial Sequence: Synthetic oligonucleotide
ucugccguggagacaguga

SEQ ID NO: 2469990 - RNA, 19 nt, Artificial Sequence
  Description of Artificial Sequence: Synthetic oligonucleotide
cuuagauauccugcauucc

SEQ ID NO: 2469991 - RNA, 19 nt, Artificial Sequence
  Description of Artificial Sequence: Synthetic oligonucleotide
ccagguaugaccacuuggc

SEQ ID NO: 2469992 - RNA, 19 nt, Artificial Sequence
  Description of Artificial Sequence: Synthetic oligonucleotide
aucacaauuccagguauga

SEQ ID NO: 2469993 - RNA, 19 nt, Artificial Sequence
  Description of Artificial Sequence: Synthetic oligonucleotide
acguccagggacaacuucg

SEQ ID NO: 2469994 - RNA, 19 nt, Artificial Sequence
  Description of Artificial Sequence: Synthetic oligonucleotide
caggaacucaugcugggac

SEQ ID NO: 2469995 - RNA, 19 nt, Artificial Sequence
  Description of Artificial Sequence: Synthetic oligonucleotide
guacuccuuagauauccug

SEQ ID NO: 2469996 - RNA, 19 nt, Artificial Sequence
  Description of Artificial Sequence: Synthetic oligonucleotide
uguacuccuuagauauccu

SEQ ID NO: 2469997 - RNA, 19 nt, Artificial Sequence
  Description of Artificial Sequence: Synthetic oligonucleotide
aucugcugauccugguagg

SEQ ID NO: 2469998 - RNA, 19 nt, Artificial Sequence
  Description of Artificial Sequence: Synthetic oligonucleotide
ccaccaguuacaaugcuag

SEQ ID NO: 2469999 - RNA, 19 nt, Artificial Sequence
  Description of Artificial Sequence: Synthetic oligonucleotide
cucaugcugggacugcacc

SEQ ID NO: 2470000 - RNA, 19 nt, Artificial Sequence
  Description of Artificial Sequence: Synthetic oligonucleotide
cucaguaaugacagauguc

SEQ ID NO: 2470001 - RNA, 19 nt, Artificial Sequence
  Description of Artificial Sequence: Synthetic oligonucleotide
cagguaugaccacuuggcc

SEQ ID NO: 2470002 - RNA, 19 nt, Artificial Sequence
  Description of Artificial Sequence: Synthetic oligonucleotide
auuugggccaugucuugcu

SEQ ID NO: 2470003 - RNA, 19 nt, Artificial Sequence
  Description of Artificial Sequence: Synthetic oligonucleotide
ucuuccagguaugaccacu

SEQ ID NO: 2470004 - RNA, 19 nt, Artificial Sequence
  Description of Artificial Sequence: Synthetic oligonucleotide
aacuuggccugagcauccc

SEQ ID NO: 2470005 - RNA, 19 nt, Artificial Sequence
  Description of Artificial Sequence: Synthetic oligonucleotide
ugaccacuuggccuccacc

SEQ ID NO: 2470006 - RNA, 19 nt, Artificial Sequence
  Description of Artificial Sequence: Synthetic oligonucleotide
uacaaugcuagagcagccu

SEQ ID NO: 2470007 - RNA, 19 nt, Artificial Sequence
  Description of Artificial Sequence: Synthetic oligonucleotide
caucacaauuccagguaug

SEQ ID NO: 2470008 - RNA, 19 nt, Artificial Sequence
  Description of Artificial Sequence: Synthetic oligonucleotide
cuugaggcuggaaaucuga

SEQ ID NO: 2470009 - RNA, 19 nt, Artificial Sequence
  Description of Artificial Sequence: Synthetic oligonucleotide
ucuguauggucugccgaag

SEQ ID NO: 2470010 - RNA, 19 nt, Artificial Sequence
  Description of Artificial Sequence: Synthetic oligonucleotide
ggagacagugaccuggcug

SEQ ID NO: 2470011 - RNA, 19 nt, Artificial Sequence
  Description of Artificial Sequence: Synthetic oligonucleotide
aacuucgugcccaucaguu

SEQ ID NO: 2470012 - RNA, 19 nt, Artificial Sequence
  Description of Artificial Sequence: Synthetic oligonucleotide
guccacaagugccuccagg

SEQ ID NO: 2470013 - RNA, 19 nt, Artificial Sequence
  Description of Artificial Sequence: Synthetic oligonucleotide
caacaacucugccuucugc

SEQ ID NO: 2470014 - RNA, 19 nt, Artificial Sequence
  Description of Artificial Sequence: Synthetic oligonucleotide
ugcucagcaucggcaaugg

SEQ ID NO: 2470015 - RNA, 19 nt, Artificial Sequence
  Description of Artificial Sequence: Synthetic oligonucleotide
auggugcggcagcaggagc

SEQ ID NO: 2470016 - RNA, 19 nt, Artificial Sequence
  Description of Artificial Sequence: Synthetic oligonucleotide
uugggccaugucuugcuug

SEQ ID NO: 2470017 - RNA, 19 nt, Artificial Sequence
  Description of Artificial Sequence: Synthetic oligonucleotide
ccagggacaacuucgugcc

SEQ ID NO: 2470018 - RNA, 19 nt, Artificial Sequence
  Description of Artificial Sequence: Synthetic oligonucleotide
aggaacucaugcugggacu

SEQ ID NO: 2470019 - RNA, 19 nt, Artificial Sequence
  Description of Artificial Sequence: Synthetic oligonucleotide
ugguaggucuucagcucag

SEQ ID NO: 2470020 - RNA, 19 nt, Artificial Sequence
  Description of Artificial Sequence: Synthetic oligonucleotide
aguuccugauauucucgca

SEQ ID NO: 2470021 - RNA, 19 nt, Artificial Sequence
  Description of Artificial Sequence: Synthetic oligonucleotide
gauggugcggcagcaggag

SEQ ID NO: 2470022 - RNA, 19 nt, Artificial Sequence
  Description of Artificial Sequence: Synthetic oligonucleotide
ugaguccacaagugccucc

SEQ ID NO: 2470023 - RNA, 19 nt, Artificial Sequence
  Description of Artificial Sequence: Synthetic oligonucleotide
acaacaacucugccuucug

SEQ ID NO: 2470024 - RNA, 19 nt, Artificial Sequence
  Description of Artificial Sequence: Synthetic oligonucleotide
cuugauuccacugucuucu

SEQ ID NO: 2470025 - RNA, 19 nt, Artificial Sequence
  Description of Artificial Sequence: Synthetic oligonucleotide
ccuuagauauccugcauuc

SEQ ID NO: 2470026 - RNA, 19 nt, Artificial Sequence
  Description of Artificial Sequence: Synthetic oligonucleotide
gaaaucugacucugcagcu

SEQ ID NO: 2470027 - RNA, 19 nt, Artificial Sequence
  Description of Artificial Sequence: Synthetic oligonucleotide
gcaauggcagacugcagag

SEQ ID NO: 2470028 - RNA, 19 nt, Artificial Sequence
  Description of Artificial Sequence: Synthetic oligonucleotide
aaugcuagagcagccucua

SEQ ID NO: 2470029 - RNA, 19 nt, Artificial Sequence
  Description of Artificial Sequence: Synthetic oligonucleotide
cauuuggccuccaucacaa

SEQ ID NO: 2470030 - RNA, 19 nt, Artificial Sequence
  Description of Artificial Sequence: Synthetic oligonucleotide
gcagccucuagauccaaag

SEQ ID NO: 2470031 - RNA, 19 nt, Artificial Sequence
  Description of Artificial Sequence: Synthetic oligonucleotide
uugcucagcaucggcaaug

SEQ ID NO: 2470032 - RNA, 19 nt, Artificial Sequence
  Description of Artificial Sequence: Synthetic oligonucleotide
cagccuucgauacauggca

SEQ ID NO: 2470033 - RNA, 19 nt, Artificial Sequence
  Description of Artificial Sequence: Synthetic oligonucleotide
agugaccuggcugguguac

SEQ ID NO: 2470034 - RNA, 19 nt, Artificial Sequence
  Description of Artificial Sequence: Synthetic oligonucleotide
cuguauggucugccgaagc

SEQ ID NO: 2470035 - RNA, 19 nt, Artificial Sequence
  Description of Artificial Sequence: Synthetic oligonucleotide
cagccucuagauccaaagc

SEQ ID NO: 2470036 - RNA, 19 nt, Artificial Sequence
  Description of Artificial Sequence: Synthetic oligonucleotide
ggaaaucugcugauccugg

SEQ ID NO: 2470037 - RNA, 19 nt, Artificial Sequence
  Description of Artificial Sequence: Synthetic oligonucleotide
ucugccgaagcugggaaau

SEQ ID NO: 2470038 - RNA, 19 nt, Artificial Sequence
  Description of Artificial Sequence: Synthetic oligonucleotide
agagccaucuccccguguu

SEQ ID NO: 2470039 - RNA, 19 nt, Artificial Sequence
  Description of Artificial Sequence: Synthetic oligonucleotide
aaaucugacucugcagcuu

SEQ ID NO: 2470040 - RNA, 19 nt, Artificial Sequence
  Description of Artificial Sequence: Synthetic oligonucleotide
agccccucgcucucucugc

SEQ ID NO: 2470041 - RNA, 19 nt, Artificial Sequence
  Description of Artificial Sequence: Synthetic oligonucleotide
augaccacuuggccuccac

SEQ ID NO: 2470042 - RNA, 19 nt, Artificial Sequence
  Description of Artificial Sequence: Synthetic oligonucleotide
guauggucugccgaagcug

SEQ ID NO: 2470043 - RNA, 19 nt, Artificial Sequence
  Description of Artificial Sequence: Synthetic oligonucleotide
aucggcaauggcagacugc

SEQ ID NO: 2470044 - RNA, 19 nt, Artificial Sequence
  Description of Artificial Sequence: Synthetic oligonucleotide
ucugcugauccugguaggu

SEQ ID NO: 2470045 - RNA, 19 nt, Artificial Sequence
  Description of Artificial Sequence: Synthetic oligonucleotide
cuuuuggccuccaucaacu

SEQ ID NO: 2470046 - RNA, 19 nt, Artificial Sequence
  Description of Artificial Sequence: Synthetic oligonucleotide
gcuucuguauggucugccg

SEQ ID NO: 2470047 - RNA, 19 nt, Artificial Sequence
  Description of Artificial Sequence: Synthetic oligonucleotide
gccuccaucacaauuccag

SEQ ID NO: 2470048 - RNA, 19 nt, Artificial Sequence
  Description of Artificial Sequence: Synthetic oligonucleotide
ucagaauccagagccccuc

SEQ ID NO: 2470049 - RNA, 19 nt, Artificial Sequence
  Description of Artificial Sequence: Synthetic oligonucleotide
gagccagaacugaagccag

SEQ ID NO: 2470050 - RNA, 19 nt, Artificial Sequence
  Description of Artificial Sequence: Synthetic oligonucleotide
ccucuagauccaaagcugc

SEQ ID NO: 2470051 - RNA, 19 nt, Artificial Sequence
  Description of Artificial Sequence: Synthetic oligonucleotide
caccaacuccuccagggac

SEQ ID NO: 2470052 - RNA, 19 nt, Artificial Sequence
  Description of Artificial Sequence: Synthetic oligonucleotide
uggcugguguacuccuuag

SEQ ID NO: 2470053 - RNA, 19 nt, Artificial Sequence
  Description of Artificial Sequence: Synthetic oligonucleotide
ggcaugaccauuuggccuc

SEQ ID NO: 2470054 - RNA, 19 nt, Artificial Sequence
  Description of Artificial Sequence: Synthetic oligonucleotide
guaccauucugcaucuuga

SEQ ID NO: 2470055 - RNA, 19 nt, Artificial Sequence
  Description of Artificial Sequence: Synthetic oligonucleotide
ugccgaagcugggaaaucu

SEQ ID NO: 2470056 - RNA, 19 nt, Artificial Sequence
  Description of Artificial Sequence: Synthetic oligonucleotide
ccagggacaacaacucugc

SEQ ID NO: 2470057 - RNA, 19 nt, Artificial Sequence
  Description of Artificial Sequence: Synthetic oligonucleotide
gguaugaccuuuuggccuc

SEQ ID NO: 2470058 - RNA, 19 nt, Artificial Sequence
  Description of Artificial Sequence: Synthetic oligonucleotide
ugccguggagacagugacc

SEQ ID NO: 2470059 - RNA, 19 nt, Artificial Sequence
  Description of Artificial Sequence: Synthetic oligonucleotide
caauucuuccagguaugac

SEQ ID NO: 2470060 - RNA, 19 nt, Artificial Sequence
  Description of Artificial Sequence: Synthetic oligonucleotide
uggcuguucucagagcagu

SEQ ID NO: 2470061 - RNA, 19 nt, Artificial Sequence
  Description of Artificial Sequence: Synthetic oligonucleotide
cuucuguauggucugccga

SEQ ID NO: 2470062 - RNA, 19 nt, Artificial Sequence
  Description of Artificial Sequence: Synthetic oligonucleotide
caucuugaggcuggaaauc

SEQ ID NO: 2470063 - RNA, 19 nt, Artificial Sequence
  Description of Artificial Sequence: Synthetic oligonucleotide
auuccucgcucuccagcag

SEQ ID NO: 2470064 - RNA, 19 nt, Artificial Sequence
  Description of Artificial Sequence: Synthetic oligonucleotide
guauaaccauuuuggccuc

SEQ ID NO: 2470065 - RNA, 19 nt, Artificial Sequence
  Description of Artificial Sequence: Synthetic oligonucleotide
ccagacacggagcaggaac

SEQ ID NO: 2470066 - RNA, 19 nt, Artificial Sequence
  Description of Artificial Sequence: Synthetic oligonucleotide
auggcagacugcagaguac

SEQ ID NO: 2470067 - RNA, 19 nt, Artificial Sequence
  Description of Artificial Sequence: Synthetic oligonucleotide
cuagagcagccucuagauc

SEQ ID NO: 2470068 - RNA, 19 nt, Artificial Sequence
  Description of Artificial Sequence: Synthetic oligonucleotide
uucgugcccaucaguuccu

SEQ ID NO: 2470069 - RNA, 19 nt, Artificial Sequence
  Description of Artificial Sequence: Synthetic oligonucleotide
acaagugccuccaggcaug

SEQ ID NO: 2470070 - RNA, 19 nt, Artificial Sequence
  Description of Artificial Sequence: Synthetic oligonucleotide
cagagcagucuccagcuca

SEQ ID NO: 2470071 - RNA, 19 nt, Artificial Sequence
  Description of Artificial Sequence: Synthetic oligonucleotide
ugcauuccucgcucuccag

SEQ ID NO: 2470072 - RNA, 19 nt, Artificial Sequence
  Description of Artificial Sequence: Synthetic oligonucleotide
ugauccugguaggucuuca

SEQ ID NO: 2470073 - RNA, 19 nt, Artificial Sequence
  Description of Artificial Sequence: Synthetic oligonucleotide
cauccaacuuggccugagc

SEQ ID NO: 2470074 - RNA, 19 nt, Artificial Sequence
  Description of Artificial Sequence: Synthetic oligonucleotide
acauggcaaucuccacguc

SEQ ID NO: 2470075 - RNA, 19 nt, Artificial Sequence
  Description of Artificial Sequence: Synthetic oligonucleotide
gccugagcaucccucagag

SEQ ID NO: 2470076 - RNA, 19 nt, Artificial Sequence
  Description of Artificial Sequence: Synthetic oligonucleotide
auaaccauuuuggccucca

SEQ ID NO: 2470077 - RNA, 19 nt, Artificial Sequence
  Description of Artificial Sequence: Synthetic oligonucleotide
ugccuucugccguggagac

SEQ ID NO: 2470078 - RNA, 19 nt, Artificial Sequence
  Description of Artificial Sequence: Synthetic oligonucleotide
uugcuuggcuguucucaga

SEQ ID NO: 2470079 - RNA, 19 nt, Artificial Sequence
  Description of Artificial Sequence: Synthetic oligonucleotide
gacucugcagcuucuguau

SEQ ID NO: 2470080 - RNA, 19 nt, Artificial Sequence
  Description of Artificial Sequence: Synthetic oligonucleotide
gaugucuuccgacuugauu

SEQ ID NO: 2470081 - RNA, 19 nt, Artificial Sequence
  Description of Artificial Sequence: Synthetic oligonucleotide
uuugggccaugucuugcuu

SEQ ID NO: 2470082 - RNA, 19 nt, Artificial Sequence
  Description of Artificial Sequence: Synthetic oligonucleotide
ccaucaguuccugauauuc

SEQ ID NO: 2470083 - RNA, 19 nt, Artificial Sequence
  Description of Artificial Sequence: Synthetic oligonucleotide
gaauccagagccccucgcu

SEQ ID NO: 2470084 - RNA, 19 nt, Artificial Sequence
  Description of Artificial Sequence: Synthetic oligonucleotide
gaacucaugcugggacugc

SEQ ID NO: 2470085 - RNA, 19 nt, Artificial Sequence
  Description of Artificial Sequence: Synthetic oligonucleotide
uaaccauuuuggccuccau

SEQ ID NO: 2470086 - RNA, 19 nt, Artificial Sequence
  Description of Artificial Sequence: Synthetic oligonucleotide
uagauccaaagcugccuuu

SEQ ID NO: 2470087 - RNA, 19 nt, Artificial Sequence
  Description of Artificial Sequence: Synthetic oligonucleotide
cccguguugcucagcaucg

SEQ ID NO: 2470088 - RNA, 19 nt, Artificial Sequence
  Description of Artificial Sequence: Synthetic oligonucleotide
uucugccguggagacagug

SEQ ID NO: 2470089 - RNA, 19 nt, Artificial Sequence
  Description of Artificial Sequence: Synthetic oligonucleotide
gagccccucgcucucucug

SEQ ID NO: 2470090 - RNA, 19 nt, Artificial Sequence
  Description of Artificial Sequence: Synthetic oligonucleotide
gacaucaaagccaccaguu

SEQ ID NO: 2470091 - RNA, 19 nt, Artificial Sequence
  Description of Artificial Sequence: Synthetic oligonucleotide
gaguccacaagugccucca

SEQ ID NO: 2470092 - RNA, 19 nt, Artificial Sequence
  Description of Artificial Sequence: Synthetic oligonucleotide
gacugcacccagaucccug

SEQ ID NO: 2470093 - RNA, 19 nt, Artificial Sequence
  Description of Artificial Sequence: Synthetic oligonucleotide
uuccagguauaaccauuuu

SEQ ID NO: 2470094 - RNA, 19 nt, Artificial Sequence
  Description of Artificial Sequence: Synthetic oligonucleotide
agcugggaaaucugcugau

SEQ ID NO: 2470095 - RNA, 19 nt, Artificial Sequence
  Description of Artificial Sequence: Synthetic oligonucleotide
gccucuagauccaaagcug

SEQ ID NO: 2470096 - RNA, 19 nt, Artificial Sequence
  Description of Artificial Sequence: Synthetic oligonucleotide
gagccaucuccccguguug

SEQ ID NO: 2470097 - RNA, 19 nt, Artificial Sequence
  Description of Artificial Sequence: Synthetic oligonucleotide
ggaacucaugcugggacug

SEQ ID NO: 2470098 - RNA, 19 nt, Artificial Sequence
  Description of Artificial Sequence: Synthetic oligonucleotide
uccugcauuccucgcucuc

SEQ ID NO: 2470099 - RNA, 19 nt, Artificial Sequence
  Description of Artificial Sequence: Synthetic oligonucleotide
augcuagagcagccucuag

SEQ ID NO: 2470100 - RNA, 19 nt, Artificial Sequence
  Description of Artificial Sequence: Synthetic oligonucleotide
gacuugauuccacugucuu

SEQ ID NO: 2470101 - RNA, 19 nt, Artificial Sequence
  Description of Artificial Sequence: Synthetic oligonucleotide
ggggacaucaaagccacca

SEQ ID NO: 2470102 - RNA, 19 nt, Artificial Sequence
  Description of Artificial Sequence: Synthetic oligonucleotide
ugaccuggcugguguacuc

SEQ ID NO: 2470103 - RNA, 19 nt, Artificial Sequence
  Description of Artificial Sequence: Synthetic oligonucleotide
cagggacaacaacucugcc

SEQ ID NO: 2470104 - RNA, 19 nt, Artificial Sequence
  Description of Artificial Sequence: Synthetic oligonucleotide
ggagccagagccagaacug

SEQ ID NO: 2470105 - RNA, 19 nt, Artificial Sequence
  Description of Artificial Sequence: Synthetic oligonucleotide
ccgaagcugggaaaucugc

SEQ ID NO: 2470106 - RNA, 19 nt, Artificial Sequence
  Description of Artificial Sequence: Synthetic oligonucleotide
uggucugccgaagcuggga

SEQ ID NO: 2470107 - RNA, 19 nt, Artificial Sequence
  Description of Artificial Sequence: Synthetic oligonucleotide
uggagacagugaccuggcu

SEQ ID NO: 2470108 - RNA, 19 nt, Artificial Sequence
  Description of Artificial Sequence: Synthetic oligonucleotide
cguggagacagugaccugg

SEQ ID NO: 2470109 - RNA, 19 nt, Artificial Sequence
  Description of Artificial Sequence: Synthetic oligonucleotide
gcauuccucgcucuccagc

SEQ ID NO: 2470110 - RNA, 19 nt, Artificial Sequence
  Description of Artificial Sequence: Synthetic oligonucleotide
uucuuccagguaugaccac

SEQ ID NO: 2470111 - RNA, 19 nt, Artificial Sequence
  Description of Artificial Sequence: Synthetic oligonucleotide
gggacaacaacucugccuu

SEQ ID NO: 2470112 - RNA, 19 nt, Artificial Sequence
  Description of Artificial Sequence: Synthetic oligonucleotide
gacaacaacucugccuucu

SEQ ID NO: 2470113 - RNA, 19 nt, Artificial Sequence
  Description of Artificial Sequence: Synthetic oligonucleotide
gacagugaccuggcuggug

SEQ ID NO: 2470114 - RNA, 19 nt, Artificial Sequence
  Description of Artificial Sequence: Synthetic oligonucleotide
augaccauuuggccuccau

SEQ ID NO: 2470115 - RNA, 19 nt, Artificial Sequence
  Description of Artificial Sequence: Synthetic oligonucleotide
augcugggacugcacccag

SEQ ID NO: 2470116 - RNA, 19 nt, Artificial Sequence
  Description of Artificial Sequence: Synthetic oligonucleotide
ccuuuuggccuccaucaac

SEQ ID NO: 2470117 - RNA, 19 nt, Artificial Sequence
  Description of Artificial Sequence: Synthetic oligonucleotide
guggagacagugaccuggc

SEQ ID NO: 2470118 - RNA, 19 nt, Artificial Sequence
  Description of Artificial Sequence: Synthetic oligonucleotide
caucuccccguguugcuca

SEQ ID NO: 2470119 - RNA, 19 nt, Artificial Sequence
  Description of Artificial Sequence: Synthetic oligonucleotide
caucaacucuuccagguau

SEQ ID NO: 2470120 - RNA, 19 nt, Artificial Sequence
  Description of Artificial Sequence: Synthetic oligonucleotide
gugccuccaggcaugacca

SEQ ID NO: 2470121 - RNA, 19 nt, Artificial Sequence
  Description of Artificial Sequence: Synthetic oligonucleotide
aagugccuccaggcaugac

SEQ ID NO: 2470122 - RNA, 19 nt, Artificial Sequence
  Description of Artificial Sequence: Synthetic oligonucleotide
cacguccagggacaacuuc

SEQ ID NO: 2470123 - RNA, 19 nt, Artificial Sequence
  Description of Artificial Sequence: Synthetic oligonucleotide
cgauacauggcaaucucca

SEQ ID NO: 2470124 - RNA, 19 nt, Artificial Sequence
  Description of Artificial Sequence: Synthetic oligonucleotide
gacagaugucuuccgacuu

SEQ ID NO: 2470125 - RNA, 19 nt, Artificial Sequence
  Description of Artificial Sequence: Synthetic oligonucleotide
gacugcagaguaccauucu

SEQ ID NO: 2470126 - RNA, 19 nt, Artificial Sequence
  Description of Artificial Sequence: Synthetic oligonucleotide
gcagccuucgauacauggc

SEQ ID NO: 2470127 - RNA, 19 nt, Artificial Sequence
  Description of Artificial Sequence: Synthetic oligonucleotide
caugcugggacugcaccca

SEQ ID NO: 2470128 - RNA, 19 nt, Artificial Sequence
  Description of Artificial Sequence: Synthetic oligonucleotide
gagccagagccagaacuga

SEQ ID NO: 2470129 - RNA, 19 nt, Artificial Sequence
  Description of Artificial Sequence: Synthetic oligonucleotide
guccagggacaacuucgug

SEQ ID NO: 2470130 - RNA, 19 nt, Artificial Sequence
  Description of Artificial Sequence: Synthetic oligonucleotide
cuucgauacauggcaaucu

SEQ ID NO: 2470131 - RNA, 19 nt, Artificial Sequence
  Description of Artificial Sequence: Synthetic oligonucleotide
ggcuggaaaucugacucug

SEQ ID NO: 2470132 - RNA, 19 nt, Artificial Sequence
  Description of Artificial Sequence: Synthetic oligonucleotide
caaugcuagagcagccucu

SEQ ID NO: 2470133 - RNA, 19 nt, Artificial Sequence
  Description of Artificial Sequence: Synthetic oligonucleotide
auccugcauuccucgcucu

SEQ ID NO: 2470134 - RNA, 19 nt, Artificial Sequence
  Description of Artificial Sequence: Synthetic oligonucleotide
ggucuucagcucagaaucc

SEQ ID NO: 2470135 - RNA, 19 nt, Artificial Sequence
  Description of Artificial Sequence: Synthetic oligonucleotide
cuccccguguugcucagca

SEQ ID NO: 2470136 - RNA, 19 nt, Artificial Sequence
  Description of Artificial Sequence: Synthetic oligonucleotide
cugccuucugccguggaga

SEQ ID NO: 2470137 - RNA, 19 nt, Artificial Sequence
  Description of Artificial Sequence: Synthetic oligonucleotide
aucuccccguguugcucag

SEQ ID NO: 2470138 - RNA, 19 nt, Artificial Sequence
  Description of Artificial Sequence: Synthetic oligonucleotide
uugauuccacugucuucuu

SEQ ID NO: 2470139 - RNA, 19 nt, Artificial Sequence
  Description of Artificial Sequence: Synthetic oligonucleotide
cugcacccagaucccuggg

SEQ ID NO: 2470140 - RNA, 19 nt, Artificial Sequence
  Description of Artificial Sequence: Synthetic oligonucleotide
gcugguguacuccuuagau

SEQ ID NO: 2470141 - RNA, 19 nt, Artificial Sequence
  Description of Artificial Sequence: Synthetic oligonucleotide
ccgacuugauuccacuguc

SEQ ID NO: 2470142 - RNA, 19 nt, Artificial Sequence
  Description of Artificial Sequence: Synthetic oligonucleotide
gcuagagcagccucuagau

SEQ ID NO: 2470143 - RNA, 19 nt, Artificial Sequence
  Description of Artificial Sequence: Synthetic oligonucleotide
agagcagucuccagcucau

SEQ ID NO: 2470144 - RNA, 19 nt, Artificial Sequence
  Description of Artificial Sequence: Synthetic oligonucleotide
uaugaccuuuuggccucca

SEQ ID NO: 2470145 - RNA, 19 nt, Artificial Sequence
  Description of Artificial Sequence: Synthetic oligonucleotide
caucccucagagccaucuc

SEQ ID NO: 2470146 - RNA, 19 nt, Artificial Sequence
  Description of Artificial Sequence: Synthetic oligonucleotide
cagggacaacuucgugccc

SEQ ID NO: 2470147 - RNA, 19 nt, Artificial Sequence
  Description of Artificial Sequence: Synthetic oligonucleotide
cuagauccaaagcugccuu

SEQ ID NO: 2470148 - RNA, 19 nt, Artificial Sequence
  Description of Artificial Sequence: Synthetic oligonucleotide
gccucugaguccacaagug

SEQ ID NO: 2470149 - RNA, 19 nt, Artificial Sequence
  Description of Artificial Sequence: Synthetic oligonucleotide
cuccaggcaugaccauuug

SEQ ID NO: 2470150 - RNA, 19 nt, Artificial Sequence
  Description of Artificial Sequence: Synthetic oligonucleotide
cacaagugccuccaggcau

SEQ ID NO: 2470151 - RNA, 19 nt, Artificial Sequence
  Description of Artificial Sequence: Synthetic oligonucleotide
auggucugccgaagcuggg

SEQ ID NO: 2470152 - RNA, 19 nt, Artificial Sequence
  Description of Artificial Sequence: Synthetic oligonucleotide
gcaucuugaggcuggaaau

SEQ ID NO: 2470153 - RNA, 19 nt, Artificial Sequence
  Description of Artificial Sequence: Synthetic oligonucleotide
auuuggccuccaucacaau

SEQ ID NO: 2470154 - RNA, 19 nt, Artificial Sequence
  Description of Artificial Sequence: Synthetic oligonucleotide
caccaguuacaaugcuaga

SEQ ID NO: 2470155 - RNA, 19 nt, Artificial Sequence
  Description of Artificial Sequence: Synthetic oligonucleotide
uaugaccacuuggccucca

SEQ ID NO: 2470156 - RNA, 19 nt, Artificial Sequence
  Description of Artificial Sequence: Synthetic oligonucleotide
gugcccaucaguuccugau

SEQ ID NO: 2470157 - RNA, 19 nt, Artificial Sequence
  Description of Artificial Sequence: Synthetic oligonucleotide
guaugaccacuuggccucc

SEQ ID NO: 2470158 - RNA, 19 nt, Artificial Sequence
  Description of Artificial Sequence: Synthetic oligonucleotide
ccuucgauacauggcaauc

SEQ ID NO: 2470159 - RNA, 19 nt, Artificial Sequence
  Description of Artificial Sequence: Synthetic oligonucleotide
caaucuccacguccaggga

SEQ ID NO: 2470160 - RNA, 19 nt, Artificial Sequence
  Description of Artificial Sequence: Synthetic oligonucleotide
guaugaccuuuuggccucc

SEQ ID NO: 2470161 - RNA, 19 nt, Artificial Sequence
  Description of Artificial Sequence: Synthetic oligonucleotide
ccccguguugcucagcauc

SEQ ID NO: 2470162 - RNA, 19 nt, Artificial Sequence
  Description of Artificial Sequence: Synthetic oligonucleotide
gcuggaaaucugacucugc

SEQ ID NO: 2470163 - RNA, 19 nt, Artificial Sequence
  Description of Artificial Sequence: Synthetic oligonucleotide
cagacugcagaguaccauu

SEQ ID NO: 2470164 - RNA, 19 nt, Artificial Sequence
  Description of Artificial Sequence: Synthetic oligonucleotide
caggauggugcggcagcag

SEQ ID NO: 2470165 - RNA, 19 nt, Artificial Sequence
  Description of Artificial Sequence: Synthetic oligonucleotide
cuggcugguguacuccuua

SEQ ID NO: 2470166 - RNA, 19 nt, Artificial Sequence
  Description of Artificial Sequence: Synthetic oligonucleotide
cacuuggccuccaccaacu

SEQ ID NO: 2470167 - RNA, 19 nt, Artificial Sequence
  Description of Artificial Sequence: Synthetic oligonucleotide
cguguugcucagcaucggc

SEQ ID NO: 2470168 - RNA, 19 nt, Artificial Sequence
  Description of Artificial Sequence: Synthetic oligonucleotide
ucgugcccaucaguuccug

SEQ ID NO: 2470169 - RNA, 19 nt, Artificial Sequence
  Description of Artificial Sequence: Synthetic oligonucleotide
ccacuuggccuccaccaac

SEQ ID NO: 2470170 - RNA, 19 nt, Artificial Sequence
  Description of Artificial Sequence: Synthetic oligonucleotide
gucuugcuuggcuguucuc

SEQ ID NO: 2470171 - RNA, 19 nt, Artificial Sequence
  Description of Artificial Sequence: Synthetic oligonucleotide
cuuccaggauggugcggca

SEQ ID NO: 2470172 - RNA, 19 nt, Artificial Sequence
  Description of Artificial Sequence: Synthetic oligonucleotide
gggacugcacccagauccc

SEQ ID NO: 2470173 - RNA, 19 nt, Artificial Sequence
  Description of Artificial Sequence: Synthetic oligonucleotide
cugauccugguaggucuuc

SEQ ID NO: 2470174 - RNA, 19 nt, Artificial Sequence
  Description of Artificial Sequence: Synthetic oligonucleotide
agccuucgauacauggcaa

SEQ ID NO: 2470175 - RNA, 19 nt, Artificial Sequence
  Description of Artificial Sequence: Synthetic oligonucleotide
ggcugguguacuccuuaga

SEQ ID NO: 2470176 - RNA, 19 nt, Artificial Sequence
  Description of Artificial Sequence: Synthetic oligonucleotide
agacagugaccuggcuggu

SEQ ID NO: 2470177 - RNA, 19 nt, Artificial Sequence
  Description of Artificial Sequence: Synthetic oligonucleotide
agccagacacggagcagga

SEQ ID NO: 2470178 - RNA, 19 nt, Artificial Sequence
  Description of Artificial Sequence: Synthetic oligonucleotide
gccguggagacagugaccu

SEQ ID NO: 2470179 - RNA, 19 nt, Artificial Sequence
  Description of Artificial Sequence: Synthetic oligonucleotide
gccgaagcugggaaaucug

SEQ ID NO: 2470180 - RNA, 19 nt, Artificial Sequence
  Description of Artificial Sequence: Synthetic oligonucleotide
cuuccagguaugaccacuu

SEQ ID NO: 2470181 - RNA, 19 nt, Artificial Sequence
  Description of Artificial Sequence: Synthetic oligonucleotide
caguaaugacagaugucuu

SEQ ID NO: 2470182 - RNA, 19 nt, Artificial Sequence
  Description of Artificial Sequence: Synthetic oligonucleotide
ggauggugcggcagcagga

SEQ ID NO: 2470183 - RNA, 19 nt, Artificial Sequence
  Description of Artificial Sequence: Synthetic oligonucleotide
uccccguguugcucagcau

SEQ ID NO: 2470184 - RNA, 19 nt, Artificial Sequence
  Description of Artificial Sequence: Synthetic oligonucleotide
gcugggaaaucugcugauc

SEQ ID NO: 2470185 - RNA, 19 nt, Artificial Sequence
  Description of Artificial Sequence: Synthetic oligonucleotide
caacuucgugcccaucagu

SEQ ID NO: 2470186 - RNA, 19 nt, Artificial Sequence
  Description of Artificial Sequence: Synthetic oligonucleotide
ggacaacaacucugccuuc

SEQ ID NO: 2470187 - RNA, 19 nt, Artificial Sequence
  Description of Artificial Sequence: Synthetic oligonucleotide
gucuuccgacuugauucca

SEQ ID NO: 2470188 - RNA, 19 nt, Artificial Sequence
  Description of Artificial Sequence: Synthetic oligonucleotide
gguguacuccuuagauauc

SEQ ID NO: 2470189 - RNA, 19 nt, Artificial Sequence
  Description of Artificial Sequence: Synthetic oligonucleotide
cugccgaagcugggaaauc

SEQ ID NO: 2470190 - RNA, 19 nt, Artificial Sequence
  Description of Artificial Sequence: Synthetic oligonucleotide
ccuggucacucaguaauga

SEQ ID NO: 2470191 - RNA, 19 nt, Artificial Sequence
  Description of Artificial Sequence: Synthetic oligonucleotide
guugcucagcaucggcaau

SEQ ID NO: 2470192 - RNA, 19 nt, Artificial Sequence
  Description of Artificial Sequence: Synthetic oligonucleotide
ugccuccaggcaugaccau

SEQ ID NO: 2470193 - RNA, 19 nt, Artificial Sequence
  Description of Artificial Sequence: Synthetic oligonucleotide
cuccuuagauauccugcau

SEQ ID NO: 2470194 - RNA, 19 nt, Artificial Sequence
  Description of Artificial Sequence: Synthetic oligonucleotide
ccacaagugccuccaggca

SEQ ID NO: 2470195 - RNA, 19 nt, Artificial Sequence
  Description of Artificial Sequence: Synthetic oligonucleotide
ccaauucuuccagguauga

SEQ ID NO: 2470196 - RNA, 19 nt, Artificial Sequence
  Description of Artificial Sequence: Synthetic oligonucleotide
uuccagccucugaguccac

SEQ ID NO: 2470197 - RNA, 19 nt, Artificial Sequence
  Description of Artificial Sequence: Synthetic oligonucleotide
gcucagcaucggcaauggc

SEQ ID NO: 2470198 - RNA, 19 nt, Artificial Sequence
  Description of Artificial Sequence: Synthetic oligonucleotide
agcaggagccagagccaga

SEQ ID NO: 2470199 - RNA, 19 nt, Artificial Sequence
  Description of Artificial Sequence: Synthetic oligonucleotide
gcuguucucagagcagucu

SEQ ID NO: 2470200 - RNA, 19 nt, Artificial Sequence
  Description of Artificial Sequence: Synthetic oligonucleotide
gguaggucuucagcucaga

SEQ ID NO: 2470201 - RNA, 19 nt, Artificial Sequence
  Description of Artificial Sequence: Synthetic oligonucleotide
gccaccaguuacaaugcua

SEQ ID NO: 2470202 - RNA, 19 nt, Artificial Sequence
  Description of Artificial Sequence: Synthetic oligonucleotide
gcugggacugcacccagau

SEQ ID NO: 2470203 - RNA, 19 nt, Artificial Sequence
  Description of Artificial Sequence: Synthetic oligonucleotide
caagugccuccaggcauga

SEQ ID NO: 2470204 - RNA, 19 nt, Artificial Sequence
  Description of Artificial Sequence: Synthetic oligonucleotide
cagcaucggcaauggcaga

SEQ ID NO: 2470205 - RNA, 19 nt, Artificial Sequence
  Description of Artificial Sequence: Synthetic oligonucleotide
gcagaguaccauucugcau

SEQ ID NO: 2470206 - RNA, 19 nt, Artificial Sequence
  Description of Artificial Sequence: Synthetic oligonucleotide
gugcggcagcaggagccag

SEQ ID NO: 2470207 - RNA, 19 nt, Artificial Sequence
  Description of Artificial Sequence: Synthetic oligonucleotide
ccaucacaauuccagguau

SEQ ID NO: 2470208 - RNA, 19 nt, Artificial Sequence
  Description of Artificial Sequence: Synthetic oligonucleotide
gcaucccucagagccaucu

SEQ ID NO: 2470209 - RNA, 19 nt, Artificial Sequence
  Description of Artificial Sequence: Synthetic oligonucleotide
cuccacguccagggacaac

SEQ ID NO: 2470210 - RNA, 19 nt, Artificial Sequence
  Description of Artificial Sequence: Synthetic oligonucleotide
caauggcagacugcagagu

SEQ ID NO: 2470211 - RNA, 19 nt, Artificial Sequence
  Description of Artificial Sequence: Synthetic oligonucleotide
gcaugaccauuuggccucc

SEQ ID NO: 2470212 - RNA, 19 nt, Artificial Sequence
  Description of Artificial Sequence: Synthetic oligonucleotide
ggugcggcagcaggagcca

SEQ ID NO: 2470213 - RNA, 19 nt, Artificial Sequence
  Description of Artificial Sequence: Synthetic oligonucleotide
ccaucaacucuuccaggua

SEQ ID NO: 2470214 - RNA, 19 nt, Artificial Sequence
  Description of Artificial Sequence: Synthetic oligonucleotide
ccguguugcucagcaucgg

SEQ ID NO: 2470215 - RNA, 19 nt, Artificial Sequence
  Description of Artificial Sequence: Synthetic oligonucleotide
ccauuuuggccuccaucaa

SEQ ID NO: 2470216 - RNA, 19 nt, Artificial Sequence
  Description of Artificial Sequence: Synthetic oligonucleotide
ccugauauucucgcaacau

SEQ ID NO: 2470217 - RNA, 19 nt, Artificial Sequence
  Description of Artificial Sequence: Synthetic oligonucleotide
cucgcaacauuugggccau

SEQ ID NO: 2470218 - RNA, 19 nt, Artificial Sequence
  Description of Artificial Sequence: Synthetic oligonucleotide
cagugaccuggcuggugua

SEQ ID NO: 2470219 - RNA, 19 nt, Artificial Sequence
  Description of Artificial Sequence: Synthetic oligonucleotide
ucgcaacauuugggccaug

SEQ ID NO: 2470220 - RNA, 19 nt, Artificial Sequence
  Description of Artificial Sequence: Synthetic oligonucleotide
ccaucuccccguguugcuc

SEQ ID NO: 2470221 - RNA, 19 nt, Artificial Sequence
  Description of Artificial Sequence: Synthetic oligonucleotide
caugaccauuuggccucca

SEQ ID NO: 2470222 - RNA, 19 nt, Artificial Sequence
  Description of Artificial Sequence: Synthetic oligonucleotide
caugucuugcuuggcuguu

SEQ ID NO: 2470223 - RNA, 19 nt, Artificial Sequence
  Description of Artificial Sequence: Synthetic oligonucleotide
cugcaucuugaggcuggaa

SEQ ID NO: 2470224 - RNA, 19 nt, Artificial Sequence
  Description of Artificial Sequence: Synthetic oligonucleotide
gggacaacuucgugcccau

SEQ ID NO: 2470225 - RNA, 19 nt, Artificial Sequence
  Description of Artificial Sequence: Synthetic oligonucleotide
cgcucuccagcagccuucg

SEQ ID NO: 2470226 - RNA, 19 nt, Artificial Sequence
  Description of Artificial Sequence: Synthetic oligonucleotide
ccguggagacagugaccug

SEQ ID NO: 2470227 - RNA, 19 nt, Artificial Sequence
  Description of Artificial Sequence: Synthetic oligonucleotide
ggccuccaucacaauucca

SEQ ID NO: 2470228 - RNA, 19 nt, Artificial Sequence
  Description of Artificial Sequence: Synthetic oligonucleotide
ggacaacuucgugcccauc

SEQ ID NO: 2470229 - RNA, 19 nt, Artificial Sequence
  Description of Artificial Sequence: Synthetic oligonucleotide
cgacuugauuccacugucu

SEQ ID NO: 2470230 - RNA, 19 nt, Artificial Sequence
  Description of Artificial Sequence: Synthetic oligonucleotide
gccuucugccguggagaca

SEQ ID NO: 2470231 - RNA, 19 nt, Artificial Sequence
  Description of Artificial Sequence: Synthetic oligonucleotide
cgugcccaucaguuccuga

SEQ ID NO: 2470232 - RNA, 19 nt, Artificial Sequence
  Description of Artificial Sequence: Synthetic oligonucleotide
ggacugcacccagaucccu

SEQ ID NO: 2470233 - RNA, 19 nt, Artificial Sequence
  Description of Artificial Sequence: Synthetic oligonucleotide
gccuccaggcaugaccauu

SEQ ID NO: 2470234 - RNA, 19 nt, Artificial Sequence
  Description of Artificial Sequence: Synthetic oligonucleotide
ccuggcugguguacuccuu

SEQ ID NO: 2470235 - RNA, 19 nt, Artificial Sequence
  Description of Artificial Sequence: Synthetic oligonucleotide
ccacguccagggacaacuu

SEQ ID NO: 2470236 - RNA, 19 nt, Artificial Sequence
  Description of Artificial Sequence: Synthetic oligonucleotide
  modified_base (11)..(11): a, c, u, g, unknown or other
guuauuacagnuuaaaagg

SEQ ID NO: 2470237 - RNA, 19 nt, Artificial Sequence
  Description of Artificial Sequence: Synthetic oligonucleotide
aaaucuauauuuaacauac

SEQ ID NO: 2470238 - RNA, 19 nt, Artificial Sequence
  Description of Artificial Sequence: Synthetic oligonucleotide
aaaacuauaauguaccucu

SEQ ID NO: 2470239 - RNA, 19 nt, Artificial Sequence
  Description of Artificial Sequence: Synthetic oligonucleotide
auauuuaacauacacauug

SEQ ID NO: 2470240 - RNA, 19 nt, Artificial Sequence
  Description of Artificial Sequence: Synthetic oligonucleotide
aacaauauacacauaauac

SEQ ID NO: 2470241 - RNA, 19 nt, Artificial Sequence
  Description of Artificial Sequence: Synthetic oligonucleotide
uuaacauacacauugaaaa

SEQ ID NO: 2470242 - RNA, 19 nt, Artificial Sequence
  Description of Artificial Sequence: Synthetic oligonucleotide
  modified_base (10)..(10): a, c, u, g, unknown or other
uuauuacagnuuaaaaggc

SEQ ID NO: 2470243 - RNA, 19 nt, Artificial Sequence
  Description of Artificial Sequence: Synthetic oligonucleotide
uguggauuucuucaaaugg

SEQ ID NO: 2470244 - RNA, 19 nt, Artificial Sequence
  Description of Artificial Sequence: Synthetic oligonucleotide
uaguauauaaguaaacugu

SEQ ID NO: 2470245 - RNA, 19 nt, Artificial Sequence
  Description of Artificial Sequence: Synthetic oligonucleotide
agcuccacuauauauauac

SEQ ID NO: 2470246 - RNA, 19 nt, Artificial Sequence
  Description of Artificial Sequence: Synthetic oligonucleotide
agaaacacagacaaguucc

SEQ ID NO: 2470247 - RNA, 19 nt, Artificial Sequence
  Description of Artificial Sequence: Synthetic oligonucleotide
aauacaagcugcuuguaug

SEQ ID NO: 2470248 - RNA, 19 nt, Artificial Sequence
  Description of Artificial Sequence: Synthetic oligonucleotide
acccacuuaaaauagcucc

SEQ ID NO: 2470249 - RNA, 19 nt, Artificial Sequence
  Description of Artificial Sequence: Synthetic oligonucleotide
uguaugaacaauauacaca

SEQ ID NO: 2470250 - RNA, 19 nt, Artificial Sequence
  Description of Artificial Sequence: Synthetic oligonucleotide
aauuuaaccuuacaguagu

SEQ ID NO: 2470251 - RNA, 19 nt, Artificial Sequence
  Description of Artificial Sequence: Synthetic oligonucleotide
uauauaaguaaacuguuuc

SEQ ID NO: 2470252 - RNA, 19 nt, Artificial Sequence
  Description of Artificial Sequence: Synthetic oligonucleotide
cauaauacaugguauacag

SEQ ID NO: 2470253 - RNA, 19 nt, Artificial Sequence
  Description of Artificial Sequence: Synthetic oligonucleotide
aaaauuaggaaauuuucua

SEQ ID NO: 2470254 - RNA, 19 nt, Artificial Sequence
  Description of Artificial Sequence: Synthetic oligonucleotide
auguaugaacaauauacac

SEQ ID NO: 2470255 - RNA, 19 nt, Artificial Sequence
  Description of Artificial Sequence: Synthetic oligonucleotide
uaauacaugguauacagua

SEQ ID NO: 2470256 - RNA, 19 nt, Artificial Sequence
  Description of Artificial Sequence: Synthetic oligonucleotide
auauaauacaagcugcuug

SEQ ID NO: 2470257 - RNA, 19 nt, Artificial Sequence
  Description of Artificial Sequence: Synthetic oligonucleotide
uauccauuuccuuuuagag

SEQ ID NO: 2470258 - RNA, 19 nt, Artificial Sequence
  Description of Artificial Sequence: Synthetic oligonucleotide
cacauugaaaacuaaaauc

SEQ ID NO: 2470259 - RNA, 19 nt, Artificial Sequence
  Description of Artificial Sequence: Synthetic oligonucleotide
cuaagucugaacuuugagg

SEQ ID NO: 2470260 - RNA, 19 nt, Artificial Sequence
  Description of Artificial Sequence: Synthetic oligonucleotide
uuuaacauacacauugaaa

SEQ ID NO: 2470261 - RNA, 19 nt, Artificial Sequence
  Description of Artificial Sequence: Synthetic oligonucleotide
uauauauacaaaacaccca

SEQ ID NO: 2470262 - RNA, 19 nt, Artificial Sequence
  Description of Artificial Sequence: Synthetic oligonucleotide
guaguauauaaguaaacug

SEQ ID NO: 2470263 - RNA, 19 nt, Artificial Sequence
  Description of Artificial Sequence: Synthetic oligonucleotide
agaaauguggauuucuuca

SEQ ID NO: 2470264 - RNA, 19 nt, Artificial Sequence
  Description of Artificial Sequence: Synthetic oligonucleotide
  modified_base (18)..(18): a, c, u, g, unknown or other
uuuucuaguuauuacagnu

SEQ ID NO: 2470265 - RNA, 19 nt, Artificial Sequence
  Description of Artificial Sequence: Synthetic oligonucleotide
  modified_base (9)..(9): a, c, u, g, unknown or other
uauuacagnuuaaaaggca

SEQ ID NO: 2470266 - RNA, 19 nt, Artificial Sequence
  Description of Artificial Sequence: Synthetic oligonucleotide
acuucugucagaaaugugg

SEQ ID NO: 2470267 - RNA, 19 nt, Artificial Sequence
  Description of Artificial Sequence: Synthetic oligonucleotide
  modified_base (4)..(4): a, c, u, g, unknown or other
cagnuuaaaaggcagauca

SEQ ID NO: 2470268 - RNA, 19 nt, Artificial Sequence
  Description of Artificial Sequence: Synthetic oligonucleotide
  modified_base (16)..(16): a, c, u, g, unknown or other
uucuaguuauuacagnuua

SEQ ID NO: 2470269 - RNA, 19 nt, Artificial Sequence
  Description of Artificial Sequence: Synthetic oligonucleotide
ucuucugcauucuaucggg

SEQ ID NO: 2470270 - RNA, 19 nt, Artificial Sequence
  Description of Artificial Sequence: Synthetic oligonucleotide
uacaguaguauauaaguaa

SEQ ID NO: 2470271 - RNA, 19 nt, Artificial Sequence
  Description of Artificial Sequence: Synthetic oligonucleotide
ugagauuuugaacuugaga

SEQ ID NO: 2470272 - RNA, 19 nt, Artificial Sequence
  Description of Artificial Sequence: Synthetic oligonucleotide
uguaugugacuuaaucucc

SEQ ID NO: 2470273 - RNA, 19 nt, Artificial Sequence
  Description of Artificial Sequence: Synthetic oligonucleotide
uuguaugugacuuaaucuc

SEQ ID NO: 2470274 - RNA, 19 nt, Artificial Sequence
  Description of Artificial Sequence: Synthetic oligonucleotide
uagagaaacacagacaagu

SEQ ID NO: 2470275 - RNA, 19 nt, Artificial Sequence
  Description of Artificial Sequence: Synthetic oligonucleotide
aaggcagaucaauuuagag

SEQ ID NO: 2470276 - RNA, 19 nt, Artificial Sequence
  Description of Artificial Sequence: Synthetic oligonucleotide
aaauuuaaccuuacaguag

SEQ ID NO: 2470277 - RNA, 19 nt, Artificial Sequence
  Description of Artificial Sequence: Synthetic oligonucleotide
uaauguaccucucauguau

SEQ ID NO: 2470278 - RNA, 19 nt, Artificial Sequence
  Description of Artificial Sequence: Synthetic oligonucleotide
ucuaagucugaacuuugag

SEQ ID NO: 2470279 - RNA, 19 nt, Artificial Sequence
  Description of Artificial Sequence: Synthetic oligonucleotide
aagaacacuaggggaaggc

SEQ ID NO: 2470280 - RNA, 19 nt, Artificial Sequence
  Description of Artificial Sequence: Synthetic oligonucleotide
aaacagucuuccaugugcc

SEQ ID NO: 2470281 - RNA, 19 nt, Artificial Sequence
  Description of Artificial Sequence: Synthetic oligonucleotide
uuccuuuuagaguccaagg

SEQ ID NO: 2470282 - RNA, 19 nt, Artificial Sequence
  Description of Artificial Sequence: Synthetic oligonucleotide
aguaguauauaaguaaacu

SEQ ID NO: 2470283 - RNA, 19 nt, Artificial Sequence
  Description of Artificial Sequence: Synthetic oligonucleotide
  modified_base (7)..(7): a, c, u, g, unknown or other
uuacagnuuaaaaggcaga

SEQ ID NO: 2470284 - RNA, 19 nt, Artificial Sequence
  Description of Artificial Sequence: Synthetic oligonucleotide
uuaagcacccacuuaaaau

SEQ ID NO: 2470285 - RNA, 19 nt, Artificial Sequence
  Description of Artificial Sequence: Synthetic oligonucleotide
aaaaggcagaucaauuuag

SEQ ID NO: 2470286 - RNA, 19 nt, Artificial Sequence
  Description of Artificial Sequence: Synthetic oligonucleotide
uccuuuuagaguccaagga

SEQ ID NO: 2470287 - RNA, 19 nt, Artificial Sequence
  Description of Artificial Sequence: Synthetic oligonucleotide
uaagcacccacuuaaaaua

SEQ ID NO: 2470288 - RNA, 19 nt, Artificial Sequence
  Description of Artificial Sequence: Synthetic oligonucleotide
aacuauaauguaccucuca

SEQ ID NO: 2470289 - RNA, 19 nt, Artificial Sequence
  Description of Artificial Sequence: Synthetic oligonucleotide
uaaccuuacaguaguauau

SEQ ID NO: 2470290 - RNA, 19 nt, Artificial Sequence
  Description of Artificial Sequence: Synthetic oligonucleotide
ugucauaugcugcaacaug

SEQ ID NO: 2470291 - RNA, 19 nt, Artificial Sequence
  Description of Artificial Sequence: Synthetic oligonucleotide
uguuuacuagugauugugc

SEQ ID NO: 2470292 - RNA, 19 nt, Artificial Sequence
  Description of Artificial Sequence: Synthetic oligonucleotide
gucauaugcugcaacaugg

SEQ ID NO: 2470293 - RNA, 19 nt, Artificial Sequence
  Description of Artificial Sequence: Synthetic oligonucleotide
  modified_base (8)..(8): a, c, u, g, unknown or other
auuacagnuuaaaaggcag

SEQ ID NO: 2470294 - RNA, 19 nt, Artificial Sequence
  Description of Artificial Sequence: Synthetic oligonucleotide
gccaaauuuaaccuuacag

SEQ ID NO: 2470295 - RNA, 19 nt, Artificial Sequence
  Description of Artificial Sequence: Synthetic oligonucleotide
uuugaggaguguuuucaag

SEQ ID NO: 2470296 - RNA, 19 nt, Artificial Sequence
  Description of Artificial Sequence: Synthetic oligonucleotide
guuuacuagugauugugcc

SEQ ID NO: 2470297 - RNA, 19 nt, Artificial Sequence
  Description of Artificial Sequence: Synthetic oligonucleotide
ugcaacauggcauguuucc

SEQ ID NO: 2470298 - RNA, 19 nt, Artificial Sequence
  Description of Artificial Sequence: Synthetic oligonucleotide
  modified_base (13)..(13): a, c, u, g, unknown or other
uaguuauuacagnuuaaaa

SEQ ID NO: 2470299 - RNA, 19 nt, Artificial Sequence
  Description of Artificial Sequence: Synthetic oligonucleotide
uuuucaagugcacugccau

SEQ ID NO: 2470300 - RNA, 19 nt, Artificial Sequence
  Description of Artificial Sequence: Synthetic oligonucleotide
uuaaccuuacaguaguaua

SEQ ID NO: 2470301 - RNA, 19 nt, Artificial Sequence
  Description of Artificial Sequence: Synthetic oligonucleotide
uacuuucauaacaaaacua

SEQ ID NO: 2470302 - RNA, 19 nt, Artificial Sequence
  Description of Artificial Sequence: Synthetic oligonucleotide
cuuacaguaguauauaagu

SEQ ID NO: 2470303 - RNA, 19 nt, Artificial Sequence
  Description of Artificial Sequence: Synthetic oligonucleotide
uccaugugccuuaagcacc

SEQ ID NO: 2470304 - RNA, 19 nt, Artificial Sequence
  Description of Artificial Sequence: Synthetic oligonucleotide
aaucuccugucauaugcug

SEQ ID NO: 2470305 - RNA, 19 nt, Artificial Sequence
  Description of Artificial Sequence: Synthetic oligonucleotide
ugaggaguguuuucaagug

SEQ ID NO: 2470306 - RNA, 19 nt, Artificial Sequence
  Description of Artificial Sequence: Synthetic oligonucleotide
aggcagaucaauuuagaga

SEQ ID NO: 2470307 - RNA, 19 nt, Artificial Sequence
  Description of Artificial Sequence: Synthetic oligonucleotide
uuagagaaacacagacaag

SEQ ID NO: 2470308 - RNA, 19 nt, Artificial Sequence
  Description of Artificial Sequence: Synthetic oligonucleotide
uguuguauccauuuccuuu

SEQ ID NO: 2470309 - RNA, 19 nt, Artificial Sequence
  Description of Artificial Sequence: Synthetic oligonucleotide
acuauaauguaccucucau

SEQ ID NO: 2470310 - RNA, 19 nt, Artificial Sequence
  Description of Artificial Sequence: Synthetic oligonucleotide
uaccucucauguaugaaca

SEQ ID NO: 2470311 - RNA, 19 nt, Artificial Sequence
  Description of Artificial Sequence: Synthetic oligonucleotide
aaguuccuauguuuacuag

SEQ ID NO: 2470312 - RNA, 19 nt, Artificial Sequence
  Description of Artificial Sequence: Synthetic oligonucleotide
uucccauccagugacuugg

SEQ ID NO: 2470313 - RNA, 19 nt, Artificial Sequence
  Description of Artificial Sequence: Synthetic oligonucleotide
acuuucauaacaaaacuau

SEQ ID NO: 2470314 - RNA, 19 nt, Artificial Sequence
  Description of Artificial Sequence: Synthetic oligonucleotide
ugugccaaauuuaaccuua

SEQ ID NO: 2470315 - RNA, 19 nt, Artificial Sequence
  Description of Artificial Sequence: Synthetic oligonucleotide
ugugacuuaaucuccuguc

SEQ ID NO: 2470316 - RNA, 19 nt, Artificial Sequence
  Description of Artificial Sequence: Synthetic oligonucleotide
cacuguuguauccauuucc

SEQ ID NO: 2470317 - RNA, 19 nt, Artificial Sequence
  Description of Artificial Sequence: Synthetic oligonucleotide
ggcagaucaauuuagagaa

SEQ ID NO: 2470318 - RNA, 19 nt, Artificial Sequence
  Description of Artificial Sequence: Synthetic oligonucleotide
uucaagugcacugccauca

SEQ ID NO: 2470319 - RNA, 19 nt, Artificial Sequence
  Description of Artificial Sequence: Synthetic oligonucleotide
uauacacauaauacauggu

SEQ ID NO: 2470320 - RNA, 19 nt, Artificial Sequence
  Description of Artificial Sequence: Synthetic oligonucleotide
aacacuaggggaaggcggg

SEQ ID NO: 2470321 - RNA, 19 nt, Artificial Sequence
  Description of Artificial Sequence: Synthetic oligonucleotide
aauagcuccacuauauaua

SEQ ID NO: 2470322 - RNA, 19 nt, Artificial Sequence
  Description of Artificial Sequence: Synthetic oligonucleotide
gaacacuaggggaaggcgg

SEQ ID NO: 2470323 - RNA, 19 nt, Artificial Sequence
  Description of Artificial Sequence: Synthetic oligonucleotide
aguuccuauguuuacuagu

SEQ ID NO: 2470324 - RNA, 19 nt, Artificial Sequence
  Description of Artificial Sequence: Synthetic oligonucleotide
  modified_base (19)..(19): a, c, u, g, unknown or other
auuuucuaguuauuacagn

SEQ ID NO: 2470325 - RNA, 19 nt, Artificial Sequence
  Description of Artificial Sequence: Synthetic oligonucleotide
uuugcucccgcauaauuuc

SEQ ID NO: 2470326 - RNA, 19 nt, Artificial Sequence
  Description of Artificial Sequence: Synthetic oligonucleotide
auuuaacauacacauugaa

SEQ ID NO: 2470327 - RNA, 19 nt, Artificial Sequence
  Description of Artificial Sequence: Synthetic oligonucleotide
cauucuaucggggaagcag

SEQ ID NO: 2470328 - RNA, 19 nt, Artificial Sequence
  Description of Artificial Sequence: Synthetic oligonucleotide
auagcuccacuauauauau

SEQ ID NO: 2470329 - RNA, 19 nt, Artificial Sequence
  Description of Artificial Sequence: Synthetic oligonucleotide
uccuauguuuacuagugau

SEQ ID NO: 2470330 - RNA, 19 nt, Artificial Sequence
  Description of Artificial Sequence: Synthetic oligonucleotide
ucucauguaugaacaauau

SEQ ID NO: 2470331 - RNA, 19 nt, Artificial Sequence
  Description of Artificial Sequence: Synthetic oligonucleotide
cauguaugaacaauauaca

SEQ ID NO: 2470332 - RNA, 19 nt, Artificial Sequence
  Description of Artificial Sequence: Synthetic oligonucleotide
uccuuuuggucucacuucu

SEQ ID NO: 2470333 - RNA, 19 nt, Artificial Sequence
  Description of Artificial Sequence: Synthetic oligonucleotide
uaaacuuugcucccgcaua

SEQ ID NO: 2470334 - RNA, 19 nt, Artificial Sequence
  Description of Artificial Sequence: Synthetic oligonucleotide
auguuuacuagugauugug

SEQ ID NO: 2470335 - RNA, 19 nt, Artificial Sequence
  Description of Artificial Sequence: Synthetic oligonucleotide
ugugccuuaagcacccacu

SEQ ID NO: 2470336 - RNA, 19 nt, Artificial Sequence
  Description of Artificial Sequence: Synthetic oligonucleotide
ugggauuuucagcagugcu

SEQ ID NO: 2470337 - RNA, 19 nt, Artificial Sequence
  Description of Artificial Sequence: Synthetic oligonucleotide
aaaauagcuccacuauaua

SEQ ID NO: 2470338 - RNA, 19 nt, Artificial Sequence
  Description of Artificial Sequence: Synthetic oligonucleotide
ucugcagggcaaaauacau

SEQ ID NO: 2470339 - RNA, 19 nt, Artificial Sequence
  Description of Artificial Sequence: Synthetic oligonucleotide
auguggauuucuucaaaug

SEQ ID NO: 2470340 - RNA, 19 nt, Artificial Sequence
  Description of Artificial Sequence: Synthetic oligonucleotide
aaacuuugcucccgcauaa

SEQ ID NO: 2470341 - RNA, 19 nt, Artificial Sequence
  Description of Artificial Sequence: Synthetic oligonucleotide
ggucgcuaaacuuugcucc

SEQ ID NO: 2470342 - RNA, 19 nt, Artificial Sequence
  Description of Artificial Sequence: Synthetic oligonucleotide
aucaauuuagagaaacaca

SEQ ID NO: 2470343 - RNA, 19 nt, Artificial Sequence
  Description of Artificial Sequence: Synthetic oligonucleotide
auacaagcugcuuguaugu

SEQ ID NO: 2470344 - RNA, 19 nt, Artificial Sequence
  Description of Artificial Sequence: Synthetic oligonucleotide
  modified_base (17)..(17): a, c, u, g, unknown or other
uuucuaguuauuacagnuu

SEQ ID NO: 2470345 - RNA, 19 nt, Artificial Sequence
  Description of Artificial Sequence: Synthetic oligonucleotide
guuccuauguuuacuagug

SEQ ID NO: 2470346 - RNA, 19 nt, Artificial Sequence
  Description of Artificial Sequence: Synthetic oligonucleotide
  modified_base (5)..(5): a, c, u, g, unknown or other
acagnuuaaaaggcagauc

SEQ ID NO: 2470347 - RNA, 19 nt, Artificial Sequence
  Description of Artificial Sequence: Synthetic oligonucleotide
uuuaaccuuacaguaguau

SEQ ID NO: 2470348 - RNA, 19 nt, Artificial Sequence
  Description of Artificial Sequence: Synthetic oligonucleotide
uuuuagaguccaaggaguu

SEQ ID NO: 2470349 - RNA, 19 nt, Artificial Sequence
  Description of Artificial Sequence: Synthetic oligonucleotide
aagugcacugccaucagcu

SEQ ID NO: 2470350 - RNA, 19 nt, Artificial Sequence
  Description of Artificial Sequence: Synthetic oligonucleotide
ugacuuaaucuccugucau

SEQ ID NO: 2470351 - RNA, 19 nt, Artificial Sequence
  Description of Artificial Sequence: Synthetic oligonucleotide
gaggaguguuuucaagugc

SEQ ID NO: 2470352 - RNA, 19 nt, Artificial Sequence
  Description of Artificial Sequence: Synthetic oligonucleotide
  modified_base (6)..(6): a, c, u, g, unknown or other
uacagnuuaaaaggcagau

SEQ ID NO: 2470353 - RNA, 19 nt, Artificial Sequence
  Description of Artificial Sequence: Synthetic oligonucleotide
acuaggggaaggcgggucg

SEQ ID NO: 2470354 - RNA, 19 nt, Artificial Sequence
  Description of Artificial Sequence: Synthetic oligonucleotide
  modified_base (15)..(15): a, c, u, g, unknown or other
ucuaguuauuacagnuuaa

SEQ ID NO: 2470355 - RNA, 19 nt, Artificial Sequence
  Description of Artificial Sequence: Synthetic oligonucleotide
  modified_base (14)..(14): a, c, u, g, unknown or other
cuaguuauuacagnuuaaa

SEQ ID NO: 2470356 - RNA, 19 nt, Artificial Sequence
  Description of Artificial Sequence: Synthetic oligonucleotide
aaucuaagucugaacuuug

SEQ ID NO: 2470357 - RNA, 19 nt, Artificial Sequence
  Description of Artificial Sequence: Synthetic oligonucleotide
ucugucagaaauguggauu

SEQ ID NO: 2470358 - RNA, 19 nt, Artificial Sequence
  Description of Artificial Sequence: Synthetic oligonucleotide
caguaguauauaaguaaac

SEQ ID NO: 2470359 - RNA, 19 nt, Artificial Sequence
  Description of Artificial Sequence: Synthetic oligonucleotide
uguuuccacuguuguaucc

SEQ ID NO: 2470360 - RNA, 19 nt, Artificial Sequence
  Description of Artificial Sequence: Synthetic oligonucleotide
uauguuuacuagugauugu

SEQ ID NO: 2470361 - RNA, 19 nt, Artificial Sequence
  Description of Artificial Sequence: Synthetic oligonucleotide
guaccucucauguaugaac

SEQ ID NO: 2470362 - RNA, 19 nt, Artificial Sequence
  Description of Artificial Sequence: Synthetic oligonucleotide
aaacuauaauguaccucuc

SEQ ID NO: 2470363 - RNA, 19 nt, Artificial Sequence
  Description of Artificial Sequence: Synthetic oligonucleotide
agaacacuaggggaaggcg

SEQ ID NO: 2470364 - RNA, 19 nt, Artificial Sequence
  Description of Artificial Sequence: Synthetic oligonucleotide
gaaauguggauuucuucaa

SEQ ID NO: 2470365 - RNA, 19 nt, Artificial Sequence
  Description of Artificial Sequence: Synthetic oligonucleotide
aauacaugguauacaguau

SEQ ID NO: 2470366 - RNA, 19 nt, Artificial Sequence
  Description of Artificial Sequence: Synthetic oligonucleotide
caagcugcuuguaugugac

SEQ ID NO: 2470367 - RNA, 19 nt, Artificial Sequence
  Description of Artificial Sequence: Synthetic oligonucleotide
auauccagaaucaaaguuu

SEQ ID NO: 2470368 - RNA, 19 nt, Artificial Sequence
  Description of Artificial Sequence: Synthetic oligonucleotide
ugcaaacagucuuccaugu

SEQ ID NO: 2470369 - RNA, 19 nt, Artificial Sequence
  Description of Artificial Sequence: Synthetic oligonucleotide
uggggaaaaucuauauuua

SEQ ID NO: 2470370 - RNA, 19 nt, Artificial Sequence
  Description of Artificial Sequence: Synthetic oligonucleotide
uccacuguuguauccauuu

SEQ ID NO: 2470371 - RNA, 19 nt, Artificial Sequence
  Description of Artificial Sequence: Synthetic oligonucleotide
caucugcagggcaaaauac

SEQ ID NO: 2470372 - RNA, 19 nt, Artificial Sequence
  Description of Artificial Sequence: Synthetic oligonucleotide
gaguccaaggaguugggga

SEQ ID NO: 2470373 - RNA, 19 nt, Artificial Sequence
  Description of Artificial Sequence: Synthetic oligonucleotide
caaaacuauaauguaccuc

SEQ ID NO: 2470374 - RNA, 19 nt, Artificial Sequence
  Description of Artificial Sequence: Synthetic oligonucleotide
acauaauacaugguauaca

SEQ ID NO: 2470375 - RNA, 19 nt, Artificial Sequence
  Description of Artificial Sequence: Synthetic oligonucleotide
cuuguaugugacuuaaucu

SEQ ID NO: 2470376 - RNA, 19 nt, Artificial Sequence
  Description of Artificial Sequence: Synthetic oligonucleotide
aagcacccacuuaaaauag

SEQ ID NO: 2470377 - RNA, 19 nt, Artificial Sequence
  Description of Artificial Sequence: Synthetic oligonucleotide
uacaugguauacaguauuu

SEQ ID NO: 2470378 - RNA, 19 nt, Artificial Sequence
  Description of Artificial Sequence: Synthetic oligonucleotide
aguauauaaguaaacuguu

SEQ ID NO: 2470379 - RNA, 19 nt, Artificial Sequence
  Description of Artificial Sequence: Synthetic oligonucleotide
aaaggcagaucaauuuaga

SEQ ID NO: 2470380 - RNA, 19 nt, Artificial Sequence
  Description of Artificial Sequence: Synthetic oligonucleotide
ccuuuuagaguccaaggag

SEQ ID NO: 2470381 - RNA, 19 nt, Artificial Sequence
  Description of Artificial Sequence: Synthetic oligonucleotide
aauguaccucucauguaug

SEQ ID NO: 2470382 - RNA, 19 nt, Artificial Sequence
  Description of Artificial Sequence: Synthetic oligonucleotide
uuccuauguuuacuaguga

SEQ ID NO: 2470383 - RNA, 19 nt, Artificial Sequence
  Description of Artificial Sequence: Synthetic oligonucleotide
auguuuccacuguuguauc

SEQ ID NO: 2470384 - RNA, 19 nt, Artificial Sequence
  Description of Artificial Sequence: Synthetic oligonucleotide
aauuuccuuuuggucucac

SEQ ID NO: 2470385 - RNA, 19 nt, Artificial Sequence
  Description of Artificial Sequence: Synthetic oligonucleotide
cuccacuauauauauacaa

SEQ ID NO: 2470386 - RNA, 19 nt, Artificial Sequence
  Description of Artificial Sequence: Synthetic oligonucleotide
acuuaaucuccugucauau

SEQ ID NO: 2470387 - RNA, 19 nt, Artificial Sequence
  Description of Artificial Sequence: Synthetic oligonucleotide
augugacuuaaucuccugu

SEQ ID NO: 2470388 - RNA, 19 nt, Artificial Sequence
  Description of Artificial Sequence: Synthetic oligonucleotide
acaguaguauauaaguaaa

SEQ ID NO: 2470389 - RNA, 19 nt, Artificial Sequence
  Description of Artificial Sequence: Synthetic oligonucleotide
agucugaacuuugaggagu

SEQ ID NO: 2470390 - RNA, 19 nt, Artificial Sequence
  Description of Artificial Sequence: Synthetic oligonucleotide
uugagauuugacagcuguc

SEQ ID NO: 2470391 - RNA, 19 nt, Artificial Sequence
  Description of Artificial Sequence: Synthetic oligonucleotide
augugccuuaagcacccac

SEQ ID NO: 2470392 - RNA, 19 nt, Artificial Sequence
  Description of Artificial Sequence: Synthetic oligonucleotide
gcuuguaugugacuuaauc

SEQ ID NO: 2470393 - RNA, 19 nt, Artificial Sequence
  Description of Artificial Sequence: Synthetic oligonucleotide
ugccaaauuuaaccuuaca

SEQ ID NO: 2470394 - RNA, 19 nt, Artificial Sequence
  Description of Artificial Sequence: Synthetic oligonucleotide
aaucaaaguuuugguaaaa

SEQ ID NO: 2470395 - RNA, 19 nt, Artificial Sequence
  Description of Artificial Sequence: Synthetic oligonucleotide
uggcauguuuccacuguug

SEQ ID NO: 2470396 - RNA, 19 nt, Artificial Sequence
  Description of Artificial Sequence: Synthetic oligonucleotide
uaccugugcaaacagucuu

SEQ ID NO: 2470397 - RNA, 19 nt, Artificial Sequence
  Description of Artificial Sequence: Synthetic oligonucleotide
cuuuuagaguccaaggagu

SEQ ID NO: 2470398 - RNA, 19 nt, Artificial Sequence
  Description of Artificial Sequence: Synthetic oligonucleotide
cuucugucagaaaugugga

SEQ ID NO: 2470399 - RNA, 19 nt, Artificial Sequence
  Description of Artificial Sequence: Synthetic oligonucleotide
acaaguuccuauguuuacu

SEQ ID NO: 2470400 - RNA, 19 nt, Artificial Sequence
  Description of Artificial Sequence: Synthetic oligonucleotide
uuacaguaccugugcaaac

SEQ ID NO: 2470401 - RNA, 19 nt, Artificial Sequence
  Description of Artificial Sequence: Synthetic oligonucleotide
  modified_base (2)..(2): a, c, u, g, unknown or other
gnuuaaaaggcagaucaau

SEQ ID NO: 2470402 - RNA, 19 nt, Artificial Sequence
  Description of Artificial Sequence: Synthetic oligonucleotide
cuauggcugggauuuucag

SEQ ID NO: 2470403 - RNA, 19 nt, Artificial Sequence
  Description of Artificial Sequence: Synthetic oligonucleotide
gucgcuaaacuuugcuccc

SEQ ID NO: 2470404 - RNA, 19 nt, Artificial Sequence
  Description of Artificial Sequence: Synthetic oligonucleotide
gugacuuaaucuccuguca

SEQ ID NO: 2470405 - RNA, 19 nt, Artificial Sequence
  Description of Artificial Sequence: Synthetic oligonucleotide
aacuaaaaucuaagucuga

SEQ ID NO: 2470406 - RNA, 19 nt, Artificial Sequence
  Description of Artificial Sequence: Synthetic oligonucleotide
aggaguguuuucaagugca

SEQ ID NO: 2470407 - RNA, 19 nt, Artificial Sequence
  Description of Artificial Sequence: Synthetic oligonucleotide
aaucuauauuuaacauaca

SEQ ID NO: 2470408 - RNA, 19 nt, Artificial Sequence
  Description of Artificial Sequence: Synthetic oligonucleotide
accuuacaguaguauauaa

SEQ ID NO: 2470409 - RNA, 19 nt, Artificial Sequence
  Description of Artificial Sequence: Synthetic oligonucleotide
agcacccacuuaaaauagc

SEQ ID NO: 2470410 - RNA, 19 nt, Artificial Sequence
  Description of Artificial Sequence: Synthetic oligonucleotide
agugauugugccaaauuua

SEQ ID NO: 2470411 - RNA, 19 nt, Artificial Sequence
  Description of Artificial Sequence: Synthetic oligonucleotide
auguaccucucauguauga

SEQ ID NO: 2470412 - RNA, 19 nt, Artificial Sequence
  Description of Artificial Sequence: Synthetic oligonucleotide
gauuugacagcuguccuua

SEQ ID NO: 2470413 - RNA, 19 nt, Artificial Sequence
  Description of Artificial Sequence: Synthetic oligonucleotide
uugcucccgcauaauuucc

SEQ ID NO: 2470414 - RNA, 19 nt, Artificial Sequence
  Description of Artificial Sequence: Synthetic oligonucleotide
aaggcgggucgcuaaacuu

SEQ ID NO: 2470415 - RNA, 19 nt, Artificial Sequence
  Description of Artificial Sequence: Synthetic oligonucleotide
aaccuuacaguaguauaua

SEQ ID NO: 2470416 - RNA, 19 nt, Artificial Sequence
  Description of Artificial Sequence: Synthetic oligonucleotide
cucucauguaugaacaaua

SEQ ID NO: 2470417 - RNA, 19 nt, Artificial Sequence
  Description of Artificial Sequence: Synthetic oligonucleotide
auucuaucggggaagcaga

SEQ ID NO: 2470418 - RNA, 19 nt, Artificial Sequence
  Description of Artificial Sequence: Synthetic oligonucleotide
ugcauucuaucggggaagc

SEQ ID NO: 2470419 - RNA, 19 nt, Artificial Sequence
  Description of Artificial Sequence: Synthetic oligonucleotide
cagaaucaaaguuuuggua

SEQ ID NO: 2470420 - RNA, 19 nt, Artificial Sequence
  Description of Artificial Sequence: Synthetic oligonucleotide
ucccgcauaauuuccuuuu

SEQ ID NO: 2470421 - RNA, 19 nt, Artificial Sequence
  Description of Artificial Sequence: Synthetic oligonucleotide
uugugccaaauuuaaccuu

SEQ ID NO: 2470422 - RNA, 19 nt, Artificial Sequence
  Description of Artificial Sequence: Synthetic oligonucleotide
auaauacaugguauacagu

SEQ ID NO: 2470423 - RNA, 19 nt, Artificial Sequence
  Description of Artificial Sequence: Synthetic oligonucleotide
ucgcuaaacuuugcucccg

SEQ ID NO: 2470424 - RNA, 19 nt, Artificial Sequence
  Description of Artificial Sequence: Synthetic oligonucleotide
uucagcagugcuucccauc

SEQ ID NO: 2470425 - RNA, 19 nt, Artificial Sequence
  Description of Artificial Sequence: Synthetic oligonucleotide
gacuuaaucuccugucaua

SEQ ID NO: 2470426 - RNA, 19 nt, Artificial Sequence
  Description of Artificial Sequence: Synthetic oligonucleotide
cauaugcugcaacauggca

SEQ ID NO: 2470427 - RNA, 19 nt, Artificial Sequence
  Description of Artificial Sequence: Synthetic oligonucleotide
cuuaagcacccacuuaaaa

SEQ ID NO: 2470428 - RNA, 19 nt, Artificial Sequence
  Description of Artificial Sequence: Synthetic oligonucleotide
uguaccucucauguaugaa

SEQ ID NO: 2470429 - RNA, 19 nt, Artificial Sequence
  Description of Artificial Sequence: Synthetic oligonucleotide
agaguccaaggaguugggg

SEQ ID NO: 2470430 - RNA, 19 nt, Artificial Sequence
  Description of Artificial Sequence: Synthetic oligonucleotide
acuuugcucccgcauaauu

SEQ ID NO: 2470431 - RNA, 19 nt, Artificial Sequence
  Description of Artificial Sequence: Synthetic oligonucleotide
accugugcaaacagucuuc

SEQ ID NO: 2470432 - RNA, 19 nt, Artificial Sequence
  Description of Artificial Sequence: Synthetic oligonucleotide
caaguuccuauguuuacua

SEQ ID NO: 2470433 - RNA, 19 nt, Artificial Sequence
  Description of Artificial Sequence: Synthetic oligonucleotide
caagugcacugccaucagc

SEQ ID NO: 2470434 - RNA, 19 nt, Artificial Sequence
  Description of Artificial Sequence: Synthetic oligonucleotide
cugcauucuaucggggaag

SEQ ID NO: 2470435 - RNA, 19 nt, Artificial Sequence
  Description of Artificial Sequence: Synthetic oligonucleotide
cacccacuuaaaauagcuc

SEQ ID NO: 2470436 - RNA, 19 nt, Artificial Sequence
  Description of Artificial Sequence: Synthetic oligonucleotide
gagauuugacagcuguccu

SEQ ID NO: 2470437 - RNA, 19 nt, Artificial Sequence
  Description of Artificial Sequence: Synthetic oligonucleotide
  modified_base (3)..(3): a, c, u, g, unknown or other
agnuuaaaaggcagaucaa

SEQ ID NO: 2470438 - RNA, 19 nt, Artificial Sequence
  Description of Artificial Sequence: Synthetic oligonucleotide
cauguuuccacuguuguau

SEQ ID NO: 2470439 - RNA, 19 nt, Artificial Sequence
  Description of Artificial Sequence: Synthetic oligonucleotide
agacaaguuccuauguuua

SEQ ID NO: 2470440 - RNA, 19 nt, Artificial Sequence
  Description of Artificial Sequence: Synthetic oligonucleotide
aaacacagacaaguuccua

SEQ ID NO: 2470441 - RNA, 19 nt, Artificial Sequence
  Description of Artificial Sequence: Synthetic oligonucleotide
ggaagaacacuaggggaag

SEQ ID NO: 2470442 - RNA, 19 nt, Artificial Sequence
  Description of Artificial Sequence: Synthetic oligonucleotide
cugcaacauggcauguuuc

SEQ ID NO: 2470443 - RNA, 19 nt, Artificial Sequence
  Description of Artificial Sequence: Synthetic oligonucleotide
gccuuaagcacccacuuaa

SEQ ID NO: 2470444 - RNA, 19 nt, Artificial Sequence
  Description of Artificial Sequence: Synthetic oligonucleotide
acaugguauacaguauuua

SEQ ID NO: 2470445 - RNA, 19 nt, Artificial Sequence
  Description of Artificial Sequence: Synthetic oligonucleotide
acuagugauugugccaaau

SEQ ID NO: 2470446 - RNA, 19 nt, Artificial Sequence
  Description of Artificial Sequence: Synthetic oligonucleotide
ccgcauaauuuccuuuugg

SEQ ID NO: 2470447 - RNA, 19 nt, Artificial Sequence
  Description of Artificial Sequence: Synthetic oligonucleotide
cucauguaugaacaauaua

SEQ ID NO: 2470448 - RNA, 19 nt, Artificial Sequence
  Description of Artificial Sequence: Synthetic oligonucleotide
uggcugggauuuucagcag

SEQ ID NO: 2470449 - RNA, 19 nt, Artificial Sequence
  Description of Artificial Sequence: Synthetic oligonucleotide
ugucagaaauguggauuuc

SEQ ID NO: 2470450 - RNA, 19 nt, Artificial Sequence
  Description of Artificial Sequence: Synthetic oligonucleotide
gguauacaguauuuacaaa

SEQ ID NO: 2470451 - RNA, 19 nt, Artificial Sequence
  Description of Artificial Sequence: Synthetic oligonucleotide
ccaugugccuuaagcaccc

SEQ ID NO: 2470452 - RNA, 19 nt, Artificial Sequence
  Description of Artificial Sequence: Synthetic oligonucleotide
accucucauguaugaacaa

SEQ ID NO: 2470453 - RNA, 19 nt, Artificial Sequence
  Description of Artificial Sequence: Synthetic oligonucleotide
ugcuuguaugugacuuaau

SEQ ID NO: 2470454 - RNA, 19 nt, Artificial Sequence
  Description of Artificial Sequence: Synthetic oligonucleotide
ugcuauggcugggauuuuc

SEQ ID NO: 2470455 - RNA, 19 nt, Artificial Sequence
  Description of Artificial Sequence: Synthetic oligonucleotide
ggcuuuggaagaacacuag

SEQ ID NO: 2470456 - RNA, 19 nt, Artificial Sequence
  Description of Artificial Sequence: Synthetic oligonucleotide
gaaggcgggucgcuaaacu

SEQ ID NO: 2470457 - RNA, 19 nt, Artificial Sequence
  Description of Artificial Sequence: Synthetic oligonucleotide
cuuugcucccgcauaauuu

SEQ ID NO: 2470458 - RNA, 19 nt, Artificial Sequence
  Description of Artificial Sequence: Synthetic oligonucleotide
gggucgcuaaacuuugcuc

SEQ ID NO: 2470459 - RNA, 19 nt, Artificial Sequence
  Description of Artificial Sequence: Synthetic oligonucleotide
gcaaacagucuuccaugug

SEQ ID NO: 2470460 - RNA, 19 nt, Artificial Sequence
  Description of Artificial Sequence: Synthetic oligonucleotide
guauauaaguaaacuguuu

SEQ ID NO: 2470461 - RNA, 19 nt, Artificial Sequence
  Description of Artificial Sequence: Synthetic oligonucleotide
aacuuugcucccgcauaau

SEQ ID NO: 2470462 - RNA, 19 nt, Artificial Sequence
  Description of Artificial Sequence: Synthetic oligonucleotide
auuugacagcuguccuuaa

SEQ ID NO: 2470463 - RNA, 19 nt, Artificial Sequence
  Description of Artificial Sequence: Synthetic oligonucleotide
ccugucauaugcugcaaca

SEQ ID NO: 2470464 - RNA, 19 nt, Artificial Sequence
  Description of Artificial Sequence: Synthetic oligonucleotide
aggaguuggggaaaaucua

SEQ ID NO: 2470465 - RNA, 19 nt, Artificial Sequence
  Description of Artificial Sequence: Synthetic oligonucleotide
uacuagugauugugccaaa

SEQ ID NO: 2470466 - RNA, 19 nt, Artificial Sequence
  Description of Artificial Sequence: Synthetic oligonucleotide
cuaggggaaggcgggucgc

SEQ ID NO: 2470467 - RNA, 19 nt, Artificial Sequence
  Description of Artificial Sequence: Synthetic oligonucleotide
uagcuccacuauauauaua

SEQ ID NO: 2470468 - RNA, 19 nt, Artificial Sequence
  Description of Artificial Sequence: Synthetic oligonucleotide
guaugugacuuaaucuccu

SEQ ID NO: 2470469 - RNA, 19 nt, Artificial Sequence
  Description of Artificial Sequence: Synthetic oligonucleotide
cccacuuaaaauagcucca

SEQ ID NO: 2470470 - RNA, 19 nt, Artificial Sequence
  Description of Artificial Sequence: Synthetic oligonucleotide
aggaaauuuucuaguuauu

SEQ ID NO: 2470471 - RNA, 19 nt, Artificial Sequence
  Description of Artificial Sequence: Synthetic oligonucleotide
gugccaaauuuaaccuuac

SEQ ID NO: 2470472 - RNA, 19 nt, Artificial Sequence
  Description of Artificial Sequence: Synthetic oligonucleotide
ggcauguuuccacuguugu

SEQ ID NO: 2470473 - RNA, 19 nt, Artificial Sequence
  Description of Artificial Sequence: Synthetic oligonucleotide
ccacuuaaaauagcuccac

SEQ ID NO: 2470474 - RNA, 19 nt, Artificial Sequence
  Description of Artificial Sequence: Synthetic oligonucleotide
ucccugcuauggcugggau

SEQ ID NO: 2470475 - RNA, 19 nt, Artificial Sequence
  Description of Artificial Sequence: Synthetic oligonucleotide
cugcuuguaugugacuuaa

SEQ ID NO: 2470476 - RNA, 19 nt, Artificial Sequence
  Description of Artificial Sequence: Synthetic oligonucleotide
cugcagggcaaaauacaua

SEQ ID NO: 2470477 - RNA, 19 nt, Artificial Sequence
  Description of Artificial Sequence: Synthetic oligonucleotide
ccagaaucaaaguuuuggu

SEQ ID NO: 2470478 - RNA, 19 nt, Artificial Sequence
  Description of Artificial Sequence: Synthetic oligonucleotide
ugcugcaacauggcauguu

SEQ ID NO: 2470479 - RNA, 19 nt, Artificial Sequence
  Description of Artificial Sequence: Synthetic oligonucleotide
gcuaaacuuugcucccgca

SEQ ID NO: 2470480 - RNA, 19 nt, Artificial Sequence
  Description of Artificial Sequence: Synthetic oligonucleotide
ggaguguuuucaagugcac

SEQ ID NO: 2470481 - RNA, 19 nt, Artificial Sequence
  Description of Artificial Sequence: Synthetic oligonucleotide
aggcgggucgcuaaacuuu

SEQ ID NO: 2470482 - RNA, 19 nt, Artificial Sequence
  Description of Artificial Sequence: Synthetic oligonucleotide
cacuaggggaaggcggguc

SEQ ID NO: 2470483 - RNA, 19 nt, Artificial Sequence
  Description of Artificial Sequence: Synthetic oligonucleotide
ggcgggucgcuaaacuuug

SEQ ID NO: 2470484 - RNA, 19 nt, Artificial Sequence
  Description of Artificial Sequence: Synthetic oligonucleotide
uaggggaaggcgggucgcu

SEQ ID NO: 2470485 - RNA, 19 nt, Artificial Sequence
  Description of Artificial Sequence: Synthetic oligonucleotide
gcuauggcugggauuuuca

SEQ ID NO: 2470486 - RNA, 19 nt, Artificial Sequence
  Description of Artificial Sequence: Synthetic oligonucleotide
cccgcauaauuuccuuuug

SEQ ID NO: 2470487 - RNA, 19 nt, Artificial Sequence
  Description of Artificial Sequence: Synthetic oligonucleotide
acacuaggggaaggcgggu

SEQ ID NO: 2470488 - RNA, 19 nt, Artificial Sequence
  Description of Artificial Sequence: Synthetic oligonucleotide
cugaacuuugaggaguguu

SEQ ID NO: 2470489 - RNA, 19 nt, Artificial Sequence
  Description of Artificial Sequence: Synthetic oligonucleotide
gcugcuuguaugugacuua

SEQ ID NO: 2470490 - RNA, 19 nt, Artificial Sequence
  Description of Artificial Sequence: Synthetic oligonucleotide
caguaccugugcaaacagu

SEQ ID NO: 2470491 - RNA, 19 nt, Artificial Sequence
  Description of Artificial Sequence: Synthetic oligonucleotide
gcuccacuauauauauaca

SEQ ID NO: 2470492 - RNA, 19 nt, Artificial Sequence
  Description of Artificial Sequence: Synthetic oligonucleotide
cgcuaaacuuugcucccgc

SEQ ID NO: 2470493 - RNA, 19 nt, Artificial Sequence
  Description of Artificial Sequence: Synthetic oligonucleotide
gucucacuucugucagaaa

SEQ ID NO: 2470494 - RNA, 19 nt, Artificial Sequence
  Description of Artificial Sequence: Synthetic oligonucleotide
cugucauaugcugcaacau

SEQ ID NO: 2470495 - RNA, 19 nt, Artificial Sequence
  Description of Artificial Sequence: Synthetic oligonucleotide
guccaaggaguuggggaaa

SEQ ID NO: 2470496 - RNA, 19 nt, Artificial Sequence
  Description of Artificial Sequence: Synthetic oligonucleotide
ggaaggcgggucgcuaaac

SEQ ID NO: 2470497 - RNA, 19 nt, Artificial Sequence
  Description of Artificial Sequence: Synthetic oligonucleotide
cuguuguauccauuuccuu

SEQ ID NO: 2470498 - RNA, 19 nt, Artificial Sequence
  Description of Artificial Sequence: Synthetic oligonucleotide
ggggaaggcgggucgcuaa

SEQ ID NO: 2470499 - RNA, 19 nt, Artificial Sequence
  Description of Artificial Sequence: Synthetic oligonucleotide
cucccugcuauggcuggga

SEQ ID NO: 2470500 - RNA, 19 nt, Artificial Sequence
  Description of Artificial Sequence: Synthetic oligonucleotide
cacaucugcagggcaaaau

SEQ ID NO: 2470501 - RNA, 19 nt, Artificial Sequence
  Description of Artificial Sequence: Synthetic oligonucleotide
cucccgcauaauuuccuuu

SEQ ID NO: 2470502 - RNA, 19 nt, Artificial Sequence
  Description of Artificial Sequence: Synthetic oligonucleotide
aggggaaggcgggucgcua

SEQ ID NO: 2470503 - RNA, 19 nt, Artificial Sequence
  Description of Artificial Sequence: Synthetic oligonucleotide
gcagaucaauuuagagaaa

SEQ ID NO: 2470504 - RNA, 19 nt, Artificial Sequence
  Description of Artificial Sequence: Synthetic oligonucleotide
gggaaggcgggucgcuaaa

SEQ ID NO: 2470505 - RNA, 19 nt, Artificial Sequence
  Description of Artificial Sequence: Synthetic oligonucleotide
gcauucuaucggggaagca

SEQ ID NO: 2470506 - RNA, 19 nt, Artificial Sequence
  Description of Artificial Sequence: Synthetic oligonucleotide
caugugccuuaagcaccca

SEQ ID NO: 2470507 - RNA, 19 nt, Artificial Sequence
  Description of Artificial Sequence: Synthetic oligonucleotide
gcgggucgcuaaacuuugc

SEQ ID NO: 2470508 - RNA, 19 nt, Artificial Sequence
  Description of Artificial Sequence: Synthetic oligonucleotide
gcagggcaaaauacauacu

SEQ ID NO: 2470509 - RNA, 19 nt, Artificial Sequence
  Description of Artificial Sequence: Synthetic oligonucleotide
ccucucauguaugaacaau

SEQ ID NO: 2470510 - RNA, 19 nt, Artificial Sequence
  Description of Artificial Sequence: Synthetic oligonucleotide
cgggucgcuaaacuuugcu

SEQ ID NO: 2470511 - RNA, 19 nt, Artificial Sequence
  Description of Artificial Sequence: Synthetic oligonucleotide
uuuacuuugaacuucuugg

SEQ ID NO: 2470512 - RNA, 19 nt, Artificial Sequence
  Description of Artificial Sequence: Synthetic oligonucleotide
uucuuuaugagaaagggca

SEQ ID NO: 2470513 - RNA, 19 nt, Artificial Sequence
  Description of Artificial Sequence: Synthetic oligonucleotide
ugaaauaauagcaccauga

SEQ ID NO: 2470514 - RNA, 19 nt, Artificial Sequence
  Description of Artificial Sequence: Synthetic oligonucleotide
aauagcaccaugaagaucu

SEQ ID NO: 2470515 - RNA, 19 nt, Artificial Sequence
  Description of Artificial Sequence: Synthetic oligonucleotide
aaauaauagcaccaugaag

SEQ ID NO: 2470516 - RNA, 19 nt, Artificial Sequence
  Description of Artificial Sequence: Synthetic oligonucleotide
auuuccgcuggacaaaucc

SEQ ID NO: 2470517 - RNA, 19 nt, Artificial Sequence
  Description of Artificial Sequence: Synthetic oligonucleotide
auuucgauggugaacacgc

SEQ ID NO: 2470518 - RNA, 19 nt, Artificial Sequence
  Description of Artificial Sequence: Synthetic oligonucleotide
uucgugacugaaauaauag

SEQ ID NO: 2470519 - RNA, 19 nt, Artificial Sequence
  Description of Artificial Sequence: Synthetic oligonucleotide
ucaauuucgauggugaaca

SEQ ID NO: 2470520 - RNA, 19 nt, Artificial Sequence
  Description of Artificial Sequence: Synthetic oligonucleotide
gaacacgcaauuuagcuug

SEQ ID NO: 2470521 - RNA, 19 nt, Artificial Sequence
  Description of Artificial Sequence: Synthetic oligonucleotide
uuuggauuucuucugcugc

SEQ ID NO: 2470522 - RNA, 19 nt, Artificial Sequence
  Description of Artificial Sequence: Synthetic oligonucleotide
ggggauaacuuucagaugg

SEQ ID NO: 2470523 - RNA, 19 nt, Artificial Sequence
  Description of Artificial Sequence: Synthetic oligonucleotide
ugaagaucugccuuuagga

SEQ ID NO: 2470524 - RNA, 19 nt, Artificial Sequence
  Description of Artificial Sequence: Synthetic oligonucleotide
aagaccguggcacaggucu

SEQ ID NO: 2470525 - RNA, 19 nt, Artificial Sequence
  Description of Artificial Sequence: Synthetic oligonucleotide
aauguaggaaaugaaguca

SEQ ID NO: 2470526 - RNA, 19 nt, Artificial Sequence
  Description of Artificial Sequence: Synthetic oligonucleotide
agaaggauuccuguaaccc

SEQ ID NO: 2470527 - RNA, 19 nt, Artificial Sequence
  Description of Artificial Sequence: Synthetic oligonucleotide
uuuaugagaaagggcaugg

SEQ ID NO: 2470528 - RNA, 19 nt, Artificial Sequence
  Description of Artificial Sequence: Synthetic oligonucleotide
augucaaagagccucaugu

SEQ ID NO: 2470529 - RNA, 19 nt, Artificial Sequence
  Description of Artificial Sequence: Synthetic oligonucleotide
aaucauuuguggcugcgug

SEQ ID NO: 2470530 - RNA, 19 nt, Artificial Sequence
  Description of Artificial Sequence: Synthetic oligonucleotide
aauuucgauggugaacacg

SEQ ID NO: 2470531 - RNA, 19 nt, Artificial Sequence
  Description of Artificial Sequence: Synthetic oligonucleotide
ucugguugaaauuuccgcu

SEQ ID NO: 2470532 - RNA, 19 nt, Artificial Sequence
  Description of Artificial Sequence: Synthetic oligonucleotide
uguacaucgugcucuuugg

SEQ ID NO: 2470533 - RNA, 19 nt, Artificial Sequence
  Description of Artificial Sequence: Synthetic oligonucleotide
uugaaauuuccgcuggaca

SEQ ID NO: 2470534 - RNA, 19 nt, Artificial Sequence
  Description of Artificial Sequence: Synthetic oligonucleotide
cucuguuuggcagagaggc

SEQ ID NO: 2470535 - RNA, 19 nt, Artificial Sequence
  Description of Artificial Sequence: Synthetic oligonucleotide
uucugguugaaauuuccgc

SEQ ID NO: 2470536 - RNA, 19 nt, Artificial Sequence
  Description of Artificial Sequence: Synthetic oligonucleotide
aaguauuccaagaccacag

SEQ ID NO: 2470537 - RNA, 19 nt, Artificial Sequence
  Description of Artificial Sequence: Synthetic oligonucleotide
aauccugcuggcucaagug

SEQ ID NO: 2470538 - RNA, 19 nt, Artificial Sequence
  Description of Artificial Sequence: Synthetic oligonucleotide
agccuugcgcuguagaugg

SEQ ID NO: 2470539 - RNA, 19 nt, Artificial Sequence
  Description of Artificial Sequence: Synthetic oligonucleotide
cuucuuuaugagaaagggc

SEQ ID NO: 2470540 - RNA, 19 nt, Artificial Sequence
  Description of Artificial Sequence: Synthetic oligonucleotide
gaaggauuccuguaacccc

SEQ ID NO: 2470541 - RNA, 19 nt, Artificial Sequence
  Description of Artificial Sequence: Synthetic oligonucleotide
uggugaacacgcaauuuag

SEQ ID NO: 2470542 - RNA, 19 nt, Artificial Sequence
  Description of Artificial Sequence: Synthetic oligonucleotide
uuuccgcuggacaaauccg

SEQ ID NO: 2470543 - RNA, 19 nt, Artificial Sequence
  Description of Artificial Sequence: Synthetic oligonucleotide
cuuggucuccugcagaagg

SEQ ID NO: 2470544 - RNA, 19 nt, Artificial Sequence
  Description of Artificial Sequence: Synthetic oligonucleotide
uagccugaaucauuugugg

SEQ ID NO: 2470545 - RNA, 19 nt, Artificial Sequence
  Description of Artificial Sequence: Synthetic oligonucleotide
cucaagugcgguaugcucc

SEQ ID NO: 2470546 - RNA, 19 nt, Artificial Sequence
  Description of Artificial Sequence: Synthetic oligonucleotide
agccugaaucauuuguggc

SEQ ID NO: 2470547 - RNA, 19 nt, Artificial Sequence
  Description of Artificial Sequence: Synthetic oligonucleotide
ggauauacugcuuccagag

SEQ ID NO: 2470548 - RNA, 19 nt, Artificial Sequence
  Description of Artificial Sequence: Synthetic oligonucleotide
uuuagcuuggggauaacuu

SEQ ID NO: 2470549 - RNA, 19 nt, Artificial Sequence
  Description of Artificial Sequence: Synthetic oligonucleotide
aaugucaaagagccucaug

SEQ ID NO: 2470550 - RNA, 19 nt, Artificial Sequence
  Description of Artificial Sequence: Synthetic oligonucleotide
acagccuucauugucggcg

SEQ ID NO: 2470551 - RNA, 19 nt, Artificial Sequence
  Description of Artificial Sequence: Synthetic oligonucleotide
ugguuuaagaccguggcac

SEQ ID NO: 2470552 - RNA, 19 nt, Artificial Sequence
  Description of Artificial Sequence: Synthetic oligonucleotide
uucacaggucaauuguucc

SEQ ID NO: 2470553 - RNA, 19 nt, Artificial Sequence
  Description of Artificial Sequence: Synthetic oligonucleotide
ugccuuuaggagcuuagcc

SEQ ID NO: 2470554 - RNA, 19 nt, Artificial Sequence
  Description of Artificial Sequence: Synthetic oligonucleotide
aucaauuucgauggugaac

SEQ ID NO: 2470555 - RNA, 19 nt, Artificial Sequence
  Description of Artificial Sequence: Synthetic oligonucleotide
cuuucugguugaaauuucc

SEQ ID NO: 2470556 - RNA, 19 nt, Artificial Sequence
  Description of Artificial Sequence: Synthetic oligonucleotide
gaaauaauagcaccaugaa

SEQ ID NO: 2470557 - RNA, 19 nt, Artificial Sequence
  Description of Artificial Sequence: Synthetic oligonucleotide
ucggauauacugcuuccag

SEQ ID NO: 2470558 - RNA, 19 nt, Artificial Sequence
  Description of Artificial Sequence: Synthetic oligonucleotide
auauacugcuuccagaguu

SEQ ID NO: 2470559 - RNA, 19 nt, Artificial Sequence
  Description of Artificial Sequence: Synthetic oligonucleotide
uggacuucgugacugaaau

SEQ ID NO: 2470560 - RNA, 19 nt, Artificial Sequence
  Description of Artificial Sequence: Synthetic oligonucleotide
uggacaaauccgcugugcc

SEQ ID NO: 2470561 - RNA, 19 nt, Artificial Sequence
  Description of Artificial Sequence: Synthetic oligonucleotide
guucccuuuacuuugaacu

SEQ ID NO: 2470562 - RNA, 19 nt, Artificial Sequence
  Description of Artificial Sequence: Synthetic oligonucleotide
ucgugacugaaauaauagc

SEQ ID NO: 2470563 - RNA, 19 nt, Artificial Sequence
  Description of Artificial Sequence: Synthetic oligonucleotide
acgcaauuuagcuugggga

SEQ ID NO: 2470564 - RNA, 19 nt, Artificial Sequence
  Description of Artificial Sequence: Synthetic oligonucleotide
gagugaaguauuccaagac

SEQ ID NO: 2470565 - RNA, 19 nt, Artificial Sequence
  Description of Artificial Sequence: Synthetic oligonucleotide
cuuuauuagcucucuucag

SEQ ID NO: 2470566 - RNA, 19 nt, Artificial Sequence
  Description of Artificial Sequence: Synthetic oligonucleotide
agagguuguaucucuguug

SEQ ID NO: 2470567 - RNA, 19 nt, Artificial Sequence
  Description of Artificial Sequence: Synthetic oligonucleotide
uuuaagaccguggcacagg

SEQ ID NO: 2470568 - RNA, 19 nt, Artificial Sequence
  Description of Artificial Sequence: Synthetic oligonucleotide
ugaaguauuccaagaccac

SEQ ID NO: 2470569 - RNA, 19 nt, Artificial Sequence
  Description of Artificial Sequence: Synthetic oligonucleotide
uaggagcuuagccugaauc

SEQ ID NO: 2470570 - RNA, 19 nt, Artificial Sequence
  Description of Artificial Sequence: Synthetic oligonucleotide
cuugaagacaugcuugguc

SEQ ID NO: 2470571 - RNA, 19 nt, Artificial Sequence
  Description of Artificial Sequence: Synthetic oligonucleotide
ucacaggucaauuguuccc

SEQ ID NO: 2470572 - RNA, 19 nt, Artificial Sequence
  Description of Artificial Sequence: Synthetic oligonucleotide
ucugccuuuaggagcuuag

SEQ ID NO: 2470573 - RNA, 19 nt, Artificial Sequence
  Description of Artificial Sequence: Synthetic oligonucleotide
gacuucgugacugaaauaa

SEQ ID NO: 2470574 - RNA, 19 nt, Artificial Sequence
  Description of Artificial Sequence: Synthetic oligonucleotide
auaauagcaccaugaagau

SEQ ID NO: 2470575 - RNA, 19 nt, Artificial Sequence
  Description of Artificial Sequence: Synthetic oligonucleotide
gaguucaugcagaggaagg

SEQ ID NO: 2470576 - RNA, 19 nt, Artificial Sequence
  Description of Artificial Sequence: Synthetic oligonucleotide
ugcgugucugguuuaagac

SEQ ID NO: 2470577 - RNA, 19 nt, Artificial Sequence
  Description of Artificial Sequence: Synthetic oligonucleotide
uggcagaccucucacuugc

SEQ ID NO: 2470578 - RNA, 19 nt, Artificial Sequence
  Description of Artificial Sequence: Synthetic oligonucleotide
uuaagaccguggcacaggu

SEQ ID NO: 2470579 - RNA, 19 nt, Artificial Sequence
  Description of Artificial Sequence: Synthetic oligonucleotide
ugaaucauuuguggcugcg

SEQ ID NO: 2470580 - RNA, 19 nt, Artificial Sequence
  Description of Artificial Sequence: Synthetic oligonucleotide
uauacugcuuccagaguuc

SEQ ID NO: 2470581 - RNA, 19 nt, Artificial Sequence
  Description of Artificial Sequence: Synthetic oligonucleotide
uuccgcuggacaaauccgc

SEQ ID NO: 2470582 - RNA, 19 nt, Artificial Sequence
  Description of Artificial Sequence: Synthetic oligonucleotide
uccauaaauguaggaaaug

SEQ ID NO: 2470583 - RNA, 19 nt, Artificial Sequence
  Description of Artificial Sequence: Synthetic oligonucleotide
aaagggcaugguaaaucac

SEQ ID NO: 2470584 - RNA, 19 nt, Artificial Sequence
  Description of Artificial Sequence: Synthetic oligonucleotide
cacugcuucccuuuauuag

SEQ ID NO: 2470585 - RNA, 19 nt, Artificial Sequence
  Description of Artificial Sequence: Synthetic oligonucleotide
cacgcaauuuagcuugggg

SEQ ID NO: 2470586 - RNA, 19 nt, Artificial Sequence
  Description of Artificial Sequence: Synthetic oligonucleotide
ugaacacgcaauuuagcuu

SEQ ID NO: 2470587 - RNA, 19 nt, Artificial Sequence
  Description of Artificial Sequence: Synthetic oligonucleotide
aauccgcugugcccaagag

SEQ ID NO: 2470588 - RNA, 19 nt, Artificial Sequence
  Description of Artificial Sequence: Synthetic oligonucleotide
gugaaguauuccaagacca

SEQ ID NO: 2470589 - RNA, 19 nt, Artificial Sequence
  Description of Artificial Sequence: Synthetic oligonucleotide
cagaccucucacuugcccg

SEQ ID NO: 2470590 - RNA, 19 nt, Artificial Sequence
  Description of Artificial Sequence: Synthetic oligonucleotide
gacugaaauaauagcacca

SEQ ID NO: 2470591 - RNA, 19 nt, Artificial Sequence
  Description of Artificial Sequence: Synthetic oligonucleotide
caggaaggcccucacaaag

SEQ ID NO: 2470592 - RNA, 19 nt, Artificial Sequence
  Description of Artificial Sequence: Synthetic oligonucleotide
uucgauggugaacacgcaa

SEQ ID NO: 2470593 - RNA, 19 nt, Artificial Sequence
  Description of Artificial Sequence: Synthetic oligonucleotide
aagagguuguaucucuguu

SEQ ID NO: 2470594 - RNA, 19 nt, Artificial Sequence
  Description of Artificial Sequence: Synthetic oligonucleotide
ucucggauauacugcuucc

SEQ ID NO: 2470595 - RNA, 19 nt, Artificial Sequence
  Description of Artificial Sequence: Synthetic oligonucleotide
uggaauuugcuuccauaaa

SEQ ID NO: 2470596 - RNA, 19 nt, Artificial Sequence
  Description of Artificial Sequence: Synthetic oligonucleotide
uggcuucuuuaugagaaag

SEQ ID NO: 2470597 - RNA, 19 nt, Artificial Sequence
  Description of Artificial Sequence: Synthetic oligonucleotide
gacaaauccgcugugccca

SEQ ID NO: 2470598 - RNA, 19 nt, Artificial Sequence
  Description of Artificial Sequence: Synthetic oligonucleotide
ucgauggugaacacgcaau

SEQ ID NO: 2470599 - RNA, 19 nt, Artificial Sequence
  Description of Artificial Sequence: Synthetic oligonucleotide
gaaggaagagguuguaucu

SEQ ID NO: 2470600 - RNA, 19 nt, Artificial Sequence
  Description of Artificial Sequence: Synthetic oligonucleotide
uggcgagugaaguauucca

SEQ ID NO: 2470601 - RNA, 19 nt, Artificial Sequence
  Description of Artificial Sequence: Synthetic oligonucleotide
agaguucaugcagaggaag

SEQ ID NO: 2470602 - RNA, 19 nt, Artificial Sequence
  Description of Artificial Sequence: Synthetic oligonucleotide
cuuuaugagaaagggcaug

SEQ ID NO: 2470603 - RNA, 19 nt, Artificial Sequence
  Description of Artificial Sequence: Synthetic oligonucleotide
cuguacaucgugcucuuug

SEQ ID NO: 2470604 - RNA, 19 nt, Artificial Sequence
  Description of Artificial Sequence: Synthetic oligonucleotide
cagaaggauuccuguaacc

SEQ ID NO: 2470605 - RNA, 19 nt, Artificial Sequence
  Description of Artificial Sequence: Synthetic oligonucleotide
gaagacaugcuuggucucc

SEQ ID NO: 2470606 - RNA, 19 nt, Artificial Sequence
  Description of Artificial Sequence: Synthetic oligonucleotide
guaucucuguugcucuggg

SEQ ID NO: 2470607 - RNA, 19 nt, Artificial Sequence
  Description of Artificial Sequence: Synthetic oligonucleotide
gaaaugaagucaucaauuu

SEQ ID NO: 2470608 - RNA, 19 nt, Artificial Sequence
  Description of Artificial Sequence: Synthetic oligonucleotide
ucuguuuggcagagaggcc

SEQ ID NO: 2470609 - RNA, 19 nt, Artificial Sequence
  Description of Artificial Sequence: Synthetic oligonucleotide
gacaugcuuggucuccugc

SEQ ID NO: 2470610 - RNA, 19 nt, Artificial Sequence
  Description of Artificial Sequence: Synthetic oligonucleotide
ggaaggaagagguuguauc

SEQ ID NO: 2470611 - RNA, 19 nt, Artificial Sequence
  Description of Artificial Sequence: Synthetic oligonucleotide
cuggaauuugcuuccauaa

SEQ ID NO: 2470612 - RNA, 19 nt, Artificial Sequence
  Description of Artificial Sequence: Synthetic oligonucleotide
uucuuggcagaccucucac

SEQ ID NO: 2470613 - RNA, 19 nt, Artificial Sequence
  Description of Artificial Sequence: Synthetic oligonucleotide
acugaaauaauagcaccau

SEQ ID NO: 2470614 - RNA, 19 nt, Artificial Sequence
  Description of Artificial Sequence: Synthetic oligonucleotide
uguucccuuuacuuugaac

SEQ ID NO: 2470615 - RNA, 19 nt, Artificial Sequence
  Description of Artificial Sequence: Synthetic oligonucleotide
uugucggcggcuucccgcg

SEQ ID NO: 2470616 - RNA, 19 nt, Artificial Sequence
  Description of Artificial Sequence: Synthetic oligonucleotide
ucaagugcgguaugcuccu

SEQ ID NO: 2470617 - RNA, 19 nt, Artificial Sequence
  Description of Artificial Sequence: Synthetic oligonucleotide
uguaggaaaugaagucauc

SEQ ID NO: 2470618 - RNA, 19 nt, Artificial Sequence
  Description of Artificial Sequence: Synthetic oligonucleotide
ucuccuucgggccucgcuc

SEQ ID NO: 2470619 - RNA, 19 nt, Artificial Sequence
  Description of Artificial Sequence: Synthetic oligonucleotide
gcucucgcaauccugcugg

SEQ ID NO: 2470620 - RNA, 19 nt, Artificial Sequence
  Description of Artificial Sequence: Synthetic oligonucleotide
aagugcgguaugcuccucu

SEQ ID NO: 2470621 - RNA, 19 nt, Artificial Sequence
  Description of Artificial Sequence: Synthetic oligonucleotide
aaauuuccgcuggacaaau

SEQ ID NO: 2470622 - RNA, 19 nt, Artificial Sequence
  Description of Artificial Sequence: Synthetic oligonucleotide
gugaacacgcaauuuagcu

SEQ ID NO: 2470623 - RNA, 19 nt, Artificial Sequence
  Description of Artificial Sequence: Synthetic oligonucleotide
uguagauggcucucgcaau

SEQ ID NO: 2470624 - RNA, 19 nt, Artificial Sequence
  Description of Artificial Sequence: Synthetic oligonucleotide
aauuuagcuuggggauaac

SEQ ID NO: 2470625 - RNA, 19 nt, Artificial Sequence
  Description of Artificial Sequence: Synthetic oligonucleotide
cuuggggauaacuuucaga

SEQ ID NO: 2470626 - RNA, 19 nt, Artificial Sequence
  Description of Artificial Sequence: Synthetic oligonucleotide
cucgcaauccugcuggcuc

SEQ ID NO: 2470627 - RNA, 19 nt, Artificial Sequence
  Description of Artificial Sequence: Synthetic oligonucleotide
ggcacuuggacuucgugac

SEQ ID NO: 2470628 - RNA, 19 nt, Artificial Sequence
  Description of Artificial Sequence: Synthetic oligonucleotide
uuggacuucgugacugaaa

SEQ ID NO: 2470629 - RNA, 19 nt, Artificial Sequence
  Description of Artificial Sequence: Synthetic oligonucleotide
uucagcagcuuucggccac

SEQ ID NO: 2470630 - RNA, 19 nt, Artificial Sequence
  Description of Artificial Sequence: Synthetic oligonucleotide
uucccuuuacuuugaacuu

SEQ ID NO: 2470631 - RNA, 19 nt, Artificial Sequence
  Description of Artificial Sequence: Synthetic oligonucleotide
aaagagccucaugucucuc

SEQ ID NO: 2470632 - RNA, 19 nt, Artificial Sequence
  Description of Artificial Sequence: Synthetic oligonucleotide
uuggcagaccucucacuug

SEQ ID NO: 2470633 - RNA, 19 nt, Artificial Sequence
  Description of Artificial Sequence: Synthetic oligonucleotide
cuuugaacuucuuggcaga

SEQ ID NO: 2470634 - RNA, 19 nt, Artificial Sequence
  Description of Artificial Sequence: Synthetic oligonucleotide
accaugaagaucugccuuu

SEQ ID NO: 2470635 - RNA, 19 nt, Artificial Sequence
  Description of Artificial Sequence: Synthetic oligonucleotide
ucuggcgagugaaguauuc

SEQ ID NO: 2470636 - RNA, 19 nt, Artificial Sequence
  Description of Artificial Sequence: Synthetic oligonucleotide
ccucacaaaggccucagcc

SEQ ID NO: 2470637 - RNA, 19 nt, Artificial Sequence
  Description of Artificial Sequence: Synthetic oligonucleotide
agagccucaugucucuccu

SEQ ID NO: 2470638 - RNA, 19 nt, Artificial Sequence
  Description of Artificial Sequence: Synthetic oligonucleotide
guagauggcucucgcaauc

SEQ ID NO: 2470639 - RNA, 19 nt, Artificial Sequence
  Description of Artificial Sequence: Synthetic oligonucleotide
uuucgauggugaacacgca

SEQ ID NO: 2470640 - RNA, 19 nt, Artificial Sequence
  Description of Artificial Sequence: Synthetic oligonucleotide
aacacgcaauuuagcuugg

SEQ ID NO: 2470641 - RNA, 19 nt, Artificial Sequence
  Description of Artificial Sequence: Synthetic oligonucleotide
uuguaucucuguugcucug

SEQ ID NO: 2470642 - RNA, 19 nt, Artificial Sequence
  Description of Artificial Sequence: Synthetic oligonucleotide
uuugaacuucuuggcagac

SEQ ID NO: 2470643 - RNA, 19 nt, Artificial Sequence
  Description of Artificial Sequence: Synthetic oligonucleotide
cuucgugacugaaauaaua

SEQ ID NO: 2470644 - RNA, 19 nt, Artificial Sequence
  Description of Artificial Sequence: Synthetic oligonucleotide
aauuuccgcuggacaaauc

SEQ ID NO: 2470645 - RNA, 19 nt, Artificial Sequence
  Description of Artificial Sequence: Synthetic oligonucleotide
uggcacaggucucggauau

SEQ ID NO: 2470646 - RNA, 19 nt, Artificial Sequence
  Description of Artificial Sequence: Synthetic oligonucleotide
ucucuguugcucuggguua

SEQ ID NO: 2470647 - RNA, 19 nt, Artificial Sequence
  Description of Artificial Sequence: Synthetic oligonucleotide
cuuccagaguucaugcaga

SEQ ID NO: 2470648 - RNA, 19 nt, Artificial Sequence
  Description of Artificial Sequence: Synthetic oligonucleotide
ucuuggcagaccucucacu

SEQ ID NO: 2470649 - RNA, 19 nt, Artificial Sequence
  Description of Artificial Sequence: Synthetic oligonucleotide
aggaaggcccucacaaagg

SEQ ID NO: 2470650 - RNA, 19 nt, Artificial Sequence
  Description of Artificial Sequence: Synthetic oligonucleotide
cuuucggccaccgggacuc

SEQ ID NO: 2470651 - RNA, 19 nt, Artificial Sequence
  Description of Artificial Sequence: Synthetic oligonucleotide
uagauggcucucgcaaucc

SEQ ID NO: 2470652 - RNA, 19 nt, Artificial Sequence
  Description of Artificial Sequence: Synthetic oligonucleotide
cgugacugaaauaauagca

SEQ ID NO: 2470653 - RNA, 19 nt, Artificial Sequence
  Description of Artificial Sequence: Synthetic oligonucleotide
guacaucgugcucuuuggc

SEQ ID NO: 2470654 - RNA, 19 nt, Artificial Sequence
  Description of Artificial Sequence: Synthetic oligonucleotide
gauggcucucgcaauccug

SEQ ID NO: 2470655 - RNA, 19 nt, Artificial Sequence
  Description of Artificial Sequence: Synthetic oligonucleotide
cuguagauggcucucgcaa

SEQ ID NO: 2470656 - RNA, 19 nt, Artificial Sequence
  Description of Artificial Sequence: Synthetic oligonucleotide
acagccuugcgcuguagau

SEQ ID NO: 2470657 - RNA, 19 nt, Artificial Sequence
  Description of Artificial Sequence: Synthetic oligonucleotide
uucccgcgagcucugguga

SEQ ID NO: 2470658 - RNA, 19 nt, Artificial Sequence
  Description of Artificial Sequence: Synthetic oligonucleotide
ggaaggcccucacaaaggc

SEQ ID NO: 2470659 - RNA, 19 nt, Artificial Sequence
  Description of Artificial Sequence: Synthetic oligonucleotide
cagccuucauugucggcgg

SEQ ID NO: 2470660 - RNA, 19 nt, Artificial Sequence
  Description of Artificial Sequence: Synthetic oligonucleotide
gaaauuuccgcuggacaaa

SEQ ID NO: 2470661 - RNA, 19 nt, Artificial Sequence
  Description of Artificial Sequence: Synthetic oligonucleotide
ugucugguuuaagaccgug

SEQ ID NO: 2470662 - RNA, 19 nt, Artificial Sequence
  Description of Artificial Sequence: Synthetic oligonucleotide
uuaugagaaagggcauggu

SEQ ID NO: 2470663 - RNA, 19 nt, Artificial Sequence
  Description of Artificial Sequence: Synthetic oligonucleotide
gcgagugaaguauuccaag

SEQ ID NO: 2470664 - RNA, 19 nt, Artificial Sequence
  Description of Artificial Sequence: Synthetic oligonucleotide
cuucccgcgagcucuggug

SEQ ID NO: 2470665 - RNA, 19 nt, Artificial Sequence
  Description of Artificial Sequence: Synthetic oligonucleotide
ucaggaaggcccucacaaa

SEQ ID NO: 2470666 - RNA, 19 nt, Artificial Sequence
  Description of Artificial Sequence: Synthetic oligonucleotide
aggucaauuguucccuuua

SEQ ID NO: 2470667 - RNA, 19 nt, Artificial Sequence
  Description of Artificial Sequence: Synthetic oligonucleotide
ucccuuuacuuugaacuuc

SEQ ID NO: 2470668 - RNA, 19 nt, Artificial Sequence
  Description of Artificial Sequence: Synthetic oligonucleotide
uaauagcaccaugaagauc

SEQ ID NO: 2470669 - RNA, 19 nt, Artificial Sequence
  Description of Artificial Sequence: Synthetic oligonucleotide
ucgcaauccugcuggcuca

SEQ ID NO: 2470670 - RNA, 19 nt, Artificial Sequence
  Description of Artificial Sequence: Synthetic oligonucleotide
guucacaggucaauuguuc

SEQ ID NO: 2470671 - RNA, 19 nt, Artificial Sequence
  Description of Artificial Sequence: Synthetic oligonucleotide
guuguaucucuguugcucu

SEQ ID NO: 2470672 - RNA, 19 nt, Artificial Sequence
  Description of Artificial Sequence: Synthetic oligonucleotide
ccuuuauuagcucucuuca

SEQ ID NO: 2470673 - RNA, 19 nt, Artificial Sequence
  Description of Artificial Sequence: Synthetic oligonucleotide
ucaugucucuccucuguuu

SEQ ID NO: 2470674 - RNA, 19 nt, Artificial Sequence
  Description of Artificial Sequence: Synthetic oligonucleotide
gcgugucugguuuaagacc

SEQ ID NO: 2470675 - RNA, 19 nt, Artificial Sequence
  Description of Artificial Sequence: Synthetic oligonucleotide
cuggcgagugaaguauucc

SEQ ID NO: 2470676 - RNA, 19 nt, Artificial Sequence
  Description of Artificial Sequence: Synthetic oligonucleotide
acuugcccgaagcuggaau

SEQ ID NO: 2470677 - RNA, 19 nt, Artificial Sequence
  Description of Artificial Sequence: Synthetic oligonucleotide
gaaggcccucacaaaggcc

SEQ ID NO: 2470678 - RNA, 19 nt, Artificial Sequence
  Description of Artificial Sequence: Synthetic oligonucleotide
gaccguggcacaggucucg

SEQ ID NO: 2470679 - RNA, 19 nt, Artificial Sequence
  Description of Artificial Sequence: Synthetic oligonucleotide
gauauacugcuuccagagu

SEQ ID NO: 2470680 - RNA, 19 nt, Artificial Sequence
  Description of Artificial Sequence: Synthetic oligonucleotide
uucccuuuauuagcucucu

SEQ ID NO: 2470681 - RNA, 19 nt, Artificial Sequence
  Description of Artificial Sequence: Synthetic oligonucleotide
caauuucgauggugaacac

SEQ ID NO: 2470682 - RNA, 19 nt, Artificial Sequence
  Description of Artificial Sequence: Synthetic oligonucleotide
uuuaggagcuuagccugaa

SEQ ID NO: 2470683 - RNA, 19 nt, Artificial Sequence
  Description of Artificial Sequence: Synthetic oligonucleotide
agccuucauugucggcggc

SEQ ID NO: 2470684 - RNA, 19 nt, Artificial Sequence
  Description of Artificial Sequence: Synthetic oligonucleotide
agauggcucucgcaauccu

SEQ ID NO: 2470685 - RNA, 19 nt, Artificial Sequence
  Description of Artificial Sequence: Synthetic oligonucleotide
ucacuugcccgaagcugga

SEQ ID NO: 2470686 - RNA, 19 nt, Artificial Sequence
  Description of Artificial Sequence: Synthetic oligonucleotide
ggucaauuguucccuuuac

SEQ ID NO: 2470687 - RNA, 19 nt, Artificial Sequence
  Description of Artificial Sequence: Synthetic oligonucleotide
auccgcugugcccaagaga

SEQ ID NO: 2470688 - RNA, 19 nt, Artificial Sequence
  Description of Artificial Sequence: Synthetic oligonucleotide
cacaaaggccucagcccgc

SEQ ID NO: 2470689 - RNA, 19 nt, Artificial Sequence
  Description of Artificial Sequence: Synthetic oligonucleotide
ggugaacacgcaauuuagc

SEQ ID NO: 2470690 - RNA, 19 nt, Artificial Sequence
  Description of Artificial Sequence: Synthetic oligonucleotide
cugcgugucugguuuaaga

SEQ ID NO: 2470691 - RNA, 19 nt, Artificial Sequence
  Description of Artificial Sequence: Synthetic oligonucleotide
agagaggccuuuggauuuc

SEQ ID NO: 2470692 - RNA, 19 nt, Artificial Sequence
  Description of Artificial Sequence: Synthetic oligonucleotide
acuuggacuucgugacuga

SEQ ID NO: 2470693 - RNA, 19 nt, Artificial Sequence
  Description of Artificial Sequence: Synthetic oligonucleotide
cuucgggccucgcucacug

SEQ ID NO: 2470694 - RNA, 19 nt, Artificial Sequence
  Description of Artificial Sequence: Synthetic oligonucleotide
augcuuggucuccugcaga

SEQ ID NO: 2470695 - RNA, 19 nt, Artificial Sequence
  Description of Artificial Sequence: Synthetic oligonucleotide
uuaggagcuuagccugaau

SEQ ID NO: 2470696 - RNA, 19 nt, Artificial Sequence
  Description of Artificial Sequence: Synthetic oligonucleotide
gcagaaggauuccuguaac

SEQ ID NO: 2470697 - RNA, 19 nt, Artificial Sequence
  Description of Artificial Sequence: Synthetic oligonucleotide
uggcucaagugcgguaugc

SEQ ID NO: 2470698 - RNA, 19 nt, Artificial Sequence
  Description of Artificial Sequence: Synthetic oligonucleotide
cugguuuaagaccguggca

SEQ ID NO: 2470699 - RNA, 19 nt, Artificial Sequence
  Description of Artificial Sequence: Synthetic oligonucleotide
auacugcuuccagaguuca

SEQ ID NO: 2470700 - RNA, 19 nt, Artificial Sequence
  Description of Artificial Sequence: Synthetic oligonucleotide
caugguaaaucacagccuu

SEQ ID NO: 2470701 - RNA, 19 nt, Artificial Sequence
  Description of Artificial Sequence: Synthetic oligonucleotide
ucauugucggcggcuuccc

SEQ ID NO: 2470702 - RNA, 19 nt, Artificial Sequence
  Description of Artificial Sequence: Synthetic oligonucleotide
cuuuaggagcuuagccuga

SEQ ID NO: 2470703 - RNA, 19 nt, Artificial Sequence
  Description of Artificial Sequence: Synthetic oligonucleotide
caauuuagcuuggggauaa

SEQ ID NO: 2470704 - RNA, 19 nt, Artificial Sequence
  Description of Artificial Sequence: Synthetic oligonucleotide
cugccuuuaggagcuuagc

SEQ ID NO: 2470705 - RNA, 19 nt, Artificial Sequence
  Description of Artificial Sequence: Synthetic oligonucleotide
ggaaaugaagucaucaauu

SEQ ID NO: 2470706 - RNA, 19 nt, Artificial Sequence
  Description of Artificial Sequence: Synthetic oligonucleotide
cauugucggcggcuucccg

SEQ ID NO: 2470707 - RNA, 19 nt, Artificial Sequence
  Description of Artificial Sequence: Synthetic oligonucleotide
uaagaccguggcacagguc

SEQ ID NO: 2470708 - RNA, 19 nt, Artificial Sequence
  Description of Artificial Sequence: Synthetic oligonucleotide
gggcacuuggacuucguga

SEQ ID NO: 2470709 - RNA, 19 nt, Artificial Sequence
  Description of Artificial Sequence: Synthetic oligonucleotide
uuguucccuuuacuuugaa

SEQ ID NO: 2470710 - RNA, 19 nt, Artificial Sequence
  Description of Artificial Sequence: Synthetic oligonucleotide
acuucuuggcagaccucuc

SEQ ID NO: 2470711 - RNA, 19 nt, Artificial Sequence
  Description of Artificial Sequence: Synthetic oligonucleotide
aguucacaggucaauuguu

SEQ ID NO: 2470712 - RNA, 19 nt, Artificial Sequence
  Description of Artificial Sequence: Synthetic oligonucleotide
acacgcaauuuagcuuggg

SEQ ID NO: 2470713 - RNA, 19 nt, Artificial Sequence
  Description of Artificial Sequence: Synthetic oligonucleotide
uucuggcgagugaaguauu

SEQ ID NO: 2470714 - RNA, 19 nt, Artificial Sequence
  Description of Artificial Sequence: Synthetic oligonucleotide
gguuuaagaccguggcaca

SEQ ID NO: 2470715 - RNA, 19 nt, Artificial Sequence
  Description of Artificial Sequence: Synthetic oligonucleotide
cagccuugcgcuguagaug

SEQ ID NO: 2470716 - RNA, 19 nt, Artificial Sequence
  Description of Artificial Sequence: Synthetic oligonucleotide
gcagaccucucacuugccc

SEQ ID NO: 2470717 - RNA, 19 nt, Artificial Sequence
  Description of Artificial Sequence: Synthetic oligonucleotide
gaggggcacuuggacuucg

SEQ ID NO: 2470718 - RNA, 19 nt, Artificial Sequence
  Description of Artificial Sequence: Synthetic oligonucleotide
agugcgguaugcuccucuu

SEQ ID NO: 2470719 - RNA, 19 nt, Artificial Sequence
  Description of Artificial Sequence: Synthetic oligonucleotide
ucucgcaauccugcuggcu

SEQ ID NO: 2470720 - RNA, 19 nt, Artificial Sequence
  Description of Artificial Sequence: Synthetic oligonucleotide
cucuccucuguuuggcaga

SEQ ID NO: 2470721 - RNA, 19 nt, Artificial Sequence
  Description of Artificial Sequence: Synthetic oligonucleotide
gggcaugguaaaucacagc

SEQ ID NO: 2470722 - RNA, 19 nt, Artificial Sequence
  Description of Artificial Sequence: Synthetic oligonucleotide
cacagccuucauugucggc

SEQ ID NO: 2470723 - RNA, 19 nt, Artificial Sequence
  Description of Artificial Sequence: Synthetic oligonucleotide
agcuuggggauaacuuuca

SEQ ID NO: 2470724 - RNA, 19 nt, Artificial Sequence
  Description of Artificial Sequence: Synthetic oligonucleotide
ugcgcuguagauggcucuc

SEQ ID NO: 2470725 - RNA, 19 nt, Artificial Sequence
  Description of Artificial Sequence: Synthetic oligonucleotide
ucgcucacugcuucccuuu

SEQ ID NO: 2470726 - RNA, 19 nt, Artificial Sequence
  Description of Artificial Sequence: Synthetic oligonucleotide
gcacaggucucggauauac

SEQ ID NO: 2470727 - RNA, 19 nt, Artificial Sequence
  Description of Artificial Sequence: Synthetic oligonucleotide
cuucagcagcuuucggcca

SEQ ID NO: 2470728 - RNA, 19 nt, Artificial Sequence
  Description of Artificial Sequence: Synthetic oligonucleotide
cucucgcaauccugcuggc

SEQ ID NO: 2470729 - RNA, 19 nt, Artificial Sequence
  Description of Artificial Sequence: Synthetic oligonucleotide
acuucgugacugaaauaau

SEQ ID NO: 2470730 - RNA, 19 nt, Artificial Sequence
  Description of Artificial Sequence: Synthetic oligonucleotide
uggcucucgcaauccugcu

SEQ ID NO: 2470731 - RNA, 19 nt, Artificial Sequence
  Description of Artificial Sequence: Synthetic oligonucleotide
gaaucauuuguggcugcgu

SEQ ID NO: 2470732 - RNA, 19 nt, Artificial Sequence
  Description of Artificial Sequence: Synthetic oligonucleotide
cucggauauacugcuucca

SEQ ID NO: 2470733 - RNA, 19 nt, Artificial Sequence
  Description of Artificial Sequence: Synthetic oligonucleotide
cuuuggcuucuggcgagug

SEQ ID NO: 2470734 - RNA, 19 nt, Artificial Sequence
  Description of Artificial Sequence: Synthetic oligonucleotide
gauggugaacacgcaauuu

SEQ ID NO: 2470735 - RNA, 19 nt, Artificial Sequence
  Description of Artificial Sequence: Synthetic oligonucleotide
ucggcggcuucccgcgagc

SEQ ID NO: 2470736 - RNA, 19 nt, Artificial Sequence
  Description of Artificial Sequence: Synthetic oligonucleotide
acaaauccgcugugcccaa

SEQ ID NO: 2470737 - RNA, 19 nt, Artificial Sequence
  Description of Artificial Sequence: Synthetic oligonucleotide
cuuggcagaccucucacuu

SEQ ID NO: 2470738 - RNA, 19 nt, Artificial Sequence
  Description of Artificial Sequence: Synthetic oligonucleotide
ucggccaccgggacucuuu

SEQ ID NO: 2470739 - RNA, 19 nt, Artificial Sequence
  Description of Artificial Sequence: Synthetic oligonucleotide
cugcuucccuuuauuagcu

SEQ ID NO: 2470740 - RNA, 19 nt, Artificial Sequence
  Description of Artificial Sequence: Synthetic oligonucleotide
uugcccgaagcuggaauuu

SEQ ID NO: 2470741 - RNA, 19 nt, Artificial Sequence
  Description of Artificial Sequence: Synthetic oligonucleotide
cuggcucaagugcgguaug

SEQ ID NO: 2470742 - RNA, 19 nt, Artificial Sequence
  Description of Artificial Sequence: Synthetic oligonucleotide
agaccguggcacaggucuc

SEQ ID NO: 2470743 - RNA, 19 nt, Artificial Sequence
  Description of Artificial Sequence: Synthetic oligonucleotide
gucggcggcuucccgcgag

SEQ ID NO: 2470744 - RNA, 19 nt, Artificial Sequence
  Description of Artificial Sequence: Synthetic oligonucleotide
accgggacucuuucugguu

SEQ ID NO: 2470745 - RNA, 19 nt, Artificial Sequence
  Description of Artificial Sequence: Synthetic oligonucleotide
gcuguagauggcucucgca

SEQ ID NO: 2470746 - RNA, 19 nt, Artificial Sequence
  Description of Artificial Sequence: Synthetic oligonucleotide
gguucccagcuccuguaca

SEQ ID NO: 2470747 - RNA, 19 nt, Artificial Sequence
  Description of Artificial Sequence: Synthetic oligonucleotide
cacauaggaggggcacuug

SEQ ID NO: 2470748 - RNA, 19 nt, Artificial Sequence
  Description of Artificial Sequence: Synthetic oligonucleotide
caauccugcuggcucaagu

SEQ ID NO: 2470749 - RNA, 19 nt, Artificial Sequence
  Description of Artificial Sequence: Synthetic oligonucleotide
auagcaccaugaagaucug

SEQ ID NO: 2470750 - RNA, 19 nt, Artificial Sequence
  Description of Artificial Sequence: Synthetic oligonucleotide
cuucuggcgagugaaguau

SEQ ID NO: 2470751 - RNA, 19 nt, Artificial Sequence
  Description of Artificial Sequence: Synthetic oligonucleotide
ccgggacucuuucugguug

SEQ ID NO: 2470752 - RNA, 19 nt, Artificial Sequence
  Description of Artificial Sequence: Synthetic oligonucleotide
gugcgguaugcuccucuuc

SEQ ID NO: 2470753 - RNA, 19 nt, Artificial Sequence
  Description of Artificial Sequence: Synthetic oligonucleotide
guggcacaggucucggaua

SEQ ID NO: 2470754 - RNA, 19 nt, Artificial Sequence
  Description of Artificial Sequence: Synthetic oligonucleotide
caaauccgcugugcccaag

SEQ ID NO: 2470755 - RNA, 19 nt, Artificial Sequence
  Description of Artificial Sequence: Synthetic oligonucleotide
ggcgagugaaguauuccaa

SEQ ID NO: 2470756 - RNA, 19 nt, Artificial Sequence
  Description of Artificial Sequence: Synthetic oligonucleotide
ucccgcgagcucuggugaa

SEQ ID NO: 2470757 - RNA, 19 nt, Artificial Sequence
  Description of Artificial Sequence: Synthetic oligonucleotide
cuugcccgaagcuggaauu

SEQ ID NO: 2470758 - RNA, 19 nt, Artificial Sequence
  Description of Artificial Sequence: Synthetic oligonucleotide
caccaugaagaucugccuu

SEQ ID NO: 2470759 - RNA, 19 nt, Artificial Sequence
  Description of Artificial Sequence: Synthetic oligonucleotide
ugucggcggcuucccgcga

SEQ ID NO: 2470760 - RNA, 19 nt, Artificial Sequence
  Description of Artificial Sequence: Synthetic oligonucleotide
gcuucuggcgagugaagua

SEQ ID NO: 2470761 - RNA, 19 nt, Artificial Sequence
  Description of Artificial Sequence: Synthetic oligonucleotide
agucuccuucgggccucgc

SEQ ID NO: 2470762 - RNA, 19 nt, Artificial Sequence
  Description of Artificial Sequence: Synthetic oligonucleotide
gcaauuuagcuuggggaua

SEQ ID NO: 2470763 - RNA, 19 nt, Artificial Sequence
  Description of Artificial Sequence: Synthetic oligonucleotide
gcccgaagcuggaauuugc

SEQ ID NO: 2470764 - RNA, 19 nt, Artificial Sequence
  Description of Artificial Sequence: Synthetic oligonucleotide
aucugccuuuaggagcuua

SEQ ID NO: 2470765 - RNA, 19 nt, Artificial Sequence
  Description of Artificial Sequence: Synthetic oligonucleotide
gcgcuguagauggcucucg

SEQ ID NO: 2470766 - RNA, 19 nt, Artificial Sequence
  Description of Artificial Sequence: Synthetic oligonucleotide
cggauauacugcuuccaga

SEQ ID NO: 2470767 - RNA, 19 nt, Artificial Sequence
  Description of Artificial Sequence: Synthetic oligonucleotide
ccgcuggacaaauccgcug

SEQ ID NO: 2470768 - RNA, 19 nt, Artificial Sequence
  Description of Artificial Sequence: Synthetic oligonucleotide
ccaagaccacagccuugcg

SEQ ID NO: 2470769 - RNA, 19 nt, Artificial Sequence
  Description of Artificial Sequence: Synthetic oligonucleotide
gcaugguaaaucacagccu

SEQ ID NO: 2470770 - RNA, 19 nt, Artificial Sequence
  Description of Artificial Sequence: Synthetic oligonucleotide
gucuccuucgggccucgcu

SEQ ID NO: 2470771 - RNA, 19 nt, Artificial Sequence
  Description of Artificial Sequence: Synthetic oligonucleotide
uggcugcgugucugguuua

SEQ ID NO: 2470772 - RNA, 19 nt, Artificial Sequence
  Description of Artificial Sequence: Synthetic oligonucleotide
cgcaauuuagcuuggggau

SEQ ID NO: 2470773 - RNA, 19 nt, Artificial Sequence
  Description of Artificial Sequence: Synthetic oligonucleotide
gcugcgugucugguuuaag

SEQ ID NO: 2470774 - RNA, 19 nt, Artificial Sequence
  Description of Artificial Sequence: Synthetic oligonucleotide
cgcuguagauggcucucgc

SEQ ID NO: 2470775 - RNA, 19 nt, Artificial Sequence
  Description of Artificial Sequence: Synthetic oligonucleotide
caccgggacucuuucuggu

SEQ ID NO: 2470776 - RNA, 19 nt, Artificial Sequence
  Description of Artificial Sequence: Synthetic oligonucleotide
cucaugucucuccucuguu

SEQ ID NO: 2470777 - RNA, 19 nt, Artificial Sequence
  Description of Artificial Sequence: Synthetic oligonucleotide
gggccucgcucacugcuuc

SEQ ID NO: 2470778 - RNA, 19 nt, Artificial Sequence
  Description of Artificial Sequence: Synthetic oligonucleotide
cccucacaaaggccucagc

SEQ ID NO: 2470779 - RNA, 19 nt, Artificial Sequence
  Description of Artificial Sequence: Synthetic oligonucleotide
uuucggccaccgggacucu

SEQ ID NO: 2470780 - RNA, 19 nt, Artificial Sequence
  Description of Artificial Sequence: Synthetic oligonucleotide
caagugcgguaugcuccuc

SEQ ID NO: 2470781 - RNA, 19 nt, Artificial Sequence
  Description of Artificial Sequence: Synthetic oligonucleotide
gggauaacuuucagauggu

SEQ ID NO: 2470782 - RNA, 19 nt, Artificial Sequence
  Description of Artificial Sequence: Synthetic oligonucleotide
gcuggcucaagugcgguau

SEQ ID NO: 2470783 - RNA, 19 nt, Artificial Sequence
  Description of Artificial Sequence: Synthetic oligonucleotide
ccucaugucucuccucugu

SEQ ID NO: 2470784 - RNA, 19 nt, Artificial Sequence
  Description of Artificial Sequence: Synthetic oligonucleotide
gcggcuucccgcgagcucu

SEQ ID NO: 2470785 - RNA, 19 nt, Artificial Sequence
  Description of Artificial Sequence: Synthetic oligonucleotide
uucggccaccgggacucuu

SEQ ID NO: 2470786 - RNA, 19 nt, Artificial Sequence
  Description of Artificial Sequence: Synthetic oligonucleotide
ggcucaagugcgguaugcu

SEQ ID NO: 2470787 - RNA, 19 nt, Artificial Sequence
  Description of Artificial Sequence: Synthetic oligonucleotide
cucagcccgcuggguuccc

SEQ ID NO: 2470788 - RNA, 19 nt, Artificial Sequence
  Description of Artificial Sequence: Synthetic oligonucleotide
gcacuuggacuucgugacu

SEQ ID NO: 2470789 - RNA, 19 nt, Artificial Sequence
  Description of Artificial Sequence: Synthetic oligonucleotide
ucgugcucuuuggcuucuu

SEQ ID NO: 2470790 - RNA, 19 nt, Artificial Sequence
  Description of Artificial Sequence: Synthetic oligonucleotide
cccgcgagcucuggugaag

SEQ ID NO: 2470791 - RNA, 19 nt, Artificial Sequence
  Description of Artificial Sequence: Synthetic oligonucleotide
gugucugguuuaagaccgu

SEQ ID NO: 2470792 - RNA, 19 nt, Artificial Sequence
  Description of Artificial Sequence: Synthetic oligonucleotide
cccgcuggguucccagcuc

SEQ ID NO: 2470793 - RNA, 19 nt, Artificial Sequence
  Description of Artificial Sequence: Synthetic oligonucleotide
cacuugcccgaagcuggaa

SEQ ID NO: 2470794 - RNA, 19 nt, Artificial Sequence
  Description of Artificial Sequence: Synthetic oligonucleotide
ggcugcgugucugguuuaa

SEQ ID NO: 2470795 - RNA, 19 nt, Artificial Sequence
  Description of Artificial Sequence: Synthetic oligonucleotide
ccgaagcuggaauuugcuu

SEQ ID NO: 2470796 - RNA, 19 nt, Artificial Sequence
  Description of Artificial Sequence: Synthetic oligonucleotide
ccuugcgcuguagauggcu

SEQ ID NO: 2470797 - RNA, 19 nt, Artificial Sequence
  Description of Artificial Sequence: Synthetic oligonucleotide
cgcgagcucuggugaaguc

SEQ ID NO: 2470798 - RNA, 19 nt, Artificial Sequence
  Description of Artificial Sequence: Synthetic oligonucleotide
ggucuccugcagaaggauu

SEQ ID NO: 2470799 - RNA, 19 nt, Artificial Sequence
  Description of Artificial Sequence: Synthetic oligonucleotide
gcuucccgcgagcucuggu

SEQ ID NO: 2470800 - RNA, 19 nt, Artificial Sequence
  Description of Artificial Sequence: Synthetic oligonucleotide
gccuugcgcuguagauggc

SEQ ID NO: 2470801 - RNA, 19 nt, Artificial Sequence
  Description of Artificial Sequence: Synthetic oligonucleotide
ggccaccgggacucuuucu

SEQ ID NO: 2470802 - RNA, 19 nt, Artificial Sequence
  Description of Artificial Sequence: Synthetic oligonucleotide
cggccaccgggacucuuuc

SEQ ID NO: 2470803 - RNA, 19 nt, Artificial Sequence
  Description of Artificial Sequence: Synthetic oligonucleotide
ggcacaggucucggauaua

SEQ ID NO: 2470804 - RNA, 19 nt, Artificial Sequence
  Description of Artificial Sequence: Synthetic oligonucleotide
ccacauaggaggggcacuu

SEQ ID NO: 2470805 - RNA, 19 nt, Artificial Sequence
  Description of Artificial Sequence: Synthetic oligonucleotide
ccgcgagcucuggugaagu

SEQ ID NO: 2470806 - RNA, 19 nt, Artificial Sequence
  Description of Artificial Sequence: Synthetic oligonucleotide
ccuucgggccucgcucacu

SEQ ID NO: 2470807 - RNA, 19 nt, Artificial Sequence
  Description of Artificial Sequence: Synthetic oligonucleotide
cgggccucgcucacugcuu

SEQ ID NO: 2470808 - RNA, 19 nt, Artificial Sequence
  Description of Artificial Sequence: Synthetic oligonucleotide
cggcggcuucccgcgagcu

SEQ ID NO: 2470809 - RNA, 19 nt, Artificial Sequence
  Description of Artificial Sequence: Synthetic oligonucleotide
aauuaagccacacugaacc

SEQ ID NO: 2470810 - RNA, 19 nt, Artificial Sequence
  Description of Artificial Sequence: Synthetic oligonucleotide
gauauagccacauuggagg

SEQ ID NO: 2470811 - RNA, 19 nt, Artificial Sequence
  Description of Artificial Sequence: Synthetic oligonucleotide
uguaucuccaauaaaaggc

SEQ ID NO: 2470812 - RNA, 19 nt, Artificial Sequence
  Description of Artificial Sequence: Synthetic oligonucleotide
uuugauauagccacauugg

SEQ ID NO: 2470813 - RNA, 19 nt, Artificial Sequence
  Description of Artificial Sequence: Synthetic oligonucleotide
gaguauauuaucuuccugg

SEQ ID NO: 2470814 - RNA, 19 nt, Artificial Sequence
  Description of Artificial Sequence: Synthetic oligonucleotide
uuuugauauagccacauug

SEQ ID NO: 2470815 - RNA, 19 nt, Artificial Sequence
  Description of Artificial Sequence: Synthetic oligonucleotide
uauauuaucuuccuggaac

SEQ ID NO: 2470816 - RNA, 19 nt, Artificial Sequence
  Description of Artificial Sequence: Synthetic oligonucleotide
aacggcuucauguuuagac

SEQ ID NO: 2470817 - RNA, 19 nt, Artificial Sequence
  Description of Artificial Sequence: Synthetic oligonucleotide
uugguauucagccacacag

SEQ ID NO: 2470818 - RNA, 19 nt, Artificial Sequence
  Description of Artificial Sequence: Synthetic oligonucleotide
ucuguuuaaacuucuaagc

SEQ ID NO: 2470819 - RNA, 19 nt, Artificial Sequence
  Description of Artificial Sequence: Synthetic oligonucleotide
uguuuaaacuucuaagcag

SEQ ID NO: 2470820 - RNA, 19 nt, Artificial Sequence
  Description of Artificial Sequence: Synthetic oligonucleotide
uauguaucuccaauaaaag

SEQ ID NO: 2470821 - RNA, 19 nt, Artificial Sequence
  Description of Artificial Sequence: Synthetic oligonucleotide
cucuggacaacacagaccg

SEQ ID NO: 2470822 - RNA, 19 nt, Artificial Sequence
  Description of Artificial Sequence: Synthetic oligonucleotide
aguucugugggacucuucc

SEQ ID NO: 2470823 - RNA, 19 nt, Artificial Sequence
  Description of Artificial Sequence: Synthetic oligonucleotide
aguccuacguacuucaagg

SEQ ID NO: 2470824 - RNA, 19 nt, Artificial Sequence
  Description of Artificial Sequence: Synthetic oligonucleotide
uaugcuugcucacagggcc

SEQ ID NO: 2470825 - RNA, 19 nt, Artificial Sequence
  Description of Artificial Sequence: Synthetic oligonucleotide
aucuguuuaaacuucuaag

SEQ ID NO: 2470826 - RNA, 19 nt, Artificial Sequence
  Description of Artificial Sequence: Synthetic oligonucleotide
auagaguauauuaucuucc

SEQ ID NO: 2470827 - RNA, 19 nt, Artificial Sequence
  Description of Artificial Sequence: Synthetic oligonucleotide
aauacuuggaacagaguuc

SEQ ID NO: 2470828 - RNA, 19 nt, Artificial Sequence
  Description of Artificial Sequence: Synthetic oligonucleotide
cuugccuugguauucagcc

SEQ ID NO: 2470829 - RNA, 19 nt, Artificial Sequence
  Description of Artificial Sequence: Synthetic oligonucleotide
uuucuguauauucuucuag

SEQ ID NO: 2470830 - RNA, 19 nt, Artificial Sequence
  Description of Artificial Sequence: Synthetic oligonucleotide
acacagaccguacuaaacg

SEQ ID NO: 2470831 - RNA, 19 nt, Artificial Sequence
  Description of Artificial Sequence: Synthetic oligonucleotide
auguuuagacguuuucccc

SEQ ID NO: 2470832 - RNA, 19 nt, Artificial Sequence
  Description of Artificial Sequence: Synthetic oligonucleotide
cauguuuagacguuuuccc

SEQ ID NO: 2470833 - RNA, 19 nt, Artificial Sequence
  Description of Artificial Sequence: Synthetic oligonucleotide
agucgaagaagccacuugg

SEQ ID NO: 2470834 - RNA, 19 nt, Artificial Sequence
  Description of Artificial Sequence: Synthetic oligonucleotide
ucuucguccaugaaaugag

SEQ ID NO: 2470835 - RNA, 19 nt, Artificial Sequence
  Description of Artificial Sequence: Synthetic oligonucleotide
uacuaaacgagcauuacuu

SEQ ID NO: 2470836 - RNA, 19 nt, Artificial Sequence
  Description of Artificial Sequence: Synthetic oligonucleotide
uggagaaacucgcaagagg

SEQ ID NO: 2470837 - RNA, 19 nt, Artificial Sequence
  Description of Artificial Sequence: Synthetic oligonucleotide
uccaaucaaucacacacag

SEQ ID NO: 2470838 - RNA, 19 nt, Artificial Sequence
  Description of Artificial Sequence: Synthetic oligonucleotide
ugaaccugaaaacuguagu

SEQ ID NO: 2470839 - RNA, 19 nt, Artificial Sequence
  Description of Artificial Sequence: Synthetic oligonucleotide
uccaauaaaaggcuuuggu

SEQ ID NO: 2470840 - RNA, 19 nt, Artificial Sequence
  Description of Artificial Sequence: Synthetic oligonucleotide
uucguccaugaaaugaggg

SEQ ID NO: 2470841 - RNA, 19 nt, Artificial Sequence
  Description of Artificial Sequence: Synthetic oligonucleotide
uauucuucuagucgaagaa

SEQ ID NO: 2470842 - RNA, 19 nt, Artificial Sequence
  Description of Artificial Sequence: Synthetic oligonucleotide
guuuaaacuucuaagcagc

SEQ ID NO: 2470843 - RNA, 19 nt, Artificial Sequence
  Description of Artificial Sequence: Synthetic oligonucleotide
aucuuuauaggccaccaca

SEQ ID NO: 2470844 - RNA, 19 nt, Artificial Sequence
  Description of Artificial Sequence: Synthetic oligonucleotide
uggguugucauauguaucu

SEQ ID NO: 2470845 - RNA, 19 nt, Artificial Sequence
  Description of Artificial Sequence: Synthetic oligonucleotide
uuuauaggccaccacaauu

SEQ ID NO: 2470846 - RNA, 19 nt, Artificial Sequence
  Description of Artificial Sequence: Synthetic oligonucleotide
uugauauagccacauugga

SEQ ID NO: 2470847 - RNA, 19 nt, Artificial Sequence
  Description of Artificial Sequence: Synthetic oligonucleotide
uucuagucgaagaagccac

SEQ ID NO: 2470848 - RNA, 19 nt, Artificial Sequence
  Description of Artificial Sequence: Synthetic oligonucleotide
uggaacaaugacucugggg

SEQ ID NO: 2470849 - RNA, 19 nt, Artificial Sequence
  Description of Artificial Sequence: Synthetic oligonucleotide
accugaaaacuguaguggg

SEQ ID NO: 2470850 - RNA, 19 nt, Artificial Sequence
  Description of Artificial Sequence: Synthetic oligonucleotide
auauuaucuuccuggaaca

SEQ ID NO: 2470851 - RNA, 19 nt, Artificial Sequence
  Description of Artificial Sequence: Synthetic oligonucleotide
ucuuuauaggccaccacaa

SEQ ID NO: 2470852 - RNA, 19 nt, Artificial Sequence
  Description of Artificial Sequence: Synthetic oligonucleotide
caaucaaucacacacagcu

SEQ ID NO: 2470853 - RNA, 19 nt, Artificial Sequence
  Description of Artificial Sequence: Synthetic oligonucleotide
uacgccacaaccuguagug

SEQ ID NO: 2470854 - RNA, 19 nt, Artificial Sequence
  Description of Artificial Sequence: Synthetic oligonucleotide
ugguuuacagcacccaugu

SEQ ID NO: 2470855 - RNA, 19 nt, Artificial Sequence
  Description of Artificial Sequence: Synthetic oligonucleotide
cucuccucauugaagauag

SEQ ID NO: 2470856 - RNA, 19 nt, Artificial Sequence
  Description of Artificial Sequence: Synthetic oligonucleotide
aacacagaccguacuaaac

SEQ ID NO: 2470857 - RNA, 19 nt, Artificial Sequence
  Description of Artificial Sequence: Synthetic oligonucleotide
gacucuggggucuggaccg

SEQ ID NO: 2470858 - RNA, 19 nt, Artificial Sequence
  Description of Artificial Sequence: Synthetic oligonucleotide
aguauauuaucuuccugga

SEQ ID NO: 2470859 - RNA, 19 nt, Artificial Sequence
  Description of Artificial Sequence: Synthetic oligonucleotide
aaacuucuaagcagccugc

SEQ ID NO: 2470860 - RNA, 19 nt, Artificial Sequence
  Description of Artificial Sequence: Synthetic oligonucleotide
uguuuagacguuuuccccu

SEQ ID NO: 2470861 - RNA, 19 nt, Artificial Sequence
  Description of Artificial Sequence: Synthetic oligonucleotide
ucgaagaagccacuuggcc

SEQ ID NO: 2470862 - RNA, 19 nt, Artificial Sequence
  Description of Artificial Sequence: Synthetic oligonucleotide
ucuaguccggcuuuggaac

SEQ ID NO: 2470863 - RNA, 19 nt, Artificial Sequence
  Description of Artificial Sequence: Synthetic oligonucleotide
ugucuuccaaucaaucaca

SEQ ID NO: 2470864 - RNA, 19 nt, Artificial Sequence
  Description of Artificial Sequence: Synthetic oligonucleotide
ugucauauguaucuccaau

SEQ ID NO: 2470865 - RNA, 19 nt, Artificial Sequence
  Description of Artificial Sequence: Synthetic oligonucleotide
uccuacguacuucaaggcc

SEQ ID NO: 2470866 - RNA, 19 nt, Artificial Sequence
  Description of Artificial Sequence: Synthetic oligonucleotide
ucuauugcuucguaagagu

SEQ ID NO: 2470867 - RNA, 19 nt, Artificial Sequence
  Description of Artificial Sequence: Synthetic oligonucleotide
aggggacccaucuuuauag

SEQ ID NO: 2470868 - RNA, 19 nt, Artificial Sequence
  Description of Artificial Sequence: Synthetic oligonucleotide
acggcuucauguuuagacg

SEQ ID NO: 2470869 - RNA, 19 nt, Artificial Sequence
  Description of Artificial Sequence: Synthetic oligonucleotide
ugcucacagggccauagag

SEQ ID NO: 2470870 - RNA, 19 nt, Artificial Sequence
  Description of Artificial Sequence: Synthetic oligonucleotide
aacuguagugggcaucgug

SEQ ID NO: 2470871 - RNA, 19 nt, Artificial Sequence
  Description of Artificial Sequence: Synthetic oligonucleotide
aguggagaaacucgcaaga

SEQ ID NO: 2470872 - RNA, 19 nt, Artificial Sequence
  Description of Artificial Sequence: Synthetic oligonucleotide
ugaagauaggaaaccaguu

SEQ ID NO: 2470873 - RNA, 19 nt, Artificial Sequence
  Description of Artificial Sequence: Synthetic oligonucleotide
uggccacacaaacaagggg

SEQ ID NO: 2470874 - RNA, 19 nt, Artificial Sequence
  Description of Artificial Sequence: Synthetic oligonucleotide
auaugcuggacacuuuuga

SEQ ID NO: 2470875 - RNA, 19 nt, Artificial Sequence
  Description of Artificial Sequence: Synthetic oligonucleotide
uggcccaauacuuggaaca

SEQ ID NO: 2470876 - RNA, 19 nt, Artificial Sequence
  Description of Artificial Sequence: Synthetic oligonucleotide
uucuucuggccacacaaac

SEQ ID NO: 2470877 - RNA, 19 nt, Artificial Sequence
  Description of Artificial Sequence: Synthetic oligonucleotide
auaggaaaccaguucugug

SEQ ID NO: 2470878 - RNA, 19 nt, Artificial Sequence
  Description of Artificial Sequence: Synthetic oligonucleotide
gacacuuuugauauagcca

SEQ ID NO: 2470879 - RNA, 19 nt, Artificial Sequence
  Description of Artificial Sequence: Synthetic oligonucleotide
aguggguugucauauguau

SEQ ID NO: 2470880 - RNA, 19 nt, Artificial Sequence
  Description of Artificial Sequence: Synthetic oligonucleotide
agaguauauuaucuuccug

SEQ ID NO: 2470881 - RNA, 19 nt, Artificial Sequence
  Description of Artificial Sequence: Synthetic oligonucleotide
agagggcuugguuuugugg

SEQ ID NO: 2470882 - RNA, 19 nt, Artificial Sequence
  Description of Artificial Sequence: Synthetic oligonucleotide
cuguuuaaacuucuaagca

SEQ ID NO: 2470883 - RNA, 19 nt, Artificial Sequence
  Description of Artificial Sequence: Synthetic oligonucleotide
aacaaugacucuggggucu

SEQ ID NO: 2470884 - RNA, 19 nt, Artificial Sequence
  Description of Artificial Sequence: Synthetic oligonucleotide
agggccauagaguauauua

SEQ ID NO: 2470885 - RNA, 19 nt, Artificial Sequence
  Description of Artificial Sequence: Synthetic oligonucleotide
ggaacaaugacucuggggu

SEQ ID NO: 2470886 - RNA, 19 nt, Artificial Sequence
  Description of Artificial Sequence: Synthetic oligonucleotide
uugcacaccacugauuucu

SEQ ID NO: 2470887 - RNA, 19 nt, Artificial Sequence
  Description of Artificial Sequence: Synthetic oligonucleotide
ucuccaauaaaaggcuuug

SEQ ID NO: 2470888 - RNA, 19 nt, Artificial Sequence
  Description of Artificial Sequence: Synthetic oligonucleotide
ugccuugguauucagccac

SEQ ID NO: 2470889 - RNA, 19 nt, Artificial Sequence
  Description of Artificial Sequence: Synthetic oligonucleotide
cagaccguacuaaacgagc

SEQ ID NO: 2470890 - RNA, 19 nt, Artificial Sequence
  Description of Artificial Sequence: Synthetic oligonucleotide
uacuucaaggccucgugcu

SEQ ID NO: 2470891 - RNA, 19 nt, Artificial Sequence
  Description of Artificial Sequence: Synthetic oligonucleotide
uuaagccacacugaaccug

SEQ ID NO: 2470892 - RNA, 19 nt, Artificial Sequence
  Description of Artificial Sequence: Synthetic oligonucleotide
gaaaugagggugggcaggg

SEQ ID NO: 2470893 - RNA, 19 nt, Artificial Sequence
  Description of Artificial Sequence: Synthetic oligonucleotide
ggacacuuuugauauagcc

SEQ ID NO: 2470894 - RNA, 19 nt, Artificial Sequence
  Description of Artificial Sequence: Synthetic oligonucleotide
caugaaaugagggugggca

SEQ ID NO: 2470895 - RNA, 19 nt, Artificial Sequence
  Description of Artificial Sequence: Synthetic oligonucleotide
ggaacagaguucuucgucc

SEQ ID NO: 2470896 - RNA, 19 nt, Artificial Sequence
  Description of Artificial Sequence: Synthetic oligonucleotide
cugaaccugaaaacuguag

SEQ ID NO: 2470897 - RNA, 19 nt, Artificial Sequence
  Description of Artificial Sequence: Synthetic oligonucleotide
ucuugugugugguuucaca

SEQ ID NO: 2470898 - RNA, 19 nt, Artificial Sequence
  Description of Artificial Sequence: Synthetic oligonucleotide
aaccaguucugugggacuc

SEQ ID NO: 2470899 - RNA, 19 nt, Artificial Sequence
  Description of Artificial Sequence: Synthetic oligonucleotide
augaaaugagggugggcag

SEQ ID NO: 2470900 - RNA, 19 nt, Artificial Sequence
  Description of Artificial Sequence: Synthetic oligonucleotide
uagucgaagaagccacuug

SEQ ID NO: 2470901 - RNA, 19 nt, Artificial Sequence
  Description of Artificial Sequence: Synthetic oligonucleotide
gucagaaacggcuucaugu

SEQ ID NO: 2470902 - RNA, 19 nt, Artificial Sequence
  Description of Artificial Sequence: Synthetic oligonucleotide
aauaugcuggacacuuuug

SEQ ID NO: 2470903 - RNA, 19 nt, Artificial Sequence
  Description of Artificial Sequence: Synthetic oligonucleotide
agagcuugcacaccacuga

SEQ ID NO: 2470904 - RNA, 19 nt, Artificial Sequence
  Description of Artificial Sequence: Synthetic oligonucleotide
gaaacggcuucauguuuag

SEQ ID NO: 2470905 - RNA, 19 nt, Artificial Sequence
  Description of Artificial Sequence: Synthetic oligonucleotide
acaaacaaggggaagugga

SEQ ID NO: 2470906 - RNA, 19 nt, Artificial Sequence
  Description of Artificial Sequence: Synthetic oligonucleotide
cacuuggcccaauacuugg

SEQ ID NO: 2470907 - RNA, 19 nt, Artificial Sequence
  Description of Artificial Sequence: Synthetic oligonucleotide
gucuauugcuucguaagag

SEQ ID NO: 2470908 - RNA, 19 nt, Artificial Sequence
  Description of Artificial Sequence: Synthetic oligonucleotide
acuucuaagcagccugcag

SEQ ID NO: 2470909 - RNA, 19 nt, Artificial Sequence
  Description of Artificial Sequence: Synthetic oligonucleotide
agaaacucgcaagagggcu

SEQ ID NO: 2470910 - RNA, 19 nt, Artificial Sequence
  Description of Artificial Sequence: Synthetic oligonucleotide
uccccuuuacuuucucuag

SEQ ID NO: 2470911 - RNA, 19 nt, Artificial Sequence
  Description of Artificial Sequence: Synthetic oligonucleotide
cuucguccaugaaaugagg

SEQ ID NO: 2470912 - RNA, 19 nt, Artificial Sequence
  Description of Artificial Sequence: Synthetic oligonucleotide
uucuaagcagccugcagau

SEQ ID NO: 2470913 - RNA, 19 nt, Artificial Sequence
  Description of Artificial Sequence: Synthetic oligonucleotide
aaaccaguucugugggacu

SEQ ID NO: 2470914 - RNA, 19 nt, Artificial Sequence
  Description of Artificial Sequence: Synthetic oligonucleotide
cuucuaagcagccugcaga

SEQ ID NO: 2470915 - RNA, 19 nt, Artificial Sequence
  Description of Artificial Sequence: Synthetic oligonucleotide
gaaguggagaaacucgcaa

SEQ ID NO: 2470916 - RNA, 19 nt, Artificial Sequence
  Description of Artificial Sequence: Synthetic oligonucleotide
ugguauucagccacacagu

SEQ ID NO: 2470917 - RNA, 19 nt, Artificial Sequence
  Description of Artificial Sequence: Synthetic oligonucleotide
uaugcuggacacuuuugau

SEQ ID NO: 2470918 - RNA, 19 nt, Artificial Sequence
  Description of Artificial Sequence: Synthetic oligonucleotide
uauugcuucguaagaguuu

SEQ ID NO: 2470919 - RNA, 19 nt, Artificial Sequence
  Description of Artificial Sequence: Synthetic oligonucleotide
cuaugcuugcucacagggc

SEQ ID NO: 2470920 - RNA, 19 nt, Artificial Sequence
  Description of Artificial Sequence: Synthetic oligonucleotide
uguggaaaaucuguuuaaa

SEQ ID NO: 2470921 - RNA, 19 nt, Artificial Sequence
  Description of Artificial Sequence: Synthetic oligonucleotide
auauagccacauuggaggu

SEQ ID NO: 2470922 - RNA, 19 nt, Artificial Sequence
  Description of Artificial Sequence: Synthetic oligonucleotide
uauaggccaccacaauuaa

SEQ ID NO: 2470923 - RNA, 19 nt, Artificial Sequence
  Description of Artificial Sequence: Synthetic oligonucleotide
ucuuccaaucaaucacaca

SEQ ID NO: 2470924 - RNA, 19 nt, Artificial Sequence
  Description of Artificial Sequence: Synthetic oligonucleotide
uggacaacacagaccguac

SEQ ID NO: 2470925 - RNA, 19 nt, Artificial Sequence
  Description of Artificial Sequence: Synthetic oligonucleotide
auaaaaggcuuugguuuuc

SEQ ID NO: 2470926 - RNA, 19 nt, Artificial Sequence
  Description of Artificial Sequence: Synthetic oligonucleotide
guccaugaaaugagggugg

SEQ ID NO: 2470927 - RNA, 19 nt, Artificial Sequence
  Description of Artificial Sequence: Synthetic oligonucleotide
uagacguuuuccccuuuac

SEQ ID NO: 2470928 - RNA, 19 nt, Artificial Sequence
  Description of Artificial Sequence: Synthetic oligonucleotide
agacguuuuccccuuuacu

SEQ ID NO: 2470929 - RNA, 19 nt, Artificial Sequence
  Description of Artificial Sequence: Synthetic oligonucleotide
agccacuuggcccaauacu

SEQ ID NO: 2470930 - RNA, 19 nt, Artificial Sequence
  Description of Artificial Sequence: Synthetic oligonucleotide
caucgugguuuacagcacc

SEQ ID NO: 2470931 - RNA, 19 nt, Artificial Sequence
  Description of Artificial Sequence: Synthetic oligonucleotide
acuaaacgagcauuacuuu

SEQ ID NO: 2470932 - RNA, 19 nt, Artificial Sequence
  Description of Artificial Sequence: Synthetic oligonucleotide
cccaauacuuggaacagag

SEQ ID NO: 2470933 - RNA, 19 nt, Artificial Sequence
  Description of Artificial Sequence: Synthetic oligonucleotide
aaacucgcaagagggcuug

SEQ ID NO: 2470934 - RNA, 19 nt, Artificial Sequence
  Description of Artificial Sequence: Synthetic oligonucleotide
uggaccgggccucuggaca

SEQ ID NO: 2470935 - RNA, 19 nt, Artificial Sequence
  Description of Artificial Sequence: Synthetic oligonucleotide
auugcuucguaagaguuuu

SEQ ID NO: 2470936 - RNA, 19 nt, Artificial Sequence
  Description of Artificial Sequence: Synthetic oligonucleotide
caaggggaaguggagaaac

SEQ ID NO: 2470937 - RNA, 19 nt, Artificial Sequence
  Description of Artificial Sequence: Synthetic oligonucleotide
guacuucaaggccucgugc

SEQ ID NO: 2470938 - RNA, 19 nt, Artificial Sequence
  Description of Artificial Sequence: Synthetic oligonucleotide
aucgugguuuacagcaccc

SEQ ID NO: 2470939 - RNA, 19 nt, Artificial Sequence
  Description of Artificial Sequence: Synthetic oligonucleotide
ucuagucgaagaagccacu

SEQ ID NO: 2470940 - RNA, 19 nt, Artificial Sequence
  Description of Artificial Sequence: Synthetic oligonucleotide
uuuggaacacucugauuuu

SEQ ID NO: 2470941 - RNA, 19 nt, Artificial Sequence
  Description of Artificial Sequence: Synthetic oligonucleotide
uuggucuauugcuucguaa

SEQ ID NO: 2470942 - RNA, 19 nt, Artificial Sequence
  Description of Artificial Sequence: Synthetic oligonucleotide
uggacacuuuugauauagc

SEQ ID NO: 2470943 - RNA, 19 nt, Artificial Sequence
  Description of Artificial Sequence: Synthetic oligonucleotide
gucauauguaucuccaaua

SEQ ID NO: 2470944 - RNA, 19 nt, Artificial Sequence
  Description of Artificial Sequence: Synthetic oligonucleotide
gacaacacagaccguacua

SEQ ID NO: 2470945 - RNA, 19 nt, Artificial Sequence
  Description of Artificial Sequence: Synthetic oligonucleotide
uucuggccacacaaacaag

SEQ ID NO: 2470946 - RNA, 19 nt, Artificial Sequence
  Description of Artificial Sequence: Synthetic oligonucleotide
acauuggaggugcucuucu

SEQ ID NO: 2470947 - RNA, 19 nt, Artificial Sequence
  Description of Artificial Sequence: Synthetic oligonucleotide
uauagccacauuggaggug

SEQ ID NO: 2470948 - RNA, 19 nt, Artificial Sequence
  Description of Artificial Sequence: Synthetic oligonucleotide
guugcucggggcccuaugc

SEQ ID NO: 2470949 - RNA, 19 nt, Artificial Sequence
  Description of Artificial Sequence: Synthetic oligonucleotide
uuagacguuuuccccuuua

SEQ ID NO: 2470950 - RNA, 19 nt, Artificial Sequence
  Description of Artificial Sequence: Synthetic oligonucleotide
ucgcaagagggcuugguuu

SEQ ID NO: 2470951 - RNA, 19 nt, Artificial Sequence
  Description of Artificial Sequence: Synthetic oligonucleotide
uccagcaguccuacguacu

SEQ ID NO: 2470952 - RNA, 19 nt, Artificial Sequence
  Description of Artificial Sequence: Synthetic oligonucleotide
acguuuuccccuuuacuuu

SEQ ID NO: 2470953 - RNA, 19 nt, Artificial Sequence
  Description of Artificial Sequence: Synthetic oligonucleotide
cuccaauaaaaggcuuugg

SEQ ID NO: 2470954 - RNA, 19 nt, Artificial Sequence
  Description of Artificial Sequence: Synthetic oligonucleotide
cuugcucacagggccauag

SEQ ID NO: 2470955 - RNA, 19 nt, Artificial Sequence
  Description of Artificial Sequence: Synthetic oligonucleotide
uaaaaggcuuugguuuucu

SEQ ID NO: 2470956 - RNA, 19 nt, Artificial Sequence
  Description of Artificial Sequence: Synthetic oligonucleotide
ggggaaguggagaaacucg

SEQ ID NO: 2470957 - RNA, 19 nt, Artificial Sequence
  Description of Artificial Sequence: Synthetic oligonucleotide
aacagaguucuucguccau

SEQ ID NO: 2470958 - RNA, 19 nt, Artificial Sequence
  Description of Artificial Sequence: Synthetic oligonucleotide
uuuggucuauugcuucgua

SEQ ID NO: 2470959 - RNA, 19 nt, Artificial Sequence
  Description of Artificial Sequence: Synthetic oligonucleotide
acagaccguacuaaacgag

SEQ ID NO: 2470960 - RNA, 19 nt, Artificial Sequence
  Description of Artificial Sequence: Synthetic oligonucleotide
uauuaucuuccuggaacaa

SEQ ID NO: 2470961 - RNA, 19 nt, Artificial Sequence
  Description of Artificial Sequence: Synthetic oligonucleotide
guccuacguacuucaaggc

SEQ ID NO: 2470962 - RNA, 19 nt, Artificial Sequence
  Description of Artificial Sequence: Synthetic oligonucleotide
aaaugagggugggcagggg

SEQ ID NO: 2470963 - RNA, 19 nt, Artificial Sequence
  Description of Artificial Sequence: Synthetic oligonucleotide
agauaggaaaccaguucug

SEQ ID NO: 2470964 - RNA, 19 nt, Artificial Sequence
  Description of Artificial Sequence: Synthetic oligonucleotide
aacuucuaagcagccugca

SEQ ID NO: 2470965 - RNA, 19 nt, Artificial Sequence
  Description of Artificial Sequence: Synthetic oligonucleotide
uaguggguugucauaugua

SEQ ID NO: 2470966 - RNA, 19 nt, Artificial Sequence
  Description of Artificial Sequence: Synthetic oligonucleotide
uugccuugguauucagcca

SEQ ID NO: 2470967 - RNA, 19 nt, Artificial Sequence
  Description of Artificial Sequence: Synthetic oligonucleotide
cgaagaagccacuuggccc

SEQ ID NO: 2470968 - RNA, 19 nt, Artificial Sequence
  Description of Artificial Sequence: Synthetic oligonucleotide
ugugggacucuucccugcu

SEQ ID NO: 2470969 - RNA, 19 nt, Artificial Sequence
  Description of Artificial Sequence: Synthetic oligonucleotide
cuucuagucgaagaagcca

SEQ ID NO: 2470970 - RNA, 19 nt, Artificial Sequence
  Description of Artificial Sequence: Synthetic oligonucleotide
cagauggucagaaacggcu

SEQ ID NO: 2470971 - RNA, 19 nt, Artificial Sequence
  Description of Artificial Sequence: Synthetic oligonucleotide
cacagaccguacuaaacga

SEQ ID NO: 2470972 - RNA, 19 nt, Artificial Sequence
  Description of Artificial Sequence: Synthetic oligonucleotide
guauauuaucuuccuggaa

SEQ ID NO: 2470973 - RNA, 19 nt, Artificial Sequence
  Description of Artificial Sequence: Synthetic oligonucleotide
guggagaaacucgcaagag

SEQ ID NO: 2470974 - RNA, 19 nt, Artificial Sequence
  Description of Artificial Sequence: Synthetic oligonucleotide
uugugugugguuucacauu

SEQ ID NO: 2470975 - RNA, 19 nt, Artificial Sequence
  Description of Artificial Sequence: Synthetic oligonucleotide
acaacacagaccguacuaa

SEQ ID NO: 2470976 - RNA, 19 nt, Artificial Sequence
  Description of Artificial Sequence: Synthetic oligonucleotide
guacuaaacgagcauuacu

SEQ ID NO: 2470977 - RNA, 19 nt, Artificial Sequence
  Description of Artificial Sequence: Synthetic oligonucleotide
caucuuuauaggccaccac

SEQ ID NO: 2470978 - RNA, 19 nt, Artificial Sequence
  Description of Artificial Sequence: Synthetic oligonucleotide
ggacccaucuuuauaggcc

SEQ ID NO: 2470979 - RNA, 19 nt, Artificial Sequence
  Description of Artificial Sequence: Synthetic oligonucleotide
cuccucauugaagauagga

SEQ ID NO: 2470980 - RNA, 19 nt, Artificial Sequence
  Description of Artificial Sequence: Synthetic oligonucleotide
ggccauagaguauauuauc

SEQ ID NO: 2470981 - RNA, 19 nt, Artificial Sequence
  Description of Artificial Sequence: Synthetic oligonucleotide
uccggcuuuggaacacucu

SEQ ID NO: 2470982 - RNA, 19 nt, Artificial Sequence
  Description of Artificial Sequence: Synthetic oligonucleotide
cuacguacuucaaggccuc

SEQ ID NO: 2470983 - RNA, 19 nt, Artificial Sequence
  Description of Artificial Sequence: Synthetic oligonucleotide
accuguaguggguugucau

SEQ ID NO: 2470984 - RNA, 19 nt, Artificial Sequence
  Description of Artificial Sequence: Synthetic oligonucleotide
gauaggaaaccaguucugu

SEQ ID NO: 2470985 - RNA, 19 nt, Artificial Sequence
  Description of Artificial Sequence: Synthetic oligonucleotide
uguugcucggggcccuaug

SEQ ID NO: 2470986 - RNA, 19 nt, Artificial Sequence
  Description of Artificial Sequence: Synthetic oligonucleotide
guaucuccaauaaaaggcu

SEQ ID NO: 2470987 - RNA, 19 nt, Artificial Sequence
  Description of Artificial Sequence: Synthetic oligonucleotide
gggacccaucuuuauaggc

SEQ ID NO: 2470988 - RNA, 19 nt, Artificial Sequence
  Description of Artificial Sequence: Synthetic oligonucleotide
agaccguacuaaacgagca

SEQ ID NO: 2470989 - RNA, 19 nt, Artificial Sequence
  Description of Artificial Sequence: Synthetic oligonucleotide
uguagugggcaucgugguu

SEQ ID NO: 2470990 - RNA, 19 nt, Artificial Sequence
  Description of Artificial Sequence: Synthetic oligonucleotide
gggaaguggagaaacucgc

SEQ ID NO: 2470991 - RNA, 19 nt, Artificial Sequence
  Description of Artificial Sequence: Synthetic oligonucleotide
gucgaagaagccacuuggc

SEQ ID NO: 2470992 - RNA, 19 nt, Artificial Sequence
  Description of Artificial Sequence: Synthetic oligonucleotide
cagaguucuucguccauga

SEQ ID NO: 2470993 - RNA, 19 nt, Artificial Sequence
  Description of Artificial Sequence: Synthetic oligonucleotide
ggccacacaaacaagggga

SEQ ID NO: 2470994 - RNA, 19 nt, Artificial Sequence
  Description of Artificial Sequence: Synthetic oligonucleotide
uugcucggggcccuaugcu

SEQ ID NO: 2470995 - RNA, 19 nt, Artificial Sequence
  Description of Artificial Sequence: Synthetic oligonucleotide
guaguggguugucauaugu

SEQ ID NO: 2470996 - RNA, 19 nt, Artificial Sequence
  Description of Artificial Sequence: Synthetic oligonucleotide
agaaacggcuucauguuua

SEQ ID NO: 2470997 - RNA, 19 nt, Artificial Sequence
  Description of Artificial Sequence: Synthetic oligonucleotide
cucuaguccggcuuuggaa

SEQ ID NO: 2470998 - RNA, 19 nt, Artificial Sequence
  Description of Artificial Sequence: Synthetic oligonucleotide
aguccagcaguccuacgua

SEQ ID NO: 2470999 - RNA, 19 nt, Artificial Sequence
  Description of Artificial Sequence: Synthetic oligonucleotide
auaggccaccacaauuaag

SEQ ID NO: 2471000 - RNA, 19 nt, Artificial Sequence
  Description of Artificial Sequence: Synthetic oligonucleotide
gucuggaccgggccucugg

SEQ ID NO: 2471001 - RNA, 19 nt, Artificial Sequence
  Description of Artificial Sequence: Synthetic oligonucleotide
aaggggaaguggagaaacu

SEQ ID NO: 2471002 - RNA, 19 nt, Artificial Sequence
  Description of Artificial Sequence: Synthetic oligonucleotide
aaccuguaguggguuguca

SEQ ID NO: 2471003 - RNA, 19 nt, Artificial Sequence
  Description of Artificial Sequence: Synthetic oligonucleotide
guucuucguccaugaaaug

SEQ ID NO: 2471004 - RNA, 19 nt, Artificial Sequence
  Description of Artificial Sequence: Synthetic oligonucleotide
cuaaacgagcauuacuuuu

SEQ ID NO: 2471005 - RNA, 19 nt, Artificial Sequence
  Description of Artificial Sequence: Synthetic oligonucleotide
cuugguauucagccacaca

SEQ ID NO: 2471006 - RNA, 19 nt, Artificial Sequence
  Description of Artificial Sequence: Synthetic oligonucleotide
ccaaucaaucacacacagc

SEQ ID NO: 2471007 - RNA, 19 nt, Artificial Sequence
  Description of Artificial Sequence: Synthetic oligonucleotide
uuuagacguuuuccccuuu

SEQ ID NO: 2471008 - RNA, 19 nt, Artificial Sequence
  Description of Artificial Sequence: Synthetic oligonucleotide
uacguacuucaaggccucg

SEQ ID NO: 2471009 - RNA, 19 nt, Artificial Sequence
  Description of Artificial Sequence: Synthetic oligonucleotide
gucuuccaaucaaucacac

SEQ ID NO: 2471010 - RNA, 19 nt, Artificial Sequence
  Description of Artificial Sequence: Synthetic oligonucleotide
ccauguacgccacaaccug

SEQ ID NO: 2471011 - RNA, 19 nt, Artificial Sequence
  Description of Artificial Sequence: Synthetic oligonucleotide
ucuggacaacacagaccgu

SEQ ID NO: 2471012 - RNA, 19 nt, Artificial Sequence
  Description of Artificial Sequence: Synthetic oligonucleotide
aacucgcaagagggcuugg

SEQ ID NO: 2471013 - RNA, 19 nt, Artificial Sequence
  Description of Artificial Sequence: Synthetic oligonucleotide
cacacaaacaaggggaagu

SEQ ID NO: 2471014 - RNA, 19 nt, Artificial Sequence
  Description of Artificial Sequence: Synthetic oligonucleotide
agcuugccuugguauucag

SEQ ID NO: 2471015 - RNA, 19 nt, Artificial Sequence
  Description of Artificial Sequence: Synthetic oligonucleotide
cuaguccggcuuuggaaca

SEQ ID NO: 2471016 - RNA, 19 nt, Artificial Sequence
  Description of Artificial Sequence: Synthetic oligonucleotide
cuggacaacacagaccgua

SEQ ID NO: 2471017 - RNA, 19 nt, Artificial Sequence
  Description of Artificial Sequence: Synthetic oligonucleotide
cuauugcuucguaagaguu

SEQ ID NO: 2471018 - RNA, 19 nt, Artificial Sequence
  Description of Artificial Sequence: Synthetic oligonucleotide
gaagccacuuggcccaaua

SEQ ID NO: 2471019 - RNA, 19 nt, Artificial Sequence
  Description of Artificial Sequence: Synthetic oligonucleotide
cacuuuugauauagccaca

SEQ ID NO: 2471020 - RNA, 19 nt, Artificial Sequence
  Description of Artificial Sequence: Synthetic oligonucleotide
uucuugugugugguuucac

SEQ ID NO: 2471021 - RNA, 19 nt, Artificial Sequence
  Description of Artificial Sequence: Synthetic oligonucleotide
ccggcuuuggaacacucug

SEQ ID NO: 2471022 - RNA, 19 nt, Artificial Sequence
  Description of Artificial Sequence: Synthetic oligonucleotide
agccacauuggaggugcuc

SEQ ID NO: 2471023 - RNA, 19 nt, Artificial Sequence
  Description of Artificial Sequence: Synthetic oligonucleotide
acgccacaaccuguagugg

SEQ ID NO: 2471024 - RNA, 19 nt, Artificial Sequence
  Description of Artificial Sequence: Synthetic oligonucleotide
ugcucggggcccuaugcuu

SEQ ID NO: 2471025 - RNA, 19 nt, Artificial Sequence
  Description of Artificial Sequence: Synthetic oligonucleotide
ggccaccacaauuaagcca

SEQ ID NO: 2471026 - RNA, 19 nt, Artificial Sequence
  Description of Artificial Sequence: Synthetic oligonucleotide
ggcccaauacuuggaacag

SEQ ID NO: 2471027 - RNA, 19 nt, Artificial Sequence
  Description of Artificial Sequence: Synthetic oligonucleotide
cguccaugaaaugagggug

SEQ ID NO: 2471028 - RNA, 19 nt, Artificial Sequence
  Description of Artificial Sequence: Synthetic oligonucleotide
caccacaauuaagccacac

SEQ ID NO: 2471029 - RNA, 19 nt, Artificial Sequence
  Description of Artificial Sequence: Synthetic oligonucleotide
cacauuggaggugcucuuc

SEQ ID NO: 2471030 - RNA, 19 nt, Artificial Sequence
  Description of Artificial Sequence: Synthetic oligonucleotide
aaacuguagugggcaucgu

SEQ ID NO: 2471031 - RNA, 19 nt, Artificial Sequence
  Description of Artificial Sequence: Synthetic oligonucleotide
ugcacaccacugauuucuu

SEQ ID NO: 2471032 - RNA, 19 nt, Artificial Sequence
  Description of Artificial Sequence: Synthetic oligonucleotide
uaguccggcuuuggaacac

SEQ ID NO: 2471033 - RNA, 19 nt, Artificial Sequence
  Description of Artificial Sequence: Synthetic oligonucleotide
gagggugggcaggggaccc

SEQ ID NO: 2471034 - RNA, 19 nt, Artificial Sequence
  Description of Artificial Sequence: Synthetic oligonucleotide
gugggcaucgugguuuaca

SEQ ID NO: 2471035 - RNA, 19 nt, Artificial Sequence
  Description of Artificial Sequence: Synthetic oligonucleotide
guuuuguggaaaaucuguu

SEQ ID NO: 2471036 - RNA, 19 nt, Artificial Sequence
  Description of Artificial Sequence: Synthetic oligonucleotide
ccuacguacuucaaggccu

SEQ ID NO: 2471037 - RNA, 19 nt, Artificial Sequence
  Description of Artificial Sequence: Synthetic oligonucleotide
acuuggcccaauacuugga

SEQ ID NO: 2471038 - RNA, 19 nt, Artificial Sequence
  Description of Artificial Sequence: Synthetic oligonucleotide
cgccacaaccuguaguggg

SEQ ID NO: 2471039 - RNA, 19 nt, Artificial Sequence
  Description of Artificial Sequence: Synthetic oligonucleotide
cuucuugugugugguuuca

SEQ ID NO: 2471040 - RNA, 19 nt, Artificial Sequence
  Description of Artificial Sequence: Synthetic oligonucleotide
cacccauguacgccacaac

SEQ ID NO: 2471041 - RNA, 19 nt, Artificial Sequence
  Description of Artificial Sequence: Synthetic oligonucleotide
gaccguacuaaacgagcau

SEQ ID NO: 2471042 - RNA, 19 nt, Artificial Sequence
  Description of Artificial Sequence: Synthetic oligonucleotide
guagugggcaucgugguuu

SEQ ID NO: 2471043 - RNA, 19 nt, Artificial Sequence
  Description of Artificial Sequence: Synthetic oligonucleotide
cauguacgccacaaccugu

SEQ ID NO: 2471044 - RNA, 19 nt, Artificial Sequence
  Description of Artificial Sequence: Synthetic oligonucleotide
acucgcaagagggcuuggu

SEQ ID NO: 2471045 - RNA, 19 nt, Artificial Sequence
  Description of Artificial Sequence: Synthetic oligonucleotide
ccaauaaaaggcuuugguu

SEQ ID NO: 2471046 - RNA, 19 nt, Artificial Sequence
  Description of Artificial Sequence: Synthetic oligonucleotide
cuuuauaggccaccacaau

SEQ ID NO: 2471047 - RNA, 19 nt, Artificial Sequence
  Description of Artificial Sequence: Synthetic oligonucleotide
ugggcaggggacccaucuu

SEQ ID NO: 2471048 - RNA, 19 nt, Artificial Sequence
  Description of Artificial Sequence: Synthetic oligonucleotide
cccuaugcuugcucacagg

SEQ ID NO: 2471049 - RNA, 19 nt, Artificial Sequence
  Description of Artificial Sequence: Synthetic oligonucleotide
caguucugugggacucuuc

SEQ ID NO: 2471050 - RNA, 19 nt, Artificial Sequence
  Description of Artificial Sequence: Synthetic oligonucleotide
agugggcaucgugguuuac

SEQ ID NO: 2471051 - RNA, 19 nt, Artificial Sequence
  Description of Artificial Sequence: Synthetic oligonucleotide
caaccuguaguggguuguc

SEQ ID NO: 2471052 - RNA, 19 nt, Artificial Sequence
  Description of Artificial Sequence: Synthetic oligonucleotide
gggcaucgugguuuacagc

SEQ ID NO: 2471053 - RNA, 19 nt, Artificial Sequence
  Description of Artificial Sequence: Synthetic oligonucleotide
ggaggugcucuucuugugu

SEQ ID NO: 2471054 - RNA, 19 nt, Artificial Sequence
  Description of Artificial Sequence: Synthetic oligonucleotide
cuucauguuuagacguuuu

SEQ ID NO: 2471055 - RNA, 19 nt, Artificial Sequence
  Description of Artificial Sequence: Synthetic oligonucleotide
aguccggcuuuggaacacu

SEQ ID NO: 2471056 - RNA, 19 nt, Artificial Sequence
  Description of Artificial Sequence: Synthetic oligonucleotide
gcuugccuugguauucagc

SEQ ID NO: 2471057 - RNA, 19 nt, Artificial Sequence
  Description of Artificial Sequence: Synthetic oligonucleotide
augcuugcucacagggcca

SEQ ID NO: 2471058 - RNA, 19 nt, Artificial Sequence
  Description of Artificial Sequence: Synthetic oligonucleotide
gaaacucgcaagagggcuu

SEQ ID NO: 2471059 - RNA, 19 nt, Artificial Sequence
  Description of Artificial Sequence: Synthetic oligonucleotide
ucgugcuggacagcacuuu

SEQ ID NO: 2471060 - RNA, 19 nt, Artificial Sequence
  Description of Artificial Sequence: Synthetic oligonucleotide
cguacuaaacgagcauuac

SEQ ID NO: 2471061 - RNA, 19 nt, Artificial Sequence
  Description of Artificial Sequence: Synthetic oligonucleotide
ggacagcacuuuccagagc

SEQ ID NO: 2471062 - RNA, 19 nt, Artificial Sequence
  Description of Artificial Sequence: Synthetic oligonucleotide
caccacugauuucuucaaa

SEQ ID NO: 2471063 - RNA, 19 nt, Artificial Sequence
  Description of Artificial Sequence: Synthetic oligonucleotide
caggggacccaucuuuaua

SEQ ID NO: 2471064 - RNA, 19 nt, Artificial Sequence
  Description of Artificial Sequence: Synthetic oligonucleotide
cagcacccauguacgccac

SEQ ID NO: 2471065 - RNA, 19 nt, Artificial Sequence
  Description of Artificial Sequence: Synthetic oligonucleotide
ucaaggccucgugcuggac

SEQ ID NO: 2471066 - RNA, 19 nt, Artificial Sequence
  Description of Artificial Sequence: Synthetic oligonucleotide
aggccucgugcuggacagc

SEQ ID NO: 2471067 - RNA, 19 nt, Artificial Sequence
  Description of Artificial Sequence: Synthetic oligonucleotide
ccacacaaacaaggggaag

SEQ ID NO: 2471068 - RNA, 19 nt, Artificial Sequence
  Description of Artificial Sequence: Synthetic oligonucleotide
agcuugcacaccacugauu

SEQ ID NO: 2471069 - RNA, 19 nt, Artificial Sequence
  Description of Artificial Sequence: Synthetic oligonucleotide
gcucggggcccuaugcuug

SEQ ID NO: 2471070 - RNA, 19 nt, Artificial Sequence
  Description of Artificial Sequence: Synthetic oligonucleotide
ccaucuuuauaggccacca

SEQ ID NO: 2471071 - RNA, 19 nt, Artificial Sequence
  Description of Artificial Sequence: Synthetic oligonucleotide
ccguacuaaacgagcauua

SEQ ID NO: 2471072 - RNA, 19 nt, Artificial Sequence
  Description of Artificial Sequence: Synthetic oligonucleotide
ggguugucauauguaucuc

SEQ ID NO: 2471073 - RNA, 19 nt, Artificial Sequence
  Description of Artificial Sequence: Synthetic oligonucleotide
gcacaccacugauuucuuc

SEQ ID NO: 2471074 - RNA, 19 nt, Artificial Sequence
  Description of Artificial Sequence: Synthetic oligonucleotide
ccuugguauucagccacac

SEQ ID NO: 2471075 - RNA, 19 nt, Artificial Sequence
  Description of Artificial Sequence: Synthetic oligonucleotide
gccucuaguccggcuuugg

SEQ ID NO: 2471076 - RNA, 19 nt, Artificial Sequence
  Description of Artificial Sequence: Synthetic oligonucleotide
gcaagagggcuugguuuug

SEQ ID NO: 2471077 - RNA, 19 nt, Artificial Sequence
  Description of Artificial Sequence: Synthetic oligonucleotide
gccacacaaacaaggggaa

SEQ ID NO: 2471078 - RNA, 19 nt, Artificial Sequence
  Description of Artificial Sequence: Synthetic oligonucleotide
cgugcuggacagcacuuuc

SEQ ID NO: 2471079 - RNA, 19 nt, Artificial Sequence
  Description of Artificial Sequence: Synthetic oligonucleotide
cucgcaagagggcuugguu

SEQ ID NO: 2471080 - RNA, 19 nt, Artificial Sequence
  Description of Artificial Sequence: Synthetic oligonucleotide
guccggcuuuggaacacuc

SEQ ID NO: 2471081 - RNA, 19 nt, Artificial Sequence
  Description of Artificial Sequence: Synthetic oligonucleotide
ggaccgggccucuggacaa

SEQ ID NO: 2471082 - RNA, 19 nt, Artificial Sequence
  Description of Artificial Sequence: Synthetic oligonucleotide
accgggccucuggacaaca

SEQ ID NO: 2471083 - RNA, 19 nt, Artificial Sequence
  Description of Artificial Sequence: Synthetic oligonucleotide
gccacuuggcccaauacuu

SEQ ID NO: 2471084 - RNA, 19 nt, Artificial Sequence
  Description of Artificial Sequence: Synthetic oligonucleotide
ggccucgugcuggacagca

SEQ ID NO: 2471085 - RNA, 19 nt, Artificial Sequence
  Description of Artificial Sequence: Synthetic oligonucleotide
ccuguaguggguugucaua

SEQ ID NO: 2471086 - RNA, 19 nt, Artificial Sequence
  Description of Artificial Sequence: Synthetic oligonucleotide
cuagucgaagaagccacuu

SEQ ID NO: 2471087 - RNA, 19 nt, Artificial Sequence
  Description of Artificial Sequence: Synthetic oligonucleotide
gguuuacagcacccaugua

SEQ ID NO: 2471088 - RNA, 19 nt, Artificial Sequence
  Description of Artificial Sequence: Synthetic oligonucleotide
gaccgggccucuggacaac

SEQ ID NO: 2471089 - RNA, 19 nt, Artificial Sequence
  Description of Artificial Sequence: Synthetic oligonucleotide
gcccaauacuuggaacaga

SEQ ID NO: 2471090 - RNA, 19 nt, Artificial Sequence
  Description of Artificial Sequence: Synthetic oligonucleotide
ccucuaguccggcuuugga

SEQ ID NO: 2471091 - RNA, 19 nt, Artificial Sequence
  Description of Artificial Sequence: Synthetic oligonucleotide
ucggggcccuaugcuugcu

SEQ ID NO: 2471092 - RNA, 19 nt, Artificial Sequence
  Description of Artificial Sequence: Synthetic oligonucleotide
cucgugcuggacagcacuu

SEQ ID NO: 2471093 - RNA, 19 nt, Artificial Sequence
  Description of Artificial Sequence: Synthetic oligonucleotide
gggcuugguuuuguggaaa

SEQ ID NO: 2471094 - RNA, 19 nt, Artificial Sequence
  Description of Artificial Sequence: Synthetic oligonucleotide
agaagccacuuggcccaau

SEQ ID NO: 2471095 - RNA, 19 nt, Artificial Sequence
  Description of Artificial Sequence: Synthetic oligonucleotide
gggcaggggacccaucuuu

SEQ ID NO: 2471096 - RNA, 19 nt, Artificial Sequence
  Description of Artificial Sequence: Synthetic oligonucleotide
gccacaaccuguagugggu

SEQ ID NO: 2471097 - RNA, 19 nt, Artificial Sequence
  Description of Artificial Sequence: Synthetic oligonucleotide
ccucgugcuggacagcacu

SEQ ID NO: 2471098 - RNA, 19 nt, Artificial Sequence
  Description of Artificial Sequence: Synthetic oligonucleotide
ggcaggggacccaucuuua

SEQ ID NO: 2471099 - RNA, 19 nt, Artificial Sequence
  Description of Artificial Sequence: Synthetic oligonucleotide
gccuugguauucagccaca

SEQ ID NO: 2471100 - RNA, 19 nt, Artificial Sequence
  Description of Artificial Sequence: Synthetic oligonucleotide
gggacucuucccugcugcu

SEQ ID NO: 2471101 - RNA, 19 nt, Artificial Sequence
  Description of Artificial Sequence: Synthetic oligonucleotide
ccccuuuacuuucucuagu

SEQ ID NO: 2471102 - RNA, 19 nt, Artificial Sequence
  Description of Artificial Sequence: Synthetic oligonucleotide
ccgggccucuggacaacac

SEQ ID NO: 2471103 - RNA, 19 nt, Artificial Sequence
  Description of Artificial Sequence: Synthetic oligonucleotide
ggucuggaccgggccucug

SEQ ID NO: 2471104 - RNA, 19 nt, Artificial Sequence
  Description of Artificial Sequence: Synthetic oligonucleotide
cgugguuuacagcacccau

SEQ ID NO: 2471105 - RNA, 19 nt, Artificial Sequence
  Description of Artificial Sequence: Synthetic oligonucleotide
ccagcaguccuacguacuu

SEQ ID NO: 2471106 - RNA, 19 nt, Artificial Sequence
  Description of Artificial Sequence: Synthetic oligonucleotide
cgcaagagggcuugguuuu

SEQ ID NO: 2471107 - RNA, 19 nt, Artificial Sequence
  Description of Artificial Sequence: Synthetic oligonucleotide
ccacauuggaggugcucuu

SEQ ID NO: 2471108 - RNA, 19 nt, Artificial Sequence
  Description of Artificial Sequence: Synthetic oligonucleotide
cagggccauagaguauauu

SEQ ID NO: 2471109 - RNA, 19 nt, Artificial Sequence
  Description of Artificial Sequence: Synthetic oligonucleotide
gcuugcucacagggccaua

SEQ ID NO: 2471110 - RNA, 19 nt, Artificial Sequence
  Description of Artificial Sequence: Synthetic oligonucleotide
cuguugcucggggcccuau

SEQ ID NO: 2471111 - RNA, 19 nt, Artificial Sequence
  Description of Artificial Sequence: Synthetic oligonucleotide
gggucuggaccgggccucu

SEQ ID NO: 2471112 - RNA, 19 nt, Artificial Sequence
  Description of Artificial Sequence: Synthetic oligonucleotide
ccaguucugugggacucuu

SEQ ID NO: 2471113 - RNA, 19 nt, Artificial Sequence
  Description of Artificial Sequence: Synthetic oligonucleotide
uuaaauaacacuaaguagg

SEQ ID NO: 2471114 - RNA, 19 nt, Artificial Sequence
  Description of Artificial Sequence: Synthetic oligonucleotide
uaagauuuaaaauugauga

SEQ ID NO: 2471115 - RNA, 19 nt, Artificial Sequence
  Description of Artificial Sequence: Synthetic oligonucleotide
uauacuaauacauauuggg

SEQ ID NO: 2471116 - RNA, 19 nt, Artificial Sequence
  Description of Artificial Sequence: Synthetic oligonucleotide
ucuuuaaucaauuugaacu

SEQ ID NO: 2471117 - RNA, 19 nt, Artificial Sequence
  Description of Artificial Sequence: Synthetic oligonucleotide
aaucaugggauucuuaaac

SEQ ID NO: 2471118 - RNA, 19 nt, Artificial Sequence
  Description of Artificial Sequence: Synthetic oligonucleotide
aucaauuugaacuggacac

SEQ ID NO: 2471119 - RNA, 19 nt, Artificial Sequence
  Description of Artificial Sequence: Synthetic oligonucleotide
uacaacuucauacaaauac

SEQ ID NO: 2471120 - RNA, 19 nt, Artificial Sequence
  Description of Artificial Sequence: Synthetic oligonucleotide
auccaauacaacuucauac

SEQ ID NO: 2471121 - RNA, 19 nt, Artificial Sequence
  Description of Artificial Sequence: Synthetic oligonucleotide
uucuaugucaucuuuauac

SEQ ID NO: 2471122 - RNA, 19 nt, Artificial Sequence
  Description of Artificial Sequence: Synthetic oligonucleotide
acuuuguaaauuuugugac

SEQ ID NO: 2471123 - RNA, 19 nt, Artificial Sequence
  Description of Artificial Sequence: Synthetic oligonucleotide
ucuauaagaauauuuacaa

SEQ ID NO: 2471124 - RNA, 19 nt, Artificial Sequence
  Description of Artificial Sequence: Synthetic oligonucleotide
uuuagaccauuuaagaaag

SEQ ID NO: 2471125 - RNA, 19 nt, Artificial Sequence
  Description of Artificial Sequence: Synthetic oligonucleotide
uguaaauuuugugacaagg

SEQ ID NO: 2471126 - RNA, 19 nt, Artificial Sequence
  Description of Artificial Sequence: Synthetic oligonucleotide
aacagugacaacuaauuga

SEQ ID NO: 2471127 - RNA, 19 nt, Artificial Sequence
  Description of Artificial Sequence: Synthetic oligonucleotide
agcaagauugguuuagacc

SEQ ID NO: 2471128 - RNA, 19 nt, Artificial Sequence
  Description of Artificial Sequence: Synthetic oligonucleotide
uuauacuaauacauauugg

SEQ ID NO: 2471129 - RNA, 19 nt, Artificial Sequence
  Description of Artificial Sequence: Synthetic oligonucleotide
aguuaaauaacacuaagua

SEQ ID NO: 2471130 - RNA, 19 nt, Artificial Sequence
  Description of Artificial Sequence: Synthetic oligonucleotide
aauugacugagguaaagca

SEQ ID NO: 2471131 - RNA, 19 nt, Artificial Sequence
  Description of Artificial Sequence: Synthetic oligonucleotide
aaaacuuggcacuguuacc

SEQ ID NO: 2471132 - RNA, 19 nt, Artificial Sequence
  Description of Artificial Sequence: Synthetic oligonucleotide
ucagauguuuguuuuaucc

SEQ ID NO: 2471133 - RNA, 19 nt, Artificial Sequence
  Description of Artificial Sequence: Synthetic oligonucleotide
aaucaauuugaacuggaca

SEQ ID NO: 2471134 - RNA, 19 nt, Artificial Sequence
  Description of Artificial Sequence: Synthetic oligonucleotide
aaaacaauaccuagugugg

SEQ ID NO: 2471135 - RNA, 19 nt, Artificial Sequence
  Description of Artificial Sequence: Synthetic oligonucleotide
acuaauacauauugggauc

SEQ ID NO: 2471136 - RNA, 19 nt, Artificial Sequence
  Description of Artificial Sequence: Synthetic oligonucleotide
uugguuuagaccauuuaag

SEQ ID NO: 2471137 - RNA, 19 nt, Artificial Sequence
  Description of Artificial Sequence: Synthetic oligonucleotide
aacuaauugacugagguaa

SEQ ID NO: 2471138 - RNA, 19 nt, Artificial Sequence
  Description of Artificial Sequence: Synthetic oligonucleotide
uuaagaaagaaauggaguu

SEQ ID NO: 2471139 - RNA, 19 nt, Artificial Sequence
  Description of Artificial Sequence: Synthetic oligonucleotide
aacaauucaguguaaucca

SEQ ID NO: 2471140 - RNA, 19 nt, Artificial Sequence
  Description of Artificial Sequence: Synthetic oligonucleotide
uuaccuuuguuccuugggg

SEQ ID NO: 2471141 - RNA, 19 nt, Artificial Sequence
  Description of Artificial Sequence: Synthetic oligonucleotide
aauuuugugacaaggucuc

SEQ ID NO: 2471142 - RNA, 19 nt, Artificial Sequence
  Description of Artificial Sequence: Synthetic oligonucleotide
aauggaauacaauuucuau

SEQ ID NO: 2471143 - RNA, 19 nt, Artificial Sequence
  Description of Artificial Sequence: Synthetic oligonucleotide
uugaggacuaaauccaggg

SEQ ID NO: 2471144 - RNA, 19 nt, Artificial Sequence
  Description of Artificial Sequence: Synthetic oligonucleotide
uaaguaggaaaauugauuu

SEQ ID NO: 2471145 - RNA, 19 nt, Artificial Sequence
  Description of Artificial Sequence: Synthetic oligonucleotide
aaauuuugugacaaggucu

SEQ ID NO: 2471146 - RNA, 19 nt, Artificial Sequence
  Description of Artificial Sequence: Synthetic oligonucleotide
acaacuaauugacugaggu

SEQ ID NO: 2471147 - RNA, 19 nt, Artificial Sequence
  Description of Artificial Sequence: Synthetic oligonucleotide
caaggucucaccaaguugc

SEQ ID NO: 2471148 - RNA, 19 nt, Artificial Sequence
  Description of Artificial Sequence: Synthetic oligonucleotide
uguugaacucacuuugagg

SEQ ID NO: 2471149 - RNA, 19 nt, Artificial Sequence
  Description of Artificial Sequence: Synthetic oligonucleotide
auucaguguaauccaauac

SEQ ID NO: 2471150 - RNA, 19 nt, Artificial Sequence
  Description of Artificial Sequence: Synthetic oligonucleotide
uccaauacaacuucauaca

SEQ ID NO: 2471151 - RNA, 19 nt, Artificial Sequence
  Description of Artificial Sequence: Synthetic oligonucleotide
uuuaaucaauuugaacugg

SEQ ID NO: 2471152 - RNA, 19 nt, Artificial Sequence
  Description of Artificial Sequence: Synthetic oligonucleotide
uacuaauacauauugggau

SEQ ID NO: 2471153 - RNA, 19 nt, Artificial Sequence
  Description of Artificial Sequence: Synthetic oligonucleotide
gaucuuguaagauuuaaaa

SEQ ID NO: 2471154 - RNA, 19 nt, Artificial Sequence
  Description of Artificial Sequence: Synthetic oligonucleotide
uguaauccaauacaacuuc

SEQ ID NO: 2471155 - RNA, 19 nt, Artificial Sequence
  Description of Artificial Sequence: Synthetic oligonucleotide
acuucauacaaauaccagu

SEQ ID NO: 2471156 - RNA, 19 nt, Artificial Sequence
  Description of Artificial Sequence: Synthetic oligonucleotide
acagugacaacuaauugac

SEQ ID NO: 2471157 - RNA, 19 nt, Artificial Sequence
  Description of Artificial Sequence: Synthetic oligonucleotide
auggaauacaauuucuaug

SEQ ID NO: 2471158 - RNA, 19 nt, Artificial Sequence
  Description of Artificial Sequence: Synthetic oligonucleotide
uaccaguuaaauaacacua

SEQ ID NO: 2471159 - RNA, 19 nt, Artificial Sequence
  Description of Artificial Sequence: Synthetic oligonucleotide
aagcaagauugguuuagac

SEQ ID NO: 2471160 - RNA, 19 nt, Artificial Sequence
  Description of Artificial Sequence: Synthetic oligonucleotide
aacugggucagaccccugc

SEQ ID NO: 2471161 - RNA, 19 nt, Artificial Sequence
  Description of Artificial Sequence: Synthetic oligonucleotide
uggggaaggaaaauauuag

SEQ ID NO: 2471162 - RNA, 19 nt, Artificial Sequence
  Description of Artificial Sequence: Synthetic oligonucleotide
gaugucuacacccuggauc

SEQ ID NO: 2471163 - RNA, 19 nt, Artificial Sequence
  Description of Artificial Sequence: Synthetic oligonucleotide
agauguuuguuuuauccug

SEQ ID NO: 2471164 - RNA, 19 nt, Artificial Sequence
  Description of Artificial Sequence: Synthetic oligonucleotide
aagaaauggaguugucaug

SEQ ID NO: 2471165 - RNA, 19 nt, Artificial Sequence
  Description of Artificial Sequence: Synthetic oligonucleotide
uuaaucaauuugaacugga

SEQ ID NO: 2471166 - RNA, 19 nt, Artificial Sequence
  Description of Artificial Sequence: Synthetic oligonucleotide
ugggauucuuaaaccaugg

SEQ ID NO: 2471167 - RNA, 19 nt, Artificial Sequence
  Description of Artificial Sequence: Synthetic oligonucleotide
cucacuuugagguagagaa

SEQ ID NO: 2471168 - RNA, 19 nt, Artificial Sequence
  Description of Artificial Sequence: Synthetic oligonucleotide
guuuagaccauuuaagaaa

SEQ ID NO: 2471169 - RNA, 19 nt, Artificial Sequence
  Description of Artificial Sequence: Synthetic oligonucleotide
auugguuuagaccauuuaa

SEQ ID NO: 2471170 - RNA, 19 nt, Artificial Sequence
  Description of Artificial Sequence: Synthetic oligonucleotide
uauaacagugacaacuaau

SEQ ID NO: 2471171 - RNA, 19 nt, Artificial Sequence
  Description of Artificial Sequence: Synthetic oligonucleotide
uacacccuggaucucaucc

SEQ ID NO: 2471172 - RNA, 19 nt, Artificial Sequence
  Description of Artificial Sequence: Synthetic oligonucleotide
guaagauuuaaaauugaug

SEQ ID NO: 2471173 - RNA, 19 nt, Artificial Sequence
  Description of Artificial Sequence: Synthetic oligonucleotide
uguaucagauguuucagau

SEQ ID NO: 2471174 - RNA, 19 nt, Artificial Sequence
  Description of Artificial Sequence: Synthetic oligonucleotide
gacacaacaauucagugua

SEQ ID NO: 2471175 - RNA, 19 nt, Artificial Sequence
  Description of Artificial Sequence: Synthetic oligonucleotide
ccauuuaagaaagaaaugg

SEQ ID NO: 2471176 - RNA, 19 nt, Artificial Sequence
  Description of Artificial Sequence: Synthetic oligonucleotide
ugguuuagaccauuuaaga

SEQ ID NO: 2471177 - RNA, 19 nt, Artificial Sequence
  Description of Artificial Sequence: Synthetic oligonucleotide
auaccaguuaaauaacacu

SEQ ID NO: 2471178 - RNA, 19 nt, Artificial Sequence
  Description of Artificial Sequence: Synthetic oligonucleotide
aauggaguugucauggcug

SEQ ID NO: 2471179 - RNA, 19 nt, Artificial Sequence
  Description of Artificial Sequence: Synthetic oligonucleotide
agcauacugaugucuacac

SEQ ID NO: 2471180 - RNA, 19 nt, Artificial Sequence
  Description of Artificial Sequence: Synthetic oligonucleotide
uaacagugacaacuaauug

SEQ ID NO: 2471181 - RNA, 19 nt, Artificial Sequence
  Description of Artificial Sequence: Synthetic oligonucleotide
uuauccugagguauucuug

SEQ ID NO: 2471182 - RNA, 19 nt, Artificial Sequence
  Description of Artificial Sequence: Synthetic oligonucleotide
aaauggaguugucauggcu

SEQ ID NO: 2471183 - RNA, 19 nt, Artificial Sequence
  Description of Artificial Sequence: Synthetic oligonucleotide
gagcaaaagaaucauggga

SEQ ID NO: 2471184 - RNA, 19 nt, Artificial Sequence
  Description of Artificial Sequence: Synthetic oligonucleotide
uauccugagguauucuugc

SEQ ID NO: 2471185 - RNA, 19 nt, Artificial Sequence
  Description of Artificial Sequence: Synthetic oligonucleotide
aauucaguguaauccaaua

SEQ ID NO: 2471186 - RNA, 19 nt, Artificial Sequence
  Description of Artificial Sequence: Synthetic oligonucleotide
gcaagauugguuuagacca

SEQ ID NO: 2471187 - RNA, 19 nt, Artificial Sequence
  Description of Artificial Sequence: Synthetic oligonucleotide
ugagguagagaacuggguc

SEQ ID NO: 2471188 - RNA, 19 nt, Artificial Sequence
  Description of Artificial Sequence: Synthetic oligonucleotide
gaggacuaaauccaggguc

SEQ ID NO: 2471189 - RNA, 19 nt, Artificial Sequence
  Description of Artificial Sequence: Synthetic oligonucleotide
ucuaugucaucuuuauacu

SEQ ID NO: 2471190 - RNA, 19 nt, Artificial Sequence
  Description of Artificial Sequence: Synthetic oligonucleotide
gaugcauacuaccacucug

SEQ ID NO: 2471191 - RNA, 19 nt, Artificial Sequence
  Description of Artificial Sequence: Synthetic oligonucleotide
agaacaagaccagugaaug

SEQ ID NO: 2471192 - RNA, 19 nt, Artificial Sequence
  Description of Artificial Sequence: Synthetic oligonucleotide
uucuuuaaucaauuugaac

SEQ ID NO: 2471193 - RNA, 19 nt, Artificial Sequence
  Description of Artificial Sequence: Synthetic oligonucleotide
ucaugggauucuuaaacca

SEQ ID NO: 2471194 - RNA, 19 nt, Artificial Sequence
  Description of Artificial Sequence: Synthetic oligonucleotide
ggauucuuaaaccaugggc

SEQ ID NO: 2471195 - RNA, 19 nt, Artificial Sequence
  Description of Artificial Sequence: Synthetic oligonucleotide
accaacccauuccucaugc

SEQ ID NO: 2471196 - RNA, 19 nt, Artificial Sequence
  Description of Artificial Sequence: Synthetic oligonucleotide
ucugaugcauacuaccacu

SEQ ID NO: 2471197 - RNA, 19 nt, Artificial Sequence
  Description of Artificial Sequence: Synthetic oligonucleotide
uuugugacaaggucucacc

SEQ ID NO: 2471198 - RNA, 19 nt, Artificial Sequence
  Description of Artificial Sequence: Synthetic oligonucleotide
aucuauaagaauauuuaca

SEQ ID NO: 2471199 - RNA, 19 nt, Artificial Sequence
  Description of Artificial Sequence: Synthetic oligonucleotide
ugaacuggacacaacaauu

SEQ ID NO: 2471200 - RNA, 19 nt, Artificial Sequence
  Description of Artificial Sequence: Synthetic oligonucleotide
gauucuuaaaccaugggcu

SEQ ID NO: 2471201 - RNA, 19 nt, Artificial Sequence
  Description of Artificial Sequence: Synthetic oligonucleotide
uuguaagauuuaaaauuga

SEQ ID NO: 2471202 - RNA, 19 nt, Artificial Sequence
  Description of Artificial Sequence: Synthetic oligonucleotide
uaaucaauuugaacuggac

SEQ ID NO: 2471203 - RNA, 19 nt, Artificial Sequence
  Description of Artificial Sequence: Synthetic oligonucleotide
gaucucaucccauaggaaa

SEQ ID NO: 2471204 - RNA, 19 nt, Artificial Sequence
  Description of Artificial Sequence: Synthetic oligonucleotide
cuuguugcagagaccaacc

SEQ ID NO: 2471205 - RNA, 19 nt, Artificial Sequence
  Description of Artificial Sequence: Synthetic oligonucleotide
uguugcagagaccaaccca

SEQ ID NO: 2471206 - RNA, 19 nt, Artificial Sequence
  Description of Artificial Sequence: Synthetic oligonucleotide
guuaccuuuguuccuuggg

SEQ ID NO: 2471207 - RNA, 19 nt, Artificial Sequence
  Description of Artificial Sequence: Synthetic oligonucleotide
agauguuucagauguuugu

SEQ ID NO: 2471208 - RNA, 19 nt, Artificial Sequence
  Description of Artificial Sequence: Synthetic oligonucleotide
aauccaauacaacuucaua

SEQ ID NO: 2471209 - RNA, 19 nt, Artificial Sequence
  Description of Artificial Sequence: Synthetic oligonucleotide
uguugaggacuaaauccag

SEQ ID NO: 2471210 - RNA, 19 nt, Artificial Sequence
  Description of Artificial Sequence: Synthetic oligonucleotide
cuacuuuguaaauuuugug

SEQ ID NO: 2471211 - RNA, 19 nt, Artificial Sequence
  Description of Artificial Sequence: Synthetic oligonucleotide
uaauugacugagguaaagc

SEQ ID NO: 2471212 - RNA, 19 nt, Artificial Sequence
  Description of Artificial Sequence: Synthetic oligonucleotide
aacuucauacaaauaccag

SEQ ID NO: 2471213 - RNA, 19 nt, Artificial Sequence
  Description of Artificial Sequence: Synthetic oligonucleotide
aaauggguucuuuaaucaa

SEQ ID NO: 2471214 - RNA, 19 nt, Artificial Sequence
  Description of Artificial Sequence: Synthetic oligonucleotide
caaauaccaguuaaauaac

SEQ ID NO: 2471215 - RNA, 19 nt, Artificial Sequence
  Description of Artificial Sequence: Synthetic oligonucleotide
cauacuaccacucugucua

SEQ ID NO: 2471216 - RNA, 19 nt, Artificial Sequence
  Description of Artificial Sequence: Synthetic oligonucleotide
agaccagugaaugaccagg

SEQ ID NO: 2471217 - RNA, 19 nt, Artificial Sequence
  Description of Artificial Sequence: Synthetic oligonucleotide
ugacaacuaauugacugag

SEQ ID NO: 2471218 - RNA, 19 nt, Artificial Sequence
  Description of Artificial Sequence: Synthetic oligonucleotide
acauauugggaucuuguaa

SEQ ID NO: 2471219 - RNA, 19 nt, Artificial Sequence
  Description of Artificial Sequence: Synthetic oligonucleotide
uccagggagcaaaagaauc

SEQ ID NO: 2471220 - RNA, 19 nt, Artificial Sequence
  Description of Artificial Sequence: Synthetic oligonucleotide
auaaaaucuauaagaauau

SEQ ID NO: 2471221 - RNA, 19 nt, Artificial Sequence
  Description of Artificial Sequence: Synthetic oligonucleotide
uuuguuuuauccugaggua

SEQ ID NO: 2471222 - RNA, 19 nt, Artificial Sequence
  Description of Artificial Sequence: Synthetic oligonucleotide
acacuaaguaggaaaauug

SEQ ID NO: 2471223 - RNA, 19 nt, Artificial Sequence
  Description of Artificial Sequence: Synthetic oligonucleotide
agcaaaagaaucaugggau

SEQ ID NO: 2471224 - RNA, 19 nt, Artificial Sequence
  Description of Artificial Sequence: Synthetic oligonucleotide
uaauccaauacaacuucau

SEQ ID NO: 2471225 - RNA, 19 nt, Artificial Sequence
  Description of Artificial Sequence: Synthetic oligonucleotide
caugccauuagcauacuga

SEQ ID NO: 2471226 - RNA, 19 nt, Artificial Sequence
  Description of Artificial Sequence: Synthetic oligonucleotide
gugacaaggucucaccaag

SEQ ID NO: 2471227 - RNA, 19 nt, Artificial Sequence
  Description of Artificial Sequence: Synthetic oligonucleotide
ggggaaggaaaauauuagg

SEQ ID NO: 2471228 - RNA, 19 nt, Artificial Sequence
  Description of Artificial Sequence: Synthetic oligonucleotide
uggacacaacaauucagug

SEQ ID NO: 2471229 - RNA, 19 nt, Artificial Sequence
  Description of Artificial Sequence: Synthetic oligonucleotide
gguucuuuaaucaauuuga

SEQ ID NO: 2471230 - RNA, 19 nt, Artificial Sequence
  Description of Artificial Sequence: Synthetic oligonucleotide
gaccauuuaagaaagaaau

SEQ ID NO: 2471231 - RNA, 19 nt, Artificial Sequence
  Description of Artificial Sequence: Synthetic oligonucleotide
uuuuguguguugaggacua

SEQ ID NO: 2471232 - RNA, 19 nt, Artificial Sequence
  Description of Artificial Sequence: Synthetic oligonucleotide
cuuugagguagagaacugg

SEQ ID NO: 2471233 - RNA, 19 nt, Artificial Sequence
  Description of Artificial Sequence: Synthetic oligonucleotide
ucaauuugaacuggacaca

SEQ ID NO: 2471234 - RNA, 19 nt, Artificial Sequence
  Description of Artificial Sequence: Synthetic oligonucleotide
gagguagagaacuggguca

SEQ ID NO: 2471235 - RNA, 19 nt, Artificial Sequence
  Description of Artificial Sequence: Synthetic oligonucleotide
uuguaaauuuugugacaag

SEQ ID NO: 2471236 - RNA, 19 nt, Artificial Sequence
  Description of Artificial Sequence: Synthetic oligonucleotide
uugugacaaggucucacca

SEQ ID NO: 2471237 - RNA, 19 nt, Artificial Sequence
  Description of Artificial Sequence: Synthetic oligonucleotide
ggagcaaaagaaucauggg

SEQ ID NO: 2471238 - RNA, 19 nt, Artificial Sequence
  Description of Artificial Sequence: Synthetic oligonucleotide
aaauggaauacaauuucua

SEQ ID NO: 2471239 - RNA, 19 nt, Artificial Sequence
  Description of Artificial Sequence: Synthetic oligonucleotide
auaacagugacaacuaauu

SEQ ID NO: 2471240 - RNA, 19 nt, Artificial Sequence
  Description of Artificial Sequence: Synthetic oligonucleotide
ucccauaggaaauggguuc

SEQ ID NO: 2471241 - RNA, 19 nt, Artificial Sequence
  Description of Artificial Sequence: Synthetic oligonucleotide
auacuaauacauauuggga

SEQ ID NO: 2471242 - RNA, 19 nt, Artificial Sequence
  Description of Artificial Sequence: Synthetic oligonucleotide
uguuaccuuuguuccuugg

SEQ ID NO: 2471243 - RNA, 19 nt, Artificial Sequence
  Description of Artificial Sequence: Synthetic oligonucleotide
gagaccaacccauuccuca

SEQ ID NO: 2471244 - RNA, 19 nt, Artificial Sequence
  Description of Artificial Sequence: Synthetic oligonucleotide
uacaaauuuucaguauaac

SEQ ID NO: 2471245 - RNA, 19 nt, Artificial Sequence
  Description of Artificial Sequence: Synthetic oligonucleotide
ugaugcauacuaccacucu

SEQ ID NO: 2471246 - RNA, 19 nt, Artificial Sequence
  Description of Artificial Sequence: Synthetic oligonucleotide
auugggaucuuguaagauu

SEQ ID NO: 2471247 - RNA, 19 nt, Artificial Sequence
  Description of Artificial Sequence: Synthetic oligonucleotide
uaccuuuguuccuugggga

SEQ ID NO: 2471248 - RNA, 19 nt, Artificial Sequence
  Description of Artificial Sequence: Synthetic oligonucleotide
uuguuuuauccugagguau

SEQ ID NO: 2471249 - RNA, 19 nt, Artificial Sequence
  Description of Artificial Sequence: Synthetic oligonucleotide
uuguugcagagaccaaccc

SEQ ID NO: 2471250 - RNA, 19 nt, Artificial Sequence
  Description of Artificial Sequence: Synthetic oligonucleotide
uuagcauacugaugucuac

SEQ ID NO: 2471251 - RNA, 19 nt, Artificial Sequence
  Description of Artificial Sequence: Synthetic oligonucleotide
uguuuuauccugagguauu

SEQ ID NO: 2471252 - RNA, 19 nt, Artificial Sequence
  Description of Artificial Sequence: Synthetic oligonucleotide
cacuaaguaggaaaauuga

SEQ ID NO: 2471253 - RNA, 19 nt, Artificial Sequence
  Description of Artificial Sequence: Synthetic oligonucleotide
ggguucuuuaaucaauuug

SEQ ID NO: 2471254 - RNA, 19 nt, Artificial Sequence
  Description of Artificial Sequence: Synthetic oligonucleotide
caaaagaaucaugggauuc

SEQ ID NO: 2471255 - RNA, 19 nt, Artificial Sequence
  Description of Artificial Sequence: Synthetic oligonucleotide
auauugggaucuuguaaga

SEQ ID NO: 2471256 - RNA, 19 nt, Artificial Sequence
  Description of Artificial Sequence: Synthetic oligonucleotide
ugugacaaggucucaccaa

SEQ ID NO: 2471257 - RNA, 19 nt, Artificial Sequence
  Description of Artificial Sequence: Synthetic oligonucleotide
uucauacaaauaccaguua

SEQ ID NO: 2471258 - RNA, 19 nt, Artificial Sequence
  Description of Artificial Sequence: Synthetic oligonucleotide
gugacaacuaauugacuga

SEQ ID NO: 2471259 - RNA, 19 nt, Artificial Sequence
  Description of Artificial Sequence: Synthetic oligonucleotide
cagauguuucagauguuug

SEQ ID NO: 2471260 - RNA, 19 nt, Artificial Sequence
  Description of Artificial Sequence: Synthetic oligonucleotide
guugaggacuaaauccagg

SEQ ID NO: 2471261 - RNA, 19 nt, Artificial Sequence
  Description of Artificial Sequence: Synthetic oligonucleotide
cuaauugacugagguaaag

SEQ ID NO: 2471262 - RNA, 19 nt, Artificial Sequence
  Description of Artificial Sequence: Synthetic oligonucleotide
aaagcaagauugguuuaga

SEQ ID NO: 2471263 - RNA, 19 nt, Artificial Sequence
  Description of Artificial Sequence: Synthetic oligonucleotide
cauacaaauaccaguuaaa

SEQ ID NO: 2471264 - RNA, 19 nt, Artificial Sequence
  Description of Artificial Sequence: Synthetic oligonucleotide
uacauauugggaucuugua

SEQ ID NO: 2471265 - RNA, 19 nt, Artificial Sequence
  Description of Artificial Sequence: Synthetic oligonucleotide
ugggucagaccccugcuga

SEQ ID NO: 2471266 - RNA, 19 nt, Artificial Sequence
  Description of Artificial Sequence: Synthetic oligonucleotide
gaaauggaguugucauggc

SEQ ID NO: 2471267 - RNA, 19 nt, Artificial Sequence
  Description of Artificial Sequence: Synthetic oligonucleotide
uuucagauguuuguuuuau

SEQ ID NO: 2471268 - RNA, 19 nt, Artificial Sequence
  Description of Artificial Sequence: Synthetic oligonucleotide
gacaacuaauugacugagg

SEQ ID NO: 2471269 - RNA, 19 nt, Artificial Sequence
  Description of Artificial Sequence: Synthetic oligonucleotide
acuaaguaggaaaauugau

SEQ ID NO: 2471270 - RNA, 19 nt, Artificial Sequence
  Description of Artificial Sequence: Synthetic oligonucleotide
auaggaaauggguucuuua

SEQ ID NO: 2471271 - RNA, 19 nt, Artificial Sequence
  Description of Artificial Sequence: Synthetic oligonucleotide
ucacuuugagguagagaac

SEQ ID NO: 2471272 - RNA, 19 nt, Artificial Sequence
  Description of Artificial Sequence: Synthetic oligonucleotide
caguguaauccaauacaac

SEQ ID NO: 2471273 - RNA, 19 nt, Artificial Sequence
  Description of Artificial Sequence: Synthetic oligonucleotide
gccauuagcauacugaugu

SEQ ID NO: 2471274 - RNA, 19 nt, Artificial Sequence
  Description of Artificial Sequence: Synthetic oligonucleotide
uuagaccauuuaagaaaga

SEQ ID NO: 2471275 - RNA, 19 nt, Artificial Sequence
  Description of Artificial Sequence: Synthetic oligonucleotide
uacugaugucuacacccug

SEQ ID NO: 2471276 - RNA, 19 nt, Artificial Sequence
  Description of Artificial Sequence: Synthetic oligonucleotide
uccugagguauucuugcaa

SEQ ID NO: 2471277 - RNA, 19 nt, Artificial Sequence
  Description of Artificial Sequence: Synthetic oligonucleotide
ugcagagaccaacccauuc

SEQ ID NO: 2471278 - RNA, 19 nt, Artificial Sequence
  Description of Artificial Sequence: Synthetic oligonucleotide
caguauaacagugacaacu

SEQ ID NO: 2471279 - RNA, 19 nt, Artificial Sequence
  Description of Artificial Sequence: Synthetic oligonucleotide
uuccucaugccauuagcau

SEQ ID NO: 2471280 - RNA, 19 nt, Artificial Sequence
  Description of Artificial Sequence: Synthetic oligonucleotide
uagcauacugaugucuaca

SEQ ID NO: 2471281 - RNA, 19 nt, Artificial Sequence
  Description of Artificial Sequence: Synthetic oligonucleotide
aaauaacacuaaguaggaa

SEQ ID NO: 2471282 - RNA, 19 nt, Artificial Sequence
  Description of Artificial Sequence: Synthetic oligonucleotide
guguguugaggacuaaauc

SEQ ID NO: 2471283 - RNA, 19 nt, Artificial Sequence
  Description of Artificial Sequence: Synthetic oligonucleotide
gaacaagaccagugaauga

SEQ ID NO: 2471284 - RNA, 19 nt, Artificial Sequence
  Description of Artificial Sequence: Synthetic oligonucleotide
ugucaucuuuauacuaaua

SEQ ID NO: 2471285 - RNA, 19 nt, Artificial Sequence
  Description of Artificial Sequence: Synthetic oligonucleotide
ucugucuacuuuguaaauu

SEQ ID NO: 2471286 - RNA, 19 nt, Artificial Sequence
  Description of Artificial Sequence: Synthetic oligonucleotide
gguuuagaccauuuaagaa

SEQ ID NO: 2471287 - RNA, 19 nt, Artificial Sequence
  Description of Artificial Sequence: Synthetic oligonucleotide
cuaaguaggaaaauugauu

SEQ ID NO: 2471288 - RNA, 19 nt, Artificial Sequence
  Description of Artificial Sequence: Synthetic oligonucleotide
aggacuaaauccagggucu

SEQ ID NO: 2471289 - RNA, 19 nt, Artificial Sequence
  Description of Artificial Sequence: Synthetic oligonucleotide
cuucauacaaauaccaguu

SEQ ID NO: 2471290 - RNA, 19 nt, Artificial Sequence
  Description of Artificial Sequence: Synthetic oligonucleotide
acuaaauccagggucugau

SEQ ID NO: 2471291 - RNA, 19 nt, Artificial Sequence
  Description of Artificial Sequence: Synthetic oligonucleotide
ucucaucccauaggaaaug

SEQ ID NO: 2471292 - RNA, 19 nt, Artificial Sequence
  Description of Artificial Sequence: Synthetic oligonucleotide
cugagaacaagaccaguga

SEQ ID NO: 2471293 - RNA, 19 nt, Artificial Sequence
  Description of Artificial Sequence: Synthetic oligonucleotide
gucucaccaaguugccugg

SEQ ID NO: 2471294 - RNA, 19 nt, Artificial Sequence
  Description of Artificial Sequence: Synthetic oligonucleotide
auacuaccacucugucuac

SEQ ID NO: 2471295 - RNA, 19 nt, Artificial Sequence
  Description of Artificial Sequence: Synthetic oligonucleotide
caauacaacuucauacaaa

SEQ ID NO: 2471296 - RNA, 19 nt, Artificial Sequence
  Description of Artificial Sequence: Synthetic oligonucleotide
aguauaacagugacaacua

SEQ ID NO: 2471297 - RNA, 19 nt, Artificial Sequence
  Description of Artificial Sequence: Synthetic oligonucleotide
ugcauacuaccacucuguc

SEQ ID NO: 2471298 - RNA, 19 nt, Artificial Sequence
  Description of Artificial Sequence: Synthetic oligonucleotide
ugacaaggucucaccaagu

SEQ ID NO: 2471299 - RNA, 19 nt, Artificial Sequence
  Description of Artificial Sequence: Synthetic oligonucleotide
agaccauuuaagaaagaaa

SEQ ID NO: 2471300 - RNA, 19 nt, Artificial Sequence
  Description of Artificial Sequence: Synthetic oligonucleotide
cugaugcauacuaccacuc

SEQ ID NO: 2471301 - RNA, 19 nt, Artificial Sequence
  Description of Artificial Sequence: Synthetic oligonucleotide
gcagagaccaacccauucc

SEQ ID NO: 2471302 - RNA, 19 nt, Artificial Sequence
  Description of Artificial Sequence: Synthetic oligonucleotide
guagagaacugggucagac

SEQ ID NO: 2471303 - RNA, 19 nt, Artificial Sequence
  Description of Artificial Sequence: Synthetic oligonucleotide
uuuuauccugagguauucu

SEQ ID NO: 2471304 - RNA, 19 nt, Artificial Sequence
  Description of Artificial Sequence: Synthetic oligonucleotide
augggauucuuaaaccaug

SEQ ID NO: 2471305 - RNA, 19 nt, Artificial Sequence
  Description of Artificial Sequence: Synthetic oligonucleotide
gauugguuuagaccauuua

SEQ ID NO: 2471306 - RNA, 19 nt, Artificial Sequence
  Description of Artificial Sequence: Synthetic oligonucleotide
caguuaaauaacacuaagu

SEQ ID NO: 2471307 - RNA, 19 nt, Artificial Sequence
  Description of Artificial Sequence: Synthetic oligonucleotide
guaaauuuugugacaaggu

SEQ ID NO: 2471308 - RNA, 19 nt, Artificial Sequence
  Description of Artificial Sequence: Synthetic oligonucleotide
gggucugaugcauacuacc

SEQ ID NO: 2471309 - RNA, 19 nt, Artificial Sequence
  Description of Artificial Sequence: Synthetic oligonucleotide
uauugggaucuuguaagau

SEQ ID NO: 2471310 - RNA, 19 nt, Artificial Sequence
  Description of Artificial Sequence: Synthetic oligonucleotide
agaaagaaauggaguuguc

SEQ ID NO: 2471311 - RNA, 19 nt, Artificial Sequence
  Description of Artificial Sequence: Synthetic oligonucleotide
auuagcauacugaugucua

SEQ ID NO: 2471312 - RNA, 19 nt, Artificial Sequence
  Description of Artificial Sequence: Synthetic oligonucleotide
gaccagugaaugaccaggc

SEQ ID NO: 2471313 - RNA, 19 nt, Artificial Sequence
  Description of Artificial Sequence: Synthetic oligonucleotide
aacucacuuugagguagag

SEQ ID NO: 2471314 - RNA, 19 nt, Artificial Sequence
  Description of Artificial Sequence: Synthetic oligonucleotide
aucuuuauacuaauacaua

SEQ ID NO: 2471315 - RNA, 19 nt, Artificial Sequence
  Description of Artificial Sequence: Synthetic oligonucleotide
uggcaauugcacuuuuauu

SEQ ID NO: 2471316 - RNA, 19 nt, Artificial Sequence
  Description of Artificial Sequence: Synthetic oligonucleotide
acuaccacucugucuacuu

SEQ ID NO: 2471317 - RNA, 19 nt, Artificial Sequence
  Description of Artificial Sequence: Synthetic oligonucleotide
augcauacuaccacucugu

SEQ ID NO: 2471318 - RNA, 19 nt, Artificial Sequence
  Description of Artificial Sequence: Synthetic oligonucleotide
cuuuauacuaauacauauu

SEQ ID NO: 2471319 - RNA, 19 nt, Artificial Sequence
  Description of Artificial Sequence: Synthetic oligonucleotide
cucaccaaguugccugggc

SEQ ID NO: 2471320 - RNA, 19 nt, Artificial Sequence
  Description of Artificial Sequence: Synthetic oligonucleotide
accaguuaaauaacacuaa

SEQ ID NO: 2471321 - RNA, 19 nt, Artificial Sequence
  Description of Artificial Sequence: Synthetic oligonucleotide
cuggacacaacaauucagu

SEQ ID NO: 2471322 - RNA, 19 nt, Artificial Sequence
  Description of Artificial Sequence: Synthetic oligonucleotide
gaccaacccauuccucaug

SEQ ID NO: 2471323 - RNA, 19 nt, Artificial Sequence
  Description of Artificial Sequence: Synthetic oligonucleotide
ugaugucuacacccuggau

SEQ ID NO: 2471324 - RNA, 19 nt, Artificial Sequence
  Description of Artificial Sequence: Synthetic oligonucleotide
aagauugguuuagaccauu

SEQ ID NO: 2471325 - RNA, 19 nt, Artificial Sequence
  Description of Artificial Sequence: Synthetic oligonucleotide
aacuuggcacuguuaccuu

SEQ ID NO: 2471326 - RNA, 19 nt, Artificial Sequence
  Description of Artificial Sequence: Synthetic oligonucleotide
guauaacagugacaacuaa

SEQ ID NO: 2471327 - RNA, 19 nt, Artificial Sequence
  Description of Artificial Sequence: Synthetic oligonucleotide
acuguuaccuuuguuccuu

SEQ ID NO: 2471328 - RNA, 19 nt, Artificial Sequence
  Description of Artificial Sequence: Synthetic oligonucleotide
uggguucuuuaaucaauuu

SEQ ID NO: 2471329 - RNA, 19 nt, Artificial Sequence
  Description of Artificial Sequence: Synthetic oligonucleotide
uccuuggggaaggaaaaua

SEQ ID NO: 2471330 - RNA, 19 nt, Artificial Sequence
  Description of Artificial Sequence: Synthetic oligonucleotide
agcucuuguugcagagacc

SEQ ID NO: 2471331 - RNA, 19 nt, Artificial Sequence
  Description of Artificial Sequence: Synthetic oligonucleotide
accagugaaugaccaggcu

SEQ ID NO: 2471332 - RNA, 19 nt, Artificial Sequence
  Description of Artificial Sequence: Synthetic oligonucleotide
ucuacacccuggaucucau

SEQ ID NO: 2471333 - RNA, 19 nt, Artificial Sequence
  Description of Artificial Sequence: Synthetic oligonucleotide
agaccaacccauuccucau

SEQ ID NO: 2471334 - RNA, 19 nt, Artificial Sequence
  Description of Artificial Sequence: Synthetic oligonucleotide
uuguguguugaggacuaaa

SEQ ID NO: 2471335 - RNA, 19 nt, Artificial Sequence
  Description of Artificial Sequence: Synthetic oligonucleotide
gaacuuggcaauugcacuu

SEQ ID NO: 2471336 - RNA, 19 nt, Artificial Sequence
  Description of Artificial Sequence: Synthetic oligonucleotide
aucucaucccauaggaaau

SEQ ID NO: 2471337 - RNA, 19 nt, Artificial Sequence
  Description of Artificial Sequence: Synthetic oligonucleotide
auacugaugucuacacccu

SEQ ID NO: 2471338 - RNA, 19 nt, Artificial Sequence
  Description of Artificial Sequence: Synthetic oligonucleotide
cuaauacauauugggaucu

SEQ ID NO: 2471339 - RNA, 19 nt, Artificial Sequence
  Description of Artificial Sequence: Synthetic oligonucleotide
cagauguuuguuuuauccu

SEQ ID NO: 2471340 - RNA, 19 nt, Artificial Sequence
  Description of Artificial Sequence: Synthetic oligonucleotide
guuucagauguuuguuuua

SEQ ID NO: 2471341 - RNA, 19 nt, Artificial Sequence
  Description of Artificial Sequence: Synthetic oligonucleotide
agagaccaacccauuccuc

SEQ ID NO: 2471342 - RNA, 19 nt, Artificial Sequence
  Description of Artificial Sequence: Synthetic oligonucleotide
gcauacugaugucuacacc

SEQ ID NO: 2471343 - RNA, 19 nt, Artificial Sequence
  Description of Artificial Sequence: Synthetic oligonucleotide
caacuaauugacugaggua

SEQ ID NO: 2471344 - RNA, 19 nt, Artificial Sequence
  Description of Artificial Sequence: Synthetic oligonucleotide
acaauucaguguaauccaa

SEQ ID NO: 2471345 - RNA, 19 nt, Artificial Sequence
  Description of Artificial Sequence: Synthetic oligonucleotide
ucucaccaaguugccuggg

SEQ ID NO: 2471346 - RNA, 19 nt, Artificial Sequence
  Description of Artificial Sequence: Synthetic oligonucleotide
acucacuuugagguagaga

SEQ ID NO: 2471347 - RNA, 19 nt, Artificial Sequence
  Description of Artificial Sequence: Synthetic oligonucleotide
ugcugagaacaagaccagu

SEQ ID NO: 2471348 - RNA, 19 nt, Artificial Sequence
  Description of Artificial Sequence: Synthetic oligonucleotide
ggacacaacaauucagugu

SEQ ID NO: 2471349 - RNA, 19 nt, Artificial Sequence
  Description of Artificial Sequence: Synthetic oligonucleotide
ugggaucuuguaagauuua

SEQ ID NO: 2471350 - RNA, 19 nt, Artificial Sequence
  Description of Artificial Sequence: Synthetic oligonucleotide
aucccauaggaaauggguu

SEQ ID NO: 2471351 - RNA, 19 nt, Artificial Sequence
  Description of Artificial Sequence: Synthetic oligonucleotide
gacuaaauccagggucuga

SEQ ID NO: 2471352 - RNA, 19 nt, Artificial Sequence
  Description of Artificial Sequence: Synthetic oligonucleotide
agggagcaaaagaaucaug

SEQ ID NO: 2471353 - RNA, 19 nt, Artificial Sequence
  Description of Artificial Sequence: Synthetic oligonucleotide
acuaauugacugagguaaa

SEQ ID NO: 2471354 - RNA, 19 nt, Artificial Sequence
  Description of Artificial Sequence: Synthetic oligonucleotide
cuguuaccuuuguuccuug

SEQ ID NO: 2471355 - RNA, 19 nt, Artificial Sequence
  Description of Artificial Sequence: Synthetic oligonucleotide
uaauacauauugggaucuu

SEQ ID NO: 2471356 - RNA, 19 nt, Artificial Sequence
  Description of Artificial Sequence: Synthetic oligonucleotide
cugagguauucuugcaaaa

SEQ ID NO: 2471357 - RNA, 19 nt, Artificial Sequence
  Description of Artificial Sequence: Synthetic oligonucleotide
cagggucugaugcauacua

SEQ ID NO: 2471358 - RNA, 19 nt, Artificial Sequence
  Description of Artificial Sequence: Synthetic oligonucleotide
uacuaccacucugucuacu

SEQ ID NO: 2471359 - RNA, 19 nt, Artificial Sequence
  Description of Artificial Sequence: Synthetic oligonucleotide
cagaccccugcugagaaca

SEQ ID NO: 2471360 - RNA, 19 nt, Artificial Sequence
  Description of Artificial Sequence: Synthetic oligonucleotide
ggucugaugcauacuacca

SEQ ID NO: 2471361 - RNA, 19 nt, Artificial Sequence
  Description of Artificial Sequence: Synthetic oligonucleotide
gaccccugcugagaacaag

SEQ ID NO: 2471362 - RNA, 19 nt, Artificial Sequence
  Description of Artificial Sequence: Synthetic oligonucleotide
gucuacacccuggaucuca

SEQ ID NO: 2471363 - RNA, 19 nt, Artificial Sequence
  Description of Artificial Sequence: Synthetic oligonucleotide
agauugguuuagaccauuu

SEQ ID NO: 2471364 - RNA, 19 nt, Artificial Sequence
  Description of Artificial Sequence: Synthetic oligonucleotide
caauucaguguaauccaau

SEQ ID NO: 2471365 - RNA, 19 nt, Artificial Sequence
  Description of Artificial Sequence: Synthetic oligonucleotide
ggaucuuguaagauuuaaa

SEQ ID NO: 2471366 - RNA, 19 nt, Artificial Sequence
  Description of Artificial Sequence: Synthetic oligonucleotide
auacaacuucauacaaaua

SEQ ID NO: 2471367 - RNA, 19 nt, Artificial Sequence
  Description of Artificial Sequence: Synthetic oligonucleotide
uuuguguguugaggacuaa

SEQ ID NO: 2471368 - RNA, 19 nt, Artificial Sequence
  Description of Artificial Sequence: Synthetic oligonucleotide
uggcacuguuaccuuuguu

SEQ ID NO: 2471369 - RNA, 19 nt, Artificial Sequence
  Description of Artificial Sequence: Synthetic oligonucleotide
gggaucuuguaagauuuaa

SEQ ID NO: 2471370 - RNA, 19 nt, Artificial Sequence
  Description of Artificial Sequence: Synthetic oligonucleotide
acccauuccucaugccauu

SEQ ID NO: 2471371 - RNA, 19 nt, Artificial Sequence
  Description of Artificial Sequence: Synthetic oligonucleotide
cuuaaaccaugggcuccug

SEQ ID NO: 2471372 - RNA, 19 nt, Artificial Sequence
  Description of Artificial Sequence: Synthetic oligonucleotide
gcauacuaccacucugucu

SEQ ID NO: 2471373 - RNA, 19 nt, Artificial Sequence
  Description of Artificial Sequence: Synthetic oligonucleotide
caagauugguuuagaccau

SEQ ID NO: 2471374 - RNA, 19 nt, Artificial Sequence
  Description of Artificial Sequence: Synthetic oligonucleotide
ccaacccauuccucaugcc

SEQ ID NO: 2471375 - RNA, 19 nt, Artificial Sequence
  Description of Artificial Sequence: Synthetic oligonucleotide
acacaacaauucaguguaa

SEQ ID NO: 2471376 - RNA, 19 nt, Artificial Sequence
  Description of Artificial Sequence: Synthetic oligonucleotide
ugucuacacccuggaucuc

SEQ ID NO: 2471377 - RNA, 19 nt, Artificial Sequence
  Description of Artificial Sequence: Synthetic oligonucleotide
uggaguugucauggcuguu

SEQ ID NO: 2471378 - RNA, 19 nt, Artificial Sequence
  Description of Artificial Sequence: Synthetic oligonucleotide
ggaucucaucccauaggaa

SEQ ID NO: 2471379 - RNA, 19 nt, Artificial Sequence
  Description of Artificial Sequence: Synthetic oligonucleotide
cagggagcaaaagaaucau

SEQ ID NO: 2471380 - RNA, 19 nt, Artificial Sequence
  Description of Artificial Sequence: Synthetic oligonucleotide
ggaguugucauggcuguuu

SEQ ID NO: 2471381 - RNA, 19 nt, Artificial Sequence
  Description of Artificial Sequence: Synthetic oligonucleotide
gguagagaacugggucaga

SEQ ID NO: 2471382 - RNA, 19 nt, Artificial Sequence
  Description of Artificial Sequence: Synthetic oligonucleotide
acccuggaucucaucccau

SEQ ID NO: 2471383 - RNA, 19 nt, Artificial Sequence
  Description of Artificial Sequence: Synthetic oligonucleotide
agaccccugcugagaacaa

SEQ ID NO: 2471384 - RNA, 19 nt, Artificial Sequence
  Description of Artificial Sequence: Synthetic oligonucleotide
cucaugccauuagcauacu

SEQ ID NO: 2471385 - RNA, 19 nt, Artificial Sequence
  Description of Artificial Sequence: Synthetic oligonucleotide
caaguugccugggcugguu

SEQ ID NO: 2471386 - RNA, 19 nt, Artificial Sequence
  Description of Artificial Sequence: Synthetic oligonucleotide
cccauuccucaugccauua

SEQ ID NO: 2471387 - RNA, 19 nt, Artificial Sequence
  Description of Artificial Sequence: Synthetic oligonucleotide
ccagggucugaugcauacu

SEQ ID NO: 2471388 - RNA, 19 nt, Artificial Sequence
  Description of Artificial Sequence: Synthetic oligonucleotide
ccaugggcuccugccagcu

SEQ ID NO: 2471389 - RNA, 19 nt, Artificial Sequence
  Description of Artificial Sequence: Synthetic oligonucleotide
ccaaguugccugggcuggu

SEQ ID NO: 2471390 - RNA, 19 nt, Artificial Sequence
  Description of Artificial Sequence: Synthetic oligonucleotide
gauaaauccauuuucuggg

SEQ ID NO: 2471391 - RNA, 19 nt, Artificial Sequence
  Description of Artificial Sequence: Synthetic oligonucleotide
uuuuccauuauugagaaug

SEQ ID NO: 2471392 - RNA, 19 nt, Artificial Sequence
  Description of Artificial Sequence: Synthetic oligonucleotide
uuuucagacagcuuauucg

SEQ ID NO: 2471393 - RNA, 19 nt, Artificial Sequence
  Description of Artificial Sequence: Synthetic oligonucleotide
uuuaacuucuucccaacgg

SEQ ID NO: 2471394 - RNA, 19 nt, Artificial Sequence
  Description of Artificial Sequence: Synthetic oligonucleotide
uauacacucucugaaaugg

SEQ ID NO: 2471395 - RNA, 19 nt, Artificial Sequence
  Description of Artificial Sequence: Synthetic oligonucleotide
auauggcuuucucugaucc

SEQ ID NO: 2471396 - RNA, 19 nt, Artificial Sequence
  Description of Artificial Sequence: Synthetic oligonucleotide
cugacaaccggcuugaggc

SEQ ID NO: 2471397 - RNA, 19 nt, Artificial Sequence
  Description of Artificial Sequence: Synthetic oligonucleotide
aaagacuuucuccucuggg

SEQ ID NO: 2471398 - RNA, 19 nt, Artificial Sequence
  Description of Artificial Sequence: Synthetic oligonucleotide
acaacagagccuuugggcg

SEQ ID NO: 2471399 - RNA, 19 nt, Artificial Sequence
  Description of Artificial Sequence: Synthetic oligonucleotide
ugaaaugcuuuccugaggu

SEQ ID NO: 2471400 - RNA, 19 nt, Artificial Sequence
  Description of Artificial Sequence: Synthetic oligonucleotide
uccauuauugagaauguac

SEQ ID NO: 2471401 - RNA, 19 nt, Artificial Sequence
  Description of Artificial Sequence: Synthetic oligonucleotide
uaagacacgaaauuuuaac

SEQ ID NO: 2471402 - RNA, 19 nt, Artificial Sequence
  Description of Artificial Sequence: Synthetic oligonucleotide
gaaauggggagauugucag

SEQ ID NO: 2471403 - RNA, 19 nt, Artificial Sequence
  Description of Artificial Sequence: Synthetic oligonucleotide
uucauugucacugauacau

SEQ ID NO: 2471404 - RNA, 19 nt, Artificial Sequence
  Description of Artificial Sequence: Synthetic oligonucleotide
aauccaguaagacacgaaa

SEQ ID NO: 2471405 - RNA, 19 nt, Artificial Sequence
  Description of Artificial Sequence: Synthetic oligonucleotide
aaucuuauacacucucuga

SEQ ID NO: 2471406 - RNA, 19 nt, Artificial Sequence
  Description of Artificial Sequence: Synthetic oligonucleotide
aaaaucaaucacagcaggg

SEQ ID NO: 2471407 - RNA, 19 nt, Artificial Sequence
  Description of Artificial Sequence: Synthetic oligonucleotide
augucuaccucuuucaugu

SEQ ID NO: 2471408 - RNA, 19 nt, Artificial Sequence
  Description of Artificial Sequence: Synthetic oligonucleotide
aaugucuaccucuuucaug

SEQ ID NO: 2471409 - RNA, 19 nt, Artificial Sequence
  Description of Artificial Sequence: Synthetic oligonucleotide
auaucuugaaaugcuuucc

SEQ ID NO: 2471410 - RNA, 19 nt, Artificial Sequence
  Description of Artificial Sequence: Synthetic oligonucleotide
uacacucucugaaaugggg

SEQ ID NO: 2471411 - RNA, 19 nt, Artificial Sequence
  Description of Artificial Sequence: Synthetic oligonucleotide
auuuuaacuucuucccaac

SEQ ID NO: 2471412 - RNA, 19 nt, Artificial Sequence
  Description of Artificial Sequence: Synthetic oligonucleotide
cauugucacugauacaugg

SEQ ID NO: 2471413 - RNA, 19 nt, Artificial Sequence
  Description of Artificial Sequence: Synthetic oligonucleotide
uccagauaaauccauuuuc

SEQ ID NO: 2471414 - RNA, 19 nt, Artificial Sequence
  Description of Artificial Sequence: Synthetic oligonucleotide
ugaaauggggagauuguca

SEQ ID NO: 2471415 - RNA, 19 nt, Artificial Sequence
  Description of Artificial Sequence: Synthetic oligonucleotide
uuaaauccaguaagacacg

SEQ ID NO: 2471416 - RNA, 19 nt, Artificial Sequence
  Description of Artificial Sequence: Synthetic oligonucleotide
uuucagacagcuuauucgu

SEQ ID NO: 2471417 - RNA, 19 nt, Artificial Sequence
  Description of Artificial Sequence: Synthetic oligonucleotide
cauuauugagaauguacag

SEQ ID NO: 2471418 - RNA, 19 nt, Artificial Sequence
  Description of Artificial Sequence: Synthetic oligonucleotide
ugguuguccaacauuuucc

SEQ ID NO: 2471419 - RNA, 19 nt, Artificial Sequence
  Description of Artificial Sequence: Synthetic oligonucleotide
agggauauggcuuucucug

SEQ ID NO: 2471420 - RNA, 19 nt, Artificial Sequence
  Description of Artificial Sequence: Synthetic oligonucleotide
uugaaaugcuuuccugagg

SEQ ID NO: 2471421 - RNA, 19 nt, Artificial Sequence
  Description of Artificial Sequence: Synthetic oligonucleotide
auucuacccacucagaaaa

SEQ ID NO: 2471422 - RNA, 19 nt, Artificial Sequence
  Description of Artificial Sequence: Synthetic oligonucleotide
uaaauccauuuucugggag

SEQ ID NO: 2471423 - RNA, 19 nt, Artificial Sequence
  Description of Artificial Sequence: Synthetic oligonucleotide
aacagcuuuaaauccagua

SEQ ID NO: 2471424 - RNA, 19 nt, Artificial Sequence
  Description of Artificial Sequence: Synthetic oligonucleotide
aauggggagauugucagga

SEQ ID NO: 2471425 - RNA, 19 nt, Artificial Sequence
  Description of Artificial Sequence: Synthetic oligonucleotide
acgaaauuuuaacuucuuc

SEQ ID NO: 2471426 - RNA, 19 nt, Artificial Sequence
  Description of Artificial Sequence: Synthetic oligonucleotide
auucgccaaucuuauacac

SEQ ID NO: 2471427 - RNA, 19 nt, Artificial Sequence
  Description of Artificial Sequence: Synthetic oligonucleotide
aauccauuuucugggagag

SEQ ID NO: 2471428 - RNA, 19 nt, Artificial Sequence
  Description of Artificial Sequence: Synthetic oligonucleotide
augguuguccaacauuuuc

SEQ ID NO: 2471429 - RNA, 19 nt, Artificial Sequence
  Description of Artificial Sequence: Synthetic oligonucleotide
guuuugucacugcacacgg

SEQ ID NO: 2471430 - RNA, 19 nt, Artificial Sequence
  Description of Artificial Sequence: Synthetic oligonucleotide
cuuuaaauccaguaagaca

SEQ ID NO: 2471431 - RNA, 19 nt, Artificial Sequence
  Description of Artificial Sequence: Synthetic oligonucleotide
uucauuccagauaaaucca

SEQ ID NO: 2471432 - RNA, 19 nt, Artificial Sequence
  Description of Artificial Sequence: Synthetic oligonucleotide
uggggcaagcucaaaauca

SEQ ID NO: 2471433 - RNA, 19 nt, Artificial Sequence
  Description of Artificial Sequence: Synthetic oligonucleotide
uccauuuucugggagagca

SEQ ID NO: 2471434 - RNA, 19 nt, Artificial Sequence
  Description of Artificial Sequence: Synthetic oligonucleotide
gacacgaaauuuuaacuuc

SEQ ID NO: 2471435 - RNA, 19 nt, Artificial Sequence
  Description of Artificial Sequence: Synthetic oligonucleotide
ugucacugauacaugguug

SEQ ID NO: 2471436 - RNA, 19 nt, Artificial Sequence
  Description of Artificial Sequence: Synthetic oligonucleotide
ugauggcccagcaacaaca

SEQ ID NO: 2471437 - RNA, 19 nt, Artificial Sequence
  Description of Artificial Sequence: Synthetic oligonucleotide
uccguuuugucacugcaca

SEQ ID NO: 2471438 - RNA, 19 nt, Artificial Sequence
  Description of Artificial Sequence: Synthetic oligonucleotide
acugauacaugguugucca

SEQ ID NO: 2471439 - RNA, 19 nt, Artificial Sequence
  Description of Artificial Sequence: Synthetic oligonucleotide
ugagaauguacagucuucc

SEQ ID NO: 2471440 - RNA, 19 nt, Artificial Sequence
  Description of Artificial Sequence: Synthetic oligonucleotide
uugggcauacgacaucucc

SEQ ID NO: 2471441 - RNA, 19 nt, Artificial Sequence
  Description of Artificial Sequence: Synthetic oligonucleotide
uaacuucuucccaacggag

SEQ ID NO: 2471442 - RNA, 19 nt, Artificial Sequence
  Description of Artificial Sequence: Synthetic oligonucleotide
caaucuuauacacucucug

SEQ ID NO: 2471443 - RNA, 19 nt, Artificial Sequence
  Description of Artificial Sequence: Synthetic oligonucleotide
ugauucuacccacucagaa

SEQ ID NO: 2471444 - RNA, 19 nt, Artificial Sequence
  Description of Artificial Sequence: Synthetic oligonucleotide
aggguuauuacacucccga

SEQ ID NO: 2471445 - RNA, 19 nt, Artificial Sequence
  Description of Artificial Sequence: Synthetic oligonucleotide
ucucucaacaaugucuacc

SEQ ID NO: 2471446 - RNA, 19 nt, Artificial Sequence
  Description of Artificial Sequence: Synthetic oligonucleotide
uccuucacugauucuaccc

SEQ ID NO: 2471447 - RNA, 19 nt, Artificial Sequence
  Description of Artificial Sequence: Synthetic oligonucleotide
uccaguaagacacgaaauu

SEQ ID NO: 2471448 - RNA, 19 nt, Artificial Sequence
  Description of Artificial Sequence: Synthetic oligonucleotide
ucgccaaucuuauacacuc

SEQ ID NO: 2471449 - RNA, 19 nt, Artificial Sequence
  Description of Artificial Sequence: Synthetic oligonucleotide
aucuuauacacucucugaa

SEQ ID NO: 2471450 - RNA, 19 nt, Artificial Sequence
  Description of Artificial Sequence: Synthetic oligonucleotide
ugucagcucaauuggauuc

SEQ ID NO: 2471451 - RNA, 19 nt, Artificial Sequence
  Description of Artificial Sequence: Synthetic oligonucleotide
uacgacaucuccuugccuc

SEQ ID NO: 2471452 - RNA, 19 nt, Artificial Sequence
  Description of Artificial Sequence: Synthetic oligonucleotide
aggacauccugacaaccgg

SEQ ID NO: 2471453 - RNA, 19 nt, Artificial Sequence
  Description of Artificial Sequence: Synthetic oligonucleotide
aauuggauucgccaaucuu

SEQ ID NO: 2471454 - RNA, 19 nt, Artificial Sequence
  Description of Artificial Sequence: Synthetic oligonucleotide
uggagcacacugacaaggg

SEQ ID NO: 2471455 - RNA, 19 nt, Artificial Sequence
  Description of Artificial Sequence: Synthetic oligonucleotide
uauugagaauguacagucu

SEQ ID NO: 2471456 - RNA, 19 nt, Artificial Sequence
  Description of Artificial Sequence: Synthetic oligonucleotide
gaauguacagucuuccucu

SEQ ID NO: 2471457 - RNA, 19 nt, Artificial Sequence
  Description of Artificial Sequence: Synthetic oligonucleotide
agcucaaaaucaaucacag

SEQ ID NO: 2471458 - RNA, 19 nt, Artificial Sequence
  Description of Artificial Sequence: Synthetic oligonucleotide
agcucaauuggauucgcca

SEQ ID NO: 2471459 - RNA, 19 nt, Artificial Sequence
  Description of Artificial Sequence: Synthetic oligonucleotide
gauguuucugaccaagucu

SEQ ID NO: 2471460 - RNA, 19 nt, Artificial Sequence
  Description of Artificial Sequence: Synthetic oligonucleotide
ggauucgccaaucuuauac

SEQ ID NO: 2471461 - RNA, 19 nt, Artificial Sequence
  Description of Artificial Sequence: Synthetic oligonucleotide
uugaggacacccugaaucu

SEQ ID NO: 2471462 - RNA, 19 nt, Artificial Sequence
  Description of Artificial Sequence: Synthetic oligonucleotide
uuuccuucacugauucuac

SEQ ID NO: 2471463 - RNA, 19 nt, Artificial Sequence
  Description of Artificial Sequence: Synthetic oligonucleotide
agauugucaggacauccug

SEQ ID NO: 2471464 - RNA, 19 nt, Artificial Sequence
  Description of Artificial Sequence: Synthetic oligonucleotide
gauacaugguuguccaaca

SEQ ID NO: 2471465 - RNA, 19 nt, Artificial Sequence
  Description of Artificial Sequence: Synthetic oligonucleotide
acgacaucuccuugccucc

SEQ ID NO: 2471466 - RNA, 19 nt, Artificial Sequence
  Description of Artificial Sequence: Synthetic oligonucleotide
uacccacucagaaaagacu

SEQ ID NO: 2471467 - RNA, 19 nt, Artificial Sequence
  Description of Artificial Sequence: Synthetic oligonucleotide
gaaguacugguauccaaca

SEQ ID NO: 2471468 - RNA, 19 nt, Artificial Sequence
  Description of Artificial Sequence: Synthetic oligonucleotide
uuuugucacugcacacggg

SEQ ID NO: 2471469 - RNA, 19 nt, Artificial Sequence
  Description of Artificial Sequence: Synthetic oligonucleotide
cauacgacaucuccuugcc

SEQ ID NO: 2471470 - RNA, 19 nt, Artificial Sequence
  Description of Artificial Sequence: Synthetic oligonucleotide
ggcgaugucagcucaauug

SEQ ID NO: 2471471 - RNA, 19 nt, Artificial Sequence
  Description of Artificial Sequence: Synthetic oligonucleotide
aucuugaaaugcuuuccug

SEQ ID NO: 2471472 - RNA, 19 nt, Artificial Sequence
  Description of Artificial Sequence: Synthetic oligonucleotide
caggacauccugacaaccg

SEQ ID NO: 2471473 - RNA, 19 nt, Artificial Sequence
  Description of Artificial Sequence: Synthetic oligonucleotide
uugagaauguacagucuuc

SEQ ID NO: 2471474 - RNA, 19 nt, Artificial Sequence
  Description of Artificial Sequence: Synthetic oligonucleotide
auaaauccauuuucuggga

SEQ ID NO: 2471475 - RNA, 19 nt, Artificial Sequence
  Description of Artificial Sequence: Synthetic oligonucleotide
aguacaguuucuuuucauu

SEQ ID NO: 2471476 - RNA, 19 nt, Artificial Sequence
  Description of Artificial Sequence: Synthetic oligonucleotide
aaucugcuucucucucaac

SEQ ID NO: 2471477 - RNA, 19 nt, Artificial Sequence
  Description of Artificial Sequence: Synthetic oligonucleotide
uguccguuuugucacugca

SEQ ID NO: 2471478 - RNA, 19 nt, Artificial Sequence
  Description of Artificial Sequence: Synthetic oligonucleotide
uuggauucgccaaucuuau

SEQ ID NO: 2471479 - RNA, 19 nt, Artificial Sequence
  Description of Artificial Sequence: Synthetic oligonucleotide
gauucgccaaucuuauaca

SEQ ID NO: 2471480 - RNA, 19 nt, Artificial Sequence
  Description of Artificial Sequence: Synthetic oligonucleotide
cuacccacucagaaaagac

SEQ ID NO: 2471481 - RNA, 19 nt, Artificial Sequence
  Description of Artificial Sequence: Synthetic oligonucleotide
ugggcauacgacaucuccu

SEQ ID NO: 2471482 - RNA, 19 nt, Artificial Sequence
  Description of Artificial Sequence: Synthetic oligonucleotide
gaucccugcaagaaggaac

SEQ ID NO: 2471483 - RNA, 19 nt, Artificial Sequence
  Description of Artificial Sequence: Synthetic oligonucleotide
ugacaagggucgaaacuug

SEQ ID NO: 2471484 - RNA, 19 nt, Artificial Sequence
  Description of Artificial Sequence: Synthetic oligonucleotide
ucauugucacugauacaug

SEQ ID NO: 2471485 - RNA, 19 nt, Artificial Sequence
  Description of Artificial Sequence: Synthetic oligonucleotide
uaaauccaguaagacacga

SEQ ID NO: 2471486 - RNA, 19 nt, Artificial Sequence
  Description of Artificial Sequence: Synthetic oligonucleotide
uugucacugauacaugguu

SEQ ID NO: 2471487 - RNA, 19 nt, Artificial Sequence
  Description of Artificial Sequence: Synthetic oligonucleotide
caacaacagagccuuuggg

SEQ ID NO: 2471488 - RNA, 19 nt, Artificial Sequence
  Description of Artificial Sequence: Synthetic oligonucleotide
uucgccaaucuuauacacu

SEQ ID NO: 2471489 - RNA, 19 nt, Artificial Sequence
  Description of Artificial Sequence: Synthetic oligonucleotide
uggggagauugucaggaca

SEQ ID NO: 2471490 - RNA, 19 nt, Artificial Sequence
  Description of Artificial Sequence: Synthetic oligonucleotide
accggcuugaggcacucgg

SEQ ID NO: 2471491 - RNA, 19 nt, Artificial Sequence
  Description of Artificial Sequence: Synthetic oligonucleotide
uucccaacggaguacaguu

SEQ ID NO: 2471492 - RNA, 19 nt, Artificial Sequence
  Description of Artificial Sequence: Synthetic oligonucleotide
agcacacugacaagggucg

SEQ ID NO: 2471493 - RNA, 19 nt, Artificial Sequence
  Description of Artificial Sequence: Synthetic oligonucleotide
cacagcgucgcccuccucg

SEQ ID NO: 2471494 - RNA, 19 nt, Artificial Sequence
  Description of Artificial Sequence: Synthetic oligonucleotide
gauucuacccacucagaaa

SEQ ID NO: 2471495 - RNA, 19 nt, Artificial Sequence
  Description of Artificial Sequence: Synthetic oligonucleotide
gaccaagucugugauuggg

SEQ ID NO: 2471496 - RNA, 19 nt, Artificial Sequence
  Description of Artificial Sequence: Synthetic oligonucleotide
uggaccagggauauggcuu

SEQ ID NO: 2471497 - RNA, 19 nt, Artificial Sequence
  Description of Artificial Sequence: Synthetic oligonucleotide
acaagggucgaaacuuggc

SEQ ID NO: 2471498 - RNA, 19 nt, Artificial Sequence
  Description of Artificial Sequence: Synthetic oligonucleotide
uuugggcgaugucagcuca

SEQ ID NO: 2471499 - RNA, 19 nt, Artificial Sequence
  Description of Artificial Sequence: Synthetic oligonucleotide
ucuacccacucagaaaaga

SEQ ID NO: 2471500 - RNA, 19 nt, Artificial Sequence
  Description of Artificial Sequence: Synthetic oligonucleotide
ucccgaguucacauggagc

SEQ ID NO: 2471501 - RNA, 19 nt, Artificial Sequence
  Description of Artificial Sequence: Synthetic oligonucleotide
uucacugauucuacccacu

SEQ ID NO: 2471502 - RNA, 19 nt, Artificial Sequence
  Description of Artificial Sequence: Synthetic oligonucleotide
cacugauacaugguugucc

SEQ ID NO: 2471503 - RNA, 19 nt, Artificial Sequence
  Description of Artificial Sequence: Synthetic oligonucleotide
auuggauucgccaaucuua

SEQ ID NO: 2471504 - RNA, 19 nt, Artificial Sequence
  Description of Artificial Sequence: Synthetic oligonucleotide
gacaagggucgaaacuugg

SEQ ID NO: 2471505 - RNA, 19 nt, Artificial Sequence
  Description of Artificial Sequence: Synthetic oligonucleotide
gcgaugucagcucaauugg

SEQ ID NO: 2471506 - RNA, 19 nt, Artificial Sequence
  Description of Artificial Sequence: Synthetic oligonucleotide
caagaaggaaccuucauau

SEQ ID NO: 2471507 - RNA, 19 nt, Artificial Sequence
  Description of Artificial Sequence: Synthetic oligonucleotide
uuauucguggugcaccguu

SEQ ID NO: 2471508 - RNA, 19 nt, Artificial Sequence
  Description of Artificial Sequence: Synthetic oligonucleotide
uguaccuugauggcccagc

SEQ ID NO: 2471509 - RNA, 19 nt, Artificial Sequence
  Description of Artificial Sequence: Synthetic oligonucleotide
cauccugacaaccggcuug

SEQ ID NO: 2471510 - RNA, 19 nt, Artificial Sequence
  Description of Artificial Sequence: Synthetic oligonucleotide
cacgggauguuucugacca

SEQ ID NO: 2471511 - RNA, 19 nt, Artificial Sequence
  Description of Artificial Sequence: Synthetic oligonucleotide
gcaagcucaaaaucaauca

SEQ ID NO: 2471512 - RNA, 19 nt, Artificial Sequence
  Description of Artificial Sequence: Synthetic oligonucleotide
acggaguacaguuucuuuu

SEQ ID NO: 2471513 - RNA, 19 nt, Artificial Sequence
  Description of Artificial Sequence: Synthetic oligonucleotide
gauauggcuuucucugauc

SEQ ID NO: 2471514 - RNA, 19 nt, Artificial Sequence
  Description of Artificial Sequence: Synthetic oligonucleotide
acuucuucccaacggagua

SEQ ID NO: 2471515 - RNA, 19 nt, Artificial Sequence
  Description of Artificial Sequence: Synthetic oligonucleotide
aagaaggaaccuucauauu

SEQ ID NO: 2471516 - RNA, 19 nt, Artificial Sequence
  Description of Artificial Sequence: Synthetic oligonucleotide
gucagcucaauuggauucg

SEQ ID NO: 2471517 - RNA, 19 nt, Artificial Sequence
  Description of Artificial Sequence: Synthetic oligonucleotide
ccauuauugagaauguaca

SEQ ID NO: 2471518 - RNA, 19 nt, Artificial Sequence
  Description of Artificial Sequence: Synthetic oligonucleotide
gcuuuccugagguuguccg

SEQ ID NO: 2471519 - RNA, 19 nt, Artificial Sequence
  Description of Artificial Sequence: Synthetic oligonucleotide
guuauuacacucccgaguu

SEQ ID NO: 2471520 - RNA, 19 nt, Artificial Sequence
  Description of Artificial Sequence: Synthetic oligonucleotide
uugauggcccagcaacaac

SEQ ID NO: 2471521 - RNA, 19 nt, Artificial Sequence
  Description of Artificial Sequence: Synthetic oligonucleotide
ucugugauuggggcaagcu

SEQ ID NO: 2471522 - RNA, 19 nt, Artificial Sequence
  Description of Artificial Sequence: Synthetic oligonucleotide
gcuuauucguggugcaccg

SEQ ID NO: 2471523 - RNA, 19 nt, Artificial Sequence
  Description of Artificial Sequence: Synthetic oligonucleotide
acaugguuguccaacauuu

SEQ ID NO: 2471524 - RNA, 19 nt, Artificial Sequence
  Description of Artificial Sequence: Synthetic oligonucleotide
uccguugggcauacgacau

SEQ ID NO: 2471525 - RNA, 19 nt, Artificial Sequence
  Description of Artificial Sequence: Synthetic oligonucleotide
gagcacacugacaaggguc

SEQ ID NO: 2471526 - RNA, 19 nt, Artificial Sequence
  Description of Artificial Sequence: Synthetic oligonucleotide
uuauuacacucccgaguuc

SEQ ID NO: 2471527 - RNA, 19 nt, Artificial Sequence
  Description of Artificial Sequence: Synthetic oligonucleotide
agcuuuaaauccaguaaga

SEQ ID NO: 2471528 - RNA, 19 nt, Artificial Sequence
  Description of Artificial Sequence: Synthetic oligonucleotide
ucaauuggauucgccaauc

SEQ ID NO: 2471529 - RNA, 19 nt, Artificial Sequence
  Description of Artificial Sequence: Synthetic oligonucleotide
gcugcauaucuugaaaugc

SEQ ID NO: 2471530 - RNA, 19 nt, Artificial Sequence
  Description of Artificial Sequence: Synthetic oligonucleotide
ucgaaacuuggcugcauau

SEQ ID NO: 2471531 - RNA, 19 nt, Artificial Sequence
  Description of Artificial Sequence: Synthetic oligonucleotide
accaagucugugauugggg

SEQ ID NO: 2471532 - RNA, 19 nt, Artificial Sequence
  Description of Artificial Sequence: Synthetic oligonucleotide
acacgaaauuuuaacuucu

SEQ ID NO: 2471533 - RNA, 19 nt, Artificial Sequence
  Description of Artificial Sequence: Synthetic oligonucleotide
caggguuauuacacucccg

SEQ ID NO: 2471534 - RNA, 19 nt, Artificial Sequence
  Description of Artificial Sequence: Synthetic oligonucleotide
gagccuuugggcgauguca

SEQ ID NO: 2471535 - RNA, 19 nt, Artificial Sequence
  Description of Artificial Sequence: Synthetic oligonucleotide
auacacucucugaaauggg

SEQ ID NO: 2471536 - RNA, 19 nt, Artificial Sequence
  Description of Artificial Sequence: Synthetic oligonucleotide
auucguggugcaccguucu

SEQ ID NO: 2471537 - RNA, 19 nt, Artificial Sequence
  Description of Artificial Sequence: Synthetic oligonucleotide
gcauacgacaucuccuugc

SEQ ID NO: 2471538 - RNA, 19 nt, Artificial Sequence
  Description of Artificial Sequence: Synthetic oligonucleotide
cugugauuggggcaagcuc

SEQ ID NO: 2471539 - RNA, 19 nt, Artificial Sequence
  Description of Artificial Sequence: Synthetic oligonucleotide
guuucugaccaagucugug

SEQ ID NO: 2471540 - RNA, 19 nt, Artificial Sequence
  Description of Artificial Sequence: Synthetic oligonucleotide
ggagauugucaggacaucc

SEQ ID NO: 2471541 - RNA, 19 nt, Artificial Sequence
  Description of Artificial Sequence: Synthetic oligonucleotide
gcuugaggcacucgguccg

SEQ ID NO: 2471542 - RNA, 19 nt, Artificial Sequence
  Description of Artificial Sequence: Synthetic oligonucleotide
acacccugaaucugcuucu

SEQ ID NO: 2471543 - RNA, 19 nt, Artificial Sequence
  Description of Artificial Sequence: Synthetic oligonucleotide
aaauccaguaagacacgaa

SEQ ID NO: 2471544 - RNA, 19 nt, Artificial Sequence
  Description of Artificial Sequence: Synthetic oligonucleotide
uggggagcaggguuauuac

SEQ ID NO: 2471545 - RNA, 19 nt, Artificial Sequence
  Description of Artificial Sequence: Synthetic oligonucleotide
agagccuuugggcgauguc

SEQ ID NO: 2471546 - RNA, 19 nt, Artificial Sequence
  Description of Artificial Sequence: Synthetic oligonucleotide
auguacagucuuccucuug

SEQ ID NO: 2471547 - RNA, 19 nt, Artificial Sequence
  Description of Artificial Sequence: Synthetic oligonucleotide
cugaaauggggagauuguc

SEQ ID NO: 2471548 - RNA, 19 nt, Artificial Sequence
  Description of Artificial Sequence: Synthetic oligonucleotide
augucagcucaauuggauu

SEQ ID NO: 2471549 - RNA, 19 nt, Artificial Sequence
  Description of Artificial Sequence: Synthetic oligonucleotide
ugacaaccggcuugaggca

SEQ ID NO: 2471550 - RNA, 19 nt, Artificial Sequence
  Description of Artificial Sequence: Synthetic oligonucleotide
auugucacugauacauggu

SEQ ID NO: 2471551 - RNA, 19 nt, Artificial Sequence
  Description of Artificial Sequence: Synthetic oligonucleotide
agcaggguuuuccuucacu

SEQ ID NO: 2471552 - RNA, 19 nt, Artificial Sequence
  Description of Artificial Sequence: Synthetic oligonucleotide
auacaugguuguccaacau

SEQ ID NO: 2471553 - RNA, 19 nt, Artificial Sequence
  Description of Artificial Sequence: Synthetic oligonucleotide
guccguugggcauacgaca

SEQ ID NO: 2471554 - RNA, 19 nt, Artificial Sequence
  Description of Artificial Sequence: Synthetic oligonucleotide
cuuugggcgaugucagcuc

SEQ ID NO: 2471555 - RNA, 19 nt, Artificial Sequence
  Description of Artificial Sequence: Synthetic oligonucleotide
uuguccguuuugucacugc

SEQ ID NO: 2471556 - RNA, 19 nt, Artificial Sequence
  Description of Artificial Sequence: Synthetic oligonucleotide
cacacgggauguuucugac

SEQ ID NO: 2471557 - RNA, 19 nt, Artificial Sequence
  Description of Artificial Sequence: Synthetic oligonucleotide
cucccgaguucacauggag

SEQ ID NO: 2471558 - RNA, 19 nt, Artificial Sequence
  Description of Artificial Sequence: Synthetic oligonucleotide
auuacacucccgaguucac

SEQ ID NO: 2471559 - RNA, 19 nt, Artificial Sequence
  Description of Artificial Sequence: Synthetic oligonucleotide
ugaggcacucgguccguug

SEQ ID NO: 2471560 - RNA, 19 nt, Artificial Sequence
  Description of Artificial Sequence: Synthetic oligonucleotide
uuacacucccgaguucaca

SEQ ID NO: 2471561 - RNA, 19 nt, Artificial Sequence
  Description of Artificial Sequence: Synthetic oligonucleotide
ucagcucaauuggauucgc

SEQ ID NO: 2471562 - RNA, 19 nt, Artificial Sequence
  Description of Artificial Sequence: Synthetic oligonucleotide
gcaggguuauuacacuccc

SEQ ID NO: 2471563 - RNA, 19 nt, Artificial Sequence
  Description of Artificial Sequence: Synthetic oligonucleotide
ugaggacacccugaaucug

SEQ ID NO: 2471564 - RNA, 19 nt, Artificial Sequence
  Description of Artificial Sequence: Synthetic oligonucleotide
gguuauuacacucccgagu

SEQ ID NO: 2471565 - RNA, 19 nt, Artificial Sequence
  Description of Artificial Sequence: Synthetic oligonucleotide
cacugacaagggucgaaac

SEQ ID NO: 2471566 - RNA, 19 nt, Artificial Sequence
  Description of Artificial Sequence: Synthetic oligonucleotide
uggcuuucucugaucccug

SEQ ID NO: 2471567 - RNA, 19 nt, Artificial Sequence
  Description of Artificial Sequence: Synthetic oligonucleotide
ggcaagcucaaaaucaauc

SEQ ID NO: 2471568 - RNA, 19 nt, Artificial Sequence
  Description of Artificial Sequence: Synthetic oligonucleotide
ggguuauuacacucccgag

SEQ ID NO: 2471569 - RNA, 19 nt, Artificial Sequence
  Description of Artificial Sequence: Synthetic oligonucleotide
gucaggacauccugacaac

SEQ ID NO: 2471570 - RNA, 19 nt, Artificial Sequence
  Description of Artificial Sequence: Synthetic oligonucleotide
uguguaccuugauggccca

SEQ ID NO: 2471571 - RNA, 19 nt, Artificial Sequence
  Description of Artificial Sequence: Synthetic oligonucleotide
cagcucaauuggauucgcc

SEQ ID NO: 2471572 - RNA, 19 nt, Artificial Sequence
  Description of Artificial Sequence: Synthetic oligonucleotide
gguucugucuggcaacuga

SEQ ID NO: 2471573 - RNA, 19 nt, Artificial Sequence
  Description of Artificial Sequence: Synthetic oligonucleotide
guaagacacgaaauuuuaa

SEQ ID NO: 2471574 - RNA, 19 nt, Artificial Sequence
  Description of Artificial Sequence: Synthetic oligonucleotide
cccuggaccagggauaugg

SEQ ID NO: 2471575 - RNA, 19 nt, Artificial Sequence
  Description of Artificial Sequence: Synthetic oligonucleotide
aggcacucgguccguuggg

SEQ ID NO: 2471576 - RNA, 19 nt, Artificial Sequence
  Description of Artificial Sequence: Synthetic oligonucleotide
agccuuugggcgaugucag

SEQ ID NO: 2471577 - RNA, 19 nt, Artificial Sequence
  Description of Artificial Sequence: Synthetic oligonucleotide
cugucuggcaacugaagua

SEQ ID NO: 2471578 - RNA, 19 nt, Artificial Sequence
  Description of Artificial Sequence: Synthetic oligonucleotide
cugcauaucuugaaaugcu

SEQ ID NO: 2471579 - RNA, 19 nt, Artificial Sequence
  Description of Artificial Sequence: Synthetic oligonucleotide
ucgcccuccucgcugggga

SEQ ID NO: 2471580 - RNA, 19 nt, Artificial Sequence
  Description of Artificial Sequence: Synthetic oligonucleotide
aaacuuggcugcauaucuu

SEQ ID NO: 2471581 - RNA, 19 nt, Artificial Sequence
  Description of Artificial Sequence: Synthetic oligonucleotide
uuccauuauugagaaugua

SEQ ID NO: 2471582 - RNA, 19 nt, Artificial Sequence
  Description of Artificial Sequence: Synthetic oligonucleotide
auacgacaucuccuugccu

SEQ ID NO: 2471583 - RNA, 19 nt, Artificial Sequence
  Description of Artificial Sequence: Synthetic oligonucleotide
aacagagccuuugggcgau

SEQ ID NO: 2471584 - RNA, 19 nt, Artificial Sequence
  Description of Artificial Sequence: Synthetic oligonucleotide
cccgaguucacauggagca

SEQ ID NO: 2471585 - RNA, 19 nt, Artificial Sequence
  Description of Artificial Sequence: Synthetic oligonucleotide
ugcacacgggauguuucug

SEQ ID NO: 2471586 - RNA, 19 nt, Artificial Sequence
  Description of Artificial Sequence: Synthetic oligonucleotide
gcucaaaaucaaucacagc

SEQ ID NO: 2471587 - RNA, 19 nt, Artificial Sequence
  Description of Artificial Sequence: Synthetic oligonucleotide
acacucccgaguucacaug

SEQ ID NO: 2471588 - RNA, 19 nt, Artificial Sequence
  Description of Artificial Sequence: Synthetic oligonucleotide
ccugacaaccggcuugagg

SEQ ID NO: 2471589 - RNA, 19 nt, Artificial Sequence
  Description of Artificial Sequence: Synthetic oligonucleotide
agcgucgcccuccucgcug

SEQ ID NO: 2471590 - RNA, 19 nt, Artificial Sequence
  Description of Artificial Sequence: Synthetic oligonucleotide
cuucuucccaacggaguac

SEQ ID NO: 2471591 - RNA, 19 nt, Artificial Sequence
  Description of Artificial Sequence: Synthetic oligonucleotide
auuuuccauuauugagaau

SEQ ID NO: 2471592 - RNA, 19 nt, Artificial Sequence
  Description of Artificial Sequence: Synthetic oligonucleotide
agagcagguugaggacacc

SEQ ID NO: 2471593 - RNA, 19 nt, Artificial Sequence
  Description of Artificial Sequence: Synthetic oligonucleotide
caagggucgaaacuuggcu

SEQ ID NO: 2471594 - RNA, 19 nt, Artificial Sequence
  Description of Artificial Sequence: Synthetic oligonucleotide
gaugucagcucaauuggau

SEQ ID NO: 2471595 - RNA, 19 nt, Artificial Sequence
  Description of Artificial Sequence: Synthetic oligonucleotide
ugggccagagguccccuuc

SEQ ID NO: 2471596 - RNA, 19 nt, Artificial Sequence
  Description of Artificial Sequence: Synthetic oligonucleotide
ugguauccaacagcuuuaa

SEQ ID NO: 2471597 - RNA, 19 nt, Artificial Sequence
  Description of Artificial Sequence: Synthetic oligonucleotide
cucucucaacaaugucuac

SEQ ID NO: 2471598 - RNA, 19 nt, Artificial Sequence
  Description of Artificial Sequence: Synthetic oligonucleotide
caacagagccuuugggcga

SEQ ID NO: 2471599 - RNA, 19 nt, Artificial Sequence
  Description of Artificial Sequence: Synthetic oligonucleotide
gagauugucaggacauccu

SEQ ID NO: 2471600 - RNA, 19 nt, Artificial Sequence
  Description of Artificial Sequence: Synthetic oligonucleotide
ucugaccaagucugugauu

SEQ ID NO: 2471601 - RNA, 19 nt, Artificial Sequence
  Description of Artificial Sequence: Synthetic oligonucleotide
acacugacaagggucgaaa

SEQ ID NO: 2471602 - RNA, 19 nt, Artificial Sequence
  Description of Artificial Sequence: Synthetic oligonucleotide
guaccuugauggcccagca

SEQ ID NO: 2471603 - RNA, 19 nt, Artificial Sequence
  Description of Artificial Sequence: Synthetic oligonucleotide
guuguccguuuugucacug

SEQ ID NO: 2471604 - RNA, 19 nt, Artificial Sequence
  Description of Artificial Sequence: Synthetic oligonucleotide
acccugaaucugcuucucu

SEQ ID NO: 2471605 - RNA, 19 nt, Artificial Sequence
  Description of Artificial Sequence: Synthetic oligonucleotide
gcucaauuggauucgccaa

SEQ ID NO: 2471606 - RNA, 19 nt, Artificial Sequence
  Description of Artificial Sequence: Synthetic oligonucleotide
cugauucuacccacucaga

SEQ ID NO: 2471607 - RNA, 19 nt, Artificial Sequence
  Description of Artificial Sequence: Synthetic oligonucleotide
agagguccccuucucccau

SEQ ID NO: 2471608 - RNA, 19 nt, Artificial Sequence
  Description of Artificial Sequence: Synthetic oligonucleotide
acauccugacaaccggcuu

SEQ ID NO: 2471609 - RNA, 19 nt, Artificial Sequence
  Description of Artificial Sequence: Synthetic oligonucleotide
cucuugccgcugcuggccc

SEQ ID NO: 2471610 - RNA, 19 nt, Artificial Sequence
  Description of Artificial Sequence: Synthetic oligonucleotide
gucgaaacuuggcugcaua

SEQ ID NO: 2471611 - RNA, 19 nt, Artificial Sequence
  Description of Artificial Sequence: Synthetic oligonucleotide
ucgcuggggagcaggguua

SEQ ID NO: 2471612 - RNA, 19 nt, Artificial Sequence
  Description of Artificial Sequence: Synthetic oligonucleotide
ucccaacggaguacaguuu

SEQ ID NO: 2471613 - RNA, 19 nt, Artificial Sequence
  Description of Artificial Sequence: Synthetic oligonucleotide
cccaacggaguacaguuuc

SEQ ID NO: 2471614 - RNA, 19 nt, Artificial Sequence
  Description of Artificial Sequence: Synthetic oligonucleotide
guccguuuugucacugcac

SEQ ID NO: 2471615 - RNA, 19 nt, Artificial Sequence
  Description of Artificial Sequence: Synthetic oligonucleotide
ugucuaccucuuucauguc

SEQ ID NO: 2471616 - RNA, 19 nt, Artificial Sequence
  Description of Artificial Sequence: Synthetic oligonucleotide
agcagguugaggacacccu

SEQ ID NO: 2471617 - RNA, 19 nt, Artificial Sequence
  Description of Artificial Sequence: Synthetic oligonucleotide
cuggcccucacagcgucgc

SEQ ID NO: 2471618 - RNA, 19 nt, Artificial Sequence
  Description of Artificial Sequence: Synthetic oligonucleotide
uugggcgaugucagcucaa

SEQ ID NO: 2471619 - RNA, 19 nt, Artificial Sequence
  Description of Artificial Sequence: Synthetic oligonucleotide
uggcuucucccacccugga

SEQ ID NO: 2471620 - RNA, 19 nt, Artificial Sequence
  Description of Artificial Sequence: Synthetic oligonucleotide
augcuuuccugagguuguc

SEQ ID NO: 2471621 - RNA, 19 nt, Artificial Sequence
  Description of Artificial Sequence: Synthetic oligonucleotide
uccugagguuguccguuuu

SEQ ID NO: 2471622 - RNA, 19 nt, Artificial Sequence
  Description of Artificial Sequence: Synthetic oligonucleotide
cagggauauggcuuucucu

SEQ ID NO: 2471623 - RNA, 19 nt, Artificial Sequence
  Description of Artificial Sequence: Synthetic oligonucleotide
ggacauccugacaaccggc

SEQ ID NO: 2471624 - RNA, 19 nt, Artificial Sequence
  Description of Artificial Sequence: Synthetic oligonucleotide
cuugauggcccagcaacaa

SEQ ID NO: 2471625 - RNA, 19 nt, Artificial Sequence
  Description of Artificial Sequence: Synthetic oligonucleotide
uggauucgccaaucuuaua

SEQ ID NO: 2471626 - RNA, 19 nt, Artificial Sequence
  Description of Artificial Sequence: Synthetic oligonucleotide
uucguggugcaccguucuu

SEQ ID NO: 2471627 - RNA, 19 nt, Artificial Sequence
  Description of Artificial Sequence: Synthetic oligonucleotide
gggauauggcuuucucuga

SEQ ID NO: 2471628 - RNA, 19 nt, Artificial Sequence
  Description of Artificial Sequence: Synthetic oligonucleotide
ccacucagaaaagacuuuc

SEQ ID NO: 2471629 - RNA, 19 nt, Artificial Sequence
  Description of Artificial Sequence: Synthetic oligonucleotide
gguccguugggcauacgac

SEQ ID NO: 2471630 - RNA, 19 nt, Artificial Sequence
  Description of Artificial Sequence: Synthetic oligonucleotide
ccauuuucugggagagcag

SEQ ID NO: 2471631 - RNA, 19 nt, Artificial Sequence
  Description of Artificial Sequence: Synthetic oligonucleotide
cucaauuggauucgccaau

SEQ ID NO: 2471632 - RNA, 19 nt, Artificial Sequence
  Description of Artificial Sequence: Synthetic oligonucleotide
ucuugccgcugcuggcccu

SEQ ID NO: 2471633 - RNA, 19 nt, Artificial Sequence
  Description of Artificial Sequence: Synthetic oligonucleotide
gucacugcacacgggaugu

SEQ ID NO: 2471634 - RNA, 19 nt, Artificial Sequence
  Description of Artificial Sequence: Synthetic oligonucleotide
gcacacgggauguuucuga

SEQ ID NO: 2471635 - RNA, 19 nt, Artificial Sequence
  Description of Artificial Sequence: Synthetic oligonucleotide
cuggggagcaggguuauua

SEQ ID NO: 2471636 - RNA, 19 nt, Artificial Sequence
  Description of Artificial Sequence: Synthetic oligonucleotide
accagggauauggcuuucu

SEQ ID NO: 2471637 - RNA, 19 nt, Artificial Sequence
  Description of Artificial Sequence: Synthetic oligonucleotide
ugggcgaugucagcucaau

SEQ ID NO: 2471638 - RNA, 19 nt, Artificial Sequence
  Description of Artificial Sequence: Synthetic oligonucleotide
agucugugauuggggcaag

SEQ ID NO: 2471639 - RNA, 19 nt, Artificial Sequence
  Description of Artificial Sequence: Synthetic oligonucleotide
ggggagcaggguuauuaca

SEQ ID NO: 2471640 - RNA, 19 nt, Artificial Sequence
  Description of Artificial Sequence: Synthetic oligonucleotide
gaaaugcuuuccugagguu

SEQ ID NO: 2471641 - RNA, 19 nt, Artificial Sequence
  Description of Artificial Sequence: Synthetic oligonucleotide
aguucacauggagcacacu

SEQ ID NO: 2471642 - RNA, 19 nt, Artificial Sequence
  Description of Artificial Sequence: Synthetic oligonucleotide
ccugagguuguccguuuug

SEQ ID NO: 2471643 - RNA, 19 nt, Artificial Sequence
  Description of Artificial Sequence: Synthetic oligonucleotide
ccguuuugucacugcacac

SEQ ID NO: 2471644 - RNA, 19 nt, Artificial Sequence
  Description of Artificial Sequence: Synthetic oligonucleotide
ugauuggggcaagcucaaa

SEQ ID NO: 2471645 - RNA, 19 nt, Artificial Sequence
  Description of Artificial Sequence: Synthetic oligonucleotide
ccagggauauggcuuucuc

SEQ ID NO: 2471646 - RNA, 19 nt, Artificial Sequence
  Description of Artificial Sequence: Synthetic oligonucleotide
acgggauguuucugaccaa

SEQ ID NO: 2471647 - RNA, 19 nt, Artificial Sequence
  Description of Artificial Sequence: Synthetic oligonucleotide
cucucugaaauggggagau

SEQ ID NO: 2471648 - RNA, 19 nt, Artificial Sequence
  Description of Artificial Sequence: Synthetic oligonucleotide
ggggcaagcucaaaaucaa

SEQ ID NO: 2471649 - RNA, 19 nt, Artificial Sequence
  Description of Artificial Sequence: Synthetic oligonucleotide
gugauuggggcaagcucaa

SEQ ID NO: 2471650 - RNA, 19 nt, Artificial Sequence
  Description of Artificial Sequence: Synthetic oligonucleotide
cacgaaauuuuaacuucuu

SEQ ID NO: 2471651 - RNA, 19 nt, Artificial Sequence
  Description of Artificial Sequence: Synthetic oligonucleotide
uccugacaaccggcuugag

SEQ ID NO: 2471652 - RNA, 19 nt, Artificial Sequence
  Description of Artificial Sequence: Synthetic oligonucleotide
ggcuucucccacccuggac

SEQ ID NO: 2471653 - RNA, 19 nt, Artificial Sequence
  Description of Artificial Sequence: Synthetic oligonucleotide
ccucuugccgcugcuggcc

SEQ ID NO: 2471654 - RNA, 19 nt, Artificial Sequence
  Description of Artificial Sequence: Synthetic oligonucleotide
cuucccaacggaguacagu

SEQ ID NO: 2471655 - RNA, 19 nt, Artificial Sequence
  Description of Artificial Sequence: Synthetic oligonucleotide
cacacugacaagggucgaa

SEQ ID NO: 2471656 - RNA, 19 nt, Artificial Sequence
  Description of Artificial Sequence: Synthetic oligonucleotide
ccaaucuuauacacucucu

SEQ ID NO: 2471657 - RNA, 19 nt, Artificial Sequence
  Description of Artificial Sequence: Synthetic oligonucleotide
gcgucgcccuccucgcugg

SEQ ID NO: 2471658 - RNA, 19 nt, Artificial Sequence
  Description of Artificial Sequence: Synthetic oligonucleotide
guugggcauacgacaucuc

SEQ ID NO: 2471659 - RNA, 19 nt, Artificial Sequence
  Description of Artificial Sequence: Synthetic oligonucleotide
ggcacucgguccguugggc

SEQ ID NO: 2471660 - RNA, 19 nt, Artificial Sequence
  Description of Artificial Sequence: Synthetic oligonucleotide
cacccugaaucugcuucuc

SEQ ID NO: 2471661 - RNA, 19 nt, Artificial Sequence
  Description of Artificial Sequence: Synthetic oligonucleotide
ggagcacacugacaagggu

SEQ ID NO: 2471662 - RNA, 19 nt, Artificial Sequence
  Description of Artificial Sequence: Synthetic oligonucleotide
cgaaacuuggcugcauauc

SEQ ID NO: 2471663 - RNA, 19 nt, Artificial Sequence
  Description of Artificial Sequence: Synthetic oligonucleotide
cucgguccguugggcauac

SEQ ID NO: 2471664 - RNA, 19 nt, Artificial Sequence
  Description of Artificial Sequence: Synthetic oligonucleotide
ggggagauugucaggacau

SEQ ID NO: 2471665 - RNA, 19 nt, Artificial Sequence
  Description of Artificial Sequence: Synthetic oligonucleotide
cucgcuggggagcaggguu

SEQ ID NO: 2471666 - RNA, 19 nt, Artificial Sequence
  Description of Artificial Sequence: Synthetic oligonucleotide
acucgguccguugggcaua

SEQ ID NO: 2471667 - RNA, 19 nt, Artificial Sequence
  Description of Artificial Sequence: Synthetic oligonucleotide
caugguuguccaacauuuu

SEQ ID NO: 2471668 - RNA, 19 nt, Artificial Sequence
  Description of Artificial Sequence: Synthetic oligonucleotide
gcacucgguccguugggca

SEQ ID NO: 2471669 - RNA, 19 nt, Artificial Sequence
  Description of Artificial Sequence: Synthetic oligonucleotide
gggcauacgacaucuccuu

SEQ ID NO: 2471670 - RNA, 19 nt, Artificial Sequence
  Description of Artificial Sequence: Synthetic oligonucleotide
gggagauugucaggacauc

SEQ ID NO: 2471671 - RNA, 19 nt, Artificial Sequence
  Description of Artificial Sequence: Synthetic oligonucleotide
gguccccuucucccaugcc

SEQ ID NO: 2471672 - RNA, 19 nt, Artificial Sequence
  Description of Artificial Sequence: Synthetic oligonucleotide
caaccggcuugaggcacuc

SEQ ID NO: 2471673 - RNA, 19 nt, Artificial Sequence
  Description of Artificial Sequence: Synthetic oligonucleotide
uugaggcacucgguccguu

SEQ ID NO: 2471674 - RNA, 19 nt, Artificial Sequence
  Description of Artificial Sequence: Synthetic oligonucleotide
cgaguucacauggagcaca

SEQ ID NO: 2471675 - RNA, 19 nt, Artificial Sequence
  Description of Artificial Sequence: Synthetic oligonucleotide
cgaugucagcucaauugga

SEQ ID NO: 2471676 - RNA, 19 nt, Artificial Sequence
  Description of Artificial Sequence: Synthetic oligonucleotide
ucacugcacacgggauguu

SEQ ID NO: 2471677 - RNA, 19 nt, Artificial Sequence
  Description of Artificial Sequence: Synthetic oligonucleotide
ucgguccguugggcauacg

SEQ ID NO: 2471678 - RNA, 19 nt, Artificial Sequence
  Description of Artificial Sequence: Synthetic oligonucleotide
cacucgguccguugggcau

SEQ ID NO: 2471679 - RNA, 19 nt, Artificial Sequence
  Description of Artificial Sequence: Synthetic oligonucleotide
uccuugccuccagguucug

SEQ ID NO: 2471680 - RNA, 19 nt, Artificial Sequence
  Description of Artificial Sequence: Synthetic oligonucleotide
acagagccuuugggcgaug

SEQ ID NO: 2471681 - RNA, 19 nt, Artificial Sequence
  Description of Artificial Sequence: Synthetic oligonucleotide
gguuguccguuuugucacu

SEQ ID NO: 2471682 - RNA, 19 nt, Artificial Sequence
  Description of Artificial Sequence: Synthetic oligonucleotide
ccgaguucacauggagcac

SEQ ID NO: 2471683 - RNA, 19 nt, Artificial Sequence
  Description of Artificial Sequence: Synthetic oligonucleotide
ggccagagguccccuucuc

SEQ ID NO: 2471684 - RNA, 19 nt, Artificial Sequence
  Description of Artificial Sequence: Synthetic oligonucleotide
cagguucugucuggcaacu

SEQ ID NO: 2471685 - RNA, 19 nt, Artificial Sequence
  Description of Artificial Sequence: Synthetic oligonucleotide
gcuggcccucacagcgucg

SEQ ID NO: 2471686 - RNA, 19 nt, Artificial Sequence
  Description of Artificial Sequence: Synthetic oligonucleotide
gggauguuucugaccaagu

SEQ ID NO: 2471687 - RNA, 19 nt, Artificial Sequence
  Description of Artificial Sequence: Synthetic oligonucleotide
cggcuugaggcacucgguc

SEQ ID NO: 2471688 - RNA, 19 nt, Artificial Sequence
  Description of Artificial Sequence: Synthetic oligonucleotide
cuuauucguggugcaccgu

SEQ ID NO: 2471689 - RNA, 19 nt, Artificial Sequence
  Description of Artificial Sequence: Synthetic oligonucleotide
caacggaguacaguuucuu

SEQ ID NO: 2471690 - RNA, 19 nt, Artificial Sequence
  Description of Artificial Sequence: Synthetic oligonucleotide
cucacagcgucgcccuccu

SEQ ID NO: 2471691 - RNA, 19 nt, Artificial Sequence
  Description of Artificial Sequence: Synthetic oligonucleotide
ccuuugggcgaugucagcu

SEQ ID NO: 2471692 - RNA, 19 nt, Artificial Sequence
  Description of Artificial Sequence: Synthetic oligonucleotide
gggucgaaacuuggcugca

SEQ ID NO: 2471693 - RNA, 19 nt, Artificial Sequence
  Description of Artificial Sequence: Synthetic oligonucleotide
ccguugggcauacgacauc

SEQ ID NO: 2471694 - RNA, 19 nt, Artificial Sequence
  Description of Artificial Sequence: Synthetic oligonucleotide
cgguccguugggcauacga

SEQ ID NO: 2471695 - RNA, 19 nt, Artificial Sequence
  Description of Artificial Sequence: Synthetic oligonucleotide
ccaacggaguacaguuucu

SEQ ID NO: 2471696 - RNA, 19 nt, Artificial Sequence
  Description of Artificial Sequence: Synthetic oligonucleotide
cuugaggcacucgguccgu

SEQ ID NO: 2471697 - RNA, 19 nt, Artificial Sequence
  Description of Artificial Sequence: Synthetic oligonucleotide
gcccuccucgcuggggagc

SEQ ID NO: 2471698 - RNA, 19 nt, Artificial Sequence
  Description of Artificial Sequence: Synthetic oligonucleotide
cacccuggaccagggauau

SEQ ID NO: 2471699 - RNA, 19 nt, Artificial Sequence
  Description of Artificial Sequence: Synthetic oligonucleotide
cagagccuuugggcgaugu

SEQ ID NO: 2471700 - RNA, 19 nt, Artificial Sequence
  Description of Artificial Sequence: Synthetic oligonucleotide
gggcgaugucagcucaauu

SEQ ID NO: 2471701 - RNA, 19 nt, Artificial Sequence
  Description of Artificial Sequence: Synthetic oligonucleotide
ccggcuugaggcacucggu

SEQ ID NO: 2471702 - RNA, 19 nt, Artificial Sequence
  Description of Artificial Sequence: Synthetic oligonucleotide
ggacacccugaaucugcuu

SEQ ID NO: 2471703 - RNA, 19 nt, Artificial Sequence
  Description of Artificial Sequence: Synthetic oligonucleotide
cgccaaucuuauacacucu

SEQ ID NO: 2471704 - RNA, 19 nt, Artificial Sequence
  Description of Artificial Sequence: Synthetic oligonucleotide
cccugcaagaaggaaccuu

SEQ ID NO: 2471705 - RNA, 19 nt, Artificial Sequence
  Description of Artificial Sequence: Synthetic oligonucleotide
cugggccagagguccccuu

SEQ ID NO: 2471706 - RNA, 19 nt, Artificial Sequence
  Description of Artificial Sequence: Synthetic oligonucleotide
cagcaacaacagagccuuu

SEQ ID NO: 2471707 - RNA, 19 nt, Artificial Sequence
  Description of Artificial Sequence: Synthetic oligonucleotide
cagcgucgcccuccucgcu

SEQ ID NO: 2471708 - RNA, 19 nt, Artificial Sequence
  Description of Artificial Sequence: Synthetic oligonucleotide
ccucgcuggggagcagggu

SEQ ID NO: 2471709 - RNA, 19 nt, Artificial Sequence
  Description of Artificial Sequence: Synthetic oligonucleotide
auagucguaggccagaacc

SEQ ID NO: 2471710 - RNA, 19 nt, Artificial Sequence
  Description of Artificial Sequence: Synthetic oligonucleotide
uucuuauccacguaggugg

SEQ ID NO: 2471711 - RNA, 19 nt, Artificial Sequence
  Description of Artificial Sequence: Synthetic oligonucleotide
uuauaagggaccuuguucc

SEQ ID NO: 2471712 - RNA, 19 nt, Artificial Sequence
  Description of Artificial Sequence: Synthetic oligonucleotide
aguuccauugcccuucucc

SEQ ID NO: 2471713 - RNA, 19 nt, Artificial Sequence
  Description of Artificial Sequence: Synthetic oligonucleotide
aacagacaccgccugaccc

SEQ ID NO: 2471714 - RNA, 19 nt, Artificial Sequence
  Description of Artificial Sequence: Synthetic oligonucleotide
gucacagacggauacagcg

SEQ ID NO: 2471715 - RNA, 19 nt, Artificial Sequence
  Description of Artificial Sequence: Synthetic oligonucleotide
ucucauaagguucugcuuc

SEQ ID NO: 2471716 - RNA, 19 nt, Artificial Sequence
  Description of Artificial Sequence: Synthetic oligonucleotide
ucgggaucugugaugaggg

SEQ ID NO: 2471717 - RNA, 19 nt, Artificial Sequence
  Description of Artificial Sequence: Synthetic oligonucleotide
cuuuucuuauccacguagg

SEQ ID NO: 2471718 - RNA, 19 nt, Artificial Sequence
  Description of Artificial Sequence: Synthetic oligonucleotide
agugcagcuggaugaaggc

SEQ ID NO: 2471719 - RNA, 19 nt, Artificial Sequence
  Description of Artificial Sequence: Synthetic oligonucleotide
uaagguucugcuuccuccg

SEQ ID NO: 2471720 - RNA, 19 nt, Artificial Sequence
  Description of Artificial Sequence: Synthetic oligonucleotide
aauagucguaggccagaac

SEQ ID NO: 2471721 - RNA, 19 nt, Artificial Sequence
  Description of Artificial Sequence: Synthetic oligonucleotide
ugugaugagggccuccagc

SEQ ID NO: 2471722 - RNA, 19 nt, Artificial Sequence
  Description of Artificial Sequence: Synthetic oligonucleotide
acagacaccgccugacccc

SEQ ID NO: 2471723 - RNA, 19 nt, Artificial Sequence
  Description of Artificial Sequence: Synthetic oligonucleotide
cuuguuccuguccagggcg

SEQ ID NO: 2471724 - RNA, 19 nt, Artificial Sequence
  Description of Artificial Sequence: Synthetic oligonucleotide
uuucuuauccacguaggug

SEQ ID NO: 2471725 - RNA, 19 nt, Artificial Sequence
  Description of Artificial Sequence: Synthetic oligonucleotide
uuuucuuauccacguaggu

SEQ ID NO: 2471726 - RNA, 19 nt, Artificial Sequence
  Description of Artificial Sequence: Synthetic oligonucleotide
aacucucauaagguucugc

SEQ ID NO: 2471727 - RNA, 19 nt, Artificial Sequence
  Description of Artificial Sequence: Synthetic oligonucleotide
ggcagcaacucucauaagg

SEQ ID NO: 2471728 - RNA, 19 nt, Artificial Sequence
  Description of Artificial Sequence: Synthetic oligonucleotide
uccgggguggaacagacac

SEQ ID NO: 2471729 - RNA, 19 nt, Artificial Sequence
  Description of Artificial Sequence: Synthetic oligonucleotide
uggaugaaggccuccagcu

SEQ ID NO: 2471730 - RNA, 19 nt, Artificial Sequence
  Description of Artificial Sequence: Synthetic oligonucleotide
acucucauaagguucugcu

SEQ ID NO: 2471731 - RNA, 19 nt, Artificial Sequence
  Description of Artificial Sequence: Synthetic oligonucleotide
cagggcgccaagcagaucc

SEQ ID NO: 2471732 - RNA, 19 nt, Artificial Sequence
  Description of Artificial Sequence: Synthetic oligonucleotide
gaucccuuuucuuauccac

SEQ ID NO: 2471733 - RNA, 19 nt, Artificial Sequence
  Description of Artificial Sequence: Synthetic oligonucleotide
agcaacucucauaagguuc

SEQ ID NO: 2471734 - RNA, 19 nt, Artificial Sequence
  Description of Artificial Sequence: Synthetic oligonucleotide
aagcagaucccuuuucuua

SEQ ID NO: 2471735 - RNA, 19 nt, Artificial Sequence
  Description of Artificial Sequence: Synthetic oligonucleotide
uggaauagucguaggccag

SEQ ID NO: 2471736 - RNA, 19 nt, Artificial Sequence
  Description of Artificial Sequence: Synthetic oligonucleotide
accgccugaccccugaggg

SEQ ID NO: 2471737 - RNA, 19 nt, Artificial Sequence
  Description of Artificial Sequence: Synthetic oligonucleotide
ucccuuauaagggaccuug

SEQ ID NO: 2471738 - RNA, 19 nt, Artificial Sequence
  Description of Artificial Sequence: Synthetic oligonucleotide
ucugcuuccuccggggugg

SEQ ID NO: 2471739 - RNA, 19 nt, Artificial Sequence
  Description of Artificial Sequence: Synthetic oligonucleotide
cagugcagcuggaugaagg

SEQ ID NO: 2471740 - RNA, 19 nt, Artificial Sequence
  Description of Artificial Sequence: Synthetic oligonucleotide
ucaucgggaucugugauga

SEQ ID NO: 2471741 - RNA, 19 nt, Artificial Sequence
  Description of Artificial Sequence: Synthetic oligonucleotide
cucauaagguucugcuucc

SEQ ID NO: 2471742 - RNA, 19 nt, Artificial Sequence
  Description of Artificial Sequence: Synthetic oligonucleotide
cugucggggucacagacgg

SEQ ID NO: 2471743 - RNA, 19 nt, Artificial Sequence
  Description of Artificial Sequence: Synthetic oligonucleotide
aagguucugcuuccuccgg

SEQ ID NO: 2471744 - RNA, 19 nt, Artificial Sequence
  Description of Artificial Sequence: Synthetic oligonucleotide
uagucguaggccagaacca

SEQ ID NO: 2471745 - RNA, 19 nt, Artificial Sequence
  Description of Artificial Sequence: Synthetic oligonucleotide
aucgggaucugugaugagg

SEQ ID NO: 2471746 - RNA, 19 nt, Artificial Sequence
  Description of Artificial Sequence: Synthetic oligonucleotide
accuuguuccuguccaggg

SEQ ID NO: 2471747 - RNA, 19 nt, Artificial Sequence
  Description of Artificial Sequence: Synthetic oligonucleotide
guagguggcucccagcagc

SEQ ID NO: 2471748 - RNA, 19 nt, Artificial Sequence
  Description of Artificial Sequence: Synthetic oligonucleotide
ugucggaguuccauugccc

SEQ ID NO: 2471749 - RNA, 19 nt, Artificial Sequence
  Description of Artificial Sequence: Synthetic oligonucleotide
cuucuccagugcuucaggg

SEQ ID NO: 2471750 - RNA, 19 nt, Artificial Sequence
  Description of Artificial Sequence: Synthetic oligonucleotide
agaaccagcuguuggggcu

SEQ ID NO: 2471751 - RNA, 19 nt, Artificial Sequence
  Description of Artificial Sequence: Synthetic oligonucleotide
uaagggaccuuguuccugu

SEQ ID NO: 2471752 - RNA, 19 nt, Artificial Sequence
  Description of Artificial Sequence: Synthetic oligonucleotide
uucuccagugcuucagggc

SEQ ID NO: 2471753 - RNA, 19 nt, Artificial Sequence
  Description of Artificial Sequence: Synthetic oligonucleotide
ucccuuuucuuauccacgu

SEQ ID NO: 2471754 - RNA, 19 nt, Artificial Sequence
  Description of Artificial Sequence: Synthetic oligonucleotide
ucuuauccacguagguggc

SEQ ID NO: 2471755 - RNA, 19 nt, Artificial Sequence
  Description of Artificial Sequence: Synthetic oligonucleotide
uccauugcccuucuccagu

SEQ ID NO: 2471756 - RNA, 19 nt, Artificial Sequence
  Description of Artificial Sequence: Synthetic oligonucleotide
caucucaucgggaucugug

SEQ ID NO: 2471757 - RNA, 19 nt, Artificial Sequence
  Description of Artificial Sequence: Synthetic oligonucleotide
gaugugucagagugccgag

SEQ ID NO: 2471758 - RNA, 19 nt, Artificial Sequence
  Description of Artificial Sequence: Synthetic oligonucleotide
uggugucggaguuccauug

SEQ ID NO: 2471759 - RNA, 19 nt, Artificial Sequence
  Description of Artificial Sequence: Synthetic oligonucleotide
uauaagggaccuuguuccu

SEQ ID NO: 2471760 - RNA, 19 nt, Artificial Sequence
  Description of Artificial Sequence: Synthetic oligonucleotide
agggccuccagcucuuggg

SEQ ID NO: 2471761 - RNA, 19 nt, Artificial Sequence
  Description of Artificial Sequence: Synthetic oligonucleotide
cagaucccuuuucuuaucc

SEQ ID NO: 2471762 - RNA, 19 nt, Artificial Sequence
  Description of Artificial Sequence: Synthetic oligonucleotide
ugccgagggacccaggauc

SEQ ID NO: 2471763 - RNA, 19 nt, Artificial Sequence
  Description of Artificial Sequence: Synthetic oligonucleotide
cuggaauagucguaggcca

SEQ ID NO: 2471764 - RNA, 19 nt, Artificial Sequence
  Description of Artificial Sequence: Synthetic oligonucleotide
ccuuuucuuauccacguag

SEQ ID NO: 2471765 - RNA, 19 nt, Artificial Sequence
  Description of Artificial Sequence: Synthetic oligonucleotide
uucugcuuccuccggggug

SEQ ID NO: 2471766 - RNA, 19 nt, Artificial Sequence
  Description of Artificial Sequence: Synthetic oligonucleotide
cugaggggagccuuccccg

SEQ ID NO: 2471767 - RNA, 19 nt, Artificial Sequence
  Description of Artificial Sequence: Synthetic oligonucleotide
aucucaucgggaucuguga

SEQ ID NO: 2471768 - RNA, 19 nt, Artificial Sequence
  Description of Artificial Sequence: Synthetic oligonucleotide
ugcuucagggcgccaagca

SEQ ID NO: 2471769 - RNA, 19 nt, Artificial Sequence
  Description of Artificial Sequence: Synthetic oligonucleotide
uuccauugcccuucuccag

SEQ ID NO: 2471770 - RNA, 19 nt, Artificial Sequence
  Description of Artificial Sequence: Synthetic oligonucleotide
guuccauugcccuucucca

SEQ ID NO: 2471771 - RNA, 19 nt, Artificial Sequence
  Description of Artificial Sequence: Synthetic oligonucleotide
acguagguggcucccagca

SEQ ID NO: 2471772 - RNA, 19 nt, Artificial Sequence
  Description of Artificial Sequence: Synthetic oligonucleotide
ucucaucgggaucugugau

SEQ ID NO: 2471773 - RNA, 19 nt, Artificial Sequence
  Description of Artificial Sequence: Synthetic oligonucleotide
agguucugcuuccuccggg

SEQ ID NO: 2471774 - RNA, 19 nt, Artificial Sequence
  Description of Artificial Sequence: Synthetic oligonucleotide
gaacagacaccgccugacc

SEQ ID NO: 2471775 - RNA, 19 nt, Artificial Sequence
  Description of Artificial Sequence: Synthetic oligonucleotide
acggccgccucccugcugg

SEQ ID NO: 2471776 - RNA, 19 nt, Artificial Sequence
  Description of Artificial Sequence: Synthetic oligonucleotide
gaccuuguuccuguccagg

SEQ ID NO: 2471777 - RNA, 19 nt, Artificial Sequence
  Description of Artificial Sequence: Synthetic oligonucleotide
ucugugaugagggccucca

SEQ ID NO: 2471778 - RNA, 19 nt, Artificial Sequence
  Description of Artificial Sequence: Synthetic oligonucleotide
gccagaaccagcuguuggg

SEQ ID NO: 2471779 - RNA, 19 nt, Artificial Sequence
  Description of Artificial Sequence: Synthetic oligonucleotide
acccuggugucggaguucc

SEQ ID NO: 2471780 - RNA, 19 nt, Artificial Sequence
  Description of Artificial Sequence: Synthetic oligonucleotide
accucccuggaauagucgu

SEQ ID NO: 2471781 - RNA, 19 nt, Artificial Sequence
  Description of Artificial Sequence: Synthetic oligonucleotide
ugccccugggagcugcccg

SEQ ID NO: 2471782 - RNA, 19 nt, Artificial Sequence
  Description of Artificial Sequence: Synthetic oligonucleotide
uggaacagacaccgccuga

SEQ ID NO: 2471783 - RNA, 19 nt, Artificial Sequence
  Description of Artificial Sequence: Synthetic oligonucleotide
ggguggaacagacaccgcc

SEQ ID NO: 2471784 - RNA, 19 nt, Artificial Sequence
  Description of Artificial Sequence: Synthetic oligonucleotide
agugccgagggacccagga

SEQ ID NO: 2471785 - RNA, 19 nt, Artificial Sequence
  Description of Artificial Sequence: Synthetic oligonucleotide
ggcguggucaccucccugg

SEQ ID NO: 2471786 - RNA, 19 nt, Artificial Sequence
  Description of Artificial Sequence: Synthetic oligonucleotide
cuucagggcgccaagcaga

SEQ ID NO: 2471787 - RNA, 19 nt, Artificial Sequence
  Description of Artificial Sequence: Synthetic oligonucleotide
cagaaccagcuguuggggc

SEQ ID NO: 2471788 - RNA, 19 nt, Artificial Sequence
  Description of Artificial Sequence: Synthetic oligonucleotide
agucguaggccagaaccag

SEQ ID NO: 2471789 - RNA, 19 nt, Artificial Sequence
  Description of Artificial Sequence: Synthetic oligonucleotide
aagggaccuuguuccuguc

SEQ ID NO: 2471790 - RNA, 19 nt, Artificial Sequence
  Description of Artificial Sequence: Synthetic oligonucleotide
gugucggaguuccauugcc

SEQ ID NO: 2471791 - RNA, 19 nt, Artificial Sequence
  Description of Artificial Sequence: Synthetic oligonucleotide
agaucccuuuucuuaucca

SEQ ID NO: 2471792 - RNA, 19 nt, Artificial Sequence
  Description of Artificial Sequence: Synthetic oligonucleotide
cucccuggaauagucguag

SEQ ID NO: 2471793 - RNA, 19 nt, Artificial Sequence
  Description of Artificial Sequence: Synthetic oligonucleotide
gguucugcuuccuccgggg

SEQ ID NO: 2471794 - RNA, 19 nt, Artificial Sequence
  Description of Artificial Sequence: Synthetic oligonucleotide
ucagagugccgagggaccc

SEQ ID NO: 2471795 - RNA, 19 nt, Artificial Sequence
  Description of Artificial Sequence: Synthetic oligonucleotide
gcucccagcagcuccaaag

SEQ ID NO: 2471796 - RNA, 19 nt, Artificial Sequence
  Description of Artificial Sequence: Synthetic oligonucleotide
uauccacguagguggcucc

SEQ ID NO: 2471797 - RNA, 19 nt, Artificial Sequence
  Description of Artificial Sequence: Synthetic oligonucleotide
ugguggggcagcaacucuc

SEQ ID NO: 2471798 - RNA, 19 nt, Artificial Sequence
  Description of Artificial Sequence: Synthetic oligonucleotide
cauaagguucugcuuccuc

SEQ ID NO: 2471799 - RNA, 19 nt, Artificial Sequence
  Description of Artificial Sequence: Synthetic oligonucleotide
ugcuccuggaugagguacu

SEQ ID NO: 2471800 - RNA, 19 nt, Artificial Sequence
  Description of Artificial Sequence: Synthetic oligonucleotide
auaagggaccuuguuccug

SEQ ID NO: 2471801 - RNA, 19 nt, Artificial Sequence
  Description of Artificial Sequence: Synthetic oligonucleotide
ccuggaauagucguaggcc

SEQ ID NO: 2471802 - RNA, 19 nt, Artificial Sequence
  Description of Artificial Sequence: Synthetic oligonucleotide
ucccuggaauagucguagg

SEQ ID NO: 2471803 - RNA, 19 nt, Artificial Sequence
  Description of Artificial Sequence: Synthetic oligonucleotide
ggggcagcaacucucauaa

SEQ ID NO: 2471804 - RNA, 19 nt, Artificial Sequence
  Description of Artificial Sequence: Synthetic oligonucleotide
ucccucucccguaucagua

SEQ ID NO: 2471805 - RNA, 19 nt, Artificial Sequence
  Description of Artificial Sequence: Synthetic oligonucleotide
agcuguuggggcuggggcu

SEQ ID NO: 2471806 - RNA, 19 nt, Artificial Sequence
  Description of Artificial Sequence: Synthetic oligonucleotide
cagcuguuggggcuggggc

SEQ ID NO: 2471807 - RNA, 19 nt, Artificial Sequence
  Description of Artificial Sequence: Synthetic oligonucleotide
ugggagcugcccguggccg

SEQ ID NO: 2471808 - RNA, 19 nt, Artificial Sequence
  Description of Artificial Sequence: Synthetic oligonucleotide
uggggagguaguccccacc

SEQ ID NO: 2471809 - RNA, 19 nt, Artificial Sequence
  Description of Artificial Sequence: Synthetic oligonucleotide
auccgcaucucaucgggau

SEQ ID NO: 2471810 - RNA, 19 nt, Artificial Sequence
  Description of Artificial Sequence: Synthetic oligonucleotide
guggaacagacaccgccug

SEQ ID NO: 2471811 - RNA, 19 nt, Artificial Sequence
  Description of Artificial Sequence: Synthetic oligonucleotide
uccccggacagcucugccc

SEQ ID NO: 2471812 - RNA, 19 nt, Artificial Sequence
  Description of Artificial Sequence: Synthetic oligonucleotide
gacccaggaucccucuccc

SEQ ID NO: 2471813 - RNA, 19 nt, Artificial Sequence
  Description of Artificial Sequence: Synthetic oligonucleotide
ggccagaaccagcuguugg

SEQ ID NO: 2471814 - RNA, 19 nt, Artificial Sequence
  Description of Artificial Sequence: Synthetic oligonucleotide
uguuccuguccagggcgcg

SEQ ID NO: 2471815 - RNA, 19 nt, Artificial Sequence
  Description of Artificial Sequence: Synthetic oligonucleotide
uucagggcgccaagcagau

SEQ ID NO: 2471816 - RNA, 19 nt, Artificial Sequence
  Description of Artificial Sequence: Synthetic oligonucleotide
aggggagccuuccccggac

SEQ ID NO: 2471817 - RNA, 19 nt, Artificial Sequence
  Description of Artificial Sequence: Synthetic oligonucleotide
uaggccagaaccagcuguu

SEQ ID NO: 2471818 - RNA, 19 nt, Artificial Sequence
  Description of Artificial Sequence: Synthetic oligonucleotide
aucugugaugagggccucc

SEQ ID NO: 2471819 - RNA, 19 nt, Artificial Sequence
  Description of Artificial Sequence: Synthetic oligonucleotide
uuccuguccagggcgcggg

SEQ ID NO: 2471820 - RNA, 19 nt, Artificial Sequence
  Description of Artificial Sequence: Synthetic oligonucleotide
ggcuuggggagguaguccc

SEQ ID NO: 2471821 - RNA, 19 nt, Artificial Sequence
  Description of Artificial Sequence: Synthetic oligonucleotide
augugucagagugccgagg

SEQ ID NO: 2471822 - RNA, 19 nt, Artificial Sequence
  Description of Artificial Sequence: Synthetic oligonucleotide
gguggcucccagcagcucc

SEQ ID NO: 2471823 - RNA, 19 nt, Artificial Sequence
  Description of Artificial Sequence: Synthetic oligonucleotide
gaucccucucccguaucag

SEQ ID NO: 2471824 - RNA, 19 nt, Artificial Sequence
  Description of Artificial Sequence: Synthetic oligonucleotide
guaguccccacccuggugu

SEQ ID NO: 2471825 - RNA, 19 nt, Artificial Sequence
  Description of Artificial Sequence: Synthetic oligonucleotide
uccgcaucucaucgggauc

SEQ ID NO: 2471826 - RNA, 19 nt, Artificial Sequence
  Description of Artificial Sequence: Synthetic oligonucleotide
auccacguagguggcuccc

SEQ ID NO: 2471827 - RNA, 19 nt, Artificial Sequence
  Description of Artificial Sequence: Synthetic oligonucleotide
caccucccuggaauagucg

SEQ ID NO: 2471828 - RNA, 19 nt, Artificial Sequence
  Description of Artificial Sequence: Synthetic oligonucleotide
ggagguaguccccacccug

SEQ ID NO: 2471829 - RNA, 19 nt, Artificial Sequence
  Description of Artificial Sequence: Synthetic oligonucleotide
ugaugagggccuccagcuc

SEQ ID NO: 2471830 - RNA, 19 nt, Artificial Sequence
  Description of Artificial Sequence: Synthetic oligonucleotide
gggaucugugaugagggcc

SEQ ID NO: 2471831 - RNA, 19 nt, Artificial Sequence
  Description of Artificial Sequence: Synthetic oligonucleotide
ggaugugucagagugccga

SEQ ID NO: 2471832 - RNA, 19 nt, Artificial Sequence
  Description of Artificial Sequence: Synthetic oligonucleotide
guaggccagaaccagcugu

SEQ ID NO: 2471833 - RNA, 19 nt, Artificial Sequence
  Description of Artificial Sequence: Synthetic oligonucleotide
ucagugcagcuggaugaag

SEQ ID NO: 2471834 - RNA, 19 nt, Artificial Sequence
  Description of Artificial Sequence: Synthetic oligonucleotide
aucccucucccguaucagu

SEQ ID NO: 2471835 - RNA, 19 nt, Artificial Sequence
  Description of Artificial Sequence: Synthetic oligonucleotide
gacagcucugccccuggga

SEQ ID NO: 2471836 - RNA, 19 nt, Artificial Sequence
  Description of Artificial Sequence: Synthetic oligonucleotide
gaaccagcuguuggggcug

SEQ ID NO: 2471837 - RNA, 19 nt, Artificial Sequence
  Description of Artificial Sequence: Synthetic oligonucleotide
cuccagugcuucagggcgc

SEQ ID NO: 2471838 - RNA, 19 nt, Artificial Sequence
  Description of Artificial Sequence: Synthetic oligonucleotide
ggggagguaguccccaccc

SEQ ID NO: 2471839 - RNA, 19 nt, Artificial Sequence
  Description of Artificial Sequence: Synthetic oligonucleotide
cugcuccuggaugagguac

SEQ ID NO: 2471840 - RNA, 19 nt, Artificial Sequence
  Description of Artificial Sequence: Synthetic oligonucleotide
ucauaagguucugcuuccu

SEQ ID NO: 2471841 - RNA, 19 nt, Artificial Sequence
  Description of Artificial Sequence: Synthetic oligonucleotide
gcuucagggcgccaagcag

SEQ ID NO: 2471842 - RNA, 19 nt, Artificial Sequence
  Description of Artificial Sequence: Synthetic oligonucleotide
uggggcuuggggagguagu

SEQ ID NO: 2471843 - RNA, 19 nt, Artificial Sequence
  Description of Artificial Sequence: Synthetic oligonucleotide
gggucacagacggauacag

SEQ ID NO: 2471844 - RNA, 19 nt, Artificial Sequence
  Description of Artificial Sequence: Synthetic oligonucleotide
ggcucagugcagcuggaug

SEQ ID NO: 2471845 - RNA, 19 nt, Artificial Sequence
  Description of Artificial Sequence: Synthetic oligonucleotide
cacguagguggcucccagc

SEQ ID NO: 2471846 - RNA, 19 nt, Artificial Sequence
  Description of Artificial Sequence: Synthetic oligonucleotide
ggugucggaguuccauugc

SEQ ID NO: 2471847 - RNA, 19 nt, Artificial Sequence
  Description of Artificial Sequence: Synthetic oligonucleotide
acccaggaucccucucccg

SEQ ID NO: 2471848 - RNA, 19 nt, Artificial Sequence
  Description of Artificial Sequence: Synthetic oligonucleotide
cauugcccuucuccagugc

SEQ ID NO: 2471849 - RNA, 19 nt, Artificial Sequence
  Description of Artificial Sequence: Synthetic oligonucleotide
uccagugcuucagggcgcc

SEQ ID NO: 2471850 - RNA, 19 nt, Artificial Sequence
  Description of Artificial Sequence: Synthetic oligonucleotide
aggaucccucucccguauc

SEQ ID NO: 2471851 - RNA, 19 nt, Artificial Sequence
  Description of Artificial Sequence: Synthetic oligonucleotide
aagccuccacggccgccuc

SEQ ID NO: 2471852 - RNA, 19 nt, Artificial Sequence
  Description of Artificial Sequence: Synthetic oligonucleotide
uuccccggacagcucugcc

SEQ ID NO: 2471853 - RNA, 19 nt, Artificial Sequence
  Description of Artificial Sequence: Synthetic oligonucleotide
ggaacagacaccgccugac

SEQ ID NO: 2471854 - RNA, 19 nt, Artificial Sequence
  Description of Artificial Sequence: Synthetic oligonucleotide
gaauagucguaggccagaa

SEQ ID NO: 2471855 - RNA, 19 nt, Artificial Sequence
  Description of Artificial Sequence: Synthetic oligonucleotide
cccuggaauagucguaggc

SEQ ID NO: 2471856 - RNA, 19 nt, Artificial Sequence
  Description of Artificial Sequence: Synthetic oligonucleotide
gugcagcuggaugaaggcc

SEQ ID NO: 2471857 - RNA, 19 nt, Artificial Sequence
  Description of Artificial Sequence: Synthetic oligonucleotide
agagugccgagggacccag

SEQ ID NO: 2471858 - RNA, 19 nt, Artificial Sequence
  Description of Artificial Sequence: Synthetic oligonucleotide
aaccagcuguuggggcugg

SEQ ID NO: 2471859 - RNA, 19 nt, Artificial Sequence
  Description of Artificial Sequence: Synthetic oligonucleotide
ugcccuucuccagugcuuc

SEQ ID NO: 2471860 - RNA, 19 nt, Artificial Sequence
  Description of Artificial Sequence: Synthetic oligonucleotide
cugggagcugcccguggcc

SEQ ID NO: 2471861 - RNA, 19 nt, Artificial Sequence
  Description of Artificial Sequence: Synthetic oligonucleotide
caccgccugaccccugagg

SEQ ID NO: 2471862 - RNA, 19 nt, Artificial Sequence
  Description of Artificial Sequence: Synthetic oligonucleotide
cuuccuccgggguggaaca

SEQ ID NO: 2471863 - RNA, 19 nt, Artificial Sequence
  Description of Artificial Sequence: Synthetic oligonucleotide
cagcucugccccugggagc

SEQ ID NO: 2471864 - RNA, 19 nt, Artificial Sequence
  Description of Artificial Sequence: Synthetic oligonucleotide
gucguaggccagaaccagc

SEQ ID NO: 2471865 - RNA, 19 nt, Artificial Sequence
  Description of Artificial Sequence: Synthetic oligonucleotide
agccuccacggccgccucc

SEQ ID NO: 2471866 - RNA, 19 nt, Artificial Sequence
  Description of Artificial Sequence: Synthetic oligonucleotide
uggucaccucccuggaaua

SEQ ID NO: 2471867 - RNA, 19 nt, Artificial Sequence
  Description of Artificial Sequence: Synthetic oligonucleotide
agguaguccccacccuggu

SEQ ID NO: 2471868 - RNA, 19 nt, Artificial Sequence
  Description of Artificial Sequence: Synthetic oligonucleotide
gucggaguuccauugcccu

SEQ ID NO: 2471869 - RNA, 19 nt, Artificial Sequence
  Description of Artificial Sequence: Synthetic oligonucleotide
ggcugucggggucacagac

SEQ ID NO: 2471870 - RNA, 19 nt, Artificial Sequence
  Description of Artificial Sequence: Synthetic oligonucleotide
ugggccgggcucagugcag

SEQ ID NO: 2471871 - RNA, 19 nt, Artificial Sequence
  Description of Artificial Sequence: Synthetic oligonucleotide
guccccacccuggugucgg

SEQ ID NO: 2471872 - RNA, 19 nt, Artificial Sequence
  Description of Artificial Sequence: Synthetic oligonucleotide
uugcccuucuccagugcuu

SEQ ID NO: 2471873 - RNA, 19 nt, Artificial Sequence
  Description of Artificial Sequence: Synthetic oligonucleotide
gccgccucccugcuggugg

SEQ ID NO: 2471874 - RNA, 19 nt, Artificial Sequence
  Description of Artificial Sequence: Synthetic oligonucleotide
ucggaguuccauugcccuu

SEQ ID NO: 2471875 - RNA, 19 nt, Artificial Sequence
  Description of Artificial Sequence: Synthetic oligonucleotide
ccuuguuccuguccagggc

SEQ ID NO: 2471876 - RNA, 19 nt, Artificial Sequence
  Description of Artificial Sequence: Synthetic oligonucleotide
gacaccgccugaccccuga

SEQ ID NO: 2471877 - RNA, 19 nt, Artificial Sequence
  Description of Artificial Sequence: Synthetic oligonucleotide
uuggggagguaguccccac

SEQ ID NO: 2471878 - RNA, 19 nt, Artificial Sequence
  Description of Artificial Sequence: Synthetic oligonucleotide
cgggguggaacagacaccg

SEQ ID NO: 2471879 - RNA, 19 nt, Artificial Sequence
  Description of Artificial Sequence: Synthetic oligonucleotide
agggcgccaagcagauccc

SEQ ID NO: 2471880 - RNA, 19 nt, Artificial Sequence
  Description of Artificial Sequence: Synthetic oligonucleotide
ccagaaccagcuguugggg

SEQ ID NO: 2471881 - RNA, 19 nt, Artificial Sequence
  Description of Artificial Sequence: Synthetic oligonucleotide
guggucaccucccuggaau

SEQ ID NO: 2471882 - RNA, 19 nt, Artificial Sequence
  Description of Artificial Sequence: Synthetic oligonucleotide
uccacguagguggcuccca

SEQ ID NO: 2471883 - RNA, 19 nt, Artificial Sequence
  Description of Artificial Sequence: Synthetic oligonucleotide
ccgggcucagugcagcugg

SEQ ID NO: 2471884 - RNA, 19 nt, Artificial Sequence
  Description of Artificial Sequence: Synthetic oligonucleotide
ggaugaaggccuccagcuc

SEQ ID NO: 2471885 - RNA, 19 nt, Artificial Sequence
  Description of Artificial Sequence: Synthetic oligonucleotide
ggaccuuguuccuguccag

SEQ ID NO: 2471886 - RNA, 19 nt, Artificial Sequence
  Description of Artificial Sequence: Synthetic oligonucleotide
ucugccccugggagcugcc

SEQ ID NO: 2471887 - RNA, 19 nt, Artificial Sequence
  Description of Artificial Sequence: Synthetic oligonucleotide
gguaguccccacccuggug

SEQ ID NO: 2471888 - RNA, 19 nt, Artificial Sequence
  Description of Artificial Sequence: Synthetic oligonucleotide
agggacccaggaucccucu

SEQ ID NO: 2471889 - RNA, 19 nt, Artificial Sequence
  Description of Artificial Sequence: Synthetic oligonucleotide
ucggggucacagacggaua

SEQ ID NO: 2471890 - RNA, 19 nt, Artificial Sequence
  Description of Artificial Sequence: Synthetic oligonucleotide
uccuguccagggcgcgggc

SEQ ID NO: 2471891 - RNA, 19 nt, Artificial Sequence
  Description of Artificial Sequence: Synthetic oligonucleotide
ggaucccucucccguauca

SEQ ID NO: 2471892 - RNA, 19 nt, Artificial Sequence
  Description of Artificial Sequence: Synthetic oligonucleotide
uccuccgggguggaacaga

SEQ ID NO: 2471893 - RNA, 19 nt, Artificial Sequence
  Description of Artificial Sequence: Synthetic oligonucleotide
aggaugugucagagugccg

SEQ ID NO: 2471894 - RNA, 19 nt, Artificial Sequence
  Description of Artificial Sequence: Synthetic oligonucleotide
gcugucggggucacagacg

SEQ ID NO: 2471895 - RNA, 19 nt, Artificial Sequence
  Description of Artificial Sequence: Synthetic oligonucleotide
aguccccacccuggugucg

SEQ ID NO: 2471896 - RNA, 19 nt, Artificial Sequence
  Description of Artificial Sequence: Synthetic oligonucleotide
cuuggggagguagucccca

SEQ ID NO: 2471897 - RNA, 19 nt, Artificial Sequence
  Description of Artificial Sequence: Synthetic oligonucleotide
ugucggggucacagacgga

SEQ ID NO: 2471898 - RNA, 19 nt, Artificial Sequence
  Description of Artificial Sequence: Synthetic oligonucleotide
caucgggaucugugaugag

SEQ ID NO: 2471899 - RNA, 19 nt, Artificial Sequence
  Description of Artificial Sequence: Synthetic oligonucleotide
cugaccccugaggggagcc

SEQ ID NO: 2471900 - RNA, 19 nt, Artificial Sequence
  Description of Artificial Sequence: Synthetic oligonucleotide
gagccuuccccggacagcu

SEQ ID NO: 2471901 - RNA, 19 nt, Artificial Sequence
  Description of Artificial Sequence: Synthetic oligonucleotide
cuuccccggacagcucugc

SEQ ID NO: 2471902 - RNA, 19 nt, Artificial Sequence
  Description of Artificial Sequence: Synthetic oligonucleotide
gaggggagccuuccccgga

SEQ ID NO: 2471903 - RNA, 19 nt, Artificial Sequence
  Description of Artificial Sequence: Synthetic oligonucleotide
ggaauagucguaggccaga

SEQ ID NO: 2471904 - RNA, 19 nt, Artificial Sequence
  Description of Artificial Sequence: Synthetic oligonucleotide
uaguccccacccugguguc

SEQ ID NO: 2471905 - RNA, 19 nt, Artificial Sequence
  Description of Artificial Sequence: Synthetic oligonucleotide
ggucaccucccuggaauag

SEQ ID NO: 2471906 - RNA, 19 nt, Artificial Sequence
  Description of Artificial Sequence: Synthetic oligonucleotide
ccccggacagcucugcccc

SEQ ID NO: 2471907 - RNA, 19 nt, Artificial Sequence
  Description of Artificial Sequence: Synthetic oligonucleotide
gggagccuuccccggacag

SEQ ID NO: 2471908 - RNA, 19 nt, Artificial Sequence
  Description of Artificial Sequence: Synthetic oligonucleotide
ggucacagacggauacagc

SEQ ID NO: 2471909 - RNA, 19 nt, Artificial Sequence
  Description of Artificial Sequence: Synthetic oligonucleotide
gcagcaacucucauaaggu

SEQ ID NO: 2471910 - RNA, 19 nt, Artificial Sequence
  Description of Artificial Sequence: Synthetic oligonucleotide
acaccgccugaccccugag

SEQ ID NO: 2471911 - RNA, 19 nt, Artificial Sequence
  Description of Artificial Sequence: Synthetic oligonucleotide
uuccuccgggguggaacag

SEQ ID NO: 2471912 - RNA, 19 nt, Artificial Sequence
  Description of Artificial Sequence: Synthetic oligonucleotide
gugucagagugccgaggga

SEQ ID NO: 2471913 - RNA, 19 nt, Artificial Sequence
  Description of Artificial Sequence: Synthetic oligonucleotide
gagggacccaggaucccuc

SEQ ID NO: 2471914 - RNA, 19 nt, Artificial Sequence
  Description of Artificial Sequence: Synthetic oligonucleotide
gcaacucucauaagguucu

SEQ ID NO: 2471915 - RNA, 19 nt, Artificial Sequence
  Description of Artificial Sequence: Synthetic oligonucleotide
cucccugcugguggggcag

SEQ ID NO: 2471916 - RNA, 19 nt, Artificial Sequence
  Description of Artificial Sequence: Synthetic oligonucleotide
guuggggcuggggcuuggg

SEQ ID NO: 2471917 - RNA, 19 nt, Artificial Sequence
  Description of Artificial Sequence: Synthetic oligonucleotide
gugcuucagggcgccaagc

SEQ ID NO: 2471918 - RNA, 19 nt, Artificial Sequence
  Description of Artificial Sequence: Synthetic oligonucleotide
ggaucugugaugagggccu

SEQ ID NO: 2471919 - RNA, 19 nt, Artificial Sequence
  Description of Artificial Sequence: Synthetic oligonucleotide
cugcccguggccgggcugc

SEQ ID NO: 2471920 - RNA, 19 nt, Artificial Sequence
  Description of Artificial Sequence: Synthetic oligonucleotide
gaucugugaugagggccuc

SEQ ID NO: 2471921 - RNA, 19 nt, Artificial Sequence
  Description of Artificial Sequence: Synthetic oligonucleotide
aggccagaaccagcuguug

SEQ ID NO: 2471922 - RNA, 19 nt, Artificial Sequence
  Description of Artificial Sequence: Synthetic oligonucleotide
cugggccgggcucagugca

SEQ ID NO: 2471923 - RNA, 19 nt, Artificial Sequence
  Description of Artificial Sequence: Synthetic oligonucleotide
caacucucauaagguucug

SEQ ID NO: 2471924 - RNA, 19 nt, Artificial Sequence
  Description of Artificial Sequence: Synthetic oligonucleotide
cauccgcaucucaucggga

SEQ ID NO: 2471925 - RNA, 19 nt, Artificial Sequence
  Description of Artificial Sequence: Synthetic oligonucleotide
gcuuccuccgggguggaac

SEQ ID NO: 2471926 - RNA, 19 nt, Artificial Sequence
  Description of Artificial Sequence: Synthetic oligonucleotide
gcagaucccuuuucuuauc

SEQ ID NO: 2471927 - RNA, 19 nt, Artificial Sequence
  Description of Artificial Sequence: Synthetic oligonucleotide
gggagcugcccguggccgg

SEQ ID NO: 2471928 - RNA, 19 nt, Artificial Sequence
  Description of Artificial Sequence: Synthetic oligonucleotide
cucucauaagguucugcuu

SEQ ID NO: 2471929 - RNA, 19 nt, Artificial Sequence
  Description of Artificial Sequence: Synthetic oligonucleotide
ccauugcccuucuccagug

SEQ ID NO: 2471930 - RNA, 19 nt, Artificial Sequence
  Description of Artificial Sequence: Synthetic oligonucleotide
gucggggucacagacggau

SEQ ID NO: 2471931 - RNA, 19 nt, Artificial Sequence
  Description of Artificial Sequence: Synthetic oligonucleotide
gccgagggacccaggaucc

SEQ ID NO: 2471932 - RNA, 19 nt, Artificial Sequence
  Description of Artificial Sequence: Synthetic oligonucleotide
caagcagaucccuuuucuu

SEQ ID NO: 2471933 - RNA, 19 nt, Artificial Sequence
  Description of Artificial Sequence: Synthetic oligonucleotide
ccuccgggguggaacagac

SEQ ID NO: 2471934 - RNA, 19 nt, Artificial Sequence
  Description of Artificial Sequence: Synthetic oligonucleotide
ccggcugucggggucacag

SEQ ID NO: 2471935 - RNA, 19 nt, Artificial Sequence
  Description of Artificial Sequence: Synthetic oligonucleotide
cuccacggccgccucccug

SEQ ID NO: 2471936 - RNA, 19 nt, Artificial Sequence
  Description of Artificial Sequence: Synthetic oligonucleotide
accccugaggggagccuuc

SEQ ID NO: 2471937 - RNA, 19 nt, Artificial Sequence
  Description of Artificial Sequence: Synthetic oligonucleotide
cucagugcagcuggaugaa

SEQ ID NO: 2471938 - RNA, 19 nt, Artificial Sequence
  Description of Artificial Sequence: Synthetic oligonucleotide
gguggaacagacaccgccu

SEQ ID NO: 2471939 - RNA, 19 nt, Artificial Sequence
  Description of Artificial Sequence: Synthetic oligonucleotide
ugaccccugaggggagccu

SEQ ID NO: 2471940 - RNA, 19 nt, Artificial Sequence
  Description of Artificial Sequence: Synthetic oligonucleotide
gaguuccauugcccuucuc

SEQ ID NO: 2471941 - RNA, 19 nt, Artificial Sequence
  Description of Artificial Sequence: Synthetic oligonucleotide
ggagcugcccguggccggg

SEQ ID NO: 2471942 - RNA, 19 nt, Artificial Sequence
  Description of Artificial Sequence: Synthetic oligonucleotide
gggcuuggggagguagucc

SEQ ID NO: 2471943 - RNA, 19 nt, Artificial Sequence
  Description of Artificial Sequence: Synthetic oligonucleotide
uggccgggcugcuccugga

SEQ ID NO: 2471944 - RNA, 19 nt, Artificial Sequence
  Description of Artificial Sequence: Synthetic oligonucleotide
ggagccuuccccggacagc

SEQ ID NO: 2471945 - RNA, 19 nt, Artificial Sequence
  Description of Artificial Sequence: Synthetic oligonucleotide
ccgggguggaacagacacc

SEQ ID NO: 2471946 - RNA, 19 nt, Artificial Sequence
  Description of Artificial Sequence: Synthetic oligonucleotide
cccguggccgggcugcucc

SEQ ID NO: 2471947 - RNA, 19 nt, Artificial Sequence
  Description of Artificial Sequence: Synthetic oligonucleotide
gagugccgagggacccagg

SEQ ID NO: 2471948 - RNA, 19 nt, Artificial Sequence
  Description of Artificial Sequence: Synthetic oligonucleotide
ccagcuguuggggcugggg

SEQ ID NO: 2471949 - RNA, 19 nt, Artificial Sequence
  Description of Artificial Sequence: Synthetic oligonucleotide
gguggggcagcaacucuca

SEQ ID NO: 2471950 - RNA, 19 nt, Artificial Sequence
  Description of Artificial Sequence: Synthetic oligonucleotide
cggggucacagacggauac

SEQ ID NO: 2471951 - RNA, 19 nt, Artificial Sequence
  Description of Artificial Sequence: Synthetic oligonucleotide
ccacguagguggcucccag

SEQ ID NO: 2471952 - RNA, 19 nt, Artificial Sequence
  Description of Artificial Sequence: Synthetic oligonucleotide
cagcaacucucauaagguu

SEQ ID NO: 2471953 - RNA, 19 nt, Artificial Sequence
  Description of Artificial Sequence: Synthetic oligonucleotide
gccgggcugcuccuggaug

SEQ ID NO: 2471954 - RNA, 19 nt, Artificial Sequence
  Description of Artificial Sequence: Synthetic oligonucleotide
guucugcuuccuccggggu

SEQ ID NO: 2471955 - RNA, 19 nt, Artificial Sequence
  Description of Artificial Sequence: Synthetic oligonucleotide
guggcucccagcagcucca

SEQ ID NO: 2471956 - RNA, 19 nt, Artificial Sequence
  Description of Artificial Sequence: Synthetic oligonucleotide
ccgccugaccccugagggg

SEQ ID NO: 2471957 - RNA, 19 nt, Artificial Sequence
  Description of Artificial Sequence: Synthetic oligonucleotide
ccaagcagaucccuuuucu

SEQ ID NO: 2471958 - RNA, 19 nt, Artificial Sequence
  Description of Artificial Sequence: Synthetic oligonucleotide
accagcuguuggggcuggg

SEQ ID NO: 2471959 - RNA, 19 nt, Artificial Sequence
  Description of Artificial Sequence: Synthetic oligonucleotide
gucaccucccuggaauagu

SEQ ID NO: 2471960 - RNA, 19 nt, Artificial Sequence
  Description of Artificial Sequence: Synthetic oligonucleotide
gggcagcaacucucauaag

SEQ ID NO: 2471961 - RNA, 19 nt, Artificial Sequence
  Description of Artificial Sequence: Synthetic oligonucleotide
cagugcuucagggcgccaa

SEQ ID NO: 2471962 - RNA, 19 nt, Artificial Sequence
  Description of Artificial Sequence: Synthetic oligonucleotide
ucccugcugguggggcagc

SEQ ID NO: 2471963 - RNA, 19 nt, Artificial Sequence
  Description of Artificial Sequence: Synthetic oligonucleotide
agcugcccguggccgggcu

SEQ ID NO: 2471964 - RNA, 19 nt, Artificial Sequence
  Description of Artificial Sequence: Synthetic oligonucleotide
cacccuggugucggaguuc

SEQ ID NO: 2471965 - RNA, 19 nt, Artificial Sequence
  Description of Artificial Sequence: Synthetic oligonucleotide
ggggcuuggggagguaguc

SEQ ID NO: 2471966 - RNA, 19 nt, Artificial Sequence
  Description of Artificial Sequence: Synthetic oligonucleotide
gcuuggggagguagucccc

SEQ ID NO: 2471967 - RNA, 19 nt, Artificial Sequence
  Description of Artificial Sequence: Synthetic oligonucleotide
gggcugcuccuggaugagg

SEQ ID NO: 2471968 - RNA, 19 nt, Artificial Sequence
  Description of Artificial Sequence: Synthetic oligonucleotide
cuuauccacguagguggcu

SEQ ID NO: 2471969 - RNA, 19 nt, Artificial Sequence
  Description of Artificial Sequence: Synthetic oligonucleotide
ccuguccagggcgcgggcg

SEQ ID NO: 2471970 - RNA, 19 nt, Artificial Sequence
  Description of Artificial Sequence: Synthetic oligonucleotide
cguagguggcucccagcag

SEQ ID NO: 2471971 - RNA, 19 nt, Artificial Sequence
  Description of Artificial Sequence: Synthetic oligonucleotide
cugccccugggagcugccc

SEQ ID NO: 2471972 - RNA, 19 nt, Artificial Sequence
  Description of Artificial Sequence: Synthetic oligonucleotide
cuggugucggaguuccauu

SEQ ID NO: 2471973 - RNA, 19 nt, Artificial Sequence
  Description of Artificial Sequence: Synthetic oligonucleotide
cuccgggguggaacagaca

SEQ ID NO: 2471974 - RNA, 19 nt, Artificial Sequence
  Description of Artificial Sequence: Synthetic oligonucleotide
cggaguuccauugcccuuc

SEQ ID NO: 2471975 - RNA, 19 nt, Artificial Sequence
  Description of Artificial Sequence: Synthetic oligonucleotide
ccgggcugcuccuggauga

SEQ ID NO: 2471976 - RNA, 19 nt, Artificial Sequence
  Description of Artificial Sequence: Synthetic oligonucleotide
gggcguggucaccucccug

SEQ ID NO: 2471977 - RNA, 19 nt, Artificial Sequence
  Description of Artificial Sequence: Synthetic oligonucleotide
cagggcgcgggcggccagg

SEQ ID NO: 2471978 - RNA, 19 nt, Artificial Sequence
  Description of Artificial Sequence: Synthetic oligonucleotide
agccuuccccggacagcuc

SEQ ID NO: 2471979 - RNA, 19 nt, Artificial Sequence
  Description of Artificial Sequence: Synthetic oligonucleotide
ggcugcuccuggaugaggu

SEQ ID NO: 2471980 - RNA, 19 nt, Artificial Sequence
  Description of Artificial Sequence: Synthetic oligonucleotide
ggggucacagacggauaca

SEQ ID NO: 2471981 - RNA, 19 nt, Artificial Sequence
  Description of Artificial Sequence: Synthetic oligonucleotide
cgggaucugugaugagggc

SEQ ID NO: 2471982 - RNA, 19 nt, Artificial Sequence
  Description of Artificial Sequence: Synthetic oligonucleotide
ucagggcgccaagcagauc

SEQ ID NO: 2471983 - RNA, 19 nt, Artificial Sequence
  Description of Artificial Sequence: Synthetic oligonucleotide
cugguggggcagcaacucu

SEQ ID NO: 2471984 - RNA, 19 nt, Artificial Sequence
  Description of Artificial Sequence: Synthetic oligonucleotide
cagagugccgagggaccca

SEQ ID NO: 2471985 - RNA, 19 nt, Artificial Sequence
  Description of Artificial Sequence: Synthetic oligonucleotide
gcagcuggaugaaggccuc

SEQ ID NO: 2471986 - RNA, 19 nt, Artificial Sequence
  Description of Artificial Sequence: Synthetic oligonucleotide
ccuuccccggacagcucug

SEQ ID NO: 2471987 - RNA, 19 nt, Artificial Sequence
  Description of Artificial Sequence: Synthetic oligonucleotide
ccuuauaagggaccuuguu

SEQ ID NO: 2471988 - RNA, 19 nt, Artificial Sequence
  Description of Artificial Sequence: Synthetic oligonucleotide
gagcugcccguggccgggc

SEQ ID NO: 2471989 - RNA, 19 nt, Artificial Sequence
  Description of Artificial Sequence: Synthetic oligonucleotide
gccuuccccggacagcucu

SEQ ID NO: 2471990 - RNA, 19 nt, Artificial Sequence
  Description of Artificial Sequence: Synthetic oligonucleotide
cacggccgccucccugcug

SEQ ID NO: 2471991 - RNA, 19 nt, Artificial Sequence
  Description of Artificial Sequence: Synthetic oligonucleotide
guccagggcgcgggcggcc

SEQ ID NO: 2471992 - RNA, 19 nt, Artificial Sequence
  Description of Artificial Sequence: Synthetic oligonucleotide
ugcuuccuccgggguggaa

SEQ ID NO: 2471993 - RNA, 19 nt, Artificial Sequence
  Description of Artificial Sequence: Synthetic oligonucleotide
gugccgagggacccaggau

SEQ ID NO: 2471994 - RNA, 19 nt, Artificial Sequence
  Description of Artificial Sequence: Synthetic oligonucleotide
cguaggccagaaccagcug

SEQ ID NO: 2471995 - RNA, 19 nt, Artificial Sequence
  Description of Artificial Sequence: Synthetic oligonucleotide
ccgccucccugcugguggg

SEQ ID NO: 2471996 - RNA, 19 nt, Artificial Sequence
  Description of Artificial Sequence: Synthetic oligonucleotide
cccugaggggagccuuccc

SEQ ID NO: 2471997 - RNA, 19 nt, Artificial Sequence
  Description of Artificial Sequence: Synthetic oligonucleotide
caggaucccucucccguau

SEQ ID NO: 2471998 - RNA, 19 nt, Artificial Sequence
  Description of Artificial Sequence: Synthetic oligonucleotide
gggguggaacagacaccgc

SEQ ID NO: 2471999 - RNA, 19 nt, Artificial Sequence
  Description of Artificial Sequence: Synthetic oligonucleotide
gcugcccguggccgggcug

SEQ ID NO: 2472000 - RNA, 19 nt, Artificial Sequence
  Description of Artificial Sequence: Synthetic oligonucleotide
ggaguuccauugcccuucu

SEQ ID NO: 2472001 - RNA, 19 nt, Artificial Sequence
  Description of Artificial Sequence: Synthetic oligonucleotide
ggggagccuuccccggaca

SEQ ID NO: 2472002 - RNA, 19 nt, Artificial Sequence
  Description of Artificial Sequence: Synthetic oligonucleotide
cagacaccgccugaccccu

SEQ ID NO: 2472003 - RNA, 19 nt, Artificial Sequence
  Description of Artificial Sequence: Synthetic oligonucleotide
gccucccugcugguggggc

SEQ ID NO: 2472004 - RNA, 19 nt, Artificial Sequence
  Description of Artificial Sequence: Synthetic oligonucleotide
cccaggaucccucucccgu

SEQ ID NO: 2472005 - RNA, 19 nt, Artificial Sequence
  Description of Artificial Sequence: Synthetic oligonucleotide
gcugcuccuggaugaggua

SEQ ID NO: 2472006 - RNA, 19 nt, Artificial Sequence
  Description of Artificial Sequence: Synthetic oligonucleotide
gcguggucaccucccugga

SEQ ID NO: 2472007 - RNA, 19 nt, Artificial Sequence
  Description of Artificial Sequence: Synthetic oligonucleotide
cggacagcucugccccugg

SEQ ID NO: 2472008 - RNA, 19 nt, Artificial Sequence
  Description of Artificial Sequence: Synthetic oligonucleotide
gccgggcucagugcagcug

SEQ ID NO: 2472009 - RNA, 19 nt, Artificial Sequence
  Description of Artificial Sequence: Synthetic oligonucleotide
ccucccuggaauagucgua

SEQ ID NO: 2472010 - RNA, 19 nt, Artificial Sequence
  Description of Artificial Sequence: Synthetic oligonucleotide
agacaccgccugaccccug

SEQ ID NO: 2472011 - RNA, 19 nt, Artificial Sequence
  Description of Artificial Sequence: Synthetic oligonucleotide
ccaggaucccucucccgua

SEQ ID NO: 2472012 - RNA, 19 nt, Artificial Sequence
  Description of Artificial Sequence: Synthetic oligonucleotide
gcccuucuccagugcuuca

SEQ ID NO: 2472013 - RNA, 19 nt, Artificial Sequence
  Description of Artificial Sequence: Synthetic oligonucleotide
cccuuauaagggaccuugu

SEQ ID NO: 2472014 - RNA, 19 nt, Artificial Sequence
  Description of Artificial Sequence: Synthetic oligonucleotide
ccgcaucucaucgggaucu

SEQ ID NO: 2472015 - RNA, 19 nt, Artificial Sequence
  Description of Artificial Sequence: Synthetic oligonucleotide
gcgccaagcagaucccuuu

SEQ ID NO: 2472016 - RNA, 19 nt, Artificial Sequence
  Description of Artificial Sequence: Synthetic oligonucleotide
ugcccguggccgggcugcu

SEQ ID NO: 2472017 - RNA, 19 nt, Artificial Sequence
  Description of Artificial Sequence: Synthetic oligonucleotide
cccuuuucuuauccacgua

SEQ ID NO: 2472018 - RNA, 19 nt, Artificial Sequence
  Description of Artificial Sequence: Synthetic oligonucleotide
ccggacagcucugccccug

SEQ ID NO: 2472019 - RNA, 19 nt, Artificial Sequence
  Description of Artificial Sequence: Synthetic oligonucleotide
guggggcagcaacucucau

SEQ ID NO: 2472020 - RNA, 19 nt, Artificial Sequence
  Description of Artificial Sequence: Synthetic oligonucleotide
ccucccugcugguggggca

SEQ ID NO: 2472021 - RNA, 19 nt, Artificial Sequence
  Description of Artificial Sequence: Synthetic oligonucleotide
cgccugaccccugagggga

SEQ ID NO: 2472022 - RNA, 19 nt, Artificial Sequence
  Description of Artificial Sequence: Synthetic oligonucleotide
ggcucccagcagcuccaaa

SEQ ID NO: 2472023 - RNA, 19 nt, Artificial Sequence
  Description of Artificial Sequence: Synthetic oligonucleotide
gcaucucaucgggaucugu

SEQ ID NO: 2472024 - RNA, 19 nt, Artificial Sequence
  Description of Artificial Sequence: Synthetic oligonucleotide
ccccacccuggugucggag

SEQ ID NO: 2472025 - RNA, 19 nt, Artificial Sequence
  Description of Artificial Sequence: Synthetic oligonucleotide
gccccugggagcugcccgu

SEQ ID NO: 2472026 - RNA, 19 nt, Artificial Sequence
  Description of Artificial Sequence: Synthetic oligonucleotide
ggggcguggucaccucccu

SEQ ID NO: 2472027 - RNA, 19 nt, Artificial Sequence
  Description of Artificial Sequence: Synthetic oligonucleotide
cccacccuggugucggagu

SEQ ID NO: 2472028 - RNA, 19 nt, Artificial Sequence
  Description of Artificial Sequence: Synthetic oligonucleotide
cugcuuccuccggggugga

SEQ ID NO: 2472029 - RNA, 19 nt, Artificial Sequence
  Description of Artificial Sequence: Synthetic oligonucleotide
ccagggcgcgggcggccag

SEQ ID NO: 2472030 - RNA, 19 nt, Artificial Sequence
  Description of Artificial Sequence: Synthetic oligonucleotide
cgcaucucaucgggaucug

SEQ ID NO: 2472031 - RNA, 19 nt, Artificial Sequence
  Description of Artificial Sequence: Synthetic oligonucleotide
ggcgccaagcagaucccuu

SEQ ID NO: 2472032 - RNA, 19 nt, Artificial Sequence
  Description of Artificial Sequence: Synthetic oligonucleotide
cgggcugcuccuggaugag

SEQ ID NO: 2472033 - RNA, 19 nt, Artificial Sequence
  Description of Artificial Sequence: Synthetic oligonucleotide
cguggucaccucccuggaa

SEQ ID NO: 2472034 - RNA, 19 nt, Artificial Sequence
  Description of Artificial Sequence: Synthetic oligonucleotide
ccccugggagcugcccgug

SEQ ID NO: 2472035 - RNA, 19 nt, Artificial Sequence
  Description of Artificial Sequence: Synthetic oligonucleotide
gggcgccaagcagaucccu

SEQ ID NO: 2472036 - RNA, 19 nt, Artificial Sequence
  Description of Artificial Sequence: Synthetic oligonucleotide
ccacccuggugucggaguu

SEQ ID NO: 2472037 - RNA, 19 nt, Artificial Sequence
  Description of Artificial Sequence: Synthetic oligonucleotide
gcucugccccugggagcug

SEQ ID NO: 2472038 - RNA, 19 nt, Artificial Sequence
  Description of Artificial Sequence: Synthetic oligonucleotide
gggcucagugcagcuggau

SEQ ID NO: 2472039 - RNA, 19 nt, Artificial Sequence
  Description of Artificial Sequence: Synthetic oligonucleotide
cccuggugucggaguucca

SEQ ID NO: 2472040 - RNA, 19 nt, Artificial Sequence
  Description of Artificial Sequence: Synthetic oligonucleotide
cggcugucggggucacaga

SEQ ID NO: 2472041 - RNA, 19 nt, Artificial Sequence
  Description of Artificial Sequence: Synthetic oligonucleotide
cgggcucagugcagcugga

SEQ ID NO: 2472042 - RNA, 19 nt, Artificial Sequence
  Description of Artificial Sequence: Synthetic oligonucleotide
cccugcugguggggcagca

SEQ ID NO: 2472043 - RNA, 19 nt, Artificial Sequence
  Description of Artificial Sequence: Synthetic oligonucleotide
ccagugcuucagggcgcca

SEQ ID NO: 2472044 - RNA, 19 nt, Artificial Sequence
  Description of Artificial Sequence: Synthetic oligonucleotide
gcuggggcuuggggaggua

SEQ ID NO: 2472045 - RNA, 19 nt, Artificial Sequence
  Description of Artificial Sequence: Synthetic oligonucleotide
cgccaagcagaucccuuuu

SEQ ID NO: 2472046 - RNA, 19 nt, Artificial Sequence
  Description of Artificial Sequence: Synthetic oligonucleotide
cccggacagcucugccccu

SEQ ID NO: 2472047 - RNA, 19 nt, Artificial Sequence
  Description of Artificial Sequence: Synthetic oligonucleotide
ccguggccgggcugcuccu

SEQ ID NO: 2472048 - RNA, 19 nt, Artificial Sequence
  Description of Artificial Sequence: Synthetic oligonucleotide
ccacggccgccucccugcu

SEQ ID NO: 2472049 - RNA, 19 nt, Artificial Sequence
  Description of Artificial Sequence: Synthetic oligonucleotide
ccuccacggccgccucccu

SEQ ID NO: 2472050 - RNA, 19 nt, Artificial Sequence
  Description of Artificial Sequence: Synthetic oligonucleotide
cccggcugucggggucaca

SEQ ID NO: 2472051 - RNA, 19 nt, Artificial Sequence
  Description of Artificial Sequence: Synthetic oligonucleotide
cggccgccucccugcuggu

SEQ ID NO: 2472052 - RNA, 19 nt, Artificial Sequence
  Description of Artificial Sequence: Synthetic oligonucleotide
aaaggaauuauucauuugc

SEQ ID NO: 2472053 - RNA, 19 nt, Artificial Sequence
  Description of Artificial Sequence: Synthetic oligonucleotide
aaaacugcucauuaaauuc

SEQ ID NO: 2472054 - RNA, 19 nt, Artificial Sequence
  Description of Artificial Sequence: Synthetic oligonucleotide
uugauuugcaaauaaaagg

SEQ ID NO: 2472055 - RNA, 19 nt, Artificial Sequence
  Description of Artificial Sequence: Synthetic oligonucleotide
acaggaauuaaccagcugc

SEQ ID NO: 2472056 - RNA, 19 nt, Artificial Sequence
  Description of Artificial Sequence: Synthetic oligonucleotide
aauaaaaggaauuauucau

SEQ ID NO: 2472057 - RNA, 19 nt, Artificial Sequence
  Description of Artificial Sequence: Synthetic oligonucleotide
auaaggaucuucuuuaaac

SEQ ID NO: 2472058 - RNA, 19 nt, Artificial Sequence
  Description of Artificial Sequence: Synthetic oligonucleotide
ugauuugcaaauaaaagga

SEQ ID NO: 2472059 - RNA, 19 nt, Artificial Sequence
  Description of Artificial Sequence: Synthetic oligonucleotide
aaauaaaaggaauuauuca

SEQ ID NO: 2472060 - RNA, 19 nt, Artificial Sequence
  Description of Artificial Sequence: Synthetic oligonucleotide
uuaacuuccguguagagca

SEQ ID NO: 2472061 - RNA, 19 nt, Artificial Sequence
  Description of Artificial Sequence: Synthetic oligonucleotide
uaagacaacaaacucaaug

SEQ ID NO: 2472062 - RNA, 19 nt, Artificial Sequence
  Description of Artificial Sequence: Synthetic oligonucleotide
aagacaacaaacucaaugu

SEQ ID NO: 2472063 - RNA, 19 nt, Artificial Sequence
  Description of Artificial Sequence: Synthetic oligonucleotide
aauaaaguaagcaauaaaa

SEQ ID NO: 2472064 - RNA, 19 nt, Artificial Sequence
  Description of Artificial Sequence: Synthetic oligonucleotide
agcaaauucagacaccagc

SEQ ID NO: 2472065 - RNA, 19 nt, Artificial Sequence
  Description of Artificial Sequence: Synthetic oligonucleotide
uucauuuggaaauuaaagc

SEQ ID NO: 2472066 - RNA, 19 nt, Artificial Sequence
  Description of Artificial Sequence: Synthetic oligonucleotide
aauguuauggcauagucua

SEQ ID NO: 2472067 - RNA, 19 nt, Artificial Sequence
  Description of Artificial Sequence: Synthetic oligonucleotide
aaaccugugacuaaugaac

SEQ ID NO: 2472068 - RNA, 19 nt, Artificial Sequence
  Description of Artificial Sequence: Synthetic oligonucleotide
aaacaauucauuuggaaau

SEQ ID NO: 2472069 - RNA, 19 nt, Artificial Sequence
  Description of Artificial Sequence: Synthetic oligonucleotide
ucuucuuuaaaccugugac

SEQ ID NO: 2472070 - RNA, 19 nt, Artificial Sequence
  Description of Artificial Sequence: Synthetic oligonucleotide
uuuaagacaacaaacucaa

SEQ ID NO: 2472071 - RNA, 19 nt, Artificial Sequence
  Description of Artificial Sequence: Synthetic oligonucleotide
cuggguaagaacuuuaucc

SEQ ID NO: 2472072 - RNA, 19 nt, Artificial Sequence
  Description of Artificial Sequence: Synthetic oligonucleotide
gaggaaauaggauuguggg

SEQ ID NO: 2472073 - RNA, 19 nt, Artificial Sequence
  Description of Artificial Sequence: Synthetic oligonucleotide
auauccauccuucaaguac

SEQ ID NO: 2472074 - RNA, 19 nt, Artificial Sequence
  Description of Artificial Sequence: Synthetic oligonucleotide
uggcaaacaauucauuugg

SEQ ID NO: 2472075 - RNA, 19 nt, Artificial Sequence
  Description of Artificial Sequence: Synthetic oligonucleotide
auucaagccuuucauauac

SEQ ID NO: 2472076 - RNA, 19 nt, Artificial Sequence
  Description of Artificial Sequence: Synthetic oligonucleotide
guuugcaagagacagaagc

SEQ ID NO: 2472077 - RNA, 19 nt, Artificial Sequence
  Description of Artificial Sequence: Synthetic oligonucleotide
aauguuugaaauggauucc

SEQ ID NO: 2472078 - RNA, 19 nt, Artificial Sequence
  Description of Artificial Sequence: Synthetic oligonucleotide
uguagagcagaugagauag

SEQ ID NO: 2472079 - RNA, 19 nt, Artificial Sequence
  Description of Artificial Sequence: Synthetic oligonucleotide
ugaggaaauaggauugugg

SEQ ID NO: 2472080 - RNA, 19 nt, Artificial Sequence
  Description of Artificial Sequence: Synthetic oligonucleotide
aacaguuugcaagagacag

SEQ ID NO: 2472081 - RNA, 19 nt, Artificial Sequence
  Description of Artificial Sequence: Synthetic oligonucleotide
acugaaacacagcaaauuc

SEQ ID NO: 2472082 - RNA, 19 nt, Artificial Sequence
  Description of Artificial Sequence: Synthetic oligonucleotide
uggaaauuaaagccuaugc

SEQ ID NO: 2472083 - RNA, 19 nt, Artificial Sequence
  Description of Artificial Sequence: Synthetic oligonucleotide
aguuacaggaauuaaccag

SEQ ID NO: 2472084 - RNA, 19 nt, Artificial Sequence
  Description of Artificial Sequence: Synthetic oligonucleotide
ugcucauuaaauucaagcc

SEQ ID NO: 2472085 - RNA, 19 nt, Artificial Sequence
  Description of Artificial Sequence: Synthetic oligonucleotide
aagagacagaagccgaggc

SEQ ID NO: 2472086 - RNA, 19 nt, Artificial Sequence
  Description of Artificial Sequence: Synthetic oligonucleotide
uuuaauaaaguaagcaaua

SEQ ID NO: 2472087 - RNA, 19 nt, Artificial Sequence
  Description of Artificial Sequence: Synthetic oligonucleotide
uuaaauucaagccuuucau

SEQ ID NO: 2472088 - RNA, 19 nt, Artificial Sequence
  Description of Artificial Sequence: Synthetic oligonucleotide
uuugcaagagacagaagcc

SEQ ID NO: 2472089 - RNA, 19 nt, Artificial Sequence
  Description of Artificial Sequence: Synthetic oligonucleotide
aaucaaacaaguaucaaaa

SEQ ID NO: 2472090 - RNA, 19 nt, Artificial Sequence
  Description of Artificial Sequence: Synthetic oligonucleotide
uuugaaauggauuccaaua

SEQ ID NO: 2472091 - RNA, 19 nt, Artificial Sequence
  Description of Artificial Sequence: Synthetic oligonucleotide
ugaaauggauuccaauaag

SEQ ID NO: 2472092 - RNA, 19 nt, Artificial Sequence
  Description of Artificial Sequence: Synthetic oligonucleotide
gacauauccauccuucaag

SEQ ID NO: 2472093 - RNA, 19 nt, Artificial Sequence
  Description of Artificial Sequence: Synthetic oligonucleotide
ucaagccuuucauauaccg

SEQ ID NO: 2472094 - RNA, 19 nt, Artificial Sequence
  Description of Artificial Sequence: Synthetic oligonucleotide
cacugaaacacaaagccag

SEQ ID NO: 2472095 - RNA, 19 nt, Artificial Sequence
  Description of Artificial Sequence: Synthetic oligonucleotide
ucaaguacaugcaaggcuc

SEQ ID NO: 2472096 - RNA, 19 nt, Artificial Sequence
  Description of Artificial Sequence: Synthetic oligonucleotide
uuugcaaauaaaaggaauu

SEQ ID NO: 2472097 - RNA, 19 nt, Artificial Sequence
  Description of Artificial Sequence: Synthetic oligonucleotide
auuaaauucaagccuuuca

SEQ ID NO: 2472098 - RNA, 19 nt, Artificial Sequence
  Description of Artificial Sequence: Synthetic oligonucleotide
uuugcucucacaguuacag

SEQ ID NO: 2472099 - RNA, 19 nt, Artificial Sequence
  Description of Artificial Sequence: Synthetic oligonucleotide
aaagccuaugccuguauug

SEQ ID NO: 2472100 - RNA, 19 nt, Artificial Sequence
  Description of Artificial Sequence: Synthetic oligonucleotide
auucauuuggaaauuaaag

SEQ ID NO: 2472101 - RNA, 19 nt, Artificial Sequence
  Description of Artificial Sequence: Synthetic oligonucleotide
aaaaggaauuauucauuug

SEQ ID NO: 2472102 - RNA, 19 nt, Artificial Sequence
  Description of Artificial Sequence: Synthetic oligonucleotide
aacacagcaaauucagaca

SEQ ID NO: 2472103 - RNA, 19 nt, Artificial Sequence
  Description of Artificial Sequence: Synthetic oligonucleotide
guugauuugcaaauaaaag

SEQ ID NO: 2472104 - RNA, 19 nt, Artificial Sequence
  Description of Artificial Sequence: Synthetic oligonucleotide
uugaaauggauuccaauaa

SEQ ID NO: 2472105 - RNA, 19 nt, Artificial Sequence
  Description of Artificial Sequence: Synthetic oligonucleotide
aaggaucuucuuuaaaccu

SEQ ID NO: 2472106 - RNA, 19 nt, Artificial Sequence
  Description of Artificial Sequence: Synthetic oligonucleotide
uucaaguacaugcaaggcu

SEQ ID NO: 2472107 - RNA, 19 nt, Artificial Sequence
  Description of Artificial Sequence: Synthetic oligonucleotide
uaauaaaguaagcaauaaa

SEQ ID NO: 2472108 - RNA, 19 nt, Artificial Sequence
  Description of Artificial Sequence: Synthetic oligonucleotide
uuaaaccugugacuaauga

SEQ ID NO: 2472109 - RNA, 19 nt, Artificial Sequence
  Description of Artificial Sequence: Synthetic oligonucleotide
auauaccgggcacugaaac

SEQ ID NO: 2472110 - RNA, 19 nt, Artificial Sequence
  Description of Artificial Sequence: Synthetic oligonucleotide
uuccguguagagcagauga

SEQ ID NO: 2472111 - RNA, 19 nt, Artificial Sequence
  Description of Artificial Sequence: Synthetic oligonucleotide
uguuauggcauagucuacg

SEQ ID NO: 2472112 - RNA, 19 nt, Artificial Sequence
  Description of Artificial Sequence: Synthetic oligonucleotide
ugcagauguaucucaaucc

SEQ ID NO: 2472113 - RNA, 19 nt, Artificial Sequence
  Description of Artificial Sequence: Synthetic oligonucleotide
aggaauuauucauuugcuc

SEQ ID NO: 2472114 - RNA, 19 nt, Artificial Sequence
  Description of Artificial Sequence: Synthetic oligonucleotide
ugacuaaugaacacgguua

SEQ ID NO: 2472115 - RNA, 19 nt, Artificial Sequence
  Description of Artificial Sequence: Synthetic oligonucleotide
agauagaagaaaagaaagg

SEQ ID NO: 2472116 - RNA, 19 nt, Artificial Sequence
  Description of Artificial Sequence: Synthetic oligonucleotide
uauccauccuucaaguaca

SEQ ID NO: 2472117 - RNA, 19 nt, Artificial Sequence
  Description of Artificial Sequence: Synthetic oligonucleotide
ucaauguuauggcauaguc

SEQ ID NO: 2472118 - RNA, 19 nt, Artificial Sequence
  Description of Artificial Sequence: Synthetic oligonucleotide
augcagauguaucucaauc

SEQ ID NO: 2472119 - RNA, 19 nt, Artificial Sequence
  Description of Artificial Sequence: Synthetic oligonucleotide
aacccaucuggguaagaac

SEQ ID NO: 2472120 - RNA, 19 nt, Artificial Sequence
  Description of Artificial Sequence: Synthetic oligonucleotide
aguaacauccugccugugg

SEQ ID NO: 2472121 - RNA, 19 nt, Artificial Sequence
  Description of Artificial Sequence: Synthetic oligonucleotide
uauggcauagucuacguuu

SEQ ID NO: 2472122 - RNA, 19 nt, Artificial Sequence
  Description of Artificial Sequence: Synthetic oligonucleotide
uaaaaggaauuauucauuu

SEQ ID NO: 2472123 - RNA, 19 nt, Artificial Sequence
  Description of Artificial Sequence: Synthetic oligonucleotide
cugugacuaaugaacacgg

SEQ ID NO: 2472124 - RNA, 19 nt, Artificial Sequence
  Description of Artificial Sequence: Synthetic oligonucleotide
aauuaaagccuaugccugu

SEQ ID NO: 2472125 - RNA, 19 nt, Artificial Sequence
  Description of Artificial Sequence: Synthetic oligonucleotide
gaauuauucauuugcucuc

SEQ ID NO: 2472126 - RNA, 19 nt, Artificial Sequence
  Description of Artificial Sequence: Synthetic oligonucleotide
aggaaauaggauugugggg

SEQ ID NO: 2472127 - RNA, 19 nt, Artificial Sequence
  Description of Artificial Sequence: Synthetic oligonucleotide
uaaugaacacgguuacuag

SEQ ID NO: 2472128 - RNA, 19 nt, Artificial Sequence
  Description of Artificial Sequence: Synthetic oligonucleotide
acgaaacucauucgaauag

SEQ ID NO: 2472129 - RNA, 19 nt, Artificial Sequence
  Description of Artificial Sequence: Synthetic oligonucleotide
uccuucaaguacaugcaag

SEQ ID NO: 2472130 - RNA, 19 nt, Artificial Sequence
  Description of Artificial Sequence: Synthetic oligonucleotide
uauuguaaacucuguaaaa

SEQ ID NO: 2472131 - RNA, 19 nt, Artificial Sequence
  Description of Artificial Sequence: Synthetic oligonucleotide
uccaauaaggaucuucuuu

SEQ ID NO: 2472132 - RNA, 19 nt, Artificial Sequence
  Description of Artificial Sequence: Synthetic oligonucleotide
cuugacauauccauccuuc

SEQ ID NO: 2472133 - RNA, 19 nt, Artificial Sequence
  Description of Artificial Sequence: Synthetic oligonucleotide
aggauuguggggcgaaccc

SEQ ID NO: 2472134 - RNA, 19 nt, Artificial Sequence
  Description of Artificial Sequence: Synthetic oligonucleotide
uuaauaaaguaagcaauaa

SEQ ID NO: 2472135 - RNA, 19 nt, Artificial Sequence
  Description of Artificial Sequence: Synthetic oligonucleotide
uugcaagagacagaagccg

SEQ ID NO: 2472136 - RNA, 19 nt, Artificial Sequence
  Description of Artificial Sequence: Synthetic oligonucleotide
aggcucaacaguuugcaag

SEQ ID NO: 2472137 - RNA, 19 nt, Artificial Sequence
  Description of Artificial Sequence: Synthetic oligonucleotide
ggaaauaggauuguggggc

SEQ ID NO: 2472138 - RNA, 19 nt, Artificial Sequence
  Description of Artificial Sequence: Synthetic oligonucleotide
ucauauaccgggcacugaa

SEQ ID NO: 2472139 - RNA, 19 nt, Artificial Sequence
  Description of Artificial Sequence: Synthetic oligonucleotide
cauagucuacguuugcggc

SEQ ID NO: 2472140 - RNA, 19 nt, Artificial Sequence
  Description of Artificial Sequence: Synthetic oligonucleotide
aauaaggaucuucuuuaaa

SEQ ID NO: 2472141 - RNA, 19 nt, Artificial Sequence
  Description of Artificial Sequence: Synthetic oligonucleotide
auaccgggcacugaaacac

SEQ ID NO: 2472142 - RNA, 19 nt, Artificial Sequence
  Description of Artificial Sequence: Synthetic oligonucleotide
aauucauuuggaaauuaaa

SEQ ID NO: 2472143 - RNA, 19 nt, Artificial Sequence
  Description of Artificial Sequence: Synthetic oligonucleotide
cacaguuacaggaauuaac

SEQ ID NO: 2472144 - RNA, 19 nt, Artificial Sequence
  Description of Artificial Sequence: Synthetic oligonucleotide
  modified_base (3)..(3): a, c, u, g, unknown or other
guncuaguaacauccugcc

SEQ ID NO: 2472145 - RNA, 19 nt, Artificial Sequence
  Description of Artificial Sequence: Synthetic oligonucleotide
uucuuuaaaccugugacua

SEQ ID NO: 2472146 - RNA, 19 nt, Artificial Sequence
  Description of Artificial Sequence: Synthetic oligonucleotide
aauuaaccagcugcuuaac

SEQ ID NO: 2472147 - RNA, 19 nt, Artificial Sequence
  Description of Artificial Sequence: Synthetic oligonucleotide
auuauucauuugcucucac

SEQ ID NO: 2472148 - RNA, 19 nt, Artificial Sequence
  Description of Artificial Sequence: Synthetic oligonucleotide
agguuuggcaaacaauuca

SEQ ID NO: 2472149 - RNA, 19 nt, Artificial Sequence
  Description of Artificial Sequence: Synthetic oligonucleotide
gacuaaugaacacgguuac

SEQ ID NO: 2472150 - RNA, 19 nt, Artificial Sequence
  Description of Artificial Sequence: Synthetic oligonucleotide
gagacagaagccgaggccc

SEQ ID NO: 2472151 - RNA, 19 nt, Artificial Sequence
  Description of Artificial Sequence: Synthetic oligonucleotide
ugcaaggcucaacaguuug

SEQ ID NO: 2472152 - RNA, 19 nt, Artificial Sequence
  Description of Artificial Sequence: Synthetic oligonucleotide
aacacgguuacuagguuug

SEQ ID NO: 2472153 - RNA, 19 nt, Artificial Sequence
  Description of Artificial Sequence: Synthetic oligonucleotide
acauauccauccuucaagu

SEQ ID NO: 2472154 - RNA, 19 nt, Artificial Sequence
  Description of Artificial Sequence: Synthetic oligonucleotide
guauuguaaacucuguaaa

SEQ ID NO: 2472155 - RNA, 19 nt, Artificial Sequence
  Description of Artificial Sequence: Synthetic oligonucleotide
ucuucacccgucuugacau

SEQ ID NO: 2472156 - RNA, 19 nt, Artificial Sequence
  Description of Artificial Sequence: Synthetic oligonucleotide
uuugcggcucccuugucag

SEQ ID NO: 2472157 - RNA, 19 nt, Artificial Sequence
  Description of Artificial Sequence: Synthetic oligonucleotide
caagccuuucauauaccgg

SEQ ID NO: 2472158 - RNA, 19 nt, Artificial Sequence
  Description of Artificial Sequence: Synthetic oligonucleotide
cuuaacuuccguguagagc

SEQ ID NO: 2472159 - RNA, 19 nt, Artificial Sequence
  Description of Artificial Sequence: Synthetic oligonucleotide
aaggaauuauucauuugcu

SEQ ID NO: 2472160 - RNA, 19 nt, Artificial Sequence
  Description of Artificial Sequence: Synthetic oligonucleotide
  modified_base (4)..(4): a, c, u, g, unknown or other
gguncuaguaacauccugc

SEQ ID NO: 2472161 - RNA, 19 nt, Artificial Sequence
  Description of Artificial Sequence: Synthetic oligonucleotide
aagccaguugauuugcaaa

SEQ ID NO: 2472162 - RNA, 19 nt, Artificial Sequence
  Description of Artificial Sequence: Synthetic oligonucleotide
uuauucauuugcucucaca

SEQ ID NO: 2472163 - RNA, 19 nt, Artificial Sequence
  Description of Artificial Sequence: Synthetic oligonucleotide
aguugauuugcaaauaaaa

SEQ ID NO: 2472164 - RNA, 19 nt, Artificial Sequence
  Description of Artificial Sequence: Synthetic oligonucleotide
acuggagagggccaugcag

SEQ ID NO: 2472165 - RNA, 19 nt, Artificial Sequence
  Description of Artificial Sequence: Synthetic oligonucleotide
ugcaagagacagaagccga

SEQ ID NO: 2472166 - RNA, 19 nt, Artificial Sequence
  Description of Artificial Sequence: Synthetic oligonucleotide
aagccgaggcccuuuaaga

SEQ ID NO: 2472167 - RNA, 19 nt, Artificial Sequence
  Description of Artificial Sequence: Synthetic oligonucleotide
acaugcaaggcucaacagu

SEQ ID NO: 2472168 - RNA, 19 nt, Artificial Sequence
  Description of Artificial Sequence: Synthetic oligonucleotide
gaagccgaggcccuuuaag

SEQ ID NO: 2472169 - RNA, 19 nt, Artificial Sequence
  Description of Artificial Sequence: Synthetic oligonucleotide
acacugaggaaauaggauu

SEQ ID NO: 2472170 - RNA, 19 nt, Artificial Sequence
  Description of Artificial Sequence: Synthetic oligonucleotide
uucacgaaacucauucgaa

SEQ ID NO: 2472171 - RNA, 19 nt, Artificial Sequence
  Description of Artificial Sequence: Synthetic oligonucleotide
gucagauaaaacucuaaaa

SEQ ID NO: 2472172 - RNA, 19 nt, Artificial Sequence
  Description of Artificial Sequence: Synthetic oligonucleotide
aacucaauguuauggcaua

SEQ ID NO: 2472173 - RNA, 19 nt, Artificial Sequence
  Description of Artificial Sequence: Synthetic oligonucleotide
uuggaaauuaaagccuaug

SEQ ID NO: 2472174 - RNA, 19 nt, Artificial Sequence
  Description of Artificial Sequence: Synthetic oligonucleotide
cuugucaggucuucacccg

SEQ ID NO: 2472175 - RNA, 19 nt, Artificial Sequence
  Description of Artificial Sequence: Synthetic oligonucleotide
aacugaaacacagcaaauu

SEQ ID NO: 2472176 - RNA, 19 nt, Artificial Sequence
  Description of Artificial Sequence: Synthetic oligonucleotide
acgguuacuagguuuggca

SEQ ID NO: 2472177 - RNA, 19 nt, Artificial Sequence
  Description of Artificial Sequence: Synthetic oligonucleotide
gauuccaauaaggaucuuc

SEQ ID NO: 2472178 - RNA, 19 nt, Artificial Sequence
  Description of Artificial Sequence: Synthetic oligonucleotide
agccgaggcccuuuaagac

SEQ ID NO: 2472179 - RNA, 19 nt, Artificial Sequence
  Description of Artificial Sequence: Synthetic oligonucleotide
acacaaagccaguugauuu

SEQ ID NO: 2472180 - RNA, 19 nt, Artificial Sequence
  Description of Artificial Sequence: Synthetic oligonucleotide
agcugcuuaacuuccgugu

SEQ ID NO: 2472181 - RNA, 19 nt, Artificial Sequence
  Description of Artificial Sequence: Synthetic oligonucleotide
acagcaaauucagacacca

SEQ ID NO: 2472182 - RNA, 19 nt, Artificial Sequence
  Description of Artificial Sequence: Synthetic oligonucleotide
guacaugcaaggcucaaca

SEQ ID NO: 2472183 - RNA, 19 nt, Artificial Sequence
  Description of Artificial Sequence: Synthetic oligonucleotide
uuucauauaccgggcacug

SEQ ID NO: 2472184 - RNA, 19 nt, Artificial Sequence
  Description of Artificial Sequence: Synthetic oligonucleotide
uauaccgggcacugaaaca

SEQ ID NO: 2472185 - RNA, 19 nt, Artificial Sequence
  Description of Artificial Sequence: Synthetic oligonucleotide
uacaugcaaggcucaacag

SEQ ID NO: 2472186 - RNA, 19 nt, Artificial Sequence
  Description of Artificial Sequence: Synthetic oligonucleotide
ugacauauccauccuucaa

SEQ ID NO: 2472187 - RNA, 19 nt, Artificial Sequence
  Description of Artificial Sequence: Synthetic oligonucleotide
uugcaaauaaaaggaauua

SEQ ID NO: 2472188 - RNA, 19 nt, Artificial Sequence
  Description of Artificial Sequence: Synthetic oligonucleotide
uugcucauuuaagacaaca

SEQ ID NO: 2472189 - RNA, 19 nt, Artificial Sequence
  Description of Artificial Sequence: Synthetic oligonucleotide
ucuggguaagaacuuuauc

SEQ ID NO: 2472190 - RNA, 19 nt, Artificial Sequence
  Description of Artificial Sequence: Synthetic oligonucleotide
cugaaacacagcaaauuca

SEQ ID NO: 2472191 - RNA, 19 nt, Artificial Sequence
  Description of Artificial Sequence: Synthetic oligonucleotide
ccuucaaguacaugcaagg

SEQ ID NO: 2472192 - RNA, 19 nt, Artificial Sequence
  Description of Artificial Sequence: Synthetic oligonucleotide
aagccuaugccuguauugu

SEQ ID NO: 2472193 - RNA, 19 nt, Artificial Sequence
  Description of Artificial Sequence: Synthetic oligonucleotide
auagucuacguuugcggcu

SEQ ID NO: 2472194 - RNA, 19 nt, Artificial Sequence
  Description of Artificial Sequence: Synthetic oligonucleotide
ggaauuauucauuugcucu

SEQ ID NO: 2472195 - RNA, 19 nt, Artificial Sequence
  Description of Artificial Sequence: Synthetic oligonucleotide
uugacauauccauccuuca

SEQ ID NO: 2472196 - RNA, 19 nt, Artificial Sequence
  Description of Artificial Sequence: Synthetic oligonucleotide
aguacaugcaaggcucaac

SEQ ID NO: 2472197 - RNA, 19 nt, Artificial Sequence
  Description of Artificial Sequence: Synthetic oligonucleotide
uagguuuggcaaacaauuc

SEQ ID NO: 2472198 - RNA, 19 nt, Artificial Sequence
  Description of Artificial Sequence: Synthetic oligonucleotide
ucacgaaacucauucgaau

SEQ ID NO: 2472199 - RNA, 19 nt, Artificial Sequence
  Description of Artificial Sequence: Synthetic oligonucleotide
uacuagguuuggcaaacaa

SEQ ID NO: 2472200 - RNA, 19 nt, Artificial Sequence
  Description of Artificial Sequence: Synthetic oligonucleotide
gcauagucuacguuugcgg

SEQ ID NO: 2472201 - RNA, 19 nt, Artificial Sequence
  Description of Artificial Sequence: Synthetic oligonucleotide
uccguguagagcagaugag

SEQ ID NO: 2472202 - RNA, 19 nt, Artificial Sequence
  Description of Artificial Sequence: Synthetic oligonucleotide
caaacucaauguuauggca

SEQ ID NO: 2472203 - RNA, 19 nt, Artificial Sequence
  Description of Artificial Sequence: Synthetic oligonucleotide
uuuggaaauuaaagccuau

SEQ ID NO: 2472204 - RNA, 19 nt, Artificial Sequence
  Description of Artificial Sequence: Synthetic oligonucleotide
cuucaaguacaugcaaggc

SEQ ID NO: 2472205 - RNA, 19 nt, Artificial Sequence
  Description of Artificial Sequence: Synthetic oligonucleotide
agaugagauagaagaaaag

SEQ ID NO: 2472206 - RNA, 19 nt, Artificial Sequence
  Description of Artificial Sequence: Synthetic oligonucleotide
aacaauucauuuggaaauu

SEQ ID NO: 2472207 - RNA, 19 nt, Artificial Sequence
  Description of Artificial Sequence: Synthetic oligonucleotide
uucaagccuuucauauacc

SEQ ID NO: 2472208 - RNA, 19 nt, Artificial Sequence
  Description of Artificial Sequence: Synthetic oligonucleotide
aaccugugacuaaugaaca

SEQ ID NO: 2472209 - RNA, 19 nt, Artificial Sequence
  Description of Artificial Sequence: Synthetic oligonucleotide
uacaggaauuaaccagcug

SEQ ID NO: 2472210 - RNA, 19 nt, Artificial Sequence
  Description of Artificial Sequence: Synthetic oligonucleotide
cauuuggaaauuaaagccu

SEQ ID NO: 2472211 - RNA, 19 nt, Artificial Sequence
  Description of Artificial Sequence: Synthetic oligonucleotide
  modified_base (2)..(2): a, c, u, g, unknown or other
uncuaguaacauccugccu

SEQ ID NO: 2472212 - RNA, 19 nt, Artificial Sequence
  Description of Artificial Sequence: Synthetic oligonucleotide
augaacacgguuacuaggu

SEQ ID NO: 2472213 - RNA, 19 nt, Artificial Sequence
  Description of Artificial Sequence: Synthetic oligonucleotide
agccaguugauuugcaaau

SEQ ID NO: 2472214 - RNA, 19 nt, Artificial Sequence
  Description of Artificial Sequence: Synthetic oligonucleotide
ggcccuuuaagacacugag

SEQ ID NO: 2472215 - RNA, 19 nt, Artificial Sequence
  Description of Artificial Sequence: Synthetic oligonucleotide
uacguuugcggcucccuug

SEQ ID NO: 2472216 - RNA, 19 nt, Artificial Sequence
  Description of Artificial Sequence: Synthetic oligonucleotide
guuacuagguuuggcaaac

SEQ ID NO: 2472217 - RNA, 19 nt, Artificial Sequence
  Description of Artificial Sequence: Synthetic oligonucleotide
ugugacuaaugaacacggu

SEQ ID NO: 2472218 - RNA, 19 nt, Artificial Sequence
  Description of Artificial Sequence: Synthetic oligonucleotide
uggggcgaacccaucuggg

SEQ ID NO: 2472219 - RNA, 19 nt, Artificial Sequence
  Description of Artificial Sequence: Synthetic oligonucleotide
cagcuugcucauuuaagac

SEQ ID NO: 2472220 - RNA, 19 nt, Artificial Sequence
  Description of Artificial Sequence: Synthetic oligonucleotide
agacaacaaacucaauguu

SEQ ID NO: 2472221 - RNA, 19 nt, Artificial Sequence
  Description of Artificial Sequence: Synthetic oligonucleotide
aaagucagauaaaacucua

SEQ ID NO: 2472222 - RNA, 19 nt, Artificial Sequence
  Description of Artificial Sequence: Synthetic oligonucleotide
uguggggcgaacccaucug

SEQ ID NO: 2472223 - RNA, 19 nt, Artificial Sequence
  Description of Artificial Sequence: Synthetic oligonucleotide
ucuugacauauccauccuu

SEQ ID NO: 2472224 - RNA, 19 nt, Artificial Sequence
  Description of Artificial Sequence: Synthetic oligonucleotide
uagagcagaugagauagaa

SEQ ID NO: 2472225 - RNA, 19 nt, Artificial Sequence
  Description of Artificial Sequence: Synthetic oligonucleotide
cuagguuuggcaaacaauu

SEQ ID NO: 2472226 - RNA, 19 nt, Artificial Sequence
  Description of Artificial Sequence: Synthetic oligonucleotide
aggaucuucuuuaaaccug

SEQ ID NO: 2472227 - RNA, 19 nt, Artificial Sequence
  Description of Artificial Sequence: Synthetic oligonucleotide
caagagacagaagccgagg

SEQ ID NO: 2472228 - RNA, 19 nt, Artificial Sequence
  Description of Artificial Sequence: Synthetic oligonucleotide
auguuugaaauggauucca

SEQ ID NO: 2472229 - RNA, 19 nt, Artificial Sequence
  Description of Artificial Sequence: Synthetic oligonucleotide
ucauuaaauucaagccuuu

SEQ ID NO: 2472230 - RNA, 19 nt, Artificial Sequence
  Description of Artificial Sequence: Synthetic oligonucleotide
cccuuuaagacacugagga

SEQ ID NO: 2472231 - RNA, 19 nt, Artificial Sequence
  Description of Artificial Sequence: Synthetic oligonucleotide
cacccgucuugacauaucc

SEQ ID NO: 2472232 - RNA, 19 nt, Artificial Sequence
  Description of Artificial Sequence: Synthetic oligonucleotide
ugccuguauuguaaacucu

SEQ ID NO: 2472233 - RNA, 19 nt, Artificial Sequence
  Description of Artificial Sequence: Synthetic oligonucleotide
uuaaagccuaugccuguau

SEQ ID NO: 2472234 - RNA, 19 nt, Artificial Sequence
  Description of Artificial Sequence: Synthetic oligonucleotide
aaacugaaacacagcaaau

SEQ ID NO: 2472235 - RNA, 19 nt, Artificial Sequence
  Description of Artificial Sequence: Synthetic oligonucleotide
ucucacaguuacaggaauu

SEQ ID NO: 2472236 - RNA, 19 nt, Artificial Sequence
  Description of Artificial Sequence: Synthetic oligonucleotide
uaggauuguggggcgaacc

SEQ ID NO: 2472237 - RNA, 19 nt, Artificial Sequence
  Description of Artificial Sequence: Synthetic oligonucleotide
uuguggggcgaacccaucu

SEQ ID NO: 2472238 - RNA, 19 nt, Artificial Sequence
  Description of Artificial Sequence: Synthetic oligonucleotide
auuuggaaauuaaagccua

SEQ ID NO: 2472239 - RNA, 19 nt, Artificial Sequence
  Description of Artificial Sequence: Synthetic oligonucleotide
ucauuugcucucacaguua

SEQ ID NO: 2472240 - RNA, 19 nt, Artificial Sequence
  Description of Artificial Sequence: Synthetic oligonucleotide
agagcagaugagauagaag

SEQ ID NO: 2472241 - RNA, 19 nt, Artificial Sequence
  Description of Artificial Sequence: Synthetic oligonucleotide
caauucauuuggaaauuaa

SEQ ID NO: 2472242 - RNA, 19 nt, Artificial Sequence
  Description of Artificial Sequence: Synthetic oligonucleotide
ccugugacuaaugaacacg

SEQ ID NO: 2472243 - RNA, 19 nt, Artificial Sequence
  Description of Artificial Sequence: Synthetic oligonucleotide
cugcuuaacuuccguguag

SEQ ID NO: 2472244 - RNA, 19 nt, Artificial Sequence
  Description of Artificial Sequence: Synthetic oligonucleotide
agccuuucauauaccgggc

SEQ ID NO: 2472245 - RNA, 19 nt, Artificial Sequence
  Description of Artificial Sequence: Synthetic oligonucleotide
guggggcgaacccaucugg

SEQ ID NO: 2472246 - RNA, 19 nt, Artificial Sequence
  Description of Artificial Sequence: Synthetic oligonucleotide
uaacuuccguguagagcag

SEQ ID NO: 2472247 - RNA, 19 nt, Artificial Sequence
  Description of Artificial Sequence: Synthetic oligonucleotide
uugucaggucuucacccgu

SEQ ID NO: 2472248 - RNA, 19 nt, Artificial Sequence
  Description of Artificial Sequence: Synthetic oligonucleotide
caguuacaggaauuaacca

SEQ ID NO: 2472249 - RNA, 19 nt, Artificial Sequence
  Description of Artificial Sequence: Synthetic oligonucleotide
cauuaaauucaagccuuuc

SEQ ID NO: 2472250 - RNA, 19 nt, Artificial Sequence
  Description of Artificial Sequence: Synthetic oligonucleotide
ccuugucaggucuucaccc

SEQ ID NO: 2472251 - RNA, 19 nt, Artificial Sequence
  Description of Artificial Sequence: Synthetic oligonucleotide
aaauaggauuguggggcga

SEQ ID NO: 2472252 - RNA, 19 nt, Artificial Sequence
  Description of Artificial Sequence: Synthetic oligonucleotide
gcagauguaucucaaucca

SEQ ID NO: 2472253 - RNA, 19 nt, Artificial Sequence
  Description of Artificial Sequence: Synthetic oligonucleotide
aaggcucaacaguuugcaa

SEQ ID NO: 2472254 - RNA, 19 nt, Artificial Sequence
  Description of Artificial Sequence: Synthetic oligonucleotide
caggucuucacccgucuug

SEQ ID NO: 2472255 - RNA, 19 nt, Artificial Sequence
  Description of Artificial Sequence: Synthetic oligonucleotide
acucaauguuauggcauag

SEQ ID NO: 2472256 - RNA, 19 nt, Artificial Sequence
  Description of Artificial Sequence: Synthetic oligonucleotide
cucauuaaauucaagccuu

SEQ ID NO: 2472257 - RNA, 19 nt, Artificial Sequence
  Description of Artificial Sequence: Synthetic oligonucleotide
guaacauccugccuguggu

SEQ ID NO: 2472258 - RNA, 19 nt, Artificial Sequence
  Description of Artificial Sequence: Synthetic oligonucleotide
uuaagacaacaaacucaau

SEQ ID NO: 2472259 - RNA, 19 nt, Artificial Sequence
  Description of Artificial Sequence: Synthetic oligonucleotide
ggcauagucuacguuugcg

SEQ ID NO: 2472260 - RNA, 19 nt, Artificial Sequence
  Description of Artificial Sequence: Synthetic oligonucleotide
cuucuuuaaaccugugacu

SEQ ID NO: 2472261 - RNA, 19 nt, Artificial Sequence
  Description of Artificial Sequence: Synthetic oligonucleotide
acuagguuuggcaaacaau

SEQ ID NO: 2472262 - RNA, 19 nt, Artificial Sequence
  Description of Artificial Sequence: Synthetic oligonucleotide
agggccaugcagauguauc

SEQ ID NO: 2472263 - RNA, 19 nt, Artificial Sequence
  Description of Artificial Sequence: Synthetic oligonucleotide
uggcauagucuacguuugc

SEQ ID NO: 2472264 - RNA, 19 nt, Artificial Sequence
  Description of Artificial Sequence: Synthetic oligonucleotide
ggaauuaaccagcugcuua

SEQ ID NO: 2472265 - RNA, 19 nt, Artificial Sequence
  Description of Artificial Sequence: Synthetic oligonucleotide
gcucauuaaauucaagccu

SEQ ID NO: 2472266 - RNA, 19 nt, Artificial Sequence
  Description of Artificial Sequence: Synthetic oligonucleotide
auggcauagucuacguuug

SEQ ID NO: 2472267 - RNA, 19 nt, Artificial Sequence
  Description of Artificial Sequence: Synthetic oligonucleotide
cacgaaacucauucgaaua

SEQ ID NO: 2472268 - RNA, 19 nt, Artificial Sequence
  Description of Artificial Sequence: Synthetic oligonucleotide
caguuugcaagagacagaa

SEQ ID NO: 2472269 - RNA, 19 nt, Artificial Sequence
  Description of Artificial Sequence: Synthetic oligonucleotide
auguuauggcauagucuac

SEQ ID NO: 2472270 - RNA, 19 nt, Artificial Sequence
  Description of Artificial Sequence: Synthetic oligonucleotide
ugaacacgguuacuagguu

SEQ ID NO: 2472271 - RNA, 19 nt, Artificial Sequence
  Description of Artificial Sequence: Synthetic oligonucleotide
ucacaguuacaggaauuaa

SEQ ID NO: 2472272 - RNA, 19 nt, Artificial Sequence
  Description of Artificial Sequence: Synthetic oligonucleotide
uagucuacguuugcggcuc

SEQ ID NO: 2472273 - RNA, 19 nt, Artificial Sequence
  Description of Artificial Sequence: Synthetic oligonucleotide
gucuucacccgucuugaca

SEQ ID NO: 2472274 - RNA, 19 nt, Artificial Sequence
  Description of Artificial Sequence: Synthetic oligonucleotide
auccuucaaguacaugcaa

SEQ ID NO: 2472275 - RNA, 19 nt, Artificial Sequence
  Description of Artificial Sequence: Synthetic oligonucleotide
agucuacguuugcggcucc

SEQ ID NO: 2472276 - RNA, 19 nt, Artificial Sequence
  Description of Artificial Sequence: Synthetic oligonucleotide
ggcucaacaguuugcaaga

SEQ ID NO: 2472277 - RNA, 19 nt, Artificial Sequence
  Description of Artificial Sequence: Synthetic oligonucleotide
guuugcggcucccuuguca

SEQ ID NO: 2472278 - RNA, 19 nt, Artificial Sequence
  Description of Artificial Sequence: Synthetic oligonucleotide
acuaaugaacacgguuacu

SEQ ID NO: 2472279 - RNA, 19 nt, Artificial Sequence
  Description of Artificial Sequence: Synthetic oligonucleotide
ugucaggucuucacccguc

SEQ ID NO: 2472280 - RNA, 19 nt, Artificial Sequence
  Description of Artificial Sequence: Synthetic oligonucleotide
acguuugcggcucccuugu

SEQ ID NO: 2472281 - RNA, 19 nt, Artificial Sequence
  Description of Artificial Sequence: Synthetic oligonucleotide
guuugaaauggauuccaau

SEQ ID NO: 2472282 - RNA, 19 nt, Artificial Sequence
  Description of Artificial Sequence: Synthetic oligonucleotide
gaacccaucuggguaagaa

SEQ ID NO: 2472283 - RNA, 19 nt, Artificial Sequence
  Description of Artificial Sequence: Synthetic oligonucleotide
ccaauaaggaucuucuuua

SEQ ID NO: 2472284 - RNA, 19 nt, Artificial Sequence
  Description of Artificial Sequence: Synthetic oligonucleotide
acaauucauuuggaaauua

SEQ ID NO: 2472285 - RNA, 19 nt, Artificial Sequence
  Description of Artificial Sequence: Synthetic oligonucleotide
uuccaauaaggaucuucuu

SEQ ID NO: 2472286 - RNA, 19 nt, Artificial Sequence
  Description of Artificial Sequence: Synthetic oligonucleotide
cucaacaguuugcaagaga

SEQ ID NO: 2472287 - RNA, 19 nt, Artificial Sequence
  Description of Artificial Sequence: Synthetic oligonucleotide
gugacuaaugaacacgguu

SEQ ID NO: 2472288 - RNA, 19 nt, Artificial Sequence
  Description of Artificial Sequence: Synthetic oligonucleotide
caugcaaggcucaacaguu

SEQ ID NO: 2472289 - RNA, 19 nt, Artificial Sequence
  Description of Artificial Sequence: Synthetic oligonucleotide
cagcaaauucagacaccag

SEQ ID NO: 2472290 - RNA, 19 nt, Artificial Sequence
  Description of Artificial Sequence: Synthetic oligonucleotide
aacuuccguguagagcaga

SEQ ID NO: 2472291 - RNA, 19 nt, Artificial Sequence
  Description of Artificial Sequence: Synthetic oligonucleotide
gaggcccuuuaagacacug

SEQ ID NO: 2472292 - RNA, 19 nt, Artificial Sequence
  Description of Artificial Sequence: Synthetic oligonucleotide
  modified_base (5)..(5): a, c, u, g, unknown or other
ggguncuaguaacauccug

SEQ ID NO: 2472293 - RNA, 19 nt, Artificial Sequence
  Description of Artificial Sequence: Synthetic oligonucleotide
gccuguauuguaaacucug

SEQ ID NO: 2472294 - RNA, 19 nt, Artificial Sequence
  Description of Artificial Sequence: Synthetic oligonucleotide
caaggcucaacaguuugca

SEQ ID NO: 2472295 - RNA, 19 nt, Artificial Sequence
  Description of Artificial Sequence: Synthetic oligonucleotide
ucuacguuugcggcucccu

SEQ ID NO: 2472296 - RNA, 19 nt, Artificial Sequence
  Description of Artificial Sequence: Synthetic oligonucleotide
uucauauaccgggcacuga

SEQ ID NO: 2472297 - RNA, 19 nt, Artificial Sequence
  Description of Artificial Sequence: Synthetic oligonucleotide
cagcugcuuaacuuccgug

SEQ ID NO: 2472298 - RNA, 19 nt, Artificial Sequence
  Description of Artificial Sequence: Synthetic oligonucleotide
ugcggcucccuugucaggu

SEQ ID NO: 2472299 - RNA, 19 nt, Artificial Sequence
  Description of Artificial Sequence: Synthetic oligonucleotide
acugaaacacaaagccagu

SEQ ID NO: 2472300 - RNA, 19 nt, Artificial Sequence
  Description of Artificial Sequence: Synthetic oligonucleotide
uggagagggccaugcagau

SEQ ID NO: 2472301 - RNA, 19 nt, Artificial Sequence
  Description of Artificial Sequence: Synthetic oligonucleotide
cuugcucauuuaagacaac

SEQ ID NO: 2472302 - RNA, 19 nt, Artificial Sequence
  Description of Artificial Sequence: Synthetic oligonucleotide
uaccgggcacugaaacaca

SEQ ID NO: 2472303 - RNA, 19 nt, Artificial Sequence
  Description of Artificial Sequence: Synthetic oligonucleotide
aaguacaugcaaggcucaa

SEQ ID NO: 2472304 - RNA, 19 nt, Artificial Sequence
  Description of Artificial Sequence: Synthetic oligonucleotide
gacacugaggaaauaggau

SEQ ID NO: 2472305 - RNA, 19 nt, Artificial Sequence
  Description of Artificial Sequence: Synthetic oligonucleotide
uuacuagguuuggcaaaca

SEQ ID NO: 2472306 - RNA, 19 nt, Artificial Sequence
  Description of Artificial Sequence: Synthetic oligonucleotide
caggaauuaaccagcugcu

SEQ ID NO: 2472307 - RNA, 19 nt, Artificial Sequence
  Description of Artificial Sequence: Synthetic oligonucleotide
auuaaagccuaugccugua

SEQ ID NO: 2472308 - RNA, 19 nt, Artificial Sequence
  Description of Artificial Sequence: Synthetic oligonucleotide
acaguuugcaagagacaga

SEQ ID NO: 2472309 - RNA, 19 nt, Artificial Sequence
  Description of Artificial Sequence: Synthetic oligonucleotide
caaguacaugcaaggcuca

SEQ ID NO: 2472310 - RNA, 19 nt, Artificial Sequence
  Description of Artificial Sequence: Synthetic oligonucleotide
cacgguuacuagguuuggc

SEQ ID NO: 2472311 - RNA, 19 nt, Artificial Sequence
  Description of Artificial Sequence: Synthetic oligonucleotide
cucacaguuacaggaauua

SEQ ID NO: 2472312 - RNA, 19 nt, Artificial Sequence
  Description of Artificial Sequence: Synthetic oligonucleotide
uucacccgucuugacauau

SEQ ID NO: 2472313 - RNA, 19 nt, Artificial Sequence
  Description of Artificial Sequence: Synthetic oligonucleotide
gaacacgguuacuagguuu

SEQ ID NO: 2472314 - RNA, 19 nt, Artificial Sequence
  Description of Artificial Sequence: Synthetic oligonucleotide
ccuuucauauaccgggcac

SEQ ID NO: 2472315 - RNA, 19 nt, Artificial Sequence
  Description of Artificial Sequence: Synthetic oligonucleotide
cuaguaacauccugccugu

SEQ ID NO: 2472316 - RNA, 19 nt, Artificial Sequence
  Description of Artificial Sequence: Synthetic oligonucleotide
gguuacuagguuuggcaaa

SEQ ID NO: 2472317 - RNA, 19 nt, Artificial Sequence
  Description of Artificial Sequence: Synthetic oligonucleotide
acacgguuacuagguuugg

SEQ ID NO: 2472318 - RNA, 19 nt, Artificial Sequence
  Description of Artificial Sequence: Synthetic oligonucleotide
guguagagcagaugagaua

SEQ ID NO: 2472319 - RNA, 19 nt, Artificial Sequence
  Description of Artificial Sequence: Synthetic oligonucleotide
uccauccuucaaguacaug

SEQ ID NO: 2472320 - RNA, 19 nt, Artificial Sequence
  Description of Artificial Sequence: Synthetic oligonucleotide
cauauaccgggcacugaaa

SEQ ID NO: 2472321 - RNA, 19 nt, Artificial Sequence
  Description of Artificial Sequence: Synthetic oligonucleotide
gcaaauucagacaccagcu

SEQ ID NO: 2472322 - RNA, 19 nt, Artificial Sequence
  Description of Artificial Sequence: Synthetic oligonucleotide
ucacccgucuugacauauc

SEQ ID NO: 2472323 - RNA, 19 nt, Artificial Sequence
  Description of Artificial Sequence: Synthetic oligonucleotide
ucaggucuucacccgucuu

SEQ ID NO: 2472324 - RNA, 19 nt, Artificial Sequence
  Description of Artificial Sequence: Synthetic oligonucleotide
aguuugcaagagacagaag

SEQ ID NO: 2472325 - RNA, 19 nt, Artificial Sequence
  Description of Artificial Sequence: Synthetic oligonucleotide
aucuggguaagaacuuuau

SEQ ID NO: 2472326 - RNA, 19 nt, Artificial Sequence
  Description of Artificial Sequence: Synthetic oligonucleotide
cauauccauccuucaagua

SEQ ID NO: 2472327 - RNA, 19 nt, Artificial Sequence
  Description of Artificial Sequence: Synthetic oligonucleotide
gcaaauaaaaggaauuauu

SEQ ID NO: 2472328 - RNA, 19 nt, Artificial Sequence
  Description of Artificial Sequence: Synthetic oligonucleotide
caucuggguaagaacuuua

SEQ ID NO: 2472329 - RNA, 19 nt, Artificial Sequence
  Description of Artificial Sequence: Synthetic oligonucleotide
gcccuuuaagacacugagg

SEQ ID NO: 2472330 - RNA, 19 nt, Artificial Sequence
  Description of Artificial Sequence: Synthetic oligonucleotide
ccgaggcccuuuaagacac

SEQ ID NO: 2472331 - RNA, 19 nt, Artificial Sequence
  Description of Artificial Sequence: Synthetic oligonucleotide
agccuaugccuguauugua

SEQ ID NO: 2472332 - RNA, 19 nt, Artificial Sequence
  Description of Artificial Sequence: Synthetic oligonucleotide
ugccugugguacucggcuc

SEQ ID NO: 2472333 - RNA, 19 nt, Artificial Sequence
  Description of Artificial Sequence: Synthetic oligonucleotide
cuuucauauaccgggcacu

SEQ ID NO: 2472334 - RNA, 19 nt, Artificial Sequence
  Description of Artificial Sequence: Synthetic oligonucleotide
auuguggggcgaacccauc

SEQ ID NO: 2472335 - RNA, 19 nt, Artificial Sequence
  Description of Artificial Sequence: Synthetic oligonucleotide
cuuccguguagagcagaug

SEQ ID NO: 2472336 - RNA, 19 nt, Artificial Sequence
  Description of Artificial Sequence: Synthetic oligonucleotide
aggaauuaaccagcugcuu

SEQ ID NO: 2472337 - RNA, 19 nt, Artificial Sequence
  Description of Artificial Sequence: Synthetic oligonucleotide
gccaugcagauguaucuca

SEQ ID NO: 2472338 - RNA, 19 nt, Artificial Sequence
  Description of Artificial Sequence: Synthetic oligonucleotide
gcaaggcucaacaguuugc

SEQ ID NO: 2472339 - RNA, 19 nt, Artificial Sequence
  Description of Artificial Sequence: Synthetic oligonucleotide
uaguaacauccugccugug

SEQ ID NO: 2472340 - RNA, 19 nt, Artificial Sequence
  Description of Artificial Sequence: Synthetic oligonucleotide
agaagccgaggcccuuuaa

SEQ ID NO: 2472341 - RNA, 19 nt, Artificial Sequence
  Description of Artificial Sequence: Synthetic oligonucleotide
acuuccguguagagcagau

SEQ ID NO: 2472342 - RNA, 19 nt, Artificial Sequence
  Description of Artificial Sequence: Synthetic oligonucleotide
gauuguggggcgaacccau

SEQ ID NO: 2472343 - RNA, 19 nt, Artificial Sequence
  Description of Artificial Sequence: Synthetic oligonucleotide
gccgaggcccuuuaagaca

SEQ ID NO: 2472344 - RNA, 19 nt, Artificial Sequence
  Description of Artificial Sequence: Synthetic oligonucleotide
ggcgaacccaucuggguaa

SEQ ID NO: 2472345 - RNA, 19 nt, Artificial Sequence
  Description of Artificial Sequence: Synthetic oligonucleotide
ggaucuucuuuaaaccugu

SEQ ID NO: 2472346 - RNA, 19 nt, Artificial Sequence
  Description of Artificial Sequence: Synthetic oligonucleotide
gguuuggcaaacaauucau

SEQ ID NO: 2472347 - RNA, 19 nt, Artificial Sequence
  Description of Artificial Sequence: Synthetic oligonucleotide
caaauucagacaccagcuu

SEQ ID NO: 2472348 - RNA, 19 nt, Artificial Sequence
  Description of Artificial Sequence: Synthetic oligonucleotide
gccuuucauauaccgggca

SEQ ID NO: 2472349 - RNA, 19 nt, Artificial Sequence
  Description of Artificial Sequence: Synthetic oligonucleotide
cugccugugguacucggcu

SEQ ID NO: 2472350 - RNA, 19 nt, Artificial Sequence
  Description of Artificial Sequence: Synthetic oligonucleotide
aggcccuuuaagacacuga

SEQ ID NO: 2472351 - RNA, 19 nt, Artificial Sequence
  Description of Artificial Sequence: Synthetic oligonucleotide
gcugcuuaacuuccgugua

SEQ ID NO: 2472352 - RNA, 19 nt, Artificial Sequence
  Description of Artificial Sequence: Synthetic oligonucleotide
ccgucuugacauauccauc

SEQ ID NO: 2472353 - RNA, 19 nt, Artificial Sequence
  Description of Artificial Sequence: Synthetic oligonucleotide
guagagcagaugagauaga

SEQ ID NO: 2472354 - RNA, 19 nt, Artificial Sequence
  Description of Artificial Sequence: Synthetic oligonucleotide
cucaauguuauggcauagu

SEQ ID NO: 2472355 - RNA, 19 nt, Artificial Sequence
  Description of Artificial Sequence: Synthetic oligonucleotide
ggauuguggggcgaaccca

SEQ ID NO: 2472356 - RNA, 19 nt, Artificial Sequence
  Description of Artificial Sequence: Synthetic oligonucleotide
acccgucuugacauaucca

SEQ ID NO: 2472357 - RNA, 19 nt, Artificial Sequence
  Description of Artificial Sequence: Synthetic oligonucleotide
gggccaugcagauguaucu

SEQ ID NO: 2472358 - RNA, 19 nt, Artificial Sequence
  Description of Artificial Sequence: Synthetic oligonucleotide
gucuacguuugcggcuccc

SEQ ID NO: 2472359 - RNA, 19 nt, Artificial Sequence
  Description of Artificial Sequence: Synthetic oligonucleotide
cucucacaguuacaggaau

SEQ ID NO: 2472360 - RNA, 19 nt, Artificial Sequence
  Description of Artificial Sequence: Synthetic oligonucleotide
acagaagccgaggcccuuu

SEQ ID NO: 2472361 - RNA, 19 nt, Artificial Sequence
  Description of Artificial Sequence: Synthetic oligonucleotide
gccuaugccuguauuguaa

SEQ ID NO: 2472362 - RNA, 19 nt, Artificial Sequence
  Description of Artificial Sequence: Synthetic oligonucleotide
gggcgaacccaucugggua

SEQ ID NO: 2472363 - RNA, 19 nt, Artificial Sequence
  Description of Artificial Sequence: Synthetic oligonucleotide
accgggcacugaaacacaa

SEQ ID NO: 2472364 - RNA, 19 nt, Artificial Sequence
  Description of Artificial Sequence: Synthetic oligonucleotide
ccuaugccuguauuguaaa

SEQ ID NO: 2472365 - RNA, 19 nt, Artificial Sequence
  Description of Artificial Sequence: Synthetic oligonucleotide
ggccaugcagauguaucuc

SEQ ID NO: 2472366 - RNA, 19 nt, Artificial Sequence
  Description of Artificial Sequence: Synthetic oligonucleotide
ggucuucacccgucuugac

SEQ ID NO: 2472367 - RNA, 19 nt, Artificial Sequence
  Description of Artificial Sequence: Synthetic oligonucleotide
augcaaggcucaacaguuu

SEQ ID NO: 2472368 - RNA, 19 nt, Artificial Sequence
  Description of Artificial Sequence: Synthetic oligonucleotide
cacuggagagggccaugca

SEQ ID NO: 2472369 - RNA, 19 nt, Artificial Sequence
  Description of Artificial Sequence: Synthetic oligonucleotide
cccgucuugacauauccau

SEQ ID NO: 2472370 - RNA, 19 nt, Artificial Sequence
  Description of Artificial Sequence: Synthetic oligonucleotide
ccguguagagcagaugaga

SEQ ID NO: 2472371 - RNA, 19 nt, Artificial Sequence
  Description of Artificial Sequence: Synthetic oligonucleotide
ggagagggccaugcagaug

SEQ ID NO: 2472372 - RNA, 19 nt, Artificial Sequence
  Description of Artificial Sequence: Synthetic oligonucleotide
ccaugcagauguaucucaa

SEQ ID NO: 2472373 - RNA, 19 nt, Artificial Sequence
  Description of Artificial Sequence: Synthetic oligonucleotide
cucccuugucaggucuuca

SEQ ID NO: 2472374 - RNA, 19 nt, Artificial Sequence
  Description of Artificial Sequence: Synthetic oligonucleotide
cgguuacuagguuuggcaa

SEQ ID NO: 2472375 - RNA, 19 nt, Artificial Sequence
  Description of Artificial Sequence: Synthetic oligonucleotide
cuucacccgucuugacaua

SEQ ID NO: 2472376 - RNA, 19 nt, Artificial Sequence
  Description of Artificial Sequence: Synthetic oligonucleotide
gccaguugauuugcaaaua

SEQ ID NO: 2472377 - RNA, 19 nt, Artificial Sequence
  Description of Artificial Sequence: Synthetic oligonucleotide
gagggccaugcagauguau

SEQ ID NO: 2472378 - RNA, 19 nt, Artificial Sequence
  Description of Artificial Sequence: Synthetic oligonucleotide
cguguagagcagaugagau

SEQ ID NO: 2472379 - RNA, 19 nt, Artificial Sequence
  Description of Artificial Sequence: Synthetic oligonucleotide
ggggcgaacccaucugggu

SEQ ID NO: 2472380 - RNA, 19 nt, Artificial Sequence
  Description of Artificial Sequence: Synthetic oligonucleotide
gcgaacccaucuggguaag

SEQ ID NO: 2472381 - RNA, 19 nt, Artificial Sequence
  Description of Artificial Sequence: Synthetic oligonucleotide
cuacguuugcggcucccuu

SEQ ID NO: 2472382 - RNA, 19 nt, Artificial Sequence
  Description of Artificial Sequence: Synthetic oligonucleotide
gacagaagccgaggcccuu

SEQ ID NO: 2472383 - RNA, 19 nt, Artificial Sequence
  Description of Artificial Sequence: Synthetic oligonucleotide
  modified_base (6)..(6): a, c, u, g, unknown or other
gggguncuaguaacauccu

SEQ ID NO: 2472384 - RNA, 19 nt, Artificial Sequence
  Description of Artificial Sequence: Synthetic oligonucleotide
agagggccaugcagaugua

SEQ ID NO: 2472385 - RNA, 19 nt, Artificial Sequence
  Description of Artificial Sequence: Synthetic oligonucleotide
gcggcucccuugucagguc

SEQ ID NO: 2472386 - RNA, 19 nt, Artificial Sequence
  Description of Artificial Sequence: Synthetic oligonucleotide
ccgggcacugaaacacaaa

SEQ ID NO: 2472387 - RNA, 19 nt, Artificial Sequence
  Description of Artificial Sequence: Synthetic oligonucleotide
cguuugcggcucccuuguc

SEQ ID NO: 2472388 - RNA, 19 nt, Artificial Sequence
  Description of Artificial Sequence: Synthetic oligonucleotide
cgaacccaucuggguaaga

SEQ ID NO: 2472389 - RNA, 19 nt, Artificial Sequence
  Description of Artificial Sequence: Synthetic oligonucleotide
ggauuccaauaaggaucuu

SEQ ID NO: 2472390 - RNA, 19 nt, Artificial Sequence
  Description of Artificial Sequence: Synthetic oligonucleotide
cgaggcccuuuaagacacu

SEQ ID NO: 2472391 - RNA, 19 nt, Artificial Sequence
  Description of Artificial Sequence: Synthetic oligonucleotide
  modified_base (1)..(1): a, c, u, g, unknown or other
ncuaguaacauccugccug

SEQ ID NO: 2472392 - RNA, 19 nt, Artificial Sequence
  Description of Artificial Sequence: Synthetic oligonucleotide
aauucuuucaacuucugag

SEQ ID NO: 2472393 - RNA, 19 nt, Artificial Sequence
  Description of Artificial Sequence: Synthetic oligonucleotide
aaagcuaacgcagaggccc

SEQ ID NO: 2472394 - RNA, 19 nt, Artificial Sequence
  Description of Artificial Sequence: Synthetic oligonucleotide
uugaucaucaggaacaugc

SEQ ID NO: 2472395 - RNA, 19 nt, Artificial Sequence
  Description of Artificial Sequence: Synthetic oligonucleotide
aggacaauaacuuccuucc

SEQ ID NO: 2472396 - RNA, 19 nt, Artificial Sequence
  Description of Artificial Sequence: Synthetic oligonucleotide
aauaacuuccuuccagucg

SEQ ID NO: 2472397 - RNA, 19 nt, Artificial Sequence
  Description of Artificial Sequence: Synthetic oligonucleotide
ugugagaccaaucacagcu

SEQ ID NO: 2472398 - RNA, 19 nt, Artificial Sequence
  Description of Artificial Sequence: Synthetic oligonucleotide
uggaacuucagaauggcgg

SEQ ID NO: 2472399 - RNA, 19 nt, Artificial Sequence
  Description of Artificial Sequence: Synthetic oligonucleotide
acacaguugcaucugaugc

SEQ ID NO: 2472400 - RNA, 19 nt, Artificial Sequence
  Description of Artificial Sequence: Synthetic oligonucleotide
auaacuuccuuccagucgg

SEQ ID NO: 2472401 - RNA, 19 nt, Artificial Sequence
  Description of Artificial Sequence: Synthetic oligonucleotide
aauguugccagauuucuga

SEQ ID NO: 2472402 - RNA, 19 nt, Artificial Sequence
  Description of Artificial Sequence: Synthetic oligonucleotide
aauaccuggguaauuuucc

SEQ ID NO: 2472403 - RNA, 19 nt, Artificial Sequence
  Description of Artificial Sequence: Synthetic oligonucleotide
agauucaucgaaaaguccc

SEQ ID NO: 2472404 - RNA, 19 nt, Artificial Sequence
  Description of Artificial Sequence: Synthetic oligonucleotide
uuuugcaaaagcuaacgca

SEQ ID NO: 2472405 - RNA, 19 nt, Artificial Sequence
  Description of Artificial Sequence: Synthetic oligonucleotide
auucuuucaacuucugagg

SEQ ID NO: 2472406 - RNA, 19 nt, Artificial Sequence
  Description of Artificial Sequence: Synthetic oligonucleotide
uuugugagaccaaucacag

SEQ ID NO: 2472407 - RNA, 19 nt, Artificial Sequence
  Description of Artificial Sequence: Synthetic oligonucleotide
uucugaggcaaacugauca

SEQ ID NO: 2472408 - RNA, 19 nt, Artificial Sequence
  Description of Artificial Sequence: Synthetic oligonucleotide
caaaagcuaacgcagaggc

SEQ ID NO: 2472409 - RNA, 19 nt, Artificial Sequence
  Description of Artificial Sequence: Synthetic oligonucleotide
ucgaguuugaauaccuggg

SEQ ID NO: 2472410 - RNA, 19 nt, Artificial Sequence
  Description of Artificial Sequence: Synthetic oligonucleotide
ugucaggacaauaacuucc

SEQ ID NO: 2472411 - RNA, 19 nt, Artificial Sequence
  Description of Artificial Sequence: Synthetic oligonucleotide
uaggaaagcuugcagagcc

SEQ ID NO: 2472412 - RNA, 19 nt, Artificial Sequence
  Description of Artificial Sequence: Synthetic oligonucleotide
ucuucuuugugacaucgag

SEQ ID NO: 2472413 - RNA, 19 nt, Artificial Sequence
  Description of Artificial Sequence: Synthetic oligonucleotide
gaaugcuuugaucaucagg

SEQ ID NO: 2472414 - RNA, 19 nt, Artificial Sequence
  Description of Artificial Sequence: Synthetic oligonucleotide
ucuuuugcaaaagcuaacg

SEQ ID NO: 2472415 - RNA, 19 nt, Artificial Sequence
  Description of Artificial Sequence: Synthetic oligonucleotide
uguuccugggcauacacag

SEQ ID NO: 2472416 - RNA, 19 nt, Artificial Sequence
  Description of Artificial Sequence: Synthetic oligonucleotide
uugagauucaucgaaaagu

SEQ ID NO: 2472417 - RNA, 19 nt, Artificial Sequence
  Description of Artificial Sequence: Synthetic oligonucleotide
auguugauaauguugccag

SEQ ID NO: 2472418 - RNA, 19 nt, Artificial Sequence
  Description of Artificial Sequence: Synthetic oligonucleotide
gacauguugauaauguugc

SEQ ID NO: 2472419 - RNA, 19 nt, Artificial Sequence
  Description of Artificial Sequence: Synthetic oligonucleotide
aaggaguuccugcagucac

SEQ ID NO: 2472420 - RNA, 19 nt, Artificial Sequence
  Description of Artificial Sequence: Synthetic oligonucleotide
uggguaauuuuccagcucc

SEQ ID NO: 2472421 - RNA, 19 nt, Artificial Sequence
  Description of Artificial Sequence: Synthetic oligonucleotide
uucuucgcaauccaggaug

SEQ ID NO: 2472422 - RNA, 19 nt, Artificial Sequence
  Description of Artificial Sequence: Synthetic oligonucleotide
ugagauucaucgaaaaguc

SEQ ID NO: 2472423 - RNA, 19 nt, Artificial Sequence
  Description of Artificial Sequence: Synthetic oligonucleotide
guaauuuuccagcuccugg

SEQ ID NO: 2472424 - RNA, 19 nt, Artificial Sequence
  Description of Artificial Sequence: Synthetic oligonucleotide
aacuucagaauggcggucc

SEQ ID NO: 2472425 - RNA, 19 nt, Artificial Sequence
  Description of Artificial Sequence: Synthetic oligonucleotide
ugagcaagcauuuuaggaa

SEQ ID NO: 2472426 - RNA, 19 nt, Artificial Sequence
  Description of Artificial Sequence: Synthetic oligonucleotide
agaauggcgguccacacag

SEQ ID NO: 2472427 - RNA, 19 nt, Artificial Sequence
  Description of Artificial Sequence: Synthetic oligonucleotide
gaagucugcagccacagac

SEQ ID NO: 2472428 - RNA, 19 nt, Artificial Sequence
  Description of Artificial Sequence: Synthetic oligonucleotide
uucugagcaagcauuuuag

SEQ ID NO: 2472429 - RNA, 19 nt, Artificial Sequence
  Description of Artificial Sequence: Synthetic oligonucleotide
gacucauugauguccgugg

SEQ ID NO: 2472430 - RNA, 19 nt, Artificial Sequence
  Description of Artificial Sequence: Synthetic oligonucleotide
uucuuucuugcagagacgg

SEQ ID NO: 2472431 - RNA, 19 nt, Artificial Sequence
  Description of Artificial Sequence: Synthetic oligonucleotide
aguuuggacucauugaugu

SEQ ID NO: 2472432 - RNA, 19 nt, Artificial Sequence
  Description of Artificial Sequence: Synthetic oligonucleotide
aauggcgguccacacaguc

SEQ ID NO: 2472433 - RNA, 19 nt, Artificial Sequence
  Description of Artificial Sequence: Synthetic oligonucleotide
accuggguaauuuuccagc

SEQ ID NO: 2472434 - RNA, 19 nt, Artificial Sequence
  Description of Artificial Sequence: Synthetic oligonucleotide
cuugaauucuuucuugcag

SEQ ID NO: 2472435 - RNA, 19 nt, Artificial Sequence
  Description of Artificial Sequence: Synthetic oligonucleotide
uuugggaucaucucuggcu

SEQ ID NO: 2472436 - RNA, 19 nt, Artificial Sequence
  Description of Artificial Sequence: Synthetic oligonucleotide
guggcuaugacuuuggcuc

SEQ ID NO: 2472437 - RNA, 19 nt, Artificial Sequence
  Description of Artificial Sequence: Synthetic oligonucleotide
uucuuucaacuucugaggc

SEQ ID NO: 2472438 - RNA, 19 nt, Artificial Sequence
  Description of Artificial Sequence: Synthetic oligonucleotide
uugcccgucacauaggcag

SEQ ID NO: 2472439 - RNA, 19 nt, Artificial Sequence
  Description of Artificial Sequence: Synthetic oligonucleotide
uuuggacucauugaugucc

SEQ ID NO: 2472440 - RNA, 19 nt, Artificial Sequence
  Description of Artificial Sequence: Synthetic oligonucleotide
auugagauucaucgaaaag

SEQ ID NO: 2472441 - RNA, 19 nt, Artificial Sequence
  Description of Artificial Sequence: Synthetic oligonucleotide
aauuuuccagcuccuggag

SEQ ID NO: 2472442 - RNA, 19 nt, Artificial Sequence
  Description of Artificial Sequence: Synthetic oligonucleotide
uugaauucuuucuugcaga

SEQ ID NO: 2472443 - RNA, 19 nt, Artificial Sequence
  Description of Artificial Sequence: Synthetic oligonucleotide
acuuugugagaccaaucac

SEQ ID NO: 2472444 - RNA, 19 nt, Artificial Sequence
  Description of Artificial Sequence: Synthetic oligonucleotide
ugaucaauuugcuucuucu

SEQ ID NO: 2472445 - RNA, 19 nt, Artificial Sequence
  Description of Artificial Sequence: Synthetic oligonucleotide
cucgaguuugaauaccugg

SEQ ID NO: 2472446 - RNA, 19 nt, Artificial Sequence
  Description of Artificial Sequence: Synthetic oligonucleotide
ugauaauguugccagauuu

SEQ ID NO: 2472447 - RNA, 19 nt, Artificial Sequence
  Description of Artificial Sequence: Synthetic oligonucleotide
aacugaucaauuugcuucu

SEQ ID NO: 2472448 - RNA, 19 nt, Artificial Sequence
  Description of Artificial Sequence: Synthetic oligonucleotide
uaauuuuccagcuccugga

SEQ ID NO: 2472449 - RNA, 19 nt, Artificial Sequence
  Description of Artificial Sequence: Synthetic oligonucleotide
uuuucuucgcaauccagga

SEQ ID NO: 2472450 - RNA, 19 nt, Artificial Sequence
  Description of Artificial Sequence: Synthetic oligonucleotide
ugcaaaagcuaacgcagag

SEQ ID NO: 2472451 - RNA, 19 nt, Artificial Sequence
  Description of Artificial Sequence: Synthetic oligonucleotide
aggccaaguacacacagag

SEQ ID NO: 2472452 - RNA, 19 nt, Artificial Sequence
  Description of Artificial Sequence: Synthetic oligonucleotide
gagcaagcauuuuaggaag

SEQ ID NO: 2472453 - RNA, 19 nt, Artificial Sequence
  Description of Artificial Sequence: Synthetic oligonucleotide
agaacaucaauucuuucaa

SEQ ID NO: 2472454 - RNA, 19 nt, Artificial Sequence
  Description of Artificial Sequence: Synthetic oligonucleotide
uuuaggaaggaaugcuuug

SEQ ID NO: 2472455 - RNA, 19 nt, Artificial Sequence
  Description of Artificial Sequence: Synthetic oligonucleotide
cuuucuugcagagacgggg

SEQ ID NO: 2472456 - RNA, 19 nt, Artificial Sequence
  Description of Artificial Sequence: Synthetic oligonucleotide
ucgcaauccaggauggucc

SEQ ID NO: 2472457 - RNA, 19 nt, Artificial Sequence
  Description of Artificial Sequence: Synthetic oligonucleotide
auuugcuucuucuuuguga

SEQ ID NO: 2472458 - RNA, 19 nt, Artificial Sequence
  Description of Artificial Sequence: Synthetic oligonucleotide
ucuguuuaggaaagcuugc

SEQ ID NO: 2472459 - RNA, 19 nt, Artificial Sequence
  Description of Artificial Sequence: Synthetic oligonucleotide
ucuucgcaauccaggaugg

SEQ ID NO: 2472460 - RNA, 19 nt, Artificial Sequence
  Description of Artificial Sequence: Synthetic oligonucleotide
acaguugcaucugaugccc

SEQ ID NO: 2472461 - RNA, 19 nt, Artificial Sequence
  Description of Artificial Sequence: Synthetic oligonucleotide
ggaaggaaugcuuugauca

SEQ ID NO: 2472462 - RNA, 19 nt, Artificial Sequence
  Description of Artificial Sequence: Synthetic oligonucleotide
cuucuuugugacaucgagg

SEQ ID NO: 2472463 - RNA, 19 nt, Artificial Sequence
  Description of Artificial Sequence: Synthetic oligonucleotide
ucugagcaagcauuuuagg

SEQ ID NO: 2472464 - RNA, 19 nt, Artificial Sequence
  Description of Artificial Sequence: Synthetic oligonucleotide
aaaagcuaacgcagaggcc

SEQ ID NO: 2472465 - RNA, 19 nt, Artificial Sequence
  Description of Artificial Sequence: Synthetic oligonucleotide
aguuugaauaccuggguaa

SEQ ID NO: 2472466 - RNA, 19 nt, Artificial Sequence
  Description of Artificial Sequence: Synthetic oligonucleotide
uugguugcacuguacacgc

SEQ ID NO: 2472467 - RNA, 19 nt, Artificial Sequence
  Description of Artificial Sequence: Synthetic oligonucleotide
acaauaacuuccuuccagu

SEQ ID NO: 2472468 - RNA, 19 nt, Artificial Sequence
  Description of Artificial Sequence: Synthetic oligonucleotide
gacauugagauucaucgaa

SEQ ID NO: 2472469 - RNA, 19 nt, Artificial Sequence
  Description of Artificial Sequence: Synthetic oligonucleotide
cuugguugcacuguacacg

SEQ ID NO: 2472470 - RNA, 19 nt, Artificial Sequence
  Description of Artificial Sequence: Synthetic oligonucleotide
acucauugauguccguggc

SEQ ID NO: 2472471 - RNA, 19 nt, Artificial Sequence
  Description of Artificial Sequence: Synthetic oligonucleotide
cuuugugagaccaaucaca

SEQ ID NO: 2472472 - RNA, 19 nt, Artificial Sequence
  Description of Artificial Sequence: Synthetic oligonucleotide
uucugucuguuuaggaaag

SEQ ID NO: 2472473 - RNA, 19 nt, Artificial Sequence
  Description of Artificial Sequence: Synthetic oligonucleotide
aggguugcccgucacauag

SEQ ID NO: 2472474 - RNA, 19 nt, Artificial Sequence
  Description of Artificial Sequence: Synthetic oligonucleotide
guuuaggaaagcuugcaga

SEQ ID NO: 2472475 - RNA, 19 nt, Artificial Sequence
  Description of Artificial Sequence: Synthetic oligonucleotide
cuuuugcaaaagcuaacgc

SEQ ID NO: 2472476 - RNA, 19 nt, Artificial Sequence
  Description of Artificial Sequence: Synthetic oligonucleotide
ugcuuugaucaucaggaac

SEQ ID NO: 2472477 - RNA, 19 nt, Artificial Sequence
  Description of Artificial Sequence: Synthetic oligonucleotide
uaucaacuguuccugggca

SEQ ID NO: 2472478 - RNA, 19 nt, Artificial Sequence
  Description of Artificial Sequence: Synthetic oligonucleotide
ugagaccaaucacagcugc

SEQ ID NO: 2472479 - RNA, 19 nt, Artificial Sequence
  Description of Artificial Sequence: Synthetic oligonucleotide
ucugcagccacagacuuug

SEQ ID NO: 2472480 - RNA, 19 nt, Artificial Sequence
  Description of Artificial Sequence: Synthetic oligonucleotide
gaggacucgaguuugaaua

SEQ ID NO: 2472481 - RNA, 19 nt, Artificial Sequence
  Description of Artificial Sequence: Synthetic oligonucleotide
guacacacagagcagggcc

SEQ ID NO: 2472482 - RNA, 19 nt, Artificial Sequence
  Description of Artificial Sequence: Synthetic oligonucleotide
guugccagauuucugagca

SEQ ID NO: 2472483 - RNA, 19 nt, Artificial Sequence
  Description of Artificial Sequence: Synthetic oligonucleotide
aauuugcuucuucuuugug

SEQ ID NO: 2472484 - RNA, 19 nt, Artificial Sequence
  Description of Artificial Sequence: Synthetic oligonucleotide
ucugcagaugcaaaccuuc

SEQ ID NO: 2472485 - RNA, 19 nt, Artificial Sequence
  Description of Artificial Sequence: Synthetic oligonucleotide
aggacucgaguuugaauac

SEQ ID NO: 2472486 - RNA, 19 nt, Artificial Sequence
  Description of Artificial Sequence: Synthetic oligonucleotide
uccgaggccaaguacacac

SEQ ID NO: 2472487 - RNA, 19 nt, Artificial Sequence
  Description of Artificial Sequence: Synthetic oligonucleotide
uuugugacaucgaggacuc

SEQ ID NO: 2472488 - RNA, 19 nt, Artificial Sequence
  Description of Artificial Sequence: Synthetic oligonucleotide
acauaggcagauucauccg

SEQ ID NO: 2472489 - RNA, 19 nt, Artificial Sequence
  Description of Artificial Sequence: Synthetic oligonucleotide
caucaauucuuucaacuuc

SEQ ID NO: 2472490 - RNA, 19 nt, Artificial Sequence
  Description of Artificial Sequence: Synthetic oligonucleotide
cggacauugagauucaucg

SEQ ID NO: 2472491 - RNA, 19 nt, Artificial Sequence
  Description of Artificial Sequence: Synthetic oligonucleotide
uggaguuuggacucauuga

SEQ ID NO: 2472492 - RNA, 19 nt, Artificial Sequence
  Description of Artificial Sequence: Synthetic oligonucleotide
gaucaucaggaacaugcug

SEQ ID NO: 2472493 - RNA, 19 nt, Artificial Sequence
  Description of Artificial Sequence: Synthetic oligonucleotide
uccagucggcccauggugg

SEQ ID NO: 2472494 - RNA, 19 nt, Artificial Sequence
  Description of Artificial Sequence: Synthetic oligonucleotide
gucuguuuaggaaagcuug

SEQ ID NO: 2472495 - RNA, 19 nt, Artificial Sequence
  Description of Artificial Sequence: Synthetic oligonucleotide
aagcauuuuaggaaggaau

SEQ ID NO: 2472496 - RNA, 19 nt, Artificial Sequence
  Description of Artificial Sequence: Synthetic oligonucleotide
agucacaggcuccagccuc

SEQ ID NO: 2472497 - RNA, 19 nt, Artificial Sequence
  Description of Artificial Sequence: Synthetic oligonucleotide
aggcaaacugaucaauuug

SEQ ID NO: 2472498 - RNA, 19 nt, Artificial Sequence
  Description of Artificial Sequence: Synthetic oligonucleotide
agcauuuuaggaaggaaug

SEQ ID NO: 2472499 - RNA, 19 nt, Artificial Sequence
  Description of Artificial Sequence: Synthetic oligonucleotide
aucaucucuggcuugaauu

SEQ ID NO: 2472500 - RNA, 19 nt, Artificial Sequence
  Description of Artificial Sequence: Synthetic oligonucleotide
uucuuuugcaaaagcuaac

SEQ ID NO: 2472501 - RNA, 19 nt, Artificial Sequence
  Description of Artificial Sequence: Synthetic oligonucleotide
ugcagaugcaaaccuuccc

SEQ ID NO: 2472502 - RNA, 19 nt, Artificial Sequence
  Description of Artificial Sequence: Synthetic oligonucleotide
uaauguugccagauuucug

SEQ ID NO: 2472503 - RNA, 19 nt, Artificial Sequence
  Description of Artificial Sequence: Synthetic oligonucleotide
uccacuccuuugaugcucg

SEQ ID NO: 2472504 - RNA, 19 nt, Artificial Sequence
  Description of Artificial Sequence: Synthetic oligonucleotide
acgggguaucaacuguucc

SEQ ID NO: 2472505 - RNA, 19 nt, Artificial Sequence
  Description of Artificial Sequence: Synthetic oligonucleotide
auaauguugccagauuucu

SEQ ID NO: 2472506 - RNA, 19 nt, Artificial Sequence
  Description of Artificial Sequence: Synthetic oligonucleotide
ucuuucaacuucugaggca

SEQ ID NO: 2472507 - RNA, 19 nt, Artificial Sequence
  Description of Artificial Sequence: Synthetic oligonucleotide
agcuccuggaguuuggacu

SEQ ID NO: 2472508 - RNA, 19 nt, Artificial Sequence
  Description of Artificial Sequence: Synthetic oligonucleotide
gaacaugcugcggacauug

SEQ ID NO: 2472509 - RNA, 19 nt, Artificial Sequence
  Description of Artificial Sequence: Synthetic oligonucleotide
cuggaguuuggacucauug

SEQ ID NO: 2472510 - RNA, 19 nt, Artificial Sequence
  Description of Artificial Sequence: Synthetic oligonucleotide
uuaggaaggaaugcuuuga

SEQ ID NO: 2472511 - RNA, 19 nt, Artificial Sequence
  Description of Artificial Sequence: Synthetic oligonucleotide
guaucaacuguuccugggc

SEQ ID NO: 2472512 - RNA, 19 nt, Artificial Sequence
  Description of Artificial Sequence: Synthetic oligonucleotide
ucuuucuugcagagacggg

SEQ ID NO: 2472513 - RNA, 19 nt, Artificial Sequence
  Description of Artificial Sequence: Synthetic oligonucleotide
gauaauguugccagauuuc

SEQ ID NO: 2472514 - RNA, 19 nt, Artificial Sequence
  Description of Artificial Sequence: Synthetic oligonucleotide
agaugcaaaccuucccguc

SEQ ID NO: 2472515 - RNA, 19 nt, Artificial Sequence
  Description of Artificial Sequence: Synthetic oligonucleotide
cuucuuuugcaaaagcuaa

SEQ ID NO: 2472516 - RNA, 19 nt, Artificial Sequence
  Description of Artificial Sequence: Synthetic oligonucleotide
aucgaaaagucccagucuu

SEQ ID NO: 2472517 - RNA, 19 nt, Artificial Sequence
  Description of Artificial Sequence: Synthetic oligonucleotide
ugugacaucgaggacucga

SEQ ID NO: 2472518 - RNA, 19 nt, Artificial Sequence
  Description of Artificial Sequence: Synthetic oligonucleotide
ugaucaucaggaacaugcu

SEQ ID NO: 2472519 - RNA, 19 nt, Artificial Sequence
  Description of Artificial Sequence: Synthetic oligonucleotide
aaguacacacagagcaggg

SEQ ID NO: 2472520 - RNA, 19 nt, Artificial Sequence
  Description of Artificial Sequence: Synthetic oligonucleotide
aagacauguugauaauguu

SEQ ID NO: 2472521 - RNA, 19 nt, Artificial Sequence
  Description of Artificial Sequence: Synthetic oligonucleotide
uaacgcagaggcccugccg

SEQ ID NO: 2472522 - RNA, 19 nt, Artificial Sequence
  Description of Artificial Sequence: Synthetic oligonucleotide
cugagcaagcauuuuagga

SEQ ID NO: 2472523 - RNA, 19 nt, Artificial Sequence
  Description of Artificial Sequence: Synthetic oligonucleotide
gguaucaacuguuccuggg

SEQ ID NO: 2472524 - RNA, 19 nt, Artificial Sequence
  Description of Artificial Sequence: Synthetic oligonucleotide
ugccagauuucugagcaag

SEQ ID NO: 2472525 - RNA, 19 nt, Artificial Sequence
  Description of Artificial Sequence: Synthetic oligonucleotide
ucccgugguggacaaaacc

SEQ ID NO: 2472526 - RNA, 19 nt, Artificial Sequence
  Description of Artificial Sequence: Synthetic oligonucleotide
aacuuccuuccagucggcc

SEQ ID NO: 2472527 - RNA, 19 nt, Artificial Sequence
  Description of Artificial Sequence: Synthetic oligonucleotide
acaugcugcggacauugag

SEQ ID NO: 2472528 - RNA, 19 nt, Artificial Sequence
  Description of Artificial Sequence: Synthetic oligonucleotide
uucagaauggcgguccaca

SEQ ID NO: 2472529 - RNA, 19 nt, Artificial Sequence
  Description of Artificial Sequence: Synthetic oligonucleotide
aucaauucuuucaacuucu

SEQ ID NO: 2472530 - RNA, 19 nt, Artificial Sequence
  Description of Artificial Sequence: Synthetic oligonucleotide
ugcaaggaguuccugcagu

SEQ ID NO: 2472531 - RNA, 19 nt, Artificial Sequence
  Description of Artificial Sequence: Synthetic oligonucleotide
ugucuguuuaggaaagcuu

SEQ ID NO: 2472532 - RNA, 19 nt, Artificial Sequence
  Description of Artificial Sequence: Synthetic oligonucleotide
uaccuggguaauuuuccag

SEQ ID NO: 2472533 - RNA, 19 nt, Artificial Sequence
  Description of Artificial Sequence: Synthetic oligonucleotide
agagacgggguaucaacug

SEQ ID NO: 2472534 - RNA, 19 nt, Artificial Sequence
  Description of Artificial Sequence: Synthetic oligonucleotide
uugaauaccuggguaauuu

SEQ ID NO: 2472535 - RNA, 19 nt, Artificial Sequence
  Description of Artificial Sequence: Synthetic oligonucleotide
ugaggcaaacugaucaauu

SEQ ID NO: 2472536 - RNA, 19 nt, Artificial Sequence
  Description of Artificial Sequence: Synthetic oligonucleotide
uaggcagauucauccgagg

SEQ ID NO: 2472537 - RNA, 19 nt, Artificial Sequence
  Description of Artificial Sequence: Synthetic oligonucleotide
uccuuugaugcucgaggcc

SEQ ID NO: 2472538 - RNA, 19 nt, Artificial Sequence
  Description of Artificial Sequence: Synthetic oligonucleotide
uuaggaaagcuugcagagc

SEQ ID NO: 2472539 - RNA, 19 nt, Artificial Sequence
  Description of Artificial Sequence: Synthetic oligonucleotide
uggcgguccacacaguccu

SEQ ID NO: 2472540 - RNA, 19 nt, Artificial Sequence
  Description of Artificial Sequence: Synthetic oligonucleotide
uugcacuguacacgcaucu

SEQ ID NO: 2472541 - RNA, 19 nt, Artificial Sequence
  Description of Artificial Sequence: Synthetic oligonucleotide
uucauccgaggccaaguac

SEQ ID NO: 2472542 - RNA, 19 nt, Artificial Sequence
  Description of Artificial Sequence: Synthetic oligonucleotide
uccguggcuaugacuuugg

SEQ ID NO: 2472543 - RNA, 19 nt, Artificial Sequence
  Description of Artificial Sequence: Synthetic oligonucleotide
gagauucaucgaaaagucc

SEQ ID NO: 2472544 - RNA, 19 nt, Artificial Sequence
  Description of Artificial Sequence: Synthetic oligonucleotide
uuccugggcauacacaguu

SEQ ID NO: 2472545 - RNA, 19 nt, Artificial Sequence
  Description of Artificial Sequence: Synthetic oligonucleotide
aagagaacaucaauucuuu

SEQ ID NO: 2472546 - RNA, 19 nt, Artificial Sequence
  Description of Artificial Sequence: Synthetic oligonucleotide
uucaucgaaaagucccagu

SEQ ID NO: 2472547 - RNA, 19 nt, Artificial Sequence
  Description of Artificial Sequence: Synthetic oligonucleotide
caauaacuuccuuccaguc

SEQ ID NO: 2472548 - RNA, 19 nt, Artificial Sequence
  Description of Artificial Sequence: Synthetic oligonucleotide
ggcaaacugaucaauuugc

SEQ ID NO: 2472549 - RNA, 19 nt, Artificial Sequence
  Description of Artificial Sequence: Synthetic oligonucleotide
ugccuucucugcaaggagu

SEQ ID NO: 2472550 - RNA, 19 nt, Artificial Sequence
  Description of Artificial Sequence: Synthetic oligonucleotide
uguacacgcaucuguuuuc

SEQ ID NO: 2472551 - RNA, 19 nt, Artificial Sequence
  Description of Artificial Sequence: Synthetic oligonucleotide
guuuuccacuccuuugaug

SEQ ID NO: 2472552 - RNA, 19 nt, Artificial Sequence
  Description of Artificial Sequence: Synthetic oligonucleotide
ucacauaggcagauucauc

SEQ ID NO: 2472553 - RNA, 19 nt, Artificial Sequence
  Description of Artificial Sequence: Synthetic oligonucleotide
uugauaauguugccagauu

SEQ ID NO: 2472554 - RNA, 19 nt, Artificial Sequence
  Description of Artificial Sequence: Synthetic oligonucleotide
gauucaucgaaaaguccca

SEQ ID NO: 2472555 - RNA, 19 nt, Artificial Sequence
  Description of Artificial Sequence: Synthetic oligonucleotide
accaaucacagcugccuug

SEQ ID NO: 2472556 - RNA, 19 nt, Artificial Sequence
  Description of Artificial Sequence: Synthetic oligonucleotide
auaccuggguaauuuucca

SEQ ID NO: 2472557 - RNA, 19 nt, Artificial Sequence
  Description of Artificial Sequence: Synthetic oligonucleotide
agaccaaucacagcugccu

SEQ ID NO: 2472558 - RNA, 19 nt, Artificial Sequence
  Description of Artificial Sequence: Synthetic oligonucleotide
gcuuugaucaucaggaaca

SEQ ID NO: 2472559 - RNA, 19 nt, Artificial Sequence
  Description of Artificial Sequence: Synthetic oligonucleotide
acgcaucuguuuuccacuc

SEQ ID NO: 2472560 - RNA, 19 nt, Artificial Sequence
  Description of Artificial Sequence: Synthetic oligonucleotide
aguugcaucugaugcccug

SEQ ID NO: 2472561 - RNA, 19 nt, Artificial Sequence
  Description of Artificial Sequence: Synthetic oligonucleotide
uucaacuucugaggcaaac

SEQ ID NO: 2472562 - RNA, 19 nt, Artificial Sequence
  Description of Artificial Sequence: Synthetic oligonucleotide
ucagaauggcgguccacac

SEQ ID NO: 2472563 - RNA, 19 nt, Artificial Sequence
  Description of Artificial Sequence: Synthetic oligonucleotide
cuuugggaucaucucuggc

SEQ ID NO: 2472564 - RNA, 19 nt, Artificial Sequence
  Description of Artificial Sequence: Synthetic oligonucleotide
uuucuucgcaauccaggau

SEQ ID NO: 2472565 - RNA, 19 nt, Artificial Sequence
  Description of Artificial Sequence: Synthetic oligonucleotide
gaguuugaauaccugggua

SEQ ID NO: 2472566 - RNA, 19 nt, Artificial Sequence
  Description of Artificial Sequence: Synthetic oligonucleotide
agauuucugagcaagcauu

SEQ ID NO: 2472567 - RNA, 19 nt, Artificial Sequence
  Description of Artificial Sequence: Synthetic oligonucleotide
ugccgauuccuugagcagc

SEQ ID NO: 2472568 - RNA, 19 nt, Artificial Sequence
  Description of Artificial Sequence: Synthetic oligonucleotide
cugcagaugcaaaccuucc

SEQ ID NO: 2472569 - RNA, 19 nt, Artificial Sequence
  Description of Artificial Sequence: Synthetic oligonucleotide
ucuuugugacaucgaggac

SEQ ID NO: 2472570 - RNA, 19 nt, Artificial Sequence
  Description of Artificial Sequence: Synthetic oligonucleotide
uguuuuccacuccuuugau

SEQ ID NO: 2472571 - RNA, 19 nt, Artificial Sequence
  Description of Artificial Sequence: Synthetic oligonucleotide
ggcagauucauccgaggcc

SEQ ID NO: 2472572 - RNA, 19 nt, Artificial Sequence
  Description of Artificial Sequence: Synthetic oligonucleotide
uucgcaauccaggaugguc

SEQ ID NO: 2472573 - RNA, 19 nt, Artificial Sequence
  Description of Artificial Sequence: Synthetic oligonucleotide
auucaucgaaaagucccag

SEQ ID NO: 2472574 - RNA, 19 nt, Artificial Sequence
  Description of Artificial Sequence: Synthetic oligonucleotide
gaguuuggacucauugaug

SEQ ID NO: 2472575 - RNA, 19 nt, Artificial Sequence
  Description of Artificial Sequence: Synthetic oligonucleotide
aggaacaugcugcggacau

SEQ ID NO: 2472576 - RNA, 19 nt, Artificial Sequence
  Description of Artificial Sequence: Synthetic oligonucleotide
gcugcggacauugagauuc

SEQ ID NO: 2472577 - RNA, 19 nt, Artificial Sequence
  Description of Artificial Sequence: Synthetic oligonucleotide
cuguuuuccacuccuuuga

SEQ ID NO: 2472578 - RNA, 19 nt, Artificial Sequence
  Description of Artificial Sequence: Synthetic oligonucleotide
auaggcagauucauccgag

SEQ ID NO: 2472579 - RNA, 19 nt, Artificial Sequence
  Description of Artificial Sequence: Synthetic oligonucleotide
aagucugcagccacagacu

SEQ ID NO: 2472580 - RNA, 19 nt, Artificial Sequence
  Description of Artificial Sequence: Synthetic oligonucleotide
cuuucaacuucugaggcaa

SEQ ID NO: 2472581 - RNA, 19 nt, Artificial Sequence
  Description of Artificial Sequence: Synthetic oligonucleotide
augcugcggacauugagau

SEQ ID NO: 2472582 - RNA, 19 nt, Artificial Sequence
  Description of Artificial Sequence: Synthetic oligonucleotide
agcagggccaccucuucug

SEQ ID NO: 2472583 - RNA, 19 nt, Artificial Sequence
  Description of Artificial Sequence: Synthetic oligonucleotide
uggcuaugacuuuggcucc

SEQ ID NO: 2472584 - RNA, 19 nt, Artificial Sequence
  Description of Artificial Sequence: Synthetic oligonucleotide
ugacaucgaggacucgagu

SEQ ID NO: 2472585 - RNA, 19 nt, Artificial Sequence
  Description of Artificial Sequence: Synthetic oligonucleotide
ggccacagaagacauguug

SEQ ID NO: 2472586 - RNA, 19 nt, Artificial Sequence
  Description of Artificial Sequence: Synthetic oligonucleotide
cauugagauucaucgaaaa

SEQ ID NO: 2472587 - RNA, 19 nt, Artificial Sequence
  Description of Artificial Sequence: Synthetic oligonucleotide
acaucgaggacucgaguuu

SEQ ID NO: 2472588 - RNA, 19 nt, Artificial Sequence
  Description of Artificial Sequence: Synthetic oligonucleotide
ugaugcucgaggccacaga

SEQ ID NO: 2472589 - RNA, 19 nt, Artificial Sequence
  Description of Artificial Sequence: Synthetic oligonucleotide
auggcgguccacacagucc

SEQ ID NO: 2472590 - RNA, 19 nt, Artificial Sequence
  Description of Artificial Sequence: Synthetic oligonucleotide
auuuuaggaaggaaugcuu

SEQ ID NO: 2472591 - RNA, 19 nt, Artificial Sequence
  Description of Artificial Sequence: Synthetic oligonucleotide
cauaggcagauucauccga

SEQ ID NO: 2472592 - RNA, 19 nt, Artificial Sequence
  Description of Artificial Sequence: Synthetic oligonucleotide
ugcaucugaugcccugcug

SEQ ID NO: 2472593 - RNA, 19 nt, Artificial Sequence
  Description of Artificial Sequence: Synthetic oligonucleotide
agacuuugugagaccaauc

SEQ ID NO: 2472594 - RNA, 19 nt, Artificial Sequence
  Description of Artificial Sequence: Synthetic oligonucleotide
caauucuuucaacuucuga

SEQ ID NO: 2472595 - RNA, 19 nt, Artificial Sequence
  Description of Artificial Sequence: Synthetic oligonucleotide
auguccguggcuaugacuu

SEQ ID NO: 2472596 - RNA, 19 nt, Artificial Sequence
  Description of Artificial Sequence: Synthetic oligonucleotide
caggauggucccguggugg

SEQ ID NO: 2472597 - RNA, 19 nt, Artificial Sequence
  Description of Artificial Sequence: Synthetic oligonucleotide
agcaagcauuuuaggaagg

SEQ ID NO: 2472598 - RNA, 19 nt, Artificial Sequence
  Description of Artificial Sequence: Synthetic oligonucleotide
uucugcagaugcaaaccuu

SEQ ID NO: 2472599 - RNA, 19 nt, Artificial Sequence
  Description of Artificial Sequence: Synthetic oligonucleotide
gcaaaagcuaacgcagagg

SEQ ID NO: 2472600 - RNA, 19 nt, Artificial Sequence
  Description of Artificial Sequence: Synthetic oligonucleotide
uccuugagcagcagcuguc

SEQ ID NO: 2472601 - RNA, 19 nt, Artificial Sequence
  Description of Artificial Sequence: Synthetic oligonucleotide
guggaacuucagaauggcg

SEQ ID NO: 2472602 - RNA, 19 nt, Artificial Sequence
  Description of Artificial Sequence: Synthetic oligonucleotide
ucgaggccacagaagacau

SEQ ID NO: 2472603 - RNA, 19 nt, Artificial Sequence
  Description of Artificial Sequence: Synthetic oligonucleotide
ucugucuguuuaggaaagc

SEQ ID NO: 2472604 - RNA, 19 nt, Artificial Sequence
  Description of Artificial Sequence: Synthetic oligonucleotide
uuuccacuccuuugaugcu

SEQ ID NO: 2472605 - RNA, 19 nt, Artificial Sequence
  Description of Artificial Sequence: Synthetic oligonucleotide
gcauuuuaggaaggaaugc

SEQ ID NO: 2472606 - RNA, 19 nt, Artificial Sequence
  Description of Artificial Sequence: Synthetic oligonucleotide
cuuugaugcucgaggccac

SEQ ID NO: 2472607 - RNA, 19 nt, Artificial Sequence
  Description of Artificial Sequence: Synthetic oligonucleotide
guacacgcaucuguuuucc

SEQ ID NO: 2472608 - RNA, 19 nt, Artificial Sequence
  Description of Artificial Sequence: Synthetic oligonucleotide
uugcaucugaugcccugcu

SEQ ID NO: 2472609 - RNA, 19 nt, Artificial Sequence
  Description of Artificial Sequence: Synthetic oligonucleotide
uugaugcucgaggccacag

SEQ ID NO: 2472610 - RNA, 19 nt, Artificial Sequence
  Description of Artificial Sequence: Synthetic oligonucleotide
gugacaucgaggacucgag

SEQ ID NO: 2472611 - RNA, 19 nt, Artificial Sequence
  Description of Artificial Sequence: Synthetic oligonucleotide
uuugaauaccuggguaauu

SEQ ID NO: 2472612 - RNA, 19 nt, Artificial Sequence
  Description of Artificial Sequence: Synthetic oligonucleotide
ugcacuguacacgcaucug

SEQ ID NO: 2472613 - RNA, 19 nt, Artificial Sequence
  Description of Artificial Sequence: Synthetic oligonucleotide
ucgaaaagucccagucuuu

SEQ ID NO: 2472614 - RNA, 19 nt, Artificial Sequence
  Description of Artificial Sequence: Synthetic oligonucleotide
uaacuuccuuccagucggc

SEQ ID NO: 2472615 - RNA, 19 nt, Artificial Sequence
  Description of Artificial Sequence: Synthetic oligonucleotide
gagaccaaucacagcugcc

SEQ ID NO: 2472616 - RNA, 19 nt, Artificial Sequence
  Description of Artificial Sequence: Synthetic oligonucleotide
auucauccgaggccaagua

SEQ ID NO: 2472617 - RNA, 19 nt, Artificial Sequence
  Description of Artificial Sequence: Synthetic oligonucleotide
agucggcccaugguggaac

SEQ ID NO: 2472618 - RNA, 19 nt, Artificial Sequence
  Description of Artificial Sequence: Synthetic oligonucleotide
ucuugcagagacgggguau

SEQ ID NO: 2472619 - RNA, 19 nt, Artificial Sequence
  Description of Artificial Sequence: Synthetic oligonucleotide
acuguacacgcaucuguuu

SEQ ID NO: 2472620 - RNA, 19 nt, Artificial Sequence
  Description of Artificial Sequence: Synthetic oligonucleotide
gacaucgaggacucgaguu

SEQ ID NO: 2472621 - RNA, 19 nt, Artificial Sequence
  Description of Artificial Sequence: Synthetic oligonucleotide
cuaacgcagaggcccugcc

SEQ ID NO: 2472622 - RNA, 19 nt, Artificial Sequence
  Description of Artificial Sequence: Synthetic oligonucleotide
agauucauccgaggccaag

SEQ ID NO: 2472623 - RNA, 19 nt, Artificial Sequence
  Description of Artificial Sequence: Synthetic oligonucleotide
cugccgauuccuugagcag

SEQ ID NO: 2472624 - RNA, 19 nt, Artificial Sequence
  Description of Artificial Sequence: Synthetic oligonucleotide
ccaaguacacacagagcag

SEQ ID NO: 2472625 - RNA, 19 nt, Artificial Sequence
  Description of Artificial Sequence: Synthetic oligonucleotide
caucgaggacucgaguuug

SEQ ID NO: 2472626 - RNA, 19 nt, Artificial Sequence
  Description of Artificial Sequence: Synthetic oligonucleotide
cagcugucaggacaauaac

SEQ ID NO: 2472627 - RNA, 19 nt, Artificial Sequence
  Description of Artificial Sequence: Synthetic oligonucleotide
ucaacuguuccugggcaua

SEQ ID NO: 2472628 - RNA, 19 nt, Artificial Sequence
  Description of Artificial Sequence: Synthetic oligonucleotide
gaaggaaugcuuugaucau

SEQ ID NO: 2472629 - RNA, 19 nt, Artificial Sequence
  Description of Artificial Sequence: Synthetic oligonucleotide
guuuggacucauugauguc

SEQ ID NO: 2472630 - RNA, 19 nt, Artificial Sequence
  Description of Artificial Sequence: Synthetic oligonucleotide
cuggguaauuuuccagcuc

SEQ ID NO: 2472631 - RNA, 19 nt, Artificial Sequence
  Description of Artificial Sequence: Synthetic oligonucleotide
uuccacuccuuugaugcuc

SEQ ID NO: 2472632 - RNA, 19 nt, Artificial Sequence
  Description of Artificial Sequence: Synthetic oligonucleotide
gaggcaaacugaucaauuu

SEQ ID NO: 2472633 - RNA, 19 nt, Artificial Sequence
  Description of Artificial Sequence: Synthetic oligonucleotide
gcagagacgggguaucaac

SEQ ID NO: 2472634 - RNA, 19 nt, Artificial Sequence
  Description of Artificial Sequence: Synthetic oligonucleotide
gaucaauuugcuucuucuu

SEQ ID NO: 2472635 - RNA, 19 nt, Artificial Sequence
  Description of Artificial Sequence: Synthetic oligonucleotide
ggguaucaacuguuccugg

SEQ ID NO: 2472636 - RNA, 19 nt, Artificial Sequence
  Description of Artificial Sequence: Synthetic oligonucleotide
acaggguugcccgucacau

SEQ ID NO: 2472637 - RNA, 19 nt, Artificial Sequence
  Description of Artificial Sequence: Synthetic oligonucleotide
uucuugcagagacggggua

SEQ ID NO: 2472638 - RNA, 19 nt, Artificial Sequence
  Description of Artificial Sequence: Synthetic oligonucleotide
cacagacuuugugagacca

SEQ ID NO: 2472639 - RNA, 19 nt, Artificial Sequence
  Description of Artificial Sequence: Synthetic oligonucleotide
uuucaacuucugaggcaaa

SEQ ID NO: 2472640 - RNA, 19 nt, Artificial Sequence
  Description of Artificial Sequence: Synthetic oligonucleotide
cucgaggccacagaagaca

SEQ ID NO: 2472641 - RNA, 19 nt, Artificial Sequence
  Description of Artificial Sequence: Synthetic oligonucleotide
ccugggcauacacaguugc

SEQ ID NO: 2472642 - RNA, 19 nt, Artificial Sequence
  Description of Artificial Sequence: Synthetic oligonucleotide
ggaguuuggacucauugau

SEQ ID NO: 2472643 - RNA, 19 nt, Artificial Sequence
  Description of Artificial Sequence: Synthetic oligonucleotide
gggguaucaacuguuccug

SEQ ID NO: 2472644 - RNA, 19 nt, Artificial Sequence
  Description of Artificial Sequence: Synthetic oligonucleotide
cugcaaggaguuccugcag

SEQ ID NO: 2472645 - RNA, 19 nt, Artificial Sequence
  Description of Artificial Sequence: Synthetic oligonucleotide
gauggucccgugguggaca

SEQ ID NO: 2472646 - RNA, 19 nt, Artificial Sequence
  Description of Artificial Sequence: Synthetic oligonucleotide
uacacgcaucuguuuucca

SEQ ID NO: 2472647 - RNA, 19 nt, Artificial Sequence
  Description of Artificial Sequence: Synthetic oligonucleotide
gccacagacuuugugagac

SEQ ID NO: 2472648 - RNA, 19 nt, Artificial Sequence
  Description of Artificial Sequence: Synthetic oligonucleotide
aggauggucccguggugga

SEQ ID NO: 2472649 - RNA, 19 nt, Artificial Sequence
  Description of Artificial Sequence: Synthetic oligonucleotide
ggaguuccugcagucacag

SEQ ID NO: 2472650 - RNA, 19 nt, Artificial Sequence
  Description of Artificial Sequence: Synthetic oligonucleotide
uuugaugcucgaggccaca

SEQ ID NO: 2472651 - RNA, 19 nt, Artificial Sequence
  Description of Artificial Sequence: Synthetic oligonucleotide
cuccaucaaugaugacagg

SEQ ID NO: 2472652 - RNA, 19 nt, Artificial Sequence
  Description of Artificial Sequence: Synthetic oligonucleotide
augacaggguugcccguca

SEQ ID NO: 2472653 - RNA, 19 nt, Artificial Sequence
  Description of Artificial Sequence: Synthetic oligonucleotide
gauguccguggcuaugacu

SEQ ID NO: 2472654 - RNA, 19 nt, Artificial Sequence
  Description of Artificial Sequence: Synthetic oligonucleotide
cuguuuaggaaagcuugca

SEQ ID NO: 2472655 - RNA, 19 nt, Artificial Sequence
  Description of Artificial Sequence: Synthetic oligonucleotide
gugagaccaaucacagcug

SEQ ID NO: 2472656 - RNA, 19 nt, Artificial Sequence
  Description of Artificial Sequence: Synthetic oligonucleotide
gacaggguugcccgucaca

SEQ ID NO: 2472657 - RNA, 19 nt, Artificial Sequence
  Description of Artificial Sequence: Synthetic oligonucleotide
gauucauccgaggccaagu

SEQ ID NO: 2472658 - RNA, 19 nt, Artificial Sequence
  Description of Artificial Sequence: Synthetic oligonucleotide
gagacgggguaucaacugu

SEQ ID NO: 2472659 - RNA, 19 nt, Artificial Sequence
  Description of Artificial Sequence: Synthetic oligonucleotide
ccuucuuuugcaaaagcua

SEQ ID NO: 2472660 - RNA, 19 nt, Artificial Sequence
  Description of Artificial Sequence: Synthetic oligonucleotide
ggacucauugauguccgug

SEQ ID NO: 2472661 - RNA, 19 nt, Artificial Sequence
  Description of Artificial Sequence: Synthetic oligonucleotide
caucugaugcccugcugga

SEQ ID NO: 2472662 - RNA, 19 nt, Artificial Sequence
  Description of Artificial Sequence: Synthetic oligonucleotide
aacuguuccugggcauaca

SEQ ID NO: 2472663 - RNA, 19 nt, Artificial Sequence
  Description of Artificial Sequence: Synthetic oligonucleotide
ggacauugagauucaucga

SEQ ID NO: 2472664 - RNA, 19 nt, Artificial Sequence
  Description of Artificial Sequence: Synthetic oligonucleotide
acucgaguuugaauaccug

SEQ ID NO: 2472665 - RNA, 19 nt, Artificial Sequence
  Description of Artificial Sequence: Synthetic oligonucleotide
ggaacuucagaauggcggu

SEQ ID NO: 2472666 - RNA, 19 nt, Artificial Sequence
  Description of Artificial Sequence: Synthetic oligonucleotide
gacucgaguuugaauaccu

SEQ ID NO: 2472667 - RNA, 19 nt, Artificial Sequence
  Description of Artificial Sequence: Synthetic oligonucleotide
aagcuaacgcagaggcccu

SEQ ID NO: 2472668 - RNA, 19 nt, Artificial Sequence
  Description of Artificial Sequence: Synthetic oligonucleotide
ugacaggguugcccgucac

SEQ ID NO: 2472669 - RNA, 19 nt, Artificial Sequence
  Description of Artificial Sequence: Synthetic oligonucleotide
ccugccgauuccuugagca

SEQ ID NO: 2472670 - RNA, 19 nt, Artificial Sequence
  Description of Artificial Sequence: Synthetic oligonucleotide
cacuccuuugaugcucgag

SEQ ID NO: 2472671 - RNA, 19 nt, Artificial Sequence
  Description of Artificial Sequence: Synthetic oligonucleotide
gggcauacacaguugcauc

SEQ ID NO: 2472672 - RNA, 19 nt, Artificial Sequence
  Description of Artificial Sequence: Synthetic oligonucleotide
caugguggaacuucagaau

SEQ ID NO: 2472673 - RNA, 19 nt, Artificial Sequence
  Description of Artificial Sequence: Synthetic oligonucleotide
aggcccugccgauuccuug

SEQ ID NO: 2472674 - RNA, 19 nt, Artificial Sequence
  Description of Artificial Sequence: Synthetic oligonucleotide
caagcauuuuaggaaggaa

SEQ ID NO: 2472675 - RNA, 19 nt, Artificial Sequence
  Description of Artificial Sequence: Synthetic oligonucleotide
ccaugguggaacuucagaa

SEQ ID NO: 2472676 - RNA, 19 nt, Artificial Sequence
  Description of Artificial Sequence: Synthetic oligonucleotide
ggaaugcuuugaucaucag

SEQ ID NO: 2472677 - RNA, 19 nt, Artificial Sequence
  Description of Artificial Sequence: Synthetic oligonucleotide
caacuguuccugggcauac

SEQ ID NO: 2472678 - RNA, 19 nt, Artificial Sequence
  Description of Artificial Sequence: Synthetic oligonucleotide
gacgggguaucaacuguuc

SEQ ID NO: 2472679 - RNA, 19 nt, Artificial Sequence
  Description of Artificial Sequence: Synthetic oligonucleotide
gauuucugagcaagcauuu

SEQ ID NO: 2472680 - RNA, 19 nt, Artificial Sequence
  Description of Artificial Sequence: Synthetic oligonucleotide
cuucugcagaugcaaaccu

SEQ ID NO: 2472681 - RNA, 19 nt, Artificial Sequence
  Description of Artificial Sequence: Synthetic oligonucleotide
caucgaaaagucccagucu

SEQ ID NO: 2472682 - RNA, 19 nt, Artificial Sequence
  Description of Artificial Sequence: Synthetic oligonucleotide
ugcagagacgggguaucaa

SEQ ID NO: 2472683 - RNA, 19 nt, Artificial Sequence
  Description of Artificial Sequence: Synthetic oligonucleotide
ugguugcacuguacacgca

SEQ ID NO: 2472684 - RNA, 19 nt, Artificial Sequence
  Description of Artificial Sequence: Synthetic oligonucleotide
cccgugguggacaaaacca

SEQ ID NO: 2472685 - RNA, 19 nt, Artificial Sequence
  Description of Artificial Sequence: Synthetic oligonucleotide
accuucccgucuucugucu

SEQ ID NO: 2472686 - RNA, 19 nt, Artificial Sequence
  Description of Artificial Sequence: Synthetic oligonucleotide
cagaauggcgguccacaca

SEQ ID NO: 2472687 - RNA, 19 nt, Artificial Sequence
  Description of Artificial Sequence: Synthetic oligonucleotide
uugccagauuucugagcaa

SEQ ID NO: 2472688 - RNA, 19 nt, Artificial Sequence
  Description of Artificial Sequence: Synthetic oligonucleotide
ggcauacacaguugcaucu

SEQ ID NO: 2472689 - RNA, 19 nt, Artificial Sequence
  Description of Artificial Sequence: Synthetic oligonucleotide
guugcacuguacacgcauc

SEQ ID NO: 2472690 - RNA, 19 nt, Artificial Sequence
  Description of Artificial Sequence: Synthetic oligonucleotide
guccguggcuaugacuuug

SEQ ID NO: 2472691 - RNA, 19 nt, Artificial Sequence
  Description of Artificial Sequence: Synthetic oligonucleotide
auacacaguugcaucugau

SEQ ID NO: 2472692 - RNA, 19 nt, Artificial Sequence
  Description of Artificial Sequence: Synthetic oligonucleotide
gcagcugucaggacaauaa

SEQ ID NO: 2472693 - RNA, 19 nt, Artificial Sequence
  Description of Artificial Sequence: Synthetic oligonucleotide
ccgucacauaggcagauuc

SEQ ID NO: 2472694 - RNA, 19 nt, Artificial Sequence
  Description of Artificial Sequence: Synthetic oligonucleotide
ucgaggacucgaguuugaa

SEQ ID NO: 2472695 - RNA, 19 nt, Artificial Sequence
  Description of Artificial Sequence: Synthetic oligonucleotide
cuucagaauggcgguccac

SEQ ID NO: 2472696 - RNA, 19 nt, Artificial Sequence
  Description of Artificial Sequence: Synthetic oligonucleotide
ggacucgaguuugaauacc

SEQ ID NO: 2472697 - RNA, 19 nt, Artificial Sequence
  Description of Artificial Sequence: Synthetic oligonucleotide
uugugacaucgaggacucg

SEQ ID NO: 2472698 - RNA, 19 nt, Artificial Sequence
  Description of Artificial Sequence: Synthetic oligonucleotide
ccuuugaugcucgaggcca

SEQ ID NO: 2472699 - RNA, 19 nt, Artificial Sequence
  Description of Artificial Sequence: Synthetic oligonucleotide
cagaugcaaaccuucccgu

SEQ ID NO: 2472700 - RNA, 19 nt, Artificial Sequence
  Description of Artificial Sequence: Synthetic oligonucleotide
guuugaauaccuggguaau

SEQ ID NO: 2472701 - RNA, 19 nt, Artificial Sequence
  Description of Artificial Sequence: Synthetic oligonucleotide
gagccugccuucucugcaa

SEQ ID NO: 2472702 - RNA, 19 nt, Artificial Sequence
  Description of Artificial Sequence: Synthetic oligonucleotide
agccuccaucaaugaugac

SEQ ID NO: 2472703 - RNA, 19 nt, Artificial Sequence
  Description of Artificial Sequence: Synthetic oligonucleotide
cagagacgggguaucaacu

SEQ ID NO: 2472704 - RNA, 19 nt, Artificial Sequence
  Description of Artificial Sequence: Synthetic oligonucleotide
ccgucuucugucuguuuag

SEQ ID NO: 2472705 - RNA, 19 nt, Artificial Sequence
  Description of Artificial Sequence: Synthetic oligonucleotide
ccuuccagucggcccaugg

SEQ ID NO: 2472706 - RNA, 19 nt, Artificial Sequence
  Description of Artificial Sequence: Synthetic oligonucleotide
cugucuguuuaggaaagcu

SEQ ID NO: 2472707 - RNA, 19 nt, Artificial Sequence
  Description of Artificial Sequence: Synthetic oligonucleotide
aggaguuccugcagucaca

SEQ ID NO: 2472708 - RNA, 19 nt, Artificial Sequence
  Description of Artificial Sequence: Synthetic oligonucleotide
cuguacacgcaucuguuuu

SEQ ID NO: 2472709 - RNA, 19 nt, Artificial Sequence
  Description of Artificial Sequence: Synthetic oligonucleotide
aggaaagcuugcagagccu

SEQ ID NO: 2472710 - RNA, 19 nt, Artificial Sequence
  Description of Artificial Sequence: Synthetic oligonucleotide
gcaagcauuuuaggaagga

SEQ ID NO: 2472711 - RNA, 19 nt, Artificial Sequence
  Description of Artificial Sequence: Synthetic oligonucleotide
uguccguggcuaugacuuu

SEQ ID NO: 2472712 - RNA, 19 nt, Artificial Sequence
  Description of Artificial Sequence: Synthetic oligonucleotide
cagcaacauuaaagagaac

SEQ ID NO: 2472713 - RNA, 19 nt, Artificial Sequence
  Description of Artificial Sequence: Synthetic oligonucleotide
cucauugauguccguggcu

SEQ ID NO: 2472714 - RNA, 19 nt, Artificial Sequence
  Description of Artificial Sequence: Synthetic oligonucleotide
agacgggguaucaacuguu

SEQ ID NO: 2472715 - RNA, 19 nt, Artificial Sequence
  Description of Artificial Sequence: Synthetic oligonucleotide
gcagaggcccugccgauuc

SEQ ID NO: 2472716 - RNA, 19 nt, Artificial Sequence
  Description of Artificial Sequence: Synthetic oligonucleotide
gguugcacuguacacgcau

SEQ ID NO: 2472717 - RNA, 19 nt, Artificial Sequence
  Description of Artificial Sequence: Synthetic oligonucleotide
gccagauuucugagcaagc

SEQ ID NO: 2472718 - RNA, 19 nt, Artificial Sequence
  Description of Artificial Sequence: Synthetic oligonucleotide
ccagauuucugagcaagca

SEQ ID NO: 2472719 - RNA, 19 nt, Artificial Sequence
  Description of Artificial Sequence: Synthetic oligonucleotide
agcagcugucaggacaaua

SEQ ID NO: 2472720 - RNA, 19 nt, Artificial Sequence
  Description of Artificial Sequence: Synthetic oligonucleotide
cacagagcagggccaccuc

SEQ ID NO: 2472721 - RNA, 19 nt, Artificial Sequence
  Description of Artificial Sequence: Synthetic oligonucleotide
gcacuguacacgcaucugu

SEQ ID NO: 2472722 - RNA, 19 nt, Artificial Sequence
  Description of Artificial Sequence: Synthetic oligonucleotide
auggucccgugguggacaa

SEQ ID NO: 2472723 - RNA, 19 nt, Artificial Sequence
  Description of Artificial Sequence: Synthetic oligonucleotide
ggccaaguacacacagagc

SEQ ID NO: 2472724 - RNA, 19 nt, Artificial Sequence
  Description of Artificial Sequence: Synthetic oligonucleotide
guuccugcagucacaggcu

SEQ ID NO: 2472725 - RNA, 19 nt, Artificial Sequence
  Description of Artificial Sequence: Synthetic oligonucleotide
ccacagacuuugugagacc

SEQ ID NO: 2472726 - RNA, 19 nt, Artificial Sequence
  Description of Artificial Sequence: Synthetic oligonucleotide
ugcugcggacauugagauu

SEQ ID NO: 2472727 - RNA, 19 nt, Artificial Sequence
  Description of Artificial Sequence: Synthetic oligonucleotide
gaccaaucacagcugccuu

SEQ ID NO: 2472728 - RNA, 19 nt, Artificial Sequence
  Description of Artificial Sequence: Synthetic oligonucleotide
aucgaggacucgaguuuga

SEQ ID NO: 2472729 - RNA, 19 nt, Artificial Sequence
  Description of Artificial Sequence: Synthetic oligonucleotide
ggucccgugguggacaaaa

SEQ ID NO: 2472730 - RNA, 19 nt, Artificial Sequence
  Description of Artificial Sequence: Synthetic oligonucleotide
guugcccgucacauaggca

SEQ ID NO: 2472731 - RNA, 19 nt, Artificial Sequence
  Description of Artificial Sequence: Synthetic oligonucleotide
auccgaggccaaguacaca

SEQ ID NO: 2472732 - RNA, 19 nt, Artificial Sequence
  Description of Artificial Sequence: Synthetic oligonucleotide
uucccgucuucugucuguu

SEQ ID NO: 2472733 - RNA, 19 nt, Artificial Sequence
  Description of Artificial Sequence: Synthetic oligonucleotide
gcuaacgcagaggcccugc

SEQ ID NO: 2472734 - RNA, 19 nt, Artificial Sequence
  Description of Artificial Sequence: Synthetic oligonucleotide
gcaauccaggauggucccg

SEQ ID NO: 2472735 - RNA, 19 nt, Artificial Sequence
  Description of Artificial Sequence: Synthetic oligonucleotide
ggcccugccgauuccuuga

SEQ ID NO: 2472736 - RNA, 19 nt, Artificial Sequence
  Description of Artificial Sequence: Synthetic oligonucleotide
cacuguacacgcaucuguu

SEQ ID NO: 2472737 - RNA, 19 nt, Artificial Sequence
  Description of Artificial Sequence: Synthetic oligonucleotide
gagcagggccaccucuucu

SEQ ID NO: 2472738 - RNA, 19 nt, Artificial Sequence
  Description of Artificial Sequence: Synthetic oligonucleotide
cuuccagucggcccauggu

SEQ ID NO: 2472739 - RNA, 19 nt, Artificial Sequence
  Description of Artificial Sequence: Synthetic oligonucleotide
agcuaacgcagaggcccug

SEQ ID NO: 2472740 - RNA, 19 nt, Artificial Sequence
  Description of Artificial Sequence: Synthetic oligonucleotide
gcggacauugagauucauc

SEQ ID NO: 2472741 - RNA, 19 nt, Artificial Sequence
  Description of Artificial Sequence: Synthetic oligonucleotide
gcaaacugaucaauuugcu

SEQ ID NO: 2472742 - RNA, 19 nt, Artificial Sequence
  Description of Artificial Sequence: Synthetic oligonucleotide
cuucccgucuucugucugu

SEQ ID NO: 2472743 - RNA, 19 nt, Artificial Sequence
  Description of Artificial Sequence: Synthetic oligonucleotide
caauccaggauggucccgu

SEQ ID NO: 2472744 - RNA, 19 nt, Artificial Sequence
  Description of Artificial Sequence: Synthetic oligonucleotide
cuuugaucaucaggaacau

SEQ ID NO: 2472745 - RNA, 19 nt, Artificial Sequence
  Description of Artificial Sequence: Synthetic oligonucleotide
ugcggacauugagauucau

SEQ ID NO: 2472746 - RNA, 19 nt, Artificial Sequence
  Description of Artificial Sequence: Synthetic oligonucleotide
cugcggacauugagauuca

SEQ ID NO: 2472747 - RNA, 19 nt, Artificial Sequence
  Description of Artificial Sequence: Synthetic oligonucleotide
ccucuuugggaucaucucu

SEQ ID NO: 2472748 - RNA, 19 nt, Artificial Sequence
  Description of Artificial Sequence: Synthetic oligonucleotide
acgcagaggcccugccgau

SEQ ID NO: 2472749 - RNA, 19 nt, Artificial Sequence
  Description of Artificial Sequence: Synthetic oligonucleotide
gucccgugguggacaaaac

SEQ ID NO: 2472750 - RNA, 19 nt, Artificial Sequence
  Description of Artificial Sequence: Synthetic oligonucleotide
cauugauguccguggcuau

SEQ ID NO: 2472751 - RNA, 19 nt, Artificial Sequence
  Description of Artificial Sequence: Synthetic oligonucleotide
gccgauuccuugagcagca

SEQ ID NO: 2472752 - RNA, 19 nt, Artificial Sequence
  Description of Artificial Sequence: Synthetic oligonucleotide
ccuggguaauuuuccagcu

SEQ ID NO: 2472753 - RNA, 19 nt, Artificial Sequence
  Description of Artificial Sequence: Synthetic oligonucleotide
cugccuugguugcacugua

SEQ ID NO: 2472754 - RNA, 19 nt, Artificial Sequence
  Description of Artificial Sequence: Synthetic oligonucleotide
cagauucauccgaggccaa

SEQ ID NO: 2472755 - RNA, 19 nt, Artificial Sequence
  Description of Artificial Sequence: Synthetic oligonucleotide
ccaggauggucccguggug

SEQ ID NO: 2472756 - RNA, 19 nt, Artificial Sequence
  Description of Artificial Sequence: Synthetic oligonucleotide
cugcagucacaggcuccag

SEQ ID NO: 2472757 - RNA, 19 nt, Artificial Sequence
  Description of Artificial Sequence: Synthetic oligonucleotide
gcccugccgauuccuugag

SEQ ID NO: 2472758 - RNA, 19 nt, Artificial Sequence
  Description of Artificial Sequence: Synthetic oligonucleotide
ccguggcuaugacuuuggc

SEQ ID NO: 2472759 - RNA, 19 nt, Artificial Sequence
  Description of Artificial Sequence: Synthetic oligonucleotide
ggcccaugguggaacuuca

SEQ ID NO: 2472760 - RNA, 19 nt, Artificial Sequence
  Description of Artificial Sequence: Synthetic oligonucleotide
ggauggucccgugguggac

SEQ ID NO: 2472761 - RNA, 19 nt, Artificial Sequence
  Description of Artificial Sequence: Synthetic oligonucleotide
ccuugagcagcagcuguca

SEQ ID NO: 2472762 - RNA, 19 nt, Artificial Sequence
  Description of Artificial Sequence: Synthetic oligonucleotide
ccucuucugcagaugcaaa

SEQ ID NO: 2472763 - RNA, 19 nt, Artificial Sequence
  Description of Artificial Sequence: Synthetic oligonucleotide
ggcuccagccuccaucaau

SEQ ID NO: 2472764 - RNA, 19 nt, Artificial Sequence
  Description of Artificial Sequence: Synthetic oligonucleotide
caggguugcccgucacaua

SEQ ID NO: 2472765 - RNA, 19 nt, Artificial Sequence
  Description of Artificial Sequence: Synthetic oligonucleotide
cagucacaggcuccagccu

SEQ ID NO: 2472766 - RNA, 19 nt, Artificial Sequence
  Description of Artificial Sequence: Synthetic oligonucleotide
gcccaugguggaacuucag

SEQ ID NO: 2472767 - RNA, 19 nt, Artificial Sequence
  Description of Artificial Sequence: Synthetic oligonucleotide
ucggcccaugguggaacuu

SEQ ID NO: 2472768 - RNA, 19 nt, Artificial Sequence
  Description of Artificial Sequence: Synthetic oligonucleotide
gucggcccaugguggaacu

SEQ ID NO: 2472769 - RNA, 19 nt, Artificial Sequence
  Description of Artificial Sequence: Synthetic oligonucleotide
cgaguuugaauaccugggu

SEQ ID NO: 2472770 - RNA, 19 nt, Artificial Sequence
  Description of Artificial Sequence: Synthetic oligonucleotide
cccugccgauuccuugagc

SEQ ID NO: 2472771 - RNA, 19 nt, Artificial Sequence
  Description of Artificial Sequence: Synthetic oligonucleotide
cuccuggaguuuggacuca

SEQ ID NO: 2472772 - RNA, 19 nt, Artificial Sequence
  Description of Artificial Sequence: Synthetic oligonucleotide
ggguaauuuuccagcuccu

SEQ ID NO: 2472773 - RNA, 19 nt, Artificial Sequence
  Description of Artificial Sequence: Synthetic oligonucleotide
caguugcaucugaugcccu

SEQ ID NO: 2472774 - RNA, 19 nt, Artificial Sequence
  Description of Artificial Sequence: Synthetic oligonucleotide
ccuucucugcaaggaguuc

SEQ ID NO: 2472775 - RNA, 19 nt, Artificial Sequence
  Description of Artificial Sequence: Synthetic oligonucleotide
ccagucggcccauggugga

SEQ ID NO: 2472776 - RNA, 19 nt, Artificial Sequence
  Description of Artificial Sequence: Synthetic oligonucleotide
aggccacagaagacauguu

SEQ ID NO: 2472777 - RNA, 19 nt, Artificial Sequence
  Description of Artificial Sequence: Synthetic oligonucleotide
ggaucaucucuggcuugaa

SEQ ID NO: 2472778 - RNA, 19 nt, Artificial Sequence
  Description of Artificial Sequence: Synthetic oligonucleotide
uggucccgugguggacaaa

SEQ ID NO: 2472779 - RNA, 19 nt, Artificial Sequence
  Description of Artificial Sequence: Synthetic oligonucleotide
cuucgcaauccaggauggu

SEQ ID NO: 2472780 - RNA, 19 nt, Artificial Sequence
  Description of Artificial Sequence: Synthetic oligonucleotide
ggcuaugacuuuggcuccu

SEQ ID NO: 2472781 - RNA, 19 nt, Artificial Sequence
  Description of Artificial Sequence: Synthetic oligonucleotide
cggcccaugguggaacuuc

SEQ ID NO: 2472782 - RNA, 19 nt, Artificial Sequence
  Description of Artificial Sequence: Synthetic oligonucleotide
ccgauuccuugagcagcag

SEQ ID NO: 2472783 - RNA, 19 nt, Artificial Sequence
  Description of Artificial Sequence: Synthetic oligonucleotide
cagucggcccaugguggaa

SEQ ID NO: 2472784 - RNA, 19 nt, Artificial Sequence
  Description of Artificial Sequence: Synthetic oligonucleotide
cgaaaagucccagucuuuu

SEQ ID NO: 2472785 - RNA, 19 nt, Artificial Sequence
  Description of Artificial Sequence: Synthetic oligonucleotide
ggaacaugcugcggacauu

SEQ ID NO: 2472786 - RNA, 19 nt, Artificial Sequence
  Description of Artificial Sequence: Synthetic oligonucleotide
cgguccacacaguccucca

SEQ ID NO: 2472787 - RNA, 19 nt, Artificial Sequence
  Description of Artificial Sequence: Synthetic oligonucleotide
cacaggcuccagccuccau

SEQ ID NO: 2472788 - RNA, 19 nt, Artificial Sequence
  Description of Artificial Sequence: Synthetic oligonucleotide
gcccgucacauaggcagau

SEQ ID NO: 2472789 - RNA, 19 nt, Artificial Sequence
  Description of Artificial Sequence: Synthetic oligonucleotide
ccuggaguuuggacucauu

SEQ ID NO: 2472790 - RNA, 19 nt, Artificial Sequence
  Description of Artificial Sequence: Synthetic oligonucleotide
cccgucacauaggcagauu

SEQ ID NO: 2472791 - RNA, 19 nt, Artificial Sequence
  Description of Artificial Sequence: Synthetic oligonucleotide
cgcagaggcccugccgauu

SEQ ID NO: 2472792 - RNA, 19 nt, Artificial Sequence
  Description of Artificial Sequence: Synthetic oligonucleotide
augagcuucggucacaccc

SEQ ID NO: 2472793 - RNA, 19 nt, Artificial Sequence
  Description of Artificial Sequence: Synthetic oligonucleotide
aauccuugcugauucugcc

SEQ ID NO: 2472794 - RNA, 19 nt, Artificial Sequence
  Description of Artificial Sequence: Synthetic oligonucleotide
cucaggugcaccaagaccg

SEQ ID NO: 2472795 - RNA, 19 nt, Artificial Sequence
  Description of Artificial Sequence: Synthetic oligonucleotide
ugauucgcaacauugagcu

SEQ ID NO: 2472796 - RNA, 19 nt, Artificial Sequence
  Description of Artificial Sequence: Synthetic oligonucleotide
accaacgccacccuggccc

SEQ ID NO: 2472797 - RNA, 19 nt, Artificial Sequence
  Description of Artificial Sequence: Synthetic oligonucleotide
uucaccauugccccaaucc

SEQ ID NO: 2472798 - RNA, 19 nt, Artificial Sequence
  Description of Artificial Sequence: Synthetic oligonucleotide
gaaaauggcagcaucauga

SEQ ID NO: 2472799 - RNA, 19 nt, Artificial Sequence
  Description of Artificial Sequence: Synthetic oligonucleotide
ucuacaugagcuucgguca

SEQ ID NO: 2472800 - RNA, 19 nt, Artificial Sequence
  Description of Artificial Sequence: Synthetic oligonucleotide
auucgcaacauugagcugg

SEQ ID NO: 2472801 - RNA, 19 nt, Artificial Sequence
  Description of Artificial Sequence: Synthetic oligonucleotide
ucaaucacaugcaucugag

SEQ ID NO: 2472802 - RNA, 19 nt, Artificial Sequence
  Description of Artificial Sequence: Synthetic oligonucleotide
gguguggucaaucacaugc

SEQ ID NO: 2472803 - RNA, 19 nt, Artificial Sequence
  Description of Artificial Sequence: Synthetic oligonucleotide
ugcugauucugccaaaaca

SEQ ID NO: 2472804 - RNA, 19 nt, Artificial Sequence
  Description of Artificial Sequence: Synthetic oligonucleotide
ugcagcauaagccgauggg

SEQ ID NO: 2472805 - RNA, 19 nt, Artificial Sequence
  Description of Artificial Sequence: Synthetic oligonucleotide
agcaucaugauucgcaaca

SEQ ID NO: 2472806 - RNA, 19 nt, Artificial Sequence
  Description of Artificial Sequence: Synthetic oligonucleotide
ugcggucucacacaugaag

SEQ ID NO: 2472807 - RNA, 19 nt, Artificial Sequence
  Description of Artificial Sequence: Synthetic oligonucleotide
auggagugcggucucacac

SEQ ID NO: 2472808 - RNA, 19 nt, Artificial Sequence
  Description of Artificial Sequence: Synthetic oligonucleotide
ucauagacaccgcagccug

SEQ ID NO: 2472809 - RNA, 19 nt, Artificial Sequence
  Description of Artificial Sequence: Synthetic oligonucleotide
gcagaaaccagucucggcg

SEQ ID NO: 2472810 - RNA, 19 nt, Artificial Sequence
  Description of Artificial Sequence: Synthetic oligonucleotide
ucaugauucgcaacauuga

SEQ ID NO: 2472811 - RNA, 19 nt, Artificial Sequence
  Description of Artificial Sequence: Synthetic oligonucleotide
agugcggucucacacauga

SEQ ID NO: 2472812 - RNA, 19 nt, Artificial Sequence
  Description of Artificial Sequence: Synthetic oligonucleotide
accucgacgccuuugauca

SEQ ID NO: 2472813 - RNA, 19 nt, Artificial Sequence
  Description of Artificial Sequence: Synthetic oligonucleotide
caugauucgcaacauugag

SEQ ID NO: 2472814 - RNA, 19 nt, Artificial Sequence
  Description of Artificial Sequence: Synthetic oligonucleotide
ccuuugaucacuuuggcug

SEQ ID NO: 2472815 - RNA, 19 nt, Artificial Sequence
  Description of Artificial Sequence: Synthetic oligonucleotide
augauucgcaacauugagc

SEQ ID NO: 2472816 - RNA, 19 nt, Artificial Sequence
  Description of Artificial Sequence: Synthetic oligonucleotide
guggaugugauggagugcg

SEQ ID NO: 2472817 - RNA, 19 nt, Artificial Sequence
  Description of Artificial Sequence: Synthetic oligonucleotide
ucucgguuccgucauagac

SEQ ID NO: 2472818 - RNA, 19 nt, Artificial Sequence
  Description of Artificial Sequence: Synthetic oligonucleotide
gguuccgucauagacaccg

SEQ ID NO: 2472819 - RNA, 19 nt, Artificial Sequence
  Description of Artificial Sequence: Synthetic oligonucleotide
gucuacaugagcuucgguc

SEQ ID NO: 2472820 - RNA, 19 nt, Artificial Sequence
  Description of Artificial Sequence: Synthetic oligonucleotide
cauggugacgccccgagag

SEQ ID NO: 2472821 - RNA, 19 nt, Artificial Sequence
  Description of Artificial Sequence: Synthetic oligonucleotide
gacgccuuugaucacuuug

SEQ ID NO: 2472822 - RNA, 19 nt, Artificial Sequence
  Description of Artificial Sequence: Synthetic oligonucleotide
uccgucauagacaccgcag

SEQ ID NO: 2472823 - RNA, 19 nt, Artificial Sequence
  Description of Artificial Sequence: Synthetic oligonucleotide
aaggccacuugccacccuc

SEQ ID NO: 2472824 - RNA, 19 nt, Artificial Sequence
  Description of Artificial Sequence: Synthetic oligonucleotide
uuucccgcgaguuccagca

SEQ ID NO: 2472825 - RNA, 19 nt, Artificial Sequence
  Description of Artificial Sequence: Synthetic oligonucleotide
aucacuuuggcugcgagga

SEQ ID NO: 2472826 - RNA, 19 nt, Artificial Sequence
  Description of Artificial Sequence: Synthetic oligonucleotide
agaaaccagucucggcgcc

SEQ ID NO: 2472827 - RNA, 19 nt, Artificial Sequence
  Description of Artificial Sequence: Synthetic oligonucleotide
gacaucaggagcaaagauc

SEQ ID NO: 2472828 - RNA, 19 nt, Artificial Sequence
  Description of Artificial Sequence: Synthetic oligonucleotide
ugccccaaucccaucgugg

SEQ ID NO: 2472829 - RNA, 19 nt, Artificial Sequence
  Description of Artificial Sequence: Synthetic oligonucleotide
agacaccgcagccugacag

SEQ ID NO: 2472830 - RNA, 19 nt, Artificial Sequence
  Description of Artificial Sequence: Synthetic oligonucleotide
ucgguuccgucauagacac

SEQ ID NO: 2472831 - RNA, 19 nt, Artificial Sequence
  Description of Artificial Sequence: Synthetic oligonucleotide
ugcuuucgcucucggaagg

SEQ ID NO: 2472832 - RNA, 19 nt, Artificial Sequence
  Description of Artificial Sequence: Synthetic oligonucleotide
cagccugacagcaccaacg

SEQ ID NO: 2472833 - RNA, 19 nt, Artificial Sequence
  Description of Artificial Sequence: Synthetic oligonucleotide
aagggcugcgcgcugggag

SEQ ID NO: 2472834 - RNA, 19 nt, Artificial Sequence
  Description of Artificial Sequence: Synthetic oligonucleotide
ucguggaugugauggagug

SEQ ID NO: 2472835 - RNA, 19 nt, Artificial Sequence
  Description of Artificial Sequence: Synthetic oligonucleotide
caauccuugcugauucugc

SEQ ID NO: 2472836 - RNA, 19 nt, Artificial Sequence
  Description of Artificial Sequence: Synthetic oligonucleotide
aggacaggcgcaaugcagc

SEQ ID NO: 2472837 - RNA, 19 nt, Artificial Sequence
  Description of Artificial Sequence: Synthetic oligonucleotide
uucggucacacccuucaca

SEQ ID NO: 2472838 - RNA, 19 nt, Artificial Sequence
  Description of Artificial Sequence: Synthetic oligonucleotide
uuggugaucuugccucggg

SEQ ID NO: 2472839 - RNA, 19 nt, Artificial Sequence
  Description of Artificial Sequence: Synthetic oligonucleotide
uucgcaacauugagcuggg

SEQ ID NO: 2472840 - RNA, 19 nt, Artificial Sequence
  Description of Artificial Sequence: Synthetic oligonucleotide
ggucacacccuucacacag

SEQ ID NO: 2472841 - RNA, 19 nt, Artificial Sequence
  Description of Artificial Sequence: Synthetic oligonucleotide
gucucacacaugaaggccg

SEQ ID NO: 2472842 - RNA, 19 nt, Artificial Sequence
  Description of Artificial Sequence: Synthetic oligonucleotide
cccacugugaccucgacgc

SEQ ID NO: 2472843 - RNA, 19 nt, Artificial Sequence
  Description of Artificial Sequence: Synthetic oligonucleotide
uucugccaaaacauuccug

SEQ ID NO: 2472844 - RNA, 19 nt, Artificial Sequence
  Description of Artificial Sequence: Synthetic oligonucleotide
ugagcuucggucacacccu

SEQ ID NO: 2472845 - RNA, 19 nt, Artificial Sequence
  Description of Artificial Sequence: Synthetic oligonucleotide
gucgugaccacuuuguucu

SEQ ID NO: 2472846 - RNA, 19 nt, Artificial Sequence
  Description of Artificial Sequence: Synthetic oligonucleotide
uugcucguggcccacugug

SEQ ID NO: 2472847 - RNA, 19 nt, Artificial Sequence
  Description of Artificial Sequence: Synthetic oligonucleotide
auagacaccgcagccugac

SEQ ID NO: 2472848 - RNA, 19 nt, Artificial Sequence
  Description of Artificial Sequence: Synthetic oligonucleotide
ugcggagccgugaagggcu

SEQ ID NO: 2472849 - RNA, 19 nt, Artificial Sequence
  Description of Artificial Sequence: Synthetic oligonucleotide
gaccgcagaggccucgugg

SEQ ID NO: 2472850 - RNA, 19 nt, Artificial Sequence
  Description of Artificial Sequence: Synthetic oligonucleotide
cuggucuacaugagcuucg

SEQ ID NO: 2472851 - RNA, 19 nt, Artificial Sequence
  Description of Artificial Sequence: Synthetic oligonucleotide
auggugacgccccgagagc

SEQ ID NO: 2472852 - RNA, 19 nt, Artificial Sequence
  Description of Artificial Sequence: Synthetic oligonucleotide
uaagccgaugggcuucuug

SEQ ID NO: 2472853 - RNA, 19 nt, Artificial Sequence
  Description of Artificial Sequence: Synthetic oligonucleotide
cacaugaaggccggggucg

SEQ ID NO: 2472854 - RNA, 19 nt, Artificial Sequence
  Description of Artificial Sequence: Synthetic oligonucleotide
gagcgcagaaaccagucuc

SEQ ID NO: 2472855 - RNA, 19 nt, Artificial Sequence
  Description of Artificial Sequence: Synthetic oligonucleotide
gcuuugauggcuucugcag

SEQ ID NO: 2472856 - RNA, 19 nt, Artificial Sequence
  Description of Artificial Sequence: Synthetic oligonucleotide
cagugcuuggcacccaggg

SEQ ID NO: 2472857 - RNA, 19 nt, Artificial Sequence
  Description of Artificial Sequence: Synthetic oligonucleotide
agccgaugggcuucuuggc

SEQ ID NO: 2472858 - RNA, 19 nt, Artificial Sequence
  Description of Artificial Sequence: Synthetic oligonucleotide
ugccaaaacauuccugcuu

SEQ ID NO: 2472859 - RNA, 19 nt, Artificial Sequence
  Description of Artificial Sequence: Synthetic oligonucleotide
uguggucaaucacaugcau

SEQ ID NO: 2472860 - RNA, 19 nt, Artificial Sequence
  Description of Artificial Sequence: Synthetic oligonucleotide
uuugaucacuuuggcugcg

SEQ ID NO: 2472861 - RNA, 19 nt, Artificial Sequence
  Description of Artificial Sequence: Synthetic oligonucleotide
cagaaaccagucucggcgc

SEQ ID NO: 2472862 - RNA, 19 nt, Artificial Sequence
  Description of Artificial Sequence: Synthetic oligonucleotide
gauggcuucugcaguuccg

SEQ ID NO: 2472863 - RNA, 19 nt, Artificial Sequence
  Description of Artificial Sequence: Synthetic oligonucleotide
acgcucuacuuccuuguuc

SEQ ID NO: 2472864 - RNA, 19 nt, Artificial Sequence
  Description of Artificial Sequence: Synthetic oligonucleotide
acgccuuugaucacuuugg

SEQ ID NO: 2472865 - RNA, 19 nt, Artificial Sequence
  Description of Artificial Sequence: Synthetic oligonucleotide
gaucucgguuccgucauag

SEQ ID NO: 2472866 - RNA, 19 nt, Artificial Sequence
  Description of Artificial Sequence: Synthetic oligonucleotide
uggugacgccccgagagcg

SEQ ID NO: 2472867 - RNA, 19 nt, Artificial Sequence
  Description of Artificial Sequence: Synthetic oligonucleotide
uggugaucuugccucgggc

SEQ ID NO: 2472868 - RNA, 19 nt, Artificial Sequence
  Description of Artificial Sequence: Synthetic oligonucleotide
ugcgaggacaggcgcaaug

SEQ ID NO: 2472869 - RNA, 19 nt, Artificial Sequence
  Description of Artificial Sequence: Synthetic oligonucleotide
aaauggcagcaucaugauu

SEQ ID NO: 2472870 - RNA, 19 nt, Artificial Sequence
  Description of Artificial Sequence: Synthetic oligonucleotide
aaggccggggucgugacca

SEQ ID NO: 2472871 - RNA, 19 nt, Artificial Sequence
  Description of Artificial Sequence: Synthetic oligonucleotide
uuccgucauagacaccgca

SEQ ID NO: 2472872 - RNA, 19 nt, Artificial Sequence
  Description of Artificial Sequence: Synthetic oligonucleotide
gcaacauugagcugggcca

SEQ ID NO: 2472873 - RNA, 19 nt, Artificial Sequence
  Description of Artificial Sequence: Synthetic oligonucleotide
acggcgaacgugcucaggu

SEQ ID NO: 2472874 - RNA, 19 nt, Artificial Sequence
  Description of Artificial Sequence: Synthetic oligonucleotide
agcauggugacgccccgag

SEQ ID NO: 2472875 - RNA, 19 nt, Artificial Sequence
  Description of Artificial Sequence: Synthetic oligonucleotide
agcgcagaaaccagucucg

SEQ ID NO: 2472876 - RNA, 19 nt, Artificial Sequence
  Description of Artificial Sequence: Synthetic oligonucleotide
agcaccaacgccacccugg

SEQ ID NO: 2472877 - RNA, 19 nt, Artificial Sequence
  Description of Artificial Sequence: Synthetic oligonucleotide
cccaucguggaugugaugg

SEQ ID NO: 2472878 - RNA, 19 nt, Artificial Sequence
  Description of Artificial Sequence: Synthetic oligonucleotide
augcaucugagggacauca

SEQ ID NO: 2472879 - RNA, 19 nt, Artificial Sequence
  Description of Artificial Sequence: Synthetic oligonucleotide
uggagugcggucucacaca

SEQ ID NO: 2472880 - RNA, 19 nt, Artificial Sequence
  Description of Artificial Sequence: Synthetic oligonucleotide
uccuuuaggacacgcucua

SEQ ID NO: 2472881 - RNA, 19 nt, Artificial Sequence
  Description of Artificial Sequence: Synthetic oligonucleotide
cucgguuccgucauagaca

SEQ ID NO: 2472882 - RNA, 19 nt, Artificial Sequence
  Description of Artificial Sequence: Synthetic oligonucleotide
ucuugcucguggcccacug

SEQ ID NO: 2472883 - RNA, 19 nt, Artificial Sequence
  Description of Artificial Sequence: Synthetic oligonucleotide
ucaggugcaccaagaccgc

SEQ ID NO: 2472884 - RNA, 19 nt, Artificial Sequence
  Description of Artificial Sequence: Synthetic oligonucleotide
uucgcucucggaaggcugu

SEQ ID NO: 2472885 - RNA, 19 nt, Artificial Sequence
  Description of Artificial Sequence: Synthetic oligonucleotide
cugcuuucgcucucggaag

SEQ ID NO: 2472886 - RNA, 19 nt, Artificial Sequence
  Description of Artificial Sequence: Synthetic oligonucleotide
gacaccgcagccugacagc

SEQ ID NO: 2472887 - RNA, 19 nt, Artificial Sequence
  Description of Artificial Sequence: Synthetic oligonucleotide
uggaugugauggagugcgg

SEQ ID NO: 2472888 - RNA, 19 nt, Artificial Sequence
  Description of Artificial Sequence: Synthetic oligonucleotide
uggucuacaugagcuucgg

SEQ ID NO: 2472889 - RNA, 19 nt, Artificial Sequence
  Description of Artificial Sequence: Synthetic oligonucleotide
ucggcucaggugcaccaag

SEQ ID NO: 2472890 - RNA, 19 nt, Artificial Sequence
  Description of Artificial Sequence: Synthetic oligonucleotide
ugugauggagugcggucuc

SEQ ID NO: 2472891 - RNA, 19 nt, Artificial Sequence
  Description of Artificial Sequence: Synthetic oligonucleotide
uggaucucgguuccgucau

SEQ ID NO: 2472892 - RNA, 19 nt, Artificial Sequence
  Description of Artificial Sequence: Synthetic oligonucleotide
ucccgcgaguuccagcacc

SEQ ID NO: 2472893 - RNA, 19 nt, Artificial Sequence
  Description of Artificial Sequence: Synthetic oligonucleotide
acacgcucuacuuccuugu

SEQ ID NO: 2472894 - RNA, 19 nt, Artificial Sequence
  Description of Artificial Sequence: Synthetic oligonucleotide
ucuugccucgggcaauccu

SEQ ID NO: 2472895 - RNA, 19 nt, Artificial Sequence
  Description of Artificial Sequence: Synthetic oligonucleotide
gaccucgacgccuuugauc

SEQ ID NO: 2472896 - RNA, 19 nt, Artificial Sequence
  Description of Artificial Sequence: Synthetic oligonucleotide
cuccagggaaaauggcagc

SEQ ID NO: 2472897 - RNA, 19 nt, Artificial Sequence
  Description of Artificial Sequence: Synthetic oligonucleotide
agggaaaauggcagcauca

SEQ ID NO: 2472898 - RNA, 19 nt, Artificial Sequence
  Description of Artificial Sequence: Synthetic oligonucleotide
acuuuguucuucuggucua

SEQ ID NO: 2472899 - RNA, 19 nt, Artificial Sequence
  Description of Artificial Sequence: Synthetic oligonucleotide
gauucgcaacauugagcug

SEQ ID NO: 2472900 - RNA, 19 nt, Artificial Sequence
  Description of Artificial Sequence: Synthetic oligonucleotide
ugcgagcgcagaaaccagu

SEQ ID NO: 2472901 - RNA, 19 nt, Artificial Sequence
  Description of Artificial Sequence: Synthetic oligonucleotide
acaggcgcaaugcagcaua

SEQ ID NO: 2472902 - RNA, 19 nt, Artificial Sequence
  Description of Artificial Sequence: Synthetic oligonucleotide
ucguggcccacugugaccu

SEQ ID NO: 2472903 - RNA, 19 nt, Artificial Sequence
  Description of Artificial Sequence: Synthetic oligonucleotide
ccauccacggcgaacgugc

SEQ ID NO: 2472904 - RNA, 19 nt, Artificial Sequence
  Description of Artificial Sequence: Synthetic oligonucleotide
ugcaguccuucccauccac

SEQ ID NO: 2472905 - RNA, 19 nt, Artificial Sequence
  Description of Artificial Sequence: Synthetic oligonucleotide
uugccucgggcaauccuug

SEQ ID NO: 2472906 - RNA, 19 nt, Artificial Sequence
  Description of Artificial Sequence: Synthetic oligonucleotide
cagggaaaauggcagcauc

SEQ ID NO: 2472907 - RNA, 19 nt, Artificial Sequence
  Description of Artificial Sequence: Synthetic oligonucleotide
augugauggagugcggucu

SEQ ID NO: 2472908 - RNA, 19 nt, Artificial Sequence
  Description of Artificial Sequence: Synthetic oligonucleotide
cuacaugagcuucggucac

SEQ ID NO: 2472909 - RNA, 19 nt, Artificial Sequence
  Description of Artificial Sequence: Synthetic oligonucleotide
uccggcguaaggccacuug

SEQ ID NO: 2472910 - RNA, 19 nt, Artificial Sequence
  Description of Artificial Sequence: Synthetic oligonucleotide
aacuccuuuaggacacgcu

SEQ ID NO: 2472911 - RNA, 19 nt, Artificial Sequence
  Description of Artificial Sequence: Synthetic oligonucleotide
agaggccucguggaucucg

SEQ ID NO: 2472912 - RNA, 19 nt, Artificial Sequence
  Description of Artificial Sequence: Synthetic oligonucleotide
cuuguucaccuugcagucc

SEQ ID NO: 2472913 - RNA, 19 nt, Artificial Sequence
  Description of Artificial Sequence: Synthetic oligonucleotide
accgcagaggccucgugga

SEQ ID NO: 2472914 - RNA, 19 nt, Artificial Sequence
  Description of Artificial Sequence: Synthetic oligonucleotide
gcggucucacacaugaagg

SEQ ID NO: 2472915 - RNA, 19 nt, Artificial Sequence
  Description of Artificial Sequence: Synthetic oligonucleotide
gguuggugaucuugccucg

SEQ ID NO: 2472916 - RNA, 19 nt, Artificial Sequence
  Description of Artificial Sequence: Synthetic oligonucleotide
cuuucccgcgaguuccagc

SEQ ID NO: 2472917 - RNA, 19 nt, Artificial Sequence
  Description of Artificial Sequence: Synthetic oligonucleotide
agggagcauggugacgccc

SEQ ID NO: 2472918 - RNA, 19 nt, Artificial Sequence
  Description of Artificial Sequence: Synthetic oligonucleotide
cuuggccccauggaacucc

SEQ ID NO: 2472919 - RNA, 19 nt, Artificial Sequence
  Description of Artificial Sequence: Synthetic oligonucleotide
caucguggaugugauggag

SEQ ID NO: 2472920 - RNA, 19 nt, Artificial Sequence
  Description of Artificial Sequence: Synthetic oligonucleotide
auugccccaaucccaucgu

SEQ ID NO: 2472921 - RNA, 19 nt, Artificial Sequence
  Description of Artificial Sequence: Synthetic oligonucleotide
caacauugagcugggccag

SEQ ID NO: 2472922 - RNA, 19 nt, Artificial Sequence
  Description of Artificial Sequence: Synthetic oligonucleotide
ugucccuugguguggucaa

SEQ ID NO: 2472923 - RNA, 19 nt, Artificial Sequence
  Description of Artificial Sequence: Synthetic oligonucleotide
acccuucacacagugcuug

SEQ ID NO: 2472924 - RNA, 19 nt, Artificial Sequence
  Description of Artificial Sequence: Synthetic oligonucleotide
agcauaagccgaugggcuu

SEQ ID NO: 2472925 - RNA, 19 nt, Artificial Sequence
  Description of Artificial Sequence: Synthetic oligonucleotide
gauggagugcggucucaca

SEQ ID NO: 2472926 - RNA, 19 nt, Artificial Sequence
  Description of Artificial Sequence: Synthetic oligonucleotide
guggaucucgguuccguca

SEQ ID NO: 2472927 - RNA, 19 nt, Artificial Sequence
  Description of Artificial Sequence: Synthetic oligonucleotide
uugccccaaucccaucgug

SEQ ID NO: 2472928 - RNA, 19 nt, Artificial Sequence
  Description of Artificial Sequence: Synthetic oligonucleotide
cugcaguuccggcguaagg

SEQ ID NO: 2472929 - RNA, 19 nt, Artificial Sequence
  Description of Artificial Sequence: Synthetic oligonucleotide
acaugcaucugagggacau

SEQ ID NO: 2472930 - RNA, 19 nt, Artificial Sequence
  Description of Artificial Sequence: Synthetic oligonucleotide
ggucucacacaugaaggcc

SEQ ID NO: 2472931 - RNA, 19 nt, Artificial Sequence
  Description of Artificial Sequence: Synthetic oligonucleotide
gcucaggugcaccaagacc

SEQ ID NO: 2472932 - RNA, 19 nt, Artificial Sequence
  Description of Artificial Sequence: Synthetic oligonucleotide
ugggagggagcauggugac

SEQ ID NO: 2472933 - RNA, 19 nt, Artificial Sequence
  Description of Artificial Sequence: Synthetic oligonucleotide
ggugcgagcgcagaaacca

SEQ ID NO: 2472934 - RNA, 19 nt, Artificial Sequence
  Description of Artificial Sequence: Synthetic oligonucleotide
cacacccuucacacagugc

SEQ ID NO: 2472935 - RNA, 19 nt, Artificial Sequence
  Description of Artificial Sequence: Synthetic oligonucleotide
guuggugaucuugccucgg

SEQ ID NO: 2472936 - RNA, 19 nt, Artificial Sequence
  Description of Artificial Sequence: Synthetic oligonucleotide
gaucuggaccucagccccg

SEQ ID NO: 2472937 - RNA, 19 nt, Artificial Sequence
  Description of Artificial Sequence: Synthetic oligonucleotide
ccauggaacuccuuuagga

SEQ ID NO: 2472938 - RNA, 19 nt, Artificial Sequence
  Description of Artificial Sequence: Synthetic oligonucleotide
uacuuucccgcgaguucca

SEQ ID NO: 2472939 - RNA, 19 nt, Artificial Sequence
  Description of Artificial Sequence: Synthetic oligonucleotide
ggugcggagccgugaaggg

SEQ ID NO: 2472940 - RNA, 19 nt, Artificial Sequence
  Description of Artificial Sequence: Synthetic oligonucleotide
ggucgugaccacuuuguuc

SEQ ID NO: 2472941 - RNA, 19 nt, Artificial Sequence
  Description of Artificial Sequence: Synthetic oligonucleotide
cgcaacauugagcugggcc

SEQ ID NO: 2472942 - RNA, 19 nt, Artificial Sequence
  Description of Artificial Sequence: Synthetic oligonucleotide
caccauugccccaauccca

SEQ ID NO: 2472943 - RNA, 19 nt, Artificial Sequence
  Description of Artificial Sequence: Synthetic oligonucleotide
gggcaauccuugcugauuc

SEQ ID NO: 2472944 - RNA, 19 nt, Artificial Sequence
  Description of Artificial Sequence: Synthetic oligonucleotide
uggcuucugcaguuccggc

SEQ ID NO: 2472945 - RNA, 19 nt, Artificial Sequence
  Description of Artificial Sequence: Synthetic oligonucleotide
uacaugagcuucggucaca

SEQ ID NO: 2472946 - RNA, 19 nt, Artificial Sequence
  Description of Artificial Sequence: Synthetic oligonucleotide
gugaccucgacgccuuuga

SEQ ID NO: 2472947 - RNA, 19 nt, Artificial Sequence
  Description of Artificial Sequence: Synthetic oligonucleotide
cagcaucaugauucgcaac

SEQ ID NO: 2472948 - RNA, 19 nt, Artificial Sequence
  Description of Artificial Sequence: Synthetic oligonucleotide
ugauggagugcggucucac

SEQ ID NO: 2472949 - RNA, 19 nt, Artificial Sequence
  Description of Artificial Sequence: Synthetic oligonucleotide
cccgccucggcucaggugc

SEQ ID NO: 2472950 - RNA, 19 nt, Artificial Sequence
  Description of Artificial Sequence: Synthetic oligonucleotide
ugguguggucaaucacaug

SEQ ID NO: 2472951 - RNA, 19 nt, Artificial Sequence
  Description of Artificial Sequence: Synthetic oligonucleotide
uccugcuuucgcucucgga

SEQ ID NO: 2472952 - RNA, 19 nt, Artificial Sequence
  Description of Artificial Sequence: Synthetic oligonucleotide
aggugcaccaagaccgcag

SEQ ID NO: 2472953 - RNA, 19 nt, Artificial Sequence
  Description of Artificial Sequence: Synthetic oligonucleotide
gugaucuugccucgggcaa

SEQ ID NO: 2472954 - RNA, 19 nt, Artificial Sequence
  Description of Artificial Sequence: Synthetic oligonucleotide
ucagccccgccucggcuca

SEQ ID NO: 2472955 - RNA, 19 nt, Artificial Sequence
  Description of Artificial Sequence: Synthetic oligonucleotide
aucguggaugugauggagu

SEQ ID NO: 2472956 - RNA, 19 nt, Artificial Sequence
  Description of Artificial Sequence: Synthetic oligonucleotide
uugaucacuuuggcugcga

SEQ ID NO: 2472957 - RNA, 19 nt, Artificial Sequence
  Description of Artificial Sequence: Synthetic oligonucleotide
uagacaccgcagccugaca

SEQ ID NO: 2472958 - RNA, 19 nt, Artificial Sequence
  Description of Artificial Sequence: Synthetic oligonucleotide
caucaggagcaaagaucug

SEQ ID NO: 2472959 - RNA, 19 nt, Artificial Sequence
  Description of Artificial Sequence: Synthetic oligonucleotide
ccgucauagacaccgcagc

SEQ ID NO: 2472960 - RNA, 19 nt, Artificial Sequence
  Description of Artificial Sequence: Synthetic oligonucleotide
caggccgcggugcggagcc

SEQ ID NO: 2472961 - RNA, 19 nt, Artificial Sequence
  Description of Artificial Sequence: Synthetic oligonucleotide
gaacgugcucagguucuug

SEQ ID NO: 2472962 - RNA, 19 nt, Artificial Sequence
  Description of Artificial Sequence: Synthetic oligonucleotide
augaaggccggggucguga

SEQ ID NO: 2472963 - RNA, 19 nt, Artificial Sequence
  Description of Artificial Sequence: Synthetic oligonucleotide
caugagcuucggucacacc

SEQ ID NO: 2472964 - RNA, 19 nt, Artificial Sequence
  Description of Artificial Sequence: Synthetic oligonucleotide
gcuucggucacacccuuca

SEQ ID NO: 2472965 - RNA, 19 nt, Artificial Sequence
  Description of Artificial Sequence: Synthetic oligonucleotide
gagggagcauggugacgcc

SEQ ID NO: 2472966 - RNA, 19 nt, Artificial Sequence
  Description of Artificial Sequence: Synthetic oligonucleotide
ucguggaucucgguuccgu

SEQ ID NO: 2472967 - RNA, 19 nt, Artificial Sequence
  Description of Artificial Sequence: Synthetic oligonucleotide
aucuugccucgggcaaucc

SEQ ID NO: 2472968 - RNA, 19 nt, Artificial Sequence
  Description of Artificial Sequence: Synthetic oligonucleotide
ugggcuucuuggccccaug

SEQ ID NO: 2472969 - RNA, 19 nt, Artificial Sequence
  Description of Artificial Sequence: Synthetic oligonucleotide
uuggccccauggaacuccu

SEQ ID NO: 2472970 - RNA, 19 nt, Artificial Sequence
  Description of Artificial Sequence: Synthetic oligonucleotide
gaaggccggggucgugacc

SEQ ID NO: 2472971 - RNA, 19 nt, Artificial Sequence
  Description of Artificial Sequence: Synthetic oligonucleotide
cagcauaagccgaugggcu

SEQ ID NO: 2472972 - RNA, 19 nt, Artificial Sequence
  Description of Artificial Sequence: Synthetic oligonucleotide
aggccacuugccacccucc

SEQ ID NO: 2472973 - RNA, 19 nt, Artificial Sequence
  Description of Artificial Sequence: Synthetic oligonucleotide
gugaccacuuuguucuucu

SEQ ID NO: 2472974 - RNA, 19 nt, Artificial Sequence
  Description of Artificial Sequence: Synthetic oligonucleotide
aucucgguuccgucauaga

SEQ ID NO: 2472975 - RNA, 19 nt, Artificial Sequence
  Description of Artificial Sequence: Synthetic oligonucleotide
ggcgaacgugcucagguuc

SEQ ID NO: 2472976 - RNA, 19 nt, Artificial Sequence
  Description of Artificial Sequence: Synthetic oligonucleotide
caagaccgcagaggccucg

SEQ ID NO: 2472977 - RNA, 19 nt, Artificial Sequence
  Description of Artificial Sequence: Synthetic oligonucleotide
ugaccucgacgccuuugau

SEQ ID NO: 2472978 - RNA, 19 nt, Artificial Sequence
  Description of Artificial Sequence: Synthetic oligonucleotide
ccugacggccgccauggcg

SEQ ID NO: 2472979 - RNA, 19 nt, Artificial Sequence
  Description of Artificial Sequence: Synthetic oligonucleotide
ccugcuuucgcucucggaa

SEQ ID NO: 2472980 - RNA, 19 nt, Artificial Sequence
  Description of Artificial Sequence: Synthetic oligonucleotide
gacgccccgagagcggugc

SEQ ID NO: 2472981 - RNA, 19 nt, Artificial Sequence
  Description of Artificial Sequence: Synthetic oligonucleotide
cccauggaacuccuuuagg

SEQ ID NO: 2472982 - RNA, 19 nt, Artificial Sequence
  Description of Artificial Sequence: Synthetic oligonucleotide
cuccuuuaggacacgcucu

SEQ ID NO: 2472983 - RNA, 19 nt, Artificial Sequence
  Description of Artificial Sequence: Synthetic oligonucleotide
cuucggucacacccuucac

SEQ ID NO: 2472984 - RNA, 19 nt, Artificial Sequence
  Description of Artificial Sequence: Synthetic oligonucleotide
guguggucaaucacaugca

SEQ ID NO: 2472985 - RNA, 19 nt, Artificial Sequence
  Description of Artificial Sequence: Synthetic oligonucleotide
acaccgcagccugacagca

SEQ ID NO: 2472986 - RNA, 19 nt, Artificial Sequence
  Description of Artificial Sequence: Synthetic oligonucleotide
accagucucggcgccacca

SEQ ID NO: 2472987 - RNA, 19 nt, Artificial Sequence
  Description of Artificial Sequence: Synthetic oligonucleotide
aagaccgcagaggccucgu

SEQ ID NO: 2472988 - RNA, 19 nt, Artificial Sequence
  Description of Artificial Sequence: Synthetic oligonucleotide
ucgacgccuuugaucacuu

SEQ ID NO: 2472989 - RNA, 19 nt, Artificial Sequence
  Description of Artificial Sequence: Synthetic oligonucleotide
ugcuuggcacccagggcuu

SEQ ID NO: 2472990 - RNA, 19 nt, Artificial Sequence
  Description of Artificial Sequence: Synthetic oligonucleotide
ggcguaaggccacuugcca

SEQ ID NO: 2472991 - RNA, 19 nt, Artificial Sequence
  Description of Artificial Sequence: Synthetic oligonucleotide
ggagcauggugacgccccg

SEQ ID NO: 2472992 - RNA, 19 nt, Artificial Sequence
  Description of Artificial Sequence: Synthetic oligonucleotide
cccaaucccaucguggaug

SEQ ID NO: 2472993 - RNA, 19 nt, Artificial Sequence
  Description of Artificial Sequence: Synthetic oligonucleotide
ugcgcgcugggagggagca

SEQ ID NO: 2472994 - RNA, 19 nt, Artificial Sequence
  Description of Artificial Sequence: Synthetic oligonucleotide
ucccaucguggaugugaug

SEQ ID NO: 2472995 - RNA, 19 nt, Artificial Sequence
  Description of Artificial Sequence: Synthetic oligonucleotide
gcguaaggccacuugccac

SEQ ID NO: 2472996 - RNA, 19 nt, Artificial Sequence
  Description of Artificial Sequence: Synthetic oligonucleotide
cuucaccauugccccaauc

SEQ ID NO: 2472997 - RNA, 19 nt, Artificial Sequence
  Description of Artificial Sequence: Synthetic oligonucleotide
cacccagggcuuugauggc

SEQ ID NO: 2472998 - RNA, 19 nt, Artificial Sequence
  Description of Artificial Sequence: Synthetic oligonucleotide
ccggcguaaggccacuugc

SEQ ID NO: 2472999 - RNA, 19 nt, Artificial Sequence
  Description of Artificial Sequence: Synthetic oligonucleotide
gaccucagccccgccucgg

SEQ ID NO: 2473000 - RNA, 19 nt, Artificial Sequence
  Description of Artificial Sequence: Synthetic oligonucleotide
gggagcauggugacgcccc

SEQ ID NO: 2473001 - RNA, 19 nt, Artificial Sequence
  Description of Artificial Sequence: Synthetic oligonucleotide
uaaggccacuugccacccu

SEQ ID NO: 2473002 - RNA, 19 nt, Artificial Sequence
  Description of Artificial Sequence: Synthetic oligonucleotide
agcccugacggccgccaug

SEQ ID NO: 2473003 - RNA, 19 nt, Artificial Sequence
  Description of Artificial Sequence: Synthetic oligonucleotide
ggcucaggugcaccaagac

SEQ ID NO: 2473004 - RNA, 19 nt, Artificial Sequence
  Description of Artificial Sequence: Synthetic oligonucleotide
ggagccgugaagggcugcg

SEQ ID NO: 2473005 - RNA, 19 nt, Artificial Sequence
  Description of Artificial Sequence: Synthetic oligonucleotide
cggucucacacaugaaggc

SEQ ID NO: 2473006 - RNA, 19 nt, Artificial Sequence
  Description of Artificial Sequence: Synthetic oligonucleotide
gcgaggacaggcgcaaugc

SEQ ID NO: 2473007 - RNA, 19 nt, Artificial Sequence
  Description of Artificial Sequence: Synthetic oligonucleotide
cauagacaccgcagccuga

SEQ ID NO: 2473008 - RNA, 19 nt, Artificial Sequence
  Description of Artificial Sequence: Synthetic oligonucleotide
acuuucccgcgaguuccag

SEQ ID NO: 2473009 - RNA, 19 nt, Artificial Sequence
  Description of Artificial Sequence: Synthetic oligonucleotide
uuggcacccagggcuuuga

SEQ ID NO: 2473010 - RNA, 19 nt, Artificial Sequence
  Description of Artificial Sequence: Synthetic oligonucleotide
uucccgcgaguuccagcac

SEQ ID NO: 2473011 - RNA, 19 nt, Artificial Sequence
  Description of Artificial Sequence: Synthetic oligonucleotide
ccucgggcaauccuugcug

SEQ ID NO: 2473012 - RNA, 19 nt, Artificial Sequence
  Description of Artificial Sequence: Synthetic oligonucleotide
agaccgcagaggccucgug

SEQ ID NO: 2473013 - RNA, 19 nt, Artificial Sequence
  Description of Artificial Sequence: Synthetic oligonucleotide
guuccgucauagacaccgc

SEQ ID NO: 2473014 - RNA, 19 nt, Artificial Sequence
  Description of Artificial Sequence: Synthetic oligonucleotide
ucccauccacggcgaacgu

SEQ ID NO: 2473015 - RNA, 19 nt, Artificial Sequence
  Description of Artificial Sequence: Synthetic oligonucleotide
gcccugacggccgccaugg

SEQ ID NO: 2473016 - RNA, 19 nt, Artificial Sequence
  Description of Artificial Sequence: Synthetic oligonucleotide
aggcgcaaugcagcauaag

SEQ ID NO: 2473017 - RNA, 19 nt, Artificial Sequence
  Description of Artificial Sequence: Synthetic oligonucleotide
agagcggugcgagcgcaga

SEQ ID NO: 2473018 - RNA, 19 nt, Artificial Sequence
  Description of Artificial Sequence: Synthetic oligonucleotide
gagagcggugcgagcgcag

SEQ ID NO: 2473019 - RNA, 19 nt, Artificial Sequence
  Description of Artificial Sequence: Synthetic oligonucleotide
acaugaaggccggggucgu

SEQ ID NO: 2473020 - RNA, 19 nt, Artificial Sequence
  Description of Artificial Sequence: Synthetic oligonucleotide
gcaccaacgccacccuggc

SEQ ID NO: 2473021 - RNA, 19 nt, Artificial Sequence
  Description of Artificial Sequence: Synthetic oligonucleotide
ggacaggcgcaaugcagca

SEQ ID NO: 2473022 - RNA, 19 nt, Artificial Sequence
  Description of Artificial Sequence: Synthetic oligonucleotide
ucuuggccccauggaacuc

SEQ ID NO: 2473023 - RNA, 19 nt, Artificial Sequence
  Description of Artificial Sequence: Synthetic oligonucleotide
agcggugcgagcgcagaaa

SEQ ID NO: 2473024 - RNA, 19 nt, Artificial Sequence
  Description of Artificial Sequence: Synthetic oligonucleotide
ggaacuccuuuaggacacg

SEQ ID NO: 2473025 - RNA, 19 nt, Artificial Sequence
  Description of Artificial Sequence: Synthetic oligonucleotide
agcuucggucacacccuuc

SEQ ID NO: 2473026 - RNA, 19 nt, Artificial Sequence
  Description of Artificial Sequence: Synthetic oligonucleotide
cucguggaucucgguuccg

SEQ ID NO: 2473027 - RNA, 19 nt, Artificial Sequence
  Description of Artificial Sequence: Synthetic oligonucleotide
gcauaagccgaugggcuuc

SEQ ID NO: 2473028 - RNA, 19 nt, Artificial Sequence
  Description of Artificial Sequence: Synthetic oligonucleotide
gcgcagaaaccagucucgg

SEQ ID NO: 2473029 - RNA, 19 nt, Artificial Sequence
  Description of Artificial Sequence: Synthetic oligonucleotide
gcggugcgagcgcagaaac

SEQ ID NO: 2473030 - RNA, 19 nt, Artificial Sequence
  Description of Artificial Sequence: Synthetic oligonucleotide
ucggcgccaccagagcccu

SEQ ID NO: 2473031 - RNA, 19 nt, Artificial Sequence
  Description of Artificial Sequence: Synthetic oligonucleotide
gcagccugacagcaccaac

SEQ ID NO: 2473032 - RNA, 19 nt, Artificial Sequence
  Description of Artificial Sequence: Synthetic oligonucleotide
gccugacagcaccaacgcc

SEQ ID NO: 2473033 - RNA, 19 nt, Artificial Sequence
  Description of Artificial Sequence: Synthetic oligonucleotide
cugcgcgcugggagggagc

SEQ ID NO: 2473034 - RNA, 19 nt, Artificial Sequence
  Description of Artificial Sequence: Synthetic oligonucleotide
aggccggggucgugaccac

SEQ ID NO: 2473035 - RNA, 19 nt, Artificial Sequence
  Description of Artificial Sequence: Synthetic oligonucleotide
ggugacgccccgagagcgg

SEQ ID NO: 2473036 - RNA, 19 nt, Artificial Sequence
  Description of Artificial Sequence: Synthetic oligonucleotide
cacggcgaacgugcucagg

SEQ ID NO: 2473037 - RNA, 19 nt, Artificial Sequence
  Description of Artificial Sequence: Synthetic oligonucleotide
ccuucacacagugcuuggc

SEQ ID NO: 2473038 - RNA, 19 nt, Artificial Sequence
  Description of Artificial Sequence: Synthetic oligonucleotide
caccgcagccugacagcac

SEQ ID NO: 2473039 - RNA, 19 nt, Artificial Sequence
  Description of Artificial Sequence: Synthetic oligonucleotide
gagugcggucucacacaug

SEQ ID NO: 2473040 - RNA, 19 nt, Artificial Sequence
  Description of Artificial Sequence: Synthetic oligonucleotide
gcagaggccucguggaucu

SEQ ID NO: 2473041 - RNA, 19 nt, Artificial Sequence
  Description of Artificial Sequence: Synthetic oligonucleotide
cggcguaaggccacuugcc

SEQ ID NO: 2473042 - RNA, 19 nt, Artificial Sequence
  Description of Artificial Sequence: Synthetic oligonucleotide
gagcggugcgagcgcagaa

SEQ ID NO: 2473043 - RNA, 19 nt, Artificial Sequence
  Description of Artificial Sequence: Synthetic oligonucleotide
gcuuucgcucucggaaggc

SEQ ID NO: 2473044 - RNA, 19 nt, Artificial Sequence
  Description of Artificial Sequence: Synthetic oligonucleotide
ucgcaacauugagcugggc

SEQ ID NO: 2473045 - RNA, 19 nt, Artificial Sequence
  Description of Artificial Sequence: Synthetic oligonucleotide
acgccccgagagcggugcg

SEQ ID NO: 2473046 - RNA, 19 nt, Artificial Sequence
  Description of Artificial Sequence: Synthetic oligonucleotide
ccaacgccacccuggcccc

SEQ ID NO: 2473047 - RNA, 19 nt, Artificial Sequence
  Description of Artificial Sequence: Synthetic oligonucleotide
cggugcggagccgugaagg

SEQ ID NO: 2473048 - RNA, 19 nt, Artificial Sequence
  Description of Artificial Sequence: Synthetic oligonucleotide
cacaugcaucugagggaca

SEQ ID NO: 2473049 - RNA, 19 nt, Artificial Sequence
  Description of Artificial Sequence: Synthetic oligonucleotide
ucgugaccacuuuguucuu

SEQ ID NO: 2473050 - RNA, 19 nt, Artificial Sequence
  Description of Artificial Sequence: Synthetic oligonucleotide
gugauggagugcggucuca

SEQ ID NO: 2473051 - RNA, 19 nt, Artificial Sequence
  Description of Artificial Sequence: Synthetic oligonucleotide
ggaugugauggagugcggu

SEQ ID NO: 2473052 - RNA, 19 nt, Artificial Sequence
  Description of Artificial Sequence: Synthetic oligonucleotide
caggcgcaaugcagcauaa

SEQ ID NO: 2473053 - RNA, 19 nt, Artificial Sequence
  Description of Artificial Sequence: Synthetic oligonucleotide
cuuucgcucucggaaggcu

SEQ ID NO: 2473054 - RNA, 19 nt, Artificial Sequence
  Description of Artificial Sequence: Synthetic oligonucleotide
cacugugaccucgacgccu

SEQ ID NO: 2473055 - RNA, 19 nt, Artificial Sequence
  Description of Artificial Sequence: Synthetic oligonucleotide
cucgacgccuuugaucacu

SEQ ID NO: 2473056 - RNA, 19 nt, Artificial Sequence
  Description of Artificial Sequence: Synthetic oligonucleotide
gcgagcgcagaaaccaguc

SEQ ID NO: 2473057 - RNA, 19 nt, Artificial Sequence
  Description of Artificial Sequence: Synthetic oligonucleotide
cccuugguguggucaauca

SEQ ID NO: 2473058 - RNA, 19 nt, Artificial Sequence
  Description of Artificial Sequence: Synthetic oligonucleotide
ggagugcggucucacacau

SEQ ID NO: 2473059 - RNA, 19 nt, Artificial Sequence
  Description of Artificial Sequence: Synthetic oligonucleotide
ucgcucucggaaggcuguc

SEQ ID NO: 2473060 - RNA, 19 nt, Artificial Sequence
  Description of Artificial Sequence: Synthetic oligonucleotide
gcgaguuccagcaccuucu

SEQ ID NO: 2473061 - RNA, 19 nt, Artificial Sequence
  Description of Artificial Sequence: Synthetic oligonucleotide
ccuuuaggacacgcucuac

SEQ ID NO: 2473062 - RNA, 19 nt, Artificial Sequence
  Description of Artificial Sequence: Synthetic oligonucleotide
ggcgccaccagagcccuga

SEQ ID NO: 2473063 - RNA, 19 nt, Artificial Sequence
  Description of Artificial Sequence: Synthetic oligonucleotide
cucucggaaggcugucccu

SEQ ID NO: 2473064 - RNA, 19 nt, Artificial Sequence
  Description of Artificial Sequence: Synthetic oligonucleotide
gccccgagagcggugcgag

SEQ ID NO: 2473065 - RNA, 19 nt, Artificial Sequence
  Description of Artificial Sequence: Synthetic oligonucleotide
cguggaugugauggagugc

SEQ ID NO: 2473066 - RNA, 19 nt, Artificial Sequence
  Description of Artificial Sequence: Synthetic oligonucleotide
gccccauggaacuccuuua

SEQ ID NO: 2473067 - RNA, 19 nt, Artificial Sequence
  Description of Artificial Sequence: Synthetic oligonucleotide
gacggccgccauggcgaag

SEQ ID NO: 2473068 - RNA, 19 nt, Artificial Sequence
  Description of Artificial Sequence: Synthetic oligonucleotide
ggggucgugaccacuuugu

SEQ ID NO: 2473069 - RNA, 19 nt, Artificial Sequence
  Description of Artificial Sequence: Synthetic oligonucleotide
agccccgccucggcucagg

SEQ ID NO: 2473070 - RNA, 19 nt, Artificial Sequence
  Description of Artificial Sequence: Synthetic oligonucleotide
cauaagccgaugggcuucu

SEQ ID NO: 2473071 - RNA, 19 nt, Artificial Sequence
  Description of Artificial Sequence: Synthetic oligonucleotide
cuugcucguggcccacugu

SEQ ID NO: 2473072 - RNA, 19 nt, Artificial Sequence
  Description of Artificial Sequence: Synthetic oligonucleotide
ccgagagcggugcgagcgc

SEQ ID NO: 2473073 - RNA, 19 nt, Artificial Sequence
  Description of Artificial Sequence: Synthetic oligonucleotide
cguggaucucgguuccguc

SEQ ID NO: 2473074 - RNA, 19 nt, Artificial Sequence
  Description of Artificial Sequence: Synthetic oligonucleotide
ggccccauggaacuccuuu

SEQ ID NO: 2473075 - RNA, 19 nt, Artificial Sequence
  Description of Artificial Sequence: Synthetic oligonucleotide
cggugcgagcgcagaaacc

SEQ ID NO: 2473076 - RNA, 19 nt, Artificial Sequence
  Description of Artificial Sequence: Synthetic oligonucleotide
gcauggugacgccccgaga

SEQ ID NO: 2473077 - RNA, 19 nt, Artificial Sequence
  Description of Artificial Sequence: Synthetic oligonucleotide
gcggugcggagccgugaag

SEQ ID NO: 2473078 - RNA, 19 nt, Artificial Sequence
  Description of Artificial Sequence: Synthetic oligonucleotide
gagcuucggucacacccuu

SEQ ID NO: 2473079 - RNA, 19 nt, Artificial Sequence
  Description of Artificial Sequence: Synthetic oligonucleotide
gacaggcgcaaugcagcau

SEQ ID NO: 2473080 - RNA, 19 nt, Artificial Sequence
  Description of Artificial Sequence: Synthetic oligonucleotide
cccauccacggcgaacgug

SEQ ID NO: 2473081 - RNA, 19 nt, Artificial Sequence
  Description of Artificial Sequence: Synthetic oligonucleotide
uggccccauggaacuccuu

SEQ ID NO: 2473082 - RNA, 19 nt, Artificial Sequence
  Description of Artificial Sequence: Synthetic oligonucleotide
ggcugcgaggacaggcgca

SEQ ID NO: 2473083 - RNA, 19 nt, Artificial Sequence
  Description of Artificial Sequence: Synthetic oligonucleotide
cgcgcugggagggagcaug

SEQ ID NO: 2473084 - RNA, 19 nt, Artificial Sequence
  Description of Artificial Sequence: Synthetic oligonucleotide
ggucuacaugagcuucggu

SEQ ID NO: 2473085 - RNA, 19 nt, Artificial Sequence
  Description of Artificial Sequence: Synthetic oligonucleotide
gucacacccuucacacagu

SEQ ID NO: 2473086 - RNA, 19 nt, Artificial Sequence
  Description of Artificial Sequence: Synthetic oligonucleotide
cauccacggcgaacgugcu

SEQ ID NO: 2473087 - RNA, 19 nt, Artificial Sequence
  Description of Artificial Sequence: Synthetic oligonucleotide
uuccggcguaaggccacuu

SEQ ID NO: 2473088 - RNA, 19 nt, Artificial Sequence
  Description of Artificial Sequence: Synthetic oligonucleotide
cucggcucaggugcaccaa

SEQ ID NO: 2473089 - RNA, 19 nt, Artificial Sequence
  Description of Artificial Sequence: Synthetic oligonucleotide
ccaagaccgcagaggccuc

SEQ ID NO: 2473090 - RNA, 19 nt, Artificial Sequence
  Description of Artificial Sequence: Synthetic oligonucleotide
gccucggcucaggugcacc

SEQ ID NO: 2473091 - RNA, 19 nt, Artificial Sequence
  Description of Artificial Sequence: Synthetic oligonucleotide
gcaucaugauucgcaacau

SEQ ID NO: 2473092 - RNA, 19 nt, Artificial Sequence
  Description of Artificial Sequence: Synthetic oligonucleotide
gugacgccccgagagcggu

SEQ ID NO: 2473093 - RNA, 19 nt, Artificial Sequence
  Description of Artificial Sequence: Synthetic oligonucleotide
gcgaacgugcucagguucu

SEQ ID NO: 2473094 - RNA, 19 nt, Artificial Sequence
  Description of Artificial Sequence: Synthetic oligonucleotide
ggccucguggaucucgguu

SEQ ID NO: 2473095 - RNA, 19 nt, Artificial Sequence
  Description of Artificial Sequence: Synthetic oligonucleotide
cacccuccucuugcucgug

SEQ ID NO: 2473096 - RNA, 19 nt, Artificial Sequence
  Description of Artificial Sequence: Synthetic oligonucleotide
ggcccacugugaccucgac

SEQ ID NO: 2473097 - RNA, 19 nt, Artificial Sequence
  Description of Artificial Sequence: Synthetic oligonucleotide
gccucgggcaauccuugcu

SEQ ID NO: 2473098 - RNA, 19 nt, Artificial Sequence
  Description of Artificial Sequence: Synthetic oligonucleotide
cggggucgugaccacuuug

SEQ ID NO: 2473099 - RNA, 19 nt, Artificial Sequence
  Description of Artificial Sequence: Synthetic oligonucleotide
cgugaccacuuuguucuuc

SEQ ID NO: 2473100 - RNA, 19 nt, Artificial Sequence
  Description of Artificial Sequence: Synthetic oligonucleotide
cacccuucacacagugcuu

SEQ ID NO: 2473101 - RNA, 19 nt, Artificial Sequence
  Description of Artificial Sequence: Synthetic oligonucleotide
auaagccgaugggcuucuu

SEQ ID NO: 2473102 - RNA, 19 nt, Artificial Sequence
  Description of Artificial Sequence: Synthetic oligonucleotide
ccacggcgaacgugcucag

SEQ ID NO: 2473103 - RNA, 19 nt, Artificial Sequence
  Description of Artificial Sequence: Synthetic oligonucleotide
ccucgacgccuuugaucac

SEQ ID NO: 2473104 - RNA, 19 nt, Artificial Sequence
  Description of Artificial Sequence: Synthetic oligonucleotide
ggaucucgguuccgucaua

SEQ ID NO: 2473105 - RNA, 19 nt, Artificial Sequence
  Description of Artificial Sequence: Synthetic oligonucleotide
gugcggucucacacaugaa

SEQ ID NO: 2473106 - RNA, 19 nt, Artificial Sequence
  Description of Artificial Sequence: Synthetic oligonucleotide
cacgcucuacuuccuuguu

SEQ ID NO: 2473107 - RNA, 19 nt, Artificial Sequence
  Description of Artificial Sequence: Synthetic oligonucleotide
aggccgcggugcggagccg

SEQ ID NO: 2473108 - RNA, 19 nt, Artificial Sequence
  Description of Artificial Sequence: Synthetic oligonucleotide
cgugaagggcugcgcgcug

SEQ ID NO: 2473109 - RNA, 19 nt, Artificial Sequence
  Description of Artificial Sequence: Synthetic oligonucleotide
cgcucucggaaggcugucc

SEQ ID NO: 2473110 - RNA, 19 nt, Artificial Sequence
  Description of Artificial Sequence: Synthetic oligonucleotide
gggucgugaccacuuuguu

SEQ ID NO: 2473111 - RNA, 19 nt, Artificial Sequence
  Description of Artificial Sequence: Synthetic oligonucleotide
ccccgagagcggugcgagc

SEQ ID NO: 2473112 - RNA, 19 nt, Artificial Sequence
  Description of Artificial Sequence: Synthetic oligonucleotide
ggacacgcucuacuuccuu

SEQ ID NO: 2473113 - RNA, 19 nt, Artificial Sequence
  Description of Artificial Sequence: Synthetic oligonucleotide
guuccggcguaaggccacu

SEQ ID NO: 2473114 - RNA, 19 nt, Artificial Sequence
  Description of Artificial Sequence: Synthetic oligonucleotide
cagaggccucguggaucuc

SEQ ID NO: 2473115 - RNA, 19 nt, Artificial Sequence
  Description of Artificial Sequence: Synthetic oligonucleotide
gcggagccgugaagggcug

SEQ ID NO: 2473116 - RNA, 19 nt, Artificial Sequence
  Description of Artificial Sequence: Synthetic oligonucleotide
cccgcgaguuccagcaccu

SEQ ID NO: 2473117 - RNA, 19 nt, Artificial Sequence
  Description of Artificial Sequence: Synthetic oligonucleotide
caacgccacccuggcccca

SEQ ID NO: 2473118 - RNA, 19 nt, Artificial Sequence
  Description of Artificial Sequence: Synthetic oligonucleotide
ccgcagccugacagcacca

SEQ ID NO: 2473119 - RNA, 19 nt, Artificial Sequence
  Description of Artificial Sequence: Synthetic oligonucleotide
cgguuccgucauagacacc

SEQ ID NO: 2473120 - RNA, 19 nt, Artificial Sequence
  Description of Artificial Sequence: Synthetic oligonucleotide
cucuugcucguggcccacu

SEQ ID NO: 2473121 - RNA, 19 nt, Artificial Sequence
  Description of Artificial Sequence: Synthetic oligonucleotide
ggcugucccuugguguggu

SEQ ID NO: 2473122 - RNA, 19 nt, Artificial Sequence
  Description of Artificial Sequence: Synthetic oligonucleotide
gucccuugguguggucaau

SEQ ID NO: 2473123 - RNA, 19 nt, Artificial Sequence
  Description of Artificial Sequence: Synthetic oligonucleotide
cacuugccacccuccucuu

SEQ ID NO: 2473124 - RNA, 19 nt, Artificial Sequence
  Description of Artificial Sequence: Synthetic oligonucleotide
cgagcgcagaaaccagucu

SEQ ID NO: 2473125 - RNA, 19 nt, Artificial Sequence
  Description of Artificial Sequence: Synthetic oligonucleotide
cagccccgccucggcucag

SEQ ID NO: 2473126 - RNA, 19 nt, Artificial Sequence
  Description of Artificial Sequence: Synthetic oligonucleotide
gccgcggugcggagccgug

SEQ ID NO: 2473127 - RNA, 19 nt, Artificial Sequence
  Description of Artificial Sequence: Synthetic oligonucleotide
ccgugaagggcugcgcgcu

SEQ ID NO: 2473128 - RNA, 19 nt, Artificial Sequence
  Description of Artificial Sequence: Synthetic oligonucleotide
cgagagcggugcgagcgca

SEQ ID NO: 2473129 - RNA, 19 nt, Artificial Sequence
  Description of Artificial Sequence: Synthetic oligonucleotide
cgcggugcggagccgugaa

SEQ ID NO: 2473130 - RNA, 19 nt, Artificial Sequence
  Description of Artificial Sequence: Synthetic oligonucleotide
gccggggucgugaccacuu

SEQ ID NO: 2473131 - RNA, 19 nt, Artificial Sequence
  Description of Artificial Sequence: Synthetic oligonucleotide
ccucagccccgccucggcu

SEQ ID NO: 2473132 - RNA, 19 nt, Artificial Sequence
  Description of Artificial Sequence: Synthetic oligonucleotide
ggccgcggugcggagccgu

SEQ ID NO: 2473133 - RNA, 19 nt, Artificial Sequence
  Description of Artificial Sequence: Synthetic oligonucleotide
ccuggccccaggccgcggu

SEQ ID NO: 2473134 - RNA, 19 nt, Artificial Sequence
  Description of Artificial Sequence: Synthetic oligonucleotide
cugcgaggacaggcgcaau

SEQ ID NO: 2473135 - RNA, 19 nt, Artificial Sequence
  Description of Artificial Sequence: Synthetic oligonucleotide
cgaguuccagcaccuucuu

SEQ ID NO: 2473136 - RNA, 19 nt, Artificial Sequence
  Description of Artificial Sequence: Synthetic oligonucleotide
ccgcggugcggagccguga

SEQ ID NO: 2473137 - RNA, 19 nt, Artificial Sequence
  Description of Artificial Sequence: Synthetic oligonucleotide
cgggcaauccuugcugauu

SEQ ID NO: 2473138 - RNA, 19 nt, Artificial Sequence
  Description of Artificial Sequence: Synthetic oligonucleotide
ccgcagaggccucguggau

SEQ ID NO: 2473139 - RNA, 19 nt, Artificial Sequence
  Description of Artificial Sequence: Synthetic oligonucleotide
cgccucggcucaggugcac

SEQ ID NO: 2473140 - RNA, 19 nt, Artificial Sequence
  Description of Artificial Sequence: Synthetic oligonucleotide
cgccccgagagcggugcga

SEQ ID NO: 2473141 - RNA, 19 nt, Artificial Sequence
  Description of Artificial Sequence: Synthetic oligonucleotide
cggcgaacgugcucagguu

SEQ ID NO: 2473142 - RNA, 19 nt, Artificial Sequence
  Description of Artificial Sequence: Synthetic oligonucleotide
ccggggucgugaccacuuu

SEQ ID NO: 2473143 - RNA, 19 nt, Artificial Sequence
  Description of Artificial Sequence: Synthetic oligonucleotide
cggcgccaccagagcccug

SEQ ID NO: 2473144 - RNA, 19 nt, Artificial Sequence
  Description of Artificial Sequence: Synthetic oligonucleotide
cgacgccuuugaucacuuu

SEQ ID NO: 2473145 - RNA, 19 nt, Artificial Sequence
  Description of Artificial Sequence: Synthetic oligonucleotide
ccgcgaguuccagcaccuu

SEQ ID NO: 2473146 - RNA, 19 nt, Artificial Sequence
  Description of Artificial Sequence: Synthetic oligonucleotide
ugauguucuguuaagaucc

SEQ ID NO: 2473147 - RNA, 19 nt, Artificial Sequence
  Description of Artificial Sequence: Synthetic oligonucleotide
aguguagagacccaaaggg

SEQ ID NO: 2473148 - RNA, 19 nt, Artificial Sequence
  Description of Artificial Sequence: Synthetic oligonucleotide
uaguaguuuagcauggucg

SEQ ID NO: 2473149 - RNA, 19 nt, Artificial Sequence
  Description of Artificial Sequence: Synthetic oligonucleotide
uaaagcgugccccagauag

SEQ ID NO: 2473150 - RNA, 19 nt, Artificial Sequence
  Description of Artificial Sequence: Synthetic oligonucleotide
aguaguuuagcauggucgc

SEQ ID NO: 2473151 - RNA, 19 nt, Artificial Sequence
  Description of Artificial Sequence: Synthetic oligonucleotide
uuuaaaagccccauguucu

SEQ ID NO: 2473152 - RNA, 19 nt, Artificial Sequence
  Description of Artificial Sequence: Synthetic oligonucleotide
guuaucacgccauacauag

SEQ ID NO: 2473153 - RNA, 19 nt, Artificial Sequence
  Description of Artificial Sequence: Synthetic oligonucleotide
agugcagaaaggcagguac

SEQ ID NO: 2473154 - RNA, 19 nt, Artificial Sequence
  Description of Artificial Sequence: Synthetic oligonucleotide
uacauaguaguuuagcaug

SEQ ID NO: 2473155 - RNA, 19 nt, Artificial Sequence
  Description of Artificial Sequence: Synthetic oligonucleotide
uuaaagacuuuauuuagcu

SEQ ID NO: 2473156 - RNA, 19 nt, Artificial Sequence
  Description of Artificial Sequence: Synthetic oligonucleotide
aaaguaggcgcccaugaag

SEQ ID NO: 2473157 - RNA, 19 nt, Artificial Sequence
  Description of Artificial Sequence: Synthetic oligonucleotide
ucuuuccagaccauguagg

SEQ ID NO: 2473158 - RNA, 19 nt, Artificial Sequence
  Description of Artificial Sequence: Synthetic oligonucleotide
uauuuagcuuuaaaagccc

SEQ ID NO: 2473159 - RNA, 19 nt, Artificial Sequence
  Description of Artificial Sequence: Synthetic oligonucleotide
uguucuuagggcaugccug

SEQ ID NO: 2473160 - RNA, 19 nt, Artificial Sequence
  Description of Artificial Sequence: Synthetic oligonucleotide
aaguaggcgcccaugaagc

SEQ ID NO: 2473161 - RNA, 19 nt, Artificial Sequence
  Description of Artificial Sequence: Synthetic oligonucleotide
uguagagacccaaagggac

SEQ ID NO: 2473162 - RNA, 19 nt, Artificial Sequence
  Description of Artificial Sequence: Synthetic oligonucleotide
ucaagacccagguagacca

SEQ ID NO: 2473163 - RNA, 19 nt, Artificial Sequence
  Description of Artificial Sequence: Synthetic oligonucleotide
uuagcauggucgcaaaggc

SEQ ID NO: 2473164 - RNA, 19 nt, Artificial Sequence
  Description of Artificial Sequence: Synthetic oligonucleotide
cauguaggagccauaaccc

SEQ ID NO: 2473165 - RNA, 19 nt, Artificial Sequence
  Description of Artificial Sequence: Synthetic oligonucleotide
uuccagaccauguaggagc

SEQ ID NO: 2473166 - RNA, 19 nt, Artificial Sequence
  Description of Artificial Sequence: Synthetic oligonucleotide
guaaggguagagcaggcgg

SEQ ID NO: 2473167 - RNA, 19 nt, Artificial Sequence
  Description of Artificial Sequence: Synthetic oligonucleotide
ugugaagccucccagcucu

SEQ ID NO: 2473168 - RNA, 19 nt, Artificial Sequence
  Description of Artificial Sequence: Synthetic oligonucleotide
agaaggucugccaaggccc

SEQ ID NO: 2473169 - RNA, 19 nt, Artificial Sequence
  Description of Artificial Sequence: Synthetic oligonucleotide
agcuuuaaaagccccaugu

SEQ ID NO: 2473170 - RNA, 19 nt, Artificial Sequence
  Description of Artificial Sequence: Synthetic oligonucleotide
aggauggagccauagcuac

SEQ ID NO: 2473171 - RNA, 19 nt, Artificial Sequence
  Description of Artificial Sequence: Synthetic oligonucleotide
aagcaugaugcccaccauc

SEQ ID NO: 2473172 - RNA, 19 nt, Artificial Sequence
  Description of Artificial Sequence: Synthetic oligonucleotide
uaaggguagagcaggcggg

SEQ ID NO: 2473173 - RNA, 19 nt, Artificial Sequence
  Description of Artificial Sequence: Synthetic oligonucleotide
aaaggcagguacaaguguc

SEQ ID NO: 2473174 - RNA, 19 nt, Artificial Sequence
  Description of Artificial Sequence: Synthetic oligonucleotide
auaguaguuuagcaugguc

SEQ ID NO: 2473175 - RNA, 19 nt, Artificial Sequence
  Description of Artificial Sequence: Synthetic oligonucleotide
uuuagcuuuaaaagcccca

SEQ ID NO: 2473176 - RNA, 19 nt, Artificial Sequence
  Description of Artificial Sequence: Synthetic oligonucleotide
aauaaagcgugccccagau

SEQ ID NO: 2473177 - RNA, 19 nt, Artificial Sequence
  Description of Artificial Sequence: Synthetic oligonucleotide
aagccucccagcucuuucc

SEQ ID NO: 2473178 - RNA, 19 nt, Artificial Sequence
  Description of Artificial Sequence: Synthetic oligonucleotide
agcaugaugcccaccaucc

SEQ ID NO: 2473179 - RNA, 19 nt, Artificial Sequence
  Description of Artificial Sequence: Synthetic oligonucleotide
auacauaguaguuuagcau

SEQ ID NO: 2473180 - RNA, 19 nt, Artificial Sequence
  Description of Artificial Sequence: Synthetic oligonucleotide
cauggcugaauaaagcgug

SEQ ID NO: 2473181 - RNA, 19 nt, Artificial Sequence
  Description of Artificial Sequence: Synthetic oligonucleotide
agccccauguucuuagggc

SEQ ID NO: 2473182 - RNA, 19 nt, Artificial Sequence
  Description of Artificial Sequence: Synthetic oligonucleotide
guugcuaccccacugacga

SEQ ID NO: 2473183 - RNA, 19 nt, Artificial Sequence
  Description of Artificial Sequence: Synthetic oligonucleotide
ggucaugaaagcaugaugc

SEQ ID NO: 2473184 - RNA, 19 nt, Artificial Sequence
  Description of Artificial Sequence: Synthetic oligonucleotide
uggucaugaaagcaugaug

SEQ ID NO: 2473185 - RNA, 19 nt, Artificial Sequence
  Description of Artificial Sequence: Synthetic oligonucleotide
auuuagcuuuaaaagcccc

SEQ ID NO: 2473186 - RNA, 19 nt, Artificial Sequence
  Description of Artificial Sequence: Synthetic oligonucleotide
uuugaaguuaaagacuuua

SEQ ID NO: 2473187 - RNA, 19 nt, Artificial Sequence
  Description of Artificial Sequence: Synthetic oligonucleotide
ggaaccgugagccaccucg

SEQ ID NO: 2473188 - RNA, 19 nt, Artificial Sequence
  Description of Artificial Sequence: Synthetic oligonucleotide
ucaccgcgcacaaaguagg

SEQ ID NO: 2473189 - RNA, 19 nt, Artificial Sequence
  Description of Artificial Sequence: Synthetic oligonucleotide
auaggagccaguguccagc

SEQ ID NO: 2473190 - RNA, 19 nt, Artificial Sequence
  Description of Artificial Sequence: Synthetic oligonucleotide
ucaugaaagcaugaugccc

SEQ ID NO: 2473191 - RNA, 19 nt, Artificial Sequence
  Description of Artificial Sequence: Synthetic oligonucleotide
cauacauaguaguuuagca

SEQ ID NO: 2473192 - RNA, 19 nt, Artificial Sequence
  Description of Artificial Sequence: Synthetic oligonucleotide
uguugcuaccccacugacg

SEQ ID NO: 2473193 - RNA, 19 nt, Artificial Sequence
  Description of Artificial Sequence: Synthetic oligonucleotide
guuaaagacuuuauuuagc

SEQ ID NO: 2473194 - RNA, 19 nt, Artificial Sequence
  Description of Artificial Sequence: Synthetic oligonucleotide
auggccaggguuaucacgc

SEQ ID NO: 2473195 - RNA, 19 nt, Artificial Sequence
  Description of Artificial Sequence: Synthetic oligonucleotide
aaggcagguacaagugucc

SEQ ID NO: 2473196 - RNA, 19 nt, Artificial Sequence
  Description of Artificial Sequence: Synthetic oligonucleotide
uguccagcgagguggaugc

SEQ ID NO: 2473197 - RNA, 19 nt, Artificial Sequence
  Description of Artificial Sequence: Synthetic oligonucleotide
caugaaagcaugaugccca

SEQ ID NO: 2473198 - RNA, 19 nt, Artificial Sequence
  Description of Artificial Sequence: Synthetic oligonucleotide
ucugugaagccucccagcu

SEQ ID NO: 2473199 - RNA, 19 nt, Artificial Sequence
  Description of Artificial Sequence: Synthetic oligonucleotide
aagccccauguucuuaggg

SEQ ID NO: 2473200 - RNA, 19 nt, Artificial Sequence
  Description of Artificial Sequence: Synthetic oligonucleotide
acagcgggcacccaggaug

SEQ ID NO: 2473201 - RNA, 19 nt, Artificial Sequence
  Description of Artificial Sequence: Synthetic oligonucleotide
uugaaguuaaagacuuuau

SEQ ID NO: 2473202 - RNA, 19 nt, Artificial Sequence
  Description of Artificial Sequence: Synthetic oligonucleotide
ccauguaggagccauaacc

SEQ ID NO: 2473203 - RNA, 19 nt, Artificial Sequence
  Description of Artificial Sequence: Synthetic oligonucleotide
cugaccaguguagagaccc

SEQ ID NO: 2473204 - RNA, 19 nt, Artificial Sequence
  Description of Artificial Sequence: Synthetic oligonucleotide
cugauguucuguuaagauc

SEQ ID NO: 2473205 - RNA, 19 nt, Artificial Sequence
  Description of Artificial Sequence: Synthetic oligonucleotide
guucuuagggcaugccugg

SEQ ID NO: 2473206 - RNA, 19 nt, Artificial Sequence
  Description of Artificial Sequence: Synthetic oligonucleotide
acugauguucuguuaagau

SEQ ID NO: 2473207 - RNA, 19 nt, Artificial Sequence
  Description of Artificial Sequence: Synthetic oligonucleotide
caguguagagacccaaagg

SEQ ID NO: 2473208 - RNA, 19 nt, Artificial Sequence
  Description of Artificial Sequence: Synthetic oligonucleotide
acaaaguaggcgcccauga

SEQ ID NO: 2473209 - RNA, 19 nt, Artificial Sequence
  Description of Artificial Sequence: Synthetic oligonucleotide
uguaggagccauaacccau

SEQ ID NO: 2473210 - RNA, 19 nt, Artificial Sequence
  Description of Artificial Sequence: Synthetic oligonucleotide
acauaguaguuuagcaugg

SEQ ID NO: 2473211 - RNA, 19 nt, Artificial Sequence
  Description of Artificial Sequence: Synthetic oligonucleotide
cuuagggcaugccuggagc

SEQ ID NO: 2473212 - RNA, 19 nt, Artificial Sequence
  Description of Artificial Sequence: Synthetic oligonucleotide
ucuuagggcaugccuggag

SEQ ID NO: 2473213 - RNA, 19 nt, Artificial Sequence
  Description of Artificial Sequence: Synthetic oligonucleotide
uucagagccagcugaccag

SEQ ID NO: 2473214 - RNA, 19 nt, Artificial Sequence
  Description of Artificial Sequence: Synthetic oligonucleotide
uagcuacugcaacugaugu

SEQ ID NO: 2473215 - RNA, 19 nt, Artificial Sequence
  Description of Artificial Sequence: Synthetic oligonucleotide
ugggccuucaagacccagg

SEQ ID NO: 2473216 - RNA, 19 nt, Artificial Sequence
  Description of Artificial Sequence: Synthetic oligonucleotide
uggagcagugcagaaaggc

SEQ ID NO: 2473217 - RNA, 19 nt, Artificial Sequence
  Description of Artificial Sequence: Synthetic oligonucleotide
gucaugaaagcaugaugcc

SEQ ID NO: 2473218 - RNA, 19 nt, Artificial Sequence
  Description of Artificial Sequence: Synthetic oligonucleotide
cuuggcacugaccaccuug

SEQ ID NO: 2473219 - RNA, 19 nt, Artificial Sequence
  Description of Artificial Sequence: Synthetic oligonucleotide
cucaccgcgcacaaaguag

SEQ ID NO: 2473220 - RNA, 19 nt, Artificial Sequence
  Description of Artificial Sequence: Synthetic oligonucleotide
aggguuaucacgccauaca

SEQ ID NO: 2473221 - RNA, 19 nt, Artificial Sequence
  Description of Artificial Sequence: Synthetic oligonucleotide
cuagcauaccagcggaggc

SEQ ID NO: 2473222 - RNA, 19 nt, Artificial Sequence
  Description of Artificial Sequence: Synthetic oligonucleotide
aacugauguucuguuaaga

SEQ ID NO: 2473223 - RNA, 19 nt, Artificial Sequence
  Description of Artificial Sequence: Synthetic oligonucleotide
augaaagcaugaugcccac

SEQ ID NO: 2473224 - RNA, 19 nt, Artificial Sequence
  Description of Artificial Sequence: Synthetic oligonucleotide
auccauggugcuuggcugg

SEQ ID NO: 2473225 - RNA, 19 nt, Artificial Sequence
  Description of Artificial Sequence: Synthetic oligonucleotide
agcauaccagcggaggccc

SEQ ID NO: 2473226 - RNA, 19 nt, Artificial Sequence
  Description of Artificial Sequence: Synthetic oligonucleotide
uuuccagaccauguaggag

SEQ ID NO: 2473227 - RNA, 19 nt, Artificial Sequence
  Description of Artificial Sequence: Synthetic oligonucleotide
aacccauggcugaauaaag

SEQ ID NO: 2473228 - RNA, 19 nt, Artificial Sequence
  Description of Artificial Sequence: Synthetic oligonucleotide
cagguaaggguagagcagg

SEQ ID NO: 2473229 - RNA, 19 nt, Artificial Sequence
  Description of Artificial Sequence: Synthetic oligonucleotide
ucugccgggcaccaaagaa

SEQ ID NO: 2473230 - RNA, 19 nt, Artificial Sequence
  Description of Artificial Sequence: Synthetic oligonucleotide
ugaauaaagcgugccccag

SEQ ID NO: 2473231 - RNA, 19 nt, Artificial Sequence
  Description of Artificial Sequence: Synthetic oligonucleotide
auguucuuagggcaugccu

SEQ ID NO: 2473232 - RNA, 19 nt, Artificial Sequence
  Description of Artificial Sequence: Synthetic oligonucleotide
uaacccauggcugaauaaa

SEQ ID NO: 2473233 - RNA, 19 nt, Artificial Sequence
  Description of Artificial Sequence: Synthetic oligonucleotide
uucugugaagccucccagc

SEQ ID NO: 2473234 - RNA, 19 nt, Artificial Sequence
  Description of Artificial Sequence: Synthetic oligonucleotide
uccagaccauguaggagcc

SEQ ID NO: 2473235 - RNA, 19 nt, Artificial Sequence
  Description of Artificial Sequence: Synthetic oligonucleotide
uuagcuuuaaaagccccau

SEQ ID NO: 2473236 - RNA, 19 nt, Artificial Sequence
  Description of Artificial Sequence: Synthetic oligonucleotide
ugccgggcaccaaagaaga

SEQ ID NO: 2473237 - RNA, 19 nt, Artificial Sequence
  Description of Artificial Sequence: Synthetic oligonucleotide
uagcauggucgcaaaggcc

SEQ ID NO: 2473238 - RNA, 19 nt, Artificial Sequence
  Description of Artificial Sequence: Synthetic oligonucleotide
uucaagacccagguagacc

SEQ ID NO: 2473239 - RNA, 19 nt, Artificial Sequence
  Description of Artificial Sequence: Synthetic oligonucleotide
cagauaggagccagugucc

SEQ ID NO: 2473240 - RNA, 19 nt, Artificial Sequence
  Description of Artificial Sequence: Synthetic oligonucleotide
acccauggcugaauaaagc

SEQ ID NO: 2473241 - RNA, 19 nt, Artificial Sequence
  Description of Artificial Sequence: Synthetic oligonucleotide
agcauggucgcaaaggcca

SEQ ID NO: 2473242 - RNA, 19 nt, Artificial Sequence
  Description of Artificial Sequence: Synthetic oligonucleotide
cccacugacgagcagaagg

SEQ ID NO: 2473243 - RNA, 19 nt, Artificial Sequence
  Description of Artificial Sequence: Synthetic oligonucleotide
auggucgcaaaggccagcc

SEQ ID NO: 2473244 - RNA, 19 nt, Artificial Sequence
  Description of Artificial Sequence: Synthetic oligonucleotide
uuagggcaugccuggagca

SEQ ID NO: 2473245 - RNA, 19 nt, Artificial Sequence
  Description of Artificial Sequence: Synthetic oligonucleotide
uagaccagcgggcccagug

SEQ ID NO: 2473246 - RNA, 19 nt, Artificial Sequence
  Description of Artificial Sequence: Synthetic oligonucleotide
uaggcgcccaugaagcccc

SEQ ID NO: 2473247 - RNA, 19 nt, Artificial Sequence
  Description of Artificial Sequence: Synthetic oligonucleotide
ucacgccauacauaguagu

SEQ ID NO: 2473248 - RNA, 19 nt, Artificial Sequence
  Description of Artificial Sequence: Synthetic oligonucleotide
ucacucugggaaccgugag

SEQ ID NO: 2473249 - RNA, 19 nt, Artificial Sequence
  Description of Artificial Sequence: Synthetic oligonucleotide
cauccauggugcuuggcug

SEQ ID NO: 2473250 - RNA, 19 nt, Artificial Sequence
  Description of Artificial Sequence: Synthetic oligonucleotide
cccauggcugaauaaagcg

SEQ ID NO: 2473251 - RNA, 19 nt, Artificial Sequence
  Description of Artificial Sequence: Synthetic oligonucleotide
acagggugcgcucacucug

SEQ ID NO: 2473252 - RNA, 19 nt, Artificial Sequence
  Description of Artificial Sequence: Synthetic oligonucleotide
uccugauggacagggugcg

SEQ ID NO: 2473253 - RNA, 19 nt, Artificial Sequence
  Description of Artificial Sequence: Synthetic oligonucleotide
accauguaggagccauaac

SEQ ID NO: 2473254 - RNA, 19 nt, Artificial Sequence
  Description of Artificial Sequence: Synthetic oligonucleotide
cugacgagcagaaggucug

SEQ ID NO: 2473255 - RNA, 19 nt, Artificial Sequence
  Description of Artificial Sequence: Synthetic oligonucleotide
caacugauguucuguuaag

SEQ ID NO: 2473256 - RNA, 19 nt, Artificial Sequence
  Description of Artificial Sequence: Synthetic oligonucleotide
auguaggagccauaaccca

SEQ ID NO: 2473257 - RNA, 19 nt, Artificial Sequence
  Description of Artificial Sequence: Synthetic oligonucleotide
uaguuuagcauggucgcaa

SEQ ID NO: 2473258 - RNA, 19 nt, Artificial Sequence
  Description of Artificial Sequence: Synthetic oligonucleotide
caggcugggugccagagug

SEQ ID NO: 2473259 - RNA, 19 nt, Artificial Sequence
  Description of Artificial Sequence: Synthetic oligonucleotide
ggcaccaaagaagaugggg

SEQ ID NO: 2473260 - RNA, 19 nt, Artificial Sequence
  Description of Artificial Sequence: Synthetic oligonucleotide
gacuuuauuuagcuuuaaa

SEQ ID NO: 2473261 - RNA, 19 nt, Artificial Sequence
  Description of Artificial Sequence: Synthetic oligonucleotide
cugccgggcaccaaagaag

SEQ ID NO: 2473262 - RNA, 19 nt, Artificial Sequence
  Description of Artificial Sequence: Synthetic oligonucleotide
ucugggaaccgugagccac

SEQ ID NO: 2473263 - RNA, 19 nt, Artificial Sequence
  Description of Artificial Sequence: Synthetic oligonucleotide
gcugaauaaagcgugcccc

SEQ ID NO: 2473264 - RNA, 19 nt, Artificial Sequence
  Description of Artificial Sequence: Synthetic oligonucleotide
aagugucccuggaugggac

SEQ ID NO: 2473265 - RNA, 19 nt, Artificial Sequence
  Description of Artificial Sequence: Synthetic oligonucleotide
auggcugaauaaagcgugc

SEQ ID NO: 2473266 - RNA, 19 nt, Artificial Sequence
  Description of Artificial Sequence: Synthetic oligonucleotide
ccagauaggagccaguguc

SEQ ID NO: 2473267 - RNA, 19 nt, Artificial Sequence
  Description of Artificial Sequence: Synthetic oligonucleotide
ugcccaccauccauggugc

SEQ ID NO: 2473268 - RNA, 19 nt, Artificial Sequence
  Description of Artificial Sequence: Synthetic oligonucleotide
agaccagcgggcccagugg

SEQ ID NO: 2473269 - RNA, 19 nt, Artificial Sequence
  Description of Artificial Sequence: Synthetic oligonucleotide
uagcauaccagcggaggcc

SEQ ID NO: 2473270 - RNA, 19 nt, Artificial Sequence
  Description of Artificial Sequence: Synthetic oligonucleotide
ugguggacucacucggugc

SEQ ID NO: 2473271 - RNA, 19 nt, Artificial Sequence
  Description of Artificial Sequence: Synthetic oligonucleotide
agccauaacccauggcuga

SEQ ID NO: 2473272 - RNA, 19 nt, Artificial Sequence
  Description of Artificial Sequence: Synthetic oligonucleotide
ccgugagccaccucgaugg

SEQ ID NO: 2473273 - RNA, 19 nt, Artificial Sequence
  Description of Artificial Sequence: Synthetic oligonucleotide
aagcgugccccagauagga

SEQ ID NO: 2473274 - RNA, 19 nt, Artificial Sequence
  Description of Artificial Sequence: Synthetic oligonucleotide
gcuacugcaacugauguuc

SEQ ID NO: 2473275 - RNA, 19 nt, Artificial Sequence
  Description of Artificial Sequence: Synthetic oligonucleotide
gaauaaagcgugccccaga

SEQ ID NO: 2473276 - RNA, 19 nt, Artificial Sequence
  Description of Artificial Sequence: Synthetic oligonucleotide
uguggcuguugcuacccca

SEQ ID NO: 2473277 - RNA, 19 nt, Artificial Sequence
  Description of Artificial Sequence: Synthetic oligonucleotide
acaagugucccuggauggg

SEQ ID NO: 2473278 - RNA, 19 nt, Artificial Sequence
  Description of Artificial Sequence: Synthetic oligonucleotide
agcggaggcccucaccgcg

SEQ ID NO: 2473279 - RNA, 19 nt, Artificial Sequence
  Description of Artificial Sequence: Synthetic oligonucleotide
aaagcgugccccagauagg

SEQ ID NO: 2473280 - RNA, 19 nt, Artificial Sequence
  Description of Artificial Sequence: Synthetic oligonucleotide
gagccauaacccauggcug

SEQ ID NO: 2473281 - RNA, 19 nt, Artificial Sequence
  Description of Artificial Sequence: Synthetic oligonucleotide
guagagacccaaagggacc

SEQ ID NO: 2473282 - RNA, 19 nt, Artificial Sequence
  Description of Artificial Sequence: Synthetic oligonucleotide
uuaaaagccccauguucuu

SEQ ID NO: 2473283 - RNA, 19 nt, Artificial Sequence
  Description of Artificial Sequence: Synthetic oligonucleotide
aggcagguacaaguguccc

SEQ ID NO: 2473284 - RNA, 19 nt, Artificial Sequence
  Description of Artificial Sequence: Synthetic oligonucleotide
guuuagcauggucgcaaag

SEQ ID NO: 2473285 - RNA, 19 nt, Artificial Sequence
  Description of Artificial Sequence: Synthetic oligonucleotide
ugcuaccccacugacgagc

SEQ ID NO: 2473286 - RNA, 19 nt, Artificial Sequence
  Description of Artificial Sequence: Synthetic oligonucleotide
aagacuuuauuuagcuuua

SEQ ID NO: 2473287 - RNA, 19 nt, Artificial Sequence
  Description of Artificial Sequence: Synthetic oligonucleotide
uuuugaaguuaaagacuuu

SEQ ID NO: 2473288 - RNA, 19 nt, Artificial Sequence
  Description of Artificial Sequence: Synthetic oligonucleotide
ggucgcaaaggccagccag

SEQ ID NO: 2473289 - RNA, 19 nt, Artificial Sequence
  Description of Artificial Sequence: Synthetic oligonucleotide
gcaaaggccagccaggcca

SEQ ID NO: 2473290 - RNA, 19 nt, Artificial Sequence
  Description of Artificial Sequence: Synthetic oligonucleotide
ggagccauaacccauggcu

SEQ ID NO: 2473291 - RNA, 19 nt, Artificial Sequence
  Description of Artificial Sequence: Synthetic oligonucleotide
ugcagaaaggcagguacaa

SEQ ID NO: 2473292 - RNA, 19 nt, Artificial Sequence
  Description of Artificial Sequence: Synthetic oligonucleotide
cuuuccagaccauguagga

SEQ ID NO: 2473293 - RNA, 19 nt, Artificial Sequence
  Description of Artificial Sequence: Synthetic oligonucleotide
ucacucggugccaggcuag

SEQ ID NO: 2473294 - RNA, 19 nt, Artificial Sequence
  Description of Artificial Sequence: Synthetic oligonucleotide
auaacccauggcugaauaa

SEQ ID NO: 2473295 - RNA, 19 nt, Artificial Sequence
  Description of Artificial Sequence: Synthetic oligonucleotide
cagaaaggcagguacaagu

SEQ ID NO: 2473296 - RNA, 19 nt, Artificial Sequence
  Description of Artificial Sequence: Synthetic oligonucleotide
gguccugauggacagggug

SEQ ID NO: 2473297 - RNA, 19 nt, Artificial Sequence
  Description of Artificial Sequence: Synthetic oligonucleotide
gacccaaagggaccacagc

SEQ ID NO: 2473298 - RNA, 19 nt, Artificial Sequence
  Description of Artificial Sequence: Synthetic oligonucleotide
acugacgagcagaaggucu

SEQ ID NO: 2473299 - RNA, 19 nt, Artificial Sequence
  Description of Artificial Sequence: Synthetic oligonucleotide
caggcuaggguuguggcug

SEQ ID NO: 2473300 - RNA, 19 nt, Artificial Sequence
  Description of Artificial Sequence: Synthetic oligonucleotide
cugaauaaagcgugcccca

SEQ ID NO: 2473301 - RNA, 19 nt, Artificial Sequence
  Description of Artificial Sequence: Synthetic oligonucleotide
aggcuagcauaccagcgga

SEQ ID NO: 2473302 - RNA, 19 nt, Artificial Sequence
  Description of Artificial Sequence: Synthetic oligonucleotide
accagcggaggcccucacc

SEQ ID NO: 2473303 - RNA, 19 nt, Artificial Sequence
  Description of Artificial Sequence: Synthetic oligonucleotide
gucgcaaaggccagccagg

SEQ ID NO: 2473304 - RNA, 19 nt, Artificial Sequence
  Description of Artificial Sequence: Synthetic oligonucleotide
cugucugguggcucccugg

SEQ ID NO: 2473305 - RNA, 19 nt, Artificial Sequence
  Description of Artificial Sequence: Synthetic oligonucleotide
aaagggaccacagccucuu

SEQ ID NO: 2473306 - RNA, 19 nt, Artificial Sequence
  Description of Artificial Sequence: Synthetic oligonucleotide
gaagccucccagcucuuuc

SEQ ID NO: 2473307 - RNA, 19 nt, Artificial Sequence
  Description of Artificial Sequence: Synthetic oligonucleotide
uaccccacugacgagcaga

SEQ ID NO: 2473308 - RNA, 19 nt, Artificial Sequence
  Description of Artificial Sequence: Synthetic oligonucleotide
accgugagccaccucgaug

SEQ ID NO: 2473309 - RNA, 19 nt, Artificial Sequence
  Description of Artificial Sequence: Synthetic oligonucleotide
gaaaggcagguacaagugu

SEQ ID NO: 2473310 - RNA, 19 nt, Artificial Sequence
  Description of Artificial Sequence: Synthetic oligonucleotide
uuaucacgccauacauagu

SEQ ID NO: 2473311 - RNA, 19 nt, Artificial Sequence
  Description of Artificial Sequence: Synthetic oligonucleotide
ugcaacugauguucuguua

SEQ ID NO: 2473312 - RNA, 19 nt, Artificial Sequence
  Description of Artificial Sequence: Synthetic oligonucleotide
guccugauggacagggugc

SEQ ID NO: 2473313 - RNA, 19 nt, Artificial Sequence
  Description of Artificial Sequence: Synthetic oligonucleotide
acgagcagaaggucugcca

SEQ ID NO: 2473314 - RNA, 19 nt, Artificial Sequence
  Description of Artificial Sequence: Synthetic oligonucleotide
ugccaggcuaggguugugg

SEQ ID NO: 2473315 - RNA, 19 nt, Artificial Sequence
  Description of Artificial Sequence: Synthetic oligonucleotide
gguggacucacucggugcc

SEQ ID NO: 2473316 - RNA, 19 nt, Artificial Sequence
  Description of Artificial Sequence: Synthetic oligonucleotide
gcuagcauaccagcggagg

SEQ ID NO: 2473317 - RNA, 19 nt, Artificial Sequence
  Description of Artificial Sequence: Synthetic oligonucleotide
aggucugccaaggcccagc

SEQ ID NO: 2473318 - RNA, 19 nt, Artificial Sequence
  Description of Artificial Sequence: Synthetic oligonucleotide
agguaaggguagagcaggc

SEQ ID NO: 2473319 - RNA, 19 nt, Artificial Sequence
  Description of Artificial Sequence: Synthetic oligonucleotide
ccaugcccaguucagagcc

SEQ ID NO: 2473320 - RNA, 19 nt, Artificial Sequence
  Description of Artificial Sequence: Synthetic oligonucleotide
gacucacucggugccaggc

SEQ ID NO: 2473321 - RNA, 19 nt, Artificial Sequence
  Description of Artificial Sequence: Synthetic oligonucleotide
agagugaggcccacagcgg

SEQ ID NO: 2473322 - RNA, 19 nt, Artificial Sequence
  Description of Artificial Sequence: Synthetic oligonucleotide
cagcgggcacccaggaugg

SEQ ID NO: 2473323 - RNA, 19 nt, Artificial Sequence
  Description of Artificial Sequence: Synthetic oligonucleotide
agacccaaagggaccacag

SEQ ID NO: 2473324 - RNA, 19 nt, Artificial Sequence
  Description of Artificial Sequence: Synthetic oligonucleotide
accgcgcacaaaguaggcg

SEQ ID NO: 2473325 - RNA, 19 nt, Artificial Sequence
  Description of Artificial Sequence: Synthetic oligonucleotide
ugcgcucacucugggaacc

SEQ ID NO: 2473326 - RNA, 19 nt, Artificial Sequence
  Description of Artificial Sequence: Synthetic oligonucleotide
ugaccaguguagagaccca

SEQ ID NO: 2473327 - RNA, 19 nt, Artificial Sequence
  Description of Artificial Sequence: Synthetic oligonucleotide
cucccugggccuucaagac

SEQ ID NO: 2473328 - RNA, 19 nt, Artificial Sequence
  Description of Artificial Sequence: Synthetic oligonucleotide
cagggugcgcucacucugg

SEQ ID NO: 2473329 - RNA, 19 nt, Artificial Sequence
  Description of Artificial Sequence: Synthetic oligonucleotide
ccagcggaggcccucaccg

SEQ ID NO: 2473330 - RNA, 19 nt, Artificial Sequence
  Description of Artificial Sequence: Synthetic oligonucleotide
cuucaagacccagguagac

SEQ ID NO: 2473331 - RNA, 19 nt, Artificial Sequence
  Description of Artificial Sequence: Synthetic oligonucleotide
agacccagguagaccagcg

SEQ ID NO: 2473332 - RNA, 19 nt, Artificial Sequence
  Description of Artificial Sequence: Synthetic oligonucleotide
ugaaagcaugaugcccacc

SEQ ID NO: 2473333 - RNA, 19 nt, Artificial Sequence
  Description of Artificial Sequence: Synthetic oligonucleotide
gcagguacaagugucccug

SEQ ID NO: 2473334 - RNA, 19 nt, Artificial Sequence
  Description of Artificial Sequence: Synthetic oligonucleotide
agguacaagugucccugga

SEQ ID NO: 2473335 - RNA, 19 nt, Artificial Sequence
  Description of Artificial Sequence: Synthetic oligonucleotide
guguagagacccaaaggga

SEQ ID NO: 2473336 - RNA, 19 nt, Artificial Sequence
  Description of Artificial Sequence: Synthetic oligonucleotide
uggacucacucggugccag

SEQ ID NO: 2473337 - RNA, 19 nt, Artificial Sequence
  Description of Artificial Sequence: Synthetic oligonucleotide
guaggcgcccaugaagccc

SEQ ID NO: 2473338 - RNA, 19 nt, Artificial Sequence
  Description of Artificial Sequence: Synthetic oligonucleotide
caguucagagccagcugac

SEQ ID NO: 2473339 - RNA, 19 nt, Artificial Sequence
  Description of Artificial Sequence: Synthetic oligonucleotide
caucugccgggcaccaaag

SEQ ID NO: 2473340 - RNA, 19 nt, Artificial Sequence
  Description of Artificial Sequence: Synthetic oligonucleotide
gguaaggguagagcaggcg

SEQ ID NO: 2473341 - RNA, 19 nt, Artificial Sequence
  Description of Artificial Sequence: Synthetic oligonucleotide
cagguacaagugucccugg

SEQ ID NO: 2473342 - RNA, 19 nt, Artificial Sequence
  Description of Artificial Sequence: Synthetic oligonucleotide
gagccaguguccagcgagg

SEQ ID NO: 2473343 - RNA, 19 nt, Artificial Sequence
  Description of Artificial Sequence: Synthetic oligonucleotide
cugguggacucacucggug

SEQ ID NO: 2473344 - RNA, 19 nt, Artificial Sequence
  Description of Artificial Sequence: Synthetic oligonucleotide
uuguggcuguugcuacccc

SEQ ID NO: 2473345 - RNA, 19 nt, Artificial Sequence
  Description of Artificial Sequence: Synthetic oligonucleotide
ugauggacagggugcgcuc

SEQ ID NO: 2473346 - RNA, 19 nt, Artificial Sequence
  Description of Artificial Sequence: Synthetic oligonucleotide
cauguucuuagggcaugcc

SEQ ID NO: 2473347 - RNA, 19 nt, Artificial Sequence
  Description of Artificial Sequence: Synthetic oligonucleotide
uccagcgagguggaugcca

SEQ ID NO: 2473348 - RNA, 19 nt, Artificial Sequence
  Description of Artificial Sequence: Synthetic oligonucleotide
gaccauguaggagccauaa

SEQ ID NO: 2473349 - RNA, 19 nt, Artificial Sequence
  Description of Artificial Sequence: Synthetic oligonucleotide
uaaaagccccauguucuua

SEQ ID NO: 2473350 - RNA, 19 nt, Artificial Sequence
  Description of Artificial Sequence: Synthetic oligonucleotide
cuguugcuaccccacugac

SEQ ID NO: 2473351 - RNA, 19 nt, Artificial Sequence
  Description of Artificial Sequence: Synthetic oligonucleotide
gcccucaccgcgcacaaag

SEQ ID NO: 2473352 - RNA, 19 nt, Artificial Sequence
  Description of Artificial Sequence: Synthetic oligonucleotide
agcuacugcaacugauguu

SEQ ID NO: 2473353 - RNA, 19 nt, Artificial Sequence
  Description of Artificial Sequence: Synthetic oligonucleotide
ggugcgcucacucugggaa

SEQ ID NO: 2473354 - RNA, 19 nt, Artificial Sequence
  Description of Artificial Sequence: Synthetic oligonucleotide
ugccccagauaggagccag

SEQ ID NO: 2473355 - RNA, 19 nt, Artificial Sequence
  Description of Artificial Sequence: Synthetic oligonucleotide
ccgcgcacaaaguaggcgc

SEQ ID NO: 2473356 - RNA, 19 nt, Artificial Sequence
  Description of Artificial Sequence: Synthetic oligonucleotide
gacgagcagaaggucugcc

SEQ ID NO: 2473357 - RNA, 19 nt, Artificial Sequence
  Description of Artificial Sequence: Synthetic oligonucleotide
agugucccuggaugggacu

SEQ ID NO: 2473358 - RNA, 19 nt, Artificial Sequence
  Description of Artificial Sequence: Synthetic oligonucleotide
agcgagguggaugccagga

SEQ ID NO: 2473359 - RNA, 19 nt, Artificial Sequence
  Description of Artificial Sequence: Synthetic oligonucleotide
cucacucugggaaccguga

SEQ ID NO: 2473360 - RNA, 19 nt, Artificial Sequence
  Description of Artificial Sequence: Synthetic oligonucleotide
aguggucaugaaagcauga

SEQ ID NO: 2473361 - RNA, 19 nt, Artificial Sequence
  Description of Artificial Sequence: Synthetic oligonucleotide
gggaccacagccucuucug

SEQ ID NO: 2473362 - RNA, 19 nt, Artificial Sequence
  Description of Artificial Sequence: Synthetic oligonucleotide
guguccagcgagguggaug

SEQ ID NO: 2473363 - RNA, 19 nt, Artificial Sequence
  Description of Artificial Sequence: Synthetic oligonucleotide
acucacucggugccaggcu

SEQ ID NO: 2473364 - RNA, 19 nt, Artificial Sequence
  Description of Artificial Sequence: Synthetic oligonucleotide
gcaggcuagcauaccagcg

SEQ ID NO: 2473365 - RNA, 19 nt, Artificial Sequence
  Description of Artificial Sequence: Synthetic oligonucleotide
ucggugccaggcuaggguu

SEQ ID NO: 2473366 - RNA, 19 nt, Artificial Sequence
  Description of Artificial Sequence: Synthetic oligonucleotide
agggugcgcucacucuggg

SEQ ID NO: 2473367 - RNA, 19 nt, Artificial Sequence
  Description of Artificial Sequence: Synthetic oligonucleotide
aaccgugagccaccucgau

SEQ ID NO: 2473368 - RNA, 19 nt, Artificial Sequence
  Description of Artificial Sequence: Synthetic oligonucleotide
cauaacccauggcugaaua

SEQ ID NO: 2473369 - RNA, 19 nt, Artificial Sequence
  Description of Artificial Sequence: Synthetic oligonucleotide
caggguuaucacgccauac

SEQ ID NO: 2473370 - RNA, 19 nt, Artificial Sequence
  Description of Artificial Sequence: Synthetic oligonucleotide
acgccauacauaguaguuu

SEQ ID NO: 2473371 - RNA, 19 nt, Artificial Sequence
  Description of Artificial Sequence: Synthetic oligonucleotide
acugaccaccuugaccugu

SEQ ID NO: 2473372 - RNA, 19 nt, Artificial Sequence
  Description of Artificial Sequence: Synthetic oligonucleotide
uccauggugcuuggcuggc

SEQ ID NO: 2473373 - RNA, 19 nt, Artificial Sequence
  Description of Artificial Sequence: Synthetic oligonucleotide
uucugcaggcuagcauacc

SEQ ID NO: 2473374 - RNA, 19 nt, Artificial Sequence
  Description of Artificial Sequence: Synthetic oligonucleotide
agagacccaaagggaccac

SEQ ID NO: 2473375 - RNA, 19 nt, Artificial Sequence
  Description of Artificial Sequence: Synthetic oligonucleotide
caccgcgcacaaaguaggc

SEQ ID NO: 2473376 - RNA, 19 nt, Artificial Sequence
  Description of Artificial Sequence: Synthetic oligonucleotide
gcgugccccagauaggagc

SEQ ID NO: 2473377 - RNA, 19 nt, Artificial Sequence
  Description of Artificial Sequence: Synthetic oligonucleotide
uggucgcaaaggccagcca

SEQ ID NO: 2473378 - RNA, 19 nt, Artificial Sequence
  Description of Artificial Sequence: Synthetic oligonucleotide
ggcccagcccaucugccgg

SEQ ID NO: 2473379 - RNA, 19 nt, Artificial Sequence
  Description of Artificial Sequence: Synthetic oligonucleotide
uggcuguugcuaccccacu

SEQ ID NO: 2473380 - RNA, 19 nt, Artificial Sequence
  Description of Artificial Sequence: Synthetic oligonucleotide
uggccaggguuaucacgcc

SEQ ID NO: 2473381 - RNA, 19 nt, Artificial Sequence
  Description of Artificial Sequence: Synthetic oligonucleotide
ugaccaccuugaccugucu

SEQ ID NO: 2473382 - RNA, 19 nt, Artificial Sequence
  Description of Artificial Sequence: Synthetic oligonucleotide
guaguuuagcauggucgca

SEQ ID NO: 2473383 - RNA, 19 nt, Artificial Sequence
  Description of Artificial Sequence: Synthetic oligonucleotide
augccuggagcagugcaga

SEQ ID NO: 2473384 - RNA, 19 nt, Artificial Sequence
  Description of Artificial Sequence: Synthetic oligonucleotide
gcuguugcuaccccacuga

SEQ ID NO: 2473385 - RNA, 19 nt, Artificial Sequence
  Description of Artificial Sequence: Synthetic oligonucleotide
uugcuaccccacugacgag

SEQ ID NO: 2473386 - RNA, 19 nt, Artificial Sequence
  Description of Artificial Sequence: Synthetic oligonucleotide
auaaagcgugccccagaua

SEQ ID NO: 2473387 - RNA, 19 nt, Artificial Sequence
  Description of Artificial Sequence: Synthetic oligonucleotide
ccaguucagagccagcuga

SEQ ID NO: 2473388 - RNA, 19 nt, Artificial Sequence
  Description of Artificial Sequence: Synthetic oligonucleotide
gagacccaaagggaccaca

SEQ ID NO: 2473389 - RNA, 19 nt, Artificial Sequence
  Description of Artificial Sequence: Synthetic oligonucleotide
aaggucugccaaggcccag

SEQ ID NO: 2473390 - RNA, 19 nt, Artificial Sequence
  Description of Artificial Sequence: Synthetic oligonucleotide
cugugaagccucccagcuc

SEQ ID NO: 2473391 - RNA, 19 nt, Artificial Sequence
  Description of Artificial Sequence: Synthetic oligonucleotide
caaaguaggcgcccaugaa

SEQ ID NO: 2473392 - RNA, 19 nt, Artificial Sequence
  Description of Artificial Sequence: Synthetic oligonucleotide
caccuugaccugucuggug

SEQ ID NO: 2473393 - RNA, 19 nt, Artificial Sequence
  Description of Artificial Sequence: Synthetic oligonucleotide
uucuuagggcaugccugga

SEQ ID NO: 2473394 - RNA, 19 nt, Artificial Sequence
  Description of Artificial Sequence: Synthetic oligonucleotide
guggcuguugcuaccccac

SEQ ID NO: 2473395 - RNA, 19 nt, Artificial Sequence
  Description of Artificial Sequence: Synthetic oligonucleotide
cccagguagaccagcgggc

SEQ ID NO: 2473396 - RNA, 19 nt, Artificial Sequence
  Description of Artificial Sequence: Synthetic oligonucleotide
ggagcagugcagaaaggca

SEQ ID NO: 2473397 - RNA, 19 nt, Artificial Sequence
  Description of Artificial Sequence: Synthetic oligonucleotide
cauggucgcaaaggccagc

SEQ ID NO: 2473398 - RNA, 19 nt, Artificial Sequence
  Description of Artificial Sequence: Synthetic oligonucleotide
cagcccaucugccgggcac

SEQ ID NO: 2473399 - RNA, 19 nt, Artificial Sequence
  Description of Artificial Sequence: Synthetic oligonucleotide
acucggugccaggcuaggg

SEQ ID NO: 2473400 - RNA, 19 nt, Artificial Sequence
  Description of Artificial Sequence: Synthetic oligonucleotide
ccaaagggaccacagccuc

SEQ ID NO: 2473401 - RNA, 19 nt, Artificial Sequence
  Description of Artificial Sequence: Synthetic oligonucleotide
caccauccauggugcuugg

SEQ ID NO: 2473402 - RNA, 19 nt, Artificial Sequence
  Description of Artificial Sequence: Synthetic oligonucleotide
agggcaugccuggagcagu

SEQ ID NO: 2473403 - RNA, 19 nt, Artificial Sequence
  Description of Artificial Sequence: Synthetic oligonucleotide
aggccagguaaggguagag

SEQ ID NO: 2473404 - RNA, 19 nt, Artificial Sequence
  Description of Artificial Sequence: Synthetic oligonucleotide
gacagggugcgcucacucu

SEQ ID NO: 2473405 - RNA, 19 nt, Artificial Sequence
  Description of Artificial Sequence: Synthetic oligonucleotide
caagugucccuggauggga

SEQ ID NO: 2473406 - RNA, 19 nt, Artificial Sequence
  Description of Artificial Sequence: Synthetic oligonucleotide
gaaccgugagccaccucga

SEQ ID NO: 2473407 - RNA, 19 nt, Artificial Sequence
  Description of Artificial Sequence: Synthetic oligonucleotide
cauaccagcggaggcccuc

SEQ ID NO: 2473408 - RNA, 19 nt, Artificial Sequence
  Description of Artificial Sequence: Synthetic oligonucleotide
gcagaaggucugccaaggc

SEQ ID NO: 2473409 - RNA, 19 nt, Artificial Sequence
  Description of Artificial Sequence: Synthetic oligonucleotide
gaccaguguagagacccaa

SEQ ID NO: 2473410 - RNA, 19 nt, Artificial Sequence
  Description of Artificial Sequence: Synthetic oligonucleotide
ccaccauccauggugcuug

SEQ ID NO: 2473411 - RNA, 19 nt, Artificial Sequence
  Description of Artificial Sequence: Synthetic oligonucleotide
ggucugccaaggcccagcc

SEQ ID NO: 2473412 - RNA, 19 nt, Artificial Sequence
  Description of Artificial Sequence: Synthetic oligonucleotide
gccaggcuaggguuguggc

SEQ ID NO: 2473413 - RNA, 19 nt, Artificial Sequence
  Description of Artificial Sequence: Synthetic oligonucleotide
gugcgcucacucugggaac

SEQ ID NO: 2473414 - RNA, 19 nt, Artificial Sequence
  Description of Artificial Sequence: Synthetic oligonucleotide
gaggcccucaccgcgcaca

SEQ ID NO: 2473415 - RNA, 19 nt, Artificial Sequence
  Description of Artificial Sequence: Synthetic oligonucleotide
gccauacauaguaguuuag

SEQ ID NO: 2473416 - RNA, 19 nt, Artificial Sequence
  Description of Artificial Sequence: Synthetic oligonucleotide
cagcgagguggaugccagg

SEQ ID NO: 2473417 - RNA, 19 nt, Artificial Sequence
  Description of Artificial Sequence: Synthetic oligonucleotide
cgugccccagauaggagcc

SEQ ID NO: 2473418 - RNA, 19 nt, Artificial Sequence
  Description of Artificial Sequence: Synthetic oligonucleotide
cacugacgagcagaagguc

SEQ ID NO: 2473419 - RNA, 19 nt, Artificial Sequence
  Description of Artificial Sequence: Synthetic oligonucleotide
aggcuaggguuguggcugu

SEQ ID NO: 2473420 - RNA, 19 nt, Artificial Sequence
  Description of Artificial Sequence: Synthetic oligonucleotide
ccgggcaccaaagaagaug

SEQ ID NO: 2473421 - RNA, 19 nt, Artificial Sequence
  Description of Artificial Sequence: Synthetic oligonucleotide
gucugccaaggcccagccc

SEQ ID NO: 2473422 - RNA, 19 nt, Artificial Sequence
  Description of Artificial Sequence: Synthetic oligonucleotide
ggccagguaaggguagagc

SEQ ID NO: 2473423 - RNA, 19 nt, Artificial Sequence
  Description of Artificial Sequence: Synthetic oligonucleotide
ggguuaucacgccauacau

SEQ ID NO: 2473424 - RNA, 19 nt, Artificial Sequence
  Description of Artificial Sequence: Synthetic oligonucleotide
cagcggaggcccucaccgc

SEQ ID NO: 2473425 - RNA, 19 nt, Artificial Sequence
  Description of Artificial Sequence: Synthetic oligonucleotide
cucacucggugccaggcua

SEQ ID NO: 2473426 - RNA, 19 nt, Artificial Sequence
  Description of Artificial Sequence: Synthetic oligonucleotide
ugggaaccgugagccaccu

SEQ ID NO: 2473427 - RNA, 19 nt, Artificial Sequence
  Description of Artificial Sequence: Synthetic oligonucleotide
auaccagcggaggcccuca

SEQ ID NO: 2473428 - RNA, 19 nt, Artificial Sequence
  Description of Artificial Sequence: Synthetic oligonucleotide
cccacagcgggcacccagg

SEQ ID NO: 2473429 - RNA, 19 nt, Artificial Sequence
  Description of Artificial Sequence: Synthetic oligonucleotide
gcgagguggaugccaggag

SEQ ID NO: 2473430 - RNA, 19 nt, Artificial Sequence
  Description of Artificial Sequence: Synthetic oligonucleotide
gggacuuggcacugaccac

SEQ ID NO: 2473431 - RNA, 19 nt, Artificial Sequence
  Description of Artificial Sequence: Synthetic oligonucleotide
ggacagggugcgcucacuc

SEQ ID NO: 2473432 - RNA, 19 nt, Artificial Sequence
  Description of Artificial Sequence: Synthetic oligonucleotide
gguuaucacgccauacaua

SEQ ID NO: 2473433 - RNA, 19 nt, Artificial Sequence
  Description of Artificial Sequence: Synthetic oligonucleotide
ggacucacucggugccagg

SEQ ID NO: 2473434 - RNA, 19 nt, Artificial Sequence
  Description of Artificial Sequence: Synthetic oligonucleotide
agguggaugccaggagggu

SEQ ID NO: 2473435 - RNA, 19 nt, Artificial Sequence
  Description of Artificial Sequence: Synthetic oligonucleotide
cacgccauacauaguaguu

SEQ ID NO: 2473436 - RNA, 19 nt, Artificial Sequence
  Description of Artificial Sequence: Synthetic oligonucleotide
ccuucaagacccagguaga

SEQ ID NO: 2473437 - RNA, 19 nt, Artificial Sequence
  Description of Artificial Sequence: Synthetic oligonucleotide
ccuugaccugucugguggc

SEQ ID NO: 2473438 - RNA, 19 nt, Artificial Sequence
  Description of Artificial Sequence: Synthetic oligonucleotide
caugcccaguucagagcca

SEQ ID NO: 2473439 - RNA, 19 nt, Artificial Sequence
  Description of Artificial Sequence: Synthetic oligonucleotide
aggguagagcaggcgggca

SEQ ID NO: 2473440 - RNA, 19 nt, Artificial Sequence
  Description of Artificial Sequence: Synthetic oligonucleotide
uggaugccaggaggguuuc

SEQ ID NO: 2473441 - RNA, 19 nt, Artificial Sequence
  Description of Artificial Sequence: Synthetic oligonucleotide
ccauguucuuagggcaugc

SEQ ID NO: 2473442 - RNA, 19 nt, Artificial Sequence
  Description of Artificial Sequence: Synthetic oligonucleotide
gaccagcgggcccaguggu

SEQ ID NO: 2473443 - RNA, 19 nt, Artificial Sequence
  Description of Artificial Sequence: Synthetic oligonucleotide
gcucuuuccagaccaugua

SEQ ID NO: 2473444 - RNA, 19 nt, Artificial Sequence
  Description of Artificial Sequence: Synthetic oligonucleotide
cugauggacagggugcgcu

SEQ ID NO: 2473445 - RNA, 19 nt, Artificial Sequence
  Description of Artificial Sequence: Synthetic oligonucleotide
caaagggaccacagccucu

SEQ ID NO: 2473446 - RNA, 19 nt, Artificial Sequence
  Description of Artificial Sequence: Synthetic oligonucleotide
uaccagcggaggcccucac

SEQ ID NO: 2473447 - RNA, 19 nt, Artificial Sequence
  Description of Artificial Sequence: Synthetic oligonucleotide
cugggccuucaagacccag

SEQ ID NO: 2473448 - RNA, 19 nt, Artificial Sequence
  Description of Artificial Sequence: Synthetic oligonucleotide
accagcgggcccagugguc

SEQ ID NO: 2473449 - RNA, 19 nt, Artificial Sequence
  Description of Artificial Sequence: Synthetic oligonucleotide
agcgugccccagauaggag

SEQ ID NO: 2473450 - RNA, 19 nt, Artificial Sequence
  Description of Artificial Sequence: Synthetic oligonucleotide
cuacugcaacugauguucu

SEQ ID NO: 2473451 - RNA, 19 nt, Artificial Sequence
  Description of Artificial Sequence: Synthetic oligonucleotide
gcccacagcgggcacccag

SEQ ID NO: 2473452 - RNA, 19 nt, Artificial Sequence
  Description of Artificial Sequence: Synthetic oligonucleotide
ggggccaugcccaguucag

SEQ ID NO: 2473453 - RNA, 19 nt, Artificial Sequence
  Description of Artificial Sequence: Synthetic oligonucleotide
ggcuagcauaccagcggag

SEQ ID NO: 2473454 - RNA, 19 nt, Artificial Sequence
  Description of Artificial Sequence: Synthetic oligonucleotide
gcuaggguuguggcuguug

SEQ ID NO: 2473455 - RNA, 19 nt, Artificial Sequence
  Description of Artificial Sequence: Synthetic oligonucleotide
cauaguaguuuagcauggu

SEQ ID NO: 2473456 - RNA, 19 nt, Artificial Sequence
  Description of Artificial Sequence: Synthetic oligonucleotide
gugcuuggcuggcagugcu

SEQ ID NO: 2473457 - RNA, 19 nt, Artificial Sequence
  Description of Artificial Sequence: Synthetic oligonucleotide
ugccagagugaggcccaca

SEQ ID NO: 2473458 - RNA, 19 nt, Artificial Sequence
  Description of Artificial Sequence: Synthetic oligonucleotide
ccauggcugaauaaagcgu

SEQ ID NO: 2473459 - RNA, 19 nt, Artificial Sequence
  Description of Artificial Sequence: Synthetic oligonucleotide
caguguccagcgaggugga

SEQ ID NO: 2473460 - RNA, 19 nt, Artificial Sequence
  Description of Artificial Sequence: Synthetic oligonucleotide
cagaccauguaggagccau

SEQ ID NO: 2473461 - RNA, 19 nt, Artificial Sequence
  Description of Artificial Sequence: Synthetic oligonucleotide
accccacugacgagcagaa

SEQ ID NO: 2473462 - RNA, 19 nt, Artificial Sequence
  Description of Artificial Sequence: Synthetic oligonucleotide
cgcgcacaaaguaggcgcc

SEQ ID NO: 2473463 - RNA, 19 nt, Artificial Sequence
  Description of Artificial Sequence: Synthetic oligonucleotide
gacuuggcacugaccaccu

SEQ ID NO: 2473464 - RNA, 19 nt, Artificial Sequence
  Description of Artificial Sequence: Synthetic oligonucleotide
cucugggaaccgugagcca

SEQ ID NO: 2473465 - RNA, 19 nt, Artificial Sequence
  Description of Artificial Sequence: Synthetic oligonucleotide
gcaugaugcccaccaucca

SEQ ID NO: 2473466 - RNA, 19 nt, Artificial Sequence
  Description of Artificial Sequence: Synthetic oligonucleotide
gggcccaguggucaugaaa

SEQ ID NO: 2473467 - RNA, 19 nt, Artificial Sequence
  Description of Artificial Sequence: Synthetic oligonucleotide
gggcaccaaagaagauggg

SEQ ID NO: 2473468 - RNA, 19 nt, Artificial Sequence
  Description of Artificial Sequence: Synthetic oligonucleotide
ggugccagagugaggccca

SEQ ID NO: 2473469 - RNA, 19 nt, Artificial Sequence
  Description of Artificial Sequence: Synthetic oligonucleotide
ggccaggguuaucacgcca

SEQ ID NO: 2473470 - RNA, 19 nt, Artificial Sequence
  Description of Artificial Sequence: Synthetic oligonucleotide
gcccagcccaucugccggg

SEQ ID NO: 2473471 - RNA, 19 nt, Artificial Sequence
  Description of Artificial Sequence: Synthetic oligonucleotide
cugcaacugauguucuguu

SEQ ID NO: 2473472 - RNA, 19 nt, Artificial Sequence
  Description of Artificial Sequence: Synthetic oligonucleotide
gcgggcacccaggauggag

SEQ ID NO: 2473473 - RNA, 19 nt, Artificial Sequence
  Description of Artificial Sequence: Synthetic oligonucleotide
acuuggcacugaccaccuu

SEQ ID NO: 2473474 - RNA, 19 nt, Artificial Sequence
  Description of Artificial Sequence: Synthetic oligonucleotide
ccacugacgagcagaaggu

SEQ ID NO: 2473475 - RNA, 19 nt, Artificial Sequence
  Description of Artificial Sequence: Synthetic oligonucleotide
ggcagguacaagugucccu

SEQ ID NO: 2473476 - RNA, 19 nt, Artificial Sequence
  Description of Artificial Sequence: Synthetic oligonucleotide
cgccauacauaguaguuua

SEQ ID NO: 2473477 - RNA, 19 nt, Artificial Sequence
  Description of Artificial Sequence: Synthetic oligonucleotide
cuggcagugcugugguccu

SEQ ID NO: 2473478 - RNA, 19 nt, Artificial Sequence
  Description of Artificial Sequence: Synthetic oligonucleotide
cccauguucuuagggcaug

SEQ ID NO: 2473479 - RNA, 19 nt, Artificial Sequence
  Description of Artificial Sequence: Synthetic oligonucleotide
gcugaccaguguagagacc

SEQ ID NO: 2473480 - RNA, 19 nt, Artificial Sequence
  Description of Artificial Sequence: Synthetic oligonucleotide
agaccauguaggagccaua

SEQ ID NO: 2473481 - RNA, 19 nt, Artificial Sequence
  Description of Artificial Sequence: Synthetic oligonucleotide
cucgauggccaggguuauc

SEQ ID NO: 2473482 - RNA, 19 nt, Artificial Sequence
  Description of Artificial Sequence: Synthetic oligonucleotide
agcgggcccaguggucaug

SEQ ID NO: 2473483 - RNA, 19 nt, Artificial Sequence
  Description of Artificial Sequence: Synthetic oligonucleotide
gggcaugccuggagcagug

SEQ ID NO: 2473484 - RNA, 19 nt, Artificial Sequence
  Description of Artificial Sequence: Synthetic oligonucleotide
gcgcacaaaguaggcgccc

SEQ ID NO: 2473485 - RNA, 19 nt, Artificial Sequence
  Description of Artificial Sequence: Synthetic oligonucleotide
ccaucugccgggcaccaaa

SEQ ID NO: 2473486 - RNA, 19 nt, Artificial Sequence
  Description of Artificial Sequence: Synthetic oligonucleotide
gcgggcagcugguggacuc

SEQ ID NO: 2473487 - RNA, 19 nt, Artificial Sequence
  Description of Artificial Sequence: Synthetic oligonucleotide
gccagcugaccaguguaga

SEQ ID NO: 2473488 - RNA, 19 nt, Artificial Sequence
  Description of Artificial Sequence: Synthetic oligonucleotide
caggccagguaaggguaga

SEQ ID NO: 2473489 - RNA, 19 nt, Artificial Sequence
  Description of Artificial Sequence: Synthetic oligonucleotide
caccucgauggccaggguu

SEQ ID NO: 2473490 - RNA, 19 nt, Artificial Sequence
  Description of Artificial Sequence: Synthetic oligonucleotide
aguguccagcgagguggau

SEQ ID NO: 2473491 - RNA, 19 nt, Artificial Sequence
  Description of Artificial Sequence: Synthetic oligonucleotide
ggcaugccuggagcagugc

SEQ ID NO: 2473492 - RNA, 19 nt, Artificial Sequence
  Description of Artificial Sequence: Synthetic oligonucleotide
ccugauggacagggugcgc

SEQ ID NO: 2473493 - RNA, 19 nt, Artificial Sequence
  Description of Artificial Sequence: Synthetic oligonucleotide
cuugaccugucugguggcu

SEQ ID NO: 2473494 - RNA, 19 nt, Artificial Sequence
  Description of Artificial Sequence: Synthetic oligonucleotide
cgcaaaggccagccaggcc

SEQ ID NO: 2473495 - RNA, 19 nt, Artificial Sequence
  Description of Artificial Sequence: Synthetic oligonucleotide
gccauaacccauggcugaa

SEQ ID NO: 2473496 - RNA, 19 nt, Artificial Sequence
  Description of Artificial Sequence: Synthetic oligonucleotide
ccucaccgcgcacaaagua

SEQ ID NO: 2473497 - RNA, 19 nt, Artificial Sequence
  Description of Artificial Sequence: Synthetic oligonucleotide
guccagcgagguggaugcc

SEQ ID NO: 2473498 - RNA, 19 nt, Artificial Sequence
  Description of Artificial Sequence: Synthetic oligonucleotide
gcuuggcuggcagugcugu

SEQ ID NO: 2473499 - RNA, 19 nt, Artificial Sequence
  Description of Artificial Sequence: Synthetic oligonucleotide
ccagcgggcccagugguca

SEQ ID NO: 2473500 - RNA, 19 nt, Artificial Sequence
  Description of Artificial Sequence: Synthetic oligonucleotide
gggccaugcccaguucaga

SEQ ID NO: 2473501 - RNA, 19 nt, Artificial Sequence
  Description of Artificial Sequence: Synthetic oligonucleotide
gcacccaggauggagccau

SEQ ID NO: 2473502 - RNA, 19 nt, Artificial Sequence
  Description of Artificial Sequence: Synthetic oligonucleotide
ggccuucaagacccaggua

SEQ ID NO: 2473503 - RNA, 19 nt, Artificial Sequence
  Description of Artificial Sequence: Synthetic oligonucleotide
cggugccaggcuaggguug

SEQ ID NO: 2473504 - RNA, 19 nt, Artificial Sequence
  Description of Artificial Sequence: Synthetic oligonucleotide
gcggaggcccucaccgcgc

SEQ ID NO: 2473505 - RNA, 19 nt, Artificial Sequence
  Description of Artificial Sequence: Synthetic oligonucleotide
ggugccaggcuaggguugu

SEQ ID NO: 2473506 - RNA, 19 nt, Artificial Sequence
  Description of Artificial Sequence: Synthetic oligonucleotide
gcagugcagaaaggcaggu

SEQ ID NO: 2473507 - RNA, 19 nt, Artificial Sequence
  Description of Artificial Sequence: Synthetic oligonucleotide
ccaggcuaggguuguggcu

SEQ ID NO: 2473508 - RNA, 19 nt, Artificial Sequence
  Description of Artificial Sequence: Synthetic oligonucleotide
gccaggguuaucacgccau

SEQ ID NO: 2473509 - RNA, 19 nt, Artificial Sequence
  Description of Artificial Sequence: Synthetic oligonucleotide
cccagauaggagccagugu

SEQ ID NO: 2473510 - RNA, 19 nt, Artificial Sequence
  Description of Artificial Sequence: Synthetic oligonucleotide
agcgggcacccaggaugga

SEQ ID NO: 2473511 - RNA, 19 nt, Artificial Sequence
  Description of Artificial Sequence: Synthetic oligonucleotide
gggaaccgugagccaccuc

SEQ ID NO: 2473512 - RNA, 19 nt, Artificial Sequence
  Description of Artificial Sequence: Synthetic oligonucleotide
cacagcgggcacccaggau

SEQ ID NO: 2473513 - RNA, 19 nt, Artificial Sequence
  Description of Artificial Sequence: Synthetic oligonucleotide
gcugguggacucacucggu

SEQ ID NO: 2473514 - RNA, 19 nt, Artificial Sequence
  Description of Artificial Sequence: Synthetic oligonucleotide
cccagcccaucugccgggc

SEQ ID NO: 2473515 - RNA, 19 nt, Artificial Sequence
  Description of Artificial Sequence: Synthetic oligonucleotide
cacccaggauggagccaua

SEQ ID NO: 2473516 - RNA, 19 nt, Artificial Sequence
  Description of Artificial Sequence: Synthetic oligonucleotide
ccccacugacgagcagaag

SEQ ID NO: 2473517 - RNA, 19 nt, Artificial Sequence
  Description of Artificial Sequence: Synthetic oligonucleotide
ccaccuugaccugucuggu

SEQ ID NO: 2473518 - RNA, 19 nt, Artificial Sequence
  Description of Artificial Sequence: Synthetic oligonucleotide
gcccaucugccgggcacca

SEQ ID NO: 2473519 - RNA, 19 nt, Artificial Sequence
  Description of Artificial Sequence: Synthetic oligonucleotide
guagaccagcgggcccagu

SEQ ID NO: 2473520 - RNA, 19 nt, Artificial Sequence
  Description of Artificial Sequence: Synthetic oligonucleotide
ccagaccauguaggagcca

SEQ ID NO: 2473521 - RNA, 19 nt, Artificial Sequence
  Description of Artificial Sequence: Synthetic oligonucleotide
ccauggugcuuggcuggca

SEQ ID NO: 2473522 - RNA, 19 nt, Artificial Sequence
  Description of Artificial Sequence: Synthetic oligonucleotide
cccucaccgcgcacaaagu

SEQ ID NO: 2473523 - RNA, 19 nt, Artificial Sequence
  Description of Artificial Sequence: Synthetic oligonucleotide
gcagugcugugguccugau

SEQ ID NO: 2473524 - RNA, 19 nt, Artificial Sequence
  Description of Artificial Sequence: Synthetic oligonucleotide
cagcgggcccaguggucau

SEQ ID NO: 2473525 - RNA, 19 nt, Artificial Sequence
  Description of Artificial Sequence: Synthetic oligonucleotide
ccauaacccauggcugaau

SEQ ID NO: 2473526 - RNA, 19 nt, Artificial Sequence
  Description of Artificial Sequence: Synthetic oligonucleotide
gcccaccauccauggugcu

SEQ ID NO: 2473527 - RNA, 19 nt, Artificial Sequence
  Description of Artificial Sequence: Synthetic oligonucleotide
ggcgggcagcugguggacu

SEQ ID NO: 2473528 - RNA, 19 nt, Artificial Sequence
  Description of Artificial Sequence: Synthetic oligonucleotide
gcauaccagcggaggcccu

SEQ ID NO: 2473529 - RNA, 19 nt, Artificial Sequence
  Description of Artificial Sequence: Synthetic oligonucleotide
gccccagauaggagccagu

SEQ ID NO: 2473530 - RNA, 19 nt, Artificial Sequence
  Description of Artificial Sequence: Synthetic oligonucleotide
ggcccucaccgcgcacaaa

SEQ ID NO: 2473531 - RNA, 19 nt, Artificial Sequence
  Description of Artificial Sequence: Synthetic oligonucleotide
gccgggcaccaaagaagau

SEQ ID NO: 2473532 - RNA, 19 nt, Artificial Sequence
  Description of Artificial Sequence: Synthetic oligonucleotide
ccucgauggccaggguuau

SEQ ID NO: 2473533 - RNA, 19 nt, Artificial Sequence
  Description of Artificial Sequence: Synthetic oligonucleotide
ggcccacagcgggcaccca

SEQ ID NO: 2473534 - RNA, 19 nt, Artificial Sequence
  Description of Artificial Sequence: Synthetic oligonucleotide
cccaucugccgggcaccaa

SEQ ID NO: 2473535 - RNA, 19 nt, Artificial Sequence
  Description of Artificial Sequence: Synthetic oligonucleotide
ccaccucgauggccagggu

SEQ ID NO: 2473536 - RNA, 19 nt, Artificial Sequence
  Description of Artificial Sequence: Synthetic oligonucleotide
ggcuaggguuguggcuguu

SEQ ID NO: 2473537 - RNA, 19 nt, Artificial Sequence
  Description of Artificial Sequence: Synthetic oligonucleotide
ugagauuucaguuaaaagc

SEQ ID NO: 2473538 - RNA, 19 nt, Artificial Sequence
  Description of Artificial Sequence: Synthetic oligonucleotide
uguauauuugucaugacag

SEQ ID NO: 2473539 - RNA, 19 nt, Artificial Sequence
  Description of Artificial Sequence: Synthetic oligonucleotide
uucauuuaaacuaaauuac

SEQ ID NO: 2473540 - RNA, 19 nt, Artificial Sequence
  Description of Artificial Sequence: Synthetic oligonucleotide
ugucauaacauuaaagaga

SEQ ID NO: 2473541 - RNA, 19 nt, Artificial Sequence
  Description of Artificial Sequence: Synthetic oligonucleotide
uaaacuaaauuacuguuug

SEQ ID NO: 2473542 - RNA, 19 nt, Artificial Sequence
  Description of Artificial Sequence: Synthetic oligonucleotide
uucuguauauaucugcugg

SEQ ID NO: 2473543 - RNA, 19 nt, Artificial Sequence
  Description of Artificial Sequence: Synthetic oligonucleotide
aagcaccaaaucuucaucc

SEQ ID NO: 2473544 - RNA, 19 nt, Artificial Sequence
  Description of Artificial Sequence: Synthetic oligonucleotide
aaaacacucccacuugggc

SEQ ID NO: 2473545 - RNA, 19 nt, Artificial Sequence
  Description of Artificial Sequence: Synthetic oligonucleotide
ugaaauguguaacuaacug

SEQ ID NO: 2473546 - RNA, 19 nt, Artificial Sequence
  Description of Artificial Sequence: Synthetic oligonucleotide
uuaaguaccguauccacag

SEQ ID NO: 2473547 - RNA, 19 nt, Artificial Sequence
  Description of Artificial Sequence: Synthetic oligonucleotide
aagaagagauucuugggag

SEQ ID NO: 2473548 - RNA, 19 nt, Artificial Sequence
  Description of Artificial Sequence: Synthetic oligonucleotide
cugucauuugauaaaagcg

SEQ ID NO: 2473549 - RNA, 19 nt, Artificial Sequence
  Description of Artificial Sequence: Synthetic oligonucleotide
acauucuguauauaucugc

SEQ ID NO: 2473550 - RNA, 19 nt, Artificial Sequence
  Description of Artificial Sequence: Synthetic oligonucleotide
uguaacuaacugaagaaga

SEQ ID NO: 2473551 - RNA, 19 nt, Artificial Sequence
  Description of Artificial Sequence: Synthetic oligonucleotide
uuaauuuccagguuucacc

SEQ ID NO: 2473552 - RNA, 19 nt, Artificial Sequence
  Description of Artificial Sequence: Synthetic oligonucleotide
ucuaauuucuauuuuccug

SEQ ID NO: 2473553 - RNA, 19 nt, Artificial Sequence
  Description of Artificial Sequence: Synthetic oligonucleotide
aaagacaccugacucgaac

SEQ ID NO: 2473554 - RNA, 19 nt, Artificial Sequence
  Description of Artificial Sequence: Synthetic oligonucleotide
ugucauuugauaaaagcgu

SEQ ID NO: 2473555 - RNA, 19 nt, Artificial Sequence
  Description of Artificial Sequence: Synthetic oligonucleotide
ugaacaaauaaacuuucca

SEQ ID NO: 2473556 - RNA, 19 nt, Artificial Sequence
  Description of Artificial Sequence: Synthetic oligonucleotide
uugucauaacauuaaagag

SEQ ID NO: 2473557 - RNA, 19 nt, Artificial Sequence
  Description of Artificial Sequence: Synthetic oligonucleotide
guugucauaacauuaaaga

SEQ ID NO: 2473558 - RNA, 19 nt, Artificial Sequence
  Description of Artificial Sequence: Synthetic oligonucleotide
uguugucauaacauuaaag

SEQ ID NO: 2473559 - RNA, 19 nt, Artificial Sequence
  Description of Artificial Sequence: Synthetic oligonucleotide
uacccaaucuucaucaucc

SEQ ID NO: 2473560 - RNA, 19 nt, Artificial Sequence
  Description of Artificial Sequence: Synthetic oligonucleotide
cuauuuuccuguuuguagg

SEQ ID NO: 2473561 - RNA, 19 nt, Artificial Sequence
  Description of Artificial Sequence: Synthetic oligonucleotide
uucaguuaaaagcuugggc

SEQ ID NO: 2473562 - RNA, 19 nt, Artificial Sequence
  Description of Artificial Sequence: Synthetic oligonucleotide
acuguauauggauuugugg

SEQ ID NO: 2473563 - RNA, 19 nt, Artificial Sequence
  Description of Artificial Sequence: Synthetic oligonucleotide
aaaggaaguggaaagacug

SEQ ID NO: 2473564 - RNA, 19 nt, Artificial Sequence
  Description of Artificial Sequence: Synthetic oligonucleotide
aguaagaccugugaauucc

SEQ ID NO: 2473565 - RNA, 19 nt, Artificial Sequence
  Description of Artificial Sequence: Synthetic oligonucleotide
ucaaaacacucccacuugg

SEQ ID NO: 2473566 - RNA, 19 nt, Artificial Sequence
  Description of Artificial Sequence: Synthetic oligonucleotide
uguagguuuuaaaacauuc

SEQ ID NO: 2473567 - RNA, 19 nt, Artificial Sequence
  Description of Artificial Sequence: Synthetic oligonucleotide
uguuuguagguuuuaaaac

SEQ ID NO: 2473568 - RNA, 19 nt, Artificial Sequence
  Description of Artificial Sequence: Synthetic oligonucleotide
ucauuuaaacuaaauuacu

SEQ ID NO: 2473569 - RNA, 19 nt, Artificial Sequence
  Description of Artificial Sequence: Synthetic oligonucleotide
auaaaagcguucuucuuag

SEQ ID NO: 2473570 - RNA, 19 nt, Artificial Sequence
  Description of Artificial Sequence: Synthetic oligonucleotide
gauucuugggaguauguug

SEQ ID NO: 2473571 - RNA, 19 nt, Artificial Sequence
  Description of Artificial Sequence: Synthetic oligonucleotide
guggaaagacuguauaugg

SEQ ID NO: 2473572 - RNA, 19 nt, Artificial Sequence
  Description of Artificial Sequence: Synthetic oligonucleotide
uauauuugucaugacagug

SEQ ID NO: 2473573 - RNA, 19 nt, Artificial Sequence
  Description of Artificial Sequence: Synthetic oligonucleotide
auauuugucaugacagugc

SEQ ID NO: 2473574 - RNA, 19 nt, Artificial Sequence
  Description of Artificial Sequence: Synthetic oligonucleotide
cuaacugaagaagagauuc

SEQ ID NO: 2473575 - RNA, 19 nt, Artificial Sequence
  Description of Artificial Sequence: Synthetic oligonucleotide
uaaauugggaaccuccuuc

SEQ ID NO: 2473576 - RNA, 19 nt, Artificial Sequence
  Description of Artificial Sequence: Synthetic oligonucleotide
aaagacuguauauggauuu

SEQ ID NO: 2473577 - RNA, 19 nt, Artificial Sequence
  Description of Artificial Sequence: Synthetic oligonucleotide
aguuauuccuauguccucc

SEQ ID NO: 2473578 - RNA, 19 nt, Artificial Sequence
  Description of Artificial Sequence: Synthetic oligonucleotide
acuaaauuacuguuugaug

SEQ ID NO: 2473579 - RNA, 19 nt, Artificial Sequence
  Description of Artificial Sequence: Synthetic oligonucleotide
uuugauaaaagcguucuuc

SEQ ID NO: 2473580 - RNA, 19 nt, Artificial Sequence
  Description of Artificial Sequence: Synthetic oligonucleotide
ucuuccacguuaaguaccg

SEQ ID NO: 2473581 - RNA, 19 nt, Artificial Sequence
  Description of Artificial Sequence: Synthetic oligonucleotide
guuuguagguuuuaaaaca

SEQ ID NO: 2473582 - RNA, 19 nt, Artificial Sequence
  Description of Artificial Sequence: Synthetic oligonucleotide
uuaaacuaaauuacuguuu

SEQ ID NO: 2473583 - RNA, 19 nt, Artificial Sequence
  Description of Artificial Sequence: Synthetic oligonucleotide
uugauaaaagcguucuucu

SEQ ID NO: 2473584 - RNA, 19 nt, Artificial Sequence
  Description of Artificial Sequence: Synthetic oligonucleotide
acugucaagcaccaaaucu

SEQ ID NO: 2473585 - RNA, 19 nt, Artificial Sequence
  Description of Artificial Sequence: Synthetic oligonucleotide
uccacaguuauuccuaugu

SEQ ID NO: 2473586 - RNA, 19 nt, Artificial Sequence
  Description of Artificial Sequence: Synthetic oligonucleotide
auuccuauguccuccagug

SEQ ID NO: 2473587 - RNA, 19 nt, Artificial Sequence
  Description of Artificial Sequence: Synthetic oligonucleotide
uucuguauauuugucauga

SEQ ID NO: 2473588 - RNA, 19 nt, Artificial Sequence
  Description of Artificial Sequence: Synthetic oligonucleotide
agugcuugcauccuauuug

SEQ ID NO: 2473589 - RNA, 19 nt, Artificial Sequence
  Description of Artificial Sequence: Synthetic oligonucleotide
aaguaagaccugugaauuc

SEQ ID NO: 2473590 - RNA, 19 nt, Artificial Sequence
  Description of Artificial Sequence: Synthetic oligonucleotide
cacaguuauuccuaugucc

SEQ ID NO: 2473591 - RNA, 19 nt, Artificial Sequence
  Description of Artificial Sequence: Synthetic oligonucleotide
ugguguacugaacaaauaa

SEQ ID NO: 2473592 - RNA, 19 nt, Artificial Sequence
  Description of Artificial Sequence: Synthetic oligonucleotide
gaagaagagauucuuggga

SEQ ID NO: 2473593 - RNA, 19 nt, Artificial Sequence
  Description of Artificial Sequence: Synthetic oligonucleotide
aguuccgucuccucgcugc

SEQ ID NO: 2473594 - RNA, 19 nt, Artificial Sequence
  Description of Artificial Sequence: Synthetic oligonucleotide
aacuguaaccaccucuuca

SEQ ID NO: 2473595 - RNA, 19 nt, Artificial Sequence
  Description of Artificial Sequence: Synthetic oligonucleotide
uggcucuucagguaaauug

SEQ ID NO: 2473596 - RNA, 19 nt, Artificial Sequence
  Description of Artificial Sequence: Synthetic oligonucleotide
uuuccgguggcucuucagg

SEQ ID NO: 2473597 - RNA, 19 nt, Artificial Sequence
  Description of Artificial Sequence: Synthetic oligonucleotide
cuaaauuacuguuugaugu

SEQ ID NO: 2473598 - RNA, 19 nt, Artificial Sequence
  Description of Artificial Sequence: Synthetic oligonucleotide
uuugguguacugaacaaau

SEQ ID NO: 2473599 - RNA, 19 nt, Artificial Sequence
  Description of Artificial Sequence: Synthetic oligonucleotide
aacuaaauuacuguuugau

SEQ ID NO: 2473600 - RNA, 19 nt, Artificial Sequence
  Description of Artificial Sequence: Synthetic oligonucleotide
aaauugggaaccuccuucu

SEQ ID NO: 2473601 - RNA, 19 nt, Artificial Sequence
  Description of Artificial Sequence: Synthetic oligonucleotide
uauuugucaugacagugcu

SEQ ID NO: 2473602 - RNA, 19 nt, Artificial Sequence
  Description of Artificial Sequence: Synthetic oligonucleotide
uaauuuccagguuucaccu

SEQ ID NO: 2473603 - RNA, 19 nt, Artificial Sequence
  Description of Artificial Sequence: Synthetic oligonucleotide
aaagagauuuccuuucauu

SEQ ID NO: 2473604 - RNA, 19 nt, Artificial Sequence
  Description of Artificial Sequence: Synthetic oligonucleotide
agcaccaaaucuucauccc

SEQ ID NO: 2473605 - RNA, 19 nt, Artificial Sequence
  Description of Artificial Sequence: Synthetic oligonucleotide
aaagcguucuucuuaguuu

SEQ ID NO: 2473606 - RNA, 19 nt, Artificial Sequence
  Description of Artificial Sequence: Synthetic oligonucleotide
ucaaguaagaccugugaau

SEQ ID NO: 2473607 - RNA, 19 nt, Artificial Sequence
  Description of Artificial Sequence: Synthetic oligonucleotide
uucucuuccacguuaagua

SEQ ID NO: 2473608 - RNA, 19 nt, Artificial Sequence
  Description of Artificial Sequence: Synthetic oligonucleotide
caugacagugcuugcaucc

SEQ ID NO: 2473609 - RNA, 19 nt, Artificial Sequence
  Description of Artificial Sequence: Synthetic oligonucleotide
aaaagcguucuucuuaguu

SEQ ID NO: 2473610 - RNA, 19 nt, Artificial Sequence
  Description of Artificial Sequence: Synthetic oligonucleotide
aaucuccuccucaaaacac

SEQ ID NO: 2473611 - RNA, 19 nt, Artificial Sequence
  Description of Artificial Sequence: Synthetic oligonucleotide
aagggcaacuguaaccacc

SEQ ID NO: 2473612 - RNA, 19 nt, Artificial Sequence
  Description of Artificial Sequence: Synthetic oligonucleotide
uguauauaucugcuggccu

SEQ ID NO: 2473613 - RNA, 19 nt, Artificial Sequence
  Description of Artificial Sequence: Synthetic oligonucleotide
aagaccugugaauuccaag

SEQ ID NO: 2473614 - RNA, 19 nt, Artificial Sequence
  Description of Artificial Sequence: Synthetic oligonucleotide
aacuaacugaagaagagau

SEQ ID NO: 2473615 - RNA, 19 nt, Artificial Sequence
  Description of Artificial Sequence: Synthetic oligonucleotide
aacugucaagcaccaaauc

SEQ ID NO: 2473616 - RNA, 19 nt, Artificial Sequence
  Description of Artificial Sequence: Synthetic oligonucleotide
accguauccacaguuauuc

SEQ ID NO: 2473617 - RNA, 19 nt, Artificial Sequence
  Description of Artificial Sequence: Synthetic oligonucleotide
aaauuacuguuugauguug

SEQ ID NO: 2473618 - RNA, 19 nt, Artificial Sequence
  Description of Artificial Sequence: Synthetic oligonucleotide
agaccugugaauuccaaga

SEQ ID NO: 2473619 - RNA, 19 nt, Artificial Sequence
  Description of Artificial Sequence: Synthetic oligonucleotide
uggccaguaguuaauuucc

SEQ ID NO: 2473620 - RNA, 19 nt, Artificial Sequence
  Description of Artificial Sequence: Synthetic oligonucleotide
uugaaauguguaacuaacu

SEQ ID NO: 2473621 - RNA, 19 nt, Artificial Sequence
  Description of Artificial Sequence: Synthetic oligonucleotide
agguaaauugggaaccucc

SEQ ID NO: 2473622 - RNA, 19 nt, Artificial Sequence
  Description of Artificial Sequence: Synthetic oligonucleotide
gauaaaagcguucuucuua

SEQ ID NO: 2473623 - RNA, 19 nt, Artificial Sequence
  Description of Artificial Sequence: Synthetic oligonucleotide
aacauuaaagagauuuccu

SEQ ID NO: 2473624 - RNA, 19 nt, Artificial Sequence
  Description of Artificial Sequence: Synthetic oligonucleotide
ucuguauauaucugcuggc

SEQ ID NO: 2473625 - RNA, 19 nt, Artificial Sequence
  Description of Artificial Sequence: Synthetic oligonucleotide
ucugcauuauuucuguaua

SEQ ID NO: 2473626 - RNA, 19 nt, Artificial Sequence
  Description of Artificial Sequence: Synthetic oligonucleotide
uccuauguccuccagugac

SEQ ID NO: 2473627 - RNA, 19 nt, Artificial Sequence
  Description of Artificial Sequence: Synthetic oligonucleotide
gauuucaguuaaaagcuug

SEQ ID NO: 2473628 - RNA, 19 nt, Artificial Sequence
  Description of Artificial Sequence: Synthetic oligonucleotide
guauauaucugcuggccug

SEQ ID NO: 2473629 - RNA, 19 nt, Artificial Sequence
  Description of Artificial Sequence: Synthetic oligonucleotide
aaguggaaagacuguauau

SEQ ID NO: 2473630 - RNA, 19 nt, Artificial Sequence
  Description of Artificial Sequence: Synthetic oligonucleotide
ggaaccuccuucuuggugg

SEQ ID NO: 2473631 - RNA, 19 nt, Artificial Sequence
  Description of Artificial Sequence: Synthetic oligonucleotide
aaacuaaauuacuguuuga

SEQ ID NO: 2473632 - RNA, 19 nt, Artificial Sequence
  Description of Artificial Sequence: Synthetic oligonucleotide
guaacuaacugaagaagag

SEQ ID NO: 2473633 - RNA, 19 nt, Artificial Sequence
  Description of Artificial Sequence: Synthetic oligonucleotide
ugguacccaaucuucauca

SEQ ID NO: 2473634 - RNA, 19 nt, Artificial Sequence
  Description of Artificial Sequence: Synthetic oligonucleotide
ugugaauuccaagacuuga

SEQ ID NO: 2473635 - RNA, 19 nt, Artificial Sequence
  Description of Artificial Sequence: Synthetic oligonucleotide
uguaaccaccucuucagcu

SEQ ID NO: 2473636 - RNA, 19 nt, Artificial Sequence
  Description of Artificial Sequence: Synthetic oligonucleotide
acauuaaagagauuuccuu

SEQ ID NO: 2473637 - RNA, 19 nt, Artificial Sequence
  Description of Artificial Sequence: Synthetic oligonucleotide
aguggaaagacuguauaug

SEQ ID NO: 2473638 - RNA, 19 nt, Artificial Sequence
  Description of Artificial Sequence: Synthetic oligonucleotide
ucgaagggcaacuguaacc

SEQ ID NO: 2473639 - RNA, 19 nt, Artificial Sequence
  Description of Artificial Sequence: Synthetic oligonucleotide
auauggauuugugguaccc

SEQ ID NO: 2473640 - RNA, 19 nt, Artificial Sequence
  Description of Artificial Sequence: Synthetic oligonucleotide
auuucaguuaaaagcuugg

SEQ ID NO: 2473641 - RNA, 19 nt, Artificial Sequence
  Description of Artificial Sequence: Synthetic oligonucleotide
aauaaacuuuccaauuuaa

SEQ ID NO: 2473642 - RNA, 19 nt, Artificial Sequence
  Description of Artificial Sequence: Synthetic oligonucleotide
uguauauggauuuguggua

SEQ ID NO: 2473643 - RNA, 19 nt, Artificial Sequence
  Description of Artificial Sequence: Synthetic oligonucleotide
ucauuugauaaaagcguuc

SEQ ID NO: 2473644 - RNA, 19 nt, Artificial Sequence
  Description of Artificial Sequence: Synthetic oligonucleotide
cugaacaaauaaacuuucc

SEQ ID NO: 2473645 - RNA, 19 nt, Artificial Sequence
  Description of Artificial Sequence: Synthetic oligonucleotide
caucauccagucaaguaag

SEQ ID NO: 2473646 - RNA, 19 nt, Artificial Sequence
  Description of Artificial Sequence: Synthetic oligonucleotide
auaucugcuggccugcuca

SEQ ID NO: 2473647 - RNA, 19 nt, Artificial Sequence
  Description of Artificial Sequence: Synthetic oligonucleotide
uggaaagacuguauaugga

SEQ ID NO: 2473648 - RNA, 19 nt, Artificial Sequence
  Description of Artificial Sequence: Synthetic oligonucleotide
gaauuccaagacuugaaaa

SEQ ID NO: 2473649 - RNA, 19 nt, Artificial Sequence
  Description of Artificial Sequence: Synthetic oligonucleotide
uccuauuugguguacugaa

SEQ ID NO: 2473650 - RNA, 19 nt, Artificial Sequence
  Description of Artificial Sequence: Synthetic oligonucleotide
cacguuaaguaccguaucc

SEQ ID NO: 2473651 - RNA, 19 nt, Artificial Sequence
  Description of Artificial Sequence: Synthetic oligonucleotide
gagauuucaguuaaaagcu

SEQ ID NO: 2473652 - RNA, 19 nt, Artificial Sequence
  Description of Artificial Sequence: Synthetic oligonucleotide
caaaacacucccacuuggg

SEQ ID NO: 2473653 - RNA, 19 nt, Artificial Sequence
  Description of Artificial Sequence: Synthetic oligonucleotide
aguauguugucauaacauu

SEQ ID NO: 2473654 - RNA, 19 nt, Artificial Sequence
  Description of Artificial Sequence: Synthetic oligonucleotide
ucuucaucauccagucaag

SEQ ID NO: 2473655 - RNA, 19 nt, Artificial Sequence
  Description of Artificial Sequence: Synthetic oligonucleotide
auccagucaaguaagaccu

SEQ ID NO: 2473656 - RNA, 19 nt, Artificial Sequence
  Description of Artificial Sequence: Synthetic oligonucleotide
uauuccuauguccuccagu

SEQ ID NO: 2473657 - RNA, 19 nt, Artificial Sequence
  Description of Artificial Sequence: Synthetic oligonucleotide
gugcuugcauccuauuugg

SEQ ID NO: 2473658 - RNA, 19 nt, Artificial Sequence
  Description of Artificial Sequence: Synthetic oligonucleotide
agucaaguaagaccuguga

SEQ ID NO: 2473659 - RNA, 19 nt, Artificial Sequence
  Description of Artificial Sequence: Synthetic oligonucleotide
uaaauuacuguuugauguu

SEQ ID NO: 2473660 - RNA, 19 nt, Artificial Sequence
  Description of Artificial Sequence: Synthetic oligonucleotide
uaacuaacugaagaagaga

SEQ ID NO: 2473661 - RNA, 19 nt, Artificial Sequence
  Description of Artificial Sequence: Synthetic oligonucleotide
uaguuaauuuccagguuuc

SEQ ID NO: 2473662 - RNA, 19 nt, Artificial Sequence
  Description of Artificial Sequence: Synthetic oligonucleotide
uccacguuaaguaccguau

SEQ ID NO: 2473663 - RNA, 19 nt, Artificial Sequence
  Description of Artificial Sequence: Synthetic oligonucleotide
caaucuucaucauccaguc

SEQ ID NO: 2473664 - RNA, 19 nt, Artificial Sequence
  Description of Artificial Sequence: Synthetic oligonucleotide
aauuuccagguuucaccug

SEQ ID NO: 2473665 - RNA, 19 nt, Artificial Sequence
  Description of Artificial Sequence: Synthetic oligonucleotide
ucccacuugggcaucgaag

SEQ ID NO: 2473666 - RNA, 19 nt, Artificial Sequence
  Description of Artificial Sequence: Synthetic oligonucleotide
cuguuugcuguuuccaaag

SEQ ID NO: 2473667 - RNA, 19 nt, Artificial Sequence
  Description of Artificial Sequence: Synthetic oligonucleotide
ccugucauuugauaaaagc

SEQ ID NO: 2473668 - RNA, 19 nt, Artificial Sequence
  Description of Artificial Sequence: Synthetic oligonucleotide
ugucaagcaccaaaucuuc

SEQ ID NO: 2473669 - RNA, 19 nt, Artificial Sequence
  Description of Artificial Sequence: Synthetic oligonucleotide
acaguuauuccuauguccu

SEQ ID NO: 2473670 - RNA, 19 nt, Artificial Sequence
  Description of Artificial Sequence: Synthetic oligonucleotide
ucaagcaccaaaucuucau

SEQ ID NO: 2473671 - RNA, 19 nt, Artificial Sequence
  Description of Artificial Sequence: Synthetic oligonucleotide
uauuugguguacugaacaa

SEQ ID NO: 2473672 - RNA, 19 nt, Artificial Sequence
  Description of Artificial Sequence: Synthetic oligonucleotide
aucugcauuauuucuguau

SEQ ID NO: 2473673 - RNA, 19 nt, Artificial Sequence
  Description of Artificial Sequence: Synthetic oligonucleotide
guaaccaccucuucagcug

SEQ ID NO: 2473674 - RNA, 19 nt, Artificial Sequence
  Description of Artificial Sequence: Synthetic oligonucleotide
uauauaucugcuggccugc

SEQ ID NO: 2473675 - RNA, 19 nt, Artificial Sequence
  Description of Artificial Sequence: Synthetic oligonucleotide
ccaguaguuaauuuccagg

SEQ ID NO: 2473676 - RNA, 19 nt, Artificial Sequence
  Description of Artificial Sequence: Synthetic oligonucleotide
cuguuuguagguuuuaaaa

SEQ ID NO: 2473677 - RNA, 19 nt, Artificial Sequence
  Description of Artificial Sequence: Synthetic oligonucleotide
uccaguuuguggccaguag

SEQ ID NO: 2473678 - RNA, 19 nt, Artificial Sequence
  Description of Artificial Sequence: Synthetic oligonucleotide
uauauggauuugugguacc

SEQ ID NO: 2473679 - RNA, 19 nt, Artificial Sequence
  Description of Artificial Sequence: Synthetic oligonucleotide
cuguauauuugucaugaca

SEQ ID NO: 2473680 - RNA, 19 nt, Artificial Sequence
  Description of Artificial Sequence: Synthetic oligonucleotide
uaaagagauuuccuuucau

SEQ ID NO: 2473681 - RNA, 19 nt, Artificial Sequence
  Description of Artificial Sequence: Synthetic oligonucleotide
aauuacuguuugauguuga

SEQ ID NO: 2473682 - RNA, 19 nt, Artificial Sequence
  Description of Artificial Sequence: Synthetic oligonucleotide
aaguaccguauccacaguu

SEQ ID NO: 2473683 - RNA, 19 nt, Artificial Sequence
  Description of Artificial Sequence: Synthetic oligonucleotide
auucuugggaguauguugu

SEQ ID NO: 2473684 - RNA, 19 nt, Artificial Sequence
  Description of Artificial Sequence: Synthetic oligonucleotide
ucccucugucuccagaggc

SEQ ID NO: 2473685 - RNA, 19 nt, Artificial Sequence
  Description of Artificial Sequence: Synthetic oligonucleotide
cugacucgaacugucaagc

SEQ ID NO: 2473686 - RNA, 19 nt, Artificial Sequence
  Description of Artificial Sequence: Synthetic oligonucleotide
cuguauauaucugcuggcc

SEQ ID NO: 2473687 - RNA, 19 nt, Artificial Sequence
  Description of Artificial Sequence: Synthetic oligonucleotide
uugugguacccaaucuuca

SEQ ID NO: 2473688 - RNA, 19 nt, Artificial Sequence
  Description of Artificial Sequence: Synthetic oligonucleotide
aagacuguauauggauuug

SEQ ID NO: 2473689 - RNA, 19 nt, Artificial Sequence
  Description of Artificial Sequence: Synthetic oligonucleotide
guauauggauuugugguac

SEQ ID NO: 2473690 - RNA, 19 nt, Artificial Sequence
  Description of Artificial Sequence: Synthetic oligonucleotide
uuuuccuguuuguagguuu

SEQ ID NO: 2473691 - RNA, 19 nt, Artificial Sequence
  Description of Artificial Sequence: Synthetic oligonucleotide
ucucuuccacguuaaguac

SEQ ID NO: 2473692 - RNA, 19 nt, Artificial Sequence
  Description of Artificial Sequence: Synthetic oligonucleotide
agagauuuccuuucauuua

SEQ ID NO: 2473693 - RNA, 19 nt, Artificial Sequence
  Description of Artificial Sequence: Synthetic oligonucleotide
aguuaaaagcuugggcaag

SEQ ID NO: 2473694 - RNA, 19 nt, Artificial Sequence
  Description of Artificial Sequence: Synthetic oligonucleotide
uucucuguuugcuguuucc

SEQ ID NO: 2473695 - RNA, 19 nt, Artificial Sequence
  Description of Artificial Sequence: Synthetic oligonucleotide
gacuguauauggauuugug

SEQ ID NO: 2473696 - RNA, 19 nt, Artificial Sequence
  Description of Artificial Sequence: Synthetic oligonucleotide
aaucuucaucauccaguca

SEQ ID NO: 2473697 - RNA, 19 nt, Artificial Sequence
  Description of Artificial Sequence: Synthetic oligonucleotide
uucuuggugggcuguggag

SEQ ID NO: 2473698 - RNA, 19 nt, Artificial Sequence
  Description of Artificial Sequence: Synthetic oligonucleotide
ugcuguuuccaaagacacc

SEQ ID NO: 2473699 - RNA, 19 nt, Artificial Sequence
  Description of Artificial Sequence: Synthetic oligonucleotide
uuauuccuauguccuccag

SEQ ID NO: 2473700 - RNA, 19 nt, Artificial Sequence
  Description of Artificial Sequence: Synthetic oligonucleotide
agcuugggcaaguuccguc

SEQ ID NO: 2473701 - RNA, 19 nt, Artificial Sequence
  Description of Artificial Sequence: Synthetic oligonucleotide
cucaaaacacucccacuug

SEQ ID NO: 2473702 - RNA, 19 nt, Artificial Sequence
  Description of Artificial Sequence: Synthetic oligonucleotide
ggcaaguuccgucuccucg

SEQ ID NO: 2473703 - RNA, 19 nt, Artificial Sequence
  Description of Artificial Sequence: Synthetic oligonucleotide
uguccuccagugacaagcc

SEQ ID NO: 2473704 - RNA, 19 nt, Artificial Sequence
  Description of Artificial Sequence: Synthetic oligonucleotide
accugugaauuccaagacu

SEQ ID NO: 2473705 - RNA, 19 nt, Artificial Sequence
  Description of Artificial Sequence: Synthetic oligonucleotide
cuccucaaaacacucccac

SEQ ID NO: 2473706 - RNA, 19 nt, Artificial Sequence
  Description of Artificial Sequence: Synthetic oligonucleotide
uauggauuugugguaccca

SEQ ID NO: 2473707 - RNA, 19 nt, Artificial Sequence
  Description of Artificial Sequence: Synthetic oligonucleotide
aguaguuaauuuccagguu

SEQ ID NO: 2473708 - RNA, 19 nt, Artificial Sequence
  Description of Artificial Sequence: Synthetic oligonucleotide
auuacuguuugauguugau

SEQ ID NO: 2473709 - RNA, 19 nt, Artificial Sequence
  Description of Artificial Sequence: Synthetic oligonucleotide
uaaccaccucuucagcugu

SEQ ID NO: 2473710 - RNA, 19 nt, Artificial Sequence
  Description of Artificial Sequence: Synthetic oligonucleotide
auggauuugugguacccaa

SEQ ID NO: 2473711 - RNA, 19 nt, Artificial Sequence
  Description of Artificial Sequence: Synthetic oligonucleotide
gucaaguaagaccugugaa

SEQ ID NO: 2473712 - RNA, 19 nt, Artificial Sequence
  Description of Artificial Sequence: Synthetic oligonucleotide
gaaccuccuucuugguggg

SEQ ID NO: 2473713 - RNA, 19 nt, Artificial Sequence
  Description of Artificial Sequence: Synthetic oligonucleotide
ugucaugacagugcuugca

SEQ ID NO: 2473714 - RNA, 19 nt, Artificial Sequence
  Description of Artificial Sequence: Synthetic oligonucleotide
cuucagcuguuuccggugg

SEQ ID NO: 2473715 - RNA, 19 nt, Artificial Sequence
  Description of Artificial Sequence: Synthetic oligonucleotide
uuacuguuugauguugauc

SEQ ID NO: 2473716 - RNA, 19 nt, Artificial Sequence
  Description of Artificial Sequence: Synthetic oligonucleotide
ugcauuauuucuguauauu

SEQ ID NO: 2473717 - RNA, 19 nt, Artificial Sequence
  Description of Artificial Sequence: Synthetic oligonucleotide
ugggaguauguugucauaa

SEQ ID NO: 2473718 - RNA, 19 nt, Artificial Sequence
  Description of Artificial Sequence: Synthetic oligonucleotide
guaguuaauuuccagguuu

SEQ ID NO: 2473719 - RNA, 19 nt, Artificial Sequence
  Description of Artificial Sequence: Synthetic oligonucleotide
cucgcugcuucucuguuug

SEQ ID NO: 2473720 - RNA, 19 nt, Artificial Sequence
  Description of Artificial Sequence: Synthetic oligonucleotide
ucuguauauuugucaugac

SEQ ID NO: 2473721 - RNA, 19 nt, Artificial Sequence
  Description of Artificial Sequence: Synthetic oligonucleotide
ugugguacccaaucuucau

SEQ ID NO: 2473722 - RNA, 19 nt, Artificial Sequence
  Description of Artificial Sequence: Synthetic oligonucleotide
agagauucuugggaguaug

SEQ ID NO: 2473723 - RNA, 19 nt, Artificial Sequence
  Description of Artificial Sequence: Synthetic oligonucleotide
uccagguuucaccugucau

SEQ ID NO: 2473724 - RNA, 19 nt, Artificial Sequence
  Description of Artificial Sequence: Synthetic oligonucleotide
uuguagguuuuaaaacauu

SEQ ID NO: 2473725 - RNA, 19 nt, Artificial Sequence
  Description of Artificial Sequence: Synthetic oligonucleotide
uuuccuguuuguagguuuu

SEQ ID NO: 2473726 - RNA, 19 nt, Artificial Sequence
  Description of Artificial Sequence: Synthetic oligonucleotide
uugggcaaguuccgucucc

SEQ ID NO: 2473727 - RNA, 19 nt, Artificial Sequence
  Description of Artificial Sequence: Synthetic oligonucleotide
aaggaaguggaaagacugu

SEQ ID NO: 2473728 - RNA, 19 nt, Artificial Sequence
  Description of Artificial Sequence: Synthetic oligonucleotide
uuccacguuaaguaccgua

SEQ ID NO: 2473729 - RNA, 19 nt, Artificial Sequence
  Description of Artificial Sequence: Synthetic oligonucleotide
ggaguauguugucauaaca

SEQ ID NO: 2473730 - RNA, 19 nt, Artificial Sequence
  Description of Artificial Sequence: Synthetic oligonucleotide
guuaaguaccguauccaca

SEQ ID NO: 2473731 - RNA, 19 nt, Artificial Sequence
  Description of Artificial Sequence: Synthetic oligonucleotide
ucagguaaauugggaaccu

SEQ ID NO: 2473732 - RNA, 19 nt, Artificial Sequence
  Description of Artificial Sequence: Synthetic oligonucleotide
uugguguacugaacaaaua

SEQ ID NO: 2473733 - RNA, 19 nt, Artificial Sequence
  Description of Artificial Sequence: Synthetic oligonucleotide
caguaguuaauuuccaggu

SEQ ID NO: 2473734 - RNA, 19 nt, Artificial Sequence
  Description of Artificial Sequence: Synthetic oligonucleotide
auguugucauaacauuaaa

SEQ ID NO: 2473735 - RNA, 19 nt, Artificial Sequence
  Description of Artificial Sequence: Synthetic oligonucleotide
ggauuugugguacccaauc

SEQ ID NO: 2473736 - RNA, 19 nt, Artificial Sequence
  Description of Artificial Sequence: Synthetic oligonucleotide
ugacucgaacugucaagca

SEQ ID NO: 2473737 - RNA, 19 nt, Artificial Sequence
  Description of Artificial Sequence: Synthetic oligonucleotide
auuugauaaaagcguucuu

SEQ ID NO: 2473738 - RNA, 19 nt, Artificial Sequence
  Description of Artificial Sequence: Synthetic oligonucleotide
guauguugucauaacauua

SEQ ID NO: 2473739 - RNA, 19 nt, Artificial Sequence
  Description of Artificial Sequence: Synthetic oligonucleotide
auuugguguacugaacaaa

SEQ ID NO: 2473740 - RNA, 19 nt, Artificial Sequence
  Description of Artificial Sequence: Synthetic oligonucleotide
uuucaccugucauuugaua

SEQ ID NO: 2473741 - RNA, 19 nt, Artificial Sequence
  Description of Artificial Sequence: Synthetic oligonucleotide
cugugaauuccaagacuug

SEQ ID NO: 2473742 - RNA, 19 nt, Artificial Sequence
  Description of Artificial Sequence: Synthetic oligonucleotide
cauucuguauauaucugcu

SEQ ID NO: 2473743 - RNA, 19 nt, Artificial Sequence
  Description of Artificial Sequence: Synthetic oligonucleotide
cacuugggcaucgaagggc

SEQ ID NO: 2473744 - RNA, 19 nt, Artificial Sequence
  Description of Artificial Sequence: Synthetic oligonucleotide
gguuucaccugucauuuga

SEQ ID NO: 2473745 - RNA, 19 nt, Artificial Sequence
  Description of Artificial Sequence: Synthetic oligonucleotide
uuccagguuucaccuguca

SEQ ID NO: 2473746 - RNA, 19 nt, Artificial Sequence
  Description of Artificial Sequence: Synthetic oligonucleotide
gauuugugguacccaaucu

SEQ ID NO: 2473747 - RNA, 19 nt, Artificial Sequence
  Description of Artificial Sequence: Synthetic oligonucleotide
guggugagauuucaguuaa

SEQ ID NO: 2473748 - RNA, 19 nt, Artificial Sequence
  Description of Artificial Sequence: Synthetic oligonucleotide
guuuccaaagacaccugac

SEQ ID NO: 2473749 - RNA, 19 nt, Artificial Sequence
  Description of Artificial Sequence: Synthetic oligonucleotide
acguuaaguaccguaucca

SEQ ID NO: 2473750 - RNA, 19 nt, Artificial Sequence
  Description of Artificial Sequence: Synthetic oligonucleotide
aauugggaaccuccuucuu

SEQ ID NO: 2473751 - RNA, 19 nt, Artificial Sequence
  Description of Artificial Sequence: Synthetic oligonucleotide
gaagagauucuugggagua

SEQ ID NO: 2473752 - RNA, 19 nt, Artificial Sequence
  Description of Artificial Sequence: Synthetic oligonucleotide
uuccuauguccuccaguga

SEQ ID NO: 2473753 - RNA, 19 nt, Artificial Sequence
  Description of Artificial Sequence: Synthetic oligonucleotide
uauaucugcuggccugcuc

SEQ ID NO: 2473754 - RNA, 19 nt, Artificial Sequence
  Description of Artificial Sequence: Synthetic oligonucleotide
gaguauguugucauaacau

SEQ ID NO: 2473755 - RNA, 19 nt, Artificial Sequence
  Description of Artificial Sequence: Synthetic oligonucleotide
uggauuugugguacccaau

SEQ ID NO: 2473756 - RNA, 19 nt, Artificial Sequence
  Description of Artificial Sequence: Synthetic oligonucleotide
guacccaaucuucaucauc

SEQ ID NO: 2473757 - RNA, 19 nt, Artificial Sequence
  Description of Artificial Sequence: Synthetic oligonucleotide
guuauuccuauguccucca

SEQ ID NO: 2473758 - RNA, 19 nt, Artificial Sequence
  Description of Artificial Sequence: Synthetic oligonucleotide
agacuguauauggauuugu

SEQ ID NO: 2473759 - RNA, 19 nt, Artificial Sequence
  Description of Artificial Sequence: Synthetic oligonucleotide
cagucaaguaagaccugug

SEQ ID NO: 2473760 - RNA, 19 nt, Artificial Sequence
  Description of Artificial Sequence: Synthetic oligonucleotide
aguuaauuuccagguuuca

SEQ ID NO: 2473761 - RNA, 19 nt, Artificial Sequence
  Description of Artificial Sequence: Synthetic oligonucleotide
uaaguaccguauccacagu

SEQ ID NO: 2473762 - RNA, 19 nt, Artificial Sequence
  Description of Artificial Sequence: Synthetic oligonucleotide
cuguaaccaccucuucagc

SEQ ID NO: 2473763 - RNA, 19 nt, Artificial Sequence
  Description of Artificial Sequence: Synthetic oligonucleotide
uccgucuccucgcugcuuc

SEQ ID NO: 2473764 - RNA, 19 nt, Artificial Sequence
  Description of Artificial Sequence: Synthetic oligonucleotide
acaccugacucgaacuguc

SEQ ID NO: 2473765 - RNA, 19 nt, Artificial Sequence
  Description of Artificial Sequence: Synthetic oligonucleotide
uauguccuccagugacaag

SEQ ID NO: 2473766 - RNA, 19 nt, Artificial Sequence
  Description of Artificial Sequence: Synthetic oligonucleotide
cucacccugggccuccugc

SEQ ID NO: 2473767 - RNA, 19 nt, Artificial Sequence
  Description of Artificial Sequence: Synthetic oligonucleotide
gaaaggaaguggaaagacu

SEQ ID NO: 2473768 - RNA, 19 nt, Artificial Sequence
  Description of Artificial Sequence: Synthetic oligonucleotide
agcuguuuccgguggcucu

SEQ ID NO: 2473769 - RNA, 19 nt, Artificial Sequence
  Description of Artificial Sequence: Synthetic oligonucleotide
gccaguaguuaauuuccag

SEQ ID NO: 2473770 - RNA, 19 nt, Artificial Sequence
  Description of Artificial Sequence: Synthetic oligonucleotide
auccuauuugguguacuga

SEQ ID NO: 2473771 - RNA, 19 nt, Artificial Sequence
  Description of Artificial Sequence: Synthetic oligonucleotide
gcaaguuccgucuccucgc

SEQ ID NO: 2473772 - RNA, 19 nt, Artificial Sequence
  Description of Artificial Sequence: Synthetic oligonucleotide
gcaccaaaucuucaucccc

SEQ ID NO: 2473773 - RNA, 19 nt, Artificial Sequence
  Description of Artificial Sequence: Synthetic oligonucleotide
aagagauucuugggaguau

SEQ ID NO: 2473774 - RNA, 19 nt, Artificial Sequence
  Description of Artificial Sequence: Synthetic oligonucleotide
guuuccgguggcucuucag

SEQ ID NO: 2473775 - RNA, 19 nt, Artificial Sequence
  Description of Artificial Sequence: Synthetic oligonucleotide
aaguuccgucuccucgcug

SEQ ID NO: 2473776 - RNA, 19 nt, Artificial Sequence
  Description of Artificial Sequence: Synthetic oligonucleotide
gaagggcaacuguaaccac

SEQ ID NO: 2473777 - RNA, 19 nt, Artificial Sequence
  Description of Artificial Sequence: Synthetic oligonucleotide
gugguacccaaucuucauc

SEQ ID NO: 2473778 - RNA, 19 nt, Artificial Sequence
  Description of Artificial Sequence: Synthetic oligonucleotide
ggaaagacuguauauggau

SEQ ID NO: 2473779 - RNA, 19 nt, Artificial Sequence
  Description of Artificial Sequence: Synthetic oligonucleotide
caguuauuccuauguccuc

SEQ ID NO: 2473780 - RNA, 19 nt, Artificial Sequence
  Description of Artificial Sequence: Synthetic oligonucleotide
ugggcaucgaagggcaacu

SEQ ID NO: 2473781 - RNA, 19 nt, Artificial Sequence
  Description of Artificial Sequence: Synthetic oligonucleotide
uccuguuuguagguuuuaa

SEQ ID NO: 2473782 - RNA, 19 nt, Artificial Sequence
  Description of Artificial Sequence: Synthetic oligonucleotide
uuaaaagcuugggcaaguu

SEQ ID NO: 2473783 - RNA, 19 nt, Artificial Sequence
  Description of Artificial Sequence: Synthetic oligonucleotide
accugacucgaacugucaa

SEQ ID NO: 2473784 - RNA, 19 nt, Artificial Sequence
  Description of Artificial Sequence: Synthetic oligonucleotide
acuugggcaucgaagggca

SEQ ID NO: 2473785 - RNA, 19 nt, Artificial Sequence
  Description of Artificial Sequence: Synthetic oligonucleotide
cuuggugggcuguggagca

SEQ ID NO: 2473786 - RNA, 19 nt, Artificial Sequence
  Description of Artificial Sequence: Synthetic oligonucleotide
uguuuccgguggcucuuca

SEQ ID NO: 2473787 - RNA, 19 nt, Artificial Sequence
  Description of Artificial Sequence: Synthetic oligonucleotide
uugcauccuauuuggugua

SEQ ID NO: 2473788 - RNA, 19 nt, Artificial Sequence
  Description of Artificial Sequence: Synthetic oligonucleotide
ugcuugcauccuauuuggu

SEQ ID NO: 2473789 - RNA, 19 nt, Artificial Sequence
  Description of Artificial Sequence: Synthetic oligonucleotide
ggugagauuucaguuaaaa

SEQ ID NO: 2473790 - RNA, 19 nt, Artificial Sequence
  Description of Artificial Sequence: Synthetic oligonucleotide
cuguuuccaaagacaccug

SEQ ID NO: 2473791 - RNA, 19 nt, Artificial Sequence
  Description of Artificial Sequence: Synthetic oligonucleotide
gguggugagauuucaguua

SEQ ID NO: 2473792 - RNA, 19 nt, Artificial Sequence
  Description of Artificial Sequence: Synthetic oligonucleotide
ugacagugcuugcauccua

SEQ ID NO: 2473793 - RNA, 19 nt, Artificial Sequence
  Description of Artificial Sequence: Synthetic oligonucleotide
ccugacucgaacugucaag

SEQ ID NO: 2473794 - RNA, 19 nt, Artificial Sequence
  Description of Artificial Sequence: Synthetic oligonucleotide
ccuccagugacaagccucc

SEQ ID NO: 2473795 - RNA, 19 nt, Artificial Sequence
  Description of Artificial Sequence: Synthetic oligonucleotide
agauucuugggaguauguu

SEQ ID NO: 2473796 - RNA, 19 nt, Artificial Sequence
  Description of Artificial Sequence: Synthetic oligonucleotide
acaacgccucugucuuuuc

SEQ ID NO: 2473797 - RNA, 19 nt, Artificial Sequence
  Description of Artificial Sequence: Synthetic oligonucleotide
gugaauuccaagacuugaa

SEQ ID NO: 2473798 - RNA, 19 nt, Artificial Sequence
  Description of Artificial Sequence: Synthetic oligonucleotide
uucuugggaguauguuguc

SEQ ID NO: 2473799 - RNA, 19 nt, Artificial Sequence
  Description of Artificial Sequence: Synthetic oligonucleotide
ucacccugggccuccugcu

SEQ ID NO: 2473800 - RNA, 19 nt, Artificial Sequence
  Description of Artificial Sequence: Synthetic oligonucleotide
cucccucugucuccagagg

SEQ ID NO: 2473801 - RNA, 19 nt, Artificial Sequence
  Description of Artificial Sequence: Synthetic oligonucleotide
acuaacugaagaagagauu

SEQ ID NO: 2473802 - RNA, 19 nt, Artificial Sequence
  Description of Artificial Sequence: Synthetic oligonucleotide
cugucaagcaccaaaucuu

SEQ ID NO: 2473803 - RNA, 19 nt, Artificial Sequence
  Description of Artificial Sequence: Synthetic oligonucleotide
gggaguauguugucauaac

SEQ ID NO: 2473804 - RNA, 19 nt, Artificial Sequence
  Description of Artificial Sequence: Synthetic oligonucleotide
caucgaagggcaacuguaa

SEQ ID NO: 2473805 - RNA, 19 nt, Artificial Sequence
  Description of Artificial Sequence: Synthetic oligonucleotide
gaaagacuguauauggauu

SEQ ID NO: 2473806 - RNA, 19 nt, Artificial Sequence
  Description of Artificial Sequence: Synthetic oligonucleotide
aucugcuggccugcucacc

SEQ ID NO: 2473807 - RNA, 19 nt, Artificial Sequence
  Description of Artificial Sequence: Synthetic oligonucleotide
uugggaguauguugucaua

SEQ ID NO: 2473808 - RNA, 19 nt, Artificial Sequence
  Description of Artificial Sequence: Synthetic oligonucleotide
aguaccguauccacaguua

SEQ ID NO: 2473809 - RNA, 19 nt, Artificial Sequence
  Description of Artificial Sequence: Synthetic oligonucleotide
cucgaacugucaagcacca

SEQ ID NO: 2473810 - RNA, 19 nt, Artificial Sequence
  Description of Artificial Sequence: Synthetic oligonucleotide
cugggaaaggaaguggaaa

SEQ ID NO: 2473811 - RNA, 19 nt, Artificial Sequence
  Description of Artificial Sequence: Synthetic oligonucleotide
ugggcaaguuccgucuccu

SEQ ID NO: 2473812 - RNA, 19 nt, Artificial Sequence
  Description of Artificial Sequence: Synthetic oligonucleotide
agauuucaguuaaaagcuu

SEQ ID NO: 2473813 - RNA, 19 nt, Artificial Sequence
  Description of Artificial Sequence: Synthetic oligonucleotide
cguuaaguaccguauccac

SEQ ID NO: 2473814 - RNA, 19 nt, Artificial Sequence
  Description of Artificial Sequence: Synthetic oligonucleotide
agguuucaccugucauuug

SEQ ID NO: 2473815 - RNA, 19 nt, Artificial Sequence
  Description of Artificial Sequence: Synthetic oligonucleotide
augacagugcuugcauccu

SEQ ID NO: 2473816 - RNA, 19 nt, Artificial Sequence
  Description of Artificial Sequence: Synthetic oligonucleotide
gaacugucaagcaccaaau

SEQ ID NO: 2473817 - RNA, 19 nt, Artificial Sequence
  Description of Artificial Sequence: Synthetic oligonucleotide
aagcuugggcaaguuccgu

SEQ ID NO: 2473818 - RNA, 19 nt, Artificial Sequence
  Description of Artificial Sequence: Synthetic oligonucleotide
caacuguaaccaccucuuc

SEQ ID NO: 2473819 - RNA, 19 nt, Artificial Sequence
  Description of Artificial Sequence: Synthetic oligonucleotide
uccucacaacgccucuguc

SEQ ID NO: 2473820 - RNA, 19 nt, Artificial Sequence
  Description of Artificial Sequence: Synthetic oligonucleotide
uggugagauuucaguuaaa

SEQ ID NO: 2473821 - RNA, 19 nt, Artificial Sequence
  Description of Artificial Sequence: Synthetic oligonucleotide
gauguugaucugcauuauu

SEQ ID NO: 2473822 - RNA, 19 nt, Artificial Sequence
  Description of Artificial Sequence: Synthetic oligonucleotide
auuuuccuguuuguagguu

SEQ ID NO: 2473823 - RNA, 19 nt, Artificial Sequence
  Description of Artificial Sequence: Synthetic oligonucleotide
aguuuguggccaguaguua

SEQ ID NO: 2473824 - RNA, 19 nt, Artificial Sequence
  Description of Artificial Sequence: Synthetic oligonucleotide
ggcaacuguaaccaccucu

SEQ ID NO: 2473825 - RNA, 19 nt, Artificial Sequence
  Description of Artificial Sequence: Synthetic oligonucleotide
uggccacucuguucuuucu

SEQ ID NO: 2473826 - RNA, 19 nt, Artificial Sequence
  Description of Artificial Sequence: Synthetic oligonucleotide
ccaaucuucaucauccagu

SEQ ID NO: 2473827 - RNA, 19 nt, Artificial Sequence
  Description of Artificial Sequence: Synthetic oligonucleotide
ugcauccuauuugguguac

SEQ ID NO: 2473828 - RNA, 19 nt, Artificial Sequence
  Description of Artificial Sequence: Synthetic oligonucleotide
aagccucccucugucucca

SEQ ID NO: 2473829 - RNA, 19 nt, Artificial Sequence
  Description of Artificial Sequence: Synthetic oligonucleotide
cagguggugagauuucagu

SEQ ID NO: 2473830 - RNA, 19 nt, Artificial Sequence
  Description of Artificial Sequence: Synthetic oligonucleotide
gaucugcauuauuucugua

SEQ ID NO: 2473831 - RNA, 19 nt, Artificial Sequence
  Description of Artificial Sequence: Synthetic oligonucleotide
ugggaaccuccuucuuggu

SEQ ID NO: 2473832 - RNA, 19 nt, Artificial Sequence
  Description of Artificial Sequence: Synthetic oligonucleotide
cagguaaauugggaaccuc

SEQ ID NO: 2473833 - RNA, 19 nt, Artificial Sequence
  Description of Artificial Sequence: Synthetic oligonucleotide
guaaauugggaaccuccuu

SEQ ID NO: 2473834 - RNA, 19 nt, Artificial Sequence
  Description of Artificial Sequence: Synthetic oligonucleotide
ccucccucugucuccagag

SEQ ID NO: 2473835 - RNA, 19 nt, Artificial Sequence
  Description of Artificial Sequence: Synthetic oligonucleotide
gucaagcaccaaaucuuca

SEQ ID NO: 2473836 - RNA, 19 nt, Artificial Sequence
  Description of Artificial Sequence: Synthetic oligonucleotide
guaccguauccacaguuau

SEQ ID NO: 2473837 - RNA, 19 nt, Artificial Sequence
  Description of Artificial Sequence: Synthetic oligonucleotide
aucauccagucaaguaaga

SEQ ID NO: 2473838 - RNA, 19 nt, Artificial Sequence
  Description of Artificial Sequence: Synthetic oligonucleotide
gggaaaggaaguggaaaga

SEQ ID NO: 2473839 - RNA, 19 nt, Artificial Sequence
  Description of Artificial Sequence: Synthetic oligonucleotide
cuauguccuccagugacaa

SEQ ID NO: 2473840 - RNA, 19 nt, Artificial Sequence
  Description of Artificial Sequence: Synthetic oligonucleotide
auauaucugcuggccugcu

SEQ ID NO: 2473841 - RNA, 19 nt, Artificial Sequence
  Description of Artificial Sequence: Synthetic oligonucleotide
cucacaacgccucugucuu

SEQ ID NO: 2473842 - RNA, 19 nt, Artificial Sequence
  Description of Artificial Sequence: Synthetic oligonucleotide
acagugcuugcauccuauu

SEQ ID NO: 2473843 - RNA, 19 nt, Artificial Sequence
  Description of Artificial Sequence: Synthetic oligonucleotide
ccacuugggcaucgaaggg

SEQ ID NO: 2473844 - RNA, 19 nt, Artificial Sequence
  Description of Artificial Sequence: Synthetic oligonucleotide
gacaccugacucgaacugu

SEQ ID NO: 2473845 - RNA, 19 nt, Artificial Sequence
  Description of Artificial Sequence: Synthetic oligonucleotide
gagauucuugggaguaugu

SEQ ID NO: 2473846 - RNA, 19 nt, Artificial Sequence
  Description of Artificial Sequence: Synthetic oligonucleotide
gguaaauugggaaccuccu

SEQ ID NO: 2473847 - RNA, 19 nt, Artificial Sequence
  Description of Artificial Sequence: Synthetic oligonucleotide
ccacaguuauuccuauguc

SEQ ID NO: 2473848 - RNA, 19 nt, Artificial Sequence
  Description of Artificial Sequence: Synthetic oligonucleotide
caguuuguggccaguaguu

SEQ ID NO: 2473849 - RNA, 19 nt, Artificial Sequence
  Description of Artificial Sequence: Synthetic oligonucleotide
cgaacugucaagcaccaaa

SEQ ID NO: 2473850 - RNA, 19 nt, Artificial Sequence
  Description of Artificial Sequence: Synthetic oligonucleotide
ccguauccacaguuauucc

SEQ ID NO: 2473851 - RNA, 19 nt, Artificial Sequence
  Description of Artificial Sequence: Synthetic oligonucleotide
ccuguuuguagguuuuaaa

SEQ ID NO: 2473852 - RNA, 19 nt, Artificial Sequence
  Description of Artificial Sequence: Synthetic oligonucleotide
ccugugaauuccaagacuu

SEQ ID NO: 2473853 - RNA, 19 nt, Artificial Sequence
  Description of Artificial Sequence: Synthetic oligonucleotide
uuccuguuuguagguuuua

SEQ ID NO: 2473854 - RNA, 19 nt, Artificial Sequence
  Description of Artificial Sequence: Synthetic oligonucleotide
gacaagccucccucugucu

SEQ ID NO: 2473855 - RNA, 19 nt, Artificial Sequence
  Description of Artificial Sequence: Synthetic oligonucleotide
caccugacucgaacuguca

SEQ ID NO: 2473856 - RNA, 19 nt, Artificial Sequence
  Description of Artificial Sequence: Synthetic oligonucleotide
ccaaagacaccugacucga

SEQ ID NO: 2473857 - RNA, 19 nt, Artificial Sequence
  Description of Artificial Sequence: Synthetic oligonucleotide
ccacguuaaguaccguauc

SEQ ID NO: 2473858 - RNA, 19 nt, Artificial Sequence
  Description of Artificial Sequence: Synthetic oligonucleotide
gacagugcuugcauccuau

SEQ ID NO: 2473859 - RNA, 19 nt, Artificial Sequence
  Description of Artificial Sequence: Synthetic oligonucleotide
cagaggccuccugggaaag

SEQ ID NO: 2473860 - RNA, 19 nt, Artificial Sequence
  Description of Artificial Sequence: Synthetic oligonucleotide
cgaagggcaacuguaacca

SEQ ID NO: 2473861 - RNA, 19 nt, Artificial Sequence
  Description of Artificial Sequence: Synthetic oligonucleotide
gagcagguggugagauuuc

SEQ ID NO: 2473862 - RNA, 19 nt, Artificial Sequence
  Description of Artificial Sequence: Synthetic oligonucleotide
auuugucaugacagugcuu

SEQ ID NO: 2473863 - RNA, 19 nt, Artificial Sequence
  Description of Artificial Sequence: Synthetic oligonucleotide
cagguuucaccugucauuu

SEQ ID NO: 2473864 - RNA, 19 nt, Artificial Sequence
  Description of Artificial Sequence: Synthetic oligonucleotide
ucgaacugucaagcaccaa

SEQ ID NO: 2473865 - RNA, 19 nt, Artificial Sequence
  Description of Artificial Sequence: Synthetic oligonucleotide
gccacucuguucuuucucu

SEQ ID NO: 2473866 - RNA, 19 nt, Artificial Sequence
  Description of Artificial Sequence: Synthetic oligonucleotide
caaagacaccugacucgaa

SEQ ID NO: 2473867 - RNA, 19 nt, Artificial Sequence
  Description of Artificial Sequence: Synthetic oligonucleotide
ccucaaaacacucccacuu

SEQ ID NO: 2473868 - RNA, 19 nt, Artificial Sequence
  Description of Artificial Sequence: Synthetic oligonucleotide
acuggccacucuguucuuu

SEQ ID NO: 2473869 - RNA, 19 nt, Artificial Sequence
  Description of Artificial Sequence: Synthetic oligonucleotide
guuucaccugucauuugau

SEQ ID NO: 2473870 - RNA, 19 nt, Artificial Sequence
  Description of Artificial Sequence: Synthetic oligonucleotide
ccaguuuguggccaguagu

SEQ ID NO: 2473871 - RNA, 19 nt, Artificial Sequence
  Description of Artificial Sequence: Synthetic oligonucleotide
gcaacuguaaccaccucuu

SEQ ID NO: 2473872 - RNA, 19 nt, Artificial Sequence
  Description of Artificial Sequence: Synthetic oligonucleotide
cagugcuugcauccuauuu

SEQ ID NO: 2473873 - RNA, 19 nt, Artificial Sequence
  Description of Artificial Sequence: Synthetic oligonucleotide
cguauccacaguuauuccu

SEQ ID NO: 2473874 - RNA, 19 nt, Artificial Sequence
  Description of Artificial Sequence: Synthetic oligonucleotide
cugcucacccugggccucc

SEQ ID NO: 2473875 - RNA, 19 nt, Artificial Sequence
  Description of Artificial Sequence: Synthetic oligonucleotide
ccucacaacgccucugucu

SEQ ID NO: 2473876 - RNA, 19 nt, Artificial Sequence
  Description of Artificial Sequence: Synthetic oligonucleotide
aaccaccucuucagcuguu

SEQ ID NO: 2473877 - RNA, 19 nt, Artificial Sequence
  Description of Artificial Sequence: Synthetic oligonucleotide
gcuggccugcucacccugg

SEQ ID NO: 2473878 - RNA, 19 nt, Artificial Sequence
  Description of Artificial Sequence: Synthetic oligonucleotide
cuguuuccgguggcucuuc

SEQ ID NO: 2473879 - RNA, 19 nt, Artificial Sequence
  Description of Artificial Sequence: Synthetic oligonucleotide
cuugggcaucgaagggcaa

SEQ ID NO: 2473880 - RNA, 19 nt, Artificial Sequence
  Description of Artificial Sequence: Synthetic oligonucleotide
caaguuccgucuccucgcu

SEQ ID NO: 2473881 - RNA, 19 nt, Artificial Sequence
  Description of Artificial Sequence: Synthetic oligonucleotide
caacgccucugucuuuucu

SEQ ID NO: 2473882 - RNA, 19 nt, Artificial Sequence
  Description of Artificial Sequence: Synthetic oligonucleotide
cucccacuugggcaucgaa

SEQ ID NO: 2473883 - RNA, 19 nt, Artificial Sequence
  Description of Artificial Sequence: Synthetic oligonucleotide
cccuccaguuuguggccag

SEQ ID NO: 2473884 - RNA, 19 nt, Artificial Sequence
  Description of Artificial Sequence: Synthetic oligonucleotide
cuccaguuuguggccagua

SEQ ID NO: 2473885 - RNA, 19 nt, Artificial Sequence
  Description of Artificial Sequence: Synthetic oligonucleotide
ccagguuucaccugucauu

SEQ ID NO: 2473886 - RNA, 19 nt, Artificial Sequence
  Description of Artificial Sequence: Synthetic oligonucleotide
aggccuccugggaaaggaa

SEQ ID NO: 2473887 - RNA, 19 nt, Artificial Sequence
  Description of Artificial Sequence: Synthetic oligonucleotide
gguacccaaucuucaucau

SEQ ID NO: 2473888 - RNA, 19 nt, Artificial Sequence
  Description of Artificial Sequence: Synthetic oligonucleotide
gggcaaguuccgucuccuc

SEQ ID NO: 2473889 - RNA, 19 nt, Artificial Sequence
  Description of Artificial Sequence: Synthetic oligonucleotide
cacaacgccucugucuuuu

SEQ ID NO: 2473890 - RNA, 19 nt, Artificial Sequence
  Description of Artificial Sequence: Synthetic oligonucleotide
ccagucaaguaagaccugu

SEQ ID NO: 2473891 - RNA, 19 nt, Artificial Sequence
  Description of Artificial Sequence: Synthetic oligonucleotide
gggcaacuguaaccaccuc

SEQ ID NO: 2473892 - RNA, 19 nt, Artificial Sequence
  Description of Artificial Sequence: Synthetic oligonucleotide
gcauccuauuugguguacu

SEQ ID NO: 2473893 - RNA, 19 nt, Artificial Sequence
  Description of Artificial Sequence: Synthetic oligonucleotide
cugcuggccugcucacccu

SEQ ID NO: 2473894 - RNA, 19 nt, Artificial Sequence
  Description of Artificial Sequence: Synthetic oligonucleotide
gguggcucuucagguaaau

SEQ ID NO: 2473895 - RNA, 19 nt, Artificial Sequence
  Description of Artificial Sequence: Synthetic oligonucleotide
cuuccacguuaaguaccgu

SEQ ID NO: 2473896 - RNA, 19 nt, Artificial Sequence
  Description of Artificial Sequence: Synthetic oligonucleotide
ggugggcuguggagcaggu

SEQ ID NO: 2473897 - RNA, 19 nt, Artificial Sequence
  Description of Artificial Sequence: Synthetic oligonucleotide
ccacucuguucuuucucuu

SEQ ID NO: 2473898 - RNA, 19 nt, Artificial Sequence
  Description of Artificial Sequence: Synthetic oligonucleotide
ccccuccaguuuguggcca

SEQ ID NO: 2473899 - RNA, 19 nt, Artificial Sequence
  Description of Artificial Sequence: Synthetic oligonucleotide
ccucgcugcuucucuguuu

SEQ ID NO: 2473900 - RNA, 19 nt, Artificial Sequence
  Description of Artificial Sequence: Synthetic oligonucleotide
cgguggcucuucagguaaa

SEQ ID NO: 2473901 - RNA, 19 nt, Artificial Sequence
  Description of Artificial Sequence: Synthetic oligonucleotide
ccuccaguuuguggccagu

SEQ ID NO: 2473902 - RNA, 19 nt, Artificial Sequence
  Description of Artificial Sequence: Synthetic oligonucleotide
aaauacuuaaaauaaaagc

SEQ ID NO: 2473903 - RNA, 19 nt, Artificial Sequence
  Description of Artificial Sequence: Synthetic oligonucleotide
aguuagacaaaucaucugc

SEQ ID NO: 2473904 - RNA, 19 nt, Artificial Sequence
  Description of Artificial Sequence: Synthetic oligonucleotide
aaagacaagucaugcaggc

SEQ ID NO: 2473905 - RNA, 19 nt, Artificial Sequence
  Description of Artificial Sequence: Synthetic oligonucleotide
aauuuaguuaucucuaucu

SEQ ID NO: 2473906 - RNA, 19 nt, Artificial Sequence
  Description of Artificial Sequence: Synthetic oligonucleotide
ucaaucauaucacugaucu

SEQ ID NO: 2473907 - RNA, 19 nt, Artificial Sequence
  Description of Artificial Sequence: Synthetic oligonucleotide
gucguuuccauuuagaaag

SEQ ID NO: 2473908 - RNA, 19 nt, Artificial Sequence
  Description of Artificial Sequence: Synthetic oligonucleotide
aauuucucugaacagaggu

SEQ ID NO: 2473909 - RNA, 19 nt, Artificial Sequence
  Description of Artificial Sequence: Synthetic oligonucleotide
aaaucuaggagaagguucc

SEQ ID NO: 2473910 - RNA, 19 nt, Artificial Sequence
  Description of Artificial Sequence: Synthetic oligonucleotide
uccaaaaucuaggagaagg

SEQ ID NO: 2473911 - RNA, 19 nt, Artificial Sequence
  Description of Artificial Sequence: Synthetic oligonucleotide
agacaaaucaucugcaauc

SEQ ID NO: 2473912 - RNA, 19 nt, Artificial Sequence
  Description of Artificial Sequence: Synthetic oligonucleotide
aaaaucuaggagaagguuc

SEQ ID NO: 2473913 - RNA, 19 nt, Artificial Sequence
  Description of Artificial Sequence: Synthetic oligonucleotide
guaaagacaagucaugcag

SEQ ID NO: 2473914 - RNA, 19 nt, Artificial Sequence
  Description of Artificial Sequence: Synthetic oligonucleotide
aagauguuccaguuuuccc

SEQ ID NO: 2473915 - RNA, 19 nt, Artificial Sequence
  Description of Artificial Sequence: Synthetic oligonucleotide
aaaagcauauuguaagccu

SEQ ID NO: 2473916 - RNA, 19 nt, Artificial Sequence
  Description of Artificial Sequence: Synthetic oligonucleotide
aaagauguuccaguuuucc

SEQ ID NO: 2473917 - RNA, 19 nt, Artificial Sequence
  Description of Artificial Sequence: Synthetic oligonucleotide
aaagcacuagcucugacga

SEQ ID NO: 2473918 - RNA, 19 nt, Artificial Sequence
  Description of Artificial Sequence: Synthetic oligonucleotide
acugacuuagcguugacag

SEQ ID NO: 2473919 - RNA, 19 nt, Artificial Sequence
  Description of Artificial Sequence: Synthetic oligonucleotide
cauguuuccaaaaucuagg

SEQ ID NO: 2473920 - RNA, 19 nt, Artificial Sequence
  Description of Artificial Sequence: Synthetic oligonucleotide
auaaggacaggccaggcuc

SEQ ID NO: 2473921 - RNA, 19 nt, Artificial Sequence
  Description of Artificial Sequence: Synthetic oligonucleotide
uaaagacaagucaugcagg

SEQ ID NO: 2473922 - RNA, 19 nt, Artificial Sequence
  Description of Artificial Sequence: Synthetic oligonucleotide
ugucaucucacagugaggg

SEQ ID NO: 2473923 - RNA, 19 nt, Artificial Sequence
  Description of Artificial Sequence: Synthetic oligonucleotide
uuucuguaaagacaaguca

SEQ ID NO: 2473924 - RNA, 19 nt, Artificial Sequence
  Description of Artificial Sequence: Synthetic oligonucleotide
agucaguuugguuacguac

SEQ ID NO: 2473925 - RNA, 19 nt, Artificial Sequence
  Description of Artificial Sequence: Synthetic oligonucleotide
uuugguuacguacacuccc

SEQ ID NO: 2473926 - RNA, 19 nt, Artificial Sequence
  Description of Artificial Sequence: Synthetic oligonucleotide
ucaugaauggacgaggaag

SEQ ID NO: 2473927 - RNA, 19 nt, Artificial Sequence
  Description of Artificial Sequence: Synthetic oligonucleotide
aaucauguuuccaaaaucu

SEQ ID NO: 2473928 - RNA, 19 nt, Artificial Sequence
  Description of Artificial Sequence: Synthetic oligonucleotide
ugaagaauuuuaaauacuu

SEQ ID NO: 2473929 - RNA, 19 nt, Artificial Sequence
  Description of Artificial Sequence: Synthetic oligonucleotide
aucguaguuagacaaauca

SEQ ID NO: 2473930 - RNA, 19 nt, Artificial Sequence
  Description of Artificial Sequence: Synthetic oligonucleotide
aauugauucuuuugugaug

SEQ ID NO: 2473931 - RNA, 19 nt, Artificial Sequence
  Description of Artificial Sequence: Synthetic oligonucleotide
ucaucugcaaucauguuuc

SEQ ID NO: 2473932 - RNA, 19 nt, Artificial Sequence
  Description of Artificial Sequence: Synthetic oligonucleotide
uaucccuuggaauugauuc

SEQ ID NO: 2473933 - RNA, 19 nt, Artificial Sequence
  Description of Artificial Sequence: Synthetic oligonucleotide
ugaacagagguuaacugca

SEQ ID NO: 2473934 - RNA, 19 nt, Artificial Sequence
  Description of Artificial Sequence: Synthetic oligonucleotide
guuacguacacucccaaag

SEQ ID NO: 2473935 - RNA, 19 nt, Artificial Sequence
  Description of Artificial Sequence: Synthetic oligonucleotide
aucucauucacccuccauc

SEQ ID NO: 2473936 - RNA, 19 nt, Artificial Sequence
  Description of Artificial Sequence: Synthetic oligonucleotide
acagugauguucaaagugc

SEQ ID NO: 2473937 - RNA, 19 nt, Artificial Sequence
  Description of Artificial Sequence: Synthetic oligonucleotide
uuaguuaucucuaucuaua

SEQ ID NO: 2473938 - RNA, 19 nt, Artificial Sequence
  Description of Artificial Sequence: Synthetic oligonucleotide
ucuguaaagacaagucaug

SEQ ID NO: 2473939 - RNA, 19 nt, Artificial Sequence
  Description of Artificial Sequence: Synthetic oligonucleotide
aacugcaugucagggaccc

SEQ ID NO: 2473940 - RNA, 19 nt, Artificial Sequence
  Description of Artificial Sequence: Synthetic oligonucleotide
uguuuccaaaaucuaggag

SEQ ID NO: 2473941 - RNA, 19 nt, Artificial Sequence
  Description of Artificial Sequence: Synthetic oligonucleotide
aaaauuuaguuaucucuau

SEQ ID NO: 2473942 - RNA, 19 nt, Artificial Sequence
  Description of Artificial Sequence: Synthetic oligonucleotide
uuuccaaaaucuaggagaa

SEQ ID NO: 2473943 - RNA, 19 nt, Artificial Sequence
  Description of Artificial Sequence: Synthetic oligonucleotide
auauuguaagccuucaaaa

SEQ ID NO: 2473944 - RNA, 19 nt, Artificial Sequence
  Description of Artificial Sequence: Synthetic oligonucleotide
auucagucaguuugguuac

SEQ ID NO: 2473945 - RNA, 19 nt, Artificial Sequence
  Description of Artificial Sequence: Synthetic oligonucleotide
uuuagaaagggccacgcuu

SEQ ID NO: 2473946 - RNA, 19 nt, Artificial Sequence
  Description of Artificial Sequence: Synthetic oligonucleotide
aggacaaucaggcugggca

SEQ ID NO: 2473947 - RNA, 19 nt, Artificial Sequence
  Description of Artificial Sequence: Synthetic oligonucleotide
uuuaguuaucucuaucuau

SEQ ID NO: 2473948 - RNA, 19 nt, Artificial Sequence
  Description of Artificial Sequence: Synthetic oligonucleotide
ucugaacagagguuaacug

SEQ ID NO: 2473949 - RNA, 19 nt, Artificial Sequence
  Description of Artificial Sequence: Synthetic oligonucleotide
aaccaacccaguugucucc

SEQ ID NO: 2473950 - RNA, 19 nt, Artificial Sequence
  Description of Artificial Sequence: Synthetic oligonucleotide
cuuucuguaaagacaaguc

SEQ ID NO: 2473951 - RNA, 19 nt, Artificial Sequence
  Description of Artificial Sequence: Synthetic oligonucleotide
aauaaggacaggccaggcu

SEQ ID NO: 2473952 - RNA, 19 nt, Artificial Sequence
  Description of Artificial Sequence: Synthetic oligonucleotide
auaucacugaucuuuucug

SEQ ID NO: 2473953 - RNA, 19 nt, Artificial Sequence
  Description of Artificial Sequence: Synthetic oligonucleotide
agcacuagcucugacgacc

SEQ ID NO: 2473954 - RNA, 19 nt, Artificial Sequence
  Description of Artificial Sequence: Synthetic oligonucleotide
ugaggguuggcuuugugga

SEQ ID NO: 2473955 - RNA, 19 nt, Artificial Sequence
  Description of Artificial Sequence: Synthetic oligonucleotide
uuagaaagggccacgcuuc

SEQ ID NO: 2473956 - RNA, 19 nt, Artificial Sequence
  Description of Artificial Sequence: Synthetic oligonucleotide
aaugccuuaaccugcucaa

SEQ ID NO: 2473957 - RNA, 19 nt, Artificial Sequence
  Description of Artificial Sequence: Synthetic oligonucleotide
uuuaagcggaguaaggauu

SEQ ID NO: 2473958 - RNA, 19 nt, Artificial Sequence
  Description of Artificial Sequence: Synthetic oligonucleotide
acagcaaccaacccaguug

SEQ ID NO: 2473959 - RNA, 19 nt, Artificial Sequence
  Description of Artificial Sequence: Synthetic oligonucleotide
cacaaagccuggaaggacg

SEQ ID NO: 2473960 - RNA, 19 nt, Artificial Sequence
  Description of Artificial Sequence: Synthetic oligonucleotide
agcaaaugccuuaaccugc

SEQ ID NO: 2473961 - RNA, 19 nt, Artificial Sequence
  Description of Artificial Sequence: Synthetic oligonucleotide
ucaauaaggacaggccagg

SEQ ID NO: 2473962 - RNA, 19 nt, Artificial Sequence
  Description of Artificial Sequence: Synthetic oligonucleotide
cauggcagccuuuaagcgg

SEQ ID NO: 2473963 - RNA, 19 nt, Artificial Sequence
  Description of Artificial Sequence: Synthetic oligonucleotide
uuucaugaauggacgagga

SEQ ID NO: 2473964 - RNA, 19 nt, Artificial Sequence
  Description of Artificial Sequence: Synthetic oligonucleotide
uggaauugauucuuuugug

SEQ ID NO: 2473965 - RNA, 19 nt, Artificial Sequence
  Description of Artificial Sequence: Synthetic oligonucleotide
aucucccuaaagcacuagc

SEQ ID NO: 2473966 - RNA, 19 nt, Artificial Sequence
  Description of Artificial Sequence: Synthetic oligonucleotide
acuuagcguugacaggucc

SEQ ID NO: 2473967 - RNA, 19 nt, Artificial Sequence
  Description of Artificial Sequence: Synthetic oligonucleotide
uucaaaauuuaguuaucuc

SEQ ID NO: 2473968 - RNA, 19 nt, Artificial Sequence
  Description of Artificial Sequence: Synthetic oligonucleotide
acagagguuaacugcaugu

SEQ ID NO: 2473969 - RNA, 19 nt, Artificial Sequence
  Description of Artificial Sequence: Synthetic oligonucleotide
acgaggaagacuucugaag

SEQ ID NO: 2473970 - RNA, 19 nt, Artificial Sequence
  Description of Artificial Sequence: Synthetic oligonucleotide
ugacuuagcguugacaggu

SEQ ID NO: 2473971 - RNA, 19 nt, Artificial Sequence
  Description of Artificial Sequence: Synthetic oligonucleotide
ucucauucacccuccaucu

SEQ ID NO: 2473972 - RNA, 19 nt, Artificial Sequence
  Description of Artificial Sequence: Synthetic oligonucleotide
uagugaugucaucucacag

SEQ ID NO: 2473973 - RNA, 19 nt, Artificial Sequence
  Description of Artificial Sequence: Synthetic oligonucleotide
uguuucaugaauggacgag

SEQ ID NO: 2473974 - RNA, 19 nt, Artificial Sequence
  Description of Artificial Sequence: Synthetic oligonucleotide
uuacguacacucccaaaga

SEQ ID NO: 2473975 - RNA, 19 nt, Artificial Sequence
  Description of Artificial Sequence: Synthetic oligonucleotide
ucucccuaaagcacuagcu

SEQ ID NO: 2473976 - RNA, 19 nt, Artificial Sequence
  Description of Artificial Sequence: Synthetic oligonucleotide
cuuagugaugucaucucac

SEQ ID NO: 2473977 - RNA, 19 nt, Artificial Sequence
  Description of Artificial Sequence: Synthetic oligonucleotide
ucacccuccaucuaucugu

SEQ ID NO: 2473978 - RNA, 19 nt, Artificial Sequence
  Description of Artificial Sequence: Synthetic oligonucleotide
cauucagucaguuugguua

SEQ ID NO: 2473979 - RNA, 19 nt, Artificial Sequence
  Description of Artificial Sequence: Synthetic oligonucleotide
ucacugaucuuuucugaag

SEQ ID NO: 2473980 - RNA, 19 nt, Artificial Sequence
  Description of Artificial Sequence: Synthetic oligonucleotide
agacaagucaugcaggcau

SEQ ID NO: 2473981 - RNA, 19 nt, Artificial Sequence
  Description of Artificial Sequence: Synthetic oligonucleotide
gagguuaacugcaugucag

SEQ ID NO: 2473982 - RNA, 19 nt, Artificial Sequence
  Description of Artificial Sequence: Synthetic oligonucleotide
ucuucaucguaguuagaca

SEQ ID NO: 2473983 - RNA, 19 nt, Artificial Sequence
  Description of Artificial Sequence: Synthetic oligonucleotide
ucuccuuucaggauccauc

SEQ ID NO: 2473984 - RNA, 19 nt, Artificial Sequence
  Description of Artificial Sequence: Synthetic oligonucleotide
uaguuagacaaaucaucug

SEQ ID NO: 2473985 - RNA, 19 nt, Artificial Sequence
  Description of Artificial Sequence: Synthetic oligonucleotide
ugucguuuccauuuagaaa

SEQ ID NO: 2473986 - RNA, 19 nt, Artificial Sequence
  Description of Artificial Sequence: Synthetic oligonucleotide
ucuccguuccuacauggca

SEQ ID NO: 2473987 - RNA, 19 nt, Artificial Sequence
  Description of Artificial Sequence: Synthetic oligonucleotide
ucugucguuuccauuuaga

SEQ ID NO: 2473988 - RNA, 19 nt, Artificial Sequence
  Description of Artificial Sequence: Synthetic oligonucleotide
ucguaguuagacaaaucau

SEQ ID NO: 2473989 - RNA, 19 nt, Artificial Sequence
  Description of Artificial Sequence: Synthetic oligonucleotide
agagguuaacugcauguca

SEQ ID NO: 2473990 - RNA, 19 nt, Artificial Sequence
  Description of Artificial Sequence: Synthetic oligonucleotide
acuagcucugacgaccggc

SEQ ID NO: 2473991 - RNA, 19 nt, Artificial Sequence
  Description of Artificial Sequence: Synthetic oligonucleotide
cauauuguaagccuucaaa

SEQ ID NO: 2473992 - RNA, 19 nt, Artificial Sequence
  Description of Artificial Sequence: Synthetic oligonucleotide
caaucauguuuccaaaauc

SEQ ID NO: 2473993 - RNA, 19 nt, Artificial Sequence
  Description of Artificial Sequence: Synthetic oligonucleotide
uuaagcggaguaaggauuu

SEQ ID NO: 2473994 - RNA, 19 nt, Artificial Sequence
  Description of Artificial Sequence: Synthetic oligonucleotide
uuucucugaacagagguua

SEQ ID NO: 2473995 - RNA, 19 nt, Artificial Sequence
  Description of Artificial Sequence: Synthetic oligonucleotide
auguuuccaaaaucuagga

SEQ ID NO: 2473996 - RNA, 19 nt, Artificial Sequence
  Description of Artificial Sequence: Synthetic oligonucleotide
cagcaaaugccuuaaccug

SEQ ID NO: 2473997 - RNA, 19 nt, Artificial Sequence
  Description of Artificial Sequence: Synthetic oligonucleotide
cuucuccguuccuacaugg

SEQ ID NO: 2473998 - RNA, 19 nt, Artificial Sequence
  Description of Artificial Sequence: Synthetic oligonucleotide
aaagggccacgcuucccac

SEQ ID NO: 2473999 - RNA, 19 nt, Artificial Sequence
  Description of Artificial Sequence: Synthetic oligonucleotide
uaaggauuuguuucaugaa

SEQ ID NO: 2474000 - RNA, 19 nt, Artificial Sequence
  Description of Artificial Sequence: Synthetic oligonucleotide
ucaguuugguuacguacac

SEQ ID NO: 2474001 - RNA, 19 nt, Artificial Sequence
  Description of Artificial Sequence: Synthetic oligonucleotide
agguuaacugcaugucagg

SEQ ID NO: 2474002 - RNA, 19 nt, Artificial Sequence
  Description of Artificial Sequence: Synthetic oligonucleotide
gucagggacccacaaagcc

SEQ ID NO: 2474003 - RNA, 19 nt, Artificial Sequence
  Description of Artificial Sequence: Synthetic oligonucleotide
caugaauggacgaggaaga

SEQ ID NO: 2474004 - RNA, 19 nt, Artificial Sequence
  Description of Artificial Sequence: Synthetic oligonucleotide
guuuccauuuagaaagggc

SEQ ID NO: 2474005 - RNA, 19 nt, Artificial Sequence
  Description of Artificial Sequence: Synthetic oligonucleotide
aguaaggauuuguuucaug

SEQ ID NO: 2474006 - RNA, 19 nt, Artificial Sequence
  Description of Artificial Sequence: Synthetic oligonucleotide
cuucaucguaguuagacaa

SEQ ID NO: 2474007 - RNA, 19 nt, Artificial Sequence
  Description of Artificial Sequence: Synthetic oligonucleotide
uggucgugcauauucuaca

SEQ ID NO: 2474008 - RNA, 19 nt, Artificial Sequence
  Description of Artificial Sequence: Synthetic oligonucleotide
uugguuacguacacuccca

SEQ ID NO: 2474009 - RNA, 19 nt, Artificial Sequence
  Description of Artificial Sequence: Synthetic oligonucleotide
uuguuucaugaauggacga

SEQ ID NO: 2474010 - RNA, 19 nt, Artificial Sequence
  Description of Artificial Sequence: Synthetic oligonucleotide
uccaaguaucccuuggaau

SEQ ID NO: 2474011 - RNA, 19 nt, Artificial Sequence
  Description of Artificial Sequence: Synthetic oligonucleotide
ugauguucaaagugcuuuc

SEQ ID NO: 2474012 - RNA, 19 nt, Artificial Sequence
  Description of Artificial Sequence: Synthetic oligonucleotide
gacaaaucaucugcaauca

SEQ ID NO: 2474013 - RNA, 19 nt, Artificial Sequence
  Description of Artificial Sequence: Synthetic oligonucleotide
aaagcauauuguaagccuu

SEQ ID NO: 2474014 - RNA, 19 nt, Artificial Sequence
  Description of Artificial Sequence: Synthetic oligonucleotide
uugacagguccuuagugau

SEQ ID NO: 2474015 - RNA, 19 nt, Artificial Sequence
  Description of Artificial Sequence: Synthetic oligonucleotide
uacguacacucccaaagau

SEQ ID NO: 2474016 - RNA, 19 nt, Artificial Sequence
  Description of Artificial Sequence: Synthetic oligonucleotide
ugugagguaggcucagcac

SEQ ID NO: 2474017 - RNA, 19 nt, Artificial Sequence
  Description of Artificial Sequence: Synthetic oligonucleotide
uuucacugacuuagcguug

SEQ ID NO: 2474018 - RNA, 19 nt, Artificial Sequence
  Description of Artificial Sequence: Synthetic oligonucleotide
gagaagguuccaaguaucc

SEQ ID NO: 2474019 - RNA, 19 nt, Artificial Sequence
  Description of Artificial Sequence: Synthetic oligonucleotide
ugccuuaaccugcucaauc

SEQ ID NO: 2474020 - RNA, 19 nt, Artificial Sequence
  Description of Artificial Sequence: Synthetic oligonucleotide
gaauugauucuuuugugau

SEQ ID NO: 2474021 - RNA, 19 nt, Artificial Sequence
  Description of Artificial Sequence: Synthetic oligonucleotide
agcguugacagguccuuag

SEQ ID NO: 2474022 - RNA, 19 nt, Artificial Sequence
  Description of Artificial Sequence: Synthetic oligonucleotide
cauuuagaaagggccacgc

SEQ ID NO: 2474023 - RNA, 19 nt, Artificial Sequence
  Description of Artificial Sequence: Synthetic oligonucleotide
aggagaagguuccaaguau

SEQ ID NO: 2474024 - RNA, 19 nt, Artificial Sequence
  Description of Artificial Sequence: Synthetic oligonucleotide
ggaauugauucuuuuguga

SEQ ID NO: 2474025 - RNA, 19 nt, Artificial Sequence
  Description of Artificial Sequence: Synthetic oligonucleotide
ugucagggacccacaaagc

SEQ ID NO: 2474026 - RNA, 19 nt, Artificial Sequence
  Description of Artificial Sequence: Synthetic oligonucleotide
guuaacugcaugucaggga

SEQ ID NO: 2474027 - RNA, 19 nt, Artificial Sequence
  Description of Artificial Sequence: Synthetic oligonucleotide
uucaucguaguuagacaaa

SEQ ID NO: 2474028 - RNA, 19 nt, Artificial Sequence
  Description of Artificial Sequence: Synthetic oligonucleotide
uccauuuagaaagggccac

SEQ ID NO: 2474029 - RNA, 19 nt, Artificial Sequence
  Description of Artificial Sequence: Synthetic oligonucleotide
ugaauggacgaggaagacu

SEQ ID NO: 2474030 - RNA, 19 nt, Artificial Sequence
  Description of Artificial Sequence: Synthetic oligonucleotide
gaaagggccacgcuuccca

SEQ ID NO: 2474031 - RNA, 19 nt, Artificial Sequence
  Description of Artificial Sequence: Synthetic oligonucleotide
uucacccuccaucuaucug

SEQ ID NO: 2474032 - RNA, 19 nt, Artificial Sequence
  Description of Artificial Sequence: Synthetic oligonucleotide
uguaagccuucaaaauuua

SEQ ID NO: 2474033 - RNA, 19 nt, Artificial Sequence
  Description of Artificial Sequence: Synthetic oligonucleotide
uggacgaggaagacuucug

SEQ ID NO: 2474034 - RNA, 19 nt, Artificial Sequence
  Description of Artificial Sequence: Synthetic oligonucleotide
accugcucaaucauaucac

SEQ ID NO: 2474035 - RNA, 19 nt, Artificial Sequence
  Description of Artificial Sequence: Synthetic oligonucleotide
ucaucguaguuagacaaau

SEQ ID NO: 2474036 - RNA, 19 nt, Artificial Sequence
  Description of Artificial Sequence: Synthetic oligonucleotide
gauuuguuucaugaaugga

SEQ ID NO: 2474037 - RNA, 19 nt, Artificial Sequence
  Description of Artificial Sequence: Synthetic oligonucleotide
ggcagcaaaugccuuaacc

SEQ ID NO: 2474038 - RNA, 19 nt, Artificial Sequence
  Description of Artificial Sequence: Synthetic oligonucleotide
aucacugaucuuuucugaa

SEQ ID NO: 2474039 - RNA, 19 nt, Artificial Sequence
  Description of Artificial Sequence: Synthetic oligonucleotide
ugcacacagcaaccaaccc

SEQ ID NO: 2474040 - RNA, 19 nt, Artificial Sequence
  Description of Artificial Sequence: Synthetic oligonucleotide
uucaugaauggacgaggaa

SEQ ID NO: 2474041 - RNA, 19 nt, Artificial Sequence
  Description of Artificial Sequence: Synthetic oligonucleotide
cucaaucauaucacugauc

SEQ ID NO: 2474042 - RNA, 19 nt, Artificial Sequence
  Description of Artificial Sequence: Synthetic oligonucleotide
gguuaacugcaugucaggg

SEQ ID NO: 2474043 - RNA, 19 nt, Artificial Sequence
  Description of Artificial Sequence: Synthetic oligonucleotide
gaagaauuuuaaauacuua

SEQ ID NO: 2474044 - RNA, 19 nt, Artificial Sequence
  Description of Artificial Sequence: Synthetic oligonucleotide
guaguuagacaaaucaucu

SEQ ID NO: 2474045 - RNA, 19 nt, Artificial Sequence
  Description of Artificial Sequence: Synthetic oligonucleotide
ccaguugucuccuuucagg

SEQ ID NO: 2474046 - RNA, 19 nt, Artificial Sequence
  Description of Artificial Sequence: Synthetic oligonucleotide
augaauggacgaggaagac

SEQ ID NO: 2474047 - RNA, 19 nt, Artificial Sequence
  Description of Artificial Sequence: Synthetic oligonucleotide
caucucacagugaggguug

SEQ ID NO: 2474048 - RNA, 19 nt, Artificial Sequence
  Description of Artificial Sequence: Synthetic oligonucleotide
caggcaucucccuaaagca

SEQ ID NO: 2474049 - RNA, 19 nt, Artificial Sequence
  Description of Artificial Sequence: Synthetic oligonucleotide
cuggucgugcauauucuac

SEQ ID NO: 2474050 - RNA, 19 nt, Artificial Sequence
  Description of Artificial Sequence: Synthetic oligonucleotide
uucacugacuuagcguuga

SEQ ID NO: 2474051 - RNA, 19 nt, Artificial Sequence
  Description of Artificial Sequence: Synthetic oligonucleotide
acacguguggaggucagag

SEQ ID NO: 2474052 - RNA, 19 nt, Artificial Sequence
  Description of Artificial Sequence: Synthetic oligonucleotide
caccugugaccacuggucg

SEQ ID NO: 2474053 - RNA, 19 nt, Artificial Sequence
  Description of Artificial Sequence: Synthetic oligonucleotide
caaccaacccaguugucuc

SEQ ID NO: 2474054 - RNA, 19 nt, Artificial Sequence
  Description of Artificial Sequence: Synthetic oligonucleotide
agccuuuaagcggaguaag

SEQ ID NO: 2474055 - RNA, 19 nt, Artificial Sequence
  Description of Artificial Sequence: Synthetic oligonucleotide
ggacgcuuuguuuuccagg

SEQ ID NO: 2474056 - RNA, 19 nt, Artificial Sequence
  Description of Artificial Sequence: Synthetic oligonucleotide
uucuccguuccuacauggc

SEQ ID NO: 2474057 - RNA, 19 nt, Artificial Sequence
  Description of Artificial Sequence: Synthetic oligonucleotide
cguaguuagacaaaucauc

SEQ ID NO: 2474058 - RNA, 19 nt, Artificial Sequence
  Description of Artificial Sequence: Synthetic oligonucleotide
gaagacuucugaagucagc

SEQ ID NO: 2474059 - RNA, 19 nt, Artificial Sequence
  Description of Artificial Sequence: Synthetic oligonucleotide
acugaucuuuucugaagaa

SEQ ID NO: 2474060 - RNA, 19 nt, Artificial Sequence
  Description of Artificial Sequence: Synthetic oligonucleotide
cacugaucuuuucugaaga

SEQ ID NO: 2474061 - RNA, 19 nt, Artificial Sequence
  Description of Artificial Sequence: Synthetic oligonucleotide
uccuuagugaugucaucuc

SEQ ID NO: 2474062 - RNA, 19 nt, Artificial Sequence
  Description of Artificial Sequence: Synthetic oligonucleotide
uccguuccuacauggcagc

SEQ ID NO: 2474063 - RNA, 19 nt, Artificial Sequence
  Description of Artificial Sequence: Synthetic oligonucleotide
agccuucaaaauuuaguua

SEQ ID NO: 2474064 - RNA, 19 nt, Artificial Sequence
  Description of Artificial Sequence: Synthetic oligonucleotide
aagacaagucaugcaggca

SEQ ID NO: 2474065 - RNA, 19 nt, Artificial Sequence
  Description of Artificial Sequence: Synthetic oligonucleotide
cacgcuucccaccugugac

SEQ ID NO: 2474066 - RNA, 19 nt, Artificial Sequence
  Description of Artificial Sequence: Synthetic oligonucleotide
gaauggacgaggaagacuu

SEQ ID NO: 2474067 - RNA, 19 nt, Artificial Sequence
  Description of Artificial Sequence: Synthetic oligonucleotide
aaagccuggaaggacgcuu

SEQ ID NO: 2474068 - RNA, 19 nt, Artificial Sequence
  Description of Artificial Sequence: Synthetic oligonucleotide
uucugaagucagcaacaaa

SEQ ID NO: 2474069 - RNA, 19 nt, Artificial Sequence
  Description of Artificial Sequence: Synthetic oligonucleotide
caaguaucccuuggaauug

SEQ ID NO: 2474070 - RNA, 19 nt, Artificial Sequence
  Description of Artificial Sequence: Synthetic oligonucleotide
uguuccaguuuucccuuuc

SEQ ID NO: 2474071 - RNA, 19 nt, Artificial Sequence
  Description of Artificial Sequence: Synthetic oligonucleotide
cauaucacugaucuuuucu

SEQ ID NO: 2474072 - RNA, 19 nt, Artificial Sequence
  Description of Artificial Sequence: Synthetic oligonucleotide
cauauucuacaaagucauc

SEQ ID NO: 2474073 - RNA, 19 nt, Artificial Sequence
  Description of Artificial Sequence: Synthetic oligonucleotide
uucucugaacagagguuaa

SEQ ID NO: 2474074 - RNA, 19 nt, Artificial Sequence
  Description of Artificial Sequence: Synthetic oligonucleotide
guuugguuacguacacucc

SEQ ID NO: 2474075 - RNA, 19 nt, Artificial Sequence
  Description of Artificial Sequence: Synthetic oligonucleotide
ucuaucugucguuuccauu

SEQ ID NO: 2474076 - RNA, 19 nt, Artificial Sequence
  Description of Artificial Sequence: Synthetic oligonucleotide
cuuucacugacuuagcguu

SEQ ID NO: 2474077 - RNA, 19 nt, Artificial Sequence
  Description of Artificial Sequence: Synthetic oligonucleotide
ucagucaguuugguuacgu

SEQ ID NO: 2474078 - RNA, 19 nt, Artificial Sequence
  Description of Artificial Sequence: Synthetic oligonucleotide
ucugacgaccggccguccc

SEQ ID NO: 2474079 - RNA, 19 nt, Artificial Sequence
  Description of Artificial Sequence: Synthetic oligonucleotide
aagcggaguaaggauuugu

SEQ ID NO: 2474080 - RNA, 19 nt, Artificial Sequence
  Description of Artificial Sequence: Synthetic oligonucleotide
aauggacgaggaagacuuc

SEQ ID NO: 2474081 - RNA, 19 nt, Artificial Sequence
  Description of Artificial Sequence: Synthetic oligonucleotide
aggacgcuuuguuuuccag

SEQ ID NO: 2474082 - RNA, 19 nt, Artificial Sequence
  Description of Artificial Sequence: Synthetic oligonucleotide
ggacaaucaggcugggcag

SEQ ID NO: 2474083 - RNA, 19 nt, Artificial Sequence
  Description of Artificial Sequence: Synthetic oligonucleotide
caucguaguuagacaaauc

SEQ ID NO: 2474084 - RNA, 19 nt, Artificial Sequence
  Description of Artificial Sequence: Synthetic oligonucleotide
caguugucuccuuucagga

SEQ ID NO: 2474085 - RNA, 19 nt, Artificial Sequence
  Description of Artificial Sequence: Synthetic oligonucleotide
auucacccuccaucuaucu

SEQ ID NO: 2474086 - RNA, 19 nt, Artificial Sequence
  Description of Artificial Sequence: Synthetic oligonucleotide
ucauucagucaguuugguu

SEQ ID NO: 2474087 - RNA, 19 nt, Artificial Sequence
  Description of Artificial Sequence: Synthetic oligonucleotide
ugcaugucagggacccaca

SEQ ID NO: 2474088 - RNA, 19 nt, Artificial Sequence
  Description of Artificial Sequence: Synthetic oligonucleotide
cuaucugucguuuccauuu

SEQ ID NO: 2474089 - RNA, 19 nt, Artificial Sequence
  Description of Artificial Sequence: Synthetic oligonucleotide
cauucacccuccaucuauc

SEQ ID NO: 2474090 - RNA, 19 nt, Artificial Sequence
  Description of Artificial Sequence: Synthetic oligonucleotide
gacaaucaggcugggcagc

SEQ ID NO: 2474091 - RNA, 19 nt, Artificial Sequence
  Description of Artificial Sequence: Synthetic oligonucleotide
acaaaucaucugcaaucau

SEQ ID NO: 2474092 - RNA, 19 nt, Artificial Sequence
  Description of Artificial Sequence: Synthetic oligonucleotide
uucagucaguuugguuacg

SEQ ID NO: 2474093 - RNA, 19 nt, Artificial Sequence
  Description of Artificial Sequence: Synthetic oligonucleotide
uucauucagucaguuuggu

SEQ ID NO: 2474094 - RNA, 19 nt, Artificial Sequence
  Description of Artificial Sequence: Synthetic oligonucleotide
uuccaaaaucuaggagaag

SEQ ID NO: 2474095 - RNA, 19 nt, Artificial Sequence
  Description of Artificial Sequence: Synthetic oligonucleotide
acguacacucccaaagaug

SEQ ID NO: 2474096 - RNA, 19 nt, Artificial Sequence
  Description of Artificial Sequence: Synthetic oligonucleotide
agcauauuguaagccuuca

SEQ ID NO: 2474097 - RNA, 19 nt, Artificial Sequence
  Description of Artificial Sequence: Synthetic oligonucleotide
auggacgaggaagacuucu

SEQ ID NO: 2474098 - RNA, 19 nt, Artificial Sequence
  Description of Artificial Sequence: Synthetic oligonucleotide
auggcacacguguggaggu

SEQ ID NO: 2474099 - RNA, 19 nt, Artificial Sequence
  Description of Artificial Sequence: Synthetic oligonucleotide
ucccuuucacugacuuagc

SEQ ID NO: 2474100 - RNA, 19 nt, Artificial Sequence
  Description of Artificial Sequence: Synthetic oligonucleotide
ugguuacguacacucccaa

SEQ ID NO: 2474101 - RNA, 19 nt, Artificial Sequence
  Description of Artificial Sequence: Synthetic oligonucleotide
cugaggagcuucuccguuc

SEQ ID NO: 2474102 - RNA, 19 nt, Artificial Sequence
  Description of Artificial Sequence: Synthetic oligonucleotide
gugugagguaggcucagca

SEQ ID NO: 2474103 - RNA, 19 nt, Artificial Sequence
  Description of Artificial Sequence: Synthetic oligonucleotide
acgcuuuguuuuccagguc

SEQ ID NO: 2474104 - RNA, 19 nt, Artificial Sequence
  Description of Artificial Sequence: Synthetic oligonucleotide
caauaaggacaggccaggc

SEQ ID NO: 2474105 - RNA, 19 nt, Artificial Sequence
  Description of Artificial Sequence: Synthetic oligonucleotide
agggccacgcuucccaccu

SEQ ID NO: 2474106 - RNA, 19 nt, Artificial Sequence
  Description of Artificial Sequence: Synthetic oligonucleotide
aagguuccaaguaucccuu

SEQ ID NO: 2474107 - RNA, 19 nt, Artificial Sequence
  Description of Artificial Sequence: Synthetic oligonucleotide
cuuuaagcggaguaaggau

SEQ ID NO: 2474108 - RNA, 19 nt, Artificial Sequence
  Description of Artificial Sequence: Synthetic oligonucleotide
uuucccuuucacugacuua

SEQ ID NO: 2474109 - RNA, 19 nt, Artificial Sequence
  Description of Artificial Sequence: Synthetic oligonucleotide
cagagguuaacugcauguc

SEQ ID NO: 2474110 - RNA, 19 nt, Artificial Sequence
  Description of Artificial Sequence: Synthetic oligonucleotide
ugugaccacuggucgugca

SEQ ID NO: 2474111 - RNA, 19 nt, Artificial Sequence
  Description of Artificial Sequence: Synthetic oligonucleotide
caucugcaaucauguuucc

SEQ ID NO: 2474112 - RNA, 19 nt, Artificial Sequence
  Description of Artificial Sequence: Synthetic oligonucleotide
uuagcguugacagguccuu

SEQ ID NO: 2474113 - RNA, 19 nt, Artificial Sequence
  Description of Artificial Sequence: Synthetic oligonucleotide
acccaguugucuccuuuca

SEQ ID NO: 2474114 - RNA, 19 nt, Artificial Sequence
  Description of Artificial Sequence: Synthetic oligonucleotide
augucaucucacagugagg

SEQ ID NO: 2474115 - RNA, 19 nt, Artificial Sequence
  Description of Artificial Sequence: Synthetic oligonucleotide
gccuuaaccugcucaauca

SEQ ID NO: 2474116 - RNA, 19 nt, Artificial Sequence
  Description of Artificial Sequence: Synthetic oligonucleotide
auuucucugaacagagguu

SEQ ID NO: 2474117 - RNA, 19 nt, Artificial Sequence
  Description of Artificial Sequence: Synthetic oligonucleotide
guuccaguuuucccuuuca

SEQ ID NO: 2474118 - RNA, 19 nt, Artificial Sequence
  Description of Artificial Sequence: Synthetic oligonucleotide
acuggucgugcauauucua

SEQ ID NO: 2474119 - RNA, 19 nt, Artificial Sequence
  Description of Artificial Sequence: Synthetic oligonucleotide
uaagcggaguaaggauuug

SEQ ID NO: 2474120 - RNA, 19 nt, Artificial Sequence
  Description of Artificial Sequence: Synthetic oligonucleotide
ucccaccugugaccacugg

SEQ ID NO: 2474121 - RNA, 19 nt, Artificial Sequence
  Description of Artificial Sequence: Synthetic oligonucleotide
accugugaccacuggucgu

SEQ ID NO: 2474122 - RNA, 19 nt, Artificial Sequence
  Description of Artificial Sequence: Synthetic oligonucleotide
ggagcuucuccguuccuac

SEQ ID NO: 2474123 - RNA, 19 nt, Artificial Sequence
  Description of Artificial Sequence: Synthetic oligonucleotide
gacaagucaugcaggcauc

SEQ ID NO: 2474124 - RNA, 19 nt, Artificial Sequence
  Description of Artificial Sequence: Synthetic oligonucleotide
agguuccaaguaucccuug

SEQ ID NO: 2474125 - RNA, 19 nt, Artificial Sequence
  Description of Artificial Sequence: Synthetic oligonucleotide
cccuuucacugacuuagcg

SEQ ID NO: 2474126 - RNA, 19 nt, Artificial Sequence
  Description of Artificial Sequence: Synthetic oligonucleotide
acgaccggccgucccuaac

SEQ ID NO: 2474127 - RNA, 19 nt, Artificial Sequence
  Description of Artificial Sequence: Synthetic oligonucleotide
ucacugacuuagcguugac

SEQ ID NO: 2474128 - RNA, 19 nt, Artificial Sequence
  Description of Artificial Sequence: Synthetic oligonucleotide
acaaucaggcugggcagca

SEQ ID NO: 2474129 - RNA, 19 nt, Artificial Sequence
  Description of Artificial Sequence: Synthetic oligonucleotide
aucauaucacugaucuuuu

SEQ ID NO: 2474130 - RNA, 19 nt, Artificial Sequence
  Description of Artificial Sequence: Synthetic oligonucleotide
ggaaggacgcuuuguuuuc

SEQ ID NO: 2474131 - RNA, 19 nt, Artificial Sequence
  Description of Artificial Sequence: Synthetic oligonucleotide
ggagaagguuccaaguauc

SEQ ID NO: 2474132 - RNA, 19 nt, Artificial Sequence
  Description of Artificial Sequence: Synthetic oligonucleotide
uaacguccugaggagcuuc

SEQ ID NO: 2474133 - RNA, 19 nt, Artificial Sequence
  Description of Artificial Sequence: Synthetic oligonucleotide
ccggccgucccuaacgucc

SEQ ID NO: 2474134 - RNA, 19 nt, Artificial Sequence
  Description of Artificial Sequence: Synthetic oligonucleotide
ccacuggucgugcauauuc

SEQ ID NO: 2474135 - RNA, 19 nt, Artificial Sequence
  Description of Artificial Sequence: Synthetic oligonucleotide
gccuuuaagcggaguaagg

SEQ ID NO: 2474136 - RNA, 19 nt, Artificial Sequence
  Description of Artificial Sequence: Synthetic oligonucleotide
uggugugagguaggcucag

SEQ ID NO: 2474137 - RNA, 19 nt, Artificial Sequence
  Description of Artificial Sequence: Synthetic oligonucleotide
ugaccacuggucgugcaua

SEQ ID NO: 2474138 - RNA, 19 nt, Artificial Sequence
  Description of Artificial Sequence: Synthetic oligonucleotide
gcuuuguggagacuggugu

SEQ ID NO: 2474139 - RNA, 19 nt, Artificial Sequence
  Description of Artificial Sequence: Synthetic oligonucleotide
acccuccaucuaucugucg

SEQ ID NO: 2474140 - RNA, 19 nt, Artificial Sequence
  Description of Artificial Sequence: Synthetic oligonucleotide
cuuagcguugacagguccu

SEQ ID NO: 2474141 - RNA, 19 nt, Artificial Sequence
  Description of Artificial Sequence: Synthetic oligonucleotide
aacguccugaggagcuucu

SEQ ID NO: 2474142 - RNA, 19 nt, Artificial Sequence
  Description of Artificial Sequence: Synthetic oligonucleotide
cuggugugagguaggcuca

SEQ ID NO: 2474143 - RNA, 19 nt, Artificial Sequence
  Description of Artificial Sequence: Synthetic oligonucleotide
caucuaucugucguuucca

SEQ ID NO: 2474144 - RNA, 19 nt, Artificial Sequence
  Description of Artificial Sequence: Synthetic oligonucleotide
ccauuuagaaagggccacg

SEQ ID NO: 2474145 - RNA, 19 nt, Artificial Sequence
  Description of Artificial Sequence: Synthetic oligonucleotide
ggacgaggaagacuucuga

SEQ ID NO: 2474146 - RNA, 19 nt, Artificial Sequence
  Description of Artificial Sequence: Synthetic oligonucleotide
gaggacaaucaggcugggc

SEQ ID NO: 2474147 - RNA, 19 nt, Artificial Sequence
  Description of Artificial Sequence: Synthetic oligonucleotide
ucucacagugaggguuggc

SEQ ID NO: 2474148 - RNA, 19 nt, Artificial Sequence
  Description of Artificial Sequence: Synthetic oligonucleotide
cacccuccaucuaucuguc

SEQ ID NO: 2474149 - RNA, 19 nt, Artificial Sequence
  Description of Artificial Sequence: Synthetic oligonucleotide
ccuuuaagcggaguaagga

SEQ ID NO: 2474150 - RNA, 19 nt, Artificial Sequence
  Description of Artificial Sequence: Synthetic oligonucleotide
agaggacaaucaggcuggg

SEQ ID NO: 2474151 - RNA, 19 nt, Artificial Sequence
  Description of Artificial Sequence: Synthetic oligonucleotide
agcggaguaaggauuuguu

SEQ ID NO: 2474152 - RNA, 19 nt, Artificial Sequence
  Description of Artificial Sequence: Synthetic oligonucleotide
agugauguucaaagugcuu

SEQ ID NO: 2474153 - RNA, 19 nt, Artificial Sequence
  Description of Artificial Sequence: Synthetic oligonucleotide
cagcaaccaacccaguugu

SEQ ID NO: 2474154 - RNA, 19 nt, Artificial Sequence
  Description of Artificial Sequence: Synthetic oligonucleotide
agccuggaaggacgcuuug

SEQ ID NO: 2474155 - RNA, 19 nt, Artificial Sequence
  Description of Artificial Sequence: Synthetic oligonucleotide
uggagacuggugugaggua

SEQ ID NO: 2474156 - RNA, 19 nt, Artificial Sequence
  Description of Artificial Sequence: Synthetic oligonucleotide
cacuagcucugacgaccgg

SEQ ID NO: 2474157 - RNA, 19 nt, Artificial Sequence
  Description of Artificial Sequence: Synthetic oligonucleotide
gcuucuccguuccuacaug

SEQ ID NO: 2474158 - RNA, 19 nt, Artificial Sequence
  Description of Artificial Sequence: Synthetic oligonucleotide
gcacuagcucugacgaccg

SEQ ID NO: 2474159 - RNA, 19 nt, Artificial Sequence
  Description of Artificial Sequence: Synthetic oligonucleotide
gcuuucuguaaagacaagu

SEQ ID NO: 2474160 - RNA, 19 nt, Artificial Sequence
  Description of Artificial Sequence: Synthetic oligonucleotide
gacuuagcguugacagguc

SEQ ID NO: 2474161 - RNA, 19 nt, Artificial Sequence
  Description of Artificial Sequence: Synthetic oligonucleotide
cguacacucccaaagaugu

SEQ ID NO: 2474162 - RNA, 19 nt, Artificial Sequence
  Description of Artificial Sequence: Synthetic oligonucleotide
gcagccuuuaagcggagua

SEQ ID NO: 2474163 - RNA, 19 nt, Artificial Sequence
  Description of Artificial Sequence: Synthetic oligonucleotide
ccuuagugaugucaucuca

SEQ ID NO: 2474164 - RNA, 19 nt, Artificial Sequence
  Description of Artificial Sequence: Synthetic oligonucleotide
cacugacuuagcguugaca

SEQ ID NO: 2474165 - RNA, 19 nt, Artificial Sequence
  Description of Artificial Sequence: Synthetic oligonucleotide
agcaaccaacccaguuguc

SEQ ID NO: 2474166 - RNA, 19 nt, Artificial Sequence
  Description of Artificial Sequence: Synthetic oligonucleotide
ccaaguaucccuuggaauu

SEQ ID NO: 2474167 - RNA, 19 nt, Artificial Sequence
  Description of Artificial Sequence: Synthetic oligonucleotide
gguuacguacacucccaaa

SEQ ID NO: 2474168 - RNA, 19 nt, Artificial Sequence
  Description of Artificial Sequence: Synthetic oligonucleotide
caaaaucuaggagaagguu

SEQ ID NO: 2474169 - RNA, 19 nt, Artificial Sequence
  Description of Artificial Sequence: Synthetic oligonucleotide
aggagcuucuccguuccua

SEQ ID NO: 2474170 - RNA, 19 nt, Artificial Sequence
  Description of Artificial Sequence: Synthetic oligonucleotide
cugggcagcaaaugccuua

SEQ ID NO: 2474171 - RNA, 19 nt, Artificial Sequence
  Description of Artificial Sequence: Synthetic oligonucleotide
cugugaccacuggucgugc

SEQ ID NO: 2474172 - RNA, 19 nt, Artificial Sequence
  Description of Artificial Sequence: Synthetic oligonucleotide
auguuccaguuuucccuuu

SEQ ID NO: 2474173 - RNA, 19 nt, Artificial Sequence
  Description of Artificial Sequence: Synthetic oligonucleotide
cguuuccauuuagaaaggg

SEQ ID NO: 2474174 - RNA, 19 nt, Artificial Sequence
  Description of Artificial Sequence: Synthetic oligonucleotide
aguaucccuuggaauugau

SEQ ID NO: 2474175 - RNA, 19 nt, Artificial Sequence
  Description of Artificial Sequence: Synthetic oligonucleotide
ggguuggcuuuguggagac

SEQ ID NO: 2474176 - RNA, 19 nt, Artificial Sequence
  Description of Artificial Sequence: Synthetic oligonucleotide
ccugugaccacuggucgug

SEQ ID NO: 2474177 - RNA, 19 nt, Artificial Sequence
  Description of Artificial Sequence: Synthetic oligonucleotide
cagucaguuugguuacgua

SEQ ID NO: 2474178 - RNA, 19 nt, Artificial Sequence
  Description of Artificial Sequence: Synthetic oligonucleotide
cacuggucgugcauauucu

SEQ ID NO: 2474179 - RNA, 19 nt, Artificial Sequence
  Description of Artificial Sequence: Synthetic oligonucleotide
gcaaccaacccaguugucu

SEQ ID NO: 2474180 - RNA, 19 nt, Artificial Sequence
  Description of Artificial Sequence: Synthetic oligonucleotide
gcucaaucauaucacugau

SEQ ID NO: 2474181 - RNA, 19 nt, Artificial Sequence
  Description of Artificial Sequence: Synthetic oligonucleotide
gaguaaggauuuguuucau

SEQ ID NO: 2474182 - RNA, 19 nt, Artificial Sequence
  Description of Artificial Sequence: Synthetic oligonucleotide
ugucuccuuucaggaucca

SEQ ID NO: 2474183 - RNA, 19 nt, Artificial Sequence
  Description of Artificial Sequence: Synthetic oligonucleotide
gucaucucacagugagggu

SEQ ID NO: 2474184 - RNA, 19 nt, Artificial Sequence
  Description of Artificial Sequence: Synthetic oligonucleotide
uagcguugacagguccuua

SEQ ID NO: 2474185 - RNA, 19 nt, Artificial Sequence
  Description of Artificial Sequence: Synthetic oligonucleotide
agggacccacaaagccugg

SEQ ID NO: 2474186 - RNA, 19 nt, Artificial Sequence
  Description of Artificial Sequence: Synthetic oligonucleotide
gaacagagguuaacugcau

SEQ ID NO: 2474187 - RNA, 19 nt, Artificial Sequence
  Description of Artificial Sequence: Synthetic oligonucleotide
cgaccggccgucccuaacg

SEQ ID NO: 2474188 - RNA, 19 nt, Artificial Sequence
  Description of Artificial Sequence: Synthetic oligonucleotide
gaccacuggucgugcauau

SEQ ID NO: 2474189 - RNA, 19 nt, Artificial Sequence
  Description of Artificial Sequence: Synthetic oligonucleotide
ccuaacguccugaggagcu

SEQ ID NO: 2474190 - RNA, 19 nt, Artificial Sequence
  Description of Artificial Sequence: Synthetic oligonucleotide
cucauucacccuccaucua

SEQ ID NO: 2474191 - RNA, 19 nt, Artificial Sequence
  Description of Artificial Sequence: Synthetic oligonucleotide
ugacgaccggccgucccua

SEQ ID NO: 2474192 - RNA, 19 nt, Artificial Sequence
  Description of Artificial Sequence: Synthetic oligonucleotide
gugaccacuggucgugcau

SEQ ID NO: 2474193 - RNA, 19 nt, Artificial Sequence
  Description of Artificial Sequence: Synthetic oligonucleotide
ggcacacguguggagguca

SEQ ID NO: 2474194 - RNA, 19 nt, Artificial Sequence
  Description of Artificial Sequence: Synthetic oligonucleotide
gaccggccgucccuaacgu

SEQ ID NO: 2474195 - RNA, 19 nt, Artificial Sequence
  Description of Artificial Sequence: Synthetic oligonucleotide
acugcaugucagggaccca

SEQ ID NO: 2474196 - RNA, 19 nt, Artificial Sequence
  Description of Artificial Sequence: Synthetic oligonucleotide
caaucauaucacugaucuu

SEQ ID NO: 2474197 - RNA, 19 nt, Artificial Sequence
  Description of Artificial Sequence: Synthetic oligonucleotide
ccgucccuaacguccugag

SEQ ID NO: 2474198 - RNA, 19 nt, Artificial Sequence
  Description of Artificial Sequence: Synthetic oligonucleotide
gacuggugugagguaggcu

SEQ ID NO: 2474199 - RNA, 19 nt, Artificial Sequence
  Description of Artificial Sequence: Synthetic oligonucleotide
cccacaaagccuggaagga

SEQ ID NO: 2474200 - RNA, 19 nt, Artificial Sequence
  Description of Artificial Sequence: Synthetic oligonucleotide
gcaaaugccuuaaccugcu

SEQ ID NO: 2474201 - RNA, 19 nt, Artificial Sequence
  Description of Artificial Sequence: Synthetic oligonucleotide
gcggaguaaggauuuguuu

SEQ ID NO: 2474202 - RNA, 19 nt, Artificial Sequence
  Description of Artificial Sequence: Synthetic oligonucleotide
cugacgaccggccgucccu

SEQ ID NO: 2474203 - RNA, 19 nt, Artificial Sequence
  Description of Artificial Sequence: Synthetic oligonucleotide
cucugacgaccggccgucc

SEQ ID NO: 2474204 - RNA, 19 nt, Artificial Sequence
  Description of Artificial Sequence: Synthetic oligonucleotide
guaucccuuggaauugauu

SEQ ID NO: 2474205 - RNA, 19 nt, Artificial Sequence
  Description of Artificial Sequence: Synthetic oligonucleotide
caucucauucacccuccau

SEQ ID NO: 2474206 - RNA, 19 nt, Artificial Sequence
  Description of Artificial Sequence: Synthetic oligonucleotide
gcacacguguggaggucag

SEQ ID NO: 2474207 - RNA, 19 nt, Artificial Sequence
  Description of Artificial Sequence: Synthetic oligonucleotide
cccuccaucuaucugucgu

SEQ ID NO: 2474208 - RNA, 19 nt, Artificial Sequence
  Description of Artificial Sequence: Synthetic oligonucleotide
gcucugacgaccggccguc

SEQ ID NO: 2474209 - RNA, 19 nt, Artificial Sequence
  Description of Artificial Sequence: Synthetic oligonucleotide
gacgaccggccgucccuaa

SEQ ID NO: 2474210 - RNA, 19 nt, Artificial Sequence
  Description of Artificial Sequence: Synthetic oligonucleotide
accacuggucgugcauauu

SEQ ID NO: 2474211 - RNA, 19 nt, Artificial Sequence
  Description of Artificial Sequence: Synthetic oligonucleotide
gaggagcuucuccguuccu

SEQ ID NO: 2474212 - RNA, 19 nt, Artificial Sequence
  Description of Artificial Sequence: Synthetic oligonucleotide
caacccaguugucuccuuu

SEQ ID NO: 2474213 - RNA, 19 nt, Artificial Sequence
  Description of Artificial Sequence: Synthetic oligonucleotide
caguuugguuacguacacu

SEQ ID NO: 2474214 - RNA, 19 nt, Artificial Sequence
  Description of Artificial Sequence: Synthetic oligonucleotide
ccguuccuacauggcagcc

SEQ ID NO: 2474215 - RNA, 19 nt, Artificial Sequence
  Description of Artificial Sequence: Synthetic oligonucleotide
cacacguguggaggucaga

SEQ ID NO: 2474216 - RNA, 19 nt, Artificial Sequence
  Description of Artificial Sequence: Synthetic oligonucleotide
gcguugacagguccuuagu

SEQ ID NO: 2474217 - RNA, 19 nt, Artificial Sequence
  Description of Artificial Sequence: Synthetic oligonucleotide
gucuccuuucaggauccau

SEQ ID NO: 2474218 - RNA, 19 nt, Artificial Sequence
  Description of Artificial Sequence: Synthetic oligonucleotide
ccuacauggcagccuuuaa

SEQ ID NO: 2474219 - RNA, 19 nt, Artificial Sequence
  Description of Artificial Sequence: Synthetic oligonucleotide
cuccaucuaucugucguuu

SEQ ID NO: 2474220 - RNA, 19 nt, Artificial Sequence
  Description of Artificial Sequence: Synthetic oligonucleotide
gggacccacaaagccugga

SEQ ID NO: 2474221 - RNA, 19 nt, Artificial Sequence
  Description of Artificial Sequence: Synthetic oligonucleotide
caggcuccuucuucaucgu

SEQ ID NO: 2474222 - RNA, 19 nt, Artificial Sequence
  Description of Artificial Sequence: Synthetic oligonucleotide
ccuuaaccugcucaaucau

SEQ ID NO: 2474223 - RNA, 19 nt, Artificial Sequence
  Description of Artificial Sequence: Synthetic oligonucleotide
gccgucccuaacguccuga

SEQ ID NO: 2474224 - RNA, 19 nt, Artificial Sequence
  Description of Artificial Sequence: Synthetic oligonucleotide
guacacucccaaagauguu

SEQ ID NO: 2474225 - RNA, 19 nt, Artificial Sequence
  Description of Artificial Sequence: Synthetic oligonucleotide
cuaacguccugaggagcuu

SEQ ID NO: 2474226 - RNA, 19 nt, Artificial Sequence
  Description of Artificial Sequence: Synthetic oligonucleotide
ggccgucccuaacguccug

SEQ ID NO: 2474227 - RNA, 19 nt, Artificial Sequence
  Description of Artificial Sequence: Synthetic oligonucleotide
gggccacgcuucccaccug

SEQ ID NO: 2474228 - RNA, 19 nt, Artificial Sequence
  Description of Artificial Sequence: Synthetic oligonucleotide
cgcuucccaccugugacca

SEQ ID NO: 2474229 - RNA, 19 nt, Artificial Sequence
  Description of Artificial Sequence: Synthetic oligonucleotide
gguuggcuuuguggagacu

SEQ ID NO: 2474230 - RNA, 19 nt, Artificial Sequence
  Description of Artificial Sequence: Synthetic oligonucleotide
cguuccuacauggcagccu

SEQ ID NO: 2474231 - RNA, 19 nt, Artificial Sequence
  Description of Artificial Sequence: Synthetic oligonucleotide
uuuaaauggaacaugaaga

SEQ ID NO: 2474232 - RNA, 19 nt, Artificial Sequence
  Description of Artificial Sequence: Synthetic oligonucleotide
aagguuuucaauuuugcac

SEQ ID NO: 2474233 - RNA, 19 nt, Artificial Sequence
  Description of Artificial Sequence: Synthetic oligonucleotide
aaaacauugaauucaaugu

SEQ ID NO: 2474234 - RNA, 19 nt, Artificial Sequence
  Description of Artificial Sequence: Synthetic oligonucleotide
gaagaauuaaaguacagcc

SEQ ID NO: 2474235 - RNA, 19 nt, Artificial Sequence
  Description of Artificial Sequence: Synthetic oligonucleotide
uuuuaaauggaacaugaag

SEQ ID NO: 2474236 - RNA, 19 nt, Artificial Sequence
  Description of Artificial Sequence: Synthetic oligonucleotide
uguugaacuaacuaaacag

SEQ ID NO: 2474237 - RNA, 19 nt, Artificial Sequence
  Description of Artificial Sequence: Synthetic oligonucleotide
aauaucauuauucauuuaa

SEQ ID NO: 2474238 - RNA, 19 nt, Artificial Sequence
  Description of Artificial Sequence: Synthetic oligonucleotide
acuacaaauguuuacaaag

SEQ ID NO: 2474239 - RNA, 19 nt, Artificial Sequence
  Description of Artificial Sequence: Synthetic oligonucleotide
aguaucacaaauuuaaugu

SEQ ID NO: 2474240 - RNA, 19 nt, Artificial Sequence
  Description of Artificial Sequence: Synthetic oligonucleotide
ugaagaacaacuuuaauuc

SEQ ID NO: 2474241 - RNA, 19 nt, Artificial Sequence
  Description of Artificial Sequence: Synthetic oligonucleotide
uuuaaaguacuacaaaugu

SEQ ID NO: 2474242 - RNA, 19 nt, Artificial Sequence
  Description of Artificial Sequence: Synthetic oligonucleotide
aacaugaagaauuaaagua

SEQ ID NO: 2474243 - RNA, 19 nt, Artificial Sequence
  Description of Artificial Sequence: Synthetic oligonucleotide
ugcacuuugaauaucaaga

SEQ ID NO: 2474244 - RNA, 19 nt, Artificial Sequence
  Description of Artificial Sequence: Synthetic oligonucleotide
uuuauuagcaacauuuggu

SEQ ID NO: 2474245 - RNA, 19 nt, Artificial Sequence
  Description of Artificial Sequence: Synthetic oligonucleotide
aucaugaugcuuuauauag

SEQ ID NO: 2474246 - RNA, 19 nt, Artificial Sequence
  Description of Artificial Sequence: Synthetic oligonucleotide
aaaucaaugaagaacaacu

SEQ ID NO: 2474247 - RNA, 19 nt, Artificial Sequence
  Description of Artificial Sequence: Synthetic oligonucleotide
ugaguugccaaaauaaacc

SEQ ID NO: 2474248 - RNA, 19 nt, Artificial Sequence
  Description of Artificial Sequence: Synthetic oligonucleotide
uaaaguacagccuuaaggu

SEQ ID NO: 2474249 - RNA, 19 nt, Artificial Sequence
  Description of Artificial Sequence: Synthetic oligonucleotide
aaacagauguccuuauaac

SEQ ID NO: 2474250 - RNA, 19 nt, Artificial Sequence
  Description of Artificial Sequence: Synthetic oligonucleotide
uucaguaucacaaauuuaa

SEQ ID NO: 2474251 - RNA, 19 nt, Artificial Sequence
  Description of Artificial Sequence: Synthetic oligonucleotide
auaacuccagucuacagac

SEQ ID NO: 2474252 - RNA, 19 nt, Artificial Sequence
  Description of Artificial Sequence: Synthetic oligonucleotide
aaacauugaauucaaugug

SEQ ID NO: 2474253 - RNA, 19 nt, Artificial Sequence
  Description of Artificial Sequence: Synthetic oligonucleotide
uuuugacaaaucuugaggc

SEQ ID NO: 2474254 - RNA, 19 nt, Artificial Sequence
  Description of Artificial Sequence: Synthetic oligonucleotide
aaauaaacccaaaacauug

SEQ ID NO: 2474255 - RNA, 19 nt, Artificial Sequence
  Description of Artificial Sequence: Synthetic oligonucleotide
uucauguagacucugauuc

SEQ ID NO: 2474256 - RNA, 19 nt, Artificial Sequence
  Description of Artificial Sequence: Synthetic oligonucleotide
uauagaauaccuuacaaua

SEQ ID NO: 2474257 - RNA, 19 nt, Artificial Sequence
  Description of Artificial Sequence: Synthetic oligonucleotide
uauuuaaaacaucaugaug

SEQ ID NO: 2474258 - RNA, 19 nt, Artificial Sequence
  Description of Artificial Sequence: Synthetic oligonucleotide
acucuguucauguagacuc

SEQ ID NO: 2474259 - RNA, 19 nt, Artificial Sequence
  Description of Artificial Sequence: Synthetic oligonucleotide
ucuguuauuucuuugacuc

SEQ ID NO: 2474260 - RNA, 19 nt, Artificial Sequence
  Description of Artificial Sequence: Synthetic oligonucleotide
uguguaaauuuauacauga

SEQ ID NO: 2474261 - RNA, 19 nt, Artificial Sequence
  Description of Artificial Sequence: Synthetic oligonucleotide
aacauguugaacuaacuaa

SEQ ID NO: 2474262 - RNA, 19 nt, Artificial Sequence
  Description of Artificial Sequence: Synthetic oligonucleotide
guuuacaaagaacauuugg

SEQ ID NO: 2474263 - RNA, 19 nt, Artificial Sequence
  Description of Artificial Sequence: Synthetic oligonucleotide
caaaacauugaauucaaug

SEQ ID NO: 2474264 - RNA, 19 nt, Artificial Sequence
  Description of Artificial Sequence: Synthetic oligonucleotide
uaaaguacuacaaauguuu

SEQ ID NO: 2474265 - RNA, 19 nt, Artificial Sequence
  Description of Artificial Sequence: Synthetic oligonucleotide
aaaucacagaaacauguug

SEQ ID NO: 2474266 - RNA, 19 nt, Artificial Sequence
  Description of Artificial Sequence: Synthetic oligonucleotide
uguaugcagaaacuaaucc

SEQ ID NO: 2474267 - RNA, 19 nt, Artificial Sequence
  Description of Artificial Sequence: Synthetic oligonucleotide
uuuaagucaacacauuuau

SEQ ID NO: 2474268 - RNA, 19 nt, Artificial Sequence
  Description of Artificial Sequence: Synthetic oligonucleotide
uaucauuauucauuuaaag

SEQ ID NO: 2474269 - RNA, 19 nt, Artificial Sequence
  Description of Artificial Sequence: Synthetic oligonucleotide
uuauuagcaacauuuggug

SEQ ID NO: 2474270 - RNA, 19 nt, Artificial Sequence
  Description of Artificial Sequence: Synthetic oligonucleotide
uuugacucuguucauguag

SEQ ID NO: 2474271 - RNA, 19 nt, Artificial Sequence
  Description of Artificial Sequence: Synthetic oligonucleotide
aaaguggguauuuaaguca

SEQ ID NO: 2474272 - RNA, 19 nt, Artificial Sequence
  Description of Artificial Sequence: Synthetic oligonucleotide
aaguacuacaaauguuuac

SEQ ID NO: 2474273 - RNA, 19 nt, Artificial Sequence
  Description of Artificial Sequence: Synthetic oligonucleotide
uucauaauaucauuauuca

SEQ ID NO: 2474274 - RNA, 19 nt, Artificial Sequence
  Description of Artificial Sequence: Synthetic oligonucleotide
aucauuauucauuuaaagu

SEQ ID NO: 2474275 - RNA, 19 nt, Artificial Sequence
  Description of Artificial Sequence: Synthetic oligonucleotide
uccuuuauuagcaacauuu

SEQ ID NO: 2474276 - RNA, 19 nt, Artificial Sequence
  Description of Artificial Sequence: Synthetic oligonucleotide
uugaauucaauguguaugc

SEQ ID NO: 2474277 - RNA, 19 nt, Artificial Sequence
  Description of Artificial Sequence: Synthetic oligonucleotide
uuaggauuaacuccuugag

SEQ ID NO: 2474278 - RNA, 19 nt, Artificial Sequence
  Description of Artificial Sequence: Synthetic oligonucleotide
uaugcagaaacuaauccac

SEQ ID NO: 2474279 - RNA, 19 nt, Artificial Sequence
  Description of Artificial Sequence: Synthetic oligonucleotide
ugaauaucaagauagcaau

SEQ ID NO: 2474280 - RNA, 19 nt, Artificial Sequence
  Description of Artificial Sequence: Synthetic oligonucleotide
aacaacuuuaauucuuucu

SEQ ID NO: 2474281 - RNA, 19 nt, Artificial Sequence
  Description of Artificial Sequence: Synthetic oligonucleotide
aagauuaauguuuacuuuu

SEQ ID NO: 2474282 - RNA, 19 nt, Artificial Sequence
  Description of Artificial Sequence: Synthetic oligonucleotide
uauaacuccagucuacaga

SEQ ID NO: 2474283 - RNA, 19 nt, Artificial Sequence
  Description of Artificial Sequence: Synthetic oligonucleotide
uuuaucgucauuaguaaaa

SEQ ID NO: 2474284 - RNA, 19 nt, Artificial Sequence
  Description of Artificial Sequence: Synthetic oligonucleotide
aacagauguccuuauaacu

SEQ ID NO: 2474285 - RNA, 19 nt, Artificial Sequence
  Description of Artificial Sequence: Synthetic oligonucleotide
aacccaaaacauugaauuc

SEQ ID NO: 2474286 - RNA, 19 nt, Artificial Sequence
  Description of Artificial Sequence: Synthetic oligonucleotide
cauuauucauuuaaaguac

SEQ ID NO: 2474287 - RNA, 19 nt, Artificial Sequence
  Description of Artificial Sequence: Synthetic oligonucleotide
gaacuaacuaaacagaaaa

SEQ ID NO: 2474288 - RNA, 19 nt, Artificial Sequence
  Description of Artificial Sequence: Synthetic oligonucleotide
auugaauucaauguguaug

SEQ ID NO: 2474289 - RNA, 19 nt, Artificial Sequence
  Description of Artificial Sequence: Synthetic oligonucleotide
uuaaauggaacaugaagaa

SEQ ID NO: 2474290 - RNA, 19 nt, Artificial Sequence
  Description of Artificial Sequence: Synthetic oligonucleotide
auuagcaacauuuggugug

SEQ ID NO: 2474291 - RNA, 19 nt, Artificial Sequence
  Description of Artificial Sequence: Synthetic oligonucleotide
auaucaagauagcaauuac

SEQ ID NO: 2474292 - RNA, 19 nt, Artificial Sequence
  Description of Artificial Sequence: Synthetic oligonucleotide
uaucacaaauuuaaugugu

SEQ ID NO: 2474293 - RNA, 19 nt, Artificial Sequence
  Description of Artificial Sequence: Synthetic oligonucleotide
uaccuuacaauauuuaaaa

SEQ ID NO: 2474294 - RNA, 19 nt, Artificial Sequence
  Description of Artificial Sequence: Synthetic oligonucleotide
gaauucaauguguaugcag

SEQ ID NO: 2474295 - RNA, 19 nt, Artificial Sequence
  Description of Artificial Sequence: Synthetic oligonucleotide
aaacuaauccaccuuugcu

SEQ ID NO: 2474296 - RNA, 19 nt, Artificial Sequence
  Description of Artificial Sequence: Synthetic oligonucleotide
cacacaacuaccuauuuug

SEQ ID NO: 2474297 - RNA, 19 nt, Artificial Sequence
  Description of Artificial Sequence: Synthetic oligonucleotide
caaaucuugaggcagcgcc

SEQ ID NO: 2474298 - RNA, 19 nt, Artificial Sequence
  Description of Artificial Sequence: Synthetic oligonucleotide
ugcauugccacacaacuac

SEQ ID NO: 2474299 - RNA, 19 nt, Artificial Sequence
  Description of Artificial Sequence: Synthetic oligonucleotide
uaccuauuuuguaaaauga

SEQ ID NO: 2474300 - RNA, 19 nt, Artificial Sequence
  Description of Artificial Sequence: Synthetic oligonucleotide
aacuaauccaccuuugcuu

SEQ ID NO: 2474301 - RNA, 19 nt, Artificial Sequence
  Description of Artificial Sequence: Synthetic oligonucleotide
gaacauuuggauuucacaa

SEQ ID NO: 2474302 - RNA, 19 nt, Artificial Sequence
  Description of Artificial Sequence: Synthetic oligonucleotide
auaauaucauuauucauuu

SEQ ID NO: 2474303 - RNA, 19 nt, Artificial Sequence
  Description of Artificial Sequence: Synthetic oligonucleotide
uuacaaagaacauuuggau

SEQ ID NO: 2474304 - RNA, 19 nt, Artificial Sequence
  Description of Artificial Sequence: Synthetic oligonucleotide
aauuuugcacuuugaauau

SEQ ID NO: 2474305 - RNA, 19 nt, Artificial Sequence
  Description of Artificial Sequence: Synthetic oligonucleotide
ucuguuuggguucccagag

SEQ ID NO: 2474306 - RNA, 19 nt, Artificial Sequence
  Description of Artificial Sequence: Synthetic oligonucleotide
uugaguugccaaaauaaac

SEQ ID NO: 2474307 - RNA, 19 nt, Artificial Sequence
  Description of Artificial Sequence: Synthetic oligonucleotide
uuauagaauaccuuacaau

SEQ ID NO: 2474308 - RNA, 19 nt, Artificial Sequence
  Description of Artificial Sequence: Synthetic oligonucleotide
cuauuuuguaaaaugauaa

SEQ ID NO: 2474309 - RNA, 19 nt, Artificial Sequence
  Description of Artificial Sequence: Synthetic oligonucleotide
ucaagauagcaauuacucc

SEQ ID NO: 2474310 - RNA, 19 nt, Artificial Sequence
  Description of Artificial Sequence: Synthetic oligonucleotide
agaauuaaaguacagccuu

SEQ ID NO: 2474311 - RNA, 19 nt, Artificial Sequence
  Description of Artificial Sequence: Synthetic oligonucleotide
uuuaauguguaaauuuaua

SEQ ID NO: 2474312 - RNA, 19 nt, Artificial Sequence
  Description of Artificial Sequence: Synthetic oligonucleotide
uaucaagauagcaauuacu

SEQ ID NO: 2474313 - RNA, 19 nt, Artificial Sequence
  Description of Artificial Sequence: Synthetic oligonucleotide
agguuuucaauuuugcacu

SEQ ID NO: 2474314 - RNA, 19 nt, Artificial Sequence
  Description of Artificial Sequence: Synthetic oligonucleotide
aauaucaagauagcaauua

SEQ ID NO: 2474315 - RNA, 19 nt, Artificial Sequence
  Description of Artificial Sequence: Synthetic oligonucleotide
aacaaaguggguauuuaag

SEQ ID NO: 2474316 - RNA, 19 nt, Artificial Sequence
  Description of Artificial Sequence: Synthetic oligonucleotide
agucaacacauuuaucguc

SEQ ID NO: 2474317 - RNA, 19 nt, Artificial Sequence
  Description of Artificial Sequence: Synthetic oligonucleotide
uuugaauaucaagauagca

SEQ ID NO: 2474318 - RNA, 19 nt, Artificial Sequence
  Description of Artificial Sequence: Synthetic oligonucleotide
aacuccagucuacagacca

SEQ ID NO: 2474319 - RNA, 19 nt, Artificial Sequence
  Description of Artificial Sequence: Synthetic oligonucleotide
cuaccuauuuuguaaaaug

SEQ ID NO: 2474320 - RNA, 19 nt, Artificial Sequence
  Description of Artificial Sequence: Synthetic oligonucleotide
aacacauuuaucgucauua

SEQ ID NO: 2474321 - RNA, 19 nt, Artificial Sequence
  Description of Artificial Sequence: Synthetic oligonucleotide
uuuggauuucacaauugcu

SEQ ID NO: 2474322 - RNA, 19 nt, Artificial Sequence
  Description of Artificial Sequence: Synthetic oligonucleotide
aggauuaacuccuugaguu

SEQ ID NO: 2474323 - RNA, 19 nt, Artificial Sequence
  Description of Artificial Sequence: Synthetic oligonucleotide
auauuuaaaacaucaugau

SEQ ID NO: 2474324 - RNA, 19 nt, Artificial Sequence
  Description of Artificial Sequence: Synthetic oligonucleotide
caagauagcaauuacucca

SEQ ID NO: 2474325 - RNA, 19 nt, Artificial Sequence
  Description of Artificial Sequence: Synthetic oligonucleotide
acaacuaccuauuuuguaa

SEQ ID NO: 2474326 - RNA, 19 nt, Artificial Sequence
  Description of Artificial Sequence: Synthetic oligonucleotide
ucaauuuugcacuuugaau

SEQ ID NO: 2474327 - RNA, 19 nt, Artificial Sequence
  Description of Artificial Sequence: Synthetic oligonucleotide
gaguugccaaaauaaaccc

SEQ ID NO: 2474328 - RNA, 19 nt, Artificial Sequence
  Description of Artificial Sequence: Synthetic oligonucleotide
aguacuacaaauguuuaca

SEQ ID NO: 2474329 - RNA, 19 nt, Artificial Sequence
  Description of Artificial Sequence: Synthetic oligonucleotide
acaaaguggguauuuaagu

SEQ ID NO: 2474330 - RNA, 19 nt, Artificial Sequence
  Description of Artificial Sequence: Synthetic oligonucleotide
uccaauucuugcuucacug

SEQ ID NO: 2474331 - RNA, 19 nt, Artificial Sequence
  Description of Artificial Sequence: Synthetic oligonucleotide
uuaaugagaauauuuuauu

SEQ ID NO: 2474332 - RNA, 19 nt, Artificial Sequence
  Description of Artificial Sequence: Synthetic oligonucleotide
caauuuugcacuuugaaua

SEQ ID NO: 2474333 - RNA, 19 nt, Artificial Sequence
  Description of Artificial Sequence: Synthetic oligonucleotide
aagucaacacauuuaucgu

SEQ ID NO: 2474334 - RNA, 19 nt, Artificial Sequence
  Description of Artificial Sequence: Synthetic oligonucleotide
aauuuaauguguaaauuua

SEQ ID NO: 2474335 - RNA, 19 nt, Artificial Sequence
  Description of Artificial Sequence: Synthetic oligonucleotide
uguuauuucuuugacucug

SEQ ID NO: 2474336 - RNA, 19 nt, Artificial Sequence
  Description of Artificial Sequence: Synthetic oligonucleotide
aacaucaugaugcuuuaua

SEQ ID NO: 2474337 - RNA, 19 nt, Artificial Sequence
  Description of Artificial Sequence: Synthetic oligonucleotide
gaaacuaauccaccuuugc

SEQ ID NO: 2474338 - RNA, 19 nt, Artificial Sequence
  Description of Artificial Sequence: Synthetic oligonucleotide
agaacauuuggauuucaca

SEQ ID NO: 2474339 - RNA, 19 nt, Artificial Sequence
  Description of Artificial Sequence: Synthetic oligonucleotide
acuaauccaccuuugcuug

SEQ ID NO: 2474340 - RNA, 19 nt, Artificial Sequence
  Description of Artificial Sequence: Synthetic oligonucleotide
accuuacaauauuuaaaac

SEQ ID NO: 2474341 - RNA, 19 nt, Artificial Sequence
  Description of Artificial Sequence: Synthetic oligonucleotide
aacauugaauucaaugugu

SEQ ID NO: 2474342 - RNA, 19 nt, Artificial Sequence
  Description of Artificial Sequence: Synthetic oligonucleotide
acagauguccuuauaacuc

SEQ ID NO: 2474343 - RNA, 19 nt, Artificial Sequence
  Description of Artificial Sequence: Synthetic oligonucleotide
gaaaacauguacaucagaa

SEQ ID NO: 2474344 - RNA, 19 nt, Artificial Sequence
  Description of Artificial Sequence: Synthetic oligonucleotide
agaaacauguugaacuaac

SEQ ID NO: 2474345 - RNA, 19 nt, Artificial Sequence
  Description of Artificial Sequence: Synthetic oligonucleotide
guaucacaaauuuaaugug

SEQ ID NO: 2474346 - RNA, 19 nt, Artificial Sequence
  Description of Artificial Sequence: Synthetic oligonucleotide
uagacucugauucuuucca

SEQ ID NO: 2474347 - RNA, 19 nt, Artificial Sequence
  Description of Artificial Sequence: Synthetic oligonucleotide
uaagguuuucaauuuugca

SEQ ID NO: 2474348 - RNA, 19 nt, Artificial Sequence
  Description of Artificial Sequence: Synthetic oligonucleotide
uuugacaaaucuugaggca

SEQ ID NO: 2474349 - RNA, 19 nt, Artificial Sequence
  Description of Artificial Sequence: Synthetic oligonucleotide
caguaucacaaauuuaaug

SEQ ID NO: 2474350 - RNA, 19 nt, Artificial Sequence
  Description of Artificial Sequence: Synthetic oligonucleotide
ugaacuaacuaaacagaaa

SEQ ID NO: 2474351 - RNA, 19 nt, Artificial Sequence
  Description of Artificial Sequence: Synthetic oligonucleotide
aaaauaaacccaaaacauu

SEQ ID NO: 2474352 - RNA, 19 nt, Artificial Sequence
  Description of Artificial Sequence: Synthetic oligonucleotide
uacagaccaacacacuuca

SEQ ID NO: 2474353 - RNA, 19 nt, Artificial Sequence
  Description of Artificial Sequence: Synthetic oligonucleotide
auuucacaauugcuuauag

SEQ ID NO: 2474354 - RNA, 19 nt, Artificial Sequence
  Description of Artificial Sequence: Synthetic oligonucleotide
agucuacagaccaacacac

SEQ ID NO: 2474355 - RNA, 19 nt, Artificial Sequence
  Description of Artificial Sequence: Synthetic oligonucleotide
aagaacauuuggauuucac

SEQ ID NO: 2474356 - RNA, 19 nt, Artificial Sequence
  Description of Artificial Sequence: Synthetic oligonucleotide
cuuacaauauuuaaaacau

SEQ ID NO: 2474357 - RNA, 19 nt, Artificial Sequence
  Description of Artificial Sequence: Synthetic oligonucleotide
ucuacagaccaacacacuu

SEQ ID NO: 2474358 - RNA, 19 nt, Artificial Sequence
  Description of Artificial Sequence: Synthetic oligonucleotide
aacacacuucauaauauca

SEQ ID NO: 2474359 - RNA, 19 nt, Artificial Sequence
  Description of Artificial Sequence: Synthetic oligonucleotide
uugcuuauagaauaccuua

SEQ ID NO: 2474360 - RNA, 19 nt, Artificial Sequence
  Description of Artificial Sequence: Synthetic oligonucleotide
uugucuguuauuucuuuga

SEQ ID NO: 2474361 - RNA, 19 nt, Artificial Sequence
  Description of Artificial Sequence: Synthetic oligonucleotide
cuuugaauaucaagauagc

SEQ ID NO: 2474362 - RNA, 19 nt, Artificial Sequence
  Description of Artificial Sequence: Synthetic oligonucleotide
gauuaacuccuugaguugc

SEQ ID NO: 2474363 - RNA, 19 nt, Artificial Sequence
  Description of Artificial Sequence: Synthetic oligonucleotide
caaaguggguauuuaaguc

SEQ ID NO: 2474364 - RNA, 19 nt, Artificial Sequence
  Description of Artificial Sequence: Synthetic oligonucleotide
uugcacuuugaauaucaag

SEQ ID NO: 2474365 - RNA, 19 nt, Artificial Sequence
  Description of Artificial Sequence: Synthetic oligonucleotide
ucuuugacucuguucaugu

SEQ ID NO: 2474366 - RNA, 19 nt, Artificial Sequence
  Description of Artificial Sequence: Synthetic oligonucleotide
ugaaaacauguacaucaga

SEQ ID NO: 2474367 - RNA, 19 nt, Artificial Sequence
  Description of Artificial Sequence: Synthetic oligonucleotide
uguccuuauaacuccaguc

SEQ ID NO: 2474368 - RNA, 19 nt, Artificial Sequence
  Description of Artificial Sequence: Synthetic oligonucleotide
uauuagcaacauuuggugu

SEQ ID NO: 2474369 - RNA, 19 nt, Artificial Sequence
  Description of Artificial Sequence: Synthetic oligonucleotide
auguugaacuaacuaaaca

SEQ ID NO: 2474370 - RNA, 19 nt, Artificial Sequence
  Description of Artificial Sequence: Synthetic oligonucleotide
aauucuuucucagcaagaa

SEQ ID NO: 2474371 - RNA, 19 nt, Artificial Sequence
  Description of Artificial Sequence: Synthetic oligonucleotide
uagaauaccuuacaauauu

SEQ ID NO: 2474372 - RNA, 19 nt, Artificial Sequence
  Description of Artificial Sequence: Synthetic oligonucleotide
uaauucuuucucagcaaga

SEQ ID NO: 2474373 - RNA, 19 nt, Artificial Sequence
  Description of Artificial Sequence: Synthetic oligonucleotide
guaugcagaaacuaaucca

SEQ ID NO: 2474374 - RNA, 19 nt, Artificial Sequence
  Description of Artificial Sequence: Synthetic oligonucleotide
ugcagaaacuaauccaccu

SEQ ID NO: 2474375 - RNA, 19 nt, Artificial Sequence
  Description of Artificial Sequence: Synthetic oligonucleotide
agaccaacacacuucauaa

SEQ ID NO: 2474376 - RNA, 19 nt, Artificial Sequence
  Description of Artificial Sequence: Synthetic oligonucleotide
acaauugcuuauagaauac

SEQ ID NO: 2474377 - RNA, 19 nt, Artificial Sequence
  Description of Artificial Sequence: Synthetic oligonucleotide
acauuuaucgucauuagua

SEQ ID NO: 2474378 - RNA, 19 nt, Artificial Sequence
  Description of Artificial Sequence: Synthetic oligonucleotide
aauaaacccaaaacauuga

SEQ ID NO: 2474379 - RNA, 19 nt, Artificial Sequence
  Description of Artificial Sequence: Synthetic oligonucleotide
uggguauuuaagucaacac

SEQ ID NO: 2474380 - RNA, 19 nt, Artificial Sequence
  Description of Artificial Sequence: Synthetic oligonucleotide
uaggauuaacuccuugagu

SEQ ID NO: 2474381 - RNA, 19 nt, Artificial Sequence
  Description of Artificial Sequence: Synthetic oligonucleotide
acaucaugaugcuuuauau

SEQ ID NO: 2474382 - RNA, 19 nt, Artificial Sequence
  Description of Artificial Sequence: Synthetic oligonucleotide
aauuaaaguacagccuuaa

SEQ ID NO: 2474383 - RNA, 19 nt, Artificial Sequence
  Description of Artificial Sequence: Synthetic oligonucleotide
cauaauaucauuauucauu

SEQ ID NO: 2474384 - RNA, 19 nt, Artificial Sequence
  Description of Artificial Sequence: Synthetic oligonucleotide
ucaugaugcuuuauauaga

SEQ ID NO: 2474385 - RNA, 19 nt, Artificial Sequence
  Description of Artificial Sequence: Synthetic oligonucleotide
uuucaauuuugcacuuuga

SEQ ID NO: 2474386 - RNA, 19 nt, Artificial Sequence
  Description of Artificial Sequence: Synthetic oligonucleotide
aaaguacagccuuaagguu

SEQ ID NO: 2474387 - RNA, 19 nt, Artificial Sequence
  Description of Artificial Sequence: Synthetic oligonucleotide
ucacaauugcuuauagaau

SEQ ID NO: 2474388 - RNA, 19 nt, Artificial Sequence
  Description of Artificial Sequence: Synthetic oligonucleotide
ugacaaaucuugaggcagc

SEQ ID NO: 2474389 - RNA, 19 nt, Artificial Sequence
  Description of Artificial Sequence: Synthetic oligonucleotide
cauguugaacuaacuaaac

SEQ ID NO: 2474390 - RNA, 19 nt, Artificial Sequence
  Description of Artificial Sequence: Synthetic oligonucleotide
aaccagaagauuaauguuu

SEQ ID NO: 2474391 - RNA, 19 nt, Artificial Sequence
  Description of Artificial Sequence: Synthetic oligonucleotide
auucuugcuucacuggaug

SEQ ID NO: 2474392 - RNA, 19 nt, Artificial Sequence
  Description of Artificial Sequence: Synthetic oligonucleotide
ugucuguuauuucuuugac

SEQ ID NO: 2474393 - RNA, 19 nt, Artificial Sequence
  Description of Artificial Sequence: Synthetic oligonucleotide
aaaacaucaugaugcuuua

SEQ ID NO: 2474394 - RNA, 19 nt, Artificial Sequence
  Description of Artificial Sequence: Synthetic oligonucleotide
accaacacacuucauaaua

SEQ ID NO: 2474395 - RNA, 19 nt, Artificial Sequence
  Description of Artificial Sequence: Synthetic oligonucleotide
aaucuugaggcagcgccuc

SEQ ID NO: 2474396 - RNA, 19 nt, Artificial Sequence
  Description of Artificial Sequence: Synthetic oligonucleotide
uguucauguagacucugau

SEQ ID NO: 2474397 - RNA, 19 nt, Artificial Sequence
  Description of Artificial Sequence: Synthetic oligonucleotide
agccuuaagguuuucaauu

SEQ ID NO: 2474398 - RNA, 19 nt, Artificial Sequence
  Description of Artificial Sequence: Synthetic oligonucleotide
cacaauugcuuauagaaua

SEQ ID NO: 2474399 - RNA, 19 nt, Artificial Sequence
  Description of Artificial Sequence: Synthetic oligonucleotide
gauagcaauuacuccaaaa

SEQ ID NO: 2474400 - RNA, 19 nt, Artificial Sequence
  Description of Artificial Sequence: Synthetic oligonucleotide
aacauuugguguguuuucu

SEQ ID NO: 2474401 - RNA, 19 nt, Artificial Sequence
  Description of Artificial Sequence: Synthetic oligonucleotide
gauucaguaucacaaauuu

SEQ ID NO: 2474402 - RNA, 19 nt, Artificial Sequence
  Description of Artificial Sequence: Synthetic oligonucleotide
acauuuggauuucacaauu

SEQ ID NO: 2474403 - RNA, 19 nt, Artificial Sequence
  Description of Artificial Sequence: Synthetic oligonucleotide
uuuggguucccagagcgca

SEQ ID NO: 2474404 - RNA, 19 nt, Artificial Sequence
  Description of Artificial Sequence: Synthetic oligonucleotide
uacuacaaauguuuacaaa

SEQ ID NO: 2474405 - RNA, 19 nt, Artificial Sequence
  Description of Artificial Sequence: Synthetic oligonucleotide
cuuauagaauaccuuacaa

SEQ ID NO: 2474406 - RNA, 19 nt, Artificial Sequence
  Description of Artificial Sequence: Synthetic oligonucleotide
ucaguaucacaaauuuaau

SEQ ID NO: 2474407 - RNA, 19 nt, Artificial Sequence
  Description of Artificial Sequence: Synthetic oligonucleotide
acccaaaacauugaauuca

SEQ ID NO: 2474408 - RNA, 19 nt, Artificial Sequence
  Description of Artificial Sequence: Synthetic oligonucleotide
cagaaccagaagauuaaug

SEQ ID NO: 2474409 - RNA, 19 nt, Artificial Sequence
  Description of Artificial Sequence: Synthetic oligonucleotide
cuugucuguuauuucuuug

SEQ ID NO: 2474410 - RNA, 19 nt, Artificial Sequence
  Description of Artificial Sequence: Synthetic oligonucleotide
gacaaaucuugaggcagcg

SEQ ID NO: 2474411 - RNA, 19 nt, Artificial Sequence
  Description of Artificial Sequence: Synthetic oligonucleotide
uccuuauaacuccagucua

SEQ ID NO: 2474412 - RNA, 19 nt, Artificial Sequence
  Description of Artificial Sequence: Synthetic oligonucleotide
aagaacaacuuuaauucuu

SEQ ID NO: 2474413 - RNA, 19 nt, Artificial Sequence
  Description of Artificial Sequence: Synthetic oligonucleotide
aaucaaugaagaacaacuu

SEQ ID NO: 2474414 - RNA, 19 nt, Artificial Sequence
  Description of Artificial Sequence: Synthetic oligonucleotide
uucacuggaugcuccuuag

SEQ ID NO: 2474415 - RNA, 19 nt, Artificial Sequence
  Description of Artificial Sequence: Synthetic oligonucleotide
auuuaucgucauuaguaaa

SEQ ID NO: 2474416 - RNA, 19 nt, Artificial Sequence
  Description of Artificial Sequence: Synthetic oligonucleotide
uucuguuuggguucccaga

SEQ ID NO: 2474417 - RNA, 19 nt, Artificial Sequence
  Description of Artificial Sequence: Synthetic oligonucleotide
cauuuggauuucacaauug

SEQ ID NO: 2474418 - RNA, 19 nt, Artificial Sequence
  Description of Artificial Sequence: Synthetic oligonucleotide
acuucauaauaucauuauu

SEQ ID NO: 2474419 - RNA, 19 nt, Artificial Sequence
  Description of Artificial Sequence: Synthetic oligonucleotide
cuacagaccaacacacuuc

SEQ ID NO: 2474420 - RNA, 19 nt, Artificial Sequence
  Description of Artificial Sequence: Synthetic oligonucleotide
auuaacuccuugaguugcc

SEQ ID NO: 2474421 - RNA, 19 nt, Artificial Sequence
  Description of Artificial Sequence: Synthetic oligonucleotide
ggguauuuaagucaacaca

SEQ ID NO: 2474422 - RNA, 19 nt, Artificial Sequence
  Description of Artificial Sequence: Synthetic oligonucleotide
aaguacagccuuaagguuu

SEQ ID NO: 2474423 - RNA, 19 nt, Artificial Sequence
  Description of Artificial Sequence: Synthetic oligonucleotide
aaaacaaaguggguauuua

SEQ ID NO: 2474424 - RNA, 19 nt, Artificial Sequence
  Description of Artificial Sequence: Synthetic oligonucleotide
uuugguguguuuucuguuu

SEQ ID NO: 2474425 - RNA, 19 nt, Artificial Sequence
  Description of Artificial Sequence: Synthetic oligonucleotide
auuauucauuuaaaguacu

SEQ ID NO: 2474426 - RNA, 19 nt, Artificial Sequence
  Description of Artificial Sequence: Synthetic oligonucleotide
ucauguagacucugauucu

SEQ ID NO: 2474427 - RNA, 19 nt, Artificial Sequence
  Description of Artificial Sequence: Synthetic oligonucleotide
aacuaccuauuuuguaaaa

SEQ ID NO: 2474428 - RNA, 19 nt, Artificial Sequence
  Description of Artificial Sequence: Synthetic oligonucleotide
acagaaacauguugaacua

SEQ ID NO: 2474429 - RNA, 19 nt, Artificial Sequence
  Description of Artificial Sequence: Synthetic oligonucleotide
acagccuuaagguuuucaa

SEQ ID NO: 2474430 - RNA, 19 nt, Artificial Sequence
  Description of Artificial Sequence: Synthetic oligonucleotide
cucugauucuuuccaauuc

SEQ ID NO: 2474431 - RNA, 19 nt, Artificial Sequence
  Description of Artificial Sequence: Synthetic oligonucleotide
augcagaaacuaauccacc

SEQ ID NO: 2474432 - RNA, 19 nt, Artificial Sequence
  Description of Artificial Sequence: Synthetic oligonucleotide
cauuuaucgucauuaguaa

SEQ ID NO: 2474433 - RNA, 19 nt, Artificial Sequence
  Description of Artificial Sequence: Synthetic oligonucleotide
auaccuuacaauauuuaaa

SEQ ID NO: 2474434 - RNA, 19 nt, Artificial Sequence
  Description of Artificial Sequence: Synthetic oligonucleotide
aucacagaaacauguugaa

SEQ ID NO: 2474435 - RNA, 19 nt, Artificial Sequence
  Description of Artificial Sequence: Synthetic oligonucleotide
caucagaaccagaagauua

SEQ ID NO: 2474436 - RNA, 19 nt, Artificial Sequence
  Description of Artificial Sequence: Synthetic oligonucleotide
auuuauacaugaauucaaa

SEQ ID NO: 2474437 - RNA, 19 nt, Artificial Sequence
  Description of Artificial Sequence: Synthetic oligonucleotide
caacuuuaauucuuucuca

SEQ ID NO: 2474438 - RNA, 19 nt, Artificial Sequence
  Description of Artificial Sequence: Synthetic oligonucleotide
ucuuuccaauucuugcuuc

SEQ ID NO: 2474439 - RNA, 19 nt, Artificial Sequence
  Description of Artificial Sequence: Synthetic oligonucleotide
caacacacuucauaauauc

SEQ ID NO: 2474440 - RNA, 19 nt, Artificial Sequence
  Description of Artificial Sequence: Synthetic oligonucleotide
acauguugaacuaacuaaa

SEQ ID NO: 2474441 - RNA, 19 nt, Artificial Sequence
  Description of Artificial Sequence: Synthetic oligonucleotide
aaaaucacagaaacauguu

SEQ ID NO: 2474442 - RNA, 19 nt, Artificial Sequence
  Description of Artificial Sequence: Synthetic oligonucleotide
auagaauaccuuacaauau

SEQ ID NO: 2474443 - RNA, 19 nt, Artificial Sequence
  Description of Artificial Sequence: Synthetic oligonucleotide
uucuuugacucuguucaug

SEQ ID NO: 2474444 - RNA, 19 nt, Artificial Sequence
  Description of Artificial Sequence: Synthetic oligonucleotide
aaaguacuacaaauguuua

SEQ ID NO: 2474445 - RNA, 19 nt, Artificial Sequence
  Description of Artificial Sequence: Synthetic oligonucleotide
uccuugaguugccaaaaua

SEQ ID NO: 2474446 - RNA, 19 nt, Artificial Sequence
  Description of Artificial Sequence: Synthetic oligonucleotide
augaagaauuaaaguacag

SEQ ID NO: 2474447 - RNA, 19 nt, Artificial Sequence
  Description of Artificial Sequence: Synthetic oligonucleotide
auucaauguguaugcagaa

SEQ ID NO: 2474448 - RNA, 19 nt, Artificial Sequence
  Description of Artificial Sequence: Synthetic oligonucleotide
uuagcaacauuuggugugu

SEQ ID NO: 2474449 - RNA, 19 nt, Artificial Sequence
  Description of Artificial Sequence: Synthetic oligonucleotide
aagauagcaauuacuccaa

SEQ ID NO: 2474450 - RNA, 19 nt, Artificial Sequence
  Description of Artificial Sequence: Synthetic oligonucleotide
auguacaucagaaccagaa

SEQ ID NO: 2474451 - RNA, 19 nt, Artificial Sequence
  Description of Artificial Sequence: Synthetic oligonucleotide
cuugaguugccaaaauaaa

SEQ ID NO: 2474452 - RNA, 19 nt, Artificial Sequence
  Description of Artificial Sequence: Synthetic oligonucleotide
gaagaacaacuuuaauucu

SEQ ID NO: 2474453 - RNA, 19 nt, Artificial Sequence
  Description of Artificial Sequence: Synthetic oligonucleotide
acaaaucuugaggcagcgc

SEQ ID NO: 2474454 - RNA, 19 nt, Artificial Sequence
  Description of Artificial Sequence: Synthetic oligonucleotide
cuugcauugccacacaacu

SEQ ID NO: 2474455 - RNA, 19 nt, Artificial Sequence
  Description of Artificial Sequence: Synthetic oligonucleotide
gucaacacauuuaucguca

SEQ ID NO: 2474456 - RNA, 19 nt, Artificial Sequence
  Description of Artificial Sequence: Synthetic oligonucleotide
ugaauucaauguguaugca

SEQ ID NO: 2474457 - RNA, 19 nt, Artificial Sequence
  Description of Artificial Sequence: Synthetic oligonucleotide
uuuccuuuauuagcaacau

SEQ ID NO: 2474458 - RNA, 19 nt, Artificial Sequence
  Description of Artificial Sequence: Synthetic oligonucleotide
auaucauuauucauuuaaa

SEQ ID NO: 2474459 - RNA, 19 nt, Artificial Sequence
  Description of Artificial Sequence: Synthetic oligonucleotide
aaguggguauuuaagucaa

SEQ ID NO: 2474460 - RNA, 19 nt, Artificial Sequence
  Description of Artificial Sequence: Synthetic oligonucleotide
caaugaagaacaacuuuaa

SEQ ID NO: 2474461 - RNA, 19 nt, Artificial Sequence
  Description of Artificial Sequence: Synthetic oligonucleotide
auguccuuauaacuccagu

SEQ ID NO: 2474462 - RNA, 19 nt, Artificial Sequence
  Description of Artificial Sequence: Synthetic oligonucleotide
uugccacacaacuaccuau

SEQ ID NO: 2474463 - RNA, 19 nt, Artificial Sequence
  Description of Artificial Sequence: Synthetic oligonucleotide
uccagucuacagaccaaca

SEQ ID NO: 2474464 - RNA, 19 nt, Artificial Sequence
  Description of Artificial Sequence: Synthetic oligonucleotide
acuaccuauuuuguaaaau

SEQ ID NO: 2474465 - RNA, 19 nt, Artificial Sequence
  Description of Artificial Sequence: Synthetic oligonucleotide
gauguccuuauaacuccag

SEQ ID NO: 2474466 - RNA, 19 nt, Artificial Sequence
  Description of Artificial Sequence: Synthetic oligonucleotide
guacuacaaauguuuacaa

SEQ ID NO: 2474467 - RNA, 19 nt, Artificial Sequence
  Description of Artificial Sequence: Synthetic oligonucleotide
agaaacuaauccaccuuug

SEQ ID NO: 2474468 - RNA, 19 nt, Artificial Sequence
  Description of Artificial Sequence: Synthetic oligonucleotide
uucaauguguaugcagaaa

SEQ ID NO: 2474469 - RNA, 19 nt, Artificial Sequence
  Description of Artificial Sequence: Synthetic oligonucleotide
caauucuugcuucacugga

SEQ ID NO: 2474470 - RNA, 19 nt, Artificial Sequence
  Description of Artificial Sequence: Synthetic oligonucleotide
guccuuauaacuccagucu

SEQ ID NO: 2474471 - RNA, 19 nt, Artificial Sequence
  Description of Artificial Sequence: Synthetic oligonucleotide
ucuguucauguagacucug

SEQ ID NO: 2474472 - RNA, 19 nt, Artificial Sequence
  Description of Artificial Sequence: Synthetic oligonucleotide
cuaauccaccuuugcuugc

SEQ ID NO: 2474473 - RNA, 19 nt, Artificial Sequence
  Description of Artificial Sequence: Synthetic oligonucleotide
auugcuuauagaauaccuu

SEQ ID NO: 2474474 - RNA, 19 nt, Artificial Sequence
  Description of Artificial Sequence: Synthetic oligonucleotide
ggauuaacuccuugaguug

SEQ ID NO: 2474475 - RNA, 19 nt, Artificial Sequence
  Description of Artificial Sequence: Synthetic oligonucleotide
acucugauucuuuccaauu

SEQ ID NO: 2474476 - RNA, 19 nt, Artificial Sequence
  Description of Artificial Sequence: Synthetic oligonucleotide
auugccacacaacuaccua

SEQ ID NO: 2474477 - RNA, 19 nt, Artificial Sequence
  Description of Artificial Sequence: Synthetic oligonucleotide
uuaacuccuugaguugcca

SEQ ID NO: 2474478 - RNA, 19 nt, Artificial Sequence
  Description of Artificial Sequence: Synthetic oligonucleotide
uaacuccagucuacagacc

SEQ ID NO: 2474479 - RNA, 19 nt, Artificial Sequence
  Description of Artificial Sequence: Synthetic oligonucleotide
ccuuuauuagcaacauuug

SEQ ID NO: 2474480 - RNA, 19 nt, Artificial Sequence
  Description of Artificial Sequence: Synthetic oligonucleotide
cuuauaacuccagucuaca

SEQ ID NO: 2474481 - RNA, 19 nt, Artificial Sequence
  Description of Artificial Sequence: Synthetic oligonucleotide
aguugccaaaauaaaccca

SEQ ID NO: 2474482 - RNA, 19 nt, Artificial Sequence
  Description of Artificial Sequence: Synthetic oligonucleotide
uugcauugccacacaacua

SEQ ID NO: 2474483 - RNA, 19 nt, Artificial Sequence
  Description of Artificial Sequence: Synthetic oligonucleotide
uuaaaacaucaugaugcuu

SEQ ID NO: 2474484 - RNA, 19 nt, Artificial Sequence
  Description of Artificial Sequence: Synthetic oligonucleotide
gcuuauagaauaccuuaca

SEQ ID NO: 2474485 - RNA, 19 nt, Artificial Sequence
  Description of Artificial Sequence: Synthetic oligonucleotide
agaauaccuuacaauauuu

SEQ ID NO: 2474486 - RNA, 19 nt, Artificial Sequence
  Description of Artificial Sequence: Synthetic oligonucleotide
gguauuuaagucaacacau

SEQ ID NO: 2474487 - RNA, 19 nt, Artificial Sequence
  Description of Artificial Sequence: Synthetic oligonucleotide
ugacucuguucauguagac

SEQ ID NO: 2474488 - RNA, 19 nt, Artificial Sequence
  Description of Artificial Sequence: Synthetic oligonucleotide
ccaauucuugcuucacugg

SEQ ID NO: 2474489 - RNA, 19 nt, Artificial Sequence
  Description of Artificial Sequence: Synthetic oligonucleotide
aucacaaauuuaaugugua

SEQ ID NO: 2474490 - RNA, 19 nt, Artificial Sequence
  Description of Artificial Sequence: Synthetic oligonucleotide
agaacaacuuuaauucuuu

SEQ ID NO: 2474491 - RNA, 19 nt, Artificial Sequence
  Description of Artificial Sequence: Synthetic oligonucleotide
gguguguuuucuguuuggg

SEQ ID NO: 2474492 - RNA, 19 nt, Artificial Sequence
  Description of Artificial Sequence: Synthetic oligonucleotide
agauucaguaucacaaauu

SEQ ID NO: 2474493 - RNA, 19 nt, Artificial Sequence
  Description of Artificial Sequence: Synthetic oligonucleotide
auuuuaaauggaacaugaa

SEQ ID NO: 2474494 - RNA, 19 nt, Artificial Sequence
  Description of Artificial Sequence: Synthetic oligonucleotide
cuccuuaggauuaacuccu

SEQ ID NO: 2474495 - RNA, 19 nt, Artificial Sequence
  Description of Artificial Sequence: Synthetic oligonucleotide
acacuucauaauaucauua

SEQ ID NO: 2474496 - RNA, 19 nt, Artificial Sequence
  Description of Artificial Sequence: Synthetic oligonucleotide
gaggcagcgccucugucca

SEQ ID NO: 2474497 - RNA, 19 nt, Artificial Sequence
  Description of Artificial Sequence: Synthetic oligonucleotide
ccuuauaacuccagucuac

SEQ ID NO: 2474498 - RNA, 19 nt, Artificial Sequence
  Description of Artificial Sequence: Synthetic oligonucleotide
ucaacacauuuaucgucau

SEQ ID NO: 2474499 - RNA, 19 nt, Artificial Sequence
  Description of Artificial Sequence: Synthetic oligonucleotide
gaaccagaagauuaauguu

SEQ ID NO: 2474500 - RNA, 19 nt, Artificial Sequence
  Description of Artificial Sequence: Synthetic oligonucleotide
aucagaaccagaagauuaa

SEQ ID NO: 2474501 - RNA, 19 nt, Artificial Sequence
  Description of Artificial Sequence: Synthetic oligonucleotide
caucaugaugcuuuauaua

SEQ ID NO: 2474502 - RNA, 19 nt, Artificial Sequence
  Description of Artificial Sequence: Synthetic oligonucleotide
uuccuuuauuagcaacauu

SEQ ID NO: 2474503 - RNA, 19 nt, Artificial Sequence
  Description of Artificial Sequence: Synthetic oligonucleotide
caacuaccuauuuuguaaa

SEQ ID NO: 2474504 - RNA, 19 nt, Artificial Sequence
  Description of Artificial Sequence: Synthetic oligonucleotide
ucagaaccagaagauuaau

SEQ ID NO: 2474505 - RNA, 19 nt, Artificial Sequence
  Description of Artificial Sequence: Synthetic oligonucleotide
cagaccaacacacuucaua

SEQ ID NO: 2474506 - RNA, 19 nt, Artificial Sequence
  Description of Artificial Sequence: Synthetic oligonucleotide
gaauuaaaguacagccuua

SEQ ID NO: 2474507 - RNA, 19 nt, Artificial Sequence
  Description of Artificial Sequence: Synthetic oligonucleotide
agacucugauucuuuccaa

SEQ ID NO: 2474508 - RNA, 19 nt, Artificial Sequence
  Description of Artificial Sequence: Synthetic oligonucleotide
cacuuugaauaucaagaua

SEQ ID NO: 2474509 - RNA, 19 nt, Artificial Sequence
  Description of Artificial Sequence: Synthetic oligonucleotide
agcaacauuugguguguuu

SEQ ID NO: 2474510 - RNA, 19 nt, Artificial Sequence
  Description of Artificial Sequence: Synthetic oligonucleotide
cauuugguguguuuucugu

SEQ ID NO: 2474511 - RNA, 19 nt, Artificial Sequence
  Description of Artificial Sequence: Synthetic oligonucleotide
agauagcaauuacuccaaa

SEQ ID NO: 2474512 - RNA, 19 nt, Artificial Sequence
  Description of Artificial Sequence: Synthetic oligonucleotide
acacaacuaccuauuuugu

SEQ ID NO: 2474513 - RNA, 19 nt, Artificial Sequence
  Description of Artificial Sequence: Synthetic oligonucleotide
aguggguauuuaagucaac

SEQ ID NO: 2474514 - RNA, 19 nt, Artificial Sequence
  Description of Artificial Sequence: Synthetic oligonucleotide
gucuguuauuucuuugacu

SEQ ID NO: 2474515 - RNA, 19 nt, Artificial Sequence
  Description of Artificial Sequence: Synthetic oligonucleotide
ccagucuacagaccaacac

SEQ ID NO: 2474516 - RNA, 19 nt, Artificial Sequence
  Description of Artificial Sequence: Synthetic oligonucleotide
caauguguaugcagaaacu

SEQ ID NO: 2474517 - RNA, 19 nt, Artificial Sequence
  Description of Artificial Sequence: Synthetic oligonucleotide
auucaguaucacaaauuua

SEQ ID NO: 2474518 - RNA, 19 nt, Artificial Sequence
  Description of Artificial Sequence: Synthetic oligonucleotide
cacaacuaccuauuuugua

SEQ ID NO: 2474519 - RNA, 19 nt, Artificial Sequence
  Description of Artificial Sequence: Synthetic oligonucleotide
acuccuugaguugccaaaa

SEQ ID NO: 2474520 - RNA, 19 nt, Artificial Sequence
  Description of Artificial Sequence: Synthetic oligonucleotide
gaugcuccuuaggauuaac

SEQ ID NO: 2474521 - RNA, 19 nt, Artificial Sequence
  Description of Artificial Sequence: Synthetic oligonucleotide
agauguccuuauaacucca

SEQ ID NO: 2474522 - RNA, 19 nt, Artificial Sequence
  Description of Artificial Sequence: Synthetic oligonucleotide
gacucugauucuuuccaau

SEQ ID NO: 2474523 - RNA, 19 nt, Artificial Sequence
  Description of Artificial Sequence: Synthetic oligonucleotide
cacauuuaucgucauuagu

SEQ ID NO: 2474524 - RNA, 19 nt, Artificial Sequence
  Description of Artificial Sequence: Synthetic oligonucleotide
guucauguagacucugauu

SEQ ID NO: 2474525 - RNA, 19 nt, Artificial Sequence
  Description of Artificial Sequence: Synthetic oligonucleotide
augcuccuuaggauuaacu

SEQ ID NO: 2474526 - RNA, 19 nt, Artificial Sequence
  Description of Artificial Sequence: Synthetic oligonucleotide
cauugccacacaacuaccu

SEQ ID NO: 2474527 - RNA, 19 nt, Artificial Sequence
  Description of Artificial Sequence: Synthetic oligonucleotide
auggaacaugaagaauuaa

SEQ ID NO: 2474528 - RNA, 19 nt, Artificial Sequence
  Description of Artificial Sequence: Synthetic oligonucleotide
cauugaauucaauguguau

SEQ ID NO: 2474529 - RNA, 19 nt, Artificial Sequence
  Description of Artificial Sequence: Synthetic oligonucleotide
guuuggguucccagagcgc

SEQ ID NO: 2474530 - RNA, 19 nt, Artificial Sequence
  Description of Artificial Sequence: Synthetic oligonucleotide
cagaaacuaauccaccuuu

SEQ ID NO: 2474531 - RNA, 19 nt, Artificial Sequence
  Description of Artificial Sequence: Synthetic oligonucleotide
gacucuguucauguagacu

SEQ ID NO: 2474532 - RNA, 19 nt, Artificial Sequence
  Description of Artificial Sequence: Synthetic oligonucleotide
cacacuucauaauaucauu

SEQ ID NO: 2474533 - RNA, 19 nt, Artificial Sequence
  Description of Artificial Sequence: Synthetic oligonucleotide
uuggguucccagagcgcau

SEQ ID NO: 2474534 - RNA, 19 nt, Artificial Sequence
  Description of Artificial Sequence: Synthetic oligonucleotide
guguguuuucuguuugggu

SEQ ID NO: 2474535 - RNA, 19 nt, Artificial Sequence
  Description of Artificial Sequence: Synthetic oligonucleotide
uugaggcagcgccucuguc

SEQ ID NO: 2474536 - RNA, 19 nt, Artificial Sequence
  Description of Artificial Sequence: Synthetic oligonucleotide
cuucacuggaugcuccuua

SEQ ID NO: 2474537 - RNA, 19 nt, Artificial Sequence
  Description of Artificial Sequence: Synthetic oligonucleotide
aucuugaggcagcgccucu

SEQ ID NO: 2474538 - RNA, 19 nt, Artificial Sequence
  Description of Artificial Sequence: Synthetic oligonucleotide
ccuuaggauuaacuccuug

SEQ ID NO: 2474539 - RNA, 19 nt, Artificial Sequence
  Description of Artificial Sequence: Synthetic oligonucleotide
gaccaacacacuucauaau

SEQ ID NO: 2474540 - RNA, 19 nt, Artificial Sequence
  Description of Artificial Sequence: Synthetic oligonucleotide
cuuugacucuguucaugua

SEQ ID NO: 2474541 - RNA, 19 nt, Artificial Sequence
  Description of Artificial Sequence: Synthetic oligonucleotide
cagccuuaagguuuucaau

SEQ ID NO: 2474542 - RNA, 19 nt, Artificial Sequence
  Description of Artificial Sequence: Synthetic oligonucleotide
cucuguucauguagacucu

SEQ ID NO: 2474543 - RNA, 19 nt, Artificial Sequence
  Description of Artificial Sequence: Synthetic oligonucleotide
gccucuguccagcuuggca

SEQ ID NO: 2474544 - RNA, 19 nt, Artificial Sequence
  Description of Artificial Sequence: Synthetic oligonucleotide
uggguucccagagcgcauu

SEQ ID NO: 2474545 - RNA, 19 nt, Artificial Sequence
  Description of Artificial Sequence: Synthetic oligonucleotide
acuccagucuacagaccaa

SEQ ID NO: 2474546 - RNA, 19 nt, Artificial Sequence
  Description of Artificial Sequence: Synthetic oligonucleotide
gcagaaacuaauccaccuu

SEQ ID NO: 2474547 - RNA, 19 nt, Artificial Sequence
  Description of Artificial Sequence: Synthetic oligonucleotide
ccaacacacuucauaauau

SEQ ID NO: 2474548 - RNA, 19 nt, Artificial Sequence
  Description of Artificial Sequence: Synthetic oligonucleotide
gccuuaagguuuucaauuu

SEQ ID NO: 2474549 - RNA, 19 nt, Artificial Sequence
  Description of Artificial Sequence: Synthetic oligonucleotide
uagcaacauuugguguguu

SEQ ID NO: 2474550 - RNA, 19 nt, Artificial Sequence
  Description of Artificial Sequence: Synthetic oligonucleotide
gucuacagaccaacacacu

SEQ ID NO: 2474551 - RNA, 19 nt, Artificial Sequence
  Description of Artificial Sequence: Synthetic oligonucleotide
aggcagcgccucuguccag

SEQ ID NO: 2474552 - RNA, 19 nt, Artificial Sequence
  Description of Artificial Sequence: Synthetic oligonucleotide
acagaccaacacacuucau

SEQ ID NO: 2474553 - RNA, 19 nt, Artificial Sequence
  Description of Artificial Sequence: Synthetic oligonucleotide
caacacauuuaucgucauu

SEQ ID NO: 2474554 - RNA, 19 nt, Artificial Sequence
  Description of Artificial Sequence: Synthetic oligonucleotide
cuccuugaguugccaaaau

SEQ ID NO: 2474555 - RNA, 19 nt, Artificial Sequence
  Description of Artificial Sequence: Synthetic oligonucleotide
gcgccucuguccagcuugg

SEQ ID NO: 2474556 - RNA, 19 nt, Artificial Sequence
  Description of Artificial Sequence: Synthetic oligonucleotide
guacagccuuaagguuuuc

SEQ ID NO: 2474557 - RNA, 19 nt, Artificial Sequence
  Description of Artificial Sequence: Synthetic oligonucleotide
ggaugcuccuuaggauuaa

SEQ ID NO: 2474558 - RNA, 19 nt, Artificial Sequence
  Description of Artificial Sequence: Synthetic oligonucleotide
ccaaaacauugaauucaau

SEQ ID NO: 2474559 - RNA, 19 nt, Artificial Sequence
  Description of Artificial Sequence: Synthetic oligonucleotide
ccacacaacuaccuauuuu

SEQ ID NO: 2474560 - RNA, 19 nt, Artificial Sequence
  Description of Artificial Sequence: Synthetic oligonucleotide
gccacacaacuaccuauuu

SEQ ID NO: 2474561 - RNA, 19 nt, Artificial Sequence
  Description of Artificial Sequence: Synthetic oligonucleotide
gcagcgccucuguccagcu

SEQ ID NO: 2474562 - RNA, 19 nt, Artificial Sequence
  Description of Artificial Sequence: Synthetic oligonucleotide
gguucccagagcgcauuuu

SEQ ID NO: 2474563 - RNA, 19 nt, Artificial Sequence
  Description of Artificial Sequence: Synthetic oligonucleotide
ggguucccagagcgcauuu

SEQ ID NO: 2474564 - RNA, 19 nt, Artificial Sequence
  Description of Artificial Sequence: Synthetic oligonucleotide
cgccucuguccagcuuggc

SEQ ID NO: 2474565 - RNA, 19 nt, Artificial Sequence
  Description of Artificial Sequence: Synthetic oligonucleotide
agaaauuucauguaggucg

SEQ ID NO: 2474566 - RNA, 19 nt, Artificial Sequence
  Description of Artificial Sequence: Synthetic oligonucleotide
aauauugauuauuaggcac

SEQ ID NO: 2474567 - RNA, 19 nt, Artificial Sequence
  Description of Artificial Sequence: Synthetic oligonucleotide
aaaagaaguauacauaucu

SEQ ID NO: 2474568 - RNA, 19 nt, Artificial Sequence
  Description of Artificial Sequence: Synthetic oligonucleotide
aauuguuuggcacaugguc

SEQ ID NO: 2474569 - RNA, 19 nt, Artificial Sequence
  Description of Artificial Sequence: Synthetic oligonucleotide
aagaucaauaaacagacca

SEQ ID NO: 2474570 - RNA, 19 nt, Artificial Sequence
  Description of Artificial Sequence: Synthetic oligonucleotide
gaaauauugauuauuaggc

SEQ ID NO: 2474571 - RNA, 19 nt, Artificial Sequence
  Description of Artificial Sequence: Synthetic oligonucleotide
aggauuuuagauuuagugc

SEQ ID NO: 2474572 - RNA, 19 nt, Artificial Sequence
  Description of Artificial Sequence: Synthetic oligonucleotide
uuaucaguaauacuuaagc

SEQ ID NO: 2474573 - RNA, 19 nt, Artificial Sequence
  Description of Artificial Sequence: Synthetic oligonucleotide
aauacuuaagcagccaccc

SEQ ID NO: 2474574 - RNA, 19 nt, Artificial Sequence
  Description of Artificial Sequence: Synthetic oligonucleotide
aauaaacagaccaagucac

SEQ ID NO: 2474575 - RNA, 19 nt, Artificial Sequence
  Description of Artificial Sequence: Synthetic oligonucleotide
auaucugagauauaucugg

SEQ ID NO: 2474576 - RNA, 19 nt, Artificial Sequence
  Description of Artificial Sequence: Synthetic oligonucleotide
aaguauacauaucugagga

SEQ ID NO: 2474577 - RNA, 19 nt, Artificial Sequence
  Description of Artificial Sequence: Synthetic oligonucleotide
ucaaagaaauuucauguag

SEQ ID NO: 2474578 - RNA, 19 nt, Artificial Sequence
  Description of Artificial Sequence: Synthetic oligonucleotide
uaauaucugagauauaucu

SEQ ID NO: 2474579 - RNA, 19 nt, Artificial Sequence
  Description of Artificial Sequence: Synthetic oligonucleotide
aagauuuauacaauauccc

SEQ ID NO: 2474580 - RNA, 19 nt, Artificial Sequence
  Description of Artificial Sequence: Synthetic oligonucleotide
agugccuucaguuuucugc

SEQ ID NO: 2474581 - RNA, 19 nt, Artificial Sequence
  Description of Artificial Sequence: Synthetic oligonucleotide
agaaugaucuguuauuagg

SEQ ID NO: 2474582 - RNA, 19 nt, Artificial Sequence
  Description of Artificial Sequence: Synthetic oligonucleotide
aacaagugcaaccacacca

SEQ ID NO: 2474583 - RNA, 19 nt, Artificial Sequence
  Description of Artificial Sequence: Synthetic oligonucleotide
gaagcuacagcuuuuauuc

SEQ ID NO: 2474584 - RNA, 19 nt, Artificial Sequence
  Description of Artificial Sequence: Synthetic oligonucleotide
gaggauuuuagauuuagug

SEQ ID NO: 2474585 - RNA, 19 nt, Artificial Sequence
  Description of Artificial Sequence: Synthetic oligonucleotide
uauuuaauaucugagauau

SEQ ID NO: 2474586 - RNA, 19 nt, Artificial Sequence
  Description of Artificial Sequence: Synthetic oligonucleotide
auuggaaucuguuauccgg

SEQ ID NO: 2474587 - RNA, 19 nt, Artificial Sequence
  Description of Artificial Sequence: Synthetic oligonucleotide
aguaaagaucaauaaacag

SEQ ID NO: 2474588 - RNA, 19 nt, Artificial Sequence
  Description of Artificial Sequence: Synthetic oligonucleotide
uaagcagccacccagguca

SEQ ID NO: 2474589 - RNA, 19 nt, Artificial Sequence
  Description of Artificial Sequence: Synthetic oligonucleotide
aaugaucuuuagcagcugg

SEQ ID NO: 2474590 - RNA, 19 nt, Artificial Sequence
  Description of Artificial Sequence: Synthetic oligonucleotide
uuuaauaucugagauauau

SEQ ID NO: 2474591 - RNA, 19 nt, Artificial Sequence
  Description of Artificial Sequence: Synthetic oligonucleotide
ucagccucaguaaagauca

SEQ ID NO: 2474592 - RNA, 19 nt, Artificial Sequence
  Description of Artificial Sequence: Synthetic oligonucleotide
uauacaauaucccauguua

SEQ ID NO: 2474593 - RNA, 19 nt, Artificial Sequence
  Description of Artificial Sequence: Synthetic oligonucleotide
uaacaccucauuuauauug

SEQ ID NO: 2474594 - RNA, 19 nt, Artificial Sequence
  Description of Artificial Sequence: Synthetic oligonucleotide
aaauauugauuauuaggca

SEQ ID NO: 2474595 - RNA, 19 nt, Artificial Sequence
  Description of Artificial Sequence: Synthetic oligonucleotide
acuuguuuaaguuuucuug

SEQ ID NO: 2474596 - RNA, 19 nt, Artificial Sequence
  Description of Artificial Sequence: Synthetic oligonucleotide
uguuaaucuccucuaauug

SEQ ID NO: 2474597 - RNA, 19 nt, Artificial Sequence
  Description of Artificial Sequence: Synthetic oligonucleotide
uuuccuaaugccuguaagg

SEQ ID NO: 2474598 - RNA, 19 nt, Artificial Sequence
  Description of Artificial Sequence: Synthetic oligonucleotide
auuauuaggcaccgaagac

SEQ ID NO: 2474599 - RNA, 19 nt, Artificial Sequence
  Description of Artificial Sequence: Synthetic oligonucleotide
ucaauaaacagaccaaguc

SEQ ID NO: 2474600 - RNA, 19 nt, Artificial Sequence
  Description of Artificial Sequence: Synthetic oligonucleotide
cuaauuguuuggcacaugg

SEQ ID NO: 2474601 - RNA, 19 nt, Artificial Sequence
  Description of Artificial Sequence: Synthetic oligonucleotide
aaggacuuaucaguaauac

SEQ ID NO: 2474602 - RNA, 19 nt, Artificial Sequence
  Description of Artificial Sequence: Synthetic oligonucleotide
ggauuuuagauuuagugcc

SEQ ID NO: 2474603 - RNA, 19 nt, Artificial Sequence
  Description of Artificial Sequence: Synthetic oligonucleotide
uucuugauccuacuaauug

SEQ ID NO: 2474604 - RNA, 19 nt, Artificial Sequence
  Description of Artificial Sequence: Synthetic oligonucleotide
uguaacaccucauuuauau

SEQ ID NO: 2474605 - RNA, 19 nt, Artificial Sequence
  Description of Artificial Sequence: Synthetic oligonucleotide
uguuaugcuauuucuaugu

SEQ ID NO: 2474606 - RNA, 19 nt, Artificial Sequence
  Description of Artificial Sequence: Synthetic oligonucleotide
auauuggaaucuguuaucc

SEQ ID NO: 2474607 - RNA, 19 nt, Artificial Sequence
  Description of Artificial Sequence: Synthetic oligonucleotide
auuucauguaggucggagc

SEQ ID NO: 2474608 - RNA, 19 nt, Artificial Sequence
  Description of Artificial Sequence: Synthetic oligonucleotide
auauugauuauuaggcacc

SEQ ID NO: 2474609 - RNA, 19 nt, Artificial Sequence
  Description of Artificial Sequence: Synthetic oligonucleotide
agauuuauacaauauccca

SEQ ID NO: 2474610 - RNA, 19 nt, Artificial Sequence
  Description of Artificial Sequence: Synthetic oligonucleotide
uuucauguaggucggagca

SEQ ID NO: 2474611 - RNA, 19 nt, Artificial Sequence
  Description of Artificial Sequence: Synthetic oligonucleotide
auuguuuggcacauggucc

SEQ ID NO: 2474612 - RNA, 19 nt, Artificial Sequence
  Description of Artificial Sequence: Synthetic oligonucleotide
uacuuaagcagccacccag

SEQ ID NO: 2474613 - RNA, 19 nt, Artificial Sequence
  Description of Artificial Sequence: Synthetic oligonucleotide
uccacuaacaagugcaacc

SEQ ID NO: 2474614 - RNA, 19 nt, Artificial Sequence
  Description of Artificial Sequence: Synthetic oligonucleotide
agcaggaugaagcuacagc

SEQ ID NO: 2474615 - RNA, 19 nt, Artificial Sequence
  Description of Artificial Sequence: Synthetic oligonucleotide
uuaggcaccgaagacauag

SEQ ID NO: 2474616 - RNA, 19 nt, Artificial Sequence
  Description of Artificial Sequence: Synthetic oligonucleotide
uauacauaucugaggacag

SEQ ID NO: 2474617 - RNA, 19 nt, Artificial Sequence
  Description of Artificial Sequence: Synthetic oligonucleotide
gauuauuaggcaccgaaga

SEQ ID NO: 2474618 - RNA, 19 nt, Artificial Sequence
  Description of Artificial Sequence: Synthetic oligonucleotide
uugauuauuaggcaccgaa

SEQ ID NO: 2474619 - RNA, 19 nt, Artificial Sequence
  Description of Artificial Sequence: Synthetic oligonucleotide
ugauuauuaggcaccgaag

SEQ ID NO: 2474620 - RNA, 19 nt, Artificial Sequence
  Description of Artificial Sequence: Synthetic oligonucleotide
aucagucuaucuuugaugu

SEQ ID NO: 2474621 - RNA, 19 nt, Artificial Sequence
  Description of Artificial Sequence: Synthetic oligonucleotide
uaauacuuaagcagccacc

SEQ ID NO: 2474622 - RNA, 19 nt, Artificial Sequence
  Description of Artificial Sequence: Synthetic oligonucleotide
guaaagaucaauaaacaga

SEQ ID NO: 2474623 - RNA, 19 nt, Artificial Sequence
  Description of Artificial Sequence: Synthetic oligonucleotide
uuagauuuagugccuucag

SEQ ID NO: 2474624 - RNA, 19 nt, Artificial Sequence
  Description of Artificial Sequence: Synthetic oligonucleotide
aauugagugcaagagcaag

SEQ ID NO: 2474625 - RNA, 19 nt, Artificial Sequence
  Description of Artificial Sequence: Synthetic oligonucleotide
uuuauauuggaaucuguua

SEQ ID NO: 2474626 - RNA, 19 nt, Artificial Sequence
  Description of Artificial Sequence: Synthetic oligonucleotide
gaucaauaaacagaccaag

SEQ ID NO: 2474627 - RNA, 19 nt, Artificial Sequence
  Description of Artificial Sequence: Synthetic oligonucleotide
ugauccuacuaauugcucc

SEQ ID NO: 2474628 - RNA, 19 nt, Artificial Sequence
  Description of Artificial Sequence: Synthetic oligonucleotide
aaaucaacacacugcaaaa

SEQ ID NO: 2474629 - RNA, 19 nt, Artificial Sequence
  Description of Artificial Sequence: Synthetic oligonucleotide
ugguccacuaacaagugca

SEQ ID NO: 2474630 - RNA, 19 nt, Artificial Sequence
  Description of Artificial Sequence: Synthetic oligonucleotide
aaacagaccaagucacuug

SEQ ID NO: 2474631 - RNA, 19 nt, Artificial Sequence
  Description of Artificial Sequence: Synthetic oligonucleotide
aagcuacagcuuuuauucc

SEQ ID NO: 2474632 - RNA, 19 nt, Artificial Sequence
  Description of Artificial Sequence: Synthetic oligonucleotide
uuagcagcuggcaauugag

SEQ ID NO: 2474633 - RNA, 19 nt, Artificial Sequence
  Description of Artificial Sequence: Synthetic oligonucleotide
gaguugaccgaccaguugc

SEQ ID NO: 2474634 - RNA, 19 nt, Artificial Sequence
  Description of Artificial Sequence: Synthetic oligonucleotide
gaggcaaauauuuaauauc

SEQ ID NO: 2474635 - RNA, 19 nt, Artificial Sequence
  Description of Artificial Sequence: Synthetic oligonucleotide
cuuaucaguaauacuuaag

SEQ ID NO: 2474636 - RNA, 19 nt, Artificial Sequence
  Description of Artificial Sequence: Synthetic oligonucleotide
aguauacauaucugaggac

SEQ ID NO: 2474637 - RNA, 19 nt, Artificial Sequence
  Description of Artificial Sequence: Synthetic oligonucleotide
uguaggucggagcaggaug

SEQ ID NO: 2474638 - RNA, 19 nt, Artificial Sequence
  Description of Artificial Sequence: Synthetic oligonucleotide
acaauaucccauguuaauc

SEQ ID NO: 2474639 - RNA, 19 nt, Artificial Sequence
  Description of Artificial Sequence: Synthetic oligonucleotide
uggaaauauugauuauuag

SEQ ID NO: 2474640 - RNA, 19 nt, Artificial Sequence
  Description of Artificial Sequence: Synthetic oligonucleotide
aacagaccaagucacuugu

SEQ ID NO: 2474641 - RNA, 19 nt, Artificial Sequence
  Description of Artificial Sequence: Synthetic oligonucleotide
aauuucauguaggucggag

SEQ ID NO: 2474642 - RNA, 19 nt, Artificial Sequence
  Description of Artificial Sequence: Synthetic oligonucleotide
uauugauuauuaggcaccg

SEQ ID NO: 2474643 - RNA, 19 nt, Artificial Sequence
  Description of Artificial Sequence: Synthetic oligonucleotide
aaagaucaauaaacagacc

SEQ ID NO: 2474644 - RNA, 19 nt, Artificial Sequence
  Description of Artificial Sequence: Synthetic oligonucleotide
aaagaaguauacauaucug

SEQ ID NO: 2474645 - RNA, 19 nt, Artificial Sequence
  Description of Artificial Sequence: Synthetic oligonucleotide
uauuggaaucuguuauccg

SEQ ID NO: 2474646 - RNA, 19 nt, Artificial Sequence
  Description of Artificial Sequence: Synthetic oligonucleotide
gucaaugaucuuuagcagc

SEQ ID NO: 2474647 - RNA, 19 nt, Artificial Sequence
  Description of Artificial Sequence: Synthetic oligonucleotide
uuauuaggcaccgaagaca

SEQ ID NO: 2474648 - RNA, 19 nt, Artificial Sequence
  Description of Artificial Sequence: Synthetic oligonucleotide
uauuaggcaccgaagacau

SEQ ID NO: 2474649 - RNA, 19 nt, Artificial Sequence
  Description of Artificial Sequence: Synthetic oligonucleotide
cuaacaagugcaaccacac

SEQ ID NO: 2474650 - RNA, 19 nt, Artificial Sequence
  Description of Artificial Sequence: Synthetic oligonucleotide
ucuggaggauuuuagauuu

SEQ ID NO: 2474651 - RNA, 19 nt, Artificial Sequence
  Description of Artificial Sequence: Synthetic oligonucleotide
uaguuccacgaguugaccg

SEQ ID NO: 2474652 - RNA, 19 nt, Artificial Sequence
  Description of Artificial Sequence: Synthetic oligonucleotide
uuuagauuuagugccuuca

SEQ ID NO: 2474653 - RNA, 19 nt, Artificial Sequence
  Description of Artificial Sequence: Synthetic oligonucleotide
ucagaucuagucuuuggac

SEQ ID NO: 2474654 - RNA, 19 nt, Artificial Sequence
  Description of Artificial Sequence: Synthetic oligonucleotide
uuuacacaggugcuggaga

SEQ ID NO: 2474655 - RNA, 19 nt, Artificial Sequence
  Description of Artificial Sequence: Synthetic oligonucleotide
uuaaucuccucuaauuguu

SEQ ID NO: 2474656 - RNA, 19 nt, Artificial Sequence
  Description of Artificial Sequence: Synthetic oligonucleotide
uguugggaggcaaauauuu

SEQ ID NO: 2474657 - RNA, 19 nt, Artificial Sequence
  Description of Artificial Sequence: Synthetic oligonucleotide
uuuagcagcuggcaauuga

SEQ ID NO: 2474658 - RNA, 19 nt, Artificial Sequence
  Description of Artificial Sequence: Synthetic oligonucleotide
cuacuaauugcuccaagac

SEQ ID NO: 2474659 - RNA, 19 nt, Artificial Sequence
  Description of Artificial Sequence: Synthetic oligonucleotide
accucauuuauauuggaau

SEQ ID NO: 2474660 - RNA, 19 nt, Artificial Sequence
  Description of Artificial Sequence: Synthetic oligonucleotide
ucagaagauuuauacaaua

SEQ ID NO: 2474661 - RNA, 19 nt, Artificial Sequence
  Description of Artificial Sequence: Synthetic oligonucleotide
uucaguuuucugcauuuac

SEQ ID NO: 2474662 - RNA, 19 nt, Artificial Sequence
  Description of Artificial Sequence: Synthetic oligonucleotide
aucuuugauguugggaggc

SEQ ID NO: 2474663 - RNA, 19 nt, Artificial Sequence
  Description of Artificial Sequence: Synthetic oligonucleotide
uccucuaauuguuuggcac

SEQ ID NO: 2474664 - RNA, 19 nt, Artificial Sequence
  Description of Artificial Sequence: Synthetic oligonucleotide
gagaaugaucuguuauuag

SEQ ID NO: 2474665 - RNA, 19 nt, Artificial Sequence
  Description of Artificial Sequence: Synthetic oligonucleotide
uguuuaaguuuucuugauc

SEQ ID NO: 2474666 - RNA, 19 nt, Artificial Sequence
  Description of Artificial Sequence: Synthetic oligonucleotide
uucgggauguaacaccuca

SEQ ID NO: 2474667 - RNA, 19 nt, Artificial Sequence
  Description of Artificial Sequence: Synthetic oligonucleotide
ucuguuauccggccccggg

SEQ ID NO: 2474668 - RNA, 19 nt, Artificial Sequence
  Description of Artificial Sequence: Synthetic oligonucleotide
ucuaucuuugauguuggga

SEQ ID NO: 2474669 - RNA, 19 nt, Artificial Sequence
  Description of Artificial Sequence: Synthetic oligonucleotide
ugaccgaccaguugcgagg

SEQ ID NO: 2474670 - RNA, 19 nt, Artificial Sequence
  Description of Artificial Sequence: Synthetic oligonucleotide
guaauacuuaagcagccac

SEQ ID NO: 2474671 - RNA, 19 nt, Artificial Sequence
  Description of Artificial Sequence: Synthetic oligonucleotide
aggcaaauauuuaauaucu

SEQ ID NO: 2474672 - RNA, 19 nt, Artificial Sequence
  Description of Artificial Sequence: Synthetic oligonucleotide
ucauguaggucggagcagg

SEQ ID NO: 2474673 - RNA, 19 nt, Artificial Sequence
  Description of Artificial Sequence: Synthetic oligonucleotide
cuugagaucagccucagua

SEQ ID NO: 2474674 - RNA, 19 nt, Artificial Sequence
  Description of Artificial Sequence: Synthetic oligonucleotide
acuaauugcuccaagacuu

SEQ ID NO: 2474675 - RNA, 19 nt, Artificial Sequence
  Description of Artificial Sequence: Synthetic oligonucleotide
acaugguccacuaacaagu

SEQ ID NO: 2474676 - RNA, 19 nt, Artificial Sequence
  Description of Artificial Sequence: Synthetic oligonucleotide
uagauuuagugccuucagu

SEQ ID NO: 2474677 - RNA, 19 nt, Artificial Sequence
  Description of Artificial Sequence: Synthetic oligonucleotide
cuauuucuauguucucugg

SEQ ID NO: 2474678 - RNA, 19 nt, Artificial Sequence
  Description of Artificial Sequence: Synthetic oligonucleotide
auaucugaggacaggacag

SEQ ID NO: 2474679 - RNA, 19 nt, Artificial Sequence
  Description of Artificial Sequence: Synthetic oligonucleotide
gcaccgaagacauaguucc

SEQ ID NO: 2474680 - RNA, 19 nt, Artificial Sequence
  Description of Artificial Sequence: Synthetic oligonucleotide
aagucacuuguuuaaguuu

SEQ ID NO: 2474681 - RNA, 19 nt, Artificial Sequence
  Description of Artificial Sequence: Synthetic oligonucleotide
uacauaucugaggacagga

SEQ ID NO: 2474682 - RNA, 19 nt, Artificial Sequence
  Description of Artificial Sequence: Synthetic oligonucleotide
agcagcuggcaauugagug

SEQ ID NO: 2474683 - RNA, 19 nt, Artificial Sequence
  Description of Artificial Sequence: Synthetic oligonucleotide
ugauguuaugcuauuucua

SEQ ID NO: 2474684 - RNA, 19 nt, Artificial Sequence
  Description of Artificial Sequence: Synthetic oligonucleotide
uuggacuucgggauguaac

SEQ ID NO: 2474685 - RNA, 19 nt, Artificial Sequence
  Description of Artificial Sequence: Synthetic oligonucleotide
uggacuucgggauguaaca

SEQ ID NO: 2474686 - RNA, 19 nt, Artificial Sequence
  Description of Artificial Sequence: Synthetic oligonucleotide
ugaagcuacagcuuuuauu

SEQ ID NO: 2474687 - RNA, 19 nt, Artificial Sequence
  Description of Artificial Sequence: Synthetic oligonucleotide
uuauacaauaucccauguu

SEQ ID NO: 2474688 - RNA, 19 nt, Artificial Sequence
  Description of Artificial Sequence: Synthetic oligonucleotide
caguaauacuuaagcagcc

SEQ ID NO: 2474689 - RNA, 19 nt, Artificial Sequence
  Description of Artificial Sequence: Synthetic oligonucleotide
uggcaauugagugcaagag

SEQ ID NO: 2474690 - RNA, 19 nt, Artificial Sequence
  Description of Artificial Sequence: Synthetic oligonucleotide
gauaucacagcuccucaga

SEQ ID NO: 2474691 - RNA, 19 nt, Artificial Sequence
  Description of Artificial Sequence: Synthetic oligonucleotide
ugagaucagccucaguaaa

SEQ ID NO: 2474692 - RNA, 19 nt, Artificial Sequence
  Description of Artificial Sequence: Synthetic oligonucleotide
agauaucacagcuccucag

SEQ ID NO: 2474693 - RNA, 19 nt, Artificial Sequence
  Description of Artificial Sequence: Synthetic oligonucleotide
ugagauaucacagcuccuc

SEQ ID NO: 2474694 - RNA, 19 nt, Artificial Sequence
  Description of Artificial Sequence: Synthetic oligonucleotide
uacaauaucccauguuaau

SEQ ID NO: 2474695 - RNA, 19 nt, Artificial Sequence
  Description of Artificial Sequence: Synthetic oligonucleotide
uuguuuggcacauggucca

SEQ ID NO: 2474696 - RNA, 19 nt, Artificial Sequence
  Description of Artificial Sequence: Synthetic oligonucleotide
aggaaggcaucgcugccgc

SEQ ID NO: 2474697 - RNA, 19 nt, Artificial Sequence
  Description of Artificial Sequence: Synthetic oligonucleotide
aauugcuccaagacuucuc

SEQ ID NO: 2474698 - RNA, 19 nt, Artificial Sequence
  Description of Artificial Sequence: Synthetic oligonucleotide
auugagugcaagagcaagg

SEQ ID NO: 2474699 - RNA, 19 nt, Artificial Sequence
  Description of Artificial Sequence: Synthetic oligonucleotide
cauaguuccacgaguugac

SEQ ID NO: 2474700 - RNA, 19 nt, Artificial Sequence
  Description of Artificial Sequence: Synthetic oligonucleotide
auguuaaucuccucuaauu

SEQ ID NO: 2474701 - RNA, 19 nt, Artificial Sequence
  Description of Artificial Sequence: Synthetic oligonucleotide
gauccuacuaauugcucca

SEQ ID NO: 2474702 - RNA, 19 nt, Artificial Sequence
  Description of Artificial Sequence: Synthetic oligonucleotide
uggaggauuuuagauuuag

SEQ ID NO: 2474703 - RNA, 19 nt, Artificial Sequence
  Description of Artificial Sequence: Synthetic oligonucleotide
auguuaugcuauuucuaug

SEQ ID NO: 2474704 - RNA, 19 nt, Artificial Sequence
  Description of Artificial Sequence: Synthetic oligonucleotide
cagucuaucuuugauguug

SEQ ID NO: 2474705 - RNA, 19 nt, Artificial Sequence
  Description of Artificial Sequence: Synthetic oligonucleotide
uguuauccggccccgggug

SEQ ID NO: 2474706 - RNA, 19 nt, Artificial Sequence
  Description of Artificial Sequence: Synthetic oligonucleotide
uggcacaugguccacuaac

SEQ ID NO: 2474707 - RNA, 19 nt, Artificial Sequence
  Description of Artificial Sequence: Synthetic oligonucleotide
augaucuuuagcagcuggc

SEQ ID NO: 2474708 - RNA, 19 nt, Artificial Sequence
  Description of Artificial Sequence: Synthetic oligonucleotide
uuuagugccuucaguuuuc

SEQ ID NO: 2474709 - RNA, 19 nt, Artificial Sequence
  Description of Artificial Sequence: Synthetic oligonucleotide
uugagaucagccucaguaa

SEQ ID NO: 2474710 - RNA, 19 nt, Artificial Sequence
  Description of Artificial Sequence: Synthetic oligonucleotide
ugaucuuuagcagcuggca

SEQ ID NO: 2474711 - RNA, 19 nt, Artificial Sequence
  Description of Artificial Sequence: Synthetic oligonucleotide
uguaaggacuuaucaguaa

SEQ ID NO: 2474712 - RNA, 19 nt, Artificial Sequence
  Description of Artificial Sequence: Synthetic oligonucleotide
cauaucugaggacaggaca

SEQ ID NO: 2474713 - RNA, 19 nt, Artificial Sequence
  Description of Artificial Sequence: Synthetic oligonucleotide
uaacaagugcaaccacacc

SEQ ID NO: 2474714 - RNA, 19 nt, Artificial Sequence
  Description of Artificial Sequence: Synthetic oligonucleotide
gauguugggaggcaaauau

SEQ ID NO: 2474715 - RNA, 19 nt, Artificial Sequence
  Description of Artificial Sequence: Synthetic oligonucleotide
uugagugcaagagcaagga

SEQ ID NO: 2474716 - RNA, 19 nt, Artificial Sequence
  Description of Artificial Sequence: Synthetic oligonucleotide
ugcauuuacacaggugcug

SEQ ID NO: 2474717 - RNA, 19 nt, Artificial Sequence
  Description of Artificial Sequence: Synthetic oligonucleotide
auuuacacaggugcuggag

SEQ ID NO: 2474718 - RNA, 19 nt, Artificial Sequence
  Description of Artificial Sequence: Synthetic oligonucleotide
auaguuccacgaguugacc

SEQ ID NO: 2474719 - RNA, 19 nt, Artificial Sequence
  Description of Artificial Sequence: Synthetic oligonucleotide
ugggaggcaaauauuuaau

SEQ ID NO: 2474720 - RNA, 19 nt, Artificial Sequence
  Description of Artificial Sequence: Synthetic oligonucleotide
gcuauuucuauguucucug

SEQ ID NO: 2474721 - RNA, 19 nt, Artificial Sequence
  Description of Artificial Sequence: Synthetic oligonucleotide
gacuucucgagaaugaucu

SEQ ID NO: 2474722 - RNA, 19 nt, Artificial Sequence
  Description of Artificial Sequence: Synthetic oligonucleotide
cucaguaaagaucaauaaa

SEQ ID NO: 2474723 - RNA, 19 nt, Artificial Sequence
  Description of Artificial Sequence: Synthetic oligonucleotide
aguuccacgaguugaccga

SEQ ID NO: 2474724 - RNA, 19 nt, Artificial Sequence
  Description of Artificial Sequence: Synthetic oligonucleotide
aggacuuaucaguaauacu

SEQ ID NO: 2474725 - RNA, 19 nt, Artificial Sequence
  Description of Artificial Sequence: Synthetic oligonucleotide
uuguuuaaguuuucuugau

SEQ ID NO: 2474726 - RNA, 19 nt, Artificial Sequence
  Description of Artificial Sequence: Synthetic oligonucleotide
uccuacuaauugcuccaag

SEQ ID NO: 2474727 - RNA, 19 nt, Artificial Sequence
  Description of Artificial Sequence: Synthetic oligonucleotide
ucgagaaugaucuguuauu

SEQ ID NO: 2474728 - RNA, 19 nt, Artificial Sequence
  Description of Artificial Sequence: Synthetic oligonucleotide
uuuuagauuuagugccuuc

SEQ ID NO: 2474729 - RNA, 19 nt, Artificial Sequence
  Description of Artificial Sequence: Synthetic oligonucleotide
acuaacaagugcaaccaca

SEQ ID NO: 2474730 - RNA, 19 nt, Artificial Sequence
  Description of Artificial Sequence: Synthetic oligonucleotide
uccacgaguugaccgacca

SEQ ID NO: 2474731 - RNA, 19 nt, Artificial Sequence
  Description of Artificial Sequence: Synthetic oligonucleotide
aaucuguuauccggccccg

SEQ ID NO: 2474732 - RNA, 19 nt, Artificial Sequence
  Description of Artificial Sequence: Synthetic oligonucleotide
agaucuagucuuuggacuu

SEQ ID NO: 2474733 - RNA, 19 nt, Artificial Sequence
  Description of Artificial Sequence: Synthetic oligonucleotide
auauaucuggaaauauuga

SEQ ID NO: 2474734 - RNA, 19 nt, Artificial Sequence
  Description of Artificial Sequence: Synthetic oligonucleotide
ucuagucuuuggacuucgg

SEQ ID NO: 2474735 - RNA, 19 nt, Artificial Sequence
  Description of Artificial Sequence: Synthetic oligonucleotide
uggaaucuguuauccggcc

SEQ ID NO: 2474736 - RNA, 19 nt, Artificial Sequence
  Description of Artificial Sequence: Synthetic oligonucleotide
gacauaguuccacgaguug

SEQ ID NO: 2474737 - RNA, 19 nt, Artificial Sequence
  Description of Artificial Sequence: Synthetic oligonucleotide
uccuaaugccuguaaggac

SEQ ID NO: 2474738 - RNA, 19 nt, Artificial Sequence
  Description of Artificial Sequence: Synthetic oligonucleotide
auacauaucugaggacagg

SEQ ID NO: 2474739 - RNA, 19 nt, Artificial Sequence
  Description of Artificial Sequence: Synthetic oligonucleotide
aaugccuguaaggacuuau

SEQ ID NO: 2474740 - RNA, 19 nt, Artificial Sequence
  Description of Artificial Sequence: Synthetic oligonucleotide
guuaaucuccucuaauugu

SEQ ID NO: 2474741 - RNA, 19 nt, Artificial Sequence
  Description of Artificial Sequence: Synthetic oligonucleotide
uuccuucugauguuaugcu

SEQ ID NO: 2474742 - RNA, 19 nt, Artificial Sequence
  Description of Artificial Sequence: Synthetic oligonucleotide
ggucaaugaucuuuagcag

SEQ ID NO: 2474743 - RNA, 19 nt, Artificial Sequence
  Description of Artificial Sequence: Synthetic oligonucleotide
gagaucagccucaguaaag

SEQ ID NO: 2474744 - RNA, 19 nt, Artificial Sequence
  Description of Artificial Sequence: Synthetic oligonucleotide
agagcaaggacuccuucau

SEQ ID NO: 2474745 - RNA, 19 nt, Artificial Sequence
  Description of Artificial Sequence: Synthetic oligonucleotide
acauaucugaggacaggac

SEQ ID NO: 2474746 - RNA, 19 nt, Artificial Sequence
  Description of Artificial Sequence: Synthetic oligonucleotide
uuaagcagccacccagguc

SEQ ID NO: 2474747 - RNA, 19 nt, Artificial Sequence
  Description of Artificial Sequence: Synthetic oligonucleotide
gaaggcaucgcugccgccc

SEQ ID NO: 2474748 - RNA, 19 nt, Artificial Sequence
  Description of Artificial Sequence: Synthetic oligonucleotide
aguugcgaggaaggcaucg

SEQ ID NO: 2474749 - RNA, 19 nt, Artificial Sequence
  Description of Artificial Sequence: Synthetic oligonucleotide
caauaucccauguuaaucu

SEQ ID NO: 2474750 - RNA, 19 nt, Artificial Sequence
  Description of Artificial Sequence: Synthetic oligonucleotide
gguucuugagaucagccuc

SEQ ID NO: 2474751 - RNA, 19 nt, Artificial Sequence
  Description of Artificial Sequence: Synthetic oligonucleotide
aguaauacuuaagcagcca

SEQ ID NO: 2474752 - RNA, 19 nt, Artificial Sequence
  Description of Artificial Sequence: Synthetic oligonucleotide
uucucgagaaugaucuguu

SEQ ID NO: 2474753 - RNA, 19 nt, Artificial Sequence
  Description of Artificial Sequence: Synthetic oligonucleotide
auaucacagcuccucagau

SEQ ID NO: 2474754 - RNA, 19 nt, Artificial Sequence
  Description of Artificial Sequence: Synthetic oligonucleotide
ggcaauugagugcaagagc

SEQ ID NO: 2474755 - RNA, 19 nt, Artificial Sequence
  Description of Artificial Sequence: Synthetic oligonucleotide
aagugcaaccacaccacug

SEQ ID NO: 2474756 - RNA, 19 nt, Artificial Sequence
  Description of Artificial Sequence: Synthetic oligonucleotide
ugagugcaagagcaaggac

SEQ ID NO: 2474757 - RNA, 19 nt, Artificial Sequence
  Description of Artificial Sequence: Synthetic oligonucleotide
gagauaucacagcuccuca

SEQ ID NO: 2474758 - RNA, 19 nt, Artificial Sequence
  Description of Artificial Sequence: Synthetic oligonucleotide
acuuaagcagccacccagg

SEQ ID NO: 2474759 - RNA, 19 nt, Artificial Sequence
  Description of Artificial Sequence: Synthetic oligonucleotide
gaggaaggcaucgcugccg

SEQ ID NO: 2474760 - RNA, 19 nt, Artificial Sequence
  Description of Artificial Sequence: Synthetic oligonucleotide
gcaauugagugcaagagca

SEQ ID NO: 2474761 - RNA, 19 nt, Artificial Sequence
  Description of Artificial Sequence: Synthetic oligonucleotide
agcuuuuauuccuucugau

SEQ ID NO: 2474762 - RNA, 19 nt, Artificial Sequence
  Description of Artificial Sequence: Synthetic oligonucleotide
gaucuuuagcagcuggcaa

SEQ ID NO: 2474763 - RNA, 19 nt, Artificial Sequence
  Description of Artificial Sequence: Synthetic oligonucleotide
uugauccuacuaauugcuc

SEQ ID NO: 2474764 - RNA, 19 nt, Artificial Sequence
  Description of Artificial Sequence: Synthetic oligonucleotide
agaucaauaaacagaccaa

SEQ ID NO: 2474765 - RNA, 19 nt, Artificial Sequence
  Description of Artificial Sequence: Synthetic oligonucleotide
uuauuccuucugauguuau

SEQ ID NO: 2474766 - RNA, 19 nt, Artificial Sequence
  Description of Artificial Sequence: Synthetic oligonucleotide
ucuuuggacuucgggaugu

SEQ ID NO: 2474767 - RNA, 19 nt, Artificial Sequence
  Description of Artificial Sequence: Synthetic oligonucleotide
agccaagucugagauauca

SEQ ID NO: 2474768 - RNA, 19 nt, Artificial Sequence
  Description of Artificial Sequence: Synthetic oligonucleotide
agacuucucgagaaugauc

SEQ ID NO: 2474769 - RNA, 19 nt, Artificial Sequence
  Description of Artificial Sequence: Synthetic oligonucleotide
uaucacagcuccucagauc

SEQ ID NO: 2474770 - RNA, 19 nt, Artificial Sequence
  Description of Artificial Sequence: Synthetic oligonucleotide
agauauaucuggaaauauu

SEQ ID NO: 2474771 - RNA, 19 nt, Artificial Sequence
  Description of Artificial Sequence: Synthetic oligonucleotide
agaccaagucacuuguuua

SEQ ID NO: 2474772 - RNA, 19 nt, Artificial Sequence
  Description of Artificial Sequence: Synthetic oligonucleotide
gccuguaaggacuuaucag

SEQ ID NO: 2474773 - RNA, 19 nt, Artificial Sequence
  Description of Artificial Sequence: Synthetic oligonucleotide
cucagaucuagucuuugga

SEQ ID NO: 2474774 - RNA, 19 nt, Artificial Sequence
  Description of Artificial Sequence: Synthetic oligonucleotide
aucuagucuuuggacuucg

SEQ ID NO: 2474775 - RNA, 19 nt, Artificial Sequence
  Description of Artificial Sequence: Synthetic oligonucleotide
cuugauccuacuaauugcu

SEQ ID NO: 2474776 - RNA, 19 nt, Artificial Sequence
  Description of Artificial Sequence: Synthetic oligonucleotide
ccucauuuauauuggaauc

SEQ ID NO: 2474777 - RNA, 19 nt, Artificial Sequence
  Description of Artificial Sequence: Synthetic oligonucleotide
uuuggcacaugguccacua

SEQ ID NO: 2474778 - RNA, 19 nt, Artificial Sequence
  Description of Artificial Sequence: Synthetic oligonucleotide
agucacuuguuuaaguuuu

SEQ ID NO: 2474779 - RNA, 19 nt, Artificial Sequence
  Description of Artificial Sequence: Synthetic oligonucleotide
auacaauaucccauguuaa

SEQ ID NO: 2474780 - RNA, 19 nt, Artificial Sequence
  Description of Artificial Sequence: Synthetic oligonucleotide
uugcgaggaaggcaucgcu

SEQ ID NO: 2474781 - RNA, 19 nt, Artificial Sequence
  Description of Artificial Sequence: Synthetic oligonucleotide
aucugaggacaggacaguc

SEQ ID NO: 2474782 - RNA, 19 nt, Artificial Sequence
  Description of Artificial Sequence: Synthetic oligonucleotide
uccuucugauguuaugcua

SEQ ID NO: 2474783 - RNA, 19 nt, Artificial Sequence
  Description of Artificial Sequence: Synthetic oligonucleotide
aucgcugccgcccucgaaa

SEQ ID NO: 2474784 - RNA, 19 nt, Artificial Sequence
  Description of Artificial Sequence: Synthetic oligonucleotide
auacuuaagcagccaccca

SEQ ID NO: 2474785 - RNA, 19 nt, Artificial Sequence
  Description of Artificial Sequence: Synthetic oligonucleotide
ggucggagcaggaugaagc

SEQ ID NO: 2474786 - RNA, 19 nt, Artificial Sequence
  Description of Artificial Sequence: Synthetic oligonucleotide
gucuaucuuugauguuggg

SEQ ID NO: 2474787 - RNA, 19 nt, Artificial Sequence
  Description of Artificial Sequence: Synthetic oligonucleotide
ucuauguucucuggaggau

SEQ ID NO: 2474788 - RNA, 19 nt, Artificial Sequence
  Description of Artificial Sequence: Synthetic oligonucleotide
cugauguuaugcuauuucu

SEQ ID NO: 2474789 - RNA, 19 nt, Artificial Sequence
  Description of Artificial Sequence: Synthetic oligonucleotide
cuggcaauugagugcaaga

SEQ ID NO: 2474790 - RNA, 19 nt, Artificial Sequence
  Description of Artificial Sequence: Synthetic oligonucleotide
aaggcaucgcugccgcccu

SEQ ID NO: 2474791 - RNA, 19 nt, Artificial Sequence
  Description of Artificial Sequence: Synthetic oligonucleotide
ggugcucauuauuuuaauc

SEQ ID NO: 2474792 - RNA, 19 nt, Artificial Sequence
  Description of Artificial Sequence: Synthetic oligonucleotide
ucuaauuguuuggcacaug

SEQ ID NO: 2474793 - RNA, 19 nt, Artificial Sequence
  Description of Artificial Sequence: Synthetic oligonucleotide
acaccucauuuauauugga

SEQ ID NO: 2474794 - RNA, 19 nt, Artificial Sequence
  Description of Artificial Sequence: Synthetic oligonucleotide
aucuggaaauauugauuau

SEQ ID NO: 2474795 - RNA, 19 nt, Artificial Sequence
  Description of Artificial Sequence: Synthetic oligonucleotide
cacagcuccucagaucuag

SEQ ID NO: 2474796 - RNA, 19 nt, Artificial Sequence
  Description of Artificial Sequence: Synthetic oligonucleotide
ugucagacacugaguaguu

SEQ ID NO: 2474797 - RNA, 19 nt, Artificial Sequence
  Description of Artificial Sequence: Synthetic oligonucleotide
agcauccuuucaaagaaau

SEQ ID NO: 2474798 - RNA, 19 nt, Artificial Sequence
  Description of Artificial Sequence: Synthetic oligonucleotide
ggacuuaucaguaauacuu

SEQ ID NO: 2474799 - RNA, 19 nt, Artificial Sequence
  Description of Artificial Sequence: Synthetic oligonucleotide
uguucucuggaggauuuua

SEQ ID NO: 2474800 - RNA, 19 nt, Artificial Sequence
  Description of Artificial Sequence: Synthetic oligonucleotide
ggaaucuguuauccggccc

SEQ ID NO: 2474801 - RNA, 19 nt, Artificial Sequence
  Description of Artificial Sequence: Synthetic oligonucleotide
cagaucuagucuuuggacu

SEQ ID NO: 2474802 - RNA, 19 nt, Artificial Sequence
  Description of Artificial Sequence: Synthetic oligonucleotide
aaauuucauguaggucgga

SEQ ID NO: 2474803 - RNA, 19 nt, Artificial Sequence
  Description of Artificial Sequence: Synthetic oligonucleotide
aucagugacauugcagcau

SEQ ID NO: 2474804 - RNA, 19 nt, Artificial Sequence
  Description of Artificial Sequence: Synthetic oligonucleotide
cucauuuauauuggaaucu

SEQ ID NO: 2474805 - RNA, 19 nt, Artificial Sequence
  Description of Artificial Sequence: Synthetic oligonucleotide
cacuaacaagugcaaccac

SEQ ID NO: 2474806 - RNA, 19 nt, Artificial Sequence
  Description of Artificial Sequence: Synthetic oligonucleotide
cagcuuuuauuccuucuga

SEQ ID NO: 2474807 - RNA, 19 nt, Artificial Sequence
  Description of Artificial Sequence: Synthetic oligonucleotide
auuuuagauuuagugccuu

SEQ ID NO: 2474808 - RNA, 19 nt, Artificial Sequence
  Description of Artificial Sequence: Synthetic oligonucleotide
agacauaguuccacgaguu

SEQ ID NO: 2474809 - RNA, 19 nt, Artificial Sequence
  Description of Artificial Sequence: Synthetic oligonucleotide
ccgaagacauaguuccacg

SEQ ID NO: 2474810 - RNA, 19 nt, Artificial Sequence
  Description of Artificial Sequence: Synthetic oligonucleotide
augccuguaaggacuuauc

SEQ ID NO: 2474811 - RNA, 19 nt, Artificial Sequence
  Description of Artificial Sequence: Synthetic oligonucleotide
uugcuccaagacuucucga

SEQ ID NO: 2474812 - RNA, 19 nt, Artificial Sequence
  Description of Artificial Sequence: Synthetic oligonucleotide
uccucagaucuagucuuug

SEQ ID NO: 2474813 - RNA, 19 nt, Artificial Sequence
  Description of Artificial Sequence: Synthetic oligonucleotide
caucagugacauugcagca

SEQ ID NO: 2474814 - RNA, 19 nt, Artificial Sequence
  Description of Artificial Sequence: Synthetic oligonucleotide
uuccacgaguugaccgacc

SEQ ID NO: 2474815 - RNA, 19 nt, Artificial Sequence
  Description of Artificial Sequence: Synthetic oligonucleotide
ucucgagaaugaucuguua

SEQ ID NO: 2474816 - RNA, 19 nt, Artificial Sequence
  Description of Artificial Sequence: Synthetic oligonucleotide
guaggucggagcaggauga

SEQ ID NO: 2474817 - RNA, 19 nt, Artificial Sequence
  Description of Artificial Sequence: Synthetic oligonucleotide
ucgggauguaacaccucau

SEQ ID NO: 2474818 - RNA, 19 nt, Artificial Sequence
  Description of Artificial Sequence: Synthetic oligonucleotide
cagugacauugcagcaucc

SEQ ID NO: 2474819 - RNA, 19 nt, Artificial Sequence
  Description of Artificial Sequence: Synthetic oligonucleotide
cauuuauauuggaaucugu

SEQ ID NO: 2474820 - RNA, 19 nt, Artificial Sequence
  Description of Artificial Sequence: Synthetic oligonucleotide
guuauccggccccgggugc

SEQ ID NO: 2474821 - RNA, 19 nt, Artificial Sequence
  Description of Artificial Sequence: Synthetic oligonucleotide
ccuacuaauugcuccaaga

SEQ ID NO: 2474822 - RNA, 19 nt, Artificial Sequence
  Description of Artificial Sequence: Synthetic oligonucleotide
ucuugagaucagccucagu

SEQ ID NO: 2474823 - RNA, 19 nt, Artificial Sequence
  Description of Artificial Sequence: Synthetic oligonucleotide
augaagcuacagcuuuuau

SEQ ID NO: 2474824 - RNA, 19 nt, Artificial Sequence
  Description of Artificial Sequence: Synthetic oligonucleotide
ccucagaucuagucuuugg

SEQ ID NO: 2474825 - RNA, 19 nt, Artificial Sequence
  Description of Artificial Sequence: Synthetic oligonucleotide
gaucuagucuuuggacuuc

SEQ ID NO: 2474826 - RNA, 19 nt, Artificial Sequence
  Description of Artificial Sequence: Synthetic oligonucleotide
caccucauuuauauuggaa

SEQ ID NO: 2474827 - RNA, 19 nt, Artificial Sequence
  Description of Artificial Sequence: Synthetic oligonucleotide
uuagugccuucaguuuucu

SEQ ID NO: 2474828 - RNA, 19 nt, Artificial Sequence
  Description of Artificial Sequence: Synthetic oligonucleotide
guugcgaggaaggcaucgc

SEQ ID NO: 2474829 - RNA, 19 nt, Artificial Sequence
  Description of Artificial Sequence: Synthetic oligonucleotide
auugauuauuaggcaccga

SEQ ID NO: 2474830 - RNA, 19 nt, Artificial Sequence
  Description of Artificial Sequence: Synthetic oligonucleotide
gaccaguugcgaggaaggc

SEQ ID NO: 2474831 - RNA, 19 nt, Artificial Sequence
  Description of Artificial Sequence: Synthetic oligonucleotide
aggcaccgaagacauaguu

SEQ ID NO: 2474832 - RNA, 19 nt, Artificial Sequence
  Description of Artificial Sequence: Synthetic oligonucleotide
ucagucuaucuuugauguu

SEQ ID NO: 2474833 - RNA, 19 nt, Artificial Sequence
  Description of Artificial Sequence: Synthetic oligonucleotide
ccuguaaggacuuaucagu

SEQ ID NO: 2474834 - RNA, 19 nt, Artificial Sequence
  Description of Artificial Sequence: Synthetic oligonucleotide
uucugauguuaugcuauuu

SEQ ID NO: 2474835 - RNA, 19 nt, Artificial Sequence
  Description of Artificial Sequence: Synthetic oligonucleotide
cugucagacacugaguagu

SEQ ID NO: 2474836 - RNA, 19 nt, Artificial Sequence
  Description of Artificial Sequence: Synthetic oligonucleotide
uagugccuucaguuuucug

SEQ ID NO: 2474837 - RNA, 19 nt, Artificial Sequence
  Description of Artificial Sequence: Synthetic oligonucleotide
ccuaaugccuguaaggacu

SEQ ID NO: 2474838 - RNA, 19 nt, Artificial Sequence
  Description of Artificial Sequence: Synthetic oligonucleotide
cucgagaaugaucuguuau

SEQ ID NO: 2474839 - RNA, 19 nt, Artificial Sequence
  Description of Artificial Sequence: Synthetic oligonucleotide
cuccucuaauuguuuggca

SEQ ID NO: 2474840 - RNA, 19 nt, Artificial Sequence
  Description of Artificial Sequence: Synthetic oligonucleotide
ccaagacuucucgagaaug

SEQ ID NO: 2474841 - RNA, 19 nt, Artificial Sequence
  Description of Artificial Sequence: Synthetic oligonucleotide
cauguuaaucuccucuaau

SEQ ID NO: 2474842 - RNA, 19 nt, Artificial Sequence
  Description of Artificial Sequence: Synthetic oligonucleotide
cagcuggcaauugagugca

SEQ ID NO: 2474843 - RNA, 19 nt, Artificial Sequence
  Description of Artificial Sequence: Synthetic oligonucleotide
gggaggcaaauauuuaaua

SEQ ID NO: 2474844 - RNA, 19 nt, Artificial Sequence
  Description of Artificial Sequence: Synthetic oligonucleotide
agccucaguaaagaucaau

SEQ ID NO: 2474845 - RNA, 19 nt, Artificial Sequence
  Description of Artificial Sequence: Synthetic oligonucleotide
cuuuagcagcuggcaauug

SEQ ID NO: 2474846 - RNA, 19 nt, Artificial Sequence
  Description of Artificial Sequence: Synthetic oligonucleotide
guccacuaacaagugcaac

SEQ ID NO: 2474847 - RNA, 19 nt, Artificial Sequence
  Description of Artificial Sequence: Synthetic oligonucleotide
ccucuaauuguuuggcaca

SEQ ID NO: 2474848 - RNA, 19 nt, Artificial Sequence
  Description of Artificial Sequence: Synthetic oligonucleotide
aggucggagcaggaugaag

SEQ ID NO: 2474849 - RNA, 19 nt, Artificial Sequence
  Description of Artificial Sequence: Synthetic oligonucleotide
cucuggaggauuuuagauu

SEQ ID NO: 2474850 - RNA, 19 nt, Artificial Sequence
  Description of Artificial Sequence: Synthetic oligonucleotide
ggcaccgaagacauaguuc

SEQ ID NO: 2474851 - RNA, 19 nt, Artificial Sequence
  Description of Artificial Sequence: Synthetic oligonucleotide
cuucgggauguaacaccuc

SEQ ID NO: 2474852 - RNA, 19 nt, Artificial Sequence
  Description of Artificial Sequence: Synthetic oligonucleotide
cgaccaguugcgaggaagg

SEQ ID NO: 2474853 - RNA, 19 nt, Artificial Sequence
  Description of Artificial Sequence: Synthetic oligonucleotide
uuauccggccccgggugcu

SEQ ID NO: 2474854 - RNA, 19 nt, Artificial Sequence
  Description of Artificial Sequence: Synthetic oligonucleotide
aucuguuauccggccccgg

SEQ ID NO: 2474855 - RNA, 19 nt, Artificial Sequence
  Description of Artificial Sequence: Synthetic oligonucleotide
gcuggcaauugagugcaag

SEQ ID NO: 2474856 - RNA, 19 nt, Artificial Sequence
  Description of Artificial Sequence: Synthetic oligonucleotide
gcuccaagacuucucgaga

SEQ ID NO: 2474857 - RNA, 19 nt, Artificial Sequence
  Description of Artificial Sequence: Synthetic oligonucleotide
guuccacgaguugaccgac

SEQ ID NO: 2474858 - RNA, 19 nt, Artificial Sequence
  Description of Artificial Sequence: Synthetic oligonucleotide
guuaugcuauuucuauguu

SEQ ID NO: 2474859 - RNA, 19 nt, Artificial Sequence
  Description of Artificial Sequence: Synthetic oligonucleotide
cauguaggucggagcagga

SEQ ID NO: 2474860 - RNA, 19 nt, Artificial Sequence
  Description of Artificial Sequence: Synthetic oligonucleotide
ugccgcccucgaaagccug

SEQ ID NO: 2474861 - RNA, 19 nt, Artificial Sequence
  Description of Artificial Sequence: Synthetic oligonucleotide
cacgaguugaccgaccagu

SEQ ID NO: 2474862 - RNA, 19 nt, Artificial Sequence
  Description of Artificial Sequence: Synthetic oligonucleotide
ugccuucaguuuucugcau

SEQ ID NO: 2474863 - RNA, 19 nt, Artificial Sequence
  Description of Artificial Sequence: Synthetic oligonucleotide
cugcauuuacacaggugcu

SEQ ID NO: 2474864 - RNA, 19 nt, Artificial Sequence
  Description of Artificial Sequence: Synthetic oligonucleotide
gccucaguaaagaucaaua

SEQ ID NO: 2474865 - RNA, 19 nt, Artificial Sequence
  Description of Artificial Sequence: Synthetic oligonucleotide
ggcacaugguccacuaaca

SEQ ID NO: 2474866 - RNA, 19 nt, Artificial Sequence
  Description of Artificial Sequence: Synthetic oligonucleotide
gcagccacccaggucaaug

SEQ ID NO: 2474867 - RNA, 19 nt, Artificial Sequence
  Description of Artificial Sequence: Synthetic oligonucleotide
ggacuucgggauguaacac

SEQ ID NO: 2474868 - RNA, 19 nt, Artificial Sequence
  Description of Artificial Sequence: Synthetic oligonucleotide
gaccgaccaguugcgagga

SEQ ID NO: 2474869 - RNA, 19 nt, Artificial Sequence
  Description of Artificial Sequence: Synthetic oligonucleotide
auuuaauaucugagauaua

SEQ ID NO: 2474870 - RNA, 19 nt, Artificial Sequence
  Description of Artificial Sequence: Synthetic oligonucleotide
gugcaaccacaccacuguc

SEQ ID NO: 2474871 - RNA, 19 nt, Artificial Sequence
  Description of Artificial Sequence: Synthetic oligonucleotide
auguaggucggagcaggau

SEQ ID NO: 2474872 - RNA, 19 nt, Artificial Sequence
  Description of Artificial Sequence: Synthetic oligonucleotide
auguugggaggcaaauauu

SEQ ID NO: 2474873 - RNA, 19 nt, Artificial Sequence
  Description of Artificial Sequence: Synthetic oligonucleotide
ccacuaacaagugcaacca

SEQ ID NO: 2474874 - RNA, 19 nt, Artificial Sequence
  Description of Artificial Sequence: Synthetic oligonucleotide
cuuaagcagccacccaggu

SEQ ID NO: 2474875 - RNA, 19 nt, Artificial Sequence
  Description of Artificial Sequence: Synthetic oligonucleotide
acaggacagucagaagauu

SEQ ID NO: 2474876 - RNA, 19 nt, Artificial Sequence
  Description of Artificial Sequence: Synthetic oligonucleotide
caaggacuccuucaucagu

SEQ ID NO: 2474877 - RNA, 19 nt, Artificial Sequence
  Description of Artificial Sequence: Synthetic oligonucleotide
auccuacuaauugcuccaa

SEQ ID NO: 2474878 - RNA, 19 nt, Artificial Sequence
  Description of Artificial Sequence: Synthetic oligonucleotide
guaacaccucauuuauauu

SEQ ID NO: 2474879 - RNA, 19 nt, Artificial Sequence
  Description of Artificial Sequence: Synthetic oligonucleotide
cagcauccuuucaaagaaa

SEQ ID NO: 2474880 - RNA, 19 nt, Artificial Sequence
  Description of Artificial Sequence: Synthetic oligonucleotide
gggauguaacaccucauuu

SEQ ID NO: 2474881 - RNA, 19 nt, Artificial Sequence
  Description of Artificial Sequence: Synthetic oligonucleotide
auguaacaccucauuuaua

SEQ ID NO: 2474882 - RNA, 19 nt, Artificial Sequence
  Description of Artificial Sequence: Synthetic oligonucleotide
caccgaagacauaguucca

SEQ ID NO: 2474883 - RNA, 19 nt, Artificial Sequence
  Description of Artificial Sequence: Synthetic oligonucleotide
ccgaccaguugcgaggaag

SEQ ID NO: 2474884 - RNA, 19 nt, Artificial Sequence
  Description of Artificial Sequence: Synthetic oligonucleotide
ggcaucgcugccgcccucg

SEQ ID NO: 2474885 - RNA, 19 nt, Artificial Sequence
  Description of Artificial Sequence: Synthetic oligonucleotide
cuaaugccuguaaggacuu

SEQ ID NO: 2474886 - RNA, 19 nt, Artificial Sequence
  Description of Artificial Sequence: Synthetic oligonucleotide
ccuucugauguuaugcuau

SEQ ID NO: 2474887 - RNA, 19 nt, Artificial Sequence
  Description of Artificial Sequence: Synthetic oligonucleotide
guugaccgaccaguugcga

SEQ ID NO: 2474888 - RNA, 19 nt, Artificial Sequence
  Description of Artificial Sequence: Synthetic oligonucleotide
acgaguugaccgaccaguu

SEQ ID NO: 2474889 - RNA, 19 nt, Artificial Sequence
  Description of Artificial Sequence: Synthetic oligonucleotide
gcucauuauuuuaaucagu

SEQ ID NO: 2474890 - RNA, 19 nt, Artificial Sequence
  Description of Artificial Sequence: Synthetic oligonucleotide
uaaugccuguaaggacuua

SEQ ID NO: 2474891 - RNA, 19 nt, Artificial Sequence
  Description of Artificial Sequence: Synthetic oligonucleotide
cgaagacauaguuccacga

SEQ ID NO: 2474892 - RNA, 19 nt, Artificial Sequence
  Description of Artificial Sequence: Synthetic oligonucleotide
cucuaauuguuuggcacau

SEQ ID NO: 2474893 - RNA, 19 nt, Artificial Sequence
  Description of Artificial Sequence: Synthetic oligonucleotide
caguugcgaggaaggcauc

SEQ ID NO: 2474894 - RNA, 19 nt, Artificial Sequence
  Description of Artificial Sequence: Synthetic oligonucleotide
uaggucggagcaggaugaa

SEQ ID NO: 2474895 - RNA, 19 nt, Artificial Sequence
  Description of Artificial Sequence: Synthetic oligonucleotide
ccaguugcgaggaaggcau

SEQ ID NO: 2474896 - RNA, 19 nt, Artificial Sequence
  Description of Artificial Sequence: Synthetic oligonucleotide
gcuccucagaucuagucuu

SEQ ID NO: 2474897 - RNA, 19 nt, Artificial Sequence
  Description of Artificial Sequence: Synthetic oligonucleotide
cccauguuaaucuccucua

SEQ ID NO: 2474898 - RNA, 19 nt, Artificial Sequence
  Description of Artificial Sequence: Synthetic oligonucleotide
aggcaucgcugccgcccuc

SEQ ID NO: 2474899 - RNA, 19 nt, Artificial Sequence
  Description of Artificial Sequence: Synthetic oligonucleotide
cuucugauguuaugcuauu

SEQ ID NO: 2474900 - RNA, 19 nt, Artificial Sequence
  Description of Artificial Sequence: Synthetic oligonucleotide
cuggaggauuuuagauuua

SEQ ID NO: 2474901 - RNA, 19 nt, Artificial Sequence
  Description of Artificial Sequence: Synthetic oligonucleotide
caaccacaccacugucaga

SEQ ID NO: 2474902 - RNA, 19 nt, Artificial Sequence
  Description of Artificial Sequence: Synthetic oligonucleotide
cuauguucucuggaggauu

SEQ ID NO: 2474903 - RNA, 19 nt, Artificial Sequence
  Description of Artificial Sequence: Synthetic oligonucleotide
ccauguuaaucuccucuaa

SEQ ID NO: 2474904 - RNA, 19 nt, Artificial Sequence
  Description of Artificial Sequence: Synthetic oligonucleotide
ggaggauuuuagauuuagu

SEQ ID NO: 2474905 - RNA, 19 nt, Artificial Sequence
  Description of Artificial Sequence: Synthetic oligonucleotide
gguccacuaacaagugcaa

SEQ ID NO: 2474906 - RNA, 19 nt, Artificial Sequence
  Description of Artificial Sequence: Synthetic oligonucleotide
guuuggcacaugguccacu

SEQ ID NO: 2474907 - RNA, 19 nt, Artificial Sequence
  Description of Artificial Sequence: Synthetic oligonucleotide
ccacgaguugaccgaccag

SEQ ID NO: 2474908 - RNA, 19 nt, Artificial Sequence
  Description of Artificial Sequence: Synthetic oligonucleotide
aagcagccacccaggucaa

SEQ ID NO: 2474909 - RNA, 19 nt, Artificial Sequence
  Description of Artificial Sequence: Synthetic oligonucleotide
auuaggcaccgaagacaua

SEQ ID NO: 2474910 - RNA, 19 nt, Artificial Sequence
  Description of Artificial Sequence: Synthetic oligonucleotide
gggugcucauuauuuuaau

SEQ ID NO: 2474911 - RNA, 19 nt, Artificial Sequence
  Description of Artificial Sequence: Synthetic oligonucleotide
gccgcccucgaaagccugg

SEQ ID NO: 2474912 - RNA, 19 nt, Artificial Sequence
  Description of Artificial Sequence: Synthetic oligonucleotide
accgaccaguugcgaggaa

SEQ ID NO: 2474913 - RNA, 19 nt, Artificial Sequence
  Description of Artificial Sequence: Synthetic oligonucleotide
cgggugcucauuauuuuaa

SEQ ID NO: 2474914 - RNA, 19 nt, Artificial Sequence
  Description of Artificial Sequence: Synthetic oligonucleotide
ccgggugcucauuauuuua

SEQ ID NO: 2474915 - RNA, 19 nt, Artificial Sequence
  Description of Artificial Sequence: Synthetic oligonucleotide
cuuuggacuucgggaugua

SEQ ID NO: 2474916 - RNA, 19 nt, Artificial Sequence
  Description of Artificial Sequence: Synthetic oligonucleotide
cuccucagaucuagucuuu

SEQ ID NO: 2474917 - RNA, 19 nt, Artificial Sequence
  Description of Artificial Sequence: Synthetic oligonucleotide
caucgcugccgcccucgaa

SEQ ID NO: 2474918 - RNA, 19 nt, Artificial Sequence
  Description of Artificial Sequence: Synthetic oligonucleotide
cagccucaguaaagaucaa

SEQ ID NO: 2474919 - RNA, 19 nt, Artificial Sequence
  Description of Artificial Sequence: Synthetic oligonucleotide
gccuucaguuuucugcauu

SEQ ID NO: 2474920 - RNA, 19 nt, Artificial Sequence
  Description of Artificial Sequence: Synthetic oligonucleotide
uccggccccgggugcucau

SEQ ID NO: 2474921 - RNA, 19 nt, Artificial Sequence
  Description of Artificial Sequence: Synthetic oligonucleotide
ggaugaagcuacagcuuuu

SEQ ID NO: 2474922 - RNA, 19 nt, Artificial Sequence
  Description of Artificial Sequence: Synthetic oligonucleotide
cugccgcccucgaaagccu

SEQ ID NO: 2474923 - RNA, 19 nt, Artificial Sequence
  Description of Artificial Sequence: Synthetic oligonucleotide
gcaucgcugccgcccucga

SEQ ID NO: 2474924 - RNA, 19 nt, Artificial Sequence
  Description of Artificial Sequence: Synthetic oligonucleotide
cgcugccgcccucgaaagc

SEQ ID NO: 2474925 - RNA, 19 nt, Artificial Sequence
  Description of Artificial Sequence: Synthetic oligonucleotide
ccccgggugcucauuauuu

SEQ ID NO: 2474926 - RNA, 19 nt, Artificial Sequence
  Description of Artificial Sequence: Synthetic oligonucleotide
cgggauguaacaccucauu

SEQ ID NO: 2474927 - RNA, 19 nt, Artificial Sequence
  Description of Artificial Sequence: Synthetic oligonucleotide
cccgggugcucauuauuuu

SEQ ID NO: 2474928 - RNA, 19 nt, Artificial Sequence
  Description of Artificial Sequence: Synthetic oligonucleotide
gccccgggugcucauuauu

SEQ ID NO: 2474929 - RNA, 19 nt, Artificial Sequence
  Description of Artificial Sequence: Synthetic oligonucleotide
cuccuucaucagugacauu

SEQ ID NO: 2474930 - RNA, 19 nt, Artificial Sequence
  Description of Artificial Sequence: Synthetic oligonucleotide
ggccccgggugcucauuau

SEQ ID NO: 2474931 - RNA, 19 nt, Artificial Sequence
  Description of Artificial Sequence: Synthetic oligonucleotide
cggccccgggugcucauua

SEQ ID NO: 2474932 - RNA, 19 nt, Artificial Sequence
  Description of Artificial Sequence: Synthetic oligonucleotide
ccggccccgggugcucauu

SEQ ID NO: 2474933 - RNA, 19 nt, Artificial Sequence
  Description of Artificial Sequence: Synthetic oligonucleotide
uucuugaaaggguacaugg

SEQ ID NO: 2474934 - RNA, 19 nt, Artificial Sequence
  Description of Artificial Sequence: Synthetic oligonucleotide
uucucuaggacuaagcaca

SEQ ID NO: 2474935 - RNA, 19 nt, Artificial Sequence
  Description of Artificial Sequence: Synthetic oligonucleotide
auuugaucuccucaaacac

SEQ ID NO: 2474936 - RNA, 19 nt, Artificial Sequence
  Description of Artificial Sequence: Synthetic oligonucleotide
uuuaccagggaccagguac

SEQ ID NO: 2474937 - RNA, 19 nt, Artificial Sequence
  Description of Artificial Sequence: Synthetic oligonucleotide
aauacuuuguuguccaggu

SEQ ID NO: 2474938 - RNA, 19 nt, Artificial Sequence
  Description of Artificial Sequence: Synthetic oligonucleotide
cauguugccauccucaucc

SEQ ID NO: 2474939 - RNA, 19 nt, Artificial Sequence
  Description of Artificial Sequence: Synthetic oligonucleotide
aggaacugcauguaggugg

SEQ ID NO: 2474940 - RNA, 19 nt, Artificial Sequence
  Description of Artificial Sequence: Synthetic oligonucleotide
acugaugaagcucucauug

SEQ ID NO: 2474941 - RNA, 19 nt, Artificial Sequence
  Description of Artificial Sequence: Synthetic oligonucleotide
aucauuuccacagggaagc

SEQ ID NO: 2474942 - RNA, 19 nt, Artificial Sequence
  Description of Artificial Sequence: Synthetic oligonucleotide
uccucaaacacaaacugga

SEQ ID NO: 2474943 - RNA, 19 nt, Artificial Sequence
  Description of Artificial Sequence: Synthetic oligonucleotide
gagcgaaauggacagaggg

SEQ ID NO: 2474944 - RNA, 19 nt, Artificial Sequence
  Description of Artificial Sequence: Synthetic oligonucleotide
uacuuuguuguccaggucu

SEQ ID NO: 2474945 - RNA, 19 nt, Artificial Sequence
  Description of Artificial Sequence: Synthetic oligonucleotide
cuugaaaggguacauggcc

SEQ ID NO: 2474946 - RNA, 19 nt, Artificial Sequence
  Description of Artificial Sequence: Synthetic oligonucleotide
ucuccucaaacacaaacug

SEQ ID NO: 2474947 - RNA, 19 nt, Artificial Sequence
  Description of Artificial Sequence: Synthetic oligonucleotide
ugaugaagcucucauugag

SEQ ID NO: 2474948 - RNA, 19 nt, Artificial Sequence
  Description of Artificial Sequence: Synthetic oligonucleotide
aaaggcuuccgugaauggc

SEQ ID NO: 2474949 - RNA, 19 nt, Artificial Sequence
  Description of Artificial Sequence: Synthetic oligonucleotide
uaggacuaagcacacuagg

SEQ ID NO: 2474950 - RNA, 19 nt, Artificial Sequence
  Description of Artificial Sequence: Synthetic oligonucleotide
gaagcugaauacuuuguug

SEQ ID NO: 2474951 - RNA, 19 nt, Artificial Sequence
  Description of Artificial Sequence: Synthetic oligonucleotide
uggacagagggcacuaugg

SEQ ID NO: 2474952 - RNA, 19 nt, Artificial Sequence
  Description of Artificial Sequence: Synthetic oligonucleotide
aauggcagguagcugaccu

SEQ ID NO: 2474953 - RNA, 19 nt, Artificial Sequence
  Description of Artificial Sequence: Synthetic oligonucleotide
uugaggagcgugaggaugg

SEQ ID NO: 2474954 - RNA, 19 nt, Artificial Sequence
  Description of Artificial Sequence: Synthetic oligonucleotide
gaagcucucauugaggagc

SEQ ID NO: 2474955 - RNA, 19 nt, Artificial Sequence
  Description of Artificial Sequence: Synthetic oligonucleotide
uccagagcgaaauggacag

SEQ ID NO: 2474956 - RNA, 19 nt, Artificial Sequence
  Description of Artificial Sequence: Synthetic oligonucleotide
uagcugaccuucuugaaag

SEQ ID NO: 2474957 - RNA, 19 nt, Artificial Sequence
  Description of Artificial Sequence: Synthetic oligonucleotide
ucuaggacuaagcacacua

SEQ ID NO: 2474958 - RNA, 19 nt, Artificial Sequence
  Description of Artificial Sequence: Synthetic oligonucleotide
uuugaucuccucaaacaca

SEQ ID NO: 2474959 - RNA, 19 nt, Artificial Sequence
  Description of Artificial Sequence: Synthetic oligonucleotide
uccaggaucacagagggca

SEQ ID NO: 2474960 - RNA, 19 nt, Artificial Sequence
  Description of Artificial Sequence: Synthetic oligonucleotide
cauccaggaucacagaggg

SEQ ID NO: 2474961 - RNA, 19 nt, Artificial Sequence
  Description of Artificial Sequence: Synthetic oligonucleotide
uguggaaccugucugccug

SEQ ID NO: 2474962 - RNA, 19 nt, Artificial Sequence
  Description of Artificial Sequence: Synthetic oligonucleotide
uugaaaggguacauggcca

SEQ ID NO: 2474963 - RNA, 19 nt, Artificial Sequence
  Description of Artificial Sequence: Synthetic oligonucleotide
ugagguggggaccauuucc

SEQ ID NO: 2474964 - RNA, 19 nt, Artificial Sequence
  Description of Artificial Sequence: Synthetic oligonucleotide
aaugcacaaguuuguucuc

SEQ ID NO: 2474965 - RNA, 19 nt, Artificial Sequence
  Description of Artificial Sequence: Synthetic oligonucleotide
ucuugaaaggguacauggc

SEQ ID NO: 2474966 - RNA, 19 nt, Artificial Sequence
  Description of Artificial Sequence: Synthetic oligonucleotide
uuucucuaggacuaagcac

SEQ ID NO: 2474967 - RNA, 19 nt, Artificial Sequence
  Description of Artificial Sequence: Synthetic oligonucleotide
agugccguugggcagacag

SEQ ID NO: 2474968 - RNA, 19 nt, Artificial Sequence
  Description of Artificial Sequence: Synthetic oligonucleotide
ugugguggaccacagugcc

SEQ ID NO: 2474969 - RNA, 19 nt, Artificial Sequence
  Description of Artificial Sequence: Synthetic oligonucleotide
cucaggaacugcauguagg

SEQ ID NO: 2474970 - RNA, 19 nt, Artificial Sequence
  Description of Artificial Sequence: Synthetic oligonucleotide
cauuuccagagcgaaaugg

SEQ ID NO: 2474971 - RNA, 19 nt, Artificial Sequence
  Description of Artificial Sequence: Synthetic oligonucleotide
aaucauguugccauccuca

SEQ ID NO: 2474972 - RNA, 19 nt, Artificial Sequence
  Description of Artificial Sequence: Synthetic oligonucleotide
uucuccugagggcaggcgg

SEQ ID NO: 2474973 - RNA, 19 nt, Artificial Sequence
  Description of Artificial Sequence: Synthetic oligonucleotide
cuuggagcucucuaggaag

SEQ ID NO: 2474974 - RNA, 19 nt, Artificial Sequence
  Description of Artificial Sequence: Synthetic oligonucleotide
uacuucuccagaugcaagc

SEQ ID NO: 2474975 - RNA, 19 nt, Artificial Sequence
  Description of Artificial Sequence: Synthetic oligonucleotide
uuccagagcgaaauggaca

SEQ ID NO: 2474976 - RNA, 19 nt, Artificial Sequence
  Description of Artificial Sequence: Synthetic oligonucleotide
ucaggcuucauggagguga

SEQ ID NO: 2474977 - RNA, 19 nt, Artificial Sequence
  Description of Artificial Sequence: Synthetic oligonucleotide
ugcacaaguuuguucuccg

SEQ ID NO: 2474978 - RNA, 19 nt, Artificial Sequence
  Description of Artificial Sequence: Synthetic oligonucleotide
cuguaggucuuccaguucc

SEQ ID NO: 2474979 - RNA, 19 nt, Artificial Sequence
  Description of Artificial Sequence: Synthetic oligonucleotide
aguuucucuaggacuaagc

SEQ ID NO: 2474980 - RNA, 19 nt, Artificial Sequence
  Description of Artificial Sequence: Synthetic oligonucleotide
gacggguccucaaaggucg

SEQ ID NO: 2474981 - RNA, 19 nt, Artificial Sequence
  Description of Artificial Sequence: Synthetic oligonucleotide
gaccaucauuuccacaggg

SEQ ID NO: 2474982 - RNA, 19 nt, Artificial Sequence
  Description of Artificial Sequence: Synthetic oligonucleotide
uguagguggcuguggacgg

SEQ ID NO: 2474983 - RNA, 19 nt, Artificial Sequence
  Description of Artificial Sequence: Synthetic oligonucleotide
uccaguuucucuaggacua

SEQ ID NO: 2474984 - RNA, 19 nt, Artificial Sequence
  Description of Artificial Sequence: Synthetic oligonucleotide
guggggaccauuuccagag

SEQ ID NO: 2474985 - RNA, 19 nt, Artificial Sequence
  Description of Artificial Sequence: Synthetic oligonucleotide
uguggacggguccucaaag

SEQ ID NO: 2474986 - RNA, 19 nt, Artificial Sequence
  Description of Artificial Sequence: Synthetic oligonucleotide
ucgaggagaagcugaauac

SEQ ID NO: 2474987 - RNA, 19 nt, Artificial Sequence
  Description of Artificial Sequence: Synthetic oligonucleotide
auguagguggcuguggacg

SEQ ID NO: 2474988 - RNA, 19 nt, Artificial Sequence
  Description of Artificial Sequence: Synthetic oligonucleotide
acguguggaaccugucugc

SEQ ID NO: 2474989 - RNA, 19 nt, Artificial Sequence
  Description of Artificial Sequence: Synthetic oligonucleotide
uccuggugccauuugaucu

SEQ ID NO: 2474990 - RNA, 19 nt, Artificial Sequence
  Description of Artificial Sequence: Synthetic oligonucleotide
uuccgugaauggcagguag

SEQ ID NO: 2474991 - RNA, 19 nt, Artificial Sequence
  Description of Artificial Sequence: Synthetic oligonucleotide
uuuccagagcgaaauggac

SEQ ID NO: 2474992 - RNA, 19 nt, Artificial Sequence
  Description of Artificial Sequence: Synthetic oligonucleotide
cacaaguuuguucuccgcc

SEQ ID NO: 2474993 - RNA, 19 nt, Artificial Sequence
  Description of Artificial Sequence: Synthetic oligonucleotide
cauuugaucuccucaaaca

SEQ ID NO: 2474994 - RNA, 19 nt, Artificial Sequence
  Description of Artificial Sequence: Synthetic oligonucleotide
uccucaaaggucgaggaga

SEQ ID NO: 2474995 - RNA, 19 nt, Artificial Sequence
  Description of Artificial Sequence: Synthetic oligonucleotide
cagacagaccaucauuucc

SEQ ID NO: 2474996 - RNA, 19 nt, Artificial Sequence
  Description of Artificial Sequence: Synthetic oligonucleotide
agcgaaauggacagagggc

SEQ ID NO: 2474997 - RNA, 19 nt, Artificial Sequence
  Description of Artificial Sequence: Synthetic oligonucleotide
guuggcguugauguggugg

SEQ ID NO: 2474998 - RNA, 19 nt, Artificial Sequence
  Description of Artificial Sequence: Synthetic oligonucleotide
gacguguggaaccugucug

SEQ ID NO: 2474999 - RNA, 19 nt, Artificial Sequence
  Description of Artificial Sequence: Synthetic oligonucleotide
gugaauggcagguagcuga

SEQ ID NO: 2475000 - RNA, 19 nt, Artificial Sequence
  Description of Artificial Sequence: Synthetic oligonucleotide
aggacuaagcacacuaggg

SEQ ID NO: 2475001 - RNA, 19 nt, Artificial Sequence
  Description of Artificial Sequence: Synthetic oligonucleotide
aaacacaaacuggaggggu

SEQ ID NO: 2475002 - RNA, 19 nt, Artificial Sequence
  Description of Artificial Sequence: Synthetic oligonucleotide
acaaguuuguucuccgccu

SEQ ID NO: 2475003 - RNA, 19 nt, Artificial Sequence
  Description of Artificial Sequence: Synthetic oligonucleotide
guuucucuaggacuaagca

SEQ ID NO: 2475004 - RNA, 19 nt, Artificial Sequence
  Description of Artificial Sequence: Synthetic oligonucleotide
ucuaggaagccugggaaug

SEQ ID NO: 2475005 - RNA, 19 nt, Artificial Sequence
  Description of Artificial Sequence: Synthetic oligonucleotide
uauggcuccaggacgugug

SEQ ID NO: 2475006 - RNA, 19 nt, Artificial Sequence
  Description of Artificial Sequence: Synthetic oligonucleotide
agcugaauacuuuguuguc

SEQ ID NO: 2475007 - RNA, 19 nt, Artificial Sequence
  Description of Artificial Sequence: Synthetic oligonucleotide
augcacaaguuuguucucc

SEQ ID NO: 2475008 - RNA, 19 nt, Artificial Sequence
  Description of Artificial Sequence: Synthetic oligonucleotide
ggacuggucauccagggcc

SEQ ID NO: 2475009 - RNA, 19 nt, Artificial Sequence
  Description of Artificial Sequence: Synthetic oligonucleotide
agcaggacuggucauccag

SEQ ID NO: 2475010 - RNA, 19 nt, Artificial Sequence
  Description of Artificial Sequence: Synthetic oligonucleotide
uuaccagggaccagguacu

SEQ ID NO: 2475011 - RNA, 19 nt, Artificial Sequence
  Description of Artificial Sequence: Synthetic oligonucleotide
ucaaucauguugccauccu

SEQ ID NO: 2475012 - RNA, 19 nt, Artificial Sequence
  Description of Artificial Sequence: Synthetic oligonucleotide
gaaguaguuggcguugaug

SEQ ID NO: 2475013 - RNA, 19 nt, Artificial Sequence
  Description of Artificial Sequence: Synthetic oligonucleotide
uuccaggacggucucccgg

SEQ ID NO: 2475014 - RNA, 19 nt, Artificial Sequence
  Description of Artificial Sequence: Synthetic oligonucleotide
ugaccuucuugaaagggua

SEQ ID NO: 2475015 - RNA, 19 nt, Artificial Sequence
  Description of Artificial Sequence: Synthetic oligonucleotide
ggacuaagcacacuagggc

SEQ ID NO: 2475016 - RNA, 19 nt, Artificial Sequence
  Description of Artificial Sequence: Synthetic oligonucleotide
auggaggugauguccagga

SEQ ID NO: 2475017 - RNA, 19 nt, Artificial Sequence
  Description of Artificial Sequence: Synthetic oligonucleotide
aaacuggagggguucuccu

SEQ ID NO: 2475018 - RNA, 19 nt, Artificial Sequence
  Description of Artificial Sequence: Synthetic oligonucleotide
uguacuucuccagaugcaa

SEQ ID NO: 2475019 - RNA, 19 nt, Artificial Sequence
  Description of Artificial Sequence: Synthetic oligonucleotide
ggagaagcugaauacuuug

SEQ ID NO: 2475020 - RNA, 19 nt, Artificial Sequence
  Description of Artificial Sequence: Synthetic oligonucleotide
gaugggcgggcuuuccagg

SEQ ID NO: 2475021 - RNA, 19 nt, Artificial Sequence
  Description of Artificial Sequence: Synthetic oligonucleotide
cacacuagggcuccaggag

SEQ ID NO: 2475022 - RNA, 19 nt, Artificial Sequence
  Description of Artificial Sequence: Synthetic oligonucleotide
uggacggguccucaaaggu

SEQ ID NO: 2475023 - RNA, 19 nt, Artificial Sequence
  Description of Artificial Sequence: Synthetic oligonucleotide
ugaauacuuuguuguccag

SEQ ID NO: 2475024 - RNA, 19 nt, Artificial Sequence
  Description of Artificial Sequence: Synthetic oligonucleotide
aacuggagggguucuccug

SEQ ID NO: 2475025 - RNA, 19 nt, Artificial Sequence
  Description of Artificial Sequence: Synthetic oligonucleotide
acuaagcacacuagggcuc

SEQ ID NO: 2475026 - RNA, 19 nt, Artificial Sequence
  Description of Artificial Sequence: Synthetic oligonucleotide
uuguuguccaggucuucag

SEQ ID NO: 2475027 - RNA, 19 nt, Artificial Sequence
  Description of Artificial Sequence: Synthetic oligonucleotide
agaccaucauuuccacagg

SEQ ID NO: 2475028 - RNA, 19 nt, Artificial Sequence
  Description of Artificial Sequence: Synthetic oligonucleotide
gaaccugucugccugucuc

SEQ ID NO: 2475029 - RNA, 19 nt, Artificial Sequence
  Description of Artificial Sequence: Synthetic oligonucleotide
agguagcugaccuucuuga

SEQ ID NO: 2475030 - RNA, 19 nt, Artificial Sequence
  Description of Artificial Sequence: Synthetic oligonucleotide
gcuguacuucuccagaugc

SEQ ID NO: 2475031 - RNA, 19 nt, Artificial Sequence
  Description of Artificial Sequence: Synthetic oligonucleotide
accucagcaggacugguca

SEQ ID NO: 2475032 - RNA, 19 nt, Artificial Sequence
  Description of Artificial Sequence: Synthetic oligonucleotide
uuggcguugauguggugga

SEQ ID NO: 2475033 - RNA, 19 nt, Artificial Sequence
  Description of Artificial Sequence: Synthetic oligonucleotide
gcggcugucaaucauguug

SEQ ID NO: 2475034 - RNA, 19 nt, Artificial Sequence
  Description of Artificial Sequence: Synthetic oligonucleotide
auugaggagcgugaggaug

SEQ ID NO: 2475035 - RNA, 19 nt, Artificial Sequence
  Description of Artificial Sequence: Synthetic oligonucleotide
agcgcguucuccugcuggc

SEQ ID NO: 2475036 - RNA, 19 nt, Artificial Sequence
  Description of Artificial Sequence: Synthetic oligonucleotide
agaagcugaauacuuuguu

SEQ ID NO: 2475037 - RNA, 19 nt, Artificial Sequence
  Description of Artificial Sequence: Synthetic oligonucleotide
auacuuuguuguccagguc

SEQ ID NO: 2475038 - RNA, 19 nt, Artificial Sequence
  Description of Artificial Sequence: Synthetic oligonucleotide
cagagcgaaauggacagag

SEQ ID NO: 2475039 - RNA, 19 nt, Artificial Sequence
  Description of Artificial Sequence: Synthetic oligonucleotide
aagccugccagcugucugu

SEQ ID NO: 2475040 - RNA, 19 nt, Artificial Sequence
  Description of Artificial Sequence: Synthetic oligonucleotide
gacuaagcacacuagggcu

SEQ ID NO: 2475041 - RNA, 19 nt, Artificial Sequence
  Description of Artificial Sequence: Synthetic oligonucleotide
augugguggaccacagugc

SEQ ID NO: 2475042 - RNA, 19 nt, Artificial Sequence
  Description of Artificial Sequence: Synthetic oligonucleotide
ucucaccagguccaguuuc

SEQ ID NO: 2475043 - RNA, 19 nt, Artificial Sequence
  Description of Artificial Sequence: Synthetic oligonucleotide
uccgccccgaaccucagca

SEQ ID NO: 2475044 - RNA, 19 nt, Artificial Sequence
  Description of Artificial Sequence: Synthetic oligonucleotide
cacuagggcuccaggaggg

SEQ ID NO: 2475045 - RNA, 19 nt, Artificial Sequence
  Description of Artificial Sequence: Synthetic oligonucleotide
aagcucucauugaggagcg

SEQ ID NO: 2475046 - RNA, 19 nt, Artificial Sequence
  Description of Artificial Sequence: Synthetic oligonucleotide
cauggccaccucuaggcgc

SEQ ID NO: 2475047 - RNA, 19 nt, Artificial Sequence
  Description of Artificial Sequence: Synthetic oligonucleotide
aaaggucgaggagaagcug

SEQ ID NO: 2475048 - RNA, 19 nt, Artificial Sequence
  Description of Artificial Sequence: Synthetic oligonucleotide
accauuuccagagcgaaau

SEQ ID NO: 2475049 - RNA, 19 nt, Artificial Sequence
  Description of Artificial Sequence: Synthetic oligonucleotide
uccgugaauggcagguagc

SEQ ID NO: 2475050 - RNA, 19 nt, Artificial Sequence
  Description of Artificial Sequence: Synthetic oligonucleotide
agacagaccaucauuucca

SEQ ID NO: 2475051 - RNA, 19 nt, Artificial Sequence
  Description of Artificial Sequence: Synthetic oligonucleotide
caggacuggucauccaggg

SEQ ID NO: 2475052 - RNA, 19 nt, Artificial Sequence
  Description of Artificial Sequence: Synthetic oligonucleotide
ggagaguccgccccgaacc

SEQ ID NO: 2475053 - RNA, 19 nt, Artificial Sequence
  Description of Artificial Sequence: Synthetic oligonucleotide
gaagccugggaaugaggug

SEQ ID NO: 2475054 - RNA, 19 nt, Artificial Sequence
  Description of Artificial Sequence: Synthetic oligonucleotide
agcacacuagggcuccagg

SEQ ID NO: 2475055 - RNA, 19 nt, Artificial Sequence
  Description of Artificial Sequence: Synthetic oligonucleotide
aaggucgaggagaagcuga

SEQ ID NO: 2475056 - RNA, 19 nt, Artificial Sequence
  Description of Artificial Sequence: Synthetic oligonucleotide
ucucauugaggagcgugag

SEQ ID NO: 2475057 - RNA, 19 nt, Artificial Sequence
  Description of Artificial Sequence: Synthetic oligonucleotide
auggacagagggcacuaug

SEQ ID NO: 2475058 - RNA, 19 nt, Artificial Sequence
  Description of Artificial Sequence: Synthetic oligonucleotide
ucuccagaugcaagccugc

SEQ ID NO: 2475059 - RNA, 19 nt, Artificial Sequence
  Description of Artificial Sequence: Synthetic oligonucleotide
ugucucaccagguccaguu

SEQ ID NO: 2475060 - RNA, 19 nt, Artificial Sequence
  Description of Artificial Sequence: Synthetic oligonucleotide
acauggccaccucuaggcg

SEQ ID NO: 2475061 - RNA, 19 nt, Artificial Sequence
  Description of Artificial Sequence: Synthetic oligonucleotide
uugggcagacagaccauca

SEQ ID NO: 2475062 - RNA, 19 nt, Artificial Sequence
  Description of Artificial Sequence: Synthetic oligonucleotide
ccucaguuggccuuggagc

SEQ ID NO: 2475063 - RNA, 19 nt, Artificial Sequence
  Description of Artificial Sequence: Synthetic oligonucleotide
gagcgcguucuccugcugg

SEQ ID NO: 2475064 - RNA, 19 nt, Artificial Sequence
  Description of Artificial Sequence: Synthetic oligonucleotide
guggacggguccucaaagg

SEQ ID NO: 2475065 - RNA, 19 nt, Artificial Sequence
  Description of Artificial Sequence: Synthetic oligonucleotide
auuuccagagcgaaaugga

SEQ ID NO: 2475066 - RNA, 19 nt, Artificial Sequence
  Description of Artificial Sequence: Synthetic oligonucleotide
augcaagccugccagcugu

SEQ ID NO: 2475067 - RNA, 19 nt, Artificial Sequence
  Description of Artificial Sequence: Synthetic oligonucleotide
gagucccucccucaggaac

SEQ ID NO: 2475068 - RNA, 19 nt, Artificial Sequence
  Description of Artificial Sequence: Synthetic oligonucleotide
gaugcaagccugccagcug

SEQ ID NO: 2475069 - RNA, 19 nt, Artificial Sequence
  Description of Artificial Sequence: Synthetic oligonucleotide
cugucaaaggcuuccguga

SEQ ID NO: 2475070 - RNA, 19 nt, Artificial Sequence
  Description of Artificial Sequence: Synthetic oligonucleotide
caaacuggagggguucucc

SEQ ID NO: 2475071 - RNA, 19 nt, Artificial Sequence
  Description of Artificial Sequence: Synthetic oligonucleotide
gcacuauggcuccaggacg

SEQ ID NO: 2475072 - RNA, 19 nt, Artificial Sequence
  Description of Artificial Sequence: Synthetic oligonucleotide
cuccaggacguguggaacc

SEQ ID NO: 2475073 - RNA, 19 nt, Artificial Sequence
  Description of Artificial Sequence: Synthetic oligonucleotide
ugguggaccacagugccgu

SEQ ID NO: 2475074 - RNA, 19 nt, Artificial Sequence
  Description of Artificial Sequence: Synthetic oligonucleotide
agcugaccuucuugaaagg

SEQ ID NO: 2475075 - RNA, 19 nt, Artificial Sequence
  Description of Artificial Sequence: Synthetic oligonucleotide
gucaaucauguugccaucc

SEQ ID NO: 2475076 - RNA, 19 nt, Artificial Sequence
  Description of Artificial Sequence: Synthetic oligonucleotide
aaccucagcaggacugguc

SEQ ID NO: 2475077 - RNA, 19 nt, Artificial Sequence
  Description of Artificial Sequence: Synthetic oligonucleotide
ggcacuauggcuccaggac

SEQ ID NO: 2475078 - RNA, 19 nt, Artificial Sequence
  Description of Artificial Sequence: Synthetic oligonucleotide
ccagaugcaagccugccag

SEQ ID NO: 2475079 - RNA, 19 nt, Artificial Sequence
  Description of Artificial Sequence: Synthetic oligonucleotide
uaguuggcguugauguggu

SEQ ID NO: 2475080 - RNA, 19 nt, Artificial Sequence
  Description of Artificial Sequence: Synthetic oligonucleotide
ucauggaggugauguccag

SEQ ID NO: 2475081 - RNA, 19 nt, Artificial Sequence
  Description of Artificial Sequence: Synthetic oligonucleotide
accagguacugaugaagcu

SEQ ID NO: 2475082 - RNA, 19 nt, Artificial Sequence
  Description of Artificial Sequence: Synthetic oligonucleotide
ggggaccauuuccagagcg

SEQ ID NO: 2475083 - RNA, 19 nt, Artificial Sequence
  Description of Artificial Sequence: Synthetic oligonucleotide
cuccugcuggcucuguagg

SEQ ID NO: 2475084 - RNA, 19 nt, Artificial Sequence
  Description of Artificial Sequence: Synthetic oligonucleotide
gucgaggagaagcugaaua

SEQ ID NO: 2475085 - RNA, 19 nt, Artificial Sequence
  Description of Artificial Sequence: Synthetic oligonucleotide
gcugaauacuuuguugucc

SEQ ID NO: 2475086 - RNA, 19 nt, Artificial Sequence
  Description of Artificial Sequence: Synthetic oligonucleotide
uuuccaggacggucucccg

SEQ ID NO: 2475087 - RNA, 19 nt, Artificial Sequence
  Description of Artificial Sequence: Synthetic oligonucleotide
guugaugugguggaccaca

SEQ ID NO: 2475088 - RNA, 19 nt, Artificial Sequence
  Description of Artificial Sequence: Synthetic oligonucleotide
uccaggacggucucccgga

SEQ ID NO: 2475089 - RNA, 19 nt, Artificial Sequence
  Description of Artificial Sequence: Synthetic oligonucleotide
guagcugaccuucuugaaa

SEQ ID NO: 2475090 - RNA, 19 nt, Artificial Sequence
  Description of Artificial Sequence: Synthetic oligonucleotide
ugccguugggcagacagac

SEQ ID NO: 2475091 - RNA, 19 nt, Artificial Sequence
  Description of Artificial Sequence: Synthetic oligonucleotide
cauggaggugauguccagg

SEQ ID NO: 2475092 - RNA, 19 nt, Artificial Sequence
  Description of Artificial Sequence: Synthetic oligonucleotide
ggaaugcacaaguuuguuc

SEQ ID NO: 2475093 - RNA, 19 nt, Artificial Sequence
  Description of Artificial Sequence: Synthetic oligonucleotide
uguggagcgcguucuccug

SEQ ID NO: 2475094 - RNA, 19 nt, Artificial Sequence
  Description of Artificial Sequence: Synthetic oligonucleotide
gugccauuugaucuccuca

SEQ ID NO: 2475095 - RNA, 19 nt, Artificial Sequence
  Description of Artificial Sequence: Synthetic oligonucleotide
cagguagcugaccuucuug

SEQ ID NO: 2475096 - RNA, 19 nt, Artificial Sequence
  Description of Artificial Sequence: Synthetic oligonucleotide
guuccuuuaccagggacca

SEQ ID NO: 2475097 - RNA, 19 nt, Artificial Sequence
  Description of Artificial Sequence: Synthetic oligonucleotide
agaugcaagccugccagcu

SEQ ID NO: 2475098 - RNA, 19 nt, Artificial Sequence
  Description of Artificial Sequence: Synthetic oligonucleotide
agagcgaaauggacagagg

SEQ ID NO: 2475099 - RNA, 19 nt, Artificial Sequence
  Description of Artificial Sequence: Synthetic oligonucleotide
aaauggacagagggcacua

SEQ ID NO: 2475100 - RNA, 19 nt, Artificial Sequence
  Description of Artificial Sequence: Synthetic oligonucleotide
cugucugccugucucacca

SEQ ID NO: 2475101 - RNA, 19 nt, Artificial Sequence
  Description of Artificial Sequence: Synthetic oligonucleotide
gguacauggccaccucuag

SEQ ID NO: 2475102 - RNA, 19 nt, Artificial Sequence
  Description of Artificial Sequence: Synthetic oligonucleotide
ggaggggcaggccacgccg

SEQ ID NO: 2475103 - RNA, 19 nt, Artificial Sequence
  Description of Artificial Sequence: Synthetic oligonucleotide
ugaugugguggaccacagu

SEQ ID NO: 2475104 - RNA, 19 nt, Artificial Sequence
  Description of Artificial Sequence: Synthetic oligonucleotide
guccucaaaggucgaggag

SEQ ID NO: 2475105 - RNA, 19 nt, Artificial Sequence
  Description of Artificial Sequence: Synthetic oligonucleotide
agcuccuggugccauuuga

SEQ ID NO: 2475106 - RNA, 19 nt, Artificial Sequence
  Description of Artificial Sequence: Synthetic oligonucleotide
ugucuguggagcgcguucu

SEQ ID NO: 2475107 - RNA, 19 nt, Artificial Sequence
  Description of Artificial Sequence: Synthetic oligonucleotide
auggaaugcacaaguuugu

SEQ ID NO: 2475108 - RNA, 19 nt, Artificial Sequence
  Description of Artificial Sequence: Synthetic oligonucleotide
aacacaaacuggagggguu

SEQ ID NO: 2475109 - RNA, 19 nt, Artificial Sequence
  Description of Artificial Sequence: Synthetic oligonucleotide
cugaugaagcucucauuga

SEQ ID NO: 2475110 - RNA, 19 nt, Artificial Sequence
  Description of Artificial Sequence: Synthetic oligonucleotide
aagauggaaugcacaaguu

SEQ ID NO: 2475111 - RNA, 19 nt, Artificial Sequence
  Description of Artificial Sequence: Synthetic oligonucleotide
ggacagagggcacuauggc

SEQ ID NO: 2475112 - RNA, 19 nt, Artificial Sequence
  Description of Artificial Sequence: Synthetic oligonucleotide
acaaacuggagggguucuc

SEQ ID NO: 2475113 - RNA, 19 nt, Artificial Sequence
  Description of Artificial Sequence: Synthetic oligonucleotide
gcugaccuucuugaaaggg

SEQ ID NO: 2475114 - RNA, 19 nt, Artificial Sequence
  Description of Artificial Sequence: Synthetic oligonucleotide
accuucuugaaaggguaca

SEQ ID NO: 2475115 - RNA, 19 nt, Artificial Sequence
  Description of Artificial Sequence: Synthetic oligonucleotide
agcgugaggaugggcgggc

SEQ ID NO: 2475116 - RNA, 19 nt, Artificial Sequence
  Description of Artificial Sequence: Synthetic oligonucleotide
ccugucaaaggcuuccgug

SEQ ID NO: 2475117 - RNA, 19 nt, Artificial Sequence
  Description of Artificial Sequence: Synthetic oligonucleotide
ccauuugaucuccucaaac

SEQ ID NO: 2475118 - RNA, 19 nt, Artificial Sequence
  Description of Artificial Sequence: Synthetic oligonucleotide
agggcacuauggcuccagg

SEQ ID NO: 2475119 - RNA, 19 nt, Artificial Sequence
  Description of Artificial Sequence: Synthetic oligonucleotide
gcgaaauggacagagggca

SEQ ID NO: 2475120 - RNA, 19 nt, Artificial Sequence
  Description of Artificial Sequence: Synthetic oligonucleotide
agguggggaccauuuccag

SEQ ID NO: 2475121 - RNA, 19 nt, Artificial Sequence
  Description of Artificial Sequence: Synthetic oligonucleotide
cauuuccacagggaagcug

SEQ ID NO: 2475122 - RNA, 19 nt, Artificial Sequence
  Description of Artificial Sequence: Synthetic oligonucleotide
gacggucucccggagaguc

SEQ ID NO: 2475123 - RNA, 19 nt, Artificial Sequence
  Description of Artificial Sequence: Synthetic oligonucleotide
gacuggucauccagggccc

SEQ ID NO: 2475124 - RNA, 19 nt, Artificial Sequence
  Description of Artificial Sequence: Synthetic oligonucleotide
gagguggggaccauuucca

SEQ ID NO: 2475125 - RNA, 19 nt, Artificial Sequence
  Description of Artificial Sequence: Synthetic oligonucleotide
ucccggagaguccgccccg

SEQ ID NO: 2475126 - RNA, 19 nt, Artificial Sequence
  Description of Artificial Sequence: Synthetic oligonucleotide
cuaggcgccuggcagcuuc

SEQ ID NO: 2475127 - RNA, 19 nt, Artificial Sequence
  Description of Artificial Sequence: Synthetic oligonucleotide
gaggugauguccaggaagu

SEQ ID NO: 2475128 - RNA, 19 nt, Artificial Sequence
  Description of Artificial Sequence: Synthetic oligonucleotide
cucucuaggaagccuggga

SEQ ID NO: 2475129 - RNA, 19 nt, Artificial Sequence
  Description of Artificial Sequence: Synthetic oligonucleotide
gagcgugaggaugggcggg

SEQ ID NO: 2475130 - RNA, 19 nt, Artificial Sequence
  Description of Artificial Sequence: Synthetic oligonucleotide
uccaggacguguggaaccu

SEQ ID NO: 2475131 - RNA, 19 nt, Artificial Sequence
  Description of Artificial Sequence: Synthetic oligonucleotide
ggaugggcgggcuuuccag

SEQ ID NO: 2475132 - RNA, 19 nt, Artificial Sequence
  Description of Artificial Sequence: Synthetic oligonucleotide
cagguacugaugaagcucu

SEQ ID NO: 2475133 - RNA, 19 nt, Artificial Sequence
  Description of Artificial Sequence: Synthetic oligonucleotide
accugucugccugucucac

SEQ ID NO: 2475134 - RNA, 19 nt, Artificial Sequence
  Description of Artificial Sequence: Synthetic oligonucleotide
cucaguuggccuuggagcu

SEQ ID NO: 2475135 - RNA, 19 nt, Artificial Sequence
  Description of Artificial Sequence: Synthetic oligonucleotide
uggaaugcacaaguuuguu

SEQ ID NO: 2475136 - RNA, 19 nt, Artificial Sequence
  Description of Artificial Sequence: Synthetic oligonucleotide
gaccuucuugaaaggguac

SEQ ID NO: 2475137 - RNA, 19 nt, Artificial Sequence
  Description of Artificial Sequence: Synthetic oligonucleotide
ucucccggagaguccgccc

SEQ ID NO: 2475138 - RNA, 19 nt, Artificial Sequence
  Description of Artificial Sequence: Synthetic oligonucleotide
gccucaguuggccuuggag

SEQ ID NO: 2475139 - RNA, 19 nt, Artificial Sequence
  Description of Artificial Sequence: Synthetic oligonucleotide
ugucugccugucucaccag

SEQ ID NO: 2475140 - RNA, 19 nt, Artificial Sequence
  Description of Artificial Sequence: Synthetic oligonucleotide
uuccacagggaagcuguac

SEQ ID NO: 2475141 - RNA, 19 nt, Artificial Sequence
  Description of Artificial Sequence: Synthetic oligonucleotide
uggggaccauuuccagagc

SEQ ID NO: 2475142 - RNA, 19 nt, Artificial Sequence
  Description of Artificial Sequence: Synthetic oligonucleotide
cagaugcaagccugccagc

SEQ ID NO: 2475143 - RNA, 19 nt, Artificial Sequence
  Description of Artificial Sequence: Synthetic oligonucleotide
cacagggaagcuguacuuc

SEQ ID NO: 2475144 - RNA, 19 nt, Artificial Sequence
  Description of Artificial Sequence: Synthetic oligonucleotide
aauggacagagggcacuau

SEQ ID NO: 2475145 - RNA, 19 nt, Artificial Sequence
  Description of Artificial Sequence: Synthetic oligonucleotide
caaaggucgaggagaagcu

SEQ ID NO: 2475146 - RNA, 19 nt, Artificial Sequence
  Description of Artificial Sequence: Synthetic oligonucleotide
gguccucaaaggucgagga

SEQ ID NO: 2475147 - RNA, 19 nt, Artificial Sequence
  Description of Artificial Sequence: Synthetic oligonucleotide
augggcgggcuuuccagga

SEQ ID NO: 2475148 - RNA, 19 nt, Artificial Sequence
  Description of Artificial Sequence: Synthetic oligonucleotide
agucccucccucaggaacu

SEQ ID NO: 2475149 - RNA, 19 nt, Artificial Sequence
  Description of Artificial Sequence: Synthetic oligonucleotide
cagcugucuguggagcgcg

SEQ ID NO: 2475150 - RNA, 19 nt, Artificial Sequence
  Description of Artificial Sequence: Synthetic oligonucleotide
cugucuguggagcgcguuc

SEQ ID NO: 2475151 - RNA, 19 nt, Artificial Sequence
  Description of Artificial Sequence: Synthetic oligonucleotide
caguuucucuaggacuaag

SEQ ID NO: 2475152 - RNA, 19 nt, Artificial Sequence
  Description of Artificial Sequence: Synthetic oligonucleotide
guggagcgcguucuccugc

SEQ ID NO: 2475153 - RNA, 19 nt, Artificial Sequence
  Description of Artificial Sequence: Synthetic oligonucleotide
aggaugggcgggcuuucca

SEQ ID NO: 2475154 - RNA, 19 nt, Artificial Sequence
  Description of Artificial Sequence: Synthetic oligonucleotide
ggguccucaaaggucgagg

SEQ ID NO: 2475155 - RNA, 19 nt, Artificial Sequence
  Description of Artificial Sequence: Synthetic oligonucleotide
cuggugccauuugaucucc

SEQ ID NO: 2475156 - RNA, 19 nt, Artificial Sequence
  Description of Artificial Sequence: Synthetic oligonucleotide
uggagcgcguucuccugcu

SEQ ID NO: 2475157 - RNA, 19 nt, Artificial Sequence
  Description of Artificial Sequence: Synthetic oligonucleotide
ucauuuccacagggaagcu

SEQ ID NO: 2475158 - RNA, 19 nt, Artificial Sequence
  Description of Artificial Sequence: Synthetic oligonucleotide
cggcugucaaucauguugc

SEQ ID NO: 2475159 - RNA, 19 nt, Artificial Sequence
  Description of Artificial Sequence: Synthetic oligonucleotide
gagaagcugaauacuuugu

SEQ ID NO: 2475160 - RNA, 19 nt, Artificial Sequence
  Description of Artificial Sequence: Synthetic oligonucleotide
auccaggaucacagagggc

SEQ ID NO: 2475161 - RNA, 19 nt, Artificial Sequence
  Description of Artificial Sequence: Synthetic oligonucleotide
cuggagggguucuccugag

SEQ ID NO: 2475162 - RNA, 19 nt, Artificial Sequence
  Description of Artificial Sequence: Synthetic oligonucleotide
guucuccugagggcaggcg

SEQ ID NO: 2475163 - RNA, 19 nt, Artificial Sequence
  Description of Artificial Sequence: Synthetic oligonucleotide
cagggaagcuguacuucuc

SEQ ID NO: 2475164 - RNA, 19 nt, Artificial Sequence
  Description of Artificial Sequence: Synthetic oligonucleotide
acgccggagucccucccuc

SEQ ID NO: 2475165 - RNA, 19 nt, Artificial Sequence
  Description of Artificial Sequence: Synthetic oligonucleotide
ccagcucagcuccuggugc

SEQ ID NO: 2475166 - RNA, 19 nt, Artificial Sequence
  Description of Artificial Sequence: Synthetic oligonucleotide
cucagcaggacuggucauc

SEQ ID NO: 2475167 - RNA, 19 nt, Artificial Sequence
  Description of Artificial Sequence: Synthetic oligonucleotide
gcucucauugaggagcgug

SEQ ID NO: 2475168 - RNA, 19 nt, Artificial Sequence
  Description of Artificial Sequence: Synthetic oligonucleotide
cuggcucuguaggucuucc

SEQ ID NO: 2475169 - RNA, 19 nt, Artificial Sequence
  Description of Artificial Sequence: Synthetic oligonucleotide
guagguggcuguggacggg

SEQ ID NO: 2475170 - RNA, 19 nt, Artificial Sequence
  Description of Artificial Sequence: Synthetic oligonucleotide
gcgccuggcagcuuccucc

SEQ ID NO: 2475171 - RNA, 19 nt, Artificial Sequence
  Description of Artificial Sequence: Synthetic oligonucleotide
gccagcugucuguggagcg

SEQ ID NO: 2475172 - RNA, 19 nt, Artificial Sequence
  Description of Artificial Sequence: Synthetic oligonucleotide
gugguggaccacagugccg

SEQ ID NO: 2475173 - RNA, 19 nt, Artificial Sequence
  Description of Artificial Sequence: Synthetic oligonucleotide
gggcgggcuuuccaggacg

SEQ ID NO: 2475174 - RNA, 19 nt, Artificial Sequence
  Description of Artificial Sequence: Synthetic oligonucleotide
agaguccgccccgaaccuc

SEQ ID NO: 2475175 - RNA, 19 nt, Artificial Sequence
  Description of Artificial Sequence: Synthetic oligonucleotide
ugggcgggcuuuccaggac

SEQ ID NO: 2475176 - RNA, 19 nt, Artificial Sequence
  Description of Artificial Sequence: Synthetic oligonucleotide
ggcguugaugugguggacc

SEQ ID NO: 2475177 - RNA, 19 nt, Artificial Sequence
  Description of Artificial Sequence: Synthetic oligonucleotide
acggucucccggagagucc

SEQ ID NO: 2475178 - RNA, 19 nt, Artificial Sequence
  Description of Artificial Sequence: Synthetic oligonucleotide
ccagguacugaugaagcuc

SEQ ID NO: 2475179 - RNA, 19 nt, Artificial Sequence
  Description of Artificial Sequence: Synthetic oligonucleotide
gcacaaguuuguucuccgc

SEQ ID NO: 2475180 - RNA, 19 nt, Artificial Sequence
  Description of Artificial Sequence: Synthetic oligonucleotide
ccuggugccauuugaucuc

SEQ ID NO: 2475181 - RNA, 19 nt, Artificial Sequence
  Description of Artificial Sequence: Synthetic oligonucleotide
cacuauggcuccaggacgu

SEQ ID NO: 2475182 - RNA, 19 nt, Artificial Sequence
  Description of Artificial Sequence: Synthetic oligonucleotide
ucaguuggccuuggagcuc

SEQ ID NO: 2475183 - RNA, 19 nt, Artificial Sequence
  Description of Artificial Sequence: Synthetic oligonucleotide
gguggggaccauuuccaga

SEQ ID NO: 2475184 - RNA, 19 nt, Artificial Sequence
  Description of Artificial Sequence: Synthetic oligonucleotide
aggacguguggaaccuguc

SEQ ID NO: 2475185 - RNA, 19 nt, Artificial Sequence
  Description of Artificial Sequence: Synthetic oligonucleotide
gcacacuagggcuccagga

SEQ ID NO: 2475186 - RNA, 19 nt, Artificial Sequence
  Description of Artificial Sequence: Synthetic oligonucleotide
cuaggaagccugggaauga

SEQ ID NO: 2475187 - RNA, 19 nt, Artificial Sequence
  Description of Artificial Sequence: Synthetic oligonucleotide
gaguccgccccgaaccuca

SEQ ID NO: 2475188 - RNA, 19 nt, Artificial Sequence
  Description of Artificial Sequence: Synthetic oligonucleotide
cuccaggaggggcaggcca

SEQ ID NO: 2475189 - RNA, 19 nt, Artificial Sequence
  Description of Artificial Sequence: Synthetic oligonucleotide
ccguugggcagacagacca

SEQ ID NO: 2475190 - RNA, 19 nt, Artificial Sequence
  Description of Artificial Sequence: Synthetic oligonucleotide
cucaaaggucgaggagaag

SEQ ID NO: 2475191 - RNA, 19 nt, Artificial Sequence
  Description of Artificial Sequence: Synthetic oligonucleotide
uaccagggaccagguacug

SEQ ID NO: 2475192 - RNA, 19 nt, Artificial Sequence
  Description of Artificial Sequence: Synthetic oligonucleotide
acagugccguugggcagac

SEQ ID NO: 2475193 - RNA, 19 nt, Artificial Sequence
  Description of Artificial Sequence: Synthetic oligonucleotide
guggaccacagugccguug

SEQ ID NO: 2475194 - RNA, 19 nt, Artificial Sequence
  Description of Artificial Sequence: Synthetic oligonucleotide
uucaggcuucauggaggug

SEQ ID NO: 2475195 - RNA, 19 nt, Artificial Sequence
  Description of Artificial Sequence: Synthetic oligonucleotide
uggugccauuugaucuccu

SEQ ID NO: 2475196 - RNA, 19 nt, Artificial Sequence
  Description of Artificial Sequence: Synthetic oligonucleotide
acuauggcuccaggacgug

SEQ ID NO: 2475197 - RNA, 19 nt, Artificial Sequence
  Description of Artificial Sequence: Synthetic oligonucleotide
agguacugaugaagcucuc

SEQ ID NO: 2475198 - RNA, 19 nt, Artificial Sequence
  Description of Artificial Sequence: Synthetic oligonucleotide
gccaccucuaggcgccugg

SEQ ID NO: 2475199 - RNA, 19 nt, Artificial Sequence
  Description of Artificial Sequence: Synthetic oligonucleotide
ccucuaggcgccuggcagc

SEQ ID NO: 2475200 - RNA, 19 nt, Artificial Sequence
  Description of Artificial Sequence: Synthetic oligonucleotide
ggaagccugggaaugaggu

SEQ ID NO: 2475201 - RNA, 19 nt, Artificial Sequence
  Description of Artificial Sequence: Synthetic oligonucleotide
ggcccugucaaaggcuucc

SEQ ID NO: 2475202 - RNA, 19 nt, Artificial Sequence
  Description of Artificial Sequence: Synthetic oligonucleotide
gcugucaaucauguugcca

SEQ ID NO: 2475203 - RNA, 19 nt, Artificial Sequence
  Description of Artificial Sequence: Synthetic oligonucleotide
gguagcugaccuucuugaa

SEQ ID NO: 2475204 - RNA, 19 nt, Artificial Sequence
  Description of Artificial Sequence: Synthetic oligonucleotide
gaccauuuccagagcgaaa

SEQ ID NO: 2475205 - RNA, 19 nt, Artificial Sequence
  Description of Artificial Sequence: Synthetic oligonucleotide
ccuggcagcuuccucccag

SEQ ID NO: 2475206 - RNA, 19 nt, Artificial Sequence
  Description of Artificial Sequence: Synthetic oligonucleotide
ggaccauuuccagagcgaa

SEQ ID NO: 2475207 - RNA, 19 nt, Artificial Sequence
  Description of Artificial Sequence: Synthetic oligonucleotide
ggcugucaaucauguugcc

SEQ ID NO: 2475208 - RNA, 19 nt, Artificial Sequence
  Description of Artificial Sequence: Synthetic oligonucleotide
gagaguccgccccgaaccu

SEQ ID NO: 2475209 - RNA, 19 nt, Artificial Sequence
  Description of Artificial Sequence: Synthetic oligonucleotide
cucaccagguccaguuucu

SEQ ID NO: 2475210 - RNA, 19 nt, Artificial Sequence
  Description of Artificial Sequence: Synthetic oligonucleotide
gucucccggagaguccgcc

SEQ ID NO: 2475211 - RNA, 19 nt, Artificial Sequence
  Description of Artificial Sequence: Synthetic oligonucleotide
uggaaccugucugccuguc

SEQ ID NO: 2475212 - RNA, 19 nt, Artificial Sequence
  Description of Artificial Sequence: Synthetic oligonucleotide
gggcacuauggcuccagga

SEQ ID NO: 2475213 - RNA, 19 nt, Artificial Sequence
  Description of Artificial Sequence: Synthetic oligonucleotide
ggcuuccgugaauggcagg

SEQ ID NO: 2475214 - RNA, 19 nt, Artificial Sequence
  Description of Artificial Sequence: Synthetic oligonucleotide
ccauuuccagagcgaaaug

SEQ ID NO: 2475215 - RNA, 19 nt, Artificial Sequence
  Description of Artificial Sequence: Synthetic oligonucleotide
ggacggguccucaaagguc

SEQ ID NO: 2475216 - RNA, 19 nt, Artificial Sequence
  Description of Artificial Sequence: Synthetic oligonucleotide
uccucccagcucagcuccu

SEQ ID NO: 2475217 - RNA, 19 nt, Artificial Sequence
  Description of Artificial Sequence: Synthetic oligonucleotide
ccaggaucacagagggcac

SEQ ID NO: 2475218 - RNA, 19 nt, Artificial Sequence
  Description of Artificial Sequence: Synthetic oligonucleotide
caggacguguggaaccugu

SEQ ID NO: 2475219 - RNA, 19 nt, Artificial Sequence
  Description of Artificial Sequence: Synthetic oligonucleotide
gccuuggagcucucuagga

SEQ ID NO: 2475220 - RNA, 19 nt, Artificial Sequence
  Description of Artificial Sequence: Synthetic oligonucleotide
ggcgggcuuuccaggacgg

SEQ ID NO: 2475221 - RNA, 19 nt, Artificial Sequence
  Description of Artificial Sequence: Synthetic oligonucleotide
cuguggagcgcguucuccu

SEQ ID NO: 2475222 - RNA, 19 nt, Artificial Sequence
  Description of Artificial Sequence: Synthetic oligonucleotide
ggacguguggaaccugucu

SEQ ID NO: 2475223 - RNA, 19 nt, Artificial Sequence
  Description of Artificial Sequence: Synthetic oligonucleotide
gucuguggagcgcguucuc

SEQ ID NO: 2475224 - RNA, 19 nt, Artificial Sequence
  Description of Artificial Sequence: Synthetic oligonucleotide
uggcguugaugugguggac

SEQ ID NO: 2475225 - RNA, 19 nt, Artificial Sequence
  Description of Artificial Sequence: Synthetic oligonucleotide
gccggagucccucccucag

SEQ ID NO: 2475226 - RNA, 19 nt, Artificial Sequence
  Description of Artificial Sequence: Synthetic oligonucleotide
cuuuaccagggaccaggua

SEQ ID NO: 2475227 - RNA, 19 nt, Artificial Sequence
  Description of Artificial Sequence: Synthetic oligonucleotide
ccucaaaggucgaggagaa

SEQ ID NO: 2475228 - RNA, 19 nt, Artificial Sequence
  Description of Artificial Sequence: Synthetic oligonucleotide
agccugccagcugucugug

SEQ ID NO: 2475229 - RNA, 19 nt, Artificial Sequence
  Description of Artificial Sequence: Synthetic oligonucleotide
uucuccgccuuggcccugu

SEQ ID NO: 2475230 - RNA, 19 nt, Artificial Sequence
  Description of Artificial Sequence: Synthetic oligonucleotide
gccauuugaucuccucaaa

SEQ ID NO: 2475231 - RNA, 19 nt, Artificial Sequence
  Description of Artificial Sequence: Synthetic oligonucleotide
ggcagacagaccaucauuu

SEQ ID NO: 2475232 - RNA, 19 nt, Artificial Sequence
  Description of Artificial Sequence: Synthetic oligonucleotide
aggggcaggccacgccgga

SEQ ID NO: 2475233 - RNA, 19 nt, Artificial Sequence
  Description of Artificial Sequence: Synthetic oligonucleotide
ggcuccaggacguguggaa

SEQ ID NO: 2475234 - RNA, 19 nt, Artificial Sequence
  Description of Artificial Sequence: Synthetic oligonucleotide
gggaccauuuccagagcga

SEQ ID NO: 2475235 - RNA, 19 nt, Artificial Sequence
  Description of Artificial Sequence: Synthetic oligonucleotide
cgaaccucagcaggacugg

SEQ ID NO: 2475236 - RNA, 19 nt, Artificial Sequence
  Description of Artificial Sequence: Synthetic oligonucleotide
gcuccaggacguguggaac

SEQ ID NO: 2475237 - RNA, 19 nt, Artificial Sequence
  Description of Artificial Sequence: Synthetic oligonucleotide
gcuuccgugaauggcaggu

SEQ ID NO: 2475238 - RNA, 19 nt, Artificial Sequence
  Description of Artificial Sequence: Synthetic oligonucleotide
ccacagcaagauggaaugc

SEQ ID NO: 2475239 - RNA, 19 nt, Artificial Sequence
  Description of Artificial Sequence: Synthetic oligonucleotide
gucccucccucaggaacug

SEQ ID NO: 2475240 - RNA, 19 nt, Artificial Sequence
  Description of Artificial Sequence: Synthetic oligonucleotide
caccucuaggcgccuggca

SEQ ID NO: 2475241 - RNA, 19 nt, Artificial Sequence
  Description of Artificial Sequence: Synthetic oligonucleotide
cguguggaaccugucugcc

SEQ ID NO: 2475242 - RNA, 19 nt, Artificial Sequence
  Description of Artificial Sequence: Synthetic oligonucleotide
cauugaggagcgugaggau

SEQ ID NO: 2475243 - RNA, 19 nt, Artificial Sequence
  Description of Artificial Sequence: Synthetic oligonucleotide
caggacggucucccggaga

SEQ ID NO: 2475244 - RNA, 19 nt, Artificial Sequence
  Description of Artificial Sequence: Synthetic oligonucleotide
gccugucucaccaggucca

SEQ ID NO: 2475245 - RNA, 19 nt, Artificial Sequence
  Description of Artificial Sequence: Synthetic oligonucleotide
guggcuguggacggguccu

SEQ ID NO: 2475246 - RNA, 19 nt, Artificial Sequence
  Description of Artificial Sequence: Synthetic oligonucleotide
gggguucuccugagggcag

SEQ ID NO: 2475247 - RNA, 19 nt, Artificial Sequence
  Description of Artificial Sequence: Synthetic oligonucleotide
ggcuuuccaggacggucuc

SEQ ID NO: 2475248 - RNA, 19 nt, Artificial Sequence
  Description of Artificial Sequence: Synthetic oligonucleotide
ccggagucccucccucagg

SEQ ID NO: 2475249 - RNA, 19 nt, Artificial Sequence
  Description of Artificial Sequence: Synthetic oligonucleotide
guccgccccgaaccucagc

SEQ ID NO: 2475250 - RNA, 19 nt, Artificial Sequence
  Description of Artificial Sequence: Synthetic oligonucleotide
gugccguugggcagacaga

SEQ ID NO: 2475251 - RNA, 19 nt, Artificial Sequence
  Description of Artificial Sequence: Synthetic oligonucleotide
cagccucaguuggccuugg

SEQ ID NO: 2475252 - RNA, 19 nt, Artificial Sequence
  Description of Artificial Sequence: Synthetic oligonucleotide
cugagggcaggcggcuguc

SEQ ID NO: 2475253 - RNA, 19 nt, Artificial Sequence
  Description of Artificial Sequence: Synthetic oligonucleotide
aggcuucauggaggugaug

SEQ ID NO: 2475254 - RNA, 19 nt, Artificial Sequence
  Description of Artificial Sequence: Synthetic oligonucleotide
agagggcacuauggcucca

SEQ ID NO: 2475255 - RNA, 19 nt, Artificial Sequence
  Description of Artificial Sequence: Synthetic oligonucleotide
gaaugagguggggaccauu

SEQ ID NO: 2475256 - RNA, 19 nt, Artificial Sequence
  Description of Artificial Sequence: Synthetic oligonucleotide
gcuuuccaggacggucucc

SEQ ID NO: 2475257 - RNA, 19 nt, Artificial Sequence
  Description of Artificial Sequence: Synthetic oligonucleotide
cuuccgugaauggcaggua

SEQ ID NO: 2475258 - RNA, 19 nt, Artificial Sequence
  Description of Artificial Sequence: Synthetic oligonucleotide
ggagcgcguucuccugcug

SEQ ID NO: 2475259 - RNA, 19 nt, Artificial Sequence
  Description of Artificial Sequence: Synthetic oligonucleotide
uggcuguggacggguccuc

SEQ ID NO: 2475260 - RNA, 19 nt, Artificial Sequence
  Description of Artificial Sequence: Synthetic oligonucleotide
cacaaacuggagggguucu

SEQ ID NO: 2475261 - RNA, 19 nt, Artificial Sequence
  Description of Artificial Sequence: Synthetic oligonucleotide
agcucucauugaggagcgu

SEQ ID NO: 2475262 - RNA, 19 nt, Artificial Sequence
  Description of Artificial Sequence: Synthetic oligonucleotide
aguccgccccgaaccucag

SEQ ID NO: 2475263 - RNA, 19 nt, Artificial Sequence
  Description of Artificial Sequence: Synthetic oligonucleotide
gccacgccggagucccucc

SEQ ID NO: 2475264 - RNA, 19 nt, Artificial Sequence
  Description of Artificial Sequence: Synthetic oligonucleotide
ggcaggccacgccggaguc

SEQ ID NO: 2475265 - RNA, 19 nt, Artificial Sequence
  Description of Artificial Sequence: Synthetic oligonucleotide
ucuccgccuuggcccuguc

SEQ ID NO: 2475266 - RNA, 19 nt, Artificial Sequence
  Description of Artificial Sequence: Synthetic oligonucleotide
cgccuuggcccugucaaag

SEQ ID NO: 2475267 - RNA, 19 nt, Artificial Sequence
  Description of Artificial Sequence: Synthetic oligonucleotide
ggaaccugucugccugucu

SEQ ID NO: 2475268 - RNA, 19 nt, Artificial Sequence
  Description of Artificial Sequence: Synthetic oligonucleotide
cuccgccuuggcccuguca

SEQ ID NO: 2475269 - RNA, 19 nt, Artificial Sequence
  Description of Artificial Sequence: Synthetic oligonucleotide
gucucaccagguccaguuu

SEQ ID NO: 2475270 - RNA, 19 nt, Artificial Sequence
  Description of Artificial Sequence: Synthetic oligonucleotide
agcugucuguggagcgcgu

SEQ ID NO: 2475271 - RNA, 19 nt, Artificial Sequence
  Description of Artificial Sequence: Synthetic oligonucleotide
ccaggacggucucccggag

SEQ ID NO: 2475272 - RNA, 19 nt, Artificial Sequence
  Description of Artificial Sequence: Synthetic oligonucleotide
gccguugggcagacagacc

SEQ ID NO: 2475273 - RNA, 19 nt, Artificial Sequence
  Description of Artificial Sequence: Synthetic oligonucleotide
cucuaggcgccuggcagcu

SEQ ID NO: 2475274 - RNA, 19 nt, Artificial Sequence
  Description of Artificial Sequence: Synthetic oligonucleotide
acggguccucaaaggucga

SEQ ID NO: 2475275 - RNA, 19 nt, Artificial Sequence
  Description of Artificial Sequence: Synthetic oligonucleotide
ccccacagcaagauggaau

SEQ ID NO: 2475276 - RNA, 19 nt, Artificial Sequence
  Description of Artificial Sequence: Synthetic oligonucleotide
ggcgccuggcagcuuccuc

SEQ ID NO: 2475277 - RNA, 19 nt, Artificial Sequence
  Description of Artificial Sequence: Synthetic oligonucleotide
ggagucccucccucaggaa

SEQ ID NO: 2475278 - RNA, 19 nt, Artificial Sequence
  Description of Artificial Sequence: Synthetic oligonucleotide
gaacugcauguagguggcu

SEQ ID NO: 2475279 - RNA, 19 nt, Artificial Sequence
  Description of Artificial Sequence: Synthetic oligonucleotide
gcaggccacgccggagucc

SEQ ID NO: 2475280 - RNA, 19 nt, Artificial Sequence
  Description of Artificial Sequence: Synthetic oligonucleotide
ccgccccgaaccucagcag

SEQ ID NO: 2475281 - RNA, 19 nt, Artificial Sequence
  Description of Artificial Sequence: Synthetic oligonucleotide
cggagaguccgccccgaac

SEQ ID NO: 2475282 - RNA, 19 nt, Artificial Sequence
  Description of Artificial Sequence: Synthetic oligonucleotide
cggagucccucccucagga

SEQ ID NO: 2475283 - RNA, 19 nt, Artificial Sequence
  Description of Artificial Sequence: Synthetic oligonucleotide
ccaccucuaggcgccuggc

SEQ ID NO: 2475284 - RNA, 19 nt, Artificial Sequence
  Description of Artificial Sequence: Synthetic oligonucleotide
gcguucuccugcuggcucu

SEQ ID NO: 2475285 - RNA, 19 nt, Artificial Sequence
  Description of Artificial Sequence: Synthetic oligonucleotide
ucuaggcgccuggcagcuu

SEQ ID NO: 2475286 - RNA, 19 nt, Artificial Sequence
  Description of Artificial Sequence: Synthetic oligonucleotide
cgcguucuccugcuggcuc

SEQ ID NO: 2475287 - RNA, 19 nt, Artificial Sequence
  Description of Artificial Sequence: Synthetic oligonucleotide
guucuccgccuuggcccug

SEQ ID NO: 2475288 - RNA, 19 nt, Artificial Sequence
  Description of Artificial Sequence: Synthetic oligonucleotide
cucuaggacuaagcacacu

SEQ ID NO: 2475289 - RNA, 19 nt, Artificial Sequence
  Description of Artificial Sequence: Synthetic oligonucleotide
aggcgccuggcagcuuccu

SEQ ID NO: 2475290 - RNA, 19 nt, Artificial Sequence
  Description of Artificial Sequence: Synthetic oligonucleotide
ccgugaauggcagguagcu

SEQ ID NO: 2475291 - RNA, 19 nt, Artificial Sequence
  Description of Artificial Sequence: Synthetic oligonucleotide
ggcuguggacggguccuca

SEQ ID NO: 2475292 - RNA, 19 nt, Artificial Sequence
  Description of Artificial Sequence: Synthetic oligonucleotide
ccuuuaccagggaccaggu

SEQ ID NO: 2475293 - RNA, 19 nt, Artificial Sequence
  Description of Artificial Sequence: Synthetic oligonucleotide
gggcaggccacgccggagu

SEQ ID NO: 2475294 - RNA, 19 nt, Artificial Sequence
  Description of Artificial Sequence: Synthetic oligonucleotide
ccacgccggagucccuccc

SEQ ID NO: 2475295 - RNA, 19 nt, Artificial Sequence
  Description of Artificial Sequence: Synthetic oligonucleotide
uggccaccucuaggcgccu

SEQ ID NO: 2475296 - RNA, 19 nt, Artificial Sequence
  Description of Artificial Sequence: Synthetic oligonucleotide
cacgccggagucccucccu

SEQ ID NO: 2475297 - RNA, 19 nt, Artificial Sequence
  Description of Artificial Sequence: Synthetic oligonucleotide
cgaggagaagcugaauacu

SEQ ID NO: 2475298 - RNA, 19 nt, Artificial Sequence
  Description of Artificial Sequence: Synthetic oligonucleotide
ccaggacguguggaaccug

SEQ ID NO: 2475299 - RNA, 19 nt, Artificial Sequence
  Description of Artificial Sequence: Synthetic oligonucleotide
ggccacgccggagucccuc

SEQ ID NO: 2475300 - RNA, 19 nt, Artificial Sequence
  Description of Artificial Sequence: Synthetic oligonucleotide
cguugaugugguggaccac

SEQ ID NO: 2475301 - RNA, 19 nt, Artificial Sequence
  Description of Artificial Sequence: Synthetic oligonucleotide
cucagcuccuggugccauu

SEQ ID NO: 2475302 - RNA, 19 nt, Artificial Sequence
  Description of Artificial Sequence: Synthetic oligonucleotide
ccagagcgaaauggacaga

SEQ ID NO: 2475303 - RNA, 19 nt, Artificial Sequence
  Description of Artificial Sequence: Synthetic oligonucleotide
cggguccucaaaggucgag

SEQ ID NO: 2475304 - RNA, 19 nt, Artificial Sequence
  Description of Artificial Sequence: Synthetic oligonucleotide
ggccaccucuaggcgccug

SEQ ID NO: 2475305 - RNA, 19 nt, Artificial Sequence
  Description of Artificial Sequence: Synthetic oligonucleotide
gcaagccugccagcugucu

SEQ ID NO: 2475306 - RNA, 19 nt, Artificial Sequence
  Description of Artificial Sequence: Synthetic oligonucleotide
ggucgaggagaagcugaau

SEQ ID NO: 2475307 - RNA, 19 nt, Artificial Sequence
  Description of Artificial Sequence: Synthetic oligonucleotide
cccugucaaaggcuuccgu

SEQ ID NO: 2475308 - RNA, 19 nt, Artificial Sequence
  Description of Artificial Sequence: Synthetic oligonucleotide
ggaaugagguggggaccau

SEQ ID NO: 2475309 - RNA, 19 nt, Artificial Sequence
  Description of Artificial Sequence: Synthetic oligonucleotide
ccgccuuggcccugucaaa

SEQ ID NO: 2475310 - RNA, 19 nt, Artificial Sequence
  Description of Artificial Sequence: Synthetic oligonucleotide
ggcggcugucaaucauguu

SEQ ID NO: 2475311 - RNA, 19 nt, Artificial Sequence
  Description of Artificial Sequence: Synthetic oligonucleotide
gcugucuguggagcgcguu

SEQ ID NO: 2475312 - RNA, 19 nt, Artificial Sequence
  Description of Artificial Sequence: Synthetic oligonucleotide
ggacggucucccggagagu

SEQ ID NO: 2475313 - RNA, 19 nt, Artificial Sequence
  Description of Artificial Sequence: Synthetic oligonucleotide
cgccggagucccucccuca

SEQ ID NO: 2475314 - RNA, 19 nt, Artificial Sequence
  Description of Artificial Sequence: Synthetic oligonucleotide
cagugccguugggcagaca

SEQ ID NO: 2475315 - RNA, 19 nt, Artificial Sequence
  Description of Artificial Sequence: Synthetic oligonucleotide
gcgcguucuccugcuggcu

SEQ ID NO: 2475316 - RNA, 19 nt, Artificial Sequence
  Description of Artificial Sequence: Synthetic oligonucleotide
cguugggcagacagaccau

SEQ ID NO: 2475317 - RNA, 19 nt, Artificial Sequence
  Description of Artificial Sequence: Synthetic oligonucleotide
cccggagaguccgccccga

SEQ ID NO: 2475318 - RNA, 19 nt, Artificial Sequence
  Description of Artificial Sequence: Synthetic oligonucleotide
ccggagaguccgccccgaa

SEQ ID NO: 2475319 - RNA, 19 nt, Artificial Sequence
  Description of Artificial Sequence: Synthetic oligonucleotide
gcgugaggaugggcgggcu

SEQ ID NO: 2475320 - RNA, 19 nt, Artificial Sequence
  Description of Artificial Sequence: Synthetic oligonucleotide
gcgggcuuuccaggacggu

SEQ ID NO: 2475321 - RNA, 19 nt, Artificial Sequence
  Description of Artificial Sequence: Synthetic oligonucleotide
cgugaggaugggcgggcuu

SEQ ID NO: 2475322 - RNA, 19 nt, Artificial Sequence
  Description of Artificial Sequence: Synthetic oligonucleotide
uuuauaaccacaaacuugu

SEQ ID NO: 2475323 - RNA, 19 nt, Artificial Sequence
  Description of Artificial Sequence: Synthetic oligonucleotide
aaaacuacaucuccaacag

SEQ ID NO: 2475324 - RNA, 19 nt, Artificial Sequence
  Description of Artificial Sequence: Synthetic oligonucleotide
uggacuagaaaauaaauac

SEQ ID NO: 2475325 - RNA, 19 nt, Artificial Sequence
  Description of Artificial Sequence: Synthetic oligonucleotide
uacuaauuauuuuauaacc

SEQ ID NO: 2475326 - RNA, 19 nt, Artificial Sequence
  Description of Artificial Sequence: Synthetic oligonucleotide
uuuuauaaccacaaacuug

SEQ ID NO: 2475327 - RNA, 19 nt, Artificial Sequence
  Description of Artificial Sequence: Synthetic oligonucleotide
aaaggaauggccuaaggga

SEQ ID NO: 2475328 - RNA, 19 nt, Artificial Sequence
  Description of Artificial Sequence: Synthetic oligonucleotide
uaaaggaauggccuaaggg

SEQ ID NO: 2475329 - RNA, 19 nt, Artificial Sequence
  Description of Artificial Sequence: Synthetic oligonucleotide
auaaccacaaacuuguaca

SEQ ID NO: 2475330 - RNA, 19 nt, Artificial Sequence
  Description of Artificial Sequence: Synthetic oligonucleotide
uguacaaaacacaacagau

SEQ ID NO: 2475331 - RNA, 19 nt, Artificial Sequence
  Description of Artificial Sequence: Synthetic oligonucleotide
guauuuggaauuuaggaug

SEQ ID NO: 2475332 - RNA, 19 nt, Artificial Sequence
  Description of Artificial Sequence: Synthetic oligonucleotide
aaguagaugaaguguuugg

SEQ ID NO: 2475333 - RNA, 19 nt, Artificial Sequence
  Description of Artificial Sequence: Synthetic oligonucleotide
uuacuaauuauuuuauaac

SEQ ID NO: 2475334 - RNA, 19 nt, Artificial Sequence
  Description of Artificial Sequence: Synthetic oligonucleotide
uguuuuacuaauuauuuua

SEQ ID NO: 2475335 - RNA, 19 nt, Artificial Sequence
  Description of Artificial Sequence: Synthetic oligonucleotide
ucaugugucacauaacuac

SEQ ID NO: 2475336 - RNA, 19 nt, Artificial Sequence
  Description of Artificial Sequence: Synthetic oligonucleotide
ugguucauaccuuuaaucc

SEQ ID NO: 2475337 - RNA, 19 nt, Artificial Sequence
  Description of Artificial Sequence: Synthetic oligonucleotide
uugaacagaagaauggcca

SEQ ID NO: 2475338 - RNA, 19 nt, Artificial Sequence
  Description of Artificial Sequence: Synthetic oligonucleotide
cuaauuauuuuauaaccac

SEQ ID NO: 2475339 - RNA, 19 nt, Artificial Sequence
  Description of Artificial Sequence: Synthetic oligonucleotide
ugucacauaacuaccgaag

SEQ ID NO: 2475340 - RNA, 19 nt, Artificial Sequence
  Description of Artificial Sequence: Synthetic oligonucleotide
uaauuauuuuauaaccaca

SEQ ID NO: 2475341 - RNA, 19 nt, Artificial Sequence
  Description of Artificial Sequence: Synthetic oligonucleotide
auaacuaccgaaguuccgc

SEQ ID NO: 2475342 - RNA, 19 nt, Artificial Sequence
  Description of Artificial Sequence: Synthetic oligonucleotide
uuuaaccagauuugaacag

SEQ ID NO: 2475343 - RNA, 19 nt, Artificial Sequence
  Description of Artificial Sequence: Synthetic oligonucleotide
uaaauacaaauguaagcug

SEQ ID NO: 2475344 - RNA, 19 nt, Artificial Sequence
  Description of Artificial Sequence: Synthetic oligonucleotide
uauuuggaauuuaggaugc

SEQ ID NO: 2475345 - RNA, 19 nt, Artificial Sequence
  Description of Artificial Sequence: Synthetic oligonucleotide
cuuguacagaggaugaugc

SEQ ID NO: 2475346 - RNA, 19 nt, Artificial Sequence
  Description of Artificial Sequence: Synthetic oligonucleotide
ucugguauuuggaauuuag

SEQ ID NO: 2475347 - RNA, 19 nt, Artificial Sequence
  Description of Artificial Sequence: Synthetic oligonucleotide
ucucaugugucacauaacu

SEQ ID NO: 2475348 - RNA, 19 nt, Artificial Sequence
  Description of Artificial Sequence: Synthetic oligonucleotide
aacagauucaaacgaggug

SEQ ID NO: 2475349 - RNA, 19 nt, Artificial Sequence
  Description of Artificial Sequence: Synthetic oligonucleotide
aaauacaaauguaagcugu

SEQ ID NO: 2475350 - RNA, 19 nt, Artificial Sequence
  Description of Artificial Sequence: Synthetic oligonucleotide
aauuauuuuauaaccacaa

SEQ ID NO: 2475351 - RNA, 19 nt, Artificial Sequence
  Description of Artificial Sequence: Synthetic oligonucleotide
acaguccaugcuuuuaacc

SEQ ID NO: 2475352 - RNA, 19 nt, Artificial Sequence
  Description of Artificial Sequence: Synthetic oligonucleotide
uauaaccacaaacuuguac

SEQ ID NO: 2475353 - RNA, 19 nt, Artificial Sequence
  Description of Artificial Sequence: Synthetic oligonucleotide
aaauguaagcuguuuuacu

SEQ ID NO: 2475354 - RNA, 19 nt, Artificial Sequence
  Description of Artificial Sequence: Synthetic oligonucleotide
auucaaacgagguguuccc

SEQ ID NO: 2475355 - RNA, 19 nt, Artificial Sequence
  Description of Artificial Sequence: Synthetic oligonucleotide
uuagcaaggcugaagaguc

SEQ ID NO: 2475356 - RNA, 19 nt, Artificial Sequence
  Description of Artificial Sequence: Synthetic oligonucleotide
uuaaaggaauggccuaagg

SEQ ID NO: 2475357 - RNA, 19 nt, Artificial Sequence
  Description of Artificial Sequence: Synthetic oligonucleotide
acagauucaaacgaggugu

SEQ ID NO: 2475358 - RNA, 19 nt, Artificial Sequence
  Description of Artificial Sequence: Synthetic oligonucleotide
gagguguucccuuagcaag

SEQ ID NO: 2475359 - RNA, 19 nt, Artificial Sequence
  Description of Artificial Sequence: Synthetic oligonucleotide
uguucccuuagcaaggcug

SEQ ID NO: 2475360 - RNA, 19 nt, Artificial Sequence
  Description of Artificial Sequence: Synthetic oligonucleotide
acuaccgaaguuccgcccc

SEQ ID NO: 2475361 - RNA, 19 nt, Artificial Sequence
  Description of Artificial Sequence: Synthetic oligonucleotide
aacuaccgaaguuccgccc

SEQ ID NO: 2475362 - RNA, 19 nt, Artificial Sequence
  Description of Artificial Sequence: Synthetic oligonucleotide
uuggaauuuaggaugcagu

SEQ ID NO: 2475363 - RNA, 19 nt, Artificial Sequence
  Description of Artificial Sequence: Synthetic oligonucleotide
uauguuguacuucuccaac

SEQ ID NO: 2475364 - RNA, 19 nt, Artificial Sequence
  Description of Artificial Sequence: Synthetic oligonucleotide
aacuacaucuccaacagau

SEQ ID NO: 2475365 - RNA, 19 nt, Artificial Sequence
  Description of Artificial Sequence: Synthetic oligonucleotide
aacgagguguucccuuagc

SEQ ID NO: 2475366 - RNA, 19 nt, Artificial Sequence
  Description of Artificial Sequence: Synthetic oligonucleotide
aaggaauggccuaagggag

SEQ ID NO: 2475367 - RNA, 19 nt, Artificial Sequence
  Description of Artificial Sequence: Synthetic oligonucleotide
acagagugaguucaagaag

SEQ ID NO: 2475368 - RNA, 19 nt, Artificial Sequence
  Description of Artificial Sequence: Synthetic oligonucleotide
acuaauuauuuuauaacca

SEQ ID NO: 2475369 - RNA, 19 nt, Artificial Sequence
  Description of Artificial Sequence: Synthetic oligonucleotide
ugaguagcgcacuccaccg

SEQ ID NO: 2475370 - RNA, 19 nt, Artificial Sequence
  Description of Artificial Sequence: Synthetic oligonucleotide
aggcugaagagucagucuc

SEQ ID NO: 2475371 - RNA, 19 nt, Artificial Sequence
  Description of Artificial Sequence: Synthetic oligonucleotide
uuguacuucuccaacgccu

SEQ ID NO: 2475372 - RNA, 19 nt, Artificial Sequence
  Description of Artificial Sequence: Synthetic oligonucleotide
auguuguacuucuccaacg

SEQ ID NO: 2475373 - RNA, 19 nt, Artificial Sequence
  Description of Artificial Sequence: Synthetic oligonucleotide
acauaacuaccgaaguucc

SEQ ID NO: 2475374 - RNA, 19 nt, Artificial Sequence
  Description of Artificial Sequence: Synthetic oligonucleotide
uggaauuuaggaugcaguc

SEQ ID NO: 2475375 - RNA, 19 nt, Artificial Sequence
  Description of Artificial Sequence: Synthetic oligonucleotide
caugugucacauaacuacc

SEQ ID NO: 2475376 - RNA, 19 nt, Artificial Sequence
  Description of Artificial Sequence: Synthetic oligonucleotide
acacaacagauucaaacga

SEQ ID NO: 2475377 - RNA, 19 nt, Artificial Sequence
  Description of Artificial Sequence: Synthetic oligonucleotide
gaauuuaggaugcaguccu

SEQ ID NO: 2475378 - RNA, 19 nt, Artificial Sequence
  Description of Artificial Sequence: Synthetic oligonucleotide
agaagaauggccaccugac

SEQ ID NO: 2475379 - RNA, 19 nt, Artificial Sequence
  Description of Artificial Sequence: Synthetic oligonucleotide
uguacuucuccaacgccug

SEQ ID NO: 2475380 - RNA, 19 nt, Artificial Sequence
  Description of Artificial Sequence: Synthetic oligonucleotide
agauccugaguuccagggc

SEQ ID NO: 2475381 - RNA, 19 nt, Artificial Sequence
  Description of Artificial Sequence: Synthetic oligonucleotide
gaaguuccgccccacaaug

SEQ ID NO: 2475382 - RNA, 19 nt, Artificial Sequence
  Description of Artificial Sequence: Synthetic oligonucleotide
uucuccaacgccugaguag

SEQ ID NO: 2475383 - RNA, 19 nt, Artificial Sequence
  Description of Artificial Sequence: Synthetic oligonucleotide
ucaaaacuacaucuccaac

SEQ ID NO: 2475384 - RNA, 19 nt, Artificial Sequence
  Description of Artificial Sequence: Synthetic oligonucleotide
uacaaauguaagcuguuuu

SEQ ID NO: 2475385 - RNA, 19 nt, Artificial Sequence
  Description of Artificial Sequence: Synthetic oligonucleotide
cacaacagauucaaacgag

SEQ ID NO: 2475386 - RNA, 19 nt, Artificial Sequence
  Description of Artificial Sequence: Synthetic oligonucleotide
uguugcaucucuuccgaca

SEQ ID NO: 2475387 - RNA, 19 nt, Artificial Sequence
  Description of Artificial Sequence: Synthetic oligonucleotide
uugaucaccgccuuccggu

SEQ ID NO: 2475388 - RNA, 19 nt, Artificial Sequence
  Description of Artificial Sequence: Synthetic oligonucleotide
ugugucacauaacuaccga

SEQ ID NO: 2475389 - RNA, 19 nt, Artificial Sequence
  Description of Artificial Sequence: Synthetic oligonucleotide
gcuagacuagucuacagag

SEQ ID NO: 2475390 - RNA, 19 nt, Artificial Sequence
  Description of Artificial Sequence: Synthetic oligonucleotide
gaugugggccgcaauaucc

SEQ ID NO: 2475391 - RNA, 19 nt, Artificial Sequence
  Description of Artificial Sequence: Synthetic oligonucleotide
agauuuauuuuaaaggaau

SEQ ID NO: 2475392 - RNA, 19 nt, Artificial Sequence
  Description of Artificial Sequence: Synthetic oligonucleotide
acaaauguaagcuguuuua

SEQ ID NO: 2475393 - RNA, 19 nt, Artificial Sequence
  Description of Artificial Sequence: Synthetic oligonucleotide
agcagguagauccugaguu

SEQ ID NO: 2475394 - RNA, 19 nt, Artificial Sequence
  Description of Artificial Sequence: Synthetic oligonucleotide
uccaacagauuuauuuuaa

SEQ ID NO: 2475395 - RNA, 19 nt, Artificial Sequence
  Description of Artificial Sequence: Synthetic oligonucleotide
cacauaacuaccgaaguuc

SEQ ID NO: 2475396 - RNA, 19 nt, Artificial Sequence
  Description of Artificial Sequence: Synthetic oligonucleotide
uuuuacuaauuauuuuaua

SEQ ID NO: 2475397 - RNA, 19 nt, Artificial Sequence
  Description of Artificial Sequence: Synthetic oligonucleotide
gaaguagaugaaguguuug

SEQ ID NO: 2475398 - RNA, 19 nt, Artificial Sequence
  Description of Artificial Sequence: Synthetic oligonucleotide
uuaaccagauuugaacaga

SEQ ID NO: 2475399 - RNA, 19 nt, Artificial Sequence
  Description of Artificial Sequence: Synthetic oligonucleotide
aauggccuaagggagaaaa

SEQ ID NO: 2475400 - RNA, 19 nt, Artificial Sequence
  Description of Artificial Sequence: Synthetic oligonucleotide
caugcuuuuaaccagauuu

SEQ ID NO: 2475401 - RNA, 19 nt, Artificial Sequence
  Description of Artificial Sequence: Synthetic oligonucleotide
uuuaaaggaauggccuaag

SEQ ID NO: 2475402 - RNA, 19 nt, Artificial Sequence
  Description of Artificial Sequence: Synthetic oligonucleotide
cagagugaguucaagaaga

SEQ ID NO: 2475403 - RNA, 19 nt, Artificial Sequence
  Description of Artificial Sequence: Synthetic oligonucleotide
guugccguggagcaggagc

SEQ ID NO: 2475404 - RNA, 19 nt, Artificial Sequence
  Description of Artificial Sequence: Synthetic oligonucleotide
aaggcugaagagucagucu

SEQ ID NO: 2475405 - RNA, 19 nt, Artificial Sequence
  Description of Artificial Sequence: Synthetic oligonucleotide
aagcuguuuuacuaauuau

SEQ ID NO: 2475406 - RNA, 19 nt, Artificial Sequence
  Description of Artificial Sequence: Synthetic oligonucleotide
cugaguagcgcacuccacc

SEQ ID NO: 2475407 - RNA, 19 nt, Artificial Sequence
  Description of Artificial Sequence: Synthetic oligonucleotide
uaaccagauuugaacagaa

SEQ ID NO: 2475408 - RNA, 19 nt, Artificial Sequence
  Description of Artificial Sequence: Synthetic oligonucleotide
ucuccaacgccugaguagc

SEQ ID NO: 2475409 - RNA, 19 nt, Artificial Sequence
  Description of Artificial Sequence: Synthetic oligonucleotide
auuuuaaaggaauggccua

SEQ ID NO: 2475410 - RNA, 19 nt, Artificial Sequence
  Description of Artificial Sequence: Synthetic oligonucleotide
gaagcagguagauccugag

SEQ ID NO: 2475411 - RNA, 19 nt, Artificial Sequence
  Description of Artificial Sequence: Synthetic oligonucleotide
cauaacuaccgaaguuccg

SEQ ID NO: 2475412 - RNA, 19 nt, Artificial Sequence
  Description of Artificial Sequence: Synthetic oligonucleotide
ucaagaagagccagggcua

SEQ ID NO: 2475413 - RNA, 19 nt, Artificial Sequence
  Description of Artificial Sequence: Synthetic oligonucleotide
caaauguaagcuguuuuac

SEQ ID NO: 2475414 - RNA, 19 nt, Artificial Sequence
  Description of Artificial Sequence: Synthetic oligonucleotide
uguaagcuguuuuacuaau

SEQ ID NO: 2475415 - RNA, 19 nt, Artificial Sequence
  Description of Artificial Sequence: Synthetic oligonucleotide
aaacgagguguucccuuag

SEQ ID NO: 2475416 - RNA, 19 nt, Artificial Sequence
  Description of Artificial Sequence: Synthetic oligonucleotide
cacaaacuuguacagagga

SEQ ID NO: 2475417 - RNA, 19 nt, Artificial Sequence
  Description of Artificial Sequence: Synthetic oligonucleotide
agaggaugaugcccuguac

SEQ ID NO: 2475418 - RNA, 19 nt, Artificial Sequence
  Description of Artificial Sequence: Synthetic oligonucleotide
aguagcgcacuccaccgag

SEQ ID NO: 2475419 - RNA, 19 nt, Artificial Sequence
  Description of Artificial Sequence: Synthetic oligonucleotide
uaacuaccgaaguuccgcc

SEQ ID NO: 2475420 - RNA, 19 nt, Artificial Sequence
  Description of Artificial Sequence: Synthetic oligonucleotide
aguagaugaaguguuuggu

SEQ ID NO: 2475421 - RNA, 19 nt, Artificial Sequence
  Description of Artificial Sequence: Synthetic oligonucleotide
gugguucauaccuuuaauc

SEQ ID NO: 2475422 - RNA, 19 nt, Artificial Sequence
  Description of Artificial Sequence: Synthetic oligonucleotide
ucacauaacuaccgaaguu

SEQ ID NO: 2475423 - RNA, 19 nt, Artificial Sequence
  Description of Artificial Sequence: Synthetic oligonucleotide
ugacccagguagaaguaga

SEQ ID NO: 2475424 - RNA, 19 nt, Artificial Sequence
  Description of Artificial Sequence: Synthetic oligonucleotide
uaggaugcaguccuuguuu

SEQ ID NO: 2475425 - RNA, 19 nt, Artificial Sequence
  Description of Artificial Sequence: Synthetic oligonucleotide
uacagaaguauggacuaga

SEQ ID NO: 2475426 - RNA, 19 nt, Artificial Sequence
  Description of Artificial Sequence: Synthetic oligonucleotide
guagauccugaguuccagg

SEQ ID NO: 2475427 - RNA, 19 nt, Artificial Sequence
  Description of Artificial Sequence: Synthetic oligonucleotide
uggguguuuggcacagucc

SEQ ID NO: 2475428 - RNA, 19 nt, Artificial Sequence
  Description of Artificial Sequence: Synthetic oligonucleotide
caaugcagugccagguggg

SEQ ID NO: 2475429 - RNA, 19 nt, Artificial Sequence
  Description of Artificial Sequence: Synthetic oligonucleotide
aaacuacaucuccaacaga

SEQ ID NO: 2475430 - RNA, 19 nt, Artificial Sequence
  Description of Artificial Sequence: Synthetic oligonucleotide
uuccggucgcacaugguug

SEQ ID NO: 2475431 - RNA, 19 nt, Artificial Sequence
  Description of Artificial Sequence: Synthetic oligonucleotide
augugucacauaacuaccg

SEQ ID NO: 2475432 - RNA, 19 nt, Artificial Sequence
  Description of Artificial Sequence: Synthetic oligonucleotide
aucaccgccuuccggucgc

SEQ ID NO: 2475433 - RNA, 19 nt, Artificial Sequence
  Description of Artificial Sequence: Synthetic oligonucleotide
aagcagguagauccugagu

SEQ ID NO: 2475434 - RNA, 19 nt, Artificial Sequence
  Description of Artificial Sequence: Synthetic oligonucleotide
guuguacuucuccaacgcc

SEQ ID NO: 2475435 - RNA, 19 nt, Artificial Sequence
  Description of Artificial Sequence: Synthetic oligonucleotide
aucucuuccgacaugucug

SEQ ID NO: 2475436 - RNA, 19 nt, Artificial Sequence
  Description of Artificial Sequence: Synthetic oligonucleotide
aaguauggacuagaaaaua

SEQ ID NO: 2475437 - RNA, 19 nt, Artificial Sequence
  Description of Artificial Sequence: Synthetic oligonucleotide
aauacaaauguaagcuguu

SEQ ID NO: 2475438 - RNA, 19 nt, Artificial Sequence
  Description of Artificial Sequence: Synthetic oligonucleotide
ucucuuccgacaugucugc

SEQ ID NO: 2475439 - RNA, 19 nt, Artificial Sequence
  Description of Artificial Sequence: Synthetic oligonucleotide
agccguggcgcaucuaagg

SEQ ID NO: 2475440 - RNA, 19 nt, Artificial Sequence
  Description of Artificial Sequence: Synthetic oligonucleotide
aaguuccgccccacaaugc

SEQ ID NO: 2475441 - RNA, 19 nt, Artificial Sequence
  Description of Artificial Sequence: Synthetic oligonucleotide
aggaugaugcccuguacaa

SEQ ID NO: 2475442 - RNA, 19 nt, Artificial Sequence
  Description of Artificial Sequence: Synthetic oligonucleotide
augguugccguggagcagg

SEQ ID NO: 2475443 - RNA, 19 nt, Artificial Sequence
  Description of Artificial Sequence: Synthetic oligonucleotide
acaugguugccguggagca

SEQ ID NO: 2475444 - RNA, 19 nt, Artificial Sequence
  Description of Artificial Sequence: Synthetic oligonucleotide
uggugguucauaccuuuaa

SEQ ID NO: 2475445 - RNA, 19 nt, Artificial Sequence
  Description of Artificial Sequence: Synthetic oligonucleotide
cagauuuauuuuaaaggaa

SEQ ID NO: 2475446 - RNA, 19 nt, Artificial Sequence
  Description of Artificial Sequence: Synthetic oligonucleotide
uuaggaugcaguccuuguu

SEQ ID NO: 2475447 - RNA, 19 nt, Artificial Sequence
  Description of Artificial Sequence: Synthetic oligonucleotide
agccggucgcuaccgaagc

SEQ ID NO: 2475448 - RNA, 19 nt, Artificial Sequence
  Description of Artificial Sequence: Synthetic oligonucleotide
ugcgagcucccgaggaagg

SEQ ID NO: 2475449 - RNA, 19 nt, Artificial Sequence
  Description of Artificial Sequence: Synthetic oligonucleotide
auuuaggaugcaguccuug

SEQ ID NO: 2475450 - RNA, 19 nt, Artificial Sequence
  Description of Artificial Sequence: Synthetic oligonucleotide
agucucugguauuuggaau

SEQ ID NO: 2475451 - RNA, 19 nt, Artificial Sequence
  Description of Artificial Sequence: Synthetic oligonucleotide
ucgcacaugguugccgugg

SEQ ID NO: 2475452 - RNA, 19 nt, Artificial Sequence
  Description of Artificial Sequence: Synthetic oligonucleotide
gaucacuggguguuuggca

SEQ ID NO: 2475453 - RNA, 19 nt, Artificial Sequence
  Description of Artificial Sequence: Synthetic oligonucleotide
auggacuagaaaauaaaua

SEQ ID NO: 2475454 - RNA, 19 nt, Artificial Sequence
  Description of Artificial Sequence: Synthetic oligonucleotide
aguuccgccccacaaugca

SEQ ID NO: 2475455 - RNA, 19 nt, Artificial Sequence
  Description of Artificial Sequence: Synthetic oligonucleotide
gauccugaguuccagggcu

SEQ ID NO: 2475456 - RNA, 19 nt, Artificial Sequence
  Description of Artificial Sequence: Synthetic oligonucleotide
agcaaggcugaagagucag

SEQ ID NO: 2475457 - RNA, 19 nt, Artificial Sequence
  Description of Artificial Sequence: Synthetic oligonucleotide
augcuuuuaaccagauuug

SEQ ID NO: 2475458 - RNA, 19 nt, Artificial Sequence
  Description of Artificial Sequence: Synthetic oligonucleotide
gaucaccgccuuccggucg

SEQ ID NO: 2475459 - RNA, 19 nt, Artificial Sequence
  Description of Artificial Sequence: Synthetic oligonucleotide
cagguagauccugaguucc

SEQ ID NO: 2475460 - RNA, 19 nt, Artificial Sequence
  Description of Artificial Sequence: Synthetic oligonucleotide
aaccagauuugaacagaag

SEQ ID NO: 2475461 - RNA, 19 nt, Artificial Sequence
  Description of Artificial Sequence: Synthetic oligonucleotide
cugaagagucagucucugg

SEQ ID NO: 2475462 - RNA, 19 nt, Artificial Sequence
  Description of Artificial Sequence: Synthetic oligonucleotide
agcgcacuccaccgagucc

SEQ ID NO: 2475463 - RNA, 19 nt, Artificial Sequence
  Description of Artificial Sequence: Synthetic oligonucleotide
agcuguuuuacuaauuauu

SEQ ID NO: 2475464 - RNA, 19 nt, Artificial Sequence
  Description of Artificial Sequence: Synthetic oligonucleotide
gguauuuggaauuuaggau

SEQ ID NO: 2475465 - RNA, 19 nt, Artificial Sequence
  Description of Artificial Sequence: Synthetic oligonucleotide
guagaaguagaugaagugu

SEQ ID NO: 2475466 - RNA, 19 nt, Artificial Sequence
  Description of Artificial Sequence: Synthetic oligonucleotide
gaagccguggcgcaucuaa

SEQ ID NO: 2475467 - RNA, 19 nt, Artificial Sequence
  Description of Artificial Sequence: Synthetic oligonucleotide
gucgcuaccgaagccgugg

SEQ ID NO: 2475468 - RNA, 19 nt, Artificial Sequence
  Description of Artificial Sequence: Synthetic oligonucleotide
acgagguguucccuuagca

SEQ ID NO: 2475469 - RNA, 19 nt, Artificial Sequence
  Description of Artificial Sequence: Synthetic oligonucleotide
ucaaacgagguguucccuu

SEQ ID NO: 2475470 - RNA, 19 nt, Artificial Sequence
  Description of Artificial Sequence: Synthetic oligonucleotide
ucuuccgacaugucugcau

SEQ ID NO: 2475471 - RNA, 19 nt, Artificial Sequence
  Description of Artificial Sequence: Synthetic oligonucleotide
agauucaaacgagguguuc

SEQ ID NO: 2475472 - RNA, 19 nt, Artificial Sequence
  Description of Artificial Sequence: Synthetic oligonucleotide
gaguuccagggcuagacua

SEQ ID NO: 2475473 - RNA, 19 nt, Artificial Sequence
  Description of Artificial Sequence: Synthetic oligonucleotide
ggccaccugacccagguag

SEQ ID NO: 2475474 - RNA, 19 nt, Artificial Sequence
  Description of Artificial Sequence: Synthetic oligonucleotide
ugcugcgagcucccgagga

SEQ ID NO: 2475475 - RNA, 19 nt, Artificial Sequence
  Description of Artificial Sequence: Synthetic oligonucleotide
uuucuauguuguacuucuc

SEQ ID NO: 2475476 - RNA, 19 nt, Artificial Sequence
  Description of Artificial Sequence: Synthetic oligonucleotide
aguuccagggcuagacuag

SEQ ID NO: 2475477 - RNA, 19 nt, Artificial Sequence
  Description of Artificial Sequence: Synthetic oligonucleotide
cagggcuagacuagucuac

SEQ ID NO: 2475478 - RNA, 19 nt, Artificial Sequence
  Description of Artificial Sequence: Synthetic oligonucleotide
gaaguauggacuagaaaau

SEQ ID NO: 2475479 - RNA, 19 nt, Artificial Sequence
  Description of Artificial Sequence: Synthetic oligonucleotide
uuccgccccacaaugcagu

SEQ ID NO: 2475480 - RNA, 19 nt, Artificial Sequence
  Description of Artificial Sequence: Synthetic oligonucleotide
ucccuuagcaaggcugaag

SEQ ID NO: 2475481 - RNA, 19 nt, Artificial Sequence
  Description of Artificial Sequence: Synthetic oligonucleotide
cucccgaggaaggugcugg

SEQ ID NO: 2475482 - RNA, 19 nt, Artificial Sequence
  Description of Artificial Sequence: Synthetic oligonucleotide
cuggguguuuggcacaguc

SEQ ID NO: 2475483 - RNA, 19 nt, Artificial Sequence
  Description of Artificial Sequence: Synthetic oligonucleotide
cugccucaaaacuacaucu

SEQ ID NO: 2475484 - RNA, 19 nt, Artificial Sequence
  Description of Artificial Sequence: Synthetic oligonucleotide
gguacagaaguauggacua

SEQ ID NO: 2475485 - RNA, 19 nt, Artificial Sequence
  Description of Artificial Sequence: Synthetic oligonucleotide
uugaugugggccgcaauau

SEQ ID NO: 2475486 - RNA, 19 nt, Artificial Sequence
  Description of Artificial Sequence: Synthetic oligonucleotide
guucauaccuuuaauccua

SEQ ID NO: 2475487 - RNA, 19 nt, Artificial Sequence
  Description of Artificial Sequence: Synthetic oligonucleotide
uuauaaccacaaacuugua

SEQ ID NO: 2475488 - RNA, 19 nt, Artificial Sequence
  Description of Artificial Sequence: Synthetic oligonucleotide
cacaaugcagugccaggug

SEQ ID NO: 2475489 - RNA, 19 nt, Artificial Sequence
  Description of Artificial Sequence: Synthetic oligonucleotide
guguuuggcacaguccaug

SEQ ID NO: 2475490 - RNA, 19 nt, Artificial Sequence
  Description of Artificial Sequence: Synthetic oligonucleotide
gucacauaacuaccgaagu

SEQ ID NO: 2475491 - RNA, 19 nt, Artificial Sequence
  Description of Artificial Sequence: Synthetic oligonucleotide
cuugaugugggccgcaaua

SEQ ID NO: 2475492 - RNA, 19 nt, Artificial Sequence
  Description of Artificial Sequence: Synthetic oligonucleotide
uccaacgccugaguagcgc

SEQ ID NO: 2475493 - RNA, 19 nt, Artificial Sequence
  Description of Artificial Sequence: Synthetic oligonucleotide
guuuuacuaauuauuuuau

SEQ ID NO: 2475494 - RNA, 19 nt, Artificial Sequence
  Description of Artificial Sequence: Synthetic oligonucleotide
uucaaacgagguguucccu

SEQ ID NO: 2475495 - RNA, 19 nt, Artificial Sequence
  Description of Artificial Sequence: Synthetic oligonucleotide
auacaaauguaagcuguuu

SEQ ID NO: 2475496 - RNA, 19 nt, Artificial Sequence
  Description of Artificial Sequence: Synthetic oligonucleotide
cuuagcaaggcugaagagu

SEQ ID NO: 2475497 - RNA, 19 nt, Artificial Sequence
  Description of Artificial Sequence: Synthetic oligonucleotide
gagcucccgaggaaggugc

SEQ ID NO: 2475498 - RNA, 19 nt, Artificial Sequence
  Description of Artificial Sequence: Synthetic oligonucleotide
uacagaggaugaugcccug

SEQ ID NO: 2475499 - RNA, 19 nt, Artificial Sequence
  Description of Artificial Sequence: Synthetic oligonucleotide
guacagaaguauggacuag

SEQ ID NO: 2475500 - RNA, 19 nt, Artificial Sequence
  Description of Artificial Sequence: Synthetic oligonucleotide
gugucacauaacuaccgaa

SEQ ID NO: 2475501 - RNA, 19 nt, Artificial Sequence
  Description of Artificial Sequence: Synthetic oligonucleotide
cuccaacagauuuauuuua

SEQ ID NO: 2475502 - RNA, 19 nt, Artificial Sequence
  Description of Artificial Sequence: Synthetic oligonucleotide
gggguuguacuucuuguca

SEQ ID NO: 2475503 - RNA, 19 nt, Artificial Sequence
  Description of Artificial Sequence: Synthetic oligonucleotide
gcaauauccuuuucuaugu

SEQ ID NO: 2475504 - RNA, 19 nt, Artificial Sequence
  Description of Artificial Sequence: Synthetic oligonucleotide
gguucauaccuuuaauccu

SEQ ID NO: 2475505 - RNA, 19 nt, Artificial Sequence
  Description of Artificial Sequence: Synthetic oligonucleotide
aggaugcaguccuuguuuu

SEQ ID NO: 2475506 - RNA, 19 nt, Artificial Sequence
  Description of Artificial Sequence: Synthetic oligonucleotide
ggcuagacuagucuacaga

SEQ ID NO: 2475507 - RNA, 19 nt, Artificial Sequence
  Description of Artificial Sequence: Synthetic oligonucleotide
gaauggccaccugacccag

SEQ ID NO: 2475508 - RNA, 19 nt, Artificial Sequence
  Description of Artificial Sequence: Synthetic oligonucleotide
gguagauccugaguuccag

SEQ ID NO: 2475509 - RNA, 19 nt, Artificial Sequence
  Description of Artificial Sequence: Synthetic oligonucleotide
cucaugugucacauaacua

SEQ ID NO: 2475510 - RNA, 19 nt, Artificial Sequence
  Description of Artificial Sequence: Synthetic oligonucleotide
acagaaguauggacuagaa

SEQ ID NO: 2475511 - RNA, 19 nt, Artificial Sequence
  Description of Artificial Sequence: Synthetic oligonucleotide
gggguacagaaguauggac

SEQ ID NO: 2475512 - RNA, 19 nt, Artificial Sequence
  Description of Artificial Sequence: Synthetic oligonucleotide
gcuaccgaagccguggcgc

SEQ ID NO: 2475513 - RNA, 19 nt, Artificial Sequence
  Description of Artificial Sequence: Synthetic oligonucleotide
ucgcuaccgaagccguggc

SEQ ID NO: 2475514 - RNA, 19 nt, Artificial Sequence
  Description of Artificial Sequence: Synthetic oligonucleotide
ugaucaccgccuuccgguc

SEQ ID NO: 2475515 - RNA, 19 nt, Artificial Sequence
  Description of Artificial Sequence: Synthetic oligonucleotide
acccagguagaaguagaug

SEQ ID NO: 2475516 - RNA, 19 nt, Artificial Sequence
  Description of Artificial Sequence: Synthetic oligonucleotide
augcccuguacaaaacaca

SEQ ID NO: 2475517 - RNA, 19 nt, Artificial Sequence
  Description of Artificial Sequence: Synthetic oligonucleotide
acgccugaguagcgcacuc

SEQ ID NO: 2475518 - RNA, 19 nt, Artificial Sequence
  Description of Artificial Sequence: Synthetic oligonucleotide
ugggccgcaauauccuuuu

SEQ ID NO: 2475519 - RNA, 19 nt, Artificial Sequence
  Description of Artificial Sequence: Synthetic oligonucleotide
ucucugguauuuggaauuu

SEQ ID NO: 2475520 - RNA, 19 nt, Artificial Sequence
  Description of Artificial Sequence: Synthetic oligonucleotide
guugcaucucuuccgacau

SEQ ID NO: 2475521 - RNA, 19 nt, Artificial Sequence
  Description of Artificial Sequence: Synthetic oligonucleotide
aagccguggcgcaucuaag

SEQ ID NO: 2475522 - RNA, 19 nt, Artificial Sequence
  Description of Artificial Sequence: Synthetic oligonucleotide
caccgaguccuguugcauc

SEQ ID NO: 2475523 - RNA, 19 nt, Artificial Sequence
  Description of Artificial Sequence: Synthetic oligonucleotide
cguggcgcaucuaaggagc

SEQ ID NO: 2475524 - RNA, 19 nt, Artificial Sequence
  Description of Artificial Sequence: Synthetic oligonucleotide
agaaguagaugaaguguuu

SEQ ID NO: 2475525 - RNA, 19 nt, Artificial Sequence
  Description of Artificial Sequence: Synthetic oligonucleotide
agggcuagacuagucuaca

SEQ ID NO: 2475526 - RNA, 19 nt, Artificial Sequence
  Description of Artificial Sequence: Synthetic oligonucleotide
ggcgcaucuaaggagcccc

SEQ ID NO: 2475527 - RNA, 19 nt, Artificial Sequence
  Description of Artificial Sequence: Synthetic oligonucleotide
auuuggaauuuaggaugca

SEQ ID NO: 2475528 - RNA, 19 nt, Artificial Sequence
  Description of Artificial Sequence: Synthetic oligonucleotide
auggaucacuggguguuug

SEQ ID NO: 2475529 - RNA, 19 nt, Artificial Sequence
  Description of Artificial Sequence: Synthetic oligonucleotide
gucucugguauuuggaauu

SEQ ID NO: 2475530 - RNA, 19 nt, Artificial Sequence
  Description of Artificial Sequence: Synthetic oligonucleotide
cuccaacgccugaguagcg

SEQ ID NO: 2475531 - RNA, 19 nt, Artificial Sequence
  Description of Artificial Sequence: Synthetic oligonucleotide
caacgccugaguagcgcac

SEQ ID NO: 2475532 - RNA, 19 nt, Artificial Sequence
  Description of Artificial Sequence: Synthetic oligonucleotide
agagccggucgcuaccgaa

SEQ ID NO: 2475533 - RNA, 19 nt, Artificial Sequence
  Description of Artificial Sequence: Synthetic oligonucleotide
aagagccggucgcuaccga

SEQ ID NO: 2475534 - RNA, 19 nt, Artificial Sequence
  Description of Artificial Sequence: Synthetic oligonucleotide
cagauuugaacagaagaau

SEQ ID NO: 2475535 - RNA, 19 nt, Artificial Sequence
  Description of Artificial Sequence: Synthetic oligonucleotide
cuagacuagucuacagagu

SEQ ID NO: 2475536 - RNA, 19 nt, Artificial Sequence
  Description of Artificial Sequence: Synthetic oligonucleotide
uccgacaugucugcauuuu

SEQ ID NO: 2475537 - RNA, 19 nt, Artificial Sequence
  Description of Artificial Sequence: Synthetic oligonucleotide
uccgccccacaaugcagug

SEQ ID NO: 2475538 - RNA, 19 nt, Artificial Sequence
  Description of Artificial Sequence: Synthetic oligonucleotide
guuccgccccacaaugcag

SEQ ID NO: 2475539 - RNA, 19 nt, Artificial Sequence
  Description of Artificial Sequence: Synthetic oligonucleotide
aggaauggccuaagggaga

SEQ ID NO: 2475540 - RNA, 19 nt, Artificial Sequence
  Description of Artificial Sequence: Synthetic oligonucleotide
agucagucucugguauuug

SEQ ID NO: 2475541 - RNA, 19 nt, Artificial Sequence
  Description of Artificial Sequence: Synthetic oligonucleotide
cugcgagcucccgaggaag

SEQ ID NO: 2475542 - RNA, 19 nt, Artificial Sequence
  Description of Artificial Sequence: Synthetic oligonucleotide
caaacgagguguucccuua

SEQ ID NO: 2475543 - RNA, 19 nt, Artificial Sequence
  Description of Artificial Sequence: Synthetic oligonucleotide
caugguugccguggagcag

SEQ ID NO: 2475544 - RNA, 19 nt, Artificial Sequence
  Description of Artificial Sequence: Synthetic oligonucleotide
ggaucacuggguguuuggc

SEQ ID NO: 2475545 - RNA, 19 nt, Artificial Sequence
  Description of Artificial Sequence: Synthetic oligonucleotide
gggcuagacuagucuacag

SEQ ID NO: 2475546 - RNA, 19 nt, Artificial Sequence
  Description of Artificial Sequence: Synthetic oligonucleotide
guccaugcuuuuaaccaga

SEQ ID NO: 2475547 - RNA, 19 nt, Artificial Sequence
  Description of Artificial Sequence: Synthetic oligonucleotide
ugugggccgcaauauccuu

SEQ ID NO: 2475548 - RNA, 19 nt, Artificial Sequence
  Description of Artificial Sequence: Synthetic oligonucleotide
cacuggguguuuggcacag

SEQ ID NO: 2475549 - RNA, 19 nt, Artificial Sequence
  Description of Artificial Sequence: Synthetic oligonucleotide
augugggccgcaauauccu

SEQ ID NO: 2475550 - RNA, 19 nt, Artificial Sequence
  Description of Artificial Sequence: Synthetic oligonucleotide
acagaggaugaugcccugu

SEQ ID NO: 2475551 - RNA, 19 nt, Artificial Sequence
  Description of Artificial Sequence: Synthetic oligonucleotide
ggguacagaaguauggacu

SEQ ID NO: 2475552 - RNA, 19 nt, Artificial Sequence
  Description of Artificial Sequence: Synthetic oligonucleotide
gaguagcgcacuccaccga

SEQ ID NO: 2475553 - RNA, 19 nt, Artificial Sequence
  Description of Artificial Sequence: Synthetic oligonucleotide
cccuuagcaaggcugaaga

SEQ ID NO: 2475554 - RNA, 19 nt, Artificial Sequence
  Description of Artificial Sequence: Synthetic oligonucleotide
uuccgacaugucugcauuu

SEQ ID NO: 2475555 - RNA, 19 nt, Artificial Sequence
  Description of Artificial Sequence: Synthetic oligonucleotide
acuacaucuccaacagauu

SEQ ID NO: 2475556 - RNA, 19 nt, Artificial Sequence
  Description of Artificial Sequence: Synthetic oligonucleotide
ggguuguacuucuugucaa

SEQ ID NO: 2475557 - RNA, 19 nt, Artificial Sequence
  Description of Artificial Sequence: Synthetic oligonucleotide
uggcgcaucuaaggagccc

SEQ ID NO: 2475558 - RNA, 19 nt, Artificial Sequence
  Description of Artificial Sequence: Synthetic oligonucleotide
gcuguuuuacuaauuauuu

SEQ ID NO: 2475559 - RNA, 19 nt, Artificial Sequence
  Description of Artificial Sequence: Synthetic oligonucleotide
accgaaguuccgccccaca

SEQ ID NO: 2475560 - RNA, 19 nt, Artificial Sequence
  Description of Artificial Sequence: Synthetic oligonucleotide
gccuuccggucgcacaugg

SEQ ID NO: 2475561 - RNA, 19 nt, Artificial Sequence
  Description of Artificial Sequence: Synthetic oligonucleotide
gccgcaauauccuuuucua

SEQ ID NO: 2475562 - RNA, 19 nt, Artificial Sequence
  Description of Artificial Sequence: Synthetic oligonucleotide
gcugaagagucagucucug

SEQ ID NO: 2475563 - RNA, 19 nt, Artificial Sequence
  Description of Artificial Sequence: Synthetic oligonucleotide
cuaccgaagccguggcgca

SEQ ID NO: 2475564 - RNA, 19 nt, Artificial Sequence
  Description of Artificial Sequence: Synthetic oligonucleotide
cuucuccaacgccugagua

SEQ ID NO: 2475565 - RNA, 19 nt, Artificial Sequence
  Description of Artificial Sequence: Synthetic oligonucleotide
caccugacccagguagaag

SEQ ID NO: 2475566 - RNA, 19 nt, Artificial Sequence
  Description of Artificial Sequence: Synthetic oligonucleotide
agagaagagccggucgcua

SEQ ID NO: 2475567 - RNA, 19 nt, Artificial Sequence
  Description of Artificial Sequence: Synthetic oligonucleotide
gcacaguccaugcuuuuaa

SEQ ID NO: 2475568 - RNA, 19 nt, Artificial Sequence
  Description of Artificial Sequence: Synthetic oligonucleotide
gucgcacaugguugccgug

SEQ ID NO: 2475569 - RNA, 19 nt, Artificial Sequence
  Description of Artificial Sequence: Synthetic oligonucleotide
agguagauccugaguucca

SEQ ID NO: 2475570 - RNA, 19 nt, Artificial Sequence
  Description of Artificial Sequence: Synthetic oligonucleotide
ccguggcgcaucuaaggag

SEQ ID NO: 2475571 - RNA, 19 nt, Artificial Sequence
  Description of Artificial Sequence: Synthetic oligonucleotide
ccggucgcuaccgaagccg

SEQ ID NO: 2475572 - RNA, 19 nt, Artificial Sequence
  Description of Artificial Sequence: Synthetic oligonucleotide
guggcgcaucuaaggagcc

SEQ ID NO: 2475573 - RNA, 19 nt, Artificial Sequence
  Description of Artificial Sequence: Synthetic oligonucleotide
gccugaguagcgcacucca

SEQ ID NO: 2475574 - RNA, 19 nt, Artificial Sequence
  Description of Artificial Sequence: Synthetic oligonucleotide
cugcugcgagcucccgagg

SEQ ID NO: 2475575 - RNA, 19 nt, Artificial Sequence
  Description of Artificial Sequence: Synthetic oligonucleotide
cagcagagaagagccgguc

SEQ ID NO: 2475576 - RNA, 19 nt, Artificial Sequence
  Description of Artificial Sequence: Synthetic oligonucleotide
cuuccggucgcacaugguu

SEQ ID NO: 2475577 - RNA, 19 nt, Artificial Sequence
  Description of Artificial Sequence: Synthetic oligonucleotide
cuaccgaaguuccgcccca

SEQ ID NO: 2475578 - RNA, 19 nt, Artificial Sequence
  Description of Artificial Sequence: Synthetic oligonucleotide
ggugguucauaccuuuaau

SEQ ID NO: 2475579 - RNA, 19 nt, Artificial Sequence
  Description of Artificial Sequence: Synthetic oligonucleotide
gagucagucucugguauuu

SEQ ID NO: 2475580 - RNA, 19 nt, Artificial Sequence
  Description of Artificial Sequence: Synthetic oligonucleotide
ggaauggccuaagggagaa

SEQ ID NO: 2475581 - RNA, 19 nt, Artificial Sequence
  Description of Artificial Sequence: Synthetic oligonucleotide
uggcacaguccaugcuuuu

SEQ ID NO: 2475582 - RNA, 19 nt, Artificial Sequence
  Description of Artificial Sequence: Synthetic oligonucleotide
ggccgcaauauccuuuucu

SEQ ID NO: 2475583 - RNA, 19 nt, Artificial Sequence
  Description of Artificial Sequence: Synthetic oligonucleotide
cuggcgccgcucaggcagc

SEQ ID NO: 2475584 - RNA, 19 nt, Artificial Sequence
  Description of Artificial Sequence: Synthetic oligonucleotide
cuuccgacaugucugcauu

SEQ ID NO: 2475585 - RNA, 19 nt, Artificial Sequence
  Description of Artificial Sequence: Synthetic oligonucleotide
uaccgaaguuccgccccac

SEQ ID NO: 2475586 - RNA, 19 nt, Artificial Sequence
  Description of Artificial Sequence: Synthetic oligonucleotide
ccugaguagcgcacuccac

SEQ ID NO: 2475587 - RNA, 19 nt, Artificial Sequence
  Description of Artificial Sequence: Synthetic oligonucleotide
gcacaugguugccguggag

SEQ ID NO: 2475588 - RNA, 19 nt, Artificial Sequence
  Description of Artificial Sequence: Synthetic oligonucleotide
guaagcuguuuuacuaauu

SEQ ID NO: 2475589 - RNA, 19 nt, Artificial Sequence
  Description of Artificial Sequence: Synthetic oligonucleotide
ccaacgccugaguagcgca

SEQ ID NO: 2475590 - RNA, 19 nt, Artificial Sequence
  Description of Artificial Sequence: Synthetic oligonucleotide
ggaugaugcccuguacaaa

SEQ ID NO: 2475591 - RNA, 19 nt, Artificial Sequence
  Description of Artificial Sequence: Synthetic oligonucleotide
cagauucaaacgagguguu

SEQ ID NO: 2475592 - RNA, 19 nt, Artificial Sequence
  Description of Artificial Sequence: Synthetic oligonucleotide
gacccagguagaaguagau

SEQ ID NO: 2475593 - RNA, 19 nt, Artificial Sequence
  Description of Artificial Sequence: Synthetic oligonucleotide
ggucgcacaugguugccgu

SEQ ID NO: 2475594 - RNA, 19 nt, Artificial Sequence
  Description of Artificial Sequence: Synthetic oligonucleotide
gcccuguacaaaacacaac

SEQ ID NO: 2475595 - RNA, 19 nt, Artificial Sequence
  Description of Artificial Sequence: Synthetic oligonucleotide
uaccgaagccguggcgcau

SEQ ID NO: 2475596 - RNA, 19 nt, Artificial Sequence
  Description of Artificial Sequence: Synthetic oligonucleotide
ccagggcuagacuagucua

SEQ ID NO: 2475597 - RNA, 19 nt, Artificial Sequence
  Description of Artificial Sequence: Synthetic oligonucleotide
gaauggccuaagggagaaa

SEQ ID NO: 2475598 - RNA, 19 nt, Artificial Sequence
  Description of Artificial Sequence: Synthetic oligonucleotide
gccggucgcuaccgaagcc

SEQ ID NO: 2475599 - RNA, 19 nt, Artificial Sequence
  Description of Artificial Sequence: Synthetic oligonucleotide
auccugaguuccagggcua

SEQ ID NO: 2475600 - RNA, 19 nt, Artificial Sequence
  Description of Artificial Sequence: Synthetic oligonucleotide
gccguggagcaggagccag

SEQ ID NO: 2475601 - RNA, 19 nt, Artificial Sequence
  Description of Artificial Sequence: Synthetic oligonucleotide
cucugguauuuggaauuua

SEQ ID NO: 2475602 - RNA, 19 nt, Artificial Sequence
  Description of Artificial Sequence: Synthetic oligonucleotide
cgagguguucccuuagcaa

SEQ ID NO: 2475603 - RNA, 19 nt, Artificial Sequence
  Description of Artificial Sequence: Synthetic oligonucleotide
guggugguucauaccuuua

SEQ ID NO: 2475604 - RNA, 19 nt, Artificial Sequence
  Description of Artificial Sequence: Synthetic oligonucleotide
acuggguguuuggcacagu

SEQ ID NO: 2475605 - RNA, 19 nt, Artificial Sequence
  Description of Artificial Sequence: Synthetic oligonucleotide
gauggaucacuggguguuu

SEQ ID NO: 2475606 - RNA, 19 nt, Artificial Sequence
  Description of Artificial Sequence: Synthetic oligonucleotide
gcugcgagcucccgaggaa

SEQ ID NO: 2475607 - RNA, 19 nt, Artificial Sequence
  Description of Artificial Sequence: Synthetic oligonucleotide
cucuuccgacaugucugca

SEQ ID NO: 2475608 - RNA, 19 nt, Artificial Sequence
  Description of Artificial Sequence: Synthetic oligonucleotide
ccgaaguuccgccccacaa

SEQ ID NO: 2475609 - RNA, 19 nt, Artificial Sequence
  Description of Artificial Sequence: Synthetic oligonucleotide
ggcacaguccaugcuuuua

SEQ ID NO: 2475610 - RNA, 19 nt, Artificial Sequence
  Description of Artificial Sequence: Synthetic oligonucleotide
gcgcacuccaccgaguccu

SEQ ID NO: 2475611 - RNA, 19 nt, Artificial Sequence
  Description of Artificial Sequence: Synthetic oligonucleotide
gcgccgcucaggcagcaga

SEQ ID NO: 2475612 - RNA, 19 nt, Artificial Sequence
  Description of Artificial Sequence: Synthetic oligonucleotide
agugccaggugggguugua

SEQ ID NO: 2475613 - RNA, 19 nt, Artificial Sequence
  Description of Artificial Sequence: Synthetic oligonucleotide
gccagccggcugcugcgag

SEQ ID NO: 2475614 - RNA, 19 nt, Artificial Sequence
  Description of Artificial Sequence: Synthetic oligonucleotide
ucaccgccuuccggucgca

SEQ ID NO: 2475615 - RNA, 19 nt, Artificial Sequence
  Description of Artificial Sequence: Synthetic oligonucleotide
ccgcucaggcagcagagaa

SEQ ID NO: 2475616 - RNA, 19 nt, Artificial Sequence
  Description of Artificial Sequence: Synthetic oligonucleotide
ggucgcuaccgaagccgug

SEQ ID NO: 2475617 - RNA, 19 nt, Artificial Sequence
  Description of Artificial Sequence: Synthetic oligonucleotide
agccagccggcugcugcga

SEQ ID NO: 2475618 - RNA, 19 nt, Artificial Sequence
  Description of Artificial Sequence: Synthetic oligonucleotide
cgcuaccgaagccguggcg

SEQ ID NO: 2475619 - RNA, 19 nt, Artificial Sequence
  Description of Artificial Sequence: Synthetic oligonucleotide
cacuccaccgaguccuguu

SEQ ID NO: 2475620 - RNA, 19 nt, Artificial Sequence
  Description of Artificial Sequence: Synthetic oligonucleotide
uggcgccgcucaggcagca

SEQ ID NO: 2475621 - RNA, 19 nt, Artificial Sequence
  Description of Artificial Sequence: Synthetic oligonucleotide
gguugccguggagcaggag

SEQ ID NO: 2475622 - RNA, 19 nt, Artificial Sequence
  Description of Artificial Sequence: Synthetic oligonucleotide
guagcgcacuccaccgagu

SEQ ID NO: 2475623 - RNA, 19 nt, Artificial Sequence
  Description of Artificial Sequence: Synthetic oligonucleotide
cgagcucccgaggaaggug

SEQ ID NO: 2475624 - RNA, 19 nt, Artificial Sequence
  Description of Artificial Sequence: Synthetic oligonucleotide
cggucgcacaugguugccg

SEQ ID NO: 2475625 - RNA, 19 nt, Artificial Sequence
  Description of Artificial Sequence: Synthetic oligonucleotide
gugggccgcaauauccuuu

SEQ ID NO: 2475626 - RNA, 19 nt, Artificial Sequence
  Description of Artificial Sequence: Synthetic oligonucleotide
cagccggcugcugcgagcu

SEQ ID NO: 2475627 - RNA, 19 nt, Artificial Sequence
  Description of Artificial Sequence: Synthetic oligonucleotide
caucuccaacagauuuauu

SEQ ID NO: 2475628 - RNA, 19 nt, Artificial Sequence
  Description of Artificial Sequence: Synthetic oligonucleotide
ccgccccacaaugcagugc

SEQ ID NO: 2475629 - RNA, 19 nt, Artificial Sequence
  Description of Artificial Sequence: Synthetic oligonucleotide
caccgccuuccggucgcac

SEQ ID NO: 2475630 - RNA, 19 nt, Artificial Sequence
  Description of Artificial Sequence: Synthetic oligonucleotide
ccgcaauauccuuuucuau

SEQ ID NO: 2475631 - RNA, 19 nt, Artificial Sequence
  Description of Artificial Sequence: Synthetic oligonucleotide
gggccgcaauauccuuuuc

SEQ ID NO: 2475632 - RNA, 19 nt, Artificial Sequence
  Description of Artificial Sequence: Synthetic oligonucleotide
cgccugaguagcgcacucc

SEQ ID NO: 2475633 - RNA, 19 nt, Artificial Sequence
  Description of Artificial Sequence: Synthetic oligonucleotide
cccugccucaaaacuacau

SEQ ID NO: 2475634 - RNA, 19 nt, Artificial Sequence
  Description of Artificial Sequence: Synthetic oligonucleotide
ccggucgcacaugguugcc

SEQ ID NO: 2475635 - RNA, 19 nt, Artificial Sequence
  Description of Artificial Sequence: Synthetic oligonucleotide
gcaaggcugaagagucagu

SEQ ID NO: 2475636 - RNA, 19 nt, Artificial Sequence
  Description of Artificial Sequence: Synthetic oligonucleotide
ggcgccgcucaggcagcag

SEQ ID NO: 2475637 - RNA, 19 nt, Artificial Sequence
  Description of Artificial Sequence: Synthetic oligonucleotide
cgcacaugguugccgugga

SEQ ID NO: 2475638 - RNA, 19 nt, Artificial Sequence
  Description of Artificial Sequence: Synthetic oligonucleotide
cgaaguuccgccccacaau

SEQ ID NO: 2475639 - RNA, 19 nt, Artificial Sequence
  Description of Artificial Sequence: Synthetic oligonucleotide
ccaugcuuuuaaccagauu

SEQ ID NO: 2475640 - RNA, 19 nt, Artificial Sequence
  Description of Artificial Sequence: Synthetic oligonucleotide
gcgagcucccgaggaaggu

SEQ ID NO: 2475641 - RNA, 19 nt, Artificial Sequence
  Description of Artificial Sequence: Synthetic oligonucleotide
ccgccuuccggucgcacau

SEQ ID NO: 2475642 - RNA, 19 nt, Artificial Sequence
  Description of Artificial Sequence: Synthetic oligonucleotide
cggucgcuaccgaagccgu

SEQ ID NO: 2475643 - RNA, 19 nt, Artificial Sequence
  Description of Artificial Sequence: Synthetic oligonucleotide
ccaccgaguccuguugcau

SEQ ID NO: 2475644 - RNA, 19 nt, Artificial Sequence
  Description of Artificial Sequence: Synthetic oligonucleotide
ccgaagccguggcgcaucu

SEQ ID NO: 2475645 - RNA, 19 nt, Artificial Sequence
  Description of Artificial Sequence: Synthetic oligonucleotide
aaauuuuacaaauauagcc

SEQ ID NO: 2475646 - RNA, 19 nt, Artificial Sequence
  Description of Artificial Sequence: Synthetic oligonucleotide
aacaaauucuacuacaauc

SEQ ID NO: 2475647 - RNA, 19 nt, Artificial Sequence
  Description of Artificial Sequence: Synthetic oligonucleotide
acuacaaucacauuaccgc

SEQ ID NO: 2475648 - RNA, 19 nt, Artificial Sequence
  Description of Artificial Sequence: Synthetic oligonucleotide
aaaauuaacugcuuauaac

SEQ ID NO: 2475649 - RNA, 19 nt, Artificial Sequence
  Description of Artificial Sequence: Synthetic oligonucleotide
aaauuaacugcuuauaaca

SEQ ID NO: 2475650 - RNA, 19 nt, Artificial Sequence
  Description of Artificial Sequence: Synthetic oligonucleotide
uuuguuuagaaaauuaagc

SEQ ID NO: 2475651 - RNA, 19 nt, Artificial Sequence
  Description of Artificial Sequence: Synthetic oligonucleotide
cuuauaacacuauacaugg

SEQ ID NO: 2475652 - RNA, 19 nt, Artificial Sequence
  Description of Artificial Sequence: Synthetic oligonucleotide
aaugauauaaauaugcucu

SEQ ID NO: 2475653 - RNA, 19 nt, Artificial Sequence
  Description of Artificial Sequence: Synthetic oligonucleotide
ucuagauuauuuaauacag

SEQ ID NO: 2475654 - RNA, 19 nt, Artificial Sequence
  Description of Artificial Sequence: Synthetic oligonucleotide
uuauuuaauacagagaagc

SEQ ID NO: 2475655 - RNA, 19 nt, Artificial Sequence
  Description of Artificial Sequence: Synthetic oligonucleotide
aauccugggaaacaaauuc

SEQ ID NO: 2475656 - RNA, 19 nt, Artificial Sequence
  Description of Artificial Sequence: Synthetic oligonucleotide
cuauaauuaacuauugagg

SEQ ID NO: 2475657 - RNA, 19 nt, Artificial Sequence
  Description of Artificial Sequence: Synthetic oligonucleotide
uuugacaugaaauauaaaa

SEQ ID NO: 2475658 - RNA, 19 nt, Artificial Sequence
  Description of Artificial Sequence: Synthetic oligonucleotide
uagauuauuuaauacagag

SEQ ID NO: 2475659 - RNA, 19 nt, Artificial Sequence
  Description of Artificial Sequence: Synthetic oligonucleotide
uacaugguaaauaugacca

SEQ ID NO: 2475660 - RNA, 19 nt, Artificial Sequence
  Description of Artificial Sequence: Synthetic oligonucleotide
uuaauugucucaauggagc

SEQ ID NO: 2475661 - RNA, 19 nt, Artificial Sequence
  Description of Artificial Sequence: Synthetic oligonucleotide
ugaggaaugauauaaauau

SEQ ID NO: 2475662 - RNA, 19 nt, Artificial Sequence
  Description of Artificial Sequence: Synthetic oligonucleotide
augauuucccuacuaaucc

SEQ ID NO: 2475663 - RNA, 19 nt, Artificial Sequence
  Description of Artificial Sequence: Synthetic oligonucleotide
uguuuaauagcuuuucaag

SEQ ID NO: 2475664 - RNA, 19 nt, Artificial Sequence
  Description of Artificial Sequence: Synthetic oligonucleotide
ugagauuuguuuaauagcu

SEQ ID NO: 2475665 - RNA, 19 nt, Artificial Sequence
  Description of Artificial Sequence: Synthetic oligonucleotide
auacaugguaaauaugacc

SEQ ID NO: 2475666 - RNA, 19 nt, Artificial Sequence
  Description of Artificial Sequence: Synthetic oligonucleotide
auuacuauaaagacaagac

SEQ ID NO: 2475667 - RNA, 19 nt, Artificial Sequence
  Description of Artificial Sequence: Synthetic oligonucleotide
aggaaugauauaaauaugc

SEQ ID NO: 2475668 - RNA, 19 nt, Artificial Sequence
  Description of Artificial Sequence: Synthetic oligonucleotide
ucuauuguucacuagggag

SEQ ID NO: 2475669 - RNA, 19 nt, Artificial Sequence
  Description of Artificial Sequence: Synthetic oligonucleotide
uucucuauuguucacuagg

SEQ ID NO: 2475670 - RNA, 19 nt, Artificial Sequence
  Description of Artificial Sequence: Synthetic oligonucleotide
ugugaucucagcuuaaaag

SEQ ID NO: 2475671 - RNA, 19 nt, Artificial Sequence
  Description of Artificial Sequence: Synthetic oligonucleotide
aauacagagaagcaaucug

SEQ ID NO: 2475672 - RNA, 19 nt, Artificial Sequence
  Description of Artificial Sequence: Synthetic oligonucleotide
uuuaauacagagaagcaau

SEQ ID NO: 2475673 - RNA, 19 nt, Artificial Sequence
  Description of Artificial Sequence: Synthetic oligonucleotide
agaaaauuaagcugaacug

SEQ ID NO: 2475674 - RNA, 19 nt, Artificial Sequence
  Description of Artificial Sequence: Synthetic oligonucleotide
uacauccuaacccugaaag

SEQ ID NO: 2475675 - RNA, 19 nt, Artificial Sequence
  Description of Artificial Sequence: Synthetic oligonucleotide
cauauuacuauaaagacaa

SEQ ID NO: 2475676 - RNA, 19 nt, Artificial Sequence
  Description of Artificial Sequence: Synthetic oligonucleotide
gacauauuacuauaaagac

SEQ ID NO: 2475677 - RNA, 19 nt, Artificial Sequence
  Description of Artificial Sequence: Synthetic oligonucleotide
cuugguugaugcuugaugg

SEQ ID NO: 2475678 - RNA, 19 nt, Artificial Sequence
  Description of Artificial Sequence: Synthetic oligonucleotide
acccugaaagucuauaacc

SEQ ID NO: 2475679 - RNA, 19 nt, Artificial Sequence
  Description of Artificial Sequence: Synthetic oligonucleotide
uucuagauuauuuaauaca

SEQ ID NO: 2475680 - RNA, 19 nt, Artificial Sequence
  Description of Artificial Sequence: Synthetic oligonucleotide
uagaacaucccuuucagug

SEQ ID NO: 2475681 - RNA, 19 nt, Artificial Sequence
  Description of Artificial Sequence: Synthetic oligonucleotide
uuacuauaaagacaagaca

SEQ ID NO: 2475682 - RNA, 19 nt, Artificial Sequence
  Description of Artificial Sequence: Synthetic oligonucleotide
aaccaguuacaucacgugg

SEQ ID NO: 2475683 - RNA, 19 nt, Artificial Sequence
  Description of Artificial Sequence: Synthetic oligonucleotide
aaauaugcucucuuuauau

SEQ ID NO: 2475684 - RNA, 19 nt, Artificial Sequence
  Description of Artificial Sequence: Synthetic oligonucleotide
cuuaagaugauuucccuac

SEQ ID NO: 2475685 - RNA, 19 nt, Artificial Sequence
  Description of Artificial Sequence: Synthetic oligonucleotide
uauaacacuauacauggua

SEQ ID NO: 2475686 - RNA, 19 nt, Artificial Sequence
  Description of Artificial Sequence: Synthetic oligonucleotide
agguuaauugucucaaugg

SEQ ID NO: 2475687 - RNA, 19 nt, Artificial Sequence
  Description of Artificial Sequence: Synthetic oligonucleotide
cacaaagguaccaaaaccc

SEQ ID NO: 2475688 - RNA, 19 nt, Artificial Sequence
  Description of Artificial Sequence: Synthetic oligonucleotide
aauucuacuacaaucacau

SEQ ID NO: 2475689 - RNA, 19 nt, Artificial Sequence
  Description of Artificial Sequence: Synthetic oligonucleotide
aacccugaaagucuauaac

SEQ ID NO: 2475690 - RNA, 19 nt, Artificial Sequence
  Description of Artificial Sequence: Synthetic oligonucleotide
uucuguacuagguuaauug

SEQ ID NO: 2475691 - RNA, 19 nt, Artificial Sequence
  Description of Artificial Sequence: Synthetic oligonucleotide
aauauuucucaaguuaucu

SEQ ID NO: 2475692 - RNA, 19 nt, Artificial Sequence
  Description of Artificial Sequence: Synthetic oligonucleotide
cuauacaugguaaauauga

SEQ ID NO: 2475693 - RNA, 19 nt, Artificial Sequence
  Description of Artificial Sequence: Synthetic oligonucleotide
aguuacaucacguggcuuc

SEQ ID NO: 2475694 - RNA, 19 nt, Artificial Sequence
  Description of Artificial Sequence: Synthetic oligonucleotide
cuuaacucuccuaacacag

SEQ ID NO: 2475695 - RNA, 19 nt, Artificial Sequence
  Description of Artificial Sequence: Synthetic oligonucleotide
agaacuuuguuuuaccucu

SEQ ID NO: 2475696 - RNA, 19 nt, Artificial Sequence
  Description of Artificial Sequence: Synthetic oligonucleotide
ucucuauuguucacuaggg

SEQ ID NO: 2475697 - RNA, 19 nt, Artificial Sequence
  Description of Artificial Sequence: Synthetic oligonucleotide
uguacuagguuaauugucu

SEQ ID NO: 2475698 - RNA, 19 nt, Artificial Sequence
  Description of Artificial Sequence: Synthetic oligonucleotide
uuuaauagcuuuucaagau

SEQ ID NO: 2475699 - RNA, 19 nt, Artificial Sequence
  Description of Artificial Sequence: Synthetic oligonucleotide
uauuacuauaaagacaaga

SEQ ID NO: 2475700 - RNA, 19 nt, Artificial Sequence
  Description of Artificial Sequence: Synthetic oligonucleotide
uuaaaagauagaacauccc

SEQ ID NO: 2475701 - RNA, 19 nt, Artificial Sequence
  Description of Artificial Sequence: Synthetic oligonucleotide
aggacauauuacuauaaag

SEQ ID NO: 2475702 - RNA, 19 nt, Artificial Sequence
  Description of Artificial Sequence: Synthetic oligonucleotide
uauuuaauacagagaagca

SEQ ID NO: 2475703 - RNA, 19 nt, Artificial Sequence
  Description of Artificial Sequence: Synthetic oligonucleotide
gaaugauauaaauaugcuc

SEQ ID NO: 2475704 - RNA, 19 nt, Artificial Sequence
  Description of Artificial Sequence: Synthetic oligonucleotide
aaagauagaacaucccuuu

SEQ ID NO: 2475705 - RNA, 19 nt, Artificial Sequence
  Description of Artificial Sequence: Synthetic oligonucleotide
aauuaagcugaacuggaaa

SEQ ID NO: 2475706 - RNA, 19 nt, Artificial Sequence
  Description of Artificial Sequence: Synthetic oligonucleotide
aauugucucaauggagccc

SEQ ID NO: 2475707 - RNA, 19 nt, Artificial Sequence
  Description of Artificial Sequence: Synthetic oligonucleotide
aaacccuauaauuaacuau

SEQ ID NO: 2475708 - RNA, 19 nt, Artificial Sequence
  Description of Artificial Sequence: Synthetic oligonucleotide
uucucaaguuaucucauug

SEQ ID NO: 2475709 - RNA, 19 nt, Artificial Sequence
  Description of Artificial Sequence: Synthetic oligonucleotide
uacaaucacauuaccgcgg

SEQ ID NO: 2475710 - RNA, 19 nt, Artificial Sequence
  Description of Artificial Sequence: Synthetic oligonucleotide
uauaaccaguuacaucacg

SEQ ID NO: 2475711 - RNA, 19 nt, Artificial Sequence
  Description of Artificial Sequence: Synthetic oligonucleotide
ucaaguuaucucauuggcc

SEQ ID NO: 2475712 - RNA, 19 nt, Artificial Sequence
  Description of Artificial Sequence: Synthetic oligonucleotide
uuuccaauggcuuucuccu

SEQ ID NO: 2475713 - RNA, 19 nt, Artificial Sequence
  Description of Artificial Sequence: Synthetic oligonucleotide
ccuauaauuaacuauugag

SEQ ID NO: 2475714 - RNA, 19 nt, Artificial Sequence
  Description of Artificial Sequence: Synthetic oligonucleotide
aauggcuuguauuuccaca

SEQ ID NO: 2475715 - RNA, 19 nt, Artificial Sequence
  Description of Artificial Sequence: Synthetic oligonucleotide
uaauguuuagcguucuucu

SEQ ID NO: 2475716 - RNA, 19 nt, Artificial Sequence
  Description of Artificial Sequence: Synthetic oligonucleotide
cuuguauuuccacagguac

SEQ ID NO: 2475717 - RNA, 19 nt, Artificial Sequence
  Description of Artificial Sequence: Synthetic oligonucleotide
cagcuuaaaagauagaaca

SEQ ID NO: 2475718 - RNA, 19 nt, Artificial Sequence
  Description of Artificial Sequence: Synthetic oligonucleotide
aauuugacaugaaauauaa

SEQ ID NO: 2475719 - RNA, 19 nt, Artificial Sequence
  Description of Artificial Sequence: Synthetic oligonucleotide
uucacuagggagucggagg

SEQ ID NO: 2475720 - RNA, 19 nt, Artificial Sequence
  Description of Artificial Sequence: Synthetic oligonucleotide
ugauggagaguucuuaacu

SEQ ID NO: 2475721 - RNA, 19 nt, Artificial Sequence
  Description of Artificial Sequence: Synthetic oligonucleotide
aucacauuaccgcgggucc

SEQ ID NO: 2475722 - RNA, 19 nt, Artificial Sequence
  Description of Artificial Sequence: Synthetic oligonucleotide
cuacaaucacauuaccgcg

SEQ ID NO: 2475723 - RNA, 19 nt, Artificial Sequence
  Description of Artificial Sequence: Synthetic oligonucleotide
aagauagaacaucccuuuc

SEQ ID NO: 2475724 - RNA, 19 nt, Artificial Sequence
  Description of Artificial Sequence: Synthetic oligonucleotide
uauacaugguaaauaugac

SEQ ID NO: 2475725 - RNA, 19 nt, Artificial Sequence
  Description of Artificial Sequence: Synthetic oligonucleotide
aacuauugaggaaugauau

SEQ ID NO: 2475726 - RNA, 19 nt, Artificial Sequence
  Description of Artificial Sequence: Synthetic oligonucleotide
uuuagcguucuucuuaaaa

SEQ ID NO: 2475727 - RNA, 19 nt, Artificial Sequence
  Description of Artificial Sequence: Synthetic oligonucleotide
uuuaauucucucuggcuac

SEQ ID NO: 2475728 - RNA, 19 nt, Artificial Sequence
  Description of Artificial Sequence: Synthetic oligonucleotide
uucuuaacucuccuaacac

SEQ ID NO: 2475729 - RNA, 19 nt, Artificial Sequence
  Description of Artificial Sequence: Synthetic oligonucleotide
uuguuuaauagcuuuucaa

SEQ ID NO: 2475730 - RNA, 19 nt, Artificial Sequence
  Description of Artificial Sequence: Synthetic oligonucleotide
gugagauuuguuuaauagc

SEQ ID NO: 2475731 - RNA, 19 nt, Artificial Sequence
  Description of Artificial Sequence: Synthetic oligonucleotide
auuaagcugaacuggaaaa

SEQ ID NO: 2475732 - RNA, 19 nt, Artificial Sequence
  Description of Artificial Sequence: Synthetic oligonucleotide
aaagacaagacagaacuuu

SEQ ID NO: 2475733 - RNA, 19 nt, Artificial Sequence
  Description of Artificial Sequence: Synthetic oligonucleotide
cuucuagauuauuuaauac

SEQ ID NO: 2475734 - RNA, 19 nt, Artificial Sequence
  Description of Artificial Sequence: Synthetic oligonucleotide
auuaacugcuuauaacacu

SEQ ID NO: 2475735 - RNA, 19 nt, Artificial Sequence
  Description of Artificial Sequence: Synthetic oligonucleotide
cucaaguuaucucauuggc

SEQ ID NO: 2475736 - RNA, 19 nt, Artificial Sequence
  Description of Artificial Sequence: Synthetic oligonucleotide
aacuuaagaugauuucccu

SEQ ID NO: 2475737 - RNA, 19 nt, Artificial Sequence
  Description of Artificial Sequence: Synthetic oligonucleotide
uaacuauugaggaaugaua

SEQ ID NO: 2475738 - RNA, 19 nt, Artificial Sequence
  Description of Artificial Sequence: Synthetic oligonucleotide
aguucuuaacucuccuaac

SEQ ID NO: 2475739 - RNA, 19 nt, Artificial Sequence
  Description of Artificial Sequence: Synthetic oligonucleotide
uugaggaaugauauaaaua

SEQ ID NO: 2475740 - RNA, 19 nt, Artificial Sequence
  Description of Artificial Sequence: Synthetic oligonucleotide
gguaaauaugaccagcccc

SEQ ID NO: 2475741 - RNA, 19 nt, Artificial Sequence
  Description of Artificial Sequence: Synthetic oligonucleotide
ucaauuugacaugaaauau

SEQ ID NO: 2475742 - RNA, 19 nt, Artificial Sequence
  Description of Artificial Sequence: Synthetic oligonucleotide
uaauugucucaauggagcc

SEQ ID NO: 2475743 - RNA, 19 nt, Artificial Sequence
  Description of Artificial Sequence: Synthetic oligonucleotide
aaacaaauucuacuacaau

SEQ ID NO: 2475744 - RNA, 19 nt, Artificial Sequence
  Description of Artificial Sequence: Synthetic oligonucleotide
ucuguacuagguuaauugu

SEQ ID NO: 2475745 - RNA, 19 nt, Artificial Sequence
  Description of Artificial Sequence: Synthetic oligonucleotide
uacagagaagcaaucugug

SEQ ID NO: 2475746 - RNA, 19 nt, Artificial Sequence
  Description of Artificial Sequence: Synthetic oligonucleotide
auaauuaacuauugaggaa

SEQ ID NO: 2475747 - RNA, 19 nt, Artificial Sequence
  Description of Artificial Sequence: Synthetic oligonucleotide
ugggaaacaaauucuacua

SEQ ID NO: 2475748 - RNA, 19 nt, Artificial Sequence
  Description of Artificial Sequence: Synthetic oligonucleotide
agauagaacaucccuuuca

SEQ ID NO: 2475749 - RNA, 19 nt, Artificial Sequence
  Description of Artificial Sequence: Synthetic oligonucleotide
uuaauacagagaagcaauc

SEQ ID NO: 2475750 - RNA, 19 nt, Artificial Sequence
  Description of Artificial Sequence: Synthetic oligonucleotide
accaguuacaucacguggc

SEQ ID NO: 2475751 - RNA, 19 nt, Artificial Sequence
  Description of Artificial Sequence: Synthetic oligonucleotide
gauggagaguucuuaacuc

SEQ ID NO: 2475752 - RNA, 19 nt, Artificial Sequence
  Description of Artificial Sequence: Synthetic oligonucleotide
uucccugaggcacaaaggu

SEQ ID NO: 2475753 - RNA, 19 nt, Artificial Sequence
  Description of Artificial Sequence: Synthetic oligonucleotide
ugugaggacauauuacuau

SEQ ID NO: 2475754 - RNA, 19 nt, Artificial Sequence
  Description of Artificial Sequence: Synthetic oligonucleotide
uguaauaacuuaagaugau

SEQ ID NO: 2475755 - RNA, 19 nt, Artificial Sequence
  Description of Artificial Sequence: Synthetic oligonucleotide
acuucuagauuauuuaaua

SEQ ID NO: 2475756 - RNA, 19 nt, Artificial Sequence
  Description of Artificial Sequence: Synthetic oligonucleotide
guugaugcuugauggagag

SEQ ID NO: 2475757 - RNA, 19 nt, Artificial Sequence
  Description of Artificial Sequence: Synthetic oligonucleotide
uuaacuauugaggaaugau

SEQ ID NO: 2475758 - RNA, 19 nt, Artificial Sequence
  Description of Artificial Sequence: Synthetic oligonucleotide
aacccuauaauuaacuauu

SEQ ID NO: 2475759 - RNA, 19 nt, Artificial Sequence
  Description of Artificial Sequence: Synthetic oligonucleotide
uuuaccucuucaguaaugu

SEQ ID NO: 2475760 - RNA, 19 nt, Artificial Sequence
  Description of Artificial Sequence: Synthetic oligonucleotide
aaauucuacuacaaucaca

SEQ ID NO: 2475761 - RNA, 19 nt, Artificial Sequence
  Description of Artificial Sequence: Synthetic oligonucleotide
ucaguaauguuuagcguuc

SEQ ID NO: 2475762 - RNA, 19 nt, Artificial Sequence
  Description of Artificial Sequence: Synthetic oligonucleotide
aauaugcucucuuuauauu

SEQ ID NO: 2475763 - RNA, 19 nt, Artificial Sequence
  Description of Artificial Sequence: Synthetic oligonucleotide
auuuaauacagagaagcaa

SEQ ID NO: 2475764 - RNA, 19 nt, Artificial Sequence
  Description of Artificial Sequence: Synthetic oligonucleotide
ugaucucagcuuaaaagau

SEQ ID NO: 2475765 - RNA, 19 nt, Artificial Sequence
  Description of Artificial Sequence: Synthetic oligonucleotide
aaucugugaucucagcuua

SEQ ID NO: 2475766 - RNA, 19 nt, Artificial Sequence
  Description of Artificial Sequence: Synthetic oligonucleotide
aacacuauacaugguaaau

SEQ ID NO: 2475767 - RNA, 19 nt, Artificial Sequence
  Description of Artificial Sequence: Synthetic oligonucleotide
uaaccaguuacaucacgug

SEQ ID NO: 2475768 - RNA, 19 nt, Artificial Sequence
  Description of Artificial Sequence: Synthetic oligonucleotide
uaauacagagaagcaaucu

SEQ ID NO: 2475769 - RNA, 19 nt, Artificial Sequence
  Description of Artificial Sequence: Synthetic oligonucleotide
acauauuacuauaaagaca

SEQ ID NO: 2475770 - RNA, 19 nt, Artificial Sequence
  Description of Artificial Sequence: Synthetic oligonucleotide
aauuaacuauugaggaaug

SEQ ID NO: 2475771 - RNA, 19 nt, Artificial Sequence
  Description of Artificial Sequence: Synthetic oligonucleotide
cuuucucuacauccuaacc

SEQ ID NO: 2475772 - RNA, 19 nt, Artificial Sequence
  Description of Artificial Sequence: Synthetic oligonucleotide
gaagcaaucugugaucuca

SEQ ID NO: 2475773 - RNA, 19 nt, Artificial Sequence
  Description of Artificial Sequence: Synthetic oligonucleotide
caugguaaauaugaccagc

SEQ ID NO: 2475774 - RNA, 19 nt, Artificial Sequence
  Description of Artificial Sequence: Synthetic oligonucleotide
uuaacucuccuaacacagc

SEQ ID NO: 2475775 - RNA, 19 nt, Artificial Sequence
  Description of Artificial Sequence: Synthetic oligonucleotide
aaagguaccaaaacccuau

SEQ ID NO: 2475776 - RNA, 19 nt, Artificial Sequence
  Description of Artificial Sequence: Synthetic oligonucleotide
acagaacuuuguuuuaccu

SEQ ID NO: 2475777 - RNA, 19 nt, Artificial Sequence
  Description of Artificial Sequence: Synthetic oligonucleotide
auaugcucucuuuauauua

SEQ ID NO: 2475778 - RNA, 19 nt, Artificial Sequence
  Description of Artificial Sequence: Synthetic oligonucleotide
gcuuauaacacuauacaug

SEQ ID NO: 2475779 - RNA, 19 nt, Artificial Sequence
  Description of Artificial Sequence: Synthetic oligonucleotide
uucccuacuaauccuggga

SEQ ID NO: 2475780 - RNA, 19 nt, Artificial Sequence
  Description of Artificial Sequence: Synthetic oligonucleotide
ugaugcuugauggagaguu

SEQ ID NO: 2475781 - RNA, 19 nt, Artificial Sequence
  Description of Artificial Sequence: Synthetic oligonucleotide
ugaggacauauuacuauaa

SEQ ID NO: 2475782 - RNA, 19 nt, Artificial Sequence
  Description of Artificial Sequence: Synthetic oligonucleotide
cauauguaauaacuuaaga

SEQ ID NO: 2475783 - RNA, 19 nt, Artificial Sequence
  Description of Artificial Sequence: Synthetic oligonucleotide
agcaaucugugaucucagc

SEQ ID NO: 2475784 - RNA, 19 nt, Artificial Sequence
  Description of Artificial Sequence: Synthetic oligonucleotide
uaacacagcauauguaaua

SEQ ID NO: 2475785 - RNA, 19 nt, Artificial Sequence
  Description of Artificial Sequence: Synthetic oligonucleotide
gaguucuuaacucuccuaa

SEQ ID NO: 2475786 - RNA, 19 nt, Artificial Sequence
  Description of Artificial Sequence: Synthetic oligonucleotide
uuucccuacuaauccuggg

SEQ ID NO: 2475787 - RNA, 19 nt, Artificial Sequence
  Description of Artificial Sequence: Synthetic oligonucleotide
ugguugaugcuugauggag

SEQ ID NO: 2475788 - RNA, 19 nt, Artificial Sequence
  Description of Artificial Sequence: Synthetic oligonucleotide
caaauucuacuacaaucac

SEQ ID NO: 2475789 - RNA, 19 nt, Artificial Sequence
  Description of Artificial Sequence: Synthetic oligonucleotide
cuaacuucuagauuauuua

SEQ ID NO: 2475790 - RNA, 19 nt, Artificial Sequence
  Description of Artificial Sequence: Synthetic oligonucleotide
auggagaguucuuaacucu

SEQ ID NO: 2475791 - RNA, 19 nt, Artificial Sequence
  Description of Artificial Sequence: Synthetic oligonucleotide
uccacagguacaacaguga

SEQ ID NO: 2475792 - RNA, 19 nt, Artificial Sequence
  Description of Artificial Sequence: Synthetic oligonucleotide
caaguuaucucauuggccu

SEQ ID NO: 2475793 - RNA, 19 nt, Artificial Sequence
  Description of Artificial Sequence: Synthetic oligonucleotide
cauccuaacccugaaaguc

SEQ ID NO: 2475794 - RNA, 19 nt, Artificial Sequence
  Description of Artificial Sequence: Synthetic oligonucleotide
agaugauuucccuacuaau

SEQ ID NO: 2475795 - RNA, 19 nt, Artificial Sequence
  Description of Artificial Sequence: Synthetic oligonucleotide
ugauuucccuacuaauccu

SEQ ID NO: 2475796 - RNA, 19 nt, Artificial Sequence
  Description of Artificial Sequence: Synthetic oligonucleotide
agauuauuuaauacagaga

SEQ ID NO: 2475797 - RNA, 19 nt, Artificial Sequence
  Description of Artificial Sequence: Synthetic oligonucleotide
uugauggagaguucuuaac

SEQ ID NO: 2475798 - RNA, 19 nt, Artificial Sequence
  Description of Artificial Sequence: Synthetic oligonucleotide
cuguacuagguuaauuguc

SEQ ID NO: 2475799 - RNA, 19 nt, Artificial Sequence
  Description of Artificial Sequence: Synthetic oligonucleotide
cugcuuauaacacuauaca

SEQ ID NO: 2475800 - RNA, 19 nt, Artificial Sequence
  Description of Artificial Sequence: Synthetic oligonucleotide
uaacacuauacaugguaaa

SEQ ID NO: 2475801 - RNA, 19 nt, Artificial Sequence
  Description of Artificial Sequence: Synthetic oligonucleotide
uuucucuauuguucacuag

SEQ ID NO: 2475802 - RNA, 19 nt, Artificial Sequence
  Description of Artificial Sequence: Synthetic oligonucleotide
uaacccugaaagucuauaa

SEQ ID NO: 2475803 - RNA, 19 nt, Artificial Sequence
  Description of Artificial Sequence: Synthetic oligonucleotide
ucuccuaacacagcauaug

SEQ ID NO: 2475804 - RNA, 19 nt, Artificial Sequence
  Description of Artificial Sequence: Synthetic oligonucleotide
auugucucaauggagccca

SEQ ID NO: 2475805 - RNA, 19 nt, Artificial Sequence
  Description of Artificial Sequence: Synthetic oligonucleotide
aucccuuucaguguguuga

SEQ ID NO: 2475806 - RNA, 19 nt, Artificial Sequence
  Description of Artificial Sequence: Synthetic oligonucleotide
gaggaaugauauaaauaug

SEQ ID NO: 2475807 - RNA, 19 nt, Artificial Sequence
  Description of Artificial Sequence: Synthetic oligonucleotide
gauuucccuacuaauccug

SEQ ID NO: 2475808 - RNA, 19 nt, Artificial Sequence
  Description of Artificial Sequence: Synthetic oligonucleotide
ucucauuggccuugguuga

SEQ ID NO: 2475809 - RNA, 19 nt, Artificial Sequence
  Description of Artificial Sequence: Synthetic oligonucleotide
auaaccaguuacaucacgu

SEQ ID NO: 2475810 - RNA, 19 nt, Artificial Sequence
  Description of Artificial Sequence: Synthetic oligonucleotide
ucccuacuaauccugggaa

SEQ ID NO: 2475811 - RNA, 19 nt, Artificial Sequence
  Description of Artificial Sequence: Synthetic oligonucleotide
gcacaaagguaccaaaacc

SEQ ID NO: 2475812 - RNA, 19 nt, Artificial Sequence
  Description of Artificial Sequence: Synthetic oligonucleotide
uuauaacacuauacauggu

SEQ ID NO: 2475813 - RNA, 19 nt, Artificial Sequence
  Description of Artificial Sequence: Synthetic oligonucleotide
gguuaauugucucaaugga

SEQ ID NO: 2475814 - RNA, 19 nt, Artificial Sequence
  Description of Artificial Sequence: Synthetic oligonucleotide
auguuuagcguucuucuua

SEQ ID NO: 2475815 - RNA, 19 nt, Artificial Sequence
  Description of Artificial Sequence: Synthetic oligonucleotide
cuagauuauuuaauacaga

SEQ ID NO: 2475816 - RNA, 19 nt, Artificial Sequence
  Description of Artificial Sequence: Synthetic oligonucleotide
ucuacauccuaacccugaa

SEQ ID NO: 2475817 - RNA, 19 nt, Artificial Sequence
  Description of Artificial Sequence: Synthetic oligonucleotide
uugugaggacauauuacua

SEQ ID NO: 2475818 - RNA, 19 nt, Artificial Sequence
  Description of Artificial Sequence: Synthetic oligonucleotide
uaauccugggaaacaaauu

SEQ ID NO: 2475819 - RNA, 19 nt, Artificial Sequence
  Description of Artificial Sequence: Synthetic oligonucleotide
acuuaagaugauuucccua

SEQ ID NO: 2475820 - RNA, 19 nt, Artificial Sequence
  Description of Artificial Sequence: Synthetic oligonucleotide
cuugugaggacauauuacu

SEQ ID NO: 2475821 - RNA, 19 nt, Artificial Sequence
  Description of Artificial Sequence: Synthetic oligonucleotide
auaacacuauacaugguaa

SEQ ID NO: 2475822 - RNA, 19 nt, Artificial Sequence
  Description of Artificial Sequence: Synthetic oligonucleotide
acauggugagauuuguuua

SEQ ID NO: 2475823 - RNA, 19 nt, Artificial Sequence
  Description of Artificial Sequence: Synthetic oligonucleotide
acauccuaacccugaaagu

SEQ ID NO: 2475824 - RNA, 19 nt, Artificial Sequence
  Description of Artificial Sequence: Synthetic oligonucleotide
acuagguuaauugucucaa

SEQ ID NO: 2475825 - RNA, 19 nt, Artificial Sequence
  Description of Artificial Sequence: Synthetic oligonucleotide
uauuguucacuagggaguc

SEQ ID NO: 2475826 - RNA, 19 nt, Artificial Sequence
  Description of Artificial Sequence: Synthetic oligonucleotide
agcauauguaauaacuuaa

SEQ ID NO: 2475827 - RNA, 19 nt, Artificial Sequence
  Description of Artificial Sequence: Synthetic oligonucleotide
cauuggccuugguugaugc

SEQ ID NO: 2475828 - RNA, 19 nt, Artificial Sequence
  Description of Artificial Sequence: Synthetic oligonucleotide
gucuauaaccaguuacauc

SEQ ID NO: 2475829 - RNA, 19 nt, Artificial Sequence
  Description of Artificial Sequence: Synthetic oligonucleotide
ucucuacauccuaacccug

SEQ ID NO: 2475830 - RNA, 19 nt, Artificial Sequence
  Description of Artificial Sequence: Synthetic oligonucleotide
cacguggcuucccugaggc

SEQ ID NO: 2475831 - RNA, 19 nt, Artificial Sequence
  Description of Artificial Sequence: Synthetic oligonucleotide
uacaucacguggcuucccu

SEQ ID NO: 2475832 - RNA, 19 nt, Artificial Sequence
  Description of Artificial Sequence: Synthetic oligonucleotide
acaaagguaccaaaacccu

SEQ ID NO: 2475833 - RNA, 19 nt, Artificial Sequence
  Description of Artificial Sequence: Synthetic oligonucleotide
cuauaaagacaagacagaa

SEQ ID NO: 2475834 - RNA, 19 nt, Artificial Sequence
  Description of Artificial Sequence: Synthetic oligonucleotide
uugguugaugcuugaugga

SEQ ID NO: 2475835 - RNA, 19 nt, Artificial Sequence
  Description of Artificial Sequence: Synthetic oligonucleotide
aagcugaacuggaaaauau

SEQ ID NO: 2475836 - RNA, 19 nt, Artificial Sequence
  Description of Artificial Sequence: Synthetic oligonucleotide
auuaacuauugaggaauga

SEQ ID NO: 2475837 - RNA, 19 nt, Artificial Sequence
  Description of Artificial Sequence: Synthetic oligonucleotide
auuucccuacuaauccugg

SEQ ID NO: 2475838 - RNA, 19 nt, Artificial Sequence
  Description of Artificial Sequence: Synthetic oligonucleotide
uacuaauccugggaaacaa

SEQ ID NO: 2475839 - RNA, 19 nt, Artificial Sequence
  Description of Artificial Sequence: Synthetic oligonucleotide
uccuaacacagcauaugua

SEQ ID NO: 2475840 - RNA, 19 nt, Artificial Sequence
  Description of Artificial Sequence: Synthetic oligonucleotide
acuauacaugguaaauaug

SEQ ID NO: 2475841 - RNA, 19 nt, Artificial Sequence
  Description of Artificial Sequence: Synthetic oligonucleotide
aguuaucucauuggccuug

SEQ ID NO: 2475842 - RNA, 19 nt, Artificial Sequence
  Description of Artificial Sequence: Synthetic oligonucleotide
cuauuguucacuagggagu

SEQ ID NO: 2475843 - RNA, 19 nt, Artificial Sequence
  Description of Artificial Sequence: Synthetic oligonucleotide
cuauaaccaguuacaucac

SEQ ID NO: 2475844 - RNA, 19 nt, Artificial Sequence
  Description of Artificial Sequence: Synthetic oligonucleotide
acuauugaggaaugauaua

SEQ ID NO: 2475845 - RNA, 19 nt, Artificial Sequence
  Description of Artificial Sequence: Synthetic oligonucleotide
gcauauguaauaacuuaag

SEQ ID NO: 2475846 - RNA, 19 nt, Artificial Sequence
  Description of Artificial Sequence: Synthetic oligonucleotide
aagcaaucugugaucucag

SEQ ID NO: 2475847 - RNA, 19 nt, Artificial Sequence
  Description of Artificial Sequence: Synthetic oligonucleotide
guaaaauggcuuguauuuc

SEQ ID NO: 2475848 - RNA, 19 nt, Artificial Sequence
  Description of Artificial Sequence: Synthetic oligonucleotide
agaacaaauuuuacaaaua

SEQ ID NO: 2475849 - RNA, 19 nt, Artificial Sequence
  Description of Artificial Sequence: Synthetic oligonucleotide
acucuccuaacacagcaua

SEQ ID NO: 2475850 - RNA, 19 nt, Artificial Sequence
  Description of Artificial Sequence: Synthetic oligonucleotide
gcuuaaaagauagaacauc

SEQ ID NO: 2475851 - RNA, 19 nt, Artificial Sequence
  Description of Artificial Sequence: Synthetic oligonucleotide
caaaacccuauaauuaacu

SEQ ID NO: 2475852 - RNA, 19 nt, Artificial Sequence
  Description of Artificial Sequence: Synthetic oligonucleotide
ccuaacacagcauauguaa

SEQ ID NO: 2475853 - RNA, 19 nt, Artificial Sequence
  Description of Artificial Sequence: Synthetic oligonucleotide
cauggugagauuuguuuaa

SEQ ID NO: 2475854 - RNA, 19 nt, Artificial Sequence
  Description of Artificial Sequence: Synthetic oligonucleotide
guuaucucauuggccuugg

SEQ ID NO: 2475855 - RNA, 19 nt, Artificial Sequence
  Description of Artificial Sequence: Synthetic oligonucleotide
acacuauacaugguaaaua

SEQ ID NO: 2475856 - RNA, 19 nt, Artificial Sequence
  Description of Artificial Sequence: Synthetic oligonucleotide
cagcauauguaauaacuua

SEQ ID NO: 2475857 - RNA, 19 nt, Artificial Sequence
  Description of Artificial Sequence: Synthetic oligonucleotide
acagcauauguaauaacuu

SEQ ID NO: 2475858 - RNA, 19 nt, Artificial Sequence
  Description of Artificial Sequence: Synthetic oligonucleotide
cacuauacaugguaaauau

SEQ ID NO: 2475859 - RNA, 19 nt, Artificial Sequence
  Description of Artificial Sequence: Synthetic oligonucleotide
ccugaaagucuauaaccag

SEQ ID NO: 2475860 - RNA, 19 nt, Artificial Sequence
  Description of Artificial Sequence: Synthetic oligonucleotide
guucacuagggagucggag

SEQ ID NO: 2475861 - RNA, 19 nt, Artificial Sequence
  Description of Artificial Sequence: Synthetic oligonucleotide
cugggaaacaaauucuacu

SEQ ID NO: 2475862 - RNA, 19 nt, Artificial Sequence
  Description of Artificial Sequence: Synthetic oligonucleotide
uggagcccaucacaguuuc

SEQ ID NO: 2475863 - RNA, 19 nt, Artificial Sequence
  Description of Artificial Sequence: Synthetic oligonucleotide
guuacaucacguggcuucc

SEQ ID NO: 2475864 - RNA, 19 nt, Artificial Sequence
  Description of Artificial Sequence: Synthetic oligonucleotide
uaacugcuuauaacacuau

SEQ ID NO: 2475865 - RNA, 19 nt, Artificial Sequence
  Description of Artificial Sequence: Synthetic oligonucleotide
uggugagauuuguuuaaua

SEQ ID NO: 2475866 - RNA, 19 nt, Artificial Sequence
  Description of Artificial Sequence: Synthetic oligonucleotide
uccuaacccugaaagucua

SEQ ID NO: 2475867 - RNA, 19 nt, Artificial Sequence
  Description of Artificial Sequence: Synthetic oligonucleotide
guacuagguuaauugucuc

SEQ ID NO: 2475868 - RNA, 19 nt, Artificial Sequence
  Description of Artificial Sequence: Synthetic oligonucleotide
uuucucaaguuaucucauu

SEQ ID NO: 2475869 - RNA, 19 nt, Artificial Sequence
  Description of Artificial Sequence: Synthetic oligonucleotide
uguucacuagggagucgga

SEQ ID NO: 2475870 - RNA, 19 nt, Artificial Sequence
  Description of Artificial Sequence: Synthetic oligonucleotide
gugaggacauauuacuaua

SEQ ID NO: 2475871 - RNA, 19 nt, Artificial Sequence
  Description of Artificial Sequence: Synthetic oligonucleotide
aagguaccaaaacccuaua

SEQ ID NO: 2475872 - RNA, 19 nt, Artificial Sequence
  Description of Artificial Sequence: Synthetic oligonucleotide
ucugugaucucagcuuaaa

SEQ ID NO: 2475873 - RNA, 19 nt, Artificial Sequence
  Description of Artificial Sequence: Synthetic oligonucleotide
aucacguggcuucccugag

SEQ ID NO: 2475874 - RNA, 19 nt, Artificial Sequence
  Description of Artificial Sequence: Synthetic oligonucleotide
auccuaacccugaaagucu

SEQ ID NO: 2475875 - RNA, 19 nt, Artificial Sequence
  Description of Artificial Sequence: Synthetic oligonucleotide
uuacaaacauggugagauu

SEQ ID NO: 2475876 - RNA, 19 nt, Artificial Sequence
  Description of Artificial Sequence: Synthetic oligonucleotide
acuagggagucggagggca

SEQ ID NO: 2475877 - RNA, 19 nt, Artificial Sequence
  Description of Artificial Sequence: Synthetic oligonucleotide
cccaucacaguuuccaaug

SEQ ID NO: 2475878 - RNA, 19 nt, Artificial Sequence
  Description of Artificial Sequence: Synthetic oligonucleotide
uuggccuugguugaugcuu

SEQ ID NO: 2475879 - RNA, 19 nt, Artificial Sequence
  Description of Artificial Sequence: Synthetic oligonucleotide
ggagucggagggcagacac

SEQ ID NO: 2475880 - RNA, 19 nt, Artificial Sequence
  Description of Artificial Sequence: Synthetic oligonucleotide
acccuauaauuaacuauug

SEQ ID NO: 2475881 - RNA, 19 nt, Artificial Sequence
  Description of Artificial Sequence: Synthetic oligonucleotide
gguaccaaaacccuauaau

SEQ ID NO: 2475882 - RNA, 19 nt, Artificial Sequence
  Description of Artificial Sequence: Synthetic oligonucleotide
cucuauuguucacuaggga

SEQ ID NO: 2475883 - RNA, 19 nt, Artificial Sequence
  Description of Artificial Sequence: Synthetic oligonucleotide
ucauuggccuugguugaug

SEQ ID NO: 2475884 - RNA, 19 nt, Artificial Sequence
  Description of Artificial Sequence: Synthetic oligonucleotide
gagaagcaaucugugaucu

SEQ ID NO: 2475885 - RNA, 19 nt, Artificial Sequence
  Description of Artificial Sequence: Synthetic oligonucleotide
ucccugaggcacaaaggua

SEQ ID NO: 2475886 - RNA, 19 nt, Artificial Sequence
  Description of Artificial Sequence: Synthetic oligonucleotide
acaucacguggcuucccug

SEQ ID NO: 2475887 - RNA, 19 nt, Artificial Sequence
  Description of Artificial Sequence: Synthetic oligonucleotide
gaggcacaaagguaccaaa

SEQ ID NO: 2475888 - RNA, 19 nt, Artificial Sequence
  Description of Artificial Sequence: Synthetic oligonucleotide
cagagaagcaaucugugau

SEQ ID NO: 2475889 - RNA, 19 nt, Artificial Sequence
  Description of Artificial Sequence: Synthetic oligonucleotide
cacuugugaggacauauua

SEQ ID NO: 2475890 - RNA, 19 nt, Artificial Sequence
  Description of Artificial Sequence: Synthetic oligonucleotide
ccuacuaauccugggaaac

SEQ ID NO: 2475891 - RNA, 19 nt, Artificial Sequence
  Description of Artificial Sequence: Synthetic oligonucleotide
caucacguggcuucccuga

SEQ ID NO: 2475892 - RNA, 19 nt, Artificial Sequence
  Description of Artificial Sequence: Synthetic oligonucleotide
aaacauggugagauuuguu

SEQ ID NO: 2475893 - RNA, 19 nt, Artificial Sequence
  Description of Artificial Sequence: Synthetic oligonucleotide
caaagguaccaaaacccua

SEQ ID NO: 2475894 - RNA, 19 nt, Artificial Sequence
  Description of Artificial Sequence: Synthetic oligonucleotide
ccuugguugaugcuugaug

SEQ ID NO: 2475895 - RNA, 19 nt, Artificial Sequence
  Description of Artificial Sequence: Synthetic oligonucleotide
gagaguucuuaacucuccu

SEQ ID NO: 2475896 - RNA, 19 nt, Artificial Sequence
  Description of Artificial Sequence: Synthetic oligonucleotide
gacacuugugaggacauau

SEQ ID NO: 2475897 - RNA, 19 nt, Artificial Sequence
  Description of Artificial Sequence: Synthetic oligonucleotide
agggagucggagggcagac

SEQ ID NO: 2475898 - RNA, 19 nt, Artificial Sequence
  Description of Artificial Sequence: Synthetic oligonucleotide
ucacauuaccgcggguccu

SEQ ID NO: 2475899 - RNA, 19 nt, Artificial Sequence
  Description of Artificial Sequence: Synthetic oligonucleotide
cccugaaagucuauaacca

SEQ ID NO: 2475900 - RNA, 19 nt, Artificial Sequence
  Description of Artificial Sequence: Synthetic oligonucleotide
cuucaguaauguuuagcgu

SEQ ID NO: 2475901 - RNA, 19 nt, Artificial Sequence
  Description of Artificial Sequence: Synthetic oligonucleotide
cuagggagucggagggcag

SEQ ID NO: 2475902 - RNA, 19 nt, Artificial Sequence
  Description of Artificial Sequence: Synthetic oligonucleotide
gauuuguuuaauagcuuuu

SEQ ID NO: 2475903 - RNA, 19 nt, Artificial Sequence
  Description of Artificial Sequence: Synthetic oligonucleotide
cuccuaacacagcauaugu

SEQ ID NO: 2475904 - RNA, 19 nt, Artificial Sequence
  Description of Artificial Sequence: Synthetic oligonucleotide
ccuuucucuacauccuaac

SEQ ID NO: 2475905 - RNA, 19 nt, Artificial Sequence
  Description of Artificial Sequence: Synthetic oligonucleotide
guaauaacuuaagaugauu

SEQ ID NO: 2475906 - RNA, 19 nt, Artificial Sequence
  Description of Artificial Sequence: Synthetic oligonucleotide
cuacuaauccugggaaaca

SEQ ID NO: 2475907 - RNA, 19 nt, Artificial Sequence
  Description of Artificial Sequence: Synthetic oligonucleotide
auuugacaugaaauauaaa

SEQ ID NO: 2475908 - RNA, 19 nt, Artificial Sequence
  Description of Artificial Sequence: Synthetic oligonucleotide
acuaauccugggaaacaaa

SEQ ID NO: 2475909 - RNA, 19 nt, Artificial Sequence
  Description of Artificial Sequence: Synthetic oligonucleotide
uagggagucggagggcaga

SEQ ID NO: 2475910 - RNA, 19 nt, Artificial Sequence
  Description of Artificial Sequence: Synthetic oligonucleotide
auucuacuacaaucacauu

SEQ ID NO: 2475911 - RNA, 19 nt, Artificial Sequence
  Description of Artificial Sequence: Synthetic oligonucleotide
acauuaccgcggguccugg

SEQ ID NO: 2475912 - RNA, 19 nt, Artificial Sequence
  Description of Artificial Sequence: Synthetic oligonucleotide
cacauuaccgcggguccug

SEQ ID NO: 2475913 - RNA, 19 nt, Artificial Sequence
  Description of Artificial Sequence: Synthetic oligonucleotide
cauuaccgcggguccuggc

SEQ ID NO: 2475914 - RNA, 19 nt, Artificial Sequence
  Description of Artificial Sequence: Synthetic oligonucleotide
ucccuuucaguguguugau

SEQ ID NO: 2475915 - RNA, 19 nt, Artificial Sequence
  Description of Artificial Sequence: Synthetic oligonucleotide
auggugagauuuguuuaau

SEQ ID NO: 2475916 - RNA, 19 nt, Artificial Sequence
  Description of Artificial Sequence: Synthetic oligonucleotide
uugaugcuugauggagagu

SEQ ID NO: 2475917 - RNA, 19 nt, Artificial Sequence
  Description of Artificial Sequence: Synthetic oligonucleotide
uuccaauggcuuucuccuu

SEQ ID NO: 2475918 - RNA, 19 nt, Artificial Sequence
  Description of Artificial Sequence: Synthetic oligonucleotide
cugugaucucagcuuaaaa

SEQ ID NO: 2475919 - RNA, 19 nt, Artificial Sequence
  Description of Artificial Sequence: Synthetic oligonucleotide
gguugaugcuugauggaga

SEQ ID NO: 2475920 - RNA, 19 nt, Artificial Sequence
  Description of Artificial Sequence: Synthetic oligonucleotide
cuaacccugaaagucuaua

SEQ ID NO: 2475921 - RNA, 19 nt, Artificial Sequence
  Description of Artificial Sequence: Synthetic oligonucleotide
caaacauggugagauuugu

SEQ ID NO: 2475922 - RNA, 19 nt, Artificial Sequence
  Description of Artificial Sequence: Synthetic oligonucleotide
cuacauccuaacccugaaa

SEQ ID NO: 2475923 - RNA, 19 nt, Artificial Sequence
  Description of Artificial Sequence: Synthetic oligonucleotide
accgcggguccuggcauac

SEQ ID NO: 2475924 - RNA, 19 nt, Artificial Sequence
  Description of Artificial Sequence: Synthetic oligonucleotide
cccuauaauuaacuauuga

SEQ ID NO: 2475925 - RNA, 19 nt, Artificial Sequence
  Description of Artificial Sequence: Synthetic oligonucleotide
cacuagggagucggagggc

SEQ ID NO: 2475926 - RNA, 19 nt, Artificial Sequence
  Description of Artificial Sequence: Synthetic oligonucleotide
cacaguuuccaauggcuuu

SEQ ID NO: 2475927 - RNA, 19 nt, Artificial Sequence
  Description of Artificial Sequence: Synthetic oligonucleotide
cugaggcacaaagguacca

SEQ ID NO: 2475928 - RNA, 19 nt, Artificial Sequence
  Description of Artificial Sequence: Synthetic oligonucleotide
cucuccuaacacagcauau

SEQ ID NO: 2475929 - RNA, 19 nt, Artificial Sequence
  Description of Artificial Sequence: Synthetic oligonucleotide
cuagguuaauugucucaau

SEQ ID NO: 2475930 - RNA, 19 nt, Artificial Sequence
  Description of Artificial Sequence: Synthetic oligonucleotide
guccuggcauacuucugua

SEQ ID NO: 2475931 - RNA, 19 nt, Artificial Sequence
  Description of Artificial Sequence: Synthetic oligonucleotide
gcauacuucuguacuaggu

SEQ ID NO: 2475932 - RNA, 19 nt, Artificial Sequence
  Description of Artificial Sequence: Synthetic oligonucleotide
gcuuguauuuccacaggua

SEQ ID NO: 2475933 - RNA, 19 nt, Artificial Sequence
  Description of Artificial Sequence: Synthetic oligonucleotide
acguggcuucccugaggca

SEQ ID NO: 2475934 - RNA, 19 nt, Artificial Sequence
  Description of Artificial Sequence: Synthetic oligonucleotide
caauggagcccaucacagu

SEQ ID NO: 2475935 - RNA, 19 nt, Artificial Sequence
  Description of Artificial Sequence: Synthetic oligonucleotide
aucugugaucucagcuuaa

SEQ ID NO: 2475936 - RNA, 19 nt, Artificial Sequence
  Description of Artificial Sequence: Synthetic oligonucleotide
guggcuucccugaggcaca

SEQ ID NO: 2475937 - RNA, 19 nt, Artificial Sequence
  Description of Artificial Sequence: Synthetic oligonucleotide
ccacagguacaacagugaa

SEQ ID NO: 2475938 - RNA, 19 nt, Artificial Sequence
  Description of Artificial Sequence: Synthetic oligonucleotide
guacaacagugaagaaaua

SEQ ID NO: 2475939 - RNA, 19 nt, Artificial Sequence
  Description of Artificial Sequence: Synthetic oligonucleotide
ggcagacacuugugaggac

SEQ ID NO: 2475940 - RNA, 19 nt, Artificial Sequence
  Description of Artificial Sequence: Synthetic oligonucleotide
cuucuguacuagguuaauu

SEQ ID NO: 2475941 - RNA, 19 nt, Artificial Sequence
  Description of Artificial Sequence: Synthetic oligonucleotide
cccuacuaauccugggaaa

SEQ ID NO: 2475942 - RNA, 19 nt, Artificial Sequence
  Description of Artificial Sequence: Synthetic oligonucleotide
caguaauguuuagcguucu

SEQ ID NO: 2475943 - RNA, 19 nt, Artificial Sequence
  Description of Artificial Sequence: Synthetic oligonucleotide
ggagcccaucacaguuucc

SEQ ID NO: 2475944 - RNA, 19 nt, Artificial Sequence
  Description of Artificial Sequence: Synthetic oligonucleotide
caaucacauuaccgcgggu

SEQ ID NO: 2475945 - RNA, 19 nt, Artificial Sequence
  Description of Artificial Sequence: Synthetic oligonucleotide
ggccuugguugaugcuuga

SEQ ID NO: 2475946 - RNA, 19 nt, Artificial Sequence
  Description of Artificial Sequence: Synthetic oligonucleotide
cucauuggccuugguugau

SEQ ID NO: 2475947 - RNA, 19 nt, Artificial Sequence
  Description of Artificial Sequence: Synthetic oligonucleotide
ccuaacccugaaagucuau

SEQ ID NO: 2475948 - RNA, 19 nt, Artificial Sequence
  Description of Artificial Sequence: Synthetic oligonucleotide
ccccuaacuucuagauuau

SEQ ID NO: 2475949 - RNA, 19 nt, Artificial Sequence
  Description of Artificial Sequence: Synthetic oligonucleotide
ggcuucccugaggcacaaa

SEQ ID NO: 2475950 - RNA, 19 nt, Artificial Sequence
  Description of Artificial Sequence: Synthetic oligonucleotide
cccuaacuucuagauuauu

SEQ ID NO: 2475951 - RNA, 19 nt, Artificial Sequence
  Description of Artificial Sequence: Synthetic oligonucleotide
cgcggguccuggcauacuu

SEQ ID NO: 2475952 - RNA, 19 nt, Artificial Sequence
  Description of Artificial Sequence: Synthetic oligonucleotide
aaaguagaaguacagcacc

SEQ ID NO: 2475953 - RNA, 19 nt, Artificial Sequence
  Description of Artificial Sequence: Synthetic oligonucleotide
auuaugaugauguugaaga

SEQ ID NO: 2475954 - RNA, 19 nt, Artificial Sequence
  Description of Artificial Sequence: Synthetic oligonucleotide
gaacuuauggaacaggagg

SEQ ID NO: 2475955 - RNA, 19 nt, Artificial Sequence
  Description of Artificial Sequence: Synthetic oligonucleotide
uaaaaguagaaguacagca

SEQ ID NO: 2475956 - RNA, 19 nt, Artificial Sequence
  Description of Artificial Sequence: Synthetic oligonucleotide
aaguucaugacccagacau

SEQ ID NO: 2475957 - RNA, 19 nt, Artificial Sequence
  Description of Artificial Sequence: Synthetic oligonucleotide
aaugauggucccuuugaac

SEQ ID NO: 2475958 - RNA, 19 nt, Artificial Sequence
  Description of Artificial Sequence: Synthetic oligonucleotide
ucaguuuccaaccaugucu

SEQ ID NO: 2475959 - RNA, 19 nt, Artificial Sequence
  Description of Artificial Sequence: Synthetic oligonucleotide
aaaaguagaaguacagcac

SEQ ID NO: 2475960 - RNA, 19 nt, Artificial Sequence
  Description of Artificial Sequence: Synthetic oligonucleotide
aacuuauggaacaggaggc

SEQ ID NO: 2475961 - RNA, 19 nt, Artificial Sequence
  Description of Artificial Sequence: Synthetic oligonucleotide
aaggaauugacaaacaggu

SEQ ID NO: 2475962 - RNA, 19 nt, Artificial Sequence
  Description of Artificial Sequence: Synthetic oligonucleotide
aagacgaagguguugaaga

SEQ ID NO: 2475963 - RNA, 19 nt, Artificial Sequence
  Description of Artificial Sequence: Synthetic oligonucleotide
guacacagcaguuagaaug

SEQ ID NO: 2475964 - RNA, 19 nt, Artificial Sequence
  Description of Artificial Sequence: Synthetic oligonucleotide
acaaauaguguuugaaguc

SEQ ID NO: 2475965 - RNA, 19 nt, Artificial Sequence
  Description of Artificial Sequence: Synthetic oligonucleotide
uacaaauaguguuugaagu

SEQ ID NO: 2475966 - RNA, 19 nt, Artificial Sequence
  Description of Artificial Sequence: Synthetic oligonucleotide
auugcaauauccuggauga

SEQ ID NO: 2475967 - RNA, 19 nt, Artificial Sequence
  Description of Artificial Sequence: Synthetic oligonucleotide
agaaguacagcaccgccgc

SEQ ID NO: 2475968 - RNA, 19 nt, Artificial Sequence
  Description of Artificial Sequence: Synthetic oligonucleotide
acagcaguuagaaugaugg

SEQ ID NO: 2475969 - RNA, 19 nt, Artificial Sequence
  Description of Artificial Sequence: Synthetic oligonucleotide
ucaucaacgggacaugaag

SEQ ID NO: 2475970 - RNA, 19 nt, Artificial Sequence
  Description of Artificial Sequence: Synthetic oligonucleotide
auacaaauaguguuugaag

SEQ ID NO: 2475971 - RNA, 19 nt, Artificial Sequence
  Description of Artificial Sequence: Synthetic oligonucleotide
aacaugaggaaaauuauga

SEQ ID NO: 2475972 - RNA, 19 nt, Artificial Sequence
  Description of Artificial Sequence: Synthetic oligonucleotide
aggaaaggcauucaucaac

SEQ ID NO: 2475973 - RNA, 19 nt, Artificial Sequence
  Description of Artificial Sequence: Synthetic oligonucleotide
aauuaugaugauguugaag

SEQ ID NO: 2475974 - RNA, 19 nt, Artificial Sequence
  Description of Artificial Sequence: Synthetic oligonucleotide
ugucuaguuuuccaaauca

SEQ ID NO: 2475975 - RNA, 19 nt, Artificial Sequence
  Description of Artificial Sequence: Synthetic oligonucleotide
gucucuggaauacaaauag

SEQ ID NO: 2475976 - RNA, 19 nt, Artificial Sequence
  Description of Artificial Sequence: Synthetic oligonucleotide
ucuaguuuuccaaaucaga

SEQ ID NO: 2475977 - RNA, 19 nt, Artificial Sequence
  Description of Artificial Sequence: Synthetic oligonucleotide
guaguugcuaguuuggagc

SEQ ID NO: 2475978 - RNA, 19 nt, Artificial Sequence
  Description of Artificial Sequence: Synthetic oligonucleotide
agaaggaauugacaaacag

SEQ ID NO: 2475979 - RNA, 19 nt, Artificial Sequence
  Description of Artificial Sequence: Synthetic oligonucleotide
aggaaaauuaugaugaugu

SEQ ID NO: 2475980 - RNA, 19 nt, Artificial Sequence
  Description of Artificial Sequence: Synthetic oligonucleotide
uugaacuuauggaacagga

SEQ ID NO: 2475981 - RNA, 19 nt, Artificial Sequence
  Description of Artificial Sequence: Synthetic oligonucleotide
guccaaaugaagcugcugg

SEQ ID NO: 2475982 - RNA, 19 nt, Artificial Sequence
  Description of Artificial Sequence: Synthetic oligonucleotide
uagaaguacagcaccgccg

SEQ ID NO: 2475983 - RNA, 19 nt, Artificial Sequence
  Description of Artificial Sequence: Synthetic oligonucleotide
aauacaaauaguguuugaa

SEQ ID NO: 2475984 - RNA, 19 nt, Artificial Sequence
  Description of Artificial Sequence: Synthetic oligonucleotide
ucuaccaggaaggaaaggc

SEQ ID NO: 2475985 - RNA, 19 nt, Artificial Sequence
  Description of Artificial Sequence: Synthetic oligonucleotide
uugaagaacaugaggaaaa

SEQ ID NO: 2475986 - RNA, 19 nt, Artificial Sequence
  Description of Artificial Sequence: Synthetic oligonucleotide
gaaguggucaccuucggac

SEQ ID NO: 2475987 - RNA, 19 nt, Artificial Sequence
  Description of Artificial Sequence: Synthetic oligonucleotide
ugaacuuauggaacaggag

SEQ ID NO: 2475988 - RNA, 19 nt, Artificial Sequence
  Description of Artificial Sequence: Synthetic oligonucleotide
gagguuucuaccaggaagg

SEQ ID NO: 2475989 - RNA, 19 nt, Artificial Sequence
  Description of Artificial Sequence: Synthetic oligonucleotide
aguccauguuuccuggugc

SEQ ID NO: 2475990 - RNA, 19 nt, Artificial Sequence
  Description of Artificial Sequence: Synthetic oligonucleotide
uuuccaaccaugucuggag

SEQ ID NO: 2475991 - RNA, 19 nt, Artificial Sequence
  Description of Artificial Sequence: Synthetic oligonucleotide
gaugaugaagagcaccagc

SEQ ID NO: 2475992 - RNA, 19 nt, Artificial Sequence
  Description of Artificial Sequence: Synthetic oligonucleotide
cuugcaugaacuccuuucg

SEQ ID NO: 2475993 - RNA, 19 nt, Artificial Sequence
  Description of Artificial Sequence: Synthetic oligonucleotide
uguaguugcuaguuuggag

SEQ ID NO: 2475994 - RNA, 19 nt, Artificial Sequence
  Description of Artificial Sequence: Synthetic oligonucleotide
ggaauugacaaacagguca

SEQ ID NO: 2475995 - RNA, 19 nt, Artificial Sequence
  Description of Artificial Sequence: Synthetic oligonucleotide
uccacaguucuguagaaga

SEQ ID NO: 2475996 - RNA, 19 nt, Artificial Sequence
  Description of Artificial Sequence: Synthetic oligonucleotide
ucuacuggguacuugggga

SEQ ID NO: 2475997 - RNA, 19 nt, Artificial Sequence
  Description of Artificial Sequence: Synthetic oligonucleotide
caugaaguggucaccuucg

SEQ ID NO: 2475998 - RNA, 19 nt, Artificial Sequence
  Description of Artificial Sequence: Synthetic oligonucleotide
ucuugaaugcugagcacag

SEQ ID NO: 2475999 - RNA, 19 nt, Artificial Sequence
  Description of Artificial Sequence: Synthetic oligonucleotide
aguucuguagaagauaacu

SEQ ID NO: 2476000 - RNA, 19 nt, Artificial Sequence
  Description of Artificial Sequence: Synthetic oligonucleotide
gaagaggauugcaauaucc

SEQ ID NO: 2476001 - RNA, 19 nt, Artificial Sequence
  Description of Artificial Sequence: Synthetic oligonucleotide
gacuguaguugcuaguuug

SEQ ID NO: 2476002 - RNA, 19 nt, Artificial Sequence
  Description of Artificial Sequence: Synthetic oligonucleotide
uuuccuggugccaagggcu

SEQ ID NO: 2476003 - RNA, 19 nt, Artificial Sequence
  Description of Artificial Sequence: Synthetic oligonucleotide
aguccaucuguccaaauga

SEQ ID NO: 2476004 - RNA, 19 nt, Artificial Sequence
  Description of Artificial Sequence: Synthetic oligonucleotide
uagaagauaacuucugguu

SEQ ID NO: 2476005 - RNA, 19 nt, Artificial Sequence
  Description of Artificial Sequence: Synthetic oligonucleotide
uccuuucgcagccauagug

SEQ ID NO: 2476006 - RNA, 19 nt, Artificial Sequence
  Description of Artificial Sequence: Synthetic oligonucleotide
aaguagaaguacagcaccg

SEQ ID NO: 2476007 - RNA, 19 nt, Artificial Sequence
  Description of Artificial Sequence: Synthetic oligonucleotide
ugaagggagagcaccagac

SEQ ID NO: 2476008 - RNA, 19 nt, Artificial Sequence
  Description of Artificial Sequence: Synthetic oligonucleotide
caagguacacagcaguuag

SEQ ID NO: 2476009 - RNA, 19 nt, Artificial Sequence
  Description of Artificial Sequence: Synthetic oligonucleotide
agaggauugcaauauccug

SEQ ID NO: 2476010 - RNA, 19 nt, Artificial Sequence
  Description of Artificial Sequence: Synthetic oligonucleotide
aguagaaguacagcaccgc

SEQ ID NO: 2476011 - RNA, 19 nt, Artificial Sequence
  Description of Artificial Sequence: Synthetic oligonucleotide
aaaucagagcuguuucccu

SEQ ID NO: 2476012 - RNA, 19 nt, Artificial Sequence
  Description of Artificial Sequence: Synthetic oligonucleotide
ugcaauauccuggaugaug

SEQ ID NO: 2476013 - RNA, 19 nt, Artificial Sequence
  Description of Artificial Sequence: Synthetic oligonucleotide
augucuaguuuuccaaauc

SEQ ID NO: 2476014 - RNA, 19 nt, Artificial Sequence
  Description of Artificial Sequence: Synthetic oligonucleotide
uucggaguagcuccgagaa

SEQ ID NO: 2476015 - RNA, 19 nt, Artificial Sequence
  Description of Artificial Sequence: Synthetic oligonucleotide
guaaaaguagaaguacagc

SEQ ID NO: 2476016 - RNA, 19 nt, Artificial Sequence
  Description of Artificial Sequence: Synthetic oligonucleotide
ggagguuucuaccaggaag

SEQ ID NO: 2476017 - RNA, 19 nt, Artificial Sequence
  Description of Artificial Sequence: Synthetic oligonucleotide
aucaacgggacaugaagug

SEQ ID NO: 2476018 - RNA, 19 nt, Artificial Sequence
  Description of Artificial Sequence: Synthetic oligonucleotide
uuucgggacucccaagugc

SEQ ID NO: 2476019 - RNA, 19 nt, Artificial Sequence
  Description of Artificial Sequence: Synthetic oligonucleotide
uguuugaaguccaucuguc

SEQ ID NO: 2476020 - RNA, 19 nt, Artificial Sequence
  Description of Artificial Sequence: Synthetic oligonucleotide
ucaacgggacaugaagugg

SEQ ID NO: 2476021 - RNA, 19 nt, Artificial Sequence
  Description of Artificial Sequence: Synthetic oligonucleotide
uguuuccuggugccaaggg

SEQ ID NO: 2476022 - RNA, 19 nt, Artificial Sequence
  Description of Artificial Sequence: Synthetic oligonucleotide
ggucccuuugaacuuaugg

SEQ ID NO: 2476023 - RNA, 19 nt, Artificial Sequence
  Description of Artificial Sequence: Synthetic oligonucleotide
gaaaggcauucaucaacgg

SEQ ID NO: 2476024 - RNA, 19 nt, Artificial Sequence
  Description of Artificial Sequence: Synthetic oligonucleotide
uugagcauguuccuaggaa

SEQ ID NO: 2476025 - RNA, 19 nt, Artificial Sequence
  Description of Artificial Sequence: Synthetic oligonucleotide
agagaugucuaguuuucca

SEQ ID NO: 2476026 - RNA, 19 nt, Artificial Sequence
  Description of Artificial Sequence: Synthetic oligonucleotide
uucgcagccauagugaguc

SEQ ID NO: 2476027 - RNA, 19 nt, Artificial Sequence
  Description of Artificial Sequence: Synthetic oligonucleotide
caccgcaaguucaugaccc

SEQ ID NO: 2476028 - RNA, 19 nt, Artificial Sequence
  Description of Artificial Sequence: Synthetic oligonucleotide
uucgggacucccaagugca

SEQ ID NO: 2476029 - RNA, 19 nt, Artificial Sequence
  Description of Artificial Sequence: Synthetic oligonucleotide
guuucuaccaggaaggaaa

SEQ ID NO: 2476030 - RNA, 19 nt, Artificial Sequence
  Description of Artificial Sequence: Synthetic oligonucleotide
caaaucagagcuguuuccc

SEQ ID NO: 2476031 - RNA, 19 nt, Artificial Sequence
  Description of Artificial Sequence: Synthetic oligonucleotide
auauccuggaugaugaaga

SEQ ID NO: 2476032 - RNA, 19 nt, Artificial Sequence
  Description of Artificial Sequence: Synthetic oligonucleotide
gaggaaaauuaugaugaug

SEQ ID NO: 2476033 - RNA, 19 nt, Artificial Sequence
  Description of Artificial Sequence: Synthetic oligonucleotide
uauccuggaugaugaagag

SEQ ID NO: 2476034 - RNA, 19 nt, Artificial Sequence
  Description of Artificial Sequence: Synthetic oligonucleotide
gaacugaagggagagcacc

SEQ ID NO: 2476035 - RNA, 19 nt, Artificial Sequence
  Description of Artificial Sequence: Synthetic oligonucleotide
uggagcaucuucuggcugc

SEQ ID NO: 2476036 - RNA, 19 nt, Artificial Sequence
  Description of Artificial Sequence: Synthetic oligonucleotide
uugaagaggauugcaauau

SEQ ID NO: 2476037 - RNA, 19 nt, Artificial Sequence
  Description of Artificial Sequence: Synthetic oligonucleotide
uccguuuguaaaaguagaa

SEQ ID NO: 2476038 - RNA, 19 nt, Artificial Sequence
  Description of Artificial Sequence: Synthetic oligonucleotide
gaagauaacuucugguucu

SEQ ID NO: 2476039 - RNA, 19 nt, Artificial Sequence
  Description of Artificial Sequence: Synthetic oligonucleotide
ggaaaggcauucaucaacg

SEQ ID NO: 2476040 - RNA, 19 nt, Artificial Sequence
  Description of Artificial Sequence: Synthetic oligonucleotide
acauuccacaguucuguag

SEQ ID NO: 2476041 - RNA, 19 nt, Artificial Sequence
  Description of Artificial Sequence: Synthetic oligonucleotide
uuuucgggacucccaagug

SEQ ID NO: 2476042 - RNA, 19 nt, Artificial Sequence
  Description of Artificial Sequence: Synthetic oligonucleotide
cuucuggcugcuuuucggg

SEQ ID NO: 2476043 - RNA, 19 nt, Artificial Sequence
  Description of Artificial Sequence: Synthetic oligonucleotide
aagauaacuucugguucuc

SEQ ID NO: 2476044 - RNA, 19 nt, Artificial Sequence
  Description of Artificial Sequence: Synthetic oligonucleotide
acuccuuucgcagccauag

SEQ ID NO: 2476045 - RNA, 19 nt, Artificial Sequence
  Description of Artificial Sequence: Synthetic oligonucleotide
aaguggucaccuucggacu

SEQ ID NO: 2476046 - RNA, 19 nt, Artificial Sequence
  Description of Artificial Sequence: Synthetic oligonucleotide
uccaaccaugucuggagag

SEQ ID NO: 2476047 - RNA, 19 nt, Artificial Sequence
  Description of Artificial Sequence: Synthetic oligonucleotide
aacaggucauaggacagca

SEQ ID NO: 2476048 - RNA, 19 nt, Artificial Sequence
  Description of Artificial Sequence: Synthetic oligonucleotide
auaguguuugaaguccauc

SEQ ID NO: 2476049 - RNA, 19 nt, Artificial Sequence
  Description of Artificial Sequence: Synthetic oligonucleotide
aaauaguguuugaagucca

SEQ ID NO: 2476050 - RNA, 19 nt, Artificial Sequence
  Description of Artificial Sequence: Synthetic oligonucleotide
aggauugcaauauccugga

SEQ ID NO: 2476051 - RNA, 19 nt, Artificial Sequence
  Description of Artificial Sequence: Synthetic oligonucleotide
cuuucgcagccauagugag

SEQ ID NO: 2476052 - RNA, 19 nt, Artificial Sequence
  Description of Artificial Sequence: Synthetic oligonucleotide
uugcaugaacuccuuucgc

SEQ ID NO: 2476053 - RNA, 19 nt, Artificial Sequence
  Description of Artificial Sequence: Synthetic oligonucleotide
ucucuggaauacaaauagu

SEQ ID NO: 2476054 - RNA, 19 nt, Artificial Sequence
  Description of Artificial Sequence: Synthetic oligonucleotide
ugcacauuccacaguucug

SEQ ID NO: 2476055 - RNA, 19 nt, Artificial Sequence
  Description of Artificial Sequence: Synthetic oligonucleotide
ucugguucucuacugggua

SEQ ID NO: 2476056 - RNA, 19 nt, Artificial Sequence
  Description of Artificial Sequence: Synthetic oligonucleotide
ugaaguggucaccuucgga

SEQ ID NO: 2476057 - RNA, 19 nt, Artificial Sequence
  Description of Artificial Sequence: Synthetic oligonucleotide
aguacagcaccgccgcuag

SEQ ID NO: 2476058 - RNA, 19 nt, Artificial Sequence
  Description of Artificial Sequence: Synthetic oligonucleotide
aaggaaaggcauucaucaa

SEQ ID NO: 2476059 - RNA, 19 nt, Artificial Sequence
  Description of Artificial Sequence: Synthetic oligonucleotide
acuguaguugcuaguuugg

SEQ ID NO: 2476060 - RNA, 19 nt, Artificial Sequence
  Description of Artificial Sequence: Synthetic oligonucleotide
cuggaugaugaagagcacc

SEQ ID NO: 2476061 - RNA, 19 nt, Artificial Sequence
  Description of Artificial Sequence: Synthetic oligonucleotide
agagucuuccuucuugaau

SEQ ID NO: 2476062 - RNA, 19 nt, Artificial Sequence
  Description of Artificial Sequence: Synthetic oligonucleotide
gagaugucuaguuuuccaa

SEQ ID NO: 2476063 - RNA, 19 nt, Artificial Sequence
  Description of Artificial Sequence: Synthetic oligonucleotide
uuuuccaccgcaaguucau

SEQ ID NO: 2476064 - RNA, 19 nt, Artificial Sequence
  Description of Artificial Sequence: Synthetic oligonucleotide
accagacuguaguugcuag

SEQ ID NO: 2476065 - RNA, 19 nt, Artificial Sequence
  Description of Artificial Sequence: Synthetic oligonucleotide
cuaggaaguccauguuucc

SEQ ID NO: 2476066 - RNA, 19 nt, Artificial Sequence
  Description of Artificial Sequence: Synthetic oligonucleotide
gucauaggacagcagcaag

SEQ ID NO: 2476067 - RNA, 19 nt, Artificial Sequence
  Description of Artificial Sequence: Synthetic oligonucleotide
caugucuggagagucuucc

SEQ ID NO: 2476068 - RNA, 19 nt, Artificial Sequence
  Description of Artificial Sequence: Synthetic oligonucleotide
ugaagaggauugcaauauc

SEQ ID NO: 2476069 - RNA, 19 nt, Artificial Sequence
  Description of Artificial Sequence: Synthetic oligonucleotide
ucggacuugcaugaacucc

SEQ ID NO: 2476070 - RNA, 19 nt, Artificial Sequence
  Description of Artificial Sequence: Synthetic oligonucleotide
agaugucuaguuuuccaaa

SEQ ID NO: 2476071 - RNA, 19 nt, Artificial Sequence
  Description of Artificial Sequence: Synthetic oligonucleotide
ucucccagucucacagccg

SEQ ID NO: 2476072 - RNA, 19 nt, Artificial Sequence
  Description of Artificial Sequence: Synthetic oligonucleotide
cuuugaacuuauggaacag

SEQ ID NO: 2476073 - RNA, 19 nt, Artificial Sequence
  Description of Artificial Sequence: Synthetic oligonucleotide
uuccaccgcaaguucauga

SEQ ID NO: 2476074 - RNA, 19 nt, Artificial Sequence
  Description of Artificial Sequence: Synthetic oligonucleotide
uguuccuaggaaguccaug

SEQ ID NO: 2476075 - RNA, 19 nt, Artificial Sequence
  Description of Artificial Sequence: Synthetic oligonucleotide
agaacaugaggaaaauuau

SEQ ID NO: 2476076 - RNA, 19 nt, Artificial Sequence
  Description of Artificial Sequence: Synthetic oligonucleotide
uccaccgcaaguucaugac

SEQ ID NO: 2476077 - RNA, 19 nt, Artificial Sequence
  Description of Artificial Sequence: Synthetic oligonucleotide
gagagcaccagacuguagu

SEQ ID NO: 2476078 - RNA, 19 nt, Artificial Sequence
  Description of Artificial Sequence: Synthetic oligonucleotide
uuccaaccaugucuggaga

SEQ ID NO: 2476079 - RNA, 19 nt, Artificial Sequence
  Description of Artificial Sequence: Synthetic oligonucleotide
ucuggcugcuuuucgggac

SEQ ID NO: 2476080 - RNA, 19 nt, Artificial Sequence
  Description of Artificial Sequence: Synthetic oligonucleotide
ugaggaaaauuaugaugau

SEQ ID NO: 2476081 - RNA, 19 nt, Artificial Sequence
  Description of Artificial Sequence: Synthetic oligonucleotide
cuaguuuggagcaucuucu

SEQ ID NO: 2476082 - RNA, 19 nt, Artificial Sequence
  Description of Artificial Sequence: Synthetic oligonucleotide
aguuuccaaccaugucugg

SEQ ID NO: 2476083 - RNA, 19 nt, Artificial Sequence
  Description of Artificial Sequence: Synthetic oligonucleotide
agaacugaagggagagcac

SEQ ID NO: 2476084 - RNA, 19 nt, Artificial Sequence
  Description of Artificial Sequence: Synthetic oligonucleotide
acagccguccguuuguaaa

SEQ ID NO: 2476085 - RNA, 19 nt, Artificial Sequence
  Description of Artificial Sequence: Synthetic oligonucleotide
uuggagcaucuucuggcug

SEQ ID NO: 2476086 - RNA, 19 nt, Artificial Sequence
  Description of Artificial Sequence: Synthetic oligonucleotide
cauguuccuaggaagucca

SEQ ID NO: 2476087 - RNA, 19 nt, Artificial Sequence
  Description of Artificial Sequence: Synthetic oligonucleotide
ugaagaacaugaggaaaau

SEQ ID NO: 2476088 - RNA, 19 nt, Artificial Sequence
  Description of Artificial Sequence: Synthetic oligonucleotide
acucccaagugcacauucc

SEQ ID NO: 2476089 - RNA, 19 nt, Artificial Sequence
  Description of Artificial Sequence: Synthetic oligonucleotide
gcuaguuuggagcaucuuc

SEQ ID NO: 2476090 - RNA, 19 nt, Artificial Sequence
  Description of Artificial Sequence: Synthetic oligonucleotide
auucggaguagcuccgaga

SEQ ID NO: 2476091 - RNA, 19 nt, Artificial Sequence
  Description of Artificial Sequence: Synthetic oligonucleotide
caguuagaaugaugguccc

SEQ ID NO: 2476092 - RNA, 19 nt, Artificial Sequence
  Description of Artificial Sequence: Synthetic oligonucleotide
agguacacagcaguuagaa

SEQ ID NO: 2476093 - RNA, 19 nt, Artificial Sequence
  Description of Artificial Sequence: Synthetic oligonucleotide
uuccacaguucuguagaag

SEQ ID NO: 2476094 - RNA, 19 nt, Artificial Sequence
  Description of Artificial Sequence: Synthetic oligonucleotide
cuaccaggaaggaaaggca

SEQ ID NO: 2476095 - RNA, 19 nt, Artificial Sequence
  Description of Artificial Sequence: Synthetic oligonucleotide
aacugaagggagagcacca

SEQ ID NO: 2476096 - RNA, 19 nt, Artificial Sequence
  Description of Artificial Sequence: Synthetic oligonucleotide
gacgaagguguugaagaac

SEQ ID NO: 2476097 - RNA, 19 nt, Artificial Sequence
  Description of Artificial Sequence: Synthetic oligonucleotide
aggcauucaucaacgggac

SEQ ID NO: 2476098 - RNA, 19 nt, Artificial Sequence
  Description of Artificial Sequence: Synthetic oligonucleotide
gagagaugucuaguuuucc

SEQ ID NO: 2476099 - RNA, 19 nt, Artificial Sequence
  Description of Artificial Sequence: Synthetic oligonucleotide
aggaauugacaaacagguc

SEQ ID NO: 2476100 - RNA, 19 nt, Artificial Sequence
  Description of Artificial Sequence: Synthetic oligonucleotide
acuuauggaacaggaggcu

SEQ ID NO: 2476101 - RNA, 19 nt, Artificial Sequence
  Description of Artificial Sequence: Synthetic oligonucleotide
cugguucucuacuggguac

SEQ ID NO: 2476102 - RNA, 19 nt, Artificial Sequence
  Description of Artificial Sequence: Synthetic oligonucleotide
uggaugacaggagccauuc

SEQ ID NO: 2476103 - RNA, 19 nt, Artificial Sequence
  Description of Artificial Sequence: Synthetic oligonucleotide
uuucgcagccauagugagu

SEQ ID NO: 2476104 - RNA, 19 nt, Artificial Sequence
  Description of Artificial Sequence: Synthetic oligonucleotide
cauguuuccuggugccaag

SEQ ID NO: 2476105 - RNA, 19 nt, Artificial Sequence
  Description of Artificial Sequence: Synthetic oligonucleotide
ccuaggaaguccauguuuc

SEQ ID NO: 2476106 - RNA, 19 nt, Artificial Sequence
  Description of Artificial Sequence: Synthetic oligonucleotide
uugcuaguuuggagcaucu

SEQ ID NO: 2476107 - RNA, 19 nt, Artificial Sequence
  Description of Artificial Sequence: Synthetic oligonucleotide
aacgggacaugaagugguc

SEQ ID NO: 2476108 - RNA, 19 nt, Artificial Sequence
  Description of Artificial Sequence: Synthetic oligonucleotide
ucggaguagcuccgagaag

SEQ ID NO: 2476109 - RNA, 19 nt, Artificial Sequence
  Description of Artificial Sequence: Synthetic oligonucleotide
aauaguguuugaaguccau

SEQ ID NO: 2476110 - RNA, 19 nt, Artificial Sequence
  Description of Artificial Sequence: Synthetic oligonucleotide
uucuggcugcuuuucggga

SEQ ID NO: 2476111 - RNA, 19 nt, Artificial Sequence
  Description of Artificial Sequence: Synthetic oligonucleotide
gucuggagagucuuccuuc

SEQ ID NO: 2476112 - RNA, 19 nt, Artificial Sequence
  Description of Artificial Sequence: Synthetic oligonucleotide
agacgaagguguugaagaa

SEQ ID NO: 2476113 - RNA, 19 nt, Artificial Sequence
  Description of Artificial Sequence: Synthetic oligonucleotide
cucaguuuccaaccauguc

SEQ ID NO: 2476114 - RNA, 19 nt, Artificial Sequence
  Description of Artificial Sequence: Synthetic oligonucleotide
gcaauauccuggaugauga

SEQ ID NO: 2476115 - RNA, 19 nt, Artificial Sequence
  Description of Artificial Sequence: Synthetic oligonucleotide
auucaucaacgggacauga

SEQ ID NO: 2476116 - RNA, 19 nt, Artificial Sequence
  Description of Artificial Sequence: Synthetic oligonucleotide
ugauggucccuuugaacuu

SEQ ID NO: 2476117 - RNA, 19 nt, Artificial Sequence
  Description of Artificial Sequence: Synthetic oligonucleotide
uucggacuugcaugaacuc

SEQ ID NO: 2476118 - RNA, 19 nt, Artificial Sequence
  Description of Artificial Sequence: Synthetic oligonucleotide
gguacuuggggagagaugu

SEQ ID NO: 2476119 - RNA, 19 nt, Artificial Sequence
  Description of Artificial Sequence: Synthetic oligonucleotide
cauucggaguagcuccgag

SEQ ID NO: 2476120 - RNA, 19 nt, Artificial Sequence
  Description of Artificial Sequence: Synthetic oligonucleotide
guccguuuguaaaaguaga

SEQ ID NO: 2476121 - RNA, 19 nt, Artificial Sequence
  Description of Artificial Sequence: Synthetic oligonucleotide
cauagugaguccugguaaa

SEQ ID NO: 2476122 - RNA, 19 nt, Artificial Sequence
  Description of Artificial Sequence: Synthetic oligonucleotide
guguuugaaguccaucugu

SEQ ID NO: 2476123 - RNA, 19 nt, Artificial Sequence
  Description of Artificial Sequence: Synthetic oligonucleotide
aaguacagcaccgccgcua

SEQ ID NO: 2476124 - RNA, 19 nt, Artificial Sequence
  Description of Artificial Sequence: Synthetic oligonucleotide
acauggagggagaugcuga

SEQ ID NO: 2476125 - RNA, 19 nt, Artificial Sequence
  Description of Artificial Sequence: Synthetic oligonucleotide
uuggggagagaugucuagu

SEQ ID NO: 2476126 - RNA, 19 nt, Artificial Sequence
  Description of Artificial Sequence: Synthetic oligonucleotide
gaauugacaaacaggucau

SEQ ID NO: 2476127 - RNA, 19 nt, Artificial Sequence
  Description of Artificial Sequence: Synthetic oligonucleotide
aguuagaaugauggucccu

SEQ ID NO: 2476128 - RNA, 19 nt, Artificial Sequence
  Description of Artificial Sequence: Synthetic oligonucleotide
caagaacugaagggagagc

SEQ ID NO: 2476129 - RNA, 19 nt, Artificial Sequence
  Description of Artificial Sequence: Synthetic oligonucleotide
cuucggacuugcaugaacu

SEQ ID NO: 2476130 - RNA, 19 nt, Artificial Sequence
  Description of Artificial Sequence: Synthetic oligonucleotide
gcaaguucaugacccagac

SEQ ID NO: 2476131 - RNA, 19 nt, Artificial Sequence
  Description of Artificial Sequence: Synthetic oligonucleotide
cuugaaugcugagcacagc

SEQ ID NO: 2476132 - RNA, 19 nt, Artificial Sequence
  Description of Artificial Sequence: Synthetic oligonucleotide
ugguucucuacuggguacu

SEQ ID NO: 2476133 - RNA, 19 nt, Artificial Sequence
  Description of Artificial Sequence: Synthetic oligonucleotide
ucccuggcucugaugcaag

SEQ ID NO: 2476134 - RNA, 19 nt, Artificial Sequence
  Description of Artificial Sequence: Synthetic oligonucleotide
caucuguccaaaugaagcu

SEQ ID NO: 2476135 - RNA, 19 nt, Artificial Sequence
  Description of Artificial Sequence: Synthetic oligonucleotide
aauugacaaacaggucaua

SEQ ID NO: 2476136 - RNA, 19 nt, Artificial Sequence
  Description of Artificial Sequence: Synthetic oligonucleotide
cuagucucuggaauacaaa

SEQ ID NO: 2476137 - RNA, 19 nt, Artificial Sequence
  Description of Artificial Sequence: Synthetic oligonucleotide
augucuggagagucuuccu

SEQ ID NO: 2476138 - RNA, 19 nt, Artificial Sequence
  Description of Artificial Sequence: Synthetic oligonucleotide
cgagaaggaauugacaaac

SEQ ID NO: 2476139 - RNA, 19 nt, Artificial Sequence
  Description of Artificial Sequence: Synthetic oligonucleotide
aggagccauucggaguagc

SEQ ID NO: 2476140 - RNA, 19 nt, Artificial Sequence
  Description of Artificial Sequence: Synthetic oligonucleotide
cauaggacagcagcaagaa

SEQ ID NO: 2476141 - RNA, 19 nt, Artificial Sequence
  Description of Artificial Sequence: Synthetic oligonucleotide
ccguuuguaaaaguagaag

SEQ ID NO: 2476142 - RNA, 19 nt, Artificial Sequence
  Description of Artificial Sequence: Synthetic oligonucleotide
agcuccgagaaggaauuga

SEQ ID NO: 2476143 - RNA, 19 nt, Artificial Sequence
  Description of Artificial Sequence: Synthetic oligonucleotide
gugcacauuccacaguucu

SEQ ID NO: 2476144 - RNA, 19 nt, Artificial Sequence
  Description of Artificial Sequence: Synthetic oligonucleotide
gcuugagcauguuccuagg

SEQ ID NO: 2476145 - RNA, 19 nt, Artificial Sequence
  Description of Artificial Sequence: Synthetic oligonucleotide
aagguacacagcaguuaga

SEQ ID NO: 2476146 - RNA, 19 nt, Artificial Sequence
  Description of Artificial Sequence: Synthetic oligonucleotide
caguucuguagaagauaac

SEQ ID NO: 2476147 - RNA, 19 nt, Artificial Sequence
  Description of Artificial Sequence: Synthetic oligonucleotide
aguggucaccuucggacuu

SEQ ID NO: 2476148 - RNA, 19 nt, Artificial Sequence
  Description of Artificial Sequence: Synthetic oligonucleotide
agugcacauuccacaguuc

SEQ ID NO: 2476149 - RNA, 19 nt, Artificial Sequence
  Description of Artificial Sequence: Synthetic oligonucleotide
cguccguuuguaaaaguag

SEQ ID NO: 2476150 - RNA, 19 nt, Artificial Sequence
  Description of Artificial Sequence: Synthetic oligonucleotide
agucucuggaauacaaaua

SEQ ID NO: 2476151 - RNA, 19 nt, Artificial Sequence
  Description of Artificial Sequence: Synthetic oligonucleotide
caucaacgggacaugaagu

SEQ ID NO: 2476152 - RNA, 19 nt, Artificial Sequence
  Description of Artificial Sequence: Synthetic oligonucleotide
agacuguaguugcuaguuu

SEQ ID NO: 2476153 - RNA, 19 nt, Artificial Sequence
  Description of Artificial Sequence: Synthetic oligonucleotide
cuuuucgggacucccaagu

SEQ ID NO: 2476154 - RNA, 19 nt, Artificial Sequence
  Description of Artificial Sequence: Synthetic oligonucleotide
cucccaagugcacauucca

SEQ ID NO: 2476155 - RNA, 19 nt, Artificial Sequence
  Description of Artificial Sequence: Synthetic oligonucleotide
agccauagugaguccuggu

SEQ ID NO: 2476156 - RNA, 19 nt, Artificial Sequence
  Description of Artificial Sequence: Synthetic oligonucleotide
gaagggagagcaccagacu

SEQ ID NO: 2476157 - RNA, 19 nt, Artificial Sequence
  Description of Artificial Sequence: Synthetic oligonucleotide
gcauguuccuaggaagucc

SEQ ID NO: 2476158 - RNA, 19 nt, Artificial Sequence
  Description of Artificial Sequence: Synthetic oligonucleotide
cagccauagugaguccugg

SEQ ID NO: 2476159 - RNA, 19 nt, Artificial Sequence
  Description of Artificial Sequence: Synthetic oligonucleotide
uucccuggcucugaugcaa

SEQ ID NO: 2476160 - RNA, 19 nt, Artificial Sequence
  Description of Artificial Sequence: Synthetic oligonucleotide
guuagaaugauggucccuu

SEQ ID NO: 2476161 - RNA, 19 nt, Artificial Sequence
  Description of Artificial Sequence: Synthetic oligonucleotide
auagugaguccugguaaaa

SEQ ID NO: 2476162 - RNA, 19 nt, Artificial Sequence
  Description of Artificial Sequence: Synthetic oligonucleotide
uuuccaccgcaaguucaug

SEQ ID NO: 2476163 - RNA, 19 nt, Artificial Sequence
  Description of Artificial Sequence: Synthetic oligonucleotide
cguuuguaaaaguagaagu

SEQ ID NO: 2476164 - RNA, 19 nt, Artificial Sequence
  Description of Artificial Sequence: Synthetic oligonucleotide
caccuucggacuugcauga

SEQ ID NO: 2476165 - RNA, 19 nt, Artificial Sequence
  Description of Artificial Sequence: Synthetic oligonucleotide
uacuggguacuuggggaga

SEQ ID NO: 2476166 - RNA, 19 nt, Artificial Sequence
  Description of Artificial Sequence: Synthetic oligonucleotide
aguucaugacccagacaug

SEQ ID NO: 2476167 - RNA, 19 nt, Artificial Sequence
  Description of Artificial Sequence: Synthetic oligonucleotide
ugaacuccuuucgcagcca

SEQ ID NO: 2476168 - RNA, 19 nt, Artificial Sequence
  Description of Artificial Sequence: Synthetic oligonucleotide
accgcaaguucaugaccca

SEQ ID NO: 2476169 - RNA, 19 nt, Artificial Sequence
  Description of Artificial Sequence: Synthetic oligonucleotide
agauaacuucugguucucu

SEQ ID NO: 2476170 - RNA, 19 nt, Artificial Sequence
  Description of Artificial Sequence: Synthetic oligonucleotide
agggagagcaccagacugu

SEQ ID NO: 2476171 - RNA, 19 nt, Artificial Sequence
  Description of Artificial Sequence: Synthetic oligonucleotide
agccguccguuuguaaaag

SEQ ID NO: 2476172 - RNA, 19 nt, Artificial Sequence
  Description of Artificial Sequence: Synthetic oligonucleotide
gagagucuuccuucuugaa

SEQ ID NO: 2476173 - RNA, 19 nt, Artificial Sequence
  Description of Artificial Sequence: Synthetic oligonucleotide
aggagguuucuaccaggaa

SEQ ID NO: 2476174 - RNA, 19 nt, Artificial Sequence
  Description of Artificial Sequence: Synthetic oligonucleotide
caacgggacaugaaguggu

SEQ ID NO: 2476175 - RNA, 19 nt, Artificial Sequence
  Description of Artificial Sequence: Synthetic oligonucleotide
caaguucaugacccagaca

SEQ ID NO: 2476176 - RNA, 19 nt, Artificial Sequence
  Description of Artificial Sequence: Synthetic oligonucleotide
agucucacagccguccguu

SEQ ID NO: 2476177 - RNA, 19 nt, Artificial Sequence
  Description of Artificial Sequence: Synthetic oligonucleotide
acaggucauaggacagcag

SEQ ID NO: 2476178 - RNA, 19 nt, Artificial Sequence
  Description of Artificial Sequence: Synthetic oligonucleotide
ccuuucgcagccauaguga

SEQ ID NO: 2476179 - RNA, 19 nt, Artificial Sequence
  Description of Artificial Sequence: Synthetic oligonucleotide
ucgggacucccaagugcac

SEQ ID NO: 2476180 - RNA, 19 nt, Artificial Sequence
  Description of Artificial Sequence: Synthetic oligonucleotide
cccaagugcacauuccaca

SEQ ID NO: 2476181 - RNA, 19 nt, Artificial Sequence
  Description of Artificial Sequence: Synthetic oligonucleotide
acgggacaugaagugguca

SEQ ID NO: 2476182 - RNA, 19 nt, Artificial Sequence
  Description of Artificial Sequence: Synthetic oligonucleotide
ugacccagacauggaggga

SEQ ID NO: 2476183 - RNA, 19 nt, Artificial Sequence
  Description of Artificial Sequence: Synthetic oligonucleotide
agguuucuaccaggaagga

SEQ ID NO: 2476184 - RNA, 19 nt, Artificial Sequence
  Description of Artificial Sequence: Synthetic oligonucleotide
cacaguucuguagaagaua

SEQ ID NO: 2476185 - RNA, 19 nt, Artificial Sequence
  Description of Artificial Sequence: Synthetic oligonucleotide
gcuuuucgggacucccaag

SEQ ID NO: 2476186 - RNA, 19 nt, Artificial Sequence
  Description of Artificial Sequence: Synthetic oligonucleotide
cuguaguugcuaguuugga

SEQ ID NO: 2476187 - RNA, 19 nt, Artificial Sequence
  Description of Artificial Sequence: Synthetic oligonucleotide
uggucaccuucggacuugc

SEQ ID NO: 2476188 - RNA, 19 nt, Artificial Sequence
  Description of Artificial Sequence: Synthetic oligonucleotide
cugcuuuucgggacuccca

SEQ ID NO: 2476189 - RNA, 19 nt, Artificial Sequence
  Description of Artificial Sequence: Synthetic oligonucleotide
gggacaugaaguggucacc

SEQ ID NO: 2476190 - RNA, 19 nt, Artificial Sequence
  Description of Artificial Sequence: Synthetic oligonucleotide
ggcugaccaggccagccug

SEQ ID NO: 2476191 - RNA, 19 nt, Artificial Sequence
  Description of Artificial Sequence: Synthetic oligonucleotide
agcaccgccgcuagucucu

SEQ ID NO: 2476192 - RNA, 19 nt, Artificial Sequence
  Description of Artificial Sequence: Synthetic oligonucleotide
ccauagugaguccugguaa

SEQ ID NO: 2476193 - RNA, 19 nt, Artificial Sequence
  Description of Artificial Sequence: Synthetic oligonucleotide
gccucaguuuccaaccaug

SEQ ID NO: 2476194 - RNA, 19 nt, Artificial Sequence
  Description of Artificial Sequence: Synthetic oligonucleotide
ccaccgcaaguucaugacc

SEQ ID NO: 2476195 - RNA, 19 nt, Artificial Sequence
  Description of Artificial Sequence: Synthetic oligonucleotide
ccuucggacuugcaugaac

SEQ ID NO: 2476196 - RNA, 19 nt, Artificial Sequence
  Description of Artificial Sequence: Synthetic oligonucleotide
uagcuccgagaaggaauug

SEQ ID NO: 2476197 - RNA, 19 nt, Artificial Sequence
  Description of Artificial Sequence: Synthetic oligonucleotide
guccaucuguccaaaugaa

SEQ ID NO: 2476198 - RNA, 19 nt, Artificial Sequence
  Description of Artificial Sequence: Synthetic oligonucleotide
ggucauaggacagcagcaa

SEQ ID NO: 2476199 - RNA, 19 nt, Artificial Sequence
  Description of Artificial Sequence: Synthetic oligonucleotide
aguugcuaguuuggagcau

SEQ ID NO: 2476200 - RNA, 19 nt, Artificial Sequence
  Description of Artificial Sequence: Synthetic oligonucleotide
ucgcagccauagugagucc

SEQ ID NO: 2476201 - RNA, 19 nt, Artificial Sequence
  Description of Artificial Sequence: Synthetic oligonucleotide
ggaaaauuaugaugauguu

SEQ ID NO: 2476202 - RNA, 19 nt, Artificial Sequence
  Description of Artificial Sequence: Synthetic oligonucleotide
uugcaauauccuggaugau

SEQ ID NO: 2476203 - RNA, 19 nt, Artificial Sequence
  Description of Artificial Sequence: Synthetic oligonucleotide
acuuggggagagaugucua

SEQ ID NO: 2476204 - RNA, 19 nt, Artificial Sequence
  Description of Artificial Sequence: Synthetic oligonucleotide
ugcuaguuuggagcaucuu

SEQ ID NO: 2476205 - RNA, 19 nt, Artificial Sequence
  Description of Artificial Sequence: Synthetic oligonucleotide
gccauucggaguagcuccg

SEQ ID NO: 2476206 - RNA, 19 nt, Artificial Sequence
  Description of Artificial Sequence: Synthetic oligonucleotide
ccagucucacagccguccg

SEQ ID NO: 2476207 - RNA, 19 nt, Artificial Sequence
  Description of Artificial Sequence: Synthetic oligonucleotide
cccagucucacagccgucc

SEQ ID NO: 2476208 - RNA, 19 nt, Artificial Sequence
  Description of Artificial Sequence: Synthetic oligonucleotide
aacuccuuucgcagccaua

SEQ ID NO: 2476209 - RNA, 19 nt, Artificial Sequence
  Description of Artificial Sequence: Synthetic oligonucleotide
ucccagucucacagccguc

SEQ ID NO: 2476210 - RNA, 19 nt, Artificial Sequence
  Description of Artificial Sequence: Synthetic oligonucleotide
guagcuccgagaaggaauu

SEQ ID NO: 2476211 - RNA, 19 nt, Artificial Sequence
  Description of Artificial Sequence: Synthetic oligonucleotide
gguuucuaccaggaaggaa

SEQ ID NO: 2476212 - RNA, 19 nt, Artificial Sequence
  Description of Artificial Sequence: Synthetic oligonucleotide
gaacuccuuucgcagccau

SEQ ID NO: 2476213 - RNA, 19 nt, Artificial Sequence
  Description of Artificial Sequence: Synthetic oligonucleotide
gacaugaaguggucaccuu

SEQ ID NO: 2476214 - RNA, 19 nt, Artificial Sequence
  Description of Artificial Sequence: Synthetic oligonucleotide
cagacuguaguugcuaguu

SEQ ID NO: 2476215 - RNA, 19 nt, Artificial Sequence
  Description of Artificial Sequence: Synthetic oligonucleotide
ggacaugaaguggucaccu

SEQ ID NO: 2476216 - RNA, 19 nt, Artificial Sequence
  Description of Artificial Sequence: Synthetic oligonucleotide
gaaguacagcaccgccgcu

SEQ ID NO: 2476217 - RNA, 19 nt, Artificial Sequence
  Description of Artificial Sequence: Synthetic oligonucleotide
cucacagccguccguuugu

SEQ ID NO: 2476218 - RNA, 19 nt, Artificial Sequence
  Description of Artificial Sequence: Synthetic oligonucleotide
gcugaccaggccagccugg

SEQ ID NO: 2476219 - RNA, 19 nt, Artificial Sequence
  Description of Artificial Sequence: Synthetic oligonucleotide
guacuuggggagagauguc

SEQ ID NO: 2476220 - RNA, 19 nt, Artificial Sequence
  Description of Artificial Sequence: Synthetic oligonucleotide
gccgcuagucucuggaaua

SEQ ID NO: 2476221 - RNA, 19 nt, Artificial Sequence
  Description of Artificial Sequence: Synthetic oligonucleotide
ggcuguccuucccuggaga

SEQ ID NO: 2476222 - RNA, 19 nt, Artificial Sequence
  Description of Artificial Sequence: Synthetic oligonucleotide
caagugcacauuccacagu

SEQ ID NO: 2476223 - RNA, 19 nt, Artificial Sequence
  Description of Artificial Sequence: Synthetic oligonucleotide
ccgagaaggaauugacaaa

SEQ ID NO: 2476224 - RNA, 19 nt, Artificial Sequence
  Description of Artificial Sequence: Synthetic oligonucleotide
ggguacuuggggagagaug

SEQ ID NO: 2476225 - RNA, 19 nt, Artificial Sequence
  Description of Artificial Sequence: Synthetic oligonucleotide
ucacagccguccguuugua

SEQ ID NO: 2476226 - RNA, 19 nt, Artificial Sequence
  Description of Artificial Sequence: Synthetic oligonucleotide
ggagagcaccagacuguag

SEQ ID NO: 2476227 - RNA, 19 nt, Artificial Sequence
  Description of Artificial Sequence: Synthetic oligonucleotide
gcugagggcaagguacaca

SEQ ID NO: 2476228 - RNA, 19 nt, Artificial Sequence
  Description of Artificial Sequence: Synthetic oligonucleotide
gagcagcccaggagguuuc

SEQ ID NO: 2476229 - RNA, 19 nt, Artificial Sequence
  Description of Artificial Sequence: Synthetic oligonucleotide
gacuugcaugaacuccuuu

SEQ ID NO: 2476230 - RNA, 19 nt, Artificial Sequence
  Description of Artificial Sequence: Synthetic oligonucleotide
caggagccauucggaguag

SEQ ID NO: 2476231 - RNA, 19 nt, Artificial Sequence
  Description of Artificial Sequence: Synthetic oligonucleotide
ccguccguuuguaaaagua

SEQ ID NO: 2476232 - RNA, 19 nt, Artificial Sequence
  Description of Artificial Sequence: Synthetic oligonucleotide
gguacacagcaguuagaau

SEQ ID NO: 2476233 - RNA, 19 nt, Artificial Sequence
  Description of Artificial Sequence: Synthetic oligonucleotide
caccgccgcuagucucugg

SEQ ID NO: 2476234 - RNA, 19 nt, Artificial Sequence
  Description of Artificial Sequence: Synthetic oligonucleotide
ccaugucuggagagucuuc

SEQ ID NO: 2476235 - RNA, 19 nt, Artificial Sequence
  Description of Artificial Sequence: Synthetic oligonucleotide
caccagacuguaguugcua

SEQ ID NO: 2476236 - RNA, 19 nt, Artificial Sequence
  Description of Artificial Sequence: Synthetic oligonucleotide
ccgcuagucucuggaauac

SEQ ID NO: 2476237 - RNA, 19 nt, Artificial Sequence
  Description of Artificial Sequence: Synthetic oligonucleotide
ccgcaaguucaugacccag

SEQ ID NO: 2476238 - RNA, 19 nt, Artificial Sequence
  Description of Artificial Sequence: Synthetic oligonucleotide
cacagccguccguuuguaa

SEQ ID NO: 2476239 - RNA, 19 nt, Artificial Sequence
  Description of Artificial Sequence: Synthetic oligonucleotide
agcagcccaggagguuucu

SEQ ID NO: 2476240 - RNA, 19 nt, Artificial Sequence
  Description of Artificial Sequence: Synthetic oligonucleotide
auguuccuaggaaguccau

SEQ ID NO: 2476241 - RNA, 19 nt, Artificial Sequence
  Description of Artificial Sequence: Synthetic oligonucleotide
ccucaguuuccaaccaugu

SEQ ID NO: 2476242 - RNA, 19 nt, Artificial Sequence
  Description of Artificial Sequence: Synthetic oligonucleotide
cuggaugacaggagccauu

SEQ ID NO: 2476243 - RNA, 19 nt, Artificial Sequence
  Description of Artificial Sequence: Synthetic oligonucleotide
guccuucccuggagagcag

SEQ ID NO: 2476244 - RNA, 19 nt, Artificial Sequence
  Description of Artificial Sequence: Synthetic oligonucleotide
ggagccauucggaguagcu

SEQ ID NO: 2476245 - RNA, 19 nt, Artificial Sequence
  Description of Artificial Sequence: Synthetic oligonucleotide
accuucggacuugcaugaa

SEQ ID NO: 2476246 - RNA, 19 nt, Artificial Sequence
  Description of Artificial Sequence: Synthetic oligonucleotide
ggggucucccagucucaca

SEQ ID NO: 2476247 - RNA, 19 nt, Artificial Sequence
  Description of Artificial Sequence: Synthetic oligonucleotide
ggcugcuuuucgggacucc

SEQ ID NO: 2476248 - RNA, 19 nt, Artificial Sequence
  Description of Artificial Sequence: Synthetic oligonucleotide
ggugccaagggcuguccuu

SEQ ID NO: 2476249 - RNA, 19 nt, Artificial Sequence
  Description of Artificial Sequence: Synthetic oligonucleotide
cagucucacagccguccgu

SEQ ID NO: 2476250 - RNA, 19 nt, Artificial Sequence
  Description of Artificial Sequence: Synthetic oligonucleotide
ccuggugccaagggcuguc

SEQ ID NO: 2476251 - RNA, 19 nt, Artificial Sequence
  Description of Artificial Sequence: Synthetic oligonucleotide
cuccuuucgcagccauagu

SEQ ID NO: 2476252 - RNA, 19 nt, Artificial Sequence
  Description of Artificial Sequence: Synthetic oligonucleotide
ggauugcaauauccuggau

SEQ ID NO: 2476253 - RNA, 19 nt, Artificial Sequence
  Description of Artificial Sequence: Synthetic oligonucleotide
gccguccguuuguaaaagu

SEQ ID NO: 2476254 - RNA, 19 nt, Artificial Sequence
  Description of Artificial Sequence: Synthetic oligonucleotide
cuggagagucuuccuucuu

SEQ ID NO: 2476255 - RNA, 19 nt, Artificial Sequence
  Description of Artificial Sequence: Synthetic oligonucleotide
guacagcaccgccgcuagu

SEQ ID NO: 2476256 - RNA, 19 nt, Artificial Sequence
  Description of Artificial Sequence: Synthetic oligonucleotide
gcaccgccgcuagucucug

SEQ ID NO: 2476257 - RNA, 19 nt, Artificial Sequence
  Description of Artificial Sequence: Synthetic oligonucleotide
gcaccagacuguaguugcu

SEQ ID NO: 2476258 - RNA, 19 nt, Artificial Sequence
  Description of Artificial Sequence: Synthetic oligonucleotide
cgggacucccaagugcaca

SEQ ID NO: 2476259 - RNA, 19 nt, Artificial Sequence
  Description of Artificial Sequence: Synthetic oligonucleotide
gguucucuacuggguacuu

SEQ ID NO: 2476260 - RNA, 19 nt, Artificial Sequence
  Description of Artificial Sequence: Synthetic oligonucleotide
ggacuugcaugaacuccuu

SEQ ID NO: 2476261 - RNA, 19 nt, Artificial Sequence
  Description of Artificial Sequence: Synthetic oligonucleotide
ccgccgcuagucucuggaa

SEQ ID NO: 2476262 - RNA, 19 nt, Artificial Sequence
  Description of Artificial Sequence: Synthetic oligonucleotide
ggacucccaagugcacauu

SEQ ID NO: 2476263 - RNA, 19 nt, Artificial Sequence
  Description of Artificial Sequence: Synthetic oligonucleotide
cgccgcuagucucuggaau

SEQ ID NO: 2476264 - RNA, 19 nt, Artificial Sequence
  Description of Artificial Sequence: Synthetic oligonucleotide
aauuccagcacucagaggc

SEQ ID NO: 2476265 - RNA, 19 nt, Artificial Sequence
  Description of Artificial Sequence: Synthetic oligonucleotide
aauuuggugagacaaaugc

SEQ ID NO: 2476266 - RNA, 19 nt, Artificial Sequence
  Description of Artificial Sequence: Synthetic oligonucleotide
aacaguaucaaugagaaac

SEQ ID NO: 2476267 - RNA, 19 nt, Artificial Sequence
  Description of Artificial Sequence: Synthetic oligonucleotide
aauucaucugcacugaagc

SEQ ID NO: 2476268 - RNA, 19 nt, Artificial Sequence
  Description of Artificial Sequence: Synthetic oligonucleotide
aauuuaaacuccaacaugg

SEQ ID NO: 2476269 - RNA, 19 nt, Artificial Sequence
  Description of Artificial Sequence: Synthetic oligonucleotide
aguuauuuccuuuaauucc

SEQ ID NO: 2476270 - RNA, 19 nt, Artificial Sequence
  Description of Artificial Sequence: Synthetic oligonucleotide
ucuucaauagcacaucugg

SEQ ID NO: 2476271 - RNA, 19 nt, Artificial Sequence
  Description of Artificial Sequence: Synthetic oligonucleotide
ugaagcuucucuuagagag

SEQ ID NO: 2476272 - RNA, 19 nt, Artificial Sequence
  Description of Artificial Sequence: Synthetic oligonucleotide
agcaaaaccacucuauccc

SEQ ID NO: 2476273 - RNA, 19 nt, Artificial Sequence
  Description of Artificial Sequence: Synthetic oligonucleotide
aagcaaaaccacucuaucc

SEQ ID NO: 2476274 - RNA, 19 nt, Artificial Sequence
  Description of Artificial Sequence: Synthetic oligonucleotide
uuaaacuccaacaugggcu

SEQ ID NO: 2476275 - RNA, 19 nt, Artificial Sequence
  Description of Artificial Sequence: Synthetic oligonucleotide
aagaaagaugacuuccugg

SEQ ID NO: 2476276 - RNA, 19 nt, Artificial Sequence
  Description of Artificial Sequence: Synthetic oligonucleotide
aaccacucuaucccgaagc

SEQ ID NO: 2476277 - RNA, 19 nt, Artificial Sequence
  Description of Artificial Sequence: Synthetic oligonucleotide
ucuuuuguaguuuuauucc

SEQ ID NO: 2476278 - RNA, 19 nt, Artificial Sequence
  Description of Artificial Sequence: Synthetic oligonucleotide
agagucuugagucagcccg

SEQ ID NO: 2476279 - RNA, 19 nt, Artificial Sequence
  Description of Artificial Sequence: Synthetic oligonucleotide
aaagcaaaaccacucuauc

SEQ ID NO: 2476280 - RNA, 19 nt, Artificial Sequence
  Description of Artificial Sequence: Synthetic oligonucleotide
ugaguuauuuccagcaagg

SEQ ID NO: 2476281 - RNA, 19 nt, Artificial Sequence
  Description of Artificial Sequence: Synthetic oligonucleotide
guuauuuccagcaagggag

SEQ ID NO: 2476282 - RNA, 19 nt, Artificial Sequence
  Description of Artificial Sequence: Synthetic oligonucleotide
uuuuauuccugaaacuugc

SEQ ID NO: 2476283 - RNA, 19 nt, Artificial Sequence
  Description of Artificial Sequence: Synthetic oligonucleotide
aaugugaaaguccugaguu

SEQ ID NO: 2476284 - RNA, 19 nt, Artificial Sequence
  Description of Artificial Sequence: Synthetic oligonucleotide
uuugaaugcaacucgauuc

SEQ ID NO: 2476285 - RNA, 19 nt, Artificial Sequence
  Description of Artificial Sequence: Synthetic oligonucleotide
aauucaaggcaagagcuac

SEQ ID NO: 2476286 - RNA, 19 nt, Artificial Sequence
  Description of Artificial Sequence: Synthetic oligonucleotide
ucuuuacuaagcuucuugg

SEQ ID NO: 2476287 - RNA, 19 nt, Artificial Sequence
  Description of Artificial Sequence: Synthetic oligonucleotide
agaaacauaagcuguaacu

SEQ ID NO: 2476288 - RNA, 19 nt, Artificial Sequence
  Description of Artificial Sequence: Synthetic oligonucleotide
auuugagucuuuuacuggg

SEQ ID NO: 2476289 - RNA, 19 nt, Artificial Sequence
  Description of Artificial Sequence: Synthetic oligonucleotide
ugcaacucgauucagguac

SEQ ID NO: 2476290 - RNA, 19 nt, Artificial Sequence
  Description of Artificial Sequence: Synthetic oligonucleotide
caaggcaagagcuacagag

SEQ ID NO: 2476291 - RNA, 19 nt, Artificial Sequence
  Description of Artificial Sequence: Synthetic oligonucleotide
uaagcuguaacugaacucc

SEQ ID NO: 2476292 - RNA, 19 nt, Artificial Sequence
  Description of Artificial Sequence: Synthetic oligonucleotide
gaaaagaaagaugacuucc

SEQ ID NO: 2476293 - RNA, 19 nt, Artificial Sequence
  Description of Artificial Sequence: Synthetic oligonucleotide
uuuaaacuccaacaugggc

SEQ ID NO: 2476294 - RNA, 19 nt, Artificial Sequence
  Description of Artificial Sequence: Synthetic oligonucleotide
ucuugagucagcccgaucu

SEQ ID NO: 2476295 - RNA, 19 nt, Artificial Sequence
  Description of Artificial Sequence: Synthetic oligonucleotide
ugacauuugagucuuuuac

SEQ ID NO: 2476296 - RNA, 19 nt, Artificial Sequence
  Description of Artificial Sequence: Synthetic oligonucleotide
guaguuuuauuccugaaac

SEQ ID NO: 2476297 - RNA, 19 nt, Artificial Sequence
  Description of Artificial Sequence: Synthetic oligonucleotide
uaauccaacauuucaguca

SEQ ID NO: 2476298 - RNA, 19 nt, Artificial Sequence
  Description of Artificial Sequence: Synthetic oligonucleotide
aaugcuuuccuguucugug

SEQ ID NO: 2476299 - RNA, 19 nt, Artificial Sequence
  Description of Artificial Sequence: Synthetic oligonucleotide
aucuggacauaauuuaaac

SEQ ID NO: 2476300 - RNA, 19 nt, Artificial Sequence
  Description of Artificial Sequence: Synthetic oligonucleotide
uuuacuaagcuucuuggau

SEQ ID NO: 2476301 - RNA, 19 nt, Artificial Sequence
  Description of Artificial Sequence: Synthetic oligonucleotide
uggacauaauuuaaacucc

SEQ ID NO: 2476302 - RNA, 19 nt, Artificial Sequence
  Description of Artificial Sequence: Synthetic oligonucleotide
agaauuccaaaugugaaag

SEQ ID NO: 2476303 - RNA, 19 nt, Artificial Sequence
  Description of Artificial Sequence: Synthetic oligonucleotide
uugaaaguccggaacauga

SEQ ID NO: 2476304 - RNA, 19 nt, Artificial Sequence
  Description of Artificial Sequence: Synthetic oligonucleotide
uagucuuuugucaugggug

SEQ ID NO: 2476305 - RNA, 19 nt, Artificial Sequence
  Description of Artificial Sequence: Synthetic oligonucleotide
gauucgggcaucuuugucc

SEQ ID NO: 2476306 - RNA, 19 nt, Artificial Sequence
  Description of Artificial Sequence: Synthetic oligonucleotide
uucaauagcacaucuggac

SEQ ID NO: 2476307 - RNA, 19 nt, Artificial Sequence
  Description of Artificial Sequence: Synthetic oligonucleotide
uuuacuggguuuuguagag

SEQ ID NO: 2476308 - RNA, 19 nt, Artificial Sequence
  Description of Artificial Sequence: Synthetic oligonucleotide
ucaauagcacaucuggaca

SEQ ID NO: 2476309 - RNA, 19 nt, Artificial Sequence
  Description of Artificial Sequence: Synthetic oligonucleotide
uccaacaugggcuugugug

SEQ ID NO: 2476310 - RNA, 19 nt, Artificial Sequence
  Description of Artificial Sequence: Synthetic oligonucleotide
uuuuacuggguuuuguaga

SEQ ID NO: 2476311 - RNA, 19 nt, Artificial Sequence
  Description of Artificial Sequence: Synthetic oligonucleotide
uggugguaaaagcaaaacc

SEQ ID NO: 2476312 - RNA, 19 nt, Artificial Sequence
  Description of Artificial Sequence: Synthetic oligonucleotide
aaaugugaaaguccugagu

SEQ ID NO: 2476313 - RNA, 19 nt, Artificial Sequence
  Description of Artificial Sequence: Synthetic oligonucleotide
uuacuaagcuucuuggaug

SEQ ID NO: 2476314 - RNA, 19 nt, Artificial Sequence
  Description of Artificial Sequence: Synthetic oligonucleotide
auaagcuguaacugaacuc

SEQ ID NO: 2476315 - RNA, 19 nt, Artificial Sequence
  Description of Artificial Sequence: Synthetic oligonucleotide
uguaacugaacuccuuggc

SEQ ID NO: 2476316 - RNA, 19 nt, Artificial Sequence
  Description of Artificial Sequence: Synthetic oligonucleotide
caacauuucagucacaaca

SEQ ID NO: 2476317 - RNA, 19 nt, Artificial Sequence
  Description of Artificial Sequence: Synthetic oligonucleotide
ugagaauuccaaaugugaa

SEQ ID NO: 2476318 - RNA, 19 nt, Artificial Sequence
  Description of Artificial Sequence: Synthetic oligonucleotide
uaguuauuuccuuuaauuc

SEQ ID NO: 2476319 - RNA, 19 nt, Artificial Sequence
  Description of Artificial Sequence: Synthetic oligonucleotide
acugaagcuucucuuagag

SEQ ID NO: 2476320 - RNA, 19 nt, Artificial Sequence
  Description of Artificial Sequence: Synthetic oligonucleotide
uugaaugcaacucgauuca

SEQ ID NO: 2476321 - RNA, 19 nt, Artificial Sequence
  Description of Artificial Sequence: Synthetic oligonucleotide
ucuggacauaauuuaaacu

SEQ ID NO: 2476322 - RNA, 19 nt, Artificial Sequence
  Description of Artificial Sequence: Synthetic oligonucleotide
uaacugaacuccuuggcug

SEQ ID NO: 2476323 - RNA, 19 nt, Artificial Sequence
  Description of Artificial Sequence: Synthetic oligonucleotide
uggaucauccccuuuguca

SEQ ID NO: 2476324 - RNA, 19 nt, Artificial Sequence
  Description of Artificial Sequence: Synthetic oligonucleotide
agaguuucaaauucaucug

SEQ ID NO: 2476325 - RNA, 19 nt, Artificial Sequence
  Description of Artificial Sequence: Synthetic oligonucleotide
uguguguagucuuuuguca

SEQ ID NO: 2476326 - RNA, 19 nt, Artificial Sequence
  Description of Artificial Sequence: Synthetic oligonucleotide
uucagucacaacaguauca

SEQ ID NO: 2476327 - RNA, 19 nt, Artificial Sequence
  Description of Artificial Sequence: Synthetic oligonucleotide
cuugauucgggcaucuuug

SEQ ID NO: 2476328 - RNA, 19 nt, Artificial Sequence
  Description of Artificial Sequence: Synthetic oligonucleotide
uacuaagcuucuuggaugc

SEQ ID NO: 2476329 - RNA, 19 nt, Artificial Sequence
  Description of Artificial Sequence: Synthetic oligonucleotide
aguuauuuccagcaaggga

SEQ ID NO: 2476330 - RNA, 19 nt, Artificial Sequence
  Description of Artificial Sequence: Synthetic oligonucleotide
cauuugagucuuuuacugg

SEQ ID NO: 2476331 - RNA, 19 nt, Artificial Sequence
  Description of Artificial Sequence: Synthetic oligonucleotide
cugaaacuugcacaggugc

SEQ ID NO: 2476332 - RNA, 19 nt, Artificial Sequence
  Description of Artificial Sequence: Synthetic oligonucleotide
uuauuccugaaacuugcac

SEQ ID NO: 2476333 - RNA, 19 nt, Artificial Sequence
  Description of Artificial Sequence: Synthetic oligonucleotide
ugugcauuugaaugcaacu

SEQ ID NO: 2476334 - RNA, 19 nt, Artificial Sequence
  Description of Artificial Sequence: Synthetic oligonucleotide
uuuguucacuugauucggg

SEQ ID NO: 2476335 - RNA, 19 nt, Artificial Sequence
  Description of Artificial Sequence: Synthetic oligonucleotide
agucacaacaguaucaaug

SEQ ID NO: 2476336 - RNA, 19 nt, Artificial Sequence
  Description of Artificial Sequence: Synthetic oligonucleotide
ugcacuguccaauuuggug

SEQ ID NO: 2476337 - RNA, 19 nt, Artificial Sequence
  Description of Artificial Sequence: Synthetic oligonucleotide
gaugcacuguccaauuugg

SEQ ID NO: 2476338 - RNA, 19 nt, Artificial Sequence
  Description of Artificial Sequence: Synthetic oligonucleotide
uccugaguuauuuccagca

SEQ ID NO: 2476339 - RNA, 19 nt, Artificial Sequence
  Description of Artificial Sequence: Synthetic oligonucleotide
ugagacaaaugcuuuccug

SEQ ID NO: 2476340 - RNA, 19 nt, Artificial Sequence
  Description of Artificial Sequence: Synthetic oligonucleotide
uccccuuugucaauggagc

SEQ ID NO: 2476341 - RNA, 19 nt, Artificial Sequence
  Description of Artificial Sequence: Synthetic oligonucleotide
cacucuaucccgaagcuac

SEQ ID NO: 2476342 - RNA, 19 nt, Artificial Sequence
  Description of Artificial Sequence: Synthetic oligonucleotide
uucuuucucuuuacuaagc

SEQ ID NO: 2476343 - RNA, 19 nt, Artificial Sequence
  Description of Artificial Sequence: Synthetic oligonucleotide
ugguaaaagcaaaaccacu

SEQ ID NO: 2476344 - RNA, 19 nt, Artificial Sequence
  Description of Artificial Sequence: Synthetic oligonucleotide
aacuccuuggcugagaauu

SEQ ID NO: 2476345 - RNA, 19 nt, Artificial Sequence
  Description of Artificial Sequence: Synthetic oligonucleotide
aaacuugcacaggugcucg

SEQ ID NO: 2476346 - RNA, 19 nt, Artificial Sequence
  Description of Artificial Sequence: Synthetic oligonucleotide
uuagagagucuugagucag

SEQ ID NO: 2476347 - RNA, 19 nt, Artificial Sequence
  Description of Artificial Sequence: Synthetic oligonucleotide
uugucaauggagcuuguau

SEQ ID NO: 2476348 - RNA, 19 nt, Artificial Sequence
  Description of Artificial Sequence: Synthetic oligonucleotide
ugaaacuugcacaggugcu

SEQ ID NO: 2476349 - RNA, 19 nt, Artificial Sequence
  Description of Artificial Sequence: Synthetic oligonucleotide
uguacucuuuucuuucucu

SEQ ID NO: 2476350 - RNA, 19 nt, Artificial Sequence
  Description of Artificial Sequence: Synthetic oligonucleotide
agagagucuugagucagcc

SEQ ID NO: 2476351 - RNA, 19 nt, Artificial Sequence
  Description of Artificial Sequence: Synthetic oligonucleotide
gucacaacaguaucaauga

SEQ ID NO: 2476352 - RNA, 19 nt, Artificial Sequence
  Description of Artificial Sequence: Synthetic oligonucleotide
aauggagcuuguauucuuc

SEQ ID NO: 2476353 - RNA, 19 nt, Artificial Sequence
  Description of Artificial Sequence: Synthetic oligonucleotide
uuggcugagaauuccaaau

SEQ ID NO: 2476354 - RNA, 19 nt, Artificial Sequence
  Description of Artificial Sequence: Synthetic oligonucleotide
uuucagucacaacaguauc

SEQ ID NO: 2476355 - RNA, 19 nt, Artificial Sequence
  Description of Artificial Sequence: Synthetic oligonucleotide
ggugguaaaagcaaaacca

SEQ ID NO: 2476356 - RNA, 19 nt, Artificial Sequence
  Description of Artificial Sequence: Synthetic oligonucleotide
uguaguuauuuccuuuaau

SEQ ID NO: 2476357 - RNA, 19 nt, Artificial Sequence
  Description of Artificial Sequence: Synthetic oligonucleotide
acaacaguaucaaugagaa

SEQ ID NO: 2476358 - RNA, 19 nt, Artificial Sequence
  Description of Artificial Sequence: Synthetic oligonucleotide
aacugaacuccuuggcuga

SEQ ID NO: 2476359 - RNA, 19 nt, Artificial Sequence
  Description of Artificial Sequence: Synthetic oligonucleotide
aguuuuauuccugaaacuu

SEQ ID NO: 2476360 - RNA, 19 nt, Artificial Sequence
  Description of Artificial Sequence: Synthetic oligonucleotide
gaucuguuuguucacuuga

SEQ ID NO: 2476361 - RNA, 19 nt, Artificial Sequence
  Description of Artificial Sequence: Synthetic oligonucleotide
ggaacaugacauuugaguc

SEQ ID NO: 2476362 - RNA, 19 nt, Artificial Sequence
  Description of Artificial Sequence: Synthetic oligonucleotide
uggcugagaauuccaaaug

SEQ ID NO: 2476363 - RNA, 19 nt, Artificial Sequence
  Description of Artificial Sequence: Synthetic oligonucleotide
guuuguucacuugauucgg

SEQ ID NO: 2476364 - RNA, 19 nt, Artificial Sequence
  Description of Artificial Sequence: Synthetic oligonucleotide
ucugcacugaagcuucucu

SEQ ID NO: 2476365 - RNA, 19 nt, Artificial Sequence
  Description of Artificial Sequence: Synthetic oligonucleotide
agcuacuucacuggacugc

SEQ ID NO: 2476366 - RNA, 19 nt, Artificial Sequence
  Description of Artificial Sequence: Synthetic oligonucleotide
uucaaggcaagagcuacag

SEQ ID NO: 2476367 - RNA, 19 nt, Artificial Sequence
  Description of Artificial Sequence: Synthetic oligonucleotide
uuuauuccugaaacuugca

SEQ ID NO: 2476368 - RNA, 19 nt, Artificial Sequence
  Description of Artificial Sequence: Synthetic oligonucleotide
ucacaacaguaucaaugag

SEQ ID NO: 2476369 - RNA, 19 nt, Artificial Sequence
  Description of Artificial Sequence: Synthetic oligonucleotide
gaaugcaacucgauucagg

SEQ ID NO: 2476370 - RNA, 19 nt, Artificial Sequence
  Description of Artificial Sequence: Synthetic oligonucleotide
uucucuuagagagucuuga

SEQ ID NO: 2476371 - RNA, 19 nt, Artificial Sequence
  Description of Artificial Sequence: Synthetic oligonucleotide
ugucaauggagcuuguauu

SEQ ID NO: 2476372 - RNA, 19 nt, Artificial Sequence
  Description of Artificial Sequence: Synthetic oligonucleotide
uccggaacaugacauuuga

SEQ ID NO: 2476373 - RNA, 19 nt, Artificial Sequence
  Description of Artificial Sequence: Synthetic oligonucleotide
uguucacuugauucgggca

SEQ ID NO: 2476374 - RNA, 19 nt, Artificial Sequence
  Description of Artificial Sequence: Synthetic oligonucleotide
cuaauccaacauuucaguc

SEQ ID NO: 2476375 - RNA, 19 nt, Artificial Sequence
  Description of Artificial Sequence: Synthetic oligonucleotide
auucuucaauagcacaucu

SEQ ID NO: 2476376 - RNA, 19 nt, Artificial Sequence
  Description of Artificial Sequence: Synthetic oligonucleotide
uaguuuuauuccugaaacu

SEQ ID NO: 2476377 - RNA, 19 nt, Artificial Sequence
  Description of Artificial Sequence: Synthetic oligonucleotide
ucaugggugcacaugcugu

SEQ ID NO: 2476378 - RNA, 19 nt, Artificial Sequence
  Description of Artificial Sequence: Synthetic oligonucleotide
cugagaauuccaaauguga

SEQ ID NO: 2476379 - RNA, 19 nt, Artificial Sequence
  Description of Artificial Sequence: Synthetic oligonucleotide
gagaauuccaaaugugaaa

SEQ ID NO: 2476380 - RNA, 19 nt, Artificial Sequence
  Description of Artificial Sequence: Synthetic oligonucleotide
cacaacaguaucaaugaga

SEQ ID NO: 2476381 - RNA, 19 nt, Artificial Sequence
  Description of Artificial Sequence: Synthetic oligonucleotide
auuugaaugcaacucgauu

SEQ ID NO: 2476382 - RNA, 19 nt, Artificial Sequence
  Description of Artificial Sequence: Synthetic oligonucleotide
ucucuuagagagucuugag

SEQ ID NO: 2476383 - RNA, 19 nt, Artificial Sequence
  Description of Artificial Sequence: Synthetic oligonucleotide
uuguucacuugauucgggc

SEQ ID NO: 2476384 - RNA, 19 nt, Artificial Sequence
  Description of Artificial Sequence: Synthetic oligonucleotide
agcuaauccaacauuucag

SEQ ID NO: 2476385 - RNA, 19 nt, Artificial Sequence
  Description of Artificial Sequence: Synthetic oligonucleotide
uguguagucuuuugucaug

SEQ ID NO: 2476386 - RNA, 19 nt, Artificial Sequence
  Description of Artificial Sequence: Synthetic oligonucleotide
aacuugcacaggugcucgc

SEQ ID NO: 2476387 - RNA, 19 nt, Artificial Sequence
  Description of Artificial Sequence: Synthetic oligonucleotide
gaaaguccggaacaugaca

SEQ ID NO: 2476388 - RNA, 19 nt, Artificial Sequence
  Description of Artificial Sequence: Synthetic oligonucleotide
aaaguccggaacaugacau

SEQ ID NO: 2476389 - RNA, 19 nt, Artificial Sequence
  Description of Artificial Sequence: Synthetic oligonucleotide
ugaaaguccggaacaugac

SEQ ID NO: 2476390 - RNA, 19 nt, Artificial Sequence
  Description of Artificial Sequence: Synthetic oligonucleotide
acuggacugcuccccaggc

SEQ ID NO: 2476391 - RNA, 19 nt, Artificial Sequence
  Description of Artificial Sequence: Synthetic oligonucleotide
caaaugugaaaguccugag

SEQ ID NO: 2476392 - RNA, 19 nt, Artificial Sequence
  Description of Artificial Sequence: Synthetic oligonucleotide
gaguuauuuccagcaaggg

SEQ ID NO: 2476393 - RNA, 19 nt, Artificial Sequence
  Description of Artificial Sequence: Synthetic oligonucleotide
gaaagaugacuuccuggug

SEQ ID NO: 2476394 - RNA, 19 nt, Artificial Sequence
  Description of Artificial Sequence: Synthetic oligonucleotide
auuuaaacuccaacauggg

SEQ ID NO: 2476395 - RNA, 19 nt, Artificial Sequence
  Description of Artificial Sequence: Synthetic oligonucleotide
aacauaagcuguaacugaa

SEQ ID NO: 2476396 - RNA, 19 nt, Artificial Sequence
  Description of Artificial Sequence: Synthetic oligonucleotide
aguccugaguuauuuccag

SEQ ID NO: 2476397 - RNA, 19 nt, Artificial Sequence
  Description of Artificial Sequence: Synthetic oligonucleotide
gagaaacauaagcuguaac

SEQ ID NO: 2476398 - RNA, 19 nt, Artificial Sequence
  Description of Artificial Sequence: Synthetic oligonucleotide
gucaauggagcuuguauuc

SEQ ID NO: 2476399 - RNA, 19 nt, Artificial Sequence
  Description of Artificial Sequence: Synthetic oligonucleotide
agcaagggagccugaaaag

SEQ ID NO: 2476400 - RNA, 19 nt, Artificial Sequence
  Description of Artificial Sequence: Synthetic oligonucleotide
uuugagucuuuuacugggu

SEQ ID NO: 2476401 - RNA, 19 nt, Artificial Sequence
  Description of Artificial Sequence: Synthetic oligonucleotide
ucccgaagcuacuucacug

SEQ ID NO: 2476402 - RNA, 19 nt, Artificial Sequence
  Description of Artificial Sequence: Synthetic oligonucleotide
guuuuguagaguuucaaau

SEQ ID NO: 2476403 - RNA, 19 nt, Artificial Sequence
  Description of Artificial Sequence: Synthetic oligonucleotide
aaaugcuuuccuguucugu

SEQ ID NO: 2476404 - RNA, 19 nt, Artificial Sequence
  Description of Artificial Sequence: Synthetic oligonucleotide
uguagucuuuugucauggg

SEQ ID NO: 2476405 - RNA, 19 nt, Artificial Sequence
  Description of Artificial Sequence: Synthetic oligonucleotide
ucgauucagguacuguuuc

SEQ ID NO: 2476406 - RNA, 19 nt, Artificial Sequence
  Description of Artificial Sequence: Synthetic oligonucleotide
gagacaaaugcuuuccugu

SEQ ID NO: 2476407 - RNA, 19 nt, Artificial Sequence
  Description of Artificial Sequence: Synthetic oligonucleotide
ugaacuccuuggcugagaa

SEQ ID NO: 2476408 - RNA, 19 nt, Artificial Sequence
  Description of Artificial Sequence: Synthetic oligonucleotide
agcacaucuggacauaauu

SEQ ID NO: 2476409 - RNA, 19 nt, Artificial Sequence
  Description of Artificial Sequence: Synthetic oligonucleotide
gaagcuacuucacuggacu

SEQ ID NO: 2476410 - RNA, 19 nt, Artificial Sequence
  Description of Artificial Sequence: Synthetic oligonucleotide
uuugaaaguccggaacaug

SEQ ID NO: 2476411 - RNA, 19 nt, Artificial Sequence
  Description of Artificial Sequence: Synthetic oligonucleotide
guguagucuuuugucaugg

SEQ ID NO: 2476412 - RNA, 19 nt, Artificial Sequence
  Description of Artificial Sequence: Synthetic oligonucleotide
agcccgaucuguuuguuca

SEQ ID NO: 2476413 - RNA, 19 nt, Artificial Sequence
  Description of Artificial Sequence: Synthetic oligonucleotide
ucagucacaacaguaucaa

SEQ ID NO: 2476414 - RNA, 19 nt, Artificial Sequence
  Description of Artificial Sequence: Synthetic oligonucleotide
cuuccuggugguaaaagca

SEQ ID NO: 2476415 - RNA, 19 nt, Artificial Sequence
  Description of Artificial Sequence: Synthetic oligonucleotide
aagcuacuucacuggacug

SEQ ID NO: 2476416 - RNA, 19 nt, Artificial Sequence
  Description of Artificial Sequence: Synthetic oligonucleotide
uaauuccagcacucagagg

SEQ ID NO: 2476417 - RNA, 19 nt, Artificial Sequence
  Description of Artificial Sequence: Synthetic oligonucleotide
guaguuauuuccuuuaauu

SEQ ID NO: 2476418 - RNA, 19 nt, Artificial Sequence
  Description of Artificial Sequence: Synthetic oligonucleotide
gguaaaagcaaaaccacuc

SEQ ID NO: 2476419 - RNA, 19 nt, Artificial Sequence
  Description of Artificial Sequence: Synthetic oligonucleotide
caggccuuggaucaucccc

SEQ ID NO: 2476420 - RNA, 19 nt, Artificial Sequence
  Description of Artificial Sequence: Synthetic oligonucleotide
auuucagucacaacaguau

SEQ ID NO: 2476421 - RNA, 19 nt, Artificial Sequence
  Description of Artificial Sequence: Synthetic oligonucleotide
uauucuucaauagcacauc

SEQ ID NO: 2476422 - RNA, 19 nt, Artificial Sequence
  Description of Artificial Sequence: Synthetic oligonucleotide
uuccuggugguaaaagcaa

SEQ ID NO: 2476423 - RNA, 19 nt, Artificial Sequence
  Description of Artificial Sequence: Synthetic oligonucleotide
uggacugcuccccaggcuc

SEQ ID NO: 2476424 - RNA, 19 nt, Artificial Sequence
  Description of Artificial Sequence: Synthetic oligonucleotide
ucuaucccgaagcuacuuc

SEQ ID NO: 2476425 - RNA, 19 nt, Artificial Sequence
  Description of Artificial Sequence: Synthetic oligonucleotide
ugaaaguccugaguuauuu

SEQ ID NO: 2476426 - RNA, 19 nt, Artificial Sequence
  Description of Artificial Sequence: Synthetic oligonucleotide
ugcucgcuccuucucaggc

SEQ ID NO: 2476427 - RNA, 19 nt, Artificial Sequence
  Description of Artificial Sequence: Synthetic oligonucleotide
gugguaaaagcaaaaccac

SEQ ID NO: 2476428 - RNA, 19 nt, Artificial Sequence
  Description of Artificial Sequence: Synthetic oligonucleotide
cugugcauuugaaugcaac

SEQ ID NO: 2476429 - RNA, 19 nt, Artificial Sequence
  Description of Artificial Sequence: Synthetic oligonucleotide
uccaauuuggugagacaaa

SEQ ID NO: 2476430 - RNA, 19 nt, Artificial Sequence
  Description of Artificial Sequence: Synthetic oligonucleotide
auucgggcaucuuuguccu

SEQ ID NO: 2476431 - RNA, 19 nt, Artificial Sequence
  Description of Artificial Sequence: Synthetic oligonucleotide
acucgauucagguacuguu

SEQ ID NO: 2476432 - RNA, 19 nt, Artificial Sequence
  Description of Artificial Sequence: Synthetic oligonucleotide
gcaagagcuacagagaaac

SEQ ID NO: 2476433 - RNA, 19 nt, Artificial Sequence
  Description of Artificial Sequence: Synthetic oligonucleotide
cuuuacuaagcuucuugga

SEQ ID NO: 2476434 - RNA, 19 nt, Artificial Sequence
  Description of Artificial Sequence: Synthetic oligonucleotide
acuugauucgggcaucuuu

SEQ ID NO: 2476435 - RNA, 19 nt, Artificial Sequence
  Description of Artificial Sequence: Synthetic oligonucleotide
aggcaagagcuacagagaa

SEQ ID NO: 2476436 - RNA, 19 nt, Artificial Sequence
  Description of Artificial Sequence: Synthetic oligonucleotide
uacuggguuuuguagaguu

SEQ ID NO: 2476437 - RNA, 19 nt, Artificial Sequence
  Description of Artificial Sequence: Synthetic oligonucleotide
ucauccccuuugucaaugg

SEQ ID NO: 2476438 - RNA, 19 nt, Artificial Sequence
  Description of Artificial Sequence: Synthetic oligonucleotide
acauaagcuguaacugaac

SEQ ID NO: 2476439 - RNA, 19 nt, Artificial Sequence
  Description of Artificial Sequence: Synthetic oligonucleotide
gagcuuguauucuucaaua

SEQ ID NO: 2476440 - RNA, 19 nt, Artificial Sequence
  Description of Artificial Sequence: Synthetic oligonucleotide
uuggugagacaaaugcuuu

SEQ ID NO: 2476441 - RNA, 19 nt, Artificial Sequence
  Description of Artificial Sequence: Synthetic oligonucleotide
agucagcccgaucuguuug

SEQ ID NO: 2476442 - RNA, 19 nt, Artificial Sequence
  Description of Artificial Sequence: Synthetic oligonucleotide
gaaacuugcacaggugcuc

SEQ ID NO: 2476443 - RNA, 19 nt, Artificial Sequence
  Description of Artificial Sequence: Synthetic oligonucleotide
gcaaaaccacucuaucccg

SEQ ID NO: 2476444 - RNA, 19 nt, Artificial Sequence
  Description of Artificial Sequence: Synthetic oligonucleotide
ugcacugaagcuucucuua

SEQ ID NO: 2476445 - RNA, 19 nt, Artificial Sequence
  Description of Artificial Sequence: Synthetic oligonucleotide
acaguaucaaugagaaaca

SEQ ID NO: 2476446 - RNA, 19 nt, Artificial Sequence
  Description of Artificial Sequence: Synthetic oligonucleotide
ucaauggagcuuguauucu

SEQ ID NO: 2476447 - RNA, 19 nt, Artificial Sequence
  Description of Artificial Sequence: Synthetic oligonucleotide
ucuuuugucaugggugcac

SEQ ID NO: 2476448 - RNA, 19 nt, Artificial Sequence
  Description of Artificial Sequence: Synthetic oligonucleotide
aaggcaagagcuacagaga

SEQ ID NO: 2476449 - RNA, 19 nt, Artificial Sequence
  Description of Artificial Sequence: Synthetic oligonucleotide
uucugugcauuugaaugca

SEQ ID NO: 2476450 - RNA, 19 nt, Artificial Sequence
  Description of Artificial Sequence: Synthetic oligonucleotide
ugagaaacauaagcuguaa

SEQ ID NO: 2476451 - RNA, 19 nt, Artificial Sequence
  Description of Artificial Sequence: Synthetic oligonucleotide
cuggguuuuguagaguuuc

SEQ ID NO: 2476452 - RNA, 19 nt, Artificial Sequence
  Description of Artificial Sequence: Synthetic oligonucleotide
uaucccgaagcuacuucac

SEQ ID NO: 2476453 - RNA, 19 nt, Artificial Sequence
  Description of Artificial Sequence: Synthetic oligonucleotide
auuuggugagacaaaugcu

SEQ ID NO: 2476454 - RNA, 19 nt, Artificial Sequence
  Description of Artificial Sequence: Synthetic oligonucleotide
ugaaugcaacucgauucag

SEQ ID NO: 2476455 - RNA, 19 nt, Artificial Sequence
  Description of Artificial Sequence: Synthetic oligonucleotide
aaguccugaguuauuucca

SEQ ID NO: 2476456 - RNA, 19 nt, Artificial Sequence
  Description of Artificial Sequence: Synthetic oligonucleotide
ugagucuuuuacuggguuu

SEQ ID NO: 2476457 - RNA, 19 nt, Artificial Sequence
  Description of Artificial Sequence: Synthetic oligonucleotide
cacuguccaauuuggugag

SEQ ID NO: 2476458 - RNA, 19 nt, Artificial Sequence
  Description of Artificial Sequence: Synthetic oligonucleotide
uguccaauuuggugagaca

SEQ ID NO: 2476459 - RNA, 19 nt, Artificial Sequence
  Description of Artificial Sequence: Synthetic oligonucleotide
uugagucuuuuacuggguu

SEQ ID NO: 2476460 - RNA, 19 nt, Artificial Sequence
  Description of Artificial Sequence: Synthetic oligonucleotide
ggaugcacuguccaauuug

SEQ ID NO: 2476461 - RNA, 19 nt, Artificial Sequence
  Description of Artificial Sequence: Synthetic oligonucleotide
uagagagucuugagucagc

SEQ ID NO: 2476462 - RNA, 19 nt, Artificial Sequence
  Description of Artificial Sequence: Synthetic oligonucleotide
cacaucuggacauaauuua

SEQ ID NO: 2476463 - RNA, 19 nt, Artificial Sequence
  Description of Artificial Sequence: Synthetic oligonucleotide
cuucaauagcacaucugga

SEQ ID NO: 2476464 - RNA, 19 nt, Artificial Sequence
  Description of Artificial Sequence: Synthetic oligonucleotide
cucgcuccuucucaggccc

SEQ ID NO: 2476465 - RNA, 19 nt, Artificial Sequence
  Description of Artificial Sequence: Synthetic oligonucleotide
uccuggugguaaaagcaaa

SEQ ID NO: 2476466 - RNA, 19 nt, Artificial Sequence
  Description of Artificial Sequence: Synthetic oligonucleotide
uuguaguuuuauuccugaa

SEQ ID NO: 2476467 - RNA, 19 nt, Artificial Sequence
  Description of Artificial Sequence: Synthetic oligonucleotide
gucaugggugcacaugcug

SEQ ID NO: 2476468 - RNA, 19 nt, Artificial Sequence
  Description of Artificial Sequence: Synthetic oligonucleotide
caagagcuacagagaaacc

SEQ ID NO: 2476469 - RNA, 19 nt, Artificial Sequence
  Description of Artificial Sequence: Synthetic oligonucleotide
auggagcuuguauucuuca

SEQ ID NO: 2476470 - RNA, 19 nt, Artificial Sequence
  Description of Artificial Sequence: Synthetic oligonucleotide
ucaaggcaagagcuacaga

SEQ ID NO: 2476471 - RNA, 19 nt, Artificial Sequence
  Description of Artificial Sequence: Synthetic oligonucleotide
gaugacuuccuggugguaa

SEQ ID NO: 2476472 - RNA, 19 nt, Artificial Sequence
  Description of Artificial Sequence: Synthetic oligonucleotide
cuggugguaaaagcaaaac

SEQ ID NO: 2476473 - RNA, 19 nt, Artificial Sequence
  Description of Artificial Sequence: Synthetic oligonucleotide
gugcauuugaaugcaacuc

SEQ ID NO: 2476474 - RNA, 19 nt, Artificial Sequence
  Description of Artificial Sequence: Synthetic oligonucleotide
agacaaaugcuuuccuguu

SEQ ID NO: 2476475 - RNA, 19 nt, Artificial Sequence
  Description of Artificial Sequence: Synthetic oligonucleotide
ugauucgggcaucuuuguc

SEQ ID NO: 2476476 - RNA, 19 nt, Artificial Sequence
  Description of Artificial Sequence: Synthetic oligonucleotide
uggugagacaaaugcuuuc

SEQ ID NO: 2476477 - RNA, 19 nt, Artificial Sequence
  Description of Artificial Sequence: Synthetic oligonucleotide
gagagucuugagucagccc

SEQ ID NO: 2476478 - RNA, 19 nt, Artificial Sequence
  Description of Artificial Sequence: Synthetic oligonucleotide
aacucgauucagguacugu

SEQ ID NO: 2476479 - RNA, 19 nt, Artificial Sequence
  Description of Artificial Sequence: Synthetic oligonucleotide
uugauucgggcaucuuugu

SEQ ID NO: 2476480 - RNA, 19 nt, Artificial Sequence
  Description of Artificial Sequence: Synthetic oligonucleotide
cuucucuuagagagucuug

SEQ ID NO: 2476481 - RNA, 19 nt, Artificial Sequence
  Description of Artificial Sequence: Synthetic oligonucleotide
cuaucccgaagcuacuuca

SEQ ID NO: 2476482 - RNA, 19 nt, Artificial Sequence
  Description of Artificial Sequence: Synthetic oligonucleotide
accacucuaucccgaagcu

SEQ ID NO: 2476483 - RNA, 19 nt, Artificial Sequence
  Description of Artificial Sequence: Synthetic oligonucleotide
ucuuggaugcacuguccaa

SEQ ID NO: 2476484 - RNA, 19 nt, Artificial Sequence
  Description of Artificial Sequence: Synthetic oligonucleotide
guccaauuuggugagacaa

SEQ ID NO: 2476485 - RNA, 19 nt, Artificial Sequence
  Description of Artificial Sequence: Synthetic oligonucleotide
cagcuaauccaacauuuca

SEQ ID NO: 2476486 - RNA, 19 nt, Artificial Sequence
  Description of Artificial Sequence: Synthetic oligonucleotide
aacuccaacaugggcuugu

SEQ ID NO: 2476487 - RNA, 19 nt, Artificial Sequence
  Description of Artificial Sequence: Synthetic oligonucleotide
ugggugcacaugcuguacu

SEQ ID NO: 2476488 - RNA, 19 nt, Artificial Sequence
  Description of Artificial Sequence: Synthetic oligonucleotide
cauaagcuguaacugaacu

SEQ ID NO: 2476489 - RNA, 19 nt, Artificial Sequence
  Description of Artificial Sequence: Synthetic oligonucleotide
agugccugcucaccagcag

SEQ ID NO: 2476490 - RNA, 19 nt, Artificial Sequence
  Description of Artificial Sequence: Synthetic oligonucleotide
cuguccaauuuggugagac

SEQ ID NO: 2476491 - RNA, 19 nt, Artificial Sequence
  Description of Artificial Sequence: Synthetic oligonucleotide
cuugagucagcccgaucug

SEQ ID NO: 2476492 - RNA, 19 nt, Artificial Sequence
  Description of Artificial Sequence: Synthetic oligonucleotide
agcagcuaauccaacauuu

SEQ ID NO: 2476493 - RNA, 19 nt, Artificial Sequence
  Description of Artificial Sequence: Synthetic oligonucleotide
aguaucaaugagaaacaua

SEQ ID NO: 2476494 - RNA, 19 nt, Artificial Sequence
  Description of Artificial Sequence: Synthetic oligonucleotide
ugucaugggugcacaugcu

SEQ ID NO: 2476495 - RNA, 19 nt, Artificial Sequence
  Description of Artificial Sequence: Synthetic oligonucleotide
uggagcuuguauucuucaa

SEQ ID NO: 2476496 - RNA, 19 nt, Artificial Sequence
  Description of Artificial Sequence: Synthetic oligonucleotide
aauagcacaucuggacaua

SEQ ID NO: 2476497 - RNA, 19 nt, Artificial Sequence
  Description of Artificial Sequence: Synthetic oligonucleotide
caucuggacauaauuuaaa

SEQ ID NO: 2476498 - RNA, 19 nt, Artificial Sequence
  Description of Artificial Sequence: Synthetic oligonucleotide
aaguccggaacaugacauu

SEQ ID NO: 2476499 - RNA, 19 nt, Artificial Sequence
  Description of Artificial Sequence: Synthetic oligonucleotide
augugaaaguccugaguua

SEQ ID NO: 2476500 - RNA, 19 nt, Artificial Sequence
  Description of Artificial Sequence: Synthetic oligonucleotide
guccugaguuauuuccagc

SEQ ID NO: 2476501 - RNA, 19 nt, Artificial Sequence
  Description of Artificial Sequence: Synthetic oligonucleotide
gguuuuguagaguuucaaa

SEQ ID NO: 2476502 - RNA, 19 nt, Artificial Sequence
  Description of Artificial Sequence: Synthetic oligonucleotide
caagggagccugaaaagaa

SEQ ID NO: 2476503 - RNA, 19 nt, Artificial Sequence
  Description of Artificial Sequence: Synthetic oligonucleotide
guagaguuucaaauucauc

SEQ ID NO: 2476504 - RNA, 19 nt, Artificial Sequence
  Description of Artificial Sequence: Synthetic oligonucleotide
ucugugcauuugaaugcaa

SEQ ID NO: 2476505 - RNA, 19 nt, Artificial Sequence
  Description of Artificial Sequence: Synthetic oligonucleotide
guagucuuuugucaugggu

SEQ ID NO: 2476506 - RNA, 19 nt, Artificial Sequence
  Description of Artificial Sequence: Synthetic oligonucleotide
acaucuggacauaauuuaa

SEQ ID NO: 2476507 - RNA, 19 nt, Artificial Sequence
  Description of Artificial Sequence: Synthetic oligonucleotide
augggugcacaugcuguac

SEQ ID NO: 2476508 - RNA, 19 nt, Artificial Sequence
  Description of Artificial Sequence: Synthetic oligonucleotide
cuucacuggacugcucccc

SEQ ID NO: 2476509 - RNA, 19 nt, Artificial Sequence
  Description of Artificial Sequence: Synthetic oligonucleotide
aagggagccugaaaagaaa

SEQ ID NO: 2476510 - RNA, 19 nt, Artificial Sequence
  Description of Artificial Sequence: Synthetic oligonucleotide
ugagucagcccgaucuguu

SEQ ID NO: 2476511 - RNA, 19 nt, Artificial Sequence
  Description of Artificial Sequence: Synthetic oligonucleotide
uuuugucaugggugcacau

SEQ ID NO: 2476512 - RNA, 19 nt, Artificial Sequence
  Description of Artificial Sequence: Synthetic oligonucleotide
aucccgaagcuacuucacu

SEQ ID NO: 2476513 - RNA, 19 nt, Artificial Sequence
  Description of Artificial Sequence: Synthetic oligonucleotide
uuggaugcacuguccaauu

SEQ ID NO: 2476514 - RNA, 19 nt, Artificial Sequence
  Description of Artificial Sequence: Synthetic oligonucleotide
ggaucauccccuuugucaa

SEQ ID NO: 2476515 - RNA, 19 nt, Artificial Sequence
  Description of Artificial Sequence: Synthetic oligonucleotide
cacuggacugcuccccagg

SEQ ID NO: 2476516 - RNA, 19 nt, Artificial Sequence
  Description of Artificial Sequence: Synthetic oligonucleotide
gugccugcucaccagcagc

SEQ ID NO: 2476517 - RNA, 19 nt, Artificial Sequence
  Description of Artificial Sequence: Synthetic oligonucleotide
uugagucagcccgaucugu

SEQ ID NO: 2476518 - RNA, 19 nt, Artificial Sequence
  Description of Artificial Sequence: Synthetic oligonucleotide
gcugagaauuccaaaugug

SEQ ID NO: 2476519 - RNA, 19 nt, Artificial Sequence
  Description of Artificial Sequence: Synthetic oligonucleotide
augacuuccuggugguaaa

SEQ ID NO: 2476520 - RNA, 19 nt, Artificial Sequence
  Description of Artificial Sequence: Synthetic oligonucleotide
gcacugaagcuucucuuag

SEQ ID NO: 2476521 - RNA, 19 nt, Artificial Sequence
  Description of Artificial Sequence: Synthetic oligonucleotide
ugggcuuguguguguaguc

SEQ ID NO: 2476522 - RNA, 19 nt, Artificial Sequence
  Description of Artificial Sequence: Synthetic oligonucleotide
auucagguacuguuuccuu

SEQ ID NO: 2476523 - RNA, 19 nt, Artificial Sequence
  Description of Artificial Sequence: Synthetic oligonucleotide
acuccuuggcugagaauuc

SEQ ID NO: 2476524 - RNA, 19 nt, Artificial Sequence
  Description of Artificial Sequence: Synthetic oligonucleotide
cccgaagcuacuucacugg

SEQ ID NO: 2476525 - RNA, 19 nt, Artificial Sequence
  Description of Artificial Sequence: Synthetic oligonucleotide
ccuuggaucauccccuuug

SEQ ID NO: 2476526 - RNA, 19 nt, Artificial Sequence
  Description of Artificial Sequence: Synthetic oligonucleotide
cuuggcugagaauuccaaa

SEQ ID NO: 2476527 - RNA, 19 nt, Artificial Sequence
  Description of Artificial Sequence: Synthetic oligonucleotide
aagcuguaacugaacuccu

SEQ ID NO: 2476528 - RNA, 19 nt, Artificial Sequence
  Description of Artificial Sequence: Synthetic oligonucleotide
augagaaacauaagcugua

SEQ ID NO: 2476529 - RNA, 19 nt, Artificial Sequence
  Description of Artificial Sequence: Synthetic oligonucleotide
gaauucaaggcaagagcua

SEQ ID NO: 2476530 - RNA, 19 nt, Artificial Sequence
  Description of Artificial Sequence: Synthetic oligonucleotide
uuugucaauggagcuugua

SEQ ID NO: 2476531 - RNA, 19 nt, Artificial Sequence
  Description of Artificial Sequence: Synthetic oligonucleotide
aggugcucgcuccuucuca

SEQ ID NO: 2476532 - RNA, 19 nt, Artificial Sequence
  Description of Artificial Sequence: Synthetic oligonucleotide
uucacuugauucgggcauc

SEQ ID NO: 2476533 - RNA, 19 nt, Artificial Sequence
  Description of Artificial Sequence: Synthetic oligonucleotide
ggacauaauuuaaacucca

SEQ ID NO: 2476534 - RNA, 19 nt, Artificial Sequence
  Description of Artificial Sequence: Synthetic oligonucleotide
aguccggaacaugacauuu

SEQ ID NO: 2476535 - RNA, 19 nt, Artificial Sequence
  Description of Artificial Sequence: Synthetic oligonucleotide
ccuuugucaauggagcuug

SEQ ID NO: 2476536 - RNA, 19 nt, Artificial Sequence
  Description of Artificial Sequence: Synthetic oligonucleotide
guucacuugauucgggcau

SEQ ID NO: 2476537 - RNA, 19 nt, Artificial Sequence
  Description of Artificial Sequence: Synthetic oligonucleotide
cuugcacaggugcucgcuc

SEQ ID NO: 2476538 - RNA, 19 nt, Artificial Sequence
  Description of Artificial Sequence: Synthetic oligonucleotide
caugggcuuguguguguag

SEQ ID NO: 2476539 - RNA, 19 nt, Artificial Sequence
  Description of Artificial Sequence: Synthetic oligonucleotide
uggaugcacuguccaauuu

SEQ ID NO: 2476540 - RNA, 19 nt, Artificial Sequence
  Description of Artificial Sequence: Synthetic oligonucleotide
gcuaauccaacauuucagu

SEQ ID NO: 2476541 - RNA, 19 nt, Artificial Sequence
  Description of Artificial Sequence: Synthetic oligonucleotide
ucacuugauucgggcaucu

SEQ ID NO: 2476542 - RNA, 19 nt, Artificial Sequence
  Description of Artificial Sequence: Synthetic oligonucleotide
auagcacaucuggacauaa

SEQ ID NO: 2476543 - RNA, 19 nt, Artificial Sequence
  Description of Artificial Sequence: Synthetic oligonucleotide
agucuuuuacuggguuuug

SEQ ID NO: 2476544 - RNA, 19 nt, Artificial Sequence
  Description of Artificial Sequence: Synthetic oligonucleotide
uuacuggguuuuguagagu

SEQ ID NO: 2476545 - RNA, 19 nt, Artificial Sequence
  Description of Artificial Sequence: Synthetic oligonucleotide
uagcacaucuggacauaau

SEQ ID NO: 2476546 - RNA, 19 nt, Artificial Sequence
  Description of Artificial Sequence: Synthetic oligonucleotide
guccuuguucuuuuguagu

SEQ ID NO: 2476547 - RNA, 19 nt, Artificial Sequence
  Description of Artificial Sequence: Synthetic oligonucleotide
agcuucuuggaugcacugu

SEQ ID NO: 2476548 - RNA, 19 nt, Artificial Sequence
  Description of Artificial Sequence: Synthetic oligonucleotide
aggccuuggaucauccccu

SEQ ID NO: 2476549 - RNA, 19 nt, Artificial Sequence
  Description of Artificial Sequence: Synthetic oligonucleotide
aagugccugcucaccagca

SEQ ID NO: 2476550 - RNA, 19 nt, Artificial Sequence
  Description of Artificial Sequence: Synthetic oligonucleotide
acuugcacaggugcucgcu

SEQ ID NO: 2476551 - RNA, 19 nt, Artificial Sequence
  Description of Artificial Sequence: Synthetic oligonucleotide
auucaaggcaagagcuaca

SEQ ID NO: 2476552 - RNA, 19 nt, Artificial Sequence
  Description of Artificial Sequence: Synthetic oligonucleotide
augcaacucgauucaggua

SEQ ID NO: 2476553 - RNA, 19 nt, Artificial Sequence
  Description of Artificial Sequence: Synthetic oligonucleotide
acugaacuccuuggcugag

SEQ ID NO: 2476554 - RNA, 19 nt, Artificial Sequence
  Description of Artificial Sequence: Synthetic oligonucleotide
ccugaaacuugcacaggug

SEQ ID NO: 2476555 - RNA, 19 nt, Artificial Sequence
  Description of Artificial Sequence: Synthetic oligonucleotide
guccggaacaugacauuug

SEQ ID NO: 2476556 - RNA, 19 nt, Artificial Sequence
  Description of Artificial Sequence: Synthetic oligonucleotide
ggcugagaauuccaaaugu

SEQ ID NO: 2476557 - RNA, 19 nt, Artificial Sequence
  Description of Artificial Sequence: Synthetic oligonucleotide
cacugaagcuucucuuaga

SEQ ID NO: 2476558 - RNA, 19 nt, Artificial Sequence
  Description of Artificial Sequence: Synthetic oligonucleotide
gugcucgcuccuucucagg

SEQ ID NO: 2476559 - RNA, 19 nt, Artificial Sequence
  Description of Artificial Sequence: Synthetic oligonucleotide
gagucuuuuacuggguuuu

SEQ ID NO: 2476560 - RNA, 19 nt, Artificial Sequence
  Description of Artificial Sequence: Synthetic oligonucleotide
caugcuguacucuuuucuu

SEQ ID NO: 2476561 - RNA, 19 nt, Artificial Sequence
  Description of Artificial Sequence: Synthetic oligonucleotide
ccaacauuucagucacaac

SEQ ID NO: 2476562 - RNA, 19 nt, Artificial Sequence
  Description of Artificial Sequence: Synthetic oligonucleotide
ugcucaccagcagcuaauc

SEQ ID NO: 2476563 - RNA, 19 nt, Artificial Sequence
  Description of Artificial Sequence: Synthetic oligonucleotide
ucucuuuacuaagcuucuu

SEQ ID NO: 2476564 - RNA, 19 nt, Artificial Sequence
  Description of Artificial Sequence: Synthetic oligonucleotide
cacaggugcucgcuccuuc

SEQ ID NO: 2476565 - RNA, 19 nt, Artificial Sequence
  Description of Artificial Sequence: Synthetic oligonucleotide
gcauuugaaugcaacucga

SEQ ID NO: 2476566 - RNA, 19 nt, Artificial Sequence
  Description of Artificial Sequence: Synthetic oligonucleotide
uccagcaagggagccugaa

SEQ ID NO: 2476567 - RNA, 19 nt, Artificial Sequence
  Description of Artificial Sequence: Synthetic oligonucleotide
gaagcuucucuuagagagu

SEQ ID NO: 2476568 - RNA, 19 nt, Artificial Sequence
  Description of Artificial Sequence: Synthetic oligonucleotide
ggagcuuguauucuucaau

SEQ ID NO: 2476569 - RNA, 19 nt, Artificial Sequence
  Description of Artificial Sequence: Synthetic oligonucleotide
uccccaggcuccugcuucu

SEQ ID NO: 2476570 - RNA, 19 nt, Artificial Sequence
  Description of Artificial Sequence: Synthetic oligonucleotide
cauuugaaugcaacucgau

SEQ ID NO: 2476571 - RNA, 19 nt, Artificial Sequence
  Description of Artificial Sequence: Synthetic oligonucleotide
gugagacaaaugcuuuccu

SEQ ID NO: 2476572 - RNA, 19 nt, Artificial Sequence
  Description of Artificial Sequence: Synthetic oligonucleotide
uucucaggcccaggccuug

SEQ ID NO: 2476573 - RNA, 19 nt, Artificial Sequence
  Description of Artificial Sequence: Synthetic oligonucleotide
caugggugcacaugcugua

SEQ ID NO: 2476574 - RNA, 19 nt, Artificial Sequence
  Description of Artificial Sequence: Synthetic oligonucleotide
cuacuucacuggacugcuc

SEQ ID NO: 2476575 - RNA, 19 nt, Artificial Sequence
  Description of Artificial Sequence: Synthetic oligonucleotide
caacucgauucagguacug

SEQ ID NO: 2476576 - RNA, 19 nt, Artificial Sequence
  Description of Artificial Sequence: Synthetic oligonucleotide
cuuggaucauccccuuugu

SEQ ID NO: 2476577 - RNA, 19 nt, Artificial Sequence
  Description of Artificial Sequence: Synthetic oligonucleotide
acuaagcuucuuggaugca

SEQ ID NO: 2476578 - RNA, 19 nt, Artificial Sequence
  Description of Artificial Sequence: Synthetic oligonucleotide
cgauucagguacuguuucc

SEQ ID NO: 2476579 - RNA, 19 nt, Artificial Sequence
  Description of Artificial Sequence: Synthetic oligonucleotide
cucgauucagguacuguuu

SEQ ID NO: 2476580 - RNA, 19 nt, Artificial Sequence
  Description of Artificial Sequence: Synthetic oligonucleotide
cuuggaugcacuguccaau

SEQ ID NO: 2476581 - RNA, 19 nt, Artificial Sequence
  Description of Artificial Sequence: Synthetic oligonucleotide
cagcccgaucuguuuguuc

SEQ ID NO: 2476582 - RNA, 19 nt, Artificial Sequence
  Description of Artificial Sequence: Synthetic oligonucleotide
cggaacaugacauuugagu

SEQ ID NO: 2476583 - RNA, 19 nt, Artificial Sequence
  Description of Artificial Sequence: Synthetic oligonucleotide
cauccccuuugucaaugga

SEQ ID NO: 2476584 - RNA, 19 nt, Artificial Sequence
  Description of Artificial Sequence: Synthetic oligonucleotide
ccggaacaugacauuugag

SEQ ID NO: 2476585 - RNA, 19 nt, Artificial Sequence
  Description of Artificial Sequence: Synthetic oligonucleotide
caacaguaucaaugagaaa

SEQ ID NO: 2476586 - RNA, 19 nt, Artificial Sequence
  Description of Artificial Sequence: Synthetic oligonucleotide
gggugcacaugcuguacuc

SEQ ID NO: 2476587 - RNA, 19 nt, Artificial Sequence
  Description of Artificial Sequence: Synthetic oligonucleotide
gcagcuaauccaacauuuc

SEQ ID NO: 2476588 - RNA, 19 nt, Artificial Sequence
  Description of Artificial Sequence: Synthetic oligonucleotide
gcucgcuccuucucaggcc

SEQ ID NO: 2476589 - RNA, 19 nt, Artificial Sequence
  Description of Artificial Sequence: Synthetic oligonucleotide
gucuuuugucaugggugca

SEQ ID NO: 2476590 - RNA, 19 nt, Artificial Sequence
  Description of Artificial Sequence: Synthetic oligonucleotide
acucuaucccgaagcuacu

SEQ ID NO: 2476591 - RNA, 19 nt, Artificial Sequence
  Description of Artificial Sequence: Synthetic oligonucleotide
augcacuguccaauuuggu

SEQ ID NO: 2476592 - RNA, 19 nt, Artificial Sequence
  Description of Artificial Sequence: Synthetic oligonucleotide
acuggguuuuguagaguuu

SEQ ID NO: 2476593 - RNA, 19 nt, Artificial Sequence
  Description of Artificial Sequence: Synthetic oligonucleotide
caggugcucgcuccuucuc

SEQ ID NO: 2476594 - RNA, 19 nt, Artificial Sequence
  Description of Artificial Sequence: Synthetic oligonucleotide
cgaagcuacuucacuggac

SEQ ID NO: 2476595 - RNA, 19 nt, Artificial Sequence
  Description of Artificial Sequence: Synthetic oligonucleotide
agucuugagucagcccgau

SEQ ID NO: 2476596 - RNA, 19 nt, Artificial Sequence
  Description of Artificial Sequence: Synthetic oligonucleotide
acaugggcuugugugugua

SEQ ID NO: 2476597 - RNA, 19 nt, Artificial Sequence
  Description of Artificial Sequence: Synthetic oligonucleotide
ccuggugguaaaagcaaaa

SEQ ID NO: 2476598 - RNA, 19 nt, Artificial Sequence
  Description of Artificial Sequence: Synthetic oligonucleotide
gucuuuuacuggguuuugu

SEQ ID NO: 2476599 - RNA, 19 nt, Artificial Sequence
  Description of Artificial Sequence: Synthetic oligonucleotide
gccugaaaagaaagaugac

SEQ ID NO: 2476600 - RNA, 19 nt, Artificial Sequence
  Description of Artificial Sequence: Synthetic oligonucleotide
agcuguaacugaacuccuu

SEQ ID NO: 2476601 - RNA, 19 nt, Artificial Sequence
  Description of Artificial Sequence: Synthetic oligonucleotide
gucuugagucagcccgauc

SEQ ID NO: 2476602 - RNA, 19 nt, Artificial Sequence
  Description of Artificial Sequence: Synthetic oligonucleotide
acuguccaauuuggugaga

SEQ ID NO: 2476603 - RNA, 19 nt, Artificial Sequence
  Description of Artificial Sequence: Synthetic oligonucleotide
caauggagcuuguauucuu

SEQ ID NO: 2476604 - RNA, 19 nt, Artificial Sequence
  Description of Artificial Sequence: Synthetic oligonucleotide
agcuucucuuagagagucu

SEQ ID NO: 2476605 - RNA, 19 nt, Artificial Sequence
  Description of Artificial Sequence: Synthetic oligonucleotide
cugcuucucuucuccaggu

SEQ ID NO: 2476606 - RNA, 19 nt, Artificial Sequence
  Description of Artificial Sequence: Synthetic oligonucleotide
ucagcccgaucuguuuguu

SEQ ID NO: 2476607 - RNA, 19 nt, Artificial Sequence
  Description of Artificial Sequence: Synthetic oligonucleotide
gagucagcccgaucuguuu

SEQ ID NO: 2476608 - RNA, 19 nt, Artificial Sequence
  Description of Artificial Sequence: Synthetic oligonucleotide
gugcacaugcuguacucuu

SEQ ID NO: 2476609 - RNA, 19 nt, Artificial Sequence
  Description of Artificial Sequence: Synthetic oligonucleotide
cugcacugaagcuucucuu

SEQ ID NO: 2476610 - RNA, 19 nt, Artificial Sequence
  Description of Artificial Sequence: Synthetic oligonucleotide
gaacuccuuggcugagaau

SEQ ID NO: 2476611 - RNA, 19 nt, Artificial Sequence
  Description of Artificial Sequence: Synthetic oligonucleotide
gcuacuucacuggacugcu

SEQ ID NO: 2476612 - RNA, 19 nt, Artificial Sequence
  Description of Artificial Sequence: Synthetic oligonucleotide
ccaggccuuggaucauccc

SEQ ID NO: 2476613 - RNA, 19 nt, Artificial Sequence
  Description of Artificial Sequence: Synthetic oligonucleotide
ccuuggcugagaauuccaa

SEQ ID NO: 2476614 - RNA, 19 nt, Artificial Sequence
  Description of Artificial Sequence: Synthetic oligonucleotide
agaugacuuccugguggua

SEQ ID NO: 2476615 - RNA, 19 nt, Artificial Sequence
  Description of Artificial Sequence: Synthetic oligonucleotide
ggcaagagcuacagagaaa

SEQ ID NO: 2476616 - RNA, 19 nt, Artificial Sequence
  Description of Artificial Sequence: Synthetic oligonucleotide
cuuugucaauggagcuugu

SEQ ID NO: 2476617 - RNA, 19 nt, Artificial Sequence
  Description of Artificial Sequence: Synthetic oligonucleotide
cugcucaccagcagcuaau

SEQ ID NO: 2476618 - RNA, 19 nt, Artificial Sequence
  Description of Artificial Sequence: Synthetic oligonucleotide
gcccgaucuguuuguucac

SEQ ID NO: 2476619 - RNA, 19 nt, Artificial Sequence
  Description of Artificial Sequence: Synthetic oligonucleotide
cucaggcccaggccuugga

SEQ ID NO: 2476620 - RNA, 19 nt, Artificial Sequence
  Description of Artificial Sequence: Synthetic oligonucleotide
ccgaagcuacuucacugga

SEQ ID NO: 2476621 - RNA, 19 nt, Artificial Sequence
  Description of Artificial Sequence: Synthetic oligonucleotide
uucgggcaucuuuguccuu

SEQ ID NO: 2476622 - RNA, 19 nt, Artificial Sequence
  Description of Artificial Sequence: Synthetic oligonucleotide
gcuucucuuagagagucuu

SEQ ID NO: 2476623 - RNA, 19 nt, Artificial Sequence
  Description of Artificial Sequence: Synthetic oligonucleotide
ggugcacaugcuguacucu

SEQ ID NO: 2476624 - RNA, 19 nt, Artificial Sequence
  Description of Artificial Sequence: Synthetic oligonucleotide
ccugcucaccagcagcuaa

SEQ ID NO: 2476625 - RNA, 19 nt, Artificial Sequence
  Description of Artificial Sequence: Synthetic oligonucleotide
cagucacaacaguaucaau

SEQ ID NO: 2476626 - RNA, 19 nt, Artificial Sequence
  Description of Artificial Sequence: Synthetic oligonucleotide
cuccaacaugggcuugugu

SEQ ID NO: 2476627 - RNA, 19 nt, Artificial Sequence
  Description of Artificial Sequence: Synthetic oligonucleotide
gugaaaguccugaguuauu

SEQ ID NO: 2476628 - RNA, 19 nt, Artificial Sequence
  Description of Artificial Sequence: Synthetic oligonucleotide
cucuaucccgaagcuacuu

SEQ ID NO: 2476629 - RNA, 19 nt, Artificial Sequence
  Description of Artificial Sequence: Synthetic oligonucleotide
ccccuuugucaauggagcu

SEQ ID NO: 2476630 - RNA, 19 nt, Artificial Sequence
  Description of Artificial Sequence: Synthetic oligonucleotide
gcaacucgauucagguacu

SEQ ID NO: 2476631 - RNA, 19 nt, Artificial Sequence
  Description of Artificial Sequence: Synthetic oligonucleotide
ccgaucuguuuguucacuu

SEQ ID NO: 2476632 - RNA, 19 nt, Artificial Sequence
  Description of Artificial Sequence: Synthetic oligonucleotide
ccacucuaucccgaagcua

SEQ ID NO: 2476633 - RNA, 19 nt, Artificial Sequence
  Description of Artificial Sequence: Synthetic oligonucleotide
gcccaggccuuggaucauc

SEQ ID NO: 2476634 - RNA, 19 nt, Artificial Sequence
  Description of Artificial Sequence: Synthetic oligonucleotide
cccuuugucaauggagcuu

SEQ ID NO: 2476635 - RNA, 19 nt, Artificial Sequence
  Description of Artificial Sequence: Synthetic oligonucleotide
cccgaucuguuuguucacu

SEQ ID NO: 2476636 - RNA, 19 nt, Artificial Sequence
  Description of Artificial Sequence: Synthetic oligonucleotide
ggccuuggaucauccccuu

SEQ ID NO: 2476637 - RNA, 19 nt, Artificial Sequence
  Description of Artificial Sequence: Synthetic oligonucleotide
cacuugauucgggcaucuu

SEQ ID NO: 2476638 - RNA, 19 nt, Artificial Sequence
  Description of Artificial Sequence: Synthetic oligonucleotide
gccuuggaucauccccuuu

SEQ ID NO: 2476639 - RNA, 19 nt, Artificial Sequence
  Description of Artificial Sequence: Synthetic oligonucleotide
gggcaucuuuguccuuguu

SEQ ID NO: 2476640 - RNA, 19 nt, Artificial Sequence
  Description of Artificial Sequence: Synthetic oligonucleotide
aaagaaacccucuuucucc

SEQ ID NO: 2476641 - RNA, 19 nt, Artificial Sequence
  Description of Artificial Sequence: Synthetic oligonucleotide
ugugacaaaaugcugauag

SEQ ID NO: 2476642 - RNA, 19 nt, Artificial Sequence
  Description of Artificial Sequence: Synthetic oligonucleotide
aauuuguacaccuuuacca

SEQ ID NO: 2476643 - RNA, 19 nt, Artificial Sequence
  Description of Artificial Sequence: Synthetic oligonucleotide
aaauuuguacaccuuuacc

SEQ ID NO: 2476644 - RNA, 19 nt, Artificial Sequence
  Description of Artificial Sequence: Synthetic oligonucleotide
aaaauuuguacaccuuuac

SEQ ID NO: 2476645 - RNA, 19 nt, Artificial Sequence
  Description of Artificial Sequence: Synthetic oligonucleotide
uuauucuagacacaaaugu

SEQ ID NO: 2476646 - RNA, 19 nt, Artificial Sequence
  Description of Artificial Sequence: Synthetic oligonucleotide
aaaagaaacccucuuucuc

SEQ ID NO: 2476647 - RNA, 19 nt, Artificial Sequence
  Description of Artificial Sequence: Synthetic oligonucleotide
uuuaccauauacauaauaa

SEQ ID NO: 2476648 - RNA, 19 nt, Artificial Sequence
  Description of Artificial Sequence: Synthetic oligonucleotide
gugcuaaugaccuagauug

SEQ ID NO: 2476649 - RNA, 19 nt, Artificial Sequence
  Description of Artificial Sequence: Synthetic oligonucleotide
uauacauaauaucuuggag

SEQ ID NO: 2476650 - RNA, 19 nt, Artificial Sequence
  Description of Artificial Sequence: Synthetic oligonucleotide
cuccacuugaucaagaagg

SEQ ID NO: 2476651 - RNA, 19 nt, Artificial Sequence
  Description of Artificial Sequence: Synthetic oligonucleotide
uaccauauacauaauaaca

SEQ ID NO: 2476652 - RNA, 19 nt, Artificial Sequence
  Description of Artificial Sequence: Synthetic oligonucleotide
uacauaauaacacaauuua

SEQ ID NO: 2476653 - RNA, 19 nt, Artificial Sequence
  Description of Artificial Sequence: Synthetic oligonucleotide
gauggugcagcgcagaggg

SEQ ID NO: 2476654 - RNA, 19 nt, Artificial Sequence
  Description of Artificial Sequence: Synthetic oligonucleotide
gauggguuauucuagacac

SEQ ID NO: 2476655 - RNA, 19 nt, Artificial Sequence
  Description of Artificial Sequence: Synthetic oligonucleotide
cacuugaucaagaaggccg

SEQ ID NO: 2476656 - RNA, 19 nt, Artificial Sequence
  Description of Artificial Sequence: Synthetic oligonucleotide
aagaaacccucuuucuccc

SEQ ID NO: 2476657 - RNA, 19 nt, Artificial Sequence
  Description of Artificial Sequence: Synthetic oligonucleotide
gaggacauaaaauuuguac

SEQ ID NO: 2476658 - RNA, 19 nt, Artificial Sequence
  Description of Artificial Sequence: Synthetic oligonucleotide
cacucaaacacacacacgc

SEQ ID NO: 2476659 - RNA, 19 nt, Artificial Sequence
  Description of Artificial Sequence: Synthetic oligonucleotide
ucauaucugcuacaaagag

SEQ ID NO: 2476660 - RNA, 19 nt, Artificial Sequence
  Description of Artificial Sequence: Synthetic oligonucleotide
uuauacauaauaucuugga

SEQ ID NO: 2476661 - RNA, 19 nt, Artificial Sequence
  Description of Artificial Sequence: Synthetic oligonucleotide
acaaauguagacaugugac

SEQ ID NO: 2476662 - RNA, 19 nt, Artificial Sequence
  Description of Artificial Sequence: Synthetic oligonucleotide
agauggaagugugagaacc

SEQ ID NO: 2476663 - RNA, 19 nt, Artificial Sequence
  Description of Artificial Sequence: Synthetic oligonucleotide
uguacuugagucuguaugc

SEQ ID NO: 2476664 - RNA, 19 nt, Artificial Sequence
  Description of Artificial Sequence: Synthetic oligonucleotide
accauauacauaauaacac

SEQ ID NO: 2476665 - RNA, 19 nt, Artificial Sequence
  Description of Artificial Sequence: Synthetic oligonucleotide
acaaagaggacauaaaauu

SEQ ID NO: 2476666 - RNA, 19 nt, Artificial Sequence
  Description of Artificial Sequence: Synthetic oligonucleotide
uauacauaauaacacaauu

SEQ ID NO: 2476667 - RNA, 19 nt, Artificial Sequence
  Description of Artificial Sequence: Synthetic oligonucleotide
aauaucuuggagugguuca

SEQ ID NO: 2476668 - RNA, 19 nt, Artificial Sequence
  Description of Artificial Sequence: Synthetic oligonucleotide
aggacauaaaauuuguaca

SEQ ID NO: 2476669 - RNA, 19 nt, Artificial Sequence
  Description of Artificial Sequence: Synthetic oligonucleotide
ucccaacugguucugaugg

SEQ ID NO: 2476670 - RNA, 19 nt, Artificial Sequence
  Description of Artificial Sequence: Synthetic oligonucleotide
uuucacaugucaaugcaca

SEQ ID NO: 2476671 - RNA, 19 nt, Artificial Sequence
  Description of Artificial Sequence: Synthetic oligonucleotide
guagacaugugacaaaaug

SEQ ID NO: 2476672 - RNA, 19 nt, Artificial Sequence
  Description of Artificial Sequence: Synthetic oligonucleotide
ugaaagccaucagagaugg

SEQ ID NO: 2476673 - RNA, 19 nt, Artificial Sequence
  Description of Artificial Sequence: Synthetic oligonucleotide
guacgugucccacagacgg

SEQ ID NO: 2476674 - RNA, 19 nt, Artificial Sequence
  Description of Artificial Sequence: Synthetic oligonucleotide
cauaucugcuacaaagagg

SEQ ID NO: 2476675 - RNA, 19 nt, Artificial Sequence
  Description of Artificial Sequence: Synthetic oligonucleotide
acaaaaugcugauaggccu

SEQ ID NO: 2476676 - RNA, 19 nt, Artificial Sequence
  Description of Artificial Sequence: Synthetic oligonucleotide
ucugcuacaaagaggacau

SEQ ID NO: 2476677 - RNA, 19 nt, Artificial Sequence
  Description of Artificial Sequence: Synthetic oligonucleotide
auguacuugagucuguaug

SEQ ID NO: 2476678 - RNA, 19 nt, Artificial Sequence
  Description of Artificial Sequence: Synthetic oligonucleotide
agugaugaaagccaucaga

SEQ ID NO: 2476679 - RNA, 19 nt, Artificial Sequence
  Description of Artificial Sequence: Synthetic oligonucleotide
ucaagggaccaucagcugc

SEQ ID NO: 2476680 - RNA, 19 nt, Artificial Sequence
  Description of Artificial Sequence: Synthetic oligonucleotide
auaaaauuuguacaccuuu

SEQ ID NO: 2476681 - RNA, 19 nt, Artificial Sequence
  Description of Artificial Sequence: Synthetic oligonucleotide
auucuagacacaaauguag

SEQ ID NO: 2476682 - RNA, 19 nt, Artificial Sequence
  Description of Artificial Sequence: Synthetic oligonucleotide
ugauggguuauucuagaca

SEQ ID NO: 2476683 - RNA, 19 nt, Artificial Sequence
  Description of Artificial Sequence: Synthetic oligonucleotide
caugaggaggcccugaaag

SEQ ID NO: 2476684 - RNA, 19 nt, Artificial Sequence
  Description of Artificial Sequence: Synthetic oligonucleotide
ucaaugcacacuauaaaua

SEQ ID NO: 2476685 - RNA, 19 nt, Artificial Sequence
  Description of Artificial Sequence: Synthetic oligonucleotide
cauaauaacacaauuuaua

SEQ ID NO: 2476686 - RNA, 19 nt, Artificial Sequence
  Description of Artificial Sequence: Synthetic oligonucleotide
acacaauuuauacauaaua

SEQ ID NO: 2476687 - RNA, 19 nt, Artificial Sequence
  Description of Artificial Sequence: Synthetic oligonucleotide
aaacccucuuucucccucc

SEQ ID NO: 2476688 - RNA, 19 nt, Artificial Sequence
  Description of Artificial Sequence: Synthetic oligonucleotide
uccaccgaaaggcaaacug

SEQ ID NO: 2476689 - RNA, 19 nt, Artificial Sequence
  Description of Artificial Sequence: Synthetic oligonucleotide
uucugauggguuauucuag

SEQ ID NO: 2476690 - RNA, 19 nt, Artificial Sequence
  Description of Artificial Sequence: Synthetic oligonucleotide
ucaagaaggccgcacacac

SEQ ID NO: 2476691 - RNA, 19 nt, Artificial Sequence
  Description of Artificial Sequence: Synthetic oligonucleotide
aaaaucauaucugcuacaa

SEQ ID NO: 2476692 - RNA, 19 nt, Artificial Sequence
  Description of Artificial Sequence: Synthetic oligonucleotide
cucaaacacacacacgcgg

SEQ ID NO: 2476693 - RNA, 19 nt, Artificial Sequence
  Description of Artificial Sequence: Synthetic oligonucleotide
ucgucugugcuaaugaccu

SEQ ID NO: 2476694 - RNA, 19 nt, Artificial Sequence
  Description of Artificial Sequence: Synthetic oligonucleotide
uaaaauuuguacaccuuua

SEQ ID NO: 2476695 - RNA, 19 nt, Artificial Sequence
  Description of Artificial Sequence: Synthetic oligonucleotide
uauucuagacacaaaugua

SEQ ID NO: 2476696 - RNA, 19 nt, Artificial Sequence
  Description of Artificial Sequence: Synthetic oligonucleotide
aucuuggagugguucaccc

SEQ ID NO: 2476697 - RNA, 19 nt, Artificial Sequence
  Description of Artificial Sequence: Synthetic oligonucleotide
gugaugaaagccaucagag

SEQ ID NO: 2476698 - RNA, 19 nt, Artificial Sequence
  Description of Artificial Sequence: Synthetic oligonucleotide
uucgucugugcuaaugacc

SEQ ID NO: 2476699 - RNA, 19 nt, Artificial Sequence
  Description of Artificial Sequence: Synthetic oligonucleotide
gacaaaaugcugauaggcc

SEQ ID NO: 2476700 - RNA, 19 nt, Artificial Sequence
  Description of Artificial Sequence: Synthetic oligonucleotide
ucuagacacaaauguagac

SEQ ID NO: 2476701 - RNA, 19 nt, Artificial Sequence
  Description of Artificial Sequence: Synthetic oligonucleotide
gaugaaagccaucagagau

SEQ ID NO: 2476702 - RNA, 19 nt, Artificial Sequence
  Description of Artificial Sequence: Synthetic oligonucleotide
uuuucacaugucaaugcac

SEQ ID NO: 2476703 - RNA, 19 nt, Artificial Sequence
  Description of Artificial Sequence: Synthetic oligonucleotide
uccucauugccccagugga

SEQ ID NO: 2476704 - RNA, 19 nt, Artificial Sequence
  Description of Artificial Sequence: Synthetic oligonucleotide
cauauacauaauaacacaa

SEQ ID NO: 2476705 - RNA, 19 nt, Artificial Sequence
  Description of Artificial Sequence: Synthetic oligonucleotide
guagagauggaagugugag

SEQ ID NO: 2476706 - RNA, 19 nt, Artificial Sequence
  Description of Artificial Sequence: Synthetic oligonucleotide
ucuggcucagacugguacg

SEQ ID NO: 2476707 - RNA, 19 nt, Artificial Sequence
  Description of Artificial Sequence: Synthetic oligonucleotide
ugguacgugucccacagac

SEQ ID NO: 2476708 - RNA, 19 nt, Artificial Sequence
  Description of Artificial Sequence: Synthetic oligonucleotide
auuuguacaccuuuaccau

SEQ ID NO: 2476709 - RNA, 19 nt, Artificial Sequence
  Description of Artificial Sequence: Synthetic oligonucleotide
gauaggccuguauacacac

SEQ ID NO: 2476710 - RNA, 19 nt, Artificial Sequence
  Description of Artificial Sequence: Synthetic oligonucleotide
uccacuugaucaagaaggc

SEQ ID NO: 2476711 - RNA, 19 nt, Artificial Sequence
  Description of Artificial Sequence: Synthetic oligonucleotide
ugugcuaaugaccuagauu

SEQ ID NO: 2476712 - RNA, 19 nt, Artificial Sequence
  Description of Artificial Sequence: Synthetic oligonucleotide
ucaaacacacacacgcggu

SEQ ID NO: 2476713 - RNA, 19 nt, Artificial Sequence
  Description of Artificial Sequence: Synthetic oligonucleotide
aagugugagaacccuucug

SEQ ID NO: 2476714 - RNA, 19 nt, Artificial Sequence
  Description of Artificial Sequence: Synthetic oligonucleotide
uggauuguaggcagguucu

SEQ ID NO: 2476715 - RNA, 19 nt, Artificial Sequence
  Description of Artificial Sequence: Synthetic oligonucleotide
agagauggaagugugagaa

SEQ ID NO: 2476716 - RNA, 19 nt, Artificial Sequence
  Description of Artificial Sequence: Synthetic oligonucleotide
accuagauugcuuuucaca

SEQ ID NO: 2476717 - RNA, 19 nt, Artificial Sequence
  Description of Artificial Sequence: Synthetic oligonucleotide
aaugcugauaggccuguau

SEQ ID NO: 2476718 - RNA, 19 nt, Artificial Sequence
  Description of Artificial Sequence: Synthetic oligonucleotide
acuugaucaagaaggccgc

SEQ ID NO: 2476719 - RNA, 19 nt, Artificial Sequence
  Description of Artificial Sequence: Synthetic oligonucleotide
acagugaugaaagccauca

SEQ ID NO: 2476720 - RNA, 19 nt, Artificial Sequence
  Description of Artificial Sequence: Synthetic oligonucleotide
guuauucuagacacaaaug

SEQ ID NO: 2476721 - RNA, 19 nt, Artificial Sequence
  Description of Artificial Sequence: Synthetic oligonucleotide
gagacagcaccuaucggcg

SEQ ID NO: 2476722 - RNA, 19 nt, Artificial Sequence
  Description of Artificial Sequence: Synthetic oligonucleotide
agacaugugacaaaaugcu

SEQ ID NO: 2476723 - RNA, 19 nt, Artificial Sequence
  Description of Artificial Sequence: Synthetic oligonucleotide
uuguacaccuuuaccauau

SEQ ID NO: 2476724 - RNA, 19 nt, Artificial Sequence
  Description of Artificial Sequence: Synthetic oligonucleotide
auuguaggcagguucugca

SEQ ID NO: 2476725 - RNA, 19 nt, Artificial Sequence
  Description of Artificial Sequence: Synthetic oligonucleotide
agugguuggggcgucgugc

SEQ ID NO: 2476726 - RNA, 19 nt, Artificial Sequence
  Description of Artificial Sequence: Synthetic oligonucleotide
gaaggccgcacacacguag

SEQ ID NO: 2476727 - RNA, 19 nt, Artificial Sequence
  Description of Artificial Sequence: Synthetic oligonucleotide
aagaggacauaaaauuugu

SEQ ID NO: 2476728 - RNA, 19 nt, Artificial Sequence
  Description of Artificial Sequence: Synthetic oligonucleotide
uucuggcucagacugguac

SEQ ID NO: 2476729 - RNA, 19 nt, Artificial Sequence
  Description of Artificial Sequence: Synthetic oligonucleotide
ugugagaacccuucuggcu

SEQ ID NO: 2476730 - RNA, 19 nt, Artificial Sequence
  Description of Artificial Sequence: Synthetic oligonucleotide
agcugcuuggucccuaggg

SEQ ID NO: 2476731 - RNA, 19 nt, Artificial Sequence
  Description of Artificial Sequence: Synthetic oligonucleotide
ucugauggguuauucuaga

SEQ ID NO: 2476732 - RNA, 19 nt, Artificial Sequence
  Description of Artificial Sequence: Synthetic oligonucleotide
gagucuguaugccucggcc

SEQ ID NO: 2476733 - RNA, 19 nt, Artificial Sequence
  Description of Artificial Sequence: Synthetic oligonucleotide
ugcuuuucacaugucaaug

SEQ ID NO: 2476734 - RNA, 19 nt, Artificial Sequence
  Description of Artificial Sequence: Synthetic oligonucleotide
ugaugaaagccaucagaga

SEQ ID NO: 2476735 - RNA, 19 nt, Artificial Sequence
  Description of Artificial Sequence: Synthetic oligonucleotide
caaaaugcugauaggccug

SEQ ID NO: 2476736 - RNA, 19 nt, Artificial Sequence
  Description of Artificial Sequence: Synthetic oligonucleotide
agcccgaucuccucauugc

SEQ ID NO: 2476737 - RNA, 19 nt, Artificial Sequence
  Description of Artificial Sequence: Synthetic oligonucleotide
cuuggagugguucacccug

SEQ ID NO: 2476738 - RNA, 19 nt, Artificial Sequence
  Description of Artificial Sequence: Synthetic oligonucleotide
uuugaagaggugguuaaaa

SEQ ID NO: 2476739 - RNA, 19 nt, Artificial Sequence
  Description of Artificial Sequence: Synthetic oligonucleotide
cuugagucuguaugccucg

SEQ ID NO: 2476740 - RNA, 19 nt, Artificial Sequence
  Description of Artificial Sequence: Synthetic oligonucleotide
aagaguuugaagagguggu

SEQ ID NO: 2476741 - RNA, 19 nt, Artificial Sequence
  Description of Artificial Sequence: Synthetic oligonucleotide
gugacaaaaugcugauagg

SEQ ID NO: 2476742 - RNA, 19 nt, Artificial Sequence
  Description of Artificial Sequence: Synthetic oligonucleotide
cucucaagggaccaucagc

SEQ ID NO: 2476743 - RNA, 19 nt, Artificial Sequence
  Description of Artificial Sequence: Synthetic oligonucleotide
ugauaggccuguauacaca

SEQ ID NO: 2476744 - RNA, 19 nt, Artificial Sequence
  Description of Artificial Sequence: Synthetic oligonucleotide
ugaccuagauugcuuuuca

SEQ ID NO: 2476745 - RNA, 19 nt, Artificial Sequence
  Description of Artificial Sequence: Synthetic oligonucleotide
cugauaggccuguauacac

SEQ ID NO: 2476746 - RNA, 19 nt, Artificial Sequence
  Description of Artificial Sequence: Synthetic oligonucleotide
gagugguucacccuggaaa

SEQ ID NO: 2476747 - RNA, 19 nt, Artificial Sequence
  Description of Artificial Sequence: Synthetic oligonucleotide
ugcuacaaagaggacauaa

SEQ ID NO: 2476748 - RNA, 19 nt, Artificial Sequence
  Description of Artificial Sequence: Synthetic oligonucleotide
aacccucuuucucccuccc

SEQ ID NO: 2476749 - RNA, 19 nt, Artificial Sequence
  Description of Artificial Sequence: Synthetic oligonucleotide
agugguucacccuggaaaa

SEQ ID NO: 2476750 - RNA, 19 nt, Artificial Sequence
  Description of Artificial Sequence: Synthetic oligonucleotide
auaucuuggagugguucac

SEQ ID NO: 2476751 - RNA, 19 nt, Artificial Sequence
  Description of Artificial Sequence: Synthetic oligonucleotide
agcaggagugguuccuggc

SEQ ID NO: 2476752 - RNA, 19 nt, Artificial Sequence
  Description of Artificial Sequence: Synthetic oligonucleotide
uggguuauucuagacacaa

SEQ ID NO: 2476753 - RNA, 19 nt, Artificial Sequence
  Description of Artificial Sequence: Synthetic oligonucleotide
cacaaauguagacauguga

SEQ ID NO: 2476754 - RNA, 19 nt, Artificial Sequence
  Description of Artificial Sequence: Synthetic oligonucleotide
acuugagucuguaugccuc

SEQ ID NO: 2476755 - RNA, 19 nt, Artificial Sequence
  Description of Artificial Sequence: Synthetic oligonucleotide
uaauaucuuggagugguuc

SEQ ID NO: 2476756 - RNA, 19 nt, Artificial Sequence
  Description of Artificial Sequence: Synthetic oligonucleotide
guggccacagugaugaaag

SEQ ID NO: 2476757 - RNA, 19 nt, Artificial Sequence
  Description of Artificial Sequence: Synthetic oligonucleotide
caaauguagacaugugaca

SEQ ID NO: 2476758 - RNA, 19 nt, Artificial Sequence
  Description of Artificial Sequence: Synthetic oligonucleotide
cuagauugcuuuucacaug

SEQ ID NO: 2476759 - RNA, 19 nt, Artificial Sequence
  Description of Artificial Sequence: Synthetic oligonucleotide
gacacaaauguagacaugu

SEQ ID NO: 2476760 - RNA, 19 nt, Artificial Sequence
  Description of Artificial Sequence: Synthetic oligonucleotide
gaucaagaaggccgcacac

SEQ ID NO: 2476761 - RNA, 19 nt, Artificial Sequence
  Description of Artificial Sequence: Synthetic oligonucleotide
aggagguuguucauccacc

SEQ ID NO: 2476762 - RNA, 19 nt, Artificial Sequence
  Description of Artificial Sequence: Synthetic oligonucleotide
ugcuaaugaccuagauugc

SEQ ID NO: 2476763 - RNA, 19 nt, Artificial Sequence
  Description of Artificial Sequence: Synthetic oligonucleotide
augcacacuauaaauauaa

SEQ ID NO: 2476764 - RNA, 19 nt, Artificial Sequence
  Description of Artificial Sequence: Synthetic oligonucleotide
uuggagugguucacccugg

SEQ ID NO: 2476765 - RNA, 19 nt, Artificial Sequence
  Description of Artificial Sequence: Synthetic oligonucleotide
augaccuagauugcuuuuc

SEQ ID NO: 2476766 - RNA, 19 nt, Artificial Sequence
  Description of Artificial Sequence: Synthetic oligonucleotide
ugcaaacauguacuugagu

SEQ ID NO: 2476767 - RNA, 19 nt, Artificial Sequence
  Description of Artificial Sequence: Synthetic oligonucleotide
caaacugcagguacuccac

SEQ ID NO: 2476768 - RNA, 19 nt, Artificial Sequence
  Description of Artificial Sequence: Synthetic oligonucleotide
aaugaccuagauugcuuuu

SEQ ID NO: 2476769 - RNA, 19 nt, Artificial Sequence
  Description of Artificial Sequence: Synthetic oligonucleotide
ucauccaccgaaaggcaaa

SEQ ID NO: 2476770 - RNA, 19 nt, Artificial Sequence
  Description of Artificial Sequence: Synthetic oligonucleotide
uaaugaccuagauugcuuu

SEQ ID NO: 2476771 - RNA, 19 nt, Artificial Sequence
  Description of Artificial Sequence: Synthetic oligonucleotide
agcuuugacagcaggagug

SEQ ID NO: 2476772 - RNA, 19 nt, Artificial Sequence
  Description of Artificial Sequence: Synthetic oligonucleotide
gauggaagugugagaaccc

SEQ ID NO: 2476773 - RNA, 19 nt, Artificial Sequence
  Description of Artificial Sequence: Synthetic oligonucleotide
ggggagacagcaccuaucg

SEQ ID NO: 2476774 - RNA, 19 nt, Artificial Sequence
  Description of Artificial Sequence: Synthetic oligonucleotide
uugcuuuucacaugucaau

SEQ ID NO: 2476775 - RNA, 19 nt, Artificial Sequence
  Description of Artificial Sequence: Synthetic oligonucleotide
uagagauggaagugugaga

SEQ ID NO: 2476776 - RNA, 19 nt, Artificial Sequence
  Description of Artificial Sequence: Synthetic oligonucleotide
uuuguacaccuuuaccaua

SEQ ID NO: 2476777 - RNA, 19 nt, Artificial Sequence
  Description of Artificial Sequence: Synthetic oligonucleotide
gugagaacccuucuggcuc

SEQ ID NO: 2476778 - RNA, 19 nt, Artificial Sequence
  Description of Artificial Sequence: Synthetic oligonucleotide
gugggagugagcuuugaca

SEQ ID NO: 2476779 - RNA, 19 nt, Artificial Sequence
  Description of Artificial Sequence: Synthetic oligonucleotide
gauuguaggcagguucugc

SEQ ID NO: 2476780 - RNA, 19 nt, Artificial Sequence
  Description of Artificial Sequence: Synthetic oligonucleotide
ucacaugucaaugcacacu

SEQ ID NO: 2476781 - RNA, 19 nt, Artificial Sequence
  Description of Artificial Sequence: Synthetic oligonucleotide
acauaauaucuuggagugg

SEQ ID NO: 2476782 - RNA, 19 nt, Artificial Sequence
  Description of Artificial Sequence: Synthetic oligonucleotide
aucauaucugcuacaaaga

SEQ ID NO: 2476783 - RNA, 19 nt, Artificial Sequence
  Description of Artificial Sequence: Synthetic oligonucleotide
aaaaugcugauaggccugu

SEQ ID NO: 2476784 - RNA, 19 nt, Artificial Sequence
  Description of Artificial Sequence: Synthetic oligonucleotide
uucccaacugguucugaug

SEQ ID NO: 2476785 - RNA, 19 nt, Artificial Sequence
  Description of Artificial Sequence: Synthetic oligonucleotide
uucauccaccgaaaggcaa

SEQ ID NO: 2476786 - RNA, 19 nt, Artificial Sequence
  Description of Artificial Sequence: Synthetic oligonucleotide
gucuguaugccucggccag

SEQ ID NO: 2476787 - RNA, 19 nt, Artificial Sequence
  Description of Artificial Sequence: Synthetic oligonucleotide
uccacggcuugcacagugg

SEQ ID NO: 2476788 - RNA, 19 nt, Artificial Sequence
  Description of Artificial Sequence: Synthetic oligonucleotide
uuugacagcaggagugguu

SEQ ID NO: 2476789 - RNA, 19 nt, Artificial Sequence
  Description of Artificial Sequence: Synthetic oligonucleotide
cuccucauugccccagugg

SEQ ID NO: 2476790 - RNA, 19 nt, Artificial Sequence
  Description of Artificial Sequence: Synthetic oligonucleotide
ggagguuguucauccaccg

SEQ ID NO: 2476791 - RNA, 19 nt, Artificial Sequence
  Description of Artificial Sequence: Synthetic oligonucleotide
uacuugagucuguaugccu

SEQ ID NO: 2476792 - RNA, 19 nt, Artificial Sequence
  Description of Artificial Sequence: Synthetic oligonucleotide
acagacggauggugcagcg

SEQ ID NO: 2476793 - RNA, 19 nt, Artificial Sequence
  Description of Artificial Sequence: Synthetic oligonucleotide
guucugauggguuauucua

SEQ ID NO: 2476794 - RNA, 19 nt, Artificial Sequence
  Description of Artificial Sequence: Synthetic oligonucleotide
ugagucuguaugccucggc

SEQ ID NO: 2476795 - RNA, 19 nt, Artificial Sequence
  Description of Artificial Sequence: Synthetic oligonucleotide
agucuguaugccucggcca

SEQ ID NO: 2476796 - RNA, 19 nt, Artificial Sequence
  Description of Artificial Sequence: Synthetic oligonucleotide
ucugugcuaaugaccuaga

SEQ ID NO: 2476797 - RNA, 19 nt, Artificial Sequence
  Description of Artificial Sequence: Synthetic oligonucleotide
auguagacaugugacaaaa

SEQ ID NO: 2476798 - RNA, 19 nt, Artificial Sequence
  Description of Artificial Sequence: Synthetic oligonucleotide
augaaagccaucagagaug

SEQ ID NO: 2476799 - RNA, 19 nt, Artificial Sequence
  Description of Artificial Sequence: Synthetic oligonucleotide
ugagaacccuucuggcuca

SEQ ID NO: 2476800 - RNA, 19 nt, Artificial Sequence
  Description of Artificial Sequence: Synthetic oligonucleotide
acucaaacacacacacgcg

SEQ ID NO: 2476801 - RNA, 19 nt, Artificial Sequence
  Description of Artificial Sequence: Synthetic oligonucleotide
cuuuaccauauacauaaua

SEQ ID NO: 2476802 - RNA, 19 nt, Artificial Sequence
  Description of Artificial Sequence: Synthetic oligonucleotide
caagaaggccgcacacacg

SEQ ID NO: 2476803 - RNA, 19 nt, Artificial Sequence
  Description of Artificial Sequence: Synthetic oligonucleotide
uguagacaugugacaaaau

SEQ ID NO: 2476804 - RNA, 19 nt, Artificial Sequence
  Description of Artificial Sequence: Synthetic oligonucleotide
ugaggaggcccugaaaguc

SEQ ID NO: 2476805 - RNA, 19 nt, Artificial Sequence
  Description of Artificial Sequence: Synthetic oligonucleotide
uggggcgucgugcaaacau

SEQ ID NO: 2476806 - RNA, 19 nt, Artificial Sequence
  Description of Artificial Sequence: Synthetic oligonucleotide
gguuauucuagacacaaau

SEQ ID NO: 2476807 - RNA, 19 nt, Artificial Sequence
  Description of Artificial Sequence: Synthetic oligonucleotide
cauaauaucuuggaguggu

SEQ ID NO: 2476808 - RNA, 19 nt, Artificial Sequence
  Description of Artificial Sequence: Synthetic oligonucleotide
agagggagcucccgcauca

SEQ ID NO: 2476809 - RNA, 19 nt, Artificial Sequence
  Description of Artificial Sequence: Synthetic oligonucleotide
caaacacacacacgcggug

SEQ ID NO: 2476810 - RNA, 19 nt, Artificial Sequence
  Description of Artificial Sequence: Synthetic oligonucleotide
gaaacccucuuucucccuc

SEQ ID NO: 2476811 - RNA, 19 nt, Artificial Sequence
  Description of Artificial Sequence: Synthetic oligonucleotide
ucauugccccaguggauug

SEQ ID NO: 2476812 - RNA, 19 nt, Artificial Sequence
  Description of Artificial Sequence: Synthetic oligonucleotide
gugugagaacccuucuggc

SEQ ID NO: 2476813 - RNA, 19 nt, Artificial Sequence
  Description of Artificial Sequence: Synthetic oligonucleotide
cuaucggcgguagugguug

SEQ ID NO: 2476814 - RNA, 19 nt, Artificial Sequence
  Description of Artificial Sequence: Synthetic oligonucleotide
cugauggguuauucuagac

SEQ ID NO: 2476815 - RNA, 19 nt, Artificial Sequence
  Description of Artificial Sequence: Synthetic oligonucleotide
uaucuuggagugguucacc

SEQ ID NO: 2476816 - RNA, 19 nt, Artificial Sequence
  Description of Artificial Sequence: Synthetic oligonucleotide
aaugcacacuauaaauaua

SEQ ID NO: 2476817 - RNA, 19 nt, Artificial Sequence
  Description of Artificial Sequence: Synthetic oligonucleotide
aggagugguuccuggccgg

SEQ ID NO: 2476818 - RNA, 19 nt, Artificial Sequence
  Description of Artificial Sequence: Synthetic oligonucleotide
augcugauaggccuguaua

SEQ ID NO: 2476819 - RNA, 19 nt, Artificial Sequence
  Description of Artificial Sequence: Synthetic oligonucleotide
caaugcacacuauaaauau

SEQ ID NO: 2476820 - RNA, 19 nt, Artificial Sequence
  Description of Artificial Sequence: Synthetic oligonucleotide
ucuuggagugguucacccu

SEQ ID NO: 2476821 - RNA, 19 nt, Artificial Sequence
  Description of Artificial Sequence: Synthetic oligonucleotide
acggcuugcacaguggcca

SEQ ID NO: 2476822 - RNA, 19 nt, Artificial Sequence
  Description of Artificial Sequence: Synthetic oligonucleotide
guacuugagucuguaugcc

SEQ ID NO: 2476823 - RNA, 19 nt, Artificial Sequence
  Description of Artificial Sequence: Synthetic oligonucleotide
caaacauguacuugagucu

SEQ ID NO: 2476824 - RNA, 19 nt, Artificial Sequence
  Description of Artificial Sequence: Synthetic oligonucleotide
agacagcaccuaucggcgg

SEQ ID NO: 2476825 - RNA, 19 nt, Artificial Sequence
  Description of Artificial Sequence: Synthetic oligonucleotide
ucgugcaaacauguacuug

SEQ ID NO: 2476826 - RNA, 19 nt, Artificial Sequence
  Description of Artificial Sequence: Synthetic oligonucleotide
cuaggguccuucccaacug

SEQ ID NO: 2476827 - RNA, 19 nt, Artificial Sequence
  Description of Artificial Sequence: Synthetic oligonucleotide
uccuccacuugaucaagaa

SEQ ID NO: 2476828 - RNA, 19 nt, Artificial Sequence
  Description of Artificial Sequence: Synthetic oligonucleotide
gagauggaagugugagaac

SEQ ID NO: 2476829 - RNA, 19 nt, Artificial Sequence
  Description of Artificial Sequence: Synthetic oligonucleotide
caccgaaaggcaaacugca

SEQ ID NO: 2476830 - RNA, 19 nt, Artificial Sequence
  Description of Artificial Sequence: Synthetic oligonucleotide
ucggcgguagugguugggg

SEQ ID NO: 2476831 - RNA, 19 nt, Artificial Sequence
  Description of Artificial Sequence: Synthetic oligonucleotide
gaccuagauugcuuuucac

SEQ ID NO: 2476832 - RNA, 19 nt, Artificial Sequence
  Description of Artificial Sequence: Synthetic oligonucleotide
uugagucuguaugccucgg

SEQ ID NO: 2476833 - RNA, 19 nt, Artificial Sequence
  Description of Artificial Sequence: Synthetic oligonucleotide
acccucuuucucccucccc

SEQ ID NO: 2476834 - RNA, 19 nt, Artificial Sequence
  Description of Artificial Sequence: Synthetic oligonucleotide
uuccuccacuugaucaaga

SEQ ID NO: 2476835 - RNA, 19 nt, Artificial Sequence
  Description of Artificial Sequence: Synthetic oligonucleotide
cugcuuggucccuaggguc

SEQ ID NO: 2476836 - RNA, 19 nt, Artificial Sequence
  Description of Artificial Sequence: Synthetic oligonucleotide
ggcgguagugguuggggcg

SEQ ID NO: 2476837 - RNA, 19 nt, Artificial Sequence
  Description of Artificial Sequence: Synthetic oligonucleotide
ccaccgaaaggcaaacugc

SEQ ID NO: 2476838 - RNA, 19 nt, Artificial Sequence
  Description of Artificial Sequence: Synthetic oligonucleotide
agggagcucccgcaucagg

SEQ ID NO: 2476839 - RNA, 19 nt, Artificial Sequence
  Description of Artificial Sequence: Synthetic oligonucleotide
uggucccucucaagggacc

SEQ ID NO: 2476840 - RNA, 19 nt, Artificial Sequence
  Description of Artificial Sequence: Synthetic oligonucleotide
aucaagaaggccgcacaca

SEQ ID NO: 2476841 - RNA, 19 nt, Artificial Sequence
  Description of Artificial Sequence: Synthetic oligonucleotide
ggguccacggcuugcacag

SEQ ID NO: 2476842 - RNA, 19 nt, Artificial Sequence
  Description of Artificial Sequence: Synthetic oligonucleotide
cacacguagagauggaagu

SEQ ID NO: 2476843 - RNA, 19 nt, Artificial Sequence
  Description of Artificial Sequence: Synthetic oligonucleotide
auggaagugugagaacccu

SEQ ID NO: 2476844 - RNA, 19 nt, Artificial Sequence
  Description of Artificial Sequence: Synthetic oligonucleotide
uggaagugugagaacccuu

SEQ ID NO: 2476845 - RNA, 19 nt, Artificial Sequence
  Description of Artificial Sequence: Synthetic oligonucleotide
caccuaucggcgguagugg

SEQ ID NO: 2476846 - RNA, 19 nt, Artificial Sequence
  Description of Artificial Sequence: Synthetic oligonucleotide
gaucuccucauugccccag

SEQ ID NO: 2476847 - RNA, 19 nt, Artificial Sequence
  Description of Artificial Sequence: Synthetic oligonucleotide
aacauguacuugagucugu

SEQ ID NO: 2476848 - RNA, 19 nt, Artificial Sequence
  Description of Artificial Sequence: Synthetic oligonucleotide
uacgugucccacagacgga

SEQ ID NO: 2476849 - RNA, 19 nt, Artificial Sequence
  Description of Artificial Sequence: Synthetic oligonucleotide
cacggcuugcacaguggcc

SEQ ID NO: 2476850 - RNA, 19 nt, Artificial Sequence
  Description of Artificial Sequence: Synthetic oligonucleotide
acacaaauguagacaugug

SEQ ID NO: 2476851 - RNA, 19 nt, Artificial Sequence
  Description of Artificial Sequence: Synthetic oligonucleotide
gaguuugaagaggugguua

SEQ ID NO: 2476852 - RNA, 19 nt, Artificial Sequence
  Description of Artificial Sequence: Synthetic oligonucleotide
acguagagauggaagugug

SEQ ID NO: 2476853 - RNA, 19 nt, Artificial Sequence
  Description of Artificial Sequence: Synthetic oligonucleotide
gugcaaacauguacuugag

SEQ ID NO: 2476854 - RNA, 19 nt, Artificial Sequence
  Description of Artificial Sequence: Synthetic oligonucleotide
aggccgcacacacguagag

SEQ ID NO: 2476855 - RNA, 19 nt, Artificial Sequence
  Description of Artificial Sequence: Synthetic oligonucleotide
gcgucgugcaaacauguac

SEQ ID NO: 2476856 - RNA, 19 nt, Artificial Sequence
  Description of Artificial Sequence: Synthetic oligonucleotide
cgugcaaacauguacuuga

SEQ ID NO: 2476857 - RNA, 19 nt, Artificial Sequence
  Description of Artificial Sequence: Synthetic oligonucleotide
cuggucccucucaagggac

SEQ ID NO: 2476858 - RNA, 19 nt, Artificial Sequence
  Description of Artificial Sequence: Synthetic oligonucleotide
uugccccaguggauuguag

SEQ ID NO: 2476859 - RNA, 19 nt, Artificial Sequence
  Description of Artificial Sequence: Synthetic oligonucleotide
guccacggcuugcacagug

SEQ ID NO: 2476860 - RNA, 19 nt, Artificial Sequence
  Description of Artificial Sequence: Synthetic oligonucleotide
ggaagugugagaacccuuc

SEQ ID NO: 2476861 - RNA, 19 nt, Artificial Sequence
  Description of Artificial Sequence: Synthetic oligonucleotide
uggagugguucacccugga

SEQ ID NO: 2476862 - RNA, 19 nt, Artificial Sequence
  Description of Artificial Sequence: Synthetic oligonucleotide
gcuuugacagcaggagugg

SEQ ID NO: 2476863 - RNA, 19 nt, Artificial Sequence
  Description of Artificial Sequence: Synthetic oligonucleotide
auaggccuguauacacacg

SEQ ID NO: 2476864 - RNA, 19 nt, Artificial Sequence
  Description of Artificial Sequence: Synthetic oligonucleotide
agaaacccucuuucucccu

SEQ ID NO: 2476865 - RNA, 19 nt, Artificial Sequence
  Description of Artificial Sequence: Synthetic oligonucleotide
cacacacacgcggugggag

SEQ ID NO: 2476866 - RNA, 19 nt, Artificial Sequence
  Description of Artificial Sequence: Synthetic oligonucleotide
gucccuaggguccuuccca

SEQ ID NO: 2476867 - RNA, 19 nt, Artificial Sequence
  Description of Artificial Sequence: Synthetic oligonucleotide
uaucggcgguagugguugg

SEQ ID NO: 2476868 - RNA, 19 nt, Artificial Sequence
  Description of Artificial Sequence: Synthetic oligonucleotide
uguaugccucggccagcag

SEQ ID NO: 2476869 - RNA, 19 nt, Artificial Sequence
  Description of Artificial Sequence: Synthetic oligonucleotide
auacacacgcacacgcacu

SEQ ID NO: 2476870 - RNA, 19 nt, Artificial Sequence
  Description of Artificial Sequence: Synthetic oligonucleotide
accuaucggcgguaguggu

SEQ ID NO: 2476871 - RNA, 19 nt, Artificial Sequence
  Description of Artificial Sequence: Synthetic oligonucleotide
cacaguggccacagugaug

SEQ ID NO: 2476872 - RNA, 19 nt, Artificial Sequence
  Description of Artificial Sequence: Synthetic oligonucleotide
gaagugugagaacccuucu

SEQ ID NO: 2476873 - RNA, 19 nt, Artificial Sequence
  Description of Artificial Sequence: Synthetic oligonucleotide
auaacacaauuuauacaua

SEQ ID NO: 2476874 - RNA, 19 nt, Artificial Sequence
  Description of Artificial Sequence: Synthetic oligonucleotide
accgaaaggcaaacugcag

SEQ ID NO: 2476875 - RNA, 19 nt, Artificial Sequence
  Description of Artificial Sequence: Synthetic oligonucleotide
ggccuguauacacacgcac

SEQ ID NO: 2476876 - RNA, 19 nt, Artificial Sequence
  Description of Artificial Sequence: Synthetic oligonucleotide
uguacaccuuuaccauaua

SEQ ID NO: 2476877 - RNA, 19 nt, Artificial Sequence
  Description of Artificial Sequence: Synthetic oligonucleotide
ucuguaugccucggccagc

SEQ ID NO: 2476878 - RNA, 19 nt, Artificial Sequence
  Description of Artificial Sequence: Synthetic oligonucleotide
acacacacgcggugggagu

SEQ ID NO: 2476879 - RNA, 19 nt, Artificial Sequence
  Description of Artificial Sequence: Synthetic oligonucleotide
guuggggcgucgugcaaac

SEQ ID NO: 2476880 - RNA, 19 nt, Artificial Sequence
  Description of Artificial Sequence: Synthetic oligonucleotide
agcaugaggaggcccugaa

SEQ ID NO: 2476881 - RNA, 19 nt, Artificial Sequence
  Description of Artificial Sequence: Synthetic oligonucleotide
cagcccgaucuccucauug

SEQ ID NO: 2476882 - RNA, 19 nt, Artificial Sequence
  Description of Artificial Sequence: Synthetic oligonucleotide
cccaguggauuguaggcag

SEQ ID NO: 2476883 - RNA, 19 nt, Artificial Sequence
  Description of Artificial Sequence: Synthetic oligonucleotide
cacagacggauggugcagc

SEQ ID NO: 2476884 - RNA, 19 nt, Artificial Sequence
  Description of Artificial Sequence: Synthetic oligonucleotide
uccuggccgggguccacgg

SEQ ID NO: 2476885 - RNA, 19 nt, Artificial Sequence
  Description of Artificial Sequence: Synthetic oligonucleotide
cauaaaauuuguacaccuu

SEQ ID NO: 2476886 - RNA, 19 nt, Artificial Sequence
  Description of Artificial Sequence: Synthetic oligonucleotide
gguacgugucccacagacg

SEQ ID NO: 2476887 - RNA, 19 nt, Artificial Sequence
  Description of Artificial Sequence: Synthetic oligonucleotide
agaguuugaagaggugguu

SEQ ID NO: 2476888 - RNA, 19 nt, Artificial Sequence
  Description of Artificial Sequence: Synthetic oligonucleotide
uggucccuaggguccuucc

SEQ ID NO: 2476889 - RNA, 19 nt, Artificial Sequence
  Description of Artificial Sequence: Synthetic oligonucleotide
gagcuuugacagcaggagu

SEQ ID NO: 2476890 - RNA, 19 nt, Artificial Sequence
  Description of Artificial Sequence: Synthetic oligonucleotide
gacugguacgugucccaca

SEQ ID NO: 2476891 - RNA, 19 nt, Artificial Sequence
  Description of Artificial Sequence: Synthetic oligonucleotide
gccccaguggauuguaggc

SEQ ID NO: 2476892 - RNA, 19 nt, Artificial Sequence
  Description of Artificial Sequence: Synthetic oligonucleotide
cauccaccgaaaggcaaac

SEQ ID NO: 2476893 - RNA, 19 nt, Artificial Sequence
  Description of Artificial Sequence: Synthetic oligonucleotide
uuccuggccgggguccacg

SEQ ID NO: 2476894 - RNA, 19 nt, Artificial Sequence
  Description of Artificial Sequence: Synthetic oligonucleotide
ugguuccuggccggggucc

SEQ ID NO: 2476895 - RNA, 19 nt, Artificial Sequence
  Description of Artificial Sequence: Synthetic oligonucleotide
caugugacaaaaugcugau

SEQ ID NO: 2476896 - RNA, 19 nt, Artificial Sequence
  Description of Artificial Sequence: Synthetic oligonucleotide
ucccuaggguccuucccaa

SEQ ID NO: 2476897 - RNA, 19 nt, Artificial Sequence
  Description of Artificial Sequence: Synthetic oligonucleotide
aaggccgcacacacguaga

SEQ ID NO: 2476898 - RNA, 19 nt, Artificial Sequence
  Description of Artificial Sequence: Synthetic oligonucleotide
gagugguuccuggccgggg

SEQ ID NO: 2476899 - RNA, 19 nt, Artificial Sequence
  Description of Artificial Sequence: Synthetic oligonucleotide
gaaagccaucagagauggg

SEQ ID NO: 2476900 - RNA, 19 nt, Artificial Sequence
  Description of Artificial Sequence: Synthetic oligonucleotide
gcaccuaucggcgguagug

SEQ ID NO: 2476901 - RNA, 19 nt, Artificial Sequence
  Description of Artificial Sequence: Synthetic oligonucleotide
gggagacagcaccuaucgg

SEQ ID NO: 2476902 - RNA, 19 nt, Artificial Sequence
  Description of Artificial Sequence: Synthetic oligonucleotide
cuaaugaccuagauugcuu

SEQ ID NO: 2476903 - RNA, 19 nt, Artificial Sequence
  Description of Artificial Sequence: Synthetic oligonucleotide
gacagcaccuaucggcggu

SEQ ID NO: 2476904 - RNA, 19 nt, Artificial Sequence
  Description of Artificial Sequence: Synthetic oligonucleotide
gugguuggggcgucgugca

SEQ ID NO: 2476905 - RNA, 19 nt, Artificial Sequence
  Description of Artificial Sequence: Synthetic oligonucleotide
agaggacauaaaauuugua

SEQ ID NO: 2476906 - RNA, 19 nt, Artificial Sequence
  Description of Artificial Sequence: Synthetic oligonucleotide
agcgcagagggagcucccg

SEQ ID NO: 2476907 - RNA, 19 nt, Artificial Sequence
  Description of Artificial Sequence: Synthetic oligonucleotide
aggcccugaaagucuuccu

SEQ ID NO: 2476908 - RNA, 19 nt, Artificial Sequence
  Description of Artificial Sequence: Synthetic oligonucleotide
cccgaucuccucauugccc

SEQ ID NO: 2476909 - RNA, 19 nt, Artificial Sequence
  Description of Artificial Sequence: Synthetic oligonucleotide
caccuuuaccauauacaua

SEQ ID NO: 2476910 - RNA, 19 nt, Artificial Sequence
  Description of Artificial Sequence: Synthetic oligonucleotide
gagugagcuuugacagcag

SEQ ID NO: 2476911 - RNA, 19 nt, Artificial Sequence
  Description of Artificial Sequence: Synthetic oligonucleotide
gggagugagcuuugacagc

SEQ ID NO: 2476912 - RNA, 19 nt, Artificial Sequence
  Description of Artificial Sequence: Synthetic oligonucleotide
caagggaccaucagcugcu

SEQ ID NO: 2476913 - RNA, 19 nt, Artificial Sequence
  Description of Artificial Sequence: Synthetic oligonucleotide
gaccaucagcugcuugguc

SEQ ID NO: 2476914 - RNA, 19 nt, Artificial Sequence
  Description of Artificial Sequence: Synthetic oligonucleotide
acgugucccacagacggau

SEQ ID NO: 2476915 - RNA, 19 nt, Artificial Sequence
  Description of Artificial Sequence: Synthetic oligonucleotide
cacacacgcggugggagug

SEQ ID NO: 2476916 - RNA, 19 nt, Artificial Sequence
  Description of Artificial Sequence: Synthetic oligonucleotide
gguucugauggguuauucu

SEQ ID NO: 2476917 - RNA, 19 nt, Artificial Sequence
  Description of Artificial Sequence: Synthetic oligonucleotide
aucggcgguagugguuggg

SEQ ID NO: 2476918 - RNA, 19 nt, Artificial Sequence
  Description of Artificial Sequence: Synthetic oligonucleotide
auggguuauucuagacaca

SEQ ID NO: 2476919 - RNA, 19 nt, Artificial Sequence
  Description of Artificial Sequence: Synthetic oligonucleotide
ggucccuaggguccuuccc

SEQ ID NO: 2476920 - RNA, 19 nt, Artificial Sequence
  Description of Artificial Sequence: Synthetic oligonucleotide
agcagcccgaucuccucau

SEQ ID NO: 2476921 - RNA, 19 nt, Artificial Sequence
  Description of Artificial Sequence: Synthetic oligonucleotide
agcaccuaucggcgguagu

SEQ ID NO: 2476922 - RNA, 19 nt, Artificial Sequence
  Description of Artificial Sequence: Synthetic oligonucleotide
ccaguggauuguaggcagg

SEQ ID NO: 2476923 - RNA, 19 nt, Artificial Sequence
  Description of Artificial Sequence: Synthetic oligonucleotide
cacguagagauggaagugu

SEQ ID NO: 2476924 - RNA, 19 nt, Artificial Sequence
  Description of Artificial Sequence: Synthetic oligonucleotide
ccacuugaucaagaaggcc

SEQ ID NO: 2476925 - RNA, 19 nt, Artificial Sequence
  Description of Artificial Sequence: Synthetic oligonucleotide
gcccgaucuccucauugcc

SEQ ID NO: 2476926 - RNA, 19 nt, Artificial Sequence
  Description of Artificial Sequence: Synthetic oligonucleotide
uggcucagacugguacgug

SEQ ID NO: 2476927 - RNA, 19 nt, Artificial Sequence
  Description of Artificial Sequence: Synthetic oligonucleotide
cgcaucaggagguuguuca

SEQ ID NO: 2476928 - RNA, 19 nt, Artificial Sequence
  Description of Artificial Sequence: Synthetic oligonucleotide
cagagggagcucccgcauc

SEQ ID NO: 2476929 - RNA, 19 nt, Artificial Sequence
  Description of Artificial Sequence: Synthetic oligonucleotide
aaaugcugauaggccugua

SEQ ID NO: 2476930 - RNA, 19 nt, Artificial Sequence
  Description of Artificial Sequence: Synthetic oligonucleotide
aguggauuguaggcagguu

SEQ ID NO: 2476931 - RNA, 19 nt, Artificial Sequence
  Description of Artificial Sequence: Synthetic oligonucleotide
gaggaggcccugaaagucu

SEQ ID NO: 2476932 - RNA, 19 nt, Artificial Sequence
  Description of Artificial Sequence: Synthetic oligonucleotide
ggggcagucugguccccgg

SEQ ID NO: 2476933 - RNA, 19 nt, Artificial Sequence
  Description of Artificial Sequence: Synthetic oligonucleotide
cuugaucaagaaggccgca

SEQ ID NO: 2476934 - RNA, 19 nt, Artificial Sequence
  Description of Artificial Sequence: Synthetic oligonucleotide
augugacaaaaugcugaua

SEQ ID NO: 2476935 - RNA, 19 nt, Artificial Sequence
  Description of Artificial Sequence: Synthetic oligonucleotide
cuguaugccucggccagca

SEQ ID NO: 2476936 - RNA, 19 nt, Artificial Sequence
  Description of Artificial Sequence: Synthetic oligonucleotide
aggccuguauacacacgca

SEQ ID NO: 2476937 - RNA, 19 nt, Artificial Sequence
  Description of Artificial Sequence: Synthetic oligonucleotide
gcagcgcagagggagcucc

SEQ ID NO: 2476938 - RNA, 19 nt, Artificial Sequence
  Description of Artificial Sequence: Synthetic oligonucleotide
gccuguauacacacgcaca

SEQ ID NO: 2476939 - RNA, 19 nt, Artificial Sequence
  Description of Artificial Sequence: Synthetic oligonucleotide
gccgcacacacguagagau

SEQ ID NO: 2476940 - RNA, 19 nt, Artificial Sequence
  Description of Artificial Sequence: Synthetic oligonucleotide
gguagugguuggggcgucg

SEQ ID NO: 2476941 - RNA, 19 nt, Artificial Sequence
  Description of Artificial Sequence: Synthetic oligonucleotide
ugguuggggcgucgugcaa

SEQ ID NO: 2476942 - RNA, 19 nt, Artificial Sequence
  Description of Artificial Sequence: Synthetic oligonucleotide
ccacggcuugcacaguggc

SEQ ID NO: 2476943 - RNA, 19 nt, Artificial Sequence
  Description of Artificial Sequence: Synthetic oligonucleotide
gacagcaggagugguuccu

SEQ ID NO: 2476944 - RNA, 19 nt, Artificial Sequence
  Description of Artificial Sequence: Synthetic oligonucleotide
auccaccgaaaggcaaacu

SEQ ID NO: 2476945 - RNA, 19 nt, Artificial Sequence
  Description of Artificial Sequence: Synthetic oligonucleotide
ccucucaagggaccaucag

SEQ ID NO: 2476946 - RNA, 19 nt, Artificial Sequence
  Description of Artificial Sequence: Synthetic oligonucleotide
cacgcggugggagugagcu

SEQ ID NO: 2476947 - RNA, 19 nt, Artificial Sequence
  Description of Artificial Sequence: Synthetic oligonucleotide
cagcgcagagggagcuccc

SEQ ID NO: 2476948 - RNA, 19 nt, Artificial Sequence
  Description of Artificial Sequence: Synthetic oligonucleotide
ccugaaagucuuccucauc

SEQ ID NO: 2476949 - RNA, 19 nt, Artificial Sequence
  Description of Artificial Sequence: Synthetic oligonucleotide
auugccccaguggauugua

SEQ ID NO: 2476950 - RNA, 19 nt, Artificial Sequence
  Description of Artificial Sequence: Synthetic oligonucleotide
aggguccuucccaacuggu

SEQ ID NO: 2476951 - RNA, 19 nt, Artificial Sequence
  Description of Artificial Sequence: Synthetic oligonucleotide
acacgcggugggagugagc

SEQ ID NO: 2476952 - RNA, 19 nt, Artificial Sequence
  Description of Artificial Sequence: Synthetic oligonucleotide
ggagugguuccuggccggg

SEQ ID NO: 2476953 - RNA, 19 nt, Artificial Sequence
  Description of Artificial Sequence: Synthetic oligonucleotide
gugguuccuggccgggguc

SEQ ID NO: 2476954 - RNA, 19 nt, Artificial Sequence
  Description of Artificial Sequence: Synthetic oligonucleotide
cacacgcggugggagugag

SEQ ID NO: 2476955 - RNA, 19 nt, Artificial Sequence
  Description of Artificial Sequence: Synthetic oligonucleotide
ggggcgucgugcaaacaug

SEQ ID NO: 2476956 - RNA, 19 nt, Artificial Sequence
  Description of Artificial Sequence: Synthetic oligonucleotide
gucgugcaaacauguacuu

SEQ ID NO: 2476957 - RNA, 19 nt, Artificial Sequence
  Description of Artificial Sequence: Synthetic oligonucleotide
gcucagacugguacguguc

SEQ ID NO: 2476958 - RNA, 19 nt, Artificial Sequence
  Description of Artificial Sequence: Synthetic oligonucleotide
cagcaccuaucggcgguag

SEQ ID NO: 2476959 - RNA, 19 nt, Artificial Sequence
  Description of Artificial Sequence: Synthetic oligonucleotide
acacacgcggugggaguga

SEQ ID NO: 2476960 - RNA, 19 nt, Artificial Sequence
  Description of Artificial Sequence: Synthetic oligonucleotide
cucauugccccaguggauu

SEQ ID NO: 2476961 - RNA, 19 nt, Artificial Sequence
  Description of Artificial Sequence: Synthetic oligonucleotide
uggccgggguccacggcuu

SEQ ID NO: 2476962 - RNA, 19 nt, Artificial Sequence
  Description of Artificial Sequence: Synthetic oligonucleotide
ggagugguucacccuggaa

SEQ ID NO: 2476963 - RNA, 19 nt, Artificial Sequence
  Description of Artificial Sequence: Synthetic oligonucleotide
uuggggcgucgugcaaaca

SEQ ID NO: 2476964 - RNA, 19 nt, Artificial Sequence
  Description of Artificial Sequence: Synthetic oligonucleotide
cucccgcaucaggagguug

SEQ ID NO: 2476965 - RNA, 19 nt, Artificial Sequence
  Description of Artificial Sequence: Synthetic oligonucleotide
cgucgugcaaacauguacu

SEQ ID NO: 2476966 - RNA, 19 nt, Artificial Sequence
  Description of Artificial Sequence: Synthetic oligonucleotide
ccacagacggauggugcag

SEQ ID NO: 2476967 - RNA, 19 nt, Artificial Sequence
  Description of Artificial Sequence: Synthetic oligonucleotide
aggaggcccugaaagucuu

SEQ ID NO: 2476968 - RNA, 19 nt, Artificial Sequence
  Description of Artificial Sequence: Synthetic oligonucleotide
acagcaccuaucggcggua

SEQ ID NO: 2476969 - RNA, 19 nt, Artificial Sequence
  Description of Artificial Sequence: Synthetic oligonucleotide
caacugguucugauggguu

SEQ ID NO: 2476970 - RNA, 19 nt, Artificial Sequence
  Description of Artificial Sequence: Synthetic oligonucleotide
gcgcagagggagcucccgc

SEQ ID NO: 2476971 - RNA, 19 nt, Artificial Sequence
  Description of Artificial Sequence: Synthetic oligonucleotide
cugugcuaaugaccuagau

SEQ ID NO: 2476972 - RNA, 19 nt, Artificial Sequence
  Description of Artificial Sequence: Synthetic oligonucleotide
cguagagauggaaguguga

SEQ ID NO: 2476973 - RNA, 19 nt, Artificial Sequence
  Description of Artificial Sequence: Synthetic oligonucleotide
cuggcucagacugguacgu

SEQ ID NO: 2476974 - RNA, 19 nt, Artificial Sequence
  Description of Artificial Sequence: Synthetic oligonucleotide
gguuggggcgucgugcaaa

SEQ ID NO: 2476975 - RNA, 19 nt, Artificial Sequence
  Description of Artificial Sequence: Synthetic oligonucleotide
caguggauuguaggcaggu

SEQ ID NO: 2476976 - RNA, 19 nt, Artificial Sequence
  Description of Artificial Sequence: Synthetic oligonucleotide
uccccugcccuggucccuc

SEQ ID NO: 2476977 - RNA, 19 nt, Artificial Sequence
  Description of Artificial Sequence: Synthetic oligonucleotide
ggucccucucaagggacca

SEQ ID NO: 2476978 - RNA, 19 nt, Artificial Sequence
  Description of Artificial Sequence: Synthetic oligonucleotide
ccgcacacacguagagaug

SEQ ID NO: 2476979 - RNA, 19 nt, Artificial Sequence
  Description of Artificial Sequence: Synthetic oligonucleotide
cugguacgugucccacaga

SEQ ID NO: 2476980 - RNA, 19 nt, Artificial Sequence
  Description of Artificial Sequence: Synthetic oligonucleotide
cugcccuggucccucucaa

SEQ ID NO: 2476981 - RNA, 19 nt, Artificial Sequence
  Description of Artificial Sequence: Synthetic oligonucleotide
ccuaggguccuucccaacu

SEQ ID NO: 2476982 - RNA, 19 nt, Artificial Sequence
  Description of Artificial Sequence: Synthetic oligonucleotide
ggguuauucuagacacaaa

SEQ ID NO: 2476983 - RNA, 19 nt, Artificial Sequence
  Description of Artificial Sequence: Synthetic oligonucleotide
cuucuggcucagacuggua

SEQ ID NO: 2476984 - RNA, 19 nt, Artificial Sequence
  Description of Artificial Sequence: Synthetic oligonucleotide
cggcgguagugguuggggc

SEQ ID NO: 2476985 - RNA, 19 nt, Artificial Sequence
  Description of Artificial Sequence: Synthetic oligonucleotide
ggccgcacacacguagaga

SEQ ID NO: 2476986 - RNA, 19 nt, Artificial Sequence
  Description of Artificial Sequence: Synthetic oligonucleotide
agaaggccgcacacacgua

SEQ ID NO: 2476987 - RNA, 19 nt, Artificial Sequence
  Description of Artificial Sequence: Synthetic oligonucleotide
ccccaguggauuguaggca

SEQ ID NO: 2476988 - RNA, 19 nt, Artificial Sequence
  Description of Artificial Sequence: Synthetic oligonucleotide
cccuaggguccuucccaac

SEQ ID NO: 2476989 - RNA, 19 nt, Artificial Sequence
  Description of Artificial Sequence: Synthetic oligonucleotide
acgcggugggagugagcuu

SEQ ID NO: 2476990 - RNA, 19 nt, Artificial Sequence
  Description of Artificial Sequence: Synthetic oligonucleotide
guuccuggccgggguccac

SEQ ID NO: 2476991 - RNA, 19 nt, Artificial Sequence
  Description of Artificial Sequence: Synthetic oligonucleotide
ggaccaucagcugcuuggu

SEQ ID NO: 2476992 - RNA, 19 nt, Artificial Sequence
  Description of Artificial Sequence: Synthetic oligonucleotide
cauugccccaguggauugu

SEQ ID NO: 2476993 - RNA, 19 nt, Artificial Sequence
  Description of Artificial Sequence: Synthetic oligonucleotide
gggcgucgugcaaacaugu

SEQ ID NO: 2476994 - RNA, 19 nt, Artificial Sequence
  Description of Artificial Sequence: Synthetic oligonucleotide
gcacacacguagagaugga

SEQ ID NO: 2476995 - RNA, 19 nt, Artificial Sequence
  Description of Artificial Sequence: Synthetic oligonucleotide
cuugcacaguggccacagu

SEQ ID NO: 2476996 - RNA, 19 nt, Artificial Sequence
  Description of Artificial Sequence: Synthetic oligonucleotide
cgcagagggagcucccgca

SEQ ID NO: 2476997 - RNA, 19 nt, Artificial Sequence
  Description of Artificial Sequence: Synthetic oligonucleotide
gguuccuggccggggucca

SEQ ID NO: 2476998 - RNA, 19 nt, Artificial Sequence
  Description of Artificial Sequence: Synthetic oligonucleotide
gcagagggagcucccgcau

SEQ ID NO: 2476999 - RNA, 19 nt, Artificial Sequence
  Description of Artificial Sequence: Synthetic oligonucleotide
ggaggcccugaaagucuuc

SEQ ID NO: 2477000 - RNA, 19 nt, Artificial Sequence
  Description of Artificial Sequence: Synthetic oligonucleotide
ggcuugcacaguggccaca

SEQ ID NO: 2477001 - RNA, 19 nt, Artificial Sequence
  Description of Artificial Sequence: Synthetic oligonucleotide
ggccgggguccacggcuug

SEQ ID NO: 2477002 - RNA, 19 nt, Artificial Sequence
  Description of Artificial Sequence: Synthetic oligonucleotide
gcgguagugguuggggcgu

SEQ ID NO: 2477003 - RNA, 19 nt, Artificial Sequence
  Description of Artificial Sequence: Synthetic oligonucleotide
cugcuacaaagaggacaua

SEQ ID NO: 2477004 - RNA, 19 nt, Artificial Sequence
  Description of Artificial Sequence: Synthetic oligonucleotide
ccgcaucaggagguuguuc

SEQ ID NO: 2477005 - RNA, 19 nt, Artificial Sequence
  Description of Artificial Sequence: Synthetic oligonucleotide
gcggugggagugagcuuug

SEQ ID NO: 2477006 - RNA, 19 nt, Artificial Sequence
  Description of Artificial Sequence: Synthetic oligonucleotide
gccgggguccacggcuugc

SEQ ID NO: 2477007 - RNA, 19 nt, Artificial Sequence
  Description of Artificial Sequence: Synthetic oligonucleotide
ggcgucgugcaaacaugua

SEQ ID NO: 2477008 - RNA, 19 nt, Artificial Sequence
  Description of Artificial Sequence: Synthetic oligonucleotide
cggcuugcacaguggccac

SEQ ID NO: 2477009 - RNA, 19 nt, Artificial Sequence
  Description of Artificial Sequence: Synthetic oligonucleotide
ccuuuaccauauacauaau

SEQ ID NO: 2477010 - RNA, 19 nt, Artificial Sequence
  Description of Artificial Sequence: Synthetic oligonucleotide
ccucauugccccaguggau

SEQ ID NO: 2477011 - RNA, 19 nt, Artificial Sequence
  Description of Artificial Sequence: Synthetic oligonucleotide
ccuaucggcgguagugguu

SEQ ID NO: 2477012 - RNA, 19 nt, Artificial Sequence
  Description of Artificial Sequence: Synthetic oligonucleotide
cgaucuccucauugcccca

SEQ ID NO: 2477013 - RNA, 19 nt, Artificial Sequence
  Description of Artificial Sequence: Synthetic oligonucleotide
ccuucccaacugguucuga

SEQ ID NO: 2477014 - RNA, 19 nt, Artificial Sequence
  Description of Artificial Sequence: Synthetic oligonucleotide
ggguccuucccaacugguu

SEQ ID NO: 2477015 - RNA, 19 nt, Artificial Sequence
  Description of Artificial Sequence: Synthetic oligonucleotide
cgggguccacggcuugcac

SEQ ID NO: 2477016 - RNA, 19 nt, Artificial Sequence
  Description of Artificial Sequence: Synthetic oligonucleotide
ccgggguccacggcuugca

SEQ ID NO: 2477017 - RNA, 19 nt, Artificial Sequence
  Description of Artificial Sequence: Synthetic oligonucleotide
cucccuccccugcccuggu

SEQ ID NO: 2477018 - RNA, 19 nt, Artificial Sequence
  Description of Artificial Sequence: Synthetic oligonucleotide
cccugcccuggucccucuc

SEQ ID NO: 2477019 - RNA, 19 nt, Artificial Sequence
  Description of Artificial Sequence: Synthetic oligonucleotide
cgcggugggagugagcuuu

SEQ ID NO: 2477020 - RNA, 19 nt, Artificial Sequence
  Description of Artificial Sequence: Synthetic oligonucleotide
cuuggucccuaggguccuu

SEQ ID NO: 2477021 - RNA, 19 nt, Artificial Sequence
  Description of Artificial Sequence: Synthetic oligonucleotide
gguccacggcuugcacagu

SEQ ID NO: 2477022 - RNA, 19 nt, Artificial Sequence
  Description of Artificial Sequence: Synthetic oligonucleotide
gcagcccgaucuccucauu

SEQ ID NO: 2477023 - RNA, 19 nt, Artificial Sequence
  Description of Artificial Sequence: Synthetic oligonucleotide
cgguagugguuggggcguc

SEQ ID NO: 2477024 - RNA, 19 nt, Artificial Sequence
  Description of Artificial Sequence: Synthetic oligonucleotide
gcucccgcaucaggagguu

SEQ ID NO: 2477025 - RNA, 19 nt, Artificial Sequence
  Description of Artificial Sequence: Synthetic oligonucleotide
cccgcaucaggagguuguu

SEQ ID NO: 2477026 - RNA, 19 nt, Artificial Sequence
  Description of Artificial Sequence: Synthetic oligonucleotide
uuuacuguuauccacggga

SEQ ID NO: 2477027 - RNA, 19 nt, Artificial Sequence
  Description of Artificial Sequence: Synthetic oligonucleotide
uguuguguaauaagguugg

SEQ ID NO: 2477028 - RNA, 19 nt, Artificial Sequence
  Description of Artificial Sequence: Synthetic oligonucleotide
aauaagguuggguaccauc

SEQ ID NO: 2477029 - RNA, 19 nt, Artificial Sequence
  Description of Artificial Sequence: Synthetic oligonucleotide
aacacguaagugaagagac

SEQ ID NO: 2477030 - RNA, 19 nt, Artificial Sequence
  Description of Artificial Sequence: Synthetic oligonucleotide
aaggccaaggcaucgaggg

SEQ ID NO: 2477031 - RNA, 19 nt, Artificial Sequence
  Description of Artificial Sequence: Synthetic oligonucleotide
acuugaaagaguaaccucc

SEQ ID NO: 2477032 - RNA, 19 nt, Artificial Sequence
  Description of Artificial Sequence: Synthetic oligonucleotide
aguagaggccgcuaggugc

SEQ ID NO: 2477033 - RNA, 19 nt, Artificial Sequence
  Description of Artificial Sequence: Synthetic oligonucleotide
uuagauacaagcacagugu

SEQ ID NO: 2477034 - RNA, 19 nt, Artificial Sequence
  Description of Artificial Sequence: Synthetic oligonucleotide
ugcaguacagcccagcgag

SEQ ID NO: 2477035 - RNA, 19 nt, Artificial Sequence
  Description of Artificial Sequence: Synthetic oligonucleotide
ugggcuaccaggaaaggcg

SEQ ID NO: 2477036 - RNA, 19 nt, Artificial Sequence
  Description of Artificial Sequence: Synthetic oligonucleotide
agaagguucuuccggaggc

SEQ ID NO: 2477037 - RNA, 19 nt, Artificial Sequence
  Description of Artificial Sequence: Synthetic oligonucleotide
ugugggaugaggaaacaag

SEQ ID NO: 2477038 - RNA, 19 nt, Artificial Sequence
  Description of Artificial Sequence: Synthetic oligonucleotide
uguguaauaagguugggua

SEQ ID NO: 2477039 - RNA, 19 nt, Artificial Sequence
  Description of Artificial Sequence: Synthetic oligonucleotide
ggugcuuuuagauacaagc

SEQ ID NO: 2477040 - RNA, 19 nt, Artificial Sequence
  Description of Artificial Sequence: Synthetic oligonucleotide
aagaguaaccuccaucuga

SEQ ID NO: 2477041 - RNA, 19 nt, Artificial Sequence
  Description of Artificial Sequence: Synthetic oligonucleotide
cauacuugaaagaguaacc

SEQ ID NO: 2477042 - RNA, 19 nt, Artificial Sequence
  Description of Artificial Sequence: Synthetic oligonucleotide
ugcuuuuagauacaagcac

SEQ ID NO: 2477043 - RNA, 19 nt, Artificial Sequence
  Description of Artificial Sequence: Synthetic oligonucleotide
aaagcuaggacaggguggg

SEQ ID NO: 2477044 - RNA, 19 nt, Artificial Sequence
  Description of Artificial Sequence: Synthetic oligonucleotide
aaggcguggucucuggucg

SEQ ID NO: 2477045 - RNA, 19 nt, Artificial Sequence
  Description of Artificial Sequence: Synthetic oligonucleotide
aaacaaggugcuuuuagau

SEQ ID NO: 2477046 - RNA, 19 nt, Artificial Sequence
  Description of Artificial Sequence: Synthetic oligonucleotide
uguguggaaccacaacugg

SEQ ID NO: 2477047 - RNA, 19 nt, Artificial Sequence
  Description of Artificial Sequence: Synthetic oligonucleotide
acuguuauccacgggaugg

SEQ ID NO: 2477048 - RNA, 19 nt, Artificial Sequence
  Description of Artificial Sequence: Synthetic oligonucleotide
uguagggaagaggacaugg

SEQ ID NO: 2477049 - RNA, 19 nt, Artificial Sequence
  Description of Artificial Sequence: Synthetic oligonucleotide
ucauacuugaaagaguaac

SEQ ID NO: 2477050 - RNA, 19 nt, Artificial Sequence
  Description of Artificial Sequence: Synthetic oligonucleotide
cuuuuagauacaagcacag

SEQ ID NO: 2477051 - RNA, 19 nt, Artificial Sequence
  Description of Artificial Sequence: Synthetic oligonucleotide
uguaauaagguuggguacc

SEQ ID NO: 2477052 - RNA, 19 nt, Artificial Sequence
  Description of Artificial Sequence: Synthetic oligonucleotide
ucguccuagcugaugaugg

SEQ ID NO: 2477053 - RNA, 19 nt, Artificial Sequence
  Description of Artificial Sequence: Synthetic oligonucleotide
aaaggcguggucucugguc

SEQ ID NO: 2477054 - RNA, 19 nt, Artificial Sequence
  Description of Artificial Sequence: Synthetic oligonucleotide
ucuuuacuguuauccacgg

SEQ ID NO: 2477055 - RNA, 19 nt, Artificial Sequence
  Description of Artificial Sequence: Synthetic oligonucleotide
acaguguuguguaauaagg

SEQ ID NO: 2477056 - RNA, 19 nt, Artificial Sequence
  Description of Artificial Sequence: Synthetic oligonucleotide
aucgggguggaauaggguc

SEQ ID NO: 2477057 - RNA, 19 nt, Artificial Sequence
  Description of Artificial Sequence: Synthetic oligonucleotide
aguaaccuccaucugaggu

SEQ ID NO: 2477058 - RNA, 19 nt, Artificial Sequence
  Description of Artificial Sequence: Synthetic oligonucleotide
ucucuggucgagcugagca

SEQ ID NO: 2477059 - RNA, 19 nt, Artificial Sequence
  Description of Artificial Sequence: Synthetic oligonucleotide
guagacgcaaagcugcagg

SEQ ID NO: 2477060 - RNA, 19 nt, Artificial Sequence
  Description of Artificial Sequence: Synthetic oligonucleotide
caaagcuaggacagggugg

SEQ ID NO: 2477061 - RNA, 19 nt, Artificial Sequence
  Description of Artificial Sequence: Synthetic oligonucleotide
ugcaguagacgcaaagcug

SEQ ID NO: 2477062 - RNA, 19 nt, Artificial Sequence
  Description of Artificial Sequence: Synthetic oligonucleotide
cagacaugaaaguguaggg

SEQ ID NO: 2477063 - RNA, 19 nt, Artificial Sequence
  Description of Artificial Sequence: Synthetic oligonucleotide
caucgaggggaguugaacg

SEQ ID NO: 2477064 - RNA, 19 nt, Artificial Sequence
  Description of Artificial Sequence: Synthetic oligonucleotide
aaagcugcaggagaccaag

SEQ ID NO: 2477065 - RNA, 19 nt, Artificial Sequence
  Description of Artificial Sequence: Synthetic oligonucleotide
ugaagagaccuucuccagc

SEQ ID NO: 2477066 - RNA, 19 nt, Artificial Sequence
  Description of Artificial Sequence: Synthetic oligonucleotide
aaguguagggaagaggaca

SEQ ID NO: 2477067 - RNA, 19 nt, Artificial Sequence
  Description of Artificial Sequence: Synthetic oligonucleotide
aaagaguaaccuccaucug

SEQ ID NO: 2477068 - RNA, 19 nt, Artificial Sequence
  Description of Artificial Sequence: Synthetic oligonucleotide
auggaaaccgucuguuuuc

SEQ ID NO: 2477069 - RNA, 19 nt, Artificial Sequence
  Description of Artificial Sequence: Synthetic oligonucleotide
ugaacgucgggcccucucg

SEQ ID NO: 2477070 - RNA, 19 nt, Artificial Sequence
  Description of Artificial Sequence: Synthetic oligonucleotide
caucucauacuugaaagag

SEQ ID NO: 2477071 - RNA, 19 nt, Artificial Sequence
  Description of Artificial Sequence: Synthetic oligonucleotide
gaaacaaggugcuuuuaga

SEQ ID NO: 2477072 - RNA, 19 nt, Artificial Sequence
  Description of Artificial Sequence: Synthetic oligonucleotide
cauguguugggaugggccg

SEQ ID NO: 2477073 - RNA, 19 nt, Artificial Sequence
  Description of Artificial Sequence: Synthetic oligonucleotide
cuucuuuacuguuauccac

SEQ ID NO: 2477074 - RNA, 19 nt, Artificial Sequence
  Description of Artificial Sequence: Synthetic oligonucleotide
gaaaccgucuguuuuccac

SEQ ID NO: 2477075 - RNA, 19 nt, Artificial Sequence
  Description of Artificial Sequence: Synthetic oligonucleotide
acuauuggaggccucggug

SEQ ID NO: 2477076 - RNA, 19 nt, Artificial Sequence
  Description of Artificial Sequence: Synthetic oligonucleotide
uuggguaccaucucauacu

SEQ ID NO: 2477077 - RNA, 19 nt, Artificial Sequence
  Description of Artificial Sequence: Synthetic oligonucleotide
cacuggguggucuagcccg

SEQ ID NO: 2477078 - RNA, 19 nt, Artificial Sequence
  Description of Artificial Sequence: Synthetic oligonucleotide
auacuugaaagaguaaccu

SEQ ID NO: 2477079 - RNA, 19 nt, Artificial Sequence
  Description of Artificial Sequence: Synthetic oligonucleotide
agggucugggcccucagac

SEQ ID NO: 2477080 - RNA, 19 nt, Artificial Sequence
  Description of Artificial Sequence: Synthetic oligonucleotide
aguguuguguaauaagguu

SEQ ID NO: 2477081 - RNA, 19 nt, Artificial Sequence
  Description of Artificial Sequence: Synthetic oligonucleotide
aaaguguagggaagaggac

SEQ ID NO: 2477082 - RNA, 19 nt, Artificial Sequence
  Description of Artificial Sequence: Synthetic oligonucleotide
gauacaagcacaguguugu

SEQ ID NO: 2477083 - RNA, 19 nt, Artificial Sequence
  Description of Artificial Sequence: Synthetic oligonucleotide
agaacuauuggaggccucg

SEQ ID NO: 2477084 - RNA, 19 nt, Artificial Sequence
  Description of Artificial Sequence: Synthetic oligonucleotide
guaaccuccaucugaggug

SEQ ID NO: 2477085 - RNA, 19 nt, Artificial Sequence
  Description of Artificial Sequence: Synthetic oligonucleotide
cacaguguuguguaauaag

SEQ ID NO: 2477086 - RNA, 19 nt, Artificial Sequence
  Description of Artificial Sequence: Synthetic oligonucleotide
guuggguaccaucucauac

SEQ ID NO: 2477087 - RNA, 19 nt, Artificial Sequence
  Description of Artificial Sequence: Synthetic oligonucleotide
ucucgcuugcacugggugg

SEQ ID NO: 2477088 - RNA, 19 nt, Artificial Sequence
  Description of Artificial Sequence: Synthetic oligonucleotide
auaaugguggcuauuggcu

SEQ ID NO: 2477089 - RNA, 19 nt, Artificial Sequence
  Description of Artificial Sequence: Synthetic oligonucleotide
aggugguucggacacguag

SEQ ID NO: 2477090 - RNA, 19 nt, Artificial Sequence
  Description of Artificial Sequence: Synthetic oligonucleotide
accucaugcucccugguag

SEQ ID NO: 2477091 - RNA, 19 nt, Artificial Sequence
  Description of Artificial Sequence: Synthetic oligonucleotide
guguuguguaauaagguug

SEQ ID NO: 2477092 - RNA, 19 nt, Artificial Sequence
  Description of Artificial Sequence: Synthetic oligonucleotide
ggaaacaaggugcuuuuag

SEQ ID NO: 2477093 - RNA, 19 nt, Artificial Sequence
  Description of Artificial Sequence: Synthetic oligonucleotide
aggagaccaaggccaaggc

SEQ ID NO: 2477094 - RNA, 19 nt, Artificial Sequence
  Description of Artificial Sequence: Synthetic oligonucleotide
gguaccaucucauacuuga

SEQ ID NO: 2477095 - RNA, 19 nt, Artificial Sequence
  Description of Artificial Sequence: Synthetic oligonucleotide
auaagguuggguaccaucu

SEQ ID NO: 2477096 - RNA, 19 nt, Artificial Sequence
  Description of Artificial Sequence: Synthetic oligonucleotide
uccugucuagcccugugug

SEQ ID NO: 2477097 - RNA, 19 nt, Artificial Sequence
  Description of Artificial Sequence: Synthetic oligonucleotide
uacuugaaagaguaaccuc

SEQ ID NO: 2477098 - RNA, 19 nt, Artificial Sequence
  Description of Artificial Sequence: Synthetic oligonucleotide
gagaguagaggccgcuagg

SEQ ID NO: 2477099 - RNA, 19 nt, Artificial Sequence
  Description of Artificial Sequence: Synthetic oligonucleotide
ucuggucgagcugagcagg

SEQ ID NO: 2477100 - RNA, 19 nt, Artificial Sequence
  Description of Artificial Sequence: Synthetic oligonucleotide
guguaauaagguuggguac

SEQ ID NO: 2477101 - RNA, 19 nt, Artificial Sequence
  Description of Artificial Sequence: Synthetic oligonucleotide
aacuauuggaggccucggu

SEQ ID NO: 2477102 - RNA, 19 nt, Artificial Sequence
  Description of Artificial Sequence: Synthetic oligonucleotide
agaguaaccuccaucugag

SEQ ID NO: 2477103 - RNA, 19 nt, Artificial Sequence
  Description of Artificial Sequence: Synthetic oligonucleotide
aucgcagcagcaaagcuag

SEQ ID NO: 2477104 - RNA, 19 nt, Artificial Sequence
  Description of Artificial Sequence: Synthetic oligonucleotide
agcagcaaagcuaggacag

SEQ ID NO: 2477105 - RNA, 19 nt, Artificial Sequence
  Description of Artificial Sequence: Synthetic oligonucleotide
ucuagcccggguaugggcu

SEQ ID NO: 2477106 - RNA, 19 nt, Artificial Sequence
  Description of Artificial Sequence: Synthetic oligonucleotide
ugcgcauguguugggaugg

SEQ ID NO: 2477107 - RNA, 19 nt, Artificial Sequence
  Description of Artificial Sequence: Synthetic oligonucleotide
uuauccacgggaugggauc

SEQ ID NO: 2477108 - RNA, 19 nt, Artificial Sequence
  Description of Artificial Sequence: Synthetic oligonucleotide
uuacuguuauccacgggau

SEQ ID NO: 2477109 - RNA, 19 nt, Artificial Sequence
  Description of Artificial Sequence: Synthetic oligonucleotide
cucgaugacaguaggcgug

SEQ ID NO: 2477110 - RNA, 19 nt, Artificial Sequence
  Description of Artificial Sequence: Synthetic oligonucleotide
gaacacguaagugaagaga

SEQ ID NO: 2477111 - RNA, 19 nt, Artificial Sequence
  Description of Artificial Sequence: Synthetic oligonucleotide
ucuagcagggucccagaac

SEQ ID NO: 2477112 - RNA, 19 nt, Artificial Sequence
  Description of Artificial Sequence: Synthetic oligonucleotide
uagauacaagcacaguguu

SEQ ID NO: 2477113 - RNA, 19 nt, Artificial Sequence
  Description of Artificial Sequence: Synthetic oligonucleotide
acaacugggcugaagucac

SEQ ID NO: 2477114 - RNA, 19 nt, Artificial Sequence
  Description of Artificial Sequence: Synthetic oligonucleotide
uuguguaauaagguugggu

SEQ ID NO: 2477115 - RNA, 19 nt, Artificial Sequence
  Description of Artificial Sequence: Synthetic oligonucleotide
gaugacaguaggcgugggc

SEQ ID NO: 2477116 - RNA, 19 nt, Artificial Sequence
  Description of Artificial Sequence: Synthetic oligonucleotide
guaugggcuaccaggaaag

SEQ ID NO: 2477117 - RNA, 19 nt, Artificial Sequence
  Description of Artificial Sequence: Synthetic oligonucleotide
agcgaggagggcccugucc

SEQ ID NO: 2477118 - RNA, 19 nt, Artificial Sequence
  Description of Artificial Sequence: Synthetic oligonucleotide
gacgcaaagcugcaggaga

SEQ ID NO: 2477119 - RNA, 19 nt, Artificial Sequence
  Description of Artificial Sequence: Synthetic oligonucleotide
uuuuccacauucugcuuuc

SEQ ID NO: 2477120 - RNA, 19 nt, Artificial Sequence
  Description of Artificial Sequence: Synthetic oligonucleotide
guugggaugggccggaaca

SEQ ID NO: 2477121 - RNA, 19 nt, Artificial Sequence
  Description of Artificial Sequence: Synthetic oligonucleotide
gguagagcagccucgauga

SEQ ID NO: 2477122 - RNA, 19 nt, Artificial Sequence
  Description of Artificial Sequence: Synthetic oligonucleotide
gggaugaggaaacaaggug

SEQ ID NO: 2477123 - RNA, 19 nt, Artificial Sequence
  Description of Artificial Sequence: Synthetic oligonucleotide
cuuucguccuagcugauga

SEQ ID NO: 2477124 - RNA, 19 nt, Artificial Sequence
  Description of Artificial Sequence: Synthetic oligonucleotide
uacuguuauccacgggaug

SEQ ID NO: 2477125 - RNA, 19 nt, Artificial Sequence
  Description of Artificial Sequence: Synthetic oligonucleotide
uggaaccacaacugggcug

SEQ ID NO: 2477126 - RNA, 19 nt, Artificial Sequence
  Description of Artificial Sequence: Synthetic oligonucleotide
ucgaugacaguaggcgugg

SEQ ID NO: 2477127 - RNA, 19 nt, Artificial Sequence
  Description of Artificial Sequence: Synthetic oligonucleotide
ugacaguaggcgugggcag

SEQ ID NO: 2477128 - RNA, 19 nt, Artificial Sequence
  Description of Artificial Sequence: Synthetic oligonucleotide
uuuuagauacaagcacagu

SEQ ID NO: 2477129 - RNA, 19 nt, Artificial Sequence
  Description of Artificial Sequence: Synthetic oligonucleotide
uagacgcaaagcugcagga

SEQ ID NO: 2477130 - RNA, 19 nt, Artificial Sequence
  Description of Artificial Sequence: Synthetic oligonucleotide
gcugagcaggaacagagag

SEQ ID NO: 2477131 - RNA, 19 nt, Artificial Sequence
  Description of Artificial Sequence: Synthetic oligonucleotide
ucuagcccuguguggaacc

SEQ ID NO: 2477132 - RNA, 19 nt, Artificial Sequence
  Description of Artificial Sequence: Synthetic oligonucleotide
acguagggaccucaugcuc

SEQ ID NO: 2477133 - RNA, 19 nt, Artificial Sequence
  Description of Artificial Sequence: Synthetic oligonucleotide
uacaagcacaguguugugu

SEQ ID NO: 2477134 - RNA, 19 nt, Artificial Sequence
  Description of Artificial Sequence: Synthetic oligonucleotide
ucgggguggaauagggucu

SEQ ID NO: 2477135 - RNA, 19 nt, Artificial Sequence
  Description of Artificial Sequence: Synthetic oligonucleotide
cuaggugcaguacagccca

SEQ ID NO: 2477136 - RNA, 19 nt, Artificial Sequence
  Description of Artificial Sequence: Synthetic oligonucleotide
ugcacuggguggucuagcc

SEQ ID NO: 2477137 - RNA, 19 nt, Artificial Sequence
  Description of Artificial Sequence: Synthetic oligonucleotide
gugguucggacacguaggg

SEQ ID NO: 2477138 - RNA, 19 nt, Artificial Sequence
  Description of Artificial Sequence: Synthetic oligonucleotide
aucgaggggaguugaacgu

SEQ ID NO: 2477139 - RNA, 19 nt, Artificial Sequence
  Description of Artificial Sequence: Synthetic oligonucleotide
ccacauucugcuuucgucc

SEQ ID NO: 2477140 - RNA, 19 nt, Artificial Sequence
  Description of Artificial Sequence: Synthetic oligonucleotide
acacguaagugaagagacc

SEQ ID NO: 2477141 - RNA, 19 nt, Artificial Sequence
  Description of Artificial Sequence: Synthetic oligonucleotide
guacagcccagcgaggagg

SEQ ID NO: 2477142 - RNA, 19 nt, Artificial Sequence
  Description of Artificial Sequence: Synthetic oligonucleotide
caaggccaaggcaucgagg

SEQ ID NO: 2477143 - RNA, 19 nt, Artificial Sequence
  Description of Artificial Sequence: Synthetic oligonucleotide
caugcucccugguagagca

SEQ ID NO: 2477144 - RNA, 19 nt, Artificial Sequence
  Description of Artificial Sequence: Synthetic oligonucleotide
gaagucaccuggugccugc

SEQ ID NO: 2477145 - RNA, 19 nt, Artificial Sequence
  Description of Artificial Sequence: Synthetic oligonucleotide
ggauaaugguggcuauugg

SEQ ID NO: 2477146 - RNA, 19 nt, Artificial Sequence
  Description of Artificial Sequence: Synthetic oligonucleotide
cagcaaagcuaggacaggg

SEQ ID NO: 2477147 - RNA, 19 nt, Artificial Sequence
  Description of Artificial Sequence: Synthetic oligonucleotide
uucguccuagcugaugaug

SEQ ID NO: 2477148 - RNA, 19 nt, Artificial Sequence
  Description of Artificial Sequence: Synthetic oligonucleotide
cugucccaaggacacaggc

SEQ ID NO: 2477149 - RNA, 19 nt, Artificial Sequence
  Description of Artificial Sequence: Synthetic oligonucleotide
agcuaggacaggguggguc

SEQ ID NO: 2477150 - RNA, 19 nt, Artificial Sequence
  Description of Artificial Sequence: Synthetic oligonucleotide
ggucccagaacuauuggag

SEQ ID NO: 2477151 - RNA, 19 nt, Artificial Sequence
  Description of Artificial Sequence: Synthetic oligonucleotide
agggcccugucccaaggac

SEQ ID NO: 2477152 - RNA, 19 nt, Artificial Sequence
  Description of Artificial Sequence: Synthetic oligonucleotide
gaacuauuggaggccucgg

SEQ ID NO: 2477153 - RNA, 19 nt, Artificial Sequence
  Description of Artificial Sequence: Synthetic oligonucleotide
accaggaaaggcguggucu

SEQ ID NO: 2477154 - RNA, 19 nt, Artificial Sequence
  Description of Artificial Sequence: Synthetic oligonucleotide
cugcuuucguccuagcuga

SEQ ID NO: 2477155 - RNA, 19 nt, Artificial Sequence
  Description of Artificial Sequence: Synthetic oligonucleotide
gaguaaccuccaucugagg

SEQ ID NO: 2477156 - RNA, 19 nt, Artificial Sequence
  Description of Artificial Sequence: Synthetic oligonucleotide
ggugcaguacagcccagcg

SEQ ID NO: 2477157 - RNA, 19 nt, Artificial Sequence
  Description of Artificial Sequence: Synthetic oligonucleotide
uauuggcugugggaugagg

SEQ ID NO: 2477158 - RNA, 19 nt, Artificial Sequence
  Description of Artificial Sequence: Synthetic oligonucleotide
gcaguagacgcaaagcugc

SEQ ID NO: 2477159 - RNA, 19 nt, Artificial Sequence
  Description of Artificial Sequence: Synthetic oligonucleotide
ucgguguucuuccugucua

SEQ ID NO: 2477160 - RNA, 19 nt, Artificial Sequence
  Description of Artificial Sequence: Synthetic oligonucleotide
uagagcagccucgaugaca

SEQ ID NO: 2477161 - RNA, 19 nt, Artificial Sequence
  Description of Artificial Sequence: Synthetic oligonucleotide
gcaaagcuaggacagggug

SEQ ID NO: 2477162 - RNA, 19 nt, Artificial Sequence
  Description of Artificial Sequence: Synthetic oligonucleotide
gaguagaggccgcuaggug

SEQ ID NO: 2477163 - RNA, 19 nt, Artificial Sequence
  Description of Artificial Sequence: Synthetic oligonucleotide
aguacagcccagcgaggag

SEQ ID NO: 2477164 - RNA, 19 nt, Artificial Sequence
  Description of Artificial Sequence: Synthetic oligonucleotide
aaccgucuguuuuccacau

SEQ ID NO: 2477165 - RNA, 19 nt, Artificial Sequence
  Description of Artificial Sequence: Synthetic oligonucleotide
gguggaauagggucugggc

SEQ ID NO: 2477166 - RNA, 19 nt, Artificial Sequence
  Description of Artificial Sequence: Synthetic oligonucleotide
cagggucccagaacuauug

SEQ ID NO: 2477167 - RNA, 19 nt, Artificial Sequence
  Description of Artificial Sequence: Synthetic oligonucleotide
aagaggacauggaaaccgu

SEQ ID NO: 2477168 - RNA, 19 nt, Artificial Sequence
  Description of Artificial Sequence: Synthetic oligonucleotide
uuccugucuagcccugugu

SEQ ID NO: 2477169 - RNA, 19 nt, Artificial Sequence
  Description of Artificial Sequence: Synthetic oligonucleotide
uggaaaccgucuguuuucc

SEQ ID NO: 2477170 - RNA, 19 nt, Artificial Sequence
  Description of Artificial Sequence: Synthetic oligonucleotide
ugggccggaacacguaagu

SEQ ID NO: 2477171 - RNA, 19 nt, Artificial Sequence
  Description of Artificial Sequence: Synthetic oligonucleotide
gccucgaugacaguaggcg

SEQ ID NO: 2477172 - RNA, 19 nt, Artificial Sequence
  Description of Artificial Sequence: Synthetic oligonucleotide
agucaccuggugccugcgc

SEQ ID NO: 2477173 - RNA, 19 nt, Artificial Sequence
  Description of Artificial Sequence: Synthetic oligonucleotide
gacacguagggaccucaug

SEQ ID NO: 2477174 - RNA, 19 nt, Artificial Sequence
  Description of Artificial Sequence: Synthetic oligonucleotide
ccggguaugggcuaccagg

SEQ ID NO: 2477175 - RNA, 19 nt, Artificial Sequence
  Description of Artificial Sequence: Synthetic oligonucleotide
cauucugcuuucguccuag

SEQ ID NO: 2477176 - RNA, 19 nt, Artificial Sequence
  Description of Artificial Sequence: Synthetic oligonucleotide
uggcuauuggcugugggau

SEQ ID NO: 2477177 - RNA, 19 nt, Artificial Sequence
  Description of Artificial Sequence: Synthetic oligonucleotide
aaggcaucgaggggaguug

SEQ ID NO: 2477178 - RNA, 19 nt, Artificial Sequence
  Description of Artificial Sequence: Synthetic oligonucleotide
ggagaguagaggccgcuag

SEQ ID NO: 2477179 - RNA, 19 nt, Artificial Sequence
  Description of Artificial Sequence: Synthetic oligonucleotide
agaguagaggccgcuaggu

SEQ ID NO: 2477180 - RNA, 19 nt, Artificial Sequence
  Description of Artificial Sequence: Synthetic oligonucleotide
cucuggucgagcugagcag

SEQ ID NO: 2477181 - RNA, 19 nt, Artificial Sequence
  Description of Artificial Sequence: Synthetic oligonucleotide
ugggcugaagucaccuggu

SEQ ID NO: 2477182 - RNA, 19 nt, Artificial Sequence
  Description of Artificial Sequence: Synthetic oligonucleotide
ggugguucggacacguagg

SEQ ID NO: 2477183 - RNA, 19 nt, Artificial Sequence
  Description of Artificial Sequence: Synthetic oligonucleotide
uuccggaggccucugcagu

SEQ ID NO: 2477184 - RNA, 19 nt, Artificial Sequence
  Description of Artificial Sequence: Synthetic oligonucleotide
caugaaaguguagggaaga

SEQ ID NO: 2477185 - RNA, 19 nt, Artificial Sequence
  Description of Artificial Sequence: Synthetic oligonucleotide
gcuuuuagauacaagcaca

SEQ ID NO: 2477186 - RNA, 19 nt, Artificial Sequence
  Description of Artificial Sequence: Synthetic oligonucleotide
uuuccacauucugcuuucg

SEQ ID NO: 2477187 - RNA, 19 nt, Artificial Sequence
  Description of Artificial Sequence: Synthetic oligonucleotide
ggaacacguaagugaagag

SEQ ID NO: 2477188 - RNA, 19 nt, Artificial Sequence
  Description of Artificial Sequence: Synthetic oligonucleotide
aggggaguugaacgucggg

SEQ ID NO: 2477189 - RNA, 19 nt, Artificial Sequence
  Description of Artificial Sequence: Synthetic oligonucleotide
cuagcagggucccagaacu

SEQ ID NO: 2477190 - RNA, 19 nt, Artificial Sequence
  Description of Artificial Sequence: Synthetic oligonucleotide
guuguguaauaagguuggg

SEQ ID NO: 2477191 - RNA, 19 nt, Artificial Sequence
  Description of Artificial Sequence: Synthetic oligonucleotide
gggauaaugguggcuauug

SEQ ID NO: 2477192 - RNA, 19 nt, Artificial Sequence
  Description of Artificial Sequence: Synthetic oligonucleotide
ugaggugguucggacacgu

SEQ ID NO: 2477193 - RNA, 19 nt, Artificial Sequence
  Description of Artificial Sequence: Synthetic oligonucleotide
ucgagcugagcaggaacag

SEQ ID NO: 2477194 - RNA, 19 nt, Artificial Sequence
  Description of Artificial Sequence: Synthetic oligonucleotide
aguagacgcaaagcugcag

SEQ ID NO: 2477195 - RNA, 19 nt, Artificial Sequence
  Description of Artificial Sequence: Synthetic oligonucleotide
gaugaggaaacaaggugcu

SEQ ID NO: 2477196 - RNA, 19 nt, Artificial Sequence
  Description of Artificial Sequence: Synthetic oligonucleotide
gaagguucuuccggaggcc

SEQ ID NO: 2477197 - RNA, 19 nt, Artificial Sequence
  Description of Artificial Sequence: Synthetic oligonucleotide
aguguagggaagaggacau

SEQ ID NO: 2477198 - RNA, 19 nt, Artificial Sequence
  Description of Artificial Sequence: Synthetic oligonucleotide
auguguugggaugggccgg

SEQ ID NO: 2477199 - RNA, 19 nt, Artificial Sequence
  Description of Artificial Sequence: Synthetic oligonucleotide
cuguuauccacgggauggg

SEQ ID NO: 2477200 - RNA, 19 nt, Artificial Sequence
  Description of Artificial Sequence: Synthetic oligonucleotide
uccaucugaggugguucgg

SEQ ID NO: 2477201 - RNA, 19 nt, Artificial Sequence
  Description of Artificial Sequence: Synthetic oligonucleotide
gugccugcgcauguguugg

SEQ ID NO: 2477202 - RNA, 19 nt, Artificial Sequence
  Description of Artificial Sequence: Synthetic oligonucleotide
agacgcaaagcugcaggag

SEQ ID NO: 2477203 - RNA, 19 nt, Artificial Sequence
  Description of Artificial Sequence: Synthetic oligonucleotide
agccucgaugacaguaggc

SEQ ID NO: 2477204 - RNA, 19 nt, Artificial Sequence
  Description of Artificial Sequence: Synthetic oligonucleotide
cacaacugggcugaaguca

SEQ ID NO: 2477205 - RNA, 19 nt, Artificial Sequence
  Description of Artificial Sequence: Synthetic oligonucleotide
gcuaccaggaaaggcgugg

SEQ ID NO: 2477206 - RNA, 19 nt, Artificial Sequence
  Description of Artificial Sequence: Synthetic oligonucleotide
gaacgucgggcccucucgc

SEQ ID NO: 2477207 - RNA, 19 nt, Artificial Sequence
  Description of Artificial Sequence: Synthetic oligonucleotide
cucucgcuugcacugggug

SEQ ID NO: 2477208 - RNA, 19 nt, Artificial Sequence
  Description of Artificial Sequence: Synthetic oligonucleotide
aggccaaggcaucgagggg

SEQ ID NO: 2477209 - RNA, 19 nt, Artificial Sequence
  Description of Artificial Sequence: Synthetic oligonucleotide
agaggacauggaaaccguc

SEQ ID NO: 2477210 - RNA, 19 nt, Artificial Sequence
  Description of Artificial Sequence: Synthetic oligonucleotide
gaugggccggaacacguaa

SEQ ID NO: 2477211 - RNA, 19 nt, Artificial Sequence
  Description of Artificial Sequence: Synthetic oligonucleotide
aacgucgggcccucucgcu

SEQ ID NO: 2477212 - RNA, 19 nt, Artificial Sequence
  Description of Artificial Sequence: Synthetic oligonucleotide
caucgcagcagcaaagcua

SEQ ID NO: 2477213 - RNA, 19 nt, Artificial Sequence
  Description of Artificial Sequence: Synthetic oligonucleotide
guaauaagguuggguacca

SEQ ID NO: 2477214 - RNA, 19 nt, Artificial Sequence
  Description of Artificial Sequence: Synthetic oligonucleotide
gguggcuauuggcuguggg

SEQ ID NO: 2477215 - RNA, 19 nt, Artificial Sequence
  Description of Artificial Sequence: Synthetic oligonucleotide
uugaacgucgggcccucuc

SEQ ID NO: 2477216 - RNA, 19 nt, Artificial Sequence
  Description of Artificial Sequence: Synthetic oligonucleotide
cugcgcauguguugggaug

SEQ ID NO: 2477217 - RNA, 19 nt, Artificial Sequence
  Description of Artificial Sequence: Synthetic oligonucleotide
ugcaggagaccaaggccaa

SEQ ID NO: 2477218 - RNA, 19 nt, Artificial Sequence
  Description of Artificial Sequence: Synthetic oligonucleotide
gucuagcccggguaugggc

SEQ ID NO: 2477219 - RNA, 19 nt, Artificial Sequence
  Description of Artificial Sequence: Synthetic oligonucleotide
ggaaaggcguggucucugg

SEQ ID NO: 2477220 - RNA, 19 nt, Artificial Sequence
  Description of Artificial Sequence: Synthetic oligonucleotide
ggaucgggguggaauaggg

SEQ ID NO: 2477221 - RNA, 19 nt, Artificial Sequence
  Description of Artificial Sequence: Synthetic oligonucleotide
ugggaucgggguggaauag

SEQ ID NO: 2477222 - RNA, 19 nt, Artificial Sequence
  Description of Artificial Sequence: Synthetic oligonucleotide
ggggaguugaacgucgggc

SEQ ID NO: 2477223 - RNA, 19 nt, Artificial Sequence
  Description of Artificial Sequence: Synthetic oligonucleotide
agggcaucgcagcagcaaa

SEQ ID NO: 2477224 - RNA, 19 nt, Artificial Sequence
  Description of Artificial Sequence: Synthetic oligonucleotide
ggaaccacaacugggcuga

SEQ ID NO: 2477225 - RNA, 19 nt, Artificial Sequence
  Description of Artificial Sequence: Synthetic oligonucleotide
gguaugggcuaccaggaaa

SEQ ID NO: 2477226 - RNA, 19 nt, Artificial Sequence
  Description of Artificial Sequence: Synthetic oligonucleotide
cagccucgaugacaguagg

SEQ ID NO: 2477227 - RNA, 19 nt, Artificial Sequence
  Description of Artificial Sequence: Synthetic oligonucleotide
ggccggaacacguaaguga

SEQ ID NO: 2477228 - RNA, 19 nt, Artificial Sequence
  Description of Artificial Sequence: Synthetic oligonucleotide
gaggggaguugaacgucgg

SEQ ID NO: 2477229 - RNA, 19 nt, Artificial Sequence
  Description of Artificial Sequence: Synthetic oligonucleotide
guucggacacguagggacc

SEQ ID NO: 2477230 - RNA, 19 nt, Artificial Sequence
  Description of Artificial Sequence: Synthetic oligonucleotide
cuauuggaggccucggugu

SEQ ID NO: 2477231 - RNA, 19 nt, Artificial Sequence
  Description of Artificial Sequence: Synthetic oligonucleotide
uucuuccggaggccucugc

SEQ ID NO: 2477232 - RNA, 19 nt, Artificial Sequence
  Description of Artificial Sequence: Synthetic oligonucleotide
cuuccugucuagcccugug

SEQ ID NO: 2477233 - RNA, 19 nt, Artificial Sequence
  Description of Artificial Sequence: Synthetic oligonucleotide
cacguaagugaagagaccu

SEQ ID NO: 2477234 - RNA, 19 nt, Artificial Sequence
  Description of Artificial Sequence: Synthetic oligonucleotide
uuucguccuagcugaugau

SEQ ID NO: 2477235 - RNA, 19 nt, Artificial Sequence
  Description of Artificial Sequence: Synthetic oligonucleotide
uguguugggaugggccgga

SEQ ID NO: 2477236 - RNA, 19 nt, Artificial Sequence
  Description of Artificial Sequence: Synthetic oligonucleotide
uucggacacguagggaccu

SEQ ID NO: 2477237 - RNA, 19 nt, Artificial Sequence
  Description of Artificial Sequence: Synthetic oligonucleotide
gucgagcugagcaggaaca

SEQ ID NO: 2477238 - RNA, 19 nt, Artificial Sequence
  Description of Artificial Sequence: Synthetic oligonucleotide
cguagggaccucaugcucc

SEQ ID NO: 2477239 - RNA, 19 nt, Artificial Sequence
  Description of Artificial Sequence: Synthetic oligonucleotide
ccugucuagcccugugugg

SEQ ID NO: 2477240 - RNA, 19 nt, Artificial Sequence
  Description of Artificial Sequence: Synthetic oligonucleotide
cugucuagcccugugugga

SEQ ID NO: 2477241 - RNA, 19 nt, Artificial Sequence
  Description of Artificial Sequence: Synthetic oligonucleotide
aguugaacgucgggcccuc

SEQ ID NO: 2477242 - RNA, 19 nt, Artificial Sequence
  Description of Artificial Sequence: Synthetic oligonucleotide
guagaggccgcuaggugca

SEQ ID NO: 2477243 - RNA, 19 nt, Artificial Sequence
  Description of Artificial Sequence: Synthetic oligonucleotide
aggaaaggcguggucucug

SEQ ID NO: 2477244 - RNA, 19 nt, Artificial Sequence
  Description of Artificial Sequence: Synthetic oligonucleotide
ggucgagcugagcaggaac

SEQ ID NO: 2477245 - RNA, 19 nt, Artificial Sequence
  Description of Artificial Sequence: Synthetic oligonucleotide
agcaaagcuaggacagggu

SEQ ID NO: 2477246 - RNA, 19 nt, Artificial Sequence
  Description of Artificial Sequence: Synthetic oligonucleotide
gcuaggugcaguacagccc

SEQ ID NO: 2477247 - RNA, 19 nt, Artificial Sequence
  Description of Artificial Sequence: Synthetic oligonucleotide
gaugggaucgggguggaau

SEQ ID NO: 2477248 - RNA, 19 nt, Artificial Sequence
  Description of Artificial Sequence: Synthetic oligonucleotide
cauggaaaccgucuguuuu

SEQ ID NO: 2477249 - RNA, 19 nt, Artificial Sequence
  Description of Artificial Sequence: Synthetic oligonucleotide
gaggaaacaaggugcuuuu

SEQ ID NO: 2477250 - RNA, 19 nt, Artificial Sequence
  Description of Artificial Sequence: Synthetic oligonucleotide
cgcuaggugcaguacagcc

SEQ ID NO: 2477251 - RNA, 19 nt, Artificial Sequence
  Description of Artificial Sequence: Synthetic oligonucleotide
agcagggucccagaacuau

SEQ ID NO: 2477252 - RNA, 19 nt, Artificial Sequence
  Description of Artificial Sequence: Synthetic oligonucleotide
aggacagggugggucagca

SEQ ID NO: 2477253 - RNA, 19 nt, Artificial Sequence
  Description of Artificial Sequence: Synthetic oligonucleotide
ucaccuggugccugcgcau

SEQ ID NO: 2477254 - RNA, 19 nt, Artificial Sequence
  Description of Artificial Sequence: Synthetic oligonucleotide
gugcaguacagcccagcga

SEQ ID NO: 2477255 - RNA, 19 nt, Artificial Sequence
  Description of Artificial Sequence: Synthetic oligonucleotide
uaauaagguuggguaccau

SEQ ID NO: 2477256 - RNA, 19 nt, Artificial Sequence
  Description of Artificial Sequence: Synthetic oligonucleotide
ugccugcgcauguguuggg

SEQ ID NO: 2477257 - RNA, 19 nt, Artificial Sequence
  Description of Artificial Sequence: Synthetic oligonucleotide
gacaguaggcgugggcaga

SEQ ID NO: 2477258 - RNA, 19 nt, Artificial Sequence
  Description of Artificial Sequence: Synthetic oligonucleotide
ggagaccaaggccaaggca

SEQ ID NO: 2477259 - RNA, 19 nt, Artificial Sequence
  Description of Artificial Sequence: Synthetic oligonucleotide
ugguucggacacguaggga

SEQ ID NO: 2477260 - RNA, 19 nt, Artificial Sequence
  Description of Artificial Sequence: Synthetic oligonucleotide
cagaacuauuggaggccuc

SEQ ID NO: 2477261 - RNA, 19 nt, Artificial Sequence
  Description of Artificial Sequence: Synthetic oligonucleotide
ggguggaauagggucuggg

SEQ ID NO: 2477262 - RNA, 19 nt, Artificial Sequence
  Description of Artificial Sequence: Synthetic oligonucleotide
ggcuauuggcugugggaug

SEQ ID NO: 2477263 - RNA, 19 nt, Artificial Sequence
  Description of Artificial Sequence: Synthetic oligonucleotide
gcuauuggcugugggauga

SEQ ID NO: 2477264 - RNA, 19 nt, Artificial Sequence
  Description of Artificial Sequence: Synthetic oligonucleotide
ggagggauaaugguggcua

SEQ ID NO: 2477265 - RNA, 19 nt, Artificial Sequence
  Description of Artificial Sequence: Synthetic oligonucleotide
gcagccucgaugacaguag

SEQ ID NO: 2477266 - RNA, 19 nt, Artificial Sequence
  Description of Artificial Sequence: Synthetic oligonucleotide
gguguucuuccugucuagc

SEQ ID NO: 2477267 - RNA, 19 nt, Artificial Sequence
  Description of Artificial Sequence: Synthetic oligonucleotide
ccaucucauacuugaaaga

SEQ ID NO: 2477268 - RNA, 19 nt, Artificial Sequence
  Description of Artificial Sequence: Synthetic oligonucleotide
uccggaggccucugcagua

SEQ ID NO: 2477269 - RNA, 19 nt, Artificial Sequence
  Description of Artificial Sequence: Synthetic oligonucleotide
ggcaucgcagcagcaaagc

SEQ ID NO: 2477270 - RNA, 19 nt, Artificial Sequence
  Description of Artificial Sequence: Synthetic oligonucleotide
cccagaacuauuggaggcc

SEQ ID NO: 2477271 - RNA, 19 nt, Artificial Sequence
  Description of Artificial Sequence: Synthetic oligonucleotide
ggcccucucgcuugcacug

SEQ ID NO: 2477272 - RNA, 19 nt, Artificial Sequence
  Description of Artificial Sequence: Synthetic oligonucleotide
caguagacgcaaagcugca

SEQ ID NO: 2477273 - RNA, 19 nt, Artificial Sequence
  Description of Artificial Sequence: Synthetic oligonucleotide
gaccucaugcucccuggua

SEQ ID NO: 2477274 - RNA, 19 nt, Artificial Sequence
  Description of Artificial Sequence: Synthetic oligonucleotide
ccuguguggaaccacaacu

SEQ ID NO: 2477275 - RNA, 19 nt, Artificial Sequence
  Description of Artificial Sequence: Synthetic oligonucleotide
ugguggcuauuggcugugg

SEQ ID NO: 2477276 - RNA, 19 nt, Artificial Sequence
  Description of Artificial Sequence: Synthetic oligonucleotide
acauucugcuuucguccua

SEQ ID NO: 2477277 - RNA, 19 nt, Artificial Sequence
  Description of Artificial Sequence: Synthetic oligonucleotide
guagagcagccucgaugac

SEQ ID NO: 2477278 - RNA, 19 nt, Artificial Sequence
  Description of Artificial Sequence: Synthetic oligonucleotide
gggaucgggguggaauagg

SEQ ID NO: 2477279 - RNA, 19 nt, Artificial Sequence
  Description of Artificial Sequence: Synthetic oligonucleotide
caaagcugcaggagaccaa

SEQ ID NO: 2477280 - RNA, 19 nt, Artificial Sequence
  Description of Artificial Sequence: Synthetic oligonucleotide
gaggccgcuaggugcagua

SEQ ID NO: 2477281 - RNA, 19 nt, Artificial Sequence
  Description of Artificial Sequence: Synthetic oligonucleotide
ggccaaggcaucgagggga

SEQ ID NO: 2477282 - RNA, 19 nt, Artificial Sequence
  Description of Artificial Sequence: Synthetic oligonucleotide
augggccggaacacguaag

SEQ ID NO: 2477283 - RNA, 19 nt, Artificial Sequence
  Description of Artificial Sequence: Synthetic oligonucleotide
uagcagggucccagaacua

SEQ ID NO: 2477284 - RNA, 19 nt, Artificial Sequence
  Description of Artificial Sequence: Synthetic oligonucleotide
cugaggugguucggacacg

SEQ ID NO: 2477285 - RNA, 19 nt, Artificial Sequence
  Description of Artificial Sequence: Synthetic oligonucleotide
cacauucugcuuucguccu

SEQ ID NO: 2477286 - RNA, 19 nt, Artificial Sequence
  Description of Artificial Sequence: Synthetic oligonucleotide
accaaggccaaggcaucga

SEQ ID NO: 2477287 - RNA, 19 nt, Artificial Sequence
  Description of Artificial Sequence: Synthetic oligonucleotide
gucuagcccuguguggaac

SEQ ID NO: 2477288 - RNA, 19 nt, Artificial Sequence
  Description of Artificial Sequence: Synthetic oligonucleotide
cuauuggcugugggaugag

SEQ ID NO: 2477289 - RNA, 19 nt, Artificial Sequence
  Description of Artificial Sequence: Synthetic oligonucleotide
agcccuguguggaaccaca

SEQ ID NO: 2477290 - RNA, 19 nt, Artificial Sequence
  Description of Artificial Sequence: Synthetic oligonucleotide
ccaggaaaggcguggucuc

SEQ ID NO: 2477291 - RNA, 19 nt, Artificial Sequence
  Description of Artificial Sequence: Synthetic oligonucleotide
cacgggaugggaucggggu

SEQ ID NO: 2477292 - RNA, 19 nt, Artificial Sequence
  Description of Artificial Sequence: Synthetic oligonucleotide
gaaaggcguggucucuggu

SEQ ID NO: 2477293 - RNA, 19 nt, Artificial Sequence
  Description of Artificial Sequence: Synthetic oligonucleotide
guggaaccacaacugggcu

SEQ ID NO: 2477294 - RNA, 19 nt, Artificial Sequence
  Description of Artificial Sequence: Synthetic oligonucleotide
agcugagcaggaacagaga

SEQ ID NO: 2477295 - RNA, 19 nt, Artificial Sequence
  Description of Artificial Sequence: Synthetic oligonucleotide
gucuagcagggucccagaa

SEQ ID NO: 2477296 - RNA, 19 nt, Artificial Sequence
  Description of Artificial Sequence: Synthetic oligonucleotide
acaguaggcgugggcagaa

SEQ ID NO: 2477297 - RNA, 19 nt, Artificial Sequence
  Description of Artificial Sequence: Synthetic oligonucleotide
guguagggaagaggacaug

SEQ ID NO: 2477298 - RNA, 19 nt, Artificial Sequence
  Description of Artificial Sequence: Synthetic oligonucleotide
cacguagggaccucaugcu

SEQ ID NO: 2477299 - RNA, 19 nt, Artificial Sequence
  Description of Artificial Sequence: Synthetic oligonucleotide
gcacuggguggucuagccc

SEQ ID NO: 2477300 - RNA, 19 nt, Artificial Sequence
  Description of Artificial Sequence: Synthetic oligonucleotide
gcaucgaggggaguugaac

SEQ ID NO: 2477301 - RNA, 19 nt, Artificial Sequence
  Description of Artificial Sequence: Synthetic oligonucleotide
ugcuuucguccuagcugau

SEQ ID NO: 2477302 - RNA, 19 nt, Artificial Sequence
  Description of Artificial Sequence: Synthetic oligonucleotide
guggucuagcccggguaug

SEQ ID NO: 2477303 - RNA, 19 nt, Artificial Sequence
  Description of Artificial Sequence: Synthetic oligonucleotide
ggucuagcccggguauggg

SEQ ID NO: 2477304 - RNA, 19 nt, Artificial Sequence
  Description of Artificial Sequence: Synthetic oligonucleotide
gaguugaacgucgggcccu

SEQ ID NO: 2477305 - RNA, 19 nt, Artificial Sequence
  Description of Artificial Sequence: Synthetic oligonucleotide
uagcccuguguggaaccac

SEQ ID NO: 2477306 - RNA, 19 nt, Artificial Sequence
  Description of Artificial Sequence: Synthetic oligonucleotide
ccacaacugggcugaaguc

SEQ ID NO: 2477307 - RNA, 19 nt, Artificial Sequence
  Description of Artificial Sequence: Synthetic oligonucleotide
ggcccugucccaaggacac

SEQ ID NO: 2477308 - RNA, 19 nt, Artificial Sequence
  Description of Artificial Sequence: Synthetic oligonucleotide
guaggcgugggcagaaggu

SEQ ID NO: 2477309 - RNA, 19 nt, Artificial Sequence
  Description of Artificial Sequence: Synthetic oligonucleotide
acguaagugaagagaccuu

SEQ ID NO: 2477310 - RNA, 19 nt, Artificial Sequence
  Description of Artificial Sequence: Synthetic oligonucleotide
cccugucccaaggacacag

SEQ ID NO: 2477311 - RNA, 19 nt, Artificial Sequence
  Description of Artificial Sequence: Synthetic oligonucleotide
gagggauaaugguggcuau

SEQ ID NO: 2477312 - RNA, 19 nt, Artificial Sequence
  Description of Artificial Sequence: Synthetic oligonucleotide
caggaacagagagggcauc

SEQ ID NO: 2477313 - RNA, 19 nt, Artificial Sequence
  Description of Artificial Sequence: Synthetic oligonucleotide
cguccuagcugaugauggg

SEQ ID NO: 2477314 - RNA, 19 nt, Artificial Sequence
  Description of Artificial Sequence: Synthetic oligonucleotide
cuggucgagcugagcagga

SEQ ID NO: 2477315 - RNA, 19 nt, Artificial Sequence
  Description of Artificial Sequence: Synthetic oligonucleotide
gggcugaagucaccuggug

SEQ ID NO: 2477316 - RNA, 19 nt, Artificial Sequence
  Description of Artificial Sequence: Synthetic oligonucleotide
ccugucccaaggacacagg

SEQ ID NO: 2477317 - RNA, 19 nt, Artificial Sequence
  Description of Artificial Sequence: Synthetic oligonucleotide
guuauccacgggaugggau

SEQ ID NO: 2477318 - RNA, 19 nt, Artificial Sequence
  Description of Artificial Sequence: Synthetic oligonucleotide
agcccggguaugggcuacc

SEQ ID NO: 2477319 - RNA, 19 nt, Artificial Sequence
  Description of Artificial Sequence: Synthetic oligonucleotide
aggaaacaaggugcuuuua

SEQ ID NO: 2477320 - RNA, 19 nt, Artificial Sequence
  Description of Artificial Sequence: Synthetic oligonucleotide
uggucgagcugagcaggaa

SEQ ID NO: 2477321 - RNA, 19 nt, Artificial Sequence
  Description of Artificial Sequence: Synthetic oligonucleotide
gggcaucgcagcagcaaag

SEQ ID NO: 2477322 - RNA, 19 nt, Artificial Sequence
  Description of Artificial Sequence: Synthetic oligonucleotide
aggcguggucucuggucga

SEQ ID NO: 2477323 - RNA, 19 nt, Artificial Sequence
  Description of Artificial Sequence: Synthetic oligonucleotide
cugugggaugaggaaacaa

SEQ ID NO: 2477324 - RNA, 19 nt, Artificial Sequence
  Description of Artificial Sequence: Synthetic oligonucleotide
acgucgggcccucucgcuu

SEQ ID NO: 2477325 - RNA, 19 nt, Artificial Sequence
  Description of Artificial Sequence: Synthetic oligonucleotide
ggccgcuaggugcaguaca

SEQ ID NO: 2477326 - RNA, 19 nt, Artificial Sequence
  Description of Artificial Sequence: Synthetic oligonucleotide
gccggaacacguaagugaa

SEQ ID NO: 2477327 - RNA, 19 nt, Artificial Sequence
  Description of Artificial Sequence: Synthetic oligonucleotide
guaccaucucauacuugaa

SEQ ID NO: 2477328 - RNA, 19 nt, Artificial Sequence
  Description of Artificial Sequence: Synthetic oligonucleotide
aagcuaggacagggugggu

SEQ ID NO: 2477329 - RNA, 19 nt, Artificial Sequence
  Description of Artificial Sequence: Synthetic oligonucleotide
ccacgggaugggaucgggg

SEQ ID NO: 2477330 - RNA, 19 nt, Artificial Sequence
  Description of Artificial Sequence: Synthetic oligonucleotide
gcuuucguccuagcugaug

SEQ ID NO: 2477331 - RNA, 19 nt, Artificial Sequence
  Description of Artificial Sequence: Synthetic oligonucleotide
cucgguguucuuccugucu

SEQ ID NO: 2477332 - RNA, 19 nt, Artificial Sequence
  Description of Artificial Sequence: Synthetic oligonucleotide
ggaaaccgucuguuuucca

SEQ ID NO: 2477333 - RNA, 19 nt, Artificial Sequence
  Description of Artificial Sequence: Synthetic oligonucleotide
ggacagggugggucagcag

SEQ ID NO: 2477334 - RNA, 19 nt, Artificial Sequence
  Description of Artificial Sequence: Synthetic oligonucleotide
cuagcccuguguggaacca

SEQ ID NO: 2477335 - RNA, 19 nt, Artificial Sequence
  Description of Artificial Sequence: Synthetic oligonucleotide
gaucgggguggaauagggu

SEQ ID NO: 2477336 - RNA, 19 nt, Artificial Sequence
  Description of Artificial Sequence: Synthetic oligonucleotide
gcaggucuagcaggguccc

SEQ ID NO: 2477337 - RNA, 19 nt, Artificial Sequence
  Description of Artificial Sequence: Synthetic oligonucleotide
caccuggugccugcgcaug

SEQ ID NO: 2477338 - RNA, 19 nt, Artificial Sequence
  Description of Artificial Sequence: Synthetic oligonucleotide
gcaguacagcccagcgagg

SEQ ID NO: 2477339 - RNA, 19 nt, Artificial Sequence
  Description of Artificial Sequence: Synthetic oligonucleotide
cucgcuugcacuggguggu

SEQ ID NO: 2477340 - RNA, 19 nt, Artificial Sequence
  Description of Artificial Sequence: Synthetic oligonucleotide
cggaacacguaagugaaga

SEQ ID NO: 2477341 - RNA, 19 nt, Artificial Sequence
  Description of Artificial Sequence: Synthetic oligonucleotide
cccuguguggaaccacaac

SEQ ID NO: 2477342 - RNA, 19 nt, Artificial Sequence
  Description of Artificial Sequence: Synthetic oligonucleotide
accgucuguuuuccacauu

SEQ ID NO: 2477343 - RNA, 19 nt, Artificial Sequence
  Description of Artificial Sequence: Synthetic oligonucleotide
gggccggaacacguaagug

SEQ ID NO: 2477344 - RNA, 19 nt, Artificial Sequence
  Description of Artificial Sequence: Synthetic oligonucleotide
ccuccaucugaggugguuc

SEQ ID NO: 2477345 - RNA, 19 nt, Artificial Sequence
  Description of Artificial Sequence: Synthetic oligonucleotide
ccggaacacguaagugaag

SEQ ID NO: 2477346 - RNA, 19 nt, Artificial Sequence
  Description of Artificial Sequence: Synthetic oligonucleotide
gucgggcccucucgcuugc

SEQ ID NO: 2477347 - RNA, 19 nt, Artificial Sequence
  Description of Artificial Sequence: Synthetic oligonucleotide
gguuggguaccaucucaua

SEQ ID NO: 2477348 - RNA, 19 nt, Artificial Sequence
  Description of Artificial Sequence: Synthetic oligonucleotide
caguaggcgugggcagaag

SEQ ID NO: 2477349 - RNA, 19 nt, Artificial Sequence
  Description of Artificial Sequence: Synthetic oligonucleotide
agagggcaucgcagcagca

SEQ ID NO: 2477350 - RNA, 19 nt, Artificial Sequence
  Description of Artificial Sequence: Synthetic oligonucleotide
gguggucuagcccggguau

SEQ ID NO: 2477351 - RNA, 19 nt, Artificial Sequence
  Description of Artificial Sequence: Synthetic oligonucleotide
ggguaccaucucauacuug

SEQ ID NO: 2477352 - RNA, 19 nt, Artificial Sequence
  Description of Artificial Sequence: Synthetic oligonucleotide
ucggacacguagggaccuc

SEQ ID NO: 2477353 - RNA, 19 nt, Artificial Sequence
  Description of Artificial Sequence: Synthetic oligonucleotide
gcacaguguuguguaauaa

SEQ ID NO: 2477354 - RNA, 19 nt, Artificial Sequence
  Description of Artificial Sequence: Synthetic oligonucleotide
cuagcccggguaugggcua

SEQ ID NO: 2477355 - RNA, 19 nt, Artificial Sequence
  Description of Artificial Sequence: Synthetic oligonucleotide
ggaggccucgguguucuuc

SEQ ID NO: 2477356 - RNA, 19 nt, Artificial Sequence
  Description of Artificial Sequence: Synthetic oligonucleotide
ggcguggucucuggucgag

SEQ ID NO: 2477357 - RNA, 19 nt, Artificial Sequence
  Description of Artificial Sequence: Synthetic oligonucleotide
cgguguucuuccugucuag

SEQ ID NO: 2477358 - RNA, 19 nt, Artificial Sequence
  Description of Artificial Sequence: Synthetic oligonucleotide
aaccuccaucugagguggu

SEQ ID NO: 2477359 - RNA, 19 nt, Artificial Sequence
  Description of Artificial Sequence: Synthetic oligonucleotide
ggguaugggcuaccaggaa

SEQ ID NO: 2477360 - RNA, 19 nt, Artificial Sequence
  Description of Artificial Sequence: Synthetic oligonucleotide
gcaggagaccaaggccaag

SEQ ID NO: 2477361 - RNA, 19 nt, Artificial Sequence
  Description of Artificial Sequence: Synthetic oligonucleotide
cuaccaggaaaggcguggu

SEQ ID NO: 2477362 - RNA, 19 nt, Artificial Sequence
  Description of Artificial Sequence: Synthetic oligonucleotide
ucgcuugcacugggugguc

SEQ ID NO: 2477363 - RNA, 19 nt, Artificial Sequence
  Description of Artificial Sequence: Synthetic oligonucleotide
cugaagucaccuggugccu

SEQ ID NO: 2477364 - RNA, 19 nt, Artificial Sequence
  Description of Artificial Sequence: Synthetic oligonucleotide
gguucuuccggaggccucu

SEQ ID NO: 2477365 - RNA, 19 nt, Artificial Sequence
  Description of Artificial Sequence: Synthetic oligonucleotide
gcuugcacuggguggucua

SEQ ID NO: 2477366 - RNA, 19 nt, Artificial Sequence
  Description of Artificial Sequence: Synthetic oligonucleotide
cccggguaugggcuaccag

SEQ ID NO: 2477367 - RNA, 19 nt, Artificial Sequence
  Description of Artificial Sequence: Synthetic oligonucleotide
gcgcauguguugggauggg

SEQ ID NO: 2477368 - RNA, 19 nt, Artificial Sequence
  Description of Artificial Sequence: Synthetic oligonucleotide
cgcaaagcugcaggagacc

SEQ ID NO: 2477369 - RNA, 19 nt, Artificial Sequence
  Description of Artificial Sequence: Synthetic oligonucleotide
gcugugggaugaggaaaca

SEQ ID NO: 2477370 - RNA, 19 nt, Artificial Sequence
  Description of Artificial Sequence: Synthetic oligonucleotide
ccaucugaggugguucgga

SEQ ID NO: 2477371 - RNA, 19 nt, Artificial Sequence
  Description of Artificial Sequence: Synthetic oligonucleotide
ccucgaugacaguaggcgu

SEQ ID NO: 2477372 - RNA, 19 nt, Artificial Sequence
  Description of Artificial Sequence: Synthetic oligonucleotide
cagcgaggagggcccuguc

SEQ ID NO: 2477373 - RNA, 19 nt, Artificial Sequence
  Description of Artificial Sequence: Synthetic oligonucleotide
ggccucugcaguagacgca

SEQ ID NO: 2477374 - RNA, 19 nt, Artificial Sequence
  Description of Artificial Sequence: Synthetic oligonucleotide
ccucgguguucuuccuguc

SEQ ID NO: 2477375 - RNA, 19 nt, Artificial Sequence
  Description of Artificial Sequence: Synthetic oligonucleotide
gaggugguucggacacgua

SEQ ID NO: 2477376 - RNA, 19 nt, Artificial Sequence
  Description of Artificial Sequence: Synthetic oligonucleotide
cgucgggcccucucgcuug

SEQ ID NO: 2477377 - RNA, 19 nt, Artificial Sequence
  Description of Artificial Sequence: Synthetic oligonucleotide
cgcauguguugggaugggc

SEQ ID NO: 2477378 - RNA, 19 nt, Artificial Sequence
  Description of Artificial Sequence: Synthetic oligonucleotide
ggcgugggcagaagguucu

SEQ ID NO: 2477379 - RNA, 19 nt, Artificial Sequence
  Description of Artificial Sequence: Synthetic oligonucleotide
ucgggcccucucgcuugca

SEQ ID NO: 2477380 - RNA, 19 nt, Artificial Sequence
  Description of Artificial Sequence: Synthetic oligonucleotide
gcguggucucuggucgagc

SEQ ID NO: 2477381 - RNA, 19 nt, Artificial Sequence
  Description of Artificial Sequence: Synthetic oligonucleotide
ccagaacuauuggaggccu

SEQ ID NO: 2477382 - RNA, 19 nt, Artificial Sequence
  Description of Artificial Sequence: Synthetic oligonucleotide
gccugcgcauguguuggga

SEQ ID NO: 2477383 - RNA, 19 nt, Artificial Sequence
  Description of Artificial Sequence: Synthetic oligonucleotide
gggagaguagaggccgcua

SEQ ID NO: 2477384 - RNA, 19 nt, Artificial Sequence
  Description of Artificial Sequence: Synthetic oligonucleotide
cucccugguagagcagccu

SEQ ID NO: 2477385 - RNA, 19 nt, Artificial Sequence
  Description of Artificial Sequence: Synthetic oligonucleotide
caggucuagcaggguccca

SEQ ID NO: 2477386 - RNA, 19 nt, Artificial Sequence
  Description of Artificial Sequence: Synthetic oligonucleotide
ggaugggccggaacacgua

SEQ ID NO: 2477387 - RNA, 19 nt, Artificial Sequence
  Description of Artificial Sequence: Synthetic oligonucleotide
ggcaucgaggggaguugaa

SEQ ID NO: 2477388 - RNA, 19 nt, Artificial Sequence
  Description of Artificial Sequence: Synthetic oligonucleotide
cugguagagcagccucgau

SEQ ID NO: 2477389 - RNA, 19 nt, Artificial Sequence
  Description of Artificial Sequence: Synthetic oligonucleotide
cguggucucuggucgagcu

SEQ ID NO: 2477390 - RNA, 19 nt, Artificial Sequence
  Description of Artificial Sequence: Synthetic oligonucleotide
guguugggaugggccggaa

SEQ ID NO: 2477391 - RNA, 19 nt, Artificial Sequence
  Description of Artificial Sequence: Synthetic oligonucleotide
ccugcgcauguguugggau

SEQ ID NO: 2477392 - RNA, 19 nt, Artificial Sequence
  Description of Artificial Sequence: Synthetic oligonucleotide
guugaacgucgggcccucu

SEQ ID NO: 2477393 - RNA, 19 nt, Artificial Sequence
  Description of Artificial Sequence: Synthetic oligonucleotide
cgggcccucucgcuugcac

SEQ ID NO: 2477394 - RNA, 19 nt, Artificial Sequence
  Description of Artificial Sequence: Synthetic oligonucleotide
ggacacguagggaccucau

SEQ ID NO: 2477395 - RNA, 19 nt, Artificial Sequence
  Description of Artificial Sequence: Synthetic oligonucleotide
gcagggucccagaacuauu

SEQ ID NO: 2477396 - RNA, 19 nt, Artificial Sequence
  Description of Artificial Sequence: Synthetic oligonucleotide
gcccggguaugggcuacca

SEQ ID NO: 2477397 - RNA, 19 nt, Artificial Sequence
  Description of Artificial Sequence: Synthetic oligonucleotide
cggacacguagggaccuca

SEQ ID NO: 2477398 - RNA, 19 nt, Artificial Sequence
  Description of Artificial Sequence: Synthetic oligonucleotide
ggaugggaucgggguggaa

SEQ ID NO: 2477399 - RNA, 19 nt, Artificial Sequence
  Description of Artificial Sequence: Synthetic oligonucleotide
cccagcgaggagggcccug

SEQ ID NO: 2477400 - RNA, 19 nt, Artificial Sequence
  Description of Artificial Sequence: Synthetic oligonucleotide
ccucucgcuugcacugggu

SEQ ID NO: 2477401 - RNA, 19 nt, Artificial Sequence
  Description of Artificial Sequence: Synthetic oligonucleotide
gcccugucccaaggacaca

SEQ ID NO: 2477402 - RNA, 19 nt, Artificial Sequence
  Description of Artificial Sequence: Synthetic oligonucleotide
ccagcgaggagggcccugu

SEQ ID NO: 2477403 - RNA, 19 nt, Artificial Sequence
  Description of Artificial Sequence: Synthetic oligonucleotide
ccaaggcaucgaggggagu

SEQ ID NO: 2477404 - RNA, 19 nt, Artificial Sequence
  Description of Artificial Sequence: Synthetic oligonucleotide
gcccagcgaggagggcccu

SEQ ID NO: 2477405 - RNA, 19 nt, Artificial Sequence
  Description of Artificial Sequence: Synthetic oligonucleotide
aaggauagguacuccagcc

SEQ ID NO: 2477406 - RNA, 19 nt, Artificial Sequence
  Description of Artificial Sequence: Synthetic oligonucleotide
agagcaucaaacauggugc

SEQ ID NO: 2477407 - RNA, 19 nt, Artificial Sequence
  Description of Artificial Sequence: Synthetic oligonucleotide
gaaaauaccagcugaguac

SEQ ID NO: 2477408 - RNA, 19 nt, Artificial Sequence
  Description of Artificial Sequence: Synthetic oligonucleotide
ugcuuaaagucuaggaagg

SEQ ID NO: 2477409 - RNA, 19 nt, Artificial Sequence
  Description of Artificial Sequence: Synthetic oligonucleotide
aaugcucuuaccagggucc

SEQ ID NO: 2477410 - RNA, 19 nt, Artificial Sequence
  Description of Artificial Sequence: Synthetic oligonucleotide
agaagaauucccuuaagca

SEQ ID NO: 2477411 - RNA, 19 nt, Artificial Sequence
  Description of Artificial Sequence: Synthetic oligonucleotide
uuaagcacugagaagucag

SEQ ID NO: 2477412 - RNA, 19 nt, Artificial Sequence
  Description of Artificial Sequence: Synthetic oligonucleotide
uuugcucccacacagcuga

SEQ ID NO: 2477413 - RNA, 19 nt, Artificial Sequence
  Description of Artificial Sequence: Synthetic oligonucleotide
aguuguuccugcuccaggc

SEQ ID NO: 2477414 - RNA, 19 nt, Artificial Sequence
  Description of Artificial Sequence: Synthetic oligonucleotide
aggcccaguacuuucaggc

SEQ ID NO: 2477415 - RNA, 19 nt, Artificial Sequence
  Description of Artificial Sequence: Synthetic oligonucleotide
cugcuuaaagucuaggaag

SEQ ID NO: 2477416 - RNA, 19 nt, Artificial Sequence
  Description of Artificial Sequence: Synthetic oligonucleotide
aauucccuuaagcacugag

SEQ ID NO: 2477417 - RNA, 19 nt, Artificial Sequence
  Description of Artificial Sequence: Synthetic oligonucleotide
uuugaggagggcagcaggg

SEQ ID NO: 2477418 - RNA, 19 nt, Artificial Sequence
  Description of Artificial Sequence: Synthetic oligonucleotide
gacacagguagggagaugg

SEQ ID NO: 2477419 - RNA, 19 nt, Artificial Sequence
  Description of Artificial Sequence: Synthetic oligonucleotide
uucccuuaagcacugagaa

SEQ ID NO: 2477420 - RNA, 19 nt, Artificial Sequence
  Description of Artificial Sequence: Synthetic oligonucleotide
cugaguacaggccacagac

SEQ ID NO: 2477421 - RNA, 19 nt, Artificial Sequence
  Description of Artificial Sequence: Synthetic oligonucleotide
aaaauaccagcugaguaca

SEQ ID NO: 2477422 - RNA, 19 nt, Artificial Sequence
  Description of Artificial Sequence: Synthetic oligonucleotide
aagucagacacagguaggg

SEQ ID NO: 2477423 - RNA, 19 nt, Artificial Sequence
  Description of Artificial Sequence: Synthetic oligonucleotide
uguucaggggccaaagcug

SEQ ID NO: 2477424 - RNA, 19 nt, Artificial Sequence
  Description of Artificial Sequence: Synthetic oligonucleotide
cuuugggccagaaaauacc

SEQ ID NO: 2477425 - RNA, 19 nt, Artificial Sequence
  Description of Artificial Sequence: Synthetic oligonucleotide
cagagcaucaaacauggug

SEQ ID NO: 2477426 - RNA, 19 nt, Artificial Sequence
  Description of Artificial Sequence: Synthetic oligonucleotide
gcugaugucguccagaaug

SEQ ID NO: 2477427 - RNA, 19 nt, Artificial Sequence
  Description of Artificial Sequence: Synthetic oligonucleotide
ugagcagucagcuguacac

SEQ ID NO: 2477428 - RNA, 19 nt, Artificial Sequence
  Description of Artificial Sequence: Synthetic oligonucleotide
uuugggccagaaaauacca

SEQ ID NO: 2477429 - RNA, 19 nt, Artificial Sequence
  Description of Artificial Sequence: Synthetic oligonucleotide
aggauagguacuccagccc

SEQ ID NO: 2477430 - RNA, 19 nt, Artificial Sequence
  Description of Artificial Sequence: Synthetic oligonucleotide
cagaagaauucccuuaagc

SEQ ID NO: 2477431 - RNA, 19 nt, Artificial Sequence
  Description of Artificial Sequence: Synthetic oligonucleotide
gacaagucuucucagcccc

SEQ ID NO: 2477432 - RNA, 19 nt, Artificial Sequence
  Description of Artificial Sequence: Synthetic oligonucleotide
gagauggauccacaaagcc

SEQ ID NO: 2477433 - RNA, 19 nt, Artificial Sequence
  Description of Artificial Sequence: Synthetic oligonucleotide
acgggaggggcuuugcucc

SEQ ID NO: 2477434 - RNA, 19 nt, Artificial Sequence
  Description of Artificial Sequence: Synthetic oligonucleotide
agaaaauaccagcugagua

SEQ ID NO: 2477435 - RNA, 19 nt, Artificial Sequence
  Description of Artificial Sequence: Synthetic oligonucleotide
ugugggacccuccugcucc

SEQ ID NO: 2477436 - RNA, 19 nt, Artificial Sequence
  Description of Artificial Sequence: Synthetic oligonucleotide
aggagaaugcucuuaccag

SEQ ID NO: 2477437 - RNA, 19 nt, Artificial Sequence
  Description of Artificial Sequence: Synthetic oligonucleotide
ugcucaguccagcauggcg

SEQ ID NO: 2477438 - RNA, 19 nt, Artificial Sequence
  Description of Artificial Sequence: Synthetic oligonucleotide
cugacaagucuucucagcc

SEQ ID NO: 2477439 - RNA, 19 nt, Artificial Sequence
  Description of Artificial Sequence: Synthetic oligonucleotide
ugggccagaaaauaccagc

SEQ ID NO: 2477440 - RNA, 19 nt, Artificial Sequence
  Description of Artificial Sequence: Synthetic oligonucleotide
gaaggauagguacuccagc

SEQ ID NO: 2477441 - RNA, 19 nt, Artificial Sequence
  Description of Artificial Sequence: Synthetic oligonucleotide
cauguugggccacuggugg

SEQ ID NO: 2477442 - RNA, 19 nt, Artificial Sequence
  Description of Artificial Sequence: Synthetic oligonucleotide
gaggagaaugcucuuacca

SEQ ID NO: 2477443 - RNA, 19 nt, Artificial Sequence
  Description of Artificial Sequence: Synthetic oligonucleotide
agaggagaaugcucuuacc

SEQ ID NO: 2477444 - RNA, 19 nt, Artificial Sequence
  Description of Artificial Sequence: Synthetic oligonucleotide
aguacuuucaggccuugga

SEQ ID NO: 2477445 - RNA, 19 nt, Artificial Sequence
  Description of Artificial Sequence: Synthetic oligonucleotide
ucugacaagucuucucagc

SEQ ID NO: 2477446 - RNA, 19 nt, Artificial Sequence
  Description of Artificial Sequence: Synthetic oligonucleotide
cagguagggagauggaucc

SEQ ID NO: 2477447 - RNA, 19 nt, Artificial Sequence
  Description of Artificial Sequence: Synthetic oligonucleotide
gggagauggauccacaaag

SEQ ID NO: 2477448 - RNA, 19 nt, Artificial Sequence
  Description of Artificial Sequence: Synthetic oligonucleotide
gagaaugcucuuaccaggg

SEQ ID NO: 2477449 - RNA, 19 nt, Artificial Sequence
  Description of Artificial Sequence: Synthetic oligonucleotide
ggagaaugcucuuaccagg

SEQ ID NO: 2477450 - RNA, 19 nt, Artificial Sequence
  Description of Artificial Sequence: Synthetic oligonucleotide
ugcuccaggcacuuugagg

SEQ ID NO: 2477451 - RNA, 19 nt, Artificial Sequence
  Description of Artificial Sequence: Synthetic oligonucleotide
ucccagaggagaaugcucu

SEQ ID NO: 2477452 - RNA, 19 nt, Artificial Sequence
  Description of Artificial Sequence: Synthetic oligonucleotide
agcagucagcuguacacgg

SEQ ID NO: 2477453 - RNA, 19 nt, Artificial Sequence
  Description of Artificial Sequence: Synthetic oligonucleotide
aggguagucuuccauguug

SEQ ID NO: 2477454 - RNA, 19 nt, Artificial Sequence
  Description of Artificial Sequence: Synthetic oligonucleotide
ucagguucugacaagucuu

SEQ ID NO: 2477455 - RNA, 19 nt, Artificial Sequence
  Description of Artificial Sequence: Synthetic oligonucleotide
aaagcugagcagucagcug

SEQ ID NO: 2477456 - RNA, 19 nt, Artificial Sequence
  Description of Artificial Sequence: Synthetic oligonucleotide
cuugcucaguccagcaugg

SEQ ID NO: 2477457 - RNA, 19 nt, Artificial Sequence
  Description of Artificial Sequence: Synthetic oligonucleotide
gaugucguccagaaugugc

SEQ ID NO: 2477458 - RNA, 19 nt, Artificial Sequence
  Description of Artificial Sequence: Synthetic oligonucleotide
uuugcuccagucucuguug

SEQ ID NO: 2477459 - RNA, 19 nt, Artificial Sequence
  Description of Artificial Sequence: Synthetic oligonucleotide
aagucuaggaaggucucug

SEQ ID NO: 2477460 - RNA, 19 nt, Artificial Sequence
  Description of Artificial Sequence: Synthetic oligonucleotide
ugacaagucuucucagccc

SEQ ID NO: 2477461 - RNA, 19 nt, Artificial Sequence
  Description of Artificial Sequence: Synthetic oligonucleotide
uggaaggauagguacucca

SEQ ID NO: 2477462 - RNA, 19 nt, Artificial Sequence
  Description of Artificial Sequence: Synthetic oligonucleotide
gaaugugcuugguggaggc

SEQ ID NO: 2477463 - RNA, 19 nt, Artificial Sequence
  Description of Artificial Sequence: Synthetic oligonucleotide
aggccccucagucagguuc

SEQ ID NO: 2477464 - RNA, 19 nt, Artificial Sequence
  Description of Artificial Sequence: Synthetic oligonucleotide
gaaugcucuuaccaggguc

SEQ ID NO: 2477465 - RNA, 19 nt, Artificial Sequence
  Description of Artificial Sequence: Synthetic oligonucleotide
aaugugcuugguggaggcc

SEQ ID NO: 2477466 - RNA, 19 nt, Artificial Sequence
  Description of Artificial Sequence: Synthetic oligonucleotide
agcuguacacgggaggggc

SEQ ID NO: 2477467 - RNA, 19 nt, Artificial Sequence
  Description of Artificial Sequence: Synthetic oligonucleotide
ugacagcuacugcuuaaag

SEQ ID NO: 2477468 - RNA, 19 nt, Artificial Sequence
  Description of Artificial Sequence: Synthetic oligonucleotide
agugcagccgccaaggaug

SEQ ID NO: 2477469 - RNA, 19 nt, Artificial Sequence
  Description of Artificial Sequence: Synthetic oligonucleotide
acagguagggagauggauc

SEQ ID NO: 2477470 - RNA, 19 nt, Artificial Sequence
  Description of Artificial Sequence: Synthetic oligonucleotide
ucguccagaaugugcuugg

SEQ ID NO: 2477471 - RNA, 19 nt, Artificial Sequence
  Description of Artificial Sequence: Synthetic oligonucleotide
gauggauccacaaagcccu

SEQ ID NO: 2477472 - RNA, 19 nt, Artificial Sequence
  Description of Artificial Sequence: Synthetic oligonucleotide
cagcauggcguccagcugg

SEQ ID NO: 2477473 - RNA, 19 nt, Artificial Sequence
  Description of Artificial Sequence: Synthetic oligonucleotide
gaagucagacacagguagg

SEQ ID NO: 2477474 - RNA, 19 nt, Artificial Sequence
  Description of Artificial Sequence: Synthetic oligonucleotide
uugcuccagucucuguugg

SEQ ID NO: 2477475 - RNA, 19 nt, Artificial Sequence
  Description of Artificial Sequence: Synthetic oligonucleotide
gcacugagaagucagacac

SEQ ID NO: 2477476 - RNA, 19 nt, Artificial Sequence
  Description of Artificial Sequence: Synthetic oligonucleotide
gaguuguuccugcuccagg

SEQ ID NO: 2477477 - RNA, 19 nt, Artificial Sequence
  Description of Artificial Sequence: Synthetic oligonucleotide
ugaggagggcagcaggggc

SEQ ID NO: 2477478 - RNA, 19 nt, Artificial Sequence
  Description of Artificial Sequence: Synthetic oligonucleotide
aggaugagcugguuugcuc

SEQ ID NO: 2477479 - RNA, 19 nt, Artificial Sequence
  Description of Artificial Sequence: Synthetic oligonucleotide
agaaugugcuugguggagg

SEQ ID NO: 2477480 - RNA, 19 nt, Artificial Sequence
  Description of Artificial Sequence: Synthetic oligonucleotide
uaccacaggagggagggag

SEQ ID NO: 2477481 - RNA, 19 nt, Artificial Sequence
  Description of Artificial Sequence: Synthetic oligonucleotide
uugggccagaaaauaccag

SEQ ID NO: 2477482 - RNA, 19 nt, Artificial Sequence
  Description of Artificial Sequence: Synthetic oligonucleotide
gacaagccagccuugcuca

SEQ ID NO: 2477483 - RNA, 19 nt, Artificial Sequence
  Description of Artificial Sequence: Synthetic oligonucleotide
uccuccgugccaaugcucu

SEQ ID NO: 2477484 - RNA, 19 nt, Artificial Sequence
  Description of Artificial Sequence: Synthetic oligonucleotide
augugcuugguggaggccg

SEQ ID NO: 2477485 - RNA, 19 nt, Artificial Sequence
  Description of Artificial Sequence: Synthetic oligonucleotide
ugcuccuccgugccaaugc

SEQ ID NO: 2477486 - RNA, 19 nt, Artificial Sequence
  Description of Artificial Sequence: Synthetic oligonucleotide
ucccuuaagcacugagaag

SEQ ID NO: 2477487 - RNA, 19 nt, Artificial Sequence
  Description of Artificial Sequence: Synthetic oligonucleotide
ggaugagcugguuugcucc

SEQ ID NO: 2477488 - RNA, 19 nt, Artificial Sequence
  Description of Artificial Sequence: Synthetic oligonucleotide
ucagucagguucugacaag

SEQ ID NO: 2477489 - RNA, 19 nt, Artificial Sequence
  Description of Artificial Sequence: Synthetic oligonucleotide
auggcguccagcuggucag

SEQ ID NO: 2477490 - RNA, 19 nt, Artificial Sequence
  Description of Artificial Sequence: Synthetic oligonucleotide
uguggaaggauagguacuc

SEQ ID NO: 2477491 - RNA, 19 nt, Artificial Sequence
  Description of Artificial Sequence: Synthetic oligonucleotide
ugaguacaggccacagaca

SEQ ID NO: 2477492 - RNA, 19 nt, Artificial Sequence
  Description of Artificial Sequence: Synthetic oligonucleotide
cuuaccagggucccuguuc

SEQ ID NO: 2477493 - RNA, 19 nt, Artificial Sequence
  Description of Artificial Sequence: Synthetic oligonucleotide
agagcccuagagcagcuca

SEQ ID NO: 2477494 - RNA, 19 nt, Artificial Sequence
  Description of Artificial Sequence: Synthetic oligonucleotide
cagaggagaaugcucuuac

SEQ ID NO: 2477495 - RNA, 19 nt, Artificial Sequence
  Description of Artificial Sequence: Synthetic oligonucleotide
ucuucucagcugcucucag

SEQ ID NO: 2477496 - RNA, 19 nt, Artificial Sequence
  Description of Artificial Sequence: Synthetic oligonucleotide
acaaagcccugcugccacc

SEQ ID NO: 2477497 - RNA, 19 nt, Artificial Sequence
  Description of Artificial Sequence: Synthetic oligonucleotide
aaagucuaggaaggucucu

SEQ ID NO: 2477498 - RNA, 19 nt, Artificial Sequence
  Description of Artificial Sequence: Synthetic oligonucleotide
uggguggccagaagaauuc

SEQ ID NO: 2477499 - RNA, 19 nt, Artificial Sequence
  Description of Artificial Sequence: Synthetic oligonucleotide
gagcagucagcuguacacg

SEQ ID NO: 2477500 - RNA, 19 nt, Artificial Sequence
  Description of Artificial Sequence: Synthetic oligonucleotide
ucugacagcuacugcuuaa

SEQ ID NO: 2477501 - RNA, 19 nt, Artificial Sequence
  Description of Artificial Sequence: Synthetic oligonucleotide
auagguacuccagcccaac

SEQ ID NO: 2477502 - RNA, 19 nt, Artificial Sequence
  Description of Artificial Sequence: Synthetic oligonucleotide
augucguccagaaugugcu

SEQ ID NO: 2477503 - RNA, 19 nt, Artificial Sequence
  Description of Artificial Sequence: Synthetic oligonucleotide
cuuccuguuccuggggugg

SEQ ID NO: 2477504 - RNA, 19 nt, Artificial Sequence
  Description of Artificial Sequence: Synthetic oligonucleotide
uccagcccaaccaacccuc

SEQ ID NO: 2477505 - RNA, 19 nt, Artificial Sequence
  Description of Artificial Sequence: Synthetic oligonucleotide
ccagaaaauaccagcugag

SEQ ID NO: 2477506 - RNA, 19 nt, Artificial Sequence
  Description of Artificial Sequence: Synthetic oligonucleotide
ugcuguggaaggauaggua

SEQ ID NO: 2477507 - RNA, 19 nt, Artificial Sequence
  Description of Artificial Sequence: Synthetic oligonucleotide
agcuggaggcuccgucucc

SEQ ID NO: 2477508 - RNA, 19 nt, Artificial Sequence
  Description of Artificial Sequence: Synthetic oligonucleotide
aaauaccagcugaguacag

SEQ ID NO: 2477509 - RNA, 19 nt, Artificial Sequence
  Description of Artificial Sequence: Synthetic oligonucleotide
ugcuccagucucuguuggg

SEQ ID NO: 2477510 - RNA, 19 nt, Artificial Sequence
  Description of Artificial Sequence: Synthetic oligonucleotide
agcugguuugcuccagucu

SEQ ID NO: 2477511 - RNA, 19 nt, Artificial Sequence
  Description of Artificial Sequence: Synthetic oligonucleotide
auucccuuaagcacugaga

SEQ ID NO: 2477512 - RNA, 19 nt, Artificial Sequence
  Description of Artificial Sequence: Synthetic oligonucleotide
gccagaaaauaccagcuga

SEQ ID NO: 2477513 - RNA, 19 nt, Artificial Sequence
  Description of Artificial Sequence: Synthetic oligonucleotide
aaggaugagcugguuugcu

SEQ ID NO: 2477514 - RNA, 19 nt, Artificial Sequence
  Description of Artificial Sequence: Synthetic oligonucleotide
cuuugcucccacacagcug

SEQ ID NO: 2477515 - RNA, 19 nt, Artificial Sequence
  Description of Artificial Sequence: Synthetic oligonucleotide
ggccuggacacacaggccc

SEQ ID NO: 2477516 - RNA, 19 nt, Artificial Sequence
  Description of Artificial Sequence: Synthetic oligonucleotide
cugcucucagugcagccgc

SEQ ID NO: 2477517 - RNA, 19 nt, Artificial Sequence
  Description of Artificial Sequence: Synthetic oligonucleotide
ugagcugguuugcuccagu

SEQ ID NO: 2477518 - RNA, 19 nt, Artificial Sequence
  Description of Artificial Sequence: Synthetic oligonucleotide
ggauagguacuccagccca

SEQ ID NO: 2477519 - RNA, 19 nt, Artificial Sequence
  Description of Artificial Sequence: Synthetic oligonucleotide
ggaaggauagguacuccag

SEQ ID NO: 2477520 - RNA, 19 nt, Artificial Sequence
  Description of Artificial Sequence: Synthetic oligonucleotide
agaaugcucuuaccagggu

SEQ ID NO: 2477521 - RNA, 19 nt, Artificial Sequence
  Description of Artificial Sequence: Synthetic oligonucleotide
ucaggggccaaagcugagc

SEQ ID NO: 2477522 - RNA, 19 nt, Artificial Sequence
  Description of Artificial Sequence: Synthetic oligonucleotide
augcucuuaccaggguccc

SEQ ID NO: 2477523 - RNA, 19 nt, Artificial Sequence
  Description of Artificial Sequence: Synthetic oligonucleotide
ccagcuuugggccagaaaa

SEQ ID NO: 2477524 - RNA, 19 nt, Artificial Sequence
  Description of Artificial Sequence: Synthetic oligonucleotide
agaauucccuuaagcacug

SEQ ID NO: 2477525 - RNA, 19 nt, Artificial Sequence
  Description of Artificial Sequence: Synthetic oligonucleotide
ggcacuuugaggagggcag

SEQ ID NO: 2477526 - RNA, 19 nt, Artificial Sequence
  Description of Artificial Sequence: Synthetic oligonucleotide
ggagggagggucgacaagc

SEQ ID NO: 2477527 - RNA, 19 nt, Artificial Sequence
  Description of Artificial Sequence: Synthetic oligonucleotide
ggguagucuuccauguugg

SEQ ID NO: 2477528 - RNA, 19 nt, Artificial Sequence
  Description of Artificial Sequence: Synthetic oligonucleotide
acuuugaggagggcagcag

SEQ ID NO: 2477529 - RNA, 19 nt, Artificial Sequence
  Description of Artificial Sequence: Synthetic oligonucleotide
ucuguugggcccggccugg

SEQ ID NO: 2477530 - RNA, 19 nt, Artificial Sequence
  Description of Artificial Sequence: Synthetic oligonucleotide
gccgccaaggaugagcugg

SEQ ID NO: 2477531 - RNA, 19 nt, Artificial Sequence
  Description of Artificial Sequence: Synthetic oligonucleotide
ucgacaagccagccuugcu

SEQ ID NO: 2477532 - RNA, 19 nt, Artificial Sequence
  Description of Artificial Sequence: Synthetic oligonucleotide
cccuagagcagcucagugg

SEQ ID NO: 2477533 - RNA, 19 nt, Artificial Sequence
  Description of Artificial Sequence: Synthetic oligonucleotide
caaggaugagcugguuugc

SEQ ID NO: 2477534 - RNA, 19 nt, Artificial Sequence
  Description of Artificial Sequence: Synthetic oligonucleotide
cagaaugugcuugguggag

SEQ ID NO: 2477535 - RNA, 19 nt, Artificial Sequence
  Description of Artificial Sequence: Synthetic oligonucleotide
ggagauggauccacaaagc

SEQ ID NO: 2477536 - RNA, 19 nt, Artificial Sequence
  Description of Artificial Sequence: Synthetic oligonucleotide
ggcaggguagucuuccaug

SEQ ID NO: 2477537 - RNA, 19 nt, Artificial Sequence
  Description of Artificial Sequence: Synthetic oligonucleotide
gggagggucgacaagccag

SEQ ID NO: 2477538 - RNA, 19 nt, Artificial Sequence
  Description of Artificial Sequence: Synthetic oligonucleotide
agucuuccauguugggcca

SEQ ID NO: 2477539 - RNA, 19 nt, Artificial Sequence
  Description of Artificial Sequence: Synthetic oligonucleotide
ugcucccacacagcugagg

SEQ ID NO: 2477540 - RNA, 19 nt, Artificial Sequence
  Description of Artificial Sequence: Synthetic oligonucleotide
agucagguucugacaaguc

SEQ ID NO: 2477541 - RNA, 19 nt, Artificial Sequence
  Description of Artificial Sequence: Synthetic oligonucleotide
cuuucaggccuuggagggg

SEQ ID NO: 2477542 - RNA, 19 nt, Artificial Sequence
  Description of Artificial Sequence: Synthetic oligonucleotide
agcagcucaguggguggcc

SEQ ID NO: 2477543 - RNA, 19 nt, Artificial Sequence
  Description of Artificial Sequence: Synthetic oligonucleotide
caggcccaguacuuucagg

SEQ ID NO: 2477544 - RNA, 19 nt, Artificial Sequence
  Description of Artificial Sequence: Synthetic oligonucleotide
cacgggaggggcuuugcuc

SEQ ID NO: 2477545 - RNA, 19 nt, Artificial Sequence
  Description of Artificial Sequence: Synthetic oligonucleotide
accaacccucuuccuguuc

SEQ ID NO: 2477546 - RNA, 19 nt, Artificial Sequence
  Description of Artificial Sequence: Synthetic oligonucleotide
ucagugcagccgccaagga

SEQ ID NO: 2477547 - RNA, 19 nt, Artificial Sequence
  Description of Artificial Sequence: Synthetic oligonucleotide
cuuaagcacugagaaguca

SEQ ID NO: 2477548 - RNA, 19 nt, Artificial Sequence
  Description of Artificial Sequence: Synthetic oligonucleotide
aggccacagacacaggcuu

SEQ ID NO: 2477549 - RNA, 19 nt, Artificial Sequence
  Description of Artificial Sequence: Synthetic oligonucleotide
uggauccacaaagcccugc

SEQ ID NO: 2477550 - RNA, 19 nt, Artificial Sequence
  Description of Artificial Sequence: Synthetic oligonucleotide
acaagccagccuugcucag

SEQ ID NO: 2477551 - RNA, 19 nt, Artificial Sequence
  Description of Artificial Sequence: Synthetic oligonucleotide
ccaacccucuuccuguucc

SEQ ID NO: 2477552 - RNA, 19 nt, Artificial Sequence
  Description of Artificial Sequence: Synthetic oligonucleotide
uugggcccggccuggacac

SEQ ID NO: 2477553 - RNA, 19 nt, Artificial Sequence
  Description of Artificial Sequence: Synthetic oligonucleotide
cuguucaggggccaaagcu

SEQ ID NO: 2477554 - RNA, 19 nt, Artificial Sequence
  Description of Artificial Sequence: Synthetic oligonucleotide
ggccagaaaauaccagcug

SEQ ID NO: 2477555 - RNA, 19 nt, Artificial Sequence
  Description of Artificial Sequence: Synthetic oligonucleotide
ugaugucguccagaaugug

SEQ ID NO: 2477556 - RNA, 19 nt, Artificial Sequence
  Description of Artificial Sequence: Synthetic oligonucleotide
cucaguccagcauggcguc

SEQ ID NO: 2477557 - RNA, 19 nt, Artificial Sequence
  Description of Artificial Sequence: Synthetic oligonucleotide
aggcacuuugaggagggca

SEQ ID NO: 2477558 - RNA, 19 nt, Artificial Sequence
  Description of Artificial Sequence: Synthetic oligonucleotide
ccucacagagcccuagagc

SEQ ID NO: 2477559 - RNA, 19 nt, Artificial Sequence
  Description of Artificial Sequence: Synthetic oligonucleotide
ugguuugcuccagucucug

SEQ ID NO: 2477560 - RNA, 19 nt, Artificial Sequence
  Description of Artificial Sequence: Synthetic oligonucleotide
agcugaggccccucaguca

SEQ ID NO: 2477561 - RNA, 19 nt, Artificial Sequence
  Description of Artificial Sequence: Synthetic oligonucleotide
agggucgacaagccagccu

SEQ ID NO: 2477562 - RNA, 19 nt, Artificial Sequence
  Description of Artificial Sequence: Synthetic oligonucleotide
cagcugaggccccucaguc

SEQ ID NO: 2477563 - RNA, 19 nt, Artificial Sequence
  Description of Artificial Sequence: Synthetic oligonucleotide
ccaaccaacccucuuccug

SEQ ID NO: 2477564 - RNA, 19 nt, Artificial Sequence
  Description of Artificial Sequence: Synthetic oligonucleotide
guucaggggccaaagcuga

SEQ ID NO: 2477565 - RNA, 19 nt, Artificial Sequence
  Description of Artificial Sequence: Synthetic oligonucleotide
guggaggccgcugugggac

SEQ ID NO: 2477566 - RNA, 19 nt, Artificial Sequence
  Description of Artificial Sequence: Synthetic oligonucleotide
uggccagaagaauucccuu

SEQ ID NO: 2477567 - RNA, 19 nt, Artificial Sequence
  Description of Artificial Sequence: Synthetic oligonucleotide
cucuguugggcccggccug

SEQ ID NO: 2477568 - RNA, 19 nt, Artificial Sequence
  Description of Artificial Sequence: Synthetic oligonucleotide
agcuuugggccagaaaaua

SEQ ID NO: 2477569 - RNA, 19 nt, Artificial Sequence
  Description of Artificial Sequence: Synthetic oligonucleotide
gaaggucucugcuguggaa

SEQ ID NO: 2477570 - RNA, 19 nt, Artificial Sequence
  Description of Artificial Sequence: Synthetic oligonucleotide
uggcaggguagucuuccau

SEQ ID NO: 2477571 - RNA, 19 nt, Artificial Sequence
  Description of Artificial Sequence: Synthetic oligonucleotide
aggggccaaagcugagcag

SEQ ID NO: 2477572 - RNA, 19 nt, Artificial Sequence
  Description of Artificial Sequence: Synthetic oligonucleotide
cagucagcuguacacggga

SEQ ID NO: 2477573 - RNA, 19 nt, Artificial Sequence
  Description of Artificial Sequence: Synthetic oligonucleotide
agcugaguacaggccacag

SEQ ID NO: 2477574 - RNA, 19 nt, Artificial Sequence
  Description of Artificial Sequence: Synthetic oligonucleotide
gagcccuagagcagcucag

SEQ ID NO: 2477575 - RNA, 19 nt, Artificial Sequence
  Description of Artificial Sequence: Synthetic oligonucleotide
ucuuccauguugggccacu

SEQ ID NO: 2477576 - RNA, 19 nt, Artificial Sequence
  Description of Artificial Sequence: Synthetic oligonucleotide
agccuugcucaguccagca

SEQ ID NO: 2477577 - RNA, 19 nt, Artificial Sequence
  Description of Artificial Sequence: Synthetic oligonucleotide
ugaggccccucagucaggu

SEQ ID NO: 2477578 - RNA, 19 nt, Artificial Sequence
  Description of Artificial Sequence: Synthetic oligonucleotide
ugcucucagugcagccgcc

SEQ ID NO: 2477579 - RNA, 19 nt, Artificial Sequence
  Description of Artificial Sequence: Synthetic oligonucleotide
guugggcccggccuggaca

SEQ ID NO: 2477580 - RNA, 19 nt, Artificial Sequence
  Description of Artificial Sequence: Synthetic oligonucleotide
agucagcuguacacgggag

SEQ ID NO: 2477581 - RNA, 19 nt, Artificial Sequence
  Description of Artificial Sequence: Synthetic oligonucleotide
augcucuucucagcugcuc

SEQ ID NO: 2477582 - RNA, 19 nt, Artificial Sequence
  Description of Artificial Sequence: Synthetic oligonucleotide
uguugggccacugguggua

SEQ ID NO: 2477583 - RNA, 19 nt, Artificial Sequence
  Description of Artificial Sequence: Synthetic oligonucleotide
caaccaacccucuuccugu

SEQ ID NO: 2477584 - RNA, 19 nt, Artificial Sequence
  Description of Artificial Sequence: Synthetic oligonucleotide
aaccaacccucuuccuguu

SEQ ID NO: 2477585 - RNA, 19 nt, Artificial Sequence
  Description of Artificial Sequence: Synthetic oligonucleotide
agggagggucgacaagcca

SEQ ID NO: 2477586 - RNA, 19 nt, Artificial Sequence
  Description of Artificial Sequence: Synthetic oligonucleotide
auguugggccacugguggu

SEQ ID NO: 2477587 - RNA, 19 nt, Artificial Sequence
  Description of Artificial Sequence: Synthetic oligonucleotide
caggggccaaagcugagca

SEQ ID NO: 2477588 - RNA, 19 nt, Artificial Sequence
  Description of Artificial Sequence: Synthetic oligonucleotide
gguagggagauggauccac

SEQ ID NO: 2477589 - RNA, 19 nt, Artificial Sequence
  Description of Artificial Sequence: Synthetic oligonucleotide
guggaaggauagguacucc

SEQ ID NO: 2477590 - RNA, 19 nt, Artificial Sequence
  Description of Artificial Sequence: Synthetic oligonucleotide
gccacagacacaggcuugg

SEQ ID NO: 2477591 - RNA, 19 nt, Artificial Sequence
  Description of Artificial Sequence: Synthetic oligonucleotide
ucuuaccagggucccuguu

SEQ ID NO: 2477592 - RNA, 19 nt, Artificial Sequence
  Description of Artificial Sequence: Synthetic oligonucleotide
gucgacaagccagccuugc

SEQ ID NO: 2477593 - RNA, 19 nt, Artificial Sequence
  Description of Artificial Sequence: Synthetic oligonucleotide
gauagguacuccagcccaa

SEQ ID NO: 2477594 - RNA, 19 nt, Artificial Sequence
  Description of Artificial Sequence: Synthetic oligonucleotide
gcuuugggccagaaaauac

SEQ ID NO: 2477595 - RNA, 19 nt, Artificial Sequence
  Description of Artificial Sequence: Synthetic oligonucleotide
cugaugucguccagaaugu

SEQ ID NO: 2477596 - RNA, 19 nt, Artificial Sequence
  Description of Artificial Sequence: Synthetic oligonucleotide
uguugggcccggccuggac

SEQ ID NO: 2477597 - RNA, 19 nt, Artificial Sequence
  Description of Artificial Sequence: Synthetic oligonucleotide
cuccucccagaggagaaug

SEQ ID NO: 2477598 - RNA, 19 nt, Artificial Sequence
  Description of Artificial Sequence: Synthetic oligonucleotide
gcuugggaguuguuccugc

SEQ ID NO: 2477599 - RNA, 19 nt, Artificial Sequence
  Description of Artificial Sequence: Synthetic oligonucleotide
ggugguaccacaggaggga

SEQ ID NO: 2477600 - RNA, 19 nt, Artificial Sequence
  Description of Artificial Sequence: Synthetic oligonucleotide
aguacaggccacagacaca

SEQ ID NO: 2477601 - RNA, 19 nt, Artificial Sequence
  Description of Artificial Sequence: Synthetic oligonucleotide
ugcugaugucguccagaau

SEQ ID NO: 2477602 - RNA, 19 nt, Artificial Sequence
  Description of Artificial Sequence: Synthetic oligonucleotide
gagcagcucaguggguggc

SEQ ID NO: 2477603 - RNA, 19 nt, Artificial Sequence
  Description of Artificial Sequence: Synthetic oligonucleotide
caguacuuucaggccuugg

SEQ ID NO: 2477604 - RNA, 19 nt, Artificial Sequence
  Description of Artificial Sequence: Synthetic oligonucleotide
acacgggaggggcuuugcu

SEQ ID NO: 2477605 - RNA, 19 nt, Artificial Sequence
  Description of Artificial Sequence: Synthetic oligonucleotide
ggcccaguacuuucaggcc

SEQ ID NO: 2477606 - RNA, 19 nt, Artificial Sequence
  Description of Artificial Sequence: Synthetic oligonucleotide
cccaaagaccaucagugca

SEQ ID NO: 2477607 - RNA, 19 nt, Artificial Sequence
  Description of Artificial Sequence: Synthetic oligonucleotide
cugagcagucagcuguaca

SEQ ID NO: 2477608 - RNA, 19 nt, Artificial Sequence
  Description of Artificial Sequence: Synthetic oligonucleotide
aguggguggccagaagaau

SEQ ID NO: 2477609 - RNA, 19 nt, Artificial Sequence
  Description of Artificial Sequence: Synthetic oligonucleotide
gcuacugcuuaaagucuag

SEQ ID NO: 2477610 - RNA, 19 nt, Artificial Sequence
  Description of Artificial Sequence: Synthetic oligonucleotide
gacacaggcuugggaguug

SEQ ID NO: 2477611 - RNA, 19 nt, Artificial Sequence
  Description of Artificial Sequence: Synthetic oligonucleotide
gcucuuaccagggucccug

SEQ ID NO: 2477612 - RNA, 19 nt, Artificial Sequence
  Description of Artificial Sequence: Synthetic oligonucleotide
ccauguugggccacuggug

SEQ ID NO: 2477613 - RNA, 19 nt, Artificial Sequence
  Description of Artificial Sequence: Synthetic oligonucleotide
cacaggcccaguacuuuca

SEQ ID NO: 2477614 - RNA, 19 nt, Artificial Sequence
  Description of Artificial Sequence: Synthetic oligonucleotide
uacacgggaggggcuuugc

SEQ ID NO: 2477615 - RNA, 19 nt, Artificial Sequence
  Description of Artificial Sequence: Synthetic oligonucleotide
augagcugguuugcuccag

SEQ ID NO: 2477616 - RNA, 19 nt, Artificial Sequence
  Description of Artificial Sequence: Synthetic oligonucleotide
cagccuugcucaguccagc

SEQ ID NO: 2477617 - RNA, 19 nt, Artificial Sequence
  Description of Artificial Sequence: Synthetic oligonucleotide
gcagccgccaaggaugagc

SEQ ID NO: 2477618 - RNA, 19 nt, Artificial Sequence
  Description of Artificial Sequence: Synthetic oligonucleotide
cccuuaagcacugagaagu

SEQ ID NO: 2477619 - RNA, 19 nt, Artificial Sequence
  Description of Artificial Sequence: Synthetic oligonucleotide
ggaguuguuccugcuccag

SEQ ID NO: 2477620 - RNA, 19 nt, Artificial Sequence
  Description of Artificial Sequence: Synthetic oligonucleotide
ugcuugguggaggccgcug

SEQ ID NO: 2477621 - RNA, 19 nt, Artificial Sequence
  Description of Artificial Sequence: Synthetic oligonucleotide
ugucguccagaaugugcuu

SEQ ID NO: 2477622 - RNA, 19 nt, Artificial Sequence
  Description of Artificial Sequence: Synthetic oligonucleotide
ccccaaagaccaucagugc

SEQ ID NO: 2477623 - RNA, 19 nt, Artificial Sequence
  Description of Artificial Sequence: Synthetic oligonucleotide
cugaggccccucagucagg

SEQ ID NO: 2477624 - RNA, 19 nt, Artificial Sequence
  Description of Artificial Sequence: Synthetic oligonucleotide
guagggagauggauccaca

SEQ ID NO: 2477625 - RNA, 19 nt, Artificial Sequence
  Description of Artificial Sequence: Synthetic oligonucleotide
ccuuaagcacugagaaguc

SEQ ID NO: 2477626 - RNA, 19 nt, Artificial Sequence
  Description of Artificial Sequence: Synthetic oligonucleotide
gccaaugcucuucucagcu

SEQ ID NO: 2477627 - RNA, 19 nt, Artificial Sequence
  Description of Artificial Sequence: Synthetic oligonucleotide
ggagggucgacaagccagc

SEQ ID NO: 2477628 - RNA, 19 nt, Artificial Sequence
  Description of Artificial Sequence: Synthetic oligonucleotide
cagcucaguggguggccag

SEQ ID NO: 2477629 - RNA, 19 nt, Artificial Sequence
  Description of Artificial Sequence: Synthetic oligonucleotide
cugccaccuccucccagag

SEQ ID NO: 2477630 - RNA, 19 nt, Artificial Sequence
  Description of Artificial Sequence: Synthetic oligonucleotide
guacuccagcccaaccaac

SEQ ID NO: 2477631 - RNA, 19 nt, Artificial Sequence
  Description of Artificial Sequence: Synthetic oligonucleotide
guggccagaagaauucccu

SEQ ID NO: 2477632 - RNA, 19 nt, Artificial Sequence
  Description of Artificial Sequence: Synthetic oligonucleotide
ggccagaagaauucccuua

SEQ ID NO: 2477633 - RNA, 19 nt, Artificial Sequence
  Description of Artificial Sequence: Synthetic oligonucleotide
cagaaaauaccagcugagu

SEQ ID NO: 2477634 - RNA, 19 nt, Artificial Sequence
  Description of Artificial Sequence: Synthetic oligonucleotide
cuuccauguugggccacug

SEQ ID NO: 2477635 - RNA, 19 nt, Artificial Sequence
  Description of Artificial Sequence: Synthetic oligonucleotide
cucuucucagcugcucuca

SEQ ID NO: 2477636 - RNA, 19 nt, Artificial Sequence
  Description of Artificial Sequence: Synthetic oligonucleotide
ccagcugaguacaggccac

SEQ ID NO: 2477637 - RNA, 19 nt, Artificial Sequence
  Description of Artificial Sequence: Synthetic oligonucleotide
agcccuagagcagcucagu

SEQ ID NO: 2477638 - RNA, 19 nt, Artificial Sequence
  Description of Artificial Sequence: Synthetic oligonucleotide
cagcuggaggcuccgucuc

SEQ ID NO: 2477639 - RNA, 19 nt, Artificial Sequence
  Description of Artificial Sequence: Synthetic oligonucleotide
cugacagcuacugcuuaaa

SEQ ID NO: 2477640 - RNA, 19 nt, Artificial Sequence
  Description of Artificial Sequence: Synthetic oligonucleotide
gcuuugcucccacacagcu

SEQ ID NO: 2477641 - RNA, 19 nt, Artificial Sequence
  Description of Artificial Sequence: Synthetic oligonucleotide
ccaaugcucuucucagcug

SEQ ID NO: 2477642 - RNA, 19 nt, Artificial Sequence
  Description of Artificial Sequence: Synthetic oligonucleotide
gcccuagagcagcucagug

SEQ ID NO: 2477643 - RNA, 19 nt, Artificial Sequence
  Description of Artificial Sequence: Synthetic oligonucleotide
cacuuugaggagggcagca

SEQ ID NO: 2477644 - RNA, 19 nt, Artificial Sequence
  Description of Artificial Sequence: Synthetic oligonucleotide
gccagccuugcucagucca

SEQ ID NO: 2477645 - RNA, 19 nt, Artificial Sequence
  Description of Artificial Sequence: Synthetic oligonucleotide
ugcucuuaccagggucccu

SEQ ID NO: 2477646 - RNA, 19 nt, Artificial Sequence
  Description of Artificial Sequence: Synthetic oligonucleotide
ccagaaugugcuuggugga

SEQ ID NO: 2477647 - RNA, 19 nt, Artificial Sequence
  Description of Artificial Sequence: Synthetic oligonucleotide
agcucaguggguggccaga

SEQ ID NO: 2477648 - RNA, 19 nt, Artificial Sequence
  Description of Artificial Sequence: Synthetic oligonucleotide
ggccgagccgggcagccag

SEQ ID NO: 2477649 - RNA, 19 nt, Artificial Sequence
  Description of Artificial Sequence: Synthetic oligonucleotide
cugugggacccuccugcuc

SEQ ID NO: 2477650 - RNA, 19 nt, Artificial Sequence
  Description of Artificial Sequence: Synthetic oligonucleotide
cgcugugggacccuccugc

SEQ ID NO: 2477651 - RNA, 19 nt, Artificial Sequence
  Description of Artificial Sequence: Synthetic oligonucleotide
gcaggguagucuuccaugu

SEQ ID NO: 2477652 - RNA, 19 nt, Artificial Sequence
  Description of Artificial Sequence: Synthetic oligonucleotide
ccagccuugcucaguccag

SEQ ID NO: 2477653 - RNA, 19 nt, Artificial Sequence
  Description of Artificial Sequence: Synthetic oligonucleotide
gcucuucucagcugcucuc

SEQ ID NO: 2477654 - RNA, 19 nt, Artificial Sequence
  Description of Artificial Sequence: Synthetic oligonucleotide
ggauccacaaagcccugcu

SEQ ID NO: 2477655 - RNA, 19 nt, Artificial Sequence
  Description of Artificial Sequence: Synthetic oligonucleotide
cgacaagccagccuugcuc

SEQ ID NO: 2477656 - RNA, 19 nt, Artificial Sequence
  Description of Artificial Sequence: Synthetic oligonucleotide
gggagggagggucgacaag

SEQ ID NO: 2477657 - RNA, 19 nt, Artificial Sequence
  Description of Artificial Sequence: Synthetic oligonucleotide
cgugccaaugcucuucuca

SEQ ID NO: 2477658 - RNA, 19 nt, Artificial Sequence
  Description of Artificial Sequence: Synthetic oligonucleotide
uguacacgggaggggcuuu

SEQ ID NO: 2477659 - RNA, 19 nt, Artificial Sequence
  Description of Artificial Sequence: Synthetic oligonucleotide
ggggcuuugcucccacaca

SEQ ID NO: 2477660 - RNA, 19 nt, Artificial Sequence
  Description of Artificial Sequence: Synthetic oligonucleotide
gggucgacaagccagccuu

SEQ ID NO: 2477661 - RNA, 19 nt, Artificial Sequence
  Description of Artificial Sequence: Synthetic oligonucleotide
ggcagcuggaggcuccguc

SEQ ID NO: 2477662 - RNA, 19 nt, Artificial Sequence
  Description of Artificial Sequence: Synthetic oligonucleotide
cugguuugcuccagucucu

SEQ ID NO: 2477663 - RNA, 19 nt, Artificial Sequence
  Description of Artificial Sequence: Synthetic oligonucleotide
cuugggaguuguuccugcu

SEQ ID NO: 2477664 - RNA, 19 nt, Artificial Sequence
  Description of Artificial Sequence: Synthetic oligonucleotide
guacacgggaggggcuuug

SEQ ID NO: 2477665 - RNA, 19 nt, Artificial Sequence
  Description of Artificial Sequence: Synthetic oligonucleotide
gcucaguccagcauggcgu

SEQ ID NO: 2477666 - RNA, 19 nt, Artificial Sequence
  Description of Artificial Sequence: Synthetic oligonucleotide
acacagguagggagaugga

SEQ ID NO: 2477667 - RNA, 19 nt, Artificial Sequence
  Description of Artificial Sequence: Synthetic oligonucleotide
agguagggagauggaucca

SEQ ID NO: 2477668 - RNA, 19 nt, Artificial Sequence
  Description of Artificial Sequence: Synthetic oligonucleotide
accuccucccagaggagaa

SEQ ID NO: 2477669 - RNA, 19 nt, Artificial Sequence
  Description of Artificial Sequence: Synthetic oligonucleotide
cugcuguggaaggauaggu

SEQ ID NO: 2477670 - RNA, 19 nt, Artificial Sequence
  Description of Artificial Sequence: Synthetic oligonucleotide
cagccgccaaggaugagcu

SEQ ID NO: 2477671 - RNA, 19 nt, Artificial Sequence
  Description of Artificial Sequence: Synthetic oligonucleotide
ccagucucuguugggcccg

SEQ ID NO: 2477672 - RNA, 19 nt, Artificial Sequence
  Description of Artificial Sequence: Synthetic oligonucleotide
guggcaggguagucuucca

SEQ ID NO: 2477673 - RNA, 19 nt, Artificial Sequence
  Description of Artificial Sequence: Synthetic oligonucleotide
auggauccacaaagcccug

SEQ ID NO: 2477674 - RNA, 19 nt, Artificial Sequence
  Description of Artificial Sequence: Synthetic oligonucleotide
agccgccaaggaugagcug

SEQ ID NO: 2477675 - RNA, 19 nt, Artificial Sequence
  Description of Artificial Sequence: Synthetic oligonucleotide
ggcuugggaguuguuccug

SEQ ID NO: 2477676 - RNA, 19 nt, Artificial Sequence
  Description of Artificial Sequence: Synthetic oligonucleotide
cuucucagcugcucucagu

SEQ ID NO: 2477677 - RNA, 19 nt, Artificial Sequence
  Description of Artificial Sequence: Synthetic oligonucleotide
gggaguuguuccugcucca

SEQ ID NO: 2477678 - RNA, 19 nt, Artificial Sequence
  Description of Artificial Sequence: Synthetic oligonucleotide
cucucagugcagccgccaa

SEQ ID NO: 2477679 - RNA, 19 nt, Artificial Sequence
  Description of Artificial Sequence: Synthetic oligonucleotide
ggggccaaagcugagcagu

SEQ ID NO: 2477680 - RNA, 19 nt, Artificial Sequence
  Description of Artificial Sequence: Synthetic oligonucleotide
cagcuuugggccagaaaau

SEQ ID NO: 2477681 - RNA, 19 nt, Artificial Sequence
  Description of Artificial Sequence: Synthetic oligonucleotide
gcacuuugaggagggcagc

SEQ ID NO: 2477682 - RNA, 19 nt, Artificial Sequence
  Description of Artificial Sequence: Synthetic oligonucleotide
gcccaguacuuucaggccu

SEQ ID NO: 2477683 - RNA, 19 nt, Artificial Sequence
  Description of Artificial Sequence: Synthetic oligonucleotide
agcuggucagccagagcau

SEQ ID NO: 2477684 - RNA, 19 nt, Artificial Sequence
  Description of Artificial Sequence: Synthetic oligonucleotide
gggccagaaaauaccagcu

SEQ ID NO: 2477685 - RNA, 19 nt, Artificial Sequence
  Description of Artificial Sequence: Synthetic oligonucleotide
guggguggccagaagaauu

SEQ ID NO: 2477686 - RNA, 19 nt, Artificial Sequence
  Description of Artificial Sequence: Synthetic oligonucleotide
cccugcugccaccuccucc

SEQ ID NO: 2477687 - RNA, 19 nt, Artificial Sequence
  Description of Artificial Sequence: Synthetic oligonucleotide
ggccacagacacaggcuug

SEQ ID NO: 2477688 - RNA, 19 nt, Artificial Sequence
  Description of Artificial Sequence: Synthetic oligonucleotide
cagucucuguugggcccgg

SEQ ID NO: 2477689 - RNA, 19 nt, Artificial Sequence
  Description of Artificial Sequence: Synthetic oligonucleotide
gguggaggccgcuguggga

SEQ ID NO: 2477690 - RNA, 19 nt, Artificial Sequence
  Description of Artificial Sequence: Synthetic oligonucleotide
cugcuccuccgugccaaug

SEQ ID NO: 2477691 - RNA, 19 nt, Artificial Sequence
  Description of Artificial Sequence: Synthetic oligonucleotide
gcuggucagccagagcauc

SEQ ID NO: 2477692 - RNA, 19 nt, Artificial Sequence
  Description of Artificial Sequence: Synthetic oligonucleotide
ugcagccgccaaggaugag

SEQ ID NO: 2477693 - RNA, 19 nt, Artificial Sequence
  Description of Artificial Sequence: Synthetic oligonucleotide
cacagguagggagauggau

SEQ ID NO: 2477694 - RNA, 19 nt, Artificial Sequence
  Description of Artificial Sequence: Synthetic oligonucleotide
gcccggccuggacacacag

SEQ ID NO: 2477695 - RNA, 19 nt, Artificial Sequence
  Description of Artificial Sequence: Synthetic oligonucleotide
cccuguucaggggccaaag

SEQ ID NO: 2477696 - RNA, 19 nt, Artificial Sequence
  Description of Artificial Sequence: Synthetic oligonucleotide
ggccacuggugguaccaca

SEQ ID NO: 2477697 - RNA, 19 nt, Artificial Sequence
  Description of Artificial Sequence: Synthetic oligonucleotide
ggucgacaagccagccuug

SEQ ID NO: 2477698 - RNA, 19 nt, Artificial Sequence
  Description of Artificial Sequence: Synthetic oligonucleotide
agccgggcagccagcuuug

SEQ ID NO: 2477699 - RNA, 19 nt, Artificial Sequence
  Description of Artificial Sequence: Synthetic oligonucleotide
cagagcccuagagcagcuc

SEQ ID NO: 2477700 - RNA, 19 nt, Artificial Sequence
  Description of Artificial Sequence: Synthetic oligonucleotide
aggccgcugugggacccuc

SEQ ID NO: 2477701 - RNA, 19 nt, Artificial Sequence
  Description of Artificial Sequence: Synthetic oligonucleotide
gggucccuguucaggggcc

SEQ ID NO: 2477702 - RNA, 19 nt, Artificial Sequence
  Description of Artificial Sequence: Synthetic oligonucleotide
cccggccuggacacacagg

SEQ ID NO: 2477703 - RNA, 19 nt, Artificial Sequence
  Description of Artificial Sequence: Synthetic oligonucleotide
cagcugaguacaggccaca

SEQ ID NO: 2477704 - RNA, 19 nt, Artificial Sequence
  Description of Artificial Sequence: Synthetic oligonucleotide
caacccucuuccuguuccu

SEQ ID NO: 2477705 - RNA, 19 nt, Artificial Sequence
  Description of Artificial Sequence: Synthetic oligonucleotide
ggccaaagcugagcaguca

SEQ ID NO: 2477706 - RNA, 19 nt, Artificial Sequence
  Description of Artificial Sequence: Synthetic oligonucleotide
gggccaaagcugagcaguc

SEQ ID NO: 2477707 - RNA, 19 nt, Artificial Sequence
  Description of Artificial Sequence: Synthetic oligonucleotide
gccaaggaugagcugguuu

SEQ ID NO: 2477708 - RNA, 19 nt, Artificial Sequence
  Description of Artificial Sequence: Synthetic oligonucleotide
caaagcccugcugccaccu

SEQ ID NO: 2477709 - RNA, 19 nt, Artificial Sequence
  Description of Artificial Sequence: Synthetic oligonucleotide
gcuugguggaggccgcugu

SEQ ID NO: 2477710 - RNA, 19 nt, Artificial Sequence
  Description of Artificial Sequence: Synthetic oligonucleotide
cucuuaccagggucccugu

SEQ ID NO: 2477711 - RNA, 19 nt, Artificial Sequence
  Description of Artificial Sequence: Synthetic oligonucleotide
guaccacaggagggaggga

SEQ ID NO: 2477712 - RNA, 19 nt, Artificial Sequence
  Description of Artificial Sequence: Synthetic oligonucleotide
gcagcucaguggguggcca

SEQ ID NO: 2477713 - RNA, 19 nt, Artificial Sequence
  Description of Artificial Sequence: Synthetic oligonucleotide
gguuugcuccagucucugu

SEQ ID NO: 2477714 - RNA, 19 nt, Artificial Sequence
  Description of Artificial Sequence: Synthetic oligonucleotide
gccagcuuugggccagaaa

SEQ ID NO: 2477715 - RNA, 19 nt, Artificial Sequence
  Description of Artificial Sequence: Synthetic oligonucleotide
caagccagccuugcucagu

SEQ ID NO: 2477716 - RNA, 19 nt, Artificial Sequence
  Description of Artificial Sequence: Synthetic oligonucleotide
ggagggagggagggucgac

SEQ ID NO: 2477717 - RNA, 19 nt, Artificial Sequence
  Description of Artificial Sequence: Synthetic oligonucleotide
ggucugacagcuacugcuu

SEQ ID NO: 2477718 - RNA, 19 nt, Artificial Sequence
  Description of Artificial Sequence: Synthetic oligonucleotide
gccuggacacacaggccca

SEQ ID NO: 2477719 - RNA, 19 nt, Artificial Sequence
  Description of Artificial Sequence: Synthetic oligonucleotide
ccaguacuuucaggccuug

SEQ ID NO: 2477720 - RNA, 19 nt, Artificial Sequence
  Description of Artificial Sequence: Synthetic oligonucleotide
ggucccuguucaggggcca

SEQ ID NO: 2477721 - RNA, 19 nt, Artificial Sequence
  Description of Artificial Sequence: Synthetic oligonucleotide
agccagcuuugggccagaa

SEQ ID NO: 2477722 - RNA, 19 nt, Artificial Sequence
  Description of Artificial Sequence: Synthetic oligonucleotide
ggggccgagccgggcagcc

SEQ ID NO: 2477723 - RNA, 19 nt, Artificial Sequence
  Description of Artificial Sequence: Synthetic oligonucleotide
cuguacacgggaggggcuu

SEQ ID NO: 2477724 - RNA, 19 nt, Artificial Sequence
  Description of Artificial Sequence: Synthetic oligonucleotide
gucccuguucaggggccaa

SEQ ID NO: 2477725 - RNA, 19 nt, Artificial Sequence
  Description of Artificial Sequence: Synthetic oligonucleotide
gggccacuggugguaccac

SEQ ID NO: 2477726 - RNA, 19 nt, Artificial Sequence
  Description of Artificial Sequence: Synthetic oligonucleotide
ccgcugugggacccuccug

SEQ ID NO: 2477727 - RNA, 19 nt, Artificial Sequence
  Description of Artificial Sequence: Synthetic oligonucleotide
gcuguacacgggaggggcu

SEQ ID NO: 2477728 - RNA, 19 nt, Artificial Sequence
  Description of Artificial Sequence: Synthetic oligonucleotide
ccgugccaaugcucuucuc

SEQ ID NO: 2477729 - RNA, 19 nt, Artificial Sequence
  Description of Artificial Sequence: Synthetic oligonucleotide
gaggccgcugugggacccu

SEQ ID NO: 2477730 - RNA, 19 nt, Artificial Sequence
  Description of Artificial Sequence: Synthetic oligonucleotide
cagcccaaccaacccucuu

SEQ ID NO: 2477731 - RNA, 19 nt, Artificial Sequence
  Description of Artificial Sequence: Synthetic oligonucleotide
gaggccccucagucagguu

SEQ ID NO: 2477732 - RNA, 19 nt, Artificial Sequence
  Description of Artificial Sequence: Synthetic oligonucleotide
gccgagccgggcagccagc

SEQ ID NO: 2477733 - RNA, 19 nt, Artificial Sequence
  Description of Artificial Sequence: Synthetic oligonucleotide
gugcuugguggaggccgcu

SEQ ID NO: 2477734 - RNA, 19 nt, Artificial Sequence
  Description of Artificial Sequence: Synthetic oligonucleotide
cacaggcuugggaguuguu

SEQ ID NO: 2477735 - RNA, 19 nt, Artificial Sequence
  Description of Artificial Sequence: Synthetic oligonucleotide
ccgccaaggaugagcuggu

SEQ ID NO: 2477736 - RNA, 19 nt, Artificial Sequence
  Description of Artificial Sequence: Synthetic oligonucleotide
gccccucagucagguucug

SEQ ID NO: 2477737 - RNA, 19 nt, Artificial Sequence
  Description of Artificial Sequence: Synthetic oligonucleotide
cagccagcuuugggccaga

SEQ ID NO: 2477738 - RNA, 19 nt, Artificial Sequence
  Description of Artificial Sequence: Synthetic oligonucleotide
gcauggcguccagcugguc

SEQ ID NO: 2477739 - RNA, 19 nt, Artificial Sequence
  Description of Artificial Sequence: Synthetic oligonucleotide
cccagaggagaaugcucuu

SEQ ID NO: 2477740 - RNA, 19 nt, Artificial Sequence
  Description of Artificial Sequence: Synthetic oligonucleotide
ggcccggccuggacacaca

SEQ ID NO: 2477741 - RNA, 19 nt, Artificial Sequence
  Description of Artificial Sequence: Synthetic oligonucleotide
gggccgagccgggcagcca

SEQ ID NO: 2477742 - RNA, 19 nt, Artificial Sequence
  Description of Artificial Sequence: Synthetic oligonucleotide
ccuccucccagaggagaau

SEQ ID NO: 2477743 - RNA, 19 nt, Artificial Sequence
  Description of Artificial Sequence: Synthetic oligonucleotide
ccacacagcugaggccccu

SEQ ID NO: 2477744 - RNA, 19 nt, Artificial Sequence
  Description of Artificial Sequence: Synthetic oligonucleotide
ccgagccgggcagccagcu

SEQ ID NO: 2477745 - RNA, 19 nt, Artificial Sequence
  Description of Artificial Sequence: Synthetic oligonucleotide
cgccaaggaugagcugguu

SEQ ID NO: 2477746 - RNA, 19 nt, Artificial Sequence
  Description of Artificial Sequence: Synthetic oligonucleotide
aaauguaauccucugaagc

SEQ ID NO: 2477747 - RNA, 19 nt, Artificial Sequence
  Description of Artificial Sequence: Synthetic oligonucleotide
uguaccaugacaaugguac

SEQ ID NO: 2477748 - RNA, 19 nt, Artificial Sequence
  Description of Artificial Sequence: Synthetic oligonucleotide
uucacaaguaaacugacag

SEQ ID NO: 2477749 - RNA, 19 nt, Artificial Sequence
  Description of Artificial Sequence: Synthetic oligonucleotide
aauuccuuggggcugaggg

SEQ ID NO: 2477750 - RNA, 19 nt, Artificial Sequence
  Description of Artificial Sequence: Synthetic oligonucleotide
ucuuaagcuguucauaggg

SEQ ID NO: 2477751 - RNA, 19 nt, Artificial Sequence
  Description of Artificial Sequence: Synthetic oligonucleotide
uucauaaaauuccuugggg

SEQ ID NO: 2477752 - RNA, 19 nt, Artificial Sequence
  Description of Artificial Sequence: Synthetic oligonucleotide
aaaggcaucggccaugaag

SEQ ID NO: 2477753 - RNA, 19 nt, Artificial Sequence
  Description of Artificial Sequence: Synthetic oligonucleotide
ucauaaaauuccuuggggc

SEQ ID NO: 2477754 - RNA, 19 nt, Artificial Sequence
  Description of Artificial Sequence: Synthetic oligonucleotide
gguaguugagcuuaggucg

SEQ ID NO: 2477755 - RNA, 19 nt, Artificial Sequence
  Description of Artificial Sequence: Synthetic oligonucleotide
aagucucucgggcaaaagg

SEQ ID NO: 2477756 - RNA, 19 nt, Artificial Sequence
  Description of Artificial Sequence: Synthetic oligonucleotide
cuuuaagugucacuggugc

SEQ ID NO: 2477757 - RNA, 19 nt, Artificial Sequence
  Description of Artificial Sequence: Synthetic oligonucleotide
cuguucauagggcagaggg

SEQ ID NO: 2477758 - RNA, 19 nt, Artificial Sequence
  Description of Artificial Sequence: Synthetic oligonucleotide
gaaggaucaacacccgugg

SEQ ID NO: 2477759 - RNA, 19 nt, Artificial Sequence
  Description of Artificial Sequence: Synthetic oligonucleotide
uuuagaaguucacaaguaa

SEQ ID NO: 2477760 - RNA, 19 nt, Artificial Sequence
  Description of Artificial Sequence: Synthetic oligonucleotide
gaagccauggcugggaugg

SEQ ID NO: 2477761 - RNA, 19 nt, Artificial Sequence
  Description of Artificial Sequence: Synthetic oligonucleotide
cucacuaaaggcaucggcc

SEQ ID NO: 2477762 - RNA, 19 nt, Artificial Sequence
  Description of Artificial Sequence: Synthetic oligonucleotide
uacaugauaugcuuuagaa

SEQ ID NO: 2477763 - RNA, 19 nt, Artificial Sequence
  Description of Artificial Sequence: Synthetic oligonucleotide
gauggcucggaagagacgg

SEQ ID NO: 2477764 - RNA, 19 nt, Artificial Sequence
  Description of Artificial Sequence: Synthetic oligonucleotide
cuagguuucuuccuuacag

SEQ ID NO: 2477765 - RNA, 19 nt, Artificial Sequence
  Description of Artificial Sequence: Synthetic oligonucleotide
gagaauucagccauugucc

SEQ ID NO: 2477766 - RNA, 19 nt, Artificial Sequence
  Description of Artificial Sequence: Synthetic oligonucleotide
uuagaaguucacaaguaaa

SEQ ID NO: 2477767 - RNA, 19 nt, Artificial Sequence
  Description of Artificial Sequence: Synthetic oligonucleotide
ucaaguucauaaaauuccu

SEQ ID NO: 2477768 - RNA, 19 nt, Artificial Sequence
  Description of Artificial Sequence: Synthetic oligonucleotide
ucgguagaaguucuuaagc

SEQ ID NO: 2477769 - RNA, 19 nt, Artificial Sequence
  Description of Artificial Sequence: Synthetic oligonucleotide
caugauaugcuuuagaagu

SEQ ID NO: 2477770 - RNA, 19 nt, Artificial Sequence
  Description of Artificial Sequence: Synthetic oligonucleotide
acaugauaugcuuuagaag

SEQ ID NO: 2477771 - RNA, 19 nt, Artificial Sequence
  Description of Artificial Sequence: Synthetic oligonucleotide
uuaagcuguucauagggca

SEQ ID NO: 2477772 - RNA, 19 nt, Artificial Sequence
  Description of Artificial Sequence: Synthetic oligonucleotide
caaguaaacugacagcagc

SEQ ID NO: 2477773 - RNA, 19 nt, Artificial Sequence
  Description of Artificial Sequence: Synthetic oligonucleotide
gauuggaagguuccugggg

SEQ ID NO: 2477774 - RNA, 19 nt, Artificial Sequence
  Description of Artificial Sequence: Synthetic oligonucleotide
uucuaggugacugaggaca

SEQ ID NO: 2477775 - RNA, 19 nt, Artificial Sequence
  Description of Artificial Sequence: Synthetic oligonucleotide
ugagcuuaggucgaaacca

SEQ ID NO: 2477776 - RNA, 19 nt, Artificial Sequence
  Description of Artificial Sequence: Synthetic oligonucleotide
aaccuuuaagugucacugg

SEQ ID NO: 2477777 - RNA, 19 nt, Artificial Sequence
  Description of Artificial Sequence: Synthetic oligonucleotide
agagacggcgcaaacaagc

SEQ ID NO: 2477778 - RNA, 19 nt, Artificial Sequence
  Description of Artificial Sequence: Synthetic oligonucleotide
agauuuucgguagaaguuc

SEQ ID NO: 2477779 - RNA, 19 nt, Artificial Sequence
  Description of Artificial Sequence: Synthetic oligonucleotide
aaguucacaaguaaacuga

SEQ ID NO: 2477780 - RNA, 19 nt, Artificial Sequence
  Description of Artificial Sequence: Synthetic oligonucleotide
ugcuuuagaaguucacaag

SEQ ID NO: 2477781 - RNA, 19 nt, Artificial Sequence
  Description of Artificial Sequence: Synthetic oligonucleotide
aggauuggaagguuccugg

SEQ ID NO: 2477782 - RNA, 19 nt, Artificial Sequence
  Description of Artificial Sequence: Synthetic oligonucleotide
uugagcuuaggucgaaacc

SEQ ID NO: 2477783 - RNA, 19 nt, Artificial Sequence
  Description of Artificial Sequence: Synthetic oligonucleotide
gucaccgugaguuuguggc

SEQ ID NO: 2477784 - RNA, 19 nt, Artificial Sequence
  Description of Artificial Sequence: Synthetic oligonucleotide
uucgguagaaguucuuaag

SEQ ID NO: 2477785 - RNA, 19 nt, Artificial Sequence
  Description of Artificial Sequence: Synthetic oligonucleotide
uaagcuguucauagggcag

SEQ ID NO: 2477786 - RNA, 19 nt, Artificial Sequence
  Description of Artificial Sequence: Synthetic oligonucleotide
aaggcaucggccaugaaga

SEQ ID NO: 2477787 - RNA, 19 nt, Artificial Sequence
  Description of Artificial Sequence: Synthetic oligonucleotide
uaugcuuuagaaguucaca

SEQ ID NO: 2477788 - RNA, 19 nt, Artificial Sequence
  Description of Artificial Sequence: Synthetic oligonucleotide
cucauucagucacucaugg

SEQ ID NO: 2477789 - RNA, 19 nt, Artificial Sequence
  Description of Artificial Sequence: Synthetic oligonucleotide
auggaaaccuuuaaguguc

SEQ ID NO: 2477790 - RNA, 19 nt, Artificial Sequence
  Description of Artificial Sequence: Synthetic oligonucleotide
uccucauucagucacucau

SEQ ID NO: 2477791 - RNA, 19 nt, Artificial Sequence
  Description of Artificial Sequence: Synthetic oligonucleotide
ucacuaaaggcaucggcca

SEQ ID NO: 2477792 - RNA, 19 nt, Artificial Sequence
  Description of Artificial Sequence: Synthetic oligonucleotide
cuuaagcuguucauagggc

SEQ ID NO: 2477793 - RNA, 19 nt, Artificial Sequence
  Description of Artificial Sequence: Synthetic oligonucleotide
caagcugcuguguucaggc

SEQ ID NO: 2477794 - RNA, 19 nt, Artificial Sequence
  Description of Artificial Sequence: Synthetic oligonucleotide
uaggucgaaaccaaucuuc

SEQ ID NO: 2477795 - RNA, 19 nt, Artificial Sequence
  Description of Artificial Sequence: Synthetic oligonucleotide
acaaugguacccaugagug

SEQ ID NO: 2477796 - RNA, 19 nt, Artificial Sequence
  Description of Artificial Sequence: Synthetic oligonucleotide
auuggaagguuccuggggu

SEQ ID NO: 2477797 - RNA, 19 nt, Artificial Sequence
  Description of Artificial Sequence: Synthetic oligonucleotide
aaaccaccggcaccaaguc

SEQ ID NO: 2477798 - RNA, 19 nt, Artificial Sequence
  Description of Artificial Sequence: Synthetic oligonucleotide
uuuaagugucacuggugcc

SEQ ID NO: 2477799 - RNA, 19 nt, Artificial Sequence
  Description of Artificial Sequence: Synthetic oligonucleotide
uuaagugucacuggugccu

SEQ ID NO: 2477800 - RNA, 19 nt, Artificial Sequence
  Description of Artificial Sequence: Synthetic oligonucleotide
gaagagacggcgcaaacaa

SEQ ID NO: 2477801 - RNA, 19 nt, Artificial Sequence
  Description of Artificial Sequence: Synthetic oligonucleotide
ggcauugccuccaagaagg

SEQ ID NO: 2477802 - RNA, 19 nt, Artificial Sequence
  Description of Artificial Sequence: Synthetic oligonucleotide
uaucuggggagcaugaguu

SEQ ID NO: 2477803 - RNA, 19 nt, Artificial Sequence
  Description of Artificial Sequence: Synthetic oligonucleotide
aaggaucaacacccguggg

SEQ ID NO: 2477804 - RNA, 19 nt, Artificial Sequence
  Description of Artificial Sequence: Synthetic oligonucleotide
agucucucgggcaaaaggg

SEQ ID NO: 2477805 - RNA, 19 nt, Artificial Sequence
  Description of Artificial Sequence: Synthetic oligonucleotide
cauucagucacucauggaa

SEQ ID NO: 2477806 - RNA, 19 nt, Artificial Sequence
  Description of Artificial Sequence: Synthetic oligonucleotide
augcuuuagaaguucacaa

SEQ ID NO: 2477807 - RNA, 19 nt, Artificial Sequence
  Description of Artificial Sequence: Synthetic oligonucleotide
aagaagucuucuaggugac

SEQ ID NO: 2477808 - RNA, 19 nt, Artificial Sequence
  Description of Artificial Sequence: Synthetic oligonucleotide
auaaaauuccuuggggcug

SEQ ID NO: 2477809 - RNA, 19 nt, Artificial Sequence
  Description of Artificial Sequence: Synthetic oligonucleotide
aaguucuuaagcuguucau

SEQ ID NO: 2477810 - RNA, 19 nt, Artificial Sequence
  Description of Artificial Sequence: Synthetic oligonucleotide
ucaguggugauccuagguu

SEQ ID NO: 2477811 - RNA, 19 nt, Artificial Sequence
  Description of Artificial Sequence: Synthetic oligonucleotide
gaaaccaaucuucuccaca

SEQ ID NO: 2477812 - RNA, 19 nt, Artificial Sequence
  Description of Artificial Sequence: Synthetic oligonucleotide
gacggcgcaaacaagcugc

SEQ ID NO: 2477813 - RNA, 19 nt, Artificial Sequence
  Description of Artificial Sequence: Synthetic oligonucleotide
cucaccucaguggugaucc

SEQ ID NO: 2477814 - RNA, 19 nt, Artificial Sequence
  Description of Artificial Sequence: Synthetic oligonucleotide
aagaaggaucaacacccgu

SEQ ID NO: 2477815 - RNA, 19 nt, Artificial Sequence
  Description of Artificial Sequence: Synthetic oligonucleotide
ucgguaguugagcuuaggu

SEQ ID NO: 2477816 - RNA, 19 nt, Artificial Sequence
  Description of Artificial Sequence: Synthetic oligonucleotide
gagcaugaguuucuuccgg

SEQ ID NO: 2477817 - RNA, 19 nt, Artificial Sequence
  Description of Artificial Sequence: Synthetic oligonucleotide
uuacaguggccucugccug

SEQ ID NO: 2477818 - RNA, 19 nt, Artificial Sequence
  Description of Artificial Sequence: Synthetic oligonucleotide
ggguaaagaagucuucuag

SEQ ID NO: 2477819 - RNA, 19 nt, Artificial Sequence
  Description of Artificial Sequence: Synthetic oligonucleotide
gucacuggugccuggaacc

SEQ ID NO: 2477820 - RNA, 19 nt, Artificial Sequence
  Description of Artificial Sequence: Synthetic oligonucleotide
uuucgguagaaguucuuaa

SEQ ID NO: 2477821 - RNA, 19 nt, Artificial Sequence
  Description of Artificial Sequence: Synthetic oligonucleotide
aguucacaaguaaacugac

SEQ ID NO: 2477822 - RNA, 19 nt, Artificial Sequence
  Description of Artificial Sequence: Synthetic oligonucleotide
ggcaaaagggcuccggagg

SEQ ID NO: 2477823 - RNA, 19 nt, Artificial Sequence
  Description of Artificial Sequence: Synthetic oligonucleotide
uuggcguugguacaugaua

SEQ ID NO: 2477824 - RNA, 19 nt, Artificial Sequence
  Description of Artificial Sequence: Synthetic oligonucleotide
agaaggaucaacacccgug

SEQ ID NO: 2477825 - RNA, 19 nt, Artificial Sequence
  Description of Artificial Sequence: Synthetic oligonucleotide
uggcguugguacaugauau

SEQ ID NO: 2477826 - RNA, 19 nt, Artificial Sequence
  Description of Artificial Sequence: Synthetic oligonucleotide
uguucggguaaagaagucu

SEQ ID NO: 2477827 - RNA, 19 nt, Artificial Sequence
  Description of Artificial Sequence: Synthetic oligonucleotide
uggaaccaaauguaauccu

SEQ ID NO: 2477828 - RNA, 19 nt, Artificial Sequence
  Description of Artificial Sequence: Synthetic oligonucleotide
gugauccuagguuucuucc

SEQ ID NO: 2477829 - RNA, 19 nt, Artificial Sequence
  Description of Artificial Sequence: Synthetic oligonucleotide
guugagcuuaggucgaaac

SEQ ID NO: 2477830 - RNA, 19 nt, Artificial Sequence
  Description of Artificial Sequence: Synthetic oligonucleotide
accggcaccaagucucucg

SEQ ID NO: 2477831 - RNA, 19 nt, Artificial Sequence
  Description of Artificial Sequence: Synthetic oligonucleotide
agucugcugacacuucuug

SEQ ID NO: 2477832 - RNA, 19 nt, Artificial Sequence
  Description of Artificial Sequence: Synthetic oligonucleotide
ugguacaugauaugcuuua

SEQ ID NO: 2477833 - RNA, 19 nt, Artificial Sequence
  Description of Artificial Sequence: Synthetic oligonucleotide
caagaaggaucaacacccg

SEQ ID NO: 2477834 - RNA, 19 nt, Artificial Sequence
  Description of Artificial Sequence: Synthetic oligonucleotide
ucuaggugacugaggacac

SEQ ID NO: 2477835 - RNA, 19 nt, Artificial Sequence
  Description of Artificial Sequence: Synthetic oligonucleotide
auaugcuuuagaaguucac

SEQ ID NO: 2477836 - RNA, 19 nt, Artificial Sequence
  Description of Artificial Sequence: Synthetic oligonucleotide
uuaggucgaaaccaaucuu

SEQ ID NO: 2477837 - RNA, 19 nt, Artificial Sequence
  Description of Artificial Sequence: Synthetic oligonucleotide
ucucucgggcaaaagggcu

SEQ ID NO: 2477838 - RNA, 19 nt, Artificial Sequence
  Description of Artificial Sequence: Synthetic oligonucleotide
ugauccuagguuucuuccu

SEQ ID NO: 2477839 - RNA, 19 nt, Artificial Sequence
  Description of Artificial Sequence: Synthetic oligonucleotide
uguaauccucugaagccau

SEQ ID NO: 2477840 - RNA, 19 nt, Artificial Sequence
  Description of Artificial Sequence: Synthetic oligonucleotide
uaaaauuccuuggggcuga

SEQ ID NO: 2477841 - RNA, 19 nt, Artificial Sequence
  Description of Artificial Sequence: Synthetic oligonucleotide
ugauaugcuuuagaaguuc

SEQ ID NO: 2477842 - RNA, 19 nt, Artificial Sequence
  Description of Artificial Sequence: Synthetic oligonucleotide
ugccuggggagauuuucgg

SEQ ID NO: 2477843 - RNA, 19 nt, Artificial Sequence
  Description of Artificial Sequence: Synthetic oligonucleotide
ggacaagucaaguucauaa

SEQ ID NO: 2477844 - RNA, 19 nt, Artificial Sequence
  Description of Artificial Sequence: Synthetic oligonucleotide
ugcugacacuucuugcugc

SEQ ID NO: 2477845 - RNA, 19 nt, Artificial Sequence
  Description of Artificial Sequence: Synthetic oligonucleotide
gagggcauugccuccaaga

SEQ ID NO: 2477846 - RNA, 19 nt, Artificial Sequence
  Description of Artificial Sequence: Synthetic oligonucleotide
gucacggugccccuguacc

SEQ ID NO: 2477847 - RNA, 19 nt, Artificial Sequence
  Description of Artificial Sequence: Synthetic oligonucleotide
ucggggucuaucuggggag

SEQ ID NO: 2477848 - RNA, 19 nt, Artificial Sequence
  Description of Artificial Sequence: Synthetic oligonucleotide
cauggaaaccuuuaagugu

SEQ ID NO: 2477849 - RNA, 19 nt, Artificial Sequence
  Description of Artificial Sequence: Synthetic oligonucleotide
gauaugcuuuagaaguuca

SEQ ID NO: 2477850 - RNA, 19 nt, Artificial Sequence
  Description of Artificial Sequence: Synthetic oligonucleotide
caggcucucguccacacug

SEQ ID NO: 2477851 - RNA, 19 nt, Artificial Sequence
  Description of Artificial Sequence: Synthetic oligonucleotide
ucggguaaagaagucuucu

SEQ ID NO: 2477852 - RNA, 19 nt, Artificial Sequence
  Description of Artificial Sequence: Synthetic oligonucleotide
ucuuccggcuucucguacc

SEQ ID NO: 2477853 - RNA, 19 nt, Artificial Sequence
  Description of Artificial Sequence: Synthetic oligonucleotide
cccuguaccaugacaaugg

SEQ ID NO: 2477854 - RNA, 19 nt, Artificial Sequence
  Description of Artificial Sequence: Synthetic oligonucleotide
uucauagggcagagggagc

SEQ ID NO: 2477855 - RNA, 19 nt, Artificial Sequence
  Description of Artificial Sequence: Synthetic oligonucleotide
cuggggagauuuucgguag

SEQ ID NO: 2477856 - RNA, 19 nt, Artificial Sequence
  Description of Artificial Sequence: Synthetic oligonucleotide
ucagucacucauggaaacc

SEQ ID NO: 2477857 - RNA, 19 nt, Artificial Sequence
  Description of Artificial Sequence: Synthetic oligonucleotide
ugaguuuguggccccggcu

SEQ ID NO: 2477858 - RNA, 19 nt, Artificial Sequence
  Description of Artificial Sequence: Synthetic oligonucleotide
auguaauccucugaagcca

SEQ ID NO: 2477859 - RNA, 19 nt, Artificial Sequence
  Description of Artificial Sequence: Synthetic oligonucleotide
aguucugccagagucugcu

SEQ ID NO: 2477860 - RNA, 19 nt, Artificial Sequence
  Description of Artificial Sequence: Synthetic oligonucleotide
aaggucugccacaggacag

SEQ ID NO: 2477861 - RNA, 19 nt, Artificial Sequence
  Description of Artificial Sequence: Synthetic oligonucleotide
uuuucgguagaaguucuua

SEQ ID NO: 2477862 - RNA, 19 nt, Artificial Sequence
  Description of Artificial Sequence: Synthetic oligonucleotide
agucacggugccccuguac

SEQ ID NO: 2477863 - RNA, 19 nt, Artificial Sequence
  Description of Artificial Sequence: Synthetic oligonucleotide
cuuuagaaguucacaagua

SEQ ID NO: 2477864 - RNA, 19 nt, Artificial Sequence
  Description of Artificial Sequence: Synthetic oligonucleotide
agucuucuaggugacugag

SEQ ID NO: 2477865 - RNA, 19 nt, Artificial Sequence
  Description of Artificial Sequence: Synthetic oligonucleotide
caugaguggaggagccugc

SEQ ID NO: 2477866 - RNA, 19 nt, Artificial Sequence
  Description of Artificial Sequence: Synthetic oligonucleotide
acaaguaaacugacagcag

SEQ ID NO: 2477867 - RNA, 19 nt, Artificial Sequence
  Description of Artificial Sequence: Synthetic oligonucleotide
uucggguaaagaagucuuc

SEQ ID NO: 2477868 - RNA, 19 nt, Artificial Sequence
  Description of Artificial Sequence: Synthetic oligonucleotide
uucucguaccaauccaaau

SEQ ID NO: 2477869 - RNA, 19 nt, Artificial Sequence
  Description of Artificial Sequence: Synthetic oligonucleotide
ucaccgugaguuuguggcc

SEQ ID NO: 2477870 - RNA, 19 nt, Artificial Sequence
  Description of Artificial Sequence: Synthetic oligonucleotide
cugccuggggagauuuucg

SEQ ID NO: 2477871 - RNA, 19 nt, Artificial Sequence
  Description of Artificial Sequence: Synthetic oligonucleotide
cuuaggucgaaaccaaucu

SEQ ID NO: 2477872 - RNA, 19 nt, Artificial Sequence
  Description of Artificial Sequence: Synthetic oligonucleotide
aggacagcgucaccgugag

SEQ ID NO: 2477873 - RNA, 19 nt, Artificial Sequence
  Description of Artificial Sequence: Synthetic oligonucleotide
ggucucggggucuaucugg

SEQ ID NO: 2477874 - RNA, 19 nt, Artificial Sequence
  Description of Artificial Sequence: Synthetic oligonucleotide
ggagauuuucgguagaagu

SEQ ID NO: 2477875 - RNA, 19 nt, Artificial Sequence
  Description of Artificial Sequence: Synthetic oligonucleotide
uggcucggaagagacggcg

SEQ ID NO: 2477876 - RNA, 19 nt, Artificial Sequence
  Description of Artificial Sequence: Synthetic oligonucleotide
uguuggcguugguacauga

SEQ ID NO: 2477877 - RNA, 19 nt, Artificial Sequence
  Description of Artificial Sequence: Synthetic oligonucleotide
accgugaguuuguggcccc

SEQ ID NO: 2477878 - RNA, 19 nt, Artificial Sequence
  Description of Artificial Sequence: Synthetic oligonucleotide
aguucuuaagcuguucaua

SEQ ID NO: 2477879 - RNA, 19 nt, Artificial Sequence
  Description of Artificial Sequence: Synthetic oligonucleotide
guacccaugaguggaggag

SEQ ID NO: 2477880 - RNA, 19 nt, Artificial Sequence
  Description of Artificial Sequence: Synthetic oligonucleotide
uccuagguuucuuccuuac

SEQ ID NO: 2477881 - RNA, 19 nt, Artificial Sequence
  Description of Artificial Sequence: Synthetic oligonucleotide
aucaacacccgugggacca

SEQ ID NO: 2477882 - RNA, 19 nt, Artificial Sequence
  Description of Artificial Sequence: Synthetic oligonucleotide
ggauuggaagguuccuggg

SEQ ID NO: 2477883 - RNA, 19 nt, Artificial Sequence
  Description of Artificial Sequence: Synthetic oligonucleotide
gcuccggaggauuggaagg

SEQ ID NO: 2477884 - RNA, 19 nt, Artificial Sequence
  Description of Artificial Sequence: Synthetic oligonucleotide
guagaaguucuuaagcugu

SEQ ID NO: 2477885 - RNA, 19 nt, Artificial Sequence
  Description of Artificial Sequence: Synthetic oligonucleotide
ucuggggagcaugaguuuc

SEQ ID NO: 2477886 - RNA, 19 nt, Artificial Sequence
  Description of Artificial Sequence: Synthetic oligonucleotide
gacacuucuugcugcucac

SEQ ID NO: 2477887 - RNA, 19 nt, Artificial Sequence
  Description of Artificial Sequence: Synthetic oligonucleotide
gaggacacucuccaguucu

SEQ ID NO: 2477888 - RNA, 19 nt, Artificial Sequence
  Description of Artificial Sequence: Synthetic oligonucleotide
guuucuuccggcuucucgu

SEQ ID NO: 2477889 - RNA, 19 nt, Artificial Sequence
  Description of Artificial Sequence: Synthetic oligonucleotide
aaccaccggcaccaagucu

SEQ ID NO: 2477890 - RNA, 19 nt, Artificial Sequence
  Description of Artificial Sequence: Synthetic oligonucleotide
ggcaccaagucucucgggc

SEQ ID NO: 2477891 - RNA, 19 nt, Artificial Sequence
  Description of Artificial Sequence: Synthetic oligonucleotide
uggggcugagggcauugcc

SEQ ID NO: 2477892 - RNA, 19 nt, Artificial Sequence
  Description of Artificial Sequence: Synthetic oligonucleotide
uggaaaccuuuaaguguca

SEQ ID NO: 2477893 - RNA, 19 nt, Artificial Sequence
  Description of Artificial Sequence: Synthetic oligonucleotide
uguucaggcucucguccac

SEQ ID NO: 2477894 - RNA, 19 nt, Artificial Sequence
  Description of Artificial Sequence: Synthetic oligonucleotide
ugggcacucgguaguugag

SEQ ID NO: 2477895 - RNA, 19 nt, Artificial Sequence
  Description of Artificial Sequence: Synthetic oligonucleotide
agacggcgcaaacaagcug

SEQ ID NO: 2477896 - RNA, 19 nt, Artificial Sequence
  Description of Artificial Sequence: Synthetic oligonucleotide
aagagacggcgcaaacaag

SEQ ID NO: 2477897 - RNA, 19 nt, Artificial Sequence
  Description of Artificial Sequence: Synthetic oligonucleotide
cuuacaguggccucugccu

SEQ ID NO: 2477898 - RNA, 19 nt, Artificial Sequence
  Description of Artificial Sequence: Synthetic oligonucleotide
aaagggcuccggaggauug

SEQ ID NO: 2477899 - RNA, 19 nt, Artificial Sequence
  Description of Artificial Sequence: Synthetic oligonucleotide
gcuuuagaaguucacaagu

SEQ ID NO: 2477900 - RNA, 19 nt, Artificial Sequence
  Description of Artificial Sequence: Synthetic oligonucleotide
aaaagggcuccggaggauu

SEQ ID NO: 2477901 - RNA, 19 nt, Artificial Sequence
  Description of Artificial Sequence: Synthetic oligonucleotide
cuucuaggugacugaggac

SEQ ID NO: 2477902 - RNA, 19 nt, Artificial Sequence
  Description of Artificial Sequence: Synthetic oligonucleotide
ugguacccaugaguggagg

SEQ ID NO: 2477903 - RNA, 19 nt, Artificial Sequence
  Description of Artificial Sequence: Synthetic oligonucleotide
gcucacuaaaggcaucggc

SEQ ID NO: 2477904 - RNA, 19 nt, Artificial Sequence
  Description of Artificial Sequence: Synthetic oligonucleotide
uuguccucauucagucacu

SEQ ID NO: 2477905 - RNA, 19 nt, Artificial Sequence
  Description of Artificial Sequence: Synthetic oligonucleotide
gacagcgucaccgugaguu

SEQ ID NO: 2477906 - RNA, 19 nt, Artificial Sequence
  Description of Artificial Sequence: Synthetic oligonucleotide
ugaggacacucuccaguuc

SEQ ID NO: 2477907 - RNA, 19 nt, Artificial Sequence
  Description of Artificial Sequence: Synthetic oligonucleotide
uucuuccggcuucucguac

SEQ ID NO: 2477908 - RNA, 19 nt, Artificial Sequence
  Description of Artificial Sequence: Synthetic oligonucleotide
uucaggcucucguccacac

SEQ ID NO: 2477909 - RNA, 19 nt, Artificial Sequence
  Description of Artificial Sequence: Synthetic oligonucleotide
ggaucaacacccgugggac

SEQ ID NO: 2477910 - RNA, 19 nt, Artificial Sequence
  Description of Artificial Sequence: Synthetic oligonucleotide
ggaaccaaauguaauccuc

SEQ ID NO: 2477911 - RNA, 19 nt, Artificial Sequence
  Description of Artificial Sequence: Synthetic oligonucleotide
ucucggggucuaucugggg

SEQ ID NO: 2477912 - RNA, 19 nt, Artificial Sequence
  Description of Artificial Sequence: Synthetic oligonucleotide
uccggcuucucguaccaau

SEQ ID NO: 2477913 - RNA, 19 nt, Artificial Sequence
  Description of Artificial Sequence: Synthetic oligonucleotide
uggggagauuuucgguaga

SEQ ID NO: 2477914 - RNA, 19 nt, Artificial Sequence
  Description of Artificial Sequence: Synthetic oligonucleotide
cucucgggcaaaagggcuc

SEQ ID NO: 2477915 - RNA, 19 nt, Artificial Sequence
  Description of Artificial Sequence: Synthetic oligonucleotide
aggucgaaaccaaucuucu

SEQ ID NO: 2477916 - RNA, 19 nt, Artificial Sequence
  Description of Artificial Sequence: Synthetic oligonucleotide
ucgggcaaaagggcuccgg

SEQ ID NO: 2477917 - RNA, 19 nt, Artificial Sequence
  Description of Artificial Sequence: Synthetic oligonucleotide
ggcuccggaggauuggaag

SEQ ID NO: 2477918 - RNA, 19 nt, Artificial Sequence
  Description of Artificial Sequence: Synthetic oligonucleotide
agcuguuggcguugguaca

SEQ ID NO: 2477919 - RNA, 19 nt, Artificial Sequence
  Description of Artificial Sequence: Synthetic oligonucleotide
gucucucgggcaaaagggc

SEQ ID NO: 2477920 - RNA, 19 nt, Artificial Sequence
  Description of Artificial Sequence: Synthetic oligonucleotide
gagauuuucgguagaaguu

SEQ ID NO: 2477921 - RNA, 19 nt, Artificial Sequence
  Description of Artificial Sequence: Synthetic oligonucleotide
caccgugaguuuguggccc

SEQ ID NO: 2477922 - RNA, 19 nt, Artificial Sequence
  Description of Artificial Sequence: Synthetic oligonucleotide
gcguugguacaugauaugc

SEQ ID NO: 2477923 - RNA, 19 nt, Artificial Sequence
  Description of Artificial Sequence: Synthetic oligonucleotide
gugaguuuguggccccggc

SEQ ID NO: 2477924 - RNA, 19 nt, Artificial Sequence
  Description of Artificial Sequence: Synthetic oligonucleotide
gauuuucgguagaaguucu

SEQ ID NO: 2477925 - RNA, 19 nt, Artificial Sequence
  Description of Artificial Sequence: Synthetic oligonucleotide
gggcaaaagggcuccggag

SEQ ID NO: 2477926 - RNA, 19 nt, Artificial Sequence
  Description of Artificial Sequence: Synthetic oligonucleotide
guucacaaguaaacugaca

SEQ ID NO: 2477927 - RNA, 19 nt, Artificial Sequence
  Description of Artificial Sequence: Synthetic oligonucleotide
uggcucacgggcccuggga

SEQ ID NO: 2477928 - RNA, 19 nt, Artificial Sequence
  Description of Artificial Sequence: Synthetic oligonucleotide
cucggggucuaucugggga

SEQ ID NO: 2477929 - RNA, 19 nt, Artificial Sequence
  Description of Artificial Sequence: Synthetic oligonucleotide
auggaaggucugccacagg

SEQ ID NO: 2477930 - RNA, 19 nt, Artificial Sequence
  Description of Artificial Sequence: Synthetic oligonucleotide
ccuuuaagugucacuggug

SEQ ID NO: 2477931 - RNA, 19 nt, Artificial Sequence
  Description of Artificial Sequence: Synthetic oligonucleotide
agcuguucauagggcagag

SEQ ID NO: 2477932 - RNA, 19 nt, Artificial Sequence
  Description of Artificial Sequence: Synthetic oligonucleotide
cuucucguaccaauccaaa

SEQ ID NO: 2477933 - RNA, 19 nt, Artificial Sequence
  Description of Artificial Sequence: Synthetic oligonucleotide
aagguuccugggguggcgu

SEQ ID NO: 2477934 - RNA, 19 nt, Artificial Sequence
  Description of Artificial Sequence: Synthetic oligonucleotide
augauaugcuuuagaaguu

SEQ ID NO: 2477935 - RNA, 19 nt, Artificial Sequence
  Description of Artificial Sequence: Synthetic oligonucleotide
ggcccugggaaaaccaccg

SEQ ID NO: 2477936 - RNA, 19 nt, Artificial Sequence
  Description of Artificial Sequence: Synthetic oligonucleotide
guaguugagcuuaggucga

SEQ ID NO: 2477937 - RNA, 19 nt, Artificial Sequence
  Description of Artificial Sequence: Synthetic oligonucleotide
cugggcacucgguaguuga

SEQ ID NO: 2477938 - RNA, 19 nt, Artificial Sequence
  Description of Artificial Sequence: Synthetic oligonucleotide
cugggguggcgugauggcg

SEQ ID NO: 2477939 - RNA, 19 nt, Artificial Sequence
  Description of Artificial Sequence: Synthetic oligonucleotide
ucggaagagacggcgcaaa

SEQ ID NO: 2477940 - RNA, 19 nt, Artificial Sequence
  Description of Artificial Sequence: Synthetic oligonucleotide
ggcgcaaacaagcugcugu

SEQ ID NO: 2477941 - RNA, 19 nt, Artificial Sequence
  Description of Artificial Sequence: Synthetic oligonucleotide
cuaaaggcaucggccauga

SEQ ID NO: 2477942 - RNA, 19 nt, Artificial Sequence
  Description of Artificial Sequence: Synthetic oligonucleotide
gauccuagguuucuuccuu

SEQ ID NO: 2477943 - RNA, 19 nt, Artificial Sequence
  Description of Artificial Sequence: Synthetic oligonucleotide
cgugauggcggucucgggg

SEQ ID NO: 2477944 - RNA, 19 nt, Artificial Sequence
  Description of Artificial Sequence: Synthetic oligonucleotide
auggcucggaagagacggc

SEQ ID NO: 2477945 - RNA, 19 nt, Artificial Sequence
  Description of Artificial Sequence: Synthetic oligonucleotide
ggcguugguacaugauaug

SEQ ID NO: 2477946 - RNA, 19 nt, Artificial Sequence
  Description of Artificial Sequence: Synthetic oligonucleotide
gcuuaggucgaaaccaauc

SEQ ID NO: 2477947 - RNA, 19 nt, Artificial Sequence
  Description of Artificial Sequence: Synthetic oligonucleotide
cucgguaguugagcuuagg

SEQ ID NO: 2477948 - RNA, 19 nt, Artificial Sequence
  Description of Artificial Sequence: Synthetic oligonucleotide
auccuagguuucuuccuua

SEQ ID NO: 2477949 - RNA, 19 nt, Artificial Sequence
  Description of Artificial Sequence: Synthetic oligonucleotide
ggcgugauggcggucucgg

SEQ ID NO: 2477950 - RNA, 19 nt, Artificial Sequence
  Description of Artificial Sequence: Synthetic oligonucleotide
ccucauucagucacucaug

SEQ ID NO: 2477951 - RNA, 19 nt, Artificial Sequence
  Description of Artificial Sequence: Synthetic oligonucleotide
gcgcaaacaagcugcugug

SEQ ID NO: 2477952 - RNA, 19 nt, Artificial Sequence
  Description of Artificial Sequence: Synthetic oligonucleotide
cccugggaaaaccaccggc

SEQ ID NO: 2477953 - RNA, 19 nt, Artificial Sequence
  Description of Artificial Sequence: Synthetic oligonucleotide
ucaacacccgugggaccag

SEQ ID NO: 2477954 - RNA, 19 nt, Artificial Sequence
  Description of Artificial Sequence: Synthetic oligonucleotide
gagcuuaggucgaaaccaa

SEQ ID NO: 2477955 - RNA, 19 nt, Artificial Sequence
  Description of Artificial Sequence: Synthetic oligonucleotide
ggaagagacggcgcaaaca

SEQ ID NO: 2477956 - RNA, 19 nt, Artificial Sequence
  Description of Artificial Sequence: Synthetic oligonucleotide
uggcgugauggcggucucg

SEQ ID NO: 2477957 - RNA, 19 nt, Artificial Sequence
  Description of Artificial Sequence: Synthetic oligonucleotide
guaaacugacagcagccuu

SEQ ID NO: 2477958 - RNA, 19 nt, Artificial Sequence
  Description of Artificial Sequence: Synthetic oligonucleotide
ggauggaaggucugccaca

SEQ ID NO: 2477959 - RNA, 19 nt, Artificial Sequence
  Description of Artificial Sequence: Synthetic oligonucleotide
ggucuaucuggggagcaug

SEQ ID NO: 2477960 - RNA, 19 nt, Artificial Sequence
  Description of Artificial Sequence: Synthetic oligonucleotide
gccuuccuggcucacgggc

SEQ ID NO: 2477961 - RNA, 19 nt, Artificial Sequence
  Description of Artificial Sequence: Synthetic oligonucleotide
guaauccucugaagccaug

SEQ ID NO: 2477962 - RNA, 19 nt, Artificial Sequence
  Description of Artificial Sequence: Synthetic oligonucleotide
cugcucaccucagugguga

SEQ ID NO: 2477963 - RNA, 19 nt, Artificial Sequence
  Description of Artificial Sequence: Synthetic oligonucleotide
gguacccaugaguggagga

SEQ ID NO: 2477964 - RNA, 19 nt, Artificial Sequence
  Description of Artificial Sequence: Synthetic oligonucleotide
ggaaaccuuuaagugucac

SEQ ID NO: 2477965 - RNA, 19 nt, Artificial Sequence
  Description of Artificial Sequence: Synthetic oligonucleotide
aucuggggagcaugaguuu

SEQ ID NO: 2477966 - RNA, 19 nt, Artificial Sequence
  Description of Artificial Sequence: Synthetic oligonucleotide
agaagucuucuaggugacu

SEQ ID NO: 2477967 - RNA, 19 nt, Artificial Sequence
  Description of Artificial Sequence: Synthetic oligonucleotide
ggcuucucguaccaaucca

SEQ ID NO: 2477968 - RNA, 19 nt, Artificial Sequence
  Description of Artificial Sequence: Synthetic oligonucleotide
acagcgucaccgugaguuu

SEQ ID NO: 2477969 - RNA, 19 nt, Artificial Sequence
  Description of Artificial Sequence: Synthetic oligonucleotide
gugauggcggucucggggu

SEQ ID NO: 2477970 - RNA, 19 nt, Artificial Sequence
  Description of Artificial Sequence: Synthetic oligonucleotide
cuguaccaugacaauggua

SEQ ID NO: 2477971 - RNA, 19 nt, Artificial Sequence
  Description of Artificial Sequence: Synthetic oligonucleotide
cgugggaccaguguucggg

SEQ ID NO: 2477972 - RNA, 19 nt, Artificial Sequence
  Description of Artificial Sequence: Synthetic oligonucleotide
cagagucugcugacacuuc

SEQ ID NO: 2477973 - RNA, 19 nt, Artificial Sequence
  Description of Artificial Sequence: Synthetic oligonucleotide
cggaggauuggaagguucc

SEQ ID NO: 2477974 - RNA, 19 nt, Artificial Sequence
  Description of Artificial Sequence: Synthetic oligonucleotide
caaguucauaaaauuccuu

SEQ ID NO: 2477975 - RNA, 19 nt, Artificial Sequence
  Description of Artificial Sequence: Synthetic oligonucleotide
aguugagcuuaggucgaaa

SEQ ID NO: 2477976 - RNA, 19 nt, Artificial Sequence
  Description of Artificial Sequence: Synthetic oligonucleotide
cucaguggugauccuaggu

SEQ ID NO: 2477977 - RNA, 19 nt, Artificial Sequence
  Description of Artificial Sequence: Synthetic oligonucleotide
cuuccggcuucucguacca

SEQ ID NO: 2477978 - RNA, 19 nt, Artificial Sequence
  Description of Artificial Sequence: Synthetic oligonucleotide
aggagccugcagcucacua

SEQ ID NO: 2477979 - RNA, 19 nt, Artificial Sequence
  Description of Artificial Sequence: Synthetic oligonucleotide
acggugccccuguaccaug

SEQ ID NO: 2477980 - RNA, 19 nt, Artificial Sequence
  Description of Artificial Sequence: Synthetic oligonucleotide
ggucugccacaggacagcg

SEQ ID NO: 2477981 - RNA, 19 nt, Artificial Sequence
  Description of Artificial Sequence: Synthetic oligonucleotide
ggagccugcagcucacuaa

SEQ ID NO: 2477982 - RNA, 19 nt, Artificial Sequence
  Description of Artificial Sequence: Synthetic oligonucleotide
cuggcucacgggcccuggg

SEQ ID NO: 2477983 - RNA, 19 nt, Artificial Sequence
  Description of Artificial Sequence: Synthetic oligonucleotide
cagucacucauggaaaccu

SEQ ID NO: 2477984 - RNA, 19 nt, Artificial Sequence
  Description of Artificial Sequence: Synthetic oligonucleotide
cauagggcagagggagcug

SEQ ID NO: 2477985 - RNA, 19 nt, Artificial Sequence
  Description of Artificial Sequence: Synthetic oligonucleotide
ggcaucggccaugaagaug

SEQ ID NO: 2477986 - RNA, 19 nt, Artificial Sequence
  Description of Artificial Sequence: Synthetic oligonucleotide
guucggguaaagaagucuu

SEQ ID NO: 2477987 - RNA, 19 nt, Artificial Sequence
  Description of Artificial Sequence: Synthetic oligonucleotide
gugccccuguaccaugaca

SEQ ID NO: 2477988 - RNA, 19 nt, Artificial Sequence
  Description of Artificial Sequence: Synthetic oligonucleotide
ccaugaguggaggagccug

SEQ ID NO: 2477989 - RNA, 19 nt, Artificial Sequence
  Description of Artificial Sequence: Synthetic oligonucleotide
cagcgucaccgugaguuug

SEQ ID NO: 2477990 - RNA, 19 nt, Artificial Sequence
  Description of Artificial Sequence: Synthetic oligonucleotide
uaguugagcuuaggucgaa

SEQ ID NO: 2477991 - RNA, 19 nt, Artificial Sequence
  Description of Artificial Sequence: Synthetic oligonucleotide
gagacggcgcaaacaagcu

SEQ ID NO: 2477992 - RNA, 19 nt, Artificial Sequence
  Description of Artificial Sequence: Synthetic oligonucleotide
aggacacucuccaguucug

SEQ ID NO: 2477993 - RNA, 19 nt, Artificial Sequence
  Description of Artificial Sequence: Synthetic oligonucleotide
ggacacucuccaguucugc

SEQ ID NO: 2477994 - RNA, 19 nt, Artificial Sequence
  Description of Artificial Sequence: Synthetic oligonucleotide
agcgucaccgugaguuugu

SEQ ID NO: 2477995 - RNA, 19 nt, Artificial Sequence
  Description of Artificial Sequence: Synthetic oligonucleotide
aggcaucggccaugaagau

SEQ ID NO: 2477996 - RNA, 19 nt, Artificial Sequence
  Description of Artificial Sequence: Synthetic oligonucleotide
auuuucgguagaaguucuu

SEQ ID NO: 2477997 - RNA, 19 nt, Artificial Sequence
  Description of Artificial Sequence: Synthetic oligonucleotide
cggccaugaagauggcucg

SEQ ID NO: 2477998 - RNA, 19 nt, Artificial Sequence
  Description of Artificial Sequence: Synthetic oligonucleotide
caguggugauccuagguuu

SEQ ID NO: 2477999 - RNA, 19 nt, Artificial Sequence
  Description of Artificial Sequence: Synthetic oligonucleotide
gcaccaagucucucgggca

SEQ ID NO: 2478000 - RNA, 19 nt, Artificial Sequence
  Description of Artificial Sequence: Synthetic oligonucleotide
cuuccuuacaguggccucu

SEQ ID NO: 2478001 - RNA, 19 nt, Artificial Sequence
  Description of Artificial Sequence: Synthetic oligonucleotide
gggaccaguguucggguaa

SEQ ID NO: 2478002 - RNA, 19 nt, Artificial Sequence
  Description of Artificial Sequence: Synthetic oligonucleotide
guguucggguaaagaaguc

SEQ ID NO: 2478003 - RNA, 19 nt, Artificial Sequence
  Description of Artificial Sequence: Synthetic oligonucleotide
ggcacucgguaguugagcu

SEQ ID NO: 2478004 - RNA, 19 nt, Artificial Sequence
  Description of Artificial Sequence: Synthetic oligonucleotide
agcuuaggucgaaaccaau

SEQ ID NO: 2478005 - RNA, 19 nt, Artificial Sequence
  Description of Artificial Sequence: Synthetic oligonucleotide
cuguuggcguugguacaug

SEQ ID NO: 2478006 - RNA, 19 nt, Artificial Sequence
  Description of Artificial Sequence: Synthetic oligonucleotide
gggcacucgguaguugagc

SEQ ID NO: 2478007 - RNA, 19 nt, Artificial Sequence
  Description of Artificial Sequence: Synthetic oligonucleotide
ccggcugggcacucgguag

SEQ ID NO: 2478008 - RNA, 19 nt, Artificial Sequence
  Description of Artificial Sequence: Synthetic oligonucleotide
uccggaggauuggaagguu

SEQ ID NO: 2478009 - RNA, 19 nt, Artificial Sequence
  Description of Artificial Sequence: Synthetic oligonucleotide
gcccugggaaaaccaccgg

SEQ ID NO: 2478010 - RNA, 19 nt, Artificial Sequence
  Description of Artificial Sequence: Synthetic oligonucleotide
ccggaggauuggaagguuc

SEQ ID NO: 2478011 - RNA, 19 nt, Artificial Sequence
  Description of Artificial Sequence: Synthetic oligonucleotide
uggggagcaugaguuucuu

SEQ ID NO: 2478012 - RNA, 19 nt, Artificial Sequence
  Description of Artificial Sequence: Synthetic oligonucleotide
cacagucacggugccccug

SEQ ID NO: 2478013 - RNA, 19 nt, Artificial Sequence
  Description of Artificial Sequence: Synthetic oligonucleotide
ccccuguaccaugacaaug

SEQ ID NO: 2478014 - RNA, 19 nt, Artificial Sequence
  Description of Artificial Sequence: Synthetic oligonucleotide
ccggcuucucguaccaauc

SEQ ID NO: 2478015 - RNA, 19 nt, Artificial Sequence
  Description of Artificial Sequence: Synthetic oligonucleotide
gcaaacaagcugcuguguu

SEQ ID NO: 2478016 - RNA, 19 nt, Artificial Sequence
  Description of Artificial Sequence: Synthetic oligonucleotide
gcaugaguuucuuccggcu

SEQ ID NO: 2478017 - RNA, 19 nt, Artificial Sequence
  Description of Artificial Sequence: Synthetic oligonucleotide
ggcucggaagagacggcgc

SEQ ID NO: 2478018 - RNA, 19 nt, Artificial Sequence
  Description of Artificial Sequence: Synthetic oligonucleotide
cccgugggaccaguguucg

SEQ ID NO: 2478019 - RNA, 19 nt, Artificial Sequence
  Description of Artificial Sequence: Synthetic oligonucleotide
cgucaccgugaguuugugg

SEQ ID NO: 2478020 - RNA, 19 nt, Artificial Sequence
  Description of Artificial Sequence: Synthetic oligonucleotide
aggcucucguccacacuga

SEQ ID NO: 2478021 - RNA, 19 nt, Artificial Sequence
  Description of Artificial Sequence: Synthetic oligonucleotide
acggcgcaaacaagcugcu

SEQ ID NO: 2478022 - RNA, 19 nt, Artificial Sequence
  Description of Artificial Sequence: Synthetic oligonucleotide
cgguagaaguucuuaagcu

SEQ ID NO: 2478023 - RNA, 19 nt, Artificial Sequence
  Description of Artificial Sequence: Synthetic oligonucleotide
ggcucacgggcccugggaa

SEQ ID NO: 2478024 - RNA, 19 nt, Artificial Sequence
  Description of Artificial Sequence: Synthetic oligonucleotide
gcgugauggcggucucggg

SEQ ID NO: 2478025 - RNA, 19 nt, Artificial Sequence
  Description of Artificial Sequence: Synthetic oligonucleotide
gucacucauggaaaccuuu

SEQ ID NO: 2478026 - RNA, 19 nt, Artificial Sequence
  Description of Artificial Sequence: Synthetic oligonucleotide
cuggacaagucaaguucau

SEQ ID NO: 2478027 - RNA, 19 nt, Artificial Sequence
  Description of Artificial Sequence: Synthetic oligonucleotide
gccaugaagauggcucgga

SEQ ID NO: 2478028 - RNA, 19 nt, Artificial Sequence
  Description of Artificial Sequence: Synthetic oligonucleotide
ggugccccuguaccaugac

SEQ ID NO: 2478029 - RNA, 19 nt, Artificial Sequence
  Description of Artificial Sequence: Synthetic oligonucleotide
gguggcgugauggcggucu

SEQ ID NO: 2478030 - RNA, 19 nt, Artificial Sequence
  Description of Artificial Sequence: Synthetic oligonucleotide
caguggccucugccugggg

SEQ ID NO: 2478031 - RNA, 19 nt, Artificial Sequence
  Description of Artificial Sequence: Synthetic oligonucleotide
guggcgugauggcggucuc

SEQ ID NO: 2478032 - RNA, 19 nt, Artificial Sequence
  Description of Artificial Sequence: Synthetic oligonucleotide
guuggcguugguacaugau

SEQ ID NO: 2478033 - RNA, 19 nt, Artificial Sequence
  Description of Artificial Sequence: Synthetic oligonucleotide
gcugcucaccucaguggug

SEQ ID NO: 2478034 - RNA, 19 nt, Artificial Sequence
  Description of Artificial Sequence: Synthetic oligonucleotide
gauggcggucucggggucu

SEQ ID NO: 2478035 - RNA, 19 nt, Artificial Sequence
  Description of Artificial Sequence: Synthetic oligonucleotide
uuccggcuucucguaccaa

SEQ ID NO: 2478036 - RNA, 19 nt, Artificial Sequence
  Description of Artificial Sequence: Synthetic oligonucleotide
cuccggaggauuggaaggu

SEQ ID NO: 2478037 - RNA, 19 nt, Artificial Sequence
  Description of Artificial Sequence: Synthetic oligonucleotide
gccacaggacagcgucacc

SEQ ID NO: 2478038 - RNA, 19 nt, Artificial Sequence
  Description of Artificial Sequence: Synthetic oligonucleotide
ccaugaagauggcucggaa

SEQ ID NO: 2478039 - RNA, 19 nt, Artificial Sequence
  Description of Artificial Sequence: Synthetic oligonucleotide
cguugguacaugauaugcu

SEQ ID NO: 2478040 - RNA, 19 nt, Artificial Sequence
  Description of Artificial Sequence: Synthetic oligonucleotide
ggaggauuggaagguuccu

SEQ ID NO: 2478041 - RNA, 19 nt, Artificial Sequence
  Description of Artificial Sequence: Synthetic oligonucleotide
cgugaguuuguggccccgg

SEQ ID NO: 2478042 - RNA, 19 nt, Artificial Sequence
  Description of Artificial Sequence: Synthetic oligonucleotide
cagccuggacaagucaagu

SEQ ID NO: 2478043 - RNA, 19 nt, Artificial Sequence
  Description of Artificial Sequence: Synthetic oligonucleotide
ggaccaguguucggguaaa

SEQ ID NO: 2478044 - RNA, 19 nt, Artificial Sequence
  Description of Artificial Sequence: Synthetic oligonucleotide
cggaagagacggcgcaaac

SEQ ID NO: 2478045 - RNA, 19 nt, Artificial Sequence
  Description of Artificial Sequence: Synthetic oligonucleotide
gcucaccucaguggugauc

SEQ ID NO: 2478046 - RNA, 19 nt, Artificial Sequence
  Description of Artificial Sequence: Synthetic oligonucleotide
auggcggucucggggucua

SEQ ID NO: 2478047 - RNA, 19 nt, Artificial Sequence
  Description of Artificial Sequence: Synthetic oligonucleotide
gccuggggagauuuucggu

SEQ ID NO: 2478048 - RNA, 19 nt, Artificial Sequence
  Description of Artificial Sequence: Synthetic oligonucleotide
gcucacgggcccugggaaa

SEQ ID NO: 2478049 - RNA, 19 nt, Artificial Sequence
  Description of Artificial Sequence: Synthetic oligonucleotide
ccgugggaccaguguucgg

SEQ ID NO: 2478050 - RNA, 19 nt, Artificial Sequence
  Description of Artificial Sequence: Synthetic oligonucleotide
gcuguuggcguugguacau

SEQ ID NO: 2478051 - RNA, 19 nt, Artificial Sequence
  Description of Artificial Sequence: Synthetic oligonucleotide
cggguaaagaagucuucua

SEQ ID NO: 2478052 - RNA, 19 nt, Artificial Sequence
  Description of Artificial Sequence: Synthetic oligonucleotide
caaaagggcuccggaggau

SEQ ID NO: 2478053 - RNA, 19 nt, Artificial Sequence
  Description of Artificial Sequence: Synthetic oligonucleotide
ccgugaguuuguggccccg

SEQ ID NO: 2478054 - RNA, 19 nt, Artificial Sequence
  Description of Artificial Sequence: Synthetic oligonucleotide
gcgucaccgugaguuugug

SEQ ID NO: 2478055 - RNA, 19 nt, Artificial Sequence
  Description of Artificial Sequence: Synthetic oligonucleotide
ccuggcucacgggcccugg

SEQ ID NO: 2478056 - RNA, 19 nt, Artificial Sequence
  Description of Artificial Sequence: Synthetic oligonucleotide
cggcaccaagucucucggg

SEQ ID NO: 2478057 - RNA, 19 nt, Artificial Sequence
  Description of Artificial Sequence: Synthetic oligonucleotide
ggcggucucggggucuauc

SEQ ID NO: 2478058 - RNA, 19 nt, Artificial Sequence
  Description of Artificial Sequence: Synthetic oligonucleotide
cugcuguguucaggcucuc

SEQ ID NO: 2478059 - RNA, 19 nt, Artificial Sequence
  Description of Artificial Sequence: Synthetic oligonucleotide
caccggcaccaagucucuc

SEQ ID NO: 2478060 - RNA, 19 nt, Artificial Sequence
  Description of Artificial Sequence: Synthetic oligonucleotide
cacggugccccuguaccau

SEQ ID NO: 2478061 - RNA, 19 nt, Artificial Sequence
  Description of Artificial Sequence: Synthetic oligonucleotide
gaggagccugcagcucacu

SEQ ID NO: 2478062 - RNA, 19 nt, Artificial Sequence
  Description of Artificial Sequence: Synthetic oligonucleotide
cggggucuaucuggggagc

SEQ ID NO: 2478063 - RNA, 19 nt, Artificial Sequence
  Description of Artificial Sequence: Synthetic oligonucleotide
gcacucgguaguugagcuu

SEQ ID NO: 2478064 - RNA, 19 nt, Artificial Sequence
  Description of Artificial Sequence: Synthetic oligonucleotide
gccccuguaccaugacaau

SEQ ID NO: 2478065 - RNA, 19 nt, Artificial Sequence
  Description of Artificial Sequence: Synthetic oligonucleotide
uggcggucucggggucuau

SEQ ID NO: 2478066 - RNA, 19 nt, Artificial Sequence
  Description of Artificial Sequence: Synthetic oligonucleotide
gggucuaucuggggagcau

SEQ ID NO: 2478067 - RNA, 19 nt, Artificial Sequence
  Description of Artificial Sequence: Synthetic oligonucleotide
cucugccuggggagauuuu

SEQ ID NO: 2478068 - RNA, 19 nt, Artificial Sequence
  Description of Artificial Sequence: Synthetic oligonucleotide
caacacccgugggaccagu

SEQ ID NO: 2478069 - RNA, 19 nt, Artificial Sequence
  Description of Artificial Sequence: Synthetic oligonucleotide
guggccccggcugggcacu

SEQ ID NO: 2478070 - RNA, 19 nt, Artificial Sequence
  Description of Artificial Sequence: Synthetic oligonucleotide
uggccccggcugggcacuc

SEQ ID NO: 2478071 - RNA, 19 nt, Artificial Sequence
  Description of Artificial Sequence: Synthetic oligonucleotide
cggugccccuguaccauga

SEQ ID NO: 2478072 - RNA, 19 nt, Artificial Sequence
  Description of Artificial Sequence: Synthetic oligonucleotide
ccaccggcaccaagucucu

SEQ ID NO: 2478073 - RNA, 19 nt, Artificial Sequence
  Description of Artificial Sequence: Synthetic oligonucleotide
ggacagcgucaccgugagu

SEQ ID NO: 2478074 - RNA, 19 nt, Artificial Sequence
  Description of Artificial Sequence: Synthetic oligonucleotide
cgcaaacaagcugcugugu

SEQ ID NO: 2478075 - RNA, 19 nt, Artificial Sequence
  Description of Artificial Sequence: Synthetic oligonucleotide
ggguggcgugauggcgguc

SEQ ID NO: 2478076 - RNA, 19 nt, Artificial Sequence
  Description of Artificial Sequence: Synthetic oligonucleotide
cccaugaguggaggagccu

SEQ ID NO: 2478077 - RNA, 19 nt, Artificial Sequence
  Description of Artificial Sequence: Synthetic oligonucleotide
ggcugggcacucgguaguu

SEQ ID NO: 2478078 - RNA, 19 nt, Artificial Sequence
  Description of Artificial Sequence: Synthetic oligonucleotide
uguacguaaauguugaaag

SEQ ID NO: 2478079 - RNA, 19 nt, Artificial Sequence
  Description of Artificial Sequence: Synthetic oligonucleotide
ucauuugauaugaagacag

SEQ ID NO: 2478080 - RNA, 19 nt, Artificial Sequence
  Description of Artificial Sequence: Synthetic oligonucleotide
uuugauaugaagacagcgg

SEQ ID NO: 2478081 - RNA, 19 nt, Artificial Sequence
  Description of Artificial Sequence: Synthetic oligonucleotide
gaugaaaucaugcagguuc

SEQ ID NO: 2478082 - RNA, 19 nt, Artificial Sequence
  Description of Artificial Sequence: Synthetic oligonucleotide
aaucuuucaugugagagcg

SEQ ID NO: 2478083 - RNA, 19 nt, Artificial Sequence
  Description of Artificial Sequence: Synthetic oligonucleotide
ucuagcaucaggcugagca

SEQ ID NO: 2478084 - RNA, 19 nt, Artificial Sequence
  Description of Artificial Sequence: Synthetic oligonucleotide
acaguguauagacagcucc

SEQ ID NO: 2478085 - RNA, 19 nt, Artificial Sequence
  Description of Artificial Sequence: Synthetic oligonucleotide
ugugagagcggucagaagc

SEQ ID NO: 2478086 - RNA, 19 nt, Artificial Sequence
  Description of Artificial Sequence: Synthetic oligonucleotide
agaaugacaugauaauccc

SEQ ID NO: 2478087 - RNA, 19 nt, Artificial Sequence
  Description of Artificial Sequence: Synthetic oligonucleotide
accacucuaaauuuccucc

SEQ ID NO: 2478088 - RNA, 19 nt, Artificial Sequence
  Description of Artificial Sequence: Synthetic oligonucleotide
cuuaagggcaucuuguacg

SEQ ID NO: 2478089 - RNA, 19 nt, Artificial Sequence
  Description of Artificial Sequence: Synthetic oligonucleotide
aauagguaccaucuucuuc

SEQ ID NO: 2478090 - RNA, 19 nt, Artificial Sequence
  Description of Artificial Sequence: Synthetic oligonucleotide
ucaucgucagacuuaaggg

SEQ ID NO: 2478091 - RNA, 19 nt, Artificial Sequence
  Description of Artificial Sequence: Synthetic oligonucleotide
cagaaugacaugauaaucc

SEQ ID NO: 2478092 - RNA, 19 nt, Artificial Sequence
  Description of Artificial Sequence: Synthetic oligonucleotide
uacguaaauguugaaaggg

SEQ ID NO: 2478093 - RNA, 19 nt, Artificial Sequence
  Description of Artificial Sequence: Synthetic oligonucleotide
aauguuuccgcucaaguuu

SEQ ID NO: 2478094 - RNA, 19 nt, Artificial Sequence
  Description of Artificial Sequence: Synthetic oligonucleotide
uuccgcucaaguuuaaugg

SEQ ID NO: 2478095 - RNA, 19 nt, Artificial Sequence
  Description of Artificial Sequence: Synthetic oligonucleotide
auagguaccaucuucuucu

SEQ ID NO: 2478096 - RNA, 19 nt, Artificial Sequence
  Description of Artificial Sequence: Synthetic oligonucleotide
uguucauuaauguuuccgc

SEQ ID NO: 2478097 - RNA, 19 nt, Artificial Sequence
  Description of Artificial Sequence: Synthetic oligonucleotide
uugauaugaagacagcgga

SEQ ID NO: 2478098 - RNA, 19 nt, Artificial Sequence
  Description of Artificial Sequence: Synthetic oligonucleotide
gucaucgucagacuuaagg

SEQ ID NO: 2478099 - RNA, 19 nt, Artificial Sequence
  Description of Artificial Sequence: Synthetic oligonucleotide
uucaguuccacauucuagc

SEQ ID NO: 2478100 - RNA, 19 nt, Artificial Sequence
  Description of Artificial Sequence: Synthetic oligonucleotide
cagggaaauggcaaaaucg

SEQ ID NO: 2478101 - RNA, 19 nt, Artificial Sequence
  Description of Artificial Sequence: Synthetic oligonucleotide
aguuccacauucuagcauc

SEQ ID NO: 2478102 - RNA, 19 nt, Artificial Sequence
  Description of Artificial Sequence: Synthetic oligonucleotide
ucuuguacguaaauguuga

SEQ ID NO: 2478103 - RNA, 19 nt, Artificial Sequence
  Description of Artificial Sequence: Synthetic oligonucleotide
auuugauaugaagacagcg

SEQ ID NO: 2478104 - RNA, 19 nt, Artificial Sequence
  Description of Artificial Sequence: Synthetic oligonucleotide
caugcugaugaaaucaugc

SEQ ID NO: 2478105 - RNA, 19 nt, Artificial Sequence
  Description of Artificial Sequence: Synthetic oligonucleotide
ucucauuugauaugaagac

SEQ ID NO: 2478106 - RNA, 19 nt, Artificial Sequence
  Description of Artificial Sequence: Synthetic oligonucleotide
uuuuggaguccaaugcagg

SEQ ID NO: 2478107 - RNA, 19 nt, Artificial Sequence
  Description of Artificial Sequence: Synthetic oligonucleotide
gauaaucccagaucacagg

SEQ ID NO: 2478108 - RNA, 19 nt, Artificial Sequence
  Description of Artificial Sequence: Synthetic oligonucleotide
guaggaaucagcacgaacc

SEQ ID NO: 2478109 - RNA, 19 nt, Artificial Sequence
  Description of Artificial Sequence: Synthetic oligonucleotide
uuugauguauucacagagc

SEQ ID NO: 2478110 - RNA, 19 nt, Artificial Sequence
  Description of Artificial Sequence: Synthetic oligonucleotide
gaaucuuucaugugagagc

SEQ ID NO: 2478111 - RNA, 19 nt, Artificial Sequence
  Description of Artificial Sequence: Synthetic oligonucleotide
aaacagaccuccaaagcac

SEQ ID NO: 2478112 - RNA, 19 nt, Artificial Sequence
  Description of Artificial Sequence: Synthetic oligonucleotide
uuuggaguccaaugcaggg

SEQ ID NO: 2478113 - RNA, 19 nt, Artificial Sequence
  Description of Artificial Sequence: Synthetic oligonucleotide
cuguggaugaaugucaucg

SEQ ID NO: 2478114 - RNA, 19 nt, Artificial Sequence
  Description of Artificial Sequence: Synthetic oligonucleotide
aaccacucuaaauuuccuc

SEQ ID NO: 2478115 - RNA, 19 nt, Artificial Sequence
  Description of Artificial Sequence: Synthetic oligonucleotide
agaagcaaaguucuucaag

SEQ ID NO: 2478116 - RNA, 19 nt, Artificial Sequence
  Description of Artificial Sequence: Synthetic oligonucleotide
aaauguugaaagggcaggg

SEQ ID NO: 2478117 - RNA, 19 nt, Artificial Sequence
  Description of Artificial Sequence: Synthetic oligonucleotide
cuuauucagauccugggac

SEQ ID NO: 2478118 - RNA, 19 nt, Artificial Sequence
  Description of Artificial Sequence: Synthetic oligonucleotide
agcaaaguucuucaaguag

SEQ ID NO: 2478119 - RNA, 19 nt, Artificial Sequence
  Description of Artificial Sequence: Synthetic oligonucleotide
uggcacauggagcagaaug

SEQ ID NO: 2478120 - RNA, 19 nt, Artificial Sequence
  Description of Artificial Sequence: Synthetic oligonucleotide
uggucauggguuuugaugu

SEQ ID NO: 2478121 - RNA, 19 nt, Artificial Sequence
  Description of Artificial Sequence: Synthetic oligonucleotide
aaaugaagcucuguccuuc

SEQ ID NO: 2478122 - RNA, 19 nt, Artificial Sequence
  Description of Artificial Sequence: Synthetic oligonucleotide
acuuaagggcaucuuguac

SEQ ID NO: 2478123 - RNA, 19 nt, Artificial Sequence
  Description of Artificial Sequence: Synthetic oligonucleotide
auggugcucccuuaaaugg

SEQ ID NO: 2478124 - RNA, 19 nt, Artificial Sequence
  Description of Artificial Sequence: Synthetic oligonucleotide
aguaggaaucagcacgaac

SEQ ID NO: 2478125 - RNA, 19 nt, Artificial Sequence
  Description of Artificial Sequence: Synthetic oligonucleotide
uggaugaaugucaucguca

SEQ ID NO: 2478126 - RNA, 19 nt, Artificial Sequence
  Description of Artificial Sequence: Synthetic oligonucleotide
ucuaaauuuccuccugaac

SEQ ID NO: 2478127 - RNA, 19 nt, Artificial Sequence
  Description of Artificial Sequence: Synthetic oligonucleotide
aaacucagacaguguauag

SEQ ID NO: 2478128 - RNA, 19 nt, Artificial Sequence
  Description of Artificial Sequence: Synthetic oligonucleotide
guacguaaauguugaaagg

SEQ ID NO: 2478129 - RNA, 19 nt, Artificial Sequence
  Description of Artificial Sequence: Synthetic oligonucleotide
ggaaggauggcuuauucag

SEQ ID NO: 2478130 - RNA, 19 nt, Artificial Sequence
  Description of Artificial Sequence: Synthetic oligonucleotide
uuuccgcucaaguuuaaug

SEQ ID NO: 2478131 - RNA, 19 nt, Artificial Sequence
  Description of Artificial Sequence: Synthetic oligonucleotide
acguaaauguugaaagggc

SEQ ID NO: 2478132 - RNA, 19 nt, Artificial Sequence
  Description of Artificial Sequence: Synthetic oligonucleotide
ugaaccgcuguacaaacuc

SEQ ID NO: 2478133 - RNA, 19 nt, Artificial Sequence
  Description of Artificial Sequence: Synthetic oligonucleotide
gguuuugauguauucacag

SEQ ID NO: 2478134 - RNA, 19 nt, Artificial Sequence
  Description of Artificial Sequence: Synthetic oligonucleotide
caucgucagacuuaagggc

SEQ ID NO: 2478135 - RNA, 19 nt, Artificial Sequence
  Description of Artificial Sequence: Synthetic oligonucleotide
uccgcucaaguuuaauggg

SEQ ID NO: 2478136 - RNA, 19 nt, Artificial Sequence
  Description of Artificial Sequence: Synthetic oligonucleotide
uuuccaaauagguaccauc

SEQ ID NO: 2478137 - RNA, 19 nt, Artificial Sequence
  Description of Artificial Sequence: Synthetic oligonucleotide
ucccuuaaauggaaggaug

SEQ ID NO: 2478138 - RNA, 19 nt, Artificial Sequence
  Description of Artificial Sequence: Synthetic oligonucleotide
uuucaugugagagcgguca

SEQ ID NO: 2478139 - RNA, 19 nt, Artificial Sequence
  Description of Artificial Sequence: Synthetic oligonucleotide
aaucgagucaaggucauaa

SEQ ID NO: 2478140 - RNA, 19 nt, Artificial Sequence
  Description of Artificial Sequence: Synthetic oligonucleotide
uacuucaggguccaugcug

SEQ ID NO: 2478141 - RNA, 19 nt, Artificial Sequence
  Description of Artificial Sequence: Synthetic oligonucleotide
uggcuuauucagauccugg

SEQ ID NO: 2478142 - RNA, 19 nt, Artificial Sequence
  Description of Artificial Sequence: Synthetic oligonucleotide
caaaaucgagucaagguca

SEQ ID NO: 2478143 - RNA, 19 nt, Artificial Sequence
  Description of Artificial Sequence: Synthetic oligonucleotide
ugacaugauaaucccagau

SEQ ID NO: 2478144 - RNA, 19 nt, Artificial Sequence
  Description of Artificial Sequence: Synthetic oligonucleotide
aagggcaucuuguacguaa

SEQ ID NO: 2478145 - RNA, 19 nt, Artificial Sequence
  Description of Artificial Sequence: Synthetic oligonucleotide
uaggaaucagcacgaacca

SEQ ID NO: 2478146 - RNA, 19 nt, Artificial Sequence
  Description of Artificial Sequence: Synthetic oligonucleotide
ugaacuguggaugaauguc

SEQ ID NO: 2478147 - RNA, 19 nt, Artificial Sequence
  Description of Artificial Sequence: Synthetic oligonucleotide
aaauggcaaaaucgaguca

SEQ ID NO: 2478148 - RNA, 19 nt, Artificial Sequence
  Description of Artificial Sequence: Synthetic oligonucleotide
uguugaaagggcagggaaa

SEQ ID NO: 2478149 - RNA, 19 nt, Artificial Sequence
  Description of Artificial Sequence: Synthetic oligonucleotide
cauggugcucccuuaaaug

SEQ ID NO: 2478150 - RNA, 19 nt, Artificial Sequence
  Description of Artificial Sequence: Synthetic oligonucleotide
ucuuucaugugagagcggu

SEQ ID NO: 2478151 - RNA, 19 nt, Artificial Sequence
  Description of Artificial Sequence: Synthetic oligonucleotide
uuaagggcaucuuguacgu

SEQ ID NO: 2478152 - RNA, 19 nt, Artificial Sequence
  Description of Artificial Sequence: Synthetic oligonucleotide
uguagacacacgcgucccg

SEQ ID NO: 2478153 - RNA, 19 nt, Artificial Sequence
  Description of Artificial Sequence: Synthetic oligonucleotide
aaucaugcagguucauuuu

SEQ ID NO: 2478154 - RNA, 19 nt, Artificial Sequence
  Description of Artificial Sequence: Synthetic oligonucleotide
cauucuagcaucaggcuga

SEQ ID NO: 2478155 - RNA, 19 nt, Artificial Sequence
  Description of Artificial Sequence: Synthetic oligonucleotide
ucccuuggcacauggagca

SEQ ID NO: 2478156 - RNA, 19 nt, Artificial Sequence
  Description of Artificial Sequence: Synthetic oligonucleotide
auucacagagcuuccaaau

SEQ ID NO: 2478157 - RNA, 19 nt, Artificial Sequence
  Description of Artificial Sequence: Synthetic oligonucleotide
uggaguccaaugcaggggu

SEQ ID NO: 2478158 - RNA, 19 nt, Artificial Sequence
  Description of Artificial Sequence: Synthetic oligonucleotide
ugauaugaagacagcggaa

SEQ ID NO: 2478159 - RNA, 19 nt, Artificial Sequence
  Description of Artificial Sequence: Synthetic oligonucleotide
ucgagucaaggucauaaau

SEQ ID NO: 2478160 - RNA, 19 nt, Artificial Sequence
  Description of Artificial Sequence: Synthetic oligonucleotide
ggaaucuuucaugugagag

SEQ ID NO: 2478161 - RNA, 19 nt, Artificial Sequence
  Description of Artificial Sequence: Synthetic oligonucleotide
cauuugauaugaagacagc

SEQ ID NO: 2478162 - RNA, 19 nt, Artificial Sequence
  Description of Artificial Sequence: Synthetic oligonucleotide
agcagaaugacaugauaau

SEQ ID NO: 2478163 - RNA, 19 nt, Artificial Sequence
  Description of Artificial Sequence: Synthetic oligonucleotide
uuggaguccaaugcagggg

SEQ ID NO: 2478164 - RNA, 19 nt, Artificial Sequence
  Description of Artificial Sequence: Synthetic oligonucleotide
uggaaggauggcuuauuca

SEQ ID NO: 2478165 - RNA, 19 nt, Artificial Sequence
  Description of Artificial Sequence: Synthetic oligonucleotide
uggcaaaaucgagucaagg

SEQ ID NO: 2478166 - RNA, 19 nt, Artificial Sequence
  Description of Artificial Sequence: Synthetic oligonucleotide
auguguucauuaauguuuc

SEQ ID NO: 2478167 - RNA, 19 nt, Artificial Sequence
  Description of Artificial Sequence: Synthetic oligonucleotide
aagacagcggaacacucuu

SEQ ID NO: 2478168 - RNA, 19 nt, Artificial Sequence
  Description of Artificial Sequence: Synthetic oligonucleotide
ugaagcucuguccuucccu

SEQ ID NO: 2478169 - RNA, 19 nt, Artificial Sequence
  Description of Artificial Sequence: Synthetic oligonucleotide
gcaaaaucgagucaagguc

SEQ ID NO: 2478170 - RNA, 19 nt, Artificial Sequence
  Description of Artificial Sequence: Synthetic oligonucleotide
ucaguuccacauucuagca

SEQ ID NO: 2478171 - RNA, 19 nt, Artificial Sequence
  Description of Artificial Sequence: Synthetic oligonucleotide
aauguugaaagggcaggga

SEQ ID NO: 2478172 - RNA, 19 nt, Artificial Sequence
  Description of Artificial Sequence: Synthetic oligonucleotide
uuguacguaaauguugaaa

SEQ ID NO: 2478173 - RNA, 19 nt, Artificial Sequence
  Description of Artificial Sequence: Synthetic oligonucleotide
cuguuuccaaauagguacc

SEQ ID NO: 2478174 - RNA, 19 nt, Artificial Sequence
  Description of Artificial Sequence: Synthetic oligonucleotide
agcggaacacucuuccaag

SEQ ID NO: 2478175 - RNA, 19 nt, Artificial Sequence
  Description of Artificial Sequence: Synthetic oligonucleotide
accuccaaagcaccugcac

SEQ ID NO: 2478176 - RNA, 19 nt, Artificial Sequence
  Description of Artificial Sequence: Synthetic oligonucleotide
ggcuuauucagauccuggg

SEQ ID NO: 2478177 - RNA, 19 nt, Artificial Sequence
  Description of Artificial Sequence: Synthetic oligonucleotide
uccuccugaacuguggaug

SEQ ID NO: 2478178 - RNA, 19 nt, Artificial Sequence
  Description of Artificial Sequence: Synthetic oligonucleotide
acucuaaauuuccuccuga

SEQ ID NO: 2478179 - RNA, 19 nt, Artificial Sequence
  Description of Artificial Sequence: Synthetic oligonucleotide
aucuuguacguaaauguug

SEQ ID NO: 2478180 - RNA, 19 nt, Artificial Sequence
  Description of Artificial Sequence: Synthetic oligonucleotide
ucacagguccauucccagg

SEQ ID NO: 2478181 - RNA, 19 nt, Artificial Sequence
  Description of Artificial Sequence: Synthetic oligonucleotide
caugauaaucccagaucac

SEQ ID NO: 2478182 - RNA, 19 nt, Artificial Sequence
  Description of Artificial Sequence: Synthetic oligonucleotide
cuagcaucaggcugagcag

SEQ ID NO: 2478183 - RNA, 19 nt, Artificial Sequence
  Description of Artificial Sequence: Synthetic oligonucleotide
auguugaaagggcagggaa

SEQ ID NO: 2478184 - RNA, 19 nt, Artificial Sequence
  Description of Artificial Sequence: Synthetic oligonucleotide
aggucuugccugcuguuuc

SEQ ID NO: 2478185 - RNA, 19 nt, Artificial Sequence
  Description of Artificial Sequence: Synthetic oligonucleotide
augaagcucuguccuuccc

SEQ ID NO: 2478186 - RNA, 19 nt, Artificial Sequence
  Description of Artificial Sequence: Synthetic oligonucleotide
agggaaauggcaaaaucga

SEQ ID NO: 2478187 - RNA, 19 nt, Artificial Sequence
  Description of Artificial Sequence: Synthetic oligonucleotide
agacacacgcgucccgcgc

SEQ ID NO: 2478188 - RNA, 19 nt, Artificial Sequence
  Description of Artificial Sequence: Synthetic oligonucleotide
uucaugugagagcggucag

SEQ ID NO: 2478189 - RNA, 19 nt, Artificial Sequence
  Description of Artificial Sequence: Synthetic oligonucleotide
agacaguguauagacagcu

SEQ ID NO: 2478190 - RNA, 19 nt, Artificial Sequence
  Description of Artificial Sequence: Synthetic oligonucleotide
gguacugcgggaccgaggc

SEQ ID NO: 2478191 - RNA, 19 nt, Artificial Sequence
  Description of Artificial Sequence: Synthetic oligonucleotide
gagcagaaugacaugauaa

SEQ ID NO: 2478192 - RNA, 19 nt, Artificial Sequence
  Description of Artificial Sequence: Synthetic oligonucleotide
acugcugaaccgcuguaca

SEQ ID NO: 2478193 - RNA, 19 nt, Artificial Sequence
  Description of Artificial Sequence: Synthetic oligonucleotide
uguggaugaaugucaucgu

SEQ ID NO: 2478194 - RNA, 19 nt, Artificial Sequence
  Description of Artificial Sequence: Synthetic oligonucleotide
agagcggucagaagcaaag

SEQ ID NO: 2478195 - RNA, 19 nt, Artificial Sequence
  Description of Artificial Sequence: Synthetic oligonucleotide
ucuguccuucccuuggcac

SEQ ID NO: 2478196 - RNA, 19 nt, Artificial Sequence
  Description of Artificial Sequence: Synthetic oligonucleotide
agcacgaaccacucuaaau

SEQ ID NO: 2478197 - RNA, 19 nt, Artificial Sequence
  Description of Artificial Sequence: Synthetic oligonucleotide
cccuuaaauggaaggaugg

SEQ ID NO: 2478198 - RNA, 19 nt, Artificial Sequence
  Description of Artificial Sequence: Synthetic oligonucleotide
caaguaggaaucagcacga

SEQ ID NO: 2478199 - RNA, 19 nt, Artificial Sequence
  Description of Artificial Sequence: Synthetic oligonucleotide
aauuuccuccugaacugug

SEQ ID NO: 2478200 - RNA, 19 nt, Artificial Sequence
  Description of Artificial Sequence: Synthetic oligonucleotide
agacuuaagggcaucuugu

SEQ ID NO: 2478201 - RNA, 19 nt, Artificial Sequence
  Description of Artificial Sequence: Synthetic oligonucleotide
cauggguuuugauguauuc

SEQ ID NO: 2478202 - RNA, 19 nt, Artificial Sequence
  Description of Artificial Sequence: Synthetic oligonucleotide
auuuccuccugaacugugg

SEQ ID NO: 2478203 - RNA, 19 nt, Artificial Sequence
  Description of Artificial Sequence: Synthetic oligonucleotide
aaucagcacgaaccacucu

SEQ ID NO: 2478204 - RNA, 19 nt, Artificial Sequence
  Description of Artificial Sequence: Synthetic oligonucleotide
cuuccaagggauacugguc

SEQ ID NO: 2478205 - RNA, 19 nt, Artificial Sequence
  Description of Artificial Sequence: Synthetic oligonucleotide
aggauggcuuauucagauc

SEQ ID NO: 2478206 - RNA, 19 nt, Artificial Sequence
  Description of Artificial Sequence: Synthetic oligonucleotide
aucgucagacuuaagggca

SEQ ID NO: 2478207 - RNA, 19 nt, Artificial Sequence
  Description of Artificial Sequence: Synthetic oligonucleotide
caaauagguaccaucuucu

SEQ ID NO: 2478208 - RNA, 19 nt, Artificial Sequence
  Description of Artificial Sequence: Synthetic oligonucleotide
uccaaugcagggguagggc

SEQ ID NO: 2478209 - RNA, 19 nt, Artificial Sequence
  Description of Artificial Sequence: Synthetic oligonucleotide
uccuacuucaggguccaug

SEQ ID NO: 2478210 - RNA, 19 nt, Artificial Sequence
  Description of Artificial Sequence: Synthetic oligonucleotide
guauagacagcuccccauc

SEQ ID NO: 2478211 - RNA, 19 nt, Artificial Sequence
  Description of Artificial Sequence: Synthetic oligonucleotide
aaauggaaggauggcuuau

SEQ ID NO: 2478212 - RNA, 19 nt, Artificial Sequence
  Description of Artificial Sequence: Synthetic oligonucleotide
augaagacagcggaacacu

SEQ ID NO: 2478213 - RNA, 19 nt, Artificial Sequence
  Description of Artificial Sequence: Synthetic oligonucleotide
uacugcgggaccgaggcga

SEQ ID NO: 2478214 - RNA, 19 nt, Artificial Sequence
  Description of Artificial Sequence: Synthetic oligonucleotide
ucccgcgcagggcaggccg

SEQ ID NO: 2478215 - RNA, 19 nt, Artificial Sequence
  Description of Artificial Sequence: Synthetic oligonucleotide
gaguccaaugcagggguag

SEQ ID NO: 2478216 - RNA, 19 nt, Artificial Sequence
  Description of Artificial Sequence: Synthetic oligonucleotide
uccaaauagguaccaucuu

SEQ ID NO: 2478217 - RNA, 19 nt, Artificial Sequence
  Description of Artificial Sequence: Synthetic oligonucleotide
aggaaucagcacgaaccac

SEQ ID NO: 2478218 - RNA, 19 nt, Artificial Sequence
  Description of Artificial Sequence: Synthetic oligonucleotide
uggaaucuuucaugugaga

SEQ ID NO: 2478219 - RNA, 19 nt, Artificial Sequence
  Description of Artificial Sequence: Synthetic oligonucleotide
ccaaauagguaccaucuuc

SEQ ID NO: 2478220 - RNA, 19 nt, Artificial Sequence
  Description of Artificial Sequence: Synthetic oligonucleotide
ugcgggaccgaggcgacgg

SEQ ID NO: 2478221 - RNA, 19 nt, Artificial Sequence
  Description of Artificial Sequence: Synthetic oligonucleotide
aaaaucgagucaaggucau

SEQ ID NO: 2478222 - RNA, 19 nt, Artificial Sequence
  Description of Artificial Sequence: Synthetic oligonucleotide
ugcuguagacacacgcguc

SEQ ID NO: 2478223 - RNA, 19 nt, Artificial Sequence
  Description of Artificial Sequence: Synthetic oligonucleotide
cacucuaaauuuccuccug

SEQ ID NO: 2478224 - RNA, 19 nt, Artificial Sequence
  Description of Artificial Sequence: Synthetic oligonucleotide
acgaaccacucuaaauuuc

SEQ ID NO: 2478225 - RNA, 19 nt, Artificial Sequence
  Description of Artificial Sequence: Synthetic oligonucleotide
cauggagcagaaugacaug

SEQ ID NO: 2478226 - RNA, 19 nt, Artificial Sequence
  Description of Artificial Sequence: Synthetic oligonucleotide
cucauuugauaugaagaca

SEQ ID NO: 2478227 - RNA, 19 nt, Artificial Sequence
  Description of Artificial Sequence: Synthetic oligonucleotide
gcaucuuguacguaaaugu

SEQ ID NO: 2478228 - RNA, 19 nt, Artificial Sequence
  Description of Artificial Sequence: Synthetic oligonucleotide
agcggucagaagcaaaguu

SEQ ID NO: 2478229 - RNA, 19 nt, Artificial Sequence
  Description of Artificial Sequence: Synthetic oligonucleotide
uugccugcuguuuccaaau

SEQ ID NO: 2478230 - RNA, 19 nt, Artificial Sequence
  Description of Artificial Sequence: Synthetic oligonucleotide
cgagucaaggucauaaaug

SEQ ID NO: 2478231 - RNA, 19 nt, Artificial Sequence
  Description of Artificial Sequence: Synthetic oligonucleotide
uucagauccugggaccucu

SEQ ID NO: 2478232 - RNA, 19 nt, Artificial Sequence
  Description of Artificial Sequence: Synthetic oligonucleotide
ugcugaaccgcuguacaaa

SEQ ID NO: 2478233 - RNA, 19 nt, Artificial Sequence
  Description of Artificial Sequence: Synthetic oligonucleotide
aauggaaggauggcuuauu

SEQ ID NO: 2478234 - RNA, 19 nt, Artificial Sequence
  Description of Artificial Sequence: Synthetic oligonucleotide
uggagcagaaugacaugau

SEQ ID NO: 2478235 - RNA, 19 nt, Artificial Sequence
  Description of Artificial Sequence: Synthetic oligonucleotide
ccaaauguucuccucgcag

SEQ ID NO: 2478236 - RNA, 19 nt, Artificial Sequence
  Description of Artificial Sequence: Synthetic oligonucleotide
uccucgcaguagcagcugc

SEQ ID NO: 2478237 - RNA, 19 nt, Artificial Sequence
  Description of Artificial Sequence: Synthetic oligonucleotide
aguccaaugcagggguagg

SEQ ID NO: 2478238 - RNA, 19 nt, Artificial Sequence
  Description of Artificial Sequence: Synthetic oligonucleotide
ucauggguuuugauguauu

SEQ ID NO: 2478239 - RNA, 19 nt, Artificial Sequence
  Description of Artificial Sequence: Synthetic oligonucleotide
ggaggcucucuccaguucc

SEQ ID NO: 2478240 - RNA, 19 nt, Artificial Sequence
  Description of Artificial Sequence: Synthetic oligonucleotide
gaaggauggcuuauucaga

SEQ ID NO: 2478241 - RNA, 19 nt, Artificial Sequence
  Description of Artificial Sequence: Synthetic oligonucleotide
gaaucagcacgaaccacuc

SEQ ID NO: 2478242 - RNA, 19 nt, Artificial Sequence
  Description of Artificial Sequence: Synthetic oligonucleotide
aggaggcucucuccaguuc

SEQ ID NO: 2478243 - RNA, 19 nt, Artificial Sequence
  Description of Artificial Sequence: Synthetic oligonucleotide
ggcaucuuguacguaaaug

SEQ ID NO: 2478244 - RNA, 19 nt, Artificial Sequence
  Description of Artificial Sequence: Synthetic oligonucleotide
cgaaccacucuaaauuucc

SEQ ID NO: 2478245 - RNA, 19 nt, Artificial Sequence
  Description of Artificial Sequence: Synthetic oligonucleotide
gacuuaagggcaucuugua

SEQ ID NO: 2478246 - RNA, 19 nt, Artificial Sequence
  Description of Artificial Sequence: Synthetic oligonucleotide
gcagguucauuuuggaguc

SEQ ID NO: 2478247 - RNA, 19 nt, Artificial Sequence
  Description of Artificial Sequence: Synthetic oligonucleotide
uacugcugaaccgcuguac

SEQ ID NO: 2478248 - RNA, 19 nt, Artificial Sequence
  Description of Artificial Sequence: Synthetic oligonucleotide
aucgagucaaggucauaaa

SEQ ID NO: 2478249 - RNA, 19 nt, Artificial Sequence
  Description of Artificial Sequence: Synthetic oligonucleotide
guagacacacgcgucccgc

SEQ ID NO: 2478250 - RNA, 19 nt, Artificial Sequence
  Description of Artificial Sequence: Synthetic oligonucleotide
ggcaaaaucgagucaaggu

SEQ ID NO: 2478251 - RNA, 19 nt, Artificial Sequence
  Description of Artificial Sequence: Synthetic oligonucleotide
gaccucuucaguuccacau

SEQ ID NO: 2478252 - RNA, 19 nt, Artificial Sequence
  Description of Artificial Sequence: Synthetic oligonucleotide
guccaaugcagggguaggg

SEQ ID NO: 2478253 - RNA, 19 nt, Artificial Sequence
  Description of Artificial Sequence: Synthetic oligonucleotide
cuuucaugugagagcgguc

SEQ ID NO: 2478254 - RNA, 19 nt, Artificial Sequence
  Description of Artificial Sequence: Synthetic oligonucleotide
ucgucagacuuaagggcau

SEQ ID NO: 2478255 - RNA, 19 nt, Artificial Sequence
  Description of Artificial Sequence: Synthetic oligonucleotide
caaauguucuccucgcagu

SEQ ID NO: 2478256 - RNA, 19 nt, Artificial Sequence
  Description of Artificial Sequence: Synthetic oligonucleotide
acacgcgucccgcgcaggg

SEQ ID NO: 2478257 - RNA, 19 nt, Artificial Sequence
  Description of Artificial Sequence: Synthetic oligonucleotide
gcuuauucagauccuggga

SEQ ID NO: 2478258 - RNA, 19 nt, Artificial Sequence
  Description of Artificial Sequence: Synthetic oligonucleotide
guguauagacagcucccca

SEQ ID NO: 2478259 - RNA, 19 nt, Artificial Sequence
  Description of Artificial Sequence: Synthetic oligonucleotide
gccugcuguuuccaaauag

SEQ ID NO: 2478260 - RNA, 19 nt, Artificial Sequence
  Description of Artificial Sequence: Synthetic oligonucleotide
cuguagacacacgcguccc

SEQ ID NO: 2478261 - RNA, 19 nt, Artificial Sequence
  Description of Artificial Sequence: Synthetic oligonucleotide
uccugaacuguggaugaau

SEQ ID NO: 2478262 - RNA, 19 nt, Artificial Sequence
  Description of Artificial Sequence: Synthetic oligonucleotide
acagcggaacacucuucca

SEQ ID NO: 2478263 - RNA, 19 nt, Artificial Sequence
  Description of Artificial Sequence: Synthetic oligonucleotide
augucaucgucagacuuaa

SEQ ID NO: 2478264 - RNA, 19 nt, Artificial Sequence
  Description of Artificial Sequence: Synthetic oligonucleotide
uuacugcugaaccgcugua

SEQ ID NO: 2478265 - RNA, 19 nt, Artificial Sequence
  Description of Artificial Sequence: Synthetic oligonucleotide
ccauccuacuucagggucc

SEQ ID NO: 2478266 - RNA, 19 nt, Artificial Sequence
  Description of Artificial Sequence: Synthetic oligonucleotide
auacuggucauggguuuug

SEQ ID NO: 2478267 - RNA, 19 nt, Artificial Sequence
  Description of Artificial Sequence: Synthetic oligonucleotide
cugaugaaaucaugcaggu

SEQ ID NO: 2478268 - RNA, 19 nt, Artificial Sequence
  Description of Artificial Sequence: Synthetic oligonucleotide
caaacucagacaguguaua

SEQ ID NO: 2478269 - RNA, 19 nt, Artificial Sequence
  Description of Artificial Sequence: Synthetic oligonucleotide
gaggcgacggggccgucgc

SEQ ID NO: 2478270 - RNA, 19 nt, Artificial Sequence
  Description of Artificial Sequence: Synthetic oligonucleotide
ugucaucgucagacuuaag

SEQ ID NO: 2478271 - RNA, 19 nt, Artificial Sequence
  Description of Artificial Sequence: Synthetic oligonucleotide
gcagggaaauggcaaaauc

SEQ ID NO: 2478272 - RNA, 19 nt, Artificial Sequence
  Description of Artificial Sequence: Synthetic oligonucleotide
gcggaacacucuuccaagg

SEQ ID NO: 2478273 - RNA, 19 nt, Artificial Sequence
  Description of Artificial Sequence: Synthetic oligonucleotide
gcugaaccgcuguacaaac

SEQ ID NO: 2478274 - RNA, 19 nt, Artificial Sequence
  Description of Artificial Sequence: Synthetic oligonucleotide
ccuuaaauggaaggauggc

SEQ ID NO: 2478275 - RNA, 19 nt, Artificial Sequence
  Description of Artificial Sequence: Synthetic oligonucleotide
guugaaagggcagggaaau

SEQ ID NO: 2478276 - RNA, 19 nt, Artificial Sequence
  Description of Artificial Sequence: Synthetic oligonucleotide
agggguagggcuggaggag

SEQ ID NO: 2478277 - RNA, 19 nt, Artificial Sequence
  Description of Artificial Sequence: Synthetic oligonucleotide
cguaaauguugaaagggca

SEQ ID NO: 2478278 - RNA, 19 nt, Artificial Sequence
  Description of Artificial Sequence: Synthetic oligonucleotide
cugcuguuuccaaauaggu

SEQ ID NO: 2478279 - RNA, 19 nt, Artificial Sequence
  Description of Artificial Sequence: Synthetic oligonucleotide
gaacacucuuccaagggau

SEQ ID NO: 2478280 - RNA, 19 nt, Artificial Sequence
  Description of Artificial Sequence: Synthetic oligonucleotide
uguuuccgcucaaguuuaa

SEQ ID NO: 2478281 - RNA, 19 nt, Artificial Sequence
  Description of Artificial Sequence: Synthetic oligonucleotide
ccgcuguacaaacucagac

SEQ ID NO: 2478282 - RNA, 19 nt, Artificial Sequence
  Description of Artificial Sequence: Synthetic oligonucleotide
aacacucuuccaagggaua

SEQ ID NO: 2478283 - RNA, 19 nt, Artificial Sequence
  Description of Artificial Sequence: Synthetic oligonucleotide
gacacacgcgucccgcgca

SEQ ID NO: 2478284 - RNA, 19 nt, Artificial Sequence
  Description of Artificial Sequence: Synthetic oligonucleotide
cucgcaguagcagcugcug

SEQ ID NO: 2478285 - RNA, 19 nt, Artificial Sequence
  Description of Artificial Sequence: Synthetic oligonucleotide
acacacgcgucccgcgcag

SEQ ID NO: 2478286 - RNA, 19 nt, Artificial Sequence
  Description of Artificial Sequence: Synthetic oligonucleotide
agacagcggaacacucuuc

SEQ ID NO: 2478287 - RNA, 19 nt, Artificial Sequence
  Description of Artificial Sequence: Synthetic oligonucleotide
cacagguccauucccaggu

SEQ ID NO: 2478288 - RNA, 19 nt, Artificial Sequence
  Description of Artificial Sequence: Synthetic oligonucleotide
ggaaucagcacgaaccacu

SEQ ID NO: 2478289 - RNA, 19 nt, Artificial Sequence
  Description of Artificial Sequence: Synthetic oligonucleotide
gcggucagaagcaaaguuc

SEQ ID NO: 2478290 - RNA, 19 nt, Artificial Sequence
  Description of Artificial Sequence: Synthetic oligonucleotide
gaccgaggcgacggggccg

SEQ ID NO: 2478291 - RNA, 19 nt, Artificial Sequence
  Description of Artificial Sequence: Synthetic oligonucleotide
cagcggaacacucuuccaa

SEQ ID NO: 2478292 - RNA, 19 nt, Artificial Sequence
  Description of Artificial Sequence: Synthetic oligonucleotide
gcacgaaccacucuaaauu

SEQ ID NO: 2478293 - RNA, 19 nt, Artificial Sequence
  Description of Artificial Sequence: Synthetic oligonucleotide
cugaacuguggaugaaugu

SEQ ID NO: 2478294 - RNA, 19 nt, Artificial Sequence
  Description of Artificial Sequence: Synthetic oligonucleotide
guacugcgggaccgaggcg

SEQ ID NO: 2478295 - RNA, 19 nt, Artificial Sequence
  Description of Artificial Sequence: Synthetic oligonucleotide
auguuuccgcucaaguuua

SEQ ID NO: 2478296 - RNA, 19 nt, Artificial Sequence
  Description of Artificial Sequence: Synthetic oligonucleotide
cuuguacguaaauguugaa

SEQ ID NO: 2478297 - RNA, 19 nt, Artificial Sequence
  Description of Artificial Sequence: Synthetic oligonucleotide
acgcgucccgcgcagggca

SEQ ID NO: 2478298 - RNA, 19 nt, Artificial Sequence
  Description of Artificial Sequence: Synthetic oligonucleotide
ggagcagaaugacaugaua

SEQ ID NO: 2478299 - RNA, 19 nt, Artificial Sequence
  Description of Artificial Sequence: Synthetic oligonucleotide
gguccaugcugaugaaauc

SEQ ID NO: 2478300 - RNA, 19 nt, Artificial Sequence
  Description of Artificial Sequence: Synthetic oligonucleotide
aaaucgagucaaggucaua

SEQ ID NO: 2478301 - RNA, 19 nt, Artificial Sequence
  Description of Artificial Sequence: Synthetic oligonucleotide
gcucccuuaaauggaagga

SEQ ID NO: 2478302 - RNA, 19 nt, Artificial Sequence
  Description of Artificial Sequence: Synthetic oligonucleotide
gauggcuuauucagauccu

SEQ ID NO: 2478303 - RNA, 19 nt, Artificial Sequence
  Description of Artificial Sequence: Synthetic oligonucleotide
ggcugguacugcgggaccg

SEQ ID NO: 2478304 - RNA, 19 nt, Artificial Sequence
  Description of Artificial Sequence: Synthetic oligonucleotide
cacgaaccacucuaaauuu

SEQ ID NO: 2478305 - RNA, 19 nt, Artificial Sequence
  Description of Artificial Sequence: Synthetic oligonucleotide
gugcucccuuaaauggaag

SEQ ID NO: 2478306 - RNA, 19 nt, Artificial Sequence
  Description of Artificial Sequence: Synthetic oligonucleotide
accgcuguacaaacucaga

SEQ ID NO: 2478307 - RNA, 19 nt, Artificial Sequence
  Description of Artificial Sequence: Synthetic oligonucleotide
cagguucauuuuggagucc

SEQ ID NO: 2478308 - RNA, 19 nt, Artificial Sequence
  Description of Artificial Sequence: Synthetic oligonucleotide
cugcugaaccgcuguacaa

SEQ ID NO: 2478309 - RNA, 19 nt, Artificial Sequence
  Description of Artificial Sequence: Synthetic oligonucleotide
cauuaauguuuccgcucaa

SEQ ID NO: 2478310 - RNA, 19 nt, Artificial Sequence
  Description of Artificial Sequence: Synthetic oligonucleotide
cccauccuacuucaggguc

SEQ ID NO: 2478311 - RNA, 19 nt, Artificial Sequence
  Description of Artificial Sequence: Synthetic oligonucleotide
ggccggcugguacugcggg

SEQ ID NO: 2478312 - RNA, 19 nt, Artificial Sequence
  Description of Artificial Sequence: Synthetic oligonucleotide
ggguuuugauguauucaca

SEQ ID NO: 2478313 - RNA, 19 nt, Artificial Sequence
  Description of Artificial Sequence: Synthetic oligonucleotide
gacggggccgucgcccucc

SEQ ID NO: 2478314 - RNA, 19 nt, Artificial Sequence
  Description of Artificial Sequence: Synthetic oligonucleotide
gagagcggucagaagcaaa

SEQ ID NO: 2478315 - RNA, 19 nt, Artificial Sequence
  Description of Artificial Sequence: Synthetic oligonucleotide
cugguacugcgggaccgag

SEQ ID NO: 2478316 - RNA, 19 nt, Artificial Sequence
  Description of Artificial Sequence: Synthetic oligonucleotide
aggcgacggggccgucgcc

SEQ ID NO: 2478317 - RNA, 19 nt, Artificial Sequence
  Description of Artificial Sequence: Synthetic oligonucleotide
cgcuguacaaacucagaca

SEQ ID NO: 2478318 - RNA, 19 nt, Artificial Sequence
  Description of Artificial Sequence: Synthetic oligonucleotide
agggcaucuuguacguaaa

SEQ ID NO: 2478319 - RNA, 19 nt, Artificial Sequence
  Description of Artificial Sequence: Synthetic oligonucleotide
uaagggcaucuuguacgua

SEQ ID NO: 2478320 - RNA, 19 nt, Artificial Sequence
  Description of Artificial Sequence: Synthetic oligonucleotide
gauacuggucauggguuuu

SEQ ID NO: 2478321 - RNA, 19 nt, Artificial Sequence
  Description of Artificial Sequence: Synthetic oligonucleotide
ggaccgaggcgacggggcc

SEQ ID NO: 2478322 - RNA, 19 nt, Artificial Sequence
  Description of Artificial Sequence: Synthetic oligonucleotide
ccgcucaaguuuaauggga

SEQ ID NO: 2478323 - RNA, 19 nt, Artificial Sequence
  Description of Artificial Sequence: Synthetic oligonucleotide
cucccuuaaauggaaggau

SEQ ID NO: 2478324 - RNA, 19 nt, Artificial Sequence
  Description of Artificial Sequence: Synthetic oligonucleotide
gucagacuuaagggcaucu

SEQ ID NO: 2478325 - RNA, 19 nt, Artificial Sequence
  Description of Artificial Sequence: Synthetic oligonucleotide
cacagagcuuccaaauguu

SEQ ID NO: 2478326 - RNA, 19 nt, Artificial Sequence
  Description of Artificial Sequence: Synthetic oligonucleotide
aggccggcugguacugcgg

SEQ ID NO: 2478327 - RNA, 19 nt, Artificial Sequence
  Description of Artificial Sequence: Synthetic oligonucleotide
aguucccacuggaaucuuu

SEQ ID NO: 2478328 - RNA, 19 nt, Artificial Sequence
  Description of Artificial Sequence: Synthetic oligonucleotide
ccacuggaaucuuucaugu

SEQ ID NO: 2478329 - RNA, 19 nt, Artificial Sequence
  Description of Artificial Sequence: Synthetic oligonucleotide
cugaaccgcuguacaaacu

SEQ ID NO: 2478330 - RNA, 19 nt, Artificial Sequence
  Description of Artificial Sequence: Synthetic oligonucleotide
gaggaggcucucuccaguu

SEQ ID NO: 2478331 - RNA, 19 nt, Artificial Sequence
  Description of Artificial Sequence: Synthetic oligonucleotide
gggaccgaggcgacggggc

SEQ ID NO: 2478332 - RNA, 19 nt, Artificial Sequence
  Description of Artificial Sequence: Synthetic oligonucleotide
cagguccauucccaggucu

SEQ ID NO: 2478333 - RNA, 19 nt, Artificial Sequence
  Description of Artificial Sequence: Synthetic oligonucleotide
cuccucgcaguagcagcug

SEQ ID NO: 2478334 - RNA, 19 nt, Artificial Sequence
  Description of Artificial Sequence: Synthetic oligonucleotide
caguuccacauucuagcau

SEQ ID NO: 2478335 - RNA, 19 nt, Artificial Sequence
  Description of Artificial Sequence: Synthetic oligonucleotide
cacgcgucccgcgcagggc

SEQ ID NO: 2478336 - RNA, 19 nt, Artificial Sequence
  Description of Artificial Sequence: Synthetic oligonucleotide
caccauggugcucccuuaa

SEQ ID NO: 2478337 - RNA, 19 nt, Artificial Sequence
  Description of Artificial Sequence: Synthetic oligonucleotide
accgaggcgacggggccgu

SEQ ID NO: 2478338 - RNA, 19 nt, Artificial Sequence
  Description of Artificial Sequence: Synthetic oligonucleotide
gagcggucagaagcaaagu

SEQ ID NO: 2478339 - RNA, 19 nt, Artificial Sequence
  Description of Artificial Sequence: Synthetic oligonucleotide
ggcgacggggccgucgccc

SEQ ID NO: 2478340 - RNA, 19 nt, Artificial Sequence
  Description of Artificial Sequence: Synthetic oligonucleotide
ggauacuggucauggguuu

SEQ ID NO: 2478341 - RNA, 19 nt, Artificial Sequence
  Description of Artificial Sequence: Synthetic oligonucleotide
cacacgcgucccgcgcagg

SEQ ID NO: 2478342 - RNA, 19 nt, Artificial Sequence
  Description of Artificial Sequence: Synthetic oligonucleotide
ccggcugguacugcgggac

SEQ ID NO: 2478343 - RNA, 19 nt, Artificial Sequence
  Description of Artificial Sequence: Synthetic oligonucleotide
ccaaugcagggguagggcu

SEQ ID NO: 2478344 - RNA, 19 nt, Artificial Sequence
  Description of Artificial Sequence: Synthetic oligonucleotide
ccacucuaaauuuccuccu

SEQ ID NO: 2478345 - RNA, 19 nt, Artificial Sequence
  Description of Artificial Sequence: Synthetic oligonucleotide
cugcgggaccgaggcgacg

SEQ ID NO: 2478346 - RNA, 19 nt, Artificial Sequence
  Description of Artificial Sequence: Synthetic oligonucleotide
guuuccgcucaaguuuaau

SEQ ID NO: 2478347 - RNA, 19 nt, Artificial Sequence
  Description of Artificial Sequence: Synthetic oligonucleotide
gguucauuuuggaguccaa

SEQ ID NO: 2478348 - RNA, 19 nt, Artificial Sequence
  Description of Artificial Sequence: Synthetic oligonucleotide
ggcaggccggcugguacug

SEQ ID NO: 2478349 - RNA, 19 nt, Artificial Sequence
  Description of Artificial Sequence: Synthetic oligonucleotide
ccuuggcacauggagcaga

SEQ ID NO: 2478350 - RNA, 19 nt, Artificial Sequence
  Description of Artificial Sequence: Synthetic oligonucleotide
ccaguucccacuggaaucu

SEQ ID NO: 2478351 - RNA, 19 nt, Artificial Sequence
  Description of Artificial Sequence: Synthetic oligonucleotide
cuccugaacuguggaugaa

SEQ ID NO: 2478352 - RNA, 19 nt, Artificial Sequence
  Description of Artificial Sequence: Synthetic oligonucleotide
ccauggugcucccuuaaau

SEQ ID NO: 2478353 - RNA, 19 nt, Artificial Sequence
  Description of Artificial Sequence: Synthetic oligonucleotide
gcugguacugcgggaccga

SEQ ID NO: 2478354 - RNA, 19 nt, Artificial Sequence
  Description of Artificial Sequence: Synthetic oligonucleotide
guccuucccuuggcacaug

SEQ ID NO: 2478355 - RNA, 19 nt, Artificial Sequence
  Description of Artificial Sequence: Synthetic oligonucleotide
cccgcgcagggcaggccgg

SEQ ID NO: 2478356 - RNA, 19 nt, Artificial Sequence
  Description of Artificial Sequence: Synthetic oligonucleotide
gggcaucuuguacguaaau

SEQ ID NO: 2478357 - RNA, 19 nt, Artificial Sequence
  Description of Artificial Sequence: Synthetic oligonucleotide
gucccgcgcagggcaggcc

SEQ ID NO: 2478358 - RNA, 19 nt, Artificial Sequence
  Description of Artificial Sequence: Synthetic oligonucleotide
gccggcugguacugcggga

SEQ ID NO: 2478359 - RNA, 19 nt, Artificial Sequence
  Description of Artificial Sequence: Synthetic oligonucleotide
cccuuggcacauggagcag

SEQ ID NO: 2478360 - RNA, 19 nt, Artificial Sequence
  Description of Artificial Sequence: Synthetic oligonucleotide
ggaguccaaugcaggggua

SEQ ID NO: 2478361 - RNA, 19 nt, Artificial Sequence
  Description of Artificial Sequence: Synthetic oligonucleotide
ccauucccaggucuugccu

SEQ ID NO: 2478362 - RNA, 19 nt, Artificial Sequence
  Description of Artificial Sequence: Synthetic oligonucleotide
gggcaggccggcugguacu

SEQ ID NO: 2478363 - RNA, 19 nt, Artificial Sequence
  Description of Artificial Sequence: Synthetic oligonucleotide
cgaggcgacggggccgucg

SEQ ID NO: 2478364 - RNA, 19 nt, Artificial Sequence
  Description of Artificial Sequence: Synthetic oligonucleotide
cgggaccgaggcgacgggg

SEQ ID NO: 2478365 - RNA, 19 nt, Artificial Sequence
  Description of Artificial Sequence: Synthetic oligonucleotide
gcgucccgcgcagggcagg

SEQ ID NO: 2478366 - RNA, 19 nt, Artificial Sequence
  Description of Artificial Sequence: Synthetic oligonucleotide
cgucagacuuaagggcauc

SEQ ID NO: 2478367 - RNA, 19 nt, Artificial Sequence
  Description of Artificial Sequence: Synthetic oligonucleotide
gcaggccggcugguacugc

SEQ ID NO: 2478368 - RNA, 19 nt, Artificial Sequence
  Description of Artificial Sequence: Synthetic oligonucleotide
ccccauccuacuucagggu

SEQ ID NO: 2478369 - RNA, 19 nt, Artificial Sequence
  Description of Artificial Sequence: Synthetic oligonucleotide
ccucgcaguagcagcugcu

SEQ ID NO: 2478370 - RNA, 19 nt, Artificial Sequence
  Description of Artificial Sequence: Synthetic oligonucleotide
cgcgucccgcgcagggcag

SEQ ID NO: 2478371 - RNA, 19 nt, Artificial Sequence
  Description of Artificial Sequence: Synthetic oligonucleotide
gcgacggggccgucgcccu

SEQ ID NO: 2478372 - RNA, 19 nt, Artificial Sequence
  Description of Artificial Sequence: Synthetic oligonucleotide
cgucccgcgcagggcaggc

SEQ ID NO: 2478373 - RNA, 19 nt, Artificial Sequence
  Description of Artificial Sequence: Synthetic oligonucleotide
ccgcgcagggcaggccggc

SEQ ID NO: 2478374 - RNA, 19 nt, Artificial Sequence
  Description of Artificial Sequence: Synthetic oligonucleotide
gcaucaggcugagcaguuu

SEQ ID NO: 2478375 - RNA, 19 nt, Artificial Sequence
  Description of Artificial Sequence: Synthetic oligonucleotide
cugcaccauggugcucccu

SEQ ID NO: 2478376 - RNA, 19 nt, Artificial Sequence
  Description of Artificial Sequence: Synthetic oligonucleotide
ccgaggcgacggggccguc

SEQ ID NO: 2478377 - RNA, 19 nt, Artificial Sequence
  Description of Artificial Sequence: Synthetic oligonucleotide
aacaaaguaaauuagcugc

SEQ ID NO: 2478378 - RNA, 19 nt, Artificial Sequence
  Description of Artificial Sequence: Synthetic oligonucleotide
uuugauauaaucuacauuc

SEQ ID NO: 2478379 - RNA, 19 nt, Artificial Sequence
  Description of Artificial Sequence: Synthetic oligonucleotide
uuaguuuacauucuaaaag

SEQ ID NO: 2478380 - RNA, 19 nt, Artificial Sequence
  Description of Artificial Sequence: Synthetic oligonucleotide
auaaucuacauucaagugg

SEQ ID NO: 2478381 - RNA, 19 nt, Artificial Sequence
  Description of Artificial Sequence: Synthetic oligonucleotide
aaucguaugauguaugcag

SEQ ID NO: 2478382 - RNA, 19 nt, Artificial Sequence
  Description of Artificial Sequence: Synthetic oligonucleotide
auugccuaaagacaaauac

SEQ ID NO: 2478383 - RNA, 19 nt, Artificial Sequence
  Description of Artificial Sequence: Synthetic oligonucleotide
aaguauaaagguaauauuc

SEQ ID NO: 2478384 - RNA, 19 nt, Artificial Sequence
  Description of Artificial Sequence: Synthetic oligonucleotide
ucuacuaaguacaacauac

SEQ ID NO: 2478385 - RNA, 19 nt, Artificial Sequence
  Description of Artificial Sequence: Synthetic oligonucleotide
aaguacaacauacagaaau

SEQ ID NO: 2478386 - RNA, 19 nt, Artificial Sequence
  Description of Artificial Sequence: Synthetic oligonucleotide
uuuauaauuuuaaauggac

SEQ ID NO: 2478387 - RNA, 19 nt, Artificial Sequence
  Description of Artificial Sequence: Synthetic oligonucleotide
uccaguauuaucaccacgg

SEQ ID NO: 2478388 - RNA, 19 nt, Artificial Sequence
  Description of Artificial Sequence: Synthetic oligonucleotide
aaagguaauauucccuuuc

SEQ ID NO: 2478389 - RNA, 19 nt, Artificial Sequence
  Description of Artificial Sequence: Synthetic oligonucleotide
uaaucuacauucaaguggc

SEQ ID NO: 2478390 - RNA, 19 nt, Artificial Sequence
  Description of Artificial Sequence: Synthetic oligonucleotide
ucuaaguacugccugaaag

SEQ ID NO: 2478391 - RNA, 19 nt, Artificial Sequence
  Description of Artificial Sequence: Synthetic oligonucleotide
ugaaauucaaacaauuuau

SEQ ID NO: 2478392 - RNA, 19 nt, Artificial Sequence
  Description of Artificial Sequence: Synthetic oligonucleotide
ucuucuauuuucaucaaug

SEQ ID NO: 2478393 - RNA, 19 nt, Artificial Sequence
  Description of Artificial Sequence: Synthetic oligonucleotide
uacauaaagccaaauguag

SEQ ID NO: 2478394 - RNA, 19 nt, Artificial Sequence
  Description of Artificial Sequence: Synthetic oligonucleotide
gacaaauacugacaggugg

SEQ ID NO: 2478395 - RNA, 19 nt, Artificial Sequence
  Description of Artificial Sequence: Synthetic oligonucleotide
aaguaaauuagcugcaugu

SEQ ID NO: 2478396 - RNA, 19 nt, Artificial Sequence
  Description of Artificial Sequence: Synthetic oligonucleotide
uuuaaauggacucaauaaa

SEQ ID NO: 2478397 - RNA, 19 nt, Artificial Sequence
  Description of Artificial Sequence: Synthetic oligonucleotide
gacucaauaaaauucaaca

SEQ ID NO: 2478398 - RNA, 19 nt, Artificial Sequence
  Description of Artificial Sequence: Synthetic oligonucleotide
aguauaaagguaauauucc

SEQ ID NO: 2478399 - RNA, 19 nt, Artificial Sequence
  Description of Artificial Sequence: Synthetic oligonucleotide
aacauacagaaaucugggc

SEQ ID NO: 2478400 - RNA, 19 nt, Artificial Sequence
  Description of Artificial Sequence: Synthetic oligonucleotide
accuaaaggccacaaaugc

SEQ ID NO: 2478401 - RNA, 19 nt, Artificial Sequence
  Description of Artificial Sequence: Synthetic oligonucleotide
aucaaaaucucuaagagug

SEQ ID NO: 2478402 - RNA, 19 nt, Artificial Sequence
  Description of Artificial Sequence: Synthetic oligonucleotide
aagacaaauacugacaggu

SEQ ID NO: 2478403 - RNA, 19 nt, Artificial Sequence
  Description of Artificial Sequence: Synthetic oligonucleotide
ugccuaaagacaaauacug

SEQ ID NO: 2478404 - RNA, 19 nt, Artificial Sequence
  Description of Artificial Sequence: Synthetic oligonucleotide
uuugagaaacccaaagccc

SEQ ID NO: 2478405 - RNA, 19 nt, Artificial Sequence
  Description of Artificial Sequence: Synthetic oligonucleotide
uucaacaaaguaaauuagc

SEQ ID NO: 2478406 - RNA, 19 nt, Artificial Sequence
  Description of Artificial Sequence: Synthetic oligonucleotide
uuuuaaaacccuuucucgc

SEQ ID NO: 2478407 - RNA, 19 nt, Artificial Sequence
  Description of Artificial Sequence: Synthetic oligonucleotide
uuaaguauaaagguaauau

SEQ ID NO: 2478408 - RNA, 19 nt, Artificial Sequence
  Description of Artificial Sequence: Synthetic oligonucleotide
auuaucaccacgguguccc

SEQ ID NO: 2478409 - RNA, 19 nt, Artificial Sequence
  Description of Artificial Sequence: Synthetic oligonucleotide
cuaaaggccacaaaugccc

SEQ ID NO: 2478410 - RNA, 19 nt, Artificial Sequence
  Description of Artificial Sequence: Synthetic oligonucleotide
gauauaaucuacauucaag

SEQ ID NO: 2478411 - RNA, 19 nt, Artificial Sequence
  Description of Artificial Sequence: Synthetic oligonucleotide
ugcucuacuaaguacaaca

SEQ ID NO: 2478412 - RNA, 19 nt, Artificial Sequence
  Description of Artificial Sequence: Synthetic oligonucleotide
aaaugagagacacgcuacg

SEQ ID NO: 2478413 - RNA, 19 nt, Artificial Sequence
  Description of Artificial Sequence: Synthetic oligonucleotide
aaaguaaauuagcugcaug

SEQ ID NO: 2478414 - RNA, 19 nt, Artificial Sequence
  Description of Artificial Sequence: Synthetic oligonucleotide
acaacauacagaaaucugg

SEQ ID NO: 2478415 - RNA, 19 nt, Artificial Sequence
  Description of Artificial Sequence: Synthetic oligonucleotide
uauaaucuacauucaagug

SEQ ID NO: 2478416 - RNA, 19 nt, Artificial Sequence
  Description of Artificial Sequence: Synthetic oligonucleotide
aguauuaucaccacggugu

SEQ ID NO: 2478417 - RNA, 19 nt, Artificial Sequence
  Description of Artificial Sequence: Synthetic oligonucleotide
uaaauuagcugcaugugaa

SEQ ID NO: 2478418 - RNA, 19 nt, Artificial Sequence
  Description of Artificial Sequence: Synthetic oligonucleotide
acauacagaaaucugggca

SEQ ID NO: 2478419 - RNA, 19 nt, Artificial Sequence
  Description of Artificial Sequence: Synthetic oligonucleotide
uuuauuuaguuuacauucu

SEQ ID NO: 2478420 - RNA, 19 nt, Artificial Sequence
  Description of Artificial Sequence: Synthetic oligonucleotide
aagagugcuaacuagcuuu

SEQ ID NO: 2478421 - RNA, 19 nt, Artificial Sequence
  Description of Artificial Sequence: Synthetic oligonucleotide
acuauguccacucugggga

SEQ ID NO: 2478422 - RNA, 19 nt, Artificial Sequence
  Description of Artificial Sequence: Synthetic oligonucleotide
cauaugaugcgaaauguug

SEQ ID NO: 2478423 - RNA, 19 nt, Artificial Sequence
  Description of Artificial Sequence: Synthetic oligonucleotide
gaaagaucuuucuaaguac

SEQ ID NO: 2478424 - RNA, 19 nt, Artificial Sequence
  Description of Artificial Sequence: Synthetic oligonucleotide
guaaugaaaauacauaugu

SEQ ID NO: 2478425 - RNA, 19 nt, Artificial Sequence
  Description of Artificial Sequence: Synthetic oligonucleotide
gaucugugguuuuaaaacc

SEQ ID NO: 2478426 - RNA, 19 nt, Artificial Sequence
  Description of Artificial Sequence: Synthetic oligonucleotide
aaauacugacaggugggcc

SEQ ID NO: 2478427 - RNA, 19 nt, Artificial Sequence
  Description of Artificial Sequence: Synthetic oligonucleotide
ucuggcuugaaucguauga

SEQ ID NO: 2478428 - RNA, 19 nt, Artificial Sequence
  Description of Artificial Sequence: Synthetic oligonucleotide
acuagcuuuugagaaaccc

SEQ ID NO: 2478429 - RNA, 19 nt, Artificial Sequence
  Description of Artificial Sequence: Synthetic oligonucleotide
cuuuugagaaacccaaagc

SEQ ID NO: 2478430 - RNA, 19 nt, Artificial Sequence
  Description of Artificial Sequence: Synthetic oligonucleotide
agcaaucuuguauucuggc

SEQ ID NO: 2478431 - RNA, 19 nt, Artificial Sequence
  Description of Artificial Sequence: Synthetic oligonucleotide
uugagaaacccaaagcccu

SEQ ID NO: 2478432 - RNA, 19 nt, Artificial Sequence
  Description of Artificial Sequence: Synthetic oligonucleotide
guauaaagguaauauuccc

SEQ ID NO: 2478433 - RNA, 19 nt, Artificial Sequence
  Description of Artificial Sequence: Synthetic oligonucleotide
uguacagaugggaucagca

SEQ ID NO: 2478434 - RNA, 19 nt, Artificial Sequence
  Description of Artificial Sequence: Synthetic oligonucleotide
gauauucaaaucuuccaca

SEQ ID NO: 2478435 - RNA, 19 nt, Artificial Sequence
  Description of Artificial Sequence: Synthetic oligonucleotide
ugauguaugcagcuauaag

SEQ ID NO: 2478436 - RNA, 19 nt, Artificial Sequence
  Description of Artificial Sequence: Synthetic oligonucleotide
acauaaagccaaauguagc

SEQ ID NO: 2478437 - RNA, 19 nt, Artificial Sequence
  Description of Artificial Sequence: Synthetic oligonucleotide
uguugugaaagccaccagu

SEQ ID NO: 2478438 - RNA, 19 nt, Artificial Sequence
  Description of Artificial Sequence: Synthetic oligonucleotide
aggaucaaaaucucuaaga

SEQ ID NO: 2478439 - RNA, 19 nt, Artificial Sequence
  Description of Artificial Sequence: Synthetic oligonucleotide
cauucaaguggcuugguac

SEQ ID NO: 2478440 - RNA, 19 nt, Artificial Sequence
  Description of Artificial Sequence: Synthetic oligonucleotide
uccuagacaccuaaaggcc

SEQ ID NO: 2478441 - RNA, 19 nt, Artificial Sequence
  Description of Artificial Sequence: Synthetic oligonucleotide
ugaaucguaugauguaugc

SEQ ID NO: 2478442 - RNA, 19 nt, Artificial Sequence
  Description of Artificial Sequence: Synthetic oligonucleotide
uaugaugcgaaauguugug

SEQ ID NO: 2478443 - RNA, 19 nt, Artificial Sequence
  Description of Artificial Sequence: Synthetic oligonucleotide
ugauauaaucuacauucaa

SEQ ID NO: 2478444 - RNA, 19 nt, Artificial Sequence
  Description of Artificial Sequence: Synthetic oligonucleotide
auauuaaguauaaagguaa

SEQ ID NO: 2478445 - RNA, 19 nt, Artificial Sequence
  Description of Artificial Sequence: Synthetic oligonucleotide
acucauaugcuuaucauug

SEQ ID NO: 2478446 - RNA, 19 nt, Artificial Sequence
  Description of Artificial Sequence: Synthetic oligonucleotide
uugccuaaagacaaauacu

SEQ ID NO: 2478447 - RNA, 19 nt, Artificial Sequence
  Description of Artificial Sequence: Synthetic oligonucleotide
aaagccaccaguaaugaaa

SEQ ID NO: 2478448 - RNA, 19 nt, Artificial Sequence
  Description of Artificial Sequence: Synthetic oligonucleotide
ugggcugaagacaaaauau

SEQ ID NO: 2478449 - RNA, 19 nt, Artificial Sequence
  Description of Artificial Sequence: Synthetic oligonucleotide
ggaaggauugccuaaagac

SEQ ID NO: 2478450 - RNA, 19 nt, Artificial Sequence
  Description of Artificial Sequence: Synthetic oligonucleotide
uucaaugcccaccacuuac

SEQ ID NO: 2478451 - RNA, 19 nt, Artificial Sequence
  Description of Artificial Sequence: Synthetic oligonucleotide
ugugaaagccaccaguaau

SEQ ID NO: 2478452 - RNA, 19 nt, Artificial Sequence
  Description of Artificial Sequence: Synthetic oligonucleotide
ucccauaugaugcgaaaug

SEQ ID NO: 2478453 - RNA, 19 nt, Artificial Sequence
  Description of Artificial Sequence: Synthetic oligonucleotide
caacaaaguaaauuagcug

SEQ ID NO: 2478454 - RNA, 19 nt, Artificial Sequence
  Description of Artificial Sequence: Synthetic oligonucleotide
ucuauuucugucucauaug

SEQ ID NO: 2478455 - RNA, 19 nt, Artificial Sequence
  Description of Artificial Sequence: Synthetic oligonucleotide
aaucucuaagagugcuaac

SEQ ID NO: 2478456 - RNA, 19 nt, Artificial Sequence
  Description of Artificial Sequence: Synthetic oligonucleotide
acucaauaaaauucaacaa

SEQ ID NO: 2478457 - RNA, 19 nt, Artificial Sequence
  Description of Artificial Sequence: Synthetic oligonucleotide
uugauauaaucuacauuca

SEQ ID NO: 2478458 - RNA, 19 nt, Artificial Sequence
  Description of Artificial Sequence: Synthetic oligonucleotide
gacuauguccacucugggg

SEQ ID NO: 2478459 - RNA, 19 nt, Artificial Sequence
  Description of Artificial Sequence: Synthetic oligonucleotide
aaagaucuuucuaaguacu

SEQ ID NO: 2478460 - RNA, 19 nt, Artificial Sequence
  Description of Artificial Sequence: Synthetic oligonucleotide
aauuagcugcaugugaacu

SEQ ID NO: 2478461 - RNA, 19 nt, Artificial Sequence
  Description of Artificial Sequence: Synthetic oligonucleotide
aaaucuuccacagaauaua

SEQ ID NO: 2478462 - RNA, 19 nt, Artificial Sequence
  Description of Artificial Sequence: Synthetic oligonucleotide
ugaacuauggcaguggauu

SEQ ID NO: 2478463 - RNA, 19 nt, Artificial Sequence
  Description of Artificial Sequence: Synthetic oligonucleotide
aaauguagcugaaggaugu

SEQ ID NO: 2478464 - RNA, 19 nt, Artificial Sequence
  Description of Artificial Sequence: Synthetic oligonucleotide
uuccaguauuaucaccacg

SEQ ID NO: 2478465 - RNA, 19 nt, Artificial Sequence
  Description of Artificial Sequence: Synthetic oligonucleotide
auauguacagaugggauca

SEQ ID NO: 2478466 - RNA, 19 nt, Artificial Sequence
  Description of Artificial Sequence: Synthetic oligonucleotide
aucugugguuuuaaaaccc

SEQ ID NO: 2478467 - RNA, 19 nt, Artificial Sequence
  Description of Artificial Sequence: Synthetic oligonucleotide
auucccuuucuuccuagac

SEQ ID NO: 2478468 - RNA, 19 nt, Artificial Sequence
  Description of Artificial Sequence: Synthetic oligonucleotide
acaccuaaaggccacaaau

SEQ ID NO: 2478469 - RNA, 19 nt, Artificial Sequence
  Description of Artificial Sequence: Synthetic oligonucleotide
acaaauacugacagguggg

SEQ ID NO: 2478470 - RNA, 19 nt, Artificial Sequence
  Description of Artificial Sequence: Synthetic oligonucleotide
cauaugcucuacuaaguac

SEQ ID NO: 2478471 - RNA, 19 nt, Artificial Sequence
  Description of Artificial Sequence: Synthetic oligonucleotide
aaaucucuaagagugcuaa

SEQ ID NO: 2478472 - RNA, 19 nt, Artificial Sequence
  Description of Artificial Sequence: Synthetic oligonucleotide
uagcuuuugagaaacccaa

SEQ ID NO: 2478473 - RNA, 19 nt, Artificial Sequence
  Description of Artificial Sequence: Synthetic oligonucleotide
acggugucccauaugaugc

SEQ ID NO: 2478474 - RNA, 19 nt, Artificial Sequence
  Description of Artificial Sequence: Synthetic oligonucleotide
uugaaucguaugauguaug

SEQ ID NO: 2478475 - RNA, 19 nt, Artificial Sequence
  Description of Artificial Sequence: Synthetic oligonucleotide
uuaaaacccuuucucgccu

SEQ ID NO: 2478476 - RNA, 19 nt, Artificial Sequence
  Description of Artificial Sequence: Synthetic oligonucleotide
uucaucaaugauucuuuga

SEQ ID NO: 2478477 - RNA, 19 nt, Artificial Sequence
  Description of Artificial Sequence: Synthetic oligonucleotide
cauauguacagaugggauc

SEQ ID NO: 2478478 - RNA, 19 nt, Artificial Sequence
  Description of Artificial Sequence: Synthetic oligonucleotide
uacauauguacagauggga

SEQ ID NO: 2478479 - RNA, 19 nt, Artificial Sequence
  Description of Artificial Sequence: Synthetic oligonucleotide
uuauuuaguuuacauucua

SEQ ID NO: 2478480 - RNA, 19 nt, Artificial Sequence
  Description of Artificial Sequence: Synthetic oligonucleotide
aguaaugaaaauacauaug

SEQ ID NO: 2478481 - RNA, 19 nt, Artificial Sequence
  Description of Artificial Sequence: Synthetic oligonucleotide
ugcgaaauguugugaaagc

SEQ ID NO: 2478482 - RNA, 19 nt, Artificial Sequence
  Description of Artificial Sequence: Synthetic oligonucleotide
ugcaggaucaaaaucucua

SEQ ID NO: 2478483 - RNA, 19 nt, Artificial Sequence
  Description of Artificial Sequence: Synthetic oligonucleotide
aucauuguuuuauuuaguu

SEQ ID NO: 2478484 - RNA, 19 nt, Artificial Sequence
  Description of Artificial Sequence: Synthetic oligonucleotide
aaggauugccuaaagacaa

SEQ ID NO: 2478485 - RNA, 19 nt, Artificial Sequence
  Description of Artificial Sequence: Synthetic oligonucleotide
guaaauuagcugcauguga

SEQ ID NO: 2478486 - RNA, 19 nt, Artificial Sequence
  Description of Artificial Sequence: Synthetic oligonucleotide
uacagaugggaucagcaau

SEQ ID NO: 2478487 - RNA, 19 nt, Artificial Sequence
  Description of Artificial Sequence: Synthetic oligonucleotide
gguaauauucccuuucuuc

SEQ ID NO: 2478488 - RNA, 19 nt, Artificial Sequence
  Description of Artificial Sequence: Synthetic oligonucleotide
acaccuuccaguauuauca

SEQ ID NO: 2478489 - RNA, 19 nt, Artificial Sequence
  Description of Artificial Sequence: Synthetic oligonucleotide
acugccugaaaguucucuc

SEQ ID NO: 2478490 - RNA, 19 nt, Artificial Sequence
  Description of Artificial Sequence: Synthetic oligonucleotide
uauuaaguauaaagguaau

SEQ ID NO: 2478491 - RNA, 19 nt, Artificial Sequence
  Description of Artificial Sequence: Synthetic oligonucleotide
cucuaagagugcuaacuag

SEQ ID NO: 2478492 - RNA, 19 nt, Artificial Sequence
  Description of Artificial Sequence: Synthetic oligonucleotide
auucaacaaaguaaauuag

SEQ ID NO: 2478493 - RNA, 19 nt, Artificial Sequence
  Description of Artificial Sequence: Synthetic oligonucleotide
auucaaguggcuugguaca

SEQ ID NO: 2478494 - RNA, 19 nt, Artificial Sequence
  Description of Artificial Sequence: Synthetic oligonucleotide
agugcuaacuagcuuuuga

SEQ ID NO: 2478495 - RNA, 19 nt, Artificial Sequence
  Description of Artificial Sequence: Synthetic oligonucleotide
auaugcucuacuaaguaca

SEQ ID NO: 2478496 - RNA, 19 nt, Artificial Sequence
  Description of Artificial Sequence: Synthetic oligonucleotide
uaacuagcuuuugagaaac

SEQ ID NO: 2478497 - RNA, 19 nt, Artificial Sequence
  Description of Artificial Sequence: Synthetic oligonucleotide
auaugcuuaucauuguuuu

SEQ ID NO: 2478498 - RNA, 19 nt, Artificial Sequence
  Description of Artificial Sequence: Synthetic oligonucleotide
ccuaaagacaaauacugac

SEQ ID NO: 2478499 - RNA, 19 nt, Artificial Sequence
  Description of Artificial Sequence: Synthetic oligonucleotide
uucucgccuggaaagaucu

SEQ ID NO: 2478500 - RNA, 19 nt, Artificial Sequence
  Description of Artificial Sequence: Synthetic oligonucleotide
aucguaugauguaugcagc

SEQ ID NO: 2478501 - RNA, 19 nt, Artificial Sequence
  Description of Artificial Sequence: Synthetic oligonucleotide
acuaaguacaacauacaga

SEQ ID NO: 2478502 - RNA, 19 nt, Artificial Sequence
  Description of Artificial Sequence: Synthetic oligonucleotide
cuuacucauaugcuuauca

SEQ ID NO: 2478503 - RNA, 19 nt, Artificial Sequence
  Description of Artificial Sequence: Synthetic oligonucleotide
gaaggauugccuaaagaca

SEQ ID NO: 2478504 - RNA, 19 nt, Artificial Sequence
  Description of Artificial Sequence: Synthetic oligonucleotide
ugacuauguccacucuggg

SEQ ID NO: 2478505 - RNA, 19 nt, Artificial Sequence
  Description of Artificial Sequence: Synthetic oligonucleotide
agagaccagauauucaaau

SEQ ID NO: 2478506 - RNA, 19 nt, Artificial Sequence
  Description of Artificial Sequence: Synthetic oligonucleotide
augcgaaauguugugaaag

SEQ ID NO: 2478507 - RNA, 19 nt, Artificial Sequence
  Description of Artificial Sequence: Synthetic oligonucleotide
ugaugcgaaauguugugaa

SEQ ID NO: 2478508 - RNA, 19 nt, Artificial Sequence
  Description of Artificial Sequence: Synthetic oligonucleotide
ugugguuuuaaaacccuuu

SEQ ID NO: 2478509 - RNA, 19 nt, Artificial Sequence
  Description of Artificial Sequence: Synthetic oligonucleotide
accuuccaguauuaucacc

SEQ ID NO: 2478510 - RNA, 19 nt, Artificial Sequence
  Description of Artificial Sequence: Synthetic oligonucleotide
ucucuaagagugcuaacua

SEQ ID NO: 2478511 - RNA, 19 nt, Artificial Sequence
  Description of Artificial Sequence: Synthetic oligonucleotide
aucucuaagagugcuaacu

SEQ ID NO: 2478512 - RNA, 19 nt, Artificial Sequence
  Description of Artificial Sequence: Synthetic oligonucleotide
ucauuguuuuauuuaguuu

SEQ ID NO: 2478513 - RNA, 19 nt, Artificial Sequence
  Description of Artificial Sequence: Synthetic oligonucleotide
cuucacaguggcuacucag

SEQ ID NO: 2478514 - RNA, 19 nt, Artificial Sequence
  Description of Artificial Sequence: Synthetic oligonucleotide
cuugacuauguccacucug

SEQ ID NO: 2478515 - RNA, 19 nt, Artificial Sequence
  Description of Artificial Sequence: Synthetic oligonucleotide
auacauauguacagauggg

SEQ ID NO: 2478516 - RNA, 19 nt, Artificial Sequence
  Description of Artificial Sequence: Synthetic oligonucleotide
uuacucauaugcuuaucau

SEQ ID NO: 2478517 - RNA, 19 nt, Artificial Sequence
  Description of Artificial Sequence: Synthetic oligonucleotide
acagaugggaucagcaauc

SEQ ID NO: 2478518 - RNA, 19 nt, Artificial Sequence
  Description of Artificial Sequence: Synthetic oligonucleotide
aaguacugccugaaaguuc

SEQ ID NO: 2478519 - RNA, 19 nt, Artificial Sequence
  Description of Artificial Sequence: Synthetic oligonucleotide
ugagagacacgcuacgcau

SEQ ID NO: 2478520 - RNA, 19 nt, Artificial Sequence
  Description of Artificial Sequence: Synthetic oligonucleotide
ugaagugagagaccagaua

SEQ ID NO: 2478521 - RNA, 19 nt, Artificial Sequence
  Description of Artificial Sequence: Synthetic oligonucleotide
gagaccagauauucaaauc

SEQ ID NO: 2478522 - RNA, 19 nt, Artificial Sequence
  Description of Artificial Sequence: Synthetic oligonucleotide
gaucaaaaucucuaagagu

SEQ ID NO: 2478523 - RNA, 19 nt, Artificial Sequence
  Description of Artificial Sequence: Synthetic oligonucleotide
ccagauauucaaaucuucc

SEQ ID NO: 2478524 - RNA, 19 nt, Artificial Sequence
  Description of Artificial Sequence: Synthetic oligonucleotide
auaaagccaaauguagcug

SEQ ID NO: 2478525 - RNA, 19 nt, Artificial Sequence
  Description of Artificial Sequence: Synthetic oligonucleotide
uacucauaugcuuaucauu

SEQ ID NO: 2478526 - RNA, 19 nt, Artificial Sequence
  Description of Artificial Sequence: Synthetic oligonucleotide
ugccugaaaguucucucug

SEQ ID NO: 2478527 - RNA, 19 nt, Artificial Sequence
  Description of Artificial Sequence: Synthetic oligonucleotide
augagagacacgcuacgca

SEQ ID NO: 2478528 - RNA, 19 nt, Artificial Sequence
  Description of Artificial Sequence: Synthetic oligonucleotide
caccuaaaggccacaaaug

SEQ ID NO: 2478529 - RNA, 19 nt, Artificial Sequence
  Description of Artificial Sequence: Synthetic oligonucleotide
ucguaugauguaugcagcu

SEQ ID NO: 2478530 - RNA, 19 nt, Artificial Sequence
  Description of Artificial Sequence: Synthetic oligonucleotide
auaugaugcgaaauguugu

SEQ ID NO: 2478531 - RNA, 19 nt, Artificial Sequence
  Description of Artificial Sequence: Synthetic oligonucleotide
cuacauucaaguggcuugg

SEQ ID NO: 2478532 - RNA, 19 nt, Artificial Sequence
  Description of Artificial Sequence: Synthetic oligonucleotide
cauaaagccaaauguagcu

SEQ ID NO: 2478533 - RNA, 19 nt, Artificial Sequence
  Description of Artificial Sequence: Synthetic oligonucleotide
cacggugucccauaugaug

SEQ ID NO: 2478534 - RNA, 19 nt, Artificial Sequence
  Description of Artificial Sequence: Synthetic oligonucleotide
agagacacgcuacgcaucu

SEQ ID NO: 2478535 - RNA, 19 nt, Artificial Sequence
  Description of Artificial Sequence: Synthetic oligonucleotide
accacuuacucauaugcuu

SEQ ID NO: 2478536 - RNA, 19 nt, Artificial Sequence
  Description of Artificial Sequence: Synthetic oligonucleotide
augcuuaucauuguuuuau

SEQ ID NO: 2478537 - RNA, 19 nt, Artificial Sequence
  Description of Artificial Sequence: Synthetic oligonucleotide
ugucucauaugcucuacua

SEQ ID NO: 2478538 - RNA, 19 nt, Artificial Sequence
  Description of Artificial Sequence: Synthetic oligonucleotide
ggaaagaucuuucuaagua

SEQ ID NO: 2478539 - RNA, 19 nt, Artificial Sequence
  Description of Artificial Sequence: Synthetic oligonucleotide
ucaaugcccaccacuuacu

SEQ ID NO: 2478540 - RNA, 19 nt, Artificial Sequence
  Description of Artificial Sequence: Synthetic oligonucleotide
acacgcuacgcaucuaucu

SEQ ID NO: 2478541 - RNA, 19 nt, Artificial Sequence
  Description of Artificial Sequence: Synthetic oligonucleotide
caguauuaucaccacggug

SEQ ID NO: 2478542 - RNA, 19 nt, Artificial Sequence
  Description of Artificial Sequence: Synthetic oligonucleotide
ugguacaccuuccaguauu

SEQ ID NO: 2478543 - RNA, 19 nt, Artificial Sequence
  Description of Artificial Sequence: Synthetic oligonucleotide
caguaaugaaaauacauau

SEQ ID NO: 2478544 - RNA, 19 nt, Artificial Sequence
  Description of Artificial Sequence: Synthetic oligonucleotide
uauucuggcuugaaucgua

SEQ ID NO: 2478545 - RNA, 19 nt, Artificial Sequence
  Description of Artificial Sequence: Synthetic oligonucleotide
cuagacaccuaaaggccac

SEQ ID NO: 2478546 - RNA, 19 nt, Artificial Sequence
  Description of Artificial Sequence: Synthetic oligonucleotide
uaugauguaugcagcuaua

SEQ ID NO: 2478547 - RNA, 19 nt, Artificial Sequence
  Description of Artificial Sequence: Synthetic oligonucleotide
auuagcugcaugugaacua

SEQ ID NO: 2478548 - RNA, 19 nt, Artificial Sequence
  Description of Artificial Sequence: Synthetic oligonucleotide
gcuaacuagcuuuugagaa

SEQ ID NO: 2478549 - RNA, 19 nt, Artificial Sequence
  Description of Artificial Sequence: Synthetic oligonucleotide
agcugcaugugaacuaugg

SEQ ID NO: 2478550 - RNA, 19 nt, Artificial Sequence
  Description of Artificial Sequence: Synthetic oligonucleotide
acucuggggaaggauugcc

SEQ ID NO: 2478551 - RNA, 19 nt, Artificial Sequence
  Description of Artificial Sequence: Synthetic oligonucleotide
auacagaaaucugggcagg

SEQ ID NO: 2478552 - RNA, 19 nt, Artificial Sequence
  Description of Artificial Sequence: Synthetic oligonucleotide
auuaaguauaaagguaaua

SEQ ID NO: 2478553 - RNA, 19 nt, Artificial Sequence
  Description of Artificial Sequence: Synthetic oligonucleotide
auguacagaugggaucagc

SEQ ID NO: 2478554 - RNA, 19 nt, Artificial Sequence
  Description of Artificial Sequence: Synthetic oligonucleotide
aggccacaaaugcccaggc

SEQ ID NO: 2478555 - RNA, 19 nt, Artificial Sequence
  Description of Artificial Sequence: Synthetic oligonucleotide
uggacucaauaaaauucaa

SEQ ID NO: 2478556 - RNA, 19 nt, Artificial Sequence
  Description of Artificial Sequence: Synthetic oligonucleotide
uaugcuuaucauuguuuua

SEQ ID NO: 2478557 - RNA, 19 nt, Artificial Sequence
  Description of Artificial Sequence: Synthetic oligonucleotide
caaauacugacaggugggc

SEQ ID NO: 2478558 - RNA, 19 nt, Artificial Sequence
  Description of Artificial Sequence: Synthetic oligonucleotide
ccaccacuuacucauaugc

SEQ ID NO: 2478559 - RNA, 19 nt, Artificial Sequence
  Description of Artificial Sequence: Synthetic oligonucleotide
uaagagugcuaacuagcuu

SEQ ID NO: 2478560 - RNA, 19 nt, Artificial Sequence
  Description of Artificial Sequence: Synthetic oligonucleotide
uaaguacugccugaaaguu

SEQ ID NO: 2478561 - RNA, 19 nt, Artificial Sequence
  Description of Artificial Sequence: Synthetic oligonucleotide
cuacgcaucuaucugaucu

SEQ ID NO: 2478562 - RNA, 19 nt, Artificial Sequence
  Description of Artificial Sequence: Synthetic oligonucleotide
ucuaucugaucuugacuau

SEQ ID NO: 2478563 - RNA, 19 nt, Artificial Sequence
  Description of Artificial Sequence: Synthetic oligonucleotide
aauguagcugaaggaugug

SEQ ID NO: 2478564 - RNA, 19 nt, Artificial Sequence
  Description of Artificial Sequence: Synthetic oligonucleotide
uggcuacucagucuauuuc

SEQ ID NO: 2478565 - RNA, 19 nt, Artificial Sequence
  Description of Artificial Sequence: Synthetic oligonucleotide
cuaaguacugccugaaagu

SEQ ID NO: 2478566 - RNA, 19 nt, Artificial Sequence
  Description of Artificial Sequence: Synthetic oligonucleotide
gucuauuucugucucauau

SEQ ID NO: 2478567 - RNA, 19 nt, Artificial Sequence
  Description of Artificial Sequence: Synthetic oligonucleotide
ccuaaaggccacaaaugcc

SEQ ID NO: 2478568 - RNA, 19 nt, Artificial Sequence
  Description of Artificial Sequence: Synthetic oligonucleotide
uaaguacaacauacagaaa

SEQ ID NO: 2478569 - RNA, 19 nt, Artificial Sequence
  Description of Artificial Sequence: Synthetic oligonucleotide
cuugguacaccuuccagua

SEQ ID NO: 2478570 - RNA, 19 nt, Artificial Sequence
  Description of Artificial Sequence: Synthetic oligonucleotide
cuacuaaguacaacauaca

SEQ ID NO: 2478571 - RNA, 19 nt, Artificial Sequence
  Description of Artificial Sequence: Synthetic oligonucleotide
ucuggggaaggauugccua

SEQ ID NO: 2478572 - RNA, 19 nt, Artificial Sequence
  Description of Artificial Sequence: Synthetic oligonucleotide
uuucuaaguacugccugaa

SEQ ID NO: 2478573 - RNA, 19 nt, Artificial Sequence
  Description of Artificial Sequence: Synthetic oligonucleotide
cacgcuacgcaucuaucug

SEQ ID NO: 2478574 - RNA, 19 nt, Artificial Sequence
  Description of Artificial Sequence: Synthetic oligonucleotide
cucagucuauuucugucuc

SEQ ID NO: 2478575 - RNA, 19 nt, Artificial Sequence
  Description of Artificial Sequence: Synthetic oligonucleotide
cuaacuagcuuuugagaaa

SEQ ID NO: 2478576 - RNA, 19 nt, Artificial Sequence
  Description of Artificial Sequence: Synthetic oligonucleotide
gaugcgaaauguugugaaa

SEQ ID NO: 2478577 - RNA, 19 nt, Artificial Sequence
  Description of Artificial Sequence: Synthetic oligonucleotide
ucuugacuauguccacucu

SEQ ID NO: 2478578 - RNA, 19 nt, Artificial Sequence
  Description of Artificial Sequence: Synthetic oligonucleotide
auacugacaggugggccac

SEQ ID NO: 2478579 - RNA, 19 nt, Artificial Sequence
  Description of Artificial Sequence: Synthetic oligonucleotide
uauuaucaccacggugucc

SEQ ID NO: 2478580 - RNA, 19 nt, Artificial Sequence
  Description of Artificial Sequence: Synthetic oligonucleotide
gaaucguaugauguaugca

SEQ ID NO: 2478581 - RNA, 19 nt, Artificial Sequence
  Description of Artificial Sequence: Synthetic oligonucleotide
acauauguacagaugggau

SEQ ID NO: 2478582 - RNA, 19 nt, Artificial Sequence
  Description of Artificial Sequence: Synthetic oligonucleotide
cuaucugaucuugacuaug

SEQ ID NO: 2478583 - RNA, 19 nt, Artificial Sequence
  Description of Artificial Sequence: Synthetic oligonucleotide
caugugaacuauggcagug

SEQ ID NO: 2478584 - RNA, 19 nt, Artificial Sequence
  Description of Artificial Sequence: Synthetic oligonucleotide
agcccuucacaguggcuac

SEQ ID NO: 2478585 - RNA, 19 nt, Artificial Sequence
  Description of Artificial Sequence: Synthetic oligonucleotide
gaugaucugugguuuuaaa

SEQ ID NO: 2478586 - RNA, 19 nt, Artificial Sequence
  Description of Artificial Sequence: Synthetic oligonucleotide
acuuacucauaugcuuauc

SEQ ID NO: 2478587 - RNA, 19 nt, Artificial Sequence
  Description of Artificial Sequence: Synthetic oligonucleotide
agacacgcuacgcaucuau

SEQ ID NO: 2478588 - RNA, 19 nt, Artificial Sequence
  Description of Artificial Sequence: Synthetic oligonucleotide
cagaaaucugggcagggga

SEQ ID NO: 2478589 - RNA, 19 nt, Artificial Sequence
  Description of Artificial Sequence: Synthetic oligonucleotide
ucaaguggcuugguacacc

SEQ ID NO: 2478590 - RNA, 19 nt, Artificial Sequence
  Description of Artificial Sequence: Synthetic oligonucleotide
ucgccuggaaagaucuuuc

SEQ ID NO: 2478591 - RNA, 19 nt, Artificial Sequence
  Description of Artificial Sequence: Synthetic oligonucleotide
uauucccuuucuuccuaga

SEQ ID NO: 2478592 - RNA, 19 nt, Artificial Sequence
  Description of Artificial Sequence: Synthetic oligonucleotide
ugucccauaugaugcgaaa

SEQ ID NO: 2478593 - RNA, 19 nt, Artificial Sequence
  Description of Artificial Sequence: Synthetic oligonucleotide
guauuaucaccacgguguc

SEQ ID NO: 2478594 - RNA, 19 nt, Artificial Sequence
  Description of Artificial Sequence: Synthetic oligonucleotide
ugagaaacccaaagcccuu

SEQ ID NO: 2478595 - RNA, 19 nt, Artificial Sequence
  Description of Artificial Sequence: Synthetic oligonucleotide
aucagcaaucuuguauucu

SEQ ID NO: 2478596 - RNA, 19 nt, Artificial Sequence
  Description of Artificial Sequence: Synthetic oligonucleotide
acgcuacgcaucuaucuga

SEQ ID NO: 2478597 - RNA, 19 nt, Artificial Sequence
  Description of Artificial Sequence: Synthetic oligonucleotide
cuaagagugcuaacuagcu

SEQ ID NO: 2478598 - RNA, 19 nt, Artificial Sequence
  Description of Artificial Sequence: Synthetic oligonucleotide
uauguacagaugggaucag

SEQ ID NO: 2478599 - RNA, 19 nt, Artificial Sequence
  Description of Artificial Sequence: Synthetic oligonucleotide
cuauggcaguggauuuucc

SEQ ID NO: 2478600 - RNA, 19 nt, Artificial Sequence
  Description of Artificial Sequence: Synthetic oligonucleotide
guugugaaagccaccagua

SEQ ID NO: 2478601 - RNA, 19 nt, Artificial Sequence
  Description of Artificial Sequence: Synthetic oligonucleotide
augggaucagcaaucuugu

SEQ ID NO: 2478602 - RNA, 19 nt, Artificial Sequence
  Description of Artificial Sequence: Synthetic oligonucleotide
ugcuuaucauuguuuuauu

SEQ ID NO: 2478603 - RNA, 19 nt, Artificial Sequence
  Description of Artificial Sequence: Synthetic oligonucleotide
augaugcgaaauguuguga

SEQ ID NO: 2478604 - RNA, 19 nt, Artificial Sequence
  Description of Artificial Sequence: Synthetic oligonucleotide
uucaaguggcuugguacac

SEQ ID NO: 2478605 - RNA, 19 nt, Artificial Sequence
  Description of Artificial Sequence: Synthetic oligonucleotide
guaugauguaugcagcuau

SEQ ID NO: 2478606 - RNA, 19 nt, Artificial Sequence
  Description of Artificial Sequence: Synthetic oligonucleotide
augcucuacuaaguacaac

SEQ ID NO: 2478607 - RNA, 19 nt, Artificial Sequence
  Description of Artificial Sequence: Synthetic oligonucleotide
uggcuugguacaccuucca

SEQ ID NO: 2478608 - RNA, 19 nt, Artificial Sequence
  Description of Artificial Sequence: Synthetic oligonucleotide
acauucaaguggcuuggua

SEQ ID NO: 2478609 - RNA, 19 nt, Artificial Sequence
  Description of Artificial Sequence: Synthetic oligonucleotide
guacagaugggaucagcaa

SEQ ID NO: 2478610 - RNA, 19 nt, Artificial Sequence
  Description of Artificial Sequence: Synthetic oligonucleotide
augauguaugcagcuauaa

SEQ ID NO: 2478611 - RNA, 19 nt, Artificial Sequence
  Description of Artificial Sequence: Synthetic oligonucleotide
guacaacauacagaaaucu

SEQ ID NO: 2478612 - RNA, 19 nt, Artificial Sequence
  Description of Artificial Sequence: Synthetic oligonucleotide
ucugucucauaugcucuac

SEQ ID NO: 2478613 - RNA, 19 nt, Artificial Sequence
  Description of Artificial Sequence: Synthetic oligonucleotide
gcgaaauguugugaaagcc

SEQ ID NO: 2478614 - RNA, 19 nt, Artificial Sequence
  Description of Artificial Sequence: Synthetic oligonucleotide
caaaucuuccacagaauau

SEQ ID NO: 2478615 - RNA, 19 nt, Artificial Sequence
  Description of Artificial Sequence: Synthetic oligonucleotide
gaaagccaccaguaaugaa

SEQ ID NO: 2478616 - RNA, 19 nt, Artificial Sequence
  Description of Artificial Sequence: Synthetic oligonucleotide
caccuuccaguauuaucac

SEQ ID NO: 2478617 - RNA, 19 nt, Artificial Sequence
  Description of Artificial Sequence: Synthetic oligonucleotide
agaaaucugggcaggggau

SEQ ID NO: 2478618 - RNA, 19 nt, Artificial Sequence
  Description of Artificial Sequence: Synthetic oligonucleotide
cugggcugaagacaaaaua

SEQ ID NO: 2478619 - RNA, 19 nt, Artificial Sequence
  Description of Artificial Sequence: Synthetic oligonucleotide
caaugcccaccacuuacuc

SEQ ID NO: 2478620 - RNA, 19 nt, Artificial Sequence
  Description of Artificial Sequence: Synthetic oligonucleotide
gcugaagacaaaauauuaa

SEQ ID NO: 2478621 - RNA, 19 nt, Artificial Sequence
  Description of Artificial Sequence: Synthetic oligonucleotide
gugcugcaggaucaaaauc

SEQ ID NO: 2478622 - RNA, 19 nt, Artificial Sequence
  Description of Artificial Sequence: Synthetic oligonucleotide
caccaguaaugaaaauaca

SEQ ID NO: 2478623 - RNA, 19 nt, Artificial Sequence
  Description of Artificial Sequence: Synthetic oligonucleotide
uagcugcaugugaacuaug

SEQ ID NO: 2478624 - RNA, 19 nt, Artificial Sequence
  Description of Artificial Sequence: Synthetic oligonucleotide
aagugagagaccagauauu

SEQ ID NO: 2478625 - RNA, 19 nt, Artificial Sequence
  Description of Artificial Sequence: Synthetic oligonucleotide
gauugccuaaagacaaaua

SEQ ID NO: 2478626 - RNA, 19 nt, Artificial Sequence
  Description of Artificial Sequence: Synthetic oligonucleotide
cauaugcuuaucauuguuu

SEQ ID NO: 2478627 - RNA, 19 nt, Artificial Sequence
  Description of Artificial Sequence: Synthetic oligonucleotide
uugguacaccuuccaguau

SEQ ID NO: 2478628 - RNA, 19 nt, Artificial Sequence
  Description of Artificial Sequence: Synthetic oligonucleotide
cucuacuaaguacaacaua

SEQ ID NO: 2478629 - RNA, 19 nt, Artificial Sequence
  Description of Artificial Sequence: Synthetic oligonucleotide
acgcaucuaucugaucuug

SEQ ID NO: 2478630 - RNA, 19 nt, Artificial Sequence
  Description of Artificial Sequence: Synthetic oligonucleotide
gagaaacccaaagcccuuc

SEQ ID NO: 2478631 - RNA, 19 nt, Artificial Sequence
  Description of Artificial Sequence: Synthetic oligonucleotide
aaacccuuucucgccugga

SEQ ID NO: 2478632 - RNA, 19 nt, Artificial Sequence
  Description of Artificial Sequence: Synthetic oligonucleotide
aaucuacauucaaguggcu

SEQ ID NO: 2478633 - RNA, 19 nt, Artificial Sequence
  Description of Artificial Sequence: Synthetic oligonucleotide
uggggaaggauugccuaaa

SEQ ID NO: 2478634 - RNA, 19 nt, Artificial Sequence
  Description of Artificial Sequence: Synthetic oligonucleotide
ggcuugguacaccuuccag

SEQ ID NO: 2478635 - RNA, 19 nt, Artificial Sequence
  Description of Artificial Sequence: Synthetic oligonucleotide
caucuaucugaucuugacu

SEQ ID NO: 2478636 - RNA, 19 nt, Artificial Sequence
  Description of Artificial Sequence: Synthetic oligonucleotide
cuugaaucguaugauguau

SEQ ID NO: 2478637 - RNA, 19 nt, Artificial Sequence
  Description of Artificial Sequence: Synthetic oligonucleotide
aucaccacggugucccaua

SEQ ID NO: 2478638 - RNA, 19 nt, Artificial Sequence
  Description of Artificial Sequence: Synthetic oligonucleotide
ggaucagcaaucuuguauu

SEQ ID NO: 2478639 - RNA, 19 nt, Artificial Sequence
  Description of Artificial Sequence: Synthetic oligonucleotide
gggaaggauugccuaaaga

SEQ ID NO: 2478640 - RNA, 19 nt, Artificial Sequence
  Description of Artificial Sequence: Synthetic oligonucleotide
uuaucaccacgguguccca

SEQ ID NO: 2478641 - RNA, 19 nt, Artificial Sequence
  Description of Artificial Sequence: Synthetic oligonucleotide
ucaccacggugucccauau

SEQ ID NO: 2478642 - RNA, 19 nt, Artificial Sequence
  Description of Artificial Sequence: Synthetic oligonucleotide
gcaggaucaaaaucucuaa

SEQ ID NO: 2478643 - RNA, 19 nt, Artificial Sequence
  Description of Artificial Sequence: Synthetic oligonucleotide
ggcuacucagucuauuucu

SEQ ID NO: 2478644 - RNA, 19 nt, Artificial Sequence
  Description of Artificial Sequence: Synthetic oligonucleotide
gaucuugacuauguccacu

SEQ ID NO: 2478645 - RNA, 19 nt, Artificial Sequence
  Description of Artificial Sequence: Synthetic oligonucleotide
gggaucagcaaucuuguau

SEQ ID NO: 2478646 - RNA, 19 nt, Artificial Sequence
  Description of Artificial Sequence: Synthetic oligonucleotide
agucuauuucugucucaua

SEQ ID NO: 2478647 - RNA, 19 nt, Artificial Sequence
  Description of Artificial Sequence: Synthetic oligonucleotide
gcuacucagucuauuucug

SEQ ID NO: 2478648 - RNA, 19 nt, Artificial Sequence
  Description of Artificial Sequence: Synthetic oligonucleotide
uagacaccuaaaggccaca

SEQ ID NO: 2478649 - RNA, 19 nt, Artificial Sequence
  Description of Artificial Sequence: Synthetic oligonucleotide
gagugcuaacuagcuuuug

SEQ ID NO: 2478650 - RNA, 19 nt, Artificial Sequence
  Description of Artificial Sequence: Synthetic oligonucleotide
gaacuauggcaguggauuu

SEQ ID NO: 2478651 - RNA, 19 nt, Artificial Sequence
  Description of Artificial Sequence: Synthetic oligonucleotide
ggcugaagacaaaauauua

SEQ ID NO: 2478652 - RNA, 19 nt, Artificial Sequence
  Description of Artificial Sequence: Synthetic oligonucleotide
acugacaggugggccaccu

SEQ ID NO: 2478653 - RNA, 19 nt, Artificial Sequence
  Description of Artificial Sequence: Synthetic oligonucleotide
ggggaaggauugccuaaag

SEQ ID NO: 2478654 - RNA, 19 nt, Artificial Sequence
  Description of Artificial Sequence: Synthetic oligonucleotide
gacacgcuacgcaucuauc

SEQ ID NO: 2478655 - RNA, 19 nt, Artificial Sequence
  Description of Artificial Sequence: Synthetic oligonucleotide
cacuucaaugcccaccacu

SEQ ID NO: 2478656 - RNA, 19 nt, Artificial Sequence
  Description of Artificial Sequence: Synthetic oligonucleotide
agaugggaucagcaaucuu

SEQ ID NO: 2478657 - RNA, 19 nt, Artificial Sequence
  Description of Artificial Sequence: Synthetic oligonucleotide
gcuugguacaccuuccagu

SEQ ID NO: 2478658 - RNA, 19 nt, Artificial Sequence
  Description of Artificial Sequence: Synthetic oligonucleotide
ccuagacaccuaaaggcca

SEQ ID NO: 2478659 - RNA, 19 nt, Artificial Sequence
  Description of Artificial Sequence: Synthetic oligonucleotide
gcuugaaucguaugaugua

SEQ ID NO: 2478660 - RNA, 19 nt, Artificial Sequence
  Description of Artificial Sequence: Synthetic oligonucleotide
aaaugcccaggcagccacu

SEQ ID NO: 2478661 - RNA, 19 nt, Artificial Sequence
  Description of Artificial Sequence: Synthetic oligonucleotide
cuacucagucuauuucugu

SEQ ID NO: 2478662 - RNA, 19 nt, Artificial Sequence
  Description of Artificial Sequence: Synthetic oligonucleotide
cuauguccacucuggggaa

SEQ ID NO: 2478663 - RNA, 19 nt, Artificial Sequence
  Description of Artificial Sequence: Synthetic oligonucleotide
cuggggaaggauugccuaa

SEQ ID NO: 2478664 - RNA, 19 nt, Artificial Sequence
  Description of Artificial Sequence: Synthetic oligonucleotide
ugggaucagcaaucuugua

SEQ ID NO: 2478665 - RNA, 19 nt, Artificial Sequence
  Description of Artificial Sequence: Synthetic oligonucleotide
cugccugaaaguucucucu

SEQ ID NO: 2478666 - RNA, 19 nt, Artificial Sequence
  Description of Artificial Sequence: Synthetic oligonucleotide
aguggcuacucagucuauu

SEQ ID NO: 2478667 - RNA, 19 nt, Artificial Sequence
  Description of Artificial Sequence: Synthetic oligonucleotide
agacaccuaaaggccacaa

SEQ ID NO: 2478668 - RNA, 19 nt, Artificial Sequence
  Description of Artificial Sequence: Synthetic oligonucleotide
uaucaccacggugucccau

SEQ ID NO: 2478669 - RNA, 19 nt, Artificial Sequence
  Description of Artificial Sequence: Synthetic oligonucleotide
agcuuuugagaaacccaaa

SEQ ID NO: 2478670 - RNA, 19 nt, Artificial Sequence
  Description of Artificial Sequence: Synthetic oligonucleotide
gccuaaagacaaauacuga

SEQ ID NO: 2478671 - RNA, 19 nt, Artificial Sequence
  Description of Artificial Sequence: Synthetic oligonucleotide
caccacuuacucauaugcu

SEQ ID NO: 2478672 - RNA, 19 nt, Artificial Sequence
  Description of Artificial Sequence: Synthetic oligonucleotide
ccacuuacucauaugcuua

SEQ ID NO: 2478673 - RNA, 19 nt, Artificial Sequence
  Description of Artificial Sequence: Synthetic oligonucleotide
cacaguggcuacucagucu

SEQ ID NO: 2478674 - RNA, 19 nt, Artificial Sequence
  Description of Artificial Sequence: Synthetic oligonucleotide
ggcagccacuucaaugccc

SEQ ID NO: 2478675 - RNA, 19 nt, Artificial Sequence
  Description of Artificial Sequence: Synthetic oligonucleotide
aggauugccuaaagacaaa

SEQ ID NO: 2478676 - RNA, 19 nt, Artificial Sequence
  Description of Artificial Sequence: Synthetic oligonucleotide
cuucaaugcccaccacuua

SEQ ID NO: 2478677 - RNA, 19 nt, Artificial Sequence
  Description of Artificial Sequence: Synthetic oligonucleotide
cugacaggugggccaccug

SEQ ID NO: 2478678 - RNA, 19 nt, Artificial Sequence
  Description of Artificial Sequence: Synthetic oligonucleotide
ucucgccuggaaagaucuu

SEQ ID NO: 2478679 - RNA, 19 nt, Artificial Sequence
  Description of Artificial Sequence: Synthetic oligonucleotide
caaaguaaauuagcugcau

SEQ ID NO: 2478680 - RNA, 19 nt, Artificial Sequence
  Description of Artificial Sequence: Synthetic oligonucleotide
gaaggaugugcugcaggau

SEQ ID NO: 2478681 - RNA, 19 nt, Artificial Sequence
  Description of Artificial Sequence: Synthetic oligonucleotide
caccacggugucccauaug

SEQ ID NO: 2478682 - RNA, 19 nt, Artificial Sequence
  Description of Artificial Sequence: Synthetic oligonucleotide
gugucccauaugaugcgaa

SEQ ID NO: 2478683 - RNA, 19 nt, Artificial Sequence
  Description of Artificial Sequence: Synthetic oligonucleotide
gucccauaugaugcgaaau

SEQ ID NO: 2478684 - RNA, 19 nt, Artificial Sequence
  Description of Artificial Sequence: Synthetic oligonucleotide
ugcccaccacuuacucaua

SEQ ID NO: 2478685 - RNA, 19 nt, Artificial Sequence
  Description of Artificial Sequence: Synthetic oligonucleotide
ccaccugggcugaagacaa

SEQ ID NO: 2478686 - RNA, 19 nt, Artificial Sequence
  Description of Artificial Sequence: Synthetic oligonucleotide
ggugucccauaugaugcga

SEQ ID NO: 2478687 - RNA, 19 nt, Artificial Sequence
  Description of Artificial Sequence: Synthetic oligonucleotide
ggccacaaaugcccaggca

SEQ ID NO: 2478688 - RNA, 19 nt, Artificial Sequence
  Description of Artificial Sequence: Synthetic oligonucleotide
cggugucccauaugaugcg

SEQ ID NO: 2478689 - RNA, 19 nt, Artificial Sequence
  Description of Artificial Sequence: Synthetic oligonucleotide
ggauugccuaaagacaaau

SEQ ID NO: 2478690 - RNA, 19 nt, Artificial Sequence
  Description of Artificial Sequence: Synthetic oligonucleotide
cagccacuucaaugcccac

SEQ ID NO: 2478691 - RNA, 19 nt, Artificial Sequence
  Description of Artificial Sequence: Synthetic oligonucleotide
gguacaccuuccaguauua

SEQ ID NO: 2478692 - RNA, 19 nt, Artificial Sequence
  Description of Artificial Sequence: Synthetic oligonucleotide
gcuacgcaucuaucugauc

SEQ ID NO: 2478693 - RNA, 19 nt, Artificial Sequence
  Description of Artificial Sequence: Synthetic oligonucleotide
cuuucucgccuggaaagau

SEQ ID NO: 2478694 - RNA, 19 nt, Artificial Sequence
  Description of Artificial Sequence: Synthetic oligonucleotide
cagaugggaucagcaaucu

SEQ ID NO: 2478695 - RNA, 19 nt, Artificial Sequence
  Description of Artificial Sequence: Synthetic oligonucleotide
cucgccuggaaagaucuuu

SEQ ID NO: 2478696 - RNA, 19 nt, Artificial Sequence
  Description of Artificial Sequence: Synthetic oligonucleotide
gugaacuauggcaguggau

SEQ ID NO: 2478697 - RNA, 19 nt, Artificial Sequence
  Description of Artificial Sequence: Synthetic oligonucleotide
gcucuacuaaguacaacau

SEQ ID NO: 2478698 - RNA, 19 nt, Artificial Sequence
  Description of Artificial Sequence: Synthetic oligonucleotide
ccuuucucgccuggaaaga

SEQ ID NO: 2478699 - RNA, 19 nt, Artificial Sequence
  Description of Artificial Sequence: Synthetic oligonucleotide
ccaguauuaucaccacggu

SEQ ID NO: 2478700 - RNA, 19 nt, Artificial Sequence
  Description of Artificial Sequence: Synthetic oligonucleotide
ccuucacaguggcuacuca

SEQ ID NO: 2478701 - RNA, 19 nt, Artificial Sequence
  Description of Artificial Sequence: Synthetic oligonucleotide
cgcaucuaucugaucuuga

SEQ ID NO: 2478702 - RNA, 19 nt, Artificial Sequence
  Description of Artificial Sequence: Synthetic oligonucleotide
gagacacgcuacgcaucua

SEQ ID NO: 2478703 - RNA, 19 nt, Artificial Sequence
  Description of Artificial Sequence: Synthetic oligonucleotide
ccacuucaaugcccaccac

SEQ ID NO: 2478704 - RNA, 19 nt, Artificial Sequence
  Description of Artificial Sequence: Synthetic oligonucleotide
cguaugauguaugcagcua

SEQ ID NO: 2478705 - RNA, 19 nt, Artificial Sequence
  Description of Artificial Sequence: Synthetic oligonucleotide
caccugggcugaagacaaa

SEQ ID NO: 2478706 - RNA, 19 nt, Artificial Sequence
  Description of Artificial Sequence: Synthetic oligonucleotide
gcccaccacuuacucauau

SEQ ID NO: 2478707 - RNA, 19 nt, Artificial Sequence
  Description of Artificial Sequence: Synthetic oligonucleotide
caguggcuacucagucuau

SEQ ID NO: 2478708 - RNA, 19 nt, Artificial Sequence
  Description of Artificial Sequence: Synthetic oligonucleotide
cgcuacgcaucuaucugau

SEQ ID NO: 2478709 - RNA, 19 nt, Artificial Sequence
  Description of Artificial Sequence: Synthetic oligonucleotide
gcccuucacaguggcuacu

SEQ ID NO: 2478710 - RNA, 19 nt, Artificial Sequence
  Description of Artificial Sequence: Synthetic oligonucleotide
aauuagaagaaauucugac

SEQ ID NO: 2478711 - RNA, 19 nt, Artificial Sequence
  Description of Artificial Sequence: Synthetic oligonucleotide
aagagcaaaacacugacag

SEQ ID NO: 2478712 - RNA, 19 nt, Artificial Sequence
  Description of Artificial Sequence: Synthetic oligonucleotide
uuagaagaaauucugacac

SEQ ID NO: 2478713 - RNA, 19 nt, Artificial Sequence
  Description of Artificial Sequence: Synthetic oligonucleotide
acuaguugagccuaacucc

SEQ ID NO: 2478714 - RNA, 19 nt, Artificial Sequence
  Description of Artificial Sequence: Synthetic oligonucleotide
gaaauucugacaccaaugg

SEQ ID NO: 2478715 - RNA, 19 nt, Artificial Sequence
  Description of Artificial Sequence: Synthetic oligonucleotide
aauguagucagucaccacu

SEQ ID NO: 2478716 - RNA, 19 nt, Artificial Sequence
  Description of Artificial Sequence: Synthetic oligonucleotide
gaaaugugcacucacacug

SEQ ID NO: 2478717 - RNA, 19 nt, Artificial Sequence
  Description of Artificial Sequence: Synthetic oligonucleotide
aacgcugagacauaagcag

SEQ ID NO: 2478718 - RNA, 19 nt, Artificial Sequence
  Description of Artificial Sequence: Synthetic oligonucleotide
gaauauggaacccagacuc

SEQ ID NO: 2478719 - RNA, 19 nt, Artificial Sequence
  Description of Artificial Sequence: Synthetic oligonucleotide
uaaccauguaauuagaaga

SEQ ID NO: 2478720 - RNA, 19 nt, Artificial Sequence
  Description of Artificial Sequence: Synthetic oligonucleotide
uaagagaaccgccaugucg

SEQ ID NO: 2478721 - RNA, 19 nt, Artificial Sequence
  Description of Artificial Sequence: Synthetic oligonucleotide
gauucagguacccagcugg

SEQ ID NO: 2478722 - RNA, 19 nt, Artificial Sequence
  Description of Artificial Sequence: Synthetic oligonucleotide
aggaauauggaacccagac

SEQ ID NO: 2478723 - RNA, 19 nt, Artificial Sequence
  Description of Artificial Sequence: Synthetic oligonucleotide
aagagaaccgccaugucgc

SEQ ID NO: 2478724 - RNA, 19 nt, Artificial Sequence
  Description of Artificial Sequence: Synthetic oligonucleotide
aguugaaauagcaaagccc

SEQ ID NO: 2478725 - RNA, 19 nt, Artificial Sequence
  Description of Artificial Sequence: Synthetic oligonucleotide
auaaccauguaauuagaag

SEQ ID NO: 2478726 - RNA, 19 nt, Artificial Sequence
  Description of Artificial Sequence: Synthetic oligonucleotide
agcugaacggcauagacag

SEQ ID NO: 2478727 - RNA, 19 nt, Artificial Sequence
  Description of Artificial Sequence: Synthetic oligonucleotide
aauggacuucuccacgccc

SEQ ID NO: 2478728 - RNA, 19 nt, Artificial Sequence
  Description of Artificial Sequence: Synthetic oligonucleotide
ucucaaaauaaccauguaa

SEQ ID NO: 2478729 - RNA, 19 nt, Artificial Sequence
  Description of Artificial Sequence: Synthetic oligonucleotide
gaaacgcugagacauaagc

SEQ ID NO: 2478730 - RNA, 19 nt, Artificial Sequence
  Description of Artificial Sequence: Synthetic oligonucleotide
auguaauuagaagaaauuc

SEQ ID NO: 2478731 - RNA, 19 nt, Artificial Sequence
  Description of Artificial Sequence: Synthetic oligonucleotide
ugagacauaagcagguuug

SEQ ID NO: 2478732 - RNA, 19 nt, Artificial Sequence
  Description of Artificial Sequence: Synthetic oligonucleotide
augaaaugugcacucacac

SEQ ID NO: 2478733 - RNA, 19 nt, Artificial Sequence
  Description of Artificial Sequence: Synthetic oligonucleotide
ggaaaugguaguuaaaggc

SEQ ID NO: 2478734 - RNA, 19 nt, Artificial Sequence
  Description of Artificial Sequence: Synthetic oligonucleotide
gacauaagcagguuugacc

SEQ ID NO: 2478735 - RNA, 19 nt, Artificial Sequence
  Description of Artificial Sequence: Synthetic oligonucleotide
gagcaaaacacugacagcc

SEQ ID NO: 2478736 - RNA, 19 nt, Artificial Sequence
  Description of Artificial Sequence: Synthetic oligonucleotide
uggcauacaauccaaggug

SEQ ID NO: 2478737 - RNA, 19 nt, Artificial Sequence
  Description of Artificial Sequence: Synthetic oligonucleotide
uaauuagaagaaauucuga

SEQ ID NO: 2478738 - RNA, 19 nt, Artificial Sequence
  Description of Artificial Sequence: Synthetic oligonucleotide
aaugguagcuuggugacag

SEQ ID NO: 2478739 - RNA, 19 nt, Artificial Sequence
  Description of Artificial Sequence: Synthetic oligonucleotide
auacaauccaagguguugc

SEQ ID NO: 2478740 - RNA, 19 nt, Artificial Sequence
  Description of Artificial Sequence: Synthetic oligonucleotide
uuacgagggcucaaggucg

SEQ ID NO: 2478741 - RNA, 19 nt, Artificial Sequence
  Description of Artificial Sequence: Synthetic oligonucleotide
uuuccaucaacaaaugaau

SEQ ID NO: 2478742 - RNA, 19 nt, Artificial Sequence
  Description of Artificial Sequence: Synthetic oligonucleotide
uuuaagagaaccgccaugu

SEQ ID NO: 2478743 - RNA, 19 nt, Artificial Sequence
  Description of Artificial Sequence: Synthetic oligonucleotide
aggaaaugguaguuaaagg

SEQ ID NO: 2478744 - RNA, 19 nt, Artificial Sequence
  Description of Artificial Sequence: Synthetic oligonucleotide
acaggcaaccaccauacuc

SEQ ID NO: 2478745 - RNA, 19 nt, Artificial Sequence
  Description of Artificial Sequence: Synthetic oligonucleotide
uacucaggaauauggaacc

SEQ ID NO: 2478746 - RNA, 19 nt, Artificial Sequence
  Description of Artificial Sequence: Synthetic oligonucleotide
ugguaguugaaauagcaaa

SEQ ID NO: 2478747 - RNA, 19 nt, Artificial Sequence
  Description of Artificial Sequence: Synthetic oligonucleotide
agccuucuucgauauaucc

SEQ ID NO: 2478748 - RNA, 19 nt, Artificial Sequence
  Description of Artificial Sequence: Synthetic oligonucleotide
uccaucaacaaaugaauuc

SEQ ID NO: 2478749 - RNA, 19 nt, Artificial Sequence
  Description of Artificial Sequence: Synthetic oligonucleotide
ucucacuaguccaauggag

SEQ ID NO: 2478750 - RNA, 19 nt, Artificial Sequence
  Description of Artificial Sequence: Synthetic oligonucleotide
guugaaauagcaaagccca

SEQ ID NO: 2478751 - RNA, 19 nt, Artificial Sequence
  Description of Artificial Sequence: Synthetic oligonucleotide
aaaccuuuccaucaacaaa

SEQ ID NO: 2478752 - RNA, 19 nt, Artificial Sequence
  Description of Artificial Sequence: Synthetic oligonucleotide
ucaacaaaugaauucucaa

SEQ ID NO: 2478753 - RNA, 19 nt, Artificial Sequence
  Description of Artificial Sequence: Synthetic oligonucleotide
aauccaagguguugcacug

SEQ ID NO: 2478754 - RNA, 19 nt, Artificial Sequence
  Description of Artificial Sequence: Synthetic oligonucleotide
uaguccaauggagagaugc

SEQ ID NO: 2478755 - RNA, 19 nt, Artificial Sequence
  Description of Artificial Sequence: Synthetic oligonucleotide
agccuaacuccucuuaaac

SEQ ID NO: 2478756 - RNA, 19 nt, Artificial Sequence
  Description of Artificial Sequence: Synthetic oligonucleotide
acucagcacuaguugagcc

SEQ ID NO: 2478757 - RNA, 19 nt, Artificial Sequence
  Description of Artificial Sequence: Synthetic oligonucleotide
auaagcagguuugaccacc

SEQ ID NO: 2478758 - RNA, 19 nt, Artificial Sequence
  Description of Artificial Sequence: Synthetic oligonucleotide
aaccuuuccaucaacaaau

SEQ ID NO: 2478759 - RNA, 19 nt, Artificial Sequence
  Description of Artificial Sequence: Synthetic oligonucleotide
accauacucaggaauaugg

SEQ ID NO: 2478760 - RNA, 19 nt, Artificial Sequence
  Description of Artificial Sequence: Synthetic oligonucleotide
acacugugagucuuggcac

SEQ ID NO: 2478761 - RNA, 19 nt, Artificial Sequence
  Description of Artificial Sequence: Synthetic oligonucleotide
aggugaaugugcugugugc

SEQ ID NO: 2478762 - RNA, 19 nt, Artificial Sequence
  Description of Artificial Sequence: Synthetic oligonucleotide
uccaauggagagaugcagc

SEQ ID NO: 2478763 - RNA, 19 nt, Artificial Sequence
  Description of Artificial Sequence: Synthetic oligonucleotide
aucgugguaguugaaauag

SEQ ID NO: 2478764 - RNA, 19 nt, Artificial Sequence
  Description of Artificial Sequence: Synthetic oligonucleotide
caggaaaugguaguuaaag

SEQ ID NO: 2478765 - RNA, 19 nt, Artificial Sequence
  Description of Artificial Sequence: Synthetic oligonucleotide
ugugccaugccauccuggg

SEQ ID NO: 2478766 - RNA, 19 nt, Artificial Sequence
  Description of Artificial Sequence: Synthetic oligonucleotide
cagccuuggaaccagaaug

SEQ ID NO: 2478767 - RNA, 19 nt, Artificial Sequence
  Description of Artificial Sequence: Synthetic oligonucleotide
acagcccucucacuagucc

SEQ ID NO: 2478768 - RNA, 19 nt, Artificial Sequence
  Description of Artificial Sequence: Synthetic oligonucleotide
cuuacgagggcucaagguc

SEQ ID NO: 2478769 - RNA, 19 nt, Artificial Sequence
  Description of Artificial Sequence: Synthetic oligonucleotide
augaauguagucagucacc

SEQ ID NO: 2478770 - RNA, 19 nt, Artificial Sequence
  Description of Artificial Sequence: Synthetic oligonucleotide
uuaaaggcaacaugagcuc

SEQ ID NO: 2478771 - RNA, 19 nt, Artificial Sequence
  Description of Artificial Sequence: Synthetic oligonucleotide
agagcuuccacagcauggc

SEQ ID NO: 2478772 - RNA, 19 nt, Artificial Sequence
  Description of Artificial Sequence: Synthetic oligonucleotide
aaugugcacucacacugug

SEQ ID NO: 2478773 - RNA, 19 nt, Artificial Sequence
  Description of Artificial Sequence: Synthetic oligonucleotide
ugaauguagucagucacca

SEQ ID NO: 2478774 - RNA, 19 nt, Artificial Sequence
  Description of Artificial Sequence: Synthetic oligonucleotide
agcagguuugaccacccgg

SEQ ID NO: 2478775 - RNA, 19 nt, Artificial Sequence
  Description of Artificial Sequence: Synthetic oligonucleotide
ucuucgauauauccccaug

SEQ ID NO: 2478776 - RNA, 19 nt, Artificial Sequence
  Description of Artificial Sequence: Synthetic oligonucleotide
uccucuuaaaccuuuccau

SEQ ID NO: 2478777 - RNA, 19 nt, Artificial Sequence
  Description of Artificial Sequence: Synthetic oligonucleotide
cacuaguugagccuaacuc

SEQ ID NO: 2478778 - RNA, 19 nt, Artificial Sequence
  Description of Artificial Sequence: Synthetic oligonucleotide
aggacucccagcuuuaaga

SEQ ID NO: 2478779 - RNA, 19 nt, Artificial Sequence
  Description of Artificial Sequence: Synthetic oligonucleotide
guaguugaaauagcaaagc

SEQ ID NO: 2478780 - RNA, 19 nt, Artificial Sequence
  Description of Artificial Sequence: Synthetic oligonucleotide
accaauggacuucuccacg

SEQ ID NO: 2478781 - RNA, 19 nt, Artificial Sequence
  Description of Artificial Sequence: Synthetic oligonucleotide
ggaguaguccaccacagag

SEQ ID NO: 2478782 - RNA, 19 nt, Artificial Sequence
  Description of Artificial Sequence: Synthetic oligonucleotide
uguccaaggccccagugac

SEQ ID NO: 2478783 - RNA, 19 nt, Artificial Sequence
  Description of Artificial Sequence: Synthetic oligonucleotide
agaaauucugacaccaaug

SEQ ID NO: 2478784 - RNA, 19 nt, Artificial Sequence
  Description of Artificial Sequence: Synthetic oligonucleotide
uucgauauauccccaugaa

SEQ ID NO: 2478785 - RNA, 19 nt, Artificial Sequence
  Description of Artificial Sequence: Synthetic oligonucleotide
uagaagaaauucugacacc

SEQ ID NO: 2478786 - RNA, 19 nt, Artificial Sequence
  Description of Artificial Sequence: Synthetic oligonucleotide
ugaccgugcagggugaggg

SEQ ID NO: 2478787 - RNA, 19 nt, Artificial Sequence
  Description of Artificial Sequence: Synthetic oligonucleotide
cugaacggcauagacagag

SEQ ID NO: 2478788 - RNA, 19 nt, Artificial Sequence
  Description of Artificial Sequence: Synthetic oligonucleotide
ggcaaaguggcauacaauc

SEQ ID NO: 2478789 - RNA, 19 nt, Artificial Sequence
  Description of Artificial Sequence: Synthetic oligonucleotide
cgauauauccccaugaaug

SEQ ID NO: 2478790 - RNA, 19 nt, Artificial Sequence
  Description of Artificial Sequence: Synthetic oligonucleotide
ccuucuucgauauaucccc

SEQ ID NO: 2478791 - RNA, 19 nt, Artificial Sequence
  Description of Artificial Sequence: Synthetic oligonucleotide
aaccauguaauuagaagaa

SEQ ID NO: 2478792 - RNA, 19 nt, Artificial Sequence
  Description of Artificial Sequence: Synthetic oligonucleotide
cagggauucagguacccag

SEQ ID NO: 2478793 - RNA, 19 nt, Artificial Sequence
  Description of Artificial Sequence: Synthetic oligonucleotide
aaacgcugagacauaagca

SEQ ID NO: 2478794 - RNA, 19 nt, Artificial Sequence
  Description of Artificial Sequence: Synthetic oligonucleotide
gguaguugaaauagcaaag

SEQ ID NO: 2478795 - RNA, 19 nt, Artificial Sequence
  Description of Artificial Sequence: Synthetic oligonucleotide
gcugagaccgccaagaggc

SEQ ID NO: 2478796 - RNA, 19 nt, Artificial Sequence
  Description of Artificial Sequence: Synthetic oligonucleotide
auggaacccagacucagca

SEQ ID NO: 2478797 - RNA, 19 nt, Artificial Sequence
  Description of Artificial Sequence: Synthetic oligonucleotide
ucgauauauccccaugaau

SEQ ID NO: 2478798 - RNA, 19 nt, Artificial Sequence
  Description of Artificial Sequence: Synthetic oligonucleotide
ugcagaugcccacaucgug

SEQ ID NO: 2478799 - RNA, 19 nt, Artificial Sequence
  Description of Artificial Sequence: Synthetic oligonucleotide
auagcaaagcccagcaaag

SEQ ID NO: 2478800 - RNA, 19 nt, Artificial Sequence
  Description of Artificial Sequence: Synthetic oligonucleotide
aaauaaccauguaauuaga

SEQ ID NO: 2478801 - RNA, 19 nt, Artificial Sequence
  Description of Artificial Sequence: Synthetic oligonucleotide
guagcuuggugacagguga

SEQ ID NO: 2478802 - RNA, 19 nt, Artificial Sequence
  Description of Artificial Sequence: Synthetic oligonucleotide
agcugagaccgccaagagg

SEQ ID NO: 2478803 - RNA, 19 nt, Artificial Sequence
  Description of Artificial Sequence: Synthetic oligonucleotide
cuuuaagagaaccgccaug

SEQ ID NO: 2478804 - RNA, 19 nt, Artificial Sequence
  Description of Artificial Sequence: Synthetic oligonucleotide
gaacggcauagacagagca

SEQ ID NO: 2478805 - RNA, 19 nt, Artificial Sequence
  Description of Artificial Sequence: Synthetic oligonucleotide
caggcaaccaccauacuca

SEQ ID NO: 2478806 - RNA, 19 nt, Artificial Sequence
  Description of Artificial Sequence: Synthetic oligonucleotide
cagcuuuaagagaaccgcc

SEQ ID NO: 2478807 - RNA, 19 nt, Artificial Sequence
  Description of Artificial Sequence: Synthetic oligonucleotide
gagcucaugaaaugugcac

SEQ ID NO: 2478808 - RNA, 19 nt, Artificial Sequence
  Description of Artificial Sequence: Synthetic oligonucleotide
acuaguccaauggagagau

SEQ ID NO: 2478809 - RNA, 19 nt, Artificial Sequence
  Description of Artificial Sequence: Synthetic oligonucleotide
uaagcagguuugaccaccc

SEQ ID NO: 2478810 - RNA, 19 nt, Artificial Sequence
  Description of Artificial Sequence: Synthetic oligonucleotide
agacauaagcagguuugac

SEQ ID NO: 2478811 - RNA, 19 nt, Artificial Sequence
  Description of Artificial Sequence: Synthetic oligonucleotide
gcaacugcucugcagaugc

SEQ ID NO: 2478812 - RNA, 19 nt, Artificial Sequence
  Description of Artificial Sequence: Synthetic oligonucleotide
aacggcauagacagagcag

SEQ ID NO: 2478813 - RNA, 19 nt, Artificial Sequence
  Description of Artificial Sequence: Synthetic oligonucleotide
ugagccuaacuccucuuaa

SEQ ID NO: 2478814 - RNA, 19 nt, Artificial Sequence
  Description of Artificial Sequence: Synthetic oligonucleotide
auccccaugaauguaguca

SEQ ID NO: 2478815 - RNA, 19 nt, Artificial Sequence
  Description of Artificial Sequence: Synthetic oligonucleotide
agaggucagagcuuccaca

SEQ ID NO: 2478816 - RNA, 19 nt, Artificial Sequence
  Description of Artificial Sequence: Synthetic oligonucleotide
acaucgugguaguugaaau

SEQ ID NO: 2478817 - RNA, 19 nt, Artificial Sequence
  Description of Artificial Sequence: Synthetic oligonucleotide
cagguacccagcuggaagc

SEQ ID NO: 2478818 - RNA, 19 nt, Artificial Sequence
  Description of Artificial Sequence: Synthetic oligonucleotide
aguugagccuaacuccucu

SEQ ID NO: 2478819 - RNA, 19 nt, Artificial Sequence
  Description of Artificial Sequence: Synthetic oligonucleotide
cauacaauccaagguguug

SEQ ID NO: 2478820 - RNA, 19 nt, Artificial Sequence
  Description of Artificial Sequence: Synthetic oligonucleotide
uguagucagucaccacuug

SEQ ID NO: 2478821 - RNA, 19 nt, Artificial Sequence
  Description of Artificial Sequence: Synthetic oligonucleotide
acugacagcccucucacua

SEQ ID NO: 2478822 - RNA, 19 nt, Artificial Sequence
  Description of Artificial Sequence: Synthetic oligonucleotide
uuccaucaacaaaugaauu

SEQ ID NO: 2478823 - RNA, 19 nt, Artificial Sequence
  Description of Artificial Sequence: Synthetic oligonucleotide
acagccuucuucgauauau

SEQ ID NO: 2478824 - RNA, 19 nt, Artificial Sequence
  Description of Artificial Sequence: Synthetic oligonucleotide
aaccagaaugguagcuugg

SEQ ID NO: 2478825 - RNA, 19 nt, Artificial Sequence
  Description of Artificial Sequence: Synthetic oligonucleotide
aauauggaacccagacuca

SEQ ID NO: 2478826 - RNA, 19 nt, Artificial Sequence
  Description of Artificial Sequence: Synthetic oligonucleotide
agccuuggaaccagaaugg

SEQ ID NO: 2478827 - RNA, 19 nt, Artificial Sequence
  Description of Artificial Sequence: Synthetic oligonucleotide
ucaggaaaugguaguuaaa

SEQ ID NO: 2478828 - RNA, 19 nt, Artificial Sequence
  Description of Artificial Sequence: Synthetic oligonucleotide
uuggccacugcagaggacu

SEQ ID NO: 2478829 - RNA, 19 nt, Artificial Sequence
  Description of Artificial Sequence: Synthetic oligonucleotide
uccugggguaggcuggucc

SEQ ID NO: 2478830 - RNA, 19 nt, Artificial Sequence
  Description of Artificial Sequence: Synthetic oligonucleotide
gaggcaaaguggcauacaa

SEQ ID NO: 2478831 - RNA, 19 nt, Artificial Sequence
  Description of Artificial Sequence: Synthetic oligonucleotide
uugacagccuucuucgaua

SEQ ID NO: 2478832 - RNA, 19 nt, Artificial Sequence
  Description of Artificial Sequence: Synthetic oligonucleotide
cuucgauauauccccauga

SEQ ID NO: 2478833 - RNA, 19 nt, Artificial Sequence
  Description of Artificial Sequence: Synthetic oligonucleotide
aggucagagcuuccacagc

SEQ ID NO: 2478834 - RNA, 19 nt, Artificial Sequence
  Description of Artificial Sequence: Synthetic oligonucleotide
caugaaaugugcacucaca

SEQ ID NO: 2478835 - RNA, 19 nt, Artificial Sequence
  Description of Artificial Sequence: Synthetic oligonucleotide
agagcugagaccgccaaga

SEQ ID NO: 2478836 - RNA, 19 nt, Artificial Sequence
  Description of Artificial Sequence: Synthetic oligonucleotide
aaacacugacagcccucuc

SEQ ID NO: 2478837 - RNA, 19 nt, Artificial Sequence
  Description of Artificial Sequence: Synthetic oligonucleotide
ucgugguaguugaaauagc

SEQ ID NO: 2478838 - RNA, 19 nt, Artificial Sequence
  Description of Artificial Sequence: Synthetic oligonucleotide
gucaccacuuguccaaggc

SEQ ID NO: 2478839 - RNA, 19 nt, Artificial Sequence
  Description of Artificial Sequence: Synthetic oligonucleotide
auucugacaccaauggacu

SEQ ID NO: 2478840 - RNA, 19 nt, Artificial Sequence
  Description of Artificial Sequence: Synthetic oligonucleotide
agggauucagguacccagc

SEQ ID NO: 2478841 - RNA, 19 nt, Artificial Sequence
  Description of Artificial Sequence: Synthetic oligonucleotide
accgccaugucgcuuacga

SEQ ID NO: 2478842 - RNA, 19 nt, Artificial Sequence
  Description of Artificial Sequence: Synthetic oligonucleotide
ucugacaccaauggacuuc

SEQ ID NO: 2478843 - RNA, 19 nt, Artificial Sequence
  Description of Artificial Sequence: Synthetic oligonucleotide
aagcagguuugaccacccg

SEQ ID NO: 2478844 - RNA, 19 nt, Artificial Sequence
  Description of Artificial Sequence: Synthetic oligonucleotide
cuggaagcaggcccaagag

SEQ ID NO: 2478845 - RNA, 19 nt, Artificial Sequence
  Description of Artificial Sequence: Synthetic oligonucleotide
acggcauagacagagcaga

SEQ ID NO: 2478846 - RNA, 19 nt, Artificial Sequence
  Description of Artificial Sequence: Synthetic oligonucleotide
ugaccacccggcuucggag

SEQ ID NO: 2478847 - RNA, 19 nt, Artificial Sequence
  Description of Artificial Sequence: Synthetic oligonucleotide
uucucaaaauaaccaugua

SEQ ID NO: 2478848 - RNA, 19 nt, Artificial Sequence
  Description of Artificial Sequence: Synthetic oligonucleotide
aaaguggcauacaauccaa

SEQ ID NO: 2478849 - RNA, 19 nt, Artificial Sequence
  Description of Artificial Sequence: Synthetic oligonucleotide
ggagcaacagagcucggcc

SEQ ID NO: 2478850 - RNA, 19 nt, Artificial Sequence
  Description of Artificial Sequence: Synthetic oligonucleotide
agguguugcacugcagagg

SEQ ID NO: 2478851 - RNA, 19 nt, Artificial Sequence
  Description of Artificial Sequence: Synthetic oligonucleotide
acucccagcuuuaagagaa

SEQ ID NO: 2478852 - RNA, 19 nt, Artificial Sequence
  Description of Artificial Sequence: Synthetic oligonucleotide
uugaccacccggcuucgga

SEQ ID NO: 2478853 - RNA, 19 nt, Artificial Sequence
  Description of Artificial Sequence: Synthetic oligonucleotide
ccaauggagagaugcagcc

SEQ ID NO: 2478854 - RNA, 19 nt, Artificial Sequence
  Description of Artificial Sequence: Synthetic oligonucleotide
caagguguugcacugcaga

SEQ ID NO: 2478855 - RNA, 19 nt, Artificial Sequence
  Description of Artificial Sequence: Synthetic oligonucleotide
agagcucggccuccuuggc

SEQ ID NO: 2478856 - RNA, 19 nt, Artificial Sequence
  Description of Artificial Sequence: Synthetic oligonucleotide
gacaggugaaugugcugug

SEQ ID NO: 2478857 - RNA, 19 nt, Artificial Sequence
  Description of Artificial Sequence: Synthetic oligonucleotide
agaaccgccaugucgcuua

SEQ ID NO: 2478858 - RNA, 19 nt, Artificial Sequence
  Description of Artificial Sequence: Synthetic oligonucleotide
ccucucacuaguccaaugg

SEQ ID NO: 2478859 - RNA, 19 nt, Artificial Sequence
  Description of Artificial Sequence: Synthetic oligonucleotide
gaauguagucagucaccac

SEQ ID NO: 2478860 - RNA, 19 nt, Artificial Sequence
  Description of Artificial Sequence: Synthetic oligonucleotide
ucccagcuuuaagagaacc

SEQ ID NO: 2478861 - RNA, 19 nt, Artificial Sequence
  Description of Artificial Sequence: Synthetic oligonucleotide
ugggagcugaacggcauag

SEQ ID NO: 2478862 - RNA, 19 nt, Artificial Sequence
  Description of Artificial Sequence: Synthetic oligonucleotide
uugagccuaacuccucuua

SEQ ID NO: 2478863 - RNA, 19 nt, Artificial Sequence
  Description of Artificial Sequence: Synthetic oligonucleotide
ggacucccagcuuuaagag

SEQ ID NO: 2478864 - RNA, 19 nt, Artificial Sequence
  Description of Artificial Sequence: Synthetic oligonucleotide
ggugaaugugcugugugcc

SEQ ID NO: 2478865 - RNA, 19 nt, Artificial Sequence
  Description of Artificial Sequence: Synthetic oligonucleotide
cagacucagcacuaguuga

SEQ ID NO: 2478866 - RNA, 19 nt, Artificial Sequence
  Description of Artificial Sequence: Synthetic oligonucleotide
acgcugagacauaagcagg

SEQ ID NO: 2478867 - RNA, 19 nt, Artificial Sequence
  Description of Artificial Sequence: Synthetic oligonucleotide
ccagcuuuaagagaaccgc

SEQ ID NO: 2478868 - RNA, 19 nt, Artificial Sequence
  Description of Artificial Sequence: Synthetic oligonucleotide
ucagcacuaguugagccua

SEQ ID NO: 2478869 - RNA, 19 nt, Artificial Sequence
  Description of Artificial Sequence: Synthetic oligonucleotide
cauguaauuagaagaaauu

SEQ ID NO: 2478870 - RNA, 19 nt, Artificial Sequence
  Description of Artificial Sequence: Synthetic oligonucleotide
cauaagcagguuugaccac

SEQ ID NO: 2478871 - RNA, 19 nt, Artificial Sequence
  Description of Artificial Sequence: Synthetic oligonucleotide
gccuaacuccucuuaaacc

SEQ ID NO: 2478872 - RNA, 19 nt, Artificial Sequence
  Description of Artificial Sequence: Synthetic oligonucleotide
gguuugaccacccggcuuc

SEQ ID NO: 2478873 - RNA, 19 nt, Artificial Sequence
  Description of Artificial Sequence: Synthetic oligonucleotide
cuucggagcaacagagcuc

SEQ ID NO: 2478874 - RNA, 19 nt, Artificial Sequence
  Description of Artificial Sequence: Synthetic oligonucleotide
agcagggauucagguaccc

SEQ ID NO: 2478875 - RNA, 19 nt, Artificial Sequence
  Description of Artificial Sequence: Synthetic oligonucleotide
ggucagagcuuccacagca

SEQ ID NO: 2478876 - RNA, 19 nt, Artificial Sequence
  Description of Artificial Sequence: Synthetic oligonucleotide
guggcauacaauccaaggu

SEQ ID NO: 2478877 - RNA, 19 nt, Artificial Sequence
  Description of Artificial Sequence: Synthetic oligonucleotide
uacgagggcucaaggucgc

SEQ ID NO: 2478878 - RNA, 19 nt, Artificial Sequence
  Description of Artificial Sequence: Synthetic oligonucleotide
ucacugggagcugaacggc

SEQ ID NO: 2478879 - RNA, 19 nt, Artificial Sequence
  Description of Artificial Sequence: Synthetic oligonucleotide
uucuucgauauauccccau

SEQ ID NO: 2478880 - RNA, 19 nt, Artificial Sequence
  Description of Artificial Sequence: Synthetic oligonucleotide
ugacagcccucucacuagu

SEQ ID NO: 2478881 - RNA, 19 nt, Artificial Sequence
  Description of Artificial Sequence: Synthetic oligonucleotide
ugguagcuuggugacaggu

SEQ ID NO: 2478882 - RNA, 19 nt, Artificial Sequence
  Description of Artificial Sequence: Synthetic oligonucleotide
aggcaaccaccauacucag

SEQ ID NO: 2478883 - RNA, 19 nt, Artificial Sequence
  Description of Artificial Sequence: Synthetic oligonucleotide
gcaacaugagcucaugaaa

SEQ ID NO: 2478884 - RNA, 19 nt, Artificial Sequence
  Description of Artificial Sequence: Synthetic oligonucleotide
cuaguugagccuaacuccu

SEQ ID NO: 2478885 - RNA, 19 nt, Artificial Sequence
  Description of Artificial Sequence: Synthetic oligonucleotide
cauagacagagcagaggca

SEQ ID NO: 2478886 - RNA, 19 nt, Artificial Sequence
  Description of Artificial Sequence: Synthetic oligonucleotide
cuuggugacaggugaaugu

SEQ ID NO: 2478887 - RNA, 19 nt, Artificial Sequence
  Description of Artificial Sequence: Synthetic oligonucleotide
caagagcaaaacacugaca

SEQ ID NO: 2478888 - RNA, 19 nt, Artificial Sequence
  Description of Artificial Sequence: Synthetic oligonucleotide
auccaagguguugcacugc

SEQ ID NO: 2478889 - RNA, 19 nt, Artificial Sequence
  Description of Artificial Sequence: Synthetic oligonucleotide
agcacuaguugagccuaac

SEQ ID NO: 2478890 - RNA, 19 nt, Artificial Sequence
  Description of Artificial Sequence: Synthetic oligonucleotide
caacaugagcucaugaaau

SEQ ID NO: 2478891 - RNA, 19 nt, Artificial Sequence
  Description of Artificial Sequence: Synthetic oligonucleotide
aacccagacucagcacuag

SEQ ID NO: 2478892 - RNA, 19 nt, Artificial Sequence
  Description of Artificial Sequence: Synthetic oligonucleotide
acgcccugcucacugggag

SEQ ID NO: 2478893 - RNA, 19 nt, Artificial Sequence
  Description of Artificial Sequence: Synthetic oligonucleotide
caauccaagguguugcacu

SEQ ID NO: 2478894 - RNA, 19 nt, Artificial Sequence
  Description of Artificial Sequence: Synthetic oligonucleotide
cgccaugucgcuuacgagg

SEQ ID NO: 2478895 - RNA, 19 nt, Artificial Sequence
  Description of Artificial Sequence: Synthetic oligonucleotide
aaggccccagugaccgugc

SEQ ID NO: 2478896 - RNA, 19 nt, Artificial Sequence
  Description of Artificial Sequence: Synthetic oligonucleotide
gagacauaagcagguuuga

SEQ ID NO: 2478897 - RNA, 19 nt, Artificial Sequence
  Description of Artificial Sequence: Synthetic oligonucleotide
uccacgcccugcucacugg

SEQ ID NO: 2478898 - RNA, 19 nt, Artificial Sequence
  Description of Artificial Sequence: Synthetic oligonucleotide
ggcaacaugagcucaugaa

SEQ ID NO: 2478899 - RNA, 19 nt, Artificial Sequence
  Description of Artificial Sequence: Synthetic oligonucleotide
gaccacccggcuucggagc

SEQ ID NO: 2478900 - RNA, 19 nt, Artificial Sequence
  Description of Artificial Sequence: Synthetic oligonucleotide
uauccccaugaauguaguc

SEQ ID NO: 2478901 - RNA, 19 nt, Artificial Sequence
  Description of Artificial Sequence: Synthetic oligonucleotide
gccaugucgcuuacgaggg

SEQ ID NO: 2478902 - RNA, 19 nt, Artificial Sequence
  Description of Artificial Sequence: Synthetic oligonucleotide
agccagggaguaguccacc

SEQ ID NO: 2478903 - RNA, 19 nt, Artificial Sequence
  Description of Artificial Sequence: Synthetic oligonucleotide
ccucuuaaaccuuuccauc

SEQ ID NO: 2478904 - RNA, 19 nt, Artificial Sequence
  Description of Artificial Sequence: Synthetic oligonucleotide
accauguaauuagaagaaa

SEQ ID NO: 2478905 - RNA, 19 nt, Artificial Sequence
  Description of Artificial Sequence: Synthetic oligonucleotide
gagccuaacuccucuuaaa

SEQ ID NO: 2478906 - RNA, 19 nt, Artificial Sequence
  Description of Artificial Sequence: Synthetic oligonucleotide
gagaaacgcugagacauaa

SEQ ID NO: 2478907 - RNA, 19 nt, Artificial Sequence
  Description of Artificial Sequence: Synthetic oligonucleotide
cucucacuaguccaaugga

SEQ ID NO: 2478908 - RNA, 19 nt, Artificial Sequence
  Description of Artificial Sequence: Synthetic oligonucleotide
ucgcuuacgagggcucaag

SEQ ID NO: 2478909 - RNA, 19 nt, Artificial Sequence
  Description of Artificial Sequence: Synthetic oligonucleotide
uaguugagccuaacuccuc

SEQ ID NO: 2478910 - RNA, 19 nt, Artificial Sequence
  Description of Artificial Sequence: Synthetic oligonucleotide
agaaacgcugagacauaag

SEQ ID NO: 2478911 - RNA, 19 nt, Artificial Sequence
  Description of Artificial Sequence: Synthetic oligonucleotide
gaagaaauucugacaccaa

SEQ ID NO: 2478912 - RNA, 19 nt, Artificial Sequence
  Description of Artificial Sequence: Synthetic oligonucleotide
cagcauggcaacugcucug

SEQ ID NO: 2478913 - RNA, 19 nt, Artificial Sequence
  Description of Artificial Sequence: Synthetic oligonucleotide
gagaccgccaagaggccug

SEQ ID NO: 2478914 - RNA, 19 nt, Artificial Sequence
  Description of Artificial Sequence: Synthetic oligonucleotide
cagaggucagagcuuccac

SEQ ID NO: 2478915 - RNA, 19 nt, Artificial Sequence
  Description of Artificial Sequence: Synthetic oligonucleotide
ccuaacuccucuuaaaccu

SEQ ID NO: 2478916 - RNA, 19 nt, Artificial Sequence
  Description of Artificial Sequence: Synthetic oligonucleotide
accgccaagaggccugccu

SEQ ID NO: 2478917 - RNA, 19 nt, Artificial Sequence
  Description of Artificial Sequence: Synthetic oligonucleotide
gcagguuugaccacccggc

SEQ ID NO: 2478918 - RNA, 19 nt, Artificial Sequence
  Description of Artificial Sequence: Synthetic oligonucleotide
uucugacaccaauggacuu

SEQ ID NO: 2478919 - RNA, 19 nt, Artificial Sequence
  Description of Artificial Sequence: Synthetic oligonucleotide
ugcagaggucagagcuucc

SEQ ID NO: 2478920 - RNA, 19 nt, Artificial Sequence
  Description of Artificial Sequence: Synthetic oligonucleotide
ugagaccgccaagaggccu

SEQ ID NO: 2478921 - RNA, 19 nt, Artificial Sequence
  Description of Artificial Sequence: Synthetic oligonucleotide
aguccaauggagagaugca

SEQ ID NO: 2478922 - RNA, 19 nt, Artificial Sequence
  Description of Artificial Sequence: Synthetic oligonucleotide
gccuucuucgauauauccc

SEQ ID NO: 2478923 - RNA, 19 nt, Artificial Sequence
  Description of Artificial Sequence: Synthetic oligonucleotide
aagcccagcaaaggucaga

SEQ ID NO: 2478924 - RNA, 19 nt, Artificial Sequence
  Description of Artificial Sequence: Synthetic oligonucleotide
ugcugugugccaugccauc

SEQ ID NO: 2478925 - RNA, 19 nt, Artificial Sequence
  Description of Artificial Sequence: Synthetic oligonucleotide
cuucuucgauauaucccca

SEQ ID NO: 2478926 - RNA, 19 nt, Artificial Sequence
  Description of Artificial Sequence: Synthetic oligonucleotide
agagaaccgccaugucgcu

SEQ ID NO: 2478927 - RNA, 19 nt, Artificial Sequence
  Description of Artificial Sequence: Synthetic oligonucleotide
gugguaguugaaauagcaa

SEQ ID NO: 2478928 - RNA, 19 nt, Artificial Sequence
  Description of Artificial Sequence: Synthetic oligonucleotide
caucgugguaguugaaaua

SEQ ID NO: 2478929 - RNA, 19 nt, Artificial Sequence
  Description of Artificial Sequence: Synthetic oligonucleotide
ugucgcuuacgagggcuca

SEQ ID NO: 2478930 - RNA, 19 nt, Artificial Sequence
  Description of Artificial Sequence: Synthetic oligonucleotide
gaccgugcagggugagggc

SEQ ID NO: 2478931 - RNA, 19 nt, Artificial Sequence
  Description of Artificial Sequence: Synthetic oligonucleotide
cugagaccgccaagaggcc

SEQ ID NO: 2478932 - RNA, 19 nt, Artificial Sequence
  Description of Artificial Sequence: Synthetic oligonucleotide
cacugugagucuuggcaca

SEQ ID NO: 2478933 - RNA, 19 nt, Artificial Sequence
  Description of Artificial Sequence: Synthetic oligonucleotide
agguuugaccacccggcuu

SEQ ID NO: 2478934 - RNA, 19 nt, Artificial Sequence
  Description of Artificial Sequence: Synthetic oligonucleotide
auauccccaugaauguagu

SEQ ID NO: 2478935 - RNA, 19 nt, Artificial Sequence
  Description of Artificial Sequence: Synthetic oligonucleotide
ggauucagguacccagcug

SEQ ID NO: 2478936 - RNA, 19 nt, Artificial Sequence
  Description of Artificial Sequence: Synthetic oligonucleotide
caccauacucaggaauaug

SEQ ID NO: 2478937 - RNA, 19 nt, Artificial Sequence
  Description of Artificial Sequence: Synthetic oligonucleotide
accuuuccaucaacaaaug

SEQ ID NO: 2478938 - RNA, 19 nt, Artificial Sequence
  Description of Artificial Sequence: Synthetic oligonucleotide
cagaggcaaaguggcauac

SEQ ID NO: 2478939 - RNA, 19 nt, Artificial Sequence
  Description of Artificial Sequence: Synthetic oligonucleotide
acccagacucagcacuagu

SEQ ID NO: 2478940 - RNA, 19 nt, Artificial Sequence
  Description of Artificial Sequence: Synthetic oligonucleotide
gguagcuuggugacaggug

SEQ ID NO: 2478941 - RNA, 19 nt, Artificial Sequence
  Description of Artificial Sequence: Synthetic oligonucleotide
cuccacgcccugcucacug

SEQ ID NO: 2478942 - RNA, 19 nt, Artificial Sequence
  Description of Artificial Sequence: Synthetic oligonucleotide
caacugcucugcagaugcc

SEQ ID NO: 2478943 - RNA, 19 nt, Artificial Sequence
  Description of Artificial Sequence: Synthetic oligonucleotide
auguagucagucaccacuu

SEQ ID NO: 2478944 - RNA, 19 nt, Artificial Sequence
  Description of Artificial Sequence: Synthetic oligonucleotide
cagagcugagaccgccaag

SEQ ID NO: 2478945 - RNA, 19 nt, Artificial Sequence
  Description of Artificial Sequence: Synthetic oligonucleotide
augucgcuuacgagggcuc

SEQ ID NO: 2478946 - RNA, 19 nt, Artificial Sequence
  Description of Artificial Sequence: Synthetic oligonucleotide
agaccgccaagaggccugc

SEQ ID NO: 2478947 - RNA, 19 nt, Artificial Sequence
  Description of Artificial Sequence: Synthetic oligonucleotide
gaaugguagcuuggugaca

SEQ ID NO: 2478948 - RNA, 19 nt, Artificial Sequence
  Description of Artificial Sequence: Synthetic oligonucleotide
uucagguacccagcuggaa

SEQ ID NO: 2478949 - RNA, 19 nt, Artificial Sequence
  Description of Artificial Sequence: Synthetic oligonucleotide
cgugguaguugaaauagca

SEQ ID NO: 2478950 - RNA, 19 nt, Artificial Sequence
  Description of Artificial Sequence: Synthetic oligonucleotide
gccauccugggguaggcug

SEQ ID NO: 2478951 - RNA, 19 nt, Artificial Sequence
  Description of Artificial Sequence: Synthetic oligonucleotide
caggaauauggaacccaga

SEQ ID NO: 2478952 - RNA, 19 nt, Artificial Sequence
  Description of Artificial Sequence: Synthetic oligonucleotide
gcuucggagcaacagagcu

SEQ ID NO: 2478953 - RNA, 19 nt, Artificial Sequence
  Description of Artificial Sequence: Synthetic oligonucleotide
ucggagcaacagagcucgg

SEQ ID NO: 2478954 - RNA, 19 nt, Artificial Sequence
  Description of Artificial Sequence: Synthetic oligonucleotide
cucagcacuaguugagccu

SEQ ID NO: 2478955 - RNA, 19 nt, Artificial Sequence
  Description of Artificial Sequence: Synthetic oligonucleotide
caggcccaagagcaaaaca

SEQ ID NO: 2478956 - RNA, 19 nt, Artificial Sequence
  Description of Artificial Sequence: Synthetic oligonucleotide
accacccggcuucggagca

SEQ ID NO: 2478957 - RNA, 19 nt, Artificial Sequence
  Description of Artificial Sequence: Synthetic oligonucleotide
ggcacaggcaaccaccaua

SEQ ID NO: 2478958 - RNA, 19 nt, Artificial Sequence
  Description of Artificial Sequence: Synthetic oligonucleotide
cacaucgugguaguugaaa

SEQ ID NO: 2478959 - RNA, 19 nt, Artificial Sequence
  Description of Artificial Sequence: Synthetic oligonucleotide
aggucagagcugagaccgc

SEQ ID NO: 2478960 - RNA, 19 nt, Artificial Sequence
  Description of Artificial Sequence: Synthetic oligonucleotide
aaccgccaugucgcuuacg

SEQ ID NO: 2478961 - RNA, 19 nt, Artificial Sequence
  Description of Artificial Sequence: Synthetic oligonucleotide
uggccacugcagaggacuc

SEQ ID NO: 2478962 - RNA, 19 nt, Artificial Sequence
  Description of Artificial Sequence: Synthetic oligonucleotide
cucccagcuuuaagagaac

SEQ ID NO: 2478963 - RNA, 19 nt, Artificial Sequence
  Description of Artificial Sequence: Synthetic oligonucleotide
cccagcaaaggucagagcu

SEQ ID NO: 2478964 - RNA, 19 nt, Artificial Sequence
  Description of Artificial Sequence: Synthetic oligonucleotide
ggucagagcugagaccgcc

SEQ ID NO: 2478965 - RNA, 19 nt, Artificial Sequence
  Description of Artificial Sequence: Synthetic oligonucleotide
ccauacucaggaauaugga

SEQ ID NO: 2478966 - RNA, 19 nt, Artificial Sequence
  Description of Artificial Sequence: Synthetic oligonucleotide
ccaugaauguagucaguca

SEQ ID NO: 2478967 - RNA, 19 nt, Artificial Sequence
  Description of Artificial Sequence: Synthetic oligonucleotide
gcugguccuggagaaacgc

SEQ ID NO: 2478968 - RNA, 19 nt, Artificial Sequence
  Description of Artificial Sequence: Synthetic oligonucleotide
cuugacagccuucuucgau

SEQ ID NO: 2478969 - RNA, 19 nt, Artificial Sequence
  Description of Artificial Sequence: Synthetic oligonucleotide
cagagcagggauucaggua

SEQ ID NO: 2478970 - RNA, 19 nt, Artificial Sequence
  Description of Artificial Sequence: Synthetic oligonucleotide
gcaaaggucagagcugaga

SEQ ID NO: 2478971 - RNA, 19 nt, Artificial Sequence
  Description of Artificial Sequence: Synthetic oligonucleotide
guaguccaccacagagcag

SEQ ID NO: 2478972 - RNA, 19 nt, Artificial Sequence
  Description of Artificial Sequence: Synthetic oligonucleotide
gugaccgugcagggugagg

SEQ ID NO: 2478973 - RNA, 19 nt, Artificial Sequence
  Description of Artificial Sequence: Synthetic oligonucleotide
ggagagaugcagccuugga

SEQ ID NO: 2478974 - RNA, 19 nt, Artificial Sequence
  Description of Artificial Sequence: Synthetic oligonucleotide
agugaccgugcagggugag

SEQ ID NO: 2478975 - RNA, 19 nt, Artificial Sequence
  Description of Artificial Sequence: Synthetic oligonucleotide
cucugcagaugcccacauc

SEQ ID NO: 2478976 - RNA, 19 nt, Artificial Sequence
  Description of Artificial Sequence: Synthetic oligonucleotide
gaaccgccaugucgcuuac

SEQ ID NO: 2478977 - RNA, 19 nt, Artificial Sequence
  Description of Artificial Sequence: Synthetic oligonucleotide
cggcuucggagcaacagag

SEQ ID NO: 2478978 - RNA, 19 nt, Artificial Sequence
  Description of Artificial Sequence: Synthetic oligonucleotide
cugcucaggaaaugguagu

SEQ ID NO: 2478979 - RNA, 19 nt, Artificial Sequence
  Description of Artificial Sequence: Synthetic oligonucleotide
gcuuacgagggcucaaggu

SEQ ID NO: 2478980 - RNA, 19 nt, Artificial Sequence
  Description of Artificial Sequence: Synthetic oligonucleotide
gcccacaucgugguaguug

SEQ ID NO: 2478981 - RNA, 19 nt, Artificial Sequence
  Description of Artificial Sequence: Synthetic oligonucleotide
gacagcccucucacuaguc

SEQ ID NO: 2478982 - RNA, 19 nt, Artificial Sequence
  Description of Artificial Sequence: Synthetic oligonucleotide
agcaaaggucagagcugag

SEQ ID NO: 2478983 - RNA, 19 nt, Artificial Sequence
  Description of Artificial Sequence: Synthetic oligonucleotide
guccaaggccccagugacc

SEQ ID NO: 2478984 - RNA, 19 nt, Artificial Sequence
  Description of Artificial Sequence: Synthetic oligonucleotide
ggcaaccaccauacucagg

SEQ ID NO: 2478985 - RNA, 19 nt, Artificial Sequence
  Description of Artificial Sequence: Synthetic oligonucleotide
ugccauccugggguaggcu

SEQ ID NO: 2478986 - RNA, 19 nt, Artificial Sequence
  Description of Artificial Sequence: Synthetic oligonucleotide
cugacaccaauggacuucu

SEQ ID NO: 2478987 - RNA, 19 nt, Artificial Sequence
  Description of Artificial Sequence: Synthetic oligonucleotide
agaggacucccagcuuuaa

SEQ ID NO: 2478988 - RNA, 19 nt, Artificial Sequence
  Description of Artificial Sequence: Synthetic oligonucleotide
gcuuuaagagaaccgccau

SEQ ID NO: 2478989 - RNA, 19 nt, Artificial Sequence
  Description of Artificial Sequence: Synthetic oligonucleotide
ccagggaguaguccaccac

SEQ ID NO: 2478990 - RNA, 19 nt, Artificial Sequence
  Description of Artificial Sequence: Synthetic oligonucleotide
gggaguaguccaccacaga

SEQ ID NO: 2478991 - RNA, 19 nt, Artificial Sequence
  Description of Artificial Sequence: Synthetic oligonucleotide
caaccaccauacucaggaa

SEQ ID NO: 2478992 - RNA, 19 nt, Artificial Sequence
  Description of Artificial Sequence: Synthetic oligonucleotide
ggcuucggagcaacagagc

SEQ ID NO: 2478993 - RNA, 19 nt, Artificial Sequence
  Description of Artificial Sequence: Synthetic oligonucleotide
gggauucagguacccagcu

SEQ ID NO: 2478994 - RNA, 19 nt, Artificial Sequence
  Description of Artificial Sequence: Synthetic oligonucleotide
agcccucucacuaguccaa

SEQ ID NO: 2478995 - RNA, 19 nt, Artificial Sequence
  Description of Artificial Sequence: Synthetic oligonucleotide
cagugaccgugcaggguga

SEQ ID NO: 2478996 - RNA, 19 nt, Artificial Sequence
  Description of Artificial Sequence: Synthetic oligonucleotide
ccuuggaaccagaauggua

SEQ ID NO: 2478997 - RNA, 19 nt, Artificial Sequence
  Description of Artificial Sequence: Synthetic oligonucleotide
cagcagccagggaguaguc

SEQ ID NO: 2478998 - RNA, 19 nt, Artificial Sequence
  Description of Artificial Sequence: Synthetic oligonucleotide
cgcuuacgagggcucaagg

SEQ ID NO: 2478999 - RNA, 19 nt, Artificial Sequence
  Description of Artificial Sequence: Synthetic oligonucleotide
ucuccacgcccugcucacu

SEQ ID NO: 2479000 - RNA, 19 nt, Artificial Sequence
  Description of Artificial Sequence: Synthetic oligonucleotide
guugagccuaacuccucuu

SEQ ID NO: 2479001 - RNA, 19 nt, Artificial Sequence
  Description of Artificial Sequence: Synthetic oligonucleotide
ccacgcccugcucacuggg

SEQ ID NO: 2479002 - RNA, 19 nt, Artificial Sequence
  Description of Artificial Sequence: Synthetic oligonucleotide
cccucucacuaguccaaug

SEQ ID NO: 2479003 - RNA, 19 nt, Artificial Sequence
  Description of Artificial Sequence: Synthetic oligonucleotide
cacccggcuucggagcaac

SEQ ID NO: 2479004 - RNA, 19 nt, Artificial Sequence
  Description of Artificial Sequence: Synthetic oligonucleotide
gcacuaguugagccuaacu

SEQ ID NO: 2479005 - RNA, 19 nt, Artificial Sequence
  Description of Artificial Sequence: Synthetic oligonucleotide
gacagccuucuucgauaua

SEQ ID NO: 2479006 - RNA, 19 nt, Artificial Sequence
  Description of Artificial Sequence: Synthetic oligonucleotide
cacgcccugcucacuggga

SEQ ID NO: 2479007 - RNA, 19 nt, Artificial Sequence
  Description of Artificial Sequence: Synthetic oligonucleotide
cccggcuucggagcaacag

SEQ ID NO: 2479008 - RNA, 19 nt, Artificial Sequence
  Description of Artificial Sequence: Synthetic oligonucleotide
gcaggcccaagagcaaaac

SEQ ID NO: 2479009 - RNA, 19 nt, Artificial Sequence
  Description of Artificial Sequence: Synthetic oligonucleotide
ggccacugcagaggacucc

SEQ ID NO: 2479010 - RNA, 19 nt, Artificial Sequence
  Description of Artificial Sequence: Synthetic oligonucleotide
cagguuugaccacccggcu

SEQ ID NO: 2479011 - RNA, 19 nt, Artificial Sequence
  Description of Artificial Sequence: Synthetic oligonucleotide
aggccccagugaccgugca

SEQ ID NO: 2479012 - RNA, 19 nt, Artificial Sequence
  Description of Artificial Sequence: Synthetic oligonucleotide
ccgccaugucgcuuacgag

SEQ ID NO: 2479013 - RNA, 19 nt, Artificial Sequence
  Description of Artificial Sequence: Synthetic oligonucleotide
ccggcuucggagcaacaga

SEQ ID NO: 2479014 - RNA, 19 nt, Artificial Sequence
  Description of Artificial Sequence: Synthetic oligonucleotide
cugggagcugaacggcaua

SEQ ID NO: 2479015 - RNA, 19 nt, Artificial Sequence
  Description of Artificial Sequence: Synthetic oligonucleotide
gucgcuuacgagggcucaa

SEQ ID NO: 2479016 - RNA, 19 nt, Artificial Sequence
  Description of Artificial Sequence: Synthetic oligonucleotide
cggagcaacagagcucggc

SEQ ID NO: 2479017 - RNA, 19 nt, Artificial Sequence
  Description of Artificial Sequence: Synthetic oligonucleotide
ccaugucgcuuacgagggc

SEQ ID NO: 2479018 - RNA, 19 nt, Artificial Sequence
  Description of Artificial Sequence: Synthetic oligonucleotide
gcagggauucagguaccca

SEQ ID NO: 2479019 - RNA, 19 nt, Artificial Sequence
  Description of Artificial Sequence: Synthetic oligonucleotide
guccaccacagagcaggga

SEQ ID NO: 2479020 - RNA, 19 nt, Artificial Sequence
  Description of Artificial Sequence: Synthetic oligonucleotide
cagcacuaguugagccuaa

SEQ ID NO: 2479021 - RNA, 19 nt, Artificial Sequence
  Description of Artificial Sequence: Synthetic oligonucleotide
ggagaaacgcugagacaua

SEQ ID NO: 2479022 - RNA, 19 nt, Artificial Sequence
  Description of Artificial Sequence: Synthetic oligonucleotide
guguugcacugcagagguc

SEQ ID NO: 2479023 - RNA, 19 nt, Artificial Sequence
  Description of Artificial Sequence: Synthetic oligonucleotide
acgagggcucaaggucgcu

SEQ ID NO: 2479024 - RNA, 19 nt, Artificial Sequence
  Description of Artificial Sequence: Synthetic oligonucleotide
gagaaccgccaugucgcuu

SEQ ID NO: 2479025 - RNA, 19 nt, Artificial Sequence
  Description of Artificial Sequence: Synthetic oligonucleotide
ccaugccauccugggguag

SEQ ID NO: 2479026 - RNA, 19 nt, Artificial Sequence
  Description of Artificial Sequence: Synthetic oligonucleotide
cccagacucagcacuaguu

SEQ ID NO: 2479027 - RNA, 19 nt, Artificial Sequence
  Description of Artificial Sequence: Synthetic oligonucleotide
gcugaacggcauagacaga

SEQ ID NO: 2479028 - RNA, 19 nt, Artificial Sequence
  Description of Artificial Sequence: Synthetic oligonucleotide
cacaggcaaccaccauacu

SEQ ID NO: 2479029 - RNA, 19 nt, Artificial Sequence
  Description of Artificial Sequence: Synthetic oligonucleotide
gcauacaauccaagguguu

SEQ ID NO: 2479030 - RNA, 19 nt, Artificial Sequence
  Description of Artificial Sequence: Synthetic oligonucleotide
cgugcagggugagggcagc

SEQ ID NO: 2479031 - RNA, 19 nt, Artificial Sequence
  Description of Artificial Sequence: Synthetic oligonucleotide
ccacaucgugguaguugaa

SEQ ID NO: 2479032 - RNA, 19 nt, Artificial Sequence
  Description of Artificial Sequence: Synthetic oligonucleotide
ccaccauacucaggaauau

SEQ ID NO: 2479033 - RNA, 19 nt, Artificial Sequence
  Description of Artificial Sequence: Synthetic oligonucleotide
ccccaugaauguagucagu

SEQ ID NO: 2479034 - RNA, 19 nt, Artificial Sequence
  Description of Artificial Sequence: Synthetic oligonucleotide
gcccucucacuaguccaau

SEQ ID NO: 2479035 - RNA, 19 nt, Artificial Sequence
  Description of Artificial Sequence: Synthetic oligonucleotide
ccacccggcuucggagcaa

SEQ ID NO: 2479036 - RNA, 19 nt, Artificial Sequence
  Description of Artificial Sequence: Synthetic oligonucleotide
aaagcuucaagacacgggc

SEQ ID NO: 2479037 - RNA, 19 nt, Artificial Sequence
  Description of Artificial Sequence: Synthetic oligonucleotide
cuuuguauucgucagaugg

SEQ ID NO: 2479038 - RNA, 19 nt, Artificial Sequence
  Description of Artificial Sequence: Synthetic oligonucleotide
agucccauaucuuagaguc

SEQ ID NO: 2479039 - RNA, 19 nt, Artificial Sequence
  Description of Artificial Sequence: Synthetic oligonucleotide
uucguagucagauagcagg

SEQ ID NO: 2479040 - RNA, 19 nt, Artificial Sequence
  Description of Artificial Sequence: Synthetic oligonucleotide
uuuguagaaacaaaguccu

SEQ ID NO: 2479041 - RNA, 19 nt, Artificial Sequence
  Description of Artificial Sequence: Synthetic oligonucleotide
guuaaaguugcuuuguucc

SEQ ID NO: 2479042 - RNA, 19 nt, Artificial Sequence
  Description of Artificial Sequence: Synthetic oligonucleotide
aagauaaagagguacuugu

SEQ ID NO: 2479043 - RNA, 19 nt, Artificial Sequence
  Description of Artificial Sequence: Synthetic oligonucleotide
ucccacauguauuugaugg

SEQ ID NO: 2479044 - RNA, 19 nt, Artificial Sequence
  Description of Artificial Sequence: Synthetic oligonucleotide
uuugccaaagaacauccgg

SEQ ID NO: 2479045 - RNA, 19 nt, Artificial Sequence
  Description of Artificial Sequence: Synthetic oligonucleotide
gauaaagagguacuuguag

SEQ ID NO: 2479046 - RNA, 19 nt, Artificial Sequence
  Description of Artificial Sequence: Synthetic oligonucleotide
auaaagagguacuuguagg

SEQ ID NO: 2479047 - RNA, 19 nt, Artificial Sequence
  Description of Artificial Sequence: Synthetic oligonucleotide
auaucuuagagucagcugu

SEQ ID NO: 2479048 - RNA, 19 nt, Artificial Sequence
  Description of Artificial Sequence: Synthetic oligonucleotide
ucuuuguagaaacaaaguc

SEQ ID NO: 2479049 - RNA, 19 nt, Artificial Sequence
  Description of Artificial Sequence: Synthetic oligonucleotide
aauuuuauucuuuguagaa

SEQ ID NO: 2479050 - RNA, 19 nt, Artificial Sequence
  Description of Artificial Sequence: Synthetic oligonucleotide
ugugcuuccaggcauuccg

SEQ ID NO: 2479051 - RNA, 19 nt, Artificial Sequence
  Description of Artificial Sequence: Synthetic oligonucleotide
aacuucaccucucaacuuc

SEQ ID NO: 2479052 - RNA, 19 nt, Artificial Sequence
  Description of Artificial Sequence: Synthetic oligonucleotide
uuuguauucgucagauggg

SEQ ID NO: 2479053 - RNA, 19 nt, Artificial Sequence
  Description of Artificial Sequence: Synthetic oligonucleotide
agagaagauaaagagguac

SEQ ID NO: 2479054 - RNA, 19 nt, Artificial Sequence
  Description of Artificial Sequence: Synthetic oligonucleotide
aaaauccauuucuguauac

SEQ ID NO: 2479055 - RNA, 19 nt, Artificial Sequence
  Description of Artificial Sequence: Synthetic oligonucleotide
augggcuucgaccuaaggc

SEQ ID NO: 2479056 - RNA, 19 nt, Artificial Sequence
  Description of Artificial Sequence: Synthetic oligonucleotide
uguagaaacaaaguccugc

SEQ ID NO: 2479057 - RNA, 19 nt, Artificial Sequence
  Description of Artificial Sequence: Synthetic oligonucleotide
aguuaaaguugcuuuguuc

SEQ ID NO: 2479058 - RNA, 19 nt, Artificial Sequence
  Description of Artificial Sequence: Synthetic oligonucleotide
ucuguauacuuugugaacc

SEQ ID NO: 2479059 - RNA, 19 nt, Artificial Sequence
  Description of Artificial Sequence: Synthetic oligonucleotide
aguuccaagccuuucuugg

SEQ ID NO: 2479060 - RNA, 19 nt, Artificial Sequence
  Description of Artificial Sequence: Synthetic oligonucleotide
uuagagucagcugucaucc

SEQ ID NO: 2479061 - RNA, 19 nt, Artificial Sequence
  Description of Artificial Sequence: Synthetic oligonucleotide
auuucuguauacuuuguga

SEQ ID NO: 2479062 - RNA, 19 nt, Artificial Sequence
  Description of Artificial Sequence: Synthetic oligonucleotide
auucagccaucucauaccc

SEQ ID NO: 2479063 - RNA, 19 nt, Artificial Sequence
  Description of Artificial Sequence: Synthetic oligonucleotide
cuuucuuaagggcaguggg

SEQ ID NO: 2479064 - RNA, 19 nt, Artificial Sequence
  Description of Artificial Sequence: Synthetic oligonucleotide
ucgagcaaaauccauuucu

SEQ ID NO: 2479065 - RNA, 19 nt, Artificial Sequence
  Description of Artificial Sequence: Synthetic oligonucleotide
uaggucaucguccaucugc

SEQ ID NO: 2479066 - RNA, 19 nt, Artificial Sequence
  Description of Artificial Sequence: Synthetic oligonucleotide
uagguguccacacauuucc

SEQ ID NO: 2479067 - RNA, 19 nt, Artificial Sequence
  Description of Artificial Sequence: Synthetic oligonucleotide
uacuuugugaaccacucgu

SEQ ID NO: 2479068 - RNA, 19 nt, Artificial Sequence
  Description of Artificial Sequence: Synthetic oligonucleotide
uauacuuugugaaccacuc

SEQ ID NO: 2479069 - RNA, 19 nt, Artificial Sequence
  Description of Artificial Sequence: Synthetic oligonucleotide
uccauuucuguauacuuug

SEQ ID NO: 2479070 - RNA, 19 nt, Artificial Sequence
  Description of Artificial Sequence: Synthetic oligonucleotide
uauuugauggucacuuuga

SEQ ID NO: 2479071 - RNA, 19 nt, Artificial Sequence
  Description of Artificial Sequence: Synthetic oligonucleotide
aacaaaguccugccccagc

SEQ ID NO: 2479072 - RNA, 19 nt, Artificial Sequence
  Description of Artificial Sequence: Synthetic oligonucleotide
acacuucguagucagauag

SEQ ID NO: 2479073 - RNA, 19 nt, Artificial Sequence
  Description of Artificial Sequence: Synthetic oligonucleotide
uugcuuuguucccagcucg

SEQ ID NO: 2479074 - RNA, 19 nt, Artificial Sequence
  Description of Artificial Sequence: Synthetic oligonucleotide
aaaagcuucaagacacggg

SEQ ID NO: 2479075 - RNA, 19 nt, Artificial Sequence
  Description of Artificial Sequence: Synthetic oligonucleotide
ugucaaggaaacuuucuug

SEQ ID NO: 2479076 - RNA, 19 nt, Artificial Sequence
  Description of Artificial Sequence: Synthetic oligonucleotide
uugccaaagaacauccggc

SEQ ID NO: 2479077 - RNA, 19 nt, Artificial Sequence
  Description of Artificial Sequence: Synthetic oligonucleotide
uaaagagguacuuguaggu

SEQ ID NO: 2479078 - RNA, 19 nt, Artificial Sequence
  Description of Artificial Sequence: Synthetic oligonucleotide
cucagaaucucccucagac

SEQ ID NO: 2479079 - RNA, 19 nt, Artificial Sequence
  Description of Artificial Sequence: Synthetic oligonucleotide
ucacuuugaauucagccau

SEQ ID NO: 2479080 - RNA, 19 nt, Artificial Sequence
  Description of Artificial Sequence: Synthetic oligonucleotide
uuagucccauaucuuagag

SEQ ID NO: 2479081 - RNA, 19 nt, Artificial Sequence
  Description of Artificial Sequence: Synthetic oligonucleotide
aaggagcccaacuucaccu

SEQ ID NO: 2479082 - RNA, 19 nt, Artificial Sequence
  Description of Artificial Sequence: Synthetic oligonucleotide
ucguagucagauagcaggg

SEQ ID NO: 2479083 - RNA, 19 nt, Artificial Sequence
  Description of Artificial Sequence: Synthetic oligonucleotide
aggucuuagucccauaucu

SEQ ID NO: 2479084 - RNA, 19 nt, Artificial Sequence
  Description of Artificial Sequence: Synthetic oligonucleotide
uuucuuaagggcagugggc

SEQ ID NO: 2479085 - RNA, 19 nt, Artificial Sequence
  Description of Artificial Sequence: Synthetic oligonucleotide
guagaaacaaaguccugcc

SEQ ID NO: 2479086 - RNA, 19 nt, Artificial Sequence
  Description of Artificial Sequence: Synthetic oligonucleotide
ucagauagcagggucacca

SEQ ID NO: 2479087 - RNA, 19 nt, Artificial Sequence
  Description of Artificial Sequence: Synthetic oligonucleotide
ucaccucucaacuucuugc

SEQ ID NO: 2479088 - RNA, 19 nt, Artificial Sequence
  Description of Artificial Sequence: Synthetic oligonucleotide
aaggucuuagucccauauc

SEQ ID NO: 2479089 - RNA, 19 nt, Artificial Sequence
  Description of Artificial Sequence: Synthetic oligonucleotide
uugaauucagccaucucau

SEQ ID NO: 2479090 - RNA, 19 nt, Artificial Sequence
  Description of Artificial Sequence: Synthetic oligonucleotide
gaagauaaagagguacuug

SEQ ID NO: 2479091 - RNA, 19 nt, Artificial Sequence
  Description of Artificial Sequence: Synthetic oligonucleotide
ugcuggaaggucuuagucc

SEQ ID NO: 2479092 - RNA, 19 nt, Artificial Sequence
  Description of Artificial Sequence: Synthetic oligonucleotide
ucugcuggaaccuucccga

SEQ ID NO: 2479093 - RNA, 19 nt, Artificial Sequence
  Description of Artificial Sequence: Synthetic oligonucleotide
guauuugauggucacuuug

SEQ ID NO: 2479094 - RNA, 19 nt, Artificial Sequence
  Description of Artificial Sequence: Synthetic oligonucleotide
cuugcuguuccucauguug

SEQ ID NO: 2479095 - RNA, 19 nt, Artificial Sequence
  Description of Artificial Sequence: Synthetic oligonucleotide
cauggaaugagggaacugc

SEQ ID NO: 2479096 - RNA, 19 nt, Artificial Sequence
  Description of Artificial Sequence: Synthetic oligonucleotide
ugcgcucucagguagguca

SEQ ID NO: 2479097 - RNA, 19 nt, Artificial Sequence
  Description of Artificial Sequence: Synthetic oligonucleotide
aagccuagcugccucagcu

SEQ ID NO: 2479098 - RNA, 19 nt, Artificial Sequence
  Description of Artificial Sequence: Synthetic oligonucleotide
auuccggauguccuuuagc

SEQ ID NO: 2479099 - RNA, 19 nt, Artificial Sequence
  Description of Artificial Sequence: Synthetic oligonucleotide
ucccauaucuuagagucag

SEQ ID NO: 2479100 - RNA, 19 nt, Artificial Sequence
  Description of Artificial Sequence: Synthetic oligonucleotide
aaagagguacuuguaggug

SEQ ID NO: 2479101 - RNA, 19 nt, Artificial Sequence
  Description of Artificial Sequence: Synthetic oligonucleotide
cucagguaggucaucgucc

SEQ ID NO: 2479102 - RNA, 19 nt, Artificial Sequence
  Description of Artificial Sequence: Synthetic oligonucleotide
uuccggauguccuuuagcu

SEQ ID NO: 2479103 - RNA, 19 nt, Artificial Sequence
  Description of Artificial Sequence: Synthetic oligonucleotide
agagucagcugucauccuc

SEQ ID NO: 2479104 - RNA, 19 nt, Artificial Sequence
  Description of Artificial Sequence: Synthetic oligonucleotide
cagaaucucccucagacuc

SEQ ID NO: 2479105 - RNA, 19 nt, Artificial Sequence
  Description of Artificial Sequence: Synthetic oligonucleotide
uagucagauagcaggguca

SEQ ID NO: 2479106 - RNA, 19 nt, Artificial Sequence
  Description of Artificial Sequence: Synthetic oligonucleotide
uucuaucagguucuguuuc

SEQ ID NO: 2479107 - RNA, 19 nt, Artificial Sequence
  Description of Artificial Sequence: Synthetic oligonucleotide
aucugcuggaaccuucccg

SEQ ID NO: 2479108 - RNA, 19 nt, Artificial Sequence
  Description of Artificial Sequence: Synthetic oligonucleotide
agcaaaauccauuucugua

SEQ ID NO: 2479109 - RNA, 19 nt, Artificial Sequence
  Description of Artificial Sequence: Synthetic oligonucleotide
auacuuugugaaccacucg

SEQ ID NO: 2479110 - RNA, 19 nt, Artificial Sequence
  Description of Artificial Sequence: Synthetic oligonucleotide
aaaaggagcccaacuucac

SEQ ID NO: 2479111 - RNA, 19 nt, Artificial Sequence
  Description of Artificial Sequence: Synthetic oligonucleotide
ggucacuuugaauucagcc

SEQ ID NO: 2479112 - RNA, 19 nt, Artificial Sequence
  Description of Artificial Sequence: Synthetic oligonucleotide
uucuuaagggcagugggca

SEQ ID NO: 2479113 - RNA, 19 nt, Artificial Sequence
  Description of Artificial Sequence: Synthetic oligonucleotide
uuguauucgucagaugggc

SEQ ID NO: 2479114 - RNA, 19 nt, Artificial Sequence
  Description of Artificial Sequence: Synthetic oligonucleotide
cucccucagacucaggugc

SEQ ID NO: 2479115 - RNA, 19 nt, Artificial Sequence
  Description of Artificial Sequence: Synthetic oligonucleotide
cuugcugaccugaugcaag

SEQ ID NO: 2479116 - RNA, 19 nt, Artificial Sequence
  Description of Artificial Sequence: Synthetic oligonucleotide
uugugaaccacucguucac

SEQ ID NO: 2479117 - RNA, 19 nt, Artificial Sequence
  Description of Artificial Sequence: Synthetic oligonucleotide
cauaucuuagagucagcug

SEQ ID NO: 2479118 - RNA, 19 nt, Artificial Sequence
  Description of Artificial Sequence: Synthetic oligonucleotide
ucuggggucagcacauccc

SEQ ID NO: 2479119 - RNA, 19 nt, Artificial Sequence
  Description of Artificial Sequence: Synthetic oligonucleotide
aaugagggaacugcuccag

SEQ ID NO: 2479120 - RNA, 19 nt, Artificial Sequence
  Description of Artificial Sequence: Synthetic oligonucleotide
uuccgaagcucuucuauca

SEQ ID NO: 2479121 - RNA, 19 nt, Artificial Sequence
  Description of Artificial Sequence: Synthetic oligonucleotide
uguagguguccacacauuu

SEQ ID NO: 2479122 - RNA, 19 nt, Artificial Sequence
  Description of Artificial Sequence: Synthetic oligonucleotide
ggaaugagggaacugcucc

SEQ ID NO: 2479123 - RNA, 19 nt, Artificial Sequence
  Description of Artificial Sequence: Synthetic oligonucleotide
uugcacacuucguagucag

SEQ ID NO: 2479124 - RNA, 19 nt, Artificial Sequence
  Description of Artificial Sequence: Synthetic oligonucleotide
aguugcuuuguucccagcu

SEQ ID NO: 2479125 - RNA, 19 nt, Artificial Sequence
  Description of Artificial Sequence: Synthetic oligonucleotide
uccaggcucacaguuaaag

SEQ ID NO: 2479126 - RNA, 19 nt, Artificial Sequence
  Description of Artificial Sequence: Synthetic oligonucleotide
ucguucaccuccuccuucg

SEQ ID NO: 2479127 - RNA, 19 nt, Artificial Sequence
  Description of Artificial Sequence: Synthetic oligonucleotide
aaguugcuuuguucccagc

SEQ ID NO: 2479128 - RNA, 19 nt, Artificial Sequence
  Description of Artificial Sequence: Synthetic oligonucleotide
uugucaaggaaacuuucuu

SEQ ID NO: 2479129 - RNA, 19 nt, Artificial Sequence
  Description of Artificial Sequence: Synthetic oligonucleotide
uucaccucucaacuucuug

SEQ ID NO: 2479130 - RNA, 19 nt, Artificial Sequence
  Description of Artificial Sequence: Synthetic oligonucleotide
uguccacacauuuccgaag

SEQ ID NO: 2479131 - RNA, 19 nt, Artificial Sequence
  Description of Artificial Sequence: Synthetic oligonucleotide
ucagguaggucaucgucca

SEQ ID NO: 2479132 - RNA, 19 nt, Artificial Sequence
  Description of Artificial Sequence: Synthetic oligonucleotide
uguuucaguuccaagccuu

SEQ ID NO: 2479133 - RNA, 19 nt, Artificial Sequence
  Description of Artificial Sequence: Synthetic oligonucleotide
uggcuccauggaaugaggg

SEQ ID NO: 2479134 - RNA, 19 nt, Artificial Sequence
  Description of Artificial Sequence: Synthetic oligonucleotide
uaaaguugcuuuguuccca

SEQ ID NO: 2479135 - RNA, 19 nt, Artificial Sequence
  Description of Artificial Sequence: Synthetic oligonucleotide
auuuccgaagcucuucuau

SEQ ID NO: 2479136 - RNA, 19 nt, Artificial Sequence
  Description of Artificial Sequence: Synthetic oligonucleotide
gauagcagggucaccacac

SEQ ID NO: 2479137 - RNA, 19 nt, Artificial Sequence
  Description of Artificial Sequence: Synthetic oligonucleotide
aaguugucuuuguauucgu

SEQ ID NO: 2479138 - RNA, 19 nt, Artificial Sequence
  Description of Artificial Sequence: Synthetic oligonucleotide
ugccaaagaacauccggcu

SEQ ID NO: 2479139 - RNA, 19 nt, Artificial Sequence
  Description of Artificial Sequence: Synthetic oligonucleotide
cccagcucgagcaaaaucc

SEQ ID NO: 2479140 - RNA, 19 nt, Artificial Sequence
  Description of Artificial Sequence: Synthetic oligonucleotide
uguauucgucagaugggcu

SEQ ID NO: 2479141 - RNA, 19 nt, Artificial Sequence
  Description of Artificial Sequence: Synthetic oligonucleotide
cuuuguucccagcucgagc

SEQ ID NO: 2479142 - RNA, 19 nt, Artificial Sequence
  Description of Artificial Sequence: Synthetic oligonucleotide
agucagauagcagggucac

SEQ ID NO: 2479143 - RNA, 19 nt, Artificial Sequence
  Description of Artificial Sequence: Synthetic oligonucleotide
aaagaacauccggcugugc

SEQ ID NO: 2479144 - RNA, 19 nt, Artificial Sequence
  Description of Artificial Sequence: Synthetic oligonucleotide
acaaaguccugccccagca

SEQ ID NO: 2479145 - RNA, 19 nt, Artificial Sequence
  Description of Artificial Sequence: Synthetic oligonucleotide
agcuucaagacacgggccu

SEQ ID NO: 2479146 - RNA, 19 nt, Artificial Sequence
  Description of Artificial Sequence: Synthetic oligonucleotide
uuucuugucccgcuuggau

SEQ ID NO: 2479147 - RNA, 19 nt, Artificial Sequence
  Description of Artificial Sequence: Synthetic oligonucleotide
uaucuuagagucagcuguc

SEQ ID NO: 2479148 - RNA, 19 nt, Artificial Sequence
  Description of Artificial Sequence: Synthetic oligonucleotide
acuucguagucagauagca

SEQ ID NO: 2479149 - RNA, 19 nt, Artificial Sequence
  Description of Artificial Sequence: Synthetic oligonucleotide
cacaccuuucuuaagggca

SEQ ID NO: 2479150 - RNA, 19 nt, Artificial Sequence
  Description of Artificial Sequence: Synthetic oligonucleotide
ugauggucacuuugaauuc

SEQ ID NO: 2479151 - RNA, 19 nt, Artificial Sequence
  Description of Artificial Sequence: Synthetic oligonucleotide
uuuccgaagcucuucuauc

SEQ ID NO: 2479152 - RNA, 19 nt, Artificial Sequence
  Description of Artificial Sequence: Synthetic oligonucleotide
guccacacauuuccgaagc

SEQ ID NO: 2479153 - RNA, 19 nt, Artificial Sequence
  Description of Artificial Sequence: Synthetic oligonucleotide
uugcuggaaggucuuaguc

SEQ ID NO: 2479154 - RNA, 19 nt, Artificial Sequence
  Description of Artificial Sequence: Synthetic oligonucleotide
accuaaggccaccaucauc

SEQ ID NO: 2479155 - RNA, 19 nt, Artificial Sequence
  Description of Artificial Sequence: Synthetic oligonucleotide
uuguagaaacaaaguccug

SEQ ID NO: 2479156 - RNA, 19 nt, Artificial Sequence
  Description of Artificial Sequence: Synthetic oligonucleotide
auguauuugauggucacuu

SEQ ID NO: 2479157 - RNA, 19 nt, Artificial Sequence
  Description of Artificial Sequence: Synthetic oligonucleotide
gaaccuucccgacugggca

SEQ ID NO: 2479158 - RNA, 19 nt, Artificial Sequence
  Description of Artificial Sequence: Synthetic oligonucleotide
aacauccggcugugcuucc

SEQ ID NO: 2479159 - RNA, 19 nt, Artificial Sequence
  Description of Artificial Sequence: Synthetic oligonucleotide
cuccuugcacacuucguag

SEQ ID NO: 2479160 - RNA, 19 nt, Artificial Sequence
  Description of Artificial Sequence: Synthetic oligonucleotide
ucuugucccgcuuggauuu

SEQ ID NO: 2479161 - RNA, 19 nt, Artificial Sequence
  Description of Artificial Sequence: Synthetic oligonucleotide
uacuuguagguguccacac

SEQ ID NO: 2479162 - RNA, 19 nt, Artificial Sequence
  Description of Artificial Sequence: Synthetic oligonucleotide
guagucagauagcaggguc

SEQ ID NO: 2479163 - RNA, 19 nt, Artificial Sequence
  Description of Artificial Sequence: Synthetic oligonucleotide
ucgaccuaaggccaccauc

SEQ ID NO: 2479164 - RNA, 19 nt, Artificial Sequence
  Description of Artificial Sequence: Synthetic oligonucleotide
ucccgcuuggauuucggca

SEQ ID NO: 2479165 - RNA, 19 nt, Artificial Sequence
  Description of Artificial Sequence: Synthetic oligonucleotide
agguaggucaucguccauc

SEQ ID NO: 2479166 - RNA, 19 nt, Artificial Sequence
  Description of Artificial Sequence: Synthetic oligonucleotide
cuucguagucagauagcag

SEQ ID NO: 2479167 - RNA, 19 nt, Artificial Sequence
  Description of Artificial Sequence: Synthetic oligonucleotide
gaugggcuucgaccuaagg

SEQ ID NO: 2479168 - RNA, 19 nt, Artificial Sequence
  Description of Artificial Sequence: Synthetic oligonucleotide
acaguuaaaguugcuuugu

SEQ ID NO: 2479169 - RNA, 19 nt, Artificial Sequence
  Description of Artificial Sequence: Synthetic oligonucleotide
uggaaugagggaacugcuc

SEQ ID NO: 2479170 - RNA, 19 nt, Artificial Sequence
  Description of Artificial Sequence: Synthetic oligonucleotide
ucuuagagucagcugucau

SEQ ID NO: 2479171 - RNA, 19 nt, Artificial Sequence
  Description of Artificial Sequence: Synthetic oligonucleotide
ucucccucagacucaggug

SEQ ID NO: 2479172 - RNA, 19 nt, Artificial Sequence
  Description of Artificial Sequence: Synthetic oligonucleotide
uguauacuuugugaaccac

SEQ ID NO: 2479173 - RNA, 19 nt, Artificial Sequence
  Description of Artificial Sequence: Synthetic oligonucleotide
gauccaggcucacaguuaa

SEQ ID NO: 2479174 - RNA, 19 nt, Artificial Sequence
  Description of Artificial Sequence: Synthetic oligonucleotide
uagucccauaucuuagagu

SEQ ID NO: 2479175 - RNA, 19 nt, Artificial Sequence
  Description of Artificial Sequence: Synthetic oligonucleotide
uguuccucauguuggccac

SEQ ID NO: 2479176 - RNA, 19 nt, Artificial Sequence
  Description of Artificial Sequence: Synthetic oligonucleotide
cuuaagggcagugggcaag

SEQ ID NO: 2479177 - RNA, 19 nt, Artificial Sequence
  Description of Artificial Sequence: Synthetic oligonucleotide
gaaucucccucagacucag

SEQ ID NO: 2479178 - RNA, 19 nt, Artificial Sequence
  Description of Artificial Sequence: Synthetic oligonucleotide
uguccuuuagcuugcuguu

SEQ ID NO: 2479179 - RNA, 19 nt, Artificial Sequence
  Description of Artificial Sequence: Synthetic oligonucleotide
ccucauguuggccacagag

SEQ ID NO: 2479180 - RNA, 19 nt, Artificial Sequence
  Description of Artificial Sequence: Synthetic oligonucleotide
agauagcagggucaccaca

SEQ ID NO: 2479181 - RNA, 19 nt, Artificial Sequence
  Description of Artificial Sequence: Synthetic oligonucleotide
ugaugcaaguugucuuugu

SEQ ID NO: 2479182 - RNA, 19 nt, Artificial Sequence
  Description of Artificial Sequence: Synthetic oligonucleotide
augagggaacugcuccagg

SEQ ID NO: 2479183 - RNA, 19 nt, Artificial Sequence
  Description of Artificial Sequence: Synthetic oligonucleotide
aggcucacaguuaaaguug

SEQ ID NO: 2479184 - RNA, 19 nt, Artificial Sequence
  Description of Artificial Sequence: Synthetic oligonucleotide
agcuugcuguuccucaugu

SEQ ID NO: 2479185 - RNA, 19 nt, Artificial Sequence
  Description of Artificial Sequence: Synthetic oligonucleotide
ugcuguuccucauguuggc

SEQ ID NO: 2479186 - RNA, 19 nt, Artificial Sequence
  Description of Artificial Sequence: Synthetic oligonucleotide
acucaggugcgcucucagg

SEQ ID NO: 2479187 - RNA, 19 nt, Artificial Sequence
  Description of Artificial Sequence: Synthetic oligonucleotide
uccggcugugcuuccaggc

SEQ ID NO: 2479188 - RNA, 19 nt, Artificial Sequence
  Description of Artificial Sequence: Synthetic oligonucleotide
ugucccgcuuggauuucgg

SEQ ID NO: 2479189 - RNA, 19 nt, Artificial Sequence
  Description of Artificial Sequence: Synthetic oligonucleotide
cuuagucccauaucuuaga

SEQ ID NO: 2479190 - RNA, 19 nt, Artificial Sequence
  Description of Artificial Sequence: Synthetic oligonucleotide
gucaccacaccuuucuuaa

SEQ ID NO: 2479191 - RNA, 19 nt, Artificial Sequence
  Description of Artificial Sequence: Synthetic oligonucleotide
uccuugcacacuucguagu

SEQ ID NO: 2479192 - RNA, 19 nt, Artificial Sequence
  Description of Artificial Sequence: Synthetic oligonucleotide
uggucacuuugaauucagc

SEQ ID NO: 2479193 - RNA, 19 nt, Artificial Sequence
  Description of Artificial Sequence: Synthetic oligonucleotide
uuagcuugcuguuccucau

SEQ ID NO: 2479194 - RNA, 19 nt, Artificial Sequence
  Description of Artificial Sequence: Synthetic oligonucleotide
acuuguagguguccacaca

SEQ ID NO: 2479195 - RNA, 19 nt, Artificial Sequence
  Description of Artificial Sequence: Synthetic oligonucleotide
cacauguauuugaugguca

SEQ ID NO: 2479196 - RNA, 19 nt, Artificial Sequence
  Description of Artificial Sequence: Synthetic oligonucleotide
uuaagggcagugggcaagc

SEQ ID NO: 2479197 - RNA, 19 nt, Artificial Sequence
  Description of Artificial Sequence: Synthetic oligonucleotide
cacuucguagucagauagc

SEQ ID NO: 2479198 - RNA, 19 nt, Artificial Sequence
  Description of Artificial Sequence: Synthetic oligonucleotide
uccuucgugcgguugguaa

SEQ ID NO: 2479199 - RNA, 19 nt, Artificial Sequence
  Description of Artificial Sequence: Synthetic oligonucleotide
uguauuugauggucacuuu

SEQ ID NO: 2479200 - RNA, 19 nt, Artificial Sequence
  Description of Artificial Sequence: Synthetic oligonucleotide
aggagcccaacuucaccuc

SEQ ID NO: 2479201 - RNA, 19 nt, Artificial Sequence
  Description of Artificial Sequence: Synthetic oligonucleotide
aagacacgggccugcucug

SEQ ID NO: 2479202 - RNA, 19 nt, Artificial Sequence
  Description of Artificial Sequence: Synthetic oligonucleotide
ugggcaucccacauguauu

SEQ ID NO: 2479203 - RNA, 19 nt, Artificial Sequence
  Description of Artificial Sequence: Synthetic oligonucleotide
aguugucuuuguauucguc

SEQ ID NO: 2479204 - RNA, 19 nt, Artificial Sequence
  Description of Artificial Sequence: Synthetic oligonucleotide
agaacauccggcugugcuu

SEQ ID NO: 2479205 - RNA, 19 nt, Artificial Sequence
  Description of Artificial Sequence: Synthetic oligonucleotide
ugaaccacucguucaccuc

SEQ ID NO: 2479206 - RNA, 19 nt, Artificial Sequence
  Description of Artificial Sequence: Synthetic oligonucleotide
uauucgucagaugggcuuc

SEQ ID NO: 2479207 - RNA, 19 nt, Artificial Sequence
  Description of Artificial Sequence: Synthetic oligonucleotide
gauggucacuuugaauuca

SEQ ID NO: 2479208 - RNA, 19 nt, Artificial Sequence
  Description of Artificial Sequence: Synthetic oligonucleotide
accugaugcaaguugucuu

SEQ ID NO: 2479209 - RNA, 19 nt, Artificial Sequence
  Description of Artificial Sequence: Synthetic oligonucleotide
agccaucucauacccaaaa

SEQ ID NO: 2479210 - RNA, 19 nt, Artificial Sequence
  Description of Artificial Sequence: Synthetic oligonucleotide
gucuuagucccauaucuua

SEQ ID NO: 2479211 - RNA, 19 nt, Artificial Sequence
  Description of Artificial Sequence: Synthetic oligonucleotide
gagaagauaaagagguacu

SEQ ID NO: 2479212 - RNA, 19 nt, Artificial Sequence
  Description of Artificial Sequence: Synthetic oligonucleotide
cuccauggaaugagggaac

SEQ ID NO: 2479213 - RNA, 19 nt, Artificial Sequence
  Description of Artificial Sequence: Synthetic oligonucleotide
gacacgggccugcucuggg

SEQ ID NO: 2479214 - RNA, 19 nt, Artificial Sequence
  Description of Artificial Sequence: Synthetic oligonucleotide
ccggauguccuuuagcuug

SEQ ID NO: 2479215 - RNA, 19 nt, Artificial Sequence
  Description of Artificial Sequence: Synthetic oligonucleotide
uugcugaccugaugcaagu

SEQ ID NO: 2479216 - RNA, 19 nt, Artificial Sequence
  Description of Artificial Sequence: Synthetic oligonucleotide
ucccagcucgagcaaaauc

SEQ ID NO: 2479217 - RNA, 19 nt, Artificial Sequence
  Description of Artificial Sequence: Synthetic oligonucleotide
ugugaaccacucguucacc

SEQ ID NO: 2479218 - RNA, 19 nt, Artificial Sequence
  Description of Artificial Sequence: Synthetic oligonucleotide
gucagaugggcuucgaccu

SEQ ID NO: 2479219 - RNA, 19 nt, Artificial Sequence
  Description of Artificial Sequence: Synthetic oligonucleotide
ugcuuuguucccagcucga

SEQ ID NO: 2479220 - RNA, 19 nt, Artificial Sequence
  Description of Artificial Sequence: Synthetic oligonucleotide
uucccgacugggcauccca

SEQ ID NO: 2479221 - RNA, 19 nt, Artificial Sequence
  Description of Artificial Sequence: Synthetic oligonucleotide
uagcuugcuguuccucaug

SEQ ID NO: 2479222 - RNA, 19 nt, Artificial Sequence
  Description of Artificial Sequence: Synthetic oligonucleotide
aucccacauguauuugaug

SEQ ID NO: 2479223 - RNA, 19 nt, Artificial Sequence
  Description of Artificial Sequence: Synthetic oligonucleotide
uccacacauuuccgaagcu

SEQ ID NO: 2479224 - RNA, 19 nt, Artificial Sequence
  Description of Artificial Sequence: Synthetic oligonucleotide
cuguuccucauguuggcca

SEQ ID NO: 2479225 - RNA, 19 nt, Artificial Sequence
  Description of Artificial Sequence: Synthetic oligonucleotide
gcugaccugaugcaaguug

SEQ ID NO: 2479226 - RNA, 19 nt, Artificial Sequence
  Description of Artificial Sequence: Synthetic oligonucleotide
gaacauccggcugugcuuc

SEQ ID NO: 2479227 - RNA, 19 nt, Artificial Sequence
  Description of Artificial Sequence: Synthetic oligonucleotide
caguuccaagccuuucuug

SEQ ID NO: 2479228 - RNA, 19 nt, Artificial Sequence
  Description of Artificial Sequence: Synthetic oligonucleotide
ugcucuggggucagcacau

SEQ ID NO: 2479229 - RNA, 19 nt, Artificial Sequence
  Description of Artificial Sequence: Synthetic oligonucleotide
ucuuaagggcagugggcaa

SEQ ID NO: 2479230 - RNA, 19 nt, Artificial Sequence
  Description of Artificial Sequence: Synthetic oligonucleotide
ucuugcugaccugaugcaa

SEQ ID NO: 2479231 - RNA, 19 nt, Artificial Sequence
  Description of Artificial Sequence: Synthetic oligonucleotide
cauccuccagaacuugcug

SEQ ID NO: 2479232 - RNA, 19 nt, Artificial Sequence
  Description of Artificial Sequence: Synthetic oligonucleotide
aaccuucccgacugggcau

SEQ ID NO: 2479233 - RNA, 19 nt, Artificial Sequence
  Description of Artificial Sequence: Synthetic oligonucleotide
ugaccugaugcaaguuguc

SEQ ID NO: 2479234 - RNA, 19 nt, Artificial Sequence
  Description of Artificial Sequence: Synthetic oligonucleotide
ugaauucagccaucucaua

SEQ ID NO: 2479235 - RNA, 19 nt, Artificial Sequence
  Description of Artificial Sequence: Synthetic oligonucleotide
uccauggaaugagggaacu

SEQ ID NO: 2479236 - RNA, 19 nt, Artificial Sequence
  Description of Artificial Sequence: Synthetic oligonucleotide
caggugcgcucucagguag

SEQ ID NO: 2479237 - RNA, 19 nt, Artificial Sequence
  Description of Artificial Sequence: Synthetic oligonucleotide
ggccacagagaagauaaag

SEQ ID NO: 2479238 - RNA, 19 nt, Artificial Sequence
  Description of Artificial Sequence: Synthetic oligonucleotide
cuucaagacacgggccugc

SEQ ID NO: 2479239 - RNA, 19 nt, Artificial Sequence
  Description of Artificial Sequence: Synthetic oligonucleotide
cacacauuuccgaagcucu

SEQ ID NO: 2479240 - RNA, 19 nt, Artificial Sequence
  Description of Artificial Sequence: Synthetic oligonucleotide
ucgucagaugggcuucgac

SEQ ID NO: 2479241 - RNA, 19 nt, Artificial Sequence
  Description of Artificial Sequence: Synthetic oligonucleotide
cauuccggauguccuuuag

SEQ ID NO: 2479242 - RNA, 19 nt, Artificial Sequence
  Description of Artificial Sequence: Synthetic oligonucleotide
guacuuguagguguccaca

SEQ ID NO: 2479243 - RNA, 19 nt, Artificial Sequence
  Description of Artificial Sequence: Synthetic oligonucleotide
ggaaacuuucuugucccgc

SEQ ID NO: 2479244 - RNA, 19 nt, Artificial Sequence
  Description of Artificial Sequence: Synthetic oligonucleotide
cgucagaugggcuucgacc

SEQ ID NO: 2479245 - RNA, 19 nt, Artificial Sequence
  Description of Artificial Sequence: Synthetic oligonucleotide
auggaaugagggaacugcu

SEQ ID NO: 2479246 - RNA, 19 nt, Artificial Sequence
  Description of Artificial Sequence: Synthetic oligonucleotide
gcaaaauccauuucuguau

SEQ ID NO: 2479247 - RNA, 19 nt, Artificial Sequence
  Description of Artificial Sequence: Synthetic oligonucleotide
guucaccuccuccuucgug

SEQ ID NO: 2479248 - RNA, 19 nt, Artificial Sequence
  Description of Artificial Sequence: Synthetic oligonucleotide
acacgggccugcucugggg

SEQ ID NO: 2479249 - RNA, 19 nt, Artificial Sequence
  Description of Artificial Sequence: Synthetic oligonucleotide
cacauuuccgaagcucuuc

SEQ ID NO: 2479250 - RNA, 19 nt, Artificial Sequence
  Description of Artificial Sequence: Synthetic oligonucleotide
auucgucagaugggcuucg

SEQ ID NO: 2479251 - RNA, 19 nt, Artificial Sequence
  Description of Artificial Sequence: Synthetic oligonucleotide
cucgagcaaaauccauuuc

SEQ ID NO: 2479252 - RNA, 19 nt, Artificial Sequence
  Description of Artificial Sequence: Synthetic oligonucleotide
ugcacacuucguagucaga

SEQ ID NO: 2479253 - RNA, 19 nt, Artificial Sequence
  Description of Artificial Sequence: Synthetic oligonucleotide
uugucccgcuuggauuucg

SEQ ID NO: 2479254 - RNA, 19 nt, Artificial Sequence
  Description of Artificial Sequence: Synthetic oligonucleotide
cacuuugaauucagccauc

SEQ ID NO: 2479255 - RNA, 19 nt, Artificial Sequence
  Description of Artificial Sequence: Synthetic oligonucleotide
ucucaacuucuugcugacc

SEQ ID NO: 2479256 - RNA, 19 nt, Artificial Sequence
  Description of Artificial Sequence: Synthetic oligonucleotide
guagguguccacacauuuc

SEQ ID NO: 2479257 - RNA, 19 nt, Artificial Sequence
  Description of Artificial Sequence: Synthetic oligonucleotide
uccggauguccuuuagcuu

SEQ ID NO: 2479258 - RNA, 19 nt, Artificial Sequence
  Description of Artificial Sequence: Synthetic oligonucleotide
gccacagagaagauaaaga

SEQ ID NO: 2479259 - RNA, 19 nt, Artificial Sequence
  Description of Artificial Sequence: Synthetic oligonucleotide
gcucucagguaggucaucg

SEQ ID NO: 2479260 - RNA, 19 nt, Artificial Sequence
  Description of Artificial Sequence: Synthetic oligonucleotide
guggcuccauggaaugagg

SEQ ID NO: 2479261 - RNA, 19 nt, Artificial Sequence
  Description of Artificial Sequence: Synthetic oligonucleotide
cugaugcaaguugucuuug

SEQ ID NO: 2479262 - RNA, 19 nt, Artificial Sequence
  Description of Artificial Sequence: Synthetic oligonucleotide
ucagaugggcuucgaccua

SEQ ID NO: 2479263 - RNA, 19 nt, Artificial Sequence
  Description of Artificial Sequence: Synthetic oligonucleotide
agaaucucccucagacuca

SEQ ID NO: 2479264 - RNA, 19 nt, Artificial Sequence
  Description of Artificial Sequence: Synthetic oligonucleotide
gguguccacacauuuccga

SEQ ID NO: 2479265 - RNA, 19 nt, Artificial Sequence
  Description of Artificial Sequence: Synthetic oligonucleotide
guauacuuugugaaccacu

SEQ ID NO: 2479266 - RNA, 19 nt, Artificial Sequence
  Description of Artificial Sequence: Synthetic oligonucleotide
ucaagacacgggccugcuc

SEQ ID NO: 2479267 - RNA, 19 nt, Artificial Sequence
  Description of Artificial Sequence: Synthetic oligonucleotide
aucuuagagucagcuguca

SEQ ID NO: 2479268 - RNA, 19 nt, Artificial Sequence
  Description of Artificial Sequence: Synthetic oligonucleotide
agcccaacuucaccucuca

SEQ ID NO: 2479269 - RNA, 19 nt, Artificial Sequence
  Description of Artificial Sequence: Synthetic oligonucleotide
gccaaagaacauccggcug

SEQ ID NO: 2479270 - RNA, 19 nt, Artificial Sequence
  Description of Artificial Sequence: Synthetic oligonucleotide
cucagacucaggugcgcuc

SEQ ID NO: 2479271 - RNA, 19 nt, Artificial Sequence
  Description of Artificial Sequence: Synthetic oligonucleotide
cuaaggccaccaucaucac

SEQ ID NO: 2479272 - RNA, 19 nt, Artificial Sequence
  Description of Artificial Sequence: Synthetic oligonucleotide
ccuuucuuaagggcagugg

SEQ ID NO: 2479273 - RNA, 19 nt, Artificial Sequence
  Description of Artificial Sequence: Synthetic oligonucleotide
aggucaucguccaucugcu

SEQ ID NO: 2479274 - RNA, 19 nt, Artificial Sequence
  Description of Artificial Sequence: Synthetic oligonucleotide
agguguccacacauuuccg

SEQ ID NO: 2479275 - RNA, 19 nt, Artificial Sequence
  Description of Artificial Sequence: Synthetic oligonucleotide
uguucccagcucgagcaaa

SEQ ID NO: 2479276 - RNA, 19 nt, Artificial Sequence
  Description of Artificial Sequence: Synthetic oligonucleotide
acuucaccucucaacuucu

SEQ ID NO: 2479277 - RNA, 19 nt, Artificial Sequence
  Description of Artificial Sequence: Synthetic oligonucleotide
guauucgucagaugggcuu

SEQ ID NO: 2479278 - RNA, 19 nt, Artificial Sequence
  Description of Artificial Sequence: Synthetic oligonucleotide
caagccuagcugccucagc

SEQ ID NO: 2479279 - RNA, 19 nt, Artificial Sequence
  Description of Artificial Sequence: Synthetic oligonucleotide
caggcucacaguuaaaguu

SEQ ID NO: 2479280 - RNA, 19 nt, Artificial Sequence
  Description of Artificial Sequence: Synthetic oligonucleotide
gcuguggcuccauggaaug

SEQ ID NO: 2479281 - RNA, 19 nt, Artificial Sequence
  Description of Artificial Sequence: Synthetic oligonucleotide
ucccgacugggcaucccac

SEQ ID NO: 2479282 - RNA, 19 nt, Artificial Sequence
  Description of Artificial Sequence: Synthetic oligonucleotide
uucgaccuaaggccaccau

SEQ ID NO: 2479283 - RNA, 19 nt, Artificial Sequence
  Description of Artificial Sequence: Synthetic oligonucleotide
cucaggugcgcucucaggu

SEQ ID NO: 2479284 - RNA, 19 nt, Artificial Sequence
  Description of Artificial Sequence: Synthetic oligonucleotide
cauccggcugugcuuccag

SEQ ID NO: 2479285 - RNA, 19 nt, Artificial Sequence
  Description of Artificial Sequence: Synthetic oligonucleotide
ggcucacaguuaaaguugc

SEQ ID NO: 2479286 - RNA, 19 nt, Artificial Sequence
  Description of Artificial Sequence: Synthetic oligonucleotide
uucaagacacgggccugcu

SEQ ID NO: 2479287 - RNA, 19 nt, Artificial Sequence
  Description of Artificial Sequence: Synthetic oligonucleotide
agcucgagcaaaauccauu

SEQ ID NO: 2479288 - RNA, 19 nt, Artificial Sequence
  Description of Artificial Sequence: Synthetic oligonucleotide
ccacaccuuucuuaagggc

SEQ ID NO: 2479289 - RNA, 19 nt, Artificial Sequence
  Description of Artificial Sequence: Synthetic oligonucleotide
uagagucagcugucauccu

SEQ ID NO: 2479290 - RNA, 19 nt, Artificial Sequence
  Description of Artificial Sequence: Synthetic oligonucleotide
gcaucccacauguauuuga

SEQ ID NO: 2479291 - RNA, 19 nt, Artificial Sequence
  Description of Artificial Sequence: Synthetic oligonucleotide
caacuucuugcugaccuga

SEQ ID NO: 2479292 - RNA, 19 nt, Artificial Sequence
  Description of Artificial Sequence: Synthetic oligonucleotide
acuuugugaaccacucguu

SEQ ID NO: 2479293 - RNA, 19 nt, Artificial Sequence
  Description of Artificial Sequence: Synthetic oligonucleotide
ccucucaacuucuugcuga

SEQ ID NO: 2479294 - RNA, 19 nt, Artificial Sequence
  Description of Artificial Sequence: Synthetic oligonucleotide
acgggccugcucugggguc

SEQ ID NO: 2479295 - RNA, 19 nt, Artificial Sequence
  Description of Artificial Sequence: Synthetic oligonucleotide
gucccgcuuggauuucggc

SEQ ID NO: 2479296 - RNA, 19 nt, Artificial Sequence
  Description of Artificial Sequence: Synthetic oligonucleotide
aaucucccucagacucagg

SEQ ID NO: 2479297 - RNA, 19 nt, Artificial Sequence
  Description of Artificial Sequence: Synthetic oligonucleotide
ggcuccauggaaugaggga

SEQ ID NO: 2479298 - RNA, 19 nt, Artificial Sequence
  Description of Artificial Sequence: Synthetic oligonucleotide
gcuccauggaaugagggaa

SEQ ID NO: 2479299 - RNA, 19 nt, Artificial Sequence
  Description of Artificial Sequence: Synthetic oligonucleotide
ggaaccuucccgacugggc

SEQ ID NO: 2479300 - RNA, 19 nt, Artificial Sequence
  Description of Artificial Sequence: Synthetic oligonucleotide
gaccugaugcaaguugucu

SEQ ID NO: 2479301 - RNA, 19 nt, Artificial Sequence
  Description of Artificial Sequence: Synthetic oligonucleotide
agacacgggccugcucugg

SEQ ID NO: 2479302 - RNA, 19 nt, Artificial Sequence
  Description of Artificial Sequence: Synthetic oligonucleotide
cacucguucaccuccuccu

SEQ ID NO: 2479303 - RNA, 19 nt, Artificial Sequence
  Description of Artificial Sequence: Synthetic oligonucleotide
gugaaccacucguucaccu

SEQ ID NO: 2479304 - RNA, 19 nt, Artificial Sequence
  Description of Artificial Sequence: Synthetic oligonucleotide
uaagggcagugggcaagcc

SEQ ID NO: 2479305 - RNA, 19 nt, Artificial Sequence
  Description of Artificial Sequence: Synthetic oligonucleotide
accuucccgacugggcauc

SEQ ID NO: 2479306 - RNA, 19 nt, Artificial Sequence
  Description of Artificial Sequence: Synthetic oligonucleotide
ccaacuucaccucucaacu

SEQ ID NO: 2479307 - RNA, 19 nt, Artificial Sequence
  Description of Artificial Sequence: Synthetic oligonucleotide
guaggucaucguccaucug

SEQ ID NO: 2479308 - RNA, 19 nt, Artificial Sequence
  Description of Artificial Sequence: Synthetic oligonucleotide
ccacauguauuugaugguc

SEQ ID NO: 2479309 - RNA, 19 nt, Artificial Sequence
  Description of Artificial Sequence: Synthetic oligonucleotide
cuugcuggaaggucuuagu

SEQ ID NO: 2479310 - RNA, 19 nt, Artificial Sequence
  Description of Artificial Sequence: Synthetic oligonucleotide
ugggcaagccuagcugccu

SEQ ID NO: 2479311 - RNA, 19 nt, Artificial Sequence
  Description of Artificial Sequence: Synthetic oligonucleotide
ccaggcauuccggaugucc

SEQ ID NO: 2479312 - RNA, 19 nt, Artificial Sequence
  Description of Artificial Sequence: Synthetic oligonucleotide
cgaccuaaggccaccauca

SEQ ID NO: 2479313 - RNA, 19 nt, Artificial Sequence
  Description of Artificial Sequence: Synthetic oligonucleotide
cagagaagauaaagaggua

SEQ ID NO: 2479314 - RNA, 19 nt, Artificial Sequence
  Description of Artificial Sequence: Synthetic oligonucleotide
gugggcaagccuagcugcc

SEQ ID NO: 2479315 - RNA, 19 nt, Artificial Sequence
  Description of Artificial Sequence: Synthetic oligonucleotide
aggcauuccggauguccuu

SEQ ID NO: 2479316 - RNA, 19 nt, Artificial Sequence
  Description of Artificial Sequence: Synthetic oligonucleotide
cccagcauccuccagaacu

SEQ ID NO: 2479317 - RNA, 19 nt, Artificial Sequence
  Description of Artificial Sequence: Synthetic oligonucleotide
cacacuucguagucagaua

SEQ ID NO: 2479318 - RNA, 19 nt, Artificial Sequence
  Description of Artificial Sequence: Synthetic oligonucleotide
ccuugcacacuucguaguc

SEQ ID NO: 2479319 - RNA, 19 nt, Artificial Sequence
  Description of Artificial Sequence: Synthetic oligonucleotide
caucccacauguauuugau

SEQ ID NO: 2479320 - RNA, 19 nt, Artificial Sequence
  Description of Artificial Sequence: Synthetic oligonucleotide
gucagauagcagggucacc

SEQ ID NO: 2479321 - RNA, 19 nt, Artificial Sequence
  Description of Artificial Sequence: Synthetic oligonucleotide
uucgucagaugggcuucga

SEQ ID NO: 2479322 - RNA, 19 nt, Artificial Sequence
  Description of Artificial Sequence: Synthetic oligonucleotide
caccucucaacuucuugcu

SEQ ID NO: 2479323 - RNA, 19 nt, Artificial Sequence
  Description of Artificial Sequence: Synthetic oligonucleotide
gcuuuguucccagcucgag

SEQ ID NO: 2479324 - RNA, 19 nt, Artificial Sequence
  Description of Artificial Sequence: Synthetic oligonucleotide
cuucgugcgguugguaaaa

SEQ ID NO: 2479325 - RNA, 19 nt, Artificial Sequence
  Description of Artificial Sequence: Synthetic oligonucleotide
cagggucaccacaccuuuc

SEQ ID NO: 2479326 - RNA, 19 nt, Artificial Sequence
  Description of Artificial Sequence: Synthetic oligonucleotide
agucagcugucauccucuu

SEQ ID NO: 2479327 - RNA, 19 nt, Artificial Sequence
  Description of Artificial Sequence: Synthetic oligonucleotide
agacucaggugcgcucuca

SEQ ID NO: 2479328 - RNA, 19 nt, Artificial Sequence
  Description of Artificial Sequence: Synthetic oligonucleotide
gagcccaacuucaccucuc

SEQ ID NO: 2479329 - RNA, 19 nt, Artificial Sequence
  Description of Artificial Sequence: Synthetic oligonucleotide
ccacacauuuccgaagcuc

SEQ ID NO: 2479330 - RNA, 19 nt, Artificial Sequence
  Description of Artificial Sequence: Synthetic oligonucleotide
gcuguuccucauguuggcc

SEQ ID NO: 2479331 - RNA, 19 nt, Artificial Sequence
  Description of Artificial Sequence: Synthetic oligonucleotide
aguccugccccagcauccu

SEQ ID NO: 2479332 - RNA, 19 nt, Artificial Sequence
  Description of Artificial Sequence: Synthetic oligonucleotide
cauuuccgaagcucuucua

SEQ ID NO: 2479333 - RNA, 19 nt, Artificial Sequence
  Description of Artificial Sequence: Synthetic oligonucleotide
agaugggcuucgaccuaag

SEQ ID NO: 2479334 - RNA, 19 nt, Artificial Sequence
  Description of Artificial Sequence: Synthetic oligonucleotide
gcuucaagacacgggccug

SEQ ID NO: 2479335 - RNA, 19 nt, Artificial Sequence
  Description of Artificial Sequence: Synthetic oligonucleotide
acacauuuccgaagcucuu

SEQ ID NO: 2479336 - RNA, 19 nt, Artificial Sequence
  Description of Artificial Sequence: Synthetic oligonucleotide
cccauaucuuagagucagc

SEQ ID NO: 2479337 - RNA, 19 nt, Artificial Sequence
  Description of Artificial Sequence: Synthetic oligonucleotide
ccagcucgagcaaaaucca

SEQ ID NO: 2479338 - RNA, 19 nt, Artificial Sequence
  Description of Artificial Sequence: Synthetic oligonucleotide
ggucaucguccaucugcug

SEQ ID NO: 2479339 - RNA, 19 nt, Artificial Sequence
  Description of Artificial Sequence: Synthetic oligonucleotide
guucccagcucgagcaaaa

SEQ ID NO: 2479340 - RNA, 19 nt, Artificial Sequence
  Description of Artificial Sequence: Synthetic oligonucleotide
gcucgagcaaaauccauuu

SEQ ID NO: 2479341 - RNA, 19 nt, Artificial Sequence
  Description of Artificial Sequence: Synthetic oligonucleotide
ggcaucccacauguauuug

SEQ ID NO: 2479342 - RNA, 19 nt, Artificial Sequence
  Description of Artificial Sequence: Synthetic oligonucleotide
cagacucaggugcgcucuc

SEQ ID NO: 2479343 - RNA, 19 nt, Artificial Sequence
  Description of Artificial Sequence: Synthetic oligonucleotide
cuucccgacugggcauccc

SEQ ID NO: 2479344 - RNA, 19 nt, Artificial Sequence
  Description of Artificial Sequence: Synthetic oligonucleotide
cggauguccuuuagcuugc

SEQ ID NO: 2479345 - RNA, 19 nt, Artificial Sequence
  Description of Artificial Sequence: Synthetic oligonucleotide
cuucgaccuaaggccacca

SEQ ID NO: 2479346 - RNA, 19 nt, Artificial Sequence
  Description of Artificial Sequence: Synthetic oligonucleotide
ggcaagccuagcugccuca

SEQ ID NO: 2479347 - RNA, 19 nt, Artificial Sequence
  Description of Artificial Sequence: Synthetic oligonucleotide
gcuucgaccuaaggccacc

SEQ ID NO: 2479348 - RNA, 19 nt, Artificial Sequence
  Description of Artificial Sequence: Synthetic oligonucleotide
gcaagccuagcugccucag

SEQ ID NO: 2479349 - RNA, 19 nt, Artificial Sequence
  Description of Artificial Sequence: Synthetic oligonucleotide
ccauaucuuagagucagcu

SEQ ID NO: 2479350 - RNA, 19 nt, Artificial Sequence
  Description of Artificial Sequence: Synthetic oligonucleotide
ccuccuugcacacuucgua

SEQ ID NO: 2479351 - RNA, 19 nt, Artificial Sequence
  Description of Artificial Sequence: Synthetic oligonucleotide
cuugucccgcuuggauuuc

SEQ ID NO: 2479352 - RNA, 19 nt, Artificial Sequence
  Description of Artificial Sequence: Synthetic oligonucleotide
gaccuaaggccaccaucau

SEQ ID NO: 2479353 - RNA, 19 nt, Artificial Sequence
  Description of Artificial Sequence: Synthetic oligonucleotide
gggcaagccuagcugccuc

SEQ ID NO: 2479354 - RNA, 19 nt, Artificial Sequence
  Description of Artificial Sequence: Synthetic oligonucleotide
gcacacuucguagucagau

SEQ ID NO: 2479355 - RNA, 19 nt, Artificial Sequence
  Description of Artificial Sequence: Synthetic oligonucleotide
gcagugggcaagccuagcu

SEQ ID NO: 2479356 - RNA, 19 nt, Artificial Sequence
  Description of Artificial Sequence: Synthetic oligonucleotide
ccauggaaugagggaacug

SEQ ID NO: 2479357 - RNA, 19 nt, Artificial Sequence
  Description of Artificial Sequence: Synthetic oligonucleotide
cuguggcuccauggaauga

SEQ ID NO: 2479358 - RNA, 19 nt, Artificial Sequence
  Description of Artificial Sequence: Synthetic oligonucleotide
gggcuucgaccuaaggcca

SEQ ID NO: 2479359 - RNA, 19 nt, Artificial Sequence
  Description of Artificial Sequence: Synthetic oligonucleotide
cucucagguaggucaucgu

SEQ ID NO: 2479360 - RNA, 19 nt, Artificial Sequence
  Description of Artificial Sequence: Synthetic oligonucleotide
caacuucaccucucaacuu

SEQ ID NO: 2479361 - RNA, 19 nt, Artificial Sequence
  Description of Artificial Sequence: Synthetic oligonucleotide
cagccaucucauacccaaa

SEQ ID NO: 2479362 - RNA, 19 nt, Artificial Sequence
  Description of Artificial Sequence: Synthetic oligonucleotide
gccuagcugccucagcugu

SEQ ID NO: 2479363 - RNA, 19 nt, Artificial Sequence
  Description of Artificial Sequence: Synthetic oligonucleotide
gggcagugggcaagccuag

SEQ ID NO: 2479364 - RNA, 19 nt, Artificial Sequence
  Description of Artificial Sequence: Synthetic oligonucleotide
ccuucgugcgguugguaaa

SEQ ID NO: 2479365 - RNA, 19 nt, Artificial Sequence
  Description of Artificial Sequence: Synthetic oligonucleotide
ggauccaggcucacaguua

SEQ ID NO: 2479366 - RNA, 19 nt, Artificial Sequence
  Description of Artificial Sequence: Synthetic oligonucleotide
caaaguccugccccagcau

SEQ ID NO: 2479367 - RNA, 19 nt, Artificial Sequence
  Description of Artificial Sequence: Synthetic oligonucleotide
ccaggcucacaguuaaagu

SEQ ID NO: 2479368 - RNA, 19 nt, Artificial Sequence
  Description of Artificial Sequence: Synthetic oligonucleotide
ggcagugggcaagccuagc

SEQ ID NO: 2479369 - RNA, 19 nt, Artificial Sequence
  Description of Artificial Sequence: Synthetic oligonucleotide
ccugaugcaaguugucuuu

SEQ ID NO: 2479370 - RNA, 19 nt, Artificial Sequence
  Description of Artificial Sequence: Synthetic oligonucleotide
gggcaucccacauguauuu

SEQ ID NO: 2479371 - RNA, 19 nt, Artificial Sequence
  Description of Artificial Sequence: Synthetic oligonucleotide
ggaaggucuuagucccaua

SEQ ID NO: 2479372 - RNA, 19 nt, Artificial Sequence
  Description of Artificial Sequence: Synthetic oligonucleotide
ggcuucgaccuaaggccac

SEQ ID NO: 2479373 - RNA, 19 nt, Artificial Sequence
  Description of Artificial Sequence: Synthetic oligonucleotide
cagcucgagcaaaauccau

SEQ ID NO: 2479374 - RNA, 19 nt, Artificial Sequence
  Description of Artificial Sequence: Synthetic oligonucleotide
cgcuuggauuucggcaucg

SEQ ID NO: 2479375 - RNA, 19 nt, Artificial Sequence
  Description of Artificial Sequence: Synthetic oligonucleotide
cccacauguauuugauggu

SEQ ID NO: 2479376 - RNA, 19 nt, Artificial Sequence
  Description of Artificial Sequence: Synthetic oligonucleotide
uccaggcauuccggauguc

SEQ ID NO: 2479377 - RNA, 19 nt, Artificial Sequence
  Description of Artificial Sequence: Synthetic oligonucleotide
cccgcuuggauuucggcau

SEQ ID NO: 2479378 - RNA, 19 nt, Artificial Sequence
  Description of Artificial Sequence: Synthetic oligonucleotide
cacgggccugcucuggggu

SEQ ID NO: 2479379 - RNA, 19 nt, Artificial Sequence
  Description of Artificial Sequence: Synthetic oligonucleotide
caucguccaucugcuggaa

SEQ ID NO: 2479380 - RNA, 19 nt, Artificial Sequence
  Description of Artificial Sequence: Synthetic oligonucleotide
ggucuuagucccauaucuu

SEQ ID NO: 2479381 - RNA, 19 nt, Artificial Sequence
  Description of Artificial Sequence: Synthetic oligonucleotide
ccucagaaucucccucaga

SEQ ID NO: 2479382 - RNA, 19 nt, Artificial Sequence
  Description of Artificial Sequence: Synthetic oligonucleotide
ccggcugugcuuccaggca

SEQ ID NO: 2479383 - RNA, 19 nt, Artificial Sequence
  Description of Artificial Sequence: Synthetic oligonucleotide
gugcgcucucagguagguc

SEQ ID NO: 2479384 - RNA, 19 nt, Artificial Sequence
  Description of Artificial Sequence: Synthetic oligonucleotide
cccucagacucaggugcgc

SEQ ID NO: 2479385 - RNA, 19 nt, Artificial Sequence
  Description of Artificial Sequence: Synthetic oligonucleotide
cuucaccucucaacuucuu

SEQ ID NO: 2479386 - RNA, 19 nt, Artificial Sequence
  Description of Artificial Sequence: Synthetic oligonucleotide
gcauuccggauguccuuua

SEQ ID NO: 2479387 - RNA, 19 nt, Artificial Sequence
  Description of Artificial Sequence: Synthetic oligonucleotide
ccucagcuguggcuccaug

SEQ ID NO: 2479388 - RNA, 19 nt, Artificial Sequence
  Description of Artificial Sequence: Synthetic oligonucleotide
gggccuggauccaggcuca

SEQ ID NO: 2479389 - RNA, 19 nt, Artificial Sequence
  Description of Artificial Sequence: Synthetic oligonucleotide
cccgacugggcaucccaca

SEQ ID NO: 2479390 - RNA, 19 nt, Artificial Sequence
  Description of Artificial Sequence: Synthetic oligonucleotide
ccgcuuggauuucggcauc

SEQ ID NO: 2479391 - RNA, 19 nt, Artificial Sequence
  Description of Artificial Sequence: Synthetic oligonucleotide
ccuucccgacugggcaucc

SEQ ID NO: 2479392 - RNA, 19 nt, Artificial Sequence
  Description of Artificial Sequence: Synthetic oligonucleotide
caccuuucuuaagggcagu

SEQ ID NO: 2479393 - RNA, 19 nt, Artificial Sequence
  Description of Artificial Sequence: Synthetic oligonucleotide
ggugcgcucucagguaggu

SEQ ID NO: 2479394 - RNA, 19 nt, Artificial Sequence
  Description of Artificial Sequence: Synthetic oligonucleotide
ggcauuccggauguccuuu

SEQ ID NO: 2479395 - RNA, 19 nt, Artificial Sequence
  Description of Artificial Sequence: Synthetic oligonucleotide
ccaagccuuucuuggcagu

SEQ ID NO: 2479396 - RNA, 19 nt, Artificial Sequence
  Description of Artificial Sequence: Synthetic oligonucleotide
cuccuucgugcgguuggua

SEQ ID NO: 2479397 - RNA, 19 nt, Artificial Sequence
  Description of Artificial Sequence: Synthetic oligonucleotide
gcucacaguuaaaguugcu

SEQ ID NO: 2479398 - RNA, 19 nt, Artificial Sequence
  Description of Artificial Sequence: Synthetic oligonucleotide
gcuugcuguuccucauguu

SEQ ID NO: 2479399 - RNA, 19 nt, Artificial Sequence
  Description of Artificial Sequence: Synthetic oligonucleotide
guccaucugcuggaaccuu

SEQ ID NO: 2479400 - RNA, 19 nt, Artificial Sequence
  Description of Artificial Sequence: Synthetic oligonucleotide
cagguaggucaucguccau

SEQ ID NO: 2479401 - RNA, 19 nt, Artificial Sequence
  Description of Artificial Sequence: Synthetic oligonucleotide
cccuccuugcacacuucgu

SEQ ID NO: 2479402 - RNA, 19 nt, Artificial Sequence
  Description of Artificial Sequence: Synthetic oligonucleotide
ccgacugggcaucccacau

SEQ ID NO: 2479403 - RNA, 19 nt, Artificial Sequence
  Description of Artificial Sequence: Synthetic oligonucleotide
ggauguccuuuagcuugcu

SEQ ID NO: 2479404 - RNA, 19 nt, Artificial Sequence
  Description of Artificial Sequence: Synthetic oligonucleotide
cguagucagauagcagggu

SEQ ID NO: 2479405 - RNA, 19 nt, Artificial Sequence
  Description of Artificial Sequence: Synthetic oligonucleotide
cguccaucugcuggaaccu

SEQ ID NO: 2479406 - RNA, 19 nt, Artificial Sequence
  Description of Artificial Sequence: Synthetic oligonucleotide
ggcugugcuuccaggcauu

SEQ ID NO: 2479407 - RNA, 19 nt, Artificial Sequence
  Description of Artificial Sequence: Synthetic oligonucleotide
gcgcucucagguaggucau

SEQ ID NO: 2479408 - RNA, 19 nt, Artificial Sequence
  Description of Artificial Sequence: Synthetic oligonucleotide
cgcucucagguaggucauc

SEQ ID NO: 2479409 - RNA, 19 nt, Artificial Sequence
  Description of Artificial Sequence: Synthetic oligonucleotide
cggcugugcuuccaggcau

SEQ ID NO: 2479410 - RNA, 19 nt, Artificial Sequence
  Description of Artificial Sequence: Synthetic oligonucleotide
cguucaccuccuccuucgu

SEQ ID NO: 2479411 - RNA, 19 nt, Artificial Sequence
  Description of Artificial Sequence: Synthetic oligonucleotide
auaauaauaauauaguggc

SEQ ID NO: 2479412 - RNA, 19 nt, Artificial Sequence
  Description of Artificial Sequence: Synthetic oligonucleotide
aauaauaauaauaauauag

SEQ ID NO: 2479413 - RNA, 19 nt, Artificial Sequence
  Description of Artificial Sequence: Synthetic oligonucleotide
aauagcaaagcauuaaggg

SEQ ID NO: 2479414 - RNA, 19 nt, Artificial Sequence
  Description of Artificial Sequence: Synthetic oligonucleotide
aagggaaucaaguuugucc

SEQ ID NO: 2479415 - RNA, 19 nt, Artificial Sequence
  Description of Artificial Sequence: Synthetic oligonucleotide
uuuauuaaagccuauacac

SEQ ID NO: 2479416 - RNA, 19 nt, Artificial Sequence
  Description of Artificial Sequence: Synthetic oligonucleotide
aaaauaauaauaauaauaa

SEQ ID NO: 2479417 - RNA, 19 nt, Artificial Sequence
  Description of Artificial Sequence: Synthetic oligonucleotide
aauaauaauauaguggcug

SEQ ID NO: 2479418 - RNA, 19 nt, Artificial Sequence
  Description of Artificial Sequence: Synthetic oligonucleotide
aaugacaaaacuucauguc

SEQ ID NO: 2479419 - RNA, 19 nt, Artificial Sequence
  Description of Artificial Sequence: Synthetic oligonucleotide
aauaauaauaauaauaaua

SEQ ID NO: 2479420 - RNA, 19 nt, Artificial Sequence
  Description of Artificial Sequence: Synthetic oligonucleotide
uacaauuuugcacacauca

SEQ ID NO: 2479421 - RNA, 19 nt, Artificial Sequence
  Description of Artificial Sequence: Synthetic oligonucleotide
augacaaaacuucaugucc

SEQ ID NO: 2479422 - RNA, 19 nt, Artificial Sequence
  Description of Artificial Sequence: Synthetic oligonucleotide
auaaagaacucaccaaacc

SEQ ID NO: 2479423 - RNA, 19 nt, Artificial Sequence
  Description of Artificial Sequence: Synthetic oligonucleotide
auaauaauauaguggcugc

SEQ ID NO: 2479424 - RNA, 19 nt, Artificial Sequence
  Description of Artificial Sequence: Synthetic oligonucleotide
uauuaaagccuauacaccc

SEQ ID NO: 2479425 - RNA, 19 nt, Artificial Sequence
  Description of Artificial Sequence: Synthetic oligonucleotide
aauuuugcacacaucaccc

SEQ ID NO: 2479426 - RNA, 19 nt, Artificial Sequence
  Description of Artificial Sequence: Synthetic oligonucleotide
uuuuauuaaagccuauaca

SEQ ID NO: 2479427 - RNA, 19 nt, Artificial Sequence
  Description of Artificial Sequence: Synthetic oligonucleotide
auaauaauaauaauaauau

SEQ ID NO: 2479428 - RNA, 19 nt, Artificial Sequence
  Description of Artificial Sequence: Synthetic oligonucleotide
aucaaguuuguccugugcc

SEQ ID NO: 2479429 - RNA, 19 nt, Artificial Sequence
  Description of Artificial Sequence: Synthetic oligonucleotide
auaaaguaguuuucuuucc

SEQ ID NO: 2479430 - RNA, 19 nt, Artificial Sequence
  Description of Artificial Sequence: Synthetic oligonucleotide
uuauuaaagccuauacacc

SEQ ID NO: 2479431 - RNA, 19 nt, Artificial Sequence
  Description of Artificial Sequence: Synthetic oligonucleotide
aaucaaguuuguccugugc

SEQ ID NO: 2479432 - RNA, 19 nt, Artificial Sequence
  Description of Artificial Sequence: Synthetic oligonucleotide
aaauaaaguaguuuucuuu

SEQ ID NO: 2479433 - RNA, 19 nt, Artificial Sequence
  Description of Artificial Sequence: Synthetic oligonucleotide
cauuuugcaagccuaagcc

SEQ ID NO: 2479434 - RNA, 19 nt, Artificial Sequence
  Description of Artificial Sequence: Synthetic oligonucleotide
ugguauaaagaacucacca

SEQ ID NO: 2479435 - RNA, 19 nt, Artificial Sequence
  Description of Artificial Sequence: Synthetic oligonucleotide
uggaccaacaaaauaaagu

SEQ ID NO: 2479436 - RNA, 19 nt, Artificial Sequence
  Description of Artificial Sequence: Synthetic oligonucleotide
aaauaauaauaauaauaau

SEQ ID NO: 2479437 - RNA, 19 nt, Artificial Sequence
  Description of Artificial Sequence: Synthetic oligonucleotide
aauaauauaguggcugcag

SEQ ID NO: 2479438 - RNA, 19 nt, Artificial Sequence
  Description of Artificial Sequence: Synthetic oligonucleotide
cuuauuuccucugauaggc

SEQ ID NO: 2479439 - RNA, 19 nt, Artificial Sequence
  Description of Artificial Sequence: Synthetic oligonucleotide
aaggguuggaucaucaggg

SEQ ID NO: 2479440 - RNA, 19 nt, Artificial Sequence
  Description of Artificial Sequence: Synthetic oligonucleotide
aucaauaccaaaugaccuc

SEQ ID NO: 2479441 - RNA, 19 nt, Artificial Sequence
  Description of Artificial Sequence: Synthetic oligonucleotide
aaagaacucaccaaaccag

SEQ ID NO: 2479442 - RNA, 19 nt, Artificial Sequence
  Description of Artificial Sequence: Synthetic oligonucleotide
acuccuacaauuuugcaca

SEQ ID NO: 2479443 - RNA, 19 nt, Artificial Sequence
  Description of Artificial Sequence: Synthetic oligonucleotide
gaaggguuggaucaucagg

SEQ ID NO: 2479444 - RNA, 19 nt, Artificial Sequence
  Description of Artificial Sequence: Synthetic oligonucleotide
agccuauacacccucuucc

SEQ ID NO: 2479445 - RNA, 19 nt, Artificial Sequence
  Description of Artificial Sequence: Synthetic oligonucleotide
caauuuugcacacaucacc

SEQ ID NO: 2479446 - RNA, 19 nt, Artificial Sequence
  Description of Artificial Sequence: Synthetic oligonucleotide
uguccagcaacacuggacc

SEQ ID NO: 2479447 - RNA, 19 nt, Artificial Sequence
  Description of Artificial Sequence: Synthetic oligonucleotide
uauaaagaacucaccaaac

SEQ ID NO: 2479448 - RNA, 19 nt, Artificial Sequence
  Description of Artificial Sequence: Synthetic oligonucleotide
gaaacaugggaguugagga

SEQ ID NO: 2479449 - RNA, 19 nt, Artificial Sequence
  Description of Artificial Sequence: Synthetic oligonucleotide
uggaucaauaccaaaugac

SEQ ID NO: 2479450 - RNA, 19 nt, Artificial Sequence
  Description of Artificial Sequence: Synthetic oligonucleotide
ugguugguguuguagaggg

SEQ ID NO: 2479451 - RNA, 19 nt, Artificial Sequence
  Description of Artificial Sequence: Synthetic oligonucleotide
acaaugacaaaacuucaug

SEQ ID NO: 2479452 - RNA, 19 nt, Artificial Sequence
  Description of Artificial Sequence: Synthetic oligonucleotide
auagcaaagcauuaagggu

SEQ ID NO: 2479453 - RNA, 19 nt, Artificial Sequence
  Description of Artificial Sequence: Synthetic oligonucleotide
aaacaugggaguugaggag

SEQ ID NO: 2479454 - RNA, 19 nt, Artificial Sequence
  Description of Artificial Sequence: Synthetic oligonucleotide
ugacaaaacuucaugucca

SEQ ID NO: 2479455 - RNA, 19 nt, Artificial Sequence
  Description of Artificial Sequence: Synthetic oligonucleotide
aauauaguggcugcaguug

SEQ ID NO: 2479456 - RNA, 19 nt, Artificial Sequence
  Description of Artificial Sequence: Synthetic oligonucleotide
aaaccagaaacaugggagu

SEQ ID NO: 2479457 - RNA, 19 nt, Artificial Sequence
  Description of Artificial Sequence: Synthetic oligonucleotide
uaaaguaguuuucuuucca

SEQ ID NO: 2479458 - RNA, 19 nt, Artificial Sequence
  Description of Artificial Sequence: Synthetic oligonucleotide
agaaacaugggaguugagg

SEQ ID NO: 2479459 - RNA, 19 nt, Artificial Sequence
  Description of Artificial Sequence: Synthetic oligonucleotide
aaagcauuaagggugguau

SEQ ID NO: 2479460 - RNA, 19 nt, Artificial Sequence
  Description of Artificial Sequence: Synthetic oligonucleotide
uauuuccucugauaggcag

SEQ ID NO: 2479461 - RNA, 19 nt, Artificial Sequence
  Description of Artificial Sequence: Synthetic oligonucleotide
gauagguggaucaauacca

SEQ ID NO: 2479462 - RNA, 19 nt, Artificial Sequence
  Description of Artificial Sequence: Synthetic oligonucleotide
aagggugguauaaagaacu

SEQ ID NO: 2479463 - RNA, 19 nt, Artificial Sequence
  Description of Artificial Sequence: Synthetic oligonucleotide
uaauaauaauaauaauaua

SEQ ID NO: 2479464 - RNA, 19 nt, Artificial Sequence
  Description of Artificial Sequence: Synthetic oligonucleotide
aaguaguuuucuuuccacu

SEQ ID NO: 2479465 - RNA, 19 nt, Artificial Sequence
  Description of Artificial Sequence: Synthetic oligonucleotide
uuugcaagccuaagccugg

SEQ ID NO: 2479466 - RNA, 19 nt, Artificial Sequence
  Description of Artificial Sequence: Synthetic oligonucleotide
agggaaucaaguuuguccu

SEQ ID NO: 2479467 - RNA, 19 nt, Artificial Sequence
  Description of Artificial Sequence: Synthetic oligonucleotide
aagccuauacacccucuuc

SEQ ID NO: 2479468 - RNA, 19 nt, Artificial Sequence
  Description of Artificial Sequence: Synthetic oligonucleotide
cauuaagggugguauaaag

SEQ ID NO: 2479469 - RNA, 19 nt, Artificial Sequence
  Description of Artificial Sequence: Synthetic oligonucleotide
acaaaauaaaguaguuuuc

SEQ ID NO: 2479470 - RNA, 19 nt, Artificial Sequence
  Description of Artificial Sequence: Synthetic oligonucleotide
aacaacaaugacaaaacuu

SEQ ID NO: 2479471 - RNA, 19 nt, Artificial Sequence
  Description of Artificial Sequence: Synthetic oligonucleotide
gaggguuccccucaugagg

SEQ ID NO: 2479472 - RNA, 19 nt, Artificial Sequence
  Description of Artificial Sequence: Synthetic oligonucleotide
guauaaagaacucaccaaa

SEQ ID NO: 2479473 - RNA, 19 nt, Artificial Sequence
  Description of Artificial Sequence: Synthetic oligonucleotide
aggauagguggaucaauac

SEQ ID NO: 2479474 - RNA, 19 nt, Artificial Sequence
  Description of Artificial Sequence: Synthetic oligonucleotide
ugcaccaauagcaaagcau

SEQ ID NO: 2479475 - RNA, 19 nt, Artificial Sequence
  Description of Artificial Sequence: Synthetic oligonucleotide
uaguuuucuuuccacuuca

SEQ ID NO: 2479476 - RNA, 19 nt, Artificial Sequence
  Description of Artificial Sequence: Synthetic oligonucleotide
ggagaauuugaagucaugg

SEQ ID NO: 2479477 - RNA, 19 nt, Artificial Sequence
  Description of Artificial Sequence: Synthetic oligonucleotide
uuugcacacaucacccaag

SEQ ID NO: 2479478 - RNA, 19 nt, Artificial Sequence
  Description of Artificial Sequence: Synthetic oligonucleotide
ucaaguuuguccugugcca

SEQ ID NO: 2479479 - RNA, 19 nt, Artificial Sequence
  Description of Artificial Sequence: Synthetic oligonucleotide
uaggcagugacuccuacaa

SEQ ID NO: 2479480 - RNA, 19 nt, Artificial Sequence
  Description of Artificial Sequence: Synthetic oligonucleotide
gaccaacaaaauaaaguag

SEQ ID NO: 2479481 - RNA, 19 nt, Artificial Sequence
  Description of Artificial Sequence: Synthetic oligonucleotide
auaauauaguggcugcagu

SEQ ID NO: 2479482 - RNA, 19 nt, Artificial Sequence
  Description of Artificial Sequence: Synthetic oligonucleotide
cuauacacccucuucccag

SEQ ID NO: 2479483 - RNA, 19 nt, Artificial Sequence
  Description of Artificial Sequence: Synthetic oligonucleotide
uuuugcacacaucacccaa

SEQ ID NO: 2479484 - RNA, 19 nt, Artificial Sequence
  Description of Artificial Sequence: Synthetic oligonucleotide
ggaagccuaggauaggugg

SEQ ID NO: 2479485 - RNA, 19 nt, Artificial Sequence
  Description of Artificial Sequence: Synthetic oligonucleotide
uaagggugguauaaagaac

SEQ ID NO: 2479486 - RNA, 19 nt, Artificial Sequence
  Description of Artificial Sequence: Synthetic oligonucleotide
ugugccauuuugcaagccu

SEQ ID NO: 2479487 - RNA, 19 nt, Artificial Sequence
  Description of Artificial Sequence: Synthetic oligonucleotide
uuuguccugugccauuuug

SEQ ID NO: 2479488 - RNA, 19 nt, Artificial Sequence
  Description of Artificial Sequence: Synthetic oligonucleotide
gacaaaacuucauguccag

SEQ ID NO: 2479489 - RNA, 19 nt, Artificial Sequence
  Description of Artificial Sequence: Synthetic oligonucleotide
aaagggaaucaaguuuguc

SEQ ID NO: 2479490 - RNA, 19 nt, Artificial Sequence
  Description of Artificial Sequence: Synthetic oligonucleotide
uuaaagccuauacacccuc

SEQ ID NO: 2479491 - RNA, 19 nt, Artificial Sequence
  Description of Artificial Sequence: Synthetic oligonucleotide
auuuugcaagccuaagccu

SEQ ID NO: 2479492 - RNA, 19 nt, Artificial Sequence
  Description of Artificial Sequence: Synthetic oligonucleotide
ucuggcugcccacuaaaca

SEQ ID NO: 2479493 - RNA, 19 nt, Artificial Sequence
  Description of Artificial Sequence: Synthetic oligonucleotide
uccucugauaggcagugac

SEQ ID NO: 2479494 - RNA, 19 nt, Artificial Sequence
  Description of Artificial Sequence: Synthetic oligonucleotide
cacuggaccaacaaaauaa

SEQ ID NO: 2479495 - RNA, 19 nt, Artificial Sequence
  Description of Artificial Sequence: Synthetic oligonucleotide
acaauuuugcacacaucac

SEQ ID NO: 2479496 - RNA, 19 nt, Artificial Sequence
  Description of Artificial Sequence: Synthetic oligonucleotide
uaauauaguggcugcaguu

SEQ ID NO: 2479497 - RNA, 19 nt, Artificial Sequence
  Description of Artificial Sequence: Synthetic oligonucleotide
cuguagcuggccauggagg

SEQ ID NO: 2479498 - RNA, 19 nt, Artificial Sequence
  Description of Artificial Sequence: Synthetic oligonucleotide
aguaguuuucuuuccacuu

SEQ ID NO: 2479499 - RNA, 19 nt, Artificial Sequence
  Description of Artificial Sequence: Synthetic oligonucleotide
uguagcuggccauggagga

SEQ ID NO: 2479500 - RNA, 19 nt, Artificial Sequence
  Description of Artificial Sequence: Synthetic oligonucleotide
uuguccugugccauuuugc

SEQ ID NO: 2479501 - RNA, 19 nt, Artificial Sequence
  Description of Artificial Sequence: Synthetic oligonucleotide
auaccaaaugaccucuccu

SEQ ID NO: 2479502 - RNA, 19 nt, Artificial Sequence
  Description of Artificial Sequence: Synthetic oligonucleotide
ggaucaauaccaaaugacc

SEQ ID NO: 2479503 - RNA, 19 nt, Artificial Sequence
  Description of Artificial Sequence: Synthetic oligonucleotide
gaggcagcgagguuucucc

SEQ ID NO: 2479504 - RNA, 19 nt, Artificial Sequence
  Description of Artificial Sequence: Synthetic oligonucleotide
acaaaacuucauguccagc

SEQ ID NO: 2479505 - RNA, 19 nt, Artificial Sequence
  Description of Artificial Sequence: Synthetic oligonucleotide
ggggaugggaaacugaggc

SEQ ID NO: 2479506 - RNA, 19 nt, Artificial Sequence
  Description of Artificial Sequence: Synthetic oligonucleotide
uuuucccuuauuuccucug

SEQ ID NO: 2479507 - RNA, 19 nt, Artificial Sequence
  Description of Artificial Sequence: Synthetic oligonucleotide
caugguugguguuguagag

SEQ ID NO: 2479508 - RNA, 19 nt, Artificial Sequence
  Description of Artificial Sequence: Synthetic oligonucleotide
cacacaucacccaagacaa

SEQ ID NO: 2479509 - RNA, 19 nt, Artificial Sequence
  Description of Artificial Sequence: Synthetic oligonucleotide
ucugauaggcagugacucc

SEQ ID NO: 2479510 - RNA, 19 nt, Artificial Sequence
  Description of Artificial Sequence: Synthetic oligonucleotide
uuucccuuauuuccucuga

SEQ ID NO: 2479511 - RNA, 19 nt, Artificial Sequence
  Description of Artificial Sequence: Synthetic oligonucleotide
auuaagggugguauaaaga

SEQ ID NO: 2479512 - RNA, 19 nt, Artificial Sequence
  Description of Artificial Sequence: Synthetic oligonucleotide
ggauagguggaucaauacc

SEQ ID NO: 2479513 - RNA, 19 nt, Artificial Sequence
  Description of Artificial Sequence: Synthetic oligonucleotide
gaagucaugguugguguug

SEQ ID NO: 2479514 - RNA, 19 nt, Artificial Sequence
  Description of Artificial Sequence: Synthetic oligonucleotide
uaggauagguggaucaaua

SEQ ID NO: 2479515 - RNA, 19 nt, Artificial Sequence
  Description of Artificial Sequence: Synthetic oligonucleotide
ccaaagggaaucaaguuug

SEQ ID NO: 2479516 - RNA, 19 nt, Artificial Sequence
  Description of Artificial Sequence: Synthetic oligonucleotide
ggaccaacaaaauaaagua

SEQ ID NO: 2479517 - RNA, 19 nt, Artificial Sequence
  Description of Artificial Sequence: Synthetic oligonucleotide
guggagaaggguuggauca

SEQ ID NO: 2479518 - RNA, 19 nt, Artificial Sequence
  Description of Artificial Sequence: Synthetic oligonucleotide
gcaagccuaagccuggugg

SEQ ID NO: 2479519 - RNA, 19 nt, Artificial Sequence
  Description of Artificial Sequence: Synthetic oligonucleotide
uucauggaggggaugggaa

SEQ ID NO: 2479520 - RNA, 19 nt, Artificial Sequence
  Description of Artificial Sequence: Synthetic oligonucleotide
gaggggaugggaaacugag

SEQ ID NO: 2479521 - RNA, 19 nt, Artificial Sequence
  Description of Artificial Sequence: Synthetic oligonucleotide
gguggaucaauaccaaaug

SEQ ID NO: 2479522 - RNA, 19 nt, Artificial Sequence
  Description of Artificial Sequence: Synthetic oligonucleotide
aagaacucaccaaaccaga

SEQ ID NO: 2479523 - RNA, 19 nt, Artificial Sequence
  Description of Artificial Sequence: Synthetic oligonucleotide
caacacuggaccaacaaaa

SEQ ID NO: 2479524 - RNA, 19 nt, Artificial Sequence
  Description of Artificial Sequence: Synthetic oligonucleotide
cuggaccaacaaaauaaag

SEQ ID NO: 2479525 - RNA, 19 nt, Artificial Sequence
  Description of Artificial Sequence: Synthetic oligonucleotide
auaguggcugcaguugugg

SEQ ID NO: 2479526 - RNA, 19 nt, Artificial Sequence
  Description of Artificial Sequence: Synthetic oligonucleotide
aggguuccccucaugaggc

SEQ ID NO: 2479527 - RNA, 19 nt, Artificial Sequence
  Description of Artificial Sequence: Synthetic oligonucleotide
uugaggagaggaagccuag

SEQ ID NO: 2479528 - RNA, 19 nt, Artificial Sequence
  Description of Artificial Sequence: Synthetic oligonucleotide
uauaguggcugcaguugug

SEQ ID NO: 2479529 - RNA, 19 nt, Artificial Sequence
  Description of Artificial Sequence: Synthetic oligonucleotide
uccugugcuuucucggccg

SEQ ID NO: 2479530 - RNA, 19 nt, Artificial Sequence
  Description of Artificial Sequence: Synthetic oligonucleotide
uauacacccucuucccagc

SEQ ID NO: 2479531 - RNA, 19 nt, Artificial Sequence
  Description of Artificial Sequence: Synthetic oligonucleotide
ugaggguuccccucaugag

SEQ ID NO: 2479532 - RNA, 19 nt, Artificial Sequence
  Description of Artificial Sequence: Synthetic oligonucleotide
ggugguauaaagaacucac

SEQ ID NO: 2479533 - RNA, 19 nt, Artificial Sequence
  Description of Artificial Sequence: Synthetic oligonucleotide
uuauuuccucugauaggca

SEQ ID NO: 2479534 - RNA, 19 nt, Artificial Sequence
  Description of Artificial Sequence: Synthetic oligonucleotide
gaucaauaccaaaugaccu

SEQ ID NO: 2479535 - RNA, 19 nt, Artificial Sequence
  Description of Artificial Sequence: Synthetic oligonucleotide
aaagccuauacacccucuu

SEQ ID NO: 2479536 - RNA, 19 nt, Artificial Sequence
  Description of Artificial Sequence: Synthetic oligonucleotide
uugcacacaucacccaaga

SEQ ID NO: 2479537 - RNA, 19 nt, Artificial Sequence
  Description of Artificial Sequence: Synthetic oligonucleotide
auacacccucuucccagcc

SEQ ID NO: 2479538 - RNA, 19 nt, Artificial Sequence
  Description of Artificial Sequence: Synthetic oligonucleotide
agaaggguuggaucaucag

SEQ ID NO: 2479539 - RNA, 19 nt, Artificial Sequence
  Description of Artificial Sequence: Synthetic oligonucleotide
uaccaaaugaccucuccuu

SEQ ID NO: 2479540 - RNA, 19 nt, Artificial Sequence
  Description of Artificial Sequence: Synthetic oligonucleotide
uuuccucugauaggcagug

SEQ ID NO: 2479541 - RNA, 19 nt, Artificial Sequence
  Description of Artificial Sequence: Synthetic oligonucleotide
agcaaagcauuaagggugg

SEQ ID NO: 2479542 - RNA, 19 nt, Artificial Sequence
  Description of Artificial Sequence: Synthetic oligonucleotide
auguccagcaacacuggac

SEQ ID NO: 2479543 - RNA, 19 nt, Artificial Sequence
  Description of Artificial Sequence: Synthetic oligonucleotide
guggaucaauaccaaauga

SEQ ID NO: 2479544 - RNA, 19 nt, Artificial Sequence
  Description of Artificial Sequence: Synthetic oligonucleotide
cucugauaggcagugacuc

SEQ ID NO: 2479545 - RNA, 19 nt, Artificial Sequence
  Description of Artificial Sequence: Synthetic oligonucleotide
gguauaaagaacucaccaa

SEQ ID NO: 2479546 - RNA, 19 nt, Artificial Sequence
  Description of Artificial Sequence: Synthetic oligonucleotide
ucaugaggcagcgagguuu

SEQ ID NO: 2479547 - RNA, 19 nt, Artificial Sequence
  Description of Artificial Sequence: Synthetic oligonucleotide
gcacacaucacccaagaca

SEQ ID NO: 2479548 - RNA, 19 nt, Artificial Sequence
  Description of Artificial Sequence: Synthetic oligonucleotide
gaguugaggagaggaagcc

SEQ ID NO: 2479549 - RNA, 19 nt, Artificial Sequence
  Description of Artificial Sequence: Synthetic oligonucleotide
uaaagccuauacacccucu

SEQ ID NO: 2479550 - RNA, 19 nt, Artificial Sequence
  Description of Artificial Sequence: Synthetic oligonucleotide
caaugacaaaacuucaugu

SEQ ID NO: 2479551 - RNA, 19 nt, Artificial Sequence
  Description of Artificial Sequence: Synthetic oligonucleotide
gaggagaggaagccuagga

SEQ ID NO: 2479552 - RNA, 19 nt, Artificial Sequence
  Description of Artificial Sequence: Synthetic oligonucleotide
augguugguguuguagagg

SEQ ID NO: 2479553 - RNA, 19 nt, Artificial Sequence
  Description of Artificial Sequence: Synthetic oligonucleotide
ggggccuaaggccagaccc

SEQ ID NO: 2479554 - RNA, 19 nt, Artificial Sequence
  Description of Artificial Sequence: Synthetic oligonucleotide
agcauuaagggugguauaa

SEQ ID NO: 2479555 - RNA, 19 nt, Artificial Sequence
  Description of Artificial Sequence: Synthetic oligonucleotide
gguguuguagaggggaggg

SEQ ID NO: 2479556 - RNA, 19 nt, Artificial Sequence
  Description of Artificial Sequence: Synthetic oligonucleotide
gaacucaccaaaccagaaa

SEQ ID NO: 2479557 - RNA, 19 nt, Artificial Sequence
  Description of Artificial Sequence: Synthetic oligonucleotide
ugcuuucucggccgggagc

SEQ ID NO: 2479558 - RNA, 19 nt, Artificial Sequence
  Description of Artificial Sequence: Synthetic oligonucleotide
gugacuccuacaauuuugc

SEQ ID NO: 2479559 - RNA, 19 nt, Artificial Sequence
  Description of Artificial Sequence: Synthetic oligonucleotide
ugguguuguagaggggagg

SEQ ID NO: 2479560 - RNA, 19 nt, Artificial Sequence
  Description of Artificial Sequence: Synthetic oligonucleotide
acacuucagcagcucuggc

SEQ ID NO: 2479561 - RNA, 19 nt, Artificial Sequence
  Description of Artificial Sequence: Synthetic oligonucleotide
augggaguugaggagagga

SEQ ID NO: 2479562 - RNA, 19 nt, Artificial Sequence
  Description of Artificial Sequence: Synthetic oligonucleotide
uuucuccacucccugcgac

SEQ ID NO: 2479563 - RNA, 19 nt, Artificial Sequence
  Description of Artificial Sequence: Synthetic oligonucleotide
cacacuucagcagcucugg

SEQ ID NO: 2479564 - RNA, 19 nt, Artificial Sequence
  Description of Artificial Sequence: Synthetic oligonucleotide
uccaccauccacagacccu

SEQ ID NO: 2479565 - RNA, 19 nt, Artificial Sequence
  Description of Artificial Sequence: Synthetic oligonucleotide
agcaacacuggaccaacaa

SEQ ID NO: 2479566 - RNA, 19 nt, Artificial Sequence
  Description of Artificial Sequence: Synthetic oligonucleotide
aucacccaagacaacaaca

SEQ ID NO: 2479567 - RNA, 19 nt, Artificial Sequence
  Description of Artificial Sequence: Synthetic oligonucleotide
ugaggagaggaagccuagg

SEQ ID NO: 2479568 - RNA, 19 nt, Artificial Sequence
  Description of Artificial Sequence: Synthetic oligonucleotide
aacacuggaccaacaaaau

SEQ ID NO: 2479569 - RNA, 19 nt, Artificial Sequence
  Description of Artificial Sequence: Synthetic oligonucleotide
gugguauaaagaacucacc

SEQ ID NO: 2479570 - RNA, 19 nt, Artificial Sequence
  Description of Artificial Sequence: Synthetic oligonucleotide
auuaaagccuauacacccu

SEQ ID NO: 2479571 - RNA, 19 nt, Artificial Sequence
  Description of Artificial Sequence: Synthetic oligonucleotide
ccuuauuuccucugauagg

SEQ ID NO: 2479572 - RNA, 19 nt, Artificial Sequence
  Description of Artificial Sequence: Synthetic oligonucleotide
aagucaugguugguguugu

SEQ ID NO: 2479573 - RNA, 19 nt, Artificial Sequence
  Description of Artificial Sequence: Synthetic oligonucleotide
aagccuaagccugguggag

SEQ ID NO: 2479574 - RNA, 19 nt, Artificial Sequence
  Description of Artificial Sequence: Synthetic oligonucleotide
aagcauuaagggugguaua

SEQ ID NO: 2479575 - RNA, 19 nt, Artificial Sequence
  Description of Artificial Sequence: Synthetic oligonucleotide
ugccauuuugcaagccuaa

SEQ ID NO: 2479576 - RNA, 19 nt, Artificial Sequence
  Description of Artificial Sequence: Synthetic oligonucleotide
agguggaucaauaccaaau

SEQ ID NO: 2479577 - RNA, 19 nt, Artificial Sequence
  Description of Artificial Sequence: Synthetic oligonucleotide
ugacaucugaggguucccc

SEQ ID NO: 2479578 - RNA, 19 nt, Artificial Sequence
  Description of Artificial Sequence: Synthetic oligonucleotide
ccauuuugcaagccuaagc

SEQ ID NO: 2479579 - RNA, 19 nt, Artificial Sequence
  Description of Artificial Sequence: Synthetic oligonucleotide
accaaaugaccucuccuuu

SEQ ID NO: 2479580 - RNA, 19 nt, Artificial Sequence
  Description of Artificial Sequence: Synthetic oligonucleotide
uucccuuauuuccucugau

SEQ ID NO: 2479581 - RNA, 19 nt, Artificial Sequence
  Description of Artificial Sequence: Synthetic oligonucleotide
cuacaauuuugcacacauc

SEQ ID NO: 2479582 - RNA, 19 nt, Artificial Sequence
  Description of Artificial Sequence: Synthetic oligonucleotide
acacuggaccaacaaaaua

SEQ ID NO: 2479583 - RNA, 19 nt, Artificial Sequence
  Description of Artificial Sequence: Synthetic oligonucleotide
accagaaacaugggaguug

SEQ ID NO: 2479584 - RNA, 19 nt, Artificial Sequence
  Description of Artificial Sequence: Synthetic oligonucleotide
ugggaguugaggagaggaa

SEQ ID NO: 2479585 - RNA, 19 nt, Artificial Sequence
  Description of Artificial Sequence: Synthetic oligonucleotide
uguggcuguaggagaauuu

SEQ ID NO: 2479586 - RNA, 19 nt, Artificial Sequence
  Description of Artificial Sequence: Synthetic oligonucleotide
ugcacacaucacccaagac

SEQ ID NO: 2479587 - RNA, 19 nt, Artificial Sequence
  Description of Artificial Sequence: Synthetic oligonucleotide
ucccuuauuuccucugaua

SEQ ID NO: 2479588 - RNA, 19 nt, Artificial Sequence
  Description of Artificial Sequence: Synthetic oligonucleotide
uccacuucauggaggggau

SEQ ID NO: 2479589 - RNA, 19 nt, Artificial Sequence
  Description of Artificial Sequence: Synthetic oligonucleotide
aaccagaaacaugggaguu

SEQ ID NO: 2479590 - RNA, 19 nt, Artificial Sequence
  Description of Artificial Sequence: Synthetic oligonucleotide
gaagccuaggauaggugga

SEQ ID NO: 2479591 - RNA, 19 nt, Artificial Sequence
  Description of Artificial Sequence: Synthetic oligonucleotide
uagguggaucaauaccaaa

SEQ ID NO: 2479592 - RNA, 19 nt, Artificial Sequence
  Description of Artificial Sequence: Synthetic oligonucleotide
acccuccugugcuuucucg

SEQ ID NO: 2479593 - RNA, 19 nt, Artificial Sequence
  Description of Artificial Sequence: Synthetic oligonucleotide
ugugcuuucucggccggga

SEQ ID NO: 2479594 - RNA, 19 nt, Artificial Sequence
  Description of Artificial Sequence: Synthetic oligonucleotide
gggaguugaggagaggaag

SEQ ID NO: 2479595 - RNA, 19 nt, Artificial Sequence
  Description of Artificial Sequence: Synthetic oligonucleotide
ggagaggaagccuaggaua

SEQ ID NO: 2479596 - RNA, 19 nt, Artificial Sequence
  Description of Artificial Sequence: Synthetic oligonucleotide
ugcaagccuaagccuggug

SEQ ID NO: 2479597 - RNA, 19 nt, Artificial Sequence
  Description of Artificial Sequence: Synthetic oligonucleotide
cugaggguuccccucauga

SEQ ID NO: 2479598 - RNA, 19 nt, Artificial Sequence
  Description of Artificial Sequence: Synthetic oligonucleotide
uuuugcccuccuccucugc

SEQ ID NO: 2479599 - RNA, 19 nt, Artificial Sequence
  Description of Artificial Sequence: Synthetic oligonucleotide
ggaguugaggagaggaagc

SEQ ID NO: 2479600 - RNA, 19 nt, Artificial Sequence
  Description of Artificial Sequence: Synthetic oligonucleotide
caagccuaagccuggugga

SEQ ID NO: 2479601 - RNA, 19 nt, Artificial Sequence
  Description of Artificial Sequence: Synthetic oligonucleotide
aaguuuguccugugccauu

SEQ ID NO: 2479602 - RNA, 19 nt, Artificial Sequence
  Description of Artificial Sequence: Synthetic oligonucleotide
agggugguauaaagaacuc

SEQ ID NO: 2479603 - RNA, 19 nt, Artificial Sequence
  Description of Artificial Sequence: Synthetic oligonucleotide
aguugaggagaggaagccu

SEQ ID NO: 2479604 - RNA, 19 nt, Artificial Sequence
  Description of Artificial Sequence: Synthetic oligonucleotide
ugaagucaugguugguguu

SEQ ID NO: 2479605 - RNA, 19 nt, Artificial Sequence
  Description of Artificial Sequence: Synthetic oligonucleotide
aagccuaggauagguggau

SEQ ID NO: 2479606 - RNA, 19 nt, Artificial Sequence
  Description of Artificial Sequence: Synthetic oligonucleotide
gguggagaaggguuggauc

SEQ ID NO: 2479607 - RNA, 19 nt, Artificial Sequence
  Description of Artificial Sequence: Synthetic oligonucleotide
gagaaggguuggaucauca

SEQ ID NO: 2479608 - RNA, 19 nt, Artificial Sequence
  Description of Artificial Sequence: Synthetic oligonucleotide
uuccccucaugaggcagcg

SEQ ID NO: 2479609 - RNA, 19 nt, Artificial Sequence
  Description of Artificial Sequence: Synthetic oligonucleotide
acuggaccaacaaaauaaa

SEQ ID NO: 2479610 - RNA, 19 nt, Artificial Sequence
  Description of Artificial Sequence: Synthetic oligonucleotide
accaaaccagaaacauggg

SEQ ID NO: 2479611 - RNA, 19 nt, Artificial Sequence
  Description of Artificial Sequence: Synthetic oligonucleotide
acucccugcgacaccuccc

SEQ ID NO: 2479612 - RNA, 19 nt, Artificial Sequence
  Description of Artificial Sequence: Synthetic oligonucleotide
guugaggagaggaagccua

SEQ ID NO: 2479613 - RNA, 19 nt, Artificial Sequence
  Description of Artificial Sequence: Synthetic oligonucleotide
gggaugggaaacugaggcc

SEQ ID NO: 2479614 - RNA, 19 nt, Artificial Sequence
  Description of Artificial Sequence: Synthetic oligonucleotide
gccuauacacccucuuccc

SEQ ID NO: 2479615 - RNA, 19 nt, Artificial Sequence
  Description of Artificial Sequence: Synthetic oligonucleotide
acaugggaguugaggagag

SEQ ID NO: 2479616 - RNA, 19 nt, Artificial Sequence
  Description of Artificial Sequence: Synthetic oligonucleotide
cuccuacaauuuugcacac

SEQ ID NO: 2479617 - RNA, 19 nt, Artificial Sequence
  Description of Artificial Sequence: Synthetic oligonucleotide
uucccagccugcaccaaua

SEQ ID NO: 2479618 - RNA, 19 nt, Artificial Sequence
  Description of Artificial Sequence: Synthetic oligonucleotide
aggggaugggaaacugagg

SEQ ID NO: 2479619 - RNA, 19 nt, Artificial Sequence
  Description of Artificial Sequence: Synthetic oligonucleotide
cacucccugcgacaccucc

SEQ ID NO: 2479620 - RNA, 19 nt, Artificial Sequence
  Description of Artificial Sequence: Synthetic oligonucleotide
uggcugcccacuaaacauu

SEQ ID NO: 2479621 - RNA, 19 nt, Artificial Sequence
  Description of Artificial Sequence: Synthetic oligonucleotide
uggcuguagcuggccaugg

SEQ ID NO: 2479622 - RNA, 19 nt, Artificial Sequence
  Description of Artificial Sequence: Synthetic oligonucleotide
cucuggcugcccacuaaac

SEQ ID NO: 2479623 - RNA, 19 nt, Artificial Sequence
  Description of Artificial Sequence: Synthetic oligonucleotide
agaacucaccaaaccagaa

SEQ ID NO: 2479624 - RNA, 19 nt, Artificial Sequence
  Description of Artificial Sequence: Synthetic oligonucleotide
aggcccaaagggaaucaag

SEQ ID NO: 2479625 - RNA, 19 nt, Artificial Sequence
  Description of Artificial Sequence: Synthetic oligonucleotide
aggagaauuugaagucaug

SEQ ID NO: 2479626 - RNA, 19 nt, Artificial Sequence
  Description of Artificial Sequence: Synthetic oligonucleotide
auagguggaucaauaccaa

SEQ ID NO: 2479627 - RNA, 19 nt, Artificial Sequence
  Description of Artificial Sequence: Synthetic oligonucleotide
aguuuguccugugccauuu

SEQ ID NO: 2479628 - RNA, 19 nt, Artificial Sequence
  Description of Artificial Sequence: Synthetic oligonucleotide
gaugggaaacugaggccca

SEQ ID NO: 2479629 - RNA, 19 nt, Artificial Sequence
  Description of Artificial Sequence: Synthetic oligonucleotide
agccuaggauagguggauc

SEQ ID NO: 2479630 - RNA, 19 nt, Artificial Sequence
  Description of Artificial Sequence: Synthetic oligonucleotide
gacaucugaggguuccccu

SEQ ID NO: 2479631 - RNA, 19 nt, Artificial Sequence
  Description of Artificial Sequence: Synthetic oligonucleotide
ugaggcagcgagguuucuc

SEQ ID NO: 2479632 - RNA, 19 nt, Artificial Sequence
  Description of Artificial Sequence: Synthetic oligonucleotide
guagcuggccauggaggag

SEQ ID NO: 2479633 - RNA, 19 nt, Artificial Sequence
  Description of Artificial Sequence: Synthetic oligonucleotide
gggaaucaaguuuguccug

SEQ ID NO: 2479634 - RNA, 19 nt, Artificial Sequence
  Description of Artificial Sequence: Synthetic oligonucleotide
ccuaaggccagaccccagc

SEQ ID NO: 2479635 - RNA, 19 nt, Artificial Sequence
  Description of Artificial Sequence: Synthetic oligonucleotide
gcgagguuucuccacuccc

SEQ ID NO: 2479636 - RNA, 19 nt, Artificial Sequence
  Description of Artificial Sequence: Synthetic oligonucleotide
caucugaggguuccccuca

SEQ ID NO: 2479637 - RNA, 19 nt, Artificial Sequence
  Description of Artificial Sequence: Synthetic oligonucleotide
acaucacccaagacaacaa

SEQ ID NO: 2479638 - RNA, 19 nt, Artificial Sequence
  Description of Artificial Sequence: Synthetic oligonucleotide
caugggaguugaggagagg

SEQ ID NO: 2479639 - RNA, 19 nt, Artificial Sequence
  Description of Artificial Sequence: Synthetic oligonucleotide
gccuaggauagguggauca

SEQ ID NO: 2479640 - RNA, 19 nt, Artificial Sequence
  Description of Artificial Sequence: Synthetic oligonucleotide
agaccccagccccacacuu

SEQ ID NO: 2479641 - RNA, 19 nt, Artificial Sequence
  Description of Artificial Sequence: Synthetic oligonucleotide
cugaggcccaaagggaauc

SEQ ID NO: 2479642 - RNA, 19 nt, Artificial Sequence
  Description of Artificial Sequence: Synthetic oligonucleotide
ucggccgggagccccugcu

SEQ ID NO: 2479643 - RNA, 19 nt, Artificial Sequence
  Description of Artificial Sequence: Synthetic oligonucleotide
auggaggggaugggaaacu

SEQ ID NO: 2479644 - RNA, 19 nt, Artificial Sequence
  Description of Artificial Sequence: Synthetic oligonucleotide
agccugcaccaauagcaaa

SEQ ID NO: 2479645 - RNA, 19 nt, Artificial Sequence
  Description of Artificial Sequence: Synthetic oligonucleotide
guuccccucaugaggcagc

SEQ ID NO: 2479646 - RNA, 19 nt, Artificial Sequence
  Description of Artificial Sequence: Synthetic oligonucleotide
cucaccaaaccagaaacau

SEQ ID NO: 2479647 - RNA, 19 nt, Artificial Sequence
  Description of Artificial Sequence: Synthetic oligonucleotide
ggcagugacuccuacaauu

SEQ ID NO: 2479648 - RNA, 19 nt, Artificial Sequence
  Description of Artificial Sequence: Synthetic oligonucleotide
agccuaagccugguggaga

SEQ ID NO: 2479649 - RNA, 19 nt, Artificial Sequence
  Description of Artificial Sequence: Synthetic oligonucleotide
cauguccagcaacacugga

SEQ ID NO: 2479650 - RNA, 19 nt, Artificial Sequence
  Description of Artificial Sequence: Synthetic oligonucleotide
caccaauagcaaagcauua

SEQ ID NO: 2479651 - RNA, 19 nt, Artificial Sequence
  Description of Artificial Sequence: Synthetic oligonucleotide
cugauaggcagugacuccu

SEQ ID NO: 2479652 - RNA, 19 nt, Artificial Sequence
  Description of Artificial Sequence: Synthetic oligonucleotide
ccugcaccaauagcaaagc

SEQ ID NO: 2479653 - RNA, 19 nt, Artificial Sequence
  Description of Artificial Sequence: Synthetic oligonucleotide
ccacacuucagcagcucug

SEQ ID NO: 2479654 - RNA, 19 nt, Artificial Sequence
  Description of Artificial Sequence: Synthetic oligonucleotide
cugcaccaauagcaaagca

SEQ ID NO: 2479655 - RNA, 19 nt, Artificial Sequence
  Description of Artificial Sequence: Synthetic oligonucleotide
cauggaggaggggcucugc

SEQ ID NO: 2479656 - RNA, 19 nt, Artificial Sequence
  Description of Artificial Sequence: Synthetic oligonucleotide
aggcagugacuccuacaau

SEQ ID NO: 2479657 - RNA, 19 nt, Artificial Sequence
  Description of Artificial Sequence: Synthetic oligonucleotide
aggcagcgagguuucucca

SEQ ID NO: 2479658 - RNA, 19 nt, Artificial Sequence
  Description of Artificial Sequence: Synthetic oligonucleotide
gugacaucugaggguuccc

SEQ ID NO: 2479659 - RNA, 19 nt, Artificial Sequence
  Description of Artificial Sequence: Synthetic oligonucleotide
gguuccccucaugaggcag

SEQ ID NO: 2479660 - RNA, 19 nt, Artificial Sequence
  Description of Artificial Sequence: Synthetic oligonucleotide
ccuacaauuuugcacacau

SEQ ID NO: 2479661 - RNA, 19 nt, Artificial Sequence
  Description of Artificial Sequence: Synthetic oligonucleotide
cacccucuucccagccugc

SEQ ID NO: 2479662 - RNA, 19 nt, Artificial Sequence
  Description of Artificial Sequence: Synthetic oligonucleotide
ggaaucaaguuuguccugu

SEQ ID NO: 2479663 - RNA, 19 nt, Artificial Sequence
  Description of Artificial Sequence: Synthetic oligonucleotide
cugccacugcuccaccauc

SEQ ID NO: 2479664 - RNA, 19 nt, Artificial Sequence
  Description of Artificial Sequence: Synthetic oligonucleotide
acugaggcccaaagggaau

SEQ ID NO: 2479665 - RNA, 19 nt, Artificial Sequence
  Description of Artificial Sequence: Synthetic oligonucleotide
uugcaagccuaagccuggu

SEQ ID NO: 2479666 - RNA, 19 nt, Artificial Sequence
  Description of Artificial Sequence: Synthetic oligonucleotide
gugccauuuugcaagccua

SEQ ID NO: 2479667 - RNA, 19 nt, Artificial Sequence
  Description of Artificial Sequence: Synthetic oligonucleotide
caaagggaaucaaguuugu

SEQ ID NO: 2479668 - RNA, 19 nt, Artificial Sequence
  Description of Artificial Sequence: Synthetic oligonucleotide
cagccugcaccaauagcaa

SEQ ID NO: 2479669 - RNA, 19 nt, Artificial Sequence
  Description of Artificial Sequence: Synthetic oligonucleotide
ggcagcgagguuucuccac

SEQ ID NO: 2479670 - RNA, 19 nt, Artificial Sequence
  Description of Artificial Sequence: Synthetic oligonucleotide
cccucaugaggcagcgagg

SEQ ID NO: 2479671 - RNA, 19 nt, Artificial Sequence
  Description of Artificial Sequence: Synthetic oligonucleotide
ggaggggcucugcagugac

SEQ ID NO: 2479672 - RNA, 19 nt, Artificial Sequence
  Description of Artificial Sequence: Synthetic oligonucleotide
cccugcgacaccuccccgg

SEQ ID NO: 2479673 - RNA, 19 nt, Artificial Sequence
  Description of Artificial Sequence: Synthetic oligonucleotide
cugugcuuucucggccggg

SEQ ID NO: 2479674 - RNA, 19 nt, Artificial Sequence
  Description of Artificial Sequence: Synthetic oligonucleotide
uuccucugauaggcaguga

SEQ ID NO: 2479675 - RNA, 19 nt, Artificial Sequence
  Description of Artificial Sequence: Synthetic oligonucleotide
cuccacucccugcgacacc

SEQ ID NO: 2479676 - RNA, 19 nt, Artificial Sequence
  Description of Artificial Sequence: Synthetic oligonucleotide
gcaccaauagcaaagcauu

SEQ ID NO: 2479677 - RNA, 19 nt, Artificial Sequence
  Description of Artificial Sequence: Synthetic oligonucleotide
cugcgacaccuccccgggg

SEQ ID NO: 2479678 - RNA, 19 nt, Artificial Sequence
  Description of Artificial Sequence: Synthetic oligonucleotide
cccagccccacacuucagc

SEQ ID NO: 2479679 - RNA, 19 nt, Artificial Sequence
  Description of Artificial Sequence: Synthetic oligonucleotide
ggcccaaagggaaucaagu

SEQ ID NO: 2479680 - RNA, 19 nt, Artificial Sequence
  Description of Artificial Sequence: Synthetic oligonucleotide
ccuauacacccucuuccca

SEQ ID NO: 2479681 - RNA, 19 nt, Artificial Sequence
  Description of Artificial Sequence: Synthetic oligonucleotide
gaggcccaaagggaaucaa

SEQ ID NO: 2479682 - RNA, 19 nt, Artificial Sequence
  Description of Artificial Sequence: Synthetic oligonucleotide
cuuucucggccgggagccc

SEQ ID NO: 2479683 - RNA, 19 nt, Artificial Sequence
  Description of Artificial Sequence: Synthetic oligonucleotide
cccagccugcaccaauagc

SEQ ID NO: 2479684 - RNA, 19 nt, Artificial Sequence
  Description of Artificial Sequence: Synthetic oligonucleotide
ggagaaggguuggaucauc

SEQ ID NO: 2479685 - RNA, 19 nt, Artificial Sequence
  Description of Artificial Sequence: Synthetic oligonucleotide
ccaacaaaauaaaguaguu

SEQ ID NO: 2479686 - RNA, 19 nt, Artificial Sequence
  Description of Artificial Sequence: Synthetic oligonucleotide
ccugugcuuucucggccgg

SEQ ID NO: 2479687 - RNA, 19 nt, Artificial Sequence
  Description of Artificial Sequence: Synthetic oligonucleotide
augggaaacugaggcccaa

SEQ ID NO: 2479688 - RNA, 19 nt, Artificial Sequence
  Description of Artificial Sequence: Synthetic oligonucleotide
caaguuuguccugugccau

SEQ ID NO: 2479689 - RNA, 19 nt, Artificial Sequence
  Description of Artificial Sequence: Synthetic oligonucleotide
ggaggggaugggaaacuga

SEQ ID NO: 2479690 - RNA, 19 nt, Artificial Sequence
  Description of Artificial Sequence: Synthetic oligonucleotide
gccuaagccugguggagaa

SEQ ID NO: 2479691 - RNA, 19 nt, Artificial Sequence
  Description of Artificial Sequence: Synthetic oligonucleotide
cccaaagggaaucaaguuu

SEQ ID NO: 2479692 - RNA, 19 nt, Artificial Sequence
  Description of Artificial Sequence: Synthetic oligonucleotide
acccucuucccagccugca

SEQ ID NO: 2479693 - RNA, 19 nt, Artificial Sequence
  Description of Artificial Sequence: Synthetic oligonucleotide
gcagcgagguuucuccacu

SEQ ID NO: 2479694 - RNA, 19 nt, Artificial Sequence
  Description of Artificial Sequence: Synthetic oligonucleotide
ggggcgacccuccugugcu

SEQ ID NO: 2479695 - RNA, 19 nt, Artificial Sequence
  Description of Artificial Sequence: Synthetic oligonucleotide
gcucugcagugacaucuga

SEQ ID NO: 2479696 - RNA, 19 nt, Artificial Sequence
  Description of Artificial Sequence: Synthetic oligonucleotide
gaggggcucugcagugaca

SEQ ID NO: 2479697 - RNA, 19 nt, Artificial Sequence
  Description of Artificial Sequence: Synthetic oligonucleotide
ggccuaaggccagacccca

SEQ ID NO: 2479698 - RNA, 19 nt, Artificial Sequence
  Description of Artificial Sequence: Synthetic oligonucleotide
uccccucaugaggcagcga

SEQ ID NO: 2479699 - RNA, 19 nt, Artificial Sequence
  Description of Artificial Sequence: Synthetic oligonucleotide
cucggccgggagccccugc

SEQ ID NO: 2479700 - RNA, 19 nt, Artificial Sequence
  Description of Artificial Sequence: Synthetic oligonucleotide
gcccaaagggaaucaaguu

SEQ ID NO: 2479701 - RNA, 19 nt, Artificial Sequence
  Description of Artificial Sequence: Synthetic oligonucleotide
ccucugauaggcagugacu

SEQ ID NO: 2479702 - RNA, 19 nt, Artificial Sequence
  Description of Artificial Sequence: Synthetic oligonucleotide
ccuaagccugguggagaag

SEQ ID NO: 2479703 - RNA, 19 nt, Artificial Sequence
  Description of Artificial Sequence: Synthetic oligonucleotide
ccuaggauagguggaucaa

SEQ ID NO: 2479704 - RNA, 19 nt, Artificial Sequence
  Description of Artificial Sequence: Synthetic oligonucleotide
guuuguccugugccauuuu

SEQ ID NO: 2479705 - RNA, 19 nt, Artificial Sequence
  Description of Artificial Sequence: Synthetic oligonucleotide
ggguuccccucaugaggca

SEQ ID NO: 2479706 - RNA, 19 nt, Artificial Sequence
  Description of Artificial Sequence: Synthetic oligonucleotide
gccuaaggccagaccccag

SEQ ID NO: 2479707 - RNA, 19 nt, Artificial Sequence
  Description of Artificial Sequence: Synthetic oligonucleotide
cugggcccuggcuguagcu

SEQ ID NO: 2479708 - RNA, 19 nt, Artificial Sequence
  Description of Artificial Sequence: Synthetic oligonucleotide
cuguggcuguaggagaauu

SEQ ID NO: 2479709 - RNA, 19 nt, Artificial Sequence
  Description of Artificial Sequence: Synthetic oligonucleotide
ggccauggaggaggggcuc

SEQ ID NO: 2479710 - RNA, 19 nt, Artificial Sequence
  Description of Artificial Sequence: Synthetic oligonucleotide
cgagguuucuccacucccu

SEQ ID NO: 2479711 - RNA, 19 nt, Artificial Sequence
  Description of Artificial Sequence: Synthetic oligonucleotide
cucaugaggcagcgagguu

SEQ ID NO: 2479712 - RNA, 19 nt, Artificial Sequence
  Description of Artificial Sequence: Synthetic oligonucleotide
cccacacuucagcagcucu

SEQ ID NO: 2479713 - RNA, 19 nt, Artificial Sequence
  Description of Artificial Sequence: Synthetic oligonucleotide
gcgacccuccugugcuuuc

SEQ ID NO: 2479714 - RNA, 19 nt, Artificial Sequence
  Description of Artificial Sequence: Synthetic oligonucleotide
cagcucuggcugcccacua

SEQ ID NO: 2479715 - RNA, 19 nt, Artificial Sequence
  Description of Artificial Sequence: Synthetic oligonucleotide
ggccagaccccagccccac

SEQ ID NO: 2479716 - RNA, 19 nt, Artificial Sequence
  Description of Artificial Sequence: Synthetic oligonucleotide
ccccagccccacacuucag

SEQ ID NO: 2479717 - RNA, 19 nt, Artificial Sequence
  Description of Artificial Sequence: Synthetic oligonucleotide
ccuggcuguagcuggccau

SEQ ID NO: 2479718 - RNA, 19 nt, Artificial Sequence
  Description of Artificial Sequence: Synthetic oligonucleotide
ccccacacuucagcagcuc

SEQ ID NO: 2479719 - RNA, 19 nt, Artificial Sequence
  Description of Artificial Sequence: Synthetic oligonucleotide
ccacucccugcgacaccuc

SEQ ID NO: 2479720 - RNA, 19 nt, Artificial Sequence
  Description of Artificial Sequence: Synthetic oligonucleotide
cgggagccccugcugccac

SEQ ID NO: 2479721 - RNA, 19 nt, Artificial Sequence
  Description of Artificial Sequence: Synthetic oligonucleotide
ccgggagccccugcugcca

SEQ ID NO: 2479722 - RNA, 19 nt, Artificial Sequence
  Description of Artificial Sequence: Synthetic oligonucleotide
ggcgacccuccugugcuuu

SEQ ID NO: 2479723 - RNA, 19 nt, Artificial Sequence
  Description of Artificial Sequence: Synthetic oligonucleotide
gggcgacccuccugugcuu

SEQ ID NO: 2479724 - RNA, 19 nt, Artificial Sequence
  Description of Artificial Sequence: Synthetic oligonucleotide
cgacccuccugugcuuucu

SEQ ID NO: 2479725 - RNA, 19 nt, Artificial Sequence
  Description of Artificial Sequence: Synthetic oligonucleotide
cuuuucagcaaucugaagg

SEQ ID NO: 2479726 - RNA, 19 nt, Artificial Sequence
  Description of Artificial Sequence: Synthetic oligonucleotide
aaaccaauauccauguagc

SEQ ID NO: 2479727 - RNA, 19 nt, Artificial Sequence
  Description of Artificial Sequence: Synthetic oligonucleotide
aaggacgaagcucggaucg

SEQ ID NO: 2479728 - RNA, 19 nt, Artificial Sequence
  Description of Artificial Sequence: Synthetic oligonucleotide
acuugauaagcucugcaac

SEQ ID NO: 2479729 - RNA, 19 nt, Artificial Sequence
  Description of Artificial Sequence: Synthetic oligonucleotide
aaccaauauccauguagcc

SEQ ID NO: 2479730 - RNA, 19 nt, Artificial Sequence
  Description of Artificial Sequence: Synthetic oligonucleotide
gaaguaaaacuugauaagc

SEQ ID NO: 2479731 - RNA, 19 nt, Artificial Sequence
  Description of Artificial Sequence: Synthetic oligonucleotide
uucagcaaucugaaggacg

SEQ ID NO: 2479732 - RNA, 19 nt, Artificial Sequence
  Description of Artificial Sequence: Synthetic oligonucleotide
aaguuuagcuuguucagca

SEQ ID NO: 2479733 - RNA, 19 nt, Artificial Sequence
  Description of Artificial Sequence: Synthetic oligonucleotide
aaaacuugauaagcucugc

SEQ ID NO: 2479734 - RNA, 19 nt, Artificial Sequence
  Description of Artificial Sequence: Synthetic oligonucleotide
gagaaguuuagcuuguuca

SEQ ID NO: 2479735 - RNA, 19 nt, Artificial Sequence
  Description of Artificial Sequence: Synthetic oligonucleotide
agacgcuucaccuucaucu

SEQ ID NO: 2479736 - RNA, 19 nt, Artificial Sequence
  Description of Artificial Sequence: Synthetic oligonucleotide
ucagcaaucugaaggacga

SEQ ID NO: 2479737 - RNA, 19 nt, Artificial Sequence
  Description of Artificial Sequence: Synthetic oligonucleotide
agaaguuuagcuuguucag

SEQ ID NO: 2479738 - RNA, 19 nt, Artificial Sequence
  Description of Artificial Sequence: Synthetic oligonucleotide
uaauugugcaucuccacca

SEQ ID NO: 2479739 - RNA, 19 nt, Artificial Sequence
  Description of Artificial Sequence: Synthetic oligonucleotide
gacggagaaguuuagcuug

SEQ ID NO: 2479740 - RNA, 19 nt, Artificial Sequence
  Description of Artificial Sequence: Synthetic oligonucleotide
aacacugcgcaaucuuccg

SEQ ID NO: 2479741 - RNA, 19 nt, Artificial Sequence
  Description of Artificial Sequence: Synthetic oligonucleotide
auauccauguagccacugc

SEQ ID NO: 2479742 - RNA, 19 nt, Artificial Sequence
  Description of Artificial Sequence: Synthetic oligonucleotide
uuuagcuuguucagcaccu

SEQ ID NO: 2479743 - RNA, 19 nt, Artificial Sequence
  Description of Artificial Sequence: Synthetic oligonucleotide
agggacauaauugugcauc

SEQ ID NO: 2479744 - RNA, 19 nt, Artificial Sequence
  Description of Artificial Sequence: Synthetic oligonucleotide
ggaaguaaaacuugauaag

SEQ ID NO: 2479745 - RNA, 19 nt, Artificial Sequence
  Description of Artificial Sequence: Synthetic oligonucleotide
uugugcaucuccaccaucu

SEQ ID NO: 2479746 - RNA, 19 nt, Artificial Sequence
  Description of Artificial Sequence: Synthetic oligonucleotide
aaucuuccgcaucacguca

SEQ ID NO: 2479747 - RNA, 19 nt, Artificial Sequence
  Description of Artificial Sequence: Synthetic oligonucleotide
uguuccagacgcuucaccu

SEQ ID NO: 2479748 - RNA, 19 nt, Artificial Sequence
  Description of Artificial Sequence: Synthetic oligonucleotide
ugcgcaaucuuccgcauca

SEQ ID NO: 2479749 - RNA, 19 nt, Artificial Sequence
  Description of Artificial Sequence: Synthetic oligonucleotide
guacaaaccaauauccaug

SEQ ID NO: 2479750 - RNA, 19 nt, Artificial Sequence
  Description of Artificial Sequence: Synthetic oligonucleotide
guuuagcuuguucagcacc

SEQ ID NO: 2479751 - RNA, 19 nt, Artificial Sequence
  Description of Artificial Sequence: Synthetic oligonucleotide
aggugaguggguaagucgc

SEQ ID NO: 2479752 - RNA, 19 nt, Artificial Sequence
  Description of Artificial Sequence: Synthetic oligonucleotide
ucuucgaugcgcacguucu

SEQ ID NO: 2479753 - RNA, 19 nt, Artificial Sequence
  Description of Artificial Sequence: Synthetic oligonucleotide
uaagucgcggcgucgaggc

SEQ ID NO: 2479754 - RNA, 19 nt, Artificial Sequence
  Description of Artificial Sequence: Synthetic oligonucleotide
aguuuagcuuguucagcac

SEQ ID NO: 2479755 - RNA, 19 nt, Artificial Sequence
  Description of Artificial Sequence: Synthetic oligonucleotide
cuuucuguucaggugaccc

SEQ ID NO: 2479756 - RNA, 19 nt, Artificial Sequence
  Description of Artificial Sequence: Synthetic oligonucleotide
ugguacaaaccaauaucca

SEQ ID NO: 2479757 - RNA, 19 nt, Artificial Sequence
  Description of Artificial Sequence: Synthetic oligonucleotide
guuggcagggacauaauug

SEQ ID NO: 2479758 - RNA, 19 nt, Artificial Sequence
  Description of Artificial Sequence: Synthetic oligonucleotide
uuccgcaucacgucaucgg

SEQ ID NO: 2479759 - RNA, 19 nt, Artificial Sequence
  Description of Artificial Sequence: Synthetic oligonucleotide
ugcuggagagaguuggcag

SEQ ID NO: 2479760 - RNA, 19 nt, Artificial Sequence
  Description of Artificial Sequence: Synthetic oligonucleotide
ugcaccgucucuugagagg

SEQ ID NO: 2479761 - RNA, 19 nt, Artificial Sequence
  Description of Artificial Sequence: Synthetic oligonucleotide
uccucgagccuucugguac

SEQ ID NO: 2479762 - RNA, 19 nt, Artificial Sequence
  Description of Artificial Sequence: Synthetic oligonucleotide
ucaucggggacggagaagu

SEQ ID NO: 2479763 - RNA, 19 nt, Artificial Sequence
  Description of Artificial Sequence: Synthetic oligonucleotide
gaguggguaagucgcggcg

SEQ ID NO: 2479764 - RNA, 19 nt, Artificial Sequence
  Description of Artificial Sequence: Synthetic oligonucleotide
caggugaguggguaagucg

SEQ ID NO: 2479765 - RNA, 19 nt, Artificial Sequence
  Description of Artificial Sequence: Synthetic oligonucleotide
acacugcgcaaucuuccgc

SEQ ID NO: 2479766 - RNA, 19 nt, Artificial Sequence
  Description of Artificial Sequence: Synthetic oligonucleotide
ccuguaaggagccagcacc

SEQ ID NO: 2479767 - RNA, 19 nt, Artificial Sequence
  Description of Artificial Sequence: Synthetic oligonucleotide
guucaggugaccccaguug

SEQ ID NO: 2479768 - RNA, 19 nt, Artificial Sequence
  Description of Artificial Sequence: Synthetic oligonucleotide
uuugcccgaacccuccgca

SEQ ID NO: 2479769 - RNA, 19 nt, Artificial Sequence
  Description of Artificial Sequence: Synthetic oligonucleotide
gaacacugcgcaaucuucc

SEQ ID NO: 2479770 - RNA, 19 nt, Artificial Sequence
  Description of Artificial Sequence: Synthetic oligonucleotide
cuguaaggagccagcaccc

SEQ ID NO: 2479771 - RNA, 19 nt, Artificial Sequence
  Description of Artificial Sequence: Synthetic oligonucleotide
uacaccgggagaacacugc

SEQ ID NO: 2479772 - RNA, 19 nt, Artificial Sequence
  Description of Artificial Sequence: Synthetic oligonucleotide
aauauccauguagccacug

SEQ ID NO: 2479773 - RNA, 19 nt, Artificial Sequence
  Description of Artificial Sequence: Synthetic oligonucleotide
acaccgggagaacacugcg

SEQ ID NO: 2479774 - RNA, 19 nt, Artificial Sequence
  Description of Artificial Sequence: Synthetic oligonucleotide
augagcaccagcuccacua

SEQ ID NO: 2479775 - RNA, 19 nt, Artificial Sequence
  Description of Artificial Sequence: Synthetic oligonucleotide
caucacgucaucggggacg

SEQ ID NO: 2479776 - RNA, 19 nt, Artificial Sequence
  Description of Artificial Sequence: Synthetic oligonucleotide
agaguuggcagggacauaa

SEQ ID NO: 2479777 - RNA, 19 nt, Artificial Sequence
  Description of Artificial Sequence: Synthetic oligonucleotide
auugugcaucuccaccauc

SEQ ID NO: 2479778 - RNA, 19 nt, Artificial Sequence
  Description of Artificial Sequence: Synthetic oligonucleotide
agcggaaugagcaccagcu

SEQ ID NO: 2479779 - RNA, 19 nt, Artificial Sequence
  Description of Artificial Sequence: Synthetic oligonucleotide
ggagccagcacccagcuuc

SEQ ID NO: 2479780 - RNA, 19 nt, Artificial Sequence
  Description of Artificial Sequence: Synthetic oligonucleotide
ugaguggguaagucgcggc

SEQ ID NO: 2479781 - RNA, 19 nt, Artificial Sequence
  Description of Artificial Sequence: Synthetic oligonucleotide
cuugcgcuccgccugcugg

SEQ ID NO: 2479782 - RNA, 19 nt, Artificial Sequence
  Description of Artificial Sequence: Synthetic oligonucleotide
uccauguagccacugccau

SEQ ID NO: 2479783 - RNA, 19 nt, Artificial Sequence
  Description of Artificial Sequence: Synthetic oligonucleotide
gagugagcagcucgcuccg

SEQ ID NO: 2479784 - RNA, 19 nt, Artificial Sequence
  Description of Artificial Sequence: Synthetic oligonucleotide
accccaguugcugagcuuc

SEQ ID NO: 2479785 - RNA, 19 nt, Artificial Sequence
  Description of Artificial Sequence: Synthetic oligonucleotide
ucggggacggagaaguuua

SEQ ID NO: 2479786 - RNA, 19 nt, Artificial Sequence
  Description of Artificial Sequence: Synthetic oligonucleotide
uacugggaagccccgcagc

SEQ ID NO: 2479787 - RNA, 19 nt, Artificial Sequence
  Description of Artificial Sequence: Synthetic oligonucleotide
gaaggacgaagcucggauc

SEQ ID NO: 2479788 - RNA, 19 nt, Artificial Sequence
  Description of Artificial Sequence: Synthetic oligonucleotide
uccuguaaggagccagcac

SEQ ID NO: 2479789 - RNA, 19 nt, Artificial Sequence
  Description of Artificial Sequence: Synthetic oligonucleotide
ucuguucaggugaccccag

SEQ ID NO: 2479790 - RNA, 19 nt, Artificial Sequence
  Description of Artificial Sequence: Synthetic oligonucleotide
aggucuucgaugcgcacgu

SEQ ID NO: 2479791 - RNA, 19 nt, Artificial Sequence
  Description of Artificial Sequence: Synthetic oligonucleotide
gagccuucugguacaaacc

SEQ ID NO: 2479792 - RNA, 19 nt, Artificial Sequence
  Description of Artificial Sequence: Synthetic oligonucleotide
uucgaugcgcacguucuug

SEQ ID NO: 2479793 - RNA, 19 nt, Artificial Sequence
  Description of Artificial Sequence: Synthetic oligonucleotide
augcgcacguucuugaguu

SEQ ID NO: 2479794 - RNA, 19 nt, Artificial Sequence
  Description of Artificial Sequence: Synthetic oligonucleotide
agcgccugguuauacccag

SEQ ID NO: 2479795 - RNA, 19 nt, Artificial Sequence
  Description of Artificial Sequence: Synthetic oligonucleotide
uguucaggugaccccaguu

SEQ ID NO: 2479796 - RNA, 19 nt, Artificial Sequence
  Description of Artificial Sequence: Synthetic oligonucleotide
auaagcucugcaaccagga

SEQ ID NO: 2479797 - RNA, 19 nt, Artificial Sequence
  Description of Artificial Sequence: Synthetic oligonucleotide
uggggcaccaucuccucga

SEQ ID NO: 2479798 - RNA, 19 nt, Artificial Sequence
  Description of Artificial Sequence: Synthetic oligonucleotide
uggggaaguaaaacuugau

SEQ ID NO: 2479799 - RNA, 19 nt, Artificial Sequence
  Description of Artificial Sequence: Synthetic oligonucleotide
aucacgucaucggggacgg

SEQ ID NO: 2479800 - RNA, 19 nt, Artificial Sequence
  Description of Artificial Sequence: Synthetic oligonucleotide
ugagcaccagcuccacuac

SEQ ID NO: 2479801 - RNA, 19 nt, Artificial Sequence
  Description of Artificial Sequence: Synthetic oligonucleotide
ucccaauccugccuccgca

SEQ ID NO: 2479802 - RNA, 19 nt, Artificial Sequence
  Description of Artificial Sequence: Synthetic oligonucleotide
cacuacaccgggagaacac

SEQ ID NO: 2479803 - RNA, 19 nt, Artificial Sequence
  Description of Artificial Sequence: Synthetic oligonucleotide
ugaccccaguugcugagcu

SEQ ID NO: 2479804 - RNA, 19 nt, Artificial Sequence
  Description of Artificial Sequence: Synthetic oligonucleotide
cuacaccgggagaacacug

SEQ ID NO: 2479805 - RNA, 19 nt, Artificial Sequence
  Description of Artificial Sequence: Synthetic oligonucleotide
caggucuucgaugcgcacg

SEQ ID NO: 2479806 - RNA, 19 nt, Artificial Sequence
  Description of Artificial Sequence: Synthetic oligonucleotide
guaagucgcggcgucgagg

SEQ ID NO: 2479807 - RNA, 19 nt, Artificial Sequence
  Description of Artificial Sequence: Synthetic oligonucleotide
aguuggcagggacauaauu

SEQ ID NO: 2479808 - RNA, 19 nt, Artificial Sequence
  Description of Artificial Sequence: Synthetic oligonucleotide
ucuccucgagccuucuggu

SEQ ID NO: 2479809 - RNA, 19 nt, Artificial Sequence
  Description of Artificial Sequence: Synthetic oligonucleotide
ugagcagcucgcuccgccc

SEQ ID NO: 2479810 - RNA, 19 nt, Artificial Sequence
  Description of Artificial Sequence: Synthetic oligonucleotide
acaggucuucgaugcgcac

SEQ ID NO: 2479811 - RNA, 19 nt, Artificial Sequence
  Description of Artificial Sequence: Synthetic oligonucleotide
aaacccaggccucggcuuu

SEQ ID NO: 2479812 - RNA, 19 nt, Artificial Sequence
  Description of Artificial Sequence: Synthetic oligonucleotide
aacccuccgcagccgggcg

SEQ ID NO: 2479813 - RNA, 19 nt, Artificial Sequence
  Description of Artificial Sequence: Synthetic oligonucleotide
cacgucaucggggacggag

SEQ ID NO: 2479814 - RNA, 19 nt, Artificial Sequence
  Description of Artificial Sequence: Synthetic oligonucleotide
ggcagggacauaauugugc

SEQ ID NO: 2479815 - RNA, 19 nt, Artificial Sequence
  Description of Artificial Sequence: Synthetic oligonucleotide
ggcgcgagugagcagcucg

SEQ ID NO: 2479816 - RNA, 19 nt, Artificial Sequence
  Description of Artificial Sequence: Synthetic oligonucleotide
uccgcccucccaauccugc

SEQ ID NO: 2479817 - RNA, 19 nt, Artificial Sequence
  Description of Artificial Sequence: Synthetic oligonucleotide
agucgcggcgucgaggcuc

SEQ ID NO: 2479818 - RNA, 19 nt, Artificial Sequence
  Description of Artificial Sequence: Synthetic oligonucleotide
accgcucaccgcugcuugc

SEQ ID NO: 2479819 - RNA, 19 nt, Artificial Sequence
  Description of Artificial Sequence: Synthetic oligonucleotide
aggacgaagcucggaucgc

SEQ ID NO: 2479820 - RNA, 19 nt, Artificial Sequence
  Description of Artificial Sequence: Synthetic oligonucleotide
cugcaccgucucuugagag

SEQ ID NO: 2479821 - RNA, 19 nt, Artificial Sequence
  Description of Artificial Sequence: Synthetic oligonucleotide
gaguuggagcagguguucc

SEQ ID NO: 2479822 - RNA, 19 nt, Artificial Sequence
  Description of Artificial Sequence: Synthetic oligonucleotide
ggagcagguguuccagacg

SEQ ID NO: 2479823 - RNA, 19 nt, Artificial Sequence
  Description of Artificial Sequence: Synthetic oligonucleotide
gagagaguuggcagggaca

SEQ ID NO: 2479824 - RNA, 19 nt, Artificial Sequence
  Description of Artificial Sequence: Synthetic oligonucleotide
acguuugcccgaacccucc

SEQ ID NO: 2479825 - RNA, 19 nt, Artificial Sequence
  Description of Artificial Sequence: Synthetic oligonucleotide
cacugcgcaaucuuccgca

SEQ ID NO: 2479826 - RNA, 19 nt, Artificial Sequence
  Description of Artificial Sequence: Synthetic oligonucleotide
gguacaaaccaauauccau

SEQ ID NO: 2479827 - RNA, 19 nt, Artificial Sequence
  Description of Artificial Sequence: Synthetic oligonucleotide
ggagaaguuuagcuuguuc

SEQ ID NO: 2479828 - RNA, 19 nt, Artificial Sequence
  Description of Artificial Sequence: Synthetic oligonucleotide
acuacaccgggagaacacu

SEQ ID NO: 2479829 - RNA, 19 nt, Artificial Sequence
  Description of Artificial Sequence: Synthetic oligonucleotide
gagucuccgggacaggucu

SEQ ID NO: 2479830 - RNA, 19 nt, Artificial Sequence
  Description of Artificial Sequence: Synthetic oligonucleotide
gcagcgccugguuauaccc

SEQ ID NO: 2479831 - RNA, 19 nt, Artificial Sequence
  Description of Artificial Sequence: Synthetic oligonucleotide
uggguaagucgcggcgucg

SEQ ID NO: 2479832 - RNA, 19 nt, Artificial Sequence
  Description of Artificial Sequence: Synthetic oligonucleotide
cacguuugcccgaacccuc

SEQ ID NO: 2479833 - RNA, 19 nt, Artificial Sequence
  Description of Artificial Sequence: Synthetic oligonucleotide
ugaguuggagcagguguuc

SEQ ID NO: 2479834 - RNA, 19 nt, Artificial Sequence
  Description of Artificial Sequence: Synthetic oligonucleotide
agcccaggcaccgcucacc

SEQ ID NO: 2479835 - RNA, 19 nt, Artificial Sequence
  Description of Artificial Sequence: Synthetic oligonucleotide
ggaucaaacccaggccucg

SEQ ID NO: 2479836 - RNA, 19 nt, Artificial Sequence
  Description of Artificial Sequence: Synthetic oligonucleotide
uugcccgaacccuccgcag

SEQ ID NO: 2479837 - RNA, 19 nt, Artificial Sequence
  Description of Artificial Sequence: Synthetic oligonucleotide
ucuccgggacaggucuucg

SEQ ID NO: 2479838 - RNA, 19 nt, Artificial Sequence
  Description of Artificial Sequence: Synthetic oligonucleotide
guuugcccgaacccuccgc

SEQ ID NO: 2479839 - RNA, 19 nt, Artificial Sequence
  Description of Artificial Sequence: Synthetic oligonucleotide
aguggguaagucgcggcgu

SEQ ID NO: 2479840 - RNA, 19 nt, Artificial Sequence
  Description of Artificial Sequence: Synthetic oligonucleotide
cagcggaaugagcaccagc

SEQ ID NO: 2479841 - RNA, 19 nt, Artificial Sequence
  Description of Artificial Sequence: Synthetic oligonucleotide
gaagcucggaucgcccggc

SEQ ID NO: 2479842 - RNA, 19 nt, Artificial Sequence
  Description of Artificial Sequence: Synthetic oligonucleotide
gaugcgcacguucuugagu

SEQ ID NO: 2479843 - RNA, 19 nt, Artificial Sequence
  Description of Artificial Sequence: Synthetic oligonucleotide
gacaggucuucgaugcgca

SEQ ID NO: 2479844 - RNA, 19 nt, Artificial Sequence
  Description of Artificial Sequence: Synthetic oligonucleotide
cucagcggaaugagcacca

SEQ ID NO: 2479845 - RNA, 19 nt, Artificial Sequence
  Description of Artificial Sequence: Synthetic oligonucleotide
uccacuacaccgggagaac

SEQ ID NO: 2479846 - RNA, 19 nt, Artificial Sequence
  Description of Artificial Sequence: Synthetic oligonucleotide
acccuccgcagccgggcgc

SEQ ID NO: 2479847 - RNA, 19 nt, Artificial Sequence
  Description of Artificial Sequence: Synthetic oligonucleotide
cucccaauccugccuccgc

SEQ ID NO: 2479848 - RNA, 19 nt, Artificial Sequence
  Description of Artificial Sequence: Synthetic oligonucleotide
aggcaccgcucaccgcugc

SEQ ID NO: 2479849 - RNA, 19 nt, Artificial Sequence
  Description of Artificial Sequence: Synthetic oligonucleotide
ggugaccccaguugcugag

SEQ ID NO: 2479850 - RNA, 19 nt, Artificial Sequence
  Description of Artificial Sequence: Synthetic oligonucleotide
gaacccuccgcagccgggc

SEQ ID NO: 2479851 - RNA, 19 nt, Artificial Sequence
  Description of Artificial Sequence: Synthetic oligonucleotide
ggcgucgaggcuccggcgg

SEQ ID NO: 2479852 - RNA, 19 nt, Artificial Sequence
  Description of Artificial Sequence: Synthetic oligonucleotide
cgagccuucugguacaaac

SEQ ID NO: 2479853 - RNA, 19 nt, Artificial Sequence
  Description of Artificial Sequence: Synthetic oligonucleotide
ugcugagcuucugcuggag

SEQ ID NO: 2479854 - RNA, 19 nt, Artificial Sequence
  Description of Artificial Sequence: Synthetic oligonucleotide
aggugaccccaguugcuga

SEQ ID NO: 2479855 - RNA, 19 nt, Artificial Sequence
  Description of Artificial Sequence: Synthetic oligonucleotide
gggacggagaaguuuagcu

SEQ ID NO: 2479856 - RNA, 19 nt, Artificial Sequence
  Description of Artificial Sequence: Synthetic oligonucleotide
agcucggaucgcccggcag

SEQ ID NO: 2479857 - RNA, 19 nt, Artificial Sequence
  Description of Artificial Sequence: Synthetic oligonucleotide
uccgcaggugaguggguaa

SEQ ID NO: 2479858 - RNA, 19 nt, Artificial Sequence
  Description of Artificial Sequence: Synthetic oligonucleotide
agcagcucgcuccgcccuc

SEQ ID NO: 2479859 - RNA, 19 nt, Artificial Sequence
  Description of Artificial Sequence: Synthetic oligonucleotide
ucagcggaaugagcaccag

SEQ ID NO: 2479860 - RNA, 19 nt, Artificial Sequence
  Description of Artificial Sequence: Synthetic oligonucleotide
accgucucuugagaggcca

SEQ ID NO: 2479861 - RNA, 19 nt, Artificial Sequence
  Description of Artificial Sequence: Synthetic oligonucleotide
acaaaccaauauccaugua

SEQ ID NO: 2479862 - RNA, 19 nt, Artificial Sequence
  Description of Artificial Sequence: Synthetic oligonucleotide
gcaccgucucuugagaggc

SEQ ID NO: 2479863 - RNA, 19 nt, Artificial Sequence
  Description of Artificial Sequence: Synthetic oligonucleotide
ccaguugcugagcuucugc

SEQ ID NO: 2479864 - RNA, 19 nt, Artificial Sequence
  Description of Artificial Sequence: Synthetic oligonucleotide
uugcgcuccgccugcugga

SEQ ID NO: 2479865 - RNA, 19 nt, Artificial Sequence
  Description of Artificial Sequence: Synthetic oligonucleotide
ggacaggucuucgaugcgc

SEQ ID NO: 2479866 - RNA, 19 nt, Artificial Sequence
  Description of Artificial Sequence: Synthetic oligonucleotide
cccacguuugcccgaaccc

SEQ ID NO: 2479867 - RNA, 19 nt, Artificial Sequence
  Description of Artificial Sequence: Synthetic oligonucleotide
gucgaggcgccugcggccg

SEQ ID NO: 2479868 - RNA, 19 nt, Artificial Sequence
  Description of Artificial Sequence: Synthetic oligonucleotide
gguacugggaagccccgca

SEQ ID NO: 2479869 - RNA, 19 nt, Artificial Sequence
  Description of Artificial Sequence: Synthetic oligonucleotide
aagcucggaucgcccggca

SEQ ID NO: 2479870 - RNA, 19 nt, Artificial Sequence
  Description of Artificial Sequence: Synthetic oligonucleotide
acugcgcaaucuuccgcau

SEQ ID NO: 2479871 - RNA, 19 nt, Artificial Sequence
  Description of Artificial Sequence: Synthetic oligonucleotide
cuccacuacaccgggagaa

SEQ ID NO: 2479872 - RNA, 19 nt, Artificial Sequence
  Description of Artificial Sequence: Synthetic oligonucleotide
aggccucggcuuugagcac

SEQ ID NO: 2479873 - RNA, 19 nt, Artificial Sequence
  Description of Artificial Sequence: Synthetic oligonucleotide
gcugcagagggcgcgagug

SEQ ID NO: 2479874 - RNA, 19 nt, Artificial Sequence
  Description of Artificial Sequence: Synthetic oligonucleotide
gcucggaucgcccggcagc

SEQ ID NO: 2479875 - RNA, 19 nt, Artificial Sequence
  Description of Artificial Sequence: Synthetic oligonucleotide
guggguaagucgcggcguc

SEQ ID NO: 2479876 - RNA, 19 nt, Artificial Sequence
  Description of Artificial Sequence: Synthetic oligonucleotide
gcgcacguucuugaguugg

SEQ ID NO: 2479877 - RNA, 19 nt, Artificial Sequence
  Description of Artificial Sequence: Synthetic oligonucleotide
acggagaaguuuagcuugu

SEQ ID NO: 2479878 - RNA, 19 nt, Artificial Sequence
  Description of Artificial Sequence: Synthetic oligonucleotide
caccgcucaccgcugcuug

SEQ ID NO: 2479879 - RNA, 19 nt, Artificial Sequence
  Description of Artificial Sequence: Synthetic oligonucleotide
gucaucggggacggagaag

SEQ ID NO: 2479880 - RNA, 19 nt, Artificial Sequence
  Description of Artificial Sequence: Synthetic oligonucleotide
uuagcuuguucagcaccuu

SEQ ID NO: 2479881 - RNA, 19 nt, Artificial Sequence
  Description of Artificial Sequence: Synthetic oligonucleotide
gguaagucgcggcgucgag

SEQ ID NO: 2479882 - RNA, 19 nt, Artificial Sequence
  Description of Artificial Sequence: Synthetic oligonucleotide
gggacaggucuucgaugcg

SEQ ID NO: 2479883 - RNA, 19 nt, Artificial Sequence
  Description of Artificial Sequence: Synthetic oligonucleotide
ccaauccugccuccgcagg

SEQ ID NO: 2479884 - RNA, 19 nt, Artificial Sequence
  Description of Artificial Sequence: Synthetic oligonucleotide
uggagagaguuggcaggga

SEQ ID NO: 2479885 - RNA, 19 nt, Artificial Sequence
  Description of Artificial Sequence: Synthetic oligonucleotide
cugcuugcgcuccgccugc

SEQ ID NO: 2479886 - RNA, 19 nt, Artificial Sequence
  Description of Artificial Sequence: Synthetic oligonucleotide
ccgcaucacgucaucgggg

SEQ ID NO: 2479887 - RNA, 19 nt, Artificial Sequence
  Description of Artificial Sequence: Synthetic oligonucleotide
aucggggacggagaaguuu

SEQ ID NO: 2479888 - RNA, 19 nt, Artificial Sequence
  Description of Artificial Sequence: Synthetic oligonucleotide
cagacgcuucaccuucauc

SEQ ID NO: 2479889 - RNA, 19 nt, Artificial Sequence
  Description of Artificial Sequence: Synthetic oligonucleotide
ggcagcgccugguuauacc

SEQ ID NO: 2479890 - RNA, 19 nt, Artificial Sequence
  Description of Artificial Sequence: Synthetic oligonucleotide
ucgaggcuccggcggguac

SEQ ID NO: 2479891 - RNA, 19 nt, Artificial Sequence
  Description of Artificial Sequence: Synthetic oligonucleotide
gcggguacugggaagcccc

SEQ ID NO: 2479892 - RNA, 19 nt, Artificial Sequence
  Description of Artificial Sequence: Synthetic oligonucleotide
cagagggcgcgagugagca

SEQ ID NO: 2479893 - RNA, 19 nt, Artificial Sequence
  Description of Artificial Sequence: Synthetic oligonucleotide
gggucgaggcgccugcggc

SEQ ID NO: 2479894 - RNA, 19 nt, Artificial Sequence
  Description of Artificial Sequence: Synthetic oligonucleotide
aagucgcggcgucgaggcu

SEQ ID NO: 2479895 - RNA, 19 nt, Artificial Sequence
  Description of Artificial Sequence: Synthetic oligonucleotide
gggagaacacugcgcaauc

SEQ ID NO: 2479896 - RNA, 19 nt, Artificial Sequence
  Description of Artificial Sequence: Synthetic oligonucleotide
gcccaggcaccgcucaccg

SEQ ID NO: 2479897 - RNA, 19 nt, Artificial Sequence
  Description of Artificial Sequence: Synthetic oligonucleotide
ggucgaggcgccugcggcc

SEQ ID NO: 2479898 - RNA, 19 nt, Artificial Sequence
  Description of Artificial Sequence: Synthetic oligonucleotide
ggacgaagcucggaucgcc

SEQ ID NO: 2479899 - RNA, 19 nt, Artificial Sequence
  Description of Artificial Sequence: Synthetic oligonucleotide
gaccugcaccgucucuuga

SEQ ID NO: 2479900 - RNA, 19 nt, Artificial Sequence
  Description of Artificial Sequence: Synthetic oligonucleotide
cugcgcaaucuuccgcauc

SEQ ID NO: 2479901 - RNA, 19 nt, Artificial Sequence
  Description of Artificial Sequence: Synthetic oligonucleotide
acgucaucggggacggaga

SEQ ID NO: 2479902 - RNA, 19 nt, Artificial Sequence
  Description of Artificial Sequence: Synthetic oligonucleotide
ggaccugcaccgucucuug

SEQ ID NO: 2479903 - RNA, 19 nt, Artificial Sequence
  Description of Artificial Sequence: Synthetic oligonucleotide
gcacccagcuucuggcgcc

SEQ ID NO: 2479904 - RNA, 19 nt, Artificial Sequence
  Description of Artificial Sequence: Synthetic oligonucleotide
ccucagcggaaugagcacc

SEQ ID NO: 2479905 - RNA, 19 nt, Artificial Sequence
  Description of Artificial Sequence: Synthetic oligonucleotide
ucgaggcgccugcggccgg

SEQ ID NO: 2479906 - RNA, 19 nt, Artificial Sequence
  Description of Artificial Sequence: Synthetic oligonucleotide
gaggcuccggcggguacug

SEQ ID NO: 2479907 - RNA, 19 nt, Artificial Sequence
  Description of Artificial Sequence: Synthetic oligonucleotide
gcuccuguaaggagccagc

SEQ ID NO: 2479908 - RNA, 19 nt, Artificial Sequence
  Description of Artificial Sequence: Synthetic oligonucleotide
cccaauccugccuccgcag

SEQ ID NO: 2479909 - RNA, 19 nt, Artificial Sequence
  Description of Artificial Sequence: Synthetic oligonucleotide
aucuuccgcaucacgucau

SEQ ID NO: 2479910 - RNA, 19 nt, Artificial Sequence
  Description of Artificial Sequence: Synthetic oligonucleotide
ggggucgaggcgccugcgg

SEQ ID NO: 2479911 - RNA, 19 nt, Artificial Sequence
  Description of Artificial Sequence: Synthetic oligonucleotide
ccccacguuugcccgaacc

SEQ ID NO: 2479912 - RNA, 19 nt, Artificial Sequence
  Description of Artificial Sequence: Synthetic oligonucleotide
cugaaggacgaagcucgga

SEQ ID NO: 2479913 - RNA, 19 nt, Artificial Sequence
  Description of Artificial Sequence: Synthetic oligonucleotide
ccauguagccacugccauc

SEQ ID NO: 2479914 - RNA, 19 nt, Artificial Sequence
  Description of Artificial Sequence: Synthetic oligonucleotide
ggggacggagaaguuuagc

SEQ ID NO: 2479915 - RNA, 19 nt, Artificial Sequence
  Description of Artificial Sequence: Synthetic oligonucleotide
ggacggagaaguuuagcuu

SEQ ID NO: 2479916 - RNA, 19 nt, Artificial Sequence
  Description of Artificial Sequence: Synthetic oligonucleotide
caggcaccgcucaccgcug

SEQ ID NO: 2479917 - RNA, 19 nt, Artificial Sequence
  Description of Artificial Sequence: Synthetic oligonucleotide
cagcgccugguuauaccca

SEQ ID NO: 2479918 - RNA, 19 nt, Artificial Sequence
  Description of Artificial Sequence: Synthetic oligonucleotide
ggacauaauugugcaucuc

SEQ ID NO: 2479919 - RNA, 19 nt, Artificial Sequence
  Description of Artificial Sequence: Synthetic oligonucleotide
ucgcuccgcccucccaauc

SEQ ID NO: 2479920 - RNA, 19 nt, Artificial Sequence
  Description of Artificial Sequence: Synthetic oligonucleotide
gaucgcccggcagcgccug

SEQ ID NO: 2479921 - RNA, 19 nt, Artificial Sequence
  Description of Artificial Sequence: Synthetic oligonucleotide
gcggcgucgaggcuccggc

SEQ ID NO: 2479922 - RNA, 19 nt, Artificial Sequence
  Description of Artificial Sequence: Synthetic oligonucleotide
gcgucgaggcuccggcggg

SEQ ID NO: 2479923 - RNA, 19 nt, Artificial Sequence
  Description of Artificial Sequence: Synthetic oligonucleotide
gucgcggcgucgaggcucc

SEQ ID NO: 2479924 - RNA, 19 nt, Artificial Sequence
  Description of Artificial Sequence: Synthetic oligonucleotide
gcggaaugagcaccagcuc

SEQ ID NO: 2479925 - RNA, 19 nt, Artificial Sequence
  Description of Artificial Sequence: Synthetic oligonucleotide
caauccugccuccgcaggu

SEQ ID NO: 2479926 - RNA, 19 nt, Artificial Sequence
  Description of Artificial Sequence: Synthetic oligonucleotide
gucuccgggacaggucuuc

SEQ ID NO: 2479927 - RNA, 19 nt, Artificial Sequence
  Description of Artificial Sequence: Synthetic oligonucleotide
agcucgcuccgcccuccca

SEQ ID NO: 2479928 - RNA, 19 nt, Artificial Sequence
  Description of Artificial Sequence: Synthetic oligonucleotide
ccgggacaggucuucgaug

SEQ ID NO: 2479929 - RNA, 19 nt, Artificial Sequence
  Description of Artificial Sequence: Synthetic oligonucleotide
cuccgggacaggucuucga

SEQ ID NO: 2479930 - RNA, 19 nt, Artificial Sequence
  Description of Artificial Sequence: Synthetic oligonucleotide
gguguuccagacgcuucac

SEQ ID NO: 2479931 - RNA, 19 nt, Artificial Sequence
  Description of Artificial Sequence: Synthetic oligonucleotide
gcgagugagcagcucgcuc

SEQ ID NO: 2479932 - RNA, 19 nt, Artificial Sequence
  Description of Artificial Sequence: Synthetic oligonucleotide
ggcggguacugggaagccc

SEQ ID NO: 2479933 - RNA, 19 nt, Artificial Sequence
  Description of Artificial Sequence: Synthetic oligonucleotide
ccgaacccuccgcagccgg

SEQ ID NO: 2479934 - RNA, 19 nt, Artificial Sequence
  Description of Artificial Sequence: Synthetic oligonucleotide
gggcgccgcagcugcagag

SEQ ID NO: 2479935 - RNA, 19 nt, Artificial Sequence
  Description of Artificial Sequence: Synthetic oligonucleotide
ucgagccuucugguacaaa

SEQ ID NO: 2479936 - RNA, 19 nt, Artificial Sequence
  Description of Artificial Sequence: Synthetic oligonucleotide
gccauccugagaagccagc

SEQ ID NO: 2479937 - RNA, 19 nt, Artificial Sequence
  Description of Artificial Sequence: Synthetic oligonucleotide
ucggaucgcccggcagcgc

SEQ ID NO: 2479938 - RNA, 19 nt, Artificial Sequence
  Description of Artificial Sequence: Synthetic oligonucleotide
cgcaucacgucaucgggga

SEQ ID NO: 2479939 - RNA, 19 nt, Artificial Sequence
  Description of Artificial Sequence: Synthetic oligonucleotide
ggguaagucgcggcgucga

SEQ ID NO: 2479940 - RNA, 19 nt, Artificial Sequence
  Description of Artificial Sequence: Synthetic oligonucleotide
cuccucgagccuucuggua

SEQ ID NO: 2479941 - RNA, 19 nt, Artificial Sequence
  Description of Artificial Sequence: Synthetic oligonucleotide
gcaucacgucaucggggac

SEQ ID NO: 2479942 - RNA, 19 nt, Artificial Sequence
  Description of Artificial Sequence: Synthetic oligonucleotide
ccugagaagccagcuccug

SEQ ID NO: 2479943 - RNA, 19 nt, Artificial Sequence
  Description of Artificial Sequence: Synthetic oligonucleotide
ccucccaauccugccuccg

SEQ ID NO: 2479944 - RNA, 19 nt, Artificial Sequence
  Description of Artificial Sequence: Synthetic oligonucleotide
ccugcaccgucucuugaga

SEQ ID NO: 2479945 - RNA, 19 nt, Artificial Sequence
  Description of Artificial Sequence: Synthetic oligonucleotide
cgcuccgcccucccaaucc

SEQ ID NO: 2479946 - RNA, 19 nt, Artificial Sequence
  Description of Artificial Sequence: Synthetic oligonucleotide
gcagagggcgcgagugagc

SEQ ID NO: 2479947 - RNA, 19 nt, Artificial Sequence
  Description of Artificial Sequence: Synthetic oligonucleotide
cggaucgcccggcagcgcc

SEQ ID NO: 2479948 - RNA, 19 nt, Artificial Sequence
  Description of Artificial Sequence: Synthetic oligonucleotide
ccaggcaccgcucaccgcu

SEQ ID NO: 2479949 - RNA, 19 nt, Artificial Sequence
  Description of Artificial Sequence: Synthetic oligonucleotide
cagcugcagagggcgcgag

SEQ ID NO: 2479950 - RNA, 19 nt, Artificial Sequence
  Description of Artificial Sequence: Synthetic oligonucleotide
ccgcaggugaguggguaag

SEQ ID NO: 2479951 - RNA, 19 nt, Artificial Sequence
  Description of Artificial Sequence: Synthetic oligonucleotide
ccgcucaccgcugcuugcg

SEQ ID NO: 2479952 - RNA, 19 nt, Artificial Sequence
  Description of Artificial Sequence: Synthetic oligonucleotide
ggagaacacugcgcaaucu

SEQ ID NO: 2479953 - RNA, 19 nt, Artificial Sequence
  Description of Artificial Sequence: Synthetic oligonucleotide
cguuugcccgaacccuccg

SEQ ID NO: 2479954 - RNA, 19 nt, Artificial Sequence
  Description of Artificial Sequence: Synthetic oligonucleotide
cagcucgcuccgcccuccc

SEQ ID NO: 2479955 - RNA, 19 nt, Artificial Sequence
  Description of Artificial Sequence: Synthetic oligonucleotide
ggguacugggaagccccgc

SEQ ID NO: 2479956 - RNA, 19 nt, Artificial Sequence
  Description of Artificial Sequence: Synthetic oligonucleotide
cagggacauaauugugcau

SEQ ID NO: 2479957 - RNA, 19 nt, Artificial Sequence
  Description of Artificial Sequence: Synthetic oligonucleotide
gcgcgagugagcagcucgc

SEQ ID NO: 2479958 - RNA, 19 nt, Artificial Sequence
  Description of Artificial Sequence: Synthetic oligonucleotide
ccucgagccuucugguaca

SEQ ID NO: 2479959 - RNA, 19 nt, Artificial Sequence
  Description of Artificial Sequence: Synthetic oligonucleotide
cgaacccuccgcagccggg

SEQ ID NO: 2479960 - RNA, 19 nt, Artificial Sequence
  Description of Artificial Sequence: Synthetic oligonucleotide
gagaguuggcagggacaua

SEQ ID NO: 2479961 - RNA, 19 nt, Artificial Sequence
  Description of Artificial Sequence: Synthetic oligonucleotide
cagcuccacuacaccggga

SEQ ID NO: 2479962 - RNA, 19 nt, Artificial Sequence
  Description of Artificial Sequence: Synthetic oligonucleotide
cccucccaauccugccucc

SEQ ID NO: 2479963 - RNA, 19 nt, Artificial Sequence
  Description of Artificial Sequence: Synthetic oligonucleotide
gaggcgccugcggccggcc

SEQ ID NO: 2479964 - RNA, 19 nt, Artificial Sequence
  Description of Artificial Sequence: Synthetic oligonucleotide
gcgccugguuauacccagg

SEQ ID NO: 2479965 - RNA, 19 nt, Artificial Sequence
  Description of Artificial Sequence: Synthetic oligonucleotide
agggcgcgagugagcagcu

SEQ ID NO: 2479966 - RNA, 19 nt, Artificial Sequence
  Description of Artificial Sequence: Synthetic oligonucleotide
ccgcccucccaauccugcc

SEQ ID NO: 2479967 - RNA, 19 nt, Artificial Sequence
  Description of Artificial Sequence: Synthetic oligonucleotide
cggguacugggaagccccg

SEQ ID NO: 2479968 - RNA, 19 nt, Artificial Sequence
  Description of Artificial Sequence: Synthetic oligonucleotide
ccacuacaccgggagaaca

SEQ ID NO: 2479969 - RNA, 19 nt, Artificial Sequence
  Description of Artificial Sequence: Synthetic oligonucleotide
cagcaaucugaaggacgaa

SEQ ID NO: 2479970 - RNA, 19 nt, Artificial Sequence
  Description of Artificial Sequence: Synthetic oligonucleotide
ucacgucaucggggacgga

SEQ ID NO: 2479971 - RNA, 19 nt, Artificial Sequence
  Description of Artificial Sequence: Synthetic oligonucleotide
gcagcucgcuccgcccucc

SEQ ID NO: 2479972 - RNA, 19 nt, Artificial Sequence
  Description of Artificial Sequence: Synthetic oligonucleotide
cgucucuugagaggccaac

SEQ ID NO: 2479973 - RNA, 19 nt, Artificial Sequence
  Description of Artificial Sequence: Synthetic oligonucleotide
gccucggcuuugagcaccc

SEQ ID NO: 2479974 - RNA, 19 nt, Artificial Sequence
  Description of Artificial Sequence: Synthetic oligonucleotide
agucuccgggacaggucuu

SEQ ID NO: 2479975 - RNA, 19 nt, Artificial Sequence
  Description of Artificial Sequence: Synthetic oligonucleotide
gaccccaguugcugagcuu

SEQ ID NO: 2479976 - RNA, 19 nt, Artificial Sequence
  Description of Artificial Sequence: Synthetic oligonucleotide
cucgagccuucugguacaa

SEQ ID NO: 2479977 - RNA, 19 nt, Artificial Sequence
  Description of Artificial Sequence: Synthetic oligonucleotide
cggggacggagaaguuuag

SEQ ID NO: 2479978 - RNA, 19 nt, Artificial Sequence
  Description of Artificial Sequence: Synthetic oligonucleotide
cccgaacccuccgcagccg

SEQ ID NO: 2479979 - RNA, 19 nt, Artificial Sequence
  Description of Artificial Sequence: Synthetic oligonucleotide
cccaggcaccgcucaccgc

SEQ ID NO: 2479980 - RNA, 19 nt, Artificial Sequence
  Description of Artificial Sequence: Synthetic oligonucleotide
ccugcuccuuuucagcaau

SEQ ID NO: 2479981 - RNA, 19 nt, Artificial Sequence
  Description of Artificial Sequence: Synthetic oligonucleotide
ccgcugcuugcgcuccgcc

SEQ ID NO: 2479982 - RNA, 19 nt, Artificial Sequence
  Description of Artificial Sequence: Synthetic oligonucleotide
gcgcaaucuuccgcaucac

SEQ ID NO: 2479983 - RNA, 19 nt, Artificial Sequence
  Description of Artificial Sequence: Synthetic oligonucleotide
caggaccugcaccgucucu

SEQ ID NO: 2479984 - RNA, 19 nt, Artificial Sequence
  Description of Artificial Sequence: Synthetic oligonucleotide
ccacguuugcccgaacccu

SEQ ID NO: 2479985 - RNA, 19 nt, Artificial Sequence
  Description of Artificial Sequence: Synthetic oligonucleotide
ccgcagcugcagagggcgc

SEQ ID NO: 2479986 - RNA, 19 nt, Artificial Sequence
  Description of Artificial Sequence: Synthetic oligonucleotide
gucgaggcuccggcgggua

SEQ ID NO: 2479987 - RNA, 19 nt, Artificial Sequence
  Description of Artificial Sequence: Synthetic oligonucleotide
gcuccgcccucccaauccu

SEQ ID NO: 2479988 - RNA, 19 nt, Artificial Sequence
  Description of Artificial Sequence: Synthetic oligonucleotide
cucgcuccgcccucccaau

SEQ ID NO: 2479989 - RNA, 19 nt, Artificial Sequence
  Description of Artificial Sequence: Synthetic oligonucleotide
gcgcugccucagcggaaug

SEQ ID NO: 2479990 - RNA, 19 nt, Artificial Sequence
  Description of Artificial Sequence: Synthetic oligonucleotide
cggcgucgaggcuccggcg

SEQ ID NO: 2479991 - RNA, 19 nt, Artificial Sequence
  Description of Artificial Sequence: Synthetic oligonucleotide
ucgcggcgucgaggcuccg

SEQ ID NO: 2479992 - RNA, 19 nt, Artificial Sequence
  Description of Artificial Sequence: Synthetic oligonucleotide
cgccugcuggagucuccgg

SEQ ID NO: 2479993 - RNA, 19 nt, Artificial Sequence
  Description of Artificial Sequence: Synthetic oligonucleotide
cgucaucggggacggagaa

SEQ ID NO: 2479994 - RNA, 19 nt, Artificial Sequence
  Description of Artificial Sequence: Synthetic oligonucleotide
caucggggacggagaaguu

SEQ ID NO: 2479995 - RNA, 19 nt, Artificial Sequence
  Description of Artificial Sequence: Synthetic oligonucleotide
ccgggagaacacugcgcaa

SEQ ID NO: 2479996 - RNA, 19 nt, Artificial Sequence
  Description of Artificial Sequence: Synthetic oligonucleotide
ggcaccgcucaccgcugcu

SEQ ID NO: 2479997 - RNA, 19 nt, Artificial Sequence
  Description of Artificial Sequence: Synthetic oligonucleotide
cccggcagcgccugguuau

SEQ ID NO: 2479998 - RNA, 19 nt, Artificial Sequence
  Description of Artificial Sequence: Synthetic oligonucleotide
cgcugccucagcggaauga

SEQ ID NO: 2479999 - RNA, 19 nt, Artificial Sequence
  Description of Artificial Sequence: Synthetic oligonucleotide
ccucggcuuugagcacccc

SEQ ID NO: 2480000 - RNA, 19 nt, Artificial Sequence
  Description of Artificial Sequence: Synthetic oligonucleotide
cgcggcgucgaggcuccgg

SEQ ID NO: 2480001 - RNA, 19 nt, Artificial Sequence
  Description of Artificial Sequence: Synthetic oligonucleotide
cacccagcuucuggcgccu

SEQ ID NO: 2480002 - RNA, 19 nt, Artificial Sequence
  Description of Artificial Sequence: Synthetic oligonucleotide
cgggagaacacugcgcaau

SEQ ID NO: 2480003 - RNA, 19 nt, Artificial Sequence
  Description of Artificial Sequence: Synthetic oligonucleotide
ggaucgcccggcagcgccu

SEQ ID NO: 2480004 - RNA, 19 nt, Artificial Sequence
  Description of Artificial Sequence: Synthetic oligonucleotide
cggcggguacugggaagcc

SEQ ID NO: 2480005 - RNA, 19 nt, Artificial Sequence
  Description of Artificial Sequence: Synthetic oligonucleotide
gggcgcgagugagcagcuc

SEQ ID NO: 2480006 - RNA, 19 nt, Artificial Sequence
  Description of Artificial Sequence: Synthetic oligonucleotide
cggcagcgccugguuauac

SEQ ID NO: 2480007 - RNA, 19 nt, Artificial Sequence
  Description of Artificial Sequence: Synthetic oligonucleotide
ccagacgcuucaccuucau

SEQ ID NO: 2480008 - RNA, 19 nt, Artificial Sequence
  Description of Artificial Sequence: Synthetic oligonucleotide
cgaggcgccugcggccggc

SEQ ID NO: 2480009 - RNA, 19 nt, Artificial Sequence
  Description of Artificial Sequence: Synthetic oligonucleotide
gcaccgcucaccgcugcuu

SEQ ID NO: 2480010 - RNA, 19 nt, Artificial Sequence
  Description of Artificial Sequence: Synthetic oligonucleotide
gcgcuccgccugcuggagu

SEQ ID NO: 2480011 - RNA, 19 nt, Artificial Sequence
  Description of Artificial Sequence: Synthetic oligonucleotide
ccuccgcaggugagugggu

SEQ ID NO: 2480012 - RNA, 19 nt, Artificial Sequence
  Description of Artificial Sequence: Synthetic oligonucleotide
cgggcgccgcagcugcaga

SEQ ID NO: 2480013 - RNA, 19 nt, Artificial Sequence
  Description of Artificial Sequence: Synthetic oligonucleotide
cgaggcuccggcggguacu

SEQ ID NO: 2480014 - RNA, 19 nt, Artificial Sequence
  Description of Artificial Sequence: Synthetic oligonucleotide
ccggcagcgccugguuaua

SEQ ID NO: 2480015 - RNA, 19 nt, Artificial Sequence
  Description of Artificial Sequence: Synthetic oligonucleotide
cgcgagugagcagcucgcu

SEQ ID NO: 2480016 - RNA, 19 nt, Artificial Sequence
  Description of Artificial Sequence: Synthetic oligonucleotide
gccgggcgccgcagcugca

SEQ ID NO: 2480017 - RNA, 19 nt, Artificial Sequence
  Description of Artificial Sequence: Synthetic oligonucleotide
cgucgaggcuccggcgggu

SEQ ID NO: 2480018 - RNA, 19 nt, Artificial Sequence
  Description of Artificial Sequence: Synthetic oligonucleotide
agugagauacuucacgagc

SEQ ID NO: 2480019 - RNA, 19 nt, Artificial Sequence
  Description of Artificial Sequence: Synthetic oligonucleotide
aauuaaagaugauugcagu

SEQ ID NO: 2480020 - RNA, 19 nt, Artificial Sequence
  Description of Artificial Sequence: Synthetic oligonucleotide
uagacuggaugacagaggg

SEQ ID NO: 2480021 - RNA, 19 nt, Artificial Sequence
  Description of Artificial Sequence: Synthetic oligonucleotide
agacaaaccucucaauagc

SEQ ID NO: 2480022 - RNA, 19 nt, Artificial Sequence
  Description of Artificial Sequence: Synthetic oligonucleotide
aauucagaguugcgcaccc

SEQ ID NO: 2480023 - RNA, 19 nt, Artificial Sequence
  Description of Artificial Sequence: Synthetic oligonucleotide
aaauucuucaggccauccg

SEQ ID NO: 2480024 - RNA, 19 nt, Artificial Sequence
  Description of Artificial Sequence: Synthetic oligonucleotide
aaaucucacccacccaggc

SEQ ID NO: 2480025 - RNA, 19 nt, Artificial Sequence
  Description of Artificial Sequence: Synthetic oligonucleotide
caauuaaagaugauugcag

SEQ ID NO: 2480026 - RNA, 19 nt, Artificial Sequence
  Description of Artificial Sequence: Synthetic oligonucleotide
uaaagaugauugcagugag

SEQ ID NO: 2480027 - RNA, 19 nt, Artificial Sequence
  Description of Artificial Sequence: Synthetic oligonucleotide
augguguucaccugcagcg

SEQ ID NO: 2480028 - RNA, 19 nt, Artificial Sequence
  Description of Artificial Sequence: Synthetic oligonucleotide
aaucucacccacccaggcc

SEQ ID NO: 2480029 - RNA, 19 nt, Artificial Sequence
  Description of Artificial Sequence: Synthetic oligonucleotide
auggaugugaccuugucca

SEQ ID NO: 2480030 - RNA, 19 nt, Artificial Sequence
  Description of Artificial Sequence: Synthetic oligonucleotide
acuauugacugcugcgugc

SEQ ID NO: 2480031 - RNA, 19 nt, Artificial Sequence
  Description of Artificial Sequence: Synthetic oligonucleotide
gaagccugaauucucccgg

SEQ ID NO: 2480032 - RNA, 19 nt, Artificial Sequence
  Description of Artificial Sequence: Synthetic oligonucleotide
uguagacuggaugacagag

SEQ ID NO: 2480033 - RNA, 19 nt, Artificial Sequence
  Description of Artificial Sequence: Synthetic oligonucleotide
ucuggguugagcagcgugg

SEQ ID NO: 2480034 - RNA, 19 nt, Artificial Sequence
  Description of Artificial Sequence: Synthetic oligonucleotide
ugcggguugagccacaaca

SEQ ID NO: 2480035 - RNA, 19 nt, Artificial Sequence
  Description of Artificial Sequence: Synthetic oligonucleotide
uucucgugcaccaagaauu

SEQ ID NO: 2480036 - RNA, 19 nt, Artificial Sequence
  Description of Artificial Sequence: Synthetic oligonucleotide
cuuguagacuggaugacag

SEQ ID NO: 2480037 - RNA, 19 nt, Artificial Sequence
  Description of Artificial Sequence: Synthetic oligonucleotide
agauggggcucucaggccc

SEQ ID NO: 2480038 - RNA, 19 nt, Artificial Sequence
  Description of Artificial Sequence: Synthetic oligonucleotide
ugugaccuuguccacgagg

SEQ ID NO: 2480039 - RNA, 19 nt, Artificial Sequence
  Description of Artificial Sequence: Synthetic oligonucleotide
agaugauggggcauuaggc

SEQ ID NO: 2480040 - RNA, 19 nt, Artificial Sequence
  Description of Artificial Sequence: Synthetic oligonucleotide
ucccaaauucuucaggcca

SEQ ID NO: 2480041 - RNA, 19 nt, Artificial Sequence
  Description of Artificial Sequence: Synthetic oligonucleotide
ugcgugcacagaaagugcg

SEQ ID NO: 2480042 - RNA, 19 nt, Artificial Sequence
  Description of Artificial Sequence: Synthetic oligonucleotide
agguagaugaggccgcgcc

SEQ ID NO: 2480043 - RNA, 19 nt, Artificial Sequence
  Description of Artificial Sequence: Synthetic oligonucleotide
cucaugagguagaugaggc

SEQ ID NO: 2480044 - RNA, 19 nt, Artificial Sequence
  Description of Artificial Sequence: Synthetic oligonucleotide
uccguguaggugaaguggg

SEQ ID NO: 2480045 - RNA, 19 nt, Artificial Sequence
  Description of Artificial Sequence: Synthetic oligonucleotide
ugagacaaaccucucaaua

SEQ ID NO: 2480046 - RNA, 19 nt, Artificial Sequence
  Description of Artificial Sequence: Synthetic oligonucleotide
gauggaugugaccuugucc

SEQ ID NO: 2480047 - RNA, 19 nt, Artificial Sequence
  Description of Artificial Sequence: Synthetic oligonucleotide
auagcaaaugcgugcacag

SEQ ID NO: 2480048 - RNA, 19 nt, Artificial Sequence
  Description of Artificial Sequence: Synthetic oligonucleotide
caagaauucagaguugcgc

SEQ ID NO: 2480049 - RNA, 19 nt, Artificial Sequence
  Description of Artificial Sequence: Synthetic oligonucleotide
guagcuuguagacuggaug

SEQ ID NO: 2480050 - RNA, 19 nt, Artificial Sequence
  Description of Artificial Sequence: Synthetic oligonucleotide
ucgugcaccaagaauucag

SEQ ID NO: 2480051 - RNA, 19 nt, Artificial Sequence
  Description of Artificial Sequence: Synthetic oligonucleotide
agaaagugcguguuguucu

SEQ ID NO: 2480052 - RNA, 19 nt, Artificial Sequence
  Description of Artificial Sequence: Synthetic oligonucleotide
aagccugaauucucccggc

SEQ ID NO: 2480053 - RNA, 19 nt, Artificial Sequence
  Description of Artificial Sequence: Synthetic oligonucleotide
aaccucucaauagccgucc

SEQ ID NO: 2480054 - RNA, 19 nt, Artificial Sequence
  Description of Artificial Sequence: Synthetic oligonucleotide
uggagaaggccucgcauag

SEQ ID NO: 2480055 - RNA, 19 nt, Artificial Sequence
  Description of Artificial Sequence: Synthetic oligonucleotide
agcucacgaucucugagac

SEQ ID NO: 2480056 - RNA, 19 nt, Artificial Sequence
  Description of Artificial Sequence: Synthetic oligonucleotide
aaauccguguaggugaagu

SEQ ID NO: 2480057 - RNA, 19 nt, Artificial Sequence
  Description of Artificial Sequence: Synthetic oligonucleotide
caaaugcgugcacagaaag

SEQ ID NO: 2480058 - RNA, 19 nt, Artificial Sequence
  Description of Artificial Sequence: Synthetic oligonucleotide
gaugaggccgcgccuaccg

SEQ ID NO: 2480059 - RNA, 19 nt, Artificial Sequence
  Description of Artificial Sequence: Synthetic oligonucleotide
aaaaucucacccacccagg

SEQ ID NO: 2480060 - RNA, 19 nt, Artificial Sequence
  Description of Artificial Sequence: Synthetic oligonucleotide
aauccguguaggugaagug

SEQ ID NO: 2480061 - RNA, 19 nt, Artificial Sequence
  Description of Artificial Sequence: Synthetic oligonucleotide
ucagaguugcgcacccacg

SEQ ID NO: 2480062 - RNA, 19 nt, Artificial Sequence
  Description of Artificial Sequence: Synthetic oligonucleotide
uggggcauuaggcauccag

SEQ ID NO: 2480063 - RNA, 19 nt, Artificial Sequence
  Description of Artificial Sequence: Synthetic oligonucleotide
aguaguagcucacgaucuc

SEQ ID NO: 2480064 - RNA, 19 nt, Artificial Sequence
  Description of Artificial Sequence: Synthetic oligonucleotide
ucgcauagcaaaugcgugc

SEQ ID NO: 2480065 - RNA, 19 nt, Artificial Sequence
  Description of Artificial Sequence: Synthetic oligonucleotide
gacaaaccucucaauagcc

SEQ ID NO: 2480066 - RNA, 19 nt, Artificial Sequence
  Description of Artificial Sequence: Synthetic oligonucleotide
agcaaaugcgugcacagaa

SEQ ID NO: 2480067 - RNA, 19 nt, Artificial Sequence
  Description of Artificial Sequence: Synthetic oligonucleotide
acuucacgagcucuccugg

SEQ ID NO: 2480068 - RNA, 19 nt, Artificial Sequence
  Description of Artificial Sequence: Synthetic oligonucleotide
ucaauagccgucccaaauu

SEQ ID NO: 2480069 - RNA, 19 nt, Artificial Sequence
  Description of Artificial Sequence: Synthetic oligonucleotide
gacaccgcgagcccguagg

SEQ ID NO: 2480070 - RNA, 19 nt, Artificial Sequence
  Description of Artificial Sequence: Synthetic oligonucleotide
uucagaguugcgcacccac

SEQ ID NO: 2480071 - RNA, 19 nt, Artificial Sequence
  Description of Artificial Sequence: Synthetic oligonucleotide
uacuucacgagcucuccug

SEQ ID NO: 2480072 - RNA, 19 nt, Artificial Sequence
  Description of Artificial Sequence: Synthetic oligonucleotide
ggauguucaggacaccgcg

SEQ ID NO: 2480073 - RNA, 19 nt, Artificial Sequence
  Description of Artificial Sequence: Synthetic oligonucleotide
auccguguaggugaagugg

SEQ ID NO: 2480074 - RNA, 19 nt, Artificial Sequence
  Description of Artificial Sequence: Synthetic oligonucleotide
uucuggguugagcagcgug

SEQ ID NO: 2480075 - RNA, 19 nt, Artificial Sequence
  Description of Artificial Sequence: Synthetic oligonucleotide
aaagugcguguuguucucg

SEQ ID NO: 2480076 - RNA, 19 nt, Artificial Sequence
  Description of Artificial Sequence: Synthetic oligonucleotide
uaguagcucacgaucucug

SEQ ID NO: 2480077 - RNA, 19 nt, Artificial Sequence
  Description of Artificial Sequence: Synthetic oligonucleotide
gaauucagaguugcgcacc

SEQ ID NO: 2480078 - RNA, 19 nt, Artificial Sequence
  Description of Artificial Sequence: Synthetic oligonucleotide
gagaaggccucgcauagca

SEQ ID NO: 2480079 - RNA, 19 nt, Artificial Sequence
  Description of Artificial Sequence: Synthetic oligonucleotide
guagcucacgaucucugag

SEQ ID NO: 2480080 - RNA, 19 nt, Artificial Sequence
  Description of Artificial Sequence: Synthetic oligonucleotide
uguccacgaggccuucugg

SEQ ID NO: 2480081 - RNA, 19 nt, Artificial Sequence
  Description of Artificial Sequence: Synthetic oligonucleotide
ucccgguagugguaguugg

SEQ ID NO: 2480082 - RNA, 19 nt, Artificial Sequence
  Description of Artificial Sequence: Synthetic oligonucleotide
cucgcauagcaaaugcgug

SEQ ID NO: 2480083 - RNA, 19 nt, Artificial Sequence
  Description of Artificial Sequence: Synthetic oligonucleotide
aucgcugggauaguaguag

SEQ ID NO: 2480084 - RNA, 19 nt, Artificial Sequence
  Description of Artificial Sequence: Synthetic oligonucleotide
cugggcggagcaauuaaag

SEQ ID NO: 2480085 - RNA, 19 nt, Artificial Sequence
  Description of Artificial Sequence: Synthetic oligonucleotide
uuguucucgugcaccaaga

SEQ ID NO: 2480086 - RNA, 19 nt, Artificial Sequence
  Description of Artificial Sequence: Synthetic oligonucleotide
guuggggauguucaggaca

SEQ ID NO: 2480087 - RNA, 19 nt, Artificial Sequence
  Description of Artificial Sequence: Synthetic oligonucleotide
ugaggaacgccugagcaaa

SEQ ID NO: 2480088 - RNA, 19 nt, Artificial Sequence
  Description of Artificial Sequence: Synthetic oligonucleotide
aguuggggauguucaggac

SEQ ID NO: 2480089 - RNA, 19 nt, Artificial Sequence
  Description of Artificial Sequence: Synthetic oligonucleotide
ugggcggagcaauuaaaga

SEQ ID NO: 2480090 - RNA, 19 nt, Artificial Sequence
  Description of Artificial Sequence: Synthetic oligonucleotide
gcugucucauagaugaugg

SEQ ID NO: 2480091 - RNA, 19 nt, Artificial Sequence
  Description of Artificial Sequence: Synthetic oligonucleotide
caauagccgucccaaauuc

SEQ ID NO: 2480092 - RNA, 19 nt, Artificial Sequence
  Description of Artificial Sequence: Synthetic oligonucleotide
cucacgaucucugagacaa

SEQ ID NO: 2480093 - RNA, 19 nt, Artificial Sequence
  Description of Artificial Sequence: Synthetic oligonucleotide
acgaucucugagacaaacc

SEQ ID NO: 2480094 - RNA, 19 nt, Artificial Sequence
  Description of Artificial Sequence: Synthetic oligonucleotide
aauucucccggcugaggaa

SEQ ID NO: 2480095 - RNA, 19 nt, Artificial Sequence
  Description of Artificial Sequence: Synthetic oligonucleotide
cauuaggcauccaggcccc

SEQ ID NO: 2480096 - RNA, 19 nt, Artificial Sequence
  Description of Artificial Sequence: Synthetic oligonucleotide
agauacuucacgagcucuc

SEQ ID NO: 2480097 - RNA, 19 nt, Artificial Sequence
  Description of Artificial Sequence: Synthetic oligonucleotide
cagugagauacuucacgag

SEQ ID NO: 2480098 - RNA, 19 nt, Artificial Sequence
  Description of Artificial Sequence: Synthetic oligonucleotide
ugcguguuguucucgugca

SEQ ID NO: 2480099 - RNA, 19 nt, Artificial Sequence
  Description of Artificial Sequence: Synthetic oligonucleotide
guagacuggaugacagagg

SEQ ID NO: 2480100 - RNA, 19 nt, Artificial Sequence
  Description of Artificial Sequence: Synthetic oligonucleotide
aaaugcgugcacagaaagu

SEQ ID NO: 2480101 - RNA, 19 nt, Artificial Sequence
  Description of Artificial Sequence: Synthetic oligonucleotide
gaaggccucgcauagcaaa

SEQ ID NO: 2480102 - RNA, 19 nt, Artificial Sequence
  Description of Artificial Sequence: Synthetic oligonucleotide
aagugcguguuguucucgu

SEQ ID NO: 2480103 - RNA, 19 nt, Artificial Sequence
  Description of Artificial Sequence: Synthetic oligonucleotide
ucucgugcaccaagaauuc

SEQ ID NO: 2480104 - RNA, 19 nt, Artificial Sequence
  Description of Artificial Sequence: Synthetic oligonucleotide
agaguugcgcacccacguc

SEQ ID NO: 2480105 - RNA, 19 nt, Artificial Sequence
  Description of Artificial Sequence: Synthetic oligonucleotide
cuugcgaugguguucaccu

SEQ ID NO: 2480106 - RNA, 19 nt, Artificial Sequence
  Description of Artificial Sequence: Synthetic oligonucleotide
ggaagccugaauucucccg

SEQ ID NO: 2480107 - RNA, 19 nt, Artificial Sequence
  Description of Artificial Sequence: Synthetic oligonucleotide
agguggggcugucucauag

SEQ ID NO: 2480108 - RNA, 19 nt, Artificial Sequence
  Description of Artificial Sequence: Synthetic oligonucleotide
ugauggggcauuaggcauc

SEQ ID NO: 2480109 - RNA, 19 nt, Artificial Sequence
  Description of Artificial Sequence: Synthetic oligonucleotide
gugcguguuguucucgugc

SEQ ID NO: 2480110 - RNA, 19 nt, Artificial Sequence
  Description of Artificial Sequence: Synthetic oligonucleotide
ugaauucucccggcugagg

SEQ ID NO: 2480111 - RNA, 19 nt, Artificial Sequence
  Description of Artificial Sequence: Synthetic oligonucleotide
aaagucgugcugcccacua

SEQ ID NO: 2480112 - RNA, 19 nt, Artificial Sequence
  Description of Artificial Sequence: Synthetic oligonucleotide
aaagaugauugcagugaga

SEQ ID NO: 2480113 - RNA, 19 nt, Artificial Sequence
  Description of Artificial Sequence: Synthetic oligonucleotide
cuucaggccauccgucccg

SEQ ID NO: 2480114 - RNA, 19 nt, Artificial Sequence
  Description of Artificial Sequence: Synthetic oligonucleotide
ugggcuggauggccaacgg

SEQ ID NO: 2480115 - RNA, 19 nt, Artificial Sequence
  Description of Artificial Sequence: Synthetic oligonucleotide
augcgugcacagaaagugc

SEQ ID NO: 2480116 - RNA, 19 nt, Artificial Sequence
  Description of Artificial Sequence: Synthetic oligonucleotide
gaaagugcguguuguucuc

SEQ ID NO: 2480117 - RNA, 19 nt, Artificial Sequence
  Description of Artificial Sequence: Synthetic oligonucleotide
uguucucgugcaccaagaa

SEQ ID NO: 2480118 - RNA, 19 nt, Artificial Sequence
  Description of Artificial Sequence: Synthetic oligonucleotide
uugggaagccugaauucuc

SEQ ID NO: 2480119 - RNA, 19 nt, Artificial Sequence
  Description of Artificial Sequence: Synthetic oligonucleotide
agcagcguggcccuugcga

SEQ ID NO: 2480120 - RNA, 19 nt, Artificial Sequence
  Description of Artificial Sequence: Synthetic oligonucleotide
gucccaaauucuucaggcc

SEQ ID NO: 2480121 - RNA, 19 nt, Artificial Sequence
  Description of Artificial Sequence: Synthetic oligonucleotide
ucaggacaccgcgagcccg

SEQ ID NO: 2480122 - RNA, 19 nt, Artificial Sequence
  Description of Artificial Sequence: Synthetic oligonucleotide
aguagcucacgaucucuga

SEQ ID NO: 2480123 - RNA, 19 nt, Artificial Sequence
  Description of Artificial Sequence: Synthetic oligonucleotide
uuguagacuggaugacaga

SEQ ID NO: 2480124 - RNA, 19 nt, Artificial Sequence
  Description of Artificial Sequence: Synthetic oligonucleotide
cucgcagucagugggcagg

SEQ ID NO: 2480125 - RNA, 19 nt, Artificial Sequence
  Description of Artificial Sequence: Synthetic oligonucleotide
uucaggacaccgcgagccc

SEQ ID NO: 2480126 - RNA, 19 nt, Artificial Sequence
  Description of Artificial Sequence: Synthetic oligonucleotide
cugggauaguaguagcuca

SEQ ID NO: 2480127 - RNA, 19 nt, Artificial Sequence
  Description of Artificial Sequence: Synthetic oligonucleotide
agccaguccaacucgcagu

SEQ ID NO: 2480128 - RNA, 19 nt, Artificial Sequence
  Description of Artificial Sequence: Synthetic oligonucleotide
accucucaauagccguccc

SEQ ID NO: 2480129 - RNA, 19 nt, Artificial Sequence
  Description of Artificial Sequence: Synthetic oligonucleotide
gaucucugagacaaaccuc

SEQ ID NO: 2480130 - RNA, 19 nt, Artificial Sequence
  Description of Artificial Sequence: Synthetic oligonucleotide
uguagcgaguguggggaag

SEQ ID NO: 2480131 - RNA, 19 nt, Artificial Sequence
  Description of Artificial Sequence: Synthetic oligonucleotide
gauggccaacggcaguagc

SEQ ID NO: 2480132 - RNA, 19 nt, Artificial Sequence
  Description of Artificial Sequence: Synthetic oligonucleotide
gacagaggggcagcugacg

SEQ ID NO: 2480133 - RNA, 19 nt, Artificial Sequence
  Description of Artificial Sequence: Synthetic oligonucleotide
aagcaguagcuuguagacu

SEQ ID NO: 2480134 - RNA, 19 nt, Artificial Sequence
  Description of Artificial Sequence: Synthetic oligonucleotide
agccgucccaaauucuuca

SEQ ID NO: 2480135 - RNA, 19 nt, Artificial Sequence
  Description of Artificial Sequence: Synthetic oligonucleotide
cccacuauugacugcugcg

SEQ ID NO: 2480136 - RNA, 19 nt, Artificial Sequence
  Description of Artificial Sequence: Synthetic oligonucleotide
cacgaucucugagacaaac

SEQ ID NO: 2480137 - RNA, 19 nt, Artificial Sequence
  Description of Artificial Sequence: Synthetic oligonucleotide
uugcgcacccacgucuugg

SEQ ID NO: 2480138 - RNA, 19 nt, Artificial Sequence
  Description of Artificial Sequence: Synthetic oligonucleotide
gggcauuaggcauccaggc

SEQ ID NO: 2480139 - RNA, 19 nt, Artificial Sequence
  Description of Artificial Sequence: Synthetic oligonucleotide
gcucaugagguagaugagg

SEQ ID NO: 2480140 - RNA, 19 nt, Artificial Sequence
  Description of Artificial Sequence: Synthetic oligonucleotide
agcguggcccuugcgaugg

SEQ ID NO: 2480141 - RNA, 19 nt, Artificial Sequence
  Description of Artificial Sequence: Synthetic oligonucleotide
ucauagaugauggggcauu

SEQ ID NO: 2480142 - RNA, 19 nt, Artificial Sequence
  Description of Artificial Sequence: Synthetic oligonucleotide
cagaaagugcguguuguuc

SEQ ID NO: 2480143 - RNA, 19 nt, Artificial Sequence
  Description of Artificial Sequence: Synthetic oligonucleotide
agcccugugcucaugaggu

SEQ ID NO: 2480144 - RNA, 19 nt, Artificial Sequence
  Description of Artificial Sequence: Synthetic oligonucleotide
cagucagugggcaggaaga

SEQ ID NO: 2480145 - RNA, 19 nt, Artificial Sequence
  Description of Artificial Sequence: Synthetic oligonucleotide
aaaauccguguaggugaag

SEQ ID NO: 2480146 - RNA, 19 nt, Artificial Sequence
  Description of Artificial Sequence: Synthetic oligonucleotide
ucgugcugcccacuauuga

SEQ ID NO: 2480147 - RNA, 19 nt, Artificial Sequence
  Description of Artificial Sequence: Synthetic oligonucleotide
uugcagugagauacuucac

SEQ ID NO: 2480148 - RNA, 19 nt, Artificial Sequence
  Description of Artificial Sequence: Synthetic oligonucleotide
cagcguguagcgagugugg

SEQ ID NO: 2480149 - RNA, 19 nt, Artificial Sequence
  Description of Artificial Sequence: Synthetic oligonucleotide
cauagcaaaugcgugcaca

SEQ ID NO: 2480150 - RNA, 19 nt, Artificial Sequence
  Description of Artificial Sequence: Synthetic oligonucleotide
ucgcugggauaguaguagc

SEQ ID NO: 2480151 - RNA, 19 nt, Artificial Sequence
  Description of Artificial Sequence: Synthetic oligonucleotide
uggggcugucucauagaug

SEQ ID NO: 2480152 - RNA, 19 nt, Artificial Sequence
  Description of Artificial Sequence: Synthetic oligonucleotide
auacuucacgagcucuccu

SEQ ID NO: 2480153 - RNA, 19 nt, Artificial Sequence
  Description of Artificial Sequence: Synthetic oligonucleotide
ggcggagcaauuaaagaug

SEQ ID NO: 2480154 - RNA, 19 nt, Artificial Sequence
  Description of Artificial Sequence: Synthetic oligonucleotide
ugagcagcguggcccuugc

SEQ ID NO: 2480155 - RNA, 19 nt, Artificial Sequence
  Description of Artificial Sequence: Synthetic oligonucleotide
caacucgcagucagugggc

SEQ ID NO: 2480156 - RNA, 19 nt, Artificial Sequence
  Description of Artificial Sequence: Synthetic oligonucleotide
gcagugagauacuucacga

SEQ ID NO: 2480157 - RNA, 19 nt, Artificial Sequence
  Description of Artificial Sequence: Synthetic oligonucleotide
uauugacugcugcgugcug

SEQ ID NO: 2480158 - RNA, 19 nt, Artificial Sequence
  Description of Artificial Sequence: Synthetic oligonucleotide
ggggauguucaggacaccg

SEQ ID NO: 2480159 - RNA, 19 nt, Artificial Sequence
  Description of Artificial Sequence: Synthetic oligonucleotide
agcagccaguccaacucgc

SEQ ID NO: 2480160 - RNA, 19 nt, Artificial Sequence
  Description of Artificial Sequence: Synthetic oligonucleotide
ggggcauuaggcauccagg

SEQ ID NO: 2480161 - RNA, 19 nt, Artificial Sequence
  Description of Artificial Sequence: Synthetic oligonucleotide
cuaccgauggaugugaccu

SEQ ID NO: 2480162 - RNA, 19 nt, Artificial Sequence
  Description of Artificial Sequence: Synthetic oligonucleotide
ugcugggcggagcaauuaa

SEQ ID NO: 2480163 - RNA, 19 nt, Artificial Sequence
  Description of Artificial Sequence: Synthetic oligonucleotide
cagcagccaguccaacucg

SEQ ID NO: 2480164 - RNA, 19 nt, Artificial Sequence
  Description of Artificial Sequence: Synthetic oligonucleotide
uagccgucccaaauucuuc

SEQ ID NO: 2480165 - RNA, 19 nt, Artificial Sequence
  Description of Artificial Sequence: Synthetic oligonucleotide
agugcguguuguucucgug

SEQ ID NO: 2480166 - RNA, 19 nt, Artificial Sequence
  Description of Artificial Sequence: Synthetic oligonucleotide
ugcacagaaagugcguguu

SEQ ID NO: 2480167 - RNA, 19 nt, Artificial Sequence
  Description of Artificial Sequence: Synthetic oligonucleotide
aacucgcagucagugggca

SEQ ID NO: 2480168 - RNA, 19 nt, Artificial Sequence
  Description of Artificial Sequence: Synthetic oligonucleotide
uccgucccgguagugguag

SEQ ID NO: 2480169 - RNA, 19 nt, Artificial Sequence
  Description of Artificial Sequence: Synthetic oligonucleotide
ggauaguaguagcucacga

SEQ ID NO: 2480170 - RNA, 19 nt, Artificial Sequence
  Description of Artificial Sequence: Synthetic oligonucleotide
guccaacucgcagucagug

SEQ ID NO: 2480171 - RNA, 19 nt, Artificial Sequence
  Description of Artificial Sequence: Synthetic oligonucleotide
ggguugagccacaacaggc

SEQ ID NO: 2480172 - RNA, 19 nt, Artificial Sequence
  Description of Artificial Sequence: Synthetic oligonucleotide
uggaugacagaggggcagc

SEQ ID NO: 2480173 - RNA, 19 nt, Artificial Sequence
  Description of Artificial Sequence: Synthetic oligonucleotide
cacgaggccuucuggguug

SEQ ID NO: 2480174 - RNA, 19 nt, Artificial Sequence
  Description of Artificial Sequence: Synthetic oligonucleotide
ucucaauagccgucccaaa

SEQ ID NO: 2480175 - RNA, 19 nt, Artificial Sequence
  Description of Artificial Sequence: Synthetic oligonucleotide
agucgugcugcccacuauu

SEQ ID NO: 2480176 - RNA, 19 nt, Artificial Sequence
  Description of Artificial Sequence: Synthetic oligonucleotide
uggccaacggcaguagcac

SEQ ID NO: 2480177 - RNA, 19 nt, Artificial Sequence
  Description of Artificial Sequence: Synthetic oligonucleotide
caaaccucucaauagccgu

SEQ ID NO: 2480178 - RNA, 19 nt, Artificial Sequence
  Description of Artificial Sequence: Synthetic oligonucleotide
gcaccaagaauucagaguu

SEQ ID NO: 2480179 - RNA, 19 nt, Artificial Sequence
  Description of Artificial Sequence: Synthetic oligonucleotide
uagaugaggccgcgccuac

SEQ ID NO: 2480180 - RNA, 19 nt, Artificial Sequence
  Description of Artificial Sequence: Synthetic oligonucleotide
gggauaguaguagcucacg

SEQ ID NO: 2480181 - RNA, 19 nt, Artificial Sequence
  Description of Artificial Sequence: Synthetic oligonucleotide
uucaggccauccgucccgg

SEQ ID NO: 2480182 - RNA, 19 nt, Artificial Sequence
  Description of Artificial Sequence: Synthetic oligonucleotide
aagucgugcugcccacuau

SEQ ID NO: 2480183 - RNA, 19 nt, Artificial Sequence
  Description of Artificial Sequence: Synthetic oligonucleotide
acagaaagugcguguuguu

SEQ ID NO: 2480184 - RNA, 19 nt, Artificial Sequence
  Description of Artificial Sequence: Synthetic oligonucleotide
ugcagcguguagcgagugu

SEQ ID NO: 2480185 - RNA, 19 nt, Artificial Sequence
  Description of Artificial Sequence: Synthetic oligonucleotide
uggauggccaacggcagua

SEQ ID NO: 2480186 - RNA, 19 nt, Artificial Sequence
  Description of Artificial Sequence: Synthetic oligonucleotide
ucccggcugaggaacgccu

SEQ ID NO: 2480187 - RNA, 19 nt, Artificial Sequence
  Description of Artificial Sequence: Synthetic oligonucleotide
acucgcagucagugggcag

SEQ ID NO: 2480188 - RNA, 19 nt, Artificial Sequence
  Description of Artificial Sequence: Synthetic oligonucleotide
ggcugucucauagaugaug

SEQ ID NO: 2480189 - RNA, 19 nt, Artificial Sequence
  Description of Artificial Sequence: Synthetic oligonucleotide
cuggguugagcagcguggc

SEQ ID NO: 2480190 - RNA, 19 nt, Artificial Sequence
  Description of Artificial Sequence: Synthetic oligonucleotide
gaguugcgcacccacgucu

SEQ ID NO: 2480191 - RNA, 19 nt, Artificial Sequence
  Description of Artificial Sequence: Synthetic oligonucleotide
aaggccucgcauagcaaau

SEQ ID NO: 2480192 - RNA, 19 nt, Artificial Sequence
  Description of Artificial Sequence: Synthetic oligonucleotide
ugauugcagugagauacuu

SEQ ID NO: 2480193 - RNA, 19 nt, Artificial Sequence
  Description of Artificial Sequence: Synthetic oligonucleotide
ccguaggcuauccggaagg

SEQ ID NO: 2480194 - RNA, 19 nt, Artificial Sequence
  Description of Artificial Sequence: Synthetic oligonucleotide
agacuggaugacagagggg

SEQ ID NO: 2480195 - RNA, 19 nt, Artificial Sequence
  Description of Artificial Sequence: Synthetic oligonucleotide
auagccgucccaaauucuu

SEQ ID NO: 2480196 - RNA, 19 nt, Artificial Sequence
  Description of Artificial Sequence: Synthetic oligonucleotide
cucucaauagccgucccaa

SEQ ID NO: 2480197 - RNA, 19 nt, Artificial Sequence
  Description of Artificial Sequence: Synthetic oligonucleotide
ugaggccgcgccuaccgau

SEQ ID NO: 2480198 - RNA, 19 nt, Artificial Sequence
  Description of Artificial Sequence: Synthetic oligonucleotide
ggccucgcauagcaaaugc

SEQ ID NO: 2480199 - RNA, 19 nt, Artificial Sequence
  Description of Artificial Sequence: Synthetic oligonucleotide
agccugaauucucccggcu

SEQ ID NO: 2480200 - RNA, 19 nt, Artificial Sequence
  Description of Artificial Sequence: Synthetic oligonucleotide
accgcgagcccguaggcua

SEQ ID NO: 2480201 - RNA, 19 nt, Artificial Sequence
  Description of Artificial Sequence: Synthetic oligonucleotide
accgacgcaucgcugggau

SEQ ID NO: 2480202 - RNA, 19 nt, Artificial Sequence
  Description of Artificial Sequence: Synthetic oligonucleotide
ugcugcaccgacgcaucgc

SEQ ID NO: 2480203 - RNA, 19 nt, Artificial Sequence
  Description of Artificial Sequence: Synthetic oligonucleotide
cugaggaacgccugagcaa

SEQ ID NO: 2480204 - RNA, 19 nt, Artificial Sequence
  Description of Artificial Sequence: Synthetic oligonucleotide
aggccgcgccuaccgaugg

SEQ ID NO: 2480205 - RNA, 19 nt, Artificial Sequence
  Description of Artificial Sequence: Synthetic oligonucleotide
cucuccuggagugcacagc

SEQ ID NO: 2480206 - RNA, 19 nt, Artificial Sequence
  Description of Artificial Sequence: Synthetic oligonucleotide
augauugcagugagauacu

SEQ ID NO: 2480207 - RNA, 19 nt, Artificial Sequence
  Description of Artificial Sequence: Synthetic oligonucleotide
agcgaguguggggaagcag

SEQ ID NO: 2480208 - RNA, 19 nt, Artificial Sequence
  Description of Artificial Sequence: Synthetic oligonucleotide
gguugagccacaacaggca

SEQ ID NO: 2480209 - RNA, 19 nt, Artificial Sequence
  Description of Artificial Sequence: Synthetic oligonucleotide
aguagcuuguagacuggau

SEQ ID NO: 2480210 - RNA, 19 nt, Artificial Sequence
  Description of Artificial Sequence: Synthetic oligonucleotide
ugcccacuauugacugcug

SEQ ID NO: 2480211 - RNA, 19 nt, Artificial Sequence
  Description of Artificial Sequence: Synthetic oligonucleotide
gcagcguguagcgagugug

SEQ ID NO: 2480212 - RNA, 19 nt, Artificial Sequence
  Description of Artificial Sequence: Synthetic oligonucleotide
gggcagcugacgcagggug

SEQ ID NO: 2480213 - RNA, 19 nt, Artificial Sequence
  Description of Artificial Sequence: Synthetic oligonucleotide
ccuaccgauggaugugacc

SEQ ID NO: 2480214 - RNA, 19 nt, Artificial Sequence
  Description of Artificial Sequence: Synthetic oligonucleotide
cucaauagccgucccaaau

SEQ ID NO: 2480215 - RNA, 19 nt, Artificial Sequence
  Description of Artificial Sequence: Synthetic oligonucleotide
ggagcaauuaaagaugauu

SEQ ID NO: 2480216 - RNA, 19 nt, Artificial Sequence
  Description of Artificial Sequence: Synthetic oligonucleotide
cgugcugcccacuauugac

SEQ ID NO: 2480217 - RNA, 19 nt, Artificial Sequence
  Description of Artificial Sequence: Synthetic oligonucleotide
ggccccaaagucgugcugc

SEQ ID NO: 2480218 - RNA, 19 nt, Artificial Sequence
  Description of Artificial Sequence: Synthetic oligonucleotide
gccaacggcaguagcaccc

SEQ ID NO: 2480219 - RNA, 19 nt, Artificial Sequence
  Description of Artificial Sequence: Synthetic oligonucleotide
gcugggauaguaguagcuc

SEQ ID NO: 2480220 - RNA, 19 nt, Artificial Sequence
  Description of Artificial Sequence: Synthetic oligonucleotide
guucucgugcaccaagaau

SEQ ID NO: 2480221 - RNA, 19 nt, Artificial Sequence
  Description of Artificial Sequence: Synthetic oligonucleotide
gcacagaaagugcguguug

SEQ ID NO: 2480222 - RNA, 19 nt, Artificial Sequence
  Description of Artificial Sequence: Synthetic oligonucleotide
agucagugggcaggaagau

SEQ ID NO: 2480223 - RNA, 19 nt, Artificial Sequence
  Description of Artificial Sequence: Synthetic oligonucleotide
guaggcuauccggaaggca

SEQ ID NO: 2480224 - RNA, 19 nt, Artificial Sequence
  Description of Artificial Sequence: Synthetic oligonucleotide
gccucgcauagcaaaugcg

SEQ ID NO: 2480225 - RNA, 19 nt, Artificial Sequence
  Description of Artificial Sequence: Synthetic oligonucleotide
cuucacgagcucuccugga

SEQ ID NO: 2480226 - RNA, 19 nt, Artificial Sequence
  Description of Artificial Sequence: Synthetic oligonucleotide
ccgguagugguaguugggg

SEQ ID NO: 2480227 - RNA, 19 nt, Artificial Sequence
  Description of Artificial Sequence: Synthetic oligonucleotide
ucacgaucucugagacaaa

SEQ ID NO: 2480228 - RNA, 19 nt, Artificial Sequence
  Description of Artificial Sequence: Synthetic oligonucleotide
cacagaaagugcguguugu

SEQ ID NO: 2480229 - RNA, 19 nt, Artificial Sequence
  Description of Artificial Sequence: Synthetic oligonucleotide
ccgucccaaauucuucagg

SEQ ID NO: 2480230 - RNA, 19 nt, Artificial Sequence
  Description of Artificial Sequence: Synthetic oligonucleotide
acuggaugacagaggggca

SEQ ID NO: 2480231 - RNA, 19 nt, Artificial Sequence
  Description of Artificial Sequence: Synthetic oligonucleotide
aggccucgcauagcaaaug

SEQ ID NO: 2480232 - RNA, 19 nt, Artificial Sequence
  Description of Artificial Sequence: Synthetic oligonucleotide
guugcgcacccacgucuug

SEQ ID NO: 2480233 - RNA, 19 nt, Artificial Sequence
  Description of Artificial Sequence: Synthetic oligonucleotide
guagaugaggccgcgccua

SEQ ID NO: 2480234 - RNA, 19 nt, Artificial Sequence
  Description of Artificial Sequence: Synthetic oligonucleotide
guaguagcucacgaucucu

SEQ ID NO: 2480235 - RNA, 19 nt, Artificial Sequence
  Description of Artificial Sequence: Synthetic oligonucleotide
uccaggccccaaagucgug

SEQ ID NO: 2480236 - RNA, 19 nt, Artificial Sequence
  Description of Artificial Sequence: Synthetic oligonucleotide
ggcugaggaacgccugagc

SEQ ID NO: 2480237 - RNA, 19 nt, Artificial Sequence
  Description of Artificial Sequence: Synthetic oligonucleotide
gcccacuauugacugcugc

SEQ ID NO: 2480238 - RNA, 19 nt, Artificial Sequence
  Description of Artificial Sequence: Synthetic oligonucleotide
caucgcugggauaguagua

SEQ ID NO: 2480239 - RNA, 19 nt, Artificial Sequence
  Description of Artificial Sequence: Synthetic oligonucleotide
gccaguccaacucgcaguc

SEQ ID NO: 2480240 - RNA, 19 nt, Artificial Sequence
  Description of Artificial Sequence: Synthetic oligonucleotide
cugagguggggcugucuca

SEQ ID NO: 2480241 - RNA, 19 nt, Artificial Sequence
  Description of Artificial Sequence: Synthetic oligonucleotide
agcucuccuggagugcaca

SEQ ID NO: 2480242 - RNA, 19 nt, Artificial Sequence
  Description of Artificial Sequence: Synthetic oligonucleotide
uagcgaguguggggaagca

SEQ ID NO: 2480243 - RNA, 19 nt, Artificial Sequence
  Description of Artificial Sequence: Synthetic oligonucleotide
gagcagcguggcccuugcg

SEQ ID NO: 2480244 - RNA, 19 nt, Artificial Sequence
  Description of Artificial Sequence: Synthetic oligonucleotide
ucgcagucagugggcagga

SEQ ID NO: 2480245 - RNA, 19 nt, Artificial Sequence
  Description of Artificial Sequence: Synthetic oligonucleotide
gaggccgcgccuaccgaug

SEQ ID NO: 2480246 - RNA, 19 nt, Artificial Sequence
  Description of Artificial Sequence: Synthetic oligonucleotide
cagaguugcgcacccacgu

SEQ ID NO: 2480247 - RNA, 19 nt, Artificial Sequence
  Description of Artificial Sequence: Synthetic oligonucleotide
gcggagcaauuaaagauga

SEQ ID NO: 2480248 - RNA, 19 nt, Artificial Sequence
  Description of Artificial Sequence: Synthetic oligonucleotide
gcuuguagacuggaugaca

SEQ ID NO: 2480249 - RNA, 19 nt, Artificial Sequence
  Description of Artificial Sequence: Synthetic oligonucleotide
agucugggcuggauggcca

SEQ ID NO: 2480250 - RNA, 19 nt, Artificial Sequence
  Description of Artificial Sequence: Synthetic oligonucleotide
aggccccaaagucgugcug

SEQ ID NO: 2480251 - RNA, 19 nt, Artificial Sequence
  Description of Artificial Sequence: Synthetic oligonucleotide
cgacgcaucgcugggauag

SEQ ID NO: 2480252 - RNA, 19 nt, Artificial Sequence
  Description of Artificial Sequence: Synthetic oligonucleotide
gccgucccaaauucuucag

SEQ ID NO: 2480253 - RNA, 19 nt, Artificial Sequence
  Description of Artificial Sequence: Synthetic oligonucleotide
cccgguagugguaguuggg

SEQ ID NO: 2480254 - RNA, 19 nt, Artificial Sequence
  Description of Artificial Sequence: Synthetic oligonucleotide
cccaaagucgugcugccca

SEQ ID NO: 2480255 - RNA, 19 nt, Artificial Sequence
  Description of Artificial Sequence: Synthetic oligonucleotide
augaggccgcgccuaccga

SEQ ID NO: 2480256 - RNA, 19 nt, Artificial Sequence
  Description of Artificial Sequence: Synthetic oligonucleotide
ccguguaggugaagugggg

SEQ ID NO: 2480257 - RNA, 19 nt, Artificial Sequence
  Description of Artificial Sequence: Synthetic oligonucleotide
cggguugagccacaacagg

SEQ ID NO: 2480258 - RNA, 19 nt, Artificial Sequence
  Description of Artificial Sequence: Synthetic oligonucleotide
uggggauguucaggacacc

SEQ ID NO: 2480259 - RNA, 19 nt, Artificial Sequence
  Description of Artificial Sequence: Synthetic oligonucleotide
ugacugcugcgugcugggc

SEQ ID NO: 2480260 - RNA, 19 nt, Artificial Sequence
  Description of Artificial Sequence: Synthetic oligonucleotide
ccauccgucccgguagugg

SEQ ID NO: 2480261 - RNA, 19 nt, Artificial Sequence
  Description of Artificial Sequence: Synthetic oligonucleotide
aguccaacucgcagucagu

SEQ ID NO: 2480262 - RNA, 19 nt, Artificial Sequence
  Description of Artificial Sequence: Synthetic oligonucleotide
cagcguggcccuugcgaug

SEQ ID NO: 2480263 - RNA, 19 nt, Artificial Sequence
  Description of Artificial Sequence: Synthetic oligonucleotide
gcaccgacgcaucgcuggg

SEQ ID NO: 2480264 - RNA, 19 nt, Artificial Sequence
  Description of Artificial Sequence: Synthetic oligonucleotide
cacagccggcuugggaagc

SEQ ID NO: 2480265 - RNA, 19 nt, Artificial Sequence
  Description of Artificial Sequence: Synthetic oligonucleotide
cauccgucccgguaguggu

SEQ ID NO: 2480266 - RNA, 19 nt, Artificial Sequence
  Description of Artificial Sequence: Synthetic oligonucleotide
uggcccuugcgaugguguu

SEQ ID NO: 2480267 - RNA, 19 nt, Artificial Sequence
  Description of Artificial Sequence: Synthetic oligonucleotide
ggccaacggcaguagcacc

SEQ ID NO: 2480268 - RNA, 19 nt, Artificial Sequence
  Description of Artificial Sequence: Synthetic oligonucleotide
gggcuggauggccaacggc

SEQ ID NO: 2480269 - RNA, 19 nt, Artificial Sequence
  Description of Artificial Sequence: Synthetic oligonucleotide
ccaaagucgugcugcccac

SEQ ID NO: 2480270 - RNA, 19 nt, Artificial Sequence
  Description of Artificial Sequence: Synthetic oligonucleotide
ccucgcauagcaaaugcgu

SEQ ID NO: 2480271 - RNA, 19 nt, Artificial Sequence
  Description of Artificial Sequence: Synthetic oligonucleotide
cugcaccgacgcaucgcug

SEQ ID NO: 2480272 - RNA, 19 nt, Artificial Sequence
  Description of Artificial Sequence: Synthetic oligonucleotide
gcugcccacuauugacugc

SEQ ID NO: 2480273 - RNA, 19 nt, Artificial Sequence
  Description of Artificial Sequence: Synthetic oligonucleotide
cauagaugauggggcauua

SEQ ID NO: 2480274 - RNA, 19 nt, Artificial Sequence
  Description of Artificial Sequence: Synthetic oligonucleotide
acgucuuggccagcagcca

SEQ ID NO: 2480275 - RNA, 19 nt, Artificial Sequence
  Description of Artificial Sequence: Synthetic oligonucleotide
gcaucgcugggauaguagu

SEQ ID NO: 2480276 - RNA, 19 nt, Artificial Sequence
  Description of Artificial Sequence: Synthetic oligonucleotide
ccuugcgaugguguucacc

SEQ ID NO: 2480277 - RNA, 19 nt, Artificial Sequence
  Description of Artificial Sequence: Synthetic oligonucleotide
cccguaggcuauccggaag

SEQ ID NO: 2480278 - RNA, 19 nt, Artificial Sequence
  Description of Artificial Sequence: Synthetic oligonucleotide
cgcaucgcugggauaguag

SEQ ID NO: 2480279 - RNA, 19 nt, Artificial Sequence
  Description of Artificial Sequence: Synthetic oligonucleotide
ggccauggagaaggccucg

SEQ ID NO: 2480280 - RNA, 19 nt, Artificial Sequence
  Description of Artificial Sequence: Synthetic oligonucleotide
gacgcaggguggccaugga

SEQ ID NO: 2480281 - RNA, 19 nt, Artificial Sequence
  Description of Artificial Sequence: Synthetic oligonucleotide
ggauggccaacggcaguag

SEQ ID NO: 2480282 - RNA, 19 nt, Artificial Sequence
  Description of Artificial Sequence: Synthetic oligonucleotide
cucgugcaccaagaauuca

SEQ ID NO: 2480283 - RNA, 19 nt, Artificial Sequence
  Description of Artificial Sequence: Synthetic oligonucleotide
aguugcgcacccacgucuu

SEQ ID NO: 2480284 - RNA, 19 nt, Artificial Sequence
  Description of Artificial Sequence: Synthetic oligonucleotide
agaaggccucgcauagcaa

SEQ ID NO: 2480285 - RNA, 19 nt, Artificial Sequence
  Description of Artificial Sequence: Synthetic oligonucleotide
gcaaaugcgugcacagaaa

SEQ ID NO: 2480286 - RNA, 19 nt, Artificial Sequence
  Description of Artificial Sequence: Synthetic oligonucleotide
gcccuugcgaugguguuca

SEQ ID NO: 2480287 - RNA, 19 nt, Artificial Sequence
  Description of Artificial Sequence: Synthetic oligonucleotide
gguagaugaggccgcgccu

SEQ ID NO: 2480288 - RNA, 19 nt, Artificial Sequence
  Description of Artificial Sequence: Synthetic oligonucleotide
cugcagcguguagcgagug

SEQ ID NO: 2480289 - RNA, 19 nt, Artificial Sequence
  Description of Artificial Sequence: Synthetic oligonucleotide
gccccaaagucgugcugcc

SEQ ID NO: 2480290 - RNA, 19 nt, Artificial Sequence
  Description of Artificial Sequence: Synthetic oligonucleotide
cugcggguugagccacaac

SEQ ID NO: 2480291 - RNA, 19 nt, Artificial Sequence
  Description of Artificial Sequence: Synthetic oligonucleotide
auuaggcauccaggcccca

SEQ ID NO: 2480292 - RNA, 19 nt, Artificial Sequence
  Description of Artificial Sequence: Synthetic oligonucleotide
caggccauccgucccggua

SEQ ID NO: 2480293 - RNA, 19 nt, Artificial Sequence
  Description of Artificial Sequence: Synthetic oligonucleotide
gugcugcccacuauugacu

SEQ ID NO: 2480294 - RNA, 19 nt, Artificial Sequence
  Description of Artificial Sequence: Synthetic oligonucleotide
ccaacggcaguagcacccc

SEQ ID NO: 2480295 - RNA, 19 nt, Artificial Sequence
  Description of Artificial Sequence: Synthetic oligonucleotide
guguagcgaguguggggaa

SEQ ID NO: 2480296 - RNA, 19 nt, Artificial Sequence
  Description of Artificial Sequence: Synthetic oligonucleotide
agccggcuugggaagccug

SEQ ID NO: 2480297 - RNA, 19 nt, Artificial Sequence
  Description of Artificial Sequence: Synthetic oligonucleotide
cagcugacgcaggguggcc

SEQ ID NO: 2480298 - RNA, 19 nt, Artificial Sequence
  Description of Artificial Sequence: Synthetic oligonucleotide
ccugugcucaugagguaga

SEQ ID NO: 2480299 - RNA, 19 nt, Artificial Sequence
  Description of Artificial Sequence: Synthetic oligonucleotide
ccagcccugugcucaugag

SEQ ID NO: 2480300 - RNA, 19 nt, Artificial Sequence
  Description of Artificial Sequence: Synthetic oligonucleotide
ggacaccgcgagcccguag

SEQ ID NO: 2480301 - RNA, 19 nt, Artificial Sequence
  Description of Artificial Sequence: Synthetic oligonucleotide
gaggaacgccugagcaaaa

SEQ ID NO: 2480302 - RNA, 19 nt, Artificial Sequence
  Description of Artificial Sequence: Synthetic oligonucleotide
gcucacgaucucugagaca

SEQ ID NO: 2480303 - RNA, 19 nt, Artificial Sequence
  Description of Artificial Sequence: Synthetic oligonucleotide
gcguguuguucucgugcac

SEQ ID NO: 2480304 - RNA, 19 nt, Artificial Sequence
  Description of Artificial Sequence: Synthetic oligonucleotide
guggcccuugcgauggugu

SEQ ID NO: 2480305 - RNA, 19 nt, Artificial Sequence
  Description of Artificial Sequence: Synthetic oligonucleotide
ugcgugcugggcggagcaa

SEQ ID NO: 2480306 - RNA, 19 nt, Artificial Sequence
  Description of Artificial Sequence: Synthetic oligonucleotide
acgcaucgcugggauagua

SEQ ID NO: 2480307 - RNA, 19 nt, Artificial Sequence
  Description of Artificial Sequence: Synthetic oligonucleotide
gcgccuaccgauggaugug

SEQ ID NO: 2480308 - RNA, 19 nt, Artificial Sequence
  Description of Artificial Sequence: Synthetic oligonucleotide
cgauggaugugaccuuguc

SEQ ID NO: 2480309 - RNA, 19 nt, Artificial Sequence
  Description of Artificial Sequence: Synthetic oligonucleotide
cguaggcuauccggaaggc

SEQ ID NO: 2480310 - RNA, 19 nt, Artificial Sequence
  Description of Artificial Sequence: Synthetic oligonucleotide
acgaggccuucuggguuga

SEQ ID NO: 2480311 - RNA, 19 nt, Artificial Sequence
  Description of Artificial Sequence: Synthetic oligonucleotide
cgcauagcaaaugcgugca

SEQ ID NO: 2480312 - RNA, 19 nt, Artificial Sequence
  Description of Artificial Sequence: Synthetic oligonucleotide
caggccccaaagucgugcu

SEQ ID NO: 2480313 - RNA, 19 nt, Artificial Sequence
  Description of Artificial Sequence: Synthetic oligonucleotide
gcgcacccacgucuuggcc

SEQ ID NO: 2480314 - RNA, 19 nt, Artificial Sequence
  Description of Artificial Sequence: Synthetic oligonucleotide
gcagcguggcccuugcgau

SEQ ID NO: 2480315 - RNA, 19 nt, Artificial Sequence
  Description of Artificial Sequence: Synthetic oligonucleotide
gcgaugguguucaccugca

SEQ ID NO: 2480316 - RNA, 19 nt, Artificial Sequence
  Description of Artificial Sequence: Synthetic oligonucleotide
cgcacccacgucuuggcca

SEQ ID NO: 2480317 - RNA, 19 nt, Artificial Sequence
  Description of Artificial Sequence: Synthetic oligonucleotide
caggacaccgcgagcccgu

SEQ ID NO: 2480318 - RNA, 19 nt, Artificial Sequence
  Description of Artificial Sequence: Synthetic oligonucleotide
gcugggcggagcaauuaaa

SEQ ID NO: 2480319 - RNA, 19 nt, Artificial Sequence
  Description of Artificial Sequence: Synthetic oligonucleotide
ggcccuugcgaugguguuc

SEQ ID NO: 2480320 - RNA, 19 nt, Artificial Sequence
  Description of Artificial Sequence: Synthetic oligonucleotide
cccaaauucuucaggccau

SEQ ID NO: 2480321 - RNA, 19 nt, Artificial Sequence
  Description of Artificial Sequence: Synthetic oligonucleotide
ggcuauccggaaggcaaaa

SEQ ID NO: 2480322 - RNA, 19 nt, Artificial Sequence
  Description of Artificial Sequence: Synthetic oligonucleotide
gugcugggcggagcaauua

SEQ ID NO: 2480323 - RNA, 19 nt, Artificial Sequence
  Description of Artificial Sequence: Synthetic oligonucleotide
cccacgucuuggccagcag

SEQ ID NO: 2480324 - RNA, 19 nt, Artificial Sequence
  Description of Artificial Sequence: Synthetic oligonucleotide
gcccguaggcuauccggaa

SEQ ID NO: 2480325 - RNA, 19 nt, Artificial Sequence
  Description of Artificial Sequence: Synthetic oligonucleotide
caaagucgugcugcccacu

SEQ ID NO: 2480326 - RNA, 19 nt, Artificial Sequence
  Description of Artificial Sequence: Synthetic oligonucleotide
gacgcaucgcugggauagu

SEQ ID NO: 2480327 - RNA, 19 nt, Artificial Sequence
  Description of Artificial Sequence: Synthetic oligonucleotide
ccccaaagucgugcugccc

SEQ ID NO: 2480328 - RNA, 19 nt, Artificial Sequence
  Description of Artificial Sequence: Synthetic oligonucleotide
ccgcgccuaccgauggaug

SEQ ID NO: 2480329 - RNA, 19 nt, Artificial Sequence
  Description of Artificial Sequence: Synthetic oligonucleotide
auccgucccgguaguggua

SEQ ID NO: 2480330 - RNA, 19 nt, Artificial Sequence
  Description of Artificial Sequence: Synthetic oligonucleotide
gcgagcccguaggcuaucc

SEQ ID NO: 2480331 - RNA, 19 nt, Artificial Sequence
  Description of Artificial Sequence: Synthetic oligonucleotide
caccgacgcaucgcuggga

SEQ ID NO: 2480332 - RNA, 19 nt, Artificial Sequence
  Description of Artificial Sequence: Synthetic oligonucleotide
gccuaccgauggaugugac

SEQ ID NO: 2480333 - RNA, 19 nt, Artificial Sequence
  Description of Artificial Sequence: Synthetic oligonucleotide
cugugcucaugagguagau

SEQ ID NO: 2480334 - RNA, 19 nt, Artificial Sequence
  Description of Artificial Sequence: Synthetic oligonucleotide
gccauccgucccgguagug

SEQ ID NO: 2480335 - RNA, 19 nt, Artificial Sequence
  Description of Artificial Sequence: Synthetic oligonucleotide
aggacaccgcgagcccgua

SEQ ID NO: 2480336 - RNA, 19 nt, Artificial Sequence
  Description of Artificial Sequence: Synthetic oligonucleotide
cggcugaggaacgccugag

SEQ ID NO: 2480337 - RNA, 19 nt, Artificial Sequence
  Description of Artificial Sequence: Synthetic oligonucleotide
gcgugcacagaaagugcgu

SEQ ID NO: 2480338 - RNA, 19 nt, Artificial Sequence
  Description of Artificial Sequence: Synthetic oligonucleotide
cgcgccuaccgauggaugu

SEQ ID NO: 2480339 - RNA, 19 nt, Artificial Sequence
  Description of Artificial Sequence: Synthetic oligonucleotide
caccgcgagcccguaggcu

SEQ ID NO: 2480340 - RNA, 19 nt, Artificial Sequence
  Description of Artificial Sequence: Synthetic oligonucleotide
gcccugugcucaugaggua

SEQ ID NO: 2480341 - RNA, 19 nt, Artificial Sequence
  Description of Artificial Sequence: Synthetic oligonucleotide
ggccgcgccuaccgaugga

SEQ ID NO: 2480342 - RNA, 19 nt, Artificial Sequence
  Description of Artificial Sequence: Synthetic oligonucleotide
ggccauccgucccgguagu

SEQ ID NO: 2480343 - RNA, 19 nt, Artificial Sequence
  Description of Artificial Sequence: Synthetic oligonucleotide
cuucuggguugagcagcgu

SEQ ID NO: 2480344 - RNA, 19 nt, Artificial Sequence
  Description of Artificial Sequence: Synthetic oligonucleotide
cguggcccuugcgauggug

SEQ ID NO: 2480345 - RNA, 19 nt, Artificial Sequence
  Description of Artificial Sequence: Synthetic oligonucleotide
ccaguccaacucgcaguca

SEQ ID NO: 2480346 - RNA, 19 nt, Artificial Sequence
  Description of Artificial Sequence: Synthetic oligonucleotide
ccgauggaugugaccuugu

SEQ ID NO: 2480347 - RNA, 19 nt, Artificial Sequence
  Description of Artificial Sequence: Synthetic oligonucleotide
cugcugcgugcugggcgga

SEQ ID NO: 2480348 - RNA, 19 nt, Artificial Sequence
  Description of Artificial Sequence: Synthetic oligonucleotide
cgccuaccgauggauguga

SEQ ID NO: 2480349 - RNA, 19 nt, Artificial Sequence
  Description of Artificial Sequence: Synthetic oligonucleotide
cccuugcgaugguguucac

SEQ ID NO: 2480350 - RNA, 19 nt, Artificial Sequence
  Description of Artificial Sequence: Synthetic oligonucleotide
gccgcgccuaccgauggau

SEQ ID NO: 2480351 - RNA, 19 nt, Artificial Sequence
  Description of Artificial Sequence: Synthetic oligonucleotide
cagccggcuugggaagccu

SEQ ID NO: 2480352 - RNA, 19 nt, Artificial Sequence
  Description of Artificial Sequence: Synthetic oligonucleotide
gcgugcugggcggagcaau

SEQ ID NO: 2480353 - RNA, 19 nt, Artificial Sequence
  Description of Artificial Sequence: Synthetic oligonucleotide
ccggcuugggaagccugaa

SEQ ID NO: 2480354 - RNA, 19 nt, Artificial Sequence
  Description of Artificial Sequence: Synthetic oligonucleotide
ccugcggguugagccacaa

SEQ ID NO: 2480355 - RNA, 19 nt, Artificial Sequence
  Description of Artificial Sequence: Synthetic oligonucleotide
ccgacgcaucgcugggaua

SEQ ID NO: 2480356 - RNA, 19 nt, Artificial Sequence
  Description of Artificial Sequence: Synthetic oligonucleotide
cggagcaauuaaagaugau

SEQ ID NO: 2480357 - RNA, 19 nt, Artificial Sequence
  Description of Artificial Sequence: Synthetic oligonucleotide
cccugcggguugagccaca

SEQ ID NO: 2480358 - RNA, 19 nt, Artificial Sequence
  Description of Artificial Sequence: Synthetic oligonucleotide
gggccagcccugugcucau

SEQ ID NO: 2480359 - RNA, 19 nt, Artificial Sequence
  Description of Artificial Sequence: Synthetic oligonucleotide
ccgcgagcccguaggcuau

SEQ ID NO: 2480360 - RNA, 19 nt, Artificial Sequence
  Description of Artificial Sequence: Synthetic oligonucleotide
cgcgagcccguaggcuauc

SEQ ID NO: 2480361 - RNA, 19 nt, Artificial Sequence
  Description of Artificial Sequence: Synthetic oligonucleotide
gcguggcccuugcgauggu

SEQ ID NO: 2480362 - RNA, 19 nt, Artificial Sequence
  Description of Artificial Sequence: Synthetic oligonucleotide
ccgucccgguagugguagu

SEQ ID NO: 2480363 - RNA, 19 nt, Artificial Sequence
  Description of Artificial Sequence: Synthetic oligonucleotide
aauacgaugucacuaagcc

SEQ ID NO: 2480364 - RNA, 19 nt, Artificial Sequence
  Description of Artificial Sequence: Synthetic oligonucleotide
agaaagaugaggcucaagc

SEQ ID NO: 2480365 - RNA, 19 nt, Artificial Sequence
  Description of Artificial Sequence: Synthetic oligonucleotide
aauacucuucauuagagug

SEQ ID NO: 2480366 - RNA, 19 nt, Artificial Sequence
  Description of Artificial Sequence: Synthetic oligonucleotide
  modified_base (5)..(5): a, c, u, g, unknown or other
uuuanauuuagcuuguccu

SEQ ID NO: 2480367 - RNA, 19 nt, Artificial Sequence
  Description of Artificial Sequence: Synthetic oligonucleotide
uuuucacucugucugaugg

SEQ ID NO: 2480368 - RNA, 19 nt, Artificial Sequence
  Description of Artificial Sequence: Synthetic oligonucleotide
  modified_base (6)..(6): a, c, u, g, unknown or other
uuuuanauuuagcuugucc

SEQ ID NO: 2480369 - RNA, 19 nt, Artificial Sequence
  Description of Artificial Sequence: Synthetic oligonucleotide
guaaacaucagaaaagucc

SEQ ID NO: 2480370 - RNA, 19 nt, Artificial Sequence
  Description of Artificial Sequence: Synthetic oligonucleotide
ucuacauuccaacaaacac

SEQ ID NO: 2480371 - RNA, 19 nt, Artificial Sequence
  Description of Artificial Sequence: Synthetic oligonucleotide
acuagaauaaucuucccug

SEQ ID NO: 2480372 - RNA, 19 nt, Artificial Sequence
  Description of Artificial Sequence: Synthetic oligonucleotide
  modified_base (9)..(9): a, c, u, g, unknown or other
gucuuuuanauuuagcuug

SEQ ID NO: 2480373 - RNA, 19 nt, Artificial Sequence
  Description of Artificial Sequence: Synthetic oligonucleotide
agaaaaguccacaaugucc

SEQ ID NO: 2480374 - RNA, 19 nt, Artificial Sequence
  Description of Artificial Sequence: Synthetic oligonucleotide
  modified_base (4)..(4): a, c, u, g, unknown or other
uuanauuuagcuuguccug

SEQ ID NO: 2480375 - RNA, 19 nt, Artificial Sequence
  Description of Artificial Sequence: Synthetic oligonucleotide
uuuagcagagucacaagag

SEQ ID NO: 2480376 - RNA, 19 nt, Artificial Sequence
  Description of Artificial Sequence: Synthetic oligonucleotide
ucuguuccgauacagaacu

SEQ ID NO: 2480377 - RNA, 19 nt, Artificial Sequence
  Description of Artificial Sequence: Synthetic oligonucleotide
uccaacaaacacaaccugg

SEQ ID NO: 2480378 - RNA, 19 nt, Artificial Sequence
  Description of Artificial Sequence: Synthetic oligonucleotide
uccgauacagaacuagagg

SEQ ID NO: 2480379 - RNA, 19 nt, Artificial Sequence
  Description of Artificial Sequence: Synthetic oligonucleotide
ugaaauacucuucauuaga

SEQ ID NO: 2480380 - RNA, 19 nt, Artificial Sequence
  Description of Artificial Sequence: Synthetic oligonucleotide
cuuucgaacagcauuggcc

SEQ ID NO: 2480381 - RNA, 19 nt, Artificial Sequence
  Description of Artificial Sequence: Synthetic oligonucleotide
uuuuagcagagucacaaga

SEQ ID NO: 2480382 - RNA, 19 nt, Artificial Sequence
  Description of Artificial Sequence: Synthetic oligonucleotide
  modified_base (3)..(3): a, c, u, g, unknown or other
uanauuuagcuuguccugg

SEQ ID NO: 2480383 - RNA, 19 nt, Artificial Sequence
  Description of Artificial Sequence: Synthetic oligonucleotide
uuaguuuccugaaauacuc

SEQ ID NO: 2480384 - RNA, 19 nt, Artificial Sequence
  Description of Artificial Sequence: Synthetic oligonucleotide
  modified_base (11)..(11): a, c, u, g, unknown or other
acgucuuuuanauuuagcu

SEQ ID NO: 2480385 - RNA, 19 nt, Artificial Sequence
  Description of Artificial Sequence: Synthetic oligonucleotide
agugguaaacaucagaaaa

SEQ ID NO: 2480386 - RNA, 19 nt, Artificial Sequence
  Description of Artificial Sequence: Synthetic oligonucleotide
aaauuacuuccuuagugga

SEQ ID NO: 2480387 - RNA, 19 nt, Artificial Sequence
  Description of Artificial Sequence: Synthetic oligonucleotide
uuuccugaaauacucuuca

SEQ ID NO: 2480388 - RNA, 19 nt, Artificial Sequence
  Description of Artificial Sequence: Synthetic oligonucleotide
augaagaccugcuuucccc

SEQ ID NO: 2480389 - RNA, 19 nt, Artificial Sequence
  Description of Artificial Sequence: Synthetic oligonucleotide
uuaguggauugaaugaagc

SEQ ID NO: 2480390 - RNA, 19 nt, Artificial Sequence
  Description of Artificial Sequence: Synthetic oligonucleotide
uacauuccaacaaacacaa

SEQ ID NO: 2480391 - RNA, 19 nt, Artificial Sequence
  Description of Artificial Sequence: Synthetic oligonucleotide
gacacuagaauaaucuucc

SEQ ID NO: 2480392 - RNA, 19 nt, Artificial Sequence
  Description of Artificial Sequence: Synthetic oligonucleotide
ugagaaacagaaagcuggg

SEQ ID NO: 2480393 - RNA, 19 nt, Artificial Sequence
  Description of Artificial Sequence: Synthetic oligonucleotide
auuagagugguaaacauca

SEQ ID NO: 2480394 - RNA, 19 nt, Artificial Sequence
  Description of Artificial Sequence: Synthetic oligonucleotide
uuucgaacagcauuggccu

SEQ ID NO: 2480395 - RNA, 19 nt, Artificial Sequence
  Description of Artificial Sequence: Synthetic oligonucleotide
uuccuuaguggauugaaug

SEQ ID NO: 2480396 - RNA, 19 nt, Artificial Sequence
  Description of Artificial Sequence: Synthetic oligonucleotide
agaccuucugucuuuuagc

SEQ ID NO: 2480397 - RNA, 19 nt, Artificial Sequence
  Description of Artificial Sequence: Synthetic oligonucleotide
aaauacucuucauuagagu

SEQ ID NO: 2480398 - RNA, 19 nt, Artificial Sequence
  Description of Artificial Sequence: Synthetic oligonucleotide
uaagccuuggagauggaug

SEQ ID NO: 2480399 - RNA, 19 nt, Artificial Sequence
  Description of Artificial Sequence: Synthetic oligonucleotide
aacuagaggagacacuaga

SEQ ID NO: 2480400 - RNA, 19 nt, Artificial Sequence
  Description of Artificial Sequence: Synthetic oligonucleotide
acuuaagccuuggagaugg

SEQ ID NO: 2480401 - RNA, 19 nt, Artificial Sequence
  Description of Artificial Sequence: Synthetic oligonucleotide
acaaacacaaccugggcga

SEQ ID NO: 2480402 - RNA, 19 nt, Artificial Sequence
  Description of Artificial Sequence: Synthetic oligonucleotide
cuagaauaaucuucccugg

SEQ ID NO: 2480403 - RNA, 19 nt, Artificial Sequence
  Description of Artificial Sequence: Synthetic oligonucleotide
ucuuacuggugacuuaagc

SEQ ID NO: 2480404 - RNA, 19 nt, Artificial Sequence
  Description of Artificial Sequence: Synthetic oligonucleotide
agaauaaucuucccuggug

SEQ ID NO: 2480405 - RNA, 19 nt, Artificial Sequence
  Description of Artificial Sequence: Synthetic oligonucleotide
uuccgauacagaacuagag

SEQ ID NO: 2480406 - RNA, 19 nt, Artificial Sequence
  Description of Artificial Sequence: Synthetic oligonucleotide
ucuuuuagcagagucacaa

SEQ ID NO: 2480407 - RNA, 19 nt, Artificial Sequence
  Description of Artificial Sequence: Synthetic oligonucleotide
  modified_base (8)..(8): a, c, u, g, unknown or other
ucuuuuanauuuagcuugu

SEQ ID NO: 2480408 - RNA, 19 nt, Artificial Sequence
  Description of Artificial Sequence: Synthetic oligonucleotide
gaugucacuaagccagggg

SEQ ID NO: 2480409 - RNA, 19 nt, Artificial Sequence
  Description of Artificial Sequence: Synthetic oligonucleotide
gucacaagaguauucauga

SEQ ID NO: 2480410 - RNA, 19 nt, Artificial Sequence
  Description of Artificial Sequence: Synthetic oligonucleotide
aguggauugaaugaagcug

SEQ ID NO: 2480411 - RNA, 19 nt, Artificial Sequence
  Description of Artificial Sequence: Synthetic oligonucleotide
acagaacuagaggagacac

SEQ ID NO: 2480412 - RNA, 19 nt, Artificial Sequence
  Description of Artificial Sequence: Synthetic oligonucleotide
uucauuagagugguaaaca

SEQ ID NO: 2480413 - RNA, 19 nt, Artificial Sequence
  Description of Artificial Sequence: Synthetic oligonucleotide
ucucuuaguuuccugaaau

SEQ ID NO: 2480414 - RNA, 19 nt, Artificial Sequence
  Description of Artificial Sequence: Synthetic oligonucleotide
uaaucuucccuggugauca

SEQ ID NO: 2480415 - RNA, 19 nt, Artificial Sequence
  Description of Artificial Sequence: Synthetic oligonucleotide
uuagcagagucacaagagu

SEQ ID NO: 2480416 - RNA, 19 nt, Artificial Sequence
  Description of Artificial Sequence: Synthetic oligonucleotide
aacagcgucucagcaauac

SEQ ID NO: 2480417 - RNA, 19 nt, Artificial Sequence
  Description of Artificial Sequence: Synthetic oligonucleotide
agacacuagaauaaucuuc

SEQ ID NO: 2480418 - RNA, 19 nt, Artificial Sequence
  Description of Artificial Sequence: Synthetic oligonucleotide
  modified_base (2)..(2): a, c, u, g, unknown or other
anauuuagcuuguccuggu

SEQ ID NO: 2480419 - RNA, 19 nt, Artificial Sequence
  Description of Artificial Sequence: Synthetic oligonucleotide
uagagugguaaacaucaga

SEQ ID NO: 2480420 - RNA, 19 nt, Artificial Sequence
  Description of Artificial Sequence: Synthetic oligonucleotide
uccuuaguggauugaauga

SEQ ID NO: 2480421 - RNA, 19 nt, Artificial Sequence
  Description of Artificial Sequence: Synthetic oligonucleotide
ugaagaccugcuuuccccg

SEQ ID NO: 2480422 - RNA, 19 nt, Artificial Sequence
  Description of Artificial Sequence: Synthetic oligonucleotide
cuuaguggauugaaugaag

SEQ ID NO: 2480423 - RNA, 19 nt, Artificial Sequence
  Description of Artificial Sequence: Synthetic oligonucleotide
ugucuuuuagcagagucac

SEQ ID NO: 2480424 - RNA, 19 nt, Artificial Sequence
  Description of Artificial Sequence: Synthetic oligonucleotide
ugaggcucaagcuuggaaa

SEQ ID NO: 2480425 - RNA, 19 nt, Artificial Sequence
  Description of Artificial Sequence: Synthetic oligonucleotide
aacacaaccugggcgacuc

SEQ ID NO: 2480426 - RNA, 19 nt, Artificial Sequence
  Description of Artificial Sequence: Synthetic oligonucleotide
uguuccgauacagaacuag

SEQ ID NO: 2480427 - RNA, 19 nt, Artificial Sequence
  Description of Artificial Sequence: Synthetic oligonucleotide
gaagcugccccagaaacag

SEQ ID NO: 2480428 - RNA, 19 nt, Artificial Sequence
  Description of Artificial Sequence: Synthetic oligonucleotide
ugaauacgaugucacuaag

SEQ ID NO: 2480429 - RNA, 19 nt, Artificial Sequence
  Description of Artificial Sequence: Synthetic oligonucleotide
cugucugauggcuuguucc

SEQ ID NO: 2480430 - RNA, 19 nt, Artificial Sequence
  Description of Artificial Sequence: Synthetic oligonucleotide
cugaaauacucuucauuag

SEQ ID NO: 2480431 - RNA, 19 nt, Artificial Sequence
  Description of Artificial Sequence: Synthetic oligonucleotide
ugugcaugcacuucuuacu

SEQ ID NO: 2480432 - RNA, 19 nt, Artificial Sequence
  Description of Artificial Sequence: Synthetic oligonucleotide
ggugacuuaagccuuggag

SEQ ID NO: 2480433 - RNA, 19 nt, Artificial Sequence
  Description of Artificial Sequence: Synthetic oligonucleotide
ugcauggcggccuuuagcu

SEQ ID NO: 2480434 - RNA, 19 nt, Artificial Sequence
  Description of Artificial Sequence: Synthetic oligonucleotide
ugacuuaagccuuggagau

SEQ ID NO: 2480435 - RNA, 19 nt, Artificial Sequence
  Description of Artificial Sequence: Synthetic oligonucleotide
uaugucaggcucugaauac

SEQ ID NO: 2480436 - RNA, 19 nt, Artificial Sequence
  Description of Artificial Sequence: Synthetic oligonucleotide
auacucuucauuagagugg

SEQ ID NO: 2480437 - RNA, 19 nt, Artificial Sequence
  Description of Artificial Sequence: Synthetic oligonucleotide
acacuagaauaaucuuccc

SEQ ID NO: 2480438 - RNA, 19 nt, Artificial Sequence
  Description of Artificial Sequence: Synthetic oligonucleotide
ucaggcucugaauacgaug

SEQ ID NO: 2480439 - RNA, 19 nt, Artificial Sequence
  Description of Artificial Sequence: Synthetic oligonucleotide
guggauugaaugaagcugc

SEQ ID NO: 2480440 - RNA, 19 nt, Artificial Sequence
  Description of Artificial Sequence: Synthetic oligonucleotide
ucugaauacgaugucacua

SEQ ID NO: 2480441 - RNA, 19 nt, Artificial Sequence
  Description of Artificial Sequence: Synthetic oligonucleotide
ucauuagagugguaaacau

SEQ ID NO: 2480442 - RNA, 19 nt, Artificial Sequence
  Description of Artificial Sequence: Synthetic oligonucleotide
ugucugauggcuuguuccc

SEQ ID NO: 2480443 - RNA, 19 nt, Artificial Sequence
  Description of Artificial Sequence: Synthetic oligonucleotide
cucagcaauacuagggcac

SEQ ID NO: 2480444 - RNA, 19 nt, Artificial Sequence
  Description of Artificial Sequence: Synthetic oligonucleotide
gauacagaacuagaggaga

SEQ ID NO: 2480445 - RNA, 19 nt, Artificial Sequence
  Description of Artificial Sequence: Synthetic oligonucleotide
auugaaugaagcugcccca

SEQ ID NO: 2480446 - RNA, 19 nt, Artificial Sequence
  Description of Artificial Sequence: Synthetic oligonucleotide
cauuagagugguaaacauc

SEQ ID NO: 2480447 - RNA, 19 nt, Artificial Sequence
  Description of Artificial Sequence: Synthetic oligonucleotide
ucuuucgaacagcauuggc

SEQ ID NO: 2480448 - RNA, 19 nt, Artificial Sequence
  Description of Artificial Sequence: Synthetic oligonucleotide
uugugcaugcacuucuuac

SEQ ID NO: 2480449 - RNA, 19 nt, Artificial Sequence
  Description of Artificial Sequence: Synthetic oligonucleotide
uagaauaaucuucccuggu

SEQ ID NO: 2480450 - RNA, 19 nt, Artificial Sequence
  Description of Artificial Sequence: Synthetic oligonucleotide
gaauacgaugucacuaagc

SEQ ID NO: 2480451 - RNA, 19 nt, Artificial Sequence
  Description of Artificial Sequence: Synthetic oligonucleotide
gaaaaguccacaauguccu

SEQ ID NO: 2480452 - RNA, 19 nt, Artificial Sequence
  Description of Artificial Sequence: Synthetic oligonucleotide
uaguggauugaaugaagcu

SEQ ID NO: 2480453 - RNA, 19 nt, Artificial Sequence
  Description of Artificial Sequence: Synthetic oligonucleotide
uuagagugguaaacaucag

SEQ ID NO: 2480454 - RNA, 19 nt, Artificial Sequence
  Description of Artificial Sequence: Synthetic oligonucleotide
ugcucuaaggucugccaag

SEQ ID NO: 2480455 - RNA, 19 nt, Artificial Sequence
  Description of Artificial Sequence: Synthetic oligonucleotide
aaccugggcgacucuuucg

SEQ ID NO: 2480456 - RNA, 19 nt, Artificial Sequence
  Description of Artificial Sequence: Synthetic oligonucleotide
ucuucauuagagugguaaa

SEQ ID NO: 2480457 - RNA, 19 nt, Artificial Sequence
  Description of Artificial Sequence: Synthetic oligonucleotide
uccugaaauacucuucauu

SEQ ID NO: 2480458 - RNA, 19 nt, Artificial Sequence
  Description of Artificial Sequence: Synthetic oligonucleotide
ucucagcaauacuagggca

SEQ ID NO: 2480459 - RNA, 19 nt, Artificial Sequence
  Description of Artificial Sequence: Synthetic oligonucleotide
cuucauuagagugguaaac

SEQ ID NO: 2480460 - RNA, 19 nt, Artificial Sequence
  Description of Artificial Sequence: Synthetic oligonucleotide
cauccuugccuuuucacuc

SEQ ID NO: 2480461 - RNA, 19 nt, Artificial Sequence
  Description of Artificial Sequence: Synthetic oligonucleotide
agaguauuucuuuuagauu

SEQ ID NO: 2480462 - RNA, 19 nt, Artificial Sequence
  Description of Artificial Sequence: Synthetic oligonucleotide
agaacuagaggagacacua

SEQ ID NO: 2480463 - RNA, 19 nt, Artificial Sequence
  Description of Artificial Sequence: Synthetic oligonucleotide
uagcagagucacaagagua

SEQ ID NO: 2480464 - RNA, 19 nt, Artificial Sequence
  Description of Artificial Sequence: Synthetic oligonucleotide
agucacaagaguauucaug

SEQ ID NO: 2480465 - RNA, 19 nt, Artificial Sequence
  Description of Artificial Sequence: Synthetic oligonucleotide
uccucgucagaaguagugg

SEQ ID NO: 2480466 - RNA, 19 nt, Artificial Sequence
  Description of Artificial Sequence: Synthetic oligonucleotide
acucuuucgaacagcauug

SEQ ID NO: 2480467 - RNA, 19 nt, Artificial Sequence
  Description of Artificial Sequence: Synthetic oligonucleotide
ucugauggcuuguucccgc

SEQ ID NO: 2480468 - RNA, 19 nt, Artificial Sequence
  Description of Artificial Sequence: Synthetic oligonucleotide
caagaguauucaugaagac

SEQ ID NO: 2480469 - RNA, 19 nt, Artificial Sequence
  Description of Artificial Sequence: Synthetic oligonucleotide
ugucaggcucugaauacga

SEQ ID NO: 2480470 - RNA, 19 nt, Artificial Sequence
  Description of Artificial Sequence: Synthetic oligonucleotide
agcuuggaaacuagagacc

SEQ ID NO: 2480471 - RNA, 19 nt, Artificial Sequence
  Description of Artificial Sequence: Synthetic oligonucleotide
acuagggcacaggagaaag

SEQ ID NO: 2480472 - RNA, 19 nt, Artificial Sequence
  Description of Artificial Sequence: Synthetic oligonucleotide
gaggcucaagcuuggaaac

SEQ ID NO: 2480473 - RNA, 19 nt, Artificial Sequence
  Description of Artificial Sequence: Synthetic oligonucleotide
auaaucuucccuggugauc

SEQ ID NO: 2480474 - RNA, 19 nt, Artificial Sequence
  Description of Artificial Sequence: Synthetic oligonucleotide
ugggcgacucuuucgaaca

SEQ ID NO: 2480475 - RNA, 19 nt, Artificial Sequence
  Description of Artificial Sequence: Synthetic oligonucleotide
uucccuggugaucacuggc

SEQ ID NO: 2480476 - RNA, 19 nt, Artificial Sequence
  Description of Artificial Sequence: Synthetic oligonucleotide
uacucuucauuagaguggu

SEQ ID NO: 2480477 - RNA, 19 nt, Artificial Sequence
  Description of Artificial Sequence: Synthetic oligonucleotide
agaaacagcgucucagcaa

SEQ ID NO: 2480478 - RNA, 19 nt, Artificial Sequence
  Description of Artificial Sequence: Synthetic oligonucleotide
auuucgcucuugcaguucu

SEQ ID NO: 2480479 - RNA, 19 nt, Artificial Sequence
  Description of Artificial Sequence: Synthetic oligonucleotide
gacaggguaggcaucggag

SEQ ID NO: 2480480 - RNA, 19 nt, Artificial Sequence
  Description of Artificial Sequence: Synthetic oligonucleotide
caggguaggcaucggaggg

SEQ ID NO: 2480481 - RNA, 19 nt, Artificial Sequence
  Description of Artificial Sequence: Synthetic oligonucleotide
uggauugaaugaagcugcc

SEQ ID NO: 2480482 - RNA, 19 nt, Artificial Sequence
  Description of Artificial Sequence: Synthetic oligonucleotide
acaggagaaagaugaggcu

SEQ ID NO: 2480483 - RNA, 19 nt, Artificial Sequence
  Description of Artificial Sequence: Synthetic oligonucleotide
uuucacucugucugauggc

SEQ ID NO: 2480484 - RNA, 19 nt, Artificial Sequence
  Description of Artificial Sequence: Synthetic oligonucleotide
auuacuuccuuaguggauu

SEQ ID NO: 2480485 - RNA, 19 nt, Artificial Sequence
  Description of Artificial Sequence: Synthetic oligonucleotide
gaagaccugcuuuccccgg

SEQ ID NO: 2480486 - RNA, 19 nt, Artificial Sequence
  Description of Artificial Sequence: Synthetic oligonucleotide
uggcucuacauuccaacaa

SEQ ID NO: 2480487 - RNA, 19 nt, Artificial Sequence
  Description of Artificial Sequence: Synthetic oligonucleotide
cuuuuagauuuucuucauc

SEQ ID NO: 2480488 - RNA, 19 nt, Artificial Sequence
  Description of Artificial Sequence: Synthetic oligonucleotide
uucacucugucugauggcu

SEQ ID NO: 2480489 - RNA, 19 nt, Artificial Sequence
  Description of Artificial Sequence: Synthetic oligonucleotide
gaaacagaaagcuggggau

SEQ ID NO: 2480490 - RNA, 19 nt, Artificial Sequence
  Description of Artificial Sequence: Synthetic oligonucleotide
caacaaacacaaccugggc

SEQ ID NO: 2480491 - RNA, 19 nt, Artificial Sequence
  Description of Artificial Sequence: Synthetic oligonucleotide
aauuacuuccuuaguggau

SEQ ID NO: 2480492 - RNA, 19 nt, Artificial Sequence
  Description of Artificial Sequence: Synthetic oligonucleotide
aucugcucuaaggucugcc

SEQ ID NO: 2480493 - RNA, 19 nt, Artificial Sequence
  Description of Artificial Sequence: Synthetic oligonucleotide
gaugaggccagaguauuuc

SEQ ID NO: 2480494 - RNA, 19 nt, Artificial Sequence
  Description of Artificial Sequence: Synthetic oligonucleotide
ggaaacuagagacccugag

SEQ ID NO: 2480495 - RNA, 19 nt, Artificial Sequence
  Description of Artificial Sequence: Synthetic oligonucleotide
cagaaaaguccacaauguc

SEQ ID NO: 2480496 - RNA, 19 nt, Artificial Sequence
  Description of Artificial Sequence: Synthetic oligonucleotide
uucuuacuggugacuuaag

SEQ ID NO: 2480497 - RNA, 19 nt, Artificial Sequence
  Description of Artificial Sequence: Synthetic oligonucleotide
ucgucagaaguaguggaca

SEQ ID NO: 2480498 - RNA, 19 nt, Artificial Sequence
  Description of Artificial Sequence: Synthetic oligonucleotide
cucgucagaaguaguggac

SEQ ID NO: 2480499 - RNA, 19 nt, Artificial Sequence
  Description of Artificial Sequence: Synthetic oligonucleotide
uugcaguucucgccgauau

SEQ ID NO: 2480500 - RNA, 19 nt, Artificial Sequence
  Description of Artificial Sequence: Synthetic oligonucleotide
gaaacagcgucucagcaau

SEQ ID NO: 2480501 - RNA, 19 nt, Artificial Sequence
  Description of Artificial Sequence: Synthetic oligonucleotide
augucaggcucugaauacg

SEQ ID NO: 2480502 - RNA, 19 nt, Artificial Sequence
  Description of Artificial Sequence: Synthetic oligonucleotide
cugaauacgaugucacuaa

SEQ ID NO: 2480503 - RNA, 19 nt, Artificial Sequence
  Description of Artificial Sequence: Synthetic oligonucleotide
uugccuuuucacucugucu

SEQ ID NO: 2480504 - RNA, 19 nt, Artificial Sequence
  Description of Artificial Sequence: Synthetic oligonucleotide
cugucuuuuagcagaguca

SEQ ID NO: 2480505 - RNA, 19 nt, Artificial Sequence
  Description of Artificial Sequence: Synthetic oligonucleotide
agaggagacacuagaauaa

SEQ ID NO: 2480506 - RNA, 19 nt, Artificial Sequence
  Description of Artificial Sequence: Synthetic oligonucleotide
agggcgacuggccuauguc

SEQ ID NO: 2480507 - RNA, 19 nt, Artificial Sequence
  Description of Artificial Sequence: Synthetic oligonucleotide
caauguccuggauugucac

SEQ ID NO: 2480508 - RNA, 19 nt, Artificial Sequence
  Description of Artificial Sequence: Synthetic oligonucleotide
gcuuggaaacuagagaccc

SEQ ID NO: 2480509 - RNA, 19 nt, Artificial Sequence
  Description of Artificial Sequence: Synthetic oligonucleotide
aucggagggcugcaccggc

SEQ ID NO: 2480510 - RNA, 19 nt, Artificial Sequence
  Description of Artificial Sequence: Synthetic oligonucleotide
cagaguauuucuuuuagau

SEQ ID NO: 2480511 - RNA, 19 nt, Artificial Sequence
  Description of Artificial Sequence: Synthetic oligonucleotide
uggaaacuagagacccuga

SEQ ID NO: 2480512 - RNA, 19 nt, Artificial Sequence
  Description of Artificial Sequence: Synthetic oligonucleotide
uagggcacaggagaaagau

SEQ ID NO: 2480513 - RNA, 19 nt, Artificial Sequence
  Description of Artificial Sequence: Synthetic oligonucleotide
uucucgccgauauucuuuc

SEQ ID NO: 2480514 - RNA, 19 nt, Artificial Sequence
  Description of Artificial Sequence: Synthetic oligonucleotide
gacucuuucgaacagcauu

SEQ ID NO: 2480515 - RNA, 19 nt, Artificial Sequence
  Description of Artificial Sequence: Synthetic oligonucleotide
uuugugcaugcacuucuua

SEQ ID NO: 2480516 - RNA, 19 nt, Artificial Sequence
  Description of Artificial Sequence: Synthetic oligonucleotide
aggagacacuagaauaauc

SEQ ID NO: 2480517 - RNA, 19 nt, Artificial Sequence
  Description of Artificial Sequence: Synthetic oligonucleotide
cuaugucaggcucugaaua

SEQ ID NO: 2480518 - RNA, 19 nt, Artificial Sequence
  Description of Artificial Sequence: Synthetic oligonucleotide
uaauuuugccaugguuucu

SEQ ID NO: 2480519 - RNA, 19 nt, Artificial Sequence
  Description of Artificial Sequence: Synthetic oligonucleotide
gucagaaguaguggacagg

SEQ ID NO: 2480520 - RNA, 19 nt, Artificial Sequence
  Description of Artificial Sequence: Synthetic oligonucleotide
gccagaguauuucuuuuag

SEQ ID NO: 2480521 - RNA, 19 nt, Artificial Sequence
  Description of Artificial Sequence: Synthetic oligonucleotide
agcgucucagcaauacuag

SEQ ID NO: 2480522 - RNA, 19 nt, Artificial Sequence
  Description of Artificial Sequence: Synthetic oligonucleotide
cucgggaagacaggguagg

SEQ ID NO: 2480523 - RNA, 19 nt, Artificial Sequence
  Description of Artificial Sequence: Synthetic oligonucleotide
cucuucauuagagugguaa

SEQ ID NO: 2480524 - RNA, 19 nt, Artificial Sequence
  Description of Artificial Sequence: Synthetic oligonucleotide
gaacuagaggagacacuag

SEQ ID NO: 2480525 - RNA, 19 nt, Artificial Sequence
  Description of Artificial Sequence: Synthetic oligonucleotide
ucgaacagcauuggccucu

SEQ ID NO: 2480526 - RNA, 19 nt, Artificial Sequence
  Description of Artificial Sequence: Synthetic oligonucleotide
ucgccgauauucuuucauc

SEQ ID NO: 2480527 - RNA, 19 nt, Artificial Sequence
  Description of Artificial Sequence: Synthetic oligonucleotide
aggagaaagaugaggcuca

SEQ ID NO: 2480528 - RNA, 19 nt, Artificial Sequence
  Description of Artificial Sequence: Synthetic oligonucleotide
agaccugcuuuccccgggg

SEQ ID NO: 2480529 - RNA, 19 nt, Artificial Sequence
  Description of Artificial Sequence: Synthetic oligonucleotide
ccugaaauacucuucauua

SEQ ID NO: 2480530 - RNA, 19 nt, Artificial Sequence
  Description of Artificial Sequence: Synthetic oligonucleotide
  modified_base (18)..(18): a, c, u, g, unknown or other
uggccagacgucuuuuana

SEQ ID NO: 2480531 - RNA, 19 nt, Artificial Sequence
  Description of Artificial Sequence: Synthetic oligonucleotide
agcuccucgucagaaguag

SEQ ID NO: 2480532 - RNA, 19 nt, Artificial Sequence
  Description of Artificial Sequence: Synthetic oligonucleotide
ccgauacagaacuagagga

SEQ ID NO: 2480533 - RNA, 19 nt, Artificial Sequence
  Description of Artificial Sequence: Synthetic oligonucleotide
cuucccuggugaucacugg

SEQ ID NO: 2480534 - RNA, 19 nt, Artificial Sequence
  Description of Artificial Sequence: Synthetic oligonucleotide
cuagagacccugagaaaca

SEQ ID NO: 2480535 - RNA, 19 nt, Artificial Sequence
  Description of Artificial Sequence: Synthetic oligonucleotide
  modified_base (13)..(13): a, c, u, g, unknown or other
agacgucuuuuanauuuag

SEQ ID NO: 2480536 - RNA, 19 nt, Artificial Sequence
  Description of Artificial Sequence: Synthetic oligonucleotide
acagaaagcuggggauggc

SEQ ID NO: 2480537 - RNA, 19 nt, Artificial Sequence
  Description of Artificial Sequence: Synthetic oligonucleotide
caguucuguuccgauacag

SEQ ID NO: 2480538 - RNA, 19 nt, Artificial Sequence
  Description of Artificial Sequence: Synthetic oligonucleotide
cugggcgacucuuucgaac

SEQ ID NO: 2480539 - RNA, 19 nt, Artificial Sequence
  Description of Artificial Sequence: Synthetic oligonucleotide
gggagggcaguucuguucc

SEQ ID NO: 2480540 - RNA, 19 nt, Artificial Sequence
  Description of Artificial Sequence: Synthetic oligonucleotide
  modified_base (7)..(7): a, c, u, g, unknown or other
cuuuuanauuuagcuuguc

SEQ ID NO: 2480541 - RNA, 19 nt, Artificial Sequence
  Description of Artificial Sequence: Synthetic oligonucleotide
acaauguccuggauuguca

SEQ ID NO: 2480542 - RNA, 19 nt, Artificial Sequence
  Description of Artificial Sequence: Synthetic oligonucleotide
guaggcaucggagggcugc

SEQ ID NO: 2480543 - RNA, 19 nt, Artificial Sequence
  Description of Artificial Sequence: Synthetic oligonucleotide
augaggcucaagcuuggaa

SEQ ID NO: 2480544 - RNA, 19 nt, Artificial Sequence
  Description of Artificial Sequence: Synthetic oligonucleotide
uuaagccuuggagauggau

SEQ ID NO: 2480545 - RNA, 19 nt, Artificial Sequence
  Description of Artificial Sequence: Synthetic oligonucleotide
ggagacacuagaauaaucu

SEQ ID NO: 2480546 - RNA, 19 nt, Artificial Sequence
  Description of Artificial Sequence: Synthetic oligonucleotide
aggcucugaauacgauguc

SEQ ID NO: 2480547 - RNA, 19 nt, Artificial Sequence
  Description of Artificial Sequence: Synthetic oligonucleotide
acuagaggagacacuagaa

SEQ ID NO: 2480548 - RNA, 19 nt, Artificial Sequence
  Description of Artificial Sequence: Synthetic oligonucleotide
acagcgucucagcaauacu

SEQ ID NO: 2480549 - RNA, 19 nt, Artificial Sequence
  Description of Artificial Sequence: Synthetic oligonucleotide
cucuuucgaacagcauugg

SEQ ID NO: 2480550 - RNA, 19 nt, Artificial Sequence
  Description of Artificial Sequence: Synthetic oligonucleotide
gcaauacuagggcacagga

SEQ ID NO: 2480551 - RNA, 19 nt, Artificial Sequence
  Description of Artificial Sequence: Synthetic oligonucleotide
acuuccuuaguggauugaa

SEQ ID NO: 2480552 - RNA, 19 nt, Artificial Sequence
  Description of Artificial Sequence: Synthetic oligonucleotide
cuucuuacuggugacuuaa

SEQ ID NO: 2480553 - RNA, 19 nt, Artificial Sequence
  Description of Artificial Sequence: Synthetic oligonucleotide
gcaucggagggcugcaccg

SEQ ID NO: 2480554 - RNA, 19 nt, Artificial Sequence
  Description of Artificial Sequence: Synthetic oligonucleotide
gacuuaagccuuggagaug

SEQ ID NO: 2480555 - RNA, 19 nt, Artificial Sequence
  Description of Artificial Sequence: Synthetic oligonucleotide
cagaaacagcgucucagca

SEQ ID NO: 2480556 - RNA, 19 nt, Artificial Sequence
  Description of Artificial Sequence: Synthetic oligonucleotide
cucaagcuuggaaacuaga

SEQ ID NO: 2480557 - RNA, 19 nt, Artificial Sequence
  Description of Artificial Sequence: Synthetic oligonucleotide
uuccugaaauacucuucau

SEQ ID NO: 2480558 - RNA, 19 nt, Artificial Sequence
  Description of Artificial Sequence: Synthetic oligonucleotide
cuuguucccgcccucggga

SEQ ID NO: 2480559 - RNA, 19 nt, Artificial Sequence
  Description of Artificial Sequence: Synthetic oligonucleotide
aaacacaaccugggcgacu

SEQ ID NO: 2480560 - RNA, 19 nt, Artificial Sequence
  Description of Artificial Sequence: Synthetic oligonucleotide
cgauacagaacuagaggag

SEQ ID NO: 2480561 - RNA, 19 nt, Artificial Sequence
  Description of Artificial Sequence: Synthetic oligonucleotide
uggugacuuaagccuugga

SEQ ID NO: 2480562 - RNA, 19 nt, Artificial Sequence
  Description of Artificial Sequence: Synthetic oligonucleotide
uggaugaggccagaguauu

SEQ ID NO: 2480563 - RNA, 19 nt, Artificial Sequence
  Description of Artificial Sequence: Synthetic oligonucleotide
uccuggauugucacaucuu

SEQ ID NO: 2480564 - RNA, 19 nt, Artificial Sequence
  Description of Artificial Sequence: Synthetic oligonucleotide
ccuggauugucacaucuuc

SEQ ID NO: 2480565 - RNA, 19 nt, Artificial Sequence
  Description of Artificial Sequence: Synthetic oligonucleotide
cagcgucucagcaauacua

SEQ ID NO: 2480566 - RNA, 19 nt, Artificial Sequence
  Description of Artificial Sequence: Synthetic oligonucleotide
ugcaccggcaaggccuggg

SEQ ID NO: 2480567 - RNA, 19 nt, Artificial Sequence
  Description of Artificial Sequence: Synthetic oligonucleotide
uggcuuguucccgcccucg

SEQ ID NO: 2480568 - RNA, 19 nt, Artificial Sequence
  Description of Artificial Sequence: Synthetic oligonucleotide
uucgaacagcauuggccuc

SEQ ID NO: 2480569 - RNA, 19 nt, Artificial Sequence
  Description of Artificial Sequence: Synthetic oligonucleotide
  modified_base (14)..(14): a, c, u, g, unknown or other
cagacgucuuuuanauuua

SEQ ID NO: 2480570 - RNA, 19 nt, Artificial Sequence
  Description of Artificial Sequence: Synthetic oligonucleotide
cuagaggagacacuagaau

SEQ ID NO: 2480571 - RNA, 19 nt, Artificial Sequence
  Description of Artificial Sequence: Synthetic oligonucleotide
cucuuaguuuccugaaaua

SEQ ID NO: 2480572 - RNA, 19 nt, Artificial Sequence
  Description of Artificial Sequence: Synthetic oligonucleotide
cugccccagaaacagcguc

SEQ ID NO: 2480573 - RNA, 19 nt, Artificial Sequence
  Description of Artificial Sequence: Synthetic oligonucleotide
cgauauucuuucauccuug

SEQ ID NO: 2480574 - RNA, 19 nt, Artificial Sequence
  Description of Artificial Sequence: Synthetic oligonucleotide
gcucugaauacgaugucac

SEQ ID NO: 2480575 - RNA, 19 nt, Artificial Sequence
  Description of Artificial Sequence: Synthetic oligonucleotide
ggugaucacuggccagacg

SEQ ID NO: 2480576 - RNA, 19 nt, Artificial Sequence
  Description of Artificial Sequence: Synthetic oligonucleotide
ggauugaaugaagcugccc

SEQ ID NO: 2480577 - RNA, 19 nt, Artificial Sequence
  Description of Artificial Sequence: Synthetic oligonucleotide
cgccgauauucuuucaucc

SEQ ID NO: 2480578 - RNA, 19 nt, Artificial Sequence
  Description of Artificial Sequence: Synthetic oligonucleotide
ucgggaagacaggguaggc

SEQ ID NO: 2480579 - RNA, 19 nt, Artificial Sequence
  Description of Artificial Sequence: Synthetic oligonucleotide
acauuccaacaaacacaac

SEQ ID NO: 2480580 - RNA, 19 nt, Artificial Sequence
  Description of Artificial Sequence: Synthetic oligonucleotide
caaccugggcgacucuuuc

SEQ ID NO: 2480581 - RNA, 19 nt, Artificial Sequence
  Description of Artificial Sequence: Synthetic oligonucleotide
acgaugucacuaagccagg

SEQ ID NO: 2480582 - RNA, 19 nt, Artificial Sequence
  Description of Artificial Sequence: Synthetic oligonucleotide
auggaugaggccagaguau

SEQ ID NO: 2480583 - RNA, 19 nt, Artificial Sequence
  Description of Artificial Sequence: Synthetic oligonucleotide
gcuuguucccgcccucggg

SEQ ID NO: 2480584 - RNA, 19 nt, Artificial Sequence
  Description of Artificial Sequence: Synthetic oligonucleotide
uggccuaugucaggcucug

SEQ ID NO: 2480585 - RNA, 19 nt, Artificial Sequence
  Description of Artificial Sequence: Synthetic oligonucleotide
agggcaguucuguuccgau

SEQ ID NO: 2480586 - RNA, 19 nt, Artificial Sequence
  Description of Artificial Sequence: Synthetic oligonucleotide
auacuagggcacaggagaa

SEQ ID NO: 2480587 - RNA, 19 nt, Artificial Sequence
  Description of Artificial Sequence: Synthetic oligonucleotide
accggcaaggccugggcuu

SEQ ID NO: 2480588 - RNA, 19 nt, Artificial Sequence
  Description of Artificial Sequence: Synthetic oligonucleotide
ucucgccgauauucuuuca

SEQ ID NO: 2480589 - RNA, 19 nt, Artificial Sequence
  Description of Artificial Sequence: Synthetic oligonucleotide
caaacacaaccugggcgac

SEQ ID NO: 2480590 - RNA, 19 nt, Artificial Sequence
  Description of Artificial Sequence: Synthetic oligonucleotide
ucggagggcugcaccggca

SEQ ID NO: 2480591 - RNA, 19 nt, Artificial Sequence
  Description of Artificial Sequence: Synthetic oligonucleotide
gaccugcuuuccccggggc

SEQ ID NO: 2480592 - RNA, 19 nt, Artificial Sequence
  Description of Artificial Sequence: Synthetic oligonucleotide
cucucuuaguuuccugaaa

SEQ ID NO: 2480593 - RNA, 19 nt, Artificial Sequence
  Description of Artificial Sequence: Synthetic oligonucleotide
uuguucccgcccucgggaa

SEQ ID NO: 2480594 - RNA, 19 nt, Artificial Sequence
  Description of Artificial Sequence: Synthetic oligonucleotide
ugguuucugcauggcggcc

SEQ ID NO: 2480595 - RNA, 19 nt, Artificial Sequence
  Description of Artificial Sequence: Synthetic oligonucleotide
uggugaucacuggccagac

SEQ ID NO: 2480596 - RNA, 19 nt, Artificial Sequence
  Description of Artificial Sequence: Synthetic oligonucleotide
guccuggauugucacaucu

SEQ ID NO: 2480597 - RNA, 19 nt, Artificial Sequence
  Description of Artificial Sequence: Synthetic oligonucleotide
cuggugaucacuggccaga

SEQ ID NO: 2480598 - RNA, 19 nt, Artificial Sequence
  Description of Artificial Sequence: Synthetic oligonucleotide
uuuccccggggccucucuc

SEQ ID NO: 2480599 - RNA, 19 nt, Artificial Sequence
  Description of Artificial Sequence: Synthetic oligonucleotide
ggcgacuggccuaugucag

SEQ ID NO: 2480600 - RNA, 19 nt, Artificial Sequence
  Description of Artificial Sequence: Synthetic oligonucleotide
agggcacaggagaaagaug

SEQ ID NO: 2480601 - RNA, 19 nt, Artificial Sequence
  Description of Artificial Sequence: Synthetic oligonucleotide
ggcucugaauacgauguca

SEQ ID NO: 2480602 - RNA, 19 nt, Artificial Sequence
  Description of Artificial Sequence: Synthetic oligonucleotide
uucugcauggcggccuuua

SEQ ID NO: 2480603 - RNA, 19 nt, Artificial Sequence
  Description of Artificial Sequence: Synthetic oligonucleotide
cugcucuaaggucugccaa

SEQ ID NO: 2480604 - RNA, 19 nt, Artificial Sequence
  Description of Artificial Sequence: Synthetic oligonucleotide
cagaaguaguggacaggga

SEQ ID NO: 2480605 - RNA, 19 nt, Artificial Sequence
  Description of Artificial Sequence: Synthetic oligonucleotide
aggcucaagcuuggaaacu

SEQ ID NO: 2480606 - RNA, 19 nt, Artificial Sequence
  Description of Artificial Sequence: Synthetic oligonucleotide
gcuuugugcaugcacuucu

SEQ ID NO: 2480607 - RNA, 19 nt, Artificial Sequence
  Description of Artificial Sequence: Synthetic oligonucleotide
cggccuuuagcucucuuag

SEQ ID NO: 2480608 - RNA, 19 nt, Artificial Sequence
  Description of Artificial Sequence: Synthetic oligonucleotide
gggcgacuggccuauguca

SEQ ID NO: 2480609 - RNA, 19 nt, Artificial Sequence
  Description of Artificial Sequence: Synthetic oligonucleotide
gcgacuggccuaugucagg

SEQ ID NO: 2480610 - RNA, 19 nt, Artificial Sequence
  Description of Artificial Sequence: Synthetic oligonucleotide
ccucgggaagacaggguag

SEQ ID NO: 2480611 - RNA, 19 nt, Artificial Sequence
  Description of Artificial Sequence: Synthetic oligonucleotide
ggcuuguucccgcccucgg

SEQ ID NO: 2480612 - RNA, 19 nt, Artificial Sequence
  Description of Artificial Sequence: Synthetic oligonucleotide
gaugaggcucaagcuugga

SEQ ID NO: 2480613 - RNA, 19 nt, Artificial Sequence
  Description of Artificial Sequence: Synthetic oligonucleotide
cuuccuuaguggauugaau

SEQ ID NO: 2480614 - RNA, 19 nt, Artificial Sequence
  Description of Artificial Sequence: Synthetic oligonucleotide
  modified_base (17)..(17): a, c, u, g, unknown or other
ggccagacgucuuuuanau

SEQ ID NO: 2480615 - RNA, 19 nt, Artificial Sequence
  Description of Artificial Sequence: Synthetic oligonucleotide
cucugaauacgaugucacu

SEQ ID NO: 2480616 - RNA, 19 nt, Artificial Sequence
  Description of Artificial Sequence: Synthetic oligonucleotide
gagggcaguucuguuccga

SEQ ID NO: 2480617 - RNA, 19 nt, Artificial Sequence
  Description of Artificial Sequence: Synthetic oligonucleotide
ccuggugaucacuggccag

SEQ ID NO: 2480618 - RNA, 19 nt, Artificial Sequence
  Description of Artificial Sequence: Synthetic oligonucleotide
gaggagacacuagaauaau

SEQ ID NO: 2480619 - RNA, 19 nt, Artificial Sequence
  Description of Artificial Sequence: Synthetic oligonucleotide
ccagaguauuucuuuuaga

SEQ ID NO: 2480620 - RNA, 19 nt, Artificial Sequence
  Description of Artificial Sequence: Synthetic oligonucleotide
acucugucugauggcuugu

SEQ ID NO: 2480621 - RNA, 19 nt, Artificial Sequence
  Description of Artificial Sequence: Synthetic oligonucleotide
ccucgucagaaguagugga

SEQ ID NO: 2480622 - RNA, 19 nt, Artificial Sequence
  Description of Artificial Sequence: Synthetic oligonucleotide
ggagggcaguucuguuccg

SEQ ID NO: 2480623 - RNA, 19 nt, Artificial Sequence
  Description of Artificial Sequence: Synthetic oligonucleotide
auggcggccuuuagcucuc

SEQ ID NO: 2480624 - RNA, 19 nt, Artificial Sequence
  Description of Artificial Sequence: Synthetic oligonucleotide
gcucucuuaguuuccugaa

SEQ ID NO: 2480625 - RNA, 19 nt, Artificial Sequence
  Description of Artificial Sequence: Synthetic oligonucleotide
ggcgacucuuucgaacagc

SEQ ID NO: 2480626 - RNA, 19 nt, Artificial Sequence
  Description of Artificial Sequence: Synthetic oligonucleotide
cagaacuagaggagacacu

SEQ ID NO: 2480627 - RNA, 19 nt, Artificial Sequence
  Description of Artificial Sequence: Synthetic oligonucleotide
caucugcucuaaggucugc

SEQ ID NO: 2480628 - RNA, 19 nt, Artificial Sequence
  Description of Artificial Sequence: Synthetic oligonucleotide
uagcuuguccugguacauu

SEQ ID NO: 2480629 - RNA, 19 nt, Artificial Sequence
  Description of Artificial Sequence: Synthetic oligonucleotide
gcgacucuuucgaacagca

SEQ ID NO: 2480630 - RNA, 19 nt, Artificial Sequence
  Description of Artificial Sequence: Synthetic oligonucleotide
gccuuuagcucucuuaguu

SEQ ID NO: 2480631 - RNA, 19 nt, Artificial Sequence
  Description of Artificial Sequence: Synthetic oligonucleotide
aggcaucggagggcugcac

SEQ ID NO: 2480632 - RNA, 19 nt, Artificial Sequence
  Description of Artificial Sequence: Synthetic oligonucleotide
gggcgacucuuucgaacag

SEQ ID NO: 2480633 - RNA, 19 nt, Artificial Sequence
  Description of Artificial Sequence: Synthetic oligonucleotide
guucccgcccucgggaaga

SEQ ID NO: 2480634 - RNA, 19 nt, Artificial Sequence
  Description of Artificial Sequence: Synthetic oligonucleotide
acacaaccugggcgacucu

SEQ ID NO: 2480635 - RNA, 19 nt, Artificial Sequence
  Description of Artificial Sequence: Synthetic oligonucleotide
ggccagaguauuucuuuua

SEQ ID NO: 2480636 - RNA, 19 nt, Artificial Sequence
  Description of Artificial Sequence: Synthetic oligonucleotide
gccgauauucuuucauccu

SEQ ID NO: 2480637 - RNA, 19 nt, Artificial Sequence
  Description of Artificial Sequence: Synthetic oligonucleotide
acaaccugggcgacucuuu

SEQ ID NO: 2480638 - RNA, 19 nt, Artificial Sequence
  Description of Artificial Sequence: Synthetic oligonucleotide
caguucucgccgauauucu

SEQ ID NO: 2480639 - RNA, 19 nt, Artificial Sequence
  Description of Artificial Sequence: Synthetic oligonucleotide
cucgccgauauucuuucau

SEQ ID NO: 2480640 - RNA, 19 nt, Artificial Sequence
  Description of Artificial Sequence: Synthetic oligonucleotide
cuggccuaugucaggcucu

SEQ ID NO: 2480641 - RNA, 19 nt, Artificial Sequence
  Description of Artificial Sequence: Synthetic oligonucleotide
cuuaagccuuggagaugga

SEQ ID NO: 2480642 - RNA, 19 nt, Artificial Sequence
  Description of Artificial Sequence: Synthetic oligonucleotide
aaacagcgucucagcaaua

SEQ ID NO: 2480643 - RNA, 19 nt, Artificial Sequence
  Description of Artificial Sequence: Synthetic oligonucleotide
gagggcgacuggccuaugu

SEQ ID NO: 2480644 - RNA, 19 nt, Artificial Sequence
  Description of Artificial Sequence: Synthetic oligonucleotide
gucugccaagaccuucugu

SEQ ID NO: 2480645 - RNA, 19 nt, Artificial Sequence
  Description of Artificial Sequence: Synthetic oligonucleotide
guucucgccgauauucuuu

SEQ ID NO: 2480646 - RNA, 19 nt, Artificial Sequence
  Description of Artificial Sequence: Synthetic oligonucleotide
gacuggccuaugucaggcu

SEQ ID NO: 2480647 - RNA, 19 nt, Artificial Sequence
  Description of Artificial Sequence: Synthetic oligonucleotide
gcaccggcaaggccugggc

SEQ ID NO: 2480648 - RNA, 19 nt, Artificial Sequence
  Description of Artificial Sequence: Synthetic oligonucleotide
cuugcaguucucgccgaua

SEQ ID NO: 2480649 - RNA, 19 nt, Artificial Sequence
  Description of Artificial Sequence: Synthetic oligonucleotide
gcggccuuuagcucucuua

SEQ ID NO: 2480650 - RNA, 19 nt, Artificial Sequence
  Description of Artificial Sequence: Synthetic oligonucleotide
gcauggcggccuuuagcuc

SEQ ID NO: 2480651 - RNA, 19 nt, Artificial Sequence
  Description of Artificial Sequence: Synthetic oligonucleotide
cuguuccgauacagaacua

SEQ ID NO: 2480652 - RNA, 19 nt, Artificial Sequence
  Description of Artificial Sequence: Synthetic oligonucleotide
cugcuuuccccggggccuc

SEQ ID NO: 2480653 - RNA, 19 nt, Artificial Sequence
  Description of Artificial Sequence: Synthetic oligonucleotide
ggauggcucuacauuccaa

SEQ ID NO: 2480654 - RNA, 19 nt, Artificial Sequence
  Description of Artificial Sequence: Synthetic oligonucleotide
cccuggugaucacuggcca

SEQ ID NO: 2480655 - RNA, 19 nt, Artificial Sequence
  Description of Artificial Sequence: Synthetic oligonucleotide
uucccgcccucgggaagac

SEQ ID NO: 2480656 - RNA, 19 nt, Artificial Sequence
  Description of Artificial Sequence: Synthetic oligonucleotide
ugcuuuccccggggccucu

SEQ ID NO: 2480657 - RNA, 19 nt, Artificial Sequence
  Description of Artificial Sequence: Synthetic oligonucleotide
ggccuuuagcucucuuagu

SEQ ID NO: 2480658 - RNA, 19 nt, Artificial Sequence
  Description of Artificial Sequence: Synthetic oligonucleotide
ccgauauucuuucauccuu

SEQ ID NO: 2480659 - RNA, 19 nt, Artificial Sequence
  Description of Artificial Sequence: Synthetic oligonucleotide
gggcugcaccggcaaggcc

SEQ ID NO: 2480660 - RNA, 19 nt, Artificial Sequence
  Description of Artificial Sequence: Synthetic oligonucleotide
cugguacauuuucucuaau

SEQ ID NO: 2480661 - RNA, 19 nt, Artificial Sequence
  Description of Artificial Sequence: Synthetic oligonucleotide
gcuggggauggcucuacau

SEQ ID NO: 2480662 - RNA, 19 nt, Artificial Sequence
  Description of Artificial Sequence: Synthetic oligonucleotide
ucccgcccucgggaagaca

SEQ ID NO: 2480663 - RNA, 19 nt, Artificial Sequence
  Description of Artificial Sequence: Synthetic oligonucleotide
gccaagaccuucugucuuu

SEQ ID NO: 2480664 - RNA, 19 nt, Artificial Sequence
  Description of Artificial Sequence: Synthetic oligonucleotide
  modified_base (16)..(16): a, c, u, g, unknown or other
gccagacgucuuuuanauu

SEQ ID NO: 2480665 - RNA, 19 nt, Artificial Sequence
  Description of Artificial Sequence: Synthetic oligonucleotide
caccggcaaggccugggcu

SEQ ID NO: 2480666 - RNA, 19 nt, Artificial Sequence
  Description of Artificial Sequence: Synthetic oligonucleotide
cuuuccccggggccucucu

SEQ ID NO: 2480667 - RNA, 19 nt, Artificial Sequence
  Description of Artificial Sequence: Synthetic oligonucleotide
cacaaccugggcgacucuu

SEQ ID NO: 2480668 - RNA, 19 nt, Artificial Sequence
  Description of Artificial Sequence: Synthetic oligonucleotide
uggcggccuuuagcucucu

SEQ ID NO: 2480669 - RNA, 19 nt, Artificial Sequence
  Description of Artificial Sequence: Synthetic oligonucleotide
cgaacagcauuggccucug

SEQ ID NO: 2480670 - RNA, 19 nt, Artificial Sequence
  Description of Artificial Sequence: Synthetic oligonucleotide
ccugggcgacucuuucgaa

SEQ ID NO: 2480671 - RNA, 19 nt, Artificial Sequence
  Description of Artificial Sequence: Synthetic oligonucleotide
gggagggcgacuggccuau

SEQ ID NO: 2480672 - RNA, 19 nt, Artificial Sequence
  Description of Artificial Sequence: Synthetic oligonucleotide
ggagggcgacuggccuaug

SEQ ID NO: 2480673 - RNA, 19 nt, Artificial Sequence
  Description of Artificial Sequence: Synthetic oligonucleotide
ccugggcuuugugcaugca

SEQ ID NO: 2480674 - RNA, 19 nt, Artificial Sequence
  Description of Artificial Sequence: Synthetic oligonucleotide
ggcggccuuuagcucucuu

SEQ ID NO: 2480675 - RNA, 19 nt, Artificial Sequence
  Description of Artificial Sequence: Synthetic oligonucleotide
cggcaaggccugggcuuug

SEQ ID NO: 2480676 - RNA, 19 nt, Artificial Sequence
  Description of Artificial Sequence: Synthetic oligonucleotide
ccggcaaggccugggcuuu

SEQ ID NO: 2480677 - RNA, 19 nt, Artificial Sequence
  Description of Artificial Sequence: Synthetic oligonucleotide
aaaauauaaguaucgauuc

SEQ ID NO: 2480678 - RNA, 19 nt, Artificial Sequence
  Description of Artificial Sequence: Synthetic oligonucleotide
aaauauaaguaucgauucc

SEQ ID NO: 2480679 - RNA, 19 nt, Artificial Sequence
  Description of Artificial Sequence: Synthetic oligonucleotide
uuuggagauacuaaaagcc

SEQ ID NO: 2480680 - RNA, 19 nt, Artificial Sequence
  Description of Artificial Sequence: Synthetic oligonucleotide
aaauacauuuuggagauac

SEQ ID NO: 2480681 - RNA, 19 nt, Artificial Sequence
  Description of Artificial Sequence: Synthetic oligonucleotide
  modified_base (9)..(9): a, c, u, g, unknown or other
uuuauuucnguaaaagcgc

SEQ ID NO: 2480682 - RNA, 19 nt, Artificial Sequence
  Description of Artificial Sequence: Synthetic oligonucleotide
uuaauauugcuuuugaguc

SEQ ID NO: 2480683 - RNA, 19 nt, Artificial Sequence
  Description of Artificial Sequence: Synthetic oligonucleotide
aauauugcuuuugagucgc

SEQ ID NO: 2480684 - RNA, 19 nt, Artificial Sequence
  Description of Artificial Sequence: Synthetic oligonucleotide
aauguuacggaaaaguguc

SEQ ID NO: 2480685 - RNA, 19 nt, Artificial Sequence
  Description of Artificial Sequence: Synthetic oligonucleotide
cuuauuuagacuucuuugg

SEQ ID NO: 2480686 - RNA, 19 nt, Artificial Sequence
  Description of Artificial Sequence: Synthetic oligonucleotide
uuugaugcguuuaacuugg

SEQ ID NO: 2480687 - RNA, 19 nt, Artificial Sequence
  Description of Artificial Sequence: Synthetic oligonucleotide
ugucuuauaauuugaugcg

SEQ ID NO: 2480688 - RNA, 19 nt, Artificial Sequence
  Description of Artificial Sequence: Synthetic oligonucleotide
gugucuuauaauuugaugc

SEQ ID NO: 2480689 - RNA, 19 nt, Artificial Sequence
  Description of Artificial Sequence: Synthetic oligonucleotide
uuaacuugguacuagaaaa

SEQ ID NO: 2480690 - RNA, 19 nt, Artificial Sequence
  Description of Artificial Sequence: Synthetic oligonucleotide
auaaguaucgauuccagga

SEQ ID NO: 2480691 - RNA, 19 nt, Artificial Sequence
  Description of Artificial Sequence: Synthetic oligonucleotide
gaugcguuuaacuugguac

SEQ ID NO: 2480692 - RNA, 19 nt, Artificial Sequence
  Description of Artificial Sequence: Synthetic oligonucleotide
aauaucaaggcccgucuuc

SEQ ID NO: 2480693 - RNA, 19 nt, Artificial Sequence
  Description of Artificial Sequence: Synthetic oligonucleotide
aauggaaaauacauuuugg

SEQ ID NO: 2480694 - RNA, 19 nt, Artificial Sequence
  Description of Artificial Sequence: Synthetic oligonucleotide
ucucccaauaucaaggccc

SEQ ID NO: 2480695 - RNA, 19 nt, Artificial Sequence
  Description of Artificial Sequence: Synthetic oligonucleotide
aauauaaguaucgauucca

SEQ ID NO: 2480696 - RNA, 19 nt, Artificial Sequence
  Description of Artificial Sequence: Synthetic oligonucleotide
auacuaaaagcccugggag

SEQ ID NO: 2480697 - RNA, 19 nt, Artificial Sequence
  Description of Artificial Sequence: Synthetic oligonucleotide
gauaacgucguaucggaag

SEQ ID NO: 2480698 - RNA, 19 nt, Artificial Sequence
  Description of Artificial Sequence: Synthetic oligonucleotide
uuauuuagacuucuuuggc

SEQ ID NO: 2480699 - RNA, 19 nt, Artificial Sequence
  Description of Artificial Sequence: Synthetic oligonucleotide
uaauauugcuuuugagucg

SEQ ID NO: 2480700 - RNA, 19 nt, Artificial Sequence
  Description of Artificial Sequence: Synthetic oligonucleotide
uguagaaugcaucuucuac

SEQ ID NO: 2480701 - RNA, 19 nt, Artificial Sequence
  Description of Artificial Sequence: Synthetic oligonucleotide
uuuaacuugguacuagaaa

SEQ ID NO: 2480702 - RNA, 19 nt, Artificial Sequence
  Description of Artificial Sequence: Synthetic oligonucleotide
ugucccuugaagcacaccc

SEQ ID NO: 2480703 - RNA, 19 nt, Artificial Sequence
  Description of Artificial Sequence: Synthetic oligonucleotide
  modified_base (8)..(8): a, c, u, g, unknown or other
uuauuucnguaaaagcgcc

SEQ ID NO: 2480704 - RNA, 19 nt, Artificial Sequence
  Description of Artificial Sequence: Synthetic oligonucleotide
ugagucgcauggaaaaugg

SEQ ID NO: 2480705 - RNA, 19 nt, Artificial Sequence
  Description of Artificial Sequence: Synthetic oligonucleotide
uauaaguaucgauuccagg

SEQ ID NO: 2480706 - RNA, 19 nt, Artificial Sequence
  Description of Artificial Sequence: Synthetic oligonucleotide
uuuuaguggauuuucugga

SEQ ID NO: 2480707 - RNA, 19 nt, Artificial Sequence
  Description of Artificial Sequence: Synthetic oligonucleotide
uuggagauacuaaaagccc

SEQ ID NO: 2480708 - RNA, 19 nt, Artificial Sequence
  Description of Artificial Sequence: Synthetic oligonucleotide
auaacgucguaucggaagg

SEQ ID NO: 2480709 - RNA, 19 nt, Artificial Sequence
  Description of Artificial Sequence: Synthetic oligonucleotide
uauaauuugaugcguuuaa

SEQ ID NO: 2480710 - RNA, 19 nt, Artificial Sequence
  Description of Artificial Sequence: Synthetic oligonucleotide
uaauuugaugcguuuaacu

SEQ ID NO: 2480711 - RNA, 19 nt, Artificial Sequence
  Description of Artificial Sequence: Synthetic oligonucleotide
ucaggauaacgucguaucg

SEQ ID NO: 2480712 - RNA, 19 nt, Artificial Sequence
  Description of Artificial Sequence: Synthetic oligonucleotide
gauacuaaaagcccuggga

SEQ ID NO: 2480713 - RNA, 19 nt, Artificial Sequence
  Description of Artificial Sequence: Synthetic oligonucleotide
guuucucccaauaucaagg

SEQ ID NO: 2480714 - RNA, 19 nt, Artificial Sequence
  Description of Artificial Sequence: Synthetic oligonucleotide
uauuuagacuucuuuggca

SEQ ID NO: 2480715 - RNA, 19 nt, Artificial Sequence
  Description of Artificial Sequence: Synthetic oligonucleotide
gaagcaugcuuauuuagac

SEQ ID NO: 2480716 - RNA, 19 nt, Artificial Sequence
  Description of Artificial Sequence: Synthetic oligonucleotide
aaguaucgauuccaggaag

SEQ ID NO: 2480717 - RNA, 19 nt, Artificial Sequence
  Description of Artificial Sequence: Synthetic oligonucleotide
uuaagcucuuccaccgucg

SEQ ID NO: 2480718 - RNA, 19 nt, Artificial Sequence
  Description of Artificial Sequence: Synthetic oligonucleotide
guuaauauugcuuuugagu

SEQ ID NO: 2480719 - RNA, 19 nt, Artificial Sequence
  Description of Artificial Sequence: Synthetic oligonucleotide
aguuaauauugcuuuugag

SEQ ID NO: 2480720 - RNA, 19 nt, Artificial Sequence
  Description of Artificial Sequence: Synthetic oligonucleotide
gaagcacagaguuugugug

SEQ ID NO: 2480721 - RNA, 19 nt, Artificial Sequence
  Description of Artificial Sequence: Synthetic oligonucleotide
ucuucuacuuuguuucucc

SEQ ID NO: 2480722 - RNA, 19 nt, Artificial Sequence
  Description of Artificial Sequence: Synthetic oligonucleotide
ucuacuuuguuucucccaa

SEQ ID NO: 2480723 - RNA, 19 nt, Artificial Sequence
  Description of Artificial Sequence: Synthetic oligonucleotide
uguuucucccaauaucaag

SEQ ID NO: 2480724 - RNA, 19 nt, Artificial Sequence
  Description of Artificial Sequence: Synthetic oligonucleotide
uuuaguggauuuucuggag

SEQ ID NO: 2480725 - RNA, 19 nt, Artificial Sequence
  Description of Artificial Sequence: Synthetic oligonucleotide
uacauuuuggagauacuaa

SEQ ID NO: 2480726 - RNA, 19 nt, Artificial Sequence
  Description of Artificial Sequence: Synthetic oligonucleotide
accaguuacagccaugcug

SEQ ID NO: 2480727 - RNA, 19 nt, Artificial Sequence
  Description of Artificial Sequence: Synthetic oligonucleotide
ugcagagggaaaauguuac

SEQ ID NO: 2480728 - RNA, 19 nt, Artificial Sequence
  Description of Artificial Sequence: Synthetic oligonucleotide
agugucuuauaauuugaug

SEQ ID NO: 2480729 - RNA, 19 nt, Artificial Sequence
  Description of Artificial Sequence: Synthetic oligonucleotide
aagaugucccuugaagcac

SEQ ID NO: 2480730 - RNA, 19 nt, Artificial Sequence
  Description of Artificial Sequence: Synthetic oligonucleotide
aguuugugugaagaugucc

SEQ ID NO: 2480731 - RNA, 19 nt, Artificial Sequence
  Description of Artificial Sequence: Synthetic oligonucleotide
aaagcgccuuuucaugccg

SEQ ID NO: 2480732 - RNA, 19 nt, Artificial Sequence
  Description of Artificial Sequence: Synthetic oligonucleotide
uaaguaucgauuccaggaa

SEQ ID NO: 2480733 - RNA, 19 nt, Artificial Sequence
  Description of Artificial Sequence: Synthetic oligonucleotide
uggagauacuaaaagcccu

SEQ ID NO: 2480734 - RNA, 19 nt, Artificial Sequence
  Description of Artificial Sequence: Synthetic oligonucleotide
ucuuuguucuccccgacaa

SEQ ID NO: 2480735 - RNA, 19 nt, Artificial Sequence
  Description of Artificial Sequence: Synthetic oligonucleotide
auaauuugaugcguuuaac

SEQ ID NO: 2480736 - RNA, 19 nt, Artificial Sequence
  Description of Artificial Sequence: Synthetic oligonucleotide
guuugugugaagauguccc

SEQ ID NO: 2480737 - RNA, 19 nt, Artificial Sequence
  Description of Artificial Sequence: Synthetic oligonucleotide
gagaagcaugcuuauuuag

SEQ ID NO: 2480738 - RNA, 19 nt, Artificial Sequence
  Description of Artificial Sequence: Synthetic oligonucleotide
agauacuaaaagcccuggg

SEQ ID NO: 2480739 - RNA, 19 nt, Artificial Sequence
  Description of Artificial Sequence: Synthetic oligonucleotide
  modified_base (7)..(7): a, c, u, g, unknown or other
uauuucnguaaaagcgccu

SEQ ID NO: 2480740 - RNA, 19 nt, Artificial Sequence
  Description of Artificial Sequence: Synthetic oligonucleotide
uuucaugccggccucuccc

SEQ ID NO: 2480741 - RNA, 19 nt, Artificial Sequence
  Description of Artificial Sequence: Synthetic oligonucleotide
acauuuuggagauacuaaa

SEQ ID NO: 2480742 - RNA, 19 nt, Artificial Sequence
  Description of Artificial Sequence: Synthetic oligonucleotide
aguaucgauuccaggaagc

SEQ ID NO: 2480743 - RNA, 19 nt, Artificial Sequence
  Description of Artificial Sequence: Synthetic oligonucleotide
guaaaagcgccuuuucaug

SEQ ID NO: 2480744 - RNA, 19 nt, Artificial Sequence
  Description of Artificial Sequence: Synthetic oligonucleotide
ugugugaagaugucccuug

SEQ ID NO: 2480745 - RNA, 19 nt, Artificial Sequence
  Description of Artificial Sequence: Synthetic oligonucleotide
uuaguggauuuucuggagu

SEQ ID NO: 2480746 - RNA, 19 nt, Artificial Sequence
  Description of Artificial Sequence: Synthetic oligonucleotide
aagcagauccaacguaucu

SEQ ID NO: 2480747 - RNA, 19 nt, Artificial Sequence
  Description of Artificial Sequence: Synthetic oligonucleotide
cuccccgacaagcagaucc

SEQ ID NO: 2480748 - RNA, 19 nt, Artificial Sequence
  Description of Artificial Sequence: Synthetic oligonucleotide
uucaggauaacgucguauc

SEQ ID NO: 2480749 - RNA, 19 nt, Artificial Sequence
  Description of Artificial Sequence: Synthetic oligonucleotide
accguucugcucuucuucc

SEQ ID NO: 2480750 - RNA, 19 nt, Artificial Sequence
  Description of Artificial Sequence: Synthetic oligonucleotide
ucuuauaauuugaugcguu

SEQ ID NO: 2480751 - RNA, 19 nt, Artificial Sequence
  Description of Artificial Sequence: Synthetic oligonucleotide
aagcaugcuuauuuagacu

SEQ ID NO: 2480752 - RNA, 19 nt, Artificial Sequence
  Description of Artificial Sequence: Synthetic oligonucleotide
aguucaccuuuguagaaug

SEQ ID NO: 2480753 - RNA, 19 nt, Artificial Sequence
  Description of Artificial Sequence: Synthetic oligonucleotide
uuucucccaauaucaaggc

SEQ ID NO: 2480754 - RNA, 19 nt, Artificial Sequence
  Description of Artificial Sequence: Synthetic oligonucleotide
cagagggaaaauguuacgg

SEQ ID NO: 2480755 - RNA, 19 nt, Artificial Sequence
  Description of Artificial Sequence: Synthetic oligonucleotide
cucagucuucucaucauag

SEQ ID NO: 2480756 - RNA, 19 nt, Artificial Sequence
  Description of Artificial Sequence: Synthetic oligonucleotide
accuuuguagaaugcaucu

SEQ ID NO: 2480757 - RNA, 19 nt, Artificial Sequence
  Description of Artificial Sequence: Synthetic oligonucleotide
agagggaaaauguuacgga

SEQ ID NO: 2480758 - RNA, 19 nt, Artificial Sequence
  Description of Artificial Sequence: Synthetic oligonucleotide
uuuguaguccuugaccaca

SEQ ID NO: 2480759 - RNA, 19 nt, Artificial Sequence
  Description of Artificial Sequence: Synthetic oligonucleotide
aacgucguaucggaaggac

SEQ ID NO: 2480760 - RNA, 19 nt, Artificial Sequence
  Description of Artificial Sequence: Synthetic oligonucleotide
uaucggaaggacuguacca

SEQ ID NO: 2480761 - RNA, 19 nt, Artificial Sequence
  Description of Artificial Sequence: Synthetic oligonucleotide
uuuaagcucuuccaccguc

SEQ ID NO: 2480762 - RNA, 19 nt, Artificial Sequence
  Description of Artificial Sequence: Synthetic oligonucleotide
aagcacaccccagagucgg

SEQ ID NO: 2480763 - RNA, 19 nt, Artificial Sequence
  Description of Artificial Sequence: Synthetic oligonucleotide
acggaaaagugucuuauaa

SEQ ID NO: 2480764 - RNA, 19 nt, Artificial Sequence
  Description of Artificial Sequence: Synthetic oligonucleotide
augcguuuaacuugguacu

SEQ ID NO: 2480765 - RNA, 19 nt, Artificial Sequence
  Description of Artificial Sequence: Synthetic oligonucleotide
uacuaaaagcccugggagu

SEQ ID NO: 2480766 - RNA, 19 nt, Artificial Sequence
  Description of Artificial Sequence: Synthetic oligonucleotide
ucuccccugaccacgagga

SEQ ID NO: 2480767 - RNA, 19 nt, Artificial Sequence
  Description of Artificial Sequence: Synthetic oligonucleotide
uuccaggaagcacagaguu

SEQ ID NO: 2480768 - RNA, 19 nt, Artificial Sequence
  Description of Artificial Sequence: Synthetic oligonucleotide
uccaacguaucucccaccu

SEQ ID NO: 2480769 - RNA, 19 nt, Artificial Sequence
  Description of Artificial Sequence: Synthetic oligonucleotide
  modified_base (3)..(3): a, c, u, g, unknown or other
ucnguaaaagcgccuuuuc

SEQ ID NO: 2480770 - RNA, 19 nt, Artificial Sequence
  Description of Artificial Sequence: Synthetic oligonucleotide
guaucggaaggacuguacc

SEQ ID NO: 2480771 - RNA, 19 nt, Artificial Sequence
  Description of Artificial Sequence: Synthetic oligonucleotide
aggauaacgucguaucgga

SEQ ID NO: 2480772 - RNA, 19 nt, Artificial Sequence
  Description of Artificial Sequence: Synthetic oligonucleotide
gauccaacguaucucccac

SEQ ID NO: 2480773 - RNA, 19 nt, Artificial Sequence
  Description of Artificial Sequence: Synthetic oligonucleotide
agcagauccaacguaucuc

SEQ ID NO: 2480774 - RNA, 19 nt, Artificial Sequence
  Description of Artificial Sequence: Synthetic oligonucleotide
caacguaucucccaccuuc

SEQ ID NO: 2480775 - RNA, 19 nt, Artificial Sequence
  Description of Artificial Sequence: Synthetic oligonucleotide
gagauacuaaaagcccugg

SEQ ID NO: 2480776 - RNA, 19 nt, Artificial Sequence
  Description of Artificial Sequence: Synthetic oligonucleotide
ugcaucuucuacuuuguuu

SEQ ID NO: 2480777 - RNA, 19 nt, Artificial Sequence
  Description of Artificial Sequence: Synthetic oligonucleotide
caggauaacgucguaucgg

SEQ ID NO: 2480778 - RNA, 19 nt, Artificial Sequence
  Description of Artificial Sequence: Synthetic oligonucleotide
uagaaugcaucuucuacuu

SEQ ID NO: 2480779 - RNA, 19 nt, Artificial Sequence
  Description of Artificial Sequence: Synthetic oligonucleotide
cucccaauaucaaggcccg

SEQ ID NO: 2480780 - RNA, 19 nt, Artificial Sequence
  Description of Artificial Sequence: Synthetic oligonucleotide
auauaaguaucgauuccag

SEQ ID NO: 2480781 - RNA, 19 nt, Artificial Sequence
  Description of Artificial Sequence: Synthetic oligonucleotide
uuugugugaagaugucccu

SEQ ID NO: 2480782 - RNA, 19 nt, Artificial Sequence
  Description of Artificial Sequence: Synthetic oligonucleotide
uugagucgcauggaaaaug

SEQ ID NO: 2480783 - RNA, 19 nt, Artificial Sequence
  Description of Artificial Sequence: Synthetic oligonucleotide
ucgcauggaaaauggaaaa

SEQ ID NO: 2480784 - RNA, 19 nt, Artificial Sequence
  Description of Artificial Sequence: Synthetic oligonucleotide
uccuugaccacaccugggu

SEQ ID NO: 2480785 - RNA, 19 nt, Artificial Sequence
  Description of Artificial Sequence: Synthetic oligonucleotide
ucgauuccaggaagcacag

SEQ ID NO: 2480786 - RNA, 19 nt, Artificial Sequence
  Description of Artificial Sequence: Synthetic oligonucleotide
accacgaggaagcagccgu

SEQ ID NO: 2480787 - RNA, 19 nt, Artificial Sequence
  Description of Artificial Sequence: Synthetic oligonucleotide
gagggaaaauguuacggaa

SEQ ID NO: 2480788 - RNA, 19 nt, Artificial Sequence
  Description of Artificial Sequence: Synthetic oligonucleotide
uugcagagggaaaauguua

SEQ ID NO: 2480789 - RNA, 19 nt, Artificial Sequence
  Description of Artificial Sequence: Synthetic oligonucleotide
ucccuugaagcacacccca

SEQ ID NO: 2480790 - RNA, 19 nt, Artificial Sequence
  Description of Artificial Sequence: Synthetic oligonucleotide
agauccaacguaucuccca

SEQ ID NO: 2480791 - RNA, 19 nt, Artificial Sequence
  Description of Artificial Sequence: Synthetic oligonucleotide
aaugcaucuucuacuuugu

SEQ ID NO: 2480792 - RNA, 19 nt, Artificial Sequence
  Description of Artificial Sequence: Synthetic oligonucleotide
guagaaugcaucuucuacu

SEQ ID NO: 2480793 - RNA, 19 nt, Artificial Sequence
  Description of Artificial Sequence: Synthetic oligonucleotide
aucacgaccucuguccccg

SEQ ID NO: 2480794 - RNA, 19 nt, Artificial Sequence
  Description of Artificial Sequence: Synthetic oligonucleotide
uuuucaugccggccucucc

SEQ ID NO: 2480795 - RNA, 19 nt, Artificial Sequence
  Description of Artificial Sequence: Synthetic oligonucleotide
ccgacaagcagauccaacg

SEQ ID NO: 2480796 - RNA, 19 nt, Artificial Sequence
  Description of Artificial Sequence: Synthetic oligonucleotide
acuuuguuucucccaauau

SEQ ID NO: 2480797 - RNA, 19 nt, Artificial Sequence
  Description of Artificial Sequence: Synthetic oligonucleotide
gaggauccgcaucacgacc

SEQ ID NO: 2480798 - RNA, 19 nt, Artificial Sequence
  Description of Artificial Sequence: Synthetic oligonucleotide
uuacggaaaagugucuuau

SEQ ID NO: 2480799 - RNA, 19 nt, Artificial Sequence
  Description of Artificial Sequence: Synthetic oligonucleotide
cuucuacuuuguuucuccc

SEQ ID NO: 2480800 - RNA, 19 nt, Artificial Sequence
  Description of Artificial Sequence: Synthetic oligonucleotide
aaagcccugggaguugcag

SEQ ID NO: 2480801 - RNA, 19 nt, Artificial Sequence
  Description of Artificial Sequence: Synthetic oligonucleotide
auccaacguaucucccacc

SEQ ID NO: 2480802 - RNA, 19 nt, Artificial Sequence
  Description of Artificial Sequence: Synthetic oligonucleotide
agaagcaugcuuauuuaga

SEQ ID NO: 2480803 - RNA, 19 nt, Artificial Sequence
  Description of Artificial Sequence: Synthetic oligonucleotide
uugaagcacaccccagagu

SEQ ID NO: 2480804 - RNA, 19 nt, Artificial Sequence
  Description of Artificial Sequence: Synthetic oligonucleotide
aauacauuuuggagauacu

SEQ ID NO: 2480805 - RNA, 19 nt, Artificial Sequence
  Description of Artificial Sequence: Synthetic oligonucleotide
accacacggugcuugucac

SEQ ID NO: 2480806 - RNA, 19 nt, Artificial Sequence
  Description of Artificial Sequence: Synthetic oligonucleotide
cauuuuggagauacuaaaa

SEQ ID NO: 2480807 - RNA, 19 nt, Artificial Sequence
  Description of Artificial Sequence: Synthetic oligonucleotide
agcgccuuuucaugccggc

SEQ ID NO: 2480808 - RNA, 19 nt, Artificial Sequence
  Description of Artificial Sequence: Synthetic oligonucleotide
uuguaguccuugaccacac

SEQ ID NO: 2480809 - RNA, 19 nt, Artificial Sequence
  Description of Artificial Sequence: Synthetic oligonucleotide
  modified_base (4)..(4): a, c, u, g, unknown or other
uucnguaaaagcgccuuuu

SEQ ID NO: 2480810 - RNA, 19 nt, Artificial Sequence
  Description of Artificial Sequence: Synthetic oligonucleotide
uaaaagcccugggaguugc

SEQ ID NO: 2480811 - RNA, 19 nt, Artificial Sequence
  Description of Artificial Sequence: Synthetic oligonucleotide
caccuuuguagaaugcauc

SEQ ID NO: 2480812 - RNA, 19 nt, Artificial Sequence
  Description of Artificial Sequence: Synthetic oligonucleotide
ugaguucaccuuuguagaa

SEQ ID NO: 2480813 - RNA, 19 nt, Artificial Sequence
  Description of Artificial Sequence: Synthetic oligonucleotide
uucaccguucugcucuucu

SEQ ID NO: 2480814 - RNA, 19 nt, Artificial Sequence
  Description of Artificial Sequence: Synthetic oligonucleotide
auaucaaggcccgucuuca

SEQ ID NO: 2480815 - RNA, 19 nt, Artificial Sequence
  Description of Artificial Sequence: Synthetic oligonucleotide
cuuuguaguccuugaccac

SEQ ID NO: 2480816 - RNA, 19 nt, Artificial Sequence
  Description of Artificial Sequence: Synthetic oligonucleotide
cuugaccacaccuggguca

SEQ ID NO: 2480817 - RNA, 19 nt, Artificial Sequence
  Description of Artificial Sequence: Synthetic oligonucleotide
ucucagucuucucaucaua

SEQ ID NO: 2480818 - RNA, 19 nt, Artificial Sequence
  Description of Artificial Sequence: Synthetic oligonucleotide
ggaaaagugucuuauaauu

SEQ ID NO: 2480819 - RNA, 19 nt, Artificial Sequence
  Description of Artificial Sequence: Synthetic oligonucleotide
acuaaaagcccugggaguu

SEQ ID NO: 2480820 - RNA, 19 nt, Artificial Sequence
  Description of Artificial Sequence: Synthetic oligonucleotide
aucuucuacuuuguuucuc

SEQ ID NO: 2480821 - RNA, 19 nt, Artificial Sequence
  Description of Artificial Sequence: Synthetic oligonucleotide
ugaugcguuuaacuuggua

SEQ ID NO: 2480822 - RNA, 19 nt, Artificial Sequence
  Description of Artificial Sequence: Synthetic oligonucleotide
uaucgauuccaggaagcac

SEQ ID NO: 2480823 - RNA, 19 nt, Artificial Sequence
  Description of Artificial Sequence: Synthetic oligonucleotide
uuuucuccguucagccuga

SEQ ID NO: 2480824 - RNA, 19 nt, Artificial Sequence
  Description of Artificial Sequence: Synthetic oligonucleotide
  modified_base (6)..(6): a, c, u, g, unknown or other
auuucnguaaaagcgccuu

SEQ ID NO: 2480825 - RNA, 19 nt, Artificial Sequence
  Description of Artificial Sequence: Synthetic oligonucleotide
  modified_base (5)..(5): a, c, u, g, unknown or other
uuucnguaaaagcgccuuu

SEQ ID NO: 2480826 - RNA, 19 nt, Artificial Sequence
  Description of Artificial Sequence: Synthetic oligonucleotide
aagugucuuauaauuugau

SEQ ID NO: 2480827 - RNA, 19 nt, Artificial Sequence
  Description of Artificial Sequence: Synthetic oligonucleotide
gauccaggagucuggcuuc

SEQ ID NO: 2480828 - RNA, 19 nt, Artificial Sequence
  Description of Artificial Sequence: Synthetic oligonucleotide
ugguuuucaggaggauccg

SEQ ID NO: 2480829 - RNA, 19 nt, Artificial Sequence
  Description of Artificial Sequence: Synthetic oligonucleotide
uaucaaggcccgucuucag

SEQ ID NO: 2480830 - RNA, 19 nt, Artificial Sequence
  Description of Artificial Sequence: Synthetic oligonucleotide
acaagcagauccaacguau

SEQ ID NO: 2480831 - RNA, 19 nt, Artificial Sequence
  Description of Artificial Sequence: Synthetic oligonucleotide
agagucggauccaggaguc

SEQ ID NO: 2480832 - RNA, 19 nt, Artificial Sequence
  Description of Artificial Sequence: Synthetic oligonucleotide
acgaggaagcagccguggg

SEQ ID NO: 2480833 - RNA, 19 nt, Artificial Sequence
  Description of Artificial Sequence: Synthetic oligonucleotide
  modified_base (2)..(2): a, c, u, g, unknown or other
cnguaaaagcgccuuuuca

SEQ ID NO: 2480834 - RNA, 19 nt, Artificial Sequence
  Description of Artificial Sequence: Synthetic oligonucleotide
uguaguccuugaccacacc

SEQ ID NO: 2480835 - RNA, 19 nt, Artificial Sequence
  Description of Artificial Sequence: Synthetic oligonucleotide
agucgcauggaaaauggaa

SEQ ID NO: 2480836 - RNA, 19 nt, Artificial Sequence
  Description of Artificial Sequence: Synthetic oligonucleotide
acguaucucccaccuucac

SEQ ID NO: 2480837 - RNA, 19 nt, Artificial Sequence
  Description of Artificial Sequence: Synthetic oligonucleotide
uccguucagccugaguuca

SEQ ID NO: 2480838 - RNA, 19 nt, Artificial Sequence
  Description of Artificial Sequence: Synthetic oligonucleotide
gucgcagcaccacacggug

SEQ ID NO: 2480839 - RNA, 19 nt, Artificial Sequence
  Description of Artificial Sequence: Synthetic oligonucleotide
ucucuuuguucuccccgac

SEQ ID NO: 2480840 - RNA, 19 nt, Artificial Sequence
  Description of Artificial Sequence: Synthetic oligonucleotide
gacaagcagauccaacgua

SEQ ID NO: 2480841 - RNA, 19 nt, Artificial Sequence
  Description of Artificial Sequence: Synthetic oligonucleotide
uggaguuaauauugcuuuu

SEQ ID NO: 2480842 - RNA, 19 nt, Artificial Sequence
  Description of Artificial Sequence: Synthetic oligonucleotide
agcagccguggggagaagc

SEQ ID NO: 2480843 - RNA, 19 nt, Artificial Sequence
  Description of Artificial Sequence: Synthetic oligonucleotide
gcagagggaaaauguuacg

SEQ ID NO: 2480844 - RNA, 19 nt, Artificial Sequence
  Description of Artificial Sequence: Synthetic oligonucleotide
guuuucaggaggauccgca

SEQ ID NO: 2480845 - RNA, 19 nt, Artificial Sequence
  Description of Artificial Sequence: Synthetic oligonucleotide
uccccgacaagcagaucca

SEQ ID NO: 2480846 - RNA, 19 nt, Artificial Sequence
  Description of Artificial Sequence: Synthetic oligonucleotide
gucgcauggaaaauggaaa

SEQ ID NO: 2480847 - RNA, 19 nt, Artificial Sequence
  Description of Artificial Sequence: Synthetic oligonucleotide
caagcagauccaacguauc

SEQ ID NO: 2480848 - RNA, 19 nt, Artificial Sequence
  Description of Artificial Sequence: Synthetic oligonucleotide
uucuccccgacaagcagau

SEQ ID NO: 2480849 - RNA, 19 nt, Artificial Sequence
  Description of Artificial Sequence: Synthetic oligonucleotide
cagauccaacguaucuccc

SEQ ID NO: 2480850 - RNA, 19 nt, Artificial Sequence
  Description of Artificial Sequence: Synthetic oligonucleotide
uacggaaaagugucuuaua

SEQ ID NO: 2480851 - RNA, 19 nt, Artificial Sequence
  Description of Artificial Sequence: Synthetic oligonucleotide
uucaugccggccucucccc

SEQ ID NO: 2480852 - RNA, 19 nt, Artificial Sequence
  Description of Artificial Sequence: Synthetic oligonucleotide
gaaaagugucuuauaauuu

SEQ ID NO: 2480853 - RNA, 19 nt, Artificial Sequence
  Description of Artificial Sequence: Synthetic oligonucleotide
cuggaguuaauauugcuuu

SEQ ID NO: 2480854 - RNA, 19 nt, Artificial Sequence
  Description of Artificial Sequence: Synthetic oligonucleotide
accgucgcagcaccacacg

SEQ ID NO: 2480855 - RNA, 19 nt, Artificial Sequence
  Description of Artificial Sequence: Synthetic oligonucleotide
agucggauccaggagucug

SEQ ID NO: 2480856 - RNA, 19 nt, Artificial Sequence
  Description of Artificial Sequence: Synthetic oligonucleotide
aacguaucucccaccuuca

SEQ ID NO: 2480857 - RNA, 19 nt, Artificial Sequence
  Description of Artificial Sequence: Synthetic oligonucleotide
cuuccaccgucgcagcacc

SEQ ID NO: 2480858 - RNA, 19 nt, Artificial Sequence
  Description of Artificial Sequence: Synthetic oligonucleotide
ggagauacuaaaagcccug

SEQ ID NO: 2480859 - RNA, 19 nt, Artificial Sequence
  Description of Artificial Sequence: Synthetic oligonucleotide
cucuccccugaccacgagg

SEQ ID NO: 2480860 - RNA, 19 nt, Artificial Sequence
  Description of Artificial Sequence: Synthetic oligonucleotide
ucuguccccgucucuuugu

SEQ ID NO: 2480861 - RNA, 19 nt, Artificial Sequence
  Description of Artificial Sequence: Synthetic oligonucleotide
agggaaaauguuacggaaa

SEQ ID NO: 2480862 - RNA, 19 nt, Artificial Sequence
  Description of Artificial Sequence: Synthetic oligonucleotide
guaguccuugaccacaccu

SEQ ID NO: 2480863 - RNA, 19 nt, Artificial Sequence
  Description of Artificial Sequence: Synthetic oligonucleotide
gcucgcuccucucagggag

SEQ ID NO: 2480864 - RNA, 19 nt, Artificial Sequence
  Description of Artificial Sequence: Synthetic oligonucleotide
aagcgccuuuucaugccgg

SEQ ID NO: 2480865 - RNA, 19 nt, Artificial Sequence
  Description of Artificial Sequence: Synthetic oligonucleotide
cgucuucaggauaacgucg

SEQ ID NO: 2480866 - RNA, 19 nt, Artificial Sequence
  Description of Artificial Sequence: Synthetic oligonucleotide
gucggauccaggagucugg

SEQ ID NO: 2480867 - RNA, 19 nt, Artificial Sequence
  Description of Artificial Sequence: Synthetic oligonucleotide
guuuaacuugguacuagaa

SEQ ID NO: 2480868 - RNA, 19 nt, Artificial Sequence
  Description of Artificial Sequence: Synthetic oligonucleotide
ugggaguugcagagggaaa

SEQ ID NO: 2480869 - RNA, 19 nt, Artificial Sequence
  Description of Artificial Sequence: Synthetic oligonucleotide
gucucuuuguucuccccga

SEQ ID NO: 2480870 - RNA, 19 nt, Artificial Sequence
  Description of Artificial Sequence: Synthetic oligonucleotide
cacacggugcuugucacuc

SEQ ID NO: 2480871 - RNA, 19 nt, Artificial Sequence
  Description of Artificial Sequence: Synthetic oligonucleotide
cuccguucagccugaguuc

SEQ ID NO: 2480872 - RNA, 19 nt, Artificial Sequence
  Description of Artificial Sequence: Synthetic oligonucleotide
guaucgauuccaggaagca

SEQ ID NO: 2480873 - RNA, 19 nt, Artificial Sequence
  Description of Artificial Sequence: Synthetic oligonucleotide
cgcaucacgaccucugucc

SEQ ID NO: 2480874 - RNA, 19 nt, Artificial Sequence
  Description of Artificial Sequence: Synthetic oligonucleotide
uccgcaucacgaccucugu

SEQ ID NO: 2480875 - RNA, 19 nt, Artificial Sequence
  Description of Artificial Sequence: Synthetic oligonucleotide
caccguucugcucuucuuc

SEQ ID NO: 2480876 - RNA, 19 nt, Artificial Sequence
  Description of Artificial Sequence: Synthetic oligonucleotide
ugcuuuugagucgcaugga

SEQ ID NO: 2480877 - RNA, 19 nt, Artificial Sequence
  Description of Artificial Sequence: Synthetic oligonucleotide
agcacagaguuugugugaa

SEQ ID NO: 2480878 - RNA, 19 nt, Artificial Sequence
  Description of Artificial Sequence: Synthetic oligonucleotide
cuuauaauuugaugcguuu

SEQ ID NO: 2480879 - RNA, 19 nt, Artificial Sequence
  Description of Artificial Sequence: Synthetic oligonucleotide
uaacgucguaucggaagga

SEQ ID NO: 2480880 - RNA, 19 nt, Artificial Sequence
  Description of Artificial Sequence: Synthetic oligonucleotide
guucaccuuuguagaaugc

SEQ ID NO: 2480881 - RNA, 19 nt, Artificial Sequence
  Description of Artificial Sequence: Synthetic oligonucleotide
ucuucaggauaacgucgua

SEQ ID NO: 2480882 - RNA, 19 nt, Artificial Sequence
  Description of Artificial Sequence: Synthetic oligonucleotide
ugcguuuaacuugguacua

SEQ ID NO: 2480883 - RNA, 19 nt, Artificial Sequence
  Description of Artificial Sequence: Synthetic oligonucleotide
gaccacgaggaagcagccg

SEQ ID NO: 2480884 - RNA, 19 nt, Artificial Sequence
  Description of Artificial Sequence: Synthetic oligonucleotide
cacgaggaagcagccgugg

SEQ ID NO: 2480885 - RNA, 19 nt, Artificial Sequence
  Description of Artificial Sequence: Synthetic oligonucleotide
uucagccugaguucaccuu

SEQ ID NO: 2480886 - RNA, 19 nt, Artificial Sequence
  Description of Artificial Sequence: Synthetic oligonucleotide
cuaaaagcccugggaguug

SEQ ID NO: 2480887 - RNA, 19 nt, Artificial Sequence
  Description of Artificial Sequence: Synthetic oligonucleotide
aggauccgcaucacgaccu

SEQ ID NO: 2480888 - RNA, 19 nt, Artificial Sequence
  Description of Artificial Sequence: Synthetic oligonucleotide
cccaccuucaccguucugc

SEQ ID NO: 2480889 - RNA, 19 nt, Artificial Sequence
  Description of Artificial Sequence: Synthetic oligonucleotide
ggaagcacagaguuugugu

SEQ ID NO: 2480890 - RNA, 19 nt, Artificial Sequence
  Description of Artificial Sequence: Synthetic oligonucleotide
cgucguaucggaaggacug

SEQ ID NO: 2480891 - RNA, 19 nt, Artificial Sequence
  Description of Artificial Sequence: Synthetic oligonucleotide
uugugugaagaugucccuu

SEQ ID NO: 2480892 - RNA, 19 nt, Artificial Sequence
  Description of Artificial Sequence: Synthetic oligonucleotide
uccucucagggagaugggu

SEQ ID NO: 2480893 - RNA, 19 nt, Artificial Sequence
  Description of Artificial Sequence: Synthetic oligonucleotide
ucgcagcaccacacggugc

SEQ ID NO: 2480894 - RNA, 19 nt, Artificial Sequence
  Description of Artificial Sequence: Synthetic oligonucleotide
agaugucccuugaagcaca

SEQ ID NO: 2480895 - RNA, 19 nt, Artificial Sequence
  Description of Artificial Sequence: Synthetic oligonucleotide
ucggauccaggagucuggc

SEQ ID NO: 2480896 - RNA, 19 nt, Artificial Sequence
  Description of Artificial Sequence: Synthetic oligonucleotide
aggaagcagccguggggag

SEQ ID NO: 2480897 - RNA, 19 nt, Artificial Sequence
  Description of Artificial Sequence: Synthetic oligonucleotide
gucccuugaagcacacccc

SEQ ID NO: 2480898 - RNA, 19 nt, Artificial Sequence
  Description of Artificial Sequence: Synthetic oligonucleotide
gaguuugugugaagauguc

SEQ ID NO: 2480899 - RNA, 19 nt, Artificial Sequence
  Description of Artificial Sequence: Synthetic oligonucleotide
guccuugaccacaccuggg

SEQ ID NO: 2480900 - RNA, 19 nt, Artificial Sequence
  Description of Artificial Sequence: Synthetic oligonucleotide
cucuguccccgucucuuug

SEQ ID NO: 2480901 - RNA, 19 nt, Artificial Sequence
  Description of Artificial Sequence: Synthetic oligonucleotide
cagccugaguucaccuuug

SEQ ID NO: 2480902 - RNA, 19 nt, Artificial Sequence
  Description of Artificial Sequence: Synthetic oligonucleotide
caccgucgcagcaccacac

SEQ ID NO: 2480903 - RNA, 19 nt, Artificial Sequence
  Description of Artificial Sequence: Synthetic oligonucleotide
ucaugccggccucuccccu

SEQ ID NO: 2480904 - RNA, 19 nt, Artificial Sequence
  Description of Artificial Sequence: Synthetic oligonucleotide
gugugaagaugucccuuga

SEQ ID NO: 2480905 - RNA, 19 nt, Artificial Sequence
  Description of Artificial Sequence: Synthetic oligonucleotide
ggagaagcaugcuuauuua

SEQ ID NO: 2480906 - RNA, 19 nt, Artificial Sequence
  Description of Artificial Sequence: Synthetic oligonucleotide
guggggagaagcaugcuua

SEQ ID NO: 2480907 - RNA, 19 nt, Artificial Sequence
  Description of Artificial Sequence: Synthetic oligonucleotide
gucuuauaauuugaugcgu

SEQ ID NO: 2480908 - RNA, 19 nt, Artificial Sequence
  Description of Artificial Sequence: Synthetic oligonucleotide
auccgcaucacgaccucug

SEQ ID NO: 2480909 - RNA, 19 nt, Artificial Sequence
  Description of Artificial Sequence: Synthetic oligonucleotide
ucaccguucugcucuucuu

SEQ ID NO: 2480910 - RNA, 19 nt, Artificial Sequence
  Description of Artificial Sequence: Synthetic oligonucleotide
uugaugcguuuaacuuggu

SEQ ID NO: 2480911 - RNA, 19 nt, Artificial Sequence
  Description of Artificial Sequence: Synthetic oligonucleotide
ccgucuucaggauaacguc

SEQ ID NO: 2480912 - RNA, 19 nt, Artificial Sequence
  Description of Artificial Sequence: Synthetic oligonucleotide
cucuuuguucuccccgaca

SEQ ID NO: 2480913 - RNA, 19 nt, Artificial Sequence
  Description of Artificial Sequence: Synthetic oligonucleotide
ggauuuucuggaguuaaua

SEQ ID NO: 2480914 - RNA, 19 nt, Artificial Sequence
  Description of Artificial Sequence: Synthetic oligonucleotide
guucuccccgacaagcaga

SEQ ID NO: 2480915 - RNA, 19 nt, Artificial Sequence
  Description of Artificial Sequence: Synthetic oligonucleotide
auguuacggaaaagugucu

SEQ ID NO: 2480916 - RNA, 19 nt, Artificial Sequence
  Description of Artificial Sequence: Synthetic oligonucleotide
caugcuuauuuagacuucu

SEQ ID NO: 2480917 - RNA, 19 nt, Artificial Sequence
  Description of Artificial Sequence: Synthetic oligonucleotide
gcguuuaacuugguacuag

SEQ ID NO: 2480918 - RNA, 19 nt, Artificial Sequence
  Description of Artificial Sequence: Synthetic oligonucleotide
gcaucacgaccucuguccc

SEQ ID NO: 2480919 - RNA, 19 nt, Artificial Sequence
  Description of Artificial Sequence: Synthetic oligonucleotide
gggagaagcaugcuuauuu

SEQ ID NO: 2480920 - RNA, 19 nt, Artificial Sequence
  Description of Artificial Sequence: Synthetic oligonucleotide
ucagggagaugggucuccu

SEQ ID NO: 2480921 - RNA, 19 nt, Artificial Sequence
  Description of Artificial Sequence: Synthetic oligonucleotide
gcuuuugagucgcauggaa

SEQ ID NO: 2480922 - RNA, 19 nt, Artificial Sequence
  Description of Artificial Sequence: Synthetic oligonucleotide
gguuuucaggaggauccgc

SEQ ID NO: 2480923 - RNA, 19 nt, Artificial Sequence
  Description of Artificial Sequence: Synthetic oligonucleotide
cgucucuuuguucuccccg

SEQ ID NO: 2480924 - RNA, 19 nt, Artificial Sequence
  Description of Artificial Sequence: Synthetic oligonucleotide
ucguaucggaaggacugua

SEQ ID NO: 2480925 - RNA, 19 nt, Artificial Sequence
  Description of Artificial Sequence: Synthetic oligonucleotide
caugccggccucuccccug

SEQ ID NO: 2480926 - RNA, 19 nt, Artificial Sequence
  Description of Artificial Sequence: Synthetic oligonucleotide
acgucguaucggaaggacu

SEQ ID NO: 2480927 - RNA, 19 nt, Artificial Sequence
  Description of Artificial Sequence: Synthetic oligonucleotide
agccguggggagaagcaug

SEQ ID NO: 2480928 - RNA, 19 nt, Artificial Sequence
  Description of Artificial Sequence: Synthetic oligonucleotide
agccugaguucaccuuugu

SEQ ID NO: 2480929 - RNA, 19 nt, Artificial Sequence
  Description of Artificial Sequence: Synthetic oligonucleotide
ccucucagggagauggguc

SEQ ID NO: 2480930 - RNA, 19 nt, Artificial Sequence
  Description of Artificial Sequence: Synthetic oligonucleotide
ggauccaggagucuggcuu

SEQ ID NO: 2480931 - RNA, 19 nt, Artificial Sequence
  Description of Artificial Sequence: Synthetic oligonucleotide
gagucgcauggaaaaugga

SEQ ID NO: 2480932 - RNA, 19 nt, Artificial Sequence
  Description of Artificial Sequence: Synthetic oligonucleotide
aucucccaccuucaccguu

SEQ ID NO: 2480933 - RNA, 19 nt, Artificial Sequence
  Description of Artificial Sequence: Synthetic oligonucleotide
guucagccugaguucaccu

SEQ ID NO: 2480934 - RNA, 19 nt, Artificial Sequence
  Description of Artificial Sequence: Synthetic oligonucleotide
gaguucaccuuuguagaau

SEQ ID NO: 2480935 - RNA, 19 nt, Artificial Sequence
  Description of Artificial Sequence: Synthetic oligonucleotide
cccaauaucaaggcccguc

SEQ ID NO: 2480936 - RNA, 19 nt, Artificial Sequence
  Description of Artificial Sequence: Synthetic oligonucleotide
accccagagucggauccag

SEQ ID NO: 2480937 - RNA, 19 nt, Artificial Sequence
  Description of Artificial Sequence: Synthetic oligonucleotide
gggaguugcagagggaaaa

SEQ ID NO: 2480938 - RNA, 19 nt, Artificial Sequence
  Description of Artificial Sequence: Synthetic oligonucleotide
uuccaccgucgcagcacca

SEQ ID NO: 2480939 - RNA, 19 nt, Artificial Sequence
  Description of Artificial Sequence: Synthetic oligonucleotide
cguaucggaaggacuguac

SEQ ID NO: 2480940 - RNA, 19 nt, Artificial Sequence
  Description of Artificial Sequence: Synthetic oligonucleotide
aggcccgucuucaggauaa

SEQ ID NO: 2480941 - RNA, 19 nt, Artificial Sequence
  Description of Artificial Sequence: Synthetic oligonucleotide
ggccucuccccugaccacg

SEQ ID NO: 2480942 - RNA, 19 nt, Artificial Sequence
  Description of Artificial Sequence: Synthetic oligonucleotide
augccggccucuccccuga

SEQ ID NO: 2480943 - RNA, 19 nt, Artificial Sequence
  Description of Artificial Sequence: Synthetic oligonucleotide
uuucuccguucagccugag

SEQ ID NO: 2480944 - RNA, 19 nt, Artificial Sequence
  Description of Artificial Sequence: Synthetic oligonucleotide
caccuucaccguucugcuc

SEQ ID NO: 2480945 - RNA, 19 nt, Artificial Sequence
  Description of Artificial Sequence: Synthetic oligonucleotide
ucccaccuucaccguucug

SEQ ID NO: 2480946 - RNA, 19 nt, Artificial Sequence
  Description of Artificial Sequence: Synthetic oligonucleotide
cuucaggauaacgucguau

SEQ ID NO: 2480947 - RNA, 19 nt, Artificial Sequence
  Description of Artificial Sequence: Synthetic oligonucleotide
cuuuaagcucuuccaccgu

SEQ ID NO: 2480948 - RNA, 19 nt, Artificial Sequence
  Description of Artificial Sequence: Synthetic oligonucleotide
cguuuaacuugguacuaga

SEQ ID NO: 2480949 - RNA, 19 nt, Artificial Sequence
  Description of Artificial Sequence: Synthetic oligonucleotide
gccguggggagaagcaugc

SEQ ID NO: 2480950 - RNA, 19 nt, Artificial Sequence
  Description of Artificial Sequence: Synthetic oligonucleotide
uccccgucucuuuguucuc

SEQ ID NO: 2480951 - RNA, 19 nt, Artificial Sequence
  Description of Artificial Sequence: Synthetic oligonucleotide
ccuugaccacaccuggguc

SEQ ID NO: 2480952 - RNA, 19 nt, Artificial Sequence
  Description of Artificial Sequence: Synthetic oligonucleotide
gcccgucuucaggauaacg

SEQ ID NO: 2480953 - RNA, 19 nt, Artificial Sequence
  Description of Artificial Sequence: Synthetic oligonucleotide
gcaccagcgagcagucugc

SEQ ID NO: 2480954 - RNA, 19 nt, Artificial Sequence
  Description of Artificial Sequence: Synthetic oligonucleotide
gaguccucuucaucugcau

SEQ ID NO: 2480955 - RNA, 19 nt, Artificial Sequence
  Description of Artificial Sequence: Synthetic oligonucleotide
caccagcgagcagucugcc

SEQ ID NO: 2480956 - RNA, 19 nt, Artificial Sequence
  Description of Artificial Sequence: Synthetic oligonucleotide
cccgucuucaggauaacgu

SEQ ID NO: 2480957 - RNA, 19 nt, Artificial Sequence
  Description of Artificial Sequence: Synthetic oligonucleotide
ucccaauaucaaggcccgu

SEQ ID NO: 2480958 - RNA, 19 nt, Artificial Sequence
  Description of Artificial Sequence: Synthetic oligonucleotide
gcaugcuuauuuagacuuc

SEQ ID NO: 2480959 - RNA, 19 nt, Artificial Sequence
  Description of Artificial Sequence: Synthetic oligonucleotide
cucgcuccucucagggaga

SEQ ID NO: 2480960 - RNA, 19 nt, Artificial Sequence
  Description of Artificial Sequence: Synthetic oligonucleotide
caccugggucauccucaag

SEQ ID NO: 2480961 - RNA, 19 nt, Artificial Sequence
  Description of Artificial Sequence: Synthetic oligonucleotide
cacgaccucuguccccguc

SEQ ID NO: 2480962 - RNA, 19 nt, Artificial Sequence
  Description of Artificial Sequence: Synthetic oligonucleotide
acggugcuugucacucuca

SEQ ID NO: 2480963 - RNA, 19 nt, Artificial Sequence
  Description of Artificial Sequence: Synthetic oligonucleotide
ccgucucuuuguucucccc

SEQ ID NO: 2480964 - RNA, 19 nt, Artificial Sequence
  Description of Artificial Sequence: Synthetic oligonucleotide
ucacgaccucuguccccgu

SEQ ID NO: 2480965 - RNA, 19 nt, Artificial Sequence
  Description of Artificial Sequence: Synthetic oligonucleotide
aagcagccguggggagaag

SEQ ID NO: 2480966 - RNA, 19 nt, Artificial Sequence
  Description of Artificial Sequence: Synthetic oligonucleotide
ccacgaggaagcagccgug

SEQ ID NO: 2480967 - RNA, 19 nt, Artificial Sequence
  Description of Artificial Sequence: Synthetic oligonucleotide
ggauccgcaucacgaccuc

SEQ ID NO: 2480968 - RNA, 19 nt, Artificial Sequence
  Description of Artificial Sequence: Synthetic oligonucleotide
gauccgcaucacgaccucu

SEQ ID NO: 2480969 - RNA, 19 nt, Artificial Sequence
  Description of Artificial Sequence: Synthetic oligonucleotide
ccggccucuccccugacca

SEQ ID NO: 2480970 - RNA, 19 nt, Artificial Sequence
  Description of Artificial Sequence: Synthetic oligonucleotide
gucguaucggaaggacugu

SEQ ID NO: 2480971 - RNA, 19 nt, Artificial Sequence
  Description of Artificial Sequence: Synthetic oligonucleotide
cggcucgcuccucucaggg

SEQ ID NO: 2480972 - RNA, 19 nt, Artificial Sequence
  Description of Artificial Sequence: Synthetic oligonucleotide
gcagccguggggagaagca

SEQ ID NO: 2480973 - RNA, 19 nt, Artificial Sequence
  Description of Artificial Sequence: Synthetic oligonucleotide
ggauaacgucguaucggaa

SEQ ID NO: 2480974 - RNA, 19 nt, Artificial Sequence
  Description of Artificial Sequence: Synthetic oligonucleotide
cuucaccguucugcucuuc

SEQ ID NO: 2480975 - RNA, 19 nt, Artificial Sequence
  Description of Artificial Sequence: Synthetic oligonucleotide
gcgccuuuucaugccggcc

SEQ ID NO: 2480976 - RNA, 19 nt, Artificial Sequence
  Description of Artificial Sequence: Synthetic oligonucleotide
cuucuuccggcucgcuccu

SEQ ID NO: 2480977 - RNA, 19 nt, Artificial Sequence
  Description of Artificial Sequence: Synthetic oligonucleotide
gccaccaguuacagccaug

SEQ ID NO: 2480978 - RNA, 19 nt, Artificial Sequence
  Description of Artificial Sequence: Synthetic oligonucleotide
gcgagcagucugccaccag

SEQ ID NO: 2480979 - RNA, 19 nt, Artificial Sequence
  Description of Artificial Sequence: Synthetic oligonucleotide
ggcucgcuccucucaggga

SEQ ID NO: 2480980 - RNA, 19 nt, Artificial Sequence
  Description of Artificial Sequence: Synthetic oligonucleotide
ucuccccgacaagcagauc

SEQ ID NO: 2480981 - RNA, 19 nt, Artificial Sequence
  Description of Artificial Sequence: Synthetic oligonucleotide
ccgcaucacgaccucuguc

SEQ ID NO: 2480982 - RNA, 19 nt, Artificial Sequence
  Description of Artificial Sequence: Synthetic oligonucleotide
agcacaccccagagucgga

SEQ ID NO: 2480983 - RNA, 19 nt, Artificial Sequence
  Description of Artificial Sequence: Synthetic oligonucleotide
gagucggauccaggagucu

SEQ ID NO: 2480984 - RNA, 19 nt, Artificial Sequence
  Description of Artificial Sequence: Synthetic oligonucleotide
ugccggccucuccccugac

SEQ ID NO: 2480985 - RNA, 19 nt, Artificial Sequence
  Description of Artificial Sequence: Synthetic oligonucleotide
ugaccacaccugggucauc

SEQ ID NO: 2480986 - RNA, 19 nt, Artificial Sequence
  Description of Artificial Sequence: Synthetic oligonucleotide
ccguucugcucuucuucca

SEQ ID NO: 2480987 - RNA, 19 nt, Artificial Sequence
  Description of Artificial Sequence: Synthetic oligonucleotide
ccguucagccugaguucac

SEQ ID NO: 2480988 - RNA, 19 nt, Artificial Sequence
  Description of Artificial Sequence: Synthetic oligonucleotide
caaggcccgucuucaggau

SEQ ID NO: 2480989 - RNA, 19 nt, Artificial Sequence
  Description of Artificial Sequence: Synthetic oligonucleotide
ccaccuucaccguucugcu

SEQ ID NO: 2480990 - RNA, 19 nt, Artificial Sequence
  Description of Artificial Sequence: Synthetic oligonucleotide
cgacaagcagauccaacgu

SEQ ID NO: 2480991 - RNA, 19 nt, Artificial Sequence
  Description of Artificial Sequence: Synthetic oligonucleotide
ccaccgucgcagcaccaca

SEQ ID NO: 2480992 - RNA, 19 nt, Artificial Sequence
  Description of Artificial Sequence: Synthetic oligonucleotide
cgagcagucugccaccagu

SEQ ID NO: 2480993 - RNA, 19 nt, Artificial Sequence
  Description of Artificial Sequence: Synthetic oligonucleotide
ccucuccccugaccacgag

SEQ ID NO: 2480994 - RNA, 19 nt, Artificial Sequence
  Description of Artificial Sequence: Synthetic oligonucleotide
cgccuuuucaugccggccu

SEQ ID NO: 2480995 - RNA, 19 nt, Artificial Sequence
  Description of Artificial Sequence: Synthetic oligonucleotide
cuguccccgucucuuuguu

SEQ ID NO: 2480996 - RNA, 19 nt, Artificial Sequence
  Description of Artificial Sequence: Synthetic oligonucleotide
gccucuccccugaccacga

SEQ ID NO: 2480997 - RNA, 19 nt, Artificial Sequence
  Description of Artificial Sequence: Synthetic oligonucleotide
gagcaccagcgagcagucu

SEQ ID NO: 2480998 - RNA, 19 nt, Artificial Sequence
  Description of Artificial Sequence: Synthetic oligonucleotide
cagccguggggagaagcau

SEQ ID NO: 2480999 - RNA, 19 nt, Artificial Sequence
  Description of Artificial Sequence: Synthetic oligonucleotide
ggcccgucuucaggauaac

SEQ ID NO: 2481000 - RNA, 19 nt, Artificial Sequence
  Description of Artificial Sequence: Synthetic oligonucleotide
cgucgcagcaccacacggu

SEQ ID NO: 2481001 - RNA, 19 nt, Artificial Sequence
  Description of Artificial Sequence: Synthetic oligonucleotide
cgcauggaaaauggaaaau

SEQ ID NO: 2481002 - RNA, 19 nt, Artificial Sequence
  Description of Artificial Sequence: Synthetic oligonucleotide
cguggggagaagcaugcuu

SEQ ID NO: 2481003 - RNA, 19 nt, Artificial Sequence
  Description of Artificial Sequence: Synthetic oligonucleotide
ccacacggugcuugucacu

SEQ ID NO: 2481004 - RNA, 19 nt, Artificial Sequence
  Description of Artificial Sequence: Synthetic oligonucleotide
cggccucuccccugaccac

SEQ ID NO: 2481005 - RNA, 19 nt, Artificial Sequence
  Description of Artificial Sequence: Synthetic oligonucleotide
ccccgacaagcagauccaa

SEQ ID NO: 2481006 - RNA, 19 nt, Artificial Sequence
  Description of Artificial Sequence: Synthetic oligonucleotide
cccugaccacgaggaagca

SEQ ID NO: 2481007 - RNA, 19 nt, Artificial Sequence
  Description of Artificial Sequence: Synthetic oligonucleotide
cgauuccaggaagcacaga

SEQ ID NO: 2481008 - RNA, 19 nt, Artificial Sequence
  Description of Artificial Sequence: Synthetic oligonucleotide
ccguggggagaagcaugcu

SEQ ID NO: 2481009 - RNA, 19 nt, Artificial Sequence
  Description of Artificial Sequence: Synthetic oligonucleotide
  modified_base (1)..(1): a, c, u, g, unknown or other
nguaaaagcgccuuuucau

SEQ ID NO: 2481010 - RNA, 19 nt, Artificial Sequence
  Description of Artificial Sequence: Synthetic oligonucleotide
aaaacuuacauuuaacccc

SEQ ID NO: 2481011 - RNA, 19 nt, Artificial Sequence
  Description of Artificial Sequence: Synthetic oligonucleotide
auuauuuucagucuucugg

SEQ ID NO: 2481012 - RNA, 19 nt, Artificial Sequence
  Description of Artificial Sequence: Synthetic oligonucleotide
auagaaaucauucucuugg

SEQ ID NO: 2481013 - RNA, 19 nt, Artificial Sequence
  Description of Artificial Sequence: Synthetic oligonucleotide
cuuguuucaauauaaaacc

SEQ ID NO: 2481014 - RNA, 19 nt, Artificial Sequence
  Description of Artificial Sequence: Synthetic oligonucleotide
ucuuaauuuaagcaugugg

SEQ ID NO: 2481015 - RNA, 19 nt, Artificial Sequence
  Description of Artificial Sequence: Synthetic oligonucleotide
uuuuauaagauagaaauca

SEQ ID NO: 2481016 - RNA, 19 nt, Artificial Sequence
  Description of Artificial Sequence: Synthetic oligonucleotide
aaugaaaacuuauucuuag

SEQ ID NO: 2481017 - RNA, 19 nt, Artificial Sequence
  Description of Artificial Sequence: Synthetic oligonucleotide
uauaagauagaaaucauuc

SEQ ID NO: 2481018 - RNA, 19 nt, Artificial Sequence
  Description of Artificial Sequence: Synthetic oligonucleotide
ucaauauaaaaccccauag

SEQ ID NO: 2481019 - RNA, 19 nt, Artificial Sequence
  Description of Artificial Sequence: Synthetic oligonucleotide
aaaucauucucuuggggac

SEQ ID NO: 2481020 - RNA, 19 nt, Artificial Sequence
  Description of Artificial Sequence: Synthetic oligonucleotide
aauauuacaaguggcuacc

SEQ ID NO: 2481021 - RNA, 19 nt, Artificial Sequence
  Description of Artificial Sequence: Synthetic oligonucleotide
aauauaaaaccccauagua

SEQ ID NO: 2481022 - RNA, 19 nt, Artificial Sequence
  Description of Artificial Sequence: Synthetic oligonucleotide
uuuauuggaacuuuacaag

SEQ ID NO: 2481023 - RNA, 19 nt, Artificial Sequence
  Description of Artificial Sequence: Synthetic oligonucleotide
aauccuagaauauuacaag

SEQ ID NO: 2481024 - RNA, 19 nt, Artificial Sequence
  Description of Artificial Sequence: Synthetic oligonucleotide
uauucuucaauacagguau

SEQ ID NO: 2481025 - RNA, 19 nt, Artificial Sequence
  Description of Artificial Sequence: Synthetic oligonucleotide
uuuuauuggaacuuuacaa

SEQ ID NO: 2481026 - RNA, 19 nt, Artificial Sequence
  Description of Artificial Sequence: Synthetic oligonucleotide
aaaauguuuuauuggaacu

SEQ ID NO: 2481027 - RNA, 19 nt, Artificial Sequence
  Description of Artificial Sequence: Synthetic oligonucleotide
uuuacuuuguuuuggacga

SEQ ID NO: 2481028 - RNA, 19 nt, Artificial Sequence
  Description of Artificial Sequence: Synthetic oligonucleotide
uguuucaauauaaaacccc

SEQ ID NO: 2481029 - RNA, 19 nt, Artificial Sequence
  Description of Artificial Sequence: Synthetic oligonucleotide
ugaaaacuuauucuuagcu

SEQ ID NO: 2481030 - RNA, 19 nt, Artificial Sequence
  Description of Artificial Sequence: Synthetic oligonucleotide
acaaagaaaugcuuguuuc

SEQ ID NO: 2481031 - RNA, 19 nt, Artificial Sequence
  Description of Artificial Sequence: Synthetic oligonucleotide
uagccaauggcuuuaaucc

SEQ ID NO: 2481032 - RNA, 19 nt, Artificial Sequence
  Description of Artificial Sequence: Synthetic oligonucleotide
aacagcacggcacuacggc

SEQ ID NO: 2481033 - RNA, 19 nt, Artificial Sequence
  Description of Artificial Sequence: Synthetic oligonucleotide
ugugguuuuauucuguacu

SEQ ID NO: 2481034 - RNA, 19 nt, Artificial Sequence
  Description of Artificial Sequence: Synthetic oligonucleotide
uaauccuagaauauuacaa

SEQ ID NO: 2481035 - RNA, 19 nt, Artificial Sequence
  Description of Artificial Sequence: Synthetic oligonucleotide
uuuuggacgaugcagagau

SEQ ID NO: 2481036 - RNA, 19 nt, Artificial Sequence
  Description of Artificial Sequence: Synthetic oligonucleotide
aaccccaaaacuucaccgc

SEQ ID NO: 2481037 - RNA, 19 nt, Artificial Sequence
  Description of Artificial Sequence: Synthetic oligonucleotide
uuccaaaauguuuuauugg

SEQ ID NO: 2481038 - RNA, 19 nt, Artificial Sequence
  Description of Artificial Sequence: Synthetic oligonucleotide
uuuguuuuggacgaugcag

SEQ ID NO: 2481039 - RNA, 19 nt, Artificial Sequence
  Description of Artificial Sequence: Synthetic oligonucleotide
auuacaaguggcuaccgag

SEQ ID NO: 2481040 - RNA, 19 nt, Artificial Sequence
  Description of Artificial Sequence: Synthetic oligonucleotide
uagaauauuacaaguggcu

SEQ ID NO: 2481041 - RNA, 19 nt, Artificial Sequence
  Description of Artificial Sequence: Synthetic oligonucleotide
uauacaaagaaaugcuugu

SEQ ID NO: 2481042 - RNA, 19 nt, Artificial Sequence
  Description of Artificial Sequence: Synthetic oligonucleotide
uccaaugaaaacuuauucu

SEQ ID NO: 2481043 - RNA, 19 nt, Artificial Sequence
  Description of Artificial Sequence: Synthetic oligonucleotide
auaauaaauauauuauuuu

SEQ ID NO: 2481044 - RNA, 19 nt, Artificial Sequence
  Description of Artificial Sequence: Synthetic oligonucleotide
acaguuuuccaaugaaaac

SEQ ID NO: 2481045 - RNA, 19 nt, Artificial Sequence
  Description of Artificial Sequence: Synthetic oligonucleotide
auauaaaaccccauaguac

SEQ ID NO: 2481046 - RNA, 19 nt, Artificial Sequence
  Description of Artificial Sequence: Synthetic oligonucleotide
cuagaauauuacaaguggc

SEQ ID NO: 2481047 - RNA, 19 nt, Artificial Sequence
  Description of Artificial Sequence: Synthetic oligonucleotide
uuauuggaacuuuacaaga

SEQ ID NO: 2481048 - RNA, 19 nt, Artificial Sequence
  Description of Artificial Sequence: Synthetic oligonucleotide
uuuaauccuagaauauuac

SEQ ID NO: 2481049 - RNA, 19 nt, Artificial Sequence
  Description of Artificial Sequence: Synthetic oligonucleotide
uccuuugucuuccaaaaug

SEQ ID NO: 2481050 - RNA, 19 nt, Artificial Sequence
  Description of Artificial Sequence: Synthetic oligonucleotide
augaaaacuuauucuuagc

SEQ ID NO: 2481051 - RNA, 19 nt, Artificial Sequence
  Description of Artificial Sequence: Synthetic oligonucleotide
ugagucaucuccaauggga

SEQ ID NO: 2481052 - RNA, 19 nt, Artificial Sequence
  Description of Artificial Sequence: Synthetic oligonucleotide
uucaccgccaauaauaaau

SEQ ID NO: 2481053 - RNA, 19 nt, Artificial Sequence
  Description of Artificial Sequence: Synthetic oligonucleotide
ucuccaaugggauugccag

SEQ ID NO: 2481054 - RNA, 19 nt, Artificial Sequence
  Description of Artificial Sequence: Synthetic oligonucleotide
aauggcuuuaauccuagaa

SEQ ID NO: 2481055 - RNA, 19 nt, Artificial Sequence
  Description of Artificial Sequence: Synthetic oligonucleotide
uaaccccaaaacuucaccg

SEQ ID NO: 2481056 - RNA, 19 nt, Artificial Sequence
  Description of Artificial Sequence: Synthetic oligonucleotide
uuuuauucuguacucuugu

SEQ ID NO: 2481057 - RNA, 19 nt, Artificial Sequence
  Description of Artificial Sequence: Synthetic oligonucleotide
aucacuucccugcaacucc

SEQ ID NO: 2481058 - RNA, 19 nt, Artificial Sequence
  Description of Artificial Sequence: Synthetic oligonucleotide
gaauauuacaaguggcuac

SEQ ID NO: 2481059 - RNA, 19 nt, Artificial Sequence
  Description of Artificial Sequence: Synthetic oligonucleotide
gaaaucauucucuugggga

SEQ ID NO: 2481060 - RNA, 19 nt, Artificial Sequence
  Description of Artificial Sequence: Synthetic oligonucleotide
auuggaacuuuacaagauc

SEQ ID NO: 2481061 - RNA, 19 nt, Artificial Sequence
  Description of Artificial Sequence: Synthetic oligonucleotide
gacuguucaauggaaaggg

SEQ ID NO: 2481062 - RNA, 19 nt, Artificial Sequence
  Description of Artificial Sequence: Synthetic oligonucleotide
uuguauucuucaauacagg

SEQ ID NO: 2481063 - RNA, 19 nt, Artificial Sequence
  Description of Artificial Sequence: Synthetic oligonucleotide
uguauucuucaauacaggu

SEQ ID NO: 2481064 - RNA, 19 nt, Artificial Sequence
  Description of Artificial Sequence: Synthetic oligonucleotide
aagcaugugguuuuauucu

SEQ ID NO: 2481065 - RNA, 19 nt, Artificial Sequence
  Description of Artificial Sequence: Synthetic oligonucleotide
uuggaacuuuacaagaucu

SEQ ID NO: 2481066 - RNA, 19 nt, Artificial Sequence
  Description of Artificial Sequence: Synthetic oligonucleotide
aaccuggcuagccaauggc

SEQ ID NO: 2481067 - RNA, 19 nt, Artificial Sequence
  Description of Artificial Sequence: Synthetic oligonucleotide
auaagauagaaaucauucu

SEQ ID NO: 2481068 - RNA, 19 nt, Artificial Sequence
  Description of Artificial Sequence: Synthetic oligonucleotide
aaugggacuguucaaugga

SEQ ID NO: 2481069 - RNA, 19 nt, Artificial Sequence
  Description of Artificial Sequence: Synthetic oligonucleotide
uuuucagucuucuggaaac

SEQ ID NO: 2481070 - RNA, 19 nt, Artificial Sequence
  Description of Artificial Sequence: Synthetic oligonucleotide
cuuuacaagaucuccauca

SEQ ID NO: 2481071 - RNA, 19 nt, Artificial Sequence
  Description of Artificial Sequence: Synthetic oligonucleotide
uuaauccuagaauauuaca

SEQ ID NO: 2481072 - RNA, 19 nt, Artificial Sequence
  Description of Artificial Sequence: Synthetic oligonucleotide
uucaauauaaaaccccaua

SEQ ID NO: 2481073 - RNA, 19 nt, Artificial Sequence
  Description of Artificial Sequence: Synthetic oligonucleotide
aauuuaagcaugugguuuu

SEQ ID NO: 2481074 - RNA, 19 nt, Artificial Sequence
  Description of Artificial Sequence: Synthetic oligonucleotide
uguuuuauuggaacuuuac

SEQ ID NO: 2481075 - RNA, 19 nt, Artificial Sequence
  Description of Artificial Sequence: Synthetic oligonucleotide
uuggggacaaacuccaugc

SEQ ID NO: 2481076 - RNA, 19 nt, Artificial Sequence
  Description of Artificial Sequence: Synthetic oligonucleotide
uauauuauuuucagucuuc

SEQ ID NO: 2481077 - RNA, 19 nt, Artificial Sequence
  Description of Artificial Sequence: Synthetic oligonucleotide
augacagagaaacaaacau

SEQ ID NO: 2481078 - RNA, 19 nt, Artificial Sequence
  Description of Artificial Sequence: Synthetic oligonucleotide
uaagcaugugguuuuauuc

SEQ ID NO: 2481079 - RNA, 19 nt, Artificial Sequence
  Description of Artificial Sequence: Synthetic oligonucleotide
aaaacuucaccgccaauaa

SEQ ID NO: 2481080 - RNA, 19 nt, Artificial Sequence
  Description of Artificial Sequence: Synthetic oligonucleotide
aaccccauaguacacauua

SEQ ID NO: 2481081 - RNA, 19 nt, Artificial Sequence
  Description of Artificial Sequence: Synthetic oligonucleotide
uacaagaucuccaucacuu

SEQ ID NO: 2481082 - RNA, 19 nt, Artificial Sequence
  Description of Artificial Sequence: Synthetic oligonucleotide
uuuauaagauagaaaucau

SEQ ID NO: 2481083 - RNA, 19 nt, Artificial Sequence
  Description of Artificial Sequence: Synthetic oligonucleotide
agaaaucauucucuugggg

SEQ ID NO: 2481084 - RNA, 19 nt, Artificial Sequence
  Description of Artificial Sequence: Synthetic oligonucleotide
uuaaccccaaaacuucacc

SEQ ID NO: 2481085 - RNA, 19 nt, Artificial Sequence
  Description of Artificial Sequence: Synthetic oligonucleotide
uuauucuguacucuuguau

SEQ ID NO: 2481086 - RNA, 19 nt, Artificial Sequence
  Description of Artificial Sequence: Synthetic oligonucleotide
uuguuuuggacgaugcaga

SEQ ID NO: 2481087 - RNA, 19 nt, Artificial Sequence
  Description of Artificial Sequence: Synthetic oligonucleotide
auucuguacucuuguauuc

SEQ ID NO: 2481088 - RNA, 19 nt, Artificial Sequence
  Description of Artificial Sequence: Synthetic oligonucleotide
uuauaagauagaaaucauu

SEQ ID NO: 2481089 - RNA, 19 nt, Artificial Sequence
  Description of Artificial Sequence: Synthetic oligonucleotide
auauacaaagaaaugcuug

SEQ ID NO: 2481090 - RNA, 19 nt, Artificial Sequence
  Description of Artificial Sequence: Synthetic oligonucleotide
aaaccuggcuagccaaugg

SEQ ID NO: 2481091 - RNA, 19 nt, Artificial Sequence
  Description of Artificial Sequence: Synthetic oligonucleotide
uguacucuuguauucuuca

SEQ ID NO: 2481092 - RNA, 19 nt, Artificial Sequence
  Description of Artificial Sequence: Synthetic oligonucleotide
ugugguuuugugaucuuca

SEQ ID NO: 2481093 - RNA, 19 nt, Artificial Sequence
  Description of Artificial Sequence: Synthetic oligonucleotide
aacuuuacaagaucuccau

SEQ ID NO: 2481094 - RNA, 19 nt, Artificial Sequence
  Description of Artificial Sequence: Synthetic oligonucleotide
ucucuuggggacaaacucc

SEQ ID NO: 2481095 - RNA, 19 nt, Artificial Sequence
  Description of Artificial Sequence: Synthetic oligonucleotide
aaugcuuguuucaauauaa

SEQ ID NO: 2481096 - RNA, 19 nt, Artificial Sequence
  Description of Artificial Sequence: Synthetic oligonucleotide
cauuuaaccccaaaacuuc

SEQ ID NO: 2481097 - RNA, 19 nt, Artificial Sequence
  Description of Artificial Sequence: Synthetic oligonucleotide
gaaacagcacggcacuacg

SEQ ID NO: 2481098 - RNA, 19 nt, Artificial Sequence
  Description of Artificial Sequence: Synthetic oligonucleotide
caugagucaucuccaaugg

SEQ ID NO: 2481099 - RNA, 19 nt, Artificial Sequence
  Description of Artificial Sequence: Synthetic oligonucleotide
agaugacagagaaacaaac

SEQ ID NO: 2481100 - RNA, 19 nt, Artificial Sequence
  Description of Artificial Sequence: Synthetic oligonucleotide
cagagaaacaaacaucuuc

SEQ ID NO: 2481101 - RNA, 19 nt, Artificial Sequence
  Description of Artificial Sequence: Synthetic oligonucleotide
uuuacaagaucuccaucac

SEQ ID NO: 2481102 - RNA, 19 nt, Artificial Sequence
  Description of Artificial Sequence: Synthetic oligonucleotide
ugaucuucaacauccugcu

SEQ ID NO: 2481103 - RNA, 19 nt, Artificial Sequence
  Description of Artificial Sequence: Synthetic oligonucleotide
gcagcuaccauuuacuuug

SEQ ID NO: 2481104 - RNA, 19 nt, Artificial Sequence
  Description of Artificial Sequence: Synthetic oligonucleotide
gacgaugcagagaugacag

SEQ ID NO: 2481105 - RNA, 19 nt, Artificial Sequence
  Description of Artificial Sequence: Synthetic oligonucleotide
accccaaaacuucaccgcc

SEQ ID NO: 2481106 - RNA, 19 nt, Artificial Sequence
  Description of Artificial Sequence: Synthetic oligonucleotide
cuagccaauggcuuuaauc

SEQ ID NO: 2481107 - RNA, 19 nt, Artificial Sequence
  Description of Artificial Sequence: Synthetic oligonucleotide
aaacuccaugccaugacgg

SEQ ID NO: 2481108 - RNA, 19 nt, Artificial Sequence
  Description of Artificial Sequence: Synthetic oligonucleotide
ccuagaauauuacaagugg

SEQ ID NO: 2481109 - RNA, 19 nt, Artificial Sequence
  Description of Artificial Sequence: Synthetic oligonucleotide
aguucuuaauuuaagcaug

SEQ ID NO: 2481110 - RNA, 19 nt, Artificial Sequence
  Description of Artificial Sequence: Synthetic oligonucleotide
uauuggaacuuuacaagau

SEQ ID NO: 2481111 - RNA, 19 nt, Artificial Sequence
  Description of Artificial Sequence: Synthetic oligonucleotide
uauucuguacucuuguauu

SEQ ID NO: 2481112 - RNA, 19 nt, Artificial Sequence
  Description of Artificial Sequence: Synthetic oligonucleotide
uggcuuuaauccuagaaua

SEQ ID NO: 2481113 - RNA, 19 nt, Artificial Sequence
  Description of Artificial Sequence: Synthetic oligonucleotide
aaaaccccauaguacacau

SEQ ID NO: 2481114 - RNA, 19 nt, Artificial Sequence
  Description of Artificial Sequence: Synthetic oligonucleotide
auccuagaauauuacaagu

SEQ ID NO: 2481115 - RNA, 19 nt, Artificial Sequence
  Description of Artificial Sequence: Synthetic oligonucleotide
uuuccaaugaaaacuuauu

SEQ ID NO: 2481116 - RNA, 19 nt, Artificial Sequence
  Description of Artificial Sequence: Synthetic oligonucleotide
uuuuccuuugucuuccaaa

SEQ ID NO: 2481117 - RNA, 19 nt, Artificial Sequence
  Description of Artificial Sequence: Synthetic oligonucleotide
agaaaugcuuguuucaaua

SEQ ID NO: 2481118 - RNA, 19 nt, Artificial Sequence
  Description of Artificial Sequence: Synthetic oligonucleotide
aaauguuuuauuggaacuu

SEQ ID NO: 2481119 - RNA, 19 nt, Artificial Sequence
  Description of Artificial Sequence: Synthetic oligonucleotide
uauuauuuucagucuucug

SEQ ID NO: 2481120 - RNA, 19 nt, Artificial Sequence
  Description of Artificial Sequence: Synthetic oligonucleotide
ugcuuguuucaauauaaaa

SEQ ID NO: 2481121 - RNA, 19 nt, Artificial Sequence
  Description of Artificial Sequence: Synthetic oligonucleotide
gugaucuucaacauccugc

SEQ ID NO: 2481122 - RNA, 19 nt, Artificial Sequence
  Description of Artificial Sequence: Synthetic oligonucleotide
uguuuuggacgaugcagag

SEQ ID NO: 2481123 - RNA, 19 nt, Artificial Sequence
  Description of Artificial Sequence: Synthetic oligonucleotide
agagaugacagagaaacaa

SEQ ID NO: 2481124 - RNA, 19 nt, Artificial Sequence
  Description of Artificial Sequence: Synthetic oligonucleotide
gcuuguuucaauauaaaac

SEQ ID NO: 2481125 - RNA, 19 nt, Artificial Sequence
  Description of Artificial Sequence: Synthetic oligonucleotide
caaugggacuguucaaugg

SEQ ID NO: 2481126 - RNA, 19 nt, Artificial Sequence
  Description of Artificial Sequence: Synthetic oligonucleotide
uuggacgaugcagagauga

SEQ ID NO: 2481127 - RNA, 19 nt, Artificial Sequence
  Description of Artificial Sequence: Synthetic oligonucleotide
acuuuacaagaucuccauc

SEQ ID NO: 2481128 - RNA, 19 nt, Artificial Sequence
  Description of Artificial Sequence: Synthetic oligonucleotide
uuacaaguggcuaccgagu

SEQ ID NO: 2481129 - RNA, 19 nt, Artificial Sequence
  Description of Artificial Sequence: Synthetic oligonucleotide
aacuucaccgccaauaaua

SEQ ID NO: 2481130 - RNA, 19 nt, Artificial Sequence
  Description of Artificial Sequence: Synthetic oligonucleotide
ugugaucuucaacauccug

SEQ ID NO: 2481131 - RNA, 19 nt, Artificial Sequence
  Description of Artificial Sequence: Synthetic oligonucleotide
uauuacaaguggcuaccga

SEQ ID NO: 2481132 - RNA, 19 nt, Artificial Sequence
  Description of Artificial Sequence: Synthetic oligonucleotide
ucuuccaaaauguuuuauu

SEQ ID NO: 2481133 - RNA, 19 nt, Artificial Sequence
  Description of Artificial Sequence: Synthetic oligonucleotide
aauguuuuauuggaacuuu

SEQ ID NO: 2481134 - RNA, 19 nt, Artificial Sequence
  Description of Artificial Sequence: Synthetic oligonucleotide
uuacaagaucuccaucacu

SEQ ID NO: 2481135 - RNA, 19 nt, Artificial Sequence
  Description of Artificial Sequence: Synthetic oligonucleotide
cuuuaauccuagaauauua

SEQ ID NO: 2481136 - RNA, 19 nt, Artificial Sequence
  Description of Artificial Sequence: Synthetic oligonucleotide
acaagaucuccaucacuuc

SEQ ID NO: 2481137 - RNA, 19 nt, Artificial Sequence
  Description of Artificial Sequence: Synthetic oligonucleotide
uucccugcaacuccaugag

SEQ ID NO: 2481138 - RNA, 19 nt, Artificial Sequence
  Description of Artificial Sequence: Synthetic oligonucleotide
uuucaauauaaaaccccau

SEQ ID NO: 2481139 - RNA, 19 nt, Artificial Sequence
  Description of Artificial Sequence: Synthetic oligonucleotide
uccaucacuucccugcaac

SEQ ID NO: 2481140 - RNA, 19 nt, Artificial Sequence
  Description of Artificial Sequence: Synthetic oligonucleotide
guuucaauauaaaacccca

SEQ ID NO: 2481141 - RNA, 19 nt, Artificial Sequence
  Description of Artificial Sequence: Synthetic oligonucleotide
uacucuuguauucuucaau

SEQ ID NO: 2481142 - RNA, 19 nt, Artificial Sequence
  Description of Artificial Sequence: Synthetic oligonucleotide
acucuuguauucuucaaua

SEQ ID NO: 2481143 - RNA, 19 nt, Artificial Sequence
  Description of Artificial Sequence: Synthetic oligonucleotide
uccaaugggauugccagug

SEQ ID NO: 2481144 - RNA, 19 nt, Artificial Sequence
  Description of Artificial Sequence: Synthetic oligonucleotide
auuuucagucuucuggaaa

SEQ ID NO: 2481145 - RNA, 19 nt, Artificial Sequence
  Description of Artificial Sequence: Synthetic oligonucleotide
gaugacagagaaacaaaca

SEQ ID NO: 2481146 - RNA, 19 nt, Artificial Sequence
  Description of Artificial Sequence: Synthetic oligonucleotide
uaccauuuacuuuguuuug

SEQ ID NO: 2481147 - RNA, 19 nt, Artificial Sequence
  Description of Artificial Sequence: Synthetic oligonucleotide
acauuuaaccccaaaacuu

SEQ ID NO: 2481148 - RNA, 19 nt, Artificial Sequence
  Description of Artificial Sequence: Synthetic oligonucleotide
ucaacauccugcucgcccu

SEQ ID NO: 2481149 - RNA, 19 nt, Artificial Sequence
  Description of Artificial Sequence: Synthetic oligonucleotide
agcaugugguuuuauucug

SEQ ID NO: 2481150 - RNA, 19 nt, Artificial Sequence
  Description of Artificial Sequence: Synthetic oligonucleotide
gaguucuuaauuuaagcau

SEQ ID NO: 2481151 - RNA, 19 nt, Artificial Sequence
  Description of Artificial Sequence: Synthetic oligonucleotide
cucuuguauucuucaauac

SEQ ID NO: 2481152 - RNA, 19 nt, Artificial Sequence
  Description of Artificial Sequence: Synthetic oligonucleotide
ugguuuugugaucuucaac

SEQ ID NO: 2481153 - RNA, 19 nt, Artificial Sequence
  Description of Artificial Sequence: Synthetic oligonucleotide
auacagguaucaaagaaaa

SEQ ID NO: 2481154 - RNA, 19 nt, Artificial Sequence
  Description of Artificial Sequence: Synthetic oligonucleotide
augagucaucuccaauggg

SEQ ID NO: 2481155 - RNA, 19 nt, Artificial Sequence
  Description of Artificial Sequence: Synthetic oligonucleotide
aaaaccuggcuagccaaug

SEQ ID NO: 2481156 - RNA, 19 nt, Artificial Sequence
  Description of Artificial Sequence: Synthetic oligonucleotide
caaagaaaugcuuguuuca

SEQ ID NO: 2481157 - RNA, 19 nt, Artificial Sequence
  Description of Artificial Sequence: Synthetic oligonucleotide
uaaaaccccauaguacaca

SEQ ID NO: 2481158 - RNA, 19 nt, Artificial Sequence
  Description of Artificial Sequence: Synthetic oligonucleotide
agauagaaaucauucucuu

SEQ ID NO: 2481159 - RNA, 19 nt, Artificial Sequence
  Description of Artificial Sequence: Synthetic oligonucleotide
acagcacggcacuacggcg

SEQ ID NO: 2481160 - RNA, 19 nt, Artificial Sequence
  Description of Artificial Sequence: Synthetic oligonucleotide
acaaguggcuaccgaguuc

SEQ ID NO: 2481161 - RNA, 19 nt, Artificial Sequence
  Description of Artificial Sequence: Synthetic oligonucleotide
acaccgaccguccgcacgg

SEQ ID NO: 2481162 - RNA, 19 nt, Artificial Sequence
  Description of Artificial Sequence: Synthetic oligonucleotide
cuuggggacaaacuccaug

SEQ ID NO: 2481163 - RNA, 19 nt, Artificial Sequence
  Description of Artificial Sequence: Synthetic oligonucleotide
ugacggccuaaguauaaca

SEQ ID NO: 2481164 - RNA, 19 nt, Artificial Sequence
  Description of Artificial Sequence: Synthetic oligonucleotide
aaacagcacggcacuacgg

SEQ ID NO: 2481165 - RNA, 19 nt, Artificial Sequence
  Description of Artificial Sequence: Synthetic oligonucleotide
uuuauucuguacucuugua

SEQ ID NO: 2481166 - RNA, 19 nt, Artificial Sequence
  Description of Artificial Sequence: Synthetic oligonucleotide
agaauauuacaaguggcua

SEQ ID NO: 2481167 - RNA, 19 nt, Artificial Sequence
  Description of Artificial Sequence: Synthetic oligonucleotide
ugccaugacggccuaagua

SEQ ID NO: 2481168 - RNA, 19 nt, Artificial Sequence
  Description of Artificial Sequence: Synthetic oligonucleotide
cacuacggcgguauguggc

SEQ ID NO: 2481169 - RNA, 19 nt, Artificial Sequence
  Description of Artificial Sequence: Synthetic oligonucleotide
gugguuuuauucuguacuc

SEQ ID NO: 2481170 - RNA, 19 nt, Artificial Sequence
  Description of Artificial Sequence: Synthetic oligonucleotide
uccccggccgagcacaucc

SEQ ID NO: 2481171 - RNA, 19 nt, Artificial Sequence
  Description of Artificial Sequence: Synthetic oligonucleotide
aaacuucaccgccaauaau

SEQ ID NO: 2481172 - RNA, 19 nt, Artificial Sequence
  Description of Artificial Sequence: Synthetic oligonucleotide
auauuacaaguggcuaccg

SEQ ID NO: 2481173 - RNA, 19 nt, Artificial Sequence
  Description of Artificial Sequence: Synthetic oligonucleotide
ucaccgccaauaauaaaua

SEQ ID NO: 2481174 - RNA, 19 nt, Artificial Sequence
  Description of Artificial Sequence: Synthetic oligonucleotide
gacaccgaccguccgcacg

SEQ ID NO: 2481175 - RNA, 19 nt, Artificial Sequence
  Description of Artificial Sequence: Synthetic oligonucleotide
acggccuaaguauaacaca

SEQ ID NO: 2481176 - RNA, 19 nt, Artificial Sequence
  Description of Artificial Sequence: Synthetic oligonucleotide
acuuauucuuagcugcuuu

SEQ ID NO: 2481177 - RNA, 19 nt, Artificial Sequence
  Description of Artificial Sequence: Synthetic oligonucleotide
gacggccuaaguauaacac

SEQ ID NO: 2481178 - RNA, 19 nt, Artificial Sequence
  Description of Artificial Sequence: Synthetic oligonucleotide
uaccgaguucuuaauuuaa

SEQ ID NO: 2481179 - RNA, 19 nt, Artificial Sequence
  Description of Artificial Sequence: Synthetic oligonucleotide
gggacuguucaauggaaag

SEQ ID NO: 2481180 - RNA, 19 nt, Artificial Sequence
  Description of Artificial Sequence: Synthetic oligonucleotide
uucuguacucuuguauucu

SEQ ID NO: 2481181 - RNA, 19 nt, Artificial Sequence
  Description of Artificial Sequence: Synthetic oligonucleotide
cuucccugcaacuccauga

SEQ ID NO: 2481182 - RNA, 19 nt, Artificial Sequence
  Description of Artificial Sequence: Synthetic oligonucleotide
uucuuaauuuaagcaugug

SEQ ID NO: 2481183 - RNA, 19 nt, Artificial Sequence
  Description of Artificial Sequence: Synthetic oligonucleotide
uacaaguggcuaccgaguu

SEQ ID NO: 2481184 - RNA, 19 nt, Artificial Sequence
  Description of Artificial Sequence: Synthetic oligonucleotide
ggacuguucaauggaaagg

SEQ ID NO: 2481185 - RNA, 19 nt, Artificial Sequence
  Description of Artificial Sequence: Synthetic oligonucleotide
ugggacuguucaauggaaa

SEQ ID NO: 2481186 - RNA, 19 nt, Artificial Sequence
  Description of Artificial Sequence: Synthetic oligonucleotide
ugguuuuauucuguacucu

SEQ ID NO: 2481187 - RNA, 19 nt, Artificial Sequence
  Description of Artificial Sequence: Synthetic oligonucleotide
ucacuucccugcaacucca

SEQ ID NO: 2481188 - RNA, 19 nt, Artificial Sequence
  Description of Artificial Sequence: Synthetic oligonucleotide
cagcacggcacuacggcgg

SEQ ID NO: 2481189 - RNA, 19 nt, Artificial Sequence
  Description of Artificial Sequence: Synthetic oligonucleotide
acuguucaauggaaagggg

SEQ ID NO: 2481190 - RNA, 19 nt, Artificial Sequence
  Description of Artificial Sequence: Synthetic oligonucleotide
caauauaaaaccccauagu

SEQ ID NO: 2481191 - RNA, 19 nt, Artificial Sequence
  Description of Artificial Sequence: Synthetic oligonucleotide
agccaauggcuuuaauccu

SEQ ID NO: 2481192 - RNA, 19 nt, Artificial Sequence
  Description of Artificial Sequence: Synthetic oligonucleotide
ugccagugugguuuuguga

SEQ ID NO: 2481193 - RNA, 19 nt, Artificial Sequence
  Description of Artificial Sequence: Synthetic oligonucleotide
auuuaaccccaaaacuuca

SEQ ID NO: 2481194 - RNA, 19 nt, Artificial Sequence
  Description of Artificial Sequence: Synthetic oligonucleotide
ccgaguucuuaauuuaagc

SEQ ID NO: 2481195 - RNA, 19 nt, Artificial Sequence
  Description of Artificial Sequence: Synthetic oligonucleotide
cauucucuuggggacaaac

SEQ ID NO: 2481196 - RNA, 19 nt, Artificial Sequence
  Description of Artificial Sequence: Synthetic oligonucleotide
acuacggcgguauguggca

SEQ ID NO: 2481197 - RNA, 19 nt, Artificial Sequence
  Description of Artificial Sequence: Synthetic oligonucleotide
caaugggauugccagugug

SEQ ID NO: 2481198 - RNA, 19 nt, Artificial Sequence
  Description of Artificial Sequence: Synthetic oligonucleotide
guccucgucgcacuccccg

SEQ ID NO: 2481199 - RNA, 19 nt, Artificial Sequence
  Description of Artificial Sequence: Synthetic oligonucleotide
caguuuuccaaugaaaacu

SEQ ID NO: 2481200 - RNA, 19 nt, Artificial Sequence
  Description of Artificial Sequence: Synthetic oligonucleotide
caaaacuucaccgccaaua

SEQ ID NO: 2481201 - RNA, 19 nt, Artificial Sequence
  Description of Artificial Sequence: Synthetic oligonucleotide
caugccaugacggccuaag

SEQ ID NO: 2481202 - RNA, 19 nt, Artificial Sequence
  Description of Artificial Sequence: Synthetic oligonucleotide
acuuacauuuaaccccaaa

SEQ ID NO: 2481203 - RNA, 19 nt, Artificial Sequence
  Description of Artificial Sequence: Synthetic oligonucleotide
augacggccuaaguauaac

SEQ ID NO: 2481204 - RNA, 19 nt, Artificial Sequence
  Description of Artificial Sequence: Synthetic oligonucleotide
aacauccugcucgcccucg

SEQ ID NO: 2481205 - RNA, 19 nt, Artificial Sequence
  Description of Artificial Sequence: Synthetic oligonucleotide
uccaugagucaucuccaau

SEQ ID NO: 2481206 - RNA, 19 nt, Artificial Sequence
  Description of Artificial Sequence: Synthetic oligonucleotide
accgaguucuuaauuuaag

SEQ ID NO: 2481207 - RNA, 19 nt, Artificial Sequence
  Description of Artificial Sequence: Synthetic oligonucleotide
cuguacucuuguauucuuc

SEQ ID NO: 2481208 - RNA, 19 nt, Artificial Sequence
  Description of Artificial Sequence: Synthetic oligonucleotide
uugugaucuucaacauccu

SEQ ID NO: 2481209 - RNA, 19 nt, Artificial Sequence
  Description of Artificial Sequence: Synthetic oligonucleotide
agcacaucccgccgccgac

SEQ ID NO: 2481210 - RNA, 19 nt, Artificial Sequence
  Description of Artificial Sequence: Synthetic oligonucleotide
agucuucuggaaacagcac

SEQ ID NO: 2481211 - RNA, 19 nt, Artificial Sequence
  Description of Artificial Sequence: Synthetic oligonucleotide
ucuguacucuuguauucuu

SEQ ID NO: 2481212 - RNA, 19 nt, Artificial Sequence
  Description of Artificial Sequence: Synthetic oligonucleotide
gagaugacagagaaacaaa

SEQ ID NO: 2481213 - RNA, 19 nt, Artificial Sequence
  Description of Artificial Sequence: Synthetic oligonucleotide
ugcagagaugacagagaaa

SEQ ID NO: 2481214 - RNA, 19 nt, Artificial Sequence
  Description of Artificial Sequence: Synthetic oligonucleotide
cucuuggggacaaacucca

SEQ ID NO: 2481215 - RNA, 19 nt, Artificial Sequence
  Description of Artificial Sequence: Synthetic oligonucleotide
guggcuaccgaguucuuaa

SEQ ID NO: 2481216 - RNA, 19 nt, Artificial Sequence
  Description of Artificial Sequence: Synthetic oligonucleotide
uggacgaugcagagaugac

SEQ ID NO: 2481217 - RNA, 19 nt, Artificial Sequence
  Description of Artificial Sequence: Synthetic oligonucleotide
gacaaacuccaugccauga

SEQ ID NO: 2481218 - RNA, 19 nt, Artificial Sequence
  Description of Artificial Sequence: Synthetic oligonucleotide
uuuggacgaugcagagaug

SEQ ID NO: 2481219 - RNA, 19 nt, Artificial Sequence
  Description of Artificial Sequence: Synthetic oligonucleotide
aacuuauucuuagcugcuu

SEQ ID NO: 2481220 - RNA, 19 nt, Artificial Sequence
  Description of Artificial Sequence: Synthetic oligonucleotide
ggcgguauguggcagcuac

SEQ ID NO: 2481221 - RNA, 19 nt, Artificial Sequence
  Description of Artificial Sequence: Synthetic oligonucleotide
acuucccugcaacuccaug

SEQ ID NO: 2481222 - RNA, 19 nt, Artificial Sequence
  Description of Artificial Sequence: Synthetic oligonucleotide
auacaaagaaaugcuuguu

SEQ ID NO: 2481223 - RNA, 19 nt, Artificial Sequence
  Description of Artificial Sequence: Synthetic oligonucleotide
cuuuguuuuggacgaugca

SEQ ID NO: 2481224 - RNA, 19 nt, Artificial Sequence
  Description of Artificial Sequence: Synthetic oligonucleotide
auucuucaauacagguauc

SEQ ID NO: 2481225 - RNA, 19 nt, Artificial Sequence
  Description of Artificial Sequence: Synthetic oligonucleotide
auugccagugugguuuugu

SEQ ID NO: 2481226 - RNA, 19 nt, Artificial Sequence
  Description of Artificial Sequence: Synthetic oligonucleotide
caucacuucccugcaacuc

SEQ ID NO: 2481227 - RNA, 19 nt, Artificial Sequence
  Description of Artificial Sequence: Synthetic oligonucleotide
acuucaccgccaauaauaa

SEQ ID NO: 2481228 - RNA, 19 nt, Artificial Sequence
  Description of Artificial Sequence: Synthetic oligonucleotide
cccugcaacuccaugaguc

SEQ ID NO: 2481229 - RNA, 19 nt, Artificial Sequence
  Description of Artificial Sequence: Synthetic oligonucleotide
uacggcgguauguggcagc

SEQ ID NO: 2481230 - RNA, 19 nt, Artificial Sequence
  Description of Artificial Sequence: Synthetic oligonucleotide
gaucuucaacauccugcuc

SEQ ID NO: 2481231 - RNA, 19 nt, Artificial Sequence
  Description of Artificial Sequence: Synthetic oligonucleotide
acuccaugagucaucucca

SEQ ID NO: 2481232 - RNA, 19 nt, Artificial Sequence
  Description of Artificial Sequence: Synthetic oligonucleotide
accgaccguccgcacggcc

SEQ ID NO: 2481233 - RNA, 19 nt, Artificial Sequence
  Description of Artificial Sequence: Synthetic oligonucleotide
cuaccgaguucuuaauuua

SEQ ID NO: 2481234 - RNA, 19 nt, Artificial Sequence
  Description of Artificial Sequence: Synthetic oligonucleotide
guauguggcagcuaccauu

SEQ ID NO: 2481235 - RNA, 19 nt, Artificial Sequence
  Description of Artificial Sequence: Synthetic oligonucleotide
uggcagcuaccauuuacuu

SEQ ID NO: 2481236 - RNA, 19 nt, Artificial Sequence
  Description of Artificial Sequence: Synthetic oligonucleotide
ggggacaaacuccaugcca

SEQ ID NO: 2481237 - RNA, 19 nt, Artificial Sequence
  Description of Artificial Sequence: Synthetic oligonucleotide
uccucgucgcacuccccgc

SEQ ID NO: 2481238 - RNA, 19 nt, Artificial Sequence
  Description of Artificial Sequence: Synthetic oligonucleotide
ccaaugggacuguucaaug

SEQ ID NO: 2481239 - RNA, 19 nt, Artificial Sequence
  Description of Artificial Sequence: Synthetic oligonucleotide
caugugguuuuauucugua

SEQ ID NO: 2481240 - RNA, 19 nt, Artificial Sequence
  Description of Artificial Sequence: Synthetic oligonucleotide
ucccugcaacuccaugagu

SEQ ID NO: 2481241 - RNA, 19 nt, Artificial Sequence
  Description of Artificial Sequence: Synthetic oligonucleotide
caugacggccuaaguauaa

SEQ ID NO: 2481242 - RNA, 19 nt, Artificial Sequence
  Description of Artificial Sequence: Synthetic oligonucleotide
gugguuuugugaucuucaa

SEQ ID NO: 2481243 - RNA, 19 nt, Artificial Sequence
  Description of Artificial Sequence: Synthetic oligonucleotide
cucgucgcacuccccgccg

SEQ ID NO: 2481244 - RNA, 19 nt, Artificial Sequence
  Description of Artificial Sequence: Synthetic oligonucleotide
cagagaugacagagaaaca

SEQ ID NO: 2481245 - RNA, 19 nt, Artificial Sequence
  Description of Artificial Sequence: Synthetic oligonucleotide
uccgccugcucugccggcg

SEQ ID NO: 2481246 - RNA, 19 nt, Artificial Sequence
  Description of Artificial Sequence: Synthetic oligonucleotide
ccgccaauaauaaauauau

SEQ ID NO: 2481247 - RNA, 19 nt, Artificial Sequence
  Description of Artificial Sequence: Synthetic oligonucleotide
ggcacuacggcgguaugug

SEQ ID NO: 2481248 - RNA, 19 nt, Artificial Sequence
  Description of Artificial Sequence: Synthetic oligonucleotide
acaucccgccgccgacacc

SEQ ID NO: 2481249 - RNA, 19 nt, Artificial Sequence
  Description of Artificial Sequence: Synthetic oligonucleotide
gguggaacaguuuuccaau

SEQ ID NO: 2481250 - RNA, 19 nt, Artificial Sequence
  Description of Artificial Sequence: Synthetic oligonucleotide
ucuuggggacaaacuccau

SEQ ID NO: 2481251 - RNA, 19 nt, Artificial Sequence
  Description of Artificial Sequence: Synthetic oligonucleotide
ggacaaacuccaugccaug

SEQ ID NO: 2481252 - RNA, 19 nt, Artificial Sequence
  Description of Artificial Sequence: Synthetic oligonucleotide
ugcucugccggcgccgccc

SEQ ID NO: 2481253 - RNA, 19 nt, Artificial Sequence
  Description of Artificial Sequence: Synthetic oligonucleotide
accuggcuagccaauggcu

SEQ ID NO: 2481254 - RNA, 19 nt, Artificial Sequence
  Description of Artificial Sequence: Synthetic oligonucleotide
augccaugacggccuaagu

SEQ ID NO: 2481255 - RNA, 19 nt, Artificial Sequence
  Description of Artificial Sequence: Synthetic oligonucleotide
agcacggcacuacggcggu

SEQ ID NO: 2481256 - RNA, 19 nt, Artificial Sequence
  Description of Artificial Sequence: Synthetic oligonucleotide
augcuuguuucaauauaaa

SEQ ID NO: 2481257 - RNA, 19 nt, Artificial Sequence
  Description of Artificial Sequence: Synthetic oligonucleotide
ucgucgcacuccccgccgc

SEQ ID NO: 2481258 - RNA, 19 nt, Artificial Sequence
  Description of Artificial Sequence: Synthetic oligonucleotide
ggacgaugcagagaugaca

SEQ ID NO: 2481259 - RNA, 19 nt, Artificial Sequence
  Description of Artificial Sequence: Synthetic oligonucleotide
uggcuaccgaguucuuaau

SEQ ID NO: 2481260 - RNA, 19 nt, Artificial Sequence
  Description of Artificial Sequence: Synthetic oligonucleotide
ucguccugccgccgccugc

SEQ ID NO: 2481261 - RNA, 19 nt, Artificial Sequence
  Description of Artificial Sequence: Synthetic oligonucleotide
ccuaaguauaacacauaaa

SEQ ID NO: 2481262 - RNA, 19 nt, Artificial Sequence
  Description of Artificial Sequence: Synthetic oligonucleotide
gcacuacggcgguaugugg

SEQ ID NO: 2481263 - RNA, 19 nt, Artificial Sequence
  Description of Artificial Sequence: Synthetic oligonucleotide
ucgcacuccccgccgccgc

SEQ ID NO: 2481264 - RNA, 19 nt, Artificial Sequence
  Description of Artificial Sequence: Synthetic oligonucleotide
uuacuuuguuuuggacgau

SEQ ID NO: 2481265 - RNA, 19 nt, Artificial Sequence
  Description of Artificial Sequence: Synthetic oligonucleotide
gagucaucuccaaugggau

SEQ ID NO: 2481266 - RNA, 19 nt, Artificial Sequence
  Description of Artificial Sequence: Synthetic oligonucleotide
ccuuugucuuccaaaaugu

SEQ ID NO: 2481267 - RNA, 19 nt, Artificial Sequence
  Description of Artificial Sequence: Synthetic oligonucleotide
cacaucccgccgccgacac

SEQ ID NO: 2481268 - RNA, 19 nt, Artificial Sequence
  Description of Artificial Sequence: Synthetic oligonucleotide
ugggauugccagugugguu

SEQ ID NO: 2481269 - RNA, 19 nt, Artificial Sequence
  Description of Artificial Sequence: Synthetic oligonucleotide
cuucaacauccugcucgcc

SEQ ID NO: 2481270 - RNA, 19 nt, Artificial Sequence
  Description of Artificial Sequence: Synthetic oligonucleotide
acagagaaacaaacaucuu

SEQ ID NO: 2481271 - RNA, 19 nt, Artificial Sequence
  Description of Artificial Sequence: Synthetic oligonucleotide
gcuaccgaguucuuaauuu

SEQ ID NO: 2481272 - RNA, 19 nt, Artificial Sequence
  Description of Artificial Sequence: Synthetic oligonucleotide
gccagugugguuuugugau

SEQ ID NO: 2481273 - RNA, 19 nt, Artificial Sequence
  Description of Artificial Sequence: Synthetic oligonucleotide
agugugguuuugugaucuu

SEQ ID NO: 2481274 - RNA, 19 nt, Artificial Sequence
  Description of Artificial Sequence: Synthetic oligonucleotide
ucgcccucguccugccgcc

SEQ ID NO: 2481275 - RNA, 19 nt, Artificial Sequence
  Description of Artificial Sequence: Synthetic oligonucleotide
guggcagcuaccauuuacu

SEQ ID NO: 2481276 - RNA, 19 nt, Artificial Sequence
  Description of Artificial Sequence: Synthetic oligonucleotide
guuuuccaaugaaaacuua

SEQ ID NO: 2481277 - RNA, 19 nt, Artificial Sequence
  Description of Artificial Sequence: Synthetic oligonucleotide
gauugccagugugguuuug

SEQ ID NO: 2481278 - RNA, 19 nt, Artificial Sequence
  Description of Artificial Sequence: Synthetic oligonucleotide
aguggcuaccgaguucuua

SEQ ID NO: 2481279 - RNA, 19 nt, Artificial Sequence
  Description of Artificial Sequence: Synthetic oligonucleotide
cuucaccgccaauaauaaa

SEQ ID NO: 2481280 - RNA, 19 nt, Artificial Sequence
  Description of Artificial Sequence: Synthetic oligonucleotide
ccgaccguccgcacggccg

SEQ ID NO: 2481281 - RNA, 19 nt, Artificial Sequence
  Description of Artificial Sequence: Synthetic oligonucleotide
aaaccccauaguacacauu

SEQ ID NO: 2481282 - RNA, 19 nt, Artificial Sequence
  Description of Artificial Sequence: Synthetic oligonucleotide
cuacggcgguauguggcag

SEQ ID NO: 2481283 - RNA, 19 nt, Artificial Sequence
  Description of Artificial Sequence: Synthetic oligonucleotide
cuuugucuuccaaaauguu

SEQ ID NO: 2481284 - RNA, 19 nt, Artificial Sequence
  Description of Artificial Sequence: Synthetic oligonucleotide
aacuuacauuuaaccccaa

SEQ ID NO: 2481285 - RNA, 19 nt, Artificial Sequence
  Description of Artificial Sequence: Synthetic oligonucleotide
gucgcacuccccgccgccg

SEQ ID NO: 2481286 - RNA, 19 nt, Artificial Sequence
  Description of Artificial Sequence: Synthetic oligonucleotide
acggcgguauguggcagcu

SEQ ID NO: 2481287 - RNA, 19 nt, Artificial Sequence
  Description of Artificial Sequence: Synthetic oligonucleotide
cuccaugagucaucuccaa

SEQ ID NO: 2481288 - RNA, 19 nt, Artificial Sequence
  Description of Artificial Sequence: Synthetic oligonucleotide
ugcucgcccucguccugcc

SEQ ID NO: 2481289 - RNA, 19 nt, Artificial Sequence
  Description of Artificial Sequence: Synthetic oligonucleotide
cugcucgcccucguccugc

SEQ ID NO: 2481290 - RNA, 19 nt, Artificial Sequence
  Description of Artificial Sequence: Synthetic oligonucleotide
ccugcaacuccaugaguca

SEQ ID NO: 2481291 - RNA, 19 nt, Artificial Sequence
  Description of Artificial Sequence: Synthetic oligonucleotide
cauccugcucgcccucguc

SEQ ID NO: 2481292 - RNA, 19 nt, Artificial Sequence
  Description of Artificial Sequence: Synthetic oligonucleotide
acggcacuacggcgguaug

SEQ ID NO: 2481293 - RNA, 19 nt, Artificial Sequence
  Description of Artificial Sequence: Synthetic oligonucleotide
uccaugccaugacggccua

SEQ ID NO: 2481294 - RNA, 19 nt, Artificial Sequence
  Description of Artificial Sequence: Synthetic oligonucleotide
ucugccggcgccgcccggu

SEQ ID NO: 2481295 - RNA, 19 nt, Artificial Sequence
  Description of Artificial Sequence: Synthetic oligonucleotide
ccccauaguacacauuaaa

SEQ ID NO: 2481296 - RNA, 19 nt, Artificial Sequence
  Description of Artificial Sequence: Synthetic oligonucleotide
gggauugccagugugguuu

SEQ ID NO: 2481297 - RNA, 19 nt, Artificial Sequence
  Description of Artificial Sequence: Synthetic oligonucleotide
ggccgagcacaucccgccg

SEQ ID NO: 2481298 - RNA, 19 nt, Artificial Sequence
  Description of Artificial Sequence: Synthetic oligonucleotide
gggacaaacuccaugccau

SEQ ID NO: 2481299 - RNA, 19 nt, Artificial Sequence
  Description of Artificial Sequence: Synthetic oligonucleotide
ggcgccgccccgcagcagc

SEQ ID NO: 2481300 - RNA, 19 nt, Artificial Sequence
  Description of Artificial Sequence: Synthetic oligonucleotide
gccgacaccgaccguccgc

SEQ ID NO: 2481301 - RNA, 19 nt, Artificial Sequence
  Description of Artificial Sequence: Synthetic oligonucleotide
gccgagcacaucccgccgc

SEQ ID NO: 2481302 - RNA, 19 nt, Artificial Sequence
  Description of Artificial Sequence: Synthetic oligonucleotide
accccauaguacacauuaa

SEQ ID NO: 2481303 - RNA, 19 nt, Artificial Sequence
  Description of Artificial Sequence: Synthetic oligonucleotide
gggguggaacaguuuucca

SEQ ID NO: 2481304 - RNA, 19 nt, Artificial Sequence
  Description of Artificial Sequence: Synthetic oligonucleotide
ggcuuuaauccuagaauau

SEQ ID NO: 2481305 - RNA, 19 nt, Artificial Sequence
  Description of Artificial Sequence: Synthetic oligonucleotide
ccagugugguuuugugauc

SEQ ID NO: 2481306 - RNA, 19 nt, Artificial Sequence
  Description of Artificial Sequence: Synthetic oligonucleotide
caccgccaauaauaaauau

SEQ ID NO: 2481307 - RNA, 19 nt, Artificial Sequence
  Description of Artificial Sequence: Synthetic oligonucleotide
gccaauggcuuuaauccua

SEQ ID NO: 2481308 - RNA, 19 nt, Artificial Sequence
  Description of Artificial Sequence: Synthetic oligonucleotide
gcaacuccaugagucaucu

SEQ ID NO: 2481309 - RNA, 19 nt, Artificial Sequence
  Description of Artificial Sequence: Synthetic oligonucleotide
cucguccugccgccgccug

SEQ ID NO: 2481310 - RNA, 19 nt, Artificial Sequence
  Description of Artificial Sequence: Synthetic oligonucleotide
ccgccgccgacaccgaccg

SEQ ID NO: 2481311 - RNA, 19 nt, Artificial Sequence
  Description of Artificial Sequence: Synthetic oligonucleotide
cuccgccugcucugccggc

SEQ ID NO: 2481312 - RNA, 19 nt, Artificial Sequence
  Description of Artificial Sequence: Synthetic oligonucleotide
guccgcacggccgccgcug

SEQ ID NO: 2481313 - RNA, 19 nt, Artificial Sequence
  Description of Artificial Sequence: Synthetic oligonucleotide
ucccgccgccgacaccgac

SEQ ID NO: 2481314 - RNA, 19 nt, Artificial Sequence
  Description of Artificial Sequence: Synthetic oligonucleotide
ggcagcuaccauuuacuuu

SEQ ID NO: 2481315 - RNA, 19 nt, Artificial Sequence
  Description of Artificial Sequence: Synthetic oligonucleotide
cacuccccgccgccgccgg

SEQ ID NO: 2481316 - RNA, 19 nt, Artificial Sequence
  Description of Artificial Sequence: Synthetic oligonucleotide
ccgagcacaucccgccgcc

SEQ ID NO: 2481317 - RNA, 19 nt, Artificial Sequence
  Description of Artificial Sequence: Synthetic oligonucleotide
ggggcucccgcuccuccgc

SEQ ID NO: 2481318 - RNA, 19 nt, Artificial Sequence
  Description of Artificial Sequence: Synthetic oligonucleotide
ccggccgagcacaucccgc

SEQ ID NO: 2481319 - RNA, 19 nt, Artificial Sequence
  Description of Artificial Sequence: Synthetic oligonucleotide
cccgccgccgacaccgacc

SEQ ID NO: 2481320 - RNA, 19 nt, Artificial Sequence
  Description of Artificial Sequence: Synthetic oligonucleotide
ccccaaaacuucaccgcca

SEQ ID NO: 2481321 - RNA, 19 nt, Artificial Sequence
  Description of Artificial Sequence: Synthetic oligonucleotide
gccgccgacaccgaccguc

SEQ ID NO: 2481322 - RNA, 19 nt, Artificial Sequence
  Description of Artificial Sequence: Synthetic oligonucleotide
gccacgggcucgcccgggg

SEQ ID NO: 2481323 - RNA, 19 nt, Artificial Sequence
  Description of Artificial Sequence: Synthetic oligonucleotide
cggccgagcacaucccgcc

SEQ ID NO: 2481324 - RNA, 19 nt, Artificial Sequence
  Description of Artificial Sequence: Synthetic oligonucleotide
cccggccgagcacaucccg

SEQ ID NO: 2481325 - RNA, 19 nt, Artificial Sequence
  Description of Artificial Sequence: Synthetic oligonucleotide
gguauguggcagcuaccau

SEQ ID NO: 2481326 - RNA, 19 nt, Artificial Sequence
  Description of Artificial Sequence: Synthetic oligonucleotide
ccgccgacaccgaccgucc

SEQ ID NO: 2481327 - RNA, 19 nt, Artificial Sequence
  Description of Artificial Sequence: Synthetic oligonucleotide
gcgguauguggcagcuacc

SEQ ID NO: 2481328 - RNA, 19 nt, Artificial Sequence
  Description of Artificial Sequence: Synthetic oligonucleotide
acggccgccgcuggccaca

SEQ ID NO: 2481329 - RNA, 19 nt, Artificial Sequence
  Description of Artificial Sequence: Synthetic oligonucleotide
ccaugacggccuaaguaua

SEQ ID NO: 2481330 - RNA, 19 nt, Artificial Sequence
  Description of Artificial Sequence: Synthetic oligonucleotide
ggccuaaguauaacacaua

SEQ ID NO: 2481331 - RNA, 19 nt, Artificial Sequence
  Description of Artificial Sequence: Synthetic oligonucleotide
gcagcagcuccccggccga

SEQ ID NO: 2481332 - RNA, 19 nt, Artificial Sequence
  Description of Artificial Sequence: Synthetic oligonucleotide
ggcuaccgaguucuuaauu

SEQ ID NO: 2481333 - RNA, 19 nt, Artificial Sequence
  Description of Artificial Sequence: Synthetic oligonucleotide
aaguggcuaccgaguucuu

SEQ ID NO: 2481334 - RNA, 19 nt, Artificial Sequence
  Description of Artificial Sequence: Synthetic oligonucleotide
cggccuaaguauaacacau

SEQ ID NO: 2481335 - RNA, 19 nt, Artificial Sequence
  Description of Artificial Sequence: Synthetic oligonucleotide
cacggccgccgcuggccac

SEQ ID NO: 2481336 - RNA, 19 nt, Artificial Sequence
  Description of Artificial Sequence: Synthetic oligonucleotide
cugcaacuccaugagucau

SEQ ID NO: 2481337 - RNA, 19 nt, Artificial Sequence
  Description of Artificial Sequence: Synthetic oligonucleotide
cgguauguggcagcuacca

SEQ ID NO: 2481338 - RNA, 19 nt, Artificial Sequence
  Description of Artificial Sequence: Synthetic oligonucleotide
gaccguccgcacggccgcc

SEQ ID NO: 2481339 - RNA, 19 nt, Artificial Sequence
  Description of Artificial Sequence: Synthetic oligonucleotide
cucugccggcgccgcccgg

SEQ ID NO: 2481340 - RNA, 19 nt, Artificial Sequence
  Description of Artificial Sequence: Synthetic oligonucleotide
cagcuaccauuuacuuugu

SEQ ID NO: 2481341 - RNA, 19 nt, Artificial Sequence
  Description of Artificial Sequence: Synthetic oligonucleotide
cgaccguccgcacggccgc

SEQ ID NO: 2481342 - RNA, 19 nt, Artificial Sequence
  Description of Artificial Sequence: Synthetic oligonucleotide
cacggcacuacggcgguau

SEQ ID NO: 2481343 - RNA, 19 nt, Artificial Sequence
  Description of Artificial Sequence: Synthetic oligonucleotide
cguccugccgccgccugcg

SEQ ID NO: 2481344 - RNA, 19 nt, Artificial Sequence
  Description of Artificial Sequence: Synthetic oligonucleotide
gggcucccgcuccuccgcc

SEQ ID NO: 2481345 - RNA, 19 nt, Artificial Sequence
  Description of Artificial Sequence: Synthetic oligonucleotide
caccgaccguccgcacggc

SEQ ID NO: 2481346 - RNA, 19 nt, Artificial Sequence
  Description of Artificial Sequence: Synthetic oligonucleotide
ccaucacuucccugcaacu

SEQ ID NO: 2481347 - RNA, 19 nt, Artificial Sequence
  Description of Artificial Sequence: Synthetic oligonucleotide
gcacuccccgccgccgccg

SEQ ID NO: 2481348 - RNA, 19 nt, Artificial Sequence
  Description of Artificial Sequence: Synthetic oligonucleotide
ccuggcuagccaauggcuu

SEQ ID NO: 2481349 - RNA, 19 nt, Artificial Sequence
  Description of Artificial Sequence: Synthetic oligonucleotide
cccucguccugccgccgcc

SEQ ID NO: 2481350 - RNA, 19 nt, Artificial Sequence
  Description of Artificial Sequence: Synthetic oligonucleotide
ccgccgcuggccacaccgg

SEQ ID NO: 2481351 - RNA, 19 nt, Artificial Sequence
  Description of Artificial Sequence: Synthetic oligonucleotide
cccaaugggacuguucaau

SEQ ID NO: 2481352 - RNA, 19 nt, Artificial Sequence
  Description of Artificial Sequence: Synthetic oligonucleotide
cugccggcgccgcccgguc

SEQ ID NO: 2481353 - RNA, 19 nt, Artificial Sequence
  Description of Artificial Sequence: Synthetic oligonucleotide
ccgacaccgaccguccgca

SEQ ID NO: 2481354 - RNA, 19 nt, Artificial Sequence
  Description of Artificial Sequence: Synthetic oligonucleotide
gguccucgucgcacucccc

SEQ ID NO: 2481355 - RNA, 19 nt, Artificial Sequence
  Description of Artificial Sequence: Synthetic oligonucleotide
cgccgcuggccacaccggg

SEQ ID NO: 2481356 - RNA, 19 nt, Artificial Sequence
  Description of Artificial Sequence: Synthetic oligonucleotide
gcacaucccgccgccgaca

SEQ ID NO: 2481357 - RNA, 19 nt, Artificial Sequence
  Description of Artificial Sequence: Synthetic oligonucleotide
ccccggccgagcacauccc

SEQ ID NO: 2481358 - RNA, 19 nt, Artificial Sequence
  Description of Artificial Sequence: Synthetic oligonucleotide
ggauugccagugugguuuu

SEQ ID NO: 2481359 - RNA, 19 nt, Artificial Sequence
  Description of Artificial Sequence: Synthetic oligonucleotide
gcgccacgggcucgcccgg

SEQ ID NO: 2481360 - RNA, 19 nt, Artificial Sequence
  Description of Artificial Sequence: Synthetic oligonucleotide
cgucgcacuccccgccgcc

SEQ ID NO: 2481361 - RNA, 19 nt, Artificial Sequence
  Description of Artificial Sequence: Synthetic oligonucleotide
ggcuagccaauggcuuuaa

SEQ ID NO: 2481362 - RNA, 19 nt, Artificial Sequence
  Description of Artificial Sequence: Synthetic oligonucleotide
ccccaaugggacuguucaa

SEQ ID NO: 2481363 - RNA, 19 nt, Artificial Sequence
  Description of Artificial Sequence: Synthetic oligonucleotide
gcuagccaauggcuuuaau

SEQ ID NO: 2481364 - RNA, 19 nt, Artificial Sequence
  Description of Artificial Sequence: Synthetic oligonucleotide
cacuucccugcaacuccau

SEQ ID NO: 2481365 - RNA, 19 nt, Artificial Sequence
  Description of Artificial Sequence: Synthetic oligonucleotide
cgagcacaucccgccgccg

SEQ ID NO: 2481366 - RNA, 19 nt, Artificial Sequence
  Description of Artificial Sequence: Synthetic oligonucleotide
cuccccggccgagcacauc

SEQ ID NO: 2481367 - RNA, 19 nt, Artificial Sequence
  Description of Artificial Sequence: Synthetic oligonucleotide
ccguccgcacggccgccgc

SEQ ID NO: 2481368 - RNA, 19 nt, Artificial Sequence
  Description of Artificial Sequence: Synthetic oligonucleotide
ccaaugggauugccagugu

SEQ ID NO: 2481369 - RNA, 19 nt, Artificial Sequence
  Description of Artificial Sequence: Synthetic oligonucleotide
cgccgacaccgaccguccg

SEQ ID NO: 2481370 - RNA, 19 nt, Artificial Sequence
  Description of Artificial Sequence: Synthetic oligonucleotide
cgccaauaauaaauauauu

SEQ ID NO: 2481371 - RNA, 19 nt, Artificial Sequence
  Description of Artificial Sequence: Synthetic oligonucleotide
cgcccgguccucgucgcac

SEQ ID NO: 2481372 - RNA, 19 nt, Artificial Sequence
  Description of Artificial Sequence: Synthetic oligonucleotide
ccgcacggccgccgcuggc

SEQ ID NO: 2481373 - RNA, 19 nt, Artificial Sequence
  Description of Artificial Sequence: Synthetic oligonucleotide
cgacaccgaccguccgcac

SEQ ID NO: 2481374 - RNA, 19 nt, Artificial Sequence
  Description of Artificial Sequence: Synthetic oligonucleotide
gcgccgcccgguccucguc

SEQ ID NO: 2481375 - RNA, 19 nt, Artificial Sequence
  Description of Artificial Sequence: Synthetic oligonucleotide
ggcgccgcccgguccucgu

SEQ ID NO: 2481376 - RNA, 19 nt, Artificial Sequence
  Description of Artificial Sequence: Synthetic oligonucleotide
cgcccucguccugccgccg

SEQ ID NO: 2481377 - RNA, 19 nt, Artificial Sequence
  Description of Artificial Sequence: Synthetic oligonucleotide
ccaugccaugacggccuaa

SEQ ID NO: 2481378 - RNA, 19 nt, Artificial Sequence
  Description of Artificial Sequence: Synthetic oligonucleotide
cgccugcgccacgggcucg

SEQ ID NO: 2481379 - RNA, 19 nt, Artificial Sequence
  Description of Artificial Sequence: Synthetic oligonucleotide
cggcacuacggcgguaugu

SEQ ID NO: 2481380 - RNA, 19 nt, Artificial Sequence
  Description of Artificial Sequence: Synthetic oligonucleotide
ccgcccgguccucgucgca

SEQ ID NO: 2481381 - RNA, 19 nt, Artificial Sequence
  Description of Artificial Sequence: Synthetic oligonucleotide
gcacggcacuacggcggua

SEQ ID NO: 2481382 - RNA, 19 nt, Artificial Sequence
  Description of Artificial Sequence: Synthetic oligonucleotide
cggcgccgcccgguccucg

SEQ ID NO: 2481383 - RNA, 19 nt, Artificial Sequence
  Description of Artificial Sequence: Synthetic oligonucleotide
gcuccccggccgagcacau

SEQ ID NO: 2481384 - RNA, 19 nt, Artificial Sequence
  Description of Artificial Sequence: Synthetic oligonucleotide
ccggcgccgcccgguccuc

SEQ ID NO: 2481385 - RNA, 19 nt, Artificial Sequence
  Description of Artificial Sequence: Synthetic oligonucleotide
cggccgccgcuggccacac

SEQ ID NO: 2481386 - RNA, 19 nt, Artificial Sequence
  Description of Artificial Sequence: Synthetic oligonucleotide
cggcgguauguggcagcua

SEQ ID NO: 2481387 - RNA, 19 nt, Artificial Sequence
  Description of Artificial Sequence: Synthetic oligonucleotide
cgccgccgacaccgaccgu

SEQ ID NO: 2481388 - RNA, 19 nt, Artificial Sequence
  Description of Artificial Sequence: Synthetic oligonucleotide
aagaagaucgaccccaagc

SEQ ID NO: 2481389 - RNA, 19 nt, Artificial Sequence
  Description of Artificial Sequence: Synthetic oligonucleotide
aaacggguccuuuagaugg

SEQ ID NO: 2481390 - RNA, 19 nt, Artificial Sequence
  Description of Artificial Sequence: Synthetic oligonucleotide
aucgccaugaguuugaagg

SEQ ID NO: 2481391 - RNA, 19 nt, Artificial Sequence
  Description of Artificial Sequence: Synthetic oligonucleotide
augugaagaagaucgaccc

SEQ ID NO: 2481392 - RNA, 19 nt, Artificial Sequence
  Description of Artificial Sequence: Synthetic oligonucleotide
ugaugcuuuucauuuaucg

SEQ ID NO: 2481393 - RNA, 19 nt, Artificial Sequence
  Description of Artificial Sequence: Synthetic oligonucleotide
aggucuaagauucucuggc

SEQ ID NO: 2481394 - RNA, 19 nt, Artificial Sequence
  Description of Artificial Sequence: Synthetic oligonucleotide
uaugugaagaagaucgacc

SEQ ID NO: 2481395 - RNA, 19 nt, Artificial Sequence
  Description of Artificial Sequence: Synthetic oligonucleotide
agagguauaccucugaaga

SEQ ID NO: 2481396 - RNA, 19 nt, Artificial Sequence
  Description of Artificial Sequence: Synthetic oligonucleotide
uaacucuccaccuuugcgg

SEQ ID NO: 2481397 - RNA, 19 nt, Artificial Sequence
  Description of Artificial Sequence: Synthetic oligonucleotide
uuuagauggcgcuucagcc

SEQ ID NO: 2481398 - RNA, 19 nt, Artificial Sequence
  Description of Artificial Sequence: Synthetic oligonucleotide
agaaaggcagggcagacuc

SEQ ID NO: 2481399 - RNA, 19 nt, Artificial Sequence
  Description of Artificial Sequence: Synthetic oligonucleotide
aaggcacaagcugauaagc

SEQ ID NO: 2481400 - RNA, 19 nt, Artificial Sequence
  Description of Artificial Sequence: Synthetic oligonucleotide
gucacucagaaucacaucc

SEQ ID NO: 2481401 - RNA, 19 nt, Artificial Sequence
  Description of Artificial Sequence: Synthetic oligonucleotide
aaaaguugcuccuuccaga

SEQ ID NO: 2481402 - RNA, 19 nt, Artificial Sequence
  Description of Artificial Sequence: Synthetic oligonucleotide
aagagguauaccucugaag

SEQ ID NO: 2481403 - RNA, 19 nt, Artificial Sequence
  Description of Artificial Sequence: Synthetic oligonucleotide
agacucacugcucacugcc

SEQ ID NO: 2481404 - RNA, 19 nt, Artificial Sequence
  Description of Artificial Sequence: Synthetic oligonucleotide
gauaagccugucgugaucg

SEQ ID NO: 2481405 - RNA, 19 nt, Artificial Sequence
  Description of Artificial Sequence: Synthetic oligonucleotide
aagcugauaagccugucgu

SEQ ID NO: 2481406 - RNA, 19 nt, Artificial Sequence
  Description of Artificial Sequence: Synthetic oligonucleotide
uccacaaugcaucuuagau

SEQ ID NO: 2481407 - RNA, 19 nt, Artificial Sequence
  Description of Artificial Sequence: Synthetic oligonucleotide
uuugcggccuucacaaacg

SEQ ID NO: 2481408 - RNA, 19 nt, Artificial Sequence
  Description of Artificial Sequence: Synthetic oligonucleotide
ucuaagauucucuggcgag

SEQ ID NO: 2481409 - RNA, 19 nt, Artificial Sequence
  Description of Artificial Sequence: Synthetic oligonucleotide
gaaaguacucccagaaagg

SEQ ID NO: 2481410 - RNA, 19 nt, Artificial Sequence
  Description of Artificial Sequence: Synthetic oligonucleotide
agaagaucgaccccaagca

SEQ ID NO: 2481411 - RNA, 19 nt, Artificial Sequence
  Description of Artificial Sequence: Synthetic oligonucleotide
auguccacaaggguaaggc

SEQ ID NO: 2481412 - RNA, 19 nt, Artificial Sequence
  Description of Artificial Sequence: Synthetic oligonucleotide
cuuuagauggcgcuucagc

SEQ ID NO: 2481413 - RNA, 19 nt, Artificial Sequence
  Description of Artificial Sequence: Synthetic oligonucleotide
uuucauuuaucgccaugag

SEQ ID NO: 2481414 - RNA, 19 nt, Artificial Sequence
  Description of Artificial Sequence: Synthetic oligonucleotide
ucacaaacggguccuuuag

SEQ ID NO: 2481415 - RNA, 19 nt, Artificial Sequence
  Description of Artificial Sequence: Synthetic oligonucleotide
gagagcugcagucugugcc

SEQ ID NO: 2481416 - RNA, 19 nt, Artificial Sequence
  Description of Artificial Sequence: Synthetic oligonucleotide
guaacucuccaccuuugcg

SEQ ID NO: 2481417 - RNA, 19 nt, Artificial Sequence
  Description of Artificial Sequence: Synthetic oligonucleotide
uuaaggggaacgccuacca

SEQ ID NO: 2481418 - RNA, 19 nt, Artificial Sequence
  Description of Artificial Sequence: Synthetic oligonucleotide
uuuaucgccaugaguuuga

SEQ ID NO: 2481419 - RNA, 19 nt, Artificial Sequence
  Description of Artificial Sequence: Synthetic oligonucleotide
agaaucacauccgcuuucc

SEQ ID NO: 2481420 - RNA, 19 nt, Artificial Sequence
  Description of Artificial Sequence: Synthetic oligonucleotide
uccgguuucacgacccuag

SEQ ID NO: 2481421 - RNA, 19 nt, Artificial Sequence
  Description of Artificial Sequence: Synthetic oligonucleotide
aaucacauccgcuuuccuu

SEQ ID NO: 2481422 - RNA, 19 nt, Artificial Sequence
  Description of Artificial Sequence: Synthetic oligonucleotide
aagacuccuuccugcuggc

SEQ ID NO: 2481423 - RNA, 19 nt, Artificial Sequence
  Description of Artificial Sequence: Synthetic oligonucleotide
uccgcuuuccuucugggaa

SEQ ID NO: 2481424 - RNA, 19 nt, Artificial Sequence
  Description of Artificial Sequence: Synthetic oligonucleotide
auauccacaaugcaucuua

SEQ ID NO: 2481425 - RNA, 19 nt, Artificial Sequence
  Description of Artificial Sequence: Synthetic oligonucleotide
agaaaaguugcuccuucca

SEQ ID NO: 2481426 - RNA, 19 nt, Artificial Sequence
  Description of Artificial Sequence: Synthetic oligonucleotide
cucucaggaaaguacuccc

SEQ ID NO: 2481427 - RNA, 19 nt, Artificial Sequence
  Description of Artificial Sequence: Synthetic oligonucleotide
ugcaucuuagaugccagcc

SEQ ID NO: 2481428 - RNA, 19 nt, Artificial Sequence
  Description of Artificial Sequence: Synthetic oligonucleotide
ugaaccuuaaggggaacgc

SEQ ID NO: 2481429 - RNA, 19 nt, Artificial Sequence
  Description of Artificial Sequence: Synthetic oligonucleotide
guacuguguggcuaagagg

SEQ ID NO: 2481430 - RNA, 19 nt, Artificial Sequence
  Description of Artificial Sequence: Synthetic oligonucleotide
uaagagguauaccucugaa

SEQ ID NO: 2481431 - RNA, 19 nt, Artificial Sequence
  Description of Artificial Sequence: Synthetic oligonucleotide
gaugccagccacucucagg

SEQ ID NO: 2481432 - RNA, 19 nt, Artificial Sequence
  Description of Artificial Sequence: Synthetic oligonucleotide
acgccuaccagcuucagau

SEQ ID NO: 2481433 - RNA, 19 nt, Artificial Sequence
  Description of Artificial Sequence: Synthetic oligonucleotide
acaaacggguccuuuagau

SEQ ID NO: 2481434 - RNA, 19 nt, Artificial Sequence
  Description of Artificial Sequence: Synthetic oligonucleotide
aagauucucuggcgaguuc

SEQ ID NO: 2481435 - RNA, 19 nt, Artificial Sequence
  Description of Artificial Sequence: Synthetic oligonucleotide
cacauagcccacaggagag

SEQ ID NO: 2481436 - RNA, 19 nt, Artificial Sequence
  Description of Artificial Sequence: Synthetic oligonucleotide
aagccugucgugaucgagg

SEQ ID NO: 2481437 - RNA, 19 nt, Artificial Sequence
  Description of Artificial Sequence: Synthetic oligonucleotide
uuucuuccggcccagguuu

SEQ ID NO: 2481438 - RNA, 19 nt, Artificial Sequence
  Description of Artificial Sequence: Synthetic oligonucleotide
aaguugcuccuuccagagg

SEQ ID NO: 2481439 - RNA, 19 nt, Artificial Sequence
  Description of Artificial Sequence: Synthetic oligonucleotide
uauaccucugaagacuccu

SEQ ID NO: 2481440 - RNA, 19 nt, Artificial Sequence
  Description of Artificial Sequence: Synthetic oligonucleotide
gaauuccugggucagucuc

SEQ ID NO: 2481441 - RNA, 19 nt, Artificial Sequence
  Description of Artificial Sequence: Synthetic oligonucleotide
gagguauaccucugaagac

SEQ ID NO: 2481442 - RNA, 19 nt, Artificial Sequence
  Description of Artificial Sequence: Synthetic oligonucleotide
augcaucuuagaugccagc

SEQ ID NO: 2481443 - RNA, 19 nt, Artificial Sequence
  Description of Artificial Sequence: Synthetic oligonucleotide
cuuugcggccuucacaaac

SEQ ID NO: 2481444 - RNA, 19 nt, Artificial Sequence
  Description of Artificial Sequence: Synthetic oligonucleotide
ucaggaaaguacucccaga

SEQ ID NO: 2481445 - RNA, 19 nt, Artificial Sequence
  Description of Artificial Sequence: Synthetic oligonucleotide
agucguguggaaucgcuga

SEQ ID NO: 2481446 - RNA, 19 nt, Artificial Sequence
  Description of Artificial Sequence: Synthetic oligonucleotide
auuuaucgccaugaguuug

SEQ ID NO: 2481447 - RNA, 19 nt, Artificial Sequence
  Description of Artificial Sequence: Synthetic oligonucleotide
aaccuuaaggggaacgccu

SEQ ID NO: 2481448 - RNA, 19 nt, Artificial Sequence
  Description of Artificial Sequence: Synthetic oligonucleotide
agguauaccucugaagacu

SEQ ID NO: 2481449 - RNA, 19 nt, Artificial Sequence
  Description of Artificial Sequence: Synthetic oligonucleotide
uucacgacccuaguguucu

SEQ ID NO: 2481450 - RNA, 19 nt, Artificial Sequence
  Description of Artificial Sequence: Synthetic oligonucleotide
uguggcguugacucucugc

SEQ ID NO: 2481451 - RNA, 19 nt, Artificial Sequence
  Description of Artificial Sequence: Synthetic oligonucleotide
gaagaucgaccccaagcac

SEQ ID NO: 2481452 - RNA, 19 nt, Artificial Sequence
  Description of Artificial Sequence: Synthetic oligonucleotide
uuuucuuccggcccagguu

SEQ ID NO: 2481453 - RNA, 19 nt, Artificial Sequence
  Description of Artificial Sequence: Synthetic oligonucleotide
gaaccuuaaggggaacgcc

SEQ ID NO: 2481454 - RNA, 19 nt, Artificial Sequence
  Description of Artificial Sequence: Synthetic oligonucleotide
agccacaggugcucggcgc

SEQ ID NO: 2481455 - RNA, 19 nt, Artificial Sequence
  Description of Artificial Sequence: Synthetic oligonucleotide
ucgccaugaguuugaaggc

SEQ ID NO: 2481456 - RNA, 19 nt, Artificial Sequence
  Description of Artificial Sequence: Synthetic oligonucleotide
caaacggguccuuuagaug

SEQ ID NO: 2481457 - RNA, 19 nt, Artificial Sequence
  Description of Artificial Sequence: Synthetic oligonucleotide
ucuuagaugccagccacuc

SEQ ID NO: 2481458 - RNA, 19 nt, Artificial Sequence
  Description of Artificial Sequence: Synthetic oligonucleotide
aacggguccuuuagauggc

SEQ ID NO: 2481459 - RNA, 19 nt, Artificial Sequence
  Description of Artificial Sequence: Synthetic oligonucleotide
ggucuaagauucucuggcg

SEQ ID NO: 2481460 - RNA, 19 nt, Artificial Sequence
  Description of Artificial Sequence: Synthetic oligonucleotide
uugcggccuucacaaacgg

SEQ ID NO: 2481461 - RNA, 19 nt, Artificial Sequence
  Description of Artificial Sequence: Synthetic oligonucleotide
gaagaagaucgaccccaag

SEQ ID NO: 2481462 - RNA, 19 nt, Artificial Sequence
  Description of Artificial Sequence: Synthetic oligonucleotide
uucacaaacggguccuuua

SEQ ID NO: 2481463 - RNA, 19 nt, Artificial Sequence
  Description of Artificial Sequence: Synthetic oligonucleotide
gguuuuacacagcaguguc

SEQ ID NO: 2481464 - RNA, 19 nt, Artificial Sequence
  Description of Artificial Sequence: Synthetic oligonucleotide
uugacucucugcacugcca

SEQ ID NO: 2481465 - RNA, 19 nt, Artificial Sequence
  Description of Artificial Sequence: Synthetic oligonucleotide
guuuuacacagcagugucc

SEQ ID NO: 2481466 - RNA, 19 nt, Artificial Sequence
  Description of Artificial Sequence: Synthetic oligonucleotide
agagcugcagucugugccu

SEQ ID NO: 2481467 - RNA, 19 nt, Artificial Sequence
  Description of Artificial Sequence: Synthetic oligonucleotide
cuuaaggggaacgccuacc

SEQ ID NO: 2481468 - RNA, 19 nt, Artificial Sequence
  Description of Artificial Sequence: Synthetic oligonucleotide
aggucucggaucccagugg

SEQ ID NO: 2481469 - RNA, 19 nt, Artificial Sequence
  Description of Artificial Sequence: Synthetic oligonucleotide
cugaaccuuaaggggaacg

SEQ ID NO: 2481470 - RNA, 19 nt, Artificial Sequence
  Description of Artificial Sequence: Synthetic oligonucleotide
cucuucuguagcagguggc

SEQ ID NO: 2481471 - RNA, 19 nt, Artificial Sequence
  Description of Artificial Sequence: Synthetic oligonucleotide
aacgccuaccagcuucaga

SEQ ID NO: 2481472 - RNA, 19 nt, Artificial Sequence
  Description of Artificial Sequence: Synthetic oligonucleotide
uguggcuaagagguauacc

SEQ ID NO: 2481473 - RNA, 19 nt, Artificial Sequence
  Description of Artificial Sequence: Synthetic oligonucleotide
uggcuaagagguauaccuc

SEQ ID NO: 2481474 - RNA, 19 nt, Artificial Sequence
  Description of Artificial Sequence: Synthetic oligonucleotide
ugcggccuucacaaacggg

SEQ ID NO: 2481475 - RNA, 19 nt, Artificial Sequence
  Description of Artificial Sequence: Synthetic oligonucleotide
gucuaagauucucuggcga

SEQ ID NO: 2481476 - RNA, 19 nt, Artificial Sequence
  Description of Artificial Sequence: Synthetic oligonucleotide
uuucacgacccuaguguuc

SEQ ID NO: 2481477 - RNA, 19 nt, Artificial Sequence
  Description of Artificial Sequence: Synthetic oligonucleotide
gaguuugaaggcgcugcgg

SEQ ID NO: 2481478 - RNA, 19 nt, Artificial Sequence
  Description of Artificial Sequence: Synthetic oligonucleotide
ugauaagccugucgugauc

SEQ ID NO: 2481479 - RNA, 19 nt, Artificial Sequence
  Description of Artificial Sequence: Synthetic oligonucleotide
uucuguagcagguggcuuu

SEQ ID NO: 2481480 - RNA, 19 nt, Artificial Sequence
  Description of Artificial Sequence: Synthetic oligonucleotide
cacgcagucguguggaauc

SEQ ID NO: 2481481 - RNA, 19 nt, Artificial Sequence
  Description of Artificial Sequence: Synthetic oligonucleotide
uggaauuccugggucaguc

SEQ ID NO: 2481482 - RNA, 19 nt, Artificial Sequence
  Description of Artificial Sequence: Synthetic oligonucleotide
gcagcgguaacucuccacc

SEQ ID NO: 2481483 - RNA, 19 nt, Artificial Sequence
  Description of Artificial Sequence: Synthetic oligonucleotide
agcugauaagccugucgug

SEQ ID NO: 2481484 - RNA, 19 nt, Artificial Sequence
  Description of Artificial Sequence: Synthetic oligonucleotide
uaagccugucgugaucgag

SEQ ID NO: 2481485 - RNA, 19 nt, Artificial Sequence
  Description of Artificial Sequence: Synthetic oligonucleotide
uuuacacagcagugucccc

SEQ ID NO: 2481486 - RNA, 19 nt, Artificial Sequence
  Description of Artificial Sequence: Synthetic oligonucleotide
uaucgccaugaguuugaag

SEQ ID NO: 2481487 - RNA, 19 nt, Artificial Sequence
  Description of Artificial Sequence: Synthetic oligonucleotide
ucucggaucccaguggcgu

SEQ ID NO: 2481488 - RNA, 19 nt, Artificial Sequence
  Description of Artificial Sequence: Synthetic oligonucleotide
gucgugaucgaggucucgg

SEQ ID NO: 2481489 - RNA, 19 nt, Artificial Sequence
  Description of Artificial Sequence: Synthetic oligonucleotide
ccacaaugcaucuuagaug

SEQ ID NO: 2481490 - RNA, 19 nt, Artificial Sequence
  Description of Artificial Sequence: Synthetic oligonucleotide
cauccgcuuuccuucuggg

SEQ ID NO: 2481491 - RNA, 19 nt, Artificial Sequence
  Description of Artificial Sequence: Synthetic oligonucleotide
agcacccggaggccgggcc

SEQ ID NO: 2481492 - RNA, 19 nt, Artificial Sequence
  Description of Artificial Sequence: Synthetic oligonucleotide
auccacaaugcaucuuaga

SEQ ID NO: 2481493 - RNA, 19 nt, Artificial Sequence
  Description of Artificial Sequence: Synthetic oligonucleotide
uccuuuagauggcgcuuca

SEQ ID NO: 2481494 - RNA, 19 nt, Artificial Sequence
  Description of Artificial Sequence: Synthetic oligonucleotide
cuaccagcuucagaucccg

SEQ ID NO: 2481495 - RNA, 19 nt, Artificial Sequence
  Description of Artificial Sequence: Synthetic oligonucleotide
uguguggcuaagagguaua

SEQ ID NO: 2481496 - RNA, 19 nt, Artificial Sequence
  Description of Artificial Sequence: Synthetic oligonucleotide
gguuucacgacccuagugu

SEQ ID NO: 2481497 - RNA, 19 nt, Artificial Sequence
  Description of Artificial Sequence: Synthetic oligonucleotide
gugaucgaggucucggauc

SEQ ID NO: 2481498 - RNA, 19 nt, Artificial Sequence
  Description of Artificial Sequence: Synthetic oligonucleotide
ucgugaucgaggucucgga

SEQ ID NO: 2481499 - RNA, 19 nt, Artificial Sequence
  Description of Artificial Sequence: Synthetic oligonucleotide
uugggcgccaugucacuca

SEQ ID NO: 2481500 - RNA, 19 nt, Artificial Sequence
  Description of Artificial Sequence: Synthetic oligonucleotide
ucgaggucucggaucccag

SEQ ID NO: 2481501 - RNA, 19 nt, Artificial Sequence
  Description of Artificial Sequence: Synthetic oligonucleotide
agccugucgugaucgaggu

SEQ ID NO: 2481502 - RNA, 19 nt, Artificial Sequence
  Description of Artificial Sequence: Synthetic oligonucleotide
cagacucacugcucacugc

SEQ ID NO: 2481503 - RNA, 19 nt, Artificial Sequence
  Description of Artificial Sequence: Synthetic oligonucleotide
gacucucugcacugccacc

SEQ ID NO: 2481504 - RNA, 19 nt, Artificial Sequence
  Description of Artificial Sequence: Synthetic oligonucleotide
aguuccaggaucagucaca

SEQ ID NO: 2481505 - RNA, 19 nt, Artificial Sequence
  Description of Artificial Sequence: Synthetic oligonucleotide
gcacauagcccacaggaga

SEQ ID NO: 2481506 - RNA, 19 nt, Artificial Sequence
  Description of Artificial Sequence: Synthetic oligonucleotide
ugugccuguggcguugacu

SEQ ID NO: 2481507 - RNA, 19 nt, Artificial Sequence
  Description of Artificial Sequence: Synthetic oligonucleotide
ugggcgccaugucacucag

SEQ ID NO: 2481508 - RNA, 19 nt, Artificial Sequence
  Description of Artificial Sequence: Synthetic oligonucleotide
acccuaguguucuggaauu

SEQ ID NO: 2481509 - RNA, 19 nt, Artificial Sequence
  Description of Artificial Sequence: Synthetic oligonucleotide
cagucguguggaaucgcug

SEQ ID NO: 2481510 - RNA, 19 nt, Artificial Sequence
  Description of Artificial Sequence: Synthetic oligonucleotide
caggaugcaggauguccac

SEQ ID NO: 2481511 - RNA, 19 nt, Artificial Sequence
  Description of Artificial Sequence: Synthetic oligonucleotide
ggaaucgcugaaccuuaag

SEQ ID NO: 2481512 - RNA, 19 nt, Artificial Sequence
  Description of Artificial Sequence: Synthetic oligonucleotide
cucagaaucacauccgcuu

SEQ ID NO: 2481513 - RNA, 19 nt, Artificial Sequence
  Description of Artificial Sequence: Synthetic oligonucleotide
acgacccuaguguucugga

SEQ ID NO: 2481514 - RNA, 19 nt, Artificial Sequence
  Description of Artificial Sequence: Synthetic oligonucleotide
gacccuaguguucuggaau

SEQ ID NO: 2481515 - RNA, 19 nt, Artificial Sequence
  Description of Artificial Sequence: Synthetic oligonucleotide
cacgacccuaguguucugg

SEQ ID NO: 2481516 - RNA, 19 nt, Artificial Sequence
  Description of Artificial Sequence: Synthetic oligonucleotide
caugaguuugaaggcgcug

SEQ ID NO: 2481517 - RNA, 19 nt, Artificial Sequence
  Description of Artificial Sequence: Synthetic oligonucleotide
ggucucggaucccaguggc

SEQ ID NO: 2481518 - RNA, 19 nt, Artificial Sequence
  Description of Artificial Sequence: Synthetic oligonucleotide
gcugauaagccugucguga

SEQ ID NO: 2481519 - RNA, 19 nt, Artificial Sequence
  Description of Artificial Sequence: Synthetic oligonucleotide
acucagaaucacauccgcu

SEQ ID NO: 2481520 - RNA, 19 nt, Artificial Sequence
  Description of Artificial Sequence: Synthetic oligonucleotide
ugucgugaucgaggucucg

SEQ ID NO: 2481521 - RNA, 19 nt, Artificial Sequence
  Description of Artificial Sequence: Synthetic oligonucleotide
acaagcugauaagccuguc

SEQ ID NO: 2481522 - RNA, 19 nt, Artificial Sequence
  Description of Artificial Sequence: Synthetic oligonucleotide
ucguguggaaucgcugaac

SEQ ID NO: 2481523 - RNA, 19 nt, Artificial Sequence
  Description of Artificial Sequence: Synthetic oligonucleotide
gggaacgccuaccagcuuc

SEQ ID NO: 2481524 - RNA, 19 nt, Artificial Sequence
  Description of Artificial Sequence: Synthetic oligonucleotide
uggaaucgcugaaccuuaa

SEQ ID NO: 2481525 - RNA, 19 nt, Artificial Sequence
  Description of Artificial Sequence: Synthetic oligonucleotide
ugggucagucucuucugua

SEQ ID NO: 2481526 - RNA, 19 nt, Artificial Sequence
  Description of Artificial Sequence: Synthetic oligonucleotide
acgcagucguguggaaucg

SEQ ID NO: 2481527 - RNA, 19 nt, Artificial Sequence
  Description of Artificial Sequence: Synthetic oligonucleotide
aggggaacgccuaccagcu

SEQ ID NO: 2481528 - RNA, 19 nt, Artificial Sequence
  Description of Artificial Sequence: Synthetic oligonucleotide
auccgcuuuccuucuggga

SEQ ID NO: 2481529 - RNA, 19 nt, Artificial Sequence
  Description of Artificial Sequence: Synthetic oligonucleotide
gguauaccucugaagacuc

SEQ ID NO: 2481530 - RNA, 19 nt, Artificial Sequence
  Description of Artificial Sequence: Synthetic oligonucleotide
cuaguguucuggaauuccu

SEQ ID NO: 2481531 - RNA, 19 nt, Artificial Sequence
  Description of Artificial Sequence: Synthetic oligonucleotide
cuccccgguacuguguggc

SEQ ID NO: 2481532 - RNA, 19 nt, Artificial Sequence
  Description of Artificial Sequence: Synthetic oligonucleotide
uccuuccagagggaauaug

SEQ ID NO: 2481533 - RNA, 19 nt, Artificial Sequence
  Description of Artificial Sequence: Synthetic oligonucleotide
cguguggaaucgcugaacc

SEQ ID NO: 2481534 - RNA, 19 nt, Artificial Sequence
  Description of Artificial Sequence: Synthetic oligonucleotide
uuccggcccagguuuuaca

SEQ ID NO: 2481535 - RNA, 19 nt, Artificial Sequence
  Description of Artificial Sequence: Synthetic oligonucleotide
uccaccuuugcggccuuca

SEQ ID NO: 2481536 - RNA, 19 nt, Artificial Sequence
  Description of Artificial Sequence: Synthetic oligonucleotide
uucccuccccgguacugug

SEQ ID NO: 2481537 - RNA, 19 nt, Artificial Sequence
  Description of Artificial Sequence: Synthetic oligonucleotide
ggcgccaugucacucagaa

SEQ ID NO: 2481538 - RNA, 19 nt, Artificial Sequence
  Description of Artificial Sequence: Synthetic oligonucleotide
auaagccugucgugaucga

SEQ ID NO: 2481539 - RNA, 19 nt, Artificial Sequence
  Description of Artificial Sequence: Synthetic oligonucleotide
guauaccucugaagacucc

SEQ ID NO: 2481540 - RNA, 19 nt, Artificial Sequence
  Description of Artificial Sequence: Synthetic oligonucleotide
acggguccuuuagauggcg

SEQ ID NO: 2481541 - RNA, 19 nt, Artificial Sequence
  Description of Artificial Sequence: Synthetic oligonucleotide
agcgguaacucuccaccuu

SEQ ID NO: 2481542 - RNA, 19 nt, Artificial Sequence
  Description of Artificial Sequence: Synthetic oligonucleotide
ccuaguguucuggaauucc

SEQ ID NO: 2481543 - RNA, 19 nt, Artificial Sequence
  Description of Artificial Sequence: Synthetic oligonucleotide
gcgaguuccaggaucaguc

SEQ ID NO: 2481544 - RNA, 19 nt, Artificial Sequence
  Description of Artificial Sequence: Synthetic oligonucleotide
gcaucuuagaugccagcca

SEQ ID NO: 2481545 - RNA, 19 nt, Artificial Sequence
  Description of Artificial Sequence: Synthetic oligonucleotide
agaucgaccccaagcacau

SEQ ID NO: 2481546 - RNA, 19 nt, Artificial Sequence
  Description of Artificial Sequence: Synthetic oligonucleotide
aucgaggucucggauccca

SEQ ID NO: 2481547 - RNA, 19 nt, Artificial Sequence
  Description of Artificial Sequence: Synthetic oligonucleotide
ggcuaagagguauaccucu

SEQ ID NO: 2481548 - RNA, 19 nt, Artificial Sequence
  Description of Artificial Sequence: Synthetic oligonucleotide
cacaaacggguccuuuaga

SEQ ID NO: 2481549 - RNA, 19 nt, Artificial Sequence
  Description of Artificial Sequence: Synthetic oligonucleotide
guccuuuagauggcgcuuc

SEQ ID NO: 2481550 - RNA, 19 nt, Artificial Sequence
  Description of Artificial Sequence: Synthetic oligonucleotide
gccacacgcagucgugugg

SEQ ID NO: 2481551 - RNA, 19 nt, Artificial Sequence
  Description of Artificial Sequence: Synthetic oligonucleotide
gccaugaguuugaaggcgc

SEQ ID NO: 2481552 - RNA, 19 nt, Artificial Sequence
  Description of Artificial Sequence: Synthetic oligonucleotide
uggcuuccgguuucacgac

SEQ ID NO: 2481553 - RNA, 19 nt, Artificial Sequence
  Description of Artificial Sequence: Synthetic oligonucleotide
guguggcuaagagguauac

SEQ ID NO: 2481554 - RNA, 19 nt, Artificial Sequence
  Description of Artificial Sequence: Synthetic oligonucleotide
uuaucgccaugaguuugaa

SEQ ID NO: 2481555 - RNA, 19 nt, Artificial Sequence
  Description of Artificial Sequence: Synthetic oligonucleotide
gcuaagagguauaccucug

SEQ ID NO: 2481556 - RNA, 19 nt, Artificial Sequence
  Description of Artificial Sequence: Synthetic oligonucleotide
gucucggaucccaguggcg

SEQ ID NO: 2481557 - RNA, 19 nt, Artificial Sequence
  Description of Artificial Sequence: Synthetic oligonucleotide
aucuuagaugccagccacu

SEQ ID NO: 2481558 - RNA, 19 nt, Artificial Sequence
  Description of Artificial Sequence: Synthetic oligonucleotide
cacaaggguaaggcacaag

SEQ ID NO: 2481559 - RNA, 19 nt, Artificial Sequence
  Description of Artificial Sequence: Synthetic oligonucleotide
aggaugcaggauguccaca

SEQ ID NO: 2481560 - RNA, 19 nt, Artificial Sequence
  Description of Artificial Sequence: Synthetic oligonucleotide
ucccggagccgccccgcag

SEQ ID NO: 2481561 - RNA, 19 nt, Artificial Sequence
  Description of Artificial Sequence: Synthetic oligonucleotide
ugcccuucccuccccggua

SEQ ID NO: 2481562 - RNA, 19 nt, Artificial Sequence
  Description of Artificial Sequence: Synthetic oligonucleotide
guuucacgacccuaguguu

SEQ ID NO: 2481563 - RNA, 19 nt, Artificial Sequence
  Description of Artificial Sequence: Synthetic oligonucleotide
gcgcuucagccacaggugc

SEQ ID NO: 2481564 - RNA, 19 nt, Artificial Sequence
  Description of Artificial Sequence: Synthetic oligonucleotide
gucguguggaaucgcugaa

SEQ ID NO: 2481565 - RNA, 19 nt, Artificial Sequence
  Description of Artificial Sequence: Synthetic oligonucleotide
cacugcccuucccuccccg

SEQ ID NO: 2481566 - RNA, 19 nt, Artificial Sequence
  Description of Artificial Sequence: Synthetic oligonucleotide
gcucacugcccuucccucc

SEQ ID NO: 2481567 - RNA, 19 nt, Artificial Sequence
  Description of Artificial Sequence: Synthetic oligonucleotide
ugccuguggcguugacucu

SEQ ID NO: 2481568 - RNA, 19 nt, Artificial Sequence
  Description of Artificial Sequence: Synthetic oligonucleotide
gcguugacucucugcacug

SEQ ID NO: 2481569 - RNA, 19 nt, Artificial Sequence
  Description of Artificial Sequence: Synthetic oligonucleotide
auggcgcuucagccacagg

SEQ ID NO: 2481570 - RNA, 19 nt, Artificial Sequence
  Description of Artificial Sequence: Synthetic oligonucleotide
gcuuccgguuucacgaccc

SEQ ID NO: 2481571 - RNA, 19 nt, Artificial Sequence
  Description of Artificial Sequence: Synthetic oligonucleotide
ugcucggcgcccguccggc

SEQ ID NO: 2481572 - RNA, 19 nt, Artificial Sequence
  Description of Artificial Sequence: Synthetic oligonucleotide
cugucgugaucgaggucuc

SEQ ID NO: 2481573 - RNA, 19 nt, Artificial Sequence
  Description of Artificial Sequence: Synthetic oligonucleotide
cuaagauucucuggcgagu

SEQ ID NO: 2481574 - RNA, 19 nt, Artificial Sequence
  Description of Artificial Sequence: Synthetic oligonucleotide
ucacgacccuaguguucug

SEQ ID NO: 2481575 - RNA, 19 nt, Artificial Sequence
  Description of Artificial Sequence: Synthetic oligonucleotide
ggcuuccgguuucacgacc

SEQ ID NO: 2481576 - RNA, 19 nt, Artificial Sequence
  Description of Artificial Sequence: Synthetic oligonucleotide
ggugcucggcgcccguccg

SEQ ID NO: 2481577 - RNA, 19 nt, Artificial Sequence
  Description of Artificial Sequence: Synthetic oligonucleotide
uccccgguacuguguggcu

SEQ ID NO: 2481578 - RNA, 19 nt, Artificial Sequence
  Description of Artificial Sequence: Synthetic oligonucleotide
cacaggugcucggcgcccg

SEQ ID NO: 2481579 - RNA, 19 nt, Artificial Sequence
  Description of Artificial Sequence: Synthetic oligonucleotide
cauuuaucgccaugaguuu

SEQ ID NO: 2481580 - RNA, 19 nt, Artificial Sequence
  Description of Artificial Sequence: Synthetic oligonucleotide
acacgcagucguguggaau

SEQ ID NO: 2481581 - RNA, 19 nt, Artificial Sequence
  Description of Artificial Sequence: Synthetic oligonucleotide
guggaaucgcugaaccuua

SEQ ID NO: 2481582 - RNA, 19 nt, Artificial Sequence
  Description of Artificial Sequence: Synthetic oligonucleotide
gaacgccuaccagcuucag

SEQ ID NO: 2481583 - RNA, 19 nt, Artificial Sequence
  Description of Artificial Sequence: Synthetic oligonucleotide
uuccgguuucacgacccua

SEQ ID NO: 2481584 - RNA, 19 nt, Artificial Sequence
  Description of Artificial Sequence: Synthetic oligonucleotide
uucuuccggcccagguuuu

SEQ ID NO: 2481585 - RNA, 19 nt, Artificial Sequence
  Description of Artificial Sequence: Synthetic oligonucleotide
guguggaaucgcugaaccu

SEQ ID NO: 2481586 - RNA, 19 nt, Artificial Sequence
  Description of Artificial Sequence: Synthetic oligonucleotide
cacaagcugauaagccugu

SEQ ID NO: 2481587 - RNA, 19 nt, Artificial Sequence
  Description of Artificial Sequence: Synthetic oligonucleotide
ggcagcgguaacucuccac

SEQ ID NO: 2481588 - RNA, 19 nt, Artificial Sequence
  Description of Artificial Sequence: Synthetic oligonucleotide
ccgcuuuccuucugggaag

SEQ ID NO: 2481589 - RNA, 19 nt, Artificial Sequence
  Description of Artificial Sequence: Synthetic oligonucleotide
uuccaggaucagucacauc

SEQ ID NO: 2481590 - RNA, 19 nt, Artificial Sequence
  Description of Artificial Sequence: Synthetic oligonucleotide
gggccgcaggaugugaugc

SEQ ID NO: 2481591 - RNA, 19 nt, Artificial Sequence
  Description of Artificial Sequence: Synthetic oligonucleotide
guugggcgccaugucacuc

SEQ ID NO: 2481592 - RNA, 19 nt, Artificial Sequence
  Description of Artificial Sequence: Synthetic oligonucleotide
ggagccgccccgcagucca

SEQ ID NO: 2481593 - RNA, 19 nt, Artificial Sequence
  Description of Artificial Sequence: Synthetic oligonucleotide
ccugucgugaucgaggucu

SEQ ID NO: 2481594 - RNA, 19 nt, Artificial Sequence
  Description of Artificial Sequence: Synthetic oligonucleotide
cccgcaguccagcacccgg

SEQ ID NO: 2481595 - RNA, 19 nt, Artificial Sequence
  Description of Artificial Sequence: Synthetic oligonucleotide
cugauaagccugucgugau

SEQ ID NO: 2481596 - RNA, 19 nt, Artificial Sequence
  Description of Artificial Sequence: Synthetic oligonucleotide
uggcgaguuccaggaucag

SEQ ID NO: 2481597 - RNA, 19 nt, Artificial Sequence
  Description of Artificial Sequence: Synthetic oligonucleotide
uccggccuuugcagccaca

SEQ ID NO: 2481598 - RNA, 19 nt, Artificial Sequence
  Description of Artificial Sequence: Synthetic oligonucleotide
gcccguccggccuuugcag

SEQ ID NO: 2481599 - RNA, 19 nt, Artificial Sequence
  Description of Artificial Sequence: Synthetic oligonucleotide
cgccaugaguuugaaggcg

SEQ ID NO: 2481600 - RNA, 19 nt, Artificial Sequence
  Description of Artificial Sequence: Synthetic oligonucleotide
guuccaggaucagucacau

SEQ ID NO: 2481601 - RNA, 19 nt, Artificial Sequence
  Description of Artificial Sequence: Synthetic oligonucleotide
ggguccuuuagauggcgcu

SEQ ID NO: 2481602 - RNA, 19 nt, Artificial Sequence
  Description of Artificial Sequence: Synthetic oligonucleotide
gcggccuucacaaacgggu

SEQ ID NO: 2481603 - RNA, 19 nt, Artificial Sequence
  Description of Artificial Sequence: Synthetic oligonucleotide
gcacccggaggccgggccg

SEQ ID NO: 2481604 - RNA, 19 nt, Artificial Sequence
  Description of Artificial Sequence: Synthetic oligonucleotide
ucuuccggcccagguuuua

SEQ ID NO: 2481605 - RNA, 19 nt, Artificial Sequence
  Description of Artificial Sequence: Synthetic oligonucleotide
ccguccggccuuugcagcc

SEQ ID NO: 2481606 - RNA, 19 nt, Artificial Sequence
  Description of Artificial Sequence: Synthetic oligonucleotide
ggaauuccugggucagucu

SEQ ID NO: 2481607 - RNA, 19 nt, Artificial Sequence
  Description of Artificial Sequence: Synthetic oligonucleotide
gcguugggcgccaugucac

SEQ ID NO: 2481608 - RNA, 19 nt, Artificial Sequence
  Description of Artificial Sequence: Synthetic oligonucleotide
ccacucucaggaaaguacu

SEQ ID NO: 2481609 - RNA, 19 nt, Artificial Sequence
  Description of Artificial Sequence: Synthetic oligonucleotide
cuguggcguugacucucug

SEQ ID NO: 2481610 - RNA, 19 nt, Artificial Sequence
  Description of Artificial Sequence: Synthetic oligonucleotide
cccguccggccuuugcagc

SEQ ID NO: 2481611 - RNA, 19 nt, Artificial Sequence
  Description of Artificial Sequence: Synthetic oligonucleotide
cagcgguaacucuccaccu

SEQ ID NO: 2481612 - RNA, 19 nt, Artificial Sequence
  Description of Artificial Sequence: Synthetic oligonucleotide
guccggccuuugcagccac

SEQ ID NO: 2481613 - RNA, 19 nt, Artificial Sequence
  Description of Artificial Sequence: Synthetic oligonucleotide
gccuguggcguugacucuc

SEQ ID NO: 2481614 - RNA, 19 nt, Artificial Sequence
  Description of Artificial Sequence: Synthetic oligonucleotide
ucggcgcccguccggccuu

SEQ ID NO: 2481615 - RNA, 19 nt, Artificial Sequence
  Description of Artificial Sequence: Synthetic oligonucleotide
cgguaacucuccaccuuug

SEQ ID NO: 2481616 - RNA, 19 nt, Artificial Sequence
  Description of Artificial Sequence: Synthetic oligonucleotide
cccuccccgguacugugug

SEQ ID NO: 2481617 - RNA, 19 nt, Artificial Sequence
  Description of Artificial Sequence: Synthetic oligonucleotide
ccuccccgguacugugugg

SEQ ID NO: 2481618 - RNA, 19 nt, Artificial Sequence
  Description of Artificial Sequence: Synthetic oligonucleotide
cugugccuguggcguugac

SEQ ID NO: 2481619 - RNA, 19 nt, Artificial Sequence
  Description of Artificial Sequence: Synthetic oligonucleotide
gcugaaccuuaaggggaac

SEQ ID NO: 2481620 - RNA, 19 nt, Artificial Sequence
  Description of Artificial Sequence: Synthetic oligonucleotide
cggguccuuuagauggcgc

SEQ ID NO: 2481621 - RNA, 19 nt, Artificial Sequence
  Description of Artificial Sequence: Synthetic oligonucleotide
ggcgcugcggcagcgguaa

SEQ ID NO: 2481622 - RNA, 19 nt, Artificial Sequence
  Description of Artificial Sequence: Synthetic oligonucleotide
cgaguuccaggaucaguca

SEQ ID NO: 2481623 - RNA, 19 nt, Artificial Sequence
  Description of Artificial Sequence: Synthetic oligonucleotide
cauauccacaaugcaucuu

SEQ ID NO: 2481624 - RNA, 19 nt, Artificial Sequence
  Description of Artificial Sequence: Synthetic oligonucleotide
agauggcgcuucagccaca

SEQ ID NO: 2481625 - RNA, 19 nt, Artificial Sequence
  Description of Artificial Sequence: Synthetic oligonucleotide
cacacgcagucguguggaa

SEQ ID NO: 2481626 - RNA, 19 nt, Artificial Sequence
  Description of Artificial Sequence: Synthetic oligonucleotide
cccagaaaggcagggcaga

SEQ ID NO: 2481627 - RNA, 19 nt, Artificial Sequence
  Description of Artificial Sequence: Synthetic oligonucleotide
cguugacucucugcacugc

SEQ ID NO: 2481628 - RNA, 19 nt, Artificial Sequence
  Description of Artificial Sequence: Synthetic oligonucleotide
cccuaguguucuggaauuc

SEQ ID NO: 2481629 - RNA, 19 nt, Artificial Sequence
  Description of Artificial Sequence: Synthetic oligonucleotide
cuuccgguuucacgacccu

SEQ ID NO: 2481630 - RNA, 19 nt, Artificial Sequence
  Description of Artificial Sequence: Synthetic oligonucleotide
gcgguaacucuccaccuuu

SEQ ID NO: 2481631 - RNA, 19 nt, Artificial Sequence
  Description of Artificial Sequence: Synthetic oligonucleotide
ccacacgcagucgugugga

SEQ ID NO: 2481632 - RNA, 19 nt, Artificial Sequence
  Description of Artificial Sequence: Synthetic oligonucleotide
ccccaagcacauagcccac

SEQ ID NO: 2481633 - RNA, 19 nt, Artificial Sequence
  Description of Artificial Sequence: Synthetic oligonucleotide
cggccuucacaaacggguc

SEQ ID NO: 2481634 - RNA, 19 nt, Artificial Sequence
  Description of Artificial Sequence: Synthetic oligonucleotide
cccgguacuguguggcuaa

SEQ ID NO: 2481635 - RNA, 19 nt, Artificial Sequence
  Description of Artificial Sequence: Synthetic oligonucleotide
gcagucguguggaaucgcu

SEQ ID NO: 2481636 - RNA, 19 nt, Artificial Sequence
  Description of Artificial Sequence: Synthetic oligonucleotide
cgcaguccagcacccggag

SEQ ID NO: 2481637 - RNA, 19 nt, Artificial Sequence
  Description of Artificial Sequence: Synthetic oligonucleotide
cuucccuccccgguacugu

SEQ ID NO: 2481638 - RNA, 19 nt, Artificial Sequence
  Description of Artificial Sequence: Synthetic oligonucleotide
ggcgaguuccaggaucagu

SEQ ID NO: 2481639 - RNA, 19 nt, Artificial Sequence
  Description of Artificial Sequence: Synthetic oligonucleotide
gaucgaccccaagcacaua

SEQ ID NO: 2481640 - RNA, 19 nt, Artificial Sequence
  Description of Artificial Sequence: Synthetic oligonucleotide
cgcugaaccuuaaggggaa

SEQ ID NO: 2481641 - RNA, 19 nt, Artificial Sequence
  Description of Artificial Sequence: Synthetic oligonucleotide
gguccuuuagauggcgcuu

SEQ ID NO: 2481642 - RNA, 19 nt, Artificial Sequence
  Description of Artificial Sequence: Synthetic oligonucleotide
ccaugaguuugaaggcgcu

SEQ ID NO: 2481643 - RNA, 19 nt, Artificial Sequence
  Description of Artificial Sequence: Synthetic oligonucleotide
cuggaauuccugggucagu

SEQ ID NO: 2481644 - RNA, 19 nt, Artificial Sequence
  Description of Artificial Sequence: Synthetic oligonucleotide
agcccacaggagagcugca

SEQ ID NO: 2481645 - RNA, 19 nt, Artificial Sequence
  Description of Artificial Sequence: Synthetic oligonucleotide
ccgcaguccagcacccgga

SEQ ID NO: 2481646 - RNA, 19 nt, Artificial Sequence
  Description of Artificial Sequence: Synthetic oligonucleotide
cagcacccggaggccgggc

SEQ ID NO: 2481647 - RNA, 19 nt, Artificial Sequence
  Description of Artificial Sequence: Synthetic oligonucleotide
cucggaucccaguggcguu

SEQ ID NO: 2481648 - RNA, 19 nt, Artificial Sequence
  Description of Artificial Sequence: Synthetic oligonucleotide
gcuuuccuucugggaagca

SEQ ID NO: 2481649 - RNA, 19 nt, Artificial Sequence
  Description of Artificial Sequence: Synthetic oligonucleotide
cucggcgcccguccggccu

SEQ ID NO: 2481650 - RNA, 19 nt, Artificial Sequence
  Description of Artificial Sequence: Synthetic oligonucleotide
ggguaaggcacaagcugau

SEQ ID NO: 2481651 - RNA, 19 nt, Artificial Sequence
  Description of Artificial Sequence: Synthetic oligonucleotide
cccacaggagagcugcagu

SEQ ID NO: 2481652 - RNA, 19 nt, Artificial Sequence
  Description of Artificial Sequence: Synthetic oligonucleotide
cuccaccuuugcggccuuc

SEQ ID NO: 2481653 - RNA, 19 nt, Artificial Sequence
  Description of Artificial Sequence: Synthetic oligonucleotide
gcgcccguccggccuuugc

SEQ ID NO: 2481654 - RNA, 19 nt, Artificial Sequence
  Description of Artificial Sequence: Synthetic oligonucleotide
cgggccgcaggaugugaug

SEQ ID NO: 2481655 - RNA, 19 nt, Artificial Sequence
  Description of Artificial Sequence: Synthetic oligonucleotide
cgcagucguguggaaucgc

SEQ ID NO: 2481656 - RNA, 19 nt, Artificial Sequence
  Description of Artificial Sequence: Synthetic oligonucleotide
cagccacucucaggaaagu

SEQ ID NO: 2481657 - RNA, 19 nt, Artificial Sequence
  Description of Artificial Sequence: Synthetic oligonucleotide
gccgccccgcaguccagca

SEQ ID NO: 2481658 - RNA, 19 nt, Artificial Sequence
  Description of Artificial Sequence: Synthetic oligonucleotide
ccgguacuguguggcuaag

SEQ ID NO: 2481659 - RNA, 19 nt, Artificial Sequence
  Description of Artificial Sequence: Synthetic oligonucleotide
cgacccuaguguucuggaa

SEQ ID NO: 2481660 - RNA, 19 nt, Artificial Sequence
  Description of Artificial Sequence: Synthetic oligonucleotide
gcucggcgcccguccggcc

SEQ ID NO: 2481661 - RNA, 19 nt, Artificial Sequence
  Description of Artificial Sequence: Synthetic oligonucleotide
aggcgcugcggcagcggua

SEQ ID NO: 2481662 - RNA, 19 nt, Artificial Sequence
  Description of Artificial Sequence: Synthetic oligonucleotide
cucuggcgaguuccaggau

SEQ ID NO: 2481663 - RNA, 19 nt, Artificial Sequence
  Description of Artificial Sequence: Synthetic oligonucleotide
ccuuugcggccuucacaaa

SEQ ID NO: 2481664 - RNA, 19 nt, Artificial Sequence
  Description of Artificial Sequence: Synthetic oligonucleotide
ccuguggcguugacucucu

SEQ ID NO: 2481665 - RNA, 19 nt, Artificial Sequence
  Description of Artificial Sequence: Synthetic oligonucleotide
cgugaucgaggucucggau

SEQ ID NO: 2481666 - RNA, 19 nt, Artificial Sequence
  Description of Artificial Sequence: Synthetic oligonucleotide
ccgccccgcaguccagcac

SEQ ID NO: 2481667 - RNA, 19 nt, Artificial Sequence
  Description of Artificial Sequence: Synthetic oligonucleotide
cgcccguccggccuuugca

SEQ ID NO: 2481668 - RNA, 19 nt, Artificial Sequence
  Description of Artificial Sequence: Synthetic oligonucleotide
ccccgcaguccagcacccg

SEQ ID NO: 2481669 - RNA, 19 nt, Artificial Sequence
  Description of Artificial Sequence: Synthetic oligonucleotide
gcgccaugucacucagaau

SEQ ID NO: 2481670 - RNA, 19 nt, Artificial Sequence
  Description of Artificial Sequence: Synthetic oligonucleotide
ccgguuucacgacccuagu

SEQ ID NO: 2481671 - RNA, 19 nt, Artificial Sequence
  Description of Artificial Sequence: Synthetic oligonucleotide
gccgcaggaugugaugcuu

SEQ ID NO: 2481672 - RNA, 19 nt, Artificial Sequence
  Description of Artificial Sequence: Synthetic oligonucleotide
cgaggucucggaucccagu

SEQ ID NO: 2481673 - RNA, 19 nt, Artificial Sequence
  Description of Artificial Sequence: Synthetic oligonucleotide
gccgggccgcaggauguga

SEQ ID NO: 2481674 - RNA, 19 nt, Artificial Sequence
  Description of Artificial Sequence: Synthetic oligonucleotide
ccgcaggaugugaugcuuu

SEQ ID NO: 2481675 - RNA, 19 nt, Artificial Sequence
  Description of Artificial Sequence: Synthetic oligonucleotide
ccccgguacuguguggcua

SEQ ID NO: 2481676 - RNA, 19 nt, Artificial Sequence
  Description of Artificial Sequence: Synthetic oligonucleotide
gggcgccaugucacucaga

SEQ ID NO: 2481677 - RNA, 19 nt, Artificial Sequence
  Description of Artificial Sequence: Synthetic oligonucleotide
ggggaacgccuaccagcuu

SEQ ID NO: 2481678 - RNA, 19 nt, Artificial Sequence
  Description of Artificial Sequence: Synthetic oligonucleotide
cguugggcgccaugucacu

SEQ ID NO: 2481679 - RNA, 19 nt, Artificial Sequence
  Description of Artificial Sequence: Synthetic oligonucleotide
gcgcugcggcagcgguaac

SEQ ID NO: 2481680 - RNA, 19 nt, Artificial Sequence
  Description of Artificial Sequence: Synthetic oligonucleotide
ggcgcccguccggccuuug

SEQ ID NO: 2481681 - RNA, 19 nt, Artificial Sequence
  Description of Artificial Sequence: Synthetic oligonucleotide
cggcagcgguaacucucca

SEQ ID NO: 2481682 - RNA, 19 nt, Artificial Sequence
  Description of Artificial Sequence: Synthetic oligonucleotide
caguggcguugggcgccau

SEQ ID NO: 2481683 - RNA, 19 nt, Artificial Sequence
  Description of Artificial Sequence: Synthetic oligonucleotide
caucaaauaacaaacaugg

SEQ ID NO: 2481684 - RNA, 19 nt, Artificial Sequence
  Description of Artificial Sequence: Synthetic oligonucleotide
ucaaauaacaaacauggcc

SEQ ID NO: 2481685 - RNA, 19 nt, Artificial Sequence
  Description of Artificial Sequence: Synthetic oligonucleotide
ucagucuucccuuugaagg

SEQ ID NO: 2481686 - RNA, 19 nt, Artificial Sequence
  Description of Artificial Sequence: Synthetic oligonucleotide
ucugguuuggcagugaagg

SEQ ID NO: 2481687 - RNA, 19 nt, Artificial Sequence
  Description of Artificial Sequence: Synthetic oligonucleotide
agucucguagucuagggcg

SEQ ID NO: 2481688 - RNA, 19 nt, Artificial Sequence
  Description of Artificial Sequence: Synthetic oligonucleotide
ucagcgaggaucauggccc

SEQ ID NO: 2481689 - RNA, 19 nt, Artificial Sequence
  Description of Artificial Sequence: Synthetic oligonucleotide
aagccgaacacugggaggc

SEQ ID NO: 2481690 - RNA, 19 nt, Artificial Sequence
  Description of Artificial Sequence: Synthetic oligonucleotide
uuguucaucaaauaacaaa

SEQ ID NO: 2481691 - RNA, 19 nt, Artificial Sequence
  Description of Artificial Sequence: Synthetic oligonucleotide
acaaacauggccacucugc

SEQ ID NO: 2481692 - RNA, 19 nt, Artificial Sequence
  Description of Artificial Sequence: Synthetic oligonucleotide
uucugugccguguagucgg

SEQ ID NO: 2481693 - RNA, 19 nt, Artificial Sequence
  Description of Artificial Sequence: Synthetic oligonucleotide
cuugcgggugaccagacgg

SEQ ID NO: 2481694 - RNA, 19 nt, Artificial Sequence
  Description of Artificial Sequence: Synthetic oligonucleotide
ugaggcgccaguagcacgg

SEQ ID NO: 2481695 - RNA, 19 nt, Artificial Sequence
  Description of Artificial Sequence: Synthetic oligonucleotide
gaccagacggcccaagccg

SEQ ID NO: 2481696 - RNA, 19 nt, Artificial Sequence
  Description of Artificial Sequence: Synthetic oligonucleotide
cuaagauacuuguucauca

SEQ ID NO: 2481697 - RNA, 19 nt, Artificial Sequence
  Description of Artificial Sequence: Synthetic oligonucleotide
ucauucauuggcaggugug

SEQ ID NO: 2481698 - RNA, 19 nt, Artificial Sequence
  Description of Artificial Sequence: Synthetic oligonucleotide
ugucguucagcgaggauca

SEQ ID NO: 2481699 - RNA, 19 nt, Artificial Sequence
  Description of Artificial Sequence: Synthetic oligonucleotide
uagggucuaacucuccacc

SEQ ID NO: 2481700 - RNA, 19 nt, Artificial Sequence
  Description of Artificial Sequence: Synthetic oligonucleotide
ucauggauggcaguuagac

SEQ ID NO: 2481701 - RNA, 19 nt, Artificial Sequence
  Description of Artificial Sequence: Synthetic oligonucleotide
cugcccaucauucauuggc

SEQ ID NO: 2481702 - RNA, 19 nt, Artificial Sequence
  Description of Artificial Sequence: Synthetic oligonucleotide
aacugcccaucauucauug

SEQ ID NO: 2481703 - RNA, 19 nt, Artificial Sequence
  Description of Artificial Sequence: Synthetic oligonucleotide
aagauacuuguucaucaaa

SEQ ID NO: 2481704 - RNA, 19 nt, Artificial Sequence
  Description of Artificial Sequence: Synthetic oligonucleotide
ucacagucuaagauacuug

SEQ ID NO: 2481705 - RNA, 19 nt, Artificial Sequence
  Description of Artificial Sequence: Synthetic oligonucleotide
agagucucguagucuaggg

SEQ ID NO: 2481706 - RNA, 19 nt, Artificial Sequence
  Description of Artificial Sequence: Synthetic oligonucleotide
ugguacaugacuugcucga

SEQ ID NO: 2481707 - RNA, 19 nt, Artificial Sequence
  Description of Artificial Sequence: Synthetic oligonucleotide
aucaaauaacaaacauggc

SEQ ID NO: 2481708 - RNA, 19 nt, Artificial Sequence
  Description of Artificial Sequence: Synthetic oligonucleotide
ugucaacugcccaucauuc

SEQ ID NO: 2481709 - RNA, 19 nt, Artificial Sequence
  Description of Artificial Sequence: Synthetic oligonucleotide
aggguagucccaaggaugc

SEQ ID NO: 2481710 - RNA, 19 nt, Artificial Sequence
  Description of Artificial Sequence: Synthetic oligonucleotide
ucuaagauacuuguucauc

SEQ ID NO: 2481711 - RNA, 19 nt, Artificial Sequence
  Description of Artificial Sequence: Synthetic oligonucleotide
acuugcucgauuucccgag

SEQ ID NO: 2481712 - RNA, 19 nt, Artificial Sequence
  Description of Artificial Sequence: Synthetic oligonucleotide
ugacuugcucgauuucccg

SEQ ID NO: 2481713 - RNA, 19 nt, Artificial Sequence
  Description of Artificial Sequence: Synthetic oligonucleotide
aauaacaaacauggccacu

SEQ ID NO: 2481714 - RNA, 19 nt, Artificial Sequence
  Description of Artificial Sequence: Synthetic oligonucleotide
ucgugcuuggguaccagcc

SEQ ID NO: 2481715 - RNA, 19 nt, Artificial Sequence
  Description of Artificial Sequence: Synthetic oligonucleotide
ugaccagacggcccaagcc

SEQ ID NO: 2481716 - RNA, 19 nt, Artificial Sequence
  Description of Artificial Sequence: Synthetic oligonucleotide
aggaucauggcccgcagca

SEQ ID NO: 2481717 - RNA, 19 nt, Artificial Sequence
  Description of Artificial Sequence: Synthetic oligonucleotide
uaagauacuuguucaucaa

SEQ ID NO: 2481718 - RNA, 19 nt, Artificial Sequence
  Description of Artificial Sequence: Synthetic oligonucleotide
ucgucgugcugccacagcc

SEQ ID NO: 2481719 - RNA, 19 nt, Artificial Sequence
  Description of Artificial Sequence: Synthetic oligonucleotide
uguagucgggucucacgcg

SEQ ID NO: 2481720 - RNA, 19 nt, Artificial Sequence
  Description of Artificial Sequence: Synthetic oligonucleotide
ugcaggguagucccaagga

SEQ ID NO: 2481721 - RNA, 19 nt, Artificial Sequence
  Description of Artificial Sequence: Synthetic oligonucleotide
uguuugucacagucuaaga

SEQ ID NO: 2481722 - RNA, 19 nt, Artificial Sequence
  Description of Artificial Sequence: Synthetic oligonucleotide
caaggaugcacccgagucc

SEQ ID NO: 2481723 - RNA, 19 nt, Artificial Sequence
  Description of Artificial Sequence: Synthetic oligonucleotide
uagagcugcgaaucucgcg

SEQ ID NO: 2481724 - RNA, 19 nt, Artificial Sequence
  Description of Artificial Sequence: Synthetic oligonucleotide
gauacuuguucaucaaaua

SEQ ID NO: 2481725 - RNA, 19 nt, Artificial Sequence
  Description of Artificial Sequence: Synthetic oligonucleotide
augacuugcucgauuuccc

SEQ ID NO: 2481726 - RNA, 19 nt, Artificial Sequence
  Description of Artificial Sequence: Synthetic oligonucleotide
guguagucgggucucacgc

SEQ ID NO: 2481727 - RNA, 19 nt, Artificial Sequence
  Description of Artificial Sequence: Synthetic oligonucleotide
aggagcgguuccuggacgc

SEQ ID NO: 2481728 - RNA, 19 nt, Artificial Sequence
  Description of Artificial Sequence: Synthetic oligonucleotide
agcaaagguggguagggga

SEQ ID NO: 2481729 - RNA, 19 nt, Artificial Sequence
  Description of Artificial Sequence: Synthetic oligonucleotide
caggguagucccaaggaug

SEQ ID NO: 2481730 - RNA, 19 nt, Artificial Sequence
  Description of Artificial Sequence: Synthetic oligonucleotide
caucauggauggcaguuag

SEQ ID NO: 2481731 - RNA, 19 nt, Artificial Sequence
  Description of Artificial Sequence: Synthetic oligonucleotide
caaaggggauguuugucac

SEQ ID NO: 2481732 - RNA, 19 nt, Artificial Sequence
  Description of Artificial Sequence: Synthetic oligonucleotide
gaaucucgcggcugguucc

SEQ ID NO: 2481733 - RNA, 19 nt, Artificial Sequence
  Description of Artificial Sequence: Synthetic oligonucleotide
ugcccaucauggauggcag

SEQ ID NO: 2481734 - RNA, 19 nt, Artificial Sequence
  Description of Artificial Sequence: Synthetic oligonucleotide
gaggcgggcgagcagcugg

SEQ ID NO: 2481735 - RNA, 19 nt, Artificial Sequence
  Description of Artificial Sequence: Synthetic oligonucleotide
ugguuuggcagugaaggcu

SEQ ID NO: 2481736 - RNA, 19 nt, Artificial Sequence
  Description of Artificial Sequence: Synthetic oligonucleotide
ucuccuguuuugcagggua

SEQ ID NO: 2481737 - RNA, 19 nt, Artificial Sequence
  Description of Artificial Sequence: Synthetic oligonucleotide
aaagguggguaggggacag

SEQ ID NO: 2481738 - RNA, 19 nt, Artificial Sequence
  Description of Artificial Sequence: Synthetic oligonucleotide
uaacaaacauggccacucu

SEQ ID NO: 2481739 - RNA, 19 nt, Artificial Sequence
  Description of Artificial Sequence: Synthetic oligonucleotide
caagccgaacacugggagg

SEQ ID NO: 2481740 - RNA, 19 nt, Artificial Sequence
  Description of Artificial Sequence: Synthetic oligonucleotide
aauccguccucugguuugg

SEQ ID NO: 2481741 - RNA, 19 nt, Artificial Sequence
  Description of Artificial Sequence: Synthetic oligonucleotide
gacaggguucaauccgucc

SEQ ID NO: 2481742 - RNA, 19 nt, Artificial Sequence
  Description of Artificial Sequence: Synthetic oligonucleotide
cugucguucagcgaggauc

SEQ ID NO: 2481743 - RNA, 19 nt, Artificial Sequence
  Description of Artificial Sequence: Synthetic oligonucleotide
uccucuucgugcuugggua

SEQ ID NO: 2481744 - RNA, 19 nt, Artificial Sequence
  Description of Artificial Sequence: Synthetic oligonucleotide
aacucuccaccaaagggga

SEQ ID NO: 2481745 - RNA, 19 nt, Artificial Sequence
  Description of Artificial Sequence: Synthetic oligonucleotide
aagaggcggcucucacggc

SEQ ID NO: 2481746 - RNA, 19 nt, Artificial Sequence
  Description of Artificial Sequence: Synthetic oligonucleotide
agggcuguagggucuaacu

SEQ ID NO: 2481747 - RNA, 19 nt, Artificial Sequence
  Description of Artificial Sequence: Synthetic oligonucleotide
accaaaggggauguuuguc

SEQ ID NO: 2481748 - RNA, 19 nt, Artificial Sequence
  Description of Artificial Sequence: Synthetic oligonucleotide
ucaggagcgguuccuggac

SEQ ID NO: 2481749 - RNA, 19 nt, Artificial Sequence
  Description of Artificial Sequence: Synthetic oligonucleotide
guagucgggucucacgcgc

SEQ ID NO: 2481750 - RNA, 19 nt, Artificial Sequence
  Description of Artificial Sequence: Synthetic oligonucleotide
ucuagguucaggagcgguu

SEQ ID NO: 2481751 - RNA, 19 nt, Artificial Sequence
  Description of Artificial Sequence: Synthetic oligonucleotide
cguucagcgaggaucaugg

SEQ ID NO: 2481752 - RNA, 19 nt, Artificial Sequence
  Description of Artificial Sequence: Synthetic oligonucleotide
aaucucgcggcugguuccg

SEQ ID NO: 2481753 - RNA, 19 nt, Artificial Sequence
  Description of Artificial Sequence: Synthetic oligonucleotide
ggugugucagggcuguagg

SEQ ID NO: 2481754 - RNA, 19 nt, Artificial Sequence
  Description of Artificial Sequence: Synthetic oligonucleotide
cuggacgcugguauccccg

SEQ ID NO: 2481755 - RNA, 19 nt, Artificial Sequence
  Description of Artificial Sequence: Synthetic oligonucleotide
agucgugguacaugacuug

SEQ ID NO: 2481756 - RNA, 19 nt, Artificial Sequence
  Description of Artificial Sequence: Synthetic oligonucleotide
cucugcccaucauggaugg

SEQ ID NO: 2481757 - RNA, 19 nt, Artificial Sequence
  Description of Artificial Sequence: Synthetic oligonucleotide
guucaucaaauaacaaaca

SEQ ID NO: 2481758 - RNA, 19 nt, Artificial Sequence
  Description of Artificial Sequence: Synthetic oligonucleotide
cugguuuggcagugaaggc

SEQ ID NO: 2481759 - RNA, 19 nt, Artificial Sequence
  Description of Artificial Sequence: Synthetic oligonucleotide
uugcucgauuucccgagcu

SEQ ID NO: 2481760 - RNA, 19 nt, Artificial Sequence
  Description of Artificial Sequence: Synthetic oligonucleotide
ucuucccuuugaaggucag

SEQ ID NO: 2481761 - RNA, 19 nt, Artificial Sequence
  Description of Artificial Sequence: Synthetic oligonucleotide
agggucuaacucuccacca

SEQ ID NO: 2481762 - RNA, 19 nt, Artificial Sequence
  Description of Artificial Sequence: Synthetic oligonucleotide
uagucgggucucacgcgcg

SEQ ID NO: 2481763 - RNA, 19 nt, Artificial Sequence
  Description of Artificial Sequence: Synthetic oligonucleotide
uagggcguagagcugcgaa

SEQ ID NO: 2481764 - RNA, 19 nt, Artificial Sequence
  Description of Artificial Sequence: Synthetic oligonucleotide
guuugucacagucuaagau

SEQ ID NO: 2481765 - RNA, 19 nt, Artificial Sequence
  Description of Artificial Sequence: Synthetic oligonucleotide
ugaaggccuccucuucgug

SEQ ID NO: 2481766 - RNA, 19 nt, Artificial Sequence
  Description of Artificial Sequence: Synthetic oligonucleotide
ugucagggcuguagggucu

SEQ ID NO: 2481767 - RNA, 19 nt, Artificial Sequence
  Description of Artificial Sequence: Synthetic oligonucleotide
acugcccaucauucauugg

SEQ ID NO: 2481768 - RNA, 19 nt, Artificial Sequence
  Description of Artificial Sequence: Synthetic oligonucleotide
uugcgggugaccagacggc

SEQ ID NO: 2481769 - RNA, 19 nt, Artificial Sequence
  Description of Artificial Sequence: Synthetic oligonucleotide
gauggcaguuagacugggg

SEQ ID NO: 2481770 - RNA, 19 nt, Artificial Sequence
  Description of Artificial Sequence: Synthetic oligonucleotide
ucucacgcgcgugaggcgc

SEQ ID NO: 2481771 - RNA, 19 nt, Artificial Sequence
  Description of Artificial Sequence: Synthetic oligonucleotide
uucgugcuuggguaccagc

SEQ ID NO: 2481772 - RNA, 19 nt, Artificial Sequence
  Description of Artificial Sequence: Synthetic oligonucleotide
ucgugguacaugacuugcu

SEQ ID NO: 2481773 - RNA, 19 nt, Artificial Sequence
  Description of Artificial Sequence: Synthetic oligonucleotide
uccccucuagguucaggag

SEQ ID NO: 2481774 - RNA, 19 nt, Artificial Sequence
  Description of Artificial Sequence: Synthetic oligonucleotide
aaggcugugaaggccuccu

SEQ ID NO: 2481775 - RNA, 19 nt, Artificial Sequence
  Description of Artificial Sequence: Synthetic oligonucleotide
ucaauccguccucugguuu

SEQ ID NO: 2481776 - RNA, 19 nt, Artificial Sequence
  Description of Artificial Sequence: Synthetic oligonucleotide
uuccuggacgcugguaucc

SEQ ID NO: 2481777 - RNA, 19 nt, Artificial Sequence
  Description of Artificial Sequence: Synthetic oligonucleotide
gacuugcucgauuucccga

SEQ ID NO: 2481778 - RNA, 19 nt, Artificial Sequence
  Description of Artificial Sequence: Synthetic oligonucleotide
ggggauguuugucacaguc

SEQ ID NO: 2481779 - RNA, 19 nt, Artificial Sequence
  Description of Artificial Sequence: Synthetic oligonucleotide
ggaagaggcggcucucacg

SEQ ID NO: 2481780 - RNA, 19 nt, Artificial Sequence
  Description of Artificial Sequence: Synthetic oligonucleotide
ugugccguguagucggguc

SEQ ID NO: 2481781 - RNA, 19 nt, Artificial Sequence
  Description of Artificial Sequence: Synthetic oligonucleotide
gucuagggcguagagcugc

SEQ ID NO: 2481782 - RNA, 19 nt, Artificial Sequence
  Description of Artificial Sequence: Synthetic oligonucleotide
cugcgaaucucgcggcugg

SEQ ID NO: 2481783 - RNA, 19 nt, Artificial Sequence
  Description of Artificial Sequence: Synthetic oligonucleotide
guagucccaaggaugcacc

SEQ ID NO: 2481784 - RNA, 19 nt, Artificial Sequence
  Description of Artificial Sequence: Synthetic oligonucleotide
aguuagacuggggugcccu

SEQ ID NO: 2481785 - RNA, 19 nt, Artificial Sequence
  Description of Artificial Sequence: Synthetic oligonucleotide
gucgugguacaugacuugc

SEQ ID NO: 2481786 - RNA, 19 nt, Artificial Sequence
  Description of Artificial Sequence: Synthetic oligonucleotide
cuagguucaggagcgguuc

SEQ ID NO: 2481787 - RNA, 19 nt, Artificial Sequence
  Description of Artificial Sequence: Synthetic oligonucleotide
acuugcgggugaccagacg

SEQ ID NO: 2481788 - RNA, 19 nt, Artificial Sequence
  Description of Artificial Sequence: Synthetic oligonucleotide
cacagucuaagauacuugu

SEQ ID NO: 2481789 - RNA, 19 nt, Artificial Sequence
  Description of Artificial Sequence: Synthetic oligonucleotide
ugucacagucuaagauacu

SEQ ID NO: 2481790 - RNA, 19 nt, Artificial Sequence
  Description of Artificial Sequence: Synthetic oligonucleotide
gucgugcugccacagccag

SEQ ID NO: 2481791 - RNA, 19 nt, Artificial Sequence
  Description of Artificial Sequence: Synthetic oligonucleotide
aggacuugcgggugaccag

SEQ ID NO: 2481792 - RNA, 19 nt, Artificial Sequence
  Description of Artificial Sequence: Synthetic oligonucleotide
cuuugaaggucaggaugcc

SEQ ID NO: 2481793 - RNA, 19 nt, Artificial Sequence
  Description of Artificial Sequence: Synthetic oligonucleotide
acucugcccaucauggaug

SEQ ID NO: 2481794 - RNA, 19 nt, Artificial Sequence
  Description of Artificial Sequence: Synthetic oligonucleotide
ggauguuugucacagucua

SEQ ID NO: 2481795 - RNA, 19 nt, Artificial Sequence
  Description of Artificial Sequence: Synthetic oligonucleotide
gaggaucauggcccgcagc

SEQ ID NO: 2481796 - RNA, 19 nt, Artificial Sequence
  Description of Artificial Sequence: Synthetic oligonucleotide
gugaggcgccaguagcacg

SEQ ID NO: 2481797 - RNA, 19 nt, Artificial Sequence
  Description of Artificial Sequence: Synthetic oligonucleotide
ucuccaccaaaggggaugu

SEQ ID NO: 2481798 - RNA, 19 nt, Artificial Sequence
  Description of Artificial Sequence: Synthetic oligonucleotide
cuugcucgauuucccgagc

SEQ ID NO: 2481799 - RNA, 19 nt, Artificial Sequence
  Description of Artificial Sequence: Synthetic oligonucleotide
guccccucuagguucagga

SEQ ID NO: 2481800 - RNA, 19 nt, Artificial Sequence
  Description of Artificial Sequence: Synthetic oligonucleotide
ucgggucucacgcgcguga

SEQ ID NO: 2481801 - RNA, 19 nt, Artificial Sequence
  Description of Artificial Sequence: Synthetic oligonucleotide
acccgaguccccucuaggu

SEQ ID NO: 2481802 - RNA, 19 nt, Artificial Sequence
  Description of Artificial Sequence: Synthetic oligonucleotide
cccaucauucauuggcagg

SEQ ID NO: 2481803 - RNA, 19 nt, Artificial Sequence
  Description of Artificial Sequence: Synthetic oligonucleotide
ucucacggcgcacgucggc

SEQ ID NO: 2481804 - RNA, 19 nt, Artificial Sequence
  Description of Artificial Sequence: Synthetic oligonucleotide
uucaauccguccucugguu

SEQ ID NO: 2481805 - RNA, 19 nt, Artificial Sequence
  Description of Artificial Sequence: Synthetic oligonucleotide
ggcagugaaggcugugaag

SEQ ID NO: 2481806 - RNA, 19 nt, Artificial Sequence
  Description of Artificial Sequence: Synthetic oligonucleotide
gucaacugcccaucauuca

SEQ ID NO: 2481807 - RNA, 19 nt, Artificial Sequence
  Description of Artificial Sequence: Synthetic oligonucleotide
caggagcgguuccuggacg

SEQ ID NO: 2481808 - RNA, 19 nt, Artificial Sequence
  Description of Artificial Sequence: Synthetic oligonucleotide
gugucagggcuguaggguc

SEQ ID NO: 2481809 - RNA, 19 nt, Artificial Sequence
  Description of Artificial Sequence: Synthetic oligonucleotide
agacggcccaagccgaaca

SEQ ID NO: 2481810 - RNA, 19 nt, Artificial Sequence
  Description of Artificial Sequence: Synthetic oligonucleotide
guucaauccguccucuggu

SEQ ID NO: 2481811 - RNA, 19 nt, Artificial Sequence
  Description of Artificial Sequence: Synthetic oligonucleotide
gagcugcgaaucucgcggc

SEQ ID NO: 2481812 - RNA, 19 nt, Artificial Sequence
  Description of Artificial Sequence: Synthetic oligonucleotide
ucgcgcaaggcgcgcacgc

SEQ ID NO: 2481813 - RNA, 19 nt, Artificial Sequence
  Description of Artificial Sequence: Synthetic oligonucleotide
ccaaggaugcacccgaguc

SEQ ID NO: 2481814 - RNA, 19 nt, Artificial Sequence
  Description of Artificial Sequence: Synthetic oligonucleotide
ggucucacgcgcgugaggc

SEQ ID NO: 2481815 - RNA, 19 nt, Artificial Sequence
  Description of Artificial Sequence: Synthetic oligonucleotide
gcccaagccgaacacuggg

SEQ ID NO: 2481816 - RNA, 19 nt, Artificial Sequence
  Description of Artificial Sequence: Synthetic oligonucleotide
ugaaggcugugaaggccuc

SEQ ID NO: 2481817 - RNA, 19 nt, Artificial Sequence
  Description of Artificial Sequence: Synthetic oligonucleotide
agggcguagagcugcgaau

SEQ ID NO: 2481818 - RNA, 19 nt, Artificial Sequence
  Description of Artificial Sequence: Synthetic oligonucleotide
gacggcccaagccgaacac

SEQ ID NO: 2481819 - RNA, 19 nt, Artificial Sequence
  Description of Artificial Sequence: Synthetic oligonucleotide
agccugucaacugcccauc

SEQ ID NO: 2481820 - RNA, 19 nt, Artificial Sequence
  Description of Artificial Sequence: Synthetic oligonucleotide
ucuucgugcuuggguacca

SEQ ID NO: 2481821 - RNA, 19 nt, Artificial Sequence
  Description of Artificial Sequence: Synthetic oligonucleotide
ccaagccgaacacugggag

SEQ ID NO: 2481822 - RNA, 19 nt, Artificial Sequence
  Description of Artificial Sequence: Synthetic oligonucleotide
ugccacagccaggacuugc

SEQ ID NO: 2481823 - RNA, 19 nt, Artificial Sequence
  Description of Artificial Sequence: Synthetic oligonucleotide
cacccgaguccccucuagg

SEQ ID NO: 2481824 - RNA, 19 nt, Artificial Sequence
  Description of Artificial Sequence: Synthetic oligonucleotide
agugcggccgggucagagu

SEQ ID NO: 2481825 - RNA, 19 nt, Artificial Sequence
  Description of Artificial Sequence: Synthetic oligonucleotide
ugcucgauuucccgagcuu

SEQ ID NO: 2481826 - RNA, 19 nt, Artificial Sequence
  Description of Artificial Sequence: Synthetic oligonucleotide
agcgguuccuggacgcugg

SEQ ID NO: 2481827 - RNA, 19 nt, Artificial Sequence
  Description of Artificial Sequence: Synthetic oligonucleotide
uauccucagucuucccuuu

SEQ ID NO: 2481828 - RNA, 19 nt, Artificial Sequence
  Description of Artificial Sequence: Synthetic oligonucleotide
gguagucccaaggaugcac

SEQ ID NO: 2481829 - RNA, 19 nt, Artificial Sequence
  Description of Artificial Sequence: Synthetic oligonucleotide
cagcgaggaucauggcccg

SEQ ID NO: 2481830 - RNA, 19 nt, Artificial Sequence
  Description of Artificial Sequence: Synthetic oligonucleotide
cucuucgugcuuggguacc

SEQ ID NO: 2481831 - RNA, 19 nt, Artificial Sequence
  Description of Artificial Sequence: Synthetic oligonucleotide
cucacggcgcacgucggcc

SEQ ID NO: 2481832 - RNA, 19 nt, Artificial Sequence
  Description of Artificial Sequence: Synthetic oligonucleotide
uucugucguucagcgagga

SEQ ID NO: 2481833 - RNA, 19 nt, Artificial Sequence
  Description of Artificial Sequence: Synthetic oligonucleotide
ucguagucuagggcguaga

SEQ ID NO: 2481834 - RNA, 19 nt, Artificial Sequence
  Description of Artificial Sequence: Synthetic oligonucleotide
gaaggcugugaaggccucc

SEQ ID NO: 2481835 - RNA, 19 nt, Artificial Sequence
  Description of Artificial Sequence: Synthetic oligonucleotide
uaccagccgccagucgugg

SEQ ID NO: 2481836 - RNA, 19 nt, Artificial Sequence
  Description of Artificial Sequence: Synthetic oligonucleotide
gcgagcagcuggaagaggc

SEQ ID NO: 2481837 - RNA, 19 nt, Artificial Sequence
  Description of Artificial Sequence: Synthetic oligonucleotide
ucugucguucagcgaggau

SEQ ID NO: 2481838 - RNA, 19 nt, Artificial Sequence
  Description of Artificial Sequence: Synthetic oligonucleotide
gucucacgcgcgugaggcg

SEQ ID NO: 2481839 - RNA, 19 nt, Artificial Sequence
  Description of Artificial Sequence: Synthetic oligonucleotide
ucccgagcuuuauccucag

SEQ ID NO: 2481840 - RNA, 19 nt, Artificial Sequence
  Description of Artificial Sequence: Synthetic oligonucleotide
cagguucugugccguguag

SEQ ID NO: 2481841 - RNA, 19 nt, Artificial Sequence
  Description of Artificial Sequence: Synthetic oligonucleotide
ggcuguagggucuaacucu

SEQ ID NO: 2481842 - RNA, 19 nt, Artificial Sequence
  Description of Artificial Sequence: Synthetic oligonucleotide
uggacgcugguauccccgu

SEQ ID NO: 2481843 - RNA, 19 nt, Artificial Sequence
  Description of Artificial Sequence: Synthetic oligonucleotide
agguucugugccguguagu

SEQ ID NO: 2481844 - RNA, 19 nt, Artificial Sequence
  Description of Artificial Sequence: Synthetic oligonucleotide
auggcccgcagcaaaggug

SEQ ID NO: 2481845 - RNA, 19 nt, Artificial Sequence
  Description of Artificial Sequence: Synthetic oligonucleotide
gaugcacccgaguccccuc

SEQ ID NO: 2481846 - RNA, 19 nt, Artificial Sequence
  Description of Artificial Sequence: Synthetic oligonucleotide
uccuggacgcugguauccc

SEQ ID NO: 2481847 - RNA, 19 nt, Artificial Sequence
  Description of Artificial Sequence: Synthetic oligonucleotide
agcucggcgaucagccggg

SEQ ID NO: 2481848 - RNA, 19 nt, Artificial Sequence
  Description of Artificial Sequence: Synthetic oligonucleotide
ucgauuucccgagcuuuau

SEQ ID NO: 2481849 - RNA, 19 nt, Artificial Sequence
  Description of Artificial Sequence: Synthetic oligonucleotide
cucucacggcgcacgucgg

SEQ ID NO: 2481850 - RNA, 19 nt, Artificial Sequence
  Description of Artificial Sequence: Synthetic oligonucleotide
ccaguagcacggcucgucg

SEQ ID NO: 2481851 - RNA, 19 nt, Artificial Sequence
  Description of Artificial Sequence: Synthetic oligonucleotide
ccucccgugguccagguuc

SEQ ID NO: 2481852 - RNA, 19 nt, Artificial Sequence
  Description of Artificial Sequence: Synthetic oligonucleotide
ucagccggggccucacuuu

SEQ ID NO: 2481853 - RNA, 19 nt, Artificial Sequence
  Description of Artificial Sequence: Synthetic oligonucleotide
gcugguuccgcugcucgcg

SEQ ID NO: 2481854 - RNA, 19 nt, Artificial Sequence
  Description of Artificial Sequence: Synthetic oligonucleotide
guucagcgaggaucauggc

SEQ ID NO: 2481855 - RNA, 19 nt, Artificial Sequence
  Description of Artificial Sequence: Synthetic oligonucleotide
cagccggcgacccgagugc

SEQ ID NO: 2481856 - RNA, 19 nt, Artificial Sequence
  Description of Artificial Sequence: Synthetic oligonucleotide
gcgccaguagcacggcucg

SEQ ID NO: 2481857 - RNA, 19 nt, Artificial Sequence
  Description of Artificial Sequence: Synthetic oligonucleotide
gucacagucuaagauacuu

SEQ ID NO: 2481858 - RNA, 19 nt, Artificial Sequence
  Description of Artificial Sequence: Synthetic oligonucleotide
gcccaucauucauuggcag

SEQ ID NO: 2481859 - RNA, 19 nt, Artificial Sequence
  Description of Artificial Sequence: Synthetic oligonucleotide
caggacuugcgggugacca

SEQ ID NO: 2481860 - RNA, 19 nt, Artificial Sequence
  Description of Artificial Sequence: Synthetic oligonucleotide
gcagccggcgacccgagug

SEQ ID NO: 2481861 - RNA, 19 nt, Artificial Sequence
  Description of Artificial Sequence: Synthetic oligonucleotide
guagcacggcucgucgugc

SEQ ID NO: 2481862 - RNA, 19 nt, Artificial Sequence
  Description of Artificial Sequence: Synthetic oligonucleotide
acccgagugcggccggguc

SEQ ID NO: 2481863 - RNA, 19 nt, Artificial Sequence
  Description of Artificial Sequence: Synthetic oligonucleotide
gucuaagauacuuguucau

SEQ ID NO: 2481864 - RNA, 19 nt, Artificial Sequence
  Description of Artificial Sequence: Synthetic oligonucleotide
gugcggccgggucagaguc

SEQ ID NO: 2481865 - RNA, 19 nt, Artificial Sequence
  Description of Artificial Sequence: Synthetic oligonucleotide
cugguuccgcugcucgcgc

SEQ ID NO: 2481866 - RNA, 19 nt, Artificial Sequence
  Description of Artificial Sequence: Synthetic oligonucleotide
gagugcggccgggucagag

SEQ ID NO: 2481867 - RNA, 19 nt, Artificial Sequence
  Description of Artificial Sequence: Synthetic oligonucleotide
ggccacucugcccaucaug

SEQ ID NO: 2481868 - RNA, 19 nt, Artificial Sequence
  Description of Artificial Sequence: Synthetic oligonucleotide
acagucuaagauacuuguu

SEQ ID NO: 2481869 - RNA, 19 nt, Artificial Sequence
  Description of Artificial Sequence: Synthetic oligonucleotide
agucgggucucacgcgcgu

SEQ ID NO: 2481870 - RNA, 19 nt, Artificial Sequence
  Description of Artificial Sequence: Synthetic oligonucleotide
cagucuucccuuugaaggu

SEQ ID NO: 2481871 - RNA, 19 nt, Artificial Sequence
  Description of Artificial Sequence: Synthetic oligonucleotide
ucucgcggcugguuccgcu

SEQ ID NO: 2481872 - RNA, 19 nt, Artificial Sequence
  Description of Artificial Sequence: Synthetic oligonucleotide
gguaccagccgccagucgu

SEQ ID NO: 2481873 - RNA, 19 nt, Artificial Sequence
  Description of Artificial Sequence: Synthetic oligonucleotide
agcgaggaucauggcccgc

SEQ ID NO: 2481874 - RNA, 19 nt, Artificial Sequence
  Description of Artificial Sequence: Synthetic oligonucleotide
gagcgguuccuggacgcug

SEQ ID NO: 2481875 - RNA, 19 nt, Artificial Sequence
  Description of Artificial Sequence: Synthetic oligonucleotide
uagcacggcucgucgugcu

SEQ ID NO: 2481876 - RNA, 19 nt, Artificial Sequence
  Description of Artificial Sequence: Synthetic oligonucleotide
guaccagccgccagucgug

SEQ ID NO: 2481877 - RNA, 19 nt, Artificial Sequence
  Description of Artificial Sequence: Synthetic oligonucleotide
cguguagucgggucucacg

SEQ ID NO: 2481878 - RNA, 19 nt, Artificial Sequence
  Description of Artificial Sequence: Synthetic oligonucleotide
cucgucgugcugccacagc

SEQ ID NO: 2481879 - RNA, 19 nt, Artificial Sequence
  Description of Artificial Sequence: Synthetic oligonucleotide
agcacggcucgucgugcug

SEQ ID NO: 2481880 - RNA, 19 nt, Artificial Sequence
  Description of Artificial Sequence: Synthetic oligonucleotide
gccacagccaggacuugcg

SEQ ID NO: 2481881 - RNA, 19 nt, Artificial Sequence
  Description of Artificial Sequence: Synthetic oligonucleotide
cucacgcgcgugaggcgcc

SEQ ID NO: 2481882 - RNA, 19 nt, Artificial Sequence
  Description of Artificial Sequence: Synthetic oligonucleotide
cgcacgucggcccaggcgc

SEQ ID NO: 2481883 - RNA, 19 nt, Artificial Sequence
  Description of Artificial Sequence: Synthetic oligonucleotide
gguuccuggacgcugguau

SEQ ID NO: 2481884 - RNA, 19 nt, Artificial Sequence
  Description of Artificial Sequence: Synthetic oligonucleotide
cucgauuucccgagcuuua

SEQ ID NO: 2481885 - RNA, 19 nt, Artificial Sequence
  Description of Artificial Sequence: Synthetic oligonucleotide
caaagguggguaggggaca

SEQ ID NO: 2481886 - RNA, 19 nt, Artificial Sequence
  Description of Artificial Sequence: Synthetic oligonucleotide
cuucgugcuuggguaccag

SEQ ID NO: 2481887 - RNA, 19 nt, Artificial Sequence
  Description of Artificial Sequence: Synthetic oligonucleotide
ugguuccgcugcucgcgca

SEQ ID NO: 2481888 - RNA, 19 nt, Artificial Sequence
  Description of Artificial Sequence: Synthetic oligonucleotide
cgugcuuggguaccagccg

SEQ ID NO: 2481889 - RNA, 19 nt, Artificial Sequence
  Description of Artificial Sequence: Synthetic oligonucleotide
ccgaacacugggaggcggg

SEQ ID NO: 2481890 - RNA, 19 nt, Artificial Sequence
  Description of Artificial Sequence: Synthetic oligonucleotide
agccgaacacugggaggcg

SEQ ID NO: 2481891 - RNA, 19 nt, Artificial Sequence
  Description of Artificial Sequence: Synthetic oligonucleotide
ugccguguagucgggucuc

SEQ ID NO: 2481892 - RNA, 19 nt, Artificial Sequence
  Description of Artificial Sequence: Synthetic oligonucleotide
gcgcaaggcgcgcacgcgg

SEQ ID NO: 2481893 - RNA, 19 nt, Artificial Sequence
  Description of Artificial Sequence: Synthetic oligonucleotide
accagacggcccaagccga

SEQ ID NO: 2481894 - RNA, 19 nt, Artificial Sequence
  Description of Artificial Sequence: Synthetic oligonucleotide
cugucaacugcccaucauu

SEQ ID NO: 2481895 - RNA, 19 nt, Artificial Sequence
  Description of Artificial Sequence: Synthetic oligonucleotide
gacuugcgggugaccagac

SEQ ID NO: 2481896 - RNA, 19 nt, Artificial Sequence
  Description of Artificial Sequence: Synthetic oligonucleotide
uccucugguuuggcaguga

SEQ ID NO: 2481897 - RNA, 19 nt, Artificial Sequence
  Description of Artificial Sequence: Synthetic oligonucleotide
gacgcugguauccccguuu

SEQ ID NO: 2481898 - RNA, 19 nt, Artificial Sequence
  Description of Artificial Sequence: Synthetic oligonucleotide
ucucguagucuagggcgua

SEQ ID NO: 2481899 - RNA, 19 nt, Artificial Sequence
  Description of Artificial Sequence: Synthetic oligonucleotide
aggaugcacccgagucccc

SEQ ID NO: 2481900 - RNA, 19 nt, Artificial Sequence
  Description of Artificial Sequence: Synthetic oligonucleotide
agucuagggcguagagcug

SEQ ID NO: 2481901 - RNA, 19 nt, Artificial Sequence
  Description of Artificial Sequence: Synthetic oligonucleotide
cagucgugguacaugacuu

SEQ ID NO: 2481902 - RNA, 19 nt, Artificial Sequence
  Description of Artificial Sequence: Synthetic oligonucleotide
aucucgcggcugguuccgc

SEQ ID NO: 2481903 - RNA, 19 nt, Artificial Sequence
  Description of Artificial Sequence: Synthetic oligonucleotide
gggcguagagcugcgaauc

SEQ ID NO: 2481904 - RNA, 19 nt, Artificial Sequence
  Description of Artificial Sequence: Synthetic oligonucleotide
cucgcgcaaggcgcgcacg

SEQ ID NO: 2481905 - RNA, 19 nt, Artificial Sequence
  Description of Artificial Sequence: Synthetic oligonucleotide
gggucuaacucuccaccaa

SEQ ID NO: 2481906 - RNA, 19 nt, Artificial Sequence
  Description of Artificial Sequence: Synthetic oligonucleotide
caguuagacuggggugccc

SEQ ID NO: 2481907 - RNA, 19 nt, Artificial Sequence
  Description of Artificial Sequence: Synthetic oligonucleotide
guacaugacuugcucgauu

SEQ ID NO: 2481908 - RNA, 19 nt, Artificial Sequence
  Description of Artificial Sequence: Synthetic oligonucleotide
ggacuugcgggugaccaga

SEQ ID NO: 2481909 - RNA, 19 nt, Artificial Sequence
  Description of Artificial Sequence: Synthetic oligonucleotide
gcaguuagacuggggugcc

SEQ ID NO: 2481910 - RNA, 19 nt, Artificial Sequence
  Description of Artificial Sequence: Synthetic oligonucleotide
gcgcacgucggcccaggcg

SEQ ID NO: 2481911 - RNA, 19 nt, Artificial Sequence
  Description of Artificial Sequence: Synthetic oligonucleotide
agccggcgacccgagugcg

SEQ ID NO: 2481912 - RNA, 19 nt, Artificial Sequence
  Description of Artificial Sequence: Synthetic oligonucleotide
acggcccaagccgaacacu

SEQ ID NO: 2481913 - RNA, 19 nt, Artificial Sequence
  Description of Artificial Sequence: Synthetic oligonucleotide
gggucucacgcgcgugagg

SEQ ID NO: 2481914 - RNA, 19 nt, Artificial Sequence
  Description of Artificial Sequence: Synthetic oligonucleotide
ugcgaaucucgcggcuggu

SEQ ID NO: 2481915 - RNA, 19 nt, Artificial Sequence
  Description of Artificial Sequence: Synthetic oligonucleotide
ccgugguccagguucugug

SEQ ID NO: 2481916 - RNA, 19 nt, Artificial Sequence
  Description of Artificial Sequence: Synthetic oligonucleotide
ccucuucgugcuuggguac

SEQ ID NO: 2481917 - RNA, 19 nt, Artificial Sequence
  Description of Artificial Sequence: Synthetic oligonucleotide
gugaaggccuccucuucgu

SEQ ID NO: 2481918 - RNA, 19 nt, Artificial Sequence
  Description of Artificial Sequence: Synthetic oligonucleotide
ggguucaauccguccucug

SEQ ID NO: 2481919 - RNA, 19 nt, Artificial Sequence
  Description of Artificial Sequence: Synthetic oligonucleotide
cagccgccagucgugguac

SEQ ID NO: 2481920 - RNA, 19 nt, Artificial Sequence
  Description of Artificial Sequence: Synthetic oligonucleotide
guuccgcugcucgcgcaag

SEQ ID NO: 2481921 - RNA, 19 nt, Artificial Sequence
  Description of Artificial Sequence: Synthetic oligonucleotide
ggcgacccgagugcggccg

SEQ ID NO: 2481922 - RNA, 19 nt, Artificial Sequence
  Description of Artificial Sequence: Synthetic oligonucleotide
ugcacccgaguccccucua

SEQ ID NO: 2481923 - RNA, 19 nt, Artificial Sequence
  Description of Artificial Sequence: Synthetic oligonucleotide
guuuugcaggguaguccca

SEQ ID NO: 2481924 - RNA, 19 nt, Artificial Sequence
  Description of Artificial Sequence: Synthetic oligonucleotide
gccgaacacugggaggcgg

SEQ ID NO: 2481925 - RNA, 19 nt, Artificial Sequence
  Description of Artificial Sequence: Synthetic oligonucleotide
cgaaucucgcggcugguuc

SEQ ID NO: 2481926 - RNA, 19 nt, Artificial Sequence
  Description of Artificial Sequence: Synthetic oligonucleotide
ggcugguuccgcugcucgc

SEQ ID NO: 2481927 - RNA, 19 nt, Artificial Sequence
  Description of Artificial Sequence: Synthetic oligonucleotide
ccuguuuugcaggguaguc

SEQ ID NO: 2481928 - RNA, 19 nt, Artificial Sequence
  Description of Artificial Sequence: Synthetic oligonucleotide
gcugcgaaucucgcggcug

SEQ ID NO: 2481929 - RNA, 19 nt, Artificial Sequence
  Description of Artificial Sequence: Synthetic oligonucleotide
ccuggacgcugguaucccc

SEQ ID NO: 2481930 - RNA, 19 nt, Artificial Sequence
  Description of Artificial Sequence: Synthetic oligonucleotide
gggcgagcagcuggaagag

SEQ ID NO: 2481931 - RNA, 19 nt, Artificial Sequence
  Description of Artificial Sequence: Synthetic oligonucleotide
gcgggcgagcagcuggaag

SEQ ID NO: 2481932 - RNA, 19 nt, Artificial Sequence
  Description of Artificial Sequence: Synthetic oligonucleotide
gcacccgaguccccucuag

SEQ ID NO: 2481933 - RNA, 19 nt, Artificial Sequence
  Description of Artificial Sequence: Synthetic oligonucleotide
cagacggcccaagccgaac

SEQ ID NO: 2481934 - RNA, 19 nt, Artificial Sequence
  Description of Artificial Sequence: Synthetic oligonucleotide
cgcgugaggcgccaguagc

SEQ ID NO: 2481935 - RNA, 19 nt, Artificial Sequence
  Description of Artificial Sequence: Synthetic oligonucleotide
gugccguguagucgggucu

SEQ ID NO: 2481936 - RNA, 19 nt, Artificial Sequence
  Description of Artificial Sequence: Synthetic oligonucleotide
ggcccaggcgcgcaccggc

SEQ ID NO: 2481937 - RNA, 19 nt, Artificial Sequence
  Description of Artificial Sequence: Synthetic oligonucleotide
ggugaccagacggcccaag

SEQ ID NO: 2481938 - RNA, 19 nt, Artificial Sequence
  Description of Artificial Sequence: Synthetic oligonucleotide
gaggcgccaguagcacggc

SEQ ID NO: 2481939 - RNA, 19 nt, Artificial Sequence
  Description of Artificial Sequence: Synthetic oligonucleotide
ggcgcgcaccggcagccgg

SEQ ID NO: 2481940 - RNA, 19 nt, Artificial Sequence
  Description of Artificial Sequence: Synthetic oligonucleotide
ggcgccaguagcacggcuc

SEQ ID NO: 2481941 - RNA, 19 nt, Artificial Sequence
  Description of Artificial Sequence: Synthetic oligonucleotide
accagccgccagucguggu

SEQ ID NO: 2481942 - RNA, 19 nt, Artificial Sequence
  Description of Artificial Sequence: Synthetic oligonucleotide
ggcgagcagcuggaagagg

SEQ ID NO: 2481943 - RNA, 19 nt, Artificial Sequence
  Description of Artificial Sequence: Synthetic oligonucleotide
ccagucgugguacaugacu

SEQ ID NO: 2481944 - RNA, 19 nt, Artificial Sequence
  Description of Artificial Sequence: Synthetic oligonucleotide
acauggccacucugcccau

SEQ ID NO: 2481945 - RNA, 19 nt, Artificial Sequence
  Description of Artificial Sequence: Synthetic oligonucleotide
acgcgcgugaggcgccagu

SEQ ID NO: 2481946 - RNA, 19 nt, Artificial Sequence
  Description of Artificial Sequence: Synthetic oligonucleotide
cauggcccgcagcaaaggu

SEQ ID NO: 2481947 - RNA, 19 nt, Artificial Sequence
  Description of Artificial Sequence: Synthetic oligonucleotide
gcacggcucgucgugcugc

SEQ ID NO: 2481948 - RNA, 19 nt, Artificial Sequence
  Description of Artificial Sequence: Synthetic oligonucleotide
gucgggucucacgcgcgug

SEQ ID NO: 2481949 - RNA, 19 nt, Artificial Sequence
  Description of Artificial Sequence: Synthetic oligonucleotide
gucucguagucuagggcgu

SEQ ID NO: 2481950 - RNA, 19 nt, Artificial Sequence
  Description of Artificial Sequence: Synthetic oligonucleotide
cgcagcaaagguggguagg

SEQ ID NO: 2481951 - RNA, 19 nt, Artificial Sequence
  Description of Artificial Sequence: Synthetic oligonucleotide
cagccugucaacugcccau

SEQ ID NO: 2481952 - RNA, 19 nt, Artificial Sequence
  Description of Artificial Sequence: Synthetic oligonucleotide
ccgcugcucgcgcaaggcg

SEQ ID NO: 2481953 - RNA, 19 nt, Artificial Sequence
  Description of Artificial Sequence: Synthetic oligonucleotide
gcgcgugaggcgccaguag

SEQ ID NO: 2481954 - RNA, 19 nt, Artificial Sequence
  Description of Artificial Sequence: Synthetic oligonucleotide
ggguaggggacaggguuca

SEQ ID NO: 2481955 - RNA, 19 nt, Artificial Sequence
  Description of Artificial Sequence: Synthetic oligonucleotide
ucacgcgcgugaggcgcca

SEQ ID NO: 2481956 - RNA, 19 nt, Artificial Sequence
  Description of Artificial Sequence: Synthetic oligonucleotide
cgagcuuuauccucagucu

SEQ ID NO: 2481957 - RNA, 19 nt, Artificial Sequence
  Description of Artificial Sequence: Synthetic oligonucleotide
gccaguagcacggcucguc

SEQ ID NO: 2481958 - RNA, 19 nt, Artificial Sequence
  Description of Artificial Sequence: Synthetic oligonucleotide
ccgcagcaaagguggguag

SEQ ID NO: 2481959 - RNA, 19 nt, Artificial Sequence
  Description of Artificial Sequence: Synthetic oligonucleotide
gcggcgggccagcucggcg

SEQ ID NO: 2481960 - RNA, 19 nt, Artificial Sequence
  Description of Artificial Sequence: Synthetic oligonucleotide
gguuccgcugcucgcgcaa

SEQ ID NO: 2481961 - RNA, 19 nt, Artificial Sequence
  Description of Artificial Sequence: Synthetic oligonucleotide
cucuagguucaggagcggu

SEQ ID NO: 2481962 - RNA, 19 nt, Artificial Sequence
  Description of Artificial Sequence: Synthetic oligonucleotide
gcgaggaucauggcccgca

SEQ ID NO: 2481963 - RNA, 19 nt, Artificial Sequence
  Description of Artificial Sequence: Synthetic oligonucleotide
gcguagagcugcgaaucuc

SEQ ID NO: 2481964 - RNA, 19 nt, Artificial Sequence
  Description of Artificial Sequence: Synthetic oligonucleotide
cauggccacucugcccauc

SEQ ID NO: 2481965 - RNA, 19 nt, Artificial Sequence
  Description of Artificial Sequence: Synthetic oligonucleotide
agccgccagucgugguaca

SEQ ID NO: 2481966 - RNA, 19 nt, Artificial Sequence
  Description of Artificial Sequence: Synthetic oligonucleotide
acucuccaccaaaggggau

SEQ ID NO: 2481967 - RNA, 19 nt, Artificial Sequence
  Description of Artificial Sequence: Synthetic oligonucleotide
gcucgucgugcugccacag

SEQ ID NO: 2481968 - RNA, 19 nt, Artificial Sequence
  Description of Artificial Sequence: Synthetic oligonucleotide
cccaagccgaacacuggga

SEQ ID NO: 2481969 - RNA, 19 nt, Artificial Sequence
  Description of Artificial Sequence: Synthetic oligonucleotide
cgauuucccgagcuuuauc

SEQ ID NO: 2481970 - RNA, 19 nt, Artificial Sequence
  Description of Artificial Sequence: Synthetic oligonucleotide
ucccgugguccagguucug

SEQ ID NO: 2481971 - RNA, 19 nt, Artificial Sequence
  Description of Artificial Sequence: Synthetic oligonucleotide
gccugucaacugcccauca

SEQ ID NO: 2481972 - RNA, 19 nt, Artificial Sequence
  Description of Artificial Sequence: Synthetic oligonucleotide
ggcguagagcugcgaaucu

SEQ ID NO: 2481973 - RNA, 19 nt, Artificial Sequence
  Description of Artificial Sequence: Synthetic oligonucleotide
gcugugaaggccuccucuu

SEQ ID NO: 2481974 - RNA, 19 nt, Artificial Sequence
  Description of Artificial Sequence: Synthetic oligonucleotide
caguagcacggcucgucgu

SEQ ID NO: 2481975 - RNA, 19 nt, Artificial Sequence
  Description of Artificial Sequence: Synthetic oligonucleotide
gcgugaggcgccaguagca

SEQ ID NO: 2481976 - RNA, 19 nt, Artificial Sequence
  Description of Artificial Sequence: Synthetic oligonucleotide
ccggcgacccgagugcggc

SEQ ID NO: 2481977 - RNA, 19 nt, Artificial Sequence
  Description of Artificial Sequence: Synthetic oligonucleotide
cgcaaggcgcgcacgcggc

SEQ ID NO: 2481978 - RNA, 19 nt, Artificial Sequence
  Description of Artificial Sequence: Synthetic oligonucleotide
ggcucgucgugcugccaca

SEQ ID NO: 2481979 - RNA, 19 nt, Artificial Sequence
  Description of Artificial Sequence: Synthetic oligonucleotide
cgccagucgugguacauga

SEQ ID NO: 2481980 - RNA, 19 nt, Artificial Sequence
  Description of Artificial Sequence: Synthetic oligonucleotide
cucccgugguccagguucu

SEQ ID NO: 2481981 - RNA, 19 nt, Artificial Sequence
  Description of Artificial Sequence: Synthetic oligonucleotide
cugcucgcgcaaggcgcgc

SEQ ID NO: 2481982 - RNA, 19 nt, Artificial Sequence
  Description of Artificial Sequence: Synthetic oligonucleotide
ccgagugcggccgggucag

SEQ ID NO: 2481983 - RNA, 19 nt, Artificial Sequence
  Description of Artificial Sequence: Synthetic oligonucleotide
gaucagccggggccucacu

SEQ ID NO: 2481984 - RNA, 19 nt, Artificial Sequence
  Description of Artificial Sequence: Synthetic oligonucleotide
cuagggcguagagcugcga

SEQ ID NO: 2481985 - RNA, 19 nt, Artificial Sequence
  Description of Artificial Sequence: Synthetic oligonucleotide
aggcgggcgagcagcugga

SEQ ID NO: 2481986 - RNA, 19 nt, Artificial Sequence
  Description of Artificial Sequence: Synthetic oligonucleotide
gcgacccgagugcggccgg

SEQ ID NO: 2481987 - RNA, 19 nt, Artificial Sequence
  Description of Artificial Sequence: Synthetic oligonucleotide
gcucgcgcaaggcgcgcac

SEQ ID NO: 2481988 - RNA, 19 nt, Artificial Sequence
  Description of Artificial Sequence: Synthetic oligonucleotide
acgucggcccaggcgcgca

SEQ ID NO: 2481989 - RNA, 19 nt, Artificial Sequence
  Description of Artificial Sequence: Synthetic oligonucleotide
acggcgcacgucggcccag

SEQ ID NO: 2481990 - RNA, 19 nt, Artificial Sequence
  Description of Artificial Sequence: Synthetic oligonucleotide
ccucugguuuggcagugaa

SEQ ID NO: 2481991 - RNA, 19 nt, Artificial Sequence
  Description of Artificial Sequence: Synthetic oligonucleotide
cgugaggcgccaguagcac

SEQ ID NO: 2481992 - RNA, 19 nt, Artificial Sequence
  Description of Artificial Sequence: Synthetic oligonucleotide
gguacaugacuugcucgau

SEQ ID NO: 2481993 - RNA, 19 nt, Artificial Sequence
  Description of Artificial Sequence: Synthetic oligonucleotide
gcucgauuucccgagcuuu

SEQ ID NO: 2481994 - RNA, 19 nt, Artificial Sequence
  Description of Artificial Sequence: Synthetic oligonucleotide
ggaugcacccgaguccccu

SEQ ID NO: 2481995 - RNA, 19 nt, Artificial Sequence
  Description of Artificial Sequence: Synthetic oligonucleotide
ggcgcacgucggcccaggc

SEQ ID NO: 2481996 - RNA, 19 nt, Artificial Sequence
  Description of Artificial Sequence: Synthetic oligonucleotide
cgcaccggcagccggcgac

SEQ ID NO: 2481997 - RNA, 19 nt, Artificial Sequence
  Description of Artificial Sequence: Synthetic oligonucleotide
cccgagugcggccggguca

SEQ ID NO: 2481998 - RNA, 19 nt, Artificial Sequence
  Description of Artificial Sequence: Synthetic oligonucleotide
cggcucgucgugcugccac

SEQ ID NO: 2481999 - RNA, 19 nt, Artificial Sequence
  Description of Artificial Sequence: Synthetic oligonucleotide
gguccagguucugugccgu

SEQ ID NO: 2482000 - RNA, 19 nt, Artificial Sequence
  Description of Artificial Sequence: Synthetic oligonucleotide
ggcccgcagcaaagguggg

SEQ ID NO: 2482001 - RNA, 19 nt, Artificial Sequence
  Description of Artificial Sequence: Synthetic oligonucleotide
ccaggacuugcgggugacc

SEQ ID NO: 2482002 - RNA, 19 nt, Artificial Sequence
  Description of Artificial Sequence: Synthetic oligonucleotide
ccgccagucgugguacaug

SEQ ID NO: 2482003 - RNA, 19 nt, Artificial Sequence
  Description of Artificial Sequence: Synthetic oligonucleotide
ggguagucccaaggaugca

SEQ ID NO: 2482004 - RNA, 19 nt, Artificial Sequence
  Description of Artificial Sequence: Synthetic oligonucleotide
acggcucgucgugcugcca

SEQ ID NO: 2482005 - RNA, 19 nt, Artificial Sequence
  Description of Artificial Sequence: Synthetic oligonucleotide
gccagucgugguacaugac

SEQ ID NO: 2482006 - RNA, 19 nt, Artificial Sequence
  Description of Artificial Sequence: Synthetic oligonucleotide
cacgcgcgugaggcgccag

SEQ ID NO: 2482007 - RNA, 19 nt, Artificial Sequence
  Description of Artificial Sequence: Synthetic oligonucleotide
cgucgugcugccacagcca

SEQ ID NO: 2482008 - RNA, 19 nt, Artificial Sequence
  Description of Artificial Sequence: Synthetic oligonucleotide
cccgcagcaaaggugggua

SEQ ID NO: 2482009 - RNA, 19 nt, Artificial Sequence
  Description of Artificial Sequence: Synthetic oligonucleotide
ccagguucugugccgugua

SEQ ID NO: 2482010 - RNA, 19 nt, Artificial Sequence
  Description of Artificial Sequence: Synthetic oligonucleotide
gccggcgacccgagugcgg

SEQ ID NO: 2482011 - RNA, 19 nt, Artificial Sequence
  Description of Artificial Sequence: Synthetic oligonucleotide
ccagccgccagucguggua

SEQ ID NO: 2482012 - RNA, 19 nt, Artificial Sequence
  Description of Artificial Sequence: Synthetic oligonucleotide
ccguguagucgggucucac

SEQ ID NO: 2482013 - RNA, 19 nt, Artificial Sequence
  Description of Artificial Sequence: Synthetic oligonucleotide
acgcggcgggccagcucgg

SEQ ID NO: 2482014 - RNA, 19 nt, Artificial Sequence
  Description of Artificial Sequence: Synthetic oligonucleotide
ggcgcgcacgcggcgggcc

SEQ ID NO: 2482015 - RNA, 19 nt, Artificial Sequence
  Description of Artificial Sequence: Synthetic oligonucleotide
ggcucucacggcgcacguc

SEQ ID NO: 2482016 - RNA, 19 nt, Artificial Sequence
  Description of Artificial Sequence: Synthetic oligonucleotide
gacccgagugcggccgggu

SEQ ID NO: 2482017 - RNA, 19 nt, Artificial Sequence
  Description of Artificial Sequence: Synthetic oligonucleotide
ggccgggucagagucucgu

SEQ ID NO: 2482018 - RNA, 19 nt, Artificial Sequence
  Description of Artificial Sequence: Synthetic oligonucleotide
cgcgcaaggcgcgcacgcg

SEQ ID NO: 2482019 - RNA, 19 nt, Artificial Sequence
  Description of Artificial Sequence: Synthetic oligonucleotide
gcgcgcaccggcagccggc

SEQ ID NO: 2482020 - RNA, 19 nt, Artificial Sequence
  Description of Artificial Sequence: Synthetic oligonucleotide
ccugucaacugcccaucau

SEQ ID NO: 2482021 - RNA, 19 nt, Artificial Sequence
  Description of Artificial Sequence: Synthetic oligonucleotide
ccagacggcccaagccgaa

SEQ ID NO: 2482022 - RNA, 19 nt, Artificial Sequence
  Description of Artificial Sequence: Synthetic oligonucleotide
cccaaggaugcacccgagu

SEQ ID NO: 2482023 - RNA, 19 nt, Artificial Sequence
  Description of Artificial Sequence: Synthetic oligonucleotide
gcccaucauggauggcagu

SEQ ID NO: 2482024 - RNA, 19 nt, Artificial Sequence
  Description of Artificial Sequence: Synthetic oligonucleotide
ccggcagccggcgacccga

SEQ ID NO: 2482025 - RNA, 19 nt, Artificial Sequence
  Description of Artificial Sequence: Synthetic oligonucleotide
ggagcgguuccuggacgcu

SEQ ID NO: 2482026 - RNA, 19 nt, Artificial Sequence
  Description of Artificial Sequence: Synthetic oligonucleotide
gccguguagucgggucuca

SEQ ID NO: 2482027 - RNA, 19 nt, Artificial Sequence
  Description of Artificial Sequence: Synthetic oligonucleotide
cgggucucacgcgcgugag

SEQ ID NO: 2482028 - RNA, 19 nt, Artificial Sequence
  Description of Artificial Sequence: Synthetic oligonucleotide
ggcggcucucacggcgcac

SEQ ID NO: 2482029 - RNA, 19 nt, Artificial Sequence
  Description of Artificial Sequence: Synthetic oligonucleotide
cgaucagccggggccucac

SEQ ID NO: 2482030 - RNA, 19 nt, Artificial Sequence
  Description of Artificial Sequence: Synthetic oligonucleotide
gcggcugguuccgcugcuc

SEQ ID NO: 2482031 - RNA, 19 nt, Artificial Sequence
  Description of Artificial Sequence: Synthetic oligonucleotide
gcgaucagccggggccuca

SEQ ID NO: 2482032 - RNA, 19 nt, Artificial Sequence
  Description of Artificial Sequence: Synthetic oligonucleotide
cugugccguguagucgggu

SEQ ID NO: 2482033 - RNA, 19 nt, Artificial Sequence
  Description of Artificial Sequence: Synthetic oligonucleotide
ggcgaucagccggggccuc

SEQ ID NO: 2482034 - RNA, 19 nt, Artificial Sequence
  Description of Artificial Sequence: Synthetic oligonucleotide
cgcgcaccggcagccggcg

SEQ ID NO: 2482035 - RNA, 19 nt, Artificial Sequence
  Description of Artificial Sequence: Synthetic oligonucleotide
gucguucagcgaggaucau

SEQ ID NO: 2482036 - RNA, 19 nt, Artificial Sequence
  Description of Artificial Sequence: Synthetic oligonucleotide
ggacgcugguauccccguu

SEQ ID NO: 2482037 - RNA, 19 nt, Artificial Sequence
  Description of Artificial Sequence: Synthetic oligonucleotide
cggcgacccgagugcggcc

SEQ ID NO: 2482038 - RNA, 19 nt, Artificial Sequence
  Description of Artificial Sequence: Synthetic oligonucleotide
gcccgcagcaaaggugggu

SEQ ID NO: 2482039 - RNA, 19 nt, Artificial Sequence
  Description of Artificial Sequence: Synthetic oligonucleotide
gcgaaucucgcggcugguu

SEQ ID NO: 2482040 - RNA, 19 nt, Artificial Sequence
  Description of Artificial Sequence: Synthetic oligonucleotide
gggugaccagacggcccaa

SEQ ID NO: 2482041 - RNA, 19 nt, Artificial Sequence
  Description of Artificial Sequence: Synthetic oligonucleotide
gcgcacgcggcgggccagc

SEQ ID NO: 2482042 - RNA, 19 nt, Artificial Sequence
  Description of Artificial Sequence: Synthetic oligonucleotide
gcgguuccuggacgcuggu

SEQ ID NO: 2482043 - RNA, 19 nt, Artificial Sequence
  Description of Artificial Sequence: Synthetic oligonucleotide
cggcagccggcgacccgag

SEQ ID NO: 2482044 - RNA, 19 nt, Artificial Sequence
  Description of Artificial Sequence: Synthetic oligonucleotide
gccgccagucgugguacau

SEQ ID NO: 2482045 - RNA, 19 nt, Artificial Sequence
  Description of Artificial Sequence: Synthetic oligonucleotide
cccgugguccagguucugu

SEQ ID NO: 2482046 - RNA, 19 nt, Artificial Sequence
  Description of Artificial Sequence: Synthetic oligonucleotide
ggcagccggcgacccgagu

SEQ ID NO: 2482047 - RNA, 19 nt, Artificial Sequence
  Description of Artificial Sequence: Synthetic oligonucleotide
cggcgcacgucggcccagg

SEQ ID NO: 2482048 - RNA, 19 nt, Artificial Sequence
  Description of Artificial Sequence: Synthetic oligonucleotide
cccgagcuuuauccucagu

SEQ ID NO: 2482049 - RNA, 19 nt, Artificial Sequence
  Description of Artificial Sequence: Synthetic oligonucleotide
cuccaccaaaggggauguu

SEQ ID NO: 2482050 - RNA, 19 nt, Artificial Sequence
  Description of Artificial Sequence: Synthetic oligonucleotide
ccccaggcccucccguggu

SEQ ID NO: 2482051 - RNA, 19 nt, Artificial Sequence
  Description of Artificial Sequence: Synthetic oligonucleotide
cgcgcgugaggcgccagua

SEQ ID NO: 2482052 - RNA, 19 nt, Artificial Sequence
  Description of Artificial Sequence: Synthetic oligonucleotide
cggcgaucagccggggccu

SEQ ID NO: 2482053 - RNA, 19 nt, Artificial Sequence
  Description of Artificial Sequence: Synthetic oligonucleotide
cggcucucacggcgcacgu

SEQ ID NO: 2482054 - RNA, 19 nt, Artificial Sequence
  Description of Artificial Sequence: Synthetic oligonucleotide
cccucccgugguccagguu

SEQ ID NO: 2482055 - RNA, 19 nt, Artificial Sequence
  Description of Artificial Sequence: Synthetic oligonucleotide
cgagugcggccgggucaga

SEQ ID NO: 2482056 - RNA, 19 nt, Artificial Sequence
  Description of Artificial Sequence: Synthetic oligonucleotide
cgccaguagcacggcucgu

SEQ ID NO: 2482057 - RNA, 19 nt, Artificial Sequence
  Description of Artificial Sequence: Synthetic oligonucleotide
cgcacgcggcgggccagcu

SEQ ID NO: 2482058 - RNA, 19 nt, Artificial Sequence
  Description of Artificial Sequence: Synthetic oligonucleotide
uuuauuucgacccacagac

SEQ ID NO: 2482059 - RNA, 19 nt, Artificial Sequence
  Description of Artificial Sequence: Synthetic oligonucleotide
aaugagagagacugaaguc

SEQ ID NO: 2482060 - RNA, 19 nt, Artificial Sequence
  Description of Artificial Sequence: Synthetic oligonucleotide
uccaauuucguccacagac

SEQ ID NO: 2482061 - RNA, 19 nt, Artificial Sequence
  Description of Artificial Sequence: Synthetic oligonucleotide
aacuauuucaggauuuagc

SEQ ID NO: 2482062 - RNA, 19 nt, Artificial Sequence
  Description of Artificial Sequence: Synthetic oligonucleotide
uucugaaagagcacuacgg

SEQ ID NO: 2482063 - RNA, 19 nt, Artificial Sequence
  Description of Artificial Sequence: Synthetic oligonucleotide
agagacugaagucacgccc

SEQ ID NO: 2482064 - RNA, 19 nt, Artificial Sequence
  Description of Artificial Sequence: Synthetic oligonucleotide
aggggaugcauacacagcc

SEQ ID NO: 2482065 - RNA, 19 nt, Artificial Sequence
  Description of Artificial Sequence: Synthetic oligonucleotide
uuuacagucacaucacacc

SEQ ID NO: 2482066 - RNA, 19 nt, Artificial Sequence
  Description of Artificial Sequence: Synthetic oligonucleotide
gacauaggaacccuuacag

SEQ ID NO: 2482067 - RNA, 19 nt, Artificial Sequence
  Description of Artificial Sequence: Synthetic oligonucleotide
cuucacugagaccagaucg

SEQ ID NO: 2482068 - RNA, 19 nt, Artificial Sequence
  Description of Artificial Sequence: Synthetic oligonucleotide
guaacuucagagcaugugg

SEQ ID NO: 2482069 - RNA, 19 nt, Artificial Sequence
  Description of Artificial Sequence: Synthetic oligonucleotide
ucagaaauuucacugucgc

SEQ ID NO: 2482070 - RNA, 19 nt, Artificial Sequence
  Description of Artificial Sequence: Synthetic oligonucleotide
agauucuugaagaaguggc

SEQ ID NO: 2482071 - RNA, 19 nt, Artificial Sequence
  Description of Artificial Sequence: Synthetic oligonucleotide
agucacaucacaccaguac

SEQ ID NO: 2482072 - RNA, 19 nt, Artificial Sequence
  Description of Artificial Sequence: Synthetic oligonucleotide
cauaggaacccuuacagug

SEQ ID NO: 2482073 - RNA, 19 nt, Artificial Sequence
  Description of Artificial Sequence: Synthetic oligonucleotide
gaggaaggaguuuauuucg

SEQ ID NO: 2482074 - RNA, 19 nt, Artificial Sequence
  Description of Artificial Sequence: Synthetic oligonucleotide
auuuucaggggaugcauac

SEQ ID NO: 2482075 - RNA, 19 nt, Artificial Sequence
  Description of Artificial Sequence: Synthetic oligonucleotide
uuuauaaacgcggugucgc

SEQ ID NO: 2482076 - RNA, 19 nt, Artificial Sequence
  Description of Artificial Sequence: Synthetic oligonucleotide
uuacagucacaucacacca

SEQ ID NO: 2482077 - RNA, 19 nt, Artificial Sequence
  Description of Artificial Sequence: Synthetic oligonucleotide
agagagacugaagucacgc

SEQ ID NO: 2482078 - RNA, 19 nt, Artificial Sequence
  Description of Artificial Sequence: Synthetic oligonucleotide
ucugaaagagcacuacgga

SEQ ID NO: 2482079 - RNA, 19 nt, Artificial Sequence
  Description of Artificial Sequence: Synthetic oligonucleotide
aguuuauaaacgcgguguc

SEQ ID NO: 2482080 - RNA, 19 nt, Artificial Sequence
  Description of Artificial Sequence: Synthetic oligonucleotide
gaaggaguuuauuucgacc

SEQ ID NO: 2482081 - RNA, 19 nt, Artificial Sequence
  Description of Artificial Sequence: Synthetic oligonucleotide
agcuuguugagcuaaccag

SEQ ID NO: 2482082 - RNA, 19 nt, Artificial Sequence
  Description of Artificial Sequence: Synthetic oligonucleotide
auuucguccacagacugcg

SEQ ID NO: 2482083 - RNA, 19 nt, Artificial Sequence
  Description of Artificial Sequence: Synthetic oligonucleotide
gaugcauacacagccagcc

SEQ ID NO: 2482084 - RNA, 19 nt, Artificial Sequence
  Description of Artificial Sequence: Synthetic oligonucleotide
guaucuuuuggucuugggc

SEQ ID NO: 2482085 - RNA, 19 nt, Artificial Sequence
  Description of Artificial Sequence: Synthetic oligonucleotide
ugcauacacagccagcccc

SEQ ID NO: 2482086 - RNA, 19 nt, Artificial Sequence
  Description of Artificial Sequence: Synthetic oligonucleotide
auuuacagucacaucacac

SEQ ID NO: 2482087 - RNA, 19 nt, Artificial Sequence
  Description of Artificial Sequence: Synthetic oligonucleotide
uuucaggggaugcauacac

SEQ ID NO: 2482088 - RNA, 19 nt, Artificial Sequence
  Description of Artificial Sequence: Synthetic oligonucleotide
gucgaguccauuuacaguc

SEQ ID NO: 2482089 - RNA, 19 nt, Artificial Sequence
  Description of Artificial Sequence: Synthetic oligonucleotide
caccaguuuauaaacgcgg

SEQ ID NO: 2482090 - RNA, 19 nt, Artificial Sequence
  Description of Artificial Sequence: Synthetic oligonucleotide
acuacggacauaggaaccc

SEQ ID NO: 2482091 - RNA, 19 nt, Artificial Sequence
  Description of Artificial Sequence: Synthetic oligonucleotide
uauuucgacccacagacuu

SEQ ID NO: 2482092 - RNA, 19 nt, Artificial Sequence
  Description of Artificial Sequence: Synthetic oligonucleotide
aauuucguccacagacugc

SEQ ID NO: 2482093 - RNA, 19 nt, Artificial Sequence
  Description of Artificial Sequence: Synthetic oligonucleotide
uucacugagaccagaucgc

SEQ ID NO: 2482094 - RNA, 19 nt, Artificial Sequence
  Description of Artificial Sequence: Synthetic oligonucleotide
agugcuuguaucuuuuggu

SEQ ID NO: 2482095 - RNA, 19 nt, Artificial Sequence
  Description of Artificial Sequence: Synthetic oligonucleotide
aucacaccaguacucgccc

SEQ ID NO: 2482096 - RNA, 19 nt, Artificial Sequence
  Description of Artificial Sequence: Synthetic oligonucleotide
aacgcggugucgccggugc

SEQ ID NO: 2482097 - RNA, 19 nt, Artificial Sequence
  Description of Artificial Sequence: Synthetic oligonucleotide
cucagaaauuucacugucg

SEQ ID NO: 2482098 - RNA, 19 nt, Artificial Sequence
  Description of Artificial Sequence: Synthetic oligonucleotide
cuucugaaagagcacuacg

SEQ ID NO: 2482099 - RNA, 19 nt, Artificial Sequence
  Description of Artificial Sequence: Synthetic oligonucleotide
acccuuacagugucgaguc

SEQ ID NO: 2482100 - RNA, 19 nt, Artificial Sequence
  Description of Artificial Sequence: Synthetic oligonucleotide
ugcuccgguaaugagagag

SEQ ID NO: 2482101 - RNA, 19 nt, Artificial Sequence
  Description of Artificial Sequence: Synthetic oligonucleotide
auaaacgcggugucgccgg

SEQ ID NO: 2482102 - RNA, 19 nt, Artificial Sequence
  Description of Artificial Sequence: Synthetic oligonucleotide
caaucucuccucuucaaac

SEQ ID NO: 2482103 - RNA, 19 nt, Artificial Sequence
  Description of Artificial Sequence: Synthetic oligonucleotide
uauaaacgcggugucgccg

SEQ ID NO: 2482104 - RNA, 19 nt, Artificial Sequence
  Description of Artificial Sequence: Synthetic oligonucleotide
uguggggcaaccacaacac

SEQ ID NO: 2482105 - RNA, 19 nt, Artificial Sequence
  Description of Artificial Sequence: Synthetic oligonucleotide
uucucagaaauuucacugu

SEQ ID NO: 2482106 - RNA, 19 nt, Artificial Sequence
  Description of Artificial Sequence: Synthetic oligonucleotide
gaagucacgccccggggcg

SEQ ID NO: 2482107 - RNA, 19 nt, Artificial Sequence
  Description of Artificial Sequence: Synthetic oligonucleotide
agcuucuuauuuucagggg

SEQ ID NO: 2482108 - RNA, 19 nt, Artificial Sequence
  Description of Artificial Sequence: Synthetic oligonucleotide
acaacaccaagauucuuga

SEQ ID NO: 2482109 - RNA, 19 nt, Artificial Sequence
  Description of Artificial Sequence: Synthetic oligonucleotide
cagcgcuccacgaugaccg

SEQ ID NO: 2482110 - RNA, 19 nt, Artificial Sequence
  Description of Artificial Sequence: Synthetic oligonucleotide
caucacaccaguacucgcc

SEQ ID NO: 2482111 - RNA, 19 nt, Artificial Sequence
  Description of Artificial Sequence: Synthetic oligonucleotide
guuuauaaacgcggugucg

SEQ ID NO: 2482112 - RNA, 19 nt, Artificial Sequence
  Description of Artificial Sequence: Synthetic oligonucleotide
agcggcaccuuccaccagc

SEQ ID NO: 2482113 - RNA, 19 nt, Artificial Sequence
  Description of Artificial Sequence: Synthetic oligonucleotide
ucaaacagcuucuuauuuu

SEQ ID NO: 2482114 - RNA, 19 nt, Artificial Sequence
  Description of Artificial Sequence: Synthetic oligonucleotide
uacagucacaucacaccag

SEQ ID NO: 2482115 - RNA, 19 nt, Artificial Sequence
  Description of Artificial Sequence: Synthetic oligonucleotide
uuucguguccuccaccagu

SEQ ID NO: 2482116 - RNA, 19 nt, Artificial Sequence
  Description of Artificial Sequence: Synthetic oligonucleotide
auguggggcaaccacaaca

SEQ ID NO: 2482117 - RNA, 19 nt, Artificial Sequence
  Description of Artificial Sequence: Synthetic oligonucleotide
uccuccaccaguuuauaaa

SEQ ID NO: 2482118 - RNA, 19 nt, Artificial Sequence
  Description of Artificial Sequence: Synthetic oligonucleotide
ucaggauuuagcuuccauu

SEQ ID NO: 2482119 - RNA, 19 nt, Artificial Sequence
  Description of Artificial Sequence: Synthetic oligonucleotide
accaguacucgccccaccg

SEQ ID NO: 2482120 - RNA, 19 nt, Artificial Sequence
  Description of Artificial Sequence: Synthetic oligonucleotide
uccuucuugucucagcaau

SEQ ID NO: 2482121 - RNA, 19 nt, Artificial Sequence
  Description of Artificial Sequence: Synthetic oligonucleotide
uuauaaacgcggugucgcc

SEQ ID NO: 2482122 - RNA, 19 nt, Artificial Sequence
  Description of Artificial Sequence: Synthetic oligonucleotide
cuggacgcagccaagcggc

SEQ ID NO: 2482123 - RNA, 19 nt, Artificial Sequence
  Description of Artificial Sequence: Synthetic oligonucleotide
accaagauucuugaagaag

SEQ ID NO: 2482124 - RNA, 19 nt, Artificial Sequence
  Description of Artificial Sequence: Synthetic oligonucleotide
augcauacacagccagccc

SEQ ID NO: 2482125 - RNA, 19 nt, Artificial Sequence
  Description of Artificial Sequence: Synthetic oligonucleotide
gugucgaguccauuuacag

SEQ ID NO: 2482126 - RNA, 19 nt, Artificial Sequence
  Description of Artificial Sequence: Synthetic oligonucleotide
acagucacaucacaccagu

SEQ ID NO: 2482127 - RNA, 19 nt, Artificial Sequence
  Description of Artificial Sequence: Synthetic oligonucleotide
caauuucguccacagacug

SEQ ID NO: 2482128 - RNA, 19 nt, Artificial Sequence
  Description of Artificial Sequence: Synthetic oligonucleotide
gauaggguccucugguaac

SEQ ID NO: 2482129 - RNA, 19 nt, Artificial Sequence
  Description of Artificial Sequence: Synthetic oligonucleotide
aauucgcggccggaguagc

SEQ ID NO: 2482130 - RNA, 19 nt, Artificial Sequence
  Description of Artificial Sequence: Synthetic oligonucleotide
agacuucuucacugagacc

SEQ ID NO: 2482131 - RNA, 19 nt, Artificial Sequence
  Description of Artificial Sequence: Synthetic oligonucleotide
cagaaauuucacugucgcc

SEQ ID NO: 2482132 - RNA, 19 nt, Artificial Sequence
  Description of Artificial Sequence: Synthetic oligonucleotide
aaauuucacugucgccucu

SEQ ID NO: 2482133 - RNA, 19 nt, Artificial Sequence
  Description of Artificial Sequence: Synthetic oligonucleotide
ugucgaguccauuuacagu

SEQ ID NO: 2482134 - RNA, 19 nt, Artificial Sequence
  Description of Artificial Sequence: Synthetic oligonucleotide
uucaauucgcggccggagu

SEQ ID NO: 2482135 - RNA, 19 nt, Artificial Sequence
  Description of Artificial Sequence: Synthetic oligonucleotide
ggucuugggcuucugaaag

SEQ ID NO: 2482136 - RNA, 19 nt, Artificial Sequence
  Description of Artificial Sequence: Synthetic oligonucleotide
cacaucacaccaguacucg

SEQ ID NO: 2482137 - RNA, 19 nt, Artificial Sequence
  Description of Artificial Sequence: Synthetic oligonucleotide
uauuuucaggggaugcaua

SEQ ID NO: 2482138 - RNA, 19 nt, Artificial Sequence
  Description of Artificial Sequence: Synthetic oligonucleotide
uugagcuaaccagugcuug

SEQ ID NO: 2482139 - RNA, 19 nt, Artificial Sequence
  Description of Artificial Sequence: Synthetic oligonucleotide
cacuacggacauaggaacc

SEQ ID NO: 2482140 - RNA, 19 nt, Artificial Sequence
  Description of Artificial Sequence: Synthetic oligonucleotide
accagaucgccccgaacuc

SEQ ID NO: 2482141 - RNA, 19 nt, Artificial Sequence
  Description of Artificial Sequence: Synthetic oligonucleotide
gagagacugaagucacgcc

SEQ ID NO: 2482142 - RNA, 19 nt, Artificial Sequence
  Description of Artificial Sequence: Synthetic oligonucleotide
ugagcuaaccagugcuugu

SEQ ID NO: 2482143 - RNA, 19 nt, Artificial Sequence
  Description of Artificial Sequence: Synthetic oligonucleotide
ugaggaugagcuccagguc

SEQ ID NO: 2482144 - RNA, 19 nt, Artificial Sequence
  Description of Artificial Sequence: Synthetic oligonucleotide
ucaauucgcggccggagua

SEQ ID NO: 2482145 - RNA, 19 nt, Artificial Sequence
  Description of Artificial Sequence: Synthetic oligonucleotide
aguggcgggcaacuauuuc

SEQ ID NO: 2482146 - RNA, 19 nt, Artificial Sequence
  Description of Artificial Sequence: Synthetic oligonucleotide
ggauuuagcuuccauuuga

SEQ ID NO: 2482147 - RNA, 19 nt, Artificial Sequence
  Description of Artificial Sequence: Synthetic oligonucleotide
uuauuucgacccacagacu

SEQ ID NO: 2482148 - RNA, 19 nt, Artificial Sequence
  Description of Artificial Sequence: Synthetic oligonucleotide
caguacucgccccaccgcg

SEQ ID NO: 2482149 - RNA, 19 nt, Artificial Sequence
  Description of Artificial Sequence: Synthetic oligonucleotide
ccgguaaugagagagacug

SEQ ID NO: 2482150 - RNA, 19 nt, Artificial Sequence
  Description of Artificial Sequence: Synthetic oligonucleotide
agaaguggcgggcaacuau

SEQ ID NO: 2482151 - RNA, 19 nt, Artificial Sequence
  Description of Artificial Sequence: Synthetic oligonucleotide
acugcgugaggaugagcuc

SEQ ID NO: 2482152 - RNA, 19 nt, Artificial Sequence
  Description of Artificial Sequence: Synthetic oligonucleotide
ucguccacagacugcguga

SEQ ID NO: 2482153 - RNA, 19 nt, Artificial Sequence
  Description of Artificial Sequence: Synthetic oligonucleotide
agacugaagucacgccccg

SEQ ID NO: 2482154 - RNA, 19 nt, Artificial Sequence
  Description of Artificial Sequence: Synthetic oligonucleotide
agcacuacggacauaggaa

SEQ ID NO: 2482155 - RNA, 19 nt, Artificial Sequence
  Description of Artificial Sequence: Synthetic oligonucleotide
guggcgggcaacuauuuca

SEQ ID NO: 2482156 - RNA, 19 nt, Artificial Sequence
  Description of Artificial Sequence: Synthetic oligonucleotide
gcuucuuauuuucagggga

SEQ ID NO: 2482157 - RNA, 19 nt, Artificial Sequence
  Description of Artificial Sequence: Synthetic oligonucleotide
cugcgugaggaugagcucc

SEQ ID NO: 2482158 - RNA, 19 nt, Artificial Sequence
  Description of Artificial Sequence: Synthetic oligonucleotide
gaccagaucgccccgaacu

SEQ ID NO: 2482159 - RNA, 19 nt, Artificial Sequence
  Description of Artificial Sequence: Synthetic oligonucleotide
ucgaguccauuuacaguca

SEQ ID NO: 2482160 - RNA, 19 nt, Artificial Sequence
  Description of Artificial Sequence: Synthetic oligonucleotide
uugaagaaguggcgggcaa

SEQ ID NO: 2482161 - RNA, 19 nt, Artificial Sequence
  Description of Artificial Sequence: Synthetic oligonucleotide
caacuauuucaggauuuag

SEQ ID NO: 2482162 - RNA, 19 nt, Artificial Sequence
  Description of Artificial Sequence: Synthetic oligonucleotide
cuaaccagugcuuguaucu

SEQ ID NO: 2482163 - RNA, 19 nt, Artificial Sequence
  Description of Artificial Sequence: Synthetic oligonucleotide
cuugggcuucugaaagagc

SEQ ID NO: 2482164 - RNA, 19 nt, Artificial Sequence
  Description of Artificial Sequence: Synthetic oligonucleotide
gaacccuuacagugucgag

SEQ ID NO: 2482165 - RNA, 19 nt, Artificial Sequence
  Description of Artificial Sequence: Synthetic oligonucleotide
aaccagugcuuguaucuuu

SEQ ID NO: 2482166 - RNA, 19 nt, Artificial Sequence
  Description of Artificial Sequence: Synthetic oligonucleotide
ugggcuucugaaagagcac

SEQ ID NO: 2482167 - RNA, 19 nt, Artificial Sequence
  Description of Artificial Sequence: Synthetic oligonucleotide
gagagagacugaagucacg

SEQ ID NO: 2482168 - RNA, 19 nt, Artificial Sequence
  Description of Artificial Sequence: Synthetic oligonucleotide
uuugggccgguguuucgug

SEQ ID NO: 2482169 - RNA, 19 nt, Artificial Sequence
  Description of Artificial Sequence: Synthetic oligonucleotide
ccaccaguuuauaaacgcg

SEQ ID NO: 2482170 - RNA, 19 nt, Artificial Sequence
  Description of Artificial Sequence: Synthetic oligonucleotide
cucuuggcagcuuguugag

SEQ ID NO: 2482171 - RNA, 19 nt, Artificial Sequence
  Description of Artificial Sequence: Synthetic oligonucleotide
agacuccuggcccggguag

SEQ ID NO: 2482172 - RNA, 19 nt, Artificial Sequence
  Description of Artificial Sequence: Synthetic oligonucleotide
caggggaugcauacacagc

SEQ ID NO: 2482173 - RNA, 19 nt, Artificial Sequence
  Description of Artificial Sequence: Synthetic oligonucleotide
gguaacuucagagcaugug

SEQ ID NO: 2482174 - RNA, 19 nt, Artificial Sequence
  Description of Artificial Sequence: Synthetic oligonucleotide
cugaagucacgccccgggg

SEQ ID NO: 2482175 - RNA, 19 nt, Artificial Sequence
  Description of Artificial Sequence: Synthetic oligonucleotide
agaccagaucgccccgaac

SEQ ID NO: 2482176 - RNA, 19 nt, Artificial Sequence
  Description of Artificial Sequence: Synthetic oligonucleotide
acagugucgaguccauuua

SEQ ID NO: 2482177 - RNA, 19 nt, Artificial Sequence
  Description of Artificial Sequence: Synthetic oligonucleotide
gacugcgugaggaugagcu

SEQ ID NO: 2482178 - RNA, 19 nt, Artificial Sequence
  Description of Artificial Sequence: Synthetic oligonucleotide
gguaaugagagagacugaa

SEQ ID NO: 2482179 - RNA, 19 nt, Artificial Sequence
  Description of Artificial Sequence: Synthetic oligonucleotide
ugguaacuucagagcaugu

SEQ ID NO: 2482180 - RNA, 19 nt, Artificial Sequence
  Description of Artificial Sequence: Synthetic oligonucleotide
accaguuuauaaacgcggu

SEQ ID NO: 2482181 - RNA, 19 nt, Artificial Sequence
  Description of Artificial Sequence: Synthetic oligonucleotide
ggaaggaguuuauuucgac

SEQ ID NO: 2482182 - RNA, 19 nt, Artificial Sequence
  Description of Artificial Sequence: Synthetic oligonucleotide
auguuguucuucauuccca

SEQ ID NO: 2482183 - RNA, 19 nt, Artificial Sequence
  Description of Artificial Sequence: Synthetic oligonucleotide
gcacuacggacauaggaac

SEQ ID NO: 2482184 - RNA, 19 nt, Artificial Sequence
  Description of Artificial Sequence: Synthetic oligonucleotide
aagucacgccccggggcgc

SEQ ID NO: 2482185 - RNA, 19 nt, Artificial Sequence
  Description of Artificial Sequence: Synthetic oligonucleotide
acagacugcgugaggauga

SEQ ID NO: 2482186 - RNA, 19 nt, Artificial Sequence
  Description of Artificial Sequence: Synthetic oligonucleotide
caguuuauaaacgcggugu

SEQ ID NO: 2482187 - RNA, 19 nt, Artificial Sequence
  Description of Artificial Sequence: Synthetic oligonucleotide
uggacgcagccaagcggcg

SEQ ID NO: 2482188 - RNA, 19 nt, Artificial Sequence
  Description of Artificial Sequence: Synthetic oligonucleotide
cagugucgaguccauuuac

SEQ ID NO: 2482189 - RNA, 19 nt, Artificial Sequence
  Description of Artificial Sequence: Synthetic oligonucleotide
agugucgaguccauuuaca

SEQ ID NO: 2482190 - RNA, 19 nt, Artificial Sequence
  Description of Artificial Sequence: Synthetic oligonucleotide
ggacauaggaacccuuaca

SEQ ID NO: 2482191 - RNA, 19 nt, Artificial Sequence
  Description of Artificial Sequence: Synthetic oligonucleotide
acugucgccucuccugccu

SEQ ID NO: 2482192 - RNA, 19 nt, Artificial Sequence
  Description of Artificial Sequence: Synthetic oligonucleotide
guuucguguccuccaccag

SEQ ID NO: 2482193 - RNA, 19 nt, Artificial Sequence
  Description of Artificial Sequence: Synthetic oligonucleotide
auaggguccucugguaacu

SEQ ID NO: 2482194 - RNA, 19 nt, Artificial Sequence
  Description of Artificial Sequence: Synthetic oligonucleotide
cgugcuccgguaaugagag

SEQ ID NO: 2482195 - RNA, 19 nt, Artificial Sequence
  Description of Artificial Sequence: Synthetic oligonucleotide
uccauuugauguuguucuu

SEQ ID NO: 2482196 - RNA, 19 nt, Artificial Sequence
  Description of Artificial Sequence: Synthetic oligonucleotide
accgugcuccgguaaugag

SEQ ID NO: 2482197 - RNA, 19 nt, Artificial Sequence
  Description of Artificial Sequence: Synthetic oligonucleotide
guguuucguguccuccacc

SEQ ID NO: 2482198 - RNA, 19 nt, Artificial Sequence
  Description of Artificial Sequence: Synthetic oligonucleotide
aggaaggaguuuauuucga

SEQ ID NO: 2482199 - RNA, 19 nt, Artificial Sequence
  Description of Artificial Sequence: Synthetic oligonucleotide
gaugaccgugcuccgguaa

SEQ ID NO: 2482200 - RNA, 19 nt, Artificial Sequence
  Description of Artificial Sequence: Synthetic oligonucleotide
cagagcauguggggcaacc

SEQ ID NO: 2482201 - RNA, 19 nt, Artificial Sequence
  Description of Artificial Sequence: Synthetic oligonucleotide
caauucgcggccggaguag

SEQ ID NO: 2482202 - RNA, 19 nt, Artificial Sequence
  Description of Artificial Sequence: Synthetic oligonucleotide
gacugaagucacgccccgg

SEQ ID NO: 2482203 - RNA, 19 nt, Artificial Sequence
  Description of Artificial Sequence: Synthetic oligonucleotide
uacggacauaggaacccuu

SEQ ID NO: 2482204 - RNA, 19 nt, Artificial Sequence
  Description of Artificial Sequence: Synthetic oligonucleotide
ugcaggcgcggcuuccggc

SEQ ID NO: 2482205 - RNA, 19 nt, Artificial Sequence
  Description of Artificial Sequence: Synthetic oligonucleotide
auacacagccagccccuga

SEQ ID NO: 2482206 - RNA, 19 nt, Artificial Sequence
  Description of Artificial Sequence: Synthetic oligonucleotide
aucgccccgaacuccaauu

SEQ ID NO: 2482207 - RNA, 19 nt, Artificial Sequence
  Description of Artificial Sequence: Synthetic oligonucleotide
cuugaagaaguggcgggca

SEQ ID NO: 2482208 - RNA, 19 nt, Artificial Sequence
  Description of Artificial Sequence: Synthetic oligonucleotide
acaccaguacucgccccac

SEQ ID NO: 2482209 - RNA, 19 nt, Artificial Sequence
  Description of Artificial Sequence: Synthetic oligonucleotide
uuccggcccuccuuggcga

SEQ ID NO: 2482210 - RNA, 19 nt, Artificial Sequence
  Description of Artificial Sequence: Synthetic oligonucleotide
augaccgugcuccgguaau

SEQ ID NO: 2482211 - RNA, 19 nt, Artificial Sequence
  Description of Artificial Sequence: Synthetic oligonucleotide
accagcgcuccacgaugac

SEQ ID NO: 2482212 - RNA, 19 nt, Artificial Sequence
  Description of Artificial Sequence: Synthetic oligonucleotide
gaagaaguggcgggcaacu

SEQ ID NO: 2482213 - RNA, 19 nt, Artificial Sequence
  Description of Artificial Sequence: Synthetic oligonucleotide
uccuuggcgagcggcaccu

SEQ ID NO: 2482214 - RNA, 19 nt, Artificial Sequence
  Description of Artificial Sequence: Synthetic oligonucleotide
ugaccgugcuccgguaaug

SEQ ID NO: 2482215 - RNA, 19 nt, Artificial Sequence
  Description of Artificial Sequence: Synthetic oligonucleotide
ucgccccaccgcgugauag

SEQ ID NO: 2482216 - RNA, 19 nt, Artificial Sequence
  Description of Artificial Sequence: Synthetic oligonucleotide
uuucguccacagacugcgu

SEQ ID NO: 2482217 - RNA, 19 nt, Artificial Sequence
  Description of Artificial Sequence: Synthetic oligonucleotide
gcgagcggcaccuuccacc

SEQ ID NO: 2482218 - RNA, 19 nt, Artificial Sequence
  Description of Artificial Sequence: Synthetic oligonucleotide
cuuggcgagcggcaccuuc

SEQ ID NO: 2482219 - RNA, 19 nt, Artificial Sequence
  Description of Artificial Sequence: Synthetic oligonucleotide
ccuggacgcagccaagcgg

SEQ ID NO: 2482220 - RNA, 19 nt, Artificial Sequence
  Description of Artificial Sequence: Synthetic oligonucleotide
gugucgccggugcaggcgc

SEQ ID NO: 2482221 - RNA, 19 nt, Artificial Sequence
  Description of Artificial Sequence: Synthetic oligonucleotide
gcgugauaggguccucugg

SEQ ID NO: 2482222 - RNA, 19 nt, Artificial Sequence
  Description of Artificial Sequence: Synthetic oligonucleotide
gauuuagcuuccauuugau

SEQ ID NO: 2482223 - RNA, 19 nt, Artificial Sequence
  Description of Artificial Sequence: Synthetic oligonucleotide
uugggccgguguuucgugu

SEQ ID NO: 2482224 - RNA, 19 nt, Artificial Sequence
  Description of Artificial Sequence: Synthetic oligonucleotide
ugagaccagaucgccccga

SEQ ID NO: 2482225 - RNA, 19 nt, Artificial Sequence
  Description of Artificial Sequence: Synthetic oligonucleotide
gguguuucguguccuccac

SEQ ID NO: 2482226 - RNA, 19 nt, Artificial Sequence
  Description of Artificial Sequence: Synthetic oligonucleotide
ugucgccggugcaggcgcg

SEQ ID NO: 2482227 - RNA, 19 nt, Artificial Sequence
  Description of Artificial Sequence: Synthetic oligonucleotide
ugacagcuucucagaaauu

SEQ ID NO: 2482228 - RNA, 19 nt, Artificial Sequence
  Description of Artificial Sequence: Synthetic oligonucleotide
cacgaugaccgugcuccgg

SEQ ID NO: 2482229 - RNA, 19 nt, Artificial Sequence
  Description of Artificial Sequence: Synthetic oligonucleotide
uggcgagcggcaccuucca

SEQ ID NO: 2482230 - RNA, 19 nt, Artificial Sequence
  Description of Artificial Sequence: Synthetic oligonucleotide
guacucgccccaccgcgug

SEQ ID NO: 2482231 - RNA, 19 nt, Artificial Sequence
  Description of Artificial Sequence: Synthetic oligonucleotide
ugggccgguguuucguguc

SEQ ID NO: 2482232 - RNA, 19 nt, Artificial Sequence
  Description of Artificial Sequence: Synthetic oligonucleotide
agagcacuacggacauagg

SEQ ID NO: 2482233 - RNA, 19 nt, Artificial Sequence
  Description of Artificial Sequence: Synthetic oligonucleotide
uaaacgcggugucgccggu

SEQ ID NO: 2482234 - RNA, 19 nt, Artificial Sequence
  Description of Artificial Sequence: Synthetic oligonucleotide
cagaucgccccgaacucca

SEQ ID NO: 2482235 - RNA, 19 nt, Artificial Sequence
  Description of Artificial Sequence: Synthetic oligonucleotide
agucacgccccggggcgcc

SEQ ID NO: 2482236 - RNA, 19 nt, Artificial Sequence
  Description of Artificial Sequence: Synthetic oligonucleotide
ucgccccgaacuccaauuu

SEQ ID NO: 2482237 - RNA, 19 nt, Artificial Sequence
  Description of Artificial Sequence: Synthetic oligonucleotide
aggaacccuuacagugucg

SEQ ID NO: 2482238 - RNA, 19 nt, Artificial Sequence
  Description of Artificial Sequence: Synthetic oligonucleotide
ggaacccuuacagugucga

SEQ ID NO: 2482239 - RNA, 19 nt, Artificial Sequence
  Description of Artificial Sequence: Synthetic oligonucleotide
aaacgcggugucgccggug

SEQ ID NO: 2482240 - RNA, 19 nt, Artificial Sequence
  Description of Artificial Sequence: Synthetic oligonucleotide
cuccuuggcgagcggcacc

SEQ ID NO: 2482241 - RNA, 19 nt, Artificial Sequence
  Description of Artificial Sequence: Synthetic oligonucleotide
ucgcggccggaguagcucu

SEQ ID NO: 2482242 - RNA, 19 nt, Artificial Sequence
  Description of Artificial Sequence: Synthetic oligonucleotide
uuggcagcuuguugagcua

SEQ ID NO: 2482243 - RNA, 19 nt, Artificial Sequence
  Description of Artificial Sequence: Synthetic oligonucleotide
cauguggggcaaccacaac

SEQ ID NO: 2482244 - RNA, 19 nt, Artificial Sequence
  Description of Artificial Sequence: Synthetic oligonucleotide
uuuuggucuugggcuucug

SEQ ID NO: 2482245 - RNA, 19 nt, Artificial Sequence
  Description of Artificial Sequence: Synthetic oligonucleotide
aagaaguggcgggcaacua

SEQ ID NO: 2482246 - RNA, 19 nt, Artificial Sequence
  Description of Artificial Sequence: Synthetic oligonucleotide
gaacuccaauuucguccac

SEQ ID NO: 2482247 - RNA, 19 nt, Artificial Sequence
  Description of Artificial Sequence: Synthetic oligonucleotide
gcccggguagccauggagg

SEQ ID NO: 2482248 - RNA, 19 nt, Artificial Sequence
  Description of Artificial Sequence: Synthetic oligonucleotide
uucgcggccggaguagcuc

SEQ ID NO: 2482249 - RNA, 19 nt, Artificial Sequence
  Description of Artificial Sequence: Synthetic oligonucleotide
gucgccucuccugccuucg

SEQ ID NO: 2482250 - RNA, 19 nt, Artificial Sequence
  Description of Artificial Sequence: Synthetic oligonucleotide
gaccgugcuccgguaauga

SEQ ID NO: 2482251 - RNA, 19 nt, Artificial Sequence
  Description of Artificial Sequence: Synthetic oligonucleotide
ggcccggguagccauggag

SEQ ID NO: 2482252 - RNA, 19 nt, Artificial Sequence
  Description of Artificial Sequence: Synthetic oligonucleotide
ggugucgccggugcaggcg

SEQ ID NO: 2482253 - RNA, 19 nt, Artificial Sequence
  Description of Artificial Sequence: Synthetic oligonucleotide
gagcuaaccagugcuugua

SEQ ID NO: 2482254 - RNA, 19 nt, Artificial Sequence
  Description of Artificial Sequence: Synthetic oligonucleotide
uacucgccccaccgcguga

SEQ ID NO: 2482255 - RNA, 19 nt, Artificial Sequence
  Description of Artificial Sequence: Synthetic oligonucleotide
aagcggcgccagcccacag

SEQ ID NO: 2482256 - RNA, 19 nt, Artificial Sequence
  Description of Artificial Sequence: Synthetic oligonucleotide
ggcgggcaacuauuucagg

SEQ ID NO: 2482257 - RNA, 19 nt, Artificial Sequence
  Description of Artificial Sequence: Synthetic oligonucleotide
ccaggucaucuuugggccg

SEQ ID NO: 2482258 - RNA, 19 nt, Artificial Sequence
  Description of Artificial Sequence: Synthetic oligonucleotide
gacuccuggcccggguagc

SEQ ID NO: 2482259 - RNA, 19 nt, Artificial Sequence
  Description of Artificial Sequence: Synthetic oligonucleotide
gagaccagaucgccccgaa

SEQ ID NO: 2482260 - RNA, 19 nt, Artificial Sequence
  Description of Artificial Sequence: Synthetic oligonucleotide
cccaccgcgugauaggguc

SEQ ID NO: 2482261 - RNA, 19 nt, Artificial Sequence
  Description of Artificial Sequence: Synthetic oligonucleotide
cagacugcgugaggaugag

SEQ ID NO: 2482262 - RNA, 19 nt, Artificial Sequence
  Description of Artificial Sequence: Synthetic oligonucleotide
cccggguagccauggaggc

SEQ ID NO: 2482263 - RNA, 19 nt, Artificial Sequence
  Description of Artificial Sequence: Synthetic oligonucleotide
gcagcuuguugagcuaacc

SEQ ID NO: 2482264 - RNA, 19 nt, Artificial Sequence
  Description of Artificial Sequence: Synthetic oligonucleotide
ggcgccagcccacagcaga

SEQ ID NO: 2482265 - RNA, 19 nt, Artificial Sequence
  Description of Artificial Sequence: Synthetic oligonucleotide
acggacauaggaacccuua

SEQ ID NO: 2482266 - RNA, 19 nt, Artificial Sequence
  Description of Artificial Sequence: Synthetic oligonucleotide
aaguggcgggcaacuauuu

SEQ ID NO: 2482267 - RNA, 19 nt, Artificial Sequence
  Description of Artificial Sequence: Synthetic oligonucleotide
guccucugguaacuucaga

SEQ ID NO: 2482268 - RNA, 19 nt, Artificial Sequence
  Description of Artificial Sequence: Synthetic oligonucleotide
gcaggcgcggcuuccggcc

SEQ ID NO: 2482269 - RNA, 19 nt, Artificial Sequence
  Description of Artificial Sequence: Synthetic oligonucleotide
gaguagcucucugaugccu

SEQ ID NO: 2482270 - RNA, 19 nt, Artificial Sequence
  Description of Artificial Sequence: Synthetic oligonucleotide
aggaugagcuccaggucau

SEQ ID NO: 2482271 - RNA, 19 nt, Artificial Sequence
  Description of Artificial Sequence: Synthetic oligonucleotide
cauacacagccagccccug

SEQ ID NO: 2482272 - RNA, 19 nt, Artificial Sequence
  Description of Artificial Sequence: Synthetic oligonucleotide
gaaguggcgggcaacuauu

SEQ ID NO: 2482273 - RNA, 19 nt, Artificial Sequence
  Description of Artificial Sequence: Synthetic oligonucleotide
gguccucugguaacuucag

SEQ ID NO: 2482274 - RNA, 19 nt, Artificial Sequence
  Description of Artificial Sequence: Synthetic oligonucleotide
gggcaaccacaacaccaag

SEQ ID NO: 2482275 - RNA, 19 nt, Artificial Sequence
  Description of Artificial Sequence: Synthetic oligonucleotide
aaagagcacuacggacaua

SEQ ID NO: 2482276 - RNA, 19 nt, Artificial Sequence
  Description of Artificial Sequence: Synthetic oligonucleotide
ggguccucugguaacuuca

SEQ ID NO: 2482277 - RNA, 19 nt, Artificial Sequence
  Description of Artificial Sequence: Synthetic oligonucleotide
cgcuccacgaugaccgugc

SEQ ID NO: 2482278 - RNA, 19 nt, Artificial Sequence
  Description of Artificial Sequence: Synthetic oligonucleotide
cgugaggaugagcuccagg

SEQ ID NO: 2482279 - RNA, 19 nt, Artificial Sequence
  Description of Artificial Sequence: Synthetic oligonucleotide
ccaguacucgccccaccgc

SEQ ID NO: 2482280 - RNA, 19 nt, Artificial Sequence
  Description of Artificial Sequence: Synthetic oligonucleotide
ccagaucgccccgaacucc

SEQ ID NO: 2482281 - RNA, 19 nt, Artificial Sequence
  Description of Artificial Sequence: Synthetic oligonucleotide
agcgcuccacgaugaccgu

SEQ ID NO: 2482282 - RNA, 19 nt, Artificial Sequence
  Description of Artificial Sequence: Synthetic oligonucleotide
ggggcaaccacaacaccaa

SEQ ID NO: 2482283 - RNA, 19 nt, Artificial Sequence
  Description of Artificial Sequence: Synthetic oligonucleotide
gcaacuauuucaggauuua

SEQ ID NO: 2482284 - RNA, 19 nt, Artificial Sequence
  Description of Artificial Sequence: Synthetic oligonucleotide
cccgaacuccaauuucguc

SEQ ID NO: 2482285 - RNA, 19 nt, Artificial Sequence
  Description of Artificial Sequence: Synthetic oligonucleotide
ucgccucuccugccuucgu

SEQ ID NO: 2482286 - RNA, 19 nt, Artificial Sequence
  Description of Artificial Sequence: Synthetic oligonucleotide
gggccgguguuucgugucc

SEQ ID NO: 2482287 - RNA, 19 nt, Artificial Sequence
  Description of Artificial Sequence: Synthetic oligonucleotide
ccaauuucguccacagacu

SEQ ID NO: 2482288 - RNA, 19 nt, Artificial Sequence
  Description of Artificial Sequence: Synthetic oligonucleotide
ccgugcuccgguaaugaga

SEQ ID NO: 2482289 - RNA, 19 nt, Artificial Sequence
  Description of Artificial Sequence: Synthetic oligonucleotide
cggacauaggaacccuuac

SEQ ID NO: 2482290 - RNA, 19 nt, Artificial Sequence
  Description of Artificial Sequence: Synthetic oligonucleotide
caggcgcggcuuccggccc

SEQ ID NO: 2482291 - RNA, 19 nt, Artificial Sequence
  Description of Artificial Sequence: Synthetic oligonucleotide
uaggguccucugguaacuu

SEQ ID NO: 2482292 - RNA, 19 nt, Artificial Sequence
  Description of Artificial Sequence: Synthetic oligonucleotide
uucgacccacagacuucuu

SEQ ID NO: 2482293 - RNA, 19 nt, Artificial Sequence
  Description of Artificial Sequence: Synthetic oligonucleotide
gccccaccgcgugauaggg

SEQ ID NO: 2482294 - RNA, 19 nt, Artificial Sequence
  Description of Artificial Sequence: Synthetic oligonucleotide
gcggcgccagcccacagca

SEQ ID NO: 2482295 - RNA, 19 nt, Artificial Sequence
  Description of Artificial Sequence: Synthetic oligonucleotide
ccggaguagcucucugaug

SEQ ID NO: 2482296 - RNA, 19 nt, Artificial Sequence
  Description of Artificial Sequence: Synthetic oligonucleotide
cccuucaauucgcggccgg

SEQ ID NO: 2482297 - RNA, 19 nt, Artificial Sequence
  Description of Artificial Sequence: Synthetic oligonucleotide
gucgccggugcaggcgcgg

SEQ ID NO: 2482298 - RNA, 19 nt, Artificial Sequence
  Description of Artificial Sequence: Synthetic oligonucleotide
cagucacaucacaccagua

SEQ ID NO: 2482299 - RNA, 19 nt, Artificial Sequence
  Description of Artificial Sequence: Synthetic oligonucleotide
ggccggaguagcucucuga

SEQ ID NO: 2482300 - RNA, 19 nt, Artificial Sequence
  Description of Artificial Sequence: Synthetic oligonucleotide
auucgcggccggaguagcu

SEQ ID NO: 2482301 - RNA, 19 nt, Artificial Sequence
  Description of Artificial Sequence: Synthetic oligonucleotide
gcauguggggcaaccacaa

SEQ ID NO: 2482302 - RNA, 19 nt, Artificial Sequence
  Description of Artificial Sequence: Synthetic oligonucleotide
ccacagacuucuucacuga

SEQ ID NO: 2482303 - RNA, 19 nt, Artificial Sequence
  Description of Artificial Sequence: Synthetic oligonucleotide
gcggcaccuuccaccagcg

SEQ ID NO: 2482304 - RNA, 19 nt, Artificial Sequence
  Description of Artificial Sequence: Synthetic oligonucleotide
ccgguguuucguguccucc

SEQ ID NO: 2482305 - RNA, 19 nt, Artificial Sequence
  Description of Artificial Sequence: Synthetic oligonucleotide
guguccuccaccaguuuau

SEQ ID NO: 2482306 - RNA, 19 nt, Artificial Sequence
  Description of Artificial Sequence: Synthetic oligonucleotide
gaucgccccgaacuccaau

SEQ ID NO: 2482307 - RNA, 19 nt, Artificial Sequence
  Description of Artificial Sequence: Synthetic oligonucleotide
gcggugucgccggugcagg

SEQ ID NO: 2482308 - RNA, 19 nt, Artificial Sequence
  Description of Artificial Sequence: Synthetic oligonucleotide
ccacgaugaccgugcuccg

SEQ ID NO: 2482309 - RNA, 19 nt, Artificial Sequence
  Description of Artificial Sequence: Synthetic oligonucleotide
acucgccccaccgcgugau

SEQ ID NO: 2482310 - RNA, 19 nt, Artificial Sequence
  Description of Artificial Sequence: Synthetic oligonucleotide
ggacgcagccaagcggcgc

SEQ ID NO: 2482311 - RNA, 19 nt, Artificial Sequence
  Description of Artificial Sequence: Synthetic oligonucleotide
ucgccggugcaggcgcggc

SEQ ID NO: 2482312 - RNA, 19 nt, Artificial Sequence
  Description of Artificial Sequence: Synthetic oligonucleotide
ccaccgcgugauagggucc

SEQ ID NO: 2482313 - RNA, 19 nt, Artificial Sequence
  Description of Artificial Sequence: Synthetic oligonucleotide
ugccuucgucuggaucuuc

SEQ ID NO: 2482314 - RNA, 19 nt, Artificial Sequence
  Description of Artificial Sequence: Synthetic oligonucleotide
accgcgugauaggguccuc

SEQ ID NO: 2482315 - RNA, 19 nt, Artificial Sequence
  Description of Artificial Sequence: Synthetic oligonucleotide
cagacuccuggcccgggua

SEQ ID NO: 2482316 - RNA, 19 nt, Artificial Sequence
  Description of Artificial Sequence: Synthetic oligonucleotide
ccaagcggcgccagcccac

SEQ ID NO: 2482317 - RNA, 19 nt, Artificial Sequence
  Description of Artificial Sequence: Synthetic oligonucleotide
ggcaacuauuucaggauuu

SEQ ID NO: 2482318 - RNA, 19 nt, Artificial Sequence
  Description of Artificial Sequence: Synthetic oligonucleotide
gcagccaagcggcgccagc

SEQ ID NO: 2482319 - RNA, 19 nt, Artificial Sequence
  Description of Artificial Sequence: Synthetic oligonucleotide
gcuccgguaaugagagaga

SEQ ID NO: 2482320 - RNA, 19 nt, Artificial Sequence
  Description of Artificial Sequence: Synthetic oligonucleotide
cuacggacauaggaacccu

SEQ ID NO: 2482321 - RNA, 19 nt, Artificial Sequence
  Description of Artificial Sequence: Synthetic oligonucleotide
gggcaacuauuucaggauu

SEQ ID NO: 2482322 - RNA, 19 nt, Artificial Sequence
  Description of Artificial Sequence: Synthetic oligonucleotide
aggucaucuuugggccggu

SEQ ID NO: 2482323 - RNA, 19 nt, Artificial Sequence
  Description of Artificial Sequence: Synthetic oligonucleotide
cgcgugauaggguccucug

SEQ ID NO: 2482324 - RNA, 19 nt, Artificial Sequence
  Description of Artificial Sequence: Synthetic oligonucleotide
gccggaguagcucucugau

SEQ ID NO: 2482325 - RNA, 19 nt, Artificial Sequence
  Description of Artificial Sequence: Synthetic oligonucleotide
accuuccaccagcgcucca

SEQ ID NO: 2482326 - RNA, 19 nt, Artificial Sequence
  Description of Artificial Sequence: Synthetic oligonucleotide
acgcggugucgccggugca

SEQ ID NO: 2482327 - RNA, 19 nt, Artificial Sequence
  Description of Artificial Sequence: Synthetic oligonucleotide
gguagccauggaggcggcc

SEQ ID NO: 2482328 - RNA, 19 nt, Artificial Sequence
  Description of Artificial Sequence: Synthetic oligonucleotide
gccauggaggcggccauga

SEQ ID NO: 2482329 - RNA, 19 nt, Artificial Sequence
  Description of Artificial Sequence: Synthetic oligonucleotide
gccaagcggcgccagccca

SEQ ID NO: 2482330 - RNA, 19 nt, Artificial Sequence
  Description of Artificial Sequence: Synthetic oligonucleotide
caagcggcgccagcccaca

SEQ ID NO: 2482331 - RNA, 19 nt, Artificial Sequence
  Description of Artificial Sequence: Synthetic oligonucleotide
ggcgagcggcaccuuccac

SEQ ID NO: 2482332 - RNA, 19 nt, Artificial Sequence
  Description of Artificial Sequence: Synthetic oligonucleotide
gugcuccgguaaugagaga

SEQ ID NO: 2482333 - RNA, 19 nt, Artificial Sequence
  Description of Artificial Sequence: Synthetic oligonucleotide
gcccuccuuggcgagcggc

SEQ ID NO: 2482334 - RNA, 19 nt, Artificial Sequence
  Description of Artificial Sequence: Synthetic oligonucleotide
cgccccaccgcgugauagg

SEQ ID NO: 2482335 - RNA, 19 nt, Artificial Sequence
  Description of Artificial Sequence: Synthetic oligonucleotide
gccgguguuucguguccuc

SEQ ID NO: 2482336 - RNA, 19 nt, Artificial Sequence
  Description of Artificial Sequence: Synthetic oligonucleotide
agaucgccccgaacuccaa

SEQ ID NO: 2482337 - RNA, 19 nt, Artificial Sequence
  Description of Artificial Sequence: Synthetic oligonucleotide
gcgccagcccacagcagac

SEQ ID NO: 2482338 - RNA, 19 nt, Artificial Sequence
  Description of Artificial Sequence: Synthetic oligonucleotide
ccuucaauucgcggccgga

SEQ ID NO: 2482339 - RNA, 19 nt, Artificial Sequence
  Description of Artificial Sequence: Synthetic oligonucleotide
cgccccgaacuccaauuuc

SEQ ID NO: 2482340 - RNA, 19 nt, Artificial Sequence
  Description of Artificial Sequence: Synthetic oligonucleotide
caccgcgugauaggguccu

SEQ ID NO: 2482341 - RNA, 19 nt, Artificial Sequence
  Description of Artificial Sequence: Synthetic oligonucleotide
cgguaaugagagagacuga

SEQ ID NO: 2482342 - RNA, 19 nt, Artificial Sequence
  Description of Artificial Sequence: Synthetic oligonucleotide
gcgugaggaugagcuccag

SEQ ID NO: 2482343 - RNA, 19 nt, Artificial Sequence
  Description of Artificial Sequence: Synthetic oligonucleotide
cugaugccuccuggacgca

SEQ ID NO: 2482344 - RNA, 19 nt, Artificial Sequence
  Description of Artificial Sequence: Synthetic oligonucleotide
cgcggugucgccggugcag

SEQ ID NO: 2482345 - RNA, 19 nt, Artificial Sequence
  Description of Artificial Sequence: Synthetic oligonucleotide
gccuucgucuggaucuucu

SEQ ID NO: 2482346 - RNA, 19 nt, Artificial Sequence
  Description of Artificial Sequence: Synthetic oligonucleotide
gucacgccccggggcgccc

SEQ ID NO: 2482347 - RNA, 19 nt, Artificial Sequence
  Description of Artificial Sequence: Synthetic oligonucleotide
ccccgaacuccaauuucgu

SEQ ID NO: 2482348 - RNA, 19 nt, Artificial Sequence
  Description of Artificial Sequence: Synthetic oligonucleotide
cugucgccucuccugccuu

SEQ ID NO: 2482349 - RNA, 19 nt, Artificial Sequence
  Description of Artificial Sequence: Synthetic oligonucleotide
gcuccacgaugaccgugcu

SEQ ID NO: 2482350 - RNA, 19 nt, Artificial Sequence
  Description of Artificial Sequence: Synthetic oligonucleotide
ccggugcaggcgcggcuuc

SEQ ID NO: 2482351 - RNA, 19 nt, Artificial Sequence
  Description of Artificial Sequence: Synthetic oligonucleotide
cucgccccaccgcgugaua

SEQ ID NO: 2482352 - RNA, 19 nt, Artificial Sequence
  Description of Artificial Sequence: Synthetic oligonucleotide
ggccgguguuucguguccu

SEQ ID NO: 2482353 - RNA, 19 nt, Artificial Sequence
  Description of Artificial Sequence: Synthetic oligonucleotide
cugccuucgucuggaucuu

SEQ ID NO: 2482354 - RNA, 19 nt, Artificial Sequence
  Description of Artificial Sequence: Synthetic oligonucleotide
cuccugccuucgucuggau

SEQ ID NO: 2482355 - RNA, 19 nt, Artificial Sequence
  Description of Artificial Sequence: Synthetic oligonucleotide
cgcagccaagcggcgccag

SEQ ID NO: 2482356 - RNA, 19 nt, Artificial Sequence
  Description of Artificial Sequence: Synthetic oligonucleotide
cgcggccggaguagcucuc

SEQ ID NO: 2482357 - RNA, 19 nt, Artificial Sequence
  Description of Artificial Sequence: Synthetic oligonucleotide
ggcgcggcuuccggcccuc

SEQ ID NO: 2482358 - RNA, 19 nt, Artificial Sequence
  Description of Artificial Sequence: Synthetic oligonucleotide
cgaugaccgugcuccggua

SEQ ID NO: 2482359 - RNA, 19 nt, Artificial Sequence
  Description of Artificial Sequence: Synthetic oligonucleotide
ccgcgugauaggguccucu

SEQ ID NO: 2482360 - RNA, 19 nt, Artificial Sequence
  Description of Artificial Sequence: Synthetic oligonucleotide
gcggccggaguagcucucu

SEQ ID NO: 2482361 - RNA, 19 nt, Artificial Sequence
  Description of Artificial Sequence: Synthetic oligonucleotide
ccccaccgcgugauagggu

SEQ ID NO: 2482362 - RNA, 19 nt, Artificial Sequence
  Description of Artificial Sequence: Synthetic oligonucleotide
gcgcggcuuccggcccucc

SEQ ID NO: 2482363 - RNA, 19 nt, Artificial Sequence
  Description of Artificial Sequence: Synthetic oligonucleotide
cgcggcuuccggcccuccu

SEQ ID NO: 2482364 - RNA, 19 nt, Artificial Sequence
  Description of Artificial Sequence: Synthetic oligonucleotide
ccuuggcgagcggcaccuu

SEQ ID NO: 2482365 - RNA, 19 nt, Artificial Sequence
  Description of Artificial Sequence: Synthetic oligonucleotide
aauaccaagguucaguccu

SEQ ID NO: 2482366 - RNA, 19 nt, Artificial Sequence
  Description of Artificial Sequence: Synthetic oligonucleotide
ucagccaucuccuuaagga

SEQ ID NO: 2482367 - RNA, 19 nt, Artificial Sequence
  Description of Artificial Sequence: Synthetic oligonucleotide
acaauaccaagguucaguc

SEQ ID NO: 2482368 - RNA, 19 nt, Artificial Sequence
  Description of Artificial Sequence: Synthetic oligonucleotide
cucccaaauaccaaacugg

SEQ ID NO: 2482369 - RNA, 19 nt, Artificial Sequence
  Description of Artificial Sequence: Synthetic oligonucleotide
gugacugucggcuggaugg

SEQ ID NO: 2482370 - RNA, 19 nt, Artificial Sequence
  Description of Artificial Sequence: Synthetic oligonucleotide
acuggcuaaaucuccaauc

SEQ ID NO: 2482371 - RNA, 19 nt, Artificial Sequence
  Description of Artificial Sequence: Synthetic oligonucleotide
ugugccugccaacaggacg

SEQ ID NO: 2482372 - RNA, 19 nt, Artificial Sequence
  Description of Artificial Sequence: Synthetic oligonucleotide
uccgauaguagcuugcggc

SEQ ID NO: 2482373 - RNA, 19 nt, Artificial Sequence
  Description of Artificial Sequence: Synthetic oligonucleotide
aguacuuguggagauggcc

SEQ ID NO: 2482374 - RNA, 19 nt, Artificial Sequence
  Description of Artificial Sequence: Synthetic oligonucleotide
agaaaacugacccggccac

SEQ ID NO: 2482375 - RNA, 19 nt, Artificial Sequence
  Description of Artificial Sequence: Synthetic oligonucleotide
caugagaacacucgguugc

SEQ ID NO: 2482376 - RNA, 19 nt, Artificial Sequence
  Description of Artificial Sequence: Synthetic oligonucleotide
uguggagauggccacaucu

SEQ ID NO: 2482377 - RNA, 19 nt, Artificial Sequence
  Description of Artificial Sequence: Synthetic oligonucleotide
uggaauuuggcgaugggaa

SEQ ID NO: 2482378 - RNA, 19 nt, Artificial Sequence
  Description of Artificial Sequence: Synthetic oligonucleotide
uccuuaaggaccaaggcua

SEQ ID NO: 2482379 - RNA, 19 nt, Artificial Sequence
  Description of Artificial Sequence: Synthetic oligonucleotide
agguccuaaccacagcugc

SEQ ID NO: 2482380 - RNA, 19 nt, Artificial Sequence
  Description of Artificial Sequence: Synthetic oligonucleotide
agaacacucgguugcaggg

SEQ ID NO: 2482381 - RNA, 19 nt, Artificial Sequence
  Description of Artificial Sequence: Synthetic oligonucleotide
ucccaaauaccaaacuggc

SEQ ID NO: 2482382 - RNA, 19 nt, Artificial Sequence
  Description of Artificial Sequence: Synthetic oligonucleotide
uuuggcgaugggaaccucg

SEQ ID NO: 2482383 - RNA, 19 nt, Artificial Sequence
  Description of Artificial Sequence: Synthetic oligonucleotide
agggaugccaaguuccugg

SEQ ID NO: 2482384 - RNA, 19 nt, Artificial Sequence
  Description of Artificial Sequence: Synthetic oligonucleotide
gaagcgguccgauaguagc

SEQ ID NO: 2482385 - RNA, 19 nt, Artificial Sequence
  Description of Artificial Sequence: Synthetic oligonucleotide
acucccaaauaccaaacug

SEQ ID NO: 2482386 - RNA, 19 nt, Artificial Sequence
  Description of Artificial Sequence: Synthetic oligonucleotide
aaggcuacacuguaccgca

SEQ ID NO: 2482387 - RNA, 19 nt, Artificial Sequence
  Description of Artificial Sequence: Synthetic oligonucleotide
auguggggcagccaggacg

SEQ ID NO: 2482388 - RNA, 19 nt, Artificial Sequence
  Description of Artificial Sequence: Synthetic oligonucleotide
ugagucgagaacagggcgc

SEQ ID NO: 2482389 - RNA, 19 nt, Artificial Sequence
  Description of Artificial Sequence: Synthetic oligonucleotide
auucuugcuuccccuuucc

SEQ ID NO: 2482390 - RNA, 19 nt, Artificial Sequence
  Description of Artificial Sequence: Synthetic oligonucleotide
caacaggacggccagacgc

SEQ ID NO: 2482391 - RNA, 19 nt, Artificial Sequence
  Description of Artificial Sequence: Synthetic oligonucleotide
agacauguggggcagccag

SEQ ID NO: 2482392 - RNA, 19 nt, Artificial Sequence
  Description of Artificial Sequence: Synthetic oligonucleotide
gaauuuggcgaugggaacc

SEQ ID NO: 2482393 - RNA, 19 nt, Artificial Sequence
  Description of Artificial Sequence: Synthetic oligonucleotide
cacaacaagcuucagcaac

SEQ ID NO: 2482394 - RNA, 19 nt, Artificial Sequence
  Description of Artificial Sequence: Synthetic oligonucleotide
cuccaaucagaucuugagg

SEQ ID NO: 2482395 - RNA, 19 nt, Artificial Sequence
  Description of Artificial Sequence: Synthetic oligonucleotide
acagguuggcacuggcacc

SEQ ID NO: 2482396 - RNA, 19 nt, Artificial Sequence
  Description of Artificial Sequence: Synthetic oligonucleotide
uccucugacagguuggcac

SEQ ID NO: 2482397 - RNA, 19 nt, Artificial Sequence
  Description of Artificial Sequence: Synthetic oligonucleotide
ugcagucuuuuccaugcag

SEQ ID NO: 2482398 - RNA, 19 nt, Artificial Sequence
  Description of Artificial Sequence: Synthetic oligonucleotide
uuaaggaccaaggcuacac

SEQ ID NO: 2482399 - RNA, 19 nt, Artificial Sequence
  Description of Artificial Sequence: Synthetic oligonucleotide
cagucuuuuccaugcaggg

SEQ ID NO: 2482400 - RNA, 19 nt, Artificial Sequence
  Description of Artificial Sequence: Synthetic oligonucleotide
caguccgaagagaaggucc

SEQ ID NO: 2482401 - RNA, 19 nt, Artificial Sequence
  Description of Artificial Sequence: Synthetic oligonucleotide
acugagucgagaacagggc

SEQ ID NO: 2482402 - RNA, 19 nt, Artificial Sequence
  Description of Artificial Sequence: Synthetic oligonucleotide
cugagucgagaacagggcg

SEQ ID NO: 2482403 - RNA, 19 nt, Artificial Sequence
  Description of Artificial Sequence: Synthetic oligonucleotide
ugugcagacccaucgguga

SEQ ID NO: 2482404 - RNA, 19 nt, Artificial Sequence
  Description of Artificial Sequence: Synthetic oligonucleotide
uguugggccacugagucga

SEQ ID NO: 2482405 - RNA, 19 nt, Artificial Sequence
  Description of Artificial Sequence: Synthetic oligonucleotide
agucuuuuccaugcagggc

SEQ ID NO: 2482406 - RNA, 19 nt, Artificial Sequence
  Description of Artificial Sequence: Synthetic oligonucleotide
aaaacugacccggccacug

SEQ ID NO: 2482407 - RNA, 19 nt, Artificial Sequence
  Description of Artificial Sequence: Synthetic oligonucleotide
uguuguugggccacugagu

SEQ ID NO: 2482408 - RNA, 19 nt, Artificial Sequence
  Description of Artificial Sequence: Synthetic oligonucleotide
acaucuacccgccaccgga

SEQ ID NO: 2482409 - RNA, 19 nt, Artificial Sequence
  Description of Artificial Sequence: Synthetic oligonucleotide
uuucagcacccacaauacc

SEQ ID NO: 2482410 - RNA, 19 nt, Artificial Sequence
  Description of Artificial Sequence: Synthetic oligonucleotide
aauaccaaacuggcuaaau

SEQ ID NO: 2482411 - RNA, 19 nt, Artificial Sequence
  Description of Artificial Sequence: Synthetic oligonucleotide
uggagauggccacaucuac

SEQ ID NO: 2482412 - RNA, 19 nt, Artificial Sequence
  Description of Artificial Sequence: Synthetic oligonucleotide
aguucagccaucuccuuaa

SEQ ID NO: 2482413 - RNA, 19 nt, Artificial Sequence
  Description of Artificial Sequence: Synthetic oligonucleotide
gauggugcagguacggggc

SEQ ID NO: 2482414 - RNA, 19 nt, Artificial Sequence
  Description of Artificial Sequence: Synthetic oligonucleotide
aacuggcuaaaucuccaau

SEQ ID NO: 2482415 - RNA, 19 nt, Artificial Sequence
  Description of Artificial Sequence: Synthetic oligonucleotide
aauuuggcgaugggaaccu

SEQ ID NO: 2482416 - RNA, 19 nt, Artificial Sequence
  Description of Artificial Sequence: Synthetic oligonucleotide
uccugcucaguccgaagag

SEQ ID NO: 2482417 - RNA, 19 nt, Artificial Sequence
  Description of Artificial Sequence: Synthetic oligonucleotide
gaucuugagggaugccaag

SEQ ID NO: 2482418 - RNA, 19 nt, Artificial Sequence
  Description of Artificial Sequence: Synthetic oligonucleotide
ugacucccaaauaccaaac

SEQ ID NO: 2482419 - RNA, 19 nt, Artificial Sequence
  Description of Artificial Sequence: Synthetic oligonucleotide
ugguaccaguuucagcacc

SEQ ID NO: 2482420 - RNA, 19 nt, Artificial Sequence
  Description of Artificial Sequence: Synthetic oligonucleotide
aguagcuugcggcggcugg

SEQ ID NO: 2482421 - RNA, 19 nt, Artificial Sequence
  Description of Artificial Sequence: Synthetic oligonucleotide
ucuuuuccaugcagggccc

SEQ ID NO: 2482422 - RNA, 19 nt, Artificial Sequence
  Description of Artificial Sequence: Synthetic oligonucleotide
gaagguccuaaccacagcu

SEQ ID NO: 2482423 - RNA, 19 nt, Artificial Sequence
  Description of Artificial Sequence: Synthetic oligonucleotide
caaggcuacacuguaccgc

SEQ ID NO: 2482424 - RNA, 19 nt, Artificial Sequence
  Description of Artificial Sequence: Synthetic oligonucleotide
ggauggugcagguacgggg

SEQ ID NO: 2482425 - RNA, 19 nt, Artificial Sequence
  Description of Artificial Sequence: Synthetic oligonucleotide
uguaccgcagcuccuggaa

SEQ ID NO: 2482426 - RNA, 19 nt, Artificial Sequence
  Description of Artificial Sequence: Synthetic oligonucleotide
aaacuggcuaaaucuccaa

SEQ ID NO: 2482427 - RNA, 19 nt, Artificial Sequence
  Description of Artificial Sequence: Synthetic oligonucleotide
uuguugggccacugagucg

SEQ ID NO: 2482428 - RNA, 19 nt, Artificial Sequence
  Description of Artificial Sequence: Synthetic oligonucleotide
gcugcaugagaacacucgg

SEQ ID NO: 2482429 - RNA, 19 nt, Artificial Sequence
  Description of Artificial Sequence: Synthetic oligonucleotide
acugucggcuggauggugc

SEQ ID NO: 2482430 - RNA, 19 nt, Artificial Sequence
  Description of Artificial Sequence: Synthetic oligonucleotide
acugaguacuuguggagau

SEQ ID NO: 2482431 - RNA, 19 nt, Artificial Sequence
  Description of Artificial Sequence: Synthetic oligonucleotide
uuggcgaugggaaccucga

SEQ ID NO: 2482432 - RNA, 19 nt, Artificial Sequence
  Description of Artificial Sequence: Synthetic oligonucleotide
cuugagggaugccaaguuc

SEQ ID NO: 2482433 - RNA, 19 nt, Artificial Sequence
  Description of Artificial Sequence: Synthetic oligonucleotide
cucgguugcagggagcggg

SEQ ID NO: 2482434 - RNA, 19 nt, Artificial Sequence
  Description of Artificial Sequence: Synthetic oligonucleotide
aaucuccaaucagaucuug

SEQ ID NO: 2482435 - RNA, 19 nt, Artificial Sequence
  Description of Artificial Sequence: Synthetic oligonucleotide
ucuugagggaugccaaguu

SEQ ID NO: 2482436 - RNA, 19 nt, Artificial Sequence
  Description of Artificial Sequence: Synthetic oligonucleotide
ugacagguuggcacuggca

SEQ ID NO: 2482437 - RNA, 19 nt, Artificial Sequence
  Description of Artificial Sequence: Synthetic oligonucleotide
acaacaagcuucagcaacu

SEQ ID NO: 2482438 - RNA, 19 nt, Artificial Sequence
  Description of Artificial Sequence: Synthetic oligonucleotide
cccacaacaagcuucagca

SEQ ID NO: 2482439 - RNA, 19 nt, Artificial Sequence
  Description of Artificial Sequence: Synthetic oligonucleotide
caaacuggcuaaaucucca

SEQ ID NO: 2482440 - RNA, 19 nt, Artificial Sequence
  Description of Artificial Sequence: Synthetic oligonucleotide
ggcgcugacucccaaauac

SEQ ID NO: 2482441 - RNA, 19 nt, Artificial Sequence
  Description of Artificial Sequence: Synthetic oligonucleotide
cagguuggcacuggcaccg

SEQ ID NO: 2482442 - RNA, 19 nt, Artificial Sequence
  Description of Artificial Sequence: Synthetic oligonucleotide
ggcgaugggaaccucgaag

SEQ ID NO: 2482443 - RNA, 19 nt, Artificial Sequence
  Description of Artificial Sequence: Synthetic oligonucleotide
gcgaugggaaccucgaagc

SEQ ID NO: 2482444 - RNA, 19 nt, Artificial Sequence
  Description of Artificial Sequence: Synthetic oligonucleotide
gaaggugcuccuguccaag

SEQ ID NO: 2482445 - RNA, 19 nt, Artificial Sequence
  Description of Artificial Sequence: Synthetic oligonucleotide
cagccaucuccuuaaggac

SEQ ID NO: 2482446 - RNA, 19 nt, Artificial Sequence
  Description of Artificial Sequence: Synthetic oligonucleotide
ugggccacugagucgagaa

SEQ ID NO: 2482447 - RNA, 19 nt, Artificial Sequence
  Description of Artificial Sequence: Synthetic oligonucleotide
agcgggacugaguacuugu

SEQ ID NO: 2482448 - RNA, 19 nt, Artificial Sequence
  Description of Artificial Sequence: Synthetic oligonucleotide
guugcagggagcgggacug

SEQ ID NO: 2482449 - RNA, 19 nt, Artificial Sequence
  Description of Artificial Sequence: Synthetic oligonucleotide
aagguccuaaccacagcug

SEQ ID NO: 2482450 - RNA, 19 nt, Artificial Sequence
  Description of Artificial Sequence: Synthetic oligonucleotide
aaacugacccggccacugu

SEQ ID NO: 2482451 - RNA, 19 nt, Artificial Sequence
  Description of Artificial Sequence: Synthetic oligonucleotide
aacaagcuucagcaacuuu

SEQ ID NO: 2482452 - RNA, 19 nt, Artificial Sequence
  Description of Artificial Sequence: Synthetic oligonucleotide
gaacagggcgcugacuccc

SEQ ID NO: 2482453 - RNA, 19 nt, Artificial Sequence
  Description of Artificial Sequence: Synthetic oligonucleotide
ccaaauaccaaacuggcua

SEQ ID NO: 2482454 - RNA, 19 nt, Artificial Sequence
  Description of Artificial Sequence: Synthetic oligonucleotide
ucuacccgccaccggaagu

SEQ ID NO: 2482455 - RNA, 19 nt, Artificial Sequence
  Description of Artificial Sequence: Synthetic oligonucleotide
cacugugacugucggcugg

SEQ ID NO: 2482456 - RNA, 19 nt, Artificial Sequence
  Description of Artificial Sequence: Synthetic oligonucleotide
cucgaagcggugugcagac

SEQ ID NO: 2482457 - RNA, 19 nt, Artificial Sequence
  Description of Artificial Sequence: Synthetic oligonucleotide
guccgauaguagcuugcgg

SEQ ID NO: 2482458 - RNA, 19 nt, Artificial Sequence
  Description of Artificial Sequence: Synthetic oligonucleotide
ugagaacacucgguugcag

SEQ ID NO: 2482459 - RNA, 19 nt, Artificial Sequence
  Description of Artificial Sequence: Synthetic oligonucleotide
cacucgguugcagggagcg

SEQ ID NO: 2482460 - RNA, 19 nt, Artificial Sequence
  Description of Artificial Sequence: Synthetic oligonucleotide
ggacugaguacuuguggag

SEQ ID NO: 2482461 - RNA, 19 nt, Artificial Sequence
  Description of Artificial Sequence: Synthetic oligonucleotide
uaccaguuucagcacccac

SEQ ID NO: 2482462 - RNA, 19 nt, Artificial Sequence
  Description of Artificial Sequence: Synthetic oligonucleotide
aacaggacggccagacgcu

SEQ ID NO: 2482463 - RNA, 19 nt, Artificial Sequence
  Description of Artificial Sequence: Synthetic oligonucleotide
cauucuugcuuccccuuuc

SEQ ID NO: 2482464 - RNA, 19 nt, Artificial Sequence
  Description of Artificial Sequence: Synthetic oligonucleotide
augagcugagccacugccg

SEQ ID NO: 2482465 - RNA, 19 nt, Artificial Sequence
  Description of Artificial Sequence: Synthetic oligonucleotide
ccgauaguagcuugcggcg

SEQ ID NO: 2482466 - RNA, 19 nt, Artificial Sequence
  Description of Artificial Sequence: Synthetic oligonucleotide
agacgcuccucugacaggu

SEQ ID NO: 2482467 - RNA, 19 nt, Artificial Sequence
  Description of Artificial Sequence: Synthetic oligonucleotide
aggacgccuguuguugggc

SEQ ID NO: 2482468 - RNA, 19 nt, Artificial Sequence
  Description of Artificial Sequence: Synthetic oligonucleotide
gacauguggggcagccagg

SEQ ID NO: 2482469 - RNA, 19 nt, Artificial Sequence
  Description of Artificial Sequence: Synthetic oligonucleotide
ggcuaaaucuccaaucaga

SEQ ID NO: 2482470 - RNA, 19 nt, Artificial Sequence
  Description of Artificial Sequence: Synthetic oligonucleotide
gcggugugcagacccaucg

SEQ ID NO: 2482471 - RNA, 19 nt, Artificial Sequence
  Description of Artificial Sequence: Synthetic oligonucleotide
aagaagcgguccgauagua

SEQ ID NO: 2482472 - RNA, 19 nt, Artificial Sequence
  Description of Artificial Sequence: Synthetic oligonucleotide
augggaaccucgaagcggu

SEQ ID NO: 2482473 - RNA, 19 nt, Artificial Sequence
  Description of Artificial Sequence: Synthetic oligonucleotide
aaccucgaagcggugugca

SEQ ID NO: 2482474 - RNA, 19 nt, Artificial Sequence
  Description of Artificial Sequence: Synthetic oligonucleotide
aagcgguccgauaguagcu

SEQ ID NO: 2482475 - RNA, 19 nt, Artificial Sequence
  Description of Artificial Sequence: Synthetic oligonucleotide
cuggauggugcagguacgg

SEQ ID NO: 2482476 - RNA, 19 nt, Artificial Sequence
  Description of Artificial Sequence: Synthetic oligonucleotide
gggacugaguacuugugga

SEQ ID NO: 2482477 - RNA, 19 nt, Artificial Sequence
  Description of Artificial Sequence: Synthetic oligonucleotide
gucggcuggauggugcagg

SEQ ID NO: 2482478 - RNA, 19 nt, Artificial Sequence
  Description of Artificial Sequence: Synthetic oligonucleotide
ggaaccucgaagcggugug

SEQ ID NO: 2482479 - RNA, 19 nt, Artificial Sequence
  Description of Artificial Sequence: Synthetic oligonucleotide
gcaugagaacacucgguug

SEQ ID NO: 2482480 - RNA, 19 nt, Artificial Sequence
  Description of Artificial Sequence: Synthetic oligonucleotide
aguccgaagagaagguccu

SEQ ID NO: 2482481 - RNA, 19 nt, Artificial Sequence
  Description of Artificial Sequence: Synthetic oligonucleotide
gcagguacggggcugcagc

SEQ ID NO: 2482482 - RNA, 19 nt, Artificial Sequence
  Description of Artificial Sequence: Synthetic oligonucleotide
cuggaauuuggcgauggga

SEQ ID NO: 2482483 - RNA, 19 nt, Artificial Sequence
  Description of Artificial Sequence: Synthetic oligonucleotide
ggagcagugugugugugcc

SEQ ID NO: 2482484 - RNA, 19 nt, Artificial Sequence
  Description of Artificial Sequence: Synthetic oligonucleotide
ugaaggugcuccuguccaa

SEQ ID NO: 2482485 - RNA, 19 nt, Artificial Sequence
  Description of Artificial Sequence: Synthetic oligonucleotide
accgaggugcugcacggcu

SEQ ID NO: 2482486 - RNA, 19 nt, Artificial Sequence
  Description of Artificial Sequence: Synthetic oligonucleotide
ucaguccgaagagaagguc

SEQ ID NO: 2482487 - RNA, 19 nt, Artificial Sequence
  Description of Artificial Sequence: Synthetic oligonucleotide
ccagacgcuccucugacag

SEQ ID NO: 2482488 - RNA, 19 nt, Artificial Sequence
  Description of Artificial Sequence: Synthetic oligonucleotide
agguacggggcugcagccc

SEQ ID NO: 2482489 - RNA, 19 nt, Artificial Sequence
  Description of Artificial Sequence: Synthetic oligonucleotide
acauucuugcuuccccuuu

SEQ ID NO: 2482490 - RNA, 19 nt, Artificial Sequence
  Description of Artificial Sequence: Synthetic oligonucleotide
cuuguggagagggcugggc

SEQ ID NO: 2482491 - RNA, 19 nt, Artificial Sequence
  Description of Artificial Sequence: Synthetic oligonucleotide
aggaccaaggcuacacugu

SEQ ID NO: 2482492 - RNA, 19 nt, Artificial Sequence
  Description of Artificial Sequence: Synthetic oligonucleotide
gugcagacccaucggugag

SEQ ID NO: 2482493 - RNA, 19 nt, Artificial Sequence
  Description of Artificial Sequence: Synthetic oligonucleotide
agggcgcugacucccaaau

SEQ ID NO: 2482494 - RNA, 19 nt, Artificial Sequence
  Description of Artificial Sequence: Synthetic oligonucleotide
aucuacccgccaccggaag

SEQ ID NO: 2482495 - RNA, 19 nt, Artificial Sequence
  Description of Artificial Sequence: Synthetic oligonucleotide
caggacgccuguuguuggg

SEQ ID NO: 2482496 - RNA, 19 nt, Artificial Sequence
  Description of Artificial Sequence: Synthetic oligonucleotide
agaagcgguccgauaguag

SEQ ID NO: 2482497 - RNA, 19 nt, Artificial Sequence
  Description of Artificial Sequence: Synthetic oligonucleotide
cacaucuacccgccaccgg

SEQ ID NO: 2482498 - RNA, 19 nt, Artificial Sequence
  Description of Artificial Sequence: Synthetic oligonucleotide
gguaccaguuucagcaccc

SEQ ID NO: 2482499 - RNA, 19 nt, Artificial Sequence
  Description of Artificial Sequence: Synthetic oligonucleotide
gguccgauaguagcuugcg

SEQ ID NO: 2482500 - RNA, 19 nt, Artificial Sequence
  Description of Artificial Sequence: Synthetic oligonucleotide
ucgguugcagggagcggga

SEQ ID NO: 2482501 - RNA, 19 nt, Artificial Sequence
  Description of Artificial Sequence: Synthetic oligonucleotide
uaccgcagcuccuggaauu

SEQ ID NO: 2482502 - RNA, 19 nt, Artificial Sequence
  Description of Artificial Sequence: Synthetic oligonucleotide
uaccaagguucaguccugc

SEQ ID NO: 2482503 - RNA, 19 nt, Artificial Sequence
  Description of Artificial Sequence: Synthetic oligonucleotide
caucuccuuaaggaccaag

SEQ ID NO: 2482504 - RNA, 19 nt, Artificial Sequence
  Description of Artificial Sequence: Synthetic oligonucleotide
cagguacggggcugcagcc

SEQ ID NO: 2482505 - RNA, 19 nt, Artificial Sequence
  Description of Artificial Sequence: Synthetic oligonucleotide
aagacauguggggcagcca

SEQ ID NO: 2482506 - RNA, 19 nt, Artificial Sequence
  Description of Artificial Sequence: Synthetic oligonucleotide
ccagaaaacugacccggcc

SEQ ID NO: 2482507 - RNA, 19 nt, Artificial Sequence
  Description of Artificial Sequence: Synthetic oligonucleotide
gaaccucgaagcggugugc

SEQ ID NO: 2482508 - RNA, 19 nt, Artificial Sequence
  Description of Artificial Sequence: Synthetic oligonucleotide
uggaagaagcgguccgaua

SEQ ID NO: 2482509 - RNA, 19 nt, Artificial Sequence
  Description of Artificial Sequence: Synthetic oligonucleotide
ugcagacccaucggugagc

SEQ ID NO: 2482510 - RNA, 19 nt, Artificial Sequence
  Description of Artificial Sequence: Synthetic oligonucleotide
accucgaagcggugugcag

SEQ ID NO: 2482511 - RNA, 19 nt, Artificial Sequence
  Description of Artificial Sequence: Synthetic oligonucleotide
cagacgcuccucugacagg

SEQ ID NO: 2482512 - RNA, 19 nt, Artificial Sequence
  Description of Artificial Sequence: Synthetic oligonucleotide
gguacggggcugcagcccc

SEQ ID NO: 2482513 - RNA, 19 nt, Artificial Sequence
  Description of Artificial Sequence: Synthetic oligonucleotide
gugugcagacccaucggug

SEQ ID NO: 2482514 - RNA, 19 nt, Artificial Sequence
  Description of Artificial Sequence: Synthetic oligonucleotide
ggcuacacuguaccgcagc

SEQ ID NO: 2482515 - RNA, 19 nt, Artificial Sequence
  Description of Artificial Sequence: Synthetic oligonucleotide
acggcuucccugcagucuu

SEQ ID NO: 2482516 - RNA, 19 nt, Artificial Sequence
  Description of Artificial Sequence: Synthetic oligonucleotide
gaagaagcgguccgauagu

SEQ ID NO: 2482517 - RNA, 19 nt, Artificial Sequence
  Description of Artificial Sequence: Synthetic oligonucleotide
gagcugagccacugccgcc

SEQ ID NO: 2482518 - RNA, 19 nt, Artificial Sequence
  Description of Artificial Sequence: Synthetic oligonucleotide
ccccagaaaacugacccgg

SEQ ID NO: 2482519 - RNA, 19 nt, Artificial Sequence
  Description of Artificial Sequence: Synthetic oligonucleotide
acgccuguuguugggccac

SEQ ID NO: 2482520 - RNA, 19 nt, Artificial Sequence
  Description of Artificial Sequence: Synthetic oligonucleotide
gaacacucgguugcaggga

SEQ ID NO: 2482521 - RNA, 19 nt, Artificial Sequence
  Description of Artificial Sequence: Synthetic oligonucleotide
gagggaugccaaguuccug

SEQ ID NO: 2482522 - RNA, 19 nt, Artificial Sequence
  Description of Artificial Sequence: Synthetic oligonucleotide
cugaguacuuguggagaug

SEQ ID NO: 2482523 - RNA, 19 nt, Artificial Sequence
  Description of Artificial Sequence: Synthetic oligonucleotide
aucuccaaucagaucuuga

SEQ ID NO: 2482524 - RNA, 19 nt, Artificial Sequence
  Description of Artificial Sequence: Synthetic oligonucleotide
cagcacccacaauaccaag

SEQ ID NO: 2482525 - RNA, 19 nt, Artificial Sequence
  Description of Artificial Sequence: Synthetic oligonucleotide
ccgccggagagcuugcugg

SEQ ID NO: 2482526 - RNA, 19 nt, Artificial Sequence
  Description of Artificial Sequence: Synthetic oligonucleotide
gaccaaggcuacacuguac

SEQ ID NO: 2482527 - RNA, 19 nt, Artificial Sequence
  Description of Artificial Sequence: Synthetic oligonucleotide
gacgccuguuguugggcca

SEQ ID NO: 2482528 - RNA, 19 nt, Artificial Sequence
  Description of Artificial Sequence: Synthetic oligonucleotide
acacucgguugcagggagc

SEQ ID NO: 2482529 - RNA, 19 nt, Artificial Sequence
  Description of Artificial Sequence: Synthetic oligonucleotide
cugccuggaagaagcgguc

SEQ ID NO: 2482530 - RNA, 19 nt, Artificial Sequence
  Description of Artificial Sequence: Synthetic oligonucleotide
gucgagaacagggcgcuga

SEQ ID NO: 2482531 - RNA, 19 nt, Artificial Sequence
  Description of Artificial Sequence: Synthetic oligonucleotide
cacuguaccgcagcuccug

SEQ ID NO: 2482532 - RNA, 19 nt, Artificial Sequence
  Description of Artificial Sequence: Synthetic oligonucleotide
ugccgccacuuguggagag

SEQ ID NO: 2482533 - RNA, 19 nt, Artificial Sequence
  Description of Artificial Sequence: Synthetic oligonucleotide
guagcuugcggcggcuggc

SEQ ID NO: 2482534 - RNA, 19 nt, Artificial Sequence
  Description of Artificial Sequence: Synthetic oligonucleotide
auggugcagguacggggcu

SEQ ID NO: 2482535 - RNA, 19 nt, Artificial Sequence
  Description of Artificial Sequence: Synthetic oligonucleotide
cuuuuccaugcagggcccc

SEQ ID NO: 2482536 - RNA, 19 nt, Artificial Sequence
  Description of Artificial Sequence: Synthetic oligonucleotide
cagggagcgggacugagua

SEQ ID NO: 2482537 - RNA, 19 nt, Artificial Sequence
  Description of Artificial Sequence: Synthetic oligonucleotide
uugcuuccccuuuccugcu

SEQ ID NO: 2482538 - RNA, 19 nt, Artificial Sequence
  Description of Artificial Sequence: Synthetic oligonucleotide
cccacaauaccaagguuca

SEQ ID NO: 2482539 - RNA, 19 nt, Artificial Sequence
  Description of Artificial Sequence: Synthetic oligonucleotide
gagcuucagcugcaugaga

SEQ ID NO: 2482540 - RNA, 19 nt, Artificial Sequence
  Description of Artificial Sequence: Synthetic oligonucleotide
ccuuaaggaccaaggcuac

SEQ ID NO: 2482541 - RNA, 19 nt, Artificial Sequence
  Description of Artificial Sequence: Synthetic oligonucleotide
cugacccggccacugugac

SEQ ID NO: 2482542 - RNA, 19 nt, Artificial Sequence
  Description of Artificial Sequence: Synthetic oligonucleotide
acuuguggagauggccaca

SEQ ID NO: 2482543 - RNA, 19 nt, Artificial Sequence
  Description of Artificial Sequence: Synthetic oligonucleotide
ugacccggccacugugacu

SEQ ID NO: 2482544 - RNA, 19 nt, Artificial Sequence
  Description of Artificial Sequence: Synthetic oligonucleotide
ggccacugagucgagaaca

SEQ ID NO: 2482545 - RNA, 19 nt, Artificial Sequence
  Description of Artificial Sequence: Synthetic oligonucleotide
ugacugucggcuggauggu

SEQ ID NO: 2482546 - RNA, 19 nt, Artificial Sequence
  Description of Artificial Sequence: Synthetic oligonucleotide
ccaucggugagcuucagcu

SEQ ID NO: 2482547 - RNA, 19 nt, Artificial Sequence
  Description of Artificial Sequence: Synthetic oligonucleotide
auuuggcgaugggaaccuc

SEQ ID NO: 2482548 - RNA, 19 nt, Artificial Sequence
  Description of Artificial Sequence: Synthetic oligonucleotide
ugucggcuggauggugcag

SEQ ID NO: 2482549 - RNA, 19 nt, Artificial Sequence
  Description of Artificial Sequence: Synthetic oligonucleotide
caacuuucugaaggugcuc

SEQ ID NO: 2482550 - RNA, 19 nt, Artificial Sequence
  Description of Artificial Sequence: Synthetic oligonucleotide
uaguagcuugcggcggcug

SEQ ID NO: 2482551 - RNA, 19 nt, Artificial Sequence
  Description of Artificial Sequence: Synthetic oligonucleotide
uggcgaugggaaccucgaa

SEQ ID NO: 2482552 - RNA, 19 nt, Artificial Sequence
  Description of Artificial Sequence: Synthetic oligonucleotide
ggacgccuguuguugggcc

SEQ ID NO: 2482553 - RNA, 19 nt, Artificial Sequence
  Description of Artificial Sequence: Synthetic oligonucleotide
auaguagcuugcggcggcu

SEQ ID NO: 2482554 - RNA, 19 nt, Artificial Sequence
  Description of Artificial Sequence: Synthetic oligonucleotide
gcuaaaucuccaaucagau

SEQ ID NO: 2482555 - RNA, 19 nt, Artificial Sequence
  Description of Artificial Sequence: Synthetic oligonucleotide
ccgaagagaagguccuaac

SEQ ID NO: 2482556 - RNA, 19 nt, Artificial Sequence
  Description of Artificial Sequence: Synthetic oligonucleotide
gacugucggcuggauggug

SEQ ID NO: 2482557 - RNA, 19 nt, Artificial Sequence
  Description of Artificial Sequence: Synthetic oligonucleotide
cuuaaggaccaaggcuaca

SEQ ID NO: 2482558 - RNA, 19 nt, Artificial Sequence
  Description of Artificial Sequence: Synthetic oligonucleotide
ccuggaauuuggcgauggg

SEQ ID NO: 2482559 - RNA, 19 nt, Artificial Sequence
  Description of Artificial Sequence: Synthetic oligonucleotide
uagcuugcggcggcuggca

SEQ ID NO: 2482560 - RNA, 19 nt, Artificial Sequence
  Description of Artificial Sequence: Synthetic oligonucleotide
agcggugugcagacccauc

SEQ ID NO: 2482561 - RNA, 19 nt, Artificial Sequence
  Description of Artificial Sequence: Synthetic oligonucleotide
ccacuuguggagagggcug

SEQ ID NO: 2482562 - RNA, 19 nt, Artificial Sequence
  Description of Artificial Sequence: Synthetic oligonucleotide
cucaguccgaagagaaggu

SEQ ID NO: 2482563 - RNA, 19 nt, Artificial Sequence
  Description of Artificial Sequence: Synthetic oligonucleotide
ucccugcagucuuuuccau

SEQ ID NO: 2482564 - RNA, 19 nt, Artificial Sequence
  Description of Artificial Sequence: Synthetic oligonucleotide
acucgguugcagggagcgg

SEQ ID NO: 2482565 - RNA, 19 nt, Artificial Sequence
  Description of Artificial Sequence: Synthetic oligonucleotide
gagucgagaacagggcgcu

SEQ ID NO: 2482566 - RNA, 19 nt, Artificial Sequence
  Description of Artificial Sequence: Synthetic oligonucleotide
gagcgggacugaguacuug

SEQ ID NO: 2482567 - RNA, 19 nt, Artificial Sequence
  Description of Artificial Sequence: Synthetic oligonucleotide
cuggagcagugugugugug

SEQ ID NO: 2482568 - RNA, 19 nt, Artificial Sequence
  Description of Artificial Sequence: Synthetic oligonucleotide
gccaggacgccuguuguug

SEQ ID NO: 2482569 - RNA, 19 nt, Artificial Sequence
  Description of Artificial Sequence: Synthetic oligonucleotide
gccacugagucgagaacag

SEQ ID NO: 2482570 - RNA, 19 nt, Artificial Sequence
  Description of Artificial Sequence: Synthetic oligonucleotide
ccccuuuccugcucagucc

SEQ ID NO: 2482571 - RNA, 19 nt, Artificial Sequence
  Description of Artificial Sequence: Synthetic oligonucleotide
aacagggcgcugacuccca

SEQ ID NO: 2482572 - RNA, 19 nt, Artificial Sequence
  Description of Artificial Sequence: Synthetic oligonucleotide
cccagaaaacugacccggc

SEQ ID NO: 2482573 - RNA, 19 nt, Artificial Sequence
  Description of Artificial Sequence: Synthetic oligonucleotide
ccggagagcuugcuggagc

SEQ ID NO: 2482574 - RNA, 19 nt, Artificial Sequence
  Description of Artificial Sequence: Synthetic oligonucleotide
gcacccacaauaccaaggu

SEQ ID NO: 2482575 - RNA, 19 nt, Artificial Sequence
  Description of Artificial Sequence: Synthetic oligonucleotide
guggagauggccacaucua

SEQ ID NO: 2482576 - RNA, 19 nt, Artificial Sequence
  Description of Artificial Sequence: Synthetic oligonucleotide
cgaugggaaccucgaagcg

SEQ ID NO: 2482577 - RNA, 19 nt, Artificial Sequence
  Description of Artificial Sequence: Synthetic oligonucleotide
cccucaugagcugagccac

SEQ ID NO: 2482578 - RNA, 19 nt, Artificial Sequence
  Description of Artificial Sequence: Synthetic oligonucleotide
ccggccacugugacugucg

SEQ ID NO: 2482579 - RNA, 19 nt, Artificial Sequence
  Description of Artificial Sequence: Synthetic oligonucleotide
ggugcagguacggggcugc

SEQ ID NO: 2482580 - RNA, 19 nt, Artificial Sequence
  Description of Artificial Sequence: Synthetic oligonucleotide
cugucggcuggauggugca

SEQ ID NO: 2482581 - RNA, 19 nt, Artificial Sequence
  Description of Artificial Sequence: Synthetic oligonucleotide
ucgaagcggugugcagacc

SEQ ID NO: 2482582 - RNA, 19 nt, Artificial Sequence
  Description of Artificial Sequence: Synthetic oligonucleotide
gacccaucggugagcuuca

SEQ ID NO: 2482583 - RNA, 19 nt, Artificial Sequence
  Description of Artificial Sequence: Synthetic oligonucleotide
ggccagacgcuccucugac

SEQ ID NO: 2482584 - RNA, 19 nt, Artificial Sequence
  Description of Artificial Sequence: Synthetic oligonucleotide
gccaccggaaguaagacau

SEQ ID NO: 2482585 - RNA, 19 nt, Artificial Sequence
  Description of Artificial Sequence: Synthetic oligonucleotide
cuuuccugcucaguccgaa

SEQ ID NO: 2482586 - RNA, 19 nt, Artificial Sequence
  Description of Artificial Sequence: Synthetic oligonucleotide
guccuaaccacagcugccu

SEQ ID NO: 2482587 - RNA, 19 nt, Artificial Sequence
  Description of Artificial Sequence: Synthetic oligonucleotide
ggaccaaggcuacacugua

SEQ ID NO: 2482588 - RNA, 19 nt, Artificial Sequence
  Description of Artificial Sequence: Synthetic oligonucleotide
gaaaacugacccggccacu

SEQ ID NO: 2482589 - RNA, 19 nt, Artificial Sequence
  Description of Artificial Sequence: Synthetic oligonucleotide
agcgguccgauaguagcuu

SEQ ID NO: 2482590 - RNA, 19 nt, Artificial Sequence
  Description of Artificial Sequence: Synthetic oligonucleotide
agccaggacgccuguuguu

SEQ ID NO: 2482591 - RNA, 19 nt, Artificial Sequence
  Description of Artificial Sequence: Synthetic oligonucleotide
gacggccagacgcuccucu

SEQ ID NO: 2482592 - RNA, 19 nt, Artificial Sequence
  Description of Artificial Sequence: Synthetic oligonucleotide
caucuacccgccaccggaa

SEQ ID NO: 2482593 - RNA, 19 nt, Artificial Sequence
  Description of Artificial Sequence: Synthetic oligonucleotide
ccacaucuacccgccaccg

SEQ ID NO: 2482594 - RNA, 19 nt, Artificial Sequence
  Description of Artificial Sequence: Synthetic oligonucleotide
caccggaaguaagacaugu

SEQ ID NO: 2482595 - RNA, 19 nt, Artificial Sequence
  Description of Artificial Sequence: Synthetic oligonucleotide
guaccaguuucagcaccca

SEQ ID NO: 2482596 - RNA, 19 nt, Artificial Sequence
  Description of Artificial Sequence: Synthetic oligonucleotide
ggggccgccggagagcuug

SEQ ID NO: 2482597 - RNA, 19 nt, Artificial Sequence
  Description of Artificial Sequence: Synthetic oligonucleotide
gcaacuuucugaaggugcu

SEQ ID NO: 2482598 - RNA, 19 nt, Artificial Sequence
  Description of Artificial Sequence: Synthetic oligonucleotide
ccgccacuuguggagaggg

SEQ ID NO: 2482599 - RNA, 19 nt, Artificial Sequence
  Description of Artificial Sequence: Synthetic oligonucleotide
cacugccgccacuugugga

SEQ ID NO: 2482600 - RNA, 19 nt, Artificial Sequence
  Description of Artificial Sequence: Synthetic oligonucleotide
cccugcagucuuuuccaug

SEQ ID NO: 2482601 - RNA, 19 nt, Artificial Sequence
  Description of Artificial Sequence: Synthetic oligonucleotide
caaguuccuggagcucauc

SEQ ID NO: 2482602 - RNA, 19 nt, Artificial Sequence
  Description of Artificial Sequence: Synthetic oligonucleotide
gcgguccgauaguagcuug

SEQ ID NO: 2482603 - RNA, 19 nt, Artificial Sequence
  Description of Artificial Sequence: Synthetic oligonucleotide
cuacccgccaccggaagua

SEQ ID NO: 2482604 - RNA, 19 nt, Artificial Sequence
  Description of Artificial Sequence: Synthetic oligonucleotide
gcuacacuguaccgcagcu

SEQ ID NO: 2482605 - RNA, 19 nt, Artificial Sequence
  Description of Artificial Sequence: Synthetic oligonucleotide
agucgagaacagggcgcug

SEQ ID NO: 2482606 - RNA, 19 nt, Artificial Sequence
  Description of Artificial Sequence: Synthetic oligonucleotide
ccacugccgccacuugugg

SEQ ID NO: 2482607 - RNA, 19 nt, Artificial Sequence
  Description of Artificial Sequence: Synthetic oligonucleotide
aggcuacacuguaccgcag

SEQ ID NO: 2482608 - RNA, 19 nt, Artificial Sequence
  Description of Artificial Sequence: Synthetic oligonucleotide
gcugccuggaagaagcggu

SEQ ID NO: 2482609 - RNA, 19 nt, Artificial Sequence
  Description of Artificial Sequence: Synthetic oligonucleotide
acagggcgcugacucccaa

SEQ ID NO: 2482610 - RNA, 19 nt, Artificial Sequence
  Description of Artificial Sequence: Synthetic oligonucleotide
gggccacugagucgagaac

SEQ ID NO: 2482611 - RNA, 19 nt, Artificial Sequence
  Description of Artificial Sequence: Synthetic oligonucleotide
gggagcgggacugaguacu

SEQ ID NO: 2482612 - RNA, 19 nt, Artificial Sequence
  Description of Artificial Sequence: Synthetic oligonucleotide
cccaucggugagcuucagc

SEQ ID NO: 2482613 - RNA, 19 nt, Artificial Sequence
  Description of Artificial Sequence: Synthetic oligonucleotide
gcugacucccaaauaccaa

SEQ ID NO: 2482614 - RNA, 19 nt, Artificial Sequence
  Description of Artificial Sequence: Synthetic oligonucleotide
uacccgccaccggaaguaa

SEQ ID NO: 2482615 - RNA, 19 nt, Artificial Sequence
  Description of Artificial Sequence: Synthetic oligonucleotide
caccgaggugcugcacggc

SEQ ID NO: 2482616 - RNA, 19 nt, Artificial Sequence
  Description of Artificial Sequence: Synthetic oligonucleotide
gccacuuguggagagggcu

SEQ ID NO: 2482617 - RNA, 19 nt, Artificial Sequence
  Description of Artificial Sequence: Synthetic oligonucleotide
cgguccgauaguagcuugc

SEQ ID NO: 2482618 - RNA, 19 nt, Artificial Sequence
  Description of Artificial Sequence: Synthetic oligonucleotide
cccgccaccggaaguaaga

SEQ ID NO: 2482619 - RNA, 19 nt, Artificial Sequence
  Description of Artificial Sequence: Synthetic oligonucleotide
acccgccaccggaaguaag

SEQ ID NO: 2482620 - RNA, 19 nt, Artificial Sequence
  Description of Artificial Sequence: Synthetic oligonucleotide
guugggccacugagucgag

SEQ ID NO: 2482621 - RNA, 19 nt, Artificial Sequence
  Description of Artificial Sequence: Synthetic oligonucleotide
gccgccggagagcuugcug

SEQ ID NO: 2482622 - RNA, 19 nt, Artificial Sequence
  Description of Artificial Sequence: Synthetic oligonucleotide
gcaguuugcgcucgcacuu

SEQ ID NO: 2482623 - RNA, 19 nt, Artificial Sequence
  Description of Artificial Sequence: Synthetic oligonucleotide
ccaccggaaguaagacaug

SEQ ID NO: 2482624 - RNA, 19 nt, Artificial Sequence
  Description of Artificial Sequence: Synthetic oligonucleotide
gguugcagggagcgggacu

SEQ ID NO: 2482625 - RNA, 19 nt, Artificial Sequence
  Description of Artificial Sequence: Synthetic oligonucleotide
guaccgcagcuccuggaau

SEQ ID NO: 2482626 - RNA, 19 nt, Artificial Sequence
  Description of Artificial Sequence: Synthetic oligonucleotide
ccucgaagcggugugcaga

SEQ ID NO: 2482627 - RNA, 19 nt, Artificial Sequence
  Description of Artificial Sequence: Synthetic oligonucleotide
ccuguccaagucccucaug

SEQ ID NO: 2482628 - RNA, 19 nt, Artificial Sequence
  Description of Artificial Sequence: Synthetic oligonucleotide
cccaaauaccaaacuggcu

SEQ ID NO: 2482629 - RNA, 19 nt, Artificial Sequence
  Description of Artificial Sequence: Synthetic oligonucleotide
gcuggagcagugugugugu

SEQ ID NO: 2482630 - RNA, 19 nt, Artificial Sequence
  Description of Artificial Sequence: Synthetic oligonucleotide
cagggcgcugacucccaaa

SEQ ID NO: 2482631 - RNA, 19 nt, Artificial Sequence
  Description of Artificial Sequence: Synthetic oligonucleotide
gccagacgcuccucugaca

SEQ ID NO: 2482632 - RNA, 19 nt, Artificial Sequence
  Description of Artificial Sequence: Synthetic oligonucleotide
cuggaagaagcgguccgau

SEQ ID NO: 2482633 - RNA, 19 nt, Artificial Sequence
  Description of Artificial Sequence: Synthetic oligonucleotide
ccucugacagguuggcacu

SEQ ID NO: 2482634 - RNA, 19 nt, Artificial Sequence
  Description of Artificial Sequence: Synthetic oligonucleotide
cugccgccacuuguggaga

SEQ ID NO: 2482635 - RNA, 19 nt, Artificial Sequence
  Description of Artificial Sequence: Synthetic oligonucleotide
cacggcuucccugcagucu

SEQ ID NO: 2482636 - RNA, 19 nt, Artificial Sequence
  Description of Artificial Sequence: Synthetic oligonucleotide
gcacggcuucccugcaguc

SEQ ID NO: 2482637 - RNA, 19 nt, Artificial Sequence
  Description of Artificial Sequence: Synthetic oligonucleotide
ccgccaccggaaguaagac

SEQ ID NO: 2482638 - RNA, 19 nt, Artificial Sequence
  Description of Artificial Sequence: Synthetic oligonucleotide
gcagacccaucggugagcu

SEQ ID NO: 2482639 - RNA, 19 nt, Artificial Sequence
  Description of Artificial Sequence: Synthetic oligonucleotide
guccgaagagaagguccua

SEQ ID NO: 2482640 - RNA, 19 nt, Artificial Sequence
  Description of Artificial Sequence: Synthetic oligonucleotide
caacaagcuucagcaacuu

SEQ ID NO: 2482641 - RNA, 19 nt, Artificial Sequence
  Description of Artificial Sequence: Synthetic oligonucleotide
cacccacaauaccaagguu

SEQ ID NO: 2482642 - RNA, 19 nt, Artificial Sequence
  Description of Artificial Sequence: Synthetic oligonucleotide
gggcgcugacucccaaaua

SEQ ID NO: 2482643 - RNA, 19 nt, Artificial Sequence
  Description of Artificial Sequence: Synthetic oligonucleotide
ccugcaguuugcgcucgca

SEQ ID NO: 2482644 - RNA, 19 nt, Artificial Sequence
  Description of Artificial Sequence: Synthetic oligonucleotide
gugcagguacggggcugca

SEQ ID NO: 2482645 - RNA, 19 nt, Artificial Sequence
  Description of Artificial Sequence: Synthetic oligonucleotide
caguuucagcacccacaau

SEQ ID NO: 2482646 - RNA, 19 nt, Artificial Sequence
  Description of Artificial Sequence: Synthetic oligonucleotide
cgccaccggaaguaagaca

SEQ ID NO: 2482647 - RNA, 19 nt, Artificial Sequence
  Description of Artificial Sequence: Synthetic oligonucleotide
caguuugcgcucgcacuuu

SEQ ID NO: 2482648 - RNA, 19 nt, Artificial Sequence
  Description of Artificial Sequence: Synthetic oligonucleotide
gcagggagcgggacugagu

SEQ ID NO: 2482649 - RNA, 19 nt, Artificial Sequence
  Description of Artificial Sequence: Synthetic oligonucleotide
cggccagacgcuccucuga

SEQ ID NO: 2482650 - RNA, 19 nt, Artificial Sequence
  Description of Artificial Sequence: Synthetic oligonucleotide
ccucaugagcugagccacu

SEQ ID NO: 2482651 - RNA, 19 nt, Artificial Sequence
  Description of Artificial Sequence: Synthetic oligonucleotide
ggacggccagacgcuccuc

SEQ ID NO: 2482652 - RNA, 19 nt, Artificial Sequence
  Description of Artificial Sequence: Synthetic oligonucleotide
gggccgccggagagcuugc

SEQ ID NO: 2482653 - RNA, 19 nt, Artificial Sequence
  Description of Artificial Sequence: Synthetic oligonucleotide
ggagcgggacugaguacuu

SEQ ID NO: 2482654 - RNA, 19 nt, Artificial Sequence
  Description of Artificial Sequence: Synthetic oligonucleotide
cgguugcagggagcgggac

SEQ ID NO: 2482655 - RNA, 19 nt, Artificial Sequence
  Description of Artificial Sequence: Synthetic oligonucleotide
ggcuucccugcagucuuuu

SEQ ID NO: 2482656 - RNA, 19 nt, Artificial Sequence
  Description of Artificial Sequence: Synthetic oligonucleotide
cagacccaucggugagcuu

SEQ ID NO: 2482657 - RNA, 19 nt, Artificial Sequence
  Description of Artificial Sequence: Synthetic oligonucleotide
ccgaggugcugcacggcuu

SEQ ID NO: 2482658 - RNA, 19 nt, Artificial Sequence
  Description of Artificial Sequence: Synthetic oligonucleotide
ggccgccggagagcuugcu

SEQ ID NO: 2482659 - RNA, 19 nt, Artificial Sequence
  Description of Artificial Sequence: Synthetic oligonucleotide
cggcuggauggugcaggua

SEQ ID NO: 2482660 - RNA, 19 nt, Artificial Sequence
  Description of Artificial Sequence: Synthetic oligonucleotide
cggcuucccugcagucuuu

SEQ ID NO: 2482661 - RNA, 19 nt, Artificial Sequence
  Description of Artificial Sequence: Synthetic oligonucleotide
cgccuguuguugggccacu

SEQ ID NO: 2482662 - RNA, 19 nt, Artificial Sequence
  Description of Artificial Sequence: Synthetic oligonucleotide
aauaguuucuggcaaaucc

SEQ ID NO: 2482663 - RNA, 19 nt, Artificial Sequence
  Description of Artificial Sequence: Synthetic oligonucleotide
ugugaaaauuuucugaacg

SEQ ID NO: 2482664 - RNA, 19 nt, Artificial Sequence
  Description of Artificial Sequence: Synthetic oligonucleotide
ucaauuaucaauccaagcu

SEQ ID NO: 2482665 - RNA, 19 nt, Artificial Sequence
  Description of Artificial Sequence: Synthetic oligonucleotide
ugcaaaggaacuuugaaag

SEQ ID NO: 2482666 - RNA, 19 nt, Artificial Sequence
  Description of Artificial Sequence: Synthetic oligonucleotide
uuauguaagaaauaguuuc

SEQ ID NO: 2482667 - RNA, 19 nt, Artificial Sequence
  Description of Artificial Sequence: Synthetic oligonucleotide
uguacuaacauuccgguac

SEQ ID NO: 2482668 - RNA, 19 nt, Artificial Sequence
  Description of Artificial Sequence: Synthetic oligonucleotide
gaauaauucaauugcauca

SEQ ID NO: 2482669 - RNA, 19 nt, Artificial Sequence
  Description of Artificial Sequence: Synthetic oligonucleotide
aaauuuucugaacgacugc

SEQ ID NO: 2482670 - RNA, 19 nt, Artificial Sequence
  Description of Artificial Sequence: Synthetic oligonucleotide
gacaugacgauucugcagg

SEQ ID NO: 2482671 - RNA, 19 nt, Artificial Sequence
  Description of Artificial Sequence: Synthetic oligonucleotide
ucugacaugacgauucugc

SEQ ID NO: 2482672 - RNA, 19 nt, Artificial Sequence
  Description of Artificial Sequence: Synthetic oligonucleotide
aucaauuaucaauccaagc

SEQ ID NO: 2482673 - RNA, 19 nt, Artificial Sequence
  Description of Artificial Sequence: Synthetic oligonucleotide
uucaauugcaucaucuggc

SEQ ID NO: 2482674 - RNA, 19 nt, Artificial Sequence
  Description of Artificial Sequence: Synthetic oligonucleotide
aauaguccucuccagcugg

SEQ ID NO: 2482675 - RNA, 19 nt, Artificial Sequence
  Description of Artificial Sequence: Synthetic oligonucleotide
aagcaaugaaacgaguccc

SEQ ID NO: 2482676 - RNA, 19 nt, Artificial Sequence
  Description of Artificial Sequence: Synthetic oligonucleotide
gaaaaugccgggaaggugg

SEQ ID NO: 2482677 - RNA, 19 nt, Artificial Sequence
  Description of Artificial Sequence: Synthetic oligonucleotide
cuggguaugaaaaugccgg

SEQ ID NO: 2482678 - RNA, 19 nt, Artificial Sequence
  Description of Artificial Sequence: Synthetic oligonucleotide
uaagaaauaguuucuggca

SEQ ID NO: 2482679 - RNA, 19 nt, Artificial Sequence
  Description of Artificial Sequence: Synthetic oligonucleotide
uugaaagcaaugaaacgag

SEQ ID NO: 2482680 - RNA, 19 nt, Artificial Sequence
  Description of Artificial Sequence: Synthetic oligonucleotide
uuuauaauagcgcugcgua

SEQ ID NO: 2482681 - RNA, 19 nt, Artificial Sequence
  Description of Artificial Sequence: Synthetic oligonucleotide
ucugcuuuauaauagcgcu

SEQ ID NO: 2482682 - RNA, 19 nt, Artificial Sequence
  Description of Artificial Sequence: Synthetic oligonucleotide
uuaaaucaauuaucaaucc

SEQ ID NO: 2482683 - RNA, 19 nt, Artificial Sequence
  Description of Artificial Sequence: Synthetic oligonucleotide
uuugugaaaauuuucugaa

SEQ ID NO: 2482684 - RNA, 19 nt, Artificial Sequence
  Description of Artificial Sequence: Synthetic oligonucleotide
uuuaacugcacuuuugaau

SEQ ID NO: 2482685 - RNA, 19 nt, Artificial Sequence
  Description of Artificial Sequence: Synthetic oligonucleotide
uaauucaauugcaucaucu

SEQ ID NO: 2482686 - RNA, 19 nt, Artificial Sequence
  Description of Artificial Sequence: Synthetic oligonucleotide
uccagaagaauuuucuuug

SEQ ID NO: 2482687 - RNA, 19 nt, Artificial Sequence
  Description of Artificial Sequence: Synthetic oligonucleotide
ucuggguaugaaaaugccg

SEQ ID NO: 2482688 - RNA, 19 nt, Artificial Sequence
  Description of Artificial Sequence: Synthetic oligonucleotide
ugucuuucuaugcagugcc

SEQ ID NO: 2482689 - RNA, 19 nt, Artificial Sequence
  Description of Artificial Sequence: Synthetic oligonucleotide
uagucuuuccaucuuuccg

SEQ ID NO: 2482690 - RNA, 19 nt, Artificial Sequence
  Description of Artificial Sequence: Synthetic oligonucleotide
auauguuaaaucaauuauc

SEQ ID NO: 2482691 - RNA, 19 nt, Artificial Sequence
  Description of Artificial Sequence: Synthetic oligonucleotide
uguucuugaauuuuauuaa

SEQ ID NO: 2482692 - RNA, 19 nt, Artificial Sequence
  Description of Artificial Sequence: Synthetic oligonucleotide
uuaacugcacuuuugaauu

SEQ ID NO: 2482693 - RNA, 19 nt, Artificial Sequence
  Description of Artificial Sequence: Synthetic oligonucleotide
uuugugaauaguccucucc

SEQ ID NO: 2482694 - RNA, 19 nt, Artificial Sequence
  Description of Artificial Sequence: Synthetic oligonucleotide
aagaaauaguuucuggcaa

SEQ ID NO: 2482695 - RNA, 19 nt, Artificial Sequence
  Description of Artificial Sequence: Synthetic oligonucleotide
uaucaauccaagcucuuca

SEQ ID NO: 2482696 - RNA, 19 nt, Artificial Sequence
  Description of Artificial Sequence: Synthetic oligonucleotide
gguacuuucugacaugacg

SEQ ID NO: 2482697 - RNA, 19 nt, Artificial Sequence
  Description of Artificial Sequence: Synthetic oligonucleotide
uuugcaaaggaacuuugaa

SEQ ID NO: 2482698 - RNA, 19 nt, Artificial Sequence
  Description of Artificial Sequence: Synthetic oligonucleotide
ucguauuucuuuugcaaag

SEQ ID NO: 2482699 - RNA, 19 nt, Artificial Sequence
  Description of Artificial Sequence: Synthetic oligonucleotide
aauaguguugcuguugggu

SEQ ID NO: 2482700 - RNA, 19 nt, Artificial Sequence
  Description of Artificial Sequence: Synthetic oligonucleotide
uuucuuugugaauaguccu

SEQ ID NO: 2482701 - RNA, 19 nt, Artificial Sequence
  Description of Artificial Sequence: Synthetic oligonucleotide
agccaguccuguuuaagcc

SEQ ID NO: 2482702 - RNA, 19 nt, Artificial Sequence
  Description of Artificial Sequence: Synthetic oligonucleotide
aauuaucaauccaagcucu

SEQ ID NO: 2482703 - RNA, 19 nt, Artificial Sequence
  Description of Artificial Sequence: Synthetic oligonucleotide
cuguugaauaauucaauug

SEQ ID NO: 2482704 - RNA, 19 nt, Artificial Sequence
  Description of Artificial Sequence: Synthetic oligonucleotide
guugacuugguccauaaga

SEQ ID NO: 2482705 - RNA, 19 nt, Artificial Sequence
  Description of Artificial Sequence: Synthetic oligonucleotide
uugugaauaguccucucca

SEQ ID NO: 2482706 - RNA, 19 nt, Artificial Sequence
  Description of Artificial Sequence: Synthetic oligonucleotide
ugaauaguccucuccagcu

SEQ ID NO: 2482707 - RNA, 19 nt, Artificial Sequence
  Description of Artificial Sequence: Synthetic oligonucleotide
caauuaucaauccaagcuc

SEQ ID NO: 2482708 - RNA, 19 nt, Artificial Sequence
  Description of Artificial Sequence: Synthetic oligonucleotide
aauaauucaauugcaucau

SEQ ID NO: 2482709 - RNA, 19 nt, Artificial Sequence
  Description of Artificial Sequence: Synthetic oligonucleotide
ugagucuucaagaccaccu

SEQ ID NO: 2482710 - RNA, 19 nt, Artificial Sequence
  Description of Artificial Sequence: Synthetic oligonucleotide
agauguacuaacauuccgg

SEQ ID NO: 2482711 - RNA, 19 nt, Artificial Sequence
  Description of Artificial Sequence: Synthetic oligonucleotide
aacacucuuguuuugugaa

SEQ ID NO: 2482712 - RNA, 19 nt, Artificial Sequence
  Description of Artificial Sequence: Synthetic oligonucleotide
aaacgagucccaggcaucc

SEQ ID NO: 2482713 - RNA, 19 nt, Artificial Sequence
  Description of Artificial Sequence: Synthetic oligonucleotide
uauuucuuuugcaaaggaa

SEQ ID NO: 2482714 - RNA, 19 nt, Artificial Sequence
  Description of Artificial Sequence: Synthetic oligonucleotide
accaauaaguuugucauug

SEQ ID NO: 2482715 - RNA, 19 nt, Artificial Sequence
  Description of Artificial Sequence: Synthetic oligonucleotide
ucaauugcaucaucuggcc

SEQ ID NO: 2482716 - RNA, 19 nt, Artificial Sequence
  Description of Artificial Sequence: Synthetic oligonucleotide
ugaaaauuuucugaacgac

SEQ ID NO: 2482717 - RNA, 19 nt, Artificial Sequence
  Description of Artificial Sequence: Synthetic oligonucleotide
guggacaccaauaaguuug

SEQ ID NO: 2482718 - RNA, 19 nt, Artificial Sequence
  Description of Artificial Sequence: Synthetic oligonucleotide
uugacuugguccauaagau

SEQ ID NO: 2482719 - RNA, 19 nt, Artificial Sequence
  Description of Artificial Sequence: Synthetic oligonucleotide
acuggaagauagucuuucc

SEQ ID NO: 2482720 - RNA, 19 nt, Artificial Sequence
  Description of Artificial Sequence: Synthetic oligonucleotide
uccgcuguccaacuggaag

SEQ ID NO: 2482721 - RNA, 19 nt, Artificial Sequence
  Description of Artificial Sequence: Synthetic oligonucleotide
aaacucuuuaacugcacuu

SEQ ID NO: 2482722 - RNA, 19 nt, Artificial Sequence
  Description of Artificial Sequence: Synthetic oligonucleotide
ugaaacgagucccaggcau

SEQ ID NO: 2482723 - RNA, 19 nt, Artificial Sequence
  Description of Artificial Sequence: Synthetic oligonucleotide
aagaauuuucuuugugaau

SEQ ID NO: 2482724 - RNA, 19 nt, Artificial Sequence
  Description of Artificial Sequence: Synthetic oligonucleotide
aaggugguggacgacccgc

SEQ ID NO: 2482725 - RNA, 19 nt, Artificial Sequence
  Description of Artificial Sequence: Synthetic oligonucleotide
guauauguuaaaucaauua

SEQ ID NO: 2482726 - RNA, 19 nt, Artificial Sequence
  Description of Artificial Sequence: Synthetic oligonucleotide
cuaacauuccgguacuuuc

SEQ ID NO: 2482727 - RNA, 19 nt, Artificial Sequence
  Description of Artificial Sequence: Synthetic oligonucleotide
ugaccuagauguacuaaca

SEQ ID NO: 2482728 - RNA, 19 nt, Artificial Sequence
  Description of Artificial Sequence: Synthetic oligonucleotide
ugacaugacgauucugcag

SEQ ID NO: 2482729 - RNA, 19 nt, Artificial Sequence
  Description of Artificial Sequence: Synthetic oligonucleotide
aacauuccgguacuuucug

SEQ ID NO: 2482730 - RNA, 19 nt, Artificial Sequence
  Description of Artificial Sequence: Synthetic oligonucleotide
aaauaguuucuggcaaauc

SEQ ID NO: 2482731 - RNA, 19 nt, Artificial Sequence
  Description of Artificial Sequence: Synthetic oligonucleotide
cugcguauauguuaaauca

SEQ ID NO: 2482732 - RNA, 19 nt, Artificial Sequence
  Description of Artificial Sequence: Synthetic oligonucleotide
cuguuuaagccaugggugc

SEQ ID NO: 2482733 - RNA, 19 nt, Artificial Sequence
  Description of Artificial Sequence: Synthetic oligonucleotide
ucucugguaaacacucuug

SEQ ID NO: 2482734 - RNA, 19 nt, Artificial Sequence
  Description of Artificial Sequence: Synthetic oligonucleotide
uuucuggcaaauccucugc

SEQ ID NO: 2482735 - RNA, 19 nt, Artificial Sequence
  Description of Artificial Sequence: Synthetic oligonucleotide
uaacauuccgguacuuucu

SEQ ID NO: 2482736 - RNA, 19 nt, Artificial Sequence
  Description of Artificial Sequence: Synthetic oligonucleotide
uucguauuucuuuugcaaa

SEQ ID NO: 2482737 - RNA, 19 nt, Artificial Sequence
  Description of Artificial Sequence: Synthetic oligonucleotide
ugcuucguauuucuuuugc

SEQ ID NO: 2482738 - RNA, 19 nt, Artificial Sequence
  Description of Artificial Sequence: Synthetic oligonucleotide
uuugcuucguauuucuuuu

SEQ ID NO: 2482739 - RNA, 19 nt, Artificial Sequence
  Description of Artificial Sequence: Synthetic oligonucleotide
uaaacacucuuguuuugug

SEQ ID NO: 2482740 - RNA, 19 nt, Artificial Sequence
  Description of Artificial Sequence: Synthetic oligonucleotide
ugcaguggacaccaauaag

SEQ ID NO: 2482741 - RNA, 19 nt, Artificial Sequence
  Description of Artificial Sequence: Synthetic oligonucleotide
uggcauaagcuuugcuucg

SEQ ID NO: 2482742 - RNA, 19 nt, Artificial Sequence
  Description of Artificial Sequence: Synthetic oligonucleotide
cugaccuagauguacuaac

SEQ ID NO: 2482743 - RNA, 19 nt, Artificial Sequence
  Description of Artificial Sequence: Synthetic oligonucleotide
ucugucuuucuaugcagug

SEQ ID NO: 2482744 - RNA, 19 nt, Artificial Sequence
  Description of Artificial Sequence: Synthetic oligonucleotide
aaguuugucauugucuuua

SEQ ID NO: 2482745 - RNA, 19 nt, Artificial Sequence
  Description of Artificial Sequence: Synthetic oligonucleotide
ugcguauauguuaaaucaa

SEQ ID NO: 2482746 - RNA, 19 nt, Artificial Sequence
  Description of Artificial Sequence: Synthetic oligonucleotide
uucugaacgacugcugugc

SEQ ID NO: 2482747 - RNA, 19 nt, Artificial Sequence
  Description of Artificial Sequence: Synthetic oligonucleotide
caaugaaacgagucccagg

SEQ ID NO: 2482748 - RNA, 19 nt, Artificial Sequence
  Description of Artificial Sequence: Synthetic oligonucleotide
uauaauagcgcugcguaua

SEQ ID NO: 2482749 - RNA, 19 nt, Artificial Sequence
  Description of Artificial Sequence: Synthetic oligonucleotide
ugguccauaagaugugcug

SEQ ID NO: 2482750 - RNA, 19 nt, Artificial Sequence
  Description of Artificial Sequence: Synthetic oligonucleotide
guaugaaaaugccgggaag

SEQ ID NO: 2482751 - RNA, 19 nt, Artificial Sequence
  Description of Artificial Sequence: Synthetic oligonucleotide
uguuccgagguccuuggcu

SEQ ID NO: 2482752 - RNA, 19 nt, Artificial Sequence
  Description of Artificial Sequence: Synthetic oligonucleotide
ugaaagcaaugaaacgagu

SEQ ID NO: 2482753 - RNA, 19 nt, Artificial Sequence
  Description of Artificial Sequence: Synthetic oligonucleotide
ugguaaacacucuuguuuu

SEQ ID NO: 2482754 - RNA, 19 nt, Artificial Sequence
  Description of Artificial Sequence: Synthetic oligonucleotide
aaaagauccaaaggagaaa

SEQ ID NO: 2482755 - RNA, 19 nt, Artificial Sequence
  Description of Artificial Sequence: Synthetic oligonucleotide
uugugaaaauuuucugaac

SEQ ID NO: 2482756 - RNA, 19 nt, Artificial Sequence
  Description of Artificial Sequence: Synthetic oligonucleotide
ugguggacgacccgcaggc

SEQ ID NO: 2482757 - RNA, 19 nt, Artificial Sequence
  Description of Artificial Sequence: Synthetic oligonucleotide
ucuuucuaugcagugcccc

SEQ ID NO: 2482758 - RNA, 19 nt, Artificial Sequence
  Description of Artificial Sequence: Synthetic oligonucleotide
ugacuugguccauaagaug

SEQ ID NO: 2482759 - RNA, 19 nt, Artificial Sequence
  Description of Artificial Sequence: Synthetic oligonucleotide
gagccaguccuguuuaagc

SEQ ID NO: 2482760 - RNA, 19 nt, Artificial Sequence
  Description of Artificial Sequence: Synthetic oligonucleotide
guaguucugucuuucuaug

SEQ ID NO: 2482761 - RNA, 19 nt, Artificial Sequence
  Description of Artificial Sequence: Synthetic oligonucleotide
acgagucccaggcauccgc

SEQ ID NO: 2482762 - RNA, 19 nt, Artificial Sequence
  Description of Artificial Sequence: Synthetic oligonucleotide
acaugacgauucugcaggc

SEQ ID NO: 2482763 - RNA, 19 nt, Artificial Sequence
  Description of Artificial Sequence: Synthetic oligonucleotide
uuguuagugcuguugacuu

SEQ ID NO: 2482764 - RNA, 19 nt, Artificial Sequence
  Description of Artificial Sequence: Synthetic oligonucleotide
gugaauaguccucuccagc

SEQ ID NO: 2482765 - RNA, 19 nt, Artificial Sequence
  Description of Artificial Sequence: Synthetic oligonucleotide
uggacgacccgcaggcugg

SEQ ID NO: 2482766 - RNA, 19 nt, Artificial Sequence
  Description of Artificial Sequence: Synthetic oligonucleotide
uguuggguaccugauggcc

SEQ ID NO: 2482767 - RNA, 19 nt, Artificial Sequence
  Description of Artificial Sequence: Synthetic oligonucleotide
ugugcauucugggucuggg

SEQ ID NO: 2482768 - RNA, 19 nt, Artificial Sequence
  Description of Artificial Sequence: Synthetic oligonucleotide
ucuuugugaauaguccucu

SEQ ID NO: 2482769 - RNA, 19 nt, Artificial Sequence
  Description of Artificial Sequence: Synthetic oligonucleotide
gaccaccugaccuagaugu

SEQ ID NO: 2482770 - RNA, 19 nt, Artificial Sequence
  Description of Artificial Sequence: Synthetic oligonucleotide
agaaauaguuucuggcaaa

SEQ ID NO: 2482771 - RNA, 19 nt, Artificial Sequence
  Description of Artificial Sequence: Synthetic oligonucleotide
gaugaggccucucugguaa

SEQ ID NO: 2482772 - RNA, 19 nt, Artificial Sequence
  Description of Artificial Sequence: Synthetic oligonucleotide
gaacuuugaaagcaaugaa

SEQ ID NO: 2482773 - RNA, 19 nt, Artificial Sequence
  Description of Artificial Sequence: Synthetic oligonucleotide
gaauaguccucuccagcug

SEQ ID NO: 2482774 - RNA, 19 nt, Artificial Sequence
  Description of Artificial Sequence: Synthetic oligonucleotide
aacucuuuaacugcacuuu

SEQ ID NO: 2482775 - RNA, 19 nt, Artificial Sequence
  Description of Artificial Sequence: Synthetic oligonucleotide
auaagcuuugcuucguauu

SEQ ID NO: 2482776 - RNA, 19 nt, Artificial Sequence
  Description of Artificial Sequence: Synthetic oligonucleotide
aggccucucugguaaacac

SEQ ID NO: 2482777 - RNA, 19 nt, Artificial Sequence
  Description of Artificial Sequence: Synthetic oligonucleotide
guacuuucugacaugacga

SEQ ID NO: 2482778 - RNA, 19 nt, Artificial Sequence
  Description of Artificial Sequence: Synthetic oligonucleotide
uuuccaucuuuccgggaug

SEQ ID NO: 2482779 - RNA, 19 nt, Artificial Sequence
  Description of Artificial Sequence: Synthetic oligonucleotide
gauguacuaacauuccggu

SEQ ID NO: 2482780 - RNA, 19 nt, Artificial Sequence
  Description of Artificial Sequence: Synthetic oligonucleotide
uaccugauggccaacugua

SEQ ID NO: 2482781 - RNA, 19 nt, Artificial Sequence
  Description of Artificial Sequence: Synthetic oligonucleotide
uucaagaccaccugaccua

SEQ ID NO: 2482782 - RNA, 19 nt, Artificial Sequence
  Description of Artificial Sequence: Synthetic oligonucleotide
uuauaauagcgcugcguau

SEQ ID NO: 2482783 - RNA, 19 nt, Artificial Sequence
  Description of Artificial Sequence: Synthetic oligonucleotide
ucauuuuguucuugaauuu

SEQ ID NO: 2482784 - RNA, 19 nt, Artificial Sequence
  Description of Artificial Sequence: Synthetic oligonucleotide
cucacaggcuuguuagugc

SEQ ID NO: 2482785 - RNA, 19 nt, Artificial Sequence
  Description of Artificial Sequence: Synthetic oligonucleotide
ccuguuuaagccaugggug

SEQ ID NO: 2482786 - RNA, 19 nt, Artificial Sequence
  Description of Artificial Sequence: Synthetic oligonucleotide
guuguuccgagguccuugg

SEQ ID NO: 2482787 - RNA, 19 nt, Artificial Sequence
  Description of Artificial Sequence: Synthetic oligonucleotide
ugaaaaugccgggaaggug

SEQ ID NO: 2482788 - RNA, 19 nt, Artificial Sequence
  Description of Artificial Sequence: Synthetic oligonucleotide
gagucuucaagaccaccug

SEQ ID NO: 2482789 - RNA, 19 nt, Artificial Sequence
  Description of Artificial Sequence: Synthetic oligonucleotide
uuccgguacuuucugacau

SEQ ID NO: 2482790 - RNA, 19 nt, Artificial Sequence
  Description of Artificial Sequence: Synthetic oligonucleotide
cuuuccgggaugugguugc

SEQ ID NO: 2482791 - RNA, 19 nt, Artificial Sequence
  Description of Artificial Sequence: Synthetic oligonucleotide
gucuuuccaucuuuccggg

SEQ ID NO: 2482792 - RNA, 19 nt, Artificial Sequence
  Description of Artificial Sequence: Synthetic oligonucleotide
gaaaauuuucugaacgacu

SEQ ID NO: 2482793 - RNA, 19 nt, Artificial Sequence
  Description of Artificial Sequence: Synthetic oligonucleotide
auaguguugcuguugggua

SEQ ID NO: 2482794 - RNA, 19 nt, Artificial Sequence
  Description of Artificial Sequence: Synthetic oligonucleotide
uguugacuugguccauaag

SEQ ID NO: 2482795 - RNA, 19 nt, Artificial Sequence
  Description of Artificial Sequence: Synthetic oligonucleotide
aaacauucuucuggcauaa

SEQ ID NO: 2482796 - RNA, 19 nt, Artificial Sequence
  Description of Artificial Sequence: Synthetic oligonucleotide
ucaagaccaccugaccuag

SEQ ID NO: 2482797 - RNA, 19 nt, Artificial Sequence
  Description of Artificial Sequence: Synthetic oligonucleotide
cuucguauuucuuuugcaa

SEQ ID NO: 2482798 - RNA, 19 nt, Artificial Sequence
  Description of Artificial Sequence: Synthetic oligonucleotide
gacuugguccauaagaugu

SEQ ID NO: 2482799 - RNA, 19 nt, Artificial Sequence
  Description of Artificial Sequence: Synthetic oligonucleotide
accuagauguacuaacauu

SEQ ID NO: 2482800 - RNA, 19 nt, Artificial Sequence
  Description of Artificial Sequence: Synthetic oligonucleotide
ucaugagccaguccuguuu

SEQ ID NO: 2482801 - RNA, 19 nt, Artificial Sequence
  Description of Artificial Sequence: Synthetic oligonucleotide
uugguccauaagaugugcu

SEQ ID NO: 2482802 - RNA, 19 nt, Artificial Sequence
  Description of Artificial Sequence: Synthetic oligonucleotide
auaauagcgcugcguauau

SEQ ID NO: 2482803 - RNA, 19 nt, Artificial Sequence
  Description of Artificial Sequence: Synthetic oligonucleotide
cauucuucuggcauaagcu

SEQ ID NO: 2482804 - RNA, 19 nt, Artificial Sequence
  Description of Artificial Sequence: Synthetic oligonucleotide
uucuggcaaauccucugcu

SEQ ID NO: 2482805 - RNA, 19 nt, Artificial Sequence
  Description of Artificial Sequence: Synthetic oligonucleotide
ugauggccaacuguaagaa

SEQ ID NO: 2482806 - RNA, 19 nt, Artificial Sequence
  Description of Artificial Sequence: Synthetic oligonucleotide
ucugguaaacacucuuguu

SEQ ID NO: 2482807 - RNA, 19 nt, Artificial Sequence
  Description of Artificial Sequence: Synthetic oligonucleotide
ugaacgacugcugugcauu

SEQ ID NO: 2482808 - RNA, 19 nt, Artificial Sequence
  Description of Artificial Sequence: Synthetic oligonucleotide
auaagaugugcugagucuu

SEQ ID NO: 2482809 - RNA, 19 nt, Artificial Sequence
  Description of Artificial Sequence: Synthetic oligonucleotide
uggacaccaauaaguuugu

SEQ ID NO: 2482810 - RNA, 19 nt, Artificial Sequence
  Description of Artificial Sequence: Synthetic oligonucleotide
cuugguccauaagaugugc

SEQ ID NO: 2482811 - RNA, 19 nt, Artificial Sequence
  Description of Artificial Sequence: Synthetic oligonucleotide
ucugggucuggguaugaaa

SEQ ID NO: 2482812 - RNA, 19 nt, Artificial Sequence
  Description of Artificial Sequence: Synthetic oligonucleotide
ucuuuccgggaugugguug

SEQ ID NO: 2482813 - RNA, 19 nt, Artificial Sequence
  Description of Artificial Sequence: Synthetic oligonucleotide
gaaggugguggacgacccg

SEQ ID NO: 2482814 - RNA, 19 nt, Artificial Sequence
  Description of Artificial Sequence: Synthetic oligonucleotide
aagaugugcugagucuuca

SEQ ID NO: 2482815 - RNA, 19 nt, Artificial Sequence
  Description of Artificial Sequence: Synthetic oligonucleotide
aggaacuuugaaagcaaug

SEQ ID NO: 2482816 - RNA, 19 nt, Artificial Sequence
  Description of Artificial Sequence: Synthetic oligonucleotide
ggaagauagucuuuccauc

SEQ ID NO: 2482817 - RNA, 19 nt, Artificial Sequence
  Description of Artificial Sequence: Synthetic oligonucleotide
augaaaaugccgggaaggu

SEQ ID NO: 2482818 - RNA, 19 nt, Artificial Sequence
  Description of Artificial Sequence: Synthetic oligonucleotide
aucaauccaagcucuucau

SEQ ID NO: 2482819 - RNA, 19 nt, Artificial Sequence
  Description of Artificial Sequence: Synthetic oligonucleotide
gcaaaggaacuuugaaagc

SEQ ID NO: 2482820 - RNA, 19 nt, Artificial Sequence
  Description of Artificial Sequence: Synthetic oligonucleotide
gcugcguauauguuaaauc

SEQ ID NO: 2482821 - RNA, 19 nt, Artificial Sequence
  Description of Artificial Sequence: Synthetic oligonucleotide
uugcuucguauuucuuuug

SEQ ID NO: 2482822 - RNA, 19 nt, Artificial Sequence
  Description of Artificial Sequence: Synthetic oligonucleotide
uucuuuugcaaaggaacuu

SEQ ID NO: 2482823 - RNA, 19 nt, Artificial Sequence
  Description of Artificial Sequence: Synthetic oligonucleotide
caccuguugaauaauucaa

SEQ ID NO: 2482824 - RNA, 19 nt, Artificial Sequence
  Description of Artificial Sequence: Synthetic oligonucleotide
aguggacaccaauaaguuu

SEQ ID NO: 2482825 - RNA, 19 nt, Artificial Sequence
  Description of Artificial Sequence: Synthetic oligonucleotide
gguaugaaaaugccgggaa

SEQ ID NO: 2482826 - RNA, 19 nt, Artificial Sequence
  Description of Artificial Sequence: Synthetic oligonucleotide
acucuuuaacugcacuuuu

SEQ ID NO: 2482827 - RNA, 19 nt, Artificial Sequence
  Description of Artificial Sequence: Synthetic oligonucleotide
ccucugcuuuauaauagcg

SEQ ID NO: 2482828 - RNA, 19 nt, Artificial Sequence
  Description of Artificial Sequence: Synthetic oligonucleotide
caauguaguucugucuuuc

SEQ ID NO: 2482829 - RNA, 19 nt, Artificial Sequence
  Description of Artificial Sequence: Synthetic oligonucleotide
uccgguacuuucugacaug

SEQ ID NO: 2482830 - RNA, 19 nt, Artificial Sequence
  Description of Artificial Sequence: Synthetic oligonucleotide
uuggguaccugauggccaa

SEQ ID NO: 2482831 - RNA, 19 nt, Artificial Sequence
  Description of Artificial Sequence: Synthetic oligonucleotide
ucuggcaaauccucugcuu

SEQ ID NO: 2482832 - RNA, 19 nt, Artificial Sequence
  Description of Artificial Sequence: Synthetic oligonucleotide
cauaagaugugcugagucu

SEQ ID NO: 2482833 - RNA, 19 nt, Artificial Sequence
  Description of Artificial Sequence: Synthetic oligonucleotide
gugguggacgacccgcagg

SEQ ID NO: 2482834 - RNA, 19 nt, Artificial Sequence
  Description of Artificial Sequence: Synthetic oligonucleotide
ggucuggguaugaaaaugc

SEQ ID NO: 2482835 - RNA, 19 nt, Artificial Sequence
  Description of Artificial Sequence: Synthetic oligonucleotide
cuucaagaccaccugaccu

SEQ ID NO: 2482836 - RNA, 19 nt, Artificial Sequence
  Description of Artificial Sequence: Synthetic oligonucleotide
gguaaacacucuuguuuug

SEQ ID NO: 2482837 - RNA, 19 nt, Artificial Sequence
  Description of Artificial Sequence: Synthetic oligonucleotide
uagcgcugcguauauguua

SEQ ID NO: 2482838 - RNA, 19 nt, Artificial Sequence
  Description of Artificial Sequence: Synthetic oligonucleotide
cuuugugaauaguccucuc

SEQ ID NO: 2482839 - RNA, 19 nt, Artificial Sequence
  Description of Artificial Sequence: Synthetic oligonucleotide
agaccaccugaccuagaug

SEQ ID NO: 2482840 - RNA, 19 nt, Artificial Sequence
  Description of Artificial Sequence: Synthetic oligonucleotide
gcaccuguugaauaauuca

SEQ ID NO: 2482841 - RNA, 19 nt, Artificial Sequence
  Description of Artificial Sequence: Synthetic oligonucleotide
uccauaagaugugcugagu

SEQ ID NO: 2482842 - RNA, 19 nt, Artificial Sequence
  Description of Artificial Sequence: Synthetic oligonucleotide
aacgagucccaggcauccg

SEQ ID NO: 2482843 - RNA, 19 nt, Artificial Sequence
  Description of Artificial Sequence: Synthetic oligonucleotide
acgacccgcaggcugguug

SEQ ID NO: 2482844 - RNA, 19 nt, Artificial Sequence
  Description of Artificial Sequence: Synthetic oligonucleotide
augaaacgagucccaggca

SEQ ID NO: 2482845 - RNA, 19 nt, Artificial Sequence
  Description of Artificial Sequence: Synthetic oligonucleotide
aaaaugccgggaagguggu

SEQ ID NO: 2482846 - RNA, 19 nt, Artificial Sequence
  Description of Artificial Sequence: Synthetic oligonucleotide
cugacaugacgauucugca

SEQ ID NO: 2482847 - RNA, 19 nt, Artificial Sequence
  Description of Artificial Sequence: Synthetic oligonucleotide
guggacgacccgcaggcug

SEQ ID NO: 2482848 - RNA, 19 nt, Artificial Sequence
  Description of Artificial Sequence: Synthetic oligonucleotide
ccauaagaugugcugaguc

SEQ ID NO: 2482849 - RNA, 19 nt, Artificial Sequence
  Description of Artificial Sequence: Synthetic oligonucleotide
uuuaagccaugggugcagu

SEQ ID NO: 2482850 - RNA, 19 nt, Artificial Sequence
  Description of Artificial Sequence: Synthetic oligonucleotide
acauuccgguacuuucuga

SEQ ID NO: 2482851 - RNA, 19 nt, Artificial Sequence
  Description of Artificial Sequence: Synthetic oligonucleotide
acuugguccauaagaugug

SEQ ID NO: 2482852 - RNA, 19 nt, Artificial Sequence
  Description of Artificial Sequence: Synthetic oligonucleotide
acuaacauuccgguacuuu

SEQ ID NO: 2482853 - RNA, 19 nt, Artificial Sequence
  Description of Artificial Sequence: Synthetic oligonucleotide
agcaaugaaacgaguccca

SEQ ID NO: 2482854 - RNA, 19 nt, Artificial Sequence
  Description of Artificial Sequence: Synthetic oligonucleotide
uuccaucuuuccgggaugu

SEQ ID NO: 2482855 - RNA, 19 nt, Artificial Sequence
  Description of Artificial Sequence: Synthetic oligonucleotide
auguacuaacauuccggua

SEQ ID NO: 2482856 - RNA, 19 nt, Artificial Sequence
  Description of Artificial Sequence: Synthetic oligonucleotide
gaaacgagucccaggcauc

SEQ ID NO: 2482857 - RNA, 19 nt, Artificial Sequence
  Description of Artificial Sequence: Synthetic oligonucleotide
gcuuuauaauagcgcugcg

SEQ ID NO: 2482858 - RNA, 19 nt, Artificial Sequence
  Description of Artificial Sequence: Synthetic oligonucleotide
gcugguuguuccgaggucc

SEQ ID NO: 2482859 - RNA, 19 nt, Artificial Sequence
  Description of Artificial Sequence: Synthetic oligonucleotide
aacgacugcugugcauucu

SEQ ID NO: 2482860 - RNA, 19 nt, Artificial Sequence
  Description of Artificial Sequence: Synthetic oligonucleotide
gaacgacugcugugcauuc

SEQ ID NO: 2482861 - RNA, 19 nt, Artificial Sequence
  Description of Artificial Sequence: Synthetic oligonucleotide
gugcaguggacaccaauaa

SEQ ID NO: 2482862 - RNA, 19 nt, Artificial Sequence
  Description of Artificial Sequence: Synthetic oligonucleotide
cuuuauaauagcgcugcgu

SEQ ID NO: 2482863 - RNA, 19 nt, Artificial Sequence
  Description of Artificial Sequence: Synthetic oligonucleotide
cuuguuagugcuguugacu

SEQ ID NO: 2482864 - RNA, 19 nt, Artificial Sequence
  Description of Artificial Sequence: Synthetic oligonucleotide
agcgcugcguauauguuaa

SEQ ID NO: 2482865 - RNA, 19 nt, Artificial Sequence
  Description of Artificial Sequence: Synthetic oligonucleotide
uuguuccgagguccuuggc

SEQ ID NO: 2482866 - RNA, 19 nt, Artificial Sequence
  Description of Artificial Sequence: Synthetic oligonucleotide
uaauagcgcugcguauaug

SEQ ID NO: 2482867 - RNA, 19 nt, Artificial Sequence
  Description of Artificial Sequence: Synthetic oligonucleotide
guuggguaccugauggcca

SEQ ID NO: 2482868 - RNA, 19 nt, Artificial Sequence
  Description of Artificial Sequence: Synthetic oligonucleotide
caugggugcaguggacacc

SEQ ID NO: 2482869 - RNA, 19 nt, Artificial Sequence
  Description of Artificial Sequence: Synthetic oligonucleotide
caggcauccgcuguccaac

SEQ ID NO: 2482870 - RNA, 19 nt, Artificial Sequence
  Description of Artificial Sequence: Synthetic oligonucleotide
guaccugauggccaacugu

SEQ ID NO: 2482871 - RNA, 19 nt, Artificial Sequence
  Description of Artificial Sequence: Synthetic oligonucleotide
gguaccugauggccaacug

SEQ ID NO: 2482872 - RNA, 19 nt, Artificial Sequence
  Description of Artificial Sequence: Synthetic oligonucleotide
gcaaugaaacgagucccag

SEQ ID NO: 2482873 - RNA, 19 nt, Artificial Sequence
  Description of Artificial Sequence: Synthetic oligonucleotide
cuuuccaucuuuccgggau

SEQ ID NO: 2482874 - RNA, 19 nt, Artificial Sequence
  Description of Artificial Sequence: Synthetic oligonucleotide
cucugguaaacacucuugu

SEQ ID NO: 2482875 - RNA, 19 nt, Artificial Sequence
  Description of Artificial Sequence: Synthetic oligonucleotide
gacgauucugcaggcuuuc

SEQ ID NO: 2482876 - RNA, 19 nt, Artificial Sequence
  Description of Artificial Sequence: Synthetic oligonucleotide
gcaguggacaccaauaagu

SEQ ID NO: 2482877 - RNA, 19 nt, Artificial Sequence
  Description of Artificial Sequence: Synthetic oligonucleotide
ugaggccucucugguaaac

SEQ ID NO: 2482878 - RNA, 19 nt, Artificial Sequence
  Description of Artificial Sequence: Synthetic oligonucleotide
gcuucguauuucuuuugca

SEQ ID NO: 2482879 - RNA, 19 nt, Artificial Sequence
  Description of Artificial Sequence: Synthetic oligonucleotide
guacuaacauuccgguacu

SEQ ID NO: 2482880 - RNA, 19 nt, Artificial Sequence
  Description of Artificial Sequence: Synthetic oligonucleotide
cacaggcuuguuagugcug

SEQ ID NO: 2482881 - RNA, 19 nt, Artificial Sequence
  Description of Artificial Sequence: Synthetic oligonucleotide
gcucacaggcuuguuagug

SEQ ID NO: 2482882 - RNA, 19 nt, Artificial Sequence
  Description of Artificial Sequence: Synthetic oligonucleotide
aaaugccgggaagguggug

SEQ ID NO: 2482883 - RNA, 19 nt, Artificial Sequence
  Description of Artificial Sequence: Synthetic oligonucleotide
auuaucaauccaagcucuu

SEQ ID NO: 2482884 - RNA, 19 nt, Artificial Sequence
  Description of Artificial Sequence: Synthetic oligonucleotide
ggccucaugagccaguccu

SEQ ID NO: 2482885 - RNA, 19 nt, Artificial Sequence
  Description of Artificial Sequence: Synthetic oligonucleotide
gucuuucuaugcagugccc

SEQ ID NO: 2482886 - RNA, 19 nt, Artificial Sequence
  Description of Artificial Sequence: Synthetic oligonucleotide
uguugcuguuggguaccug

SEQ ID NO: 2482887 - RNA, 19 nt, Artificial Sequence
  Description of Artificial Sequence: Synthetic oligonucleotide
acugcacuuuugaauuuaa

SEQ ID NO: 2482888 - RNA, 19 nt, Artificial Sequence
  Description of Artificial Sequence: Synthetic oligonucleotide
cauaagcuuugcuucguau

SEQ ID NO: 2482889 - RNA, 19 nt, Artificial Sequence
  Description of Artificial Sequence: Synthetic oligonucleotide
accugaccuagauguacua

SEQ ID NO: 2482890 - RNA, 19 nt, Artificial Sequence
  Description of Artificial Sequence: Synthetic oligonucleotide
gccaguccuguuuaagcca

SEQ ID NO: 2482891 - RNA, 19 nt, Artificial Sequence
  Description of Artificial Sequence: Synthetic oligonucleotide
ggcaccuguugaauaauuc

SEQ ID NO: 2482892 - RNA, 19 nt, Artificial Sequence
  Description of Artificial Sequence: Synthetic oligonucleotide
aucuuuccgggaugugguu

SEQ ID NO: 2482893 - RNA, 19 nt, Artificial Sequence
  Description of Artificial Sequence: Synthetic oligonucleotide
cugugcauucugggucugg

SEQ ID NO: 2482894 - RNA, 19 nt, Artificial Sequence
  Description of Artificial Sequence: Synthetic oligonucleotide
aggcauccgcuguccaacu

SEQ ID NO: 2482895 - RNA, 19 nt, Artificial Sequence
  Description of Artificial Sequence: Synthetic oligonucleotide
ggguaugaaaaugccggga

SEQ ID NO: 2482896 - RNA, 19 nt, Artificial Sequence
  Description of Artificial Sequence: Synthetic oligonucleotide
augagccaguccuguuuaa

SEQ ID NO: 2482897 - RNA, 19 nt, Artificial Sequence
  Description of Artificial Sequence: Synthetic oligonucleotide
gcaggcugguuguuccgag

SEQ ID NO: 2482898 - RNA, 19 nt, Artificial Sequence
  Description of Artificial Sequence: Synthetic oligonucleotide
uaguccucuccagcuggac

SEQ ID NO: 2482899 - RNA, 19 nt, Artificial Sequence
  Description of Artificial Sequence: Synthetic oligonucleotide
caguggacaccaauaaguu

SEQ ID NO: 2482900 - RNA, 19 nt, Artificial Sequence
  Description of Artificial Sequence: Synthetic oligonucleotide
cccgcaggcugguuguucc

SEQ ID NO: 2482901 - RNA, 19 nt, Artificial Sequence
  Description of Artificial Sequence: Synthetic oligonucleotide
caguccuguuuaagccaug

SEQ ID NO: 2482902 - RNA, 19 nt, Artificial Sequence
  Description of Artificial Sequence: Synthetic oligonucleotide
acccgcaggcugguuguuc

SEQ ID NO: 2482903 - RNA, 19 nt, Artificial Sequence
  Description of Artificial Sequence: Synthetic oligonucleotide
uacuaacauuccgguacuu

SEQ ID NO: 2482904 - RNA, 19 nt, Artificial Sequence
  Description of Artificial Sequence: Synthetic oligonucleotide
auaguccucuccagcugga

SEQ ID NO: 2482905 - RNA, 19 nt, Artificial Sequence
  Description of Artificial Sequence: Synthetic oligonucleotide
uccgagguccuuggcucac

SEQ ID NO: 2482906 - RNA, 19 nt, Artificial Sequence
  Description of Artificial Sequence: Synthetic oligonucleotide
cuggccucaugagccaguc

SEQ ID NO: 2482907 - RNA, 19 nt, Artificial Sequence
  Description of Artificial Sequence: Synthetic oligonucleotide
uuuccgggaugugguugcu

SEQ ID NO: 2482908 - RNA, 19 nt, Artificial Sequence
  Description of Artificial Sequence: Synthetic oligonucleotide
ccaccugaccuagauguac

SEQ ID NO: 2482909 - RNA, 19 nt, Artificial Sequence
  Description of Artificial Sequence: Synthetic oligonucleotide
auagcgcugcguauauguu

SEQ ID NO: 2482910 - RNA, 19 nt, Artificial Sequence
  Description of Artificial Sequence: Synthetic oligonucleotide
caccugaccuagauguacu

SEQ ID NO: 2482911 - RNA, 19 nt, Artificial Sequence
  Description of Artificial Sequence: Synthetic oligonucleotide
ccgcuguccaacuggaaga

SEQ ID NO: 2482912 - RNA, 19 nt, Artificial Sequence
  Description of Artificial Sequence: Synthetic oligonucleotide
ccuguugaauaauucaauu

SEQ ID NO: 2482913 - RNA, 19 nt, Artificial Sequence
  Description of Artificial Sequence: Synthetic oligonucleotide
gcguauauguuaaaucaau

SEQ ID NO: 2482914 - RNA, 19 nt, Artificial Sequence
  Description of Artificial Sequence: Synthetic oligonucleotide
ggcauccgcuguccaacug

SEQ ID NO: 2482915 - RNA, 19 nt, Artificial Sequence
  Description of Artificial Sequence: Synthetic oligonucleotide
ggaccaggaggagggauga

SEQ ID NO: 2482916 - RNA, 19 nt, Artificial Sequence
  Description of Artificial Sequence: Synthetic oligonucleotide
gggaugaggccucucuggu

SEQ ID NO: 2482917 - RNA, 19 nt, Artificial Sequence
  Description of Artificial Sequence: Synthetic oligonucleotide
uggguaccugauggccaac

SEQ ID NO: 2482918 - RNA, 19 nt, Artificial Sequence
  Description of Artificial Sequence: Synthetic oligonucleotide
cugguuguuccgagguccu

SEQ ID NO: 2482919 - RNA, 19 nt, Artificial Sequence
  Description of Artificial Sequence: Synthetic oligonucleotide
ggcugguuguuccgagguc

SEQ ID NO: 2482920 - RNA, 19 nt, Artificial Sequence
  Description of Artificial Sequence: Synthetic oligonucleotide
ugccgggaaggugguggac

SEQ ID NO: 2482921 - RNA, 19 nt, Artificial Sequence
  Description of Artificial Sequence: Synthetic oligonucleotide
cgggaugugguugcugacc

SEQ ID NO: 2482922 - RNA, 19 nt, Artificial Sequence
  Description of Artificial Sequence: Synthetic oligonucleotide
gcauaagcuuugcuucgua

SEQ ID NO: 2482923 - RNA, 19 nt, Artificial Sequence
  Description of Artificial Sequence: Synthetic oligonucleotide
ccagaagaauuuucuuugu

SEQ ID NO: 2482924 - RNA, 19 nt, Artificial Sequence
  Description of Artificial Sequence: Synthetic oligonucleotide
ugguuguuccgagguccuu

SEQ ID NO: 2482925 - RNA, 19 nt, Artificial Sequence
  Description of Artificial Sequence: Synthetic oligonucleotide
cugaacgacugcugugcau

SEQ ID NO: 2482926 - RNA, 19 nt, Artificial Sequence
  Description of Artificial Sequence: Synthetic oligonucleotide
ccgguacuuucugacauga

SEQ ID NO: 2482927 - RNA, 19 nt, Artificial Sequence
  Description of Artificial Sequence: Synthetic oligonucleotide
gcugagucuucaagaccac

SEQ ID NO: 2482928 - RNA, 19 nt, Artificial Sequence
  Description of Artificial Sequence: Synthetic oligonucleotide
ggcuuucaauguaguucug

SEQ ID NO: 2482929 - RNA, 19 nt, Artificial Sequence
  Description of Artificial Sequence: Synthetic oligonucleotide
caugacgauucugcaggcu

SEQ ID NO: 2482930 - RNA, 19 nt, Artificial Sequence
  Description of Artificial Sequence: Synthetic oligonucleotide
cguauauguuaaaucaauu

SEQ ID NO: 2482931 - RNA, 19 nt, Artificial Sequence
  Description of Artificial Sequence: Synthetic oligonucleotide
gcaaauccucugcuuuaua

SEQ ID NO: 2482932 - RNA, 19 nt, Artificial Sequence
  Description of Artificial Sequence: Synthetic oligonucleotide
ccgcaggcugguuguuccg

SEQ ID NO: 2482933 - RNA, 19 nt, Artificial Sequence
  Description of Artificial Sequence: Synthetic oligonucleotide
cccggcaccuguugaauaa

SEQ ID NO: 2482934 - RNA, 19 nt, Artificial Sequence
  Description of Artificial Sequence: Synthetic oligonucleotide
ggacaccaauaaguuuguc

SEQ ID NO: 2482935 - RNA, 19 nt, Artificial Sequence
  Description of Artificial Sequence: Synthetic oligonucleotide
ccgggaugugguugcugac

SEQ ID NO: 2482936 - RNA, 19 nt, Artificial Sequence
  Description of Artificial Sequence: Synthetic oligonucleotide
ccugaccuagauguacuaa

SEQ ID NO: 2482937 - RNA, 19 nt, Artificial Sequence
  Description of Artificial Sequence: Synthetic oligonucleotide
ccgggaaggugguggacga

SEQ ID NO: 2482938 - RNA, 19 nt, Artificial Sequence
  Description of Artificial Sequence: Synthetic oligonucleotide
gcuguugacuugguccaua

SEQ ID NO: 2482939 - RNA, 19 nt, Artificial Sequence
  Description of Artificial Sequence: Synthetic oligonucleotide
uugcaucaucuggccucau

SEQ ID NO: 2482940 - RNA, 19 nt, Artificial Sequence
  Description of Artificial Sequence: Synthetic oligonucleotide
ggcucacaggcuuguuagu

SEQ ID NO: 2482941 - RNA, 19 nt, Artificial Sequence
  Description of Artificial Sequence: Synthetic oligonucleotide
gcuguccaacuggaagaua

SEQ ID NO: 2482942 - RNA, 19 nt, Artificial Sequence
  Description of Artificial Sequence: Synthetic oligonucleotide
gcgcugcguauauguuaaa

SEQ ID NO: 2482943 - RNA, 19 nt, Artificial Sequence
  Description of Artificial Sequence: Synthetic oligonucleotide
ccccggcaccuguugaaua

SEQ ID NO: 2482944 - RNA, 19 nt, Artificial Sequence
  Description of Artificial Sequence: Synthetic oligonucleotide
cgagucccaggcauccgcu

SEQ ID NO: 2482945 - RNA, 19 nt, Artificial Sequence
  Description of Artificial Sequence: Synthetic oligonucleotide
gguggacgacccgcaggcu

SEQ ID NO: 2482946 - RNA, 19 nt, Artificial Sequence
  Description of Artificial Sequence: Synthetic oligonucleotide
cgcugcguauauguuaaau

SEQ ID NO: 2482947 - RNA, 19 nt, Artificial Sequence
  Description of Artificial Sequence: Synthetic oligonucleotide
cgcaggcugguuguuccga

SEQ ID NO: 2482948 - RNA, 19 nt, Artificial Sequence
  Description of Artificial Sequence: Synthetic oligonucleotide
cgacccgcaggcugguugu

SEQ ID NO: 2482949 - RNA, 19 nt, Artificial Sequence
  Description of Artificial Sequence: Synthetic oligonucleotide
gacccgcaggcugguuguu

SEQ ID NO: 2482950 - RNA, 19 nt, Artificial Sequence
  Description of Artificial Sequence: Synthetic oligonucleotide
gacgacccgcaggcugguu

SEQ ID NO: 2482951 - RNA, 19 nt, Artificial Sequence
  Description of Artificial Sequence: Synthetic oligonucleotide
ccgagguccuuggcucaca

SEQ ID NO: 2482952 - RNA, 19 nt, Artificial Sequence
  Description of Artificial Sequence: Synthetic oligonucleotide
ggacgacccgcaggcuggu

SEQ ID NO: 2482953 - RNA, 19 nt, Artificial Sequence
  Description of Artificial Sequence: Synthetic oligonucleotide
uaaacaaucccaauuagca

SEQ ID NO: 2482954 - RNA, 19 nt, Artificial Sequence
  Description of Artificial Sequence: Synthetic oligonucleotide
aaagaaagggcuuugggca

SEQ ID NO: 2482955 - RNA, 19 nt, Artificial Sequence
  Description of Artificial Sequence: Synthetic oligonucleotide
aacacaucuuaccauggcc

SEQ ID NO: 2482956 - RNA, 19 nt, Artificial Sequence
  Description of Artificial Sequence: Synthetic oligonucleotide
aaauaaaugggcgugcuuc

SEQ ID NO: 2482957 - RNA, 19 nt, Artificial Sequence
  Description of Artificial Sequence: Synthetic oligonucleotide
gauacaaggucuuacgugc

SEQ ID NO: 2482958 - RNA, 19 nt, Artificial Sequence
  Description of Artificial Sequence: Synthetic oligonucleotide
aauaaacaaucccaauuag

SEQ ID NO: 2482959 - RNA, 19 nt, Artificial Sequence
  Description of Artificial Sequence: Synthetic oligonucleotide
ucaugaauucuccucaggg

SEQ ID NO: 2482960 - RNA, 19 nt, Artificial Sequence
  Description of Artificial Sequence: Synthetic oligonucleotide
aacaagggugaucacuucc

SEQ ID NO: 2482961 - RNA, 19 nt, Artificial Sequence
  Description of Artificial Sequence: Synthetic oligonucleotide
uuugauacaaggucuuacg

SEQ ID NO: 2482962 - RNA, 19 nt, Artificial Sequence
  Description of Artificial Sequence: Synthetic oligonucleotide
uuaauuacauuaguuacag

SEQ ID NO: 2482963 - RNA, 19 nt, Artificial Sequence
  Description of Artificial Sequence: Synthetic oligonucleotide
auugcauucucccagagca

SEQ ID NO: 2482964 - RNA, 19 nt, Artificial Sequence
  Description of Artificial Sequence: Synthetic oligonucleotide
uugucgaucagcauggcag

SEQ ID NO: 2482965 - RNA, 19 nt, Artificial Sequence
  Description of Artificial Sequence: Synthetic oligonucleotide
aaaugggcaauaaacaauc

SEQ ID NO: 2482966 - RNA, 19 nt, Artificial Sequence
  Description of Artificial Sequence: Synthetic oligonucleotide
ucauugucgaucagcaugg

SEQ ID NO: 2482967 - RNA, 19 nt, Artificial Sequence
  Description of Artificial Sequence: Synthetic oligonucleotide
aauugcauucucccagagc

SEQ ID NO: 2482968 - RNA, 19 nt, Artificial Sequence
  Description of Artificial Sequence: Synthetic oligonucleotide
auuaucagcacuuggucuc

SEQ ID NO: 2482969 - RNA, 19 nt, Artificial Sequence
  Description of Artificial Sequence: Synthetic oligonucleotide
ucuuaguaccccuaaagug

SEQ ID NO: 2482970 - RNA, 19 nt, Artificial Sequence
  Description of Artificial Sequence: Synthetic oligonucleotide
aacaaucccaauuagcaaa

SEQ ID NO: 2482971 - RNA, 19 nt, Artificial Sequence
  Description of Artificial Sequence: Synthetic oligonucleotide
acaaauugcauucucccag

SEQ ID NO: 2482972 - RNA, 19 nt, Artificial Sequence
  Description of Artificial Sequence: Synthetic oligonucleotide
aggguaacaaauugcauuc

SEQ ID NO: 2482973 - RNA, 19 nt, Artificial Sequence
  Description of Artificial Sequence: Synthetic oligonucleotide
ugggcaauaaacaauccca

SEQ ID NO: 2482974 - RNA, 19 nt, Artificial Sequence
  Description of Artificial Sequence: Synthetic oligonucleotide
ugaucacuucccaagaaag

SEQ ID NO: 2482975 - RNA, 19 nt, Artificial Sequence
  Description of Artificial Sequence: Synthetic oligonucleotide
uaacaaauugcauucuccc

SEQ ID NO: 2482976 - RNA, 19 nt, Artificial Sequence
  Description of Artificial Sequence: Synthetic oligonucleotide
augggcaauaaacaauccc

SEQ ID NO: 2482977 - RNA, 19 nt, Artificial Sequence
  Description of Artificial Sequence: Synthetic oligonucleotide
ucucuuaguaccccuaaag

SEQ ID NO: 2482978 - RNA, 19 nt, Artificial Sequence
  Description of Artificial Sequence: Synthetic oligonucleotide
ucccaauuagcaaagaauc

SEQ ID NO: 2482979 - RNA, 19 nt, Artificial Sequence
  Description of Artificial Sequence: Synthetic oligonucleotide
auaaacaaucccaauuagc

SEQ ID NO: 2482980 - RNA, 19 nt, Artificial Sequence
  Description of Artificial Sequence: Synthetic oligonucleotide
aaucagccugucuccaucc

SEQ ID NO: 2482981 - RNA, 19 nt, Artificial Sequence
  Description of Artificial Sequence: Synthetic oligonucleotide
uugggagagaaccugagcu

SEQ ID NO: 2482982 - RNA, 19 nt, Artificial Sequence
  Description of Artificial Sequence: Synthetic oligonucleotide
cuuucuaauagaaacaaaa

SEQ ID NO: 2482983 - RNA, 19 nt, Artificial Sequence
  Description of Artificial Sequence: Synthetic oligonucleotide
acagaaucagccugucucc

SEQ ID NO: 2482984 - RNA, 19 nt, Artificial Sequence
  Description of Artificial Sequence: Synthetic oligonucleotide
cuucccaagaaagaaaggg

SEQ ID NO: 2482985 - RNA, 19 nt, Artificial Sequence
  Description of Artificial Sequence: Synthetic oligonucleotide
agaaagaaagggcuuuggg

SEQ ID NO: 2482986 - RNA, 19 nt, Artificial Sequence
  Description of Artificial Sequence: Synthetic oligonucleotide
ugugauuccucuccacugg

SEQ ID NO: 2482987 - RNA, 19 nt, Artificial Sequence
  Description of Artificial Sequence: Synthetic oligonucleotide
gcugauuuuguuuugauac

SEQ ID NO: 2482988 - RNA, 19 nt, Artificial Sequence
  Description of Artificial Sequence: Synthetic oligonucleotide
uuuuagucauugucgauca

SEQ ID NO: 2482989 - RNA, 19 nt, Artificial Sequence
  Description of Artificial Sequence: Synthetic oligonucleotide
ugauacaaggucuuacgug

SEQ ID NO: 2482990 - RNA, 19 nt, Artificial Sequence
  Description of Artificial Sequence: Synthetic oligonucleotide
uggauuaucagcacuuggu

SEQ ID NO: 2482991 - RNA, 19 nt, Artificial Sequence
  Description of Artificial Sequence: Synthetic oligonucleotide
agccaaaugggcaauaaac

SEQ ID NO: 2482992 - RNA, 19 nt, Artificial Sequence
  Description of Artificial Sequence: Synthetic oligonucleotide
aacaaauugcauucuccca

SEQ ID NO: 2482993 - RNA, 19 nt, Artificial Sequence
  Description of Artificial Sequence: Synthetic oligonucleotide
uuaguuacagaaucagccu

SEQ ID NO: 2482994 - RNA, 19 nt, Artificial Sequence
  Description of Artificial Sequence: Synthetic oligonucleotide
ugaacuugcaguucccagc

SEQ ID NO: 2482995 - RNA, 19 nt, Artificial Sequence
  Description of Artificial Sequence: Synthetic oligonucleotide
uggaauuacagguggacgu

SEQ ID NO: 2482996 - RNA, 19 nt, Artificial Sequence
  Description of Artificial Sequence: Synthetic oligonucleotide
ucccaagaaagaaagggcu

SEQ ID NO: 2482997 - RNA, 19 nt, Artificial Sequence
  Description of Artificial Sequence: Synthetic oligonucleotide
uaguuacagaaucagccug

SEQ ID NO: 2482998 - RNA, 19 nt, Artificial Sequence
  Description of Artificial Sequence: Synthetic oligonucleotide
aggucuuacgugcacagag

SEQ ID NO: 2482999 - RNA, 19 nt, Artificial Sequence
  Description of Artificial Sequence: Synthetic oligonucleotide
ugaauggauuaucagcacu

SEQ ID NO: 2483000 - RNA, 19 nt, Artificial Sequence
  Description of Artificial Sequence: Synthetic oligonucleotide
cuuaauuacauuaguuaca

SEQ ID NO: 2483001 - RNA, 19 nt, Artificial Sequence
  Description of Artificial Sequence: Synthetic oligonucleotide
aaucccaauuagcaaagaa

SEQ ID NO: 2483002 - RNA, 19 nt, Artificial Sequence
  Description of Artificial Sequence: Synthetic oligonucleotide
aaugggcaauaaacaaucc

SEQ ID NO: 2483003 - RNA, 19 nt, Artificial Sequence
  Description of Artificial Sequence: Synthetic oligonucleotide
uuaguaccccuaaagugug

SEQ ID NO: 2483004 - RNA, 19 nt, Artificial Sequence
  Description of Artificial Sequence: Synthetic oligonucleotide
uccucaggguaacaaauug

SEQ ID NO: 2483005 - RNA, 19 nt, Artificial Sequence
  Description of Artificial Sequence: Synthetic oligonucleotide
guagccuugggagagaacc

SEQ ID NO: 2483006 - RNA, 19 nt, Artificial Sequence
  Description of Artificial Sequence: Synthetic oligonucleotide
uugauacaaggucuuacgu

SEQ ID NO: 2483007 - RNA, 19 nt, Artificial Sequence
  Description of Artificial Sequence: Synthetic oligonucleotide
caacuuuaggcugaguggg

SEQ ID NO: 2483008 - RNA, 19 nt, Artificial Sequence
  Description of Artificial Sequence: Synthetic oligonucleotide
ucggcaacaagggugauca

SEQ ID NO: 2483009 - RNA, 19 nt, Artificial Sequence
  Description of Artificial Sequence: Synthetic oligonucleotide
ugugagaaugucagggaga

SEQ ID NO: 2483010 - RNA, 19 nt, Artificial Sequence
  Description of Artificial Sequence: Synthetic oligonucleotide
auggauuaucagcacuugg

SEQ ID NO: 2483011 - RNA, 19 nt, Artificial Sequence
  Description of Artificial Sequence: Synthetic oligonucleotide
uuacagguggacguaagcc

SEQ ID NO: 2483012 - RNA, 19 nt, Artificial Sequence
  Description of Artificial Sequence: Synthetic oligonucleotide
aaauugcauucucccagag

SEQ ID NO: 2483013 - RNA, 19 nt, Artificial Sequence
  Description of Artificial Sequence: Synthetic oligonucleotide
agggugaucacuucccaag

SEQ ID NO: 2483014 - RNA, 19 nt, Artificial Sequence
  Description of Artificial Sequence: Synthetic oligonucleotide
ucagggagacguccuaggg

SEQ ID NO: 2483015 - RNA, 19 nt, Artificial Sequence
  Description of Artificial Sequence: Synthetic oligonucleotide
cuuacgugcacagaggcug

SEQ ID NO: 2483016 - RNA, 19 nt, Artificial Sequence
  Description of Artificial Sequence: Synthetic oligonucleotide
guaacaaauugcauucucc

SEQ ID NO: 2483017 - RNA, 19 nt, Artificial Sequence
  Description of Artificial Sequence: Synthetic oligonucleotide
uuaccauggccucugugug

SEQ ID NO: 2483018 - RNA, 19 nt, Artificial Sequence
  Description of Artificial Sequence: Synthetic oligonucleotide
uacagguggacguaagcca

SEQ ID NO: 2483019 - RNA, 19 nt, Artificial Sequence
  Description of Artificial Sequence: Synthetic oligonucleotide
gcaguucccagccaaaugg

SEQ ID NO: 2483020 - RNA, 19 nt, Artificial Sequence
  Description of Artificial Sequence: Synthetic oligonucleotide
agaaaugaauggauuauca

SEQ ID NO: 2483021 - RNA, 19 nt, Artificial Sequence
  Description of Artificial Sequence: Synthetic oligonucleotide
acaagggugaucacuuccc

SEQ ID NO: 2483022 - RNA, 19 nt, Artificial Sequence
  Description of Artificial Sequence: Synthetic oligonucleotide
aucaugaauucuccucagg

SEQ ID NO: 2483023 - RNA, 19 nt, Artificial Sequence
  Description of Artificial Sequence: Synthetic oligonucleotide
aaagaaucuccauggucaa

SEQ ID NO: 2483024 - RNA, 19 nt, Artificial Sequence
  Description of Artificial Sequence: Synthetic oligonucleotide
agggagacguccuagggca

SEQ ID NO: 2483025 - RNA, 19 nt, Artificial Sequence
  Description of Artificial Sequence: Synthetic oligonucleotide
gcaacuuuaggcugagugg

SEQ ID NO: 2483026 - RNA, 19 nt, Artificial Sequence
  Description of Artificial Sequence: Synthetic oligonucleotide
gaucaugaauucuccucag

SEQ ID NO: 2483027 - RNA, 19 nt, Artificial Sequence
  Description of Artificial Sequence: Synthetic oligonucleotide
augaauucuccucagggua

SEQ ID NO: 2483028 - RNA, 19 nt, Artificial Sequence
  Description of Artificial Sequence: Synthetic oligonucleotide
ucucuaggcgucuuaauua

SEQ ID NO: 2483029 - RNA, 19 nt, Artificial Sequence
  Description of Artificial Sequence: Synthetic oligonucleotide
ugugugagaaugucaggga

SEQ ID NO: 2483030 - RNA, 19 nt, Artificial Sequence
  Description of Artificial Sequence: Synthetic oligonucleotide
ggcaacuuuaggcugagug

SEQ ID NO: 2483031 - RNA, 19 nt, Artificial Sequence
  Description of Artificial Sequence: Synthetic oligonucleotide
caauaaacaaucccaauua

SEQ ID NO: 2483032 - RNA, 19 nt, Artificial Sequence
  Description of Artificial Sequence: Synthetic oligonucleotide
uccauggucaaguggacuc

SEQ ID NO: 2483033 - RNA, 19 nt, Artificial Sequence
  Description of Artificial Sequence: Synthetic oligonucleotide
cagagcauccugaacuugc

SEQ ID NO: 2483034 - RNA, 19 nt, Artificial Sequence
  Description of Artificial Sequence: Synthetic oligonucleotide
uggacuugaacuccugauc

SEQ ID NO: 2483035 - RNA, 19 nt, Artificial Sequence
  Description of Artificial Sequence: Synthetic oligonucleotide
ggacuugaacuccugaucc

SEQ ID NO: 2483036 - RNA, 19 nt, Artificial Sequence
  Description of Artificial Sequence: Synthetic oligonucleotide
agaaucuccauggucaagu

SEQ ID NO: 2483037 - RNA, 19 nt, Artificial Sequence
  Description of Artificial Sequence: Synthetic oligonucleotide
cuuaguaccccuaaagugu

SEQ ID NO: 2483038 - RNA, 19 nt, Artificial Sequence
  Description of Artificial Sequence: Synthetic oligonucleotide
ucuuucuaauagaaacaaa

SEQ ID NO: 2483039 - RNA, 19 nt, Artificial Sequence
  Description of Artificial Sequence: Synthetic oligonucleotide
uggacguaagccaccacac

SEQ ID NO: 2483040 - RNA, 19 nt, Artificial Sequence
  Description of Artificial Sequence: Synthetic oligonucleotide
uuuaggcugaguggguggg

SEQ ID NO: 2483041 - RNA, 19 nt, Artificial Sequence
  Description of Artificial Sequence: Synthetic oligonucleotide
aaaauaaaugggcgugcuu

SEQ ID NO: 2483042 - RNA, 19 nt, Artificial Sequence
  Description of Artificial Sequence: Synthetic oligonucleotide
aauuagcaaagaaucucca

SEQ ID NO: 2483043 - RNA, 19 nt, Artificial Sequence
  Description of Artificial Sequence: Synthetic oligonucleotide
ugaauucuccucaggguaa

SEQ ID NO: 2483044 - RNA, 19 nt, Artificial Sequence
  Description of Artificial Sequence: Synthetic oligonucleotide
cuuuaggcugagugggugg

SEQ ID NO: 2483045 - RNA, 19 nt, Artificial Sequence
  Description of Artificial Sequence: Synthetic oligonucleotide
uguuuugauacaaggucuu

SEQ ID NO: 2483046 - RNA, 19 nt, Artificial Sequence
  Description of Artificial Sequence: Synthetic oligonucleotide
cugcaggagacugacaggg

SEQ ID NO: 2483047 - RNA, 19 nt, Artificial Sequence
  Description of Artificial Sequence: Synthetic oligonucleotide
uggucaaguggacucugag

SEQ ID NO: 2483048 - RNA, 19 nt, Artificial Sequence
  Description of Artificial Sequence: Synthetic oligonucleotide
gugugagaaugucagggag

SEQ ID NO: 2483049 - RNA, 19 nt, Artificial Sequence
  Description of Artificial Sequence: Synthetic oligonucleotide
aaagugugugagaauguca

SEQ ID NO: 2483050 - RNA, 19 nt, Artificial Sequence
  Description of Artificial Sequence: Synthetic oligonucleotide
acaaaagaaaugaauggau

SEQ ID NO: 2483051 - RNA, 19 nt, Artificial Sequence
  Description of Artificial Sequence: Synthetic oligonucleotide
gagaaugucagggagacgu

SEQ ID NO: 2483052 - RNA, 19 nt, Artificial Sequence
  Description of Artificial Sequence: Synthetic oligonucleotide
gucaaguggacucugagcu

SEQ ID NO: 2483053 - RNA, 19 nt, Artificial Sequence
  Description of Artificial Sequence: Synthetic oligonucleotide
ucgccugugauuccucucc

SEQ ID NO: 2483054 - RNA, 19 nt, Artificial Sequence
  Description of Artificial Sequence: Synthetic oligonucleotide
uggggaucaugaauucucc

SEQ ID NO: 2483055 - RNA, 19 nt, Artificial Sequence
  Description of Artificial Sequence: Synthetic oligonucleotide
agugugugagaaugucagg

SEQ ID NO: 2483056 - RNA, 19 nt, Artificial Sequence
  Description of Artificial Sequence: Synthetic oligonucleotide
uuacgugcacagaggcugg

SEQ ID NO: 2483057 - RNA, 19 nt, Artificial Sequence
  Description of Artificial Sequence: Synthetic oligonucleotide
uggguggggaucaugaauu

SEQ ID NO: 2483058 - RNA, 19 nt, Artificial Sequence
  Description of Artificial Sequence: Synthetic oligonucleotide
gucuuacgugcacagaggc

SEQ ID NO: 2483059 - RNA, 19 nt, Artificial Sequence
  Description of Artificial Sequence: Synthetic oligonucleotide
uaccccuaaagugugugag

SEQ ID NO: 2483060 - RNA, 19 nt, Artificial Sequence
  Description of Artificial Sequence: Synthetic oligonucleotide
cuggaauuacagguggacg

SEQ ID NO: 2483061 - RNA, 19 nt, Artificial Sequence
  Description of Artificial Sequence: Synthetic oligonucleotide
gauuaucagcacuuggucu

SEQ ID NO: 2483062 - RNA, 19 nt, Artificial Sequence
  Description of Artificial Sequence: Synthetic oligonucleotide
cucuaggcgucuuaauuac

SEQ ID NO: 2483063 - RNA, 19 nt, Artificial Sequence
  Description of Artificial Sequence: Synthetic oligonucleotide
ucacuucccaagaaagaaa

SEQ ID NO: 2483064 - RNA, 19 nt, Artificial Sequence
  Description of Artificial Sequence: Synthetic oligonucleotide
ccugcuguagccuugggag

SEQ ID NO: 2483065 - RNA, 19 nt, Artificial Sequence
  Description of Artificial Sequence: Synthetic oligonucleotide
auuacauuaguuacagaau

SEQ ID NO: 2483066 - RNA, 19 nt, Artificial Sequence
  Description of Artificial Sequence: Synthetic oligonucleotide
acaggcuaucucuaggcgu

SEQ ID NO: 2483067 - RNA, 19 nt, Artificial Sequence
  Description of Artificial Sequence: Synthetic oligonucleotide
gugugugugugugugauug

SEQ ID NO: 2483068 - RNA, 19 nt, Artificial Sequence
  Description of Artificial Sequence: Synthetic oligonucleotide
uuaucagcacuuggucucg

SEQ ID NO: 2483069 - RNA, 19 nt, Artificial Sequence
  Description of Artificial Sequence: Synthetic oligonucleotide
caaggucuuacgugcacag

SEQ ID NO: 2483070 - RNA, 19 nt, Artificial Sequence
  Description of Artificial Sequence: Synthetic oligonucleotide
aucagcacuuggucucgcc

SEQ ID NO: 2483071 - RNA, 19 nt, Artificial Sequence
  Description of Artificial Sequence: Synthetic oligonucleotide
ugugugugugugugauugg

SEQ ID NO: 2483072 - RNA, 19 nt, Artificial Sequence
  Description of Artificial Sequence: Synthetic oligonucleotide
gaaugucagggagacgucc

SEQ ID NO: 2483073 - RNA, 19 nt, Artificial Sequence
  Description of Artificial Sequence: Synthetic oligonucleotide
uuuagucauugucgaucag

SEQ ID NO: 2483074 - RNA, 19 nt, Artificial Sequence
  Description of Artificial Sequence: Synthetic oligonucleotide
cuuaccacaggcuaucucu

SEQ ID NO: 2483075 - RNA, 19 nt, Artificial Sequence
  Description of Artificial Sequence: Synthetic oligonucleotide
ugccuuucuuucuaauaga

SEQ ID NO: 2483076 - RNA, 19 nt, Artificial Sequence
  Description of Artificial Sequence: Synthetic oligonucleotide
aggcgucuuaauuacauua

SEQ ID NO: 2483077 - RNA, 19 nt, Artificial Sequence
  Description of Artificial Sequence: Synthetic oligonucleotide
aaccugagcuuuucauaug

SEQ ID NO: 2483078 - RNA, 19 nt, Artificial Sequence
  Description of Artificial Sequence: Synthetic oligonucleotide
aucacuucccaagaaagaa

SEQ ID NO: 2483079 - RNA, 19 nt, Artificial Sequence
  Description of Artificial Sequence: Synthetic oligonucleotide
cugugauuccucuccacug

SEQ ID NO: 2483080 - RNA, 19 nt, Artificial Sequence
  Description of Artificial Sequence: Synthetic oligonucleotide
agaaccugagcuuuucaua

SEQ ID NO: 2483081 - RNA, 19 nt, Artificial Sequence
  Description of Artificial Sequence: Synthetic oligonucleotide
aucucuaggcgucuuaauu

SEQ ID NO: 2483082 - RNA, 19 nt, Artificial Sequence
  Description of Artificial Sequence: Synthetic oligonucleotide
ucuuacgugcacagaggcu

SEQ ID NO: 2483083 - RNA, 19 nt, Artificial Sequence
  Description of Artificial Sequence: Synthetic oligonucleotide
accacacccuccuuaccac

SEQ ID NO: 2483084 - RNA, 19 nt, Artificial Sequence
  Description of Artificial Sequence: Synthetic oligonucleotide
ccuaaagugugugagaaug

SEQ ID NO: 2483085 - RNA, 19 nt, Artificial Sequence
  Description of Artificial Sequence: Synthetic oligonucleotide
acagguggacguaagccac

SEQ ID NO: 2483086 - RNA, 19 nt, Artificial Sequence
  Description of Artificial Sequence: Synthetic oligonucleotide
ucagcacuuggucucgccu

SEQ ID NO: 2483087 - RNA, 19 nt, Artificial Sequence
  Description of Artificial Sequence: Synthetic oligonucleotide
ugcuguagccuugggagag

SEQ ID NO: 2483088 - RNA, 19 nt, Artificial Sequence
  Description of Artificial Sequence: Synthetic oligonucleotide
ugucgaucagcauggcaga

SEQ ID NO: 2483089 - RNA, 19 nt, Artificial Sequence
  Description of Artificial Sequence: Synthetic oligonucleotide
gaaucuccauggucaagug

SEQ ID NO: 2483090 - RNA, 19 nt, Artificial Sequence
  Description of Artificial Sequence: Synthetic oligonucleotide
uuggucucgccugugauuc

SEQ ID NO: 2483091 - RNA, 19 nt, Artificial Sequence
  Description of Artificial Sequence: Synthetic oligonucleotide
acaaucccaauuagcaaag

SEQ ID NO: 2483092 - RNA, 19 nt, Artificial Sequence
  Description of Artificial Sequence: Synthetic oligonucleotide
aucagcauggcagaccaca

SEQ ID NO: 2483093 - RNA, 19 nt, Artificial Sequence
  Description of Artificial Sequence: Synthetic oligonucleotide
cagcucggcaacaagggug

SEQ ID NO: 2483094 - RNA, 19 nt, Artificial Sequence
  Description of Artificial Sequence: Synthetic oligonucleotide
cuugggagagaaccugagc

SEQ ID NO: 2483095 - RNA, 19 nt, Artificial Sequence
  Description of Artificial Sequence: Synthetic oligonucleotide
gaccacacccuccuuacca

SEQ ID NO: 2483096 - RNA, 19 nt, Artificial Sequence
  Description of Artificial Sequence: Synthetic oligonucleotide
ucuuaccauggccucugug

SEQ ID NO: 2483097 - RNA, 19 nt, Artificial Sequence
  Description of Artificial Sequence: Synthetic oligonucleotide
auugucgaucagcauggca

SEQ ID NO: 2483098 - RNA, 19 nt, Artificial Sequence
  Description of Artificial Sequence: Synthetic oligonucleotide
ugugugugugugauuggaa

SEQ ID NO: 2483099 - RNA, 19 nt, Artificial Sequence
  Description of Artificial Sequence: Synthetic oligonucleotide
ggaucaugaauucuccuca

SEQ ID NO: 2483100 - RNA, 19 nt, Artificial Sequence
  Description of Artificial Sequence: Synthetic oligonucleotide
uccugcuguagccuuggga

SEQ ID NO: 2483101 - RNA, 19 nt, Artificial Sequence
  Description of Artificial Sequence: Synthetic oligonucleotide
uacaaggucuuacgugcac

SEQ ID NO: 2483102 - RNA, 19 nt, Artificial Sequence
  Description of Artificial Sequence: Synthetic oligonucleotide
acacaucuuaccauggccu

SEQ ID NO: 2483103 - RNA, 19 nt, Artificial Sequence
  Description of Artificial Sequence: Synthetic oligonucleotide
uaauuacauuaguuacaga

SEQ ID NO: 2483104 - RNA, 19 nt, Artificial Sequence
  Description of Artificial Sequence: Synthetic oligonucleotide
gacguaagccaccacaccu

SEQ ID NO: 2483105 - RNA, 19 nt, Artificial Sequence
  Description of Artificial Sequence: Synthetic oligonucleotide
gaaucagccugucuccauc

SEQ ID NO: 2483106 - RNA, 19 nt, Artificial Sequence
  Description of Artificial Sequence: Synthetic oligonucleotide
aaugucagggagacguccu

SEQ ID NO: 2483107 - RNA, 19 nt, Artificial Sequence
  Description of Artificial Sequence: Synthetic oligonucleotide
uuacagaaucagccugucu

SEQ ID NO: 2483108 - RNA, 19 nt, Artificial Sequence
  Description of Artificial Sequence: Synthetic oligonucleotide
augggcgugcuucucuuag

SEQ ID NO: 2483109 - RNA, 19 nt, Artificial Sequence
  Description of Artificial Sequence: Synthetic oligonucleotide
aucccaauuagcaaagaau

SEQ ID NO: 2483110 - RNA, 19 nt, Artificial Sequence
  Description of Artificial Sequence: Synthetic oligonucleotide
ucuaggcgucuuaauuaca

SEQ ID NO: 2483111 - RNA, 19 nt, Artificial Sequence
  Description of Artificial Sequence: Synthetic oligonucleotide
ugcugauuuuguuuugaua

SEQ ID NO: 2483112 - RNA, 19 nt, Artificial Sequence
  Description of Artificial Sequence: Synthetic oligonucleotide
gugagaaugucagggagac

SEQ ID NO: 2483113 - RNA, 19 nt, Artificial Sequence
  Description of Artificial Sequence: Synthetic oligonucleotide
aagggugaucacuucccaa

SEQ ID NO: 2483114 - RNA, 19 nt, Artificial Sequence
  Description of Artificial Sequence: Synthetic oligonucleotide
caggcuaucucuaggcguc

SEQ ID NO: 2483115 - RNA, 19 nt, Artificial Sequence
  Description of Artificial Sequence: Synthetic oligonucleotide
guggacguaagccaccaca

SEQ ID NO: 2483116 - RNA, 19 nt, Artificial Sequence
  Description of Artificial Sequence: Synthetic oligonucleotide
ucagcauggcagaccacac

SEQ ID NO: 2483117 - RNA, 19 nt, Artificial Sequence
  Description of Artificial Sequence: Synthetic oligonucleotide
gaaccugagcuuuucauau

SEQ ID NO: 2483118 - RNA, 19 nt, Artificial Sequence
  Description of Artificial Sequence: Synthetic oligonucleotide
caaguggacucugagcuug

SEQ ID NO: 2483119 - RNA, 19 nt, Artificial Sequence
  Description of Artificial Sequence: Synthetic oligonucleotide
aagaaucuccauggucaag

SEQ ID NO: 2483120 - RNA, 19 nt, Artificial Sequence
  Description of Artificial Sequence: Synthetic oligonucleotide
cuuaccauggccucugugu

SEQ ID NO: 2483121 - RNA, 19 nt, Artificial Sequence
  Description of Artificial Sequence: Synthetic oligonucleotide
agcaaagaaucuccauggu

SEQ ID NO: 2483122 - RNA, 19 nt, Artificial Sequence
  Description of Artificial Sequence: Synthetic oligonucleotide
uucuccucaggguaacaaa

SEQ ID NO: 2483123 - RNA, 19 nt, Artificial Sequence
  Description of Artificial Sequence: Synthetic oligonucleotide
aaaugggcgugcuucucuu

SEQ ID NO: 2483124 - RNA, 19 nt, Artificial Sequence
  Description of Artificial Sequence: Synthetic oligonucleotide
agaccacacccuccuuacc

SEQ ID NO: 2483125 - RNA, 19 nt, Artificial Sequence
  Description of Artificial Sequence: Synthetic oligonucleotide
uucucuuaguaccccuaaa

SEQ ID NO: 2483126 - RNA, 19 nt, Artificial Sequence
  Description of Artificial Sequence: Synthetic oligonucleotide
ggauuaucagcacuugguc

SEQ ID NO: 2483127 - RNA, 19 nt, Artificial Sequence
  Description of Artificial Sequence: Synthetic oligonucleotide
aguaccccuaaagugugug

SEQ ID NO: 2483128 - RNA, 19 nt, Artificial Sequence
  Description of Artificial Sequence: Synthetic oligonucleotide
aguuacagaaucagccugu

SEQ ID NO: 2483129 - RNA, 19 nt, Artificial Sequence
  Description of Artificial Sequence: Synthetic oligonucleotide
cagggagacguccuagggc

SEQ ID NO: 2483130 - RNA, 19 nt, Artificial Sequence
  Description of Artificial Sequence: Synthetic oligonucleotide
uaccacaggcuaucucuag

SEQ ID NO: 2483131 - RNA, 19 nt, Artificial Sequence
  Description of Artificial Sequence: Synthetic oligonucleotide
auaaaugggcgugcuucuc

SEQ ID NO: 2483132 - RNA, 19 nt, Artificial Sequence
  Description of Artificial Sequence: Synthetic oligonucleotide
gaucacuucccaagaaaga

SEQ ID NO: 2483133 - RNA, 19 nt, Artificial Sequence
  Description of Artificial Sequence: Synthetic oligonucleotide
gcgugcuucucuuaguacc

SEQ ID NO: 2483134 - RNA, 19 nt, Artificial Sequence
  Description of Artificial Sequence: Synthetic oligonucleotide
ugcuggaauuacaggugga

SEQ ID NO: 2483135 - RNA, 19 nt, Artificial Sequence
  Description of Artificial Sequence: Synthetic oligonucleotide
acuuuaggcugagugggug

SEQ ID NO: 2483136 - RNA, 19 nt, Artificial Sequence
  Description of Artificial Sequence: Synthetic oligonucleotide
uggcagaccacacccuccu

SEQ ID NO: 2483137 - RNA, 19 nt, Artificial Sequence
  Description of Artificial Sequence: Synthetic oligonucleotide
ggucaaguggacucugagc

SEQ ID NO: 2483138 - RNA, 19 nt, Artificial Sequence
  Description of Artificial Sequence: Synthetic oligonucleotide
uccugaacuugcaguuccc

SEQ ID NO: 2483139 - RNA, 19 nt, Artificial Sequence
  Description of Artificial Sequence: Synthetic oligonucleotide
uuaccacaggcuaucucua

SEQ ID NO: 2483140 - RNA, 19 nt, Artificial Sequence
  Description of Artificial Sequence: Synthetic oligonucleotide
ucgaucagcauggcagacc

SEQ ID NO: 2483141 - RNA, 19 nt, Artificial Sequence
  Description of Artificial Sequence: Synthetic oligonucleotide
agagaaccugagcuuuuca

SEQ ID NO: 2483142 - RNA, 19 nt, Artificial Sequence
  Description of Artificial Sequence: Synthetic oligonucleotide
gggaucaugaauucuccuc

SEQ ID NO: 2483143 - RNA, 19 nt, Artificial Sequence
  Description of Artificial Sequence: Synthetic oligonucleotide
uguguguguguguguguga

SEQ ID NO: 2483144 - RNA, 19 nt, Artificial Sequence
  Description of Artificial Sequence: Synthetic oligonucleotide
cagaccacacccuccuuac

SEQ ID NO: 2483145 - RNA, 19 nt, Artificial Sequence
  Description of Artificial Sequence: Synthetic oligonucleotide
cacagcugggcaacuuuag

SEQ ID NO: 2483146 - RNA, 19 nt, Artificial Sequence
  Description of Artificial Sequence: Synthetic oligonucleotide
cacaucuuaccauggccuc

SEQ ID NO: 2483147 - RNA, 19 nt, Artificial Sequence
  Description of Artificial Sequence: Synthetic oligonucleotide
caaauugcauucucccaga

SEQ ID NO: 2483148 - RNA, 19 nt, Artificial Sequence
  Description of Artificial Sequence: Synthetic oligonucleotide
ugcauucucccagagcauc

SEQ ID NO: 2483149 - RNA, 19 nt, Artificial Sequence
  Description of Artificial Sequence: Synthetic oligonucleotide
uggcaggaacacaucuuac

SEQ ID NO: 2483150 - RNA, 19 nt, Artificial Sequence
  Description of Artificial Sequence: Synthetic oligonucleotide
auggcagaccacacccucc

SEQ ID NO: 2483151 - RNA, 19 nt, Artificial Sequence
  Description of Artificial Sequence: Synthetic oligonucleotide
ugcaggagacugacagggc

SEQ ID NO: 2483152 - RNA, 19 nt, Artificial Sequence
  Description of Artificial Sequence: Synthetic oligonucleotide
gcaggagacugacagggcc

SEQ ID NO: 2483153 - RNA, 19 nt, Artificial Sequence
  Description of Artificial Sequence: Synthetic oligonucleotide
ggcgucuuaauuacauuag

SEQ ID NO: 2483154 - RNA, 19 nt, Artificial Sequence
  Description of Artificial Sequence: Synthetic oligonucleotide
ugugugugugugugugugu

SEQ ID NO: 2483155 - RNA, 19 nt, Artificial Sequence
  Description of Artificial Sequence: Synthetic oligonucleotide
ugagaaugucagggagacg

SEQ ID NO: 2483156 - RNA, 19 nt, Artificial Sequence
  Description of Artificial Sequence: Synthetic oligonucleotide
gacagggccagcucggcaa

SEQ ID NO: 2483157 - RNA, 19 nt, Artificial Sequence
  Description of Artificial Sequence: Synthetic oligonucleotide
ucugugugugugugugugu

SEQ ID NO: 2483158 - RNA, 19 nt, Artificial Sequence
  Description of Artificial Sequence: Synthetic oligonucleotide
uugcugauuuuguuuugau

SEQ ID NO: 2483159 - RNA, 19 nt, Artificial Sequence
  Description of Artificial Sequence: Synthetic oligonucleotide
cucugugugugugugugug

SEQ ID NO: 2483160 - RNA, 19 nt, Artificial Sequence
  Description of Artificial Sequence: Synthetic oligonucleotide
ugggagagaaccugagcuu

SEQ ID NO: 2483161 - RNA, 19 nt, Artificial Sequence
  Description of Artificial Sequence: Synthetic oligonucleotide
uagggcauuggcugcugcu

SEQ ID NO: 2483162 - RNA, 19 nt, Artificial Sequence
  Description of Artificial Sequence: Synthetic oligonucleotide
cagccugucuccauccuuc

SEQ ID NO: 2483163 - RNA, 19 nt, Artificial Sequence
  Description of Artificial Sequence: Synthetic oligonucleotide
cugugugugugugugugug

SEQ ID NO: 2483164 - RNA, 19 nt, Artificial Sequence
  Description of Artificial Sequence: Synthetic oligonucleotide
uuaggcugagugggugggg

SEQ ID NO: 2483165 - RNA, 19 nt, Artificial Sequence
  Description of Artificial Sequence: Synthetic oligonucleotide
cacccuccuuaccacaggc

SEQ ID NO: 2483166 - RNA, 19 nt, Artificial Sequence
  Description of Artificial Sequence: Synthetic oligonucleotide
gugugugugugugugugug

SEQ ID NO: 2483167 - RNA, 19 nt, Artificial Sequence
  Description of Artificial Sequence: Synthetic oligonucleotide
acaaggucuuacgugcaca

SEQ ID NO: 2483168 - RNA, 19 nt, Artificial Sequence
  Description of Artificial Sequence: Synthetic oligonucleotide
uaucucuaggcgucuuaau

SEQ ID NO: 2483169 - RNA, 19 nt, Artificial Sequence
  Description of Artificial Sequence: Synthetic oligonucleotide
auucucccagagcauccug

SEQ ID NO: 2483170 - RNA, 19 nt, Artificial Sequence
  Description of Artificial Sequence: Synthetic oligonucleotide
caugaauucuccucagggu

SEQ ID NO: 2483171 - RNA, 19 nt, Artificial Sequence
  Description of Artificial Sequence: Synthetic oligonucleotide
agcacuuggucucgccugu

SEQ ID NO: 2483172 - RNA, 19 nt, Artificial Sequence
  Description of Artificial Sequence: Synthetic oligonucleotide
gaauucuccucaggguaac

SEQ ID NO: 2483173 - RNA, 19 nt, Artificial Sequence
  Description of Artificial Sequence: Synthetic oligonucleotide
caucuuaccauggccucug

SEQ ID NO: 2483174 - RNA, 19 nt, Artificial Sequence
  Description of Artificial Sequence: Synthetic oligonucleotide
aacuugcaguucccagcca

SEQ ID NO: 2483175 - RNA, 19 nt, Artificial Sequence
  Description of Artificial Sequence: Synthetic oligonucleotide
aacuuuaggcugagugggu

SEQ ID NO: 2483176 - RNA, 19 nt, Artificial Sequence
  Description of Artificial Sequence: Synthetic oligonucleotide
accccuaaagugugugaga

SEQ ID NO: 2483177 - RNA, 19 nt, Artificial Sequence
  Description of Artificial Sequence: Synthetic oligonucleotide
cucuuaguaccccuaaagu

SEQ ID NO: 2483178 - RNA, 19 nt, Artificial Sequence
  Description of Artificial Sequence: Synthetic oligonucleotide
accauggccucugugugug

SEQ ID NO: 2483179 - RNA, 19 nt, Artificial Sequence
  Description of Artificial Sequence: Synthetic oligonucleotide
caggguaacaaauugcauu

SEQ ID NO: 2483180 - RNA, 19 nt, Artificial Sequence
  Description of Artificial Sequence: Synthetic oligonucleotide
ggucuuacgugcacagagg

SEQ ID NO: 2483181 - RNA, 19 nt, Artificial Sequence
  Description of Artificial Sequence: Synthetic oligonucleotide
gccaaaugggcaauaaaca

SEQ ID NO: 2483182 - RNA, 19 nt, Artificial Sequence
  Description of Artificial Sequence: Synthetic oligonucleotide
cagcauggcagaccacacc

SEQ ID NO: 2483183 - RNA, 19 nt, Artificial Sequence
  Description of Artificial Sequence: Synthetic oligonucleotide
uaccauggccucugugugu

SEQ ID NO: 2483184 - RNA, 19 nt, Artificial Sequence
  Description of Artificial Sequence: Synthetic oligonucleotide
agaaucagccugucuccau

SEQ ID NO: 2483185 - RNA, 19 nt, Artificial Sequence
  Description of Artificial Sequence: Synthetic oligonucleotide
ucucgccugugauuccucu

SEQ ID NO: 2483186 - RNA, 19 nt, Artificial Sequence
  Description of Artificial Sequence: Synthetic oligonucleotide
ucaaguggacucugagcuu

SEQ ID NO: 2483187 - RNA, 19 nt, Artificial Sequence
  Description of Artificial Sequence: Synthetic oligonucleotide
gaauuacagguggacguaa

SEQ ID NO: 2483188 - RNA, 19 nt, Artificial Sequence
  Description of Artificial Sequence: Synthetic oligonucleotide
uguagccuugggagagaac

SEQ ID NO: 2483189 - RNA, 19 nt, Artificial Sequence
  Description of Artificial Sequence: Synthetic oligonucleotide
aaggucuuacgugcacaga

SEQ ID NO: 2483190 - RNA, 19 nt, Artificial Sequence
  Description of Artificial Sequence: Synthetic oligonucleotide
ucagccugucuccauccuu

SEQ ID NO: 2483191 - RNA, 19 nt, Artificial Sequence
  Description of Artificial Sequence: Synthetic oligonucleotide
aaugggcgugcuucucuua

SEQ ID NO: 2483192 - RNA, 19 nt, Artificial Sequence
  Description of Artificial Sequence: Synthetic oligonucleotide
gaaagggcuuugggcacag

SEQ ID NO: 2483193 - RNA, 19 nt, Artificial Sequence
  Description of Artificial Sequence: Synthetic oligonucleotide
auucuccucaggguaacaa

SEQ ID NO: 2483194 - RNA, 19 nt, Artificial Sequence
  Description of Artificial Sequence: Synthetic oligonucleotide
gagacguccuagggcauug

SEQ ID NO: 2483195 - RNA, 19 nt, Artificial Sequence
  Description of Artificial Sequence: Synthetic oligonucleotide
agggcauuggcugcugcug

SEQ ID NO: 2483196 - RNA, 19 nt, Artificial Sequence
  Description of Artificial Sequence: Synthetic oligonucleotide
agucauugucgaucagcau

SEQ ID NO: 2483197 - RNA, 19 nt, Artificial Sequence
  Description of Artificial Sequence: Synthetic oligonucleotide
acaucuuaccauggccucu

SEQ ID NO: 2483198 - RNA, 19 nt, Artificial Sequence
  Description of Artificial Sequence: Synthetic oligonucleotide
acguaagccaccacaccug

SEQ ID NO: 2483199 - RNA, 19 nt, Artificial Sequence
  Description of Artificial Sequence: Synthetic oligonucleotide
uugcauucucccagagcau

SEQ ID NO: 2483200 - RNA, 19 nt, Artificial Sequence
  Description of Artificial Sequence: Synthetic oligonucleotide
cagguggacguaagccacc

SEQ ID NO: 2483201 - RNA, 19 nt, Artificial Sequence
  Description of Artificial Sequence: Synthetic oligonucleotide
cuggcaggaacacaucuua

SEQ ID NO: 2483202 - RNA, 19 nt, Artificial Sequence
  Description of Artificial Sequence: Synthetic oligonucleotide
uugggcacagcugggcaac

SEQ ID NO: 2483203 - RNA, 19 nt, Artificial Sequence
  Description of Artificial Sequence: Synthetic oligonucleotide
uaguaccccuaaagugugu

SEQ ID NO: 2483204 - RNA, 19 nt, Artificial Sequence
  Description of Artificial Sequence: Synthetic oligonucleotide
gagagaaccugagcuuuuc

SEQ ID NO: 2483205 - RNA, 19 nt, Artificial Sequence
  Description of Artificial Sequence: Synthetic oligonucleotide
uaggcgucuuaauuacauu

SEQ ID NO: 2483206 - RNA, 19 nt, Artificial Sequence
  Description of Artificial Sequence: Synthetic oligonucleotide
cuaggcgucuuaauuacau

SEQ ID NO: 2483207 - RNA, 19 nt, Artificial Sequence
  Description of Artificial Sequence: Synthetic oligonucleotide
agcucggcaacaaggguga

SEQ ID NO: 2483208 - RNA, 19 nt, Artificial Sequence
  Description of Artificial Sequence: Synthetic oligonucleotide
guccuagggcauuggcugc

SEQ ID NO: 2483209 - RNA, 19 nt, Artificial Sequence
  Description of Artificial Sequence: Synthetic oligonucleotide
ggccagcucggcaacaagg

SEQ ID NO: 2483210 - RNA, 19 nt, Artificial Sequence
  Description of Artificial Sequence: Synthetic oligonucleotide
cguccuagggcauuggcug

SEQ ID NO: 2483211 - RNA, 19 nt, Artificial Sequence
  Description of Artificial Sequence: Synthetic oligonucleotide
caacaagggugaucacuuc

SEQ ID NO: 2483212 - RNA, 19 nt, Artificial Sequence
  Description of Artificial Sequence: Synthetic oligonucleotide
caggagacugacagggcca

SEQ ID NO: 2483213 - RNA, 19 nt, Artificial Sequence
  Description of Artificial Sequence: Synthetic oligonucleotide
guuacagaaucagccuguc

SEQ ID NO: 2483214 - RNA, 19 nt, Artificial Sequence
  Description of Artificial Sequence: Synthetic oligonucleotide
ugaguggguggggaucaug

SEQ ID NO: 2483215 - RNA, 19 nt, Artificial Sequence
  Description of Artificial Sequence: Synthetic oligonucleotide
auggccucugugugugugu

SEQ ID NO: 2483216 - RNA, 19 nt, Artificial Sequence
  Description of Artificial Sequence: Synthetic oligonucleotide
cauggucaaguggacucug

SEQ ID NO: 2483217 - RNA, 19 nt, Artificial Sequence
  Description of Artificial Sequence: Synthetic oligonucleotide
agaaagggcuuugggcaca

SEQ ID NO: 2483218 - RNA, 19 nt, Artificial Sequence
  Description of Artificial Sequence: Synthetic oligonucleotide
gccagcucggcaacaaggg

SEQ ID NO: 2483219 - RNA, 19 nt, Artificial Sequence
  Description of Artificial Sequence: Synthetic oligonucleotide
ggacguaagccaccacacc

SEQ ID NO: 2483220 - RNA, 19 nt, Artificial Sequence
  Description of Artificial Sequence: Synthetic oligonucleotide
gugugugugugugauugga

SEQ ID NO: 2483221 - RNA, 19 nt, Artificial Sequence
  Description of Artificial Sequence: Synthetic oligonucleotide
acgugcacagaggcuggac

SEQ ID NO: 2483222 - RNA, 19 nt, Artificial Sequence
  Description of Artificial Sequence: Synthetic oligonucleotide
uugcaguucccagccaaau

SEQ ID NO: 2483223 - RNA, 19 nt, Artificial Sequence
  Description of Artificial Sequence: Synthetic oligonucleotide
cuucucuuaguaccccuaa

SEQ ID NO: 2483224 - RNA, 19 nt, Artificial Sequence
  Description of Artificial Sequence: Synthetic oligonucleotide
acguccuagggcauuggcu

SEQ ID NO: 2483225 - RNA, 19 nt, Artificial Sequence
  Description of Artificial Sequence: Synthetic oligonucleotide
guaccccuaaaguguguga

SEQ ID NO: 2483226 - RNA, 19 nt, Artificial Sequence
  Description of Artificial Sequence: Synthetic oligonucleotide
agagcauccugaacuugca

SEQ ID NO: 2483227 - RNA, 19 nt, Artificial Sequence
  Description of Artificial Sequence: Synthetic oligonucleotide
gagacugacagggccagcu

SEQ ID NO: 2483228 - RNA, 19 nt, Artificial Sequence
  Description of Artificial Sequence: Synthetic oligonucleotide
gcuggaauuacagguggac

SEQ ID NO: 2483229 - RNA, 19 nt, Artificial Sequence
  Description of Artificial Sequence: Synthetic oligonucleotide
uggccucugugugugugug

SEQ ID NO: 2483230 - RNA, 19 nt, Artificial Sequence
  Description of Artificial Sequence: Synthetic oligonucleotide
cauggccucugugugugug

SEQ ID NO: 2483231 - RNA, 19 nt, Artificial Sequence
  Description of Artificial Sequence: Synthetic oligonucleotide
auacaaggucuuacgugca

SEQ ID NO: 2483232 - RNA, 19 nt, Artificial Sequence
  Description of Artificial Sequence: Synthetic oligonucleotide
accucucagugcuggaauu

SEQ ID NO: 2483233 - RNA, 19 nt, Artificial Sequence
  Description of Artificial Sequence: Synthetic oligonucleotide
ugggcgugcuucucuuagu

SEQ ID NO: 2483234 - RNA, 19 nt, Artificial Sequence
  Description of Artificial Sequence: Synthetic oligonucleotide
caagggugaucacuuccca

SEQ ID NO: 2483235 - RNA, 19 nt, Artificial Sequence
  Description of Artificial Sequence: Synthetic oligonucleotide
ugugugugugugugugauu

SEQ ID NO: 2483236 - RNA, 19 nt, Artificial Sequence
  Description of Artificial Sequence: Synthetic oligonucleotide
cuaucucuaggcgucuuaa

SEQ ID NO: 2483237 - RNA, 19 nt, Artificial Sequence
  Description of Artificial Sequence: Synthetic oligonucleotide
uaucagcacuuggucucgc

SEQ ID NO: 2483238 - RNA, 19 nt, Artificial Sequence
  Description of Artificial Sequence: Synthetic oligonucleotide
uccaccucucagugcugga

SEQ ID NO: 2483239 - RNA, 19 nt, Artificial Sequence
  Description of Artificial Sequence: Synthetic oligonucleotide
cucgccugugauuccucuc

SEQ ID NO: 2483240 - RNA, 19 nt, Artificial Sequence
  Description of Artificial Sequence: Synthetic oligonucleotide
agcuuuucauaugcuguuu

SEQ ID NO: 2483241 - RNA, 19 nt, Artificial Sequence
  Description of Artificial Sequence: Synthetic oligonucleotide
ccuugggagagaaccugag

SEQ ID NO: 2483242 - RNA, 19 nt, Artificial Sequence
  Description of Artificial Sequence: Synthetic oligonucleotide
agguggacguaagccacca

SEQ ID NO: 2483243 - RNA, 19 nt, Artificial Sequence
  Description of Artificial Sequence: Synthetic oligonucleotide
cuugcaguucccagccaaa

SEQ ID NO: 2483244 - RNA, 19 nt, Artificial Sequence
  Description of Artificial Sequence: Synthetic oligonucleotide
gggcauuggcugcugcugc

SEQ ID NO: 2483245 - RNA, 19 nt, Artificial Sequence
  Description of Artificial Sequence: Synthetic oligonucleotide
ggugaucacuucccaagaa

SEQ ID NO: 2483246 - RNA, 19 nt, Artificial Sequence
  Description of Artificial Sequence: Synthetic oligonucleotide
uggucucgccugugauucc

SEQ ID NO: 2483247 - RNA, 19 nt, Artificial Sequence
  Description of Artificial Sequence: Synthetic oligonucleotide
agacguccuagggcauugg

SEQ ID NO: 2483248 - RNA, 19 nt, Artificial Sequence
  Description of Artificial Sequence: Synthetic oligonucleotide
uccuuaccacaggcuaucu

SEQ ID NO: 2483249 - RNA, 19 nt, Artificial Sequence
  Description of Artificial Sequence: Synthetic oligonucleotide
cuggacuugaacuccugau

SEQ ID NO: 2483250 - RNA, 19 nt, Artificial Sequence
  Description of Artificial Sequence: Synthetic oligonucleotide
cauugucgaucagcauggc

SEQ ID NO: 2483251 - RNA, 19 nt, Artificial Sequence
  Description of Artificial Sequence: Synthetic oligonucleotide
aaguggacucugagcuugu

SEQ ID NO: 2483252 - RNA, 19 nt, Artificial Sequence
  Description of Artificial Sequence: Synthetic oligonucleotide
accacaccuggcauugccu

SEQ ID NO: 2483253 - RNA, 19 nt, Artificial Sequence
  Description of Artificial Sequence: Synthetic oligonucleotide
cucggcaacaagggugauc

SEQ ID NO: 2483254 - RNA, 19 nt, Artificial Sequence
  Description of Artificial Sequence: Synthetic oligonucleotide
gcauucucccagagcaucc

SEQ ID NO: 2483255 - RNA, 19 nt, Artificial Sequence
  Description of Artificial Sequence: Synthetic oligonucleotide
gccucugugugugugugug

SEQ ID NO: 2483256 - RNA, 19 nt, Artificial Sequence
  Description of Artificial Sequence: Synthetic oligonucleotide
ggcgugcuucucuuaguac

SEQ ID NO: 2483257 - RNA, 19 nt, Artificial Sequence
  Description of Artificial Sequence: Synthetic oligonucleotide
guggguggggaucaugaau

SEQ ID NO: 2483258 - RNA, 19 nt, Artificial Sequence
  Description of Artificial Sequence: Synthetic oligonucleotide
gucgaucagcauggcagac

SEQ ID NO: 2483259 - RNA, 19 nt, Artificial Sequence
  Description of Artificial Sequence: Synthetic oligonucleotide
cacuggcaggaacacaucu

SEQ ID NO: 2483260 - RNA, 19 nt, Artificial Sequence
  Description of Artificial Sequence: Synthetic oligonucleotide
gccuuucuuucuaauagaa

SEQ ID NO: 2483261 - RNA, 19 nt, Artificial Sequence
  Description of Artificial Sequence: Synthetic oligonucleotide
cagaaucagccugucucca

SEQ ID NO: 2483262 - RNA, 19 nt, Artificial Sequence
  Description of Artificial Sequence: Synthetic oligonucleotide
uacgugcacagaggcugga

SEQ ID NO: 2483263 - RNA, 19 nt, Artificial Sequence
  Description of Artificial Sequence: Synthetic oligonucleotide
gcuuugggcacagcugggc

SEQ ID NO: 2483264 - RNA, 19 nt, Artificial Sequence
  Description of Artificial Sequence: Synthetic oligonucleotide
ggcaauaaacaaucccaau

SEQ ID NO: 2483265 - RNA, 19 nt, Artificial Sequence
  Description of Artificial Sequence: Synthetic oligonucleotide
ggcaacaagggugaucacu

SEQ ID NO: 2483266 - RNA, 19 nt, Artificial Sequence
  Description of Artificial Sequence: Synthetic oligonucleotide
cacuuggucucgccuguga

SEQ ID NO: 2483267 - RNA, 19 nt, Artificial Sequence
  Description of Artificial Sequence: Synthetic oligonucleotide
ggaauuacagguggacgua

SEQ ID NO: 2483268 - RNA, 19 nt, Artificial Sequence
  Description of Artificial Sequence: Synthetic oligonucleotide
cgaucagcauggcagacca

SEQ ID NO: 2483269 - RNA, 19 nt, Artificial Sequence
  Description of Artificial Sequence: Synthetic oligonucleotide
cuccugcuguagccuuggg

SEQ ID NO: 2483270 - RNA, 19 nt, Artificial Sequence
  Description of Artificial Sequence: Synthetic oligonucleotide
gcgucuuaauuacauuagu

SEQ ID NO: 2483271 - RNA, 19 nt, Artificial Sequence
  Description of Artificial Sequence: Synthetic oligonucleotide
cccaauuagcaaagaaucu

SEQ ID NO: 2483272 - RNA, 19 nt, Artificial Sequence
  Description of Artificial Sequence: Synthetic oligonucleotide
caaucccaauuagcaaaga

SEQ ID NO: 2483273 - RNA, 19 nt, Artificial Sequence
  Description of Artificial Sequence: Synthetic oligonucleotide
gcagaccacacccuccuua

SEQ ID NO: 2483274 - RNA, 19 nt, Artificial Sequence
  Description of Artificial Sequence: Synthetic oligonucleotide
ggguggggaucaugaauuc

SEQ ID NO: 2483275 - RNA, 19 nt, Artificial Sequence
  Description of Artificial Sequence: Synthetic oligonucleotide
gugcacagaggcuggacuu

SEQ ID NO: 2483276 - RNA, 19 nt, Artificial Sequence
  Description of Artificial Sequence: Synthetic oligonucleotide
ggcuuugggcacagcuggg

SEQ ID NO: 2483277 - RNA, 19 nt, Artificial Sequence
  Description of Artificial Sequence: Synthetic oligonucleotide
gcugaguggguggggauca

SEQ ID NO: 2483278 - RNA, 19 nt, Artificial Sequence
  Description of Artificial Sequence: Synthetic oligonucleotide
ccuuaccacaggcuaucuc

SEQ ID NO: 2483279 - RNA, 19 nt, Artificial Sequence
  Description of Artificial Sequence: Synthetic oligonucleotide
acccuccuuaccacaggcu

SEQ ID NO: 2483280 - RNA, 19 nt, Artificial Sequence
  Description of Artificial Sequence: Synthetic oligonucleotide
cauugccuuucuuucuaau

SEQ ID NO: 2483281 - RNA, 19 nt, Artificial Sequence
  Description of Artificial Sequence: Synthetic oligonucleotide
gugugugugugugugugau

SEQ ID NO: 2483282 - RNA, 19 nt, Artificial Sequence
  Description of Artificial Sequence: Synthetic oligonucleotide
ucccagccaaaugggcaau

SEQ ID NO: 2483283 - RNA, 19 nt, Artificial Sequence
  Description of Artificial Sequence: Synthetic oligonucleotide
aggcuaucucuaggcgucu

SEQ ID NO: 2483284 - RNA, 19 nt, Artificial Sequence
  Description of Artificial Sequence: Synthetic oligonucleotide
uucugccccuccugcugua

SEQ ID NO: 2483285 - RNA, 19 nt, Artificial Sequence
  Description of Artificial Sequence: Synthetic oligonucleotide
gggcgugcuucucuuagua

SEQ ID NO: 2483286 - RNA, 19 nt, Artificial Sequence
  Description of Artificial Sequence: Synthetic oligonucleotide
gcuaucucuaggcgucuua

SEQ ID NO: 2483287 - RNA, 19 nt, Artificial Sequence
  Description of Artificial Sequence: Synthetic oligonucleotide
ugggcacagcugggcaacu

SEQ ID NO: 2483288 - RNA, 19 nt, Artificial Sequence
  Description of Artificial Sequence: Synthetic oligonucleotide
gggccagcucggcaacaag

SEQ ID NO: 2483289 - RNA, 19 nt, Artificial Sequence
  Description of Artificial Sequence: Synthetic oligonucleotide
ccuccugcuguagccuugg

SEQ ID NO: 2483290 - RNA, 19 nt, Artificial Sequence
  Description of Artificial Sequence: Synthetic oligonucleotide
ggggaucaugaauucuccu

SEQ ID NO: 2483291 - RNA, 19 nt, Artificial Sequence
  Description of Artificial Sequence: Synthetic oligonucleotide
cuguagccuugggagagaa

SEQ ID NO: 2483292 - RNA, 19 nt, Artificial Sequence
  Description of Artificial Sequence: Synthetic oligonucleotide
gcauugccuuucuuucuaa

SEQ ID NO: 2483293 - RNA, 19 nt, Artificial Sequence
  Description of Artificial Sequence: Synthetic oligonucleotide
ccccuaaagugugugagaa

SEQ ID NO: 2483294 - RNA, 19 nt, Artificial Sequence
  Description of Artificial Sequence: Synthetic oligonucleotide
gguggacguaagccaccac

SEQ ID NO: 2483295 - RNA, 19 nt, Artificial Sequence
  Description of Artificial Sequence: Synthetic oligonucleotide
ggcugaguggguggggauc

SEQ ID NO: 2483296 - RNA, 19 nt, Artificial Sequence
  Description of Artificial Sequence: Synthetic oligonucleotide
cacagaggcuggacuugaa

SEQ ID NO: 2483297 - RNA, 19 nt, Artificial Sequence
  Description of Artificial Sequence: Synthetic oligonucleotide
aguggacucugagcuuguu

SEQ ID NO: 2483298 - RNA, 19 nt, Artificial Sequence
  Description of Artificial Sequence: Synthetic oligonucleotide
caccucucagugcuggaau

SEQ ID NO: 2483299 - RNA, 19 nt, Artificial Sequence
  Description of Artificial Sequence: Synthetic oligonucleotide
cgucuuaauuacauuaguu

SEQ ID NO: 2483300 - RNA, 19 nt, Artificial Sequence
  Description of Artificial Sequence: Synthetic oligonucleotide
cauucucccagagcauccu

SEQ ID NO: 2483301 - RNA, 19 nt, Artificial Sequence
  Description of Artificial Sequence: Synthetic oligonucleotide
cuccacuggcaggaacaca

SEQ ID NO: 2483302 - RNA, 19 nt, Artificial Sequence
  Description of Artificial Sequence: Synthetic oligonucleotide
gguggggaucaugaauucu

SEQ ID NO: 2483303 - RNA, 19 nt, Artificial Sequence
  Description of Artificial Sequence: Synthetic oligonucleotide
gcacagaggcuggacuuga

SEQ ID NO: 2483304 - RNA, 19 nt, Artificial Sequence
  Description of Artificial Sequence: Synthetic oligonucleotide
gggagagaaccugagcuuu

SEQ ID NO: 2483305 - RNA, 19 nt, Artificial Sequence
  Description of Artificial Sequence: Synthetic oligonucleotide
gucucgccugugauuccuc

SEQ ID NO: 2483306 - RNA, 19 nt, Artificial Sequence
  Description of Artificial Sequence: Synthetic oligonucleotide
gcuucucuuaguaccccua

SEQ ID NO: 2483307 - RNA, 19 nt, Artificial Sequence
  Description of Artificial Sequence: Synthetic oligonucleotide
ccacuggcaggaacacauc

SEQ ID NO: 2483308 - RNA, 19 nt, Artificial Sequence
  Description of Artificial Sequence: Synthetic oligonucleotide
ggguaacaaauugcauucu

SEQ ID NO: 2483309 - RNA, 19 nt, Artificial Sequence
  Description of Artificial Sequence: Synthetic oligonucleotide
ggcacagcugggcaacuuu

SEQ ID NO: 2483310 - RNA, 19 nt, Artificial Sequence
  Description of Artificial Sequence: Synthetic oligonucleotide
cccaagaaagaaagggcuu

SEQ ID NO: 2483311 - RNA, 19 nt, Artificial Sequence
  Description of Artificial Sequence: Synthetic oligonucleotide
ccugagcuuuucauaugcu

SEQ ID NO: 2483312 - RNA, 19 nt, Artificial Sequence
  Description of Artificial Sequence: Synthetic oligonucleotide
cacaccuggcauugccuuu

SEQ ID NO: 2483313 - RNA, 19 nt, Artificial Sequence
  Description of Artificial Sequence: Synthetic oligonucleotide
ggucucgccugugauuccu

SEQ ID NO: 2483314 - RNA, 19 nt, Artificial Sequence
  Description of Artificial Sequence: Synthetic oligonucleotide
gcuguagccuugggagaga

SEQ ID NO: 2483315 - RNA, 19 nt, Artificial Sequence
  Description of Artificial Sequence: Synthetic oligonucleotide
ccuagggcauuggcugcug

SEQ ID NO: 2483316 - RNA, 19 nt, Artificial Sequence
  Description of Artificial Sequence: Synthetic oligonucleotide
gcacuuggucucgccugug

SEQ ID NO: 2483317 - RNA, 19 nt, Artificial Sequence
  Description of Artificial Sequence: Synthetic oligonucleotide
ccuccuuaccacaggcuau

SEQ ID NO: 2483318 - RNA, 19 nt, Artificial Sequence
  Description of Artificial Sequence: Synthetic oligonucleotide
ccaccucucagugcuggaa

SEQ ID NO: 2483319 - RNA, 19 nt, Artificial Sequence
  Description of Artificial Sequence: Synthetic oligonucleotide
caccuggcauugccuuucu

SEQ ID NO: 2483320 - RNA, 19 nt, Artificial Sequence
  Description of Artificial Sequence: Synthetic oligonucleotide
ggagagaaccugagcuuuu

SEQ ID NO: 2483321 - RNA, 19 nt, Artificial Sequence
  Description of Artificial Sequence: Synthetic oligonucleotide
ccagcucggcaacaagggu

SEQ ID NO: 2483322 - RNA, 19 nt, Artificial Sequence
  Description of Artificial Sequence: Synthetic oligonucleotide
ccacaccuggcauugccuu

SEQ ID NO: 2483323 - RNA, 19 nt, Artificial Sequence
  Description of Artificial Sequence: Synthetic oligonucleotide
ccauggucaaguggacucu

SEQ ID NO: 2483324 - RNA, 19 nt, Artificial Sequence
  Description of Artificial Sequence: Synthetic oligonucleotide
ggccucugugugugugugu

SEQ ID NO: 2483325 - RNA, 19 nt, Artificial Sequence
  Description of Artificial Sequence: Synthetic oligonucleotide
cccuaaagugugugagaau

SEQ ID NO: 2483326 - RNA, 19 nt, Artificial Sequence
  Description of Artificial Sequence: Synthetic oligonucleotide
ccucugugugugugugugu

SEQ ID NO: 2483327 - RNA, 19 nt, Artificial Sequence
  Description of Artificial Sequence: Synthetic oligonucleotide
cgccugugauuccucucca

SEQ ID NO: 2483328 - RNA, 19 nt, Artificial Sequence
  Description of Artificial Sequence: Synthetic oligonucleotide
cggcaacaagggugaucac

SEQ ID NO: 2483329 - RNA, 19 nt, Artificial Sequence
  Description of Artificial Sequence: Synthetic oligonucleotide
ggcuaucucuaggcgucuu

SEQ ID NO: 2483330 - RNA, 19 nt, Artificial Sequence
  Description of Artificial Sequence: Synthetic oligonucleotide
ggcagaccacacccuccuu

SEQ ID NO: 2483331 - RNA, 19 nt, Artificial Sequence
  Description of Artificial Sequence: Synthetic oligonucleotide
cccagccaaaugggcaaua

SEQ ID NO: 2483332 - RNA, 19 nt, Artificial Sequence
  Description of Artificial Sequence: Synthetic oligonucleotide
cugaguggguggggaucau

SEQ ID NO: 2483333 - RNA, 19 nt, Artificial Sequence
  Description of Artificial Sequence: Synthetic oligonucleotide
gggagacguccuagggcau

SEQ ID NO: 2483334 - RNA, 19 nt, Artificial Sequence
  Description of Artificial Sequence: Synthetic oligonucleotide
gggcaacuuuaggcugagu

SEQ ID NO: 2483335 - RNA, 19 nt, Artificial Sequence
  Description of Artificial Sequence: Synthetic oligonucleotide
gggcacagcugggcaacuu

SEQ ID NO: 2483336 - RNA, 19 nt, Artificial Sequence
  Description of Artificial Sequence: Synthetic oligonucleotide
ccauggccucugugugugu

SEQ ID NO: 2483337 - RNA, 19 nt, Artificial Sequence
  Description of Artificial Sequence: Synthetic oligonucleotide
cauauuuacaaauaaagcg

SEQ ID NO: 2483338 - RNA, 19 nt, Artificial Sequence
  Description of Artificial Sequence: Synthetic oligonucleotide
aaauggaaggucuuggugc

SEQ ID NO: 2483339 - RNA, 19 nt, Artificial Sequence
  Description of Artificial Sequence: Synthetic oligonucleotide
aauauuauuucuucaacag

SEQ ID NO: 2483340 - RNA, 19 nt, Artificial Sequence
  Description of Artificial Sequence: Synthetic oligonucleotide
aaaguugcauauuaagagc

SEQ ID NO: 2483341 - RNA, 19 nt, Artificial Sequence
  Description of Artificial Sequence: Synthetic oligonucleotide
aguaaaauaacauuuucuc

SEQ ID NO: 2483342 - RNA, 19 nt, Artificial Sequence
  Description of Artificial Sequence: Synthetic oligonucleotide
uuauauuuuaaauuacacg

SEQ ID NO: 2483343 - RNA, 19 nt, Artificial Sequence
  Description of Artificial Sequence: Synthetic oligonucleotide
uuuaguaaaaguuaaguac

SEQ ID NO: 2483344 - RNA, 19 nt, Artificial Sequence
  Description of Artificial Sequence: Synthetic oligonucleotide
uuaguaaaaguuaaguacc

SEQ ID NO: 2483345 - RNA, 19 nt, Artificial Sequence
  Description of Artificial Sequence: Synthetic oligonucleotide
aaauaaagcguuguugucc

SEQ ID NO: 2483346 - RNA, 19 nt, Artificial Sequence
  Description of Artificial Sequence: Synthetic oligonucleotide
ucuuaaauaacaaaauccu

SEQ ID NO: 2483347 - RNA, 19 nt, Artificial Sequence
  Description of Artificial Sequence: Synthetic oligonucleotide
uuaaauuguauacagugug

SEQ ID NO: 2483348 - RNA, 19 nt, Artificial Sequence
  Description of Artificial Sequence: Synthetic oligonucleotide
uuaaauaacaaaauccuaa

SEQ ID NO: 2483349 - RNA, 19 nt, Artificial Sequence
  Description of Artificial Sequence: Synthetic oligonucleotide
auauuaagagcauauuuac

SEQ ID NO: 2483350 - RNA, 19 nt, Artificial Sequence
  Description of Artificial Sequence: Synthetic oligonucleotide
uuaaagauggagauuguag

SEQ ID NO: 2483351 - RNA, 19 nt, Artificial Sequence
  Description of Artificial Sequence: Synthetic oligonucleotide
uuaaauuacacgauguuuc

SEQ ID NO: 2483352 - RNA, 19 nt, Artificial Sequence
  Description of Artificial Sequence: Synthetic oligonucleotide
guuuuagucacucacgagg

SEQ ID NO: 2483353 - RNA, 19 nt, Artificial Sequence
  Description of Artificial Sequence: Synthetic oligonucleotide
uuaaguaccaucacauucc

SEQ ID NO: 2483354 - RNA, 19 nt, Artificial Sequence
  Description of Artificial Sequence: Synthetic oligonucleotide
ugaguuuggaaauggaagg

SEQ ID NO: 2483355 - RNA, 19 nt, Artificial Sequence
  Description of Artificial Sequence: Synthetic oligonucleotide
aaagucagaucccugcugg

SEQ ID NO: 2483356 - RNA, 19 nt, Artificial Sequence
  Description of Artificial Sequence: Synthetic oligonucleotide
uucuucaacaguaaaauaa

SEQ ID NO: 2483357 - RNA, 19 nt, Artificial Sequence
  Description of Artificial Sequence: Synthetic oligonucleotide
aaaaguuaaguaccaucac

SEQ ID NO: 2483358 - RNA, 19 nt, Artificial Sequence
  Description of Artificial Sequence: Synthetic oligonucleotide
acaaugagaauauuauuuc

SEQ ID NO: 2483359 - RNA, 19 nt, Artificial Sequence
  Description of Artificial Sequence: Synthetic oligonucleotide
uguaguggaagguucauag

SEQ ID NO: 2483360 - RNA, 19 nt, Artificial Sequence
  Description of Artificial Sequence: Synthetic oligonucleotide
uuuuagucacucacgaggg

SEQ ID NO: 2483361 - RNA, 19 nt, Artificial Sequence
  Description of Artificial Sequence: Synthetic oligonucleotide
aacacgaugagacuuaaau

SEQ ID NO: 2483362 - RNA, 19 nt, Artificial Sequence
  Description of Artificial Sequence: Synthetic oligonucleotide
agaauauuauuucuucaac

SEQ ID NO: 2483363 - RNA, 19 nt, Artificial Sequence
  Description of Artificial Sequence: Synthetic oligonucleotide
auuaagagcauauuuacaa

SEQ ID NO: 2483364 - RNA, 19 nt, Artificial Sequence
  Description of Artificial Sequence: Synthetic oligonucleotide
ucaaaguugcauauuaaga

SEQ ID NO: 2483365 - RNA, 19 nt, Artificial Sequence
  Description of Artificial Sequence: Synthetic oligonucleotide
uucuuaaagauggagauug

SEQ ID NO: 2483366 - RNA, 19 nt, Artificial Sequence
  Description of Artificial Sequence: Synthetic oligonucleotide
auuccggucaucuuguugg

SEQ ID NO: 2483367 - RNA, 19 nt, Artificial Sequence
  Description of Artificial Sequence: Synthetic oligonucleotide
acaaauaaagcguuguugu

SEQ ID NO: 2483368 - RNA, 19 nt, Artificial Sequence
  Description of Artificial Sequence: Synthetic oligonucleotide
uaaacaaaggcacgugagg

SEQ ID NO: 2483369 - RNA, 19 nt, Artificial Sequence
  Description of Artificial Sequence: Synthetic oligonucleotide
agacuuaaaugugacaugc

SEQ ID NO: 2483370 - RNA, 19 nt, Artificial Sequence
  Description of Artificial Sequence: Synthetic oligonucleotide
aaauuguauacaguguguc

SEQ ID NO: 2483371 - RNA, 19 nt, Artificial Sequence
  Description of Artificial Sequence: Synthetic oligonucleotide
aauuacacgauguuucuau

SEQ ID NO: 2483372 - RNA, 19 nt, Artificial Sequence
  Description of Artificial Sequence: Synthetic oligonucleotide
ucuauuuuauucucaaagu

SEQ ID NO: 2483373 - RNA, 19 nt, Artificial Sequence
  Description of Artificial Sequence: Synthetic oligonucleotide
augagaauauuauuucuuc

SEQ ID NO: 2483374 - RNA, 19 nt, Artificial Sequence
  Description of Artificial Sequence: Synthetic oligonucleotide
aauaaagcguuguugucca

SEQ ID NO: 2483375 - RNA, 19 nt, Artificial Sequence
  Description of Artificial Sequence: Synthetic oligonucleotide
ucuguuggcagacagggug

SEQ ID NO: 2483376 - RNA, 19 nt, Artificial Sequence
  Description of Artificial Sequence: Synthetic oligonucleotide
gaagguucauagaaaaugg

SEQ ID NO: 2483377 - RNA, 19 nt, Artificial Sequence
  Description of Artificial Sequence: Synthetic oligonucleotide
ucuucaacaguaaaauaac

SEQ ID NO: 2483378 - RNA, 19 nt, Artificial Sequence
  Description of Artificial Sequence: Synthetic oligonucleotide
gaauauuauuucuucaaca

SEQ ID NO: 2483379 - RNA, 19 nt, Artificial Sequence
  Description of Artificial Sequence: Synthetic oligonucleotide
uaaagauggagauuguagu

SEQ ID NO: 2483380 - RNA, 19 nt, Artificial Sequence
  Description of Artificial Sequence: Synthetic oligonucleotide
aaggauuccuugcauaugu

SEQ ID NO: 2483381 - RNA, 19 nt, Artificial Sequence
  Description of Artificial Sequence: Synthetic oligonucleotide
aacaaugagaauauuauuu

SEQ ID NO: 2483382 - RNA, 19 nt, Artificial Sequence
  Description of Artificial Sequence: Synthetic oligonucleotide
uugacgacagucccuaagg

SEQ ID NO: 2483383 - RNA, 19 nt, Artificial Sequence
  Description of Artificial Sequence: Synthetic oligonucleotide
ucuacaacaaugagaauau

SEQ ID NO: 2483384 - RNA, 19 nt, Artificial Sequence
  Description of Artificial Sequence: Synthetic oligonucleotide
agcguuguuguccaaaguc

SEQ ID NO: 2483385 - RNA, 19 nt, Artificial Sequence
  Description of Artificial Sequence: Synthetic oligonucleotide
ugagguuuuagucacucac

SEQ ID NO: 2483386 - RNA, 19 nt, Artificial Sequence
  Description of Artificial Sequence: Synthetic oligonucleotide
aauuguauacagugugucu

SEQ ID NO: 2483387 - RNA, 19 nt, Artificial Sequence
  Description of Artificial Sequence: Synthetic oligonucleotide
aaagcguuguuguccaaag

SEQ ID NO: 2483388 - RNA, 19 nt, Artificial Sequence
  Description of Artificial Sequence: Synthetic oligonucleotide
uucuacaacaaugagaaua

SEQ ID NO: 2483389 - RNA, 19 nt, Artificial Sequence
  Description of Artificial Sequence: Synthetic oligonucleotide
uccagaucuccccagaagc

SEQ ID NO: 2483390 - RNA, 19 nt, Artificial Sequence
  Description of Artificial Sequence: Synthetic oligonucleotide
ugagacuuaaaugugacau

SEQ ID NO: 2483391 - RNA, 19 nt, Artificial Sequence
  Description of Artificial Sequence: Synthetic oligonucleotide
aaaaugguccagaucuccc

SEQ ID NO: 2483392 - RNA, 19 nt, Artificial Sequence
  Description of Artificial Sequence: Synthetic oligonucleotide
uacaaauaaagcguuguug

SEQ ID NO: 2483393 - RNA, 19 nt, Artificial Sequence
  Description of Artificial Sequence: Synthetic oligonucleotide
uacaacaaugagaauauua

SEQ ID NO: 2483394 - RNA, 19 nt, Artificial Sequence
  Description of Artificial Sequence: Synthetic oligonucleotide
cucaaaguugcauauuaag

SEQ ID NO: 2483395 - RNA, 19 nt, Artificial Sequence
  Description of Artificial Sequence: Synthetic oligonucleotide
uauuaagagcauauuuaca

SEQ ID NO: 2483396 - RNA, 19 nt, Artificial Sequence
  Description of Artificial Sequence: Synthetic oligonucleotide
acaagagccugugugaagc

SEQ ID NO: 2483397 - RNA, 19 nt, Artificial Sequence
  Description of Artificial Sequence: Synthetic oligonucleotide
uuuacaaauaaagcguugu

SEQ ID NO: 2483398 - RNA, 19 nt, Artificial Sequence
  Description of Artificial Sequence: Synthetic oligonucleotide
aaauauauauuaaauugua

SEQ ID NO: 2483399 - RNA, 19 nt, Artificial Sequence
  Description of Artificial Sequence: Synthetic oligonucleotide
agagcagcuaggcugaaag

SEQ ID NO: 2483400 - RNA, 19 nt, Artificial Sequence
  Description of Artificial Sequence: Synthetic oligonucleotide
uaaauuguauacagugugu

SEQ ID NO: 2483401 - RNA, 19 nt, Artificial Sequence
  Description of Artificial Sequence: Synthetic oligonucleotide
ugagaauauuauuucuuca

SEQ ID NO: 2483402 - RNA, 19 nt, Artificial Sequence
  Description of Artificial Sequence: Synthetic oligonucleotide
uggagauuguaguggaagg

SEQ ID NO: 2483403 - RNA, 19 nt, Artificial Sequence
  Description of Artificial Sequence: Synthetic oligonucleotide
uauacagugugucuacacu

SEQ ID NO: 2483404 - RNA, 19 nt, Artificial Sequence
  Description of Artificial Sequence: Synthetic oligonucleotide
aguaccaucacauuccauu

SEQ ID NO: 2483405 - RNA, 19 nt, Artificial Sequence
  Description of Artificial Sequence: Synthetic oligonucleotide
guaaaaguuaaguaccauc

SEQ ID NO: 2483406 - RNA, 19 nt, Artificial Sequence
  Description of Artificial Sequence: Synthetic oligonucleotide
uauuuacaaauaaagcguu

SEQ ID NO: 2483407 - RNA, 19 nt, Artificial Sequence
  Description of Artificial Sequence: Synthetic oligonucleotide
uaccagagcagcuaggcug

SEQ ID NO: 2483408 - RNA, 19 nt, Artificial Sequence
  Description of Artificial Sequence: Synthetic oligonucleotide
agucuccccacacucauac

SEQ ID NO: 2483409 - RNA, 19 nt, Artificial Sequence
  Description of Artificial Sequence: Synthetic oligonucleotide
uaguggaagguucauagaa

SEQ ID NO: 2483410 - RNA, 19 nt, Artificial Sequence
  Description of Artificial Sequence: Synthetic oligonucleotide
aaacaaaggcacgugaggu

SEQ ID NO: 2483411 - RNA, 19 nt, Artificial Sequence
  Description of Artificial Sequence: Synthetic oligonucleotide
uuuuaaauuacacgauguu

SEQ ID NO: 2483412 - RNA, 19 nt, Artificial Sequence
  Description of Artificial Sequence: Synthetic oligonucleotide
uaagagcauauuuacaaau

SEQ ID NO: 2483413 - RNA, 19 nt, Artificial Sequence
  Description of Artificial Sequence: Synthetic oligonucleotide
accaucacauuccauuuuc

SEQ ID NO: 2483414 - RNA, 19 nt, Artificial Sequence
  Description of Artificial Sequence: Synthetic oligonucleotide
caagacaagagccugugug

SEQ ID NO: 2483415 - RNA, 19 nt, Artificial Sequence
  Description of Artificial Sequence: Synthetic oligonucleotide
uuuaaauuacacgauguuu

SEQ ID NO: 2483416 - RNA, 19 nt, Artificial Sequence
  Description of Artificial Sequence: Synthetic oligonucleotide
uaguaaaaguuaaguacca

SEQ ID NO: 2483417 - RNA, 19 nt, Artificial Sequence
  Description of Artificial Sequence: Synthetic oligonucleotide
uaaauuacacgauguuucu

SEQ ID NO: 2483418 - RNA, 19 nt, Artificial Sequence
  Description of Artificial Sequence: Synthetic oligonucleotide
gagaauauuauuucuucaa

SEQ ID NO: 2483419 - RNA, 19 nt, Artificial Sequence
  Description of Artificial Sequence: Synthetic oligonucleotide
uucucaaaguugcauauua

SEQ ID NO: 2483420 - RNA, 19 nt, Artificial Sequence
  Description of Artificial Sequence: Synthetic oligonucleotide
aaguugcauauuaagagca

SEQ ID NO: 2483421 - RNA, 19 nt, Artificial Sequence
  Description of Artificial Sequence: Synthetic oligonucleotide
aaguuaaguaccaucacau

SEQ ID NO: 2483422 - RNA, 19 nt, Artificial Sequence
  Description of Artificial Sequence: Synthetic oligonucleotide
ucuccccacacucauacca

SEQ ID NO: 2483423 - RNA, 19 nt, Artificial Sequence
  Description of Artificial Sequence: Synthetic oligonucleotide
ucuacacuucauuuuauau

SEQ ID NO: 2483424 - RNA, 19 nt, Artificial Sequence
  Description of Artificial Sequence: Synthetic oligonucleotide
guucuguuggcagacaggg

SEQ ID NO: 2483425 - RNA, 19 nt, Artificial Sequence
  Description of Artificial Sequence: Synthetic oligonucleotide
gugaguuuggaaauggaag

SEQ ID NO: 2483426 - RNA, 19 nt, Artificial Sequence
  Description of Artificial Sequence: Synthetic oligonucleotide
uuauucucaaaguugcaua

SEQ ID NO: 2483427 - RNA, 19 nt, Artificial Sequence
  Description of Artificial Sequence: Synthetic oligonucleotide
agagcauauuuacaaauaa

SEQ ID NO: 2483428 - RNA, 19 nt, Artificial Sequence
  Description of Artificial Sequence: Synthetic oligonucleotide
acacucauaccagagcagc

SEQ ID NO: 2483429 - RNA, 19 nt, Artificial Sequence
  Description of Artificial Sequence: Synthetic oligonucleotide
acacgaugagacuuaaaug

SEQ ID NO: 2483430 - RNA, 19 nt, Artificial Sequence
  Description of Artificial Sequence: Synthetic oligonucleotide
uggaaauggaaggucuugg

SEQ ID NO: 2483431 - RNA, 19 nt, Artificial Sequence
  Description of Artificial Sequence: Synthetic oligonucleotide
uuuagucacucacgagggg

SEQ ID NO: 2483432 - RNA, 19 nt, Artificial Sequence
  Description of Artificial Sequence: Synthetic oligonucleotide
uuaagagcauauuuacaaa

SEQ ID NO: 2483433 - RNA, 19 nt, Artificial Sequence
  Description of Artificial Sequence: Synthetic oligonucleotide
uugcauaugucccucugac

SEQ ID NO: 2483434 - RNA, 19 nt, Artificial Sequence
  Description of Artificial Sequence: Synthetic oligonucleotide
uuuauucucaaaguugcau

SEQ ID NO: 2483435 - RNA, 19 nt, Artificial Sequence
  Description of Artificial Sequence: Synthetic oligonucleotide
uggagggugaguuuggaaa

SEQ ID NO: 2483436 - RNA, 19 nt, Artificial Sequence
  Description of Artificial Sequence: Synthetic oligonucleotide
aggucugacaagucucccc

SEQ ID NO: 2483437 - RNA, 19 nt, Artificial Sequence
  Description of Artificial Sequence: Synthetic oligonucleotide
gacaguaaacaaaggcacg

SEQ ID NO: 2483438 - RNA, 19 nt, Artificial Sequence
  Description of Artificial Sequence: Synthetic oligonucleotide
guaaacaaaggcacgugag

SEQ ID NO: 2483439 - RNA, 19 nt, Artificial Sequence
  Description of Artificial Sequence: Synthetic oligonucleotide
agaagcaggaacacgauga

SEQ ID NO: 2483440 - RNA, 19 nt, Artificial Sequence
  Description of Artificial Sequence: Synthetic oligonucleotide
ggaagguucauagaaaaug

SEQ ID NO: 2483441 - RNA, 19 nt, Artificial Sequence
  Description of Artificial Sequence: Synthetic oligonucleotide
auuaaauuguauacagugu

SEQ ID NO: 2483442 - RNA, 19 nt, Artificial Sequence
  Description of Artificial Sequence: Synthetic oligonucleotide
aaugguccagaucucccca

SEQ ID NO: 2483443 - RNA, 19 nt, Artificial Sequence
  Description of Artificial Sequence: Synthetic oligonucleotide
gagacuuaaaugugacaug

SEQ ID NO: 2483444 - RNA, 19 nt, Artificial Sequence
  Description of Artificial Sequence: Synthetic oligonucleotide
gagguuuuagucacucacg

SEQ ID NO: 2483445 - RNA, 19 nt, Artificial Sequence
  Description of Artificial Sequence: Synthetic oligonucleotide
aagagccugugugaagccc

SEQ ID NO: 2483446 - RNA, 19 nt, Artificial Sequence
  Description of Artificial Sequence: Synthetic oligonucleotide
aggacaguaaacaaaggca

SEQ ID NO: 2483447 - RNA, 19 nt, Artificial Sequence
  Description of Artificial Sequence: Synthetic oligonucleotide
cuuggugccacgagggcgg

SEQ ID NO: 2483448 - RNA, 19 nt, Artificial Sequence
  Description of Artificial Sequence: Synthetic oligonucleotide
cacgaugagacuuaaaugu

SEQ ID NO: 2483449 - RNA, 19 nt, Artificial Sequence
  Description of Artificial Sequence: Synthetic oligonucleotide
aguuuggaaauggaagguc

SEQ ID NO: 2483450 - RNA, 19 nt, Artificial Sequence
  Description of Artificial Sequence: Synthetic oligonucleotide
agguuuuagucacucacga

SEQ ID NO: 2483451 - RNA, 19 nt, Artificial Sequence
  Description of Artificial Sequence: Synthetic oligonucleotide
ucagcuccaacauggcaag

SEQ ID NO: 2483452 - RNA, 19 nt, Artificial Sequence
  Description of Artificial Sequence: Synthetic oligonucleotide
gaugagacuuaaaugugac

SEQ ID NO: 2483453 - RNA, 19 nt, Artificial Sequence
  Description of Artificial Sequence: Synthetic oligonucleotide
uacacgauguuucuauuuu

SEQ ID NO: 2483454 - RNA, 19 nt, Artificial Sequence
  Description of Artificial Sequence: Synthetic oligonucleotide
uuagucacucacgagggga

SEQ ID NO: 2483455 - RNA, 19 nt, Artificial Sequence
  Description of Artificial Sequence: Synthetic oligonucleotide
uaaguaccaucacauucca

SEQ ID NO: 2483456 - RNA, 19 nt, Artificial Sequence
  Description of Artificial Sequence: Synthetic oligonucleotide
gaagcaggaacacgaugag

SEQ ID NO: 2483457 - RNA, 19 nt, Artificial Sequence
  Description of Artificial Sequence: Synthetic oligonucleotide
auggagauuguaguggaag

SEQ ID NO: 2483458 - RNA, 19 nt, Artificial Sequence
  Description of Artificial Sequence: Synthetic oligonucleotide
aucacauuccauuuucuua

SEQ ID NO: 2483459 - RNA, 19 nt, Artificial Sequence
  Description of Artificial Sequence: Synthetic oligonucleotide
gacaagucuccccacacuc

SEQ ID NO: 2483460 - RNA, 19 nt, Artificial Sequence
  Description of Artificial Sequence: Synthetic oligonucleotide
agauuguaguggaagguuc

SEQ ID NO: 2483461 - RNA, 19 nt, Artificial Sequence
  Description of Artificial Sequence: Synthetic oligonucleotide
augucccucugacaccucc

SEQ ID NO: 2483462 - RNA, 19 nt, Artificial Sequence
  Description of Artificial Sequence: Synthetic oligonucleotide
ugugucuacacuucauuuu

SEQ ID NO: 2483463 - RNA, 19 nt, Artificial Sequence
  Description of Artificial Sequence: Synthetic oligonucleotide
ucauaccagagcagcuagg

SEQ ID NO: 2483464 - RNA, 19 nt, Artificial Sequence
  Description of Artificial Sequence: Synthetic oligonucleotide
aggucuuggugccacgagg

SEQ ID NO: 2483465 - RNA, 19 nt, Artificial Sequence
  Description of Artificial Sequence: Synthetic oligonucleotide
gucagaucccugcuggagg

SEQ ID NO: 2483466 - RNA, 19 nt, Artificial Sequence
  Description of Artificial Sequence: Synthetic oligonucleotide
agugugcucagcuccaaca

SEQ ID NO: 2483467 - RNA, 19 nt, Artificial Sequence
  Description of Artificial Sequence: Synthetic oligonucleotide
uuguauacagugugucuac

SEQ ID NO: 2483468 - RNA, 19 nt, Artificial Sequence
  Description of Artificial Sequence: Synthetic oligonucleotide
acaguaaacaaaggcacgu

SEQ ID NO: 2483469 - RNA, 19 nt, Artificial Sequence
  Description of Artificial Sequence: Synthetic oligonucleotide
cauaccagagcagcuaggc

SEQ ID NO: 2483470 - RNA, 19 nt, Artificial Sequence
  Description of Artificial Sequence: Synthetic oligonucleotide
agcagcuaggcugaaagug

SEQ ID NO: 2483471 - RNA, 19 nt, Artificial Sequence
  Description of Artificial Sequence: Synthetic oligonucleotide
cuuaaauaacaaaauccua

SEQ ID NO: 2483472 - RNA, 19 nt, Artificial Sequence
  Description of Artificial Sequence: Synthetic oligonucleotide
guugacgacagucccuaag

SEQ ID NO: 2483473 - RNA, 19 nt, Artificial Sequence
  Description of Artificial Sequence: Synthetic oligonucleotide
caucuuguuggcucuggcc

SEQ ID NO: 2483474 - RNA, 19 nt, Artificial Sequence
  Description of Artificial Sequence: Synthetic oligonucleotide
aaaggauuccuugcauaug

SEQ ID NO: 2483475 - RNA, 19 nt, Artificial Sequence
  Description of Artificial Sequence: Synthetic oligonucleotide
aaggucuuggugccacgag

SEQ ID NO: 2483476 - RNA, 19 nt, Artificial Sequence
  Description of Artificial Sequence: Synthetic oligonucleotide
caaauaaagcguuguuguc

SEQ ID NO: 2483477 - RNA, 19 nt, Artificial Sequence
  Description of Artificial Sequence: Synthetic oligonucleotide
gauuccggucaucuuguug

SEQ ID NO: 2483478 - RNA, 19 nt, Artificial Sequence
  Description of Artificial Sequence: Synthetic oligonucleotide
aacaaaggcacgugagguu

SEQ ID NO: 2483479 - RNA, 19 nt, Artificial Sequence
  Description of Artificial Sequence: Synthetic oligonucleotide
auacagugugucuacacuu

SEQ ID NO: 2483480 - RNA, 19 nt, Artificial Sequence
  Description of Artificial Sequence: Synthetic oligonucleotide
acgacagucccuaaggucu

SEQ ID NO: 2483481 - RNA, 19 nt, Artificial Sequence
  Description of Artificial Sequence: Synthetic oligonucleotide
uuucuauuuuauucucaaa

SEQ ID NO: 2483482 - RNA, 19 nt, Artificial Sequence
  Description of Artificial Sequence: Synthetic oligonucleotide
cucauaccagagcagcuag

SEQ ID NO: 2483483 - RNA, 19 nt, Artificial Sequence
  Description of Artificial Sequence: Synthetic oligonucleotide
agagccugugugaagcccc

SEQ ID NO: 2483484 - RNA, 19 nt, Artificial Sequence
  Description of Artificial Sequence: Synthetic oligonucleotide
auuccuugcauaugucccu

SEQ ID NO: 2483485 - RNA, 19 nt, Artificial Sequence
  Description of Artificial Sequence: Synthetic oligonucleotide
agguucuguuggcagacag

SEQ ID NO: 2483486 - RNA, 19 nt, Artificial Sequence
  Description of Artificial Sequence: Synthetic oligonucleotide
guauacagugugucuacac

SEQ ID NO: 2483487 - RNA, 19 nt, Artificial Sequence
  Description of Artificial Sequence: Synthetic oligonucleotide
uuggaaauggaaggucuug

SEQ ID NO: 2483488 - RNA, 19 nt, Artificial Sequence
  Description of Artificial Sequence: Synthetic oligonucleotide
uuuggaaauggaaggucuu

SEQ ID NO: 2483489 - RNA, 19 nt, Artificial Sequence
  Description of Artificial Sequence: Synthetic oligonucleotide
uaggcugaaaguggccugg

SEQ ID NO: 2483490 - RNA, 19 nt, Artificial Sequence
  Description of Artificial Sequence: Synthetic oligonucleotide
uggagguagggugaggaca

SEQ ID NO: 2483491 - RNA, 19 nt, Artificial Sequence
  Description of Artificial Sequence: Synthetic oligonucleotide
uuacacgauguuucuauuu

SEQ ID NO: 2483492 - RNA, 19 nt, Artificial Sequence
  Description of Artificial Sequence: Synthetic oligonucleotide
auuuacaaauaaagcguug

SEQ ID NO: 2483493 - RNA, 19 nt, Artificial Sequence
  Description of Artificial Sequence: Synthetic oligonucleotide
aagguucauagaaaauggu

SEQ ID NO: 2483494 - RNA, 19 nt, Artificial Sequence
  Description of Artificial Sequence: Synthetic oligonucleotide
gacgacagucccuaagguc

SEQ ID NO: 2483495 - RNA, 19 nt, Artificial Sequence
  Description of Artificial Sequence: Synthetic oligonucleotide
caacaguaaaauaacauuu

SEQ ID NO: 2483496 - RNA, 19 nt, Artificial Sequence
  Description of Artificial Sequence: Synthetic oligonucleotide
uguccaaagucagaucccu

SEQ ID NO: 2483497 - RNA, 19 nt, Artificial Sequence
  Description of Artificial Sequence: Synthetic oligonucleotide
gacaagagccugugugaag

SEQ ID NO: 2483498 - RNA, 19 nt, Artificial Sequence
  Description of Artificial Sequence: Synthetic oligonucleotide
gaaaggauuccuugcauau

SEQ ID NO: 2483499 - RNA, 19 nt, Artificial Sequence
  Description of Artificial Sequence: Synthetic oligonucleotide
ggacaguaaacaaaggcac

SEQ ID NO: 2483500 - RNA, 19 nt, Artificial Sequence
  Description of Artificial Sequence: Synthetic oligonucleotide
ucccuaaggucuccagaag

SEQ ID NO: 2483501 - RNA, 19 nt, Artificial Sequence
  Description of Artificial Sequence: Synthetic oligonucleotide
uggcucuggcccuugagcu

SEQ ID NO: 2483502 - RNA, 19 nt, Artificial Sequence
  Description of Artificial Sequence: Synthetic oligonucleotide
ugacgacagucccuaaggu

SEQ ID NO: 2483503 - RNA, 19 nt, Artificial Sequence
  Description of Artificial Sequence: Synthetic oligonucleotide
augagacuuaaaugugaca

SEQ ID NO: 2483504 - RNA, 19 nt, Artificial Sequence
  Description of Artificial Sequence: Synthetic oligonucleotide
uggaagguucauagaaaau

SEQ ID NO: 2483505 - RNA, 19 nt, Artificial Sequence
  Description of Artificial Sequence: Synthetic oligonucleotide
ugcauaugucccucugaca

SEQ ID NO: 2483506 - RNA, 19 nt, Artificial Sequence
  Description of Artificial Sequence: Synthetic oligonucleotide
gauuguaguggaagguuca

SEQ ID NO: 2483507 - RNA, 19 nt, Artificial Sequence
  Description of Artificial Sequence: Synthetic oligonucleotide
auaugucccucugacaccu

SEQ ID NO: 2483508 - RNA, 19 nt, Artificial Sequence
  Description of Artificial Sequence: Synthetic oligonucleotide
aagcguuguuguccaaagu

SEQ ID NO: 2483509 - RNA, 19 nt, Artificial Sequence
  Description of Artificial Sequence: Synthetic oligonucleotide
cgauguuucuauuuuauuc

SEQ ID NO: 2483510 - RNA, 19 nt, Artificial Sequence
  Description of Artificial Sequence: Synthetic oligonucleotide
ugcuggagggugaguuugg

SEQ ID NO: 2483511 - RNA, 19 nt, Artificial Sequence
  Description of Artificial Sequence: Synthetic oligonucleotide
uaaagcguuguuguccaaa

SEQ ID NO: 2483512 - RNA, 19 nt, Artificial Sequence
  Description of Artificial Sequence: Synthetic oligonucleotide
ucuuguuggcucuggcccu

SEQ ID NO: 2483513 - RNA, 19 nt, Artificial Sequence
  Description of Artificial Sequence: Synthetic oligonucleotide
cacacucauaccagagcag

SEQ ID NO: 2483514 - RNA, 19 nt, Artificial Sequence
  Description of Artificial Sequence: Synthetic oligonucleotide
cuaaggucuccagaagcag

SEQ ID NO: 2483515 - RNA, 19 nt, Artificial Sequence
  Description of Artificial Sequence: Synthetic oligonucleotide
uguauacagugugucuaca

SEQ ID NO: 2483516 - RNA, 19 nt, Artificial Sequence
  Description of Artificial Sequence: Synthetic oligonucleotide
agucccuaaggucuccaga

SEQ ID NO: 2483517 - RNA, 19 nt, Artificial Sequence
  Description of Artificial Sequence: Synthetic oligonucleotide
ucccugugcaggcaggaaa

SEQ ID NO: 2483518 - RNA, 19 nt, Artificial Sequence
  Description of Artificial Sequence: Synthetic oligonucleotide
cagcuaggcugaaaguggc

SEQ ID NO: 2483519 - RNA, 19 nt, Artificial Sequence
  Description of Artificial Sequence: Synthetic oligonucleotide
aaaguggccuggagguagg

SEQ ID NO: 2483520 - RNA, 19 nt, Artificial Sequence
  Description of Artificial Sequence: Synthetic oligonucleotide
uguuguccaaagucagauc

SEQ ID NO: 2483521 - RNA, 19 nt, Artificial Sequence
  Description of Artificial Sequence: Synthetic oligonucleotide
aaauuacacgauguuucua

SEQ ID NO: 2483522 - RNA, 19 nt, Artificial Sequence
  Description of Artificial Sequence: Synthetic oligonucleotide
ugucuacacuucauuuuau

SEQ ID NO: 2483523 - RNA, 19 nt, Artificial Sequence
  Description of Artificial Sequence: Synthetic oligonucleotide
ggcaggaaaggauuccuug

SEQ ID NO: 2483524 - RNA, 19 nt, Artificial Sequence
  Description of Artificial Sequence: Synthetic oligonucleotide
ugcaggcaggaaaggauuc

SEQ ID NO: 2483525 - RNA, 19 nt, Artificial Sequence
  Description of Artificial Sequence: Synthetic oligonucleotide
ugucccucugacaccuccc

SEQ ID NO: 2483526 - RNA, 19 nt, Artificial Sequence
  Description of Artificial Sequence: Synthetic oligonucleotide
aguaaaaguuaaguaccau

SEQ ID NO: 2483527 - RNA, 19 nt, Artificial Sequence
  Description of Artificial Sequence: Synthetic oligonucleotide
aagucagaucccugcugga

SEQ ID NO: 2483528 - RNA, 19 nt, Artificial Sequence
  Description of Artificial Sequence: Synthetic oligonucleotide
cugaaaguggccuggaggu

SEQ ID NO: 2483529 - RNA, 19 nt, Artificial Sequence
  Description of Artificial Sequence: Synthetic oligonucleotide
gguuuuagucacucacgag

SEQ ID NO: 2483530 - RNA, 19 nt, Artificial Sequence
  Description of Artificial Sequence: Synthetic oligonucleotide
cuaggcugaaaguggccug

SEQ ID NO: 2483531 - RNA, 19 nt, Artificial Sequence
  Description of Artificial Sequence: Synthetic oligonucleotide
agucagaucccugcuggag

SEQ ID NO: 2483532 - RNA, 19 nt, Artificial Sequence
  Description of Artificial Sequence: Synthetic oligonucleotide
cuauuuuauucucaaaguu

SEQ ID NO: 2483533 - RNA, 19 nt, Artificial Sequence
  Description of Artificial Sequence: Synthetic oligonucleotide
guccagaucuccccagaag

SEQ ID NO: 2483534 - RNA, 19 nt, Artificial Sequence
  Description of Artificial Sequence: Synthetic oligonucleotide
acgaugagacuuaaaugug

SEQ ID NO: 2483535 - RNA, 19 nt, Artificial Sequence
  Description of Artificial Sequence: Synthetic oligonucleotide
agggauggcagcucccugu

SEQ ID NO: 2483536 - RNA, 19 nt, Artificial Sequence
  Description of Artificial Sequence: Synthetic oligonucleotide
aggaaaggauuccuugcau

SEQ ID NO: 2483537 - RNA, 19 nt, Artificial Sequence
  Description of Artificial Sequence: Synthetic oligonucleotide
uagucacucacgaggggau

SEQ ID NO: 2483538 - RNA, 19 nt, Artificial Sequence
  Description of Artificial Sequence: Synthetic oligonucleotide
cagaucuccccagaagccc

SEQ ID NO: 2483539 - RNA, 19 nt, Artificial Sequence
  Description of Artificial Sequence: Synthetic oligonucleotide
ugcauauuaagagcauauu

SEQ ID NO: 2483540 - RNA, 19 nt, Artificial Sequence
  Description of Artificial Sequence: Synthetic oligonucleotide
auuacacgauguuucuauu

SEQ ID NO: 2483541 - RNA, 19 nt, Artificial Sequence
  Description of Artificial Sequence: Synthetic oligonucleotide
cagaagcaggaacacgaug

SEQ ID NO: 2483542 - RNA, 19 nt, Artificial Sequence
  Description of Artificial Sequence: Synthetic oligonucleotide
ggcacgugagguuuuaguc

SEQ ID NO: 2483543 - RNA, 19 nt, Artificial Sequence
  Description of Artificial Sequence: Synthetic oligonucleotide
cuccccacacucauaccag

SEQ ID NO: 2483544 - RNA, 19 nt, Artificial Sequence
  Description of Artificial Sequence: Synthetic oligonucleotide
acaaaggcacgugagguuu

SEQ ID NO: 2483545 - RNA, 19 nt, Artificial Sequence
  Description of Artificial Sequence: Synthetic oligonucleotide
acgagggcggcagggaugg

SEQ ID NO: 2483546 - RNA, 19 nt, Artificial Sequence
  Description of Artificial Sequence: Synthetic oligonucleotide
caagagccugugugaagcc

SEQ ID NO: 2483547 - RNA, 19 nt, Artificial Sequence
  Description of Artificial Sequence: Synthetic oligonucleotide
uggcaagacaagagccugu

SEQ ID NO: 2483548 - RNA, 19 nt, Artificial Sequence
  Description of Artificial Sequence: Synthetic oligonucleotide
guagggugaggacaguaaa

SEQ ID NO: 2483549 - RNA, 19 nt, Artificial Sequence
  Description of Artificial Sequence: Synthetic oligonucleotide
caggaaaggauuccuugca

SEQ ID NO: 2483550 - RNA, 19 nt, Artificial Sequence
  Description of Artificial Sequence: Synthetic oligonucleotide
acgauguuucuauuuuauu

SEQ ID NO: 2483551 - RNA, 19 nt, Artificial Sequence
  Description of Artificial Sequence: Synthetic oligonucleotide
uaccaucacauuccauuuu

SEQ ID NO: 2483552 - RNA, 19 nt, Artificial Sequence
  Description of Artificial Sequence: Synthetic oligonucleotide
agcuaggcugaaaguggcc

SEQ ID NO: 2483553 - RNA, 19 nt, Artificial Sequence
  Description of Artificial Sequence: Synthetic oligonucleotide
guaguggaagguucauaga

SEQ ID NO: 2483554 - RNA, 19 nt, Artificial Sequence
  Description of Artificial Sequence: Synthetic oligonucleotide
acacgauguuucuauuuua

SEQ ID NO: 2483555 - RNA, 19 nt, Artificial Sequence
  Description of Artificial Sequence: Synthetic oligonucleotide
aguggaagguucauagaaa

SEQ ID NO: 2483556 - RNA, 19 nt, Artificial Sequence
  Description of Artificial Sequence: Synthetic oligonucleotide
guuuggaaauggaaggucu

SEQ ID NO: 2483557 - RNA, 19 nt, Artificial Sequence
  Description of Artificial Sequence: Synthetic oligonucleotide
uucuguuggcagacagggu

SEQ ID NO: 2483558 - RNA, 19 nt, Artificial Sequence
  Description of Artificial Sequence: Synthetic oligonucleotide
ggagguagggugaggacag

SEQ ID NO: 2483559 - RNA, 19 nt, Artificial Sequence
  Description of Artificial Sequence: Synthetic oligonucleotide
cuacacuucauuuuauauu

SEQ ID NO: 2483560 - RNA, 19 nt, Artificial Sequence
  Description of Artificial Sequence: Synthetic oligonucleotide
guuggcucuggcccuugag

SEQ ID NO: 2483561 - RNA, 19 nt, Artificial Sequence
  Description of Artificial Sequence: Synthetic oligonucleotide
caguaaacaaaggcacgug

SEQ ID NO: 2483562 - RNA, 19 nt, Artificial Sequence
  Description of Artificial Sequence: Synthetic oligonucleotide
ggucugacaagucucccca

SEQ ID NO: 2483563 - RNA, 19 nt, Artificial Sequence
  Description of Artificial Sequence: Synthetic oligonucleotide
ugguugacgacagucccua

SEQ ID NO: 2483564 - RNA, 19 nt, Artificial Sequence
  Description of Artificial Sequence: Synthetic oligonucleotide
gacuuaaaugugacaugca

SEQ ID NO: 2483565 - RNA, 19 nt, Artificial Sequence
  Description of Artificial Sequence: Synthetic oligonucleotide
uuccggucaucuuguuggc

SEQ ID NO: 2483566 - RNA, 19 nt, Artificial Sequence
  Description of Artificial Sequence: Synthetic oligonucleotide
acagggugggguguggcug

SEQ ID NO: 2483567 - RNA, 19 nt, Artificial Sequence
  Description of Artificial Sequence: Synthetic oligonucleotide
ccugguugacgacaguccc

SEQ ID NO: 2483568 - RNA, 19 nt, Artificial Sequence
  Description of Artificial Sequence: Synthetic oligonucleotide
gguucuguuggcagacagg

SEQ ID NO: 2483569 - RNA, 19 nt, Artificial Sequence
  Description of Artificial Sequence: Synthetic oligonucleotide
guugcauauuaagagcaua

SEQ ID NO: 2483570 - RNA, 19 nt, Artificial Sequence
  Description of Artificial Sequence: Synthetic oligonucleotide
cauagaaaaugguccagau

SEQ ID NO: 2483571 - RNA, 19 nt, Artificial Sequence
  Description of Artificial Sequence: Synthetic oligonucleotide
agacaagagccugugugaa

SEQ ID NO: 2483572 - RNA, 19 nt, Artificial Sequence
  Description of Artificial Sequence: Synthetic oligonucleotide
acucauaccagagcagcua

SEQ ID NO: 2483573 - RNA, 19 nt, Artificial Sequence
  Description of Artificial Sequence: Synthetic oligonucleotide
acucacgaggggauuccgg

SEQ ID NO: 2483574 - RNA, 19 nt, Artificial Sequence
  Description of Artificial Sequence: Synthetic oligonucleotide
ccagaucuccccagaagcc

SEQ ID NO: 2483575 - RNA, 19 nt, Artificial Sequence
  Description of Artificial Sequence: Synthetic oligonucleotide
gucuacacuucauuuuaua

SEQ ID NO: 2483576 - RNA, 19 nt, Artificial Sequence
  Description of Artificial Sequence: Synthetic oligonucleotide
aggauuccuugcauauguc

SEQ ID NO: 2483577 - RNA, 19 nt, Artificial Sequence
  Description of Artificial Sequence: Synthetic oligonucleotide
cacgaggggauuccgguca

SEQ ID NO: 2483578 - RNA, 19 nt, Artificial Sequence
  Description of Artificial Sequence: Synthetic oligonucleotide
auuguaguggaagguucau

SEQ ID NO: 2483579 - RNA, 19 nt, Artificial Sequence
  Description of Artificial Sequence: Synthetic oligonucleotide
gaguuuggaaauggaaggu

SEQ ID NO: 2483580 - RNA, 19 nt, Artificial Sequence
  Description of Artificial Sequence: Synthetic oligonucleotide
cuggagguagggugaggac

SEQ ID NO: 2483581 - RNA, 19 nt, Artificial Sequence
  Description of Artificial Sequence: Synthetic oligonucleotide
ggugaggacaguaaacaaa

SEQ ID NO: 2483582 - RNA, 19 nt, Artificial Sequence
  Description of Artificial Sequence: Synthetic oligonucleotide
uuguaguggaagguucaua

SEQ ID NO: 2483583 - RNA, 19 nt, Artificial Sequence
  Description of Artificial Sequence: Synthetic oligonucleotide
ggugggguguggcuggcag

SEQ ID NO: 2483584 - RNA, 19 nt, Artificial Sequence
  Description of Artificial Sequence: Synthetic oligonucleotide
agaucccugcuggagggug

SEQ ID NO: 2483585 - RNA, 19 nt, Artificial Sequence
  Description of Artificial Sequence: Synthetic oligonucleotide
aguugcauauuaagagcau

SEQ ID NO: 2483586 - RNA, 19 nt, Artificial Sequence
  Description of Artificial Sequence: Synthetic oligonucleotide
ucccucugacaccucccac

SEQ ID NO: 2483587 - RNA, 19 nt, Artificial Sequence
  Description of Artificial Sequence: Synthetic oligonucleotide
ccacacucauaccagagca

SEQ ID NO: 2483588 - RNA, 19 nt, Artificial Sequence
  Description of Artificial Sequence: Synthetic oligonucleotide
cagucccuaaggucuccag

SEQ ID NO: 2483589 - RNA, 19 nt, Artificial Sequence
  Description of Artificial Sequence: Synthetic oligonucleotide
gugagguuuuagucacuca

SEQ ID NO: 2483590 - RNA, 19 nt, Artificial Sequence
  Description of Artificial Sequence: Synthetic oligonucleotide
ccuaaggucuccagaagca

SEQ ID NO: 2483591 - RNA, 19 nt, Artificial Sequence
  Description of Artificial Sequence: Synthetic oligonucleotide
cacgagggcggcagggaug

SEQ ID NO: 2483592 - RNA, 19 nt, Artificial Sequence
  Description of Artificial Sequence: Synthetic oligonucleotide
cccugguugacgacagucc

SEQ ID NO: 2483593 - RNA, 19 nt, Artificial Sequence
  Description of Artificial Sequence: Synthetic oligonucleotide
cacgauguuucuauuuuau

SEQ ID NO: 2483594 - RNA, 19 nt, Artificial Sequence
  Description of Artificial Sequence: Synthetic oligonucleotide
gaagccccugguugacgac

SEQ ID NO: 2483595 - RNA, 19 nt, Artificial Sequence
  Description of Artificial Sequence: Synthetic oligonucleotide
ggcaagacaagagccugug

SEQ ID NO: 2483596 - RNA, 19 nt, Artificial Sequence
  Description of Artificial Sequence: Synthetic oligonucleotide
ugaaaguggccuggaggua

SEQ ID NO: 2483597 - RNA, 19 nt, Artificial Sequence
  Description of Artificial Sequence: Synthetic oligonucleotide
guaccaucacauuccauuu

SEQ ID NO: 2483598 - RNA, 19 nt, Artificial Sequence
  Description of Artificial Sequence: Synthetic oligonucleotide
ccagccucagccagugugc

SEQ ID NO: 2483599 - RNA, 19 nt, Artificial Sequence
  Description of Artificial Sequence: Synthetic oligonucleotide
guuggcagacagggugggg

SEQ ID NO: 2483600 - RNA, 19 nt, Artificial Sequence
  Description of Artificial Sequence: Synthetic oligonucleotide
ggugccacgagggcggcag

SEQ ID NO: 2483601 - RNA, 19 nt, Artificial Sequence
  Description of Artificial Sequence: Synthetic oligonucleotide
gucacucacgaggggauuc

SEQ ID NO: 2483602 - RNA, 19 nt, Artificial Sequence
  Description of Artificial Sequence: Synthetic oligonucleotide
cucccacugucuccugccc

SEQ ID NO: 2483603 - RNA, 19 nt, Artificial Sequence
  Description of Artificial Sequence: Synthetic oligonucleotide
gcuccaacauggcaagaca

SEQ ID NO: 2483604 - RNA, 19 nt, Artificial Sequence
  Description of Artificial Sequence: Synthetic oligonucleotide
cccacacucauaccagagc

SEQ ID NO: 2483605 - RNA, 19 nt, Artificial Sequence
  Description of Artificial Sequence: Synthetic oligonucleotide
gauggagauuguaguggaa

SEQ ID NO: 2483606 - RNA, 19 nt, Artificial Sequence
  Description of Artificial Sequence: Synthetic oligonucleotide
gugugucuacacuucauuu

SEQ ID NO: 2483607 - RNA, 19 nt, Artificial Sequence
  Description of Artificial Sequence: Synthetic oligonucleotide
auaaagcguuguuguccaa

SEQ ID NO: 2483608 - RNA, 19 nt, Artificial Sequence
  Description of Artificial Sequence: Synthetic oligonucleotide
gaggggauuccggucaucu

SEQ ID NO: 2483609 - RNA, 19 nt, Artificial Sequence
  Description of Artificial Sequence: Synthetic oligonucleotide
ccggucaucuuguuggcuc

SEQ ID NO: 2483610 - RNA, 19 nt, Artificial Sequence
  Description of Artificial Sequence: Synthetic oligonucleotide
cuggcaggucugacaaguc

SEQ ID NO: 2483611 - RNA, 19 nt, Artificial Sequence
  Description of Artificial Sequence: Synthetic oligonucleotide
ggaaauggaaggucuuggu

SEQ ID NO: 2483612 - RNA, 19 nt, Artificial Sequence
  Description of Artificial Sequence: Synthetic oligonucleotide
aggaacacgaugagacuua

SEQ ID NO: 2483613 - RNA, 19 nt, Artificial Sequence
  Description of Artificial Sequence: Synthetic oligonucleotide
gcguuguuguccaaaguca

SEQ ID NO: 2483614 - RNA, 19 nt, Artificial Sequence
  Description of Artificial Sequence: Synthetic oligonucleotide
cacucacgaggggauuccg

SEQ ID NO: 2483615 - RNA, 19 nt, Artificial Sequence
  Description of Artificial Sequence: Synthetic oligonucleotide
cucacgaggggauuccggu

SEQ ID NO: 2483616 - RNA, 19 nt, Artificial Sequence
  Description of Artificial Sequence: Synthetic oligonucleotide
aaguaccaucacauuccau

SEQ ID NO: 2483617 - RNA, 19 nt, Artificial Sequence
  Description of Artificial Sequence: Synthetic oligonucleotide
ggcugaaaguggccuggag

SEQ ID NO: 2483618 - RNA, 19 nt, Artificial Sequence
  Description of Artificial Sequence: Synthetic oligonucleotide
cagugugcucagcuccaac

SEQ ID NO: 2483619 - RNA, 19 nt, Artificial Sequence
  Description of Artificial Sequence: Synthetic oligonucleotide
uguggcuggcaggucugac

SEQ ID NO: 2483620 - RNA, 19 nt, Artificial Sequence
  Description of Artificial Sequence: Synthetic oligonucleotide
uccggucaucuuguuggcu

SEQ ID NO: 2483621 - RNA, 19 nt, Artificial Sequence
  Description of Artificial Sequence: Synthetic oligonucleotide
gucuccccacacucauacc

SEQ ID NO: 2483622 - RNA, 19 nt, Artificial Sequence
  Description of Artificial Sequence: Synthetic oligonucleotide
cagcucccugugcaggcag

SEQ ID NO: 2483623 - RNA, 19 nt, Artificial Sequence
  Description of Artificial Sequence: Synthetic oligonucleotide
caucacauuccauuuucuu

SEQ ID NO: 2483624 - RNA, 19 nt, Artificial Sequence
  Description of Artificial Sequence: Synthetic oligonucleotide
gggauggcagcucccugug

SEQ ID NO: 2483625 - RNA, 19 nt, Artificial Sequence
  Description of Artificial Sequence: Synthetic oligonucleotide
cugugcaggcaggaaagga

SEQ ID NO: 2483626 - RNA, 19 nt, Artificial Sequence
  Description of Artificial Sequence: Synthetic oligonucleotide
cgaugagacuuaaauguga

SEQ ID NO: 2483627 - RNA, 19 nt, Artificial Sequence
  Description of Artificial Sequence: Synthetic oligonucleotide
ccucccacugucuccugcc

SEQ ID NO: 2483628 - RNA, 19 nt, Artificial Sequence
  Description of Artificial Sequence: Synthetic oligonucleotide
acagucccuaaggucucca

SEQ ID NO: 2483629 - RNA, 19 nt, Artificial Sequence
  Description of Artificial Sequence: Synthetic oligonucleotide
gcaggcaggaaaggauucc

SEQ ID NO: 2483630 - RNA, 19 nt, Artificial Sequence
  Description of Artificial Sequence: Synthetic oligonucleotide
ccuugcauaugucccucug

SEQ ID NO: 2483631 - RNA, 19 nt, Artificial Sequence
  Description of Artificial Sequence: Synthetic oligonucleotide
gagcagcuaggcugaaagu

SEQ ID NO: 2483632 - RNA, 19 nt, Artificial Sequence
  Description of Artificial Sequence: Synthetic oligonucleotide
agguagggugaggacagua

SEQ ID NO: 2483633 - RNA, 19 nt, Artificial Sequence
  Description of Artificial Sequence: Synthetic oligonucleotide
cuggagggugaguuuggaa

SEQ ID NO: 2483634 - RNA, 19 nt, Artificial Sequence
  Description of Artificial Sequence: Synthetic oligonucleotide
gguagggugaggacaguaa

SEQ ID NO: 2483635 - RNA, 19 nt, Artificial Sequence
  Description of Artificial Sequence: Synthetic oligonucleotide
ggagauuguaguggaaggu

SEQ ID NO: 2483636 - RNA, 19 nt, Artificial Sequence
  Description of Artificial Sequence: Synthetic oligonucleotide
agcucccugugcaggcagg

SEQ ID NO: 2483637 - RNA, 19 nt, Artificial Sequence
  Description of Artificial Sequence: Synthetic oligonucleotide
ggagggugaguuuggaaau

SEQ ID NO: 2483638 - RNA, 19 nt, Artificial Sequence
  Description of Artificial Sequence: Synthetic oligonucleotide
acacuucauuuuauauuuu

SEQ ID NO: 2483639 - RNA, 19 nt, Artificial Sequence
  Description of Artificial Sequence: Synthetic oligonucleotide
aggggauuccggucaucuu

SEQ ID NO: 2483640 - RNA, 19 nt, Artificial Sequence
  Description of Artificial Sequence: Synthetic oligonucleotide
gaacacgaugagacuuaaa

SEQ ID NO: 2483641 - RNA, 19 nt, Artificial Sequence
  Description of Artificial Sequence: Synthetic oligonucleotide
caagucuccccacacucau

SEQ ID NO: 2483642 - RNA, 19 nt, Artificial Sequence
  Description of Artificial Sequence: Synthetic oligonucleotide
acgaggggauuccggucau

SEQ ID NO: 2483643 - RNA, 19 nt, Artificial Sequence
  Description of Artificial Sequence: Synthetic oligonucleotide
cugguugacgacagucccu

SEQ ID NO: 2483644 - RNA, 19 nt, Artificial Sequence
  Description of Artificial Sequence: Synthetic oligonucleotide
caggaacacgaugagacuu

SEQ ID NO: 2483645 - RNA, 19 nt, Artificial Sequence
  Description of Artificial Sequence: Synthetic oligonucleotide
ggauggcagcucccugugc

SEQ ID NO: 2483646 - RNA, 19 nt, Artificial Sequence
  Description of Artificial Sequence: Synthetic oligonucleotide
gcuaggcugaaaguggccu

SEQ ID NO: 2483647 - RNA, 19 nt, Artificial Sequence
  Description of Artificial Sequence: Synthetic oligonucleotide
gcuggcaggucugacaagu

SEQ ID NO: 2483648 - RNA, 19 nt, Artificial Sequence
  Description of Artificial Sequence: Synthetic oligonucleotide
gugccacgagggcggcagg

SEQ ID NO: 2483649 - RNA, 19 nt, Artificial Sequence
  Description of Artificial Sequence: Synthetic oligonucleotide
aggcaggaaaggauuccuu

SEQ ID NO: 2483650 - RNA, 19 nt, Artificial Sequence
  Description of Artificial Sequence: Synthetic oligonucleotide
cgugagguuuuagucacuc

SEQ ID NO: 2483651 - RNA, 19 nt, Artificial Sequence
  Description of Artificial Sequence: Synthetic oligonucleotide
aggcugaaaguggccugga

SEQ ID NO: 2483652 - RNA, 19 nt, Artificial Sequence
  Description of Artificial Sequence: Synthetic oligonucleotide
uuggugccacgagggcggc

SEQ ID NO: 2483653 - RNA, 19 nt, Artificial Sequence
  Description of Artificial Sequence: Synthetic oligonucleotide
ggaacacgaugagacuuaa

SEQ ID NO: 2483654 - RNA, 19 nt, Artificial Sequence
  Description of Artificial Sequence: Synthetic oligonucleotide
gggugaguuuggaaaugga

SEQ ID NO: 2483655 - RNA, 19 nt, Artificial Sequence
  Description of Artificial Sequence: Synthetic oligonucleotide
gcagacaggguggggugug

SEQ ID NO: 2483656 - RNA, 19 nt, Artificial Sequence
  Description of Artificial Sequence: Synthetic oligonucleotide
cagugugucuacacuucau

SEQ ID NO: 2483657 - RNA, 19 nt, Artificial Sequence
  Description of Artificial Sequence: Synthetic oligonucleotide
caggcaggaaaggauuccu

SEQ ID NO: 2483658 - RNA, 19 nt, Artificial Sequence
  Description of Artificial Sequence: Synthetic oligonucleotide
ggguguggcuggcaggucu

SEQ ID NO: 2483659 - RNA, 19 nt, Artificial Sequence
  Description of Artificial Sequence: Synthetic oligonucleotide
acgugagguuuuagucacu

SEQ ID NO: 2483660 - RNA, 19 nt, Artificial Sequence
  Description of Artificial Sequence: Synthetic oligonucleotide
gcccuugagcuucuucuua

SEQ ID NO: 2483661 - RNA, 19 nt, Artificial Sequence
  Description of Artificial Sequence: Synthetic oligonucleotide
gcaagacaagagccugugu

SEQ ID NO: 2483662 - RNA, 19 nt, Artificial Sequence
  Description of Artificial Sequence: Synthetic oligonucleotide
caccucccacugucuccug

SEQ ID NO: 2483663 - RNA, 19 nt, Artificial Sequence
  Description of Artificial Sequence: Synthetic oligonucleotide
cagguucuguuggcagaca

SEQ ID NO: 2483664 - RNA, 19 nt, Artificial Sequence
  Description of Artificial Sequence: Synthetic oligonucleotide
cccucugacaccucccacu

SEQ ID NO: 2483665 - RNA, 19 nt, Artificial Sequence
  Description of Artificial Sequence: Synthetic oligonucleotide
ucccugcuggagggugagu

SEQ ID NO: 2483666 - RNA, 19 nt, Artificial Sequence
  Description of Artificial Sequence: Synthetic oligonucleotide
guguggcuggcaggucuga

SEQ ID NO: 2483667 - RNA, 19 nt, Artificial Sequence
  Description of Artificial Sequence: Synthetic oligonucleotide
cagagcagcuaggcugaaa

SEQ ID NO: 2483668 - RNA, 19 nt, Artificial Sequence
  Description of Artificial Sequence: Synthetic oligonucleotide
gguugacgacagucccuaa

SEQ ID NO: 2483669 - RNA, 19 nt, Artificial Sequence
  Description of Artificial Sequence: Synthetic oligonucleotide
cuacaacaaugagaauauu

SEQ ID NO: 2483670 - RNA, 19 nt, Artificial Sequence
  Description of Artificial Sequence: Synthetic oligonucleotide
cucugacaccucccacugu

SEQ ID NO: 2483671 - RNA, 19 nt, Artificial Sequence
  Description of Artificial Sequence: Synthetic oligonucleotide
cuuguuggcucuggcccuu

SEQ ID NO: 2483672 - RNA, 19 nt, Artificial Sequence
  Description of Artificial Sequence: Synthetic oligonucleotide
gcggcagggauggcagcuc

SEQ ID NO: 2483673 - RNA, 19 nt, Artificial Sequence
  Description of Artificial Sequence: Synthetic oligonucleotide
cagaucccugcuggagggu

SEQ ID NO: 2483674 - RNA, 19 nt, Artificial Sequence
  Description of Artificial Sequence: Synthetic oligonucleotide
ggauuccggucaucuuguu

SEQ ID NO: 2483675 - RNA, 19 nt, Artificial Sequence
  Description of Artificial Sequence: Synthetic oligonucleotide
cggucaucuuguuggcucu

SEQ ID NO: 2483676 - RNA, 19 nt, Artificial Sequence
  Description of Artificial Sequence: Synthetic oligonucleotide
ccacgagggcggcagggau

SEQ ID NO: 2483677 - RNA, 19 nt, Artificial Sequence
  Description of Artificial Sequence: Synthetic oligonucleotide
cgaggggauuccggucauc

SEQ ID NO: 2483678 - RNA, 19 nt, Artificial Sequence
  Description of Artificial Sequence: Synthetic oligonucleotide
aaagaaagcacguuuaacc

SEQ ID NO: 2483679 - RNA, 19 nt, Artificial Sequence
  Description of Artificial Sequence: Synthetic oligonucleotide
guucguaguaguuagacgg

SEQ ID NO: 2483680 - RNA, 19 nt, Artificial Sequence
  Description of Artificial Sequence: Synthetic oligonucleotide
uaggagaugaccaaugcag

SEQ ID NO: 2483681 - RNA, 19 nt, Artificial Sequence
  Description of Artificial Sequence: Synthetic oligonucleotide
aacaguucguaguaguuag

SEQ ID NO: 2483682 - RNA, 19 nt, Artificial Sequence
  Description of Artificial Sequence: Synthetic oligonucleotide
aaagcgacauagugcaggc

SEQ ID NO: 2483683 - RNA, 19 nt, Artificial Sequence
  Description of Artificial Sequence: Synthetic oligonucleotide
acauagugcaggcucaugc

SEQ ID NO: 2483684 - RNA, 19 nt, Artificial Sequence
  Description of Artificial Sequence: Synthetic oligonucleotide
ugaauccuggcucuguugg

SEQ ID NO: 2483685 - RNA, 19 nt, Artificial Sequence
  Description of Artificial Sequence: Synthetic oligonucleotide
agaugaccaaugcaggucc

SEQ ID NO: 2483686 - RNA, 19 nt, Artificial Sequence
  Description of Artificial Sequence: Synthetic oligonucleotide
aagaaagcacguuuaaccu

SEQ ID NO: 2483687 - RNA, 19 nt, Artificial Sequence
  Description of Artificial Sequence: Synthetic oligonucleotide
uuugcgacgacucuccuca

SEQ ID NO: 2483688 - RNA, 19 nt, Artificial Sequence
  Description of Artificial Sequence: Synthetic oligonucleotide
auccuuuucauccaugaag

SEQ ID NO: 2483689 - RNA, 19 nt, Artificial Sequence
  Description of Artificial Sequence: Synthetic oligonucleotide
aguuagacggagaagaccg

SEQ ID NO: 2483690 - RNA, 19 nt, Artificial Sequence
  Description of Artificial Sequence: Synthetic oligonucleotide
cuuggguauacuuaggcug

SEQ ID NO: 2483691 - RNA, 19 nt, Artificial Sequence
  Description of Artificial Sequence: Synthetic oligonucleotide
uuggguauacuuaggcugg

SEQ ID NO: 2483692 - RNA, 19 nt, Artificial Sequence
  Description of Artificial Sequence: Synthetic oligonucleotide
aguaguuagacggagaaga

SEQ ID NO: 2483693 - RNA, 19 nt, Artificial Sequence
  Description of Artificial Sequence: Synthetic oligonucleotide
cucgugucauuguagaugg

SEQ ID NO: 2483694 - RNA, 19 nt, Artificial Sequence
  Description of Artificial Sequence: Synthetic oligonucleotide
uagauggcugugaugaucc

SEQ ID NO: 2483695 - RNA, 19 nt, Artificial Sequence
  Description of Artificial Sequence: Synthetic oligonucleotide
aaagcggcuaugcagggcu

SEQ ID NO: 2483696 - RNA, 19 nt, Artificial Sequence
  Description of Artificial Sequence: Synthetic oligonucleotide
auccaugaagcuccggugc

SEQ ID NO: 2483697 - RNA, 19 nt, Artificial Sequence
  Description of Artificial Sequence: Synthetic oligonucleotide
cacaaagcggcuaugcagg

SEQ ID NO: 2483698 - RNA, 19 nt, Artificial Sequence
  Description of Artificial Sequence: Synthetic oligonucleotide
gaaagcgacauagugcagg

SEQ ID NO: 2483699 - RNA, 19 nt, Artificial Sequence
  Description of Artificial Sequence: Synthetic oligonucleotide
agcgacauagugcaggcuc

SEQ ID NO: 2483700 - RNA, 19 nt, Artificial Sequence
  Description of Artificial Sequence: Synthetic oligonucleotide
acuggcaucaggaugcacc

SEQ ID NO: 2483701 - RNA, 19 nt, Artificial Sequence
  Description of Artificial Sequence: Synthetic oligonucleotide
agcacuggcaucaggaugc

SEQ ID NO: 2483702 - RNA, 19 nt, Artificial Sequence
  Description of Artificial Sequence: Synthetic oligonucleotide
aauccuggcucuguuggcc

SEQ ID NO: 2483703 - RNA, 19 nt, Artificial Sequence
  Description of Artificial Sequence: Synthetic oligonucleotide
acucugugaaacugggccc

SEQ ID NO: 2483704 - RNA, 19 nt, Artificial Sequence
  Description of Artificial Sequence: Synthetic oligonucleotide
acuugguaaagaaagcacg

SEQ ID NO: 2483705 - RNA, 19 nt, Artificial Sequence
  Description of Artificial Sequence: Synthetic oligonucleotide
guuguguuuaugcugcugc

SEQ ID NO: 2483706 - RNA, 19 nt, Artificial Sequence
  Description of Artificial Sequence: Synthetic oligonucleotide
cuuccugaaagcgacauag

SEQ ID NO: 2483707 - RNA, 19 nt, Artificial Sequence
  Description of Artificial Sequence: Synthetic oligonucleotide
uucagcacuggcaucagga

SEQ ID NO: 2483708 - RNA, 19 nt, Artificial Sequence
  Description of Artificial Sequence: Synthetic oligonucleotide
agaaagcacguuuaaccuc

SEQ ID NO: 2483709 - RNA, 19 nt, Artificial Sequence
  Description of Artificial Sequence: Synthetic oligonucleotide
cuauccugggguacgaucc

SEQ ID NO: 2483710 - RNA, 19 nt, Artificial Sequence
  Description of Artificial Sequence: Synthetic oligonucleotide
acguuuaaccucuucagca

SEQ ID NO: 2483711 - RNA, 19 nt, Artificial Sequence
  Description of Artificial Sequence: Synthetic oligonucleotide
guaugccucauucagcucc

SEQ ID NO: 2483712 - RNA, 19 nt, Artificial Sequence
  Description of Artificial Sequence: Synthetic oligonucleotide
aacugugugucucuugggu

SEQ ID NO: 2483713 - RNA, 19 nt, Artificial Sequence
  Description of Artificial Sequence: Synthetic oligonucleotide
aguucguaguaguuagacg

SEQ ID NO: 2483714 - RNA, 19 nt, Artificial Sequence
  Description of Artificial Sequence: Synthetic oligonucleotide
ucauccaugaagcuccggu

SEQ ID NO: 2483715 - RNA, 19 nt, Artificial Sequence
  Description of Artificial Sequence: Synthetic oligonucleotide
cugaaagcgacauagugca

SEQ ID NO: 2483716 - RNA, 19 nt, Artificial Sequence
  Description of Artificial Sequence: Synthetic oligonucleotide
agcucuuuggacuugguaa

SEQ ID NO: 2483717 - RNA, 19 nt, Artificial Sequence
  Description of Artificial Sequence: Synthetic oligonucleotide
auauuugcgacgacucucc

SEQ ID NO: 2483718 - RNA, 19 nt, Artificial Sequence
  Description of Artificial Sequence: Synthetic oligonucleotide
uuuaaccucuucagcacug

SEQ ID NO: 2483719 - RNA, 19 nt, Artificial Sequence
  Description of Artificial Sequence: Synthetic oligonucleotide
agacggagaagaccgcugc

SEQ ID NO: 2483720 - RNA, 19 nt, Artificial Sequence
  Description of Artificial Sequence: Synthetic oligonucleotide
agguccaccuaagugaccc

SEQ ID NO: 2483721 - RNA, 19 nt, Artificial Sequence
  Description of Artificial Sequence: Synthetic oligonucleotide
agcugguggucauauuugc

SEQ ID NO: 2483722 - RNA, 19 nt, Artificial Sequence
  Description of Artificial Sequence: Synthetic oligonucleotide
gucucuuggguauacuuag

SEQ ID NO: 2483723 - RNA, 19 nt, Artificial Sequence
  Description of Artificial Sequence: Synthetic oligonucleotide
gaggcaguaccccaguacc

SEQ ID NO: 2483724 - RNA, 19 nt, Artificial Sequence
  Description of Artificial Sequence: Synthetic oligonucleotide
gaugauccgauccuuuuca

SEQ ID NO: 2483725 - RNA, 19 nt, Artificial Sequence
  Description of Artificial Sequence: Synthetic oligonucleotide
agcacguuuaaccucuuca

SEQ ID NO: 2483726 - RNA, 19 nt, Artificial Sequence
  Description of Artificial Sequence: Synthetic oligonucleotide
ugaaacugggcccaguauu

SEQ ID NO: 2483727 - RNA, 19 nt, Artificial Sequence
  Description of Artificial Sequence: Synthetic oligonucleotide
uauacuuaggcugggcucu

SEQ ID NO: 2483728 - RNA, 19 nt, Artificial Sequence
  Description of Artificial Sequence: Synthetic oligonucleotide
uggacuugguaaagaaagc

SEQ ID NO: 2483729 - RNA, 19 nt, Artificial Sequence
  Description of Artificial Sequence: Synthetic oligonucleotide
ucuuggguauacuuaggcu

SEQ ID NO: 2483730 - RNA, 19 nt, Artificial Sequence
  Description of Artificial Sequence: Synthetic oligonucleotide
ugggguacgaucccagggc

SEQ ID NO: 2483731 - RNA, 19 nt, Artificial Sequence
  Description of Artificial Sequence: Synthetic oligonucleotide
aaugcagguccaccuaagu

SEQ ID NO: 2483732 - RNA, 19 nt, Artificial Sequence
  Description of Artificial Sequence: Synthetic oligonucleotide
cucuuggguauacuuaggc

SEQ ID NO: 2483733 - RNA, 19 nt, Artificial Sequence
  Description of Artificial Sequence: Synthetic oligonucleotide
cauagugcaggcucaugcc

SEQ ID NO: 2483734 - RNA, 19 nt, Artificial Sequence
  Description of Artificial Sequence: Synthetic oligonucleotide
uguggccucacucugugaa

SEQ ID NO: 2483735 - RNA, 19 nt, Artificial Sequence
  Description of Artificial Sequence: Synthetic oligonucleotide
ugagcaggaggcaguaccc

SEQ ID NO: 2483736 - RNA, 19 nt, Artificial Sequence
  Description of Artificial Sequence: Synthetic oligonucleotide
ugucauuguagauggcugu

SEQ ID NO: 2483737 - RNA, 19 nt, Artificial Sequence
  Description of Artificial Sequence: Synthetic oligonucleotide
ucuguggcggcugagagaa

SEQ ID NO: 2483738 - RNA, 19 nt, Artificial Sequence
  Description of Artificial Sequence: Synthetic oligonucleotide
ucauauuugcgacgacucu

SEQ ID NO: 2483739 - RNA, 19 nt, Artificial Sequence
  Description of Artificial Sequence: Synthetic oligonucleotide
ucucuuggguauacuuagg

SEQ ID NO: 2483740 - RNA, 19 nt, Artificial Sequence
  Description of Artificial Sequence: Synthetic oligonucleotide
agagaagccgggugggagg

SEQ ID NO: 2483741 - RNA, 19 nt, Artificial Sequence
  Description of Artificial Sequence: Synthetic oligonucleotide
aucucggucagggugcagc

SEQ ID NO: 2483742 - RNA, 19 nt, Artificial Sequence
  Description of Artificial Sequence: Synthetic oligonucleotide
aacugggcccaguauuuug

SEQ ID NO: 2483743 - RNA, 19 nt, Artificial Sequence
  Description of Artificial Sequence: Synthetic oligonucleotide
uucguaguaguuagacgga

SEQ ID NO: 2483744 - RNA, 19 nt, Artificial Sequence
  Description of Artificial Sequence: Synthetic oligonucleotide
auuugcgacgacucuccuc

SEQ ID NO: 2483745 - RNA, 19 nt, Artificial Sequence
  Description of Artificial Sequence: Synthetic oligonucleotide
cuuuucauccaugaagcuc

SEQ ID NO: 2483746 - RNA, 19 nt, Artificial Sequence
  Description of Artificial Sequence: Synthetic oligonucleotide
uugacucgggccccugugg

SEQ ID NO: 2483747 - RNA, 19 nt, Artificial Sequence
  Description of Artificial Sequence: Synthetic oligonucleotide
uaguuagacggagaagacc

SEQ ID NO: 2483748 - RNA, 19 nt, Artificial Sequence
  Description of Artificial Sequence: Synthetic oligonucleotide
ugucucuuggguauacuua

SEQ ID NO: 2483749 - RNA, 19 nt, Artificial Sequence
  Description of Artificial Sequence: Synthetic oligonucleotide
ccugaaagcgacauagugc

SEQ ID NO: 2483750 - RNA, 19 nt, Artificial Sequence
  Description of Artificial Sequence: Synthetic oligonucleotide
ugagcacucgguaugccuc

SEQ ID NO: 2483751 - RNA, 19 nt, Artificial Sequence
  Description of Artificial Sequence: Synthetic oligonucleotide
cacguuuaaccucuucagc

SEQ ID NO: 2483752 - RNA, 19 nt, Artificial Sequence
  Description of Artificial Sequence: Synthetic oligonucleotide
ugaugauccgauccuuuuc

SEQ ID NO: 2483753 - RNA, 19 nt, Artificial Sequence
  Description of Artificial Sequence: Synthetic oligonucleotide
uccacaaagcggcuaugca

SEQ ID NO: 2483754 - RNA, 19 nt, Artificial Sequence
  Description of Artificial Sequence: Synthetic oligonucleotide
aagggcugcuauccugggg

SEQ ID NO: 2483755 - RNA, 19 nt, Artificial Sequence
  Description of Artificial Sequence: Synthetic oligonucleotide
uggguucccaggaucucgg

SEQ ID NO: 2483756 - RNA, 19 nt, Artificial Sequence
  Description of Artificial Sequence: Synthetic oligonucleotide
agggcugcuauccuggggu

SEQ ID NO: 2483757 - RNA, 19 nt, Artificial Sequence
  Description of Artificial Sequence: Synthetic oligonucleotide
ugugaaacugggcccagua

SEQ ID NO: 2483758 - RNA, 19 nt, Artificial Sequence
  Description of Artificial Sequence: Synthetic oligonucleotide
aggaucucggucagggugc

SEQ ID NO: 2483759 - RNA, 19 nt, Artificial Sequence
  Description of Artificial Sequence: Synthetic oligonucleotide
guauacuuaggcugggcuc

SEQ ID NO: 2483760 - RNA, 19 nt, Artificial Sequence
  Description of Artificial Sequence: Synthetic oligonucleotide
uguuuaugcugcugcugcc

SEQ ID NO: 2483761 - RNA, 19 nt, Artificial Sequence
  Description of Artificial Sequence: Synthetic oligonucleotide
aagcacguuuaaccucuuc

SEQ ID NO: 2483762 - RNA, 19 nt, Artificial Sequence
  Description of Artificial Sequence: Synthetic oligonucleotide
cuggcaucaggaugcaccc

SEQ ID NO: 2483763 - RNA, 19 nt, Artificial Sequence
  Description of Artificial Sequence: Synthetic oligonucleotide
augcagguccaccuaagug

SEQ ID NO: 2483764 - RNA, 19 nt, Artificial Sequence
  Description of Artificial Sequence: Synthetic oligonucleotide
auagugcaggcucaugccu

SEQ ID NO: 2483765 - RNA, 19 nt, Artificial Sequence
  Description of Artificial Sequence: Synthetic oligonucleotide
cauauuugcgacgacucuc

SEQ ID NO: 2483766 - RNA, 19 nt, Artificial Sequence
  Description of Artificial Sequence: Synthetic oligonucleotide
ggcugaaugcagcuggugg

SEQ ID NO: 2483767 - RNA, 19 nt, Artificial Sequence
  Description of Artificial Sequence: Synthetic oligonucleotide
ucggucagggugcagcucu

SEQ ID NO: 2483768 - RNA, 19 nt, Artificial Sequence
  Description of Artificial Sequence: Synthetic oligonucleotide
uccuuucugaggcugcggu

SEQ ID NO: 2483769 - RNA, 19 nt, Artificial Sequence
  Description of Artificial Sequence: Synthetic oligonucleotide
uagugcaggcucaugccug

SEQ ID NO: 2483770 - RNA, 19 nt, Artificial Sequence
  Description of Artificial Sequence: Synthetic oligonucleotide
acugggcccaguauuuugc

SEQ ID NO: 2483771 - RNA, 19 nt, Artificial Sequence
  Description of Artificial Sequence: Synthetic oligonucleotide
guucccaggaucucgguca

SEQ ID NO: 2483772 - RNA, 19 nt, Artificial Sequence
  Description of Artificial Sequence: Synthetic oligonucleotide
ucgguaugccucauucagc

SEQ ID NO: 2483773 - RNA, 19 nt, Artificial Sequence
  Description of Artificial Sequence: Synthetic oligonucleotide
uguggcggcugagagaagc

SEQ ID NO: 2483774 - RNA, 19 nt, Artificial Sequence
  Description of Artificial Sequence: Synthetic oligonucleotide
caugccugccaccaugagc

SEQ ID NO: 2483775 - RNA, 19 nt, Artificial Sequence
  Description of Artificial Sequence: Synthetic oligonucleotide
gcugagagaagccgggugg

SEQ ID NO: 2483776 - RNA, 19 nt, Artificial Sequence
  Description of Artificial Sequence: Synthetic oligonucleotide
ugcgacgacucuccucacg

SEQ ID NO: 2483777 - RNA, 19 nt, Artificial Sequence
  Description of Artificial Sequence: Synthetic oligonucleotide
acaaagcggcuaugcaggg

SEQ ID NO: 2483778 - RNA, 19 nt, Artificial Sequence
  Description of Artificial Sequence: Synthetic oligonucleotide
cugggguacgaucccaggg

SEQ ID NO: 2483779 - RNA, 19 nt, Artificial Sequence
  Description of Artificial Sequence: Synthetic oligonucleotide
ucguaguaguuagacggag

SEQ ID NO: 2483780 - RNA, 19 nt, Artificial Sequence
  Description of Artificial Sequence: Synthetic oligonucleotide
aggagaugaccaaugcagg

SEQ ID NO: 2483781 - RNA, 19 nt, Artificial Sequence
  Description of Artificial Sequence: Synthetic oligonucleotide
ucuuuggacuugguaaaga

SEQ ID NO: 2483782 - RNA, 19 nt, Artificial Sequence
  Description of Artificial Sequence: Synthetic oligonucleotide
gaagaccgcugcucugugg

SEQ ID NO: 2483783 - RNA, 19 nt, Artificial Sequence
  Description of Artificial Sequence: Synthetic oligonucleotide
cugguggucauauuugcga

SEQ ID NO: 2483784 - RNA, 19 nt, Artificial Sequence
  Description of Artificial Sequence: Synthetic oligonucleotide
uaguaguuagacggagaag

SEQ ID NO: 2483785 - RNA, 19 nt, Artificial Sequence
  Description of Artificial Sequence: Synthetic oligonucleotide
ccaguauuuugcauugggg

SEQ ID NO: 2483786 - RNA, 19 nt, Artificial Sequence
  Description of Artificial Sequence: Synthetic oligonucleotide
uuguguuuaugcugcugcu

SEQ ID NO: 2483787 - RNA, 19 nt, Artificial Sequence
  Description of Artificial Sequence: Synthetic oligonucleotide
ugaaagcgacauagugcag

SEQ ID NO: 2483788 - RNA, 19 nt, Artificial Sequence
  Description of Artificial Sequence: Synthetic oligonucleotide
ugggcucugguuccugaag

SEQ ID NO: 2483789 - RNA, 19 nt, Artificial Sequence
  Description of Artificial Sequence: Synthetic oligonucleotide
uuagacggagaagaccgcu

SEQ ID NO: 2483790 - RNA, 19 nt, Artificial Sequence
  Description of Artificial Sequence: Synthetic oligonucleotide
gucauauuugcgacgacuc

SEQ ID NO: 2483791 - RNA, 19 nt, Artificial Sequence
  Description of Artificial Sequence: Synthetic oligonucleotide
cuucuggagacggggaggg

SEQ ID NO: 2483792 - RNA, 19 nt, Artificial Sequence
  Description of Artificial Sequence: Synthetic oligonucleotide
ugugaugauccgauccuuu

SEQ ID NO: 2483793 - RNA, 19 nt, Artificial Sequence
  Description of Artificial Sequence: Synthetic oligonucleotide
ucauuguagauggcuguga

SEQ ID NO: 2483794 - RNA, 19 nt, Artificial Sequence
  Description of Artificial Sequence: Synthetic oligonucleotide
gaaagcacguuuaaccucu

SEQ ID NO: 2483795 - RNA, 19 nt, Artificial Sequence
  Description of Artificial Sequence: Synthetic oligonucleotide
cuuuggacuugguaaagaa

SEQ ID NO: 2483796 - RNA, 19 nt, Artificial Sequence
  Description of Artificial Sequence: Synthetic oligonucleotide
caguucguaguaguuagac

SEQ ID NO: 2483797 - RNA, 19 nt, Artificial Sequence
  Description of Artificial Sequence: Synthetic oligonucleotide
ggcugugaugauccgaucc

SEQ ID NO: 2483798 - RNA, 19 nt, Artificial Sequence
  Description of Artificial Sequence: Synthetic oligonucleotide
gcugguuguguuuaugcug

SEQ ID NO: 2483799 - RNA, 19 nt, Artificial Sequence
  Description of Artificial Sequence: Synthetic oligonucleotide
ucacucugugaaacugggc

SEQ ID NO: 2483800 - RNA, 19 nt, Artificial Sequence
  Description of Artificial Sequence: Synthetic oligonucleotide
gcacguuuaaccucuucag

SEQ ID NO: 2483801 - RNA, 19 nt, Artificial Sequence
  Description of Artificial Sequence: Synthetic oligonucleotide
ugauccgauccuuuucauc

SEQ ID NO: 2483802 - RNA, 19 nt, Artificial Sequence
  Description of Artificial Sequence: Synthetic oligonucleotide
cuggagacggggagggucc

SEQ ID NO: 2483803 - RNA, 19 nt, Artificial Sequence
  Description of Artificial Sequence: Synthetic oligonucleotide
cacucgguaugccucauuc

SEQ ID NO: 2483804 - RNA, 19 nt, Artificial Sequence
  Description of Artificial Sequence: Synthetic oligonucleotide
gguggucauauuugcgacg

SEQ ID NO: 2483805 - RNA, 19 nt, Artificial Sequence
  Description of Artificial Sequence: Synthetic oligonucleotide
ugaccaaugcagguccacc

SEQ ID NO: 2483806 - RNA, 19 nt, Artificial Sequence
  Description of Artificial Sequence: Synthetic oligonucleotide
gugucauuguagauggcug

SEQ ID NO: 2483807 - RNA, 19 nt, Artificial Sequence
  Description of Artificial Sequence: Synthetic oligonucleotide
gagagaagccgggugggag

SEQ ID NO: 2483808 - RNA, 19 nt, Artificial Sequence
  Description of Artificial Sequence: Synthetic oligonucleotide
gaggcugcggucucugcug

SEQ ID NO: 2483809 - RNA, 19 nt, Artificial Sequence
  Description of Artificial Sequence: Synthetic oligonucleotide
uaggcugggcucugguucc

SEQ ID NO: 2483810 - RNA, 19 nt, Artificial Sequence
  Description of Artificial Sequence: Synthetic oligonucleotide
gaauccuggcucuguuggc

SEQ ID NO: 2483811 - RNA, 19 nt, Artificial Sequence
  Description of Artificial Sequence: Synthetic oligonucleotide
cuaggagaugaccaaugca

SEQ ID NO: 2483812 - RNA, 19 nt, Artificial Sequence
  Description of Artificial Sequence: Synthetic oligonucleotide
uguagggccacagccggca

SEQ ID NO: 2483813 - RNA, 19 nt, Artificial Sequence
  Description of Artificial Sequence: Synthetic oligonucleotide
uccugggguacgaucccag

SEQ ID NO: 2483814 - RNA, 19 nt, Artificial Sequence
  Description of Artificial Sequence: Synthetic oligonucleotide
gcugccuugacucgggccc

SEQ ID NO: 2483815 - RNA, 19 nt, Artificial Sequence
  Description of Artificial Sequence: Synthetic oligonucleotide
caaugcagguccaccuaag

SEQ ID NO: 2483816 - RNA, 19 nt, Artificial Sequence
  Description of Artificial Sequence: Synthetic oligonucleotide
cucacggcugagcacucgg

SEQ ID NO: 2483817 - RNA, 19 nt, Artificial Sequence
  Description of Artificial Sequence: Synthetic oligonucleotide
ccacaaagcggcuaugcag

SEQ ID NO: 2483818 - RNA, 19 nt, Artificial Sequence
  Description of Artificial Sequence: Synthetic oligonucleotide
gagaagccgggugggaggg

SEQ ID NO: 2483819 - RNA, 19 nt, Artificial Sequence
  Description of Artificial Sequence: Synthetic oligonucleotide
gccaccaugagcaggaggc

SEQ ID NO: 2483820 - RNA, 19 nt, Artificial Sequence
  Description of Artificial Sequence: Synthetic oligonucleotide
cagcugguggucauauuug

SEQ ID NO: 2483821 - RNA, 19 nt, Artificial Sequence
  Description of Artificial Sequence: Synthetic oligonucleotide
aggcagcuaggagaugacc

SEQ ID NO: 2483822 - RNA, 19 nt, Artificial Sequence
  Description of Artificial Sequence: Synthetic oligonucleotide
uuccugaaagcgacauagu

SEQ ID NO: 2483823 - RNA, 19 nt, Artificial Sequence
  Description of Artificial Sequence: Synthetic oligonucleotide
ucuggagacggggaggguc

SEQ ID NO: 2483824 - RNA, 19 nt, Artificial Sequence
  Description of Artificial Sequence: Synthetic oligonucleotide
acugugugucucuugggua

SEQ ID NO: 2483825 - RNA, 19 nt, Artificial Sequence
  Description of Artificial Sequence: Synthetic oligonucleotide
cugaauccuggcucuguug

SEQ ID NO: 2483826 - RNA, 19 nt, Artificial Sequence
  Description of Artificial Sequence: Synthetic oligonucleotide
augaccaaugcagguccac

SEQ ID NO: 2483827 - RNA, 19 nt, Artificial Sequence
  Description of Artificial Sequence: Synthetic oligonucleotide
gcgacgacucuccucacgg

SEQ ID NO: 2483828 - RNA, 19 nt, Artificial Sequence
  Description of Artificial Sequence: Synthetic oligonucleotide
gcuaggagaugaccaaugc

SEQ ID NO: 2483829 - RNA, 19 nt, Artificial Sequence
  Description of Artificial Sequence: Synthetic oligonucleotide
gugggagggcuguagggcc

SEQ ID NO: 2483830 - RNA, 19 nt, Artificial Sequence
  Description of Artificial Sequence: Synthetic oligonucleotide
cccaguauuuugcauuggg

SEQ ID NO: 2483831 - RNA, 19 nt, Artificial Sequence
  Description of Artificial Sequence: Synthetic oligonucleotide
ugcugcugccuugacucgg

SEQ ID NO: 2483832 - RNA, 19 nt, Artificial Sequence
  Description of Artificial Sequence: Synthetic oligonucleotide
cuggguucccaggaucucg

SEQ ID NO: 2483833 - RNA, 19 nt, Artificial Sequence
  Description of Artificial Sequence: Synthetic oligonucleotide
gucauuguagauggcugug

SEQ ID NO: 2483834 - RNA, 19 nt, Artificial Sequence
  Description of Artificial Sequence: Synthetic oligonucleotide
gauccuuuucauccaugaa

SEQ ID NO: 2483835 - RNA, 19 nt, Artificial Sequence
  Description of Artificial Sequence: Synthetic oligonucleotide
cugagagaagccggguggg

SEQ ID NO: 2483836 - RNA, 19 nt, Artificial Sequence
  Description of Artificial Sequence: Synthetic oligonucleotide
guaguuagacggagaagac

SEQ ID NO: 2483837 - RNA, 19 nt, Artificial Sequence
  Description of Artificial Sequence: Synthetic oligonucleotide
agauggcugugaugauccg

SEQ ID NO: 2483838 - RNA, 19 nt, Artificial Sequence
  Description of Artificial Sequence: Synthetic oligonucleotide
guagauggcugugaugauc

SEQ ID NO: 2483839 - RNA, 19 nt, Artificial Sequence
  Description of Artificial Sequence: Synthetic oligonucleotide
uugguaaagaaagcacguu

SEQ ID NO: 2483840 - RNA, 19 nt, Artificial Sequence
  Description of Artificial Sequence: Synthetic oligonucleotide
uauuugcgacgacucuccu

SEQ ID NO: 2483841 - RNA, 19 nt, Artificial Sequence
  Description of Artificial Sequence: Synthetic oligonucleotide
ucaugccugccaccaugag

SEQ ID NO: 2483842 - RNA, 19 nt, Artificial Sequence
  Description of Artificial Sequence: Synthetic oligonucleotide
uggguauacuuaggcuggg

SEQ ID NO: 2483843 - RNA, 19 nt, Artificial Sequence
  Description of Artificial Sequence: Synthetic oligonucleotide
cuugacucgggccccugug

SEQ ID NO: 2483844 - RNA, 19 nt, Artificial Sequence
  Description of Artificial Sequence: Synthetic oligonucleotide
agggccacagccggcauag

SEQ ID NO: 2483845 - RNA, 19 nt, Artificial Sequence
  Description of Artificial Sequence: Synthetic oligonucleotide
uggcggcugagagaagccg

SEQ ID NO: 2483846 - RNA, 19 nt, Artificial Sequence
  Description of Artificial Sequence: Synthetic oligonucleotide
agcuaggagaugaccaaug

SEQ ID NO: 2483847 - RNA, 19 nt, Artificial Sequence
  Description of Artificial Sequence: Synthetic oligonucleotide
ucucggucagggugcagcu

SEQ ID NO: 2483848 - RNA, 19 nt, Artificial Sequence
  Description of Artificial Sequence: Synthetic oligonucleotide
aguaccccaguacccgcug

SEQ ID NO: 2483849 - RNA, 19 nt, Artificial Sequence
  Description of Artificial Sequence: Synthetic oligonucleotide
acucuccucacggcugagc

SEQ ID NO: 2483850 - RNA, 19 nt, Artificial Sequence
  Description of Artificial Sequence: Synthetic oligonucleotide
ggacuugguaaagaaagca

SEQ ID NO: 2483851 - RNA, 19 nt, Artificial Sequence
  Description of Artificial Sequence: Synthetic oligonucleotide
acggggaggguccuuucug

SEQ ID NO: 2483852 - RNA, 19 nt, Artificial Sequence
  Description of Artificial Sequence: Synthetic oligonucleotide
acuuaggcugggcucuggu

SEQ ID NO: 2483853 - RNA, 19 nt, Artificial Sequence
  Description of Artificial Sequence: Synthetic oligonucleotide
gggcuguagggccacagcc

SEQ ID NO: 2483854 - RNA, 19 nt, Artificial Sequence
  Description of Artificial Sequence: Synthetic oligonucleotide
uccgauccuuuucauccau

SEQ ID NO: 2483855 - RNA, 19 nt, Artificial Sequence
  Description of Artificial Sequence: Synthetic oligonucleotide
gauggcugugaugauccga

SEQ ID NO: 2483856 - RNA, 19 nt, Artificial Sequence
  Description of Artificial Sequence: Synthetic oligonucleotide
ggcaguaccccaguacccg

SEQ ID NO: 2483857 - RNA, 19 nt, Artificial Sequence
  Description of Artificial Sequence: Synthetic oligonucleotide
agaagaccgcugcucugug

SEQ ID NO: 2483858 - RNA, 19 nt, Artificial Sequence
  Description of Artificial Sequence: Synthetic oligonucleotide
cucuuuggacuugguaaag

SEQ ID NO: 2483859 - RNA, 19 nt, Artificial Sequence
  Description of Artificial Sequence: Synthetic oligonucleotide
gguaaagaaagcacguuua

SEQ ID NO: 2483860 - RNA, 19 nt, Artificial Sequence
  Description of Artificial Sequence: Synthetic oligonucleotide
acggcugagcacucgguau

SEQ ID NO: 2483861 - RNA, 19 nt, Artificial Sequence
  Description of Artificial Sequence: Synthetic oligonucleotide
agaccgcugcucuguggcg

SEQ ID NO: 2483862 - RNA, 19 nt, Artificial Sequence
  Description of Artificial Sequence: Synthetic oligonucleotide
uguagauggcugugaugau

SEQ ID NO: 2483863 - RNA, 19 nt, Artificial Sequence
  Description of Artificial Sequence: Synthetic oligonucleotide
auccgauccuuuucaucca

SEQ ID NO: 2483864 - RNA, 19 nt, Artificial Sequence
  Description of Artificial Sequence: Synthetic oligonucleotide
ggcccaguauuuugcauug

SEQ ID NO: 2483865 - RNA, 19 nt, Artificial Sequence
  Description of Artificial Sequence: Synthetic oligonucleotide
uaccccaguacccgcuggu

SEQ ID NO: 2483866 - RNA, 19 nt, Artificial Sequence
  Description of Artificial Sequence: Synthetic oligonucleotide
uucauccaugaagcuccgg

SEQ ID NO: 2483867 - RNA, 19 nt, Artificial Sequence
  Description of Artificial Sequence: Synthetic oligonucleotide
gaccaaugcagguccaccu

SEQ ID NO: 2483868 - RNA, 19 nt, Artificial Sequence
  Description of Artificial Sequence: Synthetic oligonucleotide
ucuggcccucgugucauug

SEQ ID NO: 2483869 - RNA, 19 nt, Artificial Sequence
  Description of Artificial Sequence: Synthetic oligonucleotide
ggaggcaguaccccaguac

SEQ ID NO: 2483870 - RNA, 19 nt, Artificial Sequence
  Description of Artificial Sequence: Synthetic oligonucleotide
ucugugaaacugggcccag

SEQ ID NO: 2483871 - RNA, 19 nt, Artificial Sequence
  Description of Artificial Sequence: Synthetic oligonucleotide
caccaugagcaggaggcag

SEQ ID NO: 2483872 - RNA, 19 nt, Artificial Sequence
  Description of Artificial Sequence: Synthetic oligonucleotide
gguucccaggaacugugug

SEQ ID NO: 2483873 - RNA, 19 nt, Artificial Sequence
  Description of Artificial Sequence: Synthetic oligonucleotide
gacgacucuccucacggcu

SEQ ID NO: 2483874 - RNA, 19 nt, Artificial Sequence
  Description of Artificial Sequence: Synthetic oligonucleotide
guaccccaguacccgcugg

SEQ ID NO: 2483875 - RNA, 19 nt, Artificial Sequence
  Description of Artificial Sequence: Synthetic oligonucleotide
cugaaugcagcuggugguc

SEQ ID NO: 2483876 - RNA, 19 nt, Artificial Sequence
  Description of Artificial Sequence: Synthetic oligonucleotide
uuucugaggcugcggucuc

SEQ ID NO: 2483877 - RNA, 19 nt, Artificial Sequence
  Description of Artificial Sequence: Synthetic oligonucleotide
ucacggcugagcacucggu

SEQ ID NO: 2483878 - RNA, 19 nt, Artificial Sequence
  Description of Artificial Sequence: Synthetic oligonucleotide
accaaugcagguccaccua

SEQ ID NO: 2483879 - RNA, 19 nt, Artificial Sequence
  Description of Artificial Sequence: Synthetic oligonucleotide
gguauacuuaggcugggcu

SEQ ID NO: 2483880 - RNA, 19 nt, Artificial Sequence
  Description of Artificial Sequence: Synthetic oligonucleotide
uacuuaggcugggcucugg

SEQ ID NO: 2483881 - RNA, 19 nt, Artificial Sequence
  Description of Artificial Sequence: Synthetic oligonucleotide
guucccaggaacugugugu

SEQ ID NO: 2483882 - RNA, 19 nt, Artificial Sequence
  Description of Artificial Sequence: Synthetic oligonucleotide
guuagacggagaagaccgc

SEQ ID NO: 2483883 - RNA, 19 nt, Artificial Sequence
  Description of Artificial Sequence: Synthetic oligonucleotide
agcuccggugcaccugcuc

SEQ ID NO: 2483884 - RNA, 19 nt, Artificial Sequence
  Description of Artificial Sequence: Synthetic oligonucleotide
gcugcuauccugggguacg

SEQ ID NO: 2483885 - RNA, 19 nt, Artificial Sequence
  Description of Artificial Sequence: Synthetic oligonucleotide
augauccgauccuuuucau

SEQ ID NO: 2483886 - RNA, 19 nt, Artificial Sequence
  Description of Artificial Sequence: Synthetic oligonucleotide
ugagagaagccggguggga

SEQ ID NO: 2483887 - RNA, 19 nt, Artificial Sequence
  Description of Artificial Sequence: Synthetic oligonucleotide
ggcuguagggccacagccg

SEQ ID NO: 2483888 - RNA, 19 nt, Artificial Sequence
  Description of Artificial Sequence: Synthetic oligonucleotide
gcugguggucauauuugcg

SEQ ID NO: 2483889 - RNA, 19 nt, Artificial Sequence
  Description of Artificial Sequence: Synthetic oligonucleotide
agacggggaggguccuuuc

SEQ ID NO: 2483890 - RNA, 19 nt, Artificial Sequence
  Description of Artificial Sequence: Synthetic oligonucleotide
ggcagcuaggagaugacca

SEQ ID NO: 2483891 - RNA, 19 nt, Artificial Sequence
  Description of Artificial Sequence: Synthetic oligonucleotide
cucaugccugccaccauga

SEQ ID NO: 2483892 - RNA, 19 nt, Artificial Sequence
  Description of Artificial Sequence: Synthetic oligonucleotide
uggucauauuugcgacgac

SEQ ID NO: 2483893 - RNA, 19 nt, Artificial Sequence
  Description of Artificial Sequence: Synthetic oligonucleotide
ucgugucauuguagauggc

SEQ ID NO: 2483894 - RNA, 19 nt, Artificial Sequence
  Description of Artificial Sequence: Synthetic oligonucleotide
ggugggagggcuguagggc

SEQ ID NO: 2483895 - RNA, 19 nt, Artificial Sequence
  Description of Artificial Sequence: Synthetic oligonucleotide
cguuuaaccucuucagcac

SEQ ID NO: 2483896 - RNA, 19 nt, Artificial Sequence
  Description of Artificial Sequence: Synthetic oligonucleotide
caaagcggcuaugcagggc

SEQ ID NO: 2483897 - RNA, 19 nt, Artificial Sequence
  Description of Artificial Sequence: Synthetic oligonucleotide
caacagggacggcaugaug

SEQ ID NO: 2483898 - RNA, 19 nt, Artificial Sequence
  Description of Artificial Sequence: Synthetic oligonucleotide
gcuccggugcaccugcucc

SEQ ID NO: 2483899 - RNA, 19 nt, Artificial Sequence
  Description of Artificial Sequence: Synthetic oligonucleotide
ugcugaauccuggcucugu

SEQ ID NO: 2483900 - RNA, 19 nt, Artificial Sequence
  Description of Artificial Sequence: Synthetic oligonucleotide
uggcccucgugucauugua

SEQ ID NO: 2483901 - RNA, 19 nt, Artificial Sequence
  Description of Artificial Sequence: Synthetic oligonucleotide
gcucaugccugccaccaug

SEQ ID NO: 2483902 - RNA, 19 nt, Artificial Sequence
  Description of Artificial Sequence: Synthetic oligonucleotide
aaacugggcccaguauuuu

SEQ ID NO: 2483903 - RNA, 19 nt, Artificial Sequence
  Description of Artificial Sequence: Synthetic oligonucleotide
aaugcagcugguggucaua

SEQ ID NO: 2483904 - RNA, 19 nt, Artificial Sequence
  Description of Artificial Sequence: Synthetic oligonucleotide
ggcugagagaagccgggug

SEQ ID NO: 2483905 - RNA, 19 nt, Artificial Sequence
  Description of Artificial Sequence: Synthetic oligonucleotide
cugcugcugccuugacucg

SEQ ID NO: 2483906 - RNA, 19 nt, Artificial Sequence
  Description of Artificial Sequence: Synthetic oligonucleotide
gggguacgaucccagggcc

SEQ ID NO: 2483907 - RNA, 19 nt, Artificial Sequence
  Description of Artificial Sequence: Synthetic oligonucleotide
ccgcugguuguguuuaugc

SEQ ID NO: 2483908 - RNA, 19 nt, Artificial Sequence
  Description of Artificial Sequence: Synthetic oligonucleotide
gcucuuuggacuugguaaa

SEQ ID NO: 2483909 - RNA, 19 nt, Artificial Sequence
  Description of Artificial Sequence: Synthetic oligonucleotide
uggcugaaugcagcuggug

SEQ ID NO: 2483910 - RNA, 19 nt, Artificial Sequence
  Description of Artificial Sequence: Synthetic oligonucleotide
caggcucaugccugccacc

SEQ ID NO: 2483911 - RNA, 19 nt, Artificial Sequence
  Description of Artificial Sequence: Synthetic oligonucleotide
cucugugaaacugggccca

SEQ ID NO: 2483912 - RNA, 19 nt, Artificial Sequence
  Description of Artificial Sequence: Synthetic oligonucleotide
ugggcccaguauuuugcau

SEQ ID NO: 2483913 - RNA, 19 nt, Artificial Sequence
  Description of Artificial Sequence: Synthetic oligonucleotide
gagcaacagggacggcaug

SEQ ID NO: 2483914 - RNA, 19 nt, Artificial Sequence
  Description of Artificial Sequence: Synthetic oligonucleotide
aggcucaugccugccacca

SEQ ID NO: 2483915 - RNA, 19 nt, Artificial Sequence
  Description of Artificial Sequence: Synthetic oligonucleotide
gcuauccugggguacgauc

SEQ ID NO: 2483916 - RNA, 19 nt, Artificial Sequence
  Description of Artificial Sequence: Synthetic oligonucleotide
aguacccgcugguuguguu

SEQ ID NO: 2483917 - RNA, 19 nt, Artificial Sequence
  Description of Artificial Sequence: Synthetic oligonucleotide
caacaguucguaguaguua

SEQ ID NO: 2483918 - RNA, 19 nt, Artificial Sequence
  Description of Artificial Sequence: Synthetic oligonucleotide
ccacagccggcauaggcgc

SEQ ID NO: 2483919 - RNA, 19 nt, Artificial Sequence
  Description of Artificial Sequence: Synthetic oligonucleotide
gagaagaccgcugcucugu

SEQ ID NO: 2483920 - RNA, 19 nt, Artificial Sequence
  Description of Artificial Sequence: Synthetic oligonucleotide
aagcgacauagugcaggcu

SEQ ID NO: 2483921 - RNA, 19 nt, Artificial Sequence
  Description of Artificial Sequence: Synthetic oligonucleotide
acgacucuccucacggcug

SEQ ID NO: 2483922 - RNA, 19 nt, Artificial Sequence
  Description of Artificial Sequence: Synthetic oligonucleotide
uacgaucccagggccuucu

SEQ ID NO: 2483923 - RNA, 19 nt, Artificial Sequence
  Description of Artificial Sequence: Synthetic oligonucleotide
gaaacugggcccaguauuu

SEQ ID NO: 2483924 - RNA, 19 nt, Artificial Sequence
  Description of Artificial Sequence: Synthetic oligonucleotide
uccggugcaccugcuccag

SEQ ID NO: 2483925 - RNA, 19 nt, Artificial Sequence
  Description of Artificial Sequence: Synthetic oligonucleotide
gaugaccaaugcaggucca

SEQ ID NO: 2483926 - RNA, 19 nt, Artificial Sequence
  Description of Artificial Sequence: Synthetic oligonucleotide
guccuuucugaggcugcgg

SEQ ID NO: 2483927 - RNA, 19 nt, Artificial Sequence
  Description of Artificial Sequence: Synthetic oligonucleotide
cuguagggccacagccggc

SEQ ID NO: 2483928 - RNA, 19 nt, Artificial Sequence
  Description of Artificial Sequence: Synthetic oligonucleotide
gguccuuucugaggcugcg

SEQ ID NO: 2483929 - RNA, 19 nt, Artificial Sequence
  Description of Artificial Sequence: Synthetic oligonucleotide
gguuguguuuaugcugcug

SEQ ID NO: 2483930 - RNA, 19 nt, Artificial Sequence
  Description of Artificial Sequence: Synthetic oligonucleotide
ggagaugaccaaugcaggu

SEQ ID NO: 2483931 - RNA, 19 nt, Artificial Sequence
  Description of Artificial Sequence: Synthetic oligonucleotide
uaugcagggcuggguuccc

SEQ ID NO: 2483932 - RNA, 19 nt, Artificial Sequence
  Description of Artificial Sequence: Synthetic oligonucleotide
cugccgcuccugcugaauc

SEQ ID NO: 2483933 - RNA, 19 nt, Artificial Sequence
  Description of Artificial Sequence: Synthetic oligonucleotide
ugugugucucuuggguaua

SEQ ID NO: 2483934 - RNA, 19 nt, Artificial Sequence
  Description of Artificial Sequence: Synthetic oligonucleotide
agaagccgggugggagggc

SEQ ID NO: 2483935 - RNA, 19 nt, Artificial Sequence
  Description of Artificial Sequence: Synthetic oligonucleotide
cauuguagauggcugugau

SEQ ID NO: 2483936 - RNA, 19 nt, Artificial Sequence
  Description of Artificial Sequence: Synthetic oligonucleotide
uacccgcugguuguguuua

SEQ ID NO: 2483937 - RNA, 19 nt, Artificial Sequence
  Description of Artificial Sequence: Synthetic oligonucleotide
acucgggccccuguggccu

SEQ ID NO: 2483938 - RNA, 19 nt, Artificial Sequence
  Description of Artificial Sequence: Synthetic oligonucleotide
ugcggucucugcugccgcu

SEQ ID NO: 2483939 - RNA, 19 nt, Artificial Sequence
  Description of Artificial Sequence: Synthetic oligonucleotide
ggucauauuugcgacgacu

SEQ ID NO: 2483940 - RNA, 19 nt, Artificial Sequence
  Description of Artificial Sequence: Synthetic oligonucleotide
acaguucguaguaguuaga

SEQ ID NO: 2483941 - RNA, 19 nt, Artificial Sequence
  Description of Artificial Sequence: Synthetic oligonucleotide
auacuuaggcugggcucug

SEQ ID NO: 2483942 - RNA, 19 nt, Artificial Sequence
  Description of Artificial Sequence: Synthetic oligonucleotide
uggcaucaggaugcacccc

SEQ ID NO: 2483943 - RNA, 19 nt, Artificial Sequence
  Description of Artificial Sequence: Synthetic oligonucleotide
cucuguggcggcugagaga

SEQ ID NO: 2483944 - RNA, 19 nt, Artificial Sequence
  Description of Artificial Sequence: Synthetic oligonucleotide
ccuucuggagacggggagg

SEQ ID NO: 2483945 - RNA, 19 nt, Artificial Sequence
  Description of Artificial Sequence: Synthetic oligonucleotide
gcagguccaccuaagugac

SEQ ID NO: 2483946 - RNA, 19 nt, Artificial Sequence
  Description of Artificial Sequence: Synthetic oligonucleotide
gcugcggucucugcugccg

SEQ ID NO: 2483947 - RNA, 19 nt, Artificial Sequence
  Description of Artificial Sequence: Synthetic oligonucleotide
gugucucuuggguauacuu

SEQ ID NO: 2483948 - RNA, 19 nt, Artificial Sequence
  Description of Artificial Sequence: Synthetic oligonucleotide
gcaguaccccaguacccgc

SEQ ID NO: 2483949 - RNA, 19 nt, Artificial Sequence
  Description of Artificial Sequence: Synthetic oligonucleotide
gcugugaugauccgauccu

SEQ ID NO: 2483950 - RNA, 19 nt, Artificial Sequence
  Description of Artificial Sequence: Synthetic oligonucleotide
cugggcccaguauuuugca

SEQ ID NO: 2483951 - RNA, 19 nt, Artificial Sequence
  Description of Artificial Sequence: Synthetic oligonucleotide
uggcugugaugauccgauc

SEQ ID NO: 2483952 - RNA, 19 nt, Artificial Sequence
  Description of Artificial Sequence: Synthetic oligonucleotide
cugagcacucgguaugccu

SEQ ID NO: 2483953 - RNA, 19 nt, Artificial Sequence
  Description of Artificial Sequence: Synthetic oligonucleotide
gugaugauccgauccuuuu

SEQ ID NO: 2483954 - RNA, 19 nt, Artificial Sequence
  Description of Artificial Sequence: Synthetic oligonucleotide
ccugggguacgaucccagg

SEQ ID NO: 2483955 - RNA, 19 nt, Artificial Sequence
  Description of Artificial Sequence: Synthetic oligonucleotide
agggccuucuggagacggg

SEQ ID NO: 2483956 - RNA, 19 nt, Artificial Sequence
  Description of Artificial Sequence: Synthetic oligonucleotide
uucugaggcugcggucucu

SEQ ID NO: 2483957 - RNA, 19 nt, Artificial Sequence
  Description of Artificial Sequence: Synthetic oligonucleotide
aagcggcuaugcagggcug

SEQ ID NO: 2483958 - RNA, 19 nt, Artificial Sequence
  Description of Artificial Sequence: Synthetic oligonucleotide
uccucacggcugagcacuc

SEQ ID NO: 2483959 - RNA, 19 nt, Artificial Sequence
  Description of Artificial Sequence: Synthetic oligonucleotide
aggaggcaguaccccagua

SEQ ID NO: 2483960 - RNA, 19 nt, Artificial Sequence
  Description of Artificial Sequence: Synthetic oligonucleotide
gaaugcagcugguggucau

SEQ ID NO: 2483961 - RNA, 19 nt, Artificial Sequence
  Description of Artificial Sequence: Synthetic oligonucleotide
gcugcugccuugacucggg

SEQ ID NO: 2483962 - RNA, 19 nt, Artificial Sequence
  Description of Artificial Sequence: Synthetic oligonucleotide
cuggcucuguuggcccugg

SEQ ID NO: 2483963 - RNA, 19 nt, Artificial Sequence
  Description of Artificial Sequence: Synthetic oligonucleotide
cugccuugacucgggcccc

SEQ ID NO: 2483964 - RNA, 19 nt, Artificial Sequence
  Description of Artificial Sequence: Synthetic oligonucleotide
ggguauacuuaggcugggc

SEQ ID NO: 2483965 - RNA, 19 nt, Artificial Sequence
  Description of Artificial Sequence: Synthetic oligonucleotide
gugaaacugggcccaguau

SEQ ID NO: 2483966 - RNA, 19 nt, Artificial Sequence
  Description of Artificial Sequence: Synthetic oligonucleotide
cuccucacggcugagcacu

SEQ ID NO: 2483967 - RNA, 19 nt, Artificial Sequence
  Description of Artificial Sequence: Synthetic oligonucleotide
acgaucccagggccuucug

SEQ ID NO: 2483968 - RNA, 19 nt, Artificial Sequence
  Description of Artificial Sequence: Synthetic oligonucleotide
gguccaccuaagugacccc

SEQ ID NO: 2483969 - RNA, 19 nt, Artificial Sequence
  Description of Artificial Sequence: Synthetic oligonucleotide
cugcugccuugacucgggc

SEQ ID NO: 2483970 - RNA, 19 nt, Artificial Sequence
  Description of Artificial Sequence: Synthetic oligonucleotide
gacggggaggguccuuucu

SEQ ID NO: 2483971 - RNA, 19 nt, Artificial Sequence
  Description of Artificial Sequence: Synthetic oligonucleotide
cuguuggcccuggcucugg

SEQ ID NO: 2483972 - RNA, 19 nt, Artificial Sequence
  Description of Artificial Sequence: Synthetic oligonucleotide
ggcugagcacucgguaugc

SEQ ID NO: 2483973 - RNA, 19 nt, Artificial Sequence
  Description of Artificial Sequence: Synthetic oligonucleotide
cagcucuuuggacuuggua

SEQ ID NO: 2483974 - RNA, 19 nt, Artificial Sequence
  Description of Artificial Sequence: Synthetic oligonucleotide
aaagcacguuuaaccucuu

SEQ ID NO: 2483975 - RNA, 19 nt, Artificial Sequence
  Description of Artificial Sequence: Synthetic oligonucleotide
gacucuccucacggcugag

SEQ ID NO: 2483976 - RNA, 19 nt, Artificial Sequence
  Description of Artificial Sequence: Synthetic oligonucleotide
ugcagcugguggucauauu

SEQ ID NO: 2483977 - RNA, 19 nt, Artificial Sequence
  Description of Artificial Sequence: Synthetic oligonucleotide
ugcuauccugggguacgau

SEQ ID NO: 2483978 - RNA, 19 nt, Artificial Sequence
  Description of Artificial Sequence: Synthetic oligonucleotide
ccuuucugaggcugcgguc

SEQ ID NO: 2483979 - RNA, 19 nt, Artificial Sequence
  Description of Artificial Sequence: Synthetic oligonucleotide
uugcgacgacucuccucac

SEQ ID NO: 2483980 - RNA, 19 nt, Artificial Sequence
  Description of Artificial Sequence: Synthetic oligonucleotide
cacggcugagcacucggua

SEQ ID NO: 2483981 - RNA, 19 nt, Artificial Sequence
  Description of Artificial Sequence: Synthetic oligonucleotide
ggcccucgugucauuguag

SEQ ID NO: 2483982 - RNA, 19 nt, Artificial Sequence
  Description of Artificial Sequence: Synthetic oligonucleotide
uucuggagacggggagggu

SEQ ID NO: 2483983 - RNA, 19 nt, Artificial Sequence
  Description of Artificial Sequence: Synthetic oligonucleotide
ccgauccuuuucauccaug

SEQ ID NO: 2483984 - RNA, 19 nt, Artificial Sequence
  Description of Artificial Sequence: Synthetic oligonucleotide
cguaguaguuagacggaga

SEQ ID NO: 2483985 - RNA, 19 nt, Artificial Sequence
  Description of Artificial Sequence: Synthetic oligonucleotide
ccccaguacccgcugguug

SEQ ID NO: 2483986 - RNA, 19 nt, Artificial Sequence
  Description of Artificial Sequence: Synthetic oligonucleotide
uggagacggggaggguccu

SEQ ID NO: 2483987 - RNA, 19 nt, Artificial Sequence
  Description of Artificial Sequence: Synthetic oligonucleotide
cugggcucugguuccugaa

SEQ ID NO: 2483988 - RNA, 19 nt, Artificial Sequence
  Description of Artificial Sequence: Synthetic oligonucleotide
ggcucuggcccucguguca

SEQ ID NO: 2483989 - RNA, 19 nt, Artificial Sequence
  Description of Artificial Sequence: Synthetic oligonucleotide
ggugcagcucuuuggacuu

SEQ ID NO: 2483990 - RNA, 19 nt, Artificial Sequence
  Description of Artificial Sequence: Synthetic oligonucleotide
gcgacauagugcaggcuca

SEQ ID NO: 2483991 - RNA, 19 nt, Artificial Sequence
  Description of Artificial Sequence: Synthetic oligonucleotide
cugcugaauccuggcucug

SEQ ID NO: 2483992 - RNA, 19 nt, Artificial Sequence
  Description of Artificial Sequence: Synthetic oligonucleotide
gcccaguauuuugcauugg

SEQ ID NO: 2483993 - RNA, 19 nt, Artificial Sequence
  Description of Artificial Sequence: Synthetic oligonucleotide
gcggcuaugcagggcuggg

SEQ ID NO: 2483994 - RNA, 19 nt, Artificial Sequence
  Description of Artificial Sequence: Synthetic oligonucleotide
ccaaugcagguccaccuaa

SEQ ID NO: 2483995 - RNA, 19 nt, Artificial Sequence
  Description of Artificial Sequence: Synthetic oligonucleotide
cuuaggcugggcucugguu

SEQ ID NO: 2483996 - RNA, 19 nt, Artificial Sequence
  Description of Artificial Sequence: Synthetic oligonucleotide
cucggucagggugcagcuc

SEQ ID NO: 2483997 - RNA, 19 nt, Artificial Sequence
  Description of Artificial Sequence: Synthetic oligonucleotide
gggcccaguauuuugcauu

SEQ ID NO: 2483998 - RNA, 19 nt, Artificial Sequence
  Description of Artificial Sequence: Synthetic oligonucleotide
ugccuugacucgggccccu

SEQ ID NO: 2483999 - RNA, 19 nt, Artificial Sequence
  Description of Artificial Sequence: Synthetic oligonucleotide
gcugagcacucgguaugcc

SEQ ID NO: 2484000 - RNA, 19 nt, Artificial Sequence
  Description of Artificial Sequence: Synthetic oligonucleotide
cuguggcggcugagagaag

SEQ ID NO: 2484001 - RNA, 19 nt, Artificial Sequence
  Description of Artificial Sequence: Synthetic oligonucleotide
agccgggugggagggcugu

SEQ ID NO: 2484002 - RNA, 19 nt, Artificial Sequence
  Description of Artificial Sequence: Synthetic oligonucleotide
cacuggcaucaggaugcac

SEQ ID NO: 2484003 - RNA, 19 nt, Artificial Sequence
  Description of Artificial Sequence: Synthetic oligonucleotide
cuggcugaaugcagcuggu

SEQ ID NO: 2484004 - RNA, 19 nt, Artificial Sequence
  Description of Artificial Sequence: Synthetic oligonucleotide
ggcuaugcagggcuggguu

SEQ ID NO: 2484005 - RNA, 19 nt, Artificial Sequence
  Description of Artificial Sequence: Synthetic oligonucleotide
guguaguccugggcaggca

SEQ ID NO: 2484006 - RNA, 19 nt, Artificial Sequence
  Description of Artificial Sequence: Synthetic oligonucleotide
ggcugcuauccugggguac

SEQ ID NO: 2484007 - RNA, 19 nt, Artificial Sequence
  Description of Artificial Sequence: Synthetic oligonucleotide
ggcucuguuggcccuggcu

SEQ ID NO: 2484008 - RNA, 19 nt, Artificial Sequence
  Description of Artificial Sequence: Synthetic oligonucleotide
cgguaugccucauucagcu

SEQ ID NO: 2484009 - RNA, 19 nt, Artificial Sequence
  Description of Artificial Sequence: Synthetic oligonucleotide
ccaugaagcuccggugcac

SEQ ID NO: 2484010 - RNA, 19 nt, Artificial Sequence
  Description of Artificial Sequence: Synthetic oligonucleotide
ccucuucagcacuggcauc

SEQ ID NO: 2484011 - RNA, 19 nt, Artificial Sequence
  Description of Artificial Sequence: Synthetic oligonucleotide
guacgaucccagggccuuc

SEQ ID NO: 2484012 - RNA, 19 nt, Artificial Sequence
  Description of Artificial Sequence: Synthetic oligonucleotide
acccgcugguuguguuuau

SEQ ID NO: 2484013 - RNA, 19 nt, Artificial Sequence
  Description of Artificial Sequence: Synthetic oligonucleotide
agcacucgguaugccucau

SEQ ID NO: 2484014 - RNA, 19 nt, Artificial Sequence
  Description of Artificial Sequence: Synthetic oligonucleotide
cugcuauccugggguacga

SEQ ID NO: 2484015 - RNA, 19 nt, Artificial Sequence
  Description of Artificial Sequence: Synthetic oligonucleotide
aagcuccggugcaccugcu

SEQ ID NO: 2484016 - RNA, 19 nt, Artificial Sequence
  Description of Artificial Sequence: Synthetic oligonucleotide
ggagcaacagggacggcau

SEQ ID NO: 2484017 - RNA, 19 nt, Artificial Sequence
  Description of Artificial Sequence: Synthetic oligonucleotide
cggcugagcacucgguaug

SEQ ID NO: 2484018 - RNA, 19 nt, Artificial Sequence
  Description of Artificial Sequence: Synthetic oligonucleotide
gcuuccugaaagcgacaua

SEQ ID NO: 2484019 - RNA, 19 nt, Artificial Sequence
  Description of Artificial Sequence: Synthetic oligonucleotide
gagacggggaggguccuuu

SEQ ID NO: 2484020 - RNA, 19 nt, Artificial Sequence
  Description of Artificial Sequence: Synthetic oligonucleotide
accccaguacccgcugguu

SEQ ID NO: 2484021 - RNA, 19 nt, Artificial Sequence
  Description of Artificial Sequence: Synthetic oligonucleotide
guacccgcugguuguguuu

SEQ ID NO: 2484022 - RNA, 19 nt, Artificial Sequence
  Description of Artificial Sequence: Synthetic oligonucleotide
ccccuguggccucacucug

SEQ ID NO: 2484023 - RNA, 19 nt, Artificial Sequence
  Description of Artificial Sequence: Synthetic oligonucleotide
cgugucauuguagauggcu

SEQ ID NO: 2484024 - RNA, 19 nt, Artificial Sequence
  Description of Artificial Sequence: Synthetic oligonucleotide
cgacgacucuccucacggc

SEQ ID NO: 2484025 - RNA, 19 nt, Artificial Sequence
  Description of Artificial Sequence: Synthetic oligonucleotide
ccuuuucauccaugaagcu

SEQ ID NO: 2484026 - RNA, 19 nt, Artificial Sequence
  Description of Artificial Sequence: Synthetic oligonucleotide
ccccucaagggcugcuauc

SEQ ID NO: 2484027 - RNA, 19 nt, Artificial Sequence
  Description of Artificial Sequence: Synthetic oligonucleotide
ccaacaguucguaguaguu

SEQ ID NO: 2484028 - RNA, 19 nt, Artificial Sequence
  Description of Artificial Sequence: Synthetic oligonucleotide
cccaguacccgcugguugu

SEQ ID NO: 2484029 - RNA, 19 nt, Artificial Sequence
  Description of Artificial Sequence: Synthetic oligonucleotide
gcugaauccuggcucuguu

SEQ ID NO: 2484030 - RNA, 19 nt, Artificial Sequence
  Description of Artificial Sequence: Synthetic oligonucleotide
cucgggccccuguggccuc

SEQ ID NO: 2484031 - RNA, 19 nt, Artificial Sequence
  Description of Artificial Sequence: Synthetic oligonucleotide
ccucacggcugagcacucg

SEQ ID NO: 2484032 - RNA, 19 nt, Artificial Sequence
  Description of Artificial Sequence: Synthetic oligonucleotide
ggaucucggucagggugca

SEQ ID NO: 2484033 - RNA, 19 nt, Artificial Sequence
  Description of Artificial Sequence: Synthetic oligonucleotide
gguacgaucccagggccuu

SEQ ID NO: 2484034 - RNA, 19 nt, Artificial Sequence
  Description of Artificial Sequence: Synthetic oligonucleotide
cugugaugauccgauccuu

SEQ ID NO: 2484035 - RNA, 19 nt, Artificial Sequence
  Description of Artificial Sequence: Synthetic oligonucleotide
ucgggccccuguggccuca

SEQ ID NO: 2484036 - RNA, 19 nt, Artificial Sequence
  Description of Artificial Sequence: Synthetic oligonucleotide
cagcuaggagaugaccaau

SEQ ID NO: 2484037 - RNA, 19 nt, Artificial Sequence
  Description of Artificial Sequence: Synthetic oligonucleotide
cccgcugguuguguuuaug

SEQ ID NO: 2484038 - RNA, 19 nt, Artificial Sequence
  Description of Artificial Sequence: Synthetic oligonucleotide
ccaguacccgcugguugug

SEQ ID NO: 2484039 - RNA, 19 nt, Artificial Sequence
  Description of Artificial Sequence: Synthetic oligonucleotide
cggucucugcugccgcucc

SEQ ID NO: 2484040 - RNA, 19 nt, Artificial Sequence
  Description of Artificial Sequence: Synthetic oligonucleotide
ccgcuccugcugaauccug

SEQ ID NO: 2484041 - RNA, 19 nt, Artificial Sequence
  Description of Artificial Sequence: Synthetic oligonucleotide
cugugaaacugggcccagu

SEQ ID NO: 2484042 - RNA, 19 nt, Artificial Sequence
  Description of Artificial Sequence: Synthetic oligonucleotide
gggcugcuauccuggggua

SEQ ID NO: 2484043 - RNA, 19 nt, Artificial Sequence
  Description of Artificial Sequence: Synthetic oligonucleotide
guagggccacagccggcau

SEQ ID NO: 2484044 - RNA, 19 nt, Artificial Sequence
  Description of Artificial Sequence: Synthetic oligonucleotide
gcggucucugcugccgcuc

SEQ ID NO: 2484045 - RNA, 19 nt, Artificial Sequence
  Description of Artificial Sequence: Synthetic oligonucleotide
cgcugguuguguuuaugcu

SEQ ID NO: 2484046 - RNA, 19 nt, Artificial Sequence
  Description of Artificial Sequence: Synthetic oligonucleotide
gcaacagggacggcaugau

SEQ ID NO: 2484047 - RNA, 19 nt, Artificial Sequence
  Description of Artificial Sequence: Synthetic oligonucleotide
cgacucuccucacggcuga

SEQ ID NO: 2484048 - RNA, 19 nt, Artificial Sequence
  Description of Artificial Sequence: Synthetic oligonucleotide
gcucugguuccugaagauu

SEQ ID NO: 2484049 - RNA, 19 nt, Artificial Sequence
  Description of Artificial Sequence: Synthetic oligonucleotide
gcacuggcaucaggaugca

SEQ ID NO: 2484050 - RNA, 19 nt, Artificial Sequence
  Description of Artificial Sequence: Synthetic oligonucleotide
gccgcuccugcugaauccu

SEQ ID NO: 2484051 - RNA, 19 nt, Artificial Sequence
  Description of Artificial Sequence: Synthetic oligonucleotide
caguacccgcugguugugu

SEQ ID NO: 2484052 - RNA, 19 nt, Artificial Sequence
  Description of Artificial Sequence: Synthetic oligonucleotide
gccuugacucgggccccug

SEQ ID NO: 2484053 - RNA, 19 nt, Artificial Sequence
  Description of Artificial Sequence: Synthetic oligonucleotide
ggguucccaggaacugugu

SEQ ID NO: 2484054 - RNA, 19 nt, Artificial Sequence
  Description of Artificial Sequence: Synthetic oligonucleotide
ccaggaucucggucagggu

SEQ ID NO: 2484055 - RNA, 19 nt, Artificial Sequence
  Description of Artificial Sequence: Synthetic oligonucleotide
gcucuggcccucgugucau

SEQ ID NO: 2484056 - RNA, 19 nt, Artificial Sequence
  Description of Artificial Sequence: Synthetic oligonucleotide
ggcucaugccugccaccau

SEQ ID NO: 2484057 - RNA, 19 nt, Artificial Sequence
  Description of Artificial Sequence: Synthetic oligonucleotide
ggagggcuguagggccaca

SEQ ID NO: 2484058 - RNA, 19 nt, Artificial Sequence
  Description of Artificial Sequence: Synthetic oligonucleotide
ccuugacucgggccccugu

SEQ ID NO: 2484059 - RNA, 19 nt, Artificial Sequence
  Description of Artificial Sequence: Synthetic oligonucleotide
gcacucgguaugccucauu

SEQ ID NO: 2484060 - RNA, 19 nt, Artificial Sequence
  Description of Artificial Sequence: Synthetic oligonucleotide
ggagacggggaggguccuu

SEQ ID NO: 2484061 - RNA, 19 nt, Artificial Sequence
  Description of Artificial Sequence: Synthetic oligonucleotide
gccgggugggagggcugua

SEQ ID NO: 2484062 - RNA, 19 nt, Artificial Sequence
  Description of Artificial Sequence: Synthetic oligonucleotide
cggcuaugcagggcugggu

SEQ ID NO: 2484063 - RNA, 19 nt, Artificial Sequence
  Description of Artificial Sequence: Synthetic oligonucleotide
cgggccccuguggccucac

SEQ ID NO: 2484064 - RNA, 19 nt, Artificial Sequence
  Description of Artificial Sequence: Synthetic oligonucleotide
uguaauguaucuaccagcc

SEQ ID NO: 2484065 - RNA, 19 nt, Artificial Sequence
  Description of Artificial Sequence: Synthetic oligonucleotide
ugaacuagguaccucaggc

SEQ ID NO: 2484066 - RNA, 19 nt, Artificial Sequence
  Description of Artificial Sequence: Synthetic oligonucleotide
ugguuuauccccuucagag

SEQ ID NO: 2484067 - RNA, 19 nt, Artificial Sequence
  Description of Artificial Sequence: Synthetic oligonucleotide
uaauguaucuaccagccgu

SEQ ID NO: 2484068 - RNA, 19 nt, Artificial Sequence
  Description of Artificial Sequence: Synthetic oligonucleotide
aaucuguuuccuuucucuc

SEQ ID NO: 2484069 - RNA, 19 nt, Artificial Sequence
  Description of Artificial Sequence: Synthetic oligonucleotide
acggaguugagccucaccg

SEQ ID NO: 2484070 - RNA, 19 nt, Artificial Sequence
  Description of Artificial Sequence: Synthetic oligonucleotide
aauggucuccgauggccgc

SEQ ID NO: 2484071 - RNA, 19 nt, Artificial Sequence
  Description of Artificial Sequence: Synthetic oligonucleotide
aggcuucauacucaggccc

SEQ ID NO: 2484072 - RNA, 19 nt, Artificial Sequence
  Description of Artificial Sequence: Synthetic oligonucleotide
cuguaauguaucuaccagc

SEQ ID NO: 2484073 - RNA, 19 nt, Artificial Sequence
  Description of Artificial Sequence: Synthetic oligonucleotide
guaguaguaguaguagugg

SEQ ID NO: 2484074 - RNA, 19 nt, Artificial Sequence
  Description of Artificial Sequence: Synthetic oligonucleotide
gaacuagguaccucaggcg

SEQ ID NO: 2484075 - RNA, 19 nt, Artificial Sequence
  Description of Artificial Sequence: Synthetic oligonucleotide
aacagcagacggcgcaccc

SEQ ID NO: 2484076 - RNA, 19 nt, Artificial Sequence
  Description of Artificial Sequence: Synthetic oligonucleotide
uucggacagccccacaacg

SEQ ID NO: 2484077 - RNA, 19 nt, Artificial Sequence
  Description of Artificial Sequence: Synthetic oligonucleotide
cauacucaggcccagugag

SEQ ID NO: 2484078 - RNA, 19 nt, Artificial Sequence
  Description of Artificial Sequence: Synthetic oligonucleotide
guaucuaccagccguuucc

SEQ ID NO: 2484079 - RNA, 19 nt, Artificial Sequence
  Description of Artificial Sequence: Synthetic oligonucleotide
aacggaguugagccucacc

SEQ ID NO: 2484080 - RNA, 19 nt, Artificial Sequence
  Description of Artificial Sequence: Synthetic oligonucleotide
auagcugcggucccgguag

SEQ ID NO: 2484081 - RNA, 19 nt, Artificial Sequence
  Description of Artificial Sequence: Synthetic oligonucleotide
cuugcuuugcaccaacaac

SEQ ID NO: 2484082 - RNA, 19 nt, Artificial Sequence
  Description of Artificial Sequence: Synthetic oligonucleotide
aguaguaguaguaguagug

SEQ ID NO: 2484083 - RNA, 19 nt, Artificial Sequence
  Description of Artificial Sequence: Synthetic oligonucleotide
agaggcuucagcuucuagu

SEQ ID NO: 2484084 - RNA, 19 nt, Artificial Sequence
  Description of Artificial Sequence: Synthetic oligonucleotide
uggacauggagggucauag

SEQ ID NO: 2484085 - RNA, 19 nt, Artificial Sequence
  Description of Artificial Sequence: Synthetic oligonucleotide
ugcuuugcaccaacaacag

SEQ ID NO: 2484086 - RNA, 19 nt, Artificial Sequence
  Description of Artificial Sequence: Synthetic oligonucleotide
guaguaguaguaguaguag

SEQ ID NO: 2484087 - RNA, 19 nt, Artificial Sequence
  Description of Artificial Sequence: Synthetic oligonucleotide
uucuaguucaggcucuggu

SEQ ID NO: 2484088 - RNA, 19 nt, Artificial Sequence
  Description of Artificial Sequence: Synthetic oligonucleotide
gauugcacugccucagagc

SEQ ID NO: 2484089 - RNA, 19 nt, Artificial Sequence
  Description of Artificial Sequence: Synthetic oligonucleotide
gagcguuucggacagcccc

SEQ ID NO: 2484090 - RNA, 19 nt, Artificial Sequence
  Description of Artificial Sequence: Synthetic oligonucleotide
aggcccagugagcacaccc

SEQ ID NO: 2484091 - RNA, 19 nt, Artificial Sequence
  Description of Artificial Sequence: Synthetic oligonucleotide
uccaaggcuucauacucag

SEQ ID NO: 2484092 - RNA, 19 nt, Artificial Sequence
  Description of Artificial Sequence: Synthetic oligonucleotide
uaguaguaguaguaguagu

SEQ ID NO: 2484093 - RNA, 19 nt, Artificial Sequence
  Description of Artificial Sequence: Synthetic oligonucleotide
ucauacucaggcccaguga

SEQ ID NO: 2484094 - RNA, 19 nt, Artificial Sequence
  Description of Artificial Sequence: Synthetic oligonucleotide
aguaguaguaguggcuccg

SEQ ID NO: 2484095 - RNA, 19 nt, Artificial Sequence
  Description of Artificial Sequence: Synthetic oligonucleotide
cuaguucaggcucugguuc

SEQ ID NO: 2484096 - RNA, 19 nt, Artificial Sequence
  Description of Artificial Sequence: Synthetic oligonucleotide
guaauguaucuaccagccg

SEQ ID NO: 2484097 - RNA, 19 nt, Artificial Sequence
  Description of Artificial Sequence: Synthetic oligonucleotide
aguaguaguggcuccggcu

SEQ ID NO: 2484098 - RNA, 19 nt, Artificial Sequence
  Description of Artificial Sequence: Synthetic oligonucleotide
uguuguuccaguucugguu

SEQ ID NO: 2484099 - RNA, 19 nt, Artificial Sequence
  Description of Artificial Sequence: Synthetic oligonucleotide
uuccguucccggucaaugg

SEQ ID NO: 2484100 - RNA, 19 nt, Artificial Sequence
  Description of Artificial Sequence: Synthetic oligonucleotide
cccacaacggaguugagcc

SEQ ID NO: 2484101 - RNA, 19 nt, Artificial Sequence
  Description of Artificial Sequence: Synthetic oligonucleotide
uuccgguuccauuuguugu

SEQ ID NO: 2484102 - RNA, 19 nt, Artificial Sequence
  Description of Artificial Sequence: Synthetic oligonucleotide
agauugcacugccucagag

SEQ ID NO: 2484103 - RNA, 19 nt, Artificial Sequence
  Description of Artificial Sequence: Synthetic oligonucleotide
cacacgcacgguaugcugg

SEQ ID NO: 2484104 - RNA, 19 nt, Artificial Sequence
  Description of Artificial Sequence: Synthetic oligonucleotide
gguuuauccccuucagagg

SEQ ID NO: 2484105 - RNA, 19 nt, Artificial Sequence
  Description of Artificial Sequence: Synthetic oligonucleotide
accuccgaccuccucuugc

SEQ ID NO: 2484106 - RNA, 19 nt, Artificial Sequence
  Description of Artificial Sequence: Synthetic oligonucleotide
uacguugcccauguuuggg

SEQ ID NO: 2484107 - RNA, 19 nt, Artificial Sequence
  Description of Artificial Sequence: Synthetic oligonucleotide
uccggagcguuucggacag

SEQ ID NO: 2484108 - RNA, 19 nt, Artificial Sequence
  Description of Artificial Sequence: Synthetic oligonucleotide
uucucucccugcugggugg

SEQ ID NO: 2484109 - RNA, 19 nt, Artificial Sequence
  Description of Artificial Sequence: Synthetic oligonucleotide
uguaucuaccagccguuuc

SEQ ID NO: 2484110 - RNA, 19 nt, Artificial Sequence
  Description of Artificial Sequence: Synthetic oligonucleotide
ggaguugagccucaccggg

SEQ ID NO: 2484111 - RNA, 19 nt, Artificial Sequence
  Description of Artificial Sequence: Synthetic oligonucleotide
ucuaguucaggcucugguu

SEQ ID NO: 2484112 - RNA, 19 nt, Artificial Sequence
  Description of Artificial Sequence: Synthetic oligonucleotide
uaucuaccagccguuuccg

SEQ ID NO: 2484113 - RNA, 19 nt, Artificial Sequence
  Description of Artificial Sequence: Synthetic oligonucleotide
cugaacuagguaccucagg

SEQ ID NO: 2484114 - RNA, 19 nt, Artificial Sequence
  Description of Artificial Sequence: Synthetic oligonucleotide
uccgguucuaguucaggcu

SEQ ID NO: 2484115 - RNA, 19 nt, Artificial Sequence
  Description of Artificial Sequence: Synthetic oligonucleotide
uggugccaaucccaggaag

SEQ ID NO: 2484116 - RNA, 19 nt, Artificial Sequence
  Description of Artificial Sequence: Synthetic oligonucleotide
aguaguaguaguaguggcu

SEQ ID NO: 2484117 - RNA, 19 nt, Artificial Sequence
  Description of Artificial Sequence: Synthetic oligonucleotide
uccuguacguugcccaugu

SEQ ID NO: 2484118 - RNA, 19 nt, Artificial Sequence
  Description of Artificial Sequence: Synthetic oligonucleotide
guaguaguggcuccggcuc

SEQ ID NO: 2484119 - RNA, 19 nt, Artificial Sequence
  Description of Artificial Sequence: Synthetic oligonucleotide
cuccgguucuaguucaggc

SEQ ID NO: 2484120 - RNA, 19 nt, Artificial Sequence
  Description of Artificial Sequence: Synthetic oligonucleotide
uacucaggcccagugagca

SEQ ID NO: 2484121 - RNA, 19 nt, Artificial Sequence
  Description of Artificial Sequence: Synthetic oligonucleotide
cauguggucccugaacuag

SEQ ID NO: 2484122 - RNA, 19 nt, Artificial Sequence
  Description of Artificial Sequence: Synthetic oligonucleotide
guaguaguaguaguggcuc

SEQ ID NO: 2484123 - RNA, 19 nt, Artificial Sequence
  Description of Artificial Sequence: Synthetic oligonucleotide
guuccgguuccauuuguug

SEQ ID NO: 2484124 - RNA, 19 nt, Artificial Sequence
  Description of Artificial Sequence: Synthetic oligonucleotide
ccaacaacagcagacggcg

SEQ ID NO: 2484125 - RNA, 19 nt, Artificial Sequence
  Description of Artificial Sequence: Synthetic oligonucleotide
aggcagugcauccaaggcu

SEQ ID NO: 2484126 - RNA, 19 nt, Artificial Sequence
  Description of Artificial Sequence: Synthetic oligonucleotide
aguaguaguaguaguagua

SEQ ID NO: 2484127 - RNA, 19 nt, Artificial Sequence
  Description of Artificial Sequence: Synthetic oligonucleotide
cucgcccuugcuuugcacc

SEQ ID NO: 2484128 - RNA, 19 nt, Artificial Sequence
  Description of Artificial Sequence: Synthetic oligonucleotide
cauguuugggcuucgagcu

SEQ ID NO: 2484129 - RNA, 19 nt, Artificial Sequence
  Description of Artificial Sequence: Synthetic oligonucleotide
uuucggacagccccacaac

SEQ ID NO: 2484130 - RNA, 19 nt, Artificial Sequence
  Description of Artificial Sequence: Synthetic oligonucleotide
ccauguuugggcuucgagc

SEQ ID NO: 2484131 - RNA, 19 nt, Artificial Sequence
  Description of Artificial Sequence: Synthetic oligonucleotide
uggggucccagauugcacu

SEQ ID NO: 2484132 - RNA, 19 nt, Artificial Sequence
  Description of Artificial Sequence: Synthetic oligonucleotide
ucuaccagccguuuccguu

SEQ ID NO: 2484133 - RNA, 19 nt, Artificial Sequence
  Description of Artificial Sequence: Synthetic oligonucleotide
uaguaguaguggcuccggc

SEQ ID NO: 2484134 - RNA, 19 nt, Artificial Sequence
  Description of Artificial Sequence: Synthetic oligonucleotide
ugugguccggagcguuucg

SEQ ID NO: 2484135 - RNA, 19 nt, Artificial Sequence
  Description of Artificial Sequence: Synthetic oligonucleotide
guacguugcccauguuugg

SEQ ID NO: 2484136 - RNA, 19 nt, Artificial Sequence
  Description of Artificial Sequence: Synthetic oligonucleotide
uuuauccccuucagaggcu

SEQ ID NO: 2484137 - RNA, 19 nt, Artificial Sequence
  Description of Artificial Sequence: Synthetic oligonucleotide
cucaggaccuccgaccucc

SEQ ID NO: 2484138 - RNA, 19 nt, Artificial Sequence
  Description of Artificial Sequence: Synthetic oligonucleotide
aauguaucuaccagccguu

SEQ ID NO: 2484139 - RNA, 19 nt, Artificial Sequence
  Description of Artificial Sequence: Synthetic oligonucleotide
ccuguaauguaucuaccag

SEQ ID NO: 2484140 - RNA, 19 nt, Artificial Sequence
  Description of Artificial Sequence: Synthetic oligonucleotide
acacgcacgguaugcuggg

SEQ ID NO: 2484141 - RNA, 19 nt, Artificial Sequence
  Description of Artificial Sequence: Synthetic oligonucleotide
ugcccaaucuguuuccuuu

SEQ ID NO: 2484142 - RNA, 19 nt, Artificial Sequence
  Description of Artificial Sequence: Synthetic oligonucleotide
uccguucccggucaauggu

SEQ ID NO: 2484143 - RNA, 19 nt, Artificial Sequence
  Description of Artificial Sequence: Synthetic oligonucleotide
uccauuuguuguuccaguu

SEQ ID NO: 2484144 - RNA, 19 nt, Artificial Sequence
  Description of Artificial Sequence: Synthetic oligonucleotide
agccuguaauguaucuacc

SEQ ID NO: 2484145 - RNA, 19 nt, Artificial Sequence
  Description of Artificial Sequence: Synthetic oligonucleotide
ggaagggucuggcacacgc

SEQ ID NO: 2484146 - RNA, 19 nt, Artificial Sequence
  Description of Artificial Sequence: Synthetic oligonucleotide
cagaccaggacaugugguc

SEQ ID NO: 2484147 - RNA, 19 nt, Artificial Sequence
  Description of Artificial Sequence: Synthetic oligonucleotide
cuagguaccucaggcgucc

SEQ ID NO: 2484148 - RNA, 19 nt, Artificial Sequence
  Description of Artificial Sequence: Synthetic oligonucleotide
ucgguacucugcccaaucu

SEQ ID NO: 2484149 - RNA, 19 nt, Artificial Sequence
  Description of Artificial Sequence: Synthetic oligonucleotide
cuucgagcuccgcugcugg

SEQ ID NO: 2484150 - RNA, 19 nt, Artificial Sequence
  Description of Artificial Sequence: Synthetic oligonucleotide
agcgcaguagcuccuggca

SEQ ID NO: 2484151 - RNA, 19 nt, Artificial Sequence
  Description of Artificial Sequence: Synthetic oligonucleotide
cuaccagccguuuccguuc

SEQ ID NO: 2484152 - RNA, 19 nt, Artificial Sequence
  Description of Artificial Sequence: Synthetic oligonucleotide
guuucggacagccccacaa

SEQ ID NO: 2484153 - RNA, 19 nt, Artificial Sequence
  Description of Artificial Sequence: Synthetic oligonucleotide
gugccaaucccaggaaggg

SEQ ID NO: 2484154 - RNA, 19 nt, Artificial Sequence
  Description of Artificial Sequence: Synthetic oligonucleotide
gggucuggcacacgcacgg

SEQ ID NO: 2484155 - RNA, 19 nt, Artificial Sequence
  Description of Artificial Sequence: Synthetic oligonucleotide
aguggcuccggcucuaguu

SEQ ID NO: 2484156 - RNA, 19 nt, Artificial Sequence
  Description of Artificial Sequence: Synthetic oligonucleotide
agcccucaggaccuccgac

SEQ ID NO: 2484157 - RNA, 19 nt, Artificial Sequence
  Description of Artificial Sequence: Synthetic oligonucleotide
aucccaggaagggucuggc

SEQ ID NO: 2484158 - RNA, 19 nt, Artificial Sequence
  Description of Artificial Sequence: Synthetic oligonucleotide
agagucagccuguaaugua

SEQ ID NO: 2484159 - RNA, 19 nt, Artificial Sequence
  Description of Artificial Sequence: Synthetic oligonucleotide
uccgguuccauuuguuguu

SEQ ID NO: 2484160 - RNA, 19 nt, Artificial Sequence
  Description of Artificial Sequence: Synthetic oligonucleotide
acuagguaccucaggcguc

SEQ ID NO: 2484161 - RNA, 19 nt, Artificial Sequence
  Description of Artificial Sequence: Synthetic oligonucleotide
caaucuguuuccuuucucu

SEQ ID NO: 2484162 - RNA, 19 nt, Artificial Sequence
  Description of Artificial Sequence: Synthetic oligonucleotide
uucccggucaauggucucc

SEQ ID NO: 2484163 - RNA, 19 nt, Artificial Sequence
  Description of Artificial Sequence: Synthetic oligonucleotide
guaccucaggcguccagug

SEQ ID NO: 2484164 - RNA, 19 nt, Artificial Sequence
  Description of Artificial Sequence: Synthetic oligonucleotide
ucccggucaauggucuccg

SEQ ID NO: 2484165 - RNA, 19 nt, Artificial Sequence
  Description of Artificial Sequence: Synthetic oligonucleotide
aggcucgguacucugccca

SEQ ID NO: 2484166 - RNA, 19 nt, Artificial Sequence
  Description of Artificial Sequence: Synthetic oligonucleotide
ucagccuguaauguaucua

SEQ ID NO: 2484167 - RNA, 19 nt, Artificial Sequence
  Description of Artificial Sequence: Synthetic oligonucleotide
ugccucugguucugguucc

SEQ ID NO: 2484168 - RNA, 19 nt, Artificial Sequence
  Description of Artificial Sequence: Synthetic oligonucleotide
cacaacggaguugagccuc

SEQ ID NO: 2484169 - RNA, 19 nt, Artificial Sequence
  Description of Artificial Sequence: Synthetic oligonucleotide
gaguccggcuugugguccg

SEQ ID NO: 2484170 - RNA, 19 nt, Artificial Sequence
  Description of Artificial Sequence: Synthetic oligonucleotide
gucauagcugcggucccgg

SEQ ID NO: 2484171 - RNA, 19 nt, Artificial Sequence
  Description of Artificial Sequence: Synthetic oligonucleotide
gaggcuucagcuucuaguu

SEQ ID NO: 2484172 - RNA, 19 nt, Artificial Sequence
  Description of Artificial Sequence: Synthetic oligonucleotide
ugcggucccgguagccagg

SEQ ID NO: 2484173 - RNA, 19 nt, Artificial Sequence
  Description of Artificial Sequence: Synthetic oligonucleotide
ucaggcguccaguggccug

SEQ ID NO: 2484174 - RNA, 19 nt, Artificial Sequence
  Description of Artificial Sequence: Synthetic oligonucleotide
uaccagccguuuccguucc

SEQ ID NO: 2484175 - RNA, 19 nt, Artificial Sequence
  Description of Artificial Sequence: Synthetic oligonucleotide
cuggcuccggcucuaguuc

SEQ ID NO: 2484176 - RNA, 19 nt, Artificial Sequence
  Description of Artificial Sequence: Synthetic oligonucleotide
uccggcuugugguccggag

SEQ ID NO: 2484177 - RNA, 19 nt, Artificial Sequence
  Description of Artificial Sequence: Synthetic oligonucleotide
ugguccggagcguuucgga

SEQ ID NO: 2484178 - RNA, 19 nt, Artificial Sequence
  Description of Artificial Sequence: Synthetic oligonucleotide
ccagagucagccuguaaug

SEQ ID NO: 2484179 - RNA, 19 nt, Artificial Sequence
  Description of Artificial Sequence: Synthetic oligonucleotide
uggcacacgcacgguaugc

SEQ ID NO: 2484180 - RNA, 19 nt, Artificial Sequence
  Description of Artificial Sequence: Synthetic oligonucleotide
caacaacagcagacggcgc

SEQ ID NO: 2484181 - RNA, 19 nt, Artificial Sequence
  Description of Artificial Sequence: Synthetic oligonucleotide
gucaauggucuccgauggc

SEQ ID NO: 2484182 - RNA, 19 nt, Artificial Sequence
  Description of Artificial Sequence: Synthetic oligonucleotide
gccuguaauguaucuacca

SEQ ID NO: 2484183 - RNA, 19 nt, Artificial Sequence
  Description of Artificial Sequence: Synthetic oligonucleotide
ggacauguggucccugaac

SEQ ID NO: 2484184 - RNA, 19 nt, Artificial Sequence
  Description of Artificial Sequence: Synthetic oligonucleotide
guuguuccaguucugguuu

SEQ ID NO: 2484185 - RNA, 19 nt, Artificial Sequence
  Description of Artificial Sequence: Synthetic oligonucleotide
guggcuccggcucuaguuc

SEQ ID NO: 2484186 - RNA, 19 nt, Artificial Sequence
  Description of Artificial Sequence: Synthetic oligonucleotide
acguggugccaaucccagg

SEQ ID NO: 2484187 - RNA, 19 nt, Artificial Sequence
  Description of Artificial Sequence: Synthetic oligonucleotide
cugguuuauccccuucaga

SEQ ID NO: 2484188 - RNA, 19 nt, Artificial Sequence
  Description of Artificial Sequence: Synthetic oligonucleotide
cacgguaugcugggcacag

SEQ ID NO: 2484189 - RNA, 19 nt, Artificial Sequence
  Description of Artificial Sequence: Synthetic oligonucleotide
cucgguacucugcccaauc

SEQ ID NO: 2484190 - RNA, 19 nt, Artificial Sequence
  Description of Artificial Sequence: Synthetic oligonucleotide
ugcuggguggaguccggcu

SEQ ID NO: 2484191 - RNA, 19 nt, Artificial Sequence
  Description of Artificial Sequence: Synthetic oligonucleotide
cagcgcaguagcuccuggc

SEQ ID NO: 2484192 - RNA, 19 nt, Artificial Sequence
  Description of Artificial Sequence: Synthetic oligonucleotide
cagcagcccagagucagcc

SEQ ID NO: 2484193 - RNA, 19 nt, Artificial Sequence
  Description of Artificial Sequence: Synthetic oligonucleotide
uggccgcuccuguacguug

SEQ ID NO: 2484194 - RNA, 19 nt, Artificial Sequence
  Description of Artificial Sequence: Synthetic oligonucleotide
ugccaaucccaggaagggu

SEQ ID NO: 2484195 - RNA, 19 nt, Artificial Sequence
  Description of Artificial Sequence: Synthetic oligonucleotide
cuggguggaguccggcuug

SEQ ID NO: 2484196 - RNA, 19 nt, Artificial Sequence
  Description of Artificial Sequence: Synthetic oligonucleotide
cugcggucccgguagccag

SEQ ID NO: 2484197 - RNA, 19 nt, Artificial Sequence
  Description of Artificial Sequence: Synthetic oligonucleotide
ggucccagauugcacugcc

SEQ ID NO: 2484198 - RNA, 19 nt, Artificial Sequence
  Description of Artificial Sequence: Synthetic oligonucleotide
ccugcgcucugcaucaggc

SEQ ID NO: 2484199 - RNA, 19 nt, Artificial Sequence
  Description of Artificial Sequence: Synthetic oligonucleotide
guccggagcguuucggaca

SEQ ID NO: 2484200 - RNA, 19 nt, Artificial Sequence
  Description of Artificial Sequence: Synthetic oligonucleotide
ggucccugaacuagguacc

SEQ ID NO: 2484201 - RNA, 19 nt, Artificial Sequence
  Description of Artificial Sequence: Synthetic oligonucleotide
cugguuccgguuccauuug

SEQ ID NO: 2484202 - RNA, 19 nt, Artificial Sequence
  Description of Artificial Sequence: Synthetic oligonucleotide
guggaguccggcuuguggu

SEQ ID NO: 2484203 - RNA, 19 nt, Artificial Sequence
  Description of Artificial Sequence: Synthetic oligonucleotide
cucccugcuggguggaguc

SEQ ID NO: 2484204 - RNA, 19 nt, Artificial Sequence
  Description of Artificial Sequence: Synthetic oligonucleotide
agguaccucaggcguccag

SEQ ID NO: 2484205 - RNA, 19 nt, Artificial Sequence
  Description of Artificial Sequence: Synthetic oligonucleotide
caggcguccaguggccugg

SEQ ID NO: 2484206 - RNA, 19 nt, Artificial Sequence
  Description of Artificial Sequence: Synthetic oligonucleotide
uuauccccuucagaggcuu

SEQ ID NO: 2484207 - RNA, 19 nt, Artificial Sequence
  Description of Artificial Sequence: Synthetic oligonucleotide
uugcccauguuugggcuuc

SEQ ID NO: 2484208 - RNA, 19 nt, Artificial Sequence
  Description of Artificial Sequence: Synthetic oligonucleotide
aucuaccagccguuuccgu

SEQ ID NO: 2484209 - RNA, 19 nt, Artificial Sequence
  Description of Artificial Sequence: Synthetic oligonucleotide
cagugagcacaccccgggc

SEQ ID NO: 2484210 - RNA, 19 nt, Artificial Sequence
  Description of Artificial Sequence: Synthetic oligonucleotide
gcccagugagcacaccccg

SEQ ID NO: 2484211 - RNA, 19 nt, Artificial Sequence
  Description of Artificial Sequence: Synthetic oligonucleotide
agggucuggcacacgcacg

SEQ ID NO: 2484212 - RNA, 19 nt, Artificial Sequence
  Description of Artificial Sequence: Synthetic oligonucleotide
ccugaacuagguaccucag

SEQ ID NO: 2484213 - RNA, 19 nt, Artificial Sequence
  Description of Artificial Sequence: Synthetic oligonucleotide
uugugguccggagcguuuc

SEQ ID NO: 2484214 - RNA, 19 nt, Artificial Sequence
  Description of Artificial Sequence: Synthetic oligonucleotide
ggugaggcucgguacucug

SEQ ID NO: 2484215 - RNA, 19 nt, Artificial Sequence
  Description of Artificial Sequence: Synthetic oligonucleotide
gagucagccuguaauguau

SEQ ID NO: 2484216 - RNA, 19 nt, Artificial Sequence
  Description of Artificial Sequence: Synthetic oligonucleotide
gcuuugcaccaacaacagc

SEQ ID NO: 2484217 - RNA, 19 nt, Artificial Sequence
  Description of Artificial Sequence: Synthetic oligonucleotide
accagccguuuccguuccc

SEQ ID NO: 2484218 - RNA, 19 nt, Artificial Sequence
  Description of Artificial Sequence: Synthetic oligonucleotide
ccagauugcacugccucag

SEQ ID NO: 2484219 - RNA, 19 nt, Artificial Sequence
  Description of Artificial Sequence: Synthetic oligonucleotide
cagacggcgcacccugcgc

SEQ ID NO: 2484220 - RNA, 19 nt, Artificial Sequence
  Description of Artificial Sequence: Synthetic oligonucleotide
ccgguucuaguucaggcuc

SEQ ID NO: 2484221 - RNA, 19 nt, Artificial Sequence
  Description of Artificial Sequence: Synthetic oligonucleotide
cuggcacacgcacgguaug

SEQ ID NO: 2484222 - RNA, 19 nt, Artificial Sequence
  Description of Artificial Sequence: Synthetic oligonucleotide
gugguccggagcguuucgg

SEQ ID NO: 2484223 - RNA, 19 nt, Artificial Sequence
  Description of Artificial Sequence: Synthetic oligonucleotide
caggacauguggucccuga

SEQ ID NO: 2484224 - RNA, 19 nt, Artificial Sequence
  Description of Artificial Sequence: Synthetic oligonucleotide
acgguaugcugggcacagc

SEQ ID NO: 2484225 - RNA, 19 nt, Artificial Sequence
  Description of Artificial Sequence: Synthetic oligonucleotide
cacccugcgcucugcauca

SEQ ID NO: 2484226 - RNA, 19 nt, Artificial Sequence
  Description of Artificial Sequence: Synthetic oligonucleotide
gccaaucccaggaaggguc

SEQ ID NO: 2484227 - RNA, 19 nt, Artificial Sequence
  Description of Artificial Sequence: Synthetic oligonucleotide
gcccucaggaccuccgacc

SEQ ID NO: 2484228 - RNA, 19 nt, Artificial Sequence
  Description of Artificial Sequence: Synthetic oligonucleotide
cucuggggucccagauugc

SEQ ID NO: 2484229 - RNA, 19 nt, Artificial Sequence
  Description of Artificial Sequence: Synthetic oligonucleotide
caacagcagacggcgcacc

SEQ ID NO: 2484230 - RNA, 19 nt, Artificial Sequence
  Description of Artificial Sequence: Synthetic oligonucleotide
cccugaacuagguaccuca

SEQ ID NO: 2484231 - RNA, 19 nt, Artificial Sequence
  Description of Artificial Sequence: Synthetic oligonucleotide
gugaggcucgguacucugc

SEQ ID NO: 2484232 - RNA, 19 nt, Artificial Sequence
  Description of Artificial Sequence: Synthetic oligonucleotide
uaguggcuccggcucuagu

SEQ ID NO: 2484233 - RNA, 19 nt, Artificial Sequence
  Description of Artificial Sequence: Synthetic oligonucleotide
gcgcaguagcuccuggcag

SEQ ID NO: 2484234 - RNA, 19 nt, Artificial Sequence
  Description of Artificial Sequence: Synthetic oligonucleotide
gguccggagcguuucggac

SEQ ID NO: 2484235 - RNA, 19 nt, Artificial Sequence
  Description of Artificial Sequence: Synthetic oligonucleotide
cgcaguagcuccuggcagg

SEQ ID NO: 2484236 - RNA, 19 nt, Artificial Sequence
  Description of Artificial Sequence: Synthetic oligonucleotide
agcguuucggacagcccca

SEQ ID NO: 2484237 - RNA, 19 nt, Artificial Sequence
  Description of Artificial Sequence: Synthetic oligonucleotide
uccgauggccgcuccugua

SEQ ID NO: 2484238 - RNA, 19 nt, Artificial Sequence
  Description of Artificial Sequence: Synthetic oligonucleotide
gguaugcugggcacagcgc

SEQ ID NO: 2484239 - RNA, 19 nt, Artificial Sequence
  Description of Artificial Sequence: Synthetic oligonucleotide
auggagggucauagcugcg

SEQ ID NO: 2484240 - RNA, 19 nt, Artificial Sequence
  Description of Artificial Sequence: Synthetic oligonucleotide
ugagccucaccggggcaga

SEQ ID NO: 2484241 - RNA, 19 nt, Artificial Sequence
  Description of Artificial Sequence: Synthetic oligonucleotide
cggcuugugguccggagcg

SEQ ID NO: 2484242 - RNA, 19 nt, Artificial Sequence
  Description of Artificial Sequence: Synthetic oligonucleotide
cccauguuugggcuucgag

SEQ ID NO: 2484243 - RNA, 19 nt, Artificial Sequence
  Description of Artificial Sequence: Synthetic oligonucleotide
cggucaauggucuccgaug

SEQ ID NO: 2484244 - RNA, 19 nt, Artificial Sequence
  Description of Artificial Sequence: Synthetic oligonucleotide
cuguacguugcccauguuu

SEQ ID NO: 2484245 - RNA, 19 nt, Artificial Sequence
  Description of Artificial Sequence: Synthetic oligonucleotide
gcacacgcacgguaugcug

SEQ ID NO: 2484246 - RNA, 19 nt, Artificial Sequence
  Description of Artificial Sequence: Synthetic oligonucleotide
gguacucugcccaaucugu

SEQ ID NO: 2484247 - RNA, 19 nt, Artificial Sequence
  Description of Artificial Sequence: Synthetic oligonucleotide
ugcccauguuugggcuucg

SEQ ID NO: 2484248 - RNA, 19 nt, Artificial Sequence
  Description of Artificial Sequence: Synthetic oligonucleotide
gccucaccggggcagauga

SEQ ID NO: 2484249 - RNA, 19 nt, Artificial Sequence
  Description of Artificial Sequence: Synthetic oligonucleotide
ccagcuccgguucuaguuc

SEQ ID NO: 2484250 - RNA, 19 nt, Artificial Sequence
  Description of Artificial Sequence: Synthetic oligonucleotide
ucccugaacuagguaccuc

SEQ ID NO: 2484251 - RNA, 19 nt, Artificial Sequence
  Description of Artificial Sequence: Synthetic oligonucleotide
cauagcugcggucccggua

SEQ ID NO: 2484252 - RNA, 19 nt, Artificial Sequence
  Description of Artificial Sequence: Synthetic oligonucleotide
acaacggaguugagccuca

SEQ ID NO: 2484253 - RNA, 19 nt, Artificial Sequence
  Description of Artificial Sequence: Synthetic oligonucleotide
auggucuccgauggccgcu

SEQ ID NO: 2484254 - RNA, 19 nt, Artificial Sequence
  Description of Artificial Sequence: Synthetic oligonucleotide
cggaguugagccucaccgg

SEQ ID NO: 2484255 - RNA, 19 nt, Artificial Sequence
  Description of Artificial Sequence: Synthetic oligonucleotide
gcacccugcgcucugcauc

SEQ ID NO: 2484256 - RNA, 19 nt, Artificial Sequence
  Description of Artificial Sequence: Synthetic oligonucleotide
gacggcgcacccugcgcuc

SEQ ID NO: 2484257 - RNA, 19 nt, Artificial Sequence
  Description of Artificial Sequence: Synthetic oligonucleotide
ggaguccggcuuguggucc

SEQ ID NO: 2484258 - RNA, 19 nt, Artificial Sequence
  Description of Artificial Sequence: Synthetic oligonucleotide
gauggccgcuccuguacgu

SEQ ID NO: 2484259 - RNA, 19 nt, Artificial Sequence
  Description of Artificial Sequence: Synthetic oligonucleotide
cuccuguacguugcccaug

SEQ ID NO: 2484260 - RNA, 19 nt, Artificial Sequence
  Description of Artificial Sequence: Synthetic oligonucleotide
caaucccaggaagggucug

SEQ ID NO: 2484261 - RNA, 19 nt, Artificial Sequence
  Description of Artificial Sequence: Synthetic oligonucleotide
guaguggcuccggcucuag

SEQ ID NO: 2484262 - RNA, 19 nt, Artificial Sequence
  Description of Artificial Sequence: Synthetic oligonucleotide
auguaucuaccagccguuu

SEQ ID NO: 2484263 - RNA, 19 nt, Artificial Sequence
  Description of Artificial Sequence: Synthetic oligonucleotide
cagauugcacugccucaga

SEQ ID NO: 2484264 - RNA, 19 nt, Artificial Sequence
  Description of Artificial Sequence: Synthetic oligonucleotide
gccguuuccguucccgguc

SEQ ID NO: 2484265 - RNA, 19 nt, Artificial Sequence
  Description of Artificial Sequence: Synthetic oligonucleotide
aggaagggucuggcacacg

SEQ ID NO: 2484266 - RNA, 19 nt, Artificial Sequence
  Description of Artificial Sequence: Synthetic oligonucleotide
ggcccagugagcacacccc

SEQ ID NO: 2484267 - RNA, 19 nt, Artificial Sequence
  Description of Artificial Sequence: Synthetic oligonucleotide
ccccacguggugccaaucc

SEQ ID NO: 2484268 - RNA, 19 nt, Artificial Sequence
  Description of Artificial Sequence: Synthetic oligonucleotide
cagagucagccuguaaugu

SEQ ID NO: 2484269 - RNA, 19 nt, Artificial Sequence
  Description of Artificial Sequence: Synthetic oligonucleotide
aguccggcuugugguccgg

SEQ ID NO: 2484270 - RNA, 19 nt, Artificial Sequence
  Description of Artificial Sequence: Synthetic oligonucleotide
ccggcuugugguccggagc

SEQ ID NO: 2484271 - RNA, 19 nt, Artificial Sequence
  Description of Artificial Sequence: Synthetic oligonucleotide
cugccucgcccuugcuuug

SEQ ID NO: 2484272 - RNA, 19 nt, Artificial Sequence
  Description of Artificial Sequence: Synthetic oligonucleotide
gugcauccaaggcuucaua

SEQ ID NO: 2484273 - RNA, 19 nt, Artificial Sequence
  Description of Artificial Sequence: Synthetic oligonucleotide
ccgauggccgcuccuguac

SEQ ID NO: 2484274 - RNA, 19 nt, Artificial Sequence
  Description of Artificial Sequence: Synthetic oligonucleotide
ccccacaacggaguugagc

SEQ ID NO: 2484275 - RNA, 19 nt, Artificial Sequence
  Description of Artificial Sequence: Synthetic oligonucleotide
cuccgaccuccucuugcuc

SEQ ID NO: 2484276 - RNA, 19 nt, Artificial Sequence
  Description of Artificial Sequence: Synthetic oligonucleotide
ccucaggcguccaguggcc

SEQ ID NO: 2484277 - RNA, 19 nt, Artificial Sequence
  Description of Artificial Sequence: Synthetic oligonucleotide
ggagcguuucggacagccc

SEQ ID NO: 2484278 - RNA, 19 nt, Artificial Sequence
  Description of Artificial Sequence: Synthetic oligonucleotide
agcuccgguucuaguucag

SEQ ID NO: 2484279 - RNA, 19 nt, Artificial Sequence
  Description of Artificial Sequence: Synthetic oligonucleotide
uggucuccgauggccgcuc

SEQ ID NO: 2484280 - RNA, 19 nt, Artificial Sequence
  Description of Artificial Sequence: Synthetic oligonucleotide
cugcuggguggaguccggc

SEQ ID NO: 2484281 - RNA, 19 nt, Artificial Sequence
  Description of Artificial Sequence: Synthetic oligonucleotide
uagguaccucaggcgucca

SEQ ID NO: 2484282 - RNA, 19 nt, Artificial Sequence
  Description of Artificial Sequence: Synthetic oligonucleotide
cgguacucugcccaaucug

SEQ ID NO: 2484283 - RNA, 19 nt, Artificial Sequence
  Description of Artificial Sequence: Synthetic oligonucleotide
ccgguagccaggccccacg

SEQ ID NO: 2484284 - RNA, 19 nt, Artificial Sequence
  Description of Artificial Sequence: Synthetic oligonucleotide
ccacguggugccaauccca

SEQ ID NO: 2484285 - RNA, 19 nt, Artificial Sequence
  Description of Artificial Sequence: Synthetic oligonucleotide
ccguucccggucaaugguc

SEQ ID NO: 2484286 - RNA, 19 nt, Artificial Sequence
  Description of Artificial Sequence: Synthetic oligonucleotide
gguaccucaggcguccagu

SEQ ID NO: 2484287 - RNA, 19 nt, Artificial Sequence
  Description of Artificial Sequence: Synthetic oligonucleotide
cggagcguuucggacagcc

SEQ ID NO: 2484288 - RNA, 19 nt, Artificial Sequence
  Description of Artificial Sequence: Synthetic oligonucleotide
cgauggccgcuccuguacg

SEQ ID NO: 2484289 - RNA, 19 nt, Artificial Sequence
  Description of Artificial Sequence: Synthetic oligonucleotide
cccagagucagccuguaau

SEQ ID NO: 2484290 - RNA, 19 nt, Artificial Sequence
  Description of Artificial Sequence: Synthetic oligonucleotide
caacggaguugagccucac

SEQ ID NO: 2484291 - RNA, 19 nt, Artificial Sequence
  Description of Artificial Sequence: Synthetic oligonucleotide
cgcacgguaugcugggcac

SEQ ID NO: 2484292 - RNA, 19 nt, Artificial Sequence
  Description of Artificial Sequence: Synthetic oligonucleotide
guugcccauguuugggcuu

SEQ ID NO: 2484293 - RNA, 19 nt, Artificial Sequence
  Description of Artificial Sequence: Synthetic oligonucleotide
ccggcucuaguuccggcuc

SEQ ID NO: 2484294 - RNA, 19 nt, Artificial Sequence
  Description of Artificial Sequence: Synthetic oligonucleotide
ggccgcuccuguacguugc

SEQ ID NO: 2484295 - RNA, 19 nt, Artificial Sequence
  Description of Artificial Sequence: Synthetic oligonucleotide
cccugcgcucugcaucagg

SEQ ID NO: 2484296 - RNA, 19 nt, Artificial Sequence
  Description of Artificial Sequence: Synthetic oligonucleotide
acggcgcacccugcgcucu

SEQ ID NO: 2484297 - RNA, 19 nt, Artificial Sequence
  Description of Artificial Sequence: Synthetic oligonucleotide
gucccugaacuagguaccu

SEQ ID NO: 2484298 - RNA, 19 nt, Artificial Sequence
  Description of Artificial Sequence: Synthetic oligonucleotide
cuggacauggagggucaua

SEQ ID NO: 2484299 - RNA, 19 nt, Artificial Sequence
  Description of Artificial Sequence: Synthetic oligonucleotide
cuugugguccggagcguuu

SEQ ID NO: 2484300 - RNA, 19 nt, Artificial Sequence
  Description of Artificial Sequence: Synthetic oligonucleotide
ccgguuccauuuguuguuc

SEQ ID NO: 2484301 - RNA, 19 nt, Artificial Sequence
  Description of Artificial Sequence: Synthetic oligonucleotide
ggcucgguacucugcccaa

SEQ ID NO: 2484302 - RNA, 19 nt, Artificial Sequence
  Description of Artificial Sequence: Synthetic oligonucleotide
ccucgcccuugcuuugcac

SEQ ID NO: 2484303 - RNA, 19 nt, Artificial Sequence
  Description of Artificial Sequence: Synthetic oligonucleotide
acccugcgcucugcaucag

SEQ ID NO: 2484304 - RNA, 19 nt, Artificial Sequence
  Description of Artificial Sequence: Synthetic oligonucleotide
cccuugcuuugcaccaaca

SEQ ID NO: 2484305 - RNA, 19 nt, Artificial Sequence
  Description of Artificial Sequence: Synthetic oligonucleotide
ccaaucccaggaagggucu

SEQ ID NO: 2484306 - RNA, 19 nt, Artificial Sequence
  Description of Artificial Sequence: Synthetic oligonucleotide
ccguuuccguucccgguca

SEQ ID NO: 2484307 - RNA, 19 nt, Artificial Sequence
  Description of Artificial Sequence: Synthetic oligonucleotide
gcacgguaugcugggcaca

SEQ ID NO: 2484308 - RNA, 19 nt, Artificial Sequence
  Description of Artificial Sequence: Synthetic oligonucleotide
cguccaguggccuggacau

SEQ ID NO: 2484309 - RNA, 19 nt, Artificial Sequence
  Description of Artificial Sequence: Synthetic oligonucleotide
aggccccacguggugccaa

SEQ ID NO: 2484310 - RNA, 19 nt, Artificial Sequence
  Description of Artificial Sequence: Synthetic oligonucleotide
cugcccaaucuguuuccuu

SEQ ID NO: 2484311 - RNA, 19 nt, Artificial Sequence
  Description of Artificial Sequence: Synthetic oligonucleotide
cgcucugcaucaggcagug

SEQ ID NO: 2484312 - RNA, 19 nt, Artificial Sequence
  Description of Artificial Sequence: Synthetic oligonucleotide
ggcacacgcacgguaugcu

SEQ ID NO: 2484313 - RNA, 19 nt, Artificial Sequence
  Description of Artificial Sequence: Synthetic oligonucleotide
gcguuucggacagccccac

SEQ ID NO: 2484314 - RNA, 19 nt, Artificial Sequence
  Description of Artificial Sequence: Synthetic oligonucleotide
gcagugcauccaaggcuuc

SEQ ID NO: 2484315 - RNA, 19 nt, Artificial Sequence
  Description of Artificial Sequence: Synthetic oligonucleotide
ccucaggaccuccgaccuc

SEQ ID NO: 2484316 - RNA, 19 nt, Artificial Sequence
  Description of Artificial Sequence: Synthetic oligonucleotide
ccucaccggggcagaugac

SEQ ID NO: 2484317 - RNA, 19 nt, Artificial Sequence
  Description of Artificial Sequence: Synthetic oligonucleotide
ccgcuccuguacguugccc

SEQ ID NO: 2484318 - RNA, 19 nt, Artificial Sequence
  Description of Artificial Sequence: Synthetic oligonucleotide
cccucaggaccuccgaccu

SEQ ID NO: 2484319 - RNA, 19 nt, Artificial Sequence
  Description of Artificial Sequence: Synthetic oligonucleotide
ccaggacauguggucccug

SEQ ID NO: 2484320 - RNA, 19 nt, Artificial Sequence
  Description of Artificial Sequence: Synthetic oligonucleotide
aggcguccaguggccugga

SEQ ID NO: 2484321 - RNA, 19 nt, Artificial Sequence
  Description of Artificial Sequence: Synthetic oligonucleotide
ccuccgaccuccucuugcu

SEQ ID NO: 2484322 - RNA, 19 nt, Artificial Sequence
  Description of Artificial Sequence: Synthetic oligonucleotide
ggcguccaguggccuggac

SEQ ID NO: 2484323 - RNA, 19 nt, Artificial Sequence
  Description of Artificial Sequence: Synthetic oligonucleotide
ccgggccaccagcgcaucc

SEQ ID NO: 2484324 - RNA, 19 nt, Artificial Sequence
  Description of Artificial Sequence: Synthetic oligonucleotide
gguuccgguuccauuuguu

SEQ ID NO: 2484325 - RNA, 19 nt, Artificial Sequence
  Description of Artificial Sequence: Synthetic oligonucleotide
ggguggaguccggcuugug

SEQ ID NO: 2484326 - RNA, 19 nt, Artificial Sequence
  Description of Artificial Sequence: Synthetic oligonucleotide
cguugcccauguuugggcu

SEQ ID NO: 2484327 - RNA, 19 nt, Artificial Sequence
  Description of Artificial Sequence: Synthetic oligonucleotide
ggcugccucgcccuugcuu

SEQ ID NO: 2484328 - RNA, 19 nt, Artificial Sequence
  Description of Artificial Sequence: Synthetic oligonucleotide
ccacaacggaguugagccu

SEQ ID NO: 2484329 - RNA, 19 nt, Artificial Sequence
  Description of Artificial Sequence: Synthetic oligonucleotide
ggcuucgagcuccgcugcu

SEQ ID NO: 2484330 - RNA, 19 nt, Artificial Sequence
  Description of Artificial Sequence: Synthetic oligonucleotide
ccggucaauggucuccgau

SEQ ID NO: 2484331 - RNA, 19 nt, Artificial Sequence
  Description of Artificial Sequence: Synthetic oligonucleotide
ccagcgcauccagcagcag

SEQ ID NO: 2484332 - RNA, 19 nt, Artificial Sequence
  Description of Artificial Sequence: Synthetic oligonucleotide
gggugaggcucgguacucu

SEQ ID NO: 2484333 - RNA, 19 nt, Artificial Sequence
  Description of Artificial Sequence: Synthetic oligonucleotide
gcgcacccugcgcucugca

SEQ ID NO: 2484334 - RNA, 19 nt, Artificial Sequence
  Description of Artificial Sequence: Synthetic oligonucleotide
gcuugugguccggagcguu

SEQ ID NO: 2484335 - RNA, 19 nt, Artificial Sequence
  Description of Artificial Sequence: Synthetic oligonucleotide
gagccucaccggggcagau

SEQ ID NO: 2484336 - RNA, 19 nt, Artificial Sequence
  Description of Artificial Sequence: Synthetic oligonucleotide
cguuucggacagccccaca

SEQ ID NO: 2484337 - RNA, 19 nt, Artificial Sequence
  Description of Artificial Sequence: Synthetic oligonucleotide
cccggucaauggucuccga

SEQ ID NO: 2484338 - RNA, 19 nt, Artificial Sequence
  Description of Artificial Sequence: Synthetic oligonucleotide
ggcuugugguccggagcgu

SEQ ID NO: 2484339 - RNA, 19 nt, Artificial Sequence
  Description of Artificial Sequence: Synthetic oligonucleotide
gcucgguacucugcccaau

SEQ ID NO: 2484340 - RNA, 19 nt, Artificial Sequence
  Description of Artificial Sequence: Synthetic oligonucleotide
ccggagcguuucggacagc

SEQ ID NO: 2484341 - RNA, 19 nt, Artificial Sequence
  Description of Artificial Sequence: Synthetic oligonucleotide
cgguagccaggccccacgu

SEQ ID NO: 2484342 - RNA, 19 nt, Artificial Sequence
  Description of Artificial Sequence: Synthetic oligonucleotide
ccuguacguugcccauguu

SEQ ID NO: 2484343 - RNA, 19 nt, Artificial Sequence
  Description of Artificial Sequence: Synthetic oligonucleotide
aauaaaagcauucagaugu

SEQ ID NO: 2484344 - RNA, 19 nt, Artificial Sequence
  Description of Artificial Sequence: Synthetic oligonucleotide
acaaaauaagaauagaggc

SEQ ID NO: 2484345 - RNA, 19 nt, Artificial Sequence
  Description of Artificial Sequence: Synthetic oligonucleotide
uacaaaauaagaauagagg

SEQ ID NO: 2484346 - RNA, 19 nt, Artificial Sequence
  Description of Artificial Sequence: Synthetic oligonucleotide
uuauauuaaaauucuaucc

SEQ ID NO: 2484347 - RNA, 19 nt, Artificial Sequence
  Description of Artificial Sequence: Synthetic oligonucleotide
uuugauuauauuaaaauuc

SEQ ID NO: 2484348 - RNA, 19 nt, Artificial Sequence
  Description of Artificial Sequence: Synthetic oligonucleotide
gauguuaagaacuacaauc

SEQ ID NO: 2484349 - RNA, 19 nt, Artificial Sequence
  Description of Artificial Sequence: Synthetic oligonucleotide
uuaaauaaaagcauucaga

SEQ ID NO: 2484350 - RNA, 19 nt, Artificial Sequence
  Description of Artificial Sequence: Synthetic oligonucleotide
aaauuguuugacuacacug

SEQ ID NO: 2484351 - RNA, 19 nt, Artificial Sequence
  Description of Artificial Sequence: Synthetic oligonucleotide
aaaccuuagaaauuguuug

SEQ ID NO: 2484352 - RNA, 19 nt, Artificial Sequence
  Description of Artificial Sequence: Synthetic oligonucleotide
acaaaguaacuccauagcc

SEQ ID NO: 2484353 - RNA, 19 nt, Artificial Sequence
  Description of Artificial Sequence: Synthetic oligonucleotide
aaaauucuaucccuauuac

SEQ ID NO: 2484354 - RNA, 19 nt, Artificial Sequence
  Description of Artificial Sequence: Synthetic oligonucleotide
acaauaguugcauaggagg

SEQ ID NO: 2484355 - RNA, 19 nt, Artificial Sequence
  Description of Artificial Sequence: Synthetic oligonucleotide
ugcacaauaugaaagguag

SEQ ID NO: 2484356 - RNA, 19 nt, Artificial Sequence
  Description of Artificial Sequence: Synthetic oligonucleotide
acuacaauccccuucacag

SEQ ID NO: 2484357 - RNA, 19 nt, Artificial Sequence
  Description of Artificial Sequence: Synthetic oligonucleotide
cuuuaaaugacugaguccc

SEQ ID NO: 2484358 - RNA, 19 nt, Artificial Sequence
  Description of Artificial Sequence: Synthetic oligonucleotide
aacgauguuuucaauaucg

SEQ ID NO: 2484359 - RNA, 19 nt, Artificial Sequence
  Description of Artificial Sequence: Synthetic oligonucleotide
aauuguuugacuacacugg

SEQ ID NO: 2484360 - RNA, 19 nt, Artificial Sequence
  Description of Artificial Sequence: Synthetic oligonucleotide
uugauuauauuaaaauucu

SEQ ID NO: 2484361 - RNA, 19 nt, Artificial Sequence
  Description of Artificial Sequence: Synthetic oligonucleotide
aucuuuaaaugacugaguc

SEQ ID NO: 2484362 - RNA, 19 nt, Artificial Sequence
  Description of Artificial Sequence: Synthetic oligonucleotide
aacaaagcuauguaggagu

SEQ ID NO: 2484363 - RNA, 19 nt, Artificial Sequence
  Description of Artificial Sequence: Synthetic oligonucleotide
aauuaugauauaaucaaga

SEQ ID NO: 2484364 - RNA, 19 nt, Artificial Sequence
  Description of Artificial Sequence: Synthetic oligonucleotide
aaagguagauaaauguuac

SEQ ID NO: 2484365 - RNA, 19 nt, Artificial Sequence
  Description of Artificial Sequence: Synthetic oligonucleotide
aacaaagauccugaagugc

SEQ ID NO: 2484366 - RNA, 19 nt, Artificial Sequence
  Description of Artificial Sequence: Synthetic oligonucleotide
aaagcuauguaggaguuag

SEQ ID NO: 2484367 - RNA, 19 nt, Artificial Sequence
  Description of Artificial Sequence: Synthetic oligonucleotide
aagccauugacaaaguaac

SEQ ID NO: 2484368 - RNA, 19 nt, Artificial Sequence
  Description of Artificial Sequence: Synthetic oligonucleotide
uuaagaacuacaauccccu

SEQ ID NO: 2484369 - RNA, 19 nt, Artificial Sequence
  Description of Artificial Sequence: Synthetic oligonucleotide
auguuaagaacuacaaucc

SEQ ID NO: 2484370 - RNA, 19 nt, Artificial Sequence
  Description of Artificial Sequence: Synthetic oligonucleotide
aagaauagaggcuauggau

SEQ ID NO: 2484371 - RNA, 19 nt, Artificial Sequence
  Description of Artificial Sequence: Synthetic oligonucleotide
uacaaauuaugauauaauc

SEQ ID NO: 2484372 - RNA, 19 nt, Artificial Sequence
  Description of Artificial Sequence: Synthetic oligonucleotide
aguuugauuauauuaaaau

SEQ ID NO: 2484373 - RNA, 19 nt, Artificial Sequence
  Description of Artificial Sequence: Synthetic oligonucleotide
aaaauaagaauagaggcua

SEQ ID NO: 2484374 - RNA, 19 nt, Artificial Sequence
  Description of Artificial Sequence: Synthetic oligonucleotide
agaugcacaauaugaaagg

SEQ ID NO: 2484375 - RNA, 19 nt, Artificial Sequence
  Description of Artificial Sequence: Synthetic oligonucleotide
aauucuaucccuauuacaa

SEQ ID NO: 2484376 - RNA, 19 nt, Artificial Sequence
  Description of Artificial Sequence: Synthetic oligonucleotide
uacaaucuacucuugagca

SEQ ID NO: 2484377 - RNA, 19 nt, Artificial Sequence
  Description of Artificial Sequence: Synthetic oligonucleotide
auauaaucaagacuuacaa

SEQ ID NO: 2484378 - RNA, 19 nt, Artificial Sequence
  Description of Artificial Sequence: Synthetic oligonucleotide
uugcauaggaggcaaaggc

SEQ ID NO: 2484379 - RNA, 19 nt, Artificial Sequence
  Description of Artificial Sequence: Synthetic oligonucleotide
ucaauaucguuuagguggg

SEQ ID NO: 2484380 - RNA, 19 nt, Artificial Sequence
  Description of Artificial Sequence: Synthetic oligonucleotide
gauaccaaggaagggaacg

SEQ ID NO: 2484381 - RNA, 19 nt, Artificial Sequence
  Description of Artificial Sequence: Synthetic oligonucleotide
gauccgagcaccaacaaag

SEQ ID NO: 2484382 - RNA, 19 nt, Artificial Sequence
  Description of Artificial Sequence: Synthetic oligonucleotide
aucaauaccucauuguccu

SEQ ID NO: 2484383 - RNA, 19 nt, Artificial Sequence
  Description of Artificial Sequence: Synthetic oligonucleotide
aaauucuaucccuauuaca

SEQ ID NO: 2484384 - RNA, 19 nt, Artificial Sequence
  Description of Artificial Sequence: Synthetic oligonucleotide
caauaugaaagguagauaa

SEQ ID NO: 2484385 - RNA, 19 nt, Artificial Sequence
  Description of Artificial Sequence: Synthetic oligonucleotide
ucaagacuuacaacaaagc

SEQ ID NO: 2484386 - RNA, 19 nt, Artificial Sequence
  Description of Artificial Sequence: Synthetic oligonucleotide
acaaauuaugauauaauca

SEQ ID NO: 2484387 - RNA, 19 nt, Artificial Sequence
  Description of Artificial Sequence: Synthetic oligonucleotide
aaauuaugauauaaucaag

SEQ ID NO: 2484388 - RNA, 19 nt, Artificial Sequence
  Description of Artificial Sequence: Synthetic oligonucleotide
uguuaagaacuacaauccc

SEQ ID NO: 2484389 - RNA, 19 nt, Artificial Sequence
  Description of Artificial Sequence: Synthetic oligonucleotide
gaauagaggcuauggaugc

SEQ ID NO: 2484390 - RNA, 19 nt, Artificial Sequence
  Description of Artificial Sequence: Synthetic oligonucleotide
uaagaauagaggcuaugga

SEQ ID NO: 2484391 - RNA, 19 nt, Artificial Sequence
  Description of Artificial Sequence: Synthetic oligonucleotide
uuagaaauuguuugacuac

SEQ ID NO: 2484392 - RNA, 19 nt, Artificial Sequence
  Description of Artificial Sequence: Synthetic oligonucleotide
agaacuacaauccccuuca

SEQ ID NO: 2484393 - RNA, 19 nt, Artificial Sequence
  Description of Artificial Sequence: Synthetic oligonucleotide
uuacaaauuaugauauaau

SEQ ID NO: 2484394 - RNA, 19 nt, Artificial Sequence
  Description of Artificial Sequence: Synthetic oligonucleotide
ugguaagaacaauaguugc

SEQ ID NO: 2484395 - RNA, 19 nt, Artificial Sequence
  Description of Artificial Sequence: Synthetic oligonucleotide
ucaaguaggcgauugugug

SEQ ID NO: 2484396 - RNA, 19 nt, Artificial Sequence
  Description of Artificial Sequence: Synthetic oligonucleotide
caauaguugcauaggaggc

SEQ ID NO: 2484397 - RNA, 19 nt, Artificial Sequence
  Description of Artificial Sequence: Synthetic oligonucleotide
accucauuguccuugagcu

SEQ ID NO: 2484398 - RNA, 19 nt, Artificial Sequence
  Description of Artificial Sequence: Synthetic oligonucleotide
ucccuauuacaaaauaaga

SEQ ID NO: 2484399 - RNA, 19 nt, Artificial Sequence
  Description of Artificial Sequence: Synthetic oligonucleotide
aaugacugagucccuggag

SEQ ID NO: 2484400 - RNA, 19 nt, Artificial Sequence
  Description of Artificial Sequence: Synthetic oligonucleotide
aguccgaagaaauuucuug

SEQ ID NO: 2484401 - RNA, 19 nt, Artificial Sequence
  Description of Artificial Sequence: Synthetic oligonucleotide
guccgaagaaauuucuugg

SEQ ID NO: 2484402 - RNA, 19 nt, Artificial Sequence
  Description of Artificial Sequence: Synthetic oligonucleotide
ucagucuuggucucaaucu

SEQ ID NO: 2484403 - RNA, 19 nt, Artificial Sequence
  Description of Artificial Sequence: Synthetic oligonucleotide
aacaauaguugcauaggag

SEQ ID NO: 2484404 - RNA, 19 nt, Artificial Sequence
  Description of Artificial Sequence: Synthetic oligonucleotide
ugaaagguagauaaauguu

SEQ ID NO: 2484405 - RNA, 19 nt, Artificial Sequence
  Description of Artificial Sequence: Synthetic oligonucleotide
caucaauaccucauugucc

SEQ ID NO: 2484406 - RNA, 19 nt, Artificial Sequence
  Description of Artificial Sequence: Synthetic oligonucleotide
ugcauaggaggcaaaggcc

SEQ ID NO: 2484407 - RNA, 19 nt, Artificial Sequence
  Description of Artificial Sequence: Synthetic oligonucleotide
uuggucucaaucuuuaaau

SEQ ID NO: 2484408 - RNA, 19 nt, Artificial Sequence
  Description of Artificial Sequence: Synthetic oligonucleotide
agaacaauaguugcauagg

SEQ ID NO: 2484409 - RNA, 19 nt, Artificial Sequence
  Description of Artificial Sequence: Synthetic oligonucleotide
guacaaucuacucuugagc

SEQ ID NO: 2484410 - RNA, 19 nt, Artificial Sequence
  Description of Artificial Sequence: Synthetic oligonucleotide
uaucccuauuacaaaauaa

SEQ ID NO: 2484411 - RNA, 19 nt, Artificial Sequence
  Description of Artificial Sequence: Synthetic oligonucleotide
uuucaauaucguuuaggug

SEQ ID NO: 2484412 - RNA, 19 nt, Artificial Sequence
  Description of Artificial Sequence: Synthetic oligonucleotide
guuaagaacuacaaucccc

SEQ ID NO: 2484413 - RNA, 19 nt, Artificial Sequence
  Description of Artificial Sequence: Synthetic oligonucleotide
gauauaaucaagacuuaca

SEQ ID NO: 2484414 - RNA, 19 nt, Artificial Sequence
  Description of Artificial Sequence: Synthetic oligonucleotide
aggaaggggagucaaguag

SEQ ID NO: 2484415 - RNA, 19 nt, Artificial Sequence
  Description of Artificial Sequence: Synthetic oligonucleotide
ucuacucuugagcagccug

SEQ ID NO: 2484416 - RNA, 19 nt, Artificial Sequence
  Description of Artificial Sequence: Synthetic oligonucleotide
cacaaaaccuuagaaauug

SEQ ID NO: 2484417 - RNA, 19 nt, Artificial Sequence
  Description of Artificial Sequence: Synthetic oligonucleotide
auaucguuuaggugggcuc

SEQ ID NO: 2484418 - RNA, 19 nt, Artificial Sequence
  Description of Artificial Sequence: Synthetic oligonucleotide
uaaucaagacuuacaacaa

SEQ ID NO: 2484419 - RNA, 19 nt, Artificial Sequence
  Description of Artificial Sequence: Synthetic oligonucleotide
aauaagaauagaggcuaug

SEQ ID NO: 2484420 - RNA, 19 nt, Artificial Sequence
  Description of Artificial Sequence: Synthetic oligonucleotide
uacaauccccuucacaggu

SEQ ID NO: 2484421 - RNA, 19 nt, Artificial Sequence
  Description of Artificial Sequence: Synthetic oligonucleotide
aauagaggcuauggaugcc

SEQ ID NO: 2484422 - RNA, 19 nt, Artificial Sequence
  Description of Artificial Sequence: Synthetic oligonucleotide
uugacuacacuggaaauac

SEQ ID NO: 2484423 - RNA, 19 nt, Artificial Sequence
  Description of Artificial Sequence: Synthetic oligonucleotide
acaacaaagcuauguagga

SEQ ID NO: 2484424 - RNA, 19 nt, Artificial Sequence
  Description of Artificial Sequence: Synthetic oligonucleotide
agaauagaggcuauggaug

SEQ ID NO: 2484425 - RNA, 19 nt, Artificial Sequence
  Description of Artificial Sequence: Synthetic oligonucleotide
ucucaaucuuuaaaugacu

SEQ ID NO: 2484426 - RNA, 19 nt, Artificial Sequence
  Description of Artificial Sequence: Synthetic oligonucleotide
aaucaagacuuacaacaaa

SEQ ID NO: 2484427 - RNA, 19 nt, Artificial Sequence
  Description of Artificial Sequence: Synthetic oligonucleotide
aucccuauuacaaaauaag

SEQ ID NO: 2484428 - RNA, 19 nt, Artificial Sequence
  Description of Artificial Sequence: Synthetic oligonucleotide
uauguaggaguuaggcagc

SEQ ID NO: 2484429 - RNA, 19 nt, Artificial Sequence
  Description of Artificial Sequence: Synthetic oligonucleotide
aagauccugaagugcauga

SEQ ID NO: 2484430 - RNA, 19 nt, Artificial Sequence
  Description of Artificial Sequence: Synthetic oligonucleotide
aagggaacgauguuuucaa

SEQ ID NO: 2484431 - RNA, 19 nt, Artificial Sequence
  Description of Artificial Sequence: Synthetic oligonucleotide
ugugguagauccgagcacc

SEQ ID NO: 2484432 - RNA, 19 nt, Artificial Sequence
  Description of Artificial Sequence: Synthetic oligonucleotide
ugauauaaucaagacuuac

SEQ ID NO: 2484433 - RNA, 19 nt, Artificial Sequence
  Description of Artificial Sequence: Synthetic oligonucleotide
aacuacaauccccuucaca

SEQ ID NO: 2484434 - RNA, 19 nt, Artificial Sequence
  Description of Artificial Sequence: Synthetic oligonucleotide
agacuuacaacaaagcuau

SEQ ID NO: 2484435 - RNA, 19 nt, Artificial Sequence
  Description of Artificial Sequence: Synthetic oligonucleotide
uccgaagaaauuucuuggc

SEQ ID NO: 2484436 - RNA, 19 nt, Artificial Sequence
  Description of Artificial Sequence: Synthetic oligonucleotide
ucucccuugccaaauccag

SEQ ID NO: 2484437 - RNA, 19 nt, Artificial Sequence
  Description of Artificial Sequence: Synthetic oligonucleotide
uucuaucccuauuacaaaa

SEQ ID NO: 2484438 - RNA, 19 nt, Artificial Sequence
  Description of Artificial Sequence: Synthetic oligonucleotide
gaacaauaguugcauagga

SEQ ID NO: 2484439 - RNA, 19 nt, Artificial Sequence
  Description of Artificial Sequence: Synthetic oligonucleotide
acuuacaacaaagcuaugu

SEQ ID NO: 2484440 - RNA, 19 nt, Artificial Sequence
  Description of Artificial Sequence: Synthetic oligonucleotide
aauaccucauuguccuuga

SEQ ID NO: 2484441 - RNA, 19 nt, Artificial Sequence
  Description of Artificial Sequence: Synthetic oligonucleotide
aauaucguuuaggugggcu

SEQ ID NO: 2484442 - RNA, 19 nt, Artificial Sequence
  Description of Artificial Sequence: Synthetic oligonucleotide
guagauaaauguuacaaau

SEQ ID NO: 2484443 - RNA, 19 nt, Artificial Sequence
  Description of Artificial Sequence: Synthetic oligonucleotide
auuguuugacuacacugga

SEQ ID NO: 2484444 - RNA, 19 nt, Artificial Sequence
  Description of Artificial Sequence: Synthetic oligonucleotide
aagguagauaaauguuaca

SEQ ID NO: 2484445 - RNA, 19 nt, Artificial Sequence
  Description of Artificial Sequence: Synthetic oligonucleotide
aguagaggaggccgauacc

SEQ ID NO: 2484446 - RNA, 19 nt, Artificial Sequence
  Description of Artificial Sequence: Synthetic oligonucleotide
uggucucaaucuuuaaaug

SEQ ID NO: 2484447 - RNA, 19 nt, Artificial Sequence
  Description of Artificial Sequence: Synthetic oligonucleotide
aggggagucaaguaggcga

SEQ ID NO: 2484448 - RNA, 19 nt, Artificial Sequence
  Description of Artificial Sequence: Synthetic oligonucleotide
guaggaguuaggcagcaug

SEQ ID NO: 2484449 - RNA, 19 nt, Artificial Sequence
  Description of Artificial Sequence: Synthetic oligonucleotide
gaggccgauaccaaggaag

SEQ ID NO: 2484450 - RNA, 19 nt, Artificial Sequence
  Description of Artificial Sequence: Synthetic oligonucleotide
cucuugagcagccuguaag

SEQ ID NO: 2484451 - RNA, 19 nt, Artificial Sequence
  Description of Artificial Sequence: Synthetic oligonucleotide
accuuagaaauuguuugac

SEQ ID NO: 2484452 - RNA, 19 nt, Artificial Sequence
  Description of Artificial Sequence: Synthetic oligonucleotide
uuagccucuggaaugcagu

SEQ ID NO: 2484453 - RNA, 19 nt, Artificial Sequence
  Description of Artificial Sequence: Synthetic oligonucleotide
aaucuacucuugagcagcc

SEQ ID NO: 2484454 - RNA, 19 nt, Artificial Sequence
  Description of Artificial Sequence: Synthetic oligonucleotide
uucagucuuggucucaauc

SEQ ID NO: 2484455 - RNA, 19 nt, Artificial Sequence
  Description of Artificial Sequence: Synthetic oligonucleotide
gaguagaggaggccgauac

SEQ ID NO: 2484456 - RNA, 19 nt, Artificial Sequence
  Description of Artificial Sequence: Synthetic oligonucleotide
ugauuauauuaaaauucua

SEQ ID NO: 2484457 - RNA, 19 nt, Artificial Sequence
  Description of Artificial Sequence: Synthetic oligonucleotide
acaaucuacucuugagcag

SEQ ID NO: 2484458 - RNA, 19 nt, Artificial Sequence
  Description of Artificial Sequence: Synthetic oligonucleotide
agguagauaaauguuacaa

SEQ ID NO: 2484459 - RNA, 19 nt, Artificial Sequence
  Description of Artificial Sequence: Synthetic oligonucleotide
aaauccagcgcagucuucu

SEQ ID NO: 2484460 - RNA, 19 nt, Artificial Sequence
  Description of Artificial Sequence: Synthetic oligonucleotide
caaucuacucuugagcagc

SEQ ID NO: 2484461 - RNA, 19 nt, Artificial Sequence
  Description of Artificial Sequence: Synthetic oligonucleotide
caaguaggcgauugugugg

SEQ ID NO: 2484462 - RNA, 19 nt, Artificial Sequence
  Description of Artificial Sequence: Synthetic oligonucleotide
uuaaaugacugagucccug

SEQ ID NO: 2484463 - RNA, 19 nt, Artificial Sequence
  Description of Artificial Sequence: Synthetic oligonucleotide
gaaagguagauaaauguua

SEQ ID NO: 2484464 - RNA, 19 nt, Artificial Sequence
  Description of Artificial Sequence: Synthetic oligonucleotide
uuguugguuagccucugga

SEQ ID NO: 2484465 - RNA, 19 nt, Artificial Sequence
  Description of Artificial Sequence: Synthetic oligonucleotide
aaucuuuaaaugacugagu

SEQ ID NO: 2484466 - RNA, 19 nt, Artificial Sequence
  Description of Artificial Sequence: Synthetic oligonucleotide
aguaacuccauagccagca

SEQ ID NO: 2484467 - RNA, 19 nt, Artificial Sequence
  Description of Artificial Sequence: Synthetic oligonucleotide
agcauucagauguuaagaa

SEQ ID NO: 2484468 - RNA, 19 nt, Artificial Sequence
  Description of Artificial Sequence: Synthetic oligonucleotide
cauucagauguuaagaacu

SEQ ID NO: 2484469 - RNA, 19 nt, Artificial Sequence
  Description of Artificial Sequence: Synthetic oligonucleotide
auccugaagugcaugaggg

SEQ ID NO: 2484470 - RNA, 19 nt, Artificial Sequence
  Description of Artificial Sequence: Synthetic oligonucleotide
cugaagugcaugagggccg

SEQ ID NO: 2484471 - RNA, 19 nt, Artificial Sequence
  Description of Artificial Sequence: Synthetic oligonucleotide
aaguaggcgauuguguggu

SEQ ID NO: 2484472 - RNA, 19 nt, Artificial Sequence
  Description of Artificial Sequence: Synthetic oligonucleotide
ucaguccgaagaaauuucu

SEQ ID NO: 2484473 - RNA, 19 nt, Artificial Sequence
  Description of Artificial Sequence: Synthetic oligonucleotide
ucuaucccuauuacaaaau

SEQ ID NO: 2484474 - RNA, 19 nt, Artificial Sequence
  Description of Artificial Sequence: Synthetic oligonucleotide
uuugacuacacuggaaaua

SEQ ID NO: 2484475 - RNA, 19 nt, Artificial Sequence
  Description of Artificial Sequence: Synthetic oligonucleotide
ugguuaaguuugauuauau

SEQ ID NO: 2484476 - RNA, 19 nt, Artificial Sequence
  Description of Artificial Sequence: Synthetic oligonucleotide
agauguuaagaacuacaau

SEQ ID NO: 2484477 - RNA, 19 nt, Artificial Sequence
  Description of Artificial Sequence: Synthetic oligonucleotide
cuacaauccccuucacagg

SEQ ID NO: 2484478 - RNA, 19 nt, Artificial Sequence
  Description of Artificial Sequence: Synthetic oligonucleotide
aauaugaaagguagauaaa

SEQ ID NO: 2484479 - RNA, 19 nt, Artificial Sequence
  Description of Artificial Sequence: Synthetic oligonucleotide
agcaccaacaaagauccug

SEQ ID NO: 2484480 - RNA, 19 nt, Artificial Sequence
  Description of Artificial Sequence: Synthetic oligonucleotide
gucucaaucuuuaaaugac

SEQ ID NO: 2484481 - RNA, 19 nt, Artificial Sequence
  Description of Artificial Sequence: Synthetic oligonucleotide
uuuaaaugacugagucccu

SEQ ID NO: 2484482 - RNA, 19 nt, Artificial Sequence
  Description of Artificial Sequence: Synthetic oligonucleotide
uguugguuagccucuggaa

SEQ ID NO: 2484483 - RNA, 19 nt, Artificial Sequence
  Description of Artificial Sequence: Synthetic oligonucleotide
ucuggaaugcagucgccga

SEQ ID NO: 2484484 - RNA, 19 nt, Artificial Sequence
  Description of Artificial Sequence: Synthetic oligonucleotide
gcaugguuaaguuugauua

SEQ ID NO: 2484485 - RNA, 19 nt, Artificial Sequence
  Description of Artificial Sequence: Synthetic oligonucleotide
uuaggugggcucuucgcac

SEQ ID NO: 2484486 - RNA, 19 nt, Artificial Sequence
  Description of Artificial Sequence: Synthetic oligonucleotide
gaggaggccgauaccaagg

SEQ ID NO: 2484487 - RNA, 19 nt, Artificial Sequence
  Description of Artificial Sequence: Synthetic oligonucleotide
aguugcauaggaggcaaag

SEQ ID NO: 2484488 - RNA, 19 nt, Artificial Sequence
  Description of Artificial Sequence: Synthetic oligonucleotide
cuuacaacaaagcuaugua

SEQ ID NO: 2484489 - RNA, 19 nt, Artificial Sequence
  Description of Artificial Sequence: Synthetic oligonucleotide
aucaguccgaagaaauuuc

SEQ ID NO: 2484490 - RNA, 19 nt, Artificial Sequence
  Description of Artificial Sequence: Synthetic oligonucleotide
ggcagcaugguuaaguuug

SEQ ID NO: 2484491 - RNA, 19 nt, Artificial Sequence
  Description of Artificial Sequence: Synthetic oligonucleotide
gauugugugguagauccga

SEQ ID NO: 2484492 - RNA, 19 nt, Artificial Sequence
  Description of Artificial Sequence: Synthetic oligonucleotide
guuuaggugggcucuucgc

SEQ ID NO: 2484493 - RNA, 19 nt, Artificial Sequence
  Description of Artificial Sequence: Synthetic oligonucleotide
gaagggaacgauguuuuca

SEQ ID NO: 2484494 - RNA, 19 nt, Artificial Sequence
  Description of Artificial Sequence: Synthetic oligonucleotide
cagccuguaagccauugac

SEQ ID NO: 2484495 - RNA, 19 nt, Artificial Sequence
  Description of Artificial Sequence: Synthetic oligonucleotide
uaacuccauagccagcaaa

SEQ ID NO: 2484496 - RNA, 19 nt, Artificial Sequence
  Description of Artificial Sequence: Synthetic oligonucleotide
augagggccguugagaggu

SEQ ID NO: 2484497 - RNA, 19 nt, Artificial Sequence
  Description of Artificial Sequence: Synthetic oligonucleotide
uugugugguagauccgagc

SEQ ID NO: 2484498 - RNA, 19 nt, Artificial Sequence
  Description of Artificial Sequence: Synthetic oligonucleotide
ucucccacacaaaaccuua

SEQ ID NO: 2484499 - RNA, 19 nt, Artificial Sequence
  Description of Artificial Sequence: Synthetic oligonucleotide
agucaaguaggcgauugug

SEQ ID NO: 2484500 - RNA, 19 nt, Artificial Sequence
  Description of Artificial Sequence: Synthetic oligonucleotide
gaaauuguuugacuacacu

SEQ ID NO: 2484501 - RNA, 19 nt, Artificial Sequence
  Description of Artificial Sequence: Synthetic oligonucleotide
auucuaucccuauuacaaa

SEQ ID NO: 2484502 - RNA, 19 nt, Artificial Sequence
  Description of Artificial Sequence: Synthetic oligonucleotide
agucgccgagcucaugaac

SEQ ID NO: 2484503 - RNA, 19 nt, Artificial Sequence
  Description of Artificial Sequence: Synthetic oligonucleotide
caacaaagcuauguaggag

SEQ ID NO: 2484504 - RNA, 19 nt, Artificial Sequence
  Description of Artificial Sequence: Synthetic oligonucleotide
agcgcagucuucuggguug

SEQ ID NO: 2484505 - RNA, 19 nt, Artificial Sequence
  Description of Artificial Sequence: Synthetic oligonucleotide
aagugcaugagggccguug

SEQ ID NO: 2484506 - RNA, 19 nt, Artificial Sequence
  Description of Artificial Sequence: Synthetic oligonucleotide
uaucguuuaggugggcucu

SEQ ID NO: 2484507 - RNA, 19 nt, Artificial Sequence
  Description of Artificial Sequence: Synthetic oligonucleotide
uuguuugacuacacuggaa

SEQ ID NO: 2484508 - RNA, 19 nt, Artificial Sequence
  Description of Artificial Sequence: Synthetic oligonucleotide
aguuaggcagcaugguuaa

SEQ ID NO: 2484509 - RNA, 19 nt, Artificial Sequence
  Description of Artificial Sequence: Synthetic oligonucleotide
cugguuccuaauuucucug

SEQ ID NO: 2484510 - RNA, 19 nt, Artificial Sequence
  Description of Artificial Sequence: Synthetic oligonucleotide
cuauggaugccagucuccc

SEQ ID NO: 2484511 - RNA, 19 nt, Artificial Sequence
  Description of Artificial Sequence: Synthetic oligonucleotide
ucccugguuccuaauuucu

SEQ ID NO: 2484512 - RNA, 19 nt, Artificial Sequence
  Description of Artificial Sequence: Synthetic oligonucleotide
agcaugguuaaguuugauu

SEQ ID NO: 2484513 - RNA, 19 nt, Artificial Sequence
  Description of Artificial Sequence: Synthetic oligonucleotide
ucaucaguccgaagaaauu

SEQ ID NO: 2484514 - RNA, 19 nt, Artificial Sequence
  Description of Artificial Sequence: Synthetic oligonucleotide
guagaggaggccgauacca

SEQ ID NO: 2484515 - RNA, 19 nt, Artificial Sequence
  Description of Artificial Sequence: Synthetic oligonucleotide
auggaggucagccauucuu

SEQ ID NO: 2484516 - RNA, 19 nt, Artificial Sequence
  Description of Artificial Sequence: Synthetic oligonucleotide
aauccagcgcagucuucug

SEQ ID NO: 2484517 - RNA, 19 nt, Artificial Sequence
  Description of Artificial Sequence: Synthetic oligonucleotide
uucagauguuaagaacuac

SEQ ID NO: 2484518 - RNA, 19 nt, Artificial Sequence
  Description of Artificial Sequence: Synthetic oligonucleotide
ucaaggaguagaggaggcc

SEQ ID NO: 2484519 - RNA, 19 nt, Artificial Sequence
  Description of Artificial Sequence: Synthetic oligonucleotide
ugcaugagggccguugaga

SEQ ID NO: 2484520 - RNA, 19 nt, Artificial Sequence
  Description of Artificial Sequence: Synthetic oligonucleotide
gaacgauguuuucaauauc

SEQ ID NO: 2484521 - RNA, 19 nt, Artificial Sequence
  Description of Artificial Sequence: Synthetic oligonucleotide
uggaggucagccauucuuu

SEQ ID NO: 2484522 - RNA, 19 nt, Artificial Sequence
  Description of Artificial Sequence: Synthetic oligonucleotide
ugacugagucccuggagaa

SEQ ID NO: 2484523 - RNA, 19 nt, Artificial Sequence
  Description of Artificial Sequence: Synthetic oligonucleotide
uaggcgauugugugguaga

SEQ ID NO: 2484524 - RNA, 19 nt, Artificial Sequence
  Description of Artificial Sequence: Synthetic oligonucleotide
auagaggcuauggaugcca

SEQ ID NO: 2484525 - RNA, 19 nt, Artificial Sequence
  Description of Artificial Sequence: Synthetic oligonucleotide
gaccacucaaggaguagag

SEQ ID NO: 2484526 - RNA, 19 nt, Artificial Sequence
  Description of Artificial Sequence: Synthetic oligonucleotide
ccaacaaagauccugaagu

SEQ ID NO: 2484527 - RNA, 19 nt, Artificial Sequence
  Description of Artificial Sequence: Synthetic oligonucleotide
cucuggaaugcagucgccg

SEQ ID NO: 2484528 - RNA, 19 nt, Artificial Sequence
  Description of Artificial Sequence: Synthetic oligonucleotide
aggccgauaccaaggaagg

SEQ ID NO: 2484529 - RNA, 19 nt, Artificial Sequence
  Description of Artificial Sequence: Synthetic oligonucleotide
ugacuacacuggaaauaca

SEQ ID NO: 2484530 - RNA, 19 nt, Artificial Sequence
  Description of Artificial Sequence: Synthetic oligonucleotide
acaauaugaaagguagaua

SEQ ID NO: 2484531 - RNA, 19 nt, Artificial Sequence
  Description of Artificial Sequence: Synthetic oligonucleotide
caauccccuucacagguac

SEQ ID NO: 2484532 - RNA, 19 nt, Artificial Sequence
  Description of Artificial Sequence: Synthetic oligonucleotide
ugguuagccucuggaaugc

SEQ ID NO: 2484533 - RNA, 19 nt, Artificial Sequence
  Description of Artificial Sequence: Synthetic oligonucleotide
agugcaugagggccguuga

SEQ ID NO: 2484534 - RNA, 19 nt, Artificial Sequence
  Description of Artificial Sequence: Synthetic oligonucleotide
uccuaauuucucugcuccu

SEQ ID NO: 2484535 - RNA, 19 nt, Artificial Sequence
  Description of Artificial Sequence: Synthetic oligonucleotide
uggaaugcagucgccgagc

SEQ ID NO: 2484536 - RNA, 19 nt, Artificial Sequence
  Description of Artificial Sequence: Synthetic oligonucleotide
gcauucagauguuaagaac

SEQ ID NO: 2484537 - RNA, 19 nt, Artificial Sequence
  Description of Artificial Sequence: Synthetic oligonucleotide
gaguuaggcagcaugguua

SEQ ID NO: 2484538 - RNA, 19 nt, Artificial Sequence
  Description of Artificial Sequence: Synthetic oligonucleotide
accacucaaggaguagagg

SEQ ID NO: 2484539 - RNA, 19 nt, Artificial Sequence
  Description of Artificial Sequence: Synthetic oligonucleotide
gguaagaacaauaguugca

SEQ ID NO: 2484540 - RNA, 19 nt, Artificial Sequence
  Description of Artificial Sequence: Synthetic oligonucleotide
uaauuucucugcuccucuc

SEQ ID NO: 2484541 - RNA, 19 nt, Artificial Sequence
  Description of Artificial Sequence: Synthetic oligonucleotide
aggugggcucuucgcaccc

SEQ ID NO: 2484542 - RNA, 19 nt, Artificial Sequence
  Description of Artificial Sequence: Synthetic oligonucleotide
cuuguugguuagccucugg

SEQ ID NO: 2484543 - RNA, 19 nt, Artificial Sequence
  Description of Artificial Sequence: Synthetic oligonucleotide
uccgagcaccaacaaagau

SEQ ID NO: 2484544 - RNA, 19 nt, Artificial Sequence
  Description of Artificial Sequence: Synthetic oligonucleotide
gguagauccgagcaccaac

SEQ ID NO: 2484545 - RNA, 19 nt, Artificial Sequence
  Description of Artificial Sequence: Synthetic oligonucleotide
acuacacuggaaauacaga

SEQ ID NO: 2484546 - RNA, 19 nt, Artificial Sequence
  Description of Artificial Sequence: Synthetic oligonucleotide
cuggaaugcagucgccgag

SEQ ID NO: 2484547 - RNA, 19 nt, Artificial Sequence
  Description of Artificial Sequence: Synthetic oligonucleotide
guaggcgauugugugguag

SEQ ID NO: 2484548 - RNA, 19 nt, Artificial Sequence
  Description of Artificial Sequence: Synthetic oligonucleotide
cucccuugccaaauccagc

SEQ ID NO: 2484549 - RNA, 19 nt, Artificial Sequence
  Description of Artificial Sequence: Synthetic oligonucleotide
ccuauuacaaaauaagaau

SEQ ID NO: 2484550 - RNA, 19 nt, Artificial Sequence
  Description of Artificial Sequence: Synthetic oligonucleotide
gaggucuggaccacucaag

SEQ ID NO: 2484551 - RNA, 19 nt, Artificial Sequence
  Description of Artificial Sequence: Synthetic oligonucleotide
uaaaagcauucagauguua

SEQ ID NO: 2484552 - RNA, 19 nt, Artificial Sequence
  Description of Artificial Sequence: Synthetic oligonucleotide
aagcuauguaggaguuagg

SEQ ID NO: 2484553 - RNA, 19 nt, Artificial Sequence
  Description of Artificial Sequence: Synthetic oligonucleotide
uaggcagcaugguuaaguu

SEQ ID NO: 2484554 - RNA, 19 nt, Artificial Sequence
  Description of Artificial Sequence: Synthetic oligonucleotide
guagauccgagcaccaaca

SEQ ID NO: 2484555 - RNA, 19 nt, Artificial Sequence
  Description of Artificial Sequence: Synthetic oligonucleotide
guaagaacaauaguugcau

SEQ ID NO: 2484556 - RNA, 19 nt, Artificial Sequence
  Description of Artificial Sequence: Synthetic oligonucleotide
ccugaagugcaugagggcc

SEQ ID NO: 2484557 - RNA, 19 nt, Artificial Sequence
  Description of Artificial Sequence: Synthetic oligonucleotide
auaccaaggaagggaacga

SEQ ID NO: 2484558 - RNA, 19 nt, Artificial Sequence
  Description of Artificial Sequence: Synthetic oligonucleotide
gaggucagccauucuuuca

SEQ ID NO: 2484559 - RNA, 19 nt, Artificial Sequence
  Description of Artificial Sequence: Synthetic oligonucleotide
auaggaggcaaaggccauc

SEQ ID NO: 2484560 - RNA, 19 nt, Artificial Sequence
  Description of Artificial Sequence: Synthetic oligonucleotide
ucuucgcacccguuccacc

SEQ ID NO: 2484561 - RNA, 19 nt, Artificial Sequence
  Description of Artificial Sequence: Synthetic oligonucleotide
augguuaaguuugauuaua

SEQ ID NO: 2484562 - RNA, 19 nt, Artificial Sequence
  Description of Artificial Sequence: Synthetic oligonucleotide
uggcauucucucccuugcc

SEQ ID NO: 2484563 - RNA, 19 nt, Artificial Sequence
  Description of Artificial Sequence: Synthetic oligonucleotide
gaugcacaauaugaaaggu

SEQ ID NO: 2484564 - RNA, 19 nt, Artificial Sequence
  Description of Artificial Sequence: Synthetic oligonucleotide
ccgagcaccaacaaagauc

SEQ ID NO: 2484565 - RNA, 19 nt, Artificial Sequence
  Description of Artificial Sequence: Synthetic oligonucleotide
cucccacacaaaaccuuag

SEQ ID NO: 2484566 - RNA, 19 nt, Artificial Sequence
  Description of Artificial Sequence: Synthetic oligonucleotide
uagaggaggccgauaccaa

SEQ ID NO: 2484567 - RNA, 19 nt, Artificial Sequence
  Description of Artificial Sequence: Synthetic oligonucleotide
agcucaugaacaucaucuu

SEQ ID NO: 2484568 - RNA, 19 nt, Artificial Sequence
  Description of Artificial Sequence: Synthetic oligonucleotide
guugguuagccucuggaau

SEQ ID NO: 2484569 - RNA, 19 nt, Artificial Sequence
  Description of Artificial Sequence: Synthetic oligonucleotide
aaaugccaaggcccuguuu

SEQ ID NO: 2484570 - RNA, 19 nt, Artificial Sequence
  Description of Artificial Sequence: Synthetic oligonucleotide
aaggaguagaggaggccga

SEQ ID NO: 2484571 - RNA, 19 nt, Artificial Sequence
  Description of Artificial Sequence: Synthetic oligonucleotide
auugugugguagauccgag

SEQ ID NO: 2484572 - RNA, 19 nt, Artificial Sequence
  Description of Artificial Sequence: Synthetic oligonucleotide
cucccugguuccuaauuuc

SEQ ID NO: 2484573 - RNA, 19 nt, Artificial Sequence
  Description of Artificial Sequence: Synthetic oligonucleotide
accaaggaagggaacgaug

SEQ ID NO: 2484574 - RNA, 19 nt, Artificial Sequence
  Description of Artificial Sequence: Synthetic oligonucleotide
aggaggccgauaccaagga

SEQ ID NO: 2484575 - RNA, 19 nt, Artificial Sequence
  Description of Artificial Sequence: Synthetic oligonucleotide
ggaacgauguuuucaauau

SEQ ID NO: 2484576 - RNA, 19 nt, Artificial Sequence
  Description of Artificial Sequence: Synthetic oligonucleotide
ucucaucaguccgaagaaa

SEQ ID NO: 2484577 - RNA, 19 nt, Artificial Sequence
  Description of Artificial Sequence: Synthetic oligonucleotide
cacaauaugaaagguagau

SEQ ID NO: 2484578 - RNA, 19 nt, Artificial Sequence
  Description of Artificial Sequence: Synthetic oligonucleotide
cuaucccuauuacaaaaua

SEQ ID NO: 2484579 - RNA, 19 nt, Artificial Sequence
  Description of Artificial Sequence: Synthetic oligonucleotide
gcaaaggccaucaauaccu

SEQ ID NO: 2484580 - RNA, 19 nt, Artificial Sequence
  Description of Artificial Sequence: Synthetic oligonucleotide
uggaccacucaaggaguag

SEQ ID NO: 2484581 - RNA, 19 nt, Artificial Sequence
  Description of Artificial Sequence: Synthetic oligonucleotide
cccuguuuggcugaggaag

SEQ ID NO: 2484582 - RNA, 19 nt, Artificial Sequence
  Description of Artificial Sequence: Synthetic oligonucleotide
auucagauguuaagaacua

SEQ ID NO: 2484583 - RNA, 19 nt, Artificial Sequence
  Description of Artificial Sequence: Synthetic oligonucleotide
gucgccgagcucaugaaca

SEQ ID NO: 2484584 - RNA, 19 nt, Artificial Sequence
  Description of Artificial Sequence: Synthetic oligonucleotide
acgauguuuucaauaucgu

SEQ ID NO: 2484585 - RNA, 19 nt, Artificial Sequence
  Description of Artificial Sequence: Synthetic oligonucleotide
ggagucaaguaggcgauug

SEQ ID NO: 2484586 - RNA, 19 nt, Artificial Sequence
  Description of Artificial Sequence: Synthetic oligonucleotide
cucaucaguccgaagaaau

SEQ ID NO: 2484587 - RNA, 19 nt, Artificial Sequence
  Description of Artificial Sequence: Synthetic oligonucleotide
gugugguagauccgagcac

SEQ ID NO: 2484588 - RNA, 19 nt, Artificial Sequence
  Description of Artificial Sequence: Synthetic oligonucleotide
ugaagugcaugagggccgu

SEQ ID NO: 2484589 - RNA, 19 nt, Artificial Sequence
  Description of Artificial Sequence: Synthetic oligonucleotide
gggaacgauguuuucaaua

SEQ ID NO: 2484590 - RNA, 19 nt, Artificial Sequence
  Description of Artificial Sequence: Synthetic oligonucleotide
agaggcuauggaugccagu

SEQ ID NO: 2484591 - RNA, 19 nt, Artificial Sequence
  Description of Artificial Sequence: Synthetic oligonucleotide
augcacaauaugaaaggua

SEQ ID NO: 2484592 - RNA, 19 nt, Artificial Sequence
  Description of Artificial Sequence: Synthetic oligonucleotide
ccguugagaggucuggacc

SEQ ID NO: 2484593 - RNA, 19 nt, Artificial Sequence
  Description of Artificial Sequence: Synthetic oligonucleotide
agccuguaagccauugaca

SEQ ID NO: 2484594 - RNA, 19 nt, Artificial Sequence
  Description of Artificial Sequence: Synthetic oligonucleotide
cagguacaaucuacucuug

SEQ ID NO: 2484595 - RNA, 19 nt, Artificial Sequence
  Description of Artificial Sequence: Synthetic oligonucleotide
gcauaggaggcaaaggcca

SEQ ID NO: 2484596 - RNA, 19 nt, Artificial Sequence
  Description of Artificial Sequence: Synthetic oligonucleotide
ggcucuucgcacccguucc

SEQ ID NO: 2484597 - RNA, 19 nt, Artificial Sequence
  Description of Artificial Sequence: Synthetic oligonucleotide
gugcaugagggccguugag

SEQ ID NO: 2484598 - RNA, 19 nt, Artificial Sequence
  Description of Artificial Sequence: Synthetic oligonucleotide
acaaagcuauguaggaguu

SEQ ID NO: 2484599 - RNA, 19 nt, Artificial Sequence
  Description of Artificial Sequence: Synthetic oligonucleotide
ugccaaggcccuguuuggc

SEQ ID NO: 2484600 - RNA, 19 nt, Artificial Sequence
  Description of Artificial Sequence: Synthetic oligonucleotide
aggaguuaggcagcauggu

SEQ ID NO: 2484601 - RNA, 19 nt, Artificial Sequence
  Description of Artificial Sequence: Synthetic oligonucleotide
ggcuauggaugccagucuc

SEQ ID NO: 2484602 - RNA, 19 nt, Artificial Sequence
  Description of Artificial Sequence: Synthetic oligonucleotide
caugguuaaguuugauuau

SEQ ID NO: 2484603 - RNA, 19 nt, Artificial Sequence
  Description of Artificial Sequence: Synthetic oligonucleotide
ggcauucucucccuugcca

SEQ ID NO: 2484604 - RNA, 19 nt, Artificial Sequence
  Description of Artificial Sequence: Synthetic oligonucleotide
uuucagucuuggucucaau

SEQ ID NO: 2484605 - RNA, 19 nt, Artificial Sequence
  Description of Artificial Sequence: Synthetic oligonucleotide
gccgauaccaaggaaggga

SEQ ID NO: 2484606 - RNA, 19 nt, Artificial Sequence
  Description of Artificial Sequence: Synthetic oligonucleotide
ucgccgagcucaugaacau

SEQ ID NO: 2484607 - RNA, 19 nt, Artificial Sequence
  Description of Artificial Sequence: Synthetic oligonucleotide
uaguugcauaggaggcaaa

SEQ ID NO: 2484608 - RNA, 19 nt, Artificial Sequence
  Description of Artificial Sequence: Synthetic oligonucleotide
agggaacgauguuuucaau

SEQ ID NO: 2484609 - RNA, 19 nt, Artificial Sequence
  Description of Artificial Sequence: Synthetic oligonucleotide
augauauaaucaagacuua

SEQ ID NO: 2484610 - RNA, 19 nt, Artificial Sequence
  Description of Artificial Sequence: Synthetic oligonucleotide
gcagucgccgagcucauga

SEQ ID NO: 2484611 - RNA, 19 nt, Artificial Sequence
  Description of Artificial Sequence: Synthetic oligonucleotide
aggcagcaugguuaaguuu

SEQ ID NO: 2484612 - RNA, 19 nt, Artificial Sequence
  Description of Artificial Sequence: Synthetic oligonucleotide
guugagaggucuggaccac

SEQ ID NO: 2484613 - RNA, 19 nt, Artificial Sequence
  Description of Artificial Sequence: Synthetic oligonucleotide
gacuuacaacaaagcuaug

SEQ ID NO: 2484614 - RNA, 19 nt, Artificial Sequence
  Description of Artificial Sequence: Synthetic oligonucleotide
ccuaauuucucugcuccuc

SEQ ID NO: 2484615 - RNA, 19 nt, Artificial Sequence
  Description of Artificial Sequence: Synthetic oligonucleotide
ugguagauccgagcaccaa

SEQ ID NO: 2484616 - RNA, 19 nt, Artificial Sequence
  Description of Artificial Sequence: Synthetic oligonucleotide
agucuuggucucaaucuuu

SEQ ID NO: 2484617 - RNA, 19 nt, Artificial Sequence
  Description of Artificial Sequence: Synthetic oligonucleotide
gcuauggaugccagucucc

SEQ ID NO: 2484618 - RNA, 19 nt, Artificial Sequence
  Description of Artificial Sequence: Synthetic oligonucleotide
caauaucguuuaggugggc

SEQ ID NO: 2484619 - RNA, 19 nt, Artificial Sequence
  Description of Artificial Sequence: Synthetic oligonucleotide
ucgcacccguuccaccuuc

SEQ ID NO: 2484620 - RNA, 19 nt, Artificial Sequence
  Description of Artificial Sequence: Synthetic oligonucleotide
ccccuucacagguacaauc

SEQ ID NO: 2484621 - RNA, 19 nt, Artificial Sequence
  Description of Artificial Sequence: Synthetic oligonucleotide
ccaaggaagggaacgaugu

SEQ ID NO: 2484622 - RNA, 19 nt, Artificial Sequence
  Description of Artificial Sequence: Synthetic oligonucleotide
auccgagcaccaacaaaga

SEQ ID NO: 2484623 - RNA, 19 nt, Artificial Sequence
  Description of Artificial Sequence: Synthetic oligonucleotide
caucaguccgaagaaauuu

SEQ ID NO: 2484624 - RNA, 19 nt, Artificial Sequence
  Description of Artificial Sequence: Synthetic oligonucleotide
gucuuggucucaaucuuua

SEQ ID NO: 2484625 - RNA, 19 nt, Artificial Sequence
  Description of Artificial Sequence: Synthetic oligonucleotide
cucuucgcacccguuccac

SEQ ID NO: 2484626 - RNA, 19 nt, Artificial Sequence
  Description of Artificial Sequence: Synthetic oligonucleotide
cuucgcacccguuccaccu

SEQ ID NO: 2484627 - RNA, 19 nt, Artificial Sequence
  Description of Artificial Sequence: Synthetic oligonucleotide
gccguugagaggucuggac

SEQ ID NO: 2484628 - RNA, 19 nt, Artificial Sequence
  Description of Artificial Sequence: Synthetic oligonucleotide
uucgcacccguuccaccuu

SEQ ID NO: 2484629 - RNA, 19 nt, Artificial Sequence
  Description of Artificial Sequence: Synthetic oligonucleotide
guuaggcagcaugguuaag

SEQ ID NO: 2484630 - RNA, 19 nt, Artificial Sequence
  Description of Artificial Sequence: Synthetic oligonucleotide
cccacacaaaaccuuagaa

SEQ ID NO: 2484631 - RNA, 19 nt, Artificial Sequence
  Description of Artificial Sequence: Synthetic oligonucleotide
ggaccacucaaggaguaga

SEQ ID NO: 2484632 - RNA, 19 nt, Artificial Sequence
  Description of Artificial Sequence: Synthetic oligonucleotide
cguuuaggugggcucuucg

SEQ ID NO: 2484633 - RNA, 19 nt, Artificial Sequence
  Description of Artificial Sequence: Synthetic oligonucleotide
ggaagggaacgauguuuuc

SEQ ID NO: 2484634 - RNA, 19 nt, Artificial Sequence
  Description of Artificial Sequence: Synthetic oligonucleotide
ccuugccaaauccagcgca

SEQ ID NO: 2484635 - RNA, 19 nt, Artificial Sequence
  Description of Artificial Sequence: Synthetic oligonucleotide
aucuacucuugagcagccu

SEQ ID NO: 2484636 - RNA, 19 nt, Artificial Sequence
  Description of Artificial Sequence: Synthetic oligonucleotide
ucguuuaggugggcucuuc

SEQ ID NO: 2484637 - RNA, 19 nt, Artificial Sequence
  Description of Artificial Sequence: Synthetic oligonucleotide
gcugauggaggucagccau

SEQ ID NO: 2484638 - RNA, 19 nt, Artificial Sequence
  Description of Artificial Sequence: Synthetic oligonucleotide
gguuaaguuugauuauauu

SEQ ID NO: 2484639 - RNA, 19 nt, Artificial Sequence
  Description of Artificial Sequence: Synthetic oligonucleotide
cguugagaggucuggacca

SEQ ID NO: 2484640 - RNA, 19 nt, Artificial Sequence
  Description of Artificial Sequence: Synthetic oligonucleotide
ggccgauaccaaggaaggg

SEQ ID NO: 2484641 - RNA, 19 nt, Artificial Sequence
  Description of Artificial Sequence: Synthetic oligonucleotide
ggaggcaaaggccaucaau

SEQ ID NO: 2484642 - RNA, 19 nt, Artificial Sequence
  Description of Artificial Sequence: Synthetic oligonucleotide
aggaguagaggaggccgau

SEQ ID NO: 2484643 - RNA, 19 nt, Artificial Sequence
  Description of Artificial Sequence: Synthetic oligonucleotide
caaagauccugaagugcau

SEQ ID NO: 2484644 - RNA, 19 nt, Artificial Sequence
  Description of Artificial Sequence: Synthetic oligonucleotide
ccuuagaaauuguuugacu

SEQ ID NO: 2484645 - RNA, 19 nt, Artificial Sequence
  Description of Artificial Sequence: Synthetic oligonucleotide
uccccuucacagguacaau

SEQ ID NO: 2484646 - RNA, 19 nt, Artificial Sequence
  Description of Artificial Sequence: Synthetic oligonucleotide
gggccguugagaggucugg

SEQ ID NO: 2484647 - RNA, 19 nt, Artificial Sequence
  Description of Artificial Sequence: Synthetic oligonucleotide
ccgauaccaaggaagggaa

SEQ ID NO: 2484648 - RNA, 19 nt, Artificial Sequence
  Description of Artificial Sequence: Synthetic oligonucleotide
gauggaggucagccauucu

SEQ ID NO: 2484649 - RNA, 19 nt, Artificial Sequence
  Description of Artificial Sequence: Synthetic oligonucleotide
cgauugugugguagauccg

SEQ ID NO: 2484650 - RNA, 19 nt, Artificial Sequence
  Description of Artificial Sequence: Synthetic oligonucleotide
ugagggccguugagagguc

SEQ ID NO: 2484651 - RNA, 19 nt, Artificial Sequence
  Description of Artificial Sequence: Synthetic oligonucleotide
gggcucuucgcacccguuc

SEQ ID NO: 2484652 - RNA, 19 nt, Artificial Sequence
  Description of Artificial Sequence: Synthetic oligonucleotide
ggaguuaggcagcaugguu

SEQ ID NO: 2484653 - RNA, 19 nt, Artificial Sequence
  Description of Artificial Sequence: Synthetic oligonucleotide
agggccguugagaggucug

SEQ ID NO: 2484654 - RNA, 19 nt, Artificial Sequence
  Description of Artificial Sequence: Synthetic oligonucleotide
ugggcucuucgcacccguu

SEQ ID NO: 2484655 - RNA, 19 nt, Artificial Sequence
  Description of Artificial Sequence: Synthetic oligonucleotide
ugcagucgccgagcucaug

SEQ ID NO: 2484656 - RNA, 19 nt, Artificial Sequence
  Description of Artificial Sequence: Synthetic oligonucleotide
ggcgauugugugguagauc

SEQ ID NO: 2484657 - RNA, 19 nt, Artificial Sequence
  Description of Artificial Sequence: Synthetic oligonucleotide
aucguuuaggugggcucuu

SEQ ID NO: 2484658 - RNA, 19 nt, Artificial Sequence
  Description of Artificial Sequence: Synthetic oligonucleotide
ccuucucaucaguccgaag

SEQ ID NO: 2484659 - RNA, 19 nt, Artificial Sequence
  Description of Artificial Sequence: Synthetic oligonucleotide
cagucuuggucucaaucuu

SEQ ID NO: 2484660 - RNA, 19 nt, Artificial Sequence
  Description of Artificial Sequence: Synthetic oligonucleotide
ggaaugcagucgccgagcu

SEQ ID NO: 2484661 - RNA, 19 nt, Artificial Sequence
  Description of Artificial Sequence: Synthetic oligonucleotide
acaauccccuucacaggua

SEQ ID NO: 2484662 - RNA, 19 nt, Artificial Sequence
  Description of Artificial Sequence: Synthetic oligonucleotide
ccuguaagccauugacaaa

SEQ ID NO: 2484663 - RNA, 19 nt, Artificial Sequence
  Description of Artificial Sequence: Synthetic oligonucleotide
caguccgaagaaauuucuu

SEQ ID NO: 2484664 - RNA, 19 nt, Artificial Sequence
  Description of Artificial Sequence: Synthetic oligonucleotide
ggugggcucuucgcacccg

SEQ ID NO: 2484665 - RNA, 19 nt, Artificial Sequence
  Description of Artificial Sequence: Synthetic oligonucleotide
cgauaccaaggaagggaac

SEQ ID NO: 2484666 - RNA, 19 nt, Artificial Sequence
  Description of Artificial Sequence: Synthetic oligonucleotide
cagucgccgagcucaugaa

SEQ ID NO: 2484667 - RNA, 19 nt, Artificial Sequence
  Description of Artificial Sequence: Synthetic oligonucleotide
gucucccugguuccuaauu

SEQ ID NO: 2484668 - RNA, 19 nt, Artificial Sequence
  Description of Artificial Sequence: Synthetic oligonucleotide
ggaggccgauaccaaggaa

SEQ ID NO: 2484669 - RNA, 19 nt, Artificial Sequence
  Description of Artificial Sequence: Synthetic oligonucleotide
aggcccuguuuggcugagg

SEQ ID NO: 2484670 - RNA, 19 nt, Artificial Sequence
  Description of Artificial Sequence: Synthetic oligonucleotide
gcucuucgcacccguucca

SEQ ID NO: 2484671 - RNA, 19 nt, Artificial Sequence
  Description of Artificial Sequence: Synthetic oligonucleotide
gcagcaugguuaaguuuga

SEQ ID NO: 2484672 - RNA, 19 nt, Artificial Sequence
  Description of Artificial Sequence: Synthetic oligonucleotide
ccguuccaccuucucauca

SEQ ID NO: 2484673 - RNA, 19 nt, Artificial Sequence
  Description of Artificial Sequence: Synthetic oligonucleotide
gugggcucuucgcacccgu

SEQ ID NO: 2484674 - RNA, 19 nt, Artificial Sequence
  Description of Artificial Sequence: Synthetic oligonucleotide
ggucagccauucuuucagu

SEQ ID NO: 2484675 - RNA, 19 nt, Artificial Sequence
  Description of Artificial Sequence: Synthetic oligonucleotide
gagggccguugagaggucu

SEQ ID NO: 2484676 - RNA, 19 nt, Artificial Sequence
  Description of Artificial Sequence: Synthetic oligonucleotide
gguuagccucuggaaugca

SEQ ID NO: 2484677 - RNA, 19 nt, Artificial Sequence
  Description of Artificial Sequence: Synthetic oligonucleotide
cugauggaggucagccauu

SEQ ID NO: 2484678 - RNA, 19 nt, Artificial Sequence
  Description of Artificial Sequence: Synthetic oligonucleotide
ggggagucaaguaggcgau

SEQ ID NO: 2484679 - RNA, 19 nt, Artificial Sequence
  Description of Artificial Sequence: Synthetic oligonucleotide
ggaguagaggaggccgaua

SEQ ID NO: 2484680 - RNA, 19 nt, Artificial Sequence
  Description of Artificial Sequence: Synthetic oligonucleotide
cagcgcagucuucuggguu

SEQ ID NO: 2484681 - RNA, 19 nt, Artificial Sequence
  Description of Artificial Sequence: Synthetic oligonucleotide
augcagucgccgagcucau

SEQ ID NO: 2484682 - RNA, 19 nt, Artificial Sequence
  Description of Artificial Sequence: Synthetic oligonucleotide
ccauucuuucagucuuggu

SEQ ID NO: 2484683 - RNA, 19 nt, Artificial Sequence
  Description of Artificial Sequence: Synthetic oligonucleotide
ggaugccagucucccuggu

SEQ ID NO: 2484684 - RNA, 19 nt, Artificial Sequence
  Description of Artificial Sequence: Synthetic oligonucleotide
cagcaugguuaaguuugau

SEQ ID NO: 2484685 - RNA, 19 nt, Artificial Sequence
  Description of Artificial Sequence: Synthetic oligonucleotide
gaagugcaugagggccguu

SEQ ID NO: 2484686 - RNA, 19 nt, Artificial Sequence
  Description of Artificial Sequence: Synthetic oligonucleotide
ccagcgcagucuucugggu

SEQ ID NO: 2484687 - RNA, 19 nt, Artificial Sequence
  Description of Artificial Sequence: Synthetic oligonucleotide
ccgagcucaugaacaucau

SEQ ID NO: 2484688 - RNA, 19 nt, Artificial Sequence
  Description of Artificial Sequence: Synthetic oligonucleotide
gggagucaaguaggcgauu

SEQ ID NO: 2484689 - RNA, 19 nt, Artificial Sequence
  Description of Artificial Sequence: Synthetic oligonucleotide
uuuugcuugcauacgaugg

SEQ ID NO: 2484690 - RNA, 19 nt, Artificial Sequence
  Description of Artificial Sequence: Synthetic oligonucleotide
uuugcaguagugcaggcag

SEQ ID NO: 2484691 - RNA, 19 nt, Artificial Sequence
  Description of Artificial Sequence: Synthetic oligonucleotide
agcaaaagaccucucagac

SEQ ID NO: 2484692 - RNA, 19 nt, Artificial Sequence
  Description of Artificial Sequence: Synthetic oligonucleotide
uguuaugcuguuauggaca

SEQ ID NO: 2484693 - RNA, 19 nt, Artificial Sequence
  Description of Artificial Sequence: Synthetic oligonucleotide
ugcuguuauggacagaacc

SEQ ID NO: 2484694 - RNA, 19 nt, Artificial Sequence
  Description of Artificial Sequence: Synthetic oligonucleotide
uuaggccucagagagaugg

SEQ ID NO: 2484695 - RNA, 19 nt, Artificial Sequence
  Description of Artificial Sequence: Synthetic oligonucleotide
ugguuuauugucugggugg

SEQ ID NO: 2484696 - RNA, 19 nt, Artificial Sequence
  Description of Artificial Sequence: Synthetic oligonucleotide
acgauggaaacucuggaac

SEQ ID NO: 2484697 - RNA, 19 nt, Artificial Sequence
  Description of Artificial Sequence: Synthetic oligonucleotide
agugccacuacagaguggc

SEQ ID NO: 2484698 - RNA, 19 nt, Artificial Sequence
  Description of Artificial Sequence: Synthetic oligonucleotide
aaaccuggcagccuaggag

SEQ ID NO: 2484699 - RNA, 19 nt, Artificial Sequence
  Description of Artificial Sequence: Synthetic oligonucleotide
ugggaugucccucacaggc

SEQ ID NO: 2484700 - RNA, 19 nt, Artificial Sequence
  Description of Artificial Sequence: Synthetic oligonucleotide
aaagaccucucagacauuc

SEQ ID NO: 2484701 - RNA, 19 nt, Artificial Sequence
  Description of Artificial Sequence: Synthetic oligonucleotide
cauacgauggaaacucugg

SEQ ID NO: 2484702 - RNA, 19 nt, Artificial Sequence
  Description of Artificial Sequence: Synthetic oligonucleotide
cagggaaugguuccgaucg

SEQ ID NO: 2484703 - RNA, 19 nt, Artificial Sequence
  Description of Artificial Sequence: Synthetic oligonucleotide
uuccgugcuacacugggcg

SEQ ID NO: 2484704 - RNA, 19 nt, Artificial Sequence
  Description of Artificial Sequence: Synthetic oligonucleotide
ggcucuaucauuuugcuug

SEQ ID NO: 2484705 - RNA, 19 nt, Artificial Sequence
  Description of Artificial Sequence: Synthetic oligonucleotide
ugcuguuaugcuguuaugg

SEQ ID NO: 2484706 - RNA, 19 nt, Artificial Sequence
  Description of Artificial Sequence: Synthetic oligonucleotide
ucauuuugcuugcauacga

SEQ ID NO: 2484707 - RNA, 19 nt, Artificial Sequence
  Description of Artificial Sequence: Synthetic oligonucleotide
auggacagaacccagugug

SEQ ID NO: 2484708 - RNA, 19 nt, Artificial Sequence
  Description of Artificial Sequence: Synthetic oligonucleotide
uuauggacagaacccagug

SEQ ID NO: 2484709 - RNA, 19 nt, Artificial Sequence
  Description of Artificial Sequence: Synthetic oligonucleotide
ucucagacauucaggacag

SEQ ID NO: 2484710 - RNA, 19 nt, Artificial Sequence
  Description of Artificial Sequence: Synthetic oligonucleotide
cugaaacuagacaggaggg

SEQ ID NO: 2484711 - RNA, 19 nt, Artificial Sequence
  Description of Artificial Sequence: Synthetic oligonucleotide
ucuuccgugcuacacuggg

SEQ ID NO: 2484712 - RNA, 19 nt, Artificial Sequence
  Description of Artificial Sequence: Synthetic oligonucleotide
uuccugacagcaaaagacc

SEQ ID NO: 2484713 - RNA, 19 nt, Artificial Sequence
  Description of Artificial Sequence: Synthetic oligonucleotide
acagcaaaagaccucucag

SEQ ID NO: 2484714 - RNA, 19 nt, Artificial Sequence
  Description of Artificial Sequence: Synthetic oligonucleotide
cuagacaggagggagaaag

SEQ ID NO: 2484715 - RNA, 19 nt, Artificial Sequence
  Description of Artificial Sequence: Synthetic oligonucleotide
cuugucagugccuucacac

SEQ ID NO: 2484716 - RNA, 19 nt, Artificial Sequence
  Description of Artificial Sequence: Synthetic oligonucleotide
uaugcuguuauggacagaa

SEQ ID NO: 2484717 - RNA, 19 nt, Artificial Sequence
  Description of Artificial Sequence: Synthetic oligonucleotide
ugucagugccuucacacgc

SEQ ID NO: 2484718 - RNA, 19 nt, Artificial Sequence
  Description of Artificial Sequence: Synthetic oligonucleotide
uacacugggcgccuagugg

SEQ ID NO: 2484719 - RNA, 19 nt, Artificial Sequence
  Description of Artificial Sequence: Synthetic oligonucleotide
uguuauggacagaacccag

SEQ ID NO: 2484720 - RNA, 19 nt, Artificial Sequence
  Description of Artificial Sequence: Synthetic oligonucleotide
uuauugucuggguggauug

SEQ ID NO: 2484721 - RNA, 19 nt, Artificial Sequence
  Description of Artificial Sequence: Synthetic oligonucleotide
ucccguagcaggcggaugg

SEQ ID NO: 2484722 - RNA, 19 nt, Artificial Sequence
  Description of Artificial Sequence: Synthetic oligonucleotide
uuugcuugcauacgaugga

SEQ ID NO: 2484723 - RNA, 19 nt, Artificial Sequence
  Description of Artificial Sequence: Synthetic oligonucleotide
uaauccuuagccuugucuu

SEQ ID NO: 2484724 - RNA, 19 nt, Artificial Sequence
  Description of Artificial Sequence: Synthetic oligonucleotide
auuuugcuugcauacgaug

SEQ ID NO: 2484725 - RNA, 19 nt, Artificial Sequence
  Description of Artificial Sequence: Synthetic oligonucleotide
guuaugcuguuauggacag

SEQ ID NO: 2484726 - RNA, 19 nt, Artificial Sequence
  Description of Artificial Sequence: Synthetic oligonucleotide
augguuuauugucugggug

SEQ ID NO: 2484727 - RNA, 19 nt, Artificial Sequence
  Description of Artificial Sequence: Synthetic oligonucleotide
uugcauacgauggaaacuc

SEQ ID NO: 2484728 - RNA, 19 nt, Artificial Sequence
  Description of Artificial Sequence: Synthetic oligonucleotide
gggcauguaauccuuagcc

SEQ ID NO: 2484729 - RNA, 19 nt, Artificial Sequence
  Description of Artificial Sequence: Synthetic oligonucleotide
ggggauuuaggccucagag

SEQ ID NO: 2484730 - RNA, 19 nt, Artificial Sequence
  Description of Artificial Sequence: Synthetic oligonucleotide
uccguaggggauuuaggcc

SEQ ID NO: 2484731 - RNA, 19 nt, Artificial Sequence
  Description of Artificial Sequence: Synthetic oligonucleotide
uggccuaucuggcuugucc

SEQ ID NO: 2484732 - RNA, 19 nt, Artificial Sequence
  Description of Artificial Sequence: Synthetic oligonucleotide
ucccugcuaaaccuggcag

SEQ ID NO: 2484733 - RNA, 19 nt, Artificial Sequence
  Description of Artificial Sequence: Synthetic oligonucleotide
guccguaggggauuuaggc

SEQ ID NO: 2484734 - RNA, 19 nt, Artificial Sequence
  Description of Artificial Sequence: Synthetic oligonucleotide
uccugacagcaaaagaccu

SEQ ID NO: 2484735 - RNA, 19 nt, Artificial Sequence
  Description of Artificial Sequence: Synthetic oligonucleotide
ugguggcucaggcacgugg

SEQ ID NO: 2484736 - RNA, 19 nt, Artificial Sequence
  Description of Artificial Sequence: Synthetic oligonucleotide
cuguuaugcuguuauggac

SEQ ID NO: 2484737 - RNA, 19 nt, Artificial Sequence
  Description of Artificial Sequence: Synthetic oligonucleotide
gaggaucaggucaucauug

SEQ ID NO: 2484738 - RNA, 19 nt, Artificial Sequence
  Description of Artificial Sequence: Synthetic oligonucleotide
uauggacagaacccagugu

SEQ ID NO: 2484739 - RNA, 19 nt, Artificial Sequence
  Description of Artificial Sequence: Synthetic oligonucleotide
caguagugcaggcagcagg

SEQ ID NO: 2484740 - RNA, 19 nt, Artificial Sequence
  Description of Artificial Sequence: Synthetic oligonucleotide
gaggaugguuuauugucug

SEQ ID NO: 2484741 - RNA, 19 nt, Artificial Sequence
  Description of Artificial Sequence: Synthetic oligonucleotide
aggcugagagcuugguggc

SEQ ID NO: 2484742 - RNA, 19 nt, Artificial Sequence
  Description of Artificial Sequence: Synthetic oligonucleotide
auacgauggaaacucugga

SEQ ID NO: 2484743 - RNA, 19 nt, Artificial Sequence
  Description of Artificial Sequence: Synthetic oligonucleotide
auuuaggccucagagagau

SEQ ID NO: 2484744 - RNA, 19 nt, Artificial Sequence
  Description of Artificial Sequence: Synthetic oligonucleotide
uacgauggaaacucuggaa

SEQ ID NO: 2484745 - RNA, 19 nt, Artificial Sequence
  Description of Artificial Sequence: Synthetic oligonucleotide
cuacagaguggcugggucc

SEQ ID NO: 2484746 - RNA, 19 nt, Artificial Sequence
  Description of Artificial Sequence: Synthetic oligonucleotide
uaaaccuggcagccuagga

SEQ ID NO: 2484747 - RNA, 19 nt, Artificial Sequence
  Description of Artificial Sequence: Synthetic oligonucleotide
cuaggagggucccagcagc

SEQ ID NO: 2484748 - RNA, 19 nt, Artificial Sequence
  Description of Artificial Sequence: Synthetic oligonucleotide
uccgccugacccuugggag

SEQ ID NO: 2484749 - RNA, 19 nt, Artificial Sequence
  Description of Artificial Sequence: Synthetic oligonucleotide
caaaagaccucucagacau

SEQ ID NO: 2484750 - RNA, 19 nt, Artificial Sequence
  Description of Artificial Sequence: Synthetic oligonucleotide
cacggcgugagguuggaag

SEQ ID NO: 2484751 - RNA, 19 nt, Artificial Sequence
  Description of Artificial Sequence: Synthetic oligonucleotide
aauccuuagccuugucuuu

SEQ ID NO: 2484752 - RNA, 19 nt, Artificial Sequence
  Description of Artificial Sequence: Synthetic oligonucleotide
ugggcauguaauccuuagc

SEQ ID NO: 2484753 - RNA, 19 nt, Artificial Sequence
  Description of Artificial Sequence: Synthetic oligonucleotide
uggaaacucuggaaccucu

SEQ ID NO: 2484754 - RNA, 19 nt, Artificial Sequence
  Description of Artificial Sequence: Synthetic oligonucleotide
aacuagacaggagggagaa

SEQ ID NO: 2484755 - RNA, 19 nt, Artificial Sequence
  Description of Artificial Sequence: Synthetic oligonucleotide
ggauugguggcucaggcac

SEQ ID NO: 2484756 - RNA, 19 nt, Artificial Sequence
  Description of Artificial Sequence: Synthetic oligonucleotide
cacauuccuugucagugcc

SEQ ID NO: 2484757 - RNA, 19 nt, Artificial Sequence
  Description of Artificial Sequence: Synthetic oligonucleotide
gugagguuggaagaggaug

SEQ ID NO: 2484758 - RNA, 19 nt, Artificial Sequence
  Description of Artificial Sequence: Synthetic oligonucleotide
gagggcucuaucauuuugc

SEQ ID NO: 2484759 - RNA, 19 nt, Artificial Sequence
  Description of Artificial Sequence: Synthetic oligonucleotide
gucaccucccugcuaaacc

SEQ ID NO: 2484760 - RNA, 19 nt, Artificial Sequence
  Description of Artificial Sequence: Synthetic oligonucleotide
uauugucuggguggauugg

SEQ ID NO: 2484761 - RNA, 19 nt, Artificial Sequence
  Description of Artificial Sequence: Synthetic oligonucleotide
gaucaggucaucauuguua

SEQ ID NO: 2484762 - RNA, 19 nt, Artificial Sequence
  Description of Artificial Sequence: Synthetic oligonucleotide
cacguggacaucuuccgug

SEQ ID NO: 2484763 - RNA, 19 nt, Artificial Sequence
  Description of Artificial Sequence: Synthetic oligonucleotide
gaccucucagacauucagg

SEQ ID NO: 2484764 - RNA, 19 nt, Artificial Sequence
  Description of Artificial Sequence: Synthetic oligonucleotide
gucaucagucagcagcacc

SEQ ID NO: 2484765 - RNA, 19 nt, Artificial Sequence
  Description of Artificial Sequence: Synthetic oligonucleotide
aaacuagacaggagggaga

SEQ ID NO: 2484766 - RNA, 19 nt, Artificial Sequence
  Description of Artificial Sequence: Synthetic oligonucleotide
ggaugguuuauugucuggg

SEQ ID NO: 2484767 - RNA, 19 nt, Artificial Sequence
  Description of Artificial Sequence: Synthetic oligonucleotide
agaggaucaggucaucauu

SEQ ID NO: 2484768 - RNA, 19 nt, Artificial Sequence
  Description of Artificial Sequence: Synthetic oligonucleotide
aggggcucgugugaggagc

SEQ ID NO: 2484769 - RNA, 19 nt, Artificial Sequence
  Description of Artificial Sequence: Synthetic oligonucleotide
uggacaucuuccgugcuac

SEQ ID NO: 2484770 - RNA, 19 nt, Artificial Sequence
  Description of Artificial Sequence: Synthetic oligonucleotide
ugaguaggccucccuccag

SEQ ID NO: 2484771 - RNA, 19 nt, Artificial Sequence
  Description of Artificial Sequence: Synthetic oligonucleotide
gaagaggaugguuuauugu

SEQ ID NO: 2484772 - RNA, 19 nt, Artificial Sequence
  Description of Artificial Sequence: Synthetic oligonucleotide
uggaaccucugccccagug

SEQ ID NO: 2484773 - RNA, 19 nt, Artificial Sequence
  Description of Artificial Sequence: Synthetic oligonucleotide
cuaucauuuugcuugcaua

SEQ ID NO: 2484774 - RNA, 19 nt, Artificial Sequence
  Description of Artificial Sequence: Synthetic oligonucleotide
uggauugguggcucaggca

SEQ ID NO: 2484775 - RNA, 19 nt, Artificial Sequence
  Description of Artificial Sequence: Synthetic oligonucleotide
uugcuggugggcauguaau

SEQ ID NO: 2484776 - RNA, 19 nt, Artificial Sequence
  Description of Artificial Sequence: Synthetic oligonucleotide
aguguggguccguagggga

SEQ ID NO: 2484777 - RNA, 19 nt, Artificial Sequence
  Description of Artificial Sequence: Synthetic oligonucleotide
ugcuugcauacgauggaaa

SEQ ID NO: 2484778 - RNA, 19 nt, Artificial Sequence
  Description of Artificial Sequence: Synthetic oligonucleotide
ucagggaaugguuccgauc

SEQ ID NO: 2484779 - RNA, 19 nt, Artificial Sequence
  Description of Artificial Sequence: Synthetic oligonucleotide
gacaucuuccgugcuacac

SEQ ID NO: 2484780 - RNA, 19 nt, Artificial Sequence
  Description of Artificial Sequence: Synthetic oligonucleotide
agaggaugguuuauugucu

SEQ ID NO: 2484781 - RNA, 19 nt, Artificial Sequence
  Description of Artificial Sequence: Synthetic oligonucleotide
ugcauacgauggaaacucu

SEQ ID NO: 2484782 - RNA, 19 nt, Artificial Sequence
  Description of Artificial Sequence: Synthetic oligonucleotide
auggaaacucuggaaccuc

SEQ ID NO: 2484783 - RNA, 19 nt, Artificial Sequence
  Description of Artificial Sequence: Synthetic oligonucleotide
ggcacguggacaucuuccg

SEQ ID NO: 2484784 - RNA, 19 nt, Artificial Sequence
  Description of Artificial Sequence: Synthetic oligonucleotide
ggugaguaggccucccucc

SEQ ID NO: 2484785 - RNA, 19 nt, Artificial Sequence
  Description of Artificial Sequence: Synthetic oligonucleotide
guaauccuuagccuugucu

SEQ ID NO: 2484786 - RNA, 19 nt, Artificial Sequence
  Description of Artificial Sequence: Synthetic oligonucleotide
uugguggccuaucuggcuu

SEQ ID NO: 2484787 - RNA, 19 nt, Artificial Sequence
  Description of Artificial Sequence: Synthetic oligonucleotide
gaugguuuauugucugggu

SEQ ID NO: 2484788 - RNA, 19 nt, Artificial Sequence
  Description of Artificial Sequence: Synthetic oligonucleotide
ugcuacacugggcgccuag

SEQ ID NO: 2484789 - RNA, 19 nt, Artificial Sequence
  Description of Artificial Sequence: Synthetic oligonucleotide
agggaaugguuccgaucgg

SEQ ID NO: 2484790 - RNA, 19 nt, Artificial Sequence
  Description of Artificial Sequence: Synthetic oligonucleotide
cagcaaaagaccucucaga

SEQ ID NO: 2484791 - RNA, 19 nt, Artificial Sequence
  Description of Artificial Sequence: Synthetic oligonucleotide
cuaaaccuggcagccuagg

SEQ ID NO: 2484792 - RNA, 19 nt, Artificial Sequence
  Description of Artificial Sequence: Synthetic oligonucleotide
cuaguggccucucagggaa

SEQ ID NO: 2484793 - RNA, 19 nt, Artificial Sequence
  Description of Artificial Sequence: Synthetic oligonucleotide
cuuccgugcuacacugggc

SEQ ID NO: 2484794 - RNA, 19 nt, Artificial Sequence
  Description of Artificial Sequence: Synthetic oligonucleotide
ucaggucaucauuguuacc

SEQ ID NO: 2484795 - RNA, 19 nt, Artificial Sequence
  Description of Artificial Sequence: Synthetic oligonucleotide
gcuguuaugcuguuaugga

SEQ ID NO: 2484796 - RNA, 19 nt, Artificial Sequence
  Description of Artificial Sequence: Synthetic oligonucleotide
ucgugugaggagcgacucc

SEQ ID NO: 2484797 - RNA, 19 nt, Artificial Sequence
  Description of Artificial Sequence: Synthetic oligonucleotide
cagaacccagugugggucc

SEQ ID NO: 2484798 - RNA, 19 nt, Artificial Sequence
  Description of Artificial Sequence: Synthetic oligonucleotide
ggacagaacccaguguggg

SEQ ID NO: 2484799 - RNA, 19 nt, Artificial Sequence
  Description of Artificial Sequence: Synthetic oligonucleotide
agaaaggcugagagcuugg

SEQ ID NO: 2484800 - RNA, 19 nt, Artificial Sequence
  Description of Artificial Sequence: Synthetic oligonucleotide
gguuccggucaucagucag

SEQ ID NO: 2484801 - RNA, 19 nt, Artificial Sequence
  Description of Artificial Sequence: Synthetic oligonucleotide
cuacacugggcgccuagug

SEQ ID NO: 2484802 - RNA, 19 nt, Artificial Sequence
  Description of Artificial Sequence: Synthetic oligonucleotide
ggaaccucugccccagugc

SEQ ID NO: 2484803 - RNA, 19 nt, Artificial Sequence
  Description of Artificial Sequence: Synthetic oligonucleotide
auugucuggguggauuggu

SEQ ID NO: 2484804 - RNA, 19 nt, Artificial Sequence
  Description of Artificial Sequence: Synthetic oligonucleotide
gagcuugguggccuaucug

SEQ ID NO: 2484805 - RNA, 19 nt, Artificial Sequence
  Description of Artificial Sequence: Synthetic oligonucleotide
cuucacacgcagguuccgg

SEQ ID NO: 2484806 - RNA, 19 nt, Artificial Sequence
  Description of Artificial Sequence: Synthetic oligonucleotide
gcuagggcugcuguuaugc

SEQ ID NO: 2484807 - RNA, 19 nt, Artificial Sequence
  Description of Artificial Sequence: Synthetic oligonucleotide
uguaauccuuagccuuguc

SEQ ID NO: 2484808 - RNA, 19 nt, Artificial Sequence
  Description of Artificial Sequence: Synthetic oligonucleotide
agccuaggagggucccagc

SEQ ID NO: 2484809 - RNA, 19 nt, Artificial Sequence
  Description of Artificial Sequence: Synthetic oligonucleotide
uugcuugcauacgauggaa

SEQ ID NO: 2484810 - RNA, 19 nt, Artificial Sequence
  Description of Artificial Sequence: Synthetic oligonucleotide
cuguuauggacagaaccca

SEQ ID NO: 2484811 - RNA, 19 nt, Artificial Sequence
  Description of Artificial Sequence: Synthetic oligonucleotide
cucucagggaaugguuccg

SEQ ID NO: 2484812 - RNA, 19 nt, Artificial Sequence
  Description of Artificial Sequence: Synthetic oligonucleotide
agaguggcuggguccccgg

SEQ ID NO: 2484813 - RNA, 19 nt, Artificial Sequence
  Description of Artificial Sequence: Synthetic oligonucleotide
aggggauuuaggccucaga

SEQ ID NO: 2484814 - RNA, 19 nt, Artificial Sequence
  Description of Artificial Sequence: Synthetic oligonucleotide
cugggcccacguaggaagg

SEQ ID NO: 2484815 - RNA, 19 nt, Artificial Sequence
  Description of Artificial Sequence: Synthetic oligonucleotide
uccgugcuacacugggcgc

SEQ ID NO: 2484816 - RNA, 19 nt, Artificial Sequence
  Description of Artificial Sequence: Synthetic oligonucleotide
uguagccagucaccucccu

SEQ ID NO: 2484817 - RNA, 19 nt, Artificial Sequence
  Description of Artificial Sequence: Synthetic oligonucleotide
gcuggugggcauguaaucc

SEQ ID NO: 2484818 - RNA, 19 nt, Artificial Sequence
  Description of Artificial Sequence: Synthetic oligonucleotide
gggaaugguuccgaucggg

SEQ ID NO: 2484819 - RNA, 19 nt, Artificial Sequence
  Description of Artificial Sequence: Synthetic oligonucleotide
gauuuaggccucagagaga

SEQ ID NO: 2484820 - RNA, 19 nt, Artificial Sequence
  Description of Artificial Sequence: Synthetic oligonucleotide
uaggccucagagagauggu

SEQ ID NO: 2484821 - RNA, 19 nt, Artificial Sequence
  Description of Artificial Sequence: Synthetic oligonucleotide
gacccuugggaggggcucg

SEQ ID NO: 2484822 - RNA, 19 nt, Artificial Sequence
  Description of Artificial Sequence: Synthetic oligonucleotide
aagggcuagggcugcuguu

SEQ ID NO: 2484823 - RNA, 19 nt, Artificial Sequence
  Description of Artificial Sequence: Synthetic oligonucleotide
gcucuaucauuuugcuugc

SEQ ID NO: 2484824 - RNA, 19 nt, Artificial Sequence
  Description of Artificial Sequence: Synthetic oligonucleotide
gagaggaucaggucaucau

SEQ ID NO: 2484825 - RNA, 19 nt, Artificial Sequence
  Description of Artificial Sequence: Synthetic oligonucleotide
auugguggcucaggcacgu

SEQ ID NO: 2484826 - RNA, 19 nt, Artificial Sequence
  Description of Artificial Sequence: Synthetic oligonucleotide
ccugggcccacguaggaag

SEQ ID NO: 2484827 - RNA, 19 nt, Artificial Sequence
  Description of Artificial Sequence: Synthetic oligonucleotide
uggugggcauguaauccuu

SEQ ID NO: 2484828 - RNA, 19 nt, Artificial Sequence
  Description of Artificial Sequence: Synthetic oligonucleotide
agaacccaguguggguccg

SEQ ID NO: 2484829 - RNA, 19 nt, Artificial Sequence
  Description of Artificial Sequence: Synthetic oligonucleotide
gugaguaggccucccucca

SEQ ID NO: 2484830 - RNA, 19 nt, Artificial Sequence
  Description of Artificial Sequence: Synthetic oligonucleotide
cugcuguuaugcuguuaug

SEQ ID NO: 2484831 - RNA, 19 nt, Artificial Sequence
  Description of Artificial Sequence: Synthetic oligonucleotide
cuuugcaguagugcaggca

SEQ ID NO: 2484832 - RNA, 19 nt, Artificial Sequence
  Description of Artificial Sequence: Synthetic oligonucleotide
cuugcauacgauggaaacu

SEQ ID NO: 2484833 - RNA, 19 nt, Artificial Sequence
  Description of Artificial Sequence: Synthetic oligonucleotide
cagugccuucacacgcagg

SEQ ID NO: 2484834 - RNA, 19 nt, Artificial Sequence
  Description of Artificial Sequence: Synthetic oligonucleotide
cccugcuaaaccuggcagc

SEQ ID NO: 2484835 - RNA, 19 nt, Artificial Sequence
  Description of Artificial Sequence: Synthetic oligonucleotide
gguggauugguggcucagg

SEQ ID NO: 2484836 - RNA, 19 nt, Artificial Sequence
  Description of Artificial Sequence: Synthetic oligonucleotide
cacugggcgccuaguggcc

SEQ ID NO: 2484837 - RNA, 19 nt, Artificial Sequence
  Description of Artificial Sequence: Synthetic oligonucleotide
gguccguaggggauuuagg

SEQ ID NO: 2484838 - RNA, 19 nt, Artificial Sequence
  Description of Artificial Sequence: Synthetic oligonucleotide
uuaugcuguuauggacaga

SEQ ID NO: 2484839 - RNA, 19 nt, Artificial Sequence
  Description of Artificial Sequence: Synthetic oligonucleotide
cagccuaggagggucccag

SEQ ID NO: 2484840 - RNA, 19 nt, Artificial Sequence
  Description of Artificial Sequence: Synthetic oligonucleotide
cucgugugaggagcgacuc

SEQ ID NO: 2484841 - RNA, 19 nt, Artificial Sequence
  Description of Artificial Sequence: Synthetic oligonucleotide
uaggggauuuaggccucag

SEQ ID NO: 2484842 - RNA, 19 nt, Artificial Sequence
  Description of Artificial Sequence: Synthetic oligonucleotide
gcauacgauggaaacucug

SEQ ID NO: 2484843 - RNA, 19 nt, Artificial Sequence
  Description of Artificial Sequence: Synthetic oligonucleotide
cuggcagccuaggaggguc

SEQ ID NO: 2484844 - RNA, 19 nt, Artificial Sequence
  Description of Artificial Sequence: Synthetic oligonucleotide
uccggucaucagucagcag

SEQ ID NO: 2484845 - RNA, 19 nt, Artificial Sequence
  Description of Artificial Sequence: Synthetic oligonucleotide
cuccucuuugcuggugggc

SEQ ID NO: 2484846 - RNA, 19 nt, Artificial Sequence
  Description of Artificial Sequence: Synthetic oligonucleotide
ugacccuugggaggggcuc

SEQ ID NO: 2484847 - RNA, 19 nt, Artificial Sequence
  Description of Artificial Sequence: Synthetic oligonucleotide
cagagguucugcagacuga

SEQ ID NO: 2484848 - RNA, 19 nt, Artificial Sequence
  Description of Artificial Sequence: Synthetic oligonucleotide
gcugcuguuaugcuguuau

SEQ ID NO: 2484849 - RNA, 19 nt, Artificial Sequence
  Description of Artificial Sequence: Synthetic oligonucleotide
ggcauguaauccuuagccu

SEQ ID NO: 2484850 - RNA, 19 nt, Artificial Sequence
  Description of Artificial Sequence: Synthetic oligonucleotide
ggagggucccagcagcuuc

SEQ ID NO: 2484851 - RNA, 19 nt, Artificial Sequence
  Description of Artificial Sequence: Synthetic oligonucleotide
aucuuccgugcuacacugg

SEQ ID NO: 2484852 - RNA, 19 nt, Artificial Sequence
  Description of Artificial Sequence: Synthetic oligonucleotide
cuaucuggcuuguccaccu

SEQ ID NO: 2484853 - RNA, 19 nt, Artificial Sequence
  Description of Artificial Sequence: Synthetic oligonucleotide
ucaggcacguggacaucuu

SEQ ID NO: 2484854 - RNA, 19 nt, Artificial Sequence
  Description of Artificial Sequence: Synthetic oligonucleotide
agccagucaccucccugcu

SEQ ID NO: 2484855 - RNA, 19 nt, Artificial Sequence
  Description of Artificial Sequence: Synthetic oligonucleotide
acacgcacggccacggcgu

SEQ ID NO: 2484856 - RNA, 19 nt, Artificial Sequence
  Description of Artificial Sequence: Synthetic oligonucleotide
ccuaggagggucccagcag

SEQ ID NO: 2484857 - RNA, 19 nt, Artificial Sequence
  Description of Artificial Sequence: Synthetic oligonucleotide
cacacgcagguuccgguca

SEQ ID NO: 2484858 - RNA, 19 nt, Artificial Sequence
  Description of Artificial Sequence: Synthetic oligonucleotide
gcauguaauccuuagccuu

SEQ ID NO: 2484859 - RNA, 19 nt, Artificial Sequence
  Description of Artificial Sequence: Synthetic oligonucleotide
cauuuugcuugcauacgau

SEQ ID NO: 2484860 - RNA, 19 nt, Artificial Sequence
  Description of Artificial Sequence: Synthetic oligonucleotide
gcuuccgccugacccuugg

SEQ ID NO: 2484861 - RNA, 19 nt, Artificial Sequence
  Description of Artificial Sequence: Synthetic oligonucleotide
agguuccggucaucaguca

SEQ ID NO: 2484862 - RNA, 19 nt, Artificial Sequence
  Description of Artificial Sequence: Synthetic oligonucleotide
augucccucacaggcacau

SEQ ID NO: 2484863 - RNA, 19 nt, Artificial Sequence
  Description of Artificial Sequence: Synthetic oligonucleotide
ggguccguaggggauuuag

SEQ ID NO: 2484864 - RNA, 19 nt, Artificial Sequence
  Description of Artificial Sequence: Synthetic oligonucleotide
cgugugaggagcgacuccc

SEQ ID NO: 2484865 - RNA, 19 nt, Artificial Sequence
  Description of Artificial Sequence: Synthetic oligonucleotide
caggcacguggacaucuuc

SEQ ID NO: 2484866 - RNA, 19 nt, Artificial Sequence
  Description of Artificial Sequence: Synthetic oligonucleotide
ccuaucuggcuuguccacc

SEQ ID NO: 2484867 - RNA, 19 nt, Artificial Sequence
  Description of Artificial Sequence: Synthetic oligonucleotide
guggcucaggcacguggac

SEQ ID NO: 2484868 - RNA, 19 nt, Artificial Sequence
  Description of Artificial Sequence: Synthetic oligonucleotide
cccugaaacuagacaggag

SEQ ID NO: 2484869 - RNA, 19 nt, Artificial Sequence
  Description of Artificial Sequence: Synthetic oligonucleotide
acacgcagguuccggucau

SEQ ID NO: 2484870 - RNA, 19 nt, Artificial Sequence
  Description of Artificial Sequence: Synthetic oligonucleotide
ugcagacugagggcucuau

SEQ ID NO: 2484871 - RNA, 19 nt, Artificial Sequence
  Description of Artificial Sequence: Synthetic oligonucleotide
gggugaguaggccucccuc

SEQ ID NO: 2484872 - RNA, 19 nt, Artificial Sequence
  Description of Artificial Sequence: Synthetic oligonucleotide
gcggaugggcuccucuuug

SEQ ID NO: 2484873 - RNA, 19 nt, Artificial Sequence
  Description of Artificial Sequence: Synthetic oligonucleotide
acauuccuugucagugccu

SEQ ID NO: 2484874 - RNA, 19 nt, Artificial Sequence
  Description of Artificial Sequence: Synthetic oligonucleotide
ccucucagacauucaggac

SEQ ID NO: 2484875 - RNA, 19 nt, Artificial Sequence
  Description of Artificial Sequence: Synthetic oligonucleotide
gcgccuaguggccucucag

SEQ ID NO: 2484876 - RNA, 19 nt, Artificial Sequence
  Description of Artificial Sequence: Synthetic oligonucleotide
gcuugguggccuaucuggc

SEQ ID NO: 2484877 - RNA, 19 nt, Artificial Sequence
  Description of Artificial Sequence: Synthetic oligonucleotide
cuugguggccuaucuggcu

SEQ ID NO: 2484878 - RNA, 19 nt, Artificial Sequence
  Description of Artificial Sequence: Synthetic oligonucleotide
aacccaguguggguccgua

SEQ ID NO: 2484879 - RNA, 19 nt, Artificial Sequence
  Description of Artificial Sequence: Synthetic oligonucleotide
gcagcaccaccucccguag

SEQ ID NO: 2484880 - RNA, 19 nt, Artificial Sequence
  Description of Artificial Sequence: Synthetic oligonucleotide
aggcggaugggcuccucuu

SEQ ID NO: 2484881 - RNA, 19 nt, Artificial Sequence
  Description of Artificial Sequence: Synthetic oligonucleotide
gcuaaaccuggcagccuag

SEQ ID NO: 2484882 - RNA, 19 nt, Artificial Sequence
  Description of Artificial Sequence: Synthetic oligonucleotide
gccuaucuggcuuguccac

SEQ ID NO: 2484883 - RNA, 19 nt, Artificial Sequence
  Description of Artificial Sequence: Synthetic oligonucleotide
gugugaggagcgacucccc

SEQ ID NO: 2484884 - RNA, 19 nt, Artificial Sequence
  Description of Artificial Sequence: Synthetic oligonucleotide
ugagagcuugguggccuau

SEQ ID NO: 2484885 - RNA, 19 nt, Artificial Sequence
  Description of Artificial Sequence: Synthetic oligonucleotide
uccccggggugaguaggcc

SEQ ID NO: 2484886 - RNA, 19 nt, Artificial Sequence
  Description of Artificial Sequence: Synthetic oligonucleotide
uaguggccucucagggaau

SEQ ID NO: 2484887 - RNA, 19 nt, Artificial Sequence
  Description of Artificial Sequence: Synthetic oligonucleotide
acugggcgccuaguggccu

SEQ ID NO: 2484888 - RNA, 19 nt, Artificial Sequence
  Description of Artificial Sequence: Synthetic oligonucleotide
gcccugaaacuagacagga

SEQ ID NO: 2484889 - RNA, 19 nt, Artificial Sequence
  Description of Artificial Sequence: Synthetic oligonucleotide
ggggcucgugugaggagcg

SEQ ID NO: 2484890 - RNA, 19 nt, Artificial Sequence
  Description of Artificial Sequence: Synthetic oligonucleotide
ccguaggggauuuaggccu

SEQ ID NO: 2484891 - RNA, 19 nt, Artificial Sequence
  Description of Artificial Sequence: Synthetic oligonucleotide
guggggccccgacgugugg

SEQ ID NO: 2484892 - RNA, 19 nt, Artificial Sequence
  Description of Artificial Sequence: Synthetic oligonucleotide
gguggcucaggcacgugga

SEQ ID NO: 2484893 - RNA, 19 nt, Artificial Sequence
  Description of Artificial Sequence: Synthetic oligonucleotide
acuagacaggagggagaaa

SEQ ID NO: 2484894 - RNA, 19 nt, Artificial Sequence
  Description of Artificial Sequence: Synthetic oligonucleotide
cgccuaguggccucucagg

SEQ ID NO: 2484895 - RNA, 19 nt, Artificial Sequence
  Description of Artificial Sequence: Synthetic oligonucleotide
cauuccuugucagugccuu

SEQ ID NO: 2484896 - RNA, 19 nt, Artificial Sequence
  Description of Artificial Sequence: Synthetic oligonucleotide
cugggcgccuaguggccuc

SEQ ID NO: 2484897 - RNA, 19 nt, Artificial Sequence
  Description of Artificial Sequence: Synthetic oligonucleotide
guccccggggugaguaggc

SEQ ID NO: 2484898 - RNA, 19 nt, Artificial Sequence
  Description of Artificial Sequence: Synthetic oligonucleotide
ccgugcuacacugggcgcc

SEQ ID NO: 2484899 - RNA, 19 nt, Artificial Sequence
  Description of Artificial Sequence: Synthetic oligonucleotide
cucaggcacguggacaucu

SEQ ID NO: 2484900 - RNA, 19 nt, Artificial Sequence
  Description of Artificial Sequence: Synthetic oligonucleotide
uugguggcucaggcacgug

SEQ ID NO: 2484901 - RNA, 19 nt, Artificial Sequence
  Description of Artificial Sequence: Synthetic oligonucleotide
ggguggauugguggcucag

SEQ ID NO: 2484902 - RNA, 19 nt, Artificial Sequence
  Description of Artificial Sequence: Synthetic oligonucleotide
gacagagguucugcagacu

SEQ ID NO: 2484903 - RNA, 19 nt, Artificial Sequence
  Description of Artificial Sequence: Synthetic oligonucleotide
cucuaucauuuugcuugca

SEQ ID NO: 2484904 - RNA, 19 nt, Artificial Sequence
  Description of Artificial Sequence: Synthetic oligonucleotide
agcccaccugggcccacgu

SEQ ID NO: 2484905 - RNA, 19 nt, Artificial Sequence
  Description of Artificial Sequence: Synthetic oligonucleotide
accugggcccacguaggaa

SEQ ID NO: 2484906 - RNA, 19 nt, Artificial Sequence
  Description of Artificial Sequence: Synthetic oligonucleotide
gcgugagguuggaagagga

SEQ ID NO: 2484907 - RNA, 19 nt, Artificial Sequence
  Description of Artificial Sequence: Synthetic oligonucleotide
ggcucgugugaggagcgac

SEQ ID NO: 2484908 - RNA, 19 nt, Artificial Sequence
  Description of Artificial Sequence: Synthetic oligonucleotide
guaggggauuuaggccuca

SEQ ID NO: 2484909 - RNA, 19 nt, Artificial Sequence
  Description of Artificial Sequence: Synthetic oligonucleotide
cccggggugaguaggccuc

SEQ ID NO: 2484910 - RNA, 19 nt, Artificial Sequence
  Description of Artificial Sequence: Synthetic oligonucleotide
cucccguagcaggcggaug

SEQ ID NO: 2484911 - RNA, 19 nt, Artificial Sequence
  Description of Artificial Sequence: Synthetic oligonucleotide
ccuucacacgcagguuccg

SEQ ID NO: 2484912 - RNA, 19 nt, Artificial Sequence
  Description of Artificial Sequence: Synthetic oligonucleotide
ugggcgccuaguggccucu

SEQ ID NO: 2484913 - RNA, 19 nt, Artificial Sequence
  Description of Artificial Sequence: Synthetic oligonucleotide
cacgcacggccacggcgug

SEQ ID NO: 2484914 - RNA, 19 nt, Artificial Sequence
  Description of Artificial Sequence: Synthetic oligonucleotide
ggccacggcgugagguugg

SEQ ID NO: 2484915 - RNA, 19 nt, Artificial Sequence
  Description of Artificial Sequence: Synthetic oligonucleotide
cccacacgcacggccacgg

SEQ ID NO: 2484916 - RNA, 19 nt, Artificial Sequence
  Description of Artificial Sequence: Synthetic oligonucleotide
ggcugagagcuugguggcc

SEQ ID NO: 2484917 - RNA, 19 nt, Artificial Sequence
  Description of Artificial Sequence: Synthetic oligonucleotide
cagcccaccugggcccacg

SEQ ID NO: 2484918 - RNA, 19 nt, Artificial Sequence
  Description of Artificial Sequence: Synthetic oligonucleotide
cccacguaggaaggcuggg

SEQ ID NO: 2484919 - RNA, 19 nt, Artificial Sequence
  Description of Artificial Sequence: Synthetic oligonucleotide
caccugggcccacguagga

SEQ ID NO: 2484920 - RNA, 19 nt, Artificial Sequence
  Description of Artificial Sequence: Synthetic oligonucleotide
cucagggaaugguuccgau

SEQ ID NO: 2484921 - RNA, 19 nt, Artificial Sequence
  Description of Artificial Sequence: Synthetic oligonucleotide
cugagagcuugguggccua

SEQ ID NO: 2484922 - RNA, 19 nt, Artificial Sequence
  Description of Artificial Sequence: Synthetic oligonucleotide
gguggggccccgacgugug

SEQ ID NO: 2484923 - RNA, 19 nt, Artificial Sequence
  Description of Artificial Sequence: Synthetic oligonucleotide
ugucccucacaggcacauu

SEQ ID NO: 2484924 - RNA, 19 nt, Artificial Sequence
  Description of Artificial Sequence: Synthetic oligonucleotide
ccugacccuugggaggggc

SEQ ID NO: 2484925 - RNA, 19 nt, Artificial Sequence
  Description of Artificial Sequence: Synthetic oligonucleotide
ccuugucagugccuucaca

SEQ ID NO: 2484926 - RNA, 19 nt, Artificial Sequence
  Description of Artificial Sequence: Synthetic oligonucleotide
gcugagagcuugguggccu

SEQ ID NO: 2484927 - RNA, 19 nt, Artificial Sequence
  Description of Artificial Sequence: Synthetic oligonucleotide
accucccguagcaggcgga

SEQ ID NO: 2484928 - RNA, 19 nt, Artificial Sequence
  Description of Artificial Sequence: Synthetic oligonucleotide
acccuugggaggggcucgu

SEQ ID NO: 2484929 - RNA, 19 nt, Artificial Sequence
  Description of Artificial Sequence: Synthetic oligonucleotide
cugacccuugggaggggcu

SEQ ID NO: 2484930 - RNA, 19 nt, Artificial Sequence
  Description of Artificial Sequence: Synthetic oligonucleotide
cccguagcaggcggauggg

SEQ ID NO: 2484931 - RNA, 19 nt, Artificial Sequence
  Description of Artificial Sequence: Synthetic oligonucleotide
cacggccacggcgugaggu

SEQ ID NO: 2484932 - RNA, 19 nt, Artificial Sequence
  Description of Artificial Sequence: Synthetic oligonucleotide
ccguagcaggcggaugggc

SEQ ID NO: 2484933 - RNA, 19 nt, Artificial Sequence
  Description of Artificial Sequence: Synthetic oligonucleotide
ggcgccuaguggccucuca

SEQ ID NO: 2484934 - RNA, 19 nt, Artificial Sequence
  Description of Artificial Sequence: Synthetic oligonucleotide
cucagacauucaggacaga

SEQ ID NO: 2484935 - RNA, 19 nt, Artificial Sequence
  Description of Artificial Sequence: Synthetic oligonucleotide
gcacguggacaucuuccgu

SEQ ID NO: 2484936 - RNA, 19 nt, Artificial Sequence
  Description of Artificial Sequence: Synthetic oligonucleotide
cacuacagaguggcugggu

SEQ ID NO: 2484937 - RNA, 19 nt, Artificial Sequence
  Description of Artificial Sequence: Synthetic oligonucleotide
guggccuaucuggcuuguc

SEQ ID NO: 2484938 - RNA, 19 nt, Artificial Sequence
  Description of Artificial Sequence: Synthetic oligonucleotide
agcuuccgccugacccuug

SEQ ID NO: 2484939 - RNA, 19 nt, Artificial Sequence
  Description of Artificial Sequence: Synthetic oligonucleotide
gaacccaguguggguccgu

SEQ ID NO: 2484940 - RNA, 19 nt, Artificial Sequence
  Description of Artificial Sequence: Synthetic oligonucleotide
ccacguaggaaggcuggga

SEQ ID NO: 2484941 - RNA, 19 nt, Artificial Sequence
  Description of Artificial Sequence: Synthetic oligonucleotide
gggcucuaucauuuugcuu

SEQ ID NO: 2484942 - RNA, 19 nt, Artificial Sequence
  Description of Artificial Sequence: Synthetic oligonucleotide
cgcacggccacggcgugag

SEQ ID NO: 2484943 - RNA, 19 nt, Artificial Sequence
  Description of Artificial Sequence: Synthetic oligonucleotide
gcucgugugaggagcgacu

SEQ ID NO: 2484944 - RNA, 19 nt, Artificial Sequence
  Description of Artificial Sequence: Synthetic oligonucleotide
uggguccguaggggauuua

SEQ ID NO: 2484945 - RNA, 19 nt, Artificial Sequence
  Description of Artificial Sequence: Synthetic oligonucleotide
cugcuaaaccuggcagccu

SEQ ID NO: 2484946 - RNA, 19 nt, Artificial Sequence
  Description of Artificial Sequence: Synthetic oligonucleotide
ggggugaguaggccucccu

SEQ ID NO: 2484947 - RNA, 19 nt, Artificial Sequence
  Description of Artificial Sequence: Synthetic oligonucleotide
gcuacacugggcgccuagu

SEQ ID NO: 2484948 - RNA, 19 nt, Artificial Sequence
  Description of Artificial Sequence: Synthetic oligonucleotide
ccggggugaguaggccucc

SEQ ID NO: 2484949 - RNA, 19 nt, Artificial Sequence
  Description of Artificial Sequence: Synthetic oligonucleotide
gcacggccacggcgugagg

SEQ ID NO: 2484950 - RNA, 19 nt, Artificial Sequence
  Description of Artificial Sequence: Synthetic oligonucleotide
cugcagacugagggcucua

SEQ ID NO: 2484951 - RNA, 19 nt, Artificial Sequence
  Description of Artificial Sequence: Synthetic oligonucleotide
ggguggggccccgacgugu

SEQ ID NO: 2484952 - RNA, 19 nt, Artificial Sequence
  Description of Artificial Sequence: Synthetic oligonucleotide
gggcucgugugaggagcga

SEQ ID NO: 2484953 - RNA, 19 nt, Artificial Sequence
  Description of Artificial Sequence: Synthetic oligonucleotide
cuggaaccucugccccagu

SEQ ID NO: 2484954 - RNA, 19 nt, Artificial Sequence
  Description of Artificial Sequence: Synthetic oligonucleotide
gccacggcgugagguugga

SEQ ID NO: 2484955 - RNA, 19 nt, Artificial Sequence
  Description of Artificial Sequence: Synthetic oligonucleotide
cggccacggcgugagguug

SEQ ID NO: 2484956 - RNA, 19 nt, Artificial Sequence
  Description of Artificial Sequence: Synthetic oligonucleotide
gugcuacacugggcgccua

SEQ ID NO: 2484957 - RNA, 19 nt, Artificial Sequence
  Description of Artificial Sequence: Synthetic oligonucleotide
ccccggggugaguaggccu

SEQ ID NO: 2484958 - RNA, 19 nt, Artificial Sequence
  Description of Artificial Sequence: Synthetic oligonucleotide
cagcuuccgccugacccuu

SEQ ID NO: 2484959 - RNA, 19 nt, Artificial Sequence
  Description of Artificial Sequence: Synthetic oligonucleotide
cguggacaucuuccgugcu

SEQ ID NO: 2484960 - RNA, 19 nt, Artificial Sequence
  Description of Artificial Sequence: Synthetic oligonucleotide
cgugcuacacugggcgccu

SEQ ID NO: 2484961 - RNA, 19 nt, Artificial Sequence
  Description of Artificial Sequence: Synthetic oligonucleotide
gggcgccuaguggccucuc

SEQ ID NO: 2484962 - RNA, 19 nt, Artificial Sequence
  Description of Artificial Sequence: Synthetic oligonucleotide
ccacggcgugagguuggaa

SEQ ID NO: 2484963 - RNA, 19 nt, Artificial Sequence
  Description of Artificial Sequence: Synthetic oligonucleotide
uugauaaucagaaaguaug

SEQ ID NO: 2484964 - RNA, 19 nt, Artificial Sequence
  Description of Artificial Sequence: Synthetic oligonucleotide
uuuuaguucauagagaucu

SEQ ID NO: 2484965 - RNA, 19 nt, Artificial Sequence
  Description of Artificial Sequence: Synthetic oligonucleotide
ugauuuucuucuuaaauag

SEQ ID NO: 2484966 - RNA, 19 nt, Artificial Sequence
  Description of Artificial Sequence: Synthetic oligonucleotide
aaagauaaggcuccauuuc

SEQ ID NO: 2484967 - RNA, 19 nt, Artificial Sequence
  Description of Artificial Sequence: Synthetic oligonucleotide
gauuaagccguuuacauac

SEQ ID NO: 2484968 - RNA, 19 nt, Artificial Sequence
  Description of Artificial Sequence: Synthetic oligonucleotide
uaaauagagggcaauacca

SEQ ID NO: 2484969 - RNA, 19 nt, Artificial Sequence
  Description of Artificial Sequence: Synthetic oligonucleotide
cuuaucagggucuaaaccc

SEQ ID NO: 2484970 - RNA, 19 nt, Artificial Sequence
  Description of Artificial Sequence: Synthetic oligonucleotide
uuuacauacauuuucuacu

SEQ ID NO: 2484971 - RNA, 19 nt, Artificial Sequence
  Description of Artificial Sequence: Synthetic oligonucleotide
ugauaaucagaaaguaugg

SEQ ID NO: 2484972 - RNA, 19 nt, Artificial Sequence
  Description of Artificial Sequence: Synthetic oligonucleotide
auguguuauacauucuucc

SEQ ID NO: 2484973 - RNA, 19 nt, Artificial Sequence
  Description of Artificial Sequence: Synthetic oligonucleotide
uguaugacuacuucugagg

SEQ ID NO: 2484974 - RNA, 19 nt, Artificial Sequence
  Description of Artificial Sequence: Synthetic oligonucleotide
uuaaauagagggcaauacc

SEQ ID NO: 2484975 - RNA, 19 nt, Artificial Sequence
  Description of Artificial Sequence: Synthetic oligonucleotide
acauacauuuucuacucgc

SEQ ID NO: 2484976 - RNA, 19 nt, Artificial Sequence
  Description of Artificial Sequence: Synthetic oligonucleotide
uuuucuucuuaaauagagg

SEQ ID NO: 2484977 - RNA, 19 nt, Artificial Sequence
  Description of Artificial Sequence: Synthetic oligonucleotide
aaggcuggagauuaagccg

SEQ ID NO: 2484978 - RNA, 19 nt, Artificial Sequence
  Description of Artificial Sequence: Synthetic oligonucleotide
ucuuagaaagcuccaaaag

SEQ ID NO: 2484979 - RNA, 19 nt, Artificial Sequence
  Description of Artificial Sequence: Synthetic oligonucleotide
ucugcauacaggucaaugg

SEQ ID NO: 2484980 - RNA, 19 nt, Artificial Sequence
  Description of Artificial Sequence: Synthetic oligonucleotide
uaaucagaaaguauggcac

SEQ ID NO: 2484981 - RNA, 19 nt, Artificial Sequence
  Description of Artificial Sequence: Synthetic oligonucleotide
gaaaguauggcaccuacug

SEQ ID NO: 2484982 - RNA, 19 nt, Artificial Sequence
  Description of Artificial Sequence: Synthetic oligonucleotide
ucuuagauucgcuaaagca

SEQ ID NO: 2484983 - RNA, 19 nt, Artificial Sequence
  Description of Artificial Sequence: Synthetic oligonucleotide
auaaggcuccauuucaccc

SEQ ID NO: 2484984 - RNA, 19 nt, Artificial Sequence
  Description of Artificial Sequence: Synthetic oligonucleotide
augauaauggcuucaaugu

SEQ ID NO: 2484985 - RNA, 19 nt, Artificial Sequence
  Description of Artificial Sequence: Synthetic oligonucleotide
ucuuuuaguucauagagau

SEQ ID NO: 2484986 - RNA, 19 nt, Artificial Sequence
  Description of Artificial Sequence: Synthetic oligonucleotide
ucuucuuaaauagagggca

SEQ ID NO: 2484987 - RNA, 19 nt, Artificial Sequence
  Description of Artificial Sequence: Synthetic oligonucleotide
cacguugauaaucagaaag

SEQ ID NO: 2484988 - RNA, 19 nt, Artificial Sequence
  Description of Artificial Sequence: Synthetic oligonucleotide
aaagguaaguuaaaggcug

SEQ ID NO: 2484989 - RNA, 19 nt, Artificial Sequence
  Description of Artificial Sequence: Synthetic oligonucleotide
ugcaaaugcaucagcagag

SEQ ID NO: 2484990 - RNA, 19 nt, Artificial Sequence
  Description of Artificial Sequence: Synthetic oligonucleotide
aaaagauaaggcuccauuu

SEQ ID NO: 2484991 - RNA, 19 nt, Artificial Sequence
  Description of Artificial Sequence: Synthetic oligonucleotide
ggcaauaccaaagugaagg

SEQ ID NO: 2484992 - RNA, 19 nt, Artificial Sequence
  Description of Artificial Sequence: Synthetic oligonucleotide
uguuauacauucuuccugu

SEQ ID NO: 2484993 - RNA, 19 nt, Artificial Sequence
  Description of Artificial Sequence: Synthetic oligonucleotide
uucugaggaguccagaaug

SEQ ID NO: 2484994 - RNA, 19 nt, Artificial Sequence
  Description of Artificial Sequence: Synthetic oligonucleotide
uucgcuaaagcaacaaugu

SEQ ID NO: 2484995 - RNA, 19 nt, Artificial Sequence
  Description of Artificial Sequence: Synthetic oligonucleotide
gcuacuuugaugauaaugg

SEQ ID NO: 2484996 - RNA, 19 nt, Artificial Sequence
  Description of Artificial Sequence: Synthetic oligonucleotide
uaaguuaaaggcuggagau

SEQ ID NO: 2484997 - RNA, 19 nt, Artificial Sequence
  Description of Artificial Sequence: Synthetic oligonucleotide
cuuccugucuccaagcucc

SEQ ID NO: 2484998 - RNA, 19 nt, Artificial Sequence
  Description of Artificial Sequence: Synthetic oligonucleotide
ccaaagguaaguuaaaggc

SEQ ID NO: 2484999 - RNA, 19 nt, Artificial Sequence
  Description of Artificial Sequence: Synthetic oligonucleotide
aagccguuuacauacauuu

SEQ ID NO: 2485000 - RNA, 19 nt, Artificial Sequence
  Description of Artificial Sequence: Synthetic oligonucleotide
aaagugaagguuucauacu

SEQ ID NO: 2485001 - RNA, 19 nt, Artificial Sequence
  Description of Artificial Sequence: Synthetic oligonucleotide
gaagguuucauacucgcca

SEQ ID NO: 2485002 - RNA, 19 nt, Artificial Sequence
  Description of Artificial Sequence: Synthetic oligonucleotide
uucuucuuaaauagagggc

SEQ ID NO: 2485003 - RNA, 19 nt, Artificial Sequence
  Description of Artificial Sequence: Synthetic oligonucleotide
aaccucaucaccuucgcau

SEQ ID NO: 2485004 - RNA, 19 nt, Artificial Sequence
  Description of Artificial Sequence: Synthetic oligonucleotide
aauaccaaagugaagguuu

SEQ ID NO: 2485005 - RNA, 19 nt, Artificial Sequence
  Description of Artificial Sequence: Synthetic oligonucleotide
agggucuaaacccaaagcu

SEQ ID NO: 2485006 - RNA, 19 nt, Artificial Sequence
  Description of Artificial Sequence: Synthetic oligonucleotide
auggcuucaauguuggaug

SEQ ID NO: 2485007 - RNA, 19 nt, Artificial Sequence
  Description of Artificial Sequence: Synthetic oligonucleotide
aacaaugugaugcccugca

SEQ ID NO: 2485008 - RNA, 19 nt, Artificial Sequence
  Description of Artificial Sequence: Synthetic oligonucleotide
aggucaauggcauggugac

SEQ ID NO: 2485009 - RNA, 19 nt, Artificial Sequence
  Description of Artificial Sequence: Synthetic oligonucleotide
uucuuuuaguucauagaga

SEQ ID NO: 2485010 - RNA, 19 nt, Artificial Sequence
  Description of Artificial Sequence: Synthetic oligonucleotide
agcuccaaaagauaaggcu

SEQ ID NO: 2485011 - RNA, 19 nt, Artificial Sequence
  Description of Artificial Sequence: Synthetic oligonucleotide
uguguuauacauucuuccu

SEQ ID NO: 2485012 - RNA, 19 nt, Artificial Sequence
  Description of Artificial Sequence: Synthetic oligonucleotide
uacauacauuuucuacucg

SEQ ID NO: 2485013 - RNA, 19 nt, Artificial Sequence
  Description of Artificial Sequence: Synthetic oligonucleotide
uugucuguauaacagcccu

SEQ ID NO: 2485014 - RNA, 19 nt, Artificial Sequence
  Description of Artificial Sequence: Synthetic oligonucleotide
uuugucuguauaacagccc

SEQ ID NO: 2485015 - RNA, 19 nt, Artificial Sequence
  Description of Artificial Sequence: Synthetic oligonucleotide
aucauguuguaacagcugu

SEQ ID NO: 2485016 - RNA, 19 nt, Artificial Sequence
  Description of Artificial Sequence: Synthetic oligonucleotide
aguaagucuuccugguuuc

SEQ ID NO: 2485017 - RNA, 19 nt, Artificial Sequence
  Description of Artificial Sequence: Synthetic oligonucleotide
uuaucagggucuaaaccca

SEQ ID NO: 2485018 - RNA, 19 nt, Artificial Sequence
  Description of Artificial Sequence: Synthetic oligonucleotide
guaaguuaaaggcuggaga

SEQ ID NO: 2485019 - RNA, 19 nt, Artificial Sequence
  Description of Artificial Sequence: Synthetic oligonucleotide
ugcaucauguuguaacagc

SEQ ID NO: 2485020 - RNA, 19 nt, Artificial Sequence
  Description of Artificial Sequence: Synthetic oligonucleotide
auuuucuacucgcacacgu

SEQ ID NO: 2485021 - RNA, 19 nt, Artificial Sequence
  Description of Artificial Sequence: Synthetic oligonucleotide
aguguuugucuguauaaca

SEQ ID NO: 2485022 - RNA, 19 nt, Artificial Sequence
  Description of Artificial Sequence: Synthetic oligonucleotide
ugcuacuuugaugauaaug

SEQ ID NO: 2485023 - RNA, 19 nt, Artificial Sequence
  Description of Artificial Sequence: Synthetic oligonucleotide
cuuaaauagagggcaauac

SEQ ID NO: 2485024 - RNA, 19 nt, Artificial Sequence
  Description of Artificial Sequence: Synthetic oligonucleotide
auacaggucaauggcaugg

SEQ ID NO: 2485025 - RNA, 19 nt, Artificial Sequence
  Description of Artificial Sequence: Synthetic oligonucleotide
uucuuagaaagcuccaaaa

SEQ ID NO: 2485026 - RNA, 19 nt, Artificial Sequence
  Description of Artificial Sequence: Synthetic oligonucleotide
aaaugcaucagcagagugu

SEQ ID NO: 2485027 - RNA, 19 nt, Artificial Sequence
  Description of Artificial Sequence: Synthetic oligonucleotide
agaguguaugacuacuucu

SEQ ID NO: 2485028 - RNA, 19 nt, Artificial Sequence
  Description of Artificial Sequence: Synthetic oligonucleotide
gacaccauacuucuuagaa

SEQ ID NO: 2485029 - RNA, 19 nt, Artificial Sequence
  Description of Artificial Sequence: Synthetic oligonucleotide
ucgcauguguuauacauuc

SEQ ID NO: 2485030 - RNA, 19 nt, Artificial Sequence
  Description of Artificial Sequence: Synthetic oligonucleotide
uaugacuacuucugaggag

SEQ ID NO: 2485031 - RNA, 19 nt, Artificial Sequence
  Description of Artificial Sequence: Synthetic oligonucleotide
uuucauacucgccaccuuc

SEQ ID NO: 2485032 - RNA, 19 nt, Artificial Sequence
  Description of Artificial Sequence: Synthetic oligonucleotide
cacugcaucauguuguaac

SEQ ID NO: 2485033 - RNA, 19 nt, Artificial Sequence
  Description of Artificial Sequence: Synthetic oligonucleotide
guuugucuguauaacagcc

SEQ ID NO: 2485034 - RNA, 19 nt, Artificial Sequence
  Description of Artificial Sequence: Synthetic oligonucleotide
cuacuuugaugauaauggc

SEQ ID NO: 2485035 - RNA, 19 nt, Artificial Sequence
  Description of Artificial Sequence: Synthetic oligonucleotide
auucgcuaaagcaacaaug

SEQ ID NO: 2485036 - RNA, 19 nt, Artificial Sequence
  Description of Artificial Sequence: Synthetic oligonucleotide
guguuauacauucuuccug

SEQ ID NO: 2485037 - RNA, 19 nt, Artificial Sequence
  Description of Artificial Sequence: Synthetic oligonucleotide
augguucugcgguacaggg

SEQ ID NO: 2485038 - RNA, 19 nt, Artificial Sequence
  Description of Artificial Sequence: Synthetic oligonucleotide
ugcauacaggucaauggca

SEQ ID NO: 2485039 - RNA, 19 nt, Artificial Sequence
  Description of Artificial Sequence: Synthetic oligonucleotide
aaugcaucagcagagugua

SEQ ID NO: 2485040 - RNA, 19 nt, Artificial Sequence
  Description of Artificial Sequence: Synthetic oligonucleotide
uggagauuaagccguuuac

SEQ ID NO: 2485041 - RNA, 19 nt, Artificial Sequence
  Description of Artificial Sequence: Synthetic oligonucleotide
gaguguaugacuacuucug

SEQ ID NO: 2485042 - RNA, 19 nt, Artificial Sequence
  Description of Artificial Sequence: Synthetic oligonucleotide
auagagaucuucaaccuca

SEQ ID NO: 2485043 - RNA, 19 nt, Artificial Sequence
  Description of Artificial Sequence: Synthetic oligonucleotide
acugucugauacauguagc

SEQ ID NO: 2485044 - RNA, 19 nt, Artificial Sequence
  Description of Artificial Sequence: Synthetic oligonucleotide
caaugugaugcccugcagc

SEQ ID NO: 2485045 - RNA, 19 nt, Artificial Sequence
  Description of Artificial Sequence: Synthetic oligonucleotide
uuggaugcuaucaucucuc

SEQ ID NO: 2485046 - RNA, 19 nt, Artificial Sequence
  Description of Artificial Sequence: Synthetic oligonucleotide
auuucacccaggguuuucc

SEQ ID NO: 2485047 - RNA, 19 nt, Artificial Sequence
  Description of Artificial Sequence: Synthetic oligonucleotide
cauguagcuauccagcuca

SEQ ID NO: 2485048 - RNA, 19 nt, Artificial Sequence
  Description of Artificial Sequence: Synthetic oligonucleotide
ugaagguuucauacucgcc

SEQ ID NO: 2485049 - RNA, 19 nt, Artificial Sequence
  Description of Artificial Sequence: Synthetic oligonucleotide
cauguguuauacauucuuc

SEQ ID NO: 2485050 - RNA, 19 nt, Artificial Sequence
  Description of Artificial Sequence: Synthetic oligonucleotide
ugucguggaacgcacgcug

SEQ ID NO: 2485051 - RNA, 19 nt, Artificial Sequence
  Description of Artificial Sequence: Synthetic oligonucleotide
cauacuucuuagaaagcuc

SEQ ID NO: 2485052 - RNA, 19 nt, Artificial Sequence
  Description of Artificial Sequence: Synthetic oligonucleotide
uuugaugauaauggcuuca

SEQ ID NO: 2485053 - RNA, 19 nt, Artificial Sequence
  Description of Artificial Sequence: Synthetic oligonucleotide
uacucgcacacguugauaa

SEQ ID NO: 2485054 - RNA, 19 nt, Artificial Sequence
  Description of Artificial Sequence: Synthetic oligonucleotide
ugguuucucugccaaaggu

SEQ ID NO: 2485055 - RNA, 19 nt, Artificial Sequence
  Description of Artificial Sequence: Synthetic oligonucleotide
uaaggcuccauuucaccca

SEQ ID NO: 2485056 - RNA, 19 nt, Artificial Sequence
  Description of Artificial Sequence: Synthetic oligonucleotide
cacacguugauaaucagaa

SEQ ID NO: 2485057 - RNA, 19 nt, Artificial Sequence
  Description of Artificial Sequence: Synthetic oligonucleotide
gccaaagguaaguuaaagg

SEQ ID NO: 2485058 - RNA, 19 nt, Artificial Sequence
  Description of Artificial Sequence: Synthetic oligonucleotide
gaaagcuccaaaagauaag

SEQ ID NO: 2485059 - RNA, 19 nt, Artificial Sequence
  Description of Artificial Sequence: Synthetic oligonucleotide
guguaugacuacuucugag

SEQ ID NO: 2485060 - RNA, 19 nt, Artificial Sequence
  Description of Artificial Sequence: Synthetic oligonucleotide
aucagcagaguguaugacu

SEQ ID NO: 2485061 - RNA, 19 nt, Artificial Sequence
  Description of Artificial Sequence: Synthetic oligonucleotide
ucugacuccacuugguuuu

SEQ ID NO: 2485062 - RNA, 19 nt, Artificial Sequence
  Description of Artificial Sequence: Synthetic oligonucleotide
cacgcuguagcccaggcug

SEQ ID NO: 2485063 - RNA, 19 nt, Artificial Sequence
  Description of Artificial Sequence: Synthetic oligonucleotide
cucaucugacuccacuugg

SEQ ID NO: 2485064 - RNA, 19 nt, Artificial Sequence
  Description of Artificial Sequence: Synthetic oligonucleotide
uacauguagcuauccagcu

SEQ ID NO: 2485065 - RNA, 19 nt, Artificial Sequence
  Description of Artificial Sequence: Synthetic oligonucleotide
augacuacuucugaggagu

SEQ ID NO: 2485066 - RNA, 19 nt, Artificial Sequence
  Description of Artificial Sequence: Synthetic oligonucleotide
ucgcuaaagcaacaaugug

SEQ ID NO: 2485067 - RNA, 19 nt, Artificial Sequence
  Description of Artificial Sequence: Synthetic oligonucleotide
aagguaaguuaaaggcugg

SEQ ID NO: 2485068 - RNA, 19 nt, Artificial Sequence
  Description of Artificial Sequence: Synthetic oligonucleotide
ucugauacauguagcuauc

SEQ ID NO: 2485069 - RNA, 19 nt, Artificial Sequence
  Description of Artificial Sequence: Synthetic oligonucleotide
gugaagguuucauacucgc

SEQ ID NO: 2485070 - RNA, 19 nt, Artificial Sequence
  Description of Artificial Sequence: Synthetic oligonucleotide
uacaggggaagagccaugg

SEQ ID NO: 2485071 - RNA, 19 nt, Artificial Sequence
  Description of Artificial Sequence: Synthetic oligonucleotide
ugauaauggcuucaauguu

SEQ ID NO: 2485072 - RNA, 19 nt, Artificial Sequence
  Description of Artificial Sequence: Synthetic oligonucleotide
guaugacuacuucugagga

SEQ ID NO: 2485073 - RNA, 19 nt, Artificial Sequence
  Description of Artificial Sequence: Synthetic oligonucleotide
uauggcaccuacugauacc

SEQ ID NO: 2485074 - RNA, 19 nt, Artificial Sequence
  Description of Artificial Sequence: Synthetic oligonucleotide
aaauagagggcaauaccaa

SEQ ID NO: 2485075 - RNA, 19 nt, Artificial Sequence
  Description of Artificial Sequence: Synthetic oligonucleotide
augcuaucaucucucggag

SEQ ID NO: 2485076 - RNA, 19 nt, Artificial Sequence
  Description of Artificial Sequence: Synthetic oligonucleotide
agguuucauacucgccacc

SEQ ID NO: 2485077 - RNA, 19 nt, Artificial Sequence
  Description of Artificial Sequence: Synthetic oligonucleotide
aguguaugacuacuucuga

SEQ ID NO: 2485078 - RNA, 19 nt, Artificial Sequence
  Description of Artificial Sequence: Synthetic oligonucleotide
aguucauagagaucuucaa

SEQ ID NO: 2485079 - RNA, 19 nt, Artificial Sequence
  Description of Artificial Sequence: Synthetic oligonucleotide
auacucgccaccuucccca

SEQ ID NO: 2485080 - RNA, 19 nt, Artificial Sequence
  Description of Artificial Sequence: Synthetic oligonucleotide
gagggcaauaccaaaguga

SEQ ID NO: 2485081 - RNA, 19 nt, Artificial Sequence
  Description of Artificial Sequence: Synthetic oligonucleotide
ucaaccucaucaccuucgc

SEQ ID NO: 2485082 - RNA, 19 nt, Artificial Sequence
  Description of Artificial Sequence: Synthetic oligonucleotide
uaucaucucucggaguaag

SEQ ID NO: 2485083 - RNA, 19 nt, Artificial Sequence
  Description of Artificial Sequence: Synthetic oligonucleotide
uguuguaacagcuguccuu

SEQ ID NO: 2485084 - RNA, 19 nt, Artificial Sequence
  Description of Artificial Sequence: Synthetic oligonucleotide
agauaaggcuccauuucac

SEQ ID NO: 2485085 - RNA, 19 nt, Artificial Sequence
  Description of Artificial Sequence: Synthetic oligonucleotide
uucuacucgcacacguuga

SEQ ID NO: 2485086 - RNA, 19 nt, Artificial Sequence
  Description of Artificial Sequence: Synthetic oligonucleotide
aguuaaaggcuggagauua

SEQ ID NO: 2485087 - RNA, 19 nt, Artificial Sequence
  Description of Artificial Sequence: Synthetic oligonucleotide
guagcuauccagcucaucu

SEQ ID NO: 2485088 - RNA, 19 nt, Artificial Sequence
  Description of Artificial Sequence: Synthetic oligonucleotide
uggaugcuaucaucucucg

SEQ ID NO: 2485089 - RNA, 19 nt, Artificial Sequence
  Description of Artificial Sequence: Synthetic oligonucleotide
auggacaccauacuucuua

SEQ ID NO: 2485090 - RNA, 19 nt, Artificial Sequence
  Description of Artificial Sequence: Synthetic oligonucleotide
auacauggacaccauacuu

SEQ ID NO: 2485091 - RNA, 19 nt, Artificial Sequence
  Description of Artificial Sequence: Synthetic oligonucleotide
ugcuuaucagggucuaaac

SEQ ID NO: 2485092 - RNA, 19 nt, Artificial Sequence
  Description of Artificial Sequence: Synthetic oligonucleotide
uuaugguucugcgguacag

SEQ ID NO: 2485093 - RNA, 19 nt, Artificial Sequence
  Description of Artificial Sequence: Synthetic oligonucleotide
ucuuaaauagagggcaaua

SEQ ID NO: 2485094 - RNA, 19 nt, Artificial Sequence
  Description of Artificial Sequence: Synthetic oligonucleotide
cucggaguaagucuuccug

SEQ ID NO: 2485095 - RNA, 19 nt, Artificial Sequence
  Description of Artificial Sequence: Synthetic oligonucleotide
cagggucuaaacccaaagc

SEQ ID NO: 2485096 - RNA, 19 nt, Artificial Sequence
  Description of Artificial Sequence: Synthetic oligonucleotide
gugcaaaugcaucagcaga

SEQ ID NO: 2485097 - RNA, 19 nt, Artificial Sequence
  Description of Artificial Sequence: Synthetic oligonucleotide
gucuuagauucgcuaaagc

SEQ ID NO: 2485098 - RNA, 19 nt, Artificial Sequence
  Description of Artificial Sequence: Synthetic oligonucleotide
ugucuguauaacagcccug

SEQ ID NO: 2485099 - RNA, 19 nt, Artificial Sequence
  Description of Artificial Sequence: Synthetic oligonucleotide
caucauguuguaacagcug

SEQ ID NO: 2485100 - RNA, 19 nt, Artificial Sequence
  Description of Artificial Sequence: Synthetic oligonucleotide
accuucgcauguguuauac

SEQ ID NO: 2485101 - RNA, 19 nt, Artificial Sequence
  Description of Artificial Sequence: Synthetic oligonucleotide
agcuauccagcucaucuga

SEQ ID NO: 2485102 - RNA, 19 nt, Artificial Sequence
  Description of Artificial Sequence: Synthetic oligonucleotide
ucuggucuuagauucgcua

SEQ ID NO: 2485103 - RNA, 19 nt, Artificial Sequence
  Description of Artificial Sequence: Synthetic oligonucleotide
uucaauguuggaugcuauc

SEQ ID NO: 2485104 - RNA, 19 nt, Artificial Sequence
  Description of Artificial Sequence: Synthetic oligonucleotide
ugagacaguguuugucugu

SEQ ID NO: 2485105 - RNA, 19 nt, Artificial Sequence
  Description of Artificial Sequence: Synthetic oligonucleotide
ucauacucgccaccuuccc

SEQ ID NO: 2485106 - RNA, 19 nt, Artificial Sequence
  Description of Artificial Sequence: Synthetic oligonucleotide
ugugaugcccugcagcauu

SEQ ID NO: 2485107 - RNA, 19 nt, Artificial Sequence
  Description of Artificial Sequence: Synthetic oligonucleotide
uagcuauccagcucaucug

SEQ ID NO: 2485108 - RNA, 19 nt, Artificial Sequence
  Description of Artificial Sequence: Synthetic oligonucleotide
gcuuaucagggucuaaacc

SEQ ID NO: 2485109 - RNA, 19 nt, Artificial Sequence
  Description of Artificial Sequence: Synthetic oligonucleotide
aagaugcuuaucagggucu

SEQ ID NO: 2485110 - RNA, 19 nt, Artificial Sequence
  Description of Artificial Sequence: Synthetic oligonucleotide
uggucuuagauucgcuaaa

SEQ ID NO: 2485111 - RNA, 19 nt, Artificial Sequence
  Description of Artificial Sequence: Synthetic oligonucleotide
ggugcaaaugcaucagcag

SEQ ID NO: 2485112 - RNA, 19 nt, Artificial Sequence
  Description of Artificial Sequence: Synthetic oligonucleotide
cauacauuuucuacucgca

SEQ ID NO: 2485113 - RNA, 19 nt, Artificial Sequence
  Description of Artificial Sequence: Synthetic oligonucleotide
uggaacgcacgcuguagcc

SEQ ID NO: 2485114 - RNA, 19 nt, Artificial Sequence
  Description of Artificial Sequence: Synthetic oligonucleotide
uccacuugguuuucaucug

SEQ ID NO: 2485115 - RNA, 19 nt, Artificial Sequence
  Description of Artificial Sequence: Synthetic oligonucleotide
uucucugccaaagguaagu

SEQ ID NO: 2485116 - RNA, 19 nt, Artificial Sequence
  Description of Artificial Sequence: Synthetic oligonucleotide
guauggcaccuacugauac

SEQ ID NO: 2485117 - RNA, 19 nt, Artificial Sequence
  Description of Artificial Sequence: Synthetic oligonucleotide
cuuuuaguucauagagauc

SEQ ID NO: 2485118 - RNA, 19 nt, Artificial Sequence
  Description of Artificial Sequence: Synthetic oligonucleotide
uaaacccaaagcugcuacu

SEQ ID NO: 2485119 - RNA, 19 nt, Artificial Sequence
  Description of Artificial Sequence: Synthetic oligonucleotide
acguugauaaucagaaagu

SEQ ID NO: 2485120 - RNA, 19 nt, Artificial Sequence
  Description of Artificial Sequence: Synthetic oligonucleotide
ucaucucucggaguaaguc

SEQ ID NO: 2485121 - RNA, 19 nt, Artificial Sequence
  Description of Artificial Sequence: Synthetic oligonucleotide
uggcuucaauguuggaugc

SEQ ID NO: 2485122 - RNA, 19 nt, Artificial Sequence
  Description of Artificial Sequence: Synthetic oligonucleotide
auaccaaagugaagguuuc

SEQ ID NO: 2485123 - RNA, 19 nt, Artificial Sequence
  Description of Artificial Sequence: Synthetic oligonucleotide
acaccauacuucuuagaaa

SEQ ID NO: 2485124 - RNA, 19 nt, Artificial Sequence
  Description of Artificial Sequence: Synthetic oligonucleotide
acaaugugaugcccugcag

SEQ ID NO: 2485125 - RNA, 19 nt, Artificial Sequence
  Description of Artificial Sequence: Synthetic oligonucleotide
aaacccaaagcugcuacuu

SEQ ID NO: 2485126 - RNA, 19 nt, Artificial Sequence
  Description of Artificial Sequence: Synthetic oligonucleotide
cuuccccacauacauggac

SEQ ID NO: 2485127 - RNA, 19 nt, Artificial Sequence
  Description of Artificial Sequence: Synthetic oligonucleotide
guaacagcuguccuuccca

SEQ ID NO: 2485128 - RNA, 19 nt, Artificial Sequence
  Description of Artificial Sequence: Synthetic oligonucleotide
uuuucuacucgcacacguu

SEQ ID NO: 2485129 - RNA, 19 nt, Artificial Sequence
  Description of Artificial Sequence: Synthetic oligonucleotide
ugcgguacaggggaagagc

SEQ ID NO: 2485130 - RNA, 19 nt, Artificial Sequence
  Description of Artificial Sequence: Synthetic oligonucleotide
uucacccaggguuuuccca

SEQ ID NO: 2485131 - RNA, 19 nt, Artificial Sequence
  Description of Artificial Sequence: Synthetic oligonucleotide
aauggcauggugacccacu

SEQ ID NO: 2485132 - RNA, 19 nt, Artificial Sequence
  Description of Artificial Sequence: Synthetic oligonucleotide
accucaucaccuucgcaug

SEQ ID NO: 2485133 - RNA, 19 nt, Artificial Sequence
  Description of Artificial Sequence: Synthetic oligonucleotide
aggcccgcgacccucaugu

SEQ ID NO: 2485134 - RNA, 19 nt, Artificial Sequence
  Description of Artificial Sequence: Synthetic oligonucleotide
gguaaguuaaaggcuggag

SEQ ID NO: 2485135 - RNA, 19 nt, Artificial Sequence
  Description of Artificial Sequence: Synthetic oligonucleotide
uugaugauaauggcuucaa

SEQ ID NO: 2485136 - RNA, 19 nt, Artificial Sequence
  Description of Artificial Sequence: Synthetic oligonucleotide
uuuaguucauagagaucuu

SEQ ID NO: 2485137 - RNA, 19 nt, Artificial Sequence
  Description of Artificial Sequence: Synthetic oligonucleotide
aucaccuucgcauguguua

SEQ ID NO: 2485138 - RNA, 19 nt, Artificial Sequence
  Description of Artificial Sequence: Synthetic oligonucleotide
gaacgcacgcuguagccca

SEQ ID NO: 2485139 - RNA, 19 nt, Artificial Sequence
  Description of Artificial Sequence: Synthetic oligonucleotide
cauacucgccaccuucccc

SEQ ID NO: 2485140 - RNA, 19 nt, Artificial Sequence
  Description of Artificial Sequence: Synthetic oligonucleotide
cagaguguaugacuacuuc

SEQ ID NO: 2485141 - RNA, 19 nt, Artificial Sequence
  Description of Artificial Sequence: Synthetic oligonucleotide
uucgcauguguuauacauu

SEQ ID NO: 2485142 - RNA, 19 nt, Artificial Sequence
  Description of Artificial Sequence: Synthetic oligonucleotide
agggcaauaccaaagugaa

SEQ ID NO: 2485143 - RNA, 19 nt, Artificial Sequence
  Description of Artificial Sequence: Synthetic oligonucleotide
ucuacucgcacacguugau

SEQ ID NO: 2485144 - RNA, 19 nt, Artificial Sequence
  Description of Artificial Sequence: Synthetic oligonucleotide
auguuguaacagcuguccu

SEQ ID NO: 2485145 - RNA, 19 nt, Artificial Sequence
  Description of Artificial Sequence: Synthetic oligonucleotide
gccguuuacauacauuuuc

SEQ ID NO: 2485146 - RNA, 19 nt, Artificial Sequence
  Description of Artificial Sequence: Synthetic oligonucleotide
cauacaggucaauggcaug

SEQ ID NO: 2485147 - RNA, 19 nt, Artificial Sequence
  Description of Artificial Sequence: Synthetic oligonucleotide
uuccugguuucucugccaa

SEQ ID NO: 2485148 - RNA, 19 nt, Artificial Sequence
  Description of Artificial Sequence: Synthetic oligonucleotide
gcgacccucauguugggcg

SEQ ID NO: 2485149 - RNA, 19 nt, Artificial Sequence
  Description of Artificial Sequence: Synthetic oligonucleotide
uccccacauacauggacac

SEQ ID NO: 2485150 - RNA, 19 nt, Artificial Sequence
  Description of Artificial Sequence: Synthetic oligonucleotide
gucugauacauguagcuau

SEQ ID NO: 2485151 - RNA, 19 nt, Artificial Sequence
  Description of Artificial Sequence: Synthetic oligonucleotide
cugaucaggcccgcgaccc

SEQ ID NO: 2485152 - RNA, 19 nt, Artificial Sequence
  Description of Artificial Sequence: Synthetic oligonucleotide
cuucuuagaaagcuccaaa

SEQ ID NO: 2485153 - RNA, 19 nt, Artificial Sequence
  Description of Artificial Sequence: Synthetic oligonucleotide
cugauacauguagcuaucc

SEQ ID NO: 2485154 - RNA, 19 nt, Artificial Sequence
  Description of Artificial Sequence: Synthetic oligonucleotide
agcaacaaugugaugcccu

SEQ ID NO: 2485155 - RNA, 19 nt, Artificial Sequence
  Description of Artificial Sequence: Synthetic oligonucleotide
aaguuaaaggcuggagauu

SEQ ID NO: 2485156 - RNA, 19 nt, Artificial Sequence
  Description of Artificial Sequence: Synthetic oligonucleotide
ugacccacugucugauaca

SEQ ID NO: 2485157 - RNA, 19 nt, Artificial Sequence
  Description of Artificial Sequence: Synthetic oligonucleotide
agcagaguguaugacuacu

SEQ ID NO: 2485158 - RNA, 19 nt, Artificial Sequence
  Description of Artificial Sequence: Synthetic oligonucleotide
guuuucaucuggucuuaga

SEQ ID NO: 2485159 - RNA, 19 nt, Artificial Sequence
  Description of Artificial Sequence: Synthetic oligonucleotide
guggaacgcacgcuguagc

SEQ ID NO: 2485160 - RNA, 19 nt, Artificial Sequence
  Description of Artificial Sequence: Synthetic oligonucleotide
uaucagggucuaaacccaa

SEQ ID NO: 2485161 - RNA, 19 nt, Artificial Sequence
  Description of Artificial Sequence: Synthetic oligonucleotide
ucaccuucgcauguguuau

SEQ ID NO: 2485162 - RNA, 19 nt, Artificial Sequence
  Description of Artificial Sequence: Synthetic oligonucleotide
caucuggucuuagauucgc

SEQ ID NO: 2485163 - RNA, 19 nt, Artificial Sequence
  Description of Artificial Sequence: Synthetic oligonucleotide
gcuccaaaagauaaggcuc

SEQ ID NO: 2485164 - RNA, 19 nt, Artificial Sequence
  Description of Artificial Sequence: Synthetic oligonucleotide
auggcauggugacccacug

SEQ ID NO: 2485165 - RNA, 19 nt, Artificial Sequence
  Description of Artificial Sequence: Synthetic oligonucleotide
ggaugcuaucaucucucgg

SEQ ID NO: 2485166 - RNA, 19 nt, Artificial Sequence
  Description of Artificial Sequence: Synthetic oligonucleotide
aggugcaaaugcaucagca

SEQ ID NO: 2485167 - RNA, 19 nt, Artificial Sequence
  Description of Artificial Sequence: Synthetic oligonucleotide
gacuacuucugaggagucc

SEQ ID NO: 2485168 - RNA, 19 nt, Artificial Sequence
  Description of Artificial Sequence: Synthetic oligonucleotide
caguguuugucuguauaac

SEQ ID NO: 2485169 - RNA, 19 nt, Artificial Sequence
  Description of Artificial Sequence: Synthetic oligonucleotide
cuucgcauguguuauacau

SEQ ID NO: 2485170 - RNA, 19 nt, Artificial Sequence
  Description of Artificial Sequence: Synthetic oligonucleotide
gaguaagucuuccugguuu

SEQ ID NO: 2485171 - RNA, 19 nt, Artificial Sequence
  Description of Artificial Sequence: Synthetic oligonucleotide
accaaagugaagguuucau

SEQ ID NO: 2485172 - RNA, 19 nt, Artificial Sequence
  Description of Artificial Sequence: Synthetic oligonucleotide
guuggaugcuaucaucucu

SEQ ID NO: 2485173 - RNA, 19 nt, Artificial Sequence
  Description of Artificial Sequence: Synthetic oligonucleotide
cauuuucuacucgcacacg

SEQ ID NO: 2485174 - RNA, 19 nt, Artificial Sequence
  Description of Artificial Sequence: Synthetic oligonucleotide
gggucuaaacccaaagcug

SEQ ID NO: 2485175 - RNA, 19 nt, Artificial Sequence
  Description of Artificial Sequence: Synthetic oligonucleotide
ccgaacucaccacaggugc

SEQ ID NO: 2485176 - RNA, 19 nt, Artificial Sequence
  Description of Artificial Sequence: Synthetic oligonucleotide
ucucggaguaagucuuccu

SEQ ID NO: 2485177 - RNA, 19 nt, Artificial Sequence
  Description of Artificial Sequence: Synthetic oligonucleotide
cuggucuuagauucgcuaa

SEQ ID NO: 2485178 - RNA, 19 nt, Artificial Sequence
  Description of Artificial Sequence: Synthetic oligonucleotide
acuucuuagaaagcuccaa

SEQ ID NO: 2485179 - RNA, 19 nt, Artificial Sequence
  Description of Artificial Sequence: Synthetic oligonucleotide
ucuaaacccaaagcugcua

SEQ ID NO: 2485180 - RNA, 19 nt, Artificial Sequence
  Description of Artificial Sequence: Synthetic oligonucleotide
ugcuaucaucucucggagu

SEQ ID NO: 2485181 - RNA, 19 nt, Artificial Sequence
  Description of Artificial Sequence: Synthetic oligonucleotide
cucgcacacguugauaauc

SEQ ID NO: 2485182 - RNA, 19 nt, Artificial Sequence
  Description of Artificial Sequence: Synthetic oligonucleotide
gcuaucaucucucggagua

SEQ ID NO: 2485183 - RNA, 19 nt, Artificial Sequence
  Description of Artificial Sequence: Synthetic oligonucleotide
ucugcgguacaggggaaga

SEQ ID NO: 2485184 - RNA, 19 nt, Artificial Sequence
  Description of Artificial Sequence: Synthetic oligonucleotide
uccaaaagauaaggcucca

SEQ ID NO: 2485185 - RNA, 19 nt, Artificial Sequence
  Description of Artificial Sequence: Synthetic oligonucleotide
ugacuacuucugaggaguc

SEQ ID NO: 2485186 - RNA, 19 nt, Artificial Sequence
  Description of Artificial Sequence: Synthetic oligonucleotide
auggugacccacugucuga

SEQ ID NO: 2485187 - RNA, 19 nt, Artificial Sequence
  Description of Artificial Sequence: Synthetic oligonucleotide
cuucuuaaauagagggcaa

SEQ ID NO: 2485188 - RNA, 19 nt, Artificial Sequence
  Description of Artificial Sequence: Synthetic oligonucleotide
gcaacaaugugaugcccug

SEQ ID NO: 2485189 - RNA, 19 nt, Artificial Sequence
  Description of Artificial Sequence: Synthetic oligonucleotide
uucugcgguacaggggaag

SEQ ID NO: 2485190 - RNA, 19 nt, Artificial Sequence
  Description of Artificial Sequence: Synthetic oligonucleotide
ggucuuagauucgcuaaag

SEQ ID NO: 2485191 - RNA, 19 nt, Artificial Sequence
  Description of Artificial Sequence: Synthetic oligonucleotide
agaaaguauggcaccuacu

SEQ ID NO: 2485192 - RNA, 19 nt, Artificial Sequence
  Description of Artificial Sequence: Synthetic oligonucleotide
ggagauuaagccguuuaca

SEQ ID NO: 2485193 - RNA, 19 nt, Artificial Sequence
  Description of Artificial Sequence: Synthetic oligonucleotide
gaugcccugcagcauugca

SEQ ID NO: 2485194 - RNA, 19 nt, Artificial Sequence
  Description of Artificial Sequence: Synthetic oligonucleotide
agauucgcuaaagcaacaa

SEQ ID NO: 2485195 - RNA, 19 nt, Artificial Sequence
  Description of Artificial Sequence: Synthetic oligonucleotide
gauucgcuaaagcaacaau

SEQ ID NO: 2485196 - RNA, 19 nt, Artificial Sequence
  Description of Artificial Sequence: Synthetic oligonucleotide
uacuucugaggaguccaga

SEQ ID NO: 2485197 - RNA, 19 nt, Artificial Sequence
  Description of Artificial Sequence: Synthetic oligonucleotide
ugcacugcaucauguugua

SEQ ID NO: 2485198 - RNA, 19 nt, Artificial Sequence
  Description of Artificial Sequence: Synthetic oligonucleotide
caacaaugugaugcccugc

SEQ ID NO: 2485199 - RNA, 19 nt, Artificial Sequence
  Description of Artificial Sequence: Synthetic oligonucleotide
cauacauggacaccauacu

SEQ ID NO: 2485200 - RNA, 19 nt, Artificial Sequence
  Description of Artificial Sequence: Synthetic oligonucleotide
ugucuccaagcuccuuccu

SEQ ID NO: 2485201 - RNA, 19 nt, Artificial Sequence
  Description of Artificial Sequence: Synthetic oligonucleotide
cccgcgacccucauguugg

SEQ ID NO: 2485202 - RNA, 19 nt, Artificial Sequence
  Description of Artificial Sequence: Synthetic oligonucleotide
acacguugauaaucagaaa

SEQ ID NO: 2485203 - RNA, 19 nt, Artificial Sequence
  Description of Artificial Sequence: Synthetic oligonucleotide
uaccaaagugaagguuuca

SEQ ID NO: 2485204 - RNA, 19 nt, Artificial Sequence
  Description of Artificial Sequence: Synthetic oligonucleotide
gcugcuacuuugaugauaa

SEQ ID NO: 2485205 - RNA, 19 nt, Artificial Sequence
  Description of Artificial Sequence: Synthetic oligonucleotide
uggcugucguggaacgcac

SEQ ID NO: 2485206 - RNA, 19 nt, Artificial Sequence
  Description of Artificial Sequence: Synthetic oligonucleotide
caucagcagaguguaugac

SEQ ID NO: 2485207 - RNA, 19 nt, Artificial Sequence
  Description of Artificial Sequence: Synthetic oligonucleotide
auguugggcgcagcgcgcg

SEQ ID NO: 2485208 - RNA, 19 nt, Artificial Sequence
  Description of Artificial Sequence: Synthetic oligonucleotide
uggcauggugacccacugu

SEQ ID NO: 2485209 - RNA, 19 nt, Artificial Sequence
  Description of Artificial Sequence: Synthetic oligonucleotide
caucucucggaguaagucu

SEQ ID NO: 2485210 - RNA, 19 nt, Artificial Sequence
  Description of Artificial Sequence: Synthetic oligonucleotide
cuggagauuaagccguuua

SEQ ID NO: 2485211 - RNA, 19 nt, Artificial Sequence
  Description of Artificial Sequence: Synthetic oligonucleotide
uugggcgcagcgcgcgugc

SEQ ID NO: 2485212 - RNA, 19 nt, Artificial Sequence
  Description of Artificial Sequence: Synthetic oligonucleotide
uggcaccuacugauacccc

SEQ ID NO: 2485213 - RNA, 19 nt, Artificial Sequence
  Description of Artificial Sequence: Synthetic oligonucleotide
aucucucggaguaagucuu

SEQ ID NO: 2485214 - RNA, 19 nt, Artificial Sequence
  Description of Artificial Sequence: Synthetic oligonucleotide
gcuaaagcaacaaugugau

SEQ ID NO: 2485215 - RNA, 19 nt, Artificial Sequence
  Description of Artificial Sequence: Synthetic oligonucleotide
cagcagaguguaugacuac

SEQ ID NO: 2485216 - RNA, 19 nt, Artificial Sequence
  Description of Artificial Sequence: Synthetic oligonucleotide
cuuaugguucugcgguaca

SEQ ID NO: 2485217 - RNA, 19 nt, Artificial Sequence
  Description of Artificial Sequence: Synthetic oligonucleotide
ucucugccaaagguaaguu

SEQ ID NO: 2485218 - RNA, 19 nt, Artificial Sequence
  Description of Artificial Sequence: Synthetic oligonucleotide
ugaucaggcccgcgacccu

SEQ ID NO: 2485219 - RNA, 19 nt, Artificial Sequence
  Description of Artificial Sequence: Synthetic oligonucleotide
ccucauguugggcgcagcg

SEQ ID NO: 2485220 - RNA, 19 nt, Artificial Sequence
  Description of Artificial Sequence: Synthetic oligonucleotide
uguagcuauccagcucauc

SEQ ID NO: 2485221 - RNA, 19 nt, Artificial Sequence
  Description of Artificial Sequence: Synthetic oligonucleotide
ccaccacugaucaggcccg

SEQ ID NO: 2485222 - RNA, 19 nt, Artificial Sequence
  Description of Artificial Sequence: Synthetic oligonucleotide
uggugacccacugucugau

SEQ ID NO: 2485223 - RNA, 19 nt, Artificial Sequence
  Description of Artificial Sequence: Synthetic oligonucleotide
ggaacgcacgcuguagccc

SEQ ID NO: 2485224 - RNA, 19 nt, Artificial Sequence
  Description of Artificial Sequence: Synthetic oligonucleotide
acucgcacacguugauaau

SEQ ID NO: 2485225 - RNA, 19 nt, Artificial Sequence
  Description of Artificial Sequence: Synthetic oligonucleotide
cuauccagcucaucugacu

SEQ ID NO: 2485226 - RNA, 19 nt, Artificial Sequence
  Description of Artificial Sequence: Synthetic oligonucleotide
aacucaccacaggugcaaa

SEQ ID NO: 2485227 - RNA, 19 nt, Artificial Sequence
  Description of Artificial Sequence: Synthetic oligonucleotide
cccacugucugauacaugu

SEQ ID NO: 2485228 - RNA, 19 nt, Artificial Sequence
  Description of Artificial Sequence: Synthetic oligonucleotide
aggaguccagaaugauuuu

SEQ ID NO: 2485229 - RNA, 19 nt, Artificial Sequence
  Description of Artificial Sequence: Synthetic oligonucleotide
cucugccaaagguaaguua

SEQ ID NO: 2485230 - RNA, 19 nt, Artificial Sequence
  Description of Artificial Sequence: Synthetic oligonucleotide
agcugcuacuuugaugaua

SEQ ID NO: 2485231 - RNA, 19 nt, Artificial Sequence
  Description of Artificial Sequence: Synthetic oligonucleotide
accacugaucaggcccgcg

SEQ ID NO: 2485232 - RNA, 19 nt, Artificial Sequence
  Description of Artificial Sequence: Synthetic oligonucleotide
cugcgguacaggggaagag

SEQ ID NO: 2485233 - RNA, 19 nt, Artificial Sequence
  Description of Artificial Sequence: Synthetic oligonucleotide
gguuucucugccaaaggua

SEQ ID NO: 2485234 - RNA, 19 nt, Artificial Sequence
  Description of Artificial Sequence: Synthetic oligonucleotide
uguugggcgcagcgcgcgu

SEQ ID NO: 2485235 - RNA, 19 nt, Artificial Sequence
  Description of Artificial Sequence: Synthetic oligonucleotide
cauuucacccaggguuuuc

SEQ ID NO: 2485236 - RNA, 19 nt, Artificial Sequence
  Description of Artificial Sequence: Synthetic oligonucleotide
cccgaacucaccacaggug

SEQ ID NO: 2485237 - RNA, 19 nt, Artificial Sequence
  Description of Artificial Sequence: Synthetic oligonucleotide
gugaugcccugcagcauug

SEQ ID NO: 2485238 - RNA, 19 nt, Artificial Sequence
  Description of Artificial Sequence: Synthetic oligonucleotide
ggaagagccauggcuucug

SEQ ID NO: 2485239 - RNA, 19 nt, Artificial Sequence
  Description of Artificial Sequence: Synthetic oligonucleotide
caauggcauggugacccac

SEQ ID NO: 2485240 - RNA, 19 nt, Artificial Sequence
  Description of Artificial Sequence: Synthetic oligonucleotide
uacucgccaccuuccccac

SEQ ID NO: 2485241 - RNA, 19 nt, Artificial Sequence
  Description of Artificial Sequence: Synthetic oligonucleotide
ccucuuaugguucugcggu

SEQ ID NO: 2485242 - RNA, 19 nt, Artificial Sequence
  Description of Artificial Sequence: Synthetic oligonucleotide
agaugcuuaucagggucua

SEQ ID NO: 2485243 - RNA, 19 nt, Artificial Sequence
  Description of Artificial Sequence: Synthetic oligonucleotide
gaugcuuaucagggucuaa

SEQ ID NO: 2485244 - RNA, 19 nt, Artificial Sequence
  Description of Artificial Sequence: Synthetic oligonucleotide
aacgcacgcuguagcccag

SEQ ID NO: 2485245 - RNA, 19 nt, Artificial Sequence
  Description of Artificial Sequence: Synthetic oligonucleotide
guuaaaggcuggagauuaa

SEQ ID NO: 2485246 - RNA, 19 nt, Artificial Sequence
  Description of Artificial Sequence: Synthetic oligonucleotide
gguuuucaucuggucuuag

SEQ ID NO: 2485247 - RNA, 19 nt, Artificial Sequence
  Description of Artificial Sequence: Synthetic oligonucleotide
gcaauaccaaagugaaggu

SEQ ID NO: 2485248 - RNA, 19 nt, Artificial Sequence
  Description of Artificial Sequence: Synthetic oligonucleotide
cuucaauguuggaugcuau

SEQ ID NO: 2485249 - RNA, 19 nt, Artificial Sequence
  Description of Artificial Sequence: Synthetic oligonucleotide
gcacacguugauaaucaga

SEQ ID NO: 2485250 - RNA, 19 nt, Artificial Sequence
  Description of Artificial Sequence: Synthetic oligonucleotide
aucuggucuuagauucgcu

SEQ ID NO: 2485251 - RNA, 19 nt, Artificial Sequence
  Description of Artificial Sequence: Synthetic oligonucleotide
ggacaccauacuucuuaga

SEQ ID NO: 2485252 - RNA, 19 nt, Artificial Sequence
  Description of Artificial Sequence: Synthetic oligonucleotide
guccuucccaccacugauc

SEQ ID NO: 2485253 - RNA, 19 nt, Artificial Sequence
  Description of Artificial Sequence: Synthetic oligonucleotide
gguuucauacucgccaccu

SEQ ID NO: 2485254 - RNA, 19 nt, Artificial Sequence
  Description of Artificial Sequence: Synthetic oligonucleotide
cacuugguuuucaucuggu

SEQ ID NO: 2485255 - RNA, 19 nt, Artificial Sequence
  Description of Artificial Sequence: Synthetic oligonucleotide
cucuuaugguucugcggua

SEQ ID NO: 2485256 - RNA, 19 nt, Artificial Sequence
  Description of Artificial Sequence: Synthetic oligonucleotide
ggucaauggcauggugacc

SEQ ID NO: 2485257 - RNA, 19 nt, Artificial Sequence
  Description of Artificial Sequence: Synthetic oligonucleotide
gggcaauaccaaagugaag

SEQ ID NO: 2485258 - RNA, 19 nt, Artificial Sequence
  Description of Artificial Sequence: Synthetic oligonucleotide
agccguuuacauacauuuu

SEQ ID NO: 2485259 - RNA, 19 nt, Artificial Sequence
  Description of Artificial Sequence: Synthetic oligonucleotide
guugggcgcagcgcgcgug

SEQ ID NO: 2485260 - RNA, 19 nt, Artificial Sequence
  Description of Artificial Sequence: Synthetic oligonucleotide
cuaucaucucucggaguaa

SEQ ID NO: 2485261 - RNA, 19 nt, Artificial Sequence
  Description of Artificial Sequence: Synthetic oligonucleotide
gcccgcgacccucauguug

SEQ ID NO: 2485262 - RNA, 19 nt, Artificial Sequence
  Description of Artificial Sequence: Synthetic oligonucleotide
gucuaaacccaaagcugcu

SEQ ID NO: 2485263 - RNA, 19 nt, Artificial Sequence
  Description of Artificial Sequence: Synthetic oligonucleotide
ugggcgcagcgcgcgugcg

SEQ ID NO: 2485264 - RNA, 19 nt, Artificial Sequence
  Description of Artificial Sequence: Synthetic oligonucleotide
cugacuccacuugguuuuc

SEQ ID NO: 2485265 - RNA, 19 nt, Artificial Sequence
  Description of Artificial Sequence: Synthetic oligonucleotide
caauaccaaagugaagguu

SEQ ID NO: 2485266 - RNA, 19 nt, Artificial Sequence
  Description of Artificial Sequence: Synthetic oligonucleotide
gcuauccagcucaucugac

SEQ ID NO: 2485267 - RNA, 19 nt, Artificial Sequence
  Description of Artificial Sequence: Synthetic oligonucleotide
acgcacgcuguagcccagg

SEQ ID NO: 2485268 - RNA, 19 nt, Artificial Sequence
  Description of Artificial Sequence: Synthetic oligonucleotide
gguacaggggaagagccau

SEQ ID NO: 2485269 - RNA, 19 nt, Artificial Sequence
  Description of Artificial Sequence: Synthetic oligonucleotide
cagcucaucugacuccacu

SEQ ID NO: 2485270 - RNA, 19 nt, Artificial Sequence
  Description of Artificial Sequence: Synthetic oligonucleotide
guuucauacucgccaccuu

SEQ ID NO: 2485271 - RNA, 19 nt, Artificial Sequence
  Description of Artificial Sequence: Synthetic oligonucleotide
gacccucauguugggcgca

SEQ ID NO: 2485272 - RNA, 19 nt, Artificial Sequence
  Description of Artificial Sequence: Synthetic oligonucleotide
ggccccgaacucaccacag

SEQ ID NO: 2485273 - RNA, 19 nt, Artificial Sequence
  Description of Artificial Sequence: Synthetic oligonucleotide
cguugauaaucagaaagua

SEQ ID NO: 2485274 - RNA, 19 nt, Artificial Sequence
  Description of Artificial Sequence: Synthetic oligonucleotide
cuacucgcacacguugaua

SEQ ID NO: 2485275 - RNA, 19 nt, Artificial Sequence
  Description of Artificial Sequence: Synthetic oligonucleotide
cguggaacgcacgcuguag

SEQ ID NO: 2485276 - RNA, 19 nt, Artificial Sequence
  Description of Artificial Sequence: Synthetic oligonucleotide
caccacugaucaggcccgc

SEQ ID NO: 2485277 - RNA, 19 nt, Artificial Sequence
  Description of Artificial Sequence: Synthetic oligonucleotide
auguagcuauccagcucau

SEQ ID NO: 2485278 - RNA, 19 nt, Artificial Sequence
  Description of Artificial Sequence: Synthetic oligonucleotide
aucaggcccgcgacccuca

SEQ ID NO: 2485279 - RNA, 19 nt, Artificial Sequence
  Description of Artificial Sequence: Synthetic oligonucleotide
ccacugaucaggcccgcga

SEQ ID NO: 2485280 - RNA, 19 nt, Artificial Sequence
  Description of Artificial Sequence: Synthetic oligonucleotide
caggcccgcgacccucaug

SEQ ID NO: 2485281 - RNA, 19 nt, Artificial Sequence
  Description of Artificial Sequence: Synthetic oligonucleotide
ccaccuuccccacauacau

SEQ ID NO: 2485282 - RNA, 19 nt, Artificial Sequence
  Description of Artificial Sequence: Synthetic oligonucleotide
gcauugcacugcaucaugu

SEQ ID NO: 2485283 - RNA, 19 nt, Artificial Sequence
  Description of Artificial Sequence: Synthetic oligonucleotide
caucaccuucgcauguguu

SEQ ID NO: 2485284 - RNA, 19 nt, Artificial Sequence
  Description of Artificial Sequence: Synthetic oligonucleotide
ccuucgcauguguuauaca

SEQ ID NO: 2485285 - RNA, 19 nt, Artificial Sequence
  Description of Artificial Sequence: Synthetic oligonucleotide
gcuccauuucacccagggu

SEQ ID NO: 2485286 - RNA, 19 nt, Artificial Sequence
  Description of Artificial Sequence: Synthetic oligonucleotide
cugaggaguccagaaugau

SEQ ID NO: 2485287 - RNA, 19 nt, Artificial Sequence
  Description of Artificial Sequence: Synthetic oligonucleotide
caccuucgcauguguuaua

SEQ ID NO: 2485288 - RNA, 19 nt, Artificial Sequence
  Description of Artificial Sequence: Synthetic oligonucleotide
guucugcgguacaggggaa

SEQ ID NO: 2485289 - RNA, 19 nt, Artificial Sequence
  Description of Artificial Sequence: Synthetic oligonucleotide
cagcauugcacugcaucau

SEQ ID NO: 2485290 - RNA, 19 nt, Artificial Sequence
  Description of Artificial Sequence: Synthetic oligonucleotide
cugucguggaacgcacgcu

SEQ ID NO: 2485291 - RNA, 19 nt, Artificial Sequence
  Description of Artificial Sequence: Synthetic oligonucleotide
ccccgaacucaccacaggu

SEQ ID NO: 2485292 - RNA, 19 nt, Artificial Sequence
  Description of Artificial Sequence: Synthetic oligonucleotide
cgcacgcuguagcccaggc

SEQ ID NO: 2485293 - RNA, 19 nt, Artificial Sequence
  Description of Artificial Sequence: Synthetic oligonucleotide
ccuuccccacauacaugga

SEQ ID NO: 2485294 - RNA, 19 nt, Artificial Sequence
  Description of Artificial Sequence: Synthetic oligonucleotide
ccgcgacccucauguuggg

SEQ ID NO: 2485295 - RNA, 19 nt, Artificial Sequence
  Description of Artificial Sequence: Synthetic oligonucleotide
cggaguaagucuuccuggu

SEQ ID NO: 2485296 - RNA, 19 nt, Artificial Sequence
  Description of Artificial Sequence: Synthetic oligonucleotide
gcacgcuguagcccaggcu

SEQ ID NO: 2485297 - RNA, 19 nt, Artificial Sequence
  Description of Artificial Sequence: Synthetic oligonucleotide
ccucaucaccuucgcaugu

SEQ ID NO: 2485298 - RNA, 19 nt, Artificial Sequence
  Description of Artificial Sequence: Synthetic oligonucleotide
gcacugcaucauguuguaa

SEQ ID NO: 2485299 - RNA, 19 nt, Artificial Sequence
  Description of Artificial Sequence: Synthetic oligonucleotide
cugcuacuuugaugauaau

SEQ ID NO: 2485300 - RNA, 19 nt, Artificial Sequence
  Description of Artificial Sequence: Synthetic oligonucleotide
cgcgacccucauguugggc

SEQ ID NO: 2485301 - RNA, 19 nt, Artificial Sequence
  Description of Artificial Sequence: Synthetic oligonucleotide
cgcauguguuauacauucu

SEQ ID NO: 2485302 - RNA, 19 nt, Artificial Sequence
  Description of Artificial Sequence: Synthetic oligonucleotide
gcuggagauuaagccguuu

SEQ ID NO: 2485303 - RNA, 19 nt, Artificial Sequence
  Description of Artificial Sequence: Synthetic oligonucleotide
gggcgcagcgcgcgugcgu

SEQ ID NO: 2485304 - RNA, 19 nt, Artificial Sequence
  Description of Artificial Sequence: Synthetic oligonucleotide
ggcuggagauuaagccguu

SEQ ID NO: 2485305 - RNA, 19 nt, Artificial Sequence
  Description of Artificial Sequence: Synthetic oligonucleotide
ggcccgcgacccucauguu

SEQ ID NO: 2485306 - RNA, 19 nt, Artificial Sequence
  Description of Artificial Sequence: Synthetic oligonucleotide
aaugugugaaaccacagcc

SEQ ID NO: 2485307 - RNA, 19 nt, Artificial Sequence
  Description of Artificial Sequence: Synthetic oligonucleotide
uaaaguuucauaauuaggu

SEQ ID NO: 2485308 - RNA, 19 nt, Artificial Sequence
  Description of Artificial Sequence: Synthetic oligonucleotide
aauauucgcagcuaauauc

SEQ ID NO: 2485309 - RNA, 19 nt, Artificial Sequence
  Description of Artificial Sequence: Synthetic oligonucleotide
acagguuaaaauuucuggc

SEQ ID NO: 2485310 - RNA, 19 nt, Artificial Sequence
  Description of Artificial Sequence: Synthetic oligonucleotide
aaugcuuaagugcauuuuc

SEQ ID NO: 2485311 - RNA, 19 nt, Artificial Sequence
  Description of Artificial Sequence: Synthetic oligonucleotide
uguccuuucaaacuagagg

SEQ ID NO: 2485312 - RNA, 19 nt, Artificial Sequence
  Description of Artificial Sequence: Synthetic oligonucleotide
aaaacgggcgcccacuugc

SEQ ID NO: 2485313 - RNA, 19 nt, Artificial Sequence
  Description of Artificial Sequence: Synthetic oligonucleotide
guccuuucaaacuagaggg

SEQ ID NO: 2485314 - RNA, 19 nt, Artificial Sequence
  Description of Artificial Sequence: Synthetic oligonucleotide
uucaagauuucauacagug

SEQ ID NO: 2485315 - RNA, 19 nt, Artificial Sequence
  Description of Artificial Sequence: Synthetic oligonucleotide
ucuaaaguuucauaauuag

SEQ ID NO: 2485316 - RNA, 19 nt, Artificial Sequence
  Description of Artificial Sequence: Synthetic oligonucleotide
auauucgcagcuaauaucc

SEQ ID NO: 2485317 - RNA, 19 nt, Artificial Sequence
  Description of Artificial Sequence: Synthetic oligonucleotide
cuaauauccucaaaagucc

SEQ ID NO: 2485318 - RNA, 19 nt, Artificial Sequence
  Description of Artificial Sequence: Synthetic oligonucleotide
uaacccaccacaaugacga

SEQ ID NO: 2485319 - RNA, 19 nt, Artificial Sequence
  Description of Artificial Sequence: Synthetic oligonucleotide
aacuagagggaacagagga

SEQ ID NO: 2485320 - RNA, 19 nt, Artificial Sequence
  Description of Artificial Sequence: Synthetic oligonucleotide
uuuccuaucuuuucuaaag

SEQ ID NO: 2485321 - RNA, 19 nt, Artificial Sequence
  Description of Artificial Sequence: Synthetic oligonucleotide
uuaccaaaugcuuaagugc

SEQ ID NO: 2485322 - RNA, 19 nt, Artificial Sequence
  Description of Artificial Sequence: Synthetic oligonucleotide
uuaacaccguacaagaaug

SEQ ID NO: 2485323 - RNA, 19 nt, Artificial Sequence
  Description of Artificial Sequence: Synthetic oligonucleotide
cauaauuagguuacggacc

SEQ ID NO: 2485324 - RNA, 19 nt, Artificial Sequence
  Description of Artificial Sequence: Synthetic oligonucleotide
ucauaauuagguuacggac

SEQ ID NO: 2485325 - RNA, 19 nt, Artificial Sequence
  Description of Artificial Sequence: Synthetic oligonucleotide
aaauuucuggcugucuugc

SEQ ID NO: 2485326 - RNA, 19 nt, Artificial Sequence
  Description of Artificial Sequence: Synthetic oligonucleotide
uuuaccuuuacgagcauug

SEQ ID NO: 2485327 - RNA, 19 nt, Artificial Sequence
  Description of Artificial Sequence: Synthetic oligonucleotide
caaacuagagggaacagag

SEQ ID NO: 2485328 - RNA, 19 nt, Artificial Sequence
  Description of Artificial Sequence: Synthetic oligonucleotide
uagguuacggaccaacagg

SEQ ID NO: 2485329 - RNA, 19 nt, Artificial Sequence
  Description of Artificial Sequence: Synthetic oligonucleotide
aauaaaacuuuuaauuaca

SEQ ID NO: 2485330 - RNA, 19 nt, Artificial Sequence
  Description of Artificial Sequence: Synthetic oligonucleotide
uuuaacaccguacaagaau

SEQ ID NO: 2485331 - RNA, 19 nt, Artificial Sequence
  Description of Artificial Sequence: Synthetic oligonucleotide
aauuagguuacggaccaac

SEQ ID NO: 2485332 - RNA, 19 nt, Artificial Sequence
  Description of Artificial Sequence: Synthetic oligonucleotide
cuuaccaaaugcuuaagug

SEQ ID NO: 2485333 - RNA, 19 nt, Artificial Sequence
  Description of Artificial Sequence: Synthetic oligonucleotide
aguuucauaauuagguuac

SEQ ID NO: 2485334 - RNA, 19 nt, Artificial Sequence
  Description of Artificial Sequence: Synthetic oligonucleotide
aaaauuucuggcugucuug

SEQ ID NO: 2485335 - RNA, 19 nt, Artificial Sequence
  Description of Artificial Sequence: Synthetic oligonucleotide
uucacaaggguacuaaccu

SEQ ID NO: 2485336 - RNA, 19 nt, Artificial Sequence
  Description of Artificial Sequence: Synthetic oligonucleotide
ucuugaggcucucauaacc

SEQ ID NO: 2485337 - RNA, 19 nt, Artificial Sequence
  Description of Artificial Sequence: Synthetic oligonucleotide
accuuuacgagcauugucc

SEQ ID NO: 2485338 - RNA, 19 nt, Artificial Sequence
  Description of Artificial Sequence: Synthetic oligonucleotide
uaccaaaugcuuaagugca

SEQ ID NO: 2485339 - RNA, 19 nt, Artificial Sequence
  Description of Artificial Sequence: Synthetic oligonucleotide
uuagguuacggaccaacag

SEQ ID NO: 2485340 - RNA, 19 nt, Artificial Sequence
  Description of Artificial Sequence: Synthetic oligonucleotide
agugcaacagugaauauuc

SEQ ID NO: 2485341 - RNA, 19 nt, Artificial Sequence
  Description of Artificial Sequence: Synthetic oligonucleotide
caccguacaagaauggugg

SEQ ID NO: 2485342 - RNA, 19 nt, Artificial Sequence
  Description of Artificial Sequence: Synthetic oligonucleotide
aauaaugugugaaaccaca

SEQ ID NO: 2485343 - RNA, 19 nt, Artificial Sequence
  Description of Artificial Sequence: Synthetic oligonucleotide
aaguuucauaauuagguua

SEQ ID NO: 2485344 - RNA, 19 nt, Artificial Sequence
  Description of Artificial Sequence: Synthetic oligonucleotide
uuggaagacaaugugagga

SEQ ID NO: 2485345 - RNA, 19 nt, Artificial Sequence
  Description of Artificial Sequence: Synthetic oligonucleotide
acuuuaacaccguacaaga

SEQ ID NO: 2485346 - RNA, 19 nt, Artificial Sequence
  Description of Artificial Sequence: Synthetic oligonucleotide
aaggguacuaaccucccug

SEQ ID NO: 2485347 - RNA, 19 nt, Artificial Sequence
  Description of Artificial Sequence: Synthetic oligonucleotide
auaauuagguuacggacca

SEQ ID NO: 2485348 - RNA, 19 nt, Artificial Sequence
  Description of Artificial Sequence: Synthetic oligonucleotide
accacugucuaccaguguc

SEQ ID NO: 2485349 - RNA, 19 nt, Artificial Sequence
  Description of Artificial Sequence: Synthetic oligonucleotide
ucauaacccaccacaauga

SEQ ID NO: 2485350 - RNA, 19 nt, Artificial Sequence
  Description of Artificial Sequence: Synthetic oligonucleotide
auucacaaggguacuaacc

SEQ ID NO: 2485351 - RNA, 19 nt, Artificial Sequence
  Description of Artificial Sequence: Synthetic oligonucleotide
gacuuuaacaccguacaag

SEQ ID NO: 2485352 - RNA, 19 nt, Artificial Sequence
  Description of Artificial Sequence: Synthetic oligonucleotide
ucaaaaguccauucuuacc

SEQ ID NO: 2485353 - RNA, 19 nt, Artificial Sequence
  Description of Artificial Sequence: Synthetic oligonucleotide
uagggguucaauaaaacuu

SEQ ID NO: 2485354 - RNA, 19 nt, Artificial Sequence
  Description of Artificial Sequence: Synthetic oligonucleotide
cucauaacccaccacaaug

SEQ ID NO: 2485355 - RNA, 19 nt, Artificial Sequence
  Description of Artificial Sequence: Synthetic oligonucleotide
acaaugacgaugguggagg

SEQ ID NO: 2485356 - RNA, 19 nt, Artificial Sequence
  Description of Artificial Sequence: Synthetic oligonucleotide
uuagggguucaauaaaacu

SEQ ID NO: 2485357 - RNA, 19 nt, Artificial Sequence
  Description of Artificial Sequence: Synthetic oligonucleotide
ugaccuugggaaaguaggg

SEQ ID NO: 2485358 - RNA, 19 nt, Artificial Sequence
  Description of Artificial Sequence: Synthetic oligonucleotide
gagacuuuaacaccguaca

SEQ ID NO: 2485359 - RNA, 19 nt, Artificial Sequence
  Description of Artificial Sequence: Synthetic oligonucleotide
cagaauaaugugugaaacc

SEQ ID NO: 2485360 - RNA, 19 nt, Artificial Sequence
  Description of Artificial Sequence: Synthetic oligonucleotide
caguuuuggaaaacgggcg

SEQ ID NO: 2485361 - RNA, 19 nt, Artificial Sequence
  Description of Artificial Sequence: Synthetic oligonucleotide
ucuacccuggcccagaaua

SEQ ID NO: 2485362 - RNA, 19 nt, Artificial Sequence
  Description of Artificial Sequence: Synthetic oligonucleotide
agguuaaaauuucuggcug

SEQ ID NO: 2485363 - RNA, 19 nt, Artificial Sequence
  Description of Artificial Sequence: Synthetic oligonucleotide
uuuagggguucaauaaaac

SEQ ID NO: 2485364 - RNA, 19 nt, Artificial Sequence
  Description of Artificial Sequence: Synthetic oligonucleotide
ugcaacagugaauauucgc

SEQ ID NO: 2485365 - RNA, 19 nt, Artificial Sequence
  Description of Artificial Sequence: Synthetic oligonucleotide
uucgcagcuaauauccuca

SEQ ID NO: 2485366 - RNA, 19 nt, Artificial Sequence
  Description of Artificial Sequence: Synthetic oligonucleotide
uuucaaacuagagggaaca

SEQ ID NO: 2485367 - RNA, 19 nt, Artificial Sequence
  Description of Artificial Sequence: Synthetic oligonucleotide
gauggcuuggaagacaaug

SEQ ID NO: 2485368 - RNA, 19 nt, Artificial Sequence
  Description of Artificial Sequence: Synthetic oligonucleotide
cacaaggguacuaaccucc

SEQ ID NO: 2485369 - RNA, 19 nt, Artificial Sequence
  Description of Artificial Sequence: Synthetic oligonucleotide
gagggagacuuuaacaccg

SEQ ID NO: 2485370 - RNA, 19 nt, Artificial Sequence
  Description of Artificial Sequence: Synthetic oligonucleotide
uaauauccucaaaagucca

SEQ ID NO: 2485371 - RNA, 19 nt, Artificial Sequence
  Description of Artificial Sequence: Synthetic oligonucleotide
aggguacuaaccucccugc

SEQ ID NO: 2485372 - RNA, 19 nt, Artificial Sequence
  Description of Artificial Sequence: Synthetic oligonucleotide
cuugaggcucucauaaccc

SEQ ID NO: 2485373 - RNA, 19 nt, Artificial Sequence
  Description of Artificial Sequence: Synthetic oligonucleotide
uaacaccguacaagaaugg

SEQ ID NO: 2485374 - RNA, 19 nt, Artificial Sequence
  Description of Artificial Sequence: Synthetic oligonucleotide
acagugaauauucgcagcu

SEQ ID NO: 2485375 - RNA, 19 nt, Artificial Sequence
  Description of Artificial Sequence: Synthetic oligonucleotide
agcauuguccuuucaaacu

SEQ ID NO: 2485376 - RNA, 19 nt, Artificial Sequence
  Description of Artificial Sequence: Synthetic oligonucleotide
uacagugcaacagugaaua

SEQ ID NO: 2485377 - RNA, 19 nt, Artificial Sequence
  Description of Artificial Sequence: Synthetic oligonucleotide
guccauucuuaccaaaugc

SEQ ID NO: 2485378 - RNA, 19 nt, Artificial Sequence
  Description of Artificial Sequence: Synthetic oligonucleotide
ucuccaguuuuggaaaacg

SEQ ID NO: 2485379 - RNA, 19 nt, Artificial Sequence
  Description of Artificial Sequence: Synthetic oligonucleotide
ucggaugacguccauggga

SEQ ID NO: 2485380 - RNA, 19 nt, Artificial Sequence
  Description of Artificial Sequence: Synthetic oligonucleotide
caacagugaauauucgcag

SEQ ID NO: 2485381 - RNA, 19 nt, Artificial Sequence
  Description of Artificial Sequence: Synthetic oligonucleotide
agauuucauacagugcaac

SEQ ID NO: 2485382 - RNA, 19 nt, Artificial Sequence
  Description of Artificial Sequence: Synthetic oligonucleotide
auucgcagcuaauauccuc

SEQ ID NO: 2485383 - RNA, 19 nt, Artificial Sequence
  Description of Artificial Sequence: Synthetic oligonucleotide
ucccuuuaccuuuacgagc

SEQ ID NO: 2485384 - RNA, 19 nt, Artificial Sequence
  Description of Artificial Sequence: Synthetic oligonucleotide
cagcuaauauccucaaaag

SEQ ID NO: 2485385 - RNA, 19 nt, Artificial Sequence
  Description of Artificial Sequence: Synthetic oligonucleotide
acguccaugggauugguga

SEQ ID NO: 2485386 - RNA, 19 nt, Artificial Sequence
  Description of Artificial Sequence: Synthetic oligonucleotide
gaggguguagccgagauga

SEQ ID NO: 2485387 - RNA, 19 nt, Artificial Sequence
  Description of Artificial Sequence: Synthetic oligonucleotide
ucauacagugcaacaguga

SEQ ID NO: 2485388 - RNA, 19 nt, Artificial Sequence
  Description of Artificial Sequence: Synthetic oligonucleotide
ucaaccugcacacggguuc

SEQ ID NO: 2485389 - RNA, 19 nt, Artificial Sequence
  Description of Artificial Sequence: Synthetic oligonucleotide
cuucaugaggccccaaggc

SEQ ID NO: 2485390 - RNA, 19 nt, Artificial Sequence
  Description of Artificial Sequence: Synthetic oligonucleotide
acggguucggaugacgucc

SEQ ID NO: 2485391 - RNA, 19 nt, Artificial Sequence
  Description of Artificial Sequence: Synthetic oligonucleotide
uuccuaucuuuucuaaagu

SEQ ID NO: 2485392 - RNA, 19 nt, Artificial Sequence
  Description of Artificial Sequence: Synthetic oligonucleotide
ucaaacuagagggaacaga

SEQ ID NO: 2485393 - RNA, 19 nt, Artificial Sequence
  Description of Artificial Sequence: Synthetic oligonucleotide
uuucccaugucccuccagu

SEQ ID NO: 2485394 - RNA, 19 nt, Artificial Sequence
  Description of Artificial Sequence: Synthetic oligonucleotide
cugucugaaggucaggaug

SEQ ID NO: 2485395 - RNA, 19 nt, Artificial Sequence
  Description of Artificial Sequence: Synthetic oligonucleotide
cuccaguuuuggaaaacgg

SEQ ID NO: 2485396 - RNA, 19 nt, Artificial Sequence
  Description of Artificial Sequence: Synthetic oligonucleotide
cuuggaagacaaugugagg

SEQ ID NO: 2485397 - RNA, 19 nt, Artificial Sequence
  Description of Artificial Sequence: Synthetic oligonucleotide
ugaauauucgcagcuaaua

SEQ ID NO: 2485398 - RNA, 19 nt, Artificial Sequence
  Description of Artificial Sequence: Synthetic oligonucleotide
agugaauauucgcagcuaa

SEQ ID NO: 2485399 - RNA, 19 nt, Artificial Sequence
  Description of Artificial Sequence: Synthetic oligonucleotide
cuuucaaacuagagggaac

SEQ ID NO: 2485400 - RNA, 19 nt, Artificial Sequence
  Description of Artificial Sequence: Synthetic oligonucleotide
gaugacguccaugggauug

SEQ ID NO: 2485401 - RNA, 19 nt, Artificial Sequence
  Description of Artificial Sequence: Synthetic oligonucleotide
gagcauuguccuuucaaac

SEQ ID NO: 2485402 - RNA, 19 nt, Artificial Sequence
  Description of Artificial Sequence: Synthetic oligonucleotide
uuuacgagcauuguccuuu

SEQ ID NO: 2485403 - RNA, 19 nt, Artificial Sequence
  Description of Artificial Sequence: Synthetic oligonucleotide
aaacuagagggaacagagg

SEQ ID NO: 2485404 - RNA, 19 nt, Artificial Sequence
  Description of Artificial Sequence: Synthetic oligonucleotide
agccgagaugauucgggcc

SEQ ID NO: 2485405 - RNA, 19 nt, Artificial Sequence
  Description of Artificial Sequence: Synthetic oligonucleotide
uggcuuggaagacaaugug

SEQ ID NO: 2485406 - RNA, 19 nt, Artificial Sequence
  Description of Artificial Sequence: Synthetic oligonucleotide
gaugguggaggguguagcc

SEQ ID NO: 2485407 - RNA, 19 nt, Artificial Sequence
  Description of Artificial Sequence: Synthetic oligonucleotide
uuuuccuaucuuuucuaaa

SEQ ID NO: 2485408 - RNA, 19 nt, Artificial Sequence
  Description of Artificial Sequence: Synthetic oligonucleotide
gucccuuuaccuuuacgag

SEQ ID NO: 2485409 - RNA, 19 nt, Artificial Sequence
  Description of Artificial Sequence: Synthetic oligonucleotide
gaggagggagacuuuaaca

SEQ ID NO: 2485410 - RNA, 19 nt, Artificial Sequence
  Description of Artificial Sequence: Synthetic oligonucleotide
agugcauuuucuuucccau

SEQ ID NO: 2485411 - RNA, 19 nt, Artificial Sequence
  Description of Artificial Sequence: Synthetic oligonucleotide
uauccucaaaaguccauuc

SEQ ID NO: 2485412 - RNA, 19 nt, Artificial Sequence
  Description of Artificial Sequence: Synthetic oligonucleotide
cuaccagugucuugagucc

SEQ ID NO: 2485413 - RNA, 19 nt, Artificial Sequence
  Description of Artificial Sequence: Synthetic oligonucleotide
augacgaugguggagggug

SEQ ID NO: 2485414 - RNA, 19 nt, Artificial Sequence
  Description of Artificial Sequence: Synthetic oligonucleotide
aaaguccauucuuaccaaa

SEQ ID NO: 2485415 - RNA, 19 nt, Artificial Sequence
  Description of Artificial Sequence: Synthetic oligonucleotide
auaacccaccacaaugacg

SEQ ID NO: 2485416 - RNA, 19 nt, Artificial Sequence
  Description of Artificial Sequence: Synthetic oligonucleotide
accguacaagaaugguggc

SEQ ID NO: 2485417 - RNA, 19 nt, Artificial Sequence
  Description of Artificial Sequence: Synthetic oligonucleotide
uuaaaauuucuggcugucu

SEQ ID NO: 2485418 - RNA, 19 nt, Artificial Sequence
  Description of Artificial Sequence: Synthetic oligonucleotide
agacaaugugaggacacuc

SEQ ID NO: 2485419 - RNA, 19 nt, Artificial Sequence
  Description of Artificial Sequence: Synthetic oligonucleotide
uuuuggaaaacgggcgccc

SEQ ID NO: 2485420 - RNA, 19 nt, Artificial Sequence
  Description of Artificial Sequence: Synthetic oligonucleotide
aacaccguacaagaauggu

SEQ ID NO: 2485421 - RNA, 19 nt, Artificial Sequence
  Description of Artificial Sequence: Synthetic oligonucleotide
aauuucuggcugucuugcu

SEQ ID NO: 2485422 - RNA, 19 nt, Artificial Sequence
  Description of Artificial Sequence: Synthetic oligonucleotide
uaccuuuacgagcauuguc

SEQ ID NO: 2485423 - RNA, 19 nt, Artificial Sequence
  Description of Artificial Sequence: Synthetic oligonucleotide
uguagccgagaugauucgg

SEQ ID NO: 2485424 - RNA, 19 nt, Artificial Sequence
  Description of Artificial Sequence: Synthetic oligonucleotide
ugcacacggguucggauga

SEQ ID NO: 2485425 - RNA, 19 nt, Artificial Sequence
  Description of Artificial Sequence: Synthetic oligonucleotide
guagccgagaugauucggg

SEQ ID NO: 2485426 - RNA, 19 nt, Artificial Sequence
  Description of Artificial Sequence: Synthetic oligonucleotide
ggucccuuuaccuuuacga

SEQ ID NO: 2485427 - RNA, 19 nt, Artificial Sequence
  Description of Artificial Sequence: Synthetic oligonucleotide
cauacagugcaacagugaa

SEQ ID NO: 2485428 - RNA, 19 nt, Artificial Sequence
  Description of Artificial Sequence: Synthetic oligonucleotide
gaauauucgcagcuaauau

SEQ ID NO: 2485429 - RNA, 19 nt, Artificial Sequence
  Description of Artificial Sequence: Synthetic oligonucleotide
ugaggcucucauaacccac

SEQ ID NO: 2485430 - RNA, 19 nt, Artificial Sequence
  Description of Artificial Sequence: Synthetic oligonucleotide
aucgucaccaaggccaauc

SEQ ID NO: 2485431 - RNA, 19 nt, Artificial Sequence
  Description of Artificial Sequence: Synthetic oligonucleotide
ucgucaccaaggccaaucc

SEQ ID NO: 2485432 - RNA, 19 nt, Artificial Sequence
  Description of Artificial Sequence: Synthetic oligonucleotide
cuaaccucccugcucuacc

SEQ ID NO: 2485433 - RNA, 19 nt, Artificial Sequence
  Description of Artificial Sequence: Synthetic oligonucleotide
gaaugguggcauucacaag

SEQ ID NO: 2485434 - RNA, 19 nt, Artificial Sequence
  Description of Artificial Sequence: Synthetic oligonucleotide
ugucccuccaguuuuccua

SEQ ID NO: 2485435 - RNA, 19 nt, Artificial Sequence
  Description of Artificial Sequence: Synthetic oligonucleotide
aggucggaggcugaguuuc

SEQ ID NO: 2485436 - RNA, 19 nt, Artificial Sequence
  Description of Artificial Sequence: Synthetic oligonucleotide
uacaagaaugguggcauuc

SEQ ID NO: 2485437 - RNA, 19 nt, Artificial Sequence
  Description of Artificial Sequence: Synthetic oligonucleotide
ucucauaacccaccacaau

SEQ ID NO: 2485438 - RNA, 19 nt, Artificial Sequence
  Description of Artificial Sequence: Synthetic oligonucleotide
cauucacaaggguacuaac

SEQ ID NO: 2485439 - RNA, 19 nt, Artificial Sequence
  Description of Artificial Sequence: Synthetic oligonucleotide
uaaccucccugcucuaccc

SEQ ID NO: 2485440 - RNA, 19 nt, Artificial Sequence
  Description of Artificial Sequence: Synthetic oligonucleotide
guucaauaaaacuuuuaau

SEQ ID NO: 2485441 - RNA, 19 nt, Artificial Sequence
  Description of Artificial Sequence: Synthetic oligonucleotide
guuacggaccaacagguua

SEQ ID NO: 2485442 - RNA, 19 nt, Artificial Sequence
  Description of Artificial Sequence: Synthetic oligonucleotide
ugcccaucgucaccaaggc

SEQ ID NO: 2485443 - RNA, 19 nt, Artificial Sequence
  Description of Artificial Sequence: Synthetic oligonucleotide
ucaggucggaggcugaguu

SEQ ID NO: 2485444 - RNA, 19 nt, Artificial Sequence
  Description of Artificial Sequence: Synthetic oligonucleotide
acaaggguacuaaccuccc

SEQ ID NO: 2485445 - RNA, 19 nt, Artificial Sequence
  Description of Artificial Sequence: Synthetic oligonucleotide
cauaacccaccacaaugac

SEQ ID NO: 2485446 - RNA, 19 nt, Artificial Sequence
  Description of Artificial Sequence: Synthetic oligonucleotide
ucacaaggguacuaaccuc

SEQ ID NO: 2485447 - RNA, 19 nt, Artificial Sequence
  Description of Artificial Sequence: Synthetic oligonucleotide
aauauccucaaaaguccau

SEQ ID NO: 2485448 - RNA, 19 nt, Artificial Sequence
  Description of Artificial Sequence: Synthetic oligonucleotide
uauucgcagcuaauauccu

SEQ ID NO: 2485449 - RNA, 19 nt, Artificial Sequence
  Description of Artificial Sequence: Synthetic oligonucleotide
ugcuuaagugcauuuucuu

SEQ ID NO: 2485450 - RNA, 19 nt, Artificial Sequence
  Description of Artificial Sequence: Synthetic oligonucleotide
guuuuggaaaacgggcgcc

SEQ ID NO: 2485451 - RNA, 19 nt, Artificial Sequence
  Description of Artificial Sequence: Synthetic oligonucleotide
aaguccauucuuaccaaau

SEQ ID NO: 2485452 - RNA, 19 nt, Artificial Sequence
  Description of Artificial Sequence: Synthetic oligonucleotide
uagccgagaugauucgggc

SEQ ID NO: 2485453 - RNA, 19 nt, Artificial Sequence
  Description of Artificial Sequence: Synthetic oligonucleotide
ggagggagacuuuaacacc

SEQ ID NO: 2485454 - RNA, 19 nt, Artificial Sequence
  Description of Artificial Sequence: Synthetic oligonucleotide
guuaaaauuucuggcuguc

SEQ ID NO: 2485455 - RNA, 19 nt, Artificial Sequence
  Description of Artificial Sequence: Synthetic oligonucleotide
agacuuuaacaccguacaa

SEQ ID NO: 2485456 - RNA, 19 nt, Artificial Sequence
  Description of Artificial Sequence: Synthetic oligonucleotide
ugugaaaccacagccucuu

SEQ ID NO: 2485457 - RNA, 19 nt, Artificial Sequence
  Description of Artificial Sequence: Synthetic oligonucleotide
gcucucauaacccaccaca

SEQ ID NO: 2485458 - RNA, 19 nt, Artificial Sequence
  Description of Artificial Sequence: Synthetic oligonucleotide
acaagaaugguggcauuca

SEQ ID NO: 2485459 - RNA, 19 nt, Artificial Sequence
  Description of Artificial Sequence: Synthetic oligonucleotide
aaacgggcgcccacuugcc

SEQ ID NO: 2485460 - RNA, 19 nt, Artificial Sequence
  Description of Artificial Sequence: Synthetic oligonucleotide
acgagcauuguccuuucaa

SEQ ID NO: 2485461 - RNA, 19 nt, Artificial Sequence
  Description of Artificial Sequence: Synthetic oligonucleotide
caaugacgaugguggaggg

SEQ ID NO: 2485462 - RNA, 19 nt, Artificial Sequence
  Description of Artificial Sequence: Synthetic oligonucleotide
gaaaacgggcgcccacuug

SEQ ID NO: 2485463 - RNA, 19 nt, Artificial Sequence
  Description of Artificial Sequence: Synthetic oligonucleotide
cagguuaaaauuucuggcu

SEQ ID NO: 2485464 - RNA, 19 nt, Artificial Sequence
  Description of Artificial Sequence: Synthetic oligonucleotide
acuaaccucccugcucuac

SEQ ID NO: 2485465 - RNA, 19 nt, Artificial Sequence
  Description of Artificial Sequence: Synthetic oligonucleotide
guguagccgagaugauucg

SEQ ID NO: 2485466 - RNA, 19 nt, Artificial Sequence
  Description of Artificial Sequence: Synthetic oligonucleotide
gguguagccgagaugauuc

SEQ ID NO: 2485467 - RNA, 19 nt, Artificial Sequence
  Description of Artificial Sequence: Synthetic oligonucleotide
auuagguuacggaccaaca

SEQ ID NO: 2485468 - RNA, 19 nt, Artificial Sequence
  Description of Artificial Sequence: Synthetic oligonucleotide
cugucuaccagugucuuga

SEQ ID NO: 2485469 - RNA, 19 nt, Artificial Sequence
  Description of Artificial Sequence: Synthetic oligonucleotide
cugcacacggguucggaug

SEQ ID NO: 2485470 - RNA, 19 nt, Artificial Sequence
  Description of Artificial Sequence: Synthetic oligonucleotide
agguuacggaccaacaggu

SEQ ID NO: 2485471 - RNA, 19 nt, Artificial Sequence
  Description of Artificial Sequence: Synthetic oligonucleotide
guuuuccuaucuuuucuaa

SEQ ID NO: 2485472 - RNA, 19 nt, Artificial Sequence
  Description of Artificial Sequence: Synthetic oligonucleotide
guacuaaccucccugcucu

SEQ ID NO: 2485473 - RNA, 19 nt, Artificial Sequence
  Description of Artificial Sequence: Synthetic oligonucleotide
ucggaggcugaguuucuug

SEQ ID NO: 2485474 - RNA, 19 nt, Artificial Sequence
  Description of Artificial Sequence: Synthetic oligonucleotide
ggaaaguaggggucaggag

SEQ ID NO: 2485475 - RNA, 19 nt, Artificial Sequence
  Description of Artificial Sequence: Synthetic oligonucleotide
uucuugaggcucucauaac

SEQ ID NO: 2485476 - RNA, 19 nt, Artificial Sequence
  Description of Artificial Sequence: Synthetic oligonucleotide
aaugacgaugguggagggu

SEQ ID NO: 2485477 - RNA, 19 nt, Artificial Sequence
  Description of Artificial Sequence: Synthetic oligonucleotide
augacguccaugggauugg

SEQ ID NO: 2485478 - RNA, 19 nt, Artificial Sequence
  Description of Artificial Sequence: Synthetic oligonucleotide
augguggcauucacaaggg

SEQ ID NO: 2485479 - RNA, 19 nt, Artificial Sequence
  Description of Artificial Sequence: Synthetic oligonucleotide
uuaccuuuacgagcauugu

SEQ ID NO: 2485480 - RNA, 19 nt, Artificial Sequence
  Description of Artificial Sequence: Synthetic oligonucleotide
uggaggguguagccgagau

SEQ ID NO: 2485481 - RNA, 19 nt, Artificial Sequence
  Description of Artificial Sequence: Synthetic oligonucleotide
guaggggucaggagagggg

SEQ ID NO: 2485482 - RNA, 19 nt, Artificial Sequence
  Description of Artificial Sequence: Synthetic oligonucleotide
acugucuaccagugucuug

SEQ ID NO: 2485483 - RNA, 19 nt, Artificial Sequence
  Description of Artificial Sequence: Synthetic oligonucleotide
agggguucaauaaaacuuu

SEQ ID NO: 2485484 - RNA, 19 nt, Artificial Sequence
  Description of Artificial Sequence: Synthetic oligonucleotide
agagauggcuuggaagaca

SEQ ID NO: 2485485 - RNA, 19 nt, Artificial Sequence
  Description of Artificial Sequence: Synthetic oligonucleotide
gguacuaaccucccugcuc

SEQ ID NO: 2485486 - RNA, 19 nt, Artificial Sequence
  Description of Artificial Sequence: Synthetic oligonucleotide
caccagcucaggucggagg

SEQ ID NO: 2485487 - RNA, 19 nt, Artificial Sequence
  Description of Artificial Sequence: Synthetic oligonucleotide
agcugucugaaggucagga

SEQ ID NO: 2485488 - RNA, 19 nt, Artificial Sequence
  Description of Artificial Sequence: Synthetic oligonucleotide
augugaggacacuccugag

SEQ ID NO: 2485489 - RNA, 19 nt, Artificial Sequence
  Description of Artificial Sequence: Synthetic oligonucleotide
uggaaaacgggcgcccacu

SEQ ID NO: 2485490 - RNA, 19 nt, Artificial Sequence
  Description of Artificial Sequence: Synthetic oligonucleotide
uucaaccugcacacggguu

SEQ ID NO: 2485491 - RNA, 19 nt, Artificial Sequence
  Description of Artificial Sequence: Synthetic oligonucleotide
ccuucaugaggccccaagg

SEQ ID NO: 2485492 - RNA, 19 nt, Artificial Sequence
  Description of Artificial Sequence: Synthetic oligonucleotide
agaggggucccuuuaccuu

SEQ ID NO: 2485493 - RNA, 19 nt, Artificial Sequence
  Description of Artificial Sequence: Synthetic oligonucleotide
uugggaaaguaggggucag

SEQ ID NO: 2485494 - RNA, 19 nt, Artificial Sequence
  Description of Artificial Sequence: Synthetic oligonucleotide
guccaugggauuggugagg

SEQ ID NO: 2485495 - RNA, 19 nt, Artificial Sequence
  Description of Artificial Sequence: Synthetic oligonucleotide
ucccaugucccuccaguuu

SEQ ID NO: 2485496 - RNA, 19 nt, Artificial Sequence
  Description of Artificial Sequence: Synthetic oligonucleotide
uaccagugucuugagucca

SEQ ID NO: 2485497 - RNA, 19 nt, Artificial Sequence
  Description of Artificial Sequence: Synthetic oligonucleotide
ugacgaugguggagggugu

SEQ ID NO: 2485498 - RNA, 19 nt, Artificial Sequence
  Description of Artificial Sequence: Synthetic oligonucleotide
cucucauaacccaccacaa

SEQ ID NO: 2485499 - RNA, 19 nt, Artificial Sequence
  Description of Artificial Sequence: Synthetic oligonucleotide
ugaggacacuccugaggac

SEQ ID NO: 2485500 - RNA, 19 nt, Artificial Sequence
  Description of Artificial Sequence: Synthetic oligonucleotide
cuugggaaaguagggguca

SEQ ID NO: 2485501 - RNA, 19 nt, Artificial Sequence
  Description of Artificial Sequence: Synthetic oligonucleotide
gugcaacagugaauauucg

SEQ ID NO: 2485502 - RNA, 19 nt, Artificial Sequence
  Description of Artificial Sequence: Synthetic oligonucleotide
uuacgagcauuguccuuuc

SEQ ID NO: 2485503 - RNA, 19 nt, Artificial Sequence
  Description of Artificial Sequence: Synthetic oligonucleotide
auccuagccccugaccuug

SEQ ID NO: 2485504 - RNA, 19 nt, Artificial Sequence
  Description of Artificial Sequence: Synthetic oligonucleotide
cccuuuaccuuuacgagca

SEQ ID NO: 2485505 - RNA, 19 nt, Artificial Sequence
  Description of Artificial Sequence: Synthetic oligonucleotide
uccuagccccugaccuugg

SEQ ID NO: 2485506 - RNA, 19 nt, Artificial Sequence
  Description of Artificial Sequence: Synthetic oligonucleotide
gagaggggucccuuuaccu

SEQ ID NO: 2485507 - RNA, 19 nt, Artificial Sequence
  Description of Artificial Sequence: Synthetic oligonucleotide
ucuugccuucaaccugcac

SEQ ID NO: 2485508 - RNA, 19 nt, Artificial Sequence
  Description of Artificial Sequence: Synthetic oligonucleotide
uacgagcauuguccuuuca

SEQ ID NO: 2485509 - RNA, 19 nt, Artificial Sequence
  Description of Artificial Sequence: Synthetic oligonucleotide
ggagaggggucccuuuacc

SEQ ID NO: 2485510 - RNA, 19 nt, Artificial Sequence
  Description of Artificial Sequence: Synthetic oligonucleotide
cacacggguucggaugacg

SEQ ID NO: 2485511 - RNA, 19 nt, Artificial Sequence
  Description of Artificial Sequence: Synthetic oligonucleotide
gccgagaggcccuucauga

SEQ ID NO: 2485512 - RNA, 19 nt, Artificial Sequence
  Description of Artificial Sequence: Synthetic oligonucleotide
ugccaucagcugucugaag

SEQ ID NO: 2485513 - RNA, 19 nt, Artificial Sequence
  Description of Artificial Sequence: Synthetic oligonucleotide
uucccaugucccuccaguu

SEQ ID NO: 2485514 - RNA, 19 nt, Artificial Sequence
  Description of Artificial Sequence: Synthetic oligonucleotide
acgggcgcccacuugccca

SEQ ID NO: 2485515 - RNA, 19 nt, Artificial Sequence
  Description of Artificial Sequence: Synthetic oligonucleotide
auacagugcaacagugaau

SEQ ID NO: 2485516 - RNA, 19 nt, Artificial Sequence
  Description of Artificial Sequence: Synthetic oligonucleotide
ucgcagcuaauauccucaa

SEQ ID NO: 2485517 - RNA, 19 nt, Artificial Sequence
  Description of Artificial Sequence: Synthetic oligonucleotide
acagugcaacagugaauau

SEQ ID NO: 2485518 - RNA, 19 nt, Artificial Sequence
  Description of Artificial Sequence: Synthetic oligonucleotide
caugucccuccaguuuucc

SEQ ID NO: 2485519 - RNA, 19 nt, Artificial Sequence
  Description of Artificial Sequence: Synthetic oligonucleotide
acgaugguggaggguguag

SEQ ID NO: 2485520 - RNA, 19 nt, Artificial Sequence
  Description of Artificial Sequence: Synthetic oligonucleotide
aaccugcacacggguucgg

SEQ ID NO: 2485521 - RNA, 19 nt, Artificial Sequence
  Description of Artificial Sequence: Synthetic oligonucleotide
ucaggagaggggucccuuu

SEQ ID NO: 2485522 - RNA, 19 nt, Artificial Sequence
  Description of Artificial Sequence: Synthetic oligonucleotide
ugccuucaaccugcacacg

SEQ ID NO: 2485523 - RNA, 19 nt, Artificial Sequence
  Description of Artificial Sequence: Synthetic oligonucleotide
cacggguucggaugacguc

SEQ ID NO: 2485524 - RNA, 19 nt, Artificial Sequence
  Description of Artificial Sequence: Synthetic oligonucleotide
cgagaggcccuucaugagg

SEQ ID NO: 2485525 - RNA, 19 nt, Artificial Sequence
  Description of Artificial Sequence: Synthetic oligonucleotide
gggucccuuuaccuuuacg

SEQ ID NO: 2485526 - RNA, 19 nt, Artificial Sequence
  Description of Artificial Sequence: Synthetic oligonucleotide
acacggguucggaugacgu

SEQ ID NO: 2485527 - RNA, 19 nt, Artificial Sequence
  Description of Artificial Sequence: Synthetic oligonucleotide
acccuggcccagaauaaug

SEQ ID NO: 2485528 - RNA, 19 nt, Artificial Sequence
  Description of Artificial Sequence: Synthetic oligonucleotide
guccaccacugucuaccag

SEQ ID NO: 2485529 - RNA, 19 nt, Artificial Sequence
  Description of Artificial Sequence: Synthetic oligonucleotide
cacuugcccaucgucacca

SEQ ID NO: 2485530 - RNA, 19 nt, Artificial Sequence
  Description of Artificial Sequence: Synthetic oligonucleotide
cuacccuggcccagaauaa

SEQ ID NO: 2485531 - RNA, 19 nt, Artificial Sequence
  Description of Artificial Sequence: Synthetic oligonucleotide
uaauuagguuacggaccaa

SEQ ID NO: 2485532 - RNA, 19 nt, Artificial Sequence
  Description of Artificial Sequence: Synthetic oligonucleotide
ugcucuacccuggcccaga

SEQ ID NO: 2485533 - RNA, 19 nt, Artificial Sequence
  Description of Artificial Sequence: Synthetic oligonucleotide
aacccaccacaaugacgau

SEQ ID NO: 2485534 - RNA, 19 nt, Artificial Sequence
  Description of Artificial Sequence: Synthetic oligonucleotide
uacccuggcccagaauaau

SEQ ID NO: 2485535 - RNA, 19 nt, Artificial Sequence
  Description of Artificial Sequence: Synthetic oligonucleotide
cuagccccugaccuuggga

SEQ ID NO: 2485536 - RNA, 19 nt, Artificial Sequence
  Description of Artificial Sequence: Synthetic oligonucleotide
ggaggguguagccgagaug

SEQ ID NO: 2485537 - RNA, 19 nt, Artificial Sequence
  Description of Artificial Sequence: Synthetic oligonucleotide
gagaugauucgggccgaga

SEQ ID NO: 2485538 - RNA, 19 nt, Artificial Sequence
  Description of Artificial Sequence: Synthetic oligonucleotide
gaggggucccuuuaccuuu

SEQ ID NO: 2485539 - RNA, 19 nt, Artificial Sequence
  Description of Artificial Sequence: Synthetic oligonucleotide
gguucggaugacguccaug

SEQ ID NO: 2485540 - RNA, 19 nt, Artificial Sequence
  Description of Artificial Sequence: Synthetic oligonucleotide
accaaaugcuuaagugcau

SEQ ID NO: 2485541 - RNA, 19 nt, Artificial Sequence
  Description of Artificial Sequence: Synthetic oligonucleotide
gcuuaagugcauuuucuuu

SEQ ID NO: 2485542 - RNA, 19 nt, Artificial Sequence
  Description of Artificial Sequence: Synthetic oligonucleotide
cucccugcucuacccuggc

SEQ ID NO: 2485543 - RNA, 19 nt, Artificial Sequence
  Description of Artificial Sequence: Synthetic oligonucleotide
agccccugaccuugggaaa

SEQ ID NO: 2485544 - RNA, 19 nt, Artificial Sequence
  Description of Artificial Sequence: Synthetic oligonucleotide
ggccgagaggcccuucaug

SEQ ID NO: 2485545 - RNA, 19 nt, Artificial Sequence
  Description of Artificial Sequence: Synthetic oligonucleotide
aggccaauccuagccccug

SEQ ID NO: 2485546 - RNA, 19 nt, Artificial Sequence
  Description of Artificial Sequence: Synthetic oligonucleotide
uacggaccaacagguuaaa

SEQ ID NO: 2485547 - RNA, 19 nt, Artificial Sequence
  Description of Artificial Sequence: Synthetic oligonucleotide
ugacguccaugggauuggu

SEQ ID NO: 2485548 - RNA, 19 nt, Artificial Sequence
  Description of Artificial Sequence: Synthetic oligonucleotide
cccuucaugaggccccaag

SEQ ID NO: 2485549 - RNA, 19 nt, Artificial Sequence
  Description of Artificial Sequence: Synthetic oligonucleotide
uacuaaccucccugcucua

SEQ ID NO: 2485550 - RNA, 19 nt, Artificial Sequence
  Description of Artificial Sequence: Synthetic oligonucleotide
ccucccugcucuacccugg

SEQ ID NO: 2485551 - RNA, 19 nt, Artificial Sequence
  Description of Artificial Sequence: Synthetic oligonucleotide
ggcgcccacuugcccaucg

SEQ ID NO: 2485552 - RNA, 19 nt, Artificial Sequence
  Description of Artificial Sequence: Synthetic oligonucleotide
agggagacuuuaacaccgu

SEQ ID NO: 2485553 - RNA, 19 nt, Artificial Sequence
  Description of Artificial Sequence: Synthetic oligonucleotide
gcccagaauaaugugugaa

SEQ ID NO: 2485554 - RNA, 19 nt, Artificial Sequence
  Description of Artificial Sequence: Synthetic oligonucleotide
gccaauccuagccccugac

SEQ ID NO: 2485555 - RNA, 19 nt, Artificial Sequence
  Description of Artificial Sequence: Synthetic oligonucleotide
gugaauauucgcagcuaau

SEQ ID NO: 2485556 - RNA, 19 nt, Artificial Sequence
  Description of Artificial Sequence: Synthetic oligonucleotide
ggguucaauaaaacuuuua

SEQ ID NO: 2485557 - RNA, 19 nt, Artificial Sequence
  Description of Artificial Sequence: Synthetic oligonucleotide
cgagcauuguccuuucaaa

SEQ ID NO: 2485558 - RNA, 19 nt, Artificial Sequence
  Description of Artificial Sequence: Synthetic oligonucleotide
gccccugaccuugggaaag

SEQ ID NO: 2485559 - RNA, 19 nt, Artificial Sequence
  Description of Artificial Sequence: Synthetic oligonucleotide
ccgagaggcccuucaugag

SEQ ID NO: 2485560 - RNA, 19 nt, Artificial Sequence
  Description of Artificial Sequence: Synthetic oligonucleotide
ggcccagaauaauguguga

SEQ ID NO: 2485561 - RNA, 19 nt, Artificial Sequence
  Description of Artificial Sequence: Synthetic oligonucleotide
auucgggccgagaggcccu

SEQ ID NO: 2485562 - RNA, 19 nt, Artificial Sequence
  Description of Artificial Sequence: Synthetic oligonucleotide
gucccuccaguuuuccuau

SEQ ID NO: 2485563 - RNA, 19 nt, Artificial Sequence
  Description of Artificial Sequence: Synthetic oligonucleotide
cagugaauauucgcagcua

SEQ ID NO: 2485564 - RNA, 19 nt, Artificial Sequence
  Description of Artificial Sequence: Synthetic oligonucleotide
acggaccaacagguuaaaa

SEQ ID NO: 2485565 - RNA, 19 nt, Artificial Sequence
  Description of Artificial Sequence: Synthetic oligonucleotide
cagugcaacagugaauauu

SEQ ID NO: 2485566 - RNA, 19 nt, Artificial Sequence
  Description of Artificial Sequence: Synthetic oligonucleotide
ccacuugcccaucgucacc

SEQ ID NO: 2485567 - RNA, 19 nt, Artificial Sequence
  Description of Artificial Sequence: Synthetic oligonucleotide
caggagaggggucccuuua

SEQ ID NO: 2485568 - RNA, 19 nt, Artificial Sequence
  Description of Artificial Sequence: Synthetic oligonucleotide
gcccaucgucaccaaggcc

SEQ ID NO: 2485569 - RNA, 19 nt, Artificial Sequence
  Description of Artificial Sequence: Synthetic oligonucleotide
gacgaugguggagggugua

SEQ ID NO: 2485570 - RNA, 19 nt, Artificial Sequence
  Description of Artificial Sequence: Synthetic oligonucleotide
gcccacuugcccaucguca

SEQ ID NO: 2485571 - RNA, 19 nt, Artificial Sequence
  Description of Artificial Sequence: Synthetic oligonucleotide
cugcucuacccuggcccag

SEQ ID NO: 2485572 - RNA, 19 nt, Artificial Sequence
  Description of Artificial Sequence: Synthetic oligonucleotide
gcugucuugcucuccaguu

SEQ ID NO: 2485573 - RNA, 19 nt, Artificial Sequence
  Description of Artificial Sequence: Synthetic oligonucleotide
cgaugguggaggguguagc

SEQ ID NO: 2485574 - RNA, 19 nt, Artificial Sequence
  Description of Artificial Sequence: Synthetic oligonucleotide
cuuuacgagcauuguccuu

SEQ ID NO: 2485575 - RNA, 19 nt, Artificial Sequence
  Description of Artificial Sequence: Synthetic oligonucleotide
gggagacuuuaacaccgua

SEQ ID NO: 2485576 - RNA, 19 nt, Artificial Sequence
  Description of Artificial Sequence: Synthetic oligonucleotide
ccuuuacgagcauuguccu

SEQ ID NO: 2485577 - RNA, 19 nt, Artificial Sequence
  Description of Artificial Sequence: Synthetic oligonucleotide
cuuuaccuuuacgagcauu

SEQ ID NO: 2485578 - RNA, 19 nt, Artificial Sequence
  Description of Artificial Sequence: Synthetic oligonucleotide
guacaagaaugguggcauu

SEQ ID NO: 2485579 - RNA, 19 nt, Artificial Sequence
  Description of Artificial Sequence: Synthetic oligonucleotide
ccguacaagaaugguggca

SEQ ID NO: 2485580 - RNA, 19 nt, Artificial Sequence
  Description of Artificial Sequence: Synthetic oligonucleotide
ccaugucccuccaguuuuc

SEQ ID NO: 2485581 - RNA, 19 nt, Artificial Sequence
  Description of Artificial Sequence: Synthetic oligonucleotide
ggcauucacaaggguacua

SEQ ID NO: 2485582 - RNA, 19 nt, Artificial Sequence
  Description of Artificial Sequence: Synthetic oligonucleotide
ggccaauccuagccccuga

SEQ ID NO: 2485583 - RNA, 19 nt, Artificial Sequence
  Description of Artificial Sequence: Synthetic oligonucleotide
gcugucugaaggucaggau

SEQ ID NO: 2485584 - RNA, 19 nt, Artificial Sequence
  Description of Artificial Sequence: Synthetic oligonucleotide
ggguacuaaccucccugcu

SEQ ID NO: 2485585 - RNA, 19 nt, Artificial Sequence
  Description of Artificial Sequence: Synthetic oligonucleotide
cccuggcccagaauaaugu

SEQ ID NO: 2485586 - RNA, 19 nt, Artificial Sequence
  Description of Artificial Sequence: Synthetic oligonucleotide
aggguguagccgagaugau

SEQ ID NO: 2485587 - RNA, 19 nt, Artificial Sequence
  Description of Artificial Sequence: Synthetic oligonucleotide
ccacugucuaccagugucu

SEQ ID NO: 2485588 - RNA, 19 nt, Artificial Sequence
  Description of Artificial Sequence: Synthetic oligonucleotide
aggggucccuuuaccuuua

SEQ ID NO: 2485589 - RNA, 19 nt, Artificial Sequence
  Description of Artificial Sequence: Synthetic oligonucleotide
ccaucgucaccaaggccaa

SEQ ID NO: 2485590 - RNA, 19 nt, Artificial Sequence
  Description of Artificial Sequence: Synthetic oligonucleotide
ggaaaacgggcgcccacuu

SEQ ID NO: 2485591 - RNA, 19 nt, Artificial Sequence
  Description of Artificial Sequence: Synthetic oligonucleotide
ccccaaggccccucuucug

SEQ ID NO: 2485592 - RNA, 19 nt, Artificial Sequence
  Description of Artificial Sequence: Synthetic oligonucleotide
ggggucccuuuaccuuuac

SEQ ID NO: 2485593 - RNA, 19 nt, Artificial Sequence
  Description of Artificial Sequence: Synthetic oligonucleotide
cggaugacguccaugggau

SEQ ID NO: 2485594 - RNA, 19 nt, Artificial Sequence
  Description of Artificial Sequence: Synthetic oligonucleotide
augaggccccaaggccccu

SEQ ID NO: 2485595 - RNA, 19 nt, Artificial Sequence
  Description of Artificial Sequence: Synthetic oligonucleotide
ggacacuccugaggacaca

SEQ ID NO: 2485596 - RNA, 19 nt, Artificial Sequence
  Description of Artificial Sequence: Synthetic oligonucleotide
gggguucaauaaaacuuuu

SEQ ID NO: 2485597 - RNA, 19 nt, Artificial Sequence
  Description of Artificial Sequence: Synthetic oligonucleotide
cacugucuaccagugucuu

SEQ ID NO: 2485598 - RNA, 19 nt, Artificial Sequence
  Description of Artificial Sequence: Synthetic oligonucleotide
gcucuacccuggcccagaa

SEQ ID NO: 2485599 - RNA, 19 nt, Artificial Sequence
  Description of Artificial Sequence: Synthetic oligonucleotide
gccccucuucugccaucag

SEQ ID NO: 2485600 - RNA, 19 nt, Artificial Sequence
  Description of Artificial Sequence: Synthetic oligonucleotide
ggguguagccgagaugauu

SEQ ID NO: 2485601 - RNA, 19 nt, Artificial Sequence
  Description of Artificial Sequence: Synthetic oligonucleotide
cgagaugauucgggccgag

SEQ ID NO: 2485602 - RNA, 19 nt, Artificial Sequence
  Description of Artificial Sequence: Synthetic oligonucleotide
ucgggccgagaggcccuuc

SEQ ID NO: 2485603 - RNA, 19 nt, Artificial Sequence
  Description of Artificial Sequence: Synthetic oligonucleotide
gguuacggaccaacagguu

SEQ ID NO: 2485604 - RNA, 19 nt, Artificial Sequence
  Description of Artificial Sequence: Synthetic oligonucleotide
cucuacccuggcccagaau

SEQ ID NO: 2485605 - RNA, 19 nt, Artificial Sequence
  Description of Artificial Sequence: Synthetic oligonucleotide
gcacacggguucggaugac

SEQ ID NO: 2485606 - RNA, 19 nt, Artificial Sequence
  Description of Artificial Sequence: Synthetic oligonucleotide
gucggaggcugaguuucuu

SEQ ID NO: 2485607 - RNA, 19 nt, Artificial Sequence
  Description of Artificial Sequence: Synthetic oligonucleotide
ccugcacacggguucggau

SEQ ID NO: 2485608 - RNA, 19 nt, Artificial Sequence
  Description of Artificial Sequence: Synthetic oligonucleotide
cggguucggaugacgucca

SEQ ID NO: 2485609 - RNA, 19 nt, Artificial Sequence
  Description of Artificial Sequence: Synthetic oligonucleotide
ggaugacguccaugggauu

SEQ ID NO: 2485610 - RNA, 19 nt, Artificial Sequence
  Description of Artificial Sequence: Synthetic oligonucleotide
ccgagaugauucgggccga

SEQ ID NO: 2485611 - RNA, 19 nt, Artificial Sequence
  Description of Artificial Sequence: Synthetic oligonucleotide
ggucaggagaggggucccu

SEQ ID NO: 2485612 - RNA, 19 nt, Artificial Sequence
  Description of Artificial Sequence: Synthetic oligonucleotide
ggucggaggcugaguuucu

SEQ ID NO: 2485613 - RNA, 19 nt, Artificial Sequence
  Description of Artificial Sequence: Synthetic oligonucleotide
cgucaccaaggccaauccu

SEQ ID NO: 2485614 - RNA, 19 nt, Artificial Sequence
  Description of Artificial Sequence: Synthetic oligonucleotide
gggccgagaggcccuucau

SEQ ID NO: 2485615 - RNA, 19 nt, Artificial Sequence
  Description of Artificial Sequence: Synthetic oligonucleotide
cgggccgagaggcccuuca

SEQ ID NO: 2485616 - RNA, 19 nt, Artificial Sequence
  Description of Artificial Sequence: Synthetic oligonucleotide
caucgucaccaaggccaau

SEQ ID NO: 2485617 - RNA, 19 nt, Artificial Sequence
  Description of Artificial Sequence: Synthetic oligonucleotide
ggguucggaugacguccau

SEQ ID NO: 2485618 - RNA, 19 nt, Artificial Sequence
  Description of Artificial Sequence: Synthetic oligonucleotide
gcgcccacuugcccaucgu

SEQ ID NO: 2485619 - RNA, 19 nt, Artificial Sequence
  Description of Artificial Sequence: Synthetic oligonucleotide
cccugaccuugggaaagua

SEQ ID NO: 2485620 - RNA, 19 nt, Artificial Sequence
  Description of Artificial Sequence: Synthetic oligonucleotide
ccuuuaccuuuacgagcau

SEQ ID NO: 2485621 - RNA, 19 nt, Artificial Sequence
  Description of Artificial Sequence: Synthetic oligonucleotide
ccaugggauuggugaggau

SEQ ID NO: 2485622 - RNA, 19 nt, Artificial Sequence
  Description of Artificial Sequence: Synthetic oligonucleotide
ccccugaccuugggaaagu

SEQ ID NO: 2485623 - RNA, 19 nt, Artificial Sequence
  Description of Artificial Sequence: Synthetic oligonucleotide
gggcgcccacuugcccauc

SEQ ID NO: 2485624 - RNA, 19 nt, Artificial Sequence
  Description of Artificial Sequence: Synthetic oligonucleotide
gcccuucaugaggccccaa

SEQ ID NO: 2485625 - RNA, 19 nt, Artificial Sequence
  Description of Artificial Sequence: Synthetic oligonucleotide
cgggcgcccacuugcccau

SEQ ID NO: 2485626 - RNA, 19 nt, Artificial Sequence
  Description of Artificial Sequence: Synthetic oligonucleotide
gauuaagggacuuaggccg

SEQ ID NO: 2485627 - RNA, 19 nt, Artificial Sequence
  Description of Artificial Sequence: Synthetic oligonucleotide
augauuaagggacuuaggc

SEQ ID NO: 2485628 - RNA, 19 nt, Artificial Sequence
  Description of Artificial Sequence: Synthetic oligonucleotide
aagaugacuaaaauauugc

SEQ ID NO: 2485629 - RNA, 19 nt, Artificial Sequence
  Description of Artificial Sequence: Synthetic oligonucleotide
aauugugagagcuaccacu

SEQ ID NO: 2485630 - RNA, 19 nt, Artificial Sequence
  Description of Artificial Sequence: Synthetic oligonucleotide
uaggagaacacccaggagc

SEQ ID NO: 2485631 - RNA, 19 nt, Artificial Sequence
  Description of Artificial Sequence: Synthetic oligonucleotide
augacuaaaauauugcaca

SEQ ID NO: 2485632 - RNA, 19 nt, Artificial Sequence
  Description of Artificial Sequence: Synthetic oligonucleotide
augagcaugauuaagggac

SEQ ID NO: 2485633 - RNA, 19 nt, Artificial Sequence
  Description of Artificial Sequence: Synthetic oligonucleotide
cuagcuuucacagaguagg

SEQ ID NO: 2485634 - RNA, 19 nt, Artificial Sequence
  Description of Artificial Sequence: Synthetic oligonucleotide
aaauauugcacaagggcuc

SEQ ID NO: 2485635 - RNA, 19 nt, Artificial Sequence
  Description of Artificial Sequence: Synthetic oligonucleotide
gaagaugacuaaaauauug

SEQ ID NO: 2485636 - RNA, 19 nt, Artificial Sequence
  Description of Artificial Sequence: Synthetic oligonucleotide
acuugcuugagacaaaugu

SEQ ID NO: 2485637 - RNA, 19 nt, Artificial Sequence
  Description of Artificial Sequence: Synthetic oligonucleotide
auaccuagcuuucacagag

SEQ ID NO: 2485638 - RNA, 19 nt, Artificial Sequence
  Description of Artificial Sequence: Synthetic oligonucleotide
ugauuaagggacuuaggcc

SEQ ID NO: 2485639 - RNA, 19 nt, Artificial Sequence
  Description of Artificial Sequence: Synthetic oligonucleotide
acuuaggccgcauuagagc

SEQ ID NO: 2485640 - RNA, 19 nt, Artificial Sequence
  Description of Artificial Sequence: Synthetic oligonucleotide
aagcgcuccaaguucaggg

SEQ ID NO: 2485641 - RNA, 19 nt, Artificial Sequence
  Description of Artificial Sequence: Synthetic oligonucleotide
uuaaagagugccaggcugc

SEQ ID NO: 2485642 - RNA, 19 nt, Artificial Sequence
  Description of Artificial Sequence: Synthetic oligonucleotide
acucacauccaccaggcuc

SEQ ID NO: 2485643 - RNA, 19 nt, Artificial Sequence
  Description of Artificial Sequence: Synthetic oligonucleotide
aauacccucaaucggggcu

SEQ ID NO: 2485644 - RNA, 19 nt, Artificial Sequence
  Description of Artificial Sequence: Synthetic oligonucleotide
aaagagcaaacgcaggcgu

SEQ ID NO: 2485645 - RNA, 19 nt, Artificial Sequence
  Description of Artificial Sequence: Synthetic oligonucleotide
guauaccuagcuuucacag

SEQ ID NO: 2485646 - RNA, 19 nt, Artificial Sequence
  Description of Artificial Sequence: Synthetic oligonucleotide
ugaaacugaugccucuccg

SEQ ID NO: 2485647 - RNA, 19 nt, Artificial Sequence
  Description of Artificial Sequence: Synthetic oligonucleotide
gaaacugaugccucuccgg

SEQ ID NO: 2485648 - RNA, 19 nt, Artificial Sequence
  Description of Artificial Sequence: Synthetic oligonucleotide
cuuaggccgcauuagagcc

SEQ ID NO: 2485649 - RNA, 19 nt, Artificial Sequence
  Description of Artificial Sequence: Synthetic oligonucleotide
ugaauugugagagcuacca

SEQ ID NO: 2485650 - RNA, 19 nt, Artificial Sequence
  Description of Artificial Sequence: Synthetic oligonucleotide
uugcuugagacaaauguaa

SEQ ID NO: 2485651 - RNA, 19 nt, Artificial Sequence
  Description of Artificial Sequence: Synthetic oligonucleotide
agaugacuaaaauauugca

SEQ ID NO: 2485652 - RNA, 19 nt, Artificial Sequence
  Description of Artificial Sequence: Synthetic oligonucleotide
aaacgcaggcgucacuggg

SEQ ID NO: 2485653 - RNA, 19 nt, Artificial Sequence
  Description of Artificial Sequence: Synthetic oligonucleotide
uuccagucccaccaggccg

SEQ ID NO: 2485654 - RNA, 19 nt, Artificial Sequence
  Description of Artificial Sequence: Synthetic oligonucleotide
agcaugagcaugauuaagg

SEQ ID NO: 2485655 - RNA, 19 nt, Artificial Sequence
  Description of Artificial Sequence: Synthetic oligonucleotide
agagcuaccacuugcuuga

SEQ ID NO: 2485656 - RNA, 19 nt, Artificial Sequence
  Description of Artificial Sequence: Synthetic oligonucleotide
uccuauccggaacugcugg

SEQ ID NO: 2485657 - RNA, 19 nt, Artificial Sequence
  Description of Artificial Sequence: Synthetic oligonucleotide
uccugaguggguuagcagc

SEQ ID NO: 2485658 - RNA, 19 nt, Artificial Sequence
  Description of Artificial Sequence: Synthetic oligonucleotide
cucugguugcccaauaccc

SEQ ID NO: 2485659 - RNA, 19 nt, Artificial Sequence
  Description of Artificial Sequence: Synthetic oligonucleotide
acugaugccucuccgggcg

SEQ ID NO: 2485660 - RNA, 19 nt, Artificial Sequence
  Description of Artificial Sequence: Synthetic oligonucleotide
agcguuagaccccuugaac

SEQ ID NO: 2485661 - RNA, 19 nt, Artificial Sequence
  Description of Artificial Sequence: Synthetic oligonucleotide
aguagugucggccacuggu

SEQ ID NO: 2485662 - RNA, 19 nt, Artificial Sequence
  Description of Artificial Sequence: Synthetic oligonucleotide
uguauaccuagcuuucaca

SEQ ID NO: 2485663 - RNA, 19 nt, Artificial Sequence
  Description of Artificial Sequence: Synthetic oligonucleotide
ucugcgagcaccacugccc

SEQ ID NO: 2485664 - RNA, 19 nt, Artificial Sequence
  Description of Artificial Sequence: Synthetic oligonucleotide
acuucuaguccugaguggg

SEQ ID NO: 2485665 - RNA, 19 nt, Artificial Sequence
  Description of Artificial Sequence: Synthetic oligonucleotide
uuuggcuguauaccuagcu

SEQ ID NO: 2485666 - RNA, 19 nt, Artificial Sequence
  Description of Artificial Sequence: Synthetic oligonucleotide
ggcgaucugacucacaucc

SEQ ID NO: 2485667 - RNA, 19 nt, Artificial Sequence
  Description of Artificial Sequence: Synthetic oligonucleotide
ucucugguugcccaauacc

SEQ ID NO: 2485668 - RNA, 19 nt, Artificial Sequence
  Description of Artificial Sequence: Synthetic oligonucleotide
agcgguacgaguuccagca

SEQ ID NO: 2485669 - RNA, 19 nt, Artificial Sequence
  Description of Artificial Sequence: Synthetic oligonucleotide
cugacucacauccaccagg

SEQ ID NO: 2485670 - RNA, 19 nt, Artificial Sequence
  Description of Artificial Sequence: Synthetic oligonucleotide
gucaccuuuaaagagugcc

SEQ ID NO: 2485671 - RNA, 19 nt, Artificial Sequence
  Description of Artificial Sequence: Synthetic oligonucleotide
agaccccuugaacagaaag

SEQ ID NO: 2485672 - RNA, 19 nt, Artificial Sequence
  Description of Artificial Sequence: Synthetic oligonucleotide
ugacucacauccaccaggc

SEQ ID NO: 2485673 - RNA, 19 nt, Artificial Sequence
  Description of Artificial Sequence: Synthetic oligonucleotide
accaggccguauuugacac

SEQ ID NO: 2485674 - RNA, 19 nt, Artificial Sequence
  Description of Artificial Sequence: Synthetic oligonucleotide
guauuugacaccuguguca

SEQ ID NO: 2485675 - RNA, 19 nt, Artificial Sequence
  Description of Artificial Sequence: Synthetic oligonucleotide
aaagcaugagcaugauuaa

SEQ ID NO: 2485676 - RNA, 19 nt, Artificial Sequence
  Description of Artificial Sequence: Synthetic oligonucleotide
aacagcguuagaccccuug

SEQ ID NO: 2485677 - RNA, 19 nt, Artificial Sequence
  Description of Artificial Sequence: Synthetic oligonucleotide
uacgaguuccagcagcgug

SEQ ID NO: 2485678 - RNA, 19 nt, Artificial Sequence
  Description of Artificial Sequence: Synthetic oligonucleotide
aauccguuuguagugugug

SEQ ID NO: 2485679 - RNA, 19 nt, Artificial Sequence
  Description of Artificial Sequence: Synthetic oligonucleotide
ugacuaaaauauugcacaa

SEQ ID NO: 2485680 - RNA, 19 nt, Artificial Sequence
  Description of Artificial Sequence: Synthetic oligonucleotide
aaaacagcguuagaccccu

SEQ ID NO: 2485681 - RNA, 19 nt, Artificial Sequence
  Description of Artificial Sequence: Synthetic oligonucleotide
cucaaucggggcuuucucg

SEQ ID NO: 2485682 - RNA, 19 nt, Artificial Sequence
  Description of Artificial Sequence: Synthetic oligonucleotide
ucagcaccgacgcagcugu

SEQ ID NO: 2485683 - RNA, 19 nt, Artificial Sequence
  Description of Artificial Sequence: Synthetic oligonucleotide
uuugccucauaguccagca

SEQ ID NO: 2485684 - RNA, 19 nt, Artificial Sequence
  Description of Artificial Sequence: Synthetic oligonucleotide
uccggaacugcugggagcg

SEQ ID NO: 2485685 - RNA, 19 nt, Artificial Sequence
  Description of Artificial Sequence: Synthetic oligonucleotide
accuuuaaagagugccagg

SEQ ID NO: 2485686 - RNA, 19 nt, Artificial Sequence
  Description of Artificial Sequence: Synthetic oligonucleotide
uuucuuccaguuugaaacu

SEQ ID NO: 2485687 - RNA, 19 nt, Artificial Sequence
  Description of Artificial Sequence: Synthetic oligonucleotide
caaagagcaaacgcaggcg

SEQ ID NO: 2485688 - RNA, 19 nt, Artificial Sequence
  Description of Artificial Sequence: Synthetic oligonucleotide
ucugccacuccuauccgga

SEQ ID NO: 2485689 - RNA, 19 nt, Artificial Sequence
  Description of Artificial Sequence: Synthetic oligonucleotide
ucaaucggggcuuucucgu

SEQ ID NO: 2485690 - RNA, 19 nt, Artificial Sequence
  Description of Artificial Sequence: Synthetic oligonucleotide
aguggguuagcagcucucc

SEQ ID NO: 2485691 - RNA, 19 nt, Artificial Sequence
  Description of Artificial Sequence: Synthetic oligonucleotide
aagcaugagcaugauuaag

SEQ ID NO: 2485692 - RNA, 19 nt, Artificial Sequence
  Description of Artificial Sequence: Synthetic oligonucleotide
ucugguugcccaauacccu

SEQ ID NO: 2485693 - RNA, 19 nt, Artificial Sequence
  Description of Artificial Sequence: Synthetic oligonucleotide
ucugacucacauccaccag

SEQ ID NO: 2485694 - RNA, 19 nt, Artificial Sequence
  Description of Artificial Sequence: Synthetic oligonucleotide
cauuagagccccuugggca

SEQ ID NO: 2485695 - RNA, 19 nt, Artificial Sequence
  Description of Artificial Sequence: Synthetic oligonucleotide
acgaguuccagcagcgugc

SEQ ID NO: 2485696 - RNA, 19 nt, Artificial Sequence
  Description of Artificial Sequence: Synthetic oligonucleotide
aagggcucccaacugaauu

SEQ ID NO: 2485697 - RNA, 19 nt, Artificial Sequence
  Description of Artificial Sequence: Synthetic oligonucleotide
auuaagggacuuaggccgc

SEQ ID NO: 2485698 - RNA, 19 nt, Artificial Sequence
  Description of Artificial Sequence: Synthetic oligonucleotide
aacgcaggcgucacugggc

SEQ ID NO: 2485699 - RNA, 19 nt, Artificial Sequence
  Description of Artificial Sequence: Synthetic oligonucleotide
ugagcaugauuaagggacu

SEQ ID NO: 2485700 - RNA, 19 nt, Artificial Sequence
  Description of Artificial Sequence: Synthetic oligonucleotide
uuagaccccuugaacagaa

SEQ ID NO: 2485701 - RNA, 19 nt, Artificial Sequence
  Description of Artificial Sequence: Synthetic oligonucleotide
aucgucagcaccgacgcag

SEQ ID NO: 2485702 - RNA, 19 nt, Artificial Sequence
  Description of Artificial Sequence: Synthetic oligonucleotide
aguuugaaacugaugccuc

SEQ ID NO: 2485703 - RNA, 19 nt, Artificial Sequence
  Description of Artificial Sequence: Synthetic oligonucleotide
auccggaacugcugggagc

SEQ ID NO: 2485704 - RNA, 19 nt, Artificial Sequence
  Description of Artificial Sequence: Synthetic oligonucleotide
gacuuaggccgcauuagag

SEQ ID NO: 2485705 - RNA, 19 nt, Artificial Sequence
  Description of Artificial Sequence: Synthetic oligonucleotide
guuuguaguguguggacca

SEQ ID NO: 2485706 - RNA, 19 nt, Artificial Sequence
  Description of Artificial Sequence: Synthetic oligonucleotide
gcuaccacuugcuugagac

SEQ ID NO: 2485707 - RNA, 19 nt, Artificial Sequence
  Description of Artificial Sequence: Synthetic oligonucleotide
ugcuugagacaaauguaaa

SEQ ID NO: 2485708 - RNA, 19 nt, Artificial Sequence
  Description of Artificial Sequence: Synthetic oligonucleotide
ugcugugccacuugcgcug

SEQ ID NO: 2485709 - RNA, 19 nt, Artificial Sequence
  Description of Artificial Sequence: Synthetic oligonucleotide
gaccccuugaacagaaagc

SEQ ID NO: 2485710 - RNA, 19 nt, Artificial Sequence
  Description of Artificial Sequence: Synthetic oligonucleotide
cccaauacccucaaucggg

SEQ ID NO: 2485711 - RNA, 19 nt, Artificial Sequence
  Description of Artificial Sequence: Synthetic oligonucleotide
uccguuuguagugugugga

SEQ ID NO: 2485712 - RNA, 19 nt, Artificial Sequence
  Description of Artificial Sequence: Synthetic oligonucleotide
uggcuguauaccuagcuuu

SEQ ID NO: 2485713 - RNA, 19 nt, Artificial Sequence
  Description of Artificial Sequence: Synthetic oligonucleotide
agcgcuuggcuccccagcg

SEQ ID NO: 2485714 - RNA, 19 nt, Artificial Sequence
  Description of Artificial Sequence: Synthetic oligonucleotide
auccguuuguagugugugg

SEQ ID NO: 2485715 - RNA, 19 nt, Artificial Sequence
  Description of Artificial Sequence: Synthetic oligonucleotide
uggaccacggcgaucugac

SEQ ID NO: 2485716 - RNA, 19 nt, Artificial Sequence
  Description of Artificial Sequence: Synthetic oligonucleotide
gaauugugagagcuaccac

SEQ ID NO: 2485717 - RNA, 19 nt, Artificial Sequence
  Description of Artificial Sequence: Synthetic oligonucleotide
aagagcaaacgcaggcguc

SEQ ID NO: 2485718 - RNA, 19 nt, Artificial Sequence
  Description of Artificial Sequence: Synthetic oligonucleotide
auuugacaccugugucacc

SEQ ID NO: 2485719 - RNA, 19 nt, Artificial Sequence
  Description of Artificial Sequence: Synthetic oligonucleotide
agugucggccacuggugac

SEQ ID NO: 2485720 - RNA, 19 nt, Artificial Sequence
  Description of Artificial Sequence: Synthetic oligonucleotide
cacuucuaguccugagugg

SEQ ID NO: 2485721 - RNA, 19 nt, Artificial Sequence
  Description of Artificial Sequence: Synthetic oligonucleotide
uucucugguugcccaauac

SEQ ID NO: 2485722 - RNA, 19 nt, Artificial Sequence
  Description of Artificial Sequence: Synthetic oligonucleotide
uuggcuguauaccuagcuu

SEQ ID NO: 2485723 - RNA, 19 nt, Artificial Sequence
  Description of Artificial Sequence: Synthetic oligonucleotide
cuguauaccuagcuuucac

SEQ ID NO: 2485724 - RNA, 19 nt, Artificial Sequence
  Description of Artificial Sequence: Synthetic oligonucleotide
caccuuuaaagagugccag

SEQ ID NO: 2485725 - RNA, 19 nt, Artificial Sequence
  Description of Artificial Sequence: Synthetic oligonucleotide
gaacacccaggagcgaucg

SEQ ID NO: 2485726 - RNA, 19 nt, Artificial Sequence
  Description of Artificial Sequence: Synthetic oligonucleotide
uuaggccgcauuagagccc

SEQ ID NO: 2485727 - RNA, 19 nt, Artificial Sequence
  Description of Artificial Sequence: Synthetic oligonucleotide
ggagcgaucgucagcaccg

SEQ ID NO: 2485728 - RNA, 19 nt, Artificial Sequence
  Description of Artificial Sequence: Synthetic oligonucleotide
cuugcuugagacaaaugua

SEQ ID NO: 2485729 - RNA, 19 nt, Artificial Sequence
  Description of Artificial Sequence: Synthetic oligonucleotide
uuguaguguguggaccacg

SEQ ID NO: 2485730 - RNA, 19 nt, Artificial Sequence
  Description of Artificial Sequence: Synthetic oligonucleotide
acagcguuagaccccuuga

SEQ ID NO: 2485731 - RNA, 19 nt, Artificial Sequence
  Description of Artificial Sequence: Synthetic oligonucleotide
agcaccgacgcagcugucc

SEQ ID NO: 2485732 - RNA, 19 nt, Artificial Sequence
  Description of Artificial Sequence: Synthetic oligonucleotide
cugaauugugagagcuacc

SEQ ID NO: 2485733 - RNA, 19 nt, Artificial Sequence
  Description of Artificial Sequence: Synthetic oligonucleotide
ugaccggggugucugcgag

SEQ ID NO: 2485734 - RNA, 19 nt, Artificial Sequence
  Description of Artificial Sequence: Synthetic oligonucleotide
gcacuucuaguccugagug

SEQ ID NO: 2485735 - RNA, 19 nt, Artificial Sequence
  Description of Artificial Sequence: Synthetic oligonucleotide
ccuuuaaagagugccaggc

SEQ ID NO: 2485736 - RNA, 19 nt, Artificial Sequence
  Description of Artificial Sequence: Synthetic oligonucleotide
aucggggcuuucucguugg

SEQ ID NO: 2485737 - RNA, 19 nt, Artificial Sequence
  Description of Artificial Sequence: Synthetic oligonucleotide
cccuugaacagaaagcaug

SEQ ID NO: 2485738 - RNA, 19 nt, Artificial Sequence
  Description of Artificial Sequence: Synthetic oligonucleotide
uccaucccaaagagcaaac

SEQ ID NO: 2485739 - RNA, 19 nt, Artificial Sequence
  Description of Artificial Sequence: Synthetic oligonucleotide
uagugucggccacugguga

SEQ ID NO: 2485740 - RNA, 19 nt, Artificial Sequence
  Description of Artificial Sequence: Synthetic oligonucleotide
acggcgaucugacucacau

SEQ ID NO: 2485741 - RNA, 19 nt, Artificial Sequence
  Description of Artificial Sequence: Synthetic oligonucleotide
ucggccacuggugaccggg

SEQ ID NO: 2485742 - RNA, 19 nt, Artificial Sequence
  Description of Artificial Sequence: Synthetic oligonucleotide
guggguuccagucccacca

SEQ ID NO: 2485743 - RNA, 19 nt, Artificial Sequence
  Description of Artificial Sequence: Synthetic oligonucleotide
uugccucauaguccagcag

SEQ ID NO: 2485744 - RNA, 19 nt, Artificial Sequence
  Description of Artificial Sequence: Synthetic oligonucleotide
cuuugccucauaguccagc

SEQ ID NO: 2485745 - RNA, 19 nt, Artificial Sequence
  Description of Artificial Sequence: Synthetic oligonucleotide
aaauccguuuguagugugu

SEQ ID NO: 2485746 - RNA, 19 nt, Artificial Sequence
  Description of Artificial Sequence: Synthetic oligonucleotide
caugagcaugauuaaggga

SEQ ID NO: 2485747 - RNA, 19 nt, Artificial Sequence
  Description of Artificial Sequence: Synthetic oligonucleotide
uugugagagcuaccacuug

SEQ ID NO: 2485748 - RNA, 19 nt, Artificial Sequence
  Description of Artificial Sequence: Synthetic oligonucleotide
agcuucuuugccucauagu

SEQ ID NO: 2485749 - RNA, 19 nt, Artificial Sequence
  Description of Artificial Sequence: Synthetic oligonucleotide
cucguuggccaacaugcug

SEQ ID NO: 2485750 - RNA, 19 nt, Artificial Sequence
  Description of Artificial Sequence: Synthetic oligonucleotide
cugguugcccaauacccuc

SEQ ID NO: 2485751 - RNA, 19 nt, Artificial Sequence
  Description of Artificial Sequence: Synthetic oligonucleotide
ggcauaggagaacacccag

SEQ ID NO: 2485752 - RNA, 19 nt, Artificial Sequence
  Description of Artificial Sequence: Synthetic oligonucleotide
guuccagucccaccaggcc

SEQ ID NO: 2485753 - RNA, 19 nt, Artificial Sequence
  Description of Artificial Sequence: Synthetic oligonucleotide
ugguugcccaauacccuca

SEQ ID NO: 2485754 - RNA, 19 nt, Artificial Sequence
  Description of Artificial Sequence: Synthetic oligonucleotide
accuagcuuucacagagua

SEQ ID NO: 2485755 - RNA, 19 nt, Artificial Sequence
  Description of Artificial Sequence: Synthetic oligonucleotide
gugucugcgagcaccacug

SEQ ID NO: 2485756 - RNA, 19 nt, Artificial Sequence
  Description of Artificial Sequence: Synthetic oligonucleotide
agggaccagaggaagauga

SEQ ID NO: 2485757 - RNA, 19 nt, Artificial Sequence
  Description of Artificial Sequence: Synthetic oligonucleotide
gaccagaggaagaugacua

SEQ ID NO: 2485758 - RNA, 19 nt, Artificial Sequence
  Description of Artificial Sequence: Synthetic oligonucleotide
cagaggaagaugacuaaaa

SEQ ID NO: 2485759 - RNA, 19 nt, Artificial Sequence
  Description of Artificial Sequence: Synthetic oligonucleotide
gagcgcuucacugugaccu

SEQ ID NO: 2485760 - RNA, 19 nt, Artificial Sequence
  Description of Artificial Sequence: Synthetic oligonucleotide
cacugggccgcggaaaucc

SEQ ID NO: 2485761 - RNA, 19 nt, Artificial Sequence
  Description of Artificial Sequence: Synthetic oligonucleotide
caauacccucaaucggggc

SEQ ID NO: 2485762 - RNA, 19 nt, Artificial Sequence
  Description of Artificial Sequence: Synthetic oligonucleotide
cuaguccugaguggguuag

SEQ ID NO: 2485763 - RNA, 19 nt, Artificial Sequence
  Description of Artificial Sequence: Synthetic oligonucleotide
acuccuauccggaacugcu

SEQ ID NO: 2485764 - RNA, 19 nt, Artificial Sequence
  Description of Artificial Sequence: Synthetic oligonucleotide
uaggccgcauuagagcccc

SEQ ID NO: 2485765 - RNA, 19 nt, Artificial Sequence
  Description of Artificial Sequence: Synthetic oligonucleotide
ucucguuggccaacaugcu

SEQ ID NO: 2485766 - RNA, 19 nt, Artificial Sequence
  Description of Artificial Sequence: Synthetic oligonucleotide
ugugaccucccaguagugu

SEQ ID NO: 2485767 - RNA, 19 nt, Artificial Sequence
  Description of Artificial Sequence: Synthetic oligonucleotide
gacgcagcugucccgggac

SEQ ID NO: 2485768 - RNA, 19 nt, Artificial Sequence
  Description of Artificial Sequence: Synthetic oligonucleotide
ugagagcuaccacuugcuu

SEQ ID NO: 2485769 - RNA, 19 nt, Artificial Sequence
  Description of Artificial Sequence: Synthetic oligonucleotide
uuuguaguguguggaccac

SEQ ID NO: 2485770 - RNA, 19 nt, Artificial Sequence
  Description of Artificial Sequence: Synthetic oligonucleotide
uaaagagugccaggcugcu

SEQ ID NO: 2485771 - RNA, 19 nt, Artificial Sequence
  Description of Artificial Sequence: Synthetic oligonucleotide
augcugugccacuugcgcu

SEQ ID NO: 2485772 - RNA, 19 nt, Artificial Sequence
  Description of Artificial Sequence: Synthetic oligonucleotide
uccacaucugccacuccua

SEQ ID NO: 2485773 - RNA, 19 nt, Artificial Sequence
  Description of Artificial Sequence: Synthetic oligonucleotide
agggacuuaggccgcauua

SEQ ID NO: 2485774 - RNA, 19 nt, Artificial Sequence
  Description of Artificial Sequence: Synthetic oligonucleotide
gcguuagaccccuugaaca

SEQ ID NO: 2485775 - RNA, 19 nt, Artificial Sequence
  Description of Artificial Sequence: Synthetic oligonucleotide
gcccaauacccucaaucgg

SEQ ID NO: 2485776 - RNA, 19 nt, Artificial Sequence
  Description of Artificial Sequence: Synthetic oligonucleotide
ccaauacccucaaucgggg

SEQ ID NO: 2485777 - RNA, 19 nt, Artificial Sequence
  Description of Artificial Sequence: Synthetic oligonucleotide
ucuaguccugaguggguua

SEQ ID NO: 2485778 - RNA, 19 nt, Artificial Sequence
  Description of Artificial Sequence: Synthetic oligonucleotide
ugucggccacuggugaccg

SEQ ID NO: 2485779 - RNA, 19 nt, Artificial Sequence
  Description of Artificial Sequence: Synthetic oligonucleotide
ucgucagcaccgacgcagc

SEQ ID NO: 2485780 - RNA, 19 nt, Artificial Sequence
  Description of Artificial Sequence: Synthetic oligonucleotide
gcauuagagccccuugggc

SEQ ID NO: 2485781 - RNA, 19 nt, Artificial Sequence
  Description of Artificial Sequence: Synthetic oligonucleotide
cacugugaccucccaguag

SEQ ID NO: 2485782 - RNA, 19 nt, Artificial Sequence
  Description of Artificial Sequence: Synthetic oligonucleotide
guagugucggccacuggug

SEQ ID NO: 2485783 - RNA, 19 nt, Artificial Sequence
  Description of Artificial Sequence: Synthetic oligonucleotide
agcgaucgucagcaccgac

SEQ ID NO: 2485784 - RNA, 19 nt, Artificial Sequence
  Description of Artificial Sequence: Synthetic oligonucleotide
gucugcgagcaccacugcc

SEQ ID NO: 2485785 - RNA, 19 nt, Artificial Sequence
  Description of Artificial Sequence: Synthetic oligonucleotide
agcgcuucacugugaccuc

SEQ ID NO: 2485786 - RNA, 19 nt, Artificial Sequence
  Description of Artificial Sequence: Synthetic oligonucleotide
cauaguccagcagcagccc

SEQ ID NO: 2485787 - RNA, 19 nt, Artificial Sequence
  Description of Artificial Sequence: Synthetic oligonucleotide
uuucucugguugcccaaua

SEQ ID NO: 2485788 - RNA, 19 nt, Artificial Sequence
  Description of Artificial Sequence: Synthetic oligonucleotide
gcuugagacaaauguaaaa

SEQ ID NO: 2485789 - RNA, 19 nt, Artificial Sequence
  Description of Artificial Sequence: Synthetic oligonucleotide
ggacauguccacaucugcc

SEQ ID NO: 2485790 - RNA, 19 nt, Artificial Sequence
  Description of Artificial Sequence: Synthetic oligonucleotide
cuccuauccggaacugcug

SEQ ID NO: 2485791 - RNA, 19 nt, Artificial Sequence
  Description of Artificial Sequence: Synthetic oligonucleotide
aguccugaguggguuagca

SEQ ID NO: 2485792 - RNA, 19 nt, Artificial Sequence
  Description of Artificial Sequence: Synthetic oligonucleotide
cugggagcgcuucacugug

SEQ ID NO: 2485793 - RNA, 19 nt, Artificial Sequence
  Description of Artificial Sequence: Synthetic oligonucleotide
caucugccacuccuauccg

SEQ ID NO: 2485794 - RNA, 19 nt, Artificial Sequence
  Description of Artificial Sequence: Synthetic oligonucleotide
agaacacccaggagcgauc

SEQ ID NO: 2485795 - RNA, 19 nt, Artificial Sequence
  Description of Artificial Sequence: Synthetic oligonucleotide
uucuaguccugaguggguu

SEQ ID NO: 2485796 - RNA, 19 nt, Artificial Sequence
  Description of Artificial Sequence: Synthetic oligonucleotide
aguucagggccaccuuggu

SEQ ID NO: 2485797 - RNA, 19 nt, Artificial Sequence
  Description of Artificial Sequence: Synthetic oligonucleotide
ucccggaagcgcuccaagu

SEQ ID NO: 2485798 - RNA, 19 nt, Artificial Sequence
  Description of Artificial Sequence: Synthetic oligonucleotide
ugucugcgagcaccacugc

SEQ ID NO: 2485799 - RNA, 19 nt, Artificial Sequence
  Description of Artificial Sequence: Synthetic oligonucleotide
cagcgguacgaguuccagc

SEQ ID NO: 2485800 - RNA, 19 nt, Artificial Sequence
  Description of Artificial Sequence: Synthetic oligonucleotide
cacuugcuugagacaaaug

SEQ ID NO: 2485801 - RNA, 19 nt, Artificial Sequence
  Description of Artificial Sequence: Synthetic oligonucleotide
uuaagggacuuaggccgca

SEQ ID NO: 2485802 - RNA, 19 nt, Artificial Sequence
  Description of Artificial Sequence: Synthetic oligonucleotide
gcagcucuccaucccaaag

SEQ ID NO: 2485803 - RNA, 19 nt, Artificial Sequence
  Description of Artificial Sequence: Synthetic oligonucleotide
cguuagaccccuugaacag

SEQ ID NO: 2485804 - RNA, 19 nt, Artificial Sequence
  Description of Artificial Sequence: Synthetic oligonucleotide
aacugaauugugagagcua

SEQ ID NO: 2485805 - RNA, 19 nt, Artificial Sequence
  Description of Artificial Sequence: Synthetic oligonucleotide
cacaagggcucccaacuga

SEQ ID NO: 2485806 - RNA, 19 nt, Artificial Sequence
  Description of Artificial Sequence: Synthetic oligonucleotide
caguuugaaacugaugccu

SEQ ID NO: 2485807 - RNA, 19 nt, Artificial Sequence
  Description of Artificial Sequence: Synthetic oligonucleotide
aagggacuuaggccgcauu

SEQ ID NO: 2485808 - RNA, 19 nt, Artificial Sequence
  Description of Artificial Sequence: Synthetic oligonucleotide
gcgaucgucagcaccgacg

SEQ ID NO: 2485809 - RNA, 19 nt, Artificial Sequence
  Description of Artificial Sequence: Synthetic oligonucleotide
caacaugcugugccacuug

SEQ ID NO: 2485810 - RNA, 19 nt, Artificial Sequence
  Description of Artificial Sequence: Synthetic oligonucleotide
cagcgugcaaagggcagcg

SEQ ID NO: 2485811 - RNA, 19 nt, Artificial Sequence
  Description of Artificial Sequence: Synthetic oligonucleotide
caacugaauugugagagcu

SEQ ID NO: 2485812 - RNA, 19 nt, Artificial Sequence
  Description of Artificial Sequence: Synthetic oligonucleotide
ccuagcuuucacagaguag

SEQ ID NO: 2485813 - RNA, 19 nt, Artificial Sequence
  Description of Artificial Sequence: Synthetic oligonucleotide
aacacccaggagcgaucgu

SEQ ID NO: 2485814 - RNA, 19 nt, Artificial Sequence
  Description of Artificial Sequence: Synthetic oligonucleotide
cggaaauccguuuguagug

SEQ ID NO: 2485815 - RNA, 19 nt, Artificial Sequence
  Description of Artificial Sequence: Synthetic oligonucleotide
cuuuaaagagugccaggcu

SEQ ID NO: 2485816 - RNA, 19 nt, Artificial Sequence
  Description of Artificial Sequence: Synthetic oligonucleotide
ccaacugaauugugagagc

SEQ ID NO: 2485817 - RNA, 19 nt, Artificial Sequence
  Description of Artificial Sequence: Synthetic oligonucleotide
caccaggccguauuugaca

SEQ ID NO: 2485818 - RNA, 19 nt, Artificial Sequence
  Description of Artificial Sequence: Synthetic oligonucleotide
cacaucugccacuccuauc

SEQ ID NO: 2485819 - RNA, 19 nt, Artificial Sequence
  Description of Artificial Sequence: Synthetic oligonucleotide
gggacuuaggccgcauuag

SEQ ID NO: 2485820 - RNA, 19 nt, Artificial Sequence
  Description of Artificial Sequence: Synthetic oligonucleotide
ucccgggacauguccacau

SEQ ID NO: 2485821 - RNA, 19 nt, Artificial Sequence
  Description of Artificial Sequence: Synthetic oligonucleotide
gcgugcaaagggcagcgcc

SEQ ID NO: 2485822 - RNA, 19 nt, Artificial Sequence
  Description of Artificial Sequence: Synthetic oligonucleotide
cacuccuauccggaacugc

SEQ ID NO: 2485823 - RNA, 19 nt, Artificial Sequence
  Description of Artificial Sequence: Synthetic oligonucleotide
gucagcaccgacgcagcug

SEQ ID NO: 2485824 - RNA, 19 nt, Artificial Sequence
  Description of Artificial Sequence: Synthetic oligonucleotide
cuggugaccggggugucug

SEQ ID NO: 2485825 - RNA, 19 nt, Artificial Sequence
  Description of Artificial Sequence: Synthetic oligonucleotide
cuaccacuugcuugagaca

SEQ ID NO: 2485826 - RNA, 19 nt, Artificial Sequence
  Description of Artificial Sequence: Synthetic oligonucleotide
ugggccgcggaaauccguu

SEQ ID NO: 2485827 - RNA, 19 nt, Artificial Sequence
  Description of Artificial Sequence: Synthetic oligonucleotide
agcuaccacuugcuugaga

SEQ ID NO: 2485828 - RNA, 19 nt, Artificial Sequence
  Description of Artificial Sequence: Synthetic oligonucleotide
uccccagcgguacgaguuc

SEQ ID NO: 2485829 - RNA, 19 nt, Artificial Sequence
  Description of Artificial Sequence: Synthetic oligonucleotide
gugucggccacuggugacc

SEQ ID NO: 2485830 - RNA, 19 nt, Artificial Sequence
  Description of Artificial Sequence: Synthetic oligonucleotide
accggggugucugcgagca

SEQ ID NO: 2485831 - RNA, 19 nt, Artificial Sequence
  Description of Artificial Sequence: Synthetic oligonucleotide
ccgcauuagagccccuugg

SEQ ID NO: 2485832 - RNA, 19 nt, Artificial Sequence
  Description of Artificial Sequence: Synthetic oligonucleotide
agcaaacgcaggcgucacu

SEQ ID NO: 2485833 - RNA, 19 nt, Artificial Sequence
  Description of Artificial Sequence: Synthetic oligonucleotide
agcgugcaaagggcagcgc

SEQ ID NO: 2485834 - RNA, 19 nt, Artificial Sequence
  Description of Artificial Sequence: Synthetic oligonucleotide
ggacuuaggccgcauuaga

SEQ ID NO: 2485835 - RNA, 19 nt, Artificial Sequence
  Description of Artificial Sequence: Synthetic oligonucleotide
gcggaaauccguuuguagu

SEQ ID NO: 2485836 - RNA, 19 nt, Artificial Sequence
  Description of Artificial Sequence: Synthetic oligonucleotide
guggguuagcagcucucca

SEQ ID NO: 2485837 - RNA, 19 nt, Artificial Sequence
  Description of Artificial Sequence: Synthetic oligonucleotide
agcaugauuaagggacuua

SEQ ID NO: 2485838 - RNA, 19 nt, Artificial Sequence
  Description of Artificial Sequence: Synthetic oligonucleotide
cucccggaagcgcuccaag

SEQ ID NO: 2485839 - RNA, 19 nt, Artificial Sequence
  Description of Artificial Sequence: Synthetic oligonucleotide
ccuauccggaacugcuggg

SEQ ID NO: 2485840 - RNA, 19 nt, Artificial Sequence
  Description of Artificial Sequence: Synthetic oligonucleotide
cgcauuagagccccuuggg

SEQ ID NO: 2485841 - RNA, 19 nt, Artificial Sequence
  Description of Artificial Sequence: Synthetic oligonucleotide
cuauccggaacugcuggga

SEQ ID NO: 2485842 - RNA, 19 nt, Artificial Sequence
  Description of Artificial Sequence: Synthetic oligonucleotide
auacccucaaucggggcuu

SEQ ID NO: 2485843 - RNA, 19 nt, Artificial Sequence
  Description of Artificial Sequence: Synthetic oligonucleotide
ucccaccaggccguauuug

SEQ ID NO: 2485844 - RNA, 19 nt, Artificial Sequence
  Description of Artificial Sequence: Synthetic oligonucleotide
guguggaccacggcgaucu

SEQ ID NO: 2485845 - RNA, 19 nt, Artificial Sequence
  Description of Artificial Sequence: Synthetic oligonucleotide
uuagagccccuugggcacu

SEQ ID NO: 2485846 - RNA, 19 nt, Artificial Sequence
  Description of Artificial Sequence: Synthetic oligonucleotide
caccgacgcagcugucccg

SEQ ID NO: 2485847 - RNA, 19 nt, Artificial Sequence
  Description of Artificial Sequence: Synthetic oligonucleotide
uagaccccuugaacagaaa

SEQ ID NO: 2485848 - RNA, 19 nt, Artificial Sequence
  Description of Artificial Sequence: Synthetic oligonucleotide
gagaacacccaggagcgau

SEQ ID NO: 2485849 - RNA, 19 nt, Artificial Sequence
  Description of Artificial Sequence: Synthetic oligonucleotide
caguagugucggccacugg

SEQ ID NO: 2485850 - RNA, 19 nt, Artificial Sequence
  Description of Artificial Sequence: Synthetic oligonucleotide
gagcaaacgcaggcgucac

SEQ ID NO: 2485851 - RNA, 19 nt, Artificial Sequence
  Description of Artificial Sequence: Synthetic oligonucleotide
cguuuguaguguguggacc

SEQ ID NO: 2485852 - RNA, 19 nt, Artificial Sequence
  Description of Artificial Sequence: Synthetic oligonucleotide
gaguggguuagcagcucuc

SEQ ID NO: 2485853 - RNA, 19 nt, Artificial Sequence
  Description of Artificial Sequence: Synthetic oligonucleotide
uguggaccacggcgaucug

SEQ ID NO: 2485854 - RNA, 19 nt, Artificial Sequence
  Description of Artificial Sequence: Synthetic oligonucleotide
ucggggcuuucucguuggc

SEQ ID NO: 2485855 - RNA, 19 nt, Artificial Sequence
  Description of Artificial Sequence: Synthetic oligonucleotide
gugccacuugcgcugggca

SEQ ID NO: 2485856 - RNA, 19 nt, Artificial Sequence
  Description of Artificial Sequence: Synthetic oligonucleotide
gaccggggugucugcgagc

SEQ ID NO: 2485857 - RNA, 19 nt, Artificial Sequence
  Description of Artificial Sequence: Synthetic oligonucleotide
gcgcuccaaguucagggcc

SEQ ID NO: 2485858 - RNA, 19 nt, Artificial Sequence
  Description of Artificial Sequence: Synthetic oligonucleotide
gcaccgacgcagcuguccc

SEQ ID NO: 2485859 - RNA, 19 nt, Artificial Sequence
  Description of Artificial Sequence: Synthetic oligonucleotide
ugcccacucccggaagcgc

SEQ ID NO: 2485860 - RNA, 19 nt, Artificial Sequence
  Description of Artificial Sequence: Synthetic oligonucleotide
acugggccgcggaaauccg

SEQ ID NO: 2485861 - RNA, 19 nt, Artificial Sequence
  Description of Artificial Sequence: Synthetic oligonucleotide
ggcuguauaccuagcuuuc

SEQ ID NO: 2485862 - RNA, 19 nt, Artificial Sequence
  Description of Artificial Sequence: Synthetic oligonucleotide
gggagcgcuucacugugac

SEQ ID NO: 2485863 - RNA, 19 nt, Artificial Sequence
  Description of Artificial Sequence: Synthetic oligonucleotide
uguguggaccacggcgauc

SEQ ID NO: 2485864 - RNA, 19 nt, Artificial Sequence
  Description of Artificial Sequence: Synthetic oligonucleotide
ugguggguuccagucccac

SEQ ID NO: 2485865 - RNA, 19 nt, Artificial Sequence
  Description of Artificial Sequence: Synthetic oligonucleotide
cagcguuagaccccuugaa

SEQ ID NO: 2485866 - RNA, 19 nt, Artificial Sequence
  Description of Artificial Sequence: Synthetic oligonucleotide
ggcacuucuaguccugagu

SEQ ID NO: 2485867 - RNA, 19 nt, Artificial Sequence
  Description of Artificial Sequence: Synthetic oligonucleotide
gccgcauuagagccccuug

SEQ ID NO: 2485868 - RNA, 19 nt, Artificial Sequence
  Description of Artificial Sequence: Synthetic oligonucleotide
gaacugcugggagcgcuuc

SEQ ID NO: 2485869 - RNA, 19 nt, Artificial Sequence
  Description of Artificial Sequence: Synthetic oligonucleotide
ggccgcggaaauccguuug

SEQ ID NO: 2485870 - RNA, 19 nt, Artificial Sequence
  Description of Artificial Sequence: Synthetic oligonucleotide
ccaggagcgaucgucagca

SEQ ID NO: 2485871 - RNA, 19 nt, Artificial Sequence
  Description of Artificial Sequence: Synthetic oligonucleotide
ccguuuguaguguguggac

SEQ ID NO: 2485872 - RNA, 19 nt, Artificial Sequence
  Description of Artificial Sequence: Synthetic oligonucleotide
uaagggacuuaggccgcau

SEQ ID NO: 2485873 - RNA, 19 nt, Artificial Sequence
  Description of Artificial Sequence: Synthetic oligonucleotide
cugcgagcaccacugccca

SEQ ID NO: 2485874 - RNA, 19 nt, Artificial Sequence
  Description of Artificial Sequence: Synthetic oligonucleotide
gcucccaacugaauuguga

SEQ ID NO: 2485875 - RNA, 19 nt, Artificial Sequence
  Description of Artificial Sequence: Synthetic oligonucleotide
agccccacuuucucugguu

SEQ ID NO: 2485876 - RNA, 19 nt, Artificial Sequence
  Description of Artificial Sequence: Synthetic oligonucleotide
caggccguauuugacaccu

SEQ ID NO: 2485877 - RNA, 19 nt, Artificial Sequence
  Description of Artificial Sequence: Synthetic oligonucleotide
ggagcgcuucacugugacc

SEQ ID NO: 2485878 - RNA, 19 nt, Artificial Sequence
  Description of Artificial Sequence: Synthetic oligonucleotide
gccguauuugacaccugug

SEQ ID NO: 2485879 - RNA, 19 nt, Artificial Sequence
  Description of Artificial Sequence: Synthetic oligonucleotide
uccgggcguccccggcagg

SEQ ID NO: 2485880 - RNA, 19 nt, Artificial Sequence
  Description of Artificial Sequence: Synthetic oligonucleotide
gugaccggggugucugcga

SEQ ID NO: 2485881 - RNA, 19 nt, Artificial Sequence
  Description of Artificial Sequence: Synthetic oligonucleotide
cuccgggcguccccggcag

SEQ ID NO: 2485882 - RNA, 19 nt, Artificial Sequence
  Description of Artificial Sequence: Synthetic oligonucleotide
gugagagcuaccacuugcu

SEQ ID NO: 2485883 - RNA, 19 nt, Artificial Sequence
  Description of Artificial Sequence: Synthetic oligonucleotide
ccccacuuucucugguugc

SEQ ID NO: 2485884 - RNA, 19 nt, Artificial Sequence
  Description of Artificial Sequence: Synthetic oligonucleotide
ccggaagcgcuccaaguuc

SEQ ID NO: 2485885 - RNA, 19 nt, Artificial Sequence
  Description of Artificial Sequence: Synthetic oligonucleotide
cgguacgaguuccagcagc

SEQ ID NO: 2485886 - RNA, 19 nt, Artificial Sequence
  Description of Artificial Sequence: Synthetic oligonucleotide
gagcuaccacuugcuugag

SEQ ID NO: 2485887 - RNA, 19 nt, Artificial Sequence
  Description of Artificial Sequence: Synthetic oligonucleotide
ugcgagcaccacugcccac

SEQ ID NO: 2485888 - RNA, 19 nt, Artificial Sequence
  Description of Artificial Sequence: Synthetic oligonucleotide
gcagcgugcaaagggcagc

SEQ ID NO: 2485889 - RNA, 19 nt, Artificial Sequence
  Description of Artificial Sequence: Synthetic oligonucleotide
uggcuccccagcgguacga

SEQ ID NO: 2485890 - RNA, 19 nt, Artificial Sequence
  Description of Artificial Sequence: Synthetic oligonucleotide
guggaccacggcgaucuga

SEQ ID NO: 2485891 - RNA, 19 nt, Artificial Sequence
  Description of Artificial Sequence: Synthetic oligonucleotide
ccaccaggccguauuugac

SEQ ID NO: 2485892 - RNA, 19 nt, Artificial Sequence
  Description of Artificial Sequence: Synthetic oligonucleotide
ggccguauuugacaccugu

SEQ ID NO: 2485893 - RNA, 19 nt, Artificial Sequence
  Description of Artificial Sequence: Synthetic oligonucleotide
ucacugggccgcggaaauc

SEQ ID NO: 2485894 - RNA, 19 nt, Artificial Sequence
  Description of Artificial Sequence: Synthetic oligonucleotide
ccucaaucggggcuuucuc

SEQ ID NO: 2485895 - RNA, 19 nt, Artificial Sequence
  Description of Artificial Sequence: Synthetic oligonucleotide
cuucuaguccugagugggu

SEQ ID NO: 2485896 - RNA, 19 nt, Artificial Sequence
  Description of Artificial Sequence: Synthetic oligonucleotide
gcuguauaccuagcuuuca

SEQ ID NO: 2485897 - RNA, 19 nt, Artificial Sequence
  Description of Artificial Sequence: Synthetic oligonucleotide
ggugucugcgagcaccacu

SEQ ID NO: 2485898 - RNA, 19 nt, Artificial Sequence
  Description of Artificial Sequence: Synthetic oligonucleotide
ccguauuugacaccugugu

SEQ ID NO: 2485899 - RNA, 19 nt, Artificial Sequence
  Description of Artificial Sequence: Synthetic oligonucleotide
agcugucccgggacauguc

SEQ ID NO: 2485900 - RNA, 19 nt, Artificial Sequence
  Description of Artificial Sequence: Synthetic oligonucleotide
gucacugggccgcggaaau

SEQ ID NO: 2485901 - RNA, 19 nt, Artificial Sequence
  Description of Artificial Sequence: Synthetic oligonucleotide
gccacuccuauccggaacu

SEQ ID NO: 2485902 - RNA, 19 nt, Artificial Sequence
  Description of Artificial Sequence: Synthetic oligonucleotide
gucggccacuggugaccgg

SEQ ID NO: 2485903 - RNA, 19 nt, Artificial Sequence
  Description of Artificial Sequence: Synthetic oligonucleotide
cuccccagcgguacgaguu

SEQ ID NO: 2485904 - RNA, 19 nt, Artificial Sequence
  Description of Artificial Sequence: Synthetic oligonucleotide
gcgcuuggcuccccagcgg

SEQ ID NO: 2485905 - RNA, 19 nt, Artificial Sequence
  Description of Artificial Sequence: Synthetic oligonucleotide
cugugccacuugcgcuggg

SEQ ID NO: 2485906 - RNA, 19 nt, Artificial Sequence
  Description of Artificial Sequence: Synthetic oligonucleotide
ccaggccguauuugacacc

SEQ ID NO: 2485907 - RNA, 19 nt, Artificial Sequence
  Description of Artificial Sequence: Synthetic oligonucleotide
gcgguacgaguuccagcag

SEQ ID NO: 2485908 - RNA, 19 nt, Artificial Sequence
  Description of Artificial Sequence: Synthetic oligonucleotide
gagcgaucgucagcaccga

SEQ ID NO: 2485909 - RNA, 19 nt, Artificial Sequence
  Description of Artificial Sequence: Synthetic oligonucleotide
gagcaugauuaagggacuu

SEQ ID NO: 2485910 - RNA, 19 nt, Artificial Sequence
  Description of Artificial Sequence: Synthetic oligonucleotide
cacauccaccaggcucagc

SEQ ID NO: 2485911 - RNA, 19 nt, Artificial Sequence
  Description of Artificial Sequence: Synthetic oligonucleotide
gcaccacugcccacucccg

SEQ ID NO: 2485912 - RNA, 19 nt, Artificial Sequence
  Description of Artificial Sequence: Synthetic oligonucleotide
gguugcccaauacccucaa

SEQ ID NO: 2485913 - RNA, 19 nt, Artificial Sequence
  Description of Artificial Sequence: Synthetic oligonucleotide
caccugugucaccuuuaaa

SEQ ID NO: 2485914 - RNA, 19 nt, Artificial Sequence
  Description of Artificial Sequence: Synthetic oligonucleotide
ggcgucacugggccgcgga

SEQ ID NO: 2485915 - RNA, 19 nt, Artificial Sequence
  Description of Artificial Sequence: Synthetic oligonucleotide
cguuggccaacaugcugug

SEQ ID NO: 2485916 - RNA, 19 nt, Artificial Sequence
  Description of Artificial Sequence: Synthetic oligonucleotide
agccccuugggcacuucua

SEQ ID NO: 2485917 - RNA, 19 nt, Artificial Sequence
  Description of Artificial Sequence: Synthetic oligonucleotide
cacggcgaucugacucaca

SEQ ID NO: 2485918 - RNA, 19 nt, Artificial Sequence
  Description of Artificial Sequence: Synthetic oligonucleotide
gaguuccagcagcgugcaa

SEQ ID NO: 2485919 - RNA, 19 nt, Artificial Sequence
  Description of Artificial Sequence: Synthetic oligonucleotide
gccaacaugcugugccacu

SEQ ID NO: 2485920 - RNA, 19 nt, Artificial Sequence
  Description of Artificial Sequence: Synthetic oligonucleotide
aggccguauuugacaccug

SEQ ID NO: 2485921 - RNA, 19 nt, Artificial Sequence
  Description of Artificial Sequence: Synthetic oligonucleotide
uacccucaaucggggcuuu

SEQ ID NO: 2485922 - RNA, 19 nt, Artificial Sequence
  Description of Artificial Sequence: Synthetic oligonucleotide
guugcccaauacccucaau

SEQ ID NO: 2485923 - RNA, 19 nt, Artificial Sequence
  Description of Artificial Sequence: Synthetic oligonucleotide
uagagccccuugggcacuu

SEQ ID NO: 2485924 - RNA, 19 nt, Artificial Sequence
  Description of Artificial Sequence: Synthetic oligonucleotide
guacgaguuccagcagcgu

SEQ ID NO: 2485925 - RNA, 19 nt, Artificial Sequence
  Description of Artificial Sequence: Synthetic oligonucleotide
aggcgucacugggccgcgg

SEQ ID NO: 2485926 - RNA, 19 nt, Artificial Sequence
  Description of Artificial Sequence: Synthetic oligonucleotide
caagggcucccaacugaau

SEQ ID NO: 2485927 - RNA, 19 nt, Artificial Sequence
  Description of Artificial Sequence: Synthetic oligonucleotide
ccaccuugguggguuccag

SEQ ID NO: 2485928 - RNA, 19 nt, Artificial Sequence
  Description of Artificial Sequence: Synthetic oligonucleotide
aaacagcguuagaccccuu

SEQ ID NO: 2485929 - RNA, 19 nt, Artificial Sequence
  Description of Artificial Sequence: Synthetic oligonucleotide
ggagaacacccaggagcga

SEQ ID NO: 2485930 - RNA, 19 nt, Artificial Sequence
  Description of Artificial Sequence: Synthetic oligonucleotide
gcgaucugacucacaucca

SEQ ID NO: 2485931 - RNA, 19 nt, Artificial Sequence
  Description of Artificial Sequence: Synthetic oligonucleotide
gccgcggaaauccguuugu

SEQ ID NO: 2485932 - RNA, 19 nt, Artificial Sequence
  Description of Artificial Sequence: Synthetic oligonucleotide
cugggccgcggaaauccgu

SEQ ID NO: 2485933 - RNA, 19 nt, Artificial Sequence
  Description of Artificial Sequence: Synthetic oligonucleotide
caaucggggcuuucucguu

SEQ ID NO: 2485934 - RNA, 19 nt, Artificial Sequence
  Description of Artificial Sequence: Synthetic oligonucleotide
ccccagcgguacgaguucc

SEQ ID NO: 2485935 - RNA, 19 nt, Artificial Sequence
  Description of Artificial Sequence: Synthetic oligonucleotide
cggggcuuucucguuggcc

SEQ ID NO: 2485936 - RNA, 19 nt, Artificial Sequence
  Description of Artificial Sequence: Synthetic oligonucleotide
cugcugggagcgcuucacu

SEQ ID NO: 2485937 - RNA, 19 nt, Artificial Sequence
  Description of Artificial Sequence: Synthetic oligonucleotide
cacucccggaagcgcucca

SEQ ID NO: 2485938 - RNA, 19 nt, Artificial Sequence
  Description of Artificial Sequence: Synthetic oligonucleotide
ccgggacauguccacaucu

SEQ ID NO: 2485939 - RNA, 19 nt, Artificial Sequence
  Description of Artificial Sequence: Synthetic oligonucleotide
cccgggacauguccacauc

SEQ ID NO: 2485940 - RNA, 19 nt, Artificial Sequence
  Description of Artificial Sequence: Synthetic oligonucleotide
gcgagcaccacugcccacu

SEQ ID NO: 2485941 - RNA, 19 nt, Artificial Sequence
  Description of Artificial Sequence: Synthetic oligonucleotide
ccacuccuauccggaacug

SEQ ID NO: 2485942 - RNA, 19 nt, Artificial Sequence
  Description of Artificial Sequence: Synthetic oligonucleotide
cauccaccaggcucagcuu

SEQ ID NO: 2485943 - RNA, 19 nt, Artificial Sequence
  Description of Artificial Sequence: Synthetic oligonucleotide
ccacucccggaagcgcucc

SEQ ID NO: 2485944 - RNA, 19 nt, Artificial Sequence
  Description of Artificial Sequence: Synthetic oligonucleotide
cagcaccgacgcagcuguc

SEQ ID NO: 2485945 - RNA, 19 nt, Artificial Sequence
  Description of Artificial Sequence: Synthetic oligonucleotide
ccgacgcagcugucccggg

SEQ ID NO: 2485946 - RNA, 19 nt, Artificial Sequence
  Description of Artificial Sequence: Synthetic oligonucleotide
cggccacuggugaccgggg

SEQ ID NO: 2485947 - RNA, 19 nt, Artificial Sequence
  Description of Artificial Sequence: Synthetic oligonucleotide
cgcaggcgucacugggccg

SEQ ID NO: 2485948 - RNA, 19 nt, Artificial Sequence
  Description of Artificial Sequence: Synthetic oligonucleotide
cggcgaucugacucacauc

SEQ ID NO: 2485949 - RNA, 19 nt, Artificial Sequence
  Description of Artificial Sequence: Synthetic oligonucleotide
cagccccacuuucucuggu

SEQ ID NO: 2485950 - RNA, 19 nt, Artificial Sequence
  Description of Artificial Sequence: Synthetic oligonucleotide
gcgucacugggccgcggaa

SEQ ID NO: 2485951 - RNA, 19 nt, Artificial Sequence
  Description of Artificial Sequence: Synthetic oligonucleotide
cgagcaccacugcccacuc

SEQ ID NO: 2485952 - RNA, 19 nt, Artificial Sequence
  Description of Artificial Sequence: Synthetic oligonucleotide
ccacggcgaucugacucac

SEQ ID NO: 2485953 - RNA, 19 nt, Artificial Sequence
  Description of Artificial Sequence: Synthetic oligonucleotide
ccccuugaacagaaagcau

SEQ ID NO: 2485954 - RNA, 19 nt, Artificial Sequence
  Description of Artificial Sequence: Synthetic oligonucleotide
ggaacugcugggagcgcuu

SEQ ID NO: 2485955 - RNA, 19 nt, Artificial Sequence
  Description of Artificial Sequence: Synthetic oligonucleotide
ccccuugggcacuucuagu

SEQ ID NO: 2485956 - RNA, 19 nt, Artificial Sequence
  Description of Artificial Sequence: Synthetic oligonucleotide
cccucaaucggggcuuucu

SEQ ID NO: 2485957 - RNA, 19 nt, Artificial Sequence
  Description of Artificial Sequence: Synthetic oligonucleotide
ccaacaugcugugccacuu

SEQ ID NO: 2485958 - RNA, 19 nt, Artificial Sequence
  Description of Artificial Sequence: Synthetic oligonucleotide
gcuuggcuccccagcggua

SEQ ID NO: 2485959 - RNA, 19 nt, Artificial Sequence
  Description of Artificial Sequence: Synthetic oligonucleotide
aggccgcauuagagccccu

SEQ ID NO: 2485960 - RNA, 19 nt, Artificial Sequence
  Description of Artificial Sequence: Synthetic oligonucleotide
ccggggugucugcgagcac

SEQ ID NO: 2485961 - RNA, 19 nt, Artificial Sequence
  Description of Artificial Sequence: Synthetic oligonucleotide
ccgcggaaauccguuugua

SEQ ID NO: 2485962 - RNA, 19 nt, Artificial Sequence
  Description of Artificial Sequence: Synthetic oligonucleotide
cgcuuggcuccccagcggu

SEQ ID NO: 2485963 - RNA, 19 nt, Artificial Sequence
  Description of Artificial Sequence: Synthetic oligonucleotide
gggccgcggaaauccguuu

SEQ ID NO: 2485964 - RNA, 19 nt, Artificial Sequence
  Description of Artificial Sequence: Synthetic oligonucleotide
ggccgcauuagagccccuu

SEQ ID NO: 2485965 - RNA, 19 nt, Artificial Sequence
  Description of Artificial Sequence: Synthetic oligonucleotide
cgucagcaccgacgcagcu

SEQ ID NO: 2485966 - RNA, 19 nt, Artificial Sequence
  Description of Artificial Sequence: Synthetic oligonucleotide
ccccagcgcuuggcucccc

SEQ ID NO: 2485967 - RNA, 19 nt, Artificial Sequence
  Description of Artificial Sequence: Synthetic oligonucleotide
cguccccggcagggacccc

SEQ ID NO: 2485968 - RNA, 19 nt, Artificial Sequence
  Description of Artificial Sequence: Synthetic oligonucleotide
aaauacuauacuuugaucc

SEQ ID NO: 2485969 - RNA, 19 nt, Artificial Sequence
  Description of Artificial Sequence: Synthetic oligonucleotide
uauuauaacacuuaaaugg

SEQ ID NO: 2485970 - RNA, 19 nt, Artificial Sequence
  Description of Artificial Sequence: Synthetic oligonucleotide
aacccuauaacccaguagc

SEQ ID NO: 2485971 - RNA, 19 nt, Artificial Sequence
  Description of Artificial Sequence: Synthetic oligonucleotide
ugaaguauggauaagcagg

SEQ ID NO: 2485972 - RNA, 19 nt, Artificial Sequence
  Description of Artificial Sequence: Synthetic oligonucleotide
aggagaaacauuuggagcc

SEQ ID NO: 2485973 - RNA, 19 nt, Artificial Sequence
  Description of Artificial Sequence: Synthetic oligonucleotide
aaugagaaagcucaggagu

SEQ ID NO: 2485974 - RNA, 19 nt, Artificial Sequence
  Description of Artificial Sequence: Synthetic oligonucleotide
uaaaguacgucuucuagcg

SEQ ID NO: 2485975 - RNA, 19 nt, Artificial Sequence
  Description of Artificial Sequence: Synthetic oligonucleotide
uuaaaugugaaguccaccc

SEQ ID NO: 2485976 - RNA, 19 nt, Artificial Sequence
  Description of Artificial Sequence: Synthetic oligonucleotide
aaaauacuauacuuugauc

SEQ ID NO: 2485977 - RNA, 19 nt, Artificial Sequence
  Description of Artificial Sequence: Synthetic oligonucleotide
acucuucuuagacacaucc

SEQ ID NO: 2485978 - RNA, 19 nt, Artificial Sequence
  Description of Artificial Sequence: Synthetic oligonucleotide
aaaugaaugagaaugagaa

SEQ ID NO: 2485979 - RNA, 19 nt, Artificial Sequence
  Description of Artificial Sequence: Synthetic oligonucleotide
uuuaaaguacgucuucuag

SEQ ID NO: 2485980 - RNA, 19 nt, Artificial Sequence
  Description of Artificial Sequence: Synthetic oligonucleotide
auuauaacacuuaaauggc

SEQ ID NO: 2485981 - RNA, 19 nt, Artificial Sequence
  Description of Artificial Sequence: Synthetic oligonucleotide
ucuaacaucaaacuuuaaa

SEQ ID NO: 2485982 - RNA, 19 nt, Artificial Sequence
  Description of Artificial Sequence: Synthetic oligonucleotide
aacuuuuggagcaugucgc

SEQ ID NO: 2485983 - RNA, 19 nt, Artificial Sequence
  Description of Artificial Sequence: Synthetic oligonucleotide
ucuuagaaaccacuuuugg

SEQ ID NO: 2485984 - RNA, 19 nt, Artificial Sequence
  Description of Artificial Sequence: Synthetic oligonucleotide
aagaaguaauaccagaaau

SEQ ID NO: 2485985 - RNA, 19 nt, Artificial Sequence
  Description of Artificial Sequence: Synthetic oligonucleotide
uauaacacuuaaauggcca

SEQ ID NO: 2485986 - RNA, 19 nt, Artificial Sequence
  Description of Artificial Sequence: Synthetic oligonucleotide
aguaauguuuuccugagga

SEQ ID NO: 2485987 - RNA, 19 nt, Artificial Sequence
  Description of Artificial Sequence: Synthetic oligonucleotide
aaguccacccaguagcccc

SEQ ID NO: 2485988 - RNA, 19 nt, Artificial Sequence
  Description of Artificial Sequence: Synthetic oligonucleotide
aauguguaaaucagugacc

SEQ ID NO: 2485989 - RNA, 19 nt, Artificial Sequence
  Description of Artificial Sequence: Synthetic oligonucleotide
aagauacuauuauuauaac

SEQ ID NO: 2485990 - RNA, 19 nt, Artificial Sequence
  Description of Artificial Sequence: Synthetic oligonucleotide
uuaaaguacgucuucuagc

SEQ ID NO: 2485991 - RNA, 19 nt, Artificial Sequence
  Description of Artificial Sequence: Synthetic oligonucleotide
ucuucuagcguaaacuccc

SEQ ID NO: 2485992 - RNA, 19 nt, Artificial Sequence
  Description of Artificial Sequence: Synthetic oligonucleotide
auguguaaaucagugaccc

SEQ ID NO: 2485993 - RNA, 19 nt, Artificial Sequence
  Description of Artificial Sequence: Synthetic oligonucleotide
uggaauaccaccuucaguu

SEQ ID NO: 2485994 - RNA, 19 nt, Artificial Sequence
  Description of Artificial Sequence: Synthetic oligonucleotide
caucaaacuuuaaaguacg

SEQ ID NO: 2485995 - RNA, 19 nt, Artificial Sequence
  Description of Artificial Sequence: Synthetic oligonucleotide
aggagcuuggaauaccacc

SEQ ID NO: 2485996 - RNA, 19 nt, Artificial Sequence
  Description of Artificial Sequence: Synthetic oligonucleotide
ugaaugagaaugagaaagc

SEQ ID NO: 2485997 - RNA, 19 nt, Artificial Sequence
  Description of Artificial Sequence: Synthetic oligonucleotide
caagauacuauuauuauaa

SEQ ID NO: 2485998 - RNA, 19 nt, Artificial Sequence
  Description of Artificial Sequence: Synthetic oligonucleotide
aagacacagggucaugggg

SEQ ID NO: 2485999 - RNA, 19 nt, Artificial Sequence
  Description of Artificial Sequence: Synthetic oligonucleotide
aaugagaaugagaaagcuc

SEQ ID NO: 2486000 - RNA, 19 nt, Artificial Sequence
  Description of Artificial Sequence: Synthetic oligonucleotide
agauacuauuauuauaaca

SEQ ID NO: 2486001 - RNA, 19 nt, Artificial Sequence
  Description of Artificial Sequence: Synthetic oligonucleotide
cucucuaaacuuuuggagc

SEQ ID NO: 2486002 - RNA, 19 nt, Artificial Sequence
  Description of Artificial Sequence: Synthetic oligonucleotide
acaucaaacuuuaaaguac

SEQ ID NO: 2486003 - RNA, 19 nt, Artificial Sequence
  Description of Artificial Sequence: Synthetic oligonucleotide
ucuagcguaaacucccagg

SEQ ID NO: 2486004 - RNA, 19 nt, Artificial Sequence
  Description of Artificial Sequence: Synthetic oligonucleotide
uuauaacacuuaaauggcc

SEQ ID NO: 2486005 - RNA, 19 nt, Artificial Sequence
  Description of Artificial Sequence: Synthetic oligonucleotide
agcguaaacucccaggauc

SEQ ID NO: 2486006 - RNA, 19 nt, Artificial Sequence
  Description of Artificial Sequence: Synthetic oligonucleotide
agaaugagaaagcucagga

SEQ ID NO: 2486007 - RNA, 19 nt, Artificial Sequence
  Description of Artificial Sequence: Synthetic oligonucleotide
gaaguaauaccagaaauga

SEQ ID NO: 2486008 - RNA, 19 nt, Artificial Sequence
  Description of Artificial Sequence: Synthetic oligonucleotide
cauuuggagcccaagauac

SEQ ID NO: 2486009 - RNA, 19 nt, Artificial Sequence
  Description of Artificial Sequence: Synthetic oligonucleotide
gauugaaguauggauaagc

SEQ ID NO: 2486010 - RNA, 19 nt, Artificial Sequence
  Description of Artificial Sequence: Synthetic oligonucleotide
uugaaguauggauaagcag

SEQ ID NO: 2486011 - RNA, 19 nt, Artificial Sequence
  Description of Artificial Sequence: Synthetic oligonucleotide
aaucagauucaaauugagg

SEQ ID NO: 2486012 - RNA, 19 nt, Artificial Sequence
  Description of Artificial Sequence: Synthetic oligonucleotide
uaaacucccaggauccagg

SEQ ID NO: 2486013 - RNA, 19 nt, Artificial Sequence
  Description of Artificial Sequence: Synthetic oligonucleotide
acuauacuuugauccaccc

SEQ ID NO: 2486014 - RNA, 19 nt, Artificial Sequence
  Description of Artificial Sequence: Synthetic oligonucleotide
aaacauuuggagcccaaga

SEQ ID NO: 2486015 - RNA, 19 nt, Artificial Sequence
  Description of Artificial Sequence: Synthetic oligonucleotide
ucucuaaacuuuuggagca

SEQ ID NO: 2486016 - RNA, 19 nt, Artificial Sequence
  Description of Artificial Sequence: Synthetic oligonucleotide
acaguaggaucacaguugg

SEQ ID NO: 2486017 - RNA, 19 nt, Artificial Sequence
  Description of Artificial Sequence: Synthetic oligonucleotide
cuuagacacauccacuucc

SEQ ID NO: 2486018 - RNA, 19 nt, Artificial Sequence
  Description of Artificial Sequence: Synthetic oligonucleotide
uucuucacagucaaggaaa

SEQ ID NO: 2486019 - RNA, 19 nt, Artificial Sequence
  Description of Artificial Sequence: Synthetic oligonucleotide
aaacucccaggauccaggc

SEQ ID NO: 2486020 - RNA, 19 nt, Artificial Sequence
  Description of Artificial Sequence: Synthetic oligonucleotide
gagaauguguaaaucagug

SEQ ID NO: 2486021 - RNA, 19 nt, Artificial Sequence
  Description of Artificial Sequence: Synthetic oligonucleotide
cuuugauccacccugcaac

SEQ ID NO: 2486022 - RNA, 19 nt, Artificial Sequence
  Description of Artificial Sequence: Synthetic oligonucleotide
uucuuagaaaccacuuuug

SEQ ID NO: 2486023 - RNA, 19 nt, Artificial Sequence
  Description of Artificial Sequence: Synthetic oligonucleotide
ucgucuaacaucaaacuuu

SEQ ID NO: 2486024 - RNA, 19 nt, Artificial Sequence
  Description of Artificial Sequence: Synthetic oligonucleotide
uacuauuauuauaacacuu

SEQ ID NO: 2486025 - RNA, 19 nt, Artificial Sequence
  Description of Artificial Sequence: Synthetic oligonucleotide
gguaugucuagauggaggg

SEQ ID NO: 2486026 - RNA, 19 nt, Artificial Sequence
  Description of Artificial Sequence: Synthetic oligonucleotide
aacaguaggaucacaguug

SEQ ID NO: 2486027 - RNA, 19 nt, Artificial Sequence
  Description of Artificial Sequence: Synthetic oligonucleotide
uaaauggccaaaugggcac

SEQ ID NO: 2486028 - RNA, 19 nt, Artificial Sequence
  Description of Artificial Sequence: Synthetic oligonucleotide
ggaaaagaugucugaaugg

SEQ ID NO: 2486029 - RNA, 19 nt, Artificial Sequence
  Description of Artificial Sequence: Synthetic oligonucleotide
ccagaaaugaaugagaaug

SEQ ID NO: 2486030 - RNA, 19 nt, Artificial Sequence
  Description of Artificial Sequence: Synthetic oligonucleotide
auggaggggagccucaagg

SEQ ID NO: 2486031 - RNA, 19 nt, Artificial Sequence
  Description of Artificial Sequence: Synthetic oligonucleotide
uuuuggagcaugucgcuca

SEQ ID NO: 2486032 - RNA, 19 nt, Artificial Sequence
  Description of Artificial Sequence: Synthetic oligonucleotide
aucacaguuggaagaaucc

SEQ ID NO: 2486033 - RNA, 19 nt, Artificial Sequence
  Description of Artificial Sequence: Synthetic oligonucleotide
ucuggguuuaaaugugaag

SEQ ID NO: 2486034 - RNA, 19 nt, Artificial Sequence
  Description of Artificial Sequence: Synthetic oligonucleotide
caaacuuuaaaguacgucu

SEQ ID NO: 2486035 - RNA, 19 nt, Artificial Sequence
  Description of Artificial Sequence: Synthetic oligonucleotide
cagaacaguaggaucacag

SEQ ID NO: 2486036 - RNA, 19 nt, Artificial Sequence
  Description of Artificial Sequence: Synthetic oligonucleotide
gaaguauggauaagcaggc

SEQ ID NO: 2486037 - RNA, 19 nt, Artificial Sequence
  Description of Artificial Sequence: Synthetic oligonucleotide
uggauaagcaggcugggaa

SEQ ID NO: 2486038 - RNA, 19 nt, Artificial Sequence
  Description of Artificial Sequence: Synthetic oligonucleotide
uaaaugugaaguccaccca

SEQ ID NO: 2486039 - RNA, 19 nt, Artificial Sequence
  Description of Artificial Sequence: Synthetic oligonucleotide
guaaaucagugacccaugg

SEQ ID NO: 2486040 - RNA, 19 nt, Artificial Sequence
  Description of Artificial Sequence: Synthetic oligonucleotide
aagcucaggaguucugaag

SEQ ID NO: 2486041 - RNA, 19 nt, Artificial Sequence
  Description of Artificial Sequence: Synthetic oligonucleotide
uacuauacuuugauccacc

SEQ ID NO: 2486042 - RNA, 19 nt, Artificial Sequence
  Description of Artificial Sequence: Synthetic oligonucleotide
guuggaagaauccucaaaa

SEQ ID NO: 2486043 - RNA, 19 nt, Artificial Sequence
  Description of Artificial Sequence: Synthetic oligonucleotide
uaggaucacaguuggaaga

SEQ ID NO: 2486044 - RNA, 19 nt, Artificial Sequence
  Description of Artificial Sequence: Synthetic oligonucleotide
uuccugaggagaaacauuu

SEQ ID NO: 2486045 - RNA, 19 nt, Artificial Sequence
  Description of Artificial Sequence: Synthetic oligonucleotide
aaguacgucuucuagcgua

SEQ ID NO: 2486046 - RNA, 19 nt, Artificial Sequence
  Description of Artificial Sequence: Synthetic oligonucleotide
ugggaaaagcagcacugag

SEQ ID NO: 2486047 - RNA, 19 nt, Artificial Sequence
  Description of Artificial Sequence: Synthetic oligonucleotide
gaaucagauucaaauugag

SEQ ID NO: 2486048 - RNA, 19 nt, Artificial Sequence
  Description of Artificial Sequence: Synthetic oligonucleotide
uuugauccacccugcaacc

SEQ ID NO: 2486049 - RNA, 19 nt, Artificial Sequence
  Description of Artificial Sequence: Synthetic oligonucleotide
agaauguguaaaucaguga

SEQ ID NO: 2486050 - RNA, 19 nt, Artificial Sequence
  Description of Artificial Sequence: Synthetic oligonucleotide
ucugagguuuguaucugug

SEQ ID NO: 2486051 - RNA, 19 nt, Artificial Sequence
  Description of Artificial Sequence: Synthetic oligonucleotide
ucaaacuuuaaaguacguc

SEQ ID NO: 2486052 - RNA, 19 nt, Artificial Sequence
  Description of Artificial Sequence: Synthetic oligonucleotide
auacuauacuuugauccac

SEQ ID NO: 2486053 - RNA, 19 nt, Artificial Sequence
  Description of Artificial Sequence: Synthetic oligonucleotide
agcucaggaguucugaaga

SEQ ID NO: 2486054 - RNA, 19 nt, Artificial Sequence
  Description of Artificial Sequence: Synthetic oligonucleotide
acagaugccacuugucugu

SEQ ID NO: 2486055 - RNA, 19 nt, Artificial Sequence
  Description of Artificial Sequence: Synthetic oligonucleotide
acccugcaacccuauaacc

SEQ ID NO: 2486056 - RNA, 19 nt, Artificial Sequence
  Description of Artificial Sequence: Synthetic oligonucleotide
cugagguuuguaucugugg

SEQ ID NO: 2486057 - RNA, 19 nt, Artificial Sequence
  Description of Artificial Sequence: Synthetic oligonucleotide
aguaggaucacaguuggaa

SEQ ID NO: 2486058 - RNA, 19 nt, Artificial Sequence
  Description of Artificial Sequence: Synthetic oligonucleotide
uaaaucagugacccauggu

SEQ ID NO: 2486059 - RNA, 19 nt, Artificial Sequence
  Description of Artificial Sequence: Synthetic oligonucleotide
uuucuggguuuaaauguga

SEQ ID NO: 2486060 - RNA, 19 nt, Artificial Sequence
  Description of Artificial Sequence: Synthetic oligonucleotide
agaaaccacuuuuggcuuc

SEQ ID NO: 2486061 - RNA, 19 nt, Artificial Sequence
  Description of Artificial Sequence: Synthetic oligonucleotide
agcucucuaaacuuuugga

SEQ ID NO: 2486062 - RNA, 19 nt, Artificial Sequence
  Description of Artificial Sequence: Synthetic oligonucleotide
ucugaauggcacagguaug

SEQ ID NO: 2486063 - RNA, 19 nt, Artificial Sequence
  Description of Artificial Sequence: Synthetic oligonucleotide
agaacaguaggaucacagu

SEQ ID NO: 2486064 - RNA, 19 nt, Artificial Sequence
  Description of Artificial Sequence: Synthetic oligonucleotide
acugagagaauguguaaau

SEQ ID NO: 2486065 - RNA, 19 nt, Artificial Sequence
  Description of Artificial Sequence: Synthetic oligonucleotide
agcuuggaauaccaccuuc

SEQ ID NO: 2486066 - RNA, 19 nt, Artificial Sequence
  Description of Artificial Sequence: Synthetic oligonucleotide
gagguuuguaucuguggug

SEQ ID NO: 2486067 - RNA, 19 nt, Artificial Sequence
  Description of Artificial Sequence: Synthetic oligonucleotide
gcucucuaaacuuuuggag

SEQ ID NO: 2486068 - RNA, 19 nt, Artificial Sequence
  Description of Artificial Sequence: Synthetic oligonucleotide
gaauaccaccuucaguuuc

SEQ ID NO: 2486069 - RNA, 19 nt, Artificial Sequence
  Description of Artificial Sequence: Synthetic oligonucleotide
uguuuuccugaggagaaac

SEQ ID NO: 2486070 - RNA, 19 nt, Artificial Sequence
  Description of Artificial Sequence: Synthetic oligonucleotide
aaacuuuaaaguacgucuu

SEQ ID NO: 2486071 - RNA, 19 nt, Artificial Sequence
  Description of Artificial Sequence: Synthetic oligonucleotide
uuuugccucgucuaacauc

SEQ ID NO: 2486072 - RNA, 19 nt, Artificial Sequence
  Description of Artificial Sequence: Synthetic oligonucleotide
aaagcucaggaguucugaa

SEQ ID NO: 2486073 - RNA, 19 nt, Artificial Sequence
  Description of Artificial Sequence: Synthetic oligonucleotide
acuauuauuauaacacuua

SEQ ID NO: 2486074 - RNA, 19 nt, Artificial Sequence
  Description of Artificial Sequence: Synthetic oligonucleotide
auaacacuuaaauggccaa

SEQ ID NO: 2486075 - RNA, 19 nt, Artificial Sequence
  Description of Artificial Sequence: Synthetic oligonucleotide
agaaucagauucaaauuga

SEQ ID NO: 2486076 - RNA, 19 nt, Artificial Sequence
  Description of Artificial Sequence: Synthetic oligonucleotide
gaaacauuuggagcccaag

SEQ ID NO: 2486077 - RNA, 19 nt, Artificial Sequence
  Description of Artificial Sequence: Synthetic oligonucleotide
augucugaauggcacaggu

SEQ ID NO: 2486078 - RNA, 19 nt, Artificial Sequence
  Description of Artificial Sequence: Synthetic oligonucleotide
gacaccaugccuucuucac

SEQ ID NO: 2486079 - RNA, 19 nt, Artificial Sequence
  Description of Artificial Sequence: Synthetic oligonucleotide
aauggcacagguaugucua

SEQ ID NO: 2486080 - RNA, 19 nt, Artificial Sequence
  Description of Artificial Sequence: Synthetic oligonucleotide
cacaguuggaagaauccuc

SEQ ID NO: 2486081 - RNA, 19 nt, Artificial Sequence
  Description of Artificial Sequence: Synthetic oligonucleotide
acagaagcgaggccacagg

SEQ ID NO: 2486082 - RNA, 19 nt, Artificial Sequence
  Description of Artificial Sequence: Synthetic oligonucleotide
acuuuaaaguacgucuucu

SEQ ID NO: 2486083 - RNA, 19 nt, Artificial Sequence
  Description of Artificial Sequence: Synthetic oligonucleotide
aaaguacgucuucuagcgu

SEQ ID NO: 2486084 - RNA, 19 nt, Artificial Sequence
  Description of Artificial Sequence: Synthetic oligonucleotide
aucaggagcuuggaauacc

SEQ ID NO: 2486085 - RNA, 19 nt, Artificial Sequence
  Description of Artificial Sequence: Synthetic oligonucleotide
cacagucaaggaaaacccc

SEQ ID NO: 2486086 - RNA, 19 nt, Artificial Sequence
  Description of Artificial Sequence: Synthetic oligonucleotide
cuagcguaaacucccagga

SEQ ID NO: 2486087 - RNA, 19 nt, Artificial Sequence
  Description of Artificial Sequence: Synthetic oligonucleotide
auacuuugauccacccugc

SEQ ID NO: 2486088 - RNA, 19 nt, Artificial Sequence
  Description of Artificial Sequence: Synthetic oligonucleotide
cagaaaugaaugagaauga

SEQ ID NO: 2486089 - RNA, 19 nt, Artificial Sequence
  Description of Artificial Sequence: Synthetic oligonucleotide
aguuggaagaauccucaaa

SEQ ID NO: 2486090 - RNA, 19 nt, Artificial Sequence
  Description of Artificial Sequence: Synthetic oligonucleotide
uuuggagcaugucgcucag

SEQ ID NO: 2486091 - RNA, 19 nt, Artificial Sequence
  Description of Artificial Sequence: Synthetic oligonucleotide
uucuagcguaaacucccag

SEQ ID NO: 2486092 - RNA, 19 nt, Artificial Sequence
  Description of Artificial Sequence: Synthetic oligonucleotide
agaugucugaauggcacag

SEQ ID NO: 2486093 - RNA, 19 nt, Artificial Sequence
  Description of Artificial Sequence: Synthetic oligonucleotide
gaagcgaggccacaggaaa

SEQ ID NO: 2486094 - RNA, 19 nt, Artificial Sequence
  Description of Artificial Sequence: Synthetic oligonucleotide
aacccaguagccauucuga

SEQ ID NO: 2486095 - RNA, 19 nt, Artificial Sequence
  Description of Artificial Sequence: Synthetic oligonucleotide
agguuuguaucugugguga

SEQ ID NO: 2486096 - RNA, 19 nt, Artificial Sequence
  Description of Artificial Sequence: Synthetic oligonucleotide
auaccagaaaugaaugaga

SEQ ID NO: 2486097 - RNA, 19 nt, Artificial Sequence
  Description of Artificial Sequence: Synthetic oligonucleotide
ucacaguuggaagaauccu

SEQ ID NO: 2486098 - RNA, 19 nt, Artificial Sequence
  Description of Artificial Sequence: Synthetic oligonucleotide
aaugugaaguccacccagu

SEQ ID NO: 2486099 - RNA, 19 nt, Artificial Sequence
  Description of Artificial Sequence: Synthetic oligonucleotide
uuuggagcccaagauacua

SEQ ID NO: 2486100 - RNA, 19 nt, Artificial Sequence
  Description of Artificial Sequence: Synthetic oligonucleotide
uacgucuucuagcguaaac

SEQ ID NO: 2486101 - RNA, 19 nt, Artificial Sequence
  Description of Artificial Sequence: Synthetic oligonucleotide
uguguaaaucagugaccca

SEQ ID NO: 2486102 - RNA, 19 nt, Artificial Sequence
  Description of Artificial Sequence: Synthetic oligonucleotide
ggagccucaaggcaagaag

SEQ ID NO: 2486103 - RNA, 19 nt, Artificial Sequence
  Description of Artificial Sequence: Synthetic oligonucleotide
aauggccaaaugggcacag

SEQ ID NO: 2486104 - RNA, 19 nt, Artificial Sequence
  Description of Artificial Sequence: Synthetic oligonucleotide
acuuuuggagcaugucgcu

SEQ ID NO: 2486105 - RNA, 19 nt, Artificial Sequence
  Description of Artificial Sequence: Synthetic oligonucleotide
uagaaaccacuuuuggcuu

SEQ ID NO: 2486106 - RNA, 19 nt, Artificial Sequence
  Description of Artificial Sequence: Synthetic oligonucleotide
gauccaggcacucuucuua

SEQ ID NO: 2486107 - RNA, 19 nt, Artificial Sequence
  Description of Artificial Sequence: Synthetic oligonucleotide
gucuagauggaggggagcc

SEQ ID NO: 2486108 - RNA, 19 nt, Artificial Sequence
  Description of Artificial Sequence: Synthetic oligonucleotide
cacccaguagccccggacg

SEQ ID NO: 2486109 - RNA, 19 nt, Artificial Sequence
  Description of Artificial Sequence: Synthetic oligonucleotide
cuggguuuaaaugugaagu

SEQ ID NO: 2486110 - RNA, 19 nt, Artificial Sequence
  Description of Artificial Sequence: Synthetic oligonucleotide
uaucuguggugaacauuug

SEQ ID NO: 2486111 - RNA, 19 nt, Artificial Sequence
  Description of Artificial Sequence: Synthetic oligonucleotide
caagaaguaauaccagaaa

SEQ ID NO: 2486112 - RNA, 19 nt, Artificial Sequence
  Description of Artificial Sequence: Synthetic oligonucleotide
ugccacuugucuguggucu

SEQ ID NO: 2486113 - RNA, 19 nt, Artificial Sequence
  Description of Artificial Sequence: Synthetic oligonucleotide
gaacaguaggaucacaguu

SEQ ID NO: 2486114 - RNA, 19 nt, Artificial Sequence
  Description of Artificial Sequence: Synthetic oligonucleotide
guaaacucccaggauccag

SEQ ID NO: 2486115 - RNA, 19 nt, Artificial Sequence
  Description of Artificial Sequence: Synthetic oligonucleotide
acuuugauccacccugcaa

SEQ ID NO: 2486116 - RNA, 19 nt, Artificial Sequence
  Description of Artificial Sequence: Synthetic oligonucleotide
gucuucuagcguaaacucc

SEQ ID NO: 2486117 - RNA, 19 nt, Artificial Sequence
  Description of Artificial Sequence: Synthetic oligonucleotide
uccacuucccaguaauguu

SEQ ID NO: 2486118 - RNA, 19 nt, Artificial Sequence
  Description of Artificial Sequence: Synthetic oligonucleotide
cacccugcaacccuauaac

SEQ ID NO: 2486119 - RNA, 19 nt, Artificial Sequence
  Description of Artificial Sequence: Synthetic oligonucleotide
gaaagcucaggaguucuga

SEQ ID NO: 2486120 - RNA, 19 nt, Artificial Sequence
  Description of Artificial Sequence: Synthetic oligonucleotide
aaaccccaacccgauggag

SEQ ID NO: 2486121 - RNA, 19 nt, Artificial Sequence
  Description of Artificial Sequence: Synthetic oligonucleotide
uacuuugauccacccugca

SEQ ID NO: 2486122 - RNA, 19 nt, Artificial Sequence
  Description of Artificial Sequence: Synthetic oligonucleotide
acaggaaaagaugucugaa

SEQ ID NO: 2486123 - RNA, 19 nt, Artificial Sequence
  Description of Artificial Sequence: Synthetic oligonucleotide
gaaugagaaugagaaagcu

SEQ ID NO: 2486124 - RNA, 19 nt, Artificial Sequence
  Description of Artificial Sequence: Synthetic oligonucleotide
guuuguaucuguggugaac

SEQ ID NO: 2486125 - RNA, 19 nt, Artificial Sequence
  Description of Artificial Sequence: Synthetic oligonucleotide
cuucuucacagucaaggaa

SEQ ID NO: 2486126 - RNA, 19 nt, Artificial Sequence
  Description of Artificial Sequence: Synthetic oligonucleotide
cacaggaaaagaugucuga

SEQ ID NO: 2486127 - RNA, 19 nt, Artificial Sequence
  Description of Artificial Sequence: Synthetic oligonucleotide
agcacugagagaaugugua

SEQ ID NO: 2486128 - RNA, 19 nt, Artificial Sequence
  Description of Artificial Sequence: Synthetic oligonucleotide
gaauggcacagguaugucu

SEQ ID NO: 2486129 - RNA, 19 nt, Artificial Sequence
  Description of Artificial Sequence: Synthetic oligonucleotide
ccaguaauguuuuccugag

SEQ ID NO: 2486130 - RNA, 19 nt, Artificial Sequence
  Description of Artificial Sequence: Synthetic oligonucleotide
ugucugaauggcacaggua

SEQ ID NO: 2486131 - RNA, 19 nt, Artificial Sequence
  Description of Artificial Sequence: Synthetic oligonucleotide
uuggagcccaagauacuau

SEQ ID NO: 2486132 - RNA, 19 nt, Artificial Sequence
  Description of Artificial Sequence: Synthetic oligonucleotide
aaccccaacccgauggaga

SEQ ID NO: 2486133 - RNA, 19 nt, Artificial Sequence
  Description of Artificial Sequence: Synthetic oligonucleotide
agaugccacuugucugugg

SEQ ID NO: 2486134 - RNA, 19 nt, Artificial Sequence
  Description of Artificial Sequence: Synthetic oligonucleotide
acggcuguuagcucucuaa

SEQ ID NO: 2486135 - RNA, 19 nt, Artificial Sequence
  Description of Artificial Sequence: Synthetic oligonucleotide
auaagcaggcugggaaaag

SEQ ID NO: 2486136 - RNA, 19 nt, Artificial Sequence
  Description of Artificial Sequence: Synthetic oligonucleotide
cccugcaacccuauaaccc

SEQ ID NO: 2486137 - RNA, 19 nt, Artificial Sequence
  Description of Artificial Sequence: Synthetic oligonucleotide
cuuuaaaguacgucuucua

SEQ ID NO: 2486138 - RNA, 19 nt, Artificial Sequence
  Description of Artificial Sequence: Synthetic oligonucleotide
gauaagcaggcugggaaaa

SEQ ID NO: 2486139 - RNA, 19 nt, Artificial Sequence
  Description of Artificial Sequence: Synthetic oligonucleotide
uguaucuguggugaacauu

SEQ ID NO: 2486140 - RNA, 19 nt, Artificial Sequence
  Description of Artificial Sequence: Synthetic oligonucleotide
cugcaacccuauaacccag

SEQ ID NO: 2486141 - RNA, 19 nt, Artificial Sequence
  Description of Artificial Sequence: Synthetic oligonucleotide
agcccaagauacuauuauu

SEQ ID NO: 2486142 - RNA, 19 nt, Artificial Sequence
  Description of Artificial Sequence: Synthetic oligonucleotide
ugcaacccuauaacccagu

SEQ ID NO: 2486143 - RNA, 19 nt, Artificial Sequence
  Description of Artificial Sequence: Synthetic oligonucleotide
gaucaggagcuuggaauac

SEQ ID NO: 2486144 - RNA, 19 nt, Artificial Sequence
  Description of Artificial Sequence: Synthetic oligonucleotide
cuagauggaggggagccuc

SEQ ID NO: 2486145 - RNA, 19 nt, Artificial Sequence
  Description of Artificial Sequence: Synthetic oligonucleotide
aacccgauggagagggaca

SEQ ID NO: 2486146 - RNA, 19 nt, Artificial Sequence
  Description of Artificial Sequence: Synthetic oligonucleotide
ucuagauggaggggagccu

SEQ ID NO: 2486147 - RNA, 19 nt, Artificial Sequence
  Description of Artificial Sequence: Synthetic oligonucleotide
ugucuagauggaggggagc

SEQ ID NO: 2486148 - RNA, 19 nt, Artificial Sequence
  Description of Artificial Sequence: Synthetic oligonucleotide
aggcaagaaguaauaccag

SEQ ID NO: 2486149 - RNA, 19 nt, Artificial Sequence
  Description of Artificial Sequence: Synthetic oligonucleotide
gugaacauuuggcugauuu

SEQ ID NO: 2486150 - RNA, 19 nt, Artificial Sequence
  Description of Artificial Sequence: Synthetic oligonucleotide
gcuguuagcucucuaaacu

SEQ ID NO: 2486151 - RNA, 19 nt, Artificial Sequence
  Description of Artificial Sequence: Synthetic oligonucleotide
caugucgcucagaucagga

SEQ ID NO: 2486152 - RNA, 19 nt, Artificial Sequence
  Description of Artificial Sequence: Synthetic oligonucleotide
ugggcacagaugccacuug

SEQ ID NO: 2486153 - RNA, 19 nt, Artificial Sequence
  Description of Artificial Sequence: Synthetic oligonucleotide
gaaguccacccaguagccc

SEQ ID NO: 2486154 - RNA, 19 nt, Artificial Sequence
  Description of Artificial Sequence: Synthetic oligonucleotide
guagccauucugagguuug

SEQ ID NO: 2486155 - RNA, 19 nt, Artificial Sequence
  Description of Artificial Sequence: Synthetic oligonucleotide
caugguucgugacauugaa

SEQ ID NO: 2486156 - RNA, 19 nt, Artificial Sequence
  Description of Artificial Sequence: Synthetic oligonucleotide
ggcuguuagcucucuaaac

SEQ ID NO: 2486157 - RNA, 19 nt, Artificial Sequence
  Description of Artificial Sequence: Synthetic oligonucleotide
cagguaugucuagauggag

SEQ ID NO: 2486158 - RNA, 19 nt, Artificial Sequence
  Description of Artificial Sequence: Synthetic oligonucleotide
aucaaacuuuaaaguacgu

SEQ ID NO: 2486159 - RNA, 19 nt, Artificial Sequence
  Description of Artificial Sequence: Synthetic oligonucleotide
augucuagauggaggggag

SEQ ID NO: 2486160 - RNA, 19 nt, Artificial Sequence
  Description of Artificial Sequence: Synthetic oligonucleotide
cuuuuggagcaugucgcuc

SEQ ID NO: 2486161 - RNA, 19 nt, Artificial Sequence
  Description of Artificial Sequence: Synthetic oligonucleotide
gcguaaacucccaggaucc

SEQ ID NO: 2486162 - RNA, 19 nt, Artificial Sequence
  Description of Artificial Sequence: Synthetic oligonucleotide
gagcccaagauacuauuau

SEQ ID NO: 2486163 - RNA, 19 nt, Artificial Sequence
  Description of Artificial Sequence: Synthetic oligonucleotide
augguucgugacauugaag

SEQ ID NO: 2486164 - RNA, 19 nt, Artificial Sequence
  Description of Artificial Sequence: Synthetic oligonucleotide
ccauucugagguuuguauc

SEQ ID NO: 2486165 - RNA, 19 nt, Artificial Sequence
  Description of Artificial Sequence: Synthetic oligonucleotide
caacccgauggagagggac

SEQ ID NO: 2486166 - RNA, 19 nt, Artificial Sequence
  Description of Artificial Sequence: Synthetic oligonucleotide
acccgauggagagggacag

SEQ ID NO: 2486167 - RNA, 19 nt, Artificial Sequence
  Description of Artificial Sequence: Synthetic oligonucleotide
ucgugacauugaagaagga

SEQ ID NO: 2486168 - RNA, 19 nt, Artificial Sequence
  Description of Artificial Sequence: Synthetic oligonucleotide
ugaauggcacagguauguc

SEQ ID NO: 2486169 - RNA, 19 nt, Artificial Sequence
  Description of Artificial Sequence: Synthetic oligonucleotide
aguagccauucugagguuu

SEQ ID NO: 2486170 - RNA, 19 nt, Artificial Sequence
  Description of Artificial Sequence: Synthetic oligonucleotide
caggagcuuggaauaccac

SEQ ID NO: 2486171 - RNA, 19 nt, Artificial Sequence
  Description of Artificial Sequence: Synthetic oligonucleotide
ccaggcacucuucuuagac

SEQ ID NO: 2486172 - RNA, 19 nt, Artificial Sequence
  Description of Artificial Sequence: Synthetic oligonucleotide
caggcacucuucuuagaca

SEQ ID NO: 2486173 - RNA, 19 nt, Artificial Sequence
  Description of Artificial Sequence: Synthetic oligonucleotide
gggucagaacaguaggauc

SEQ ID NO: 2486174 - RNA, 19 nt, Artificial Sequence
  Description of Artificial Sequence: Synthetic oligonucleotide
gagccucaaggcaagaagu

SEQ ID NO: 2486175 - RNA, 19 nt, Artificial Sequence
  Description of Artificial Sequence: Synthetic oligonucleotide
gccucgucuaacaucaaac

SEQ ID NO: 2486176 - RNA, 19 nt, Artificial Sequence
  Description of Artificial Sequence: Synthetic oligonucleotide
cacugagagaauguguaaa

SEQ ID NO: 2486177 - RNA, 19 nt, Artificial Sequence
  Description of Artificial Sequence: Synthetic oligonucleotide
aguagccccggacggcugu

SEQ ID NO: 2486178 - RNA, 19 nt, Artificial Sequence
  Description of Artificial Sequence: Synthetic oligonucleotide
gaggggagccucaaggcaa

SEQ ID NO: 2486179 - RNA, 19 nt, Artificial Sequence
  Description of Artificial Sequence: Synthetic oligonucleotide
cccaacccgauggagaggg

SEQ ID NO: 2486180 - RNA, 19 nt, Artificial Sequence
  Description of Artificial Sequence: Synthetic oligonucleotide
gagaaacauuuggagccca

SEQ ID NO: 2486181 - RNA, 19 nt, Artificial Sequence
  Description of Artificial Sequence: Synthetic oligonucleotide
ucagugacccaugguucgu

SEQ ID NO: 2486182 - RNA, 19 nt, Artificial Sequence
  Description of Artificial Sequence: Synthetic oligonucleotide
gggaaaagcagcacugaga

SEQ ID NO: 2486183 - RNA, 19 nt, Artificial Sequence
  Description of Artificial Sequence: Synthetic oligonucleotide
uggcacagguaugucuaga

SEQ ID NO: 2486184 - RNA, 19 nt, Artificial Sequence
  Description of Artificial Sequence: Synthetic oligonucleotide
cucaggaguucugaagaca

SEQ ID NO: 2486185 - RNA, 19 nt, Artificial Sequence
  Description of Artificial Sequence: Synthetic oligonucleotide
ccugcaacccuauaaccca

SEQ ID NO: 2486186 - RNA, 19 nt, Artificial Sequence
  Description of Artificial Sequence: Synthetic oligonucleotide
auggauaagcaggcuggga

SEQ ID NO: 2486187 - RNA, 19 nt, Artificial Sequence
  Description of Artificial Sequence: Synthetic oligonucleotide
aguacgucuucuagcguaa

SEQ ID NO: 2486188 - RNA, 19 nt, Artificial Sequence
  Description of Artificial Sequence: Synthetic oligonucleotide
cuucuagcguaaacuccca

SEQ ID NO: 2486189 - RNA, 19 nt, Artificial Sequence
  Description of Artificial Sequence: Synthetic oligonucleotide
gugacccaugguucgugac

SEQ ID NO: 2486190 - RNA, 19 nt, Artificial Sequence
  Description of Artificial Sequence: Synthetic oligonucleotide
ccgauggagagggacagcc

SEQ ID NO: 2486191 - RNA, 19 nt, Artificial Sequence
  Description of Artificial Sequence: Synthetic oligonucleotide
cuauacuuugauccacccu

SEQ ID NO: 2486192 - RNA, 19 nt, Artificial Sequence
  Description of Artificial Sequence: Synthetic oligonucleotide
ggauugaaguauggauaag

SEQ ID NO: 2486193 - RNA, 19 nt, Artificial Sequence
  Description of Artificial Sequence: Synthetic oligonucleotide
aggaaaaccccaacccgau

SEQ ID NO: 2486194 - RNA, 19 nt, Artificial Sequence
  Description of Artificial Sequence: Synthetic oligonucleotide
cacucuucuuagacacauc

SEQ ID NO: 2486195 - RNA, 19 nt, Artificial Sequence
  Description of Artificial Sequence: Synthetic oligonucleotide
ggaaaaccccaacccgaug

SEQ ID NO: 2486196 - RNA, 19 nt, Artificial Sequence
  Description of Artificial Sequence: Synthetic oligonucleotide
aagcgaggccacaggaaaa

SEQ ID NO: 2486197 - RNA, 19 nt, Artificial Sequence
  Description of Artificial Sequence: Synthetic oligonucleotide
agccccggacggcuguuag

SEQ ID NO: 2486198 - RNA, 19 nt, Artificial Sequence
  Description of Artificial Sequence: Synthetic oligonucleotide
ggagcuuggaauaccaccu

SEQ ID NO: 2486199 - RNA, 19 nt, Artificial Sequence
  Description of Artificial Sequence: Synthetic oligonucleotide
caggaaaagaugucugaau

SEQ ID NO: 2486200 - RNA, 19 nt, Artificial Sequence
  Description of Artificial Sequence: Synthetic oligonucleotide
agaagcgaggccacaggaa

SEQ ID NO: 2486201 - RNA, 19 nt, Artificial Sequence
  Description of Artificial Sequence: Synthetic oligonucleotide
ggaggggagccucaaggca

SEQ ID NO: 2486202 - RNA, 19 nt, Artificial Sequence
  Description of Artificial Sequence: Synthetic oligonucleotide
ggccaaaugggcacagaug

SEQ ID NO: 2486203 - RNA, 19 nt, Artificial Sequence
  Description of Artificial Sequence: Synthetic oligonucleotide
agcaugucgcucagaucag

SEQ ID NO: 2486204 - RNA, 19 nt, Artificial Sequence
  Description of Artificial Sequence: Synthetic oligonucleotide
gucccaaggauugaaguau

SEQ ID NO: 2486205 - RNA, 19 nt, Artificial Sequence
  Description of Artificial Sequence: Synthetic oligonucleotide
gcuuggaauaccaccuuca

SEQ ID NO: 2486206 - RNA, 19 nt, Artificial Sequence
  Description of Artificial Sequence: Synthetic oligonucleotide
cuguuagcucucuaaacuu

SEQ ID NO: 2486207 - RNA, 19 nt, Artificial Sequence
  Description of Artificial Sequence: Synthetic oligonucleotide
cucgucuaacaucaaacuu

SEQ ID NO: 2486208 - RNA, 19 nt, Artificial Sequence
  Description of Artificial Sequence: Synthetic oligonucleotide
gcucaggaguucugaagac

SEQ ID NO: 2486209 - RNA, 19 nt, Artificial Sequence
  Description of Artificial Sequence: Synthetic oligonucleotide
agaaacauuuggagcccaa

SEQ ID NO: 2486210 - RNA, 19 nt, Artificial Sequence
  Description of Artificial Sequence: Synthetic oligonucleotide
gcccaagauacuauuauua

SEQ ID NO: 2486211 - RNA, 19 nt, Artificial Sequence
  Description of Artificial Sequence: Synthetic oligonucleotide
gucgcucagaucaggagcu

SEQ ID NO: 2486212 - RNA, 19 nt, Artificial Sequence
  Description of Artificial Sequence: Synthetic oligonucleotide
cauugaagaaggacaccau

SEQ ID NO: 2486213 - RNA, 19 nt, Artificial Sequence
  Description of Artificial Sequence: Synthetic oligonucleotide
gcacagaugccacuugucu

SEQ ID NO: 2486214 - RNA, 19 nt, Artificial Sequence
  Description of Artificial Sequence: Synthetic oligonucleotide
cugaagacacagggucaug

SEQ ID NO: 2486215 - RNA, 19 nt, Artificial Sequence
  Description of Artificial Sequence: Synthetic oligonucleotide
gcaugucgcucagaucagg

SEQ ID NO: 2486216 - RNA, 19 nt, Artificial Sequence
  Description of Artificial Sequence: Synthetic oligonucleotide
agccucaaggcaagaagua

SEQ ID NO: 2486217 - RNA, 19 nt, Artificial Sequence
  Description of Artificial Sequence: Synthetic oligonucleotide
uccacccugcaacccuaua

SEQ ID NO: 2486218 - RNA, 19 nt, Artificial Sequence
  Description of Artificial Sequence: Synthetic oligonucleotide
gacccaugguucgugacau

SEQ ID NO: 2486219 - RNA, 19 nt, Artificial Sequence
  Description of Artificial Sequence: Synthetic oligonucleotide
cucagaucaggagcuugga

SEQ ID NO: 2486220 - RNA, 19 nt, Artificial Sequence
  Description of Artificial Sequence: Synthetic oligonucleotide
caguuggaagaauccucaa

SEQ ID NO: 2486221 - RNA, 19 nt, Artificial Sequence
  Description of Artificial Sequence: Synthetic oligonucleotide
ggagcaugucgcucagauc

SEQ ID NO: 2486222 - RNA, 19 nt, Artificial Sequence
  Description of Artificial Sequence: Synthetic oligonucleotide
cagaugccacuugucugug

SEQ ID NO: 2486223 - RNA, 19 nt, Artificial Sequence
  Description of Artificial Sequence: Synthetic oligonucleotide
ggcugggaaaagcagcacu

SEQ ID NO: 2486224 - RNA, 19 nt, Artificial Sequence
  Description of Artificial Sequence: Synthetic oligonucleotide
ccaaggauugaaguaugga

SEQ ID NO: 2486225 - RNA, 19 nt, Artificial Sequence
  Description of Artificial Sequence: Synthetic oligonucleotide
gcacugagagaauguguaa

SEQ ID NO: 2486226 - RNA, 19 nt, Artificial Sequence
  Description of Artificial Sequence: Synthetic oligonucleotide
agauggaggggagccucaa

SEQ ID NO: 2486227 - RNA, 19 nt, Artificial Sequence
  Description of Artificial Sequence: Synthetic oligonucleotide
gguuuguaucuguggugaa

SEQ ID NO: 2486228 - RNA, 19 nt, Artificial Sequence
  Description of Artificial Sequence: Synthetic oligonucleotide
cgucuaacaucaaacuuua

SEQ ID NO: 2486229 - RNA, 19 nt, Artificial Sequence
  Description of Artificial Sequence: Synthetic oligonucleotide
auggccaaaugggcacaga

SEQ ID NO: 2486230 - RNA, 19 nt, Artificial Sequence
  Description of Artificial Sequence: Synthetic oligonucleotide
ccucgucuaacaucaaacu

SEQ ID NO: 2486231 - RNA, 19 nt, Artificial Sequence
  Description of Artificial Sequence: Synthetic oligonucleotide
gagcuuggaauaccaccuu

SEQ ID NO: 2486232 - RNA, 19 nt, Artificial Sequence
  Description of Artificial Sequence: Synthetic oligonucleotide
gacggcuguuagcucucua

SEQ ID NO: 2486233 - RNA, 19 nt, Artificial Sequence
  Description of Artificial Sequence: Synthetic oligonucleotide
ucccaggauccaggcacuc

SEQ ID NO: 2486234 - RNA, 19 nt, Artificial Sequence
  Description of Artificial Sequence: Synthetic oligonucleotide
ccacccugcaacccuauaa

SEQ ID NO: 2486235 - RNA, 19 nt, Artificial Sequence
  Description of Artificial Sequence: Synthetic oligonucleotide
ggagcccaagauacuauua

SEQ ID NO: 2486236 - RNA, 19 nt, Artificial Sequence
  Description of Artificial Sequence: Synthetic oligonucleotide
gucuaacaucaaacuuuaa

SEQ ID NO: 2486237 - RNA, 19 nt, Artificial Sequence
  Description of Artificial Sequence: Synthetic oligonucleotide
ggcagucccaaggauugaa

SEQ ID NO: 2486238 - RNA, 19 nt, Artificial Sequence
  Description of Artificial Sequence: Synthetic oligonucleotide
ggaauaccaccuucaguuu

SEQ ID NO: 2486239 - RNA, 19 nt, Artificial Sequence
  Description of Artificial Sequence: Synthetic oligonucleotide
ggggucagaacaguaggau

SEQ ID NO: 2486240 - RNA, 19 nt, Artificial Sequence
  Description of Artificial Sequence: Synthetic oligonucleotide
acccaugguucgugacauu

SEQ ID NO: 2486241 - RNA, 19 nt, Artificial Sequence
  Description of Artificial Sequence: Synthetic oligonucleotide
guacgucuucuagcguaaa

SEQ ID NO: 2486242 - RNA, 19 nt, Artificial Sequence
  Description of Artificial Sequence: Synthetic oligonucleotide
ucgcucagaucaggagcuu

SEQ ID NO: 2486243 - RNA, 19 nt, Artificial Sequence
  Description of Artificial Sequence: Synthetic oligonucleotide
ccacuucccaguaauguuu

SEQ ID NO: 2486244 - RNA, 19 nt, Artificial Sequence
  Description of Artificial Sequence: Synthetic oligonucleotide
cuguggucuucugaagaau

SEQ ID NO: 2486245 - RNA, 19 nt, Artificial Sequence
  Description of Artificial Sequence: Synthetic oligonucleotide
gggagccucaaggcaagaa

SEQ ID NO: 2486246 - RNA, 19 nt, Artificial Sequence
  Description of Artificial Sequence: Synthetic oligonucleotide
gccccggacggcuguuagc

SEQ ID NO: 2486247 - RNA, 19 nt, Artificial Sequence
  Description of Artificial Sequence: Synthetic oligonucleotide
ccggacggcuguuagcucu

SEQ ID NO: 2486248 - RNA, 19 nt, Artificial Sequence
  Description of Artificial Sequence: Synthetic oligonucleotide
auccacccugcaacccuau

SEQ ID NO: 2486249 - RNA, 19 nt, Artificial Sequence
  Description of Artificial Sequence: Synthetic oligonucleotide
uagccccggacggcuguua

SEQ ID NO: 2486250 - RNA, 19 nt, Artificial Sequence
  Description of Artificial Sequence: Synthetic oligonucleotide
cgcucagaucaggagcuug

SEQ ID NO: 2486251 - RNA, 19 nt, Artificial Sequence
  Description of Artificial Sequence: Synthetic oligonucleotide
ccccaacccgauggagagg

SEQ ID NO: 2486252 - RNA, 19 nt, Artificial Sequence
  Description of Artificial Sequence: Synthetic oligonucleotide
cggcuguuagcucucuaaa

SEQ ID NO: 2486253 - RNA, 19 nt, Artificial Sequence
  Description of Artificial Sequence: Synthetic oligonucleotide
cgaggccacaggaaaagau

SEQ ID NO: 2486254 - RNA, 19 nt, Artificial Sequence
  Description of Artificial Sequence: Synthetic oligonucleotide
cccggacggcuguuagcuc

SEQ ID NO: 2486255 - RNA, 19 nt, Artificial Sequence
  Description of Artificial Sequence: Synthetic oligonucleotide
ccccggacggcuguuagcu

SEQ ID NO: 2486256 - RNA, 19 nt, Artificial Sequence
  Description of Artificial Sequence: Synthetic oligonucleotide
cguaaacucccaggaucca

SEQ ID NO: 2486257 - RNA, 19 nt, Artificial Sequence
  Description of Artificial Sequence: Synthetic oligonucleotide
gccacuugucuguggucuu

SEQ ID NO: 2486258 - RNA, 19 nt, Artificial Sequence
  Description of Artificial Sequence: Synthetic oligonucleotide
ccaacccgauggagaggga

SEQ ID NO: 2486259 - RNA, 19 nt, Artificial Sequence
  Description of Artificial Sequence: Synthetic oligonucleotide
guagccccggacggcuguu

SEQ ID NO: 2486260 - RNA, 19 nt, Artificial Sequence
  Description of Artificial Sequence: Synthetic oligonucleotide
ggacggcuguuagcucucu

SEQ ID NO: 2486261 - RNA, 19 nt, Artificial Sequence
  Description of Artificial Sequence: Synthetic oligonucleotide
ggugaacauuuggcugauu

SEQ ID NO: 2486262 - RNA, 19 nt, Artificial Sequence
  Description of Artificial Sequence: Synthetic oligonucleotide
uucauuaugaguaucauuc

SEQ ID NO: 2486263 - RNA, 19 nt, Artificial Sequence
  Description of Artificial Sequence: Synthetic oligonucleotide
aaugauauucuucaugccu

SEQ ID NO: 2486264 - RNA, 19 nt, Artificial Sequence
  Description of Artificial Sequence: Synthetic oligonucleotide
aaugauaaacauuacucga

SEQ ID NO: 2486265 - RNA, 19 nt, Artificial Sequence
  Description of Artificial Sequence: Synthetic oligonucleotide
aucucuauagcaaagauuc

SEQ ID NO: 2486266 - RNA, 19 nt, Artificial Sequence
  Description of Artificial Sequence: Synthetic oligonucleotide
caaaugauaaacauuacuc

SEQ ID NO: 2486267 - RNA, 19 nt, Artificial Sequence
  Description of Artificial Sequence: Synthetic oligonucleotide
ucuggaaaugucuuguucg

SEQ ID NO: 2486268 - RNA, 19 nt, Artificial Sequence
  Description of Artificial Sequence: Synthetic oligonucleotide
acucgaauaauucuggcgg

SEQ ID NO: 2486269 - RNA, 19 nt, Artificial Sequence
  Description of Artificial Sequence: Synthetic oligonucleotide
uuguuaaccuccaaauucg

SEQ ID NO: 2486270 - RNA, 19 nt, Artificial Sequence
  Description of Artificial Sequence: Synthetic oligonucleotide
aaagauucucuucuaauga

SEQ ID NO: 2486271 - RNA, 19 nt, Artificial Sequence
  Description of Artificial Sequence: Synthetic oligonucleotide
uauucuucaugccugaaug

SEQ ID NO: 2486272 - RNA, 19 nt, Artificial Sequence
  Description of Artificial Sequence: Synthetic oligonucleotide
uguguuacgacauuucuga

SEQ ID NO: 2486273 - RNA, 19 nt, Artificial Sequence
  Description of Artificial Sequence: Synthetic oligonucleotide
auaauuagagcuucaguag

SEQ ID NO: 2486274 - RNA, 19 nt, Artificial Sequence
  Description of Artificial Sequence: Synthetic oligonucleotide
uguuucauccaauugccgg

SEQ ID NO: 2486275 - RNA, 19 nt, Artificial Sequence
  Description of Artificial Sequence: Synthetic oligonucleotide
aauguccaaaucugcuucc

SEQ ID NO: 2486276 - RNA, 19 nt, Artificial Sequence
  Description of Artificial Sequence: Synthetic oligonucleotide
aacauuacucgaauaauuc

SEQ ID NO: 2486277 - RNA, 19 nt, Artificial Sequence
  Description of Artificial Sequence: Synthetic oligonucleotide
ugaacucaaaugauaaaca

SEQ ID NO: 2486278 - RNA, 19 nt, Artificial Sequence
  Description of Artificial Sequence: Synthetic oligonucleotide
gauucucuucuaaugaucg

SEQ ID NO: 2486279 - RNA, 19 nt, Artificial Sequence
  Description of Artificial Sequence: Synthetic oligonucleotide
aaaucguucugucccuagc

SEQ ID NO: 2486280 - RNA, 19 nt, Artificial Sequence
  Description of Artificial Sequence: Synthetic oligonucleotide
uguuacgacauuucugagg

SEQ ID NO: 2486281 - RNA, 19 nt, Artificial Sequence
  Description of Artificial Sequence: Synthetic oligonucleotide
aauuuggcuucacugaacu

SEQ ID NO: 2486282 - RNA, 19 nt, Artificial Sequence
  Description of Artificial Sequence: Synthetic oligonucleotide
ugucuuuuaguaaugucca

SEQ ID NO: 2486283 - RNA, 19 nt, Artificial Sequence
  Description of Artificial Sequence: Synthetic oligonucleotide
ucacaugucagaaaucucu

SEQ ID NO: 2486284 - RNA, 19 nt, Artificial Sequence
  Description of Artificial Sequence: Synthetic oligonucleotide
cuuguuaaccuccaaauuc

SEQ ID NO: 2486285 - RNA, 19 nt, Artificial Sequence
  Description of Artificial Sequence: Synthetic oligonucleotide
uguucgcacauaauuagag

SEQ ID NO: 2486286 - RNA, 19 nt, Artificial Sequence
  Description of Artificial Sequence: Synthetic oligonucleotide
gagguuauuguuuucugcc

SEQ ID NO: 2486287 - RNA, 19 nt, Artificial Sequence
  Description of Artificial Sequence: Synthetic oligonucleotide
ucagaaaucucuauagcaa

SEQ ID NO: 2486288 - RNA, 19 nt, Artificial Sequence
  Description of Artificial Sequence: Synthetic oligonucleotide
uucgcacauaauuagagcu

SEQ ID NO: 2486289 - RNA, 19 nt, Artificial Sequence
  Description of Artificial Sequence: Synthetic oligonucleotide
uaucauugaguucauuaug

SEQ ID NO: 2486290 - RNA, 19 nt, Artificial Sequence
  Description of Artificial Sequence: Synthetic oligonucleotide
uuaaccuccaaauucguau

SEQ ID NO: 2486291 - RNA, 19 nt, Artificial Sequence
  Description of Artificial Sequence: Synthetic oligonucleotide
uacucgaauaauucuggcg

SEQ ID NO: 2486292 - RNA, 19 nt, Artificial Sequence
  Description of Artificial Sequence: Synthetic oligonucleotide
uaauuagagcuucaguaga

SEQ ID NO: 2486293 - RNA, 19 nt, Artificial Sequence
  Description of Artificial Sequence: Synthetic oligonucleotide
aauuagagcuucaguagac

SEQ ID NO: 2486294 - RNA, 19 nt, Artificial Sequence
  Description of Artificial Sequence: Synthetic oligonucleotide
cauuacucgaauaauucug

SEQ ID NO: 2486295 - RNA, 19 nt, Artificial Sequence
  Description of Artificial Sequence: Synthetic oligonucleotide
aaacuguucuugaagggcg

SEQ ID NO: 2486296 - RNA, 19 nt, Artificial Sequence
  Description of Artificial Sequence: Synthetic oligonucleotide
aaucugagccaguucauca

SEQ ID NO: 2486297 - RNA, 19 nt, Artificial Sequence
  Description of Artificial Sequence: Synthetic oligonucleotide
cauaauuagagcuucagua

SEQ ID NO: 2486298 - RNA, 19 nt, Artificial Sequence
  Description of Artificial Sequence: Synthetic oligonucleotide
cuuguucgcacauaauuag
